(19) United States
(12) Patent Application Publication
(10) Pub. No.: US 2007/0134655 A1
(43) Pub. Date: Jun. 14, 2007

(54) Bioinformatically detectable group of novel regulatory genes and uses thereof

(76) Inventor: Itzhak Bentwich, Rehovot (IL)

Correspondence Address: ROSETTA-GENOMICS;c/o PSWS, 700 W. 47TH STREET, SUITE 1000, KANSAS CITY, MO, 64112, US

(21) Appl. No.: 10/535,164

(22) PCT Filed: Nov. 16, 2003
(86) PCT No.: PCT/IL03/00970

§ 371 Date: Jul. 24, 2006

Related U.S. Application Data
(60) Provisional application No. 60/468,251, filed on May 7, 2003.

(30) Foreign Application Priority Data
Nov. 14, 2002 (US) 10/293338
Dec. 6, 2002 (US) 10/310914
Dec. 18, 2003 (US) 10/321503
Jan. 16, 2003 (US) 10/345201
Aug. 13, 2003 (US) 10/604726
Aug. 13, 2003 (US) 10/604727
Aug. 27, 2003 (US) 10/604926
Aug. 28, 2003 (US) 10/649653
Aug. 29, 2003 (US) 10/651227
Aug. 29, 2003 (US) 10/604985

(51) Int. Cl. C12Q 1/68; C07H 21/04; C12P 21/06

(52) U.S. Cl. 435/6; 536/23.2; 435/69.1; 435/320.1; 435/325

(57) ABSTRACT

The present invention relates to a first group of novel genes, here identified as genomic address messenger or GAM genes, and a second group of novel operon-like genes, here identified as genomic record or GR genes. GAM genes selectively inhibit translation of known ‘target’ genes, many of which are known to be involved in various diseases. Nucleic acid molecules are provided respectively encoding 8607 GAM genes, and 1096 GR genes, as are vectors and probes both comprising the nucleic acid molecules, and methods and systems for detecting GAM and GR genes and specific functions and utilities thereof, for detecting expression of GAM and GR genes, and for selectively enhancing and selectively inhibiting translation of the respective target genes thereof.

### BACKGROUND OF THE INVENTION

[0001] 1. Field of the Invention

[0002] The present invention relates to a group of bioinformatically detectable novel genes, here identified as Genomic Address Messenger or GAM genes, which are believed to be related to the micro RNA (miRNA) group of genes.

[0003] 2. Description of Prior Art

[0004] MIR genes are regulatory genes encoding MicroRNA's (miRNA), short ˜22 nt non-coding RNA's, found in a wide range of species, believed to function as specific gene translation repressors, sometimes involved in cell-differentiation. Some 110 human MIR genes have been detected by laboratory means. Over the past 6 months, the need for computerized detection of MIR genes has been recognized, and several informatic detection engines have been reported (Lim, 2003; Grad, 2003; Lai, 2003). Collectively these informatic detection engines found 38 more human MIR genes which were later confirmed in zebrafish, 14 human MIRs which were confirmed in human, and 55 postulated human MIRs which could not be confirmed by laboratory (Lim, 2003). Extensive efforts to identify novel MIR genes using conventional biological detection techniques such as massive cloning and sequencing efforts, and several bioinformatic detection attempts, have led leading researchers in the field to the conclusion that the total number of human MIR genes is between 200 to 255 (Lau, 2003; Lim 2003 Science; Lim, 2003 Genes Dev). Recent studies postulate that the number of MIR genes may be higher (Grad, 2003; Krichevsky, 2003).

[0005] The ability to detect novel MIR genes is limited by the methodologies used to detect such genes. All MIR genes identified so far either present a visibly discernable whole body phenotype, as do Lin-4 and Let-7 (Wightman, 1993; Reinhart, 2000), or produce sufficient quantities of RNA so as to be detected by the standard molecular biological techniques.

[0006] Initial studies reporting MIR genes (Bartel, 2001; Tuschl, 2001) discovered 93 MIR genes in several species, by sequencing a limited number of clones (300 by Bartel and 100 by Tuschl) of small segments (i.e. size fractionated) RNA. MiRNA encoded by MIR genes detected in these studies therefore, represent the more prevalent among the miRNA gene family, and can not be much rarer than 1% of all small ˜20 nt-long RNA segments.

[0007] Current methodology has therefore been unable to detect micro RNA genes (MIR genes) which either do not present a visually discernable whole body phenotype, or are rare (e.g. rarer than 0.1% of all size fractionated ˜20 nt-long RNA segments expressed in the tissues examined), and therefore do not produce significant enough quantities of RNA so as to be detected by standard biological techniques.

### BRIEF DESCRIPTION OF SEQUENCE LISTING, LARGE TABLES AND COMPUTER PROGRAM LISTING

[0008] Sequence listing, large tables related to sequence listing, and computer program listing are filed under section 801 (a)(i) on an electronic medium in computer readable form, attached to the present invention, and are hereby incorporated by reference. Said sequence listing, large tables related to sequence listing, and computer program listing are submitted on a CD-ROM (Operating system: MS-Windows), entitled SEQUENCE LISTING AND LARGE TABLES, containing files the names and sizes of which are as follows:

[0009] Sequence listing comprising 548,156 genomic sequences, is filed under section 801 (a)(i) on an electronic medium in computer readable form, attached to the present invention, and is hereby incorporated by reference. Said sequence listing is contained in a self extracting compressed file named SEQLIST.EXE (9,813 KB). Compressed file contains 1 file named SEQLIST.TXT (82,859 KB).

[0010] Large tables relating to genomic sequences are stored in 7 self extracting files, each comprising a respective one of the following table files: TABLE1.TXT (839 KB); TABLE2.TXT (4348 KB); TABLE3.TXT (715 KB); TABLE4.TXT (545728 KB); TABLE5.TXT (1523981 KB); TABLE6.TXT (373091 KB); and TABLE7.TXT (125 KB).

[0011] Computer program listing of a computer program constructed and operative in accordance with a preferred embodiment of the present invention is enclosed on an electronic medium in computer readable form, and is hereby incorporated by reference. The computer program listing is contained in a self extracting compressed file named COMPUTER PROGRAM LISTING.EXE (168 KB). Compressed file contains 5 files, the name and sizes of which are as follows: AUXILARY_FILES.TXT (117K); BIDING_SITE_SCORING.TXT (17K); EDIT_DISTANCE.TXT (144K); FIRST-K.TXT (96K); HAIRPIN_PREDICTIO.TXT (47K); and TWO_PHASED_PREDICTOR.TXT (74K).

### SUMMARY OF THE INVENTION

[0012] The present invention relates to a novel group of regulatory, non-protein coding genes, which are functional in specifically inhibiting translation of target proteins. Each gene in this novel group of genes, here identified as GAM or Genomic Address Messengers, specifically inhibits translation of one of more other ‘target’ genes by means of complementary hybridization of a segment of the RNA transcript encoded by GAM, to an inhibitor site located in an untranslated region (UTR) of the mRNA of the one or more ‘target’ genes.

[0013] In various preferred embodiments, the present invention seeks to provide improved method and system for specific modulation of expression of specific known ‘target’ genes involved in significant human diseases, and improved method and system for detection of expression of novel genes of the present invention, which modulate these target genes.

[0014] Accordingly, the invention provides several substantially pure DNAs (e.g., genomic DNA, cDNA or synthetic DNA) each encoding a novel gene of the GAM group of gene, vectors comprising the DNAs, probes comprising the DNAs, a method and system for selectively modulating translation of known ‘target’ genes utilizing the vectors, and a method and system for detecting expression of known ‘target’ genes utilizing the probe.

[0015] By “substantially pure DNA” is meant DNA that is free of the genes which, in the naturally-occurring genome of the organism from which the DNA of the invention is derived, flank the genes discovered and isolated by the present invention. The term therefore includes, for example, a recombinant DNA which is incorporated into a vector, into an autonomously replicating plasmid or virus, or into the genomic DNA of a prokaryote or eukaryote at a site other than its natural site; or which exists as a separate molecule (e.g., a cDNA or a genomic or cDNA fragment produced by PCR or restriction endonuclease digestion) independent of other sequences. It also includes a recombinant DNA which is part of a hybrid gene encoding additional polypeptide sequence.

[0016] “Inhibiting translation” is defined as the ability to prevent synthesis of a specific protein encoded by a respective gene, by means of inhibiting the translation of the mRNA of this gene. “Translation inhibitor site” is defined as the minimal DNA sequence sufficient to inhibit translation.

[0017] There is thus provided in accordance with a preferred embodiment of the present invention a bioinformatically detectable novel gene encoding substantially pure DNA wherein RNA encoded by the bioinformatically detectable novel gene is about 18 to about 24 nucleotides in length, and originates from an RNA precursor, which RNA precursor is about 50 to about 120 nucleotides in length, a nucleotide sequence of a first half of the RNA precursor is a partial or accurate inversed reversed sequence of a nucleotide sequence of a second half thereof, a nucleotide sequence of the RNA encoded by the novel gene is a partial or accurate inversed reversed sequence of a nucleotide sequence of a binding site associated with at least one target gene, the novel gene cannot be detected by either of the following: a visually discernable whole body phenotype, and detection of 99.9% of RNA species shorter than 25 nucleotides expressed in a tissue sample, and a function of the novel gene is bioinformatically deducible.

[0018] There is still further provided in accordance with another preferred embodiment of the present invention a bioinformatically detectable novel gene encoding substantially pure DNA wherein RNA encoded by the bioinformatically detectable novel gene includes a plurality of RNA sections, each of the RNA sections being about 50 to about 120 nucleotides in length, and including an RNA segment, which RNA segment is about 18 to about 24 nucleotides in length, a nucleotide sequence of a first half of each of the RNA sections encoded by the novel gene is a partial or accurate inversed reversed sequence of nucleotide sequence of a second half thereof, a nucleotide sequence of each of the RNA segments encoded by the novel gene is a partial or accurate inversed reversed sequence of the nucleotide sequence of a binding site associated with at least one target gene, and a function of the novel gene is bioinformatically deducible from the following data elements: the nucleotide sequence of the RNA encoded by the novel gene, a nucleotide sequence of the at least one target gene, and function of the at least one target gene.

[0019] There is additionally provided in accordance with another preferred embodiment of the present invention a bioinformatically detectable novel gene encoding substantially pure DNA wherein RNA encoded by the bioinformatically detectable novel gene is about 18 to about 24 nucleotides in length, and originates from an RNA precursor, which RNA precursor is about 50 to about 120 nucleotides in length, a nucleotide sequence of a first half of the RNA precursor is a partial or accurate inversed reversed sequence of a nucleotide sequence of a second half thereof, a nucleotide sequence of the RNA encoded by the novel gene is a partial or accurate inversed reversed sequence of a nucleotide sequence of a binding site associated with at least one target gene, a function of the novel gene is modulation of expression of the at least one target gene, and the at least one target gene does not encode a protein.

[0020] There is moreover provided in accordance with another preferred embodiment of the present invention a bioinformatically detectable novel gene encoding substantially pure DNA wherein the bioinformatically detectable novel gene does not encode a protein, RNA encoded by the bioinformatically detectable novel gene is maternally transferred by a cell to at least one daughter cell of the cell, a function of the novel gene includes modulation of a cell type of the daughter cell, and the modulation is bioinformatically deducible.

[0021] There is further provided in accordance with another preferred embodiment of the present invention a bioinformatically detectable novel gene encoding substantially pure DNA wherein the bioinformatically detectable novel gene does not encode a protein, a function of the novel gene is promotion of expression of the at lease one target gene, and the at least one target gene is bioinformatically deducible.

[0022] Still further in accordance with a preferred embodiment of the present invention the function of the novel gene is bioinformatically deducible from the following data elements: the nucleotide sequence of the RNA encoded by the bioinformatically detectable novel gene, a nucleotide sequence of the at least one target gene, and a function of the at least one target gene.

[0023] Additionally in accordance with a preferred embodiment of the present invention the RNA encoded by the novel gene complementarily binds the binding site associated with the at least one target gene, thereby modulating expression of the at least one target gene.

[0024] Moreover in accordance with a preferred embodiment of the present invention the binding site associated with at least one target gene is located in an untranslated region of RNA encoded by the at least one target gene.

[0025] Further in accordance with a preferred embodiment of the present invention the function of the novel gene is selective inhibition of translation of the at least one target gene, which selective inhibition includes complementary hybridization of the RNA encoded by the novel gene to the binding site.

[0026] Still further in accordance with a preferred embodiment of the present invention, the present invention includes a vector including the DNA

[0027] Additionally in accordance with a preferred embodiment of the present invention, the present invention includes a method of selectively inhibiting translation of at least one gene, including introducing the vector into a cell.

[0028] Moreover in accordance with a preferred embodiment of the present invention the introducing includes utilizing RNAi pathway.

[0029] Further in accordance with a preferred embodiment of the present invention, the present invention includes a gene expression inhibition system including: the vector and a vector inserter, functional to insert the vector of claim 10 into a cell, thereby selectively inhibiting translation of at least one gene.

[0030] Still further in accordance with a preferred embodiment of the present invention, the present invention includes a probe including the DNA

[0031] Additionally in accordance with a preferred embodiment of the present invention, the present invention includes a method of selectively detecting expression of at least one gene, including using the probe

[0032] Moreover in accordance with a preferred embodiment of the present invention, the present invention includes a gene expression detection system including: the probe, and a gene expression detector functional to selectively detect expression of at least one gene.

### BRIEF DESCRIPTION OF DRAWINGS

[0033] FIG. 1 is a simplified diagram illustrating the genomic differentiation enigma that the present invention addresses;

[0034] FIGS. 2, 3 and 4 are schematic diagrams which when taken together provide an analogy that illustrates a conceptual model of the present invention, addressing the genomic differentiation enigma;

[0035] FIGS. 5A and 5B are schematic diagrams, which when taken together illustrate a genomic records' concept of the conceptual model of the present invention, addressing the genomic differentiation enigma;

[0036] FIG. 6 is a schematic diagram illustrating a ‘genomically programmed cell differentiation’ concept of the conceptual model of the present invention, addressing the genomic differentiation enigma;

[0037] FIG. 7 is a schematic diagram illustrating a ‘genomically programmed cell-specific protein expression modulation’ concept of the conceptual model of the present invention, addressing the genomic differentiation enigma;

[0038] FIG. 8 is a simplified diagram illustrating a mode by which genes of a novel group of genes of the present invention, modulate expression of known target genes;

[0039] FIG. 9 is a simplified block diagram illustrating a bioinformatic gene detection system capable of detecting genes of the novel group of genes of the present invention, which system is constructed and operative in accordance with a preferred embodiment of the present invention;

[0040] FIG. 10 is a simplified flowchart illustrating operation of a mechanism for training of a computer system to recognize the novel genes of the present invention, which mechanism is constructed and operative in accordance with a preferred embodiment of the present invention;

[0041] FIG. 11A is a simplified block diagram of a non-coding genomic sequence detector constructed and operative in accordance with a preferred embodiment of the present invention;

[0042] FIG. 11B is a simplified flowchart illustrating operation of a non-coding genomic sequence detector constructed and operative in accordance with a preferred embodiment of the present invention;

[0043] FIG. 12A is a simplified block diagram of a hairpin detector constructed and operative in accordance with a preferred embodiment of the present invention;

[0044] FIG. 12B is a simplified flowchart illustrating operation of a hairpin detector constructed and operative in accordance with a preferred embodiment of the present invention;

[0045] FIG. 13A is a simplified block diagram of a dicer-cut location detector constructed and operative in accordance with a preferred embodiment of the present invention;

[0046] FIG. 13B is a simplified flowchart illustrating training of a dicer-cut location detector constructed and operative in accordance with a preferred embodiment of the present invention;

[0047] FIG. 13C is a simplified flowchart illustrating operation of a dicer-cut location detector constructed and operative in accordance with a preferred embodiment of the present invention;

[0048] FIG. 14A is a simplified block diagram of a target-gene binding-site detector constructed and operative in accordance with a preferred embodiment of the present invention;

[0049] FIG. 14B is a simplified flowchart illustrating operation of a target-gene binding-site detector constructed and operative in accordance with a preferred embodiment of the present invention;

[0050] FIG. 15 is a simplified flowchart illustrating operation of a function & utility analyzer constructed and operative in accordance with a preferred embodiment of the present invention;

[0051] FIG. 16 is a simplified diagram describing a novel bioinformatically detected group of regulatory genes, referred to here as Genomic Record (GR) genes, each of which encodes an ‘operon-like’ cluster of novel miRNA-like genes, which in turn modulate expression of one or more target genes;

[0052] FIG. 17 is a simplified diagram illustrating a mode by which genes of a novel group of operon-like genes of the present invention, modulate expression of other such genes, in a cascading manner;

[0053] FIG. 18 is a block diagram illustrating an overview of a methodology for finding novel genes and novel operon-like genes of the present invention, and their respective functions;

[0054] FIG. 19 is a block diagram illustrating different utilities of novel genes and novel operon-like genes, both of the present invention;

[0055] FIGS. 20A and 20B are simplified diagrams, which when taken together illustrate a mode of gene therapy applicable to novel genes of the present invention;

[0056] FIG. 21 is a table summarizing laboratory validation results which validate efficacy of a bioinformatic gene detection system constructed and operative in accordance with a preferred embodiment of the present invention;

[0057] FIG. 22 is a picture of laboratory results validating the expression of 25 novel genes detected by a bioinformatic gene detection engine constructed and operative in accordance with a preferred embodiment of the present invention, thereby validating the efficacy of the gene detection engine of the present invention;

[0058] FIG. 23A is a schematic representation of an ‘operon like’ cluster of novel gene hairpin sequences detected bioinformatically by a bioinformatic gene detection engine constructed and operative in accordance with a preferred embodiment of the present invention, and non-GAM hairpin useful as negative controls thereto;

[0059] FIG. 23B is a schematic representation of secondary folding of hairpins of the operon-like cluster of FIG. 23A;

[0060] FIG. 23C is a picture of laboratory results demonstrating expression of novel genes of FIGS. 23A and 23B, and lack of expression of the negative controls, thereby validating efficacy of bioinformatic detection of GAM genes and GR genes of the present invention, by a bioinformatic gene detection engine constructed and operative in accordance with a preferred embodiment of the present invention;

[0061] FIG. 24A is an annotated sequence of EST72223 comprising known miRNA gene MIR98 and novel gene GAM25, both detected by the gene detection system of the present invention; and

[0062] FIGS. 24B and 24C are pictures of laboratory results demonstrating laboratory confirmation of expression of known gene MIR98 and of novel bioinformatically detected gene GAM25 respectively, both of FIG. 24A, thus validating the bioinformatic gene detection system of the present invention.

### DETAILED DESCRIPTION OF DRAWINGS

[0063] Reference is now made to FIG. 1 which is a simplified diagram providing a conceptual explanation of a genomic differentiation enigma, which the present invention addresses.

[0064] FIG. 1 depicts different cell types in an organism, such as CARTILAGE CELL, LIVER CELL, FIBROBLAST CELL and BONE CELL all containing identical DNA, and deriving from the initial FERTILIZED EGG CELL, and yet each of these cells expressing different proteins, and hence acquiring different shape and function.

[0065] The present invention proposes that the inevitable conclusion from this constraint is, however, strikingly simple: the coding system used must be modular. It must comprise multiple modules, or records, one for each cell-type, and a mechanism whereby each cell at its inception is instructed which record to open, and behaves according to instructions in that record.

[0066] This modular code concept is somewhat difficult to grasp, since we are strongly habituated to viewing things from an external viewpoint. An architect, for example, looks at a blueprint of a building, which details exactly where each element (block, window, door, electrical switch, etc.) is to be placed relative to all other elements, and then instructs builders to place these elements in their designated places. This is an external viewpoint: the architect is external to the blueprint, which itself is external to the physical building, and its different elements. The architect may therefore act as an ‘external organizing agent’: seeing the full picture and the relationships between all elements, and being able to instruct from the outside where to place each of them.

[0067] Genomics differentiation coding evidently works differently, without any such external organizing agent: It comprises only one smart block (the first cell), which is the architect and the blueprint, and which continuously duplicates itself, somehow knowing when to manifest itself as a block and when as a window, door, or electrical switch.

[0068] Reference is now made to FIGS. 2 through 4 which are schematic diagrams which when taken together provide an analogy that illustrates a conceptual model of the present invention, addressing the genomic differentiation enigma.

[0069] Reference is now made to FIG. 2A. Imagine a very talented chef, capable of preparing any meal provided he is given specific written cooking instructions. This chef is equipped with two items: (a) a thick recipe book, and (b) a small note with a number scribbled on it. The book comprises multiple pages, each page detailing how to prepare a specific meal. The small note indicates the page to be opened, and therefore the meal to be prepared. The chef looks at the page-number written on the note, opens the recipe book at the appropriate page, and prepares the meal according to the written instructions on this page. As an example, FIG. 2A depicts a CHEF holding a note with the number 12 written on it, he opens the book on page 12, and since that page contains the recipe for preparing BREAD, the CHEF prepares a loaf of BREAD.

[0070] Reference is now made to FIG. 2B, which depicts two identical chefs, CHEF A and CHEF B, holding an identical recipe book. Despite their identity, and the identity of their recipe book, since CHEF A holds a note numbered 12, and therefore opens the book on page 12 and prepares BREAD, whereas CHEF B holds a note numbered 34 and therefore opens the book on page 34 and prepares a PIE.

[0071] Reference is now made to FIG. 3. Imagine the chef of the analogy is also capable of duplicating himself once he has finished preparing the specified meal. The format of the book is such that at the bottom of each page, two numbers are written. When he has finished preparing the meal specified on that page, the chef is trained to do the following: (i) divide himself into two identical duplicate chefs, (ii) duplicate the recipe book and hand a copy to each of his duplicate chefs, and (iii) write down the two numbers found at the bottom of the page of the meal he prepared, on two small notes, handing one note to each of his two duplicate chefs.

[0072] Each of the two resulting duplicate chefs are now equipped with the same book, and have the same talent to prepare any meal, but since each of them received a different note, they will now prepare different meals.

[0073] FIG. 3 depicts CHEF A holding a recipe book and receiving a note numbered 12. CHEF A therefore opens the book on page 12 and prepares BREAD. When he is finished making bread, CHEF A performs the following actions: (i) divides himself into two duplicate chefs, designated CHEF B and CHEF C, (ii) duplicates his recipe book handing a copy to each of CHEF B and CHEF C, (iii) writes down the numbers found at the bottom of page 12, numbers 34 and 57, on two notes, handing note numbered 34 to CHEF B and note numbered 57 to CHEF C.

[0074] Accordingly, CHEF B receives a note numbered 34 and therefore opens the recipe book on page 34 and prepares PIE, whereas CHEF C receives a note numbered 57 and therefore opens the book on page 57 and therefore prepares RICE.

[0075] It is appreciated that while CHEF A, CHEF B & CHEF C are identical and hold identical recipe books, they each prepare a different meal. It is also appreciated that the meals prepared by CHEF B and CHEF C are determined CHEF A, and are mediated by the differently numbered notes passed on from CHEF A to CHEF B and CHEF C.

[0076] It is further appreciated that the mechanism illustrated by FIG. 3 enables an unlimited lineage of chefs to divide into duplicate, identical chefs and to determine the meals those duplicate chefs would prepare. For example, having been directed to page 34, when CHEF B divides into duplicate chefs (not shown), he will instruct its two duplicate chefs to prepare meals specified on pages 14 and 93 respectively, according to the numbers at the bottom of page 34 to which he was directed. Similarly, CHEF C will instruct its duplicate chefs to prepare meals specified on pages 21 and 46 respectively, etc.

[0077] Reference is now made to FIG. 4. Imagine that the cooking instructions on each page of the recipe book are written in shorthand format: The main meal-page to which the chef was directed by the scribbled note, merely contains a list of numbers which direct him to multiple successive pages, each specifying how to prepare an ingredient of that meal.

[0078] As an example, FIG. 4 depicts CHEF A of FIGS. 2 and 3, holding a recipe book and a note numbered 12. Accordingly, CHEF A opens the recipe book on page 12, which details the instructions for preparing BREAD. However, the ‘instructions’ on making BREAD found on page 12 comprise only of 3 numbers, 18, 7 and 83, which ‘refer’ CHEF A to pages detailing preparation of the ingredients of BREAD—FLOUR, MILK and SALT, respectively.

[0079] As illustrated in FIG. 4, turning from the main ‘meal page’ (e.g. 12) to respective ‘ingredients pages’ (e.g. pages 18, 7 & 83) is mediated by scribbled notes with the page-numbers written on them. In this analogy, the scribbled notes are required for seeking the target pages to be turned to—both when turning to main ‘meal pages’ (e.g. page 12), as well as when turning to ‘ingredient pages’ (e.g. pages 18, 7 & 83).

[0080] The chef in the given analogy, schematically depicted in FIGS. 2 through 4, represents a cell; the thick recipe book represents the DNA; preparing a meal in the given analogy represents the cell manifesting itself as a specific cell-type; and ingredients of a meal represent proteins expressed by that cell-type. Like the chef equipped with the thick recipe book in the given analogy, all cells in an organism contain the same DNA and are therefore each potentially capable of manifesting itself as any cell-type, expressing proteins typical of that cell type.

[0081] Reference is now made to FIGS. 5A and 5B which are schematic diagrams, which when taken together illustrate a ‘genomic records’ concept of the conceptual model of the present invention, addressing the genomic differentiation enigma.

[0082] The Genomic Records concept asserts that the DNA (the thick recipe book in the illustration) comprises a very large number of Genomic Records (analogous to pages in the recipe book), each containing the instructions for differentiation of a different cell-type, or developmental process. Each Genomic Record is headed by a very short genomic sequence which functions as a ‘Genomic Address’ of that Genomic Record (analogous to the page number in the recipe book). At its inception, in addition to the DNA, each cell also receives a short RNA segment (the scribbled note in the illustration). This short RNA segment binds complementarily to a ‘Genomic Address’ sequence of one of the Genomic Records, thereby activating that Genomic Record, and accordingly determining the cell's-fate (analogous to opening the book on the page corresponding to the number on the scribbled note, thereby determining the meal to be prepared).

[0083] Reference is now made to FIG. 5A. FIG. 5A illustrates a CELL which comprises a GENOME. The GENOME comprises a plurality of GENOMIC RECORDS, each of which correlates to a specific cell type (for clarity only 6 sample genomic records are shown). Each genomic record comprises genomic instructions on differentiation into a specific cell-type, as further elaborated below with reference to FIG. 7. At cell inception, the CELL receives a maternal short RNA segment, which activates one of the GENOMIC RECORDS, causing the cell to differentiate according to the instructions comprised in that genomic record. As an example, FIG. 5A illustrates reception of a maternal short RNA segment designated A′ and outlined by a broken line, which activates the FIBRO genomic record, causing the cell to differentiate into a FIBROBLAST CELL.

[0084] Reference is now made to FIG. 5B, which is a simplified schematic diagram, illustrating cellular differentiation mediated by the ‘Genomic Records’ concept. FIG. 5B depicts 2 cells in an organism, designated CELL A and CELL B, each having a GENOME. It is appreciated that since CELL A and CELL B are cells in the same organism, the GENOME of CELL A is identical to that of CELL B. Despite having an identical GENOME, CELL A differentiates differently from CELL B, due to activation of different genomic records in these two cells. In CELL A the FIBRO GENOMIC RECORD is activated, causing CELL A to differentiate into a FIBROBLAST CELL, whereas in CELL B the BONE GENOMIC RECORD is activated, causing the CELL B to differentiate into a BONE CELL. The cause for activation of different genomic records in these two cells is the different maternal short RNA which they both received: CELL A received a maternal short RNA segment designated A′ which activated genomic record FIBRO, whereas CELL B received a maternal short RNA segment designated B′ which activated genomic record BONE.

[0085] Reference is now made to FIG. 6 which is a schematic diagram illustrating a ‘genomically programmed cell differentiation’ concept of the conceptual model of the present invention, addressing the genomic differentiation enigma.

[0086] A cell designated CELL A divides into 2 cells designated CELL B and CELL C. CELL A, CELL B and CELL C each comprise a GENOME, which GENOME comprises a plurality of GENOMIC RECORDS. It is appreciated that since CELL A, CELL B and CELL C are cells in the same organism, the GENOME of these cells, and the GENOMIC RECORDS comprised therein, are identical.

[0087] As described above with reference to FIG. 5B, at its inception, CELL A receives a maternal short RNA segment, designated A′ and marked by a broken line, which activates the FIBRO genomic record, thereby causing CELL A to differentiate into a FIBROBLAST CELL. However, FIG. 6 shows further details of the genomic records: each cell genomic record also comprises two short genomic sequences, referred to here as Daughter Cell Genomic Addresses. Blocks designated B and C are Daughter Cell Genomic Addresses of the FIBRO Genomic Record. At cell division, each parent cell transcribes two short RNA segments, corresponding to the two Daughter Cell Genomic Addresses of the Genomic Record of that parent cell, and transfers one to each of its two daughter cells. CELL A of FIG. 6 transcribes and transfers to its two respective daughter cells, two short RNA segments, outlined by a broken line and designated B′ and C′, corresponding to daughter cell genomic addresses designated B and C comprised in the FIBRO genomic record.

[0088] CELL B therefore receives the above mentioned maternal short RNA segment designated B′, which binds complementarily to genomic address designated B of genomic record BONE, thereby activating this genomic record, which in turn causes CELL B to differentiate into a BONE CELL. Similarly, CELL C receives the above mentioned maternal short RNA segment designated C′, which binds complementarily to genomic address designated C of genomic record CARTIL., thereby activating this genomic record, which in turn causes CELL C to differentiate into a CARTILAGE CELL.

[0089] It is appreciated that the mechanism illustrated by FIG. 6 enables an unlimited lineage of cells to divide into daughter cells containing the same DNA, and to determine the cell-fate of these daughter cells. For example, when CELL B and CELL C divide into their respective daughter cells (not shown), they will transfer short RNA segments designated D′ & E′, and F′ & G′ respectively, to their respective daughter cells. The cell fate of each of these daughter cells would be determined by the identity of the maternal short RNA segment they receive, which would determine the genomic record activated.

[0090] Reference is now made to FIG. 7 which is a schematic diagram illustrating a ‘genomically programmed cell-specific protein expression modulation’ concept of the conceptual model of the present invention, addressing the genomic differentiation enigma.

[0091] Cell A receives a maternal short RNA segment designated A′, which activates a genomic record designated FIBRO, by anti-sense binding to a binding site ‘header’ of this genomic record, designated A. Genomic record FIBRO encodes 3 short RNA segments, designated 1, 2 and 4 respectively, which modulate expression of target genes designated GENE1, GENE2 and GENE4 respectively. Modulation of expression of these genes results in CELL A differentiating into a FIBROBLAST CELL.

[0092] Reference is now made to FIG. 8, which is a simplified diagram describing each of a plurality of novel bioinformatically detected genes of the present invention, referred to here as Genomic Address Messenger (GAM) genes, which modulates expression of respective target genes thereof, the function and utility of which target genes is known in the art.

[0093] GAM is a novel bioinformatically detected regulatory, non protein coding, micro RNA (miRNA) gene. The method by which GAM is detected is described hereinabove with reference to FIGS. 8-15.

[0094] GAM GENE and GAM TARGET GENE are human genes contained in the human genome.

[0095] GAM GENE encodes a GAM PRECURSOR RNA. Similar to other miRNA genes, and unlike most ordinary genes, GAM PRECURSOR RNA does not encode a protein.

[0096] GAM PRECURSOR RNA folds onto itself, forming GAM FOLDED PRECURSOR RNA, which has a two-dimensional ‘hairpin structure’. As is well known in the art, this ‘hairpin structure’, is typical of RNA encoded by miRNA genes, and is due to the fact that the nucleotide sequence of the first half of the RNA encoded by a miRNA gene is an accurately or partially inversed reversed sequence of the nucleotide sequence of the second half thereof. By inversed reversed is meant a sequence which is reversed and wherein each nucleotide is replaced by a complementary nucleotide, as is well known in the art (e.g. ATGGC is the complementary sequence of GCCAT).

[0097] An enzyme complex designated DICER COMPLEX ‘dices’ the GAM FOLDED PRECURSOR RNA into GAM RNA, a single stranded ˜22 nt long RNA segment. As is known in the art, ‘dicing’ of a hairpin structured RNA precursor product into a short ˜22 nt RNA segment is catalyzed by an enzyme complex comprising an enzyme called Dicer together with other necessary proteins.

[0098] TARGET GENE encodes a corresponding messenger RNA, GAM TARGET RNA. GAM TARGET RNA comprises three regions, as is typical of mRNA of a protein coding gene: a 5′ untranslated region, a protein coding region and a 3′ untranslated region, designated 5′UTR, PROTEIN CODING and 3′UTR respectively.

[0099] GAM RNA binds complementarily to one or more target binding sites located in untranslated regions of GAM TARGET RNA. This complementary binding is due to the fact that the nucleotide sequence of GAM RNA is a partial or accurate inversed reversed sequence of the nucleotide sequence of each of the target binding sites. As an illustration, FIG. 8 shows three such target binding sites, designated BINDING SITE I, BINDING SITE II and BINDING SITE III respectively. It is appreciated that the number of target binding sites shown in FIG. 8 is meant as an illustration only, and is not meant to be limiting GAM RNA may have a different number of target binding sites in untranslated regions of a GAM TARGET RNA. It is further appreciated that while FIG. 8 depicts target binding sites in the 3′UTR region, this is meant as an example only, these target binding sites may be located in the 3′UTR region, the 5′UTR region, or in both 3′UTR and 5′UTR regions.

[0100] The complementary binding of GAM RNA to target binding sites on GAM TARGET RNA, such as BINDING SITE I, BINDING SITE II and BINDING SITE III, inhibits translation of GAM TARGET RNA into GAM TARGET PROTEIN. GAM TARGET PROTEIN is therefore outlined by a broken line.

[0101] It is appreciated that GAM TARGET GENE in fact represents a plurality of GAM target genes. The mRNA of each one of this plurality of GAM target genes comprises one or more target binding sites, each having a nucleotide sequence which is at least partly complementary to GAM RNA, and which when bound by GAM RNA causes inhibition of translation of respective one or more GAM target proteins.

[0102] It is further appreciated by one skilled in the art that the mode of translational inhibition illustrated by FIG. 8 with specific reference to translational inhibition exerted by GAM GENE on one or more TARGET GENE, is in fact common to other known miRNA genes, as is well known in the art.

[0103] Nucleotide sequences of each of a plurality of GAM GENEs described by FIG. 8 and their respective genomic source and chromosomal location are further described hereinbelow with reference to Table 1, hereby incorporated by reference.

[0104] Nucleotide sequences of GAM PRECURSOR RNA, and a schematic representation of a predicted secondary folding of GAM FOLDED PRECURSOR RNA, of each of a plurality of GAM GENEs described by FIG. 8 are further described hereinbelow with reference to Table 2, hereby incorporated by reference.

[0105] Nucleotide sequences of a ‘diced’ GAM RNA of each of a plurality of GAM GENEs described by FIG. 8 are further described hereinbelow with reference to Table 3, hereby incorporated by reference.

[0106] Nucleotide sequences of target binding sites, such as BINDING SITE-I, BINDING SITE-II and BINDING SITE-III of FIG. 8, found on GAM TARGET RNA, of each of a plurality of GAM GENEs described by FIG. 8, and schematic representation of the complementarity of each of these target binding sites to each of a plurality of GAM RNA described by FIG. 8 are described hereinbelow with reference to Table 4, hereby incorporated by reference.

[0107] It is appreciated that specific functions and accordingly utilities of each of a plurality of GAM GENEs described by FIG. 8 correlate with, and may be deduced from, the identity of the TARGET GENEs that each of said plurality of GAM GENEs binds and inhibits, and the function of each of said TARGET GENEs, as elaborated hereinbelow with reference to Table 5, hereby incorporated by reference.

[0108] Studies establishing known functions of each of a plurality of TARGET GENEs of GAM GENEs of FIG. 8, and correlation of said each of a plurality of TARGET GENEs to known diseases are listed in Table 6, and are hereby incorporated by reference.

[0109] The present invention discloses a novel group of genes, the GAM genes, belonging to the miRNA genes group, and for which a specific complementary binding has been determined.

[0110] Reference is now made to FIG. 9 which is a simplified block diagram illustrating a bioinformatic gene detection system capable of detecting genes of the novel group of genes of the present invention, which system is constructed and operative in accordance with a preferred embodiment of the present invention.

[0111] A centerpiece of the present invention is a bioinformatic gene detection engine 100, which is a preferred implementation of a mechanism capable of bioinformatically detecting genes of the novel group of genes of the present invention.

[0112] The function of the bioinformatic gene detection engine 100 is as follows: it receives three types of input, expressed RNA data 102, sequenced DNA data 104, and protein function data 106, performs a complex process of analysis of this data as elaborated below, and based on this analysis produces output of a bioinformatically detected group of novel genes designated 108.

[0113] Expressed RNA data 102 comprises published expressed sequence tags (EST) data, published mRNA data, as well as other sources of published RNA data. Sequenced DNA data 104 comprises alphanumeric data describing sequenced genomic data, which preferably includes annotation data such as location of known protein coding regions relative to the sequenced data. Protein function data 106 comprises scientific publications reporting studies which elucidated physiological function known proteins, and their connection, involvement and possible utility in treatment and diagnosis of various diseases. Expressed RNA data 102 and sequenced DNA data 104 may preferably be obtained from data published by the National Center for Bioinformatics (NCBI) at the National Institute of Health (NIH) (Jenuth, 2000), as well as from various other published data sources. Protein function data 106 may preferably be obtained from any one of numerous relevant published data sources, such as the Online Mendelian Inherited Disease In M an (OMIM™) database developed by John Hopkins University, and also published by NCBI (2000).

[0114] Prior to actual detection of bioinformatically detected novel genes 108 by the bioinformatic gene detection engine 100, a process of bioinformatic gene detection engine training & validation designated 110 takes place. This process uses the known miRNA genes as a training set (some 200 such genes have been found to date using biological laboratory means), to train the bioinformatic gene detection engine 100 to bioinformatically recognize miRNA-like genes, and their respective potential target binding sites. Bioinformatic gene detection engine training & validation 110 is further described hereinbelow with reference to FIG. 10.

[0115] The bioinformatic gene detection engine 100 comprises several modules which are preferably activated sequentially, and are described as follows:

[0116] A non-coding genomic sequence detector 112 operative to bioinformatically detect non-protein coding genomic sequences. The non-coding genomic sequence detector 112 is further described herein below with reference to FIGS. 11A and 11B.

[0117] A hairpin detector 114 operative to bioinformatically detect genomic ‘hairpin-shaped’ sequences, similar to GAM FOLDED PRECURSOR of FIG. 8. The hairpin detector 114 is further described herein below with reference to FIGS. 12A and 12B.

[0118] A dicer-cut location detector 116 operative to bioinformatically detect the location on a hairpin shaped sequence which is enzymatically cut by DICER COMPLEX of FIG. 8. The dicer-cut location detector 116 is further described herein below with reference to FIG. 13A.

[0119] A target-gene binding-site detector 118 operative to bioinformatically detect target genes having binding sites, the nucleotide sequence of which is partially complementary to that of a given genomic sequence, such as a sequence cut by DICER COMPLEX of FIG. 8. The target-gene binding-site detector 118 is further described hereinbelow with reference to FIGS. 14A and 14B.

[0120] A function & utility analyzer 120 operative to analyze function and utility of target genes, in order to identify target genes which have a significant clinical function and utility. The function & utility analyzer 120 is further described hereinbelow with reference to FIG. 15.

[0121] Hardware implementation of the bioinformatic gene detection engine 100 is important, since significant computing power is preferably required in order to perform the computation of bioinformatic gene detection engine 100 in reasonable time and cost. For example, it is estimated that a using a powerful 8-processor server (e.g. DELL POWEREDGE™ 8450, 8 XEON™ 550 MHz processors, 8 GB RAM), over 6 years (!) of computing time are required to detect all MIR genes in the human EST data, together with their respective binding sites. Various computer hardware and software configurations may be utilized in order to address this computation challenge, as is known in the art. A preferred embodiment of the present invention may preferably comprise a hardware configuration, comprising a cluster of one hundred PCs (PENTIUM™ IV, 1.7 GHz, with 40 GB storage each), connected by Ethernet to 12 servers (2-CPU, XEON™ 1.2-2.2 GHz, with ˜200 GB storage each), combined with an 8-processor server (8-CPU, Xeon 550 Mhz w/8 GB RAM) connected via 2 HBA fiber-channels to an EMC CLARIION™ 100-disks, 3.6 Terabyte storage device. A preferred embodiment of the present invention may also preferably comprise a software configuration which utilizes a commercial database software program, such as MICROSOFT™ SQL Server 2000. Using such preferred hardware and software configuration, may reduce computing time required to detect all MIR genes in the human EST data, and their respective binding sites, from 6 years to 45 days. It is appreciated that the above mentioned hardware configuration is not meant to be limiting, and is given as an illustration only. The present invention may be implemented in a wide variety of hardware and software configurations.

[0122] The present invention discloses 8607 novel genes of the GAM group of genes, which have been detected bioinformatically, as described hereinbelow with reference to Table 1 through Table 6, and 1096 novel genes of the GR group of genes, which have been detected bioinformatically, as described hereinbelow with reference to Table 7. Laboratory confirmation of 50 bioinformatically predicted genes of the GAM group of genes, and several bioinformatically predicted genes of the GR group of genes, is described hereinbelow with reference to FIGS. 21 through 24C.

[0123] Reference is now made to FIG. 10 which is a simplified flowchart illustrating operation of a mechanism for training a computer system to recognize the novel genes of the present invention. This mechanism is a preferred implementation of the bioinformatic gene detection engine training & validation 110 described hereinabove with reference to FIG. 9.

[0124] BIOINFORMATIC GENE DETECTION ENGINE TRAINING & VALIDATION 110 of FIG. 9 begins by training the bioinformatic gene detection engine to recognize known miRNA genes, as designated by numeral 122. T his training step comprises HAIRPIN DETECTOR TRAINING & VALIDATION 124, further described hereinbelow with reference to FIG. 12A, DICER-CUT LOCATION DETECTOR TRAINING & VALIDATION 126, further described hereinbelow with reference to FIGS. 13A and 13B, and TARGET-GENE BINDING-SITE DETECTOR TRAINING & VALIDATION 128, further described hereinbelow with reference to FIG. 14A.

[0125] Next, the BIOINFORMATIC GENE DETECTION ENGINE 100 is used to bioinformatically detect sample novel genes, as designated by numeral 130. Examples of sample novel genes thus detected are described hereinbelow with reference to FIGS. 21 through 24C.

[0126] Finally, wet lab experiments are preferably conducted in order to validate expression and preferably function of the sample novel genes detected by the BIOINFORMATIC GENE DETECTION ENGINE 100 in the previous step. An example of wet-lab validation of the above mentioned sample novel gene bioinformatically detected by the system is described hereinbelow with reference to FIGS. 22A and 22B.

[0127] Reference is now made to FIG. 11A which is a simplified block diagram of a preferred implementation of the NON-CODING GENOMIC SEQUENCE DETECTOR 112 described hereinabove with reference to FIG. 9. The NON-PROTEIN CODING GENOMIC SEQUENCE DETECTOR 112 of FIG. 9 preferably receives as input at least two types of published genomic data: EXPRESSED RNA DATA 102 and SEQUENCED DNA DATA 104. The EXPRESSED RNA DATA can include, among others, EST data, EST clusters data, EST genome alignment data and mRNA data. Sources for EXPRESSED RNA DATA 102 include NCBI dbEST, NCBI UniGene clusters and mapping data, and TIGR gene indices. SEQUENCED DNA DATA 104 includes both sequence data (FASTA format files), and features annotation (GenBank file format) mainly from NCBI database. After its initial training, indicated by numeral 134, and based on the above mentioned input data, the NON-PROTEIN CODING GENOMIC SEQUENCE DETECTOR 112 produces as output a plurality of NON-PROTEIN CODING GENOMIC SEQUENCES 136. Preferred operation of the NON-PROTEIN CODING GENOMIC SEQUENCE DETECTOR 112 is described hereinbelow with reference to FIG. 11B.

[0128] Reference is now made to FIG. 11B which is a simplified flowchart illustrating a preferred operation of the NON-CODING GENOMIC SEQUENCE DETECTOR 112 of FIG. 9. Detection of NON-PROTEIN CODING GENOMIC SEQUENCES 136, generally preferably progresses in one of the following two paths:

[0129] A first path for detecting NON-PROTEIN CODING GENOMIC SEQUENCES 136 begins by receiving a plurality of known RNA sequences, such as EST data. Each RNA sequence is first compared to all known protein-coding sequences, in order to select only those RNA sequences which are non-protein coding, i.e. intergenic or intronic. This can preferably be performed by sequence comparison of the RNA sequence to known protein coding sequences, using one of many alignment algorithms known in the art, such as BLAST. This sequence comparison to the DNA preferably also provides the localization of the RNA sequence on the DNA.

[0130] Alternatively, selection of non-protein coding RNA sequences and their localization to the DNA can be performed by using publicly available EST clusters data and genomic mapping databases, such as UNIGENE database published by NCBI or TIGR database, in order map expressed RNA sequences to DNA sequences encoding them, to find the right orientation of EST sequences, and to exclude ESTs which map to protein coding DNA regions, as is well known in the art. Public databases, such as TIGR, may also be used to map an EST to a cluster of ESTs, assumed to be expressed as one piece, and is known in the art as Tentative Human Consensus. Publicly available genome annotation databases, such as NCBI's GENBANK, may also be used to deduce expressed intronic sequences.

[0131] Optionally, an attempt may be made to ‘expand’ the non-protein RNA sequences thus found, by searching for transcription start and end signals, upstream and downstream of location of the RNA on the DNA respectively, as is well known in the art.

[0132] A second path for detecting non-protein coding genomic sequences starts by receiving DNA sequences. The DNA sequences are parsed into non protein coding sequences, based on published DNA annotation data, by extracting those DNA sequences which are between known protein coding sequences. Next, transcription start and end signals are sought. If such signals are found, and depending on their ‘strength’, probable expressed non-protein coding genomic sequences are yielded. Such approach is especially useful for identifying novel GAM genes which are found in proximity to other known miRNA genes, or other wet-lab validated GAM genes. Since, as described hereinbelow with reference to FIG. 16, GAM genes are frequently found in clusters, therefore sequences near a known miRNA are more likely to contain novel GAM genes. Optionally, sequence orthology, i.e. sequences conservation in an evolutionary related species, may be used to select genomic sequences having higher probability of containing expressed novel GAM genes.

[0133] Reference is now made to FIG. 12A which is a simplified block diagram of a preferred implementation of the HAIRPIN DETECTOR 114 described hereinabove with reference to FIG. 9.

[0134] The goal of the HAIPIN DETECTOR 114 is to detect ‘hairpin’ shaped genomic sequences, similar to those of known miRNA genes. As mentioned hereinabove with reference to FIG. 8, a ‘hairpin’ genomic sequence refers to a genomic sequence which ‘folds onto itself’ forming a hairpin like shape, due to the fact that nucleotide sequence of the first half of the nucleotide sequence is an accurate or partial complementary sequence of the nucleotide sequence of its second half.

[0135] The HAIRPIN DETECTOR 114 of FIG. 9 receives as input a plurality of NON-PROTEIN CODING GENOMIC SEQUENCES 136 of FIG. 11A. After a phase of HAIRPIN DETECTOR TRAINING & VALIDATION 124 of FIG. 10, the HAIRPIN DETECTOR 114 is operative to detect and output ‘hairpin shaped’ sequences, which are found in the input NON-PROTEIN CODING GENOMIC SEQUENCES 138. The hairpin shaped sequences detected by the HAIRPIN DETECTOR 114 are designated HAIRPINS ON GENOMIC SEQUENCES 138. Preferred operation of the HAIRPIN DETECTOR 114 is described hereinbelow with reference to FIG. 12B.

[0136] The phase of HAIRPIN DETECTOR TRAINING & VALIDATION 124 is an iterative process of applying the HAIRPIN DETECTOR 114 to known hairpin shaped miRNA genes, calibrating the HAIRPIN DETECTOR 114 such that it identifies the training set of known hairpins, as well as sequences which are similar thereto. In a preferred embodiment of the present invention, THE HAIRPIN DETECTOR TRAINING & VALIDATION 124 trains and validates each of the steps of operation of the HAIRPIN DETECTOR 114, which steps are described hereinbelow with reference to FIG. 12B.

[0137] The hairpin detector training and validation 124 preferably uses two sets of data: a training set of known miRNA genes, such as 440 miRNA genes of H. sapiens, M. musculus, C. elegans, C. Brigssae and D. Melanogaster, annotated in RFAM database (Griffiths-Jones 2003), and a large ‘background set’ of hairpins found in expressed non-protein coding genomic sequences, such as a set of 21,985 hairpins found in Tentative Human Concensus (THC) sequences in TIGR database. The ‘background set’ is expected to comprise some valid, previously undetected miRNA hairpins, and many hairpins which are not miRNA hairpins.

[0138] In order to validate the performance of the HAIRPIN DETECTOR 114, a validation method is preferably used, which validation method is a variation on the k-fold cross validation method (Mitchell, 1997). This preferred validation method is devised to better cope with the nature of the training set, which includes large families of similar and even identical miRNAs. The training set is preferably first divided into clusters of miRNAs such that any two miRNAs that belong to different clusters have an Edit Distance score (see Algorithms and Strings; Dan Gusfield, Cambridge University Press, 1997) of at least D=3, i.e. they differ by at least 3 editing operations. Next, the group of clusters is preferably divided into k sets. Then standard k-fold cross validation is preferably performed on this group of clusters, preferably using k=5, such that the members of each cluster are all in the training set or in the test set. It is appreciated that without the prior clustering, standard cross validation methods results in much higher performance of the predictors due to the redundancy of training examples, within the genome of a species and across genomes of different species.

[0139] In a preferred embodiment of the present invention, using the above-mentioned validation method, the efficacy of the HAIRPIN DETECTOR 114 is indeed validated: for example, when a similarity threshold is chosen such that 90% of the published miRNA-precursor hairpins are successfully predicted, only 7.6% of the 21,985 background hairpins are predicted to be miRNA-precursors, some of which may indeed be previously unknown miRNA precursors.

[0140] Reference is now made to FIG. 12B which is a simplified flowchart illustrating a preferred operation of the HAIRPIN DETECTOR 114 of FIG. 9.

[0141] A hairpin structure is a secondary structure, resulting from the nucleotide sequence pattern: the nucleotide sequence of the first half of the hairpin is a partial or accurate inversed reversed sequence of the nucleotide sequence of the second half thereof. Various methodologies are known in the art for prediction of secondary and tertiary hairpin structures, based on given nucleotide sequences.

[0142] In a preferred embodiment of the present invention, the HAIRPIN DETECTOR 114 initially calculates possible secondary structure folding patterns of a given one of the non-protein coding genomic sequences 136 and the respective energy of each of these possible secondary folding patterns, preferably using a secondary structure folding algorithm based on free-energy minimization, such as the MFOLD algorithm (Mathews et al., 1999), as is well known in the art.

[0143] Next, the HAIRPIN DETECTOR 114 analyzes the results of the secondary structure folding, in order to determine the presence, and location of hairpin folding structures. A secondary structure folding algorithm, such as MFOLD algorithm, typically provides as output a listing of the base-pairing of the folded shape, i.e. a listing of each pair of connected nucleotides in the sequence. The goal of this second step is to asses this base-pairing listing, in order to determine if it describes a hairpin type bonding pattern. Preferably, each of the sequences that is determined to describe a hairpin structure is folded separately in order to determine its exact folding pattern and free-energy.

[0144] The HAIRPIN DETECTOR 114 then assess those hairpin structures found by the previous step, comparing them to hairpins of known miRNA genes, using various characteristic hairpin features such as length of the hairpin and of its loop, free-energy and thermodynamic stability, amount and type of mismatched nucleotides, existence of sequence repeat-elements. Only hairpins that bear statistically significant resemblance to the training set of known miRNA hairpins, according to the abovementioned parameters are accepted.

[0145] In a preferred embodiment of the present invention, similarity to the training set of known miRNA hairpins is determined using a ‘similarity score’ which is calculated using a weighted sum of terms, where each term is a function of one of the abovementioned hairpin features, and the parameters of each function are learned from the set of known hairpins, as described hereinabove with reference to hairpin detector training & validation 124. The weight of each term in the similarity score is optimized so as to achieve maximal separation between the distribution of similarity scores of hairpins which have been validated as miRNA-precursor hairpins, and the distribution of similarity scores of hairpins detected in the ‘background set’ mentioned hereinabove with reference to FIG. 12B, many of which are expected not to be miRNA-precursor hairpins.

[0146] In another preferred embodiment of the present invention, the above-mentioned DETERMINE IF SIMILAR TO KNOWN HAIRPIN-GENES step may may preferably be split into two stages. The first stage is a permissive filter that implements a simplified scoring method, based on a subset of the hairpin features described hereinabove, such as minimal length and maximal free energy. The second stage is more stringent, and a full calculation of the weighted sum of terms described hereinabove is performed. This second stage may preferably be performed only on the subset of hairpins that survived prior filtering stages of the hairpin-detector 114.

[0147] Lastly, the HAIRPIN DETECTOR 114 attempts to select those hairpin structures which are as thermodynamically stable as the hairpins of known miRNA genes. This may preferably be achieved in various manners. A preferred embodiment of the present invention utilizes the following methodology preferably comprising three logical steps:

[0148] First, the HAIRPIN DETECTOR 114 attempts to group potential hairpins into ‘families’ of closely related hairpins. As is known in the art, a free-energy calculation algorithm, typically provides multiple ‘versions’ each describing a different possible secondary structure folding pattern for the given genomic sequence, and the free energy of such possible folding. The HAIRPIN DETECTOR 114 therefore preferably assesses all hairpins found in each of the ‘versions’, grouping hairpins which appear in different versions, but which share near identical locations into a common ‘family’ of hairpins. For example, all hairpins in different versions, the center of which hairpins is within 7 nucleotides of each other may preferably be grouped to a single ‘family’. Hairpins may also be grouped to a single ‘family’ if the sequences of one or more hairpins are identical to, or are subsequences of, the sequence of another hairpin.

[0149] Next, hairpin ‘families’ are assessed, in order to select only those families which represent hairpins that are as stable as those of known miRNA hairpins. Preferably only families which are represented in a majority of the secondary structure folding versions, such as at least in 65% or 80% or 100% of the secondary structure folding versions, are considered stable.

[0150] Finally, an attempt is made to select the most suitable hairpin from each selected family. For example, a hairpin which appears in more versions than other hairpins, and in versions the free-energy of which is lower, may be preferred.

[0151] In another preferred embodiment of the present invention, hairpins with homology to other species, and clusters of thermodynamically stable hairpin are further favored.

[0152] Reference is now made to FIG. 13A which is a simplified block diagram of a preferred implementation of the DICER-CUT LOCATION DETECTOR 116 described hereinabove with reference to FIG. 9.

[0153] The goal of the DICER-CUT LOCATION DETECTOR 116 is to detect the location in which DICER COMPLEX of FIG. 8, comprising the enzyme Dicer, would ‘dice’ the given hairpin sequence, similar to GAM FOLDED PRECURSOR RNA, yielding GAM RNA both of FIG. 8.

[0154] The DICER-CUT LOCATION DETECTOR 116 of FIG. 9 therefore receives as input a plurality of HAIRPINS ON GENOMIC SEQUENCES 138 of FIG. 12A, which were calculated by the previous step, and after a phase of DICER-CUT LOCATION DETECTOR TRAINING & VALIDATION 126, is operative to detect a respective plurality of DICER-CUT SEQUENCES FROM HAIRPINS 140, one for each hairpin.

[0155] In a preferred embodiment of the present invention, the DICER-CUT LOCATION DETECTOR 116 preferably uses standard machine learning techniques such as K nearest-neighbors, Bayesian networks and Support Vector Machines (SVM), trained on known dicer-cut locations of known miRNA genes in order to predict dicer-cut locations of novel GAM genes. The DICER-CUT LOCATION DETECTOR TRAINING & VALIDATION 126 is further described hereinbelow with reference to FIG. 13B.

[0156] Reference is now made to FIG. 13B which is a simplified flowchart illustrating a preferred implementation of DICER-CUT LOCATION DETECTOR TRAINING & VALIDATION 126 of FIG. 10.

[0157] The general goal of the DICER-CUT LOCATION DETECTOR TRAINING & VALIDATION 126 is to analyze known hairpin shaped miRNA-precursors and their respective dicer-cut miRNA, in order to determine a common pattern to the dicer-cut location of known miRNA genes. Once such a common pattern is deduced, it may preferably be used by the DICER-CUT LOCATION DETECTOR 116, in detecting the predicted DICER-CUT SEQUENCES FROM HAIRPINS 140, from the respective HAIRPINS ON GENOMIC SEQUENCES 138, all of FIG. 13A.

[0158] First, the dicer-cut location of all known miRNA genes is obtained and studied, so as to train the DICER-CUT LOCATION DETECTOR 116: for each of the known miRNA, the location of the miRNA relative to its hairpin-shaped miRNA-precursor is noted.

[0159] The 5′ and 3′ ends of the dicer-cut location of each of the known miRNA genes is represented relative to the respective miRNA precursor hairpin, as well as to the nucleotides in each location along the hairpin. Frequency and identity of nucleotides and of nucleotide-pairing, and position of nucleotides and nucleotide pairing relative to the dicer-cut location in the known miRNA precursor hairpins is analyzed and modeled. In a preferred embodiment of the present invention, features learned from published miRNAs include: distance from hairpin's loop, nucleotide content, positional distribution of nucleotides and mismatched-nucleotides, and symmetry of mismatched-nucleotides.

[0160] Different techniques are well known in the art of machine learning for analysis of existing pattern from a given ‘training set’ of examples, which techniques are then capable, to a certain degree, to detect similar patterns in other, previously unseen examples. Such machine learning techniques include, but are not limited to neural networks, Bayesian networks, Support Vector Machines (SVM), Genetic Algorithms, Markovian modeling, Maximum Liklyhood modeling, Nearest Neighbor algorithms, Decision trees and other techniques, as is well known in the art.

[0161] The DICER-CUT LOCATION DETECTOR 116 preferably uses such standard machine learning techniques to predict either the 5′ end or both the 5′ and 3′ ends of the miRNA excised, or ‘diced’ by the Dicer enzyme from the miRNA hairpin shaped precursor, based on known pairs of miRNA-precursors and their respective resulting miRNAs. The nucleotide sequences of 440 published miRNA and their corresponding hairpin precursors are preferably used for training and evaluation of the dicer-cut location detector module.

[0162] Using the abovementioned training set, machine learning predictors, such as a Support Vector Machine (SVM) predictor, are implemented, which predictors test every possible nucleotide on a hairpin as a candidate for being the 5′ end or the 3′ end of a miRNA. Other machine learning predictors include predictors based on Nearest Neighbor, Bayesian modeling, and K-nearest-neighbor algorithms. The training set of the published miRNA precursor sequences is preferably used for training multiple separate classifiers or predictors, each of which produces a model for the 5′ or 3′ end of a miRNA relative to its hairpin precursor. The models take into account various miRNA properties such as the distance of the respective (3′ or 5′) end of the miRNA from the hairpin's loop, the nucleotides at its vicinity and the local ‘bulge’ (i.e. base-pair mismatch) structure.

[0163] Performance of the resulting predictors, evaluated on the above-mentioned validation set of 440 published miRNAs using k-fold cross validation (Mitchell, 1997) with k=3, is found to be as follows: in 70% of known miRNAs 5′-end location is correctly determined by an SVM predictor within up to 2 nucleotides; a Nearest Neighbor (EDIT DISTANCE) predictor achieves 53% accuracy (233/440); a Two-Phased predictor that uses Baysian modeling (TWO PHASED) achieves 79% accuracy (348/440), when only the first phase is used, and 63% (277/440) when both phases are used; a K-nearest-neighbor predictor (FIRST-K) achieves 61% accuracy (268/440). The accuracies of all predictors are considerably higher on top scoring subsets of published miRNA.

[0164] Finally, in order to validate the efficacy and accuracy of the dicer-cut location detector 116, a sample of novel genes detected thereby is preferably selected, and validated by wet lab. Laboratory results validating the efficacy of the dicer-cut location detector 116 are described hereinbelow with reference to FIGS. 21 through 24C.

[0165] Reference is now made to FIG. 13C which is a simplified flowchart illustrating operation of DICER-CUT LOCATION DETECTOR 116 of FIG. 9, constructed and operative in accordance with a preferred embodiment of the present invention.

[0166] The DICER CUT LOCATION DETECTOR 116 is a machine learning computer program module, which is trained on recognizing dicer-cut location of known miRNA genes, and based on this training, is operable to detect dicer cut location of novel GAM FOLDED PRECURSOR RNA. In a preferred embodiment of the present invention, the dicer-cut location module preferably utilizes machine learning algorithms, such as Support Vector Machine (SVM), Bayesian modeling, Nearest Neighbors, and K-nearest-neighbor, as is well known in the art.

[0167] When assessing a novel GAM precursor, all 19-24 nucleotide long segments comprised in the GAM precursor are initially considered as ‘potential GAMs’, since the dicer-cut location is initially unknown.

[0168] For each such potential GAM, its 5′ end, or its 5′ and 3′ ends are scored by two or more recognition classifiers or predictors.

[0169] In a preferred embodiment of the present invention, the DICER-CUT LOCATION DETECTOR 116 preferably uses a Support Vector Machine predictor trained on features such as distance from hairpin's loop, nucleotide content, positional distribution of nucleotides and mismatched-nucleotides, and symmetry of mismatched-nucleotides.

[0170] In another preferred embodiment of the present invention, the DICER-CUT LOCATION DETECTOR 116 preferably uses an ‘EDIT DISTANCE’ predictor, which seeks sequences that are similar to those of published miRNAs, utilizing the Nearest Neighbor algorithm, where the similarity metric between two sequences is a variant of the edit distance algorithm (Algorithms and Strings, Dan Gusfield, Cambridge University Press, 1997). This predictor is based on the observation that miRNAs tend to form clusters (Dostie, 2003), the members of which show marked sequence similarity to each other.

[0171] In yet another preferred embodiment of the present invention, the DICER-CUT LOCATION DETECTOR 116 preferably uses a ‘TWO PHASED’ predictor, which predicts the dicer-cut location in two distinct phases: (a) selecting the double-stranded segment of the hairpin comprising the miRNA by naïve Bayesian modeling (Mitchell, 1997), and (b) detecting which strand contains the miRNA by either naïve or by K-nearest-neighbor modeling. The latter is a variant oft he ‘FIRST-K’ predictor described herein below, with parameters optimized for this specific task. The ‘TWO PHASED’ predictor may be operated in two modes: either utilizing only the first phase and thereby producing two alternative dicer-cut location predictions, or utilizing both phases and thereby producing only one final dicer-cut location.

[0172] In still another preferred embodiment of the present invention, the DICER-CUT LOCATION DETECTOR 116 preferably uses a ‘FIRST-K’ predictor, which utilizes the K-nearest-neighbor algorithm. The similarity metric between any two sequences is 1-E/L, where L is a parameter, preferably 8-10 and E is the edit distance between the two sequences, taking into account only the first L nucleotides of each sequence. If the K-nearest-neighbor scores of two or more locations on the hairpin are not significantly different, these locations are further ranked by a Bayesian model, similar to the one described hereinabove.

[0173] Scores of two or more of the abovementioned classifiers or predictors are integrated, yielding an integrated score for each ‘potential GAM’. As an example, FIG. 13C illustrates integration of scores from two classifiers, a 3′ end recognition classifier and a 5′ end recognition classifier, the scores of which are integrated to yield an integrated score. In a preferred embodiment of the present invention, INTEGRATED SCORE of 13C preferably implements a ‘best-of-breed’ approach, accepting only ‘potential GAMs’ that score highly on one of the above mentioned EDIT DISTANCE’, or ‘TWO-PHASED’ predictors. In this context, ‘high scores’ means scores which have been demonstrated to have low false positive value when scoring known miRNAs.

[0174] The INTEGRATED SCORE is then evaluated as follows: (a) the ‘potential GAM’ having the highest score is taken to be the most probable GAM, and (b) if the integrated score of this ‘potential GAM’ is higher than a pre-defined threshold, then the potential GAM is accepted as the PREDICTED GAM.

[0175] Reference is now made to FIG. 14A which is a simplified block diagram of a preferred implementation of the TARGET-GENE BINDING-SITE DETECTOR 118 described hereinabove with reference to FIG. 9. The goal of the TARGET-GENE BINDING-SITE DETECTOR 118 is to detect a BINDING SITE of FIG. 8, including binding sites located in untranslated regions of the RNA of a known gene, the nucleotide sequence of which BINDING SITE is a partial or accurate inversed reversed sequence to that of a GAM RNA of FIG. 8, thereby determining that the above mentioned known gene is a target gene of GAM of FIG. 8.

[0176] The TARGET-GENE BINDING-SITE DETECTOR 118 of FIG. 9 therefore receives as input a plurality of DICER-CUT SEQUENCES FROM HAIRPINS 140 of FIG. 13A which were calculated by the previous step, and a plurality of POTENTIAL TARGET GENE SEQUENCES 142 which derive from SEQUENCED DNA DATA 104 of FIG. 9, and after a phase of TARGET-GENE BINDING-SITE DETECTOR TRAINING & VALIDATION 128 is operative to detect a plurality of POTENTIAL NOVEL TARGET-GENES HAVING BINDING SITE/S 144 the nucleotide sequence of which is a partial or accurate inversed reversed sequence to that of each of the plurality of DICER-CUT SEQUENCES FROM HAIRPINS 140. Preferred operation of the TARGET-GENE BINDING-SITE DETECTOR 118 is further described hereinbelow with reference to FIG. 14B.

[0177] Reference is now made to FIG. 14B which is a simplified flowchart illustrating a preferred operation of the target-gene binding-site detector 118 of FIG. 9.

[0178] In a preferred embodiment of the present invention, the target-gene binding-site detector 118 first uses a sequence comparison algorithm such as BLAST in order to compare the nucleotide sequence of each of the plurality of dicer-cut sequences from hairpins 140, to the potential target gene sequences 142, such a untranslated regions of known mRNAs, in order to find crude potential matches. Alternatively, the sequence comparison may preferably be performed using a sequence match search tool that is essentially a variant of the EDIT DISTANCE algorithm described hereinabove with reference to FIG. 13C, and the Nearest Neighbor algorithm (Mitchell, 1997).

[0179] Results of the sequence comparison, performed by BLAST or other algorithms such as EDIT DISTANCE, are then filtered, preferably utilizing BLAST or EDIT DISTANCE score, to results which are similar to those of known binding sites (e.g. binding sites of miRNA genes Lin-4 and Let-7 to target genes Lin-14, Lin-41, Lin 28 etc.). Next the binding site is expanded, checking if nucleotide sequenced immediately adjacent to the binding site found by the sequence comparison algorithm (e.g. BLAST or EDIT DISTANCE), may improve the match. Suitable binding sites, then are computed for free-energy and spatial structure. The results are analyzed, accepting only those binding sites, which have free-energy and spatial structure similar to that of known binding sites. Since known binding sites of known miRNA genes frequently have multiple adjacent binding sites on the same target RNA, accordingly binding sites which are clustered are strongly preferred. Binding sites found in evolutionarily conserved sequences may preferably also be preferred.

[0180] For each candidate binding site a score, Binding Site Prediction Accuracy, is calculated which estimates their similarity of its binding to that of known binding sites. This score is based on GAM-binding site folding features including, but not limited to the free-energy, the total number and distribution of base pairs, the total number and distribution of unpaired nucleotides.

[0181] In another preferred embodiment of the present invention binding sites are searched by a reversed process: sequences of K (preferably 22) nucleotides of the untranslated regions of the target gene are assessed as potential binding sites. A sequence comparison algorithm, such as BLAST or EDIT DISTANCE, is then used to search for partially or accurately complementary sequences elsewhere in the genome, which complementary sequences are found in known miRNA genes or computationally predicted GAM genes. Only complementary sequences, the complementarity of which withstands the spatial structure and free energy analysis requirements described above are accepted. Clustered binding sites are strongly favored, as are potential binding sites and potential GAM genes which occur in evolutionarily conserved genomic sequences.

[0182] Target binding sites, identified by the TARGET-GENE BINDING-SITE DETECTOR 118, are divided into 3 groups: a) comprises binding sites that are exactly complementary to the predicted GAM. b) and c) comprise binding sites that are not exactly complementary to the predicted GAM: b) has binding sites with 0.9<Binding Site Prediction Accuracy<=1 and c) has binding sites with 0.8<Binding Site Prediction Accuracy<=0.9. The average number of mismatching nucleotides in the alignment of predicted GAM and target binding site is smallest in category A and largest in category C.

[0183] In a preferred embodiment of the current invention a ranking of GAM to target gene binding is performed by calculating a score, Mir Target Accuracy. This score is the dominant group identifier of all binding sites of a specific GAM to a specific target gene UTR, where ‘a’ dominates ‘b’ and ‘b’ dominates ‘c’.

[0184] In yet another preferred embodiment of the current invention a ranking of GAM to target gene binding is performed directly from the set of Binding Site Prediction Accuracies corresponding to all the binding sites of a specific GAM to a specific target gene UTR. This set of scores is sorted in descending order. The final score is a weighted sum of these scores where the weights are exponentially decreasing as a function of the rank.

[0185] Reference is now made to FIG. 15 which is a simplified flowchart illustrating a preferred operation of the function & utility analyzer 120 described hereinabove with reference to FIG. 9. The goal of the function & utility analyzer 120 is to determine if a potential target gene is in fact a valid clinically useful target gene. Since a potential novel GAM gene binding a binding site in the UTR of a target gene is understood to inhibit expression of that target gene, and if that target gene is shown to have a valid clinical utility, then in such a case it follows that the potential novel gene itself also has a valid useful function—which is the opposite of that of the target gene.

[0186] The function & utility analyzer 120 preferably receives as input a plurality of potential novel target genes having binding-site/s 144, generated by the target-gene binding-site detector 118, both of FIG. 14A. Each potential gene, is evaluated as follows:

[0187] First, the system checks to see if the function of the potential target gene is scientifically well established. Preferably, this can be achieved bioinformatically by searching various published data sources presenting information on known function of proteins. Many such data sources exist and are published as is well known in the art.

[0188] Next, for those target genes the function of which is scientifically known and is well documented, the system then checks if scientific research data exists which links them to known diseases. For example, a preferred embodiment of the present invention utilizes the OMIM™ database published by NCBI, which summarizes research publications relating to genes which have been shown to be associated with diseases.

[0189] Finally, the specific possible utility of the target gene is evaluated. While this process too may be facilitated by bioinformatic means, it might require manual evaluation of published scientific research regarding the target gene, in order to determine the utility of the target gene to the diagnosis and or treatment of specific disease. Only potential novel genes, the target-genes of which have passed all three examinations, are accepted as novel genes.

[0190] Reference is now made to FIG. 16, which is a simplified diagram describing each of a plurality of novel bioinformatically detected regulatory genes, referred to here as Genomic Record (GR) genes, which encodes an ‘operon-like’ cluster of novel micro RNA-like genes, each of which in turn modulates expression of at least one target gene, the function and utility of which at least one target gene is known in the art.

[0191] GR GENE is a novel bioinformatically detected regulatory, non protein coding, RNA gene. The method by which GR GENE was detected is described hereinabove with reference to FIGS. 9-18.

[0192] GR GENE encodes GR PRECURSOR RNA, an RNA molecule, typically several hundred nucleotides long.

[0193] GR PRECURSOR RNA folds spatially, forming GR FOLDED PRECURSOR RNA. It is appreciated that GR FOLDED PRECURSOR RNA comprises a plurality of what is known in the art as ‘hairpin’ structures. These ‘hairpin’ structures are due to the fact that the nucleotide sequence of GR PRECURSOR RNA comprises a plurality of segments, the first half of each such segment having a nucleotide sequence which is at least a partial or accurate inversed reversed sequence of the second half thereof, as is well known in the art.

[0194] GR FOLDED PRECURSOR RNA is naturally processed by cellular enzymatic activity into separate GAM precursor RNAs, herein schematically represented by GAM1 FOLDED PRECURSOR RNA through GAM3 FOLDED PRECURSOR RNA, each of which GAM precursor RNAs being a hairpin shaped RNA segment, corresponding to GAM FOLDED PRECURSOR RNA of FIG. 8.

[0195] The above mentioned GAM precursor RNAs are diced by DICER COMPLEX of FIG. 8, yielding respective short RNA segments of about 22 nucleotides in length, schematically represented by GAM1 RNA through GAM3 RNA, each of which GAM RNAs corresponding to GAM RNA of FIG. 8.

[0196] GAM1 RNA, GAM2 RNA and GAM3 RNA, each bind complementarily to binding sites located in untranslated regions of respective target genes, designated GAM1-TARGET RNA, GAM2-TARGET RNA and GAM3-TARGET RNA, respectively, which target binding site corresponds to a target binding site such as BINDING SITE I, BINDING SITE II or BINDING SITE m of FIG. 8. This binding inhibits translation of the respective target proteins designated GAM1-TARGET PROTEIN, GAM2-TARGET PROTEIN and GAM3-TARGET PROTEIN respectively.

[0197] It is appreciated that specific functions, and accordingly utilities, of each GR GENE of the present invention, correlates with, and may be deduced from, the identity of the target genes, which are inhibited by GAM RNAs comprised in the ‘operon-like’ cluster of said GR GENE, schematically represented by GAM1 TARGET PROTEIN through GAM3 TARGET PROTEIN.

[0198] A listing of GAM GENEs comprised in each of a plurality of GR GENEs of FIG. 16 is provided in Table 7, hereby incorporated by reference. Nucleotide sequences of each said GAM GENEs and their respective genomic source and chromosomal location are further described hereinbelow with reference to Table 1, hereby incorporated by reference. TARGET GENEs of each of said GAM GENEs are elaborated hereinbelow with reference to Table 4, hereby incorporated by reference. The functions of each of said TARGET GENEs and their association with various diseases, and accordingly the utilities of said each of GAM GENEs, and hence the functions and utilities of each of said GR GENEs of FIG. 16 is elaborated hereinbelow with reference to Table 5, hereby incorporated by reference. Studies establishing known functions of each of said TARGET GENEs, and correlation of each of said TARGET GENEs to known diseases are listed in table 6, and are hereby incorporated by reference.

[0199] The present invention discloses 1096 novel genes of the GR group of genes, which have been detected bioinformatically, as elaborated hereinbelow with reference to Table 7. Laboratory confirmation of 2 genes of the GR group of genes is described hereinbelow with reference to FIGS. 23A through 24C.

[0200] In summary, the current invention discloses a very large number of novel GR genes, each of which encodes a plurality of GAM genes, which in turn may modulate expression of a plurality of target proteins. It is appreciated therefore that the function of GR genes is in fact similar to that of the Genomic Records concept of the present invention addressing the differentiation enigma, described hereinabove with reference to FIG. 7.

[0201] Reference is now made to FIG. 17 which is a simplified diagram illustrating a mode by which genes of a novel group of operon-like genes, described hereinabove with reference to FIG. 16 of the present invention, modulate expression of other such genes, in a cascading manner.

[0202] GR1 GENE and GR2 GENE are two genes of the novel group of operon-like genes designated GR of FIG. 16. As is typical of genes of the GR group of genes, GR1 and GR2 each encode a long RNA precursor, which in turn folds into a folded RNA precursor comprising multiple hairpin shapes, and is cut into respective separate hairpin shaped RNA segments, each of which RNA segments being diced to yield a gene of a group of genes designated GAM of FIG. 8. In this manner GR1 yields GAM1 RNA, GAM2 RNA and GAM3 RNA, and GR2 yields GAM4 RNA, GAM5 RNA and GAM6 RNA.

[0203] As FIG. 17 shows, GAM3 RNA, which derives from GR1, binds a binding site located adjacent to GR2 GENE, thus modulating expression of GR2, thereby invoking expression of GAM4 RNA, GAM5 RNA and GAM6 RNA which derive from GR2.

[0204] It is appreciated that the mode of modulation of expression presented by FIG. 17 enables an unlimited ‘cascading effect’ in which a GR gene comprises multiple GAM genes, each of which may modulate expression of other GR genes, each such GR gene comprising additional GAM genes, etc., whereby eventually certain GAM genes modulate expression of target proteins. This mechanism is in accord with the conceptual model of the present invention addressing the differentiation enigma, described hereinabove with specific reference to FIGS. 6 and 7.

[0205] Reference is now made to FIG. 18 which is a block diagram illustrating an overview of a methodology for finding novel genes and operon-like genes of the present invention, and their respective functions.

[0206] According to a preferred embodiment of the present invention, the methodology to finding novel genes of the present invention and their function comprises of the following major steps:

[0207] First, genes of the novel group of genes of the present invention, referred to here as GAM genes, are located and their function elicited by detecting target proteins they bind and the function of those target proteins, as described hereinabove with reference to FIGS. 9 through 15.

[0208] Next, genes of a novel group of operon-like genes of the present invention, referred to here as GR genes, are located, by locating clusters of proximally located GAM genes, based on the previous step.

[0209] Consequently, the hierarchy of GR and GAM genes is elicited: binding sites for non-protein-binding GAM genes comprised in each GR gene found are sought adjacent to other GR genes. When found, such a binding site indicates that the connection between the GAM and the GR the expression of which it modulates, and thus the hierarchy of the GR genes and the GAM genes they comprise.

[0210] Lastly, the function of GR genes and GAM genes which are ‘high’ in the hierarchy, i.e. GAM genes which modulate expression of other GR genes rather than directly modulating expression of target proteins, may be deduced. A preferred approach is as follows: The function of protein-modulating GAM genes is deducible from the proteins which they modulate, provided that the function of these target proteins is known. The function of ‘higher’ GAM genes may be deduced by comparing the function of protein-modulating GAM genes, with the hierarchical relationships by which the ‘higher’ GAM genes are connected to the protein-modulating GAM genes. For example, given a group of several protein-modulating GAM genes, which collectively cause a protein expression pattern typical of a certain cell-type, then a ‘higher’ GAM gene is sought which modulates expression of GR genes which perhaps modulate expression of other genes which eventually modulate expression of the given group of protein-modulating GAM genes. The ‘higher’ GAM gene found in this manner is taken to be responsible for differentiation of that cell-type, as per the conceptual model of the invention described hereinabove with reference to FIG. 6.

[0211] Reference is now made to FIG. 19 which is a block diagram illustrating different utilities of genes of the novel group of genes of the present invention referred to here as GAM genes and GR genes.

[0212] The present invention discloses a first plurality of novel genes referred to here as GAM genes, and a second plurality of operon-like genes referred to here as GR genes, each of the GR genes encoding a plurality of GAM genes. The present invention further discloses a very large number of known target-genes, which are bound by, and the expression of which is modulated by each of the novel genes of the present invention. Published scientific data referenced by the present invention provides specific, substantial, and credible evidence that the above mentioned target genes modulated by novel genes of the present invention, are associated with various diseases. Specific novel genes of the present invention, target genes thereof and diseases associated therewith, are described hereinbelow with reference to Tables 1 through 7. It is therefore appreciated that a function of GAM genes and GR genes of the present invention is modulation of expression of target genes related to known diseases, and that therefore utilities of novel genes of the present invention include diagnosis and treatment of the above mentioned diseases. FIG. 19 describes various types of diagnostic and therapeutic utilities of novel genes of the present invention.

[0213] A utility of novel genes of the present invention is detection of GAM genes and of GR genes. It is appreciated that since GAM genes and GR genes modulate expression of disease related target genes, that detection of expression of GAM genes in clinical scenarios associated with said diseases is a specific, substantial and credible utility. Diagnosis of novel genes of the present invention may preferably be implemented by RNA expression detection techniques, including but not limited to biochips, as is well known in the art. Diagnosis of expression of genes of the present invention may be useful for research purposes, in order to further understand the connection between the novel genes of the present invention and the above mentioned related diseases, for disease diagnosis and prevention purposes, and for monitoring disease progress.

[0214] Another utility of novel genes of the present invention is anti-GAM gene therapy, a mode of therapy which allows up regulation of a disease related target-gene of a novel GAM gene of the present invention, by lowering levels of the novel GAM gene which naturally inhibits expression of that target gene. This mode of therapy is particularly useful with respect to target genes which have been shown to be under-expressed in association with a specific disease. Anti-GAM gene therapy is further discussed hereinbelow with reference to FIGS. 20A and 20B.

[0215] A further utility of novel genes of the present invention is GAM replacement therapy, a mode of therapy which achieves down regulation of a disease related target-gene of a novel GAM gene of the present invention, by raising levels of the GAM gene which naturally inhibits expression of that target gene. This mode of therapy is particularly useful with respect to target genes which have been shown to be over-expressed in association with a specific disease. GAM replacement therapy involves introduction of supplementary GAM gene products into a cell, or stimulation of a cell to produce excess GAM gene products. GAM replacement therapy may preferably be achieved by transfecting cells with an artificial DNA molecule encoding a GAM gene, which causes the cells to produce the GAM gene product, as is well known in the art. Yet a further utility of novel genes of the present invention is modified GAM therapy. Disease conditions are likely to exist, in which a mutation in a binding site of a GAM gene prevents natural GAM gene to effectively bind inhibit a disease related target-gene, causing up regulation of that target gene, and thereby contributing to the disease pathology. In such conditions, a modified GAM gene is designed which effectively binds the mutated GAM binding site, i.e. is an effective anti-sense of the mutated GAM binding site, and is introduced in disease effected cells. Modified GAM therapy is preferably achieved by transfecting cells with an artificial DNA molecule encoding the modified GAM gene, which causes the cells to produce the modified GAM gene product, as is well known in the art.

[0216] An additional utility of novel genes of the present invention is induced cellular differentiation therapy. As aspect of the present invention is finding genes which determine cellular differentiation, as described hereinabove with reference to FIG. 18. Induced cellular differentiation therapy comprises transfection of cell with such GAM genes thereby determining their differentiation as desired. It is appreciated that this approach may be widely applicable, inter alia as a means for auto transplantation harvesting cells of one cell-type from a patient, modifying their differentiation as desired, and then transplanting them back into the patient. It is further appreciated that this approach may also be utilized to modify cell differentiation in vivo, by transfecting cells in a genetically diseased tissue with a cell-differentiation determining GAM gene, thus stimulating these cells to differentiate appropriately.

[0217] Reference is now made to FIGS. 20A and 20B, simplified diagrams which when taken together illustrate anti-GAM gene therapy mentioned hereinabove with reference to FIG. 19. A utility of novel genes of the present invention is anti-GAM gene therapy, a mode of therapy which allows up regulation of a disease related target-gene of a novel GAM gene of the present invention, by lowering levels of the novel GAM gene which naturally inhibits expression of that target gene. FIG. 20A shows a normal GAM gene, inhibiting translation of a target gene of GAM gene, by binding to a BINDING SITE found in an untranslated region of GAM TARGET RNA, as described hereinabove with reference to FIG. 8.

[0218] FIG. 20B shows an example of anti-GAM gene therapy. ANTI-GAM RNA is short artificial RNA molecule the sequence of which is an anti-sense of GAM RNA. Anti-GAM treatment comprises transfecting diseased cells with ANTI-GAM RNA, or with a DNA encoding thereof. The ANTI-GAM RNA binds the natural GAM RNA, thereby preventing binding of natural GAM RNA to its BINDING SITE. This prevents natural translation inhibition of GAM TARGET RNA by GAM RNA, thereby up regulating expression of GAM TARGET PROTEIN.

[0219] It is appreciated that anti-GAM gene therapy is particularly useful with respect to target genes which have been shown to be under-expressed in association with a specific disease.

[0220] Furthermore, anti-GAM therapy is particularly useful, since it may be used in situations in which technologies known in the art as RNAi and siRNA can not be utilized. As in known in the art, RNAi and siRNA are technologies which offer means for artificially inhibiting expression of a target protein, by artificially designed short RNA segments which bind complementarily to mRNA of said target protein. However, RNAi and siRNA can not be used to directly upregulate translation of target proteins.

[0221] Reference is now made to FIG. 21, which is a table summarizing laboratory validation results that validate efficacy of the bioinformatic gene detection engine 100 of FIG. 9. In order to assess efficacy of the bioinformatic gene detection engine 100, novel genes predicted thereby are preferably divided into 4 DETECTION ACCURACY GROUPS (first column), designated A through D, ranking GAMS from the most probable GAMs to the least probable GAMs, using the scores of HAIRPIN DETECTOR 114 and DICER-CUT LOCATION DETECTOR 116 as follows:

[0222] Group A: The score of the HAIRPIN-DETECTOR is above 0.7, the overall score of the two-phased predictor is above 0.55, and the score of the second phase of the two-phased predictor is above 0.75. Group B: The score of the EDIT-DISTANCE predictor is equal or above 17. In both groups A and B one miRNA is predicted for each hairpin. Group C: The score of the HAIRPIN-DETECTOR is between 0.6 and 0.7, and the overall score of the two-phased predictor is above 0.55. Group D: The score of the HAIRPIN-DETECTOR is between 0.3 and 0.6, and the overall score of the two-phased predictor is above 0.55. In both groups C and D, for each hairpin both sides of the double stranded window are given as output, and are examined in the lab. The groups are mutually exclusive, i.e. in groups A, C and D all hairpins score less than 17 in the EDIT-DISTANCE predictor. It is appreciated that the division into groups is not exhaustive: 344 of the 440 published hairpins, and 4747 of the 8607 novel GAMs of the present invention, belong to one of the groups.

[0223] Sample novel bioinformatically predicted genes, of each of these groups are sent to the laboratory for validation (third column), and the number (fourth column) and percent (fifth column) of successful validation of predicted genes is noted for each of the groups, as well as overall (bottom line). The number of novel genes explicitly specified by present invention belonging to each of the four groups is noted (sixth column), as is the number of novel genes found in intergenic and intronic RNA (seventh and eighth columns). Expected positives (eighth column) is deduced by multiplying the % success in the lab validation by the number of novel GAMs detected in intronic and intergenic RNA databases.

[0224] It is appreciated that the present invention comprises 4747 novel GAM genes, which fall into one of these four detection accuracy groups, and that the bioinformatic prediction is substantiated by a group of 50 novel GAM genes validated by laboratory means, out of 147 genes which were tested in the lab, resulting in validation of an overall 34% accuracy. The top group demonstrated 50% accuracy. Pictures of test-results of specific genes in the abovementioned four groups, as well as the methodology used for validating the expression of predicted genes is elaborated hereinbelow with reference to FIG. 22.

[0225] It is further appreciated that failure to detect a gene in the lab does not necessarily indicate a mistaken bioinformatic prediction. Rather, it may be due to technical sensitivity limitation of the lab test, or because the gene is not expressed in the tissue examined, or at the development phase tested.

[0226] It is still further appreciated that in general these findings are in agreement with the expected bioinformatic accuracy, as describe hereinabove with reference to FIG. 13B: assuming 80% accuracy of the hairpin detector 114 and 80% accuracy of the dicer-cut location detector 116 and 80% accuracy of the lab validation, this would result in 50% overall accuracy of the genes validated in the lab.

[0227] Reference is now made to FIG. 22 which is a picture of laboratory results validating the expression of 25 novel genes detected by the bioinformatic gene detection engine 100, in the four detection accuracy groups A through D described hereinabove with reference to FIG. 21.

[0228] Each row in FIG. 22, designated A through D, correlates to a corresponding one of the four detection accuracy groups A-D, described hereinabove with reference to FIG. 21. In each row, pictures of several genes validated by hybridization of PCR-product southern-blots, are provided, each corresponding to a specific GAM gene, as elaborated hereinbelow. These PCR-product hybridization pictures are designated 1 through 5 in the A group, 1 through 12 in the B group, 1 through 9 in the C group, and 1 through 4 in the D group. In each PCR hybridization picture, 2 lanes are seen: the test lane, designated ‘+’ and the control lane, designated ‘−’. For convenience of viewing the results, all PCR-product hybridization pictures of FIG. 22 have been shrunk x4 vertically. It is appreciated that for each of the tested genes, a clear hybridization band appears in the test (‘+’) lane, but not in the control (‘−’) lane.

[0229] Specifically, FIG. 22 shows pictures of PCR-product hybridization validation by southern-blot, the methodology of which is described hereinbelow, to the following novel GAM genes:

[0230] DETECTION ACCURACY GROUP A: (1) GAM8297.1; (2) GAM5346.1; (3) GAM281.1; (4) GAM8554.1; and (5) GAM2071.1.

[0231] DETECTION ACCURACY GROUP B: (1) GAM7553.1; (2) GAM5385.1; (3) GAM5227.1; (4) GAM7809.1; (5) GAM1032.1; (6) GAM3431.1; (7) GAM7933.1; (8) GAM3298.1; (9) GAM116.1; (10) GAM3418.1 (later published by other researchers as MIR23); (11) GAM3499.1; (12) GAM3027.1; (13) GAM7080.1; (14) GAM895.1; and (15) GAM2608.1, (16) GAM20, and (17) GAM21.

[0232] DETECTION ACCURACY GROUP C: (1) GAM3770.1; (2) GAM1338.1; (3) GAM7957.1; (4) GAM391.1; (5) GAM 8678.1; (6) GAM2033.1; (7) GAM7776.1; (8) GAM8145.1; and (9) GAM 633.1.

[0233] DETECTION ACCURACY GROUP D: (1) GAM19; (2) GAM8358.1; (3) GAM3229.1; and (4) GAM7052.1.

[0234] In addition to the PCR detection, the following GAMs were cloned and sequenced: GAM1338.1, GAM7809.1, GAM116.1, GAM3418.1 (later published by other researchers as M123), GAM3499.1, GAM3027.1, GAM7080.1, and GAM21.

[0235] The PCR-product hybridization validation methodology used is briefly described as follows. In order to validate the expression of predicted novel GAM genes, and assuming that these novel genes are probably expressed at low concentrations, a PCR product cloning approach was set up through the following strategy: two types of cDNA libraries designated “One tailed” and “Ligation” were prepared from frozen HeLa S100 extract (4c Biotech, Belgium) size fractionated RNA. Essentially, Total S100 RNA was prepared through an SDS-Proteinase K incubation followed by an acid Phenol-Chloroform purification and Isopropanol precipitation. Alternatively, total HeLa RNA was also used as starting material for these libraries.

[0236] Fractionation was done by loading up to 500 μg per YM100 Amicon Microcon column (Millipore) followed by a 500 g centrifugation for 40 minutes at 4° C. Flowthrough “YM100” RNA consisting of about ¼ of the total RNA was used for library preparation or fractionated further by loading onto a YM30 Amicon Microcon column (Millipore) followed by a 13,500 g centrifugation for 25 minutes at 4° C. Flowthrough “YM30” was used for library preparation as is and consists of less than 0.5% of total RNA. For the both the “ligation” and the “One-tailed” libraries RNA was dephosphorilated and ligated to an RNA (lowercase)-DNA (UPPERCASE) hybrid 5′-phosphorilated, 3′ idT blocked 3′-adapter (5′-P-uuuAACCGCATTCTC-idT-3′ Dharmacon # P-002045-01-05) (as elaborated in Elbashir et al 2001) resulting in ligation only of RNase III type cleavage products. 3′-Ligated RNA was excised and purified from a half 6%, half 13% polyacrylamide gel to remove excess adapter with a Nanosep 0.2 μM centrifugal device (Pall) according to instructions, and precipitated with glycogen and 3 volumes of Ethanol. Pellet was resuspended in a minimal volume of water. For the “ligation” library a DNA (UPPERCASE)-RNA (lowercase) hybrid 5′-adapter (5′-TACTAATACGACTCACTaaa-3′ Dharmacon # P-002046-01-05) was ligated to the 3′-adapted RNA, reverse transcribed with “EcoRI-RT”: (5′-GACTAGCTGGAATTCAAGGATGCGGTTAAA-3′), PCR amplified with two external primers essentially as in Elbashir et al 2001 except that primers were “EcoRI-RT” and “PstI Fwd” (5′-CAGCCAACGCTGCAGATACGACTCACTAAA-3′). This PCR product was used as a template for a second round of PCR with one hemispecific and one external primer or with two hemispecific primers.

[0237] For the “One tailed” library the 3′-Adapted RNA was annealed to 20 pmol primer “EcoRI RT” by heating to 70° C. and cooling 0.1° C./sec to 30° C. and then reverse transcribed with Superscript II RT (According to instructions, Invitrogen) in a 20 μl volume for 10 alternating 5 minute cycles of 37° C. and 45° C. Subsequently, RNA was digested with 1 μl 2M NaOH, 2 mM EDTA at 65° C. for 10 minutes. cDNA was loaded on a polyacrylamide gel, excised and gel-purified from excess primer as above (invisible, judged by primer run alongside) and resuspended in 13 μl of water. Purified cDNA was then oligo-dC tailed with 400 U of recombinant terminal transferase (Roche molecular biochemicals), 1 μl 100 μM dCTP, 1 μl 15 mM CoCl₂, and 4 μl reaction buffer, to a final volume of 20 μl for 15 minutes at 37° C. Reaction was stopped with 2 μl 0.2M EDTA and 15 μl 3M NaOAc pH 5.2. Volume was adjusted to 150 μl with water, Phenol: Bromochloropropane 10:1 extracted and subsequently precipitated with glycogen and 3 volumes of Ethanol. C-tailed cDNA was used as a template for PCR with the external primers “T3-PstBsg(G/I)₁₈” (5′-AATTAACCCTCACTAAAGGCTGCAGGTGCAGGIGGGIIGGGIIGGGIIGN-3′ where I stands for Inosine and N for any of the 4 possible deoxynucleotides), and with “EcoRI Nested” (5′-GGAATTCAAGGATGCGGTTA-3′). This PCR product was used as a template for a second round of PCR with one hemispecific and one external primer or with two hemispecific primers.

[0238] Hemispecific primers were constructed for each predicted GAM by an in-house program designed to choose about half of the 5′ or 3′ sequence of the GAM corresponding to a TM° of about 30′-34° C. constrained by an optimized 3′ clamp, appended to the cloning adapter sequence (for “One-tailed” libraries 5′-GGNNGGGNNG on the 5′ end of the GAM, or TTTAACCGCATC-3′ on the 3′ end of the GAM. For “Ligation” libraries the same 3′ adapter and 5′-CGACTCACTAAA on the 5′ end). Consequently, a fully complementary primer of a TM° higher than 60° C. was created covering only one half of the GAM sequence permitting the unbiased elucidation by sequencing of the other half.

Confirmation of GAM Sequence Authenticity of PCR Products:

[0239] SOUTHERN BLOT: PCR-product sequences were confirmed by southern blot (Southern EM. Biotechnology.1992; 24:122-39.(1975)) and hybridization with DNA oligonucleotide probes synthesized against predicted GAMs. Gels were transferred onto a Biodyne PLUS 0.45 μm, (Pall) positively charged nylon membrane and UV cross-linked. Hybridization was performed overnight with DIG-labeled probes at 42° C. in DIG Easy-Hyb buffer (Roche). Membranes were washed twice with 2×SSC and 0.1% SDS for 10 min. at 42° C. and then washed twice with 0.5×SSC and 0.1% SDS for 5 min at 42° C. The membrane was then developed by using a DIG luminescent detection kit (Roche) using anti-DIG and CSPD reaction, according to the manufacturer's protocol. All probes were prepared according to the manufacturers (Roche Molecular Biochemicals) protocols: Digoxigenin (DIG) labeled antisense transcripts was prepared from purified PCR products using a DIG RNA labeling kit with T3 RNA polymerase. DIG labeled PCR was prepared by using a DIG PCR labeling kit. 3′-DIG-tailed oligo ssDNA antisense probes, containing DIG-dUTP and dATP at an average tail length of 50 nucleotides were prepared from 100 pmole oligonucleotides with the DIG Oligonucleotide Labeling Kit.

[0240] CLONING: PCR products were inserted into pGEM-T (Promega) or pTZ57 (MBI Fermentas), transformed into competent JM109 E. coli (Promega) and sown on LB-Amp plates with IPTG/Xgal. White and light-blue colonies were transferred to duplicate gridded plates, one of which was blotted onto a membrane (Biodyne Plus, Pall) for hybridization with DIG tailed oligo probes (according to instructions, Roche) corresponding to the expected GAM. Plasmid DNA from positive colonies was sequenced.

[0241] Reference is now made to FIG. 23A, which is a schematic representation of a novel human GR gene, herein designated GR12731, located on chromosome 9, comprising 2 known MIR genes—MIR24 and MIR23, and 2 novel GAM genes, herein designated GAM22 and GAM116, all marked by solid black boxes. FIG. 23A also schematically illustrates 6 non-GAM hairpin sequences, and one non-hairpin sequence, all marked by white boxes, and serving as negative controls. By ‘non-GAM hairpin sequences’ is meant sequences of a similar length to known MIR PRECURSOR sequences, which form hairpin secondary folding pattern similar to MIR PRECURSOR hairpins, and yet which are assessed by the bioinformatic gene detection engine 100 not to be valid GAM PRECURSOR hairpins. It is appreciated that FIG. 23A is a simplified schematic representation, reflecting only the order in which the segments of interest appear relative to one another, and not a proportional distance between the segments.

[0242] Reference is now made to FIG. 23B, which is a schematic representation of secondary folding of each of the MIRs and GAMs of GR GR12731—MIR24, M13, GAM22 and GAM116, and of the negative control non-GAM hairpins, herein designated N2, N3, N116, N4, N6 and N7. NO is a non-hairpin control, of a similar length to that of known MIR PRECURSOR hairpins. It is appreciated that the negative controls are situated adjacent to and in between real MIR and GAM genes, and demonstrates similar secondary folding patterns to that of known MIRs and GAMs.

[0243] Reference is now made to FIG. 23C, which is a picture of laboratory results of a PCR test upon a YM100 “ligation”-library, utilizing specific primer sets directly inside the boundaries of the hairpins. Due to the nature of the library the only PCR amplifiable products can result from RNaseRIII type enzyme cleaved RNA, as expected for legitimate hairpin precursors presumed to be produced by DROSHA (Lee et al, Nature 425 415-419, 2003). FIG. 23C demonstrates expression of hairpin precursors of known MIR genes—MIR23 and M4, and of novel bioinformatically detected GAM22 and GAM116 genes predicted bioinformatically by a system constructed and operative in accordance with a preferred embodiment of the present invention. FIG. 23C also shows that none of the 7 controls (6 hairpins designated N2, N3, N23, N4, N6 and N7 and 1 non-hairpin sequence designated NO) were expressed. N116 is a negative control sequence partially overlapping GAM116.

[0244] In the picture, test lanes including template are designated ‘+’ and the control lane is designated ‘−’. It is appreciated that for each of the tested hairpins, a clear PCR band appears in the test (‘+’) lane, but not in the control (‘−’) lane.

[0245] FIGS. 23A through 23C, when taken together validate the efficacy of the bioinformatic gene detection engine in: (a) detecting known MIR genes; (b) detecting novel GAM genes which are found adjacent to these MIR genes, and which despite exhaustive prior biological efforts and bioinformatic detection efforts, went undetected; (c) discerning between GAM (or MIR) PRECURSOR hairpins, and non-GAM hairpins.

[0246] It is appreciated that the ability to discern GAM-hairpins from non-GAM-hairpins is very significant in detecting GAM genes, since hairpins in general are highly abundant in the genome. Other MIR prediction programs have not been able to address this challenge successfully.

[0247] Reference is now made to FIG. 24A which is an annotated sequence of an EST comprising a novel gene detected by the gene detection system of the present invention. FIG. 24A shows the nucleotide sequence of a known human non-protein coding EST (Expressed Sequence Tag), identified as EST72223. The EST72223 clone obtained from TIGR database (Kirkness and Kerlavage, 1997) was sequenced to yield the above 705 bp transcript with a polyadenyl tail. It is appreciated that the sequence of this EST comprises sequences of one known miRNA gene, identified as MIR98, and of one novel GAM gene, referred to here as GAM25, detected by the bioinformatic gene detection system of the present invention and described hereinabove with reference to FIG. 9.

[0248] The sequences of the precursors of the known MIR98 and of the predicted GAM25 are in bold, the sequences of the established miRNA 98 and of the predicted miRNA GAM25 are underlined.

[0249] Reference is now made to FIGS. 24B and 24C that are pictures of laboratory results, which when taken together demonstrate laboratory confirmation of expression of the bioinformatically detected novel gene of FIG. 24A.

[0250] In two parallel experiments, an enzymatically synthesized capped, EST72223 RNA transcript, was incubated with Hela S100 lysate for 0 minutes, 4 hours and 24 hours. RNA was subsequently harvested, run on a denaturing polyacrylamide gel, and reacted with a 102 nt and a 145 nt antisense MIR98 and GAM25 transcript probes respectively. The Northern blot results of these experiments demonstrated processing of EST72223 RNA by Hela lysate (lanes 2-4, in 24B and 24C), into ˜80 bp and 22 bp segments, which reacted with the MIR98 probe (24B), and into 100 bp and 24 bp segments, which reacted with the GAM25 probe (24C). These results demonstrate the processing of EST72223 by Hela lysate into MIR98 and GAM25. It is also appreciated from FIG. 24C (lane 1) that Hela lysate itself reacted with the GAM25 probe, in a number of bands, including a ˜100 bp band, indicating that GAM25-precursor is endogenously expressed in Hela cells. The presence of additional bands, higher than 100 bp in lanes 5-9 probably corresponds to the presence of nucleotide sequences in Hela lysate, which contain the GAM25 sequence.

[0251] In addition, in order to demonstrate the kinetics and specificity of the processing of MIR98 and GAM25 miRNA precursors into their respective miRNA's, transcripts of MIR98 and of the bioinformatically predicted GAM25, were similarly incubated with Hela S100 lysate, for 0 minutes, 30 minutes, 1 hour and 24 hours, and for 24 hours with the addition of EDTA, added to inhibit Dicer activity, following which RNA was harvested, run on a polyacrylamide gel and reacted with MIR98 and GAM25 probes. Capped transcripts were prepared for in-vitro RNA cleavage assays with T7 RNA polymerase including a m⁷G(5′)ppp(5′) G-capping reaction using the m Message m Machine kit (Ambion). Purified PCR products were used as template for the reaction. These were amplified for each assay with specific primers containing a T7 promoter at the 5′ end and a T3 RNA polymerase promoter at the 3′end. Capped RNA transcripts were incubated at 30° C. in supplemented, dialysis concentrated, Hela S100 cytoplasmic extract (4C Biotech, Seneffe, Belgium). The Hela S100 was supplemented by dialysis to a final concentration of 20 mM Hepes, 100 mM KCl, 2.5 mM MgCl₂, 0.5 mM DTT, 20% glycerol and protease inhibitor cocktail tablets (Complete mini Roche Molecular Biochemicals). After addition of all components, final concentrations were 100 mM capped target RNA, 2 mM ATP, 0.2 mM GTP, 500 U/ml RNasin, 25 μg/ml creatine kinase, 25 mM creatine phosphate, 2.5 mM DTT and 50% S100 extract. Proteinase K, used to enhance Dicer activity (Zhang H, Kolb FA, Brondani V, Billy E, Pilipowicz W. Human Dicer preferentially cleaves dsRNAs at their termini without a requirement for ATP.EMBO J. 2002 Nov. 1; 21(21):5875-85) was dissolved in 50 mM Tris-HCl pH 8, 5 mM CaCl₂, and 50% glycerol, was added to a final concentration of 0.6 mg/ml. Cleavage reactions were stopped by the addition of 8 volumes of proteinase K buffer (200 Mm Tris-Hcl, pH 7.5, 25 m M EDTA, 300 mM NaCl, and 2% SDS) and incubated at 65° C. for 15 min at different time points (0, 0.5, 1, 4, 24 h) and subjected to phenol/chloroform extraction. Pellets were dissolved in water and kept frozen. Samples were analyzed on a segmented half 6%, half 13% polyacrylamide 1×TBE-7M Urea gel.

[0252] The Northern blot results of these experiments demonstrated an accumulation of a ˜22 bp segment which reacted with the M18 probe, and of a ˜24 bp segment which reacted with the GAM25 probe, over time (lanes 5-8). Absence of these segments when incubated with EDTA (lane 9), which is known to inhibit Dicer enzyme (Zhang et al., 2002), supports the notion that the processing of MIR98 and GAM25 miRNA's from their precursors is mediated by Dicer enzyme, found in Hela lysate. The molecular sizes of EST72223, MIR-98 and GAM25 are indicated by arrows.

[0253] Transcript products were 705 nt (EST72223), 102 nt (MIR98), 125 nt (GAM25) long.EST72223 was PCR amplified with T7-EST 72223 forward primer:

5′-TAATACGACTCACTATAGGCCCTTATTAGAGGATTCTGCT-3′

[0254] and T3-EST72223 reverse primer:

5′-AATTAACCCTCACTAAAGGTTTTTTTTTCCTGAGACAGAGT-3′.

[0255] MIR98 was PCR amplified using EST72223 as a template with T7MIR8 forward primer:

5′-TAATACGACTCACTATAGGGTGAGGTAGTAAGTTGTATTGTT-3′

[0256] and T3MIR98 reverse primer:

5′-AATTAACCCTCACTAAAGGGAAAGTAGTAAGTTGTATAGTT-3′.

[0257] GAM25 was PCR amplified using EST72223 as a template with GAM25 forward primer:

5′-AATTAACCCTCACTAAAGGCCTGAGACAGAGTCTTGCTC-3′.

[0258] To validate the identity of the band shown by the lower arrow in FIG. 24C, a RNA band parallel to a marker of 24 base was excised from the gel and cloned as in Elbashir et al (2001) and sequenced. 90 clones corresponded to the sequence of GAM25, three corresponded to GAM25* (the opposite arm of the hairpin with a 1-3 nucleotide 3′ overhang) and two to the hairpin-loop.

[0259] GAM25 was also validated endogenously by sequencing from both sides from a HeLa YM100 total-RNA “ligation” libraries, utilizing hemispecific primers as detailed in FIG. 22.

[0260] Taken together, these results validate the presence and processing of a novel MIR gene product, GAM25, which was predicted bioinformatically. The processing of this novel gene product, by Hela lysate from EST72223, through its precursor, to its final form was similar to that observed for known gene, MIR98.

[0261] It is appreciated that the data presented in FIGS. 24A, 24B and 24C when taken together validate the function of the bioinformatic gene detection engine 100 of FIG. 9. FIG. 24A shows a novel GAM gene bioinformatically detected by the bioinformatic gene detection engine 100, and FIGS. 24B and 24C show laboratory confirmation of the expression of this novel gene. This is in accord with the engine training and validation methodology described hereinabove with reference to FIG. 10.

[0262] It is appreciated by persons skilled in the art that the present invention is not limited by what has been particularly shown and described hereinabove. Rather the scope of the present invention includes both combinations and subcombinations of the various features described hereinabove as well as variations and modifications which would occur to persons skilled in the art upon reading the specifications and which are not in the prior art.

### DETAILED DESCRIPTION OF LARGE TABLES

[0263] Table 1 comprises data relating to the source and location of novel GAM genes of the present invention, and contains the following fields:

| | |
|---|---|
| GENE NAME | Rosetta Genomics Ltd. gene nomenclature (see |
| | below) |
| GAM SEQ-ID | GAM Seq-ID, as in the Sequence Listing |
| PRECUR SEQ-ID | GAM precursor Seq-ID, as in the Sequence Listing |
| ORGANISM | Abbreviated (hsa = Homo sapiens) |
| CHR | Chromosome encoding the GAM gene |
| CHROMOSOME | Offset of GAM precursor sequence on chromosome |
| OFFSET | |
| SOURCE_REF-ID | Accession number of source sequence |
| SOURCE_OFFSET | Offset of GAM precursor sequence on source |
| | sequence |
| SRC | Source-type of GAM precursor sequence (see |
| | below) |
| GAM ACC | GAM Prediction Accuracy Group (see below); |

[0264] Table 2 comprises data relating to GAM precursors of novel GAM genes of the present invention, and contains the following fields:

| | |
|---|---|
| GENE NAME | Rosetta Genomics Ltd. gene nomenclature (see below) |
| PRECUR | GAM precursor Seq-ID, as in the Sequence Listing |
| SEQ-ID | |
| PRECURSOR | GAM precursor nucleotide sequence (5′ to 3′) |
| SEQUENCE | |
| FOLDED- | Schematic representation of the GAM folded precursor, |
| PRECURSOR | beginning 5′ end (beginning of upper row) to 3′ end |
| | (beginning of lower row), where the hairpin loop is |
| | positioned at the right part of the draw. |
| SRC | Source-type of GAM precursor sequence (see below) |
| GAM ACC | GAM Prediction Accuracy Group (see below); |

[0265] Table 3 comprises data relating to GAM genes of the present invention, and contains the following fields:

TABLE 3
Genes

| | |
|---|---|
| GENE NAME | Rosetta Genomics Ltd. gene nomenclature |
| | (see below) |
| GAM SEQ-ID; | GAM Seq-ID, as in the Sequence Listing |
| GENE_SEQUENCE | Sequence (5′ to 3′) of the mature, ‘diced’ GAM |
| | gene |
| PRECUR SEQ-ID | GAM precursor Seq-ID, as in the Sequence |
| | Listing |
| SOURCE_REF-ID | Accession number of the source sequence |
| SRC | Source-type of GAM precursor sequence |
| | (see below) |
| GAM ACC | GAM Prediction Accuracy Group (see below); |

[0266] Table 4 comprises data relating to target-genens and binding sites of GAM genes of the present invention, and contains the following fields:

| | |
|---|---|
| GENE NAME | Rosetta Genomics Ltd. gene nomenclature (see below) |
| GAM SEQ-ID; | GAM Seq-ID, as in the Sequence Listing |
| TARGET | GAM target protein name |
| #BS | Number of binding sites of GAM onto Target |
| TARGET SEQ-ID | Target binding site Seq-ID, as in the Sequence Listing |
| TARGET REF-ID | Target accession number (GenBank) |
| UTR | Untranslated region of binding site/s (3′ or 5′) |
| UTR OFFSET | Offset of GAM binding site relative to UTR |
| TAR-BINDING-SITE-SEQ | Nucleotide sequence (5′ to 3′) of the target binding site |
| BINDING-SITE-DRAW | Schematic representation of the binding site, upper row |
| | present 5′ to 3′ sequence of the GAM, lower row present 3′ |
| | to 5′ sequence of the target. |
| SRC | Source-type of GAM precursor sequence (see below) |
| GAM ACC | GAM Prediction Accuracy Group (see below); |
| BS ACC | Binding-Site Accuracy Group (see below) |
| TAR ACC | Target Accuracy Group (see below); |

[0267] Table 5 comprises data relating to functions and utilities of novel GAM genes of the present invention, and containing the following fields:

| | |
|---|---|
| GENE NAME | Rosetta Genomics Ltd. gene nomenclature (see |
| | below) |
| TARGET | GAM target protein name |
| GENE_SEQUENCE | Sequence (5′ to 3′) of the mature, ‘diced’ GAM |
| | gene |
| GENE-FUNCTION | Description of the GAM functions and utilities |
| SRC | Source-type of GAM precursor sequence (see |
| | below) |
| GAM ACC | GAM Prediction Accuracy Group (see below) |
| TAR ACC | Target Accuracy Group (see below) |
| TAR DIS | Target Accuracy Group (see below); |

[0268] Table 6 comprises a bibliography of references supporting the functions and utilities of novel GAM genes of the present invention, and contains the following fields:

TABLE 6
Gene Function References - Bibliography.

| | |
|---|---|
| GENE NAME | Rosetta Genomics Ltd. gene nomenclature (see below) |
| TARGET | GAM target protein name |
| REFERENCES | list of references relating to the target gene, |
| SRC | Source-type of GAM precursor sequence (see below) |
| GAM ACC | GAM Prediction Accuracy Group (see below) |
| TAR ACC | Target Accuracy Group (see below); and |

[0269] Table 7 comprises data relating to novel GR genes of the present inventions, and contains the following fields:

| | |
|---|---|
| GENE NAME | Rosetta Genomics Ltd. GR gene |
| | nomenclature |
| SOURCE START_OFFSET | Start-offset of GR gene relative to |
| | source sequence |
| SOURCE END_OFFSET | End-offset of GR gene relative to |
| | source sequence |
| SOURCE_REF-ID | Accession number of the source sequence |
| GAMS_ID'S_IN_GR | List of the GAM genes in the GR cluster |
| SRC | Source-type of GAM precursor sequence |
| | (see below) |
| GR ACC | GR Prediction Accuracy Group |
| | (see below). |

[0270] The following conventions and abbreviations are used in the tables:

[0271] GENE NAME is a RosettaGenomics Ltd. gene nomenclature. All GAMs are designated by GAMx.1 or GAMx.2 where x is the unique SEQ-ID. If the GAM precursor has a single prediction for GAM, it is designated by GAMx.1. Otherwise, the higher accuracy GAM prediction is designated by GAMx.1 and the second is designated by GAMx.2.

[0272] SRC is a field indicating the type of source in which novel genes were detected, as one of the following options: (1) TIGR Intergenic, (3) EST or Unigene Intron Intergenic, (4) TIGR Intron, (6) DNA Intergenic, (7) DNA Intron, (8) DNA Exon. Sequences are based on NCBI Build33 of the human genome. TIGR source is based on “Tentative Human Consensus” (THC) The Institute for Genomic Research which are not found in mRNA Intron/Exon according to NCBI GenBank genome annotation.

[0273] GAM ACC (GAM Prediction Accuracy Group) of gene prediction system: A—very high accuracy, B—high accuracy, C— moderate accuracy, D-low accuracy, as described hereinbelow with reference to FIG. 21.

[0274] BS ACC (Binding-Site Accuracy Group) indicates accuracy of total GAM-target binding prediction, considering the number of binding sites a GAM has on the target's UTR; A—very high accuracy, B—high accuracy, C—moderate accuracy, as described hereinbelow with reference to FIG. 14B.

[0275] TAR ACC (Target Accuracy Group) indicates accuracy of target binding site prediction, A—very high accuracy, B—high accuracy, C— moderate accuracy, as described hereinbelow with reference to FIG. 14B.

[0276] TAR DIS (Target Disease Relation Group) ‘A’ indicates if the target gene is known to have a specific causative relation to a specific known disease, based on the OMIM database. It is appreciated that this is a partial classification emphasizing genes which are associated with ‘single gene’ diseases etc. All genes of the present invention ARE associated with various diseases, although not all are in ‘A’ status.

[0277] GR ACC (GR Prediction Accuracy Group) indicates the maximum gene prediction accuracy among GAM genes of the cluster, A—very high accuracy, B—high accuracy, C— moderate accuracy, as described hereinbelow with reference to FIG. 14B.

The application's sequence listing, which the Patent Office published only in electronic form, follows.

SEQUENCE LISTING (548156 sequences)

SEQ ID NO: 1 - RNA, 73 nt, Human
aaaaagacauuggacuaaaugcuaauauauggaauagaagauuucccaauguuaauuuaguuaacaacuuuuu

SEQ ID NO: 2 - RNA, 62 nt, Human
aaaaagguccugguucacccuggagagucaccuuuccugggccaccggauuugggccuuuuu

SEQ ID NO: 3 - RNA, 78 nt, Human
aaaaccaaaaaacauauauauaauggcuucucugucaccgcuggugacaauaggucuuaaugcaaguuuucauguuuu

SEQ ID NO: 4 - RNA, 78 nt, Human
aaaagcuggauugcugauuuuugcuaauaaacaagauguuaaagaaugcaugacuguagcagaaaucucccaguuuuu

SEQ ID NO: 5 - RNA, 85 nt, Human
aaaaucauaaggacaaaaaucugcugaugcugugagauaaaaccgaugauucugcagucaauuuguuuuguaccugugugguuuu

SEQ ID NO: 6 - RNA, 116 nt, Human
aaaaugcacaucaccaccuacuugaguguugaggauucaauuaguuaauguacuucaaauaaucauguaguaaaugcucaguaguguguguguguguguguguguguguguauuuu

SEQ ID NO: 7 - RNA, 100 nt, Human
aaacagacugggccaauguccacaaagaauuccuggucagcaccaccgauguccaaaggugcaauaucaaggaagggcaggcgugauggcuuauuuguuu

SEQ ID NO: 8 - RNA, 72 nt, Human
aaacaucauuuuaaaaugucuucagcauuuuuugaauagacguauucaaacauauucugaacauugauguuu

SEQ ID NO: 9 - RNA, 77 nt, Human
aaagagguguagaaucuggguugguccuucaaggcagcucauugcagcuacuggccuccagugaaacaggucucuuu

SEQ ID NO: 10 - RNA, 73 nt, Human
aaagccacagguaagaauucucauuugcuaaauuacaaugauuggugcaaauuaugccuaugacauuggcuuu

SEQ ID NO: 11 - RNA, 79 nt, Human
aaaggaugaaaagguggugucauguuuuggggagaaucuuacuucucaaauggaaauugcacuuuuugcugaauccuuu

SEQ ID NO: 12 - RNA, 87 nt, Human
aaaggcccuuccgguuuuggucaaggaugguagcccaacguucacauucuuaugaaccagguaaccccaaggucgggacggguuuuu

SEQ ID NO: 13 - RNA, 80 nt, Human
aaaggggagacuuaaaauuugcuccaaugucaguucucuacagaugagaaccaauacuacagcaaguaagucuugccuuu

SEQ ID NO: 14 - RNA, 108 nt, Human
aaagggugagauaauguucccacaguguaucauuagugugaugaguuuaucucuuuaaagccucacaaccugcugauaugcugugguuuuucuugguccuaucucuuu

SEQ ID NO: 15 - RNA, 80 nt, Human
aaaggugggugcagaaucuguaugggaguuccaaaucucuuuugugcuucaugccaauuaccugcaguuuuacuaccuuu

SEQ ID NO: 16 - RNA, 79 nt, Human
aaagucuugugauuuccucucaucuuuuagagauuccugccaaaaauucuaccaagcagagauggaggagcucgacuuu

SEQ ID NO: 17 - RNA, 79 nt, Human
aaagucuugugauuuccucucaucuuuuagagauuccugccaaaaauucuaccaagcagagauggaggagcuugacuuu

SEQ ID NO: 18 - RNA, 111 nt, Human
aaaguuauuuuggguguaaguggugaaugaaugugaaggccuaggacauuacuguacacuacuauagacuuuauaaacauuguacacuuagacuacacuaaacauaauuuu

SEQ ID NO: 19 - RNA, 96 nt, Human
aaaugcagguuuacaaagaugagcaggugguggugauaaaggauaaauacccaaaggcccguuaccauuggcuggucuuaccguggaccuccauuu

SEQ ID NO: 20 - RNA, 79 nt, Human
aaauguggaauacuggcaguguaaaagucuuaaacuaacuuuaaagcuaacaaaucaaaggcacaguauuaacacauuu

SEQ ID NO: 21 - RNA, 78 nt, Human
aaauuuuuccucuuauuugcaugaaaggacaagacacuguuaugcccuguccuaaaugugaagacagagguugaauuu

SEQ ID NO: 22 - RNA, 90 nt, Human
aaauuuuugggggagcgggggaaggaguuaaugaaacuguauugcacaaugcucugaucaauccuucuuuuucucuuuugcccacaauuu

SEQ ID NO: 23 - RNA, 90 nt, Human
aacaaggcaaaauaucugccuuauacaugucacaaguuauaaagauugagagcuguauuuagguaaaugcguuguauguuuugucauguu

SEQ ID NO: 24 - RNA, 65 nt, Human
aacaccccaugccaucugacagaugggaaccuaggggaccccuucgucagagaaucugggagguu

SEQ ID NO: 25 - RNA, 98 nt, Human
aacagacugggccaauguccacaaagaauuccuggucagcaccaccgauguccaaaggugcaauaucaaggaagggcaggcgugauggcuuauuuguu

SEQ ID NO: 26 - RNA, 94 nt, Human
aacagagauuuaccgcauuguuucucagaagcaaaugucagacagacgcgaaaaugacaugucuccaagcaacaaugugguuccuauucauguu

SEQ ID NO: 27 - RNA, 72 nt, Human
aacagaucucaaagaucucaucauuuuugacaaacagucaucacaaaggaugagacagaauuugaaauuguu

SEQ ID NO: 28 - RNA, 97 nt, Human
aacagggcuucucgucaucacuugcagcgugugagcuuccaaauaagccgccauuucuuuggaaaacgcacgcacuuaggcauggcgaucuccuguu

SEQ ID NO: 29 - RNA, 82 nt, Human
aacaguucuggccugagaccuggauugagccuuggcagacuucuugucuaaauguuggccauucagucucaggcccucuguu

SEQ ID NO: 30 - RNA, 103 nt, Human
aacauacagaagaagcaaggaaauuacaguuagaggucacaacugcccgaagccaguucuaaauuuuuaugaagccaauuucccugcaaaugucauggauguu

SEQ ID NO: 31 - RNA, 77 nt, Human
aacccagacgccaugaaagcugcauggccuggagaaaaagcugaaccaggcccuuuuggaucuucaugcccuggguu

SEQ ID NO: 32 - RNA, 81 nt, Human
aacccagcagcucuccauguccacagcugauuuccagaggauggaagaagucaggaaacuugggacaccgcugcugagguu

SEQ ID NO: 33 - RNA, 104 nt, Human
aaccucaucccagccaagagcuucuuaaucuuugucucauucccucaccaaccuugggagauagacugauugggaacugaaguucaaagagguugaaugggguu

SEQ ID NO: 34 - RNA, 99 nt, Human
aaccuccagcacaccaccaaugaauagcaguaauaccagcauaauugucugcaguucugcugagauacgugcucuauuuuauuggcuuggcuguagguu

SEQ ID NO: 35 - RNA, 97 nt, Human
aacgaacuccuggaugucuauguagaugucucauaauuuaggccaaugcuguacaacuucauguggcaucauccacauagaaugaauagggguuguu

SEQ ID NO: 36 - RNA, 79 nt, Human
aacgagagcagaaggcagaagccagugccauccuuacgcuccaaacagcuagaugcaggacuugcccguuccucucguu

SEQ ID NO: 37 - RNA, 71 nt, Human
aacgucaucagcuuccuaaccauguuuaagaggaauaacuucaugaacauuuugcccugaacugaagaguu

SEQ ID NO: 38 - RNA, 88 nt, Human
aacucacaacccuaccaaugcuacucucaacaaguucacagagggaacuuaaggaaguaugggagugacggacuuuggguucggaguu

SEQ ID NO: 39 - RNA, 66 nt, Human
aacucccugugggcucccuuuggggguguggcccaccugcacaucggaggccucacaucgggaguu

SEQ ID NO: 40 - RNA, 70 nt, Human
aacugaacaagaggaguauguauucccgugugccagagugccaggucaccacauacuauuauguuggguu

SEQ ID NO: 41 - RNA, 69 nt, Human
aacugaggcgcagacagguucgguuaccugcaauagaaugcagccaacccgaauuugagccccugaguu

SEQ ID NO: 42 - RNA, 94 nt, Human
aacuucagaucagacugaggauguccuggaggcuguagcugcaaagcuggaucuuccagaugacuugauuggauacuuuagucuauucuuaguu

SEQ ID NO: 43 - RNA, 106 nt, Human
aacuuccaagugggcaaguaauuccaaugauuaguuuuuucccccaaguuugacuugggaagcuggggggaaguuaauuaugaagcaagggguguaccaggggguu

SEQ ID NO: 44 - RNA, 61 nt, Human
aacuugcguaauggacccacccuugagcgaauuucauccucgcgugggucuuaacacaguu

SEQ ID NO: 45 - RNA, 77 nt, Human
aacuuuaaugauuauuuauucagacccuggaaaaccacacuauaaaauagggcacuggaucacaaguucguuugguu

SEQ ID NO: 46 - RNA, 126 nt, Human
aacuuucagcugcccccuuuucccuauaaaaguauacuuaucugcaguuucccuugucaagaguauuaaaggucugcauaaaguaaaagcuaauacuauccugagggagggcuucagugcaaaguu

SEQ ID NO: 47 - RNA, 88 nt, Human
aacuuuuguucaguugagaugauugugaaacuagguaucuuucauucugacuccuaguuuaacauuuaauuuugacucccaaugaguu

SEQ ID NO: 48 - RNA, 97 nt, Human
aagaaagaggcaguauaguauagugguuaagagcaaggucucuggaguuuugugaccuugagcaaguuaccagaucucucugugccgcaacuuucuu

SEQ ID NO: 49 - RNA, 73 nt, Human
aagaaaggacgggguuucuaguugcuaagauuuugccaaacauggcuacagaacugguaaacaaaccuuucuu

SEQ ID NO: 50 - RNA, 109 nt, Human
aagaagaaaaccaaacaagaugucuggacucuuuuaaauggaagcaaagaugacuuccucauauaugauagauguggccgucuuguauaucaucuugguuugccuuuuu

SEQ ID NO: 51 - RNA, 90 nt, Human
aagaauggcuuuuuauucauaugugauaaaaagauaagucauuugguaacaccuuugaaccuguuuucaaaauaaugaaaaguuucucuu

SEQ ID NO: 52 - RNA, 99 nt, Human
aagaccugagagaauguaagaacauauagaacauccaaaauaagacauaucuuugguuguuuuaaaaccuuuuuguuugccucauuuucuucugugcuu

SEQ ID NO: 53 - RNA, 79 nt, Human
aagacuagggauuaucuacaccuucacuuugggcaauagcuauuuccuaaaggaauggaaaaaggugauuuugcuacuu

SEQ ID NO: 54 - RNA, 64 nt, Human
aagacugagcugugaauuuguccccucaguagaggaucacccuggccaaguuccaguucaucuu

SEQ ID NO: 55 - RNA, 82 nt, Human
aagagacuguccuucccucaauguauauucuuggcacccuuguugaaaaugaguucacaauagauguauggauuuguuucuu

SEQ ID NO: 56 - RNA, 95 nt, Human
aagagacuuuguagaugugauuaaauuaaggcucuugagauugggagauuauccuggauuaucagaguaggcuugauguaaucacaagaguccuu

SEQ ID NO: 57 - RNA, 85 nt, Human
aagaggagauaccguagucuagaugucuugagguagaauauaugauggaccacauaguuuaagauuacaagguacuuucccucuu

SEQ ID NO: 58 - RNA, 91 nt, Human
aagaggguggaaccaguguaaggaaauguggaggaggcagaauuucacuuuggacucuucacuccuccuuuucuucauuauuuaucuucuu

SEQ ID NO: 59 - RNA, 110 nt, Human
aagauaccuccuuagaaggcucaucauuagcugaaaguuugagagcugcagcagaagcggcuguaucacagacuggauuuaguuaugaugaaaauacuggacuguauuuu

SEQ ID NO: 60 - RNA, 88 nt, Human
aagauccaggagcagcucugccugguccaggacuccaaucguccaugauguuccugcuaugacuaggcagacuguaucccugagucuu

SEQ ID NO: 61 - RNA, 85 nt, Human
aagauuguuucagggugucucagggucccucuguaccaucugcuguggaaugcaggacccucugugacauucuuuaucccuucuu

SEQ ID NO: 62 - RNA, 92 nt, Human
aagauuuccaggugugaggcagcuggccuuuguagagcaccucaguaaagagcuaguaucuacacucuacacugccucaugucaagauucuu

SEQ ID NO: 63 - RNA, 85 nt, Human
aagcagcuucaauucugccgggacuucucccgccuuuuuuuuccugcggcgggagaaguagaugaagccagugauuaggguguuu

SEQ ID NO: 64 - RNA, 79 nt, Human
aagccaauguuaucccuagaaaaacauuuuugucacugcuguugauaaacaagaaaaucaaggaaacucauguuggcuu

SEQ ID NO: 65 - RNA, 89 nt, Human
aagcccuugacuggggcugcugccuuucucucagagaugcccugcccagugaggaggaaucuagagaggcagucuggccacaguugcuu

SEQ ID NO: 66 - RNA, 85 nt, Human
aagccugacaaguugaugccacugcugucugagggcuccuccggcucaacagucagcucagugcuuguguaauucuuccgggcuu

SEQ ID NO: 67 - RNA, 107 nt, Human
aagccuuguuuuuucccagagcaaccauguuuuagcauaaugggaugaccuggugucccauuauaaauaaagggugguauggcuagaaggguaugagcaguaggcuu

SEQ ID NO: 68 - RNA, 87 nt, Human
aaggagcaaugagaaacaaaacuaauuuuggagcagauggucucuggaauuugcauauccuggcuagugauuuucucaucuuuccuu

SEQ ID NO: 69 - RNA, 66 nt, Human
aaggauaccaggaugguuaccaggaugacuaccgucaucaugagaguuaucaccauggauacccuu

SEQ ID NO: 70 - RNA, 74 nt, Human
aaggauuuauuaaaaaaccaguaagacacuacuacaucaugacacugucacacugggcuuuuaacacaagacuu

SEQ ID NO: 71 - RNA, 79 nt, Human
aaggcgcaaacccgccacguucuggaaacuauccgcaagugaucgagacggcggguggcacgauggcggaugugaccuu

SEQ ID NO: 72 - RNA, 96 nt, Human
aaggcguuggaaacgggauugcacaggggggcgcgggcaccccaaaacaauggcccaaccgcucuuuuaaacacaccgccuagugccaacagccuu

SEQ ID NO: 73 - RNA, 74 nt, Human
aaggcugggggugggaagauggaauacugaccuaauguauaaaacuuaaaacaauucuccaauccccucuccuu

SEQ ID NO: 74 - RNA, 101 nt, Human
aagggccagucuaacccagcugaccaagcaggccugucugagaaugugcaucauuugagcaacucaggccugcuggguuaacugcuuacaccauuuuccuu

SEQ ID NO: 75 - RNA, 88 nt, Human
aaggguuguuuuguuguuagguaaauagauauuaggcaguccauuucuaaaauaugccugaugaagcuagauaccuaaagcuacccuu

SEQ ID NO: 76 - RNA, 78 nt, Human
aaggguuugccacuuaaccuucgacacgggagggaaaauaaagaauucccuuucacuaagaacacacggcaaacuguu

SEQ ID NO: 77 - RNA, 96 nt, Human
aaguccaacaucccgggccguucuguauuuaugucgccacaguugcuuguuuguaguggcauagaugacagcaucucucauccgauggcuggucuu

SEQ ID NO: 78 - RNA, 68 nt, Human
aaguggagggggcugagcgcagggccaggaugcuggucacuggguggcccugugagcuccccucccuu

SEQ ID NO: 79 - RNA, 79 nt, Human
aaguguucuccugaggacccuuaggucagacagagaagcuuucucuuucugaugggaagggucaaaguggaaaucucuu

SEQ ID NO: 80 - RNA, 77 nt, Human
aaguuacccugugacagucauucaucugugcucuggguggcccaugggaugaguguacuacugggcagguguaacuu

SEQ ID NO: 81 - RNA, 75 nt, Human
aaguucauucuagcaguaauuuaucagaggucacucauccucuauuaaauuauuaaucuaaucaccuuugaacuu

SEQ ID NO: 82 - RNA, 72 nt, Human
aaguugugaauuugauguaagcuuaggaaauugaauuaaaauuuauaggcaucuguauuaauuguacaauuu

SEQ ID NO: 83 - RNA, 99 nt, Human
aauaacauauauauccaugaagcuagcaacugaaagucuacgacuacauuuugaauguucucuccaaaucagaacuagcguucuagaauaguuguuguu

SEQ ID NO: 84 - RNA, 102 nt, Human
aaaaccaaaaaccuuucucccacucuaauagaugagucacauaaugggaaaacaaacaaauguaucaucuauuaaagugggagaacuugguuuuguaguuuu

SEQ ID NO: 85 - RNA, 84 nt, Human
aaaagaaaaccaaagugguccacaaaacauucuccuuuccuucugaagguuuuacgaugcauuguuaucauuaaccagucuuuu

SEQ ID NO: 86 - RNA, 83 nt, Human
aaaagggcaagaauaucacggcaugggcaugaguagcuugaaacugcuuaaguauguccuguuuuucuucaacuugcucuuuu

SEQ ID NO: 87 - RNA, 85 nt, Human
aaaagguuucucuuaacaguauuuccagugacaaugcaagguaaguauaucaaaggaaaucaacaguugugcuugggggcuuuuu

SEQ ID NO: 88 - RNA, 82 nt, Human
aaaaguaaugugagucugucuaaccauauuuuccuaacucaacaguaggaucaugaugguaaggcaaaugcaaguuauuuuu

SEQ ID NO: 89 - RNA, 92 nt, Human
aaaaguuauuuuauaaauaaagggaacuuccaggcuuucagucuuuaagaaaagcuaaggcuuguuuggcuuuuuguuuauuuuuagguuuu

SEQ ID NO: 90 - RNA, 80 nt, Human
aaaauucccacuuaauugaauacuuagaaaaaaauggccaguggccgauugaaagguauauuaaaauuaagggcaguuuu

SEQ ID NO: 91 - RNA, 77 nt, Human
aaacggaugggccugggggccacuuugcacaggguucuccagagcccugcccauccugccuccaccacuuccuguuu

SEQ ID NO: 92 - RNA, 91 nt, Human
aaacgugcaaauguauuguagagacuuuaugauuagaauggcauauauuuaugaaacuuaaagaugaauguuuuauugaauuuguagguuu

SEQ ID NO: 93 - RNA, 68 nt, Human
aaacguguggugauugaugcuuucauggacucuguugccccaaguccccaagccuuguaccagcguuu

SEQ ID NO: 94 - RNA, 83 nt, Human
aaagaaaaccaaagugguccacaaaacauucuccuuuccuucugaagguuuuacgaugcauuguuaucauuaacccagucuuu

SEQ ID NO: 95 - RNA, 67 nt, Human
aaagaaaaccggguggcaaauacccgggaaauuuuuacccccgcccauauugaaccggguuuucuuu

SEQ ID NO: 96 - RNA, 76 nt, Human
aaagacaagcugucauugcaauaggauguuacaacauuauauugcauuaaaaaugauaccuaaaagcuugcucuuu

SEQ ID NO: 97 - RNA, 74 nt, Human
aaagcauuacucuuaaaaaagcaauacugagaauaaaauuccuucucuucacgcaaucaaaaugacuaagcuuu

SEQ ID NO: 98 - RNA, 77 nt, Human
aaagcuuuucuuaauguaacuuugaguacauuuuaaugccuucuauuuuuaaaacucaaaaucauuaguugggcuuu

SEQ ID NO: 99 - RNA, 73 nt, Human
aaaggacccuguucacugcugcacuuuucaaugaauuaaaauuuauuucuguucuagugggaauguguccuuu

SEQ ID NO: 100 - RNA, 63 nt, Human
aaaggaugcugcugcacagcuucuccaauguaccagucauugaggccagcgcgcagcacuuuu

SEQ ID NO: 101 - RNA, 86 nt, Human
aaaggauuauagugaugcauugucugaaguuagcaccucuuggacugaaucguuuguuuagacuacauguauuacaaagucucuuu

SEQ ID NO: 102 - RNA, 63 nt, Human
aaaggcagacggugaaugccuugagaaauuguucagauucaaggacaagcauuuguugccuuu

SEQ ID NO: 103 - RNA, 75 nt, Human
aaaggccacuucuaugacuuauuuuucuguuugguugggcugccauggaaaccggaagcauguauucaagccuuu

SEQ ID NO: 104 - RNA, 72 nt, Human
aaauacaaauuccugggucuccuggcagacuugcuaaaucagaaucuccaggggauccuggaauugguguuu

SEQ ID NO: 105 - RNA, 76 nt, Human
aaauagugauuccaaagacaagguuucccuggaacccaccagauguacaagaaacaaaucuuuagguuugccauuu

SEQ ID NO: 106 - RNA, 75 nt, Human
aaauauuaguuugaggguuuuuuccaauuuaaauuaacuaauaaaggggggagaaugacacaaaagcugcuauuu

SEQ ID NO: 107 - RNA, 74 nt, Human
aaauauugugcaccauauggaaguacugccuuauaugauaaggauaaaguuaaauugguagguguauaacauuu

SEQ ID NO: 108 - RNA, 76 nt, Human
aaaucaaacuguuuaauaggaauuuggagagacaggcuuuugucauuuuccaaugcacuugggaggcacaagauuu

SEQ ID NO: 109 - RNA, 88 nt, Human
aaaucuagccagagcccuucacugccaugauagcuggggcuucaccagucugucuacuguggugaucuguagacuucugguuguauuu

SEQ ID NO: 110 - RNA, 93 nt, Human
aaaucucucaaccacugcaagcuuuuaaaagucuggcgcaucuugacuuucuuuucaccuauaacagccagcuuggauucauuugagagauuu

SEQ ID NO: 111 - RNA, 98 nt, Human
aaauggcuuuaaagcuugguguuacuuuucuuaaguuguuuaauuauaguuaaggcaauuucaaaaaugcuccaaagaaauguggaaagggaccuuuu

SEQ ID NO: 112 - RNA, 90 nt, Human
aaauuuuugggggagcgagggaaggaguuaaugaaacuguauugcacaaugcucugaucaauccuucuuuuucucuuuugcccacaauuu

SEQ ID NO: 113 - RNA, 83 nt, Human
aacaaaauuauagaauuuccagauuucuugccagguauuuuugaaaaccuaucaaggugcuccauuggauuucuguauuuguu

SEQ ID NO: 114 - RNA, 92 nt, Human
aacagagucucacucuguugcccaggcuggaguacaguggcacgaucucagcucacugcaaccuccaccuccuggguucaagcguuucuguu

SEQ ID NO: 115 - RNA, 74 nt, Human
aacagcuacucagcugcuuaagcugggccacaaguacagaccagagacaagcaagagaagaagcagagacuguu

SEQ ID NO: 116 - RNA, 85 nt, Human
aacagucccccaaagucuuauuucagcauuaacucaaaaguccacaguccaaaguuucaucugagacaagcaagucucuucuguu

SEQ ID NO: 117 - RNA, 64 nt, Human
aacauccaauucaacugugggaaaggagcuccuucaacugaugccccaguacuuuguggguguu

SEQ ID NO: 118 - RNA, 94 nt, Human
aacaucuaccuacucaugacauggcaaauagucauuuuacaauaacaauacaguacaauaugaucgugcuacuuucauggcuaggaaugaaguu

SEQ ID NO: 119 - RNA, 73 nt, Human
aacaugaaagauuggaauacauuuuaacuuaauguaaugcauaauuaagaaacauguuccaguacuuuauguu

SEQ ID NO: 120 - RNA, 86 nt, Human
aacauggauuuuaacguugcaggauuguaaauucauaagauaguuauuaccuuucuuugaaauuguguaauguuuauauucuuguu

SEQ ID NO: 121 - RNA, 91 nt, Human
aacaugugaauacuaccaaguuucuguccccaaagucaggcaucacugcuagucuuuugggacagaugggacagauguucacuuuaauguu

SEQ ID NO: 122 - RNA, 88 nt, Human
aaccauucaaagcaaguugcugcuuaagucuugcccacaacuuuucaucugaaaaguggaguagcugaagcagccaaugcuggugguu

SEQ ID NO: 123 - RNA, 69 nt, Human
aacccaacaugccaugguuuauggagccuucauucccagguugccacuuuggccucaguguggaggguu

SEQ ID NO: 124 - RNA, 82 nt, Human
aacccgacacaguagcauuugugccaauuucugguuggaauggugacaacaugcuggagccaagugcuaacaugucuggguu

SEQ ID NO: 125 - RNA, 68 nt, Human
aaccuggggacgcauagccaaggggaagcgcgacucacaacggcgcgacuucuugaguucuccagguu

SEQ ID NO: 126 - RNA, 84 nt, Human
aaccuucuguuacucccugggagaaaggcgcugagcguggcaugcaggugucuuugcuguguuuuucuccacuucuaaaugguu

SEQ ID NO: 127 - RNA, 69 nt, Human
aacgggagugggcacagaaagccuucuccuggcaacaggacaagggcugcccgcguguccagcccuguu

SEQ ID NO: 128 - RNA, 71 nt, Human
aacucggguauuagguuggcuaaccacaagcuuagcggcggcggggauuauucaacacaaguaauugaguu

SEQ ID NO: 129 - RNA, 74 nt, Human
aacucuggugggucugauacagguagcaauguaauuugaaaucaguugaauuuccuguuuuucucucauagguu

SEQ ID NO: 130 - RNA, 84 nt, Human
aacuggucggugauuuagguaguuuccuguuguugggauccaccuuucucucgacagcacgacacugccuucauuacuucaguu

SEQ ID NO: 131 - RNA, 96 nt, Human
aagaaggcaaagacuggggcagcagggaaguuuaaaaggggaaaauaaauguguuuccccauuauaccuccuucaccccagaauauuugccgucuu

SEQ ID NO: 132 - RNA, 74 nt, Human
aagaauucuaagaacacuacuagaagcauuuguucccuccuagucaaugcuucauacuuuuucuugggauucuu

SEQ ID NO: 133 - RNA, 79 nt, Human
aagagaaaaugguacagcaguuacaagaggauguggacauggaagaugcuccuuaaaaaucucuguaaccauuucuuuu

SEQ ID NO: 134 - RNA, 80 nt, Human
aagagaaaaugguacagcaguuacaagaggauguggacauggaagaugcuccuuaaaaaucucuguaaccauuuucuuuu

SEQ ID NO: 135 - RNA, 82 nt, Human
aagaguaguuuggacccacaauauugcauuacugauuuauucacuaccuuagcagcauguaguauacagacauucugcucuu

SEQ ID NO: 136 - RNA, 107 nt, Human
aagauauucagauacucuucuaugccaggaagcacaaaagacuuguugagauugccucaguucaguagaucuuccuuggcagccaggcauaggugguuucuugucuu

SEQ ID NO: 137 - RNA, 86 nt, Human
aagaugauucugacagugaaaagcagcaacaaauucaucacaucaagaacuuguaugccuucaaccucuucugccagaagcguuuu

SEQ ID NO: 138 - RNA, 73 nt, Human
aagauugaauuaggagguuaggcaggaguaggaucaaagacuuagaaaaugcuuguuuccuccuauuauucuu

SEQ ID NO: 139 - RNA, 89 nt, Human
aagcgaacuuugugccuguccuagaagugaaaauuguucaguccaagaaacugauguuauuugauuuauuuaaaggcuaaaauuuguuu

SEQ ID NO: 140 - RNA, 77 nt, Human
aagcugaaggugcuggaggugccaagugaagugugugcauuuuugauaacuguguacuucuggugacuguacaguuu

SEQ ID NO: 141 - RNA, 91 nt, Human
aagcugggggcacuggcuucugcucuugcucuuucuucuggaaacauuauucuguuccuuuggacaugggcaaggguccugucccuaacuu

SEQ ID NO: 142 - RNA, 106 nt, Human
aaggaaaguuugguaaggcgggggcugcgcagaucugcuguucucuggaaccuaaacugggaacccuagacuugcgcagaaaauuaauaguuuuccauuuuucuuu

SEQ ID NO: 143 - RNA, 114 nt, Human
aaggaaggugaugacuugcuccauugucuguggcuuucuuauguuguaaugggagcuuaucagugugcaccaugaucagguuacagcaucaggaggagcucuacaaccuauuuu

SEQ ID NO: 144 - RNA, 74 nt, Human
aaggaggacaaaagugcuguuaaaguugcuaaaaugcuuuccuuuuccuuccacagucuuuuucucucucacuu

SEQ ID NO: 145 - RNA, 63 nt, Human
aaggauggggagcaagcuccagcucuguaacacaugguggaacuucuuuuagccccagaccuu

SEQ ID NO: 146 - RNA, 103 nt, Human
aaggcaccacggccagcccucauaccuccuuuaaaagccaaccuguuuuuugcaaaaaggcuggcuguuuuuuggaccuaagggguuuuggaauuugggccuu

SEQ ID NO: 147 - RNA, 82 nt, Human
aaggcgccagagcugaagaccagccccuagaagccacaccccugcccuucuagcagcuacggguccucuggcuccgggccuu

SEQ ID NO: 148 - RNA, 115 nt, Human
aaggcuuauuuuuccaggcaggaggagaggcugguggucuugagcuuuuggccuggaauuccagucugaauuuucaaauauucccugccuccaaccccuuugggauccuagucuu

SEQ ID NO: 149 - RNA, 62 nt, Human
aagggaacucagaguccggcagcauccuccauaugcugaacgcagguacucugggcccccuu

SEQ ID NO: 150 - RNA, 103 nt, Human
aaggggagguuuuugcaaauucccaaggaaaugucaaaaaggcaaaauggccaccauuauccauuugcuuuuuuggguuuacugggggaaaaacacuuuccuu

SEQ ID NO: 151 - RNA, 103 nt, Human
aaggggagguuuuugcaaauucccaaggaaaugucaaaaagggaaaauggccagcauuauccauuugcuuuuuuggguuuacugggggaauaacacuuuccuu

SEQ ID NO: 152 - RNA, 73 nt, Human
aagggggagaauaugugaagggggcuuccaugggaggcuucgauggcccacccacccuuccauucuuccucuu

SEQ ID NO: 153 - RNA, 87 nt, Human
aagguaaugcucauuuagacugacacagguaugaaaauuccaaucccuucuuuucacuaucauuguaucugacacacacaucaccuu

SEQ ID NO: 154 - RNA, 64 nt, Human
aagguacccagaguucucacacgcaagagcuguacuugguuguauguguguugagcuggcccuu

SEQ ID NO: 155 - RNA, 94 nt, Human
aagguauuuucugagcugugagccugccuuccagugacauguucuaaaaauugcaaguuauuugaggaggcuuuacagccaauaggaaguucuu

SEQ ID NO: 156 - RNA, 90 nt, Human
aagguguuugucaguuguuucauaaaccagauugaggaggacaaacugcucugccaauuucuggauuucuuuauuuucagcaaacacuuu

SEQ ID NO: 157 - RNA, 75 nt, Human
aaguauacgaaguuccacauugguuggcauaaguggauguuaacaagaaagcaguuuggggcucuucaguuacuu

SEQ ID NO: 158 - RNA, 72 nt, Human
aagucagaaacggccaucucacuguucacauauauacacguauguacaggaagaaccuaguguuucuagcuu

SEQ ID NO: 159 - RNA, 72 nt, Human
aagugagggagauagugaggggagggcacgcuugucuucucagguaucuuccccagcauugcucccuuacuu

SEQ ID NO: 160 - RNA, 109 nt, Human
aagugcuggauauugcuaagaauucagguagucucgggaucuccagagucuccauacuaggacaggagaucuucagaaccuggaggaauggaaauagucuagucagcuu

SEQ ID NO: 161 - RNA, 84 nt, Human
aaguugaugggugcagcaaaccaacauggcacauguauaccuauguaacaaaucugcauguugugcacguguacccuagaacuu

SEQ ID NO: 162 - RNA, 80 nt, Human
aaguuuaagaagcagccucuugucacagguugacuccuagguagugugccuagugaccaagagggcugcuaagaaagcuu

SEQ ID NO: 163 - RNA, 80 nt, Human
aauacacacauaucagaguacugugauagacucagauaaaaugauacaaauuauaguguucuaacuaugucaaauguguu

SEQ ID NO: 164 - RNA, 80 nt, Human
aauacgaagacauggauaguugcaaggucuugaaaggucgaagaaagauaccggugaugaauaaccuaugucuuugcguu

SEQ ID NO: 165 - RNA, 128 nt, Human
aauagcugggauuauaggugcccaccaccaggcugggcuaauuuuguauuuuuagcugaaacccagucucuacuaagauacgaaaauuagcugggugugguggugugugccuguggucccagcuacuu

SEQ ID NO: 166 - RNA, 65 nt, Human
aauccugaucugguccauuaaagagugugcgcggacaaaguuucugaaaggauuagagaaggauu

SEQ ID NO: 167 - RNA, 77 nt, Human
aaucuucaauauccaagaaaagaaacccccaaagaauaguacaugcuuuggacuaguggaagggauguggggagauu

SEQ ID NO: 168 - RNA, 73 nt, Human
aaugaaauguauggucuuuugugauuggcaucuuucccuuagcauguuuucaguuucauccauguauuucauu

SEQ ID NO: 169 - RNA, 71 nt, Human
aauaauauugcacuggguauauaacugguugccaccaccuauuagccaugucacucagagacaauauuauu

SEQ ID NO: 170 - RNA, 72 nt, Human
aaucacacucccuacaaguucagugugcccccaguggcacccgugggcacaucuugacaauggggaaggguu

SEQ ID NO: 171 - RNA, 71 nt, Human
aaucaccauguagugugucuucuugaguaggccaauguugcguauagagagaaaaugacuaucaggagauu

SEQ ID NO: 172 - RNA, 87 nt, Human
aaucuuuaaaauguguuguuuuucacaaguaauuuaaguauagcauuauuauuauuugguacuugagucaaagacgacauuuagauu

SEQ ID NO: 173 - RNA, 105 nt, Human
aaugaaguggaaucaagguggcaagaaaauuuagaaucguuucugauagggacuuucccuuauccuaaauguguuuugaaggcacacguuauuuccauugucauu

SEQ ID NO: 174 - RNA, 61 nt, Human
aaugacaccguugauugagcuugucagcagagcugaaagagacagucgacggaugugcauu

SEQ ID NO: 175 - RNA, 104 nt, Human
aaugacccguucuggaaucagcuucucucauuuucuuucccugcaccaacuagcagugaguugaaacucuuggaggaagcaaccauuucagucugcaggucauu

SEQ ID NO: 176 - RNA, 86 nt, Human
aaugcuaauaugauggucuuaggacaugaaccaagacaaacaacuucgaaucugggucacuuaaacaagccaucuauccaggcauu

SEQ ID NO: 177 - RNA, 105 nt, Human
aaugggcaacgugagguggagggaggcgggagaugaaauucuugguugaaacaauagucagaagaaaauaaucuucucauuuuuccucacuuuaguugauucauu

SEQ ID NO: 178 - RNA, 129 nt, Human
aauguaaaccccuuaaagcagauguguguggggccuuaugaagaccaggauucugcgggugucaggggauugccccucuugacagagacuaggguuuuagacugaggcuuccugcaggguguucgcauu

SEQ ID NO: 179 - RNA, 81 nt, Human
aauguccauucuuauuaaaugaauguaucucaaggcccuaccaaauaaguacauguaaaaaguaggaagaaaugugauauu

SEQ ID NO: 180 - RNA, 79 nt, Human
aauguggucgaagauucaaaagcauguuaccuucaaccaagugaaaggcauuuucggcuucacugacagcgacugcauu

SEQ ID NO: 181 - RNA, 104 nt, Human
aauguucuggcacauaguaauuaauuaagaaaaucgagcacccuuaauuaccuagaaugcaggguuguuaguuuuuugguugacuuuuguuuugcuggggcauu

SEQ ID NO: 182 - RNA, 99 nt, Human
aauguugcuagugcuccuuaggccuuuaagcuauaaacucagcaaggaaugucugcauuuuaucucuuuaagguaccaccagggggguaugacagcauu

SEQ ID NO: 183 - RNA, 86 nt, Human
aauuauuucacugauguuuucuucucucuucauuucuuucuuucuagaaauccauguucuaauucagaggcauuaauucauuaauu

SEQ ID NO: 184 - RNA, 85 nt, Human
aauucaaccugagaagcgagguuucugggugcaaacaauauauagugcuugcccagaauaccuguuuacucaguggaguuggguu

SEQ ID NO: 185 - RNA, 82 nt, Human
aauucgagguugccugaaaagcuggguguccuugcuccuuuuccuggaagccaauauacccaguuuuuacucaguuugaauu

SEQ ID NO: 186 - RNA, 79 nt, Human
aauucugggagauuaggaaaaaagcuucugaaaugaagguuauuucagaaguaauuuuuaugggagagcuuccagaauu

SEQ ID NO: 187 - RNA, 75 nt, Human
aauuuauguuguuuaguguuauauuccagacgugauaccaaaauuuuguugcaaauauaauggacaauauuuauu

SEQ ID NO: 188 - RNA, 74 nt, Human
acaaacuaaauacuauuugaaagucugaauucaaauaaccaugaauucuuaacuuuaaauguaaagaaguaugu

SEQ ID NO: 189 - RNA, 76 nt, Human
acaaauguagauacaauaaaauguaaacaauguagcuauuaaauaugauuacagaaaauguucuauuuauuuuugu

SEQ ID NO: 190 - RNA, 88 nt, Human
acaacaaccaguacuuugauaucuccgcccucucguguguuccuuguggagcuaaccagaggcaagaugcccgaggaacuucaugugu

SEQ ID NO: 191 - RNA, 71 nt, Human
acaagggucauucgcaggaauaacgguagaggggaacugaagcagggccgccguggcauuaugagccuugu

SEQ ID NO: 192 - RNA, 68 nt, Human
acaagguguuuuuauugaggucuuaggaauugcaauuugggagacagauucagcuagaagccacuugu

SEQ ID NO: 193 - RNA, 63 nt, Human
acaagucuugggaaguccaucugacucucugaaacaguuugucucugaccucccaggaagugu

SEQ ID NO: 194 - RNA, 118 nt, Human
acaauaauugaaauauuuucaagcugauuacaccgcagcccgaggcuagccugguugcuaagggugagcuccgcgguugcuagggggaguaaaucaucuugcauuauuugauuuuugu

SEQ ID NO: 195 - RNA, 103 nt, Human
acaauagucuaagagcuaacuaguugcacuugucuuuacccuagaggcuugcuaaauaaagcauacuuucuggagggcaagugcaggggucgcuucuguuugu

SEQ ID NO: 196 - RNA, 86 nt, Human
acaauauaauauauucuaaacacaaugaaauagggaauauaauguaugaacuuuuugcauuggcuugaagcaauauaauauauugu

SEQ ID NO: 197 - RNA, 81 nt, Human
acaauauaguuucuccugaacaccugcuuuccuucugggagucuggaauuuugguaugugccaggcagagacuaccuuugu

SEQ ID NO: 198 - RNA, 74 nt, Human
acaaugucuuuaauuccucauaugcugacuuggcaauccauaugcagccuaaaaggugguugaaagaugucugu

SEQ ID NO: 199 - RNA, 93 nt, Human
acacaaaacuaugagagugacaaaauggugacagguagcugggaccuaggcuaucuuaccaugaagguuguuuugcuuauuguauauuugugu

SEQ ID NO: 200 - RNA, 60 nt, Human
acacacagcacacagagugugggaggagagccaccacaacuccucucuauugcugugugu

SEQ ID NO: 201 - RNA, 75 nt, Human
acacauauauccuaaauaucagcuucuaauuaagucaacuuucaacucuaaagcuguuuaaaaggauuccugugu

SEQ ID NO: 202 - RNA, 88 nt, Human
acacauauuucaugucaccuaagauugccaaacguacguguucgugaaaaggcuaauggcugaugauuggauugacguggcugugugu

SEQ ID NO: 203 - RNA, 101 nt, Human
acaccacaugcagauuuuggugcuuucccaaccuucuugguauaaagguaaacaauucuauuaccagggguucgggacagccuaguuuuguuagaggcugu

SEQ ID NO: 204 - RNA, 104 nt, Human
acaccuccaaccucccugccuuugaacccuguguuaacaaugagaagcuuguuuauuugaaggcuggguucucauuggcccacagggguagguuguaauugugu

SEQ ID NO: 205 - RNA, 99 nt, Human
acaccuggaaguauuagauacauguuuaaaauaucuuuuauagguuuuauauaaaaaugucugaguaugauuaugugugaaaguucugauaccaguugu

SEQ ID NO: 206 - RNA, 95 nt, Human
acacugcuucaagguuucuuuuguauauaauucuuagaaugcucauuucuuuuaaauggguuaauuuguacagcagagggaauguuauuguaggu

SEQ ID NO: 207 - RNA, 71 nt, Human
acacuguguuucugaggguccuggaauggccagaacugaaggauccucuccagguucuucaauaucagugu

SEQ ID NO: 208 - RNA, 80 nt, Human
acagaguuccaaaaucuccuuuaucacucgacauacagaacccucuugucuugaguuugggaguuaauuuugcucuuugu

SEQ ID NO: 209 - RNA, 94 nt, Human
acagauacauuuuuuacagguuauuuucauuguguuauugacauccaugucucucguaaaacagauggcccaaaguaaugaaucauguggcugu

SEQ ID NO: 210 - RNA, 108 nt, Human
acagauguaggcagaagaccaggaguagggagagcugagacuagggauaaacaaaggggcaggaauccuggagagaagccccgugcuccacucacugacugcgucugu

SEQ ID NO: 211 - RNA, 71 nt, Human
acagaugucugcugccaaaaaguuguucugauagaaaauccaaaaucaucgaccccaaaagccaagucugu

SEQ ID NO: 212 - RNA, 80 nt, Human
acagcacaaacccuaaaguccaugugcagucuccauguacaaguauaaaagucuguuucaggacaacccuggguugcugu

SEQ ID NO: 213 - RNA, 48 nt, Human
acagcagcccauaacaguuuguggccucuacuaacuguccucugcugu

SEQ ID NO: 214 - RNA, 85 nt, Human
acagccagcgcucucagcucaugaugcgcacccggaucgccgcccaggguuucacggucgcagccaucuugcugggucuggcugu

SEQ ID NO: 215 - RNA, 98 nt, Human
acagccuggcuccuaacaggagggaagaugaagcagacugccgggagaucucugccagcaaacucuucucuucccacucauguuaggcccaguguugu

SEQ ID NO: 216 - RNA, 75 nt, Human
acagcuaugcugauugguugaagugugaauucuuggucuggaaagcaaaacuuucgcuauucuauuugugguugu

SEQ ID NO: 217 - RNA, 70 nt, Human
acaggaacuuuggagauaaacagggcucucgacauuggcaaguugcaccaucccugguuucuccaucugu

SEQ ID NO: 218 - RNA, 60 nt, Human
acaggaaggguccuagguagggggagguuccuccucccuugaaacccugggccacucugu

SEQ ID NO: 219 - RNA, 80 nt, Human
acaggcugcuauaaaugcgcuugauggccucggcuucuuccuugucaaggaugccuuucuccacauaagcaucagcuugu

SEQ ID NO: 220 - RNA, 80 nt, Human
acaggcugcuauaaaugcgcuugaugggcucggcuucuuccuugucaaggaugccuuucuccacauaagcaucagcuugu

SEQ ID NO: 221 - RNA, 60 nt, Human
acagugauucggcacauaaaacaggugcugaacuguagcaguuguuuuacuccauccugu

SEQ ID NO: 222 - RNA, 80 nt, Human
acauaccaacuuccaaucugccuaaaugugacagccucugcccaagacuggcucacugaggcgucuuggcuacuggaugu

SEQ ID NO: 223 - RNA, 79 nt, Human
acauagauggcugguacauugcugugcuggaaucacgccuaucuguauaguaaagaagccaagcccacagagacuaugu

SEQ ID NO: 224 - RNA, 85 nt, Human
acauagaugguaccuuacuuuuccucauucuuaauaggugucuaagaaugucagggcaaaaguaugggcauuuuucuugcuaugu

SEQ ID NO: 225 - RNA, 75 nt, Human
acauauuuuccuuccacaauauggauuugugucauuuaaacugaagaaguugaucuugugugaugacagguaugu

SEQ ID NO: 226 - RNA, 107 nt, Human
acaucccaaaacaacaacaugaaaaaacuggcccucaaaucuucgcucgcuauuuccaugucagaaagggggaaagaggaagcugaacaauguauagucugggaagu

SEQ ID NO: 227 - RNA, 112 nt, Human
acaugacuuacagugugcaguuuggagaucuuuggccaucaauccgugucagucuccucucagagcagaaguauggugcacuggucaauaacuuugcugccugggaucaugu

SEQ ID NO: 228 - RNA, 71 nt, Human
acaugagggugcacaugucaaguacuuagcuaaaaucaacaaagugaggacugugaagauaacuuucaugu

SEQ ID NO: 229 - RNA, 66 nt, Human
acaugcauaagucaggcucucuugaaauauacaaagcguuagcggcagaggaucuugacugcaagu

SEQ ID NO: 230 - RNA, 93 nt, Human
acaugugugcauguaugugugcauguguguguuaugcuuauguaagugcauggauguggcuguguaugcacaugaaugugcauguacacaugu

SEQ ID NO: 231 - RNA, 78 nt, Human
acauuaacaugauaauaccaacauguauuuggucaaagucuaaacacuuuuuugauaaaauacauuuuauguuaaugu

SEQ ID NO: 232 - RNA, 73 nt, Human
acauuuauagagguuauaaggaucuuggcucuagaacaaauuuuugaaauuaggaucauuuuaccauggaugu

SEQ ID NO: 233 - RNA, 104 nt, Human
accaaugugagauuccgaaucauuggucagccacagugaugccaccuuggcaucaaacuugccuguuccaucuuuaucaauguaucuggaagucugacuugagu

SEQ ID NO: 234 - RNA, 78 nt, Human
accagaggaggacaucagauccugcauuauguacacugaucguuucugcagcugcagauucugcuguucgacucuggu

SEQ ID NO: 235 - RNA, 76 nt, Human
accagcuggauaaggacaucaauaccuucucuaugcgugucagggagugguacggguaucacuuuccggagcuggu

SEQ ID NO: 236 - RNA, 65 nt, Human
accagggauaccaucugguccagugguuuuuaaacaaagcugcuuagcaccuggaauucccuggu

SEQ ID NO: 237 - RNA, 83 nt, Human
accagggugguggcggagugcgcaugcgugguucccgggcgacgggaacgcgcgcucaccgugcgcgcucgcggccggguggu

SEQ ID NO: 238 - RNA, 70 nt, Human
accagguccaguucacagacauuguggaaauauucguuuaagacuccacgaauugugaauggcuccaggu

SEQ ID NO: 239 - RNA, 67 nt, Human
accagguggccuuaguucuccagcaucacaucccuguauaagcuccucugagcagggucgacauggu

SEQ ID NO: 240 - RNA, 75 nt, Human
accaguggaucgagcaggacauggagaaguacauccugagaggggaugagacguuugcuguccugagccgcuggu

SEQ ID NO: 241 - RNA, 126 nt, Human
accaguugugauaagauugacaaguuggugacagagcauguuuugugaaccucugaacucuucugggggcauuucucauaauuuaugucuucuugucucccggcuugggugccuagcacucauggu

SEQ ID NO: 242 - RNA, 98 nt, Human
accauggcguccuccgcggccggcugcguggugaucguuggcaguggagucauugggcgaagcugggccaugcuguuugccaguggaggcuuccaggu

SEQ ID NO: 243 - RNA, 85 nt, Human
acccaaagcaguggccaacaucgcggaccccugugccuugucacagaugggugcugguccucaggcguuggggacacugcugggu

SEQ ID NO: 244 - RNA, 90 nt, Human
acccaguuugugguacuuuguuaugccagcccuagaaaauuaauaugugagagaauccaccuuucagcggcaucacuaccaaaacugggu

SEQ ID NO: 245 - RNA, 78 nt, Human
accccagaaguuccaaccugugccuuauaucuugaagaaaauuuuccaggaucgcgaggcagcagcgaccacuggggu

SEQ ID NO: 246 - RNA, 66 nt, Human
accccaugccucacuugugagauuagaguaccauguuuucuuucuuuccacauguggaaguggggu

SEQ ID NO: 247 - RNA, 60 nt, Human
acccccaaaauuccuguguggaaaucuuuacccccaaggugauaacacuaggaggguggu

SEQ ID NO: 248 - RNA, 90 nt, Human
acccccacccuccuuccgauuucucuugaaggacaggccgcucaauuugaaaggcuucuugaaagagaauuucuucuucuucuugggggu

SEQ ID NO: 249 - RNA, 76 nt, Human
accccuaacauugaccuugugcaucccugagagagugggcagagaauccaauucucaugaagcgcgaagucggggu

SEQ ID NO: 250 - RNA, 89 nt, Human
accccuccucaaauuauaagguaaaugacacaaaguugaacauagggucaguguugggcaaaaagcauuuaaaauauagauaacggggu

SEQ ID NO: 251 - RNA, 75 nt, Human
accccuugucaagcauugccugugauugcccagcccagauucaucugugccuuggacauggugauggugaugggu

SEQ ID NO: 252 - RNA, 90 nt, Human
acccgucccugauccuggccgcagcacagaugcccgcuuaccaggagcugguggaggaggcgauugccuauggccggaagcugggcgggu

SEQ ID NO: 253 - RNA, 76 nt, Human
acccgugccggccagcgcaccagguucaaggcauuuguugcuaucggggacuacaaugugccacgucggucugggu

SEQ ID NO: 254 - RNA, 96 nt, Human
aaugacuggguguauuuucucugaugaugcaauccagguggcaugccuggcauaacugguggcauuccuggcaucagaggaggaacaccuggcauu

SEQ ID NO: 255 - RNA, 71 nt, Human
aaugaguuaggcugcagaggacugguccgucuccucggcauaaacccuuugaaguuccuuuuccacucguu

SEQ ID NO: 256 - RNA, 72 nt, Human
aaugcacauacaaugccagaacuccuuaaaagcaacuaauaucauauuuguguuuugcauaaaacaugcauu

SEQ ID NO: 257 - RNA, 74 nt, Human
aaugcagccauggcgucuaguucuggagaucucauaaggguggguccaaagacgauuccaagguucucugcauu

SEQ ID NO: 258 - RNA, 78 nt, Human
aaugccccacuuuuuggaacaacgcgauccuugguucucggaggaagaauggcuuauaccccaagaggauggggaauu

SEQ ID NO: 259 - RNA, 102 nt, Human
aaugcuggacauuuaucuggagcugcaggggguaaagugucauccuugggaaauucaaagcuggccuguaccugcugagagcaccagggauauggucacauu

SEQ ID NO: 260 - RNA, 77 nt, Human
aauggaaaccaugcaauuaccugccuuaguucuuuugucauaaaaacaaucacuugguuggucguauuguagcuauu

SEQ ID NO: 261 - RNA, 73 nt, Human
aauggaauggaaucuccaggagugaggguuuccauggaagccagcacuauccuuggggacaccacugaccauu

SEQ ID NO: 262 - RNA, 104 nt, Human
aauggagggauucagcuucagguuaaaaaggaggaagaggaaaugccaaggagaagguuuuuccaaauuccuuccuuuuuaaauuuagauggaguccauuuauu

SEQ ID NO: 263 - RNA, 87 nt, Human
aauggucgugccaaaaagggccgcggccacgugcagccuauucgcugcacuaacugugcccgaugcgugcccaaggacaaggccauu

SEQ ID NO: 264 - RNA, 77 nt, Human
aauguaaugacaacaauuuaggcaucauaaaauacugaacuauugugacuuuauacuuagaauugcugucuuacauu

SEQ ID NO: 265 - RNA, 82 nt, Human
aaugugaacauuuauucauauuguuuugauuacccucguguuacuacaagauggcaauaaauacuaugggauuguuuguauu

SEQ ID NO: 266 - RNA, 114 nt, Human
aauguuuacugaguauucaccaggugcuggguggagaaagaagacuuaaagauucccuagacaucuccucuccccuagacucaggaccauggcacuuauuuucuagucaauauu

SEQ ID NO: 267 - RNA, 92 nt, Human
aauuccugccagaaugcgcacagaacauaagucagccaagugugucgugccagggauacuuugacuuugguuugcugcugcugcuagggauu

SEQ ID NO: 268 - RNA, 105 nt, Human
aauugauaaagccagaguggagacacagaaccacugguucaccuacaaugagacaaugacaguggagagugugacccaagcuguguccaaucuggcuuugcaguu

SEQ ID NO: 269 - RNA, 62 nt, Human
aauugcuacugaagagcuugccacauucaugacauuugugaggcuucucuccaguaugcauu

SEQ ID NO: 270 - RNA, 110 nt, Human
aauuggcuugagguuuuuuuggauaucagaggaaguaagucuuuuuauucuaccuagcaucuaguuuuugauagacaaguuuccuuauuauaccccucuucugguugguu

SEQ ID NO: 271 - RNA, 80 nt, Human
aauuugcaacaguucuuuccccaggccacucgcagucuugcugugacucuccuguggggucccaugaacccuuccaaguu

SEQ ID NO: 272 - RNA, 83 nt, Human
aauuuggcuaaacuuaaaagcaagcuggguuccucuggggauauaaauaagcauuggacugggaggaaacagcuggccaaauu

SEQ ID NO: 273 - RNA, 71 nt, Human
aauuuugggaugguaucuaugucucugaaaaaggaacgguucagcaggcugaugaauaagaucuaagaguu

SEQ ID NO: 274 - RNA, 81 nt, Human
acaaaauagacacuuuuggauuuucccgucuuuuccaacaccaaggaugagauuaucaaaagauguguuaaauuaauuugu

SEQ ID NO: 275 - RNA, 68 nt, Human
acaaagaucugacaugucacccagggacccauuucacccacugcucuguuuggccgccagucuuuugu

SEQ ID NO: 276 - RNA, 79 nt, Human
acaacagccagaacuguggauacacaccuggcggcuggugggaggcggaugcugugaguucccaguucuuggcuguugu

SEQ ID NO: 277 - RNA, 61 nt, Human
acaacuacggaccuuggucccggccuuuauggacuauuauuggaccaacuccgaaaguugu

SEQ ID NO: 278 - RNA, 108 nt, Human
acaagcugcugucuuugcaccuugguccuuggccaagccuccccuugccacgggggcaugggaugaccugugaacgagacagggugcaggagucacagcauagcuggu

SEQ ID NO: 279 - RNA, 70 nt, Human
acaauuuuguauggaaugcuagauggccaagccucagccuuugguccagugcaacccuugccucgcuugu

SEQ ID NO: 280 - RNA, 71 nt, Human
acacaaauguucccaguuuuucaucugcacugccaagcacugaguugguuggauuggcaagcauguugugu

SEQ ID NO: 281 - RNA, 73 nt, Human
acacagaccacuaagaacaauaacuuuaacaaaauaagcauuugcuucaaaguuauuuuuuagucgcuggugu

SEQ ID NO: 282 - RNA, 112 nt, Human
acaccggaagugggcuuauuugcgcaucagcuacuuucgcuucuacuuaaaaacggaggaucuggguaaaagaaccgaaaggcuguacgaaccuaagacuugucuccgaugu

SEQ ID NO: 283 - RNA, 93 nt, Human
acacugccucuagauuguuauuuuguccaagagagagaucauggagagagucucucucgcucacggaggcucugucuuucuaggaguaugugu

SEQ ID NO: 284 - RNA, 90 nt, Human
acacuggacagauggauguugaugagcuugugugcagcaguucuacuggaaguauguacaaggggcucagccagccaauuuggacggugu

SEQ ID NO: 285 - RNA, 71 nt, Human
acacugguauaaaacacaguuuaaacaauuagaaaaaugaaaacugauaccacuuuaugccucuauagugu

SEQ ID NO: 286 - RNA, 77 nt, Human
acagaaugcugucuuggaccaguauucaacuuguggggcaaccuaaauuugggaguauugcuuuuucuguauucugu

SEQ ID NO: 287 - RNA, 126 nt, Human
acagacaauucugaugauuaugauuucauuugguuuaacuaagcuguacuaguucauuucauaaggaaaugauacuguagacaaauguaaauaaagccugugagucaagcaucaagugguguuugu

SEQ ID NO: 288 - RNA, 107 nt, Human
acagauugcucacagaucuuauggaaaggcugccaguguuacuuccucaguguuggggagguagagcccacuaagccugagcccccuguucccugucugcacacugu

SEQ ID NO: 289 - RNA, 83 nt, Human
acagcacaucuccauuagcacuagccacaauucaggagcucaguagacacgaacuaguggcuugcauauuggagagugcaugu

SEQ ID NO: 290 - RNA, 88 nt, Human
acagcugccuguacaucaacaucuucucagaaugacccagaaguuaucaucgugggagcuggcgugcuuggcucugcuuggcagcugu

SEQ ID NO: 291 - RNA, 76 nt, Human
acagcugugguuuuaggcuuuuuccuccuaguauaagaccaaaagucuuaucuguaggccagaacaugaaguuagu

SEQ ID NO: 292 - RNA, 70 nt, Human
acaggaaggacgggcguggucugcaggaggaucuccaggccccugcagcccucccuacaguccucucugu

SEQ ID NO: 293 - RNA, 94 nt, Human
acaggagaauugcuugaacccuggagguggagguugcagugagccgagauugcaccauugcacuccacccuaggcaacaagagcaaaacucugu

SEQ ID NO: 294 - RNA, 98 nt, Human
acaggcaggagggggaugaugguacugagagaguaugugucccagagcuugucaggacacaguggcagaauugcucucauccucuucuacuucucugu

SEQ ID NO: 295 - RNA, 90 nt, Human
acagggcaaacaaccaggucggccuggcccccguggcuuaagccuaagucucuucagccaccucccaggaagaucuggccucuguccugu

SEQ ID NO: 296 - RNA, 79 nt, Human
acaguuguuccuagcuuaguguuuuguuuuccuguugcaugacagauuuaacuauucuuuccagcaguggaggugcugu

SEQ ID NO: 297 - RNA, 91 nt, Human
acauaguuccugucaaaaucccaguaagauauuugaauagauacagacaagauuauuccaaaguuuauacgggaagacaaaggaacuaagu

SEQ ID NO: 298 - RNA, 78 nt, Human
acaucaagacaauguauacuauuucaaauauauccauacauaaucaaauauagcuguaguacauguuuucauuggugu

SEQ ID NO: 299 - RNA, 77 nt, Human
acaucauugucuaucaugaacuuguacagccaucagguaaaaauuggugugaagaagacauggagaauggaggaugu

SEQ ID NO: 300 - RNA, 77 nt, Human
acaucugacaucaccugcagcuuccuuauaacaugcccacugggcagagaggaugagaggcaggagagcaccagugu

SEQ ID NO: 301 - RNA, 73 nt, Human
acauggaguucgcugauucucagagccacuucccauguccuggcauccauuguucagcuugaugucucccugu

SEQ ID NO: 302 - RNA, 95 nt, Human
acaugguggcuggguuccaagggcaaguucugagaaagagagccugguggaaaccuaucacuuuugaugaccuagcccuggaagucacauugugu

SEQ ID NO: 303 - RNA, 63 nt, Human
acauguauugaagcccuguagaaugacacgcuuuugucagaugcgcgggaugcucaugcaugu

SEQ ID NO: 304 - RNA, 72 nt, Human
acaugucauauugagccuccuacugaacucagccacauauggaaguuugaaguggguccucgaaaugcaugu

SEQ ID NO: 305 - RNA, 114 nt, Human
acauucacuugcaaccuaugcuuccaucacuauaaacuuucaagaucuugagauguucaggcaauucauuuaucuucagaagcauaaggaaagugguuaaugcacuugaaaugu

SEQ ID NO: 306 - RNA, 82 nt, Human
acauuuacaauaccucaggcuaauuacuguuauuuuuggggucgaacuuuuuuuugacagugaaggguggauuaugggaugu

SEQ ID NO: 307 - RNA, 131 nt, Human
accaacugcuuagcaccccuggccaaggucauccaugacaacuuugguaucguggaaggacucaugaccacaguccaugccaucacugacaccagaagacuguggauggccucccggaacuguggcgugau

SEQ ID NO: 308 - RNA, 67 nt, Human
accacauuagcuuggcucucugucucagaggguaucucuaagacuaggggcuugguauauauguggu

SEQ ID NO: 309 - RNA, 65 nt, Human
accacgccuggcuaauuuuugaauuuuugguagagacgggguuuuaccguguuggccaggcuggu

SEQ ID NO: 310 - RNA, 75 nt, Human
accacguuuguuucgacgccggaccgcguaagagacgaugauguugggcacggaagguggagagggauucguggu

SEQ ID NO: 311 - RNA, 130 nt, Human
accacugcccugacugucacaacuccuaaccuugccauugccugccucccccuccccuucuccuuaagagacaauuucugcagguggcaggugagcaagcccaggagaaugcugcaaucuuggggguggu

SEQ ID NO: 312 - RNA, 72 nt, Human
accagcacaccagcugcccgguggggcagaccugcugcccgagccugggugggagcugggccugcugccagu

SEQ ID NO: 313 - RNA, 73 nt, Human
accagguccaguucacagacauuguggaaauauucguuuaagaccuccacgaaguugugaauggccuccaggu

SEQ ID NO: 314 - RNA, 76 nt, Human
accaguggaucgagcaggacauggagaaguacauccugagaggggaugagacguuugcuguccugagccgccuggu

SEQ ID NO: 315 - RNA, 80 nt, Human
accaugccccugccacgugggccacuucagacuuggggcacaaauaacauggagggagccaugaaggguggggccauggu

SEQ ID NO: 316 - RNA, 64 nt, Human
accauugccauuucuacauguuauucgcuugguacccucaaguggauacaagucuggcauuggu

SEQ ID NO: 317 - RNA, 72 nt, Human
accauuuuaaaacgggcacaaauaucucuaaggcgcauagugcuuuucaccaguaggccuuugugaaguggu

SEQ ID NO: 318 - RNA, 62 nt, Human
accccaaacauuugucuuuaucuuggcaaaggccaagucaucaaggcaugggacauuggggu

SEQ ID NO: 319 - RNA, 88 nt, Human
accccgcccgggaaggcagccgcaccauggagucuuccaguucaucuaacucuuauuucuccguuggcccaaccagucccagcgcugu

SEQ ID NO: 320 - RNA, 72 nt, Human
acccuagcuaacauccuacagaauggugaaagacugaguguuuuuccccuauaauaggaaacaagcaagggu

SEQ ID NO: 321 - RNA, 78 nt, Human
acccuaugccuauuuugcucacuucccuauucuggugcuuugguugguccuuugagcaagauccccggggcuaagggu

SEQ ID NO: 322 - RNA, 71 nt, Human
accgcgagguuuuuccuagggcugucugggcuggucuacgggucgucccggcugccuuucaugccuccggu

SEQ ID NO: 323 - RNA, 75 nt, Human
accgggggcccccuuauuguuuggggcaaagggccagggccccggaaacgcuccccauauaaaauggcccccggu

SEQ ID NO: 324 - RNA, 74 nt, Human
accgugccagagagaucgugauuggugagucugguugaguccugaucaccaguaucuuuuuucugaaggcaggu

SEQ ID NO: 325 - RNA, 89 nt, Human
accuauucccuguggcuuaggugagcaugugaccaggccuggccuccugagucccacagcuuccuagccacagugauaaaagaaugggu

SEQ ID NO: 326 - RNA, 80 nt, Human
accucgauucucgucuauaacaggacuaaguucacugugaucuuaaauaagcuugguuaaaaugggacaugagugcaggu

SEQ ID NO: 327 - RNA, 73 nt, Human
accucuagcucgccguuggccgccuccaggacgcgcaccuuguccagguaggaggccaggcggucguugaggu

SEQ ID NO: 328 - RNA, 71 nt, Human
accucucauuucuccucaaugccacugcacugaugucaacugacuuagggcaggcaugagagaacugaggu

SEQ ID NO: 329 - RNA, 70 nt, Human
accugcgacugagcgaugccgucggggaccagguacuggccgugguuuaacggguccugcgguggugggu

SEQ ID NO: 330 - RNA, 63 nt, Human
accuggaacagcugccuggauuggccuggaaagguuuguugauguggguaguuauuuccgggu

SEQ ID NO: 331 - RNA, 93 nt, Human
accuggagcugcacccccccaguuauccguggucucaccguggccuccucucuuccuuggaccacgaccagcuauccggagggguuuccaggu

SEQ ID NO: 332 - RNA, 80 nt, Human
accuuaucucugugcuucgugaagcuaaucaagcaauuaaucccaaguugcuucaguuggucgaagacagagguucaggu

SEQ ID NO: 333 - RNA, 77 nt, Human
accuucaccuuccucaccaaaagcacucacuuccugguuuccagaaagaggugaagugaaguggugacuauggaggu

SEQ ID NO: 334 - RNA, 78 nt, Human
accuucggguccacugguuugaugacacccaccgcaacugucuguggcauaucacgaacagcaaagcgacccaaaggu

SEQ ID NO: 335 - RNA, 83 nt, Human
accuuggcauaauuggugauccugaagaaagaggucucucuccuaagucucugucagaauugagcuucacaauugcuaauggu

SEQ ID NO: 336 - RNA, 115 nt, Human
accuuggugguaagaacuuuagcuccagggaacuugaggcagaggcccuguuguggucuguguugacagcaaccgcaccuguccacgucaugcuccugaacuugaccaccaaggu

SEQ ID NO: 337 - RNA, 61 nt, Human
accuuguggggcucuugggaugggcgggcacccaagcccuggcuuguccuucccagaaggu

SEQ ID NO: 338 - RNA, 89 nt, Human
accuuuuggugaagagggcgugaggaaaauaauuccauuaucgaauaugcuuuuauuauuccucuuuaaugccuuuuucauuuuggggu

SEQ ID NO: 339 - RNA, 85 nt, Human
acccuagaaaagaucaccaacagccguccucccugcgucauccugugacugcacaggacucuggguuccugcucuguucuggggu

SEQ ID NO: 340 - RNA, 67 nt, Human
acccugucucccauucugagaaucuggguuagaacugcaacauacaaauuucuuuugggggaugggu

SEQ ID NO: 341 - RNA, 61 nt, Human
acccuuccuuggcaccauucuucuacacuuaaggauggaguuugggaccacauugaagggu

SEQ ID NO: 342 - RNA, 74 nt, Human
accgaagcuggcuuuggugcugacaucggaauggagaaauucuuccacaucaagugccgagcuuccggcuuggu

SEQ ID NO: 343 - RNA, 100 nt, Human
accgagcuccgucgucucguuuccggcggucgcgcgcucuuuucucgggacgggagaggccguguagcgucgccguuacuccgaggagauaccagucggu

SEQ ID NO: 344 - RNA, 61 nt, Human
accgugggugguucaaugacaugaaaaucaccguaucauuggagauugugccacccaaggu

SEQ ID NO: 345 - RNA, 74 nt, Human
accuacuuugagauggcaagaacugcuggagacacacuggauguuuuuaccaugauugacaucuuuaaguaugu

SEQ ID NO: 346 - RNA, 102 nt, Human
accugacaacuggcccuaauacuucauucaaguucgcuauaguuuuggucccucaaucccagacauaugcauaauuggauaaguagaagggaaguguaaggu

SEQ ID NO: 347 - RNA, 104 nt, Human
accugccuauauuacauucauuuugaugguuuguaucucaaaggaguacagugaacgaaacuuguuuaaagauacaccggaaagaaaaagagaagaggcagagu

SEQ ID NO: 348 - RNA, 86 nt, Human
accuucgcauucagaauuugaccaucuuggugagaaacauuaagaccuacuaccagagauggggugaugauuaugaugaagaaggu

SEQ ID NO: 349 - RNA, 74 nt, Human
acgaacgguuaagcuggcuguccugaacacuauuauaacgguggacugagaauggcaaaauuagucgccuucgu

SEQ ID NO: 350 - RNA, 63 nt, Human
acgauauuaggagagaaagaccccgagaguauugguuugggaauuucuuuuguacaagauugu

SEQ ID NO: 351 - RNA, 78 nt, Human
acgcauccuacaagcaauaguuauggggaucugauggugcaacaaagauccaauaucuacugaucuucgauggagugu

SEQ ID NO: 352 - RNA, 75 nt, Human
acggagggucaguggaaaugggaccuugguugugacaaagccugagaaugucauguugauccauccaccccucgu

SEQ ID NO: 353 - RNA, 66 nt, Human
acggcccaagggcuggagcuguaugagaacacucggaccccuaccagcuccagaccuuuguccugu

SEQ ID NO: 354 - RNA, 88 nt, Human
acgggaauggagaaaguuugccagacuggauuuaggguguucuucaugaccucggucuuguggcaaauggugaacguuccauccucgu

SEQ ID NO: 355 - RNA, 87 nt, Human
acgggggaacaacacaggagagaaauaguauauacagccacgacugcuguugccgcugacuauaaaacaaaccuguguugucucugu

SEQ ID NO: 356 - RNA, 70 nt, Human
acggucauucugguagguagggguagggccagagcaaggaguccugguuugugaaccaccagcuggccgu

SEQ ID NO: 357 - RNA, 67 nt, Human
acguaaggggcugggcugggcagcaccaggggcuugaggcucuggugaugcuccuccagcuccucgu

SEQ ID NO: 358 - RNA, 89 nt, Human
acguagacucggcguggagggugucguggacgccgccugguccgaccgcggccggguggccucagggcuccucauccaggagucugugu

SEQ ID NO: 359 - RNA, 75 nt, Human
acuacuauguuaucucagcaaauuaagcgaugguuuuaaacauaaccuucuuaaagcuauucaggauuuaguagu

SEQ ID NO: 360 - RNA, 86 nt, Human
acuacugaaguucugcagaacaguaucgagcuugaauuugggggucucgcaguaauuuaugcucuuugcuuuugccuuuucauagu

SEQ ID NO: 361 - RNA, 70 nt, Human
acuagcaaaguggauugcugacagaacggauguucauauucggguuuucagaccacccaacuacucuggu

SEQ ID NO: 362 - RNA, 75 nt, Human
acuauucaggcgcaguacaaguuggggcacugcauccuuuguggauggauuuccguugcuguguuccucacaagu

SEQ ID NO: 363 - RNA, 73 nt, Human
acuauugccagacccacuaccagugcuuguggucgugcugguaguugcagaacucuggguagcuggcgguggu

SEQ ID NO: 364 - RNA, 70 nt, Human
acuauuggccauguccaucacgagaguguuuguaguaauuaauuaccuuguacaggaccuggcacuuagu

SEQ ID NO: 365 - RNA, 84 nt, Human
acucaauaagaaucuuuuauaucaaguaaaaugaaaguugaugauagaauaucaaauagugaauuugauaugaaaucuaagagu

SEQ ID NO: 366 - RNA, 75 nt, Human
acucaccauuuuacuacuucuaucuuuuugacuuuccaagaauguccuagaguuggagugguacaguaugugggu

SEQ ID NO: 367 - RNA, 71 nt, Human
acucauugaaaauggaggcuaugcagaccagaccuaugauggaugggugacacagccccagguuagcgggu

SEQ ID NO: 368 - RNA, 77 nt, Human
acucauuuacgucuuggccuguggcucaagaauuuuguccagaaaucucuuaggcccucaggcccuugcgaaauggu

SEQ ID NO: 369 - RNA, 92 nt, Human
acuccagccuggccucugaccccaguucaauccgaccaugcccaagcccaagcgggccuuuccuccagaacugcuccggggccuggcugugu

SEQ ID NO: 370 - RNA, 72 nt, Human
acuccucgcuuacgagcuccacagcacaaagggcaucaaaagacuguugugagaggaacgcaagcgaggggu

SEQ ID NO: 371 - RNA, 78 nt, Human
acucuauuuuauucaaauggcacuaugauaugaguucaaaaaauuuuugaaacaguguccuuuguuuugagauggagu

SEQ ID NO: 372 - RNA, 105 nt, Human
acucuuagaaaaaaggcuuacaacuuuugaagguuuagcaugaugucagauguccauuugucauauauggccuuuauuggcuugagguauguauguucuauaugu

SEQ ID NO: 373 - RNA, 84 nt, Human
acucuugagcucccuccacuucugaggacguuuccugacacauucaacagcaucagcguccaaucaggagggagcucaaagagu

SEQ ID NO: 374 - RNA, 112 nt, Human
acucuuugagaugacugguauugaauggagcagucuuugaaaggcaccaacccuuccuaacugaugguggucucuugaaagaggcucuuccaaauuugucuucugaaagugu

SEQ ID NO: 375 - RNA, 61 nt, Human
acugaaacugaaagggaaaacccacaaucuugggugaaacuccuuccucagcugguucagu

SEQ ID NO: 376 - RNA, 82 nt, Human
acugacaguacccgacuguuuauuggaucuauugauuugaaaagaauuuguuaggauagaucuuaagcaguaaucugucagu

SEQ ID NO: 377 - RNA, 73 nt, Human
acugcagcacuuauaucccuccccuguugauguuucuuuuauuagcacucagggcuuccaggugugagcaagu

SEQ ID NO: 378 - RNA, 107 nt, Human
acugcaggucguauaaacgugauaaaugaaugcuacccugcuggcucuccgagagaguguaauuaguauuuauaucaaaauuuaugaaacaaauuuucggccgcagu

SEQ ID NO: 379 - RNA, 69 nt, Human
acugcucuaugagaacauuucuaccucuggaaaaggaggcuggugaaugucccuaucucaaaggguugu

SEQ ID NO: 380 - RNA, 84 nt, Human
acuggagacacaucuaauggcugugcugaugucaagggacuuucuaaucauguucaucaguugauagcagaugcuguuuccagu

SEQ ID NO: 381 - RNA, 77 nt, Human
acuggaguaaaaggacuaacugcagucagcaacaaugcagggguugacaauuuugguuuaggggcuuuugcuucggu

SEQ ID NO: 382 - RNA, 93 nt, Human
acugggacugcugagauguccucuauucuugaagagcguauucuuggagcugauaccucuguugaucuugaagaaacugggcgugucuuaagu

SEQ ID NO: 383 - RNA, 66 nt, Human
acuggugcagagaaccauugcaagacuucgccuaaagaaaauuuuuaguggugucuuuguaaaagu

SEQ ID NO: 384 - RNA, 78 nt, Human
acuguagagggaauugccgggugugccccauggauuggaggacaaguuugcgaucacaagggccggcacuucugcagu

SEQ ID NO: 385 - RNA, 87 nt, Human
acuguauuuuuacuauacuguugcuauguuuggauacauaccacuguguuuaaguugccuacaguauucagcccaguaacauacagu

SEQ ID NO: 386 - RNA, 60 nt, Human
acuguccucauggagcuuacagacuaauuacauaaaguaagagcuaaaacugaugacagu

SEQ ID NO: 387 - RNA, 86 nt, Human
acugugaucgucgugacugugguccuauugaggccagugucugaguuaugggcuuggcacguauaggauccacuauuauucacagu

SEQ ID NO: 388 - RNA, 73 nt, Human
acuguguuaguaacucuuuaugaauauugucuaaaaacuaaauaagauauucauguaaagugauuaucacagu

SEQ ID NO: 389 - RNA, 89 nt, Human
acuuacugaaccucuuuggcaaacauuuaucaagacaauuuuggacacaaaugcuuguuuagaaauuuugcucaggaaggugagucagu

SEQ ID NO: 390 - RNA, 73 nt, Human
acuuauggucaucucucccacugaaaccaaggucuuuucaaauguggcuaaauggggaugaggagacacgggu

SEQ ID NO: 391 - RNA, 84 nt, Human
acuucuucucuuauguuagcuucauuauuagauuguuucauuuuugaaaauuccugaugugagaccugaauauuuuuaagaagu

SEQ ID NO: 392 - RNA, 92 nt, Human
acuuggagaguuuggcccaggaguuccugaaccauauuuguuacuugugcucacucagguugaguucuguggccaguuuguauucucaaagu

SEQ ID NO: 393 - RNA, 95 nt, Human
acuuguacaacauugccaucugcuguugagaaugguagguacuguucugagaaccuggugcagauccuuagcauaggcagaaauguugagaaagu

SEQ ID NO: 394 - RNA, 75 nt, Human
acuuuacuggucccuuuacucuuccacauaaaugguauauacaaccacucagguccaaggaaaaagccgguuagu

SEQ ID NO: 395 - RNA, 88 nt, Human
acuuucaagcuccuggggaaauguugcugguugaccguuuuugggcaauccauuuucggccaaagauuucacccuugagguugcaggu

SEQ ID NO: 396 - RNA, 64 nt, Human
acuuucaggguaaugaugcaccuguugaacaagacauuacagugcagaaacuuacuuugaaagu

SEQ ID NO: 397 - RNA, 71 nt, Human
acuuugauuuacuuagauauguauguaacaacagugaauguacauuaagaugaagucaaguguugcaaagu

SEQ ID NO: 398 - RNA, 99 nt, Human
acuuuuggcucauuuuuugaugcaugugaccugggauuauaaaugugaaauuagguuuacgaaaggauccagugucauugugcaucaugggcaaggagu

SEQ ID NO: 399 - RNA, 96 nt, Human
acuuuuuaagaguaugaucauagcaucuacuuguagguuuguugaguauguuugacaagcccaagauagaugcucauguuagacccauuaagaagu

SEQ ID NO: 400 - RNA, 111 nt, Human
agaaaagacaacuaguauuugaggaaggugugagaaaugagccuaaagagguagaugagacucaaaggaggcugauaaagauaccacagcuacaaguuuuuguuauauucu

SEQ ID NO: 401 - RNA, 80 nt, Human
agaaagagcucacaggcuuuggggauuugugcaugaggagauacagugcugcauuccuaacugucgagugacucugcuuu

SEQ ID NO: 402 - RNA, 82 nt, Human
agaaaggaagaggcaggcgccagggggaacccacuucguguuuugugacccucccuuuuaggugaagccccuuuuucuugcu

SEQ ID NO: 403 - RNA, 82 nt, Human
agaaagggccuaaaguuggugacuaaucccauguggaaauuuaacccguuccuuucaugaaucuucaccagaugcccuugcu

SEQ ID NO: 404 - RNA, 78 nt, Human
agaaaguuuuucaauccuucauggaaauaacaucacguuucuucuacagacaugaaacauggagagagaaacauuucu

SEQ ID NO: 405 - RNA, 74 nt, Human
agaaccagcugauggccccagugccugaaagugcccuugggcaccuccucagcuggugccaggaucuggucucu

SEQ ID NO: 406 - RNA, 87 nt, Human
agaacuucagccguggcucucuagucuucgugucaauauccuuuauuguuuugaugauuauuuucuucagccauggcucauauuucu

SEQ ID NO: 407 - RNA, 71 nt, Human
agaagccaagaaacauacgaaauacaacccucuuuuuagacguuuccaauuucuaaauuuuaaaagcuuuu

SEQ ID NO: 408 - RNA, 78 nt, Human
agaagcuucugcaauucucaaaucucugggaagcuuccaucaguggucucagucuauagugggaaagcaggugcuucu

SEQ ID NO: 409 - RNA, 72 nt, Human
agaaggccaugcagaaggcaaggacugacuaggcaauuaugucagcagauccuggccuaauggggcauuuuu

SEQ ID NO: 410 - RNA, 72 nt, Human
agaagucugguggagagacucuguggacguaaagaagggaaugaacacagagaaacuuucagccagauuccu

SEQ ID NO: 411 - RNA, 105 nt, Human
agaauaucugaacauuggacuuguucuuuagaguauauggccuuuaguucuuguggaacuaaauacagugauucuaagaucaaaagucuuaguguuugggguuuu

SEQ ID NO: 412 - RNA, 84 nt, Human
agaaucgcuugaacccaggaggcugagguugcagugagccaagauugugccacuguacuccagcccgggugacagagugagacu

SEQ ID NO: 413 - RNA, 84 nt, Human
agaaucgcuugaacgcaggagguggagauugcagugagcugaggucaugccacugcacucuggccugccugacagagcgagacu

SEQ ID NO: 414 - RNA, 86 nt, Human
agaaucucccucugucacccaggcuggagugcaguggcaugaucucggcucacugcaaccuccaccucccggguucaagcgauucu

SEQ ID NO: 415 - RNA, 67 nt, Human
agaaucuugccuuucuccuucaggcucauauaaacuauuggcugacaccguggaggguaaagauucu

SEQ ID NO: 416 - RNA, 76 nt, Human
agaaugccaagaugguauuuucuuuggcaagaugcuuugguugugcagucauugaagauacuuggcacuauuuucu

SEQ ID NO: 417 - RNA, 84 nt, Human
agaauugcuugaacccaggagauggaaguugcagugagcugagauugcaccauuguacuccagccugggugacacggcaagacu

SEQ ID NO: 418 - RNA, 71 nt, Human
agacaaauugaagggagagaugauggaccuccaacauggcagccuuuuccuuagaacaccaaagauugucu

SEQ ID NO: 419 - RNA, 105 nt, Human
agacaaggccucgcucugucacccagggcuggagugcaguggguguggaucaauaccucacugcagccuccaacuccuggggcucagggcaauccuuccuugucu

SEQ ID NO: 420 - RNA, 79 nt, Human
agacacugaauuggacauugauuuccuuuucucugcgucgaaaugucaaggaaaguugcaagucugugauuuuguguuu

SEQ ID NO: 421 - RNA, 87 nt, Human
agacaucacgguggaggacaugaacgagcuagagcgacaguuucuugaauugcugcaguucagacaucaauguuccuuccagugucu

SEQ ID NO: 422 - RNA, 86 nt, Human
agacaugucaaggcaggagccaucugaucgaccuuagacuuggcaagcugguggcuaaguccagugcucacugccgacaucugucu

SEQ ID NO: 423 - RNA, 86 nt, Human
agaccaccuuauucuuuucuuauggguauguggcaugaaugccaucauuuauuuacccagcugccaguugaagaacauuuuggucu

SEQ ID NO: 424 - RNA, 78 nt, Human
agacccagugccugugacuuugaguaguuuguucuaaauguggugacaaacaagucauuucuguaagacauugggucu

SEQ ID NO: 425 - RNA, 78 nt, Human
agaccuacuugauccaauaaaagaacucuaugaggaugucagaagaaaagccuuaaugagauuggaauaugaaggucu

SEQ ID NO: 426 - RNA, 71 nt, Human
agaccuugucacauucaugacauuuguaaggcuucucuccaguaugaauucuuugauguugugaaagguuu

SEQ ID NO: 427 - RNA, 114 nt, Human
agacgaggaggugauugagcuguauggggguacccagcacaucccacuauaccagaugaguggcuucuauggcaagggucccuccauuaagcaguucauggacaucuucucgcu

SEQ ID NO: 428 - RNA, 76 nt, Human
agacucuguuaugauuuuauuucuucaauuguuccaaucacaguuucuaauacagaaauaaaacuauucagcgucu

SEQ ID NO: 429 - RNA, 75 nt, Human
agagaagauucccggagaguaaauccucuuuccaaucccgaggaacaagcauugucucucuggcaagauccaucu

SEQ ID NO: 430 - RNA, 87 nt, Human
agagaaucauacauuuguuauauugucacaucugccuugagucuuucaacuauaagugacagcuauuuccuaaucaauguguucuuu

SEQ ID NO: 431 - RNA, 74 nt, Human
agagaauccagcauccacuguucugcccaguauuuauccauugaccugugcucugucuggauccuaucuucucu

SEQ ID NO: 432 - RNA, 93 nt, Human
agagaaucugccuaagugggaauuaaaauggcuaaaguuuuaaccucaauuauuuugaaaccagaacauuuuccccacuauagacgauuuucu

SEQ ID NO: 433 - RNA, 68 nt, Human
agagacuguccuuugcaaaggaaaugaccagcauuucaacuguaugucuuccuggaaggguagauucu

SEQ ID NO: 434 - RNA, 77 nt, Human
agagagauucaccuggguaccuacaguagucgagauguaagccuuggggacugggaauuugggaagagagauucucu

SEQ ID NO: 435 - RNA, 79 nt, Human
agagaggauagauugaauguggauaaugcgaagauagagugacgucucaucgaaugggucacguauugucuaccuuuuu

SEQ ID NO: 436 - RNA, 90 nt, Human
agagaucgagcaaucaaagcguuaucugucaaagcaauucggcuccuacugauuuugccaaaaccacgcuuguagauuaguucaauuacu

SEQ ID NO: 437 - RNA, 77 nt, Human
agagcaagaugaacagaaucuguauucucaaagagcacauagccaaacccugugccgaugccugucauuuugucucu

SEQ ID NO: 438 - RNA, 70 nt, Human
agagcuuccucaucagguuacccagaagugggucccauccaccauccaggugugcuuggauguuaguucu

SEQ ID NO: 439 - RNA, 80 nt, Human
agaggaaaaagcaaguugcuccagaaaaaccuguaaagaaacaaaagacaggugagacuucgagagcccugucaucuucu

SEQ ID NO: 440 - RNA, 87 nt, Human
agaggaagcgggaggagcugagcaacguacuggccgccaugaggaaagcugcgugccaagaaagacugagccccuccccugcccucu

SEQ ID NO: 441 - RNA, 87 nt, Human
agaggaagcgggaggagcugagcaacguacuggccgccaugaggaaagcugcugccaaugaaagacugagccccuccccugcccucu

SEQ ID NO: 442 - RNA, 84 nt, Human
agaggaccucacccuaagagccgcccccugugcuacugaucucgcauacuacgcucacacucuucuuggugcucugguaccucu

SEQ ID NO: 443 - RNA, 61 nt, Human
agaggagauccaggcuaaauuuucuggcccuucaggaaggcuggcaccucuggcucucccu

SEQ ID NO: 444 - RNA, 80 nt, Human
agaggcaaagcuagggcagcucuggggucugggugggaaaggggcaucugaucucaguugcugcucaaggcacagcugcu

SEQ ID NO: 445 - RNA, 86 nt, Human
agaggcacaucuugauaacaugcugagaacugaggcaacugaugucuuuaggcucuuauagucccagcauguuuuuaagagcuacu

SEQ ID NO: 446 - RNA, 87 nt, Human
agaggcuguguggccaaccaggacccaaggugcccuucccagauuccuugggaaggacacagcaguauuggaccgguucuagccucu

SEQ ID NO: 447 - RNA, 62 nt, Human
agagggaagcagguucauaguucacaccuuguguugaagaugacaugagccuucuuucuccu

SEQ ID NO: 448 - RNA, 71 nt, Human
agagggauguagccagauucuguggaccgccgucuuuuucacccuuaagaauccgucgcuaugauuucucu

SEQ ID NO: 449 - RNA, 72 nt, Human
agaggggacccuaacaggcuggacagaguuggagcaaugguaaguucugacuagaguggccggggauccucu

SEQ ID NO: 450 - RNA, 66 nt, Human
agaggggccacggggcgcccauguacaaaacuacguguucccgccauagccccuuggauucccucu

SEQ ID NO: 451 - RNA, 115 nt, Human
agaggguugacauuagguuuggugagaugaguugcuuggcacagaucagcagaacaggacccuggugauaaggcaucuggcuuugcuaaccacuuaucaucuuccauuauucucu

SEQ ID NO: 452 - RNA, 89 nt, Human
agagguggaacuuugaagaauucacuggucguuuuguaucacagguacaacuagagcguacacuuaacuuuucaacuguucuaucaucu

SEQ ID NO: 453 - RNA, 80 nt, Human
agagguggucugcugaccugugguaucucagaggggacguuccuccuccucccugugcacaggugggcugaccuccugcu

SEQ ID NO: 454 - RNA, 107 nt, Human
agagguguuccuuaggccacacccugcccucccuggacugccugaccucgcuccaaggcucaggggaagguucugagggcaggugugaaaaugcuuggaaugucccu

SEQ ID NO: 455 - RNA, 86 nt, Human
agagucucauucuguugcccaggcaggagugcaauggugugaccucaggucacugcaaccucugcugccuggguucaagcgauucu

SEQ ID NO: 456 - RNA, 68 nt, Human
agauacacccuuuccguuuggauggugaguuccuaaguuuauccagagguaaagcccauugugugucu

SEQ ID NO: 457 - RNA, 73 nt, Human
agauagggcuuuccccauccuuuugcuuuuuuuaggcaacccuuucacaaaaccagggaaggggaaccugucu

SEQ ID NO: 458 - RNA, 114 nt, Human
agaucaacgauggcauuagauuagcauuggagcacaaacccuauugugaacuguacaugccagggaucuagguugcaugcuccuuaugagacucuaacuagugccugaugaucu

SEQ ID NO: 459 - RNA, 68 nt, Human
agaucgauggaauuucugggguauagcacauucuaaugucaccugagcuuccagguccucaaugaucu

SEQ ID NO: 460 - RNA, 72 nt, Human
agaugaaauaauguucugucacgugaaauauuuaaguauauaguauauuuauacucuagaacaugcacauuu

SEQ ID NO: 461 - RNA, 85 nt, Human
agaugacuguugggagagaagcugaggcagggcuugcaugucugcuagacuugcugguuccuugcuucuagcacuccuguuaucu

SEQ ID NO: 462 - RNA, 69 nt, Human
agauggaugggacagaaaauaaaucuaaguuuggugcgaacgccauucugggggugucccuugccgucu

SEQ ID NO: 463 - RNA, 87 nt, Human
agauggucugaugcuacaggacuugguuucagcuaagcugauuucagauuacacuguuaccgagaucccugauaccauuaaugaucu

SEQ ID NO: 464 - RNA, 76 nt, Human
agauguagcuuuuguaauacuauuuugaccucuucugcucucauuugguuaauauuugcaugcaaugucuaaaucu

SEQ ID NO: 465 - RNA, 95 nt, Human
agauucaaagcaacaccaccaccacugaaguauuuuuaguuauauaagauuggaacuaccaagcauguggcuccuggucaguguaauucuaaucu

SEQ ID NO: 466 - RNA, 88 nt, Human
agauugucggacacgcgguaauugaugaacggcaggugagggagagcucugaucagccugguguucauuguccagaguccggcuguuu

SEQ ID NO: 467 - RNA, 113 nt, Human
agauuuuuucugauacuacauauugucaguuuuuuaaauacucaguuugugcuaaaagaaaacauucggcaacugauaucugcuguucuguauguaucugucaguccagauuu

SEQ ID NO: 468 - RNA, 65 nt, Human
agcaagaguagggugcauggcuugaauaagaggaaacagccguucacccaacauuugcuuuugcu

SEQ ID NO: 469 - RNA, 107 nt, Human
agcaaggacaaguugugaccuucccaguccucucuccauuugcagaucagcaagcuucugucagcaaggagggguggacaaugaaacuggguucagcuugauuuguu

SEQ ID NO: 470 - RNA, 67 nt, Human
agcaauccucaauauuucggggagaaauauuuuggcuucccucaguuugaaguguuagguuuuuguu

SEQ ID NO: 471 - RNA, 71 nt, Human
agcacaucuaagggaauaacaugauuuaagguugaaauggcuuuagaaucauuuggguuugaggguguguu

SEQ ID NO: 472 - RNA, 70 nt, Human
agcacaucuuugagaucucccgccguccugaccuacucacuauggugguugacuacagaacccgugugcu

SEQ ID NO: 473 - RNA, 106 nt, Human
agcacaugguauuccuggguggugcaguucuagcggauaucaugaaagacaaagacaacuuuuggaugacccgacaagaguaccaagaaaaggguguccgugugcu

SEQ ID NO: 474 - RNA, 90 nt, Human
agcaccagcucuugccccuaugcuggguaccaagggaguucuccuagcuguggcuucucuagguucuaggggugcaagccucuguguguu

SEQ ID NO: 475 - RNA, 73 nt, Human
agcacgcuacaacgggcaucgcuggacuagcaacuuguccugcuaucccucaaugugacgcagugagcgugcu

SEQ ID NO: 476 - RNA, 90 nt, Human
agcagcaaggcccugguuucuaagcuguauccuuuuauucaugugggacaugagcaaauggcagaauuaggggcgagugcuuucaaugcu

SEQ ID NO: 477 - RNA, 71 nt, Human
agcagcagcccucucucuggaaccgugggauuuggaccauucuccacccugaagugcagaggguugcuguu

SEQ ID NO: 478 - RNA, 74 nt, Human
agcagccagaugguccagagacagggauuuugauacauguggucucuguccuucagaaggaagugauugcugcu

SEQ ID NO: 479 - RNA, 65 nt, Human
agcagccgagcggccauggagcugugcgggcuggggcugccccggccgcccaugcugcuggcgcu

SEQ ID NO: 480 - RNA, 77 nt, Human
agcagucaauagcauccuucucuacaacaggaggucaugaguagcuuucugccagagggaggguguuacgagcugcu

SEQ ID NO: 481 - RNA, 78 nt, Human
agcagucacucuccacccuucccuucugccugcccagcugccccggggccacgaguggaugcuggggcuguggcugcu

SEQ ID NO: 482 - RNA, 85 nt, Human
agcaguccaaaaaaugugaaugugcaaauugugaguaaaacauugcauuuaaauuugcacucauuugcaaguuacaguacuagcu

SEQ ID NO: 483 - RNA, 65 nt, Human
agcauacagcagcaagaaggggugcaggugguggugcaacagccuggcccuggguugcuguggcu

SEQ ID NO: 484 - RNA, 79 nt, Human
agcaugacugacacgucugaccccugagaagguggucucugccuuccuaaaggugucaucuguguucaaggacgaagcu

SEQ ID NO: 485 - RNA, 86 nt, Human
agcaugaucaagaagccccgcccacucgggcugaaggcagugauuuuggccaaugcaguccuggauggagccgacugcaucaugcu

SEQ ID NO: 486 - RNA, 63 nt, Human
agcauggucagcaaguucucgggguucuccagggaauucuugccagucccuuaagauuaugcu

SEQ ID NO: 487 - RNA, 82 nt, Human
agccaaaauguacaagaccacaccggaugucaucuuuguauuuggauucagaacucauuuggugguggcaagacaacuggcu

SEQ ID NO: 488 - RNA, 72 nt, Human
agccaaagcuuguuuccuuuuucuucccauccugaguucagugugaaguauagggaagaacaacaccaggcu

SEQ ID NO: 489 - RNA, 86 nt, Human
agccacaccaccagaaugugucuguccccagcaauaauguucacgcgccuuauuccagugacaaagaacacauguguacugugguu

SEQ ID NO: 490 - RNA, 77 nt, Human
agccaccuccgccaccccugccccgccgacccagcacaccuaggcagggccuguggggagugggcgccgggagugcu

SEQ ID NO: 491 - RNA, 80 nt, Human
agccagagggaucgaaauggaaaucagcugagaucaccgcaagaggaggcguuacagcgauuggucaaucucuauggacu

SEQ ID NO: 492 - RNA, 63 nt, Human
agcccagcaggcucguaccaaagucacagcaguaaugcuauguacugcagagucugaugagcu

SEQ ID NO: 493 - RNA, 90 nt, Human
agcccaguccuaaauucgaauagcagcucuuaaagagaauaggaugcucuugauaggcuuucuuuaggacugauauucaauuucugggcu

SEQ ID NO: 494 - RNA, 76 nt, Human
agcccgaaagugucuccaccaggcggcuucaauggauccaucccuaaagagguggcccccuggaggccaucuugcu

SEQ ID NO: 495 - RNA, 61 nt, Human
agccgacgggaccggcucaaacccccggggguuuucaacggggggcggcgggacccgugcu

SEQ ID NO: 496 - RNA, 76 nt, Human
agccgcagucuguauggccuggggggcuccaagaggaucuccauuggagggggcagcugugccaucaguggcggcu

SEQ ID NO: 497 - RNA, 73 nt, Human
agccggcgacacccuggagggacgggcagguguggugagccucugcccggguucucugggugagggccaggcu

SEQ ID NO: 498 - RNA, 69 nt, Human
agccucaaagcuuggccagggcugaagguaccacacgguugugggugaggcaggcuaagcgggauggcu

SEQ ID NO: 499 - RNA, 70 nt, Human
agccuccaggguccugcccgccgagcuccagcagccaguggggcgggcgcggcacagccucugugagacu

SEQ ID NO: 500 - RNA, 60 nt, Human
agccucccuaguaguugggauuacaggcaugcgcuaccaagcccagcuaauuuuuguguu

SEQ ID NO: 501 - RNA, 86 nt, Human
agccuggagccggcugauguuccgguucaucucagagaucucagucuuugugcgccgaggucauccccgugcuucccagccaggcu

SEQ ID NO: 502 - RNA, 79 nt, Human
agccuuccauuggaagaaggugccgucuaggacuuucauaacuagagagaagacaacaucugcuuugaaaggacaugcu

SEQ ID NO: 503 - RNA, 105 nt, Human
agccuuucuugucuucauaagccuguugaugucucugguccugauccugaaaucacagaugcagacagacuaacagacacaggcuuacaacuugcagggcaggcu

SEQ ID NO: 504 - RNA, 77 nt, Human
agcgagaaguacauccugacccugcagacggugcacuucacuucugaagcuguggaguugcaggauaugagcuugcu

SEQ ID NO: 505 - RNA, 78 nt, Human
agcgaucaugucgcacaaacaaauuuacuauucggacaaauacgacgacgaggaguuugaguaucgacaugucaugcu

SEQ ID NO: 506 - RNA, 68 nt, Human
agcgguggccccgagguucgagucuugcucuucaaugcuaccggggaccgggacccggcggcccugcu

SEQ ID NO: 507 - RNA, 89 nt, Human
agcguuagguaugagccucgguguuaaucggcgaggguugggcaacguguugcuagucuggucguuggugacagugaggcuucugcgcu

SEQ ID NO: 508 - RNA, 75 nt, Human
agcuaacauacacauagugaagaaugcuuuccuuuaagacugggagcaaggcauucuuauucaacaauguuagcu

SEQ ID NO: 509 - RNA, 81 nt, Human
agcuaaggaugcuggggcagaaagauggaaccuggguuacucaugacaucuugaaacugcugcagccauccuagacuggcu

SEQ ID NO: 510 - RNA, 114 nt, Human
agcuauugugacaaucuugguuaccauccauuaagugcugcugauuuuggaaagaucaugaaaaacgucuuuccaaacaugaaggcacgucguuugggcacaagaggcaaaucu

SEQ ID NO: 511 - RNA, 80 nt, Human
agcuccaucuuuuguaggggagugaguuuccaucucuggacauaucuaacagaggcuggauuccaccuacaaaagaagcu

SEQ ID NO: 512 - RNA, 67 nt, Human
agcucccaguaucgaggggcaaacuuaacauuagcuuaaugcgacuuauuugcccagauuggguccu

SEQ ID NO: 513 - RNA, 86 nt, Human
agcuccgcgccgccggcaaugagaguuuccugcaacggccaguacgccgaggccuccgcgcucuacggccgcgcgcugcgggugcu

SEQ ID NO: 514 - RNA, 61 nt, Human
agcucugcacucaugauucuguggcucucuguccaucuggccacaguucagaagccaggcu

SEQ ID NO: 515 - RNA, 84 nt, Human
agcucuuccgccuggcgcggcuugaggaccagugcacugaguacauggccaaggucauugagaagcugguggagcgggaggacu

SEQ ID NO: 516 - RNA, 85 nt, Human
agcucuuccuggaucgucucagaucugccauuccucuggauaugaaccugugggcguggcagaaauccagaaaucaguaggggcu

SEQ ID NO: 517 - RNA, 89 nt, Human
agcugaagucacacaugaaagaagccaugaucaagcuugguuuccacuugcucugcuucuucauguaucuuuauaguaugaucuuagcu

SEQ ID NO: 518 - RNA, 91 nt, Human
agcugagcucacagccgaauaagccaccaugaggcugucagugugucuccugauggucucgcuggcccuuugcugcuaccaggcccaugcu

SEQ ID NO: 519 - RNA, 75 nt, Human
agcugcgcuccccugcuagaaccuccaaacaagcucucaagguccauuuguaggagaacguaggguagucaagcu

SEQ ID NO: 520 - RNA, 87 nt, Human
agcuguaaauuauguuggagcagggacuguggaguuuauuauggacucaaaacauaauuucuguuucauggagaugaauacaaggcu

SEQ ID NO: 521 - RNA, 60 nt, Human
agcugucagggccucacuguggaaggaagguccacagaaaacauccugggguccugagcu

SEQ ID NO: 522 - RNA, 87 nt, Human
agcugugucuugcuuucuuauuugagguuucuucagaaagggaaacugauuauauuagagacaauaauguuggaagacaaaacaguu

SEQ ID NO: 523 - RNA, 104 nt, Human
agcuguguggguggaacgugccucugcugcccacccaggggcccugaugugggaaccucacccauggguaaggcagcggggacccaggugugcacccacaggcu

SEQ ID NO: 524 - RNA, 80 nt, Human
agcuuacugccagcaccaacugccucucacaggcuggggugaucaugggacugggaaggaggggugugggcgguagagcu

SEQ ID NO: 525 - RNA, 83 nt, Human
agcuuagauaccauguaguggucuguggcuacaggaagcugguucugucguguuccacagucugcuuaaaaaacugucugacu

SEQ ID NO: 526 - RNA, 68 nt, Human
agcuucaaaagcacaacuacacacuuugcccaaggucugauucuguguaucugugcaucugaggagcu

SEQ ID NO: 527 - RNA, 83 nt, Human
agcuuccauguccagaggaagccaggcgucuccuguaggaaaugucuuucuuguaggcucacucaccauugcacagggaagcu

SEQ ID NO: 528 - RNA, 89 nt, Human
agcuuccugcaggcccagcugugccaggacgugcugagcagcuuccaggagcuguguggggcccuggggcuggaacccgguggggggcu

SEQ ID NO: 529 - RNA, 78 nt, Human
agcuugcugaugcaucaguggcagcagauucaagggugguuuccagcaucuacugucaguguggcaugaggacaagcu

SEQ ID NO: 530 - RNA, 85 nt, Human
agcuuggccaacauggugaaaccccaucucuacuaaaaauacaaaaauuagcugagcaugguggugcgcgccuguaauccaagcu

SEQ ID NO: 531 - RNA, 111 nt, Human
agcuuugccacauucugcacagacguggacucugggaccguggugugcagauguuuucucauggccgaguuaucccugaaccaucuugugcagccuuuaugagggcaagcu

SEQ ID NO: 532 - RNA, 81 nt, Human
aggaaaccaaaauauugacagcaguuaucucugauagauagaaugacagaugauguuuauuuucuucuuacacuuuuuccu

SEQ ID NO: 533 - RNA, 69 nt, Human
aggaaaggaggaagaaauguuuucuuaggggaauucgcuagguuuuaacgauuuguuucuccugcuccu

SEQ ID NO: 534 - RNA, 56 nt, Human
aggaaaguugcuuuuagaaguagaauauauauucacucacaugcaagcgauuuccu

SEQ ID NO: 535 - RNA, 81 nt, Human
aggaagacacauagguggguuuauguuucaccucauuuggaacaaaagaggacagaagcagaccacucugugcaccaaccu

SEQ ID NO: 536 - RNA, 79 nt, Human
aggaaguggaugagcuguacagagaagcaccuauugauaaaacggggaaucucacuuacaucgaguucacacgcauccu

SEQ ID NO: 537 - RNA, 72 nt, Human
aggaaucuaguggccaagaguuguaguuuagaaacaacccaucugaauacugcuuuuaccacuuugauaccu

SEQ ID NO: 538 - RNA, 74 nt, Human
aggaauuccugcccagcucacaaucuaaguuucaauacucugcagcucagacagaaaguuuggccuguguuccu

SEQ ID NO: 539 - RNA, 88 nt, Human
aggacacgggguugggggaaggcagacuggcaggccagggugacccuccugaccagaggugcugcccagacccgagcccguuuguccu

SEQ ID NO: 540 - RNA, 83 nt, Human
aggaccucaaagagggagucacagccugggcucggggagcucccaggucugggcucccugaguggcugcaucucuucucuccu

SEQ ID NO: 541 - RNA, 67 nt, Human
aggacgcggccgcaagcuuauucccuuuagugaggguuaauuuuagcuuggcacuggccgucguuuu

SEQ ID NO: 542 - RNA, 90 nt, Human
aggacugcagccuaaauuccaaauaccagagacugaaauuuucagccuugcuaagggaacaucucgauguuugaaccuuuguugugucuu

SEQ ID NO: 543 - RNA, 76 nt, Human
aggacuucgucaccaugacagcuucucggaugcuaugacccaaccaucuguggagaguggagugcaccagguaccu

SEQ ID NO: 544 - RNA, 87 nt, Human
aggacuugacggagaggugaaggcuccagacgccaggauauuuauucccugugccaauacagcauucacaccugaccuccagguccu

SEQ ID NO: 545 - RNA, 79 nt, Human
aggacuuuagcagcucguuguauuuccuggucaaccucucagcgaccuggagggauucgucgagcucccgccgcagcuu

SEQ ID NO: 546 - RNA, 98 nt, Human
aggagaagaccuucaagcuuuacauuuggacuuggacgcaagaacuucaggaggauggagucacuugugguauugauguggacuuugagguuuggccu

SEQ ID NO: 547 - RNA, 85 nt, Human
aggagaaggaauuucagguggguuuaagucagagcuaguuccccaacagaaagaucauuugaaaccaguuuuuaucccuucucuu

SEQ ID NO: 548 - RNA, 117 nt, Human
aggagacccgugucauguuugagaagauagcgaaauacauuggggagaaucuucaacugcugguggaccggcccgauggcaccuacuguuuccgucugcacaacgaccggguguacu

SEQ ID NO: 549 - RNA, 82 nt, Human
aggagacguccucuacauaaaagcuccaugugaaaagcuacuccuagucuuaacauuugcaguccuugugucacugucuucu

SEQ ID NO: 550 - RNA, 68 nt, Human
aggagcaaccucuggagccaucgcgauugauuccucccaucccaagauggcuucuggguuccacuccu

SEQ ID NO: 551 - RNA, 130 nt, Human
aggagcagacuuuucucuugucacuuuggaaggagaggauugugaggcugccccuuuaaauagcauucccguaggaggcagaucacauccauccgucaccuacugccaaagcaucauuuuugguuucuau

SEQ ID NO: 552 - RNA, 70 nt, Human
aggagcccaugagauuugagucagguuguaagugaaaucacuuacacuuuuggauagaauuuauacuccu

SEQ ID NO: 553 - RNA, 77 nt, Human
aggagccucuucauguuugaugucccagaagcaagggccuguuucuguugaguuugauuauagaagagaggacuccu

SEQ ID NO: 554 - RNA, 106 nt, Human
aggaggcggagcucgggugguaacgccagcgacggggaguggcuauaaauacagaugaagcuucgcuggcuugccggccccuaaccugcugugcaccccacuuccu

SEQ ID NO: 555 - RNA, 84 nt, Human
aggaggcggaggcagcuggggagguccugagcgaugugaccaggccgccaucgcucgucucuuccuacucuccugccgccuccu

SEQ ID NO: 556 - RNA, 73 nt, Human
aggaguaaaggcauaggccccucaugaccugcagggaccccagccacugccucugggcuuggcuugagcuccu

SEQ ID NO: 557 - RNA, 66 nt, Human
aggaucauucuuccucggcggauaacaagagcgcaguggcucuucccuggggauagagugcacccu

SEQ ID NO: 558 - RNA, 75 nt, Human
aggaugaaucauauauuagaaugugaauucuaucuguuagaacuaauggauuguugcuugauaguguaucauccu

SEQ ID NO: 559 - RNA, 74 nt, Human
aggauggaacaggaagguauguccugucaguaucuuaacccuuucaacaagacauuuaccuauuugucuuuccu

SEQ ID NO: 560 - RNA, 66 nt, Human
aggcaaaagagaaauccucagacacauucugaaggauccggacauggucugggacuucuggagccu

SEQ ID NO: 561 - RNA, 87 nt, Human
aggcaacaugcuguuguuaagggcacuugggccauugguguuuugugacagcugggcucaggcaucucaacaagcagcggugugccu

SEQ ID NO: 562 - RNA, 98 nt, Human
aggcaccuggggguguagaccgggguggagccgcaugggcaccuggggguguagaccgggguggaacuauguaaacaucccacacacucaggugacuu

SEQ ID NO: 563 - RNA, 97 nt, Human
aggcaggagaaugguguuaacccaggaggcggagcuugcagugagccgagaucgcgccacugcacuccagccugggagacacagccagacuccgucu

SEQ ID NO: 564 - RNA, 65 nt, Human
aggcagggcaccugggggaugcuggggccaucggcucucagauggcaacucccagggcccagucu

SEQ ID NO: 565 - RNA, 74 nt, Human
aggcagggguauccgugcguaauucagggaaggaggaaacagcuaugggguggggauuauguguggcccuggcu

SEQ ID NO: 566 - RNA, 66 nt, Human
aggccagaggaucacuugagcccaggaguuugagaccagccugggcaacauagugagacucugucu

SEQ ID NO: 567 - RNA, 108 nt, Human
aggccaugcaauccccccacggggcauucuagaucaguccgauguggacuucgacaaggagucucuaucauaugguuucaccauccucagguugggggagugcucccu

SEQ ID NO: 568 - RNA, 60 nt, Human
aggcccuauuggacaaauuugguggggagcauaauccaccaucaauauaucuggaggccu

SEQ ID NO: 569 - RNA, 63 nt, Human
aggccuaaggagcacuagcaacauuuggcuauauugguuugcuagucaccaacuucugggucu

SEQ ID NO: 570 - RNA, 63 nt, Human
aggccugggccgcuuccugcaagaaaacaagcagcuucugcacgacgcacuggcccaggaccu

SEQ ID NO: 571 - RNA, 85 nt, Human
aggcgccauuccuuccacauucggcuauggggaggaaagccaguaggacccauuugucgacaugguggaagggguuucacugucu

SEQ ID NO: 572 - RNA, 95 nt, Human
aggcgcuggugucaaacaguuaugugaugcuuugaagcacccucacuguagaugagagugucuugcacugcaaacauagccgaucacccgugccu

SEQ ID NO: 573 - RNA, 86 nt, Human
aggcggccuccaacgcgagcgaaagacgccagccgagucagcgcggacauacucgcucccgucccgcccgcgguccccagccgccu

SEQ ID NO: 574 - RNA, 87 nt, Human
aggcgugaacaguuauccagaagaacagcacccuccaccacuggucugggcuugagguucaucaucaauaaucuguacaccucgccu

SEQ ID NO: 575 - RNA, 130 nt, Human
aggcucacacagcaagucuuugucaaagcuuaggaauggaaguagguuguccccuccuagucaugggaucucuccaacucacuagacaaucuugcuuuacgugcugaugaacaugcucugugagcagccu

SEQ ID NO: 576 - RNA, 112 nt, Human
aggcucugagcagucaggguggaugggaaguggggggccauugccuucucggaguucaggacagaagguucuggccuccugucuuagccuuccugggcugugucuggagccu

SEQ ID NO: 577 - RNA, 64 nt, Human
aggcugagagacugcuccccauugcagauuagcguauagucagaugggcuacaguuuuucuccu

SEQ ID NO: 578 - RNA, 83 nt, Human
aggcugagguaggaugauugcuagcuagaguccaggaguucaggauuaaaaugagcuaugaucauaccacugcacuccagccu

SEQ ID NO: 579 - RNA, 79 nt, Human
aggcuggaaugcagugauacuaacauggcucgcagcagccuugaccuccugggcucaagcgacccuccugcuucagccu

SEQ ID NO: 580 - RNA, 84 nt, Human
aggcuggacugagcugcucucccacaggguuucugugcagcuggauuuucucuguugcauacaugccuggcaucugucuccccu

SEQ ID NO: 581 - RNA, 73 nt, Human
aggcuggaguaccguggcacgaucugggcccauugcaaccuuugcauccggguuuaaagcgauucuccugccu

SEQ ID NO: 582 - RNA, 79 nt, Human
aggcuggagugcaauggcaagaucucggcuuacuacagguuugaccuccugugcucaagcaauccucccaccucagccu

SEQ ID NO: 583 - RNA, 87 nt, Human
aggcuguaugcuguuaaugcuaaucgugauagggguuuuugccuccaacugacuccuacauauuagcauuaacaguguaugaugccu

SEQ ID NO: 584 - RNA, 109 nt, Human
aggcuuggcuuuguuacuuuugaugaccaugauccuguggauaaaaucguauugcagaaauaccauaccaucaaauggucauaaugcagaaguaagaaaggcuuugucu

SEQ ID NO: 585 - RNA, 62 nt, Human
agggaaaggacugcccugcuccuuuugaggaaggaaaccugcaaggcaaguucucaaucccu

SEQ ID NO: 586 - RNA, 81 nt, Human
agggaaauggccuucccgccggacgaaggcuuaucugccugacaggcugugacucuucucucaaccuugggcuucuucccu

SEQ ID NO: 587 - RNA, 88 nt, Human
agggaauagaucuguucugaguguccccaaaaaaguuguccuaggaacugauguggagaaguuacagggagacugauuuccauuccuu

SEQ ID NO: 588 - RNA, 71 nt, Human
agggagagguggaggcccugcuggaucgauacuucgaggcugauccuccagggcagguggcugccuccccu

SEQ ID NO: 589 - RNA, 67 nt, Human
agggaggcuggagguuguggugggucacaguguugcugacaccucuggccuccagcccugcaucccu

SEQ ID NO: 590 - RNA, 75 nt, Human
agggauuuuguuugcuccuucugccauuugaguacacagcuagaaauggcaucuaugaagcagacaguaggcccu

SEQ ID NO: 591 - RNA, 129 nt, Human
agggcaagauccucgcuccaaccguggcccguguucucuccuuuuguccccauagugugacuccgccaggaacuuggaauggcugaagacugugaaugagagucaugggucuguggaacgcucaucccu

SEQ ID NO: 592 - RNA, 83 nt, Human
agggcaggggagagcaagggguuuuggggucgaccuccugggggaggguagcccuggggccccgcugugcccucacucgcccu

SEQ ID NO: 593 - RNA, 71 nt, Human
agggcagugggugagggacaggaacccagggagggaccauucccauaacugccccacuaagucccugcccu

SEQ ID NO: 594 - RNA, 87 nt, Human
agggccaugcagcuggagacccaugggggagcugauguuguuuugagagccgugcagcuggagauccgggggugagcugauguuccu

SEQ ID NO: 595 - RNA, 65 nt, Human
agggccgggcgugcuggagccugggaaaugccuacguguccauggggcgcccagucgcaggcccu

SEQ ID NO: 596 - RNA, 74 nt, Human
agggcggccggggagcaccugguuuuauuuccgugcagugaggggauaucauccuggugcccucgucuugguuu

SEQ ID NO: 597 - RNA, 102 nt, Human
aggggagguucuugcaaauucccaaggaaaugucaaaaaggcaaaauggccagcauuauccauuugcuuuuuuggguuuacugggugaauagcacuuuccuu

SEQ ID NO: 598 - RNA, 99 nt, Human
agggggacaacacccugauccgcaucauggucucccggagugaguuggacaugcucgacauucgggagaucuuccggaccaaguaugagaagucccucu

SEQ ID NO: 599 - RNA, 74 nt, Human
agggggcacaccacaucaaaaugagggguguguugcuguugcgaaauuaaaaccaaucguuguguuuguccccu

SEQ ID NO: 600 - RNA, 60 nt, Human
agggggccgguggaccugcuccagcagcuggugcugcaccagcaggagguccugcccccu

SEQ ID NO: 601 - RNA, 68 nt, Human
aggguaaugaguaggugagagggucuggaggaagccucccuacugcuggagccucuacuuauuacccu

SEQ ID NO: 602 - RNA, 71 nt, Human
aggguccaguuuauguugcaugucaguuuccuauuucauuacuucaagcaugcagugguaugaaugauccu

SEQ ID NO: 603 - RNA, 64 nt, Human
agggucuuuccaacuguucuggucagugaggacccugacugcaaggaggaguucuggagacccu

SEQ ID NO: 604 - RNA, 98 nt, Human
agggugagauaauguucccacaguguaucauuagugugaugaguuuaucucuuuaaagccucacaaccugcugauaugcugugguuuuucuugguccu

SEQ ID NO: 605 - RNA, 89 nt, Human
aggguuuuaaacacuaaucacaaacuggaaugacuugacuucaaaaggcaacaaccuuaaagggccgucauuuccauuagguauucccu

SEQ ID NO: 606 - RNA, 75 nt, Human
agguaccucaccuaaguggaaucauacaguauuugucuuuuugugacuagcuuauuucacuuagcauuauguccu

SEQ ID NO: 607 - RNA, 88 nt, Human
agguauaauucagagacuguccuuugcaaaggaaaugaccagcauuucaacuguaugucuuccuggaaggguagauucugcuauaucu

SEQ ID NO: 608 - RNA, 65 nt, Human
aggucaccagugacagggaaaaaguccugaaauccaggaaaaucacuuagucccugcgggugccu

SEQ ID NO: 609 - RNA, 64 nt, Human
aggucagaaagaccuccugacuccauguuacaguagacaaaacaaguuggacucuuuuggaccu

SEQ ID NO: 610 - RNA, 86 nt, Human
aggucuccuuaccuucugcuucccuuucugccugugacugaaugggcaugucaaggucuaguaggggauccaggaggaggaagccu

SEQ ID NO: 611 - RNA, 108 nt, Human
aggucuggaguugguuauggguuuugacucugaggaugacauugaguuuuaauucagcuuguccugguucugcagucaaaaauuccauguuagccuggcucgagacuu

SEQ ID NO: 612 - RNA, 82 nt, Human
aggucugguucagguguccagagucucaaggggcuggggcccagcccagcucucuucggcugagacucccgccagaaccccu

SEQ ID NO: 613 - RNA, 85 nt, Human
aggugaaaucaaaauaaucuauacuaucuagaagacuuucuugaugcgcaguccagagaugucaugguguagaacuugaacaccu

SEQ ID NO: 614 - RNA, 69 nt, Human
agguggcagagaggcaauaucaauccuucugcaucacacagugggaaaaguuugucucauugcaguucu

SEQ ID NO: 615 - RNA, 84 nt, Human
agguggggaugaaagcugagaaagcgaagaggugguucaggggaucacucuuuccuacuuguuccucucaccucaaacucaccu

SEQ ID NO: 616 - RNA, 106 nt, Human
aggugggugaggaagacuaacaaaaguaaugugagccagugucuucaaaaggggggcugaaaccaguugcaaaaaaugucagucuauagccacucccaacccaccu

SEQ ID NO: 617 - RNA, 62 nt, Human
aggugucugucccuaaagaacugguggcacuuaugagugcuauucgugauggagaaacaccu

SEQ ID NO: 618 - RNA, 127 nt, Human
agguguuuguauuuccuagagaaucuguuacugaucauguaaacuugaucacaccgcuggagaagccucuacagaacuuuaccuuguguuuucgagccuauagugaucucucucgugccuacagccu

SEQ ID NO: 619 - RNA, 119 nt, Human
agguucuggugaauucaggaugguauuuuugucuuugaauaguuucugguugcauuucuauagugggggugaagcuaggggaacuucugugaucuuccugaggucacuucaaagugccu

SEQ ID NO: 620 - RNA, 73 nt, Human
agguugaagugaccagagauugcgccauugcacuccagccugggugacaagagcaaccggucuacaacaaucu

SEQ ID NO: 621 - RNA, 91 nt, Human
agguuggugucugugaaaagcugacagagaugugagaggucccacccugaggccaacaaagacucugcagcucuggcagaaccacuaagcu

SEQ ID NO: 622 - RNA, 85 nt, Human
agguuuugcucuguuacccaggauggaaugcaguggcgugaucauagcucacuguaaccuugaacuccugggcucaagcaauccu

SEQ ID NO: 623 - RNA, 108 nt, Human
aguaacugcaaagaugcuguccgugcgcguugcugcggccgugguccgcgcccuuccucggcgggccggacuggucuccagaaaugcuuggguucaucuuucauugcu

SEQ ID NO: 624 - RNA, 69 nt, Human
aguaaggauaggccccaaauguggacagauccucuuagucacaugagccucuuggggucuauuuucucu

SEQ ID NO: 625 - RNA, 66 nt, Human
aguaaugacuuccagaaguauuuuggcaaucccaucuucuauugagggaccaagaugucuauuacu

SEQ ID NO: 626 - RNA, 75 nt, Human
aguaauuuagggagcagcccuaaaauuguccaaaggguucuaagugguucuugggcugcaucucucuggauugcu

SEQ ID NO: 627 - RNA, 96 nt, Human
gggaccucaaugccuggaccaagagugccgaggccuuuggcaagauuguggcagagcguccuggcacuaacucaacaggcccugacccaugguccc

SEQ ID NO: 628 - RNA, 69 nt, Human
gggaccugguuagucuuggggcagagaguaucuacuugggcacucucuuccaagaaagaccuugucucc

SEQ ID NO: 629 - RNA, 75 nt, Human
gggacgguugggggcugggagcccugggcguguaguguaacuggaaucuuuugccucucccagccaccuccuccc

SEQ ID NO: 630 - RNA, 89 nt, Human
gggacucagcaaugucagcccguuccucggccuccuccagcucaugcugaggcuugcggaauuuagcuagauugguguuggauuguucc

SEQ ID NO: 631 - RNA, 89 nt, Human
gggacuuaacugagaggaucugaguagcagacacccuaagagcaugucauugucuucucaccaguuacucuccaguuggcuagaguccc

SEQ ID NO: 632 - RNA, 71 nt, Human
gggagaaaggcuuaaguccuuggggugggaggagaaaccccuccccggggauccugcagcucuagucuccc

SEQ ID NO: 633 - RNA, 70 nt, Human
gggagaagggggcgagccugcgggcggaagaggaagcaaggcccucuuccuccacgucucaccccagccc

SEQ ID NO: 634 - RNA, 93 nt, Human
gggagaaucgcuugaacccuuggagguggagguugcagugagccaagauugugccauugcacuccagccuggguaacagagcaagacucucuc

SEQ ID NO: 635 - RNA, 100 nt, Human
gggagacccaggacccgggagagagguagaggggagcagagacagccaccagcuucuaucuucugcucuaagcacauucuuucacgaguuuaaguuuccu

SEQ ID NO: 636 - RNA, 66 nt, Human
gggagaggggauucacaaggugaagaacuggaaccccagcuucccuccagccucuccuccauuccc

SEQ ID NO: 637 - RNA, 89 nt, Human
gggagcaggagacccucauuugccacccagaccaaugugagccugcccccagcccccucucauuggaaguggcaaggggcuucccuccu

SEQ ID NO: 638 - RNA, 107 nt, Human
gggagccagcaagcaggaugauaucgaagagcuggagaccaaggccgugggaaugucuaacgauggccgcuuucucaaguuugacaucgaaaucggcagaggcuccu

SEQ ID NO: 639 - RNA, 74 nt, Human
gggagccaggccagggcgaggggccggaggcuggggaugccgaggucugucccacgcccgcccgccuggccacc

SEQ ID NO: 640 - RNA, 84 nt, Human
gggagccuggcaggccuggcccagcggccagggugaguguucucagaccccgggcagcuggugguucuccagggccagguaccc

SEQ ID NO: 641 - RNA, 120 nt, Human
gggagcgggaucuaaggacuuacaugaaccucgaguucugacuuugguaaagucugacccuagucugcugcugaagucugaacuugggccucugaccuggggccuuugacuuccccuucc

SEQ ID NO: 642 - RNA, 119 nt, Human
gggagcucuuugcucaggcaccaguagaacaauauccugguauugcuguggagacggugacagauucuagccgcuacuauguaauccggauccaggaugguacugggcgcagugcuuuc

SEQ ID NO: 643 - RNA, 105 nt, Human
gggaggagagaaggaaccauagauucugagaaacacaccaggaugacuaggccuggaggaguccagggugggccucagacccucacuucuugucuggcaccuccc

SEQ ID NO: 644 - RNA, 90 nt, Human
gggaggaucgcuugagccuaggaggucaaggcugcagugagcugagaucacaccacugcacuccugccuaggugacaaagugagacuguc

SEQ ID NO: 645 - RNA, 63 nt, Human
gggaggccagggaagcccgacgugguggggcgcugccucccgcuccguggccuccuuccuccc

SEQ ID NO: 646 - RNA, 73 nt, Human
gggagggcaauuuuucaucuuccaauggcggccucaaccuugaggcgaauccacuggcgaaagaugccuuucu

SEQ ID NO: 647 - RNA, 76 nt, Human
gggaggggccugugucugagccagagccugggacccaggagguucucugccagcucaagcgagaccagcccagccc

SEQ ID NO: 648 - RNA, 94 nt, Human
gggaguauagggcugugacuaguauguugaguccuguaaguaggagagugauauuugaucaggaaacgugguuacuagcccagagaguucuccc

SEQ ID NO: 649 - RNA, 74 nt, Human
gggagucguuugaggcgcgacuuccugcgccugcucagcagccugaggcgcggcgagugcccuccugcccuccu

SEQ ID NO: 650 - RNA, 68 nt, Human
gggagugaaauuuuccucucuuccccugcacauuaggaaggguaucagagggguugguguacauuccc

SEQ ID NO: 651 - RNA, 109 nt, Human
gggauagcucauuuuugaaaucaguuuagaacauuuaaaaugugggaaauucaaauaaaaaugcaaauuuucacuguuuucuaaaaagucagaucaacauugcuggccc

SEQ ID NO: 652 - RNA, 76 nt, Human
gggaucaaaugguggcuguguaaaucucuggagucauuuuauuccaucagacucuucacaacuauuccuaucuccc

SEQ ID NO: 653 - RNA, 61 nt, Human
gggaucccuaaauguaucugugauauuuggcuuucuaaauaugauacucuggggaggaacc

SEQ ID NO: 654 - RNA, 88 nt, Human
gggaucgugagacacauacagaucgagaccgggaucgugguguuauugacuaugaccgggaucgauuugacagagcaacgccgacccc

SEQ ID NO: 655 - RNA, 73 nt, Human
gggaucuuguuccacugauuacucucucugacgaguccaucaccugcaacuuaaaugaacaagcuuacauccc

SEQ ID NO: 656 - RNA, 72 nt, Human
gggaugggccaaauuaaaggaauagguugggcuaguuaacugcagcaggagcauguccuuauggcacagauc

SEQ ID NO: 657 - RNA, 102 nt, Human
gggaugggccaguuugcugagaaugacacauuacuguugccccucuaacuugacccuggguuuccuguggguaagcagcuguuucagcaaaucccagauucc

SEQ ID NO: 658 - RNA, 68 nt, Human
gggauuacaggugugagccauaucuccuggccuccuuuuuucugagacauggucucacucugacaccc

SEQ ID NO: 659 - RNA, 85 nt, Human
gggcacacacguucagccacccaccuucaagcacaaagagaaagcugaauuugcaggaugggagggcucagggugugcguucccc

SEQ ID NO: 660 - RNA, 67 nt, Human
gggcacauuggugguauuuugguauguggccacuggcccuaaacaacugaccauuucuacccugccu

SEQ ID NO: 661 - RNA, 76 nt, Human
gggcacccugcagacggcauucccguucagcugcaucccaugugcgucgaugggcaaaguauuuguagcacugccc

SEQ ID NO: 662 - RNA, 64 nt, Human
gggcaccgcaacgggcaaacaugagccccgcuggcucauacaugugcuccugcaucaggugcuc

SEQ ID NO: 663 - RNA, 63 nt, Human
gggcaccgggccggcggccgggcccgggccgugaccggaggccgcccauuuggccccgcgccc

SEQ ID NO: 664 - RNA, 102 nt, Human
gggcagcaaaaacauccauuccgcugcgcaacaguugucauuuuucuaacaucugaaaacuccagaaggagauggugauaaaugugguaccggauucugccu

SEQ ID NO: 665 - RNA, 74 nt, Human
gggcagggggccccuggaauuagggcuucucccaaacgcgggacacgggcuguggggcccccgggcgguugccc

SEQ ID NO: 666 - RNA, 88 nt, Human
gggcaucuggaucaaguucaggcacagcccuggucuccugcuccucuggacuguggcguuugcagcugagaacuuggcccuggugucu

SEQ ID NO: 667 - RNA, 93 nt, Human
gggcaugaagggcuuuaagggacagcugagccggcagguggcagaucagauguggcaggcugggaaaagacaagccuccagggccuucagcuu

SEQ ID NO: 668 - RNA, 74 nt, Human
gggcauuuagugcuauaaauuucccucuaaacacugcuucagcugugucccagagauuuugguacguugugucu

SEQ ID NO: 669 - RNA, 76 nt, Human
gggccacucaggccaugugcaccccugggcagagccccuuaaagcugcugucacuagaugcccaugguccaggccu

SEQ ID NO: 670 - RNA, 77 nt, Human
gggccagcagacuaucuaggaagcaggaguagcaugacuuuaaagugauucucugugccaaucucugcaacugguuc

SEQ ID NO: 671 - RNA, 67 nt, Human
gggccagguccggacaagacagcacuccugaagcagaugggcaggaggugaucgaggagccuggccu

SEQ ID NO: 672 - RNA, 81 nt, Human
gggcccaugcucuuaguggggaaaacucuuggagccguuuacuuugagcuuugaacacugaaaccauuguuggcaggguuc

SEQ ID NO: 673 - RNA, 86 nt, Human
gggcccccaagcuggggcccgcgacucgaaggggacugggauggggaucucguuggacugcguggcuagcuugggcaugggggccu

SEQ ID NO: 674 - RNA, 65 nt, Human
gggccccucugcggauggagccccaggugcaacagggcccauggucaucuguggagggacagccc

SEQ ID NO: 675 - RNA, 67 nt, Human
gggcccugagauggggucugaccucaguuccugcggggaacuucaccagugaccccagucagugccc

SEQ ID NO: 676 - RNA, 69 nt, Human
gggccggagccggcggcagugguggcagcgguaucgccgcccuagcucaccgcgccccuuuuccagccc

SEQ ID NO: 677 - RNA, 69 nt, Human
gggccggcauccggggccaggcuagaaacagaaucuaaugccugguagagccccacacaugccaggccc

SEQ ID NO: 678 - RNA, 71 nt, Human
gggccggugugagggcagguacagccgggucugggcuaugugcagagguuccuccuuguccuugauggccu

SEQ ID NO: 679 - RNA, 87 nt, Human
gggccgucggggccaucucccucccggagucgcuggccagucagcucccucuugaacuccagggggaaggcccucgccgacucgucc

SEQ ID NO: 680 - RNA, 96 nt, Human
gggccuggacccacaccgcgggaggacucgggcgugaccagguugccgcagggguagguccgcgcugucuuccgcgccgucugcggucgagcgucc

SEQ ID NO: 681 - RNA, 76 nt, Human
gggccuuuauuugguuuuggcuuuagcugauaauguuuuagugaugucagcuagugcaguucucaaauggcugccu

SEQ ID NO: 682 - RNA, 72 nt, Human
gggcgcuggcggaugucuugcuggcuacagaggagcgccgugguacuagagcgcaaggcuccuccggcggcc

SEQ ID NO: 683 - RNA, 79 nt, Human
gggcggccuagacccccugcugcccaggccguugaggcaacacuggguuccuggcuugacagcugugggcuggcugccc

SEQ ID NO: 684 - RNA, 72 nt, Human
gggcggcugcacgaaggaugaacgguuuguggcagaggugaccugccuggacccccugaggcgcagccgccu

SEQ ID NO: 685 - RNA, 77 nt, Human
gggcgugagugcaggaagcacauuuggcuuggcaggagcugucaggaaggggaagcggguuuccugcgauucugccu

SEQ ID NO: 686 - RNA, 67 nt, Human
gggcguuuuuuuggggggggaaaagguaagggccggguaugucuggccccuuugcaggggagcgccc

SEQ ID NO: 687 - RNA, 61 nt, Human
gggcuaaaugaucuacagccuuggccuaaucaaauggcuauagcauguggaucucgagcuc

SEQ ID NO: 688 - RNA, 73 nt, Human
gggcucaagugaucugcccacccugccugagccucccaaagugcugggauuacaggugugagccacugugccc

SEQ ID NO: 689 - RNA, 79 nt, Human
gggcucagcccccuucccccacgucacgucugcaucacuacugugggugagccuggacggacgggggcuggggcugccc

SEQ ID NO: 690 - RNA, 74 nt, Human
gggcuccagguuacagguagauuuaaaauugacugguugacaauugguuaaguuuaucuaaagaucugggacuc

SEQ ID NO: 691 - RNA, 62 nt, Human
gggcucgggcucugggcucaccaccucaucgaucagagggaggcccaguucuguccgggccc

SEQ ID NO: 692 - RNA, 81 nt, Human
gggcucgggggcgcucagcggcgagugggcaagauuggggccuuuccuguccucgaagcugcacaaagguggccccagccc

SEQ ID NO: 693 - RNA, 65 nt, Human
gggcucuguauggacuuucggcgugugcaugcacacgccgaauaacaaacugccacgccgagccu

SEQ ID NO: 694 - RNA, 70 nt, Human
gggcugaucuggaggggccggccgacggcuacgguuacccccgcggccggcacauccucucgguguuccc

SEQ ID NO: 695 - RNA, 83 nt, Human
gggcugcaaagcgagaagagagccgguggaguguacuugucccugacaggcugaccuaccugagucucugagcuuuucagucc

SEQ ID NO: 696 - RNA, 82 nt, Human
gggcugcggcagggacucggccucugggagguuuaccucgcccccacuugugcccccagcucagccccccugcacgcagccc

SEQ ID NO: 697 - RNA, 77 nt, Human
gggcugcggcugcagaaguaccgccugcggaguaacugcaaagaugcuguccgugcgcguugcugcggccguggucc

SEQ ID NO: 698 - RNA, 82 nt, Human
gggcuggaggggccgaggcaccccgcaugcuccaagguccgagguccuggguggcaucagugguggcgccugggcucagcuc

SEQ ID NO: 699 - RNA, 97 nt, Human
gggcuggauccaaauaugugggguugggauucugugaccuacuuccaauuuuaauauugaccugagcucauauuuagcucuacauguuucccagcuc

SEQ ID NO: 700 - RNA, 64 nt, Human
gggcuggcgucuggguggggugggcgcgguugggcggcguccgcccauaguuccgcgcgugccc

SEQ ID NO: 701 - RNA, 77 nt, Human
gggcugguggaagccacgaugccaccuggcgugcagcugcacugccucuauggcacuggcguccccacaccagacuc

SEQ ID NO: 702 - RNA, 63 nt, Human
gggcuguuauggggauaagcuggugagguccccaaauauugaccaacuggcaucccacagccu

SEQ ID NO: 703 - RNA, 100 nt, Human
gggcuuccaguggggggagagccccugagaggugauuggcuaucucugacuggaugacugagcgaguugauuucacagcucuccuccccuacuggagccu

SEQ ID NO: 704 - RNA, 88 nt, Human
gggcuuccgguuagggccggggauaggcucaguccucuagaagagugagccucuguucuaaauccuccggccuucccuggucgugccc

SEQ ID NO: 705 - RNA, 109 nt, Human
gggcuuguuuaacuuccgaccaucaguacgcccaguuccacuggaaguucacauucaaggcuuuccaggucaacauuacuguccucguauggcuaguaugaacaagccu

SEQ ID NO: 706 - RNA, 76 nt, Human
ggggaaacugaggugcgggugcgcgggccuggggacggccgucccauggcuuccaucugagccaccucgggacccc

SEQ ID NO: 707 - RNA, 65 nt, Human
ggggaagcgagcaggcgaguccaggaggggccggggccgggguggggcucgccugcccucacucc

SEQ ID NO: 708 - RNA, 73 nt, Human
ggggaccuccuuccagcucuacgcgccucucauucagagaggugaggucaggaaaggggaaggacgaagcccc

SEQ ID NO: 709 - RNA, 69 nt, Human
ggggacuuaguuagguagauuaauaucuggagcuccucgagggaccaaaucuccaacuuuuuuuucccc

SEQ ID NO: 710 - RNA, 73 nt, Human
ggggaguggcuauaaauacagaugaagcuucgcuggcuugccggccccuaaccugcugugcaccccacuuccu

SEQ ID NO: 711 - RNA, 71 nt, Human
ggggauaggggcagucgaaagggcuuggguucaaaaaaagcccagcugcuuuuucuccugccgcugccucc

SEQ ID NO: 712 - RNA, 62 nt, Human
ggggaucaugaaacagcccaauuagcauuaagcugcauguuaaaauugugguaaugaugccu

SEQ ID NO: 713 - RNA, 91 nt, Human
ggggaugaaugaaggugcuggguugcaggguugaaaaagucucccgcuuuuccguuccuacagucccgguucugccuuuguguggugcccc

SEQ ID NO: 714 - RNA, 89 nt, Human
ggggaugaauucuucaaauaggagccgauggaucugugguccuuugggacucaucaaagccuugguuuagcauuugucaguuuaucuuc

SEQ ID NO: 715 - RNA, 91 nt, Human
ggggaugaauucuucaaauaggagccgauggaucugugguccuuugggacucaucaaagccuugguuuagcauuuugucaguuuuaucuuc

SEQ ID NO: 716 - RNA, 76 nt, Human
ggggaugccgugaagcugagagcaugcugggccgagaugucaucggugccgcaggagcuuagcuugcugcaucguc

SEQ ID NO: 717 - RNA, 75 nt, Human
ggggauggaaggcgauggccccugcgaggacgauggcccggcccgccucgccccggcggcaucccugccgucgcc

SEQ ID NO: 718 - RNA, 95 nt, Human
ggggcagaaaguguguaagugaaguauuuuucaaagaaugcaguuauuaucugauugcauuugaccuuuugaccuuuguuacauaauucuacccc

SEQ ID NO: 719 - RNA, 63 nt, Human
ggggcagggcugccugcugcagcuugccaggggucuuguuggcguuguacuuggucuugcccc

SEQ ID NO: 720 - RNA, 65 nt, Human
ggggccguuugaucuucccaaaauuuuccaggauaaggccaugaagagggacauauugauucccc

SEQ ID NO: 721 - RNA, 85 nt, Human
ggggccucuauccacgaguucugcaucaaccugcggcagcucuacggggacagccgcaaguuccugcugcuuggucugaggcccu

SEQ ID NO: 722 - RNA, 90 nt, Human
ggggccugggcuggcaucagccggccaaugagccacugcacaaugaggagcuggcauggagcagugccggguggcccagccuggugcccc

SEQ ID NO: 723 - RNA, 97 nt, Human
ggggccuugguaauauaggaaaccuucuugccaauauaggaauauguugacauauuagcuauagcaaaaggcuuauauuagcaccgaaugaggcucu

SEQ ID NO: 724 - RNA, 73 nt, Human
ggggcgcgcccugcggcccccggagaaaggccuuuucagaaccccucuccgguguggggcgcccgcgggcccc

SEQ ID NO: 725 - RNA, 74 nt, Human
ggggcggcugguggccugagcgggaggccaucaucaaccuggccacccagcccaagaggcccaugugcaucccc

SEQ ID NO: 726 - RNA, 76 nt, Human
ggggcgggcgggagggagggugccucagcgggggcugcugcgcugccugcaggccccugccccaccucccgacccc

SEQ ID NO: 727 - RNA, 75 nt, Human
ggggcucaagugagagcaaguggucccgggccccuucaccaggggcucaggugagagcagguguucccgggcccc

SEQ ID NO: 728 - RNA, 73 nt, Human
ggggcuccuccuuccccucaaaggcaucacugccccuucccaagggcaggccagcagggaacaagaggacccc

SEQ ID NO: 729 - RNA, 82 nt, Human
ggggcuucugagcugugggucaggaaacagcucuaacgaagauauuuauuggguguuuacucugccccauuccuuaagcucc

SEQ ID NO: 730 - RNA, 75 nt, Human
ggggcuugcacugccuucucaggccagcuauacccuagcugagcaaagaacugaagaagcaaguguccacucccc

SEQ ID NO: 731 - RNA, 87 nt, Human
gggggacagagcgagacuccaucuuuucugggagacuccauugggagacugucuuuuuugggagacggagucgugccuuaguuuccc

SEQ ID NO: 732 - RNA, 88 nt, Human
gggggaggcacagcaggugugaaggcgacaggaccacguggcacggggccccuggccuaaaguccuggcgccgccacaccugcccccc

SEQ ID NO: 733 - RNA, 82 nt, Human
gggggcacggaugcggaugagggcgaguggccuggcagguaagccugcaugcucugggccaggccacaucugcggugcuucc

SEQ ID NO: 734 - RNA, 92 nt, Human
gggggccacagcagaguaaagacagagucugccaugcaggagugcuucgcaggucaggcacugcucugagugcuuuguguuaaccugccccc

SEQ ID NO: 735 - RNA, 85 nt, Human
gggggcgagaagggggccucaaaacggaguggggcgcuauuuuuggugggccaccaaccacaguguggggcuuucucucuccccu

SEQ ID NO: 736 - RNA, 81 nt, Human
gggggcggcgcacugauuccgggccccagagaacugccuaucaguggcaggggggucaaauccuucacugcugccgcuccc

SEQ ID NO: 737 - RNA, 65 nt, Human
gggggcucuaagcgccuaugagcaggccuuccugggggccgugcagagggcccgcuggggccccc

SEQ ID NO: 738 - RNA, 67 nt, Human
ggggggcaccaaugacaagggaauugggauggggaugacagucccuauuuccuuugcuguguucccc

SEQ ID NO: 739 - RNA, 77 nt, Human
gggggggacuuuggcgacccgggucagccggccgcccccugggcugcuggugggcgucgggcggcggcuccuccccc

SEQ ID NO: 740 - RNA, 66 nt, Human
ggggggugguugcuccccggccgcaggccgcgcccuggucuggccucuggggugaagcugccucuu

SEQ ID NO: 741 - RNA, 67 nt, Human
gggggugcggggcuggccguggcucugcauucggcugugagugccagugaccuggagcugcaccccc

SEQ ID NO: 742 - RNA, 63 nt, Human
ggggguuggaggguggagggguggcauuaggguaugugagccgcuccccaugcuucaccuccc

SEQ ID NO: 743 - RNA, 84 nt, Human
gggguaccaacgaguccuggccuugucuguggaggcggauuacaccuucccauugcugaaaaggucgaggccucuuggugaucc

SEQ ID NO: 744 - RNA, 80 nt, Human
gggguagacaugcacguugucaggggaagagauggcugugaauauucucuuggacugaccccgacaggcauauuaaucuu

SEQ ID NO: 745 - RNA, 78 nt, Human
ggggucaaguacauucccagucguggccucuggacaaguggcgggcccugacucaugaggguuccaaugugcugcccc

SEQ ID NO: 746 - RNA, 82 nt, Human
auagguauuacuguaucucagggaggugucugcaguauuauuaguauuuaaggaaaucauacuugcuguugacaguaccugu

SEQ ID NO: 747 - RNA, 79 nt, Human
auaguaagaagguuggcccugaugcugggcuuuuucuaauagcauagacuugaucacaucauuaaccucucuuaccugu

SEQ ID NO: 748 - RNA, 85 nt, Human
auaguauccagucacagugaauuugaaagcuggaauaguuugucucuuacaauggguucucuguucacugucagcuuaucauuau

SEQ ID NO: 749 - RNA, 97 nt, Human
auauaaaccugguugcuagcauucugugaaaucagugaagagacuggaguucucucagugcacacacugauuuuucacuuagucccuagguuucugu

SEQ ID NO: 750 - RNA, 88 nt, Human
auauaugcauuggugaauauauauguauacacauacuuacauacuuauauggguaucuguauagauaaucuguauuagaguauuauau

SEQ ID NO: 751 - RNA, 115 nt, Human
auauauguauacuagacuacuugauauuguuuaaaggccauggaggcgguuccuuuuuucucccuggucuuuuuuccucucugugcuucaguguggguaguuucuguugcugugu

SEQ ID NO: 752 - RNA, 64 nt, Human
auaucagauuugaauuacagcugaguuacccacuugggagucaguuuuagauuggagcugguau

SEQ ID NO: 753 - RNA, 107 nt, Human
auaugcugaguugggacaggagcuaaggauagaggugaggaaacccgcagacaacagcgacaugcuccucaucuuugagucccagcgaaccuuuccacugugugugu

SEQ ID NO: 754 - RNA, 97 nt, Human
auauguaugugugugcauguaugugugcauguguuuauaugugcauaugaaugugugcauugagcguguguguaugugcguguaugugcaugugugu

SEQ ID NO: 755 - RNA, 131 nt, Human
aucaacacaauaauugaaauauuuucaagcugauuacaccgcagcccgaggcuagccugguugcuaagggugagcuccgcgguugcuagggggaguaaaucaucuugcauuauuugauuuuuguuauagau

SEQ ID NO: 756 - RNA, 60 nt, Human
aucagcucuugaugccuuucuuuuaaauuaauuauagacagagagaggcauuuagcugau

SEQ ID NO: 757 - RNA, 80 nt, Human
aucauagguuccaguaaugggcaguuuggguaaauguaagcuggcaaaccuucugucuuaauucuccagaaacuugugau

SEQ ID NO: 758 - RNA, 61 nt, Human
aucaucuguaccauuggcccaugcuucccugaucaguggagacuguugaaugugagaugau

SEQ ID NO: 759 - RNA, 80 nt, Human
aucaugagggagguuguguaggaaagaaucaucaagggacuuaguugggagcuucucuaccacagcuuacuccuuauggu

SEQ ID NO: 760 - RNA, 68 nt, Human
auccaacucacaccucgcacuccugccacucacaggugagacggagcauggggagggguguggugggu

SEQ ID NO: 761 - RNA, 66 nt, Human
auccacaguugguugaauuuguggauguggaacccauggauacagagggccaacuguauuuaggau

SEQ ID NO: 762 - RNA, 71 nt, Human
auccccguucccgauuccuguaguagcggcuguauugcagccgccugccgaacugacccgggucuguggau

SEQ ID NO: 763 - RNA, 80 nt, Human
aucccuugcauuuccauaugaauuuuaacaucagcuuaauaaauuucugagaaaaagccaguuggaauuuugauagggau

SEQ ID NO: 764 - RNA, 88 nt, Human
auccgccucacagacaguugcguccagaggcuuuuggaaaucaccgaagggucagaauuccucaggcugcaaguggagggagguggau

SEQ ID NO: 765 - RNA, 71 nt, Human
auccuauagauacagcccugguaugaggccuuauaaugccagcuauaugcacaugcccuguauaaugggau

SEQ ID NO: 766 - RNA, 75 nt, Human
auccugggaaggacccuacccagucauuuuaucuaccccaaccaugguuaaaguggcuggaguggagucuuggau

SEQ ID NO: 767 - RNA, 84 nt, Human
auccuuaaacacugugcugaagacuacugugacucuguccuuuuuagacucaacauacauggucucaucaucccuauaauggau

SEQ ID NO: 768 - RNA, 61 nt, Human
aucggucaaacgggucauacgcaaguguugacacauauuguguacacucccuaggacugau

SEQ ID NO: 769 - RNA, 78 nt, Human
aucgucugagcccaggaguuugaggcugcagugagcuacaaucacaccccugcacucaagccuggguuacagagugau

SEQ ID NO: 770 - RNA, 79 nt, Human
aucucaggacucuggauaccuuuauuuuugcuucagguggcuuuuaaucagauucaaaagggaauuuaguuuucuagau

SEQ ID NO: 771 - RNA, 89 nt, Human
aucucguggguggcuguggcuugacuagguguagaacacgggaacguauuguacaaaaggagggaggaacgaaccauugaucucgaggu

SEQ ID NO: 772 - RNA, 65 nt, Human
aucuguaacuuaaauugggccaaucagaaugguuaucuuuguucaggucacaugaguugcaagau

SEQ ID NO: 773 - RNA, 60 nt, Human
aucugucaggagcaaggacuacuuuggcauuaaccaucacuguuugauuucuugacaggu

SEQ ID NO: 774 - RNA, 76 nt, Human
aucugucuuuccaagccuuccccgggaucagaguuuuuaaggauaauuugguggggagaggcuugggaaguggggu

SEQ ID NO: 775 - RNA, 75 nt, Human
aucuucauggugcugggcgccagggcgguggaucuccuucugcauccugucagcaaugcccggauacaugguggu

SEQ ID NO: 776 - RNA, 66 nt, Human
aucuucucagaaaaccaaaccaaaggcagccaugaaaacccguguucuguacgugguugagaaggu

SEQ ID NO: 777 - RNA, 66 nt, Human
aucuuggaagggaccuguucuccugccagagcagcugugagguuauggaggaagaaccccuuggau

SEQ ID NO: 778 - RNA, 87 nt, Human
aucuuguacauuuuccccacacuuggaaucagccauuccuccagggagugcagguucacaggcugggcucuaagagaauuauaaggu

SEQ ID NO: 779 - RNA, 64 nt, Human
aucuugucccuccuuuccugauugcucuuggcugaguaucuauggugguaggagaguacaggau

SEQ ID NO: 780 - RNA, 131 nt, Human
aucuuucaugccaguacuguaaauguguuaaguuaucagagaaauccuuuuguggccucuuuagugucuuuagguuccuucucucuuucuucucgaauagcagcauucaugacaguuuggcacgaauuggu

SEQ ID NO: 781 - RNA, 75 nt, Human
augaaucagucacuugcacaauuaauccucuuggcaucauacaaacuggguuuuaauggcaaaugaugacaucau

SEQ ID NO: 782 - RNA, 96 nt, Human
augacugugcugcaggaggcggcucagugugaagaacuacggguuuccugauguugaagcucagaauuagccacacugaccuucucagucaugcau

SEQ ID NO: 783 - RNA, 65 nt, Human
augagauuugggaggggccaggggcagaaugauaugguuugacuguguccucacccaaaucucau

SEQ ID NO: 784 - RNA, 63 nt, Human
augagggcagcaccugccucugaaugggaaaucaugcaacuacucagaauguguccuccucau

SEQ ID NO: 785 - RNA, 73 nt, Human
augaguaguagcccuuuugaaaaugauagaccaaccuuauuucucugacagccaacaggguuaugauacuuau

SEQ ID NO: 786 - RNA, 77 nt, Human
augauaaucuaccucacuuucccuguggcuauguucuggguuuccaaucaggccgagugguuugaggacgaugucau

SEQ ID NO: 787 - RNA, 91 nt, Human
augaugccaggacugcagcuucagggacuuguggcagaugcacagggugccucuggcucccuggagcuccacacugcagucccagcucugu

SEQ ID NO: 788 - RNA, 98 nt, Human
augauuucauuaugaaaugguaaaaaguauaugugcaauacuucugagcuacaaagaacacuuguauuuucuccuuugcauuuauaacugaaguucau

SEQ ID NO: 789 - RNA, 75 nt, Human
augcaaacacugauuaacucaaauaucuuguaaguucauucauacauggccuuauuugaggcaguguauuuguau

SEQ ID NO: 790 - RNA, 96 nt, Human
augcacaucaccaccuacuugaguguugaggauucaauuaguuaauguacuucaaauaaucauguaguaaaugcucaguagugugugugugugugu

SEQ ID NO: 791 - RNA, 62 nt, Human
augcagugucccaaauuucugucuacaagcauguguguggcagaaaacuggagaccaggcau

SEQ ID NO: 792 - RNA, 79 nt, Human
augcauccaagagaucaaggucgagcucuauuguuccaguauucucgggauccagcugcuuagauaucuugaauagcgu

SEQ ID NO: 793 - RNA, 131 nt, Human
augcccuuucugacuguguucucuguguuucaguccugucgugcaugucuaagcccugugccuugccuugggaauaagggacaaugacugagguuacgugguuuuggauuguaagguagaggaccuuuuau

SEQ ID NO: 794 - RNA, 82 nt, Human
augcgugacgccaucccgcagcucauccagcuggaccaggcgaagccccuggccgcugugcugaaggaggugugcgacgcgu

SEQ ID NO: 795 - RNA, 83 nt, Human
augcugauacguuaagcuaugcaucacuuucaguuucauucaaucucaaaguacuguaaucccagcguugcguuaccaagugu

SEQ ID NO: 796 - RNA, 74 nt, Human
augcuguauaucuuaugauuucuuaaggagaugacucauaccaaagggaaucauccaagacaugccaaaagcau

SEQ ID NO: 797 - RNA, 76 nt, Human
augcuuacaaagccaaauaaucgcagggcaaggcagauaaaggcaggcaggauagugacaguggcucggugagcau

SEQ ID NO: 798 - RNA, 79 nt, Human
auggaaaacuuuugaggaggggcuagcuaaauaagggguccagguaaugguggcccuugcaaccuuaagaccuagaaau

SEQ ID NO: 799 - RNA, 86 nt, Human
auggcaggaugacggauggcaacgaagcagcuggagaaggacuucagccugcaucgaagaaguacugccaaggucauccgugucau

SEQ ID NO: 800 - RNA, 82 nt, Human
auggccgaggagaagcgcgagggcuacgagcgucuccugaagaugcaaaaccagcguggcggcgcgcucucuuccaggacau

SEQ ID NO: 801 - RNA, 74 nt, Human
auggcggcaggcaaccaaugaggcaguuuagaccauucgguugcgcuuuuggauuggggagucugugaugccau

SEQ ID NO: 802 - RNA, 71 nt, Human
auggcugauggcaacgaggaucugcgggcugacgacuugccugggccagccuucgagagcuaugaguccau

SEQ ID NO: 803 - RNA, 69 nt, Human
auggcugucuuuuggaggucauuuuuuugagccuaucucgggucucuaagggcaaacuccagcagccau

SEQ ID NO: 804 - RNA, 94 nt, Human
augggaagaauuacuguggccuaccaggugaauauuggcuuggaaaugauaaaauuagccagcuuaccaggaugggacccacagaacuuuugau

SEQ ID NO: 805 - RNA, 60 nt, Human
augggaauggccuacaauuacaauaaacaauuaauucaguuauuuuaggggccuuaccau

SEQ ID NO: 806 - RNA, 90 nt, Human
augggcuucgacggggcuuaauagcccuugccccacugaaugcugcuacgcgcagaaucccgggcuugggagcccccaaaaauggcccau

SEQ ID NO: 807 - RNA, 66 nt, Human
auggguguuacuucuuugauaguucuuacuaccuugugggggaacuaccaaaggaaguugucucgu

SEQ ID NO: 808 - RNA, 79 nt, Human
auggguuccucacccccucccuccagaacagcuugagacagucuccaagcugagcuggaugggcuaccuuagaacccgu

SEQ ID NO: 809 - RNA, 74 nt, Human
auggucaacggcgcuacagaacaaagggcgagcucuaaagaguccagcucauccucuucccgaccucugaucgu

SEQ ID NO: 810 - RNA, 73 nt, Human
auggugaaaguagauauguuuguagcaaaauagguaugcugugguugacuagagacauuuuaagguuuauuau

SEQ ID NO: 811 - RNA, 63 nt, Human
auggugacaacaugcuggagccaagugcuaacaugccuuggucaagggauggaaagucaccgu

SEQ ID NO: 812 - RNA, 65 nt, Human
auggugacaacaugcuggagccaagugcuaacaugccuugguuccacgggauggaaagucaccgu

SEQ ID NO: 813 - RNA, 63 nt, Human
auggugacaacaugcuggagccaagugcuacauggcuugguucacaggauggcaaguccccgu

SEQ ID NO: 814 - RNA, 76 nt, Human
auggugcuauaauaaauaaacuucaacacucuuuaugauaacaacacuguguuauauucuuugaauccuagcccau

SEQ ID NO: 815 - RNA, 99 nt, Human
augguugucacuuucagauucuagcuugcuuggacuuucaguggcaacaaauggagccacugacaguacagguggcuucaucuugacuggugaccucau

SEQ ID NO: 816 - RNA, 82 nt, Human
auguagccagagcaauggugauguucuuauugcucccugaauucaggucuauugcauggacaucaggauuccucugggacau

SEQ ID NO: 817 - RNA, 90 nt, Human
auguauaaauguaaggaguauauauuuugaauacuaugaucaccccagaaugaucauucaauaagaauguaucuaauaucauuuguacau

SEQ ID NO: 818 - RNA, 78 nt, Human
auguccaaagacucaacaguuagacuacuuuucuuccacucauuuuaaagaaaaaugucuaugaaguguuuuggauau

SEQ ID NO: 819 - RNA, 67 nt, Human
augucuuuaauuccucauaugcugacuuggcaauccauaugcagccuaaaaggugguugaaagaugu

SEQ ID NO: 820 - RNA, 60 nt, Human
augugcagaggagaagaucccaccgagcacacugguugagauccaucugacugcugccau

SEQ ID NO: 821 - RNA, 85 nt, Human
auguggaauuuucagaaaaagauugucugcucugguuaaacuuccuucuggagaggauuacaauuugaaacuggaacuucuucau

SEQ ID NO: 822 - RNA, 71 nt, Human
augugguccaaccugggcauuggccuagcuaucucccugucugugguuggggcagccuggggcaucuauau

SEQ ID NO: 823 - RNA, 77 nt, Human
auguguguguguguauauacacacacauauauaaauuagaauuugcagauauuauguguauauauauacacacauau

SEQ ID NO: 824 - RNA, 130 nt, Human
auguuacaaacuagauuauucuuugcuuuagauauccaaccauucagacuccuagcugagucuuacaaguuucuagcucaggagggaguuguuggguggcaggggguggcucugugguugcugguuaugu

SEQ ID NO: 825 - RNA, 79 nt, Human
auguuaugaaaaagcaauagugugguccuggcuaugacaauccuauaaaagccagagaacacugugauuaagggaacau

SEQ ID NO: 826 - RNA, 101 nt, Human
auguuggcuaucaguucuugcuauucucagagcacucuaucauguuuuuagguguauauuguguauucaggauagcauuaaaaagaacugauggcaaaugu

SEQ ID NO: 827 - RNA, 79 nt, Human
auguuuugaagcaggccauugagcugaguccugauaaccaauacgucaagguucucuugggccugaaacugcagaagau

SEQ ID NO: 828 - RNA, 74 nt, Human
auuaggcugaaacauaugaaauugcugcauuguaguuuaaaaacugucagcaguuucauaugguuccaccuaau

SEQ ID NO: 829 - RNA, 82 nt, Human
auuaucugccaguuaagauuauucuuaaaacucuggaugccauggcuuuuaauaaguuuaauguucuucacuggcacauagu

SEQ ID NO: 830 - RNA, 77 nt, Human
auuauguauuuauuauuggcgauuauaaaguuuguuuucacagggcguaguaguuagcaacaaugaaaaugaauaau

SEQ ID NO: 831 - RNA, 86 nt, Human
auuaugugcuguaguauguauauaguauuuuuagugaaaauauucauauaaaauauuacuuaaaucauuucuacauugcacaaaau

SEQ ID NO: 832 - RNA, 89 nt, Human
auucaaggaacuuuguggcugagaacuuacaaggguucuuagugaagguguucaagcaggaaccugaggaaucagacccaaaggagagu

SEQ ID NO: 833 - RNA, 77 nt, Human
ggggucaccaccugccugcgcuucccaggcccaggcucaauugcugaccugcggaagcuggcugugaacaugguccc

SEQ ID NO: 834 - RNA, 85 nt, Human
ggggugaaaauuaaauucuaguuacagauucaugaaacuugaagccaaauuaguuuuaugagacuaucaacuccccuuucauccu

SEQ ID NO: 835 - RNA, 78 nt, Human
ggggugagggccgugccaaucccauccccacuguccucaagagggaccaggaaggacuaggcuacagaucagcacccc

SEQ ID NO: 836 - RNA, 69 nt, Human
gggguggagcaggugggcgacaugaucgaucgccuuuucgacaccucugccugagccugcugcuagccc

SEQ ID NO: 837 - RNA, 96 nt, Human
ggggugggaagaggcgggacauggcugugucuuggagucacccucuccccucgugccccagguuugcuuccucugucccugucucucucccgcccc

SEQ ID NO: 838 - RNA, 77 nt, Human
gggguguugggcuggggauuguggcuguagaggauggugagguuucucuggggcuagggccucagugcucucagccu

SEQ ID NO: 839 - RNA, 83 nt, Human
gggguugccgcucugggaacccgaccguuuggagccagggucugucccccggaggucccggaaagggcggggcggccaacccc

SEQ ID NO: 840 - RNA, 71 nt, Human
gggguugggcaaugguggugaauaaagaauuguucuaaucuacuucucuuauucucccuguucccagcccu

SEQ ID NO: 841 - RNA, 83 nt, Human
gggguuuggguccuggucacguggaacugggcaaugaagggagcucgugugcagaccucgugcagccggggccuccaggcccc

SEQ ID NO: 842 - RNA, 93 nt, Human
gggguuuuuuucucugagaaaagggggguucuauugugugguggaaagccaagaagugguuggugcucgccugaucuuaguacucaaaacucu

SEQ ID NO: 843 - RNA, 66 nt, Human
ggguaaugaguaggugagagggucuggaggaagccucccuacugcuggagccucuacuuauuaccc

SEQ ID NO: 844 - RNA, 104 nt, Human
ggguaguuaccugggaugucauccuucaaugcugcauuauuggcuuuguuucugccuguggaaaggcaaguggguggugacucccaaaucauggccacuugccc

SEQ ID NO: 845 - RNA, 104 nt, Human
gggucagcaggaaguugcggcugaugagcagcucccggagcgguggggcggggccuccucuucuccaguuccaguacgcucaucagucguccuccugcugauuu

SEQ ID NO: 846 - RNA, 82 nt, Human
ggguccacucuccugccugcugggaccuauggaaggggcuuccuggccaaggcccccucuuccagaggaggagcagggaucu

SEQ ID NO: 847 - RNA, 77 nt, Human
gggucccgguugcagacuugccauggccuccgaagcuucugugcgucuaggggugcccccuggccgucuguggaucc

SEQ ID NO: 848 - RNA, 77 nt, Human
gggucccugaucuggaagguggauuuccccuaucaggacaagcuggucggauacaucaccaacuacagcaggcgcuu

SEQ ID NO: 849 - RNA, 74 nt, Human
ggguccggugcggcuccggaaguagucgugcccuuugcuggggcauucagagacagaguuucaccgugguaccc

SEQ ID NO: 850 - RNA, 78 nt, Human
ggguccuaggagaaaaaguccuacuuuucuggguccccaggugcaagcaccucccggagacuguuucucccauggccu

SEQ ID NO: 851 - RNA, 85 nt, Human
ggguccuggcgggcgggucgagucuccccaaggcggccaucccaagcagcuccccggaugucccucagacccgcgcgcuaggcuc

SEQ ID NO: 852 - RNA, 75 nt, Human
gggucuacgugugugauccuuaucguaagaacaauucacaguaucacauuuucacagaugaggacacugaggccc

SEQ ID NO: 853 - RNA, 112 nt, Human
gggucucagauagaggugaaauucuaaccuacucagagugauuucuuuuagguucccagaccugggauccacauuuuuugcucuacugagguaggaaggugucacuagaucc

SEQ ID NO: 854 - RNA, 88 nt, Human
gggucucauucaguugcccagguuggagugcagugaugccaucuuggcucacugcaaccuacagcucaugggcucaaaugauccuccc

SEQ ID NO: 855 - RNA, 79 nt, Human
gggucucuuuuuuucaucuagguaaaccggagcaaauaaaaccuauugaagaguucuccugaugauugaaugaguuccc

SEQ ID NO: 856 - RNA, 63 nt, Human
gggucugugucacagugaccucccagagccccaagcucgggccucccacuuaaacacaggccc

SEQ ID NO: 857 - RNA, 88 nt, Human
gggucuugcucugucacccaggcuggagugcagugguguaaucuuggcucacugcaaccuccaccucccagggucaagcgaucuuccc

SEQ ID NO: 858 - RNA, 75 nt, Human
gggugaaaguguuuagcucaaguaugcagcuugucggccaaguggauaccuuugggcugagccucuacuuucccu

SEQ ID NO: 859 - RNA, 74 nt, Human
gggugacucgcguaccgugcggcuugcugacaggagcugcggcgggcccugggccgcaugguggagcggaaccu

SEQ ID NO: 860 - RNA, 115 nt, Human
gggugcauggacuaggacccuggaggcagaaauaguuaccgaggggaaguuacaggccugagugugagucccuguuugguugcugaugagcuuugagguccuuggccagacacuc

SEQ ID NO: 861 - RNA, 72 nt, Human
gggugccccucgaggacugcucugagaucaacugcaugauccgggugaagaagcaggucugggugggcagcc

SEQ ID NO: 862 - RNA, 67 nt, Human
gggugcccgccgaccugggcgccgaggccggcuugcagcagcugcucggcgcccugcgcgagcuccc

SEQ ID NO: 863 - RNA, 77 nt, Human
gggugcggaggcagcaaauguuacagguccuggugguguuccaguucaaggcaguaaauaugcagcagaccguaacc

SEQ ID NO: 864 - RNA, 60 nt, Human
gggugcuggaaucacuuuugccaaaggcaucauauccuugggcgaauuuuuccggaaucc

SEQ ID NO: 865 - RNA, 64 nt, Human
gggugcuggugcugagcuggguccaaaagucugcacagaagggagccccgcugggcccagaccu

SEQ ID NO: 866 - RNA, 99 nt, Human
ggguggaaggugaaggagcaagguaaagagagacucccgugacaaucagcaauacgccuuuaaguucauugggcuuugcuuaucuuuacuaagccaucu

SEQ ID NO: 867 - RNA, 70 nt, Human
ggguggcauggggagcagcuagaacagugcagauucauccauaaucccuuucugcuguucaccaccaccc

SEQ ID NO: 868 - RNA, 71 nt, Human
ggguggcgggugucuggcuggaaucuccccuggguacauggagggugccagccggcuggaccugcagaccc

SEQ ID NO: 869 - RNA, 71 nt, Human
ggguguaagcaauaagugaaguuacauuggcccuaacccuagggaugauucuuuacccaguuuuaaagccc

SEQ ID NO: 870 - RNA, 85 nt, Human
ggguguaauugggccuccugcugccucucagcuuggcuucaucuguaaaauggggacaguaggccaggggccugugguuacaccc

SEQ ID NO: 871 - RNA, 76 nt, Human
gggugugggaugcuucgccaggucaugugcuauauugucucauuuuuguaguacuuuuacacguuguaugacaccc

SEQ ID NO: 872 - RNA, 94 nt, Human
ggguucuuuugucuuuaaaucaauaaguaaucuaggacuagcauuauguuugcuagaccuggcauuugcucgggacauaagguucaaaguuucc

SEQ ID NO: 873 - RNA, 65 nt, Human
ggguucuuuuuccgcuuucugagcccuuuuauaccuuacguuuagaaggggaaaaucauccuccc

SEQ ID NO: 874 - RNA, 91 nt, Human
ggguugaccagaaaauguagaaugcaucagaagcauguccaugauaaggccaaucaggaugcucaugcagaagcucagugcuggcagaccc

SEQ ID NO: 875 - RNA, 112 nt, Human
ggguugcugaucagacugcgagcagcaggggggcugccacuggcagagcuggaagcauguagaucagagauggcagcagcagcugcaggcgcucggggcuguccagcagccu

SEQ ID NO: 876 - RNA, 93 nt, Human
ggguugugucuccaguccucucuggaggguauguucugggcggaggggccaucugcauggaacuucucaccaaacagggcuggagcagugccu

SEQ ID NO: 877 - RNA, 74 nt, Human
ggguuucgccauguugccucggcuggucuaggcuggucuggaccuaggcuggucucaacauggacucugaacuc

SEQ ID NO: 878 - RNA, 66 nt, Human
ggguuucugcgggugaaccaguuaaggguuuucuucugcuuuuacuucucgccuaugcucaagccu

SEQ ID NO: 879 - RNA, 75 nt, Human
ggguuugagcccacaggaccugcacacaaacuuccccaccucuuggacuuggggacaggaucugugccucaaccc

SEQ ID NO: 880 - RNA, 60 nt, Human
gguaaaguggcaacggccaauuuggguaucuggucucccaaaaguacuugccgcucuacc

SEQ ID NO: 881 - RNA, 79 nt, Human
gguaauaauuaggacagcugacauacuuguugcuaauuuugagaucugggcaacaacuguguaggcuguucuuucaacc

SEQ ID NO: 882 - RNA, 62 nt, Human
gguacaagaaucgggcuugucgggggaggguuaccucccugugaaaggcaggcucgggugcc

SEQ ID NO: 883 - RNA, 77 nt, Human
gguacaucugcauaaacaauauggcacaucuacuuauuaaccaaguuuccugugcuuucacauuguuuuuugcuacc

SEQ ID NO: 884 - RNA, 107 nt, Human
gguaccuuauuauugaaaaucagauaaacuuugguuggguggguauuuggaggaaucuuuuaagucuuuucuuaagcaaaguuuggacauucuaaaauaagguugcc

SEQ ID NO: 885 - RNA, 80 nt, Human
gguacuacggucuauuucucaaccuuaggcaguaauagacaucacaaacugccaugguuuugcacuaugauuauaauacc

SEQ ID NO: 886 - RNA, 71 nt, Human
gguacuucuacucacagcggcgauuccgaggccaacuccagcaauggcuuugcaaaucugcggaaagugcu

SEQ ID NO: 887 - RNA, 74 nt, Human
gguagagacgggguuucaccauguuggucaggauagucucaaucucuugaccuugugauccaccugccucagcc

SEQ ID NO: 888 - RNA, 86 nt, Human
gguagaguacaaaguggaggaauuacugucuagaaagcaccauuuccagcacucagcacgagguggucuuucccuccacaccugcc

SEQ ID NO: 889 - RNA, 77 nt, Human
gguagcaacccaagaaaguggguuuggacauucaaauacuugaguuuaaguccagaugugcaaacuugggcaaagcc

SEQ ID NO: 890 - RNA, 71 nt, Human
gguagcaugaugcuuccagcuuuauucuuuuugcuuaggauuaucuuggcuguauaggcucauuagguucc

SEQ ID NO: 891 - RNA, 68 nt, Human
gguagccagggaaccggcugugagggucugggaggugcuaaaccaaacggccauggaagcuggcugcc

SEQ ID NO: 892 - RNA, 75 nt, Human
gguagggagugaaaggcccggccaccuaaaggcacagcuggugccugggucaagcugaggcggcaucucucugcc

SEQ ID NO: 893 - RNA, 114 nt, Human
gguaguggugauucaaagcaagaugguagcauuggagaggaugagauauggucagaugaggauauauuuuaaaaguugagcuaacaggauuugcugaggaaucagaagugaacc

SEQ ID NO: 894 - RNA, 69 nt, Human
gguauacuuacuagcauauuauauagcucuaagaguguagaguuauaugaugugcuagugaaguguauu

SEQ ID NO: 895 - RNA, 104 nt, Human
gguauucaggagagugugucagagcccaccagauacauuggaguuuauccaccuaaacuacuaauuacuacaugggcaugaaugcuggcauauugagaaguacc

SEQ ID NO: 896 - RNA, 80 nt, Human
ggucacaaucugaugcugucaguuugaccgagcugguuuugcuuauggucaugcugcaauuuguuagaauaauagggauc

SEQ ID NO: 897 - RNA, 80 nt, Human
ggucagacagggggacagggcagagcuagcauaacucaggcuuuuggggaugugcauggcagcuguuuuccuuuggggcc

SEQ ID NO: 898 - RNA, 76 nt, Human
ggucagagugaacucuugcuuccuguauucaggcagcucagagcagaaaguaaggggcagagucauacguguggcc

SEQ ID NO: 899 - RNA, 79 nt, Human
ggucaugcccuggaagccaaugaugcaacuucccucucucuucaagaaguaugcacugggugggacgggguacuggacu

SEQ ID NO: 900 - RNA, 94 nt, Human
ggucauugugcccugccaaggcacagcguagaucuggaaagagcagaaugcuuuccuuuucauauguggcuggucauggaaggggcaguugucc

SEQ ID NO: 901 - RNA, 95 nt, Human
ggucauuguguccugccaaggcacagccguagaucuggaaagagcagaaugcuuuccuuuucagauguggcuggucauggaaggggcaguugucc

SEQ ID NO: 902 - RNA, 93 nt, Human
gguccaaggucaacguuugcggccaaaaagggcccuggacuuagcgggaauuauaccucccaagggggccuuggccgggcgggaaccugggcc

SEQ ID NO: 903 - RNA, 90 nt, Human
gguccaauugguuccaagacgcguaggcgagauggucugaaagcccccgguaucauuccucgaauuucagugcgggaaccaaugcagacu

SEQ ID NO: 904 - RNA, 91 nt, Human
gguccaauugguuccaagacgcguaggcgaguuggucugaaagcccccgguaucauuccucgaauuucaagugcgggaaccaaugcagacu

SEQ ID NO: 905 - RNA, 82 nt, Human
gguccacauucacuuucccguggaagguucaggaagcgacaccguuguuaucaggggcccuuccucggauguggagaaggcc

SEQ ID NO: 906 - RNA, 65 nt, Human
ggucccacugaagcaccucuauuuaaaucccccuguuccgaauaagggagcuguguaaauggacc

SEQ ID NO: 907 - RNA, 73 nt, Human
ggucccugagcucccuagagucggccaccacagauucagacuuggacuaugauuaucuacagaacuggggacc

SEQ ID NO: 908 - RNA, 60 nt, Human
gguccugcugugccagaaacccuuaagaaaaagcgaaggaauuucgcagagcugaagauc

SEQ ID NO: 909 - RNA, 72 nt, Human
gguccuugccaccguuccacacugcaauugguacauucauggcugucacauuguaguagggagguugggacu

SEQ ID NO: 910 - RNA, 78 nt, Human
gguccuuuaggaggugauagucaucgcuguccgaggugucauacaccagguuguuggcgaacauacuccugaggaacc

SEQ ID NO: 911 - RNA, 63 nt, Human
ggucgaaguggucuggaacuugcggggcguggagggguccggcgggaaugaccacuuccggcc

SEQ ID NO: 912 - RNA, 72 nt, Human
ggucuacaagaauugguggcuauucggguacuguuaccuguuggccgaguggcgacugauguuccucagacc

SEQ ID NO: 913 - RNA, 83 nt, Human
ggucuaguugucuuagaguugggcugaacagaagcacucuuccaagggcgcugcagcaauuuucagugagacagcagaagacu

SEQ ID NO: 914 - RNA, 64 nt, Human
ggucucacacugguuucucgugcccaccagcuuguaauggagggauacaauuggugucaugauc

SEQ ID NO: 915 - RNA, 68 nt, Human
ggucuggcaggaagggggcagccugcaacccccaagggcagguguggggcugccacagccgcuuggcc

SEQ ID NO: 916 - RNA, 130 nt, Human
ggucugugugaagcaucacuuugcagggauuacuaaugguggggcagcaggucugugaauuaaguuaucucuugaccucacccucaugucaacacaaauguaauuccuaaacaagaugcauugccagucu

SEQ ID NO: 917 - RNA, 78 nt, Human
ggucuuacagacguccaggggggucgguggcggccgcggcgagggccccggccagcccgccugagaugaugugggacu

SEQ ID NO: 918 - RNA, 69 nt, Human
ggucuuugcggauguccacgucacacuucaugauggaguugaagguaguuucguggaugccacaggacu

SEQ ID NO: 919 - RNA, 104 nt, Human
ggugaaauagauuaugaagcaaugugugaagcuuucggauggcuuaaugggagcagaucugagaaauauguucgcaauucgugcugaucaugauuuguaguacc

SEQ ID NO: 920 - RNA, 72 nt, Human
ggugaacucggcgcacacuucacagaacuccuuuagguaaagcgguugugcccuucgcgacgauuuucuacc

SEQ ID NO: 921 - RNA, 73 nt, Human
ggugaagguuuuaucagagcccagggcagacucaguggcuuccuauccagggcucuucccacagcucgucacc

SEQ ID NO: 922 - RNA, 74 nt, Human
ggugaauuucuagcucuucauggguccugaacauugauuucagucuuugcaaagaaugaagaagugaauucgcu

SEQ ID NO: 923 - RNA, 67 nt, Human
ggugacaaaccauugcugugagccaagcugcuaacaugccuugguuccaacgcgauggcaagucacc

SEQ ID NO: 924 - RNA, 60 nt, Human
ggugacaacaugcuggaaccaagugcuaacaugccuugguucaagggauggaaagucacc

SEQ ID NO: 925 - RNA, 61 nt, Human
ggugacaacaugcuggagccaagugcuaacaugccuuggcuuccaaggauggaaagucacc

SEQ ID NO: 926 - RNA, 80 nt, Human
ggugaccaacuuauacucaacuugaauaaacaucagcucugaucggauccagcugaugaacucugggauaggcugguucc

SEQ ID NO: 927 - RNA, 85 nt, Human
ggugacucagugcucaggaucuuauggcuccuuccuccagcuugggggacucuuaaaggggcugggguagagacuaagaguugcc

SEQ ID NO: 928 - RNA, 62 nt, Human
ggugagaaggggucugcggccucgucuccagccgagggcgggaggcgccucgccccuacacc

SEQ ID NO: 929 - RNA, 75 nt, Human
ggugagguggguggaucaccugaggucaggaguucaagaccagccuggccaacauggugaaaccccaucucuacu

SEQ ID NO: 930 - RNA, 109 nt, Human
ggugaugaccccacaaggaagagguacuguugcagccgcugcagcugcugccacagccaguauugccggggcuccaacccaguacccaccuggccguggggguccuccc

SEQ ID NO: 931 - RNA, 77 nt, Human
ggugaugcccaagauggaccagauaacaucacaugaaggccguuucuggaaugaagucugacuccuccaguuucacc

SEQ ID NO: 932 - RNA, 94 nt, Human
ggugcacgcauguaaucccagcuacucaggaggcugaggcaggggaaucgccugaaccugggaggcggagguugcggugaccugagauuguacc

SEQ ID NO: 933 - RNA, 102 nt, Human
ggugcaguggcacacaccuguaaucccagcuacuccgaaggcugaggcaggaggaucaccugagcccaggaaguugagacugcagugagcugagauugcacc

SEQ ID NO: 934 - RNA, 91 nt, Human
ggugccacgcucaacaccggguuccagccguguccgggccaucgaucacaguccgcaccaaaguacuaauucgguaucacgcacuggcacc

SEQ ID NO: 935 - RNA, 83 nt, Human
ggugccaugaccggaauguucguaacgauuucagugcuccaaacuauaguaucgaaggguaaccaagcugcaaucauggcacc

SEQ ID NO: 936 - RNA, 123 nt, Human
ggugccccucacccugccuauccgcauagcacgccccgccagaacuaccacaggcaauacaagcacuggugccccugaccggcagcugcgcgcacggcaggccugccuaucccucacagcacc

SEQ ID NO: 937 - RNA, 71 nt, Human
ggugcccucuccaagcacuuuaggcuggacacucagaccuugucacugugcuugcccagaagaggcgcauc

SEQ ID NO: 938 - RNA, 76 nt, Human
ggugccgaggucagagaugguggcccuagagucauaggcuugagcagggagccacgauaauucuccagacaguacc

SEQ ID NO: 939 - RNA, 71 nt, Human
ggugccuggucaaucaguccucgggauggcagccaucaacccgugggccuccuggggugaccuuacggacc

SEQ ID NO: 940 - RNA, 75 nt, Human
ggugcgucgggcggcaccaccauguacccgggcauagccgacaggaugcagaaggagaucaccgcccuggcgccc

SEQ ID NO: 941 - RNA, 72 nt, Human
ggugcucagcuucucgugcgcaucucgcugcuucugguaguggugugcuucucgauuuggcuucgaagugcu

SEQ ID NO: 942 - RNA, 89 nt, Human
ggugcucugggcacugcaggggugcuggcuggacugcgguuaccgcagcgcggaacccccuaggcgaccccgcgcuggccgggagcacu

SEQ ID NO: 943 - RNA, 67 nt, Human
ggugcugggggcucugcugggccuggccucaaccauggggagccccagcuccagugccuacugcacc

SEQ ID NO: 944 - RNA, 93 nt, Human
ggugcuuagguguuugcaggucugagaaaccucuaaccuaguguuccucuaaauuagaguccuuggaucuguaucaaaaccaccuaguguacu

SEQ ID NO: 945 - RNA, 64 nt, Human
ggugcuugcuguccgaugggucuguauucaacauuaaauacaaauugccugacggcagguaacc

SEQ ID NO: 946 - RNA, 87 nt, Human
gguggaaaagcauguacaggucaucucagugcuccaguuggguacuaguccuuccuuguacugggaguggccugcagugccauccuc

SEQ ID NO: 947 - RNA, 71 nt, Human
gguggagagaaaaugcaguauucuuaucugagacguaauagaggccagagugcugaacaacacuauccacc

SEQ ID NO: 948 - RNA, 66 nt, Human
gguggaucaccuaaggucaggaguuggugaccagccugacuaacauggugaaacucugacucuacu

SEQ ID NO: 949 - RNA, 95 nt, Human
gguggauggaaagcaagguagaguaggcuucgugggacacagcugggcaggaaggcuucugacucgccugaggccacaucuccuaaccagauacc

SEQ ID NO: 950 - RNA, 97 nt, Human
gguggcauaugcguguaaucccagcuacuugggaggcugaggcaggagaauugcuugaacccaggagguggagguuacagugagcagagauugcacc

SEQ ID NO: 951 - RNA, 82 nt, Human
gguggccacagcucaucaggaacagcuucuucuaagggauccacuggaccuaggaaaaccgagguguugagagcaggccacc

SEQ ID NO: 952 - RNA, 73 nt, Human
gguggcccccugcgcaaagaccuaggcccuggugucgggcuggcaggccugguaggcggaggcgggcaccacc

SEQ ID NO: 953 - RNA, 85 nt, Human
gguggcguagacgaguuaaguccuggucugcguggaggucgacgacuccgucgcagacuacggaccugucugggucucagccgcc

SEQ ID NO: 954 - RNA, 66 nt, Human
ggugggagggaaaguguucggcagggcagaaacccugccuggcuguauccaacugucacucccacu

SEQ ID NO: 955 - RNA, 62 nt, Human
gguggggcacacagcggggggcgccagguuuuccuugucccccagcugcucugccccuuucc

SEQ ID NO: 956 - RNA, 102 nt, Human
ggugggguugaaagcuaagaaagugaggaggugguucaggggaucacucuuuccuacuuguuccucucaccucaaacucaccuucuacugcgcagcaacacu

SEQ ID NO: 957 - RNA, 68 nt, Human
gguggugucuuccggcuucugcugcuggcuggcaaaacuguaguaguuguuggggcccaggacccacc

SEQ ID NO: 958 - RNA, 90 nt, Human
ggugguguuuuggugucuguuuuugcccuguggccuuagggugcccuuccugucccuucuuucagaaacagucauucuguaauaauagcu

SEQ ID NO: 959 - RNA, 74 nt, Human
ggugguuaguuucugcgacuugugugggacugcugauaggaagaugucuucaggaaaugcuaaaauugggcacc

SEQ ID NO: 960 - RNA, 85 nt, Human
gguguauugcuuugcccucuuuuucacugagaaccauucagaaaggauauggucuguaucaaaguuggccaacaugcaacuugcc

SEQ ID NO: 961 - RNA, 79 nt, Human
ggugucucuggaagugucuauacagaugugugcugcugcugcugcugcuuucugccuuaaaauuucuggagccaacacc

SEQ ID NO: 962 - RNA, 77 nt, Human
ggugucuguuccagugcucucgcgagggccuucuucuuuucgggguuggcaaggcgagggcacccuggccggacacu

SEQ ID NO: 963 - RNA, 109 nt, Human
ggugucuuaccauguugccuaggcugguaggcuggucucacacuccugagcugaaaugaugcuccugacucagccuccacaacuagcugggauuacauagugagucacu

SEQ ID NO: 964 - RNA, 81 nt, Human
ggugucuugguucuagcuucugggccucuuguuuucuagaauuauuugauacaagaaaguucuggcacaaccacaggcacu

SEQ ID NO: 965 - RNA, 70 nt, Human
ggugugcagaucuagaucgcagaguaguaagucucauucuaaaacauugcaacuacuguuagaguccacc

SEQ ID NO: 966 - RNA, 113 nt, Human
ggugugggcuuugucauguuuguuguguacauaugugcgugugcacacacccauacacacauguacauaucuagguacauacacauaucaggaaauaugggaaauuuugcacu

SEQ ID NO: 967 - RNA, 63 nt, Human
gguguggguuuuuggcauguagcaguuuuuaugguaagaucuauauauaaaaagucccacacc

SEQ ID NO: 968 - RNA, 90 nt, Human
gguguggucaugcauaccugcagucccagcuacuuagaugagaggaaggaucaccugagccugggagaucaagugagucaugaucacacc

SEQ ID NO: 969 - RNA, 69 nt, Human
gguguuaagugcuccaaggagguggccaccgccauccguggggccaucauccuggccaagcucuccauc

SEQ ID NO: 970 - RNA, 78 nt, Human
gguuaaguuucccuggggggccacccaaaucgggggaacccccggcaaaauaaagggcccccuugggggggaaaaacc

SEQ ID NO: 971 - RNA, 67 nt, Human
gguuacaagcgauaucuccugccucagcuucccaauuaagcuggggauuacacaggcuauuguagcc

SEQ ID NO: 972 - RNA, 84 nt, Human
gguuaccagaaaucacaguggggucuccuuguuggcaucuaauaaugaucuuccaagacaagaucuccugucacucuugguacc

SEQ ID NO: 973 - RNA, 91 nt, Human
gguucauucucuggaucagagucaguggugucagaauaucuauaaugaucagguucauugucacuaacaucugguguacagaaguugaacu

SEQ ID NO: 974 - RNA, 69 nt, Human
gguuccacuccaccauucuauauauggauaaggcuugguaaaguguaagagaaagguggcagugggauc

SEQ ID NO: 975 - RNA, 71 nt, Human
gguuccccuacuucuuggugagguucacugugauauacaacgacacagauggcaagcaagaagcgggagcu

SEQ ID NO: 976 - RNA, 110 nt, Human
gguuccgucacccccucccagggaagcaggucugagcagcuuguccuggcuguguccaugucagagcaacggcccaagucugggucugggggggaaggugucauggagcc

SEQ ID NO: 977 - RNA, 110 nt, Human
gguuccgucacccccucccagggaagcaggucugagcagcuuguccuggcuguguccaugucagagcaacggcccaagucugggucuggggggggaagugucauggagcc

SEQ ID NO: 978 - RNA, 62 nt, Human
gguucuccacauggaaucccugggccacuggagucaaggcuugaagauuucuaugcaggacc

SEQ ID NO: 979 - RNA, 81 nt, Human
gguugaaaaaccagggccuucaucuaggaaauacagcauuuuccagaagcuucuuugaaagggaauccugguuuuguugcc

SEQ ID NO: 980 - RNA, 87 nt, Human
gguugccgugauugaggaggugcuaccagcgucugcugggcagagaccagggaugcugcuccacaucccacaaugcacaggacaauc

SEQ ID NO: 981 - RNA, 77 nt, Human
gguuggagugcaggggcgcgaucucggcucacugcaaccuuugccucccggguucaagcgauucuccugccucaccc

SEQ ID NO: 982 - RNA, 61 nt, Human
gguuggggucauggcgccccgaagccuccuccugcugcucucaggggcccuggcccugacc

SEQ ID NO: 983 - RNA, 90 nt, Human
gguuuacaucaacaucugcacucgcaccucuaucccuccucaccgcagaggugaccgaaggaggagcugcgcagaugcuagaggaggacc

SEQ ID NO: 984 - RNA, 72 nt, Human
gguuucaccauaguaaaaucuuucuuuggcauuuagucaauagccuagggagauaagcacuauuuagaaacc

SEQ ID NO: 985 - RNA, 100 nt, Human
gguuucauuucuucuuggcuugccugagggguucuugcagguacaauuaacacaaaauguucugaggguaguagcuuuucaugcacugaagaaugagauc

SEQ ID NO: 986 - RNA, 69 nt, Human
gguuuccccauacugucucuuguuuuuggaggugacauuuccauccagaaggauaacgaucaggaaacu

SEQ ID NO: 987 - RNA, 82 nt, Human
gguuuccuggaacuuugggggaucauuauaaaaauacuaggguaaaaaagcaaccuuaguaaucccagcaauuugggaggcc

SEQ ID NO: 988 - RNA, 60 nt, Human
gguuucggcaguggcauucggggccggggucgcggcguggacggggccggggccgaggcc

SEQ ID NO: 989 - RNA, 97 nt, Human
gguuucuuaauuagauauagcugaaaagaacgcuagaccaaauagguucucugccuugccuuuucguuuguuuuguuuuagcuauuaucagggaacc

SEQ ID NO: 990 - RNA, 74 nt, Human
gguuugcgcugcuaugagaaucuaaggcugccacugaucugacaggaggcagaacucagguggcaaugcuuacu

SEQ ID NO: 991 - RNA, 70 nt, Human
gguuuguauguguguguauauauguaaauauguauguauguguguacguauguauauacacauacacucu

SEQ ID NO: 992 - RNA, 85 nt, Human
gguuugucugaucauugcucgugcaguuugaguacuggauacucccuuauuccaguugcuugcaccacgcccuggucuuggaacc

SEQ ID NO: 993 - RNA, 87 nt, Human
gguuuucaaggugucaugaaaagauggggauuuaaaggccagccugcuacgcauggucaaacgaaaacccacaggagaccuggagcu

SEQ ID NO: 994 - RNA, 76 nt, Human
gguuuuguugcuacaauuccaugaccaaaaaucucugaaaaguuaaagauuuuccuagcauuuuggcaacaaaacu

SEQ ID NO: 995 - RNA, 81 nt, Human
guaaaaaaacuucaacuuugagaucugacagucucaggucugccacuuacuagcugugugaucuugaacaaggaauuuugc

SEQ ID NO: 996 - RNA, 101 nt, Human
guaaacaaugcaaauagauuuccuaucuucccugggccacuguuguacuagauuacaguuuagguuucauagguccaggcuguggguucugcgauguuugc

SEQ ID NO: 997 - RNA, 72 nt, Human
guaaagccgucggacauccuuggagagaggauagauuccuuaauucuuuugccaaguaugccucggcuuggc

SEQ ID NO: 998 - RNA, 74 nt, Human
guaacagguggggcuggcuacauuggcagccacacggugcuggagcugcuggaggcuggcuacuugccuguggu

SEQ ID NO: 999 - RNA, 72 nt, Human
guaaccuagagaggggugcccccaguguggguuagaaaaucucucggaucuugauuggguccucuugguugc

SEQ ID NO: 1000 - RNA, 84 nt, Human
guaacuauaaaagggaaccuauaaauguaguuucaucugucgucaauuacugcagaaaauuauguguauccacaaccuaguuau

SEQ ID NO: 1001 - RNA, 72 nt, Human
guaagaagguuggcccugaugcugggcuuuuucuaauagcauagacuugaucacaucauuaaccucucuuac

SEQ ID NO: 1002 - RNA, 100 nt, Human
guaagacauaugaagaauuggaucagagauuucuaugacagugcgggaaagcagcacugagaaacuuuugauuguuuucaauuucuucuuuuauguucac

SEQ ID NO: 1003 - RNA, 82 nt, Human
guaagauggguaaagcaugccauuucuguuuucuugagauuuuuacuuuuuagaaacacacaugcuuccacugccaucugac

SEQ ID NO: 1004 - RNA, 94 nt, Human
guaagccuaccaggaggaaccagaacagcugcauaacuuggcaucuaccuaugugcuccugucccuuccacuuccuccuucuguggguaauuac

SEQ ID NO: 1005 - RNA, 118 nt, Human
guaagggagaauguaaaacaucaacucagccaggcuuuuguuuucugcagcaauaauaaagggccuccugcacuuagcaaaaaucugucuuaacuuuguagugcauuucuuccauuac

SEQ ID NO: 1006 - RNA, 63 nt, Human
guaagguguugcaguguggcaaaauagcaauguacggaguuuugcacaccacaacagccagac

SEQ ID NO: 1007 - RNA, 95 nt, Human
guaaguugguucuguuuugagcuucacugaggaagcacagcuguugguugaaguauuaguaugcuguguccuucauaagcacagagccaugguac

SEQ ID NO: 1008 - RNA, 78 nt, Human
guaauggcauaagaauacugacuuauucucguuuagaaagcccucuggcagaauacaagucauuucaauuuccguuac

SEQ ID NO: 1009 - RNA, 80 nt, Human
guaauucacaaaaacucacauuuacuuugaagagcaauuuggcaaugucuauaaggcuaaauguguuuauucugugauac

SEQ ID NO: 1010 - RNA, 67 nt, Human
guacacuucacucagaggcaggugcaucuuuaaauaauuucuuauaagccucuaaagugaucagugc

SEQ ID NO: 1011 - RNA, 78 nt, Human
guacagagaugaggcagaguggagagaaacaacucuggcugagccagagucuccagccacuacuucuuauuccugggc

SEQ ID NO: 1012 - RNA, 68 nt, Human
guacaggcugaggccuuugacaguguuaccaucuacuucagugacauuguuggcuucacagcauuguc

SEQ ID NO: 1013 - RNA, 74 nt, Human
guacaucaggcuuuugugauuugagacuugaugguggcucugcuccacgucaaucacaaaggcuuguccagugc

SEQ ID NO: 1014 - RNA, 71 nt, Human
guaccacacuggacguggggguccucccccagcuaugggccgaggagcacccccuccaggcaugauggugc

SEQ ID NO: 1015 - RNA, 90 nt, Human
guaccaccuugucggguagcuuaucagacugauguugacuguugaaucucauggcaacaccagucgaugggcugucugacauuuugguau

SEQ ID NO: 1016 - RNA, 72 nt, Human
guaccaggaagacuucaugaaagcagucagaaaaaguggugauucuagaaggcuggagucuaaauuggguac

SEQ ID NO: 1017 - RNA, 80 nt, Human
guacucugcccgugugggcacuguccugggccagcgauuucugcugccagcugagaacaacaagccccaaagacagguac

SEQ ID NO: 1018 - RNA, 97 nt, Human
guacugccugcccggggcuuaggaggguggcaccggugcugggacacacgggacuguguccucgccaacccccgaccugcccccugccagccagugc

SEQ ID NO: 1019 - RNA, 73 nt, Human
guagaaagaaaagccccugaugcuggaggcugucuucacgcuugaccccagaccuggggguguuguguucuac

SEQ ID NO: 1020 - RNA, 78 nt, Human
guagaaaguaaaugagauaaguacuuuguacauguuaacgcacaguaaaugguaauuauuuacauucauuucaucuac

SEQ ID NO: 1021 - RNA, 62 nt, Human
guagaagcauuuugagaacagguuggcaucaucacauaagcccuuauauucaagaacucugc

SEQ ID NO: 1022 - RNA, 69 nt, Human
guagacaaguccuccagcacagccuauauggagcucacuaggcugacaucugaggacucugcugucuau

SEQ ID NO: 1023 - RNA, 67 nt, Human
guagacgcccagcaucuucaaagacaugcucugaguuauucugccauuuagaugacggggcuuuugc

SEQ ID NO: 1024 - RNA, 80 nt, Human
guagagaggguguuucaccauguuggccagguuggucucgaauuccugaccucaagugauccgcucgcucgccucucuac

SEQ ID NO: 1025 - RNA, 74 nt, Human
guagagaugggaucucacuuuguuguccaaucuguucucaaacucuuggcuucaagugagccuccugccucugc

SEQ ID NO: 1026 - RNA, 74 nt, Human
guagagaugggguuuugccauguugccuaggcugaucucaaaucccugggcucaagcaauccacccaccucagc

SEQ ID NO: 1027 - RNA, 68 nt, Human
guagagggcaaugugguugucauggagacagcugucuucaacacaaaccauccugugcaucuaucuac

SEQ ID NO: 1028 - RNA, 74 nt, Human
guagaggugggguuucuccauguuggucaggcuggucuuuaacuccugaccucaggugauacgcccgccuuggc

SEQ ID NO: 1029 - RNA, 66 nt, Human
guagcagaauauguuacaacugcggcaaaggaaaugcuaaacugucacagcuguagaucaugcugc

SEQ ID NO: 1030 - RNA, 83 nt, Human
guagcagauugggagaaauuaccugauuguuaacucucugaaaccuuaagggguuaaccgcugucucgcuccauuccugcugc

SEQ ID NO: 1031 - RNA, 70 nt, Human
guagcaggcuuccugcagacuguauagacugcacaacaaauuucuccuguaccuaugggaagccugucac

SEQ ID NO: 1032 - RNA, 74 nt, Human
guagccuggaagaggggcuccugcagguaaucguacacuucauuuuugccuagccgaucaucuuccugagcugc

SEQ ID NO: 1033 - RNA, 74 nt, Human
guagcugcuagaggccuuugcuagcugcuacagguagguccacacugucgcaggcugcucugucucuuagcccc

SEQ ID NO: 1034 - RNA, 94 nt, Human
guaggcuugaugacagagccuggacaagaacagcgaccaggagaucgaccucaaggaguacucgguguuccugaccaugcugugcauggccuac

SEQ ID NO: 1035 - RNA, 75 nt, Human
guagggagcacccgcgugccagucacucgagacggcucuucgagcacuggccuacuggcacucggcgcuucguac

SEQ ID NO: 1036 - RNA, 69 nt, Human
guaggggcccucguccuucuucucggccgccaccagcaggcugugcuccaggucggccugggccccugc

SEQ ID NO: 1037 - RNA, 71 nt, Human
guaguaaaauaagccucacucaaacauagcugacuuccuauugguacagcuugaaaagcacuuuuuacuac

SEQ ID NO: 1038 - RNA, 74 nt, Human
guagucccagcuauucaggagcuugaggugggaggaucacuucggcccaggagucugaggcuggagugagcuau

SEQ ID NO: 1039 - RNA, 102 nt, Human
guaguccuugacucucacauuaaaacuaacuuuggcuagguacugguggcucacaccuguaaguaaucccaguacuuuaggaggcugagaguggaggauuac

SEQ ID NO: 1040 - RNA, 74 nt, Human
guagucuccacuggagaaguuaauugaugaguaguagccuacaacucaggcucuagcuucuccaggaacacuac

SEQ ID NO: 1041 - RNA, 71 nt, Human
guagugcuccuggagaagcuagagccugauguaggcuacauacucaucauuuacuucuacagggagacuac

SEQ ID NO: 1042 - RNA, 63 nt, Human
guagugcuugucacauaguaagccuuuguuguuguuagcgcuuacuguguaacaaaucacugc

SEQ ID NO: 1043 - RNA, 84 nt, Human
guagugucagagauaccggggcuguugguacuguuuuuccuauccagacaaagaccccgauaccucguguuccuaaaauacugc

SEQ ID NO: 1044 - RNA, 63 nt, Human
guaguuucuagcauaacaccagggaugugguggugaaacguuccggaagguguugagaacugc

SEQ ID NO: 1045 - RNA, 77 nt, Human
guauauaggcugagcaagagguggugagguugaucggggguggcuggaucucacuuccucugcuggggccucggugc

SEQ ID NO: 1046 - RNA, 89 nt, Human
guaucagaaagacuuguguuaaaucaguccgcccuuuaacuugcgcaaaggcauggcgcggggugacuuggccagucugaccugagugc

SEQ ID NO: 1047 - RNA, 76 nt, Human
guauccugggggugugugugugcaugcaugucugugugucugucuguccaugcacacauacacuugcccaggagac

SEQ ID NO: 1048 - RNA, 90 nt, Human
guaucuugugcugaccuccuaucucauccggugacuuagaaugccuaacucuuugggaaugcagccuaguaggucucagccuuauuuuac

SEQ ID NO: 1049 - RNA, 68 nt, Human
guaugaugucuaucaguauuuucugccugagaaugaccucacugaggagauguugcugaagcaucugc

SEQ ID NO: 1050 - RNA, 76 nt, Human
guaugcuaugcuaauuuuuaaaaaguaacauaacacuaagaucacugaauuuuaaguauuagauuuucuggugugc

SEQ ID NO: 1051 - RNA, 77 nt, Human
guaugggggguguucugcuuggcaccaugucuggcuuuuuggccagaaguccuuugcagagcugaauauccccuugc

SEQ ID NO: 1052 - RNA, 96 nt, Human
guauggugucuucacuuauuauguauguuuaucuguauguauauuccuuauuuugucauauauguagagaaaauugcaugacuugaggcaucauau

SEQ ID NO: 1053 - RNA, 75 nt, Human
guauguacaauugauaauauaaaggggcucauugaaacuugagagccuguugaguuuugguuacuuguacauugc

SEQ ID NO: 1054 - RNA, 75 nt, Human
guauucuguauguuuagccaaaagcacuaaggucauaugaucuuaaguucaaaauggcuaaacuaaccagagaac

SEQ ID NO: 1055 - RNA, 97 nt, Human
guauuugacucgaccuuggaacacuggcccugagacucagggguuuaacauuucaccucccugaauucccauccagaaaucucaggcgagcagauau

SEQ ID NO: 1056 - RNA, 83 nt, Human
guauuuugcuucugucugugaauucuguugcuucuggggcauuuccuggaagguuggaaaguuuacaaaucucaguccaaugc

SEQ ID NO: 1057 - RNA, 98 nt, Human
gucaacuacaucuaucguucagacagaguacuguggacugcugagaauguccucuauucuugaaguagcguauucuuggagcugauaccucuguugau

SEQ ID NO: 1058 - RNA, 87 nt, Human
gucaaucacccugggcuccucgaacucagccucagugcuguagcccugguggcugacccugcgcaggcgguccaggcccugguugau

SEQ ID NO: 1059 - RNA, 93 nt, Human
gucacacauggguugaaccucacugauuucugggaggcuacagcgggaccauggcauaacuauccgggaagagacuugugauccauguguggc

SEQ ID NO: 1060 - RNA, 85 nt, Human
gucacagacuguugaaacaugaccagaagcguguagcuccauccaucgugcuagagcucgcuugggucccuuugacaucuuuggc

SEQ ID NO: 1061 - RNA, 90 nt, Human
gucacagauugcggccaggggcuuaauagcgcggugaguacuaggggccaucgugaauguauugagccagugcuugcagcuuacagugac

SEQ ID NO: 1062 - RNA, 78 nt, Human
gucaccauccucugcauugacuugggcacugacaugguuccugccaucucccuggcuuaugagcaggcugagagugac

SEQ ID NO: 1063 - RNA, 71 nt, Human
gucacccauauuaaaaugcacaggggccaggcaugguggcuuaugccuguaaucccagcauuuugggaggc

SEQ ID NO: 1064 - RNA, 71 nt, Human
gucacccuggcuggaggugcaguggcgugaucucagcucacugcagucuugaccucccaggcccaggugac

SEQ ID NO: 1065 - RNA, 68 nt, Human
gucacuggaaaaugccuacaggcaguagccaccaucauguggcacaaagugggcaucauccuaguguc

SEQ ID NO: 1066 - RNA, 82 nt, Human
gucagaaaacgcucuuguuaccacucauguucuucauuucuuuauucagaaaugcugacuauaucaucaaccaguuuucugc

SEQ ID NO: 1067 - RNA, 80 nt, Human
gucagagucuucucaucugugccagcacccuucauggauuuguaaaguuuguucggcaagaagagagggcuguucuugac

SEQ ID NO: 1068 - RNA, 63 nt, Human
gucagaugccugauaacagggugcaguguuguuuauacuucauugcuccuucaggacauggac

SEQ ID NO: 1069 - RNA, 76 nt, Human
gucagcacuuacauuaagaaaauugguacaaccccgacacaguagcauuugugccaauuucugguggaauggugac

SEQ ID NO: 1070 - RNA, 72 nt, Human
gucaggcacgcucacacgcaguguccuguguuggcuccugacccagcagggggacauggugggcggauguac

SEQ ID NO: 1071 - RNA, 84 nt, Human
gucaggcagaggugacgccaggagaugauuuaaaggugaaaaugacaagguuuccaccccucaaaccuuggcuccuuuucugac

SEQ ID NO: 1072 - RNA, 76 nt, Human
gucaggccaggggguugcaaauguggguacuuuccgugagaacucauaaggguaguuggggauuuccugaucugau

SEQ ID NO: 1073 - RNA, 84 nt, Human
gucagggaaaucaugcagccaucaggacacaggcuccgggacgucgagcaucauccucuccuggcugaaaaugacaacuaugac

SEQ ID NO: 1074 - RNA, 69 nt, Human
gucagguuaaaaggcuuugcacagcuauuguucacauuuacagccuuggcucaaacccuggucucugac

SEQ ID NO: 1075 - RNA, 88 nt, Human
gucaucacaaaauacugccaaugaaucaucaaaugcauugaaaagaaaacgugaagaugaugaugaugacgaugaugaugaugaugac

SEQ ID NO: 1076 - RNA, 64 nt, Human
gucauccucguccuccucugccuguggcugcugcgguggcggcagaggaggggaugagucugac

SEQ ID NO: 1077 - RNA, 73 nt, Human
gucauuuugguuuacaauggaaacucggggaauucaaaauuaacauccugugcccggugagcuucuuauagac

SEQ ID NO: 1078 - RNA, 77 nt, Human
guccaaagccacacugaaaacagaggcagagacauguacucuggugugaucucuuguccucagugucucuucugggc

SEQ ID NO: 1079 - RNA, 75 nt, Human
guccacacugaccuucugugucauggcauaugcccaugucaggcagugcugugcuaaaggaaggauuacauggac

SEQ ID NO: 1080 - RNA, 110 nt, Human
guccacuggcccuucuugucuuagguccucacacacagcucugcucaguucaaucacccagaaugcaggcugguuggugaggcaaauuuggacagaagaagucagugucc

SEQ ID NO: 1081 - RNA, 78 nt, Human
guccagagaugaggcagaguggagagaaacaacucuggcugagccagagucuccagccacuacuucuuauuccugggc

SEQ ID NO: 1082 - RNA, 98 nt, Human
guccagauaauuccaggccaggcacgguggcucacgucuguaaucauagcacuuugggacuacaggcauaagccaucaugccuggcuuauuucuagac

SEQ ID NO: 1083 - RNA, 74 nt, Human
guccagggaaagagcaguaagggucagaagagaaagagccugguguucucacugccuccugccuuccuuaugac

SEQ ID NO: 1084 - RNA, 103 nt, Human
guccaucuucaguggcauugggccuuggcugggaugcugaguuauccacuggagcaucggcaguacaggcaggcacagaggcaguggauccaucggagguggc

SEQ ID NO: 1085 - RNA, 74 nt, Human
guccaugaccacugcaaucaccucucgcgccgagcggagcugcuggcgcagagcguccuugcagccguaggggc

SEQ ID NO: 1086 - RNA, 80 nt, Human
guccauuccauccgaggcaagucuucugaaaaccugugaacucaguucggaggaaauccugucucgugaacgaaguggac

SEQ ID NO: 1087 - RNA, 63 nt, Human
gucccauggaagcuucaugacuguaugcuguucauuuuucucuaagaugcagucacauaggau

SEQ ID NO: 1088 - RNA, 79 nt, Human
gucccccggguacuuuggggucaaaauacgguaauccauggacguaagcuggggaaggacuccggaccgcuggggggac

SEQ ID NO: 1089 - RNA, 65 nt, Human
guccccuuaacuaauccugaccuuaaccuauauaccaauggaaguucaguuguggagaaugggac

SEQ ID NO: 1090 - RNA, 90 nt, Human
gucccucccuccccugcugugaccuuguggggguugagaaaccuaggcacucauggcccccuggaggggcagggcaggcagggcuggggc

SEQ ID NO: 1091 - RNA, 86 nt, Human
guccggaaaugacuagcucucuggaaaagcuccucuugccgaugaggaagcucaugguggagcugguagaugagcccacgcuggac

SEQ ID NO: 1092 - RNA, 61 nt, Human
guccguuuucucugguuuugugaagacugcacaaaacucucaugauggagaaccaaaggac

SEQ ID NO: 1093 - RNA, 74 nt, Human
guccuacaaggcuucuggcuacaucuucacaaguuaugauauagacugggugaggcagacgccugaacagggac

SEQ ID NO: 1094 - RNA, 102 nt, Human
guccuccaucaccagagcaaguucagccaccaggccccuuaagcacagugccaagagccuuacugggccuucaggaaguucaggcuuuuguggcaggaggac

SEQ ID NO: 1095 - RNA, 69 nt, Human
guccugcagcugcagcugagacugcggcggagacugcgcgagcgugaggagaagcuggggccgcaggac

SEQ ID NO: 1096 - RNA, 88 nt, Human
guccuggacauaucggaguaggggguggucagacaucacaggagcugucaacuccugcggaaugggccaacucacucgguggcaggac

SEQ ID NO: 1097 - RNA, 110 nt, Human
guccuggcaaagaugacaugccguucacacucauucaucacgcugcgugccuucugauugucauagaguggcauaggcguugaugugaccgucuccacaucuauugggac

SEQ ID NO: 1098 - RNA, 66 nt, Human
guccuggugaagaccuaguucuugcaggagacaauuccacugcagaagcacuuuacuuaaaaggac

SEQ ID NO: 1099 - RNA, 71 nt, Human
guccuucuuucagaccaaagcuuggacgucagugccagcgaugaugagauagccaggcugaagaagcagac

SEQ ID NO: 1100 - RNA, 88 nt, Human
guccuugaacuuggaaccugacaauguugguguugucgugucuggaaaugauaaacuaauuaacggaaggagauauagugaagaggac

SEQ ID NO: 1101 - RNA, 86 nt, Human
guccuugaacuuggaaccugacaauguugguguugucguguuuggaaaugauaaacuaauuaaggaagagauauagugaagaggac

SEQ ID NO: 1102 - RNA, 87 nt, Human
guccuugaacuuggaaccugacaauguugguguugucguguuuggaaaugauaaacuaauuaaggaaggagauauagugaagaggac

SEQ ID NO: 1103 - RNA, 87 nt, Human
guccuugaacuuggaaccugacaauguugguguugucguguuuggaaaugauuaacuaauuaaggaaggagauauagugaagaggac

SEQ ID NO: 1104 - RNA, 87 nt, Human
guccuugaacuuggaaccugacaauguugguguugucguguuugggaaugauaaacuaauuaaggaaggagauauagugaagaggac

SEQ ID NO: 1105 - RNA, 86 nt, Human
guccuugaacuuggaaccugacaauguugguguugucguuuuggaaaugauaaacuaauuaaggaaggagauauagugaagaggac

SEQ ID NO: 1106 - RNA, 124 nt, Human
guccuugucauccucugccuguuguuucucauuuuagggaaaagcaguagcuuugcugugcuuuuuauuaucuaucuuucccugucuaccuuuacaaaugaaaauuauugcagagugcaaguac

SEQ ID NO: 1107 - RNA, 112 nt, Human
guccuuuagucucuauuuuugcuccuaauuguuccugcagguaguagguuaacauguaacguacuuacagaaggaagcaauugaacauggcauagauacugaaagaaagggc

SEQ ID NO: 1108 - RNA, 78 nt, Human
guccuuucucuggagaggcuuguggggccucaggacgcuacccacugcucuccgggccucuccugccgccucugggac

SEQ ID NO: 1109 - RNA, 60 nt, Human
gucgacuagggguuucagcauauugaucaugcucgucuugaauuccugaccccaggugau

SEQ ID NO: 1110 - RNA, 87 nt, Human
gucgccgcuguggggcagcgccuggcgggcggcccgcgggcgggucgccuccccuccuguagcccacacccuucuuaaagcggcggc

SEQ ID NO: 1111 - RNA, 74 nt, Human
gucgccuguugaguagacauggugggcuuuuuacaacggggugaaugaauccaugucuuaaccagcagguguac

SEQ ID NO: 1112 - RNA, 66 nt, Human
gucgcgcgcaaauuucuggugagcgccacaugacaauuuggcacacucuauccgaaauuugccgac

SEQ ID NO: 1113 - RNA, 70 nt, Human
gucgcugggauagaagccuuugaccaagcaggucaggcugaccugguucuuggucagcucaucccgggau

SEQ ID NO: 1114 - RNA, 86 nt, Human
gucguguccuacccaugcgcgucccggcggagcgggcaugcgccaccgcggcgccuggcgggacgugugggccgugaggauaggac

SEQ ID NO: 1115 - RNA, 93 nt, Human
gucuaaccagucccagugagaugaaccagguaucucagcuggaaaugcagaaaucaccugccuucucuguuggucucccugggagcugcagac

SEQ ID NO: 1116 - RNA, 82 nt, Human
gucuaauacacagauaucccaaugacuaaaguaagaauuccugucugaagcgucgucggcugggaucucgcacugguuagac

SEQ ID NO: 1117 - RNA, 78 nt, Human
gucuacaagaauaaguuuguuuuggaaaguugagcuauagcuacagcucuagcuauccagcagacuuuucauuaugac

SEQ ID NO: 1118 - RNA, 62 nt, Human
gucuacaagcauuuugaaauauucugugccuucgcagaauuucgugugugaucacugaggac

SEQ ID NO: 1119 - RNA, 68 nt, Human
gucuacauaaaugaagagcucaagaugacaucagucccauuugucuuaaguccugguguuguguggau

SEQ ID NO: 1120 - RNA, 94 nt, Human
gucuacuuuggcuacuaccaugggcuucugggggaacagggcuauggccuucucuuccagaaaccacugggugguccucaaaaccaaagugggc

SEQ ID NO: 1121 - RNA, 88 nt, Human
gucuauuaugagucugacuggcacagacaucugucaaggaagaaggauucuuugagcguauuugugucagucaacugcauauauggac

SEQ ID NO: 1122 - RNA, 71 nt, Human
gucucagcuagaacgagcggcccuagguuuucggaagggaggaucaggguauguuugcgagcggcuggaac

SEQ ID NO: 1123 - RNA, 89 nt, Human
gucuccagaacuagacugugagcuccuugaaggcaaauaguuuuuguucuauuuccuucuaauaucucauuuucuauuuucugugaggc

SEQ ID NO: 1124 - RNA, 71 nt, Human
gucuccagcugcaccuccaccauggccaccauggcaaagccggagaggagggcggagguccugcuggaggc

SEQ ID NO: 1125 - RNA, 103 nt, Human
gucucucaugaaauggaaagauucagaugaggcagacuuggugcuggcgaaagaggcaaauaugaaguguccucaaauguaaugcuuuuuaugaacgagagac

SEQ ID NO: 1126 - RNA, 73 nt, Human
gucucugcaagcucuugagucccgccaagaugauauuuuaaaacgucuguaugaguugaaagcugcaguugau

SEQ ID NO: 1127 - RNA, 76 nt, Human
gucucuguugcccaggcuggagugcaguggcgcaaucucagcucacugcaaccuccaccuccuggguucaagcgau

SEQ ID NO: 1128 - RNA, 81 nt, Human
gucugaaauccaggugugggcagggccgugcucccuccgaaggcucuaggggaggauccuugcucaacuuauuuuugagac

SEQ ID NO: 1129 - RNA, 64 nt, Human
gucugaaccugggggaucaggggaguaggggacucuccccuuguccacugauggggggucuggc

SEQ ID NO: 1130 - RNA, 85 nt, Human
gucugaauugucaaauaguucuaaagugcauucuugcagcuaauaaauagcagcauuuguuuauaaaaccuuaagaaauucagac

SEQ ID NO: 1131 - RNA, 90 nt, Human
gucugauuaacaaggugugacacauucacaguaugcgggcuauuuuaagaacccucauuuggugggcugauucaucucuggaguaaagac

SEQ ID NO: 1132 - RNA, 90 nt, Human
gucugauuucugaauguaaaguuguuguguuuuuuuaaauaguaguuuguaguauuuuaaagaaagaacagaucgaguucuaauuaugau

SEQ ID NO: 1133 - RNA, 72 nt, Human
gucugggccagaugcccugccaggaaagggacauggacccacgugcuugaggccuggcagcugggccaagac

SEQ ID NO: 1134 - RNA, 64 nt, Human
gucugguggagagacucuguggacguaaagaagggaaugaacacagagaaacuuucagccagau

SEQ ID NO: 1135 - RNA, 77 nt, Human
gucugguggccgcucaucuugugcacgguugugcugguccaggagggauagaugugcgcuugugugggucaugagac

SEQ ID NO: 1136 - RNA, 71 nt, Human
gucugucauuccugugccacgaccucagcuugcauccuaucagucuuggggaaggaaaagggaguacagac

SEQ ID NO: 1137 - RNA, 74 nt, Human
gucuguccagaucuuccaucuuaugcgccagcuugcagcagguuaaggacagcagcaggaugaagcuggaugac

SEQ ID NO: 1138 - RNA, 82 nt, Human
gucugugaccaaacagcccagaacguccggccaagcagccugcauauggccuugggagucauggcacaguacgguggcagac

SEQ ID NO: 1139 - RNA, 81 nt, Human
gucuuugaauggaaaacaacuauuuucucaucauugggucaauauugacugaucaguaguaggucuuuuaccauucuggac

SEQ ID NO: 1140 - RNA, 81 nt, Human
gugaaggaacaguuugccuggagacauuucuacugguaccuuaccaaugaggguauccaguaucuccgugauuaccuucau

SEQ ID NO: 1141 - RNA, 87 nt, Human
gugaaggaggaacugaaggguucaacugcggguaccacuuaggagacauauucugugacccguguaauccauaaguuucuaguuuac

SEQ ID NO: 1142 - RNA, 83 nt, Human
gugacccucaacuaccucagguuugaaggcccuaaaugaaacugauuaccacucauagggacaaaccgaggggguucgguuac

SEQ ID NO: 1143 - RNA, 111 nt, Human
gugaccuacaagucucuuuauuugcccuccauuauagacugagcuguuaauaacauuuaaugagcucacauggauucacuggcuaauaaagaagaauagaguugaggacau

SEQ ID NO: 1144 - RNA, 95 nt, Human
gugacucugguccaucacacuuagguccucuggccugccucugccacauccagcugcuaggggcuggccucagcccugugaggggccgcaggcac

SEQ ID NO: 1145 - RNA, 67 nt, Human
gugacuucaucuuuguccuuaaauuaaccuuugcucuugagagcagaagagggaaagacaggggaac

SEQ ID NO: 1146 - RNA, 98 nt, Human
gugacuuuccaggugucacacagugaguggcauaaucagaguacaauuugagucaugcccauacaucacauugccagugauuacccaaggaaagugac

SEQ ID NO: 1147 - RNA, 85 nt, Human
gugagaaagcacugggguccagauggggagaagauguucugccauaagaaaaucuccuggucugguccgugccuuggcuuagcac

SEQ ID NO: 1148 - RNA, 70 nt, Human
gugagaacuugguauuauugguucgagaaggaauuggugaauccaccggccgugauccauaccauuccac

SEQ ID NO: 1149 - RNA, 65 nt, Human
gugagaucaccuugccccauaauuuccaugcuuccuuugugugcaggggcaaaggcgauuaucac

SEQ ID NO: 1150 - RNA, 79 nt, Human
gugagauguguuccaggaagucgucuugagcacccauugcucagaguuuauauuggacuugcuuucuagcacauaccac

SEQ ID NO: 1151 - RNA, 108 nt, Human
gugagccuccggccugcaagaccacuuuguagucccuaccagcuguguggccagcccuguugguaaagggaccuagagaugaacacuuucuugcccuuagggguucac

SEQ ID NO: 1152 - RNA, 87 nt, Human
gugaggauggcagugcaggaugcaguagaugcccugaugcagaagugcuuucaacuccucguccuucaacuccaacaccuuccucac

SEQ ID NO: 1153 - RNA, 84 nt, Human
gugaggcucuggcaaggugugggcuagagaugcgacucaguuggaucuaucucucagaaggcuaccuuguaaguagaguuccac

SEQ ID NO: 1154 - RNA, 72 nt, Human
gugagggguuguuaacaaagaauauauauuggucauucuuacaacuacuauuuaaagucagcaacuuuucac

SEQ ID NO: 1155 - RNA, 62 nt, Human
gugaguguucuaaugauuccuaaacuacagucccuuaggaacugcguggcuaucacacugac

SEQ ID NO: 1156 - RNA, 126 nt, Human
gugauacaagugugaguuacaucauagucuauuucuugcuaaggccaaaguagaggaagucgagguaaauuugcaaaugcuauuugagccaguggccauggaaauaauuaugcucacauucuucac

SEQ ID NO: 1157 - RNA, 100 nt, Human
gugauauguuguaugaugcucucuuuucaugcugagcaguggcagcaagucgcagcucccaaucagcugugcaaucaugaggguaaacaaugcauauugu

SEQ ID NO: 1158 - RNA, 78 nt, Human
gugauccugugaucaugaucgggaaggcuuaacaugguaaagaugucaaaucuccccaaauugauguauagguauaac

SEQ ID NO: 1159 - RNA, 66 nt, Human
gugauucuggcacaggaaauggucuccaaaaucucaaaauaucagaucucuaccuugucaagucau

SEQ ID NO: 1160 - RNA, 81 nt, Human
gugcaauaaagaaaacauuaaauauuuaguuuggacuugaauaucaagucguagaaauuuauuuggaauacuugcuggcac

SEQ ID NO: 1161 - RNA, 79 nt, Human
gugcacaaccaaaaaauggagggaaacugaagcaagaauucgaauuaagagacuuuuuccauucccucacgguuugcac

SEQ ID NO: 1162 - RNA, 104 nt, Human
gugcacagccccacaaccaggucagcgaugaagguaucuucagucucccccgaaccgaugaagacaccauugacgccccaaccauuggccugggcagcuugcac

SEQ ID NO: 1163 - RNA, 102 nt, Human
gugcacuacagacuccagccucccuuugaagccagguuccagagcuuccucccuuuggccuggaaccucaacagcaggauugggaugaggauggaaguguac

SEQ ID NO: 1164 - RNA, 83 nt, Human
gugcaguacaaagacaguucagugacaaguuccauccauaccauggaagaggguuaaacuuguggcuguuuuugccacagcau

SEQ ID NO: 1165 - RNA, 75 nt, Human
gugcaguaccgcccugaggaguucacgaaggccaagggccugccuggugacagcuucuacaucagggcccuguac

SEQ ID NO: 1166 - RNA, 109 nt, Human
gugccacuaaugagcucucacucuggcuuguuaugugagaaacacaucucugugguguuuuaaucauucugcauuuuggggucuauuuguuacaggagauagugugcac

SEQ ID NO: 1167 - RNA, 87 nt, Human
gugccagcgaugaugagauagccaggcugaagaagccagaccaaggcaucaaggggcgaucagccuggucucuaugaagacuggcgc

SEQ ID NO: 1168 - RNA, 73 nt, Human
gugcccacagugccccggacacauuucacaccucaggcucgugguggugcaggggacaagaggcugugggugc

SEQ ID NO: 1169 - RNA, 95 nt, Human
gugcccgcccuggccccacggcagaaucagcuucuggguccaucggaggauccgagugugaauucccugcaagaacguggggagagugugggcgc

SEQ ID NO: 1170 - RNA, 80 nt, Human
gugccuaugcgggauccugggugugcaugacuccacucgcucagggccauggggaauguagacgccagcuguacagguac

SEQ ID NO: 1171 - RNA, 75 nt, Human
gugccucagccuccugaguagcugggauucacgggugcuugccaccuugccuggcuaauucggugguuuuaguac

SEQ ID NO: 1172 - RNA, 131 nt, Human
gugccucaucuguaggugguugagagaaugaaaggagguagcaugagcagggcacucagcucggaggcagugccuagccaacauugcuuaucuucacugugaauuuggcuuuuuuccuacucuugaaucuu

SEQ ID NO: 1173 - RNA, 90 nt, Human
gugccuuuaacucuuuuggcccuugggagucauugcaaccccaauacaaaugccagcccagggauuuccaguggccacaaguuauugcac

SEQ ID NO: 1174 - RNA, 91 nt, Human
gugcgcucggggcccuucgggcagaucuuccggccggacaacuucguuuucggucagaguggugcugggaacaacugggccaagggugcac

SEQ ID NO: 1175 - RNA, 70 nt, Human
gugcggcucagugagacucuugguggggcggguccgcuuccucuucaccaucacaggcuucuggcugcgc

SEQ ID NO: 1176 - RNA, 87 nt, Human
gugcuaaauguguucgugacaggaucaagcgugcuuuccuuaucgaggagcagaaaaucguugugaaaguguugaaggcacaagcac

SEQ ID NO: 1177 - RNA, 66 nt, Human
gugcuaggauuacaggcugaucccauaaugcauccucaaguggucaucuuaagccucauccuacau

SEQ ID NO: 1178 - RNA, 87 nt, Human
gugcuagggggucaccuaugugggagccagcucugccuccugccccgaagcuccagagacuucuccuacaacugacucucuggacac

SEQ ID NO: 1179 - RNA, 84 nt, Human
gugcucgguuuguaggcagugucauuagcugauuguacuguggugguuacaaucacuaacuccacugccaucaaaacaaggcac

SEQ ID NO: 1180 - RNA, 76 nt, Human
gugcugaccccaggaggggaggggccggccaccaucaagacguuccggacgccggagcucccacccucuucagcac

SEQ ID NO: 1181 - RNA, 62 nt, Human
gugcugcagaugcaucccaauaaucaggguggccucaaaacccugucuguccucuguagcac

SEQ ID NO: 1182 - RNA, 104 nt, Human
gugcugggucaaacagccuuuauuuuagcaguugugagacccuagagaacuccuuugguguuuuggggucuccccagcaugcacaauggggguuaugcuagcau

SEQ ID NO: 1183 - RNA, 81 nt, Human
gugcugucuuaugguugcguggcgaguuucugcuucagaugcagagcacuguccagagcuuccuccaguggacaauagcau

SEQ ID NO: 1184 - RNA, 113 nt, Human
guggaaacauacagaagaagcaaggaaauuacaguuagaggucacaacugcccgaagccaguucuaaauuuuuaugaagccaauuucccugcaaaugucauggauguuauugc

SEQ ID NO: 1185 - RNA, 78 nt, Human
guggaacggcucaccaacauccuugauggaggugcccagaacacugcacuccgcaggaaaguugagagcaucauccac

SEQ ID NO: 1186 - RNA, 93 nt, Human
guggaagaagaugaugaaauaaaucgagauugguuggauuggaccuauucagcagcuacauuuucuguuuuucucaguauccucuacuucuac

SEQ ID NO: 1187 - RNA, 104 nt, Human
guggaauucuucaucgagucguugacuucucgacggaaugcugacagguucugggugaaccugucucuguuuuucguaagaagauuucgcucgaugccuuccau

SEQ ID NO: 1188 - RNA, 86 nt, Human
guggagaagggguccaguuucaaucuucugcauauagcuagccaguuguccuugcaccauuguugaacagggaauccuuuccccau

SEQ ID NO: 1189 - RNA, 131 nt, Human
guggagauagauuuacccuuucuaaacuauuagcuguaauuuuaagguaagcauauagugugauagcuaguuugcucugcuuaaaaauacaauauuacaauuucugauaguggcaccaggguaguuuguau

SEQ ID NO: 1190 - RNA, 76 nt, Human
guggagcgagggaaggaguuaaugaaacuguauugcacaaugcucugaucaauccuucuuuuucucuuuugcccac

SEQ ID NO: 1191 - RNA, 70 nt, Human
guggagcugucggaggccaggcuccgggacgugcugcagcgcgccgggcccucucucccacuuuuuccau

SEQ ID NO: 1192 - RNA, 63 nt, Human
guggaggugcacauggaaccaaaccuccccaccaggugcugguauuccaggugcaguguccau

SEQ ID NO: 1193 - RNA, 78 nt, Human
guggaguuugugccucggcagcugggccugacggagcgccggguccacaucagccaucugcuggcccacacgcgcuac

SEQ ID NO: 1194 - RNA, 80 nt, Human
guggauggacuggaaggggauguucauggucagcugcgugguguagcuccgguagaaggccccaacccucgguccuccac

SEQ ID NO: 1195 - RNA, 82 nt, Human
guggauggacuggaaggggauguucauggucagcugcgugguguagcuccgguagaaggcccccaaccccucgguccuccac

SEQ ID NO: 1196 - RNA, 83 nt, Human
guggauuggauaugguuggaguggcacagacuggaucugggaaaacauugucuuauuugcuuccugccauuguccaacaucac

SEQ ID NO: 1197 - RNA, 71 nt, Human
guggcaagaggaacacaaggacugcccagaaaaaccggggcaagcuucugggcaaaggccccuguugccgc

SEQ ID NO: 1198 - RNA, 70 nt, Human
guggcaaguggauuauucggcugcggaagggcuuggccucccguugcugggagaaucucauuuuggccau

SEQ ID NO: 1199 - RNA, 71 nt, Human
guggcaccuucagggccaggagaggcacuggggaggggucacaggaugcuacucgggcaccuagaagccac

SEQ ID NO: 1200 - RNA, 85 nt, Human
guggcagaagaucccagcugaccacggccccuuucucuggggucagagggagaagacaggcgcagucagcaggggcagcuguugc

SEQ ID NO: 1201 - RNA, 71 nt, Human
guggcaguuccagccuuauccucagggucugacacaaucgggcuuuuacgaaaggcauguuuuacugccac

SEQ ID NO: 1202 - RNA, 71 nt, Human
guggcauauccaggcaugcugugcucuaacuggcgagggauugugccaaggacuugaauggaugaugucac

SEQ ID NO: 1203 - RNA, 65 nt, Human
guggcccacgugggcgggacggccgcaggcaugggguggcugugcugguccgacaccugggcuac

SEQ ID NO: 1204 - RNA, 72 nt, Human
guggcgaguauggugcggaggcccuggagaggauguuccuguccuuccccaccaccaagaccuacuucccgc

SEQ ID NO: 1205 - RNA, 80 nt, Human
guggcuacacagcucguuuccccuggguccucuguguaguuaacuuugcuggggacccugaugggagaagggacagccac

SEQ ID NO: 1206 - RNA, 94 nt, Human
guggcuagccauucaccagcaagucccuaaaaugaccugaaaccugaagaguguuucacccaugaaaggguuugcucucucugggcauggcuac

SEQ ID NO: 1207 - RNA, 82 nt, Human
guggcuaggaaagaacagcauaacuucagaguaaggguauagacuugggaugugaggcaguuaugcugaaagguucugucac

SEQ ID NO: 1208 - RNA, 77 nt, Human
guggcucgacucuugaccauggcugggguuccugaggaugagcuaaacccuuuccauguacuggggguugaggccac

SEQ ID NO: 1209 - RNA, 73 nt, Human
guggcucggccaucaugcccaggaucugagcccacaucuggcaccagcucuaccaagggccugguugggccac

SEQ ID NO: 1210 - RNA, 88 nt, Human
guggcucggcucagcugccuggguuguggccgcccuagcauccuguaugcccacagcuacuguaauccccgcugcugcuccgggccac

SEQ ID NO: 1211 - RNA, 66 nt, Human
guggcugugaaagaggaugcuuugguagcaagggggaucugucagacauuaauauucacauaccac

SEQ ID NO: 1212 - RNA, 87 nt, Human
guggcuuuuccagaaccagcauguucccuuuccucaguaaacgaggaauccauaaaacaaguuuuuguugguuacuaccagagucau

SEQ ID NO: 1213 - RNA, 61 nt, Human
gugggaaccccuuugccugaacgccuuacuaauggcaaguuuaaccccccgggguucccac

SEQ ID NO: 1214 - RNA, 70 nt, Human
gugggaacggguggcccggcugugugacuuuaaccccaagucuagcaagcaggccaaagaugucucccgc

SEQ ID NO: 1215 - RNA, 94 nt, Human
gugggacaaauauuaacaaagcaugauuuaaauauauauauauuuaaugugugauauguuuguauauauauuuaaacacaugcaauuguucuac

SEQ ID NO: 1216 - RNA, 83 nt, Human
gugggagcgccggucucuauauggcggcggcucugucgggccuggcuguccggcucucgcgcucggccgccgcccgcuccuau

SEQ ID NO: 1217 - RNA, 95 nt, Human
gugggagcuccaggggaggggaacagcacaggaagccucuaucagugccagucgggcacaggacacugccugccagucacccugagagguuccac

SEQ ID NO: 1218 - RNA, 62 nt, Human
gugggaggauuuugagauacuuauucuuuauuugagccagucuugcaagguuaacuucucac

SEQ ID NO: 1219 - RNA, 105 nt, Human
gugggauauuuucucuuuaaugcuuagauacuguuucuucccuaagauguguuucucaaccacaauugguggaaugaaccagagaggcaagaggaagugaauugc

SEQ ID NO: 1220 - RNA, 85 nt, Human
gugggcccacuguuccagcugcuuaaacgagggucugacuuauguguggaggcuggcaccccgucuggagggcaggaggucccac

SEQ ID NO: 1221 - RNA, 87 nt, Human
guggggugaagggucauuaagggcacgcaguagccauaaugccacacccuuugugccagccacugcgcuucuggaaaccuaccccac

SEQ ID NO: 1222 - RNA, 62 nt, Human
guggguagcaguuaaucacaugcugauagguaaucaauguggcagauacuguuagugcccac

SEQ ID NO: 1223 - RNA, 91 nt, Human
gugggucugacuugggggccauuuuagaaacugacucugaagaaguuuuuaauucucucauuguugcugaaugccccucgcagggagccac

SEQ ID NO: 1224 - RNA, 93 nt, Human
guggguggaacgugccucugcugcccacccaggggcccugaugugggaaccucacccauggguaaggcagcggggacccaggugugcacccac

SEQ ID NO: 1225 - RNA, 74 nt, Human
guggguggugcagggguggucuuaggagggcuuuccugaaggaguggccaggguucacccaucuuuccacccac

SEQ ID NO: 1226 - RNA, 80 nt, Human
gugguacuucaggaacucuuuuucaaacucacaucacaguacaucuggagauugucuaagaggcagccuccugacaccac

SEQ ID NO: 1227 - RNA, 90 nt, Human
gugguagaguacaaaguggaggaauuacugucuagaaagcaccauuuccagcacucagcacgagguggucuuucccuccacaccugccac

SEQ ID NO: 1228 - RNA, 61 nt, Human
gugguagucuccuaugguggcuggcacgggccucguggcagaagccugggagacugacugc

SEQ ID NO: 1229 - RNA, 67 nt, Human
guggucacgcccacaaucuucagcguggccucucccaggucacuguaggagaugcuguagugaccau

SEQ ID NO: 1230 - RNA, 89 nt, Human
guggucugccaccagcuguccucuucccugaaugccacuuaccguucuuugguggccagagagaaggucuucugggaccuggcggccac

SEQ ID NO: 1231 - RNA, 91 nt, Human
guggugcugaaacgaccggagauaccugacagaugagagccucagcagcuuggcagucucauguccccuuaccucacuugucucuagccgc

SEQ ID NO: 1232 - RNA, 69 nt, Human
guggugcuucgagcuggagggcagcaggugacccucaccacucaugcccccuuuggcuugggggcccau

SEQ ID NO: 1233 - RNA, 77 nt, Human
gugguggaugggccaucagaauauacacuugcuagauaauuuggcuaucugagugaaaugaguuauggaucuacuac

SEQ ID NO: 1234 - RNA, 61 nt, Human
gugguggcagaugccccugugugccuggggacgggauagcauaugggcaggugcaauccac

SEQ ID NO: 1235 - RNA, 75 nt, Human
gugguggcucagacuuauaaucccagcacuuugggaggccauggugggagaagcucaggagucugagaccagcau

SEQ ID NO: 1236 - RNA, 77 nt, Human
guguaaaauuauugcuuaugucauuucuuaagcaguuaugcucuuaaugcuuaaaagaaggcuagcauuguuugcac

SEQ ID NO: 1237 - RNA, 80 nt, Human
guguaaugugguucuagugucgcugcguguucauccucucgagcuugucugucacguaggucacacuagacucugggcac

SEQ ID NO: 1238 - RNA, 71 nt, Human
guguauauguguguguguguguguguguagcuugaagugguccauauguacacacacauauacauauauau

SEQ ID NO: 1239 - RNA, 73 nt, Human
gugucaagccagagauucggggcaguagauaaauguucauuuuacugaugcacuuuaguuuuuggucuguuac

SEQ ID NO: 1240 - RNA, 67 nt, Human
gugucccccaggcuggaaugcaguggcacgaucucggcucacugcaagcuccgccuccuggguucau

SEQ ID NO: 1241 - RNA, 64 nt, Human
gugucccugugucuccccagguaguaauaaggauguccuuuuccuccagguauacaguggguac

SEQ ID NO: 1242 - RNA, 80 nt, Human
guguccgacccaggcuaagcuugagcauggcugagcagugagcccacagccgagcagcuggccagauugcagcggagaac

SEQ ID NO: 1243 - RNA, 73 nt, Human
gugucguugcauguaacaagucuuuuuuacaauuuuauucuaugcuguaugaaauucaguuauaugaguauac

SEQ ID NO: 1244 - RNA, 80 nt, Human
gugucuagauccugccucaggagcuauguguccugaauuuaaaaaucagguauguuauaucccuggggcaugucagacau

SEQ ID NO: 1245 - RNA, 75 nt, Human
gugucugcuugugugcuggcguuucuuggagagauacgguggcugucacccucuucuccaggcacacacagacac

SEQ ID NO: 1246 - RNA, 102 nt, Human
gugucugggaggaguccccuacgccucccugguggccaccauccucugcuucuccgggguggccuuauucugcggcugugggcauguggcucucgcaggcac

SEQ ID NO: 1247 - RNA, 78 nt, Human
gugucuguguuuuaaacauuguuuauuugagacagggucucacucugucaccaggcuacagugcagaggcacagucac

SEQ ID NO: 1248 - RNA, 62 nt, Human
gugucuucggccgccggaaggggggugcguccggaucuucuucuuuuuguggcuguggacac

SEQ ID NO: 1249 - RNA, 117 nt, Human
gugucuuuauaguagaaugauuuauauuccuuuggguauauauccaggaaugguauugcugagucaaaugguauuucugguucuagauccuuggggaaucaccauacugucuuccac

SEQ ID NO: 1250 - RNA, 100 nt, Human
gugugacauggcuuauguguauaauccagcccuuuuggaggucaggauggaagaucgcuugaaccugggaguuugagguugcacugagucaugauggcau

SEQ ID NO: 1251 - RNA, 109 nt, Human
gugugaccuuggcccugugaggcuucaccucuugagccugagaagcagaggugacaguacuggcccugguucuuagcagggggguggcgggcaggguaggggguggcgc

SEQ ID NO: 1252 - RNA, 73 nt, Human
gugugaggaccgaaauuugcccuaugucuauaucccucuaagacggaccugggugcagccgcaguccaagcgc

SEQ ID NO: 1253 - RNA, 74 nt, Human
gugugcggcaguagaaauagcacaggccuuggggacacgcagggcuggguguuaacccugauacugccucaugc

SEQ ID NO: 1254 - RNA, 85 nt, Human
gugugcuacugggggaggcaugggaaagagcuccggugacagaagccaagguucaauucuccccuagauucuccagggagcacgc

SEQ ID NO: 1255 - RNA, 71 nt, Human
guguggcuucggcagggucagccuugcgggugcuuguggacguggguggcuauggcagccggagccucuac

SEQ ID NO: 1256 - RNA, 71 nt, Human
guguguagggauaaggcgugaccacagcuccuugggccuucgagaguagugauuacuaccuuccugcgugc

SEQ ID NO: 1257 - RNA, 89 nt, Human
guguguauguguacucuagacguugucccacgaugagaccccgaaccaugguuccaucaggaugcaucacgaucauuaggcaugcacau

SEQ ID NO: 1258 - RNA, 71 nt, Human
gugugucaucgauauccucauuuucuauggcaccuucagcuacgaguuuggggcagucuccucagacacac

SEQ ID NO: 1259 - RNA, 73 nt, Human
gugugugugcuaggagcuggagcgcuagcacucuucaggugacaauucucaacuccauuuccuccacaugcau

SEQ ID NO: 1260 - RNA, 76 nt, Human
guguucucuccuuuuguccccauagugugacuccgccaggaacuuggaauggcugaagacugugaaugagagucau

SEQ ID NO: 1261 - RNA, 60 nt, Human
guguuggaaaaucuacuacagggaacaaaagcaacacaucuuucucagugguuccaacac

SEQ ID NO: 1262 - RNA, 69 nt, Human
guguuuuagaagcauuugcgguggacaauggaaggcccggcuucaucguauuccuguuugcugauccac

SEQ ID NO: 1263 - RNA, 75 nt, Human
guguuuugcacuguaauaccucggucguagcaaagugccgugggaccgaaguauuauggugcagugacuugacgc

SEQ ID NO: 1264 - RNA, 87 nt, Human
guuaaagccuaggcuagcaauuuuuuuuaguugcaacuaaguaagauauacuacaaacuaaggaugcugcuagacuaaggaauaaac

SEQ ID NO: 1265 - RNA, 72 nt, Human
guuaaagcuuaccgggagaagauugagaaggagcuggagacaguuugcaaugauguccugucucugcuugac

SEQ ID NO: 1266 - RNA, 80 nt, Human
guuaagggugguguaggagaucaaauaaauuauccuuuaacauccagacuauaagauuuugacuucuaccuacccaaagc

SEQ ID NO: 1267 - RNA, 130 nt, Human
guuaauuauucaagggggugucucugccaagagaaagucaccuguggagaagaguucugugucuggacuuggagcacagccacggaugcugucaucugcuuccucuuggcacacacccuugauccaaggc

SEQ ID NO: 1268 - RNA, 64 nt, Human
auucagcggcaguggugcuuucccgaaucucagaaugccuguuaaaagaucacugaaguuggau

SEQ ID NO: 1269 - RNA, 62 nt, Human
auucaggugccucugccccacgcgguguccuggagaagcccgugggaugagaggcccuggau

SEQ ID NO: 1270 - RNA, 60 nt, Human
auucaucuguacuucaauaucuaguuuccauagcaacugagaugcaguuugcaggugggu

SEQ ID NO: 1271 - RNA, 86 nt, Human
auucauggcuagcaccuggaaaugcaguaucucguguauauagcaaaaagauccuggguaguucggaugauacuggaauccugaau

SEQ ID NO: 1272 - RNA, 81 nt, Human
auucauuugauccuucagaaaucacaaggaagaagaaguguuauaacuuauucuccaacaacuggaacuugucaaaugagu

SEQ ID NO: 1273 - RNA, 76 nt, Human
auucuaaacgagggcugguggugaguuugguguuugucucgugucacccucaccccucaccuccucaguuuaggau

SEQ ID NO: 1274 - RNA, 100 nt, Human
auugacauacauccgagaacauucugugguggauccaguggaaaagaaaauggaacuuuguucuaccaauaucacacucacaaauuuggugucaguuaau

SEQ ID NO: 1275 - RNA, 62 nt, Human
auugaugccacuaggagucaauauugguguauauauuaaugauaggcucuuggggcaucgau

SEQ ID NO: 1276 - RNA, 60 nt, Human
auugcauuccaucgcuggggggucgcgcguugugcgguuucuugggguggguagagcaau

SEQ ID NO: 1277 - RNA, 76 nt, Human
auuggaagcugugcaguauaaaauucaaguuguugcuggagcaaauuacuacauuaagguacgagcaggugauaau

SEQ ID NO: 1278 - RNA, 92 nt, Human
auugugggaagauuaucucgauccuauuaugaacaguuuugcagauguuggaaacugaaacuaagagauaucgauugacuuaacccaacaau

SEQ ID NO: 1279 - RNA, 73 nt, Human
auuuaaauuauuuuccuuucuggacuuccaaguccacuuggcaauuuuacuuaggaaaauaucaugcguaaau

SEQ ID NO: 1280 - RNA, 87 nt, Human
auuuacacuuucccauguuacagcacaauauuucaauggaauauuucuugccauaaauaauaucuugcugauuuguagaagugaaau

SEQ ID NO: 1281 - RNA, 84 nt, Human
auuuaggauucucugugugaugaccuuggaugcuguaaagugauucgucauagucucugggguacccauguaguuguagggagu

SEQ ID NO: 1282 - RNA, 71 nt, Human
auuuaucagucuguuuuuccgaugauguguacaugagagaguacaccaugugaagaguagagagaaugagu

SEQ ID NO: 1283 - RNA, 90 nt, Human
auuuauguagcaugccacuaaaagaggcagaaaauuuuuccuuuaacuuaaauuugaauuugucuugauguuuguuugcuuuuuguaggu

SEQ ID NO: 1284 - RNA, 73 nt, Human
auuucccccuccuuugggugaauuccucucuugauuagcucaggaacggaaugugauccaaucugggcaaaau

SEQ ID NO: 1285 - RNA, 73 nt, Human
auuucuaaauuagagagguuaacaagacagaugauuacuaugccucaugugcugugugcucuuugaaaggaau

SEQ ID NO: 1286 - RNA, 99 nt, Human
auuucuuccaucagccugucccuaggacuaaaaugccucauuaguguuauucuuaggaaggcaucuuccuagaucaggcugcaaggaaauggaggaagu

SEQ ID NO: 1287 - RNA, 77 nt, Human
caaaaacaguuagcuguuuacaugcuuccccuuuaaucccagaguuaguuuugcaaacggcaugauuccuguuuuug

SEQ ID NO: 1288 - RNA, 80 nt, Human
caaaagguuuauugaaaugcauguagauaaauuaucaucagcauaaaacuguuauggaguuuucaacauggggucuuuug

SEQ ID NO: 1289 - RNA, 67 nt, Human
caaaauuaacccggcauucccaguuuaauugcugcgugcacggcgggcgcugccgggucaaauuuug

SEQ ID NO: 1290 - RNA, 82 nt, Human
caaacuaguagacugaugagcuggauugcuuagauugauaacauuuacaaauaggaguccaguugacaugcuauuaauguug

SEQ ID NO: 1291 - RNA, 102 nt, Human
caaacugaucaccuggggaugagagcaauggguaacugaagcuuugggcucgggggacaggucagugcccacguuguuguauucccauuuugucucaguuug

SEQ ID NO: 1292 - RNA, 76 nt, Human
caaacuugcuguaggucugcuugaggaucugcccaguccggcggcugccgucuuccagccuccccaucagcguuug

SEQ ID NO: 1293 - RNA, 73 nt, Human
caaagcgaccagcuacauuuaccaaagccugggugauguggagugguacauagagaugaagcuggucgucaug

SEQ ID NO: 1294 - RNA, 63 nt, Human
caaauugggagcccugguuugggcauaaugggucaguuuguucaaccgccggguucccuuuug

SEQ ID NO: 1295 - RNA, 77 nt, Human
caacagaaauuuauuuucucacaguucugguacacuagaaauccagaccgaagugcaggaacauuccauuucugaug

SEQ ID NO: 1296 - RNA, 98 nt, Human
caacaggugcaaguguuaaaggguaugauccuucaguggaacaaagccuccgugucaccugagggauagcaacaugccuacaagcacugcaagaguug

SEQ ID NO: 1297 - RNA, 101 nt, Human
caacccaguaaguguccccagucaaugcuucucuccauaggagaccuguaaaugggcgguggggggaggaauuuucuggucucacacacuauuauggguug

SEQ ID NO: 1298 - RNA, 81 nt, Human
caacggucagacgagucgacacguggcagaaaucaucaucuccucguggaggugaugguugucaugugugggucaccguug

SEQ ID NO: 1299 - RNA, 82 nt, Human
caacucgacggcgcgcaacgugaccuggaagcugggcaggcgacuguacggacccagcucagugagcuucgcugaugacuug

SEQ ID NO: 1300 - RNA, 92 nt, Human
caacugccaccugggagacugcugguaaagaugggagguggccuuugccgcuuuccaucuucucacugcaguuucuucacgugggccacuug

SEQ ID NO: 1301 - RNA, 93 nt, Human
caagaaagccgaggcuggggcugggucagcaaccgaauuccaguuuagaggcggauuuggucguggacguggucagccaccucaguaaaauug

SEQ ID NO: 1302 - RNA, 114 nt, Human
caagaagaacagguucacagaaggagauaccaaaggggauagaaaaaugggaaaaauguccagaaagccauguuccuguuuccuugaguuaucaucugagugauauguuucuug

SEQ ID NO: 1303 - RNA, 65 nt, Human
caagaagguuaucuccucagccaacagagcugugguuggugugguggcuggagguggccgaauug

SEQ ID NO: 1304 - RNA, 65 nt, Human
caagaagguuaucuccucagccaucagagcugugguuggugugguggcuggagguggccgaauug

SEQ ID NO: 1305 - RNA, 63 nt, Human
caagagcugcccaagcggcugguaucugcuacaucaccagcacauuugccagcuguagccuug

SEQ ID NO: 1306 - RNA, 80 nt, Human
caagcggaggugacccugagaguguggcuggggaguaugggcggcacucccucuacaaaaugcuugguuacuucagccug

SEQ ID NO: 1307 - RNA, 77 nt, Human
caaggacaucggcuccaagucugacccacucugcauccuuuuacaggaugugggagggggcagcugggcugagcuug

SEQ ID NO: 1308 - RNA, 88 nt, Human
caaggguguaguauuucauaccgccugaaaugaucagcauuggcacaaaucaaaauucagccgccuuugaaaugcaaaaauaccuuug

SEQ ID NO: 1309 - RNA, 63 nt, Human
caaguaguucaauggcuagcuuuucucauuaucccaaugagaucaagugcuaggacuggauug

SEQ ID NO: 1310 - RNA, 92 nt, Human
caaguugugaccuucccaguccucucuccauuugcagaucagcaagcuucugucagcaaggagggguggacaaugaaacuggguucagcuug

SEQ ID NO: 1311 - RNA, 63 nt, Human
caauuauaaaaauagcgcgugucacucccgcggcgcgcacgaccgccgcgcuauuauauauug

SEQ ID NO: 1312 - RNA, 79 nt, Human
caauugguaacuugaguugugucuuggucaugggagaguauugcauucuugguugaauacauaguuaagauguuaauug

SEQ ID NO: 1313 - RNA, 111 nt, Human
caauuuuauauguucacuugacuggaucaugggguacugagauagaugggaaaacauuauuucugggugugucuguggggauguuuccggaagagauuagcauuugaauug

SEQ ID NO: 1314 - RNA, 79 nt, Human
cacaaaagaaauauuauuacaagguuucagagguagccaauugcauucuuuuggaaaucuacuguacuguuucaaugug

SEQ ID NO: 1315 - RNA, 64 nt, Human
cacaacacugccaugcaacaccuucagagucguuggagucaaguugcaggaucagcagguugug

SEQ ID NO: 1316 - RNA, 68 nt, Human
cacacggcuggguaccgggguccgggaauucuucgggaugucaaauccugguauccuuccccaaugug

SEQ ID NO: 1317 - RNA, 83 nt, Human
cacagaucuugucuugcuggucuuugaucagcugcuccagcuccgcgagcucagccuuuaagggcuccacggcacagucugug

SEQ ID NO: 1318 - RNA, 95 nt, Human
cacagcugcuaaaccaggugcugaaccgggugacagcugagaggaaccuguuugaucguguggucacccuacggcugccuggccuagagagcgug

SEQ ID NO: 1319 - RNA, 83 nt, Human
cacaggauguucccuuuguuggcaaaaacauggacggaacuucugaaacaugugagagaaaccauaaagaggaauacuaugug

SEQ ID NO: 1320 - RNA, 89 nt, Human
cacaggccagggagaaagaggagacagaggaagcaccgaggguggcuacguugucuucccuagaucaauuuucuucuggauggcucgug

SEQ ID NO: 1321 - RNA, 74 nt, Human
cacaggcgaguggagcccaaggaaccccucagcuugcgugcuggguacugguguucuccuggccucaauccgug

SEQ ID NO: 1322 - RNA, 90 nt, Human
cacauauucauacaaaugacuuaguaaucuaauaugagaagugguccuucacuuauauuaggaacuugguaaauauuuguugaaugaaug

SEQ ID NO: 1323 - RNA, 84 nt, Human
cacauccaucauggcuugugcuucuaacuaaaaucaaaggaaugaaagcagaaaaagcacugagaaaaugguaaaacgggugug

SEQ ID NO: 1324 - RNA, 74 nt, Human
cacaugugauugcauuaccuuauguguauuagagacugacuuaagcugcaacaaggugauaaaggugauaugug

SEQ ID NO: 1325 - RNA, 83 nt, Human
cacauuccuguuagcugaggucaccugacucugcuugucguuuuugcacaggcagacgugugcauucuggagagcagggagug

SEQ ID NO: 1326 - RNA, 97 nt, Human
caccaacacaguuuuugaugccaaacgucugauuggacgcagauuugaugaugcuguaguccagucugauaugaaacauuggcccuuuaugguggug

SEQ ID NO: 1327 - RNA, 62 nt, Human
caccacugggugcccgcuggcuacgcuugcaugggcgccaucuuugcuggcaccuuguggug

SEQ ID NO: 1328 - RNA, 60 nt, Human
caccagccuuccuguauagacacuaaauuguuagcaagaguguugagcuaguuccuggug

SEQ ID NO: 1329 - RNA, 68 nt, Human
caccaguaguuuuggucagggguuaauaauauuauuauuauuuuagccaccagggccaggugguggug

SEQ ID NO: 1330 - RNA, 76 nt, Human
caccaucucugaaguagcuuugcaaucuggaagggguacagugucccuucccucaaaggcugcugagcggguggug

SEQ ID NO: 1331 - RNA, 84 nt, Human
caccccguucauguaacacgggccugaggucagcaguagaggaccaguauugguuuuggccccagccucugcguggauggauug

SEQ ID NO: 1332 - RNA, 72 nt, Human
cacccucaccaagguuaaaugccucccucucgguucauccugagaaagaugaguuaauccuuuuuggaggug

SEQ ID NO: 1333 - RNA, 65 nt, Human
caccgcggcccaggacguguggaugcugcuggggggccgccuccucaccggccuggccugcggug

SEQ ID NO: 1334 - RNA, 79 nt, Human
caccuccuaauucacagagggaggaaaguucaaaaugcaggaacuuucacuucccacugugagccuccaagggagugug

SEQ ID NO: 1335 - RNA, 74 nt, Human
cacgcagggcccaugagaggacacccaguacauccugacccaaugacaucggcgugucuaaccuggacugcgug

SEQ ID NO: 1336 - RNA, 85 nt, Human
cacgccaugaccuucacugcugucucagagaaggaugaucaggauggugcuuucacaaaauggagaguggagaauucauggggug

SEQ ID NO: 1337 - RNA, 71 nt, Human
cacgccuuugguuacuugggguggaacaaguuaacaaaccaguuuuuuugugacaugguuucaaaggccug

SEQ ID NO: 1338 - RNA, 102 nt, Human
cacgcgucuuuguggucaccuggcuuaggaagcucacaagguccucaucauuuggagguguuucccugugagugcccucagcccuaggcuuucuuacgugug

SEQ ID NO: 1339 - RNA, 76 nt, Human
cacggaccaccgcgggguccccggcaagccuggaagaguugugacucuuguugaagauccugcgguaugggaugug

SEQ ID NO: 1340 - RNA, 101 nt, Human
cacguuaauccugguggcuucucuaggugucguugugugcgguccucuuguuuggcugugcgugugaacacgugugugaguucaccauguacuguacugug

SEQ ID NO: 1341 - RNA, 108 nt, Human
cacguugccuaacgucagauauguacagaaaaauaagaguuguacuaaacgacuauauugcucuuguugauccuuucuugaacuguauuugcgugucuuaggagcgug

SEQ ID NO: 1342 - RNA, 72 nt, Human
cacucccgcggcucacucugcccucgucacggugccacuggcucccuggcacagacauugcggcgggaugug

SEQ ID NO: 1343 - RNA, 84 nt, Human
cacucuguaauaaagaacuuggaaagggagguuccaagauggccaaauaugaacagcuccagucuacagcccccagcgugagug

SEQ ID NO: 1344 - RNA, 74 nt, Human
cacucuguuacccaggcuggagugcagugguguaaucucagcucacugcaaccucuaccuccuggguucaagug

SEQ ID NO: 1345 - RNA, 84 nt, Human
cacugaguguagacaaguccuccagcacagccuauauggagcucacuaggcugacaucugaggacucugcugucuauuucugug

SEQ ID NO: 1346 - RNA, 95 nt, Human
cacuggugagguggauugaugaugaaucuucugacacaccuggagcaacuccagaacacagucacgaggauaaugggaauuuaccgaaacccgug

SEQ ID NO: 1347 - RNA, 61 nt, Human
cacugugcugucagauguccaccucuauaccccgaaccauagacaucucaugguacggcug

SEQ ID NO: 1348 - RNA, 94 nt, Human
cacugugggggcggugagaacgcuguggacacugaggacgcugugggggcggugagggcgcuguggacgcggugaggacgcugugggggcggug

SEQ ID NO: 1349 - RNA, 75 nt, Human
cacuguuuccuccugcuauuagcccggguaacucagcugauccguggcuuugguaguuccuggaaaucaucagug

SEQ ID NO: 1350 - RNA, 80 nt, Human
cacuucucugagugaagcugaggagaaggcuguaaaucugccaaaacagccuugaaguauucuuuugucaugaggaagug

SEQ ID NO: 1351 - RNA, 82 nt, Human
cagaaaagaggguuugaugauaaggauggcuauaccuuggggagaacuuaguggaguugaagaucagccagaucccucucug

SEQ ID NO: 1352 - RNA, 91 nt, Human
cagaaacagauccaccuccagguacgugguggacgaaugggagcagcuggcugcuggccccacgcuuaccaaccuugaguccacauuuuug

SEQ ID NO: 1353 - RNA, 67 nt, Human
cagaaaggacaucacagguaaacugaaggacccugcgaacuuucaguauccugccgagucuguucug

SEQ ID NO: 1354 - RNA, 83 nt, Human
cagaacuggagaaugaacugaacacaaagugaaagaaaaugaggagaacacuuuguauuuaccccaaaaucuuuucaguugug

SEQ ID NO: 1355 - RNA, 69 nt, Human
cagaagacugcugguuuugagauaaugccaaacgagcauggccucgucugauccuacguucuacuucug

SEQ ID NO: 1356 - RNA, 80 nt, Human
cagaagauucagacacacuugcaauguauugcuggggauucuccagcauuggcaugauggagaggguggagaaucauuug

SEQ ID NO: 1357 - RNA, 95 nt, Human
cagaagucauuuguggaaacgggcauugugagaaggcguuaccauuaguuacaaauguuacugcuagaacggagugaacggcacaggugaaaaug

SEQ ID NO: 1358 - RNA, 81 nt, Human
cagaccccagacacccauuguccauagccuucucagggcagagugggcugguuguguugacaauaaaacaguguugguuug

SEQ ID NO: 1359 - RNA, 80 nt, Human
cagacuacaaagugacagucaccugguaaguccuguaugguaggaaguggguguggcucucggguccuaaauguggucug

SEQ ID NO: 1360 - RNA, 70 nt, Human
cagagacuguccuuugcaaaggaaaugaccagcauuucaacuguaugucuuccuggaaggguagauucug

SEQ ID NO: 1361 - RNA, 71 nt, Human
cagagaucagaauacgaagcuuccucucagcaucaugggaggagauaaaauaauucauucuauggucuuug

SEQ ID NO: 1362 - RNA, 82 nt, Human
cagagcucagagcagcuccugcauguuaucuaccagcgggucgauaaggcaguggguuuggcugaagcugcucugggucuug

SEQ ID NO: 1363 - RNA, 72 nt, Human
cagaggaggcgacuguugauuugaaauuccuaaaaaugacguaguagucccggauccuuaguuggcuuccug

SEQ ID NO: 1364 - RNA, 130 nt, Human
cagaggagucuggauuuuaaguccuugugcacggauggucucaagugaucaggauaguguggucgguacacccaaagcuugugaaugacuccauccaaagagcaucagucuguauucccaugacccccag

SEQ ID NO: 1365 - RNA, 71 nt, Human
cagaggucugucuauccugcccuggucuccuccaccccaggagaguuuucaaagguagagaggacccuuug

SEQ ID NO: 1366 - RNA, 130 nt, Human
cagaguggcacauccuacugacacuguccuauggagaguuacagugcaggaaaccugaacccagcucucaggucccucuggaacuuuggcucuucuuuguuuugucucagugagugauuugggcccucug

SEQ ID NO: 1367 - RNA, 112 nt, Human
cagaucaguagugacaugagauuuucauaggagcagaaacccuauugugaacuccaaacacaagggaucuagguuaugcacuacuuaugagaaucuaaugccugaugaucug

SEQ ID NO: 1368 - RNA, 75 nt, Human
cagaugaccaagcgagacgugccuggcuucgccaucgggggccugagcgggggugagagcaaagucgcaguucug

SEQ ID NO: 1369 - RNA, 76 nt, Human
cagaugcccccagucccuguguguucugcaagacuugcucuugaggaggaagaugcaccucacuaaggcucaucug

SEQ ID NO: 1370 - RNA, 63 nt, Human
cagaugggcucuuugggcuuugggagcuggcuucaccuggcuacucccgagucuggcccucug

SEQ ID NO: 1371 - RNA, 108 nt, Human
cagauugcacgaacauuucauuuuucacacagggucaccagaauaccaucaauuuuuugguaucacugucaaaagugauccuagcaccuucugaaauaacgugagcug

SEQ ID NO: 1372 - RNA, 80 nt, Human
cagcaaguggucaagucaccaaugauguacauauguugcuaaaucaaacagauuucccaucuuacuugaccucucagcug

SEQ ID NO: 1373 - RNA, 82 nt, Human
cagcaccucggcccagguauggccagacgaggggcuggccugcauggcuggauggccccccgugcccugggccacugugcug

SEQ ID NO: 1374 - RNA, 77 nt, Human
cagcaugaucaagaaugacaccucuggcgaguacaagaagacucugcugaagcugucugggggagaugaugaugcug

SEQ ID NO: 1375 - RNA, 112 nt, Human
cagccaggccaggacccgggcuugccaagagcagaggcccucccagcaaccaggauaccaccacuuugggggcuuuguguacagagguccgggucugagaccucauaggcug

SEQ ID NO: 1376 - RNA, 100 nt, Human
cagccccacucccuguucccuacccauauaggcccuaaauuugggaaaaaucacuauuaauuucugaauccuuugccuguggguaggaagagaauggcug

SEQ ID NO: 1377 - RNA, 112 nt, Human
cagccccgcagguuuuuggcgaugaugacguccgucacagcaucaaagacaaacuggauguuguugguguccguggcgcaggugacguggguguagaucucuuugugggcug

SEQ ID NO: 1378 - RNA, 76 nt, Human
cagccuaacuuccuagugugcaucaggcaagaugagcaggcaccaucauguaaagagcaccuugggguguaggcug

SEQ ID NO: 1379 - RNA, 78 nt, Human
cagccucuccccuucuggggucucgggaaacacgcgguaauuaccgaagaaccccgcacucugugagaggcgaggcug

SEQ ID NO: 1380 - RNA, 62 nt, Human
cagccugcaaguggaagagaagaacuugaacccagguccaacuuuugcgccacagcaggcug

SEQ ID NO: 1381 - RNA, 77 nt, Human
cagccuguuggucccgcuugcagggguguccuuccccagggccgguggggcuuucuugauggcggggcagguggcug

SEQ ID NO: 1382 - RNA, 78 nt, Human
cagcgagcgcggucguccuugguggaaggaaccaugaacuggcaucucccccucuuccucuuggccucugugacgcug

SEQ ID NO: 1383 - RNA, 77 nt, Human
cagcgcugcccagauagcagcacgguaugagcaacucaacauccaucuucguaucguuccgccugggcgggauucug

SEQ ID NO: 1384 - RNA, 67 nt, Human
cagcugggcccgggggaccacuaccaccaaaaugcggggaccgguaguggccccaaaugucuggcug

SEQ ID NO: 1385 - RNA, 64 nt, Human
cagcuguggacuuaccggcaaggcuacgaugucagcauuccugucuauaguccacugucagcug

SEQ ID NO: 1386 - RNA, 130 nt, Human
cagcuguuaucaccugcuaguugugugagccugagcaaguuacucuaccaaucuguggcucaguguccucaucuauagaauggggagaguaacaauagccaccucauagggcagcggugaagauucagug

SEQ ID NO: 1387 - RNA, 85 nt, Human
cagcuuccauguccagaggaagccaggcgucuccuguaggaaaugucuuucuuguaggcucacucaccauugcacagggaagcug

SEQ ID NO: 1388 - RNA, 73 nt, Human
cagcuucuccuuccgggacagcuccaccuguuccucguccaugguggugucgaugggccggaaguaggacaug

SEQ ID NO: 1389 - RNA, 105 nt, Human
caggaaaaagaggugcuggagagagucgagaaagagaaaauggaacgugagaaagacaacggcauccguccucccagucucgagacugccaguccucuguaccug

SEQ ID NO: 1390 - RNA, 75 nt, Human
caggaaaagcacuuguguuauuauuagaguugcaugcugaacuagcugcuuuuuuauggaauacuauuuuaccug

SEQ ID NO: 1391 - RNA, 80 nt, Human
caggaccauagaugauacaugucagugcuguggaaugugcauucucugaguguuguuuugugguaucauugucuuuccug

SEQ ID NO: 1392 - RNA, 71 nt, Human
caggagcuaguccagcaggucuugaguuuggcaacucagcuaaagaaguagaccugucugagcugccacug

SEQ ID NO: 1393 - RNA, 85 nt, Human
caggaggccaugagccaaggaaugcaagcagccucuggaaguugaaaacgacccaagugcucaguccuacagcugcauggaacug

SEQ ID NO: 1394 - RNA, 72 nt, Human
caggaggcugaaaugggaggaucacuugagccugggaggucgaggcugcaaugaguccuaauugagccacug

SEQ ID NO: 1395 - RNA, 96 nt, Human
caggaguacgacgcugugguagcuaugaucaugccacugcacuccagccugggugacagagcaagaucuagauaauuacacucuguccugcuccug

SEQ ID NO: 1396 - RNA, 60 nt, Human
caggauaauaauauggggucuuguccuucaccuuuuaaguucaggcaacaguuuguccug

SEQ ID NO: 1397 - RNA, 74 nt, Human
caggaugucucugugagagaagggagcaguucgguggcaccuugcccaggcucaguccuggcacaguuauccug

SEQ ID NO: 1398 - RNA, 76 nt, Human
caggcaaggaagaugcugccaauaacuaugcccgagggcacuacaccauuggcaaggagaucauugaccuugugug

SEQ ID NO: 1399 - RNA, 62 nt, Human
caggccuucuucucuuaaucacaagauccuuucaggcauuuacucuugagggaacaggucug

SEQ ID NO: 1400 - RNA, 68 nt, Human
caggcucgugggacuguacguggacccgcaaggccggagggcacgcgcgcaggagcucauguggccug

SEQ ID NO: 1401 - RNA, 94 nt, Human
caggcuggucuugaauuccugagcucaaaugauccaccugccucggccucccaaaguucugggauuacagguaugagccagcauguccggccug

SEQ ID NO: 1402 - RNA, 67 nt, Human
cagggacagaaggcagcucccuucccccaggaagggcaagaggagacaggugccugggcugucccug

SEQ ID NO: 1403 - RNA, 78 nt, Human
cagggacaggccagcugauauuggccauuggcacaggaucuugucugucugggaaagauaucggugagacuguuucug

SEQ ID NO: 1404 - RNA, 90 nt, Human
cagggagaagagcugugugcugugaugugguuuauaaauuaccauuuggaaggagcugcacagcacagcagccugcaacuacucuuccug

SEQ ID NO: 1405 - RNA, 91 nt, Human
cagggagaggaaaggaggggcaaagaggugagggacaggggggacaauggcuuucccucuguccccugccagcucccccagcugcacccug

SEQ ID NO: 1406 - RNA, 81 nt, Human
cagggcagaagcaugaaaggacaccaaccacgagugacacacuauacuauggcuguccugugucacaugcuauuuggccug

SEQ ID NO: 1407 - RNA, 61 nt, Human
cagggccuggaguccugggggagcucagccagcucugccuuucucagggccuggaguccug

SEQ ID NO: 1408 - RNA, 78 nt, Human
caggguacauugaagaccuuaagaaguuucuaaaaccauauacuuuagaagaacagaagaaccucacagucuguccug

SEQ ID NO: 1409 - RNA, 60 nt, Human
caggguguugccauguugcccaggcugguuucgaacucuuggcaucaagcaauccuccug

SEQ ID NO: 1410 - RNA, 72 nt, Human
caggugauugagcaggaaaccccagugagugcaaaauccucucgcucgcagcuggacuuguuugacgaugug

SEQ ID NO: 1411 - RNA, 75 nt, Human
caggugcacucuauucaagugcaaggauaucagaaguuuuugcaucaacaaauuuucgagauggaguucacucug

SEQ ID NO: 1412 - RNA, 81 nt, Human
caggugcugcugagcgagcccgaggaggcggcggcucuguaucggggccuuagucgccagucccgcgcugagcgccgccug

SEQ ID NO: 1413 - RNA, 77 nt, Human
cagguggcgguggcgcggcggcagggccuggcucuggccagggcgaugggcuuguagggccggcggcagcacgcuug

SEQ ID NO: 1414 - RNA, 101 nt, Human
caggugggucuccuguucccagugcuacccugcauaacggccuccuucccaggcucuggggcagagcacgacggguaggcuggaacgggcugccgcagcug

SEQ ID NO: 1415 - RNA, 89 nt, Human
cagguguggacuaccaugccuggcuaauuuuuguauuuuugguagaaacaggguuuuaccauguuggccaggcuggucuugaacuucug

SEQ ID NO: 1416 - RNA, 65 nt, Human
cagguguuccgggccccuucaccuggggcucaagugagagcagguguucugggccccuucaccug

SEQ ID NO: 1417 - RNA, 75 nt, Human
cagguuccacaaguuccauuaccuggccuuugugcccucagcagaggaccucuaugacugcaggguggagcacug

SEQ ID NO: 1418 - RNA, 104 nt, Human
cagguucuucugagagucuugacagagucuucuucccacgcugcucaugugaccucacuuccagugcacaccuggaaacucugcaugggucucagugggcccug

SEQ ID NO: 1419 - RNA, 63 nt, Human
caguacagcuucuggcucuaugagcucugugaugucuacuuggagugccugaaaccuguacug

SEQ ID NO: 1420 - RNA, 85 nt, Human
caguacggaugugcgggcaggcgucauagauagggaugccuggguggccuggucauggcugauccugcuuguguaugacagacug

SEQ ID NO: 1421 - RNA, 99 nt, Human
caguauauuugagugaaugauuauauguuuaaaaaguuacaugggggcuuuuuugguuguccuaaacuuacaaaacauuccacucauucuguuguacug

SEQ ID NO: 1422 - RNA, 110 nt, Human
caguaucaugauguauaugagggcuaacccauugugguuuacuuaaaaauuaguuuaaguggaguuagaaguggguuauuuuccucuggugaaaauuauggacauagcug

SEQ ID NO: 1423 - RNA, 80 nt, Human
cagucacuacuuauuugcauuauuccugcauauucagugaaugugaggucauauuugguauuguauuagaaguaguguug

SEQ ID NO: 1424 - RNA, 67 nt, Human
caguccaaaccggaagggcagaauuuauuuuugggaaacugaaggaagucccgaccuuccuggauug

SEQ ID NO: 1425 - RNA, 108 nt, Human
caguccagaguucaagaccagccugggcaacauggugaaaccccaucuauacaaaaacucggcaaggcaugguggcaugcaccuguugucccagcuacucaggggcug

SEQ ID NO: 1426 - RNA, 78 nt, Human
cagucguacaggguacagaauaauucuucguuguguggcacuaacccacacacugcaggacaucguucucccuggcug

SEQ ID NO: 1427 - RNA, 101 nt, Human
cagucuugguuacaaguaugauccuucuguagucuuuuaggggagguuggcuccucugaagucuuacuuggaagacagauucauaaagugccacugggcug

SEQ ID NO: 1428 - RNA, 63 nt, Human
cagugaagcaggauguauguggccuugaggauaaccugcacuggucuaccuucugcuucccug

SEQ ID NO: 1429 - RNA, 80 nt, Human
cagugaugucagcauucauacugccaacagucugcuggucauacauggaagacuguuaaaguguggucugugcaucauug

SEQ ID NO: 1430 - RNA, 76 nt, Human
caguucauggaggggauacaagacggaauauuugguagacaauaaaguucacgcaagaagacccuuugguauacug

SEQ ID NO: 1431 - RNA, 87 nt, Human
caguucucgcuguuuuaaaauccgucccuucguuguuggcuaggcucucuccagggaaacuagccggggcaagaggcaggggaacug

SEQ ID NO: 1432 - RNA, 81 nt, Human
caguucugauggggcuccaacagccaggcugugguccuuugacguuccucaccuguugccaaccuaucccguagugaacug

SEQ ID NO: 1433 - RNA, 82 nt, Human
caguucuucugggagaaaaauggcaggcuucuggggaaagaaagccagcugaauuuugacuccaucuccccagaagaugcug

SEQ ID NO: 1434 - RNA, 72 nt, Human
caguugauuauggcaagaaguccaagcuggaguucuccauuuaacccagcaccccagguuuguccacagcug

SEQ ID NO: 1435 - RNA, 78 nt, Human
caguuggucuuggcacucaaccagcuucgccuccgugaucuucaggaugucagggagcugcugcaggucaaccagcug

SEQ ID NO: 1436 - RNA, 73 nt, Human
caguuucuagagucuguugccaacauguuugcagcugcucagcagcucucgcagaacaucaguucagaaacug

SEQ ID NO: 1437 - RNA, 94 nt, Human
cauaaaaaucccuguguccuaaagucauggcgugcucuauuucauggucauuuguagagcacagcagcacugugccugucagggaaaaggugug

SEQ ID NO: 1438 - RNA, 102 nt, Human
cauaaggagcuuugacaaggacccacugucuggccccaucuucagagauuccaauaggucuggggugugcacaggcacuggcgucuuuaaaaucucccugug

SEQ ID NO: 1439 - RNA, 76 nt, Human
cauacacuauacaagguuuguugaauacuaguuucuuuggaaccauagggaaagcuuugcucugggucaguguaug

SEQ ID NO: 1440 - RNA, 87 nt, Human
cauauaaaaguauuacacaauucuguucagcacaugauucuugauaauaaaugacuauguuauaggguuauguauacuuuuagauug

SEQ ID NO: 1441 - RNA, 85 nt, Human
cauauagucugcacaauucaauaugaacguuuuauuuccaacaaguauguaguucacuguuccaugacuugugcauaacaauaug

SEQ ID NO: 1442 - RNA, 66 nt, Human
cauauaugucugguauucuuggggucuaguagucuaguauaauacacauagccuaggacauguaug

SEQ ID NO: 1443 - RNA, 130 nt, Human
caucaaagaauaaauaagcugcucuaauugccaagaauucacaugugguuguaugcagcauuacugggaaauugaaguguaucugcaugugauucugcugugauggacacuuguaaguuuguuccuggag

SEQ ID NO: 1444 - RNA, 130 nt, Human
cauccaggcagguguuucgacaauggcagcaucuacaacccugaagugcuuggauaucacagaggagaacucugcauucucgcuuccuggagggguguucgcaauguugccaguguucugucugcagaug

SEQ ID NO: 1445 - RNA, 75 nt, Human
cauccauggauuuugguauagaggagggguuuaagggguguccugcaaucagucccccucucauaccaaaggaug

SEQ ID NO: 1446 - RNA, 80 nt, Human
cauccccaaggagaacuucaguugcuugacucguuggaucacaacgagcuaaagcucaaauugcucuuaaacuuggugug

SEQ ID NO: 1447 - RNA, 72 nt, Human
caucccuaacacaaauccagggacuuuguuucuuaaccuuaaaauuggaaacacuucuugcuaccagggaug

SEQ ID NO: 1448 - RNA, 121 nt, Human
caucccuuuuuccuauauugaagacauucagccugagcacugaaguucaucuugcaaucaaugccacucaaauuucuagugcuuuucaucucugaacucuuuaacuguggaaauagacaug

SEQ ID NO: 1449 - RNA, 73 nt, Human
cauccuccugcagugccuccaagaccacagcccucacaggcuccugguccugcugugcaucgcccaguggaug

SEQ ID NO: 1450 - RNA, 62 nt, Human
caucgucaccaaggcacgggggaagagugacucacucuucaacuuugauguucaugacgaug

SEQ ID NO: 1451 - RNA, 61 nt, Human
caucgucaugaacaucaaaguugaagagugguccaucuucccccgugccuuggugacgaug

SEQ ID NO: 1452 - RNA, 97 nt, Human
caucuauuuaagcugaagacaacaucaugggaguuagggagauuucggagugcgauugagcuggacacccccucuaugacugcagagcaaguagcug

SEQ ID NO: 1453 - RNA, 65 nt, Human
caucucacuaagugcugaucaguuuugauucaguuggaguagagcacauagguucuuuggagaug

SEQ ID NO: 1454 - RNA, 77 nt, Human
caugaaagaagccugguuacugauuuguauaaaauguacucuuaaaguauaaaguauaagguaagguaaauuucaug

SEQ ID NO: 1455 - RNA, 63 nt, Human
caugaaucacgacuguggacgacaaugugccugugguggucaauguuccauucccgauucaug

SEQ ID NO: 1456 - RNA, 73 nt, Human
caugauccaugucuucacugcuacagucuggcucaaaauaaaugccuucuuuauagaacaggaaggacucaug

SEQ ID NO: 1457 - RNA, 65 nt, Human
caugcaagcauauuuuucagcaaguacagaaucugugcaacucugcagaaauggcuaagugcaug

SEQ ID NO: 1458 - RNA, 96 nt, Human
caugccaagcacgguucagcucccugcggccaagucgaaauguggucuucagcaucaucgagcauuucuggagggagcugcugcugucucagccug

SEQ ID NO: 1459 - RNA, 85 nt, Human
cauggcuuacuggguaaagcucagcuguacuugacagucaacccggcuccucgggacauggccugucaggugcagccccaccaug

SEQ ID NO: 1460 - RNA, 87 nt, Human
cauggcuuauguguauaauccagcccuuuuggaggucaggauggaagaucgcuugaaccugggaguuugagguugcacugagucaug

SEQ ID NO: 1461 - RNA, 70 nt, Human
caugggaaacaaccugaaaaagcaggcaggccucccggucagggagccucugcugugcuggcuucccaug

SEQ ID NO: 1462 - RNA, 62 nt, Human
caugugaugauaauggucuucucgccaucccaagauggguuggcagccaugaucuuugcaug

SEQ ID NO: 1463 - RNA, 78 nt, Human
caugugucaugggaggaauguagugggaaguaauugaaucaugggggcaguuaccccaaugcuauucucgugauagug

SEQ ID NO: 1464 - RNA, 96 nt, Human
caugugugcauguguacaugcaugcauguguguaugugugcauauggggaugugugugcguguguuggagugugugugugugcgcguguguguaug

SEQ ID NO: 1465 - RNA, 71 nt, Human
cauguugaaugcacaaaagcaacagguccaguuuaugcuaaaggaauuugaagcacgcaggcaacagcaug

SEQ ID NO: 1466 - RNA, 131 nt, Human
cauuaaaacucaccaucaaauagauguaaucuuauuaauuacacauuuuguauuuuaauuauuucaaggagugaagaaaacaggguguuuuuguuuuuguaguucugauuacucauuuaugcauuguuuug

SEQ ID NO: 1467 - RNA, 86 nt, Human
cauuagauucucauaagagcccaaacccuauugugagcugcacaugcaagggaucuagguugugcgcuccuuaugagaaucuaaug

SEQ ID NO: 1468 - RNA, 80 nt, Human
cauuauguagaauggaaugugaaacaucauccucgcuuaaaacaggauuuugccacaauuauuucacauauuauguagug

SEQ ID NO: 1469 - RNA, 70 nt, Human
cauucugagucuuucuggaugaacuuggcuauaucugaaaucugcuaucugagugaggacuccaagaaug

SEQ ID NO: 1470 - RNA, 77 nt, Human
cauucuggauuuggucgauugcuucuuuuuaguaucuuuaacuuauuagaucucaaacucagcugcacaucagaaug

SEQ ID NO: 1471 - RNA, 71 nt, Human
cauugacaagacaggguucccacugacaagaccacaauuuaccagguugcugcucaaacgaacccccaaug

SEQ ID NO: 1472 - RNA, 77 nt, Human
cauugacucagcacaccagguaugucacagcuugugcuuuugcaccuaauacccuuuuacuugcuacugggucaaug

SEQ ID NO: 1473 - RNA, 83 nt, Human
cauuggagaaaacaggaggagauguuaaaguaacccaucuugcaggacgacauugaagauuggucuucuguugaucuaagaug

SEQ ID NO: 1474 - RNA, 75 nt, Human
cauuguccccacugcauugccaucuugaagauuugucacacucugacaggagaaggcuuguuuggcaugacaaug

SEQ ID NO: 1475 - RNA, 63 nt, Human
cauuuccaacaggacauggagggaaggcuuccuaagggaagacuuccugucccaaaggaagug

SEQ ID NO: 1476 - RNA, 72 nt, Human
cauuucuggcccccugcaugccacccagaaugcaugcggcgcccaggaugcaugcuguggggccauugaaug

SEQ ID NO: 1477 - RNA, 103 nt, Human
cauuuuauuccuaggguugcuuuugcuuuaguuuguaaaacguucuuauuuuuaugauaauguaguauauacuaaauaaagaaaaaucaggaaguagaaaaug

SEQ ID NO: 1478 - RNA, 77 nt, Human
cauuuugacuuuguuggcauaaugucaguaacauacauauuccagugguuuuauggacaggcaauuuagucauuaug

SEQ ID NO: 1479 - RNA, 72 nt, Human
ccaaaaauccaucucaucaccuagagagcauguacuggcagaacugucuaaagugacuauuuggaacucugg

SEQ ID NO: 1480 - RNA, 77 nt, Human
ccaaacaccaauggcucucaguucuuccugacaugugacaagacagacuggcuggauggcaagcaugugguguuugg

SEQ ID NO: 1481 - RNA, 65 nt, Human
ccaaacugaauaaauagcaucccucuccccacgagagcuaggggagacucaugugcugaguuugg

SEQ ID NO: 1482 - RNA, 85 nt, Human
ccaaagcaaccaguaauucuuuuugaaagugcaggcauuuauuuugagcuguauuucauaggaguuucauuugguuugguuuugg

SEQ ID NO: 1483 - RNA, 72 nt, Human
ccaaauaaauuaaaaauguuuuaaagcccugaguucauagacugguuuuaggagauuuuuaugacacacggg

SEQ ID NO: 1484 - RNA, 60 nt, Human
ccaaauccagcaguucugucagcaaaggggagcucuuuuuaucaauaacuggugcugugg

SEQ ID NO: 1485 - RNA, 72 nt, Human
ccaacaggaugccacgcugggccgagcgacuauuuccugccaauguugcucacucgguguacguccuggagg

SEQ ID NO: 1486 - RNA, 78 nt, Human
ccaaccacauggcacaucgggcuauuugaacacggugacugucucucccagauggaucccucugugcuucuuggacgg

SEQ ID NO: 1487 - RNA, 83 nt, Human
ccaacgucuguucauggcugugguuuuaaaagagucccucaacagaugcucuauuuaauaaccaguuuguaccucagaugugg

SEQ ID NO: 1488 - RNA, 103 nt, Human
ccaagaagcuugagagaagaaaaauuucagaaaaauugucucaauuugacuagaauaucaaugaaccaggaaaacugaagcaccuucccuaaagaaaacuugg

SEQ ID NO: 1489 - RNA, 90 nt, Human
ccaagaccaacaggaugccacgcugggccgagcgacuauuuccugccaauguugcucacucgguguacguccuggaggacucuauugugg

SEQ ID NO: 1490 - RNA, 65 nt, Human
ccaagcacauuacaggggaccugauugcuacacguucagaaugcguuugcugucauccugcuugg

SEQ ID NO: 1491 - RNA, 91 nt, Human
ccaaggcgccuuuguuggggguccgggaauccgcggugugccaggucggaaaaggcguccgcuuuccuggagaggaggcuaaggugccggg

SEQ ID NO: 1492 - RNA, 72 nt, Human
ccaaguucauugagguaucuaaagaggcccggaagcgguuccugggcccccugcaccccuccuucaaccugg

SEQ ID NO: 1493 - RNA, 77 nt, Human
ccaaguuuaauuuauaggcuuucguggacuucuggaagucaacugacuucgaaguuaggacagcauggggggauugg

SEQ ID NO: 1494 - RNA, 74 nt, Human
ccaaugggagguuuguguacagucagugaaauugaagaacauuuaugucauuaauggacuuacauagcuauugg

SEQ ID NO: 1495 - RNA, 98 nt, Human
ccaauuccugaauucaguaagcaaguuacaauucaaaaaggaagaagaguaaaaaccuuuuauugacagugacuuugccacugaauucaagggaaugg

SEQ ID NO: 1496 - RNA, 78 nt, Human
ccacacacacuuuugccaguucccccuggugaaccauaauacacacgugggagacagcuggcaucaucugagucuugg

SEQ ID NO: 1497 - RNA, 94 nt, Human
ccacagugggggugcccgggcugggucccacuggggaagcucaaggcagcccuggccuuucccucauucuccacccagucaggccccugcgugg

SEQ ID NO: 1498 - RNA, 98 nt, Human
ccaccauggugcggccgguggccgagagcggggccaccaagaccagccgcgucuacggcuucaucggccucugcuggcugcuggccgcgcugcugggg

SEQ ID NO: 1499 - RNA, 74 nt, Human
ccaccggccuggccuugccugcagacuauaaacuauaaccauagcucgacacagucugcaguccaggcgugugg

SEQ ID NO: 1500 - RNA, 62 nt, Human
ccacgagagaacauggguugacccgaaucaccggugauucuuggaggacccauccuuugugg

SEQ ID NO: 1501 - RNA, 85 nt, Human
ccacggcggggccaagcuggccugaaaggcaccugggaagacucacuggaaggaaaggcacgcgggccgguagggcugagccggg

SEQ ID NO: 1502 - RNA, 84 nt, Human
ccacucaugaacccucacauccgcgugggccccuccugagcccccuugcuuguggcuaggcagccuaggauguggguucugugg

SEQ ID NO: 1503 - RNA, 84 nt, Human
ccacuugauguucagugaagagaaccagaaaaagucuguagagcaguaccaucugggucucaucaaaaaggagaaauaacgugg

SEQ ID NO: 1504 - RNA, 77 nt, Human
ccagaacaaccugcagcagacuccacuccacuuggcugugaucaccaaccagccagaaauugcugaggcacuucugg

SEQ ID NO: 1505 - RNA, 82 nt, Human
ccagaagacuguggauggcccuccgggaaacuguggcgugauggccgcggggcucuccagaacaucaucccugcucuacugg

SEQ ID NO: 1506 - RNA, 61 nt, Human
ccagacccauucagccccuuccgcugucuggggugggguuaaggggcacaaugggaaaugg

SEQ ID NO: 1507 - RNA, 119 nt, Human
ccagacuuccccaucuccacgccucucugaccacuuuugcagcagaaccacuauuuucuagguuagcaguucucaacugugggugaguuugccccuuggagacauuuguugaugucugg

SEQ ID NO: 1508 - RNA, 95 nt, Human
ccagagauagcaccuucugacccagugcagauuggacgguuaauugguagguuggaguugagucucacguugaaacagaaugaagugcuuccugg

SEQ ID NO: 1509 - RNA, 66 nt, Human
ccagaggaagagcgcuucgagcuucuucaaggaacuuagagaagagcggcauugugcuccuucugg

SEQ ID NO: 1510 - RNA, 106 nt, Human
ccagaggcugugaccauggcuaguagacaguggcaacauagucauccccaagaugcuaaucuucugcuggaacugucauacguuaucauggucaauguaaaccugg

SEQ ID NO: 1511 - RNA, 85 nt, Human
ccagaugaagaagaucuagaacgacuucucuuucuguuccucucaggagaagaugaugaacuugaauaagaucuuuuucgugggg

SEQ ID NO: 1512 - RNA, 60 nt, Human
ccagauugccucguuaaauccuuaaccuuggugaaaugguuugggaaaaugcaggucugg

SEQ ID NO: 1513 - RNA, 103 nt, Human
ccagccaccaagaugcaugaggggcagggucaccaucucagaaggggaagcacaggaaugugauugggaugguuaaaccucucuucuccucccuuugugcugg

SEQ ID NO: 1514 - RNA, 93 nt, Human
ccagccugacguaggugggcagcaccagcugcagggugggcuggcucucguugcucagcucgaugacugccugcuucaccggcgucaggaugg

SEQ ID NO: 1515 - RNA, 71 nt, Human
ccagccuggugaugcagcaggugucacagaaggacccugucccagcugguccugcuccacugcuaggaugg

SEQ ID NO: 1516 - RNA, 84 nt, Human
ccagcgcccaaggaaggccacuucucaacuggcagaacuucugaaguuuagaauuggaauuacuuccuuacuagugucuuuugg

SEQ ID NO: 1517 - RNA, 76 nt, Human
ccagcugugugugaggaggaccugaugcccgaggaugaccagcgggccacgcgcaaccucuucauugguaaccugg

SEQ ID NO: 1518 - RNA, 75 nt, Human
ccaggaacugaugguggagucacacaggcuacuacuucacugaaagggccugcacccacaagacucagagccugg

SEQ ID NO: 1519 - RNA, 83 nt, Human
ccaggacccucaucuuccagggcugaguguggguggaucccaggauggggcccaggcagcccaggaugggaggagacaccugg

SEQ ID NO: 1520 - RNA, 79 nt, Human
ccaggaggggaaacaggcacgcucauuucggcaacacacaacgcgcaagggauagagcgggcuuauaaacccucugugg

SEQ ID NO: 1521 - RNA, 100 nt, Human
ccaggcggagacuucaccagggagauggcacaggaggaaagagcaucuacggugagcgcuuccccgaugagaacuucaaacugaagcacuacgggccugg

SEQ ID NO: 1522 - RNA, 80 nt, Human
ccaggcucuucuggacaaguacaaugcugagaagccuaagaaugcgauucacaccuuugugcaguccggaucucacuugg

SEQ ID NO: 1523 - RNA, 73 nt, Human
ccaggcuuucugguuuuuggccguguagagcuaccacggugcuauaacgccggugaagcuucaggggguuugg

SEQ ID NO: 1524 - RNA, 81 nt, Human
ccaggguuagaugacugcgggaagccuuugaucccaacccccaaggcuuuguauauuugaucauuugugaucuaacccugg

SEQ ID NO: 1525 - RNA, 74 nt, Human
ccaggucuaucuguccaauacuuugugucuaggguagaggucccuaacccuggcugcacauuggaagcaccugg

SEQ ID NO: 1526 - RNA, 75 nt, Human
ccaggugaggaagugaucccaaaagaugaaaauggaaaaauacuauuugacacaguggaucucugugccacgugg

SEQ ID NO: 1527 - RNA, 93 nt, Human
ccaguauauuucugcagucugguauguuuuucccccuaagaaccucagcugagaaauaaagcagguuaacaaagcuguaugaaaugucacugg

SEQ ID NO: 1528 - RNA, 75 nt, Human
ccagucagggucuucacgaagaucugcaucccaccucuaagacggaggaccaggugcaggguggacucuuucugg

SEQ ID NO: 1529 - RNA, 97 nt, Human
ccagucuaugugacaguuucauuucccuuuaauguggaaaucuguaggaucaacauagaccucacagcugggggaggucagaacgucacuggccugg

SEQ ID NO: 1530 - RNA, 84 nt, Human
ccagugcaccccagcuccggggcagaagaggcagccugcagaucucugcugccgggaaagagcuccugaaguuguggggucugg

SEQ ID NO: 1531 - RNA, 81 nt, Human
ccagugccaggcagaggugggaugcaggggguuccugaaagggggugccugggaggcuugcccaugggaugcuuggacugg

SEQ ID NO: 1532 - RNA, 74 nt, Human
ccaguuauuguguaaauguccccacuaugguggauuucagguuaccacuaugauaucacagaaugcagaauugg

SEQ ID NO: 1533 - RNA, 75 nt, Human
ccaguucuccuuuaguguucaggcucaaaugaaaggccacuuucagcaaguuuuccugacauugucggagacugg

SEQ ID NO: 1534 - RNA, 93 nt, Human
ccaguugcacacuggcauuuucuugcugcaagcuuuuuuaaauuucugaacucaaggcaguggcagaagaugucagucaccucugauaacugg

SEQ ID NO: 1535 - RNA, 70 nt, Human
ccauccugucuuccucccagggucugguuggcggcuuuuuacucucaauaaaggauggauggauggaugg

SEQ ID NO: 1536 - RNA, 71 nt, Human
ccaucuauagacuuauuuugcucaaugguuucugaaugccaaacugcucacaaaaauaagucuucugaagg

SEQ ID NO: 1537 - RNA, 92 nt, Human
ccaucucucagauuacuucauugcucaccggccggcucugaaagaaaaguaucccaaaucggcgcaccuugggcgaauuguuugacaaaugg

SEQ ID NO: 1538 - RNA, 101 nt, Human
ccaucugccaauuccucaggaggacagaacaaaccagugaggcaugaagauuagauuauguaacgcucgaggauugcuguuuucaaagaggaaacaaaugg

SEQ ID NO: 1539 - RNA, 107 nt, Human
ccaucuggcagaacacugggcaaaagagguucugauucuggccuguuacuugcuguacaaacuugcacaaggccagagaggacucucuuuucccaucugcaaagugg

SEQ ID NO: 1540 - RNA, 100 nt, Human
ccaucuucaguggcauugggccuuggcugggaugcugaguuauccacuggagcaucggcaguacaggcaggcacagaggcaguggauccaucggaggugg

SEQ ID NO: 1541 - RNA, 76 nt, Human
ccaucuuucacugggaauugcgaaggggauaugccauuaugaaaacaggucccucccucauuccaaggagagaugg

SEQ ID NO: 1542 - RNA, 62 nt, Human
ccaugcucggcuaauuuuuaaaauauuuguagagauggggucuugcuauguugccgggcugg

SEQ ID NO: 1543 - RNA, 78 nt, Human
ccaugggccucaccguguccgcgcucuuuucgcggaucuucgggaagaagcagaugcggauucucaugguuggcuugg

SEQ ID NO: 1544 - RNA, 95 nt, Human
ccaugggccugggcaggccaaccaggagaugcugcgaugaugacacugaguugccaagcagaccucccuggacgcaguggcccaggccgucgugg

SEQ ID NO: 1545 - RNA, 80 nt, Human
ccauuaagucaguuucgaucuucaaacugugccuuguuuuuuaaaagauaagaugcuagaaauucaaugggauuuggugg

SEQ ID NO: 1546 - RNA, 81 nt, Human
ccauugaaaaauuugagaaggaggcugcugagaugggaaagggcuccuuucaaguauugccugggucuuggauuaaacugg

SEQ ID NO: 1547 - RNA, 62 nt, Human
ccauugcucagugacaguaucuuaaagcuuguccagagcuugaaggaccacacagguagugg

SEQ ID NO: 1548 - RNA, 70 nt, Human
ccauuuaaugaccagcagucacugagcgcugugaaaauucacucagugauaccccguguggucuugaagg

SEQ ID NO: 1549 - RNA, 118 nt, Human
ccauuuuuuuguaggucagaagugguugcaaacuggauuuuuagacucuuccuguugggggucucggacauuugcucuuuuccacagcggccaauucuucagagccacaaagaacugg

SEQ ID NO: 1550 - RNA, 86 nt, Human
cccaaagcucacaguuuggcacugaaucauauacaaucucguaguuuggauggcugugugugacugcagacugcuagacagcaggg

SEQ ID NO: 1551 - RNA, 67 nt, Human
cccaauacaucauagagggcagucagcucaauuagggcuaaauggcaaacuuucuucauguccuggg

SEQ ID NO: 1552 - RNA, 98 nt, Human
cccaauccagacccagugacaauguuacagggacaucaaggcguucaacccaaggugguugaggcgccugcuuuuccuuggccucugggaguauuggg

SEQ ID NO: 1553 - RNA, 91 nt, Human
cccaauuaacaucgaggucucagcaaacaauuaccacauuuaacauauauggaguuaaaguagauuggauuugcugaaaaucggugcuggg

SEQ ID NO: 1554 - RNA, 82 nt, Human
cccacagacgaauaccuggagggcaugaugagcgaggccccggggcccaucaacuucaccauguuccucaccauguuugggg

SEQ ID NO: 1555 - RNA, 66 nt, Human
cccacagcggagucugugucuuuuagcuacagaggagguuccuuguugcuaaagaugaccuguggg

SEQ ID NO: 1556 - RNA, 63 nt, Human
cccacagggcugggggcuuccccugggagaaaguccuucccuccccauggcccagcccugggg

SEQ ID NO: 1557 - RNA, 89 nt, Human
cccacuccacggggaugucguugggauaaaagccuuugaccaggcagguaaggcugaccugguuuuuggucaacucaucccgggauggg

SEQ ID NO: 1558 - RNA, 72 nt, Human
cccacugauggagccagcagcauugagaaaauuguagagauugaugcucacauagguugugccaugaguggg

SEQ ID NO: 1559 - RNA, 73 nt, Human
cccacugauggagcccagcagcauugagaaaauuguagagauugaugcucacauagguugugccaugaguggg

SEQ ID NO: 1560 - RNA, 77 nt, Human
cccagaaacuuucaggagaggcaagcagauucacugacccccacguguaucuuuauguguaaugaagguuuuauggg

SEQ ID NO: 1561 - RNA, 100 nt, Human
cccagaacaaagaccucuagccaacauguaagcaccuagaccaugguuucccauccuuaucauuguuaacauuuuggcuagauaguucuuuguugugugg

SEQ ID NO: 1562 - RNA, 80 nt, Human
cccagagaaagcucugccugcaauauuuuucaggucaugucacacaaagaaaaauaacaaugcuugcacagcccacuggg

SEQ ID NO: 1563 - RNA, 77 nt, Human
cccagaggaugucagucccaaggaccaguagcugccaucaguuuggauucugaaaacuaacuggcaucaacacuggg

SEQ ID NO: 1564 - RNA, 102 nt, Human
cccagcaugauucauaccuguaaucuuacccauucuugauuuagaugagauuuggauuucgaguugaugcuagaauggguuaauacuuuugaggauguuggg

SEQ ID NO: 1565 - RNA, 75 nt, Human
cccagcccugaccguucugcauaugaacaugggccuugguuuccccaucuguaugaagaagggaguagggcuggg

SEQ ID NO: 1566 - RNA, 66 nt, Human
cccagccgagauguccagauguugcuuuagaccugaagggcagcucgggagguccaguaggcuggg

SEQ ID NO: 1567 - RNA, 81 nt, Human
cccagccuggacccccgaggaggcggccuccuuuucaaaagugggagggggcagggccugaaguguugggggcagccuggg

SEQ ID NO: 1568 - RNA, 85 nt, Human
cccagggacuagucuaccaagguuauuuggcagcuaauucuagauuuggaucauugcccagaguugcacuugcuggucucuuggg

SEQ ID NO: 1569 - RNA, 74 nt, Human
cccaguacccaccuggccguggggguccuccccacaucuaugggccgaggagcacccccuccaggcaugauggg

SEQ ID NO: 1570 - RNA, 82 nt, Human
cccaucucaaacguccuugcuacucugugauuguagaauaucugaucaaccuucugggagcgagaaaguaguugugaauggg

SEQ ID NO: 1571 - RNA, 65 nt, Human
cccaucuccagcccgggcuucaaacugcugcugagggggggcugggagccaggaauggggcuggg

SEQ ID NO: 1572 - RNA, 68 nt, Human
cccaucucugugacuuccuggagacucacuuccuagaugaggacgugaaggcuaucacagaagauggg

SEQ ID NO: 1573 - RNA, 65 nt, Human
cccaucucugugacuuccuggagacucacuucuagaugaggaagugaagcuuaucagaagauggg

SEQ ID NO: 1574 - RNA, 69 nt, Human
cccaucucuugugacuuccuggagacucacuuccuagaugaggaagugaaguuuaucaagaacgauggg

SEQ ID NO: 1575 - RNA, 127 nt, Human
cccaucuguacaguccagccacugacauaagccccacucgguuaccacccccuugacccccuaccuuugaagaggcuucgugcaggacuuugaugcuugggguguuccguguugacucccagguggg

SEQ ID NO: 1576 - RNA, 64 nt, Human
cccaucuuucucuuauuugaugucucugaucagcuccucuuucagcacaaacuggagaaagggg

SEQ ID NO: 1577 - RNA, 75 nt, Human
ccccaaugugcucaaguucauuggugugcuguacaaggauaagaagcugaaccuccugacagaguacauugaggg

SEQ ID NO: 1578 - RNA, 63 nt, Human
ccccacagacgauucccuguccccugccucaugcuccggcaggguacaggcucgcaccugggg

SEQ ID NO: 1579 - RNA, 84 nt, Human
ccccaccccaguggagcucaccuuccaguaggucuaaacugguuugauugaguuccauggaaaacaacaaagugggguaagggg

SEQ ID NO: 1580 - RNA, 65 nt, Human
ccccacgcucaguccuggucaaaggcugccagaccuuucugagugcccccagggaggggcugggg

SEQ ID NO: 1581 - RNA, 68 nt, Human
ccccagcaucugauguuuugagaagugcauggaguuuccuaaacuuugcacagaagaauauccugggg

SEQ ID NO: 1582 - RNA, 77 nt, Human
ccccagccagaaucgacgugagugugaugaccgccccggucgugaagacauaccagcucaacagguucaauuugggg

SEQ ID NO: 1583 - RNA, 68 nt, Human
ccccaggcaugggcugcgagcagcugguggcagaggaggcggcugagcuguggccauccaugcugggg

SEQ ID NO: 1584 - RNA, 105 nt, Human
ccccaucgccuccaguugcuauggcaacaggccauucugggccagccacgucucugcauggcagugcccaaugguggaguugcuaggggcgacggagcuguuugg

SEQ ID NO: 1585 - RNA, 87 nt, Human
ccccauuuucuugggagaaauucaaguuugcugcagaaauucgcauaaguaaugaggagugaaauguuaaucaccaagacaaugggg

SEQ ID NO: 1586 - RNA, 72 nt, Human
cccccaaaagaguucuuacacgaggugacacaggccucucaguuccucaaaauagccuccuggaagaagggg

SEQ ID NO: 1587 - RNA, 76 nt, Human
cccccaagcugggcccgcgacucgaaggugacugggauggugaucucguuggacugcguggcuagcuugggcaugg

SEQ ID NO: 1588 - RNA, 79 nt, Human
cccccacgccgaggcuuuggagugaacagcccgcuuggcuguggcaucucaguccuauuuuugaguuuuuuuguggggg

SEQ ID NO: 1589 - RNA, 61 nt, Human
ccccccaggucgcaggugucugaggccagucaaccugcagagcacucgcggcguggguggg

SEQ ID NO: 1590 - RNA, 81 nt, Human
ccccccuugaguaucaggccauuaggacccgaggagggacaguauagccuugaguaucaggccauuagaacccgagggggg

SEQ ID NO: 1591 - RNA, 67 nt, Human
cccccucagauguuccugcagugcugaaauucauccuacagaaguaaccgcaaaacucuagaggggg

SEQ ID NO: 1592 - RNA, 63 nt, Human
cccccuucaguaaauuguccugacauccucccccacuuggagagccagucuacuagaaggggg

SEQ ID NO: 1593 - RNA, 90 nt, Human
ccccgagugagcaauuucugucccuuuuaagggcucacaacucuaagggggugugcgugagagggucgugaucgauugagcaagcagggg

SEQ ID NO: 1594 - RNA, 89 nt, Human
ccccggagccccaaggagccccucaucaguggcuggcucuucuuccgcuacauggcaaucgggggcuaugugggugcagccaccguggg

SEQ ID NO: 1595 - RNA, 63 nt, Human
ccccggcagcgguuggcgaguggggaccgaacccccgguucuccaugaucccgcuggccgggg

SEQ ID NO: 1596 - RNA, 111 nt, Human
ccccggcuggaucaggaggcgaccauauggcuuuucuuguuucacgugaagaaucuguugcgcugagagcaccaggagcagguagaagacccgggcagccauccugcgggg

SEQ ID NO: 1597 - RNA, 78 nt, Human
ccccgucguaaacgcugaggaaugauguggccaagaaugccugauguucuuuaaacaaauuccauggaguuuaagggg

SEQ ID NO: 1598 - RNA, 69 nt, Human
ccccguggaauuuuaugaggaguuaugccuaacaacuguugggcaaccucagggggauauuuauggugg

SEQ ID NO: 1599 - RNA, 71 nt, Human
ccccucauuaggaugcaucacuggccucgugcaccggcuucaccagcacugcacccuaaucaaaacagggg

SEQ ID NO: 1600 - RNA, 95 nt, Human
ccccuccacucugcuguggccuauggcuuuucauuccuaugugauugcugucccaaacucauguagggcuaaaagccaugggcuacagugagggg

SEQ ID NO: 1601 - RNA, 61 nt, Human
ccccuccagcccccaugugcucugagccagucccaacacuggcugaguuggcugcgagggg

SEQ ID NO: 1602 - RNA, 76 nt, Human
ccccucuccagcauagugagaucaagaaggaggcuucacauuuuaucuucagcuccaucaccauccuggagaaggg

SEQ ID NO: 1603 - RNA, 88 nt, Human
ccccugccugaccaagccaugucugaacaggaggcucaagccccagggggccgggggcugcccccggacaugcuggcagagcaggugg

SEQ ID NO: 1604 - RNA, 78 nt, Human
ccccugcuguauccugcaucauuagaaaaaucaaagccauuggugggaucauucugacagccagucacaacccagggg

SEQ ID NO: 1605 - RNA, 93 nt, Human
ccccuggagguccaaggggagcggcaaggcagggcaggcgguccccaggaaccugcccagugcacaggcccagcuacucaggagcugaagggg

SEQ ID NO: 1606 - RNA, 76 nt, Human
ccccuuccaggaagggccugguguugcagcugauccagucuuaccagcggaugccaggcaaugccauggugagggg

SEQ ID NO: 1607 - RNA, 61 nt, Human
ccccuuuuuggacacuuauacaaggugugggaaacccacugguaccagugcaagaaugggg

SEQ ID NO: 1608 - RNA, 80 nt, Human
cccgacaggccucccggcucucccgcccucccucccgagacacgagccgaacugggcgucaggucggggagccggucggg

SEQ ID NO: 1609 - RNA, 115 nt, Human
cccgaccacuagcagccucuuucagucacuggaaaaugcuuacaggcaguagccaccaucauguggcacaaagugggcaucauccuagugucuaacauuuaagcugugguucugg

SEQ ID NO: 1610 - RNA, 60 nt, Human
cccgacccgcgcccgggccugcgggcgacucgagcgggcccugcuggcugcggcugaggg

SEQ ID NO: 1611 - RNA, 73 nt, Human
cccgaggguugccaguuccaccuccucuuguacaggaucuugguacaggggcugguaggaguacgcaguuggg

SEQ ID NO: 1612 - RNA, 80 nt, Human
cccgauccggcagcucauuuaaauagagcucaucacaacaacaguguugguggugaagugaguagcugcaggacccuggg

SEQ ID NO: 1613 - RNA, 72 nt, Human
cccggaccagugaagcuggagccaggguguaaggcaaggaggugcugaguggcuccaaaagagcuggccagg

SEQ ID NO: 1614 - RNA, 68 nt, Human
cccggacccgcagggcugccugguuccuggaagucuucccagucuucccagccagcccgggcccuggg

SEQ ID NO: 1615 - RNA, 70 nt, Human
cccggagacccgccccggcccgguccacauucuccccaggaagccggacucuauggggcgggacccuggg

SEQ ID NO: 1616 - RNA, 61 nt, Human
cccggauccucagucgugcgggagucugggaggccuggcuuccucaggggugagguuuggg

SEQ ID NO: 1617 - RNA, 102 nt, Human
cccggcagggugggaggcagcaggggucagccugggcaggaaccucucccaacucuguccagguguucagaccucuuggcccaaccugcucaccccaccggg

SEQ ID NO: 1618 - RNA, 83 nt, Human
cccggccucaccccaccuugcccccaagaggucccacagagcuucggaccuccuugagacaaggcagggugcugaggggcggg

SEQ ID NO: 1619 - RNA, 69 nt, Human
cccggggacugagaguuaaggagaguuggaggcuuuacuagggccacaggguuccuacucgccccuggg

SEQ ID NO: 1620 - RNA, 68 nt, Human
cccggggacugagaguuaaggagaguuggaggcuuuacugggccacaggguuccuacucgccccuggg

SEQ ID NO: 1621 - RNA, 74 nt, Human
cccgguauugccaggcggcugagaauguuacgcucugacaucuguaaccucacagcaacugggggaauaucggg

SEQ ID NO: 1622 - RNA, 75 nt, Human
cccucaaguuuacugaguugguggaaaugugggcguucuagagaacugcccuaauauagacuacagcuaagaggg

SEQ ID NO: 1623 - RNA, 69 nt, Human
cccucaccuuauugggcaaaacugcaucaaucuccuuuugcaguuucugcuggacaucagggugagugg

SEQ ID NO: 1624 - RNA, 90 nt, Human
cccuccaguuugucaagaguugaaggaggcucuguggccaggugaccuggcugcuuccacuccuuguaccucagucuaaacauggagugg

SEQ ID NO: 1625 - RNA, 98 nt, Human
cccucucccggccagggagacggagcccauccacagugucagcuauggccauguggccgccugccagcuaaugggcccccacacccuggccuugaggg

SEQ ID NO: 1626 - RNA, 98 nt, Human
cccugccauccagacagucccccugcccccagggcaaccaguucuccuaugcucuaugagguugucuaugaggcaggggcccuggagaggaugcaggg

SEQ ID NO: 1627 - RNA, 72 nt, Human
cccugccugcuagcuggggaccgcuccuuggcagaugucaucauccaugagaucucccacaguugguuuggg

SEQ ID NO: 1628 - RNA, 67 nt, Human
cccuggaggagaucuaucucuucucccugcccauuaaggaaucagagaucauugauuucuuccuggg

SEQ ID NO: 1629 - RNA, 73 nt, Human
cccuggaguuuacuuccugccaggugaccuccugggggagggagccuucaagcgagccuggccagaagcgggg

SEQ ID NO: 1630 - RNA, 60 nt, Human
cccugggguuggggccucaccccucuggagggccggaggcaggagguggaaaccccaggg

SEQ ID NO: 1631 - RNA, 63 nt, Human
cccuguaucaaccuauuuaacacuucagcaggaccuggugcauguggauugauacuagcaggg

SEQ ID NO: 1632 - RNA, 72 nt, Human
cccugucuacugauagucaguuugcugugucagaaagcacuucugaaagcagauaugagucaccagacaggg

SEQ ID NO: 1633 - RNA, 110 nt, Human
cccugugccugucucuccaggguucuaccacuuggggggauugggccgguccguggugcauuggauggugucccaaccgggugguggaccuugucaucgacgucacaggg

SEQ ID NO: 1634 - RNA, 90 nt, Human
cccuguucucaguaaagaucgcaacuuucauguuuuccuggauaugaucaggaucuaaguguuaggcggaaaauacuagagauguuuggg

SEQ ID NO: 1635 - RNA, 86 nt, Human
cccuugauuugggagaggcagcagagucauguccagggcaucagaccagugacaucuuugccuuuaugccucuagucaucugaggg

SEQ ID NO: 1636 - RNA, 86 nt, Human
cccuuuacaagccagcuacuuugcaggaaaaguggggggcacuguguuuccauccaaccuugcagggcaacuggggugcaaacggg

SEQ ID NO: 1637 - RNA, 104 nt, Human
ccgacaagaaagccgaggcuggggcugggucagcaaccgaauuccaguuuagaggcggauuuggucguggacguggucagccaccucaguaaaauuggacgagg

SEQ ID NO: 1638 - RNA, 66 nt, Human
ccgaccuggcccagccuggcccguccccaauccagugggcuggccaggccaccugcaccagggagg

SEQ ID NO: 1639 - RNA, 94 nt, Human
ccgaggaccuccugaccccgcgguggcagcugggaccgcgcuacgcggcuaagcaguucgcgcguuacggcgccgccuccggggugguccccgg

SEQ ID NO: 1640 - RNA, 121 nt, Human
ccgaugaacccagggccguucccuucauacccuuucauuaguagcucuaagauguuugauuaagguguacguuuacagaggaguugguuggugaugagcauugaacauuuggguucuucgg

SEQ ID NO: 1641 - RNA, 85 nt, Human
ccgcaaagugggucucauugcugccggcggaccuggaccgucuccgggcaccaagacugugccggacacagagacuagugugagg

SEQ ID NO: 1642 - RNA, 94 nt, Human
ccgcacuuccagggccuaugcaggaugugcagguggcguucgcgcuccgccgaggugcgaaacuugccuuugcaguaggggcaacggaaggcgg

SEQ ID NO: 1643 - RNA, 63 nt, Human
ccgcagggccugccugguuccuggaagucuucccagucuucccagccagcccgggcccugggg

SEQ ID NO: 1644 - RNA, 82 nt, Human
ccgccgccgccgccgcccccugcagccacucucccgccucuaccgccgcgggagcugcaucguccacuccggucggcggugg

SEQ ID NO: 1645 - RNA, 96 nt, Human
ccgcggguggaggucgauggcagcaucauggaagggggcggccagauccugagagucucuacggccuugagcugucuccuaggccuccccuugcgg

SEQ ID NO: 1646 - RNA, 68 nt, Human
ccgcgugcaguaccaguucgagauggagagcuucgacuccauccccggccuggugcgcugcuacgugg

SEQ ID NO: 1647 - RNA, 98 nt, Human
ccgcguguggcuuccgcggagguuucggcaguggcauccggggccggggucgcuggccguggacgguggccuggggccgaggccugcggagcucgcgg

SEQ ID NO: 1648 - RNA, 86 nt, Human
ccgcucaacucuucaucuucucgccccacuccaaacgagagagcgacggaccggagaggcgagacagcggcgagagaagggagcgg

SEQ ID NO: 1649 - RNA, 65 nt, Human
ccgcucaccuauagccaauauaagcagucaccauccaggugcugcuggacaggcucguguagcgg

SEQ ID NO: 1650 - RNA, 104 nt, Human
ccgcugcggaccagugccccgcgcugugcgagugcuccgaggcagcgcgcacagucaagugcguuacccggauugaccaggugcccagggccugccgcuagugg

SEQ ID NO: 1651 - RNA, 78 nt, Human
ccgcuguccaacaaccaggaggugagugccuuuggggaagacggcgagggcgaccgaccuggaccuauggacagugcg

SEQ ID NO: 1652 - RNA, 98 nt, Human
ccgcuucaauuuccacucuucuuuccuuugccuccccuuucagauaaacaagcuggaggcacgccugaggcaggcaggguguacagauguuagagggg

SEQ ID NO: 1653 - RNA, 72 nt, Human
ccgcuucacuggcaccauggaugccuucgugaagaucgugaggcacgagggcaccaggacccucuggagcgg

SEQ ID NO: 1654 - RNA, 71 nt, Human
ccgcuucugacugccuagggcgagugggcauccugucaucaucuccacugucccaagcagucacuaggugg

SEQ ID NO: 1655 - RNA, 113 nt, Human
ccgcuuugauuggcuccgaauccucuuggguccacauacggccaucacuccugccuggagcgaaugcgauuccaaugagaucuauacugucggacacacgcuuucaaagacgg

SEQ ID NO: 1656 - RNA, 78 nt, Human
ccggaacauuggggggcaaacauaagggcaagguuauaggcugacaucuuguucuugucuugguucuuugcugucugg

SEQ ID NO: 1657 - RNA, 79 nt, Human
ccggaaccugcucaucuggaucaagaagaauuugcuaaaagagcggccagaguuguucauccaggaagacagcgugcgg

SEQ ID NO: 1658 - RNA, 78 nt, Human
ccggaaccugcucaucuggaucaagaagaauuugcuaaaagagcggccagaguuguucauccaggagacagcgugcgg

SEQ ID NO: 1659 - RNA, 79 nt, Human
ccggaaccugcucaucuggaucaagaagaauuugcuaaaagagcggccagaguuguucauccagggagacagcgugcgg

SEQ ID NO: 1660 - RNA, 60 nt, Human
ccggcccggggaggacaagucgcugccaccuuuggcugccgacgugauucccugggacgg

SEQ ID NO: 1661 - RNA, 77 nt, Human
ccggccgggugcaguguuuuggccuggagcagggcggccuguucguggaggccacgccgcagcaggauaucggccgg

SEQ ID NO: 1662 - RNA, 93 nt, Human
ccggccuugccagacggaagcuccuuguccccgacugcagcacaggcccuggcugugggacauaagcaaagauuuggugcuggaugaggaagg

SEQ ID NO: 1663 - RNA, 76 nt, Human
ccggggcggccucgcgggugacuccgggcuccguggcugucccggaccccaccucuucccugccgaccgccaccgg

SEQ ID NO: 1664 - RNA, 76 nt, Human
ccgggguuccaccccuuucuccggcccucagccucccccguacuguggcacugccggccccuggcccuagucccgg

SEQ ID NO: 1665 - RNA, 71 nt, Human
ccggguagagggauugagccaagaggugagggugcacgucuucccuccuggucccagcuccccaagccugg

SEQ ID NO: 1666 - RNA, 92 nt, Human
ccgguaaauuuuggaaaaaucgcggaaaauuuuugguaaacagucaauuuuuuacccaaagcccgaaucggaaaauccuuuuaauuaaccgg

SEQ ID NO: 1667 - RNA, 67 nt, Human
ccgguguaaauguugagccuuuuuggccuggcuuguuugcaaaggcccuggccaacgucaacauugg

SEQ ID NO: 1668 - RNA, 86 nt, Human
ccgucagcccuuggcagggggucuuggaagccagagguuuuugcucagggcagggaaagggcugcaggauccccgggggcugccgg

SEQ ID NO: 1669 - RNA, 80 nt, Human
ccguccgcgcggacuccguuucccguggugccccgggcggcccgcuuccggcgcaguuaguuacgagucggcgcacgcgg

SEQ ID NO: 1670 - RNA, 78 nt, Human
ccgugaccgccaccgccacuucccagguagcccagcagccuccagccgcugccgccccuggggaacaggccgucgcgg

SEQ ID NO: 1671 - RNA, 86 nt, Human
ccguggcuuauggaguuaaggaaggucacgugagcaaacagaaguguuccuucugcuuuuuaccuucuuucuuucuauagcccugg

SEQ ID NO: 1672 - RNA, 76 nt, Human
ccgugguuccucaccugcauuaaccagccccaguuccgggcugucuugggggaagugcaacuguggagaaagaugg

SEQ ID NO: 1673 - RNA, 80 nt, Human
ccguuggacccagagagccugaguuggagaugaacuuuggccaacuuuccucaucaccauacuuaaaauccuguccaagg

SEQ ID NO: 1674 - RNA, 67 nt, Human
ccuaagucugaagucucaucagacgaacgacauccaguucagccuggugacaagaaucggacugagg

SEQ ID NO: 1675 - RNA, 82 nt, Human
ccuacagacccucagguacugcccugugacuucucuguaugacaucacaaggcugccaagugccuguuuuucuagaacuagg

SEQ ID NO: 1676 - RNA, 63 nt, Human
ccuacccuccuuuuuuucccuaucacugaagcuuuuuagugcauuaguggggaggaggguggg

SEQ ID NO: 1677 - RNA, 94 nt, Human
ccuacuguugagguauaguauuguagcuuaauauuaauuauaauauaaaauaucuagaaaaaauaagucaagauacuguuuuucuggggguagg

SEQ ID NO: 1678 - RNA, 112 nt, Human
ccuagaugggaucugcugcaggcaagauauucccggccucagaagcugaggggagaaccuucuguucuuccccaccuucggcuugcauuccuccuucagcaucuucuuaagg

SEQ ID NO: 1679 - RNA, 77 nt, Human
ccuaucaguagauccuuccacuggguucgcaauuuugaucugcgccccagacaucugacggaucucauugauuuugg

SEQ ID NO: 1680 - RNA, 74 nt, Human
ccucagauaaaaccucaauuacugguaauuguacauuuccaucaauaucccuuuuaaagagguuuauucugagg

SEQ ID NO: 1681 - RNA, 90 nt, Human
ccucagccucccaaagugcugggauuacaggugugaaccaccaugcccggcagugauucauuucuaaacccagcuuguuaaaaggugagg

SEQ ID NO: 1682 - RNA, 107 nt, Human
ccucaguggcuguaggaacuccagauuauaucucuccugaaauccuucaagccauggaagauggaaaagggagauauggaccugaaugugacugguggucuuugggg

SEQ ID NO: 1683 - RNA, 96 nt, Human
ccucauaacuggaguagaguuccugguugcuuuucauaagagggagaguuacuuucuuuguaucucugcaagcagagauuucucuuugguuugagg

SEQ ID NO: 1684 - RNA, 65 nt, Human
ccucaugagcaagguugcagaucgguccuuccucagcuccuugauuugugaccuugaccaagggg

SEQ ID NO: 1685 - RNA, 90 nt, Human
ccucauugguucauucggcagcuguuuauuuagaaccugccgugugcuagggcagaucugggauacagcuguggacaagggaggaugagg

SEQ ID NO: 1686 - RNA, 74 nt, Human
ccucauuucuucuauuuaaaaaaaagccucuuucagugcaaguggggugccaaggauguagaauaaauaagagg

SEQ ID NO: 1687 - RNA, 98 nt, Human
ccucccagacugagcccccgaccuggcccagccuggcccguccccaauccagugggcuggccaggccaccugcaccagggaggacagcugcuggcagg

SEQ ID NO: 1688 - RNA, 82 nt, Human
ccucccauaguucucccgcgucugguuggcccguguguuccuuuuccuauaccuccccaggcagccuggggaacgugguugg

SEQ ID NO: 1689 - RNA, 91 nt, Human
ccuccccucguggagaguauaccagcugguguguagccccggugugagggcuacaaaguuauauguguagagcaucuccacuguguagagg

SEQ ID NO: 1690 - RNA, 76 nt, Human
ccuccggacuuucaaaugcuugcugaaccuuccaaaauacuuccucuagguggcagcgcaggaauaucucuggaag

SEQ ID NO: 1691 - RNA, 110 nt, Human
ccuccugcgcagccuuaagguucuccuucuucccgccccaggccuucagggcaaaggccugcagggcucggccguaggagaaggucagggcccaaggcuucagcaggggg

SEQ ID NO: 1692 - RNA, 83 nt, Human
ccuccugcugaagcuucuggauuugagaggcuuuacucuccaggagagugaagcgaguugggccagagcugagagucuggugg

SEQ ID NO: 1693 - RNA, 88 nt, Human
ccuccugugucccaaaacgaaaacacuccuauauuuuguagcgccuuccagaauggggcagcggaaacuaguguugggacaaaggagg

SEQ ID NO: 1694 - RNA, 81 nt, Human
ccuccuuguggaguaggaaaacauaagcuugaagaaggaagcuuuaaagaaagguggucguucucgcccgcaauuuagagg

SEQ ID NO: 1695 - RNA, 73 nt, Human
ccucgacuguccccaugcaguaccagcaaagaccgcccagugucccagccuagccuuguggggagcaaagagg

SEQ ID NO: 1696 - RNA, 81 nt, Human
ccucuagguaaagguuccaaggcaugccccaagagcaccuccuccucacccuucuggggacauuccuguagcaaccagagg

SEQ ID NO: 1697 - RNA, 70 nt, Human
ccucucaaagugcugggauuacaggcgugagcaagccuagcuuguauuuccuagacuuuuauauaagagg

SEQ ID NO: 1698 - RNA, 74 nt, Human
ccucucccauggcuagggaaaauggcacaguuggguccuauuucagaugcuaaagaaaacccuuaugggcgagg

SEQ ID NO: 1699 - RNA, 60 nt, Human
ccucuccuccucuucccuccccaucuaaagggguuuggggagagacacaggcaggcgagg

SEQ ID NO: 1700 - RNA, 61 nt, Human
ccucuggccaacacugccuuuuuccagggugcagcccuggaguguaguuuugggcuggagg

SEQ ID NO: 1701 - RNA, 72 nt, Human
ccucuggcuccggcuuugcuguagccuccagcagccuggcuggcuaucgacuccgaggccgggcaucagugg

SEQ ID NO: 1702 - RNA, 72 nt, Human
ccucugucuccgagcucgccugcaucuacucggcccucauucugcacgacgaugaggugacagucacggagg

SEQ ID NO: 1703 - RNA, 89 nt, Human
ccucugugauaucccugaggaccaagauaugauuauaucugacucaaagucagauagccagucuuggaaucccagcuuuacgacugagg

SEQ ID NO: 1704 - RNA, 82 nt, Human
ccucuugaauaagcucucugccuccuccucccuuucucccuuguggggaaauguuuggaggcaucacuggcauucgaugggg

SEQ ID NO: 1705 - RNA, 86 nt, Human
ccugaagccuugaagccucuucgggaugucuuccagcguaaucagcaggaugggcaauuggaggacucaccaggcuuguggccagg

SEQ ID NO: 1706 - RNA, 74 nt, Human
ccugaauauagggucuccuuaaacacaucugagcacugaccuggaugagugcacuugggagaccuggugacagg

SEQ ID NO: 1707 - RNA, 72 nt, Human
ccugacuccugggucucggcuucccguauccagcacaaggauggguucucugucgcagagccuggagucugg

SEQ ID NO: 1708 - RNA, 61 nt, Human
ccugagaaacugguggcuuugaacacuugguguggacuacuguguuauccgggauaucagg

SEQ ID NO: 1709 - RNA, 77 nt, Human
ccugaugguauacuacugcuuugcggaauugcauacaacugugcauuacaaaguuaauaugguaauuauggucuggg

SEQ ID NO: 1710 - RNA, 86 nt, Human
ccugauguggggacucuccuuucuuuuuaggucuauucaugugggugggcaggaaggaugugaggacucuaggucuccaguucagg

SEQ ID NO: 1711 - RNA, 81 nt, Human
ccugcaguaucucugagugugccuguacauauacauauaaaaaauuguaucauaaggaauuaacucaugagauuauggagg

SEQ ID NO: 1712 - RNA, 72 nt, Human
ccugcaugggguguuuguggccgagguggaggaugacaguccugccaaggguccugacggccucgugccagg

SEQ ID NO: 1713 - RNA, 81 nt, Human
ccugcccagugcugaguugucuucgagguuggcgcuccuccaggaaagcgauuggcugcguggaguuuagaaugggaaagg

SEQ ID NO: 1714 - RNA, 74 nt, Human
ccugcccaugccaggacucuggaggcuuagcuccucccuuuguaccaggcacguccagagcccuggcuaccagg

SEQ ID NO: 1715 - RNA, 77 nt, Human
ccugccccagccuggcucccucguugcugggcuuucggggcuggccaguggggacagucagggacuggagaggcagg

SEQ ID NO: 1716 - RNA, 81 nt, Human
ccugccccucugccugugcuccuggcaguguggcuucccggugcucaccugcacagcaguuaacagcagaggccgagcggg

SEQ ID NO: 1717 - RNA, 94 nt, Human
ccugcccuuggcuuccagaacagcugucagccugaguagagggugagggggccuccugcugcaggcagauuccuucugcagagcccuggccagg

SEQ ID NO: 1718 - RNA, 84 nt, Human
ccugcucaguguuuggcaucugguggcuaagcuggucuucagaguucaagacagcuucauucucaugccuggcaccuugguagg

SEQ ID NO: 1719 - RNA, 76 nt, Human
ccugcucgccuccuggagagcgcaagacacacagggcaccccccgcugugaauagugcaacgccggguaaagcagg

SEQ ID NO: 1720 - RNA, 99 nt, Human
ccugcucugccuucagacugcccucuuucuaccucucccucuagaacuacaucucuucuggcuggguuuauagcuuggggcugggggaggcccaguggg

SEQ ID NO: 1721 - RNA, 76 nt, Human
ccugcucugggacagauuccgaagugggagugucauagaucaaucccguguccugaacuugggucccaucacacgg

SEQ ID NO: 1722 - RNA, 76 nt, Human
ccugcuggguggggccaggcauaaccuggggauagcugucccuaaccucaaugacaagggcacccacccuggcugg

SEQ ID NO: 1723 - RNA, 75 nt, Human
ccugcuguaugcuaggcauugugcaagguguuagggcugaugcuugagcacaguaccuccacaucugcaguaugg

SEQ ID NO: 1724 - RNA, 85 nt, Human
ccugcuguguggcagcugaacucugccaaggugauggugaccaaugugacaucauugcuuaagacaguagaacacauacggcagg

SEQ ID NO: 1725 - RNA, 69 nt, Human
ccuggagagugcacaugccccuugguccuggcagggcgccaagucuggcaccauguuggccucuucagg

SEQ ID NO: 1726 - RNA, 64 nt, Human
ccuggaggcucucguggcccaccuuuaaaaaguaaaggugccccaagaaacgagaggcucuugg

SEQ ID NO: 1727 - RNA, 67 nt, Human
ccuggcagacaggcgggcaaacagugagcgcccacccagaccggcugcugcgcccccuccugccagg

SEQ ID NO: 1728 - RNA, 79 nt, Human
ccuggccugcaacuucagccuuucucaaaaucggggcacggucaucguggagcgcugguggaagguaccgcuggccggg

SEQ ID NO: 1729 - RNA, 75 nt, Human
ccuggcuauggaaaagugauguggguagccaauuuuauaaaauguuggcuuucuggauuuuuauccggagugagg

SEQ ID NO: 1730 - RNA, 88 nt, Human
ccugggccugccacucccacgcccuucaccaaugccguccagcugcugcugacgcugaagcuggugagccuggccagugaaguccagg

SEQ ID NO: 1731 - RNA, 79 nt, Human
ccugggucuuugcgucccgcucagggugaucggccacauuggaagcugugaccaugcccguggugccacaagacccggg

SEQ ID NO: 1732 - RNA, 71 nt, Human
ccugguuauucuaaucccaauuacauguacuuuagcaaagguguaauacugaucuggagggaaaaaccagg

SEQ ID NO: 1733 - RNA, 98 nt, Human
ccuguagaccaccuuauucuuuucuuauggguauguggcaugaaugccaucauuuauuuacccagcugccaguugaagaacauuuuggucuuuccagg

SEQ ID NO: 1734 - RNA, 75 nt, Human
ccugugaagcagaccucuccagggggaggugaguuaagccuuuccagccacuggacgaguaagucaaugcauggg

SEQ ID NO: 1735 - RNA, 66 nt, Human
ccugugucacaaugggcaaggagcucagagucucugggccucugauuuccccaucuguauuacagg

SEQ ID NO: 1736 - RNA, 75 nt, Human
ccuguugcugugggccacgcugaacgccgccuucgugcucgugggcucugugauuguggcuuucauagagguggg

SEQ ID NO: 1737 - RNA, 70 nt, Human
ccuguuggcacugaugaagaacccuuacaguucaggguccuggaacuucuaccagugccacucugacagg

SEQ ID NO: 1738 - RNA, 92 nt, Human
ccuguuucucuucaaauucuuccccucggcaauggccaucuccacccuggauaguuaggcugagagcaaauauuugugaaaauagggacagg

SEQ ID NO: 1739 - RNA, 63 nt, Human
ccuguuuucccggggugagccaguaucuccccagacacuggcaggcacgccgggcagaguagg

SEQ ID NO: 1740 - RNA, 72 nt, Human
ccuucccugcuugccugcucccucacgccccugcucugcguguuggaugugaaaaggaugucagggacuagg

SEQ ID NO: 1741 - RNA, 68 nt, Human
ccuucccuuccacagaguuuaguuuccucauuuguaaaaugaagacaaaccucgugagagagggaagg

SEQ ID NO: 1742 - RNA, 75 nt, Human
ccuucugugcauggggaacacaaggacuaaguugggagaauggagaauuggcuuccugucuuuauggauucaagg

SEQ ID NO: 1743 - RNA, 77 nt, Human
ccuugcuguccucugggcuucuccucugacccaggucacccuguggcaggccaugggcccucaggauguuucaaagg

SEQ ID NO: 1744 - RNA, 96 nt, Human
ccuuggcccugugaggcuucaccucuugagccugagaagcagaggugacaguacuggcccugguucuuagcagggggguggcgggcaggguagggg

SEQ ID NO: 1745 - RNA, 64 nt, Human
ccuugggaaccccaggucaaaaagggcccgaaugacaacuugggaaaaacuugggggcccaggg

SEQ ID NO: 1746 - RNA, 65 nt, Human
ccuuguacacucgcugcgaacacccucguggucuuacgcaucugggugucgcggcgcccacaagg

SEQ ID NO: 1747 - RNA, 105 nt, Human
ccuuguauucggggaacggggcugaugaguugaccgugguguccagggaugucaaucgccacguuccacuuuccucaccccaaauauguggaaccuuguacaagg

SEQ ID NO: 1748 - RNA, 71 nt, Human
ccuuuauguacuaucucuagaaguaaaauaguaaaaacuauauaagauagauauauaugaguagaacaagg

SEQ ID NO: 1749 - RNA, 66 nt, Human
ccuuucccaagugugacaaagauccaugaacugaacugugguggacacugugcuuacagggaacgg

SEQ ID NO: 1750 - RNA, 93 nt, Human
ccuuuccuuuucuggggggaaagggaaaauuuuugggggggauuuccccgagaaaaccccccuuuucaacuuuccuaccauaaaaaggggggg

SEQ ID NO: 1751 - RNA, 66 nt, Human
ccuuucuccguccuucauggaagcccugggagauaaccuggcuuccuggaguugauggaauaaagg

SEQ ID NO: 1752 - RNA, 78 nt, Human
ccuuucugacuucaagaugaaucuuugggacgauguuucuggugcuugguccacagugauucacuuuugaaggagagg

SEQ ID NO: 1753 - RNA, 60 nt, Human
ccuuugaacaaccugucgguuuuuaucaccauuuuauagguaagaaaauugggucagagg

SEQ ID NO: 1754 - RNA, 74 nt, Human
ccuuugaacccuguguuaacaaugagaagcuuguuuauuugaaggcuggguucucauuggcccacagggguagg

SEQ ID NO: 1755 - RNA, 99 nt, Human
ccuuuguuauaauugauaggauacaucuuggacauggaauuguuaagccaccucugagcaguguaugucaggacuuguucauuagguuggcagcagagg

SEQ ID NO: 1756 - RNA, 80 nt, Human
ccuuuugcauuucuuguuuccacucuauggguuggaauagagagaguccagauuuugaggagaagcugaaaugugugggg

SEQ ID NO: 1757 - RNA, 66 nt, Human
ccuuuuuaaugggucccaaaaucugugacaaauuuugguccaguugguucccuuuaaaaguucugg

SEQ ID NO: 1758 - RNA, 62 nt, Human
cgaaaccuguuuguucccagcccacccccaguggaugggaugcauaaugccagcaaguuuug

SEQ ID NO: 1759 - RNA, 62 nt, Human
cgaaucuggagagcuuuggauccugggugaugucuucauccgccaguacuuuaccgucuucg

SEQ ID NO: 1760 - RNA, 81 nt, Human
cgaauggaccacuggagggguucaaagauuccaguucuaauaugggaaugagccucuuugaucucuuccggggcuuuuucg

SEQ ID NO: 1761 - RNA, 81 nt, Human
cgaauggaccacuggagggguucaaagguucgcgucccaguacgggaaugagccucuuugaucucuuccggggcuuuuucg

SEQ ID NO: 1762 - RNA, 74 nt, Human
cgacuccuaacgcagccguguccggagcgcccucccgacggacccagagggcgcuacgguugcgugggcagucg

SEQ ID NO: 1763 - RNA, 84 nt, Human
cgacuuccucaugaagagacuccagaaagggguauggggcauagucucuuacccucuuucuuuggagcuaaaggagguucuucg

SEQ ID NO: 1764 - RNA, 84 nt, Human
cgacuuccucaugaagagacuccagaaagggguauggggcauagucucuuacccucuuucuuuggagcuaaaggagguuuuucg

SEQ ID NO: 1765 - RNA, 89 nt, Human
cgagauguguaaucauaagcaucugcgaauggaagcaucaaaacggaugaugaacugaaucgcagggugacuugugcuugguuauuuug

SEQ ID NO: 1766 - RNA, 86 nt, Human
cgagauugagcaauaacaggucugugaugcccuuaguuguccggcccggacaacgacaggauugacagauugauagcucuuucucg

SEQ ID NO: 1767 - RNA, 64 nt, Human
cgaggcagcgagcgacccccagcaucccgcggccuccgaaggggccgccgccgccgccgccucg

SEQ ID NO: 1768 - RNA, 90 nt, Human
cgaggcugguguugugaagauccuggugucgcaugggccgcgcccgccguguuaccgguauuguaagaacaagccguacccaaagucucg

SEQ ID NO: 1769 - RNA, 85 nt, Human
cgagggcccuccgugccgccggcgccaugggcaauugccacacgguggggcccaacgaggcgcuggugguuucagggggcuguug

SEQ ID NO: 1770 - RNA, 105 nt, Human
cgaguacuacugaucacaucuacuuaacuggcacaaugaacacaguagguacuuuuagcuuauguuggccuuuuggaguggguguccaagaucagcacuuccucg

SEQ ID NO: 1771 - RNA, 92 nt, Human
cgaguagcugcgcuccccugcuagaaccuccaaacaagcucucaagguccauuuguaggagaacguaggguagucaagcuuccaagacgucg

SEQ ID NO: 1772 - RNA, 131 nt, Human
cgagugauuuuugagguaaguauguuauuggaaaggugugaucuauauagaacccuguacaugaaaaggaggagaugccgcuaucuuggcagggaugaucauguauuugaaauaguaacucacagcauuug

SEQ ID NO: 1773 - RNA, 97 nt, Human
cgagugugccucggcaggagggcuugacuuucuucggcacagagcuagccccagugcggucaacaggagucgggccucucugcuaagaacauacuug

SEQ ID NO: 1774 - RNA, 78 nt, Human
cgagugugugcuggagaaggccuggcucgcauggaguuguuucuuuuguugugugccauuuugcagcauuuuaauuug

SEQ ID NO: 1775 - RNA, 83 nt, Human
cgaucuucccaggugggcggaagcgguggaagaaacccuucgguugguggaggguuccguuuucgaaaccccugggaaaguug

SEQ ID NO: 1776 - RNA, 78 nt, Human
cgauggucucagcuuggaggcugaagugagcuacaguugcccucuguacuccagccugggggacaaaaggagaccuug

SEQ ID NO: 1777 - RNA, 81 nt, Human
cgauugggacugacgcucauggacaggguucccauggauaaauuugucgaaggcaccagguccaaugcaguggucaagucg

SEQ ID NO: 1778 - RNA, 72 nt, Human
cgcauagccgccucuucgaccaggccuucgggcugccccugcugccggaggaguggucgcaugugguuagcg

SEQ ID NO: 1779 - RNA, 83 nt, Human
cgccaguaaucccagcguuuugagaagccauggcacgcagauuuugagcccaggaguuugagaccagucugggcaacauggcg

SEQ ID NO: 1780 - RNA, 73 nt, Human
cgccccggcccggugcagcaccaccagcguguccaggaagcccucccgggcagcgucgugcacgggucgggug

SEQ ID NO: 1781 - RNA, 106 nt, Human
cgccccugaggaccccucggaucugcuccagcacgugaaauuccaguccagcaacuuugaaaacauccugacgugggacagcgggccggagggcaccccagacacg

SEQ ID NO: 1782 - RNA, 79 nt, Human
cgccccugcgcuguccgcccuuccccuagcguuacuuccggucccucgcugaggggguucgugcggcucccaggaggcg

SEQ ID NO: 1783 - RNA, 88 nt, Human
cgccccuguugacagauggagauugggcagcagggccuugcugcauuguuaucugcuguuccgacuugguuugucuuguccaagggug

SEQ ID NO: 1784 - RNA, 92 nt, Human
cgcccucuggcccuuccugggcaucguggcugaggugcuggugcuggucaccaucaucuucaucuacgagaagcgccggaagcccgaggacg

SEQ ID NO: 1785 - RNA, 72 nt, Human
cgcccuggggucauugucagguaaagaugguaaagccuguugcuagucaaguauugagggacucagguggug

SEQ ID NO: 1786 - RNA, 81 nt, Human
cgcccuugcaaucucuaggucacuuucuccgcuuguagauuuugcgcgcaagccccagaaagacggcugggggcaggggug

SEQ ID NO: 1787 - RNA, 74 nt, Human
cgccucagccgccucgcacauuuagucuugccgggaguggugugauucccgaccaagauggcggccguggggcg

SEQ ID NO: 1788 - RNA, 67 nt, Human
cgccugggcuuccuaucccaucgggacccagauggcuggggggcagggggaaugggaguauaaggug

SEQ ID NO: 1789 - RNA, 60 nt, Human
cgccuucucugucccccagaacagaacaaacucuuguucucugugguuggggaaaaggug

SEQ ID NO: 1790 - RNA, 63 nt, Human
cgccuugggugggccccgcuguuucguugugcuuacggaaguggggccacucuuaaaagggcg

SEQ ID NO: 1791 - RNA, 95 nt, Human
guuacuggaguacggggccaggugccacccuuagucacuaccaacuuccuggugaaagaccaagggaaugcaaguccccgauacauccgauguac

SEQ ID NO: 1792 - RNA, 88 nt, Human
guuacuuggcuuucggcucugcucugauaauucuguggcucucuuaagaguuaaauccugaaaagugcagacucaagagccaugugau

SEQ ID NO: 1793 - RNA, 91 nt, Human
guuagaguugaggguacugaggcccaaggcuguccugcuccaugucacccaguuggucagggggcugcuggcugagccccaaugcucugac

SEQ ID NO: 1794 - RNA, 65 nt, Human
guuagguagguagcccgccagaagaaaagaucuagcccaguuucuggacauauugcgugccuaac

SEQ ID NO: 1795 - RNA, 82 nt, Human
guuaguaccacuuagggcuacaaggacccuggguucuucugucagaggaauuggguucagguuucaggcuuuaggguguaac

SEQ ID NO: 1796 - RNA, 64 nt, Human
guuagugugucuaaaacaaggagguuuaaggcaauauggaacuguaucccguugaugcacuaac

SEQ ID NO: 1797 - RNA, 73 nt, Human
guuaguucaguacuuauuagcugcaggagcuaacguucaugcaagaacagcaacaggggauacagcgacuaac

SEQ ID NO: 1798 - RNA, 79 nt, Human
guuauauaauguacaauauaggaccccuccaaauagguuuugcuucuggugaaucuuggucauuggguuaguauaugac

SEQ ID NO: 1799 - RNA, 78 nt, Human
guuaugauccuauaagcauggcaacagauauguggagcauuggaguguuaacauaugucaugcuuacaggaauaucac

SEQ ID NO: 1800 - RNA, 70 nt, Human
guucaacaucauuagagcccuguagaaugacagccuuuuucagguugccagucugcucauccauguaugc

SEQ ID NO: 1801 - RNA, 71 nt, Human
guucaauuguacaaaaccuaauuuguugucaaaaguaucaagcaauaaauuuuaacuauuguacagggaau

SEQ ID NO: 1802 - RNA, 84 nt, Human
guucacagaggaacuuaagaaguauggagugacgacuugugguucgaguugugugaugcuacauaugauaaagcuccaguggac

SEQ ID NO: 1803 - RNA, 67 nt, Human
guucaccaccugcuugcggacccugauauggcgcuggcggaucagcacgcgagcgugguggauggac

SEQ ID NO: 1804 - RNA, 85 nt, Human
guucaccucaacuggauucggaaugugcugauuuccauuggacucaaguugaucucacuuauauucugagugccgggaggugaau

SEQ ID NO: 1805 - RNA, 69 nt, Human
guucaggggucccaugagccuugauuuaaugggggccguugccauagggauucagggggcucccugggc

SEQ ID NO: 1806 - RNA, 97 nt, Human
guucaguucgagcgccaagaucgugaagcccaauggcgagaagccggacgaguucgaguccggcaucucccaggcucuucuggagcuggagaugaac

SEQ ID NO: 1807 - RNA, 79 nt, Human
guuccacaccuugcucaucuccuugugcccuuggaucugagaguugacgaaggcgcggaggaugugggaggugaggggc

SEQ ID NO: 1808 - RNA, 85 nt, Human
guuccagguuuauuuaauuccaaaggugagaguuggagugagaugucuuccauaucuauaccuuugugcacaguugaaugggaac

SEQ ID NO: 1809 - RNA, 92 nt, Human
guuccauuuuaaguuagaaaaauguaucugugugggaguaaaaagauuuccuuuuuaaaaucauuucagauaucaccauacuugaugggaac

SEQ ID NO: 1810 - RNA, 89 nt, Human
guucccacacuggcgguguggcugccugcucagggccuggcuccuccgacauggaggaggaaggggcggcagcuggcacagccggggac

SEQ ID NO: 1811 - RNA, 76 nt, Human
guuccuacuugcaaaagaaaagugacguggaggaucacucggugcaccugcuuuuuuucugcaaaucgcugggaac

SEQ ID NO: 1812 - RNA, 73 nt, Human
guucguuuuuguagagguaguuugggagcauggggggugccccugagcuccagccucuucuggagguacgugc

SEQ ID NO: 1813 - RNA, 94 nt, Human
guucucuugagacuaguaggcauagaagaaagcagaaggaaaauaaauagaaagaaggucuucuaccuucauggcuauucaggcucaggagggu

SEQ ID NO: 1814 - RNA, 92 nt, Human
guucugcacauguguauguucugccauuuccaggacgaaaaggagguugugcuaaagggaaaggaggaucgaugcacauguaugccaagaac

SEQ ID NO: 1815 - RNA, 74 nt, Human
guucugugccaaacaccuguguggaaugccgcaagcccaucggugcggacuccaaggaggugcacuauaagaac

SEQ ID NO: 1816 - RNA, 71 nt, Human
guucuuaagguugaagugugguucagggccagugcaauauuaguggacagcacuuaguagcuguggaggac

SEQ ID NO: 1817 - RNA, 107 nt, Human
guucuugccaccaaaaagaagcaaauaacaucuaguaccugugggcaguuggcuaagaggcugugguauuuuuuguguguauuugcuuucuaccuggggaucagagc

SEQ ID NO: 1818 - RNA, 67 nt, Human
guucuuuucccuugcugcaaccuacagaggugccauugugggaaugauaguagcugaaauuaagaac

SEQ ID NO: 1819 - RNA, 93 nt, Human
guugaaagcuaagaaagugaggaggugguucaggggaucacucuuuccuacuuguuccucucaccucaaacucaccuucuacugcgcagcaac

SEQ ID NO: 1820 - RNA, 61 nt, Human
guugaaggcacaacaguuaauggcuguauuguugcuauuccguugcugacauguuuuuaau

SEQ ID NO: 1821 - RNA, 79 nt, Human
guugacacuaaaaugcaucaaacuccuuucaugcuggcuuuaccagaagucaaaaaugaagaggcuugcuaaguguggc

SEQ ID NO: 1822 - RNA, 114 nt, Human
guugagcauccuuaauccccaaauccaaaauucuccagucagcauuuccuuugagcaucaugucauugcucaaaaaguuucagauuuuggaguuuugaauuugggauacucaac

SEQ ID NO: 1823 - RNA, 80 nt, Human
guugaggccauccagcccuugccguucuuuugacuuccucagcagagcauaccuuccaagaaacuggacuucuccucgau

SEQ ID NO: 1824 - RNA, 84 nt, Human
guugauuuguuuccaugaaccugaguugcuuugauuuaaaaaaaauuaaugcaacaaaaauacagcaucaguauacaaauccac

SEQ ID NO: 1825 - RNA, 91 nt, Human
guugcagaugcuauucuaggcaaucagauguucacacauuaugaccgggcucauauugcucaacugugugaaaaggcuggccuacugcagc

SEQ ID NO: 1826 - RNA, 80 nt, Human
guugcauacagggcacauggcuagaauugcaguuuccacuugucaucuaagcuggccaacuuggugcaguuguacacagc

SEQ ID NO: 1827 - RNA, 105 nt, Human
guugcauucuuagggagcgucuucaguguguacacggcagcagucccuuggccgcauucuuagggaaccuuuucaguucauacacaguggcggucccuuggcaac

SEQ ID NO: 1828 - RNA, 82 nt, Human
guugccugacggggauuagacuggagucacuauagcgauaaauggccugucauacuuuccuuugauuucccaggguuucaac

SEQ ID NO: 1829 - RNA, 66 nt, Human
guugccuugcuccaagucugggcaucgugacauugccgugaugcccagaagaaaguuaauggcaau

SEQ ID NO: 1830 - RNA, 110 nt, Human
guugccuuugcuccagaucuaggugagaucagauggaauggaggcuccaucuggucuucaggaagucucaaguuuucacugaucuacauaaaaucucagagcaaggcaau

SEQ ID NO: 1831 - RNA, 87 nt, Human
guugcggcccggguuuagaagggauucaugggggccgggcugccggugcggcccgggcggccggggcuucugggcgugggccccaac

SEQ ID NO: 1832 - RNA, 72 nt, Human
guugcuguucauaaguuuaguaucuauaucugaaaaaaucauagaaaauugcuggguuuagcucucagcagc

SEQ ID NO: 1833 - RNA, 90 nt, Human
guuggaagagaaaaugguacagcaguuacaagaggauguggacauggaagaugcuccuuaaaaaucucuguaaccauuucuuuuauguac

SEQ ID NO: 1834 - RNA, 72 nt, Human
guugggauucccaucggggagggugcucaugaugaagagguacucaagacaauugacgagggagaugccgau

SEQ ID NO: 1835 - RNA, 92 nt, Human
guugggcagaacacagccauauuuuucuucucgcagaaagccuauagauggaugugugaguaggagaaauauugcugaauucuuuucccagc

SEQ ID NO: 1836 - RNA, 90 nt, Human
guugggcccucucuugaagaagcgaccuugcggugccauguguuuugcucagauggugugcacccucuguuucuuguuugggcgcccagc

SEQ ID NO: 1837 - RNA, 75 nt, Human
guuggugaccucagauacacuguucagaaguacucaaaguauuccuuuuuucucacauuugagagucacucuagc

SEQ ID NO: 1838 - RNA, 82 nt, Human
guugucuguuuguggauuucauuucugccuuuuaguuuuuacuucuucuuucuuuggaggcagaaauugggcauaagacaau

SEQ ID NO: 1839 - RNA, 74 nt, Human
guuguuauuggugcaggaguaauagguguagaacuggguucaguuuggcaaagacuuggugcagaugugacagc

SEQ ID NO: 1840 - RNA, 68 nt, Human
guuguuuuuauaaugggcguuuucacaugcacauauguguaugcauguauacgcccauacagacaugc

SEQ ID NO: 1841 - RNA, 131 nt, Human
guuuaaaugguuauccgggagaauuccuguuguguggaagaugcuuugcccuuucuucaucuggaaaucauuuuuccauccuuuaggucacagcuuaaacaugauuuucccaggaauuuuucucugaccac

SEQ ID NO: 1842 - RNA, 69 nt, Human
guuuaauggccaauacgauaucauccaaugcaaagaaggggugggcugcuaucgaguggauaauugaac

SEQ ID NO: 1843 - RNA, 71 nt, Human
guuuagaaguuucuggccccacaguucuagaggcugacugacuggggcagguuguagagaaacuucuggac

SEQ ID NO: 1844 - RNA, 70 nt, Human
guuuagccagcucucccggcaguagcaaggccaccugugguuugaaucuuucuggaagaaaugguggagc

SEQ ID NO: 1845 - RNA, 82 nt, Human
guuucagauaaaguagaaguugucuguacuucuucccuagcaaacugagggagugguacugacuucugucucugucuggggc

SEQ ID NO: 1846 - RNA, 100 nt, Human
guuucccacuuuucucccaucugucauuuuucucuuuccauaaaaagcuaauggugacguuaucaaagagugaaggagucagaggcuaaggguggggaac

SEQ ID NO: 1847 - RNA, 82 nt, Human
guuucuuguaaaggcgucugacaguccugagaauuauugaugguaaggaauaaaaaauguacagaugacuucaugaagauac

SEQ ID NO: 1848 - RNA, 111 nt, Human
guuugaauucagacacugacaggugggcaagggaaaauagaugguaaucucuuaaagaguaaagaccaucucucuaaguucucuuaucccuuauagcaguggcucucaaac

SEQ ID NO: 1849 - RNA, 75 nt, Human
guuugaccuggccuggcaguacgggcccugcaccgggaucacacggcugcagcgcuggugucgggccaagcagau

SEQ ID NO: 1850 - RNA, 79 nt, Human
guuugagaagauuagaagaagaaucucuaucaggaccagucuucagccauagggguucugcuucucggcuucuauaaac

SEQ ID NO: 1851 - RNA, 96 nt, Human
guuugagcagaugagagccaacgugggcaaguugcucaaggguaucgacagguacaauccugagaaccuggccacccuggagcucuauguagagac

SEQ ID NO: 1852 - RNA, 95 nt, Human
guuugagguguuugugguauaauuuuuuugcguuuaguaugguguguaguuauauauauugaguuuaaggguuguguguauagaguauuuuggau

SEQ ID NO: 1853 - RNA, 82 nt, Human
guuugaguucaaagauggagcgaggguggauauggugggaaggggcacacggguucucacgcaacaacggaggaaggcaggc

SEQ ID NO: 1854 - RNA, 83 nt, Human
guuugcagacucugugggaauuguuuuucaucuguuucuaugguugucaaaugaauucuucacccacccuacaguuugcuaac

SEQ ID NO: 1855 - RNA, 86 nt, Human
guuugccucgaguuagucacgaaggaaucgaagagagccuuagucuucgaggcuuuucccuuccugugagccccuuugaggccagc

SEQ ID NO: 1856 - RNA, 91 nt, Human
guuuggaauugcaucagagaucauguaaggugaagagaaagaguacaaaguguuucuauggccugucucuggacuccugcacauuccgaac

SEQ ID NO: 1857 - RNA, 61 nt, Human
guuuggaggguuugguggucuccacucccgccuugacggggcugccaucugccuuccaggc

SEQ ID NO: 1858 - RNA, 82 nt, Human
guuuggaguuccacagccucugccaagcgguuuguaagccuuagcgagcucuugcgcgcaggggcaauauggagcgccgcac

SEQ ID NO: 1859 - RNA, 91 nt, Human
guuuggccguaaggugccgugcgugaauugugcuugugcccuccacacggguucgugggcacuccggacgugauuaaccagccggccagac

SEQ ID NO: 1860 - RNA, 81 nt, Human
guuuggggguuggaggguggagggguggcauuaggguaugugagccgcuccccaugcuucaccuccccucuccccucaagc

SEQ ID NO: 1861 - RNA, 106 nt, Human
guuuguaaaugucccuccugugucccaaaacgaaaacacuccuauauuuuguagcgccuuccagaauggggcagcggaaacuaguguugggacaaaggaggcgagc

SEQ ID NO: 1862 - RNA, 60 nt, Human
guuugugccuucacccugagcaaaguauuuaaacaaauuuucucgaagguguguguaaau

SEQ ID NO: 1863 - RNA, 96 nt, Human
guuugugggaggaggacuggcaaaaauaugagaguaggaguuugggcucuugagcuugggccuggccuucaaauuuccacucuuucacucacuagc

SEQ ID NO: 1864 - RNA, 81 nt, Human
guuuuauaauuccuuaaaacagcugaaaauugggacaacauacuuuacgcaaugaacaguaguuaaauagggaaauaaaac

SEQ ID NO: 1865 - RNA, 77 nt, Human
guuuuauuaaaguuauuuacauuuaauggcaauauuuacagagaaacauuguguaaaucuuaaaauuuuuuaaaaac

SEQ ID NO: 1866 - RNA, 73 nt, Human
guuuucagcuucccuaagggacuggcauaggguuuguggggucaaugccaggaaccugggggaaacuggaugc

SEQ ID NO: 1867 - RNA, 62 nt, Human
guuuucauccucuaguacugaagugcccucaaggugguaggcacuguauagcaggagaaaac

SEQ ID NO: 1868 - RNA, 78 nt, Human
guuuucaugggaagccacuuugacaggcauuacuguggcaaguguugucugacuuacugcuucaacaaaccagaagac

SEQ ID NO: 1869 - RNA, 71 nt, Human
guuuucccaauacuuuagaaaaauuacuaaucauuaauaagucgauuuuauacucaaaguaauggccuaac

SEQ ID NO: 1870 - RNA, 76 nt, Human
guuuucgcugugaacauucccuugaucucaucaaguucugagcgggucaauggggcaacacgguuagcgggagagc

SEQ ID NO: 1871 - RNA, 91 nt, Human
guuuucuggcuccaccucacccuaguuccuaaucaucauccauauccaccugauggaauagaaaauagcgugagguguguucccaggaggc

SEQ ID NO: 1872 - RNA, 73 nt, Human
guuuugaauguaaagaaaaauuguggaaaugcugucagcagcuauucacagaccaaaccagacauccauagac

SEQ ID NO: 1873 - RNA, 82 nt, Human
guuuugauagucugaggcugggccucugccuuugugaaguugaagagccaggagcuacucagcaacaauugauuuuugaaac

SEQ ID NO: 1874 - RNA, 68 nt, Human
guuuugcaauucuucugcacuuucccaccaagcugggaucugggugagucuagagauauuugugaaau

SEQ ID NO: 1875 - RNA, 77 nt, Human
guuuuggucucgcgggcuaguagggcgcacuuggcggggaggcgcuugggcgcgagacuaggcgugaagagcagagc

SEQ ID NO: 1876 - RNA, 69 nt, Human
guuuuguauaacuuuauugcaagucacauaaucuugguuuagacuugacgcaacgggagguuacagagc

SEQ ID NO: 1877 - RNA, 89 nt, Human
cgcgacuccgugagcgccuccgccggucccgggacgcgggagcgucgccguucucgcuccuugucucgcucccggcuccgcucucugcg

SEQ ID NO: 1878 - RNA, 91 nt, Human
cgcggagccucauggggguuggaguccccaagguuuccuuugugcgcaguauuggcggggccuuggacuaccacucccacaaggcaccgcg

SEQ ID NO: 1879 - RNA, 101 nt, Human
cgcggcgcuggccgacugggcgucgcccuuccacgagcgccacuuccacuacgaggagcaccuggagcgcaugaagcggcgcagcagcgccagugucagcg

SEQ ID NO: 1880 - RNA, 79 nt, Human
cgcgggaggcgugcugggcgcggggcugcggugcccagaggcugcggcauuaggggcucggcgcccccgaccuuccgcg

SEQ ID NO: 1881 - RNA, 79 nt, Human
cgcuaccaagcgguguggucccagcaugggggguccuacuacaugauaucgcgcucgcugggacccgaguuuggaggcg

SEQ ID NO: 1882 - RNA, 77 nt, Human
cgcucacauuccaggcccuuguccugcaggcugccgcgggcggacacgccagaggaggaggccggggaauggccgcg

SEQ ID NO: 1883 - RNA, 86 nt, Human
cgcuccaguugguuggguauaccgaugacuuugggccgugaguguguuucggguuucaaggucgcugggcccgagguggaccugcg

SEQ ID NO: 1884 - RNA, 90 nt, Human
cgcucgcugaccuggcgcugcugccccuggugccugacggaggaugagaaggccgucugucccggguggacucagugaggaucagcagug

SEQ ID NO: 1885 - RNA, 74 nt, Human
cgcucuuucacccaggcuggagugcaguggcaugaucucagcucacugcaaccuccaucuccuggguucaagcg

SEQ ID NO: 1886 - RNA, 76 nt, Human
cgcugccucucugcaggccgugugcuuugcucgguugaucuugcagagccuaagacacaggcccagagaggcagug

SEQ ID NO: 1887 - RNA, 68 nt, Human
cgcugcgucccagcgacucugcggggguuucgucgaggcccggcaggcuugggucgggagacgcggcg

SEQ ID NO: 1888 - RNA, 88 nt, Human
cgcugggcaggacgacaaacacgagacgccacuguggaaugagcaacuucggagcacggggugacuugcuugggaccgugcccacgug

SEQ ID NO: 1889 - RNA, 88 nt, Human
cgcugggcugugcggugcggagggugaugaggaugucuggugacagccgugcggacaccacuccucucugcagcacugccucccagcg

SEQ ID NO: 1890 - RNA, 77 nt, Human
cgcugggucuccuuucucacugccccaacgcguuugcaggggcgcuuuccccgcugggggcuguugggggcccggcg

SEQ ID NO: 1891 - RNA, 89 nt, Human
cgcugguuccugcggcuucugcucagacaccaacgccagacggcgaugccucucggguggugacuccagcgcaggaacuugaagaagcg

SEQ ID NO: 1892 - RNA, 97 nt, Human
cgcuguaagcuucugcuggggauaggaauucuggugcuccugaucaucgugauucugggggugcccuugauuaucuucaccaucaaggccaacagcg

SEQ ID NO: 1893 - RNA, 75 nt, Human
cgcugucggggccgugagacgcugucggggcggugaggacacugucggggcggugaggacgcuguggggacggug

SEQ ID NO: 1894 - RNA, 72 nt, Human
cgcugugcgugagcugcgacggcaagguggagcacuaccgcaucauguaccaugccagcaagcucagcaucg

SEQ ID NO: 1895 - RNA, 78 nt, Human
cggaaaacagcuggaagauggucguacccugucugacuacaacauccagaaagaguccaccuugcagcuggugcuccg

SEQ ID NO: 1896 - RNA, 89 nt, Human
cggaaccgcugucuuucacgccugucucacuccacacgggggccccgaccccagggucccgaaagucccaggcuguuggacguggucug

SEQ ID NO: 1897 - RNA, 81 nt, Human
cggacacaucacagguauugacugggcucccaagagcgaccgcauugucacuuguggggcagaccgcaaugccuaugucug

SEQ ID NO: 1898 - RNA, 80 nt, Human
cggacacuucggcccccugagaccaguucacggacgguggcaaauaucacaucugcuggucucugaguccuagcugucug

SEQ ID NO: 1899 - RNA, 86 nt, Human
cggacagacauuugguauggaucacuggucauuccuacgucaccuaugggccacuggccaauggugccaccagauguuuuuguuug

SEQ ID NO: 1900 - RNA, 80 nt, Human
cggacauucccugugacuccacaggccagaccucaaccuagaaagauggccacaggacuugcaacucaggguggugucug

SEQ ID NO: 1901 - RNA, 91 nt, Human
cggacccugcugugagcagcucccuauuccaugacaguguguugagcucuccauugucagaggcugguaggguguucagcuagaggugccg

SEQ ID NO: 1902 - RNA, 67 nt, Human
cggaccgcuggaucgugccgggcgggggcauggagcccgaggaggagccgggcggugcggcgguccg

SEQ ID NO: 1903 - RNA, 95 nt, Human
cggagagugcuuggguggugggugcuggaggauuuccaguucugaacacguauuuauauuggaaagagaccagaaccgaagcucggcacuccccg

SEQ ID NO: 1904 - RNA, 100 nt, Human
gacauggaggucagcgccacagaacucaugaacauucucaauaagguugugacgcgacacccugaucugaagacugaugguuugggcauugacacauguc

SEQ ID NO: 1905 - RNA, 104 nt, Human
gacauuguauagcuaagaaauaguaaagcagggauuugaacuccacaucugacccuacagccuguauucauaacaacucugcucugugucuuggcuccaaaguc

SEQ ID NO: 1906 - RNA, 67 nt, Human
uucaaguaaaaacccuuucuccuuccuggggccucggcuccuggagggcuggagggucucgucugag

SEQ ID NO: 1907 - RNA, 104 nt, Human
uucaauuaccuuuuggugaagagggcgugaggaaaauaauuccauuaucgaauaugcuuuuauuauuccucuuuaaugccuuuuucauuuugggguuuuaggaa

SEQ ID NO: 1908 - RNA, 75 nt, Human
uucaauuuccuauuccuuucaccugccccuagaaggggcaagaggcgggugagcaggagagauggggcuauugaa

SEQ ID NO: 1909 - RNA, 77 nt, Human
uucacaacuacuuuugaacaucuaaauuuaaaccuaaauuuuuuaauuaaaugccuguucaacaaagcuaauuggaa

SEQ ID NO: 1910 - RNA, 98 nt, Human
uucacaguuccggcuucccggcugcugucauauuugccgucuuugucaucacaggcaaaugccagcagaggccuuuuggggugccacgccacugugaa

SEQ ID NO: 1911 - RNA, 103 nt, Human
uucaccgcacccucggacugccccaaggccccgccgcgcuccagcgccgcuccggcggcggcggcggcggcggcggggugguggaggcggcgguggcggugga

SEQ ID NO: 1912 - RNA, 77 nt, Human
uucacucaggcgcgcuacuuggagaaagaagagaagugucucccuccucccagcauucggguaguggucacggugga

SEQ ID NO: 1913 - RNA, 116 nt, Human
uucacuggauaugguggugggugcuuguaguugcagcuuagucagaaggcugugguagaagaaucgccugaaccugaguaguugaggcugcagugagccaugaucaugccacugaa

SEQ ID NO: 1914 - RNA, 65 nt, Human
uucagaaugaugggccugugaccauagagcuggaaucgccagcucccggcacugcuaccucugaa

SEQ ID NO: 1915 - RNA, 73 nt, Human
uucagcaagguucuggcgcaggugcagcacccccugcugcugcuuaccucagcguucacaggccugugcagaa

SEQ ID NO: 1916 - RNA, 86 nt, Human
uucaggccacccugcucauggcccuuccuggccgccugccacaccgcaagcucgcuggggggacacuagaagcaccguggccuggg

SEQ ID NO: 1917 - RNA, 86 nt, Human
uucaguugcuucaggccaucuggauguauaugugcaggucacaggguuaugauggcuuagcuugggcucaggggccugacauugag

SEQ ID NO: 1918 - RNA, 63 nt, Human
uucaugcaagcauguguuuuaccuggcaagccugccgcaagacacagguaagaugcaggugaa

SEQ ID NO: 1919 - RNA, 71 nt, Human
uucauggucccugcccaguccucguggaacuacaacuuucaaugggugaucgggcaugaccccaacaugaa

SEQ ID NO: 1920 - RNA, 78 nt, Human
uucauuauuuuaugcugccucugcauaacuaauuuugauuucagggcuaggaggguggagguagggugaggaaaugaa

SEQ ID NO: 1921 - RNA, 81 nt, Human
uucauugguacaaacaucuuucauacacaauaggcuaugauaaaaugaggcauauggguguauaacuacaguauuaaugga

SEQ ID NO: 1922 - RNA, 77 nt, Human
uuccaaccagcuguauuuacuccuuggaauauggugcuuguggccuuucugaggagaaagcuguggagaaguugggg

SEQ ID NO: 1923 - RNA, 87 nt, Human
uuccaauggguguuaaucucccaccauaagaaucugugacacacggaugcaugaucuaugaagugagagaugggaacaacaauggaa

SEQ ID NO: 1924 - RNA, 91 nt, Human
uuccaggauuucacaugaauucaaugaagggggcugugucuuauuccuggaugcuuugccuccuucauggaauucaguggauuuaauggaa

SEQ ID NO: 1925 - RNA, 67 nt, Human
uuccaugggcaggggccaugacagggagauaggccacaccuuucccagguggaaccugcagauggag

SEQ ID NO: 1926 - RNA, 73 nt, Human
uucccacugaacuuuuucuccaauucgcguacuagccggacuuggauuuucuggaaagauuucaguugaggaa

SEQ ID NO: 1927 - RNA, 71 nt, Human
uuccuaagccuugggacagcugggaacuuaacuugaaauaggaaguucucacugaauccuggaggcuggaa

SEQ ID NO: 1928 - RNA, 78 nt, Human
uuccuaccacuuaagaauaaaaaaugcauuuuaauaaaaacaaaucuauacugaagucauuuuccuuugugagaggaa

SEQ ID NO: 1929 - RNA, 105 nt, Human
uuccuccaguuuucagucacucaguagaugucuguacuaucauauccaucauaugaauauaucacauaugauagguaccaacuaucugagugaaaacuggaagaa

SEQ ID NO: 1930 - RNA, 76 nt, Human
uuccucuuccagcucagcuucucuacucugggcaagguaagcagggggcugaaagguauagagaugggaaggggaa

SEQ ID NO: 1931 - RNA, 79 nt, Human
uuccugaggauucacuggguuucugggucccaaaggggaaguucucuucaagguacaaaaaccacgacuccgcagagaa

SEQ ID NO: 1932 - RNA, 92 nt, Human
uuccugccagaaugcgcacagaacauaagucagccaagugugucgugccaggggauacuuugacuuugguuugcugcugcugcugcuagggg

SEQ ID NO: 1933 - RNA, 95 nt, Human
uuccuguuggaccuucgaacaugucuucuccacgagguggaaugaagcaaaaggacaacccauuugguaaaagguggagaaugugggaacaggag

SEQ ID NO: 1934 - RNA, 94 nt, Human
uuccuuuggcagcauuacuuuugauaagaagucuccaaauaaaauacaaaauuuuggcacagacauuuuaaucuugucaagacaauguaaggaa

SEQ ID NO: 1935 - RNA, 75 nt, Human
uucgccucuuccugcuguaugcucaucccugcacugagcacagauaugacaagcaguagccaugggggagguggg

SEQ ID NO: 1936 - RNA, 67 nt, Human
uucggcuggcuagcaggacacugagacuccccucugcuuugggcaguguccgcugcagccagucgga

SEQ ID NO: 1937 - RNA, 94 nt, Human
uucggguucuagccagaagcccuggggccugucucuugccucuucuuguagcaugagacacccuuggcagguguggcugugaagauguaucgaa

SEQ ID NO: 1938 - RNA, 130 nt, Human
uucuauguuauacccuggaguccugguugaggggugggggaaucagaaaaguagguuuacauuuaacauuuuucuuaacuacauucacuucuuaaaaaggaacaagaaguguaaauaaguauguauagag

SEQ ID NO: 1939 - RNA, 88 nt, Human
uucucauguugaagccaauuguuuuccaaauaauacugaauacaacuuucaaauuccuuuggguuauaguuggaaaccaggaugggaa

SEQ ID NO: 1940 - RNA, 67 nt, Human
uucucuguguaauuggcaaggcuguaccaauguugugcugaugcaagccuuuuucaguucaagagaa

SEQ ID NO: 1941 - RNA, 124 nt, Human
uucugaacuugggccagaucuuaaccugcugguaaagcacuggcugaggguuuagacuuucaaggaauuugagguuguuuucccugccuuauugcaacccagugucuggcugcugagaccagag

SEQ ID NO: 1942 - RNA, 85 nt, Human
uucugacccaugagaaagggaaaauuuacggagugauaauuuucacauaggugugaauuuauccauuauauaggcauggucagga

SEQ ID NO: 1943 - RNA, 84 nt, Human
uucugcaauccaguccucuuagaaauugguuucucucuuugggagauucagacucagaggcagccagaggggacaggucaagag

SEQ ID NO: 1944 - RNA, 75 nt, Human
uucugggccagaucuagggaucuucccucccucccugcacucuagcugcaggagcuuccuggugucugcccagag

SEQ ID NO: 1945 - RNA, 85 nt, Human
uucugguguuuccuagagagccaauggacuguauauaaaugcugcguuuguuuggagagggugucuuucuguaaggaucacugaa

SEQ ID NO: 1946 - RNA, 65 nt, Human
uucuguaccagguuuaaauguagucuucuggagaaguauuuuugacauugagcucugggacagga

SEQ ID NO: 1947 - RNA, 94 nt, Human
uucugucuuuugaauucugucgugacuggggcuaaacaacugucacuggcaagugacaagaggcacagacagcaggggaaauaaaaagagagaa

SEQ ID NO: 1948 - RNA, 104 nt, Human
uucugugaggcuguggccaucuacggcaucaucauggcaauugucauuagcaacauggcugagccuuucagugccacagaccccaaggccaucggccaucggaa

SEQ ID NO: 1949 - RNA, 74 nt, Human
uucuuaacgauauaagcaacggcuuugagagagaaaacuacuuucaaacaaagcacaguaacaguugaaaagag

SEQ ID NO: 1950 - RNA, 101 nt, Human
uucuuagaguccaucacagaccugaacugcugaaugcuauuccucauggaaacugaggcauggacauuucggcagcucccccuuggauguggccuggagga

SEQ ID NO: 1951 - RNA, 106 nt, Human
uugaaaaaugucaagacccuauaaaacugauuuguguucagaauuuucaaaaacaucuuguucucuucccuucacuaaaugucaguauucuugacuccuuuucuaa

SEQ ID NO: 1952 - RNA, 83 nt, Human
uugaaaauggaauggaaucuccaggagugaggguuuccauggaagccagcacuauccuuggggacaccacugaccauuaacaa

SEQ ID NO: 1953 - RNA, 82 nt, Human
uugaacucauucuggcugcaaacuacuuagacaucaaagguuugcuugauguuacaugcaagacuguugccaauaugaucaa

SEQ ID NO: 1954 - RNA, 94 nt, Human
uugaacuugaaacagaaaccugugcuaaaaugcuugccucauucaaauguuccuuaaaaccagagcacagagauuuuugcuuuuuuacuaucaa

SEQ ID NO: 1955 - RNA, 78 nt, Human
uugaagggauaggcucacuuuguuaauauuugagaacauaccauccauagaaccauagcuugucaguuguucuuucaa

SEQ ID NO: 1956 - RNA, 84 nt, Human
uugaccccaucaacgcacugcagggcugccauggaagggccuaugagugaccacccuuggauggaggccuggcaggaggggcaa

SEQ ID NO: 1957 - RNA, 77 nt, Human
uugacuaguuuucuuucuuuugcuaccucaacaccaaacaauaugggauuagugagaaaugaacuucaacugguuga

SEQ ID NO: 1958 - RNA, 103 nt, Human
uugagaaggagucucgcucugucacccaggcuggagugcaauggcacgaucucggcucacugcaaccucugccuccuggguucaagcgauucucuugccucag

SEQ ID NO: 1959 - RNA, 103 nt, Human
uugagacagagucucacucugucaccuaggcuguagugcaguggugcgaucucagcucacugcaaccucugccuccuggguucaagcaauucucaugucucag

SEQ ID NO: 1960 - RNA, 103 nt, Human
uugagacagagucucacucuuuuguccaggcuggagugcaauggugcuuucuuggcucacugcaaccucugccucccagguucaagugauucuccugccucag

SEQ ID NO: 1961 - RNA, 103 nt, Human
uugagacagagucuugcucugucacccaggcuggagugcaguggcaugaucucagcucauugcaaccucugccucccggguucaagcaauucuccugccucag

SEQ ID NO: 1962 - RNA, 103 nt, Human
uugagacagggucucacuuugucacccaggcuggagugcaguggcaugaucucggcucacugcaaccucugccaccugggcucaagcaauccuccuuccucag

SEQ ID NO: 1963 - RNA, 89 nt, Human
uugagacggagucagccuggagugcaguggugcaauuucggcucguugcagccucugccucccagguuuaagugauucuccugccucag

SEQ ID NO: 1964 - RNA, 104 nt, Human
uugagagcuggagucucgcucugucacccaggcuggagugcaguggugcgaucuuggcucacugcaaccuccaccuuuguguucaagcaauucuccuuccucag

SEQ ID NO: 1965 - RNA, 103 nt, Human
uugagauggaguauugcucuguggcccaggcuggagugcaguggcacaaucucggcuuacugcaagcuccgccuccuggguucacgccauucuccuaccucag

SEQ ID NO: 1966 - RNA, 103 nt, Human
uugagauggagucucccucugucaccuaggcuggagugcaguggcaugaucucggcuuacugcaaccuccaucucuaggguccaagugauccuccugccucag

SEQ ID NO: 1967 - RNA, 103 nt, Human
uugagauggagucucgcucugucacccaggcuggagugcagugguaagaucucugcucacugcaagcucugccucccggguucacgccauucuccugccucag

SEQ ID NO: 1968 - RNA, 102 nt, Human
uugagauggagucucgcucuguugcccaggcuggagugcaguggugcgaucucagcucacugcauccucugccucccggguucaagcaauucucugccucag

SEQ ID NO: 1969 - RNA, 101 nt, Human
uugagauggaguuuugcucuuguuccccaggcuggagugcaaaggugcggucuuggcucacugcacuccagccugggauacagagcgagacccugucucaa

SEQ ID NO: 1970 - RNA, 114 nt, Human
uugagauggguucucacuauauuguccaggcuagagugcaguggcuauucacagaugcgaacauaguacacugcagccuccaacuccuagccucaagugauccuccugucucaa

SEQ ID NO: 1971 - RNA, 66 nt, Human
uugagauuacuacacuacggauugaugucaccacugauggaagacaugcugagguagaauuuacaa

SEQ ID NO: 1972 - RNA, 103 nt, Human
uugaggcagagucucacucugucacccaggcuggagcgcagugacaugaucucugcucacugcaaccuccaccuccuggguucaagagauucucgugccucag

SEQ ID NO: 1973 - RNA, 68 nt, Human
uugagggccugaagccagaaggaacugacauggaggacagucuguuccaccuggauugcaggcuccag

SEQ ID NO: 1974 - RNA, 90 nt, Human
uugaguagcgaagagguggagaaauagcccgggccguuugcaagcuuugaagguccaggcucucuuucacacuccucagugucaucucaa

SEQ ID NO: 1975 - RNA, 103 nt, Human
uugagucagagucucacucugucauccaggcuggagugcagugguacgaucucgacucacugcauccucugccuuccagguucaagcgauucuccugccucag

SEQ ID NO: 1976 - RNA, 104 nt, Human
uugagucggaguaucgcucucguugccuaggcuggagugcaguggcgugaucucggcucacugcaaccuccaccucucggguucaagcaauucuccugccucag

SEQ ID NO: 1977 - RNA, 103 nt, Human
uugauacggagucucccucugucacccaggcuggagugcaguggcaugaucucagcucacugcaaccucugccucccggguucaagcaauucuccugccucag

SEQ ID NO: 1978 - RNA, 67 nt, Human
uugauacggagucuugcucuguugcccgggcuggagugcagugggugacagagugagacccuguuga

SEQ ID NO: 1979 - RNA, 81 nt, Human
uugaucuuaaccaguuucacuuguaccaagaccaaacuuucuuaccuuuccaugcagggaaacaggcaccaucaagaucaa

SEQ ID NO: 1980 - RNA, 76 nt, Human
uugaugaugucucucacucuguuccuuuaauuacaaagucucugaagacucugaacuugacugaggauaauguuaa

SEQ ID NO: 1981 - RNA, 60 nt, Human
uugauuggcaucugggaacuuggaguucagggggcuuccaccauucccagaacugaucaa

SEQ ID NO: 1982 - RNA, 76 nt, Human
uugauuuuuagagcaccaucacuuucacauuccugauucugauuuuguuugguuuguuggguuuucugaaacuuaa

SEQ ID NO: 1983 - RNA, 81 nt, Human
uugcacuggucccuggagagagggcguccccugcaggagagcuucaugcgccugguggaggccuguggggacucggagcaa

SEQ ID NO: 1984 - RNA, 80 nt, Human
uugcagaauuuaccucaagaacucuuugcuguugacccaacuaccguuucacaaggauugaaagaugagguucucuacaa

SEQ ID NO: 1985 - RNA, 94 nt, Human
uugcauuguaguaguuuguacagucauauguaaaacaauuuaucauaaugaagacccuuauaauaacaaccauauaugcuaucuaaaaaugcaa

SEQ ID NO: 1986 - RNA, 69 nt, Human
uugccaaaugcaucaaagguauuauauggucagaggauaauugugcacuaugucgccuuuggguagcaa

SEQ ID NO: 1987 - RNA, 76 nt, Human
uugccgucugccacagcuggugccgucugagaagggggucccccuguagcagcacaucgcugacuuggcucggcaa

SEQ ID NO: 1988 - RNA, 68 nt, Human
uugccucugcuugucaugccauuaagcucccaaauaaggaagaaacucacagauaaguccauuggugg

SEQ ID NO: 1989 - RNA, 63 nt, Human
uugcuaaaguugaacaaucccgguacuguaccauaucaguccuuuguggguaguagguagcaa

SEQ ID NO: 1990 - RNA, 75 nt, Human
uugcucuauuggcaggcuggagugcaguggugcgaucucagcucacugcaacccccgccucccagauucaagcaa

SEQ ID NO: 1991 - RNA, 76 nt, Human
uugcucugucacccaggcuggagugcaguggugccaucuuggcucacugcaaccucugccucccagguucaagcaa

SEQ ID NO: 1992 - RNA, 71 nt, Human
uugcugaggacccccaaggcguacuggcaaucaccguaaagguuuggggaucacaguuacuuucucagcaa

SEQ ID NO: 1993 - RNA, 109 nt, Human
uugcugggagcccaggacuggacucagaggagaagaugaguaucaauccauagcagaaacaaagagguauauaugcaucuuccaauagagaucacugggguucccacaa

SEQ ID NO: 1994 - RNA, 111 nt, Human
uugcuguagaggaagaaggagccgucggaguccagcaugggaggcgugguguuguaguuguucuccggcugcccgcugcucucccacuccacggcgaugucgcugggguag

SEQ ID NO: 1995 - RNA, 76 nt, Human
uugcuugaacccaagaggcggagguugcagugagcuaagaucaugccacugcacuccagccugggugacagagcaa

SEQ ID NO: 1996 - RNA, 76 nt, Human
uugcuugaacccaggaggcggagauugcagugagccaagaucacuccacugcacuccagccugggcaacagagcaa

SEQ ID NO: 1997 - RNA, 96 nt, Human
uuggaaggaaagcaaguauauagaucaagcuguauuaaaaugaaagugcagagauagucuuagaaugagaauauaaagugcuuuuuuuaaauccaa

SEQ ID NO: 1998 - RNA, 72 nt, Human
uuggaagugggaaguugagucgaauuagggcuccuaaucaucugagcuaucuaauuuuuaucccccuuucag

SEQ ID NO: 1999 - RNA, 103 nt, Human
uuggacaacugccccuuccaugaccagccacaucugaaaaggaaagcauucugcucuuuccagaucuacgcugugccuuggagggcacaaugaacuugucgaa

SEQ ID NO: 2000 - RNA, 70 nt, Human
uuggacaccacaaauuguggguauugucaaauauugcuggauccuguacccauguuaugugacucuccaa

SEQ ID NO: 2001 - RNA, 80 nt, Human
uuggauauaagccagaaguagaauugcugauuaauaggguuuauguguguucagcauuaguagauucugcccauguccaa

SEQ ID NO: 2002 - RNA, 72 nt, Human
uuggauguucacugccaguugucucaugugaaaaauuaacuuuuuuguggcaauuagugugacaguuuccaa

SEQ ID NO: 2003 - RNA, 74 nt, Human
uuggccaguuggcguaauaccgaagaggccugaaccgaucgccuuuuccaacaguugcgcaaccugauagccaa

SEQ ID NO: 2004 - RNA, 61 nt, Human
uuggcccugugucuuugucauggcacaaaggugugcacugcgugacaaugacccaagccag

SEQ ID NO: 2005 - RNA, 88 nt, Human
uuggcgaugcugucggggauucugcugggcaacugggcacccugcccgccaccauccucaccagucucuucaccgacagcuuagucaa

SEQ ID NO: 2006 - RNA, 73 nt, Human
uuggcucugcguuuauagucucaaggacaaagacuuugucuuuguucucaaggacuaucagccaugagauuga

SEQ ID NO: 2007 - RNA, 106 nt, Human
uuggcuguaacacuggagcccuuggccacuuagaaggccugaguuuuuuuauauuuuccaccaagcugcugauucuaaacuguggugggguucuuucaauggccga

SEQ ID NO: 2008 - RNA, 80 nt, Human
uugggaauaugcaugggaaugaggcuguuggacgagaacugcucauuuucuuggcccaguaccuaugcaacgaauaccag

SEQ ID NO: 2009 - RNA, 85 nt, Human
uugggauuuaacuuuuuuaaugggucugaaaauucugugacaaauuuuuggucaaguuguuuccauuaaaaaguacugauuuuaa

SEQ ID NO: 2010 - RNA, 74 nt, Human
uuggggacuuuugguaguuuaaacucuuuaaccuuuuccucgccguuuaugaguaaagcuaaagcuguuaucaa

SEQ ID NO: 2011 - RNA, 69 nt, Human
uugggguugaagaguuuauuuauugcucugcccccuuggcacagcaagcccaggcucuaccagcaacga

SEQ ID NO: 2012 - RNA, 104 nt, Human
uuggucacuuuuuacgugagcguauaaucccaagaucaguguuauauuuuacuggagaagcuauugaagaugaugaugaugauuaugaugaagaaggugaagaa

SEQ ID NO: 2013 - RNA, 113 nt, Human
uuggucauuaucuugagcagugaccauuacuagaucauguuaaauuagcgaaugcuguuacugaauacgcuaacccauguguugcugaugagucaacugacaauugugaccaa

SEQ ID NO: 2014 - RNA, 62 nt, Human
uuggucugcuagccuagagguuucaguuccaaagggaggaaugcuuccggcaggagacacaa

SEQ ID NO: 2015 - RNA, 86 nt, Human
uuggugaaguauuuuguuaccucagucuuguauucaaguugcuguauuuuuucagcuuguuacauugauaauaauuauuucaccaa

SEQ ID NO: 2016 - RNA, 73 nt, Human
uuggugcauguaauaauguugaguggcagucaaaagucaugauuuuuaucuuaguucuucauuacugcauuga

SEQ ID NO: 2017 - RNA, 97 nt, Human
uuggugcccagggagaaccccuuggauaucgccaggaugauccuagcuaucguucuuuucacucugguggauauggccaggaugccuuggguaugga

SEQ ID NO: 2018 - RNA, 77 nt, Human
uugguucccuuccagucucuucccccuuucuaucccaaucaccaauagaaaugcuaacaucccugccugguagccag

SEQ ID NO: 2019 - RNA, 74 nt, Human
uugguugggucuuguucggcuuucugugcuuuuuaaucagccauuuaccagcaacuguugcacgggcccaucag

SEQ ID NO: 2020 - RNA, 70 nt, Human
uugguuugguggcccugucugugaggaccaaauauugucucuauuucacagaugaggaaacugaagccaa

SEQ ID NO: 2021 - RNA, 87 nt, Human
uugugaagaaccaucgaaaccuguuuguucccagcccacccccaguggaugggaugcauaaugccagcaaguuuuguuuaacagcaa

SEQ ID NO: 2022 - RNA, 72 nt, Human
uuguggaacaugggccuuauguugucacaaguaacaugaccuugcgugacagagacuuccccuggaccacaa

SEQ ID NO: 2023 - RNA, 66 nt, Human
uugugggaagcagggaaacuggaucuugauauuccaguacaacauuauguucccgaauucccagaa

SEQ ID NO: 2024 - RNA, 105 nt, Human
uugugguccauggcgagcccaggccucagacaauggcugugguguugcucagacaugcacacagcucucuguaccuugagccaggucuccaccauggcaccacag

SEQ ID NO: 2025 - RNA, 87 nt, Human
uuguguaccgccugcugcgcucgcccaugugcgaguaccuggugaauuucuugcacaaguugcggcagcugccugagcgauacauga

SEQ ID NO: 2026 - RNA, 83 nt, Human
uuguguucugaaagccuccgugcugcuggaucuuuggggggaaauacaggauccuucagcacugagguguuuaagauuugcaa

SEQ ID NO: 2027 - RNA, 71 nt, Human
uuguuaaccuuguaagauggauaauguguauaagaauguaggccuuaacuauuucacaugagucaaaacaa

SEQ ID NO: 2028 - RNA, 68 nt, Human
uuguucuugcuuccaggcuuugcgcugcaaauccagugcuaccagugugaagaauuccagcugaacaa

SEQ ID NO: 2029 - RNA, 74 nt, Human
uuguuggauucuuauuggcaucacucaccagagaaggaaaaauggaugaugauucaagacaguggaagagacag

SEQ ID NO: 2030 - RNA, 60 nt, Human
uuguuugguauacuucauuuccagugaugggcuggucacugaugcugaggagccaggcag

SEQ ID NO: 2031 - RNA, 73 nt, Human
uuuagccuggguugccugugguuauauaauauggcaaaauucuacugaagacacaugguauaaaaugguaaaa

SEQ ID NO: 2032 - RNA, 77 nt, Human
uuuaguucacuuguuuuuccucuuuguguuaaggcuaucauucagagggcaaacaguucccgguguugugaauugaa

SEQ ID NO: 2033 - RNA, 92 nt, Human
uuuauggucuggugagaagaucccugcucugagucacugccaagcucuagcuaugugacuuugaacagggaauuucugucccuaucuauaaa

SEQ ID NO: 2034 - RNA, 71 nt, Human
uuuaugguuuuuuccacauuguccacaaucaugccaaccauuaauguggacaauguggaaaaaacccuaaa

SEQ ID NO: 2035 - RNA, 82 nt, Human
uuuauucaucuuccaugugccugcugagucucagacucccuuucuuuccaucagcucuggcagccucaucaagaugacugaa

SEQ ID NO: 2036 - RNA, 102 nt, Human
uuuauuuaguaaacauucuuugagucuacacuauguacagaugugcugcuauguaguagcaaagauucaggaugugcccucaaggaaugucugucaaguaag

SEQ ID NO: 2037 - RNA, 72 nt, Human
uuucacagacucuaagucguaaaacucuguuacaaaggaaaugauugagaaaaugaauucgagucuuugaaa

SEQ ID NO: 2038 - RNA, 69 nt, Human
uuucagguaggugaagcagagaaagaaggcagcauacgucagcauuuucuucucugcacuuauaaggaa

SEQ ID NO: 2039 - RNA, 80 nt, Human
uuucauuauuuuaugcugccucugcauaacuaauuuugauuucagggcuaggaggguggagguagggugaggaaaugaaa

SEQ ID NO: 2040 - RNA, 61 nt, Human
uuuccugcuuguauuggcguauaucguuccuccugagcagcaacccacaguagguaggaaa

SEQ ID NO: 2041 - RNA, 94 nt, Human
uuucgaguuuuuauagguuggugcaaaagugauugugguuugcauugagaauaauggagaagacgaauauuuggacaacuguauauaaauggaa

SEQ ID NO: 2042 - RNA, 82 nt, Human
uuucguuaguuuaaauccuugagggguacagcaucacucggauucuguguccaauggccuuagcaggaagauugcuucggaa

SEQ ID NO: 2043 - RNA, 60 nt, Human
uuucuaaccaucacaauucagugaaguacaaaacacugaguuacaggcugugggaagaga

SEQ ID NO: 2044 - RNA, 107 nt, Human
uuucuagugcauuaagccugagccauauucucacaugcaagugaagucauuaaagaacuuuacauaugugagauagaaacaaugguuccuuaguuuugcacugggaa

SEQ ID NO: 2045 - RNA, 82 nt, Human
uuucuauugaagccuaagcuuugaaugaagacaugcuucugaaaauaaagcagguuuucucuagucugcuuauuaauagaaa

SEQ ID NO: 2046 - RNA, 85 nt, Human
uuucucuaugaaucucaucagacucuggcgagacuuuugaauucauaaccaagccaacaucuccagacauguaaaaauagggaaa

SEQ ID NO: 2047 - RNA, 74 nt, Human
uuucucugacgauuagugaugcugagcauauuuucacauguuugucggccacugguacgucuucuuuugagaag

SEQ ID NO: 2048 - RNA, 60 nt, Human
uuucugcauagacucacuuguuaaauagcaguucuguugagaguggaguuacugcaggga

SEQ ID NO: 2049 - RNA, 61 nt, Human
uuucugucaagaagcaguuugaagaauuaacccuuggugaauuuuugaaacuggacagaga

SEQ ID NO: 2050 - RNA, 73 nt, Human
uuucugugacagucacugcccucaggcuuggccuguccugauaggcugggugguagugcaucuuccauagggg

SEQ ID NO: 2051 - RNA, 71 nt, Human
uuucuucaguuccaacaaaaggucugucaucugauaacaaaccuaugguuaacuuggauaagcugaaggaa

SEQ ID NO: 2052 - RNA, 94 nt, Human
uuucuugccuagagaacacacaugggcuuuggagcccgacagaccugggcuugaaucccggcucguguucuugcugcaggaccugggcaagaaa

SEQ ID NO: 2053 - RNA, 101 nt, Human
uuugaacuuguccccugaauagcuacagguuuuggaagcugaaucaauguuaucagaugaguuagaauccaaaccagagcuccugguacaguuuguucaga

SEQ ID NO: 2054 - RNA, 92 nt, Human
uuugagauuuuauugaguacuacuaaucuugacauauuuugguuggcaccacauucuugguauaguggguuagugguugaauaguuugcaga

SEQ ID NO: 2055 - RNA, 61 nt, Human
uuugaggcccguuuagauaccauggcagagacaaacagcauaucuuuaaauggaccuuuga

SEQ ID NO: 2056 - RNA, 78 nt, Human
uuugauuaguugugugucugccugaaaccauuuaguagagcacuuuaauucugcaugguuuuuacaaaacucauuaaa

SEQ ID NO: 2057 - RNA, 62 nt, Human
uuugcggauguccacgucacacuucaugauggaguugaagguggucucguggaugccgcaag

SEQ ID NO: 2058 - RNA, 72 nt, Human
uuuggaaggccuuucaaaagccucaccugggaacauugggaauugguuaauuuuuugaugaggucauccgga

SEQ ID NO: 2059 - RNA, 86 nt, Human
uuuggaaggcugaagcggguagaucaccugaggccaggaguucgaaaccagccuggccaacauggugaaaccccgucccuacuaaa

SEQ ID NO: 2060 - RNA, 80 nt, Human
uuuggauugaggcugcugugcacaggaauauggguauuuccucuuauuccuuacuccacugcaccuaaucaauaaccaag

SEQ ID NO: 2061 - RNA, 70 nt, Human
uuuggcuuaacauucaagcaccuggaauaaagaucucccgggguuucguuguugcacaaaaucagccaaa

SEQ ID NO: 2062 - RNA, 61 nt, Human
uuugggggguuuggccaaacuuuuuauuuaauauucuggaguugguuaacacacacuuaaa

SEQ ID NO: 2063 - RNA, 72 nt, Human
uuuggguggaugcugcucucgaauaagucggacaucuucuacucuuuguucgaaggugcggcgcugcuugaa

SEQ ID NO: 2064 - RNA, 75 nt, Human
uuuguacaguuuaaacaacagcugaaagaacuaaagaagcaauguggucuucaagcugacagagaagcugacgga

SEQ ID NO: 2065 - RNA, 111 nt, Human
uuuguauuuuuaguagaaacggggguuucuccauguuggucaggcuggucucgaacucccgaccucaggugauccaccugccuuggccucccaaagugcugggauuacaga

SEQ ID NO: 2066 - RNA, 108 nt, Human
uuugugaagaugauugggaaaucaaauaaguaaaaacgcugggucaaaacuuuaaaaauuuuggcuacuuuaagguuuuucuuugccuuuuucagucugcuuuacaag

SEQ ID NO: 2067 - RNA, 82 nt, Human
uuuguggggacauuggucugucggugccaguacauccuccuccaugaugacuucccuauggacaaccucaucucccugcuca

SEQ ID NO: 2068 - RNA, 77 nt, Human
uuuguucauaaucccaaacaagggcccugcuggcagcaacaggacagguggggccaggacagggaagcuggagcagg

SEQ ID NO: 2069 - RNA, 84 nt, Human
uuuguuucacugcguucaauuuugaguuuccuaacauccauucuacaggucaaucaaaauacaaaggcgugcaaaugaaacaag

SEQ ID NO: 2070 - RNA, 82 nt, Human
uuuguuuucggccacaaugaguccuuuagugccauuguggacucacaaugcacauggacaucaggcugugaaugaagacaga

SEQ ID NO: 2071 - RNA, 84 nt, Human
uuuuaaagaagaagaccauuuuacuuaugauguucaggaaaucuaugauuuccuacaaccaguaagguucuuacauuuuuaaaa

SEQ ID NO: 2072 - RNA, 83 nt, Human
uuuuaauagcuuaagauuuuaagagaaaauaugaagacuuagaagaguagcaugaggaaggaaaagauaaaagguuucuaaaa

SEQ ID NO: 2073 - RNA, 86 nt, Human
uuuuagaaaagaauaugacauuuuauuuucacuuauggacauacaguacaugaauuuagaaauaaaaucgucgcaggauucugaaa

SEQ ID NO: 2074 - RNA, 89 nt, Human
uuuuagcauggcuuguaauagcaaacaguuuguaauagcaaugacguguuauuuauugcagcauuguuuguaauagcaaaauacuggaa

SEQ ID NO: 2075 - RNA, 75 nt, Human
uuuuauaauccuacucacaaaugacuagcuucuccucuuguauuuugaagcagugugggugcuggauugauaaaa

SEQ ID NO: 2076 - RNA, 73 nt, Human
uuuuaugucaccaguugguccucaucaaauaaaauuuccuuaggagugcagagggcucauugggaaaauaaaa

SEQ ID NO: 2077 - RNA, 78 nt, Human
uuuucaauugacucacuggauaucuugguaugugaaucagaggauaaagagacuauuguuccaugucagaauugaaaa

SEQ ID NO: 2078 - RNA, 61 nt, Human
uuuucaggugaagagugagguugucauggccucagcuaugcuuccuggcucucccucaaga

SEQ ID NO: 2079 - RNA, 69 nt, Human
uuuucccccaucccccuccaaagucuugauagccaagcguuauuuugggggguaggaaacgggugaaaa

SEQ ID NO: 2080 - RNA, 66 nt, Human
uuuuccuuauccaauguacucacgggauuauguuuauguucggcgguauaguguggaucaggaaaa

SEQ ID NO: 2081 - RNA, 73 nt, Human
uuuucgaaugaaugacaacuuuauuuuucuuacacuuuuaaggcugaugaaaaaccuucauuucaauugaaaa

SEQ ID NO: 2082 - RNA, 72 nt, Human
uuuucucugguuccucucugcagucuccuuucagccugcuucaggaaugagcuuguggagccccggagagaa

SEQ ID NO: 2083 - RNA, 72 nt, Human
uuuugggaagggggaccugcuguuuggccaauuuauccuacaggucuuggacggugggaccucuucagagaa

SEQ ID NO: 2084 - RNA, 65 nt, Human
uuuugggggcucuggguguggcgguugccguagcugaaauggcugcaccaugucggccuucgaga

SEQ ID NO: 2085 - RNA, 84 nt, Human
uuuugggggucggcagcaaguuuuauuugcaaagcagcauuagcaaacagaagcaauugcaccguaaaugaguaaccucuaaag

SEQ ID NO: 2086 - RNA, 103 nt, Human
uuuugguacuuucaguagagacgggguuucaccguguuagccgggauggucucgaucuccugacuucgugaucugcccgccucguccucccaaagugcuggga

SEQ ID NO: 2087 - RNA, 80 nt, Human
uuuuguuuacaagauugauuuaauaugagaggauacaaaaugucaucguuauccucucuuaugaacaacuguagucaaaa

SEQ ID NO: 2088 - RNA, 80 nt, Human
uuuuucauuuccuuaccuccuugccauaaucuuaacaaguaacaguaaaguauauggcaaggagguaaggaaaugaaaaa

SEQ ID NO: 2089 - RNA, 75 nt, Human
uuuuucgaaugaaugacaacuuuauuuuucuuacacuuuuaaggcugaugaaaaaccuucauuucaauugaaaag

SEQ ID NO: 2090 - RNA, 97 nt, Human
uuuuucuacuccaaaucuuucgucaaacacaguuucgagauuguugcuauggcuuguauuaaucuugcaucaaaaaucgaagaagcaccuagaagaa

SEQ ID NO: 2091 - RNA, 109 nt, Human
uuuuugaugagaaugagcuugagcugcugaugugugggacuggagacaucagugugucugacuucaaagcccaugcaguaguuguugguggcucauggcauuucagaga

SEQ ID NO: 2092 - RNA, 90 nt, Human
uuuuuggggaaaauuguucuguuuguuuuaauuaaaccgacugaagaagccaagacacagauggaaagagacuaagaacaagacuggaaa

SEQ ID NO: 2093 - RNA, 90 nt, Human
uuuuuucacugggacaguugcuuuuauuaucuucauuuacaaaugaaacuguggaacagaaaguaauauggccaauuauuaguggagaaa

SEQ ID NO: 2094 - RNA, 71 nt, Human
uuuuuucaugcauuacugcguuuauuucucucuaaaaccuuaugaaguaaaaacuaacuagcaaggggaaa

SEQ ID NO: 2095 - RNA, 106 nt, Human
uuuuuuccuuuuucuguaggccgccuuaagcuuucuaaauuuggaacaucuaagcaagcugaagggaaaaggggguuucgcaaaaucacucgggggaagggaaagg

SEQ ID NO: 2096 - RNA, 86 nt, Human
uuuuuucuaaaugggaaaaggguuaauaagggcuuauguucauucuuguauugcucucuaaacuuuguuccuugucacagaagaaa

SEQ ID NO: 2097 - RNA, 91 nt, Human
uuuuuugauucagcuuauacccgggcugaaaaccucaauuuauguucaugacagugggguuuucagcccggguauaagcugaaucaaaaaa

SEQ ID NO: 2098 - RNA, 73 nt, Human
uuuuuugcuuucaggaaagguuuauuguggugagugccuucuguacagucgacugcaaaugaaacgcagagga

SEQ ID NO: 2099 - RNA, 86 nt, Human
uuuuuuguagagacggggccuugccauguuacccaggcugguuuugaaccugggaaacauagggagacccugucucuauuguaaaa

SEQ ID NO: 2100 - RNA, 76 nt, Human
uuuuuuugagacggugucucacucugucgcccaggcuagagcgcaguggcaagagcgagacuccaucucaaaaaaa

SEQ ID NO: 2101 - RNA, 110 nt, Human
gaccacuguaaucccagcgcccaaggaaggccacuucucaacuggcagaacuucugaaguuuagaauuggaauuacuuccuuacuagugucuuuuggcuuaaauuuuguc

SEQ ID NO: 2102 - RNA, 68 nt, Human
gaccagacuuuuccagaagugccggacgucgggcagcgucuauaucaccuugaagaaguaugacgguc

SEQ ID NO: 2103 - RNA, 68 nt, Human
gaccagacuuuuccagaagugccggacgucgggcggcgucuauaucaccuugaagaaguaugacgguc

SEQ ID NO: 2104 - RNA, 64 nt, Human
gaccagccauccugguuuacaugggacgcaggaacugccguuuuaaagcugggcugaguugguc

SEQ ID NO: 2105 - RNA, 74 nt, Human
gacccagaaugagcguuauaaggcugccaugcggagggcauuccacauccgguugauagcucggcgccuggguu

SEQ ID NO: 2106 - RNA, 86 nt, Human
gaccgaccgcggcugccccaguugaugagcggcguguccccucugcagcgcugcaccccgugcggggcuuuggcugugacgcgguc

SEQ ID NO: 2107 - RNA, 114 nt, Human
gaccgccucuuccuugugucuccucugaucaucucccaugagaucaaccagaagagcccuuucugggagaugucucaggcucagcugcaucaggaagaguuugaaguugugguc

SEQ ID NO: 2108 - RNA, 67 nt, Human
gacgaaccuuggccgcaguccuugcgaacuguucgcaaaacagugcgggcugcggugggucagcguc

SEQ ID NO: 2109 - RNA, 71 nt, Human
gacgaauccuuaguacuguggaaaagagcagacagaaauauaaaccagcuucucucacaguggaauucguc

SEQ ID NO: 2110 - RNA, 72 nt, Human
gacgacuaauguuggcucccugccugcuaacacaacauccguucugcagcccaugggucaaagaguaauuuc

SEQ ID NO: 2111 - RNA, 82 nt, Human
gacgcugcuggccuuugccggguacucagggcuacuggcugggguggaagugagugcugggucaccccccauccgcaacguc

SEQ ID NO: 2112 - RNA, 67 nt, Human
gacggacaacccaucgugugaacuauagaguuugugaacaaauuuauauuggguucauaguggcguc

SEQ ID NO: 2113 - RNA, 88 nt, Human
gacggcaaauauucuggggugaaggaggucauaauggggaaacacuuuuuuuuccccuuuuuaacuuccugugcccaagcuugccuuc

SEQ ID NO: 2114 - RNA, 77 nt, Human
gacuauucaggcgcaguacaaguuggggcacugcauccuuuguggauggauuuccguugcuguguuccucacaaguc

SEQ ID NO: 2115 - RNA, 98 nt, Human
gacuauuugaaaagccaggaguaaauuacaagucuugacaauggugccaugucugccagucagggcaguguucugcugauggcacugauucaucaguc

SEQ ID NO: 2116 - RNA, 78 nt, Human
gacucauguuuauuagggagugagggagcacaaagggaggucuccuugcccuuguucuccuuaacacagcucagaguc

SEQ ID NO: 2117 - RNA, 70 nt, Human
gacuccccuuggugguauucgcccuccggaacccaaagacuuugguuucccggaagcugcccgggggguc

SEQ ID NO: 2118 - RNA, 66 nt, Human
gacuccggcccauuuaaacacaaaagagacccagaugggucucugaaagaccacagggccgggguc

SEQ ID NO: 2119 - RNA, 78 nt, Human
gacucucgccggccgcgcgaacccguuugagcucgguauccuagugcacacgccuugcaagcgacggcgccaugaguc

SEQ ID NO: 2120 - RNA, 82 nt, Human
gacugaaggaggaauaucagucccuuauccgguauguggagaacaacaagaaugcugacaacgauugguuccgacuggaguc

SEQ ID NO: 2121 - RNA, 77 nt, Human
gacugacaacugugagacaugcacuugcuacgaaacagaaauuucauguugcacccuuguuucuacaccuguggguu

SEQ ID NO: 2122 - RNA, 86 nt, Human
gacugacagaggaccuuguugcaccucguggcugcuuuguucacccgcagggcggccugugggcaccccgggguuccccuucaguc

SEQ ID NO: 2123 - RNA, 74 nt, Human
gacugcgggacggacgguggacgcugggacgcguuuguagcuccggccccgccguuccgacccccgccgccguc

SEQ ID NO: 2124 - RNA, 76 nt, Human
gacuguagacacaaacuguguaacuuccaugagccauuuccuuccugugcacauguauguguguuauuuuucaguc

SEQ ID NO: 2125 - RNA, 95 nt, Human
gacugugguuuuauugguaaagauauaagacauauuggcucuauuaaaaacucagguaauaaagcacuaagguugauuuuuguauugcuacaguc

SEQ ID NO: 2126 - RNA, 72 nt, Human
gacuuauuucuucuuggacacacccacggugcggccacggcggccaguggucuugucgaagaggaagugguc

SEQ ID NO: 2127 - RNA, 77 nt, Human
gacuucuccuguccauccccuuggcccccucuccucuaguccaugagauuacagcuuugcacacugacaggaggguc

SEQ ID NO: 2128 - RNA, 92 nt, Human
gacuugucguggccccggucugacuugucguggccccugucuaguuucucauggcugcgguccgacuugucauggccccuguccgacuuguc

SEQ ID NO: 2129 - RNA, 99 nt, Human
gacuuugacaguuucaucugcugcuucguuaggcuggagggcauguucagagcuuuucaugcauuugacaaggauggcagauggguaucaucaaagcuc

SEQ ID NO: 2130 - RNA, 64 nt, Human
gacuuugcuuccgguacaaacaggccaccugagcacuggugguggccugcuccggcugcuuguc

SEQ ID NO: 2131 - RNA, 93 nt, Human
gacuuuguuggaaggggaggcggggagagagugcuggaggcucuggggcgauggcuuccgcaccucuuccaaccacccucuuucccuggaguc

SEQ ID NO: 2132 - RNA, 76 nt, Human
gagaaacaaggcgaggaggaggaugcagaaaucauugucaagaucuuuguggaguuuuccauagccucugagacuc

SEQ ID NO: 2133 - RNA, 97 nt, Human
gagaaaccacacuggaguaagguaagcuguccuggagagcuggaagcuuuacuugaaucgggugcuuuguuuuuggcagucuuuauuccuguggcuc

SEQ ID NO: 2134 - RNA, 63 nt, Human
gagaaagauuguccuucaggggacaugacaucaauagguuucuggaaugagggacucuuucuc

SEQ ID NO: 2135 - RNA, 75 nt, Human
gagaaaguugucuuuuguaaugcugaauaugaaccacucccuuucuguucaggugcuccagaagccccaauucuc

SEQ ID NO: 2136 - RNA, 78 nt, Human
gagaacauaaggucuugugcaagaggaggccucgcucuucuguuccuucucggcaccaccuggaucuuugggguucuc

SEQ ID NO: 2137 - RNA, 81 nt, Human
gagaacuaggcacuuaggaaugugucuguugccugggaaaccacaccuggcacagagacaguccugagaucccuggcacuc

SEQ ID NO: 2138 - RNA, 97 nt, Human
gagaacugccagugcaggaaagccaggggacgccgugguggcaggaagcucuuugccccacacagauucugcauggccccugcaacugacggaccuc

SEQ ID NO: 2139 - RNA, 82 nt, Human
gagaagguccccuucaccaagguccaggagccauucuagaaacucugauaagucgucuucugaccggucaagggcgcuccuc

SEQ ID NO: 2140 - RNA, 89 nt, Human
gagaaucacuugaacccgggagguggagguugcagugagccaagaucgugccauugcacuccagccuggugacaaagcaagacugucuc

SEQ ID NO: 2141 - RNA, 86 nt, Human
gagaaucgcuugaacccaggagguggagguugcagugagccaagaucgcgccacugcacuccagccugggcgacagagugagauuc

SEQ ID NO: 2142 - RNA, 85 nt, Human
gagaaucgcuugaaccuggaggcggagguugcagugagcagagauugcaccauugcacuccagccugggcaacagagcgagacuc

SEQ ID NO: 2143 - RNA, 78 nt, Human
gagaaugcaaaauucacuuacauuuuaaagacagaacacacuucaugucagugguaggcugauucugauuuugcucuc

SEQ ID NO: 2144 - RNA, 86 nt, Human
gagaauugcuuaaaccuggaggcugagguugcaguaagccaagauugugccacugcacuccagccugggugacaaaagcaagacuc

SEQ ID NO: 2145 - RNA, 74 nt, Human
gagacaagguuucaccauguugcccggguugaucucaaacuccugggcucaagugaucuacccaccuuggccuc

SEQ ID NO: 2146 - RNA, 99 nt, Human
gagacagacucucacugugucgcccagguuggagugcaguggcgugaucuccacuuacugcaaccucugccucccggguucaagugauucuccugccuc

SEQ ID NO: 2147 - RNA, 89 nt, Human
gagacagggucucacucuguugcccaggcuggaggcgugaccuuggcucacugcacucuagccuaggugacagagcaagacucugucuc

SEQ ID NO: 2148 - RNA, 90 nt, Human
gagacagucucucucugucacccaggcuggugugcaguggcgugaucucggcucacugcaaccucugccuccuggguucaagcgauucuc

SEQ ID NO: 2149 - RNA, 103 nt, Human
gagacagugguagaguacaaaguggaggaauuacugucuagaaagcaccauuuccagcacucagcacgagguggucuuucccuccacaccugccaccaaccuc

SEQ ID NO: 2150 - RNA, 95 nt, Human
gagaccagcuuggccaacauggugaaaccccaucucuacuaaaaauacaaaaauuagcugagcaugguggugcgcgccuguaauccaagcuacuc

SEQ ID NO: 2151 - RNA, 69 nt, Human
gagaccuuguaucaaucagcugacuguucugaugccaaugaugccuugauaguguugauacaucuucuc

SEQ ID NO: 2152 - RNA, 66 nt, Human
gagacgggguuucaccauguuggucaggauggucucgaucuccugacuuugugaucugcccaccuc

SEQ ID NO: 2153 - RNA, 71 nt, Human
gagacucuuccaggucaaagggcuggcgugugguccgugccaccgagguaccuguguccugggagagcuuc

SEQ ID NO: 2154 - RNA, 75 nt, Human
gagacugcgggcccagcguuccauguccuuggcaaucuguugagcugucuuggucuugugcuucuccuucuucuc

SEQ ID NO: 2155 - RNA, 77 nt, Human
gagacuggauggcuuuucauugacaugguagagaggaaauggaucaaauccaccaaugaaaucaaagcuguccucuu

SEQ ID NO: 2156 - RNA, 75 nt, Human
gagagacuacuugauauaauuuugauuuucuuaaauuuauuaagaguuguuuuguguccuaucauauggucuauc

SEQ ID NO: 2157 - RNA, 79 nt, Human
gagagagagagauuggaagagagauggggagagacugacucagaucccucuccugucugcuucuuuuucugguucucuc

SEQ ID NO: 2158 - RNA, 87 nt, Human
gagagauuaagagcuguucucuggaguuccaaucccaccuuuaccguuuaauagcugugugacuuuagguaaguuacuuaaccucuc

SEQ ID NO: 2159 - RNA, 100 nt, Human
gagagccaguaccuuuacauaaagcguuguaauacacagguuagcccagcagggcauucccaugaccucagauguuuaucaggugaagccaguggcucuc

SEQ ID NO: 2160 - RNA, 106 nt, Human
gagagcuggagucucgcucugucacccaggcuggagugcaguggugcgaucuuggcucacugcaaccuccaccuuuguguucaagcaauucuccuuccucagccuc

SEQ ID NO: 2161 - RNA, 76 nt, Human
gagagguaagccaagcucucaggagggacaaagauagauuucuaucuucagugcucuugggggauguuugcuccuc

SEQ ID NO: 2162 - RNA, 82 nt, Human
gagagguuuagucaagaauaccaaagcccaugucaucaucagacuccucggauucuucuuucuuugcuuccacuugcuucuc

SEQ ID NO: 2163 - RNA, 80 nt, Human
gagauaggcuguagcccaggcuggagagcaguggcucgauuguagcucacugcacccucaaacuccugggcuccugucuc

SEQ ID NO: 2164 - RNA, 92 nt, Human
gagaucaaaggggaaugggacuaagacugcagagcccuggcucccccacugccugccaauugccugcgguuuguggucucuuccacuuucuc

SEQ ID NO: 2165 - RNA, 85 nt, Human
gagaugagggggcacauuuaaaucuguguauguccagaguccgugaggauugggaaucagucuaaagcugugcucgcuucuccuc

SEQ ID NO: 2166 - RNA, 79 nt, Human
gagaugcaguuaaaauucuagaauaauuaaaagccacaaagugaaacuguuguucuggggcccuauguuguagauucuc

SEQ ID NO: 2167 - RNA, 98 nt, Human
gagauggagucucacucugccaccaggcuagaggucaguggugugaucuuggcucacugcaaccucugccucccggguucaagcgauucuccugccuc

SEQ ID NO: 2168 - RNA, 68 nt, Human
gagauggggucucgcuguguugcccaggcuggucuugaacuccugggcucaagcaauccacccaucuc

SEQ ID NO: 2169 - RNA, 68 nt, Human
gagaugggguuucaccauguuggccaggcucgucucgaacuccugacuucaggugauccacccaucuc

SEQ ID NO: 2170 - RNA, 65 nt, Human
gagauggguuucaccauguuggucaggcuggucucgaacuccugaccucaugauccgcccaccuc

SEQ ID NO: 2171 - RNA, 76 nt, Human
gagauguccucuauucuugaagagcguauucuuggagcugauaccucugaugaucuugaagaaagcugggcguguc

SEQ ID NO: 2172 - RNA, 92 nt, Human
gagauguggccgagacugcgcuggcauccagcaggucgcugggugacuucugggcagcuggcuugccugcgaguaucucucuguuauuccuc

SEQ ID NO: 2173 - RNA, 81 nt, Human
gagauuuuguauugguacugcguucuguguuuuaaaccuuggcuuaagauuucugaauagucgguaaaauacauuuuucuc

SEQ ID NO: 2174 - RNA, 87 nt, Human
gagcaccuaggaggcaguccaggcucuuuagcaugguguuggaagcccuuaaugaucugcuacagccugggccuccagccuccucuc

SEQ ID NO: 2175 - RNA, 90 nt, Human
gagcacgggcucaugugacaccagccccgacaccgucucgcccucccugagccccggcuucgaggaccugucccaugugcagccugucuc

SEQ ID NO: 2176 - RNA, 73 nt, Human
gagcacuguaggcuuuagucccuggaauuaauaacuucuguuagugagcuccagggcuggggcucacaggcuc

SEQ ID NO: 2177 - RNA, 109 nt, Human
gagcagcgauggaccauguagugcaugggcagugugcgacauccugcucucucacauaccguaucgauagcgcaaccuucucacacuacaaauuggcgaucugcuccuc

SEQ ID NO: 2178 - RNA, 71 nt, Human
gagcaggaggauucagauucgaaacaucccuccucacgugcagugggaggugucggauggacuuuuggcuc

SEQ ID NO: 2179 - RNA, 72 nt, Human
gagcaucucaagggggccuuauucaauucuagguaacuagccaggugugaaagaaagggcccagggugucuc

SEQ ID NO: 2180 - RNA, 68 nt, Human
gagccagacucacagaguccccuggcccuggccauggcuccaguacaggguucucugaauugcugcuc

SEQ ID NO: 2181 - RNA, 72 nt, Human
gagcccagccaaucagcgccccggacugcaccagagccauggucggcagaagagcacugaucguacuggcuc

SEQ ID NO: 2182 - RNA, 73 nt, Human
gagcccgagaggaccggcgcucagcccgggucccacgcugccccgggcugcucugcgucggucccgcgcgcuc

SEQ ID NO: 2183 - RNA, 62 nt, Human
gagcccucugagaggcccagguccuagagcagcuucugccugggcugaggucuugggggcuu

SEQ ID NO: 2184 - RNA, 74 nt, Human
gagcggacauuuaggaacuggaugaacuccuuggguguuaacccucgagucaaucauuuguacagugacuuauc

SEQ ID NO: 2185 - RNA, 83 nt, Human
gagcgggcgugcauaugcgguggcgggugggguggaagggggagauccugcugcacuggccgccaaguaugaggggcgagcuc

SEQ ID NO: 2186 - RNA, 95 nt, Human
gagcuaucugagucacuagaugaggaggaggaagaugaugaugauuuaugccuuuucuuuucuucuuucuuaacuuuagauuugggaaucagcuc

SEQ ID NO: 2187 - RNA, 73 nt, Human
gagcucagugccuuaccuuugcagggccaggguccccguucuggccaguguuggcuagggacacuugcaguuc

SEQ ID NO: 2188 - RNA, 62 nt, Human
gagcuccgggccagggcugccgucgccgccgucggggagucagcccgccagcccgccagcuc

SEQ ID NO: 2189 - RNA, 89 nt, Human
gagcuccgguagcccgccgcuggaggagcuguucgcccggggcgggcccuugcggaccuuccucgagcgccaggcggggucugaagccc

SEQ ID NO: 2190 - RNA, 72 nt, Human
gagcugcugggucccucaucucccucaucuauuauagauugacuuacagcagggagagaaucucuuuagcuc

SEQ ID NO: 2191 - RNA, 71 nt, Human
gagcuggaggagcucacggugcagguggcccgggucuauaaugggcggcucaaggugcagcgccucugcuc

SEQ ID NO: 2192 - RNA, 98 nt, Human
gagcuggagucucgcucugucacccaggcuggagugcaguggugcgaucuuggcucacugcaaccuccaccuuuguguucaagcaauucuccuuccuc

SEQ ID NO: 2193 - RNA, 88 nt, Human
gagcuggcagguuggaugacacacugggaagcguauggggaaaacucugaacaauuccaaaaugcuucuaagaaccuguuugaagcuc

SEQ ID NO: 2194 - RNA, 67 nt, Human
gagcuggcuccugggcccacagcugugccugggaauaguccaggcugugcaugcagaggagcugcuc

SEQ ID NO: 2195 - RNA, 71 nt, Human
gagcuguaaauugcuuaaaucgcuuaaacuggagauuucagugagauuuuuagcaguagauuacuaagcuc

SEQ ID NO: 2196 - RNA, 123 nt, Human
gagcuguuuacaucaugagagaugugucuuuauaaauggauuaaucccauuauugcagaaaugguuuuguuaucaugggagggggucauuauaaaaagacaauuuugccaggugcaguggcuc

SEQ ID NO: 2197 - RNA, 96 nt, Human
gagcuguuugaagcuaccagucugagcccuauugacuauuuuuuucaggcucugaauagcucuagggaucucagcaggggugggaggaaacagcuc

SEQ ID NO: 2198 - RNA, 75 nt, Human
gagcuuaucauuuaaccagucccaaccccauaagugucgccuagcccagagggucggccugggggaaccgagcuc

SEQ ID NO: 2199 - RNA, 92 nt, Human
gagcuuucugggcagacuuggugaccuugccagcuccagcagccuucuuguccacuggcuuuggaugacacccaccggcaacugucuggcuc

SEQ ID NO: 2200 - RNA, 81 nt, Human
gaggaacacggccacugccaucaugagcagggcauugagguugaccacacgggcccagcucggguccucgcugauguccuc

SEQ ID NO: 2201 - RNA, 66 nt, Human
gaggaagcggaccgagcccgucgccuuggagcaugagcgcugcgccgccgcgggcucguccuccuc

SEQ ID NO: 2202 - RNA, 94 nt, Human
gaggaaggacuggagagccacuugaggucauauguuaagguauguaaaacacacuguucugaucacuuacaucuguggcucuccaguuuuccuu

SEQ ID NO: 2203 - RNA, 71 nt, Human
gaggaaugcagacucaguggagaaggaguuggaccagucaacaucucuguugucacaagcaguguuuccuc

SEQ ID NO: 2204 - RNA, 81 nt, Human
gaggaccaagacugacacagacucucuucuguuucccuuaucuccuuuccaaaguaagucugugaaucuacccugguccuu

SEQ ID NO: 2205 - RNA, 86 nt, Human
gaggaccagggugcaguuaguuccucguguuugaguucaaagauggagcgaggguggauauggugggaaggggcacacggguucuc

SEQ ID NO: 2206 - RNA, 71 nt, Human
gaggacgugggggcugcugcccaacacggaggcugggcuggccugguccgugggcucagguucucauccuc

SEQ ID NO: 2207 - RNA, 74 nt, Human
gaggacugaaccaggcaggcuggggugcagugaguccuccugccucuucucugaaaugccccugugucacccuc

SEQ ID NO: 2208 - RNA, 78 nt, Human
gaggagcggagcggcacagccucccacccucccggcugguguuagugcccggacggcgggcucugcgcuccgccccuc

SEQ ID NO: 2209 - RNA, 78 nt, Human
gaggagcggagcggcacagccucccacucucccggcugguguuagugcccggacggcgggcucugcgcuccgccccuc

SEQ ID NO: 2210 - RNA, 60 nt, Human
gaggaggcgauagacuuucuucguugcaaucccaaaaucuggaauguucauaguguccuc

SEQ ID NO: 2211 - RNA, 63 nt, Human
gaggaggcgggccgccugcucuuggagaacuacgaggaguaugcggcucgggcccgucugcuc

SEQ ID NO: 2212 - RNA, 76 nt, Human
gaggaguaugggguagagcaauggucugggccaaggaauggugagcuuagggucuuccucugacuccuuacuccuc

SEQ ID NO: 2213 - RNA, 80 nt, Human
gaggaucccuugugcuagguggaguggauggaugaucuaggcucacuacaaucuccaccucccagguucaagcgauucuc

SEQ ID NO: 2214 - RNA, 87 nt, Human
gaggcaacacagcaguuaagaauugagauaaagugccagucugccaguuagaauccugugucucacuauuuuaacacucugugccuc

SEQ ID NO: 2215 - RNA, 97 nt, Human
gaggcaggaaaaucgcuugaacccaaggcagagguugcagucagcagauauugcaccacugcacuccagccugggcaacaaagcaagacucugccuc

SEQ ID NO: 2216 - RNA, 101 nt, Human
gaggcaggagaaauugcuugaacccaggagguagagguugcagugagucaagaucaugccauugcacuccaaccugggcgacaagagcaaaacucugucuc

SEQ ID NO: 2217 - RNA, 100 nt, Human
gaggcaggagaaucucuugaacccgggaggcagagguugcagugagccgagaucaugccauugcacuccagccugggcaacaagagcgagacuccgucuc

SEQ ID NO: 2218 - RNA, 99 nt, Human
gaggcaggagaauggugugaacccaggaggcagagcuugcagugagccgagaucaagccacuguacuccauccugggugacagagcaagacuccaucuc

SEQ ID NO: 2219 - RNA, 99 nt, Human
gaggcaggagaaugguguuaacccaggaggcggagcuugcagugagccgagaucgcgccacugcacuccagccugggagacacagccagacuccgucuc

SEQ ID NO: 2220 - RNA, 100 nt, Human
gaggcaggagaauugcuugaacccaggaggcggagguugcggugaguugagaucgugccauugcacuccggccugggcaacaacagcaaaacuccgucuc

SEQ ID NO: 2221 - RNA, 100 nt, Human
gaggcaggagaauugcuugaaccugggaggcagaaguugcagugagcugagaucaugccauugcacucuagccugggcaacaagagcaaaacuccgucuc

SEQ ID NO: 2222 - RNA, 80 nt, Human
gaggcaucugcuagaaaacauucuauuguauaaaacccgaguucuuaaaaacauguuuucuuuggcacuuucauucccuc

SEQ ID NO: 2223 - RNA, 75 nt, Human
gaggcaugggggaugguccaaucauggccugcucuaguaacgcaucugccagguugagaauaucccagguggcuc

SEQ ID NO: 2224 - RNA, 104 nt, Human
gaggccacaaggacugcaugaucucgcagcugccuuccagaaacaacauuccagaaugcucuguuccccccuuccagcccaagagacugugcagaauaggccuc

SEQ ID NO: 2225 - RNA, 87 nt, Human
gaggccccugggcugguggacguaccuggugggcacccugagccucaggcccugugcccugguggcagcccccagcaccaggaccuc

SEQ ID NO: 2226 - RNA, 75 nt, Human
gaggcccuugcgccggcgaguguagggcuggcgcugccggacgcggugcuagucgccggaugaagugagggccuc

SEQ ID NO: 2227 - RNA, 70 nt, Human
gaggccgccaccggcaaggggugcgcgcuggggagcggacgcugcauccccuuucugcugcaggaaccuc

SEQ ID NO: 2228 - RNA, 77 nt, Human
gaggcggagcacgcacgcagcucaucgacgaccacauuccucuucgacaaagcccguguaccccugcugcuggccuc

SEQ ID NO: 2229 - RNA, 72 nt, Human
gaggcggagcuugcagugagccgagaucccgcacugcacuccagccugggcgacagagcgagacuccgucuc

SEQ ID NO: 2230 - RNA, 75 nt, Human
gaggcggagguuugcagugagccgagagcgugccauugcauuccagccugggcaacaagagcaaaacuccgucuc

SEQ ID NO: 2231 - RNA, 76 nt, Human
gaggcuaagucugggcagugggcuggccccuggugugagcauuagaccagccacagugccugauugguauagccuu

SEQ ID NO: 2232 - RNA, 75 nt, Human
gaggcugggaagugcaagaccaagauaugaacagauucauuaucugguacagauacccugcauauuuuuggccuc

SEQ ID NO: 2233 - RNA, 76 nt, Human
gaggcugucuucacgcugacccagaccugggggguguuuguguccuuacaggauguucaguuugcaaggaggcuuu

SEQ ID NO: 2234 - RNA, 87 nt, Human
gagggaaauaccuuggcaugcagcuccaguccgagcagccccaaaccgcugccgcccgaagcuaagccugccucuggccuuccccuc

SEQ ID NO: 2235 - RNA, 61 nt, Human
gagggaacccuaggucagaccuugguuuccuguuguucuucccaagacccaggguucccuc

SEQ ID NO: 2236 - RNA, 72 nt, Human
gagggacgcugcuucuccccugcccacgucuccaaggccugaaaggcaggguucuguggaacagcauuucuc

SEQ ID NO: 2237 - RNA, 62 nt, Human
gagggcccaggauuuuuggauccccagcccugugacaaggguuccuguccaguuucccccuc

SEQ ID NO: 2238 - RNA, 84 nt, Human
gagggcugucaccauuagcacucucggagcugggagaagucccugagcccugaaggguguuuugggcaguaugugacagugcuc

SEQ ID NO: 2239 - RNA, 71 nt, Human
gagggcuugaagacuucucagaagagacacucacuacuggaguuaaaguuauaugaagucccugagcccuu

SEQ ID NO: 2240 - RNA, 93 nt, Human
gaggggagauuaaagaaucaauguucccaggggaaaagggccuuaaauuguuuggucuuuucaauggcugacacugucuccaacucuccccuu

SEQ ID NO: 2241 - RNA, 74 nt, Human
gagggguccauacggcgucguucuggauucccgucguaacuuaaagggaaacuuucacaauguccggagcccuu

SEQ ID NO: 2242 - RNA, 78 nt, Human
gaggggugacaaguguguuugagcuggaagugccugcgcgcaggccuuuucucauggcaugaccuugacucaccuuuu

SEQ ID NO: 2243 - RNA, 76 nt, Human
gaggguacuguagaaucuuuauuaucucaacaaucuaaaaaaugauguuuauuuccuuaguuagauagugccacuu

SEQ ID NO: 2244 - RNA, 125 nt, Human
gagggucccugugguucugaugaggggagaucauccugcaugguggaggguccccgagguucugaugaggggagaccacuccauaugguggagggucucugcaguucugauaaugggagaucauc

SEQ ID NO: 2245 - RNA, 78 nt, Human
gaggguccgcauuaacagugagaggauaggguuuuuggcuggggacaguaagaccaucaucacugcgugaaaaccuuc

SEQ ID NO: 2246 - RNA, 92 nt, Human
gagggugucuauggagaggcggcggcgcggcugcugaggcggaggcugaggcaguggcgauggcgcccuuuccugaagaaguggacgucuuc

SEQ ID NO: 2247 - RNA, 87 nt, Human
gagguaaguuugaacccaggagggagagguuguggugagccaagauggcaccauugcacuccagccugggugacagagugagacuuc

SEQ ID NO: 2248 - RNA, 61 nt, Human
gagguacuagguuuugacaagcuugcaucaugcgugaguauaagcuagucguucuuggcuc

SEQ ID NO: 2249 - RNA, 85 nt, Human
gagguaggugcuuuaacugugugcacccugugagguaggugcuuuaacugugugcacauugugagguaggugcugaaacugcuuc

SEQ ID NO: 2250 - RNA, 62 nt, Human
gagguaucugcugcgccugagaugaguaaacugucguuucgggcgcgggcgcuagacgccuc

SEQ ID NO: 2251 - RNA, 68 nt, Human
gaggugccggugggccuguguugcugcgauuuuagucugugcugggaggcagggcuccgcugcgccuc

SEQ ID NO: 2252 - RNA, 88 nt, Human
gaggugccucaguggaggcgcugugucuccuacgcaacuucugagggcuggagggugccaagggcagcugcugaccgccuggugcuuc

SEQ ID NO: 2253 - RNA, 98 nt, Human
gaggugggaggauugcuuguuccccggagguugaagcuacagugagccuugauugugucacugcacuccagccugggcaacagguaagacucugucuc

SEQ ID NO: 2254 - RNA, 67 nt, Human
gagguggguggaucaccugaggucagguguucaagaccacccugaccaacauggugaaacccaucuc

SEQ ID NO: 2255 - RNA, 80 nt, Human
gagguggucuuauccagcucagcuuccccugggacccaccgugggaccugaggcagaacugggguggacuuggccuccuc

SEQ ID NO: 2256 - RNA, 80 nt, Human
gagguuggaagaaugacacgggcucaggacacagagugaggacucaugucuaaugagcaccggccaaaacuuccaucuuc

SEQ ID NO: 2257 - RNA, 81 nt, Human
gagguuggcccccugaggugugagugaaaugagcuuugcuuuauuuuccaaguuucucucucaccuucaggggcauucuuc

SEQ ID NO: 2258 - RNA, 68 nt, Human
gagguuuccaggcuagugguuucuuccucugaccacaguaagaggaaaggaagcuuugccuccaccuc

SEQ ID NO: 2259 - RNA, 82 nt, Human
gaguaaaaggaucugggcugcagucuaggcugagagaugccagcaaaggcugccuaggccagugcaguccaguaaaucccuc

SEQ ID NO: 2260 - RNA, 105 nt, Human
gaguaacaggugcuggagccagacuuccuggguucauauccugguucuaccaauuuaccagcugugugaacuuaggaaaauuccucuccgccucuuaguuuauuc

SEQ ID NO: 2261 - RNA, 104 nt, Human
gaguaaggggcagagcgcugccucucugcaggccgugugcuuugcucgguugaucuugcagagccuaagacacaggcccagagaggcagugaucgccaaagauc

SEQ ID NO: 2262 - RNA, 73 nt, Human
gaguaaugggauauccaauaaacugagaauguuucuucacaaucuccuuuauucuucguuccuccaaguacuc

SEQ ID NO: 2263 - RNA, 78 nt, Human
gagucagggauuuucugguuugagagacaaugacacacaccccuaaguucaccuucucucgaauaguaggcccugcuc

SEQ ID NO: 2264 - RNA, 84 nt, Human
gagucgcuugaaccugggagggggagguugcagugagcugagaucgugcuacugcauuccagccugggcaacagagcaagacuc

SEQ ID NO: 2265 - RNA, 76 nt, Human
gagucggugcuugguaccuggucucuccagucucaacagacucaggucaggucucucaaccaggaagcaaccacuc

SEQ ID NO: 2266 - RNA, 76 nt, Human
gagucggugcuugguaccuggucucuccagucucaacagacucaggucaggucucucacccaggaagcaaccacuc

SEQ ID NO: 2267 - RNA, 71 nt, Human
gagucuaaagguuggaguguggggguggugggggaucccccaccugggucuggacugcaugaggaagacuc

SEQ ID NO: 2268 - RNA, 83 nt, Human
gagucucacucugugguccagacuggaguauagugcuaucagagcuuacuacaacuuuaaacuucugggcucaggugauccuc

SEQ ID NO: 2269 - RNA, 76 nt, Human
gagucucuguugccuaggcuggagugcaguggugugaucuugguucacugcaacaccuccuggguucaagugauuc

SEQ ID NO: 2270 - RNA, 86 nt, Human
gagucuugccaugccggccaggcuggagugcagugcugugaucucggcucacugcaaccuccaccucccgggcuccagcaauccuc

SEQ ID NO: 2271 - RNA, 67 nt, Human
gagugaggaauguuuggguggcgucaagguugguaagcggcgcgcgccgcucgagcucucccgcauc

SEQ ID NO: 2272 - RNA, 66 nt, Human
gagugccucgcucgguaacugcuugguccugaacauucucucguuucaggaacugaugagguucuc

SEQ ID NO: 2273 - RNA, 79 nt, Human
gaguggagcggagcgggcuggugcuggggccgcggagaucgcugugcuggccccagccccaucaccgaaacacauacuc

SEQ ID NO: 2274 - RNA, 86 nt, Human
gaguggauuggauaugguuggaguggcacagacuggaucugggaaaacauugucuuauuugcuuccugccauuguccacaucacuc

SEQ ID NO: 2275 - RNA, 82 nt, Human
gagugggagcuacagccagcagccuagcuaugguggacagcagacaaagcuauggacaagcagcaaagcuauaaucccacuc

SEQ ID NO: 2276 - RNA, 76 nt, Human
gaguguccaauucuaggguauuucuccuugauaaaugauuuauuauugucacaaaagauaccaaauuuugauacuc

SEQ ID NO: 2277 - RNA, 89 nt, Human
gaguuagaguugagcuccccuguagcccaggacuaugcuguagauaucaguaugauccugggguguggcaaaaacaauuuucuuuauuc

SEQ ID NO: 2278 - RNA, 82 nt, Human
gaguuagcgguggguggaggagggggccuuggcaucuucucuuuaugucucugagcugugccuucgccaccccuucuggguc

SEQ ID NO: 2279 - RNA, 85 nt, Human
gaguugcgagggaggcugcgggggcgggcggacguauguugagacccuaugcagccuccugcucucccgagggcuccugcggcuc

SEQ ID NO: 2280 - RNA, 72 nt, Human
gaguugcugcagaggacaugacccccagcagaugucccguaggcaucaguccaguuauauccgcaguaucuc

SEQ ID NO: 2281 - RNA, 73 nt, Human
gaguuucauccuugugauaagaaauguguacuuggaacaagcuaaccugcuauuucccaccuuuaugaaacuc

SEQ ID NO: 2282 - RNA, 73 nt, Human
gaguuuuauuggguuuguugaaguaugacuugagaauaaugcauaccuggguucaaaccacaugcugaagcuc

SEQ ID NO: 2283 - RNA, 81 nt, Human
gaguuuucuucuaauguuuugugcuuaugaaaaccauuucuguguaacguguuuaaguagcuuauuuaucugaaagaacuc

SEQ ID NO: 2284 - RNA, 97 nt, Human
gauaagcugggggcacuggcuucugcucuugcucuuucuucuggaaacauuauucuguuccuuuggacaugggcaaggguccugucccuaacuuguc

SEQ ID NO: 2285 - RNA, 65 nt, Human
gauaaggaccuguuuggggcagcagggagcaaaaucuccuuuaacaaccaagcaguuccucauuc

SEQ ID NO: 2286 - RNA, 66 nt, Human
gauacaagacaggcaagaacaagugguucuuccagaaacugcgguuuuagaugcuuuguuuugauc

SEQ ID NO: 2287 - RNA, 78 nt, Human
gauacagccuugcucuguugcucaggcugaagugcacuggcgcaaucucccgucugggcgacagagcaagacucuguc

SEQ ID NO: 2288 - RNA, 67 nt, Human
gauacagccuuuucuuuaucuuauagcaggaaaaaaaaccuuuugagggaaauagaagggcugcguu

SEQ ID NO: 2289 - RNA, 66 nt, Human
gauacccucuuggccauccgggccccaucaggcaccagccuggaggugcccaucccagagggucuc

SEQ ID NO: 2290 - RNA, 93 nt, Human
gauacugcaaaagugagaaggagauaauagauacuuugcucugaauuuggcauccagaguuaacauuucuccccucacucccuugcugguguc

SEQ ID NO: 2291 - RNA, 85 nt, Human
gauagaucaguugcuauauuuucugguguagggucuuucuuauuuagugagaucuagggauaccacagaaaugguucagucuauc

SEQ ID NO: 2292 - RNA, 80 nt, Human
gauauauaaaucggggaaaauagaucauuuauugaagacauacuguacagaugaaaaugaucuguugacuccuuuguauc

SEQ ID NO: 2293 - RNA, 75 nt, Human
gauaucgaagagcuggagaccaaggccgugggaaugucuaacgauggccgcuuucucaaguuugacaucgaaauc

SEQ ID NO: 2294 - RNA, 81 nt, Human
gauauguugaaggguauuuguuaauuuuacuuuucaaagauacuuuaaaacaguagagcuagcaaugacaccuugcauuuc

SEQ ID NO: 2295 - RNA, 87 nt, Human
gauauguuucuacuagugguugauggccucuuucagcuccaucgcuauggaggcgagguucaucaauaacucagagaaacuuguguc

SEQ ID NO: 2296 - RNA, 71 nt, Human
gaucacucaggagcauguuauucaauuuucauguauuuacauuguuuugaagguuccuuuuggaguugauu

SEQ ID NO: 2297 - RNA, 63 nt, Human
gaucacucaugauguuucuuccaagaacugcaaagccaucuuggaagagcagcccaggugguc

SEQ ID NO: 2298 - RNA, 101 nt, Human
gaucagaagguugagacuccaacugggagagauguguuucugcugcucaaauauuucccaaguuugcaagacaucuccagccuuuggagugccuucugguu

SEQ ID NO: 2299 - RNA, 97 nt, Human
gaucaucagacagauggccacucaugugaaaauugauuugugcauaaauguaaggaauaugugcucucauuggguaaucucaucugcuuuggugguu

SEQ ID NO: 2300 - RNA, 75 nt, Human
gauccagcaggaagugcuggugaccccgggccgcaacgccgacgcccgugucgucaguucgucaaggugaagauc

SEQ ID NO: 2301 - RNA, 60 nt, Human
gauccucaagaugggcgaauccaacucggggcugagauguugaugcgcccacuugggcuc

SEQ ID NO: 2302 - RNA, 89 nt, Human
gauccucauguucacuacccuucaugcaugaaagacaaagcuacucagacaccuagcuguugggcagaagagggugcagaaaagagguc

SEQ ID NO: 2303 - RNA, 77 nt, Human
gauccugucacgaacacauuuagcacacauggaaccaccauaggcccugcugacauguuucuuuguuuuggacaauc

SEQ ID NO: 2304 - RNA, 91 nt, Human
gaucuaaagacaagcaccuagucuccuuguucucuguauaucuccauugcccagcuagaaggguggaaacaguugugccuguuccuggguu

SEQ ID NO: 2305 - RNA, 83 nt, Human
gaucuaacauccauuuauugagaaguuuccacuugcuguacacuuagauugcagccuuagauuuuauauuuggaucaaaguuc

SEQ ID NO: 2306 - RNA, 109 nt, Human
gaucucggcguugugcaugucgggcgacugcuccaugaucuugcgccgcucgaucugcgaccacaccaugaaggcguucaugggucgcuugaugugcccacucgggguc

SEQ ID NO: 2307 - RNA, 60 nt, Human
gaucuuucauuguuggauccccaaagccagugccuugggugagcagcaagucccaagauc

SEQ ID NO: 2308 - RNA, 115 nt, Human
gaugaagggagagagaggaggagagaggcaaguguuccaggcuagagaaauagagaccacgacccugaacuggagcauugacuuccuuucucucccuuucuccuuccuucccguc

SEQ ID NO: 2309 - RNA, 93 nt, Human
gaugaagucuugcucugucgcccaggcuggagugcaauggcgcgaucucggcucacugcaagcuccggcuugguaacagagcgagacuccauc

SEQ ID NO: 2310 - RNA, 85 nt, Human
gaugaauccuucaaauaggagccgauggaucugugguccuuugggacucaucaaagccuugguuuagcauuuugucaguuuuauc

SEQ ID NO: 2311 - RNA, 83 nt, Human
gaugacuguugggagagaagcugaggcagggcuugcaugucugcuagacuugcugguuccuugcuucuagcacuccuguuauc

SEQ ID NO: 2312 - RNA, 74 nt, Human
gaugaggggggaugcgaguaccuccaagaagaaaaaucacacucugaauggugcuugcauuuuaggguuucauu

SEQ ID NO: 2313 - RNA, 81 nt, Human
gaugaguggcuuuucgagggaccuggcacguacaucccccggaaggaaguggaggucguggagaucauucaggccaccauc

SEQ ID NO: 2314 - RNA, 79 nt, Human
gaugaucuucuacugaaaugccuaaagaagucacaggcuggcuucuguuuuauucagggauuuuuuuaaaaagucaauc

SEQ ID NO: 2315 - RNA, 78 nt, Human
gaugcacuuguccguucccauagccugcugcuaugauccccugccacagcugcacagaggggcacggaacuccaaauc

SEQ ID NO: 2316 - RNA, 61 nt, Human
gaugccuucaguuuggucagugucuaaaaguuaagucuguuuaggccaagcaugguggcuc

SEQ ID NO: 2317 - RNA, 80 nt, Human
gaugcuaugucagaacaccggaggcauuuucccaacuguccauuuuggaaaauucucuagaaacucugagguuuagcauu

SEQ ID NO: 2318 - RNA, 77 nt, Human
gaugcuggcaaagaucucacugaucccaaugagcagguacugagggaucugcaccagauggacaguggugccgcguu

SEQ ID NO: 2319 - RNA, 73 nt, Human
gauggaaaaaucagcucagaaaggccaauuacuucuuuaauagaucaguuuuuuugacauaauaacucacauc

SEQ ID NO: 2320 - RNA, 63 nt, Human
gauggaaaguucagcaagaucagcaacaaaaccaagaaaaaugauccuugcgugcugaauauc

SEQ ID NO: 2321 - RNA, 106 nt, Human
gauggauuauaagguagcaacccaagaaaguggguuuggacauucaaauacuugaguuuaaguccagaugugcaaacuugggcaaagccauuuaaccucauucauc

SEQ ID NO: 2322 - RNA, 65 nt, Human
gauggcccaggugcacccagaggccccagcccuuuggcugccuuuggguugugacuuggguuguc

SEQ ID NO: 2323 - RNA, 75 nt, Human
gauggcugucuccuucaccuaccgacaccuggcacucuucacagacacaggcuacaucuggauggggacagcauc

SEQ ID NO: 2324 - RNA, 73 nt, Human
gaugggaaugagccaccucagauguggagggcccugaagaauccauauaggagggcaggcucuucacucccuc

SEQ ID NO: 2325 - RNA, 60 nt, Human
gaugggauggaaaugaaauggccaaaagagcaaaggcuuauuucaaaaccuuugucccuc

SEQ ID NO: 2326 - RNA, 70 nt, Human
gaugggcgucccaguucccuuucccauuccugagccugaugguuguaagaguggaauuaacugcccuauc

SEQ ID NO: 2327 - RNA, 72 nt, Human
gaugggcugaagaaggagucagagcgggaucgggcaaugcuggcucucacauccacucucaacaaacucauc

SEQ ID NO: 2328 - RNA, 85 nt, Human
gauggucugaugcuacaggacuugguuucagcuaagcugauuucagauuacacuguuaccgagaucccugauaccauuaaugauc

SEQ ID NO: 2329 - RNA, 91 nt, Human
gaugguuuuagaugauaaccacaggucuacaagagcguuuuuaguaaagugccuguguucauuguggacaaaguuauuauuuugcaacauc

SEQ ID NO: 2330 - RNA, 93 nt, Human
gauguaccaacaguaccagcaacaggccggcuauggugcacagcagccgcaggcuccaccucagcagccucaacaguaugguauucaguauuc

SEQ ID NO: 2331 - RNA, 77 nt, Human
gauguaguggguuggugcaaaaguaauuggaguuuugccauuuuaaugcaauuacuuuugcaccaaucuaauauauc

SEQ ID NO: 2332 - RNA, 61 nt, Human
gaugucagucccaaggaccaguagcugccaucaguuuggauucugaaaacuaacuggcauc

SEQ ID NO: 2333 - RNA, 62 nt, Human
gauguccuuuuauaaaguugaggaacuucucuucuguuccuacuuugcugagagucuccauc

SEQ ID NO: 2334 - RNA, 82 nt, Human
gaugugaggaaaggaagugccaaaaaugccuggacagauggcuugucccaaggccaggacacacacuuuaaaauccaacauu

SEQ ID NO: 2335 - RNA, 65 nt, Human
gauguggaugguggccucacccagauugacaaguaccuguacuccucugaggacuacauuaaguc

SEQ ID NO: 2336 - RNA, 94 nt, Human
gauguguggccacccugaccgcuggcaugugcccagcgacguggccggaagccaugaucugcgucgauugccaauccgguuaauuccacgcauc

SEQ ID NO: 2337 - RNA, 77 nt, Human
gauuaaagggagacaauggugucuuggaggcaaacuacaguuugcuguaagauaacuuuccgugcaucuuuuaaauc

SEQ ID NO: 2338 - RNA, 63 nt, Human
gauuaaugcagguguuauagaagccagaagagaaacuguggcacccuaaagaagcauauaauc

SEQ ID NO: 2339 - RNA, 79 nt, Human
gauuaauuggauuugaggauaauuauuauuauuugguuuuuagauuugaaaaguagaauuuccauugagacaauugauu

SEQ ID NO: 2340 - RNA, 119 nt, Human
gauuacagaugugagccacugcacccagccuggauuuuggcucuuaaacauuaauacacacauaugaaaaggacacaggaaccagccagcaggaguuuccacuggccauaucugaaauc

SEQ ID NO: 2341 - RNA, 94 nt, Human
gauucaaagcaagaugguagcauuggagaggaugagauauggucagaugaggauauauuuuaaaaguugagcuaacaggauuugcugaggaauc

SEQ ID NO: 2342 - RNA, 90 nt, Human
gauucacaaccauuccacauuuguggggaagaucuggcucacuguucugauugucuuccggaucguccuuacagcuguaggaggagaauc

SEQ ID NO: 2343 - RNA, 107 nt, Human
gauuccuuuuaauccuauagcuuuguguguuugugugugcauguauguguguuguugugugugugugcacgugcuuuauucacaaauuuauaaggguuucuaggguc

SEQ ID NO: 2344 - RNA, 72 nt, Human
gauucgauucagcaaaugggaucaauauuucaccugaugauaaguauaucuauguugcugacauauuggauc

SEQ ID NO: 2345 - RNA, 64 nt, Human
gauugacacacagggggauggaguugguccuuguccauucucucacccuugcugugcauguauc

SEQ ID NO: 2346 - RNA, 63 nt, Human
gauuggcugcguuguuguaggccaacaugaugguggcaucuggcaaucaacuuaguagaaguc

SEQ ID NO: 2347 - RNA, 97 nt, Human
gauuguccacgccgucauucucuucaucuguauaaacuguggcugguucacuuuaacccugagcaggagcugccuaugaaagaggauggcuggaguc

SEQ ID NO: 2348 - RNA, 77 nt, Human
gauuuaguacaguuaugcucagaugaacacuggacccauguggcagggucaagcaacuagaacaugauucagaaauc

SEQ ID NO: 2349 - RNA, 61 nt, Human
gauuucaggucauuuuuagcccuagacuggaaaggggucaggggacaggugaccugggcuc

SEQ ID NO: 2350 - RNA, 78 nt, Human
gauuugguauuggacuugcaagucucuuuacagaaaauguauuggcacauccuugcauuguucuacgccgccaauguc

SEQ ID NO: 2351 - RNA, 103 nt, Human
gauuuucaguacuguaguugcccuggacauugaguacaguucagccuuacucuguuuuuaaguaguuguguugucaauuucaugcuuuuaaguccugaugauc

SEQ ID NO: 2352 - RNA, 85 nt, Human
gauuuugcucucagaaccccuucccccuucaucaugccccucugcuuuaggguuacgcuaguggaaaaauuugagcagcaaacuc

SEQ ID NO: 2353 - RNA, 86 nt, Human
gcaaaaaaagugagggagauagugaggggagggcacgcuugucuucucagguaucuuccccagcauugcucccuuacuuaguaugc

SEQ ID NO: 2354 - RNA, 72 nt, Human
gcaaaauauauuuauuucuaggauauaaugauuuagugacuagcuaaaagugguuuuaaauggacguuuugc

SEQ ID NO: 2355 - RNA, 78 nt, Human
gcaaagcaaaaggccacagagggcucccugagaauccaguacacuaagcgaggccuucacuggucaagacaacuuugc

SEQ ID NO: 2356 - RNA, 106 nt, Human
gcaaaggaaguggcuuaaugauccugaagggauuucuucugaugguagcuuuuuguauuaucacguaagauucuauuuucaguuguguguaagccaguuuuuuagu

SEQ ID NO: 2357 - RNA, 81 nt, Human
gcaaauacuuuugaccucuugugaugagucagaacuaaaacuuaauucuuugacuuucacauuuuuuaaaaaguguauugc

SEQ ID NO: 2358 - RNA, 71 nt, Human
gcaacccagcucuuuuaucaugaggagagguagccaugcugacucaugaacagguggaggaaagggguagc

SEQ ID NO: 2359 - RNA, 76 nt, Human
gcaaccucugaagauggaacagucauugcucaggcugaguauggcaguaguggauauaaggaggacagaggguugc

SEQ ID NO: 2360 - RNA, 90 nt, Human
gcaaccuucccccaacuauaggaaauggauauaauugaagcaugauuuguguugggucauguuuuucacucaccuccuuagugaagaugc

SEQ ID NO: 2361 - RNA, 85 nt, Human
gcaagaaacgugugcuaaagacugagguuccuuggaaacaugcugaaaauucuguucucaagggugucagaaccauacguacugc

SEQ ID NO: 2362 - RNA, 110 nt, Human
gcaagacgaccguuucauauuucuuucaaauaacucaagauaagugcuuagucauagucaaguuuguggauuggguuacucuuaagggaguugagaccuuacuaaauagc

SEQ ID NO: 2363 - RNA, 73 nt, Human
gcaaggaaauuacaguuagaggucacaacugcccgaagccaguucuaaauuuuuaugaagccaauuucccugc

SEQ ID NO: 2364 - RNA, 74 nt, Human
gcaagguuugggaaauaagcugauaguaaagucauguaacacuuucugugcagguuaacauuucuggaccuugc

SEQ ID NO: 2365 - RNA, 61 nt, Human
gcaaguaguuauacucaggaagaacuucgacacuuacggguuucuucuguuugauacuggc

SEQ ID NO: 2366 - RNA, 65 nt, Human
gcaagugaaugucuugcugaaugugucuagggguucaucuucaguaaucgacauuccacuagugc

SEQ ID NO: 2367 - RNA, 100 nt, Human
gcaagugacuaaguguucauuaccuuuugguuagcguugcuaucacuguagcugugcugccuuaacaucgagaguugaguuguggacuuagucauugagu

SEQ ID NO: 2368 - RNA, 109 nt, Human
gcaaguuccuuuauuuuugaaugggaaugccuuacagaauuuaaaagaaacuuuaaacguggauguuuugguacaacuuauagaaaagguaaaggaaaccccaacaugc

SEQ ID NO: 2369 - RNA, 89 nt, Human
gcaaugaggacucucuacaggacccgauauggcuaucccguggaucuauuugugaugacuauauggcaacucuuggcuguccucauugu

SEQ ID NO: 2370 - RNA, 61 nt, Human
gcaaugccguagcuauggaauagaagcauuuguugaacucuuuuugugagccaggcccugu

SEQ ID NO: 2371 - RNA, 65 nt, Human
gcacaaaggcggcgcggugcacgucggaguuguaguacuucagcugcaucugcgccaccugcugc

SEQ ID NO: 2372 - RNA, 90 nt, Human
gcacaaccugccacugccacaguagcucaaccaagcaguugugcugagaauggcaccuggugagagccugcugugugccaggcuuugugc

SEQ ID NO: 2373 - RNA, 60 nt, Human
gcacaauugaaccaacuuccaucgugaaucuuuauaaugauugacuuugguguauagugc

SEQ ID NO: 2374 - RNA, 72 nt, Human
gcacagagauccagaaaguggguagugcaggcuguagugcugauaacuacuguacuacuuggaucuuugugc

SEQ ID NO: 2375 - RNA, 71 nt, Human
gcacagaguuagguaacaaaaauuccuaucagaguaaaaugacaaagcacagaaaaaccagauucuaaugc

SEQ ID NO: 2376 - RNA, 80 nt, Human
gcacauuugugucuuggguuaucuguggggugagaaaccuccucacuuccaaucccagcuaucuggguacaaucuggugu

SEQ ID NO: 2377 - RNA, 75 nt, Human
gcaccacagcaaggauuaucaugugcccuccagagacauacucucagguggaugcgagaaauauccagcuguugc

SEQ ID NO: 2378 - RNA, 77 nt, Human
gcaccauggccagcuuccugaagggggcccaugugaccaucaacgcacgggccgaggaggauguggagccugagugc

SEQ ID NO: 2379 - RNA, 92 nt, Human
gcaccccggagcggauggccgaggcuggcuucauccacugccccacugagaacgagccagacuuggccaguguuucuucugcuucaaggagc

SEQ ID NO: 2380 - RNA, 68 nt, Human
gcaccccuccccucuuggcagccagugggcaagaaccuuacccuacgcugccagguggaggguggggc

SEQ ID NO: 2381 - RNA, 76 nt, Human
gcacccgccucuuccagguccgcgccaacagcgcuggagccacccgggcuguugagguauugccuaaggcuggugc

SEQ ID NO: 2382 - RNA, 65 nt, Human
gcaccgggugcuccugcucgaggccacugugacguucaugcaggcccugugggagcccacggugu

SEQ ID NO: 2383 - RNA, 65 nt, Human
gcaccuccccuguuguguagccagcacaggcacaauuuguggguuugguggcagguagguggugc

SEQ ID NO: 2384 - RNA, 61 nt, Human
gcacgaggacugguccauuaucaucuucaccaacacgugcaagaccugccagauucugugc

SEQ ID NO: 2385 - RNA, 71 nt, Human
gcacgcuccugcuccugacucaccgcuguucgcucucgccgaggaacaagucggucaggaagcccgcgcgc

SEQ ID NO: 2386 - RNA, 77 nt, Human
gcacggcgaggcauggacgcuuucaugggugguuacgcgacaguugccaggaccgagggcgaaaccggcugcaaggc

SEQ ID NO: 2387 - RNA, 77 nt, Human
gcacucuccgagucgcugaagccgcugcugucgcugacacugggcgcugcugcggccuuucaugcgcuccagggugc

SEQ ID NO: 2388 - RNA, 73 nt, Human
gcacugcgagaccugcauaucuggcuucuacggugaucccaccaauggagggaaaugucagccaugcaagugc

SEQ ID NO: 2389 - RNA, 62 nt, Human
gcacugcugcugaaccggccccgggcggccacugucguggcccgggggccccucaagugugu

SEQ ID NO: 2390 - RNA, 91 nt, Human
gcacuggcuugccaguucuucagcucuaggacuuguagcuuuaagcaaacgguguggcauggguugaguguggccaacuggcaggaugugc

SEQ ID NO: 2391 - RNA, 97 nt, Human
gcacuuugugccgcaccagcuccagccgguccuuguccucagccgccgccagguaugcgcuggacgcccgcuucuccugcugggcggccuccagugc

SEQ ID NO: 2392 - RNA, 90 nt, Human
gcagaaaucuggauggccugaguuugaugacuccggggcaugggcccccauguucgagucccuccgcucuuggcaaaccgguucuucugu

SEQ ID NO: 2393 - RNA, 76 nt, Human
gcagacaaaaugaaagaaaaugagagcagaaaguaagcauuuccagccuaucuaauuucuuuaguuuucuauuugc

SEQ ID NO: 2394 - RNA, 62 nt, Human
gcagagccagagaauaagcuuuuuccuguuuguguugaaacauggaaguccccuggcugugc

SEQ ID NO: 2395 - RNA, 84 nt, Human
gcagagcuggggcugcgcggggccgggcgagcgggaccaggcgggagccauggaccgcuagggcccggccuagccccgcgaugc

SEQ ID NO: 2396 - RNA, 72 nt, Human
gcagagguacugagccauaacagagaggcgacuacgcuguuugcuuccuguauuggcugcaagucucucugc

SEQ ID NO: 2397 - RNA, 79 nt, Human
gcagauggggcacucgcugcccucagcgcagagcucacacagcgcagcguguuggcacggcagcacugcccgcuucugu

SEQ ID NO: 2398 - RNA, 80 nt, Human
gcagauuuguguuuuguuuucuuguuaucacugucacacagcuuauaacauguaugcuuuucagaauacaguugucuagc

SEQ ID NO: 2399 - RNA, 68 nt, Human
gcagcacaaaggcggcgcggugcacaucggaguuguaguacuuuaacugcauuugcgccaccugcugc

SEQ ID NO: 2400 - RNA, 68 nt, Human
gcagcacaaaggcggcgcggugcacgucggaguuguaguacuucagcugcaucugcgccaccugcugc

SEQ ID NO: 2401 - RNA, 93 nt, Human
gcagcacuggagcucagcccagguuccagcucaauugaagaaucuccuccuuccacuggaaaccuccuuggcuggguuccaaauugaaaaggc

SEQ ID NO: 2402 - RNA, 89 nt, Human
gcagcaggcagggccaggcagggccgggccuggggccugguguccgaccgcagcccagccccccucaucgccugacacucugccucugc

SEQ ID NO: 2403 - RNA, 76 nt, Human
gcagcaguaucugcaguccauagaagagcgugagaaacuggacgggcucuacgagugcauucucugugccugcugu

SEQ ID NO: 2404 - RNA, 81 nt, Human
gcagccucaucuguuugcggaucagaacccgagcugugcuuguggcugcggcugcuaacuggcugcgcacagggaagcugu

SEQ ID NO: 2405 - RNA, 85 nt, Human
gcagcugaaggcuaggcgccacugggccuggaauucgccacaggacggaucuuacagaggcaaguggucccuggaccucucuugc

SEQ ID NO: 2406 - RNA, 71 nt, Human
gcagcugacuggucuuaaugcuguacuugcgauaggcucguuaagcagcauggaaaagauggguugauugc

SEQ ID NO: 2407 - RNA, 87 nt, Human
gcagcuucccuugcccauguguguccaugugacuaaguucuggccaauggaaugugagugauaaugauacauacagagggaggcugc

SEQ ID NO: 2408 - RNA, 88 nt, Human
gcagcuugaguguuagauuaugacuggagagaaaggcaguccaacaugucaaacaugucuguuuucucacacacuaacacuuugcugu

SEQ ID NO: 2409 - RNA, 75 nt, Human
gcagcuugcucugugguuuucccaacacaaauccgugcuagugcuggggacggaaccgucagagcagucaguugc

SEQ ID NO: 2410 - RNA, 68 nt, Human
gcaggaauugaagcuuuuacagcuggagacugagaaguaggcaucuguacuguaaaccuuugaccugu

SEQ ID NO: 2411 - RNA, 93 nt, Human
gcaggacaucaucuaugaaaauuaucugugaguacgaaaacgagcaucgugguuuaagguguuccagaugacuucaaagguaugaaugccugc

SEQ ID NO: 2412 - RNA, 73 nt, Human
gcaggaggcucaugggugguugcugaaugaagaacagaaucuuggugcuuuguggcucaccacagccaucugu

SEQ ID NO: 2413 - RNA, 60 nt, Human
gcaggaugauugaggaugcaauucgaagucacagcgaaucagccucaccuucagcccugu

SEQ ID NO: 2414 - RNA, 86 nt, Human
gcaggcaggcaaggugacgggacuggaagcccuuuucagagccuuggaggagcugguccguccacaagcaaugagugccacucugc

SEQ ID NO: 2415 - RNA, 94 nt, Human
gcaggcauguguuggcaaaggcuguuaauaguaguuaaguguuaagacugcuuuucuuuaacguuuucaugguaaugcauauuuagagcacugu

SEQ ID NO: 2416 - RNA, 96 nt, Human
gcaggcccaaccgccgccagcaccauggccagcaccauuuccgccuacaaggagaagaugaaggagcugucggugcugucgcucaucugcuccugc

SEQ ID NO: 2417 - RNA, 68 nt, Human
gcaggcggcgcgaauucacuagugauugugagcugagaucgcacccaaacaauccuagugaagccugu

SEQ ID NO: 2418 - RNA, 66 nt, Human
gcaggggcucacggaggaagugcugccugggccagggggaccagcuuuccuccguagagaccaugu

SEQ ID NO: 2419 - RNA, 95 nt, Human
gcaggggcucgaaccagcucuugaggcgggccuggaacgucggccugcgaggcguagucugcugggccugcuccuccagcuuggcgagcaccugc

SEQ ID NO: 2420 - RNA, 105 nt, Human
gcagguagggaucucuggcuuugguaauucuuuaugagaggauccuagccuuugaagcugggagcaggagucaucaucuaaagaauuccauugcucaccuccugc

SEQ ID NO: 2421 - RNA, 92 nt, Human
gcagguauguuacgaaguuuagggggaauuugcuaagccgggagcauauggcuuggcgugcaagugcuggaugaaacuuauaacaugccugc

SEQ ID NO: 2422 - RNA, 111 nt, Human
gcagguccaucuucaguggcauugggccuuggcugggaugcugaguuauccacuggagcaucggcaguacaggcaggcacagaggcaguggauccaucggagguggcaggu

SEQ ID NO: 2423 - RNA, 90 nt, Human
gcaggucccgcuggugcuguggucgagugaccgggacuugugggcuccgugcggccgacacucaugaaggccacaucaccagcgacuugc

SEQ ID NO: 2424 - RNA, 62 nt, Human
gcaggugccagcacggugguuaaaggggagaaguccucuuccuguuuugugguggccccugu

SEQ ID NO: 2425 - RNA, 82 nt, Human
gcagguucacaaggcaggcggucugcguggcacugaagucagggacagucaccaacagcacugucugguccucaggaccugc

SEQ ID NO: 2426 - RNA, 100 nt, Human
gcagguugguacuacuucugauuaggcagaaaacaccaggauuccuuaagugauccuugaaaugguuauuguuuucugccuugucacauuugccaccugu

SEQ ID NO: 2427 - RNA, 79 nt, Human
gcaguauguggagacaggcaagcuugcagcaguugcaguaguguggaaaucuuuuugccugucuuauaauuucguuugu

SEQ ID NO: 2428 - RNA, 111 nt, Human
gcagucccugacaaaugccuucagcuucucugaguccuccuucuuccggucuucagccaaugaggaugaagccaaagcagagaccauccggagcuugaggaaguccuuugc

SEQ ID NO: 2429 - RNA, 85 nt, Human
gcagucuggauucguguuuauugaagccaguaauuagagacaucuuuuuuucccaggacuagaaagcaagguuccacaugacugc

SEQ ID NO: 2430 - RNA, 78 nt, Human
gcagugcacacagguccccggggaccccaccauguggagcggaugguggcuguggccccuuguggccgucugcacugc

SEQ ID NO: 2431 - RNA, 80 nt, Human
gcagugcuugucuaacagcuucugggugcagauuuucuucggcauccuuuugcacucagcuuauuacagguagguagugc

SEQ ID NO: 2432 - RNA, 73 nt, Human
gcaguggagggggcaggaccuccugcuggugcagcaccagcucguggagcagguccaccggccccuacauugc

SEQ ID NO: 2433 - RNA, 74 nt, Human
gcaguggagggggcaggaccuccugcuggugcagcaccagcucgugugagcagguccaccggccccuacauugc

SEQ ID NO: 2434 - RNA, 74 nt, Human
gcaguggagggggcaggaccuccugcuggugcagcaccagcugcugguagcagguccaccggccccuacauugc

SEQ ID NO: 2435 - RNA, 110 nt, Human
gcaguggcgugaucucgguucacuguaaccuccaccucuuggguucaagcgauucuucugccucagccucccgaguagcugggauuacagugccugccaccaugcccggc

SEQ ID NO: 2436 - RNA, 72 nt, Human
gcaguugucaaauaccaggagggcaucagccgcaaacuccucugagcugguguaccuggacagggcaggggc

SEQ ID NO: 2437 - RNA, 82 nt, Human
gcaguugucacaaaaacucacucaucaacuucuuagugaauuugacaggcaagaagaugacauucacuuagugacauuaugu

SEQ ID NO: 2438 - RNA, 72 nt, Human
gcauaagagaacaguacaauuugcaguuaggaucaucuuucuagauuucuguaucuuucaaaauuucugugc

SEQ ID NO: 2439 - RNA, 69 nt, Human
gcauacuggcuacccagguggauuuagacaaguaacagcugcucagcuucaccugagggauccaguggc

SEQ ID NO: 2440 - RNA, 79 nt, Human
gcauaguuaaaaaaaugaagcgagauggcaguuugugcaguaauaucugcccuucgaaguucaugcaaccaacuaaugc

SEQ ID NO: 2441 - RNA, 131 nt, Human
gcauauauuuaagagagagcgcauuuguauaagagauuaguguguguggguuuguaugugagagagaaacacacacaugcacccaguuacacucuccagcagaguaccccuguucuugccugaguaucugc

SEQ ID NO: 2442 - RNA, 73 nt, Human
gcauccagcaugaugcccugcucguccagcucuucuccaacgcggccggacaugugcuucagaaccuggaugc

SEQ ID NO: 2443 - RNA, 73 nt, Human
gcauccugcagcuucgagccaauggugagcuccuucuggaucagcuccuucagcuccuucuugcucagggugu

SEQ ID NO: 2444 - RNA, 68 nt, Human
gcaucgauuaaauccacagucagccauaauaacuccucagacauguuaugcuggggccgugucgaugu

SEQ ID NO: 2445 - RNA, 63 nt, Human
gcaucugcaggggaagccaguuuguucuuuugauccagaaggguuaauuuucgcugcaggugu

SEQ ID NO: 2446 - RNA, 70 nt, Human
gcaugagaucuuugcgcguucgagguguuaccauaugcccguaagauuuuagaccgugcaauuauuaagc

SEQ ID NO: 2447 - RNA, 76 nt, Human
gcaugaucccaggguggaguuuucagcccucugacauuaaaaggugaagcagaggacaugaaaacucgcucugugc

SEQ ID NO: 2448 - RNA, 82 nt, Human
gcaugcgauuuguuaaucaugauggagucucagagcuuuugaagagcugaaccgauaugagaaagucuuaaccaguuguugc

SEQ ID NO: 2449 - RNA, 70 nt, Human
gcauggccagggagggcaaauggaaaggcaaccacucucugccgguccugggcuuaucccugcaaugugc

SEQ ID NO: 2450 - RNA, 77 nt, Human
gcauguaggggguccggcaugggcguccuggcacuugacgcuuaccucguccguagucuggugggccucuguagugc

SEQ ID NO: 2451 - RNA, 73 nt, Human
gcauguccuucacaucacaaaaaccuguccagccgcccaaggccaugguguccaccgaugugcacacacaugc

SEQ ID NO: 2452 - RNA, 78 nt, Human
gcaugucuuaucccgcugaugauuaugagucugaggcggcuuaugaccccuacgcuuaucccagcgacuaugauaugc

SEQ ID NO: 2453 - RNA, 72 nt, Human
gcauuaaaggauaauuuucucugugaauaagagcaaaauggucuucagagaaacagacuguucauuugaagc

SEQ ID NO: 2454 - RNA, 64 nt, Human
gcauugaucuuauccuccgugacugucaccucaucgucgugcagaaugagggccgaguauaugc

SEQ ID NO: 2455 - RNA, 108 nt, Human
gcauuguuuuaccccuuuucucgugggugugguguucagguggccggagcauguggcagcugugggcauucaauuaaacacccuccgaggaagcguggaccucggugu

SEQ ID NO: 2456 - RNA, 72 nt, Human
gcauuucuaaagcccuuugaaaaugugugucaugcuuauggguggccacauuccagagggcugaauaugugc

SEQ ID NO: 2457 - RNA, 81 nt, Human
gcauuugcugaguggaaagccagcccccucccaggcaccuucauuaggugcacguggccccaggccucccuccgaagaugc

SEQ ID NO: 2458 - RNA, 81 nt, Human
gccaaaaugggaaaggaaaagacucauaucaacauugucgucauuggacacguagauucgggcaaguccaccacuacuggc

SEQ ID NO: 2459 - RNA, 95 nt, Human
gccaacaaaaaagacuuggaggaggcagaggggagacuugcagcuccucugcugaaacguuuaagccucuccacauccaaauugaacagccuggc

SEQ ID NO: 2460 - RNA, 110 nt, Human
gccaagaacuugugguugucuugaauccacaaucuuuucucuggcauuggguuccccaaccugaucaauugaguugggagcaauggauucaagucaacagucauucuuac

SEQ ID NO: 2461 - RNA, 73 nt, Human
gccaagagccaucugaagccaccucucugccuguuccucccaagaggccaggguggccacggguggugagggc

SEQ ID NO: 2462 - RNA, 83 nt, Human
gccaagauccauuaauuauuugggguugcaaaauggugguauucucauucugucguuugcuugccuuuauuagcuggaauggu

SEQ ID NO: 2463 - RNA, 87 nt, Human
gccaaggaaacaggaugcugauagucuccagcgggccuggacugugggcugguguguggaacugcugcaagcuuucuuccugguggc

SEQ ID NO: 2464 - RNA, 75 nt, Human
gccaaggcaacacuugcugaugagcaacuuuaaggcuaagccaaguuuucucaaaauaaucagcaguaagcuggc

SEQ ID NO: 2465 - RNA, 66 nt, Human
gccaauaagcgccgguaugccccuguauugggauggccacaagggucacauuggaugcgaguuggu

SEQ ID NO: 2466 - RNA, 94 nt, Human
gccaauuagcugcugccaguggcauaggagggauuaaaagcuggacccaagguuuggaucaccugcuaucuaauuggcuuaagcugcauacggc

SEQ ID NO: 2467 - RNA, 82 nt, Human
gccacaugaaagccguagaauuugaccuugcgaagacucgaguagucguaaagggcaaggguccaaauggcucgcaaauugc

SEQ ID NO: 2468 - RNA, 107 nt, Human
gccaccaccugaacaucagucuagcagaccuuuuaccuuauuaugcagaaagcacacuuggcaugaaaagaaaggguauccucggcuagauuugcuucugucauggc

SEQ ID NO: 2469 - RNA, 84 nt, Human
gccaccaggccaaccugcauauaagaucgaaguaaguuaaauacucaccuaacuaauacgagagguaaucagauggucuagggc

SEQ ID NO: 2470 - RNA, 91 nt, Human
gccaccaggcgguggucugugaugaaggucagggccacgcagggguagguucacagaggccaggagucgcagacggcaacuucuggugggc

SEQ ID NO: 2471 - RNA, 63 nt, Human
gccaccaggucaugaaggaggcguuugggcccgaagauggguuacagaggcucaccugguggu

SEQ ID NO: 2472 - RNA, 74 nt, Human
gccacccgggcagcgcccugagccugaguccucgcguguccgcugagccagagcagggcgcccccgagcguggu

SEQ ID NO: 2473 - RNA, 70 nt, Human
gccaccggggucugcgauggcacgccagugcuggagccgcagccaggcgaggccacucgacucccggggc

SEQ ID NO: 2474 - RNA, 92 nt, Human
gccacuucuucuuauuggagugugagcacuaggagcagggaccuuuccauggugcuugcuguguuauacccugcacccagaacuuaguaggc

SEQ ID NO: 2475 - RNA, 76 nt, Human
gccagaaacucauaauccagaggaacuguguccagcaagcgggcguaguugccauugaucugggcgaugaucuggu

SEQ ID NO: 2476 - RNA, 65 nt, Human
gccagaacagacuguucucugcagugaaucugagccuucaagauucauguaggacaugauuuggc

SEQ ID NO: 2477 - RNA, 62 nt, Human
gccagaggagccugcuguuuuucagaacugaacuggaagggcagaaucaggcuaucucuggc

SEQ ID NO: 2478 - RNA, 76 nt, Human
gccagaucauccugucacaccauuaacgagcuguugugauuggcccucucacgguagaacuguggcagugacuggc

SEQ ID NO: 2479 - RNA, 72 nt, Human
gccagcacgccaaguacacuugcucuuucuguggcaaaaccaagaugaagagacgagcuguggggaucuggc

SEQ ID NO: 2480 - RNA, 130 nt, Human
gccagcagaguucuggagagagagaauucugagacugccacagggcaucugguaccaguucaaauucgcaaagugguacaaugagugaaccugaggcccagauaaagacucccucagaacaguaaguaac

SEQ ID NO: 2481 - RNA, 66 nt, Human
gccagccagcccagcagcgcuccgugcuccaucggagagcggugugcggagaaggcaugagcuggc

SEQ ID NO: 2482 - RNA, 70 nt, Human
gccagccccugggguuuccaccuccugccuccggcccuccagaggggugaggccccaaccccagggcagc

SEQ ID NO: 2483 - RNA, 86 nt, Human
gccagcgccugagcauccccgucaugguggucacccugggaccccacgcgggaccagugcuucggggaccgcuuucagccgccugc

SEQ ID NO: 2484 - RNA, 81 nt, Human
gccaggaccaagagacaggcagcucaccaggguggacaaaucgccagagauguggugcauuguccuguuuucacuuuuggc

SEQ ID NO: 2485 - RNA, 79 nt, Human
gccaggccuccucauccaaguacauccuggauccucuuucucucugguuuccagguacucaggaacuaggccauuuggc

SEQ ID NO: 2486 - RNA, 61 nt, Human
gccagucucaccugcaccuuacgcagcggcaucaauguuaguauguacaggauguacuggu

SEQ ID NO: 2487 - RNA, 87 nt, Human
gccagucugcccagcugcaguacucacgccccaugggggaucuuggucuguuuuucuugugggagccuaguggagagcagacguggc

SEQ ID NO: 2488 - RNA, 61 nt, Human
gccagugucuuuggggggcuguggcagggccgccugccugggguucccuuacucaucuggu

SEQ ID NO: 2489 - RNA, 78 nt, Human
gccaguucaggguccacacugccucgccguuuuggagcagacaccugcuaaccaaugcgguggagcuccugagccggc

SEQ ID NO: 2490 - RNA, 61 nt, Human
gccaguuuaacugucuagcaaaaugcauuucauuuuaaaauuggauauugggagacuuggc

SEQ ID NO: 2491 - RNA, 60 nt, Human
gccaucacgccacaguuucccggaggggccauccacagucuucuggguggcagugauggc

SEQ ID NO: 2492 - RNA, 61 nt, Human
gccaucacugccaccagaagacuguggauggccccuccggggaaaacuguggcgugauggc

SEQ ID NO: 2493 - RNA, 60 nt, Human
gccaucccacaguuguuacugguuugucaagcauaagccaugcccuaacgacaggcuggc

SEQ ID NO: 2494 - RNA, 76 nt, Human
gccaucccgggcagugggcaccgucaaaguauaccugcccaacaagcaacgcacgguggugacuguccgggauggc

SEQ ID NO: 2495 - RNA, 75 nt, Human
gccaugagcacaggcggguccacacacaggcggcgaaccuccacucgcuggcagacggcucgcuuuucguauggc

SEQ ID NO: 2496 - RNA, 82 nt, Human
gccaugccaucgucagugaccccgaggcagguaacgcuguugacgugccaucgaggacugcugcacggucgcccuucauggc

SEQ ID NO: 2497 - RNA, 61 nt, Human
gccauucccacccuccuagguucacauccagggcugugucuuccuugggggaggagauggu

SEQ ID NO: 2498 - RNA, 64 nt, Human
gccauuuuaagcaauaaaaauuggcaugugggugcaugccuguaaucccugcuacuuaggaggc

SEQ ID NO: 2499 - RNA, 76 nt, Human
gcccacugugacgaugucaccgaucuggacgucccugaagcagggggacagguguacagacauguucuuguggcgc

SEQ ID NO: 2500 - RNA, 71 nt, Human
gcccagagucagcaugugcggcgggccaggaccacaaggcuccuaaucccagauguaccgcgacccuaggc

SEQ ID NO: 2501 - RNA, 90 nt, Human
gcccaggcuagaauucaguggcaggaucauagcucacugcagccucgaacuccuaggcucaagcaauccuccugcuucugccuccugggu

SEQ ID NO: 2502 - RNA, 81 nt, Human
gcccaggcuggaguguaguggcaugaucucggcucacugcaagcucugccucccggguucacgcccuucuccugccucagc

SEQ ID NO: 2503 - RNA, 92 nt, Human
gcccauuuaauugaaaguauauaguaaugaaaagccuuauaacgucgggccucuagcaaugcgauuauauagcaaugauuauaaagcugggc

SEQ ID NO: 2504 - RNA, 88 nt, Human
gccccaccgcgcaugaaaccgaaaaaaggggcccuuccccauuugcaaagcgaacaugaacgggccuugacauuuuaaugcguugggc

SEQ ID NO: 2505 - RNA, 60 nt, Human
gccccagccaccauauaccccugcaguuugcacuuuaauugaugguaguucaguuggggu

SEQ ID NO: 2506 - RNA, 92 nt, Human
gccccaucagggauggucacaguccacgccacaggggcugacucugcccaaucaugucccccugguggcagcgaccagauccuggcuggggc

SEQ ID NO: 2507 - RNA, 66 nt, Human
gccccaucccuuguccaguguccucucuaaggcagauuuaaaggacacaaaaggaagcuguguggc

SEQ ID NO: 2508 - RNA, 69 nt, Human
gcccccaaaccauguucagccacacgccuaccaguucaccuaccguguuacugaauguggcaucagggc

SEQ ID NO: 2509 - RNA, 68 nt, Human
gccccccagagcuaauuacauccacacccauccccugaagugguggacauaagggagcccuggggagc

SEQ ID NO: 2510 - RNA, 74 nt, Human
gccccgccccugccgccggaauccugaagcccaaggucugcccgggggcgguccggcggcgccggcgauggggc

SEQ ID NO: 2511 - RNA, 73 nt, Human
gccccggagacagaagcaugaacgugucaaaagaaccaagugaaugcgcgugcguggaagaauacaccggggc

SEQ ID NO: 2512 - RNA, 66 nt, Human
gccccguggcccggggaagggggcugggauugcgccagccccggauaccuggacugcuuagugggc

SEQ ID NO: 2513 - RNA, 71 nt, Human
gccccucgguugggaccguuucucggcacgagcccuacccuugaaucuggggcgcggucuggauugugggc

SEQ ID NO: 2514 - RNA, 86 nt, Human
gccccucuccuuccucuccuccccgggccagcgggcagugcugcuggccgaagcugcccgcacccuggagaaggugggcgaccggc

SEQ ID NO: 2515 - RNA, 80 nt, Human
gccccuugaccccagcuagggccucagggacuuucgggccuuuuccaaaauuuccucccugaucuugggguagucggggu

SEQ ID NO: 2516 - RNA, 85 nt, Human
gcccgccagcucuggcugggaggacuugcucuugggucugcagccugcaucaggagccuccacuuuccccagugcuggauuaugc

SEQ ID NO: 2517 - RNA, 86 nt, Human
gcccgccccuucccuccccuuucuuuacauauaggagaugggauacucauucccgcugcuauugauaaggucggaggcggccgggc

SEQ ID NO: 2518 - RNA, 78 nt, Human
gcccgccgcucuuccuggcgugucaucuccagcauugagcagaaaacagagaggaaugagaagaagcagcagaugggc

SEQ ID NO: 2519 - RNA, 77 nt, Human
gcccgcguggccuucuccucguaggacucccaaacucguucacucugcguuuauccacaggauaaagccacgcuggu

SEQ ID NO: 2520 - RNA, 71 nt, Human
gcccgcucauaaggggauggccauggcgagguuuauagauaguugggguggugaguguaaaugagugaggc

SEQ ID NO: 2521 - RNA, 78 nt, Human
gcccggaaaccacacuacgacaucuggggcaauacagucaauguagccagcaggauggaguccacgggggucaugggc

SEQ ID NO: 2522 - RNA, 84 nt, Human
gcccggcuccucaggaagaaaaccgcuggcccuucccgagugugccggccgagggccgaggggccgugcaaauggggagagggc

SEQ ID NO: 2523 - RNA, 92 nt, Human
gcccguuaauuuuuuacccuauguuuacaucuugaggcagcagagucugucugcagcuauguggugagcuauguaaggaaaaaaaucugggc

SEQ ID NO: 2524 - RNA, 77 nt, Human
gcccuacauggaugacugugguggcaugagauucagcgguucaucacccucgugcccuccaaccugccccaugaagc

SEQ ID NO: 2525 - RNA, 88 nt, Human
gcccuacccaagaagggagacaggcccuggggucacuuguuuccagcccuucaugaccccaagaccuguuccccacaggggccagggc

SEQ ID NO: 2526 - RNA, 68 nt, Human
gcccucccggcaggcacuacucaucgagagguacuaugccuuugaugaggccuuuguucgggaggugc

SEQ ID NO: 2527 - RNA, 71 nt, Human
gcccucccugagccucagucucucauccuccaugggaggauguaauuuuccugaaaaagacagggccgggc

SEQ ID NO: 2528 - RNA, 71 nt, Human
gcccucgaggcccccgcagucccaucauucaguuccguagggucaccggcgcggcaguggccucgcagggc

SEQ ID NO: 2529 - RNA, 86 nt, Human
gcccucgcccggccugucagcgcugcucuccgccgcagcuucagcaccucggcccagaacaaugcuaaaguagcugugcuaggggc

SEQ ID NO: 2530 - RNA, 65 nt, Human
gcccugaguugggagccuccgcgaacagugguccuguacaagugcgugguuuccggcucuggggc

SEQ ID NO: 2531 - RNA, 76 nt, Human
gcccugggaugaaaacauggaccucuuggaagguauaacugggcuuugaagacucugguccgaaaguuuaucuggc

SEQ ID NO: 2532 - RNA, 72 nt, Human
gcccuugauguccugcaaaugaaggaggaggauguccuuaaguuccuugcagcaggaacccacuuagguggc

SEQ ID NO: 2533 - RNA, 108 nt, Human
gcccuuuaagcagcuucauaaccgaagauugcuguggcacggguccaggaccaccaacuuugcugggauccugucccagggaucuucggauagccccgccugaagcgc

SEQ ID NO: 2534 - RNA, 80 nt, Human
gccgacaaggagcgccuggccauccugggcauccacaaugagguguccaagauuguccagaccuaccacgucaauauggc

SEQ ID NO: 2535 - RNA, 80 nt, Human
gccgacccccaagaggccauuaacuguuugaugcgagcaaucgagaucuacacagacaugggccgauucacgauugcggc

SEQ ID NO: 2536 - RNA, 61 nt, Human
gccgaugugucuacucgaagauucugugaucucacucucaggagaccauugcaucauuggc

SEQ ID NO: 2537 - RNA, 76 nt, Human
gccgcccucgccgccgccgucgccgccgcggagcagaucaauaggcgaacgcggagcacagcgcagcgcgggcggc

SEQ ID NO: 2538 - RNA, 63 nt, Human
gccgccgccaggguagcgguguagcugcgcagcgucgcgcgcgcuaccgcacccagguucggc

SEQ ID NO: 2539 - RNA, 68 nt, Human
gccgccucuucgaccaggccuucggguugccccggcugccggaggaguggucgcagugguuaggcggc

SEQ ID NO: 2540 - RNA, 83 nt, Human
gccgcgcccccuuggcgccggguguccugccgcugcuugcgcagcggcccuuguuucuucuuacccguuguuaggggcgcagc

SEQ ID NO: 2541 - RNA, 63 nt, Human
gccgcuccgcucugggugguucaaucccaaccagggguugggauguccugccugcggaggggc

SEQ ID NO: 2542 - RNA, 64 nt, Human
gccgcucgccccaggccugggcccgcuccuguagcggcuggccggccagggagcccacaguggc

SEQ ID NO: 2543 - RNA, 111 nt, Human
gccgcucgccuccuccugccguccgcucggcucaggcgcgggcccuggcuaucuggcgguccucggucuccgcccugcccccggccggcggcagguaagggaggcggcggc

SEQ ID NO: 2544 - RNA, 65 nt, Human
gccggagaugggcccggcggauacuccucuuuuggggaagagguucaagcuggcccauggccggu

SEQ ID NO: 2545 - RNA, 67 nt, Human
gccggcuuuuucgcggggggaaagaaacaaaggccugcauuccccccuucuaaaagggaaagccggc

SEQ ID NO: 2546 - RNA, 85 nt, Human
gccgggcuuggaagccuuugaccuggauccugcacaguuggggagucaauguccagcccuacuccggguccccagccaaccuggc

SEQ ID NO: 2547 - RNA, 74 nt, Human
gccgggggucuggcaggaaugggaggcauccagaacgagaaggagaccaugcaaagccugaacgaccgccuggc

SEQ ID NO: 2548 - RNA, 73 nt, Human
gccguccgcaagcaggagaacgcggccccgcugggcgauccugcccgaaggcgcccgaacugcggcgcgcggc

SEQ ID NO: 2549 - RNA, 73 nt, Human
gccgugggacugucccgggagcgggcccuggacuacuacgggcuguacgacgaccgugggcgccccuaugugc

SEQ ID NO: 2550 - RNA, 78 nt, Human
gccguugagcugguacaccguccggaaggcauuggccauacccgacagccggccgcugauguuggccagcgagagggc

SEQ ID NO: 2551 - RNA, 83 nt, Human
gccuaccccaucugcuccucaucugugcugggggaggccccuccccucaccggccccgaagcugaguuguuuggggugauggc

SEQ ID NO: 2552 - RNA, 98 nt, Human
gccuacuugaccucaaagucacaacccucauauguuaaaucauggccggcagcucaugguacagauuuggcgaaggguuguggggagagucaugaggc

SEQ ID NO: 2553 - RNA, 61 nt, Human
gccuagaauucagaauguacccgauguccacuaacaguagacuggauacaugaacuguggc

SEQ ID NO: 2554 - RNA, 71 nt, Human
gccuaguucuuaccuauguagcacggccggaaagugagaccgccuuagcugcugauuguacuagagcaggc

SEQ ID NO: 2555 - RNA, 87 nt, Human
gccucaaagcugcauguugagugccgucugcuuucggucccgucauuaucucuguauagacccaguuggcaaucaugcauuuggggc

SEQ ID NO: 2556 - RNA, 79 nt, Human
gccucacagaagacuucgugucccaccuggagaccgagcuggagcagucgaggcugcgggagacggagacacugggggc

SEQ ID NO: 2557 - RNA, 80 nt, Human
gccucagauuucugcucaugaucuacauagauuuggaaacuguuuuccucuguuuuggucucuugggcaacauuuuuggc

SEQ ID NO: 2558 - RNA, 109 nt, Human
gccucagccucuccucaguacagucucauggguggaaaagaccaggcuuccggacugcucugggcuacuacccaggagaggcugggcaguggggaaggggggcuggggc

SEQ ID NO: 2559 - RNA, 82 nt, Human
gccucagucucccgaguagcugggacuacaggugcgugccaccacacccagcuaauuuuuguauuuuugguagagacggggu

SEQ ID NO: 2560 - RNA, 83 nt, Human
gccucagucuccugaguagcugggguuacaggugccugccaccaaguccagcuaauuuuuguauuuuuagguagagauggggu

SEQ ID NO: 2561 - RNA, 81 nt, Human
gccucauccucccaaguagcugggauuacaggcuuuugccauuaugccugguaauuuugguauuuuuaguagagauggggu

SEQ ID NO: 2562 - RNA, 60 nt, Human
gccuccaucugggccucucuggucaaaaccacuuuuuugagucaggggcccagccuaggc

SEQ ID NO: 2563 - RNA, 77 nt, Human
gccucggcacgugcacucauggccuuggaauuguuggccugcaucuucuuuaggcccuuuuuguugugcuucuuggc

SEQ ID NO: 2564 - RNA, 61 nt, Human
gccucuggguccugggcagauacagccuuugcugugggagggaugugggggaccuugaggc

SEQ ID NO: 2565 - RNA, 84 nt, Human
gccugaccgaggcgaacgcguggacaaagugaagcugaucaaggaaaucaagaacuacauccaaggcaucaaccucguccaggc

SEQ ID NO: 2566 - RNA, 79 nt, Human
gccugagcgagcagaaggcccgcgagacgcucaagaacucggcucugagcgcgcagcugcgcgaggccgcuacucaggc

SEQ ID NO: 2567 - RNA, 61 nt, Human
gccugaugacaugcucacgugacaugguuaugcccuguuuggcuuuauaugugauaaaggc

SEQ ID NO: 2568 - RNA, 67 nt, Human
gccugccgggggugguggcacugagagccugggggaacaggcgccaggccaguggcccaaggacggc

SEQ ID NO: 2569 - RNA, 88 nt, Human
gccugcgggguauuguagaaacgcugcgcugccuaucacagcuugugaugugacacguucauucugcaaguuuaaacuucgccuaggu

SEQ ID NO: 2570 - RNA, 99 nt, Human
gccugcugcuguacuucaucagaaaacaccuucagcugcugcaggaagggcucuuugugguaguuggggugcacauuaucauaguugggcacuacaggc

SEQ ID NO: 2571 - RNA, 107 nt, Human
gccuggaacucugugguccugcaccucccccuacaccccccaacaaaaauuagccuccaaucagcuccuggagacaauguuggugggaaccacaaggguuccugggc

SEQ ID NO: 2572 - RNA, 86 nt, Human
gccuggccuccugcaugcccaacaagccugcucccguggggccugcuauccaccuguuggggaccugcuuguugggaggacccggu

SEQ ID NO: 2573 - RNA, 108 nt, Human
gccuggccuuccauauaucaagcagaguuuuaucaccuuaugcaggggcagcccugccaccugccauaaaguugauaggcuaaugacauuuuguggauauugccaugu

SEQ ID NO: 2574 - RNA, 95 nt, Human
gccuggcuccagcagccugggcauggcggcgacucccccaaaaacaccccagcugggugggugccugggggccuaggugaggcugguguuggagc

SEQ ID NO: 2575 - RNA, 70 nt, Human
gccugggacuuggagaaaugggauuugaaauuccuccuggagaaagcucagaaucuguuuuuucccaagc

SEQ ID NO: 2576 - RNA, 63 nt, Human
gccugggagucucccugccucacuccucuaggcaggggagugaugcuucaggacgugacaggc

SEQ ID NO: 2577 - RNA, 103 nt, Human
gccugggcugugguaaguaauggagcugugaguuccuggauggugacacgguccaggaucuugaaacucguguccaguuucaggggcuggcugcagcgcuggc

SEQ ID NO: 2578 - RNA, 82 nt, Human
gccugucaccuaaaucuuaugcaacuuaucaaagaaaugcuucuacauucuuacaaagaccacuaggaagagguggcaaggu

SEQ ID NO: 2579 - RNA, 65 nt, Human
gccuucguucaagggucaggaauggaccagaacagauggguucuggaggccccugaacagagggc

SEQ ID NO: 2580 - RNA, 110 nt, Human
gccuucuuguccacugcuuugaugacacccaccgcaacugucugucuuauaucacgaacagcaaagcgaccccaaaguggauagucugagaagcuccaacacacaugggc

SEQ ID NO: 2581 - RNA, 72 nt, Human
gccuugagcuaagguauccgcuucaaggccuccuauccauggcccuuggaagcggauaccuuagcucaaggu

SEQ ID NO: 2582 - RNA, 71 nt, Human
gccuugggacgugcccauuuuuacuguaaauuaugauuccguaacugacuuguaguaagcagguuucuggc

SEQ ID NO: 2583 - RNA, 67 nt, Human
gccuugucaccuccaguugggugccucuggguucccacuggcucugcccaggugggggugggugggc

SEQ ID NO: 2584 - RNA, 71 nt, Human
gcgaccgggagagcuuuucuuuaacgauaucaacuuuguggugccaaaaggaaaagcggccuccccccagc

SEQ ID NO: 2585 - RNA, 72 nt, Human
gcgaccuucagcuccuuuggcuuauguccuuaugcccccugggacuucacgugcuccguuggaucaggucgc

SEQ ID NO: 2586 - RNA, 76 nt, Human
gcgacgcggagcccagcgggcgcgcgugcgguugucuaccccgugacgcggcccagcggggcucgggaccgcgcgc

SEQ ID NO: 2587 - RNA, 88 nt, Human
gcgacguccuguuucuggcugugaagccacauaucauccccuucauccuggaugagauuggggccgacgugcaagccagacacaucgu

SEQ ID NO: 2588 - RNA, 77 nt, Human
gcgagcgggaaaucgugcgcgacauccagagaagcugugcuacgucgccuggaauucgagcagagauggcacgccgc

SEQ ID NO: 2589 - RNA, 60 nt, Human
gcgaggaccugcgggcacgcucccagggguccccugaggacucggccccccaggccucgc

SEQ ID NO: 2590 - RNA, 80 nt, Human
gcgagugccagcaugccuggcuaauuuuuuguauuuuuaguagagacuggguuucaccauguuggccaggcuggucucgu

SEQ ID NO: 2591 - RNA, 84 nt, Human
gcgccagguuucaauuucuaucgccuauacuuuauuggguaaaugguuccgguaagguugucagguaguaagguggacgugggu

SEQ ID NO: 2592 - RNA, 92 nt, Human
gcgcccuccgggcccagccucccgagccuucggagcgggcgccgucccagcccagcuccggggaaacgcgagccgcgaugccuggggggugc

SEQ ID NO: 2593 - RNA, 80 nt, Human
gcgccuaccucacagacggccaggagccagggagccccaggaugcuccgacugacaacccugcugcugggaccacggcgc

SEQ ID NO: 2594 - RNA, 83 nt, Human
gcgccugagaacccaauugacuacgcgcgacgauccaggacacgccuggccccguuggucccuauccaauucuucccagacgu

SEQ ID NO: 2595 - RNA, 63 nt, Human
gcgccugggcgugcucaagaacgugcuggcugccagcgccgggggcaugcucaccuacggcgu

SEQ ID NO: 2596 - RNA, 102 nt, Human
gcgcgcucguucgggaucgccgagggggcugagauagugaauuccuaagaagaaaauaauggaugcauauuaguuguucucuaaguggacucaacagugugc

SEQ ID NO: 2597 - RNA, 72 nt, Human
gcgcggcgaggaugccaacugauggcucguacggacuuguucguugaucacucacaucgugcucgcugcagc

SEQ ID NO: 2598 - RNA, 73 nt, Human
gcgcguuccccgguuuucuuuguuccaaggggggccccuauauauagggggggccggauuuuuauuagcgcgc

SEQ ID NO: 2599 - RNA, 79 nt, Human
gcgcuccaaauugaauuuacuuuuaaaaugggcaaaauaccacaauugaccauuuuagagcuaaguuaaauuggacugc

SEQ ID NO: 2600 - RNA, 68 nt, Human
gcgcuggccgccgccgccuccuccaaagggggccggguccuggaggugggcuuuggcauggccaucgc

SEQ ID NO: 2601 - RNA, 73 nt, Human
gcgcuuuguggcuccuccuggccaggucauacuucgaaguuguccccucgccaaagggacgggucaguagcgu

SEQ ID NO: 2602 - RNA, 63 nt, Human
gcggaaacgugccggagauugcuguguaccuggcuuugaagcaacuccucaguacguuuuggc

SEQ ID NO: 2603 - RNA, 83 nt, Human
gcggaaguguccucggccggcgcagcccgcgcuccgcccgcgcuccgaccccggcccggcuggcacccccucgacgccuccgc

SEQ ID NO: 2604 - RNA, 75 nt, Human
gcggagagguaucugcugcgccugagaugaguaaacugucguuucgggcgcgggcgcuagacgccucgaagccgc

SEQ ID NO: 2605 - RNA, 83 nt, Human
gcggaggcucguaacugucgguucuuuccccuucggucuuaggaugaggugggcgcaccgggcauagugguuggaguuucugu

SEQ ID NO: 2606 - RNA, 98 nt, Human
gcggaggugggggucuggcuucagggucucaguccuucccuuuagaauaucugagaggggaaggucaggaagguccaagcguugagucaccccucugc

SEQ ID NO: 2607 - RNA, 84 nt, Human
gcggcacgcccgggaggcuuucucuggcugguaaccgcuacucccggacaccagaccaccgccuuccguacacagggugcccgc

SEQ ID NO: 2608 - RNA, 72 nt, Human
gcggccaccgucaacaggagcacucggugccggagaacaugguagaggcaccucugucgggcagguggccgu

SEQ ID NO: 2609 - RNA, 60 nt, Human
gcggccgagggggagggccgggggagcggacgucgccucugcuggucucccaccucccgc

SEQ ID NO: 2610 - RNA, 93 nt, Human
gcggccggaggaccagcaggaggaggaggcggcggccgccgccgcguaccuggacgagcugcccgagccgcugcugcugcgcgugcuggccgc

SEQ ID NO: 2611 - RNA, 81 nt, Human
gcggccggggcgggagagacucagcaacgacccauaccucagacccgacggcccggagcggagcgcgcccugcccuggcgc

SEQ ID NO: 2612 - RNA, 64 nt, Human
gcggccucggugauguggaugugaaugacuggagacagcauucuauuuacaagaacgguacugc

SEQ ID NO: 2613 - RNA, 79 nt, Human
gcggcgacucgccggcgcgcugcucggagcagcgccuccgcgacgaacgcuccuccgccagcuugcucgcgggucgugc

SEQ ID NO: 2614 - RNA, 84 nt, Human
gcggcgcagcgaaaauggcggguuccaggugggcgcgcaaggccgugguccugcuuugugccucugaccugcugcugcugcugc

SEQ ID NO: 2615 - RNA, 60 nt, Human
gcggcgggagagcggcggggccuagagcgugacucggccgcuacgcgcugcuucccccgc

SEQ ID NO: 2616 - RNA, 66 nt, Human
gcggcugcagaaguaccgccugcggaguaacugcaaagaugcuguccgugcgcgugcugcggccgu

SEQ ID NO: 2617 - RNA, 67 nt, Human
gcggcugcagaaguaccgccugcggaguaacugcaaagaugcuguccgugcgcguugcugcggccgu

SEQ ID NO: 2618 - RNA, 66 nt, Human
gcggcugcagaauaccgccugcggaguaacugcaaagaugcuguccgugcgcguugcugcggccgu

SEQ ID NO: 2619 - RNA, 67 nt, Human
gcggcugcaggaguaccgccugcggaguaacugcaaagaugcuguccgugcgcguugcugcggccgu

SEQ ID NO: 2620 - RNA, 63 nt, Human
gcgggacggacgguggacgcugggacgcguuuguagcuccggccccgccguuccgacccccgc

SEQ ID NO: 2621 - RNA, 76 nt, Human
gcgggacggacgguggacgcugggacgcguuuguagcuccggccccgccguuccgagcccccgccgccgucgccgc

SEQ ID NO: 2622 - RNA, 61 nt, Human
gcgggagagucuguguguaugugucuuccccggaauccacaacacagcacccuccuccugu

SEQ ID NO: 2623 - RNA, 80 nt, Human
gcgggagcugggggugugccuccaggagcugcugauggcugacgggcggcccgggacugguggaucucccggcugaccgu

SEQ ID NO: 2624 - RNA, 97 nt, Human
gcggggcggaggcacucgcgcggggggucauucggggucuggguucuggugccugcgcagcuuuccccgauggcccacugcgugaccuugguucagc

SEQ ID NO: 2625 - RNA, 88 nt, Human
gcgggggguuucacacgcgguuuugggugcgugucgccgccaagcgucugccgcgcgacacauucuccuaugccgcgcaucccuucgc

SEQ ID NO: 2626 - RNA, 68 nt, Human
gcggucccaagggcuggagcuguuugagaacaccucggcccccuaccagcuccagaccuuuguccugc

SEQ ID NO: 2627 - RNA, 73 nt, Human
gcggucucccgccuggcccacgcccaccaugcgcauccaccccuguggcggccgggccggguuggggggcugu

SEQ ID NO: 2628 - RNA, 89 nt, Human
gcgguggcugguucugcuacuuaauggcggcaagacugguuggcccugacuacgucugugaagcccgagaugcaggaagguguggccgc

SEQ ID NO: 2629 - RNA, 65 nt, Human
gcggugggagcagcagccaaguccgcgggaaaccgagcugcucgggccugcccugcaccccccgc

SEQ ID NO: 2630 - RNA, 84 nt, Human
gcguccggcugcggcugcagaaguaccgccugcggaguaacugcaaagaugcuguccgugcgcguugcugcggccgugguccgc

SEQ ID NO: 2631 - RNA, 88 nt, Human
gcgucgccgcgaugguguuguuggagagcgagcaguuccugacggagcugaccagacuuuuccagaagugccggacgucgggcagcgu

SEQ ID NO: 2632 - RNA, 85 nt, Human
gcgucucgcgacccaggcgcggguuuccggaggacagccaacaagcgaugcugccgccgccguuuccugauugguuguggguggc

SEQ ID NO: 2633 - RNA, 71 nt, Human
gcgugggcggaaucacuugagcccaggaguuugagaucagccugggcaauauagugagaccucgucuaugu

SEQ ID NO: 2634 - RNA, 82 nt, Human
gcguggugggaggcuggggcuggugccugcggacagcuccagauggaaucccaggccacggugcuucuaguauccccccagc

SEQ ID NO: 2635 - RNA, 80 nt, Human
gcguggugggaggcuggggcuggugcugcggacaguccagauggaaucccaggccacggugcuucuaguguccccccagc

SEQ ID NO: 2636 - RNA, 76 nt, Human
gcguguuggcuuggcuguugacauggaugaaauugaaaaguaccaagaaguggaagaagaccaagacccaucaugc

SEQ ID NO: 2637 - RNA, 60 nt, Human
gcuaaauggccggaccauggagauugagucuaccuuucacauguauguccagccuguagu

SEQ ID NO: 2638 - RNA, 86 nt, Human
gcuaacuagcagggaccccugcaaguguuaggucggggggaccucgagcugccugagcugacacgaggcggaggggucuguguagc

SEQ ID NO: 2639 - RNA, 85 nt, Human
gcuaaugagguggaacaacuuguugcggaagaggaauuuuuacaagaagcuagaguugcaucuucccaaguucuccauuucuggc

SEQ ID NO: 2640 - RNA, 73 nt, Human
gcuacagaaacagucauuauauaaauuagcaucuauauucagaaucugcuaucucauugauaucuuuugcagc

SEQ ID NO: 2641 - RNA, 85 nt, Human
gcuacgaggcugggaauccuggagaacccccaagaaccaagcgccuccagggucucuacacgaaagaccaggacccagcaaaagc

SEQ ID NO: 2642 - RNA, 79 nt, Human
gcuacuccaauggcugugggagacuuaauuccaauuccaggugauacagccgucagucucccacuagcuguaggauggu

SEQ ID NO: 2643 - RNA, 67 nt, Human
gcuagcauaaguuugagggugaugcacaggggcucacaccuguaaucccaaccuuugagauagcagc

SEQ ID NO: 2644 - RNA, 93 nt, Human
gcuagccacagggaaguugagaaaagagggaaacggggauaacagaagcuaaaaauguccugaguggccuggaagaagaccccugaggugggc

SEQ ID NO: 2645 - RNA, 65 nt, Human
gcuaggagcugccaaggccucuugagugugacaucacagguuagaggcccugcugagcugcuagc

SEQ ID NO: 2646 - RNA, 70 nt, Human
gcuaggcagccagaaaccugcggaaaaugguagcgauggcggcugggccgagugggugucuggugccggc

SEQ ID NO: 2647 - RNA, 85 nt, Human
gcuaggcugagaccuauggugguggcagggguggcuguugagccugaacuuccaguacuccugcccuuccuucuguuuaccuggc

SEQ ID NO: 2648 - RNA, 131 nt, Human
gcuagucacuggggcaaagaugacuaaaacacuuuuccugcccucgaggagcucacagucuaguaugucucauccccuacuagacugaagcuccuugaggacagggauggucauacucaccucgguguugc

SEQ ID NO: 2649 - RNA, 89 nt, Human
gcuaucaguucuugcuauucucagagcacucuaucauguuuuuagguguauauuguguauucaggauagcauuaaaaagaacugauggc

SEQ ID NO: 2650 - RNA, 85 nt, Human
gcuaucuggauuuuaaagugacugaagggagcuuugucuauaaggguggaaaaaucuacaagguuccuuccacugaagcagaagc

SEQ ID NO: 2651 - RNA, 107 nt, Human
gcuauugugacaaucuugguuaccauccauuaagugcugcugauuuuggaaagaucaugaaaaacgucuuuccaaacaugaaggcacgucguuugggcacaagaggc

SEQ ID NO: 2652 - RNA, 83 nt, Human
gcuauuuuugcuguuuggcagauggugaggggucacucuggcuguccucuggcuccuccuccugcagcggcagcuuggguggc

SEQ ID NO: 2653 - RNA, 81 nt, Human
gcucaaguauuuuuuuggugugcauucuagcuaauccacauagcuaaagugaaaaaacacugaaaagaucaaugccugagu

SEQ ID NO: 2654 - RNA, 110 nt, Human
gcucacaaaaccuagguggggaugaaagcugagaaagcgaagaggugguucaggggaucacucuuuccuacuuguuccucucaccucaaacucaccuucuacugcacagc

SEQ ID NO: 2655 - RNA, 73 nt, Human
gcucacaaucucugucaucggcugauccaaccguuccuugagcuuggcagcuggcaugaagaaggaauagagc

SEQ ID NO: 2656 - RNA, 100 nt, Human
gcucacugggcacaugcaccagguacaugcacuggguacccgugagacagaggcuacuugggggauacagggucaauguggcugaguagugccuuugggc

SEQ ID NO: 2657 - RNA, 71 nt, Human
gcucagaacuuguucacgaacgugacagagcuuacguuaagcagaggucaccgggcaacuaaguuccaugc

SEQ ID NO: 2658 - RNA, 61 nt, Human
gcucagagagauuaccuggacuuccuggacugacgaggaagaccagggaauuuaucagagc

SEQ ID NO: 2659 - RNA, 80 nt, Human
gcucagccuguaauucuggaauuucgggaggccgaggcaggaagauuccuugagcacaggaguuccagaccagccugggc

SEQ ID NO: 2660 - RNA, 87 nt, Human
gcucagcgcauggcucagcggauggggcacgacagcuagcaacaguuauugucuccagucuugucugcuguuucuaggcgcuugagu

SEQ ID NO: 2661 - RNA, 74 nt, Human
gcucagcuacacagggcgugaugaccggcacuuuguacccaugggccucuacaucgucaggcagugauaugagc

SEQ ID NO: 2662 - RNA, 108 nt, Human
gcucauccuuaguggaguuguuugacgauuuggagaagagcaagauuugaucuuaugaacauuaucacggaaucuuuuccagaguucugaacuuucauuaaugauggc

SEQ ID NO: 2663 - RNA, 71 nt, Human
gcucaucgccagggaccaauuggccauccuaggcagcgacuucgccuucagccagguccuccgccuugagc

SEQ ID NO: 2664 - RNA, 84 nt, Human
gcucauucaguucaaugcuguggaaaccgagccuguaggugacagcaucagcuacuggccugguaucagcagcugagccugagc

SEQ ID NO: 2665 - RNA, 60 nt, Human
gcucauugcucaaagguauuuauuacaguaucaggagccaauaccuugugagcaguuggu

SEQ ID NO: 2666 - RNA, 80 nt, Human
gcuccaaacagcgcaacaccacaaguaccccaccaucaugaaacaggaagacagaaccugugguuugcaaccccgggggc

SEQ ID NO: 2667 - RNA, 77 nt, Human
gcuccaacccgggaaagaggguaacucccggcggaggggucccacccggcugguaaacccaucaacccggagggagc

SEQ ID NO: 2668 - RNA, 75 nt, Human
gcuccagugaacuggcgaguguggaaccuccugacaccuucugaggaccuccugccugccauguugcuguggagc

SEQ ID NO: 2669 - RNA, 60 nt, Human
gcuccgccccucucuggguucaggcgauucucuugccucagccuuccgaguagcuggagc

SEQ ID NO: 2670 - RNA, 61 nt, Human
gcuccgcgugaauggggcuggaucuuaugccggcguacaagauuaggccucucaaaagagc

SEQ ID NO: 2671 - RNA, 100 nt, Human
gcuccggcaugugcaaagcugguuuugcuggggacgacgcuccccgagccguguuuccuuccaucgucgggcgccccagacaccaggcgucauggugggc

SEQ ID NO: 2672 - RNA, 75 nt, Human
gcuccugaaaaguacaucaagucuaaagugaaccagcuaacucauuaagacuggaaucaugagcaacaauggagc

SEQ ID NO: 2673 - RNA, 86 nt, Human
gcuccuggccuaggccaugucgagccguauggugccccggugucccgucgccgggacccggcaacccgcggcccuugggccagggc

SEQ ID NO: 2674 - RNA, 84 nt, Human
gcuccugggcugaagcgaucuuccugucuugaccuccuaaaguucugagauuacaggcaugagccacugcacccagcccacugc

SEQ ID NO: 2675 - RNA, 96 nt, Human
gcucgccaagucgcugggguuagguggggcaagaguuucgccggcgcaucagcgcugcuucggacuguuugcaacguguuccagcgagcugggagc

SEQ ID NO: 2676 - RNA, 86 nt, Human
gcucuccuuucugaucuaaaaacucaucuuugggguaaagaguuaaguguccaaagguugucacaguucaugaggucagagggagc

SEQ ID NO: 2677 - RNA, 60 nt, Human
gcucucgggggcaccuuccgggguuccuaagccgcggggccccucgcugccccucgaggc

SEQ ID NO: 2678 - RNA, 69 nt, Human
gcucugccaguagguuccaacuacuacaugguaauguggugaugguaccaaguuacuggaauccagagu

SEQ ID NO: 2679 - RNA, 61 nt, Human
gcucuggauuaccuugcaccuuaugccaaguauaaaguuuggauaaagccuggugcagagc

SEQ ID NO: 2680 - RNA, 84 nt, Human
gcugaaacggcugugggaggcugggcccugggacgcccucucauagcguccagcgauccagacaaauaggagagccgugacggc

SEQ ID NO: 2681 - RNA, 82 nt, Human
gcugaagccauuggugucugcuccgcugaucguccugaugcccgaggaccuguggaccguggaaaaugacaugauggucagc

SEQ ID NO: 2682 - RNA, 74 nt, Human
gcugaaggagagcaguuuguugaagaagccuuggaaaagucuccuugccaaacagauguccuccgcagugcagc

SEQ ID NO: 2683 - RNA, 86 nt, Human
gcugacacgauggagaagguaugugcaggggacuccuggagggggacgagguuuucagcacagccuucauguuccccgugcucagc

SEQ ID NO: 2684 - RNA, 82 nt, Human
gcugacaugugguuacuggguugccauagggaugagguagcagccagguuccugacaggugacagagacugccaaggugagc

SEQ ID NO: 2685 - RNA, 87 nt, Human
gcugacgagcgggucuggcucagagcagcguccacccucggcccucacaggccccgcugcccugccgccagggcuugagcuugcagu

SEQ ID NO: 2686 - RNA, 73 nt, Human
gcugagauguccucuauucuugaagagcguauucuuggagcugauaccucuguugaucuugaagaaacugggc

SEQ ID NO: 2687 - RNA, 65 nt, Human
gcugagcaggacgugcccuccacccugggacccaucucccagggucaccagcaugaaugcucggc

SEQ ID NO: 2688 - RNA, 70 nt, Human
gcugagccuuaaugggggcagaaaggggucauaaagaacccucuucagcuccacauucacggggcucugc

SEQ ID NO: 2689 - RNA, 77 nt, Human
gcugagcgacuucgaggggaagaagcccggguaacucagcugauccguggcuuugguaguuccuggaaaucaucagu

SEQ ID NO: 2690 - RNA, 76 nt, Human
gcugaguaucagugaacucaugagcgggacagguccauucacccugaaauuccuccuuggucacugccuucucagc

SEQ ID NO: 2691 - RNA, 74 nt, Human
gcugcaauccauggugaugucgcgucaugcaugcacugacuaugagugcccugcacuacugacaauggagcagc

SEQ ID NO: 2692 - RNA, 74 nt, Human
gcugcacuggugcaugaaggugaaguaaggaggcagcuacucccuccacaaauaagaauucgugcagcagcagu

SEQ ID NO: 2693 - RNA, 67 nt, Human
gcugcagagggagaaggacaggcagugucguggccuggagcucauugccucagagaacuucugcagc

SEQ ID NO: 2694 - RNA, 73 nt, Human
gcugccacacagagggcuugcuuccaguugccacaugugagaaaggcugagagagcuuucucgugggcaccgc

SEQ ID NO: 2695 - RNA, 79 nt, Human
gcugcccugucuugcguuccaguguuccagcuucugcgagaugacccucaaggcgagcgagggcgagagugggggcagc

SEQ ID NO: 2696 - RNA, 95 nt, Human
gcugccggacgcggugcuagucgccggaugaagugagggccucacccccacgcagccuuagcuuucucgggaggaccgagcaccuuggcggcagc

SEQ ID NO: 2697 - RNA, 83 nt, Human
gcugccucacggacacacuggagcagguauugggcccccuaagacugagguaaccgacugccuguugcuuugcugugugcagc

SEQ ID NO: 2698 - RNA, 78 nt, Human
gcugccuguaaucccagcuacucgggaagcugaggcaggagaauugcuugaaccugggagguggggauugcagucagc

SEQ ID NO: 2699 - RNA, 97 nt, Human
gcugccuuccuugagcuccccaggagucgguuuccacaucugugagguggagggcugguguggaggugcucauggggugcggugcuugggagacagc

SEQ ID NO: 2700 - RNA, 63 nt, Human
gcugcgcgccggcgccgugguggccguccccaccgauacgcuguacggccuggccugcgcggc

SEQ ID NO: 2701 - RNA, 74 nt, Human
gcugcggcgggagcucgacgaaucccuccaggucgcugagagguugaccaggaaauacaacgagcugcuaaagu

SEQ ID NO: 2702 - RNA, 72 nt, Human
gcugcggcugagaaguaccgccugcggaguaacugcaaagaugcuguccgugcgcguugcugcggccguggu

SEQ ID NO: 2703 - RNA, 91 nt, Human
gcugcuaucucaugagguaaaugcgugaucacauagccaagagaugccuuuuuguucuaaugaucacuguaagaccuucuugagagacagu

SEQ ID NO: 2704 - RNA, 74 nt, Human
gcugcugcugaagucaccugaaaacucaacuaagcuaaagagccuagauggguuacucagaugacuggcagugc

SEQ ID NO: 2705 - RNA, 82 nt, Human
gcugcugcugcuccccagcccaccagugccuggccagccugcccccuucccuggacagggcuguggagauggcuccggcggc

SEQ ID NO: 2706 - RNA, 61 nt, Human
gcugcugcugcugcuggccggggccgggcugucagccgccucgcccccagcagcgccgcgc

SEQ ID NO: 2707 - RNA, 68 nt, Human
gcugcuggggagcagagagggacccucuaucgcuggcuucagggggugccuugggucccuucaguagc

SEQ ID NO: 2708 - RNA, 80 nt, Human
gcugcugugaucccgacugcagcuccguggauuucagugucuuuucugccugcucaguuccaguugucacgggcgacagc

SEQ ID NO: 2709 - RNA, 76 nt, Human
gcugcuuccggagcaccugucuucauugccucucccuucugcagccugaaaggagggauguucaggacucugcagc

SEQ ID NO: 2710 - RNA, 81 nt, Human
gcugcuugagucaugcugaagagauaggcuucauagauuauauuuaagaaguugucaucauucugaaugagguacagcagu

SEQ ID NO: 2711 - RNA, 60 nt, Human
gcuggagauaaggagugggcccuggaagaugcucauucaggcccugcucaagauuccagu

SEQ ID NO: 2712 - RNA, 61 nt, Human
gcuggagaugcgcuuggggccgcgcuggaagggcgaggcccuggagcaggccaucaucagc

SEQ ID NO: 2713 - RNA, 71 nt, Human
gcuggaggaagaggagucgcagagaaacccaguccucugacugguuucuggugaggucucuauucaucagu

SEQ ID NO: 2714 - RNA, 76 nt, Human
gcuggaggacggccugaaccgggugcugggccugggccugggcugccugcgccucaccgaggccgacuaccugagc

SEQ ID NO: 2715 - RNA, 121 nt, Human
gcuggaggacugcuucaccuuccugggcaaucuuccuggccaucauccucuuccccuuuggguucauuugcuguuuugccuugaggaagcgacgaugccccaacuguggagccaccuucgc

SEQ ID NO: 2716 - RNA, 81 nt, Human
gcuggaguacaggaguucugggcuguagugcgcuauggcacaaucauagcucacugcagccucuaccuccugggcuccagc

SEQ ID NO: 2717 - RNA, 65 nt, Human
gcuggagugugaucuagcucacuguagccucaacguccauggcucaggugauucucacacucagc

SEQ ID NO: 2718 - RNA, 99 nt, Human
gcuggauauugcuaagaauucagguagucucgggaucuccagagucuccauacuaggacaggagaucuucagaaccuggaggaauggaaauagucuagu

SEQ ID NO: 2719 - RNA, 87 nt, Human
gcuggcccucacucccgcuaggaugaucacuuuucaugguuauugcuccauuuagggucucuagaaggcagguaguguggugccggc

SEQ ID NO: 2720 - RNA, 103 nt, Human
gcuggcggccuuggacggggcaguggcucccccggccugaggagugccgccccuuguggccacgcugcccagcaggccggcuccuucccucucgggcgccagc

SEQ ID NO: 2721 - RNA, 86 nt, Human
gcuggcgugccugggcagcacccucggggguagcagcuacuccagcugcuacagcuuuggcucuggugguggcuauggcacgcagc

SEQ ID NO: 2722 - RNA, 80 nt, Human
gcugggaccugcugagacucccccuggagcgggagcagaauggagacagccaccauucaggggacuggcgggggcccagc

SEQ ID NO: 2723 - RNA, 83 nt, Human
gcugggccuguuggucaggcauggaggagcuguguggucacuggccacuggcucucuucugcaccaccgccggcucugacagu

SEQ ID NO: 2724 - RNA, 85 nt, Human
gcugggcuugcgcuugcggccgguguacugggugucaggucugacuucccugcccuggcgccugugccgcuccuucuucuccagc

SEQ ID NO: 2725 - RNA, 62 nt, Human
gcuggggagagcccccucggggggcaucggucaagcugcugaacccccugcucaccgccagc

SEQ ID NO: 2726 - RNA, 60 nt, Human
gcuggggcaccaugcagagucagagaagggauuacacucugcaaauuuugugcucacagc

SEQ ID NO: 2727 - RNA, 88 nt, Human
gcugggugccaggggcaggggauccucaguauagccggugaacccugauaccaggagccugggccucccugaaccccuggcuuccagc

SEQ ID NO: 2728 - RNA, 84 nt, Human
gcuggucccaggaagauguccgucagccccuggagagcuggcucacggccgcugcuuccugcccagacuggauaccgggaccgc

SEQ ID NO: 2729 - RNA, 70 nt, Human
gcugguggggccaggaguggaacugcucuugacaccccgagagccagcccugcccuuggaaccagacagc

SEQ ID NO: 2730 - RNA, 60 nt, Human
gcugguguguaucggcccagggugacucaagacgucaaccugcugcugagccacgccggc

SEQ ID NO: 2731 - RNA, 72 nt, Human
gcugguuuccuggccgaggcggagcugcugaaccugaggaagaucagcuccgacuuuggacgggcacccggu

SEQ ID NO: 2732 - RNA, 82 nt, Human
gcugucgcccccaagcucgccccuggacacgcccuuccucccugccucacgggacucgccgcuggcgcagcuggcggacagc

SEQ ID NO: 2733 - RNA, 67 nt, Human
gcugucgcgccgcgcugcggggccaugauccggaacgggcgcggggcugcaggcggcgcagagcagc

SEQ ID NO: 2734 - RNA, 71 nt, Human
gcugucguuuuuuccuugacacuuguaggcuccucuucauguuuacauaaccucagugggaaaacgccagc

SEQ ID NO: 2735 - RNA, 104 nt, Human
gcugucuauuaugagucugacuggcacagacaucugucaaggaagaaggauucuuugagcguauuugugucagucaacugcauauauggaccacaacagaaagc

SEQ ID NO: 2736 - RNA, 79 nt, Human
gcugucugcuuguggauuucauuucugccuuuuagauuuuacuucuuucuuuggaggcagaaauugggcauaagacagu

SEQ ID NO: 2737 - RNA, 72 nt, Human
gcugucuuggaagacauggcucguccggacagacauggauugucuggacgauguggcuuuucuauggcaugu

SEQ ID NO: 2738 - RNA, 107 nt, Human
gcugugccagcgccgggccuuggaagccuuugaccuggauccugcacaguggggagucaauguccagcccuacuccggguccccagccaaccuggcgucuacacagc

SEQ ID NO: 2739 - RNA, 67 nt, Human
gcugugcggcucaaggagaagaagcuggugaaggaggucaucgccgucagcugugggccugcacagu

SEQ ID NO: 2740 - RNA, 82 nt, Human
gcuguggcuggauucaaguaauccaggauaggcuguuuccaucugugaggccuauucuugauuacuuguuucuggaggcagc

SEQ ID NO: 2741 - RNA, 87 nt, Human
gcugugguugcuguaagggguccucccugcgccacacggccgucgccauggugaagcugagcaaagaggccaagcagagacuacagc

SEQ ID NO: 2742 - RNA, 83 nt, Human
gcuguguugcccaggccggucacaaaaagaggggcuuuaucuaauguccucuguuuguauguauuugaagugggcgauaaagc

SEQ ID NO: 2743 - RNA, 106 nt, Human
gcuguuauaccgugugugucuguguuuuaaacauuguuuauuugagacagggucucacucugucaccaggcuacagugcagaggcacagucacagcucauugcagc

SEQ ID NO: 2744 - RNA, 80 nt, Human
gcuguuggcaagaaacggcuuuacuuacaaaacagacucuuuaccuucugcuguguuugaaguauguuuagucagcaugc

SEQ ID NO: 2745 - RNA, 85 nt, Human
gcuguuggugaguauggagaucucugcccuugucagaggaaggcuuccucaucacaaggcagggcaggugucugugcccaagagc

SEQ ID NO: 2746 - RNA, 71 nt, Human
gcuuaaaaugccagauguuguucgggggacaacuuguaucuuucuagcagcagaucuguaguuuguauagc

SEQ ID NO: 2747 - RNA, 81 nt, Human
gcuuaauuauuacgggcacugccuuggagcgauguuaaaaaacauugaugaugcaguucuuucaacagguauuuauugagc

SEQ ID NO: 2748 - RNA, 75 nt, Human
gcuuaauugcugauacauaugaaugaaaccuuggcugguauuaccuggcauucacugugcuaucggcaaugaugc

SEQ ID NO: 2749 - RNA, 72 nt, Human
gcuuaccaggaagcauuugaaauuaguaagaacagaaaugcagccuacacacccaauucgucuuggucuggc

SEQ ID NO: 2750 - RNA, 68 nt, Human
gcuuagauaagucuggguucuacucccaaagccucuaggcuaggcauggagcagcccaauuaucuagc

SEQ ID NO: 2751 - RNA, 83 nt, Human
gcuuauccccuguguccccgcuccuggccccuccagacccccgccuugccucgcgcugggaggggagauccagaaugaaaggc

SEQ ID NO: 2752 - RNA, 72 nt, Human
gcuuaucucuuuugguuccuuguuggaaaguugauuuugaaggcauccagcuugggaacccgggacaauagc

SEQ ID NO: 2753 - RNA, 75 nt, Human
gcuuauuuaaguguccacuuucuuuaucccauccuauucuuugugauaaaccagagggaucaggcuuaaccaagu

SEQ ID NO: 2754 - RNA, 73 nt, Human
gcuucauucauggcuguguuugagauaacuaaaguaaauuuuuuuucagguauuuggugucauguuuuggagu

SEQ ID NO: 2755 - RNA, 82 nt, Human
gcuuccccaaacagcuaggaugaaggcaacauauuccucacaggucauuugaucuugagguccuucaaggcugacuccaagc

SEQ ID NO: 2756 - RNA, 75 nt, Human
gcuuccccaugccucaguuugcucuggguuagcucagcagcagcacucaauauuccacagaagcaagggggaagc

SEQ ID NO: 2757 - RNA, 77 nt, Human
gcuucccugggagaaaguccuucccuccccauggcccagcccuggggaaagaaagcagagacuaacucagggacugc

SEQ ID NO: 2758 - RNA, 67 nt, Human
gcuuccuucgucuaccacucugugccagcuccaacagaccuggcaacuaauaggacuagaaggaggc

SEQ ID NO: 2759 - RNA, 87 nt, Human
gcuuccuugucuuuugccucauaucgucagguagcuaguuucgguucagcugcuccucccagacaguuugaugcaucucaauucagc

SEQ ID NO: 2760 - RNA, 81 nt, Human
gcuucgagucggccaccuuccuaggcuacuucaagucuggccugaaguacaagaaaggagguguggcaucaggauucaagc

SEQ ID NO: 2761 - RNA, 83 nt, Human
gcuucgccacugauuguccaaacgcaauucuuguacgagucugcggccaaccgagaauuguggcuggacaucuguggcugagc

SEQ ID NO: 2762 - RNA, 113 nt, Human
gcuucucugcuccccugggugaugggugggcccagaagguggcagucccacaccuuguccucccaccucccugaaacuguccauugcuuuuauagggugagguaagugacagc

SEQ ID NO: 2763 - RNA, 62 nt, Human
gcuucuguuugugcacaaguaacacgacgacugaaaucugcaacuacugcaaagacgcgggc

SEQ ID NO: 2764 - RNA, 89 nt, Human
gcuucuugcugaucagagcuugguuggcacagccgggguccucgcccucggcccugcuguucucccggaucgcucugauccagcccagc

SEQ ID NO: 2765 - RNA, 72 nt, Human
gcuugaacccaggagguggagguugcagugagcugagauccugccacugcacuccagucugggugacagagc

SEQ ID NO: 2766 - RNA, 72 nt, Human
gcuugaacccgggaaguggagguugcagugagcugagaucaugccacugcacuccagccugggugacagagu

SEQ ID NO: 2767 - RNA, 73 nt, Human
gcuugacuuuagacacagguuucaaaaguagaaaguuuuauucucuuauguuucuauggcuuugaaguuuugc

SEQ ID NO: 2768 - RNA, 71 nt, Human
gcuugauuugcuuggugaccgaauuacuaggugacuaguuuacuaacuaggucauucacggcaagucaagu

SEQ ID NO: 2769 - RNA, 71 nt, Human
gcuugcucaugauguacgcgcaguccaaaggcaucuacuacgugcaguggaggaugacaucgugggcaagc

SEQ ID NO: 2770 - RNA, 104 nt, Human
gcuugcuccacuggaggaggugcugggcagcguucuucugaggccagugcuggcuggguucaggucguaugccaggugccccugcagcucccccagggagaagu

SEQ ID NO: 2771 - RNA, 76 nt, Human
gcuuggaaaagaucaggaaugucccgcagggcuuugcggaugugguuucccgagcccugggcguccgucucugagc

SEQ ID NO: 2772 - RNA, 106 nt, Human
gcuuggagccucccccagagguguggcaggugcugaagacccaccccggagacccccgcuuccagugcagucucuuggcaucucuauccccuaugaggcaccacgu

SEQ ID NO: 2773 - RNA, 73 nt, Human
gcuuggaguucuaugauuuucucagguaccgacauuuacgagcacccguuagaaagagcgugggacccucagc

SEQ ID NO: 2774 - RNA, 83 nt, Human
gcuuggccaacauggugaaaccccaucucuacuaaaaauacaaaaauuagcugagcaugguggugcgcgccuguaauccaagc

SEQ ID NO: 2775 - RNA, 77 nt, Human
gcuuggccuaugacaggucaccguguguaaaucuuucccaauaaaguguugcacaaaggcauccuguccgugcaggu

SEQ ID NO: 2776 - RNA, 84 nt, Human
gcuuguaacuuuccaaagaauucuccuuuugggcuuucugguuuuauuuuaagcccaaaggugaauuuuuugggaaguuugagc

SEQ ID NO: 2777 - RNA, 77 nt, Human
gcuugucucucuauauugugaugaucugcugacuucuagccucuucaacuagacucuaagcuccuugagagacaugu

SEQ ID NO: 2778 - RNA, 74 nt, Human
gcuugucugcaacagccccaaacuggaaacaacccauauccaucaaguuuauccagcaggguggacaaauaagc

SEQ ID NO: 2779 - RNA, 81 nt, Human
gcuuguggagaaccuucaggcagagggagaguuggcuccuuaacaggggcuuguugaccucaguggaauguuguccaaagu

SEQ ID NO: 2780 - RNA, 67 nt, Human
gcuuguucuguucuaccagugucuugacaguuaaucaugaucuuugcacaguagaugcagaacuagu

SEQ ID NO: 2781 - RNA, 123 nt, Human
gcuuuaaauaauuggcuugagguuuuuuuggauaucagaggaaguaagucuuuuuauucuaccuagcaucuaguuuuugauagacaaguuuccuuauuauaccccucuucugguugguuuggc

SEQ ID NO: 2782 - RNA, 72 nt, Human
gcuuucaccagcuuuacccaaacgccuuuugucuuccgaagucaccugugugaaggggacaguggugcaagu

SEQ ID NO: 2783 - RNA, 73 nt, Human
gcuuucccucuccuuuauaaauugcauauauuuuuaacauauauuaacacuuuaaaaccgugggguggaaagu

SEQ ID NO: 2784 - RNA, 78 nt, Human
gcuuugccugcauggauggacaagaguuccgcuucgcacagcuguguggucuucacaucgucauucaugcagaugagc

SEQ ID NO: 2785 - RNA, 60 nt, Human
gcuuuggucucugcuggacagcccuugggggagcagggaguccagcagggccaguccugc

SEQ ID NO: 2786 - RNA, 61 nt, Human
gcuuuguuaaaugugcaucauuucacucuuuugauugaaugauugccggaaagugcaaggc

SEQ ID NO: 2787 - RNA, 83 nt, Human
gcuuuucuuucauaucugaaaccuagcugcuuacuuggcuuuucaauuucaguaguuaggauucugauuuugucuacucuagc

SEQ ID NO: 2788 - RNA, 103 nt, Human
gcuuuuugggguuuuuuaagaggugaagucuugcucugucacccaggcuggagugcagccacaugagcucaagagauccucccucuucagccuccaaagcagc

SEQ ID NO: 2789 - RNA, 89 nt, Human
ggaaaaaaacuuuaauuggcgccaaaaaacagaaugaaaugggcuuggccuuauauuguguuuuuugcguuggucugggguuuucuucu

SEQ ID NO: 2790 - RNA, 71 nt, Human
ggaaaaaacgccggagaaauuugggguuggaaaccccuguuuuuggccccgcaacuccuugaccuaaaucc

SEQ ID NO: 2791 - RNA, 70 nt, Human
ggaaaacggcaaaauuguguacguugauguaccgccgagaggugggacuuugaccugcaauuagguuucc

SEQ ID NO: 2792 - RNA, 70 nt, Human
ggaaaaugggagaugauuaagaguugguguggccuagucacaccaaaauguauuuauuacauccugcucc

SEQ ID NO: 2793 - RNA, 85 nt, Human
ggaaacagggaaagguuuuuuugcguguagggguugugcaaacccuaaugcauaacggagcaugaaaagacuuuccccuguugcc

SEQ ID NO: 2794 - RNA, 63 nt, Human
ggaaaccccacguguccuuuccuaaccaggaagcccguccucuaaggagggggcauggguccc

SEQ ID NO: 2795 - RNA, 77 nt, Human
ggaaacuggggccuucuuugaguacuagugaguaagacauuuugcaacagugcugaguaugaaaggcccuggucucu

SEQ ID NO: 2796 - RNA, 69 nt, Human
ggaaagagguugugagcugauuggauuaaagaccuggcacuucaguaacucagcacgcuuccacuucac

SEQ ID NO: 2797 - RNA, 75 nt, Human
ggaaaggcuucguucugccaaacagagacuccaaguguugccagucuccaaaaauucggagaaaagagccuuucc

SEQ ID NO: 2798 - RNA, 85 nt, Human
ggaaagguccagagcuguggagaaagaaggggcucccugucuccaggguuuguuuaagguuuucuccauggccuagggcccagcc

SEQ ID NO: 2799 - RNA, 87 nt, Human
ggaaaugguuauugaaucagauagaccaguucuguugagggucuuaaagagucucaauuuucucaucuauaaaaccaauaccuuucc

SEQ ID NO: 2800 - RNA, 62 nt, Human
ggaaauuacacugaggcggugagacgaugggagaacguccgugucucuagcccggugggucc

SEQ ID NO: 2801 - RNA, 65 nt, Human
ggaacaccauaggaguugccaucagagauaacacccauggacacaaacucucccucugggguucc

SEQ ID NO: 2802 - RNA, 72 nt, Human
ggaacagggagggccugugucuggccaggcugagguuccagaucuguugccaucauggccccuucagggucc

SEQ ID NO: 2803 - RNA, 107 nt, Human
ggaacagguccuuuaccucuuaccauguuuuagacuaguugguugguugguugguuugguuuugauugguuaguuaguugguuuguggguagugguuugugcugucc

SEQ ID NO: 2804 - RNA, 79 nt, Human
ggaacauacuugccuggagauagccuuugcgauauuuaaauguccguggauacagaaaucucugcaggcaaguugcucc

SEQ ID NO: 2805 - RNA, 130 nt, Human
ggaacucagauaaucaucccuuuccagaaaguucugagcagccugggagcagcagggaaggagaagucagcucuauuccaggggcuccacagaacuaaugagguuggggagggaagcuuaaaagauagcc

SEQ ID NO: 2806 - RNA, 129 nt, Human
ggaacuccaaauauauguauacuagacuacuugauauuguuuaaaggccauggaggcgguuccuuuuuucucccuggucuuuuuuccucucugugcuucaguguggguaguuucuguugcugugucucc

SEQ ID NO: 2807 - RNA, 86 nt, Human
ggaagacgagugcuccgggacugcauacacucauggugccgaugucucugucucguggcacguagugguaagcggcauuugguucc

SEQ ID NO: 2808 - RNA, 108 nt, Human
ggaagacuugaagagguuaucacgacauuuaaggaaucugauccucagaacuucucugggacaauuucaguucuaauaaugucuuaaauuuuauuccaguccuguucu

SEQ ID NO: 2809 - RNA, 73 nt, Human
ggaagagauaugcaacuggcuaguccucgcguccuugcaauguacaaguggagcuucagaagcaaucucuucc

SEQ ID NO: 2810 - RNA, 76 nt, Human
ggaagagugccucagggcagcggaaccggcucauugcaauggugauggacuggccgucagagcucguaacucuucu

SEQ ID NO: 2811 - RNA, 103 nt, Human
ggaagcaaagguggcacauugauuauaacacacagcugaggucucgaucacacuagaugucuccagucagucguguggaaaucgaugugcuucagaacagucu

SEQ ID NO: 2812 - RNA, 73 nt, Human
ggaagcauucagcagcuggacgcugagcugaggaacaccaagugggagauggccgcccagcugcgagaauacc

SEQ ID NO: 2813 - RNA, 87 nt, Human
ggaagccaagacaugcugggcuuaaacuacccaugagaugcacuucucuggugacaguuuaccuggugauaugguuuggcuguaucc

SEQ ID NO: 2814 - RNA, 65 nt, Human
ggaagccaugaagcagucuucuugccgugaaugggguaaauauggacugcgcauucauggguucc

SEQ ID NO: 2815 - RNA, 130 nt, Human
ggaagccuucccuuaccucagccugguugagggcccccugggcuguuuucacugguugaugguaucugaucccuuccagccugagguuccuggagggccaguccaggucugaggucugguucaugcuucc

SEQ ID NO: 2816 - RNA, 67 nt, Human
ggaagcgagcgagcgcuucgcugccggcuacauccagugcaugcacgaggugcacacguucgugucc

SEQ ID NO: 2817 - RNA, 97 nt, Human
ggaagcugggaggacgcagauccuucggaccggggggcgacccuuuuuaggcugugacucggggguggccccaggcccgggauagcccccagauucc

SEQ ID NO: 2818 - RNA, 87 nt, Human
ggaaggagccagaauggaggcccaggcugggagguguccgugcuggagccaguuuugagccaagccucaggaagcuggcugccuucu

SEQ ID NO: 2819 - RNA, 94 nt, Human
ggaaggauuggagagccacuugaggucauauguuaagguauguaaaacacacuguucugaucacuuacaucuguggcucuccaguuuuccuucu

SEQ ID NO: 2820 - RNA, 94 nt, Human
ggaaggauuggagagccacuugaggucauguguuaagguauguaaaacacacuguucugaucacuuacaucuguggcucuccaguuuuccuucu

SEQ ID NO: 2821 - RNA, 73 nt, Human
ggaagggcagcuuggcagagccucaggauggacccccuuggggacacgcugcggcgacugcgggaggccuucc

SEQ ID NO: 2822 - RNA, 73 nt, Human
ggaaggucacgugcgacaaaaguucuggaggccuuuugaaaggcacaccgagcaugugguucgcaccacuucu

SEQ ID NO: 2823 - RNA, 102 nt, Human
ggaagguucaacacgaauugugcaaaaucucuggauauauuaguuuagcgauaugguuguugaagaaaauaauauguuuuaagcauucacaacgugaccucc

SEQ ID NO: 2824 - RNA, 72 nt, Human
ggaaguccagugucaaggugccauuagguuuggugauucugauuccaggauggcaccuugaacgcugcgucc

SEQ ID NO: 2825 - RNA, 80 nt, Human
ggaagucucaaccuggagaagaugcuauacaaugcaagaggugaacucugccuuaguaaaauccagcuggugggauauuc

SEQ ID NO: 2826 - RNA, 86 nt, Human
ggaagucugauuaguugcugggauggucccauccaugaagcacuggacacaugcugggaaccaucugugcauaaaucagaagagcc

SEQ ID NO: 2827 - RNA, 90 nt, Human
ggaagugaccugcaggagagcauacuuggcaaggaugagaauaccugugugauaaacacagcaucugcacauauuuccugcuugauuucc

SEQ ID NO: 2828 - RNA, 79 nt, Human
ggaauaaaccugagaaaggauaguggcucuagagaaacaguaauagcaccuuucuagcaccuuugauuuuucucagucc

SEQ ID NO: 2829 - RNA, 64 nt, Human
ggaauacaucaauggggacaaguauuuccagcagauuuuugauuguccccggcugaaguuuucu

SEQ ID NO: 2830 - RNA, 98 nt, Human
ggaauauaaagaucuuguuucuucauauuucaaacaccaaauaguauuagucuacuacuaauaguguuagaacaccagauacaaagcuaaaauauucc

SEQ ID NO: 2831 - RNA, 79 nt, Human
ggaauaucugauccaugauuucaccuuaaugguagaaguaccugcuauuuuugguaaugaucuucaggcagauuuggcc

SEQ ID NO: 2832 - RNA, 96 nt, Human
ggaaucugcacauacuuaucuaauacuguguuuucugaauuaugcucacaagaugcuaagauggaaaagaacaugagugguagugcagcugguucc

SEQ ID NO: 2833 - RNA, 83 nt, Human
ggaaucuggcaggaagcauccagggcccagccucugucaggccuggcuuggccugggggccccagcugcuucuuccauugucu

SEQ ID NO: 2834 - RNA, 83 nt, Human
ggaaugaggucugaacuccacugaauuaaaccacuggcauuugggggcuguguauuauagcagugcaaagaguuccuuuaucc

SEQ ID NO: 2835 - RNA, 85 nt, Human
ggaaugcugcaaaaauacucuaguucaacaaagaguuaugaucacaaaauaauuuuuauccauucuacaguguuucagaauuacc

SEQ ID NO: 2836 - RNA, 76 nt, Human
ggaaugguauuagucaaacauggugccagugucuuuuacaaaaacagauggcauagugucagauguaccuuacucu

SEQ ID NO: 2837 - RNA, 103 nt, Human
ggaauuuuggguuauacuacgauucuggacugaaaugguaugcagguaugacuuaaaagccauagguauacugggcaccauuugagcacguauagccacuucc

SEQ ID NO: 2838 - RNA, 95 nt, Human
ggacaagcugauuuccugaggcaucgaugaggcucauggcacuggcaugggagagguuggugcaagagaccccauugauugccaagagcuggucc

SEQ ID NO: 2839 - RNA, 83 nt, Human
ggacaaggaccaggaccugaucaccaucauuggaaaggaggacgccguccgagaggcacagaaggagcuggaggccuugaucc

SEQ ID NO: 2840 - RNA, 75 nt, Human
ggacacccgggccuccggcccuggcagucagaugugcucacccuggucggccaacaccgccggacccgggcgucc

SEQ ID NO: 2841 - RNA, 60 nt, Human
ggacaggaacacugaccccugaagucgagccugggggucuaacauaguggucauuugucc

SEQ ID NO: 2842 - RNA, 69 nt, Human
ggacaggcucugcccaggaagagcugccgccuccuggcacagcaaacguuccaggccugggcccuguuc

SEQ ID NO: 2843 - RNA, 86 nt, Human
ggacaguuuggcuggacauaguaugucuuauuuggcaguuuguccccuucugcacugugaauauauuaugucagucccuucuggcc

SEQ ID NO: 2844 - RNA, 128 nt, Human
ggacaucaaagaauaaauaagcugcucuaauugccaagaauucacaugugguuguaugcagcuuuacugggagacugaaguguaucugcaugugauucugcugugauggacacuuguaaguuugugcc

SEQ ID NO: 2845 - RNA, 94 nt, Human
ggacauccaccucuucccugcucgucacugaacggagcuugaugaccccauccuugaguuccugcucgccgaugauagccaccagugggaugcc

SEQ ID NO: 2846 - RNA, 93 nt, Human
ggacauguagagugcuuuuguagugagcuaaccuugaucucuaaggacuaacuacccagguccaggucuucacuagggguacugacaguguuu

SEQ ID NO: 2847 - RNA, 68 nt, Human
ggacauuugguggcugaggagagcgcgucacugcuauugaauagcuccauuuaacaccagccaugucu

SEQ ID NO: 2848 - RNA, 77 nt, Human
ggaccacagguguaggccaccaugucuggcugauuuuuuaauuuuuuuguagucaugggggucucacuauguugucc

SEQ ID NO: 2849 - RNA, 85 nt, Human
ggacccccaucucugugacuuccuggagcaccucacuuccuagcaugaggaacgugaagcuuuaucacagaagcauggggugacc

SEQ ID NO: 2850 - RNA, 76 nt, Human
ggacccgggggacuggggaggcucuggccggcguaguccuugccgccagccuucacagcggguucucugagggucu

SEQ ID NO: 2851 - RNA, 114 nt, Human
ggacccuuucaccuccccuuucuaacuguaccugggaggagcuuaggcucucuucuuauggaccaacugauguucacucagguaggaugaaauggggugcaagaaauuagguuc

SEQ ID NO: 2852 - RNA, 77 nt, Human
ggaccucagguggcugaaggagacgaauguauuuggugucugccauaucuuugcauccuucaaugacacuuuugucc

SEQ ID NO: 2853 - RNA, 104 nt, Human
ggaccugcagcugucgcgcgaggggucugggagauggggccacuggauccagcauccucuccguacuccaggaccucuucucugucaccuggcucaauaggucc

SEQ ID NO: 2854 - RNA, 64 nt, Human
ggaccugucaccccaccauggagaaaagagucuuuugguucuuuuuaacauaagugauuaguuu

SEQ ID NO: 2855 - RNA, 95 nt, Human
ggacgauucugcagaggcauuaagauaacgcuguccagauacauacucucccgugugcaucugggauccuggguccugaggccuuucaggagucc

SEQ ID NO: 2856 - RNA, 79 nt, Human
ggacgauugcaugguuauuucuugaauauuugacuugauccccaugaaggucaauauuuuaaaugugaugcaguuguuu

SEQ ID NO: 2857 - RNA, 79 nt, Human
ggacuccacuuacgacuauuaugaggcaaacaucugccugugcaguuugucuuuccauccagucuauucuuuggggucc

SEQ ID NO: 2858 - RNA, 91 nt, Human
ggacuccagcccgccccagaagccgagguuucuccugagcgaggugagcaccuguaccuggagguuggagacaggggcagggcuggcagcc

SEQ ID NO: 2859 - RNA, 78 nt, Human
ggacucggcccccugccagcccccgaagcauugcagccaggagugcagcgugggggcccugcaggccauggccaggcc

SEQ ID NO: 2860 - RNA, 98 nt, Human
ggacucgguccccgagcugcgcuggcugcccgugcugcggcacuacgacuuggacuuggugcgcgccgcgauggcgcaagucaucggggacagagucc

SEQ ID NO: 2861 - RNA, 85 nt, Human
ggacucuauagaggggcacgccggggcuauuuaggacuaucaguuggcgaauuuuccuggggacucccuuuuaguacuggagucc

SEQ ID NO: 2862 - RNA, 95 nt, Human
ggacugaaagagaacugggauggaggagaauuagaggauggugugguguuucccaagacauccccugaucuugcuaucccagcaucuccuagacc

SEQ ID NO: 2863 - RNA, 60 nt, Human
ggacuguucuacucagccucuguggaagaaaacuucccacagggcugcacuagcacagcc

SEQ ID NO: 2864 - RNA, 79 nt, Human
ggacuuccagaguucaguuccuucuggcagagagguaucuuucuccaugccauauggaugugacucaaaugaggggucc

SEQ ID NO: 2865 - RNA, 67 nt, Human
ggacuugcagagagaguuuucuacuggaauguaagagguuuugaaggcucucuuuucugcaaaggcc

SEQ ID NO: 2866 - RNA, 106 nt, Human
ggacuuuuucucugcccuucgucauuaugcagccugugaacagcgucugggaaagucguggucauugguugcauaauuccauuugaggcuuauggaggaaaggacc

SEQ ID NO: 2867 - RNA, 61 nt, Human
ggagaaaaaguccuacuuuucuggguccccaggugcagcaccucccagagacuguuucucc

SEQ ID NO: 2868 - RNA, 106 nt, Human
ggagaaacagacaggaggggggaaggaaccaaacuguuuucuaaggaucgguugucugcaugaagaaauuucgguuucccuccaaccgcccccuccucgauucucc

SEQ ID NO: 2869 - RNA, 79 nt, Human
ggagaaaggcugagcuuggagaaaaggugcuugaggaccccacugccuaaggaccugcucuaggaaacauucccacucc

SEQ ID NO: 2870 - RNA, 74 nt, Human
ggagaagaucaccucuucucacagcacacaaauuuuauguuugucucauugcaguguagaagguauucuguucc

SEQ ID NO: 2871 - RNA, 88 nt, Human
ggagaaucacuugaacccaggagguggagguugcagugagccaagaucaugcuacuguacuccagucugggcaacagagugagacucc

SEQ ID NO: 2872 - RNA, 88 nt, Human
ggagaaucacuugaacccgggaggcaaagguugcagugagcugagaucgugccacuguacugcagccugggagacagagugagacucc

SEQ ID NO: 2873 - RNA, 91 nt, Human
ggagaaucacuugaaccugggaggcagagguuguugcagugagccgagauugcaccacugcacuccagccugggugacagagugagacucc

SEQ ID NO: 2874 - RNA, 91 nt, Human
ggagaaucacuugagcccaggaggcggagguugcagugggagccaagauaacgccauugcacuccagccugggcgacaagagugagacucu

SEQ ID NO: 2875 - RNA, 88 nt, Human
ggagaaucacuuuaaccagagaguuggagguugcagggagccgagaucgcaccacugcacuccagccugggugacaaagcgagacucc

SEQ ID NO: 2876 - RNA, 89 nt, Human
ggagaaucauuugaacccaggagguggaaguugcagugagcucagaucgcaccauugcacuccagccuggguaacaagaaugaaacucc

SEQ ID NO: 2877 - RNA, 88 nt, Human
ggagaaucgcuugaaccaggagguggagguugcagugagccaagaucaagccauugcacuccagccuggucaacaagggcgaaacucc

SEQ ID NO: 2878 - RNA, 88 nt, Human
ggagaaucgcuugaacccgggaggcagaggcagcagugagcugagaucacaccacugcacuccagccugggcaacaaugugaaacucc

SEQ ID NO: 2879 - RNA, 112 nt, Human
ggagaaugacacagaucaaagagcuuuuuccaagccaguauuuuccaaaccgcggguuauaaucucuagcgcauugugaaauugguuugguagaucgggaucaucacccucc

SEQ ID NO: 2880 - RNA, 88 nt, Human
ggagaauggcaugaacccgggagguggagcuugcagugagcagagaucacgccacugcacuccagccugggcaacagagcgagacucc

SEQ ID NO: 2881 - RNA, 89 nt, Human
ggagaaugggccugaacccgggaggcggacguugcagugagccgagauugcaccacugcacuccagccugggcaacagagcgagacucc

SEQ ID NO: 2882 - RNA, 88 nt, Human
ggagaauugcuugaacccaagagguggagguugcagugagccacgauugugccauugcacuccagccugggugacagagugagacucc

SEQ ID NO: 2883 - RNA, 89 nt, Human
ggagaauugcuugaacccggguggcggagguuguggugagugaagauugcacuauugcacuccagccugggcaacaagagugaaacucc

SEQ ID NO: 2884 - RNA, 88 nt, Human
ggagaauugcuugaacccuggagguggagguugcagugagccaagauugcgccauugcacuccagccugggugaagaagugagacucc

SEQ ID NO: 2885 - RNA, 89 nt, Human
ggagaauugcuugaaccugggaggcagaaguugcagugagcugagaucaugccauugcacucuagccugggcaacaagagcaaaacucc

SEQ ID NO: 2886 - RNA, 88 nt, Human
ggagaauugcuugacccgggaggcggagguugcagugagccaagauugcgccauugcacuccacccugggcaacaacagcgaaacucc

SEQ ID NO: 2887 - RNA, 88 nt, Human
ggagaauuucuugaacccaggagguggagguugcagugagccgagauugcgccacugcacuccagccugggcaacagaacaagacucc

SEQ ID NO: 2888 - RNA, 60 nt, Human
ggagacaaauaucuggggccugcaguucuuaugcaggccuaucgcuggaugauugacucc

SEQ ID NO: 2889 - RNA, 112 nt, Human
ggagacaugauguagcagaugaugggacugucuuacauaacuggaucuuuuagaacuaucgaagauuaaguaguaaaaugguauaaaaaguuucuugacaauguuauuuucc

SEQ ID NO: 2890 - RNA, 82 nt, Human
ggagacauggagugggaggucagcaguggugauggauucuggagauacuggaucaccaugagcagagcucucauuucucucc

SEQ ID NO: 2891 - RNA, 83 nt, Human
ggagagaggguguagagucaugccaguucuuaggugcuccugacaaggagaucugcagcacucugcucacauuccuguuuucc

SEQ ID NO: 2892 - RNA, 76 nt, Human
ggagagcagugucccaggccugaugcccacuccucauuccuaagggagggugcuuucuccugggucuccugugucc

SEQ ID NO: 2893 - RNA, 78 nt, Human
ggagagcauuuguauguuauggugaaugccaaauuugaaguggaggcaauguucacugcaaugugcgaaugccaggcc

SEQ ID NO: 2894 - RNA, 85 nt, Human
ggagaggucaagagacugagcagaccaugguguuaguucuguugaaaagaacucaggucuucugagcucaaucucuggucucucc

SEQ ID NO: 2895 - RNA, 76 nt, Human
ggagaggugaugagcccagacaaggcaggguguuagguuuaacugguuugcccucaucagguuuucgcaucuuuuu

SEQ ID NO: 2896 - RNA, 78 nt, Human
ggagagguggaugccuggcccggccagcgagagcgggccaccgccauccugcuggccugccgccaccugccccucucc

SEQ ID NO: 2897 - RNA, 88 nt, Human
ggagaguugcuugaauccaggaaguggagauugcaguaagcaaagaucgugccacugcacuccagccugggugacacagcaagacucc

SEQ ID NO: 2898 - RNA, 71 nt, Human
ggagaugggagaaaaaagauaccagggauaauuaaaauccacagcaguuucaucaguuuccucauccaucc

SEQ ID NO: 2899 - RNA, 73 nt, Human
ggagcaccugccagaugccagccagagcucuccuguaugaggugucugucggccccaucugggaggugucucc

SEQ ID NO: 2900 - RNA, 68 nt, Human
ggagcagagugaaggcaagaugacugacauguggaauugagguccuagcucugcuacuuacucacucc

SEQ ID NO: 2901 - RNA, 72 nt, Human
ggagcagggccugacugcgcaggauucacagauuaaucucuugagguccuggaugccucaucccuuaguuuc

SEQ ID NO: 2902 - RNA, 111 nt, Human
ggagcauucuugucccucuauccucacagagaagcagaggcuucucuccccaagaucuuggggugaggcugggccaugugcugggguugugaggaugagucaaggaggccc

SEQ ID NO: 2903 - RNA, 74 nt, Human
ggagccacagcagcagccgccgggguuucagugccagcucagccaggcucccuggggucagccgcucuggcuuc

SEQ ID NO: 2904 - RNA, 88 nt, Human
ggagcccagaugaacuuaaagaagcgagcaugggauucuuaguuuuucaagauccguacacacgaagccuuuaaucagcaucaacucc

SEQ ID NO: 2905 - RNA, 78 nt, Human
ggagccgggaagaugccaaggcugggcuaugggaugagggcgaaaugaccgggaccagcaaggagcucccagggcacc

SEQ ID NO: 2906 - RNA, 73 nt, Human
ggagccugagagguggaggaguucugaucccccguuacuuccuagcauuuucuccucuugccuuaaaaguucc

SEQ ID NO: 2907 - RNA, 75 nt, Human
ggagcgcccuuugggguuggaagcaccccccgacagucggugggagggugauauggcgaccuauuuugggcgccc

SEQ ID NO: 2908 - RNA, 68 nt, Human
ggagcuggcccugggcagcaacaagcugggugaugugggcauggcggagcugugcccagggcugcucc

SEQ ID NO: 2909 - RNA, 73 nt, Human
ggagcuguccugugucagccugaaauaaucaaaaggaucaaaaauccuguuuuaggcaacauaggaagacucc

SEQ ID NO: 2910 - RNA, 92 nt, Human
ggagcuuugacaaggacccacugucuggccccaucuucagagauuccaauaggucuggggugugcacaggcacuggcgucuuuaaaaucucc

SEQ ID NO: 2911 - RNA, 74 nt, Human
ggaggaaugcuggacuggaggccccuggagccagauggcaagagggugacagcuuccuuuccuguguguacucu

SEQ ID NO: 2912 - RNA, 103 nt, Human
ggaggaccuggccaaaguggguggugcagggguggucuuaggagggcuuuccugaaggaguggccaggguucacccaucuuuccacccacggacccauccucu

SEQ ID NO: 2913 - RNA, 79 nt, Human
ggaggagacaagcaagcugucauguuauaagcagcccuuugagggguccaugugaugucaaggaaugaagucucuagcc

SEQ ID NO: 2914 - RNA, 73 nt, Human
ggaggagacucuucuguuaccaccaagccaggaaguuucauggcuugggaagaccaagaggaaguccaccucc

SEQ ID NO: 2915 - RNA, 78 nt, Human
ggaggagaggcugguggucuugagcuuuuggccuggaauuccagucugaauuuucaaauauucccugccuccaacccc

SEQ ID NO: 2916 - RNA, 72 nt, Human
ggaggagcagcugacucagggguggaggagccuaggaaugccucucuccaggcccaagucgugcucuccuuc

SEQ ID NO: 2917 - RNA, 94 nt, Human
ggaggagcgugcggaggaccagcaggaggaggaggcggcggcgccgcgcguaccuggacgagcugccgagccgcugcugcugcgcgugcuggcc

SEQ ID NO: 2918 - RNA, 92 nt, Human
ggaggaucgcuugagcccaggaggcggagguugcagugagcugagauggcaccacuuauugcacuccagcccgggcgacagagcgagacucc

SEQ ID NO: 2919 - RNA, 87 nt, Human
ggaggaugcaaucuuauugugucuuugaauaaguacccaggcuaguauggggacuuguguaacacagaaagaacaucugcaaccuuc

SEQ ID NO: 2920 - RNA, 73 nt, Human
ggaggcagugcuggggcuugcgcccucgggggaccccccuucaucccucgagcagucggguccggcguccucc

SEQ ID NO: 2921 - RNA, 72 nt, Human
ggaggcggggcagacgggcugcaagagggagccggcccgacgcggaccgcuucccugcagugccccgagucc

SEQ ID NO: 2922 - RNA, 70 nt, Human
ggaggcucucuguguugcccaagcuggacuugaacucuugggcuccagcaguccucccacaugagccucc

SEQ ID NO: 2923 - RNA, 83 nt, Human
ggaggcugggaggccgcccccagccgcugcuacccacgcagagccgggcuggcuucgcgggggcggcgggcggcccgagcccc

SEQ ID NO: 2924 - RNA, 75 nt, Human
ggaggcuguucugugcauuguuggauuuuuagcagcgucccugaccucaguccaauagaugccaguaacaacucc

SEQ ID NO: 2925 - RNA, 69 nt, Human
ggagggacuuccagcuccuagucguguggguugcaggccguccugucccagggcugggggacuuccuuc

SEQ ID NO: 2926 - RNA, 92 nt, Human
ggagggccagugacccagcccaggcugcugaccguccugcuccaggcuagaguccagagguucaagagccugggcuguguccauaccccacc

SEQ ID NO: 2927 - RNA, 93 nt, Human
ggaggggaaggggcuagcagguguguaaacagaggguuccaucaggcuggggcagguggccgccuuccgcacacuugaggaacccuccccucu

SEQ ID NO: 2928 - RNA, 81 nt, Human
ggagggggaugaugguacugagagaguaugugucccagagcuugucaggacacaguggcagaauugcucucauccucuucu

SEQ ID NO: 2929 - RNA, 78 nt, Human
ggagguccccuuagaggaaauccuggaccugcagugggugggcucagggcccaggugcugucuuccuggggcgcuucc

SEQ ID NO: 2930 - RNA, 80 nt, Human
ggaggucuuguguaucuguggcaaacagggaguucccuuaaucacucuuuauuugcugcgguuaaagcuggccaaccucc

SEQ ID NO: 2931 - RNA, 77 nt, Human
ggagguggcagguguaggaucaucuggugagcaaguagagucaccaagucuggaugaccacuacccccacuaccccc

SEQ ID NO: 2932 - RNA, 74 nt, Human
ggagucaaaaggcccagagucugagucccagcccugagcacuuaggagccuucugacuuaggguuugucacucc

SEQ ID NO: 2933 - RNA, 87 nt, Human
ggagucuaugaacuggccacuuuucagaugaaaccuggugggccagcucuguggggugaugcauuuaaaagggcaguucaaugcuuc

SEQ ID NO: 2934 - RNA, 87 nt, Human
ggagucucacucugucacccaggcuggagugcaguggcacgaucucggcucacugcaaacucugccuccugguucaagcgauucucc

SEQ ID NO: 2935 - RNA, 87 nt, Human
ggagucucacucuguugcccaggcuggggugcaguggucuagucuuggcucacugcaaccucugccuccugguucaagcgauucucc

SEQ ID NO: 2936 - RNA, 86 nt, Human
ggagucucacugucacccaggcuggaguguagugcugcgauccugacucgcugcaaccuccaccucuggaguucaggugauucucc

SEQ ID NO: 2937 - RNA, 88 nt, Human
ggagucucccucugucgcccaggcuggagugcaguggugugaucucgguucacugcaaccucugccucccggguuccagugauucucc

SEQ ID NO: 2938 - RNA, 88 nt, Human
ggagucucgcucugucacccaggcuggagugcagugguaagaucucugcucacugcaagcucugccucccggguucacgccauucucc

SEQ ID NO: 2939 - RNA, 87 nt, Human
ggagucucgcucugucacccaggcuggagugcaguggugcgaucuuggcucacugcaaccuccaccuuuguguucaagcaauucucc

SEQ ID NO: 2940 - RNA, 88 nt, Human
ggagucucgcucugucacccaggcuggagugcaguggugugauuucagcucacugcaaucucugccugccggguucaagcgauucuuc

SEQ ID NO: 2941 - RNA, 91 nt, Human
ggagucucgcucuguccuccaggcuggaggagugcaguggcacgaucucagcucacugcaaccuccgccucccagcuucaagcgauucuuc

SEQ ID NO: 2942 - RNA, 101 nt, Human
ggagucuuaaacgugguagcucugugcuagagagugguaaccugauggcucccggaggaggugguauuaauccuuagcaucagggcaaaucuugagacucu

SEQ ID NO: 2943 - RNA, 86 nt, Human
ggagucuuacuuugucacccaggcuggagugcaguggugugaucucggcucacuacggccuccccauccuggguccaagcgauucu

SEQ ID NO: 2944 - RNA, 88 nt, Human
ggagucuugcucugucgcccagguuggagugcaguggcgugaucucggcuuacugcaacuuccagcuccuggguucgaacgauucucc

SEQ ID NO: 2945 - RNA, 68 nt, Human
ggagugaccuggagcacugugggggacgggacuccgccugcuguucccgcgcugagcuacaggacucc

SEQ ID NO: 2946 - RNA, 93 nt, Human
ggaguggaggagggcagaggacacgucucagggccaguaaccuaggcuuauagaagacgucaucaccguccucaugauguucaccccgucucc

SEQ ID NO: 2947 - RNA, 71 nt, Human
ggaguggugaugcacacauuuggggguuaugccaacagcaaagcugucacacuggaggcuucauuuacucc

SEQ ID NO: 2948 - RNA, 76 nt, Human
ggagugucuuggaggccuuggugaccaaugccagcagaguccugcggggugugggcccggccucccuggauucucu

SEQ ID NO: 2949 - RNA, 89 nt, Human
ggaguuuagcucuuguugcccaggcuggagugcagugguacgaucucggcucacugcaacuucucccuccugguuucaagcaacucucc

SEQ ID NO: 2950 - RNA, 89 nt, Human
ggaguuucgcucuuguugcccaagcuggagugcaauggcacaauauuggcucacugcaaccuccaccucccggguucaagcgauucucc

SEQ ID NO: 2951 - RNA, 105 nt, Human
ggaguuucuuccaaacuucaccaucuggauacugguguuucuuuacagauuccuccuucauuucuguugaguagccgggauccuugggaggcauguaggaagccc

SEQ ID NO: 2952 - RNA, 98 nt, Human
ggauagcggaucugcaucguagcgaucuccaauuccaauagggaacacugucacucuguuggaccuggcggcaucagcugcugcauccacugaaaucc

SEQ ID NO: 2953 - RNA, 79 nt, Human
ggauaguuggaacuaauguacagaacuaaauuuuuuaaacuuuauuugcuguuaaaauucugugaaguuucaguuaucu

SEQ ID NO: 2954 - RNA, 86 nt, Human
ggauauccaucaacacuagugguggcagcuucaggaaccgguuuggugcuggugcuggaggcggcuauggcuuuggagguggugcc

SEQ ID NO: 2955 - RNA, 111 nt, Human
ggauauggagaaugauaccagguaucaagcucauagcggccaaaagcaauuguuuuaaucauguugcuucccucugugauuuggacuugcagccuuaacuucuccaaaucc

SEQ ID NO: 2956 - RNA, 93 nt, Human
ggauauuuugugacaucgguggcucgaucauccuuaagcaacugaaguuaaaauuguugacggaaaaggcacuuaaauguuacuuucaugucc

SEQ ID NO: 2957 - RNA, 85 nt, Human
ggaucacagauggagaagugucaaacaaggaugguugcgggcaagagggcugcacccuaucuuggagaccuucucccaggugucc

SEQ ID NO: 2958 - RNA, 62 nt, Human
ggaucaccccuucuuuguuaagcuuuacuucacauuucaggacgacgagaagcuguguaucc

SEQ ID NO: 2959 - RNA, 109 nt, Human
ggaucagagaggaaaagucacuugcccaaagucacacagcugaacagugguggaguucaacuuugaccgugggcugucuggccccaagguguaugcuugcuucucuccc

SEQ ID NO: 2960 - RNA, 84 nt, Human
ggaucauuuacuggaucccuucuucuuucacuggguccgugcucccagcaggugcagagaaucuuagaagacgcagguguaucc

SEQ ID NO: 2961 - RNA, 73 nt, Human
ggauccgcugccaguccccacugaggaaggaaacccccuccucaaacacuaucgggggcccgcaggggaugcc

SEQ ID NO: 2962 - RNA, 72 nt, Human
ggaucuagaccaugcagcuuuucccuacugucaccagauugggagcagggauuggcugccauuguccucucc

SEQ ID NO: 2963 - RNA, 84 nt, Human
ggaucucuugaggcugggaaacagagguugcagugagccgagaucacgccacucugcuccagccugggugacaaagugagaucc

SEQ ID NO: 2964 - RNA, 65 nt, Human
ggaugaaaacauggaccucuuggaagguauaacuggcuuugaagacucuguccgaaaguuuaucu

SEQ ID NO: 2965 - RNA, 94 nt, Human
ggaugaacaauagucugcaauuuccccuaagccaggccuugggauucggacuuuugaggaccuggguaguaguuaguugacaugcuauuuaucu

SEQ ID NO: 2966 - RNA, 71 nt, Human
ggaugaggaggguaggcucguaguagccaugcaggaacugcaggucgaugauguugagcagcuucucgucu

SEQ ID NO: 2967 - RNA, 77 nt, Human
ggaugauggcccaccgaugggcggguggcaacuucuuggaagcacuuacaccccacccgacguggccauuguaaucc

SEQ ID NO: 2968 - RNA, 98 nt, Human
ggaugcauauaggauguuugggagcauaauccgugaagaaaaaaucaauuaaaucauuguguucaacaggaauauuuacaaauauucugcaugaaucc

SEQ ID NO: 2969 - RNA, 113 nt, Human
ggaugccugcaaaccaaccacuagcugcuccugcaaacacauuauguguuccuuuucccugagaaauauccuugauguguuugguggcaguaucuacagaagcggcagccacc

SEQ ID NO: 2970 - RNA, 81 nt, Human
ggauggaguggcagcugaaggugcaggaacuggaccccgccgggcacaagucccugugcgugaacgaggugcccuccuucu

SEQ ID NO: 2971 - RNA, 75 nt, Human
ggaugggacguacucauacucaggaugcuguuccccuuacucuugggcaggaauuuaggugguuauguuccaccc

SEQ ID NO: 2972 - RNA, 74 nt, Human
ggaugggcuucccaagaugccuugcacugucccagaaacggaugugccccagcucuuccgggagccuuacaucc

SEQ ID NO: 2973 - RNA, 85 nt, Human
ggauggggcagagcugagaagccaaggggggaagaguuggggcugaccucuucuucaccucgggccuuaaucacugaccaagucc

SEQ ID NO: 2974 - RNA, 64 nt, Human
ggauggucucaagugaucaggauaguguggucgguacacccaaagcuugugaaugacuccaucc

SEQ ID NO: 2975 - RNA, 86 nt, Human
ggauguagucguucaacuaacggugacuuuuacaaaugagacggaaaaucauguaaacuguauccuuuaguuuuaucgcuguaucu

SEQ ID NO: 2976 - RNA, 60 nt, Human
ggaugucucauucuagagugacagccaaaaggguaucucacccuagagugacagcuaucc

SEQ ID NO: 2977 - RNA, 79 nt, Human
ggaugucugugucaggcauguuaacuucaaacaaaaucugagaucggcuuuuuccauugacauucuuagcacagcaccc

SEQ ID NO: 2978 - RNA, 76 nt, Human
ggaugugguugaugaagguuucccauaugguuucagggccaaaccaaggaagaaucuaacuuucagccucaugucc

SEQ ID NO: 2979 - RNA, 69 nt, Human
ggauuacagcuaggaccuccagaacacugacaaaaagaaguggugcaguggaaauccuugccuuguucc

SEQ ID NO: 2980 - RNA, 80 nt, Human
ggauuauccuuuucuggagaaguagucuagaccacggcaauuggcagaacacauucuaugguuccaggagaggccauucc

SEQ ID NO: 2981 - RNA, 69 nt, Human
ggauucuuguuuuccacaugugguaucuuccagaguauccuggaaugucuacaugcccgauuagaaucc

SEQ ID NO: 2982 - RNA, 87 nt, Human
ggauugacagauugaugcucuuucucgauuccgugggaugugugcauugccguucuuaguugguggagcgauuugucugguuaauuc

SEQ ID NO: 2983 - RNA, 75 nt, Human
ggauugaguaugucuuucuuguuuuuccuggucuugaugaccuugaugugacuaugaauuacagaucucaacucc

SEQ ID NO: 2984 - RNA, 82 nt, Human
ggauugccaaaacggucaccagcacauuucccaggagcuugaaguucucaggauccacaugcagcuugucacagugcaguuc

SEQ ID NO: 2985 - RNA, 80 nt, Human
ggauugcuccauuaaguuagacuaugauacuuaguuuauaaacagauuauaccaucauagcuauuuaagagaagcccucc

SEQ ID NO: 2986 - RNA, 77 nt, Human
ggauuuauacauacagagauuguaguauuuaguauaugaaauauuuugaauacacaucucugucagugugaaaauuc

SEQ ID NO: 2987 - RNA, 83 nt, Human
ggauuugaauaacuagacauuauuuaugcugccaaacucauuuguugcaguuguuuguaaugucuaguggggcuucaucaucc

SEQ ID NO: 2988 - RNA, 102 nt, Human
ggauuuuagucuguaacaaaguugucgcuauugugcuucauccguucagcugaacaggaggauggauacagccgcgaggcuaaaaaacggauuuccucuucc

SEQ ID NO: 2989 - RNA, 96 nt, Human
ggcaacacuucgaugguuccggaucaccaugugggguuguuaggcgaaugugcccucgacuggcacuggggccgggagaucuaacaggagugugcu

SEQ ID NO: 2990 - RNA, 71 nt, Human
ggcaacgacguguuacccguggggaauuagcaggcgcucugaacgcaugcacggaggacacgcccauugcc

SEQ ID NO: 2991 - RNA, 86 nt, Human
ggcaacuacaaauaucucuuuaccaucuuggcuucucauaauccugcagggaggcccuugaagggaagagaacagauuugguugcc

SEQ ID NO: 2992 - RNA, 78 nt, Human
ggcaacuucaggaugacaaaaacaaagucucuucugcugggaaaucccaguacagaucguuucucaucucuaagugcc

SEQ ID NO: 2993 - RNA, 79 nt, Human
ggcaacuucaggaugacaaaaaccaaagucucuucugcugggaaaucccaguacagaucguuucucaucucuaagugcc

SEQ ID NO: 2994 - RNA, 69 nt, Human
ggcaagaaggugcugacuuccuugggagaugccauaaagcaccuggaugaucucaagggcaccuuugcc

SEQ ID NO: 2995 - RNA, 131 nt, Human
ggcaagauccucgcuccaaccguggcccguguucucuccuuuuguccccauagugugacuccgccaggaacuuggaauggcugaagacugugaaugagagucaugggucuguggaacgcucaucccugacc

SEQ ID NO: 2996 - RNA, 93 nt, Human
ggcaaggauuccugcacgucaagggccucaggugacuuucaugcacacccaagucagaaggcucuccugaauccuggaugucaccuuccugcc

SEQ ID NO: 2997 - RNA, 63 nt, Human
ggcaaugaggguuggacaggcagauaauacacauauauucuuuaacuuugcaaacccauuguc

SEQ ID NO: 2998 - RNA, 90 nt, Human
ggcaauggacgcuaccccagaugggucagcuucggaggccugcccaaggcuccugaucaggcggccgucugguccaaucagcaucuugcc

SEQ ID NO: 2999 - RNA, 77 nt, Human
ggcacaauuaaccccugugggucggcagccuggcccagaucaaaggcuuccugaccgauagagguuguuauguggcc

SEQ ID NO: 3000 - RNA, 85 nt, Human
ggcacagugagacagauguggaagagcagacccaggagcugaagaccaucacucagcuccagggugagccugcaccgccgugacc

SEQ ID NO: 3001 - RNA, 79 nt, Human
ggcaccagcucuuugggccuaggauacugccgggccccccaaggggguccccagcaaccaggccuggccuccugguguc

SEQ ID NO: 3002 - RNA, 79 nt, Human
ggcaccagcucuuugggccuaggauacugccgggcccccccaagggguccccagcaaccaggccuggccuccugguguc

SEQ ID NO: 3003 - RNA, 96 nt, Human
ggcacccagaucggaaacaccaugagagcacuuuaucuguagguccuuugggccagcaauuugggcucacaaauggacaccucugagcugagggcu

SEQ ID NO: 3004 - RNA, 90 nt, Human
ggcaccccgggguguggccagaggacuucggcgacgcuuccccgagaguagccccccuccucaacccagaaaagacaaccccgcggggcu

SEQ ID NO: 3005 - RNA, 88 nt, Human
ggcacccucggcugugccuccucugaggcuggcaguuccuuccuggauaugcaaggucaagagcggagggggaagcagagagagugcc

SEQ ID NO: 3006 - RNA, 88 nt, Human
ggcacccucggugcugccuccucugaggcuggcaguuccuuccuggauaugcaaggucaagagcggagggggaagcagagagagugcc

SEQ ID NO: 3007 - RNA, 75 nt, Human
ggcacgcgucucugugcaacaccaacacgggcaagugcuucugcaccaccaagggcgucaagggggacgagugcc

SEQ ID NO: 3008 - RNA, 90 nt, Human
ggcacggguucgcugguguucgcgcugccccacuucacggcuggccgcuaugagguggaguuggacgcgggugucaggacgugcccugcc

SEQ ID NO: 3009 - RNA, 68 nt, Human
ggcacucaagagauccuccugccucagccucccaaagggcugggauuauaggcaugaggcuccgugcc

SEQ ID NO: 3010 - RNA, 99 nt, Human
ggcacugucuuugcccgcauggccccugagcagaagacagagcuggugugcgagcuacagaagcuucaguacugcgugggcaugugcggagacggugcc

SEQ ID NO: 3011 - RNA, 71 nt, Human
ggcagaaggcuuuuacaccacaagugcagugaaagaacugcacggugaguuuaaaacaaccgcuuguggcc

SEQ ID NO: 3012 - RNA, 89 nt, Human
ggcagagcgcugccucucugcaggccgugugcuuugcucgguugaucuugcagagccuaagacacaggcccagagaggcagugaucgcc

SEQ ID NO: 3013 - RNA, 103 nt, Human
ggcagaggagggcucacuuuucaaaguuccaaauagggcaaaauguguguuucccuaggaaguauuuuuuaaaaacauuuuugagauagagucuugcucuguc

SEQ ID NO: 3014 - RNA, 93 nt, Human
ggcagagggcucuccuaauggguucacagugagauuucuuugaagaaaaagcuucaguugagcucaguaacaucuuagcgagaaccaagugcc

SEQ ID NO: 3015 - RNA, 62 nt, Human
ggcagagugacucccaucccaucauugaugucuggcuuugacuuggcaugggagacauugcc

SEQ ID NO: 3016 - RNA, 70 nt, Human
ggcagcacaaaggcggggcggugcacgucggaguuguaguacuucagcugcaucugcgccaccugcugcu

SEQ ID NO: 3017 - RNA, 72 nt, Human
ggcagcagagcuuugugcaggucagaguguccccauccgucuccgaguuccugcuccaguuagacagcugcc

SEQ ID NO: 3018 - RNA, 73 nt, Human
ggcagcaggggugggcauccgggcuaaggcuuuacuuggcggcagucucaucggauuuugcagcuucugggcc

SEQ ID NO: 3019 - RNA, 104 nt, Human
ggcagccacagguuucaacucccauuugugaauaaauuaaaugacucuuuacaaaaccaucagcagucuugguguaucacauuugguauuuagaaacuuuuguc

SEQ ID NO: 3020 - RNA, 94 nt, Human
ggcaggagaaucgcuuaaacccgggagguggagguuguggagcugagauugugccauugcacugcagccugggcaauaacagcaaaacuccguc

SEQ ID NO: 3021 - RNA, 103 nt, Human
ggcaggagaauugcuugaacacaggaggcagagauugcagugagucaagaucaugccacugcacuccagcacuccagccuaagugacagagcaagauccuguu

SEQ ID NO: 3022 - RNA, 105 nt, Human
ggcaggagugggagaaggaggagagaaaagcugguccucugcagucuuuacacccacagcucugcccuuuucccuuucaaccucuccuccgcugucaugccugcu

SEQ ID NO: 3023 - RNA, 100 nt, Human
ggcagggaccaaccccuaaucccuccccagcggcaagccccucuuuucagagugggcagaggguugccuauggugggcacuaggaaugagguccccugcc

SEQ ID NO: 3024 - RNA, 86 nt, Human
ggcagggcccagggcagcggccgacccggggccccggacuuuaucaccgugcgcugccccagcugcugcaggggccugacauuguc

SEQ ID NO: 3025 - RNA, 77 nt, Human
ggcagggccccuuugagguaccaguugacaccugucgucacgacugcaccugaagcccagccaaugagcggcccgcc

SEQ ID NO: 3026 - RNA, 94 nt, Human
ggcagucuucuaagacuaguaucaauauuuuaagaguauggugagcuuuuuugaaauuauaccuauaauagaauuagaugcuuaugcugcuguc

SEQ ID NO: 3027 - RNA, 75 nt, Human
ggcaguggcugauugacacccucuaugccuucaacaguggaaaacguagagcgguuccagacucugaagacugcc

SEQ ID NO: 3028 - RNA, 75 nt, Human
ggcaguguucggguaucagaaaucacuuaaacuagcaauuggccuuauaaagugaugauacacugggcuuuugcc

SEQ ID NO: 3029 - RNA, 89 nt, Human
ggcauagaccauguacaggaauccaucuucaucuuucucacucucauacaccucugagauugguguggagacgcugaccaugcuguguc

SEQ ID NO: 3030 - RNA, 90 nt, Human
ggcaucagauucucauaaggagcgugcaaccuacaucccucgugugugcaguucacaauagggcucgugcugcuaugagaaucuaaugcc

SEQ ID NO: 3031 - RNA, 73 nt, Human
ggcaucauugaggccaggagcucugcccgugaccuguaucccacguacucuaucuuccauuccucgcccugcc

SEQ ID NO: 3032 - RNA, 75 nt, Human
ggcaugcuauuuuaaucauuaaauucuugaugaugacgaucaucaucaagaugagaaagaaaagaaauaugagcc

SEQ ID NO: 3033 - RNA, 61 nt, Human
ggcauggaggcaaaaacaucugugguucacucagccucaauuuccaaugugucucugugcc

SEQ ID NO: 3034 - RNA, 65 nt, Human
ggcauggcagagccuugauuuguaauguuugcuaauuuacgugguacaagugcuccaguacggcc

SEQ ID NO: 3035 - RNA, 62 nt, Human
ggcauggggagguucccggguaucuccgacacugggggggcccaggccgagcuccuugugcc

SEQ ID NO: 3036 - RNA, 90 nt, Human
ggcauuauauucuuauaaggaggacgcaaccuagaucccucacaugugcagugugcaauagggcuugcauuccuuugagaaucugaugcu

SEQ ID NO: 3037 - RNA, 81 nt, Human
ggcauugccugugauugggggugagguuaucuauucugagauucaagauggaagccuccauugccccuccuaagccaugcu

SEQ ID NO: 3038 - RNA, 102 nt, Human
ggcauuguggugcacgccuguaaucccagcuacucgggaggcugaggcaggagaauugcuugaaccugggaggcggugguugcaguguucagagaucacgcc

SEQ ID NO: 3039 - RNA, 100 nt, Human
ggccaaaagagauccacuguugccccaguugguggaaaagacuuuacagaugcaacaugccaugaaguaccacccuuuggggguggucggcuuacgggcc

SEQ ID NO: 3040 - RNA, 92 nt, Human
ggccaagguguaggcguccagccacgagaugaccucuugacacuuguccagaaccuucuucuuguccgacucgcugaucuugcccuugagcc

SEQ ID NO: 3041 - RNA, 78 nt, Human
ggccaaguuccagaggaucuguuugccaaaugaguugaccuugguaccuauauaacaaaggucccuuggacauugccc

SEQ ID NO: 3042 - RNA, 89 nt, Human
ggccaauugaaacaaacaguucugauaccguucuuccaccacugauuaagagugggguggcagguauuagggauaauauucauuuagcc

SEQ ID NO: 3043 - RNA, 74 nt, Human
ggccacgugcugccccuccuggacaauaauuuagcaauaaauacugcgcagggcagggguagggcaccaaggcc

SEQ ID NO: 3044 - RNA, 84 nt, Human
ggccagaggggaguuccugggugcuccacaugccuguccuaggcuuuuggacaugcuggcccccagaucugccccuccauggcu

SEQ ID NO: 3045 - RNA, 86 nt, Human
ggccagcgcagggccucguggcacccaugcaggagaaggugucccccuucuuccaguccucggcugccacgcgcaguaugcugguc

SEQ ID NO: 3046 - RNA, 88 nt, Human
ggccagcgcgagggcaucguggcgaccgaugcaggagaaggugucccccuucuuccaguccucggcugccacgcgcaguaugcugguc

SEQ ID NO: 3047 - RNA, 82 nt, Human
ggccaggacugcgcucaggaucccgccccggagcccccagcccgggggagagggggagggaaguugggacgaagcccaggcc

SEQ ID NO: 3048 - RNA, 93 nt, Human
ggccaggcacgguggcucacgccugugaucccagcacuuugggagaccaaggcugguggauuacaagaucaggaguuugagaccauccuggcc

SEQ ID NO: 3049 - RNA, 73 nt, Human
ggccaggcggacgaaccccuccucagugcuuggucaucuuggccgggcucgggggguauccgaccuucaggcc

SEQ ID NO: 3050 - RNA, 76 nt, Human
ggccaguugcucuaaguggauuggauaugguuggaguggcacagacuggaucugggcuagagagaggcgaugggcc

SEQ ID NO: 3051 - RNA, 100 nt, Human
ggccaucuuugaacuccuggacuauauugugaacgagccaccuccuaagcugcccaacgguguguucacccccgacuuccaggaguugucaauaaaugcc

SEQ ID NO: 3052 - RNA, 101 nt, Human
ggccaucuuugaacuccuggacuauauugugaacgagccaccuccuaagcugcccaacgguguguucacccccgacuuccaggaguuugucaauaaaugcc

SEQ ID NO: 3053 - RNA, 71 nt, Human
ggcccagaguuaccacgcugccaggccacauccaggccguguauguucagaacguggucaagcuuuacgcc

SEQ ID NO: 3054 - RNA, 74 nt, Human
ggcccagcagauggagggccaggaggaggaagagucugcagcauuuguucuccuggcucccacccugccagguc

SEQ ID NO: 3055 - RNA, 60 nt, Human
ggcccagcuuggggcuggcgggggaggcugugucuucaaaccuuugcccccaguuggguc

SEQ ID NO: 3056 - RNA, 83 nt, Human
ggcccaggaucggcagggcugcuggcagaggaaucccagcugggguucccaugccaccaggcuccugcaggacuugcugggcc

SEQ ID NO: 3057 - RNA, 83 nt, Human
ggcccagggaucggcagggcugcuggcagaggaaucccagcugggguucccaugccccaggcuccugcaggacuugcugggcc

SEQ ID NO: 3058 - RNA, 107 nt, Human
ggcccaugacugccccugccccagugccauuggccgccccacccgcaccacuggcuggggguccggggguccggccagugcaggcacccuggggcaguagcagggcc

SEQ ID NO: 3059 - RNA, 61 nt, Human
ggcccccaugggcccggguccauucacccuuuugggcaauugggaccgguucccggggguc

SEQ ID NO: 3060 - RNA, 63 nt, Human
ggcccccgcuggcuugccaagcuuggggaauuccagagaggggcaguuaguauuaguggggcc

SEQ ID NO: 3061 - RNA, 99 nt, Human
ggccccgcaggaacaggcucugguagaucuguaauccuguuggcuggcgacacgugucgccagccaacaggaugggaggaagggcagacugugguggcc

SEQ ID NO: 3062 - RNA, 91 nt, Human
ggccccguucguuggggggcucaucaagcugucgucaugcgcccaugucgcgcgaagaagcccgaucgaguccccugagacguacugugcc

SEQ ID NO: 3063 - RNA, 61 nt, Human
ggcccgccugcgccgcgaguaccuguaccgcaaggcccgggaggaggcgcagcgcguggcc

SEQ ID NO: 3064 - RNA, 73 nt, Human
ggcccggggccuaccucaaaggagcggggucgcgaagcuagcuagcagcggccccccuccagguccccgggcc

SEQ ID NO: 3065 - RNA, 62 nt, Human
ggcccuacccugggagggcccauccagcuaccugcugguaggccaccuccaggagaugggcc

SEQ ID NO: 3066 - RNA, 76 nt, Human
ggcccucagaggcuccucccuaucuccuggcuaguuaccacuaggcuaccaggucucuaggggccugagagaggcc

SEQ ID NO: 3067 - RNA, 67 nt, Human
ggcccugcaccagugcugcauugaugauuuccgagagauggugcagcagcuccuggaggcuggggcc

SEQ ID NO: 3068 - RNA, 82 nt, Human
ggcccuguggcucugauguuccccccugggaggcuccaccgggucucuuuuuuggggaugagagcagugccccaggcccgcc

SEQ ID NO: 3069 - RNA, 88 nt, Human
ggccgaccccgaggcgcgggcagaggcuggugagcagccaggcacagcugagcgggcccugcuccgagaucagcccagggccguggcc

SEQ ID NO: 3070 - RNA, 70 nt, Human
ggccgcgcucgggcgccccucgcgcagcgcuccaugcccguguggugcugccgcugcucccuggccgguc

SEQ ID NO: 3071 - RNA, 83 nt, Human
ggccgcugggagccuugagagccaugugcaaagaggacagauccuguuccugucaccauugcucucgauucacucagcuggcu

SEQ ID NO: 3072 - RNA, 112 nt, Human
ggccgcuucgggcuggcggcuggagagcgcucgggucaugucugcccagggggacugcgaguuccuggugcagcgagcccgggaguuggugccgcaagaccugugggcagcc

SEQ ID NO: 3073 - RNA, 67 nt, Human
ggccggcgagcaguucggacagcugggccgggagcugcgcgcccaggagugucugcccuacgcggcc

SEQ ID NO: 3074 - RNA, 82 nt, Human
ggccggcggagaggccagcagcccccgggacaccagugccuucuuccuggagaccaaggagcgccuguaccuccuggcggcc

SEQ ID NO: 3075 - RNA, 69 nt, Human
ggccgggcccacucgccgcgcgcccagccaugaaccuggcgagccagagcggggaggccggcaccgguc

SEQ ID NO: 3076 - RNA, 72 nt, Human
ggccgugcucuuuggaauuuuccuguacaugggagucaccucccuuaacgggauccaguucuaugagcggcu

SEQ ID NO: 3077 - RNA, 78 nt, Human
ggccguggcucccauccuccggaaucugcaaaauggcuacuucuucagacauaauggggagagggauggcaagaggcc

SEQ ID NO: 3078 - RNA, 72 nt, Human
ggccuaaaagcaagguucuuauucuccggaaccaugggccucgugucaguuggagagagcguugaggaggcc

SEQ ID NO: 3079 - RNA, 75 nt, Human
ggccuaaagcaagguguguauuuguuauucugaaauuguuuugcaucuggacaaauacuaaauaucccaguggcc

SEQ ID NO: 3080 - RNA, 61 nt, Human
ggccuacaggcagcuguggcccagcaggacacucugauggaagcccgguucccugagggcc

SEQ ID NO: 3081 - RNA, 68 nt, Human
ggccuccaugccuauguggugguacaaugucacugacggauccugccagcuguuuguguaugggggcu

SEQ ID NO: 3082 - RNA, 79 nt, Human
ggccucccaaagugcugagauuacaggcaugagccacugcaccuggcccuugccucuauuucaaagcuacuuuggugcc

SEQ ID NO: 3083 - RNA, 84 nt, Human
ggccucugcugcccuuucugugccccccagguucuaucuccccgucacacccgaggccuggcuucaggagggagcggagcagcc

SEQ ID NO: 3084 - RNA, 61 nt, Human
ggccugccacuggucauggguagcuagagcugcuggcuucccuguggcuuagcugguggcc

SEQ ID NO: 3085 - RNA, 75 nt, Human
ggccuggaccucccaacgugcugggauuacacacgugauugucugacaagcagaggcaugagcuggguccaggcc

SEQ ID NO: 3086 - RNA, 65 nt, Human
ggccugggagggcaugggucaagggcguccgggaagcuggagcucuuccugcugaccuuccggcc

SEQ ID NO: 3087 - RNA, 76 nt, Human
ggccuucugcauguagugauccggggcucccccaaggggaaccgcccagccauccucaccuaccaugaugugggcc

SEQ ID NO: 3088 - RNA, 70 nt, Human
ggccuugagugcugcuugcuugggcaccggagggugggacaugggccccgguagcaagcauggcagggcc

SEQ ID NO: 3089 - RNA, 87 nt, Human
ggccuuggauggccauggugguuucucuacauagucuuuccacuuaugagaugcguuguacaggaauguccuggccauccuaaggcc

SEQ ID NO: 3090 - RNA, 64 nt, Human
ggccuuucagcuaacauucauggaugcaaaccacuacuggucuguggacggucugcugaaugcc

SEQ ID NO: 3091 - RNA, 76 nt, Human
ggcgaagcugaugcugagagguggcccgcuguacugauuuuguaaaaccagcaggaaaaccucugcucggccgacc

SEQ ID NO: 3092 - RNA, 61 nt, Human
ggcgaccaucuuguauucaagugcugacaaccgugaugucauuuacuucagagauuuugcc

SEQ ID NO: 3093 - RNA, 106 nt, Human
ggcgaccugaucaggggagguggggguacacaucaauuuggaguuguuucagggcuacugaaacauuuaaaaugugaauucccaaacuuuuccuuuugggcuuguc

SEQ ID NO: 3094 - RNA, 75 nt, Human
ggcgagagaagaaggaauggguugagaaacugacugaaguguucuaucagcgucugaugccuucuucccuuugcc

SEQ ID NO: 3095 - RNA, 63 nt, Human
ggcgagcaccgcgccggcccugagccucccgcucgcuccccacggccgcggugcauguucgcc

SEQ ID NO: 3096 - RNA, 77 nt, Human
ggcgcaaaugggccccgggcggcccagguccuccuacuguggaaggagcagggaagcugcccgagggaacccaagcc

SEQ ID NO: 3097 - RNA, 83 nt, Human
ggcgcacccgguggccgcccggaccugcuuauugcugucaagucgguggcagaggacuucgagcggcgccaaggccgugcgcc

SEQ ID NO: 3098 - RNA, 83 nt, Human
ggcgccaccaaagccaggcuugagggcugggaguccggacugagaaagggguccugggccacccuggccgggguaggaucgcc

SEQ ID NO: 3099 - RNA, 84 nt, Human
ggcgccuaugggcaggcggugcgcuaccagggccgcgcgcaggccgugcugcagcaguaccaacaccugcccucguuccgcgcc

SEQ ID NO: 3100 - RNA, 66 nt, Human
ggcgcuauauauggauccaauggcaagaucaucaugacagaucugcgcgcgaucgauaucagcgcu

SEQ ID NO: 3101 - RNA, 93 nt, Human
ggcgcuggugucaaacaguuaugugaugcuuugaagcacccucacuguagaugagagugucuugcacugcaaacauagccgaucacccgugcc

SEQ ID NO: 3102 - RNA, 60 nt, Human
ggcggaguuucuccauguaggucagguuggucucgaaauccugaccucagguuaucugcc

SEQ ID NO: 3103 - RNA, 70 nt, Human
ggcggcagggcgcugcaccgugcucccccggcucugcucgacagcagcacgcagugagagccucgccgcc

SEQ ID NO: 3104 - RNA, 62 nt, Human
ggcggcccgcuuggcuuccggccaauaggcaucaucucgccgguccaggucguagggccgcc

SEQ ID NO: 3105 - RNA, 72 nt, Human
ggcggccucugggaggacccuuccuuaguccccucucccaccacucaggcuccugcuucccagagaguggcc

SEQ ID NO: 3106 - RNA, 81 nt, Human
ggcggcggcgguuagggcuguguagggcgaggccucccccuuccuccucgccauccuacuccucccuccucgucauccucc

SEQ ID NO: 3107 - RNA, 95 nt, Human
ggcggcggggccgaugagcgggauggauggcuccgagcgcugaccccggcauguccaggauguuaccguuccugcugucugcucugguuucugcc

SEQ ID NO: 3108 - RNA, 71 nt, Human
ggcggcgguggcggcggcgacugcugcggugaaggaggaggaggagccgagcgggcgcuggcaccgaggcc

SEQ ID NO: 3109 - RNA, 108 nt, Human
ggcggcugggucuuggaaggagccugcugaaggaggugggcugucuucugacaggcagcucuccgaaucuuccaccaaggacuccuugaagucuaugacccugccguc

SEQ ID NO: 3110 - RNA, 60 nt, Human
ggcgggcacggggcguaggagcuggcuggcggccggcucugcauguucuuguugccuguc

SEQ ID NO: 3111 - RNA, 90 nt, Human
ggcggggagugggaaaggguccggggcggagugccguugguuaaggagaagccaaaaauguuugccaagggaacugagaucacccaugcu

SEQ ID NO: 3112 - RNA, 81 nt, Human
ggcggggggcagagaagaauuuuaacuuggaugauucccaugcccacuccagcuguaacuuucuuugacugugacccagcc

SEQ ID NO: 3113 - RNA, 67 nt, Human
ggcgggguggggaauaaauauauuaagugccucuuggcauuugggguguuuaaacaauaacccggcc

SEQ ID NO: 3114 - RNA, 91 nt, Human
ggcgguugaaggcguuguaggcugacuccaggucgaacagcaucugacgcaccugugagucguccagcucaucugacgccgacaugccgcu

SEQ ID NO: 3115 - RNA, 72 nt, Human
ggcgucugguacucagaugucacgaagcacgccauuggacuaagauggugguuucgcauagugccaagcacc

SEQ ID NO: 3116 - RNA, 91 nt, Human
ggcgucuugcucuauuggcaggcuggagugcaguggugcgaucucagcucacugcaacccccgccucccagauucaagcaauucuccugcc

SEQ ID NO: 3117 - RNA, 71 nt, Human
ggcgugcacaccuucccggcuguccuacaguccucaggacucuacucccucagcagcguggugaccgugcc

SEQ ID NO: 3118 - RNA, 73 nt, Human
ggcguugggggcgcccgauauccuguggggggaaggguuucccgguucccuuuugggggccccuuuauuugcc

SEQ ID NO: 3119 - RNA, 93 nt, Human
ggcguuuuuggcuccauuuaacagaagaaggaccauagugaucauuuaaucucuaugagucugucuuaucuucuggaaaaggggccuaacacc

SEQ ID NO: 3120 - RNA, 90 nt, Human
ggcuaaauuuauuuucuugugucugccuagcaagauaauuucucuauucuuugacaguauugucucaggcaccugaaucagaccuaagcc

SEQ ID NO: 3121 - RNA, 71 nt, Human
ggcuaagugccagcuccucuuugcccucaaggugcucaagcaugaugcccgaggagaagcugguugaggcc

SEQ ID NO: 3122 - RNA, 84 nt, Human
ggcuacgaacgaggcugcggaccuaucgcuuggguuauaugaagucaaggguuaacacgguucuagguggccucacucgugguu

SEQ ID NO: 3123 - RNA, 74 nt, Human
ggcuacgaaguccagauaccuugaaacauuguggggccugcuuggaauccacuugacaacugacuucuguggcc

SEQ ID NO: 3124 - RNA, 62 nt, Human
ggcuaguguaauacuccacagagaaguagacaccccaaacuggagagcauguugcauuugcc

SEQ ID NO: 3125 - RNA, 62 nt, Human
ggcuaguuccuugauagcaucuuacucucaccuucuuugugucugugaugaaaggaacaguc

SEQ ID NO: 3126 - RNA, 73 nt, Human
ggcuauuugcacugggcuucuuuucaugccgcuacucuaagccucccugaauuuucccccgggacaaucagcc

SEQ ID NO: 3127 - RNA, 71 nt, Human
ggcucaaggaacagcuggcaaggggggcagagaaggcacaggaaggagcccucacucuggcuguccaagcc

SEQ ID NO: 3128 - RNA, 63 nt, Human
ggcucacgcaugggccggcuggaggugcuggggacgguguuugcuggacccaaggugugagcc

SEQ ID NO: 3129 - RNA, 58 nt, Human
ggcucaugcauauaaucccaacuaucuaggaggcugaggugggaggauuguaugagcc

SEQ ID NO: 3130 - RNA, 62 nt, Human
ggcucauucgauaucuccucacucaccugucuggugccucggugauggcuguugugugagcc

SEQ ID NO: 3131 - RNA, 72 nt, Human
ggcucauugcuuaggugcccagguuuuucaggugcaauuaaaauuuagaacuaccacacaaaggcauuggcu

SEQ ID NO: 3132 - RNA, 62 nt, Human
ggcuccgcccccacccugccugcccccucgcuggagcaacgcaagcaggaggcgggggaguc

SEQ ID NO: 3133 - RNA, 93 nt, Human
ggcuccuccuguccggggcggagcccugcgucgcgggccuggggaggccccgccagcacccuugacgucugggucccgagcagugcggcagcc

SEQ ID NO: 3134 - RNA, 62 nt, Human
ggcuccugugucuucucacucuugguauuccugcuugugcaggagccuguguacacagggcc

SEQ ID NO: 3135 - RNA, 63 nt, Human
ggcucgccgcgcuagcccugcugaccugcagccuguggccggcacgggcagacaacgcgagcc

SEQ ID NO: 3136 - RNA, 63 nt, Human
ggcucgccgcgcucgcccugcugaccugcagccuguggccggcacgggcagacaacgcgagcc

SEQ ID NO: 3137 - RNA, 78 nt, Human
ggcucgcucuggaccucacugcuggucuccagcugggcagggccggucugggggcugcagccuggcucgagcacugcc

SEQ ID NO: 3138 - RNA, 74 nt, Human
ggcucggugcuaaauauggagauauagcagugucaacacacaaguggucccuccauguugucacagcugauguc

SEQ ID NO: 3139 - RNA, 70 nt, Human
ggcucucggccuuggcaacggccgucgucaugguuacuggccccuaggcgccgauggccgaggccgcgcc

SEQ ID NO: 3140 - RNA, 84 nt, Human
ggcucugcaggcuuaucaguucagcacaacgugcuccugcauucaagaaacagggcauggggcugcucacuggcacuggaggcc

SEQ ID NO: 3141 - RNA, 97 nt, Human
ggcucuuggcucugcucucuccucccucucaucuucugcccuccccucugcuauguggggaacaugaagaugaagggccuccugagugaguccggcu

SEQ ID NO: 3142 - RNA, 102 nt, Human
ggcugacugggcccgaaaguggagggggaccguggagaagggcccccaguaugacacacuggagaaggccuggcaugccuuuuucacggcggcugagcggcu

SEQ ID NO: 3143 - RNA, 77 nt, Human
ggcugagaccacccuugccugcccccuucuuucugccuuaagaauguccuuuuaggcugggcaugguggcucacgcc

SEQ ID NO: 3144 - RNA, 91 nt, Human
ggcugaggggcuccaguuugcaaccucuauaagugaaucucaacauucuuucauaauagguaaagguugucucaacuacagcuauccagcc

SEQ ID NO: 3145 - RNA, 71 nt, Human
ggcugaggugggaggauggcuugaacauggggcagugagccuugauugcaccauacucuccagccugggcc

SEQ ID NO: 3146 - RNA, 74 nt, Human
ggcugagguggguggaucacaaggucaagagauggagacaauccuggccaacauggugaaaccucaucucuacu

SEQ ID NO: 3147 - RNA, 67 nt, Human
ggcugaguucuguaguuuccagaguuggcuggcuagagccuucuaagagguuacagaacuauuagcu

SEQ ID NO: 3148 - RNA, 79 nt, Human
ggcugccagaugggaccucacugacccagacguuccgggcccgggaacagcuggcagcugugaggcucuauguggagcu

SEQ ID NO: 3149 - RNA, 83 nt, Human
ggcugcggcgggcuccacgggggggcaggagugggccgugaugucgcugugcuuguacgccgccucguccagguccagcagcc

SEQ ID NO: 3150 - RNA, 80 nt, Human
ggcugcguuagguggaagcagcggaggaaggagacaaaagggauugucauuuucaugucguggcuuuuuagaagacagcc

SEQ ID NO: 3151 - RNA, 80 nt, Human
ggcugcguuagguggaagcagcggaggaaggagacgaaagggauugucauuuucaugucguggcuuuuuagaagacagcc

SEQ ID NO: 3152 - RNA, 65 nt, Human
ggcugcuggugagggcugugcagcugcugggagaacuggacgggcugcagggcugccaggcugcc

SEQ ID NO: 3153 - RNA, 88 nt, Human
ggcugggacugaggucauguucugucagguuccaaagagcgccaggaagacucugagaccacagagcacggccugcuuucucccagcc

SEQ ID NO: 3154 - RNA, 89 nt, Human
ggcugggucaaaugguauuucuggcucuagauccuugaggaauugccacacugucuuccacaaggguugaacuaauuuacccucccgcc

SEQ ID NO: 3155 - RNA, 87 nt, Human
ggcuggucucgaacuucugaccucaagugaucugcucucuugggccucccaaagugcuggaauuacaggcaugauucgcacccagcc

SEQ ID NO: 3156 - RNA, 97 nt, Human
ggcugucuagaagagucaguuguugcaccacuagugucuguuuuauuucuacauggguguuaugggcgaugcaaaccugauuuucuucgaaucggcc

SEQ ID NO: 3157 - RNA, 89 nt, Human
ggcugugaaguguucguggcaguagacucugaagcuaaggagcugagggcuuaacaaguuucuagaagcugccaucaacaugccaaguc

SEQ ID NO: 3158 - RNA, 84 nt, Human
ggcuguggcuggauucaaguaauccaggauaggcuguuuccaucugugaggccuauucuugauuacuuguuucuggaggcagcu

SEQ ID NO: 3159 - RNA, 67 nt, Human
ggcuguggggggaugagcucacucugguccccucagaccuguggcuccaaggaaucuucccacggcc

SEQ ID NO: 3160 - RNA, 80 nt, Human
ggcuuaguuuucugcccaguggaggcugaaguagagacagaucuuuggccucuucuggaagugcuguugaauacacagcc

SEQ ID NO: 3161 - RNA, 87 nt, Human
ggcuuccgucccugcugcugcugcugcuggccggggccgggcugucagccgccucgcccccagcagcgccgcgcuucaacgugagcc

SEQ ID NO: 3162 - RNA, 78 nt, Human
ggcuuccugcuccacugacugguucgagggugccaaguacuucuccuggaugcccagcguggaagaaaaaaggaaguc

SEQ ID NO: 3163 - RNA, 72 nt, Human
ggcuuccuggcagaagauggugacuggaguggccagugcccuguccuccagauaccacugagcucacuggcc

SEQ ID NO: 3164 - RNA, 62 nt, Human
ggcuuccuguauguggcugggcuugguggcucacaccuguaaucccagcacuuugggaggcc

SEQ ID NO: 3165 - RNA, 99 nt, Human
ggcuugagccagccucaggucucgaacauggcacagcuggugcacagcacuuucucguacaugucacugcaguccacgaggccacacaggguacaggcc

SEQ ID NO: 3166 - RNA, 73 nt, Human
ggcuugauuugcuuggugaccgaauuacuaggugacuaguuuacuaacuaggucauucaaggaacgucaaguu

SEQ ID NO: 3167 - RNA, 70 nt, Human
ggcuugauuuguuggugaccgaauuacuagugacuaguuuacuaacuaggucauucaaggaagucaaguu

SEQ ID NO: 3168 - RNA, 73 nt, Human
ggcuugauuuugcuuggugaccgaauuacuagugacuaguuuacuaacuaggucauucaagggaagucaaguu

SEQ ID NO: 3169 - RNA, 85 nt, Human
ggcuugcgauuccacuccgggcaggcuucaggcuaucugggacggagacugccaggcugaagccuguuccugcggaacgcaggcc

SEQ ID NO: 3170 - RNA, 72 nt, Human
ggcuuggccauggcggcuggugcugauaaccauuucuuggcagaagugcccgccaaagcuguggcccuaguc

SEQ ID NO: 3171 - RNA, 59 nt, Human
ggcuugggccgaccccagagagagcccaucaccuucuuuuugggguuuggggcuuggcc

SEQ ID NO: 3172 - RNA, 80 nt, Human
ggcuugguccgguggucucucgcggcgcgccuuuguguacucgaugcucgcuacggcggggugcaucggcgggcugagcc

SEQ ID NO: 3173 - RNA, 96 nt, Human
ggcuuuacaggaggugacuuaaguucaaaggaggccuguuagucuaauccaacauggguguccuuuggacauaagaagauaccagcacugugugcc

SEQ ID NO: 3174 - RNA, 90 nt, Human
ggcuuugcuggggcagcaagccugauaagcaugaagcucuuaucuuugguggcuguggucggguguuugcuggugcccccagcugaagcc

SEQ ID NO: 3175 - RNA, 73 nt, Human
ggcuuuuucuucuggggacagcaucaccccaggaaacaacuccuuggagcuguccauugcagaccacagggcc

SEQ ID NO: 3176 - RNA, 86 nt, Human
gggaaaagaacaauauauccaaauaaaagaccuagaaggagacaguaaucuucccuagguuugcauuuguuuacucuauuuuuccc

SEQ ID NO: 3177 - RNA, 60 nt, Human
gggaaaagcuguucccaucaaggauggcauccucuucaaauuucccugguuagcuuuccc

SEQ ID NO: 3178 - RNA, 71 nt, Human
gggaaacuccgaggacagagggcuaaauccaugaagucuguggauggccugaugauccacagcggagaccc

SEQ ID NO: 3179 - RNA, 76 nt, Human
gggaaagcagaagguuggggcuggaggucugcuggcaggcaggcagacauuuggagccaacuuuccugcucagccc

SEQ ID NO: 3180 - RNA, 96 nt, Human
gggaaaggccaucacccuccguggacggggucucggccaccacauccaccuucugaagguggcccagacaccuccacgcugcugacugcacuuccc

SEQ ID NO: 3181 - RNA, 77 nt, Human
gggaaaggcccaggagggggagaaaggcagacucagccagggaugggugaggguuucccugucccaaagcaagaccc

SEQ ID NO: 3182 - RNA, 107 nt, Human
ugguugucuuuucaauaccugguaugguaugaggcacaggauaguugcugacaaacauuuguuagcuaauuaucaugugcugggggaguuggagggagauugaacca

SEQ ID NO: 3183 - RNA, 107 nt, Human
ugguuuagcuuaggaacagcaucuggcacauaguaaguguucagugaacguuagcuauuaccaucaucacuauuaaugugugcuagugacuguccugaguuacauua

SEQ ID NO: 3184 - RNA, 75 nt, Human
ugguuuuaguccauugguagcauuguguguaugaggagauucaacaccacagacagcugcaggacucgauaucca

SEQ ID NO: 3185 - RNA, 73 nt, Human
ugguuuugguggcccaggcugggagugcaagggcgcaaucucagcucagugaaaccucggccucccgugucca

SEQ ID NO: 3186 - RNA, 92 nt, Human
uguaaaaacuuugccacaaacagaaucugccuuaacuaugagacuugugcuccacuuguauucucaggcaagcucuuggcagagucagugca

SEQ ID NO: 3187 - RNA, 72 nt, Human
uguaaagcggacaguuugaaacuuggggcauaugccaaccaaaacuucguuucugcaugucagaaaagugca

SEQ ID NO: 3188 - RNA, 131 nt, Human
uguaauacaaggaaggugaugacuugcuccauugucuguggcuuucuuauguuguaaugggagcuuaucagugugcaccaugaucagguuacagcaucaggaggagcucuacaaccuauuuuagauucaca

SEQ ID NO: 3189 - RNA, 85 nt, Human
uguaccauuguuguuuuagacauaaugcuacugcacacuucauagacuacaguacaguauaguauaaauacaacuuuugugugca

SEQ ID NO: 3190 - RNA, 90 nt, Human
uguaccuauaaauauaugcugucugucaguguacaguaugguacaaacuccuuuucuggcacacuuaaaaugcaagcaaucuaugggaca

SEQ ID NO: 3191 - RNA, 81 nt, Human
uguaccugggaaagcucaguggugggugacacaauucgcuucauuauuguucgcguaaccugcugauccuuucccgggaca

SEQ ID NO: 3192 - RNA, 76 nt, Human
uguacggcaguucaguaguuaucaaaucaguuggucucaggaccccuguguacucauaauuauugagacccaaaca

SEQ ID NO: 3193 - RNA, 85 nt, Human
uguacuauuuguuuaaugaaugcauaugagguguuuuuauuccaacaagaaaauuauucguacgcgauuauugaaugaauagaca

SEQ ID NO: 3194 - RNA, 92 nt, Human
uguacuucaggacccgaagacccggacucucuggcaagggacuggggccaagcccaguaagaggucugaccggcgaaagucuugaggguaca

SEQ ID NO: 3195 - RNA, 75 nt, Human
uguagcaugaaucaaauguauuuauuaauagcacuuaugacuauagaauauaauuggcauaugauucauauuaca

SEQ ID NO: 3196 - RNA, 61 nt, Human
uguaggccaggcuggucucgaacauccugaccucaagugauccaccugccuuggccuuuca

SEQ ID NO: 3197 - RNA, 60 nt, Human
uguauacagaggugacucgcuaccuggacuucaaggugguggagggcagcuuugucuaca

SEQ ID NO: 3198 - RNA, 107 nt, Human
uguauauacaugugugcauguaugugugcauguguguguuaugcuuauguaagugcauggauguggcuguguaugcacaugaaugugcauguacacauguguauaca

SEQ ID NO: 3199 - RNA, 87 nt, Human
uguaucaucauuguuauuucauuagauucucaaaucauaaugcugagugguuuaauaaaauaauccagugguacgaauuaagguaca

SEQ ID NO: 3200 - RNA, 71 nt, Human
uguauuaaauugugugaaauagucucccguggguugauuuguauagacuucauucauauauuuuuucugca

SEQ ID NO: 3201 - RNA, 121 nt, Human
uguauugcagcagguuggcagccucaguaaaucuccauuuguaaaugugacagucagcagaaucuccaguuacagucaacucaaagcaagcaggggcaugccacauacauguucauauaua

SEQ ID NO: 3202 - RNA, 72 nt, Human
uguauuuugacaucauuaugagauuuaaacaaauuccucagugaauguuugguugugauauguuaaccugca

SEQ ID NO: 3203 - RNA, 77 nt, Human
ugucaaauuuguaagcuucauagggauggacaucauaucuauaaugcccuucuauaugugcuaccauagaugugaca

SEQ ID NO: 3204 - RNA, 71 nt, Human
ugucaggcucgggcucuggggccuacaaggagccagccauccucguggggccugagaaccucacccugaca

SEQ ID NO: 3205 - RNA, 68 nt, Human
ugucauccaucuucccuggaagucucccaccggggagugaggugcuugucaggguucacuggguaaca

SEQ ID NO: 3206 - RNA, 78 nt, Human
uguccaguucccauuuugguccucauaaucaaaacagcuuaacaugacagucaucaccaguaauaguggcauuggaua

SEQ ID NO: 3207 - RNA, 83 nt, Human
ugucccaagcaaggauagggaaggggaaugguugagccucuggagaucauuguaaccaacuccugccagaccuguuuggggca

SEQ ID NO: 3208 - RNA, 90 nt, Human
ugucccguucaucaauuucuccucugcagggugagcuguggugcccgcagccaaacuggguuccaguuaggggcaguagaguuggggaca

SEQ ID NO: 3209 - RNA, 94 nt, Human
ugucccuuccaagcuguguuaacuguucaaacucaggccugugugacuccauuggggugagaggugaaagcauaacauggguacagaggggaca

SEQ ID NO: 3210 - RNA, 64 nt, Human
ugucgacauccguggaggauggccagauccccgaggucaucuucuacaccuaggcuguccgaca

SEQ ID NO: 3211 - RNA, 131 nt, Human
ugucggcggggagggaucugacacucaagcugagguucuugcuguugugcuguacccacacacgaaugucauguuuguggagaagaguagcuagugaaugaagccguggugguggaggggggccugaugca

SEQ ID NO: 3212 - RNA, 60 nt, Human
ugucggguagcuggaacuacacagguguguaccaccacaucugguaccaccacacccaca

SEQ ID NO: 3213 - RNA, 71 nt, Human
ugucucagcucaaauggaauauugucgcaccccaugcacugucaguugcaauauuccuguggugucuggca

SEQ ID NO: 3214 - RNA, 74 nt, Human
ugucuccauugagauuaauguggccccugcuuaguucuuacuaaucagaacacuuaauuuacaaucaaaugaca

SEQ ID NO: 3215 - RNA, 97 nt, Human
ugucugaaggaaacauugggaucuucugugauauggaugggaaaugcagucucaucaggaaucauuugguuugggucccuugucuugguaauugaua

SEQ ID NO: 3216 - RNA, 79 nt, Human
ugucugauaaccacacuaauucaucugcuuccagguuacagcuccgucuagcagcaagguugaaaagguuaaaaaggca

SEQ ID NO: 3217 - RNA, 104 nt, Human
ugucugguaacggcaaugcggcugcaacggcggaagaaaacagcccaaagaugagagugauucgcguggguacccgcaagagccagcuugcucgcauacagacg

SEQ ID NO: 3218 - RNA, 84 nt, Human
ugucuuuugccgaaaugcuaaugauuucugugaaaacucacuaggguacaggagacaaucauuuauguuuaagaaaagaaggca

SEQ ID NO: 3219 - RNA, 101 nt, Human
ugugaaacacagccaguuucuuugaugacucaaaacguacuuugugaucuugccaagcuuugagaucaucguuacaagcagcauuuugguugugaaaaaca

SEQ ID NO: 3220 - RNA, 76 nt, Human
ugugaaaguagauuuuuauuacagagcaaauuuuucuaucaauucaaugcuuuaaauaaaacaacauaauaccaua

SEQ ID NO: 3221 - RNA, 70 nt, Human
ugugagagauugggcgaagaaacaacguggcuccuauuuuuggcacccucuucuccuugugauccuuaca

SEQ ID NO: 3222 - RNA, 89 nt, Human
ugugagcccgaguggugugaugccugaggacccacucuucauccuguacaccaguggcuccacaggcaaacccaagggugugguucaca

SEQ ID NO: 3223 - RNA, 64 nt, Human
ugugaucccaaaguuaaccuuggcuaucuauaauuugugauggcagcuauucuuuggguaaaca

SEQ ID NO: 3224 - RNA, 72 nt, Human
ugugaugauuugauucagguauagcccaaauuaguaaggggcuuuagcuguaaacugaaaacaauauucaca

SEQ ID NO: 3225 - RNA, 94 nt, Human
ugugaugggaggaguccucuguaucucagucugauccuggucucccucucggccauggucucacacuagugcugcugggaaaccaucccucaca

SEQ ID NO: 3226 - RNA, 72 nt, Human
ugugcaaggcggaaaggcuggggcagcagcuggagaaucagcucagcaggccuuggcccucccccguggaca

SEQ ID NO: 3227 - RNA, 80 nt, Human
ugugccacugcacuccagccugggcaacagagugagacccugucucuaaaauaaauaaauaggccgggcgcgguggcuca

SEQ ID NO: 3228 - RNA, 75 nt, Human
uguggaaacuuuuggcuguggggaccccauuucacugaugauugaauggguccaccucugucaaaggaauucaga

SEQ ID NO: 3229 - RNA, 108 nt, Human
uguggagaauuaaaaaggguagugaggcuggcauuuauagaaucuggcuuucuuguauuggguggaaagcuagaugaaaccaguuucucucagccuuuucucuccuca

SEQ ID NO: 3230 - RNA, 61 nt, Human
uguggcccagaggugcaaggagcuggguaucaccgcccuacacaucaaacuccgggccaca

SEQ ID NO: 3231 - RNA, 88 nt, Human
uguggcgaguuugacaaugcuggcgccaaugaugaguguggaccgagacccucauugugcucuuuccagauccucaagcccgccgaca

SEQ ID NO: 3232 - RNA, 92 nt, Human
uguggcucugccucccugucucacucucccuauaacuggccucucccugcucagaccuuccuggacgagcugcaugagacagggcagcugca

SEQ ID NO: 3233 - RNA, 78 nt, Human
ugugggaagaugcuggcaaggugcuggagggcccuggaggcaaagggccugccucgaccuugccccccauaacccaca

SEQ ID NO: 3234 - RNA, 71 nt, Human
ugugguacaggaggcugcuuagcaguuuugagauaguuuaaucuacuaaauguggccucagcugugucgca

SEQ ID NO: 3235 - RNA, 102 nt, Human
ugugguccacaaggggagagcaggggacacagcauuggcaggaaccucaaauuccugaccaaacccucuuccacacaaugccucccgaaagaaaggaaccca

SEQ ID NO: 3236 - RNA, 72 nt, Human
uguggucuuaaacuucuguuuuacaaaauccaaaagguaaauacagaagaaaucaauacaauagagauuaua

SEQ ID NO: 3237 - RNA, 65 nt, Human
ugugucccagcuaguucacuccuuucgccgugcgugguggaggcuggccucucuggcugggugca

SEQ ID NO: 3238 - RNA, 64 nt, Human
uguguguguauauauguauguguguauguguguguauauauagauguauauauauacacacaca

SEQ ID NO: 3239 - RNA, 78 nt, Human
ugugugugugugugugugugugucugucugucugucugguagaggcagagaggaauguaaacaaauauuguauaugca

SEQ ID NO: 3240 - RNA, 72 nt, Human
uguguuugcuguuuuccaucauguguuauccuaagaguugggguuuuuuuaaaaucuguuucaccaggcgca

SEQ ID NO: 3241 - RNA, 131 nt, Human
uguuaaauucaacaucucuuguaauugucauuugucuguuuuucaaauaacccaaggauuucuaucagugcauuugaaaggaaccuggggauagcuaucaaguggaaagagagagagaaagaauucauaca

SEQ ID NO: 3242 - RNA, 82 nt, Human
uguuacaagguuagugguccuaagccccgcagugacuguucaucgccagaacagcggguuguaccauuguagccggguuaca

SEQ ID NO: 3243 - RNA, 78 nt, Human
uguuauggcugagggaagcagugauggggguaggcaccacagucuguaaccccuccccuucuaucuuaguacccaaca

SEQ ID NO: 3244 - RNA, 81 nt, Human
uguuauguuauuaaaucaaaacaaaacacaagguacggauuacuucacuguccuuuaucuugauugguuucuuacaaaaca

SEQ ID NO: 3245 - RNA, 81 nt, Human
uguucuccucaucuggaaaauaauuuggcuguauaaucgugguauucaggaaguuagggcagguguuuagguggaagagca

SEQ ID NO: 3246 - RNA, 77 nt, Human
uguucuuggugagaagggccggcggauucgggaacugacugcuguaguucagaagagguuuggcuuuccagagggca

SEQ ID NO: 3247 - RNA, 77 nt, Human
uguugaauuuagggcaaaaugacauguuuauauuuuaaauaaaugaaaucuagucauuaaagagucuuaauaaagca

SEQ ID NO: 3248 - RNA, 82 nt, Human
uguugagaugaggguuucagggaagcagaaaaaccaagugcuggaucauuucuccuuugaggggccuuuguccaauucagca

SEQ ID NO: 3249 - RNA, 72 nt, Human
uguugagugcagaugaaggguuguaugaggccccauccugggagggcuguacaccuucuuggcacagcagca

SEQ ID NO: 3250 - RNA, 87 nt, Human
uguugauggucucauaacugaauauauuaaaaacuuaaauuguauacuuuaaguuggugauuguaugauauaugaguuuuaucaaua

SEQ ID NO: 3251 - RNA, 74 nt, Human
uguugauggugguccgcacauaggagguggcaggcuuccgcuggccggaucuccgcuuaaugaccaccacgaca

SEQ ID NO: 3252 - RNA, 91 nt, Human
uguugcccaggcuggucuugaacucuauaguguuugaucauagaaguggagauacuaaccaaaaaucuuuucaaauuaagccuaauaaaca

SEQ ID NO: 3253 - RNA, 77 nt, Human
uguugcuaucuaucacuuucauguaacaauggacuuaguguccauuaaacugccugagaagugguuugagccugaca

SEQ ID NO: 3254 - RNA, 81 nt, Human
uguuggugacggggcagcuugggggacgaacggggagcagugcagcggccgcccacgucucccggguuauccucgcuggca

SEQ ID NO: 3255 - RNA, 62 nt, Human
uguugucauugcucccuuguguuguacuaaucacgaauacaagguucgcacuuugaccaaca

SEQ ID NO: 3256 - RNA, 83 nt, Human
uguuguuaccugucuuccauaaauaccauaguuaaauguuuugugugcauacauguucguauuugucuauaaagguauugaua

SEQ ID NO: 3257 - RNA, 83 nt, Human
uguuuaguagcagaucuccuuucuugauaguuucuugguacugccaguucuugcuaucaggucuguugguuucuacuauuuca

SEQ ID NO: 3258 - RNA, 83 nt, Human
uguuuaguggcaucagcccuaauccaucugaugcuuuuucauuauuaggcauguuggagacuugggcaaugugacugcugaca

SEQ ID NO: 3259 - RNA, 86 nt, Human
uguuugguacuagacauguuugcuagcugaccaucuacccaacugaaguaugccuuuggucauaagcauuucuuaucuaccgaaca

SEQ ID NO: 3260 - RNA, 92 nt, Human
uguuugugccgucuuuggucugggaggagucggauuggcaguuaucaugggcuguaaaguggcuggugcuucccggaucauugguguggaca

SEQ ID NO: 3261 - RNA, 83 nt, Human
uguuuugcacugacuaguacugaauaauacaaccacucuuauuuaauguuaguauuauuuauuugacaacucagugucuaaca

SEQ ID NO: 3262 - RNA, 62 nt, Human
uguuuuuggcauuauuccaacaugcuuuguuuuaagaagccuugaagggaaugucagauuca

SEQ ID NO: 3263 - RNA, 79 nt, Human
uuaaagaacagcauuugauuugcuuaaacaaaguaguaacagcugaaguuccuuccaaaucacuuuucugauucucuaa

SEQ ID NO: 3264 - RNA, 80 nt, Human
uuaaaugcagauucccaggcccugggccagagcuaccaaaucaaagucucuaagaacaaggccuggaaaucugccuuuag

SEQ ID NO: 3265 - RNA, 79 nt, Human
uuaacacgccugcauugggcaccaaguauccaacagaugaacuucugggggacacauucaaaucguugcgggguauuaa

SEQ ID NO: 3266 - RNA, 60 nt, Human
uuaaccauggacauggaucuucuuuauaauucuaauuugaagugcugucuccauggucgg

SEQ ID NO: 3267 - RNA, 86 nt, Human
uuaacuacuaaaaacuuagaauuaugaaaggcauuugguuaaugaauucuauguaaugagaguaauguucugagauuaguaauuga

SEQ ID NO: 3268 - RNA, 70 nt, Human
uuaagacuccugacccccaaguggcaugcagcccccaugcccaccgggaccuggucagcacagaucuuga

SEQ ID NO: 3269 - RNA, 71 nt, Human
uuaaggaauuaguuuauucauucauuuucauucaaaaggcuaccuacuuugagugucuucucauuccuuaa

SEQ ID NO: 3270 - RNA, 101 nt, Human
uuaaguuuuaggguuauuguaaagauguacagcaguuaaaagagucucuggcacauagaaagcacuauauaaaaguuguauauuauuauuucuagacuuga

SEQ ID NO: 3271 - RNA, 103 nt, Human
uuaaucccuccagugacagcgguggggcagcuguuuuguuucuauuucacagaugagaaaggcggagaggcuccaaaagggcuaaugauuggauggagauugg

SEQ ID NO: 3272 - RNA, 71 nt, Human
uuacacauaaagaaaugacaaccucuggggcuugaaaaagccuccagacaaaguuaacuccuauguuguag

SEQ ID NO: 3273 - RNA, 103 nt, Human
uuacacuugaucuuagccaaaagucugagaagugauuuuauauuauauuuauaaagaucacuuuagcuuucuccuggagacuggauugguagggacaagguga

SEQ ID NO: 3274 - RNA, 106 nt, Human
uuacagauucaaguggaugaaaaggggaagauuguggaugcuagguuuaaaacauuuggcugugguuccgcaauugccuccagcucauuagccacugaauggguga

SEQ ID NO: 3275 - RNA, 75 nt, Human
uuacucugucaccaggcuggagugcaguggugcacucucagcucacugcaaccuccaccuccuggguucaaguga

SEQ ID NO: 3276 - RNA, 96 nt, Human
uuacugacaaaacugggcagcugaaaauaaaagagaauaaauucuauuccacuguaagaaguugauuucuuuucagcuuucuuuguauaucaguaa

SEQ ID NO: 3277 - RNA, 101 nt, Human
uuacugaguauucaccaggugcuggguggagaaagaagacuuaaagauucccuagacaucuccucuccccuagacucaggaccauggcacuuauuuucuag

SEQ ID NO: 3278 - RNA, 107 nt, Human
uuacuguuccauuuugcaacauccugcaacaccauccugggagacaagagcauuaccgagcuuggcuuucacgggggaggguuguauucaguaaaaaagaauaguaa

SEQ ID NO: 3279 - RNA, 81 nt, Human
uuacuguuuauggaaggggagacuuaguaucauaaugaugucaaucuucugcauacugaucacuaauucaaucaacaauag

SEQ ID NO: 3280 - RNA, 93 nt, Human
uuacuuuugaggagagggauaucauugaaggagccuuucgucaaggucucauucgggucuuggcggcaacuucuacucuuucuucugggguga

SEQ ID NO: 3281 - RNA, 80 nt, Human
uuagaaaagugcugccagaaacauccuugccaugcuucuguauguacuggugcuaguguuucuaucagauaaauuuuuag

SEQ ID NO: 3282 - RNA, 72 nt, Human
uuagaaacuauugacuguccauagugguuauugauauuccucucaacccuuuuaagucugauccccuucuaa

SEQ ID NO: 3283 - RNA, 76 nt, Human
uuagaccugcuagccaguauguucccuggugagaaugagcucauagugaaugaccagcuggcuguagcagaacuga

SEQ ID NO: 3284 - RNA, 82 nt, Human
uuagaggaucccugggaggcaggacacuggaggaugacaaagagucuuagggaaaaugcacugaguuugagggauaaacuag

SEQ ID NO: 3285 - RNA, 115 nt, Human
uuagcaccugccuauauuacauucauuuugaugguuuguaucucaaaggaguacagugaacgaaacuuguuuaaagauacaccggaaagaaaaagagaagaggcagaguggcuug

SEQ ID NO: 3286 - RNA, 78 nt, Human
uuagcuggggccuugaagaugaugaagauaugacacuuacaagguggacaggcaugauuauugggccaccaaggcugg

SEQ ID NO: 3287 - RNA, 101 nt, Human
uuaggaggagccgcgggugguggauaugcccaggucauccccauggaggagguaagaccuugaagagaugcgggucagcuaucacuguguuuccuuccuga

SEQ ID NO: 3288 - RNA, 72 nt, Human
uuaguuguggacugauccaacuucgggagauaaggggguaccccccgcucuauagacuccaguuauaacuga

SEQ ID NO: 3289 - RNA, 89 nt, Human
uuauacagcaaacaauuucuucaauuagcagucuagacauuucuauaaacagaaaucuuggacaauugauaauauuucugacuguauaa

SEQ ID NO: 3290 - RNA, 89 nt, Human
uuauaguacaccacuacagacacauaaaaaguugacuuaucuaauuaaaacauuuucccuuccuauguuucuaauucugaaaacuauaa

SEQ ID NO: 3291 - RNA, 111 nt, Human
uuaucucacauccccaucuuacuuuccuacauguucucaaaacacaguaguaccagccuuaccuuucugcuguauguagauagucagaucauccuacugggggugggauga

SEQ ID NO: 3292 - RNA, 60 nt, Human
uuaucuguaagcucucagcacugaucauggccugugggugugcaacaaguuuggggauaa

SEQ ID NO: 3293 - RNA, 77 nt, Human
uuaugaugaaguaucgggagacggguuuucaagaagaaaguccgguauucaggauaucucuaaaguuaucauuauaa

SEQ ID NO: 3294 - RNA, 78 nt, Human
uuauggcagauugauaccugccuggucgcaugaugcaaugaguauuuuuagacgagggaauuauuucaagggccauga

SEQ ID NO: 3295 - RNA, 75 nt, Human
uuauggggacaugagaauuacugcgaaaauaaauagaauguccuuuuguaaaagcagcaauaucaugucuuguaa

SEQ ID NO: 3296 - RNA, 75 nt, Human
uuauggggacaugagaauuacugcgaaaauaaauagaauguccuuuugugaaagcagcaauaucaugucuuguaa

SEQ ID NO: 3297 - RNA, 80 nt, Human
uuauguuauuagguguaaagaaaguguaugcugugccuguuuugguacugcgagcaguucuuccaauucgaugaauauaa

SEQ ID NO: 3298 - RNA, 75 nt, Human
uuauuagugaugaguuauguguuagcggagugucguguuguuauacuaagcguaggagugauucguagauaauaa

SEQ ID NO: 3299 - RNA, 77 nt, Human
uuauucaaaaucaacaucuuggguccgaauuugaacuucuuccaaucucuuggcacuucaaggguuguuaagaauag

SEQ ID NO: 3300 - RNA, 71 nt, Human
uuauugcccauucugggaguguugagcguuuuaaguuugcuaugcuuguaaaaaucaaugaauggcaaugg

SEQ ID NO: 3301 - RNA, 71 nt, Human
uuauuggucugaauucauuuuagguuacuuuaacauuuuaauuuccuguaacuguccaugagagaauauaa

SEQ ID NO: 3302 - RNA, 95 nt, Human
uuauuuacaaugcuagaaauacagacuuaccuuacaucaauuuuguccuaaaccgaauuucucaggauuacugugguuucuuucauucugauuga

SEQ ID NO: 3303 - RNA, 77 nt, Human
uuauuucaaugggauuuauauacacgguauuuuacaauggucagcagugguagaaaguguucguccauucggaauaa

SEQ ID NO: 3304 - RNA, 92 nt, Human
uuauuuccuggcaacugcucucuguaccgacaaaaucuaucccaaggcauugaccuugugauuagauuuacacagagcuuuugcuuuuauaa

SEQ ID NO: 3305 - RNA, 106 nt, Human
uuauuugucaauauguggggauaaccuguagcugcauucaugagguagcaaauagcaguuuuggccuguggggugaacagcuaaacaguguucuggcaucagauaa

SEQ ID NO: 3306 - RNA, 71 nt, Human
uucaaaaccagaagcagucgagacauaggacaaccuagcaguuggccuuauaaguggcucuuuguuuugaa

SEQ ID NO: 3307 - RNA, 110 nt, Human
uucaaaauguucacuuuuaacacaaagucuucccauaaaaaauguggcuacauuuuccccccaaugacuacauacauagauggguagcagcaagaaaagaugaaaaugaa

SEQ ID NO: 3308 - RNA, 65 nt, Human
uucaagaauguuagaaguucaagccagaaguuucuuucaggguuuuggucuaucucauuugggaa

SEQ ID NO: 3309 - RNA, 71 nt, Human
uucaauuguaugcugggaagcgggagguagugauuauaccuucucccaaaucuuucuagcacacuaaugaa

SEQ ID NO: 3310 - RNA, 65 nt, Human
uucacaaugggguggucaagggugaucuucagguggcuuuugggcaucauauaccccauggugga

SEQ ID NO: 3311 - RNA, 78 nt, Human
uucaccugaucuccagaaggccucgaaauccaccuaucgacuaauaccggauuuaagcaaggcaaaggagauagugag

SEQ ID NO: 3312 - RNA, 78 nt, Human
uucacuucugauccagcacuucugucauuugcugaauauuucugcaagccaacugugaacaugggucagaaacaggaa

SEQ ID NO: 3313 - RNA, 67 nt, Human
uucacuuucccguggaagguucaggaagcgacaccguuguuaucaggggcccuuccucggaugugga

SEQ ID NO: 3314 - RNA, 74 nt, Human
uucagacccucgaggauucggucauaugggaauugcuguuccugauguauacagugcuuguaaaacgguuugaa

SEQ ID NO: 3315 - RNA, 71 nt, Human
uucagcaagguucuggcgcaggugcagcacccccugcugcauuaccucagcguucacaggccugugcagaa

SEQ ID NO: 3316 - RNA, 83 nt, Human
uucagcauaacguuuauggacaaaauguauauaguauaucuuauauucuauauguauuuuaucacauaguaaggaaugcugag

SEQ ID NO: 3317 - RNA, 76 nt, Human
uucagcauuuaggggguuccuggugagggcucaggagagaucugggcccagagccagccacacuccuuguguugag

SEQ ID NO: 3318 - RNA, 87 nt, Human
uucaggaaguacaagaagauaauaaggguucuucuaucacgaaaggggaagaggccuaaaaauuccuucgcauuguaaauucaggaa

SEQ ID NO: 3319 - RNA, 79 nt, Human
uucaggggcagcgaagaagaugauacgucaugcuucccggucaagggcagcuggcgcaaucuugcagcugagaucugaa

SEQ ID NO: 3320 - RNA, 101 nt, Human
uucaguauagcaaggugcuagguuuuuuccuuuccccaccugucucuuagccuggggaauuaaaugagaagccuuagaauggguggcccuugugaccugaa

SEQ ID NO: 3321 - RNA, 81 nt, Human
uucaguggcauugggccuuggcugggaugcugaguuauccacuggagcaucggcaguacaggcaggcacagaggcagugga

SEQ ID NO: 3322 - RNA, 78 nt, Human
uucaguucucgaggagaaaagauccuuauggcagaugcugauggagccacaaaguuuccagauguugagaacuuagaa

SEQ ID NO: 3323 - RNA, 81 nt, Human
uucauccauuucuguauuuguauccauuucuguauccccagugcuucauacaguaggauuuaauauaugcagggugaugag

SEQ ID NO: 3324 - RNA, 72 nt, Human
uucaugggggccagcagcuucacagugcugcguugcaccagcuuugcacuggagagcugugcccacccugaa

SEQ ID NO: 3325 - RNA, 105 nt, Human
uucauguuuuuguauuauguaucuuuuuguaugguaaagacuauauuuuguacuuaaccagauauauuuuuaccccagauggggauauucuuuguaaaaaaugaa

SEQ ID NO: 3326 - RNA, 69 nt, Human
uucauucccuuggguagacaaaauccaacauucaacgacaguuggagguauacaccaagcggaggugaa

SEQ ID NO: 3327 - RNA, 90 nt, Human
uuccagggcccggggccgguggggcuuucggcucgaugggcggcaaggacuucgagcagccucucgccauuucccgcgucacuccuggaa

SEQ ID NO: 3328 - RNA, 97 nt, Human
uuccaguguuucaaagaaagcacuuuuaaaaauguauauacaugaaugaacauuucauuauaucauaaaauaaaugcugcgcuguaagauaaaggaa

SEQ ID NO: 3329 - RNA, 116 nt, Human
uuccauucagggacuugauacaaaaaauuuaguuugaacugcuauuagcagguggcaggagccaccuucaaaugaaucuucaaauuggaaaauacugcuucaccaccuguugggga

SEQ ID NO: 3330 - RNA, 71 nt, Human
uuccccggcaagguuuuauguacauauguagucuuucuuuauccuacuuuaauacucauuuugcuacagaa

SEQ ID NO: 3331 - RNA, 102 nt, Human
uucccucacguuugucacccaguccuucugucuuuuaaauuguucaccguagcauccaguagacuauuaaaauagcggaguggaaguuggguuaagagggag

SEQ ID NO: 3332 - RNA, 86 nt, Human
uucccugagacucuuuaacuucuugaaaaaaguugaugcuguuuuauuugaaaaaucgucaagacuauuaaaaggcaaauagggga

SEQ ID NO: 3333 - RNA, 62 nt, Human
uuccgccggccuguuggcaccgcaacaggggaucccuucccagcgaauuacaggcggcggaa

SEQ ID NO: 3334 - RNA, 97 nt, Human
uuccuaaugcacagucuugagucuugcagggcaggcuuguuaaggauuugguuucuaacccuccccucuccagggugaacucaagcugucauaggag

SEQ ID NO: 3335 - RNA, 73 nt, Human
uuccuacgguuuguccacaacuuccagagcugaagaguagcucaaggacaucaaagggcagaggcccuaggaa

SEQ ID NO: 3336 - RNA, 71 nt, Human
uuccugcgcucuacgguuuuccaugcccccuccaguuugggggucuaaaccaaacaggaaaggugcagggg

SEQ ID NO: 3337 - RNA, 80 nt, Human
uuccugcucuuuaacuuucuggcuuuggggagagguaggcaacucuucuuugcagaaauagaaaggccgaagagggggag

SEQ ID NO: 3338 - RNA, 100 nt, Human
uuccuuuuaccuuaccaggguaggacucuaaucugauuaugggucauaagacucuuguucgaaucagagaggguccugccucauccucugggggaaggaa

SEQ ID NO: 3339 - RNA, 85 nt, Human
uucgcuggcucgcaaaucacauuucaucaagcucagaugacuuauuuggcaugugggcucgugcaggaugucaugcagaagugaa

SEQ ID NO: 3340 - RNA, 79 nt, Human
uucggugcuuuuaccuaccuacaacgagcgcgagaaccugccgcucaucguguggcugcuggugaaaagcuucuccgag

SEQ ID NO: 3341 - RNA, 100 nt, Human
uucucaaccagcaaugcgacuagacaagaugguggccacgucaugugcugggcgcuguguguguggacccauguugaccuugagcguugucgguggagga

SEQ ID NO: 3342 - RNA, 92 nt, Human
uucucagaugggcgggugucugucucugcucgaauugacagaaaaggauucugugaaggugaugagauuuccauccaugcugacuuugagaa

SEQ ID NO: 3343 - RNA, 101 nt, Human
uucucugcugcugggcuaccacacaaugagauugcagcucagaucugucgccaggcugguuugguaaagaaauccaaagauguaguagacuacagugagga

SEQ ID NO: 3344 - RNA, 91 nt, Human
uucugaaaacuuuaaguucaguaauaugccagggguucccaagaccacuugagaccugguaauuuauuggaagucucuaagggaaucagaa

SEQ ID NO: 3345 - RNA, 85 nt, Human
uucugaacugugacacuuucucagucuuuucuuaaauuucaugaccuugagaacuuugaagaguacugguuaguguuuuguagaa

SEQ ID NO: 3346 - RNA, 128 nt, Human
uucugcaccacuggcauggauggcggcaugaguaucugggaugugaagagcuuggagucagccuugaaggaccucaagaucaaaugaccugugaggaauauguugccuucauccuagcugcuggggaa

SEQ ID NO: 3347 - RNA, 79 nt, Human
uucugcucuguucuuuguuuuauguuuaacugcuguuucuaauugcagguguauuacagauacaaauaagaguacagaa

SEQ ID NO: 3348 - RNA, 82 nt, Human
uucugguagcaggaugggauggagaaagagacuguguuccaaguauugauauguuuguuuucucaucccaaaauuaucagag

SEQ ID NO: 3349 - RNA, 99 nt, Human
uucuuaaugaaauuaugaaggaagaaaggcaguucucugaaagaaguuuauccaauuaucaauaagagaauaauguuuucuucuggguuuaauuaagga

SEQ ID NO: 3350 - RNA, 75 nt, Human
uucuuauagucuccuaacauuugucucuagccuuugccuuuguacaaucacagauauccuauggagauuuaagga

SEQ ID NO: 3351 - RNA, 66 nt, Human
uucuucccuguuagggagagcugagggcagcugccacugagucuccugucccugagaaggggagga

SEQ ID NO: 3352 - RNA, 89 nt, Human
uucuucuuucuucaaauaucaccauugauuucuguggauauccuuagggugacacucuggaaaucuuggaugaaaguuaggaaguagaa

SEQ ID NO: 3353 - RNA, 66 nt, Human
uucuugggcuaacaguagagcugaacuuuuccauaucauguuuagagaccacugguagccuaagaa

SEQ ID NO: 3354 - RNA, 80 nt, Human
uucuugguaauuuugcagcacgucagcaucaauaucgucauagauacucaugcugucagcacuugcaacgguauuaaggg

SEQ ID NO: 3355 - RNA, 75 nt, Human
uucuuuggcuucacucucacaaacuccuugaauuucuucucuuuauucuuuuccuugucuuuuguaguuggggaa

SEQ ID NO: 3356 - RNA, 73 nt, Human
uucuuuuuaggguguuaaucuuuaugugaaaaaucuugaugaugguauugaugaugaacgucuccggaaagag

SEQ ID NO: 3357 - RNA, 102 nt, Human
uugaaauggggucuuacucugucaccaggcuggagugcaguggugcacucucagcucacugcaaccuccaccuccuggguucaagugauucuucugccucag

SEQ ID NO: 3358 - RNA, 67 nt, Human
uugaacccaggaggcggagcuugcagugggccgagauugcgccacugcgcuccagccugggcaacag

SEQ ID NO: 3359 - RNA, 104 nt, Human
uugaagccagagcaaguauguccuucaucagguaaucaggaacucuucaguugaagcugaggaacuaacugauuaguuguugaucauaauauaauugguuacaa

SEQ ID NO: 3360 - RNA, 78 nt, Human
uugaauugauaauuagaauauugaauaagcaauccuaugauccacuaauuuguuuuaucaguuaauaauauuaaucaa

SEQ ID NO: 3361 - RNA, 79 nt, Human
uugaccagccggaaagcauuggggaugacggccgacagcagggugguguggaugucacccaggacuuuccggaaggcaa

SEQ ID NO: 3362 - RNA, 74 nt, Human
uugagaagcgccgacgagaccggaucaauaacaguuugucugagcugagaaggcugguacccagugcuuuugag

SEQ ID NO: 3363 - RNA, 104 nt, Human
uugagacacagucucgcucugucacccaggcugcggugcaguggugugaucuuggccucacugcaaccucugccuccuggguucaagugauucuucugccucag

SEQ ID NO: 3364 - RNA, 109 nt, Human
uugagacagacagggucuugcucuguugcccaggcugggaaugcaguggcgccaucuuggcucacugcaaccucugccucccggguucaaggcaagucuugcgucucag

SEQ ID NO: 3365 - RNA, 103 nt, Human
uugagacagagucuugcucugucacccaggcuggacuccaguggcacaaucucagcucacugcaaccuccgccuccuggguucaggcaaaucuccugccucaa

SEQ ID NO: 3366 - RNA, 104 nt, Human
uugagacagaguuucgcucuuguugcccaggcuggagugcaauggugcgaucucagcucacugcaaacuccaccucccggguucaagcgauucuccugccucag

SEQ ID NO: 3367 - RNA, 101 nt, Human
uugagacagucucacucuguugcccaggcuggagugcaguggcguggucuugacucacugcaaccuccaccucccagguucaagcaguucucaugucucag

SEQ ID NO: 3368 - RNA, 103 nt, Human
uugagacggacucucgcugugucacccaggcuggaguucaguggcaugaucucagcucacugcaaccucugucuccuggguucaagcgauucaccugccucag

SEQ ID NO: 3369 - RNA, 104 nt, Human
uugagacggaguuuagcucuuguugcccaggcuggagugcagugguacgaucucggcucacugcaacuucucccuccugguuucaagcaacucuccugccucag

SEQ ID NO: 3370 - RNA, 102 nt, Human
uugagacggcgucuugcucuauuggcaggcuggagugcaguggugcgaucucagcucacugcaacccccgccucccagauucaagcaauucuccugccucag

SEQ ID NO: 3371 - RNA, 103 nt, Human
uugagauggagucucgccgugucgcccaggcuagagugcagugacgcaaucucggcucaccgcaagcucugccuccuggguucacuccauucucccgccucag

SEQ ID NO: 3372 - RNA, 103 nt, Human
uugagauggagucuugcuuugucacccaggcuggagugcaguggugugaucuccacucacugcaaccuccaccucccagcuucaagugauucuccugccucaa

SEQ ID NO: 3373 - RNA, 79 nt, Human
uugagugugcagcucacaacagacaucaggaucacuguccaggaguguccuggguuaaccuuuguuggcugggccucag

SEQ ID NO: 3374 - RNA, 92 nt, Human
uugaguguuugauaagaguagcauuagguauuagugggaaaugauuggauuuuucauuuaagcauuguugggacaacuuguuaaccauuugg

SEQ ID NO: 3375 - RNA, 76 nt, Human
uugaguucauaaucuggucaugugggaauugcuaucuuugugauuuugauuauuucuuccagauuauuuuauucaa

SEQ ID NO: 3376 - RNA, 93 nt, Human
uugauacaaagcuuaaaauucugcauauggucauagaaaaugcauauugguuuguguuuuuaucacuugcuuccaacuuaggcuuuggcucag

SEQ ID NO: 3377 - RNA, 114 nt, Human
uugaucucuuggcgaucuucuucuugcccauggcagcugucacuuugcggggguagcggucaauuccagccaccagagcauggcuguaggggcgaucugaggugccaucaucaa

SEQ ID NO: 3378 - RNA, 91 nt, Human
uugauuuucauuaauccagagcugcagcaccagagauaauuucaaucaacucuuuugugaugacagcuuggcggguacgguugaaugucaa

SEQ ID NO: 3379 - RNA, 100 nt, Human
uugcaauuauuugaggaacuccgccgccuggcgcccauuacacagcgaccccacagaagccaccgcgugggugccguggaggccucuucaagugcugcag

SEQ ID NO: 3380 - RNA, 72 nt, Human
uugcaggaauugaagcuuuuacagcuggagacugagaaguaggcaucuguacuguaaaccuuugaccuguga

SEQ ID NO: 3381 - RNA, 91 nt, Human
uugcagugguuuuagugggugaaaaugucccaucugcaccaguacacaggcaggcauuaucauucuucaccuacuuuuuaaauaguggcaa

SEQ ID NO: 3382 - RNA, 74 nt, Human
uugcauuuccagaauucugaguuaaagaaacaaaguguuugcuuuguaacaggccaaaauucuauuuccugcaa

SEQ ID NO: 3383 - RNA, 100 nt, Human
uugccccaaccccaagguaauggucaucuacuuugcaaccuauggagauccugauagcucccauacaaagugagguacacuguugccaauuuggaggcag

SEQ ID NO: 3384 - RNA, 76 nt, Human
uugcccgucaacaaaaaucaggcauguucugugaaagucagcauggcuuccaucucagacauccuuuucugugcaa

SEQ ID NO: 3385 - RNA, 81 nt, Human
uugcgcuuuccuuucugucaagaagcaguuugaagaauuaacccuuggugaauuuuugaaacuggacagagaaagagccaa

SEQ ID NO: 3386 - RNA, 60 nt, Human
uugcggcauccacgagaccaccuucaacuccaucaugaagugugacguggacauccgcaa

SEQ ID NO: 3387 - RNA, 86 nt, Human
uugcuccaaaacaccagagaagugcagaaugaggagcugccaugcucaggcagucauucugcaugauucuuauucuacaggaggaa

SEQ ID NO: 3388 - RNA, 105 nt, Human
uugcuggaucugucuguggcuauuuuuuuccauguuuuucucacucaagcaaagucuguuaguggaaacaugggcugggggauggggagaggacagauaaagcaa

SEQ ID NO: 3389 - RNA, 106 nt, Human
uugcugguuaauucuggauugugaaucuccauguaucuuugggaccugucagccguggcagucucccuuccuagccauggaagagcauauccuuguuuauuggcaa

SEQ ID NO: 3390 - RNA, 74 nt, Human
uugcuguugccuaggcuggagugcaguggcacaaucauagcucacugcagcuucgaacuccugggcucaagcaa

SEQ ID NO: 3391 - RNA, 91 nt, Human
uugcuuccucuugagugcaacggaaagggcuaucagauaucugcacguuugugagauuuauagcuccuccauuacacuucuucauaagcaa

SEQ ID NO: 3392 - RNA, 76 nt, Human
uugcuugaaccuaggauuuggagguugcagugagcugagaucaugcuacugcacuccagccugggcaacagagcaa

SEQ ID NO: 3393 - RNA, 60 nt, Human
uuggaaaagguucuagggcagggaaaaugcacccauuuccccuuuucccuuuuuuuccaa

SEQ ID NO: 3394 - RNA, 89 nt, Human
uuggaaugaguuacagagauaucgauaugaguacaaugagagagaagguacuuuagucauauguugauaaaaacuuguacaucacccaa

SEQ ID NO: 3395 - RNA, 86 nt, Human
uuggacagggacgacauucaggagccaaacaggccgcaagagcaacuggcagauccaaggucccguggaugacugucuuugaacaa

SEQ ID NO: 3396 - RNA, 87 nt, Human
uuggaccuaaguguaacuccuucaugcacuaaacuggacagagccaugcugucuagucuugaaguccucauuuacacagagguucag

SEQ ID NO: 3397 - RNA, 75 nt, Human
uuggagccaggagccugccaugagguuuugagaacagagugcuguuuuagagcuggcagcagcaucucagcccaa

SEQ ID NO: 3398 - RNA, 65 nt, Human
uuggaggggagcguggggagggcgagugcugguaaaucucugcaccucacccugaucuccuccaa

SEQ ID NO: 3399 - RNA, 72 nt, Human
uuggauggguccugugggaggagcaccucaaaccgaauauggaguuuucagccaaaaagagcccacuuucaa

SEQ ID NO: 3400 - RNA, 80 nt, Human
uuggauguggcuggcucacacucuagaggacaaucuguccuacucaaaguccauggagcuaaaaguugauuuucauccaa

SEQ ID NO: 3401 - RNA, 72 nt, Human
uuggcacagcuauuuccagacuaauccugaguccuauuuauaggcugagaugauuagguuggccugugucag

SEQ ID NO: 3402 - RNA, 77 nt, Human
uuggcauggacuaguucaaguaucagugccuccaucaauguuuuuacaagucacuaaauacugaaaguccuugacaa

SEQ ID NO: 3403 - RNA, 86 nt, Human
uuggccucugggacucagauuccuccucuuuaaaauggugcuaauaauagcacccacccucugugaggaggaugcugugaggacaa

SEQ ID NO: 3404 - RNA, 71 nt, Human
uuggcuccacaaggaggcucaccagcucuucuuggaaccugaggugcuggacccagagucuguggagcuga

SEQ ID NO: 3405 - RNA, 84 nt, Human
uuggcucuguuguuccuuuuuuaauuccccagggucuagcaucucagagacacuuguggaaugaauucauuaacgacuggcuga

SEQ ID NO: 3406 - RNA, 109 nt, Human
uugggcugcaaucacacaaugggugcaucaccagugcggacaccuaggcguacagggaaccauggcuuggggaguguaaagaaggauguuaccccaggaugcaguucag

SEQ ID NO: 3407 - RNA, 82 nt, Human
uugggggagaacugccauccuaaaaauauuaaaucuuuucaaaauaucaacauuuaaugucuuuccauuuaguuuccuuuaa

SEQ ID NO: 3408 - RNA, 64 nt, Human
uuggguaauccacuuaguuuccagguaacauacguaagaauguccacuggguuggaaaccccaa

SEQ ID NO: 3409 - RNA, 93 nt, Human
uuggguccuaguaguaccaaagugcucauagugcagguaguuuuggcaugacucuacuguaguaugggcacuuccaguacucuuggauaacaa

SEQ ID NO: 3410 - RNA, 103 nt, Human
uuggugaaaccccgucucuacuaaaaaauacaaaaauuagccaggcauggugaugggcgccugucccaggcuguuuuuauguuauguggggaugaggcacuga

SEQ ID NO: 3411 - RNA, 82 nt, Human
uuggugguuguuguuaaaguggccuuuaaaaagggguucacucugcuaaaaggaggcucauccugauaauugcaaucacuaa

SEQ ID NO: 3412 - RNA, 75 nt, Human
uugguguagacuccaggccuguucuucugggcacagcauagccccaggagacaauuccuuggagcucuccauugg

SEQ ID NO: 3413 - RNA, 80 nt, Human
uugguuagguaguggaaccuucuaaaugacgcacuaugugauuccugugucauauagaauguucuaugauucuuagccag

SEQ ID NO: 3414 - RNA, 71 nt, Human
uuguaccaugaacugacagaccuaccagucaaauucauguacccagauaauggucucucacauggcaacaa

SEQ ID NO: 3415 - RNA, 62 nt, Human
uuguauaguaauguuucagaccaucauccagcuuuggcugcugaaaucauacagcugugcaa

SEQ ID NO: 3416 - RNA, 71 nt, Human
uugucacauaugccacuguggaggagguggaugcagcuaugcaugcaaggccacacaagguggauggacag

SEQ ID NO: 3417 - RNA, 86 nt, Human
uuguccuucauauacugcuccugaaaaaugcucaagucuuccaaaaccauucaucuugucaucuuuccagcuuccuguguagacaa

SEQ ID NO: 3418 - RNA, 62 nt, Human
uugucucaaaguuaugccuaccuggcucguaggaugccaacguuaggagugaaaauagucaa

SEQ ID NO: 3419 - RNA, 62 nt, Human
uugucuucaggacugcucuguuccaguauuuuugcugucauacaguacaugucccagagcaa

SEQ ID NO: 3420 - RNA, 71 nt, Human
uugucuuccuaaugcuaccuuuguugguccuuucuuccuuaagugccaagugcugagcuaaaggaggauaa

SEQ ID NO: 3421 - RNA, 66 nt, Human
uugucuucuaguacagucugcaggguucaccuuuucccugacucagucuucuccuaagagugacaa

SEQ ID NO: 3422 - RNA, 82 nt, Human
uugucuucuguagacuagacugggcauuaguuccuuaauaagagaggcaaugagugcaauauaauagucaugaagagggcag

SEQ ID NO: 3423 - RNA, 76 nt, Human
uugugagaucgaucuguccuggcaguuaacacgaugugcaacaguguguuagcauggaacagaacgcuuuucacaa

SEQ ID NO: 3424 - RNA, 107 nt, Human
uugugcaugggaagauuguaguuacucuugagggaagcggauuuacgccaaagugcgguacaaauucaucuaacuuccaggaaagcacuuucaguccauaugcacaa

SEQ ID NO: 3425 - RNA, 73 nt, Human
uugugcgccucuuaucaagucagcacacaccuuuuccaaggauuuuacguugcggcuuguuagggugauucga

SEQ ID NO: 3426 - RNA, 91 nt, Human
uuguggauauugaaguuugaagccuguuguucaucuauagaugcacuggaugggauuggaagucuucagauuucaguaggguuuuccacaa

SEQ ID NO: 3427 - RNA, 82 nt, Human
uugugucuuacuaaagcagcuuauuguagguguggcguucuaaaacguuuccugccugcgaugguucacaaaauaaacacaa

SEQ ID NO: 3428 - RNA, 109 nt, Human
uuguguucaacaguuaaucaaaaccagagagucuagggcagccucucugaugucguccaugauguacauucagucccugguuucucuacuuuucugucugaugucacag

SEQ ID NO: 3429 - RNA, 75 nt, Human
uuguucauaaucccaaacaagggcccugcuggcagcaacaggacagguggggccaggacagggaagcuggagcag

SEQ ID NO: 3430 - RNA, 76 nt, Human
uuguugaagggcagugaagguagguuucagguuugguuuuacaaaccuguuaacuaccuccuguccagcuugacag

SEQ ID NO: 3431 - RNA, 71 nt, Human
uuguugcccaggcuggagugcaauggcacgaucuuagcucacugcaaccucugccucauggguugaagcaa

SEQ ID NO: 3432 - RNA, 106 nt, Human
uuguuucggacuauagagugcugauggcagagauuggugaggauuuggauaaaucugauguguccucauuaauuuuccucaugaaggauuacaugggccgaggcag

SEQ ID NO: 3433 - RNA, 65 nt, Human
uuguuuggaggguguuguggucuccaaucccggcuugacggggcugcuaucugccuuccaggcaa

SEQ ID NO: 3434 - RNA, 85 nt, Human
uuuaaaaaaauaccacugugagaauaaagcgcuaguaagauacaucacuuacugauuuuaaaaauacagaaagauuuugaguaaa

SEQ ID NO: 3435 - RNA, 76 nt, Human
uuuaaaaaucuuacuucucgugacaguccuacaugaaaaauuaaaaaucacaaggauucauggauggaaaacugag

SEQ ID NO: 3436 - RNA, 75 nt, Human
uuuacugagcgucuacuuugggcccgacacuuuucuagguacaggagauauggcagggaacaaaugccaagugaa

SEQ ID NO: 3437 - RNA, 105 nt, Human
uuuagaaagaagaggcacaucuugauaacaugcugagaacugaggcaacugaugucuuuaggcucuuauagucccagcauguuuuuaagagcuacugaauuugaa

SEQ ID NO: 3438 - RNA, 73 nt, Human
uuuagauuucuggugguaaauauaaaugaguuucauuuuaaguaaacucauuuugugggauuugagauuuaaa

SEQ ID NO: 3439 - RNA, 95 nt, Human
uuuagcaguacaaaaucuuugacuaugaccaugggacacagacaugaguuuauguuuugguuuguuguggucuggggaucauguacuuuucuaaa

SEQ ID NO: 3440 - RNA, 93 nt, Human
uuuaguaaggucaguuugauuggauacuuaaguuuuagaaaugagaaaaauacagaguuuuagaaaugagaucuagagaacacgucuucuaaa

SEQ ID NO: 3441 - RNA, 83 nt, Human
uuuaguuccucaggaacagagaacuuugcaaugaugaucucaacucugcaucaucuggugacuccugauucugcaggacuaag

SEQ ID NO: 3442 - RNA, 79 nt, Human
uuuauaaaacuuucauugucaggugaaccagugugcaagcccacaguacgcagcacaacugucaaugcaggucaaugag

SEQ ID NO: 3443 - RNA, 119 nt, Human
uuuauggcuuagaguccuccugucuucccuuuucaccccucuagucccuccuccguccauuucuugaagggaacuaugagugugauagaagguggaguggggauucccuguggccugaa

SEQ ID NO: 3444 - RNA, 74 nt, Human
uuuauugacuacuuuaaguagaacaaacuaaauacauauuuaacaguuuugguucauuuauacaguacauuaaa

SEQ ID NO: 3445 - RNA, 103 nt, Human
uuuauuuugauuuguuuucggccacaaugaguccuuuagugccauuguggacucacaaugcacauggacaucaggcugugaaugaagacagaggcaguuuaaa

SEQ ID NO: 3446 - RNA, 76 nt, Human
uuuauuuuggccacauagaucaaaguuaguuucagucuuuucaagcucuaaaauuuugguucugugguuauuuaaa

SEQ ID NO: 3447 - RNA, 105 nt, Human
uuucaacuuccugaaguugaagagcgaauuccauuucuucugaacugaaaggaagacuucacaaggagaaucuggaauuuguccuuucgauuuuuuaguuagaag

SEQ ID NO: 3448 - RNA, 77 nt, Human
uuucaauaaaaguuaugcacaaaugugaacaccugagauggagcugaacauuucuucacuuuguucuuuuucugaag

SEQ ID NO: 3449 - RNA, 83 nt, Human
uuucaauuugacaauguccggcccuugaaauuucauacccggugggaaaauuuuaaauggccgggaccuugguugguuugaga

SEQ ID NO: 3450 - RNA, 87 nt, Human
uuucagaugugcuucgcuuuugaaugucuguaucuaacuaaugagggaugcaaaauaaccaagaaguuaaaagcguaagaucuggaa

SEQ ID NO: 3451 - RNA, 66 nt, Human
uuucaggaguuggagaacggaguacauuuuuaaaauuuuuuguuccauucugaucaacuaaagaaa

SEQ ID NO: 3452 - RNA, 84 nt, Human
uuucaguucuuuacguauugucacccagagaacaguguucacuaaaaacauuauucccacugccagauagaaaaggacaugaaa

SEQ ID NO: 3453 - RNA, 124 nt, Human
uuucccacgacacgauguucccuuucuacagcugcuggaggacuggacugcuacuacuacuccuggcuguggcagugagagaauccuggcagacagaagaaaaaacuugcgacuugguaggaga

SEQ ID NO: 3454 - RNA, 64 nt, Human
uuuccccuuaaauuggucagcauagugccccauuuuggggcauccuucaucuggacaagggaaa

SEQ ID NO: 3455 - RNA, 81 nt, Human
uuucccgcgucacuccuggaagcaaggcggcucuagcuaauuuauguauuggagauguaaucacagccauugauggggaaa

SEQ ID NO: 3456 - RNA, 72 nt, Human
uuucccuaaaucaaaucaauauuaauugugccuuauuucacuuaacauagacuugaauuauuuuuagggaaa

SEQ ID NO: 3457 - RNA, 126 nt, Human
uuuccgggucuguuccuccuugagccguuucaaaacagcuuugugcucacucuuugggguagucuccagcaggugauuucuuaaugcuuuguacugucugguuuggauuuugcagguauccugaaa

SEQ ID NO: 3458 - RNA, 69 nt, Human
uuuccucaagagugcauuccagaaggggaccugcuauucuucgaggggaccugcuauucuucgagggga

SEQ ID NO: 3459 - RNA, 72 nt, Human
uuuccuuuuucuguaggccgccuuaagcuuucuaaauuuggaacaucuaagcaagcugaagggaaaaggggg

SEQ ID NO: 3460 - RNA, 113 nt, Human
uuucuaacacuggccucagcacuaguucccugagacuuccuuagguugucauggaaaccagccacaccuggagaggcaucagggcccacugggcuuguggugggaucgagaga

SEQ ID NO: 3461 - RNA, 113 nt, Human
uuucuacugguggaccacuucagacagaggagagagacucuaucucuuuuauuugccuaauuuaagugucugagaaacagaaucuccuuuguucugcuggacuguaauggaag

SEQ ID NO: 3462 - RNA, 82 nt, Human
uuucuauagagaggcuuucacuuuugaguucuuugaguuuaaagauugcuuuucuugaaaugcucuuuuuuuaauguagaaa

SEQ ID NO: 3463 - RNA, 79 nt, Human
uuucugaacguggugggauucccgcugaaccacuucugcaagcagcuggugaagcucuacuacccgccccguccggagg

SEQ ID NO: 3464 - RNA, 85 nt, Human
uuucugauggcugcuaugugucugacacugugccaugaucuguaggagaaacaagugaacaggggacaaucucagccuuuaggaa

SEQ ID NO: 3465 - RNA, 61 nt, Human
uuucuggguacuuacgguccugagucucaaguucgucuucgagaugcuguugugccagaag

SEQ ID NO: 3466 - RNA, 86 nt, Human
uuucuguucacaccagcuuguuucaguuuaguauauuucuuucugucuacauuuauacuuacugauaaauucacugugaucaggaa

SEQ ID NO: 3467 - RNA, 75 nt, Human
uuucuuuauuggcacuaguauaaaacagagcagaucaacuggccucucggucuguacaaaguguggggcgugaaa

SEQ ID NO: 3468 - RNA, 85 nt, Human
uuugaaaagaacacuuuuuggggcagccuucaaaaagguucauacauaccaacgggcuuucuuaaaauuggguucuaauguuaaa

SEQ ID NO: 3469 - RNA, 104 nt, Human
uuugaccaggagaucugagauugaugcugggacugcugcugagauccagaggaucaacaagcucauagcagcuuccucagcaccaugagaucuggauuguuaaa

SEQ ID NO: 3470 - RNA, 93 nt, Human
uuugacccuuuugagauggaacuuucauaaaguuucuuggcaguaguuuauuugcuucaaauaaacuuauuugaaaaguugucucaagucaaa

SEQ ID NO: 3471 - RNA, 77 nt, Human
uuugagguggaugggucuucucuuuuuugggguuuccagcucacugggacucucagaccuuaccuuuccagcucaaa

SEQ ID NO: 3472 - RNA, 85 nt, Human
uuugaucgaggagcgcgguuaccggacgggcugggucuauggucgcuccgcgggccgcuccgccggcuggugcuuuuuuaucagg

SEQ ID NO: 3473 - RNA, 77 nt, Human
uuugcacuaagucauuugcacucguuggaguuguggagacggccuugagucucaguacgagugugcgugagugugag

SEQ ID NO: 3474 - RNA, 83 nt, Human
uuugcagcuaacuacuauguguagacagguuuuauauuauaaaguaugcauucuuaucaccuaguauauaguuaguuuguaga

SEQ ID NO: 3475 - RNA, 117 nt, Human
uuugcgcuauuaaaggcaagcugauauaaauuagaacucuucugaaugggccuucuauauuuaaaugggcuuuuucuaggaaguguauauuuguaaacuugucuugaauggaaaaaa

SEQ ID NO: 3476 - RNA, 71 nt, Human
uuugcuauagacaaggggucugaaaacuauggccugugguucaaauccaaccccuugucuguuucugcaaa

SEQ ID NO: 3477 - RNA, 98 nt, Human
uuuggaaggaaagcaaguauauagaucaagcuguauuaaaaugaaagugcagagauagucuuagaaugagaauauaaagugcuuuuuuuaaauccaaa

SEQ ID NO: 3478 - RNA, 52 nt, Human
uuuggaguaauucaguauagguucguuuaaaagagauuuuuauaacuucaga

SEQ ID NO: 3479 - RNA, 71 nt, Human
uuuggauguauaauaguuuagcaagauguuacuuuuguaagacaucagauguucaaaaaagugcauccgaa

SEQ ID NO: 3480 - RNA, 68 nt, Human
uuuggcuuccuuuuauuucuugaggauuacaugaaacgugaacuauacaggaaaguauggcagccagg

SEQ ID NO: 3481 - RNA, 84 nt, Human
uuugggacauaugcaugcggaaugaggcuguuggacgagaacugcucauuuucuuggcccaguaccuaugcaacgaauaccaga

SEQ ID NO: 3482 - RNA, 63 nt, Human
uuugggccgcccucggcccccagaaaaguuuuucaaaaccucuuuugggcgccgggccccaga

SEQ ID NO: 3483 - RNA, 68 nt, Human
uuugugccagauauuggagauaaaaaggucagugaggcaugaccuuuggguucacauucuggugggag

SEQ ID NO: 3484 - RNA, 81 nt, Human
uuugugcuauuuuaucacaggcuuacacuacaauuguuaauaaauacuucauuuggagauguaugguguaaaacacacaaa

SEQ ID NO: 3485 - RNA, 70 nt, Human
uuuguggauauagugauuucugccaucaugcaggguaccauugaagcagagauuauagauguuaaucaga

SEQ ID NO: 3486 - RNA, 112 nt, Human
uuuguggccccugugugcagucaagccccaaccuccuggcuuggucuccgcuuguuguuggcuaccuaguuccagguugagggcccacuccuguaguuacagccccgucaag

SEQ ID NO: 3487 - RNA, 76 nt, Human
uuugugugugaagcuuaagggucauauguuugcuuguauuuuuacugcuaaucugugaacauuauugacaggcgaa

SEQ ID NO: 3488 - RNA, 64 nt, Human
uuuguuacuuuuuucggaguuagggagggauugaagacugaaccucccuuggaagaauaccaga

SEQ ID NO: 3489 - RNA, 91 nt, Human
uuuguuucauuauuuggaacucaauaauagagacuuuaaguacaaauugugagucuaggagaauuuuugauuuccacagaugagaaauaaa

SEQ ID NO: 3490 - RNA, 72 nt, Human
uuuguuuguuuuguuuuguuuuguuuucucaaaaauguugaauuuggaaagagaacuauccagaaagauaga

SEQ ID NO: 3491 - RNA, 123 nt, Human
uuuuaaaagcgauguaacuuggcagguguuaagcugguuucaguaaucuuagcaucuauuuccuuuuccccagugauuuucaaguagcuaaauuagcugccugccggguccagguuuuugaag

SEQ ID NO: 3492 - RNA, 102 nt, Human
uuuuaagaagagcugugugcucccuuugguuccggggaccccgcuuauagccagcaaaaauggccuuggaccacagccuuccagacauaguuccuuuuagaa

SEQ ID NO: 3493 - RNA, 99 nt, Human
uuuuaggaaacaaaagguuuauugaaaugcauguagauaaauuaucaucagcauaaaacuguuauggaguuuucaacauggggucuuuugcucuuaaaa

SEQ ID NO: 3494 - RNA, 75 nt, Human
uuuuagugauuauuaagcacuucugucagucuuugaaaaaagaacguauuuuuugugcuuugaagaucucugaag

SEQ ID NO: 3495 - RNA, 81 nt, Human
uuuuaugccauuaguugucuggcuuucauggcucugcaccacauuacagucagagcaggaaggccagcaguggagauagaa

SEQ ID NO: 3496 - RNA, 112 nt, Human
uuuucaauuuuuaaaaauuagauuuauugcagacuggccucaagcucccagacuauauuuuuuagcugcauuauuuagggguugaaaugccagcuuuugagacuuuugaaaa

SEQ ID NO: 3497 - RNA, 74 nt, Human
uuuucccauucuuggccacuuuaauucagaagaagguuuuuuuuccuuauuuucagggccaaacccggggagga

SEQ ID NO: 3498 - RNA, 88 nt, Human
uuuuccuugugaagagcccuacagcugccccuauuuacugacuugggagaaguaaagucagaaagaacgaacagcuguggggggaaaa

SEQ ID NO: 3499 - RNA, 62 nt, Human
uuuucucuaccccagccucucccuaagacccuauagcgucuaaggaagggcuggauugaaag

SEQ ID NO: 3500 - RNA, 97 nt, Human
uuuucugucuuacuuguucaccucaucaugaagauuuaguagccauuggcuacaaggauggcauaguggugauaauugacaucaguaagaaaggaga

SEQ ID NO: 3501 - RNA, 77 nt, Human
uuuucugugaaccaugcacgugcuggcacuggccucaggagacagugcccugccuuggcugucagguccacggagaa

SEQ ID NO: 3502 - RNA, 73 nt, Human
uuuugagacagagucucacucuguugcccagacuggacggcaguggcaacaagagcgaaacuccaucucaaaa

SEQ ID NO: 3503 - RNA, 108 nt, Human
uuuugagauuuuauugaguacuacuaaucuugacauauuuugguuggcaccacauucuugguauaguggguuagugguugaauaguuugcagacuuugugaaacaaaa

SEQ ID NO: 3504 - RNA, 61 nt, Human
uuuuggaacagacuuucuuacugcaauuaagaaccgcuauguguuagaagauggaccagag

SEQ ID NO: 3505 - RNA, 73 nt, Human
uuuuggcccggcucaagacccgucuggugcagcccuucuauggguugcaguccggaacuguugcuggcugaaa

SEQ ID NO: 3506 - RNA, 106 nt, Human
uuuuggcccugugcucuugauaacagaguguuugagggacaacuuucacauuugaguuuuuccaaaauuaaagguuguagaagagucacaguaucuauugucaaaa

SEQ ID NO: 3507 - RNA, 78 nt, Human
uuuuggcucucugaccagcaccauggcgguuggcaagaacaagcgccuuacgaaagggcggcaaaaagggagccaaga

SEQ ID NO: 3508 - RNA, 85 nt, Human
uuuugggcuuuccuucuccuuuauaaauugcauauauuuuuaacauauauuaacacuuuaaaaccgugggguggaaaguuuaaaa

SEQ ID NO: 3509 - RNA, 94 nt, Human
uuuuguauuuuaguagagauggguuucaccauguuggcaaggcuggucuugaacuccugaccucaggugauacacccaucucggccucccaaag

SEQ ID NO: 3510 - RNA, 75 nt, Human
uuuuuacugacaacuaauaaacacuguauguguacauauucauauacacuguggacuggagaaagucaguaugga

SEQ ID NO: 3511 - RNA, 77 nt, Human
uuuuuauaauccuacucacaaaugacuagcuucuccucuuguauuuugaagcagugugggugcuggauugauaaaaa

SEQ ID NO: 3512 - RNA, 91 nt, Human
uuuuugagucugggucucgcucugucacccaggcuggaguacaguggugagaucauagcuuacuguagccucgaccucccgggcucaaaga

SEQ ID NO: 3513 - RNA, 86 nt, Human
uuuuugcaguguuuuauacccucggcaaucuugcugcguuacgcaguacaugcuuuuuaaugggaccugugaagcaacugaagaaa

SEQ ID NO: 3514 - RNA, 89 nt, Human
uuuuuggggaagucaugcugagggugguagugugacccugccugaaaaaagggucucuuacccucccagcccuggcucaacucugaaga

SEQ ID NO: 3515 - RNA, 65 nt, Human
uuuuuugagauggaauuuugcucuugcugcccaggcugggguugcaauggugagaucucaaaaaa

SEQ ID NO: 3516 - RNA, 107 nt, Human
uuuuuugagauggagucucacucugucgcccaggcuggaaugcagugagcagagaucgcaccacugcacuccagccugggcaagagugagacugugucgucaaaagg

SEQ ID NO: 3517 - RNA, 82 nt, Human
uuuuuugauauagaugaucuuacuuucuugaaagcuucuucaaaaugcuuaugacuaaccuugaguucaccuuagcaaaaga

SEQ ID NO: 3518 - RNA, 71 nt, Human
uuuuuuggagacggagucucgcucugucacuccagcccugggcgauagagugagacucaggcucaaaaaaa

SEQ ID NO: 3519 - RNA, 71 nt, Human
uuuuuuucagaagucacacucagaauuuaauuucuccaaaaguuguuucuguguuugauucauguagaaaa

SEQ ID NO: 3520 - RNA, 70 nt, Human
uuuuuuuccuccccucucaguagcacggaguccgaauuaauuggauuucauucacuggggaggaacaaaa

SEQ ID NO: 3521 - RNA, 80 nt, Human
uuuuuuuucagcuacauaaacauuuuucucauguuuuguuacuaaaacaacuuguuuaggguuuuaugguugggggaaaa

SEQ ID NO: 3522 - RNA, 109 nt, Human
aguacagggugcugugagaucuaagaauacaaggcugaugcguucucauugugguuagggcugcugcauugcuuugcgaauucuuauguuaaaauaugcauuccguacu

SEQ ID NO: 3523 - RNA, 71 nt, Human
aguaccguuuuugagguucaguccuuaaacauuugcuuuaagaaaacaggcuugaauuucacaaugcugcu

SEQ ID NO: 3524 - RNA, 71 nt, Human
aguagaacuauuuauuuuccuuugcguauauacccaguaaugagauugcugcauugaaugauaguucugcu

SEQ ID NO: 3525 - RNA, 61 nt, Human
aguauccuaagaucagcugggcaugguggcuuacaacuguaaucccagcacuugggagacu

SEQ ID NO: 3526 - RNA, 106 nt, Human
aguaucuggaauucuauugugugugagucugugcaggaacacaaugagucucaaagugaaaaaaacuuuggauuccugguuccuacagcacuuuuguucagauacu

SEQ ID NO: 3527 - RNA, 66 nt, Human
aguauggaugugucuugaauguguugaggcccuuggaagggacucuuucugcaagauaccuguacu

SEQ ID NO: 3528 - RNA, 89 nt, Human
aguauuauuaagacuuuuccugggucugggcugugccuguugcugccucugagacaagucagccuaauacaggaaaagcuuaauucucu

SEQ ID NO: 3529 - RNA, 72 nt, Human
aguauuugacugcuaaauucuccacauuauguaaccugauuaauuacauuuggguguaaagcaguaaaugcu

SEQ ID NO: 3530 - RNA, 70 nt, Human
agucacuggaaaaugccuacaggcaguagccaccaucauguggcacaaagugggcaucauccuagugucu

SEQ ID NO: 3531 - RNA, 70 nt, Human
agucacuggaaaaugcuuacaggcaguagccaccaucauguggcacaaagugggcaucauccuagugucu

SEQ ID NO: 3532 - RNA, 72 nt, Human
agucagagagaaacuugaauggugaauuccuagaaaaaucaaacaaauucucaagcaaauuaaguucugacu

SEQ ID NO: 3533 - RNA, 71 nt, Human
agucaguccugcugugggaagcccacacaucaguguguuggagcaaaguucacgaaggccaugggcugacu

SEQ ID NO: 3534 - RNA, 78 nt, Human
agucauuguuuucaugacaccacucuuuuuucucuuuuacguuaggaaacgacuacgugugguuaugugaacuugacu

SEQ ID NO: 3535 - RNA, 62 nt, Human
aguccaacgucucugaugcgguggcucagagcacccguaucauuuauggaggcucugugacu

SEQ ID NO: 3536 - RNA, 130 nt, Human
aguccaggacuguuuuccuacagcgugccucaaaaguguuguagagggcaggauucuacauucacagccuguuccaucuacgagauuuuccagaugcuacuugugguagacauuccuaacucaugguacu

SEQ ID NO: 3537 - RNA, 59 nt, Human
aguccauugguagcauuguguguaugaggagauucaacaccacagacagcugcaggacu

SEQ ID NO: 3538 - RNA, 110 nt, Human
agucccgaggcuacgugaaggaacaguuugccuggagacauuucuacugguaccuuaccaaugaggguauccaguaucuccgugauuaccuucaucugcccccggagauu

SEQ ID NO: 3539 - RNA, 79 nt, Human
agucggcuucgguaaaggccaagaaaaagcggcguacaaaaaaauuccuccgcccaccggcaaaguaccgacaucgacu

SEQ ID NO: 3540 - RNA, 84 nt, Human
agucucacucugucuccuaggcuggagugcaguggcgugaucucaucucauugcaaccuccaccuccuggauucaagugauucu

SEQ ID NO: 3541 - RNA, 84 nt, Human
agucucacucuguugcccaggcuggagugcaguggugcgaucucagcucacugcaaccuccaccuccuggguucaagugauucu

SEQ ID NO: 3542 - RNA, 60 nt, Human
agucucgaacuccugagcucaagcaguccgcccaccuugaccucccaaagugcugggauu

SEQ ID NO: 3543 - RNA, 92 nt, Human
agucucucucuggcuggaccuggacugcagucacacucuaagagcuccucuuucuacaccucugccagugggcguucggucagagacaagcu

SEQ ID NO: 3544 - RNA, 83 nt, Human
agucucugaccagccugaacgugucuuaugucacuuguuuggaaaugaugugauugaagauuucagagaggucauuggaggcu

SEQ ID NO: 3545 - RNA, 76 nt, Human
agucuguuguuagucuuaaaaaugaggaggaaaaugaaaauuccauuucucaguacaaagaauccgugaagagacu

SEQ ID NO: 3546 - RNA, 84 nt, Human
agucuugcucuguugccuaggcuggagugcagugaugcaauuuuggcucacugcaaccuccaccuccuggguucaagcauuucu

SEQ ID NO: 3547 - RNA, 67 nt, Human
agucuuguauagcaauaugcuuggagaggagaauacuuaucucuggcgcacaucacuauauuuggcu

SEQ ID NO: 3548 - RNA, 76 nt, Human
agugaaccagaaugcaguuuuccuugagauaccuguuuuaaaagguuuuucagacaauuuugcagaaaggugcauu

SEQ ID NO: 3549 - RNA, 72 nt, Human
agugacuuuauucgacaugguuaguguccuagggaauuaaguuuuuuggggcagaacuagguaccaagcacu

SEQ ID NO: 3550 - RNA, 73 nt, Human
agugaggggcaggaugaaaucaucuaggguagguauuuagagggagggcgccgugcaaaauaaaauccucacu

SEQ ID NO: 3551 - RNA, 65 nt, Human
agugauggucaguauuucuuugaaauucuacaaggaacuucaggcacaugugcugaugaguuauu

SEQ ID NO: 3552 - RNA, 99 nt, Human
agugcaggaugugcggguuuguuacauagguaaacgugucccauggugguuugcugcaccuaucaaccuaucaccuagguauuaagccccacaugcauu

SEQ ID NO: 3553 - RNA, 75 nt, Human
agugccacggagagugagguggcccggggcaaaaacauccucagaaaugcccugguaucucaucuagauggcacu

SEQ ID NO: 3554 - RNA, 76 nt, Human
agugcgcagccuagaucccucacaugcacaguucacaguaggguuugcgcugcuaugagaaucuaaggcugccacu

SEQ ID NO: 3555 - RNA, 76 nt, Human
agugcguaacuggcaugaggacuauuggucuuugagaaauucuggccaacaguuaucaaaugguauuguacacacu

SEQ ID NO: 3556 - RNA, 61 nt, Human
aguggaaaacggcgauggggaacaacauacggaucugugaaaauucccccuuuucuccauu

SEQ ID NO: 3557 - RNA, 79 nt, Human
aguggacaaugucauguuuggagaaagauaacaacacaaauaauguaaccuuuccuuaaaaggcagaacucaauccauu

SEQ ID NO: 3558 - RNA, 100 nt, Human
aguggcacuuaacaugcagcuucuuugaccucguggccaccaggccuccagagggccuugugcacaucggacaaacaggagcagcaggagaagugacgcu

SEQ ID NO: 3559 - RNA, 91 nt, Human
agugggccuaauccuuaugcgcguacccguucucccuuuggucagggcuauacccaaccugagaccugguuaucgauaaggagggcucucu

SEQ ID NO: 3560 - RNA, 79 nt, Human
agugggggugaauucauguguaguacaagccgauagacagaccaguccuugcuugacgcacaagucugaaugcuccacu

SEQ ID NO: 3561 - RNA, 62 nt, Human
agugggugaaaaugucccaucugcaccaguacacaggcaggcauuaucauucuucaccuacu

SEQ ID NO: 3562 - RNA, 124 nt, Human
agugguaaugccguguguugauagaaauauguaaucgaucuuuucuuuggugggcaauuagcaauauugaggaaaguuaaagauguauguaucccuaccacuugaaacaccuggaaaugccauu

SEQ ID NO: 3563 - RNA, 89 nt, Human
agugguuucuccgaggcagucuggggcagcugguuaagaaaucuugcaucuuccagccagaguccauggacuagucacgcuugaucacu

SEQ ID NO: 3564 - RNA, 76 nt, Human
aguguagguaggaaugagguuuccuggucggcuuaauuguucuagaugauuccucaauauucccuucccugcugcu

SEQ ID NO: 3565 - RNA, 125 nt, Human
agugucuccagauugcacgaacauuucauuuuucacacagggucaccagaauaccaucaauuuuuugguaucacugucaaaagugauccuagcaccuucugaaauaacgugagcugccagauucu

SEQ ID NO: 3566 - RNA, 123 nt, Human
agugugaagacaaaagccacuuucuaaggaugguggagcagaaaggcaggaguccugcucccuggcaccaucauggagcaugcccagcccagaucugccccccucugaauuuccuguugcauu

SEQ ID NO: 3567 - RNA, 112 nt, Human
agugugaguuacaucauagucuauuucuugcuaaggccaaaguagaggaagucgagguaaauuugcaaaugcuauuugagccaguggccauggaaauaauuaugcucacauu

SEQ ID NO: 3568 - RNA, 75 nt, Human
agugugauaucaagaaagggcuucaccaggaugaucaaugcaaauggauauggagcuuucuuggaaugaaacauu

SEQ ID NO: 3569 - RNA, 114 nt, Human
aguguuggguugacuugaauggaggugauuguuuuagaagaaggucagaagacuagauuugcuuuucucuccaauuugaaauaccucuucuauucgaggacacccaggaacauu

SEQ ID NO: 3570 - RNA, 79 nt, Human
aguuaauauagagaauacuggcuuuaacagugaacuggaauaaugagggcuucacugguaaaaugcuucugaauugacu

SEQ ID NO: 3571 - RNA, 79 nt, Human
aguuaauauagagaauucuggcuuuaacagugaacuggaauaaugagggcuucacugguaaaaugcuucugaauugacu

SEQ ID NO: 3572 - RNA, 74 nt, Human
aguuagcaguggggauggcagcaguagaaggaaucacuguuucuccuaggagucugaaggccucgcugcuuucu

SEQ ID NO: 3573 - RNA, 82 nt, Human
aguuauaugugauaucaaugaagaaauauuuguagcauguaaacgguuauuucuguuucuuaaaaaguauuguuagugggcu

SEQ ID NO: 3574 - RNA, 61 nt, Human
aguuaucucuaccagugguucucaaacuuuagacuuuuugagaaucaccugguggguugcu

SEQ ID NO: 3575 - RNA, 99 nt, Human
aguucaagaccagccugggcaacauggugaaaccccaucuauacaaaaacucggcaaggcaugguggcaugcaccuguugucccagcuacucaggggcu

SEQ ID NO: 3576 - RNA, 59 nt, Human
aguucacaguggcugaagcuguucccauaagacccugaaucuagcagccacuguguacu

SEQ ID NO: 3577 - RNA, 76 nt, Human
aguucagacauucuagacuguuccgucagacucaguuucaaaagagaaugugugggagaacagucuuuguccgacu

SEQ ID NO: 3578 - RNA, 76 nt, Human
aguucauccagccgccgcuugacaugggggcagggagcccgccaggaugcaggcgcacuuugguugggguaggacu

SEQ ID NO: 3579 - RNA, 82 nt, Human
aguucuaggguacauaugcacaacaugcagguuuguuacauauguauacaugugccauguuggugugcugcacccauuaacu

SEQ ID NO: 3580 - RNA, 74 nt, Human
aguucuucagcagacucaacuaucauggacauucaggucccgacacgagccccagaugcagucuacacagaacu

SEQ ID NO: 3581 - RNA, 77 nt, Human
aguugcugcagagggagaaggacaggcagugucguggccuggagcucauugccucagagaacuucugcagccgagcu

SEQ ID NO: 3582 - RNA, 67 nt, Human
aguugguagagauacugaugagaccuauugcauugacacgaggccucuaugauaucugcuuccgacu

SEQ ID NO: 3583 - RNA, 105 nt, Human
aguuguaagagaauuuaugugaugcugagauaugugauagaguugagaugauguaaaugaagagauuuuggaaaguagaaagcacuacauaaagauauuccaacu

SEQ ID NO: 3584 - RNA, 85 nt, Human
aguugucgagaaaggagggaccagaaaucagaugaacugaguaauucaucaugucaucuugaaggcuuuuccacucuggacaacu

SEQ ID NO: 3585 - RNA, 61 nt, Human
aguuuaguggcaaguucuuuagccuuugccuuuucgagcuuggcgauacgagccacaaacu

SEQ ID NO: 3586 - RNA, 85 nt, Human
aguuucacucuugucacccaggcuggagugcaguggugccaucuuggcucacugcaaccuccgccugccgaguucaagcgauucu

SEQ ID NO: 3587 - RNA, 62 nt, Human
aguuucccggggggcaggcgggggccagauguucucccccgcugugggcccucagggggacu

SEQ ID NO: 3588 - RNA, 107 nt, Human
aguuuggguaaugaagccacagagauuugcugauacauuugcuaggcacgacuucuggucauuuagaaagcuauuuuguggcuucaucaauaagguauuccccagcu

SEQ ID NO: 3589 - RNA, 82 nt, Human
aguuuuaggguacaugugcacaacaugcagguuuguuacauauguauacaugugccauguuggugugcugcacccauuaacu

SEQ ID NO: 3590 - RNA, 74 nt, Human
auaagaaaaucaaagacaaugacauccucagcucccucucaccccaaguaugccauugucuuuguaauucuuau

SEQ ID NO: 3591 - RNA, 101 nt, Human
auaagcugcucuaauugccaagaauucacaugugguuguaugcagcauuacugggaaauugaaguguaucugcaugugauucugcugugauggacacuugu

SEQ ID NO: 3592 - RNA, 101 nt, Human
auaagcugcucuaauugccaagaauucacaugugguuguaugcagcuuuacugggagacugaaguguaucugcaugugauucugcugugauggacacuugu

SEQ ID NO: 3593 - RNA, 79 nt, Human
auaauaguguaaaucagauauaauugagggcuauauggcaguaaaacugcuagugccaguuuucuuguuugccuguuau

SEQ ID NO: 3594 - RNA, 97 nt, Human
auaauuccuucccuuagaugcauagggagagucucuaaauuugauggaaauggacacuugaguagugacuuagccuuauguacucuguuggaauugu

SEQ ID NO: 3595 - RNA, 73 nt, Human
auaauugugucaugauuaauguguauuuacuguacuaauuagaaaauauaguuugaggcugggcacacauuau

SEQ ID NO: 3596 - RNA, 103 nt, Human
auacaaaaaauuugcagggcgugguggugcgggccuguggucucagccuccugggcugcugggacuacaggcaccugcccccacaucuggcuaauuuuuguau

SEQ ID NO: 3597 - RNA, 102 nt, Human
auacaggacuaauugucagccuagaaaaggaacuugcuccauuguuugaagaacugagacaaguuguggaaguuucuuaaucugacagugguuucagugugu

SEQ ID NO: 3598 - RNA, 91 nt, Human
auacuguuuucaguguugucacagccucuuucaaauaaucccgccuaacuugcguuaugaugaggcggcuguuggcagcaucguucagugu

SEQ ID NO: 3599 - RNA, 84 nt, Human
auagaaaaacacacuaauuaugugcgggguauauggcaugugcucuggccuuaauccaugaacaucauuauaucauuuuuuuau

SEQ ID NO: 3600 - RNA, 78 nt, Human
auagaaauauguauuuuaagcacucaugcaaagguaaaugaacacuguuuaaaugugugcuuagcuuauuuuuucugu

SEQ ID NO: 3601 - RNA, 100 nt, Human
auagacaggucucacucuguugcccaggcuggagugcaguggugugacuguagcucacuauagccaccaaguccugggcucaagcgauccuccugucuau

SEQ ID NO: 3602 - RNA, 61 nt, Human
auagagggcuuucuaugugccaggugcugguccaagccccuuuucaacauaagcucucugu

SEQ ID NO: 3603 - RNA, 73 nt, Human
auagcauugaaggacucguggauaucuaacagcaauaccugaucacuacuucgcacuaguuucucgguacuau

SEQ ID NO: 3604 - RNA, 65 nt, Human
auagguacuucucgaaauucuuaagagguuaaauguauuauggucuucauuugaggggugcuuau

SEQ ID NO: 3605 - RNA, 81 nt, Human
auaguacugaacccuuuaucaacuauguuuuuucagucuacaaccaaggcggcuacuaagugacuaaggggcagguaguau

SEQ ID NO: 3606 - RNA, 77 nt, Human
auaucaaaaggaaguuauaaggccauugagagaaaaucucagaagaagucaacaggcccaagauaccucagugauau

SEQ ID NO: 3607 - RNA, 86 nt, Human
auaucaucaaagucaugacauuggaaauauugcagcuuuucacagucauuagaaaugcuuauuuccugaaguuccuuugauuguau

SEQ ID NO: 3608 - RNA, 78 nt, Human
auaucccaaaugcugcuugcuucaaacaggcacccucggugcugccuccucugaggcuggcaguuccuuccuggauau

SEQ ID NO: 3609 - RNA, 60 nt, Human
auaugguuacauucuauagcgauuggucuugugccgagugguugggaaauguuaccauau

SEQ ID NO: 3610 - RNA, 62 nt, Human
auauuauggcuugcaaccuggagaccucugguagauuucuuuagugcaucccagccaagugu

SEQ ID NO: 3611 - RNA, 109 nt, Human
auauuugugguaguagugugaacauuaaaaagauaauguaugugaaguaccauucgaguggugaauacguuuuuaugagaaugucauacugaaaaaauauugcaaauau

SEQ ID NO: 3612 - RNA, 81 nt, Human
aucaacuuccaauaccugcugccugucucccugacccaugaaucuggcaacguuaggcacagucagacauggacaguugau

SEQ ID NO: 3613 - RNA, 69 nt, Human
aucaaucacacugggugaccuuuacucccugucaggucaguaagagucacccaguguaaacagcaugau

SEQ ID NO: 3614 - RNA, 72 nt, Human
aucacaagugggguguacucccccuugcauauugggaacaacaucacaagugggguguacugccucugugau

SEQ ID NO: 3615 - RNA, 74 nt, Human
aucacuugaacccgggagguggagguugcagugagcugagaucaugccacugcacuccagccugggcaagagau

SEQ ID NO: 3616 - RNA, 79 nt, Human
aucagaaauuuuggaaaucaaaggacagaacugggaagaacaagugaauagucugccugaaguuuucagaaaagcuggu

SEQ ID NO: 3617 - RNA, 73 nt, Human
aucauaauucuggagggaagcucuuggaggcugugagucucccuguacaguguuaccauccccgacaucugau

SEQ ID NO: 3618 - RNA, 63 nt, Human
aucauguccaccccugcagauccuuggaaaagaaaauguuuauguugcaggguauugcauggu

SEQ ID NO: 3619 - RNA, 84 nt, Human
auccaauaaaccaaauuacaaucugcugcuucuucucauuuucaaauacuauaaagauucacacuguuaaaggguuuuuugggu

SEQ ID NO: 3620 - RNA, 83 nt, Human
auccagcaagaugcaagccuucagaaucugggauguuaaccagaagaccuucuaucugaggaacaaccaacuaguugcuggau

SEQ ID NO: 3621 - RNA, 78 nt, Human
auccauggauuuugguaucuuggcaggagggugguccuggaauuagccgccaccaugcccagcuaauaccccauggau

SEQ ID NO: 3622 - RNA, 72 nt, Human
aucgugccuuagcaaacaucuucgugugagcuacuucgugagcccacauguauguguuuguugaggggcgau

SEQ ID NO: 3623 - RNA, 84 nt, Human
aucguucagcagugguuagaauacagggugacucaaguagaugggcacuccaguaaaaaugacauccucacacuguugaaggau

SEQ ID NO: 3624 - RNA, 77 nt, Human
aucuaaaagaaguuacugaggaagauuugaauaaucacuuuaagucuuugggaagcagugauuugaaauuuugaggu

SEQ ID NO: 3625 - RNA, 90 nt, Human
aucuaugaaggccaaguggaggugacuggugaugaauacaauguagaaagcauugauggucagccaggugccuucaccugcuauauggau

SEQ ID NO: 3626 - RNA, 90 nt, Human
aucuaugaaggccaaguggaggugacuggugaugaauacaauguggaaagcauugauggucagccaggugccuucaccugcuauuuggau

SEQ ID NO: 3627 - RNA, 130 nt, Human
aucucggcucauugcaagcucugccuccuggguucacgccauucuccugacucagccucccgaguagcugggaggcugaagcaggagaaucacuugaacccaggagguagagguugcagugagucgagau

SEQ ID NO: 3628 - RNA, 61 nt, Human
aucugcacuccuucaaagcuugcacgggcacugcaggacuugucccaaggaaagucuagau

SEQ ID NO: 3629 - RNA, 63 nt, Human
aucuguuggaugcuugcggcggugcugcacuccaugugccacuguugcuuggcccugacugau

SEQ ID NO: 3630 - RNA, 65 nt, Human
aucuucugguucaaagaacacaucagaugcaaggauaauaucuuguggugguagagccagaagau

SEQ ID NO: 3631 - RNA, 104 nt, Human
aucuuggccaggcuggucuuaaacuccugaccuugugauccacccgccucaccuccuaaagugcugagauuacagggcaugaggccaccaugcccggccaagau

SEQ ID NO: 3632 - RNA, 72 nt, Human
aucuuuguauguaaaacuuuaacugauuucugucauucaucaaugaguagaaguaaauacauuauaguugau

SEQ ID NO: 3633 - RNA, 79 nt, Human
augaaacaauaaaacaaaacaaaagucauuucaaacaaagcuguuguuuugaaaacucuugcuuucuuuugguguccau

SEQ ID NO: 3634 - RNA, 75 nt, Human
augaagacgaguaugaaguaaauuugaaagacuuugagccacagcccgguaauaugucucauccucggccuuggu

SEQ ID NO: 3635 - RNA, 79 nt, Human
augacagcaagacacuggcccuggaauccuccgugucacaugugggcugcugacaggaagaaugugcuuuuguuguugu

SEQ ID NO: 3636 - RNA, 82 nt, Human
augacccucacucgcgccaguggaggugacaucccuaggaaagaaacggauuugucuccagcugacgggcuggaggguucau

SEQ ID NO: 3637 - RNA, 66 nt, Human
augacugggucagcgugugccuaaccuacgccggcaggcgcggguaaaccguugaaacccauucgu

SEQ ID NO: 3638 - RNA, 84 nt, Human
augagcuauacagugugaggcauauuucauagcaacguugguugauugccaaggagacucugccaccguucuggauaagcucau

SEQ ID NO: 3639 - RNA, 83 nt, Human
augaguauugaucugucccagccugugcauugcuccgaggcaguucugaguggaugauguacagaugggauuccucagcucau

SEQ ID NO: 3640 - RNA, 72 nt, Human
augauuggagacaaaguuuauguccauuacaaaggaaaauugucaaauggaaagaaguuugauuccagucau

SEQ ID NO: 3641 - RNA, 91 nt, Human
augcaaaugucuucagguuagaaagccuuuauuuacuuuggaaaugaacaagaaaugccucugucuuagaaaccuggagauuauuugacgu

SEQ ID NO: 3642 - RNA, 98 nt, Human
augcacaucaccaccuacuugaguguugaggauucaauuaguuaauguacuucaaauaaucauguaguaaaugcucaguagugugugugugugugugu

SEQ ID NO: 3643 - RNA, 131 nt, Human
augcacgaguuuauggcuugccgguucccuuuccacaugacuccagaccaccgucacggggacgggauagacacaguggggcuaugaugcaaggacuuuagaggcggaaaagaagccguaaaucgaugcau

SEQ ID NO: 3644 - RNA, 73 nt, Human
augcacggucagccaauuuuauuuaucuuaagcaucagcugguucaauaaguccccaaucugguugccggcau

SEQ ID NO: 3645 - RNA, 71 nt, Human
augcagguccagagccaacugcaguccuguccaaucccauagguacaagggccuggcuccucuuccugugu

SEQ ID NO: 3646 - RNA, 60 nt, Human
augcauguauccuuacccccaugggaaaauguugguguguucucaaggguaugcaugugu

SEQ ID NO: 3647 - RNA, 91 nt, Human
augccuggcugggaagucuggggaagggauacagagcuuggugggccuaacaccauucauaucccuuacccucugucucuccucccuguau

SEQ ID NO: 3648 - RNA, 71 nt, Human
augcuagggugagugguaggaaguuuuuucauaggagguguaugagugggucguagcggaaucggggguau

SEQ ID NO: 3649 - RNA, 74 nt, Human
augcuguuuuaccaagacuuuauagcagauggacccagaaagaauuuucugcuauguguucacuacaacaggau

SEQ ID NO: 3650 - RNA, 110 nt, Human
auggaagcugccucugguggauaugcggaggugggccgaguucuuuuggauaaaggugcugauguuaaugccccuccaguucccuccucaagagauacagcuuuaaccau

SEQ ID NO: 3651 - RNA, 72 nt, Human
auggacaguauuagccaucauugaggcacucugucgcacucaacauagggcguguuggcugagauuguccau

SEQ ID NO: 3652 - RNA, 83 nt, Human
auggacuaagcuucauuccaguucaauaacuaaacgagggcccauaggacuugugcugaaacccauuggagucaagguuccau

SEQ ID NO: 3653 - RNA, 109 nt, Human
auggacuacauauaugacacugucccauaagauuauaauggagcauugggauaaaguaaguacuugauggcucugaggaaucugugugacuugggcauuguggauccau

SEQ ID NO: 3654 - RNA, 67 nt, Human
auggagaggaggagguggagacuuuugccuuucaggcagaaauugcccaacucaugucccucaucau

SEQ ID NO: 3655 - RNA, 104 nt, Human
auggcaccccacgggguuuccacacguuggugcguaugagcaucuuugacucuuagucgcucggcaccgcauaacaccccugugggcacgucugauugugccgu

SEQ ID NO: 3656 - RNA, 60 nt, Human
auggcagccuuucagcaugcgguuaaaaucggaacugauaugcuagaauuggacugccau

SEQ ID NO: 3657 - RNA, 101 nt, Human
auggcaugcacguguuggaaguuaguggaggcuaucuccccaguggucaaaggaggucuugcuggagaaauuauauuuuacuaacuugaagcagcagcugu

SEQ ID NO: 3658 - RNA, 71 nt, Human
auggccacugagggguugucugggucaugggaagaauccuucaugaauaagauuaauauucucauggaaau

SEQ ID NO: 3659 - RNA, 94 nt, Human
augggaacagcaagauggcaaaagcuugcugagugguacagcgccagccuggguaguggccuccccagcaaguugcaugucacuagcuuccugu

SEQ ID NO: 3660 - RNA, 62 nt, Human
augggagcuuaauuucguucagcacaccauaaaaguuguggcagaguaaagauuauuccugu

SEQ ID NO: 3661 - RNA, 78 nt, Human
auggggaugcaguggaccugccucggauagcagcacacaugucccaucugccaucucaugcuucacuaaauccaccau

SEQ ID NO: 3662 - RNA, 80 nt, Human
augggggccuccuuaaauacacaccagcagucaaguggaggaaaacuugaacaauaaugagucgcuucuugggucucuau

SEQ ID NO: 3663 - RNA, 87 nt, Human
auggguagcaugaacuaagguagauaaaggcuucacgugguguuuggcauggcguagguguagauuggaccucaguuuucugcccau

SEQ ID NO: 3664 - RNA, 65 nt, Human
auggucaccccaggccaugcuugcacucagaaguuuucucaugaggagauggccauggcgaccgu

SEQ ID NO: 3665 - RNA, 74 nt, Human
auggucguucuacugggcugauuuuggacaguggagccacucauaccacugcaauuccaguccacgauggcuau

SEQ ID NO: 3666 - RNA, 62 nt, Human
auggugacaaacaugcuggagccaagugcuaaaugccugguucaagggauggaagucaccgu

SEQ ID NO: 3667 - RNA, 62 nt, Human
auggugacaacaugcuggagccaagugcuaaauggcuugguucacggauggcaagucaccgu

SEQ ID NO: 3668 - RNA, 62 nt, Human
auggugacaacaugcuggagcccagugcuacaugccuugguucacgggauggaagucaccgu

SEQ ID NO: 3669 - RNA, 66 nt, Human
auggugacacacaugcuggagccaagugcuaacaugccuugguucaagggauggaaagucaaccgu

SEQ ID NO: 3670 - RNA, 60 nt, Human
auggugacacaugcuggagccagugcuaacaugccugguucacggauggcaagucaccgu

SEQ ID NO: 3671 - RNA, 93 nt, Human
auggugcuaaggaaauuugcuaugcucuucgagcugaggguuauugggcugacuuuauugacccaucaucugguuuggcauuuuuuggaccau

SEQ ID NO: 3672 - RNA, 90 nt, Human
augguuuaacuuuguuguuuaacuauccucagcauccuuuccaucaagaauggaggugcuuugauuaaugguuaaaacuuguuuuacuau

SEQ ID NO: 3673 - RNA, 90 nt, Human
auguacaugcucaggguugucccccaguagaagugaugggcugcuuugagccguucuuacugaugucuggucugaucccuggguggucau

SEQ ID NO: 3674 - RNA, 102 nt, Human
augucaauucuauuuacugcaggagccuaguaccuggcacagaguagguacucauaauauuuacucaggccgggugugguggcucaugccuuguuauugcau

SEQ ID NO: 3675 - RNA, 71 nt, Human
auguccuuuuuuucccuuuuaauucuucuccucagaggauagacuaauguagaggaguuaaaaauggauau

SEQ ID NO: 3676 - RNA, 80 nt, Human
auguggucaguggguugcaucuucggggagcugcugacucagaagccucuguuccccgggaagucagaaaucgaucagau

SEQ ID NO: 3677 - RNA, 91 nt, Human
auguucaagaaauccucuagcaggucuagcaucuggucaucugggaaaagaugaguacacgaugcccacccuccuuaagguucuugagcau

SEQ ID NO: 3678 - RNA, 112 nt, Human
auguuggccaggcuggucuuaaacuccugaccucgugaucugcccacuuuggccucccaaagugcugggauuacaggcaugagccaccgcacccagccaaguaauccuauau

SEQ ID NO: 3679 - RNA, 78 nt, Human
auuaagacuuuuccugggucugggcugugccuguugcugccucugagacaagucagccuaauacaggaaaagcuuaau

SEQ ID NO: 3680 - RNA, 60 nt, Human
auuaggcccuaauugccugacuuaaauuaauauugguuaaggcccacuuaggguccuggu

SEQ ID NO: 3681 - RNA, 91 nt, Human
auuauacccuuuaaacagagagaguuuauauaaaggccucuauagaggggugacaauuuuauaaacaauuuucuuuaaaacggguguuaau

SEQ ID NO: 3682 - RNA, 72 nt, Human
auuauuagagacaagaguaccaaagcgguguguguuuuuugugugugugguuuggcugucguuuguggugau

SEQ ID NO: 3683 - RNA, 93 nt, Human
auuauucugaugaaaauccacaaugucuuugagcuucugguuguguaaugcugggguuuaaagucaccauuuguggguuuggcaucaauuaau

SEQ ID NO: 3684 - RNA, 82 nt, Human
auucaaacugggcucaguggcucacaccuauaauccaacacuuuggaaagcugaggugagaggaucacuugagcccacgagu

SEQ ID NO: 3685 - RNA, 94 nt, Human
auucaaguggaugaaaaggggaagauuguggaugcuagguuuaaaacauuuggcugugguuccgcaauugccuccagcucauuagccacugaau

SEQ ID NO: 3686 - RNA, 77 nt, Human
auuccaagugcuccaaggguaacucauaaagucaaggggccaaucggcggcccaaugggcccuccaagaguuggaau

SEQ ID NO: 3687 - RNA, 75 nt, Human
auuccuauucuuuuuauaaaaauuguaaaaucucaguaugagguguuucaaggauauguauggagcagcgggaau

SEQ ID NO: 3688 - RNA, 81 nt, Human
auucucuaacuggucaucaucaauuguucuacaggcaaauacagacucugugaacagucucugaugaaaggcugggagaau

SEQ ID NO: 3689 - RNA, 75 nt, Human
auucugaaucuguugacuggagugaauucaguggucacaauaccaccaucaaauaagaaucaacuuccucagagu

SEQ ID NO: 3690 - RNA, 79 nt, Human
auucugaguuguuggugccugcccuuccccugaaucuaagaacugauuaguggguuagacugcaacagcagcucaggau

SEQ ID NO: 3691 - RNA, 87 nt, Human
auucuucaaauguucccucagugauccuuuuacucuccuugucacuuauuugggagaaauaggggcacaugagauaagaagaagaau

SEQ ID NO: 3692 - RNA, 86 nt, Human
auugcaggauggagcacugagaaagcaagauguuggcuaccagaaauggaguuucaaaaauuuucuuaaaagcucuauuggacaau

SEQ ID NO: 3693 - RNA, 60 nt, Human
auugccagacagcugcaccacagacugagucacguggaugugguuaaaguugucugcaau

SEQ ID NO: 3694 - RNA, 77 nt, Human
auugcuuucaguuucuucuuuagguucuugauuuuuuugucuaucucaggguccccagaaauugacugagagacagu

SEQ ID NO: 3695 - RNA, 68 nt, Human
auugguggccuagaaucugaucuguccuguuuaugcacaccggagggauaggaucuguaccguccagu

SEQ ID NO: 3696 - RNA, 125 nt, Human
auuguauugcagcagguuggcagccucaguaaaucuccauuuguaaaugugacagucagcagaaucuccaguuacagucaacucaaagcaagcaggggcaugccacauacauguucauauauagu

SEQ ID NO: 3697 - RNA, 99 nt, Human
auugugauuuccuucguuggagcugugagcagcagcacauuggcccuaauccugccaccuuugguugaaauucuuacauuuucgaaggaacauuauaau

SEQ ID NO: 3698 - RNA, 73 nt, Human
auugugcgaaacgcuucgccagacaugcagggccuaccuuguuaguacgggucuagaagccaguugcaucaau

SEQ ID NO: 3699 - RNA, 78 nt, Human
auuguugagauuauaauaucaauaacuuacugcaguuuugagugagcuacuuagugcaugguauuauaaaacaacgau

SEQ ID NO: 3700 - RNA, 101 nt, Human
auuguuggcuggcugauucuugcaaagagaugcauaaguaaacuagucaaguacaucuuaaccauuuugggugucauuuagucagucagucaugaaacagu

SEQ ID NO: 3701 - RNA, 77 nt, Human
auuuagggcaggccgauuuguuagaagucacugaugcuccaguaggcuuuuguuauaaucaggccuguuuccugagu

SEQ ID NO: 3702 - RNA, 63 nt, Human
auuucacagucuuggcccuucacauccugcccccugagcaguggagagccacacgugugaaau

SEQ ID NO: 3703 - RNA, 88 nt, Human
auuugagaauggaaaggacaaucuuugggaugacauagcuuaggacacuugcucauuuauuugaaagaguccgauacacagugcagau

SEQ ID NO: 3704 - RNA, 78 nt, Human
auuugcaagcugaccuacauaaacaucuguguaauaaauuuauggauacggauuuaacaauggauaaguucuguaagu

SEQ ID NO: 3705 - RNA, 98 nt, Human
auuugugucuaucuaauggguuauugagaaaaucaaauaaaauaaugcaugcaaaguacuuuuagcacagguccaauauccaugguaagaauacaaau

SEQ ID NO: 3706 - RNA, 85 nt, Human
auuuucugagcugugagccugccuuccagugacauguucuaaaaauugcaaguuauuugaggaggcuuuacagccaauaggaagu

SEQ ID NO: 3707 - RNA, 96 nt, Human
auuuugcauucuuugugugccuuaucauguguuaaguaccaugaggguacacccaggcuuagcacaaugcauuugguauacaaaaccauguaaaau

SEQ ID NO: 3708 - RNA, 73 nt, Human
caaaaccaaauuuaaguucacaaggccaugcuacuuccagagagugaaugcccuuguuuagaaugggucucug

SEQ ID NO: 3709 - RNA, 87 nt, Human
caaaacgguaaugaucagaugccaaaacgagugugaaugugcauaauuuacgaaagacauuuuugagaacugguuacaugaguuuug

SEQ ID NO: 3710 - RNA, 65 nt, Human
caaaacucccgccuuaccugcgguggcagcacugacaugcugccacgggcccggcgggauuuuug

SEQ ID NO: 3711 - RNA, 92 nt, Human
caaaaucccuugacaaaagcgcauagguuauuucaaaccaggcauuguuuuuuauguaaccuguuuuaccgcaucuucucaggcagguuuug

SEQ ID NO: 3712 - RNA, 83 nt, Human
caaacaaucuguggaugggaaaagcaccacuuguuacuuggagaugaugaugaugaugaaguuccagaucuguggagaauuug

SEQ ID NO: 3713 - RNA, 94 nt, Human
caaacacaaagcagguuugguugaggacagacacucagggaauuuuugaccaccaaaaaaguuuuggggguuuguuuuuccuguuuuuuguaug

SEQ ID NO: 3714 - RNA, 71 nt, Human
caaagacugaagaaauuucacagcaguuuauuaauguauauaaacuuauaaauauuucuccagcaaauuug

SEQ ID NO: 3715 - RNA, 79 nt, Human
caaagagguguagaaucuggguugguccuucaaggcagcucauugcagcuacuggccuccagugaaacaggucucuuug

SEQ ID NO: 3716 - RNA, 85 nt, Human
caaagaucauccugugagguaauuccaguacauuaaaaggaauugacuugaguguagugggaagccuuccucagggugcuauuug

SEQ ID NO: 3717 - RNA, 87 nt, Human
caaagccuccgcuggggcuguuucuuaacacggaguuacaaacuuuaagaacagacagcuccagacggaaauccacgccaggcuuug

SEQ ID NO: 3718 - RNA, 84 nt, Human
caaaggaaauacuguguuagaauuuucuaguaggacucuuuaaaccuuuuggggaaagcuaucagauaauucgcaguaccuuug

SEQ ID NO: 3719 - RNA, 73 nt, Human
caaaggcaggcuucuccgguggcauggugguagacuacccuaacagugccaaagcaaagaaauucuaccucug

SEQ ID NO: 3720 - RNA, 110 nt, Human
caaaguucauaauuuuucugagcuuucuaggguuuccaggcaagcuuaugaggggccaccguuacagcaacuuguugggaacaccuggauaguggaacaagaaagcuuug

SEQ ID NO: 3721 - RNA, 66 nt, Human
caaauguaguuguauuucaagguuugguccaaagaccagagaaucccuaaguaggaagacaguuug

SEQ ID NO: 3722 - RNA, 73 nt, Human
caaauugugccagcguugggcaauaaaaguuaggaacaggaacuuaucuuggugugcccuuccuguacuuuug

SEQ ID NO: 3723 - RNA, 79 nt, Human
caacaucgagagcuucuucagcgggagcugguccaucuucugggucaagauggccuccugcuggauaugcgugcuguug

SEQ ID NO: 3724 - RNA, 90 nt, Human
caaccccgagccuggcguccggccuguggcgcacccugcaagugggcuggaacaugcagcugcugcccgcgggcuuggcguccuuuguug

SEQ ID NO: 3725 - RNA, 73 nt, Human
caacuaauguuggaacuaugaaaagcucuucucuacuuuuaacaaagcuuagucacaaacaguuccccaguug

SEQ ID NO: 3726 - RNA, 82 nt, Human
caacuuuucagguggagagccauuucuucaagaccggggagaauaccugggcaaguuggugagguucugcaaaguagaguug

SEQ ID NO: 3727 - RNA, 87 nt, Human
caagacuuacccaaggaugcuuaccugaguacaacgggaucuuuagauagaaccaccacugggauagcuccugcaaguaaggacuug

SEQ ID NO: 3728 - RNA, 121 nt, Human
caagaggaguugcacccuuccagacuugcggaugaguagcuugccaaccugacccucugucaggucagccaggguacaagcauucucugccaauuuggcuucucggucuuucuccugcuug

SEQ ID NO: 3729 - RNA, 62 nt, Human
caagauucuugauacugcacucucuaagauuggagagaaaagccuguuuaccaaggagcuug

SEQ ID NO: 3730 - RNA, 74 nt, Human
caagcaaucccccuguugggguugggaacgggcaagcgcguggcaaagccccccaaagaacaagggaaaaauug

SEQ ID NO: 3731 - RNA, 88 nt, Human
caagcagugaagggugcagaucauggauagagcuuucaagaaguuuguucuaguucuucuccugaaacuggaccucccuccuagcuug

SEQ ID NO: 3732 - RNA, 75 nt, Human
caagcuaccaaugacuuucuucacagaauuggaaaaaacuacuuuaaaguucauauagaaucaaaaaagagcuug

SEQ ID NO: 3733 - RNA, 66 nt, Human
caagguagagccgagagacaagguagagccgcucgggucuaccuuguuucccaacggguuuccuug

SEQ ID NO: 3734 - RNA, 99 nt, Human
caagguugugguuuccugagcaggauggauugggcagacaaaaucagcaaugccccugcuccugagagaggccucgccaucccuguuccauaagucuug

SEQ ID NO: 3735 - RNA, 91 nt, Human
caaguaauuauaaucucucucucuggccaucauuggcgagugcaguguugagcuaaaagugacccagaggaggugaacuauaauuuacuug

SEQ ID NO: 3736 - RNA, 70 nt, Human
caaguccccuacaauugucuuacaagugucuuauguccagagaacauguaagaugagugcuagagacuug

SEQ ID NO: 3737 - RNA, 88 nt, Human
caauaauagagauacugagcauguuuucauuugcacaaaggaucauggcauuuuguuaggugagagcauguuuggauugcuacuguug

SEQ ID NO: 3738 - RNA, 78 nt, Human
caaugugcaacugacaucugcuagugaugaucugguaauauacaaccuguccaguagccgaacaguuuguuuuuauug

SEQ ID NO: 3739 - RNA, 87 nt, Human
caauguguugcuccaagcauaugcacgcagauccgcaugucccuucgcgguaaggcuguggugcuugauagggcaagaacaccauug

SEQ ID NO: 3740 - RNA, 74 nt, Human
caauuacaguccuacaaguaccuggguugccucccuccugaccuggagaacaguccccugguacacugucauug

SEQ ID NO: 3741 - RNA, 89 nt, Human
caauucugugaagaaagucaugguggcugauggggauggcauuuaaucuauacauuaccuugggcaguauggccauuuucacgauauug

SEQ ID NO: 3742 - RNA, 64 nt, Human
cacaaaaugggacugcugaagaguggacaguuggaccuuacuuuggugaccccauacguuugug

SEQ ID NO: 3743 - RNA, 67 nt, Human
cacaagacaguuagacaaccaaggauucaucaggagaaguucugggaauggucaucuaugucucgug

SEQ ID NO: 3744 - RNA, 104 nt, Human
cacaccauucuccugccucagccuccggaguagcugggacuacaggcgcccgccaccacgcccggcuauuuuguauuuuuaguagagacagggguuucaccgug

SEQ ID NO: 3745 - RNA, 85 nt, Human
cacaccucagccuuccaaguaguugggacuacaggcauauaucaucaugccuggcuaaauuaacuauuuuauuuuaagagaugug

SEQ ID NO: 3746 - RNA, 85 nt, Human
cacagaaucagaccaugacuaccuucaccuggaacaucaaccacgcccggcugauggugguggaggaaccgauguguuuacugug

SEQ ID NO: 3747 - RNA, 61 nt, Human
cacagagggcuugcugagggcagggcugcugcuccgcagagaacagacuuggcccucugug

SEQ ID NO: 3748 - RNA, 83 nt, Human
cacagcaggcuuuuacggugauugcugauugggaagaucucuuucucccuuacggcgucauucaugucaaggcccggucugug

SEQ ID NO: 3749 - RNA, 87 nt, Human
cacagccaguuucuuugaugacucaaaacguacuuugugaucuugccaagcuuugagaucaucguuacaagcagcauuuugguugug

SEQ ID NO: 3750 - RNA, 92 nt, Human
cacagcucuguuuagucucuugcucuuaauacguauagcaucuuccuucuccuguugugcuaaucuaaagaacgaaucaauucggagcugug

SEQ ID NO: 3751 - RNA, 86 nt, Human
cacaggagggauccuuggguuaaggauuguauuuaaaaacccccaaacggcguuuuaacaaugguaaccccccuagggcuccugug

SEQ ID NO: 3752 - RNA, 68 nt, Human
cacaggccccguugcccauggcugucagccgggggcuccccccgcagcagccacagcagccgcuucug

SEQ ID NO: 3753 - RNA, 64 nt, Human
cacagggauacuccauuguccccuccucuggcugucccuuggagaggcacuuuggauccuugug

SEQ ID NO: 3754 - RNA, 76 nt, Human
cacaggggacagcauaagcaaaggcacacgagggggagaacagaggugucuggguggagauggggaguccuuugug

SEQ ID NO: 3755 - RNA, 78 nt, Human
cacaggguggcuugacaaauauuaacuugguuccccagcaauaaacugagucuuccagggucaagucauugccuucug

SEQ ID NO: 3756 - RNA, 103 nt, Human
cacaggucgggggccuagagaccaccaaugcccuuggacacacagaauccccuugauuuccaggagguaguggguggcauucucugagccuuugcacauggug

SEQ ID NO: 3757 - RNA, 100 nt, Human
cacaguggggcaccugaucuagcacacauucagaggguagggaggggaagggaucuagcuauacucugggcauggagcagggaaggucguccuugcuaug

SEQ ID NO: 3758 - RNA, 81 nt, Human
cacauugauuuucaguaugacucugauggcucucacgacugccuuugaaccgccugacgagcuaugcauacugaacaagug

SEQ ID NO: 3759 - RNA, 63 nt, Human
caccaagaaguugacagccaggugaauguuauacacaagcucaucgucugucaucuucacgug

SEQ ID NO: 3760 - RNA, 68 nt, Human
caccaccgccacuucgucauccgcagaggccaggucuugcgggagaugcugaagaguauggcggggug

SEQ ID NO: 3761 - RNA, 84 nt, Human
caccaggcaggcagguuaaguuccuugaugcccuccuuuggaaagaaguggagggugagggaaaaaggacuuccauuucaggug

SEQ ID NO: 3762 - RNA, 76 nt, Human
caccaugcgggccucagguggcagagaggcccagccucacaggccuguggccccacacaccagucccagcaaggug

SEQ ID NO: 3763 - RNA, 107 nt, Human
caccccaugcuauagcgauucuucacagcaugcucagguaaccacgcaacuguguguguucgaucauguuugugaguuugugcugugaugacuuuauuaauggguug

SEQ ID NO: 3764 - RNA, 93 nt, Human
caccgaugaacucuuaagucauaucacaguuuacuuauuuacuuauggugcugacuauguggccgaugugaaauggcuagcuaguuaguggug

SEQ ID NO: 3765 - RNA, 69 nt, Human
caccgccugcugcugggacugcacagugagcuguuccuggagcugcuaaguaaccagagcgaggcggug

SEQ ID NO: 3766 - RNA, 88 nt, Human
caccucguucugcucaccuggccuggcaggcugugcuugguucacacuaccagccuggaucccacaccugccacgggugaaccaggug

SEQ ID NO: 3767 - RNA, 75 nt, Human
caccugauuuuuaagcuuugacaccugcacauuuuaaguuuccaugucuaguauuuguacaaacuaaaugaggug

SEQ ID NO: 3768 - RNA, 106 nt, Human
caccugccuauauuacauucauuuugaugguuuguaucucaaaggaguacagugaacgaaacuuguuuaaagauacaccggaaagaaaaagagaagaggcagagug

SEQ ID NO: 3769 - RNA, 76 nt, Human
caccugggagacugcugguaaagaugggagguggccuuugccgcuuuccaucuucucacugcaguuucuucacgug

SEQ ID NO: 3770 - RNA, 74 nt, Human
caccuuuuaaauauuuaauucuuauguggacuuauuuccagaaaacuuggugauaauucuugagacaaaaggug

SEQ ID NO: 3771 - RNA, 101 nt, Human
cacgaggucauuuaaaaguucauuuugagggaauaacauguaauauaauuugaaauaaagguauaguaaccuuaaaaagaacauuauaacugauuguugug

SEQ ID NO: 3772 - RNA, 105 nt, Human
cacgcgagucagaaccuaaagugcucucugggcaaccugaguggguagagugauuccgucuuucucuggcccugcuaggcccaaaggagaggugugacuaucgug

SEQ ID NO: 3773 - RNA, 77 nt, Human
cacgcgccgggcgcggcccccucccaaacugugacugguauuuauuggacccagagaaccgggccgggcacagcgug

SEQ ID NO: 3774 - RNA, 112 nt, Human
cacggauuuccuggaagaccuggauuuuucggaagcuauggauuugagggaagacaaggauuuucuggaagacauggauagucuggaagacauggcuuuguuggaagacgug

SEQ ID NO: 3775 - RNA, 71 nt, Human
cacggccauuugcucuuuuccuagacuagcuauggcugggccuggucaagcuuugggaggcugaggcugug

SEQ ID NO: 3776 - RNA, 89 nt, Human
cacuauggguuuccugugacauuuugagcaaguaugccucugugacugggguucuuacacuccagaauggaugagaagcaccguaagug

SEQ ID NO: 3777 - RNA, 70 nt, Human
cacuauguuggccaggcuggucucgaucuccugaucucagaugauccaccugccucggccucccaaagug

SEQ ID NO: 3778 - RNA, 92 nt, Human
cacucuucuccuuacccugagaugugcuguuagagaucuucgaagccauauuuucuccagauguuuugggaugaggagacacaacaacagug

SEQ ID NO: 3779 - RNA, 74 nt, Human
cacugccaccacuuggccuggcguggccacguucuuacucaucuggagccaggcaaggcaaagugaugguggug

SEQ ID NO: 3780 - RNA, 83 nt, Human
cacugcuugaauacacugagacccggaaucaguuccuugaugagcucauggagcuugagaucuucuuagcccagagagcagug

SEQ ID NO: 3781 - RNA, 79 nt, Human
cacugcuuugcacaacuccaggggaugcuguucacauacaacacaaaaugaauuguguuuccuggaguugagagcugug

SEQ ID NO: 3782 - RNA, 87 nt, Human
cacuggcagcaguucuacuuccugagcaagcguggccggaaccuucugcguaacccgugugggggaagaggacuuggaaggcuggug

SEQ ID NO: 3783 - RNA, 69 nt, Human
cacuggcuuccaagugcagcaacccagcccauggagauugccucuucuaggcaguugcucaagccagug

SEQ ID NO: 3784 - RNA, 84 nt, Human
cacuggugcuuucaucaucagaggucaaauuauuaugauaacuauuccauuaaguuugccaaacauuugucgugguuaccagug

SEQ ID NO: 3785 - RNA, 97 nt, Human
cacuguagggcaguaaggaaagaauguucuuuuucaaaaauagucugagccaauuggauguuuuuguggaauauuuuuuuaauuugcccugcaugug

SEQ ID NO: 3786 - RNA, 85 nt, Human
cacugucaucugagccucccccagcaccauagcccgccaccaucaauacuucagucgggcgugcuggacaccccucggagccgug

SEQ ID NO: 3787 - RNA, 75 nt, Human
cacugugugauuugauuccaagcuacccaugaagaaacccagacucagaggucacuugccuagggucacacagug

SEQ ID NO: 3788 - RNA, 77 nt, Human
cacuuccuaaaauaccuguaucacagaugaccuugaagaagaccauuuguccaaugaaccaagguaugccugaagug

SEQ ID NO: 3789 - RNA, 61 nt, Human
cacuucgcuggcucggaagacuggggucggaaacccugcccgggccgugccagcggagcug

SEQ ID NO: 3790 - RNA, 74 nt, Human
cacuugagcccaggaggcggagguuggagugagcugagauuguaccacugcacuccagccugggugacaaagug

SEQ ID NO: 3791 - RNA, 96 nt, Human
cacuuucaugucugccuucuuugcuggaaggugccucccuauuccacagacuuuggaucagugggugugggggaauccaaggcagaccaugaaaug

SEQ ID NO: 3792 - RNA, 87 nt, Human
cagaaacgucccacaugcccaccaggagcaagcuucaaaauguucagcuugcuuacauuaagcagaguaauuccagggauguuucug

SEQ ID NO: 3793 - RNA, 79 nt, Human
cagaaaggggcguggcaccagcaccacccaaccagaagaaaaaucucucuuuggugcuagugucauagcucccuaucug

SEQ ID NO: 3794 - RNA, 92 nt, Human
cagaaaugaacaaaacuaaugcuagcagguuaaaaucaaucaaaauguuuaaaaauugauucuguccucagcauguuauuuccucagcucug

SEQ ID NO: 3795 - RNA, 69 nt, Human
cagaaaugcuuccuggaauauuacgucagcuuggugcugacaguuuaacaagccuuaggaaguuagcug

SEQ ID NO: 3796 - RNA, 85 nt, Human
cagaacuguggagaaugaacugaacacaaagugaaagaaaaugaggagaacacuuuguauuuaccccaaaaucuuuucaguugug

SEQ ID NO: 3797 - RNA, 111 nt, Human
cagaagggguuuuuaucaaaaauauguagauucuacuacaauauuuuagcuaaagaagaagaaguaguaguagcaguaguagucaguauuuuugacccugacccaacucug

SEQ ID NO: 3798 - RNA, 72 nt, Human
cagaaguacuggccaaagcgaggaauggaggagcauucacuggcuucuccccgccuacguuccagacuccug

SEQ ID NO: 3799 - RNA, 74 nt, Human
cagaagucucccugcugaaucgaaaggaagugcuacaauauucuuucaaauucaucgcaguugagagaaaacug

SEQ ID NO: 3800 - RNA, 60 nt, Human
cagaagugauuugcuccuuaaaggggcuguuccuugcccagaaaaggugucacacuuuug

SEQ ID NO: 3801 - RNA, 67 nt, Human
cagaaugucagagcugagucugguguuacugacuaaggaacaaccugacucaggcucuagauggcug

SEQ ID NO: 3802 - RNA, 67 nt, Human
cagaauguggaucugccgaauugaagaggccugauuucagcuccaccagaugcagauuuguguuuug

SEQ ID NO: 3803 - RNA, 93 nt, Human
cagacaugagccacugugcccagccagggcuguguguuauguagugacagcucacugauacagcucucucuggggacuuaggaaccaaguuug

SEQ ID NO: 3804 - RNA, 96 nt, Human
cagacugggccaauguccacaaagaauuccuggucagcaccaccgaugucaaaaggugcaauaucaaggaagggcaaggcgugauggcuuaauuug

SEQ ID NO: 3805 - RNA, 77 nt, Human
cagacuucacagagaaugcaguugucuugacuucaggucugucuguucuguuggcaaguaaaugcaguacuguucug

SEQ ID NO: 3806 - RNA, 80 nt, Human
cagacuuccguauggcaucguuggauuucagaggcuuucugguguaucuguaaaucugaauguugccuucugccagucug

SEQ ID NO: 3807 - RNA, 66 nt, Human
cagagagggagacgcagagccagaccugacgggcugugcuuucaaaacugugcagucuccuuccug

SEQ ID NO: 3808 - RNA, 72 nt, Human
cagagaugaggcagaguggagagaaacaacucuggcugagccagagucuccagccacuacuucuuauuccug

SEQ ID NO: 3809 - RNA, 94 nt, Human
cagagcccaugcagggcuuuagauuuggacacacaagaguugauaacuuccucaugaacuccuugccugaucuaaacucauauuauggguucug

SEQ ID NO: 3810 - RNA, 78 nt, Human
cagaguauaugggggccucugccaccccccaggcugggacuggggccugugaccuugagaaccucaucucacauucug

SEQ ID NO: 3811 - RNA, 70 nt, Human
cagaguccccuuucucagaaguacagcccuuccacagagaaaugccuggcugagauucaggggaucuuug

SEQ ID NO: 3812 - RNA, 61 nt, Human
cagaguucagugcccugcuucagggcagagaccaaguuguggagucaggaacugaaagcug

SEQ ID NO: 3813 - RNA, 89 nt, Human
cagaucaaugccuggggguacagggcaggggacaguagauauguccccugauaaugcaucaccuucccuaaacaucccaacauggucug

SEQ ID NO: 3814 - RNA, 91 nt, Human
cagaucauuaaaucagauuuaaagaacuccaacaggacugggaaucuagccuccucagaccugcgaugauguuccuugcucuugagaucug

SEQ ID NO: 3815 - RNA, 76 nt, Human
cagaucccggaaugccugaaccaacuguuuugagccuacuuuggggauaacaggauuauuuggucuucuggauuug

SEQ ID NO: 3816 - RNA, 86 nt, Human
cagaugccugucucagcacagcuggguucugugcucagggucuccccaggcugaaauccaggugcuguggacugcgcucucgucug

SEQ ID NO: 3817 - RNA, 73 nt, Human
cagauggcuaaugagcaggcguuucuucauuuuucuuugcaaguuuguucuauaugcucguauggccugaaug

SEQ ID NO: 3818 - RNA, 69 nt, Human
cagauucugaaaauguccuaggagaagaugagucuucugaugaccaggacauggaagucaacgagucug

SEQ ID NO: 3819 - RNA, 90 nt, Human
cagcaaagaggaggcugaaagaggguugccacuuuuacaguugaauccaaaagcuuuuauaagaaaaaacuccuuucaucucuguagcug

SEQ ID NO: 3820 - RNA, 70 nt, Human
cagcaccgaggcgcugugccucgccaucucuaggaacuccgagcagauggccagccacagcgcagugcug

SEQ ID NO: 3821 - RNA, 76 nt, Human
cagcagcuauugcuauucaauggagacgguggccaccauuuccccugcaucgucucuccuacguaaucagucccug

SEQ ID NO: 3822 - RNA, 92 nt, Human
cagccaaagagucuacuucagaagcggaggcacugggaguccgguuugggauugccaggcugugguugugagucugagcuugugagcggcug

SEQ ID NO: 3823 - RNA, 70 nt, Human
cagccacugcccuugcccuggucagcaccauucagguuggugucgaccuugcaggcagcggcaggagcug

SEQ ID NO: 3824 - RNA, 63 nt, Human
cagcccugagugcccaguccacugaggcccuggaagggcuaagugggcggggacccaaggcug

SEQ ID NO: 3825 - RNA, 80 nt, Human
cagcccugggcugaucccagcugugugucaccagaagcuuucccggcuucucugugaggggucccaccagcccagggcug

SEQ ID NO: 3826 - RNA, 62 nt, Human
cagcccugugccuuugcuagagaaccgacaaucaaacccuuuucuguggaggaucaaggcug

SEQ ID NO: 3827 - RNA, 60 nt, Human
cagccuugugugaaaaugccuucuuccucuuuaagaaaaaggacaauuuuuaagcugcug

SEQ ID NO: 3828 - RNA, 65 nt, Human
cagcgacaguguaagccugaaucucuugcuuuucaucaucauuuuaggaucaacacuguauguug

SEQ ID NO: 3829 - RNA, 130 nt, Human
cagcgcggcucccgccacccucaauaaauguugcuuggaguggaccgaggcucugcaggaaugcagggagggccgggcuccgccccaggguuauuucuaaguugaggacaggagguugugaguucugcug

SEQ ID NO: 3830 - RNA, 84 nt, Human
cagcgcugggcaugcuggcggcagggggugcggggcuggccguggcucugcauucggcugugagugccaguugaccuggagcug

SEQ ID NO: 3831 - RNA, 99 nt, Human
cagcggggcggcggcggcggcggcggcggcuguggaggccgcaguccggguccuggcuucggccucagccccaccauggugacgcuugcugaacugcug

SEQ ID NO: 3832 - RNA, 88 nt, Human
cagcggucuucgugcuggcacccuacagcagauggagccugucaacggacaggugacgguccuggucaugugccacacgagggagcug

SEQ ID NO: 3833 - RNA, 63 nt, Human
cagcguccaaggcuuccugaaaagcagucuugcucucgaucugcuucaccaucuuggcugcug

SEQ ID NO: 3834 - RNA, 100 nt, Human
cagcuccacccaacucccaucccucuuccagcaaccacagauaaugacaauuguuugugaggugcuuggagauccccuagaugaaagguucugggugcug

SEQ ID NO: 3835 - RNA, 63 nt, Human
cagcucugaggggccucaaaccaggcccugaggaugggccgggcaggaggagcuccggagcug

SEQ ID NO: 3836 - RNA, 81 nt, Human
cagcucugucucgaucugcuccucgaggucucgaaccucccgcaugauggugccuguguccucgauggucuggaugagcug

SEQ ID NO: 3837 - RNA, 79 nt, Human
cagcucuuaucugaaaacuacaccgcuguggcccagacugugaaccugcuggccgaguggcucauucagacagguguug

SEQ ID NO: 3838 - RNA, 84 nt, Human
cagcucuucucuuuggacacaugggccuucuuagaggguucagucuaggacccggcucuccuggcccuguguugaggguagcug

SEQ ID NO: 3839 - RNA, 91 nt, Human
cagcugaaaagagagggucagggggaggcuggcugcuugcuuagguggaauccaaguuuucccguggcccugccuauacucugguggccug

SEQ ID NO: 3840 - RNA, 101 nt, Human
cagcugcucagagccagggcagugggugagggacaggaacccagggagggaccauucccauaacugccccacuaagucccugcccuccaaugacucaucug

SEQ ID NO: 3841 - RNA, 87 nt, Human
cagcuuccaaagccaggaugaagaggaggagaaaggaugggguccacaccuuguuuucuccaccaucauccaggggcucugcugcug

SEQ ID NO: 3842 - RNA, 70 nt, Human
cagcuucucuuucuuucugccuuucagaugggcuucuuucgccgaagguacaaagaaauuaucgaagcug

SEQ ID NO: 3843 - RNA, 94 nt, Human
caggaacugcgcuucgcuuccgagauccugugcacaggcaccugccaaauacacgguguaugacgcaaagggauaugugaagccccagaacuug

SEQ ID NO: 3844 - RNA, 73 nt, Human
caggaagacgggcacuggggggcuggguggggcuuagcgcagguccuccucaucgcccuggauggucuucuug

SEQ ID NO: 3845 - RNA, 85 nt, Human
caggaauguuuuuuugucucugccgugacuucuaacauagcauaugagguuaaaacacugcuuuaguaaaaauggaauacucuug

SEQ ID NO: 3846 - RNA, 88 nt, Human
caggacccagugaggcacgacgugguuuacuagaaguggccgguuuccuggcagcuuuguaaauggacucuaaccucaguggaaucug

SEQ ID NO: 3847 - RNA, 89 nt, Human
caggacuuggagucuaggggagggaugauggcaaugaaagguuucuuuucuccugucacaucuugcuccagacgucaucuugucuccug

SEQ ID NO: 3848 - RNA, 82 nt, Human
caggagaagucuaauccacagguuacaccuauguuugauaugauauaaguucucuuugcguaggccacuggguuuucuccug

SEQ ID NO: 3849 - RNA, 75 nt, Human
caggaggcagaaaguuccagaaaccaaggagccaaccuguggauuaaaggguauugugacucacauguccuccug

SEQ ID NO: 3850 - RNA, 65 nt, Human
caggagguccggcccggggcuggaggggccgaggcaccccgcaggcuccaagguccgagguccug

SEQ ID NO: 3851 - RNA, 96 nt, Human
caggaguacgacgcugugguagcuaugaucaugccacugcacuccagccugggugacagagcaagaucuagauaauuacagucuguccugcuccug

SEQ ID NO: 3852 - RNA, 79 nt, Human
caggaucgagggcgugcugugcggggccgugaagcagcugaaggucacccgcgccaagccugacagcacccucuaccug

SEQ ID NO: 3853 - RNA, 73 nt, Human
caggaugcuacacaaugggguugggaaaggcccuggggccgaggagaaggguuccaaaccggugugguaccug

SEQ ID NO: 3854 - RNA, 62 nt, Human
caggauuucacugcgcuaaccaggaugggucucgaucuccugaccucgugauugaaauucug

SEQ ID NO: 3855 - RNA, 74 nt, Human
caggcagaagaagaugcccaugauggcgcccugcauggagcgcggggccucugaguaggcaaacuccaggccug

SEQ ID NO: 3856 - RNA, 68 nt, Human
caggcaggcaguugcagucaccugggacuagcaagguuuugaugcuucagugagugacugugugucug

SEQ ID NO: 3857 - RNA, 99 nt, Human
caggccaggcaggggccacgugugggccagucagccacuacaagauuuuugcuaagcuuugggcuguuggcagcaucuuggaccucaugccugggccug

SEQ ID NO: 3858 - RNA, 61 nt, Human
caggcccugccacggccaacucaggucagccagccugaggcuguggccuccaaagggucug

SEQ ID NO: 3859 - RNA, 61 nt, Human
caggcccugccacggucaacucaggucagccagccugaggcuguggccuccaaagggucug

SEQ ID NO: 3860 - RNA, 72 nt, Human
caggccgagaagaacguggagaagaaaauggaaaauaacagaggucucaagaaccauggacuccugggucug

SEQ ID NO: 3861 - RNA, 69 nt, Human
caggcgcguaccauagcuuuccuucuugaacaagccuuccgcaucaaggaggacaucucugcuugccug

SEQ ID NO: 3862 - RNA, 62 nt, Human
caggcuggagcgcaguggcgaucauggcccacugcggccucgaccuccugggcuccagcgug

SEQ ID NO: 3863 - RNA, 71 nt, Human
caggcuguaaucugucucugcuggggugaagggacggagggagacagaugagaaaugagaacacagaccug

SEQ ID NO: 3864 - RNA, 64 nt, Human
cagggacaaccauccucucccuguguccccugccccccacacugagggaaugucuguguccuug

SEQ ID NO: 3865 - RNA, 89 nt, Human
cagggacacugagcuggcuaucucggcgcuucgggcaagaacugcaacaggcucuccugggguccugcagguguacagccgggccccug

SEQ ID NO: 3866 - RNA, 73 nt, Human
cagggaggcugcauggggccagcgcuagguggcugacucagcagcagccauggggcuggaagaagcuucccug

SEQ ID NO: 3867 - RNA, 88 nt, Human
cagggcaaacaaccaggucggccuggcccccguggcuuaagccuaagucucuucagccaccucccaggaagaucuggccucuguccug

SEQ ID NO: 3868 - RNA, 80 nt, Human
cagggcauggcagccugagaagucagagcuggaagcauccaguugccugcucuucacuugugucaggcuguuccuuccug

SEQ ID NO: 3869 - RNA, 84 nt, Human
cagggcauuccgcagggcaucugccuccuggcugccgcucagacugaggagccaggagaccccaccgcccagcguguugcccug

SEQ ID NO: 3870 - RNA, 85 nt, Human
caggggaccuggaaguuggaacaauuuugcuccugggacaccgaggggcuuacgucgaagauucgccagacuuuugggccuccug

SEQ ID NO: 3871 - RNA, 66 nt, Human
cagggggccuggccacaugagggaguccacagaaaaccuucccuccuggcccacccagguccccug

SEQ ID NO: 3872 - RNA, 74 nt, Human
cagggggucuggcugggggcugguccaugcuugugguuaguggacagcagccacccauuugacagcuaccucug

SEQ ID NO: 3873 - RNA, 74 nt, Human
caggguugcugggucagacugugcaagaccccccuuggccacuuguaaaguucggaucucaguuccagccacug

SEQ ID NO: 3874 - RNA, 79 nt, Human
cagguaugacaugugccacugugucugaaauuccugagcaccgagggccgcuucaggcaccaggcacuuugccaaccug

SEQ ID NO: 3875 - RNA, 66 nt, Human
cagguccccgcagguccgggcacuagcaccccucccagcagccccgugcggaccugcgggccccug

SEQ ID NO: 3876 - RNA, 85 nt, Human
cagguccugccuguuccccauggugcuucucacccugaaacccucagagcuacagccagggauagagcagaugagcagugagcug

SEQ ID NO: 3877 - RNA, 60 nt, Human
caggucgcgcugccgccgccacugcugccgcucaaacagcaggguggcgcgagcccccug

SEQ ID NO: 3878 - RNA, 89 nt, Human
caggugcaugucaccaugucuggcuaauuuuuguauuuuugguagagacaggguuucaccauguuggccaggcuggucuugagcuccug

SEQ ID NO: 3879 - RNA, 91 nt, Human
caggugugcauggggaggccuguuggcugcucacuggcauuugggaccuggaggcggggagcagacacaucagcacucgagugaacaccug

SEQ ID NO: 3880 - RNA, 66 nt, Human
cagguguuugugaaauuuuccauugcacaaauuauagucaguacggagaaaaucauucagcagcug

SEQ ID NO: 3881 - RNA, 92 nt, Human
cagguucagccuaugacccagguccaaaaguuccagccuucucugccaccuccagagcuagcuucagguucuggucaaagagcucacaccug

SEQ ID NO: 3882 - RNA, 71 nt, Human
cagguuuguuacacguguauacaugugccauguugguguggacagagcacauuuuuguauaaacaaaccug

SEQ ID NO: 3883 - RNA, 92 nt, Human
caguaaacauaaguuccucaggagaguuugaugugugucaggugcuuagaacagggccugauauauaaucagcccaugaugagcuauuacug

SEQ ID NO: 3884 - RNA, 68 nt, Human
caguacucaucgggaucguguggauuaugagccaucgcauuaggaaucccuacgaucucgauauacug

SEQ ID NO: 3885 - RNA, 76 nt, Human
caguagagcaguuauuaaaccuuaaaguuccaaaaugaucuccuucgacuuuaugucucacauucaugucaugcug

SEQ ID NO: 3886 - RNA, 96 nt, Human
caguaggccagcaccgugucgcgcagcgccagguucucgggcagugccuuggcccaguagcccggccgcgugaccagguccgggcaggcguacuug

SEQ ID NO: 3887 - RNA, 79 nt, Human
caguauaacuaugacccuucuggaacugcuucuccacaaaccacuacagagcaggcaauuuuggaaggucaguaugcug

SEQ ID NO: 3888 - RNA, 130 nt, Human
caguauguuccucuaagguugucauaauaagugcaucauuaccaaguauuacagcagguacugguuugcaucagggcugcugacguugucugugggcauuguuaagaaaccaaucugggaaacaaaucug

SEQ ID NO: 3889 - RNA, 80 nt, Human
caguccagggaaaacagcugaagaccaagauggugagcucugauugcuucaguuggucaucaacuauuuucccuugacug

SEQ ID NO: 3890 - RNA, 76 nt, Human
cagugaaggaagaaccuguagaagaugaccucguuccggagcuggguaucucaaaucugcuuucauccagccacug

SEQ ID NO: 3891 - RNA, 73 nt, Human
cagugauuuugugaucugcuaauggguugccacccacaaccauugcuuuagcacuuuuacuucaaaucagaug

SEQ ID NO: 3892 - RNA, 72 nt, Human
caguggccccugggcaggggcacccaggcugaacccugaggugcugccugcuugguccugccuuggccucug

SEQ ID NO: 3893 - RNA, 76 nt, Human
cagugggaaggggggccgauacacuguacgagagugaguagcaggucucacagugaaccggucucuuucccuacug

SEQ ID NO: 3894 - RNA, 72 nt, Human
cagugucccauugucaucuacucagucucuaauagggcuaaggagcaugauaguaucuauuuauaagcacug

SEQ ID NO: 3895 - RNA, 63 nt, Human
caguguggagcaggggcugggucugaggccccuccugaggcuucauccuugcucugcagccug

SEQ ID NO: 3896 - RNA, 91 nt, Human
caguguggucaguguuaccauccauacugugucaguauuaagaucacuaaagugguucuuagcaaagguuggaggugucuugagugcacug

SEQ ID NO: 3897 - RNA, 117 nt, Human
caguuagcaugccaggaauauacaguaaagaacaagguggaucuucuucacggagguuacugugugagacgaaagacaguucacuguucaucacuggaaauacuguacgugcuacug

SEQ ID NO: 3898 - RNA, 61 nt, Human
caguucggcuuccgcgaaaacgacucuugcuguccacauagccagccgugaagccaaacug

SEQ ID NO: 3899 - RNA, 68 nt, Human
caguucgugguguuggcgggccugaggaguaugaacggugccuuagcguuuguggacacuucggacug

SEQ ID NO: 3900 - RNA, 79 nt, Human
caguuugcaauuacuuucucgauuggugucaguaguuuuacugauuaggacuuuuauugugaauuacaguugaaagcug

SEQ ID NO: 3901 - RNA, 80 nt, Human
cauagcacaggagauucagagggcugggaugacuucugagcugcucucuauacccaaggcccuuucaauuucuagcugug

SEQ ID NO: 3902 - RNA, 82 nt, Human
cauagucuugcugucacccaggcuggagugcaguggcgcaaucucugcucacugcaaccucuggguucaagcaauucucaug

SEQ ID NO: 3903 - RNA, 74 nt, Human
cauauccugaacugagauaugcaaaauacucauuuucaaguuauggaaauguguuuguggcauauaggacugug

SEQ ID NO: 3904 - RNA, 60 nt, Human
cauaucgacguagaaugucugcaugccccaugguuaucaacagacuaugcgucugaagug

SEQ ID NO: 3905 - RNA, 106 nt, Human
cauaugguccaauaucaaagggaaugauagcauugaaggacucggggauaucuaacagcaauaccugaucacuacuucgcacuaguuucucgguacuacgcauaug

SEQ ID NO: 3906 - RNA, 104 nt, Human
caucaacgagaagcugugcuacguugcccugggauucgagcaggagaugggcaacgccggaucuccucuccucugggggacgacgcuacgcagcuugccggaug

SEQ ID NO: 3907 - RNA, 94 nt, Human
caucacccaaagcaguggccaacaucgcggaccccugugccuugucacagaugggugcugguccucaggcguuggggacacugcugggucgaug

SEQ ID NO: 3908 - RNA, 131 nt, Human
caucacccagugguucucucagcaacagacauguccaguggaccguaguguugugacggucgcccaucugcgcccaguaccucggaucaugcggaacauguugucaaagcugcagauugccugugacaacg

SEQ ID NO: 3909 - RNA, 63 nt, Human
caucacgccagucauuuuauuuccaucaucauccuugugaagaaauggaagucuggagaggug

SEQ ID NO: 3910 - RNA, 79 nt, Human
caucagcuauuccuguucuagaaagggcacucuggcugcaauguggaggagggagugacuggaggaagggagguaagug

SEQ ID NO: 3911 - RNA, 65 nt, Human
caucaggaccagcucugagaucccuuaaggagagcagauugagggagacaugaggugguucuaug

SEQ ID NO: 3912 - RNA, 76 nt, Human
caucaggccgaaucaggguguugaccuuggccacaucaaugucauacagcuucuucacagccuguuuaaucuggug

SEQ ID NO: 3913 - RNA, 64 nt, Human
caucauuagagcccugguagaaugacagccuuuuucagguugccagucuccucauccauguaug

SEQ ID NO: 3914 - RNA, 66 nt, Human
cauccacaccuaauguccacauggucagcaccacccugccuguggacagcaggaugauugaggaug

SEQ ID NO: 3915 - RNA, 83 nt, Human
cauccaucuucacauuaacaacuuuuuaauuaaccuucugacacugucaauaagaaguuucacuguuguuguggaaagggaug

SEQ ID NO: 3916 - RNA, 71 nt, Human
caucccaucucugaucugugacacgaggagaggagccccucacucacccgacacagcucaggguggugaug

SEQ ID NO: 3917 - RNA, 76 nt, Human
cauccgcagccaggccucccugacaacccagcaggccaucggccugaagcauuacagugacuuccuggaacguaug

SEQ ID NO: 3918 - RNA, 64 nt, Human
cauccucucaggcagagcagggugguccgggccacacugggccuaccucuccagccucaggaug

SEQ ID NO: 3919 - RNA, 62 nt, Human
caucgucaccaaggcacgggggaagaguggaccacucuucaacuuugauguucaugacgaug

SEQ ID NO: 3920 - RNA, 82 nt, Human
caucucgagacagcgguucagaaagucccggaagauagcugacagcuucucuggguucugaaguucuggggucccauuggug

SEQ ID NO: 3921 - RNA, 75 nt, Human
caucucuacagucuucacaugccccacuccagccgugugguagcacgccuugcuugugacccugggauagagaug

SEQ ID NO: 3922 - RNA, 85 nt, Human
caucucuuccuuuugaagauccgucugcuaugauuaagauccagcaauccaccccuuuggcagugauuuuggauaugaagacaug

SEQ ID NO: 3923 - RNA, 80 nt, Human
caucuggauuguuaagaccacagcaacuggcacauucgaccaaguucuuagggugaagucucaguaggccaguccaggug

SEQ ID NO: 3924 - RNA, 62 nt, Human
caucuuggucccucucuaggcugugauggaaucugaaaugaaguuugacaaggaccaugaug

SEQ ID NO: 3925 - RNA, 65 nt, Human
caucuuucacuggaauugcaaagggauagccauaugaaacagcuccuccucauccaagagagaug

SEQ ID NO: 3926 - RNA, 65 nt, Human
caucuuugcccgucuccuggggaccccccaagaaauguggaguccucgggggccgugcacugaug

SEQ ID NO: 3927 - RNA, 63 nt, Human
caucuuuggguauuugaauagcaagcgcucuuuuuugaguggcgcugcuuaaaaaccgagaug

SEQ ID NO: 3928 - RNA, 71 nt, Human
caugaacacgugugggccucggucaccuggcuuugagggcagucugaccaggcuagaccacacgugccgug

SEQ ID NO: 3929 - RNA, 73 nt, Human
caugaccacaguccaugccaucacugccacccagaagacuguggauggccccuccgggaaaacuguggccgug

SEQ ID NO: 3930 - RNA, 71 nt, Human
caugaccacaguccaugccaucacugccacccagaagacuguggauggccccuccgggaaacuguggcgug

SEQ ID NO: 3931 - RNA, 108 nt, Human
caugacuguuggcugaacucaacuggugauucuuacuuugaauggcuuaugugacugcgaucacaccaggacuggaguuaccugaagacucagcugggcagguuacug

SEQ ID NO: 3932 - RNA, 99 nt, Human
caugaugggacugguggcuuuaugaggagaggaagagcaacuggaacugggacacaugcuugcucugucuugccuuuugaugccuccugccaugucaug

SEQ ID NO: 3933 - RNA, 79 nt, Human
caugcccagggccgcgugugcccccagaggugcucuuggaggagggugccagggggaagagcgauggguccugugggug

SEQ ID NO: 3934 - RNA, 67 nt, Human
caugcgggaugcccagggacggcuggacagcacgcgugggcugcugugcggccugggcgcuggcgug

SEQ ID NO: 3935 - RNA, 85 nt, Human
caugcuucgggcauuccaugcagccuugcggaacucucccgucaacaccaagaaucaagcugugaaggagcgagcccagggcgug

SEQ ID NO: 3936 - RNA, 77 nt, Human
cauggaauaugagaaaauagcagaaacagauuuugagaagcgagauuuucggaagguuguuuucugcauggaccgug

SEQ ID NO: 3937 - RNA, 131 nt, Human
cauggaauuaaacuuucagucccacuguucauuuuauucauacauuaggguggcaaggguggucuugcucauugcaagcaaagucauccugguucaugaaaugaagaauguggacugugcaguuuucccag

SEQ ID NO: 3938 - RNA, 125 nt, Human
cauggaugacuuggggaccuuguauggacagaacuggcucaaugaccaggugaugaacauguauggagaccuggucauggacacagucccugaaaaggugcauuucuucaauaguuucuucuaug

SEQ ID NO: 3939 - RNA, 75 nt, Human
cauggcugagcauccaugggguccugggagucuugccccucagagucaacagggagccccaggguggcagacaug

SEQ ID NO: 3940 - RNA, 130 nt, Human
cauggggucgugucacugggcuccucagggaaggcaguagguuguauaguuaucuuccgaggggcaacaucacugcccugaaaccacacaaccuacuaccucaccccgccaggcccggccuugcacugcg

SEQ ID NO: 3941 - RNA, 73 nt, Human
cauggucugugagagguggcaggaauggggacccucaccccccaagcagccugugcccucuggccgcacugug

SEQ ID NO: 3942 - RNA, 80 nt, Human
cauguaauuucugcuuuguuggucaggguuuacagcauuaauggacaguucacccugacuacaagucggaacgugacaug

SEQ ID NO: 3943 - RNA, 68 nt, Human
caugucagaagcucaaagcgacucauaaugcaugugaauuugcuuuggagagacuuaucuucugagug

SEQ ID NO: 3944 - RNA, 76 nt, Human
caugucuuaucccgcugaugauuaugagucugaggcggcuuaugaccccuacgcuuaucccagcgacuaugauaug

SEQ ID NO: 3945 - RNA, 79 nt, Human
cauguguguguauauguuucuguccguaugucaucuuuaucaucagugugaaacacgacuuccucuauauacacguuug

SEQ ID NO: 3946 - RNA, 79 nt, Human
cauguugucacuuaacccccaggaguuauuuauuaucuuuuuguuaaagucaggcucauuugggguaaugugaugacug

SEQ ID NO: 3947 - RNA, 102 nt, Human
cauuacugcagcgggcaugaaaaccggcaggguguuaggcucauggccugaagagaagucacaucaccagccgauguuuucaugcaaaaggcaaucgugaug

SEQ ID NO: 3948 - RNA, 60 nt, Human
cauuagagcccuguagaaugacagcccuuuucagguuggcagucuacuaauuccuguaug

SEQ ID NO: 3949 - RNA, 100 nt, Human
cauucaccuuuucacucaacucuuacaacucugugaaguaguaacuauuauuaucccuauuuuacagagauagguaagcagggagauaaguggguggaug

SEQ ID NO: 3950 - RNA, 62 nt, Human
cauuccccugucugucugcauuugucucagaacauuuccuuggcuggacagaugggguuaug

SEQ ID NO: 3951 - RNA, 77 nt, Human
cauugcuuccuccgugugauuuccgaagcaaagcaaugggacccuacgcuucagagucuuauugggguggggcagug

SEQ ID NO: 3952 - RNA, 70 nt, Human
cauuggacgcaacaaagacgccaagauguaguuguauacaacaauguugguucuuucgucugcuacagug

SEQ ID NO: 3953 - RNA, 67 nt, Human
cauugucgucauuggacacguagauucgggcaaguccaccacuacguggccaucugaucuauaaaug

SEQ ID NO: 3954 - RNA, 92 nt, Human
cauuucauaucuaccucccaaagauauuccuguagauucagucuuacacacuuaauuugacuuggaauugucuuaaggaugcuuuugaauug

SEQ ID NO: 3955 - RNA, 78 nt, Human
cauuuccagauuuauuuccaauuucaguuucaaaacaaacugaccugaaauuuuuaguauuuacuaucugugacaaug

SEQ ID NO: 3956 - RNA, 72 nt, Human
cauuugaauugguagaccgaguaaugaagaggcagcccucccuaaugugcauggacaucauccaauucauug

SEQ ID NO: 3957 - RNA, 79 nt, Human
cauuuguuucacuguguucaauuuugaguuuccuaacauccauucuacaggucaaucaaaauacaaaggcgugcaaaug

SEQ ID NO: 3958 - RNA, 79 nt, Human
cauuuuucacucuuuaaaaucacauucaaaaaucggcaaagaaacgccccggggaaugaguagacgggaggggagggug

SEQ ID NO: 3959 - RNA, 92 nt, Human
ccaaagagcugaauguuauguuuauugaaaagugcaaaagcuggauacaauguaaagcagcucuuucgacguguagcagcagcuuugccggg

SEQ ID NO: 3960 - RNA, 94 nt, Human
ccaaagucccaacggccacgccuaacaauuauaaaaguguucagcgagaguguuggcgugagugugaaugggugugcgcuggggggcacggugg

SEQ ID NO: 3961 - RNA, 77 nt, Human
ccaaagucuggggguuagaaagaaggaagcuugacccaaacaaaguuucauuuacaguauauacagucaggccuugg

SEQ ID NO: 3962 - RNA, 103 nt, Human
ccaaauuugucagguggggauuucaccccagccuuaugacucaguuuuagauuuaacuugauucauuuaagguuggaguuuauuucuggcuggcaaaauaugg

SEQ ID NO: 3963 - RNA, 89 nt, Human
ccaacaucugccacuuaggagcccugggaacgggugaccuucauaugacgaagaggcaccuccagcagccuugagaagcaagaacaugg

SEQ ID NO: 3964 - RNA, 83 nt, Human
ccaacgucuguucauggcugugguuuuaaaagagucccucaacagaugcucuauuuaauaaccaguuuguuccucagaugugg

SEQ ID NO: 3965 - RNA, 90 nt, Human
ccaacucauuacacagcugaaucagaaccacacacuucucagaccuaaggacagaguaggucugauucaugauguguuucagcuaguugg

SEQ ID NO: 3966 - RNA, 99 nt, Human
ccaagaacuuuuuggccccguguuggaugcagugucucgggacuucgucaguguccugcacaggucgcaucaagaaggcgggcuccggaacuuacucgg

SEQ ID NO: 3967 - RNA, 79 nt, Human
ccaagaucacucaauuuaucaguaauggagcuuacuucaucagcuuccuugccugcuuuuauaaauuagguucuauugg

SEQ ID NO: 3968 - RNA, 81 nt, Human
ccaagcugguuuggaacuccuggccucaagcaaucugcccgccccagccucccaaagugcuaggagcauaagccagcaugg

SEQ ID NO: 3969 - RNA, 73 nt, Human
ccaaggagaacuucaguugcuugacucguuuggaucacaaccgagcuaaagcucaaauugcucuuaaacuugg

SEQ ID NO: 3970 - RNA, 80 nt, Human
ccaagggagugcaauuuuucaucuuccaauggcggccucaaccuugaggcgaauccacuggcgaaagaugccuuucuagg

SEQ ID NO: 3971 - RNA, 64 nt, Human
ccaagucugacccacucugcguccuuuuacaggaugugggagggggcagcugggcugagcuugg

SEQ ID NO: 3972 - RNA, 131 nt, Human
ccacaauaguuuauuuacaauugaacucuuuauaagauauuuacaagacaaccaauuuuacacaucagaaaugguaucaaaaguuaugaauuacaacacagacaacaauaugaaaugggcauaaaacaaag

SEQ ID NO: 3973 - RNA, 105 nt, Human
ccacaauggcacugggggcaaguccaucuaugggaagaaguucgaugaugaaaacuuuauccucaagcauacgggaccaggucuacuauccauggccaacucugg

SEQ ID NO: 3974 - RNA, 64 nt, Human
ccacacagcccuauggucaaacaauccuacguuugugccucugcuuuuaaaggugcugugcugg

SEQ ID NO: 3975 - RNA, 71 nt, Human
ccacaccacuaugcaaccuuucugauauuccuccuguuggcauaaagagcaaagcaguugugguuccaugg

SEQ ID NO: 3976 - RNA, 120 nt, Human
ccacaccagaggcugugaccauggcuaguagacaguggcaacauagucauccccaagaugcuaaucuucugcuggaacugucauacguuaucauggucaauguaaaccugguuugugugg

SEQ ID NO: 3977 - RNA, 69 nt, Human
ccacaguucaagaaucacugguguccgaggagaucgugcacgaccuggauaccugugaggucacggugg

SEQ ID NO: 3978 - RNA, 89 nt, Human
ccaccaagcucuggggacuggaaugcaggcaguggaagccccagauugacuuaaccuguugacagaucuucagagaaacugcugguagg

SEQ ID NO: 3979 - RNA, 101 nt, Human
ccaccaguccaggggugggaauacagggggugggaggugugcauaagagguuauaggcacaggccagcccgguacagaacccuaggcguccugacaggugg

SEQ ID NO: 3980 - RNA, 65 nt, Human
ccaccauuaagcaguucauggacaucuucucgcuaccggagaugcucugcuguccuguguggugg

SEQ ID NO: 3981 - RNA, 65 nt, Human
ccaccugccccugagggagaggaaaggugaaguauuccugccaccucucccuccaagggaagggg

SEQ ID NO: 3982 - RNA, 78 nt, Human
ccaccugggagacugcugguaaagaugggagguggccuuugccgcuuuccaucuucucacugcaguuucuucacgugg

SEQ ID NO: 3983 - RNA, 63 nt, Human
ccacgccuggcuaauuuuuguauuuuuaauaaagaugcagugucaccauauuggccaggcugg

SEQ ID NO: 3984 - RNA, 77 nt, Human
ccacgggcuugguucuuaauaaaguuauucaacuucaaauuuuugugggagacugauuaaguaacuucggccagugg

SEQ ID NO: 3985 - RNA, 74 nt, Human
ccacuauuccuaaccgggggccuggcagggguggagugaugugaacuaagggucccuggaaaaggguggagugg

SEQ ID NO: 3986 - RNA, 75 nt, Human
ccacugcuucaugagcucaaaucuguuuuuucuagcuaagagaccacaggccaaagaacuaaagggcaagcaggg

SEQ ID NO: 3987 - RNA, 90 nt, Human
ccacugucuguaagauucccagcagcugcagccucaaaauuuuuaacaaucaggaguugcucagcuucuggcucaaucugucaaccaugg

SEQ ID NO: 3988 - RNA, 79 nt, Human
ccacuuagucucaacccggaaugaaauaugacugaggacucucagagaaacuuucguucaguauauuaugagaaagugg

SEQ ID NO: 3989 - RNA, 86 nt, Human
ccacuucugaaaacauccacggugaagggcagggccaggccuggcuguggagugggccagcugaguaccugggcgucacgaagugg

SEQ ID NO: 3990 - RNA, 108 nt, Human
ccacuugcaauuauuugaggaacuccgccgccuggcgcccauuaccagcgaccccacagaagccaccgccgugggugccguggaggccuccuucaagugcugcagugg

SEQ ID NO: 3991 - RNA, 83 nt, Human
ccacuuuauuauggaugauccagcaggaaacaguuacuugcagaauguguaugcgccugaagaugauccugagaugaaggugg

SEQ ID NO: 3992 - RNA, 69 nt, Human
ccagaaaggacaucacagguaaacugaaggacccugcgaacuuucaguauccugccgagucuguucugg

SEQ ID NO: 3993 - RNA, 80 nt, Human
ccagaacgauggugugcccucgguuggguccgggcucgaguccuucaugcuguccgggguugggaccgccgcguucucgg

SEQ ID NO: 3994 - RNA, 90 nt, Human
ccagaauguuuugagcuacuucgggauacuugguaaagggggcuauggaaagguucuccaaguacgagaaguaacaggagcaaauacugg

SEQ ID NO: 3995 - RNA, 88 nt, Human
ccagaugccagucacugccuaaggcacuggguauaugguauccccaaacaagaggcauaaucccaguccuuagguagugcuagcaugg

SEQ ID NO: 3996 - RNA, 91 nt, Human
ccagauucagcccauuuggccccgacgccucuguucucggaauccgggugcugcggauugaggucccgguuccuaacggacugcaagaugg

SEQ ID NO: 3997 - RNA, 77 nt, Human
ccagcagcccgcucuggccggggccgacuggcagcuccuaguggagaccucgggcaucagcaucuaccggcugcugg

SEQ ID NO: 3998 - RNA, 73 nt, Human
ccagcaucaucgcagagauccugagugucuaccagaagugcaaggacaagcaggcugcugcuaagugagcugg

SEQ ID NO: 3999 - RNA, 73 nt, Human
ccagcaugauccugaaaucugcauccgccgugguuuguauucauugugcauaucagggauacccucaagcugg

SEQ ID NO: 4000 - RNA, 63 nt, Human
ccagcaugaugggugcggccagcagcgaguccucacacguguugugcagcaccaguguguugg

SEQ ID NO: 4001 - RNA, 75 nt, Human
ccagcauucgcccaucucaagguuggcgugggacaucgguuggaugcccaggcuucugggaguacuugugcucgg

SEQ ID NO: 4002 - RNA, 121 nt, Human
ccagccaaugaagucuguacucugguggcuuccaguggaaaaggcauuuuggaggcagccugcagguccuggcucuggcauccgagagagacuggagcacccaguguuacacgugagcugg

SEQ ID NO: 4003 - RNA, 77 nt, Human
ccagccuaguguugcuuccauuacgccaguguuggaauccagccgccacuguuagcuaccuggaaaaccugggcugg

SEQ ID NO: 4004 - RNA, 72 nt, Human
ccagcuucccuacuccuacccuggcccuuuuauacuaggacuccuuaggaggagugagacaggugauaaugg

SEQ ID NO: 4005 - RNA, 91 nt, Human
ccaggaaaaguuguucuggccccucaucugguuucaugaaggacaauaucuagcaugagagugacagggguuagaauaauggacauuuugg

SEQ ID NO: 4006 - RNA, 68 nt, Human
ccaggacagggaggcuggccggagguuccugcagagggagcgucaaggcccugugcugcugucccugg

SEQ ID NO: 4007 - RNA, 74 nt, Human
ccaggagcuacacaccuucgaggugaccggccaggaaacggucgcccagaucaaggcucauguagccucacugg

SEQ ID NO: 4008 - RNA, 97 nt, Human
ccaggccugaccugucucuugaaggaguauuuguguugaagaugggugguaacguucagcaaaagccaugcccaggagacaggcacaguacccaugg

SEQ ID NO: 4009 - RNA, 89 nt, Human
ccagggaaaguaguaaguuguauaguuaucuucuaauuggggccuaauaucccuaccccacaacaauacaacuuacuaccucacccugg

SEQ ID NO: 4010 - RNA, 116 nt, Human
ccagguaucagucuuuuugucuauuccuggauuuuggugaaaacagaaucuaaucuuauauucgcagccuuaagguuagaaggucacuuacauccaguaaucacaguaagaucugg

SEQ ID NO: 4011 - RNA, 95 nt, Human
ccagguuaaauaaggguuccaaaaauucucugguccgggauuuuaaccuucgcuggaaucugucacacguuuggaacccucaaguguccaccugg

SEQ ID NO: 4012 - RNA, 75 nt, Human
ccagguuccacuucuauagccacgugagaaaaacauggaauaggugguccacacgaaguuauaguggaaacuagg

SEQ ID NO: 4013 - RNA, 63 nt, Human
ccagucaccagccucaggacagauacaaagcugucuggcuuaucuucuucaugcugggucugg

SEQ ID NO: 4014 - RNA, 85 nt, Human
ccagucagcucaggccucuauggagcaaagaaacugguguccuucuuggagcgcugccuucaucuccuugaacugagccaacugg

SEQ ID NO: 4015 - RNA, 67 nt, Human
ccagugaauuucccagcuauucuaaagcugcuuuauaguaauucugggaggauggguuauuauaugg

SEQ ID NO: 4016 - RNA, 81 nt, Human
ccauauaugcaacuauauuucauguuguaauacaaaggauuaaacuacaaaagugaaaauuaaaagucauugcauaugugg

SEQ ID NO: 4017 - RNA, 61 nt, Human
ccauauggaugaaggacuuggguaggaaagauguuccuguugaaguuacccaaccaaaugg

SEQ ID NO: 4018 - RNA, 90 nt, Human
ccauauuggacuuuccaucugucagaaggaugauggcaugucggauuuccugccaggccaucguuuccaugccgagguagucgcauuugg

SEQ ID NO: 4019 - RNA, 75 nt, Human
ccaucagucaggucugaauaacuuucgggauucuuugggaauguuuuaagaguucaugggauagaccgcaggugg

SEQ ID NO: 4020 - RNA, 66 nt, Human
ccauccauucacuguucagcuguacugugauuuaguuuuuacaccguuaaaacccugaguggaugg

SEQ ID NO: 4021 - RNA, 95 nt, Human
ccaucucugcuuauuccucugccacgucuuucccuucuccucucugcucucauaaagaagaaugggagaugaaaguggaggggcagcugaggugg

SEQ ID NO: 4022 - RNA, 78 nt, Human
ccaucugauuuugagcacaccauccauguuggcuuugaugcuguuacuggagaauucacuggcaugccagaacagugg

SEQ ID NO: 4023 - RNA, 74 nt, Human
ccaugcaggcuacuccauguuuggggcuggcaucaccguaggccugucuaaccucuucuguggagucugcgugg

SEQ ID NO: 4024 - RNA, 74 nt, Human
ccaugcaggcuacuccauguuuggggcuggccucaccguaggccugucuaaccucuucuguggagucugcgugg

SEQ ID NO: 4025 - RNA, 83 nt, Human
ccaugccugaagcuaaaaauauauacggguuuuugaaugcagcagccaauaaauuccauuuuguguggugguuuaggcuaugg

SEQ ID NO: 4026 - RNA, 84 nt, Human
ccauggaccgccuguacuuugugauggaguacgugaaugggggcgaccucauguaucacauccagcaagucggccgguucaagg

SEQ ID NO: 4027 - RNA, 106 nt, Human
ccaugggcucauugugacaggaaaagugccugcugcugcuucuuuacacccacccuggccaacagaaguacacagugcaguucaccuucaagaaugaagcaucagg

SEQ ID NO: 4028 - RNA, 83 nt, Human
ccauuaagauauuguagagcuuauuccuuccucaaauuccagcugguuuggaggugggaugcagaggcucugugucuuagagg

SEQ ID NO: 4029 - RNA, 101 nt, Human
ccauuauuuaaucagaauuacccuugcucuguuuaucugugaggccucagacacaacggugguucagcccucucccuaagcaguagcaagcugaguaaugg

SEQ ID NO: 4030 - RNA, 82 nt, Human
ccauuccaacggagucaguugggacuacaagccacucauuguuaaacacuuagugcuuuuaaaccaacuugcggaauacagg

SEQ ID NO: 4031 - RNA, 72 nt, Human
ccauugccacguagacauugcccagagugaagugguucacagcaaaguguggugcgaucucuacugccaugg

SEQ ID NO: 4032 - RNA, 92 nt, Human
ccauuugcucaguagaaguuuaauggagaaaucguuguuuaaaacaaucagucaaaaagaacagcucuuuuacaaacaaguuauggcagugg

SEQ ID NO: 4033 - RNA, 71 nt, Human
cccaaaacuauuguuuguguuucuguguuucauauucagugauuuaauacaguaucaugggcugagguggg

SEQ ID NO: 4034 - RNA, 111 nt, Human
cccaaacuacuagaacuguccaaggccaggaggaauuggaaagaagaugguuucuugaaaucucucuuccauacuucuuuggucuuuugcagcagacaguaacuuauuggg

SEQ ID NO: 4035 - RNA, 73 nt, Human
cccaagcaagccuccaggcccugaguguucugaugccugaaggguagucauaggucccgagguggagucgggg

SEQ ID NO: 4036 - RNA, 80 nt, Human
cccaagcccuugaccuccuuuuccuuaucugaaauguugcugugauuccuguggugagaucagaugaggcagcacuuggg

SEQ ID NO: 4037 - RNA, 69 nt, Human
cccaagcugggcccgcgacucgaaggugacugggauggugaucucguuggacugcguggcuagcuuggg

SEQ ID NO: 4038 - RNA, 95 nt, Human
cccaagcuucucucuguccccuucccuccaagcucugucucuuaaguuauuuaaauuauggcuggggucggggagggguacaggggggcacuggg

SEQ ID NO: 4039 - RNA, 94 nt, Human
cccaagguuacuugguaaguaaagagagaagccagaagccuggggccuccugacggcuccugcuucucuuuuuacuaaggucuucugccauggg

SEQ ID NO: 4040 - RNA, 63 nt, Human
cccacucuuacagccucugucucuuuauuuucaaggaagaaagaggcagacugaaauagaagg

SEQ ID NO: 4041 - RNA, 73 nt, Human
cccacucuugaagaagaaggcggcuccuccgggguccaaggugguuggccgcgucuucucccucggaagcggg

SEQ ID NO: 4042 - RNA, 87 nt, Human
cccagacagugcccguuuugagaugugaccugguggccaccaaaugccuuggccucagugcaaacuaagcagggcacacugccuggg

SEQ ID NO: 4043 - RNA, 73 nt, Human
cccagacgccaugaaagcugccauggccuggagaaaaagcugaaccaggccuuuggaaucuuaaugcccuggg

SEQ ID NO: 4044 - RNA, 72 nt, Human
cccagagccaugaaagcugcauggccuggagaaaaagcugaaccaggccuuuguggaucuucaugcccuggg

SEQ ID NO: 4045 - RNA, 75 nt, Human
cccagaggagucgauuccgaagcccgucacacucgcuucaaggacgacgacggcgacgaggaggacgaaaauggg

SEQ ID NO: 4046 - RNA, 84 nt, Human
cccagcccaagauugaauucugauuaaaggaggcugaauugcagagccuccuuucaucaaauucgaguuuugaauugagcuggg

SEQ ID NO: 4047 - RNA, 70 nt, Human
cccagcuacggcgcccggcggucagcagcgcggcagcgucuaugcaggcgcugggggccuggccaccggg

SEQ ID NO: 4048 - RNA, 94 nt, Human
cccaggaacuuuuggggaaggggccggcggggucaggaaucacuuuggaggguccggcaaguuuuggaaccccccgggcccaggcccacuuggg

SEQ ID NO: 4049 - RNA, 78 nt, Human
cccaggaggagcgcagcgggauggcguggaccuuguuggugguguagcugucccagaugaugagcuucccauccuggg

SEQ ID NO: 4050 - RNA, 111 nt, Human
cccaggagucggugacuaaucugggcaacauuguuauacccuaucucuauaaaaauaauuaaaaaauuaagcaggcauuagggugcaugcccauaguuccagcuccucagg

SEQ ID NO: 4051 - RNA, 71 nt, Human
cccaggaugaguucuaccgcagcggcugggcccugaacaugaaggagcugaagcugcugcagaccaucggg

SEQ ID NO: 4052 - RNA, 76 nt, Human
cccaggcgucgaagcaaugcuccggucuuagccucccaaguagcggcgaguacaggcacagugccacgacgccggg

SEQ ID NO: 4053 - RNA, 75 nt, Human
cccagggcaugaagaucacaaugggccugguucagauuuuucuccagggccguggcagcuuucauggcaucuggg

SEQ ID NO: 4054 - RNA, 113 nt, Human
cccaggggcacauggcauggagaguaaauggcagaaucagaauguggacacaaauuuguuugggucugaauccuguguucuuuucauuauaucgagugucuggccuccuuggg

SEQ ID NO: 4055 - RNA, 88 nt, Human
cccaggugguguugcuguccuucuccaauugugagucuguugaaugggauuaucuucauagugguuuucuucauggaauaccaccggg

SEQ ID NO: 4056 - RNA, 64 nt, Human
cccaucucugugacuuccuggagacucauuucuagaugggaagggaaguuaucaagacgauggg

SEQ ID NO: 4057 - RNA, 67 nt, Human
cccaucuggccguggggguccucccccagcuaugggccgaggagcuacccccuccaggcaugauggg

SEQ ID NO: 4058 - RNA, 83 nt, Human
cccauggcauaugucuugcagcccucuuuguguggaaaguaacuuauggcacgccaaguggcguugugagauaaccugccggg

SEQ ID NO: 4059 - RNA, 70 nt, Human
cccauugcgggccugggcuagggggaccaggcacucaccgccuccucccugguacacaggcuucuguggg

SEQ ID NO: 4060 - RNA, 71 nt, Human
ccccaaaauggaggacuuugcuaccaggaccuacggcaccaguggccuggacaacagaccucuguuugggg

SEQ ID NO: 4061 - RNA, 66 nt, Human
ccccacgcucaguccuggucaaaggcgugccagaccuuucugagugcccccagggaggggcugggg

SEQ ID NO: 4062 - RNA, 64 nt, Human
ccccacgcucaguccuggucaaaggcugccagaccuuucugagugcccccaggaggggcugggg

SEQ ID NO: 4063 - RNA, 66 nt, Human
ccccacgcucaguccuggucaaaggcugccagaccuuucugagugcccccagggagggugcugggg

SEQ ID NO: 4064 - RNA, 92 nt, Human
ccccagaugcaaugcgaucacagggucguuaccaucuucuuuauuaauuggucaacauuuugugugauccagcauuugagugacacuggugg

SEQ ID NO: 4065 - RNA, 63 nt, Human
ccccagccaaagaugacagcagaacaacauaauuuacacugugauuuaucuuuuugcugaggg

SEQ ID NO: 4066 - RNA, 75 nt, Human
ccccagcccggaagccuccacuaucuccagcccagacaaacccugugguccagaggaggaaugagggugcagggg

SEQ ID NO: 4067 - RNA, 64 nt, Human
ccccaggaggcggcgggggcgcaggggcgcgcgggggcgcccgugccggagccgcccaaggagg

SEQ ID NO: 4068 - RNA, 63 nt, Human
ccccagggcugggccauggggagggaaggacuuucucccaggggaagcccccagcccuguggg

SEQ ID NO: 4069 - RNA, 61 nt, Human
ccccccaggucgcaggugucugaggccagccaaccugcagagcacucgcggcguggguggg

SEQ ID NO: 4070 - RNA, 88 nt, Human
cccccguuugagggaguccaacuugccggguuguuaaaagaaccuccaggccuuuaagcauucggcuggguuggcccuuaaagggggg

SEQ ID NO: 4071 - RNA, 110 nt, Human
ccccgagggugugacugagagccaguccccagcacccuuguccagauggggaccaggaggugggugaagauauuuggggucugagcucugugcugguugcccccgagggg

SEQ ID NO: 4072 - RNA, 75 nt, Human
ccccggacacacccuuacucuccaaaaauugauggaaccagaacaacccgagaugacgaggagaagaggccaagg

SEQ ID NO: 4073 - RNA, 71 nt, Human
ccccggacucuuaccaccccauucuaggccccugaaacccaggggagcgagggcaacgugguaaacugggg

SEQ ID NO: 4074 - RNA, 121 nt, Human
ccccgguaucauuccucgaauuucagugcgggaaccaaugcagacuggcauuaagcuguggauagcuggugccaauggucguggucagcgugaacugauuauggugacggacagacugggg

SEQ ID NO: 4075 - RNA, 106 nt, Human
ccccgucuugcuaagcaguuuaguuagacugcaggccagucucuguggugugacaccccccaguggcaaggagcugccaaaacugagcuucugggcaagacguggg

SEQ ID NO: 4076 - RNA, 80 nt, Human
ccccucagcacccugccuugucuccaggagguccgaagcucugugggaccucuugggggcaagguggggugaggccgggg

SEQ ID NO: 4077 - RNA, 95 nt, Human
ccccuccauggcgacggcggccggggccgcuaggacugaagcaccucgccggaggacgaggcugguggcgacgggcugucggcugucgugagggg

SEQ ID NO: 4078 - RNA, 75 nt, Human
ccccuguaaucucagcuacucaggagguugaggcaggagaaucucuugaaucugggaggcggagguugcaguggg

SEQ ID NO: 4079 - RNA, 61 nt, Human
ccccuguccuccugucccuugcccugggccucugcuggcugaggagggacaaggugagggg

SEQ ID NO: 4080 - RNA, 92 nt, Human
ccccuguucaaucaugucugaagcuggucacaacauuuuucugcuucuugguagaaguguggucaguuucauccccauugauuuuaucuggg

SEQ ID NO: 4081 - RNA, 62 nt, Human
cccgcggcggguuggcucgcgcuucguugucagaucugaggcgaggcuaggugagccguggg

SEQ ID NO: 4082 - RNA, 76 nt, Human
cccgcggggcccgugacuggugcugggcuucagccaugaagacccucauagccgccuacuccgggguccugcgcgg

SEQ ID NO: 4083 - RNA, 75 nt, Human
cccgcguauagcuucuggccugagcuuggccuggauuguuggacgaguucuuuaugcuuauggcuauuacacggg

SEQ ID NO: 4084 - RNA, 90 nt, Human
cccgcuugggcuguggaguggaucgaacuuccucggggucucucucuauccucuuugggaucugcucgaacccuccgaggcuggagcagg

SEQ ID NO: 4085 - RNA, 108 nt, Human
cccggaguuuauggucuggugagaagaucccugcucugagucacugccaagcucuagcuaugugacuuugaacagggaauuucugucccuaucuauaaaauaaacggg

SEQ ID NO: 4086 - RNA, 71 nt, Human
cccggcccucccugcccuccauucagggagaaaccucuccuucccgugugagaagggccagaggguccagg

SEQ ID NO: 4087 - RNA, 72 nt, Human
cccgguuuccuugggggccaccuccguugugaauaacgccacugucuccaagauggauggcucccagucggg

SEQ ID NO: 4088 - RNA, 65 nt, Human
cccuaaauaccccagcgggcuccgggggguuaccaaccccaguaaaacccgcggggugaaccggg

SEQ ID NO: 4089 - RNA, 84 nt, Human
cccuccacccuccugucugcccuggcugauuugagagaacaaaagccacacuagaucuucagacuuugggaggaaaagggaggg

SEQ ID NO: 4090 - RNA, 68 nt, Human
cccugagcgcaagagccaagccgccagcgcugcgaugugggccacgcugccgcugcucugcgccgggg

SEQ ID NO: 4091 - RNA, 77 nt, Human
cccugccaagcugcacaacucccucauuggcaccaagggccgucugauccgcuccaucauggaggagugcggcgggg

SEQ ID NO: 4092 - RNA, 81 nt, Human
cccugcccccagccgucuuucuggggcuugcgcgcaaaaucuacaagcggagaaagugaccuagagauugcaagggcgggg

SEQ ID NO: 4093 - RNA, 92 nt, Human
cccugccgcaggagagccacuuucagagaugcccugagugaucgucaccagcugcauccugcaaacuucaucuugcugucccuguggcuugg

SEQ ID NO: 4094 - RNA, 65 nt, Human
cccugccgggggguuggccgaggcccugggaaagggguugccgggggugugggccccgggcaggg

SEQ ID NO: 4095 - RNA, 67 nt, Human
cccuggaggagaucuaucucuucucccugccuauuaaggaaucagagaucauugauuucuuccuggg

SEQ ID NO: 4096 - RNA, 67 nt, Human
cccuggaggagaucuaucucuucugccugcccauuaaggaaucagagaucauugauuucuuccuggg

SEQ ID NO: 4097 - RNA, 61 nt, Human
cccugggguuggggccucaccccucuggagggccuggaggcaggagguggaaaccccaggg

SEQ ID NO: 4098 - RNA, 60 nt, Human
cccugggguuuccaccuccugccuccggccuccagagggugugaggccccaaccccaggg

SEQ ID NO: 4099 - RNA, 61 nt, Human
cccugguggccaauuggaaccggguguuguaaaaccccggauugggguggccacccuaggg

SEQ ID NO: 4100 - RNA, 84 nt, Human
cccuguacauaaaauguauuugguuuuguuggagagugucagacugauacucuccaacaaaaccaaauacauuucguauggagg

SEQ ID NO: 4101 - RNA, 89 nt, Human
cccuguccugucuucgaguauuuguuuuuaaugcugggugucgaucgagacaacaagcgcucagagcaaagcaaggaugcauuacgggg

SEQ ID NO: 4102 - RNA, 102 nt, Human
cccugucuccacuggaagugaguggugcagcaucucuuuggcagguggggggcaucaguaccuggccagagggguccucgucgcugagcuccuggaucaggg

SEQ ID NO: 4103 - RNA, 85 nt, Human
cccuucgagaugugcccuucucagcccuguacugguucaacuaugagcuggugaagagcuggcucaaugggcucaggccgaaggg

SEQ ID NO: 4104 - RNA, 80 nt, Human
cccuuucaaaacaaagcuuucccaggauagcccugggcagaacuccugggauugacugggcaguaauguaguugagaggg

SEQ ID NO: 4105 - RNA, 67 nt, Human
ccgaaagcugagugccgccggggucccuugggggggccucugguuuaggcgcccgaaaggcuuuggg

SEQ ID NO: 4106 - RNA, 101 nt, Human
ccgaggcuacgugaaggaacacuuugccuggagacauuucuacugguaccuuaccaaugaggguauccaguaucuccgugauuaccuucaucugcccccgg

SEQ ID NO: 4107 - RNA, 65 nt, Human
ccgaggguaccucgccggggccgccgcuccaccuggcgauggccucgguggacucgcuccucugg

SEQ ID NO: 4108 - RNA, 87 nt, Human
ccgagguccgucgcaagguugcccagguccgggccgccguggaggguggugaggcgccggggcccacugagugaggacggagcuggg

SEQ ID NO: 4109 - RNA, 131 nt, Human
ccgaggucgugccacugcaguccaccuggccaacacagcaggccucucucuaaaauaauaauuauuauuauuguuauucuugacaggccaguguagaacagguggggcaucugugguaugacagaacuggg

SEQ ID NO: 4110 - RNA, 68 nt, Human
ccgaugaucaagcugaugaacgccuacugcgagaggcagggcuugucaaugaugcagaucauauucgg

SEQ ID NO: 4111 - RNA, 62 nt, Human
ccgaugggguuuacuggaagcaucucuuucaaagguugcauccaagucaccuuccccaaugg

SEQ ID NO: 4112 - RNA, 85 nt, Human
ccgauucacugcuagucccagaagguguccagccgagacucuuucgggaggaggcucuucgugcugguacugguguugugaucgg

SEQ ID NO: 4113 - RNA, 96 nt, Human
ccgcagggagaagagcugugugcugugaugugguuuauaaauuaccauuuggaaggagcugcacagcacagcagccugcaacuacucuuccugagg

SEQ ID NO: 4114 - RNA, 95 nt, Human
ccgcaucuucuugucuuccuuuucaucagaugccacaucucuuuacuauagaccuuaaaggagaugucuaccaguuggaaagggggaguaugugg

SEQ ID NO: 4115 - RNA, 65 nt, Human
ccgcccagucccggggaccgucccuaccgcgagggucugaggcgcggcugccccggggagggugg

SEQ ID NO: 4116 - RNA, 81 nt, Human
ccgccucaaugauguuugcaaaggagcugaagcuggugucccgggcgcccagcgaaugaaccgauggucgacaugaagugg

SEQ ID NO: 4117 - RNA, 87 nt, Human
ccgcgauguggaucauguccuuaucaauguagaagucaaccucugaggcugacugaaauucaccauccagggcugagauaccgcugg

SEQ ID NO: 4118 - RNA, 62 nt, Human
ccgcuccagacuuuagucacuagguucuaggagugagcuggggccugcugaggugggggugg

SEQ ID NO: 4119 - RNA, 74 nt, Human
ccggacaagccuaucacccaguauccacaugcgguggggaagaacacccuccucauugcugggcuccaggccgg

SEQ ID NO: 4120 - RNA, 83 nt, Human
ccggacucuccgucaugggcgugugcuugugauuccaggacuggcuacugcguacauccacagguucacuaacgggggcaagg

SEQ ID NO: 4121 - RNA, 91 nt, Human
ccggccucugagcaagacagugcgcuucaacgugcucaaggucaccaaggcugccggcaccaagaagcaguuccagaaguucugaggcugg

SEQ ID NO: 4122 - RNA, 74 nt, Human
ccgggaggccccgaggaggcggcuccucuucaagagugggagggggcaggccuggaguguugggggcagccugg

SEQ ID NO: 4123 - RNA, 85 nt, Human
ccgggcgagcugcugcugcgucugcugcggaugaucaucuugccgcugguggugugcagcuugaucggcggcgccgccagccugg

SEQ ID NO: 4124 - RNA, 67 nt, Human
ccggggagggaugcgccggcacccgcggcgagucagcccagcggcugcgggaaacacaacucgccgg

SEQ ID NO: 4125 - RNA, 76 nt, Human
ccggggcggccucgcgggugacuccgggcuccguggcugucccggaccccaccucuucccugccgcccgccaccgg

SEQ ID NO: 4126 - RNA, 63 nt, Human
ccggguccccuucagcaaggagggcggcccacugcucugcuggugcuggaaggaggaccccgg

SEQ ID NO: 4127 - RNA, 72 nt, Human
ccgggugcgauggugcaugccuguaaucccagcuacucgggaggcugaggcaggagaaucgcuugaaccugg

SEQ ID NO: 4128 - RNA, 79 nt, Human
ccgggugcggcuccaccccuuccacgucauccgcaucaacaagauguuguccugugcuggggcugacaggugagcuugg

SEQ ID NO: 4129 - RNA, 102 nt, Human
ccgguagguuuagaaugaggucugugucacugugguauuacgauauuuugacugguuauuauaaccacagugucacagaguccaucaaaaacccaugccugg

SEQ ID NO: 4130 - RNA, 63 nt, Human
ccgguugaccuccagugucaugcagccgcgguagaacgcggugacuggcgcugaagucaccgg

SEQ ID NO: 4131 - RNA, 65 nt, Human
ccgguugccaauguaugcuuguacuccaggcuccuuggaguuauacagguaugaaauggccaugg

SEQ ID NO: 4132 - RNA, 82 nt, Human
ccguaagcaugugacuggccauuugugccgaguucuuauuuuuacggagggcuuguggccuuagacgccaguuugcuuaugg

SEQ ID NO: 4133 - RNA, 78 nt, Human
ccguaugaaugcagcgaaugugggaaagccuuuagguuugaagucuccauucguuguacaccagagaacucauacagg

SEQ ID NO: 4134 - RNA, 72 nt, Human
ccgugcgcguugcugcggccgugguccgcgcccuuccucggcgggccggacuggucuccagaaaugcugugg

SEQ ID NO: 4135 - RNA, 72 nt, Human
ccgugcgcguugcugcggccgugguccgcgcccuuccucggcgggccggacuggucuccagaaaugcuuugg

SEQ ID NO: 4136 - RNA, 73 nt, Human
ccguggaagacccugggccccucaccgcaggcagcaguuugcguuuugaaagguuauugggucccuuccucgg

SEQ ID NO: 4137 - RNA, 95 nt, Human
ccguggcccguguucucuccuuuuguccccauagugugacuccgccaggaacuuggaauggcugaagacugugaaugagagucaugggucugugg

SEQ ID NO: 4138 - RNA, 76 nt, Human
ccguucauguaacacgggccugaggucagcaguagaggaccaguauugguuuuggccccagccucugcguggaugg

SEQ ID NO: 4139 - RNA, 77 nt, Human
ccuaaaaaaucuuugcccaaaccaauguccuguagcauuucuucaguguuuuguucuagcagauucauaguuuuagg

SEQ ID NO: 4140 - RNA, 78 nt, Human
ccuaaaacauaagugaagaucaggcuacagugcuuuucucaugacauggagccuuguuguuuguucacucauucuagg

SEQ ID NO: 4141 - RNA, 84 nt, Human
ccuaaacagaugaaaaaauaggaggugggcuggauguggcccauggcuacagguuuccuggccccucacucauuucacuggugg

SEQ ID NO: 4142 - RNA, 80 nt, Human
ccuacaaggaggccuuucggaaggacaugauccgcuggggagaggagaaacgccaggcugacccaggcuucuuuugcagg

SEQ ID NO: 4143 - RNA, 74 nt, Human
ccuacagcacaaucccccgcucagcuggcugguagggcccuucgccuugcccgcuggcgggcaguagcuguagg

SEQ ID NO: 4144 - RNA, 112 nt, Human
ccuacauguguuacacucaguguguaaauaacugugaagaggcaauugucagauagcaaauugggcaccugcuguguacgguauauugcacuggggcugacggguguguagg

SEQ ID NO: 4145 - RNA, 79 nt, Human
ccuaccaugacuguucucaaaguuugaaguugagcauaccgaugcgccacuccugcuucaaugcuugagaagucguagg

SEQ ID NO: 4146 - RNA, 72 nt, Human
ccuaccuauguaaucuuguuuccucacaccugagcuaugugcuaugugugaagggagagaaggguggguggg

SEQ ID NO: 4147 - RNA, 108 nt, Human
ccuacucuccauuaugauuacuuuuucucuauuucucuguccaucuacuaggaaaauggguguugcuaggaaaugggaaaaggggauccacaguaaggucgggauagg

SEQ ID NO: 4148 - RNA, 74 nt, Human
ccuacuucagagugucccugagccaugacugcuugacuccacagauggcuucaggaagacagcacagaagaggg

SEQ ID NO: 4149 - RNA, 76 nt, Human
ccuagaccccgcguuguccgauguucaugaguuccgcagaagggguuuauucccacacggcacccgcgccucuugg

SEQ ID NO: 4150 - RNA, 68 nt, Human
ccuagaggccuuucucucugcacgaaaaacagguaguuugcagucugagauaugggagagcuuuuagg

SEQ ID NO: 4151 - RNA, 98 nt, Human
ccuagagucuggccucugauucacaaucuucccagccuacgguguuagaggugggguggucaagaagugaagacagaugguccuugacuuacaauagg

SEQ ID NO: 4152 - RNA, 105 nt, Human
ccuaggcaucuaaacuuauuccacauuuccugggggccuuaggacagaguuuagauuucacuucaagaacccucaggaggcuggggcgguuuggaucaccuuagg

SEQ ID NO: 4153 - RNA, 77 nt, Human
ccuaggccuggagccccuggcacccagcucagcucccacccugggcccugggugcugcuggcuuuauuuggcuuagg

SEQ ID NO: 4154 - RNA, 87 nt, Human
ccuauaaauacuuacuucaguuaccagguaaaccaagugagaaccaaauuuucacaggcauuuacucauggcugaaaguuccagagg

SEQ ID NO: 4155 - RNA, 71 nt, Human
ccuaugcgauagugauucaaaucaacauccucugcaucucuguccagguugaugguuuccauguccacagg

SEQ ID NO: 4156 - RNA, 112 nt, Human
ccuauuauauaggguuauaccuuuuuucuuaugccucagcucuguaccugacaauuuaugauucaguggagccaagcuagaaggaacaaaggucaucuaacacugugauggg

SEQ ID NO: 4157 - RNA, 113 nt, Human
ccucaacccuggcauguggggcccagcaguguaccugugcuauaaggugggccuggcgaaggccaacacgcugguguacgaggcagagcugcugggccgcuacccggaggagg

SEQ ID NO: 4158 - RNA, 75 nt, Human
ccucaacugcuguucuagacugugggggugcauuccugucucagcaccaaggaucccaacaggcaggcagggagg

SEQ ID NO: 4159 - RNA, 108 nt, Human
ccucagcagacaucagaaaauucaugcucggaagaaugccuacaggaaugaaaacuuaauaauugugggaaauacuugagcaaaauaucugguuucaugguauguagg

SEQ ID NO: 4160 - RNA, 95 nt, Human
ccuccaaggcccagggagugcuauugcgucaugaagagcauugucaggacuuccuggcaggccauucacgggcuauggagccccugccucggugg

SEQ ID NO: 4161 - RNA, 70 nt, Human
ccuccacuuuuuuuaaucggaacaccuccauuugauuacauaugggguaugggauugaugagggcauggg

SEQ ID NO: 4162 - RNA, 96 nt, Human
ccucccauguacacaggacacgaguacacagucaggucggcuggggcuggcaagucacuuggugcccggggccugugugcugaugcugacgggagg

SEQ ID NO: 4163 - RNA, 66 nt, Human
ccuccccgggggguguggcuaagggacgaggcaguucucguccagagcccagguaauccgggcggg

SEQ ID NO: 4164 - RNA, 96 nt, Human
ccuccccucaccccugaggaccaaauagggguggcagagccaaacccucgcugggcgucugugaccaaagccuaagaagccagggguggggccggg

SEQ ID NO: 4165 - RNA, 92 nt, Human
ccucccucccuuggugccagccucugaggucuucuuccucaagugcaaagaguggucugagagugguggagccugguuccaaggaagggggg

SEQ ID NO: 4166 - RNA, 77 nt, Human
ccuccggccucgguagaaccgccagcccgcguccgaaggcggaggcgaggggaacuggccgcgugaggggccugagg

SEQ ID NO: 4167 - RNA, 67 nt, Human
ccuccucccgucacuccacgcagcuggcagagagcacagugaucaccagcgugagugguggaggagg

SEQ ID NO: 4168 - RNA, 110 nt, Human
ccuccugcgcagccuucagguucuccuucuucccgccccaggccuucagggcaaaggccugcagggcucggccguaggagaaggucagggcccagggcuucagcaggggg

SEQ ID NO: 4169 - RNA, 60 nt, Human
ccuccuggcccuuuggggugguacccccaauguaaugcuaaucccuaagggaaaaggagg

SEQ ID NO: 4170 - RNA, 80 nt, Human
ccuccuucugcuugcacaaguuuccugggcuggaccguuucaacagagaggcuuauuugacuuuaugcuagaagaugagg

SEQ ID NO: 4171 - RNA, 98 nt, Human
ccucggccgacuuucccaggcagugcaggcuagcccaguccaggagugugcagccuggcuugggucgagcucugucacaucuggauaagcaacugggg

SEQ ID NO: 4172 - RNA, 66 nt, Human
ccucggcggcccggcuggugaaucacacacucuauguucaccugcagccgggcaugagccuggagg

SEQ ID NO: 4173 - RNA, 71 nt, Human
ccucgggacacaugguuaucucagugauaccuugaagaagcugaagauaacagcuguggacaagacugagg

SEQ ID NO: 4174 - RNA, 97 nt, Human
ccucuagagggauaugaagcaccgccaggguccuuugaguuuuaagcuguggcucguaguguucuggcgggcaguuauguugauuuaacuguugagg

SEQ ID NO: 4175 - RNA, 98 nt, Human
ccucuccuacauugagcacaucuuugagaucucccgccguccugaccuacucacuauggugguugacuacagaacccgugugcugaagaucucugagg

SEQ ID NO: 4176 - RNA, 117 nt, Human
ccucucucugugugggaccaggacaguggcuuaagucuccacuccaggaaagaaucaaaguuucuagaguugugagaaaaccagagaguggcuguccugauucuucacugugagggg

SEQ ID NO: 4177 - RNA, 71 nt, Human
ccucugccacuacugcugccacaugggaacugugaaggaggcacccuggcaagcagcagugaugggggagg

SEQ ID NO: 4178 - RNA, 87 nt, Human
ccucuggcccuuccugggcaucguggcugaggugcuggugcugggucaccaucaucuucaucuacgagaagcgccggaagcccgagg

SEQ ID NO: 4179 - RNA, 84 nt, Human
ccucuggcccuuccugggcaucguggcugaggugcuggugcuggucaccaucaucuucaucuacgagaagcgccggagccgagg

SEQ ID NO: 4180 - RNA, 84 nt, Human
ccucuggccuucugggcaucguggcugaggugcuggugcugggucaccaucaucuucaucuacgagaagcgccggaagccgagg

SEQ ID NO: 4181 - RNA, 89 nt, Human
ccucuucccugggaggcguucacucccgccgggccgaggaccaggucgccgaucccagcggcuagggugagcgcgcccucggggagggg

SEQ ID NO: 4182 - RNA, 74 nt, Human
ccucuuccgugaggcgcgcugagacccggaccggcccuccugagaggaugccggugcgggcgcccgcggagagg

SEQ ID NO: 4183 - RNA, 90 nt, Human
ccucuuccuccucuuccuccucuuccucauccacuccagcuccccccuccuccuggaugggagggguccccucggagggaggagcagagg

SEQ ID NO: 4184 - RNA, 78 nt, Human
ccugaaagaccgaccauucuucccugggcuggugaaguacaugaacucagggccgguuguggccauggucugggaggg

SEQ ID NO: 4185 - RNA, 88 nt, Human
ccugaaauuuuccacuugcugcuucuuggugugaggcgagaaaugccaccacguggcacugcaggaguagacugguggaagccacagg

SEQ ID NO: 4186 - RNA, 66 nt, Human
acgaggcgggugaaggcuguggguguccuggcgucccugggccaccugucagccccucguccuggu

SEQ ID NO: 4187 - RNA, 70 nt, Human
acggaggggaggagacucaguuccucuucaucccuuuacuuccugauaaacuugucucacuuuacucugu

SEQ ID NO: 4188 - RNA, 61 nt, Human
acggaucccaggagcccacacaugacauccugcagaugcucagugaccuccaggagucugu

SEQ ID NO: 4189 - RNA, 77 nt, Human
acggccgaggggguagcuuuaacugugacgggugucgcccaggugaagaucaugacggagaaggaacuccuggccgu

SEQ ID NO: 4190 - RNA, 131 nt, Human
acgugcacaagagugugacgacuuagggaguggaguggcacagaccuaugggcuuggcuugccaaguggggaccaugacggugucacuucuaucuguggccucccgaacuggcaugcgugaaccaacaugu

SEQ ID NO: 4191 - RNA, 75 nt, Human
acgugcuaugauggguugaaaagagguuggucugaaauugacgagccucccauuucagaggcucaggaaguuugu

SEQ ID NO: 4192 - RNA, 61 nt, Human
acguggccuggggggagcugugacuaccuggugguggacacugcccccgugggaccuccgu

SEQ ID NO: 4193 - RNA, 130 nt, Human
acuaaaaucaacacaauaauugaaauauuuucaagcugauuacaccgcagcccgaggcuagccugguugcuaagggugagcuccgcgguugcuagggggaguaaaucaucuugcauuauuugauuuuugu

SEQ ID NO: 4194 - RNA, 76 nt, Human
acuagauugugagcuucuggaagacaaggcuaugucuuugauuguugucuccccuaccacagcccaguacuuuagu

SEQ ID NO: 4195 - RNA, 67 nt, Human
acuauugagaccgcaacugcuugcacugaucauuuugguucgugagcaguuggugaguuuagauggu

SEQ ID NO: 4196 - RNA, 76 nt, Human
acucagauggcgacaugguggucagcugcucagccaucagcagccugcccgacaucgucuucaccaucaauggagu

SEQ ID NO: 4197 - RNA, 92 nt, Human
acuccaaggaucuggggguuaccaagaaugguguuaaauggucagguaaaauauacuuucuugacgccaagguagcuuaaaggcuggugggu

SEQ ID NO: 4198 - RNA, 75 nt, Human
acuccugccucugggaucucuccagauauggucgcugcucaauggagagcuaccgggagaaccuggagcgggugu

SEQ ID NO: 4199 - RNA, 113 nt, Human
acucuaucugaucuccuaagcgaagcauguggcuauccauuauagagauguuucccagccucucugcagcuaggaguggccauuugacuauguucuggucaaaacauaugagu

SEQ ID NO: 4200 - RNA, 83 nt, Human
acucugaagaugaucagacagggcaagcgaaauuggucauucucgcuaacacugcccagcuuugaggagaucugaaauagagu

SEQ ID NO: 4201 - RNA, 60 nt, Human
acucugugcuauauuacuugaggggcuaagaaaaauguauggucagugaaacacaguagu

SEQ ID NO: 4202 - RNA, 91 nt, Human
acucuuaaaccuuuagaaaugcuacagcaucuagcuucucuagaucaauaaucacagaggcuuaagugcugaccucauaaagauaaagagu

SEQ ID NO: 4203 - RNA, 78 nt, Human
acucuuccgcgccucgaggaacccgaucagcuguugccaacauugcccuggcugaaggccuuacucgaguggaggagu

SEQ ID NO: 4204 - RNA, 63 nt, Human
acucuugaguuugguguucaggcaucauuauuaaaaaguggaguccuauguaccagacugagu

SEQ ID NO: 4205 - RNA, 77 nt, Human
acucuugguucucuauucaaaguguuuggaaucuuuauucuguuuaaaacacugaugacauuugccaauuuuugagu

SEQ ID NO: 4206 - RNA, 73 nt, Human
acugaggccugugaaucuaagaggguugagcaugaaggacaugcgcagccuuaaaagggggcacaggccaggu

SEQ ID NO: 4207 - RNA, 78 nt, Human
acugcucucaccagguuccccaccacccugaaauagcuggcuugaaagaaugguggaauggccuugggaagauucagu

SEQ ID NO: 4208 - RNA, 92 nt, Human
acuggaaaucacugccauuuccaggagaucaccuauccuaguuuugaggaauagucauugagguggguuuccuuaauggcaucucuucuagu

SEQ ID NO: 4209 - RNA, 83 nt, Human
acuggaacaacguuugacgguguuggggggugcuguacauuggcugauaacacuuagcaaacacugaucuuacugugugaagu

SEQ ID NO: 4210 - RNA, 94 nt, Human
acuggcgcugcaaggcugugggcaaggucaucccuugagcugaacgggaagcucacuggcauggccuuccgugucccacugccaacgugucagu

SEQ ID NO: 4211 - RNA, 69 nt, Human
acuggugacacaugcuggagccaagugcuaacauugccuugguuccacgggcaugugacagucacccgu

SEQ ID NO: 4212 - RNA, 116 nt, Human
acugguuaacuucuugagcuauuucguggaacuuggaacacagccugccacccagugaaguguccagaccauugucuuccaaccccagcuggccucuagaacacccacuggccagu

SEQ ID NO: 4213 - RNA, 70 nt, Human
acuucaguggagaacaggaugcucugucucuugcuguccggggcaaggauggacuccauuugccugaagu

SEQ ID NO: 4214 - RNA, 79 nt, Human
acuuccauguucugggugauggaaacugccaaaccuccugucagugaggacucuuuccgacugcccagaaagugggggu

SEQ ID NO: 4215 - RNA, 71 nt, Human
acuucccaaaaaauucaccuuugggcuuaaaauaaaaccagaaagcccaaaaggagaauucuuuggaaagu

SEQ ID NO: 4216 - RNA, 73 nt, Human
acuuccuguccuuacucccucuuuaagauugcguacccacugcagagugcugaagacgggguagccacgaggu

SEQ ID NO: 4217 - RNA, 78 nt, Human
acuucgcucccacucccgcacagccugacaggguacacagaguggguucaacauggcugugagggaguccuagcaggu

SEQ ID NO: 4218 - RNA, 74 nt, Human
acuuggaaauaaauaugaauugguagguuaccuauuaaacaaguguguuagaguagccuagcaguuuucaaagu

SEQ ID NO: 4219 - RNA, 81 nt, Human
acuuguauuugcugagccagugguauuaacucaugcauaaaacaaauuucgguuugcuauuucuucuagcaaauuucaagu

SEQ ID NO: 4220 - RNA, 105 nt, Human
acuugugcugauauuuuaaggaugugcucaagaguaugaagcagggugcuuuugucccuuucucuccucccuaguaauucccuccucccuaucccauagccaagu

SEQ ID NO: 4221 - RNA, 99 nt, Human
acuuuaagaacucgaauauaggucuuuuaaauuaaccagucagacaaaguaacaaguaggacugaaacgaacaaggcuugagaauccgguugguaaagu

SEQ ID NO: 4222 - RNA, 79 nt, Human
acuuugcuuccuagcugaugucaucccacauugguacagguguuauucaguacugggugguucagcagggaagccaggu

SEQ ID NO: 4223 - RNA, 84 nt, Human
agaaaagcuagauuuuucguauacuuugaaauaaugugucacaacagauuguaugcagaaauagauaugaaaauccugcugucu

SEQ ID NO: 4224 - RNA, 65 nt, Human
agaaauaaccuguggggcuguguugauaaaaagcucuuuuuuuccccacagcgcaggugguuucu

SEQ ID NO: 4225 - RNA, 63 nt, Human
agaaauuccuucacaaaauuugggguaaaaacccuuacaaggcaauuuugugggcgaguuucu

SEQ ID NO: 4226 - RNA, 94 nt, Human
agaacaagggcuaaauucaaaucaaauuuucccuguacccuaagaaaaauaauuaggccgggagauguuugacuaagugaguaggcauuguucu

SEQ ID NO: 4227 - RNA, 61 nt, Human
agaaccuuccccuugcuuagccaacucuauuuccccuccuugaggaagacgggaggauucu

SEQ ID NO: 4228 - RNA, 70 nt, Human
agaacuggaugggaauuuccacucuucacccucuaccuaggugacuuugagcaaguuauuuauccuuucu

SEQ ID NO: 4229 - RNA, 67 nt, Human
agaaggugcugacuuccuuggggagaugccauuaaagcaccugggaugaucucaaggggcaccuuuu

SEQ ID NO: 4230 - RNA, 73 nt, Human
agaagugaucguuccagcauucuuggccuaggcuuauugccagcgcaaauauaagaugacugaaugaaacucu

SEQ ID NO: 4231 - RNA, 84 nt, Human
agaaucgcuugaacccaggaggcggagguugcagugagccaggaucacgccacuguacuccacccugggcgacagagcgagacu

SEQ ID NO: 4232 - RNA, 63 nt, Human
agacacgccugccccaugacaagaccaagugcuucaaguucaucuaggggcagcgcacggucu

SEQ ID NO: 4233 - RNA, 75 nt, Human
agacagaagcugagcuagcaaccccagaaggcaucuaugagaggccuguggacuaccugccugagagggauguuu

SEQ ID NO: 4234 - RNA, 97 nt, Human
agacaggagaguugcuugaauccaggaaguggagauugcaguaagcaaagaucgugccacugcacuccagccugggugacacagcaagacuccaucu

SEQ ID NO: 4235 - RNA, 72 nt, Human
agacagggggcacaugccaaacaccacagggcaucagaugcugcucugugugcucacaaguguucccugucu

SEQ ID NO: 4236 - RNA, 113 nt, Human
agacagugcugggucaaacagccuuuauuuuagcaguugugagacccuagagaacuccuuugguguuuuggggucuccccagcaugcacaauggggguuaugcuagcaucucu

SEQ ID NO: 4237 - RNA, 75 nt, Human
agaccuuccucuggaaccucaguuaaauucacuuaaucuaagugggucuaggugcugggggcccuuaucuugucu

SEQ ID NO: 4238 - RNA, 64 nt, Human
agacgcucuuugugcuagggugaugucaauuggacagauucucccuuucuucacaaugggcucu

SEQ ID NO: 4239 - RNA, 130 nt, Human
agacguggggucucgcuauguuggccagguuggucuugaacucuuggccucaagcauuccuccugccucagcuucccaaagugcuaggauuacagccaugagccaauaguaguaaaaugacuuuuuguuu

SEQ ID NO: 4240 - RNA, 75 nt, Human
agacuaaggccaacacagcagaaagggcaaagggcuggaaagaagcuaaguccugauggaggcuuucugaagucu

SEQ ID NO: 4241 - RNA, 93 nt, Human
agacugaggaccaagacugacacagacucucuucuguuucccuuaucuccuuuccaaaguaagucugugaaucuacccugguccuuuccuucu

SEQ ID NO: 4242 - RNA, 71 nt, Human
agacugggcaauauagcaagaccccaucucuaaaaaauuaggcaugguggugcaugccuguauucccagcu

SEQ ID NO: 4243 - RNA, 86 nt, Human
agacuugauguuuuugaaaguugucaccaguuuauugucaccuuccaacugaaccacugucuugacuuucuccccugucauugucu

SEQ ID NO: 4244 - RNA, 69 nt, Human
agacuuggagucaucuggacugcagagaaggaacuccucugaagcaagcuccggagacuucuuagaucu

SEQ ID NO: 4245 - RNA, 93 nt, Human
agagagagucucacucugucgcccaggcuggagugcaguggugugaucucggcucacugcaaccucugccuuccggauucaagugauucuccu

SEQ ID NO: 4246 - RNA, 105 nt, Human
agagaggaccaugugaaggaggugaaguauuuaaaguggaaaggaggaaaauaaccugaacucuuaacugcucuugaaaguucacucugucuucacuccagcucu

SEQ ID NO: 4247 - RNA, 77 nt, Human
agagcaagaugaacagaaucuguauucucaaagagcacauagccaaacccuuugccgaugccugucauuuugucucu

SEQ ID NO: 4248 - RNA, 92 nt, Human
agagccagaagauggagaggaggcugcaaacccuuagcugcucuauaaauauaaucauugaggcuugauugucccuugccaucucuugcuuu

SEQ ID NO: 4249 - RNA, 79 nt, Human
agagcugcucugcaagcuagaacgugggacgcacacauccugggugcugucuugugaagccuugcugcaggcaagcccu

SEQ ID NO: 4250 - RNA, 83 nt, Human
agagcugguguguagcggguaccuucugucugcuggcacuagguauuuuacacauuaaaucagcucguucucacaucagcucu

SEQ ID NO: 4251 - RNA, 85 nt, Human
agaggacagacuuaucuucagaacauuucagucauuccucaaaguggcuagaaacuugucagcaugaaucagaugagcagccucu

SEQ ID NO: 4252 - RNA, 130 nt, Human
agaggagucuggauuuuaaguccuugugcacggauggucucaagugaucaggauaguguggucgguacacccaaagcuugugaaugacuccauccaaagagcaucagucuguauucccaugacccccagu

SEQ ID NO: 4253 - RNA, 101 nt, Human
agaggccuaacaguaagcccauggcacuuuauucucucgaauccaucaagaugaccuucauagauuugagcaacaagaugccgucccugcuguuugguucu

SEQ ID NO: 4254 - RNA, 93 nt, Human
agagggcaaaugucaacugcuggagagagugcauggacagaagugcaagcaaaauaaaguccagcucuuccagguugaccacuuugugccccu

SEQ ID NO: 4255 - RNA, 75 nt, Human
agagggucguuucuggcaggaacggagugguugguagucucaggcgccaggcguccugccagguaugcccgcucu

SEQ ID NO: 4256 - RNA, 124 nt, Human
agaguauaccugugcccgguugcuguagcucaugccuguaaucccaccacuuugggaggccaaggcggguggaucauuugagguuaguaguuugagaccagcuuggccaacauggggaaacucu

SEQ ID NO: 4257 - RNA, 87 nt, Human
agagucccacuuuguugcccaggcuggagugcaguaggcaugaucuuggcucacugcaaccuccaccuccuggguucaagcgauucu

SEQ ID NO: 4258 - RNA, 88 nt, Human
agagucucacucugucaccuaggcugaagugcaguggcgugaucucagcucacugcagccuccaccucccggguucaagugauucucu

SEQ ID NO: 4259 - RNA, 86 nt, Human
agagucuugaucugucacccaggcugcaguguaguggcaugaucucggcucacugcaacccccgccuccuggguucaagccauucu

SEQ ID NO: 4260 - RNA, 80 nt, Human
agauaaagauugugaugugcugguugguuauaaagcuguguaucggaucagcuuugccauggccaucuuuuucuuugucu

SEQ ID NO: 4261 - RNA, 69 nt, Human
agauaccauacacaugaugaaguugcuguuugaaaguacuguugaagcacuguacaaguuugugguucu

SEQ ID NO: 4262 - RNA, 65 nt, Human
agauagaucuuaaagggcaaagcaguauauugguaguugucaauauagcagugcuagcucugucu

SEQ ID NO: 4263 - RNA, 97 nt, Human
agauaugauuagacuucguuaguaauguucaacuuuucacaaaagauggcugaagugccaucuuaacaaacuuacuggcagauugguuuuuauauuu

SEQ ID NO: 4264 - RNA, 83 nt, Human
agaucugagauugaugcugggacugcugcugagauccagaggaucaacaagcucauagcagcuuccucagcaccaugagaucu

SEQ ID NO: 4265 - RNA, 64 nt, Human
agaugaggucucagaugcgagaucaacucuaauacgaaauccaucugcaaucugggccccauuu

SEQ ID NO: 4266 - RNA, 85 nt, Human
agaugccaggcauguaugcaacagagaaaauccagcugcacagaaacccuguggaggagcagcucaguccagcgugaaggcgucu

SEQ ID NO: 4267 - RNA, 81 nt, Human
agaugcgcugcugcugcugucguccugccuggcgccuuggccuacaggggccgcgguuaagggugggagugggggugcacu

SEQ ID NO: 4268 - RNA, 91 nt, Human
agaugcuuuuggugugucucauacuguguuuggcagagagguccaaucuguccucucuguggagacaggaagucgucccagagguccaucu

SEQ ID NO: 4269 - RNA, 70 nt, Human
agauguguuaggaaugucaacagagcaaggagaaaaaaggcaguccuggaaucacauucuuagcacaccu

SEQ ID NO: 4270 - RNA, 83 nt, Human
agauguuauguaaaaguuugagguugagaugacauaucugacacucuguuguuacucucagaagcuacuacaugugaaauucu

SEQ ID NO: 4271 - RNA, 73 nt, Human
ccugaaugagaaugucugcgguauuucccgaaauaaguaucccucaaggaugauacuguggaccucacucagg

SEQ ID NO: 4272 - RNA, 97 nt, Human
ccugacucuguccugcugccugggucaaauguggcugucccuggaguuucucuucaggggugccuaccuugagaggcagugugguguggugguuagg

SEQ ID NO: 4273 - RNA, 79 nt, Human
ccugccccaucccuuccccagugcacucugaccuagcuagugccuggugcccagugaccugggggagccuggcugcagg

SEQ ID NO: 4274 - RNA, 104 nt, Human
ccugccccccugccugccaucugagagcccugcagugugccugcgcccugccuacagccggcgcgcucagccgggcaacuucaaugcagcgggggguccucggg

SEQ ID NO: 4275 - RNA, 65 nt, Human
ccugcggucugguuccuccaucagggcgcuguggguauggcccugaggugaggggcaggccuggg

SEQ ID NO: 4276 - RNA, 61 nt, Human
ccuggcacagaaucugggaauuuguauuucuggcgaguuuccaauugaugcugaugcuggg

SEQ ID NO: 4277 - RNA, 104 nt, Human
ccuggccgcccucuggcccuuccugggcaucguggcugaggugcuggugcuggucaccaucaucuucaucuacgagaagcgccggaagcccgaggacguccugg

SEQ ID NO: 4278 - RNA, 94 nt, Human
ccuggccggccuccggcaguucuucaagcagcugcccagcccgcccuuccugccggccgccgggacagcagacugccgguaacgcgcggccggg

SEQ ID NO: 4279 - RNA, 77 nt, Human
ccuggcugaccugguguuugucugcacucugcccuucugggccuaugcaggcauccaugaauggguguuuggccagg

SEQ ID NO: 4280 - RNA, 89 nt, Human
ccugggccugcccacucccacgcccuucaccaaugccguccagcugcugcugacgcugaagcuggugagccuggccagugaaguccagg

SEQ ID NO: 4281 - RNA, 112 nt, Human
ccuggguccagucccucaccugguaccuuugugcauguugccuucauuccugagcagguaucauccucagggaaccagcauggcaccuaccaggccaggcucuguucuuagg

SEQ ID NO: 4282 - RNA, 69 nt, Human
ccuggucaaucaacaaagucuugccaaugguuuccaucacucucuuggacauugguuuaccuugccagg

SEQ ID NO: 4283 - RNA, 86 nt, Human
ccuggugucccucgacucugacagugauggggagcugggauccagauacuccuccggguauucaucugcagagcaggugaaccagg

SEQ ID NO: 4284 - RNA, 86 nt, Human
ccugguugggccgacguggggacuagcggugcucucaaacccggguauggcgggcaccuuugguucucagucaacguucacacggg

SEQ ID NO: 4285 - RNA, 86 nt, Human
ccuguacaaagcagccuuggaccaggagggaaaaccccaaggcucugcagccucccugcuccccuccguuuaaggcuguggucagg

SEQ ID NO: 4286 - RNA, 98 nt, Human
ccuguauuucuccaucuccaggucuggacagugcaaguugccaagaaaaaggaccuaguguagccauugcacugcagaugaaauaauggaggcucagg

SEQ ID NO: 4287 - RNA, 86 nt, Human
ccugucccucaccugcggugguuuaugguggguccuucagugguuacuacuggagcuggauccgccagcccccaggaaggggcugg

SEQ ID NO: 4288 - RNA, 77 nt, Human
ccuguccuucggucccccaggccugccggucagaagccuggggcugguaggcccuuggugguccucauguggauggg

SEQ ID NO: 4289 - RNA, 80 nt, Human
ccugugccugugcuugucauaaaugaugcuucccagaagaaaggaaagaaggaggugaggagaggacgagcaaggacggg

SEQ ID NO: 4290 - RNA, 61 nt, Human
ccuguggcauuuuccuuauugaauauuaacauaaguacacacugugagacucugcuacagg

SEQ ID NO: 4291 - RNA, 76 nt, Human
ccugugggcuuucuacaguaucccacugugucugguaugugucaauuuaugggauuacugagaauugccucuaagg

SEQ ID NO: 4292 - RNA, 73 nt, Human
ccuguucagugcucugcucaucaagugucuggagaaggagguugcagcauugugcagauacacaccccgcagg

SEQ ID NO: 4293 - RNA, 66 nt, Human
ccuguuggcgggccaucugcaggggcacacaugccgcgugccuagacagaaagggcugcuuguagg

SEQ ID NO: 4294 - RNA, 72 nt, Human
ccuguuguuggcagcgucaagaaugagaagacuuuugugggggguccucuuaaggcaaaugccgagaacagg

SEQ ID NO: 4295 - RNA, 72 nt, Human
ccuuaaaauauggguaugcaauuguuacaaagccauaguaaaugguuuauaaaauguacuuuuauuuuaugg

SEQ ID NO: 4296 - RNA, 62 nt, Human
ccuuaagaaacgcagcgguucgggggaggagacuuuuagaauuaucuuucaaacacuuaagg

SEQ ID NO: 4297 - RNA, 73 nt, Human
ccuuaauggccagcucuccacgcugcucggcaucugcaauggcggcuccagggaagcccucuggccuuugagg

SEQ ID NO: 4298 - RNA, 68 nt, Human
ccuuaauuacuuccuuagcagccccagcuccacagugaagguuggggcuucaacaugggaauuuaggg

SEQ ID NO: 4299 - RNA, 78 nt, Human
ccuuacagugagggcuauacaugguagccaguugaauuuauggaaucuaccaacuguuuagggcccugauuugcuggg

SEQ ID NO: 4300 - RNA, 65 nt, Human
ccuuagauguucugacagcacugcaccuuuggcuugguuucagugguugguggaacaugaauagg

SEQ ID NO: 4301 - RNA, 78 nt, Human
ccuuauggagacuguaucauccuuaucuucaucuuacaggugagaaaucugcagugaagaaagguacaucccaagggg

SEQ ID NO: 4302 - RNA, 74 nt, Human
ccuuauuaaagcaucugcaacagccaggaaucauugagcuaugaguaaaacgcugccuuaggugauuugucagg

SEQ ID NO: 4303 - RNA, 108 nt, Human
ccuucaaaaaguuuguagccuaucgggguggagagauaagccaaguauccagauaaccauggcauaaggcagaauauuuucuguacuaugagagguacaaaggggagg

SEQ ID NO: 4304 - RNA, 109 nt, Human
ccuucaaaaaguuuguagccuaucgggguggagagauaagccaaguauccagauaaccauggcauaaggcagaauauuuucuguacuaugagagguacaaaggggaggg

SEQ ID NO: 4305 - RNA, 72 nt, Human
ccuuccuucuggguguggggcaggccuucucaagaauggggagucuuaugaacuacagucaaacaagguagg

SEQ ID NO: 4306 - RNA, 83 nt, Human
ccuucgagaugugcccuucucagcccuguacugguucaacuaugagcuggugaagagcuggcucaaugggcucaggccgaagg

SEQ ID NO: 4307 - RNA, 68 nt, Human
ccuucguuuucaggccuugucaagaagacaaauuuuuaaaucauuuuccugaccccugagaaagcagg

SEQ ID NO: 4308 - RNA, 79 nt, Human
ccuucuaugcagaagucgagaccauggagguccuacauguggagguaugaucgauaacuuggugcgaucugaaggaagg

SEQ ID NO: 4309 - RNA, 65 nt, Human
ccuucucgaggaggacggggauggccucccuguuguggugcuccuuguggccuuccuugaggagg

SEQ ID NO: 4310 - RNA, 87 nt, Human
ccuugagaguuugauagcuugcuugauccauugaugaacaaaauaucuguuguggcccaacuggaucaggcaguugagaucucaagg

SEQ ID NO: 4311 - RNA, 74 nt, Human
ccuugugaaaguuauaauguaguaggagaugggguaaacaacuaucugauguacauauucaacugucacugagg

SEQ ID NO: 4312 - RNA, 86 nt, Human
ccuuuaaagaaaccuuuagaaggacuuagaccucacauauuaauguugagaaguucugcuuaauuuuaaaaugguuucuauaaagg

SEQ ID NO: 4313 - RNA, 72 nt, Human
ccuuuguuucuaaucuccucucagucuguacuacuacuacuacacuaacaugacuuugguuuuggggaaagg

SEQ ID NO: 4314 - RNA, 63 nt, Human
ccuuuugacaagugggauggcaaggaccuggaggaccugcagauccucaucaaggucaaaggg

SEQ ID NO: 4315 - RNA, 84 nt, Human
cgaaaagcuauggcaaauaucagugagcgugugggaacugagaaacgaagucggggcuguacacucacucuaacaagcgaaucg

SEQ ID NO: 4316 - RNA, 63 nt, Human
cgaacgagacgugagacuugcgcuuaugccauuaucucuuuaccaguauuaaacgaucguuug

SEQ ID NO: 4317 - RNA, 72 nt, Human
cgaacggcgaaccacagacuaggcuauuuacggaaagaaggaaagaagccgauuaugugguuuagccaguug

SEQ ID NO: 4318 - RNA, 89 nt, Human
cgaaguuccaugucaugucuucaguuguagaaguuuuuccucuuuaagguaaagcgaccaacuugaacuuucucuggcaacacgauucg

SEQ ID NO: 4319 - RNA, 67 nt, Human
cgaaucgccaaaaacuuggaacuggaacaagugacugucccaauuggaguucugcuggugaucuuug

SEQ ID NO: 4320 - RNA, 76 nt, Human
cgaccggugggacgacgcuucagacugguccucacuacucuuuggacuccacucacgcgacaucaccacggggacg

SEQ ID NO: 4321 - RNA, 73 nt, Human
cgaccucggguccacgugucccgguacucgccggccggagccuccggcuucccggggccgggggaccuuagcg

SEQ ID NO: 4322 - RNA, 81 nt, Human
cgacgguuacucugguuacugggcccgcgccgcgcuggcgagagccgccgcccgcgagggaugcuggugaggaagccgucg

SEQ ID NO: 4323 - RNA, 79 nt, Human
cgacuugucuccucuauauaaaugcguagggguuuuaguuaaauguccuuugaaguauacuugaggagggugacgggcg

SEQ ID NO: 4324 - RNA, 84 nt, Human
cgagcucgcccagcauaucagguuggugcgccgaaauuguuuguugagauauuggucgauagcaaauauguagugggcgguuug

SEQ ID NO: 4325 - RNA, 73 nt, Human
cgaggagagacuguuuaaagucagcaagaaugaggagaaaccugugcaaaugauguuuaagcaaucuacuuug

SEQ ID NO: 4326 - RNA, 81 nt, Human
cgaggaugaucaguacagccuuguggccagccuugacaacguuaggaaucucuccacuaucuugaaagcuauucauuuccg

SEQ ID NO: 4327 - RNA, 69 nt, Human
cgagggaacuuauuccgcacgggccuacuguaggaccaucugcucccguaauuaggaauuuuccauuug

SEQ ID NO: 4328 - RNA, 73 nt, Human
cgaggguacagcuucaccaacacggccgagcgggaaaaucgugcgcgaacaucaaggagaagcugugcuaacg

SEQ ID NO: 4329 - RNA, 93 nt, Human
cgauaaccugaagcuguucuguuaccucugggcucucauccucuccuauuuauacagugaagcccauggcaaauaggaagaagcucaguaucg

SEQ ID NO: 4330 - RNA, 96 nt, Human
cgaugcugagaucagaauguggccuggacaacuucggggacuuugacugggucaucgagaaccauggaguugaacagccgccuggaggagcaguug

SEQ ID NO: 4331 - RNA, 85 nt, Human
cgcacaucguggugagcuggaugaucgcgcagaccgugacggccguggccggcgugguguccuaccccuucgacacggugcggcg

SEQ ID NO: 4332 - RNA, 69 nt, Human
cgcacgcgcuauguggagcauguguguaugagccacacauacacgcagaaaaaguauguagcgacgucg

SEQ ID NO: 4333 - RNA, 80 nt, Human
cgcagcuccuggcgcucggcggggcuaacugcagcgcggagaucucggccgccaagcuccgccucccgccccgggcugug

SEQ ID NO: 4334 - RNA, 67 nt, Human
cgcagugagcacuaauuguagccuuuccacugauggcguggaggggccgauacccagucgcacugcg

SEQ ID NO: 4335 - RNA, 109 nt, Human
cgccaggaugauccuagcuaucguucuuuucacucugguggauauggccaggaugccuuggguauggaccccaugauggaacaugagauggguggccaccacccuggug

SEQ ID NO: 4336 - RNA, 77 nt, Human
cgcccacugugacgaugucaccgaucuggacgucccugaagcagggggacagguguacagacauguucuugugggcg

SEQ ID NO: 4337 - RNA, 78 nt, Human
cgccgagcacagcuucuccuuaugucacgcacgauuucccgcucggccgugguggugaagcuguagccgcgcucggug

SEQ ID NO: 4338 - RNA, 81 nt, Human
cgccgcggggaugcugagcuucggcgggcggcuggacguuccuaagcagagcucgcagcguggcuugacggcccgcgagcg

SEQ ID NO: 4339 - RNA, 114 nt, Human
cgcgaucgggaauuggcagugagcguguuccagaguucagucugcgccucagguaacacgggccugacgccggcgcgucucucgggaauaaccuggcuguuggugagaucugcg

SEQ ID NO: 4340 - RNA, 72 nt, Human
cgcgcggcgacgcggcacacccggacacacgcucucggcacccccccggcaacgcaacggcaacgccacgcg

SEQ ID NO: 4341 - RNA, 71 nt, Human
cgcgcucgcgucccucgugcgggcuccagccgcagccuuagcuucggcucccggcuuggguggcgcggccg

SEQ ID NO: 4342 - RNA, 74 nt, Human
cgcggccagcaguuaccugagccugaggcccgagcuagugcacgucccacagaagcuacagcugccaggucacg

SEQ ID NO: 4343 - RNA, 80 nt, Human
cgcggguucugguucccgggcacggccuuccacauucgcuugcaaaggcuauguggcgguuccccccacuuuagcccccg

SEQ ID NO: 4344 - RNA, 63 nt, Human
cgcucgcaagaccaccagcgcccagagccccagucugaggcuggcgccgggggucugcgggcg

SEQ ID NO: 4345 - RNA, 77 nt, Human
cgcugaacucaugcagacgcuccgauuucuuggacucuacagagaugagcaucaggauuuuauggaugagcaaaacg

SEQ ID NO: 4346 - RNA, 67 nt, Human
cgcugcccgcgacuccugagcacacucccauggcggguggcgugcucugggugggugugcggcagug

SEQ ID NO: 4347 - RNA, 90 nt, Human
cgcugcgguaggccguuuccgaggcagcaguugcggccgcuuuuagccccugagcggcgaucugcggacugccugcgagucucugcugug

SEQ ID NO: 4348 - RNA, 74 nt, Human
cgcugcuauuagaaugcauugugaaacgacuggaguaugauuaaaaguuguguuccccaaugcuuggaguagug

SEQ ID NO: 4349 - RNA, 71 nt, Human
cgcuguaaagaaguucuugaguggcguguaaaauacagcaaauacaaaccauuaucaaaaccuaaaaagug

SEQ ID NO: 4350 - RNA, 100 nt, Human
cgcuuucuucuuccucuuuuauucccaucaguccuaggaccagagagugaaccaugagugcucuuggguucccgggcagcagggaugagggcagagagug

SEQ ID NO: 4351 - RNA, 84 nt, Human
cggaagugccuccuccccguccccuuccuuuccagccucacgcccgugggcugcaguuggaacgauggcggcuggcagcugccg

SEQ ID NO: 4352 - RNA, 104 nt, Human
cggaagugggcuuauuugcgcaucagcuacuuucgcuucuacuuaaaaacggaggaucuggguaaaagaaccgaaaggcuguacgaaccuaagacuugucuccg

SEQ ID NO: 4353 - RNA, 72 nt, Human
cggaaugcaguacccucagcagcagguuugugcuggucccccggaaccggcugcuguuuuguaauaguuuug

SEQ ID NO: 4354 - RNA, 94 nt, Human
cggaauuuggcacgaaccaugccacuguuucaugggcccgaguuacuuuccccagaugacucugguuuuguuugguuugccgccagagugacug

SEQ ID NO: 4355 - RNA, 84 nt, Human
cggacuuccauaaacucaaccuuccuuaaccccagaaaccacagacuuucaagagugaugacgaggggaagagaugagaagacg

SEQ ID NO: 4356 - RNA, 76 nt, Human
cggagaugccuacauagaagagugacagcagcuagacuaaauguuuaacugcugaacuaguuccucagguauccug

SEQ ID NO: 4357 - RNA, 64 nt, Human
cggagcaccugucuucauugccucucccuucugcagccugaaaggagggauguucaggacucug

SEQ ID NO: 4358 - RNA, 85 nt, Human
cggaggcacgcuccggcgaggcgagaggguuggguuagcaggcaucccggucgccccuuccuucuuuucgccggaguugaaucug

SEQ ID NO: 4359 - RNA, 83 nt, Human
cggaggcugcggcugcagaaguaccgccugcggaguaacugcaaagaugcuguccgugcgcguugcugcggccgugguccgcg

SEQ ID NO: 4360 - RNA, 73 nt, Human
cggagggcugccgggacgaagaggcuacaucuacacagggcgguguaggggaagcccgucucuucgaccuccg

SEQ ID NO: 4361 - RNA, 61 nt, Human
cggaggugucugagguugccaucagccagggcgaggucacccuggcccucaggaaccuccg

SEQ ID NO: 4362 - RNA, 75 nt, Human
cggagugguggccagccagccugcucguguaguggacgaacgggagcagauggccaucaguggcggcuucauccg

SEQ ID NO: 4363 - RNA, 87 nt, Human
cggaguucugcuuuaaucuggguaacugaggcuaauaugagcaagacuuugguuaauuaacuggguucucagaugccacagacuccg

SEQ ID NO: 4364 - RNA, 105 nt, Human
cggcaauugaucagaucaaccaacccggucagcccgcucuccggccccgugccugggguggcgggcgccuggcaggcuuuggugacucuagauuaccucgggccg

SEQ ID NO: 4365 - RNA, 77 nt, Human
cggcacugccacccuuuuggcauuguugccaccauugacugguggcgauggagagcugccaauugggcuggcggccg

SEQ ID NO: 4366 - RNA, 77 nt, Human
cggcccggcccucgcgugccucccaggcuccgcaccccugaugcugcgcgggugcugagcccgcuucggccgggacg

SEQ ID NO: 4367 - RNA, 82 nt, Human
cggccgccgcgcugccgcagcugcuugccguuaagccgcgcccgggaaacuugggccgagcagcugccgggggcuggcgccg

SEQ ID NO: 4368 - RNA, 60 nt, Human
cggccgccgcggaggcgcagcaugucggggcgcccgagggcguggaggccgcggaggccg

SEQ ID NO: 4369 - RNA, 68 nt, Human
cggccgcggccaaucggagccgcucuugcugcgacgcagcggucggaagcggagcaaggucgaggccg

SEQ ID NO: 4370 - RNA, 107 nt, Human
cggccuggggagccgucuuggccuggggagccgucuuggccugcgcgggugcuucggcgccgccaggcuccuguauccccguuuccagagccgcggcccucagggcg

SEQ ID NO: 4371 - RNA, 74 nt, Human
cggcgcuuccgcaaguuccugguguuuguggcaaacuucgaugaagaaugaccccaagaccuuugagggcguug

SEQ ID NO: 4372 - RNA, 73 nt, Human
cggcgcuuccgcaaguuccugguguuuguggcaaacuucgaugagaaugaccccaagaccuuugagggcguug

SEQ ID NO: 4373 - RNA, 91 nt, Human
cggcuccaggcggcgagcugagguugggagccuggcuuuccccuccgagaggguucaggugccucugccauagcuucugucgccugugcug

SEQ ID NO: 4374 - RNA, 72 nt, Human
cggcucccaauguugacguuggccagggccuuugcaaacaagccaggccaaaaaggcucaacauuuacaccg

SEQ ID NO: 4375 - RNA, 82 nt, Human
cggcuccgagaagcagguucuucgugaguuccucgcaagggccggucagagcuacacauugagaaccugaacauggaggccg

SEQ ID NO: 4376 - RNA, 60 nt, Human
cgggagccgcauggagccccgggcggcggacggcugcucccugggcgacguggguuucug

SEQ ID NO: 4377 - RNA, 91 nt, Human
cgggaucucacucugucacccaggcuggagugcaguggugugauuuuggcucacugcaaccuccaucuccuggguucaagcgauucuccug

SEQ ID NO: 4378 - RNA, 75 nt, Human
cgggcacauggggaaagaaucaccugaguuggccuggguaagucacugaaggcuucauggaggugauugugccug

SEQ ID NO: 4379 - RNA, 71 nt, Human
cgggccacuuucucagccuccuucugcccguaauuuuccuucaggaucugguacuguucuggaguggcccg

SEQ ID NO: 4380 - RNA, 71 nt, Human
cgggccagacuacucagcuucacggucauguggaaccgccgguccggcaucacaguggagccccuggcccg

SEQ ID NO: 4381 - RNA, 73 nt, Human
cgggccuugauagugucuccucauggcuuccacuggcaaaagcaugguuacccgaggugaugaucuuggucug

SEQ ID NO: 4382 - RNA, 87 nt, Human
cgggcuugaccggcgucggcccgccgccuccgcugccgcuucgccccaauccggucccucuggcccggccugacccggucuggcuug

SEQ ID NO: 4383 - RNA, 75 nt, Human
cggggacagcgaccugcagcuggaacgcaucaacguguacuacaaugaggccaccggcggcaaguacgugccccg

SEQ ID NO: 4384 - RNA, 72 nt, Human
cggggccgcacccgagcuacgccgugccgcaccgguugggccggucggugggagcucugggagcaggcgcug

SEQ ID NO: 4385 - RNA, 79 nt, Human
cgggggcucugccaguggccuggcuugaacggacgaugcggucaguagggcuggaggucuacacgcagaguuucucccg

SEQ ID NO: 4386 - RNA, 79 nt, Human
cggggggagccgagacugagcuuuccugucuuuccuuuuuucugagagauucaaagccuccacgacucuguuucccccg

SEQ ID NO: 4387 - RNA, 100 nt, Human
cgggucccuggucugggccaugucuggcugugaugcuugggagggagacuguuguucccggagaugcggcgcgcaggacaaggagcauccaagauaccug

SEQ ID NO: 4388 - RNA, 63 nt, Human
cgggucgggguuuaacgcguuucugggccgccguaagcccggccuaggggcagcuuugacucg

SEQ ID NO: 4389 - RNA, 68 nt, Human
cgguagcagugcccagucgagcccggggcagcggcugccgggccagggacuggugcgcugaggggcug

SEQ ID NO: 4390 - RNA, 101 nt, Human
cggucaggccccaucagggauggucacaguccagccacaggggcgacucugcccaucagucccccuggggcagcgaccagauccuggcuggggcagcaccg

SEQ ID NO: 4391 - RNA, 63 nt, Human
cggucgagcgcaguuaccgcgcggggcucugcuccaaagccgcgcuguuccugcugcuggccg

SEQ ID NO: 4392 - RNA, 68 nt, Human
cgguguccgaggaccuggggcuggugcauuuucgguuguugcugaucugucucaggacucugacacug

SEQ ID NO: 4393 - RNA, 61 nt, Human
cgguguguuaaggugauugugaaacaguugcugugaacuuucaugucaccuacauaugcug

SEQ ID NO: 4394 - RNA, 81 nt, Human
cgguugguuucugggccuucaacaaccuuuguauguuaggcucccuugauucggguaccgggguagagguccacccggccg

SEQ ID NO: 4395 - RNA, 71 nt, Human
cguaacauuuuccaaauguuccuuaucaguugguccacugagagccacugaucugauuggaaaacaagacg

SEQ ID NO: 4396 - RNA, 97 nt, Human
cgucagacuuggaagaaauauucuguucuaaaaucuucucacuuuuauaaaaaauaugcuuuucuuuuggauuuaggauguuaucuaauuucugaug

SEQ ID NO: 4397 - RNA, 86 nt, Human
cgucaugucuaagucagagucuccuaaagagcccgaacagcugaggaagcucuucaugggaggguugagcuuggaaacaacugaug

SEQ ID NO: 4398 - RNA, 67 nt, Human
cguccacuuucaucucuuugcucgggagguucaacugcuggaccccaaagagacugcaucauggacg

SEQ ID NO: 4399 - RNA, 91 nt, Human
cgucgagauguuuuuaaccagcgcguuucucaccggcuucucauuucacuguuuguacuccgggaucgggcacggagaagacauccuggcg

SEQ ID NO: 4400 - RNA, 87 nt, Human
cgucgcuggggcucgugucgcugggcggcaaggcgaccacggcgucgcaggccaaggcagugcugagcgccgagcagcugcgcgacg

SEQ ID NO: 4401 - RNA, 94 nt, Human
cgucggcauggcugucauucugaggguggaaaauaacuggauuucggguuaauuggugacauccucaagagcuguggcaagccaugucucggcg

SEQ ID NO: 4402 - RNA, 73 nt, Human
cgucuuggcucucuccgcuucguccuuaccagacuucgcacuuugugaggcgguucaauggugaagccaagug

SEQ ID NO: 4403 - RNA, 98 nt, Human
cgugacccugccccagccuaggccugucugcuggccuucagugccaucccaccccugggcaaggcaggcuuagcagcuaagggaggcugggggucacg

SEQ ID NO: 4404 - RNA, 85 nt, Human
cgugagcuucuuauagacaccagaaaaaguuucaaccuuguguuccacauuguucugcuguucuuuguccaaaugaaccuuuaug

SEQ ID NO: 4405 - RNA, 77 nt, Human
cguggaccuucccuguggccuguacccgucccucaacagagacaggcaauuaccagcgcccaggcuguuguccgacg

SEQ ID NO: 4406 - RNA, 61 nt, Human
cguggccggccaugggaagagccauguuuucaacguggagcuuggcagcgagcuggccaug

SEQ ID NO: 4407 - RNA, 80 nt, Human
cguuccccaacucaaggccgcucaacugucgccguucagaggacuacaguacacagcgagagucuuaccuagggggggcg

SEQ ID NO: 4408 - RNA, 73 nt, Human
cguuuuggaagcaaguggguucagugaaguguguugccacgaauagcacccgcugcuuuuggcuuuauuaacg

SEQ ID NO: 4409 - RNA, 78 nt, Human
cuaauaaacucugcaaugaaaucauguugacugcaucagucuguaccaugaccugaccucauuagcaaguuuauucag

SEQ ID NO: 4410 - RNA, 77 nt, Human
cuacaggacacaauguggcugaccugguggugauacucaagauucugccaacguuggaagcuguugcugcccugggg

SEQ ID NO: 4411 - RNA, 82 nt, Human
cuacuaguaaguagauuucucaaauaaaacauaauaauagcuaaauauagcuaauauuuacugaccauuuacuaugcagcag

SEQ ID NO: 4412 - RNA, 63 nt, Human
cuacucuuauuccuacucauuuagcaguaguucuauugggcacuaguagucaguagggagugg

SEQ ID NO: 4413 - RNA, 71 nt, Human
cuacuggaaagaaggcuuuauggagaucccaggaaccaaggaccauguaagccugaauuugugccaugugg

SEQ ID NO: 4414 - RNA, 93 nt, Human
cuacuuuugagucuugcuuguucagucaacugacugcuuaauaucuuugacaggguaguuugaaaggagaggugagcaaaguuucaggaguag

SEQ ID NO: 4415 - RNA, 71 nt, Human
cuagaaucucguguguuaguuuuaacuguuuugaaaauaauaaguaacauuaacacaauguugauauuugg

SEQ ID NO: 4416 - RNA, 70 nt, Human
cuagagaaggaucgggacggcuugugauuucucucccgagacagcgaucucucucuucuccuaucucuag

SEQ ID NO: 4417 - RNA, 83 nt, Human
cuagagaccccagaccuuuucauauggauauuugagaauguaaugcaucucaggccucgugcuggaacucuagggcacucuag

SEQ ID NO: 4418 - RNA, 63 nt, Human
cuagagcgguccuuggggagacgcgggucccaguccugcggcuccuacuggggagugcgcugg

SEQ ID NO: 4419 - RNA, 96 nt, Human
cuagagcuuuuguugaugauaugaaugaucuggauucagugaguucaguggucauuuaauccaguccuaccucucauacagcagacagauagauag

SEQ ID NO: 4420 - RNA, 112 nt, Human
cuagaguuagcaguguccggggagaguggcuuuagaccagucaguaccuugcucuuugugcauggugcaugucaagucaggaagccaagaaaccguuggcauuaaaaucuag

SEQ ID NO: 4421 - RNA, 87 nt, Human
cuagccaaaauguacaagaccacaccggaugucaucuuuguauuuggauucagaacucauuuggugguggcaagacaacuggcuuag

SEQ ID NO: 4422 - RNA, 60 nt, Human
cuagcccaucauuaccugugaacugcaguggggcagucauggcaaauagaauugggcugg

SEQ ID NO: 4423 - RNA, 73 nt, Human
cuagcugcugccagccaagcugcuaccagaccagcuccugcggaacuggcuguggcauuggugguggcauugg

SEQ ID NO: 4424 - RNA, 95 nt, Human
cuagcuuguuuguauagguagaaugauucaucucuccauuuuagauggcuagauguuuuguggaagaucuuagaauugccugccucauuugcugg

SEQ ID NO: 4425 - RNA, 80 nt, Human
cuagggggucaccuaugugggagccagcucugccuccugccccgaagcuccagagacuucuccuacaacugacucucugg

SEQ ID NO: 4426 - RNA, 77 nt, Human
cuaguccagguucgaacccaggaucacagauugcauuuaguuguuaugucucuuuagucucauuuuaucuggaacag

SEQ ID NO: 4427 - RNA, 82 nt, Human
cuauaccguagucuauuuaaagugugcaauagcguuacaucuacaaaaacaacguauauacuuuaauuugguuaagguaugg

SEQ ID NO: 4428 - RNA, 77 nt, Human
cuauagggaaagcugguacgccugcagguaccgguccggaauucccgggucgacccacgcguccgcauuaccuguag

SEQ ID NO: 4429 - RNA, 81 nt, Human
cuaugaggaaguaauagucucuuuuccaaauacuguuaguccaaaggcuuguuuguagaaucagacuguucuuuguuuugg

SEQ ID NO: 4430 - RNA, 72 nt, Human
cuauggcauuugcagauguucagccccauguagcugacgucauggacagggcuggauguugagugacuguag

SEQ ID NO: 4431 - RNA, 84 nt, Human
cuauggcucggggcucgcugcgccgguugcugcggcuccucgugcuggggcucuggcuggcguugcugcgcuccguggccgggg

SEQ ID NO: 4432 - RNA, 71 nt, Human
cuaugugaaugggaagugguuaaagccugaacacagaaauucagugccuugccaggaucccaucacaggag

SEQ ID NO: 4433 - RNA, 79 nt, Human
cuauuaugaacacaugagaaugauuuuuuucucuuaaucauuauuaaggaaauauuuuaauuucauggucauauaaugg

SEQ ID NO: 4434 - RNA, 109 nt, Human
cucacucucaccccucuagccuuaaauccagaaucuagacugaauauggacugaaugggucagauuuggggaaauguguuucuggggacagcugagggaccagagagag

SEQ ID NO: 4435 - RNA, 67 nt, Human
cucacugcuauauucaaaauuuauugagcugcaacugugugcucagcaaugagaauauagcagugag

SEQ ID NO: 4436 - RNA, 87 nt, Human
cucagacuuuuugacugccauguccuccuuuagaaggacuacaguuuggcuacuuggucucuucuggggcagauguggcauccugag

SEQ ID NO: 4437 - RNA, 73 nt, Human
cucagccagguuuccgauugucgauucaaggaagcaaaaguaauuuuucuugacauuugaggaccuuccugag

SEQ ID NO: 4438 - RNA, 112 nt, Human
cucagccucucccugauguaaucuggguuccuuguguggcaacaguaaugggaagaaaggaccugaaauauuaguugauuccaagggacccucuaagguuagagaggcagag

SEQ ID NO: 4439 - RNA, 72 nt, Human
cucagccuuccgaguagcugggauuacaggcaugcgccaccaggcccagcuaauacggaauauaaaguagag

SEQ ID NO: 4440 - RNA, 70 nt, Human
cucagcugguccugacucguggagaugcagacuuaggugugcccucgguugcuaggucagcgaccagcag

SEQ ID NO: 4441 - RNA, 77 nt, Human
cucaggauggcgcugggcuguccccucgccucuguccuugccagaagauggaggagaggcggcccaacucuucugag

SEQ ID NO: 4442 - RNA, 100 nt, Human
cucagggaacuuuggaaaauaaaauuuggcagccuaucuaaaauuaaaucaauuugugggugaggaacaaaaaccggauuucuuuguaaaucucccugag

SEQ ID NO: 4443 - RNA, 78 nt, Human
cucagguccuuuagugcuucucagucaacagacagggagggagcuuccccugugacugaggugcgcauaaagacugag

SEQ ID NO: 4444 - RNA, 63 nt, Human
cucagugaguucagaauauccuacaccuaaccccccucuuagaugguagcuaugcucagugag

SEQ ID NO: 4445 - RNA, 60 nt, Human
cucagugccuuuacugucgucucaagagaggagacuuguguggaacaguucaggucugag

SEQ ID NO: 4446 - RNA, 99 nt, Human
cucagugugggccauccaucugagguugaugagauauuugaugcuauaucauauagcaaaggugcaucugucauccgaaugcugcaugacuacauuggg

SEQ ID NO: 4447 - RNA, 91 nt, Human
cucaguucugccuccugacuaugacaguaaucccacccagcucaacuaugguguggcaguuacugauguggaccaugauggggacuuugag

SEQ ID NO: 4448 - RNA, 85 nt, Human
agauuacucuguuuuauaagccuuuuugaucuugaacuucguaauagcacuuugauuuccucacuuaaggcaggcaguguacucu

SEQ ID NO: 4449 - RNA, 87 nt, Human
agcaacuggguucccauggcaugugguggccuuagaggagguguucagccugccaccgucggugcuuuggugcucugcccaggagcu

SEQ ID NO: 4450 - RNA, 67 nt, Human
agcaaucaaagguuuucgcaauucuccagugggaguaaaccacagacuacgagggaguuugacagcu

SEQ ID NO: 4451 - RNA, 60 nt, Human
agcacagaacugcuuuuuauuuggggucugugaguuucuuagguauuagcaaucugugcu

SEQ ID NO: 4452 - RNA, 62 nt, Human
agcacaggaagcggaugacagaggaauccccuuuccuccaggucaccuuggcuugcugaguu

SEQ ID NO: 4453 - RNA, 67 nt, Human
agcacuguggcuuuugucagauggagugccggucugcagaggacugcucuuucgaauccacaguguu

SEQ ID NO: 4454 - RNA, 64 nt, Human
agcagaacaguaagcuuccagaggaaaccuacacuucuauccuuugggccuggccuguucuguu

SEQ ID NO: 4455 - RNA, 74 nt, Human
agcagaacugcaacacaauuuaaaugucuguaaauuaggucacaaaagggaugcaaaauguuugcaguuugacu

SEQ ID NO: 4456 - RNA, 101 nt, Human
agcagacugcccuguugaccagaauuuguuagauugcuauuacaaugcugauuauauuuuauagcaauuacugacauaagguuauacuuugggcaauggcu

SEQ ID NO: 4457 - RNA, 71 nt, Human
agcagaggcuggggaauggggguucugcucucacugaaugguggggaaccuucaacugcuuagccugugcu

SEQ ID NO: 4458 - RNA, 97 nt, Human
agcagaggugagguuucugagguuucauuauguugcccaggcuggucuugaacuccugagcucaagugauccucccaccucagccuuccaaagugcu

SEQ ID NO: 4459 - RNA, 88 nt, Human
agcauaugacagcaagacacuggcccuggaauccuccgugucacaugugggcugcugacaggaagaaugugcuuuuguuguuguuguu

SEQ ID NO: 4460 - RNA, 79 nt, Human
agcauauguuacuuaccuuguuauuaaauauuucuugaaaagcaaauuuuaaugguuuaauuuuauguggacguauguu

SEQ ID NO: 4461 - RNA, 105 nt, Human
agcaucugcaguacaucgugaccugguauggacucucugcagcuacauccuaccugugguuuaagaaauuccuacgugggacaccuggugugugacagaucagcu

SEQ ID NO: 4462 - RNA, 77 nt, Human
agccacacccuguaaagcccuggggcaacugaaggaguuuuuuugcugcaaggccccaggacugaagucuguuggcu

SEQ ID NO: 4463 - RNA, 75 nt, Human
agccacauuuugggguuguggugcguauaccauuugcgcgcaagagcgcaugguggcccggcccccuauauggcu

SEQ ID NO: 4464 - RNA, 62 nt, Human
agccagcaccugaugaaacuuccuucagugaggccuugcugaagaggaaucaggaccuggcu

SEQ ID NO: 4465 - RNA, 98 nt, Human
agccagcaggagcaguuggagaccgcuguuacgaggagggaauguacgaggcugccaagcugcucuauagcaauguuucuaacuuugcccggcuggcu

SEQ ID NO: 4466 - RNA, 70 nt, Human
agccagcaucguguuucaaacagugcaugacgcacaccuccggugcaaucaggcaugacaugugcucccu

SEQ ID NO: 4467 - RNA, 77 nt, Human
agccagguccugcaugaggcagcuggagaaguuuguccgcagcgugcauggcuuccagaugcuguaugccgacugcu

SEQ ID NO: 4468 - RNA, 70 nt, Human
agccagucauucuaaggggcuuuguauuggugcuauaaagucaaccucaauuccuuacaguggucugguu

SEQ ID NO: 4469 - RNA, 78 nt, Human
agccauacaagguggcagcggguaaccugcuuguucugucauccagggccucuuugugccccgucugucacccaggcu

SEQ ID NO: 4470 - RNA, 71 nt, Human
agcccaggugaccuucucugaggagucugcaguuccugagaggagcuggcgccucaggccauaccugggcu

SEQ ID NO: 4471 - RNA, 100 nt, Human
agccccagggcucgacgccugucccguuccuggucaaugagaccccaggcccaauaggcuuauaggccagugagcccaggccccuacaagcccugaagcu

SEQ ID NO: 4472 - RNA, 90 nt, Human
agccccuguguccagcugccuccagaagguucccagcaccgggguccacacagccguguugcugccacuuccaggugcuggcuugggguu

SEQ ID NO: 4473 - RNA, 106 nt, Human
agcccgcugccggcgcgcggcgcaugguggcggcuccuuucggagcgcagccgaaccucugacccggacuccguuaccccugcccggcgcgccccggcggccggcu

SEQ ID NO: 4474 - RNA, 67 nt, Human
agcccucaccgcccccaccuaccccaaccucaauggggaaggaaaggggccugagcugggcagggcu

SEQ ID NO: 4475 - RNA, 93 nt, Human
agccgggcaugguggcucacaccuguaaucccagcacuuugggaggccaagguggguggaucacaaggucaggagaucgagaccauccuggcu

SEQ ID NO: 4476 - RNA, 75 nt, Human
agccgggggucuggcaggaaugggaggcauccagaacgagaaggagaccaugcaaagccugaacgacgccuggcu

SEQ ID NO: 4477 - RNA, 77 nt, Human
agccguacauucccacgcaguuucaucucagggaggccaguuggcggccgguccuggauuuguuuuaagguacggcu

SEQ ID NO: 4478 - RNA, 93 nt, Human
agccuccagucccaagcaagccuccaggcccugaguguucugaugccugaaggguagucauaggucccgagguggagucggggguggagugcu

SEQ ID NO: 4479 - RNA, 82 nt, Human
agccuggagcuccucccugccagccccaggggcuggucgcuggucccugggcacagugagcagggcugaggucagacggguu

SEQ ID NO: 4480 - RNA, 68 nt, Human
agccuguccccagcccuucggaagccccggcgccagcccgggcccucggcagggaggaugacggagcu

SEQ ID NO: 4481 - RNA, 74 nt, Human
agccuucaucgucuggcuggccaacggggacacccuccgugucuucaagaugaccaagcgggaggaugggggcu

SEQ ID NO: 4482 - RNA, 81 nt, Human
agccuucugggccagaucuagggaucuucccucccucccugcacucuagcugcaggagcuuccuggugucugcccagagcu

SEQ ID NO: 4483 - RNA, 81 nt, Human
agccuuguggcugaggccugugacacuccggaacacugggaggcaguaccccagagccuagcaggccgacaagcaaggacu

SEQ ID NO: 4484 - RNA, 99 nt, Human
agccuuuacuuaaaaucuucagugucuugucaaaucuagcucuguaucagaugcuggaauauuccuaacauuugacaaacuggaguugaacuaaaggcu

SEQ ID NO: 4485 - RNA, 76 nt, Human
agccuuuuaacagcagaaaauuauccgguagcaaauugucuuagggaaauuacuacacuguuguaacaaaagggcu

SEQ ID NO: 4486 - RNA, 73 nt, Human
agcgagaucguggcuggacuggagaagaugccugcccgccgggcuuccuuaucccaccccagagacaucggcu

SEQ ID NO: 4487 - RNA, 104 nt, Human
agcggaggaagagguccuggguaaaggagcagguguguucuuagaaggcccuccugucugcugcuggaacacaucaccuguuuauucguccuccauuucccgcu

SEQ ID NO: 4488 - RNA, 75 nt, Human
agcggagggacugauaucucuggcuaaauauuuguccuuuuauuaugguuucuaaaucaguuauuuucuucagcu

SEQ ID NO: 4489 - RNA, 71 nt, Human
agcguggaugccgguguggacgcugugaaucguggcuggcccgguucuccgcuucuccccauccccauacu

SEQ ID NO: 4490 - RNA, 85 nt, Human
agcuacuccaauggcugugggagacuuaauuccaauuccaggugauacagccgucagucucccacuagcuguaggauggugugcu

SEQ ID NO: 4491 - RNA, 94 nt, Human
agcuaucacucaagcuucucacaccaucagaaaauucauucuggcaagaaaccuuaugaaugucaugaaugugggaaggcuuuuugugauggcu

SEQ ID NO: 4492 - RNA, 65 nt, Human
agcucagccccucacaguggccucaagugugaugccuuacaaaagcaccacucagaugggcagcu

SEQ ID NO: 4493 - RNA, 85 nt, Human
agcugagacugacgggugauguugcucauaggcuccagcucugcauaagaccuuggcuuggagaccucccucucagucaacagcu

SEQ ID NO: 4494 - RNA, 85 nt, Human
agcugauuuccugaggcaucgaugaggcucauggcacuggcaugggagagguuggugcaagagaccccauugauugccaagagcu

SEQ ID NO: 4495 - RNA, 79 nt, Human
agcugccggguguuggggaaagagucgccugccuccggaccggagugcagaccucugacccuggagucgcucggccgcu

SEQ ID NO: 4496 - RNA, 70 nt, Human
agcugcggggccacccuccgggcagaucgguaauagagcccuccgucuggugggaugcgcacccccugcu

SEQ ID NO: 4497 - RNA, 105 nt, Human
agcuggcuaccgacuccaccuucucccuggaccagcccgguggcacccuggaucugacccugauccgugcccgccuccaggagaaguugucaccucccuacagcu

SEQ ID NO: 4498 - RNA, 78 nt, Human
agcuguacaggcccgggauguaugggaucaccgcccgaagauggcggcucucaaacuccucuccuccgggcuucggcu

SEQ ID NO: 4499 - RNA, 104 nt, Human
agcugucagaguacggcuccugggacgcuuuugcuuauuuuuuguacggcuuuuucgaguuggcuuaggcagaauucuccucugagcgauaaagacgacaugcu

SEQ ID NO: 4500 - RNA, 88 nt, Human
agcuucugaaagccucaaacaucugugagugugcuaagagccgauccuuagguauuuuauacacucuaugcugagucaguuaggaguu

SEQ ID NO: 4501 - RNA, 74 nt, Human
aggaaacagaaaguuugagccuauaagccucuuuaucccaaucaaauggcuaacguccacucuuucuggcuucu

SEQ ID NO: 4502 - RNA, 81 nt, Human
aggaacagacuucauucuuuuucuuaacaaaaaaggcaucuucagugugugauuucaaaagaaagaagauucuggguuccu

SEQ ID NO: 4503 - RNA, 86 nt, Human
aggaacgauucacaggacaaacaaacccaauuuuuaagaaguuuauuugaaacucuuccuggucgaguccagugugaaauguuacu

SEQ ID NO: 4504 - RNA, 86 nt, Human
aggaacgauucacaggacaaacaaacccaauuuuuaagaaguuuauuugaaacucuuccuggucggguccagugugaaauguuacu

SEQ ID NO: 4505 - RNA, 98 nt, Human
aggaagaaagagcuugaggugggagcggcgcugggaggaagggaugggccccgccuuccugggcagccuuuccagccuccugcuggcucucucuuccu

SEQ ID NO: 4506 - RNA, 60 nt, Human
aggacagagccaaacaggaacagaggcugcccaacucccuucuguacugagcucuguuuu

SEQ ID NO: 4507 - RNA, 71 nt, Human
aggacuagagcucaugcugaucaugucggucagggguuugacuggcagaguacggcugcuguuggaguuuu

SEQ ID NO: 4508 - RNA, 63 nt, Human
aggacuagccaggaccggagcgcucgucacuccaauugggugcuccugggucccacugguucu

SEQ ID NO: 4509 - RNA, 93 nt, Human
aggagaaagaggaacaaggagagagggcaaaaccacagaacaguggauucuguuugcccguuuuucuguguaaacucugauauuaacucuccu

SEQ ID NO: 4510 - RNA, 90 nt, Human
aggagacucuuuucccccccaguauguguucuuagugccuuuguugaaaaugaguuggcucuaaguacaaagacuuauuucugaguucuu

SEQ ID NO: 4511 - RNA, 87 nt, Human
aggagcgccauggauuacuacagaaaauaugcagcuaucuuucuggucacauugucgguguuucugcauguucuccauuccgcuccu

SEQ ID NO: 4512 - RNA, 63 nt, Human
aggagcuggcugugagcgcccugggagccauugcuacggcugcccaggccucgcugcugcccu

SEQ ID NO: 4513 - RNA, 76 nt, Human
aggaggcaguccaggcucuuuagcaugguguuggaagcccuuaaugaucugcuacagccugggccuccagccuccu

SEQ ID NO: 4514 - RNA, 86 nt, Human
aggagggaaaggcccaggagggggagaaaggcagacucagccagggaugggugaggguuucccugucccaaagcaagacccaagcu

SEQ ID NO: 4515 - RNA, 119 nt, Human
aggagggcgguauucaggagagugugucagagcccaccagauacauuggaguuuauccaccuaaacuacuaauuacuacaugggcaugaaugcuggcauauugagaaguaccuauucuu

SEQ ID NO: 4516 - RNA, 81 nt, Human
aggaguagagaagggggacaggaguuagggggccccuguguagggguauagggcuccugcaucccucugggaucugagccu

SEQ ID NO: 4517 - RNA, 90 nt, Human
aggagucuugcccuguugcccaggcuggagugcaguggggcgaucuuggcucacugcaaccucugccucccggguucaagcaauucuccu

SEQ ID NO: 4518 - RNA, 78 nt, Human
aggcaaacgagaagaaggaggaacccaaguagcuuuuuggcuucguguccaacccucuugcccuucgccuguuugccu

SEQ ID NO: 4519 - RNA, 68 nt, Human
aggcaaagaaagacuuaagggagcagagggcugucuguugcuaccauuuuuuucaaauucuacugccu

SEQ ID NO: 4520 - RNA, 68 nt, Human
aggcaaagaaagccuuaagggagcagagggcuugucuguugcuaccauuucuucaaauucuacugccu

SEQ ID NO: 4521 - RNA, 104 nt, Human
aggcacacacgcaugguuuucucuuuuauaugcuagauuucaucccugacagcagaaaaugauuggcaaugguuaugacggagaacaugcaauagcgugguccu

SEQ ID NO: 4522 - RNA, 84 nt, Human
aggcagaacggaggguggcgggggacaaacgcgcgggacaauuuucucuccagcugguuaauuuuucuccaauauuuguagccu

SEQ ID NO: 4523 - RNA, 91 nt, Human
aggcagagucucacuuuguugcccaggcuggagugcaguggugcagucuuggcucacugcagccugucuucuggguuaaaacgauucuccu

SEQ ID NO: 4524 - RNA, 131 nt, Human
aggcagcggcauuagaucggaggaaugagauggacagaccugggcugugggcuaggagggcagucagcuggccuaggguagcccgggcuggugucaggguaaggagaggaagggagggaugagggcugauu

SEQ ID NO: 4525 - RNA, 83 nt, Human
aggcaugaaguuugaucgaggcuauauuucuccauacuuuauuaauacaucaaaaggucagaaaugugaauuccaggaugccu

SEQ ID NO: 4526 - RNA, 79 nt, Human
aggccaaauuuccacuuucagcaguuuuauuucagcuguuagcccgaagaaagaagcugcugaaaacagaaguucaccu

SEQ ID NO: 4527 - RNA, 130 nt, Human
aggccagcuuuuugggcugggguugcugagagaugugaugaugaaauguguggccuaccuggcaucuggccccagcuucagcuccauuuacugucuugcuccccacccucacuagccugcauugaggccu

SEQ ID NO: 4528 - RNA, 74 nt, Human
aggccaggcacgguggcucacgucuguaaucauagcacuuugggacuacaggcauaagccaucaugccuggcuu

SEQ ID NO: 4529 - RNA, 80 nt, Human
aggccuccccucuauccuuaucugucuggucgagucauuccgggccgagugggcaccaucaugggacgggcaggaggucu

SEQ ID NO: 4530 - RNA, 68 nt, Human
aggccuccugauaguuggggccaccucuucggacaaagauugugacuucgugcuccuucaggaggccu

SEQ ID NO: 4531 - RNA, 102 nt, Human
aggccucuucccuucagaaacaugccacuuaggucuaguucuccuggggugccaccuggucccagaccucaugacaucucauuuuguugggaucccuggccu

SEQ ID NO: 4532 - RNA, 110 nt, Human
aggccugcaucaccggccgugauuucuccgcuugcagcuucacuccggagcccgcgaaccggcuaccgccccgcugcagcacgaugaugucgcggucugugaguuugucu

SEQ ID NO: 4533 - RNA, 73 nt, Human
cucauaagugugugugggugugagagcacgauggugccuguguucugugaauguguccauaugugucuguaag

SEQ ID NO: 4534 - RNA, 62 nt, Human
cucaucaugaaaacugggaggccgggcaugguggcucaugccuguaaucccagcauuuugag

SEQ ID NO: 4535 - RNA, 77 nt, Human
cucaucgauuuucugguacagaaaaagaucaauccucaagugaugaaggcugggagacucugccaggaaaagaugag

SEQ ID NO: 4536 - RNA, 77 nt, Human
cucaugaugcuguugucuuucacccaaaauuuguagggaagacccuagaaacccuggcaggagaagagugugguggg

SEQ ID NO: 4537 - RNA, 97 nt, Human
cucaugauuccguuucuagguccuaggcccgugccugauccaggauccaagcucccggaagcuggcacugggcccgcccuggguaggcagcagugag

SEQ ID NO: 4538 - RNA, 63 nt, Human
cucaugcagacgcuccgauuucuuggacucuacagagaugagcaucaggauuuuauggaugag

SEQ ID NO: 4539 - RNA, 61 nt, Human
cucauugagccugacuguucugcuccauaaaauaggguaauaaaggucaaacaucagugag

SEQ ID NO: 4540 - RNA, 69 nt, Human
cucauuuuaauccugcagggcugccugccaguggaucuauccagcugcuuccuuguagccaagaaugag

SEQ ID NO: 4541 - RNA, 76 nt, Human
cuccaacgaugccuuuguucugaaaacccccucagccgccuaccuguggguggguacaggagccagcgaggcagag

SEQ ID NO: 4542 - RNA, 65 nt, Human
cuccagcaguguacugggaucauuaggacagccugagucaugaugaccucauuuugcaguugaag

SEQ ID NO: 4543 - RNA, 86 nt, Human
cuccagucccaagcaagccuccaggcccugaguguucugaugccugaaggguagucauaggucccgagguggagucggggguggag

SEQ ID NO: 4544 - RNA, 86 nt, Human
cuccaguuugucaagaguugaaggaggcucuguggccaggugaccuggcugccuuccacuccuuguaccucagucuaaacauggag

SEQ ID NO: 4545 - RNA, 81 nt, Human
cucccagcccagaacuuccagaugcccuggcaccucuagggaccaacugggacucauuauggaagaauggggugagaggag

SEQ ID NO: 4546 - RNA, 70 nt, Human
cucccccagcucugcuggucccggggccacagcgucaggccuguggggguggagguaugaggugggagag

SEQ ID NO: 4547 - RNA, 87 nt, Human
cuccccuuuucuguguucguagcagcuggcacaagcccagcacugggcucugcuccuggugccagugcugccuacugaugugggggg

SEQ ID NO: 4548 - RNA, 72 nt, Human
cucccgcuacacggaggcuaccaguacgagcagcgcucgcugucccccgucgcugccccgccccugcgggag

SEQ ID NO: 4549 - RNA, 75 nt, Human
cucccgcuccggcucccgcucgggaucucgcuccggaucucgcuccgggucccgcagugggucccggagaggaag

SEQ ID NO: 4550 - RNA, 71 nt, Human
cucccucuuuuuugauuuacugguacauuuuuaaaauaauaaaucugccauaaaaugcauuauaucuggag

SEQ ID NO: 4551 - RNA, 84 nt, Human
cuccuaccagaaagccauguucauauuucucagcaaugcuggagcagaaaggaucacagauguggcuuuggauuucuggaggag

SEQ ID NO: 4552 - RNA, 66 nt, Human
cuccucaccgccuggcuaccugaccuugguguugagcuucagguaugccacauagugugucaggag

SEQ ID NO: 4553 - RNA, 81 nt, Human
cuccucaccugcuccuugaaugacagcgccacagaggucacagggcaccgcuggcugaaggggggcguggugcugaaggag

SEQ ID NO: 4554 - RNA, 62 nt, Human
cuccucugcagcugauuggcucuggaguguggccagaagccucucuccugcaauuaaaggag

SEQ ID NO: 4555 - RNA, 93 nt, Human
cuccugcuuuauauaacuucuugaauccagcuaagagauuuauaaacuaauggcauaaaugucuggagccaaccuuggcaguuauagcaggag

SEQ ID NO: 4556 - RNA, 96 nt, Human
cuccugggagguugcgggguggggaugaaaagucccaauccucuaauccugccuuggucuuuugcugccaguccccauccugaagcuaccuagggg

SEQ ID NO: 4557 - RNA, 99 nt, Human
cuccuguaguccuagagcguuucucuugaacccuaauuuuuaggucucaaagagugggcuucagagauaaagagguuuaggcagggacagggcgaggag

SEQ ID NO: 4558 - RNA, 99 nt, Human
cuccuguaguccuagagcguuucucuugaaccuuaauuuuuaggucuuaaagagugggcuucagagauaaagagguuucggcagggacagggcgaggag

SEQ ID NO: 4559 - RNA, 88 nt, Human
cuccugugagcccacauucaacauuuuuugauacauuugauccaucuuugguuucuacagaagaugaagaagauaggcuuagagagag

SEQ ID NO: 4560 - RNA, 79 nt, Human
cuccuuccuccagggaggccucagcaucagugucuguggacguagucucugaagagugcuucagcugauggggaaggag

SEQ ID NO: 4561 - RNA, 97 nt, Human
cucgaaacgccggucucaguggcuauugaguuacccaccaaguuaccccgguuagagcuguuugggguggcucacguuauugcggcaaacuuuggag

SEQ ID NO: 4562 - RNA, 79 nt, Human
cucgagcggcucgagguggugcuggcugaaggcauccgugcgaaggugcuuucgggguccgcugcugcugcucugugag

SEQ ID NO: 4563 - RNA, 78 nt, Human
cucgcuauauggggaagggugucucaaaggcuguugagcacaucaauaaaacuaugugcgccugcccugguuagcaag

SEQ ID NO: 4564 - RNA, 74 nt, Human
cucggaguaaucgccugcauuggggagaagcuagaugaaagggaagcuggcaucacugagaagguguuuucgag

SEQ ID NO: 4565 - RNA, 93 nt, Human
cucggccccugagcuccaggccgugcgcauguuugcugacuaccucgcccacgagaagucggagggacagcaucguggccgagcuggaccgag

SEQ ID NO: 4566 - RNA, 91 nt, Human
cucggcccugagcuccaggccgugcgcauguuugcugacuaccucgcccacgagagucggagggacagcaucguggccgagcuggaccgag

SEQ ID NO: 4567 - RNA, 89 nt, Human
cucggccuccccuucagcagcuuugaccacucuaaagcccacuacuaucgcuaugaugagcaguugaaccugugccuggagcggcugag

SEQ ID NO: 4568 - RNA, 65 nt, Human
cucggcggccuggcgccggccgucgcuguacggugagccccagggaggcggaucugggccccgag

SEQ ID NO: 4569 - RNA, 62 nt, Human
cucggggaggccgccgggccggccuccgagacuccggcgggcaccgagucgccucacucgag

SEQ ID NO: 4570 - RNA, 72 nt, Human
cucgggugguggcgcaugccuguaaucccagcuacucaggaggcugaggcaggagaaucgcuuaaacccggg

SEQ ID NO: 4571 - RNA, 63 nt, Human
cucgucgaucucguucuccaugucuuccgugugcuggauacacuggcagagcucacagaugag

SEQ ID NO: 4572 - RNA, 116 nt, Human
cucguggcugcugcugcuccugcucucccucucccuccuccaggccacggauuucaugucccugugacugguggggcccauggaggagacaggaagccucaaguuccagugcagag

SEQ ID NO: 4573 - RNA, 71 nt, Human
cucuaacacucaucuucaaaagacugggacugcugagauguccucuauucuugaagagcguauucuuggag

SEQ ID NO: 4574 - RNA, 91 nt, Human
cucuagcgugauagucucuucuggguggcugcauccucaggcaggcuccccuccuagucccacauccaggaugacaccuuaacaguuaggg

SEQ ID NO: 4575 - RNA, 72 nt, Human
cucuaugccaugguggugguucucucgaggggcucaagauccugagggaggggcaccccaaggcagcaugag

SEQ ID NO: 4576 - RNA, 73 nt, Human
cucucaagcuccuuagaugcugggcagaagugggaugaguggcccaagaccgagaucccuaagguucugagag

SEQ ID NO: 4577 - RNA, 103 nt, Human
cucucaccccucuagccuuaaauccagaaucuagacugaauauggacugaaugggucagauuuggggaaauguguuucuggggacagcugagggaccagagag

SEQ ID NO: 4578 - RNA, 77 nt, Human
cucucauauuggcacaucugcuguccauuggggguucucaguuuccucccccagacagcccuaccugugccagagag

SEQ ID NO: 4579 - RNA, 85 nt, Human
cucugaaacccuccuccacagcugcagcccauccucccggcucccuccuagucuguccugcguccucuguccccggguuucagag

SEQ ID NO: 4580 - RNA, 66 nt, Human
cucugagccuuauagauuacauauccuuagcuaaaaacugcugcauuuggagucuaaggaaaggag

SEQ ID NO: 4581 - RNA, 69 nt, Human
cucugaggcucauuuugcaguuguugaaauuguccccgcaguuuucaaucaugucugaaccaaucagag

SEQ ID NO: 4582 - RNA, 95 nt, Human
cucugcacagcagcccagcagggauguccucucuagagaugguuuaucaaggguaccccaugagagggcagcuccugaugcagcugccggaagag

SEQ ID NO: 4583 - RNA, 67 nt, Human
cucuggggacuggaaugcaggcaguggaagccccagauugacuuaaccuguugacagaucuucagag

SEQ ID NO: 4584 - RNA, 75 nt, Human
cucuggguuacuggcugaguucugcccuguguggcuuucugcugugccagggcugcacugaguucaaaugcagag

SEQ ID NO: 4585 - RNA, 65 nt, Human
cucugucacucaugccuugccuaauuguucacaaugguggaaagcuucauguaauaugaucaggg

SEQ ID NO: 4586 - RNA, 79 nt, Human
cucugucuccuauagaugcagacagugaggauggagacugggucaucuggaugucacaucuggcaccugggaaacagag

SEQ ID NO: 4587 - RNA, 131 nt, Human
cucugugaugcuuggggaccggcuccucggucacaccccaguccugcucugaagguugccguuuuccaaacagaaggaugguagcuagaggggagauagcaagauucuggagucuggaaagccuucacuug

SEQ ID NO: 4588 - RNA, 90 nt, Human
cucuguuguucaccuuuugcuuuuugcacuguuuguucucuuaucuggauuuugagcuuagugcuaggacugagaggcugcaccauaggg

SEQ ID NO: 4589 - RNA, 79 nt, Human
cucuuacucccuuuuccccucaaaggagaacuguguuuaugaaacuguaguuuugccuuuggaugaaagggcauuugag

SEQ ID NO: 4590 - RNA, 111 nt, Human
cucuuauauauguguguguguguguguguguguauacauguauauauauauacacguguauauacacacacacauauuuuucucucuccuuaaaaauacagaauguaagag

SEQ ID NO: 4591 - RNA, 69 nt, Human
cucuucaucaguacaccacugugagccgacugaaaugauaaucacuugaagcuaucauuggugggagag

SEQ ID NO: 4592 - RNA, 78 nt, Human
cucuucgucacucuuaugucucucuccuuuucugugucuguguguggggagagagagagagagaaagagagagaggag

SEQ ID NO: 4593 - RNA, 96 nt, Human
cucuugacagaucuuggucucaacaauaaauucguuggggaagugucuaaucuuccagcauuuaucaauggcacguuuguugaaacccagcaagag

SEQ ID NO: 4594 - RNA, 85 nt, Human
cucuugaccagagggucucaaaugagggacauuuuaccugccaggggacauuuccaauguuuggggacacuuuugguuaucagag

SEQ ID NO: 4595 - RNA, 82 nt, Human
cucuugaccagagguucucaaaugagggacauuuuaccugccggggacauuuccaauguuuggggacacuuuugguuaucag

SEQ ID NO: 4596 - RNA, 97 nt, Human
cucuugcccaggcuggaguucagugguaugaucacaacucuccuaagccucaaacaccugggaucaagugauccucuggcuucagccucccaaguag

SEQ ID NO: 4597 - RNA, 86 nt, Human
cucuuggcugcccuuaugaagggaagaucuccccagcuaaaguagcugaggucaccaagaaguucuacucaaugggcugcuacgag

SEQ ID NO: 4598 - RNA, 73 nt, Human
cucuuguugcccaggcuggagugcaauggugcgaucuuggcucacugcaaccuccgccucccggguucaagag

SEQ ID NO: 4599 - RNA, 74 nt, Human
cucuuucaguggaaaaccgauggggaaccuggcccccaaggcuggucccccaggaacgggcagcccuucaagag

SEQ ID NO: 4600 - RNA, 64 nt, Human
cucuuucauccuguagucaggcagauaggccacaaaggugcugccaaggaccaggaugauggag

SEQ ID NO: 4601 - RNA, 110 nt, Human
cucuuugagaugacugguauugaauggagcagucuuugaaaggcaccaacccuuccuaacugaugguggucucuugaaagaggcucuuccaaauuugucuucugaaagug

SEQ ID NO: 4602 - RNA, 67 nt, Human
cugaacccaggaguuuaggguugcugugagcauugaucaugccacugcacuccagccugggugacag

SEQ ID NO: 4603 - RNA, 83 nt, Human
cugaaccuugagauccuuucacuagaauacacagggaaaagagaaaaagcuugcccuugugaaaggugaguuucauuguuuag

SEQ ID NO: 4604 - RNA, 84 nt, Human
cugaacuugggccagccacucaucugacuuguccuucguucccuaaccugucaaguaaaacggaagagggauggaccgaaccag

SEQ ID NO: 4605 - RNA, 116 nt, Human
cugaaggguggagagggccucucaugcaggcaugugugagcagcugcaggugugugagcaaaugugcaucacuggggaacaggugucuguggaugagggaggaagugagggugagg

SEQ ID NO: 4606 - RNA, 78 nt, Human
cugaaguuuccuguuuaaaaacugguaauaccuuuaagaagauuuuuuaaagacuagaaaaaguucggcugauuucag

SEQ ID NO: 4607 - RNA, 92 nt, Human
cugaaucaugcaguguauacaggaugucagugaagaggucuggcaggaaugccucacucucuuccuacugacugguacauguuaugaugcag

SEQ ID NO: 4608 - RNA, 74 nt, Human
cugaauccuuccauuucuucugcacaucuacuugcuuaaauugugggcaaaagagaaaaagaaggauugaucag

SEQ ID NO: 4609 - RNA, 72 nt, Human
cugaaugaccugcagucagggcccagaguugggacucuauacuacccugggcucuggucuguagguuuguag

SEQ ID NO: 4610 - RNA, 85 nt, Human
cugaauucuuacuggguuggugaagauuccacauaccaaauuuuuugagguuauccucauugauccauuccauaagagcuaucag

SEQ ID NO: 4611 - RNA, 75 nt, Human
cugacgaagccauugaaacagaugaucugaccauuaagcuggugaucaaggcacuccuggaagugguucagucag

SEQ ID NO: 4612 - RNA, 123 nt, Human
cugagacuggccugcaugaauacagggugugcgugaaugaaacugcccacaugaacuuuaugugcuacgauuuaacugcagccuugaacacacacaaaaauauucuuaagggcucagauuuag

SEQ ID NO: 4613 - RNA, 88 nt, Human
cugagcggcgggaccggaggggaugaggaggaagaguggcucuauggcgguacgaaacuuccugucucugucucucggguucucucag

SEQ ID NO: 4614 - RNA, 90 nt, Human
cugagcuggauggaaagacagcaaagauguacagggguggcuuuggacuagcucaucucauggcucuggggcuggguccauggcuggcag

SEQ ID NO: 4615 - RNA, 105 nt, Human
cugaggcaggagaaauugcuugaacccaggagguagagguugcagugagucaagaucaugccauugcacuccaaccugggcgacaagagcaaaacucugucucag

SEQ ID NO: 4616 - RNA, 61 nt, Human
cugagggaaguauaccuguccugccagccuuggucucuggcagggaagguccuuccaacag

SEQ ID NO: 4617 - RNA, 74 nt, Human
cugaguagcagugaacucaggagcgggacagguccauucacccugaaauuccuccuuggucacugccuucucag

SEQ ID NO: 4618 - RNA, 61 nt, Human
cugauauaagguccagguugauucacuccaaaggguguuaucuuacgaggacagucauuag

SEQ ID NO: 4619 - RNA, 84 nt, Human
cugaugaucauuuuagauagguaaggugaucuccauguaagggagggccaacaucuaccuuagaagcuaaaugugucacaucag

SEQ ID NO: 4620 - RNA, 95 nt, Human
cugauuuaaaaauauggucuuguuuuauaugauuaaaugguuuguuuucauagaugauauguuacucauuguaaagaccacauauuuuuauucag

SEQ ID NO: 4621 - RNA, 85 nt, Human
cugcacaaagaccccuugcugccagggccaggcaccggccuagcuccuugccugccugccugaggcagccguggaaucagggcag

SEQ ID NO: 4622 - RNA, 110 nt, Human
cugcaccgccagccucagcugucuuggagcagauguguauaguuagagauggggaccuuuucacuguaaauacugcucacauguuccuaggcugacuuuacuaugugcag

SEQ ID NO: 4623 - RNA, 95 nt, Human
cugcacuggcuacgagagacgaauggaugauccugguggaacggggcuccggauugugauccaugggcgagauccaucgacugucgggugugcag

SEQ ID NO: 4624 - RNA, 90 nt, Human
cugcagccaaguggaggugacugggugaugaauacaauguggaaagcauugauggucagccaggugccuucaccugcuauuuggaugcag

SEQ ID NO: 4625 - RNA, 98 nt, Human
cugcagcuccaauaaaauugccgagaugauguuuggguuugugcuggacauuccugagaggagccagaggugagucuugauuuuguuggggagagcag

SEQ ID NO: 4626 - RNA, 77 nt, Human
cugcagggcugcugccucaacauuuuagguucugauagcuguauucucaguccuggagugacagguguagccugcag

SEQ ID NO: 4627 - RNA, 78 nt, Human
cugcaguggugauguguugucacuucaggacaccccacuaccugaauugcagcaguguugcgaaucaucacucugcag

SEQ ID NO: 4628 - RNA, 91 nt, Human
cugcaucugccuccugcggggccuggacagggagggggccagaccacagcggacccuccuccggucauugugcgggccucugaggcugugg

SEQ ID NO: 4629 - RNA, 81 nt, Human
cugccauugcccacuuacuacacccugcccaaugccaccguggcuccugaaacgcgggcaguaaucaaguggaugaagcgg

SEQ ID NO: 4630 - RNA, 69 nt, Human
cugcccagcuggcuaaaguucaagaaaauacuauugcuucuuuaagaaaugcugcuagucauggugcag

SEQ ID NO: 4631 - RNA, 77 nt, Human
cugcccuagccaggggcacuggccagccugguuccaggcccacauggccuagucagugccucgaggagcugguucag

SEQ ID NO: 4632 - RNA, 92 nt, Human
cugcccuucgagaugugcccuucucagcccuguacugguucaacuaugagcuggugaagagcuggcucaauggguucaggccgaaggagcag

SEQ ID NO: 4633 - RNA, 82 nt, Human
cugccgcaggugccggagaaccuccugggacagcgagaagcugcugucaucugcagguuccugguaggcaaugaggcggcag

SEQ ID NO: 4634 - RNA, 71 nt, Human
cugccggcacugggcagcugccccacacaaugggaagcagugguggggcugggccaguccaggagccgcag

SEQ ID NO: 4635 - RNA, 81 nt, Human
cugccgugcccggaauuccaccagcucucggaagaagacucugaagucgaagaugggggugucacaguuccgaggcagcag

SEQ ID NO: 4636 - RNA, 69 nt, Human
cugccuagacccuccauugcagacaguucccaaaggaggcuggaagugcaaaugguguguuuggugcag

SEQ ID NO: 4637 - RNA, 84 nt, Human
cugccuaggauacugauggucgugaagauguucaaugauggaucuuugaacagcuucagcguggccuuaaguuucuaaggacag

SEQ ID NO: 4638 - RNA, 72 nt, Human
cugccucugaaauagcugcugcuucgagauccucccuuuuuaaagcacuuucuaaagcccucaggauggcgg

SEQ ID NO: 4639 - RNA, 86 nt, Human
cugccucuggaguccuagagacccggauuuacucagcuaggagagaggauggaucacagggucuaaggguggccauucagagguag

SEQ ID NO: 4640 - RNA, 71 nt, Human
cugccucuuuccuucccuggaagagauuuuaugggaucgcuuccugauagaagaugggaaggagagggcag

SEQ ID NO: 4641 - RNA, 70 nt, Human
cugccuguagaggaugccgcacagagauugacuugauucauagagacaauucacuccaucccuauggcag

SEQ ID NO: 4642 - RNA, 79 nt, Human
cugccuuucauggcuucuucugggccaaaucccccccugaaucagaaaauaaggagcagcucgaggccaggaggcgcag

SEQ ID NO: 4643 - RNA, 70 nt, Human
cugccuuucugugucugguucagagcucuuccuucugggcauguuuucuggacuacaugcacaugggcag

SEQ ID NO: 4644 - RNA, 60 nt, Human
cugcgccggcugcccguugcuagcuauggcaaaugguggcggcggcggcggcggcagcag

SEQ ID NO: 4645 - RNA, 61 nt, Human
cugcgcggggggguacaaauuauggcggacaccacuuccuccaaauaaauuccccgcgcgg

SEQ ID NO: 4646 - RNA, 109 nt, Human
cugcggagcccgcgucgcagcagcccggacaggaagauuggucuggauguggguccggucuuacagucgcgggccaggaugagggcagguugcgacagcgcgcacccgg

SEQ ID NO: 4647 - RNA, 83 nt, Human
cugcggccgggcggcucggcggggccagcagcaggagcaguaagcucagcgccccgcgcggcccugcaagggaagcgccgcag

SEQ ID NO: 4648 - RNA, 85 nt, Human
cugcuacgcuccagccagccccuaacugguccccagaagcggcgcugcuacagggaccaggagcugcugcgaacugcgcuggcgg

SEQ ID NO: 4649 - RNA, 99 nt, Human
cugcuccaaggccuggccacaugcagacaggaggaagcugagcucgacauuaggccucaaggcugccaucugucuuguagggccuggccuugugggcag

SEQ ID NO: 4650 - RNA, 74 nt, Human
cugcuccagcagcuggugcugcaccagcaggagguccugcccccuccacugcugcugcuccagcugaggagaag

SEQ ID NO: 4651 - RNA, 68 nt, Human
cugcucucacaguggccuguaacaauuucuucugggagaacaguugagcagacagccacauugggcag

SEQ ID NO: 4652 - RNA, 60 nt, Human
cugcucugcuucucugcggcgccgccagacauggucgguucgcuggagagaggcgagcgg

SEQ ID NO: 4653 - RNA, 130 nt, Human
cugcugaaagucuacagucugugaauauaccaauuccccuuuacaacugaugcagaucauuaugaaauacuggaaggcauacccuacaauuuaggaauugguguggcugccacugcuaugcucucaauug

SEQ ID NO: 4654 - RNA, 75 nt, Human
cugcugugucuuuccaggugcugaaagagaaaacggaauuucuugcauagacagcugaagaguccuguagagcag

SEQ ID NO: 4655 - RNA, 92 nt, Human
cugcuuuccugaaaaccaugcugcacuuccacaugaaguucucucugacguugagcuugauggaaaaaggaugcagaagucaggaauagcag

SEQ ID NO: 4656 - RNA, 68 nt, Human
cuggaacccgccccgucgggggaccccgaggcuccgccuccaggcccccuccacucggccuucuccag

SEQ ID NO: 4657 - RNA, 83 nt, Human
cuggaagaaggaagcugugauagguuaugugaaagagaugucuccucaucucuaauggcuuaccgagacagcucucgauucag

SEQ ID NO: 4658 - RNA, 64 nt, Human
cuggaagccgccuccgugucguccaagggcuuacccagcccuuacaacaugucuucggcuccgg

SEQ ID NO: 4659 - RNA, 76 nt, Human
cuggagaccucggcucaagucuuugcccugcugccgacgcauugugucaccuugggcaaggacuucgcaucuccag

SEQ ID NO: 4660 - RNA, 77 nt, Human
cuggagaguuccauucacuuccugaaacgugcaccuguuucaggugcauguuuauucagugugcauggauauuuaag

SEQ ID NO: 4661 - RNA, 85 nt, Human
cuggaggagaagagguucugcuggaacaagcugguguagaugcaagugaaagcuuugaagauguaggacacucuucugaugccag

SEQ ID NO: 4662 - RNA, 63 nt, Human
cuggaggagggacgggucugcagguuccaaugggugacagccugacaucugucccuucaacgg

SEQ ID NO: 4663 - RNA, 78 nt, Human
cuggagggcaagucuugcauccacugcuuugcuggcaacccgacugguaagcuucuggaaggcaaggcuugcauccag

SEQ ID NO: 4664 - RNA, 97 nt, Human
cuggagugauguuagcagacccagcuuagaguucuucuuucuuucuuaagcccuuugcucugggaggaagaucuccagcuucagcucacacucacag

SEQ ID NO: 4665 - RNA, 112 nt, Human
cuggaugagagaccuugauuuccuguucacuauuggcuggucuggaccuuggugccugacccaaagcacacagaucagaacuccuugggaaagggagucagucccucucugg

SEQ ID NO: 4666 - RNA, 74 nt, Human
cuggaugugcugcagaugcaucccaauaaucaggguggccucaaaacccugucuguccucuguagcacuuuuag

SEQ ID NO: 4667 - RNA, 106 nt, Human
cuggauuccccaaagcucacaguuuggcacugaaucauauacaaucucguaguuuggauggcugugugugacugcagacugcuagacagcagggcccacaucacag

SEQ ID NO: 4668 - RNA, 65 nt, Human
cuggauucggaaugugcugauuuccauuggacucaaguugaucucacuuauauucugagugccgg

SEQ ID NO: 4669 - RNA, 79 nt, Human
cuggcagcgcuucaagucaugguccccaucaugcaggaucucaggcuccacgaugggcacaaugccauucugcuggcag

SEQ ID NO: 4670 - RNA, 114 nt, Human
cuggcagcugcaugguacauaaagucuccugauaggcugagucuguugcuagggggaauuagcaugaauuuuuccacacacagacucaguggcugaaugauaaaagcugacugg

SEQ ID NO: 4671 - RNA, 76 nt, Human
cuggccgcagggugauauacaaguauggcaaacugucaaagcuggcagagacgcucuaugacaccaccaaggucag

SEQ ID NO: 4672 - RNA, 68 nt, Human
cuggccuccaucuaaaggcgcugcuugauucgugaggauacaacgaugcgagacaaggugguggccag

SEQ ID NO: 4673 - RNA, 77 nt, Human
cugggacccuguacacguauccugaaaacuggagggccuucaaggcucucaucgcugcucaguacagcggggcucag

SEQ ID NO: 4674 - RNA, 82 nt, Human
cugggaggcagagguugcagugaucaggaauugugccacugcacuccaaccugagugacagagcaacacucugucuuaaaag

SEQ ID NO: 4675 - RNA, 94 nt, Human
cugggagggagagaacuuucuggggguagggugcccuccaucugaaacaggccaggugagcaucaugcauaaggccuccauucuguccgcucag

SEQ ID NO: 4676 - RNA, 82 nt, Human
cugggagugcugggggacagguaccccccggugguccuauggcaggaugagaagggagggacuuggcucccccagagcccgg

SEQ ID NO: 4677 - RNA, 69 nt, Human
cugggauggggaccgcggaaguucccaccgaugcggccggcggggcccagccuugguccccagcuccgg

SEQ ID NO: 4678 - RNA, 105 nt, Human
cugggauuacaggcaccugcugccaagucuggcuaauuuuuguauuuuuaauagagacgggguuucgcuauguuggccaggcuggucucgaacuccugaucucag

SEQ ID NO: 4679 - RNA, 94 nt, Human
cugggcacguaggccucccgcagugagaugaggaucgggucggcaucccgcccgcucacccacuccucagccuccagggcugccucgggcccgg

SEQ ID NO: 4680 - RNA, 73 nt, Human
cugggcaugaugguuggcgccuauagucccagcuacuugggaggcugaggcaggagacuggcaugaaccccgg

SEQ ID NO: 4681 - RNA, 71 nt, Human
cugggcaugguggcgcgcgccugcaucucagcuacucaagaggcugaggcaggagaaucacuugaacccgg

SEQ ID NO: 4682 - RNA, 88 nt, Human
cugggcccgggagacaacuuggcgucaccccucagcggucgccacucucuucucuguuguuggguccgcaucguauucccggaaucag

SEQ ID NO: 4683 - RNA, 64 nt, Human
cuggggacggggccuuccgcgagucucccaccucucgggggacugcagggagaggcgucuccag

SEQ ID NO: 4684 - RNA, 71 nt, Human
cuggggaggugugcucugcucucaaccucugcgagucucuccagaagcaccuagcagagcugaaucaccag

SEQ ID NO: 4685 - RNA, 78 nt, Human
cuggggcguuuauggcaagucacuuugacagacauuauuguggcaaauguugucugacuuacuguuucaacaaaccag

SEQ ID NO: 4686 - RNA, 75 nt, Human
cuggggcuguuaaauuacauuuuauuggcauaagguugcacugcaaucugccaguaucacauaaugauaauccag

SEQ ID NO: 4687 - RNA, 80 nt, Human
cugggggaaugcgguggcuuccaggguaaccgucugacccugaacuucagcacguuaagcggccgggggucaucuaacag

SEQ ID NO: 4688 - RNA, 78 nt, Human
cugggguguauauggcaagucacuuugacagacauuauaguggcaaauguugucugacuuacuguuucaacaaaccag

SEQ ID NO: 4689 - RNA, 75 nt, Human
cugggguguuuauggcaagucacuugacagacauuauguggcaaugucgucugacuuacuguuucaacaaaccag

SEQ ID NO: 4690 - RNA, 78 nt, Human
cugggguguuuauggcaagucacuuugacagacauuaucguggcaaaugcugucugacuuacugguucaacaaaccag

SEQ ID NO: 4691 - RNA, 78 nt, Human
cugggguguuuauggcaagucacuuugacagacauuaucguggcaaauguugucugacuuacuguuucaacaaaccag

SEQ ID NO: 4692 - RNA, 81 nt, Human
cugggguguuuauggcaagucacuuugacagacauuaugguggcaaaauguggucugacuuacuuguuucaaacaaaccag

SEQ ID NO: 4693 - RNA, 77 nt, Human
cugggguguuuauggcaagucacuuugacagacauuaugguggcaaugucgucugacuuacuguuucaacaaaccag

SEQ ID NO: 4694 - RNA, 77 nt, Human
cugggguguuuauggcaagucacuuugacagacauuauguggcaaauguugucugacuuacuguuucaacaaaccag

SEQ ID NO: 4695 - RNA, 78 nt, Human
cugggguguuuauggcaagucacuuugacagacauuauuguggcaaaugucgucugacuuacuguuucaacaaaccag

SEQ ID NO: 4696 - RNA, 78 nt, Human
cugggguguuuauggcaagucacuuugacagacauuauuguggcaaauguggucugacuuacuguuucaacaaaccag

SEQ ID NO: 4697 - RNA, 77 nt, Human
cugggguguuuauggcaagucacuuugacagacauuauuguggcaaaugugucugacuuacuguuucaacaaaccag

SEQ ID NO: 4698 - RNA, 78 nt, Human
cugggguguuuauggcaagucacuuugacagacauuauuguggcaaauguuguccgacuuacuguuucaacaaaccag

SEQ ID NO: 4699 - RNA, 81 nt, Human
cugggguguuuauggcaagucacuuugacagacauuauuguggcaaauguuguccugacuuaccuguuuccaacaaaccag

SEQ ID NO: 4700 - RNA, 78 nt, Human
cugggguguuuauggcaagucacuuugacagacauuauuguggcuaauguugucugacuuacuguuucaacaaaccag

SEQ ID NO: 4701 - RNA, 80 nt, Human
cuggguaaacuaaugguuugcguaucacacaauuacacuacaaucugauaggagugguaaaaccagccaauggaauccag

SEQ ID NO: 4702 - RNA, 74 nt, Human
cuggguaucaccagcggaggcugcagagcagcaaugauugcugccuguuguuuccucuggaagcugcgacccag

SEQ ID NO: 4703 - RNA, 72 nt, Human
cuggguucaagccauccucccaccucagccucccaaaaugcugggauuacaggcaugagccacuguacccag

SEQ ID NO: 4704 - RNA, 79 nt, Human
cugguaaccuggcguccgguggggccgcuggggccaccucccuuugcuuugucuacccgcuggacuuugcuaggaccag

SEQ ID NO: 4705 - RNA, 90 nt, Human
cugguacuccucauggggcuugaccauuaucacacagguggggcgcuuggagcugcgcugcacccaggucccgucuuagaggggauauag

SEQ ID NO: 4706 - RNA, 68 nt, Human
cugguagcauucaguguaccauaccuauguggaaagaacuccguaggggacacaugaggugcuggcag

SEQ ID NO: 4707 - RNA, 72 nt, Human
cugguccacgugggcuuguuagcaggcagaggaacccugcuuuccaaaaacugauauaguccagagucacgg

SEQ ID NO: 4708 - RNA, 60 nt, Human
cuggucuccugugaagaacauguggaucucuucccgaaggaaaaggucccaggagaccag

SEQ ID NO: 4709 - RNA, 63 nt, Human
cuggugacggggcccugggcuggggcugucccacacuggacccagcucucccccugcagccag

SEQ ID NO: 4710 - RNA, 83 nt, Human
cuggugcaucaguuguucccggcgcaggcccccguugaucguggcgcuggugcugcugacggagcugcugguucugcugccag

SEQ ID NO: 4711 - RNA, 79 nt, Human
cuggugcucccgaccccugguaggcccauccuccccgugcagacaggggagcaggcgccagcuaagaggagcaguccag

SEQ ID NO: 4712 - RNA, 66 nt, Human
cugguuaacuucuugagcuauuucguggaacuuggaacacagccugccacccagugaaguguccag

SEQ ID NO: 4713 - RNA, 94 nt, Human
cugguuauuguauauacugugucucuaaaagcugacuggucucucccaccagcucacuuucuacuugagacauaccauauugcagugaggcuag

SEQ ID NO: 4714 - RNA, 84 nt, Human
cuguacaaagcagccuuggaccaggagggaaaaccccaaggcucugcagccucccugcuccccuccguuuaaggcuguggucag

SEQ ID NO: 4715 - RNA, 66 nt, Human
cuguacggccccaccaacuuugcccccguggucacccacguggccaggaaugcagcggccgugcag

SEQ ID NO: 4716 - RNA, 77 nt, Human
cuguacuguauuuauguugcuauggggcaaaagagauccacuguugcccaguugggugaagagacuuacagaugcag

SEQ ID NO: 4717 - RNA, 67 nt, Human
cuguagcugguucuguaaagguugguggagaggcagguccaucugucacacuacccugccacuacag

SEQ ID NO: 4718 - RNA, 78 nt, Human
cuguaggaauugugugcauuccauucacacaguauuucuuuagggaugcugugaugauuugaauuacaaauccuacag

SEQ ID NO: 4719 - RNA, 74 nt, Human
cuguaucgauaugguuccuuuuccgucaccacuggacauuguccaggguauugaaagugccugagauccugcag

SEQ ID NO: 4720 - RNA, 84 nt, Human
cugucacauucaggggcuuccccucacugugcugcaccacacugccaauguuaugcagugacuggaaguucuggguguucacag

SEQ ID NO: 4721 - RNA, 75 nt, Human
cugucacccagagucuaggcuggagugcuauggcacgaucauagcucauugcagccucgaacuccuggguucaag

SEQ ID NO: 4722 - RNA, 69 nt, Human
cugucagggcugauggugaaggggucagcacgcggauguugaucuuuucuuucuucagcaguucggcag

SEQ ID NO: 4723 - RNA, 93 nt, Human
cugucauucucuugcuccuuacuugaaauacaaauauugggaaugucacagacaucaagcaacuacugucaagugggaggagagaaugagcag

SEQ ID NO: 4724 - RNA, 77 nt, Human
cuguccaaggccaggaggaauuggaaagaagaugguuucuugaaaucucucuuccauacuucuuuggucuuuugcag

SEQ ID NO: 4725 - RNA, 84 nt, Human
cugucuacugguccaaauagaccaugucaguucacccccugguuugugucuauggguggcugugguauaugggaaaaguagcgg

SEQ ID NO: 4726 - RNA, 86 nt, Human
cugucuuugcccggggaagguauccuccgaugacgagcuguccgacaguacccggaugaaguugucggaguccccaucggaggcag

SEQ ID NO: 4727 - RNA, 73 nt, Human
cugugaagcaugugcugguggucauugguaacagucauguuugucaacaaugucaguccagccagcugcacag

SEQ ID NO: 4728 - RNA, 82 nt, Human
cugugaguuauaugugaugaaaaaguauagcuuucuugaauucaaauaagcaauggcaaagaucacauuuagaauuugacag

SEQ ID NO: 4729 - RNA, 76 nt, Human
cugugaugaauaccuggaccaaacaaaugggauuuccccucauuuauguggaagcugaacagguagaagaugacag

SEQ ID NO: 4730 - RNA, 107 nt, Human
cugugauucauguuucauuaguuaggccaugggacuucugaguacaucacaauauuuuggauacacauagagauuguuccacugagaaaugaaaucaaugguuaggg

SEQ ID NO: 4731 - RNA, 109 nt, Human
cugugcaccucgugguaaaacucuuugggguucgccagcuguagcucauauuucauguuggggucaugccgaacacccaugaaguuguaguuccacgaggacugggcag

SEQ ID NO: 4732 - RNA, 109 nt, Human
cugugcaccucgugguagaacucuuugggguucgccagcuguagcucauauuucauguuggggucaugccgaacacccaugaaguuguaguuccacgaggacugggcag

SEQ ID NO: 4733 - RNA, 86 nt, Human
cugugcaucagccuguagguucuuccucuacccuuccgaagaugccaguauugaggaaagaaaaacugcaggaucugaugacucag

SEQ ID NO: 4734 - RNA, 73 nt, Human
cugugcccugacccuacaagaugccaagagaagaugcucacuucaucuaugguuaccccaagaaggggcacgg

SEQ ID NO: 4735 - RNA, 74 nt, Human
cugugccuuguuuuuuaaaagauaagaugcuagaaauucaaugggauuugguggucuuuccuuugcaagcacag

SEQ ID NO: 4736 - RNA, 89 nt, Human
cugugcucacucugguuuucugcucagggucugaagcagcugcugucucccuccucugcccccauccccuggcucuccccugggcacag

SEQ ID NO: 4737 - RNA, 89 nt, Human
cugugcucccugugcacucucagaccccaccucuucguugucauagagugugaccaugcgcacgugaggcucuguggccagggagccag

SEQ ID NO: 4738 - RNA, 83 nt, Human
cugugcucuugauaacagaguguuugagggacaacuuucacauuugaguuuuuccaaaauuaaagguuguagaagagucacag

SEQ ID NO: 4739 - RNA, 67 nt, Human
cugugcuggguccuguacccaagagguccaggaucgggucugguccucgggugccuuuccaaaacag

SEQ ID NO: 4740 - RNA, 92 nt, Human
cuguggaccuuugggacacaagguggaccuguacugauagagaaacacacucucuaagaagugcuuacucacccuuuuccaaaggagcacag

SEQ ID NO: 4741 - RNA, 74 nt, Human
cuguggauaaugguacuucagccuggggcaagcccauagacaguggucccagcuggggagaaccauuacugcag

SEQ ID NO: 4742 - RNA, 61 nt, Human
cuguggcaggggaggacagaacuuugauccuuaccucccaaccucugucuacucaccacag

SEQ ID NO: 4743 - RNA, 71 nt, Human
cuguggccuaccaggugaauauuggcuuggaaaugauaaaauuagccagcuuaccaggaugggacccacag

SEQ ID NO: 4744 - RNA, 74 nt, Human
cuguggcucaugccuguaauccuagcacuuugggaugccuaggugaguggauugccggagcucaggaguacaag

SEQ ID NO: 4745 - RNA, 93 nt, Human
cugugggccagaaagcaggcaccagggcugaccucaaggccguaucagagggccaagcagaguucuuuuggauaccugcuuuucaucccacag

SEQ ID NO: 4746 - RNA, 81 nt, Human
cugugggcucuggcauauauuagcugugugacugugggugagucacuucacuucauggaggcucaguuuccucgucuguag

SEQ ID NO: 4747 - RNA, 65 nt, Human
cuguggggacaggaugucuggguccccaggcuuugacuguggggacaggugucugggucccccag

SEQ ID NO: 4748 - RNA, 79 nt, Human
cuguggugggacggccaaaagacaggcggggggccuacacuccaaagcuugagaaggaaauggccgcaauuuaccgaag

SEQ ID NO: 4749 - RNA, 78 nt, Human
cuguguaauuuuuggccuaaauagcccugugaaguagauauuauuccaacuuuacagguuagaaaauuugaggcacag

SEQ ID NO: 4750 - RNA, 74 nt, Human
cuguguccagcccuugcagagagcuuuguccucugacaucagcuaccacacaggcucauucucaacuggcacag

SEQ ID NO: 4751 - RNA, 114 nt, Human
cugugucugaagaucaugcugaccccacaaacggaugggccugggggccacuuugcacaggguucuccagagcccugcccauccugccuccaccacuuccuguuuuucccacag

SEQ ID NO: 4752 - RNA, 82 nt, Human
cugugugugccgugcgaggacgcaacgucgagaacaugaagaucuugcgucuaaugcugcuccacaucaaauaccuguacgg

SEQ ID NO: 4753 - RNA, 114 nt, Human
cuguuuccuauaggugcugucagaucagguuccugauuggaguucucuuaucugcucugguuuggagggcugccccauucgggaaucuguuuuguuuugcucaaauacacucag

SEQ ID NO: 4754 - RNA, 89 nt, Human
cuguuuuuguaucuuuaugcuguauuuuaacacuuuguauuacuuagguuauuuugcuuugguuaaaaauggcucaaguagaaaagcag

SEQ ID NO: 4755 - RNA, 76 nt, Human
cuuaaacuuccuccaacuuucuucugcuacaagaauagaccagauuauguuagugaagaagaggaggaugaugaag

SEQ ID NO: 4756 - RNA, 79 nt, Human
cuuaauuauuacgggcacugccuuggagcgauguuaaaaaacauugaugaugcaguucuuucaacagguauuuauugag

SEQ ID NO: 4757 - RNA, 87 nt, Human
cuuauggcucugaggccaucggcugucucugcauuucacuggcuguggaggagagacuccuaggauggcugcugucugagccaugag

SEQ ID NO: 4758 - RNA, 71 nt, Human
cuuauuaggcaaguuaggugcacugaaucuaaccuuuaagguugacaugggcucaaacuuggccuaaaaag

SEQ ID NO: 4759 - RNA, 126 nt, Human
cuuauucugaaacaacuugaaucuuuguuuuuaugcugugauauuaguggcuguggcagugccuagaauuguuuaauugccuaaugcacaaaggugagcacuuugauugauguguauucagagaag

SEQ ID NO: 4760 - RNA, 73 nt, Human
cuuauucuguuuaccuggauuuuuauuucaauuuauaccuuauaugaaaaaauacaaaauucaaaaggauaag

SEQ ID NO: 4761 - RNA, 72 nt, Human
cuuauuguaacugacaacuguuuucaacuccaagagcuaaacuauuggcaguucauguuaaguuacagugag

SEQ ID NO: 4762 - RNA, 70 nt, Human
cuucaauccucugucucucgaggaacuaggcuccaacacggggauccagguuuucaaucagauugugaag

SEQ ID NO: 4763 - RNA, 75 nt, Human
cuucaccaaguugucauuugagcacaguuugaggaguguaagacagucaugcggacuugagggguacaagggaag

SEQ ID NO: 4764 - RNA, 80 nt, Human
cuucacgcuggggcuagcaggacuucucggcgagggaguuuuuaacuuugugagaacuccucaugcacccugugcuggag

SEQ ID NO: 4765 - RNA, 80 nt, Human
cuucauccacuacucagucauccaaacuagugccauuacaaaugcggcacagucgaugaucugucaauguagagaugcag

SEQ ID NO: 4766 - RNA, 73 nt, Human
cuucaucuccacucugcacggcggcugagggcccuuacucugggccugggcacccuuagaggggagaacgaag

SEQ ID NO: 4767 - RNA, 72 nt, Human
cuucaucuccacucugcacggcggcugagggcccuucucugggccugggcacccuuagaggggagaacgaag

SEQ ID NO: 4768 - RNA, 90 nt, Human
cuucaucugguguugagacuucgggguggugcuaagaaaaggaagaagaagucuuacaccacucccaagaagaacaagcauaagaggaag

SEQ ID NO: 4769 - RNA, 103 nt, Human
cuucaugagcucuuccacauuuguguggcccaggaacacauccaaagaggcguugcuuugcgcuucguguuccuugggauacagggugugggcagcugugagg

SEQ ID NO: 4770 - RNA, 85 nt, Human
cuuccagugugggguuccccauucauccgccuuuuggaguagggucugcgcugaggcaggggaaugggagaaguuugaaagggag

SEQ ID NO: 4771 - RNA, 65 nt, Human
cuuccaguuugcaaaagaucuucugugaccaugagugagcccguagaagugaaccaggcugggag

SEQ ID NO: 4772 - RNA, 101 nt, Human
cuucccauaaaaguuugcucucucuuuuugaaggaaauuucugggcaaacaacauuucugagaaagaaauucagauaugggaaaguaaagaucauggggag

SEQ ID NO: 4773 - RNA, 67 nt, Human
cuuccccaguuguccccuggaguuuggcggggacauccccgccucaggcauccuucucaaggggaag

SEQ ID NO: 4774 - RNA, 101 nt, Human
cuuccuauaaaaguuuagcucucucuuuuugaaggaaauuucugggcaaacaacauuuugagaaagaaauucagauaugggaaaguaaagaucauggggag

SEQ ID NO: 4775 - RNA, 100 nt, Human
cuuccuauaaaaguuugcucucucuuuuugaaggaaauuucugggcaaacaacauuuugagaaagaaauucagauaugggaaaguaaagaucauggggag

SEQ ID NO: 4776 - RNA, 100 nt, Human
cuuccuaucaaaguuugcucucucuuugugaaggaaauuucugggcaaacaacauuuugagaaagaaauucagauaugggaaaguaaagaucauggggag

SEQ ID NO: 4777 - RNA, 65 nt, Human
cuuccucgaggaggacggggauggccucccuguuggggugguccuuguggccuuccuugaggagg

SEQ ID NO: 4778 - RNA, 101 nt, Human
cuuccucugugggguaccauccucaaucucgguggggauuugcagguuuucuguggcccuuaaucccccuggguucuuuggaaugguccccaggauggaag

SEQ ID NO: 4779 - RNA, 70 nt, Human
cuuccugggcaucguggcugaggugcuggugcuggucaccaucaucuucaucuacgagaagcgccggaag

SEQ ID NO: 4780 - RNA, 73 nt, Human
cuuccugggccauuguggcuggaggugcuggugcuggucaccaucaucuucaucuacgagaagcgccgggaag

SEQ ID NO: 4781 - RNA, 63 nt, Human
cuuccuuugguuucugccggccucgggcuucugcggcccgauguggcaggcgccgcgagagag

SEQ ID NO: 4782 - RNA, 70 nt, Human
cuucgccugccucucugcccuuguccucaucaccgaccggcaugggcugcaggagccgcggcggguggag

SEQ ID NO: 4783 - RNA, 76 nt, Human
cuucgugcuggccacccuacagcagauugagccugucaacggacaggugacgguccuggucaugugccacacgagg

SEQ ID NO: 4784 - RNA, 73 nt, Human
cuucuaaaagacuuucuucgaaaccucaaagaaccucuucugaccuuucgccuuaacagagccuuuauggaag

SEQ ID NO: 4785 - RNA, 83 nt, Human
cuucuaccacugugguauauuuucaccaugucucuguauauaaauaacauacuuagauauuugauauaccuuucguguaguag

SEQ ID NO: 4786 - RNA, 86 nt, Human
cuucuaggcaucaaaggcaaaccagauacaacauuaagaugaugggcauuaaaaagaugagguaggggucaaaaugagccuagagg

SEQ ID NO: 4787 - RNA, 67 nt, Human
cuucucccuggaccagcccgguggcacccuggaucugacccugauccgugcccgccuccaggagaag

SEQ ID NO: 4788 - RNA, 105 nt, Human
cuucucccuugucuggagcugccaccgccauuuaaaaguguuggacgcuguuuauucccagcuucucaaccucagugugugugggaaaggccugaaagagagagg

SEQ ID NO: 4789 - RNA, 64 nt, Human
cuucuucagcagcccaagcugucaggaucucuuaaguuuuugggacauuuauaugcugcagaag

SEQ ID NO: 4790 - RNA, 81 nt, Human
cuucuucagugagacgggcgcuggcaagcacgugccccgggcuguguuuguagacuuggaacccacagucauugauagaag

SEQ ID NO: 4791 - RNA, 63 nt, Human
cuucuucugggguucucuaauggggauaacauuaaucaucuccuaagaugacuauaguagagg

SEQ ID NO: 4792 - RNA, 92 nt, Human
cuucuugcaggcaguguuguuccugauugccccagucuaguuuaucgcaagggaauuucuuugcggggcagugagcucccuuuuggcagaag

SEQ ID NO: 4793 - RNA, 87 nt, Human
cuucuugucuuagguccucacacacagcucugcucaguucaaucacccagaaugcaggcugguuggugaggcaaauuuggacagaag

SEQ ID NO: 4794 - RNA, 83 nt, Human
cuugaaacgcuuugucaugcuucuucaguaccauggauuugaaaugaacucauccuugcugugagcauccaggagcccuugag

SEQ ID NO: 4795 - RNA, 85 nt, Human
cuugaaagggcugcaaauuucccauguucuggcauuaaagggauuucaacccuuuggccaaauugggguaccaguaacccccgag

SEQ ID NO: 4796 - RNA, 119 nt, Human
cuugagaaaagacaacuaguauuugaggaaggugugagaaaugagccuaaagagguagaugagacucaaaggaggcugauaaagauaccacagcuacaaguuuuuguuauauucugaag

SEQ ID NO: 4797 - RNA, 86 nt, Human
cuugagagaagaaaaauuucagauuaauugccucaauuugacuagaauaucaaugaaccaggaaaacugaagcaccuucccuaaag

SEQ ID NO: 4798 - RNA, 92 nt, Human
cuugcccaggcuggaguucagugguaugaucacaacucuccuaagccucaaacaccugggaucaagugauccucuggcuucagccucccaag

SEQ ID NO: 4799 - RNA, 94 nt, Human
cuugccugguucccagccuuuaagguuuuuagucuauaaguucaacguuguuggaaaagugcucugauaccugcagaggugggagaaagguggg

SEQ ID NO: 4800 - RNA, 74 nt, Human
cuugcucugucacccaggcuggagugcaguggugccaucuuggcucacugcaaccuccgccuccccaguucaag

SEQ ID NO: 4801 - RNA, 80 nt, Human
cuugcucuugucaccuaggcuggagugcaguggugcgaucucggcucacugcacccuccucuuggguucaagccagcgag

SEQ ID NO: 4802 - RNA, 75 nt, Human
cuugcugcugcuggucgggcacccaagugcgugaggggcuucagccugucccgggguugccugaggcagagcaag

SEQ ID NO: 4803 - RNA, 81 nt, Human
cuuggacuuccccucccagcucguguacggucucccaccucuggagccccauccccgcgcugguggggggauaauucuagg

SEQ ID NO: 4804 - RNA, 77 nt, Human
cuuggagccaggagccugccaugagguuuugagaacagagugcuguuuuagagcuggcagcagcaucucagcccaag

SEQ ID NO: 4805 - RNA, 97 nt, Human
cuuggagggcgaggggcccuuaggggagucacggcuggacccugggacugagccccuggggacuaccaaguggcucugggaucccacugccccugag

SEQ ID NO: 4806 - RNA, 68 nt, Human
cuuggcucuggggugugcugggagggucaccaggucccuuuuccuuccugugcccucugaaagcuaag

SEQ ID NO: 4807 - RNA, 75 nt, Human
cuuggggcuucacuguggcugacaagaguauuauuacuaccuacaccucguacagcacacaaccagaaccuagag

SEQ ID NO: 4808 - RNA, 71 nt, Human
cuugggggcuauuaaagcaaacauuucgacuaaaggggcgaauccucgaauugugcgaucaagcacccgag

SEQ ID NO: 4809 - RNA, 92 nt, Human
cuuguacccugaaaucuucugcugucccaccuugacugccccaaacuuggacugucucagccuugccaggguuauaguaggcaggucacagg

SEQ ID NO: 4810 - RNA, 86 nt, Human
cuuguauauuuuguauuaccucuuuuuuucaagugauuuaaauaguuaaucauuuaaccaaagaagauguguagugccuuaacaag

SEQ ID NO: 4811 - RNA, 88 nt, Human
cuugugggagagauuaucaagcguuugagcagaaaggauuccgccuuguggucugaaauucaugcaagcuuccgaagaucuucucaag

SEQ ID NO: 4812 - RNA, 86 nt, Human
cuuuaaguugugugggguuuuuuggaggggagggaugggcaauuaccagcaaacuccgccucccccaaaccucaccuaacccgaag

SEQ ID NO: 4813 - RNA, 71 nt, Human
cuuuauaaaaugaucuaacuacuuauauuugugcugcaucgcguuacaucuguuuuuauuucacuaugaag

SEQ ID NO: 4814 - RNA, 74 nt, Human
cuuuauuugugcgcugugagggugaaggcaaucuaucaucaacuuuucuuucccugauaugcuccagaauaaag

SEQ ID NO: 4815 - RNA, 80 nt, Human
cuuucagagcuuuggucccuguaaugcccgucuuuccuguguccaggaauaaccuuugcuacuaggcaguccucugaaag

SEQ ID NO: 4816 - RNA, 71 nt, Human
cuuucaggucuccuggccucagugauggaauuaagaugacuucuaucucugaauccaagggugacugaaag

SEQ ID NO: 4817 - RNA, 71 nt, Human
cuuucccucuccuuuauaaauugcauauauuuuuaacauauauuaacacuuuaaaaccgugggguggaaag

SEQ ID NO: 4818 - RNA, 130 nt, Human
cuuuccucccacuucccucugugcccgucuuaucuguauuuuacugucugcucuuucugacugcuuguaaugagaagacaagugauuuucuugaaaugccugaggcuagaaagggagcuggaacuuaaag

SEQ ID NO: 4819 - RNA, 130 nt, Human
cuuucugugccacucaggaagcaaugggcaugauucagcagaggagaggagaguuuagaacugguuaugcuuccuucuccaacccucccugcaaaaacacuggccagcuccugacaucacaguaagacag

SEQ ID NO: 4820 - RNA, 66 nt, Human
cuuugggaggccaaggcagguggauugccugagcucaggaguucgauacuagccugggcaacagag

SEQ ID NO: 4821 - RNA, 64 nt, Human
cuuuguaagaugcaaagagguuggaucaaguuuaaaugacugugcugccccuuucacaucaaag

SEQ ID NO: 4822 - RNA, 73 nt, Human
cuuuguggcugagaacuuacaaggguucuuagugaagguguucaagcaggaaccugaggaaucagacccaaag

SEQ ID NO: 4823 - RNA, 77 nt, Human
cuuuuaaugggaucggcaugagcaaaagcucccucagaguuacgaccgaguuaaauaucagagaguccacgugaaag

SEQ ID NO: 4824 - RNA, 75 nt, Human
cuuuuacuuuuuaaaaaaucauaaaacggucuguaucugagaagauacuaauaucaaugcuuuaaaaagugagag

SEQ ID NO: 4825 - RNA, 75 nt, Human
cuuuuccgacuuccuuccauccgaguagagugacccugggccggucacucagcgggggacacaggaagggcugag

SEQ ID NO: 4826 - RNA, 77 nt, Human
cuuuucgacugcaggaucaucagguucggaugagucucauguggcugcugcaccuccagauauaugcucucgaacag

SEQ ID NO: 4827 - RNA, 77 nt, Human
cuuuucucaccgaagugaucuggaaugugcuaccguauaugcaaggaagacagguuacaagaucaaggugaaggcag

SEQ ID NO: 4828 - RNA, 64 nt, Human
cuuuucuggggauucaucaucuaugacacacacucacugaugcauaaacuggucaccugaagag

SEQ ID NO: 4829 - RNA, 89 nt, Human
cuuuugcauuuuuaguagagaugggguuucaccauguuggccaggccucuacugcagcaacugggaaugugccaucuuuacugcaacag

SEQ ID NO: 4830 - RNA, 85 nt, Human
cuuuuggaaggugacuuuaucaccuuaaugcauauuccccucuccauagaggagaggaaaagguguaggccugccuuaccgagag

SEQ ID NO: 4831 - RNA, 70 nt, Human
cuuuuggcagagcucccacuauuugcaauggauuuuggauaaacaagaucuguuggaggagcgccaaaag

SEQ ID NO: 4832 - RNA, 114 nt, Human
cuuuuuuggagcuugugcuucuggguuuggggagaugguggaggaccuggaagcacaaaucuuccucuucuaaauacuuccuaacuucagagagcaccagaagacacaagaaag

SEQ ID NO: 4833 - RNA, 85 nt, Human
gaaaaauaucauucacuucuucuuggugcagaaggcauagaccggauuaugcaaucacugagaaguagcuucuggauguguuuuc

SEQ ID NO: 4834 - RNA, 101 nt, Human
gaaaaaugucaagacccuauaaaacugauuuguguucagaauuuucaaaaacaucuuguucucuucccuucacuaaaugucaguauucuugacuccuuuuc

SEQ ID NO: 4835 - RNA, 75 nt, Human
gaaaagcacuuuuacacauauucacauuugaccucacugcccaaagauggccaaauccacuuguguauggguuuc

SEQ ID NO: 4836 - RNA, 60 nt, Human
gaaaagguggugucauguuuuggggagaaucuuacuucucaaauggaaauugcacuuuuu

SEQ ID NO: 4837 - RNA, 76 nt, Human
gaaaauauaagaacauucuagaagguugugagacauaagguacaaaaaccuucuagcauaauuucaaaaaauuuuc

SEQ ID NO: 4838 - RNA, 102 nt, Human
gaaacagacugggccaauguccacaaagaauuccuggucagcaccaccgauguccuaaggugcaauaucaaggaagggcaggcgugauggcuuauuuguuuc

SEQ ID NO: 4839 - RNA, 90 nt, Human
gaaacauagucuugcugucacccaggcuggagugcaguggcgcaaucucugcucacugcaaccucuggguucaagcaauucucaugccuc

SEQ ID NO: 4840 - RNA, 76 nt, Human
gaaaccaagacuacuaugugccacucauuucucucuucuauugggaauuguaaauguauauaggaguguguguuuc

SEQ ID NO: 4841 - RNA, 74 nt, Human
gaaacccuauaaauguccuaucugugagaaaaguuucauucagagaucaaacuuuaauagacaucagaggguuc

SEQ ID NO: 4842 - RNA, 60 nt, Human
gaaaccuacuuugaaguuauccccacuauuauuauggggguuaaggagcuaguagauuuc

SEQ ID NO: 4843 - RNA, 98 nt, Human
gaaagagguuuaauugacucacaguucugcauggcugaggagccugccccaggaaacuuacagucaugacagaaguggaagcaaacacauccuucuuc

SEQ ID NO: 4844 - RNA, 71 nt, Human
gaaaggugcuucauggagaggugauuguagaaaaggaugauuaaaugaucucugcaaacaaggugcuuuuu

SEQ ID NO: 4845 - RNA, 120 nt, Human
gaaagucuacagucugugaauauaccaauuccccuuuacaacugaugcagaucauuaugaaauacuggaaggcauaaccuacaauuuaggaauugguguggcugccacuguuacgcucuc

SEQ ID NO: 4846 - RNA, 99 nt, Human
gaaauggagucuugcuuugucaccgaggcuggagugcaguggcaugaucucugcucacugcaagcuccaccucccggguucacgccauucuccugccuc

SEQ ID NO: 4847 - RNA, 116 nt, Human
gaaauguggagaauuaaaaaggguagugaggcuggcauuuauagaaucuggcuuucuuguauuggguggaaagcuagaugaaaccaguuucucucagccuuuucucuccucagguc

SEQ ID NO: 4848 - RNA, 62 nt, Human
gaacaaacguccuuuucauuuugguuuagaaauagaaacgugguaaaaggaggcgacuguuu

SEQ ID NO: 4849 - RNA, 83 nt, Human
gaaccaucccauccauucacuguucagcuguacugugauuuaguuuuuacaccguuaaaacccugaguggauggcugugguuu

SEQ ID NO: 4850 - RNA, 61 nt, Human
gaacccaggcaaggcguaguucgagggagcccuggggguuccauucggcccuccuggguuu

SEQ ID NO: 4851 - RNA, 90 nt, Human
gaacgaccugaaccucugucuucgaccaacugaagcaacuugggauuaauugcuugauuagcuucacgaagcacagagauaaggucgcuc

SEQ ID NO: 4852 - RNA, 87 nt, Human
gaacuccaggccucaagugaaccucccgccuuugccucccaaaguguugggauuauagguaugagucuccuugccuggccuagauuc

SEQ ID NO: 4853 - RNA, 79 nt, Human
gaacuccaucuuggucauguggccaaaauuuggaaucucccugaguccucucucucgucauaacccugagauggagauc

SEQ ID NO: 4854 - RNA, 72 nt, Human
gaacugaagcuggggcugcagcuguggccuugguuugauccuuggccuuggcucuggccuuggcucuggcuc

SEQ ID NO: 4855 - RNA, 82 nt, Human
gaacuugaagaauugaaacaaauuguucccaaagaaucccucguuuacuucuuaauaggaaagguuuacaagaaguuagguc

SEQ ID NO: 4856 - RNA, 88 nt, Human
gaacuugaguguauucgagagaucaaagagagaguaggcacgucaaaaguuuagguuuuacucagugguggaguagacucaacaguuu

SEQ ID NO: 4857 - RNA, 73 nt, Human
gaagaaaggaccccaggucagagacuggagccauuacuucaagaucaucgaggaccugagggcucagaucuuc

SEQ ID NO: 4858 - RNA, 76 nt, Human
gaagaagaagaauggguuuggugagaggguuccaauauuaacaacccaacuucaagcucauuccucuaaccucuuc

SEQ ID NO: 4859 - RNA, 131 nt, Human
gaagaaguagauugggcugcaaucacacaaugggugcaucaccagugcggacaccuaggcguacagggaaccauggcuuggggaguguaaagaaggauguuaccccaggaugcaguucagacaauuuuauc

SEQ ID NO: 4860 - RNA, 73 nt, Human
gaagaaugaguuuacaguauggauagcuccuccuagauuucaaggggaguaaauuccccccucucauuuuguc

SEQ ID NO: 4861 - RNA, 67 nt, Human
gaagaauguggaucaguuuugauggaacuuggaguacguuuucaucgacuuaucuaugagcaucuuc

SEQ ID NO: 4862 - RNA, 68 nt, Human
gaagacucucugccuccgccaaaauuuaauuaaaugcauugagaaucuggaggagcuacagagucuuc

SEQ ID NO: 4863 - RNA, 68 nt, Human
gaagacucuguagcuccuccagauucucaaugcauuuaauuaaauuuuggcggaggcagagagucuuc

SEQ ID NO: 4864 - RNA, 78 nt, Human
gaagacucuucaguggccuugcagaaccuuucuuagacugcauggcagucugggauguucuaccauaccgcugucuuu

SEQ ID NO: 4865 - RNA, 85 nt, Human
gaagacugguuugugaauaugacaaugaaaucuguguguaucagauuuuuauugaagcauucaucagcagccucaaccaguuuuc

SEQ ID NO: 4866 - RNA, 65 nt, Human
gaagagccuaaacaugguguucaauagucuacuaugaauuaaacaaucguguggagaagcuuuuc

SEQ ID NO: 4867 - RNA, 86 nt, Human
gaagaggaacacuucagugaggaccaguacuugguugcagucaggaaaaauucacaaagucaguucucgaucaagguuaccucuuc

SEQ ID NO: 4868 - RNA, 67 nt, Human
gaagaggcagaccagcuuuauuuuugaacccaaucacugggugcccaacuaugacucugcuaucuuc

SEQ ID NO: 4869 - RNA, 130 nt, Human
gaagaggccuuuacuccuguuuucuuccauucucaccccucuguuucugccagaauugugacagcagggcagaaaaugggcuuuucgugcagaguugacaagauacaggguagugaagacaagaaucuuc

SEQ ID NO: 4870 - RNA, 61 nt, Human
gaagcaaauucagaucacucagcucuucgggguucccgucgugguggcucugaaugucuuc

SEQ ID NO: 4871 - RNA, 85 nt, Human
gaagcaagauuuacuagggacaucuggauagcccaggacaaugacuucugggaacaggaagcucccuagggccagaucgugcugc

SEQ ID NO: 4872 - RNA, 74 nt, Human
gaagcacaauugauugugauaccuagagcagcaucaucauugauauguauaucaccuucagacuuuuguguuuu

SEQ ID NO: 4873 - RNA, 72 nt, Human
gaagcacauuuaaagcacuuuucuguaaaagcuaguuccuuaccugcuuggaaaucuuuuuguuuguucuuc

SEQ ID NO: 4874 - RNA, 90 nt, Human
gaagccaaacugcaggccucugcccuccccuaaauguccuccuaggaugcagucacucgggaggaagaugugccuguuaccaagugcuuc

SEQ ID NO: 4875 - RNA, 74 nt, Human
gaagcccgaggcugcuccuguggaaguggcucugggcaccagccuguggggcuaaagacuugacagcuagcuuc

SEQ ID NO: 4876 - RNA, 68 nt, Human
gaagccuuugaccaggcagggucaggcugaccugguucuuggucaucuccuccugggauugggcuauc

SEQ ID NO: 4877 - RNA, 80 nt, Human
gaagcguaauauuuugguaaaauucggguuaaauuuuuguaaaucagcucaauuuuuaaccaauaggccgaaaucgcuuc

SEQ ID NO: 4878 - RNA, 66 nt, Human
gaagcucugagacaugugagaaggucuaguauucuacuagaacuggaagauugcucuccgaguuuc

SEQ ID NO: 4879 - RNA, 75 nt, Human
gaagcuuuggggaauuaaguucuuuucaaaucuuggaagucaauauucacuugaaggaauucuauccggggcuuu

SEQ ID NO: 4880 - RNA, 72 nt, Human
gaaggcccacugcacgggcgggugcuugugaaauuucuccaggggcaccugcagccccggcgcugggcuuuc

SEQ ID NO: 4881 - RNA, 71 nt, Human
gaaggccuguguuguuaaucuuuaucugugagaggaucucugugagauacgauaugauaaacaggcacuuu

SEQ ID NO: 4882 - RNA, 74 nt, Human
gaaggcgucaucgagaguaacuggaauggagauuguugacagcuuugaugacaugaaccucucggagucccuuc

SEQ ID NO: 4883 - RNA, 67 nt, Human
gaaggcuucgucugccaaacagagacucaagugugccagucuccaaaaauuuggagaaagagcuuuc

SEQ ID NO: 4884 - RNA, 77 nt, Human
gaaggguaccugcuggagaccugugugguuugugggguggguuucuuauaucacugaaucuaaagugggugccuuuc

SEQ ID NO: 4885 - RNA, 74 nt, Human
gaagguauuuguuuuucggucuuugaggaagaaccacaccguuuuccacaacgguugaacuaauuuccacuuuc

SEQ ID NO: 4886 - RNA, 106 nt, Human
gaaggucccacaaaaagcuauucuuuggggcuuauuugcaaagcaggggaacccaugaauuaugcaaaucgagguccaaggaggcguuguuggcuuguccaccuuc

SEQ ID NO: 4887 - RNA, 62 nt, Human
gaaggugcugacuuccuugggagaugccauaaagcaccugggaugaucucaagggcaccuuu

SEQ ID NO: 4888 - RNA, 63 nt, Human
gaaggugcugacuuccuugggagaugccauaaagcaccugggaugaucucaaggggcaccuuu

SEQ ID NO: 4889 - RNA, 112 nt, Human
gaaguacuucacccuggggcuccccacugggaguaccccacuuggcugcuacaagaagcugauugaauacuauaagaauggggaccuguccuuuaaauaugugaagaccuuc

SEQ ID NO: 4890 - RNA, 64 nt, Human
gaaguccugguguacaauaauacauccauuguucaggaugagaucugcucaccgucuggggcuc

SEQ ID NO: 4891 - RNA, 64 nt, Human
gaagucuccuauuugaucagguuauuuccugggacuuggcaaaaaucugauugguggggaucuc

SEQ ID NO: 4892 - RNA, 60 nt, Human
gaagugguaaagccuggggcuucagugaaguuguccugcaaggcuucuggcuacaucuuc

SEQ ID NO: 4893 - RNA, 72 nt, Human
gaaguuccaggcuguagugcacuaugaugaucguacguaugaacagccauugcacuccagccugggcaauuc

SEQ ID NO: 4894 - RNA, 78 nt, Human
gaauauuuccacaaugucugugaacuggaccugguguucaacuucuacaagguuuacacggucguggacgagauguuc

SEQ ID NO: 4895 - RNA, 64 nt, Human
gaaucacgugauguuucccaggcacuguggucccacaaaaucauaagugucuucacagucuuuc

SEQ ID NO: 4896 - RNA, 72 nt, Human
gaauccuucacuccaguuaauggcacugcucacuuccugccucugcugccaccaucacugugugaagcuuuc

SEQ ID NO: 4897 - RNA, 69 nt, Human
gaaucucauuaauccauucaugcgcgucacuaauuagaugacgaggcauuuggcuaccuuaagagaguc

SEQ ID NO: 4898 - RNA, 103 nt, Human
gaaugcaucuauacuugaaacuaaauuaaaaucuuuugcuuuuaguuuguguaagccaaugaauuacugguguuucuuagguuaguuucaaguauuggcauuc

SEQ ID NO: 4899 - RNA, 90 nt, Human
gaaugucucaaagaaaauguccuugauuuaauuaugguccaagguggcugcuuugcacaagcuugucagugacaugaacuugaagacuuc

SEQ ID NO: 4900 - RNA, 101 nt, Human
gaauguggcuucauccuccggccccaugcgcugguggcagucacagaaugaugugaacccugucucucugcagcuggaccuggacaggagauuccagcuuc

SEQ ID NO: 4901 - RNA, 91 nt, Human
gaauucagaauauuguauugaugaugguuauucuuuuauauaauuacaauaauuauccaggaaaauagcaaacagaugcagugcugaauuc

SEQ ID NO: 4902 - RNA, 72 nt, Human
gaauuccugaggcccgagccacacccuaaaccaauuucaucagaaucucugggugggacggagccuggauuc

SEQ ID NO: 4903 - RNA, 70 nt, Human
gaauucuacaagagccucacuaaugacugggaagaccacuuggcagucaagcacuuuucuguagaagguc

SEQ ID NO: 4904 - RNA, 79 nt, Human
gaauugcuuuuauuucgguaugcauccacauuucagcauuuagugguccugaacagcaaguggaaagacgcagcaauuu

SEQ ID NO: 4905 - RNA, 86 nt, Human
gacaaaggauaauggggacguuugacaggacugcauucagauggugacugacauccagacugcuguacggaccaauccacuuuguc

SEQ ID NO: 4906 - RNA, 96 nt, Human
gacaaaugccuucagcuucucugaguccuccuucuuccggucuucagccaaugaggaugaagccaaagcagagaccauccggagcuugaggaaguc

SEQ ID NO: 4907 - RNA, 73 nt, Human
gacaaccugccacucuaugagcuuaagaacaccaucacagugucccccuucucgggcgagagugacaucuguc

SEQ ID NO: 4908 - RNA, 75 nt, Human
gacaagaagcucucucucagacaaccaucucaugggccccauuccaggacacuucugaguacaucauuucauguc

SEQ ID NO: 4909 - RNA, 80 nt, Human
gacaaucucauaacaggaagauuugaacauagcagcugcuuaccauuucaugcuaauuaaaugugauuuccaucauuguc

SEQ ID NO: 4910 - RNA, 83 nt, Human
gacaauuaaggacgugggaugaggcuccgagacaggacgcgguucugccuggggauccugaagauaaaaagcuuugaaaaguc

SEQ ID NO: 4911 - RNA, 72 nt, Human
gacacaaagaugaaaagcuuggccacaaaggagcugacggugccguggcgagagagauccaucuugacgguc

SEQ ID NO: 4912 - RNA, 96 nt, Human
gacacuggcaacauugcggacacccuccaggaagcgagaaugcagaguuuccucugugauaucaagcacuucaggguuguagaugcugccauuguc

SEQ ID NO: 4913 - RNA, 70 nt, Human
gacacuuuaugggggcagaauggaacaagcuccaagaauguagauacugauucuuucuccauaaaguguu

SEQ ID NO: 4914 - RNA, 73 nt, Human
gacagaacucugcuuccagcgcugugugccagcuugcaccaccgagcucuggacgcugaggaggaggccuguc

SEQ ID NO: 4915 - RNA, 78 nt, Human
gacagauggacuaaaaggauuuuauaggggcaugucugcuucauaugcugguauaucagagacuguuauccauuuguu

SEQ ID NO: 4916 - RNA, 67 nt, Human
gacagcuucuauuugggucccaccucuccaagaacgaaacaguucaugggauaggaucagaaagcuc

SEQ ID NO: 4917 - RNA, 84 nt, Human
gacauaguuucagacgccaguauaagccuuugagucucaauagacugcaguaucuuauugauuugggucguguugauccuaguc

SEQ ID NO: 4918 - RNA, 79 nt, Human
gacaucaucauugcagcuggacgacgugguuagcaguacugugacugggccacguguggacggaggccauguacagguc

SEQ ID NO: 4919 - RNA, 77 nt, Human
gacauccaauuuuguucaggucccuuuuaauggcacuuaauaaauauacauucugagaccuggcagaacaggcuguc

SEQ ID NO: 4920 - RNA, 60 nt, Human
gacaucuuuuucugaccuguaugaugacaguccgggcaaccuaaguccaugagggauguc

SEQ ID NO: 4921 - RNA, 128 nt, Human
gacaugaguuugugauggcacaauaugugaaugaauuucaggguaaugaugcaccuguugaacaagaaauuaacagugcagaaacuuacuuuugaaagugccagaguagagugugauacaaacauguc

SEQ ID NO: 4922 - RNA, 67 nt, Human
gacauguacuauacauaguaaggcguccuaugcaucuacgugcauaauagcguguauagugcaucuc

SEQ ID NO: 4923 - RNA, 84 nt, Human
gacaugucaaggcaggagccaucugaucgaccuuagacuuggcaagcugguggcuaaguccagugcucacugccgacaucuguc

SEQ ID NO: 4924 - RNA, 126 nt, Human
gacauuaauaaugaggcaaauggcauuaaaauuggcccucagcaugcugcuaccaaugcaacacaugcaggcaaucagggaggacagcaggcuggggcggcugcuguugagucuguuuuuacuguc

SEQ ID NO: 4925 - RNA, 127 nt, Human
gacauuaauaaugaggcaaauggcauuaaaauuggcccucagcaugcugcuaccaaugcaacacaugcaggcaaucagggaggacagcaggcugggggcggcugcuguugagucuguuuuuacuguc

SEQ ID NO: 4926 - RNA, 60 nt, Human
gacauucugccagguuuucuugggcaaugacaccaagaaguugacagccaggugaauguu

SEQ ID NO: 4927 - RNA, 60 nt, Human
gacauugugccucgauaguggcagcuuucaauugcaaucaaugcccuucgagaauguguc

SEQ ID NO: 4928 - RNA, 86 nt, Human
gaccagcgacauuuuugggucuccggucacugccacuucacgcuuggcacacccaaacaaacccaagucaagguccucggcugguu

SEQ ID NO: 4929 - RNA, 97 nt, Human
gaccaugaagccagagucuccaggacuccucacucaaccucggccauggacgcagguugggugugaggggggucccagccuuucggucuucuauuuc

SEQ ID NO: 4930 - RNA, 78 nt, Human
gacccacucuugugcuaacuagccccuucucugaauaacccauuaaucugagaauggcucaagcacuuccuaaagguc

SEQ ID NO: 4931 - RNA, 96 nt, Human
gacccgggguggggugcacucgccauuuccucacgugcaggacagcucuugauuuggguggaaaacagggugcuaaagccaaccagccuuuggguc

SEQ ID NO: 4932 - RNA, 60 nt, Human
gaccugcgggacaagauucuuggugccaccauugagaacuccaggauuguccugcagauc

SEQ ID NO: 4933 - RNA, 76 nt, Human
gaccuggguucuccccgagcccugaaguggaguaaagauguuuggcccaagaagggcuggggugcaaagccagguc

SEQ ID NO: 4934 - RNA, 85 nt, Human
gaccuguucuguuuuaucuucugucagcuccucuggugcuaugccugugguacugauugagcuaaagaagaaaagagaggagguu

SEQ ID NO: 4935 - RNA, 61 nt, Human
gaccuuaugugguucauuccuucaaucauuucaaacauugaaaguagggccuacauggguc

SEQ ID NO: 4936 - RNA, 87 nt, Human
gaccuuugugaguuccagugguguccuuggcacucagagguucagcugaagucccgacuggugaggacaaguggagccacaaggguc

SEQ ID NO: 4937 - RNA, 67 nt, Human
gaccuuuguuccuuaaagcaauaacugacaauucuuuguaguucucuguggggaguaacaagggcuc

SEQ ID NO: 4938 - RNA, 80 nt, Human
gacgagacuuaauaugguauuuguagcacaauacaucacacagguaaaugugcuccaggaagccucacuagucacucguc

SEQ ID NO: 4939 - RNA, 100 nt, Human
gacgagagcccugaaggcagcgcugccgacgaccucuacagcaugcucgaggaggagaggcagcagaggcaugagcagcgacccgcggcggggcggcguc

SEQ ID NO: 4940 - RNA, 76 nt, Human
gacgcugccagcucgggacucuguuccaccgugguggucugccccuacagugcugcaggcugagcugacauuuguc

SEQ ID NO: 4941 - RNA, 85 nt, Human
gacgggacacaucuggcuauuuugucccagcggucagaggauccccuuggguacugcugcaacgccaguuccagaaguuucuguu

SEQ ID NO: 4942 - RNA, 75 nt, Human
gacggucacacggaagcucacacggacagucacacgcucacacggacggucacagggaugcucacacggacgguc

SEQ ID NO: 4943 - RNA, 74 nt, Human
gacuacaccugcuuuguguuuagugacguggaccucauuccaaugaaugaccauaaugcguacagguguuuuuc

SEQ ID NO: 4944 - RNA, 86 nt, Human
gacucaaugugcaacugacaucugcuagugaugaucugguaauauacaaccuguccaguagccgaacaguuuguuuuuauuguguu

SEQ ID NO: 4945 - RNA, 80 nt, Human
gacuccaccuucucccuggaccagcccgguggcacccuggaucugacccugauccgugcccgccuccaggagaaguuguc

SEQ ID NO: 4946 - RNA, 78 nt, Human
gacucccagccaaauccauccugcucuuccauuucuuccacgauggugcaguguaacgaugcacuuuggaagggaguu

SEQ ID NO: 4947 - RNA, 72 nt, Human
gacuccugccccagccccauccucagcuuccaccuaagaaguagugcaggaaaguggugauaagcagauguc

SEQ ID NO: 4948 - RNA, 61 nt, Human
gacucuucagggaaaaggucagugaaguuuaacaagggcuauacugcucuuagccagaguc

SEQ ID NO: 4949 - RNA, 95 nt, Human
gacugaguuuugcccuguugccuaggcuggagugcaauggcaugaucucggcucacugcaaccucugccuccuggguucaagugauucuccuguc

SEQ ID NO: 4950 - RNA, 78 nt, Human
gacugauacagucuguaagaucucuucgagagagcuguccaauuacagaucuauauacuuuucuucagaaggucaguc

SEQ ID NO: 4951 - RNA, 64 nt, Human
gacugguuugucuacagguaacaugcccaaguacugcacguggaacuucuggaccagcucaguc

SEQ ID NO: 4952 - RNA, 92 nt, Human
gacuguccgucaagcaggcagcggggauguagcucucucugcccugggcaagaauagcacuucccguuaaaagccagcagccggcgucaguc

SEQ ID NO: 4953 - RNA, 73 nt, Human
gacugugaggagggugcuaucgaggaaaucagcuugaaccacagucgcuguaccucugcaccccuggaaaguc

SEQ ID NO: 4954 - RNA, 93 nt, Human
gacuuacauaaugaaaaccaauucauuuuaaauaucagauuauuauuuuguaaguuguggaaaaagcuaauuguaguuuucauuaugaagguu

SEQ ID NO: 4955 - RNA, 69 nt, Human
gacuucccgauggaugcgcacgcuugcccucugaaauuuggcagcuaugcguacccuaauucugaaguc

SEQ ID NO: 4956 - RNA, 78 nt, Human
gacuuccucaugaagagacuccagaaagggguauggggcauagucucuuacccucuuucuuuggagcuaaaggagguu

SEQ ID NO: 4957 - RNA, 64 nt, Human
gacuuguguuugaaucccaguuccaucacuuccugcugugagaucuugggcaaaucacuuaguc

SEQ ID NO: 4958 - RNA, 83 nt, Human
gacuuuuguugaaaaauuugaccuuuaccucuuaugaacgaaagaaauauagagguuucaagcauuuuugccagcacagaguc

SEQ ID NO: 4959 - RNA, 77 nt, Human
gagaaacggaaacuuuuuccaaaguggcugcaucauuuuucauucccaccagccauguaugaggguuuccaguucuc

SEQ ID NO: 4960 - RNA, 74 nt, Human
gagaaagggucuggcuauguugccuagguuggucucaaacuccuggccucaaguaaucugccagucucagucuc

SEQ ID NO: 4961 - RNA, 87 nt, Human
gagaaauacagguagauaugcugguuuaccuauuuguauagucaauuccuguuuauuaugaaacagcguuaucucuuuguguaucuu

SEQ ID NO: 4962 - RNA, 79 nt, Human
gagaacugggauggaggagaauuagaggauggugugguguuucccaagacauccccugaucuugcuaucccagcaucuc

SEQ ID NO: 4963 - RNA, 72 nt, Human
gagaagcagguagcucaguauugcugaugagaguggcuguuccaagcaucaguaggccuggaaucucuucuc

SEQ ID NO: 4964 - RNA, 77 nt, Human
gagaagggaggcugcagugagccaagaucgugccauugcauucaaggccugggugacaagaagcagaauuccaucuc

SEQ ID NO: 4965 - RNA, 86 nt, Human
gagaagggggccacggcuucucacaggguggggcgggccugguguacccuccccgaaagcacuggagaagggggccacggcuucuc

SEQ ID NO: 4966 - RNA, 86 nt, Human
gagaaucacuugaacccaggagguggagguugcagugagccaagaucgugccauugcacuccagccuggguaacagagugggacuc

SEQ ID NO: 4967 - RNA, 69 nt, Human
gagaaugggggaggugugugacagccaugcuggacucagaagcaggugucauaaacugccccagcucuu

SEQ ID NO: 4968 - RNA, 86 nt, Human
gagaauugcuugaacccaggagguggagguugcagugagccgagaucacgcuacugcacuccagccugggugacagagugagacuc

SEQ ID NO: 4969 - RNA, 99 nt, Human
gagacaggagaaucacuugaaccggggagguggaggcugcaaugagccaagaucacgccacugcacuccaaccugggcaacagagugagacuucgucuc

SEQ ID NO: 4970 - RNA, 82 nt, Human
gagacaguuucacuuuuguugcccaggcuggagugcaguggcgcggucucagcucaccgcaacaagagcgaaacuccaucuc

SEQ ID NO: 4971 - RNA, 99 nt, Human
gagacggggaauccucagggccuauuaccaggagaggaaucgagccaugguccuccuuacuccucuucagcuggugaauccuccggaucuccuuuccuc

SEQ ID NO: 4972 - RNA, 76 nt, Human
gagacucuaugucugcccguccaucagugaacucauuaaaacuugugcaguguugcuggagcuggccuggugucuc

SEQ ID NO: 4973 - RNA, 64 nt, Human
gagagaaaaggggaggaugccacuggagucauccucuucaaugccacuauccuucccaucucuc

SEQ ID NO: 4974 - RNA, 87 nt, Human
gagagaacuguugcgugcuugagucugugagccagugucugccuuuuuagaagcagccucauggucucaugcuuaaucuugucucuc

SEQ ID NO: 4975 - RNA, 63 nt, Human
gagagacacucagaauggacgaucuaaaguuccuuccagcuuccaaauucugggcugguuuuc

SEQ ID NO: 4976 - RNA, 91 nt, Human
gagagagaagaaagagaagugaaacgacaguugguggcuuggugggauaggaagcugaaaccaaugguuaagucaaaguuuuguuuuccuu

SEQ ID NO: 4977 - RNA, 67 nt, Human
gagagcauuagacccaagaccauuguggagaagauugacuugacaguguguccagcauaaugcucuc

SEQ ID NO: 4978 - RNA, 61 nt, Human
gagagccucugucguggggagggugucaaacugacaacccguuaggacagaagaggcuuuu

SEQ ID NO: 4979 - RNA, 71 nt, Human
gagagcuucagcuugcauauccuugggcagaaaacccugcuggauuccaguaagcucuuuauugaacucuu

SEQ ID NO: 4980 - RNA, 101 nt, Human
gagaggaaaagucacuugcccaaagucacacagcugaacagugguggaguucaacuuugaccgugggcugucuggccccaagguguaugcuugcuucucuc

SEQ ID NO: 4981 - RNA, 97 nt, Human
gagaggagaaucgcuugaaccugggaguuggagguuacagugagccgagauugcgccacugcauuccagccugggugacagagcgagacuccgucuc

SEQ ID NO: 4982 - RNA, 100 nt, Human
gagaggauguuaucccccauagccagaaaccaggguggcuuccaaaagaaaaggguagcauucggugacucugcuuuaggccuugaggaugaaucuuuuc

SEQ ID NO: 4983 - RNA, 91 nt, Human
gagaggcaccacucacaggcaggcccggcugcacaaguccucccugcugggccuggucacugcagcugccccucccuggcuggcuccucuc

SEQ ID NO: 4984 - RNA, 68 nt, Human
gagaggcguggaguauaaccuauauauaagugugguauaaaacuuauagaguucuccgagugcuuuuc

SEQ ID NO: 4985 - RNA, 81 nt, Human
gagagggcuugccuuuggugcuuccuuaaucccuuuacuuucuuaaacuugaaacagggguuggggaggcagagcuagcuc

SEQ ID NO: 4986 - RNA, 61 nt, Human
gagagucugguauuacacuggaggaucacaaacuguauuuucuuguuauaaauggcuccuc

SEQ ID NO: 4987 - RNA, 78 nt, Human
gagaguugcuugagcccaggaggcggagguuguagucagccagccacuguacucuagccugggcaacagagcucucuc

SEQ ID NO: 4988 - RNA, 72 nt, Human
gagauaggagaagagagagaucgcugucucgggagagaaaucacaagccgucccgauccuucucuaggucuc

SEQ ID NO: 4989 - RNA, 79 nt, Human
gagauauguaaauacgcuguuggggugagagauuuuaagaaaacugucucugcuauugacagauccuggacauaaaauc

SEQ ID NO: 4990 - RNA, 72 nt, Human
gagaugaaauguuuuacuucugacugugggacuaauguguuccuacagguugcaacauaaaacggauuucuc

SEQ ID NO: 4991 - RNA, 69 nt, Human
gagaugcagcagaaguugguggagcugucggcugagaacgagaagcugcaccagcgcguggagcagcuc

SEQ ID NO: 4992 - RNA, 60 nt, Human
gagauggagcgagucagaaccagcauggaguguuacugcugauuucugucccugcaucuc

SEQ ID NO: 4993 - RNA, 85 nt, Human
gagauggugccuuggacacccuugccuggaacucguuagcaacugcgagcagaagcuuuccagucacacaucaaggcgcuugauc

SEQ ID NO: 4994 - RNA, 72 nt, Human
gagcaagcacgcaagaaauccucguugugguuucauguuuuugagcuuuagcaggauucuaaagagcugcuc

SEQ ID NO: 4995 - RNA, 109 nt, Human
gagcaaggacaaguugugaccuucccaguccucucuccauuugcagaucagcaagcuucugucagcaaggagggguggacaaugaaacuggguucagcuugauuuguuu

SEQ ID NO: 4996 - RNA, 82 nt, Human
gagcacgcuucccaagcuuggggugggcaauguaggcaagucgaucgagcuugcggcugacacccuuugggaucuugggcuu

SEQ ID NO: 4997 - RNA, 60 nt, Human
gagcagaggcugguuauaaauuugaacucccucagcccauuugcaacucugccucuguuc

SEQ ID NO: 4998 - RNA, 63 nt, Human
gagcagcuacgaggagcagccgaccgugcgcuuccaacaccaggugcugcucguggccugcuc

SEQ ID NO: 4999 - RNA, 68 nt, Human
gagcaggaagaauguacuucugagauucggcagucacucacugacgagccuccccuguaugccugcuc

SEQ ID NO: 5000 - RNA, 70 nt, Human
gagcaggcuucagacacugccuuuaucuuuacagaaagccaugggaagggaaaugucugagguagagcuc

SEQ ID NO: 5001 - RNA, 75 nt, Human
gagcaguugaguggcacagccuggcaccaugaugcagguccuuguaauggaguuaguguccagucagcugagcuc

SEQ ID NO: 5002 - RNA, 64 nt, Human
gagccaagccgccagcgcugcgaugugggccacgcugccgcugcucugcgccggggccuggcuc

SEQ ID NO: 5003 - RNA, 90 nt, Human
gagccagaagauggagaggaggcugcaaacccuuagcugcucuauaaauauaaucauugaggcuugauugucccuugccaucucuugcuu

SEQ ID NO: 5004 - RNA, 102 nt, Human
gagccagcuggaugcgacaguccguggccuucuaucaggcuauauugaugaugcuuuauggcaaauuguagaagucauggguucuuguuucuaaguuggauc

SEQ ID NO: 5005 - RNA, 96 nt, Human
gagccaguaccuuuacauaaagcguuguaauacacagguuagcccagcagggcauucccaugaccucagauguuuaucaggugaagccaguggcuc

SEQ ID NO: 5006 - RNA, 83 nt, Human
gagccggccagcccugacaguccaaaggguuccucgggagacagagaccgagccuccuguggcccuggccccugguccagcuc

SEQ ID NO: 5007 - RNA, 93 nt, Human
gagccggggcuuccucaagagcguggcccaagggccccacagcccgagauccggcagccccagccaccuucacaugaggaggccccgaagcuc

SEQ ID NO: 5008 - RNA, 63 nt, Human
gagccugccucccucuuggccucucauccauuggcucaugcagggcaggggugaggcagguuu

SEQ ID NO: 5009 - RNA, 66 nt, Human
gagccuuauuuuacaucagaugggaaaagaccuugcaggucauucauugucuuacaugcagagcuc

SEQ ID NO: 5010 - RNA, 101 nt, Human
gagccuuuuaaugacacaguggggccaguuggagcacugauccuggucauuacuccugcacccuggccugcagccuuccucucagugucuuauuugggcuu

SEQ ID NO: 5011 - RNA, 77 nt, Human
gagcgcccugggucuuguuuugguguuucgcuuuucuguaaggauuaagcagauagggagaagggaaaaggggccuc

SEQ ID NO: 5012 - RNA, 76 nt, Human
gagcuaacaaacugcuacaaacugaaggaccuuuucaaaaaagcaaacugaaggaccuuuucaaaaaagcaagcuc

SEQ ID NO: 5013 - RNA, 88 nt, Human
gagcucccacggcuuuucuagaaauuggcacacaaacuccaaagcguguguggaaaugcagaugaccugggagacccaaaacaaccuc

SEQ ID NO: 5014 - RNA, 63 nt, Human
gagcugaucgccagcaguguauucuuaauugucuucauuugagcacugguaaacaaucugcuu

SEQ ID NO: 5015 - RNA, 80 nt, Human
gagcugcccaacauccagaaggucgaaguguacccaguagaacugcugcuuguccggacacgaugaucugggcaaaucuc

SEQ ID NO: 5016 - RNA, 67 nt, Human
gagcuggcuccugggcccacagcugugccugggaauaguccaggcugugccugcagaggagcugcuc

SEQ ID NO: 5017 - RNA, 81 nt, Human
gagcuggggagaggaguuccucccuuaaaagccagcaacugccuuuggggaaugucggggggucucuccuuucuccugcuu

SEQ ID NO: 5018 - RNA, 76 nt, Human
gagcuucaucuccauggaagugccugucaugguaguaaauggcaaggaugauaugcaugauguugaagaugagcuu

SEQ ID NO: 5019 - RNA, 89 nt, Human
gaggaacagccgguaaugcccucauggauggagcaucucagcugaugggagaaaacaggaccaugaccauucacaacggcauguucuuc

SEQ ID NO: 5020 - RNA, 70 nt, Human
gaggaagacaccccuucagauaaugauaguggcaucuguaugagcccagaguccuaucuggggucuccuc

SEQ ID NO: 5021 - RNA, 97 nt, Human
gaggaagggagcuggggcuucgaggggaccugcacauucaguccugugcugggugcuggagacucgucccuccccacugcccccucugcccauccuc

SEQ ID NO: 5022 - RNA, 90 nt, Human
gaggaaggucaggguauuaccauaauggucuaggcagagaaaguauacaucuuuaauagggcaagacaauggaguuagacaccuucauuc

SEQ ID NO: 5023 - RNA, 70 nt, Human
gaggagcaaccucuggagccaucgcgauugauuccucccaucccaagauggcuucuggguuccacuccuu

SEQ ID NO: 5024 - RNA, 71 nt, Human
gaggagcccaguggcgccuuuucagugguucuugggaugcuccgcagccaauuaagccgacugaguuccuu

SEQ ID NO: 5025 - RNA, 71 nt, Human
gaggagcgguagcuuuugggaagcaggacguucucaccaggagagcguccucucgagauuucugcucccuc

SEQ ID NO: 5026 - RNA, 80 nt, Human
gaggagguggcggcgcuggagcuccucccggggaccagcgacccggggagcgagcacgucgcuccgcaccgcucuuccuc

SEQ ID NO: 5027 - RNA, 69 nt, Human
gaggagguuggcuuagucaaaugccucuguccacacugacauggcacuuacccaagcaccgaacuccuc

SEQ ID NO: 5028 - RNA, 88 nt, Human
gaggauuuuauuucaagauaaaacauaacuucuacccauacuauugauuccaaagguuagaaaaaguguuuuuccucaucuuauccuu

SEQ ID NO: 5029 - RNA, 99 nt, Human
gaggcaaggacuugcucuguuacccaggcuaaagugcaguggcgcaaucauagcucacugcagccuugaacuccugggcucaagagcucuucccgccuc

SEQ ID NO: 5030 - RNA, 90 nt, Human
gaggcacaaggaacagcugcuggcugcggagcccgugcgcgccaagcuggacaggcagcgccgcgucuuccagcccucgccccuggccuc

SEQ ID NO: 5031 - RNA, 77 nt, Human
gaggcacucacucuagaaauagccuguguuagcugaugugugaaagcguagccggccagccacacuagagaugccuu

SEQ ID NO: 5032 - RNA, 78 nt, Human
gaggcagaaacuguggaagguaaauauauguuaagaaacuaauaguuucuuguuuguagauuccucuggugcugucuc

SEQ ID NO: 5033 - RNA, 76 nt, Human
gaggcagaagccuuccucaagaaagcuguggugcaguccccgcaggucacagaaguccuuuaagaggguuugccuu

SEQ ID NO: 5034 - RNA, 82 nt, Human
gaggcagaguuggagcucacaguaacugccaguugaauccaaauaacaucugauuagucucuuggcuccuagcaaucucuuc

SEQ ID NO: 5035 - RNA, 77 nt, Human
gaggcagcccuggccaccuucggaacuuucccgucgaccaggccccccgggacucccagggcuccagggcccuccuc

SEQ ID NO: 5036 - RNA, 97 nt, Human
gaggcaggagaaucacuugaacucgggagguggagguugcagugagccaagaucacgccacugcacuccagccugggugacagaaugagacuguauc

SEQ ID NO: 5037 - RNA, 99 nt, Human
gaggcaggagaaucauuugaaccugggaaguggagguugcagugagccaagaucgugucacugcacucuagccuaggugauaaagcgagacucagucuc

SEQ ID NO: 5038 - RNA, 98 nt, Human
gaggcaggagaaucgcuugaacccaggaggcggagguguagugagcugagauggcaccacuguacuccagccugggcaacagcaugagacuccgucuc

SEQ ID NO: 5039 - RNA, 100 nt, Human
gaggcaggagaaucgcuugaacccaggaggcggagguuguggugagcgaagaucgugccauugcacuccagccugggcaacaagagcaaaacucugucuc

SEQ ID NO: 5040 - RNA, 100 nt, Human
gaggcaggagaaucguuugaaccugggaggcggagguuguguugagccgagaucucgccauugcacuccagccuaggcaacaagagcgaaacuccaucuc

SEQ ID NO: 5041 - RNA, 100 nt, Human
gaggcaggagaauugcuugaacccaggaaguggaggcuucagugagcugagaacacgccacugcacuccaguccugggcaacagagcaagacucugucuc

SEQ ID NO: 5042 - RNA, 75 nt, Human
gaggcaggaggccccugaaggcaaggcagguagacgguggagaaucugccuccccugccuuuggacccuguccuc

SEQ ID NO: 5043 - RNA, 66 nt, Human
gaggcaggcggaucaugaagucaggagauugagaccauccuggcuaacauggugaaacccugucuc

SEQ ID NO: 5044 - RNA, 74 nt, Human
gaggccacucccuuuaaaaaugcucaaaguguuggagcuacugugugacaacagcugacauuuaggagggcuuu

SEQ ID NO: 5045 - RNA, 77 nt, Human
gaggccagagcaggguggacagguguccaggcuggugaugugcuucggaacgccauucuauccccaaacuuggucuc

SEQ ID NO: 5046 - RNA, 83 nt, Human
gaggccagcgccccguggccaggcagcagcgugugcaugucgccggcugugccacgcguggcugcggaagcguggauggccuc

SEQ ID NO: 5047 - RNA, 75 nt, Human
gaggcccagaggguuggacauacuaggaauucugucauccccaguggcugauccuuuaaccccuucucaggucuc

SEQ ID NO: 5048 - RNA, 110 nt, Human
gaggccccaagaaguuaaauaacuugcuuaagaucacagagcuaaugaguggcagaacaauuauucuagcucugauuuuaagggauuuacuuaacuuuuacuuggaauuc

SEQ ID NO: 5049 - RNA, 73 nt, Human
gaggcgcgauauuuggcauuuuuaauuuagguuuguuuuauuuaaguuuaauguuaauuccaugcuguguuuc

SEQ ID NO: 5050 - RNA, 68 nt, Human
gaggcggguggaucacucaaggucaggcauuugagaccagccuggccaacauugugaaaccccgucuc

SEQ ID NO: 5051 - RNA, 76 nt, Human
gaggcuaggaaaaucagaggcagccccgaucggaagcaggucuccugacuccuaggcagggcugcuucccagccuc

SEQ ID NO: 5052 - RNA, 85 nt, Human
gaggcuggcuguacaaacggagcgcugcugaucgacgaacagagauccuguacaacacucaaggggucguuguaaagccagacuc

SEQ ID NO: 5053 - RNA, 65 nt, Human
gaggcugguggucuugagcuuuuggccuggaauuccagucugaauuuucaaauauucccugccuc

SEQ ID NO: 5054 - RNA, 76 nt, Human
gaggcugugugugugguuuacaagugcugcagaccagggaagccccacuggcacagguguggccucagccggccuc

SEQ ID NO: 5055 - RNA, 62 nt, Human
gagggaaaaggcacugcuuauuccagugcagccagucaugguaaugcagugcaccagcccuc

SEQ ID NO: 5056 - RNA, 72 nt, Human
gagggaaaggaugaauuauuuaauauauucuaaguuaacuauuuggaaaaaaugggauuagagccuuuccuc

SEQ ID NO: 5057 - RNA, 84 nt, Human
gagggaggacucugcagucuuauccaggcucuccucggcaucgcugccuucaagggucucuccaucuuuaaaggguccucccuc

SEQ ID NO: 5058 - RNA, 79 nt, Human
gagggcaaacgucgaggaccugcgcugcgccaugcccagguccuggcuuuggagcgagugcagguaccgccaggcucuc

SEQ ID NO: 5059 - RNA, 80 nt, Human
gagggcacuggaaaggucgguacuuagaugcccagugaaaaccccucaccccaaucucugcccugccugcaggagcccuc

SEQ ID NO: 5060 - RNA, 61 nt, Human
gagggcccaggauuuuggauccccagcccugugacaaggguuccuguccaguuucccccuc

SEQ ID NO: 5061 - RNA, 96 nt, Human
gagggcuuuagaaaugcugugccagagcugcaccccagaccaacaaaaucagacucuccaggaugcggccaaggcaucaguauguggaaagcuuuc

SEQ ID NO: 5062 - RNA, 89 nt, Human
gaggggaaaggagccccaaagagaagggacgcagggcaaaaaucaugcagccccagcaccccaccucugcgggcuggccaccuccccuc

SEQ ID NO: 5063 - RNA, 92 nt, Human
gaggggaaggggcuagcagguguguaaacagaggguuccaucaggcuggggcaggguggccgccuuccgcacacuugaggaacccuccccuc

SEQ ID NO: 5064 - RNA, 92 nt, Human
gaggggaaggggcuagcagguguguaaacagaggguuccaucaggcuggggcaggguggccgccuuccgcacacuugaggaagccuccccuc

SEQ ID NO: 5065 - RNA, 88 nt, Human
gagggggcaagucacaugggcagagauagccgugugagcagucucagcucaagcugccccccauuucuguaacccuccuagcccccuu

SEQ ID NO: 5066 - RNA, 78 nt, Human
gagggguggccaacaggucggugucagggugagggguggccacaaggcgggccauggcugggaccggccgcucuccuc

SEQ ID NO: 5067 - RNA, 75 nt, Human
gaggguugaagugugcuuuuccaagguuagagguuuuuaaaccuuguggcuuuaaugggaacguaguuugcccuc

SEQ ID NO: 5068 - RNA, 71 nt, Human
gagguagcugugguuguauuucacccaggagagugguccuuugggaugcaaggcaguuguucuaauaccuc

SEQ ID NO: 5069 - RNA, 99 nt, Human
gagguaggagaacugcuugaacucaggaggcgggggcugcaaugagcugagaucaagccacugcacuccagccuaugggauagagugagauuccaucuc

SEQ ID NO: 5070 - RNA, 96 nt, Human
gagguccagcuugcagccgucgugguuuugugcaaagcagcugagugucccucuguuaaugugugcaaaccauggugagagcugagccuggaucuc

SEQ ID NO: 5071 - RNA, 78 nt, Human
gagguccaguuucauucuucugcauguggguuagccaauuuuccuaacaccauuuauugauuaggguguccuuuccuc

SEQ ID NO: 5072 - RNA, 64 nt, Human
gaggucccagcacauguguuuucaagaggccacuaggcauucuucacugagugcugcugacuuc

SEQ ID NO: 5073 - RNA, 71 nt, Human
gaggucgaggugauugggggagcagacaaguaccacuccgugugucggcucugcuacuucaagaaggccuc

SEQ ID NO: 5074 - RNA, 91 nt, Human
gaggugaaggaggguaaauucuuuucuaagcccuacuugccugacaugcauuuagguuuuuagaaaggaaacugaccccacccuuuauuuu

SEQ ID NO: 5075 - RNA, 91 nt, Human
gaggugaaggaggguaaauucuuuucuaagcccuacuugccugacaugcauuuagguuuuuagaaaggaaccugaccccacccuuuauuuu

SEQ ID NO: 5076 - RNA, 114 nt, Human
gaggugacagaggugaaggaggguaaauucuuuucuaagcccuacuugccugacaugcauuuagguuuuuagaaaggaaacugaccccacccuuuauuuucuaucucccacuuc

SEQ ID NO: 5077 - RNA, 114 nt, Human
gaggugacagaggugaaggaggguaaauucuuuucuaagcccuacuugccugacaugcauuuagguuuuuagaaaggaaccugaccccacccuuuauuuucuaucucccacuuc

SEQ ID NO: 5078 - RNA, 97 nt, Human
gaggugauagugugguuuauggacugaggucaaaaucuaagaaguuucgcagaccugacauccaguacccugaugcuacagacgaggacaucaccuc

SEQ ID NO: 5079 - RNA, 78 nt, Human
gagguuaagugacuugcucaaugccacacugaaaauuuagcacaaagccaggucuggagcagagguggcuugaaccuc

SEQ ID NO: 5080 - RNA, 81 nt, Human
gagguuaucuugugguuuauuuuauauucuacuuaacuuuaacauuucugcagguagaauaaauauccuauuuaaagcuuu

SEQ ID NO: 5081 - RNA, 77 nt, Human
gagguucuauuguauccuuggccagaaacugggugaaaagaauaagcagacaauuuuuggagauacugaggaauuuc

SEQ ID NO: 5082 - RNA, 65 nt, Human
gaguaaaggagugucucaagguacuugaucacgugguucuugaaguccuuggauuucucuuucuc

SEQ ID NO: 5083 - RNA, 92 nt, Human
gaguagcuaugacaaugaggaguuuuaagagugagaaaacacaaugucuaugagaacauggacuucucuuuuagaggcuccaugagcuacuc

SEQ ID NO: 5084 - RNA, 79 nt, Human
gaguauugaucugucccagccugugcauugcuccgaggcaguucugaguggaugauguacagaugggauuccucagcuc

SEQ ID NO: 5085 - RNA, 74 nt, Human
gagucaagcccaagagcucccuuggcccuguuccccacucccuccacuggccucugcuguuccugucuuugcuc

SEQ ID NO: 5086 - RNA, 114 nt, Human
gaguccucagguugaugcugcagagccugcgggugaacagaguugggccugaggagcugccuguugugggccagcugcuucgacugcugcuucagcaugcaccccucaggacuc

SEQ ID NO: 5087 - RNA, 84 nt, Human
gagucuaugaacuggccacuuuucagaugaaaccuggugggccagcucuguggggugaugcauuuaaaagggcaguucaugcuc

SEQ ID NO: 5088 - RNA, 99 nt, Human
gagucucgcuuugucgcccaggcuggagugcaguggugcgaucucugcucacugcaagcuccgccucccggguucacgccauucuccugccucagccuc

SEQ ID NO: 5089 - RNA, 86 nt, Human
gagucuugcucugucacccaggcuggagugcaguggcucaaucuuggcucacugcaaccuccgccucccggguucaagugauucuc

SEQ ID NO: 5090 - RNA, 86 nt, Human
gagucuugcucugucgcccaggcugaauugcaguggggccaucucagcucacugcaaccuucaccuuccggguucaagcaguucuc

SEQ ID NO: 5091 - RNA, 68 nt, Human
gagugagggugggagggugugucugagcugggacuuuuuugagcacuggucauaccccccaccugcuc

SEQ ID NO: 5092 - RNA, 60 nt, Human
gaguggagggcuguggaguugggggccccuguucuuccccaacuuggcuuuccuuuucuu

SEQ ID NO: 5093 - RNA, 78 nt, Human
gaguggagugcggguggugggaaucccugggaggauuacgaaauccuuaaagugggauuuaccaaacgcauuccuuuc

SEQ ID NO: 5094 - RNA, 74 nt, Human
gaguggccggcagagcagugggcaucaaccuggcaggggccacccagaugccugcucaguguugugggccauuu

SEQ ID NO: 5095 - RNA, 73 nt, Human
gagugguagcugagcuucaggcugggacgugcuucauuaacaacuauaacgucagcccaguggaguugcccuu

SEQ ID NO: 5096 - RNA, 62 nt, Human
gaguggucggcugggcagagugcacgcugcuuggcgccgcaggcugaucccgccguccacuc

SEQ ID NO: 5097 - RNA, 84 nt, Human
gaguuaaugggugcagcacaccaacauggcacauguauacauauguaacaaagcugcauguugugcacauguacccuagaacuu

SEQ ID NO: 5098 - RNA, 80 nt, Human
gaguuagcaucaugaauuugcuuuucuccucuaaaaugcaaagguuagauucaaauuaucaugauugucagcugucacuc

SEQ ID NO: 5099 - RNA, 98 nt, Human
gaguuggagaaucccuuaaagggcccagaauauucacuaguugaucauucagcagguauuuauugagccccuguuaucuuucaggcacucuucuacuu

SEQ ID NO: 5100 - RNA, 90 nt, Human
gaguuuaacuguguaauuuuuggccuaaauagcccugugaaguagauauuauuccaacuuuacagguuagggcaauuuggacuuggauuc

SEQ ID NO: 5101 - RNA, 85 nt, Human
gaguuuagcucuuguugcccaggcuggagugcagugguacgaucucggcucacugcaacuucucccuccugguuucaagcaacuc

SEQ ID NO: 5102 - RNA, 124 nt, Human
gauaacauggaguuaugauagcaguggaggcaggcaggggaaaagggcccaugagauauggauggcagcacucucccccauucccugccauccccacugcacauguauaagcuaaguaaauauu

SEQ ID NO: 5103 - RNA, 97 nt, Human
gauaauguggacuuagauaauuacagguuuaauugggaacaagguguuuggacuuauuucucuucccguggagcagaauuauaaaacccaccuuuuc

SEQ ID NO: 5104 - RNA, 60 nt, Human
gauacaucaucugaaaucuaggacuauccuuggguacuaugacuagaugccuuguguauc

SEQ ID NO: 5105 - RNA, 127 nt, Human
gauaucagugucucucacaucaacacagaaauagggcacuucucaacauuaauuuuggaauuauucaccauuuaaaaauugucacugcucuuuuucauuacuguagauaacugagaguuagcuguuc

SEQ ID NO: 5106 - RNA, 88 nt, Human
gauaugguauugggagaaguagaucggugagcaggggagcaggguuugauccaccccugcuaucagacuucuucuguggagccauguu

SEQ ID NO: 5107 - RNA, 87 nt, Human
gaucaaagacugagccuaggaaguggguuuuuugaggcugcauauacucaaggcaauucuucagaaccacagagggcucauuggauc

SEQ ID NO: 5108 - RNA, 68 nt, Human
gaucacaagggcaacccaccaaacuagcguacuaccaguauggccugggcaaucuuggcccugugauc

SEQ ID NO: 5109 - RNA, 101 nt, Human
gaucacuacucuuggaaucaaagauaaauccaaauacugcauaucagaaacaacaggcaaguaguuguuuaucuuuaauuugaaagacuucaucugugauc

SEQ ID NO: 5110 - RNA, 75 nt, Human
gaucaguuugucucggugaaaaguaaacuuugaaagcuuuccagaguguugaaucuuccaccagaaaacuugauc

SEQ ID NO: 5111 - RNA, 98 nt, Human
gaucauuugagaccagaaguuccaggcuguagugcacuaugaugaucguacguaugaacagccauugcacuccagccugggcaauucagcaagacauc

SEQ ID NO: 5112 - RNA, 111 nt, Human
gauccagauagaugauauguuucuacuagugguugauggccucuuucagcuccaucgcuauggaggcgagguucaucaauaacucagagaaacuuguguccagaguugguc

SEQ ID NO: 5113 - RNA, 87 nt, Human
gauccauuuucacuuauuggagagagcacgauuuauuguggugacaauucaguguggagucgugcugcuccagaguguaaagugguc

SEQ ID NO: 5114 - RNA, 74 nt, Human
gauccgacauuuuuuguauucuuuaagauuuuacaccuaaaaaaucucuccuaucccaaaaauaaugugggauc

SEQ ID NO: 5115 - RNA, 79 nt, Human
gauccuuuuaguuacuugacacuuccauugcccaugaaaaaagaacgcaccuuggaaguuuacuuaguuagaauggauc

SEQ ID NO: 5116 - RNA, 72 nt, Human
gaucgccgggugcaauuuggcauugaaaguggaaagcuccguggcuuccuccguguuggagaccuggugauu

SEQ ID NO: 5117 - RNA, 76 nt, Human
gaucgcguggccgccaaaagaugaggaccccgccaacugaucauggcagcaaaucauaggcaagcggccgcggauc

SEQ ID NO: 5118 - RNA, 89 nt, Human
gaucgcucaaaaagaauacaaggaaaggggugucauuccaccaaaaacuaagggaaaagcacugucccuuuauuuuuaaggagcguauu

SEQ ID NO: 5119 - RNA, 73 nt, Human
gaucgguugcacgcagcugagcaggagagccucaagcgcuccaagguagcucaaccuggugcuggacgagauc

SEQ ID NO: 5120 - RNA, 94 nt, Human
gaucucugggcuuagcuggaaauagcagaaggacagguuccucggcggaccugcugaguuauguuucuucugcaggagcaggugccgagagguu

SEQ ID NO: 5121 - RNA, 64 nt, Human
gaucuugugucuagaggcuccagagccuugcgauaggcuucuugaguacauauaucacgacuuc

SEQ ID NO: 5122 - RNA, 64 nt, Human
gaugaacgcuaccgacauuuaggauucucuguugaugaccuuggaugcuguaaagugauucguc

SEQ ID NO: 5123 - RNA, 78 nt, Human
gaugacccagaucauaguaaugaugaccguucaacaaccccgagccauguacguugcuauccagugacugugucuauc

SEQ ID NO: 5124 - RNA, 67 nt, Human
gaugaccuuucagaugcuuucucuggaacugaaccagagguucacaaaacaaguguaguagguuguu

SEQ ID NO: 5125 - RNA, 84 nt, Human
gaugagaaaagucccaggcuaauggcagaaauuugcacuuugaacauguguguuuuuguguuguggaaccugagauuccuuauu

SEQ ID NO: 5126 - RNA, 76 nt, Human
gaugagaugcaccaaagcucagggaaggcaugaggagggaagguggcucaguagccugggguuggugcagagcguc

SEQ ID NO: 5127 - RNA, 71 nt, Human
gaugaggcagauaggaugauugacaugggcuugagccagauguccagaagauccuggagcacaugccuguc

SEQ ID NO: 5128 - RNA, 84 nt, Human
gaugauuauguguucaguuguuuuaccuauuagacuguaaacuccuuauaaucuaguaaaggcauagauuauauuuuauucauc

SEQ ID NO: 5129 - RNA, 105 nt, Human
gaugcacugguauaauucacuggcuugcccaguugguacucucuuagccauggcuauuccugaugacuaacuggcaguaaaagccaggaaauuauggaggucuac

SEQ ID NO: 5130 - RNA, 65 nt, Human
gaugcuccacagauaauccuaagagguuuucauuacauuuagccuaaucuggaagaucuggcauu

SEQ ID NO: 5131 - RNA, 74 nt, Human
gaugcucccaaacauccuauaugcauccauggaaauuuaaagauccuggaauagcgucuuccaugugggacauc

SEQ ID NO: 5132 - RNA, 92 nt, Human
gaugcuggugcucaguacgggaaagucauagaccgaagagugagggaacuguucgugcagucugaaauuuuccccuuggaaacaccagcauu

SEQ ID NO: 5133 - RNA, 92 nt, Human
gaugcuuuggaagacucauuauucagagcugcagcuggacugccuuagacaucugcauuucucuaucucugaaauaagggacuccgagcauc

SEQ ID NO: 5134 - RNA, 72 nt, Human
gauggaauaguucagaaggaaugguaccaguuccuccuuguaccucugguagaauucggcugugaauccauc

SEQ ID NO: 5135 - RNA, 63 nt, Human
gauggacucauuuccugguccuuaaagaugcagccucuuaagggcuccuugauggaugccauc

SEQ ID NO: 5136 - RNA, 73 nt, Human
gaugggaggccuggggcccugcccgcuggacagcacuaucucuaccagcggugguuccggccuucugauaauc

SEQ ID NO: 5137 - RNA, 70 nt, Human
gaugggcuggguagagagcaggacuggagcuucccucacaggguucugccucuggcccgaucuccccauc

SEQ ID NO: 5138 - RNA, 71 nt, Human
gauggggcaacggcugagggugggggcaguguguaaggcaccuuuugcggucagcccagccacacuccauc

SEQ ID NO: 5139 - RNA, 82 nt, Human
gauggguguaaugccugagauugcacaagcuguggaagagauggauuggcuccucccaacugauauccaggcugaaucuauc

SEQ ID NO: 5140 - RNA, 79 nt, Human
gauggucucauaacugaauauauuaaaaacuuaaauuguauacuuuaaguuggugauuguaugauauaugaguuuuauc

SEQ ID NO: 5141 - RNA, 60 nt, Human
gauguaaacacaaaagaaagugucucagcagggcugagcccuccuucucgugucugcauu

SEQ ID NO: 5142 - RNA, 85 nt, Human
gaugucaaugcugccauugccaccaucaaaacaagcgcagcauccaguuuguggauuggugccccacuggcuucaagguggcauc

SEQ ID NO: 5143 - RNA, 86 nt, Human
gaugucaaugcugccauugccaccaucaaaaccaagcgcacauccaguuuguggauuggugccccacuggcuucaagguuggcauc

SEQ ID NO: 5144 - RNA, 78 nt, Human
gaugugaucgccaaccagccugucgugaucgacaacggauccggugugauuaaagcugguuuugcuggugaucagauc

SEQ ID NO: 5145 - RNA, 61 nt, Human
gauguuucacagccaggcaguuuaugauauuaacagacuagacuccacagguguaaacguc

SEQ ID NO: 5146 - RNA, 90 nt, Human
gauucaguaaaaagugcugaaaaagaaaucagccuaugguuuaagccugaagaacugguugacuacaagucuugugcucaugacuggguc

SEQ ID NO: 5147 - RNA, 74 nt, Human
gauuccucuauugccacugauuggagcugaaaauaaaacugaaauucagcuagaaaaaaaggagcauaugaguc

SEQ ID NO: 5148 - RNA, 82 nt, Human
gauucucugaccgggcugacuuauuucuagguuucuuucaaggggaaacuccugaguagcucuggaauaagagccagagauc

SEQ ID NO: 5149 - RNA, 78 nt, Human
gauuucauaggugucuguuuucuuguacuguuagcagauucugacagaugugaugagaagaagaaugcauuggagauc

SEQ ID NO: 5150 - RNA, 74 nt, Human
gauuugcuuuuaauuacaaauacugugcaugacgaugccuucuucugcaaaaccaauaaauacaagaacaaauu

SEQ ID NO: 5151 - RNA, 75 nt, Human
gauuuugcccagcuaaaggccaacguuaaguguucagaacacauuuaagauaggcuaggcuaagcugggauguuc

SEQ ID NO: 5152 - RNA, 77 nt, Human
gauuuugucccaguccagccuuuaucaucuccacaguguaacuuuuccagugacuuagguucuaaugggacaaauuc

SEQ ID NO: 5153 - RNA, 73 nt, Human
gauuuuucuccaggcuguagaaccugccagacuguaguacaguggcaggcaacuuacaucccuuggaaaaguu

SEQ ID NO: 5154 - RNA, 85 nt, Human
gcaaaauucaaacuuauagugguaaagaaacagguuguucacuugcugaggugcaaaaauucuuaagacuucuguuugaaauugc

SEQ ID NO: 5155 - RNA, 77 nt, Human
gcaaagcaaguggcuuggagagauagugauuuagcucaagagggagugagaugugacuguugccacauguuaaaugc

SEQ ID NO: 5156 - RNA, 89 nt, Human
gcaaauaaaguagacauggucuggauaguugguggcaguucuguuuauaaggaagccaugaaucacccaggccaucuuaaacuauuugu

SEQ ID NO: 5157 - RNA, 65 nt, Human
gcaacuggggaagguauuuauugauccacaccauuuucuuggauuuucuauccuccccagggggc

SEQ ID NO: 5158 - RNA, 61 nt, Human
gcaagaaagagaugcaacccacacacccaauccgccuggggcuugcucuuaacuuuucugu

SEQ ID NO: 5159 - RNA, 72 nt, Human
gcaagcggcgccgcaaccuucugcguaacccguguggggaagaggacuuggaaggcuggugugacguggagc

SEQ ID NO: 5160 - RNA, 89 nt, Human
gcaaggucaucccuugagcugaacgggaagucaaugggauuggcuaccgggucccaauggccaacgugcagcggggggacugaccaugc

SEQ ID NO: 5161 - RNA, 69 nt, Human
gcaaggugugggcaaggucaucccugagcugacgggaagcucaauggauggccuuccggucccaacugc

SEQ ID NO: 5162 - RNA, 82 nt, Human
gcaauaauggaagaacagaguauuuuaauuuuuaucuucaaagaaaaucguacaaugacacugauuuuucuguuaaaacugc

SEQ ID NO: 5163 - RNA, 103 nt, Human
gcaauacucccaccccagccucucgaguagcugggauuacaggcgugugccaccaugccuggcuaauuuuuguauuuguagagaugggguuuugccauguugc

SEQ ID NO: 5164 - RNA, 81 nt, Human
gcaauaggcgggugggugcgugcuuccucccugccccagggcuucucccugaggcugguaggugggccccucgcuuucugc

SEQ ID NO: 5165 - RNA, 96 nt, Human
gcaauccccccacggggcauucuagaucaguccgauguggacuucgacaaggagucucuaucauaugguuucaccauccucagguugggggagugc

SEQ ID NO: 5166 - RNA, 94 nt, Human
gcaaugguuuguguagcaggcuuccugcagacuguauagacugcacaacaaauuucuccuguaccuaugggaagccugucacuuuugacugugc

SEQ ID NO: 5167 - RNA, 78 nt, Human
gcaauucaacuuugaguuaucuuuuaaauaugucuuguauaguucauauucauggcugaaacuugaccacacuauugc

SEQ ID NO: 5168 - RNA, 66 nt, Human
gcacaacugcuagugcccccuucuguggcuggucaugaggcccagagugguaacuggcagucuugu

SEQ ID NO: 5169 - RNA, 83 nt, Human
gcacagcacaggaaccugggcaggcaguccacccucagggccugccugugaccacugcuaaccugugcggaacaaacaugugc

SEQ ID NO: 5170 - RNA, 60 nt, Human
gcacagcagagcuuuccagaggaagccucaccaagccucugcaaugagguucuucugugc

SEQ ID NO: 5171 - RNA, 64 nt, Human
gcacagucucagaugggcaguuagucauuacuuucuuggucaaugccuugugacuagacugugc

SEQ ID NO: 5172 - RNA, 78 nt, Human
gcacauguuggaggagagagccuugggagccacugccacuccaguccugccaccacccuugucuuccucugcaagugc

SEQ ID NO: 5173 - RNA, 99 nt, Human
gcaccacuaugugacugaauuucaggguaaugaugcaccuguggaacaagaaauuaacagugcagaaacuuacuuugaaaagugcagaguagagugugc

SEQ ID NO: 5174 - RNA, 78 nt, Human
gcaccaguaagaaagacugucgcuagcauuuuuauuucaucaucaacaacaaacaugcaguuucuuucucugaugugc

SEQ ID NO: 5175 - RNA, 91 nt, Human
gcacccugugagguaggugcuuuaacugugugcacccugugagguaggugcuuuaacugugugcacauugugagguaggugcugaaacugc

SEQ ID NO: 5176 - RNA, 104 nt, Human
gcaccgaggggccaguaccuucuggauaccuccacaugguccgagugcacugaaccaaaccacauguggcaaugggaugauucucugguacuauccuuuggucc

SEQ ID NO: 5177 - RNA, 80 nt, Human
gcaccucuuggacugaaucguuugucuagacuacauguauuacaaagucucuuuggcaagauugcagcaagaucaugugc

SEQ ID NO: 5178 - RNA, 84 nt, Human
gcacgccaagcggggcuggggugcauccugggcaggggacugaaauguaccugucaggguuugccucagaagugccuggugagc

SEQ ID NO: 5179 - RNA, 83 nt, Human
gcacgcucggggcggccggccagccaggcgcgcagcggcacaaggcggcagucgcagcgccagggguuggcgcccaggugugc

SEQ ID NO: 5180 - RNA, 71 nt, Human
gcacuagauuguaaagacugggguggaccucuuucuuaauguccaauguccuuugucuuaagauuuggugc

SEQ ID NO: 5181 - RNA, 91 nt, Human
gcacucuguguccagacuuuaacuaaaggcggauuucccgagacuacgggugugcuguuagaaggguucugggucugugcacuaaagaggu

SEQ ID NO: 5182 - RNA, 69 nt, Human
gcacugagcuuggaggagguacagguggaccagaugacggcucugccugugaaauccaaauuccagugu

SEQ ID NO: 5183 - RNA, 108 nt, Human
gcacugcucuggcauaggaauacuugaauagcuugguuaaaugaagggauggccaggagauguuacuuuuccaagcuauucaggcacuccuuaugucagagacagcgu

SEQ ID NO: 5184 - RNA, 61 nt, Human
gcacuucccacacuaaaauaacccaguuuuucucaaucuuuugguauuuuuggagaggugu

SEQ ID NO: 5185 - RNA, 64 nt, Human
gcagaagaacauagacaaauaugucgcucuugggacacaaggugcugacauguauacuugcugc

SEQ ID NO: 5186 - RNA, 61 nt, Human
gcagaauacuuuguggccugaaguucaaaaacuauaugggcacgguuaugaaauauuuugu

SEQ ID NO: 5187 - RNA, 85 nt, Human
gcagaauauaagucuuuagccuucccaaguuucuuggcaaaugcaacagcuugaaacucaaaucugcggcuuaggacuguuaggc

SEQ ID NO: 5188 - RNA, 77 nt, Human
gcagaaugcccagagucuucccugguagaugcagguuccauagcgacguucuccugcaaugcacgcugguauucugc

SEQ ID NO: 5189 - RNA, 111 nt, Human
gcagaauucuaaagugaccuuuccccaggugugaucucauccuuugaaccucggcagguccugugaagaugaugagauaucacucugucacuauaguaaaggaaguuuugc

SEQ ID NO: 5190 - RNA, 80 nt, Human
gcagaauugaagaugggaaguucauugggacugugucuuggaaaagcaccaaguucgucucaguuguuccuguuuuuugc

SEQ ID NO: 5191 - RNA, 78 nt, Human
gcagagacuaugauguggaauggggcuaugcuuuugaugugcaucucaaugcuuuuuauccacuccuggucauuuugc

SEQ ID NO: 5192 - RNA, 94 nt, Human
gcagagcuuguguaggaagaaugaaaucugcaauuugacuuuuaggagugucguuuuccgggucaggcagauugguauucagcgcuggcucugc

SEQ ID NO: 5193 - RNA, 71 nt, Human
gcagagguacugagccauaacagagaggcgacuacgcuguugcuuccuguauuggcugcaagucucucugc

SEQ ID NO: 5194 - RNA, 64 nt, Human
gcagaugaauauuaacgaaacccaaaccuuucgggugaccgugaucuuguucgucuuuuuuugc

SEQ ID NO: 5195 - RNA, 106 nt, Human
gcagauguguacagaugcuaaacuguugggaaaaugcugcuuaugagacaucucugcuucuugagaccugaaucugcaaauguugagcacuguaccuuacaaaagc

SEQ ID NO: 5196 - RNA, 79 nt, Human
gcagauguugaacgaugggcuggauuguuuuggaaccuuguuccagcagagcccauguguucaugaagaaaacauuugc

SEQ ID NO: 5197 - RNA, 106 nt, Human
gcagauuccuuuuuguuaaaugcugacuguguccuugguuucccauucaccugggaaguagaagaauaaaaaucauuccauaguuccauccaaggagggcagcugc

SEQ ID NO: 5198 - RNA, 63 nt, Human
gcagcaagaugcaagggggucaaagagccuuuuguuugggcauugauaucugcaucaugcugc

SEQ ID NO: 5199 - RNA, 71 nt, Human
gcagcacaaaggcggcgcggugcacgucggaguuguaguacuucagcugcaucugcgccaccugcugcugu

SEQ ID NO: 5200 - RNA, 80 nt, Human
gcagcacccaccuccaaccucgggccagugucuucaggcuuuacuggggaccugcgagcuggccuaaugugguggccugc

SEQ ID NO: 5201 - RNA, 72 nt, Human
gcagcagaaaggcaguauuguguguggucauggagagcauccgaaccacacgacagugcucacugucugugc

SEQ ID NO: 5202 - RNA, 68 nt, Human
gcagcagcagcuccagcagcagcaauugcagcagcagcaguuacugcagcuccagcagcugcuccagc

SEQ ID NO: 5203 - RNA, 78 nt, Human
gcagcauaaaucccaaaccacuccucugcucuccacacuguauggauggaggugcugaggaaguuggagaggugaggc

SEQ ID NO: 5204 - RNA, 77 nt, Human
gcagcccgaacaagaucacucaaggugaaggauaaucuacuaauaccagcacuuugaaugaaaauuuguuucucugc

SEQ ID NO: 5205 - RNA, 72 nt, Human
gcagcccugaagaaaucagguaaauuccgcuccagagacggcagagcugguggcgccauucuucagggcagc

SEQ ID NO: 5206 - RNA, 71 nt, Human
gcagccgggccugaggcugagagcauguaccagaucaaguaugaggagcugcagagccugggcugggaagc

SEQ ID NO: 5207 - RNA, 94 nt, Human
gcagccggggccuucucaacgccucaguaccucggcgggaccgccaugguucugcugcacgugaagcggggcgacgagagccaguuccugcugc

SEQ ID NO: 5208 - RNA, 94 nt, Human
gcagccggggccuucucaacgccucaguaccucggcgggaccgccaugguucugcugcacgugaagcggggcggcgagagccaguuccugcugc

SEQ ID NO: 5209 - RNA, 91 nt, Human
gcagccucccugagguagauguguucuccugucacuuaaagaaccagcuucuccuggucugaguaguaagaggcgcauuugcuguugcugc

SEQ ID NO: 5210 - RNA, 79 nt, Human
gcagccuccugagguagguaaccuuguuuacugauggggaacaaggcaguguucuuuaccaaaucucagggcggguagc

SEQ ID NO: 5211 - RNA, 76 nt, Human
gcagccuugcucuguggcuuuucccaacacaaucagugcuagugcuggggaggaacagucaagagcagucaguugc

SEQ ID NO: 5212 - RNA, 81 nt, Human
gcagcgacgcugaguuucaagaaagccaagauggcugaguccacaggcucacccacgggugcguuuagacugggaugcugc

SEQ ID NO: 5213 - RNA, 99 nt, Human
gcagcggcgccacgcggguccacugguugcacugcgggcuguaggccuccacgcccagcacgucgaagcgcuccauggacucgauguugucaucgcugc

SEQ ID NO: 5214 - RNA, 64 nt, Human
gcagcuaucuagcauggcauugucaccaacucccuucgcauggugaugcgauuaagguagcagc

SEQ ID NO: 5215 - RNA, 73 nt, Human
gcagcuccagcgucaaauuugucuccaccagcuccuccucccggaagagcuucaagagcuaagaaccugcugc

SEQ ID NO: 5216 - RNA, 82 nt, Human
gcagcuccaguaucccaaacuuucuaguccugcugauccucccagcaacgggguggaaacuggagggcagugucuggucugu

SEQ ID NO: 5217 - RNA, 75 nt, Human
gcagcuggaucgggccucagagcaggcggcaggcguugcccacgcugucagcugaggugucaaggucauggcugu

SEQ ID NO: 5218 - RNA, 69 nt, Human
gcagcuguaccuccaggcuuuggagaaagagggcagccucuugucaaagcaggaagaguccaaagcugc

SEQ ID NO: 5219 - RNA, 68 nt, Human
gcaggaacccggaaaagaugcuguuggcacccuccaugcccaguagugaguucuugucgggggccugc

SEQ ID NO: 5220 - RNA, 89 nt, Human
gcaggaccuucacagggagguuauuuugucucucugucucgguuucucugagccacugagacagauggcuguccgcuuugaggcucugc

SEQ ID NO: 5221 - RNA, 97 nt, Human
gcaggacuggagcuuccucaccaggguucugccucuggccccgaucuccccauccacacagcggagccaggccacuggaaaggacagccaguccagc

SEQ ID NO: 5222 - RNA, 70 nt, Human
gcaggagagcauacuuggcaaggaugagaauaccugugugauaaacacagcaucugcacauauuuccugc

SEQ ID NO: 5223 - RNA, 60 nt, Human
gcaggaucuccaacuauaaugcuucuguccuuaaaagcagguggaguugguugaaucugu

SEQ ID NO: 5224 - RNA, 118 nt, Human
gcaggcagaucugggagcuguuugauuucuuucugcuuugcaucaaauucuacucccauuuacugcugaagagaagcagagcuuucugaacuauccaaaaguuuccauuguugucugc

SEQ ID NO: 5225 - RNA, 105 nt, Human
gcaggccccgcuggugcacugaagagccacccuguggcaucgauaaacaccgguguuuaucgaugccaccccuggccuucuuuugcccgaccagggguggcuggc

SEQ ID NO: 5226 - RNA, 79 nt, Human
gcaggccggccagcuggcccggcgccucugggaggccucccguaucccccugcucuaggccaagguggccgcagucugc

SEQ ID NO: 5227 - RNA, 69 nt, Human
gcaggccuggcacagccuuggcuuccacgccugagcgugagagcacgaguuaguuguaguccggcuugc

SEQ ID NO: 5228 - RNA, 76 nt, Human
gcaggcuuuuccauucaaacuuugucauuuguuucuuuaaguucaagaaagacaaaaucuacacugaaauccuugu

SEQ ID NO: 5229 - RNA, 89 nt, Human
gcagggagacuggagagaaagcgaagauguagcccaaagccauagugcuuugugugcccugcaacugagcuuucccugcagcuuucugu

SEQ ID NO: 5230 - RNA, 66 nt, Human
gcaggggcuggcacugaugggcgaggggaggaagugccucccuuagaaacuugggccaaacccugu

SEQ ID NO: 5231 - RNA, 88 nt, Human
gcaggguucucagcagugaugggagggcaggggaagagauguaaaggcuuugagacuggguucccaucgcuggaaaagaaggcucugu

SEQ ID NO: 5232 - RNA, 74 nt, Human
gcagguucuggagaacacuucagugccagcauuaaccgauuagcugcugggcuguggggaguuuccagagaggc

SEQ ID NO: 5233 - RNA, 99 nt, Human
gcagguugguacuacuucugauuaggcagaaaacaccaggauuccuuaagugauccuugaaaugguuauuguuuucugccuugucacauuugccacugu

SEQ ID NO: 5234 - RNA, 109 nt, Human
gcagguuuuuucuucuucaaaaccauucuaccucauuagcauucaagcgagcuguggcucugaugaucauguagcagagugugagggcacugaggagggcaaaacuggc

SEQ ID NO: 5235 - RNA, 77 nt, Human
gcagucaaggcuccaagaaagugagacuucagcacuuuuucacuccugagaaguccacagucaugagccuggcuugc

SEQ ID NO: 5236 - RNA, 73 nt, Human
gcaguccgucuucaagguccagauaacaugagaaaugaagcuucucacaucguuguuggggaugacggacugu

SEQ ID NO: 5237 - RNA, 60 nt, Human
gcagucgcgucgccggcugcucgggccccagccccggccgcuguggugacuccgacgugc

SEQ ID NO: 5238 - RNA, 77 nt, Human
gcagucuuuuuaaaugauacagaaauacguuuauagaugcagaaagacauuuaugauauaucguuaagcagaaaagc

SEQ ID NO: 5239 - RNA, 104 nt, Human
gcaguggaggcucaagaggaaaguuuguuaguggaggcagugguagaggucgucauguacgcuccuuuacacgauaaaaauccuuuugggaacaucuuaacugu

SEQ ID NO: 5240 - RNA, 74 nt, Human
gcaguggagggggcaggaccuccugcuggugcagcaccagcugcugugagcagguccaccggccccuacacugc

SEQ ID NO: 5241 - RNA, 72 nt, Human
gcaguggagggggcaggaccuccugcuggugcagcaccagugcuggagcagguccaccggccccuacauugc

SEQ ID NO: 5242 - RNA, 112 nt, Human
gcagugggcaaaaagugagaaaguaagacugugggaggugacuguuacagaucggaaaacucugauugaaccauucacuuuauuagccaguaaacuuucucaaccccagagc

SEQ ID NO: 5243 - RNA, 114 nt, Human
gcaguguugggagugcuguuggaaagcugagccugagagacagauugaggaaggagauuuacucgguguuuguuucugugucacagcuuuccguccauuuaacucuugaucugu

SEQ ID NO: 5244 - RNA, 77 nt, Human
gcaguguuggggauccagagccaugucggaccugcuacuacugggccugauugggggccugacucucuuacugcugc

SEQ ID NO: 5245 - RNA, 73 nt, Human
gcaguucagagaaggcugcagucagcuaccuugaccuaggggcugaagccuuaacuucccacucugauucugc

SEQ ID NO: 5246 - RNA, 95 nt, Human
gcaguucuugugcuaugggugggagucuucuuccucaaguuucggcagcugugcugcugcuggaugggcugcuccucccagggcucaagggcugu

SEQ ID NO: 5247 - RNA, 72 nt, Human
gcauauagaaaggcaguccugggaccuccuguucuucagaauauacaggucuuuaaacuguaaucagguagc

SEQ ID NO: 5248 - RNA, 62 nt, Human
gcaucccacaguucugagacaagcuuuagucuuuccucuagcagcuucuucugugcagaugc

SEQ ID NO: 5249 - RNA, 60 nt, Human
gcaucgaccgcgggcgcuacgggcuugacucccccaaggccgagguccgcggccaggugc

SEQ ID NO: 5250 - RNA, 111 nt, Human
gcaugauugugugugugugaaugugugcauguaugugugcaugugugaauuaugauuugguguguacacauguauaccugugugggugugcgugcauaugcauaguugugc

SEQ ID NO: 5251 - RNA, 92 nt, Human
gcaugcccacugagagccugaaggaggagcuggcuaccugaagaagaacccgaggaggagcauggaaugccugagaggccagugggcggagc

SEQ ID NO: 5252 - RNA, 75 nt, Human
gcaugccgacuacagcugguaccaggcgggcagugcccgcucagggccuguuacagucuaccccuacaugcaugc

SEQ ID NO: 5253 - RNA, 73 nt, Human
gcaugcugacgagguuuggagaaucgaaacuggcuccgugggcaguuuccuaaaaugugccuccucgaguugc

SEQ ID NO: 5254 - RNA, 76 nt, Human
gcaugcugguggucauccuggcagcugguggguggccugguaugcugcccacucagcuugagacucacccucaugc

SEQ ID NO: 5255 - RNA, 73 nt, Human
gcauggaagaggagcucgggaggacaggguuggggccuccagggucugacaccaccccacuccucuuccuagc

SEQ ID NO: 5256 - RNA, 93 nt, Human
gcaugugcuccugcggcguggggguuuguagacuuggaaaacccuguuggcagaaaguuaagagcucccaggccugaaggcaggacacagugc

SEQ ID NO: 5257 - RNA, 100 nt, Human
gcaugugggcaacucuguguuccugucaguccacggguugagcaguauuggaagccccauccgugggcagcacugagguccaacgggauugcccaggugc

SEQ ID NO: 5258 - RNA, 87 nt, Human
gcauuagauugucauaggagugcaaauccuguugugcacugugcaugcaaggaucuagguggugcacuccuuaugagaaucuaaugc

SEQ ID NO: 5259 - RNA, 72 nt, Human
gcauugcccggaagaucaagucgugcuccuggcaggcgcgccccuggaggaugaggccacucugggcagugc

SEQ ID NO: 5260 - RNA, 71 nt, Human
gcauugcccggaagaucaagucgugcuccuggcaggcgcgcccuggaggaugaggccacucugggcagugc

SEQ ID NO: 5261 - RNA, 78 nt, Human
gcauugcuggggccaugcagggccuagcucuccaccaagggaaagugcugauuuuccuugucaugguccuggccuugc

SEQ ID NO: 5262 - RNA, 77 nt, Human
gcauugggcaagaagauggaugcagggaggaccaugaagcugcuaguuuucccggacaucgacugaggcccaguugc

SEQ ID NO: 5263 - RNA, 85 nt, Human
gcauuuacugcuaagaacauuaaagaauuccuauguuugacuagaaauuuuuuagauuaguguuucuuaaacuugaguaauaugc

SEQ ID NO: 5264 - RNA, 63 nt, Human
gcauuucucugauaaccagugaugaugagcauuuuuucauaugucugcuggcugcauaaaugu

SEQ ID NO: 5265 - RNA, 94 nt, Human
gcauuugguuuuaaaauuuuuaugcuaauauaaaugcucaaguaauuuaaaauauugaaagcaucccuguugguauaaauuucugaguaaaugc

SEQ ID NO: 5266 - RNA, 77 nt, Human
gccaaauugagacaauuucagcaaaucuguaagcaguuuguauguuuaguugggguaaugaaguauuucaguuuugu

SEQ ID NO: 5267 - RNA, 75 nt, Human
gccaacaucgaccaggagaccuaccgcugugaacucauucaaggauggaacauuacuguggaccuggucauuggc

SEQ ID NO: 5268 - RNA, 88 nt, Human
gccaaggaaacaggaugcugauagucuccagcagggccuggacaugugggcugguguguggaacugcugcaacuuucuuccugguggc

SEQ ID NO: 5269 - RNA, 111 nt, Human
gccaaggaugguggcgggcaccuguaaucucagcuacucaggaagcugagacaggagaaucacuugaaccugggaggcggagguugcauuuagccgagaucacaccauugc

SEQ ID NO: 5270 - RNA, 84 nt, Human
gccaagugcagggaugcagguaugaagugcuugugaaauaacagaauucccacaguaauuucuucccuggcuuccugcacuggu

SEQ ID NO: 5271 - RNA, 75 nt, Human
gccaauagguuccaugauucugaugcaguauagaucauuuuucuauccaagauuauaugggaucuaaaaauuggc

SEQ ID NO: 5272 - RNA, 95 nt, Human
gccaauggaauccagguaaaguacaaaaacgccaccuuuuauuguccugucuuauuucucgggaaggaggguucuacuuuacacauuucaugagc

SEQ ID NO: 5273 - RNA, 71 nt, Human
gccaauguccacaaagaauuccuggucagcaccaccgauguccaaaggugcaauaucaaggaagggcaggc

SEQ ID NO: 5274 - RNA, 72 nt, Human
gccaauguccacaaagaauuccuggucagcaccaccgauguccaaagguggcaauaucaaggaagggcaggc

SEQ ID NO: 5275 - RNA, 74 nt, Human
gccacagcccuuaggggaguccagggccagcuggucgaaagugaggaucuugcccccugcccugaggaugcggc

SEQ ID NO: 5276 - RNA, 105 nt, Human
gccacccuauuugcaguuuuucuaaguaacuugguagguugaaagauccaaggucaaaagaacuuauccaguguagcaaauaacaguaaaauaagauaaaguggc

SEQ ID NO: 5277 - RNA, 71 nt, Human
gccaccugcugggcccgcuccaccaccugcaccugcacccgcugcuccucaaucugcugcuuagucuuggc

SEQ ID NO: 5278 - RNA, 89 nt, Human
gccacgguucauuucacccuugacaggcucauugaggauggcauaagcgugugucauucuggaugucuugcaccgggcauagccguggu

SEQ ID NO: 5279 - RNA, 77 nt, Human
gccacguggggaacuaugagggacugggagccaggcaagaagugccugagcaacguccggcaggaguaccggcgggc

SEQ ID NO: 5280 - RNA, 70 nt, Human
gccacucuuccaagccucuuggugcacaguaaccuauugcugaaagcuuuugaacagcugagaaaguggc

SEQ ID NO: 5281 - RNA, 73 nt, Human
gccacugauuguccaaacgcaauucuuguacgagucugcggccaaccgagaauuguggcuggacaucuguggc

SEQ ID NO: 5282 - RNA, 90 nt, Human
gccagagcagacuacuaaagcuuuaccugugagguuuuuguuuacagauuacaauagacuguccaguguagguggagaaacuucucuggc

SEQ ID NO: 5283 - RNA, 63 nt, Human
gccagagcgauauauucaucuggagaaccuuuuggccaggucuuacuuugauccucgugaggc

SEQ ID NO: 5284 - RNA, 112 nt, Human
gccagcaaagcuccuaugccugcuaaacccuagcaccugagagccaaagagguuuuguagagaaccuggucucuuagugauggggacaugguaccuuaggaguccagugagc

SEQ ID NO: 5285 - RNA, 72 nt, Human
gccagcacgccaaguacacuugcucuuucuguggcaaaaccaagaugaagagacgagcugcguggaucuggc

SEQ ID NO: 5286 - RNA, 101 nt, Human
gccagccucagcugucuuggagcagauguguauaguuagagauggggaccuuuucacuguaaauacugcucacauguuccuaggcugacuuuacuaugugc

SEQ ID NO: 5287 - RNA, 76 nt, Human
gccagcggaacuguaccaucgccguccacauugcucacagggacugggaaggcgaugccugucgggagcugcuggu

SEQ ID NO: 5288 - RNA, 75 nt, Human
gccagcucagccuuggcuuuuaacucaauauuccaguccauaggggugguuaaaaguugcugcaaggcugcaggc

SEQ ID NO: 5289 - RNA, 64 nt, Human
gccaggcccagccucauaagccacaacuugggaacaacgugcacaugggauccaugggcuuggc

SEQ ID NO: 5290 - RNA, 60 nt, Human
gccaggccccugcgcgccaagcccugguuggcagccggggaggacgucaggaggcccugc

SEQ ID NO: 5291 - RNA, 94 nt, Human
gccagggcucauggucacucgugacuuacuaguuugauaggcucucacuguggagcuagaaguuccuuggcuguccaauggagccugcaguggc

SEQ ID NO: 5292 - RNA, 85 nt, Human
gccaggguuccagcuucaccaggaccaggcucuucuccuugggccucccagcugacagguccugcccgaagcccagguagauggu

SEQ ID NO: 5293 - RNA, 62 nt, Human
gccaguaacugggaacacacuugggagcaguccuaugucucagugccccuuuaauuucuggc

SEQ ID NO: 5294 - RNA, 79 nt, Human
gccaguggcgcccagccggaauggcauggucugugaagccccacuuccacaaggacugcagcggcgcgugccacguggu

SEQ ID NO: 5295 - RNA, 93 nt, Human
gccauaugagccacuucucagccaccaugucuuuaaauucaucgacauugaacuuggugaagccccauuucuuugagaaguggaucgucuggc

SEQ ID NO: 5296 - RNA, 77 nt, Human
gccaucaaugucaaugacuccgucaccaagagcaguuugacaaccucuauggcugccgggagucccucauagauggc

SEQ ID NO: 5297 - RNA, 60 nt, Human
gccaucagcuccuugggacugaugaacagagucagaagcccaaaggaauugcacuguggc

SEQ ID NO: 5298 - RNA, 75 nt, Human
gccauccagcacccagacuccagcaccggcgaggacccccacuccggcugcaggacccugucccagcgagaccgc

SEQ ID NO: 5299 - RNA, 79 nt, Human
gccauccagugccauccucgucgcugcagcgacacacgcucucgccgccgccaugacugagcagaugacccuucguggc

SEQ ID NO: 5300 - RNA, 86 nt, Human
gccauccugucggugaacggcaccgaccugcgccaggccacccacgaccaggccgugcaggcgcugaagcgcgcgggcaaggaggu

SEQ ID NO: 5301 - RNA, 62 nt, Human
gccaucugcggguccagauccaacaguaauugacuauugaaggcuugcgggcccacaguggu

SEQ ID NO: 5302 - RNA, 73 nt, Human
gccauggcagugacagcgacggcucccagaguccccgcucucugccccccuccagcccugucaggcccauggc

SEQ ID NO: 5303 - RNA, 74 nt, Human
gccauggcggccaugaguuguugcggcggguuucgguuacugcgguggcagcucugucuggccggccccuuggc

SEQ ID NO: 5304 - RNA, 103 nt, Human
gccauucauuguacaguugcaggaaugagagugauuuuaugaugugguacauugggaccauguucuaaaaccuuggguuucugagucugcuuuuugaguaggu

SEQ ID NO: 5305 - RNA, 65 nt, Human
gccauucauuuucauuaacacauauauucuguccugcaauacuggagagguggaaugugucuggc

SEQ ID NO: 5306 - RNA, 69 nt, Human
gccauugagucacuccacccuggggccuaggccaucccgcccuggcccugagaugaugugcuaaauggc

SEQ ID NO: 5307 - RNA, 86 nt, Human
gccauuggccaggccaccagggguccccaugauaaugcacagcuaguugcuugagcaugguuauggugauucgugcccccaacagc

SEQ ID NO: 5308 - RNA, 77 nt, Human
gcccaaagacaaauauugggcaggaaaucaguucucacugagcccgguuuccauguaaaaucucuguuguggugggc

SEQ ID NO: 5309 - RNA, 60 nt, Human
gcccaagaauuugauaaugcuggaugccuugcagacaucauucaguuucuaauauugggc

SEQ ID NO: 5310 - RNA, 91 nt, Human
gcccaagaugugcagcuuccuggaguggagggaccucaaaguugucuauaagagauaugccagccucuacuucugcugcgccaucgagggc

SEQ ID NO: 5311 - RNA, 79 nt, Human
gcccaagcacggaguccccagaggaacacacacgcccaccacaaugcauuucucaggaggugauucaggaacuuagggc

SEQ ID NO: 5312 - RNA, 66 nt, Human
gcccacacuacaggccagggcugcggggcuggcgcaaucccagcccccuuccccgggccacggggc

SEQ ID NO: 5313 - RNA, 63 nt, Human
gcccaccuggcacgggccagcucggauaucgugucccuggcagggcccagugcugggccgggc

SEQ ID NO: 5314 - RNA, 76 nt, Human
gcccacugccauggaguccugcuguggaugggcacgggcaauagcugccaugacccacaggaacccaugaaacggc

SEQ ID NO: 5315 - RNA, 76 nt, Human
gcccacugugacaaugucaccgaucuggacgucccugaagcagggggacagguguacagacauguucuuguggcgc

SEQ ID NO: 5316 - RNA, 77 nt, Human
gcccacugugacgaugucaccgaucuggacgucccugaagcagggggacagguguacagacauguuucuuguggcgc

SEQ ID NO: 5317 - RNA, 72 nt, Human
gcccagagccuguguggccccgagcacagugcuguuccugacucccugcgcuggcucugccacccccugggc

SEQ ID NO: 5318 - RNA, 67 nt, Human
gcccagaggacucccaacccuggcuuggugucaagaaacagccagcaagaguuaggggccuuagggc

SEQ ID NO: 5319 - RNA, 77 nt, Human
gcccagcccauggcugccaugggaggccugaaggugcuucugcacugggcugguccaggcggcggggagcccugggu

SEQ ID NO: 5320 - RNA, 82 nt, Human
gcccagccccuggcagcacccacgaugcgggaccugccucucaccagccuggcccuaguggggucugcccugggggcucugc

SEQ ID NO: 5321 - RNA, 98 nt, Human
gcccaggcuuggaguugcggguggcguugaccuucaguuucacgugcaaagccuccggccuucacaggguucaccgccauuucuuccgugccucgggc

SEQ ID NO: 5322 - RNA, 87 nt, Human
gcccagggagaaccccuuggauaucgccaggaugauccuagcuaucguucuuuucacucugguggauauggccaggaugccuugggu

SEQ ID NO: 5323 - RNA, 65 nt, Human
gcccagguucacaagugugcaucuuuuggcuucggcgacccuuugcgcaaacacaccaccugggc

SEQ ID NO: 5324 - RNA, 76 nt, Human
gcccagguuccaaggagcucacuacaccccuggucaaucaauggcccucacugggaacgcuuaauggggccgaggc

SEQ ID NO: 5325 - RNA, 86 nt, Human
gcccaguucacuucuuugcagagccuuuuaccccugcacaguuuagaacagagggaccaaaugcuucuaggagucaacuggcuggc

SEQ ID NO: 5326 - RNA, 71 nt, Human
gcccauccgcgaacucacccagaacugggauguggaccuggcggccccacugggcgaguaucuggaggagc

SEQ ID NO: 5327 - RNA, 61 nt, Human
gcccauuaacuucugaauuuugggaaagacacaagaaagagcccaaaguuuucagauaggc

SEQ ID NO: 5328 - RNA, 71 nt, Human
gcccauuggcagggguaccaaagugauccuccaucuuaaagaagaucagacagaguaccuagaagagaggc

SEQ ID NO: 5329 - RNA, 87 nt, Human
gccccaacgucuguucauggcugugguuuuaaaagagucccucaacagaugcucuauuuaauaaccaguuuguuccucagauguggc

SEQ ID NO: 5330 - RNA, 71 nt, Human
gccccacuuuuaaaaaccuggcuccuuacucuggcugggucccggggaagagauauuuuuaaaacaagggc

SEQ ID NO: 5331 - RNA, 60 nt, Human
gccccagcagccccugcagccuccaggcccucucgccgggccacagcguagggcuggggu

SEQ ID NO: 5332 - RNA, 86 nt, Human
gccccagggcagccucgugcgugugauccagcgagcgggccugguguuccccaacauggaagcauaugccggucucucccuggcgc

SEQ ID NO: 5333 - RNA, 73 nt, Human
gccccauucuuaccguuuuuguuacuucgaaaucauuugacgauuuuggguggaccuggacugaggcgugggc

SEQ ID NO: 5334 - RNA, 96 nt, Human
gccccccuacuuccgcuuccugacacucauggccuuccacgucuuccuccaagagaagguggaccuggcagugguggaggugggcauuggcggggc

SEQ ID NO: 5335 - RNA, 96 nt, Human
gcccccucccgaggaggucgagccgggcagugggguccgcaucgugguggaguacugugaacccugcggcuucgaggcgaccuaccuggagcuggc

SEQ ID NO: 5336 - RNA, 69 nt, Human
gccccgcggggagcccgcgggcucgucaccacacacaacgugcgcucgagcacacgggcuacacggggc

SEQ ID NO: 5337 - RNA, 73 nt, Human
gccccggggucuggcggaugaugaagauugagagcccucucuuagagcagaggaugaucggguuccccggggu

SEQ ID NO: 5338 - RNA, 77 nt, Human
gccccuauggggcccacaugggugguaacagcagcaggacaccuuuuccaaagcuguccaccagccccacuaggggc

SEQ ID NO: 5339 - RNA, 80 nt, Human
gccccucacccaaguggcggcaucuuaacggcauugguggaagcuggggucagaaaagagaaaugaccauuuggaggggc

SEQ ID NO: 5340 - RNA, 84 nt, Human
gcccggccgugcacccagccugcggcagagagggcggcgucccccacaaagccugccaggcugagcccuugcaauggccguggc

SEQ ID NO: 5341 - RNA, 92 nt, Human
gcccggugcucgguuuguaggcagugucauuagcugauuguacuguggugguuacaaucacuaacuccacugccaucaaaacaaggcacagc

SEQ ID NO: 5342 - RNA, 77 nt, Human
gcccucaaccggcggccgcgccaugcugcgggguaacacccgcggggcgguauggagagcggcacacgccggggggc

SEQ ID NO: 5343 - RNA, 87 nt, Human
gcccucaccugcuugcuccuaaaugugauccugcuuacuguaacuucuuaagacacuaucagugcguuguuccaugaaggcgagggc

SEQ ID NO: 5344 - RNA, 76 nt, Human
gcccucagggaacuuuguggccugugggggguuggacaacaucugcuccaucuacagccucaagacccgcgagggc

SEQ ID NO: 5345 - RNA, 84 nt, Human
gcccucugccugccccuaacgcccaacuccaugccugccucagucaugguuuguuuuugcuucuggaagggguagauggagggu

SEQ ID NO: 5346 - RNA, 79 nt, Human
gcccugagcaggaagaugugccacuuccuagcaggcgcaaggccugugcggaagaaacgccgcucccugccaccagggc

SEQ ID NO: 5347 - RNA, 78 nt, Human
gcccugagucaaggugcagcaggaucccguugagcugccccauccguagggcguaggggccugcaccgcccucagagc

SEQ ID NO: 5348 - RNA, 90 nt, Human
gcccugcaguucuacgaggcguucccaagggccaggcuaucagagcgacaggcacgggcacugggccugcugagcgccguggagcggggu

SEQ ID NO: 5349 - RNA, 76 nt, Human
gcccugccaagcacagcguagaucuggaaagagcagaaugcuuuccuuuucagauguggcuggucauggaaggggc

SEQ ID NO: 5350 - RNA, 78 nt, Human
gcccugcuggcugaugagcucaucacugucuacagccugccuggcauggacccugacuggcucauuggcgagagaggc

SEQ ID NO: 5351 - RNA, 72 nt, Human
gcccugcuggcugcagagcggcuucagauacggcugucauccaagccaggggagccuuugagccagugcugc

SEQ ID NO: 5352 - RNA, 86 nt, Human
gcccuggugugacuucaagaguucauguuaacuacuuuucuggaaacuuacuuuucuuaguugaugaauucuugaagagccugggc

SEQ ID NO: 5353 - RNA, 83 nt, Human
gcccuuuucccacuuuuuuugcuuguuuaauuuuagagugacaaaacucagauccagcuuguggaugcucuuggggaaacagc

SEQ ID NO: 5354 - RNA, 74 nt, Human
gccgacccuccaaguuagcugacuucugggggaacaacaacgagauccucagugggcuggacauggaggaaggc

SEQ ID NO: 5355 - RNA, 73 nt, Human
gccgcaccaggucuuguagcagcgccuccucgagaagccaacagagcaguaagcgcagcagccggaguguggc

SEQ ID NO: 5356 - RNA, 109 nt, Human
gccgcaccucccccagcccugugcucaccucccuaaacagacucuggaguucaagauccaguguccaaugcaccaugggugaauucacagcagugguggaggcagcagc

SEQ ID NO: 5357 - RNA, 62 nt, Human
gccgcaggagggcucggccgugcugcgggaaaugcucucggucggccuaggcuuucugcugc

SEQ ID NO: 5358 - RNA, 79 nt, Human
gccgcccucagugucuggggccccagggcagagagucaccauccccugcacugggagcagcuccaacauuggggcaggu

SEQ ID NO: 5359 - RNA, 60 nt, Human
gccgccgccgcccggcuccgcucgcggccccucugucugcaggcgugccccggcggcggc

SEQ ID NO: 5360 - RNA, 64 nt, Human
gccgcgccauguccugcuuggcccgcugcagggcggccuccagcucggacaacuaggcguuggc

SEQ ID NO: 5361 - RNA, 76 nt, Human
gccgcgcuguugccgcggcuuguuauucuuaaaauggcgccgcuagaccuggacaaguauguggaaauagcgcggc

SEQ ID NO: 5362 - RNA, 83 nt, Human
gccgcguugcgggccgcccggcuucggcaccaggagcuuguccggcugcucgggaucaaggcccagguggcccuguagcuggc

SEQ ID NO: 5363 - RNA, 80 nt, Human
gccgcugggagccuugagagccaugugcaagaggacagauccuguuccugucaccauugcucucgauucacucagcuggc

SEQ ID NO: 5364 - RNA, 74 nt, Human
gccggagcgcgcggggccggaagaggcgggcggccaguggagguccgcagaguuugggcgccaggcgagacggc

SEQ ID NO: 5365 - RNA, 61 nt, Human
gccggcgcccgggcuguguucccuguggaacccacggggccuucucguacccuggcccggc

SEQ ID NO: 5366 - RNA, 78 nt, Human
gccggcgcuugcgcuccugcucgaucuucugcugcuucuccagcuucucagugaugcgggccucgcgcagggacuggc

SEQ ID NO: 5367 - RNA, 61 nt, Human
gccggcggggcgcgggcgcggcggccccggaggaugcugcugagccccggcacugccuggc

SEQ ID NO: 5368 - RNA, 78 nt, Human
gccggguggaggcgaugcgccuagggccgggcuggagccacucgugccacgccaugcuguacgccgccaacccugggc

SEQ ID NO: 5369 - RNA, 63 nt, Human
gccggguugggaccgcugcgggcccgccugccuuuggcgucgccggccguucccguucccggc

SEQ ID NO: 5370 - RNA, 63 nt, Human
gccgguuuggcaccauuugcucuuuauccaccuccuucugaaguuguaaugccaauaaccugu

SEQ ID NO: 5371 - RNA, 75 nt, Human
gccgucggaguccagcacgggaggcguggucuuguaguuguucuccggcuacccauugcucucccacuccacggc

SEQ ID NO: 5372 - RNA, 75 nt, Human
gccgucggaguccagcacgggaggcguggucuuguaguuguucuccggcugcccauugcucucccacuccacggc

SEQ ID NO: 5373 - RNA, 75 nt, Human
gccgucggaguccaucaugggagguguggucuuguaguuguucuccggcugcccauugcucucccacuccacggc

SEQ ID NO: 5374 - RNA, 75 nt, Human
gccgucuccccugcucccggugcucugcgagaucuccccugaccagaucuccacagcccggacccgggggcuggc

SEQ ID NO: 5375 - RNA, 93 nt, Human
gccguggagugggagagcagcgggcagccggagaacaacuacaacaccacgccucccaugcuggacuccgacggcuccuucuuccucuacagc

SEQ ID NO: 5376 - RNA, 86 nt, Human
gccguggcucuuccaggcguccgugugaggguucgugaccaggagacaaugcaggucucgggccucgguggugccugggucucggc

SEQ ID NO: 5377 - RNA, 101 nt, Human
gccguguggacaggggacaacacugccgagugggaccauuugaagaucucuauuccuaugugucucagcuuggggcuggugggacuuuccuucuguggggc

SEQ ID NO: 5378 - RNA, 93 nt, Human
gccuaaauacauuuuugcuuacuagcuauuuaaaauaaauucuuaaucagaggaggccuuuggguuuuauuggucaaaucuuuguaagcuggc

SEQ ID NO: 5379 - RNA, 80 nt, Human
gccuaacucagcuucuaguccuuggaaauuaagcagcucauugaaaauucaagaguuccagccagaagcuacagcuaggc

SEQ ID NO: 5380 - RNA, 105 nt, Human
gccuacugacuuaauaaauuucagaggcagaagagaagcugcagagcucaguccuugacacugaacuuucucacugcuucuaaggguggaagaggucaguuuggu

SEQ ID NO: 5381 - RNA, 72 nt, Human
gccuacugagcagagagugguccagguauugaauggacucaauauccuagaaggacucacauucuagcaggc

SEQ ID NO: 5382 - RNA, 74 nt, Human
gccuagagugaugugccgccugcaggaccagggccucauccuguaccaccagcaccagcacagcugcugugagu

SEQ ID NO: 5383 - RNA, 79 nt, Human
gccuaggaacuuggugacuaucauuugaacaacuaggcagccauacugcagucaguugucauggggucauucccuaggc

SEQ ID NO: 5384 - RNA, 63 nt, Human
gccuagucuuuuccauaaaaugaauaagaaguacauuugguggaguuugagaccagccugggc

SEQ ID NO: 5385 - RNA, 76 nt, Human
gccucacuggcuggguucaaaaagggaggggccaggcacaguggcucacgccuguaaucccggcacuuugggaggc

SEQ ID NO: 5386 - RNA, 92 nt, Human
gccucagagggaaacagggucuacauuucucugggagaaaaagccugcacacagguccccaaggagcagugggcuuugaaucuugauggggu

SEQ ID NO: 5387 - RNA, 82 nt, Human
gccucagccucucaaguagcugggacuacaggcaugugccaacacacccagcuaauuuuugcacuuucaguagagauggggu

SEQ ID NO: 5388 - RNA, 89 nt, Human
gccucaguggaagcaagcaugguagugaguggaagauggcaucagagugucauguucuaccucuuauucuagaugcugguuccuuaggc

SEQ ID NO: 5389 - RNA, 71 nt, Human
gccucccaaacuggugagauuacaggcaugagcaccacaacuggccugaaauucuuaaaggaugggagugu

SEQ ID NO: 5390 - RNA, 74 nt, Human
gccucccggauccaggcguccgggaucugcgccaccagaaccuagccuccugcagaccuccgccaucugggggc

SEQ ID NO: 5391 - RNA, 128 nt, Human
gccuccuguaacagucgccuuuuguguucugcuggcauuuguuugaacacaguccacagguucagugguugcaucucuaaucagcugccaguccccaucccagacauucuuugcaucuaagcugaggu

SEQ ID NO: 5392 - RNA, 60 nt, Human
gccuccuucucaaaacucaaauacucuuuauucaucuaagggucugggagagucgggggu

SEQ ID NO: 5393 - RNA, 71 nt, Human
gccucuauacaaaauugagauggggguugggggcaggggcucaugccugcaaucccagcacuuagggaggc

SEQ ID NO: 5394 - RNA, 61 nt, Human
gccucuccuggggccacuguugggggugggagugagcccaccacagaggccacaggcaggc

SEQ ID NO: 5395 - RNA, 74 nt, Human
gccucuggcuuuaccauugaaauuuaagaacuagaacgauuucuuaaaguaagugugggucaagguccuaaggc

SEQ ID NO: 5396 - RNA, 67 nt, Human
gccucuuacccacugggauaggaaccaaaauguguucacugucccuguuuagccaaggguagguggc

SEQ ID NO: 5397 - RNA, 88 nt, Human
gccucuucugaaggaaaagacaguguaguccugcaaaacaucuugaggacuacuguucgaagauuuuuggaagaauacugagaacggc

SEQ ID NO: 5398 - RNA, 103 nt, Human
gccucuuguggucggaagcaccgagugugcuacuucuauccguggucguaccuugauggagcggaaggcagauuagacaucgaggcuuccggaaaacaaaggc

SEQ ID NO: 5399 - RNA, 89 nt, Human
gccugaagacguacacuggccacaagaaugagaaauacugcauauuugccaauuucucuguuacuggugggaaguggauugugucuggc

SEQ ID NO: 5400 - RNA, 60 nt, Human
gccugacaggacauuugaaauuaagauuggacagcccacuguuuccuacuuccugaaggc

SEQ ID NO: 5401 - RNA, 76 nt, Human
gccugaccuugacucuugugcuggucuuugaaagacaccagaagaaggccaacaccaacacggaccugaggcuggc

SEQ ID NO: 5402 - RNA, 80 nt, Human
gccugaugguauacuacugcuuugcggaauugcauacaacugugcauuacaaaguuaauaugguaauuauggucuggggu

SEQ ID NO: 5403 - RNA, 80 nt, Human
gccuggaauaaaagaggagaaaaaagcuguaagccacaaaaaagugacuaagcuuucucaacuacuuuucuucauaaugc

SEQ ID NO: 5404 - RNA, 70 nt, Human
gccugggacgugcccauuuuuacuguaaauuaugauuccguaacugacuuguaguaagcagguuucuggc

SEQ ID NO: 5405 - RNA, 90 nt, Human
gccugggccgggagugggccacguggggacuacuguguggagcugaccgcacuccccagcaugcuggcauccagcuccccaagggccagc

SEQ ID NO: 5406 - RNA, 87 nt, Human
gccugggcugcccccacuucucccauaauucccugcccuagagcagcaccuccagagcuaggagaaggagagggggccacccaaggc

SEQ ID NO: 5407 - RNA, 69 nt, Human
gccuguccaaucagaggauccauuuuaugguugaugcgaauacaacgguaacccgaucccuugcauggc

SEQ ID NO: 5408 - RNA, 63 nt, Human
gccuguggcuuugacccagugggcuuggccugguuggcaggcccaucgucggaggguucaggc

SEQ ID NO: 5409 - RNA, 82 nt, Human
gccuguguugcccaggcuguuuucaaacuugggcccaagcaguccugcugccucagccuccagaauagcugggauuacaggc

SEQ ID NO: 5410 - RNA, 81 nt, Human
gccuuaagaaaauagcuuccugucucaggcuuucuaggaagucacaaacuaggugucugggaggcaguuuuagguaagugc

SEQ ID NO: 5411 - RNA, 66 nt, Human
gccuuaguucuguucaaauagagaccugaaucaaauauuguaguuuagguucaaacagaguauggc

SEQ ID NO: 5412 - RNA, 76 nt, Human
gccuuccgggcuuuugggcuauuuuacaacauuguagcugauugcaaugcaaaaauagcccggccccuagacaggu

SEQ ID NO: 5413 - RNA, 76 nt, Human
gccuuccuccagcagcagggaggggaggacuggcugucucagaaucuuuuaaaagcccugcugucugaggaccugc

SEQ ID NO: 5414 - RNA, 94 nt, Human
gccuucucagaguacggcucaggcuugggggccggcugcuuggggguccgguugagguggaccccaagccugagccguccuucucagaguacgc

SEQ ID NO: 5415 - RNA, 74 nt, Human
gccuucucucuccuggugcaaaauggcaacucuuaaggagaaaacucauugcaccagcuugcggaagaagaggc

SEQ ID NO: 5416 - RNA, 78 nt, Human
gccuugaaccugagggggauuccacagcuguuuggaggcaucugcuguugauacugcuggaauccagaguggugaggc

SEQ ID NO: 5417 - RNA, 66 nt, Human
gccuugcacacucauuacauuuguaagguuucucuccaguaugaauuuuccgaugucgugcaaggu

SEQ ID NO: 5418 - RNA, 69 nt, Human
gccuuggcgcugccggucccaacuugauccaaggagccuugagaaggagaugagauucaguaccagggc

SEQ ID NO: 5419 - RNA, 86 nt, Human
gccuuguccugaguuucucacuuggcuucaggaaggccccagguaggauuccagaaaccagugaagauguggccacaggaggaggu

SEQ ID NO: 5420 - RNA, 75 nt, Human
gccuugugcauuagaaaccugcagcuuggcaagaacaacaaaaaaggugaaggugucacagucagugcacucagc

SEQ ID NO: 5421 - RNA, 79 nt, Human
gccuuuugcuuuugauuuuaauauaaauacuuauuuuagcuuuauaaguuauugaauguuugauacaaaggauggaggc

SEQ ID NO: 5422 - RNA, 102 nt, Human
gcgaacguugggaacauuuuaggguuuaaugaacuuugucauaaguaacagacgauacguucuuaaagcacaguucuuggauccaccaauacaacguucagc

SEQ ID NO: 5423 - RNA, 77 nt, Human
gcgaagaagggaccccaggucagagacuggagccauuacuucaagaucaucgaggaccugagggcucagaucuucgc

SEQ ID NO: 5424 - RNA, 85 nt, Human
gcgaccacaacuaccaagagcuacauccuuagagcgcucgggcagcugaugcucuuuguggauggaaugcugggggugguggcgc

SEQ ID NO: 5425 - RNA, 65 nt, Human
gcgacccccuccgagaucugcuuauguucccaauggaagauauaucuaucucggugauaggucgu

SEQ ID NO: 5426 - RNA, 61 nt, Human
gcgacgggcaggacgccccguucgccuagcgcgugcucaggaguugguguccugccugcgc

SEQ ID NO: 5427 - RNA, 71 nt, Human
gcgagcuacagcuucaccaccacggcgagcgggaaaucgugcgcgacaucacaggggaagcugugguacgu

SEQ ID NO: 5428 - RNA, 73 nt, Human
gcgaggagcugaggaggggcacaguucuauugccaccaccaccagggcugugccccuggccgccagugggugc

SEQ ID NO: 5429 - RNA, 70 nt, Human
gcgagucgcgcgagaggguggccgacagcggaggcaaacguugugcgcgcgcacaugagcgcgugcucgu

SEQ ID NO: 5430 - RNA, 103 nt, Human
gcgaugacuucuguuucuuccagaugcucaugggugggggugugugucgcacagugacacucaacuucaacaugccaggcgccuuugugcaugaagucauggu

SEQ ID NO: 5431 - RNA, 72 nt, Human
gcgaugcaacagagaagaauaaggaguuucucccgcguuuaggagcuacuauugaacauaucucagucucgc

SEQ ID NO: 5432 - RNA, 83 nt, Human
gcgauggcugcgacgcgugcagggccuugcgcccgcgagaucuucaccucgcuggaguacggaccggugccggagagccacgc

SEQ ID NO: 5433 - RNA, 62 nt, Human
gcgcagcgagcgccggaagcggaggaguaccgacucuuccagcgucucgggcuccuugcagc

SEQ ID NO: 5434 - RNA, 88 nt, Human
gcgcaggucgguagugaggggaucgugcuggaucgucuggugcagcaucagggccagcaaucccgcgcgguuugucaugguugugcgc

SEQ ID NO: 5435 - RNA, 74 nt, Human
gcgcaugugcacguagacgcgcaaugcgggugacgugcuugaccucgcauacaggcuauacguggauaaugcgc

SEQ ID NO: 5436 - RNA, 81 nt, Human
gcgccacugucagcuuagaaggggccuuagggaaccuggcaggaggagucccugaggccaacucuuccugauuuauuuugc

SEQ ID NO: 5437 - RNA, 77 nt, Human
gcgcccccuuggcgccggguguccugccgcugcuugcgcagcggcccuuguuucuucuuacccguuguuaggggcgc

SEQ ID NO: 5438 - RNA, 63 nt, Human
gcgccggagggcuggcacugcugggggacccauuacacccuccgcagccgcuggcccaggugc

SEQ ID NO: 5439 - RNA, 65 nt, Human
gcgccggccgaucccgccuggggacacacucuccugggacuggucccuggcacacucgugggcgc

SEQ ID NO: 5440 - RNA, 83 nt, Human
gcgcgagaaggaaaaauggagugucauuugcagaugucucuggaguggccaauucuauucucauaucauuuccggucucucgc

SEQ ID NO: 5441 - RNA, 95 nt, Human
gcgcgcgggucuugcgaacgaccgccggcucccugacaucuccgucccaccccgccccggagaugauugugugugcggucggcuagccgcgcugc

SEQ ID NO: 5442 - RNA, 76 nt, Human
gcgcgcucgcguccccucgugcgggcuccagccgcagccuuagcuucggcucccggcuuggguggcgcggccgugc

SEQ ID NO: 5443 - RNA, 111 nt, Human
gcgcgcugcuggcucugugcggggcacuggcugccugcggguggcuccugggcgccgaagcccaggagcccggggcgcccgcggcgggcaugaggcggcgccggcggcugc

SEQ ID NO: 5444 - RNA, 87 nt, Human
gcgcggucugcgcguucccauuuuccacaggaggcgccgauuuuuuuucgaaccaccucccgcaagaaaaugguguugucgccgugc

SEQ ID NO: 5445 - RNA, 87 nt, Human
gcgcgucugugauucuuccuucuugacuuuuugcugccuucucuccccgcagcggacuuuaggggauuacaggaugauaggcugcgu

SEQ ID NO: 5446 - RNA, 71 nt, Human
gcgcguggguucccucguggagcccacagguuucuccuggggccaccaagcggggggacaaaacuccgcgc

SEQ ID NO: 5447 - RNA, 82 nt, Human
gcgcucgccuugcagcgguugcgccgagaccauuuccgagaggaaggcuucggacucuuugucaccgugcaaaauguugcgc

SEQ ID NO: 5448 - RNA, 89 nt, Human
gcggagcucgggugguaacgccagcgacggggaguggcuauaaauacagaugaagcuucgcuggcuugccggccccuaaccugcugugc

SEQ ID NO: 5449 - RNA, 65 nt, Human
gcggagcuuaugauacaccaacaauaguagagggguaucauugagaggugauuaggggacucugc

SEQ ID NO: 5450 - RNA, 75 nt, Human
gcggagggcgaggcggcguggacagcggccccggcacccagcgccccgccgcccgcaagccgcgcgcccguccgc

SEQ ID NO: 5451 - RNA, 74 nt, Human
gcggaggugacccugagaguguggcuggggaguaugggcggcacucccucuacaaaaugcuugguuacuucagc

SEQ ID NO: 5452 - RNA, 73 nt, Human
gcggagucucggcgugcccuggggcggcgcgggcgcaggggcgcgugcgcggcgggcugucguuggcuggagc

SEQ ID NO: 5453 - RNA, 89 nt, Human
gcggaguggccgggcccgagugcacgugucugaggagggcacugagcccgaggcgaugcuccaggugcugggccccaagccggcucugc

SEQ ID NO: 5454 - RNA, 89 nt, Human
gcggaguggccgggcccgagugcacgugucugaggagggcacugagcccgaugcgaugcuccaggugcugggccccaagccggcucugc

SEQ ID NO: 5455 - RNA, 71 nt, Human
gcggcaacauucagguccuggaugccagcgacgcuuaucaguuguugcuggcaaucaaacccgacacccgc

SEQ ID NO: 5456 - RNA, 66 nt, Human
gcggcagggcauggugugccucgggcucuauagagccgagcccgcuggguacccgcccgguaccgc

SEQ ID NO: 5457 - RNA, 89 nt, Human
gcggccgcgggccaggcugucacucagguuccugucaaggucaggacauucagcagaaccugugucaggccgcugaggccccgcgcagc

SEQ ID NO: 5458 - RNA, 103 nt, Human
gcggccucauuugcugucaagcuuuucaaagcauggauggcagaaaacagaugccaacucugucacucgucuaugagaaaagccaacuuagacaagaggcugc

SEQ ID NO: 5459 - RNA, 60 nt, Human
gcggccuccuucccaggcucuggggcagcgcaagagggguaggcugggaggggcugccgc

SEQ ID NO: 5460 - RNA, 60 nt, Human
gcggccuccuucccaggcucuggggcagcgcaggagggguaggcugggaggggcugccgc

SEQ ID NO: 5461 - RNA, 65 nt, Human
gcggccucgcugccgcaucccaggcuaagcgcugcgcgcaaagccgugcggagauuggaggccgc

SEQ ID NO: 5462 - RNA, 93 nt, Human
gcggcgaacuucugcacacagcuccaguguuugcucuggaucucgaugacuuucucuagcguggccacugcguugauguugggcuuuugcugc

SEQ ID NO: 5463 - RNA, 89 nt, Human
gcggcucugggcgcuguuguuuggucuuuaggccugcggaggggcguuaucuggagggccgcgggugcaggccgcagugacagggccgc

SEQ ID NO: 5464 - RNA, 97 nt, Human
gcggcugcuagggcagcggugaugaacagugagagauucccacugugaagcauaguggauggauaggaauacuucaucacggcucagccagcguugc

SEQ ID NO: 5465 - RNA, 61 nt, Human
gcggcugcuccggcuucuggccccuggcgggcuucuuguccgcgcgccgggagccggccgc

SEQ ID NO: 5466 - RNA, 87 nt, Human
gcggcugggacccuguacacguauccugaaaacuggagggccuucaaggcucucaucgcugcucaguacagcggggcucagguccgc

SEQ ID NO: 5467 - RNA, 81 nt, Human
gcggcugggguggcagggccgguguuucugugcugauuucaggguacaggacacuguuggcuuuagagaccaccaggcugu

SEQ ID NO: 5468 - RNA, 60 nt, Human
gcggcuguccccugccggggccgcccuacucuggggcuuccugcuccagcugacagccgc

SEQ ID NO: 5469 - RNA, 77 nt, Human
gcgggaggcgugcugggcgcggggcugcggugcccagaggcugcggcauuaggggcucggcgcccccgaccuuccgc

SEQ ID NO: 5470 - RNA, 85 nt, Human
gcgggccgcccacggccacgccgcaguggaagagcaccggcucgccgucguucacgcuguagaacacgcggccguggcggucggc

SEQ ID NO: 5471 - RNA, 73 nt, Human
gcgggccgcugccaugacgaccgccaucuuggagcgccugagcacccugucggucagcgggcagcagcugcgc

SEQ ID NO: 5472 - RNA, 86 nt, Human
gcgggcucucucacgccgcggccucacccggcggugcuucggcaggcggccggcgcggggcgcaggcggcgcggccaugggcucgc

SEQ ID NO: 5473 - RNA, 83 nt, Human
gcgggcugccaucuaguuggacgcggauucucuggcccacaauuucgcuggggaagaccaaguccucaaggauggcaucgugc

SEQ ID NO: 5474 - RNA, 70 nt, Human
gcgggcuuuugucucuggauucgauggcucugcgggcacagccaucaucacagaagagcaugcagccagu

SEQ ID NO: 5475 - RNA, 85 nt, Human
gcggggaacaccaauggcgggguacuugaagcugguguguguuuccuuucagcgucaaggguuccacacuguugggagucgcugc

SEQ ID NO: 5476 - RNA, 87 nt, Human
gcggggaugguccucuguggacaccaagagcuggccuccuaccugggguggccggacauccgcgucugcagagcggggcccacccgc

SEQ ID NO: 5477 - RNA, 72 nt, Human
gcggggccggucguaaccgcgccgcgggccggacgaugcccaagaagcugcugcuguugcccccggccucgc

SEQ ID NO: 5478 - RNA, 96 nt, Human
gcggggcggaggcacucgcgcgggggguaauucggggucuggguucuggugccgcgcagcuuuccccgauggcccacugcgugaccuugguucagc

SEQ ID NO: 5479 - RNA, 63 nt, Human
gcgggggguugcugcgccguccuccacuacuggcuacuggcgcugcagccaugcagcccccgc

SEQ ID NO: 5480 - RNA, 72 nt, Human
gcggggguuaggcgcugagacggauuuggcggugagaucgcuguggccaggcugcagcugaaugggccucgu

SEQ ID NO: 5481 - RNA, 91 nt, Human
gcggucaggacgccgccguagccgccggcguagccccccgaggaggacgaggacacaaagcgggcggaggacacggauacgccgcggccgc

SEQ ID NO: 5482 - RNA, 87 nt, Human
gcgguccgagguggaagaaguggauuuugccggcugguuguguaaaacccugcggcugaaccagcccggcacacccacgcgcaccgc

SEQ ID NO: 5483 - RNA, 71 nt, Human
gcgguucugcgcgccgccgaucuugccgaugcugugcaggcugcagagcgcgcacggcucgcuggagccgc

SEQ ID NO: 5484 - RNA, 80 nt, Human
gcguccgggggaccacgccccacacccgggggacagaacuuagccccgaccccgggugcgcggcguccccccgugggcgc

SEQ ID NO: 5485 - RNA, 92 nt, Human
gcguccuccugcgcugaaccgggagcgcucgggugggacucagggagccuugaucacuucccgccugcgucccggacccgguggaggagcgc

SEQ ID NO: 5486 - RNA, 89 nt, Human
gcgucgccgcgaaugguguuguuggagagcgagcaguuccugacggagcugaccagacuuuuccagaagugccggacgucgggcagcgu

SEQ ID NO: 5487 - RNA, 62 nt, Human
gcgucgccgcgccgcagggccagcaucacgcucuggcucugcaucucgcggcgccgcgacgc

SEQ ID NO: 5488 - RNA, 74 nt, Human
gcgucggacaccugggguggcacacacacgcaaaaugucacgccguguaagacacacccgagggaucaugucgc

SEQ ID NO: 5489 - RNA, 71 nt, Human
gcgucuauagagcaacucacagcauugaagcuagcuucauuaaacaagcuuucacugugaguuacugaugc

SEQ ID NO: 5490 - RNA, 74 nt, Human
gcgugccaagcucgacccccuccgcggccacuacuuccucuucgacugcccaggccagguggagcucugcacgc

SEQ ID NO: 5491 - RNA, 85 nt, Human
gcgugggucucuaccucugucuccacccgcaagugcuggagaucuuuggcuuugagggggcugaugcggaggacgugaucuacgu

SEQ ID NO: 5492 - RNA, 76 nt, Human
gcguucugacgcuuuguacgcucugcguucccaugggccaggaacgcggaugggagacaacacagccucgggaugc

SEQ ID NO: 5493 - RNA, 101 nt, Human
aggccugccgucaugucuaagucagagucuccuaaagagcccgaacagcuaaggaagcucuucauuggaggguugagcuuugaaacaacugaugacagccu

SEQ ID NO: 5494 - RNA, 79 nt, Human
aggccugcucucggggaggguaccgugcauccuugcagauggaaacgccuucaugcuggaccaggccgagggcaggccu

SEQ ID NO: 5495 - RNA, 85 nt, Human
aggcgcugguccccuucaaaagggcagggggaccgcaugggggcgucuuuuucuuaaccuuauugcaagggaauaccgugugccu

SEQ ID NO: 5496 - RNA, 74 nt, Human
aggcuggagcaguggugcgcucucggcacugcaaccucugucugccaguuucaaguaguucuccugcccagccu

SEQ ID NO: 5497 - RNA, 89 nt, Human
agggacauugccuuauuucugcuagaucaaaguagaaguccaguuccucuacuuggcaucuguugauaucuggaaagggugguguuccu

SEQ ID NO: 5498 - RNA, 63 nt, Human
agggagcaucuucucucggacucgggaccugguucgggccggggugcugaaggagaagccccu

SEQ ID NO: 5499 - RNA, 72 nt, Human
agggagccucaaauggcacgguagaaaucucagcuucuaaagggauuaugacauugugcccuguggcuuccu

SEQ ID NO: 5500 - RNA, 75 nt, Human
agggaguaaagauaaucugggcugcuccauaagacagaacaggguagcgggguacuaggcagauuuuagcaaccu

SEQ ID NO: 5501 - RNA, 72 nt, Human
agggccgcgauggcuugcgcccagucgggcaccccagguccgguguuuguggagcugccguugacgugcuuu

SEQ ID NO: 5502 - RNA, 75 nt, Human
agggcugacauggugugagugugugggugugugauaagcuucucaucccugcauagaugcaguauucuuagccuu

SEQ ID NO: 5503 - RNA, 87 nt, Human
agggcugcuaaggaagcaaaaaaggcuaagcaagcaucuaaaaagacugcaauggcugcugcuaaggcaccuacaaaggcagcaccu

SEQ ID NO: 5504 - RNA, 78 nt, Human
aggggaugagggggaagaggagcugccuuuuggaggcccccuucaccugcagcuaugaugcccuuccccuucuccccu

SEQ ID NO: 5505 - RNA, 106 nt, Human
aggggcacauggcauggagaguaaauggcagaaucagaauguggacacaaauuuguuugggucugaauccuguguucuuuucauuauaucgagugucuggccuccu

SEQ ID NO: 5506 - RNA, 76 nt, Human
agggucauggcuaagucauuugauucaguagaaaagagauuauaaauacaugaagggcuacuuaacucaugucccu

SEQ ID NO: 5507 - RNA, 63 nt, Human
aggguuuguucauuauugcugauuuggggccugggucucagggcggggagcacugcaggcccu

SEQ ID NO: 5508 - RNA, 64 nt, Human
agguacguaggauaauucacgucgcuacuagccacaaggaguucuccuuauuuuuaauguaccu

SEQ ID NO: 5509 - RNA, 63 nt, Human
aggucaaauuguguccuccaucacugcuucccugagauuugauggagcccugaauguugaccu

SEQ ID NO: 5510 - RNA, 77 nt, Human
agguccgcgcugugucccguguuuucugcgugagaggaaaagaugcuagaaccacaggagaauggcgugauugaccu

SEQ ID NO: 5511 - RNA, 89 nt, Human
agguccuccuuuccuuuuaauuaaaugaauuaaguacauuaauuuuacuaagugauacgauucaauuuucauugaggaaguguggacuu

SEQ ID NO: 5512 - RNA, 77 nt, Human
aggucuagugcaucuuuuaaccagccgaauggaguccuuuacaaacugccgacuuggcucaacaaacugcauuaccu

SEQ ID NO: 5513 - RNA, 79 nt, Human
aggucucguaaucuuggcuuuugaaguguuuaaaccuucuaucaaacaguuucuuaaauaucauuucuucccggguccu

SEQ ID NO: 5514 - RNA, 81 nt, Human
aggucuggaggggccauggggcaguccugggugugggacaccgucgggguuugacccaggguugucuccccuccagagccu

SEQ ID NO: 5515 - RNA, 93 nt, Human
aggugcacccuguggaauuuggcagaaaaggcccaaucgcccuuuagagggugaacugaagccuguuccugcaauguucuaaggagugccccu

SEQ ID NO: 5516 - RNA, 69 nt, Human
aggugcugaggaguuccggaaccccaaggcauccuugcgugugcggcucugugaccuccugagccaccu

SEQ ID NO: 5517 - RNA, 80 nt, Human
agguggcagagaggcaauaucaauccuucugcaucacacagugggaaaaguuugucucauugcaguucucuuccaagccu

SEQ ID NO: 5518 - RNA, 66 nt, Human
agguggguggaucaccugaggucaggagcucgagaccagccuggccaacauggugaaaccccaucu

SEQ ID NO: 5519 - RNA, 113 nt, Human
aggugugucucaggaaggugguucugugcaugccugggugugguuaaggcguggccagaaggcuucccuggugcucucaguccaggcaaagcccagagcaucugagcacgucu

SEQ ID NO: 5520 - RNA, 60 nt, Human
aguaaaacagguuugaacuucuuaacuuccagaagauaggaggaugggaccugugauacu

SEQ ID NO: 5521 - RNA, 77 nt, Human
aguaccaccugcccagagcaaaucugauggacugacuuccgaucaauagguuugauggccuuagcagguucuguacu

SEQ ID NO: 5522 - RNA, 88 nt, Human
aguacuuguuuuucucugauaagacucaggaauucugaaaugugaaauugucucaauucuuucucuuguagcaugaaucaaauguauu

SEQ ID NO: 5523 - RNA, 76 nt, Human
aguagaggugggguuucaucauaguggucagguugggcuugaacuccugaccucaggugaucugccugccucggcu

SEQ ID NO: 5524 - RNA, 79 nt, Human
aguauacuuuuggacaaucugcagcuauaaaaauauacacauacaaaaguacagcuacagauuguccacacaguauacu

SEQ ID NO: 5525 - RNA, 63 nt, Human
aguauugagggggcaucagaauuggguguacagcugagcauucucuccugacucuucuaugcu

SEQ ID NO: 5526 - RNA, 73 nt, Human
aguauugccuauuugcaugggagaaaugauuucugaaguccgucuccugaaacaugcccuuaugcucuuugcu

SEQ ID NO: 5527 - RNA, 84 nt, Human
aguccaccgacucacugcccgcgcacgcgaccgagucuucgcuauugcugaccuacgucugugcugcgguguguccagggggcu

SEQ ID NO: 5528 - RNA, 68 nt, Human
agucccugcuguguacuagaacgacugagcgugagaguugagagucccugcuguguacuagaacgacu

SEQ ID NO: 5529 - RNA, 75 nt, Human
aguccuagcccugcugagugugacaugcaaagcuucgacccacagcaggaagucucacaguucugggcuaggacu

SEQ ID NO: 5530 - RNA, 111 nt, Human
aguccucagagcaagagaugaccuuaucacagaccuacuaaaugaagcaaaacagagacucagcaaggugguaaaagauacaaccagguaccaagugcugcuggauggacu

SEQ ID NO: 5531 - RNA, 72 nt, Human
agucggaaugguacauugguuuuccuuuaugacggacugcgguuuaaaggcccaacuugaacugcuuggauu

SEQ ID NO: 5532 - RNA, 80 nt, Human
agucuaauauagagauuacuggcuuuaacagugaacuggaauaaugagggcuucacugguaaaaugcuucugaauugacu

SEQ ID NO: 5533 - RNA, 82 nt, Human
agucucacucugucacccaggcuggagugcaguggcaugaucuugguucacugcaaccucugcuucugggauucaagagauu

SEQ ID NO: 5534 - RNA, 62 nt, Human
agucucauguggcugcugcaccuccagauauaugcucucaaacaguguggccugaugaaacu

SEQ ID NO: 5535 - RNA, 66 nt, Human
agucuguauagcaauaugcuuggagaggagaauacuuaucucuggcgcacaucaccuauauuggcu

SEQ ID NO: 5536 - RNA, 83 nt, Human
agucuuacuauguugcccaggcugguccugaacucuuggccucgagagauccugcugccucaaccucccaaguagcuaagauu

SEQ ID NO: 5537 - RNA, 82 nt, Human
agucuugcucugucacccaggcuggagugcaguggugccaucuuggcucacugcaaccuccgccuccccaguucaagugauu

SEQ ID NO: 5538 - RNA, 75 nt, Human
agugaaaguauauugaauuaagagccuauauaguucaccuugccauucgauauaggcucuuaauucaaucucacu

SEQ ID NO: 5539 - RNA, 88 nt, Human
agugagaaaugggacccugccuuacugccaaccuacuguuugaggagccagaaguugacaugaaguugcaaggucaccuuuucaagcu

SEQ ID NO: 5540 - RNA, 73 nt, Human
agugaggggcaggaugaaaucaccuaggguagguauuuagagggagggcgccgugcaaaauaaaauccucacu

SEQ ID NO: 5541 - RNA, 66 nt, Human
agugauggucaguauuucuuugaaauucuacaaggaacuucaggcacauggugcugaugaguuauu

SEQ ID NO: 5542 - RNA, 75 nt, Human
agugccaucuagaugagauaccagggcauuucugaggauguuuuugccccgggccaccucacucuccguggcacu

SEQ ID NO: 5543 - RNA, 73 nt, Human
agugccucuucccucccccugcgaacgcuagaauccgaaccaagugagcccagaacgaaggaacacgggcgcu

SEQ ID NO: 5544 - RNA, 76 nt, Human
aguggcguucagccacccgagauugagcaauaacaggucugugaugcccuuagauguccggggcugcacgcgcgcu

SEQ ID NO: 5545 - RNA, 82 nt, Human
agugguucuucuuaucuccauccccaucggcuuccucuuuaagaaagccgguccugggcugaagagauggggagcagccgcu

SEQ ID NO: 5546 - RNA, 77 nt, Human
aguguaguacuccuuugggggcucuaagggagaauccauuuuccuuccuuugcaagcuccuagaggcuacuugcauu

SEQ ID NO: 5547 - RNA, 96 nt, Human
agugucguggacucuucuguggcaggacuuggaggcugucccuagcgcacagggggcaucaggaaacuuggccacagaagaccuggucuacaugcu

SEQ ID NO: 5548 - RNA, 70 nt, Human
agugugugcauguguguaugugugcgugugcauguaugugugcauaugugugugcauaugugcaugugcu

SEQ ID NO: 5549 - RNA, 105 nt, Human
aguguguuaguaacuugucuaauugaacuaauguuguguccuaauuguuuacauggaaauacuguugagaagaccauuuuguucacuuggcaguuucuucacacu

SEQ ID NO: 5550 - RNA, 98 nt, Human
aguguugcauuacuuugaggcagaucguugucuauuucuucugaaaagucagucugaguugcagaaguaauagugugccuuggaguagcagcagcauu

SEQ ID NO: 5551 - RNA, 75 nt, Human
aguguuuucauccuucuucauggccuccuucccacaaauaucaggaaaaugggaacugaugaggagaguaacauu

SEQ ID NO: 5552 - RNA, 80 nt, Human
aguuaauauagagaauuacuggcuuuaacagugaacuggaauaaugagggcuucacugguaaaaugcuucugaauugacu

SEQ ID NO: 5553 - RNA, 94 nt, Human
aguucaaggcugccuccucucugucuucauuaugugaauugaauguggucacacaucuguguuggagcagaggcaggggcugcagcuuucagcu

SEQ ID NO: 5554 - RNA, 97 nt, Human
aguucauagagaauucuucgcuucauuuuugauggcuggcucugcaaagcaccauguggaguggcagguggagggagcgaggaaccaugaaugaacu

SEQ ID NO: 5555 - RNA, 85 nt, Human
aguuccuaugugccccacaggaaagcgcccuuaaccacugaugaguguugauguuuuucugcacuagaaggcacuauguugaacu

SEQ ID NO: 5556 - RNA, 82 nt, Human
aguucuaggguacaugugcacaacaugcagguuuguuacauagguauacaugugcuauguuggugugcugcacccauuaacu

SEQ ID NO: 5557 - RNA, 76 nt, Human
aguucugaggcuagucuuucuggguuaacugauggucccaagaccucgguuugaccugaccaugaugcccaggacu

SEQ ID NO: 5558 - RNA, 86 nt, Human
aguucugcagggcugcugccucaacauuuuagguucugauagcuguauucucaguccuggagugacagguguagccugcaguuacu

SEQ ID NO: 5559 - RNA, 64 nt, Human
aguugaggacuuugaaucugggacagaacugcaucaccucacucccagagaaaguuggucagcu

SEQ ID NO: 5560 - RNA, 106 nt, Human
aguugaggguauuaagcgcauacugugugacuccaccgggaaaggacucugggacaccgcaccggguuuccgcgggacuucacaccaugugccuuuugccuuugcu

SEQ ID NO: 5561 - RNA, 73 nt, Human
aguuggagcggaaggcaggaugggaccaugaucaccacuggauucguccagcuuuucgcaaaucauuccgacu

SEQ ID NO: 5562 - RNA, 78 nt, Human
aguugugugcguucaacacgauaauaccuguugccacuggaggaacagauggguacgucgugucuggaagugccagcu

SEQ ID NO: 5563 - RNA, 101 nt, Human
aguuuaaggaugucgcaaagucuggguggccuucaguccaugaaagagaacacaucuguucuaucucaggcugaggucaucugcauccucaucaauaagcu

SEQ ID NO: 5564 - RNA, 61 nt, Human
aguuuaguggcaaguucuuuagccuuugccuuuucgagcuuggcgauacgagccacagacu

SEQ ID NO: 5565 - RNA, 79 nt, Human
aguuuaucacucauggugauuugguuuacucuggagaguaaaauauccggugugucaggcaugacaugaaugguggucu

SEQ ID NO: 5566 - RNA, 73 nt, Human
aguuuauccacguuacaaaagcauauuugucucuccucugaguaagaaugcuguguuccuucgcuggacaacu

SEQ ID NO: 5567 - RNA, 91 nt, Human
aguuuaucuagccaauguuugucaauuuuauugauguuuuuaagugauuaacuuuugauuucauugauuuucaccauugguuuucuauucu

SEQ ID NO: 5568 - RNA, 79 nt, Human
aguuucucuggaguauuugcgcuggaaguuucuaaucaaaaccauuagacuuugaguuucacaaacuccucuugaagcu

SEQ ID NO: 5569 - RNA, 80 nt, Human
aguuucuuccuccugggggggucguggucucgcuggcuuuaggagugaagcugcagaccuucgccaagaggauuacaacu

SEQ ID NO: 5570 - RNA, 81 nt, Human
aguuugucccaccccuccccaaagugcuguaagauaccccugcgcuuguggcaauugggaagggugugucagugagaagcu

SEQ ID NO: 5571 - RNA, 61 nt, Human
aguuuguccucuccuuuuauccaagcaggaagauucuauauccugaugguagagacagacu

SEQ ID NO: 5572 - RNA, 82 nt, Human
aguuuuaggguacauguacacaacgugcagguuuguuacauauguauacaugugccauguuggugugcugcacccauuaacu

SEQ ID NO: 5573 - RNA, 74 nt, Human
aguuuugcaccugagacagauagccucacucgccucacccuaguccugguggcauuugucucaggugcaaaauu

SEQ ID NO: 5574 - RNA, 91 nt, Human
auaaaacucugucaaaaaucaaaugacauuucuauucaucauuucacaugugaugaagagaauguauuugcugcaguuggaagggguuuau

SEQ ID NO: 5575 - RNA, 93 nt, Human
auaaacugcuguccagauuguuaauuucauuuauauuuauuuuaauuaauuugucaugaauauggacaaaaccuuuucugggguguggggugu

SEQ ID NO: 5576 - RNA, 80 nt, Human
auacagcuuuuggcuuuuugagcacaccuacgaucuuggaaauacuggaaaaugugauacuuagaauacuuuggcugugu

SEQ ID NO: 5577 - RNA, 63 nt, Human
auacuuacuagcauauuauauagcucuaagaguguagaguuauaugaugugcuagugaagugu

SEQ ID NO: 5578 - RNA, 78 nt, Human
auacuuuaauagaaccaaaguugcagauauuggaauguauggaaguaucucagucucugcauaagaggauuaaaguau

SEQ ID NO: 5579 - RNA, 60 nt, Human
auagcaacgucauggugaagguggccacucagccggcugacaauccccuugacguucuau

SEQ ID NO: 5580 - RNA, 61 nt, Human
auagccuccuugggugucauggaucccagaccgauuaucauguaguaccggaggagacuau

SEQ ID NO: 5581 - RNA, 83 nt, Human
auaggcacguuuccauaacucccuguucccaagguuuggauaaccuaugcucauuuagcaggaacacuacacuacgugcuugu

SEQ ID NO: 5582 - RNA, 88 nt, Human
gcguugcugguguuguuggcguuagcggcagcggcggcggguucgggccgccuuuccugccggaugugugggcggcggcggcggcagc

SEQ ID NO: 5583 - RNA, 66 nt, Human
gcguuuggagaacaucuucuugcuccuuuuccggaaacgagauaauggacacagagucccagacgu

SEQ ID NO: 5584 - RNA, 85 nt, Human
gcuaaaaaagugcaugauggugagagcccaaguuaucuuucccucuucgguguucuucuucucuucucugcaaugcuucuguagc

SEQ ID NO: 5585 - RNA, 68 nt, Human
gcuaagaauucagaugucaggaagucugugaaucuugauggauuuucugagaaaccugacucaauggc

SEQ ID NO: 5586 - RNA, 69 nt, Human
gcuaagugacacgugaaugauaaugugauagccggcuaucacauuaucaugguggagcugucaucuggu

SEQ ID NO: 5587 - RNA, 93 nt, Human
gcuaaguggggcugaaaucaacaaaaggucuuggacuguuggcucagaaaucauccuagaaagcccgcccuguugauaucugucaugcuuagc

SEQ ID NO: 5588 - RNA, 66 nt, Human
gcuacagagcugucugaugcaauacuugaaggauaccccaagagcaagaagcaguucuuuguaagu

SEQ ID NO: 5589 - RNA, 84 nt, Human
gcuacccgccuucgucuccgaguuugcgacucgcggaccggguccccggcgcgaagaggcuggacucggauucguugccugagc

SEQ ID NO: 5590 - RNA, 76 nt, Human
gcuaccggaccugccugggagccagugaagggcgagucagggcacgcguccuggaggcugccagcguccuuguagc

SEQ ID NO: 5591 - RNA, 112 nt, Human
gcuaccugccaaaaauucaugcugagccugaacuuccaagugacagcagaacugaaaaugguaugucugcacaaaugccaaggcuaagugagugacacaggcauguuacagc

SEQ ID NO: 5592 - RNA, 96 nt, Human
gcuacuucuaugugucccaugguacugccacagaagagucucagcucucuccaggauucaguucuaaggucagugccuaagauaaaaauggagugu

SEQ ID NO: 5593 - RNA, 79 nt, Human
gcuagaaggggccugggaggcggggcuggaccuuccugcaagucgcagcuccaccccucacuaacuguuggcccucagc

SEQ ID NO: 5594 - RNA, 61 nt, Human
gcuagagcugagcgaagcgaugccuaaaucaaaggaacuuguuucuucaagcucuucuggc

SEQ ID NO: 5595 - RNA, 93 nt, Human
gcuagagcugccaacagggcuccagggagcuuggcuucuguagaaguucuaaggaagcgguacgaacuccacggcgggugggcgcuaacuagc

SEQ ID NO: 5596 - RNA, 65 nt, Human
gcuagaggccuuugcuagcugcuacagguagguccacacugucgcaggcugcucugucucuuagc

SEQ ID NO: 5597 - RNA, 84 nt, Human
gcuagcuaucugaugagucgcugugccauagcuugaucuauguuucuaucaaauaugguaaguauaaacuucauucauacuggc

SEQ ID NO: 5598 - RNA, 99 nt, Human
gcuaggauuacagguaugagccaccacacccagcuaguuguuuucuuucguuguuguuaauucuuaaaguuggggggggucucaauuuguuauccuggc

SEQ ID NO: 5599 - RNA, 91 nt, Human
gcuaggauugcaccacugcacuccaaccuggacaacagagcaagacccugucucuaggccaggugcaguggcucacaccuguaaucccagc

SEQ ID NO: 5600 - RNA, 61 nt, Human
gcuaguugaccuuugccauuuuccccacaccccuggagaaaagagccaggaucagccaggc

SEQ ID NO: 5601 - RNA, 86 nt, Human
gcuaucuggggccgagagcugcccccugagcuagaacucccauugguggaauuggaguucugcucgcucucagucuccaugauagu

SEQ ID NO: 5602 - RNA, 126 nt, Human
gcuaugggaacgagggguuguggguaggacgcaauuucacuggcagguucucugggccggggcaccuuaguguccagagggaggaagggugggcaagaauccuagauaacccgaaguuucuaaggc

SEQ ID NO: 5603 - RNA, 84 nt, Human
gcucaaacuucccaaaaaauucaccuuugggcuuaaaauaaaaccagaaagcccaaaaggagaauucuuuggaaaguuacaagc

SEQ ID NO: 5604 - RNA, 68 nt, Human
gcucaaccucuuuguucaguauguguaaccuugaagcuaauugguacuacuggauaucugacuggagc

SEQ ID NO: 5605 - RNA, 71 nt, Human
gcucacaaucgagcacacgcgugugcacacacaugugcacagaucagugucagaagcaucgaccugcgagc

SEQ ID NO: 5606 - RNA, 123 nt, Human
gcucacacagcaagucuuugucaaagcuuaggaauggaaguagguuguccccuccuagucaugggaucucuccaacucacuagacaaucuugcuuuacgugcugaugaacaugcucugugagc

SEQ ID NO: 5607 - RNA, 74 nt, Human
gcucaccaacuauaaguaggaauacuggcugaucuugguaggacucagcggguauccaguguaaauuguugagc

SEQ ID NO: 5608 - RNA, 63 nt, Human
gcucagccccucacaguggccucaagugugaugccuuacaaaagcaccacucagaugggcagc

SEQ ID NO: 5609 - RNA, 73 nt, Human
gcucagccuuugccagcagcaacucauugugggggaaagaaucuacagguugccugauggacagcaggugggu

SEQ ID NO: 5610 - RNA, 81 nt, Human
gcucagcgccgcacccggaagaugaggcucgccgugggagcccugacuggucugcgccgucaacuggggcugggucugggc

SEQ ID NO: 5611 - RNA, 88 nt, Human
gcucagcgucgccgcgaugguguuguuggagagcgagcaguuccugacggagcugaccagacuuuuccagaagugccggacgucgggc

SEQ ID NO: 5612 - RNA, 131 nt, Human
gcuccaaagaaccaagagugcaaaucaguccauuucacuuucacugucugagauagggucucuaagacccaggauacaaggguggaauguagcuauauggacucgauuugcuuccggaccuuuuccagagc

SEQ ID NO: 5613 - RNA, 88 nt, Human
gcuccaaggccaccuaguacuuugagaaaguuauacagacaaccaagucaggcuuccucaaucuagcagucuauugccaaaaaggagc

SEQ ID NO: 5614 - RNA, 108 nt, Human
gcucccgucugcagcucccagcaagaucaauccagaaggcaggugauuucugcauuuccaacagagguaccuggcucaucucauugggacugguuagacagugggugc

SEQ ID NO: 5615 - RNA, 76 nt, Human
gcuccgaaaccuuacguucgcugucccuuguaaagacccuagaggcagugauggggaacgccaaggagaaaggggc

SEQ ID NO: 5616 - RNA, 80 nt, Human
gcuccgcaagggggagcugcgcucggcggaccugcccgcgaucaucucaacauggcaggagcugaggcagcugcaggagc

SEQ ID NO: 5617 - RNA, 80 nt, Human
gcuccgccuuuucuggguacuuacgguccugagucucaaguucgucuucgagaugcuguugugccagaagcuggcggagc

SEQ ID NO: 5618 - RNA, 68 nt, Human
gcuccuggcuccuagggcagcgccuagagcacagugugauugcaucaggcgcccuuugaggccagggc

SEQ ID NO: 5619 - RNA, 60 nt, Human
gcucgcugggaaaguccuugcugugaaaucgaagauugaggacuacuuuccagaauuugc

SEQ ID NO: 5620 - RNA, 75 nt, Human
gcucggaacugccgacccgagugcuucccgcagagggcugguggugggagcggagugggucgggcggggccgagc

SEQ ID NO: 5621 - RNA, 61 nt, Human
gcucgucgggccgaaucgccaagacgccggcaaugucggcucgugccgauucggcacgagc

SEQ ID NO: 5622 - RNA, 89 nt, Human
gcucguguggggucuccgguccagggcgcggcaugggcguccuggccgcagcggcgcgcugccugguccggggugcggaccgaaugagc

SEQ ID NO: 5623 - RNA, 113 nt, Human
gcucguugcccaggcuggagugcaauggcgugaucuuggcucaccacaaccuccacuucccagguucaagcgauucucaugccuuagccucccaaguagcugggauuacaggc

SEQ ID NO: 5624 - RNA, 83 nt, Human
gcucucagccuuaguaaggaagcacguggaggagggacggaggagguucccuugcugggcaugcuucguagagggccaggagc

SEQ ID NO: 5625 - RNA, 84 nt, Human
gcucucuuuaucuuucucucucacucauguaugcauacaugcacagagaugcauacacaggugccuaugcaaguacauuuaagc

SEQ ID NO: 5626 - RNA, 86 nt, Human
gcucugcagacacaaagaugaaaagcuuggccacaaaggagcugacggugccguggcgagagagauccaucuugacggucaggagc

SEQ ID NO: 5627 - RNA, 105 nt, Human
gcucugucacccaggcugagugcaggggcaugaucauggcucacugaacuccaccucaugggucagcgaucuccugacucaagcucaaguacuggauuacagggc

SEQ ID NO: 5628 - RNA, 91 nt, Human
gcucugucgcccaggcuggagugcaguggcgcaaucuuggcucaauggcgcgaugacggcucacugcaaccuccaccuccuggguucaagc

SEQ ID NO: 5629 - RNA, 72 nt, Human
gcucuguuacccaggcuggaaugcaguggcacaaucucggcucacugcaaccuccaccucccggguucaagc

SEQ ID NO: 5630 - RNA, 98 nt, Human
gcucuguucacuuauuuucagucuuuuucucucuaugcuucauuuucaauggcuucuguggcuuagucuuuaaguuuacugaucuuuuucugcagugu

SEQ ID NO: 5631 - RNA, 81 nt, Human
gcucuguuucccaggugccagaugugacauccagaugacccagucuccauccucacugucugcaucuguaggagacagagu

SEQ ID NO: 5632 - RNA, 76 nt, Human
gcucuuguugcccaggcuggagugcaguggcaugaucucagcucacugcaaccucugccaccuggguucaagcugu

SEQ ID NO: 5633 - RNA, 89 nt, Human
gcucuuucagauuuuuugauguaggcauuuaaggcuauguacuuuccacuuagcuucaccuuugccauaucccagauguuuugauaggu

SEQ ID NO: 5634 - RNA, 83 nt, Human
gcugaacuguguuuacuggaaaaauucagaggccuaaaguuuaaaauaaaauuuacuucugauguuuuaauuaaaauguuugc

SEQ ID NO: 5635 - RNA, 60 nt, Human
gcugaagguaccuuaacauggggaaucuucuuaaaguuuugacaugcacagaccuugagc

SEQ ID NO: 5636 - RNA, 93 nt, Human
gcugaauuugagccagaucuauaugcuccaucaucacucuccuggggaaaagagccuagauguguucuaucugcauuccugcuuagauucugc

SEQ ID NO: 5637 - RNA, 85 nt, Human
gcugacacgauggagaagguaugugcaggggacuccuggagggggacgagguuuucagcacagccuucauguucucgugcucagc

SEQ ID NO: 5638 - RNA, 63 nt, Human
gcugacuagcauucaagagcuuuugguuuaaaagaucaaaacaucccagcaguguugaucagu

SEQ ID NO: 5639 - RNA, 70 nt, Human
gcugagaagcagugacccgcagaugccggcugaauggacugcuccggucuuggagucacugcuacucagc

SEQ ID NO: 5640 - RNA, 78 nt, Human
gcugagaaggagcuggggauccccgcucuccuggaccccaaugacauggucuccaugagcgucccugacugccucagc

SEQ ID NO: 5641 - RNA, 70 nt, Human
gcugagaucuguaucuguggaccugaauguugaucccucgcuucagauugacauaccugaugcgcucagu

SEQ ID NO: 5642 - RNA, 74 nt, Human
gcugagguucuggaguggcacaggaacaggaggagcaaaugacacugggucuuugugcugaggcaggacacagc

SEQ ID NO: 5643 - RNA, 97 nt, Human
gcugagugaacugcacugugacaagcugcauguggauccugagaacuucaagcuccugggaaaugugcuggugaccguuuuggcaauccauuucggc

SEQ ID NO: 5644 - RNA, 81 nt, Human
gcugagugagccuccgccauccagcaugacaaacuguggccgaccgcagcugugccguggcacgauggcgaggaagccagc

SEQ ID NO: 5645 - RNA, 79 nt, Human
gcugaucuccugccugauguuucugucucagagccaaggccaagaggcccagacagaguugccccaggcccggaucagc

SEQ ID NO: 5646 - RNA, 77 nt, Human
gcugauguggacuucucuuuucuugggcaauggagucuuacucugcuuuuauucucaagaaugguaugcacgucagc

SEQ ID NO: 5647 - RNA, 88 nt, Human
gcugcaaaucucguggccggcggcgaccauggcgcggaucacauccggaugccgcugggcggccauggccacggcgaagauggucagc

SEQ ID NO: 5648 - RNA, 90 nt, Human
gcugcaguggaaaggaguuugugacauugacauugacagcaugaaaaugggucuugccagugcaugugagacugccucccaacacucagc

SEQ ID NO: 5649 - RNA, 62 nt, Human
gcugccagcccaacugcuccagugauaguuuuccaccacuucaccgagagccugggcucagc

SEQ ID NO: 5650 - RNA, 63 nt, Human
gcugccaggaacugccccacuacuguguugcggggguggcaacuuuaggggguuccaggcagc

SEQ ID NO: 5651 - RNA, 62 nt, Human
gcugccgcguggcggacacgccagaaggaggaggccuggggcauggccgcguguguggcagc

SEQ ID NO: 5652 - RNA, 63 nt, Human
gcugccucucugcaaaguugaggcgguggagaacuacugaggacuucugagcagagagguggu

SEQ ID NO: 5653 - RNA, 97 nt, Human
gcugccugcugggucccugggguucgcugggcccugauugcugccguuuccccgcugcagagcucgccgugcgccccgacgggccccgugaugcagc

SEQ ID NO: 5654 - RNA, 73 nt, Human
gcugcggcugcagaaguaccgccugcggaguaacugcaaagaugcuguccgugcgcguugcugcggccguggu

SEQ ID NO: 5655 - RNA, 61 nt, Human
gcugcgguaucccaaggugguccaugcauggcacacggauucaccuugcucacacugcagu

SEQ ID NO: 5656 - RNA, 62 nt, Human
gcugcucacaauaguugauaccccaggauuggagaugcagggauaauaguaauuguggcagc

SEQ ID NO: 5657 - RNA, 80 nt, Human
gcugcucaucgccaguggcgccaaucuccuggcggucaacaccgacgggaacaugcccuaugaccugugugaugaugagc

SEQ ID NO: 5658 - RNA, 83 nt, Human
gcugcuccugcaaacacauuauguguuccuuuucccugagaaauauccuugauguguuugguggcaguaucuacagaagcggc

SEQ ID NO: 5659 - RNA, 95 nt, Human
gcugcugcugauggacugccggccgcaggagcuauacgagucgucgcacaucgagucggccaucaacguggccaucccgggcaucaugcugcggc

SEQ ID NO: 5660 - RNA, 88 nt, Human
gcugcuggagcagcugccuucaggcccugcgccgccuccggaguccauggccggcacgcgcuggguacucggggcgcugcuccggggc

SEQ ID NO: 5661 - RNA, 82 nt, Human
gcugcugguguuagagcaguuccugagccauccugccccaggagaucagagcagggugcaggagcugcauccggagagcggc

SEQ ID NO: 5662 - RNA, 87 nt, Human
gcuggagcccagcaugcuggggagugcggucagcuccacacaguaguccccacguggcccacucccggcccaggcugcuuuccgugu

SEQ ID NO: 5663 - RNA, 91 nt, Human
gcuggagccugcagccgcagcugguaguccaucugugcgucgauuccugcagagaugcagcgccgggcugugugggugcugugguaccagc

SEQ ID NO: 5664 - RNA, 75 nt, Human
gcuggagcgcaguggugugaucacagcucaguguaaccucaaacauugggguucaagccauucuccugccucagc

SEQ ID NO: 5665 - RNA, 94 nt, Human
gcuggagugcacucgcgcgggggguaauucggggucuggguucuggugccugcgcagcuuuccccgauggcccacugcgugaccuugguucagc

SEQ ID NO: 5666 - RNA, 102 nt, Human
gcuggaugaugaauccuuguuuuucagguggcuccaaaaagaauguugcauguguucagaccauccugagcagagccaccaaauuuagugacagugucuagc

SEQ ID NO: 5667 - RNA, 73 nt, Human
gcuggcaaaauuuuguucugacagacuacuuuauucuugucaaggaaaguuugucaguggaaacuaugucagu

SEQ ID NO: 5668 - RNA, 107 nt, Human
gcuggccaagggaguuaggggugcuaugugaaccuaguccagucaagauccaucccuuggcaccggacacgguggcucacgccuguaaucccaccacuuuggcaggc

SEQ ID NO: 5669 - RNA, 64 nt, Human
gcuggccgagguguguuugguggccggggccgaggugggaucccgggcacaggcagaggccagc

SEQ ID NO: 5670 - RNA, 100 nt, Human
gcuggcgcgcgagaacgccgccaugcgccuggagcucgacgcgcugcgcggcaagugcgaggcgcugcagggcuucgcgcgcuccguggccgccgcccgc

SEQ ID NO: 5671 - RNA, 75 nt, Human
gcugggaagugguuaagugugcccacccguguucuccuccaaaugcuugucgggcaagauuagcuccuuucaugc

SEQ ID NO: 5672 - RNA, 73 nt, Human
gcugggagccuugagagccaugugcaagaggacagauccuguuccugucaccauugcucucgauucacucagc

SEQ ID NO: 5673 - RNA, 71 nt, Human
gcuggggagggaguuuacauguuuucuaauggagccauuaucuguuggaggcauucauuccccucaccagc

SEQ ID NO: 5674 - RNA, 69 nt, Human
gcuggggucccauaggauguccucauaugggcuuagaacugggcccgacagccauccuugagccccagu

SEQ ID NO: 5675 - RNA, 70 nt, Human
gcuggggugcuaggacuuggugcauguguucuuucuaguccuuacgauguucccaccuggaugccccagc

SEQ ID NO: 5676 - RNA, 62 nt, Human
gcugguaacugauaagggggcaccgcugaggggcgggcccccucaaggcgggaguugccggc

SEQ ID NO: 5677 - RNA, 87 nt, Human
gcugguacgaucaauaccauaugaccagagcccaggcccaaagcaucuugcuuugguugcuacauucugguguugaugggugccagu

SEQ ID NO: 5678 - RNA, 74 nt, Human
gcuggugaugaccuugaagcuguagccaaauuucuggacucuacaggcucaagauuagauuaucgucgcuaugc

SEQ ID NO: 5679 - RNA, 89 nt, Human
gcuggugggggauaaucugcagucuuacuuuuaaguuagaaacaccaauaaauuuaguauacagacgacagugaacuuucacuuacagc

SEQ ID NO: 5680 - RNA, 61 nt, Human
gcugguggugggcggggacggccgguucuacaugaaggaggccauccagcucaucgcucgc

SEQ ID NO: 5681 - RNA, 71 nt, Human
gcugguuuccuggccgaggcggagcugcugaaccugaggaagaucagcuccgacuuggacgggcacccggu

SEQ ID NO: 5682 - RNA, 71 nt, Human
gcuguaaaacacucuacacaauuucacaagacgcauugcaggggaaaaagugacugagauggaucaacagu

SEQ ID NO: 5683 - RNA, 85 nt, Human
gcugucagaucagguuccugauuggaguucucuuaucugcucugguuuggagggcugccccauucgggaaucuguuuuguuuugc

SEQ ID NO: 5684 - RNA, 89 nt, Human
gcugucggugccgguugcgucaucuuccugcucaucaucaucuuccugacgguccuacuacugaagcuacgcaggcggcaccgaaaggc

SEQ ID NO: 5685 - RNA, 84 nt, Human
gcuguucagagccaugcaguugcugaagaggaagccagaaaagcccaccaacucuggcuuucaguggaggcauuaaaguacagc

SEQ ID NO: 5686 - RNA, 93 nt, Human
gcuguugggucguguaguugaugcccuugguaaugcuauugauggaaaggguccaauugguuccaagacgcguaggcgaguuggucugaaagc

SEQ ID NO: 5687 - RNA, 70 nt, Human
gcuguugguggaucuaccauucugguguuuggaggacaguggcccucuucucacagaucuacuaggcagu

SEQ ID NO: 5688 - RNA, 81 nt, Human
gcuuaaugauccugaagggauuucuucugaugguagcuuuuguauuaucaaguaagauucuauuuucaguuguguguaagc

SEQ ID NO: 5689 - RNA, 109 nt, Human
gcuuacaauugcugguaccugguagcauuuauuuucccucaaguaccuaguaaccuuaugaagguagggaggguagaugcucuaccacauuccuucagcuguauugagu

SEQ ID NO: 5690 - RNA, 77 nt, Human
gcuuacauggaagaguauauaugggaaaauagcucaucagaaagaaauauccuggaaacgcuucuccagaugaaagc

SEQ ID NO: 5691 - RNA, 72 nt, Human
gcuuaccaggaagcauuugaaauuaguaagaaagaaaauugcagcuacacacccaauucgucuuggucuggc

SEQ ID NO: 5692 - RNA, 76 nt, Human
gcuuacuuaaacugcaucauucucauuuauauuauacagaccauuuuggauaauaugcucaaaaauggaggaaagc

SEQ ID NO: 5693 - RNA, 67 nt, Human
gcuucaaccugaguucugcguuauaaagccuggagaaagcuaagcuuagaacauaacuugcugaagu

SEQ ID NO: 5694 - RNA, 78 nt, Human
gcuucaguucagaaauuuaguaaugggccaggugugguggcucaugccuacaaucccagcaauuuaggaggcugaggc

SEQ ID NO: 5695 - RNA, 74 nt, Human
gcuucauccuguuccacaauccugaguauaacaagaacaccucgaaguuugaugggacaagacucuaugaaagc

SEQ ID NO: 5696 - RNA, 73 nt, Human
gcuucauuacugaaguagcuacauuagcgaaaacaguguuauuuuuguugcaguuacaaagcuaccaggaagc

SEQ ID NO: 5697 - RNA, 69 nt, Human
gcuuccaauuuguuaucaggugacucuggaguaugccaguuugagugaaccuagagacaaaugcucugc

SEQ ID NO: 5698 - RNA, 77 nt, Human
gcuuccccuccagucccccugggggcaggugguggcuccguguccccugcuagacggagggcccucgagggugaggc

SEQ ID NO: 5699 - RNA, 101 nt, Human
gcuuccuaucucagcgcccugccgccgccgccgcggccagcgagcggcccuguaugcaggccaucaagugugugguggugggagacggagcuguaggguac

SEQ ID NO: 5700 - RNA, 74 nt, Human
gcuuccucaccaccuugugcacugcugcucccacaccacagugacuagcagcacauaaugguuugaauuaaagc

SEQ ID NO: 5701 - RNA, 71 nt, Human
gcuucuacuucugguguuuuugguggcuuguuuuaucaacaggaaaugccagaaacagaggaagaagaagc

SEQ ID NO: 5702 - RNA, 81 nt, Human
gcuucugacacaggacggucguggagaagaugcccuggaggagccacuugggcuuguuuuuccaccagaccccgaagaagu

SEQ ID NO: 5703 - RNA, 70 nt, Human
gcuugaacccgggaggcagagguugcagugagcugagauggcacuacugcacugcagccugguacaaagc

SEQ ID NO: 5704 - RNA, 77 nt, Human
gcuugaagucagcgucuuccauuccagaaagacccccauucuuccuuuggggguaugauguggaagcugguuucagc

SEQ ID NO: 5705 - RNA, 77 nt, Human
gcuugcuggguuuacagauggcaaagaucuggcaaauuaaaaauagccuuaggccaaagaucaaacccaaggugggc

SEQ ID NO: 5706 - RNA, 73 nt, Human
gcuuggaggugaaacuugugcuuguauccccagccacgaagagcuggaccagcuucaaguacauguccacagc

SEQ ID NO: 5707 - RNA, 79 nt, Human
gcuugggugacagagugaaagccccaucucuaaauaaauaaauaaagagagguccugauucaguuuaucaaucccaugu

SEQ ID NO: 5708 - RNA, 77 nt, Human
gcuuguaacuacugaucuugagcucauaaaauaccuaaauaaugugguggaacaacugaaagauugguuauacaagu

SEQ ID NO: 5709 - RNA, 95 nt, Human
gcuugucucaugccucgccguggagcugcagugcuggugcgccuggggugaccugggacucgccugcugcucuguggccuucgugcgcgacaagc

SEQ ID NO: 5710 - RNA, 72 nt, Human
gcuuuaacccuucuacagacacgggcccucuccucggugaggagggaccucgggcauguguggggugguggu

SEQ ID NO: 5711 - RNA, 75 nt, Human
gcuuucagugcaguuucaaacauuuucacaacaggcaauaguccaugagaauuuggaaugacaguauagaauggc

SEQ ID NO: 5712 - RNA, 80 nt, Human
gcuuucaucaucacagggcagacaauauacacgaaaaguggauauugaagguacuggucugugcugguagcuuggggggc

SEQ ID NO: 5713 - RNA, 60 nt, Human
gcuuucccaaccuucuugguauaaagguaaacaauucuauuaccagggguucgggacagc

SEQ ID NO: 5714 - RNA, 62 nt, Human
gcuuuccuuuccaagaggaauccucggcagauaaacguggacuguccucuacagaaggaagc

SEQ ID NO: 5715 - RNA, 78 nt, Human
gcuuugaaagagauguggugugugaagacgaagaugccuuuuguuugucuuuggagaauauugcaacacuacaaaagu

SEQ ID NO: 5716 - RNA, 130 nt, Human
gcuuugagaauuuaauaccacugggaagaaguaugguagugguggaugaaggguggauauuuuaaauugugcaguuacaguuuacuguccuauuaccucugcucguuuaaccaguuuguuauaucacugu

SEQ ID NO: 5717 - RNA, 104 nt, Human
gcuuuggaaaagauuauguaacuccuugagagcauacucuuucucuagcccaaaggcagugagagaguuuucuuguucaggauugcuuaacuuuccauuuaagc

SEQ ID NO: 5718 - RNA, 92 nt, Human
gcuuugggcgggacaagguaaccuuuuccuuugaggcaggccgucgcugcgucucuggagagggcaacuuugaguucgaaacccggcaaggc

SEQ ID NO: 5719 - RNA, 61 nt, Human
gcuuugugcucaggcaucacauagcaggcagccugcagccuuucuugccugagagaagagu

SEQ ID NO: 5720 - RNA, 79 nt, Human
gcuuuucuaguuugcaacuucuaaucugcugugagucaggaaaacauauggcagaguuaaauugugcuuuugguuaggu

SEQ ID NO: 5721 - RNA, 74 nt, Human
gcuuuucuugaucacuguggcuggggacccgcuagcgcguuaucauccugugucgcaguggcauuuagucuggc

SEQ ID NO: 5722 - RNA, 75 nt, Human
gcuuuucuuggaaugaaugcauuuuugaagucucagggggauuucuucugacuucuaaugcugucacagagaggc

SEQ ID NO: 5723 - RNA, 68 nt, Human
gcuuuuggaauaccuaucagaguauauacacaugagguaguaacacucugguacagaucuccagaagu

SEQ ID NO: 5724 - RNA, 91 nt, Human
gcuuuugggaagugaugagucauuuugcaccagguaauaggggaaaauugugugaccuccagcaaacacaugaaugguuauuuccuggagc

SEQ ID NO: 5725 - RNA, 113 nt, Human
gcuuuuucuccccuuugccgauucagaaugcugcuuugucaauuugugugccugcuguaggaacugguccguuuuccaagugugacagugcaggcagagaaggguggaugagc

SEQ ID NO: 5726 - RNA, 71 nt, Human
ggaaaaauggagaaaucaggagugaggcacuuaaaaaagauggcuaaaauuuucuggacuucaucaaagcc

SEQ ID NO: 5727 - RNA, 97 nt, Human
ggaaaaccauuguguaaaacaguaggcggaucuuucagagacuccaaaucauugacaauucagaaggaucuugucgcugcauuugacaacggagacc

SEQ ID NO: 5728 - RNA, 104 nt, Human
ggaaaagcaagccaggaggugcuugcggccgcuucuaguaguuuccaggcgcugccgggcggcuggcacuaagcgguccugagcgcuguggcuacggcugcucc

SEQ ID NO: 5729 - RNA, 86 nt, Human
ggaaaaucuaaagcuugucuuguagguucgaaccgggggaaauucccgggacccgguaaccgugcaaggcgguaccaagcuuuucc

SEQ ID NO: 5730 - RNA, 77 nt, Human
ggaaaaugaguggaagaccuggcucccucucuucucucccguuaggcacaagacgguguaaauccuggucuuccucc

SEQ ID NO: 5731 - RNA, 71 nt, Human
ggaaacagaccucaagcagcacucccugggggcaggacccugccauucugugcuguuugggggcaguuucu

SEQ ID NO: 5732 - RNA, 94 nt, Human
ggaaaccgccggccugggaggacaagccgaguucuuguuuugccgagagcaaaacucuaggcucccacuuccuucucccaguccgugcguuucc

SEQ ID NO: 5733 - RNA, 102 nt, Human
ggaaacuucaguuuuuauaaucuuccuaaauugauccuuuauguugauaaacagugucgauauuaaggagcucauuaauuuuggaagauccauaucugaucc

SEQ ID NO: 5734 - RNA, 81 nt, Human
ggaaagaauaaaggcuuggacucagccuagguucaaguacugcaucuugaccuggccuguaggcaagucuuuucacuucuc

SEQ ID NO: 5735 - RNA, 60 nt, Human
ggaaaggaugucugugucaggcauguuaacuucaaacaaaaucugagaucggcuuuuucc

SEQ ID NO: 5736 - RNA, 98 nt, Human
ggaaaguacucaccaggagucuuguucgucugagagguuucagaguucgauuccagaauuuacagacaugaacgcaaccggaacugugaguaucuucc

SEQ ID NO: 5737 - RNA, 102 nt, Human
ggaaaugggagaaacucccaggcaggaacaccuuuugcugugauggccgcgucaugauggcccggcaaaagggcauuuucuaccugacccuuuuccucaucc

SEQ ID NO: 5738 - RNA, 118 nt, Human
ggaaauguggagaauuaaaaaggguagugaggcuggcauuuauagaaucuggcuuucuuguauuggguggaaagcuagaugaaaccaguuucucucagccuuuucucuccucaggucu

SEQ ID NO: 5739 - RNA, 72 nt, Human
ggaacaagguguuaacaggccugggaaucuagaaaaucccaucagcuucaccauuuuguuuucauuuugucu

SEQ ID NO: 5740 - RNA, 72 nt, Human
ggaacacgauggcuggacuaugucagggcucgucuucgaaagugcagugacauuucaguauucgugacaucc

SEQ ID NO: 5741 - RNA, 71 nt, Human
ggaacagggagggccugugucuggccaggcugagguuccagaucuguugccaucauggccccuucaggucc

SEQ ID NO: 5742 - RNA, 72 nt, Human
ggaacagggagggccugugucuggccaggcugagguuccagaucuguugccaucauggccccuucaggugcc

SEQ ID NO: 5743 - RNA, 65 nt, Human
ggaacauuagucugaacugcaguuggaccuccugaccaagcacugcguucucacacuagugugcc

SEQ ID NO: 5744 - RNA, 80 nt, Human
ggaacucugcuuugccucacaucauaucauuauggcucagaaugaacugcugagcuuuacuaugagugaaagaagcagcc

SEQ ID NO: 5745 - RNA, 82 nt, Human
ggaagagagcgaugacaccccugcgccggaguccgacuccaagcggaccccagcgucucgguccaucccagcgucucggucc

SEQ ID NO: 5746 - RNA, 71 nt, Human
ggaagagguauaccugucucuaaaggaagcgcacgucaguuuccaaacagaagcaagagguggaacccucc

SEQ ID NO: 5747 - RNA, 93 nt, Human
ggaagaguauuaaagaccauuucuggcugggcagggcacucucagcagcucaacugcccagcgugaccaguggccaccucugcagugucuucc

SEQ ID NO: 5748 - RNA, 96 nt, Human
ggaagaguugcuaaaugaauucagugaagguuggaguacaguggcaggaauuuggucacugcagccuugacuuccugggcucaagcgaucuuuucc

SEQ ID NO: 5749 - RNA, 73 nt, Human
ggaagaucacucugcucugauuauggaaaagucuucaagggcugcuucaaacucaaacacagagagaaacucu

SEQ ID NO: 5750 - RNA, 89 nt, Human
ggaagauuguuucagggugucucagggucccucuguaccaucugcuguggaaugcaggacccucugugacauucuuuaucccuucuucc

SEQ ID NO: 5751 - RNA, 76 nt, Human
ggaagcaaagaugacuuccucauauaugauagauguggccgucugguauaucaucuggguugccuuuuugccuucc

SEQ ID NO: 5752 - RNA, 109 nt, Human
ggaagcacauacucagaccuguuuuguuaacuagaauucuuuaaaagcugaugccaaacaucuuuacagaggaacuguaguucacauccaccugucugacauugucccc

SEQ ID NO: 5753 - RNA, 127 nt, Human
ggaagcaucccugcugcggacgcuuucacuucuaaagagucuugucugcuaauaagagugcccauggcccaggguggcagcagggggauuuagaaagggcaugaugauggcacuagcggcugcuuuc

SEQ ID NO: 5754 - RNA, 127 nt, Human
ggaagccgucagccaagucgccacauuucucugcaaaaugucauagcuuauauuaauguacaguauuccaugguaugcugccuuccguuguaaguagcagaucucuccgugacuugacacggcuacu

SEQ ID NO: 5755 - RNA, 98 nt, Human
ggaagcugugaugggaaaggaggccugcacuuggaccuugaaccucaagccucaagcuccaguggggaccuuguuaaaugcuccugucaagagcucuc

SEQ ID NO: 5756 - RNA, 89 nt, Human
ggaaggaaugaucuaaaggagaggagucauugggauaaggccagccucucauauucuucaacuuuucuccucuggucccuguucuuucc

SEQ ID NO: 5757 - RNA, 71 nt, Human
ggaaggacuuucuguuauugcaaaguugguaaauaaagaugccaagguuacuaacaucacgaauuuccucc

SEQ ID NO: 5758 - RNA, 109 nt, Human
ggaaggagcuauucaccaaaaucugcaaauguaaacugaaggacaucgcauguuuaaaaugugggaacuuuguaguuuaucaugugauuguuccauguaguuccugucu

SEQ ID NO: 5759 - RNA, 73 nt, Human
ggaaggagggcggugucggcaggagccagggguguccucuggcuucccaaagcuagggccguucccuccuucc

SEQ ID NO: 5760 - RNA, 69 nt, Human
ggaagggguaaacccagguuccucuucuugagucaaucuccagaaugggacauggguucaucuccaucc

SEQ ID NO: 5761 - RNA, 105 nt, Human
ggaaggugcaacguaagagcagacacaaccugagaugcccuugagauuuaggagaacaggagggcgcccuuucuguugugaccugacucuuaaaagaaaucuucu

SEQ ID NO: 5762 - RNA, 74 nt, Human
ggaagugggcagcaagaucuacguggaugaugggcuuauuucucuccaggugaagcagaaaggugccgacuucc

SEQ ID NO: 5763 - RNA, 68 nt, Human
ggaauaggcuaaauugcuagagaugugcuguggaauuaucuguauuucuagcuaugaucuuagcuucc

SEQ ID NO: 5764 - RNA, 69 nt, Human
ggaauaggcuaaauuugcuagagaugugcuguggaauuaucuguauuucuagcuaugaucuuagcuucc

SEQ ID NO: 5765 - RNA, 68 nt, Human
ggaauccagggagaacuggagccuguuuuaugcuggcauggaacuuggccucaguacgucuggguucu

SEQ ID NO: 5766 - RNA, 88 nt, Human
ggaaucuugcucugucacccaggcuggagugcaguggugcaaucucggcucacugcaaccuccaacuccuggguucaagcaauucucc

SEQ ID NO: 5767 - RNA, 69 nt, Human
ggaaugaaacuggggucuucaaaguggguugugacaaucuggcaaccuuugaaacccuuugcuuauucc

SEQ ID NO: 5768 - RNA, 64 nt, Human
ggaauggguauugugggaauugggagaauaugaugucaaguauccagccuugauacccauuacc

SEQ ID NO: 5769 - RNA, 71 nt, Human
ggaauggugacaacaugcuuggagccaagugcuaacaugccuugguuccagggauggcaagucaccguaac

SEQ ID NO: 5770 - RNA, 86 nt, Human
ggaauguaaguaagugacaaugcuuauggaaagccaguuaguuagaauuggaaaucugucuugucauuuuacaagcauuagauucc

SEQ ID NO: 5771 - RNA, 87 nt, Human
ggaauugaaaaguaaaaacaaagugugcauuuuccuuacuacguuuagucaggaauaugcggucauuuuauugguuacuggguuucc

SEQ ID NO: 5772 - RNA, 83 nt, Human
ggacagacaugaugacuuugagcucugaggcaaaggugauaauggcaacgcucacauugaucucaaagcugaagauccugucc

SEQ ID NO: 5773 - RNA, 79 nt, Human
ggacauaguggaagugagcuacaacguuauacgugucguguaguacgaugucuagugaugaguuugcuaauacaaugcc

SEQ ID NO: 5774 - RNA, 74 nt, Human
ggacaugguaaccugguccacggagggcggccgccacccucgcguagcuuuccugugguuuuccaggacugucc

SEQ ID NO: 5775 - RNA, 68 nt, Human
ggaccaacugauaccucgcuauguagcuuuacuccuuuauccucuagguggcguauuagaauggugcc

SEQ ID NO: 5776 - RNA, 71 nt, Human
ggaccaagcaagucaggaguguggccauguuuucugagcaggcugcccagagggcccacacucuacugucc

SEQ ID NO: 5777 - RNA, 85 nt, Human
ggaccagacuauugugacauggagaauguagaggaauuauucaauguucaggaucaacaugaucuccucacucuaggauggaucc

SEQ ID NO: 5778 - RNA, 75 nt, Human
ggaccaguuggggcggaaagggaaaaccgccuggccggccaguugcaaaggccuuuucgccgcgaauaagggucc

SEQ ID NO: 5779 - RNA, 107 nt, Human
ggaccccagggagcaaaaucaucccuuuuuaacuugagaaucuugaggggcuuuuaagaggagacucucuugauugguaagucuuaagguugcuuuugcccuguucc

SEQ ID NO: 5780 - RNA, 66 nt, Human
ggacccucccuggccuccauucagggagaaacucuccuucacgugugagacgggccaagagggucc

SEQ ID NO: 5781 - RNA, 89 nt, Human
ggacccuuguggcuccacuuguccucaccagucgggacuucagcugaaccucugagugccaaggacaccacuggaacucacaaaggucu

SEQ ID NO: 5782 - RNA, 103 nt, Human
ggaccguuauaugagcgggcgcgagcugaggagcugcaacacagccguguaccacugaccacugcugaguuggggccuuauaguggggcugcccgcacggccc

SEQ ID NO: 5783 - RNA, 66 nt, Human
ggaccuuguugcaccucguggcugcuuuguucacccgcagggcggccugugggcaccccgggguuc

SEQ ID NO: 5784 - RNA, 72 nt, Human
ggacgaauccuuaguacuguggaaaagagcagacagaaauauaaccagcuucucucacaguggaauucgucc

SEQ ID NO: 5785 - RNA, 90 nt, Human
ggacgagagagccgaggacaagggggauccguuuggacgugaccgucaucguccagcuggucaccuuucuccucucaugugccuuuguuc

SEQ ID NO: 5786 - RNA, 82 nt, Human
ggacgaggagaugaaccgcaugcaugagagcaugaagcuauucgauagcaucugcaacaacaagugguucacagacacgucc

SEQ ID NO: 5787 - RNA, 73 nt, Human
ggacggaggcaauaaauacugauggccaagcggggcuccuggcugggcccaaguggggugggugaggcugucc

SEQ ID NO: 5788 - RNA, 84 nt, Human
ggacgugacgggcggcuacguuucucacaggcugccaaggcaagauggacgagcaacguggacacguuaugaacgaucgggucc

SEQ ID NO: 5789 - RNA, 101 nt, Human
ggacuacaggcacaugcaaccacaucuggcuaauuuucuugaguuuuaguagagacugggucucauuauguuguccaggcuggucccaagcuccugaguuc

SEQ ID NO: 5790 - RNA, 92 nt, Human
ggacucauagugguagauagcuuauuggucaggguagauagagauauguuuucuguguaacugucuaguuuuuguccuaccauucggagacu

SEQ ID NO: 5791 - RNA, 107 nt, Human
ggacucguguguaagaaaaacuaggacugugugguguaaauaacuacaauucucuuaacuccguagcaguugccaacucaguccuuguacuucguuaacacgaaucu

SEQ ID NO: 5792 - RNA, 93 nt, Human
ggacugcauccuaccaccaacucguccaacugacaagcccuugcggcugccucuccaggaugucuacgaaauuggugguauuggaacuguucc

SEQ ID NO: 5793 - RNA, 79 nt, Human
ggacuggugauucauuuguguaacucacugaagccaaaauacuaucuuuuaagaugucccacauggaagacgcuauucc

SEQ ID NO: 5794 - RNA, 68 nt, Human
ggacuuagaaguaguauguuauuccugguuaagcaggcaugcuugcccuggagcagcuauuuuaagcc

SEQ ID NO: 5795 - RNA, 93 nt, Human
ggacuucuuuccuagguuucuuuacagaacggguuggggucgagaaagauuccgaagaucaguuacgcuguuuuaaaaccuaggugggaguuu

SEQ ID NO: 5796 - RNA, 106 nt, Human
ggacuuggccaagcccagcuugaagacacugggucugcagcgucucucuaagaaauccucuaucuucaggcccaggauguaauccagcuucaucuugcccucaucc

SEQ ID NO: 5797 - RNA, 78 nt, Human
ggacuuuuauuuccaccuguugacaggacagcaggaggacugccugcccuuccuggucugacgguugcuguguuguuc

SEQ ID NO: 5798 - RNA, 79 nt, Human
ggacuuuuccuuuccugcuuuucacuugaagguucccugugcaaccgacggaaagaucggggaaacuccggaaguauuc

SEQ ID NO: 5799 - RNA, 88 nt, Human
ggagaaccgcuugaacccaggagacagagguugcugugagccgaaauagugcuacugcagucgagcuugggcgacagagugagaaucc

SEQ ID NO: 5800 - RNA, 77 nt, Human
ggagaacuuuugugucuagcucagggauuguuaacgcaccaaucagcacccugucaaaacggaccaaucaacucucu

SEQ ID NO: 5801 - RNA, 93 nt, Human
ggagaagaggucuugcauaccagcacaguggauggggaauggugugaccucugucccugcucucuucucugcuggcuuaagggucuauucucc

SEQ ID NO: 5802 - RNA, 88 nt, Human
ggagaaucacuugaaccagggagguggagguugcagugagcugagauugcaccauugcacuccagccugggugaaaaagcgagacucc

SEQ ID NO: 5803 - RNA, 88 nt, Human
ggagaaucacuugaacccaggaggcagagguugcagugagcugagauggugccacugcacuacagccugggcaacagagugagacucc

SEQ ID NO: 5804 - RNA, 88 nt, Human
ggagaaucacuugaacccaggagguggagguugcagugagccaagaucgugccacugcacuccagccugggugauagagcaagacucc

SEQ ID NO: 5805 - RNA, 88 nt, Human
ggagaaucacuugaacccaggagguggagguugcagugagcugagauugcaccacugcacuccagccugggugacagaaugagacucu

SEQ ID NO: 5806 - RNA, 88 nt, Human
ggagaaucacuugaaccugggaagugcggguugcagugagccaagauugugccacugcacuccaucgugggugacagagugggacucc

SEQ ID NO: 5807 - RNA, 77 nt, Human
ggagaauccccaaaauuuucagauaguggccuaaaaaaauuuuauuugcucacugguugucauucuggguauucccc

SEQ ID NO: 5808 - RNA, 88 nt, Human
ggagaaucgcuugaacccggggggcagagguugcagugagcugaguuugcgccacugcacucuagccugggggagaaagugaaacucc

SEQ ID NO: 5809 - RNA, 85 nt, Human
ggagaaucgcuugaaucugggaggcggagguugcagugagcugagaucgcaccacugcacuccagccuguugacagcgagauucc

SEQ ID NO: 5810 - RNA, 89 nt, Human
ggagaauugcuugaacccuggagguggagguugcagugagccgagauugcaccauugcacuccacccuaggcaacaagagcaaaacucu

SEQ ID NO: 5811 - RNA, 88 nt, Human
ggagaauugcuugaauccaggaggcagagguugcagugagcugagaucaugccacugcacuccagccugggugacagagugacacucc

SEQ ID NO: 5812 - RNA, 106 nt, Human
ggagacgaacacauacacagaagauucagacacacuugcaauguauugcuggggauucuccagcauuggcaugauggagaggguggagaaucauuugaccgccucc

SEQ ID NO: 5813 - RNA, 87 nt, Human
ggagagagagagcagacaggccuggguucaaauuugggcucucuaguuugucagguuugcaaccucgggcaaauucucuagcuuccc

SEQ ID NO: 5814 - RNA, 64 nt, Human
ggagagcccgucgcgggagugcaaggagcuggacggccucuggagcuuccgcgccgacuucucu

SEQ ID NO: 5815 - RNA, 82 nt, Human
ggagagccuggugguggacauaggccugacaguaguaacaccaggcugacaggucgauguagcugaggaccaacgggugucc

SEQ ID NO: 5816 - RNA, 73 nt, Human
ggagagggguggaagacagaaaccacacacauauaccugcaaaugugacuuggucuguuuuuuucccccauuu

SEQ ID NO: 5817 - RNA, 76 nt, Human
ggagagugcagauucacuugaugggaacagcuacagcuccagcgaugaaaaacugaauucugcaacagacucuacc

SEQ ID NO: 5818 - RNA, 101 nt, Human
ggagauggaccugugaucugggauuaccauguuguuuugcuucauguuucaaguggaggacagaacuucauuuaugaucucgauacugucuugccauuucc

SEQ ID NO: 5819 - RNA, 65 nt, Human
ggagauugaugucaggucagaauauuggaguuauacaucuauuucugaguugaauacucagcucc

SEQ ID NO: 5820 - RNA, 81 nt, Human
ggagauuuuaaaaauuacagccauuuugaugagugagcauuggaguugauauuuucacugugguuuuaauuugcauucucu

SEQ ID NO: 5821 - RNA, 71 nt, Human
ggagauuuuauaggaugguuccugggcugauugauaaugccaaggcagcagggagcugaccugcauucuuc

SEQ ID NO: 5822 - RNA, 81 nt, Human
ggagcaaccuggcuucagauacuuucaaacauguggagacagcacuucaaaguuagaauuuauaaagaagacucagugucc

SEQ ID NO: 5823 - RNA, 75 nt, Human
ggagccagacuuccuggguucauauccugguucuaccaauuuaccagcugugugaacuuaggaaaauuccucucc

SEQ ID NO: 5824 - RNA, 95 nt, Human
ggagccauuguggacguuccaguuggugaggagcuguugggucguguaguugaugcccuugguaauguauugauggaaaggguccaauugguucc

SEQ ID NO: 5825 - RNA, 78 nt, Human
ggagcccuugauguccugcaaaugaaggaggaggauguccuuaaguuccuugcagcaggaacccacuuagguggcacc

SEQ ID NO: 5826 - RNA, 77 nt, Human
ggagccucagucccucauccgugaaauggggauacaaagauguaccucgcccacacuggccagcagaccaaggcucc

SEQ ID NO: 5827 - RNA, 72 nt, Human
ggagccugaaagugcucccauagccauuugcuccuuuggcuuugggguuaagcgucaucuuuuuuaggcucc

SEQ ID NO: 5828 - RNA, 62 nt, Human
ggagcgcggcuugaggagggcggggccgccccgcaggcccgccaguguccucagcugccucc

SEQ ID NO: 5829 - RNA, 88 nt, Human
ggagcgcucgggugcccagcagcgggcucgcucguacuuggucauguaugguguggugauucgcuucugguuggccugcggucgcucc

SEQ ID NO: 5830 - RNA, 86 nt, Human
ggagcucaugcuggaggagguggaggucuucaaggauccagcacccgucaagaccaugaccaucucuucuaagaggcaacaacucu

SEQ ID NO: 5831 - RNA, 98 nt, Human
ggagcuggaggaccuggagcaccugcagcuggacuucuggcgggggccugcccacccuggcucccccaucgacguccgagugcccuuccccagcaucc

SEQ ID NO: 5832 - RNA, 83 nt, Human
ggagcuggaguucaggaggagucagaagaggcuuucagccuggucggggcugggccucaaggcuaaaguuuuacuuaggcucc

SEQ ID NO: 5833 - RNA, 71 nt, Human
ggagcugggguuuaaucggccgaggagggagucuggggccauucugacuugguugacuuaggccaggcucc

SEQ ID NO: 5834 - RNA, 86 nt, Human
ggagcugugugagguagacgaggauggugacuccuggcugcagguaacccgcaggcuccccauccuacacaccuccucaccacucu

SEQ ID NO: 5835 - RNA, 84 nt, Human
ggaggagggggucgggccuccgaggaaggccuagccgcugcugcugccaggaauuccagguuggaggggcggcaaccuccugcc

SEQ ID NO: 5836 - RNA, 66 nt, Human
ggaggaguugcgcgcgcugugccgugugcaagcgcugcggcagggcuccgagaccucggcuccucc

SEQ ID NO: 5837 - RNA, 74 nt, Human
ggaggcaguccaggcucuuuagcaugguguuggaagcccuuaaugaucugcuacagccugggccuccagccucc

SEQ ID NO: 5838 - RNA, 72 nt, Human
ggaggccaagguggaucaccugaggucaggaguucgagaccagccugaccaacauggugaaaccccgucucu

SEQ ID NO: 5839 - RNA, 79 nt, Human
ggaggccgguggccguguggucccagacagcugcugcaagacggugguggcucuuuguggacagcgagaccaugccucc

SEQ ID NO: 5840 - RNA, 74 nt, Human
ggaggcgcggugaggagucaggcuuaaaacuuguuggaggggaguaaccaggccugcuccucucgcucuccucc

SEQ ID NO: 5841 - RNA, 74 nt, Human
ggaggcucagcccacccuccagcuuuuccucaggguguccugagguccaagauucuggagcaaucugacccuuc

SEQ ID NO: 5842 - RNA, 79 nt, Human
ggaggcuguucugugcauuguuggauauuuagcagcgucccugaccucaguccaauagaugccaguaacaacucccucc

SEQ ID NO: 5843 - RNA, 84 nt, Human
ggagggaguagaauuagucaccaggcaaagcccccacuggggggguuccuguuauuuaauagucugcauuuaccuguucccuuc

SEQ ID NO: 5844 - RNA, 79 nt, Human
ggagggcgggggagagacgagcggcucuggccccuuaauuguacuucgggcucguauugucucuccuuucgccaccucc

SEQ ID NO: 5845 - RNA, 71 nt, Human
ggaggggacuggaggaaacccccuuguuggaagagauuccaagagaagcacgguuuucucuuucccuugcc

SEQ ID NO: 5846 - RNA, 86 nt, Human
ggaggggaggauacaagaggaaugauaaauggcaaggaaaaccacucacucuuaaugcuuuuugucauacucauguccucuugucc

SEQ ID NO: 5847 - RNA, 85 nt, Human
ggagguagagaagaggaagaaguucaagauugaugaccagagaaggacccacaacuacgaugaguucaucugcaccuuuaucucc

SEQ ID NO: 5848 - RNA, 92 nt, Human
ggaggucagcuaccaggaagauccaugaucugggcauuggcagaugccugccaucacagccaggaagaugccucugaccugggugcaucucc

SEQ ID NO: 5849 - RNA, 60 nt, Human
ggagguggcuccugggagcuuggcuccugccagcccuguucccaggagcccucagcuucc

SEQ ID NO: 5850 - RNA, 114 nt, Human
ggagguggguuggaguugauuauaugggugcaggccuuguccacaagcgaaugggaaacuucuuccguccuccuagcuggccugcccaaagcccuuagcacagaucccauuucu

SEQ ID NO: 5851 - RNA, 96 nt, Human
ggaggugguggaggcugugaccauuguagagacaacaaccauggugguagugggcauugugggcuacguggaaacccucgaggccuccggaccuuc

SEQ ID NO: 5852 - RNA, 72 nt, Human
ggagguuucgaaauacaccaguuacgagcugcaugacaaguuuggcugggugaaagggaauggaaugccucc

SEQ ID NO: 5853 - RNA, 62 nt, Human
ggaguccccagaagcccugugcccacgaaccccugugggcggaggagagaggcggggacucc

SEQ ID NO: 5854 - RNA, 88 nt, Human
ggagucucacccuguugcccaggcuagagugcaguggugcaaucucagcucacugcaaccucugccucccggguucaagugauucucc

SEQ ID NO: 5855 - RNA, 87 nt, Human
ggagucucacucuguugcccaggcuggaauggaguggcgcgaucucagcucacugcacuccagccugggggaacagagugagacuuc

SEQ ID NO: 5856 - RNA, 88 nt, Human
ggagucucccucugucacccaggcuggagugcaguggcaugaucucagcucacugcaaccucugccucccggguucaagcaauucucc

SEQ ID NO: 5857 - RNA, 87 nt, Human
ggagucucgcucuuguugcccaagcuggagugcaauggcacaauauuggcucaccgcaaccuccacuuccuggguucaagcgacucc

SEQ ID NO: 5858 - RNA, 89 nt, Human
ggagucucgcucuuguugcccaggcuggagugcaguggcaugaucucagcucacugcaaccucugccaccuggguucaagcuguucucc

SEQ ID NO: 5859 - RNA, 75 nt, Human
ggagucuggccucaccugugccuggucuccugcaggggcuucagcgugacgucuggugggcaaagccggaucuuc

SEQ ID NO: 5860 - RNA, 67 nt, Human
ggagucugugucgggggagggcugccgucgagcccgccgucgccucgccccugaacuguuagacucc

SEQ ID NO: 5861 - RNA, 73 nt, Human
ggagugcaguggcacaaucucagcucacuacaaccuccgccucccagguucaagcgauucugccuuagccucc

SEQ ID NO: 5862 - RNA, 76 nt, Human
ggagugcaguggcguggucucggcucgcugcaaccucugccucccagguucuagcgggucucaugccucggccucc

SEQ ID NO: 5863 - RNA, 63 nt, Human
ggaguggagggggcugcccacccucgcuguacacagcugggcccagauggccccuucugaucc

SEQ ID NO: 5864 - RNA, 71 nt, Human
ggaguggcagggucuugcuguguugcccagggugggcuugaauuccugggcucaagugauccucccacuuu

SEQ ID NO: 5865 - RNA, 95 nt, Human
ggaguggggugcagugaguggccucaaaguugugcagaugcuuccgagccagaaacaaagccagcugccgccguccaucugcacucauguccucc

SEQ ID NO: 5866 - RNA, 74 nt, Human
ggagugugcauggugagggauaguucuugggcacugagccuggaagaggcuggcacucacuccaugggcacucc

SEQ ID NO: 5867 - RNA, 75 nt, Human
ggaguuaaacauuaugaggcugaugaauuugagauggcuaucaggcacuucgaacaagccuuaagagaauauuuc

SEQ ID NO: 5868 - RNA, 89 nt, Human
ggaguuuugcucuugcugccgaggcuggagugcaguggugugaucucgacucacugcaaccuccgccucccaaguucaagcaauuaucc

SEQ ID NO: 5869 - RNA, 89 nt, Human
ggaguuuuguucuuguugcccaggcuggagugcaauggcacaauccuggcucacugcaaccuccgccuccuggguucaagcaauucucc

SEQ ID NO: 5870 - RNA, 76 nt, Human
ggauagcagaagguugauguuuuuagugggacccaaggccuugaauuucccaguaauaaaauuagguuuccuuucc

SEQ ID NO: 5871 - RNA, 85 nt, Human
ggaucaugaacacguauaguaguggugccuucgcccaaagugucagacacagugguggagcccuacaacgccacccucucagucc

SEQ ID NO: 5872 - RNA, 83 nt, Human
ggaucaugggugguggugaacagcagaaagggauuauggaugaaucugcauuguucuagcugcuccccaugccacccgucucc

SEQ ID NO: 5873 - RNA, 91 nt, Human
ggauccggcugccagccugaggccaagcacggcuggagacccacgaccuggccugccguugcccugagcugcagccucggccccaggaucc

SEQ ID NO: 5874 - RNA, 80 nt, Human
ggauccggguccccgaccaaaggccgacacccgagaggugcgcucggacccggccggucccccgaggguggcucggaucc

SEQ ID NO: 5875 - RNA, 72 nt, Human
ggaucguggcgcgcauggcccuggugccgcgcacccuggaggcgcgcggacuggacgccacgccgcugaucc

SEQ ID NO: 5876 - RNA, 82 nt, Human
ggaucuugcuguugccuaggcuggagugcaguggcacaaucauagcucacugcagcuucgaacuccugggcucaagcaaucc

SEQ ID NO: 5877 - RNA, 74 nt, Human
ggaucuugguuuaaaagggauuuggaucuccccuaggguucauguuggaaauucagauccccagaacaagauuu

SEQ ID NO: 5878 - RNA, 94 nt, Human
ggaugaacaauagucugcaauuuccccuaagccaggccuugggauuuggacuuuugaggaccuggguaguaguuaguugacaugcuauuuaucu

SEQ ID NO: 5879 - RNA, 72 nt, Human
ggaugaagccucugugggaucuuugggcuuggggcugaauuucucaggcauaaauaccuaauggccuugucu

SEQ ID NO: 5880 - RNA, 85 nt, Human
ggaugacauccagagggcagaaugcaugcugcagcaggcggagaggcugggcugccggcaguugucacagccacagauguugucc

SEQ ID NO: 5881 - RNA, 71 nt, Human
ggaugaccagcucgucuucggucgugugauuacaucucauggcccguguguggggacuugcuuugucauuu

SEQ ID NO: 5882 - RNA, 75 nt, Human
ggaugagggccgcgguggcugccagcgugggguugagcgaggggccugcuggcucccggagcggucgccucuucc

SEQ ID NO: 5883 - RNA, 95 nt, Human
ggaugcuggugcucaguacgggaaagucauagaccgaagagugagggaacuguucgugcagucugcaaauuuuccccuuggaaacaccagcauuu

SEQ ID NO: 5884 - RNA, 86 nt, Human
ggaugggcuugugguuagcaguuuuugccaggaucauaggcugcuucacuuagaguaguggcaaagaugcugaccuacauucuucc

SEQ ID NO: 5885 - RNA, 60 nt, Human
ggauggggagguugggggggcaggagcuucugucccccacauuccaugcaccuccccucu

SEQ ID NO: 5886 - RNA, 60 nt, Human
ggauguaggcaucuugguggugcuuggcaaaguacagcauguuguccagagccaacaucc

SEQ ID NO: 5887 - RNA, 63 nt, Human
ggauguuucacagccaggcaguuuaugauauuaacagacuagacuccacagguguaaacgucc

SEQ ID NO: 5888 - RNA, 71 nt, Human
ggauguuuggaagauaagcuuaaaggagaaaugauggaucugcagcaugggagcuuauuucuucagacacc

SEQ ID NO: 5889 - RNA, 85 nt, Human
ggauuagcuuggugggacaaccugugaauuggacgaccaucuuuugacaagacaccacguuuagggggaccaaacaagcugguuu

SEQ ID NO: 5890 - RNA, 85 nt, Human
ggauuaguucuggagagagcagguugcuaagaagaaucuggcuucuucagucagcgcucuugcuuccuaucucuccaugugaucu

SEQ ID NO: 5891 - RNA, 90 nt, Human
ggauucugcauacgccaucucugagagccauggagggagccacaccccuggugacuucauggugcuggaugggagacgcuagcggcaucc

SEQ ID NO: 5892 - RNA, 63 nt, Human
ggauugaaacugucucaggaccuugaugaucuugcuauucucuaccuggccacaguucaagcc

SEQ ID NO: 5893 - RNA, 64 nt, Human
ggauugguauaacaaggcacaagauuuggaauuuacccuuuacagacuggcuuuuauaacaccc

SEQ ID NO: 5894 - RNA, 82 nt, Human
ggauuguauccuagauacucugaaugaagcauuguaaagacuuagauuguguuaucuucuucuuagaguacugauacuuucc

SEQ ID NO: 5895 - RNA, 64 nt, Human
ggauuuggcaaagaaggcaguacaguuaauccuggcugcaacugcuggaaaauuugcuacaccc

SEQ ID NO: 5896 - RNA, 73 nt, Human
ggcaaacagacuugaccaucuucagacccacugcauucucaagcugaaguggucugcucauaguuugugugcc

SEQ ID NO: 5897 - RNA, 88 nt, Human
ggcaaauacuuuugaccucuugugaugaggucaggaacuaggaacuuuaauucuuugacuuuucacauuuuuuaaaagguguauugcu

SEQ ID NO: 5898 - RNA, 82 nt, Human
ggcaaauguccaggcaccugccuggcccuaaaaagagucacaguccugacccucgugggggcagggcaggugucccgaggcc

SEQ ID NO: 5899 - RNA, 69 nt, Human
ggcaagacagggacuagcagccagagccaguaaugccuuccugguuugcucugagggguccugucuucc

SEQ ID NO: 5900 - RNA, 68 nt, Human
ggcaagggcuggguuuguacuucuaaaugcuuuugugguagaggcauacaccacagaaaucuuuggcc

SEQ ID NO: 5901 - RNA, 89 nt, Human
ggcaagucaguggcuuguuucuguuucauggaaucuucuagcuauggagagcucagguaucagacuucagaaguagagcuuggcuugcc

SEQ ID NO: 5902 - RNA, 110 nt, Human
ggcaaguguugucaugguaguacaggaggcaaaaccauuuauauuuugaacacuuacugcacugauaggauguuuugugguugagcugauuuuaguacuguagauagguc

SEQ ID NO: 5903 - RNA, 65 nt, Human
ggcaauacuuccuccugucaucucaggugggucuccauccugaguacagagaggaccuagaagcc

SEQ ID NO: 5904 - RNA, 78 nt, Human
ggcaaugucuugaccuggguuggaagguagggugggucuggaaaagcuuugguccaggguucaagauuugagagugcc

SEQ ID NO: 5905 - RNA, 102 nt, Human
ggcacacuuccugucaaacaaguuggugacauugacuaggcauggcuucugggaaaaugucauguaagcuuuguuaccaucugagcaaaauggagauguucc

SEQ ID NO: 5906 - RNA, 79 nt, Human
ggcacauugauuauaacacacagcugaggucucgaucacacuagaugucuccagucagucguguggaaaucgaugugcu

SEQ ID NO: 5907 - RNA, 99 nt, Human
ggcaccucuagaaguauacgugugugucuccaaccaggugucagaagccagauauguuugacaaccacucugucuggaggccugcacacuuaugguguc

SEQ ID NO: 5908 - RNA, 86 nt, Human
ggcacugcaggucaggccaguuaggaggugcugcuccuccuccguggguggagggcuuuccuccuggcgauguccuccucaguguc

SEQ ID NO: 5909 - RNA, 69 nt, Human
ggcacuucugguuggccucggggcgcgcuggcucggcucuuccuccgcccucgaggcccccgcaguccc

SEQ ID NO: 5910 - RNA, 106 nt, Human
ggcacuuggaaccgucuuggggaauauagcuugguaauugaacugcuuaagcuuauuauuaauauuuaagcuauaguuccaggcccauuccagaggucccccagcc

SEQ ID NO: 5911 - RNA, 83 nt, Human
ggcagaaaaucgauucagaugaagcacgaggauucgagggaaucuuuguacugucaacuuuuugguacuucgaguuuucugcc

SEQ ID NO: 5912 - RNA, 85 nt, Human
ggcagaacacacagcaaggaaagguccuuucuggggaucaccccauuggcugaagaugagaccauucuuccucuuguguuuugcc

SEQ ID NO: 5913 - RNA, 69 nt, Human
ggcagaccccgauccugcugcgccgccuucaagggggaccgccggccgcgagccagguugggauuugcu

SEQ ID NO: 5914 - RNA, 87 nt, Human
ggcagagggcucucaggguccacgucaaggguccagcagucgucaccauugcucccuacgucacacuccggagggugucucaaugcc

SEQ ID NO: 5915 - RNA, 70 nt, Human
ggcagcacaaaggcggcgcggugcacgucggaguuguaguacuucagcugcaucugcgccaccugcugcu

SEQ ID NO: 5916 - RNA, 64 nt, Human
ggcagcccugggccuugguuugauuaccuccccugggggaugcuggucagacccagagguuguc

SEQ ID NO: 5917 - RNA, 66 nt, Human
ggcagcgaguccucagggcgcccgggagccaccagucugcucucgggcucuacucagacuagcgcc

SEQ ID NO: 5918 - RNA, 81 nt, Human
ggcagcguggcgggaacggcugcuucuccucugcccagggcccuguucuuggugggacucggcugccccuccucugcugcc

SEQ ID NO: 5919 - RNA, 73 nt, Human
ggcagcucccaagaccacccgcccccaggugcagccaccuacaccccggggaagggggaagagcaggagcucc

SEQ ID NO: 5920 - RNA, 67 nt, Human
ggcagcucuucggccgcauccccaugcgcuucucggugcugaugcagaugcguuucgacgggcugcu

SEQ ID NO: 5921 - RNA, 73 nt, Human
ggcagcugugccccuugugcggaugggacggacuucccccagcugugucaacuguguccaggguguggcuguc

SEQ ID NO: 5922 - RNA, 88 nt, Human
ggcaggcacucagcccuuggaggugcuggaggcugugcagcgcagccuggugcugcagcgaccacagaccugggcugacugcgugacc

SEQ ID NO: 5923 - RNA, 83 nt, Human
ggcaggcagcuggugccggggcggucaccuccugcucagagaugucaaaucccagccucugaagcugccccaccagcucugcc

SEQ ID NO: 5924 - RNA, 76 nt, Human
ggcaggcauucacccucaggaccaggcaagugcagagucagcaguccuguuccuggguauggaguccuguccugcc

SEQ ID NO: 5925 - RNA, 81 nt, Human
ggcaggcccccaccaccccaugcugacuuggagaaccccagaucucuggggcccagccaagcaaggguguggggggcagcu

SEQ ID NO: 5926 - RNA, 80 nt, Human
ggcaggcuuuggugacucuagauuaccucgggccgauugcacgccccccguggugacuaggaccccuucaaacgucugcc

SEQ ID NO: 5927 - RNA, 130 nt, Human
ggcagggaggugacgagguaggggcagagcggauggaagccggagaucccagguucccggaauacuccggcuggggccuucgggcuucuccuguccccucccuacccccgugccucggguuucucccucc

SEQ ID NO: 5928 - RNA, 110 nt, Human
ggcaggguguacaccuguggcucucggggcugcccuuuggcuuuggagaugguuuucucgauggaggacgggaggccuuuguuggagaccuugcacuuguacuccuugcc

SEQ ID NO: 5929 - RNA, 105 nt, Human
ggcagguggaggugcaucaagagcccggggcagcggugcccagaggccaggaggccccugaaggcaaggccacgggagacugguggagaaucugccuccccugcc

SEQ ID NO: 5930 - RNA, 67 nt, Human
ggcagguguuugaggaggcccugcacagggucccaggacugcaccagggccucaucagcaaccugcu

SEQ ID NO: 5931 - RNA, 83 nt, Human
ggcagguugcuguguugugcuuccuucuacagccaauaugaaaaggccuaaguuaaagaaagcaaguaaacgcaugaccugcc

SEQ ID NO: 5932 - RNA, 62 nt, Human
ggcaguagagccuagcgcccaggcccuugagcugcagggucuggguguggacgucuaugacc

SEQ ID NO: 5933 - RNA, 75 nt, Human
ggcaguagaggccgcuauggcgaacguuccgugggcagaggucugcgagaaauuccaggcggcgcucgcucuguc

SEQ ID NO: 5934 - RNA, 71 nt, Human
ggcagugaaaacccugugucugauaagucucagagacaaacugcuacuuagaauuacagggguucacuguu

SEQ ID NO: 5935 - RNA, 106 nt, Human
ggcaguuaccugcuggaccucucgagccuggcggaacguauggauaaaagauucaugcuucuaucuccaguugcucuucugaggagguucagccuuuaacucugcu

SEQ ID NO: 5936 - RNA, 61 nt, Human
ggcaucagcaguccuuaaaggccugagcuugcaacacucaggcaggacucggcugagggcc

SEQ ID NO: 5937 - RNA, 88 nt, Human
ggcaugcaguaacuguucaaauaauguuuguuuaauugacggguuuuaagcucgauaacuuagcuaagcccuuugcacagucuaagcc

SEQ ID NO: 5938 - RNA, 93 nt, Human
ggcauggaggacgccuucaacaagggacgggccaauuucucagggaugucggagaggaaugaccuguuucuuucugaaguguuccaccaagcc

SEQ ID NO: 5939 - RNA, 83 nt, Human
ggcaugggguuggcuucuguccacuugcugagcaacuuguuuuccuuuucacaguggauaugaccuuggaugccgacacagcc

SEQ ID NO: 5940 - RNA, 85 nt, Human
ggcauguggcugggcagguggauuacaaggcuggucuugaguccugaccucaagugauccaccugccucugccucccaaagugcu

SEQ ID NO: 5941 - RNA, 93 nt, Human
ggccaagcccagcuugaauaccugggucugcaggcgucucucuaagaaauccucuaucuucaggcccaggauguaauccagcuucaucuugcc

SEQ ID NO: 5942 - RNA, 79 nt, Human
ggccaauacaaucuacaucuagacacaauauuguaaaauuuuggaauauuaaggauagaaggaagauauuaaaguggcc

SEQ ID NO: 5943 - RNA, 75 nt, Human
ggccaccaacacauggcccagccagugcugcugggcucugguuucuguguucuggugaggccaugggguggggcc

SEQ ID NO: 5944 - RNA, 81 nt, Human
ggccacuuccaccuuccagggcauaggugaccccuguggaaaacaaguaccccuggaacauccuagaaguggagguggacc

SEQ ID NO: 5945 - RNA, 63 nt, Human
ggccagcugggggcuggcgggggaggcugugucugucaaaccguugugcccccaguguggguc

SEQ ID NO: 5946 - RNA, 85 nt, Human
ggccaggacucuugcagaacugagaccugggagcuccucccucaccaggaagggacccgaggcaggcggcgggggucucugagcc

SEQ ID NO: 5947 - RNA, 64 nt, Human
ggccagggaagcccgacgugguggggcgcugccucccgcuccguggccuccuuccucccuggcc

SEQ ID NO: 5948 - RNA, 93 nt, Human
ggccagugaggugcccguuggugggugugagaguuuguugccagaucagcugaggaagcgucuuaccccucagcgcggugcgaucucacgguu

SEQ ID NO: 5949 - RNA, 87 nt, Human
ggccagugcauugaaaggucuccaggccuagagaaucuuagauaaaaggcacuggaaccagaucaaagcccaucuuuucagcuggcu

SEQ ID NO: 5950 - RNA, 75 nt, Human
ggccaugggcgccaaccaugcuggagaccagagcaacacaugccuggacacggcgacggaacgcaccacgaggcc

SEQ ID NO: 5951 - RNA, 91 nt, Human
ggcccaaggaaugaagagaaccaaugguauguacugguggcagauaacaagcuuugcacugggcugaccaacuguuuuuuauuaaauggcu

SEQ ID NO: 5952 - RNA, 86 nt, Human
ggcccacgugccggucaugcccauuccgcggugggugcgcuccuuccacggcccgcacaccaccugcugcaugcggcuguugggcc

SEQ ID NO: 5953 - RNA, 79 nt, Human
ggcccagcggccucuuuccuacguaccucggacugacggggcggucugacaagugccguggguugggcuucgccgggcu

SEQ ID NO: 5954 - RNA, 82 nt, Human
ggcccaggaucggcagggcugcuggcagaggaaucccagcugggguucccaugccccaggcuccugcaggacuugcugggcc

SEQ ID NO: 5955 - RNA, 99 nt, Human
ggcccaggcugcccguuccucuccuucuccgccagucugcgcugcggcugccacggcucacaccagagggaugggguaggaggcgcaggcagccaggcc

SEQ ID NO: 5956 - RNA, 84 nt, Human
ggccccaggacgccaggguggccggcugcugggccacgugcuguccguggugagcccugccgcugucccauggcccagggagcc

SEQ ID NO: 5957 - RNA, 65 nt, Human
ggcccccucaaaaguggucucaacgggggguucgccggccccgggagaaacacgccagggggacc

SEQ ID NO: 5958 - RNA, 67 nt, Human
ggcccggcccgcagcccgagcaggaagcgccggcgcuaggcuggccccugcgcugccagcuggagcc

SEQ ID NO: 5959 - RNA, 83 nt, Human
ggccgaguuguuugggggcgcugugcccacggggcccgggggcuccgccccggguuucaauggcguugccccucuacuuugcu

SEQ ID NO: 5960 - RNA, 84 nt, Human
ggccgcccggaacaccuucaccuucugcugcacgaaaugcuucuucuuggucuuggaggcgaagccgaaaccugggccggggcc

SEQ ID NO: 5961 - RNA, 79 nt, Human
ggccgcgaugucccccgccugucugcgaaugcugcguagcggguagacauggagggcuuucggcaucgucagaguggcc

SEQ ID NO: 5962 - RNA, 68 nt, Human
ggccgcucuagaggauccaagcuuacguacgcgugcaugcgacgucauagcucuucuauagugucacc

SEQ ID NO: 5963 - RNA, 75 nt, Human
ggccggaagauggauguggcugacuucgagugggugaugugguucaccuccuuucgcaacgucaucaucuuugcc

SEQ ID NO: 5964 - RNA, 88 nt, Human
ggccggcugugaacguaguuccugagagauagcaaacaugcccaacagugagcccgcaucucugcuggagcuguucaacagcaucgcc

SEQ ID NO: 5965 - RNA, 95 nt, Human
ggccgggcaugguggcucacaccuauaaucccagcacuuugggaagccgaggugaguggaucaucugaggucaggaguuugagaccagccuggcc

SEQ ID NO: 5966 - RNA, 75 nt, Human
ggccgggcgcgguggcucacgccuguaauuccagcacuuugggaggauuacaggcaugagucaccauacccggcc

SEQ ID NO: 5967 - RNA, 104 nt, Human
ggccgucuccggagucgcaguguccucggccgccgaagagugggugaagugcggaacuuccuccuuuuguggcuguggacaccuuccacaccggcuuccuggcc

SEQ ID NO: 5968 - RNA, 111 nt, Human
ggccguuaugggauauuucagggauaggaguugugaaagagcccuuggcuggacguuucuagccuuaaucuuuggcaagccauuucauuucccugagccucaguuuccgcc

SEQ ID NO: 5969 - RNA, 80 nt, Human
ggccucugcaacuuacuagcuguguguccuugggaaagaacuucaaggacuucuuugcagguaucugauuaguggagguc

SEQ ID NO: 5970 - RNA, 75 nt, Human
ggccugagaacaugguucgcaucgcuuugcagcuggacgauggcucgagguugcaggacucuuucuguucaggcc

SEQ ID NO: 5971 - RNA, 67 nt, Human
ggccugccuccgggcacacccggcuccccggacgccucgccggccgcuggggcuggaggcacgggcc

SEQ ID NO: 5972 - RNA, 80 nt, Human
ggccugcugaggucccuccuugagucucauguucaagcagucuuuguccaugaaacugggaggcgaccguguuagcugcc

SEQ ID NO: 5973 - RNA, 78 nt, Human
ggccuggugcggcuucggggcaaggaggaucccuggaacucuaucaccaguggagcauugaccggggcugugcuggcu

SEQ ID NO: 5974 - RNA, 79 nt, Human
ggccugugaggucccuccuugagucucauguucaagcagucuuuguccaugaaacugggaggcgaccguguuagcugcc

SEQ ID NO: 5975 - RNA, 83 nt, Human
ggccuucuauccugggcugcaacauccuucgaguugaauauuccuuacugaucuauguuagcguuccuggauccaagaagguc

SEQ ID NO: 5976 - RNA, 66 nt, Human
ggccuugcugguggcuuugggggcccuggcuucccugugugccccccuggaggcauccaagagguc

SEQ ID NO: 5977 - RNA, 71 nt, Human
ggccuugguguggaggggcuguacucugagcccaagugagucagcuauaggaagaggccauaccuagagcc

SEQ ID NO: 5978 - RNA, 75 nt, Human
ggccuuuguccccgaggccgcgccgggagcucccaagcgcacuccugggccggaccucggcgcgggacaaaagcc

SEQ ID NO: 5979 - RNA, 66 nt, Human
ggcgaaccugaaaaguuaggucaggcguugacugaagucuaugccaaggccaauagcuucaccguc

SEQ ID NO: 5980 - RNA, 64 nt, Human
ggcgaagccgggagugugggcgcggcugggguccugggcccgcgcgcugcuccgggacuacgcc

SEQ ID NO: 5981 - RNA, 74 nt, Human
ggcgacaggugcagaacaaaaacagcaggacaaacccacgaguuugaauguuggaaagacacugacaaaucgcc

SEQ ID NO: 5982 - RNA, 78 nt, Human
ggcgacgugcccuguccaggccucacuucccgcgucgcaaaacgggguggacaacgcagccuaaggcagagccgcgcc

SEQ ID NO: 5983 - RNA, 76 nt, Human
ggcgaucggcaucgaccugggcaccaccuacuccugcguggggguguuccaacacggcaagguggagaucaucgcc

SEQ ID NO: 5984 - RNA, 79 nt, Human
ggcgcagcccggccuccgacagccaugggaacuugugcuucaaguuguuguagggcugcuuccggaggcuguacuggcc

SEQ ID NO: 5985 - RNA, 105 nt, Human
ggcgcgggagggagcgaagcagcgcgggcagcgagcgagaugcagcaccgaggcuuccuccuccucacccuccucgcccugcuggcgcucaccuccgcggucgcc

SEQ ID NO: 5986 - RNA, 95 nt, Human
ggcgcucuaccgacugaugacuaccuggaccagcccugccuugagacgucaacggaucaaguguacagugaguccuggccgguauggaagagccc

SEQ ID NO: 5987 - RNA, 65 nt, Human
ggcggcaagcgggcugggacugcucggccgccuccugcccggcgagcagcucagaccaugucgcc

SEQ ID NO: 5988 - RNA, 88 nt, Human
ggcggcgaaaggaccggcuuaaugccagaccgggaguuggagguguccgaucucgaguggggauccagcaaggccuucucagccaguc

SEQ ID NO: 5989 - RNA, 82 nt, Human
ggcggcggcugaaccggggccugcggcggaagcagcacucccugcugaagcgccugcgcaaggccaagaaggaggcgccgcc

SEQ ID NO: 5990 - RNA, 72 nt, Human
ggcgggccgguuagcggcgacggggagggugggcucguggugcccccccuuuuguugugguuaacgcucgcc

SEQ ID NO: 5991 - RNA, 81 nt, Human
ggcggggcgcguugugcugaaaggucucggcuccugggucgcgcccauaggagccucuucucggcgcugcggggauccguc

SEQ ID NO: 5992 - RNA, 82 nt, Human
ggcggggucauugcaugacagcaagaaggcacgagguccccucaucuguccuuucccagcucgcaggccuuggaaccccgcc

SEQ ID NO: 5993 - RNA, 71 nt, Human
ggcggugagccccugugcaccguggacgugugagggagguggcacgggccagggcgcgggggccgccagcc

SEQ ID NO: 5994 - RNA, 96 nt, Human
ggcguaucagguuucagaggaugcggcugggaacgggaguagaggugaggggucguugcaucugucgcgguguguaucuuuuggggguucagcgcc

SEQ ID NO: 5995 - RNA, 73 nt, Human
ggcgucacugcccugaugggcgguugggaaggcaaaaccugcccugaaaagccuuuggguagugauucuagcc

SEQ ID NO: 5996 - RNA, 65 nt, Human
ggcgucggaggggccccucaaggccuccugggguacacugagcaccacgggguuccucugacuuc

SEQ ID NO: 5997 - RNA, 64 nt, Human
ggcgucgucgggccgccgcagcccgccgaaggcgcgggugaguggcagacccuugggccccgcc

SEQ ID NO: 5998 - RNA, 74 nt, Human
ggcgucguuuuucuucuuccagggcucguuuuuuggcuuccauuucccguucccuggauucgagcagccgcguc

SEQ ID NO: 5999 - RNA, 94 nt, Human
ggcgugucacaaccacugcaacacaaaaaaucuugcaaucucaugcuuguuuuauaaaugugaucccaugguuugaaguaguggguuacaugcu

SEQ ID NO: 6000 - RNA, 76 nt, Human
ggcguucagcagagucagggauggguccauuauaugauccaugaaccagaaccucacaucuugcuguuccggcgcc

SEQ ID NO: 6001 - RNA, 71 nt, Human
ggcguugcacugcaugggccccaggaggggggucgacgcggccacucaccgcaagggccuggcagugugcc

SEQ ID NO: 6002 - RNA, 106 nt, Human
ggcuaagaguaacaggugcuggagccagacuuccuggguucauauccugguucuaccaauuuaccagcugugugaacuuaggaaaauuccucuccgccucuuaguu

SEQ ID NO: 6003 - RNA, 71 nt, Human
ggcuaagugccagcuccucuuugcccucaaggugcuccacaugaugcccgaggagaagcugguugagggcc

SEQ ID NO: 6004 - RNA, 76 nt, Human
ggcuaauuuuuuguguuuuuaguagagacgggggucaaacacugauccugccuuuccacuguaccacuaaguagcc

SEQ ID NO: 6005 - RNA, 77 nt, Human
ggcuagaaaagccaaggccaaaggcuggaggggagaggacagucagcauguccagccuggggucuggguguaggguu

SEQ ID NO: 6006 - RNA, 67 nt, Human
ggcuagaaagaugcuaaggggaugcuacagcuguuuguccccugacagagauuccaucuaucuaacc

SEQ ID NO: 6007 - RNA, 81 nt, Human
ggcuagagaagcggcaaagucuauggccuuuccaaugcuccaucgguggcaaaagaacauugguuugcucuucucuuugcu

SEQ ID NO: 6008 - RNA, 93 nt, Human
ggcuaggcuggucuugaacuccugaccucgugauccacccgccuuggccucccaaagugcugggauuacaggcaugagccaccgcaccuggcc

SEQ ID NO: 6009 - RNA, 73 nt, Human
ggcucaacucggggaggccgccgggccggccuccgagacuccggcgggcaccgagucgccucacucgagcgcc

SEQ ID NO: 6010 - RNA, 63 nt, Human
ggcucaggacccuguggaucugggaguguggcaucacugccaagggcugcggggaucugugcc

SEQ ID NO: 6011 - RNA, 77 nt, Human
ggcucaggcaguggguggggaaggggacaaaagccggguuggagcugcuucuuuuaagccaaacccaagcaggggcc

SEQ ID NO: 6012 - RNA, 83 nt, Human
ggcucagucaaagcugcuccugcucagguccggcccccauccccgggaacauccgccugucagagggaagucaaaguggagcu

SEQ ID NO: 6013 - RNA, 86 nt, Human
ggcuccacagugugcacagaugaacgaaguuauggcagaguuagcuaacagaacucccucaaguuucauuugugaaguuggaagcu

SEQ ID NO: 6014 - RNA, 66 nt, Human
ggcuccuccgaauggcuggcuguggauggguuggucagucccuccaacaacagcaaggaggaugcc

SEQ ID NO: 6015 - RNA, 62 nt, Human
ggcuccuuacugcuuauuaaucuguauguacacaugaugaaaugaagcagaagcugggaguc

SEQ ID NO: 6016 - RNA, 72 nt, Human
ggcucgucccggagucagaaaaggcaggucaacuacccaaggcggccaaaggcccuuccugucuccagagcc

SEQ ID NO: 6017 - RNA, 62 nt, Human
ggcucuccauucccaggcucagugcaggauccaggccugcauguguggcggguggagaagcu

SEQ ID NO: 6018 - RNA, 81 nt, Human
ggcucugaagucagcgguuguaugaagcugugggcacaguacgugggacacagcauggaggacugugacugaugcagagcu

SEQ ID NO: 6019 - RNA, 70 nt, Human
ggcugaacugagucaggcuccugcugaggggcccgauuggugcccgcagccugggcagcugaccacagcc

SEQ ID NO: 6020 - RNA, 72 nt, Human
ggcugaaggcuaaguucccuuccaacuuugagauuucugcucaaagaugguaaacauacaguagucucugcc

SEQ ID NO: 6021 - RNA, 67 nt, Human
ggcugacauggcuuuagauccuguuuaugauuugguaucuuauugucacaaaguuguuccgucaguc

SEQ ID NO: 6022 - RNA, 85 nt, Human
ggcugcaggucuuggaaggaaugugggcaagguuuugaacuugauuguucuugaagcuaucagaccacaucgaggcucagcaguc

SEQ ID NO: 6023 - RNA, 87 nt, Human
ggcugcaucaaaggcugccaggaagccccgugccacuccagugcccaggguaccagaagggcuccaccaggcagucccccaccaguc

SEQ ID NO: 6024 - RNA, 75 nt, Human
ggcugcggcugcagaaguaccgccugcggaguaacugcaaagaugcuguccgugcgcguugcugcggccgugguc

SEQ ID NO: 6025 - RNA, 85 nt, Human
ggcugcugccuuaugggucagugguaugggugugaggacaucugauggaguucucuuccaaccacugccuacaauugguggugcc

SEQ ID NO: 6026 - RNA, 113 nt, Human
ggcugcugggugcacccccggggccugggggugaacccccgcugaugggggaggauggaccccuggggcuggugggugaaccccuaggggcugguggguggacuccgggggcu

SEQ ID NO: 6027 - RNA, 82 nt, Human
ggcugcuguaggacgguugcuccgagcgucgguugcccgacaugugagugccauuccuuggggcauuucugccacugcagcc

SEQ ID NO: 6028 - RNA, 62 nt, Human
ggcuggagcuugacacgguugagaaucccugaugcucaacccguauuuucuggcuaccaguu

SEQ ID NO: 6029 - RNA, 76 nt, Human
ggcuggagugcauucgcuugucccggcuuacugcagccuccgccucccggguucaagugauuuuugugcuucagcc

SEQ ID NO: 6030 - RNA, 99 nt, Human
ggcuggccuggcugacggcagcugccaaggggaugccgcacugcaggaggaccugggguggugcuauaccuucacagcagcaggcaaaagaggucagcu

SEQ ID NO: 6031 - RNA, 61 nt, Human
ggcugggccugagacaugggcuggccuccagguggagggguccagcaggcagguacaagcc

SEQ ID NO: 6032 - RNA, 76 nt, Human
ggcuggguggcugcaucggaggcguucagcugcuucaagaugaagcugaacaucuccuucccagccacuggcugcc

SEQ ID NO: 6033 - RNA, 88 nt, Human
ggcuggucuuaaacuccugaccucgugaucugcccacuuuggccucccaaagugcugggauuacaggcaugagccaccgcacccagcc

SEQ ID NO: 6034 - RNA, 81 nt, Human
ggcugguuccccaucuuauucgaacucuccugcaucauuaauagaugcaaguuagauguacgaacaaggggacucacaguc

SEQ ID NO: 6035 - RNA, 90 nt, Human
ggcugugggaagcgauuugcgauguucaccuccacgauauuugcugugguuggauucuugggagcuggauacucguuuaucaucucagcc

SEQ ID NO: 6036 - RNA, 80 nt, Human
ggcuguggugguugaaaguaauuaauuuaugacauaguaucugagacuuaaauuugcuguguccuuuuggcuuuucagcc

SEQ ID NO: 6037 - RNA, 66 nt, Human
ggcuguuugaggaaucuugagccaaguccuagucauuauuuuugccauccucgaacuugaacaguc

SEQ ID NO: 6038 - RNA, 77 nt, Human
ggcuuagcugugagaagugguucucuuccucuggucccuucuggggacucuguuuccccauuucuugcugcuguguc

SEQ ID NO: 6039 - RNA, 75 nt, Human
ggcuucaccagcgcuucucuguuugucucgucccuggauuucuaacaguugccucgagaugcucugguucugguc

SEQ ID NO: 6040 - RNA, 61 nt, Human
ggcuucaugauauacaccaauuccaaaauaaaacaaucaaaugguccagguguagaaugcc

SEQ ID NO: 6041 - RNA, 74 nt, Human
ggcuuccgugauggucuacgaugacaccaguaagaaauggguaccaaucaaaccuggccagcagggauucagcc

SEQ ID NO: 6042 - RNA, 76 nt, Human
ggcuuccucaccaccuugugcacugcugcucccacaccacagugacuagcagcacauaaugguuugaauuaaagcu

SEQ ID NO: 6043 - RNA, 71 nt, Human
ggcuuggccauggcggcuggugcugauaaccauuucuuggcagaagugccgccaaagcuguggcccuaguc

SEQ ID NO: 6044 - RNA, 72 nt, Human
ggcuuggugagggccaccaccccacuguggggggcuaacuuuccggguggugaaaaagcccuccucauugcc

SEQ ID NO: 6045 - RNA, 65 nt, Human
ggcuuguggaccaguaacugucaauggcuaaaaccaccgaauaggagccaaugacuccacaaguc

SEQ ID NO: 6046 - RNA, 86 nt, Human
ggcuuuaggaaucgccuggcucuacccucucacuucauggcuacagauacuugugcccugagagagcaagugaauuucccaaagcc

SEQ ID NO: 6047 - RNA, 81 nt, Human
ggcuuuaucucuugccuugaccuccuacauuaucaacaaagugagaguuuaagaucuccugggcaggagauuucagaagcc

SEQ ID NO: 6048 - RNA, 65 nt, Human
ggcuuucugagaaaucgaguucaggcugccaaguauccucucuuagucgcuucaucucagaaguu

SEQ ID NO: 6049 - RNA, 60 nt, Human
ggcuuucuguucauccguacuuucaaagauuuagugaucaaguacuaugugucaggaacc

SEQ ID NO: 6050 - RNA, 83 nt, Human
ggcuuugccucguucauugcuguguccuggcacuucucagucucucacggaaugugccuuggauaaaugagugaagcaaaguc

SEQ ID NO: 6051 - RNA, 90 nt, Human
ggcuuugcuggcccagcaagccugauaagcaugaagcucuuaucuuugguggcuguggucggguguuugcuggugcccccagcugaagcc

SEQ ID NO: 6052 - RNA, 93 nt, Human
ggcuuuuagugcuacuggugcucuugaaggacagauguuccggaaaacugggaggcuuaucucacugagugagcagaaucugguagcacugcu

SEQ ID NO: 6053 - RNA, 82 nt, Human
ggcuuuuccuaaucucuuuggucuuuggaagugggcaggguuucucaaaccaagugucuuccaugggccauuggcaaaggcu

SEQ ID NO: 6054 - RNA, 79 nt, Human
ggcuuuuuagcuugagacucuauccugagauuuugaugugguaggucuagggugaggcauaggcauuuuuuaaaaagcu

SEQ ID NO: 6055 - RNA, 81 nt, Human
ggcuuuuucuuagugccucugugcauuugggugauguucuauuuacauggccuguguaaaucuccauugggaagucaugcc

SEQ ID NO: 6056 - RNA, 82 nt, Human
gggaaacacguauucaggccggcgcggguugguacauccuagggcauaccaggggacucuggucgguuacugauacggcacc

SEQ ID NO: 6057 - RNA, 80 nt, Human
gggaaaccuuggcaagcaguuccaguccgagcagccccagaccgcugccgcccgaagcuaagccugccucuggccuuccc

SEQ ID NO: 6058 - RNA, 70 nt, Human
gggaaacuccgaggacagagggcuaaauccaugaaguuguggauggccugaugauccacagcggagaccc

SEQ ID NO: 6059 - RNA, 71 nt, Human
gggaaacuccgaggacagagggcuaaauccaugaaguuuguggauggccugaugauccacagcggagaccc

SEQ ID NO: 6060 - RNA, 72 nt, Human
gggaaacuccgaggacagagggcuaaauccaugaaguuuguggauggccugaugauccacagcuggagaccc

SEQ ID NO: 6061 - RNA, 82 nt, Human
gggaaagaaugccaagaugguauuuucuuuuggcaagaugcuuugguugugcagucauugaagauacuuggcacuauuuucu

SEQ ID NO: 6062 - RNA, 59 nt, Human
gggaaauggcucaaacacaauccagggaagcucucuaugauauguguuugacauccccc

SEQ ID NO: 6063 - RNA, 78 nt, Human
gggaaauuugccuuuaccacugaagauuaugacauguuugaaguguguuuugagagcaagggaacagggcggauaccu

SEQ ID NO: 6064 - RNA, 82 nt, Human
gggaacacaagggcuggccggacucugagaagcugagggacaaagaauggaccccaagcaccucacgcccagcucccauccu

SEQ ID NO: 6065 - RNA, 78 nt, Human
gggaacuucuggauacaaguggggccaugcucccuggcccugacuccaggcugggguauccugaacuguauccaaccc

SEQ ID NO: 6066 - RNA, 76 nt, Human
gggaaggagcuccccccacugcccauccugcccgcuuuguggcggguagagucagugacagggaggcagcccuccu

SEQ ID NO: 6067 - RNA, 78 nt, Human
gggaaggcaguagguuguauaguuaucuuccgaggggcaacaucacugcccugaaaccacacaaccuacuaccucacc

SEQ ID NO: 6068 - RNA, 66 nt, Human
gggaaguaguuucucuuugggcaugcugacagcaguuuuucauagccucacggaugagcccuuucu

SEQ ID NO: 6069 - RNA, 84 nt, Human
gggaauuuugauaugaaaagaaacuagucauuuauuuauacaauaggcuuggcucaaaaguguuuuucagaccucgguauuccu

SEQ ID NO: 6070 - RNA, 88 nt, Human
gggacaguuuggugcugcagugaauuaauuacguaggcaaucgagacucuaauaaggauauuuugcuccagcaauuccugauuguccc

SEQ ID NO: 6071 - RNA, 129 nt, Human
gggacaucaaagaauaaauaagcugcucuaauugccaagaauucacaugugguuguaugcagcauuacugggaaauugaaguguaucugcaugugauucugcugugauggacacuuguaaguuuguucc

SEQ ID NO: 6072 - RNA, 77 nt, Human
gggacccucaagagagcauggagaguguggggugugccuggauaggcccccuuugcaggcagucuuuugagagucuc

SEQ ID NO: 6073 - RNA, 96 nt, Human
cggagccguguacagauucaucaccacgaucugugccaucauugggggaccuucaacgucgccggauccuggacucaugcaucuucacaggcucug

SEQ ID NO: 6074 - RNA, 90 nt, Human
cggagcucgcuucuuugcccagguuggagugcaauggcacaaucuuggcucacugcaaccuccgccucccggguucaagcaauucuccug

SEQ ID NO: 6075 - RNA, 73 nt, Human
cggagggcgaggcggcguggacagcggccccggcacccagcgccccgccgcccgcaagccgcgcgcccguccg

SEQ ID NO: 6076 - RNA, 65 nt, Human
cggagggucugggaaggguggcguuggcccguucugacagaggccucccuggccagguccauccg

SEQ ID NO: 6077 - RNA, 90 nt, Human
cggagucucacucuguugccuaggcuggagugcaguggcgcgaucuuggcucacugcaaccucugccucccagguucaagcgauucucug

SEQ ID NO: 6078 - RNA, 64 nt, Human
cggauaucugugucuuucuaccacgucaaaaacaacgggaagauugaacucaucaagauguucg

SEQ ID NO: 6079 - RNA, 84 nt, Human
cggaucuagaugccaguuccguucuggcuacuuugaugagagguauguauuggccucuagagucagaacuggccgaagcauccg

SEQ ID NO: 6080 - RNA, 81 nt, Human
cggauggagcuugagcaacgccccgcccuuuguugagauuccccaacccugcuagccuuguaaacuccugagccuucaccg

SEQ ID NO: 6081 - RNA, 106 nt, Human
cggauuauccccauaccccacccauucccgauacaccuuacuuacuguguguuggcccagccagagugaggaaggaguuuggccacauuggagauggcgguagcug

SEQ ID NO: 6082 - RNA, 61 nt, Human
cggcaccaucacgugcuuggggacggguucucucccggggcgucuucgugcaguggugccg

SEQ ID NO: 6083 - RNA, 79 nt, Human
cggccagagggcacaggcugcuuggggggugaggguccccauuccugccaccucucacagaccaugacccacagggcug

SEQ ID NO: 6084 - RNA, 76 nt, Human
cggccgcucaaaucugccgguagcccagcccgccccgcgugcgggggcuguggcgguuacacggccgggcgcgccg

SEQ ID NO: 6085 - RNA, 94 nt, Human
cggccgucgggugugagcugcgccgaccgcucugaggguucguggcccaccgcuccuucgcggucccugccgccaccguacacgcucagcgucg

SEQ ID NO: 6086 - RNA, 79 nt, Human
cggcgcggcuaccugccccguuuucccugugaguugaccugcuccgggccgcgggccgccaauggcaggggccgcuccg

SEQ ID NO: 6087 - RNA, 74 nt, Human
cggcgcuuccgcaaguuccugguguuuguggcaaacuucgaugagaaugaccccaagaccuuugaggggcguug

SEQ ID NO: 6088 - RNA, 96 nt, Human
cggcgugcccugguggcuggaaggaggcguguggcgugaugcggccguggacgcggacugagugcgcgggagccccugugaggagccgggcagccg

SEQ ID NO: 6089 - RNA, 80 nt, Human
cggcuccgagagcagguucuucgugaguuccucgcagggccggucggagcuacacauugagaaccugaacauggaggccg

SEQ ID NO: 6090 - RNA, 66 nt, Human
cggcugcccaggcccugccuuggcaugugugucuccagagcgugcccggccaggccaucccagccg

SEQ ID NO: 6091 - RNA, 101 nt, Human
cggcugcgcgggucgcggugcugugaggucugcgggcgcuggcaaauccggcccaggauguagagcuggcagugccugacggcgcgucugacgcggaguug

SEQ ID NO: 6092 - RNA, 77 nt, Human
cggcugggagcuugaacuugccuggguuggcuuccacuauaccgauggucucuuccagguccucgaggucccacucg

SEQ ID NO: 6093 - RNA, 72 nt, Human
cgggagcgcuggcggcagcagaacguuaacggcgccuucgccgagcugaggaagcugcugccgacgcacccg

SEQ ID NO: 6094 - RNA, 62 nt, Human
cgggagcuggaagaaugggggcaaaaaccccaggcccccauucuccaacccccaagcucuug

SEQ ID NO: 6095 - RNA, 74 nt, Human
cgggauaauggggucucaaaagguuuuggaaguaguagauaccucuaaaagccaaggagcagcccuaguucucg

SEQ ID NO: 6096 - RNA, 73 nt, Human
cgggccacccgggucaagcgcgcuccgccgggaaacuucugcgggcgccgggcugaagcuccgggcagggcug

SEQ ID NO: 6097 - RNA, 72 nt, Human
cgggccacggcccggaaccggccccaggcgggucuccaaaaaccgggcccgcuugcacccgggucuggcccg

SEQ ID NO: 6098 - RNA, 100 nt, Human
cgggccuucgggagcugggaagagcacccugcugaagaggcugcuccaggagcacagcggcaucuuuggcuucagcgugucccauaccacgaggaacccg

SEQ ID NO: 6099 - RNA, 81 nt, Human
cgggcgcaggguguccgagccgcugccugugcuuccgcaccaccgugcgcugcaugcaucugcugcuggaggccgugcccg

SEQ ID NO: 6100 - RNA, 73 nt, Human
cgggcugcgcgcacagcucagaccucguaacgcgacgggccccccacugccgacaucugcgccccgccgaccg

SEQ ID NO: 6101 - RNA, 104 nt, Human
cggggacuacaauggccacgucggucuggguguuaagugcuccaaggagguggccaccgccauccguggggccaucauccuggccaagcucuccaucguccccg

SEQ ID NO: 6102 - RNA, 102 nt, Human
cggggagcuauuugcuuuuaugcuaaaugaccuuagaccacuuauaaaaugcauaugagugcuuuaaauguuauuuugugugugugugguguugccucccug

SEQ ID NO: 6103 - RNA, 69 nt, Human
cggggcccgucuggggcgccggcgggugcguuugaaucugguccgagcgcgggaaacggcggguccccg

SEQ ID NO: 6104 - RNA, 63 nt, Human
cgggggagaggggcaaaugccuccgggacugacacuccaggcagcuuugccuucucuccccug

SEQ ID NO: 6105 - RNA, 72 nt, Human
cgggggcaauggcaucgugggagcgcagguagucaaggacgaggauugugugcugcuuuagauuuggcccug

SEQ ID NO: 6106 - RNA, 67 nt, Human
cggggggagccgagauuagagcaucagccugagagaagcggugcuucugguucuccgcuccgccucg

SEQ ID NO: 6107 - RNA, 71 nt, Human
cggggguucggggggaugcccaggcccggugagcucgcucuccgccugggcacuugggcuccgggcccuug

SEQ ID NO: 6108 - RNA, 72 nt, Human
cggggucggcacacaggcuuugagacaaccaggaugcggagacaaucacaaagaguguguaggccagccccg

SEQ ID NO: 6109 - RNA, 80 nt, Human
cgggucacccgcugcgaugcuggcggucacucucuguaccuugccguguagccgaagccagcgggccgguugguggccug

SEQ ID NO: 6110 - RNA, 68 nt, Human
cgggugguaaaguggcaacgcgaauuuggguaucuggucucccaaaaguacuugccgcucuaccccug

SEQ ID NO: 6111 - RNA, 100 nt, Human
cgguacaugcagagcgaacgcugucgcagagucaucuguuuggugggagcuggaaucuccacauccgcaggcauccccgacuuucgcucuccauccaccg

SEQ ID NO: 6112 - RNA, 111 nt, Human
cgguaucauuccucgaauuucagugcgggaaccaaugcagacuggcauuaaggcuguggauagcuuggugccaauuggucguggucagcgugaacugauuauuggugaccg

SEQ ID NO: 6113 - RNA, 65 nt, Human
cggucagcuccccgauggccugggugagggcaggcuggcugcucugacaccauggggagcugcug

SEQ ID NO: 6114 - RNA, 71 nt, Human
cggucucaccaaacgccccaaacucuccuccacacccccucugagugcccuggggcgccuggcugaggcug

SEQ ID NO: 6115 - RNA, 72 nt, Human
cggugcuggggaagucggaggagugggcggacaaccaccugccccuuacggaugccgaacuggcccgcaucg

SEQ ID NO: 6116 - RNA, 61 nt, Human
cgguuucugcgggccaagcacggugcgcaaagagcgcguggugcggcccgacucggagcug

SEQ ID NO: 6117 - RNA, 77 nt, Human
cguaguuuaauuucucuguguuuuuuauauaaccaucuuugucgacaguaaagggcacgucuggagugaugauuucg

SEQ ID NO: 6118 - RNA, 79 nt, Human
cguauaucuguucucgguacuauagggcaccagaguugaucuuuggagccacugauuauaccucuaguauagauguaug

SEQ ID NO: 6119 - RNA, 61 nt, Human
cguaucgagcguggucaagcugcugcugcaguguccagcacagccagacaacgcacgaucg

SEQ ID NO: 6120 - RNA, 84 nt, Human
cgucaugucuaagucagagucuccuaaagagcccgaacagcugaggaagcucuucauggaggguugagcuugaaacaacugaug

SEQ ID NO: 6121 - RNA, 67 nt, Human
cgucccaaaggccggcaagaugguguccuggaugaucugucgccugguggugcugguguuugggaug

SEQ ID NO: 6122 - RNA, 80 nt, Human
cgucgucggcgcugggcaggcacacggcggacacugucugggagaagcggacagguguggccagcuccagcagggggaug

SEQ ID NO: 6123 - RNA, 70 nt, Human
cgugcagucuuugguguucagagcacagccgcaggccugugggcucugcugggggacccugugcugcaug

SEQ ID NO: 6124 - RNA, 80 nt, Human
cgugcucgcgcugcucucccaccgccgggcucugaagcagaagaucuggccuggcaucccgagcccagagagcgaguuug

SEQ ID NO: 6125 - RNA, 89 nt, Human
cguggaggcggugaaggaggaggcagcggcuguggcagcccggcaggagacggacucuaucccgcugguggacgacauccgcuuccacg

SEQ ID NO: 6126 - RNA, 101 nt, Human
cguggagguguagagggaucgcggucuggucgugugauuuugggaguuguuuggggugcggguucugugucgggugggagcguuuguuguggaccuccgcg

SEQ ID NO: 6127 - RNA, 65 nt, Human
cguggccgccuucgguuugaggugggcuuggagcacccgaacgccucgcgccgccuggggccacg

SEQ ID NO: 6128 - RNA, 89 nt, Human
cguggugugcucuguggggcaggaguaggugccaaaucuggacucuugucacuucuugcuuccugcuuugcagcuuucuuagcuucaug

SEQ ID NO: 6129 - RNA, 70 nt, Human
cgugucugugcaggguaugaucaucuaccgagccgccuacuucgguaucuaugacacugcacagggaaug

SEQ ID NO: 6130 - RNA, 81 nt, Human
cguguggcugugacgccgggucgcgaugugacauugugaaggugacagucauggagcgaccaacggcauuguaggcaugcg

SEQ ID NO: 6131 - RNA, 71 nt, Human
cguguuaggcgccgaugcgacgcucaucagacccagaaagguguguugauaagacagcagacgguggcaug

SEQ ID NO: 6132 - RNA, 73 nt, Human
cguuccuucccagccucagcccacggcaggggugcagccccaucuuucugcuguaggcugggcuacagggacg

SEQ ID NO: 6133 - RNA, 66 nt, Human
cguuucuaguaagaacuuggcaucaagucuaagaagaagggcuuuaccaaguacugcgcagaaaug

SEQ ID NO: 6134 - RNA, 72 nt, Human
guuuuucaucugcacugccaagacugagugguuggauggcaagcaugugguguuggcaaagugaaagaaggc

SEQ ID NO: 6135 - RNA, 77 nt, Human
uaaagcugaugauccaacaaugggggagggcccagacaaggcacgcucccagcuccugauccuggaucgaggcuuug

SEQ ID NO: 6136 - RNA, 72 nt, Human
uaaauaggcccagagugaagacuugagagcaaaaugccugaacacaugcaccuuauuuuuuggggcuguuua

SEQ ID NO: 6137 - RNA, 122 nt, Human
uaaaucugggcugagggaaagcauguccacaccaggugcccagacaucugguuggcuuuggcugauuuguccugcaggcaccugccuugucuggauuugcacacuuuccaaguugcccauua

SEQ ID NO: 6138 - RNA, 78 nt, Human
uaaauuggaaugacagaagaugagagcuaggaagugguauauuuaauuucuagauuucagggcuggagugguggagua

SEQ ID NO: 6139 - RNA, 80 nt, Human
uaacaacgaggccaggagggauuuuuacacagacccgagugaguggggggacaauauuuucccuccuaguuguguuguug

SEQ ID NO: 6140 - RNA, 92 nt, Human
uaacagcauucacucagucaggaggacagggcccucauggccugaccagcucuugaaggcccugccucuuaauacuguuacaauggcuauua

SEQ ID NO: 6141 - RNA, 74 nt, Human
uaacugcagcaauuuccuugaacugucuguagaaauucuggaaugcagauauuuauucaaugguacugcaguua

SEQ ID NO: 6142 - RNA, 107 nt, Human
uaacuguaagaaggaguguagugucccagcccugacaacgaguaccgccagggaccuaccaucuaacaccaucugggaacacuauuuuuucucaguccuuccaguug

SEQ ID NO: 6143 - RNA, 104 nt, Human
uaagacugcucucgaaguuuaucaggauguucacaugacaaaacuggacccaggcuacuuuaguuuuguugggauauuguaagcuaaauuuuucuguaaccuua

SEQ ID NO: 6144 - RNA, 78 nt, Human
uaagaguggcagggcggacuaacaggaggcaggccagcuacaggcaggcaggccuaaagggugcgauugccaaucuug

SEQ ID NO: 6145 - RNA, 63 nt, Human
uaagauuacaggcaugagccaccacaccugggcgcaaugugguccauuccuuuaauguccuua

SEQ ID NO: 6146 - RNA, 78 nt, Human
uaagauucugcugaggagcccccgcuggucccucugggcaugcugugcucggacggaaagcggggcugcggguccuug

SEQ ID NO: 6147 - RNA, 73 nt, Human
uaaggaagucagcacuuacauuacgaaaauuggguacaaccccgacaaaguagcauuuugugccauuuucuug

SEQ ID NO: 6148 - RNA, 103 nt, Human
uaagggauccuccugcucaggcucuggacuagcugggauuacaggugugugccaccacaccuugcuuucccacuaauucuguuccugcuaguuucuucccuua

SEQ ID NO: 6149 - RNA, 68 nt, Human
uaagguagcuggaacuagaaucaccaaggcuuuuucagcccuuggguucuuugguucucucucucuua

SEQ ID NO: 6150 - RNA, 61 nt, Human
uaagguuaugucuguguaugucauucacacuuaggcaagcauacacaggcacauggcuuua

SEQ ID NO: 6151 - RNA, 78 nt, Human
uaaguacuuucccuucucucacaccugugguugcgugggcuugccuuaugaccaacugaaagagugggaaaaagcuug

SEQ ID NO: 6152 - RNA, 86 nt, Human
uaaguuuuaggguacaugugcacaacaugcagguuuguuacauagguauacaugugccauguuggugugcugcacccaguaacuug

SEQ ID NO: 6153 - RNA, 130 nt, Human
uaaucuuaacauucucaacuaugauuaccaaagcagaaaaauaaaacacauuaaaucacaugcuggcuuaugaaagccuccaucuuuaagugacaugugcacucucguucauaguucauuggccaaagaa

SEQ ID NO: 6154 - RNA, 66 nt, Human
uaauggucuuaugccaauccaugcagaaaaauaagacacaaugcaggagucagaugaggaccauua

SEQ ID NO: 6155 - RNA, 72 nt, Human
uaauuuagugaggugaacgacuucagauuucauuacuggauuggauauuugagguaaaauuucauuugguua

SEQ ID NO: 6156 - RNA, 75 nt, Human
uaauuuauguuuauuauuuauacguuauauucgguuuauuuauuguguugguguguaaaauguagguguuuauug

SEQ ID NO: 6157 - RNA, 90 nt, Human
uacaaguaaacuuaaaaggagugucaaguuaucagacuuuguaaagauguugaaguuuuaaaugggaaagcccuuuugagcuuugcugua

SEQ ID NO: 6158 - RNA, 85 nt, Human
uacacauugaagagaacaaacagugggaguguuuauuccuuaagagagaauaaacugcagagauuaaaaguuuccuucgagugua

SEQ ID NO: 6159 - RNA, 77 nt, Human
uacacccagcucucuuuuucuaauguaaauguuguguacaauaguuuuauuugauuaagcuucaggacuguuuugua

SEQ ID NO: 6160 - RNA, 80 nt, Human
uacagaaacagauggguacaagaacuaagaaaacggcuaagaaaguguuuugguccugacuacuaccauuucgcucugug

SEQ ID NO: 6161 - RNA, 105 nt, Human
uacagauauucugaaaacuuuaaguucaguaauaugccagggguucccaagaccacuugagaccugguaauuuauuggaagucucuaagggaaucagaagcugua

SEQ ID NO: 6162 - RNA, 66 nt, Human
uacagugaaaccccaugucugcuaaaauuacaaaaaauuagcugggcgugguggugcacgccugua

SEQ ID NO: 6163 - RNA, 83 nt, Human
uacaucugacuuuauucccaguccucuuauccugugaaggcugguacacuagggaaaggggauauuuaaaaaugucaagugug

SEQ ID NO: 6164 - RNA, 62 nt, Human
uacaucugcugccuacauuccugcucacacauacgcuugcagcuuugaggcaggagagggua

SEQ ID NO: 6165 - RNA, 78 nt, Human
uacauguagauaugaucagauuuaccauuuuuagggggaagagggaaaaaaagguguuuuuaucaucaacuacaugug

SEQ ID NO: 6166 - RNA, 65 nt, Human
uacauuuauugaaauggcuguacauguaagcagguaacuacacagcagacguggcaauaugugug

SEQ ID NO: 6167 - RNA, 101 nt, Human
uaccagaaucuuuuauuugcaaagagaaacuaggggaaaauguagccaacauauacaaagaucuucagaaacucucucgccucuuuaaagaccagcuggug

SEQ ID NO: 6168 - RNA, 75 nt, Human
uaccagagcauacauauaucaacaguaagauguaauuuuucauuacaucacugcuagaauauuuagcuuugugua

SEQ ID NO: 6169 - RNA, 64 nt, Human
uaccucaagcagagagagggcuucaggccaccccacuucuggcucuuuccaguccuagcaggua

SEQ ID NO: 6170 - RNA, 60 nt, Human
uaccucuucaggauuuauugggucagggaagggccuggccagagaaucuguccugaggug

SEQ ID NO: 6171 - RNA, 75 nt, Human
uaccuggaggccauucacaacuucguggaggucuuaaacgaauauuuccacaaugucugugaacuggaccuggug

SEQ ID NO: 6172 - RNA, 70 nt, Human
uaccuggauaauacacccguuuugccucgugccgaauucggcacgagaacauauggguuaaaucucggua

SEQ ID NO: 6173 - RNA, 98 nt, Human
uacgacucacuauagggaaagcugguacgccugcagguaccgguccggaauucccgggucgacccacgcguccgaaacugucccccauagagguugua

SEQ ID NO: 6174 - RNA, 120 nt, Human
uacgcaaauuauccauguuagcacauuuggaacaaauguauaaauguacuuucugaauaaagucaaaagucuaacuuguuuuuaguuccauaauguuuuaauguuuaauuauauugugua

SEQ ID NO: 6175 - RNA, 87 nt, Human
uacuaaacagauacaccucuaaggauuuuuguaaaucucguucuuuuuagaguaguaacagcauuuuuagaggaauccauuuuauua

SEQ ID NO: 6176 - RNA, 71 nt, Human
uacuaagucugaagaugggcauuaugcaagaacagauuaugcagagaaugcuaacaaauuagaagaaagug

SEQ ID NO: 6177 - RNA, 109 nt, Human
uacuauuucuagcaucugagauccaggucaguugugauuaauuuuucucuguauuaugcaauguauuuuccugcuuuucaugccucucuacuggaugcuagacauugua

SEQ ID NO: 6178 - RNA, 64 nt, Human
uacugagcaaggccccagauccuucucucuggaggaagagggaagcccagggguccuguuugua

SEQ ID NO: 6179 - RNA, 75 nt, Human
uacugauacaaguuugauacaugcaauuguugggaggaaagauuccucagaaggcacaaagagcuguauugugua

SEQ ID NO: 6180 - RNA, 63 nt, Human
uacuuagaguaguaugagcaagcaugggcgccccaaacuuccauacuucacgcuaucuaagug

SEQ ID NO: 6181 - RNA, 110 nt, Human
uagaaauuuaccagagauagcaccuucugacccagugcagauuggacgguuaauugguagguuggaguugagucucacguugaaacagaaugaagugcuuccuggagcua

SEQ ID NO: 6182 - RNA, 63 nt, Human
uagaagagaggaggcaugucagugacuugaaauugcaaugaaaugcuacacaccucuugucua

SEQ ID NO: 6183 - RNA, 62 nt, Human
uagacuccaggcuuggucuucugggcacagccaucaccccaggagacaacuccuuggagcug

SEQ ID NO: 6184 - RNA, 72 nt, Human
uagagacaggguuuugccauguugcucaggcuagucuugaaugcccgggcucaagugauccaccccccucug

SEQ ID NO: 6185 - RNA, 114 nt, Human
uagagcaagugcagccauaagugguaagaaaugaaugaguauggcuguguuccaauuacaauuauuauggauggauauacucguauuuccuaugucagauggaaucuugcucug

SEQ ID NO: 6186 - RNA, 61 nt, Human
uagaggccagccuuugucuuguucagaugacuguugcacaggaaagacugcuggcugacua

SEQ ID NO: 6187 - RNA, 71 nt, Human
uagaguacagugucuuaaaauauucauguuuuacuuggauaucuagaagauaaaaggcauucuguauuuua

SEQ ID NO: 6188 - RNA, 61 nt, Human
uagcaaguucauaaguuuccaaaaaggaagcccauacauaacaguggagguguuuugucua

SEQ ID NO: 6189 - RNA, 89 nt, Human
uagcaccccuugcccugugucuguggaacagaagcagcuuccuucagagaagacugcagcucccaaggacacaagcuguugggaugcua

SEQ ID NO: 6190 - RNA, 79 nt, Human
uagcagcuucucgauguuaucagucaacaacaugccagcucugccuugcuuguugcugcaugauugcgagauggcucua

SEQ ID NO: 6191 - RNA, 89 nt, Human
uagcauccuugcugugcuucugaggcuacugcuguuagaaagcuuuagaaagcuuuuugccauggcacuggugagcuuguaaggggcua

SEQ ID NO: 6192 - RNA, 79 nt, Human
uagcaugaggugugugcauuugccaggggcaaauuucuauucucaauuaacccaugcagcaaaugcuacgcaucugcug

SEQ ID NO: 6193 - RNA, 110 nt, Human
uagcaugccaggaauauacaguaaagaacaagguggaucuucuucacggagguuacugugugagacgaaagacaguucacuguucaucacuggaaauacuguacgugcua

SEQ ID NO: 6194 - RNA, 77 nt, Human
uagccgugauguccgggggccguguacaucauguuaccgugggguggggucugcauuggcugcugggcauauggcug

SEQ ID NO: 6195 - RNA, 89 nt, Human
uagcuaggacuacaggggcaagcuaccaugucuggcuaauuuuuaaaacuuuuuuguagagacagggucuugcuauguuucccaggcua

SEQ ID NO: 6196 - RNA, 87 nt, Human
uagcuggcaugggacugguagugcaggcuggcucuuggaaaggaguauguauuccaggcugguuggcugcuguuccacugggagcug

SEQ ID NO: 6197 - RNA, 113 nt, Human
uagcugggauuacaggcaugcaccaccacgcccggcuaauuuuuuuguauuuuuaguggagacagcguuucuccauguuggucaggcugguuuugaacuuuugaccccaggug

SEQ ID NO: 6198 - RNA, 73 nt, Human
uagcuugcugcuuucacacaggucagaaggaucuaugccggauuugagcccaggucuuucugauugcaagcug

SEQ ID NO: 6199 - RNA, 122 nt, Human
uagcuuugaccaacacucuguguaaaccaaggucuguaacaucacauuucuccaucaauguuauguugccuguuucuuggucgauugcaaacagaucucuuguguuuccuccuacaaugcug

SEQ ID NO: 6200 - RNA, 76 nt, Human
uaggaaaggcaagagaaaugcuuguuucuuuuauauauccagcuuuuuaagaaauacguguuugccagucauccua

SEQ ID NO: 6201 - RNA, 88 nt, Human
uaggaaguaauguagaagagauagugauuaauaauacacguuuccuaaugugggauauugguggccaagaaucucuucguucuuccug

SEQ ID NO: 6202 - RNA, 62 nt, Human
uaggagugucgguuguuaagaacuagagcuuauuccuauuccaaaucuaucuugcgcuccug

SEQ ID NO: 6203 - RNA, 75 nt, Human
uaggaucugguguggcuuuuggggagccagugugcuguguggugaccucauuggccuccugaacccuagaaccug

SEQ ID NO: 6204 - RNA, 77 nt, Human
uaggcaugugauuucagguuuuucguacugaaaacauugaaauuucaguuggaaaacccccugaaauuuuaugagua

SEQ ID NO: 6205 - RNA, 79 nt, Human
uaggcgccgggugccgaugacugggccuucuugcucucggucggcuucuuggucucggcgugccccauucccggcccug

SEQ ID NO: 6206 - RNA, 89 nt, Human
uaggcuguaugcuguuaaugcuaaucgugauagggguuuuugccuccaacugacuccuacauauuagcauuaacaguguaugaugccug

SEQ ID NO: 6207 - RNA, 73 nt, Human
uagggaagaucuaggagaagaggaagaacaguaagccacugcuucuuggaaaaucuucugggggucugaccug

SEQ ID NO: 6208 - RNA, 68 nt, Human
uaggggagggaagagaacuaagaugauacuaacaaaugcuaucacugguuuuguggcugccucccuua

SEQ ID NO: 6209 - RNA, 75 nt, Human
uaggggucuguaccgggcuggccugugccuaucaccucuuaugcaaaccuucccaccccuguauucccaccccug

SEQ ID NO: 6210 - RNA, 62 nt, Human
uagggguuugcaaacaauacguagccaauuuccuuaaaagggaaauucuugugugucuccua

SEQ ID NO: 6211 - RNA, 102 nt, Human
uaggucccaacaguuuguguuuuccuuacugucccaguuuuauaucauuauucuuaguacuaaacagagugacaacagggagugacauuuguugaggaccua

SEQ ID NO: 6212 - RNA, 88 nt, Human
uaggugugaggauuaaaugacaaccuccuuagugugaugcuuuuacaaaguaaacacugaaagaguagguuuaaugguuaucacccua

SEQ ID NO: 6213 - RNA, 63 nt, Human
uagguugagaaaagacagacuugggguagagcuaggccgagucgcccucccuuucucuuuuua

SEQ ID NO: 6214 - RNA, 73 nt, Human
uaguacauaaaguggguccagggcacucagggcugugaaggcccugagcucugggagcccacacuauuuauug

SEQ ID NO: 6215 - RNA, 74 nt, Human
uaguacugcauucuguguauguaugugcauguauauuuguguguguguguaugcaagcucacagcugucugcug

SEQ ID NO: 6216 - RNA, 71 nt, Human
uaguagacugaugagcuggauugcuuagauugauaacauuuacaaauaggaguccaguugacaugcuauua

SEQ ID NO: 6217 - RNA, 74 nt, Human
uaguaguuguguugggauaagcaggagucuauaacuuucccucaucaaagauccuucuggucucaagggcucug

SEQ ID NO: 6218 - RNA, 105 nt, Human
uaguaucacagccuuucuauccugaacguuuuguuccuuagaugccagagaaauguuuagcauuggaauucugaaggcuugaggagugaaagaggugacaugcug

SEQ ID NO: 6219 - RNA, 87 nt, Human
uaguauuuccugaaauaacaaguuuagugcuuuaacuauggcuacaugugcuuaaggaauuugagccacuuauuuuugaagaugcug

SEQ ID NO: 6220 - RNA, 108 nt, Human
uagucagcauauagcgauccuggaaugagccucuguaucaucuggucacggaaguacgugguaugcaagaagccccggaggcuauccuauccaaagcuguagagauug

SEQ ID NO: 6221 - RNA, 96 nt, Human
uagucucauccagguaugacaugugccacugugucugaaauuccugagcaccgagggccgcuucaggcaccaggcacuuugccaaccugagagcug

SEQ ID NO: 6222 - RNA, 123 nt, Human
uagugagaugaacccgguaccucagauggaaauggagaaaucgccugucuucugcgucucucacgcugggagcuguagaccggagcuguuccuauuuggccaucuuggcuccucucuccucug

SEQ ID NO: 6223 - RNA, 67 nt, Human
uagugauuguuucucuucacccccaacauuuccguuuaccaaggucgaguuggagagaaauucauug

SEQ ID NO: 6224 - RNA, 89 nt, Human
uagugcugacuuuuuguuugaaauuaaacagauggguaaccuaauugguggccuccugacuuuuuaaggaaaaacgugugcagccauua

SEQ ID NO: 6225 - RNA, 64 nt, Human
uaguguccuguagaaacuguuccagcucagggaaaggggagaugcugcggauauacaggaucug

SEQ ID NO: 6226 - RNA, 130 nt, Human
uaguguucacauguugcucaguuuugcuaacugauaaaucauuuaauccucuucuucauauguaugaguacuaucuuauaucuguggucaagagugagguaagcaagcuccaacagacccugagaaccua

SEQ ID NO: 6227 - RNA, 62 nt, Human
uaguguuucagucggugacgucacucacucugagacggugacgucacucacucugagaccua

SEQ ID NO: 6228 - RNA, 85 nt, Human
uaguuacugcugagauaccauuucuucucuuugcaaggauacacauauucaacauacacaagagaggaauguaaagaagugccua

SEQ ID NO: 6229 - RNA, 131 nt, Human
uaguuaucagucaccaccagaccauuauuggcgguuagaauuccagaaacggugaauagaaguucaucuucuauuuugucuucauggaauauaucacucugguaaacagcugguucuaaauaugaugguua

SEQ ID NO: 6230 - RNA, 61 nt, Human
uaguuaucgaagcuuucaccagacuaccauaccugugugaaggcgacauguauaaugacua

SEQ ID NO: 6231 - RNA, 76 nt, Human
uaguucccaauccccaagguuuuguuugguuucuuuucuuuucaugucacacacucuccuugggugauuucaucua

SEQ ID NO: 6232 - RNA, 81 nt, Human
uaguucuauuuauauuuuugcaaaugucaggaucucauucuuuuuuaugccugaacaguacugcauuguguauauggacua

SEQ ID NO: 6233 - RNA, 105 nt, Human
uaguucuccccauacauaccccaagucacccuucucuuuccucgaaggcucaagguuuucgugaucuuuucagcuguacuuuauggaguauguucuugaguucug

SEQ ID NO: 6234 - RNA, 72 nt, Human
uaguugcuccccuaccuucugucggaauaggauuauucccaugcaccucuggguagguauagguaguagcua

SEQ ID NO: 6235 - RNA, 86 nt, Human
uauaaucuagccacaguguggcuauaaugaggcacggcuuauugcagcuggaaaucaauuauccucacgcugagguggggauucua

SEQ ID NO: 6236 - RNA, 83 nt, Human
uauagaacccagcucagaugugacuuccagagaggguccaggcauucaaacccacucucugccaugucacuuaguguucugug

SEQ ID NO: 6237 - RNA, 79 nt, Human
uauauagguaaagcucuaagacuccugagccaacuuuuauguaacuggcuuccuaggcuugggagcuugaacuacugua

SEQ ID NO: 6238 - RNA, 117 nt, Human
uauaugcacuugaaaguauucaaaagucuucccggacaaaaugaggacuugguacuuacuggauaccagguugacaaaaacaaggaugacgagcugacgggcuuuuagcagcaugua

SEQ ID NO: 6239 - RNA, 102 nt, Human
uauaugccugauucauaguaaaauaccucuaauaaacauuguuuuauagaaaaccugacuucagugaauauuuugguauuuuacagugggccaguuuauaua

SEQ ID NO: 6240 - RNA, 83 nt, Human
uauccugggcuacuguauggagaauauguuguagagacaggcaaaagucuagguaggacauaaugguagcuuagacuaggaua

SEQ ID NO: 6241 - RNA, 103 nt, Human
uaucgcagugugggaacaagacuuuucauugccuuuugcucaguaagauugucuacacaaacugccacgggaggaaugacaagcaguugacccacuggugaua

SEQ ID NO: 6242 - RNA, 129 nt, Human
uaucuggacagcaggaagggccacauaaccuucugugacuguagucgucuguccaguacuuucucugugccacacaccugcacuacaguaaccccgagguagagugccaguaucuucccuuuucagaua

SEQ ID NO: 6243 - RNA, 91 nt, Human
uaucuucccuuccaaccuggugucagcagccuuucgcucauacucuaccaccuaugaagagaggaauaucaccggaaccagggugaaggug

SEQ ID NO: 6244 - RNA, 78 nt, Human
uaucuucuuucauuauggagggagguuuggcagauggagaaccugaucgaacuucgcuucuuggugauagcaaagaug

SEQ ID NO: 6245 - RNA, 74 nt, Human
uaugaaaggugugaacuugcaauguccuccugucuuaaacccaaguugacagugcccucucaaaacuuuucaua

SEQ ID NO: 6246 - RNA, 71 nt, Human
uauggcauucuguuuaauacacgaaagguuuccacuugauauacauuguguuaaaacagaagauagccaua

SEQ ID NO: 6247 - RNA, 87 nt, Human
uauggccacccgaaagcgcuccuccagcagggacagcucacugaugaggucggugauggcguugguaaaggcuuccugggggcugua

SEQ ID NO: 6248 - RNA, 81 nt, Human
uauguccagauucugugaccacuaguuacuguaucagaacucaucagguacccacuuauaaauagcacugaucuggcugua

SEQ ID NO: 6249 - RNA, 94 nt, Human
uauuacguugaaugagaguagugagagugggcauccuugucuugucaaaguucucaaggagaaugcuuccaguuuuuacucauucagcaugaug

SEQ ID NO: 6250 - RNA, 74 nt, Human
uauuaucacaguguuauucuucuucauaucuguggcaugacagguguaucugaaagagaaacgaccgugaaaua

SEQ ID NO: 6251 - RNA, 114 nt, Human
uauuauugggcaccuguuaugugagacacuguccuaggcacugugggauaacaacagcaaacacuucacacaacagccuggccuuccuguguuuuacaacagcuccuaaagaua

SEQ ID NO: 6252 - RNA, 74 nt, Human
uauucuaaguauuccaaauaaguugacucauacaguguuuauucuuuuaugucuggcuuauuucacuuagcgua

SEQ ID NO: 6253 - RNA, 75 nt, Human
uauuggcuagcuugugcccucaaguguuuggaauguaucuaguaaagcuugcuguggccauggugcuggcuggug

SEQ ID NO: 6254 - RNA, 76 nt, Human
uauuggugccuucuuucaucaugccuuuuaaaucuaaggguuacugguauaugcuuuuagaagaauugugucaaua

SEQ ID NO: 6255 - RNA, 74 nt, Human
uauuguuuauguauugucuauggcugcuuuugugcuucauacagcaguguugacaaguuaugacagagacagua

SEQ ID NO: 6256 - RNA, 71 nt, Human
uauuuaagaaaugucuuugaccccauguguuaggaccccaucuaauuccuugucuccuuguuuccuaagug

SEQ ID NO: 6257 - RNA, 73 nt, Human
uauuucugaucgauauuuuuguguaauaagcauggaaaugaacuuuauacacaccacuguguugucagagaua

SEQ ID NO: 6258 - RNA, 94 nt, Human
uauuugaaauaauauuuugguugacuuaaguuuugagagacaauucuaaaauugaucuagagacucauucaauagcaaugugaccuuuuaaaua

SEQ ID NO: 6259 - RNA, 78 nt, Human
uauuuguauuuuacuaugauaguugagaaauuuagccucuuagucauuuuuagcuguuauuguggaagaccucaaaua

SEQ ID NO: 6260 - RNA, 79 nt, Human
uauuuugcauccuaguuuguauuaugaagucaucauauauauauuugaaauaguauaagcuaauuacuguugcagaaug

SEQ ID NO: 6261 - RNA, 98 nt, Human
uauuuugcauucuuugugugccuuaucauguguuaaguaccaugaggguacacccaggcuuagcacaaugcauuugguauacaaaaccauguaaaaug

SEQ ID NO: 6262 - RNA, 90 nt, Human
ucaaagcugaggcuuggagcaggugugaguugccuuccauugauugguuaggugaccuccgcccaccccugcuccaacuuccauaguuga

SEQ ID NO: 6263 - RNA, 76 nt, Human
ucaacagcuuaggaugugucccuuucaacucagacuuuucauuuuagagaauggggcagauggggcaaaucguuga

SEQ ID NO: 6264 - RNA, 76 nt, Human
ucaacgcagugaaagauguagccaaagcccugugagaccucaucagugcaacgaaggcugcagcuggcaaaguugg

SEQ ID NO: 6265 - RNA, 87 nt, Human
ucaaggccccaaggugaggcaaaucccuggaaggcuugaacccugcaguucagucucccgggguaaucacuccccaauaagcaguga

SEQ ID NO: 6266 - RNA, 73 nt, Human
ucaagucauaggcuucuuucagucuuuaugucaccucaggagacuuauuugagaggaagccuucuguacuuga

SEQ ID NO: 6267 - RNA, 71 nt, Human
ucacaaauggcagaacaguauguaaagcugguaacaccucgguuucagugcaccauguguuugcuuuguga

SEQ ID NO: 6268 - RNA, 73 nt, Human
ucacaauuuuuuucucuggcuccuuuaaaacaaacgaaaaauguuucugugugcuuugguauucuagcuguga

SEQ ID NO: 6269 - RNA, 61 nt, Human
ucacagacaacagccugguggcagcgggccacgacugcuucccggugcuguucaccuauga

SEQ ID NO: 6270 - RNA, 113 nt, Human
ucacagggaguuaaugaggggugaggaaggccgaccaggcaagaagcucaagaaggugaagcuucggaaguuggagaggccuccagaaacgccaacaguugauccaacaguga

SEQ ID NO: 6271 - RNA, 72 nt, Human
ucaccaccacagagagccagcaaggccuucaggaagucuccggaggugucacccucaauggcuugguggaga

SEQ ID NO: 6272 - RNA, 76 nt, Human
ucaccagcuuccuggagcugcacugccuugagagccccacagagcugucucagagcagcgacagugaggccgguga

SEQ ID NO: 6273 - RNA, 114 nt, Human
ucaccauguuggccaggauggucucgaucucuugaccuuguguuccacccgccuuggccucccaaagugcuggaauuacaggcaugagccaccgcgccuggccuguauauguga

SEQ ID NO: 6274 - RNA, 124 nt, Human
ucacccagugguucucucagcaacagacauguccaguggaccguaguguugugacggucgcccaucugcgcccaguaccucggaucaugcggaacauguugucaaagcugcagauugccuguga

SEQ ID NO: 6275 - RNA, 73 nt, Human
ucacccgcuuugugaaauggccccgcuauaucagguugcagcggcagagagccauuccucuauaagcggguga

SEQ ID NO: 6276 - RNA, 64 nt, Human
ucacccugucgcacuucaccguggggauaacggggucuaccauggucuagaagugcacugguga

SEQ ID NO: 6277 - RNA, 81 nt, Human
ucaccucaacuggauucggaaugugcugauuuccauuggacucaaguugaucucacuuauauucugagugccgggagguga

SEQ ID NO: 6278 - RNA, 82 nt, Human
ucacgaggacggagggccauguguugggucagcaccaucagcuucauggcggcugaagagaugcauuggccugucccuauga

SEQ ID NO: 6279 - RNA, 70 nt, Human
ucacggaacaaugcuucaacacguuagaacgaucagaaauguugcuucuacuuuugaggcgcuucccuga

SEQ ID NO: 6280 - RNA, 104 nt, Human
ucacguccuaggagccgcauguucaugauugagaucgcaggcgugaagcuuuuguacacuggugauuucucaagacaagaacguuggcacuuaauuggagguga

SEQ ID NO: 6281 - RNA, 130 nt, Human
ucacgucucugcaaaguagcaagugguuauguucauaucauuuugaaagcugaguggauagauuuaaauagcaagagcuuuguucggaaugauguguggaacccagaaucacagacccugcgauacauga

SEQ ID NO: 6282 - RNA, 84 nt, Human
ucacuaaguucaucuguggggcuggaaggggaggguuggcagaaagucagccccacccaguccacgugguugcuauacauggga

SEQ ID NO: 6283 - RNA, 91 nt, Human
ucacuauaaagcgaugaaguccauaguacaauaguauaucugcuaauguaaaguuauacccuguaagguagacuuuaucuucaagauauga

SEQ ID NO: 6284 - RNA, 76 nt, Human
ucacucuguugcccaggcuggagugcaguggcacuaucuugacucacugcaaccuccaccuccuggguuccaguga

SEQ ID NO: 6285 - RNA, 71 nt, Human
ucacugcugcccacugcagggucccugaggugaaguaaacgccggcgcugggcuuggccagucggcaguga

SEQ ID NO: 6286 - RNA, 76 nt, Human
ucacugugucgcccagguuggagugcaguggcgcgaucuccaccuacugcaaccucugccucccggguucaaguga

SEQ ID NO: 6287 - RNA, 76 nt, Human
ucacuugagcccaggagaucgaggcuguaaugagcuaugauugggccacugcacccuagccugggcgauagaguga

SEQ ID NO: 6288 - RNA, 76 nt, Human
ucacuuuggugauaucaugggaagguguacuuccggugaugccuagaggucacguccugugaugucauuaggcuga

SEQ ID NO: 6289 - RNA, 113 nt, Human
ucagaagggguuuuuaucaaaaauauguagauucuacuacaauauuuuagcuaaagaagaagaaguaguaguagcaguaguagucaguauuuuugacccugacccaacucuga

SEQ ID NO: 6290 - RNA, 105 nt, Human
ucagaaggucacgcaacagaugcuguguuaggagcaugaggguagauauaugggccauuugugauguucaggauacggcugauuugauucuugguguccaucuga

SEQ ID NO: 6291 - RNA, 84 nt, Human
ucagacaucaguuucauagaacuauauaaauguaaaguagcacugcuaugacacaggauggguucuucagaggaagcuuuuugg

SEQ ID NO: 6292 - RNA, 76 nt, Human
ucagacuugcauuucaccaggcauucuuuagcugccugcggugcuaaagaauggguggcugggcugugugagauga

SEQ ID NO: 6293 - RNA, 87 nt, Human
ucagagacaccucucauuucuccucaaugccacugcacugaugucaacugacuuagggcaggcaugagagaacugagguuuacaugg

SEQ ID NO: 6294 - RNA, 62 nt, Human
ucagagucuccuaaagagcccgaacagcugaggaagcucuucauuggaggguugagcuuuga

SEQ ID NO: 6295 - RNA, 81 nt, Human
ucagcauuccuuacuaugugauaaaauacauauagaauauaagauauacuauauacauuuuguccauaaacguuaugcuga

SEQ ID NO: 6296 - RNA, 74 nt, Human
ucagccccagagagucgaugggggacacugacaaaccaaucacaaaguuaggugccauuagcucuuagggagga

SEQ ID NO: 6297 - RNA, 90 nt, Human
ucagccugcugaacaguuccuuuuucagagacauagauaccauccaaaaauuuccugauauccuuguuuuuaacuguuguggcuggcuga

SEQ ID NO: 6298 - RNA, 86 nt, Human
ucagcuaauguccucaaagacacacccaucagacacacugacugacucucuaaugugugugugagugugcgugagauaagaguuga

SEQ ID NO: 6299 - RNA, 118 nt, Human
ucagcugacauuguauagcuaagaaauaguaaagcagggauuugaacuccacaucugacccuacagccuguauucauaacaacucugcucugugucuuggcuccaaagucuucucuga

SEQ ID NO: 6300 - RNA, 84 nt, Human
ucagcuggugcagcuggaguuugucucaggcaaggcuccugacuuccuucuugccggcucaacuucuccgacucuaccagcuga

SEQ ID NO: 6301 - RNA, 85 nt, Human
ucaggaccccaagggggagcugcagggccagaaugugcugaccguccgguacucgcuggagcugacugcugcccgcuuggcuugg

SEQ ID NO: 6302 - RNA, 71 nt, Human
ucaggauguuguuugaucuucucaaacaucuaguucccugcuugaugggaggauccuaaugaaauaccuga

SEQ ID NO: 6303 - RNA, 70 nt, Human
ucaggccaucugggcguauacgugcaagucacagggaaugcgauggcuuggcuugggcucagaggccuga

SEQ ID NO: 6304 - RNA, 99 nt, Human
ucagggaagugaaggaaguccagucuggugagaguguuaagucugagagaaagacuagauagaacgaggcucggaggucuccuaauuuucauccccuga

SEQ ID NO: 6305 - RNA, 72 nt, Human
ucaggugucacauuccaagcagauuggcccucaucccucagaauguggaucugccgaauugaagaggccuga

SEQ ID NO: 6306 - RNA, 72 nt, Human
ucaggugucacauuccaagcggauuggcccucauccuucagaauguggaucugccgaauugaagaggccuga

SEQ ID NO: 6307 - RNA, 63 nt, Human
ucagguugagagugagcugcugugagccagugacaacuacugcuacaacuugcuguuacuuga

SEQ ID NO: 6308 - RNA, 86 nt, Human
ucagucugccugcgggcucuguuggcaucccuugcccugacacugggcaccuuguggccccuagcaggcccaccuuggcacaccga

SEQ ID NO: 6309 - RNA, 80 nt, Human
ucagucuuugaccaacugggaucauacagagggacaaaagcuccucuagaggauuauacagaugaugauuuaagcacuga

SEQ ID NO: 6310 - RNA, 79 nt, Human
ucagugcgggaaccaaugcagacuggcauuaagcuguggauagcuuggugccaauuggucguggucagccgugaacuga

SEQ ID NO: 6311 - RNA, 74 nt, Human
ucaguggcuacgggaugaacuggccaacacgcagcagaaacugcagaagagugagcagucuguggcucaacugg

SEQ ID NO: 6312 - RNA, 113 nt, Human
ucagugugcaucagauugacugggaucuuguuagaaugcagauucugcagaucuaggguggggccagcuuuucugcauuuuuaacaagcuccagaugauaaugaugcuucugg

SEQ ID NO: 6313 - RNA, 72 nt, Human
ucaguuauucaggaguuucuguauggggcacaaauuagcucuucuuagcagcagacuaaucugaagaaauga

SEQ ID NO: 6314 - RNA, 82 nt, Human
ucaguuucuggccccgauaugaguagggggagcgcagaguacggugaccccaacugcuuuuuguccuggguugguacauugg

SEQ ID NO: 6315 - RNA, 104 nt, Human
ucauaguggcaaugaaugacgagcauugagccaucaugaggugccaggcacugcuucggaaaccaaaggaccaugcugaagagcucugucguucuccacucuga

SEQ ID NO: 6316 - RNA, 76 nt, Human
ucauaucagugaauauuugcuaagaacaggaaagagaagucuuccuuucaaauagcuuauuguucauugggaauga

SEQ ID NO: 6317 - RNA, 64 nt, Human
ucaucccgucguccuguuccucaugauguugggagcgcugacacggggggcaggguggggguga

SEQ ID NO: 6318 - RNA, 72 nt, Human
ucaucgguggcggagucuuccaggccaucaaggguuuccgcaaugccccuguuggaauucggcaccgguuga

SEQ ID NO: 6319 - RNA, 123 nt, Human
ucaucuauccccuaggccagauuaucuuaucagcuacugacccaguuagcuuuccuacuucacaacagguuucuaaugcuuuaugucagugugagagaaauggcaaguugggaaaauuuguga

SEQ ID NO: 6320 - RNA, 71 nt, Human
ucaucucaucagcgacaggucucccucccagaaccccaucaggacaggagaaaaggcagcaagagaggugg

SEQ ID NO: 6321 - RNA, 76 nt, Human
ucaucuguuaaucccagguguccucauguugcugaaauauuuagauagcuaaaauaucccuuaauuucacagauga

SEQ ID NO: 6322 - RNA, 73 nt, Human
ucaucuuuguccuuaaauuaaccuuugcucuugagagcaaaagagggaaagacaggggaacaucaaagcauga

SEQ ID NO: 6323 - RNA, 73 nt, Human
ucaugaccacaguccaugccaucacugccacccagaagacuguggauggccccuccgggaaacuguggcguga

SEQ ID NO: 6324 - RNA, 64 nt, Human
ucaugauaucaagugccucauuaaauuuguccuugacagauggaugugccagcacuuggucuga

SEQ ID NO: 6325 - RNA, 84 nt, Human
ucaugccucgcagguauucgaguugcagguuugccugacugguccggugagccugaagaguguucgcguugugcguaggcaaga

SEQ ID NO: 6326 - RNA, 91 nt, Human
ucaugcgagaccuggcugcuguagcugcugcgggacuaccacugauaggucgucaggcucagguagcugcuggccgcguacuuguugguga

SEQ ID NO: 6327 - RNA, 74 nt, Human
ucauggagauacaauaacaccacuuaucagugaaucucaauucaagauguuauggaggaauagauuugcuuuga

SEQ ID NO: 6328 - RNA, 90 nt, Human
ucauggucucagcgaauagcggcccuuagggcuggccccuuacaugugugagugcccagggcugaggguggcuggccaccugaguccuga

SEQ ID NO: 6329 - RNA, 84 nt, Human
ucauguacaagaguucacaccugaugaauguagacacauuccuagagaacauuuaucaaugugaaaauuucuuuaauacacuga

SEQ ID NO: 6330 - RNA, 74 nt, Human
ucaugugauagugcaacaguuuggcuuugcggaaaaauuuuaaacaguccacaacuuugcaucuaaacuuaugg

SEQ ID NO: 6331 - RNA, 94 nt, Human
ucauguguuuugcacugacuaguacugaauaauacaaccacucuuauuuaauguuaguauuauuuauuugacaacucagugucuaacagcuuga

SEQ ID NO: 6332 - RNA, 71 nt, Human
ucauguuaauacauuagcauucuagccgcauggugucugcuggcacuuucugagaugauugauugacauga

SEQ ID NO: 6333 - RNA, 65 nt, Human
ucauguuccccgugacaggugggccugaggggucggcgugaccccuccccagcaugguagcauga

SEQ ID NO: 6334 - RNA, 84 nt, Human
ucauuccucuuaaucuucacuaaaauggacaaguauucauugagcaccuaaugcguguucaguauggugggagaugagggauga

SEQ ID NO: 6335 - RNA, 100 nt, Human
ucauugcugcaaggaacuuccaugccucuaacacucaucuucaaaagacugggacugcugagauguccucuauucuugaagagcguauucuuggagcuga

SEQ ID NO: 6336 - RNA, 76 nt, Human
ucauuggguauguguaucugcguguguguguguguauguguauguauauacauacauauauauacauauguaauga

SEQ ID NO: 6337 - RNA, 72 nt, Human
uccaaauauguuauauuaaaaccuuguuccuuggcaauuucacuaagcagcuggauguaaucuguauuugga

SEQ ID NO: 6338 - RNA, 93 nt, Human
uccaaggcccuggugagaagauguugcuuugggagucccaguuguguaagacuccugacucucuuguaaaggagcaagguuuuuaggcuugga

SEQ ID NO: 6339 - RNA, 101 nt, Human
uccacaguuugaucucuucucuguucccuccacacucuucuuuugcuccucuuccuguauuucagagugguuaagaucauggaagucagacaagcuauggg

SEQ ID NO: 6340 - RNA, 89 nt, Human
uccacgccgucauucucuucaucuguauaaacuguggcugguucacuuuaacccugagcaggagcugccuaugaaagaggauggcugga

SEQ ID NO: 6341 - RNA, 71 nt, Human
uccagaaggaccucaucucugcaccucuuacuugaggagcaagaggagggaagggagaaagggauguagga

SEQ ID NO: 6342 - RNA, 88 nt, Human
uccagacacuuucuuccuucaguucagggaacccucaauacacaguaagaaugaagagguugcaggucugagcuugaggaggacugga

SEQ ID NO: 6343 - RNA, 76 nt, Human
uccagagacuuuggagacuuuucguuuuuuagauuucucauuuuaaaacacacauaauacaaguuuucuuucugga

SEQ ID NO: 6344 - RNA, 127 nt, Human
uccagcagccuucuuguccacugcuuugaugacacccaccgcaacugucugucucauaucacgaacagcaaagcgacccaaagguggauagucugagaagcucucaacacacaugggcuugccagga

SEQ ID NO: 6345 - RNA, 73 nt, Human
uccagcuauguaaccugcuacaaauguuacaaccagcugcucuggcuuugaacauucacugcggggcuuagga

SEQ ID NO: 6346 - RNA, 76 nt, Human
uccaggaccucaaugaccgcuucgccagcuucaucgagcgcgugcacgagcuggagcagcagaacaagguccugga

SEQ ID NO: 6347 - RNA, 88 nt, Human
uccaggccgugcgcacccaggagaaggagcagaucaagacccucaacaacaaguuugccuccuucauagacaagguacgguuccugga

SEQ ID NO: 6348 - RNA, 70 nt, Human
uccaggguuaguuuuuguagccucggcuggcccgucggccucuggcacgcucgaacuuccggcccuugga

SEQ ID NO: 6349 - RNA, 75 nt, Human
uccaguccauggcaggcggguacaaggggagguaagaugggagcuccacuccuuggaccaccagcugguucugga

SEQ ID NO: 6350 - RNA, 70 nt, Human
uccaguggaugucucuuuucagugcacuggguggucaaugcccacucgcucugaaaucaucugacuguga

SEQ ID NO: 6351 - RNA, 86 nt, Human
uccaguugcuauggcaacaggccauucugggccagccacgucucugcauggcagugcccaaugguggaguugcuaugggcaacgga

SEQ ID NO: 6352 - RNA, 73 nt, Human
uccauaaucugcuaguuuugcauguacuuauaugaacaacagugcaguaaguugaaaacucaguaucuaugga

SEQ ID NO: 6353 - RNA, 90 nt, Human
uccauagaagucucucagcaaaugcucuuuuuuugaaaugcuuuaaauguauacuuugagacggagguuugagcugaguacugcugugga

SEQ ID NO: 6354 - RNA, 70 nt, Human
uccaucccgggugugcagggcauucuagcuucaagagggagucaguugcacugugccuggaaauagugga

SEQ ID NO: 6355 - RNA, 65 nt, Human
uccaucgggcagccagaggccagcgucuccgaugacacugagcaccuggugaauggccggaugga

SEQ ID NO: 6356 - RNA, 66 nt, Human
uccaucgggcagccagaggcccagcgucuccgaugacacugagcaccuggugaauggccggaugga

SEQ ID NO: 6357 - RNA, 80 nt, Human
uccaugcguauaucggacguggucucauacgcguugcugcagugcuguugcacgcggacaugaccaugcacgacguagga

SEQ ID NO: 6358 - RNA, 88 nt, Human
uccaugugacugucggcgggcuuugucucuggauucgauggcucugcgggcacagccaucaucacagaagagcaugcagccaugugga

SEQ ID NO: 6359 - RNA, 74 nt, Human
uccauucuuaaaaucaagcacaaaaucugacaaugaaacauauccagggguuguguguccccaucugaucugga

SEQ ID NO: 6360 - RNA, 70 nt, Human
ucccaaccuccccuuccuguggcugccccagagccugugagggaugcugcaguacaggggagcauaggga

SEQ ID NO: 6361 - RNA, 66 nt, Human
ucccaagaguucugcugcaucagccagugaggacaagaguucuucagugcgguucagcucaaggga

SEQ ID NO: 6362 - RNA, 63 nt, Human
ucccaauggcauuucagaagugagcaguggaauuuuccugccauccuaauaagagcccuggga

SEQ ID NO: 6363 - RNA, 75 nt, Human
ucccacagucgggaggaaaagaaagaagacucuguuguucauuguuuuuaucuuuuucuccagaugccuguggga

SEQ ID NO: 6364 - RNA, 65 nt, Human
ucccaccccaggaagcuacaagagacaggcuguccuguccccacaacucucccuggguccuggga

SEQ ID NO: 6365 - RNA, 77 nt, Human
ucccacguuuguuccagaggaauuuaacuuucuguauuuuuccaacauuaaaauccacaucaauagcacacguguga

SEQ ID NO: 6366 - RNA, 71 nt, Human
ucccacugaacuuuuucuccaauucgcguacuagccggacuuggauuuucuggaaagauuucaguugagga

SEQ ID NO: 6367 - RNA, 96 nt, Human
ucccagauucuuccugguggaggcauucggagagcaacacccuggccuuaacacacuacauaucuuugaauuucacacgggggcagccuucuggga

SEQ ID NO: 6368 - RNA, 73 nt, Human
ucccagcucacucagcuggagcugaaggggaacugcuuggaccgccugccagcccagcugggccagugucgga

SEQ ID NO: 6369 - RNA, 73 nt, Human
ucccaguugcuacccugcauagcggccuccuucccaggcucugguggcagcgcauggagggguagugcuggga

SEQ ID NO: 6370 - RNA, 70 nt, Human
ucccccgaccuaugggcauaccuuuaagaauuagaaaagucuuuuccgugguagaucaaacgcgagggga

SEQ ID NO: 6371 - RNA, 80 nt, Human
uccccgacagguguccucucccggaaucggggucugaaccccgccaagcucugcaggggaggaagcaccugggucgggga

SEQ ID NO: 6372 - RNA, 106 nt, Human
uccccuaggccagauuaucuuaucagcuacugacccaguuagcuuuccuacuucacaacagguuucuaaugcuuuaugucagugugagagaaauggcaaguuggga

SEQ ID NO: 6373 - RNA, 66 nt, Human
uccccugguuucuugucgucugugcuugauucuugaacagguaaccacuugagaggaugccggcga

SEQ ID NO: 6374 - RNA, 61 nt, Human
ucccgaguuagcgugggauacacgggugcacgcaccccccacgcccagcuuaauuugcgga

SEQ ID NO: 6375 - RNA, 110 nt, Human
ucccggaguuuauggucuggugagaagaucccugcucugagucacugccaagcucuagcuaugugacuuugaacagggaauuucugucccuaucuauaaaauaaacgggg

SEQ ID NO: 6376 - RNA, 70 nt, Human
ucccggaugaagaggugagcuccccuucgcccccucagcgagcccagcguggggaccacucuucccggga

SEQ ID NO: 6377 - RNA, 64 nt, Human
ucccguggaggcucgcgccgacggcggcggggacgagacugccgagcggacggaggcuccggga

SEQ ID NO: 6378 - RNA, 81 nt, Human
ucccuacaguugugccaugcauuuaagcgagugguauugcaggaaguccauucuggcucugguggauggacagccuuggga

SEQ ID NO: 6379 - RNA, 78 nt, Human
ucccucucccaccugucugcauagaaaggcagaauuagacauagcaugcuuuggaaaagcaaauaggaauuguuggga

SEQ ID NO: 6380 - RNA, 111 nt, Human
ucccucugcuagugaguacaaaugaagucugugggccaacaaggagcgaggagcaguuuccuggaagcccugggcugguguuugacuugcuuugagauagaauaaauggga

SEQ ID NO: 6381 - RNA, 63 nt, Human
ucccucugcuggaccugaaugguacugaugcuguugagagccaucugguccucagacauggga

SEQ ID NO: 6382 - RNA, 73 nt, Human
ucccucuugcgcuguaugacaucguccucaaaccacucggccugauuggaaacccagaacauagccacaggga

SEQ ID NO: 6383 - RNA, 94 nt, Human
ucccugaccacaccuuuacucagaagucuaaggaacagacuguuuaaccuguuuccagugguuucagggacuucuguauuggguguagcaagga

SEQ ID NO: 6384 - RNA, 105 nt, Human
ucccugcagggcagagcucccggcuuuggugcguccuucccagcgcgcuccauggucugggaugggcgguggcggcccgggccggccugcuacuugaggcaggga

SEQ ID NO: 6385 - RNA, 70 nt, Human
ucccuggagguucuggaugaaggcugaacacaggcuuguuaaugucagucugugcugaggaccucaggga

SEQ ID NO: 6386 - RNA, 73 nt, Human
ucccuucagagcccauggguuucccauucccuccugucagcccuggccaugaaauccuggggaucuggaggga

SEQ ID NO: 6387 - RNA, 71 nt, Human
ucccuuguggaugcaaugaauggaaaggaagguguuguggaauguuccuucguuaagucacaggaaacgga

SEQ ID NO: 6388 - RNA, 94 nt, Human
ucccuuuuauuaaccaucuucccuuucucgaguauacacaaguagaaaagaaacagugaaguaccccgauagggaggguggggagaggauggga

SEQ ID NO: 6389 - RNA, 63 nt, Human
uccgaguucccaaacaaaacacagguaccuaagggcuucaucuguaggccuugggaacuugga

SEQ ID NO: 6390 - RNA, 71 nt, Human
uccgauucuucucaaagugcacuguguuaagccuaguguaagguagcauaauagaaaaguggagaauucga

SEQ ID NO: 6391 - RNA, 76 nt, Human
uccgcagugugagaaguagauaggguuacugguuacgucaguaaaaccgaggcucaguuuaaucuugagaugcggg

SEQ ID NO: 6392 - RNA, 87 nt, Human
uccgccggucccaguccaggucucgcuggcgcuuuucuuccuggagccucagcuucuccuggauuugcugcuucuggacuaggcgga

SEQ ID NO: 6393 - RNA, 64 nt, Human
uccgcuccagacuuuagucacuagguucuaggagugagcuggggccugcugagguggggguggg

SEQ ID NO: 6394 - RNA, 81 nt, Human
uccggaaccugugcucagaugacacccccauggugcggcgggccgcagccuccaagcugggggaguuugccaggugcugga

SEQ ID NO: 6395 - RNA, 65 nt, Human
uccggaugucuauaagacuuuguaucuuccuuuauuuguugguugguaugaauuuugcagccgga

SEQ ID NO: 6396 - RNA, 85 nt, Human
uccuaaauacuccaucuguuuaguacuguauuguggaauauuugaguucuauuuccauacuugaaaacauggaggauuuuagaga

SEQ ID NO: 6397 - RNA, 98 nt, Human
uccuagaaccugaacauuuggcuuggcaggugcgaaacguaucuagaagcuuuacuggagccagcacucgacgcaaaauguccuuuaggucccuagga

SEQ ID NO: 6398 - RNA, 73 nt, Human
uccuaguggugcgggcacacacacccugcacgccacacaccaccuacaggguggccgugagccgcacccagga

SEQ ID NO: 6399 - RNA, 71 nt, Human
uccuauggaagcugguagcaguauuaucuuguuuauggauaaaaauugcugcgaaaagagcuuuccaggga

SEQ ID NO: 6400 - RNA, 85 nt, Human
uccucaaauacuacacauuuaaaggaacuguuaaacugaaaaagacuugacaauuuuugguaaauccguagcacagaaaugagga

SEQ ID NO: 6401 - RNA, 81 nt, Human
uccucaucggcaaggggggcggaaaauucgcaaggugcgcgacagcacuggagccacgugucaucuucccugcggugagga

SEQ ID NO: 6402 - RNA, 74 nt, Human
uccuccaaggaagugauaauaguggcaacauuuaaaagauaaaaugggaguuauuaggagaugauuggugagga

SEQ ID NO: 6403 - RNA, 85 nt, Human
uccuccgaaccagcauccccaccaucaacauggagaacaagaccacgugguucucuguggacauugacucggagcugguggagga

SEQ ID NO: 6404 - RNA, 72 nt, Human
uccuccgcagaagguuggugggggguccagucugugauccuuggugcugugugccccacuccaaccugggga

SEQ ID NO: 6405 - RNA, 71 nt, Human
uccucuucacucugcucucaggagaucuggcugugaggcccucaggccagggauacaaagcggggagaggg

SEQ ID NO: 6406 - RNA, 74 nt, Human
uccucuuccagcucagcuucucuacucugggcaagguaagcagggggcugaaagguauagagaugggaagggga

SEQ ID NO: 6407 - RNA, 69 nt, Human
uccugaacgcagccugcugaggucgacuugagaaaguucagggccuggagagaaggcugugaggcagga

SEQ ID NO: 6408 - RNA, 87 nt, Human
uccugcgaguuccccuaaguucuuagaggacugcuuugccuuuugaucugagaguugcaaaguucccuaaagaauggcccuugugga

SEQ ID NO: 6409 - RNA, 94 nt, Human
uccugcgucuggaccuggcuggccgggacugaccgacuaccucaugaagauccucacugagcgagguacaguucaccaccacggccgagcggga

SEQ ID NO: 6410 - RNA, 79 nt, Human
uccugcuacaacaccucccuuugcauuucguugagcauacugugcaacaacucgagacaacagagaccaaagagcaggg

SEQ ID NO: 6411 - RNA, 79 nt, Human
uccuggaagauggcuuuggcguacugaugcaagaggcggcucauguaccagugcugccacgggagcagcccuuccagga

SEQ ID NO: 6412 - RNA, 87 nt, Human
uccuggacagauuuccacccgacagcuucgugcacaugugucaggaccugcgugugcucaaugcuguucgggacuaucacaucggga

SEQ ID NO: 6413 - RNA, 91 nt, Human
uccuggaucuggcugacaacgcggaucgugacaacaagaagacgcucauuauucaucgucaccuccagcuagucauccguaacgaccagga

SEQ ID NO: 6414 - RNA, 75 nt, Human
uccuggcuccagguggacagagcauggggauggaggcagaacguucucagacagcaguggccuccugggccggga

SEQ ID NO: 6415 - RNA, 74 nt, Human
uccuguacgauuggggauauaacgggcuucacuaacuuucccuaggcauugaaacuucccccaaaucugaugga

SEQ ID NO: 6416 - RNA, 72 nt, Human
uccuguggccuucaauugucuucagagguggaugagaaaaagacaccauuugugaggggguguggcacggga

SEQ ID NO: 6417 - RNA, 61 nt, Human
uccugugguuuguugguuucugcuuccucaccaaccagugggcagucaccaacccgaagga

SEQ ID NO: 6418 - RNA, 82 nt, Human
uccuguuuuauuggcuguuuagcaagaccuucuuagggcaagugcugcugaagagguauuuaaauauuuuguauuggcagga

SEQ ID NO: 6419 - RNA, 80 nt, Human
uccuuaaccuaguccaacccuuuuauuuuacaguuagggaaaccuaagcugagagaggagauggaaaccugguuguagga

SEQ ID NO: 6420 - RNA, 92 nt, Human
uccuuccucuuccagcucagcuucucuacucugggcaagguaagcagggggcugaaagguauagagaugggaaggggaaagcaaguuguggg

SEQ ID NO: 6421 - RNA, 72 nt, Human
uccuucuguaaauacccguuaccauauuuauccauuuguaauuaaauuaugguauuaacuugcuacagagga

SEQ ID NO: 6422 - RNA, 84 nt, Human
uccuugaacuuggaaccugacaauguugguguugucguguuggaaaugauaaacuaauuaaggaaggagauauagugaagagga

SEQ ID NO: 6423 - RNA, 75 nt, Human
uccuugugagaauuccgacugcacaacccugcacuucagcuguguguaaugaaaaggguugggaugaaucaggga

SEQ ID NO: 6424 - RNA, 65 nt, Human
uccuugugggagcagcuauggcaaguccaccuccuugcauugucauaggucacauuccacaagga

SEQ ID NO: 6425 - RNA, 68 nt, Human
uccuuguuuacuuggagaagaccugugacuggcuuccgaaaccugaacaugucugcuucaugcaagga

SEQ ID NO: 6426 - RNA, 78 nt, Human
uccuuugcccagcuuaacggguccaaagucuacuuuaaaugcaggcuucaaaaauguuaggauuggggggcaacagga

SEQ ID NO: 6427 - RNA, 65 nt, Human
ucgacggagacucuccuaaccccuaugguguucuuacacauggagguuagggagagcccuggaga

SEQ ID NO: 6428 - RNA, 81 nt, Human
ucgagauggcauccuccuugccacaggucuucacgugcaccgcaacucagcccauucagcaggaguaggagccaucuuuga

SEQ ID NO: 6429 - RNA, 88 nt, Human
ucgagugcuggaaggaugaaggauuccugcaucacugugauggccauggcgcugcugucuggguucuuuuucuucgcgccggccucga

SEQ ID NO: 6430 - RNA, 90 nt, Human
ucgcagucagacguuuggcaacagcaguggaagaggcaacuggugcuuuucagcuaggccuugaaaaauugcuucagagguugauuucga

SEQ ID NO: 6431 - RNA, 74 nt, Human
ucgccaaugauucucuuauaugcaacugucucauagucacuccaagauagucucagaauagagguucuugguga

SEQ ID NO: 6432 - RNA, 88 nt, Human
ucgcccgucccuuaccuacauuguuccaacaugccagaggcuguuaaccuuggagaccugcugcggauauggguacggcccggcgcga

SEQ ID NO: 6433 - RNA, 69 nt, Human
ucgcgcgggggguaauucggggucuggguucuggugccgcgcagcuuuccccgauggcccacugcguga

SEQ ID NO: 6434 - RNA, 77 nt, Human
ucgcggagaugucagugccugauggaguggccggggcgggugccuucacgucagcuccagaaucacugucagggcga

SEQ ID NO: 6435 - RNA, 80 nt, Human
ucgcgugcgggauguuuugugagggcaaggcccggcaugguugcugcgguaucccaaucacagacacaggccggaugggg

SEQ ID NO: 6436 - RNA, 73 nt, Human
ucgcuguagggcaggcugaagggguagaggggucuguaacgugaguccugccagagcagcuuguccuccagga

SEQ ID NO: 6437 - RNA, 82 nt, Human
ucgcuguggggcggcacgugcuccggcaugggcacguugcucaucagcaaggugcgugaggaguaugccgaccgcaucauga

SEQ ID NO: 6438 - RNA, 76 nt, Human
ucgcuugaacccgggaggcagagguaguagugagcugaagucccgccacugcacuccagccugggcaacagagcga

SEQ ID NO: 6439 - RNA, 77 nt, Human
ucgcuugaacccuggagguggagguugcagugagcugagaucguagccacugcacuccagucugggugacagaguga

SEQ ID NO: 6440 - RNA, 76 nt, Human
ucgcuugaacgcaggagguggagauugcagugagcugaggucaugccacugcacucuggccugccugacagagcga

SEQ ID NO: 6441 - RNA, 78 nt, Human
ucggaagcacaucaugggccagaauguugcagaauacaugcgcuacuuaauggaagaagaugaagaugcuuacaaaga

SEQ ID NO: 6442 - RNA, 79 nt, Human
ucggagaccccaccaaguuugccacauuuguuuucaacgucuuugaugaaaacaaggacgggcgaauugaguucuccga

SEQ ID NO: 6443 - RNA, 90 nt, Human
ucggauauauaucaauucuacagaguuuagauuauauauagguauuacaggugauaugauaugauagauuuuuguauugauguauuacga

SEQ ID NO: 6444 - RNA, 78 nt, Human
ucggcaggucugcagugggaaccuguggagacaaaagugacuucuucuuggaugccacuccccuguguugacuuucga

SEQ ID NO: 6445 - RNA, 80 nt, Human
ucggccaugacuguguaugcucuggugguggugucuuacuuccucaucaccggaggaauaauuuaugauguuauuguuga

SEQ ID NO: 6446 - RNA, 64 nt, Human
ucggcuccaagucugacccacucugcguccuuuuacaggaugugggagggggcagcugggcuga

SEQ ID NO: 6447 - RNA, 70 nt, Human
ucgggauucuccuguaccucuuaucagauuuauucuuucuugcaacaaagggguagaggcuggaugccga

SEQ ID NO: 6448 - RNA, 64 nt, Human
ucguaggccuucucgaugcacccagcgaucucaucccugauagugucgagcaggaugucaauga

SEQ ID NO: 6449 - RNA, 86 nt, Human
ucguucuuaaaugugcauagauuuuuuuaaguaaacauguucccuacauacuuuagcuuacuaacuuccacaaacagcagaacuga

SEQ ID NO: 6450 - RNA, 64 nt, Human
ucguuuuggaucacuuuggacccagcggugauggugaacuugaagugcuucccauucugaacga

SEQ ID NO: 6451 - RNA, 86 nt, Human
ucuaaggaagaaauggguugagaagcaauuggugagguccuuaggggaucugaggugcccgucagcuugcuuguuucuucuuugga

SEQ ID NO: 6452 - RNA, 113 nt, Human
ucuauaugagacuaacuaagguauuugccccuuggagcuuuuauagucuuuaaaaugagauaaugucugugaaaugcuuuuaggacacugccuggcauaaacacucaugaaga

SEQ ID NO: 6453 - RNA, 100 nt, Human
ucuauccaacuacgcguaguccacaagucgcagcuucgaacucuccaauauagagagcuaucgaauucuggaccugagcucagccauaguucuacauaga

SEQ ID NO: 6454 - RNA, 103 nt, Human
ucucacucuccuacuagacuuuucauugaaaaguuaggcaggaaaaaggaaaggaaucccaauuugcugccagcucugaugagagaucagguggggggagaga

SEQ ID NO: 6455 - RNA, 66 nt, Human
ucucccaaaguguugggauuacaggugugaggcacugcaccuggccuaauccacaaacugucuaga

SEQ ID NO: 6456 - RNA, 71 nt, Human
ucucccaggcaauauuccaggauaggcugccaguuggacuaaggaagccacuccugcggaacccugggaga

SEQ ID NO: 6457 - RNA, 112 nt, Human
ucuccccagcaugauucauaccuguaaucuuacccauucuugauuuagaugagauuuggauuucgaguugaugcuagaauggguuaauacuuuugaggauguuggguuggga

SEQ ID NO: 6458 - RNA, 70 nt, Human
ucuccccgcaguccuacccagccuuuuaaccugcuaaaggagaggcugugguuuuagcaccuuggggaga

SEQ ID NO: 6459 - RNA, 63 nt, Human
ucucguucauccauucaugcgcgucacuaauuagaugacgaggcauuuggcuaccuuaagaga

SEQ ID NO: 6460 - RNA, 89 nt, Human
ucucuaacaaggugcagagcuuagcugauuggugaacagugauugguuuccgcuuuguucacaguggcuaaguucugcaccugaagaga

SEQ ID NO: 6461 - RNA, 85 nt, Human
ucucucucagguuuuaaauguugcaaauguaauuguggcucaucaaugcagcuaucaaugcaacuuuauauuccuugaggggaga

SEQ ID NO: 6462 - RNA, 71 nt, Human
ucucugguuucaauggguacgauuauuguaagcaggauccauucaauaaucggacccauuuaaaccggaga

SEQ ID NO: 6463 - RNA, 65 nt, Human
ucucuguccuucuacaggagguguuccgcuuugccuacuacaagcugcuucacgaaggcagauga

SEQ ID NO: 6464 - RNA, 76 nt, Human
ucucugucuaggggucacaaauugaaauggcuccuguaucacauacggaggucuuguguaucuguggcaacaggga

SEQ ID NO: 6465 - RNA, 86 nt, Human
ucucuuacacaggcugaccgauuucuccugguguucagagucuguuuuugucuagcaccauuugaaaucgguuaugauguaggggg

SEQ ID NO: 6466 - RNA, 83 nt, Human
ucucuugcaacgugugagcugccucuugccaagagugaguggcaaaagaaacuaaccccggagcaguucuacgucacaagaga

SEQ ID NO: 6467 - RNA, 104 nt, Human
ucucuugcccucugucauccuagcaguguggaugguugguugggaucuucgugucccgucucagcacacucgagcucugaagugacagugaggaagggcaggga

SEQ ID NO: 6468 - RNA, 104 nt, Human
ucucuuguaauugucauuugucuguuuuucaaauaacccaaggauuucuaucagugcauuugaaaggaaccuggggauagcuaucaaguggaaagagagagaga

SEQ ID NO: 6469 - RNA, 77 nt, Human
ucugaauuauccuggcugucuuuaguugcuaucgguccuggucuuggcuacuaacaucauccagccagguguucaga

SEQ ID NO: 6470 - RNA, 67 nt, Human
ucugagagaggcaggcucgcugcagaugggaacagggcuccucucacaguaugccugggcucuugga

SEQ ID NO: 6471 - RNA, 107 nt, Human
ucugagccuccuucuggccccuggaaggggacagcaucaccauggaauggugugucccguugccuguuggaucugucuccaucuucacucagacagaaggcuauaga

SEQ ID NO: 6472 - RNA, 80 nt, Human
ucugagucacuagaugaggaggaggaagaugaugaugauuuaugccuuuucuuuucuucuuucuuaacuuuagauuuggg

SEQ ID NO: 6473 - RNA, 89 nt, Human
ucugaugcacugcguguuuaaacacagaucaguccuuuuuucuggugcuacuguggaagaagauugucuuugggcaugcugacagcaga

SEQ ID NO: 6474 - RNA, 60 nt, Human
ucugaugcugucaguuugaccgagcugguuuugcuuauggucaugcugcaauuuguuaga

SEQ ID NO: 6475 - RNA, 87 nt, Human
ucugcaauggcugccaggcggaucacuccuccacuggagccaucccgcuccauggccaaagcgagagcauuggcagugaauugcaga

SEQ ID NO: 6476 - RNA, 112 nt, Human
ucugcaccgccagccucagcugucuuggagcagauguguauaguuagagauggggaccuuuucacuguaaauacugcucacauguuccuaggcugacuuuacuaugugcaga

SEQ ID NO: 6477 - RNA, 76 nt, Human
ucugcaccucccagccuggagaggagccugugacuugcccuguuccuuggcuccucaggcugggguaagguguggg

SEQ ID NO: 6478 - RNA, 98 nt, Human
ucugcccugcauguaccuggugguguuugucuguggucugguggggaacucucuggugcuggucauauccaucuucuaccauaaguugcagagccuga

SEQ ID NO: 6479 - RNA, 73 nt, Human
ucugccgcaugggccauucuuccucucuugcucuuagugauggcagcaguagguggcuacuugauguggcgga

SEQ ID NO: 6480 - RNA, 79 nt, Human
ucugccuccagugucaaucccaaaccccgaacaaccaucuuuguuuagugggcaagugagggaccacauugauuucaga

SEQ ID NO: 6481 - RNA, 63 nt, Human
ucugcgcaguccgcgcaaacaugcaggugcuugaagagcgagcggugcgugcggaagcgcagg

SEQ ID NO: 6482 - RNA, 72 nt, Human
ucugcggaggcugccgugacguaggguaugggccuaaauaggccauugugagucaugagcuuggucuguaga

SEQ ID NO: 6483 - RNA, 76 nt, Human
ucugcgggguccuggccgggcagggacagggcagaggacucugagcgccccacccaugccugccuggccugguaga

SEQ ID NO: 6484 - RNA, 110 nt, Human
ucugcucaugauuacugggccaauaccacugcaaugacugucagaacaauucuugugaaaguuguuuuuauaagccuuguaguuuguugaaguugagguucaagggcaga

SEQ ID NO: 6485 - RNA, 76 nt, Human
ucuggaguccuaaggcugguuggcgagaacuagcaggguccugcaaguuauagguuauucagcccaggauacuggg

SEQ ID NO: 6486 - RNA, 72 nt, Human
ucuggaguuugggaauccaggaucaagccugcgcauuucaguggcuggugagggcugcucuccgcuuccaga

SEQ ID NO: 6487 - RNA, 128 nt, Human
ucuggccugauuccuagaggugaccagaauuuaaugucagggccuaaauagucauugaguagauugcauuccuauuggugcccucgaagaccucacuugugcaccugugggaccccugccggggcaga

SEQ ID NO: 6488 - RNA, 87 nt, Human
ucugggauguggcggauuaugugauaccagcucaggaggaaaacucccucuucgucaugaccaacgugauccucaccaugaaccaga

SEQ ID NO: 6489 - RNA, 103 nt, Human
ucugguauaaugaucuaugaugccaacauuacucaaagcagguaccacuguuuacuuugguguagucaauggcagaccuuauaaaucaaauacaacaaccagg

SEQ ID NO: 6490 - RNA, 91 nt, Human
ucugucagccuuacuauauacugagcuacuccuuucccaccucccccugaacacugugacaagaggaagcuagguugaaaucacugauaga

SEQ ID NO: 6491 - RNA, 67 nt, Human
ucuguccgaaccgagauacgucuacucagagcgccgcugagucuguguaggcgugggaauggacagg

SEQ ID NO: 6492 - RNA, 79 nt, Human
ucugugugagacuucgugguggugcuaagaaaaggaacgaagaagucuuacaccacucccaagaagaauaagcacaaga

SEQ ID NO: 6493 - RNA, 83 nt, Human
ucuguguguggagacuucgugguggugcuaagaaaaggaagaagaagucuuacaccauucccaagaagaauaagcacaagaga

SEQ ID NO: 6494 - RNA, 96 nt, Human
ucuguuauaacaucucaacuuaccuguugccacuuggaauauauaucgauacauuauggugccgagugguaacaugggaguguuugauccaacaga

SEQ ID NO: 6495 - RNA, 76 nt, Human
ucuguuccugagagaaggcucaugguucugguggguaguuuuguaucugcugaugagccugauccucauaaacaga

SEQ ID NO: 6496 - RNA, 78 nt, Human
ucuguugcaggcugcggcccaggcacucaauccgcuaggcccuucugcgauguuuuaccuggcugcggcugugucaga

SEQ ID NO: 6497 - RNA, 75 nt, Human
ucuguuuacaguuagcuccugguauuauacagguaccaaaaugcuaccuggaauacuagugguucugugagauga

SEQ ID NO: 6498 - RNA, 78 nt, Human
ucuuaaaucaguuuguguacugacagccaaaaaugaauuccauuuuggugauuccaccucauggacugaguucuggga

SEQ ID NO: 6499 - RNA, 77 nt, Human
ucuuaagucacauggcuucugucuuggaaauuuuaccuuuaaaagauuauuuaagacaggaaccaggaggcuuggga

SEQ ID NO: 6500 - RNA, 73 nt, Human
ucuuacaugguaugcuaaggagucaguacuuuacucauaaggaggcaaaauuggcaaggcauacagaaaaaga

SEQ ID NO: 6501 - RNA, 68 nt, Human
ucuuaguauaguguuaggucagacacggcuaccaacgauuccaccuguccugacccauuucuauagga

SEQ ID NO: 6502 - RNA, 73 nt, Human
ucuuauaccccaaaagucauacagugucagaacaaaggcugggauggguaugauguacagugggaauguaaga

SEQ ID NO: 6503 - RNA, 98 nt, Human
ucuuaucaaaugcccuaaaauuauuaccacccaagagaaacaggaaaaagguuacauguuuuuguuuacugagaguaagaucaccugcaucuggaaga

SEQ ID NO: 6504 - RNA, 61 nt, Human
ucuucagucaagugauuucauuggcagcaaugggccaguaugagaacuugaaagcugcaga

SEQ ID NO: 6505 - RNA, 94 nt, Human
ucuuccgccguaucaggacgcugaaagggaaacuggccaggcagcacccagaggccuucagccauaucccagaggcauccuuccuggaggaaga

SEQ ID NO: 6506 - RNA, 94 nt, Human
ucuuccucuaauauugccuuuucuuguacaaggcagaccagguaucuuuuuaugcuguuuuuccuuuacuaagaaaaguauugcaucuugaaga

SEQ ID NO: 6507 - RNA, 80 nt, Human
ucuucgcggaccccaacgccaagcagcgagcccugagccgacagccggaugcugccgggcacuuggcgggccucgacgga

SEQ ID NO: 6508 - RNA, 83 nt, Human
ucuucucaugcugaacaguucuccauccacagccaaagacacucuagacaauggcgauuauggagaaccagacuaugacugga

SEQ ID NO: 6509 - RNA, 65 nt, Human
ucuucucuguaguggauguacuacagcucccaaauaaaugcuguagaugcaaauggcaaagaaga

SEQ ID NO: 6510 - RNA, 76 nt, Human
ucuugacacuacuagugucauuuaggagcuuagcucaaaguucagcuaaccuuugacacugcuagugcguucaaga

SEQ ID NO: 6511 - RNA, 70 nt, Human
ucuugcuagcucccauauggccaagagguggcaaaaauugggcuuuaugguggugcuggaguuggcaaga

SEQ ID NO: 6512 - RNA, 67 nt, Human
ucuuggcgcgcggcacugggagccgcgggccgagccugucaagccccgcagcagcagcgcgucagga

SEQ ID NO: 6513 - RNA, 63 nt, Human
ucuugggcagugcugguaguaggguguaugaauuaucuauugccaaaacaacacugcccgaga

SEQ ID NO: 6514 - RNA, 76 nt, Human
ucuugggcaugaauuuacugguuauguucaacacguaaaauaugcaaugacaugaauaauagcugccaugccaaga

SEQ ID NO: 6515 - RNA, 72 nt, Human
ucuuguggcuggguggaacugagucuuuuuuggugaaauguacacaguaguucuguucccccaguuacauga

SEQ ID NO: 6516 - RNA, 79 nt, Human
ucuugugugagacuucgugguggugcuaagaaaaggaagaagaagucuuacaccacucccaagaagaauaagcacaaga

SEQ ID NO: 6517 - RNA, 80 nt, Human
ucuuguguggagacuucgugguggugcuaagaaaaggaagaagaagucuuacaccacucccaagaagaauaagcacaaga

SEQ ID NO: 6518 - RNA, 80 nt, Human
ucuuguguugagacuucgggguggugcuaagaaaaggaagaagaagucuuacaccacucccaagaagaauaagcacaaga

SEQ ID NO: 6519 - RNA, 81 nt, Human
ucuuguguugagacuucgugguggugcuaagaaaaggaacgaagaagucuuacaccacucccaagaagaauaagcacaaga

SEQ ID NO: 6520 - RNA, 81 nt, Human
ucuuguguugagacuucgugguggugcuaagaaaaggaagaagaaagucuuacaccacucccaagaagaauaagcacaaga

SEQ ID NO: 6521 - RNA, 80 nt, Human
ucuuguguugagacuucgugguggugcuaagaaaaggaagaagaaaucuuacaccacucccaagaagaauaagcacaaga

SEQ ID NO: 6522 - RNA, 80 nt, Human
ucuuguguugagacuucgugguggugcuaagaaaaggaagaagaagucuuacaccacucccaagaagaauaagcacaaga

SEQ ID NO: 6523 - RNA, 80 nt, Human
ucuuguguugagacuucgugguggugcuaagaaaaggaagaagaagucuuacaccacucccaagaagaauaagcacauga

SEQ ID NO: 6524 - RNA, 81 nt, Human
ucuuguguugagacuucgugguggugcuaagaacaaggaagaagaagucuuacaccacucccaagaagaauaagcacaaga

SEQ ID NO: 6525 - RNA, 81 nt, Human
ucuuguguuugagacuucgugguggugcuaagaaaaggaagaagaagucuuacaccacucccaagaagaauaagcacaaga

SEQ ID NO: 6526 - RNA, 81 nt, Human
ucuuguuccuggccguggagaggggccuggggcacugguuccggcugugucugguggucuggcugcggggaaggggcaaga

SEQ ID NO: 6527 - RNA, 72 nt, Human
ucuuuauagcaguaugagaaugaacuaacacaguaaauugguacugcggagaguagaguauugcuauaaaga

SEQ ID NO: 6528 - RNA, 98 nt, Human
ucuuuccuggguuuugaauuugcaguaacaggugugagcauucuagcagcaguuugaugaucauguaugauacugcaaacaggaccuacguuuaaaga

SEQ ID NO: 6529 - RNA, 65 nt, Human
ucuuugagucucgacagaacgcuguucuauaugaagccaaacuaauugcuguggagauuuacaga

SEQ ID NO: 6530 - RNA, 63 nt, Human
ucuuugcuuuaaauaauacuacugggcugauuacaguucagagguccuuagauagagaggaga

SEQ ID NO: 6531 - RNA, 86 nt, Human
ucuuuucaguaauuucauccucuuuaucuaccuguucuauuuugcguuuuuuagaacagguuggaaguguggagucaccagaagga

SEQ ID NO: 6532 - RNA, 72 nt, Human
ucuuuuucggcgcuugcacucaggcauuuaacaacacuggacacggugcaaggugacagcagucgguuggga

SEQ ID NO: 6533 - RNA, 80 nt, Human
ucuuuuugggggaaaaccccgauaggguugugcacugguaaagaacaccugaaucuuaucucgguucucccuccaaagga

SEQ ID NO: 6534 - RNA, 71 nt, Human
ugaaaaaaaagcacacccuuuuaagacuacuuuaugaggcacuugugguuguagagagugaugcugcuuca

SEQ ID NO: 6535 - RNA, 71 nt, Human
ugaaauauauaugaugaaaagaauugagaaguucuaaauuaagacauuucaguuaagcucauaaaauuuca

SEQ ID NO: 6536 - RNA, 71 nt, Human
ugaaauuuuauuguguaaaguuuauagaaguaugacuaguauuccuuuguacaaaguacacaacgguuuua

SEQ ID NO: 6537 - RNA, 104 nt, Human
ugaacuuuuuuccuaguacccauucuagcuguaacacgaagggcuccgacuggugaucccaaagcccccucuaguucgaaaacugacuaguacggaagagucca

SEQ ID NO: 6538 - RNA, 70 nt, Human
ugaagacucucugccuccgccaaaauuuaauuaaaugcauugagaaucuggaggagcuacagagucuucg

SEQ ID NO: 6539 - RNA, 102 nt, Human
ugaagauauaccaaauguagcaguuuauccucauaaugggaaugauagacuuaaaauauuucccauauuauggggaaaaaacugcauguugggguaucuaca

SEQ ID NO: 6540 - RNA, 101 nt, Human
ugaagauccucacugagcgaggcuacagcuucaccaccacggccgagcgggaaaucgugcgcgacaucaggagaagcugugcuacgucgcccuggacuucg

SEQ ID NO: 6541 - RNA, 110 nt, Human
ugaauacacaacaaaggagguuuaccggaagaacuucuucaaugacuggcgaaaggaaauggcgguggaagaagagggaagucaucaagagccuggacaagugugauuca

SEQ ID NO: 6542 - RNA, 82 nt, Human
ugaauaccaacaauaucacugagcuagugacuauugggaaaugaacuaguuuugaugaagcuuagucugauaacugauuuca

SEQ ID NO: 6543 - RNA, 109 nt, Human
ugaaucacuguggaaaacaucaguaauucaacaaccuugcugcugaccucuuauucaguuaaaugagagcaaguguugaaacagcugguggugguucacaucaaaauca

SEQ ID NO: 6544 - RNA, 76 nt, Human
ugaaugccgugcagcacgcuguugugaaaauggaugcgguuaaaucucaaacagacggacucugcaaggcauugca

SEQ ID NO: 6545 - RNA, 91 nt, Human
ugaauggccgcucgccgagugcuguuugcaaacuuaggaacccccucgcgcggggccuagcggggguacguggcgcaugcgguaacacuca

SEQ ID NO: 6546 - RNA, 96 nt, Human
ugaaugucaauuuugaaauggagggagacagugaaguaauuauggaaagcaagcaaaauccagucucugucccaccauaaaaugaaaugacuauca

SEQ ID NO: 6547 - RNA, 62 nt, Human
ugacaaaauguguuucauggucaaaaaauggcagacaaugauugaagcucacguugauguca

SEQ ID NO: 6548 - RNA, 113 nt, Human
ugacacuuucuguaaacgccaucugugcuuuucucccauuuguacugcccuguauauccccguucagcauugccaguguuuccagccaccucuuaaagcauucugaaguuuca

SEQ ID NO: 6549 - RNA, 92 nt, Human
ugacaugaggaguuguauuauuauauaugugccgagauguaauacgauuucuucgcccuccauaucaugauauuacuuucugccuuacauca

SEQ ID NO: 6550 - RNA, 79 nt, Human
ugaccauccugcaggccccgagcccggcccccuccaccaucccugggaccccggcggggcuccgguccugagaucuuca

SEQ ID NO: 6551 - RNA, 72 nt, Human
ugacgcgcacgccccugcuauggacuaucggaguuugggauuucgggaaugccuggcagaaguugcgcguua

SEQ ID NO: 6552 - RNA, 90 nt, Human
ugacucccaugaagacguaccgugcggacgaguggaaggagaaauuuggccauuacaaagacacaggaauauguuaagaagugaggggca

SEQ ID NO: 6553 - RNA, 72 nt, Human
ugacuccugcugccaucucaaggacauuuuccuaaggacaguccugguguccugauggagugaaagggauca

SEQ ID NO: 6554 - RNA, 76 nt, Human
ugacugcagugcacaugauccggaaggucccugaacucuccagugucuuccucccacccugugcccaacugcuuca

SEQ ID NO: 6555 - RNA, 73 nt, Human
ugacuuuugguuuuugucuuuguuuuuaaucauggucccaaaggcagaaggcaguauuuuaucuacuaaguca

SEQ ID NO: 6556 - RNA, 61 nt, Human
ugacuuuuuacaagucugacacuugaagcuuuugggccucagggagcagcuugauaaguca

SEQ ID NO: 6557 - RNA, 87 nt, Human
ugagaaaguaagacugugggaggugacuguuacagaucggaaaacucugauugaaccauucacuuuauuagccaguaaacuuucuca

SEQ ID NO: 6558 - RNA, 81 nt, Human
ugagaaaugccaggcaaucaaugaggaugcucaguuuagcaucuccuauuugaguagauuuacaguuguguggaauucuua

SEQ ID NO: 6559 - RNA, 77 nt, Human
ugagaaggcaaacauguucagaagucaaguaacuggaaaaauaaaccuccuuggccugauagaaaugaucuuacuca

SEQ ID NO: 6560 - RNA, 107 nt, Human
ugagaagguagaccugugcccuaggaucaugucacauauacagauaaugccauuuccuugugugugugauguguguuuugaugaccuccacaggccuuacuguauca

SEQ ID NO: 6561 - RNA, 100 nt, Human
ugagacagaguuucacucguuucccaggcuggagugcagugguacgcacuuggcucacugcaaccucugccucccagguucaagugauucuccugccuca

SEQ ID NO: 6562 - RNA, 102 nt, Human
ugagacagaguuucgcucuugaccccgaggcuggagugcaguggccugaucuuggcucacugcaaccucugccucccggauucaagcgauucuccugccuca

SEQ ID NO: 6563 - RNA, 101 nt, Human
ugagacggagucucgcucugucacccaggcuggagugcaguggugcgaucuuggcucacugcaacuuccaccuccuguguucaagcaauuuuccugucuca

SEQ ID NO: 6564 - RNA, 65 nt, Human
ugagcaagaguauaaugcaacaguggccaggaugaagccacacugggccaucugcacucugcuca

SEQ ID NO: 6565 - RNA, 117 nt, Human
ugaggagcuguugggucguguaguugaugcccuugguaaugcuauugauggaaaggguccaauugguuccaagacgcguaggcgaguuggucugaaagcccccgguaucauuccucg

SEQ ID NO: 6566 - RNA, 73 nt, Human
ugaggauuccaaucugauacccaaagagauucucuggcgaccaaaagaagccuucagugauggaauaacuuca

SEQ ID NO: 6567 - RNA, 100 nt, Human
ugaggcaggagaaucacuugaaccugggaggcaagagguugcagugagcugagaucauaccacugcacucuggccuggguaacagagcgagacugucuca

SEQ ID NO: 6568 - RNA, 102 nt, Human
ugaggcaggagaaucgcuugaacccaggaggcgaagguugcagugagccgagaucaugccuuugcccuccagccugggcaacgugagugaaacuccaucuca

SEQ ID NO: 6569 - RNA, 63 nt, Human
ugaggcagucacagcuugaagugugacgcuuagugugucacugauguuggagcugggcucuca

SEQ ID NO: 6570 - RNA, 95 nt, Human
ugaggccugcucacugguagaacuucuuguuagggcuguuagcauggucagcuagcagcuggcauggggugaacuguuuuccauaggcagcuuca

SEQ ID NO: 6571 - RNA, 100 nt, Human
ugaggcgagagaaucgcuugaacugggaggcagaaguugcagugagccaagaucguaucauugcacuccagccugggccacagagcgagacucugucuca

SEQ ID NO: 6572 - RNA, 77 nt, Human
ugaggcuagcuucauccaggauaaacagcuccuucaacucgcccagagagaaguggcgcucuacauccugcuccuca

SEQ ID NO: 6573 - RNA, 92 nt, Human
ugaggcugaacucaagcagcuggugucucgacccgaugucguggagaugcacgaugugacagcgcaggacccaaagcucuugguucaccuca

SEQ ID NO: 6574 - RNA, 71 nt, Human
ugagggccugggacucgucuuuacacuuucagaaucccugugugugccugaaaaaauauccuuugugcuca

SEQ ID NO: 6575 - RNA, 79 nt, Human
ugaggggugaauucaugauccucgcuuacugacuuccugcgcucggggagucaggugcggggagcgguuaagcccuuca

SEQ ID NO: 6576 - RNA, 107 nt, Human
ugaggugggagaauugcuugaacccaggaggcggaggcagaggcugcagugacccaagauugugccacugcacuccacccugggcaacagagcaagaccccaucuca

SEQ ID NO: 6577 - RNA, 100 nt, Human
ugaggugggaggcucccuugagccaggaggucaaggcugcagugagcugugaucaugccacugcaguccagcccgggcgacagagugagaccccaucuca

SEQ ID NO: 6578 - RNA, 64 nt, Human
ugaguauaccugucuguaucgguucagaguucauggcgaaccugucaagugaagacacuacuca

SEQ ID NO: 6579 - RNA, 102 nt, Human
ugagucggaguaucgcucucguugccuaggcuggagugcaguggcgugaucucggcucacugcaaccuccaccucucggguucaagcaauucuccugccuca

SEQ ID NO: 6580 - RNA, 131 nt, Human
ugagugaaagguguuuaugagaagucgaugacuccggaucuuaucauccaagaggacagcacagaauaguuaauuuugucccuggagggacuaggaugcuggacgucuuuuucugauacccgaucauuacg

SEQ ID NO: 6581 - RNA, 75 nt, Human
ugaguggugucacaaagcacaggucauagacccugaggguugaggcuacugugaggaacugcuugacacgacuca

SEQ ID NO: 6582 - RNA, 95 nt, Human
ugagugugacggaugugacggggccugggcaccaggguacaguagaacuuuaggcugggacucuggggccugcucccagcuccacgucagauuca

SEQ ID NO: 6583 - RNA, 72 nt, Human
ugauaaaaauagugugagacuguccaucaucgaugcuuuguugaugggacguccucucauacugauguauca

SEQ ID NO: 6584 - RNA, 68 nt, Human
ugauagcaacucugcuuccuugccucaggacagguuuguggcaaggaagaaagcagaaguugcuuuca

SEQ ID NO: 6585 - RNA, 57 nt, Human
ugaucccugucuauucauauuugacuuaauuauuuaaauuuaauuugauagggguca

SEQ ID NO: 6586 - RNA, 76 nt, Human
ugauccuguucucuuccacucugccagcaguuccuuuuguacugcuucugguaguucauagaaaacuugaggauca

SEQ ID NO: 6587 - RNA, 108 nt, Human
ugauccuuaugaucuguguuauguugggccaaaggugauuacuuuauaaauuauaaagaucccuaaacucugcauugccuuuggucccaaacaagcaaaucuggguca

SEQ ID NO: 6588 - RNA, 86 nt, Human
ugaucugucuuuauaaaggagauggaagugaauucaagauauugagauguuagauuugacuggguuguccuuuggcuagaagauca

SEQ ID NO: 6589 - RNA, 73 nt, Human
ugaucuuacuggacauuuuaugguucaaguauucaacuagcuuauuagaauacucccuaaaugcaguagauua

SEQ ID NO: 6590 - RNA, 72 nt, Human
ugaugaguaaggaaggaugaaaggaaagggagugcugaguugcccuacuuucccuuucauucuuugucauca

SEQ ID NO: 6591 - RNA, 73 nt, Human
ugaugcacaaaaugggacugcugaagaguggacaguuggaccuuacuuuggugaccccauacauuugugguca

SEQ ID NO: 6592 - RNA, 72 nt, Human
ugaugucaguuccuuugcgcccugacugcaucaucaugcggcggcgaacggugucaaauggauaggaaguca

SEQ ID NO: 6593 - RNA, 65 nt, Human
ugaugucuuugaccugagguauagaguuguccucuaaaaucuuugcauaaggcauagggacauca

SEQ ID NO: 6594 - RNA, 71 nt, Human
ugauugccugccagaaaacugcacaugacuccaauguccugcacauugccagacuuccaaacaggcaguua

SEQ ID NO: 6595 - RNA, 61 nt, Human
ugauuggugccuguuuccucauugacuucauguuuuuugaaagcacuggcagccaggaaca

SEQ ID NO: 6596 - RNA, 86 nt, Human
ugauugugcaccacaggcguggacaaaaauagauaugcaagcaagcagcgauguggcacugaagaacaccugugagugggcgauca

SEQ ID NO: 6597 - RNA, 66 nt, Human
ugauuucuaggacucaagcagcaagccaggauucuagguguggcugcugugucaucuuugaaguca

SEQ ID NO: 6598 - RNA, 97 nt, Human
ugcaaagaugcuguccgugcgcguugcugcggccgugguccgcgcccuuccucggcgggccggacuggucuccagaaaugcuuggguucaucuuuca

SEQ ID NO: 6599 - RNA, 64 nt, Human
ugcaagagaauauuggcaauggagacuucucuguguacagugccagcacccacaaguucuugua

SEQ ID NO: 6600 - RNA, 75 nt, Human
ugcaagagggucagguauaugugugucuaauacaguggucuguacuuccauccacauauauguggcuuuguugua

SEQ ID NO: 6601 - RNA, 74 nt, Human
ugcaauauuuauccacaauucuagacauuuuccauuuuuguggaagaguugcuguuaccuuaauuauaaaugca

SEQ ID NO: 6602 - RNA, 71 nt, Human
ugcaauccuugguuccagaacccagcaauuccuaucaucacaauuguuucaagucuuauccaagcccugua

SEQ ID NO: 6603 - RNA, 82 nt, Human
ugcacuggcaccuagacauguacaacaggaaccguguggauacaucccccacaccuguuucuuggcaugucauguguaugca

SEQ ID NO: 6604 - RNA, 65 nt, Human
ugcacuguggcacgggcuuggccggggcugccuggcucugagcaggcucgugggacggcccugua

SEQ ID NO: 6605 - RNA, 92 nt, Human
ugcagaauagucaugucaggcugaauauagcagcacccagugagaagaucccuggccucaaugacucuuaacucaaccugaacucuucugua

SEQ ID NO: 6606 - RNA, 70 nt, Human
ugcagccggugguaucauguacucaagaccuggcuuggagauacacggcaggucugaugccccgguugua

SEQ ID NO: 6607 - RNA, 60 nt, Human
ugcagcuaugcucugaaugauuucauuccugagagugauagcauucugguccuggcugca

SEQ ID NO: 6608 - RNA, 83 nt, Human
ugcaggagucuuggagggucggaugcggcgccggaugaggaugaggcguggcggaagaugcguuuggcucugcagacacugca

SEQ ID NO: 6609 - RNA, 76 nt, Human
ugcaggggauggauaaacagggaaacacugugcauuccucacagccaacaguguaggucuuggugaagccccggcg

SEQ ID NO: 6610 - RNA, 73 nt, Human
ugcaguaugaugucuaucaguauuuucugccugagaaugaccucacugaggagauguugcugaagcaucugca

SEQ ID NO: 6611 - RNA, 73 nt, Human
ugcagugcucugggaacucauuacugggucaagacaagaugucaccuggugaugaaaucccaucauauacuca

SEQ ID NO: 6612 - RNA, 60 nt, Human
ugcaguggcgugaucucugaauugccaaagaauucagaaggcugauuauuaagcuacuca

SEQ ID NO: 6613 - RNA, 71 nt, Human
ugcaucuucaucuuggucaccacgccagagaggauccgaccucgaauggacacauuaccagugaaggggca

SEQ ID NO: 6614 - RNA, 71 nt, Human
ugcaucuucaucuuggucaccacgccagagaggauccgcccucgaauggacacauuaccagugaaggggca

SEQ ID NO: 6615 - RNA, 79 nt, Human
ugcaucuuucauaguucuguuaacuauuuuguacaucgcuucuuuuucaaaacuaguucuuaggaacagacucgaugca

SEQ ID NO: 6616 - RNA, 120 nt, Human
ugcaugauaugugguaaggccuuuagacuucauucacaccuuauucaacaucaaagaauucauacuggugagaaacccuaugaauguaaggaaugugggaaggccuuuagcuaucauuca

SEQ ID NO: 6617 - RNA, 60 nt, Human
ugcaugggaaugaggcuguuggacgagaacugcucauuuucuuggcccaguaccuaugca

SEQ ID NO: 6618 - RNA, 75 nt, Human
ugcauuaaucuucucauuuucuacuauucucucaacguugucugugagaccguacucagagugaggauuucugca

SEQ ID NO: 6619 - RNA, 63 nt, Human
ugcauuacaaaccugcagcuugccaacaacaacaaaaaagguaaagguuucacagucagugca

SEQ ID NO: 6620 - RNA, 78 nt, Human
ugcauuucgccauguugcccagcacucaagcaaucauccuaccucagccucccaaguagcugggauuacaggcaugua

SEQ ID NO: 6621 - RNA, 98 nt, Human
ugccaagaagauccugcuggagaugggggaguucuuucagauucaggaugauuaccuugaccucuuuggggaccccagugugaccggcaaaauuggca

SEQ ID NO: 6622 - RNA, 82 nt, Human
ugccacagccuugguaagaucuugaacuagugcagaauucagcugugguagagugcugaucuuagcaugcuucgauguggca

SEQ ID NO: 6623 - RNA, 73 nt, Human
ugccaccaugccuggcuaauuuugguauuuuuaguagagaugggguuucaccauguuggccaggcuggucuca

SEQ ID NO: 6624 - RNA, 63 nt, Human
ugccauuucacacauggacuccaccguuaguuuuagaaguuggagacugugugugguuccgca

SEQ ID NO: 6625 - RNA, 72 nt, Human
ugcccagcuccacaagcgccugcagcgccuccacgucaccggcgugggcagcagcacaggccaggcugggca

SEQ ID NO: 6626 - RNA, 74 nt, Human
ugcccaugccuugcuuuugauccauaguuguauaaugauugauucugaccuucugauuagcaaagcccagggua

SEQ ID NO: 6627 - RNA, 65 nt, Human
ugccccccgggccgucuuccccuccaucguggggcgccccaggcaccagggcgugauggggggca

SEQ ID NO: 6628 - RNA, 77 nt, Human
ugccccguuacucuuagugugauagacuaccacgcugguuuauguucagcguuccccuauauuguuguuucggggca

SEQ ID NO: 6629 - RNA, 79 nt, Human
ugccccuuccaugaccagccacaucugaaaaggaaagcauucugcucuuuccagaucuacgcugugccuuggcagggca

SEQ ID NO: 6630 - RNA, 71 nt, Human
ugcccgcguacaugggcugaggaaugcucaagcagaagaaaugguagaguuuucuucaggcuuaaagggua

SEQ ID NO: 6631 - RNA, 71 nt, Human
ugcccgcguacaugggcugaggaauguucaagcagaagaaaugguagaguauucuucaggcuuaaagggua

SEQ ID NO: 6632 - RNA, 71 nt, Human
ugcccgcguacaugggcugaggaauguucaagcagaagaaaugguagaguuuucuucaggcuuaaagggua

SEQ ID NO: 6633 - RNA, 71 nt, Human
ugcccgcguacaugggcugaggaauguucaagcagaagaaaugguagaguuuucuuuaggcuuaaagggua

SEQ ID NO: 6634 - RNA, 74 nt, Human
ugcccgucuuucuugguucaccuuaucgggggugggccuccggcagggaacggccugggacaacugggggggca

SEQ ID NO: 6635 - RNA, 88 nt, Human
ugcccuguugaccagaauuuguuagauugcuauuacaaugcugauuauauuuuauagcaauuacugacauaagguuauacuuugggca

SEQ ID NO: 6636 - RNA, 130 nt, Human
ugcccuuucccccaguauuguagagcaagucuuguguuaaaagcccagugugacagugucaugauguaguagugucuuacugguuuuuuaauaaauccuuuuguauaaaaauguauuggcucuuuuauca

SEQ ID NO: 6637 - RNA, 67 nt, Human
ugccggugacaaauuaacagagguccuugaagaggcuaacacucuguuuaaugaagugucccgagca

SEQ ID NO: 6638 - RNA, 93 nt, Human
ugccuaguggaccagagccuucgucuggacugccgccaugagaauaccagcaguucacccauccaguacgaguucagccugacccgugagaca

SEQ ID NO: 6639 - RNA, 107 nt, Human
ugccuaguuugcuggaucguuccccucuguauuggaaguuaaugccccugaugaucuuuaucuacagaauagcuuuaagguggagagggguaacuauuaauuaggua

SEQ ID NO: 6640 - RNA, 79 nt, Human
ugccugauguauuuacucgugaucuucauucaugcuuggggacagagugagugggauuuaugaguuacuguacucagca

SEQ ID NO: 6641 - RNA, 84 nt, Human
ugccugccaagccaguggcucagcuucucuuauggugacauucugcaugucauuaaugccucugaugaugagugguggcaggca

SEQ ID NO: 6642 - RNA, 70 nt, Human
ugccuguuccgugcauguggucauaaaucaaaaccauaaucaggguccaugagcauaacacgcacgggca

SEQ ID NO: 6643 - RNA, 98 nt, Human
ugccuuagaaaucuacuugacaaacagauacugaacacucauccauggcuuaauccacaaauguuagaguguauuucugaaacuagcagacuagggua

SEQ ID NO: 6644 - RNA, 70 nt, Human
ugccuucucuaggucccuauuccugcuuggcagccgagcagagguacccucuuaggacuuaggauaggca

SEQ ID NO: 6645 - RNA, 73 nt, Human
ugcgaaagacggggcacuggugcuuuuaaauccagagugggacugccugcgccugcuccuguuaucaauagca

SEQ ID NO: 6646 - RNA, 81 nt, Human
ugcgcaucacugugggcguggauggcuccguguacaagcugcaccccagcuucaaggagcgguuccaugccagcgugcgca

SEQ ID NO: 6647 - RNA, 92 nt, Human
ugcggugcuccccagaaaaggggaaggggcaguggggugagaagguccuggcuccccuucucccggccuuccucugccuggggcccacugca

SEQ ID NO: 6648 - RNA, 73 nt, Human
ugcgucuucccuuccuggacucacagacugggguggcccagaacaacugcuacaucuggauggagaagaggca

SEQ ID NO: 6649 - RNA, 61 nt, Human
ugcguguccuaacugguuggaaaaacugugaucaccacuucaaguguagggacuccucgca

SEQ ID NO: 6650 - RNA, 64 nt, Human
ugcguugucaguggcccgggugcggacccaggacaggccuugggccacccggggcggcaucgcg

SEQ ID NO: 6651 - RNA, 126 nt, Human
ugcguuguuacaggaagucccuugccauccuaaaagccaccccuuuucucucuaaggagaauggcccaguccucucccaaguccacacaggggaggugauagcauugcuuucguguaaauuaugua

SEQ ID NO: 6652 - RNA, 69 nt, Human
cguuugaagaagagugcagauacacuuugggggauccaaaaggagcugcaauuuuaaagucuucugaug

SEQ ID NO: 6653 - RNA, 82 nt, Human
cguuuuuaaaaugaacaucucugugugccacaguuccuaggacuggggcaaggacacagugucaagucuuguuuugaggaug

SEQ ID NO: 6654 - RNA, 91 nt, Human
cuaaaacggcuuuugaugaggccauugcugaacuugauacacugaaugaagacucauacaaagacagcacccucaucaugcaguugcuuag

SEQ ID NO: 6655 - RNA, 71 nt, Human
cuaaccauugaugagcacuccugauuuuaaucuagaacauucagauuuaccauaauguuccuuagugguag

SEQ ID NO: 6656 - RNA, 90 nt, Human
cuaacuuugacagagucacacaggucuuuugaaugcaggaugucugaaccuuucugugcucaugugccugucuggcucuaagaaggguag

SEQ ID NO: 6657 - RNA, 80 nt, Human
cuacaagucccagcaggccccgcggccaaggugccucgucuuuccuggacuccuggagcagagccucuugggaaauguag

SEQ ID NO: 6658 - RNA, 75 nt, Human
cuacacagacuucuauuccucucggagcaugcuaccaacgucggaaucauguucagggacaaggagaaugcgugg

SEQ ID NO: 6659 - RNA, 96 nt, Human
cuacaugaagaagagagaagaggagaugcgugauaccaagagucaaaaaacucggguccuauacuucagcaucuuuucaaguucugucucaugugg

SEQ ID NO: 6660 - RNA, 80 nt, Human
cuaccaucuuuauggcagccgcauggacaggcagacgaaacagcagcccagacagaauguggcuuacaacagagaggagg

SEQ ID NO: 6661 - RNA, 65 nt, Human
cuacccccaccaccacuuccugagaugagaugucuagguauaggaggauguggcuguugggguag

SEQ ID NO: 6662 - RNA, 66 nt, Human
cuacccccaccaccacuuccugagaugagaugucuagguauaggaggauguggcuguugggguuag

SEQ ID NO: 6663 - RNA, 71 nt, Human
cuaccugaggcgucuccagaacagcucagcgccccaaggagcuggaauucgagguaggccggccucggugg

SEQ ID NO: 6664 - RNA, 96 nt, Human
cuaccuuguuuuugguuggcuuuuguuguuguuccugcuacuuucaccuuuaagcagagcagucaggagacaagcauaaaccagagcacuggguag

SEQ ID NO: 6665 - RNA, 68 nt, Human
cuacgugccagcucuaguuuucagccuugggagguuuuauucugacuuccucugauuuuggcaugugg

SEQ ID NO: 6666 - RNA, 74 nt, Human
cuacugcuggaauucuugucauugcagaaaaucaauguuguguucugauuuggggcauucuagcuugcaaguag

SEQ ID NO: 6667 - RNA, 77 nt, Human
cuagagacagacauagucaaaaugaaaacauaaauuccaauuuugugucaauuauuuucaaacuauguucccucugg

SEQ ID NO: 6668 - RNA, 61 nt, Human
cuagagcaagccucaauaaguuuauuuuauuaccuuggaauucuuugaugguggugucuag

SEQ ID NO: 6669 - RNA, 78 nt, Human
cuaggaauaucaggcucucagaagcugccugugaggaugaagauucagccucagaaggucuaggugagcuuuuccugg

SEQ ID NO: 6670 - RNA, 85 nt, Human
cuaggacagcuuugcucuuccugccccuuauaggagcccucacaguucaucuuccugguggcgcagaugagugaggcacccuugg

SEQ ID NO: 6671 - RNA, 130 nt, Human
cuauaaaaccauccagaccucucgauggccacuucugaaaacauccacggugaagggcagggcaggccuggcuguggagugggccagcugaguaccugggcgucacaagggaaaugguuggggauuaugg

SEQ ID NO: 6672 - RNA, 93 nt, Human
cuaucuacaaacagaauauaacaaaaggaaaaugugacuuaagaagugaucucagguccauagcucuucgguucuuccaaauuuguagaucag

SEQ ID NO: 6673 - RNA, 106 nt, Human
cuaucuuuucaucucauuaauucaauuaaaaccauuaccuuaaaauggguuucuuucgaaguguggugucuuuuauauuugaauuaguaacuguaugaagucauag

SEQ ID NO: 6674 - RNA, 81 nt, Human
cuaugacugcucugccauguugcuuugccgaccucgccccugggaaggggaccgggcaaggccacuuccagaggguugugg

SEQ ID NO: 6675 - RNA, 86 nt, Human
cuauguaugagagaauaaaguauuuuggaaaaacaaacggauaauucuuuaaauccagaacuacuuuuuaucuucugauaucauag

SEQ ID NO: 6676 - RNA, 61 nt, Human
cucaacccuuucuuuaaugucauccagggagggggccagggauggaggggaggguguugag

SEQ ID NO: 6677 - RNA, 73 nt, Human
cucaacuggauucggaaugugcugauuuccauuggacucaaguugaucucacuuauauucugagugccgggag

SEQ ID NO: 6678 - RNA, 69 nt, Human
cucaagcuucccagaaucccuugucccuccccacuuugggcacuuagggguggggcuggggagugagag

SEQ ID NO: 6679 - RNA, 79 nt, Human
cucaagguucccugggcauccugcccacccaagcugacugcuaaggucaucgauacggagcaggagcccaggccuagag

SEQ ID NO: 6680 - RNA, 92 nt, Human
cucaaguggcuaaugacacaaucauuacagaaacguucaugauggguccgugcaaagaagaagcuggccugauuaugugguagucgcaagag

SEQ ID NO: 6681 - RNA, 90 nt, Human
cucaaucuggcugcuccucuccauguacccauuccccuuggggugcaagccacaccacccuucacuugggggaugauagcagccaguggg

SEQ ID NO: 6682 - RNA, 68 nt, Human
cucacugcccuggagaaagagaggaaugacaccaccugucccguugcugacucuaaggcuuuuaugag

SEQ ID NO: 6683 - RNA, 68 nt, Human
cucagaguaggucauucugguuugcccuaugccaugugguaagaagccagucagccugcccauuugag

SEQ ID NO: 6684 - RNA, 76 nt, Human
cucagccagacguggagggagccgggugccgcaggaaguccuuuccaccucucauccagcuucacgccugguggag

SEQ ID NO: 6685 - RNA, 75 nt, Human
cucaggguugucccccaguagaagugaugggcugcuuugagccguucuuacugaugucuggucugauccccuggg

SEQ ID NO: 6686 - RNA, 81 nt, Human
cucaguaugcaugguuggcaauguagagugacugugcugcugcuccaccaucuucuacacugccuucauacuugcccugag

SEQ ID NO: 6687 - RNA, 84 nt, Human
cucaguggaagugcugauggagccucugugaagcacaguccugagaccagugcagugaagacugaggucugcccuuccacugag

SEQ ID NO: 6688 - RNA, 86 nt, Human
cucauagugguagauagcuuauuggucaggguagauagagauauguuuucuguguaacugucuaguuuuuguccuaccauucggag

SEQ ID NO: 6689 - RNA, 71 nt, Human
cucauccugcuccuccaggccuucaucaccaccauaagcacaagggucagcauaggcagggucacccagag

SEQ ID NO: 6690 - RNA, 69 nt, Human
cucauggacagcuucgaugcuuuuggaagcauucaccaucuuccaguucaaagucgugucuuucaugag

SEQ ID NO: 6691 - RNA, 81 nt, Human
cuccacuuccccaucccccuaagcccccacugccuuccuuagugauagcagucauaaaucucagggcaccguggaguggag

SEQ ID NO: 6692 - RNA, 66 nt, Human
cuccagaguagcguaggacuucaggcaugcaccaccaugccuggguaacuugcguauuuucgguag

SEQ ID NO: 6693 - RNA, 75 nt, Human
cuccagcaaacgacaaccaacugcacgauggucugaggcagagugugguucagucagggaggucagaagcuggag

SEQ ID NO: 6694 - RNA, 69 nt, Human
cuccagcagugugacgggguaccgggugcucugagaccauuuccggguucccguugccuuugcugaggg

SEQ ID NO: 6695 - RNA, 97 nt, Human
cuccauagccaucaucugcuacagggccaaagccaccuccagcgcccaggugauuggggugcugcucugggucgaacaugcggaucugggauugggg

SEQ ID NO: 6696 - RNA, 66 nt, Human
cucccacccugccggccucaggaacagcuggcuccagaugggggguggcaggcagugaagugggag

SEQ ID NO: 6697 - RNA, 69 nt, Human
cucccaggcaauauuccaggauaggcugccaguuggacuaaggaagccacuccugcggaacccugggag

SEQ ID NO: 6698 - RNA, 65 nt, Human
cuccccauugaaguucacaagacgggaggccauuucuccucauucuuggugcaucaaauccggag

SEQ ID NO: 6699 - RNA, 79 nt, Human
cuccccccauggccaggccuugcuccuguucugccugauguucccugguugugggccugggcuuggcucuggggagggg

SEQ ID NO: 6700 - RNA, 111 nt, Human
cucccggaguuuauggucuggugagaagaucccugcucugagucacugccaagcucuagcuaugugacuuugaacagggaauuucugucccuaucuauaaaauaaacgggg

SEQ ID NO: 6701 - RNA, 89 nt, Human
cucccugaaguaaggaguuggucacuugcaugccugggaguaggcagcaauauuucuauauaugugucugacucuuagcuuucauugag

SEQ ID NO: 6702 - RNA, 74 nt, Human
cuccuccaggagaccauaagauagaucccccauccucucagcccuauucccaugccucccucucauuggaggag

SEQ ID NO: 6703 - RNA, 60 nt, Human
cuccucgcuccgugcucgcaggugccuccuccuggacggcggcagcggcggcgcgaggag

SEQ ID NO: 6704 - RNA, 67 nt, Human
cuccucuggacuuuucgguucccuccccuguuguaacuaggggagggugagugucuguguaggggag

SEQ ID NO: 6705 - RNA, 88 nt, Human
cuccugaaagucauccucgccagucccggcguucaauguccaucaauggcggucuaaugcuggggaaaaaagguggcauugcaaggag

SEQ ID NO: 6706 - RNA, 60 nt, Human
cuccuguggugaauggauaaguaaaggcagaaaagauuauaugucauaccuccauggggg

SEQ ID NO: 6707 - RNA, 77 nt, Human
cuccuugcccaaauuugcccccugugugcuacaugaucggaugacucauaacucuaagggccugguuaagcaagcgg

SEQ ID NO: 6708 - RNA, 80 nt, Human
cuccuuggcagccgggagaggagcaagcgcacgccacugcccgugacccaggcguccggcugcuguccccugccggggag

SEQ ID NO: 6709 - RNA, 74 nt, Human
cuccuuguuccagggaacacucaguuucccuacaggugaucuuggggagagacuguucccaggcaacccuggag

SEQ ID NO: 6710 - RNA, 73 nt, Human
cuccuuguuccagggaacacucauuucccuacaggugaucuuggggagagacuguucccaggcaacccuggag

SEQ ID NO: 6711 - RNA, 86 nt, Human
cucgaagugauccugaggccgaagauugggcugccugguguugcagagacagaagccgggagcggcugaucaggaacacgugcgag

SEQ ID NO: 6712 - RNA, 80 nt, Human
cucgcggcagcuggaagcggcuggucaccugcagugugcucacauuccacaccagcaccaugccguccaugcugcacgag

SEQ ID NO: 6713 - RNA, 79 nt, Human
cucgcuauauggggaacgggugucucaaaggcuguugagcacaucaauaaacacuauugcgccugcccugguuagcaag

SEQ ID NO: 6714 - RNA, 65 nt, Human
cucggagugggguugggacguuuucacucccaguggaaacgccaacuauaaccccucccuccgag

SEQ ID NO: 6715 - RNA, 66 nt, Human
cucgggcugagugaggcacagguuaugauggcuuugucacaucaccugaaugcuguggaguccgag

SEQ ID NO: 6716 - RNA, 69 nt, Human
cucgggucccacguguccccgguacucgccggccggagccuccggcuucccggggccgggggaccuuag

SEQ ID NO: 6717 - RNA, 75 nt, Human
cucgucaaaaaauauucacaguucauaaacuuuccuauuuauguauggagcagcaagacugaaacuguugaggag

SEQ ID NO: 6718 - RNA, 87 nt, Human
cucuaacaaggugcagagcuuagcugauuggugaacagugauugguuuccgcuuuguucacaguggcuaaguucugcaccugaagag

SEQ ID NO: 6719 - RNA, 71 nt, Human
cucuacgguucuccaugcccccuccaguuugggggucuaaaccaaacaggagaggugcaggggaccaggag

SEQ ID NO: 6720 - RNA, 63 nt, Human
cucuaucugccgagcuucuucaccuacgccaaguacaucgugcaaguggaugguaagauaggg

SEQ ID NO: 6721 - RNA, 110 nt, Human
cucucaccugaauuuugugguagaaagucuguauuuguuguugugagcguguuaaauugauaacaaaccaaacuacuugauagcuaaagcagauuguuucggguggggag

SEQ ID NO: 6722 - RNA, 116 nt, Human
cucucaucauagauuaaucacuuaguugcaagggaccaguaaauuaacagaauggugaacauuuuccuuuucuuggugcuuuugcuggaugacuagugguuucugcuggaacagag

SEQ ID NO: 6723 - RNA, 81 nt, Human
cucucaugcaggcaugugugagcagcugcaggugugugagcaaaugugcaucacuggggaacaggugucuguggaugaggg

SEQ ID NO: 6724 - RNA, 76 nt, Human
cucucccuugacccaagccacgaacgagcuggagggaaucugcgguacuuugagcaguuauuggaggaagagagag

SEQ ID NO: 6725 - RNA, 65 nt, Human
cucucccuugcaauuguucgccccucugggccaaaccaaagggacgcugcucuguacagguagag

SEQ ID NO: 6726 - RNA, 65 nt, Human
cucucccuugcaguuguucgccccucugggccaaaccaaagggacgcugcucuguacagguagag

SEQ ID NO: 6727 - RNA, 102 nt, Human
cucuccuauaaccaggauucacggguccaggaaucaagggauagaaguaggagugguuccucucaccuguccccucaacuggaguucuacugguuuggaggg

SEQ ID NO: 6728 - RNA, 102 nt, Human
cucucuccucccugauuugcuggaggcucuacauaaacuuuaagaccuucuuacauaguaagcguuaagaagagagcugucaguuacagaggcgggcaagag

SEQ ID NO: 6729 - RNA, 86 nt, Human
cucugcggcuuuccuugaccucugacccgccgaccacgcuugaucccgggccgcggggccaggaagucggaguuugagccccggag

SEQ ID NO: 6730 - RNA, 81 nt, Human
cucugcucucaggagaccuggcuaugaggcccucggggcagggauacaaaguuagugaggucuauguccagagaagcugag

SEQ ID NO: 6731 - RNA, 76 nt, Human
cucugcugcccuuucugugccccccagguucuaucuccccgucacacccgaggccuggcuucaggagggagcggag

SEQ ID NO: 6732 - RNA, 78 nt, Human
cucugggaagcuuagaagauacuucagcacugggaggauucuuuuacaggaacuguguguugauuucugguuccagag

SEQ ID NO: 6733 - RNA, 75 nt, Human
cucugggcuguggagugggugggcaacgggccuggguagcugggcccaggcaacccaccccuccaccucuuggag

SEQ ID NO: 6734 - RNA, 81 nt, Human
cucuguaaagcgggcugaugacuguaccugccucacagauagcugggauggugcaugucaugugcucagcugggaacagug

SEQ ID NO: 6735 - RNA, 84 nt, Human
cucugucuccugaguagcuggaauuacaggcaugagccacugcacacugcuuacgcuuugaucucagcacaaccaggcuaggag

SEQ ID NO: 6736 - RNA, 74 nt, Human
cucuguggccuacaaaucugggcaccagugguucuaaaaucgccugcgugccucagcaagugccagccacggag

SEQ ID NO: 6737 - RNA, 70 nt, Human
cucuguugcucagcaggaaugcagggguacaaucacgacucacuauacccuugaacuucugggcucaggg

SEQ ID NO: 6738 - RNA, 84 nt, Human
cucuguuuaguuugauauuaaagcaaaauuaagaggucuuaguuuuuccuauagaacuuuuaauaugucaauucagaaauagag

SEQ ID NO: 6739 - RNA, 109 nt, Human
cucuguuuccuaauucuaggcuagcuuuuuuugugagaugugaaucuuacucuugugaaauaugggaucaagacacauaagcaaaagucuagugagaauuaggacagag

SEQ ID NO: 6740 - RNA, 89 nt, Human
cucuuaaaccuuuagaaaugcuacagcaucuagcuucucuagaucaauaaucacagaggcuuaagugcugaccucauaaagauaaagag

SEQ ID NO: 6741 - RNA, 78 nt, Human
cucuuaguuuugauuugaggcaucccguaaaguuguaguugcagaaucccaaacuaggcuacauuucaaaauucaggg

SEQ ID NO: 6742 - RNA, 71 nt, Human
cucuucgucacucuuaugucucucuccuuuucugugucuguguguggggagagagagagagagaaagagag

SEQ ID NO: 6743 - RNA, 76 nt, Human
cucuucuucccccucaagguaacauuggauguggcugauuaacucccacaagaaccugagcauuaagggucaagag

SEQ ID NO: 6744 - RNA, 91 nt, Human
cucuugauaaucugauuuaacacaaauuuccucauugaguuucuccucaugaagaaacggccucagugagguaaaucggaaugcacaggag

SEQ ID NO: 6745 - RNA, 80 nt, Human
cucuugccucagucuuccaaauagcugggacuagaggcacaugccacugggcccagccuauuugcaaaacuuuuguagag

SEQ ID NO: 6746 - RNA, 73 nt, Human
cucuuguugaccaggcuggagugcaauggcgcgaucucggcucacuguaaccucugccucccggguucaagag

SEQ ID NO: 6747 - RNA, 91 nt, Human
cucuuuauucugacaacauuaugacauuaaauaaaauccaagagguauuggauuaguccuuguuuggucucuggugauuuagauaaggcag

SEQ ID NO: 6748 - RNA, 91 nt, Human
cucuuugaaacacugccaugccuacguccaucagcuacuaaaugauucgcaaauguacugacugcacuuauauaugcaguggccuaccgag

SEQ ID NO: 6749 - RNA, 77 nt, Human
cucuuugaagcguuuuccaacaguauagaucucaugaaucaaauccuccaugcagaugaugccguauuuaccaagag

SEQ ID NO: 6750 - RNA, 88 nt, Human
cugaaaacucugauuuccaaauuugugaaugguugaacuacagauacuacuguaucaguguucuuaccaauugcaacaguuaauucag

SEQ ID NO: 6751 - RNA, 64 nt, Human
cugaaacaaaaagcauuguuguuugccaugauacaagugcacuguggcaaugcccguugcucag

SEQ ID NO: 6752 - RNA, 82 nt, Human
cugaaacgcuacaccaggcaaauucuuaguccuacugugaaaucgauggggucuuggaaaauggacugggacuguguuucag

SEQ ID NO: 6753 - RNA, 120 nt, Human
cugaaagaccaaccacauuggccacacaggcuaucugaaccacgguugacugucucuccagauggaucccucugugcuucuggacggcaaggauggccaggcauguuauugggaucucag

SEQ ID NO: 6754 - RNA, 102 nt, Human
cugaaagucuaucugcugccacgccugggcacauacugcaucauuuacaaaacuguagagcaccuguugugugugcaguugugauuucuuauagauuuuuag

SEQ ID NO: 6755 - RNA, 86 nt, Human
cugaacauuuuccgaaaaucauuuugagcaaaauaucuguuuaauaacaagauaaccacaucaagaugguuggaaagcugaagcag

SEQ ID NO: 6756 - RNA, 76 nt, Human
cugacagauuucuucccucuucccuccccaucacccaccucagugauaacacauuacugauagaggaagucauuag

SEQ ID NO: 6757 - RNA, 85 nt, Human
cugacaugugcauuauccaugucauuuuaaacaaagugaccuauggaaggguacgcugugcugugacaugguaaugggcuguugg

SEQ ID NO: 6758 - RNA, 93 nt, Human
cugagaguuggggccacaccaccagugaggggugcaguagucacucacagacucagacaagcaacccacuggcuugccugucccaauucccag

SEQ ID NO: 6759 - RNA, 105 nt, Human
cugagaugccuuuaguggaacucuucuccucagaaccauguagagucuaccugacuccaggugguacuuuuaagguauccaggagaccuuuagauuugcucucag

SEQ ID NO: 6760 - RNA, 71 nt, Human
cugagcuccggcagccucagcggcucugagucucccagccucaacccuggccgccgccugccaaucuucag

SEQ ID NO: 6761 - RNA, 96 nt, Human
cugaggaccccucggaucugcuccagcacgugaaauuccaguccagcaacuuugaaaacauccugacgugggacagcgggccggagggcaccccag

SEQ ID NO: 6762 - RNA, 92 nt, Human
cugaggaugggcaacccccaggucugcagcuccagguacauaucacgcgcacagccugggcagccuggcccucaccggucgcccacucccag

SEQ ID NO: 6763 - RNA, 96 nt, Human
cugaggcaccuccacuggccccuuugugaggcacgcuugaccuggguuucauggaaagaaugugcccucaccaaagggugcuaaacaaggccccag

SEQ ID NO: 6764 - RNA, 80 nt, Human
cugagguuacuguggcucggcaaaggcagcuagaggaaucugcaagucaucuggccugcuuccaggcugcagaaucccag

SEQ ID NO: 6765 - RNA, 94 nt, Human
cugagucagcgcacgaucacugucgggguguacgaagcggccaagcugcucaacgucgaccccgauaacgugguguugugccugcuggcggcgg

SEQ ID NO: 6766 - RNA, 75 nt, Human
cugaucaauccuucuuuuucucuuuugcccacaauuuaagcaaguagaugugcagaagaaaugggaaggauucag

SEQ ID NO: 6767 - RNA, 66 nt, Human
cugaucccucccccagcucugcugggucccggggccacagcgucaggccgguggggguggagguag

SEQ ID NO: 6768 - RNA, 86 nt, Human
cugaugcugaggauuccgacggcagcauugccuccugggagcuacggguggcaggggaacgcuccuggaugauccccagcaaacag

SEQ ID NO: 6769 - RNA, 70 nt, Human
cugauggcugaagcuccuaauauggcaguugugaaugaacagcaaaugccagaagaaguuccagccccag

SEQ ID NO: 6770 - RNA, 76 nt, Human
cugcaagaagaaaccaagacugagaaugcugucauguguuaaguauauuuaaaguggcuacguucuaguuuugcag

SEQ ID NO: 6771 - RNA, 95 nt, Human
cugcaagacugugcccuuccccuccugaaagaugucaucgcaacagauaaagaagacguugccuucaaagaccugggauguggccauucuugugg

SEQ ID NO: 6772 - RNA, 67 nt, Human
cugcaaguccagccagaguguuuuauaucgcgucaacaauaagaacuacuuagguugguaccagcag

SEQ ID NO: 6773 - RNA, 78 nt, Human
cugcagcagaucugcaagauccucaaugcgcacauggacucacugcaguggaucgaccagaacucggcccugcugcag

SEQ ID NO: 6774 - RNA, 117 nt, Human
cugcagcccaagcaaaauggaaauacaagcaaucauguaguucacuguguccaucagacaggaacaaaucagaugaccaggaauugagagacugaacauuuccucagguggcuggag

SEQ ID NO: 6775 - RNA, 86 nt, Human
cugcagcccuuguaccucaaagcgaucccacaauguccacucuugguuauaguacuggugacguggugcggcaagggguacagcag

SEQ ID NO: 6776 - RNA, 85 nt, Human
cugcagggauuuuguuugcuccuucugccauuugaguacacagcuagaaauggcaucuaugaagcagacaguaggcccuuaccag

SEQ ID NO: 6777 - RNA, 83 nt, Human
cugccaaauauccauuagacauugagugagaaacaggucacaagauugccacucccuuaagcaggaucuagguauuuagguag

SEQ ID NO: 6778 - RNA, 66 nt, Human
cugccccaucaggcccaucucaagauguuggauuacagugcaacaugagaugggguggggacacag

SEQ ID NO: 6779 - RNA, 100 nt, Human
cugcccccgcccucuggacccgagugacucaggccuuuguuuguccuuccugguagaggcggguucccucccucggcaagaugccggagugcugggaugg

SEQ ID NO: 6780 - RNA, 63 nt, Human
cugcccuccaucuaaaggcgcugcuugauuuugaggauaaagauggagacaaggugguggcag

SEQ ID NO: 6781 - RNA, 92 nt, Human
cugcccuucgagaugugcccuucucagcccuguacugguucaacuaugagcuggugaagagcuggcucaauggguucaggccgaaggaccag

SEQ ID NO: 6782 - RNA, 81 nt, Human
cugccgauguucuggcauggauggugguccuguaguccuuuauugaucgauagcagggaacugaccgagcgagguuggcag

SEQ ID NO: 6783 - RNA, 65 nt, Human
cugccgccucuccgagcucuugugacgcggaccucagugccaggauggcucggggcgagcggcgg

SEQ ID NO: 6784 - RNA, 76 nt, Human
cugccggaaguuuaccagcucacuuucggcgucgcgcccgccuccguggagcaggccggaaguggcuuuccggcag

SEQ ID NO: 6785 - RNA, 96 nt, Human
cugccuaaugaugguguauggaagcuguagcauuucuggcaccugccaacuugucagagcugccuuucccuuccuggcacuuugucuauguggcag

SEQ ID NO: 6786 - RNA, 99 nt, Human
cugccuauauuacauucauuuugaugguuuguaucucaaaggaguacagugaacgaaacuuguuuaaagauacaccggaaagaaaaagagaagaggcag

SEQ ID NO: 6787 - RNA, 72 nt, Human
cugccucucugcaggccgugugcuuugcucgguugaucuugcagagccuaagacacaggcccagagaggcag

SEQ ID NO: 6788 - RNA, 72 nt, Human
cugccucuucuccugcuggcagguacacuucuucaggcuguguccucugugcagguagguaggggauggcag

SEQ ID NO: 6789 - RNA, 83 nt, Human
cugcggugcaggucgaccagggccugggagcgcugcuggucccggagcuccuccagccgcugccagcccugcuccugcagcag

SEQ ID NO: 6790 - RNA, 128 nt, Human
cugcgucuaaauuccuggagaauauuccuucuguccuagcacucaucuggccuccccauccccuuagguaggcuaguccauguguguguuacaggggcugcuagaaaguuccucccuauuuugagcag

SEQ ID NO: 6791 - RNA, 100 nt, Human
cugcgugcccggaguccccgccugugucgucucugucgccguccccgucuccugccaggcgcggagcccugcgagccgcgggugggccccaggcgcgcag

SEQ ID NO: 6792 - RNA, 62 nt, Human
cugcuccuuguggaagaauaaggacauucagaggcuguuaccuucuccucucaaggaugcag

SEQ ID NO: 6793 - RNA, 102 nt, Human
cugcucuggcauaggaauacuugaauagcuugguuaaaugaagggauggccaggagauguuacuuuuccaagcuauucaggcacuccuuaugucagagacag

SEQ ID NO: 6794 - RNA, 91 nt, Human
cugcucuuccaaagcuccugcgucuguuuuuaaagggccuggggaaaaauacugccuaggaaaaugccaaaauggaauuaggagagaguag

SEQ ID NO: 6795 - RNA, 80 nt, Human
cugcugaggccuguccccaccucaccccuugguugucgaugguguggaacauuggggugaggggcaaaaugccuaagcag

SEQ ID NO: 6796 - RNA, 78 nt, Human
cugcugagguucuggaguggcacaggaacaggaggagcaaaugacacugggucuuugugcugaggcaggacacagcgg

SEQ ID NO: 6797 - RNA, 60 nt, Human
cugcugcgcccuguccuccgucggcucugcgggcucccgggccuacagcggcugcggcag

SEQ ID NO: 6798 - RNA, 60 nt, Human
cugcuggacauuccaaaucccaccaucgauuguggcaggcgcuuugggauuuccuuucag

SEQ ID NO: 6799 - RNA, 60 nt, Human
cugcuggcagagaugcauuccagagaugcacuccgcucuggaacucacucucagccacag

SEQ ID NO: 6800 - RNA, 91 nt, Human
cugcuggugggagaaccuagaguugggaagacaucacugauuaugucucuggucagugaagaauuuccagaagagguuccuccccgggcag

SEQ ID NO: 6801 - RNA, 68 nt, Human
cugcuguuguccaacagaacgaccuaguauuugaauuugcuaguaacgucauggaggaugaacgacag

SEQ ID NO: 6802 - RNA, 66 nt, Human
cugcuucuucgggccugcagguccuuugggcacggccguagagaccagaagggccuggagaacuag

SEQ ID NO: 6803 - RNA, 68 nt, Human
cugcuucuuuucuccucccuuuuacuugccgguagaacacaguuaugggucgcaagaagaagaagcag

SEQ ID NO: 6804 - RNA, 86 nt, Human
cugcuugaauggauguauuuugucuguauguaaagauuuaacuacguaaauguugacauauuaauuagaugguuuguuucaagcag

SEQ ID NO: 6805 - RNA, 64 nt, Human
cugcuuggugcgagugcccgagggcguuggaggcagcgugacuccugcaccuugugcuuuguag

SEQ ID NO: 6806 - RNA, 83 nt, Human
cugcuuuugcacagaucugggaguaucggauguagcugaguccagccugucuccaguaggccaccaugcuguagcgaaagcgg

SEQ ID NO: 6807 - RNA, 71 nt, Human
cuggaaacugaucucggaguuaaggcgaauuguucaagaacacaaacuacaucgcacucgucaguugucag

SEQ ID NO: 6808 - RNA, 92 nt, Human
cuggaaauguauuccauuucaagaaaguacgacuaucagcagccacaaaaccaagcugacagugugcaacucucauuggaaugaaaccucag

SEQ ID NO: 6809 - RNA, 68 nt, Human
cuggaacagcccauuuuaucuuugaauggucuucugccagcccauuuugaggccagaggugcugucag

SEQ ID NO: 6810 - RNA, 81 nt, Human
cuggaacugccuucgugccgccucaaucucuuuguucaucucaucuuuaaggaucuuguucucuuugugacagcguucuag

SEQ ID NO: 6811 - RNA, 101 nt, Human
cuggacaccaguagguagugucaagccagagauucggggcaguagauaaauguucauuuuacugaugcacuuuaguuuuuggucuguuaccuguuuuccag

SEQ ID NO: 6812 - RNA, 93 nt, Human
cuggaccuuuuguccuauguguguggauuccagggcaacucuagcaucagagcaaaagccuuggguuucucgcauucaguggccuaucuccag

SEQ ID NO: 6813 - RNA, 65 nt, Human
cuggacuuggaugggcccgaguugggggcaacaccccgggcauuggggcuuuccagcucucacag

SEQ ID NO: 6814 - RNA, 87 nt, Human
cuggagagagugccucagggcuuuuugaaccugcucauugccacuggugaugaccuggccgucaggcagcucguagcucuucuccag

SEQ ID NO: 6815 - RNA, 69 nt, Human
cuggagaucucugguuccccggggagucugagagcuucgaggaugcccauguggagcacagaucuccag

SEQ ID NO: 6816 - RNA, 65 nt, Human
cuggagcaaacgccuucauccggaugccuggaggccaugaaggaauggagugcguaacgcuccag

SEQ ID NO: 6817 - RNA, 109 nt, Human
cuggaggauuuggggugccccucucggcagggaacaggaaguaggaaucccagaagggucugggggaacccuaacccugagcucaguccaguucaccccucaccuccag

SEQ ID NO: 6818 - RNA, 100 nt, Human
cuggagggccugaauuucaaccucacggagauuccggaggcucagauccaugaaggcuccaggaacuccuccguaccucaacagcagacagccaguccag

SEQ ID NO: 6819 - RNA, 81 nt, Human
cuggagguggaagccaacaaugccuuugaccaguaucgagaccuguauuuugaagguggcgucucaucugucuaccucugg

SEQ ID NO: 6820 - RNA, 86 nt, Human
cuggaugaagcugacgaaauguuaagccguggauucaaggaccagaucuaugaccauauuccaaaaugcucaacagcaacacccag

SEQ ID NO: 6821 - RNA, 79 nt, Human
cuggaugcuuuggagccaagcuuucgucccaugcaagggaaacaaccacuucugggauguccgcugcaaucugcuccgg

SEQ ID NO: 6822 - RNA, 74 nt, Human
cuggauucagccugggccugggcagugggcaggggcugugcgccacccccgguaacaggcccaggcgguuccag

SEQ ID NO: 6823 - RNA, 71 nt, Human
cuggauugcaguggcccaaucugggcucaugaaaccucugggucccggucaagugguucuucugccuucag

SEQ ID NO: 6824 - RNA, 60 nt, Human
cuggcaucacuggcgggcucgggaccgggcggggccuggcccgucgcccggccagucugg

SEQ ID NO: 6825 - RNA, 82 nt, Human
cuggcaucuugggugaguuagagauggaaguacauuuuaauaggaugcuucuuuucucuucccccagugccuagguugccag

SEQ ID NO: 6826 - RNA, 91 nt, Human
cuggccacauaugccccugucaucucugcugagaaagccuaccaugaacagcuuucuguagcagagauuaccaaugcuugcuuugagccag

SEQ ID NO: 6827 - RNA, 76 nt, Human
cuggccaggcgguggguucucucuagcuuuaguucuacugcaacguucagagcaggcccauagucuuacaggccag

SEQ ID NO: 6828 - RNA, 75 nt, Human
cuggccagggugguggcuaacgccuguaaucccagcacuuugggaggccgaggcggguggaucaacuguggucag

SEQ ID NO: 6829 - RNA, 80 nt, Human
cuggcccgacgccgacggccucucaguggcucccggaggacccggcgggcccaguguuggagagcugaaggucaggccag

SEQ ID NO: 6830 - RNA, 72 nt, Human
cuggccucaagugguccucccaucuuggcuucccaaagugcugggauuacagaugugagccaccauggccgg

SEQ ID NO: 6831 - RNA, 79 nt, Human
cuggcggccggcgggcacagccggcucauuguucugcacuacaaccacucgggccggcuggccgggcgcggggggccgg

SEQ ID NO: 6832 - RNA, 80 nt, Human
cuggcugcuccucuccauguacccauuccccuuggggugcaagccacaccacccuucacuugggggaugauagcagccag

SEQ ID NO: 6833 - RNA, 76 nt, Human
cuggcugcugcugucuuccuagauacacugaauccacuucuguguagcaccugggucagcugacaauuaaugcuag

SEQ ID NO: 6834 - RNA, 77 nt, Human
cugggaagaacugauaucugagaacaacuuaaacggcgauuuuagugaaguugacgcucaagagcaggauuccccag

SEQ ID NO: 6835 - RNA, 94 nt, Human
cugggaagaaguaugguagugguggaugaaggguggauauuuuaaauugugcaguuacaguuuacuguccuauuaccucugcucguuuaaccag

SEQ ID NO: 6836 - RNA, 95 nt, Human
cugggaccgugccuucaagcccuaacaacuucuuggcccacgguguccuccccgacagcgugcaccuucacccgcugcucaagguccgcucccag

SEQ ID NO: 6837 - RNA, 75 nt, Human
cugggacuauaggugugugccacgaugcuggcuaauuuuuuuguauuagagaugugguuucaccacguugcccag

SEQ ID NO: 6838 - RNA, 77 nt, Human
cugggacucagagccccgcuucuucccacuccacuuguugucccaugaaggaagaagugggguuccuccugacccag

SEQ ID NO: 6839 - RNA, 63 nt, Human
cugggauagaagccuuugaccaggcaggucaggcugaccugguucuuggucagcucaucccgg

SEQ ID NO: 6840 - RNA, 72 nt, Human
cugggcauggugucuuaugccuguaaucccagcacuuugggaggcugaggcuggaggaucacaugaacccag

SEQ ID NO: 6841 - RNA, 80 nt, Human
cugggcuucaaggaagggcaaagcaucaaguaguguaucgggaacauuacaaacaagaaaggaggugcuucuaagcccag

SEQ ID NO: 6842 - RNA, 78 nt, Human
cugggcuuugggccuggugguugggagucaccuacugacaucgggacugacauuccugaaccccugguaugaggccag

SEQ ID NO: 6843 - RNA, 79 nt, Human
cuggggacugaagaccacugaguugaccacauccucgugccgcagccuggccagacagauguuguaguggcggucccag

SEQ ID NO: 6844 - RNA, 73 nt, Human
cuggggcuaccucucuacagcuguuuccucagaggggaaaaaucuuggaggaccagaugggugggagcucugg

SEQ ID NO: 6845 - RNA, 74 nt, Human
cuggggcucaccgcaauccuuccaacucucagccuccacagguagcuggggauaacggggcugugagccacugg

SEQ ID NO: 6846 - RNA, 93 nt, Human
cugggggcugagaccacccuugccugcccccuucuuucugccuuaagaauguccuuuuaggcugggcaugguggcucacgccuguaaccccag

SEQ ID NO: 6847 - RNA, 86 nt, Human
cuggggggcuucggcagaacccggagaccaccauggccucauuugggccacaagugaaaaacaugguucaggcuggagccuuccgg

SEQ ID NO: 6848 - RNA, 72 nt, Human
cuggggugaggcgggcagcgcuacgcgugggguaggaccaucuuacgcugggaccccgccaaggagccccag

SEQ ID NO: 6849 - RNA, 77 nt, Human
cugggguguuuauggcaagucacuuugacagacauuaauguggcagauguugucugacuuacuguuucaacaaccag

SEQ ID NO: 6850 - RNA, 78 nt, Human
cugggguguuuauggcaagucacuuugacagacauuauguguggaaauguggucugacuuacuguuucaacaaaccag

SEQ ID NO: 6851 - RNA, 78 nt, Human
cugggguguuuauggcaagucacuuugacagacauuauuguggcaaauguugucugacuuacuguuucaacaaaccag

SEQ ID NO: 6852 - RNA, 78 nt, Human
cugggguguuuauggcaagucacuuugacagacauuauuguggcaaauguugucugacuuacuguuucaaccaaccag

SEQ ID NO: 6853 - RNA, 77 nt, Human
cugggguguuuauggcaagucacuuugacagacauuauuguggcaauguugucugacuuacuguuucaacaaaccag

SEQ ID NO: 6854 - RNA, 76 nt, Human
cugggguguuuauggcaagucacuuugacagacauuauuguggcaauguugucugacuuacuguuucacaaaccag

SEQ ID NO: 6855 - RNA, 79 nt, Human
cugggguguuuauggcaagucacuuugacagacauuauugugggcaaauguugucugacuuacuguuucaacaaaccag

SEQ ID NO: 6856 - RNA, 79 nt, Human
cugggguguuuauggcaagucacuuuugacagacauuauuguggcaaauguugucugacuuacuguuucaacaaaccag

SEQ ID NO: 6857 - RNA, 79 nt, Human
cuggguauaggaccgucgugagacauggucaguuaaccccuacugaugcauguguugugccaugguacucccugcucag

SEQ ID NO: 6858 - RNA, 72 nt, Human
cuggguccccaagucuggucuucugugaggcaggggcuaagcaggagcuuguccaggaaugugggggucugg

SEQ ID NO: 6859 - RNA, 115 nt, Human
cugggucuugcugugcccucccaggcuuaguguucccucccucaaagacugacagccaucguucugcacggggcuuucugcauguaacgccagcuaagcauaguaagaaguccag

SEQ ID NO: 6860 - RNA, 95 nt, Human
cugggugaaccaggauggucgcuuucugucucguucaaugauccucuugcccugaucuuguucagacggugucucuccuguguacagcaccacag

SEQ ID NO: 6861 - RNA, 74 nt, Human
cuggguucccaaauucuccuugcuguucugcaucauugucuagauggauuaguaaagaagaaugaaaacuccag

SEQ ID NO: 6862 - RNA, 74 nt, Human
cugguaccuuugugcauguugccuucauuccugagcagguaucauccucagggaaccagcauggcaccuaccag

SEQ ID NO: 6863 - RNA, 74 nt, Human
cugguaguugguaaaggagcuggccuugaacucagggauaucuugaaagccacuguugcuucuauggacucuag

SEQ ID NO: 6864 - RNA, 76 nt, Human
cuggucacaucaucuaucaucuacgaagaaagcgccggaaggcccgaggacguccuggaugauuggacgacgccgg

SEQ ID NO: 6865 - RNA, 87 nt, Human
cuggugcgcacuuggcuggaggacaugggagugacgcuggagucguugaaagugugccauucuccugucccuggacugcgacaguag

SEQ ID NO: 6866 - RNA, 67 nt, Human
cuggugcuaccaagaagucagauggaaacaauugauguuucuauugaagcugcuucuggugguaaag

SEQ ID NO: 6867 - RNA, 83 nt, Human
cugguguggccagguccauugugcugaugccucaagagauccaggcugguacagaugggucuggcacauucuguaccugccag

SEQ ID NO: 6868 - RNA, 93 nt, Human
cugguguugugggagaaagaacgcggggcccgaaaaaaagucccaaauuaugaacgacgccugcggaacccaauguuuuuuccacaauggggg

SEQ ID NO: 6869 - RNA, 82 nt, Human
cugguuccgccggccguggucgccgagucggugucguccuugaccaucgccgacgcguucauugcagccggcgagagcucag

SEQ ID NO: 6870 - RNA, 90 nt, Human
cugguucucgccgccucacgcgaacucuacaaaugcaucaagaaagcggugaagcagaagcagauucggcgcggggugaaagagguucag

SEQ ID NO: 6871 - RNA, 86 nt, Human
cuguaaggaagaaccugcugucugccagagaggauaagcugcccaucucagcagcugucuaaaagaaggcaggugucucuuuaaag

SEQ ID NO: 6872 - RNA, 77 nt, Human
cuguaaugcagagaccugugacuauuuccucagcuaccggaugauaggggcugauguagaauuugagcugagugcag

SEQ ID NO: 6873 - RNA, 77 nt, Human
cuguaccagguacugugcugcauuacacauguuuacgcacuccccgacaugcuugugagguaggcagugcuauacag

SEQ ID NO: 6874 - RNA, 83 nt, Human
cuguacgcucccacgguggcacaugaacgacuucuuccacuccuuccugauuguguuccgcgugcuguguggagaguggauag

SEQ ID NO: 6875 - RNA, 68 nt, Human
cuguaguccaacuauucaggaugcugaggugggaguaucuauuugagcccagaaaguugaggcuacag

SEQ ID NO: 6876 - RNA, 83 nt, Human
cugucaagaaggaacaucaaagugaagacauuuucugucaggcaaauuuucaggaaagucuccuuugcacccuuacuugaggg

SEQ ID NO: 6877 - RNA, 68 nt, Human
cuguccccaagcgcaugccaucugcagccagcagucuuggaacuuugguugguggcaccaggggacag

SEQ ID NO: 6878 - RNA, 73 nt, Human
cugucccccuaccccaagucccccagucccucaaaggagggcagggaguggggacuugcaggaagcaggacag

SEQ ID NO: 6879 - RNA, 80 nt, Human
cuguccgguugaaacacaacgcgaggaucgggcgugguggcucacgccuguaaucccagcacuuugggaggccgaggcag

SEQ ID NO: 6880 - RNA, 102 nt, Human
cugucucugggcccugucugaggcuucuuaagauguuguuacaauaaucuacuauguggagugucuggaggugucucuuacuucucuggcauuaagagacag

SEQ ID NO: 6881 - RNA, 105 nt, Human
cugugaaagagacuggucauccugcauuaguaugacagaggggggcugcagaauguugcuauacuggugguacuggauuaucauggcccugggaauuuuucauag

SEQ ID NO: 6882 - RNA, 110 nt, Human
cugugcaccucgugguagaaacucuuugggguucgccagcuguagcucauauuucauguuggggucaugccgaacacccaugaaguuguaguuccacgaggacugggcag

SEQ ID NO: 6883 - RNA, 84 nt, Human
cugugcaccuucccugggacaacuuucuuauugaugggucuuguguuuaauuaaugagaguuuguuuuagggguaugggcccag

SEQ ID NO: 6884 - RNA, 75 nt, Human
cuguggaaaaacuaagggaugcuuuagauauggcaaaccaggcuguaaugcagagaccugugacuauuuccucag

SEQ ID NO: 6885 - RNA, 73 nt, Human
cugugggcgagugaaaggguuccaaccggaaggggaacuggacgcaagggacaacacgcacucgggaacacag

SEQ ID NO: 6886 - RNA, 75 nt, Human
cuguggggggcgucugcgcccuggccaauguccugggggcucagguaugccagcuggagcgacugugcugcacgg

SEQ ID NO: 6887 - RNA, 72 nt, Human
cuguguacgccgccagcugggugagcauggggcagccccaguggccaccggagcugugugagcaagugacag

SEQ ID NO: 6888 - RNA, 74 nt, Human
cugugucuuugguuuuaagaguaaauucuaguuaacaugaccuucagaaacuccuggaaacaucugaggcgcag

SEQ ID NO: 6889 - RNA, 72 nt, Human
cuguucaccuugucacagggcuaugucuuggcucuuggcuaagacuuuaagggcccacacagcagagaacag

SEQ ID NO: 6890 - RNA, 67 nt, Human
cuguuccaaagccaauacgaagaccucccaaaaauugguuggguuaauuuguaauggucccagacag

SEQ ID NO: 6891 - RNA, 70 nt, Human
cuguugcgccuccaugugcuuuggaucagcaaccccagugguauucuaccagagcauugugggaaagcag

SEQ ID NO: 6892 - RNA, 116 nt, Human
cuguugguucuuucuccugacuccugugguuuugcuaauggcacuuuacagacuccauggagaugucagguggaccaucuucuagggcccagcaggaguagggaaugugccaacag

SEQ ID NO: 6893 - RNA, 66 nt, Human
cuguuugaaugugcugguaacugcuuugcuucuugaguagagccaccaccaccauagcccagccag

SEQ ID NO: 6894 - RNA, 91 nt, Human
cuuaaggagagagauuguguucuuccucucucaggggugauaacucaggaagccucuggguugggaagaccaucaguucuuuugucuuagg

SEQ ID NO: 6895 - RNA, 77 nt, Human
cuuaaguguguuuugugugugugcccacacguagacaaauguguacggugcacacacacagugcaucauuuuuuaag

SEQ ID NO: 6896 - RNA, 72 nt, Human
cuuacaaaguauaucuaaggauuauucugcugaagauucaguuuaagaguuuccuugggagaacuaaguaag

SEQ ID NO: 6897 - RNA, 62 nt, Human
cuuacagcugagaccuguuccugcaagccagcugccuugucugaacagaacguagugguagg

SEQ ID NO: 6898 - RNA, 87 nt, Human
cuuaccccaguauccuauuaucucauaccuaaggcagugaugguuucucagaccucuuagauugagaagauguggcauggguguaag

SEQ ID NO: 6899 - RNA, 72 nt, Human
cuuaguggcauguacuggugggagagggaguucccagaucuaauccccccagcaguaugcaucugaucugag

SEQ ID NO: 6900 - RNA, 78 nt, Human
cuuaugagugugaagaauguggaaaauguuuuagucaaaagggcacccuaacugaacaucaucgaguucacacuagag

SEQ ID NO: 6901 - RNA, 93 nt, Human
cuuauuuucucacaagccugguuauuugaggaugugcuuguaacguaugcuuucucuucuauuucucauagccaaugcuuguaccugaauagg

SEQ ID NO: 6902 - RNA, 93 nt, Human
cuuauuuuuucacaagccugguuauuugaggaugugcuuguaacguaugcuuucucuucuauuucucauagccaaugcuuguaccugaauagg

SEQ ID NO: 6903 - RNA, 93 nt, Human
cuuauuuuuucacaagccugguuauuugaggaugugcuuguaacguaugcuuucucuucuauuucucauagccaaugcuuguaccuuaauagg

SEQ ID NO: 6904 - RNA, 70 nt, Human
cuucaaacugguuucuucacucugaagcagguuccccuuccccuucaggauaucuggaccaaguuugaag

SEQ ID NO: 6905 - RNA, 131 nt, Human
cuucaagccuccugaggagaaucuagaugucucagguacaaagagguuuuaauuucacagcaucuccaacagcgcacuuugggugauguggaccauucuguauugagcagaaauuuucuaauggaaggaag

SEQ ID NO: 6906 - RNA, 83 nt, Human
cuucaagugucuugaugguagacaaggugaacguuuccuccuucucaaauucauccccuaccucaucccaggcugcuucgaag

SEQ ID NO: 6907 - RNA, 102 nt, Human
cuucacaccccaaacuucuaggugaucugugggauuuauaccugggcagccuucagguacgucugaagucccacccaugaggcuccucaaaguggaguggag

SEQ ID NO: 6908 - RNA, 131 nt, Human
cuucaccaugcaggggugacuuuuauuugaaggcagaaaacacccuauuuggggguucacucauaaucugcaacaguuuguuuguuuguuuuuaaaaaagagaaaaaucagaagccaaagggccugggaag

SEQ ID NO: 6909 - RNA, 71 nt, Human
cuucacccacguaauguauguccugcaagcugucccacaguuguggggcacgucucgguugucgggugaag

SEQ ID NO: 6910 - RNA, 73 nt, Human
cuucagagaggugggauguggaggggagaggacaugaggauggagcugccaaagccauccugccacugugaag

SEQ ID NO: 6911 - RNA, 71 nt, Human
cuucagaugagcuccucucuuuccaaaggcagguuaacacggguuaggaaggagauuaggagacucugaag

SEQ ID NO: 6912 - RNA, 89 nt, Human
cuucagcuugaugcauggucacuucuuuacuauuuaaaauacuacacauuguacaaaauaucgaagacacuaccauaugcuaaaggaag

SEQ ID NO: 6913 - RNA, 60 nt, Human
cuucaggagccagcuguagguguccuuguccugcaggagcugcagcauggccuucugaag

SEQ ID NO: 6914 - RNA, 87 nt, Human
cuucaggcaguaaaccaacagcucacaaaggagaaagagcacuaccagguguuagagugaaguaauugggaaacuguucauuugagg

SEQ ID NO: 6915 - RNA, 73 nt, Human
cuucaucuccacucugcacgggggcugagggccccuucucugggccugggcacccuuagaggggagaacgaag

SEQ ID NO: 6916 - RNA, 78 nt, Human
cuuccagguccucaguacacaaccaccacgagggaaacccagaccuagguuuccggcgccgacucugaggcccgggag

SEQ ID NO: 6917 - RNA, 69 nt, Human
cuuccaugggcaggggccaugacagggagauaggccacaccuuucccagguggaaccugcagauggagg

SEQ ID NO: 6918 - RNA, 73 nt, Human
cuucccagcuguugagggccguuccuugggcaggcggccgcccgccuuggcccgucucuggagugcugggcag

SEQ ID NO: 6919 - RNA, 86 nt, Human
cuucccaggcccguggccaacccagcaguccuucccucagcugccuaggaggaagggacccagcugggucugggccacaagggagg

SEQ ID NO: 6920 - RNA, 78 nt, Human
cuuccggccgccgguucauuagcgugaagauguuggagcgccgcuuggacugcuuucggauggguguggggguggagg

SEQ ID NO: 6921 - RNA, 99 nt, Human
cuuccuauaaaguuugcucucucuuuuugaaggaaauuucugggcaaacaacauuuugagaaagaaauucagauaugggaaaguaaagaucauggggag

SEQ ID NO: 6922 - RNA, 73 nt, Human
cuuccuccauccugagguuuggggggagaugcagugaaccugcaaauuccccaauuugaaagggugcuggagg

SEQ ID NO: 6923 - RNA, 79 nt, Human
cuuccuccucucugaccgguuggccagggacuaugcagccaucgucuucuuugcuaacaaccgcuuugagacagggaag

SEQ ID NO: 6924 - RNA, 70 nt, Human
cuuccugggcuucguggcugaggugcuggugcuggucaccaucaucuucaucuacgagaagcgccggaag

SEQ ID NO: 6925 - RNA, 130 nt, Human
cuucucacuuucccuucacacacagucguguaguuuugcgcuugcuugauuaaucucuuggccucagucgguuuucuaccauauggaguugguucauucucucgaauggcuguguaguccaguguguggg

SEQ ID NO: 6926 - RNA, 62 nt, Human
cuucucuuaaucugccuuuggucuguugauuuucagugaacaaucagagaguaaaggggaag

SEQ ID NO: 6927 - RNA, 110 nt, Human
cuucugccagccccuggccuuuacuuucuuccuugccuaugcagggcaaacaaaaugugaaauucugcccucagcugagcugaguaagggcuccuggggguuggcuggag

SEQ ID NO: 6928 - RNA, 63 nt, Human
cuucuggccuuaugucucaggaaugcaguuuauuuugauuggcaucuucuaccaggccugaag

SEQ ID NO: 6929 - RNA, 81 nt, Human
cuucugggaccugccagcaccgugguuugugguuagcuccuucuugccaagccaaccaugagcucccagauucgucagaag

SEQ ID NO: 6930 - RNA, 76 nt, Human
cuucuguccaccuguccugcagaggagucguuuccagcccggcugccccaggaugggugaguucaacgagaagaag

SEQ ID NO: 6931 - RNA, 103 nt, Human
cuucuuaaacuccguggcuugugcuuucauuuuguuucagaccacguagggggcugacugaaagggaugaaacaauucagguuuucuagggagauugagcaag

SEQ ID NO: 6932 - RNA, 80 nt, Human
cuucuucagugagacgggcgcuggcaagcacgugccccgggcuguguuuguagacuuggaacccacagucauugaugaag

SEQ ID NO: 6933 - RNA, 76 nt, Human
cuugaaugauaagcuugccuugcucuuuggaaaaugaugauuguuauuacagaagugaaacaaacuucuauucagg

SEQ ID NO: 6934 - RNA, 82 nt, Human
cuugaccagccggaaagcauuggggaugacggccgacagcagggugguguggaugucacccaggacuuuccggaaggcaaag

SEQ ID NO: 6935 - RNA, 71 nt, Human
cuugaccaggcucggaggucgccccgaucgaaacagugaccgggacauggggugccccguuuaaggucagg

SEQ ID NO: 6936 - RNA, 97 nt, Human
cuugagacuuguguagacucugaugcucguaggugacacauaguaaccuuccuggugcucuggcaaccucgcagugucaugguggcaucuuuccaag

SEQ ID NO: 6937 - RNA, 76 nt, Human
cuugaggcuuuaaacaaucacuguauggauaguaaaaauucuacuguauggaauacaaguguaauuugaauccaag

SEQ ID NO: 6938 - RNA, 77 nt, Human
cuugaguuggggacaugagugagaacuggggguuuugaggaguaacccuugugaacacauguacuccagcagccagg

SEQ ID NO: 6939 - RNA, 75 nt, Human
cuugauacuucucucguuguugaacagagaaaaaauauaccagccuccucuggaagcagcgagggaaaauuuaag

SEQ ID NO: 6940 - RNA, 67 nt, Human
cuugauaggugucagucuuguaaucaguauauaaaagaagaaucccaugaugauaaagccuaugaag

SEQ ID NO: 6941 - RNA, 74 nt, Human
cuugaucugucacccaggcugcaguguaguggcaugaucucggcucacugcaacccccgccuccuggguucaag

SEQ ID NO: 6942 - RNA, 100 nt, Human
cuugauuuccagguacagcaggccucuguaacuuuucuuggcagugaagucaugaagucuccuguccucuaaagcuacagaaauuuaaccuggaagcaag

SEQ ID NO: 6943 - RNA, 71 nt, Human
cuugcugugaggagagccaagcugagggcauguacaggccaugugcaugcuguuccuguggcauaagcaag

SEQ ID NO: 6944 - RNA, 107 nt, Human
cuuggacagacccuucgauucuaauuacuuuaggaaaacuccucggcuaaugaaacuuggagaggguaaauucagaguaggagcuggagaagaagggauuguuuagg

SEQ ID NO: 6945 - RNA, 101 nt, Human
cuuggacaggugcuagacgacuuuccgccaaacacuccaccucagcaaagcggguguugagggccauggaagggugagaagggucuucugacauguucaag

SEQ ID NO: 6946 - RNA, 100 nt, Human
cuuggcccacauccaggcuacccccagcccgcuucuccccugcuuagcccagggaggagacaguaaaggugaugggggcagccgggagggaggggccaag

SEQ ID NO: 6947 - RNA, 60 nt, Human
cuuggccucgagcaagccuggccuauccccuguagggggugggugaggggcgaggcugag

SEQ ID NO: 6948 - RNA, 121 nt, Human
cuuggguaagaaaagagaguuggagaaucccuuaaagggcccagaauauucacuaguugaucauucagcagguauuuauugagccccuguuaucuuucaggcacucuucuacuuaccaggg

SEQ ID NO: 6949 - RNA, 99 nt, Human
cuugggucccuggguuacauggagagauucgugguguagcucaaucuaugugucauagcuaucccacaaucucuucuucaacuucuccaacacaccaag

SEQ ID NO: 6950 - RNA, 60 nt, Human
cuuggugacaaauauguuguguaaaguucaggggagaguccgccacauguuguucccagg

SEQ ID NO: 6951 - RNA, 112 nt, Human
cuugguggggcugguuagcgagucauuguauguagagguggaguaaaggcagcacaggugcagucgugaacaugcuuccgcauagaagguggcaaauaagcuccucccugag

SEQ ID NO: 6952 - RNA, 62 nt, Human
cuugguugugcaucuucccagucuauuucugcuucuagaaauacccuguguacaacagcaag

SEQ ID NO: 6953 - RNA, 67 nt, Human
cuuguccuucuucguguaggagcagagagccccauccagacgggcuugcccuucauagaaguccaag

SEQ ID NO: 6954 - RNA, 72 nt, Human
cuuguggaccacgcccgccgggcccaaggauccgccgccggggcgcggaccgggggcugggcuggccgcagg

SEQ ID NO: 6955 - RNA, 107 nt, Human
cuuguuucggacuauagagugcugauggcagagauuggugaggauuggauaaaucugauguguccucauuaauuuuccucaugaaggauuacaugggccgaggcaag

SEQ ID NO: 6956 - RNA, 103 nt, Human
cuuuaaggaggcgaggaagugccggcaagucugaucuuuaaaauggugacuaaauaguaguguggcuauagaauuuauugucuaaacccgagcaacuuugagg

SEQ ID NO: 6957 - RNA, 93 nt, Human
cuuuacugaagcucacuggguguccaucaaucacaaaguggcguaugcagccugugaaggguuugcugggggccaagcguggugucaguagag

SEQ ID NO: 6958 - RNA, 90 nt, Human
cuuuaggaggcugaggugggaggacugcuuaaggcaaggagucugagaccagccugggcaauacagcaagaucccaucucuauuucaaag

SEQ ID NO: 6959 - RNA, 75 nt, Human
cuuuauuaaagugaaacuacuacuucaauauaugcagaaaacaacauauuggauauuuucaccucugggauaaag

SEQ ID NO: 6960 - RNA, 92 nt, Human
cuuucacuacaucagagaaccaucagaaguacaggcaauggucuguaagaacaauuucaaauauuucuucuagcagauggcugaaggagaag

SEQ ID NO: 6961 - RNA, 110 nt, Human
cuuuccuaguaaagcuguuguauuuccuauaugucuguacucuuccugugaaauuuccauccuuuuugugugucaggaaaguagguacugccauuguuuugaguggaagg

SEQ ID NO: 6962 - RNA, 72 nt, Human
cuuuccugggguucuuaggagugaggagaaguaugugggacaucucuucuuuuccuguucccucuaggaagg

SEQ ID NO: 6963 - RNA, 64 nt, Human
cuuucugaccacuuguggugucauuggacugauuugccagaugacaucaaugugggaauuugag

SEQ ID NO: 6964 - RNA, 70 nt, Human
cuuugaagcagguaucuugcauggcccaccggggucgaagucccugccaugcuaccucugaaagucaaag

SEQ ID NO: 6965 - RNA, 106 nt, Human
cuuugagaugacugguauugaauggagcagucuuugaaaggcaccaacccuuccuaacugaugguggucucuugaaagaggcucuuccaaauuugucuucugaaag

SEQ ID NO: 6966 - RNA, 102 nt, Human
cuuugcauuacaacugccuacacuauucaguagaguaacgugcuauacaggcuugaagccucagagcaacaggcuauaccagacaguguaggugugcaguag

SEQ ID NO: 6967 - RNA, 82 nt, Human
cuuuggaaaaacaguuagucuggagccuguggcccaggcccuucuguccccaggcaucaucccaacagcucauuuucccuag

SEQ ID NO: 6968 - RNA, 78 nt, Human
cuuuggucuugggggugcagggcuuggugacgcggauggucuccuggcacugagcauuguagcgcgccuucuccaggg

SEQ ID NO: 6969 - RNA, 79 nt, Human
cuuugguuauaaauuaugaucuaccuaccaaucgugcuauauucacagaauuggcuagggggucgauuugggaggaaag

SEQ ID NO: 6970 - RNA, 90 nt, Human
cuuugugagcuuggcgagugcuggggcuagucaguaacuugaaguccaagaucccuaauucagcucugugcucucacagccuuaccaaag

SEQ ID NO: 6971 - RNA, 95 nt, Human
cuuuguuauaauugauaggauacaucuuggacauggaauuguuaaagccaccucugagcaguguaugucaggacuuguucauuagguuggcagag

SEQ ID NO: 6972 - RNA, 80 nt, Human
cuuuuaacucuggaguagaugucuugcuaacccccaccaccuugagugaggcaguaccauacuuggaguucaucaaagag

SEQ ID NO: 6973 - RNA, 99 nt, Human
cuuuuccacuggaggcuucaaggagcacguggacagucugaaagccccaauauggaugcuggaggcuucagaccccuugaggcauagaugguguugaag

SEQ ID NO: 6974 - RNA, 77 nt, Human
cuuuucuccccuuuacccugaggaaucuauuuugguuaacaggucaaaauuuuuuuccagguaguaggggaggaagg

SEQ ID NO: 6975 - RNA, 131 nt, Human
cuuuugagcugcuucuuauaaugugucucuuguguuaaggugcaucuagugcaguuagugaagcagcuuagaaucuacugcccuaaaugccccuucuggcacaggcugccuaauauacagcauuuuaaaag

SEQ ID NO: 6976 - RNA, 94 nt, Human
cuuuuggagacaaucugacagguuaaaacaggaacuguuggaauuauucuagcuguaacuacuauuggcuauguguugauuggauccuagaaag

SEQ ID NO: 6977 - RNA, 70 nt, Human
cuuuuggcagagcucccacuauuugcaauggauuuuggauaaacaagaucuguugaaggagcgccaaaag

SEQ ID NO: 6978 - RNA, 62 nt, Human
cuuuugugaguguauauaaugguuuuguuaggauggcaaaaccagguauccaaaggcgaaag

SEQ ID NO: 6979 - RNA, 100 nt, Human
cuuuuucucugcccuucgucauuaugcagccugugaacagcgucugggaaagugguggucauugguugcauaauuugaucugaggcuuauggaggaaagg

SEQ ID NO: 6980 - RNA, 72 nt, Human
cuuuuuucuguucucguccggggaucccgagcuguccugcagcuguacccugagaacucagagcaguuggag

SEQ ID NO: 6981 - RNA, 84 nt, Human
gaaaaaugaguaaaauaauuaaugaaacauauuuagagcacuuaauggucucuguuuucaauauaauucuugauuucauuuuuc

SEQ ID NO: 6982 - RNA, 103 nt, Human
gaaacagacugggccaauguccacaaagaauuccuggucagcaccacccgauguccaaaggugcaauaucaaggaagggcaggcgugauggcuuauuuguuuu

SEQ ID NO: 6983 - RNA, 102 nt, Human
gaaacagacugggccaauguccacaaagaauuccuggucagcaccaccgauguccaaaggugcaauaucaaggaagggcaggcgugauggcuuauuuguuuu

SEQ ID NO: 6984 - RNA, 72 nt, Human
gaaaccuaggaagaacaacacaguugagacaauguagcagcagcagugggugcuguguccuccacuggauuc

SEQ ID NO: 6985 - RNA, 89 nt, Human
gaaacucuaauauugaaucucuuaaauuuaguguauguaaacagcuuacaaauacguauuggcuaaauggauuuaauuuugguuuauuc

SEQ ID NO: 6986 - RNA, 75 nt, Human
gaaagcuaguaacagguacauagguaaccaaaguauauagcuuauuuggugaaucuucguccucauuacguuuuc

SEQ ID NO: 6987 - RNA, 80 nt, Human
gaaaugcaaugguaaagaacaaggcagcauguagugcuugcacuuacaaauacuaccaguuuuguaacaauuugcauuuu

SEQ ID NO: 6988 - RNA, 73 nt, Human
gaaaugcuacgagguguucagcuugucacaguccagucaaaggcccaacugcgauuguccaccuugugucuuc

SEQ ID NO: 6989 - RNA, 64 nt, Human
gaaauuccaucgaucugucaugggccccaaagguuccagaauccagcagauuacucgggauuuc

SEQ ID NO: 6990 - RNA, 74 nt, Human
gaacaacacaucaaagaugcauuuguauguucauauaacacuaauaggacaauacaaaguaucuucacggucuc

SEQ ID NO: 6991 - RNA, 96 nt, Human
gaacacaaagagguguagaaucuggguugguccuucaaggcagcucauugcagcuacuggccuccagugaaacaggucucuuugagcuauuuguuc

SEQ ID NO: 6992 - RNA, 82 nt, Human
gaacagaaucuuguggaagaagaaugaaguugcugauuaugaagcuacaacauuuuccaucuucuauaacaacacucuguuc

SEQ ID NO: 6993 - RNA, 84 nt, Human
gaacauugcagagguacugagccauaacagagaggcgacuacgcuguugcuuccuguauuggcugcaagucucucugccacuuc

SEQ ID NO: 6994 - RNA, 72 nt, Human
gaaccaggccccagacaugcugcauagauuuuauggaaagaacucuucuuauguccaugggggauuggauuc

SEQ ID NO: 6995 - RNA, 68 nt, Human
gaaccagucagguuuacuuacgcuggauguuugagugugaagaaauaccggcccaaguacugcgguuc

SEQ ID NO: 6996 - RNA, 76 nt, Human
ugcuacgaggaggucaaggaccgcugcacccuggcagagaagcuggggggcagugccgucaucucccuggagggca

SEQ ID NO: 6997 - RNA, 62 nt, Human
ugcuacuauuuuauugcccgagguggggguguaugcaccgcacaccggggcuaugagaagca

SEQ ID NO: 6998 - RNA, 75 nt, Human
ugcuaugaacacuaugggaucaggcugcccaagaaggggaagccugagccaaaccaugaguggacauuauuggca

SEQ ID NO: 6999 - RNA, 65 nt, Human
ugcucagacugggugugcuggggcucaugguggacugaucaugcugcccugggacccagcuggua

SEQ ID NO: 7000 - RNA, 88 nt, Human
ugcucccagcccugaccguucugcauaugaacaugggccuugguuuccccaucuguaugaagaagggaguagggcugggugauucgca

SEQ ID NO: 7001 - RNA, 64 nt, Human
ugcucccuggacgguggcucuagacuuuugagaagcucaaaacuuuuagcgccagucuugagca

SEQ ID NO: 7002 - RNA, 83 nt, Human
ugcuccgccuuuucuggguacuuacgguccugagucucaaguucgucuucgagaugcuguuugugccagaagcuggcggagca

SEQ ID NO: 7003 - RNA, 61 nt, Human
ugcuccuucaucagcuuugccaacucucggagcucggaggacacgaagcaaaugaugagua

SEQ ID NO: 7004 - RNA, 80 nt, Human
ugcucugcuuuuaaauuucugaacuucuucaauacaaauuaaaauaguacuggagucuuuugggaggccaauagcuagca

SEQ ID NO: 7005 - RNA, 71 nt, Human
ugcucuggugugugaaggucgguggguuaacugugugccuacugaaccuggcaaauaaacaucacccugca

SEQ ID NO: 7006 - RNA, 74 nt, Human
ugcucugucacccaggcuggagugcaguggcgugaucucagcucacugcaaccuccaccuccuggguccaagca

SEQ ID NO: 7007 - RNA, 73 nt, Human
ugcugaacaggaaaggcaccaaagaaagacacuggcaaugaaagugcuauugggaaaauacuguguucaagca

SEQ ID NO: 7008 - RNA, 75 nt, Human
ugcugagcucggcuuauauuucggaccacaugaaggugcacagccaggguccucaccaugucugugagcucugca

SEQ ID NO: 7009 - RNA, 74 nt, Human
ugcugagcucggcuuauauuucggaccacaugaaggugcacagccagguccucaccaugucugugagcucugca

SEQ ID NO: 7010 - RNA, 71 nt, Human
ugcugagcuggggugggcuccacucaguucaagcuuaccagcugcuuuguuuaccuacucaagccucagca

SEQ ID NO: 7011 - RNA, 67 nt, Human
ugcugaggacucccaagcguacugcucaucaucguuauguuuggugaucacaguuacuuucucagca

SEQ ID NO: 7012 - RNA, 76 nt, Human
ugcugagguucuggaguggcacaggaacaggaggagcaaaugacacugggucuuugugcugaggcaggacacagcg

SEQ ID NO: 7013 - RNA, 71 nt, Human
ugcugcugacaaaccaagaggauuugccagaggucuugauccugaaagaauaauuggugccacagacagca

SEQ ID NO: 7014 - RNA, 80 nt, Human
ugcugggggcccgaguggugcugguggaaaagcgcacaaguucucucgccacaacgugcuccaccucuggcccuucagca

SEQ ID NO: 7015 - RNA, 131 nt, Human
ugcuuauuuguuuuacaaccuguaucaucaaacucucucucuaaacuuuaaaaugcuguauaaauaugauacuuuugaggagagagugugcucagaacuuagacgggauuugguaggccaaguaugcuaag

SEQ ID NO: 7016 - RNA, 97 nt, Human
ugcuuccuuaccuacaagaaaauuuagaaguuggugcaaauggcauuuccaugaguacuucucaugcaucuuugcauauuucaccuggggggaagca

SEQ ID NO: 7017 - RNA, 88 nt, Human
ugcuucgggcugcuacaucaacucucucagugugugacuuccuuggagagaagauugcaucuguuuuggguaucagcaccccaaagua

SEQ ID NO: 7018 - RNA, 89 nt, Human
ugcuucucauguagggcgccgacagcauauucugaaucagcuggggguuuucaguuaucuguugcagcaggcucugcaugccuggggua

SEQ ID NO: 7019 - RNA, 92 nt, Human
ugcuuggaggaaaggccuggggcuccucuacuggaucuacacucuguccccaggguuuuuagaucccacugagccccgccugacuugaaaca

SEQ ID NO: 7020 - RNA, 68 nt, Human
ugcuuuacugcugugguccauguagugacaacuaaguuacuuugaaaggcucuacaaaguuccaagca

SEQ ID NO: 7021 - RNA, 66 nt, Human
ugcuuucuuuaggaucccaaacaucgcugccgccuccgcagcgccgucggaucccuggggagagca

SEQ ID NO: 7022 - RNA, 93 nt, Human
uggaaaagauuauguaacuccuugagagcauacucuuucucuagcccaaaggcagugagagaguuuucuuguucaggauugcuuaacuuucca

SEQ ID NO: 7023 - RNA, 99 nt, Human
uggaaaagguguucaucuguacuauguugguggagagguguaugcggaaugccucagugacagcagcauauuuguacagaguaggaacugcaacuuuca

SEQ ID NO: 7024 - RNA, 75 nt, Human
uggaaagcggaguuccuaacaggauaaaaguucccccaucaguucccccaguaccuccaagcaaguagcuuucca

SEQ ID NO: 7025 - RNA, 74 nt, Human
uggaauaaagucacaugaaaacaaaacacaacuauauauauuuucaguuuguuugccuuauugauguuuuucca

SEQ ID NO: 7026 - RNA, 94 nt, Human
uggacagcauugagagcuuucgugagucugacauuaacagauggccuauuggugauacugugucuccagggcuauacgggcucugaaauugcca

SEQ ID NO: 7027 - RNA, 81 nt, Human
uggacuaagaacgauggcugguuucaugcaaaaaggaaacauaaucuuguuuaugauacuggcuuuuguaauccuggucca

SEQ ID NO: 7028 - RNA, 101 nt, Human
uggacuaggacccuggaggcagaaauaguuaccgaggggaaguuacaggccugagugugagucccuguuugguugcugaugagcuuugagguccuuggcca

SEQ ID NO: 7029 - RNA, 74 nt, Human
uggacuucauuuucuuucacgcugcugcuugcccaguggguguagacagcaagaaaaugaagaaaaucagucca

SEQ ID NO: 7030 - RNA, 102 nt, Human
uggacuuggcccacauccaggcuacccccagcccgcuucuucccugcuuagcccagggaggaaacauuaaaggugaugggggcagccgggagggagggucca

SEQ ID NO: 7031 - RNA, 85 nt, Human
uggagaaggacuucauuggcuuucugcucuucaacgccacacaacguguccuuggagaagacagcacaauggggcucuaucuuca

SEQ ID NO: 7032 - RNA, 68 nt, Human
uggagagcuggcggggcgaagaguagggucuaugucugccaacucuaacagccugcccgugcuuucca

SEQ ID NO: 7033 - RNA, 74 nt, Human
uggagcucagcccagguuccagcucaauugaagaaucuccuccuuccacuggaaaccuccuuggcuggguucca

SEQ ID NO: 7034 - RNA, 96 nt, Human
uggaggaaugggagcuaugggcaaauacugggagcuggcuggaugccaggauacagcagccaucugccaucauuacccuagcuucaggauccucua

SEQ ID NO: 7035 - RNA, 105 nt, Human
uggaggcugacaucuccauguauggcaaagaggagcuccuacaagguuguggaaagccaugaagaaaccuccuuuuugaaaggaccaacaggaaaaagcuuacca

SEQ ID NO: 7036 - RNA, 69 nt, Human
uggagguagagcucaucaccagguuccucccgaugcucauguccuuccugguggaugacuacacuuuca

SEQ ID NO: 7037 - RNA, 69 nt, Human
uggaguaccuucuacugccucagugggcaaauccaaaaccccauuaguggcaaggaagaaaguguuccg

SEQ ID NO: 7038 - RNA, 112 nt, Human
uggagucucguucugucaccaaggcuggagcacaacaucagcucacugcaaccucugccucccagguucaagugauucuccugcuucagccucccaaguagcugggacuaca

SEQ ID NO: 7039 - RNA, 62 nt, Human
uggauaauugggugccauuaacacaaacaggucacaauccugcuguuuucuagcccugucca

SEQ ID NO: 7040 - RNA, 71 nt, Human
uggaugcagcuaugaaugcaaggccacacaagguggauggaagaguguggaaccaaagagagcugucucca

SEQ ID NO: 7041 - RNA, 78 nt, Human
uggaugguuuuagccauagauuacacugcagaagaaaauauuaacugaccucggcggcauagcaauggcaacuaucca

SEQ ID NO: 7042 - RNA, 79 nt, Human
uggauucuggauauauuauaaugagugacacuuugacagcggaugucauuggucgaagaguugaaguuaauggagaaca

SEQ ID NO: 7043 - RNA, 98 nt, Human
uggauuuuuacaucuuaccaaauauggagagcuuuggccauuauuucuuuggcuauucuuuugccucuuuuucucucuccuauuuuucuguaauucca

SEQ ID NO: 7044 - RNA, 78 nt, Human
uggauuuuuauggacucuuuauuaggguauuaagauauugaaaauaauacacguaaaccacaaaagaguagcauucca

SEQ ID NO: 7045 - RNA, 88 nt, Human
uggcaaguuacaccuaaccccuggcuccauggagguuacagugcacacagcaacuaccuccuaguggggguuuaguacauauuuguua

SEQ ID NO: 7046 - RNA, 84 nt, Human
uggcacagauccucgaacaauucuuaaagauuuauugccggaaacaauaccuccaccugaguuggaugauaugacacuguggca

SEQ ID NO: 7047 - RNA, 74 nt, Human
uggcaggacccgcuggugcuggacggagcagcugaccacagacugagauccucaucacgggacaccuuccgcca

SEQ ID NO: 7048 - RNA, 78 nt, Human
uggcaucacagucacauuugaagcgguucccucaggaaaaggacuggguugaacaguuugaauuggcugugguaucca

SEQ ID NO: 7049 - RNA, 85 nt, Human
uggcaucccagauguugcaguugaagucgucguagccagcgagcagcagccguccgcugcgcgagaaggcaacagagggaugcca

SEQ ID NO: 7050 - RNA, 63 nt, Human
uggcauuuuuauggucaucucuggagucccuuugauucaagaaauuauaccucuaggaugcca

SEQ ID NO: 7051 - RNA, 70 nt, Human
uggccagcaguuuuuaggucugucaguacugcacugcaagaauggcagauuuugggaucucugcuggcca

SEQ ID NO: 7052 - RNA, 69 nt, Human
uggccaggugguggcuccugcagccuggagcugaugugcaguggccucugugagccccagccugagcca

SEQ ID NO: 7053 - RNA, 63 nt, Human
uggccauuuguaucacucauucugccuacaaaacaaagaaugcacuguggaauuugagggcca

SEQ ID NO: 7054 - RNA, 101 nt, Human
uggcccucccugccugcuuauguauggacagaguauguugucucagcuuccuccgagagagacuggugguuuagcuucugucuacacaggcagaagggcua

SEQ ID NO: 7055 - RNA, 95 nt, Human
uggccgggcgcgguggcucaagccuguaaucccagcacuuugggaggccgagguggguggaucacaagguccggagauugagaccauccuggcua

SEQ ID NO: 7056 - RNA, 69 nt, Human
uggccucccacccagcucagagaccuggugaggaccacccauaagggcugugcagaggguuagaggcca

SEQ ID NO: 7057 - RNA, 73 nt, Human
uggccucucugugcuuccauuuccccaucuguaagauaggaauaacacaucucacaggagcauggagaggcua

SEQ ID NO: 7058 - RNA, 95 nt, Human
uggccucugggacucagauuccuccucuuuaaaauggugcuaauaauagcacccacccucugugaggaggaugcugugaggacaaaaugagauca

SEQ ID NO: 7059 - RNA, 74 nt, Human
uggccuugagccacugcuucuccgucagugagucgcuguaguccaccuccuugcgguggcgggagccacggccg

SEQ ID NO: 7060 - RNA, 71 nt, Human
uggccuuuaacugaccuaaagaggugugugugauuuaauuuuuucccguuccuuuuucuucaguaaaccca

SEQ ID NO: 7061 - RNA, 75 nt, Human
uggcuaaauucgugauccgcccagccaugccgccgacugcagugacauacugcggcugaucaaaggagcuggcua

SEQ ID NO: 7062 - RNA, 95 nt, Human
uggcuacacuaaaaaaugaccugggaagccaaaggucagcucaaaagagaauuugauuaauuccugguuuuccagacgauuguuugguggacaca

SEQ ID NO: 7063 - RNA, 73 nt, Human
uggcugacuggggcuggggugagagaggaaagaccuacauuuccucuccugccagaugcccuuuggaaagcca

SEQ ID NO: 7064 - RNA, 69 nt, Human
uggcugaugggcaagggggcaaaguccggacaucuuuggugcaaagacucccccugacccaccaggcca

SEQ ID NO: 7065 - RNA, 99 nt, Human
uggcugcaugauaguaagaguauggcugagccugucuugcagaucauccaguaccuguacaggccaggcuacacuguucuccagcacucucuguagcca

SEQ ID NO: 7066 - RNA, 75 nt, Human
uggcugguccuacuucucugccccaccaaugggggacuugaauguggcagagaauacagucagucagggcagcca

SEQ ID NO: 7067 - RNA, 73 nt, Human
uggcugucuucccccucaguguuuaggaacgucuccaagacgucugaagacaaccuugaggagggagcaguua

SEQ ID NO: 7068 - RNA, 66 nt, Human
uggcuguggugucuggguguggccuggggcucccucugcaggggccccccucggcagccacagcca

SEQ ID NO: 7069 - RNA, 83 nt, Human
uggcuuuaucucuugccuugaccuccuacauuaucaacaaagugagaguuuaagaucuccugggcaggagauuucagaagcca

SEQ ID NO: 7070 - RNA, 77 nt, Human
ugggaaaucugcuuccuagggcuguuagaaggaaauuggucuccuuaaauuacgucagcaucugaggcaguuuccua

SEQ ID NO: 7071 - RNA, 92 nt, Human
ugggaaggcuuucgcagacaugaugggcaagguggacgucugaaaguggugcaaccuguccgaguucaucguguacuaugagaguuucacca

SEQ ID NO: 7072 - RNA, 81 nt, Human
ugggaaggugacauuuggcuuccugauuacgggagggaguugguuaucucagguggagcaggaaagccugguugauucuca

SEQ ID NO: 7073 - RNA, 87 nt, Human
ugggaauacacccugcuuuuaaaggcucccagagccugaggaagaaagugaccaggcuuaggggagccggagcggcagggauuuccg

SEQ ID NO: 7074 - RNA, 73 nt, Human
ugggaauguguggggggcuuccaugggcacaugauccucaagggcauucuagcccauuaggcucccaguccca

SEQ ID NO: 7075 - RNA, 99 nt, Human
ugggaauguuuacugaauuagcuauucuauacucuaaauuuaagccucagaaaaugagggagcaccuggagcuguucuggucuagagugaauauuccca

SEQ ID NO: 7076 - RNA, 88 nt, Human
ugggacugcugagauguccucuauucuugaagagcguauucuuggagcugauaccucuguugaucuugaagaaacugggcgugucuua

SEQ ID NO: 7077 - RNA, 82 nt, Human
ugggagggcaagagaggaagagauggcagcuuuuuaagugaaauuuuaaucuuaucuaucuuuuguucauuuugagucccca

SEQ ID NO: 7078 - RNA, 80 nt, Human
ugggauggcaaaguuuguuggcucagacuguugcuaacaggaacucugaagcccgggcuuucaagccagaaacaaucuca

SEQ ID NO: 7079 - RNA, 107 nt, Human
ugggauuacagacaugagccacugugcccagccagggcuguguguuauguagugacagcucacugauacagcucucucuggggacuuaggaaccaaguuugacccca

SEQ ID NO: 7080 - RNA, 104 nt, Human
ugggcaaaaagugagaaaguaagacugugggaggugacuguuacagaucggaaaacucugauugaaccauucacuuuauuagccaguaaacuuucucaacccca

SEQ ID NO: 7081 - RNA, 105 nt, Human
ugggcaaggauuggcaccggcccugccugcgcugcgagcgcugcgggaagacacugacccccggcgggcacgcggagcacgacggccaugcccuuacuugccaca

SEQ ID NO: 7082 - RNA, 77 nt, Human
ugggcaucaucuccuccagggacauugauuuucucaaagaggaggaacaugacuguuucuuggaagagauaaugaca

SEQ ID NO: 7083 - RNA, 73 nt, Human
ugggcccacugugagagcccccccuuugggagagaaaagucucagagagggggaaguguggacaagaggccca

SEQ ID NO: 7084 - RNA, 75 nt, Human
ugggccuguuguggaguacgcuuuggacugagaagcaucgaggcuauaggacgcagcuguugccaugacggccca

SEQ ID NO: 7085 - RNA, 82 nt, Human
ugggcgccuguaaucucagcuacuugggaggcugagacagagaauugcuugaacccaggaggcggagguugcagugagccua

SEQ ID NO: 7086 - RNA, 113 nt, Human
ugggcugagggaaagcauguccacaccaggugcccagacaucugguuggcuuuggcugauuuguccugcaggcaccugccuugucuggauuugcacacuuuccaaguugccca

SEQ ID NO: 7087 - RNA, 78 nt, Human
ugggcuuaacucagggagacuuuguacauuucaggcaauuacgcuuuuggacgcaagguuuuaucucaggcaagcgca

SEQ ID NO: 7088 - RNA, 82 nt, Human
uggggaaaaggucagaaagaccuccugacuccauguuacaguagacaaaacaaguuggacucuuuuggaccuauaaacccua

SEQ ID NO: 7089 - RNA, 61 nt, Human
uggggcacugaggcccgggauguaggcacuggacagcagcaacccaggcaucugugcccca

SEQ ID NO: 7090 - RNA, 61 nt, Human
uggggcacugaggcccgggauguaugcacuggacagcagcaacccaggcauuugugcccca

SEQ ID NO: 7091 - RNA, 65 nt, Human
uggggccaauuuuguaacucagaucuugcugagaccaggagcaucugauuuaacaggaaguuuca

SEQ ID NO: 7092 - RNA, 80 nt, Human
uggggccuuccgguucacagcgaauuacugguuaaccaauugacaaaaaguagaaugcuguaaaaacuguuaggugccca

SEQ ID NO: 7093 - RNA, 77 nt, Human
uggggcuugcacugccuucucaggccagcuauacccuagcugagcaaagaacugaagaagcaaguguccacucccca

SEQ ID NO: 7094 - RNA, 77 nt, Human
ugggggagcgagggaaggaguuaaugaaacuguauugcacaaugcucugaucaauccuucuuuuucucuuuugccca

SEQ ID NO: 7095 - RNA, 77 nt, Human
ugggggagcgggggaaggaguuaaugaaacuguauugcacaaugcucugaucaauccuucuuuuucucuuuugccca

SEQ ID NO: 7096 - RNA, 73 nt, Human
ugggggcuguggcagggccgccugccugggguucccuuacucaucugguaguucaugcaggccacggcccuca

SEQ ID NO: 7097 - RNA, 97 nt, Human
uggggggaugaccaguacagacaugccaguuaaguuuauacuagugggaucccaaauccaaagcaguguacguggugauauggucagugacuaacca

SEQ ID NO: 7098 - RNA, 65 nt, Human
uggggguccugccccuggagggccuuauggaccaccagcugguggagggcccuauggacacccca

SEQ ID NO: 7099 - RNA, 63 nt, Human
uggggguccugccccuggagggccuuggaccaccagcugguggagggcccuauggacacccca

SEQ ID NO: 7100 - RNA, 75 nt, Human
ugggguauuaccagguuaagaggcugcccgucccccuggaugcucagcaggcugaacccagaaggguaagcccca

SEQ ID NO: 7101 - RNA, 76 nt, Human
uggggugacgccgccuagccucagucacucugggaaccgccagcgcccucccaguggagcaggcucagucacucca

SEQ ID NO: 7102 - RNA, 67 nt, Human
ugggguuccacuuucuggugugguuccuuugugucaaaggaaucagggacacacaguguggguucca

SEQ ID NO: 7103 - RNA, 73 nt, Human
uggguagcagggugaucuaacauuauacauccuggaaguuguuugaugcaagaaaggccucucuugcugucca

SEQ ID NO: 7104 - RNA, 93 nt, Human
ugggucaucuugcuucucaaauuaccuguugccacuuggaauauauaucgauacauuauggugcccgacgggaacaugggaguguuugaucca

SEQ ID NO: 7105 - RNA, 86 nt, Human
uggguccaggaucuuggaaugguaucccaugguucaaucuucuggauucaaccacauaaauuuaccccacccaugucguggaccca

SEQ ID NO: 7106 - RNA, 106 nt, Human
ugggucccagauucuuccugguggaggcauucggagagcaacacccuggccuuaacacacuacauaucuuugaauuucacacgggggcagccuucugggaaaacca

SEQ ID NO: 7107 - RNA, 87 nt, Human
ugggucccggugaugggaaggguaucagguugccggggaguuuccacucuucucuggugauuguuccuucccucccuuccucuccca

SEQ ID NO: 7108 - RNA, 105 nt, Human
ugggugaggaacagguagagaaguguaagugagacaaacuucccugccauuugccaaaguggcagcacauaauguaucaugagugccucuacccucugauaucca

SEQ ID NO: 7109 - RNA, 94 nt, Human
uggguucuguggccacugcuggaccaaggacguggaugagccuccccuagucacucauccaucccacuggcuccagagauggucacaugaccca

SEQ ID NO: 7110 - RNA, 70 nt, Human
uggguugcgcgcgcgucgacgacagcaagcgccccggggcguguagaaacaacgcgcagcacgcauccca

SEQ ID NO: 7111 - RNA, 81 nt, Human
uggguuuugaauuugcaguaacaggugugagcauucuagcagcaguuugaugaucauguaugauacugcaaacaggaccua

SEQ ID NO: 7112 - RNA, 109 nt, Human
ugguaccuuauuauugaaaaucagauaaacuuugguuggguggguauuuggaggaaucuuuuaagucuuuucuuaagcaaaguuuggacauucuaaaauaagguugcca

SEQ ID NO: 7113 - RNA, 80 nt, Human
ugguauuugugcgcaaucugcugcuagcccccugccucuuucugguacugggauuuuuguauuauucugcguggaagcua

SEQ ID NO: 7114 - RNA, 78 nt, Human
ugguccaauaagcagccuaagcuuucauucucaucccaagaagggacaggagucuuggcccagaggcuguggggacca

SEQ ID NO: 7115 - RNA, 107 nt, Human
ugguccaugagaauugacgauaaauaggaauugccuuggcaaaaugucagucugagaaguuucucucugacauccugggcauccuucuuuuuguccuucccauccca

SEQ ID NO: 7116 - RNA, 78 nt, Human
uggugaauuaucauuuauuuuguacuguguuaggcagcucuguaguugcuacauuuaaccaaauaagucaauuugcua

SEQ ID NO: 7117 - RNA, 97 nt, Human
uggugacugauuccaaaucuaccagcuaacacauccaccaccacugcgggcaggcaagugacuagaaggcaaguuguggacuuggccucagggacca

SEQ ID NO: 7118 - RNA, 76 nt, Human
uggugaggagacaccgggcuguuuauacugauuguucuauaacaggugaagaaacaaccuugguguguucucacua

SEQ ID NO: 7119 - RNA, 73 nt, Human
uggugcagcagaccuguaaaugucuucaaauucauuauuccucagaucgucaaguacaguccugauugcauca

SEQ ID NO: 7120 - RNA, 103 nt, Human
uggugggacacagagccagugacugacauagaagagcagugggguagaauuacaguuccaucuggugccuuuucucugagcaaagcuguauccaucaccacca

SEQ ID NO: 7121 - RNA, 78 nt, Human
uggugguggcagacuuugggcugucacggcucauaauggaagagaggaaaagggcccccauggagaaggccaccccca

SEQ ID NO: 7122 - RNA, 113 nt, Human
ugguucauaauauuccuugcagauguugaacgaugggcuggauuguuuuggaaccuuguuccagcagagcccauguguucaugaagaaaacauuugcuuacagcuuaugacua

SEQ ID NO: 7123 - RNA, 72 nt, Human
ugguucuggagaugagcauuggggcgccggaagcccagcaacgccuggcccugagugagcaccugguuacca

SEQ ID NO: 7124 - RNA, 61 nt, Human
ugguucuguuuaccuugauuagugaaguaauuugcugcaguguuacagaggagcagaauca

SEQ ID NO: 7125 - RNA, 106 nt, Human
ugguugcaaggcaggaaauauuggugaaaugcuagcaaagucacaauuucuacucugaacaugauuugcaguguucaucaguauuuuucugaacccugcuuuacca

SEQ ID NO: 7126 - RNA, 111 nt, Human
ugguuggcucucucugacuucugcuggccauuuucuucauggcuagaaggcuucagaacaagaggcuggaaaaucagaagagcguggucaucaccucagcaugagccacca

SEQ ID NO: 7127 - RNA, 74 nt, Human
ugguuucauuaaaauguguaagguuggcugggugcaguaacucaugccuguaaucccagcauuuuaggagacca

SEQ ID NO: 7128 - RNA, 78 nt, Human
uguaagucaugacuguuaucacaggggagagagauuaggcucaacucugaauacagugaagacaauuggggauuuaua

SEQ ID NO: 7129 - RNA, 66 nt, Human
uguaaugauuggugccuguuuccucauugacuucauguuuuuugaaagcacuggcagccaggaaca

SEQ ID NO: 7130 - RNA, 69 nt, Human
uguacaauggcgauuauguucuguaccuguaacggcuauuugcaaagcagauacuugagccauugugca

SEQ ID NO: 7131 - RNA, 113 nt, Human
uguacagaguuggaaaguaagaccauggcauauacagaaggaaagagcacaguguuaaggcucaggaaucaguacaagucaucagggucagcauucucccacuuucaagugca

SEQ ID NO: 7132 - RNA, 91 nt, Human
uguacauacuuucgccuaaaacaguucuguauauucuuuuguuaacgggguagcaaaagcauauaaaaagguuuuggggggaugcagugca

SEQ ID NO: 7133 - RNA, 75 nt, Human
uguaguaacgcccuuuucccagugauaugagcacagguuuuuccagcuccaugagcaccuggaaggcguuauuca

SEQ ID NO: 7134 - RNA, 67 nt, Human
uguagucucagcuacucuagaaggcuaaggcaggaggauugcuugagcccaggagguggaggcugca

SEQ ID NO: 7135 - RNA, 73 nt, Human
uguauaugcauuuguuauuuauauugaaaacauuccauuguuccuugcaguauagaaggcaaaugcaauuaua

SEQ ID NO: 7136 - RNA, 75 nt, Human
uguaugcauuuccucugguuuuauuauucaaauuaagaaaauacuuaaaaauuuuuugguaacagcuugcaugca

SEQ ID NO: 7137 - RNA, 101 nt, Human
uguauuauucaacuuuaaucuuuugcgaaauguuguauuuacugcuuaaaaucuagguggguggauauauucauguaugcauauauugauagauuaauaca

SEQ ID NO: 7138 - RNA, 76 nt, Human
ugucacagugggauuugguggaaaacuauuuggcagcagauggaaaaucuacaacauggagugucagacugggaca

SEQ ID NO: 7139 - RNA, 80 nt, Human
ugucaccauccucugcauugacuugggcacugacaugguuccugccaucucccuggcuuaugagcaggcugagagugaca

SEQ ID NO: 7140 - RNA, 93 nt, Human
ugucaccauccuucaagcugagacuccuggugagccuuugccaccaugaaaaccacauagcugaccagggcugugcuugagguacagaggaca

SEQ ID NO: 7141 - RNA, 62 nt, Human
uguccagcaacuucaucacuggggcacaaugagcuguucuucacauuugaguguccuggaca

SEQ ID NO: 7142 - RNA, 81 nt, Human
ugucccagcaagagugccgguuagucaguguuuguugaaaauacaguagaaaagcugauucugguuaucucuuuaaggaca

SEQ ID NO: 7143 - RNA, 74 nt, Human
ugucccauagagcuuuugcauccucuggauguauugcgaaagaaauguccagacuuugagggcuacaggguaca

SEQ ID NO: 7144 - RNA, 71 nt, Human
ugucccuugcaagggugacaggccgcugccggcucugugcugguacggcucaucccuugcacccaggggca

SEQ ID NO: 7145 - RNA, 95 nt, Human
uguccgguucugguggcucaugccuguaaucccagcauuuugggaggccgagaugggcggaucacgaggucaggaaguuaagaccauccugggca

SEQ ID NO: 7146 - RNA, 61 nt, Human
uguccucucuugacuucucagagaacagaagggguuccugagcagguagccuggggggaca

SEQ ID NO: 7147 - RNA, 85 nt, Human
uguccuugauuauuuguuaaaaucugcuagaaaaguaacaggaauguuaucaagccuuucuagacauuuugaacacaaucugaca

SEQ ID NO: 7148 - RNA, 78 nt, Human
ugucgacuccucaugcuggacuugucuuucggguucuuuguagcccaggggagcaucaaaguccacguucaugucaca

SEQ ID NO: 7149 - RNA, 101 nt, Human
ugucgaugucuccucaccugaugaaaaaucaguaauaacuuacgugucaucucucuaugaugcauuuccuaaagucccugaagguggggaaggcauuggug

SEQ ID NO: 7150 - RNA, 98 nt, Human
ugucggcuuugcuggcccagcaagccugauaagcaugaagcucuuaucuuugguggcuguggucggguguuugcuggugcccccagcugaagccaaca

SEQ ID NO: 7151 - RNA, 95 nt, Human
ugucuaccccauguuuggucuuucaagagugcauugcguguggcaugagauguacauagcuucauguuuguuucuaaugaagguggggauggaua

SEQ ID NO: 7152 - RNA, 111 nt, Human
ugucuauagaguaugugggccauuuucugcccguaaaauguucaaauguuuucucucucuaaagcuuuguucauuguaucugguggaauuuugguucucagggaguagaca

SEQ ID NO: 7153 - RNA, 88 nt, Human
ugucugcaagauuccgauuaaugcuauuuuuaugguuccaaauuuaagauagacaauagcugaucauaauagggaacacuuacagaca

SEQ ID NO: 7154 - RNA, 69 nt, Human
ugucuggugauuaguucugugacuguguuuuaccugggccagcaugccauggaaugccaucaccggaua

SEQ ID NO: 7155 - RNA, 64 nt, Human
ugucuguggcaaaaguuuaaucagaggaaauucuuucccagucugucgauuuaugccucagcca

SEQ ID NO: 7156 - RNA, 69 nt, Human
ugucuuaaccaauuugggggcaggguggggucucaagccuuuggccccugugacuccaaguauaaggca

SEQ ID NO: 7157 - RNA, 109 nt, Human
ugucuucucagguagcagggcgcguuuccacuuaaggugugucugucacgcaccucauucuccccagacagucuuugaguaacaucuguucccaucuuccuuggaagca

SEQ ID NO: 7158 - RNA, 75 nt, Human
ugucuuggaaaggccaaagagaaugcacuguauacugccauuguaucaaauguuuugggcaccuuuuucagggca

SEQ ID NO: 7159 - RNA, 75 nt, Human
ugucuuuuuauuugguccaaccccugcuuuacugcucaugcugcuuaaagcaggagggacuagagaaacaaggca

SEQ ID NO: 7160 - RNA, 95 nt, Human
ugugaaaccauuaugcagaugaagaagaugaagcccgagagguuaugaaacagacccaagugggcucgcucuucagucucggcauaaggaauccg

SEQ ID NO: 7161 - RNA, 91 nt, Human
ugugaagacagugagaacaaguuugacuuuucagugauguccuauaauauacuuucacaagauuuacuggaagauaacucucaccuuuaua

SEQ ID NO: 7162 - RNA, 73 nt, Human
ugugaagcaacugaagaaaauguuugaagcaacaagauugcuugcaacaauuguuaugcuuuuguguuucaua

SEQ ID NO: 7163 - RNA, 82 nt, Human
ugugaauaaaacuuuuaauaauguacagcagaaauugggcaggcucauucuuauauuaaaacaaaagauuuccuauauuaca

SEQ ID NO: 7164 - RNA, 64 nt, Human
ugugaaugggaagugguuaaagccugaacacagaaauucagugccuugccaggaucccaucaca

SEQ ID NO: 7165 - RNA, 63 nt, Human
ugugaccuccaccaaaagggcaaauacagacuaucccguuuuauccccguguguguuggcaua

SEQ ID NO: 7166 - RNA, 89 nt, Human
ugugagcaugugugugugcauguaccggggaaugaaggugaacauacaccucugugugugcacugcagacacgccccaguguguccaca

SEQ ID NO: 7167 - RNA, 103 nt, Human
ugugagcuccugaggagucaggccugagucugugggucaucuagcacauccuuaauagaaugauugccuggaugugaccacccucacccccaacccucacaca

SEQ ID NO: 7168 - RNA, 93 nt, Human
ugugaggacaugagauuuggaggggcuggaguggaaugauaugguuuggcucuguguccucacccaaaucucaucuugaauuguauucccaua

SEQ ID NO: 7169 - RNA, 128 nt, Human
ugugauacaagugugaguuacaucauagucuauuucuugcuaaggccaaaguagaggaagucgagguaaauuugcaaaugcuauuugagccaguggccauggaaauaauuaugcucacauucuucaca

SEQ ID NO: 7170 - RNA, 74 nt, Human
ugugauccuggcccggagcaccuccaugccucagcuuggcgagaggucuggggugauccgggugaagcaauaca

SEQ ID NO: 7171 - RNA, 100 nt, Human
ugugauuccucagccagagcaaccucucuaugccaaguacaggcacugcucagggagaaggagagugcugaacggcaagggugcagguggagggauggca

SEQ ID NO: 7172 - RNA, 92 nt, Human
ugugcaaggugaggacaggccccgaaugcuuaugaugcuuucacagaaugugucauaccgugccucgggguugaccacauagugcuugcaca

SEQ ID NO: 7173 - RNA, 84 nt, Human
ugugcaaucccuaauauaauguaaaugcuauguaaucguuguuauacuguauuguuuuuauuuguauuauguuuuauugucaua

SEQ ID NO: 7174 - RNA, 86 nt, Human
ugugcaucccagcaguaagcaacaauggcugauccagaagguacagacggggagggcacggguuguaacggcugguuuuauguaca

SEQ ID NO: 7175 - RNA, 65 nt, Human
ugugcauuuucagcaacuugccaaguauaauuuuccugauaaaggcugggcugcugauauguaua

SEQ ID NO: 7176 - RNA, 67 nt, Human
ugugcgcuucuacuuccucacucguguuuacuccgaguaccuugaggauguucuggaagagcugaca

SEQ ID NO: 7177 - RNA, 76 nt, Human
ugugcugcugggaaggaucuuuggccuaggggaugacuuaguuuauucaaagcuuuucuuaagcccuuucaguaca

SEQ ID NO: 7178 - RNA, 103 nt, Human
uguggaagagaaauggaagucggcucccauugcggcagacaucauggcuuccaagcuucgcugcucuugggcuccgaaacaguauccauuggcuuuauccaca

SEQ ID NO: 7179 - RNA, 60 nt, Human
uguggaggaggaugacgaugaugagcuggacagcaagcucaauuauaagccuccaccaca

SEQ ID NO: 7180 - RNA, 79 nt, Human
uguggggaucuggugcugugguucugcaugaagacaguaacggugucuucauccaggaaccacauugucuggaccuaca

SEQ ID NO: 7181 - RNA, 61 nt, Human
uguggggugcccccgaugggaggcugucccaucucccaguccccaucucuuuuuccccaca

SEQ ID NO: 7182 - RNA, 82 nt, Human
ugugguacuucaggaacucuuuuucaaacucacaucacaguacaucuggagauugucuaagaggcagccuccugacaccaca

SEQ ID NO: 7183 - RNA, 98 nt, Human
uguggugccugguggagaccuggccaagguacagagagcugugugcaugcugagcaacaccacagccauugcugaggccugggcucgccuggaccaca

SEQ ID NO: 7184 - RNA, 92 nt, Human
uguguaccggcacgcccaccgaggcucuggcguccuuuugacuacauuuguccgggagggcaaggucgagccguuggagggugccguggcca

SEQ ID NO: 7185 - RNA, 90 nt, Human
ugugucagucaggauaggucaacugcuguaacaaacagcccucaaaucucaguggcugaacaccauacagcucugcuucuggcucacaca

SEQ ID NO: 7186 - RNA, 61 nt, Human
uguguccuugacuaaaaccauacguggcuauggaaaccauguuuguaguucugaauacaca

SEQ ID NO: 7187 - RNA, 70 nt, Human
ugugucgcgcgggucaaccuggccacgugcucccuagguccaugcgcgguugggugcgccugccggccca

SEQ ID NO: 7188 - RNA, 73 nt, Human
uguguggggagagcucucccaccacacagagugugccugugaaacucugucucuucucuguucuccccccaca

SEQ ID NO: 7189 - RNA, 73 nt, Human
ugugugugaugagaacauguuugggccaauuaagauauuauacuucacaaauacuugcuuuauauuuacacca

SEQ ID NO: 7190 - RNA, 70 nt, Human
uguguguguaugugugugagugagauggguagcgggggugcuaucaugucgcccacgcgggucacgaacg

SEQ ID NO: 7191 - RNA, 74 nt, Human
uguguuccgugacuggcuccccagcaaucucaccagaugugcuuagauuuggguggacucagucacgcugccca

SEQ ID NO: 7192 - RNA, 70 nt, Human
uguguugaugcauuuucacuucuguggucauaggaaauggacuggucuaaagagagugaggcgcaacaca

SEQ ID NO: 7193 - RNA, 72 nt, Human
uguguuggcaaaggcuguuaauaguaguuaaguguuaagacugcuuuucuuuaacguuuucaugguaaugca

SEQ ID NO: 7194 - RNA, 89 nt, Human
uguuaagaagugaggggcaggaugaaaucaccuaggguagguauuuagagggagggcgccgugcaaaauaaaauccucacuaugaaaca

SEQ ID NO: 7195 - RNA, 77 nt, Human
uguuacaggaggcagaaagaaaugauuuagguagacgggguaaagccaguccccagcagaaaauuugccuuuuaaca

SEQ ID NO: 7196 - RNA, 110 nt, Human
uguuauuauuuauuucuuuuaauacaaagcuuuggcauuagcaguuuuaugagaaaauaaaaugugcgaaaaauaaaugcuuguguggcaugauugguaaaugaugcaca

SEQ ID NO: 7197 - RNA, 73 nt, Human
uguucauaaucccaaacaagggcccugcuggcagcaacaggacagguggggccaggacagggaagcuggagca

SEQ ID NO: 7198 - RNA, 119 nt, Human
uguuccucuaagguugucauaauaagugcaucauuaccaaguauuacagcagguacugguuugcaucagggcugcugacguugucugugggcauuguuaagaaaccaaucugggaaaca

SEQ ID NO: 7199 - RNA, 110 nt, Human
uguucucucauuacgggacugaaaauguaugcugucuuacaugaaugcaguugguaaacuguggauuuacuugagaagcuuugcauuguuaaguuuuccaugaaagagca

SEQ ID NO: 7200 - RNA, 108 nt, Human
uguucuugcuaccaaggcucucaaccaccaugauugcgcuagcacagccucgcgauagucacgcuucacggcgcaucguggggaugacugagcacggaggcgaggaca

SEQ ID NO: 7201 - RNA, 76 nt, Human
uguucuuggugagaagggccggcggauucgggaacugacugcuguaguucagaagagguuggcuuuccagagggca

SEQ ID NO: 7202 - RNA, 83 nt, Human
uguucuuguguucuuugccuuauucaucauuuuuaaggcuuaucuaauuaacuguguuuggaacugguauaaauacaucaaca

SEQ ID NO: 7203 - RNA, 85 nt, Human
uguugaaaacaaauacuguuucauuuguugaaaacaaauacugugucauuuguuuucagacagcaaacagaaugauucuuugaca

SEQ ID NO: 7204 - RNA, 73 nt, Human
uguugcuauuuccuaaccugcaggcagaaccugaaagggcauuuuggcuccggggcauccuggauuuagaaca

SEQ ID NO: 7205 - RNA, 72 nt, Human
uguugcugagugagucuuucuagccaggacaagcugauuggaauuuuugaaugguagagaagaaacagcaca

SEQ ID NO: 7206 - RNA, 119 nt, Human
uguuggcauuuggagaggaagcacuguacuauauaccacaguguacugcccauagcuggauacacuguaggaacuuaguaaauauuuguugaguugucuggagaaaaaaaggaccaaua

SEQ ID NO: 7207 - RNA, 84 nt, Human
uguugugguggaugcacugaguggccugagggugaccuugcuggacguuacuauaggcucauugagaugacagaugcugcagca

SEQ ID NO: 7208 - RNA, 82 nt, Human
uguuuaacuuuguaagaugcaaagagguuggaucaaguuuaaaugacugugcugccccuuucacaucaaagaauacuggaca

SEQ ID NO: 7209 - RNA, 101 nt, Human
uguuuaggucgggggaaaggaaggggcugacaaccgcagacaucuggacaccagcaaggguccaggggagguuugcagaacuucuuuguccuuggcuaaca

SEQ ID NO: 7210 - RNA, 68 nt, Human
uguuucaugacugguaacagaguagucucgaggggauccuuggagaaccuguucugacuuuagaagca

SEQ ID NO: 7211 - RNA, 81 nt, Human
uguuuugaaagaagagaaauaugggucuguuccgcuggcucacggaggucagaguuaagguuaucucucuuguucuaaaca

SEQ ID NO: 7212 - RNA, 85 nt, Human
uguuuuucuccucauccuguaccucuuuuuucauuaagaauccugccuggaaguuuaggucaaagaggcugcuuggagcaaaaua

SEQ ID NO: 7213 - RNA, 109 nt, Human
uuaaaucugggaacagccaaaccuuggaucaauucugugugcuuaagaaacuugaguuucauuaaggcguggaauuuguguaauuggaauucauauucccagcauuuaa

SEQ ID NO: 7214 - RNA, 77 nt, Human
uuaacagguaaaugagaagagcauuguggacauuauuggcuguccccaauaaaaugcuguucauuaugcacuguuaa

SEQ ID NO: 7215 - RNA, 88 nt, Human
uuaagacccacucuguuuaaaaauauauauucuauguaugcguauauggaauugaaaugucauuauuguaaccuagaaagugccuuga

SEQ ID NO: 7216 - RNA, 68 nt, Human
uuaagcaucugcaauggugacuuccaccucaacuccuggcucaauacugauggaaguaaucugcuuaa

SEQ ID NO: 7217 - RNA, 89 nt, Human
uuaauaccaauagaagggcaaugcuuuuagauuaaaaugaaggugacuuaaacagcuuaaaguuuaguuuaaaaguuguaggugauuaa

SEQ ID NO: 7218 - RNA, 62 nt, Human
uuaaucauuaggaugucagcugacccuuguagaaagggcaaauugggaucuuggguuuuuaa

SEQ ID NO: 7219 - RNA, 119 nt, Human
uuaaucgccuugcagcacaucccccuuucgccagcuggcguaauagcgaagaggccccgaccgaucgcccuucccaacaguugcgcagccugaauggcgaauggaaauguaagcguuaa

SEQ ID NO: 7220 - RNA, 77 nt, Human
uuaaugguugauauugcuaggguggcgcuuccaauuaggugcaugaauagguggccugcaguaauguuagcgguuag

SEQ ID NO: 7221 - RNA, 104 nt, Human
uuacaagcuguguggcuguggacaaauuuaaugucuuugugacucgguuuuuauaaaucgggagcauucagaguagauguaagcacuacacagauuucuuguga

SEQ ID NO: 7222 - RNA, 97 nt, Human
uuacacacucgugauguaguucaucugugauugugaagccucagaauauucugguugacaagugaaucuccaugugggugacauuaagauuguguga

SEQ ID NO: 7223 - RNA, 71 nt, Human
uuacaggugguugcuuugaacuuuauuugagaaaaacagaagauaaauguaucaaaagaacacacaggugg

SEQ ID NO: 7224 - RNA, 71 nt, Human
uuacaugagaauguuauuugaauggaauuuucuuaacccagaagguaguauuuauaaucauuuacuuguag

SEQ ID NO: 7225 - RNA, 74 nt, Human
uuacauuuucuuuuacuaaaaaagagacauagaagccgaugagucuuuuuggaucuuggacaaagaaaaugugg

SEQ ID NO: 7226 - RNA, 80 nt, Human
uuaccacauggagcauuucacaguuucaaagaaguuuuccuuauuuuaaaacugcaagaaaaugcuacacuugaugguag

SEQ ID NO: 7227 - RNA, 62 nt, Human
uuaccuguuuagccuaugaauugaauugacuggccagauggggucaaucguuugacagguaa

SEQ ID NO: 7228 - RNA, 107 nt, Human
uuacucugaauuagaaacauguuuaugauaauccuauuagaaaauuugauugauugauuaaagugucuuuuugggucgacaucccuagcguuucugauccugaguaa

SEQ ID NO: 7229 - RNA, 71 nt, Human
uuacuguuuuauuuauaccaugcauagcucaaaaagagagauaaaaugaaguguuaacaggaagucaguaa

SEQ ID NO: 7230 - RNA, 80 nt, Human
uuagaaugcagauucucagcccccucccagacauggugaagucagaagcucucagggagggacucagcaaaugauucuaa

SEQ ID NO: 7231 - RNA, 82 nt, Human
uuagagauguuggaaguuguuguuuuuccugucuaaugucuuguauaucauuaggaaguuguccagaaacuugcgucucuga

SEQ ID NO: 7232 - RNA, 99 nt, Human
uuagauuggggcagguuaaggcaggcggccgaauuuggggcuaauugggccaauuggccuuauggggggccgaauaacauuuaauggcccgcgguuuaa

SEQ ID NO: 7233 - RNA, 89 nt, Human
uuagcaugaagucccucuggaucuugagcugguuuauggacucaaucgucucauggaucuuacuguccagagcacugaucuccugcugg

SEQ ID NO: 7234 - RNA, 68 nt, Human
uuaggauaacauugcugucggaggucacgcaagcuaacggcaagugugucuaucaguagugguccugg

SEQ ID NO: 7235 - RNA, 80 nt, Human
uuaggcauugaacacauucuuaaaaacacuggucuguaagaaacugguguuuugaaaaauuaaagugugucguagucuag

SEQ ID NO: 7236 - RNA, 73 nt, Human
uuaggcugaaacauaugaaauugcugcauuuguaguuuaaaaacugucagcaguuucauaugguuccaccuaa

SEQ ID NO: 7237 - RNA, 72 nt, Human
uuauaauauagagacuucaguagguauaaauaggaguuaccuauuuaauucucccagucaucaaugagguaa

SEQ ID NO: 7238 - RNA, 86 nt, Human
uuauacaaaauccucauugacgccacggacaaaggccauccucccauggcgggucauugcaccguuuuagugagaauuuuggauaa

SEQ ID NO: 7239 - RNA, 97 nt, Human
uuauacugcauauggugaacaugaggaggauguaaugcuaagugaaauaagaggacaaauaguguaucauucuccuuaugugaaguauccaguguag

SEQ ID NO: 7240 - RNA, 89 nt, Human
uuaucugguuacccagugguacaguucauauaggaagggcaggauaaaugcuugauucuuugcucuuguacacuaaguuuuuaagauaa

SEQ ID NO: 7241 - RNA, 96 nt, Human
uuaugauugggaaagaaugccaagaugguauuuucuuuuggcaagaugcuugguugugcagucauugaagauaacuuggcacuauuuucugcauag

SEQ ID NO: 7242 - RNA, 71 nt, Human
uuaugguaagcaaaauaaauuguauuuuuccauccuuggggaggauaaaggaacucuuugcacugcuauaa

SEQ ID NO: 7243 - RNA, 72 nt, Human
uuaugugaacacaauuuccccuucuguuaagacuauaaacuauaugaguauguguacugcauguuuacauaa

SEQ ID NO: 7244 - RNA, 107 nt, Human
uuauguuuuguuguuugauuuccuaguucauaacagaagggguuuuguaagcugaccuagcuugacaauccuuuuuggguuuuuugguuucaaacaugaucuuauaa

SEQ ID NO: 7245 - RNA, 96 nt, Human
uuauuccacuucggagaccgccccccuugucccucagaugcauccaaaucaggaguuagggaucauacuccacugugguccugaauuauagaauaa

SEQ ID NO: 7246 - RNA, 100 nt, Human
uuauuuaguaaacauucuuugagucuacacuauguacagaugugcugcuauguaguagcaaagauucaggaugugcccucaaggaaugucugucaaguaa

SEQ ID NO: 7247 - RNA, 83 nt, Human
uuauuucugccgcuaaaugaguuguaggaccuugggcugucucuuuuaccccugggucuuaguuugcucauugguaaaaauga

SEQ ID NO: 7248 - RNA, 131 nt, Human
uuauuugguuuguaagaauuuauuuuuaagggucaaggucauuuguaacauuuugugugugucaauucaaugcaauguuggcugccuuuugaagucuuugauauauuggugaauauucuucugaucuauaa

SEQ ID NO: 7249 - RNA, 92 nt, Human
uuauuuuugacaggaacuguuuuuaauccaugugguuagucuuuggcaacaagcugacugguggauauagaacgaggguugguuagcgguga

SEQ ID NO: 7250 - RNA, 86 nt, Human
uucaaacugggcucaguggcucacaccuauaauccaacacuuuggaaagcugaggugagaggaucacuugagcccacgaguucgag

SEQ ID NO: 7251 - RNA, 74 nt, Human
uucaagcgaaggucaagcuguaaacuuuaagacauguucacccuuaaaagugccacuuugaaugguuguuugaa

SEQ ID NO: 7252 - RNA, 101 nt, Human
gaaccgaugcacuggcaccuagacauguacaacaggaaccguguggauacaucccccacaccuguuucuuggcaugucauguguaugcagcucuucgguuu

SEQ ID NO: 7253 - RNA, 69 nt, Human
gaacugcucugcagaaaggucgcugcucaaguggcugcacucacaggcuagccuuucugcacugcuguc

SEQ ID NO: 7254 - RNA, 130 nt, Human
gaacuugcgagcugcagugccaggucaaccccuagcucugacugcccgugguggccccaaggacacccagcccagcuaucaccauggcaauggaccuuacaacgacguggacaucccuggcugcugguuu

SEQ ID NO: 7255 - RNA, 78 nt, Human
gaagaaagaccugcaccugccugauccgaugggcaaagguggccuuuggaaggggcguuguccaguuccucuuucuuc

SEQ ID NO: 7256 - RNA, 79 nt, Human
gaagaacgaguaaccugaaaugaaggagcgagaaucccacccucagccccccaacagcuuccucagcuucuuuuucuuc

SEQ ID NO: 7257 - RNA, 73 nt, Human
gaagaagggaccccaggucagagacuggagccauuacuucaagaucaucgaggaccugagggcucagaucuuc

SEQ ID NO: 7258 - RNA, 74 nt, Human
gaagacaaauugaagggagagaugauggaucuccaacauggcagccuuuuccuuagaacaccaaagauugucuc

SEQ ID NO: 7259 - RNA, 77 nt, Human
gaagacauggaaauccucugggguggacgggugcagcugacgccucgucccuacugcagaggaaguucggugugguc

SEQ ID NO: 7260 - RNA, 70 nt, Human
gaagagcucaggagauagggaagaggaucuguccagggguuagaccucaagguugacuugugaguucuuu

SEQ ID NO: 7261 - RNA, 101 nt, Human
gaagagugaauggcuugacguacuugcaguuaacggugcaaaaugggcuggcugccucuguuccuacgguacuguaacuuugaucaugucuguuccuguuc

SEQ ID NO: 7262 - RNA, 77 nt, Human
gaagaguugcgauguggggccggaucuuaugcaugacgaucuuccgcuggccugggcuccgcacgucaaucaucuuc

SEQ ID NO: 7263 - RNA, 77 nt, Human
gaagaucaaucugauggcuaaagaucaguaugacugcguaaggcaguuugacaucuacccaucccuaacagauuuuc

SEQ ID NO: 7264 - RNA, 67 nt, Human
gaagauggauguggcugacuucgagugggugaugugguacaccuccuuucgcaacgucaucaucuuu

SEQ ID NO: 7265 - RNA, 77 nt, Human
gaagaugguaacugggaucucguuggaaauaacacccccauuuucuucaucagggaucccauauuguuuccaucuuu

SEQ ID NO: 7266 - RNA, 106 nt, Human
gaagcacguaauguuuaaaauguguuguuuuucacaaguaauuuaaguauagcauuauuauuauuugguacuugagucaaagacgacauuuagauucuucagcuuu

SEQ ID NO: 7267 - RNA, 114 nt, Human
gaagcuaccugagguuuagaauuccuucagcccuagcugcuuuuauucugcuuuuuauuuaaacaaaaagagggggaggaucugaaggaaacuaguuuucuguacaaaggcuuu

SEQ ID NO: 7268 - RNA, 95 nt, Human
gaagcuagagggaggucaggagaaggguaacagggaggaugcaaagcagacaucuacccuggucaccccaggaucaggauaucuguccuuguuuc

SEQ ID NO: 7269 - RNA, 61 nt, Human
gaagcuaggcaccugcccauuuccuugggaguaaagcugaugguguagguggucuggcuuu

SEQ ID NO: 7270 - RNA, 80 nt, Human
gaagcuaugaguggagcugccgccuggucaccuucacccauggaguccucucuauaggccucuccgcuuauauuggcuuc

SEQ ID NO: 7271 - RNA, 66 nt, Human
gaagcucucuugggcugcuaagaugggccuuggaacacaccgcgcguuauagcccaagaggguuuu

SEQ ID NO: 7272 - RNA, 66 nt, Human
gaagcuguagagugcugcccgaaaucucuaggaaguugguggcaagggacagcacucacacucuuc

SEQ ID NO: 7273 - RNA, 83 nt, Human
gaagcuguccccuccucccugccacccucccaggcucauuaguguccuuggaaggggcagaggacucagaggggaucagucuc

SEQ ID NO: 7274 - RNA, 103 nt, Human
gaagcuucaugcacuuaaagaaguauuuuuagaauaagaauuugcauacuuaccuagugaaacuuuucuagaauuauuuuucacucuaagucauguauguuuc

SEQ ID NO: 7275 - RNA, 104 nt, Human
gaaggaacaauggucgugccaaaaagggccgcggccacgugcagccuauucgcugcacuaacugugcccgaugcgugcccaaggacaaggccauuaagaaauuc

SEQ ID NO: 7276 - RNA, 77 nt, Human
gaaggaacaguuugccuggagacauuucuacugguaccuuaccaaugaggguauccaguaucuccgugauuaccuuc

SEQ ID NO: 7277 - RNA, 96 nt, Human
gaaggacucuggaaccucguguuuucuuuaggauacagagaguaacuguagcuauaauuuguacuucagacaagcaaucauuggucagaguccuuu

SEQ ID NO: 7278 - RNA, 81 nt, Human
gaaggaggcuguucugugcauuguuggauuuuuagcagcgucccugaccucaguccaauagaugccaguaacaacucccuc

SEQ ID NO: 7279 - RNA, 92 nt, Human
gaaggauuggagagccacuugaggucauauguuaagguauguaaaacacacuguucugaucacuuacaucuguggcucuccaguuuuccuuc

SEQ ID NO: 7280 - RNA, 79 nt, Human
gaaggcgucuuucagagucaucuauccucuuggcaugccaaugcaagaggaaagcauuccucaaaccaaagaaaucuuc

SEQ ID NO: 7281 - RNA, 61 nt, Human
gaaggcugaguacugggcacucucaucucucacuggugagaauguccgagaauucuucuuc

SEQ ID NO: 7282 - RNA, 92 nt, Human
gaaggcugcgaagguggagaguuaccggugucgaagcgccuucaagcuccuggaggugaacgagaggcaccagauucugcggcccggccuuc

SEQ ID NO: 7283 - RNA, 90 nt, Human
gaagggacuuccugggacacaucagauccauuucuggaguucuuccgcagggugaugggacaugggccugguggucgucuuggggccuuc

SEQ ID NO: 7284 - RNA, 60 nt, Human
gaaggggucagggggcuccuugcuucuagugaacaagggcccugaguucuagagcccuuu

SEQ ID NO: 7285 - RNA, 64 nt, Human
gaaggggugaccacccccuugggccuucugggggaacucucccuuggggguggcuugcccccac

SEQ ID NO: 7286 - RNA, 89 nt, Human
gaaggguuuacgaugcauuguuaucauuaaccagucuuuuacuacuaaacuuaaauggccaauugaaacaaacaguucugaaaccguuc

SEQ ID NO: 7287 - RNA, 73 nt, Human
gaagguucuggucuuggcccuaagaggucucuucauaauugaccccagggagucaucaagcauuggagcguuc

SEQ ID NO: 7288 - RNA, 71 nt, Human
gaaguauuuggaacaguaaaggaagauguaucauuacauggauauaaaaaauacuugcugucacaaucuuc

SEQ ID NO: 7289 - RNA, 73 nt, Human
gaagucccguguugccauccucaaggcuaaccugcgcaaguccccaguugccaaggauguggacuuggaguuc

SEQ ID NO: 7290 - RNA, 77 nt, Human
gaagucggucguguccggcgugaugggcuugcuguccuccuggucagagcccaucccuguccggggacugccgcuuu

SEQ ID NO: 7291 - RNA, 85 nt, Human
gaagugaaaauguuuuacaaucucuagguuuggcuaguucucuuaacacugguuaaauuaacauugcauaaacacuuuucaaguc

SEQ ID NO: 7292 - RNA, 94 nt, Human
gaaguggagaguguaggaaauccacugcagaaugaggucugcuugucauccucucagucucaacugcucucccuccuucaucgcucucuguuuc

SEQ ID NO: 7293 - RNA, 61 nt, Human
gaagugggucagauugcaguguguaguuuuggagaaucuguaaagcuguuacacccauuuc

SEQ ID NO: 7294 - RNA, 80 nt, Human
gaaguugaucuacuuccagcugcaccgggcccucaagaugauuguggaucccguggagccacauggcgagaugaaauuuc

SEQ ID NO: 7295 - RNA, 81 nt, Human
gaaguugccucagguuacgaggucuuggcacaauuauauguguaauuguguuauccaggauuuuccaagcuucgguacuuc

SEQ ID NO: 7296 - RNA, 90 nt, Human
gaaguuguuagggcggccuucgaggguagggggauucucacuggaguggcucaaugaggaucuugcaggaggccggcaggugaugagauc

SEQ ID NO: 7297 - RNA, 72 nt, Human
gaaguuucagucaauaauccacugcauauaggauggugguuccauaagauuguaauggagcuguaaaauuuc

SEQ ID NO: 7298 - RNA, 117 nt, Human
gaauaaauaagcugcucuaauugccaagaauucacaugugguuguaugcagcauuacugggaaauugaaguguaucugcaugugauucugcugugauggacacuuguaaguuuguuc

SEQ ID NO: 7299 - RNA, 113 nt, Human
gaauaaauaagcugcucuaauugccaagaauucacaugugguuguaugcagcuuuacugggagacugaaguguaucugcaugugauucugcugugauggacacuuguaaguuu

SEQ ID NO: 7300 - RNA, 93 nt, Human
gaauauugcauguagaguucgacgcuggacaucugugaagaccaaccugggcuuuuuggguguguugccucuauccuucccauguucuuguuc

SEQ ID NO: 7301 - RNA, 108 nt, Human
gaaucugguugguuccuuaaagaucacuugacauggacaggguuuggaaaacuauuugaucauuacggagacugucaccgucaagagguguuuauuaucauuagguuu

SEQ ID NO: 7302 - RNA, 87 nt, Human
gaaucuucgugguugccaucgugcuauagauuucgagucucuaauugaagaaaaucaucuguuguaucucgaggagccccuugauuc

SEQ ID NO: 7303 - RNA, 85 nt, Human
gaauguaaaaggaauauuacaguguuaacugccauauauguaauauacacaaacucaauuagcauuguaauggccaaaugcauuc

SEQ ID NO: 7304 - RNA, 80 nt, Human
gaaugugucccagagauucugguauguuguaucuuuguucucguugguuucaaagaacaucuuuauuucugccuucauuu

SEQ ID NO: 7305 - RNA, 75 nt, Human
gaauguuucuugaaauuggcgucaaacugucuuguauuucauuucuuuugcgaugccuaauugaaucgaaacuuc

SEQ ID NO: 7306 - RNA, 103 nt, Human
gaauuccuaaguauguggucuguauugugcuuguacugaccauguauauaugcuaugguuauuuagugcuagcuaagaacauaccauuuccccaguagcaguc

SEQ ID NO: 7307 - RNA, 71 nt, Human
gaauugaugauguauuugcaaacauuaaugugaaauaaauugaauuuaauguugaauacuuucaggcauuc

SEQ ID NO: 7308 - RNA, 68 nt, Human
gaauuggugaacggaagaguccuuauguugcaguaugcuguauaguaauggccuucagcauccucuuc

SEQ ID NO: 7309 - RNA, 94 nt, Human
gaauuucaugccugggcaaagucaaaguuuuuuccuuuaaucacauuacucaaagaauaaguugacuauaucccaacagcacuuguccaaauuc

SEQ ID NO: 7310 - RNA, 80 nt, Human
gaauuuggggaggacacaguccagggcggaacucuauccaucugucugucugucugucugugucuaucucccuaucuguc

SEQ ID NO: 7311 - RNA, 96 nt, Human
gaauuuugugaaacagacuuguauauucuauuuuacaacuacaaaugccuccaaaguauuguacaaauaagugugcaguaucugugaacugaauuc

SEQ ID NO: 7312 - RNA, 84 nt, Human
gaauuuuuuauacaguuacuaguuuaaugggugaaaaauaguauuguuuuaauuuucaugucauuaauagugaaguuaauauuc

SEQ ID NO: 7313 - RNA, 71 nt, Human
gacaacauggcugugugcuucagcggcuuccugggcacguaggagcagcuguaagugccauugccguuguc

SEQ ID NO: 7314 - RNA, 123 nt, Human
gacaacuuguuggguacauaucaguauacgacauuaauauaucucccuguccccaauuagguuaucagucacuugauggaggagauuguauguuauauauuacuuuguauucuucacaguguc

SEQ ID NO: 7315 - RNA, 93 nt, Human
gacaagaaaugccccuucacugguaauguguccauucgagggcggauccucucuggcguggugaccaagaugaagaugcagaggaccauuguc

SEQ ID NO: 7316 - RNA, 98 nt, Human
gacaagcagagaccaggaaaagacaaggacaugaauuuaagguacucaaguuccaaauacacgaauccauggcuaguuguuucuuuuucucucuuuuc

SEQ ID NO: 7317 - RNA, 81 nt, Human
gacaaggaccaggaccugaucaccaucauuggaaaggaggacgccguccgagaggcacagaaggagcuggaggccuugauc

SEQ ID NO: 7318 - RNA, 68 nt, Human
gacaagggugccucuaaaagcuugacagggccuugacugcacaauucgagcugaauuugccccuuguc

SEQ ID NO: 7319 - RNA, 66 nt, Human
gacaaugccgcugcacugccuacuuugagggaucgaggugugaggugaacaagugcagccgcuguc

SEQ ID NO: 7320 - RNA, 78 nt, Human
gacaccgccgggacaaagcugauugucucucccugcagccacacaguggcucccuaucacgcugccaccggaccuguc

SEQ ID NO: 7321 - RNA, 72 nt, Human
gacacggauggacaauacggaaccgucagaccucugguuagacgacacagagcugacgcuucaucacguguc

SEQ ID NO: 7322 - RNA, 99 nt, Human
gacacggggacauacaacgcaggcagcuucggacagguguggucuggagacauucacaucacgucgcggcgcugacggaguauacagaagccccguguc

SEQ ID NO: 7323 - RNA, 109 nt, Human
gacagcacagccuccucugaaggccggccauaccagaguccugccucggcaugggccucaccauugaggcagcuccacugucugugcuggucugagggugcugccuguc

SEQ ID NO: 7324 - RNA, 90 nt, Human
gacagcagaacuuuucuauccaaaugaaugccgucccauggaaaguggcuguccugggaggcuacacguuucuccaauggugaugcuguu

SEQ ID NO: 7325 - RNA, 72 nt, Human
gacagcagagauggugaagggccugugcgggaggcgacagugaaacccuuugccaucgacauauuuccuguc

SEQ ID NO: 7326 - RNA, 82 nt, Human
gacagccaguaucauccugagcacugagguaugcuuuccauggccgagacccagcccuacucauugcgauggucuggauguu

SEQ ID NO: 7327 - RNA, 71 nt, Human
gacagcuccuaugaugggcccaacccaauauaucccaauguuuucccaauuucccaugauaacugcagguc

SEQ ID NO: 7328 - RNA, 91 nt, Human
gacaggaucuugcucuguugcccaggcuggagugcaguagugcaaucauagcucacugcagccuccaacuccugggcucaagugauccuuc

SEQ ID NO: 7329 - RNA, 82 nt, Human
gacaggauuccaguacaggucucucauuuccuucaugauuaggaauacuacuuugaaaugagagaccuguacuguaucuguu

SEQ ID NO: 7330 - RNA, 95 nt, Human
gacaggggcaguuaggccgcauagcuggagagugagucacauuuacuuaguuuugccaugugacaggucuuuccccuaugucaucucccuugauc

SEQ ID NO: 7331 - RNA, 91 nt, Human
gacagugaaggauucuuaucacauaaugugcaggccaugugccugugaacuugaaguuugcgcaaaauguggaaagaaagaagacauuguu

SEQ ID NO: 7332 - RNA, 71 nt, Human
gacaugacauuaggaacuuagcauuuuagaucuguguucaaacaagucuuaaaauugucuagucucauguc

SEQ ID NO: 7333 - RNA, 77 nt, Human
gacaugaggacuuugggcucugaggcaaaggugauaauggcaacgcucacauugaucucaaagcugaagauccuguc

SEQ ID NO: 7334 - RNA, 65 nt, Human
gggaacaaaccucucaccucaggccagaaggggaugaccuccauuugcuucucugaguaguuucc

SEQ ID NO: 7335 - RNA, 65 nt, Human
gggaaccauaggagaauuuauuucuagauguaaauaauuauuuuaaguuugcccuaugguggccc

SEQ ID NO: 7336 - RNA, 95 nt, Human
gggaacggaaggaggaaugcuggacuggaggccccuggagccagauggcaagagggugacagcuuccuuuccuguguguacucuguccaguuccu

SEQ ID NO: 7337 - RNA, 92 nt, Human
gggaacuaaauucauuccugaugccagaucugaucgagucaguaugucuucagcuugaucagauuuuaaaaucaguuuugaaagugguuccc

SEQ ID NO: 7338 - RNA, 72 nt, Human
gggaagaccugcagugcacgguuucuuccaggcugagguaccuggaucuuggguucuucacugcagggaccc

SEQ ID NO: 7339 - RNA, 64 nt, Human
gggaagacguuuucuuuaucgcccugagaagaucuaccccagggagaaucugagacaucuugcc

SEQ ID NO: 7340 - RNA, 90 nt, Human
gggaagcacugucugugaggucucuaacuagcuguauugaaaaugauaaaugauccuagaggcuaguauuaucucguugacauuuuucuc

SEQ ID NO: 7341 - RNA, 73 nt, Human
gggaagguggggaggguccgaggggaaggggacccagcuucccugugcccgcucaccccacuccaccaguccc

SEQ ID NO: 7342 - RNA, 66 nt, Human
gggaaguaugugccgccgagcccugcgccgacgcgggccagccgccgcggcgagcccaugcccccc

SEQ ID NO: 7343 - RNA, 81 nt, Human
gggaauaccuuggcaagcagcuccaguccgagcagccccagaccgcugccgcccgaagcuaagccugccucuggccuuccc

SEQ ID NO: 7344 - RNA, 72 nt, Human
gggaaugauagcauugaaggacucggggauaucuaacagcaauaccugaucacuacuucgcacuaaguucuc

SEQ ID NO: 7345 - RNA, 73 nt, Human
gggacaagggagauggagguaagacagaugaacacaacacagucuuugcugaaggaggucaucccuuguaccc

SEQ ID NO: 7346 - RNA, 62 nt, Human
gggacaucccgaggaaaggcugcguguacggaucacgggcacagccagccgcggggcguccc

SEQ ID NO: 7347 - RNA, 93 nt, Human
gggaccccuccccagggccuuuuccuccucugcgucuuccaucuacugaaaugggagagcggguggggagcuucuguucuggugaagggaccc

SEQ ID NO: 7348 - RNA, 72 nt, Human
gggaccuaccaggggcuucuggcaacuuuaagaaggaaagucugagcaauuggaggcuccuggaggcugccc

SEQ ID NO: 7349 - RNA, 98 nt, Human
gggacguccgcgacuaccuggaagagaggcuggaagcugaauucggucagaagagaauccaucugaauagccaguuuccaggcacccagcggcuuccc

SEQ ID NO: 7350 - RNA, 73 nt, Human
gggacuacgggugugcacuccucgccuggcuaauuucaauuuuugguacaggcaggaucuugccaccuugccc

SEQ ID NO: 7351 - RNA, 71 nt, Human
gggacucuggcuaaggcucuucauuuccccuggagcaggggcagaagugaggaggggagggucggagucuc

SEQ ID NO: 7352 - RNA, 77 nt, Human
gggacugcugucugcugucuacacuacacacuacuacacugcugucugcugugugugauaaggacacagauaguccu

SEQ ID NO: 7353 - RNA, 76 nt, Human
gggagaauccccuaagcuccagggcccagggucuaaccugagaggucggggcugcaggaagcugggggaggcuccc

SEQ ID NO: 7354 - RNA, 75 nt, Human
gggagaggugauugauguacacaaccguguccgaauggugacagugggcaucgucugcaccagccccauccuccc

SEQ ID NO: 7355 - RNA, 83 nt, Human
gggagcaugggcaccuccuagguccgggcuggcuuuccauuuguccccuaauuccagucucucucugaggcccagcugcuccc

SEQ ID NO: 7356 - RNA, 97 nt, Human
gggagccgguugaggaaaggcagacauccgacuucuugcccugguauaacuggcacgacaaggguaaggaucugcaucugaucuuccacggguuucc

SEQ ID NO: 7357 - RNA, 106 nt, Human
gggagcggcuaggccgggacgcccgugguccucaccccuugagcugcuuuggagacucggcugccagagggagggccaugggccgaggccuggcauucacguuccc

SEQ ID NO: 7358 - RNA, 78 nt, Human
gggaggaaaagcuaugaaacuguauagggcuguauauauacuugucucagcuuaaugcaggaaauuggcuuacuuucc

SEQ ID NO: 7359 - RNA, 90 nt, Human
gggaggagauguagcacgggaucaugggggcagcgcgugaucuuugcacuucgcagcccaucuggguaccuguugguucaggcucuuucu

SEQ ID NO: 7360 - RNA, 70 nt, Human
gggagggggcuccucucaggaggggugagggcauuauugcauuugcuggggggaaggacaacccucuccc

SEQ ID NO: 7361 - RNA, 89 nt, Human
gggaggucacacugcccgucggaccuuggcaugcuccauucagcugaccugcugaggacaggcaucgccgagacuccuuggguccuccc

SEQ ID NO: 7362 - RNA, 62 nt, Human
gggagucauugaacuucagcucuggaaaggauguuguuaccaaguucaguuugugaauugcc

SEQ ID NO: 7363 - RNA, 67 nt, Human
gggagugguaggcugccuuuucuccugguauuuguacacaaaagcuggggagagcuuuuccacugcc

SEQ ID NO: 7364 - RNA, 94 nt, Human
gggauaguauuaauuuuuuuugguugggugcugugguugguuaaaaugaccaacuauuuugcagccccuccuuucaauagguugauucuauucu

SEQ ID NO: 7365 - RNA, 85 nt, Human
gggauaugaggagaaugaggaguugcugaggaacaaugcaccaccugcugcuggaggugagaagcggacccaucacuugcuuccc

SEQ ID NO: 7366 - RNA, 92 nt, Human
gggaucauugauuguguggugagaaucccuaaggagcagggcuuccucuccuucuggagggguaaccuggccaacgugauccguuacuuccc

SEQ ID NO: 7367 - RNA, 91 nt, Human
gggauggaaaaugcagacacaauauagcaaauagagggucuuuuccugucauggaaaucggucagcccugaugcuucugcauuucuuuccc

SEQ ID NO: 7368 - RNA, 73 nt, Human
gggauucuccaccaggacaccgccagcguccccaccguccucagcuuggcaaacguuucccgaagaggauucc

SEQ ID NO: 7369 - RNA, 83 nt, Human
gggauucugugucuggcuccuuucacuuagcauaaugucuuuaagggacaugcagguuguagcagguaucaguacuccauucc

SEQ ID NO: 7370 - RNA, 62 nt, Human
gggcacauuggugguauuuugguauguggccacuggcacuaaacaacugaccauuucuaccc

SEQ ID NO: 7371 - RNA, 64 nt, Human
gggcaccccagugucccgcuggcccagcaggagucacuguuggccucuggacacucaucggccu

SEQ ID NO: 7372 - RNA, 106 nt, Human
gggcacugcggggugcuugcugucucgcuugagggccucacgaugcguccaucacugcugaugacccguuaccuggaguccuggggcgcagccaagccuuuugccc

SEQ ID NO: 7373 - RNA, 84 nt, Human
gggcacuuccaacacaacuugucuuggugauauuuggccagcaaaugucaacauuaccaaagaaaaguuggagguggauggcuu

SEQ ID NO: 7374 - RNA, 66 nt, Human
gggcagagggcaugugaaguaaccuaggaccugcuggucacccugggugaugugcugcccucguuc

SEQ ID NO: 7375 - RNA, 81 nt, Human
gggcaggggaggggcucagucuuucuuggcagcagcuuuccucauggcggccaguacguugcucagcuccucccgcuuccu

SEQ ID NO: 7376 - RNA, 81 nt, Human
gggccagggaggcacaaaccuaacuguaccccugcuacaggcaggguggauagacagagacccauugucccuuccaugucc

SEQ ID NO: 7377 - RNA, 70 nt, Human
gggccaugcgcuuacauugauaucauuagcuggcagucggcugacaauuucacagugcucccacuggccc

SEQ ID NO: 7378 - RNA, 70 nt, Human
gggccccaagcucgcuaguccucggaucccagaaacauaacuccgggggugcagaccugcuuggaggccc

SEQ ID NO: 7379 - RNA, 62 nt, Human
gggcccgggcaggacugggccucccucugaucgaugagguggugagcccagagcccgagccc

SEQ ID NO: 7380 - RNA, 86 nt, Human
gggccuugaggaugauguuccgggugugcauccccuggaaguagucgaucugcuccugcgucauccggaagcggaccuucuugccc

SEQ ID NO: 7381 - RNA, 101 nt, Human
gggcgagcucgguggugacgcgcggcccucacgugacccagagcugcagagcgacgcagccuucggugcagucgucacucgcgucuggcuaccagcucccc

SEQ ID NO: 7382 - RNA, 69 nt, Human
gggcgcccgcacuccucagcucuuggguggucgaugggacugggcgccguggagcaggggguggcgcuc

SEQ ID NO: 7383 - RNA, 78 nt, Human
gggcgccuccuccgcggguaugaccaguccgccuacgacggcaaggauuacaucgcccuugaacgaggaccugcgcuc

SEQ ID NO: 7384 - RNA, 75 nt, Human
gggcgcuccaggaccggccccagcgggcaaaccccccgcauucacccccgcacccggggcuccacccaagcgccc

SEQ ID NO: 7385 - RNA, 81 nt, Human
gggcgcuuuuugcggggggcgaaaagauaugaaaagcagccaguuauuuuccgccccccuuuuaaagagaaaaacgcgccc

SEQ ID NO: 7386 - RNA, 76 nt, Human
gggcggaagguacacuauaggcucggggagguagaaugggcuauuugcugaagcuucuugguggcccugcuagccc

SEQ ID NO: 7387 - RNA, 66 nt, Human
gggcggacgcgugggccagcagcugguggggacugguuucaacgccagcuuucugugcuucugccu

SEQ ID NO: 7388 - RNA, 90 nt, Human
gggcggaggcacucgcgcgggggguaauucggggucuggguucuggugccgcgcagcuuuccccgauggcccacugcgugaccuugguuc

SEQ ID NO: 7389 - RNA, 73 nt, Human
gggcggccgcucuagaggauccaagcuuacguacgcgugcaugcgacgucauagcucuucuauagugucaccu

SEQ ID NO: 7390 - RNA, 86 nt, Human
gggcgggggcccucgucuuacccagcaguguuugggugcgguugggagucucuaauacugccggguaaugauggaggccccugucc

SEQ ID NO: 7391 - RNA, 88 nt, Human
gggcgguaaguuggauuucgaugaaccggucccugaaguugugcucccucugggacuccauccuucaucucuccaaucucaccagccu

SEQ ID NO: 7392 - RNA, 121 nt, Human
gggcgucagacuugcauacgcagcagaucagcauccuucgcuggcccuuagcaacuuagguggucgauuggaaacugugaaggugugaucuuucaggagcuggaagucuuaggaaaagccu

SEQ ID NO: 7393 - RNA, 94 nt, Human
gggcgucugcuggagugugcccaaugcuauaugucaguugagguucuaagacuuggaagccacagaaaugcagaaugccacuccggaagggucc

SEQ ID NO: 7394 - RNA, 74 nt, Human
gggcguucuguggcuuucauuaauauaguucuuaguuuuccacuggucuguaucccauucugccuuggacgccu

SEQ ID NO: 7395 - RNA, 64 nt, Human
gggcguuggcagagguggcggcggcggcaugggugccccgacguugcccccugccuggcagccc

SEQ ID NO: 7396 - RNA, 80 nt, Human
gggcuagaagguaucuacaacuucacacauaaccaaaaacagagaaguggugaaguggugaaaggaguuucucaaagccu

SEQ ID NO: 7397 - RNA, 62 nt, Human
gggcucgggcucugggcucaccaccucaucgaucagagggaggcccaguccugcccgggccc

SEQ ID NO: 7398 - RNA, 81 nt, Human
gggcucuguaugggaggccauggccuucgccagcaucuauaagcuggacaaccuuguggccauucuagacaucaaucgccu

SEQ ID NO: 7399 - RNA, 75 nt, Human
gggcuguagugcacuuugagcgagggcggccuggggaccgccggguggcugugucgucauuagcaucauuggcgc

SEQ ID NO: 7400 - RNA, 81 nt, Human
gggcuguggugucuguccgcuuucaggaagacauuauuucaauauggaauaagacugccagugaccaagcaaccacagccc

SEQ ID NO: 7401 - RNA, 66 nt, Human
gggcuuccccagugucuuugggggucugugaaaaagaggauccucugagguuuacugggagggcuc

SEQ ID NO: 7402 - RNA, 78 nt, Human
gggcuuccccucggccuccaggugaggcugcccauugcaggcacugggcaggccugaccuugcuggggcucauggccc

SEQ ID NO: 7403 - RNA, 81 nt, Human
gggcuugcuggguuuacagauggcaaagaucuggcaaauuaaaaauagccuuaggccaaagaucaaacccaaggugggcuu

SEQ ID NO: 7404 - RNA, 83 nt, Human
gggcuuuggccugaauucaggaagugguccccugauuccaaacacaggcuggguccgggggacgauugggauggccagaaucc

SEQ ID NO: 7405 - RNA, 72 nt, Human
ggggaaagauguccucaucugcucaggcacucauccaugccccgccuccaagcagugugaugucgacucccu

SEQ ID NO: 7406 - RNA, 101 nt, Human
ggggaaaucaaggaugcucgguuuaagguacacuguuuccauguuauguuucuacacauugcuaccucagugcuccuggaaacuuagcuuuugaugucucc

SEQ ID NO: 7407 - RNA, 74 nt, Human
ggggaaaugacuggcccaaggggacaagacgcaucuuaagaugucaaguccuggacccuucccugcaaggcccc

SEQ ID NO: 7408 - RNA, 80 nt, Human
ggggaacacaggagcguaccacuacacuugggcugauuuuuuguaaauuuuguaggagacagggucucccuguguugccc

SEQ ID NO: 7409 - RNA, 73 nt, Human
ggggaacugacuuauagaaaaugcucagcacguggccuagcacaaggcauucuuuaaaucugagucucucccc

SEQ ID NO: 7410 - RNA, 81 nt, Human
ggggaagggacgggacguugcaguuuaaggcauuucuggcuucggagccaucccugccaccucugcaccugccccuugacc

SEQ ID NO: 7411 - RNA, 87 nt, Human
ggggaaggggcuagcagguguguaaacagaggguuccaucaggcuggggcagguggccgccuuccgcacacuugaggaacccucccc

SEQ ID NO: 7412 - RNA, 78 nt, Human
ggggaaguggaagcgccgggcccugcugcgggggggagagccacugacgccgggaccgggaccgccgccgccgccgcc

SEQ ID NO: 7413 - RNA, 73 nt, Human
ggggacagcgaccugcagcuggaacgcaucaacguguacuacaaugaggccaccggcggcaaguacgugcccc

SEQ ID NO: 7414 - RNA, 84 nt, Human
ggggacagcgcgugugguggccgaggaugcugcggggcguguagcuccgugcgccccucgcuggugacugcugcgccgugccuc

SEQ ID NO: 7415 - RNA, 82 nt, Human
ggggaccggucucaccgaaugcauccugucgggcaucaugucugugaacgggaagaaggugcugcacauggaccggaacccc

SEQ ID NO: 7416 - RNA, 82 nt, Human
ggggaccggucucaccgaaugcauccugucgggcaucaugucugugaacgggaagaaggugcugcacauugaccggaacccc

SEQ ID NO: 7417 - RNA, 82 nt, Human
ggggaccggucucaccgaaugcauccugucgggcaucuugucugugaacgggaagaaggugcugcacauggaccggaacccc

SEQ ID NO: 7418 - RNA, 73 nt, Human
ggggacggucucaaugcgugaucagagaaucuucaccuuggugaaaaguggcucagauccagacaaugucucc

SEQ ID NO: 7419 - RNA, 102 nt, Human
ggggacuacaauggccacgucggucuggguguuaagugcuccaaggagguggccaccgccauccguggggccaucauccuggccaagcucuccaucgucccc

SEQ ID NO: 7420 - RNA, 73 nt, Human
ggggagaaaaagcuguagaacaaauguuugggguuaccauugaaaaucuaaugucugcaauauuuuucuccuc

SEQ ID NO: 7421 - RNA, 68 nt, Human
ggggaggaggauuaggcuggacugaucgcgggucgcaggugaccccgggaccagaugucccuccccuc

SEQ ID NO: 7422 - RNA, 78 nt, Human
ggggaggagguggcugugaagaaggugcgagaccucaaagaaaccgauaucaagcacuugcgacagcugaagcacccc

SEQ ID NO: 7423 - RNA, 74 nt, Human
ggggaucuuggccucacgguguaagaagggagaggaugguuucucuucugcccucacuagggccuagggaaccc

SEQ ID NO: 7424 - RNA, 90 nt, Human
ggggaugaauucuucaaauaggagccgauggaucugugguccuuugggacucaucaaagccuugguuuagcauuugucaguuuuaucuuc

SEQ ID NO: 7425 - RNA, 83 nt, Human
ggggcacguggcaggaaggggaggcaaggccaaggcaggggauucccccaccggccgccccccaaaccccuacccaaggcccc

SEQ ID NO: 7426 - RNA, 88 nt, Human
ggggcagagcggauggaagccggagaucccagguucccggaauacuccggcuggggccuucgggcuucuccuguccccucccuacccc

SEQ ID NO: 7427 - RNA, 87 nt, Human
ggggcagccugcaacccccaaaggccgguguugggcuuccaaaugcuucaggccuggggccagaaagggguuacaaaagguugcccu

SEQ ID NO: 7428 - RNA, 78 nt, Human
ggggcagucaguaggaacuguaacuaugucucugaugcaccacguguuuagacacagcacaguccuuuuuucuguucc

SEQ ID NO: 7429 - RNA, 68 nt, Human
ggggccagcagccugauuuagcagcuaaugaagccagcuucugagggaaaauucaguuguugugccuc

SEQ ID NO: 7430 - RNA, 62 nt, Human
ggggcccccugugacccuggagagugucccucucucagggaugccacaaccaugggggcccc

SEQ ID NO: 7431 - RNA, 75 nt, Human
ggggccggcugggggccugagcgggaggccaucaucaaccuggccacccagcccaagaggcccauguccaucccc

SEQ ID NO: 7432 - RNA, 82 nt, Human
ggggccuguggcaaaagaacugagcggacugccaucuggacccucugccggaucagguccuccucccccuccaccaggcccc

SEQ ID NO: 7433 - RNA, 69 nt, Human
ggggccuuugaauuugaggucuaugggcgggucgaggaccaggaucugcucgugcuucgccguggcccc

SEQ ID NO: 7434 - RNA, 86 nt, Human
ggggcgggcuucugggggccauguuugggggaagggaagguuccccacccacccuuggaaaacccccaguccccugaagccccccc

SEQ ID NO: 7435 - RNA, 73 nt, Human
ggggcuauugagaaaacuugucuucacaagacggguuaauauuugugugaacggcgguuaguuacuauacuuc

SEQ ID NO: 7436 - RNA, 62 nt, Human
ggggcucauuugcaggggggagccaaaagggucaucaucucugcccccucugcugacgcccc

SEQ ID NO: 7437 - RNA, 81 nt, Human
ggggcugagcaaugauagaauuucuagggcugggaagcagaacccuuaagucucugcccucccaauucuauuacucucccu

SEQ ID NO: 7438 - RNA, 92 nt, Human
ggggcugaggaggaggagcagggggugcugcguggaaggugcugcagguccuugcacgcugugucgcgccucuccuccucggaaacagaacc

SEQ ID NO: 7439 - RNA, 87 nt, Human
ggggcugugaugucagccacugaggguguugugcucacguucgagggcccagcacaaaaauccuuguaugacaucucaugcugaccc

SEQ ID NO: 7440 - RNA, 65 nt, Human
ggggcuguuauggggauaagcuggugagguccccaaauauugaccaacuggcaucccacagccuc

SEQ ID NO: 7441 - RNA, 76 nt, Human
gggggagcuugaaggaacuacuacuaagccccuggccccaaacccaagcuucagucccacuccaggcuucaccccc

SEQ ID NO: 7442 - RNA, 77 nt, Human
gggggcgugguggcgggacuggaccucuggggccuguguugggccuuagcucgguaacuggugaccccuuugcccuc

SEQ ID NO: 7443 - RNA, 88 nt, Human
gggggcugcagaacuggaauucuggucuaggacaagacaagugccagccagcguucucuaucuuuauccggaauccucugcucacccu

SEQ ID NO: 7444 - RNA, 95 nt, Human
gggggcuugcccaggugcugggacaggacgaugagguugaccagcgucucuggguagccacuauccuugucuagcgccuccugcagcaggcccuc

SEQ ID NO: 7445 - RNA, 78 nt, Human
ggggggaggaacccaccaacagggggggucuccacaacuccucaguguccgccccacuugugucgggaagcccccccc

SEQ ID NO: 7446 - RNA, 64 nt, Human
ggggggccacccguuuuccaaaauuucguucaaaguuucaaguuggaauccugguggucccacc

SEQ ID NO: 7447 - RNA, 73 nt, Human
gggggguggccagcccugaaguugcccucccagggaggaaccagcucugggagggaggggcugucagaccucc

SEQ ID NO: 7448 - RNA, 72 nt, Human
gggggucaccacacuuugcuaacucuugugugcacauauuuuauaauagaguagcgagggaauggugccgcc

SEQ ID NO: 7449 - RNA, 62 nt, Human
ggggguccgggcgggguguaaacuggugccgcgguguguuguuugccccccggcugaucucc

SEQ ID NO: 7450 - RNA, 76 nt, Human
gggggugcagggcccugugguuggacuucaccucucagcacugaaaacccaaaacccagcuggccuuaacacuccu

SEQ ID NO: 7451 - RNA, 74 nt, Human
gggggugcugugaugcgugaggcagccgggggaggcccggaguccgagacugcuugagcgcugcgcacaccccu

SEQ ID NO: 7452 - RNA, 65 nt, Human
ggggguuacugcagugauggagaugcaagccccuacucuugcccucuaucccuucuacagccccc

SEQ ID NO: 7453 - RNA, 72 nt, Human
gggguaguggauggcaacugauggaacaggagaaugcucagcagcauuugcucuuccagccugucacgccuc

SEQ ID NO: 7454 - RNA, 74 nt, Human
gggguauaaucaugugucacauagcauuguuuuggucaacaguggaccacauguaugaggacacauauaauccc

SEQ ID NO: 7455 - RNA, 97 nt, Human
gggguaugaggcuuuauucaggaagagcucaagaugggaggggagccccuggggucccacucuuguggccucuugauaccaaggcucaugggacgcu

SEQ ID NO: 7456 - RNA, 76 nt, Human
ggggucagaagacuggauugugaguaggccaguuuucaguacagggaaaaaagcuacagaucacucuuuugacccc

SEQ ID NO: 7457 - RNA, 77 nt, Human
ggggucaguacaucccccagucguggcccucuggacaguggcgggccugccucaugagggcuccaaugugcugcccc

SEQ ID NO: 7458 - RNA, 91 nt, Human
gggguccaggcucugguuggggcuguggacugaggucugaucuccaggcugguauguggacugugggcaguuuggacugggccuggguccc

SEQ ID NO: 7459 - RNA, 72 nt, Human
ggggugcagggggucucugugcugcugcugcagguggugcugcugcugcggugagcgugagacccgcacccc

SEQ ID NO: 7460 - RNA, 63 nt, Human
ggggugguggaaugguccuuccuuuaagccccggaaaagggauggacccacuuucuccacccc

SEQ ID NO: 7461 - RNA, 69 nt, Human
ggggugugaggaagcuguccccagagcucccuggggagugaggggugggcaaagccaacuaaacacccu

SEQ ID NO: 7462 - RNA, 69 nt, Human
ggggugugaggaagcuguccccagagcucccuggggagugaggggugggcaaagccaacuaagcacccu

SEQ ID NO: 7463 - RNA, 71 nt, Human
gggguuauaaugagaagaaaauaacagacaauauucagugugagauuuuucaaguucuuuaugaagaagcc

SEQ ID NO: 7464 - RNA, 93 nt, Human
gggguucauucacauugcaagauuauucccacuugucuuugaugaacucagggcaugugaacgggugauugggaccagugugaaugagccacc

SEQ ID NO: 7465 - RNA, 62 nt, Human
gggguucuccggggaauccuccagcuuggucagcaaguucucgggguucuccggggaauccu

SEQ ID NO: 7466 - RNA, 62 nt, Human
gggguucuccggggaauccuccagcuuggucagcaaguucucgggguucuccggggaauucu

SEQ ID NO: 7467 - RNA, 89 nt, Human
gggguucugcuuuuuuuacccaggcuggagugcaguggcacaaucucagcucacugcaaccuccgccucugggacucgagcaauucucc

SEQ ID NO: 7468 - RNA, 75 nt, Human
gggguucuuguaguugaaaaacuugagcccauggggacacuauacaagggcacaaguuuuccaacuaugaacucc

SEQ ID NO: 7469 - RNA, 101 nt, Human
ggguacauaucaguauacgacauuaauauaucucccuguccccaauuagguuaucagucacuugauggaggagauuguauguuauauauuacuuuguauuc

SEQ ID NO: 7470 - RNA, 68 nt, Human
ggguacaugugcacaaugugcagguuaguuacauauguauacaugugacaugcuggugcacugcaccc

SEQ ID NO: 7471 - RNA, 78 nt, Human
ggguagacuauuucaguggaaaaaucuggaacucaagggcuguuguucagauucuuuuguaccacguugguggucccc

SEQ ID NO: 7472 - RNA, 85 nt, Human
ggguagauguuuucuuggcagccauauuuguaggcacugcuggauacuuuaguguuagaaguggcuauuaagagacgaguuuccc

SEQ ID NO: 7473 - RNA, 79 nt, Human
ggguaugaugucagcuugaacagucauggccucuucuucuguuuccaauucuguuucuugauuuugaacuuccucaccc

SEQ ID NO: 7474 - RNA, 71 nt, Human
gggucaagccagcaccugaugaaacuuccuucagugaggccuugcugaagaggaaucaggaccuggcuccc

SEQ ID NO: 7475 - RNA, 80 nt, Human
gggucaagcugaaaaggcaagguuucuucaacuggcuugagagcuaugagguaggcuguuuccuucuuucgcuuuguccc

SEQ ID NO: 7476 - RNA, 62 nt, Human
ggguccucuucuuuucccagagcuccaccccaaccaggagcucuagauaauggagagcuccc

SEQ ID NO: 7477 - RNA, 62 nt, Human
ggguccucuucuuuucccagagcuccaccccaaccaggagcucuaguuaauggagagcuccc

SEQ ID NO: 7478 - RNA, 104 nt, Human
gggucggcaggaaguugcggcugaugagcagcucccggagcgguggggcggggccuccucuucuccaguuccaguacgcucaucagucguccuccugcugauuu

SEQ ID NO: 7479 - RNA, 94 nt, Human
gggucgucgccucguccagucucucuggguggccaugcuugguuuuauguaacucuggccuagggcaucccacugacucuaugaggagugaccc

SEQ ID NO: 7480 - RNA, 108 nt, Human
gggucuaaugcuauuccaaaagguuacuucucaaauuagggaaaccugggaauuugaagcgauacagguccagcccuggggcaaguaacuggaaggguuuauaggccc

SEQ ID NO: 7481 - RNA, 76 nt, Human
gggucucaccuuuagccucugcccccaguucuggucugacccaacagaggggcucuaugauauuaagaaggggccc

SEQ ID NO: 7482 - RNA, 72 nt, Human
gggucucuuuucggcgcucuagaggcagagggaggggaucccugucgugacaagagcgccugucugcgaccc

SEQ ID NO: 7483 - RNA, 61 nt, Human
gggucuuuggaggggaguuugccucucccaacggagagcaguucuaccacuacaaggaucu

SEQ ID NO: 7484 - RNA, 81 nt, Human
gggugaucuaccaaaacaguuugaguuuuaaauuauccagugcagugguuccuagacucacuuugugcauggaggcagccc

SEQ ID NO: 7485 - RNA, 110 nt, Human
gggugaugccaccuccugggugggugaugccuccucuggguggugauaccuccucuaggugggugaugccuccucuggguggugauaccuccucuaggcgggugaugccc

SEQ ID NO: 7486 - RNA, 88 nt, Human
gggugcacugugcuggaccaacccugauucugcuggggcuagcgggucuccauuaggaguggggugcuccguccggcacagugugucc

SEQ ID NO: 7487 - RNA, 80 nt, Human
gggugcagugaguggccucaaaguugugcagaugcuuccgagccagaaacaaagccagcugccgccguccaucugcacuc

SEQ ID NO: 7488 - RNA, 94 nt, Human
gggugcauggccggaugucucugggacugaacgggggagggagugugaucugcugcuccuccaaauucccacaaggacuuuccuaucaucacuu

SEQ ID NO: 7489 - RNA, 114 nt, Human
ggguggaaggaaaucugaggacaguucuaaggagucuugucugcuuucagugcgaucuucuagucauacugaagacaauaccucuccagauuggucuuuccccuucuucuccuc

SEQ ID NO: 7490 - RNA, 61 nt, Human
ggguggcggcgaggacgagucugugcuccaucagcugccgcacccgccgccucccgccccc

SEQ ID NO: 7491 - RNA, 82 nt, Human
ggguggcgucauggaauggguguggucuaagccaggucuccagauaagggcauucugccucuuccuucucuugucgccucuc

SEQ ID NO: 7492 - RNA, 92 nt, Human
gggugggagggaggauggugcgucauuuaacauuaaauugccucucucuacaguauguggcugagcaucauggaccuuccucccucugcccc

SEQ ID NO: 7493 - RNA, 60 nt, Human
ggguggucggauggcagcgugacgccaguaucauuuccagcauuuccaucuuuaccacuc

SEQ ID NO: 7494 - RNA, 62 nt, Human
ggguguaugguucuguaaaaaccagugaauucuauuuuucaagguuuuuggaaagcacaucc

SEQ ID NO: 7495 - RNA, 73 nt, Human
gggugugugcccacaacacucuaggugcagagccccugggcaaaguauuacagggugugaguggggauuaccc

SEQ ID NO: 7496 - RNA, 80 nt, Human
ggguguugaccuuggccacaucaaugucauacagcuucuucacagccuguuuaaucuggugcuuguuggcuuuaacaucc

SEQ ID NO: 7497 - RNA, 85 nt, Human
ggguuaucugcaacugagaggggcugguuaaggcguccccaaguuggaagggcgcuuugcuucuguuuucuggaugcagaguccu

SEQ ID NO: 7498 - RNA, 66 nt, Human
ggguucaaagccuuuauugggucagggcuugcuccagagcucaggggccagguaggucaggagccu

SEQ ID NO: 7499 - RNA, 72 nt, Human
ggguucacagcaguaggggcugggcuuccagcaggcucaugauucaggccuuaacccuugcccugggagccc

SEQ ID NO: 7500 - RNA, 74 nt, Human
ggguuccaaugggugcacaguuccaaaaauguggagggacccuucucaguuuugaggccaugaauccaaagccc

SEQ ID NO: 7501 - RNA, 77 nt, Human
ggguuccuguucacucuugacucuguggcaaauuguauuuacaguagaccgcugacguuucccaaguggacagaucc

SEQ ID NO: 7502 - RNA, 62 nt, Human
ggguucggggcggaggcccgggggggugcgcgcgcccgggguccggccucucacucgcuccc

SEQ ID NO: 7503 - RNA, 78 nt, Human
ggguugagauugcuguccucccaaaggugaugucgguccugacgcuccucaucuaugaacugcucagagucuccuccc

SEQ ID NO: 7504 - RNA, 114 nt, Human
ggguugauauuauuggcacauucccuccaaaugacagacaucaucucuucuccugaauuuauggggcugaguuucucauuuguaguauggugugugucucugcauauggaacuc

SEQ ID NO: 7505 - RNA, 84 nt, Human
ggguuggcugguuucaugguggguugguucaugagcagccuccuguucuaugaggcuuuucaacaguuucacauccagcugccc

SEQ ID NO: 7506 - RNA, 88 nt, Human
ggguuggggggacuucagaucauacagucugccauggagaaaagaacuugcuggcagacagccugaugguucagaggcuccagugccc

SEQ ID NO: 7507 - RNA, 82 nt, Human
ggguuuccugucccucagcuccuguccuuuguuccuggacagcaacgacacagaggaccagcuuggagguucaggaaaaccc

SEQ ID NO: 7508 - RNA, 65 nt, Human
ggguuuuaaguaugccaaugaggagaguugccaaagucaucucuaacucaggcaucucuggaucc

SEQ ID NO: 7509 - RNA, 78 nt, Human
gguaaaguggggaaggccacaucugagcggggucgcgcucggugauuguuccuggccaguguggagucucuaaacacc

SEQ ID NO: 7510 - RNA, 110 nt, Human
gguaauuuuuuguugaaggaggcuguucugugcauuguuggauauuuagcagcgucccugaccucaguccaauagaugccaguaacaacucccucccgauuaugaucacc

SEQ ID NO: 7511 - RNA, 110 nt, Human
gguaauuuuuuguugaaggaggcuguucugugcauuguuggauuuuuagcagcgucccugaccucaguccaauagaugccaguaacaacucccucccgauuaugaucacc

SEQ ID NO: 7512 - RNA, 74 nt, Human
gguacaguugguggcuaucaaauuaggacucaguaauuacuugugucacugagugaaagcugcucauugcugcc

SEQ ID NO: 7513 - RNA, 102 nt, Human
gguacuagacuauuaugcagauggugcccaagaucuuccuggcccccagcccagggucacccuccuuuaggaagauuguguauuuagcugaugaccugugcc

SEQ ID NO: 7514 - RNA, 85 nt, Human
gguagaaggcaguggcaagagggguucagguagggggaugaugagggaacaccagacuuggcuaguugggccacugcuagaagcc

SEQ ID NO: 7515 - RNA, 60 nt, Human
gguagcaggccccaaguuauuauuccccgcccugaauauucaucuuguagcagcucugcc

SEQ ID NO: 7516 - RNA, 61 nt, Human
gguaggaaugaggcuagaccuuuaacuucccuaaggcauacuuuucuagcuaccuucugcc

SEQ ID NO: 7517 - RNA, 93 nt, Human
gguaggaggaucgcuugaguccaggagguugagguugcagugagcuugugccacuguacuccagccugagugacagagcgagacccuguugcc

SEQ ID NO: 7518 - RNA, 89 nt, Human
gguaguagccauggcggccaugaguuuguugcggcggguuucgguuacugcgguggcagcucugucuggccggccccuuggcacucgcc

SEQ ID NO: 7519 - RNA, 97 nt, Human
gguauaaucuagcagucuguggauuugauccuuccaccucauaaaaaaggcauaggugggcaguauaauugauuugcagggauaugcuagaauuacu

SEQ ID NO: 7520 - RNA, 117 nt, Human
gguauuucccaagucucugggugguuggaaggcuguggcuggucucaguuggguuacucaaugcccaggaggggcugagcaccagccauaucuuugcuugguucacaugaugauacc

SEQ ID NO: 7521 - RNA, 79 nt, Human
ggucaaccggggagcggcagaaccagaguucgaaggaaaccuuucugaaucugacgucugccccuucuaaauuaggacu

SEQ ID NO: 7522 - RNA, 95 nt, Human
ggucacagaaggauagagccugggggcaaaaugucuaacuugucuacauggggaccacaguucacauuaugcaucucaggcuccacagugaggcu

SEQ ID NO: 7523 - RNA, 77 nt, Human
ggucaccacgccagagaggauccgcccucgaauggacacauuaccagugaaggggcauuucuuggcaauguggugcc

SEQ ID NO: 7524 - RNA, 63 nt, Human
ggucaccccgccggccccgacgggcgcccuggcgcccggggguacccagaggcgggaaagacc

SEQ ID NO: 7525 - RNA, 67 nt, Human
ggucacucauacuacagacacuuggccuaugacugucaucuaggucaucuggauccugaaguugauc

SEQ ID NO: 7526 - RNA, 102 nt, Human
ggucacucaucuguuuguucauuccuuuaacaaguaugugucgagugccuacuaugugcugggcacuguagguucaaugguaagaaaagcagauacaggacu

SEQ ID NO: 7527 - RNA, 81 nt, Human
ggucaggaguucaucuugauuuuuacauuugaaaauaaugaaauaaauuuacaaaauaaaaggaaaagugaauaucuuucc

SEQ ID NO: 7528 - RNA, 76 nt, Human
ggucaugauguuggauucuguugccuggguaccaccagagggaaagcuggggcggagggauuuguucguguugacc

SEQ ID NO: 7529 - RNA, 74 nt, Human
ggucaugugaagcguacgugugugugcauuguauguguguguacauugugugugcauugugugugcauguggcc

SEQ ID NO: 7530 - RNA, 93 nt, Human
ggucauugugcccugccaagcacagcguagaucuggaaagagcagaauguuauccuuuucagauguggcuggucauggaaggggcaguugucc

SEQ ID NO: 7531 - RNA, 91 nt, Human
gguccaauugguuccaagacgcguaggcgaguaggucugaaagcccccgguaucauaccucgaaucucagugcggggaaccaaugcagacu

SEQ ID NO: 7532 - RNA, 74 nt, Human
ggucccucuggcgccguucgguuucucuuauugccuucacugaggaugagucccuuuguggcucuauguggacc

SEQ ID NO: 7533 - RNA, 74 nt, Human
ggucccuucuaugugaaaagagaaggugggcugaagccucuaagaucuucuccaguuuucacauaguauggacu

SEQ ID NO: 7534 - RNA, 93 nt, Human
ggucccuugaauuuccauauuaauuuuaagagcagcuugucaaauugugcaaagaauuuagcugugauuuuaguaggaaauuuauuuuagauc

SEQ ID NO: 7535 - RNA, 86 nt, Human
gguccggcugcccuugaccgguccgaccuggcguccuccccgauaagccgccccacgggccggucccccgggccacaccgccggcc

SEQ ID NO: 7536 - RNA, 60 nt, Human
gguccuccuccuggacguuguaaaucaggaccccaccauaacuuaacaggaggacggauc

SEQ ID NO: 7537 - RNA, 63 nt, Human
gguccugguguacaauaauacauccauuguucaggaugagauucuugcucaccgucuggggcu

SEQ ID NO: 7538 - RNA, 83 nt, Human
gguccuguucuuacuaucucaaaaaugggcaucgaacaaucaaucuaggagcguggcaguggguaaaaugguggacaggcacc

SEQ ID NO: 7539 - RNA, 71 nt, Human
gguccuugccaucuccuuccaucugcccauuaacucucgcaagugccuccgugaggagauucacaaggacc

SEQ ID NO: 7540 - RNA, 125 nt, Human
ggucgcgcucacugcagauuggagaacaggugcaucucguagcucuucuuuggaaacaaaagaagccaccagcugaggaagaugcucaccggucaccgucccuuuauuuaugcccagcgaugacc

SEQ ID NO: 7541 - RNA, 72 nt, Human
ggucgcggagauggaauuggagcagagagaagggaccauggcagccgugggcuuugaggaguucucagcgcc

SEQ ID NO: 7542 - RNA, 82 nt, Human
ggucggaauuuugggauggcgcuguagcagcggcugucagucguagcccgugcgcccgcgccuguccugguccgguccggcc

SEQ ID NO: 7543 - RNA, 64 nt, Human
ggucuaugucaugaaugaacucggaggugaggcucuccucuagucaaggucaaauucauggguc

SEQ ID NO: 7544 - RNA, 99 nt, Human
ggucuauuucauuauugguggguagcgcauuuaacaguuaaauacauuuaaauaauguauaggugacugcaggacugcagcauugguaacuagauaacc

SEQ ID NO: 7545 - RNA, 75 nt, Human
ggucucacugaccccacaaggggcucuggagcugggauggccccagaggguuucccaaguuggggugaggaggcc

SEQ ID NO: 7546 - RNA, 74 nt, Human
ggucugauuggguuugguuuaguauuccuaugagcguaaaugguaaaauucuucugauacccacucuuuagacu

SEQ ID NO: 7547 - RNA, 78 nt, Human
ggucuguguguguagugagaguguguagccacuauuauaacuggaauuuaauuuacauucauaaacuacuauauuucc

SEQ ID NO: 7548 - RNA, 79 nt, Human
ggucuugaucuccugaccucgugauccacccaccuuggccucccaaagugcuggcguuacagguaugagucaccgcacc

SEQ ID NO: 7549 - RNA, 101 nt, Human
ggucuuguacuacuuccaagauugugcuaauuagugacaaacauugggcuuucccuucaauguuauggucuuuaugaaaacaaacaggauaguucagggcc

SEQ ID NO: 7550 - RNA, 82 nt, Human
ggucuuguugaacaguguguagacuaguggguugacugcugaagagagauaaccgauccaaacaaacacauugagcagggcc

SEQ ID NO: 7551 - RNA, 61 nt, Human
ggugacaacaugcuggagccaagugcuaacaugccuugguucaaagggauggaaagucacc

SEQ ID NO: 7552 - RNA, 61 nt, Human
ggugacaacaugcuggagccaagugcuaacaugccuugguucaagggauggaaaagucacc

SEQ ID NO: 7553 - RNA, 61 nt, Human
ggugacaacaugcuggagccaagugcuaacaugccuugguucaagggauggcaaagucacc

SEQ ID NO: 7554 - RNA, 61 nt, Human
ggugacaacaugcuggagccaagugcuaacaugccuugguucaagggcauggaaagucacc

SEQ ID NO: 7555 - RNA, 82 nt, Human
ggugagacagggagucccggcugcccuguggccccauucuguuguggaggcuucgcugggagcugagaacacccugcugucc

SEQ ID NO: 7556 - RNA, 79 nt, Human
ggugagagaauucauaaauauuaguuaaggaucuaaaacaaacuucucaaauaacugaaagcugaaaccucuggaagcc

SEQ ID NO: 7557 - RNA, 71 nt, Human
ggugagcaggaugagcacccuguaggccacacgaacuuucugguccucuuaucuccugccuccuucucacu

SEQ ID NO: 7558 - RNA, 75 nt, Human
ggugaggcuaggaccuggcccagggcaacugucuccucaacagcauuugcgccuccauuccauuuaguuuccacc

SEQ ID NO: 7559 - RNA, 99 nt, Human
ggugaguccuucaacuacaucugcaagguuuuauuucuuaggaaaauauuuaaagcaaauauuucaaaaaugacuaaaucugagugguagggagucacu

SEQ ID NO: 7560 - RNA, 103 nt, Human
ggugaguugggagcugugauggaucuguuggcggguuuuggauguguaaagaaugauauauauauuaaauaggucaaucagacuaugacagcuauguacgacc

SEQ ID NO: 7561 - RNA, 98 nt, Human
ggugcaaacaccccguucauguaacacgggccugaggucagcaguagaggaccaguauugguuuuggccccagccucugcguggauggauugaacgcc

SEQ ID NO: 7562 - RNA, 90 nt, Human
ggugcacccuguggaauuuggcagaaaaggcccaaucgcccuuuagagggugaacugaagccuguuccugcaauguucuaaggagugccc

SEQ ID NO: 7563 - RNA, 82 nt, Human
ggugcacgcauguaaucccagcuacucaggaggcugaggcaggggaaucgccugaaccugggaggcggagguugcggugacc

SEQ ID NO: 7564 - RNA, 87 nt, Human
ggugcacugcgagcgcgcgcggaccgcgcacaggcggcggagccgguaugggcccgccuggcccugggcgccgcgccgacgagcacc

SEQ ID NO: 7565 - RNA, 90 nt, Human
ggugcagcagucagcagcaaagugaaagcuguucagaacuacuggauuuuccaguggaagcuuugacaucauuaacucugucucugcauc

SEQ ID NO: 7566 - RNA, 98 nt, Human
ggugcaggguggggugggagugggcagcugccgcuacaccagcagaguaagacugcaggggugcagcccucccucccaugcccuucuguucagacacc

SEQ ID NO: 7567 - RNA, 65 nt, Human
ggugcaguaccgcggcgaggugcaggccaugcucggccagagcaccgaggagcugcgggugcgcc

SEQ ID NO: 7568 - RNA, 77 nt, Human
ggugccaagguaggggacagggccugggggugguuuugagggcaggcugccugggguguuguccucuucuugggauc

SEQ ID NO: 7569 - RNA, 109 nt, Human
ggugccagcaacagcugcaaccaggaucuugacauagucacuaguuggugaggauacaucagcuaucucaguauuuggggucacuggugcuucagugcuuuugcgcacc

SEQ ID NO: 7570 - RNA, 69 nt, Human
ggugccaggagaagcagcaucugcugaaagucagcuugcugguuugcagauggcugucuuccuguugcu

SEQ ID NO: 7571 - RNA, 76 nt, Human
ggugcccauccuuauguacauaguguuuucaauguuuagcuccgacuaccaaacgagaucaugcagcuaggauacc

SEQ ID NO: 7572 - RNA, 73 nt, Human
ggugcgcggugcucacagcucaucguggugccgggucacgguccucgccauaguugagugagccugacgugcc

SEQ ID NO: 7573 - RNA, 75 nt, Human
ggugcgggagcgacggggcccagggauuguguuuaaaguagugcuucuaccaacaugucccgugguuccagcgcc

SEQ ID NO: 7574 - RNA, 72 nt, Human
ggugcgugacgucucagaagaagggauucacucaguacuacuguacccccacuucgugacuagaauugcacc

SEQ ID NO: 7575 - RNA, 75 nt, Human
ggugcucagcagcgagaggacgcgucacucugccguucugcagggugacgcccuccccguaccucgcugagagcc

SEQ ID NO: 7576 - RNA, 74 nt, Human
ggugcugucgggcggaccaccauguauccgggcauugcugacaggaugcagaaggagaucaccgccuggcgccc

SEQ ID NO: 7577 - RNA, 80 nt, Human
ggugcugucgggcggcaccaccauguauccgggcauugccgacagaugcagaaggagaucaccgcccugggcccagcacc

SEQ ID NO: 7578 - RNA, 84 nt, Human
gguggacacuucugccacccuauucuguagccccagacagagauggggaaacauaugccuggagugacagagccuuccuccacc

SEQ ID NO: 7579 - RNA, 76 nt, Human
gguggacgggcuccugcggcaaggggacaugcuucgggcauuccaugcagccuugcggaacucucccgucaacacc

SEQ ID NO: 7580 - RNA, 71 nt, Human
gguggagcagaaaggcaggaguccugcucccuggcaccaucauggagcaugcccagcccagaucugccccc

SEQ ID NO: 7581 - RNA, 72 nt, Human
gguggagcagaaaggcaggaguccugcucccuggcaccaucauggagcaugcccagcccagaucugcccccc

SEQ ID NO: 7582 - RNA, 61 nt, Human
gguggagcgguucauuuauuuggaaacuaugacaugaaaaccaaauuugaaaacucacauc

SEQ ID NO: 7583 - RNA, 63 nt, Human
gguggaggaucacuuuugcccaggaguugaagaccagccugagcaacacagugagacuccauc

SEQ ID NO: 7584 - RNA, 84 nt, Human
gguggcacauugauuauaacacacagcugaggucucgaucacacuagaugucuccagucagucguguggaaaucgaugugcuuc

SEQ ID NO: 7585 - RNA, 86 nt, Human
gguggcacuggcaggaugugccuccugaggugugucgaguguucucuacauggggcacuguggaggugucaucggcucaguucccc

SEQ ID NO: 7586 - RNA, 88 nt, Human
gguggcccaagcguugccugcagguugauggcaggggcacgucaaggcguaacccuggaucugcgcauugcuggaccuaugggccacu

SEQ ID NO: 7587 - RNA, 86 nt, Human
ggugggauuggauuggagaugagguucgaauaaagucaguucauuacuugacacccgaacagugucuuuucuccaaaacuucuacc

SEQ ID NO: 7588 - RNA, 82 nt, Human
gguggggaugaaagcugagaaagcgaagaggugguucaggggaucacucuuuccuacuuguuccucucaccucaaacucacc

SEQ ID NO: 7589 - RNA, 60 nt, Human
ggugggggacacaggugcgcagcugcacagagucagcagcagcagccugcuccccgcacu

SEQ ID NO: 7590 - RNA, 78 nt, Human
gguggggggcgaacacgccgcgguccucgucgugugaaguaagaacucugcuagagaggaaauggcugcuucaucauc

SEQ ID NO: 7591 - RNA, 87 nt, Human
ggugggugaguuggcugccggugaguugggugccgguggagucguguugguccucagaauccccgcguagccgcugcuccuccuacc

SEQ ID NO: 7592 - RNA, 75 nt, Human
ggugguacaggauggcauagugaaggcccugaauguggaaccagauggcacaggccucaccugcagccuggcacc

SEQ ID NO: 7593 - RNA, 87 nt, Human
gguggugaccuggaagguguuguaggcauagucacagaaggugaccaccuuuugugcacgcucccggccacgcaugagguucacgcc

SEQ ID NO: 7594 - RNA, 81 nt, Human
gguggugccaaguguaucccucgcguuuaaagaggggauggucacacuauuccaagaaacuggggcaggcagggaaccacc

SEQ ID NO: 7595 - RNA, 73 nt, Human
ggugguggacugcacuccggggccauuuaaugucuuuaggccuugagucucggcuucggucccagucaacgcc

SEQ ID NO: 7596 - RNA, 68 nt, Human
gguggugggugugaggaagggcugggcacuuucacugucuuuuccuucauaaacuggcaagcacuacc

SEQ ID NO: 7597 - RNA, 127 nt, Human
ggugguuuguuucaccuaucaacccgucaucuagguuuuaagccccgcaugcauuagguauuuguccuaaugugcugcuucccuuuucccccaagacccugacaggccccugggugugauguucccc

SEQ ID NO: 7598 - RNA, 71 nt, Human
gguguaaauguugagccuuuuuggccuggcuuguuugcaaaggcccuggcaaacgucaacauugggaagcc

SEQ ID NO: 7599 - RNA, 63 nt, Human
gguguacagauuuuucacaagacuuggacagauuuaucaguccuggcuagacaaguccacacc

SEQ ID NO: 7600 - RNA, 78 nt, Human
gguguagaagcauuucuuuacugaaccuuaccagggagccauccaggauccugaagaguuuguggaaggaauggcacu

SEQ ID NO: 7601 - RNA, 106 nt, Human
ggugucggcgcgggagcagcacuuccacagccaagugcgggaguccacgguuguuuuugagcacguucacucucgcagugucagcuggggcuguuuugcuuuuacc

SEQ ID NO: 7602 - RNA, 76 nt, Human
ggugucggcuccgucaaccacuuuugugcaccuguccccacgaggacacauggacaauagugcgacugcugagacc

SEQ ID NO: 7603 - RNA, 88 nt, Human
ggugucuccucagaugauaacaguuuucauugacggcuacuaugaggaacccauggaugugguggcacuguuuggucugaggggcauc

SEQ ID NO: 7604 - RNA, 74 nt, Human
ggugugagcucugaggaguccugaacccugggugcagcauccuagcauccugggaguccuuuucugcccacacu

SEQ ID NO: 7605 - RNA, 73 nt, Human
ggugugcccgaugugcagcgagcaguucccuccugacuaugaccagcagguguuugaaaggcaugugcagacc

SEQ ID NO: 7606 - RNA, 71 nt, Human
ggugugcccggaaccggcccuugguggggaaauaaugccuuugcuaagggggccccggauuccgggucgcc

SEQ ID NO: 7607 - RNA, 63 nt, Human
ggugugguggcucaugccuguaaucccaggacuuugggaggccaaggcgugagcaccugcgcc

SEQ ID NO: 7608 - RNA, 79 nt, Human
gguguuccugaaguaucugaaaaauaugaaauuagcucuguucccacuuuucuguuuuucaagaauucucagaaacauc

SEQ ID NO: 7609 - RNA, 60 nt, Human
gguguuggcgggggcggagggcaggggaacgggauccuucucccgcugcccaccaacacc

SEQ ID NO: 7610 - RNA, 95 nt, Human
gguguugggucugccgugccucccuuccuuccuccucuuggggccacuggcugcuccaguuccccauccguggcaagccgguagagccauucauc

SEQ ID NO: 7611 - RNA, 92 nt, Human
gguuaaacucugcuuauucauguuuaaagacgcugaaaacuuauguuuucagauuuuuauuccccuaacaggauaaaagccugguuaccacc

SEQ ID NO: 7612 - RNA, 75 nt, Human
gguuagagaaacucaucagaagaaaguuucaaucacuucacuguuauuuucugcaauucuuauucucuuauagcc

SEQ ID NO: 7613 - RNA, 102 nt, Human
gguuagcagagaaacuuggaaaguucuguguuaggaucuugcuggcagaauuaacuuuuugcaaaaguuuuauacacagauauuuguauuaaauuuggagcc

SEQ ID NO: 7614 - RNA, 100 nt, Human
gguuagguaacccuugugacccuguaugaagguccacuuccuuccuuuccuccgggagggaauggucuucguggcuuggaauuauaagucaaccugcacc

SEQ ID NO: 7615 - RNA, 72 nt, Human
gguuauaguacuaccaauguuggugacuugguaagauuauauccaggugauugguguguguguauuauggcu

SEQ ID NO: 7616 - RNA, 106 nt, Human
gguuaugaggcauuuuuugaaauucauauauccuuacuauaauagugaaucaucaaguguugaauguaagugcaguagaaauuaugaaaucucuugccacagaacc

SEQ ID NO: 7617 - RNA, 87 nt, Human
gguucaaauguaagucccuccgaugccuucuuucugcuccccgcgcagugcauagugaggccacugcugcuuacccuucccggaacc

SEQ ID NO: 7618 - RNA, 69 nt, Human
gguucaccggcuucaugguaugcgcggguauuuccgaaaaagcuaucuuaagcuggaacauuuugaacu

SEQ ID NO: 7619 - RNA, 72 nt, Human
gguuccuguuguuaucuguaccuaaguuacucaguucugagugcaugucugguacagauaacaacaggagcc

SEQ ID NO: 7620 - RNA, 76 nt, Human
gguucgggccaagcggggcacagcccagggcuucgggaugcccgaggugggccaucacacucugcuggagccaacc

SEQ ID NO: 7621 - RNA, 81 nt, Human
gguucuucaguugcuucaggccaucuggauguauaugugcaggucacaggguuaugauggcuuagcuugggcucaggggcc

SEQ ID NO: 7622 - RNA, 105 nt, Human
gguucuucaucuuguguuugaagacaagaagcuggauccggaacuccugcucugugagguccaggaagccagccagcuuggccacaggcauggugguguagagcu

SEQ ID NO: 7623 - RNA, 94 nt, Human
gguucuugcagauucccaaggaaaugucagaaaggcaaaauggccagcauuauccauuugcuuuuuuggguuuacugggugaauagcacuuucc

SEQ ID NO: 7624 - RNA, 64 nt, Human
gguugaacaaugcucucacauuacaggaauuuagggccuagaauguguaaggcucuugccagcc

SEQ ID NO: 7625 - RNA, 82 nt, Human
gguugcacaacgagcacagcccggacuaugaguuggagaucuaaauucugaucugagucuggaacugacaaguugugugacc

SEQ ID NO: 7626 - RNA, 100 nt, Human
gguugcgcagagguggucuuauccagcucagcuuccccugggacccaccgugggaccugaggcagaacugggguggacuuggccuccuccauggcacacc

SEQ ID NO: 7627 - RNA, 71 nt, Human
gguugcugcugcccaaggaccgcggagucggacgcaggcagaccauguggacccuggugagcuggguggcc

SEQ ID NO: 7628 - RNA, 130 nt, Human
gguuggcuuucuuuauaaggugggugaggaagacuaacaaaaguaaugugagccagugucuucaaaaggggggcugaaaccaguugcaaaaaaugucagucuauagccacucccaacccaccuacuuccc

SEQ ID NO: 7629 - RNA, 105 nt, Human
gguuguauguuuugaccacuuccaccuaugaaaauuaucugaacauuauucagauuuaagaguucaugggagcaggugguacagaaccuaguguugaauauaauu

SEQ ID NO: 7630 - RNA, 111 nt, Human
gguugugggcagagcuccuggcccggaugcugucuccuguucuaucgagagacuuggaagaucagcacugagauuauuaugagcagaauggucaggaggaugcccagagcc

SEQ ID NO: 7631 - RNA, 77 nt, Human
gguuguuaacaucugacacagugagugagaaaaaauccagcacagucacugggcagguuuaagaagaaguggcagcc

SEQ ID NO: 7632 - RNA, 72 nt, Human
gguuguuuuuaaaaaagcucuucuguuuaaaacauauuuguaaaacaagauuuggaugacauggaagcaauc

SEQ ID NO: 7633 - RNA, 89 nt, Human
gguuuaaacaagauuggaaggaacaauuuaaaagcacucauguauaauugauaugucaaguuacuaaucauuccucuauucauuaaacc

SEQ ID NO: 7634 - RNA, 97 nt, Human
gguuuacuguguaccuauccugccuuaauucuagaaucagcucuuucuccaacaagcuuugguucuucuuaguggcgcaugauauguauuagagacc

SEQ ID NO: 7635 - RNA, 73 nt, Human
gguuuccaccuccugccuccggcccuccagaggggugaggccccaaccccagggcagcagaaggaugagggcc

SEQ ID NO: 7636 - RNA, 89 nt, Human
gguuugugauuuuucuguaaaggaaaaggcagggugauuuaaccaguuugaccaccuuuccuguacucuuacaggaaaaucgcagcacu

SEQ ID NO: 7637 - RNA, 78 nt, Human
gguuuucaagcaugcaaaacaguuuauuguaacuuacugaaaaauauuaacaauuaauugugaauacaugcuguuacc

SEQ ID NO: 7638 - RNA, 79 nt, Human
guaaaacaauggccauacucuguugaggaccaccaaggaaacuaucuuuuuacuuggucauuaacaaaugccuuuuuau

SEQ ID NO: 7639 - RNA, 125 nt, Human
guaaaucucccugauaccaucacucuuaaaccuuuagaaaugcuacagcaucuagcuucucuagaucaauaaucacagaggcuuaagugcugaccucauaaagauaaagaguucccaugauuuac

SEQ ID NO: 7640 - RNA, 107 nt, Human
guaacuagccauucucaugaugaaaugacauugguauuugagagggaacagaaaaaucacaguaccugcucuugaguucauucacgcuacagggaagagcuaguuac

SEQ ID NO: 7641 - RNA, 78 nt, Human
guaacucuucucuuguaccaggaagcagcuguaggugggguaaugggaucugucuccuggugcagaggggcagcuuau

SEQ ID NO: 7642 - RNA, 83 nt, Human
guaacugaauaguggaacucagaaagacauccuauucagaaggaucucucaugauaauaguuuccuucacuauuguaguauac

SEQ ID NO: 7643 - RNA, 106 nt, Human
guaacugcaaagaugcuguccgugcgcguugcugcggccgugguccgcgcccuuccucggcgggccggacuggucuccagaaaugcuuggguucaucuuucauugc

SEQ ID NO: 7644 - RNA, 93 nt, Human
guaagcagucuggauucguguuuauugaagccaguaauuagagacaucuuuuuuucccaggacuagaaagcaagguuccacaugacugcauac

SEQ ID NO: 7645 - RNA, 75 nt, Human
guaagcuaugugaguuuuacaaugcuuuuaaacugucauauuuccuguugagcacuuuaacuggcacauucuuau

SEQ ID NO: 7646 - RNA, 109 nt, Human
guaagggacuugaguauacuuggauuuuugguaucuguggguuggggggacgguccaggaaccaauaccccauggauaccaagggacaacuguacuuauuuaccuuuau

SEQ ID NO: 7647 - RNA, 81 nt, Human
guaaguccugcucauguauguuccuuuauuugaagcaaaccuacagguguuucuuaauaugacagaaucaugaagacuugc

SEQ ID NO: 7648 - RNA, 98 nt, Human
guaaguuacugacaagccucagcaaacccaaagauguuaacaguauuuuaagaaguugcugcagauuccuuuggccacuguauuuguuaauuucuugc

SEQ ID NO: 7649 - RNA, 76 nt, Human
guaauuucugcuuuguuggucaggguuuacagcauuaauggacagguucacccugaccuacaagucggaacgugac

SEQ ID NO: 7650 - RNA, 82 nt, Human
guacaccagagacuccgggucacucacugucagaauauucuuauacauacaaugagucuccacgccuguacaaugaguguac

SEQ ID NO: 7651 - RNA, 82 nt, Human
guacagaagugcaauguacagaagccacguguacauuuugugccaauuccguaccauguguacauucuguaccauucuguac

SEQ ID NO: 7652 - RNA, 130 nt, Human
guacagauaaggaauugagcgcagaaaaguugugacuugcucaaguuuucaggguuagaaaguggcaaagaccuaauucuaaaaaggcuuuauaauuacagauuuugugcucuuaucuuuuauucuauac

SEQ ID NO: 7653 - RNA, 60 nt, Human
guacagggagaucuggaguucuguuuccuccuguuggauucuagaacuccauguuaguac

SEQ ID NO: 7654 - RNA, 79 nt, Human
guacauaagugucaugcagcaggacgucacuguuggaagaagucuccucaugaccauaucccuguuguccauuguguau

SEQ ID NO: 7655 - RNA, 99 nt, Human
guacauguuaugggguacagagugauauuuugauauauuuaugcaauacguaaagaucaagucagagucauuaucauauccauuaccuaaaucauguau

SEQ ID NO: 7656 - RNA, 79 nt, Human
guaccaugaaugcgcuaaagcuggacuccaugacuguaccggaggcggcacaggguaccagcgacuaguaugauggugc

SEQ ID NO: 7657 - RNA, 71 nt, Human
guaccccucucagucugcaguauugaguuguuuaaaguauaugugcagucuugcuuacaaggagggguuac

SEQ ID NO: 7658 - RNA, 89 nt, Human
guaccgcucugucaucuagguuggugugcaguggaguggcauacuguuaauuucacagaguauauaauuuagguuuccaaagaggguac

SEQ ID NO: 7659 - RNA, 88 nt, Human
guacgaggcuggguuuacaugaagaucuggugucgccaugggcucgcgccccgcccguuguuaccgguauuguaagaacaagccguac

SEQ ID NO: 7660 - RNA, 91 nt, Human
guacgcugugacacaggagagcaagaucacguauuuggaaagagugaugacccaagacugauuaugaaucuccaaguaacacaucaaguac

SEQ ID NO: 7661 - RNA, 75 nt, Human
guacggcguguccucccugcagcgcggcguggccgacuacaugcgcgcgcaccuggcgggaggcgcgggcccggc

SEQ ID NO: 7662 - RNA, 81 nt, Human
guagaacccaauagaaauaugugauaaauaaauacaaugucaaguuagaaaaaauguuguaguuucauguuguugguuugc

SEQ ID NO: 7663 - RNA, 73 nt, Human
guagacauggucuuuucccucuagagcuuaccagaugagugugagauaaauagaaaaguaaacaugccauugc

SEQ ID NO: 7664 - RNA, 74 nt, Human
guagagacggggucuuguuauguuccacaggcuggucuugaacuccugggaccaagcaauccucccaccucugc

SEQ ID NO: 7665 - RNA, 72 nt, Human
guagagaugggguuucaccauguuagccaggauggucucgaucuccugaccucgugauccacccaccucagc

SEQ ID NO: 7666 - RNA, 67 nt, Human
guagagcuuuaugcugaaaagguggccacuagaggucugugugccauugcccaggcagagucucugc

SEQ ID NO: 7667 - RNA, 72 nt, Human
guagaggugggguuucaucaugggggccaggauggucucaaucucuugaccucgugauccgcccaccucggc

SEQ ID NO: 7668 - RNA, 86 nt, Human
guagaguuaagccuggcaggagcgugcucuguugcacuaaaugugugguggcaggccccucaaagccgugguuggaauaaucuuac

SEQ ID NO: 7669 - RNA, 81 nt, Human
guagauaaaaggugaaccaugugacaugggcauuuuuguaagucaaaaacaaauuucacauaugguaaaccuaauauucac

SEQ ID NO: 7670 - RNA, 71 nt, Human
guagcauguacauauugccgaucuggguucauuuauuccuuccagauuauuuauuaucuauuuacugcugc

SEQ ID NO: 7671 - RNA, 62 nt, Human
guagcgcagguacgucgucuguagcaggcaggaaucaguggcuacgggaugaccugugcaac

SEQ ID NO: 7672 - RNA, 71 nt, Human
guagcuuuaaaagucuugaucucuggugauguaagucaucuaacguccuuuguaaagacugccuuggcuau

SEQ ID NO: 7673 - RNA, 89 nt, Human
guaggaggagucagggauuuucugguuugagagacaaugacacacaccccuaaguucaccuucucucgaauaguaggcccugcucuuac

SEQ ID NO: 7674 - RNA, 60 nt, Human
guaggcaugacuaagggguaaggguugacuauucuugagcuaccucaccaacuugccuau

SEQ ID NO: 7675 - RNA, 79 nt, Human
guaguacagaagagaaaaucaguggaucaucuaugagucaagaugcccaucuuuggauuucuaauguuauacuagcuac

SEQ ID NO: 7676 - RNA, 85 nt, Human
guaguggguguugagauugaacgcuuucuuaauugguggcugcuuuuaggccuacuauggguguugaauuuuuuacucucucuac

SEQ ID NO: 7677 - RNA, 108 nt, Human
guaguuaccauugccuuuucugugagcuauuuguuuugguuugcugaaacuaguccaaaacaggaaauuuaacagacagccacagccaaagagugucaugugaauuac

SEQ ID NO: 7678 - RNA, 73 nt, Human
guaguucuugagcagugcgucaugguugugcgaguuugugucaaacuugcuguacgucugcuugaggaucugc

SEQ ID NO: 7679 - RNA, 72 nt, Human
guauacggggaccgcugaaagcuguggcuuuauaggauagggagagucauagcauaucaggucucauuaugc

SEQ ID NO: 7680 - RNA, 71 nt, Human
guauacuugaugggacaggcauugcccggugucaccauguugggcuugagcaggguccccuccagguauac

SEQ ID NO: 7681 - RNA, 72 nt, Human
guauauauaugauaaaugauuauaacgugugugucagugacaauauguagucuuugguuguuaguuauauac

SEQ ID NO: 7682 - RNA, 86 nt, Human
guaucucuuccgucuguuuguccauucuuuuaacacugggcuuuggcuucacuucacagguaggaggcugggcacaaaagggauac

SEQ ID NO: 7683 - RNA, 86 nt, Human
guaucugccagcagaauggcauggugcccaucguggagccugagauccucccugauggggaccaugacuugaagcgcugccaguau

SEQ ID NO: 7684 - RNA, 73 nt, Human
guaugagggaagggagguggaagcucauaucccaccccaggggguuuugaggaucuuuucccuucucucucac

SEQ ID NO: 7685 - RNA, 92 nt, Human
guaugcacagacagaguugggacaugggacauaucuucagggccuggagacugaagccaccuaugacgcagccacccaggaguuugugauac

SEQ ID NO: 7686 - RNA, 76 nt, Human
guauguaaacaauuauacauguauuuaucacccuaaaagguugaaacauguaaucaacuaauucucuucugcauac

SEQ ID NO: 7687 - RNA, 85 nt, Human
guauguuagacugggauugucuucaucaucaucuuuauccagucauacagcaggggugacagaaaaacauucucaggacucauac

SEQ ID NO: 7688 - RNA, 76 nt, Human
guauugcuauuuguuuaaagcacucacauaaauccauuucacccaaaaaggaaacauaaagugcuucuagcaguac

SEQ ID NO: 7689 - RNA, 76 nt, Human
guauugggcgcaggggcagaagucaggagcuuuguacuguuuuuauaugaucucaacuguuuuugugacuuauuac

SEQ ID NO: 7690 - RNA, 95 nt, Human
guauuuuuaguggagauaggguuucaccauguuggccaggcuggucuugaauuccuggccucaggugauccgccugucucagccccccaaagugc

SEQ ID NO: 7691 - RNA, 71 nt, Human
gucaaaaagcagucaucuauucauugaauuuuacagcaaacccaccucaaagaguauuugaacuuguugac

SEQ ID NO: 7692 - RNA, 89 nt, Human
gucaaauccacacauguauauucucucuaugcccaggcccaucugggggagggcagcccagagacacgugugcaccugugugggcugac

SEQ ID NO: 7693 - RNA, 71 nt, Human
gucaacagcagcuggaggaaaauggcaagaacuuggaaucaagauuagguuagaauaacacugcuguagac

SEQ ID NO: 7694 - RNA, 87 nt, Human
gucaacagcgacuucuaccggaggaugcagaacagcgauuucuugcgggagcucgugaucaccaucgccagggagggccuugaggac

SEQ ID NO: 7695 - RNA, 69 nt, Human
gucaaggauuuggguuggggcacccaggaagccugaggguuagcuggguggaccuccuggcuccucggc

SEQ ID NO: 7696 - RNA, 60 nt, Human
gucacccgggagcggagguugcgugagcaggauugugcgacugacuccagccugggugac

SEQ ID NO: 7697 - RNA, 73 nt, Human
gucacgaaagagugucggauucggaucgcugguggauugccagacgagguuuagggucgcggcuacaagugac

SEQ ID NO: 7698 - RNA, 97 nt, Human
gucacgauggcucaugccuguaaucccagcuacucaggaggauugcuugacccugagagguggagguugcagugagcucagaucacaccaucgcaac

SEQ ID NO: 7699 - RNA, 66 nt, Human
gucacuuuaaacugaggaaacggcaaaugguguuuuaaagcucuuuguauuucuccaguuucugac

SEQ ID NO: 7700 - RNA, 94 nt, Human
gucagaacccuuuuccacgugcagaauggcuuugauggcuugugugcgucauccguucuaagccauugcugaccguuccccugggggggcuggc

SEQ ID NO: 7701 - RNA, 71 nt, Human
gucagaggaaaaggcacuuugaaccuccuguaacgaugcugagguuuggacauucugacccagccccugac

SEQ ID NO: 7702 - RNA, 79 nt, Human
gucagauggagacugagaaagcaagauguuggcuaccagaaauggaguuucaaaaauuuucuuaaaagcucuauuggac

SEQ ID NO: 7703 - RNA, 84 nt, Human
gucagcagaucccagugaaggguuuuguguguuuaggccucauuucuuugucuuuuuccuacuccguuccuggcauuugcugau

SEQ ID NO: 7704 - RNA, 110 nt, Human
gucaggacuguuggcuaagggaaugucugcuuggacugaucauugaacaaucuuuccaacuaaaagcuucuaugauucucuaaguagcaaucagcaccgacaguuaugau

SEQ ID NO: 7705 - RNA, 75 nt, Human
gucaggccgguuuaaucggccgaggguucagucagagcuagaacauuccagaggucgcccagcuccggcgcugac

SEQ ID NO: 7706 - RNA, 97 nt, Human
gucaggggugcccauaaugaauuguguuuacccugagaacaaauccacuacauuggaauuuuaggcauaaccaguaucauuaaaaggagccccuugc

SEQ ID NO: 7707 - RNA, 108 nt, Human
gucagugccaauuuugccggucacacugggguccccaaagaagucaagguaaucauccugaaucugaaagaacucccccaucuccagcaggaucuucuuggcauuggc

SEQ ID NO: 7708 - RNA, 88 nt, Human
gucaguguuccagguguaucuuagcuaaaacuagagaaugcccuaacuuagaugguuuuugaagccuauacaauugguauuguuugac

SEQ ID NO: 7709 - RNA, 62 nt, Human
gucaguuguggaagaggucaucacuccccggaaggaccuggccucuuuaauccucaauugau

SEQ ID NO: 7710 - RNA, 88 nt, Human
gucaucaucaucaucaucgucaucaucaucaucuucacguuuucuuuucaaugcauuugaugauucauuggcaguauuuugugaugac

SEQ ID NO: 7711 - RNA, 81 nt, Human
gucaucuacaacaacaguguaagugaaccugcuguugcccucagcaacaaguucaccaucauuagagcccuguagaaugac

SEQ ID NO: 7712 - RNA, 71 nt, Human
gucaucuuucuccuccucuugguugguuuacaagaguagugaauacuucaguuauggacagaaagaaagac

SEQ ID NO: 7713 - RNA, 73 nt, Human
gucaugugaugcucaaucagcaaaccagggauuggcuucauccugggaaaaagcuaucugggugcaacaagac

SEQ ID NO: 7714 - RNA, 67 nt, Human
gucauucaagaguugcuuguggacuacuaugugaaagauacaagacacaaauguaacuucugaggac

SEQ ID NO: 7715 - RNA, 62 nt, Human
gucauuuuggguugccgugcucccaaaacauuuuaaaugaaaguauuggcauucaaaaagac

SEQ ID NO: 7716 - RNA, 99 nt, Human
guccacugauauucacuagccuguuuguccucaccccugaagcagauaaacacauguagauggaggaaaagugacaggcagguggguucaucagugggc

SEQ ID NO: 7717 - RNA, 60 nt, Human
guccagaagaagcuacuccuuccagcaggccuaauaggauggcaucuaauauuuuuggac

SEQ ID NO: 7718 - RNA, 64 nt, Human
guccauauuacccuucagcaccugagucccaagcugaggucucaacaugggugaugugaaggac

SEQ ID NO: 7719 - RNA, 70 nt, Human
gucccagaucacugccgcugaaccuguagggaccuuauaguacaaauuagaugcagcguagaucagggac

SEQ ID NO: 7720 - RNA, 66 nt, Human
guccccggcagcgguuggcgaguggggaccgaacccccgguucuccaugaucccgcuggccggggc

SEQ ID NO: 7721 - RNA, 64 nt, Human
gucccggcgaagagaagagacacauuguuggaaggcagcccaugacagcuucccuuccugggac

SEQ ID NO: 7722 - RNA, 106 nt, Human
gucccgggagcguguguucuccgaggaccgggcccgcuucuauggcgcugagauugugucagcccuggacuaccugcacucggagaagaacgugguguaccgggac

SEQ ID NO: 7723 - RNA, 87 nt, Human
gucccuaucacucggagcggagaccugagcuaugagucaucagugaggugcuauacucagagccauuccgcucaggucauggaggac

SEQ ID NO: 7724 - RNA, 64 nt, Human
gucccucaaauaaaagucacuuucacgagguggucaaggaaggccagugugcuuuuguagggac

SEQ ID NO: 7725 - RNA, 70 nt, Human
gucccuccgaacaagugaaaagagguccuuguaugucagggcccuguuugauuaugaucggacucgggac

SEQ ID NO: 7726 - RNA, 75 nt, Human
gucccucuucuccauccugcuggucguggaggacucccgauggucucugcgcaucaguggucauggcucugggac

SEQ ID NO: 7727 - RNA, 74 nt, Human
gucccugucauugguggccaugcugggaagaccaucaucccccugaucucucagcgcacccccaaggugggaac

SEQ ID NO: 7728 - RNA, 86 nt, Human
gucccuucccuccccaggccucgcuuccccagccuucugaaagaaggagguccaaggggaucgagggcuggcggggagaagcagac

SEQ ID NO: 7729 - RNA, 63 nt, Human
guccgcucugacucggcuggcgucuuucgcucgcguuggaggccgccuuuucagaagcggugc

SEQ ID NO: 7730 - RNA, 76 nt, Human
guccgggacucagggacuugguggccacgcagcuguccauagggagguugaaugguugcugcacuuugguccggau

SEQ ID NO: 7731 - RNA, 75 nt, Human
guccggggcgaggggcccaucuucuucuacacugggaacgagggcgacgugugggccuucgccaacaacucgggc

SEQ ID NO: 7732 - RNA, 85 nt, Human
guccuauaguguugaugcauuuucacuucugugguccuaggaaauggacuggucuaaagagagugaggcacaacacaagcagggc

SEQ ID NO: 7733 - RNA, 74 nt, Human
guccucccucaccagaugauuccuaggacucauggugcaacauacaggagccaggcuuuagggacggggaggac

SEQ ID NO: 7734 - RNA, 69 nt, Human
guccugcgccgucagcacaagccacgcuucagacacaagaggcccaagagcuucugcuaggugcagggc

SEQ ID NO: 7735 - RNA, 64 nt, Human
guccuucaugggccugcuggccauguacaccuacuuccaggccaagauaagggcccugaagggc

SEQ ID NO: 7736 - RNA, 78 nt, Human
guccuucuccuaggugggauaaaacucugggaaagccuuuuuuccucuggagaguaggauuuucuuguggagaaggau

SEQ ID NO: 7737 - RNA, 87 nt, Human
guccuugaacuuggaaccugacaauguugguguugucguguugggaaaugauaaacuaauuaaggaaggagauauagugaagaggac

SEQ ID NO: 7738 - RNA, 86 nt, Human
guccuugugcuccgcggcacccccaaggucacucaggcccugaacguccugaccacgaccuucgggcgcugccagagccccuggac

SEQ ID NO: 7739 - RNA, 85 nt, Human
guccuuugucauacauggcagcguaaguguaagcaaacucuucuaugaacacucgcucaaaccagccuuucagaauggcagggac

SEQ ID NO: 7740 - RNA, 93 nt, Human
gucgaccuguguaaauugucucaaaaauuugggggaagggaaauucauucaagcucuucccaaaaaguuuuugggaaccaaaaaaaaggcggc

SEQ ID NO: 7741 - RNA, 70 nt, Human
gucgcccaggccggagugcaguggugcgaucucagaucaguguaccauuugccucucgggcucaagcgau

SEQ ID NO: 7742 - RNA, 112 nt, Human
gucggagucacaggucuuuuguucgguggcagcauccacugcagaggcuaggcugucuuccuggccuuucagccuuucacggaucagcucggcaauggcccucugaguccgc

SEQ ID NO: 7743 - RNA, 73 nt, Human
gucggcuuuuauuauuccuaaacaaaagagcuuuauuuucucaugaguagguuuuagaguuuuaauuguugac

SEQ ID NO: 7744 - RNA, 87 nt, Human
gucgguggggcggggacgcgagguguggauggggggucgccuugaccucugccucagccaguagcgcagucucggccucgccguuac

SEQ ID NO: 7745 - RNA, 73 nt, Human
gucguagacggaauaguaggaccugaggaagacauccccgaggauccacaggggcuggccguucugggaggac

SEQ ID NO: 7746 - RNA, 61 nt, Human
gucguccccacagcuccggaagugcuuggcgccguugcgucacuuccggaucggggucgac

SEQ ID NO: 7747 - RNA, 74 nt, Human
gucgugcgugccccaacgaaggggggaaacaacccagacgggaagacccccaauaguggagagggccgcaucac

SEQ ID NO: 7748 - RNA, 70 nt, Human
gucuaauccuuuuuguagucacucauaggccagacuuagggcuaggaugaugauuaauaagagggaugac

SEQ ID NO: 7749 - RNA, 74 nt, Human
gucuaucaguggauggcauaauuaacuuuucgcauauuuugggcuuagaggucggauuaccauccgugguuuac

SEQ ID NO: 7750 - RNA, 92 nt, Human
gucucaaugccgcaggcaacuacuggucacccgggccagcugcagugucuggcugggguuaccguggccuggaguaccugcggcuccgagac

SEQ ID NO: 7751 - RNA, 102 nt, Human
gucucaccgagcaccuaggaggcaguccaggcucuuuagcaugguguuggaagcccuuaaugaucugcuacagccugggccuccagccuccucuccuuccac

SEQ ID NO: 7752 - RNA, 88 nt, Human
gucucacugagccuuagucgucggcaggucccaggcgcgaaguuucucggccuggaggagggggucgcgcgaagugccagaugcaggc

SEQ ID NO: 7753 - RNA, 61 nt, Human
gucuccagugauccacagacugcgauucagaaccgacguacagcuagguaucucuggagac

SEQ ID NO: 7754 - RNA, 66 nt, Human
gucuccgggguagcaggggcugcucugugcugggcugggccaguagggggcgcccucccugggagc

SEQ ID NO: 7755 - RNA, 70 nt, Human
gucucuuuuuaccuaguaagaguagacuucuuuaagucaaggaauaugcuuuauucaggugcucggcggc

SEQ ID NO: 7756 - RNA, 78 nt, Human
gucugaaacauuuuacuucauauuacacauacuuuucuuuuaaaaaaggcagaaacauugaaggaaacaacacucaac

SEQ ID NO: 7757 - RNA, 86 nt, Human
gucugauucugguuuugaguuacucuuuguucaguaacugcacuuuauuuuauuguccaaagagagucagagcuaagcauacaggc

SEQ ID NO: 7758 - RNA, 60 nt, Human
gucugcaauuaccacacaguuuggguuggaugugucgaucugaucaaauucugagcggac

SEQ ID NO: 7759 - RNA, 78 nt, Human
gucugccccagccuuguuuuacucccugcauuccauauucuguuguuccggcuugcagcccacagggcuggagaagau

SEQ ID NO: 7760 - RNA, 63 nt, Human
gucugcugccuuuuguuuagcuaagcccugcccacagagguugagucuauagaggcaguaggc

SEQ ID NO: 7761 - RNA, 71 nt, Human
gucuggaccugggacccacugcagauuauguuuuuccugacuuaacugagaaggcagguuccauugaagac

SEQ ID NO: 7762 - RNA, 79 nt, Human
gucuggaggcuaggaagugcaagaucaaggugccagcagauaugguaucugguuagggcccacuuccuaguuugcagau

SEQ ID NO: 7763 - RNA, 117 nt, Human
gucuggauuuuaaguccuugugcacggauggucucaagugaucaggauaguguggucgguacacccaaagcuugugaaugacuccauccaaagagcaucagucuguauucccaugac

SEQ ID NO: 7764 - RNA, 72 nt, Human
gucuggggcccugcgccugaugagcugccaugaaaguggccgccucucacacuggcaggcgguggcucagau

SEQ ID NO: 7765 - RNA, 63 nt, Human
gucugggugcaguuuauucugauuuacucugaggugagcugaaaucaggaccgcagcucgggc

SEQ ID NO: 7766 - RNA, 74 nt, Human
gucuuaagcugauuucagaaaacaaugcaucugucagaugucauuaagcaacaaucugggauacagaccuagac

SEQ ID NO: 7767 - RNA, 80 nt, Human
gucuuaucuguauuuuacugucugcucuuucugacugcuuguaaugagaagacaagugauuuucuugaaaugccugaggc

SEQ ID NO: 7768 - RNA, 84 nt, Human
gucuucaaaaugggguuuauaguaucaagugaggcuguuugguucuucugaaaacacacucauuuucugacacaugggcuagac

SEQ ID NO: 7769 - RNA, 76 nt, Human
gucuucauaucuccagguucugcuggagcaauuaccucccccaucuggcuccuuaggaccuagagguaguaaaggc

SEQ ID NO: 7770 - RNA, 68 nt, Human
gucuucuagaacgcuuggcguggaccucuuuaagugggucccuugcaagcguauuuccuuaagaagac

SEQ ID NO: 7771 - RNA, 72 nt, Human
gucuucuaugaaaaggcugauaaugggcugggcgcgguggcucacgccuguaaucccagcacuuugggaggc

SEQ ID NO: 7772 - RNA, 81 nt, Human
gucuugaaucucuauaguauucucaaauaagguccugaaacaacaggcuuuuauguuaaauucaauacuucugagcaaggc

SEQ ID NO: 7773 - RNA, 65 nt, Human
gucuugcuaggccaggucuuccaggugguuaccggggucacauggauuucugggcggagcgagau

SEQ ID NO: 7774 - RNA, 76 nt, Human
gucuuggggaagcuuuguuaaauuuuuguuaauguggguaaaucugaguuuaauucaacugcuucccuauauagac

SEQ ID NO: 7775 - RNA, 67 nt, Human
gucuugugcccacacugagccagcaaaguccugcugucacacccacaagcuccuugggggacaggac

SEQ ID NO: 7776 - RNA, 72 nt, Human
gucuuuggguaauuugaccccacgugcucucuggcccucaagcauguaaccucggggucugaggcccaggac

SEQ ID NO: 7777 - RNA, 74 nt, Human
gucuuuuguaaaucaaguaagaauccauuaaagaaauuaauuuuaaaugugcauuaccugguuacauaaaggac

SEQ ID NO: 7778 - RNA, 91 nt, Human
gugaacuuggcugggaccucagggcuuggagucagauagcuuugggaccuuggagacaugacuuaaccucucugggucucaguuuucucac

SEQ ID NO: 7779 - RNA, 91 nt, Human
gugaagacacgggagaaaauccaccauaauaaaacugacauucaauuuucaacuuuaguuauuuaacacagauuuucuuuauucucuuuau

SEQ ID NO: 7780 - RNA, 64 nt, Human
gugaagggcuugggauucguggcagcugaguccucacugaccaaggauugcccuugugcuuuac

SEQ ID NO: 7781 - RNA, 74 nt, Human
gugaauggaggugcucgugauguaaaacuucucauggggggaaccagggcauuacuuuuaaccaaaacauucac

SEQ ID NO: 7782 - RNA, 62 nt, Human
gugacaccacccaucuccaacauucagaugcccaggaugguaauggagguaaagugugucau

SEQ ID NO: 7783 - RNA, 79 nt, Human
gugaccuacuccaaugugugaggauggcuggacugccugcaugugccugccucgccccaugccuguggacuggaaacac

SEQ ID NO: 7784 - RNA, 72 nt, Human
gugacuacagccugccccugacuguguugucccagggcugaugcuguacagguacaggcuggagauuuucac

SEQ ID NO: 7785 - RNA, 60 nt, Human
gugacuccugcgggcgcccccacuucuuuuugggggugggagggccaggcgucggguuau

SEQ ID NO: 7786 - RNA, 62 nt, Human
gugacugccugguuaagaucuacaaaucugaugggauuaagggccuguaccaaggcuuuaac

SEQ ID NO: 7787 - RNA, 73 nt, Human
gugacuuugaugauuugaaaggagaacuagaugaauauguccaaaaauaccucccuggaaaaauuaaagucau

SEQ ID NO: 7788 - RNA, 90 nt, Human
gugagcgcacauagugucucacgugacuacuaguaugccaccugcaugaggcauuaacuuuaaacauggucugcgggacaugccgcucau

SEQ ID NO: 7789 - RNA, 89 nt, Human
gugagggccugccugggcccgugucauagucccugccccaggccgacggccugcaggucucgggggugacgcucgcuaggcgcuuucac

SEQ ID NO: 7790 - RNA, 94 nt, Human
gugaggggagcugugccuggauccugccuccaagucacaugagcacuagcucauaguggcagggugggggugggaggggcaggucuaaacucac

SEQ ID NO: 7791 - RNA, 96 nt, Human
gugagggguggcauaucggucgcuaccggaaaacucgcuaugggggcgcggcaugugccaacgcgaugcuugguaugccggaugucaaccuuucgc

SEQ ID NO: 7792 - RNA, 87 nt, Human
gugaggguggcuggacaaguuggguagaccugcaaaagggccagcggcucucugcauggcucuggccauccggcacuuucccuugac

SEQ ID NO: 7793 - RNA, 96 nt, Human
gugaggguuuaccacauaauccgggauuucuuggcaaugcccaaagacuuucugggccuucuaagagcaacaguggaucaagcugguaacccccau

SEQ ID NO: 7794 - RNA, 74 nt, Human
gugaguccauggcuaaaucaaagcugccccugagaagagacuuaauccaagccugauuguacuaguggcaucac

SEQ ID NO: 7795 - RNA, 71 nt, Human
gugaguuuaucaauaacucaggcauacuaagucaacacuuaaauuguguuucuguuuugaccuguacuuau

SEQ ID NO: 7796 - RNA, 71 nt, Human
gugaguuuuguuuccaccuggacugucaccugccggcccugcaggauguaccaggggaggaguggagcugc

SEQ ID NO: 7797 - RNA, 78 nt, Human
gugauccacacgcuggcccaggaguucgacauuuaccgcgaggugggcggagagccugugccugugacgagggaugau

SEQ ID NO: 7798 - RNA, 60 nt, Human
gugaucucagaggaaggagcaggcaccauucuuugcuguucuccaaccuccuugagugac

SEQ ID NO: 7799 - RNA, 82 nt, Human
gugaugaauuuggaagaaaaagacauuccucuacuucuggugaggagaguaaucgucauagacuuccaccuaauuccucuac

SEQ ID NO: 7800 - RNA, 93 nt, Human
gugaugcuuggaagcauuuucugugcuuugaucacuaugcuaggacacauuaggauuggucauggaaauagaaugcaccaccaugagcaucau

SEQ ID NO: 7801 - RNA, 73 nt, Human
gugaugggcacaaugggcccuugguaccugcugcugcugcuuggucacugugugggccucuauguggccucgc

SEQ ID NO: 7802 - RNA, 65 nt, Human
gugaugggcuagcacuuauaucgggugauucgauuuacaccgcguauaacuuuccagcccagaac

SEQ ID NO: 7803 - RNA, 95 nt, Human
gugaugucaugugaugggugaugucaugugaugggugaugucaugugaugugugaugucaugugaugggugaugucaugugaugcaugaugucau

SEQ ID NO: 7804 - RNA, 79 nt, Human
gugauguccggagauucggagcggcgauaucuggaucuaagucuccgcuccgaugugaagucuaucucugugacaccau

SEQ ID NO: 7805 - RNA, 79 nt, Human
gugauguuagggugucaauuuuagaucuuuccugcuuucucuugugggcauuuagugcuauaaauuucccucuacacac

SEQ ID NO: 7806 - RNA, 62 nt, Human
gugauucucucagcccugagguauacagaaucauuugccucagacugcuguuggauuuuaac

SEQ ID NO: 7807 - RNA, 96 nt, Human
gugauuuuaccuuuauuuccuucacuuuaagccaaucaugaaauuucacagugauuucuggggugggagcagaaggaaggcuguguuaagaaucau

SEQ ID NO: 7808 - RNA, 109 nt, Human
gugauuuuguucugagagaaggugauuggaguccuccaccuggcacugauuugagucauucaaggguuaggaugcaggucaucuuuuuucaauauuucaacaaaauuau

SEQ ID NO: 7809 - RNA, 72 nt, Human
gugcaagcccuguugugcuuguauauaauacauguacucucacagaccccaaaacagcugcuuuaaauguac

SEQ ID NO: 7810 - RNA, 75 nt, Human
gugcaaugggaaggacgacuguggggacggguccgacgaggccuccugccccaaggugaacgucgucacuuguac

SEQ ID NO: 7811 - RNA, 78 nt, Human
gugcacucaacagaacggcccuucaaaugugagaaaugugaggcagcuuucgccacgaaggaucggcugcgggcgcac

SEQ ID NO: 7812 - RNA, 72 nt, Human
gugcagacauucagcugugccgcggucacuguggaguucaugcacuacauaaucgcugcacgugcccugcgc

SEQ ID NO: 7813 - RNA, 94 nt, Human
gugcagcuggaauucuuucuaaccucacuugcaauaauuauuagaaccagaugauggucuggcaagugggugguauagaggcucuugugcguac

SEQ ID NO: 7814 - RNA, 77 nt, Human
gugcaggcugcgacaacgugguacucaucuggaaugugggcacagcggaggagcuguaccgccuggacagccugcac

SEQ ID NO: 7815 - RNA, 72 nt, Human
gugcaguggcucaugcauauaaucccaacuaucuaggaggcugaggugggaggauuguaugagccgagaaau

SEQ ID NO: 7816 - RNA, 62 nt, Human
gugcaucagccggcuugaguuuguucaauaucaaagcugaaaacuagcgaggucugcuguac

SEQ ID NO: 7817 - RNA, 110 nt, Human
gugccaauacaggacuaauugucagccuagaaaaggaacuugcuccauuguuugaagaacugagacaaguuguggaaguuucuuaaucugacagugguuucaguguguac

SEQ ID NO: 7818 - RNA, 83 nt, Human
gugccaccaugaacccaggugaaauaacacaagcauguggcucaucacaaagccuguuugguggucucuucacauggacgcgc

SEQ ID NO: 7819 - RNA, 73 nt, Human
gugccacuuuaugauggggauaugagaaaugcauuguuaggcaguuucaucaugcaaacaucauagaguguac

SEQ ID NO: 7820 - RNA, 106 nt, Human
gugccaggaggugguggacacguacggcaagcuccauccuguccauccugcuggaggaggucagcccugagcuguugugcagcauguugcacuucugcucuggcac

SEQ ID NO: 7821 - RNA, 81 nt, Human
gugccaucagucagguaccacuuaaaggauguacaggcgacuucuagauaucuguugagagccugguaaggggugaaacac

SEQ ID NO: 7822 - RNA, 99 nt, Human
gugcccaacauuggcagguggccaauaauugcaaaauaagcaaauguaugaaugaaccauuagaugcuuuguguuguauacuuacuaccugcugggcac

SEQ ID NO: 7823 - RNA, 80 nt, Human
gugcccugccccgcgcugggggccggaguccuugaauguggcuucaggggcuccuguccugggccagggcugaugggcac

SEQ ID NO: 7824 - RNA, 80 nt, Human
gugcccuggccccuaggcaccugcggccuggcccagaaguguccugggacugccggcggccgccugcgggagaagggcac

SEQ ID NO: 7825 - RNA, 82 nt, Human
gugcggguuuguuacauagguaaacgugucccauggugguuugcugcaccuaucaacguaucaccuagguauuaagccccac

SEQ ID NO: 7826 - RNA, 98 nt, Human
gugcuccuuuuugauauagauaaaauauuuaaugcuucuauuuacaucugcucauguagguuuuacaauauuccauguauauccaauguggaugguac

SEQ ID NO: 7827 - RNA, 62 nt, Human
gugcugggauuacaggugugagccaucuuuguuuuuagauucacauucauauacucccgcau

SEQ ID NO: 7828 - RNA, 96 nt, Human
gugcuggugggggccgacucugugagggcagccaucaccuucagcuucuuuuccaucuucuccuggggugugcuggccucccuggccuaccagcgc

SEQ ID NO: 7829 - RNA, 74 nt, Human
gugcugguguagaagcugcagcaaguucuccacaagacugagguaagaccacugaugaaguggcuacacuacac

SEQ ID NO: 7830 - RNA, 83 nt, Human
gugcuuauaaagugaaggggucauacaguugggccuucauuauuuugcugaauuaugugaugauucuuuugcuuucuacccac

SEQ ID NO: 7831 - RNA, 92 nt, Human
gugcuucaacugguaucuaugaggcccuagagcuccgggacaaugauaagacucgcuauauggggaagggugucucaaaggcuguugagcac

SEQ ID NO: 7832 - RNA, 92 nt, Human
guggaaacugcucucucacgacucucaaagaugaagacuuuuguaaacguguaucuuuggcuacuguggauaaaacaguuugaaaacuccau

SEQ ID NO: 7833 - RNA, 95 nt, Human
guggaaugggccuaaaguagugacaagguagucacagacuucuggaggaggguacuugggcuggugucuaccuggcauauuuaggaacauuccau

SEQ ID NO: 7834 - RNA, 83 nt, Human
guggacuuaaccauugcaaagcacacugucuuucucagcguucucugcaagucaguagguguuaguaugguugcaaaguucac

SEQ ID NO: 7835 - RNA, 72 nt, Human
guggagcagauaaccauuguuucucggccgcuaucuggucagaggggagcugggccgggaaauucugccuac

SEQ ID NO: 7836 - RNA, 71 nt, Human
guggaggcacacaccuguuggguuccaucuaacgccugcgggagguguauacuaaggggugcgacccccac

SEQ ID NO: 7837 - RNA, 62 nt, Human
guggaggugacuggugaugaauacaauguggaaagcauugauggucagccaggugccuucac

SEQ ID NO: 7838 - RNA, 82 nt, Human
guggagugaggcuggagaggggcuuggcaaucuucaggaauugaugcuguagcagcucuuuagcugaaccucucuucuccac

SEQ ID NO: 7839 - RNA, 61 nt, Human
guggagugcaccugggguugggggcacugugcccccagcccccugcuccuuuggacucuac

SEQ ID NO: 7840 - RNA, 100 nt, Human
guggcagggucauaggauaauaguggagagaaggucagcagauaaacacgugaacaaaggucucugguuuuccuaggcagaggucccuguggccuuccgc

SEQ ID NO: 7841 - RNA, 67 nt, Human
guggccagaagccucguuccuccugacucuuccugcagguggcucaggaaggauucagccuggccac

SEQ ID NO: 7842 - RNA, 66 nt, Human
guggcccaaacccagcugggucccuuccuccuaggcagcugagggaaggacugcuggguuggccac

SEQ ID NO: 7843 - RNA, 67 nt, Human
guggcccagacccagcugggucccuuccuccuaggcagcugagggaaggacugcugggauuggccac

SEQ ID NO: 7844 - RNA, 78 nt, Human
guggcccagaguccgagucgugcaggugcugugggcccugcuggcagugcuccuggcgucguggaggcugugggcgau

SEQ ID NO: 7845 - RNA, 88 nt, Human
guggcccaugacaaucuuuuuccaauguggccuggggaagccaaaagauuggacaccccugguuacaggaagaaguuccuugugcuau

SEQ ID NO: 7846 - RNA, 103 nt, Human
guggcccucauccuucagaauguggaucugccgaauugaagaggccugauuucagcuccaccagaugcagauuuguguuuuguuuucuuguuaucacugucac

SEQ ID NO: 7847 - RNA, 71 nt, Human
guggcccuuggaaacacuguaugaacugaagcacgcuucacauaucaggcaaguuacccaagggcaagcac

SEQ ID NO: 7848 - RNA, 66 nt, Human
guggccgcuucaguaggcagcgagcaucugugguggggggagcugcugcaguuccugaacggccac

SEQ ID NO: 7849 - RNA, 116 nt, Human
guggccuuuuuuccuuuuucuguaggccgccuuaagcuuucuaaauuuggaacaucuaagcaagcugaagggaaaaggggguuucgcaaaaucacucgggggaagggaaagguugc

SEQ ID NO: 7850 - RNA, 61 nt, Human
guggcgaggaguccgagccguugggggcauccaggcccagcugcugggagaccuuggccac

SEQ ID NO: 7851 - RNA, 114 nt, Human
guggcggcggcgcgugcgacggucaccucgguuuggggaagauggaagaguugagucaggcccuggcuaguagcuuuucugugucucaagaucugaacagcacagcugccccac

SEQ ID NO: 7852 - RNA, 73 nt, Human
guggcggcuccagacccggguagugccuuuguccccugaauacucacucccccgguccagagggccuucccac

SEQ ID NO: 7853 - RNA, 66 nt, Human
guggcguuuauucccuuaguauguaggugacccaggguggcuuugcuuuggcaagggagaagucac

SEQ ID NO: 7854 - RNA, 76 nt, Human
guggcucauugcuuaggugcccagguuuuucaggugcaauuaaaauuuagaacuaccacacaaaggcauuggcugc

SEQ ID NO: 7855 - RNA, 82 nt, Human
guggcuccgaucgagcgggaucaagcugcugcugcagguccaugcacgccagcaagcaggaucgccgccgacaagcaguuac

SEQ ID NO: 7856 - RNA, 78 nt, Human
guggcugcagagcuccacagagaaggggaucagagugagacugggcucuacaagccuuugugauguaucugcagccac

SEQ ID NO: 7857 - RNA, 93 nt, Human
guggcugcguggacaaguggcgucgcgguagccccuuacccggcaaaggcccgguuggggcucuguugcgggcgcacgacgcacggcggcgac

SEQ ID NO: 7858 - RNA, 88 nt, Human
guggcuggguuuagaaugauuccuugggaaaagggguagcaaaguaacuuuguccugaagaagccccaaguauccugagcccagcagc

SEQ ID NO: 7859 - RNA, 79 nt, Human
guggcugguggagcugucuuaaacgaagagaaccaugagcaaugaagucuguuuaccuuauuacacagcccacagcuac

SEQ ID NO: 7860 - RNA, 93 nt, Human
guggcuucaauucuaagaguggacagcggggaucuuccaagucuggaaaguugacaaggagaugaccuucaggccauucagaaaggagcugac

SEQ ID NO: 7861 - RNA, 63 nt, Human
guggcuucacgcaauccccacaccucggccuuccaaagugcugggauuacagguguaagccac

SEQ ID NO: 7862 - RNA, 97 nt, Human
guggcuuuaaaagacggacagcuuuagguuuguucucacuggaacugguuacacuuucugugcaaacuuaaccaagugaugaucgucuggaagcugc

SEQ ID NO: 7863 - RNA, 64 nt, Human
gugggaaaacugcuugacagaauucacauacuccgagguauaugcaguucugagucugugccac

SEQ ID NO: 7864 - RNA, 94 nt, Human
gugggacaaauauaaacaaagcaugauuuaaauauauauauauuuaaugugugauauguuuguauauauauuuaaacacaugcaauuguucuac

SEQ ID NO: 7865 - RNA, 108 nt, Human
gugggaccucuguggguccaggaucuuggaaugguaucccaugguucaaucuucuggauucaaccacauaaauuuaccccacccaugucguggacccaagcuuccuac

SEQ ID NO: 7866 - RNA, 92 nt, Human
gugggaccuucuguuuggcaggcuuccucucccuugccuggucaugguuuucuggugagaagaguguuccuggccuugcuggagguucccau

SEQ ID NO: 7867 - RNA, 84 nt, Human
gugggagcucgaagauugcugcacugugcauuucaagcaacaaagucugaaaagugccagggcaauuucuucacaguauuucac

SEQ ID NO: 7868 - RNA, 88 nt, Human
gugggaggaggacuggcaaaaauaugagaguaggaguuugggcucuugagcuugggccuggccuucaaauuuccacucuuucacucac

SEQ ID NO: 7869 - RNA, 60 nt, Human
gugggcaaggucaucccugagcugaacggaaagcucaccuggauggcuuucgugucccau

SEQ ID NO: 7870 - RNA, 94 nt, Human
guggggcccgugggcagcugggcaacuggauguccccagcugauuuccagcgagcuguggaugagagguuuccaggcugcaugcagggccgcac

SEQ ID NO: 7871 - RNA, 72 nt, Human
guggggcuggaagaaaagagcaucgacuugauuucuccaaccacucaucccucuuuuucuuucuucccccac

SEQ ID NO: 7872 - RNA, 83 nt, Human
gugggggcgcucaauaacuuggauaccggucggcauggucacaacacccgacagugcucuucgccagaaguuggcggcccuac

SEQ ID NO: 7873 - RNA, 73 nt, Human
gugggggcgguugugaucaugaggucaggaguucaagagcagccuggccaaaauggagaaagccugucucuac

SEQ ID NO: 7874 - RNA, 98 nt, Human
gugggguaaaacccagacgccaugaaagcggccauggccuuggagaaaaagcuuaaccaggcccuuuuggauuuucaugcccuggguucuugccgcac

SEQ ID NO: 7875 - RNA, 98 nt, Human
gugggguaaaaccccagacgccaugaaagcugccauggcccuggagaaaaagcugaaccaggcccuuuuggaucuucaugcccuggguucugccccgc

SEQ ID NO: 7876 - RNA, 98 nt, Human
gugggguaaaaccccagacgccaugaaagcugccaugugccuggagaaaaagcugaaccaggcccuuuggaucuucaugcccugggguucugccgcac

SEQ ID NO: 7877 - RNA, 98 nt, Human
gugggguaaaagcccagacgccaugaaagcugccuuggcccugggagaacaagcugaaccaggccuuuugcaucuucaugcccuggguucugccccgc

SEQ ID NO: 7878 - RNA, 100 nt, Human
gugggguugaaagcuaagaaagugaggaggugguucaggggaucacucuuuccuacuuguuccucucaccucaaacucaccuucuacugcgcagcaacac

SEQ ID NO: 7879 - RNA, 86 nt, Human
guggucucccgcgcgggacggagggacuggccggagcuggcgcuuucucagcacuagaucuggacuccgacccggcgccagaauac

SEQ ID NO: 7880 - RNA, 73 nt, Human
guggucuguauugugcuuguacugaccauguauauaugcuaugguuauuuagugcuagcuaagaacauaccau

SEQ ID NO: 7881 - RNA, 79 nt, Human
guggugccaccgcaguugcagaaaggaaugucagucagaaaugaauuguguuucagucacucugcaugguugcugccac

SEQ ID NO: 7882 - RNA, 96 nt, Human
guggugccugguggagaccuggccaagguacagagagcugugugcaugcugagcaacaccacagccauugcugaggccugggcucgccuggaccac

SEQ ID NO: 7883 - RNA, 65 nt, Human
gugguggcacaugccuguagcuccagccauuugggaggcugagguaugauaauugccugaaccau

SEQ ID NO: 7884 - RNA, 101 nt, Human
gugguggcaggcgccuguagucccagcuacucgggaggcugaggcaggagaauggcaugaacccgggagguggaacuugcagugagccgagaucacgccac

SEQ ID NO: 7885 - RNA, 93 nt, Human
gugguguaugggaucugcauggagguggucuaugagaaagcaaaccccagugagugcugcuucgggauucucuccaacugcaaccaugccuac

SEQ ID NO: 7886 - RNA, 60 nt, Human
gugguguuguuuugguccugauaggaagcugaagcugucuauccucuacccagcuaccac

SEQ ID NO: 7887 - RNA, 78 nt, Human
gugguuaaacgugagacccugggggccaaaagguguggggaccacaaggagaagacucucgggggaacaaugagccac

SEQ ID NO: 7888 - RNA, 105 nt, Human
gugguuacguuuuccacaggguaaugcauuugcaaggacaucaauccucuuccucuggguggcucucuuugauggaugcauuuccaugaugaaaugacaaggcac

SEQ ID NO: 7889 - RNA, 71 nt, Human
gugguuagugucuaugcucagaauccaaugcggagagagucucguccucugguucagacuguaguaaccac

SEQ ID NO: 7890 - RNA, 69 nt, Human
guguaaaauuucucccgggcacuggagucuugcuccgcguaguaacucuccaagccuucugggaugcac

SEQ ID NO: 7891 - RNA, 72 nt, Human
guguacgggcaguucacgggccaggcccuccucucagggcgagagaugguggggcccacgcugcccggauac

SEQ ID NO: 7892 - RNA, 94 nt, Human
guguacuuuucaauccuguguaauguuuaauucuugcaacugaaucaaaacaguguuaaauuauggcaauauugcacuuggggaaugaguacau

SEQ ID NO: 7893 - RNA, 83 nt, Human
guguagagugggccucuggaguccggcugccuggguucaaguccaggcuccccuacucggggcacaggggugcugcucugggc

SEQ ID NO: 7894 - RNA, 72 nt, Human
guguagcaggcuuccugcagacuguauagacugcacaacaaauuucuccuguaccuaugggaagccugucac

SEQ ID NO: 7895 - RNA, 81 nt, Human
guguaggggcgaggggguggcggugccaggguccugcaguucaccaggugcccacgugccugccacccgagcgccauucac

SEQ ID NO: 7896 - RNA, 60 nt, Human
guguauauauuuacggggucuaugagauguuuugauagacaugcaacgugaaauaagcac

SEQ ID NO: 7897 - RNA, 81 nt, Human
guguauuucgaguggcaucagucucacucaucuguggugccccgguguuuacaagagccagauggugucagaggaguacgc

SEQ ID NO: 7898 - RNA, 105 nt, Human
gugucacuugugcuuugcucuugucccacgugucuuccacuuugcauaugagccgugaacugugcauagugcugggauggaggggaguguugggcaugugaucac

SEQ ID NO: 7899 - RNA, 97 nt, Human
gugucccuuccaagcuguguuaacuguucaaacucaggccugugugacuccauuggggugagaggugaaagcauaacauggguacagaggggacaac

SEQ ID NO: 7900 - RNA, 69 nt, Human
guguccucccugcauccccccaccaagugccuuccugaaggccuggguguauuggccaggagaggacac

SEQ ID NO: 7901 - RNA, 103 nt, Human
gugucucaacuugagaaaccaaauagugcgaagggacucaggguggccagaccugugaccuuggccucauuuguaucuuguuuucgcugaggugaucagacac

SEQ ID NO: 7902 - RNA, 92 nt, Human
gugucucuaugaguccucucuaggaggagccuacaagcaguugguccgagcucgcuucacccgcucuuuccuggcccaaaucauaggacugc

SEQ ID NO: 7903 - RNA, 66 nt, Human
gugucuggaaaaauucaccgugagccugaaccacaagcuggacagccaugcggagcuucuagaugc

SEQ ID NO: 7904 - RNA, 100 nt, Human
gugugaaggcucuaagagacauugaaccuggagaagaaauuucuuguuauuauggagauggguucuuuggagaaaauaaugaguucugcgaguguuacac

SEQ ID NO: 7905 - RNA, 73 nt, Human
gugugagucccucugggagcccaacauggauccggaucaccuguuugaaaccaucucccaggccauucaacgc

SEQ ID NO: 7906 - RNA, 68 nt, Human
gugugcacagaugaacgaaguuauggcagaguuagcuaaagaacucccucaaguuucauuugugaagc

SEQ ID NO: 7907 - RNA, 76 nt, Human
gugugcauaaacuucuaucuccauguugguggccuauacgggcacccaugugaccaaggaacguugccuugcacac

SEQ ID NO: 7908 - RNA, 75 nt, Human
gugugccagacuuccguugagucacauauagacaggaccaaaacauacgugacucuuguuagccacuggcaacau

SEQ ID NO: 7909 - RNA, 70 nt, Human
guguggccgaugugucuauugaagauucugugaucucacucucaggagaccauugcaucauuggccgcac

SEQ ID NO: 7910 - RNA, 72 nt, Human
guguggucgaagcuucugaagcugccuacaaggaagccuuugaaaucagcaaagagcagaugcaaaccacgc

SEQ ID NO: 7911 - RNA, 76 nt, Human
gugugguuaugucucuguauaggcaagugucugugucuauagauacuuuugcuuuuuauagugauuaaagcuccac

SEQ ID NO: 7912 - RNA, 75 nt, Human
gugugguuuggacgaauuccaacuuguuucacgcuauaucaggaugagauaacugaaagggaagcagaaccauac

SEQ ID NO: 7913 - RNA, 66 nt, Human
guguguacacggguccuuuuuugcaaugaaauacaugguuaugacuugaauccaaaguguauacac

SEQ ID NO: 7914 - RNA, 102 nt, Human
guguguaguaguaucucauuuugguuuuaauuuauauauuucccugaugauuaaaaggggauguccuguaaauguuuucuuuugugaaauaccauagcacac

SEQ ID NO: 7915 - RNA, 92 nt, Human
guguguccgcaggcgcccgacgcugccgaugucccggggcugagccgcgcccaggugucccggacagugcgugcgagcguguguguccgcgc

SEQ ID NO: 7916 - RNA, 65 nt, Human
guguguccguggggccugccuugccuucugccucccugcagcugagguggcuaggcuugacacac

SEQ ID NO: 7917 - RNA, 80 nt, Human
gugugugcauguaugugugcauguguguguguguaugcgugugcgugugcaugugcaugugugcgugugugugugugugu

SEQ ID NO: 7918 - RNA, 95 nt, Human
guguguuuaaacaaacuguugcugagauucugcauuagucacaacgaauuuaccaaaauugguuugauucagauuuggcaauguguaaacuucac

SEQ ID NO: 7919 - RNA, 74 nt, Human
guguucuuguuugaucuucacguuaagaugcuauugagcuuuuuuauccauggauggucuuccaacaacugcau

SEQ ID NO: 7920 - RNA, 64 nt, Human
guguugccaaagauucaccgaagauaaacacuacccuuguacuuugguggggacuuuggaacac

SEQ ID NO: 7921 - RNA, 74 nt, Human
guguugggcugugacuggccugccagguguuugccucccucugcaacaccagccuguuacuaacagccuagugc

SEQ ID NO: 7922 - RNA, 84 nt, Human
guguuggguggcaaggucuaugugaucggaggcuuugacggcuuacagagaaucaacaacguggagaccuacgaccccuuucac

SEQ ID NO: 7923 - RNA, 73 nt, Human
guguuguacucauuaauguuauuaugagguuaauguuauuauuaggcuuuuaacaauaugacuguguacacau

SEQ ID NO: 7924 - RNA, 95 nt, Human
guguugugucccuggguacuugagauuagggaguggugaugacucuuaacgagcaugcugccuucaauccauuuaacccugaguggacacagcac

SEQ ID NO: 7925 - RNA, 79 nt, Human
guguuugaaagcucuguuuauaaauagugauugauacauuuaucauguauuuggugcugaagauaaacacuuuuuacau

SEQ ID NO: 7926 - RNA, 76 nt, Human
guguuuggaacugcuaccgauacaucaaugguaggaacuccucugauguccugguuuauguuaccagcaaugacac

SEQ ID NO: 7927 - RNA, 81 nt, Human
guuaaaaugucuauugggguccuuauuuaacucucaaaaggguuuuagaaguaaauagcagauucaacuauccauugaagc

SEQ ID NO: 7928 - RNA, 91 nt, Human
guuaacuuaaacauguuccccuuaaaugcacuugauggguguugaaauggucaaccuucuuaaaauuuuuaagaugaacuuaguucuuaac

SEQ ID NO: 7929 - RNA, 95 nt, Human
guuaaggacucugaagauguaccuaugguccuaguaggaaauaaaugugauuugccuucuagaacaguagacacagaacaggcucaggacuuagc

SEQ ID NO: 7930 - RNA, 83 nt, Human
guuacaaaauccuguguucgguuguaaccugaacucauuaaaagacuuguuuucagguuuaucaacuguuuauuuucacugac

SEQ ID NO: 7931 - RNA, 61 nt, Human
guuacaucuuggaaccugagccauggagguggcgccaccucccugaggagaaagguguggc

SEQ ID NO: 7932 - RNA, 69 nt, Human
guuacccuggcuggagugcagugacgugaucacggcucacugcggccacaaccuuccagcuuaggugau

SEQ ID NO: 7933 - RNA, 74 nt, Human
guuacggaacucucacuucuguguuauggacauuuucaugacaugcacagaaguggagaggaugguucugugac

SEQ ID NO: 7934 - RNA, 84 nt, Human
guuagaaaugcaaauucuugggcucugcccuagaccuacugaaacauacucugugggcggggcccagcaaucuguguuugaaac

SEQ ID NO: 7935 - RNA, 79 nt, Human
guuaggcuucugaggggucaggcagaauaugguguccauaucuuccauagcucugcagauucuugggaugaagucaagc

SEQ ID NO: 7936 - RNA, 72 nt, Human
guuaguuaacgcuguucacguagcucuuuucugccuuuucacuuagagcuguguguguaccaguuuccugac

SEQ ID NO: 7937 - RNA, 66 nt, Human
guuauagcugucggcugucugagagcaccuuuagcuacagaggcucauggauucgcagguuauaac

SEQ ID NO: 7938 - RNA, 74 nt, Human
guuauuuugacuugccucuucaucuggcaaaaucucugaaccacugcucuggagaugacagcaggcaaaaucac

SEQ ID NO: 7939 - RNA, 65 nt, Human
guucaaucagggguuucucacucucuuccuucagggagagcccagcgaguuuccuucguaugagc

SEQ ID NO: 7940 - RNA, 102 nt, Human
guucagaccaagaauucacugcaacaagauaucagcugaugguuacgaaguagaaaaucucaucucugaagaucucacaaagagaagucaugguuucaggac

SEQ ID NO: 7941 - RNA, 110 nt, Human
guucagcaaauccacuguaaguagugugaguacauagcucaccuaucaacaauuuucuuucuaaacuugaaggugagaacuauaguacuuaugcuuugucaugguugaac

SEQ ID NO: 7942 - RNA, 77 nt, Human
guuccaaauguugaugcaugugguuaauguugcauuagagcacuuugcaauugcauaauucauuaauguuugugagc

SEQ ID NO: 7943 - RNA, 73 nt, Human
guuccacgcaccgccuuugaguuggacacagauggcaaccccuuugaccaggacaucuacgggcgcgaggagc

SEQ ID NO: 7944 - RNA, 107 nt, Human
guuccauugacuaauggcagagagcugugcuucaaauacagcuguggucugagcaaacuuggcugcucuaaauacugaaugccaguuccuuugccaauuccaugggc

SEQ ID NO: 7945 - RNA, 87 nt, Human
guucccgccucaagauguugcaaaggagcugaagcugguguucccgggcgcccagcgaaugaaccgaggucgacaugaagugggggc

SEQ ID NO: 7946 - RNA, 78 nt, Human
guuccugagugggaagggcuuggugaucuauccgaaaauuggagacaagcuggacaucaucugcccccgagcagaagc

SEQ ID NO: 7947 - RNA, 95 nt, Human
guuccuuaggccacacccugcccucccuggacugccugaccucgcuccaaggcucaggggaagguucugagggcaggugugaaaaugcuuggaau

SEQ ID NO: 7948 - RNA, 63 nt, Human
guuccuucauucugaccuucaaauguguagagagcuuugcacgucccuauggcagggaggggc

SEQ ID NO: 7949 - RNA, 81 nt, Human
guucguagguuauaaauucuguuaguugcuaagaagcauuuuuaaaauuauguacuauagcucuuuauucagcagacgaac

SEQ ID NO: 7950 - RNA, 99 nt, Human
guucuagcucagguaguagucguacuucuucucggucuucuucuccuaaaaggaaaaagagacacaguaggaguagaucuccaacaaucaaagcuagac

SEQ ID NO: 7951 - RNA, 71 nt, Human
guucucaaagagguucuuuucagagcacguuccuuguaauggcuucagugacauugagaaccuugaaggac

SEQ ID NO: 7952 - RNA, 74 nt, Human
guucucuuucucugcaucugccucaguacuggggagauucugggacugaaccuaagauucagauggcagagagc

SEQ ID NO: 7953 - RNA, 69 nt, Human
guucugaauaacuuuauugcaagucacauaaucuugguuuagacuugacgcaacgggagguuacagagc

SEQ ID NO: 7954 - RNA, 82 nt, Human
guucugcagccuccuggccaguguaugagaggucccuggggaacagcagaggggcugccgauggguggguaggguguggagc

SEQ ID NO: 7955 - RNA, 76 nt, Human
guucugggagcucugcaaaaucaguagcaagugcuggaaaaggcacaugccgaagauacucaagagcucccaagau

SEQ ID NO: 7956 - RNA, 73 nt, Human
guucuguauaaacugguggacaguaaguuaguuccuuuguuuuaacuuauaagcccccacuucaccgcagaau

SEQ ID NO: 7957 - RNA, 73 nt, Human
guucuguuacacaauguuugcacaggcacagugguuucgccacgaaccgguguacacuugucaggggcagagc

SEQ ID NO: 7958 - RNA, 67 nt, Human
guucuugagcagugcguacaugguugugcgaguuugugucaaacuugcuguaggucugcuugaggau

SEQ ID NO: 7959 - RNA, 96 nt, Human
guugaacuugaccucgggggggauagacauggguuuggccuuuaaaaacauggccccagcagcuucaguccuuuucucgucgauggucagcacagc

SEQ ID NO: 7960 - RNA, 81 nt, Human
guugaagcugauguuacuagugguagauugguucauacgaugcacggaggggucaaugugucaaagacaucgguuaucaac

SEQ ID NO: 7961 - RNA, 71 nt, Human
guugaaggaagugagcacauuauuuguacugugaauauaaauuuuuggccuuuuauuuaucuuccuuugac

SEQ ID NO: 7962 - RNA, 112 nt, Human
guugaauucaaaaauuggaucucacuuaggcuuugaaggugacagccaucucugauagcugagcauaaguaaagaaagguggagugccgaugcagaaaggaaaauauucagc

SEQ ID NO: 7963 - RNA, 64 nt, Human
guugagaugauugugaaacuagguaucuuucauucugacuccuaguuuaacauuuaauuuugac

SEQ ID NO: 7964 - RNA, 66 nt, Human
guugaggcugaucccaggcacuguugcaacccagcugggugugugcaugcuuggggcagcacugac

SEQ ID NO: 7965 - RNA, 78 nt, Human
guugaugaagaugaaccuacuguaguaccaaccacuucugcaagaauggaaucacaagcuacuagcgcuuccauuaac

SEQ ID NO: 7966 - RNA, 74 nt, Human
guugccaaggaaggcuuuuucugauuuuuugacaaaugaauuuuugcacacuuucauuggugucuuucggcaac

SEQ ID NO: 7967 - RNA, 60 nt, Human
guugccaccgaggaggcggcggcccugcgucuggaacgccguugccaccgaggaggcggc

SEQ ID NO: 7968 - RNA, 69 nt, Human
guugccagaacgcugguguggggcgcuugucuuugggaccuuugugcuucccaguguguguuugguggc

SEQ ID NO: 7969 - RNA, 78 nt, Human
guugcccgagccguugccgucguaacuaggcguccuggaaguccacgucguuuaccguuuguaaggcgcuugcgcagc

SEQ ID NO: 7970 - RNA, 72 nt, Human
guugccuaucacagaugaacaaauccaggagaugaaaucaaaccuggagaacaucgacuucaagauggcagc

SEQ ID NO: 7971 - RNA, 80 nt, Human
guugcgcgugccugggaagcuaaaccccugcgguguuguuccugugggcaagugucuagcgcaugcaggugccgucugac

SEQ ID NO: 7972 - RNA, 71 nt, Human
guugcugcuucuugguuggaagauucuggacagccugaaaggcuuugagauacuccacacugagcaguggc

SEQ ID NO: 7973 - RNA, 91 nt, Human
guugcugugcaacucagauggccauuauguagguuugcccuagugcuuagcauggcuuauuccauggccaucacuauggcacccagguggc

SEQ ID NO: 7974 - RNA, 83 nt, Human
guuggaauuuuaaagaaaauauguuguaauaaugcuguuguaaguaauauuuuaaugucucuuugccuguuuucuauuucagc

SEQ ID NO: 7975 - RNA, 72 nt, Human
guuggaugagaagagguggugguuaaaggcugucguaaaggaccccuggcugcuugcuucaacuuguuucgc

SEQ ID NO: 7976 - RNA, 105 nt, Human
guuggauuugcaaaccuccccaaucaaguucaccgaaaaucagugaaaaaagguuuugaguucacacugaugguggucggugaaucaggucuaggaaaauccgac

SEQ ID NO: 7977 - RNA, 82 nt, Human
guugggaaugcgccucuucgcugugccgggagacccuuucccaaauggggcgcggcgguaacaggcgcgugggggacccgac

SEQ ID NO: 7978 - RNA, 66 nt, Human
guuggugacuuugguguaucgagcauggagaccgcacagucccauugaacaccuuuccucacugac

SEQ ID NO: 7979 - RNA, 77 nt, Human
guugguuagcaaaagugcagccucaagauggcugauggcaacgaggaucugcgggcugacgacuugccugggccagc

SEQ ID NO: 7980 - RNA, 74 nt, Human
guugucacuuaacccccaggaguuauuuauuaucuuuuuguuaaagucaggcucauuugggguaaugugaugac

SEQ ID NO: 7981 - RNA, 84 nt, Human
guugucuugaauccacaaucuuuucucuggcauuggguuccccaaccugaucaauugaguugggagcaauggauucaagucaac

SEQ ID NO: 7982 - RNA, 75 nt, Human
guugugacagaaugaccucaagcagggagaggaagggaacuacuuuuucacaccugaaauguuacugauuauaac

SEQ ID NO: 7983 - RNA, 72 nt, Human
guuguggggcugguugcugucuuuacguuucacaaccauggaaggacugccaaccucuacucccuucacagc

SEQ ID NO: 7984 - RNA, 74 nt, Human
guuguuauuggugcaggaguaauagguguagaauuggguucaguuuggcaaagacuuggugcagaugugacagc

SEQ ID NO: 7985 - RNA, 81 nt, Human
guuguucaagguguuguguucagggcccuuccagguaauugaggcuuuggggcggccacagacucgacaucuaggaacaac

SEQ ID NO: 7986 - RNA, 96 nt, Human
guuguucgggacuuaaagacacuugaccuguuugggcuguugccacuuaaaaguucaugaccacaaauguccacagugucuuccccuguuauuaac

SEQ ID NO: 7987 - RNA, 81 nt, Human
guuguucuuucccucguguccaugacuuuucucugccauuagcagggaagugugcggagggcuuccagggaaucaagugac

SEQ ID NO: 7988 - RNA, 83 nt, Human
guuguuggaccagaagcaccucuggcugcugggaucguugggaaccugaggucugcaggagugcaaugcuauggcccaacagc

SEQ ID NO: 7989 - RNA, 79 nt, Human
guuguuucuuuagcucuccuccaagacacuauggccaacugaagcccaaagccagcugagaggggagucugggaacugc

SEQ ID NO: 7990 - RNA, 80 nt, Human
guuuacaagacaugauuuugcuggcuuuacaaaaggacauucuauuuauuuuuccaguaauucuucauugucccauaagc

SEQ ID NO: 7991 - RNA, 122 nt, Human
guuuaguggcuucacgcagaaguuggcaggagcaugggcuucggaggccuauagcccgcagggauuaaagccugugguuuccacagaagcaccaccuaucauauuugccacaccaacuaaac

SEQ ID NO: 7992 - RNA, 83 nt, Human
guuuaguguauaccugucacucuagaauguaggcucccugagauaaaaacuauaauucuuuugauggcaguuacauucccaac

SEQ ID NO: 7993 - RNA, 75 nt, Human
guuuauaucuucacccuguaaugguugggaccaggccaaucccuucuccacuuacuauaaugguuggaacuaaac

SEQ ID NO: 7994 - RNA, 78 nt, Human
guuucacucuugucacccaggcuggagugcaguggugccaucuuggcucacugcaaccuccgccugccgaguucaagc

SEQ ID NO: 7995 - RNA, 77 nt, Human
guuucacucuuucgcccaggcuggagugcaguggugcaaucuccgcucacugcaaccuccgccuuccgauuugaagc

SEQ ID NO: 7996 - RNA, 102 nt, Human
guuucagacaucaaggaguaucacugugcuuuccuccucuuuauaacugugcaggugggugugcagagaaauagcagagugaugguucgaugauacugaagc

SEQ ID NO: 7997 - RNA, 77 nt, Human
guuucagagcauaacucgauugcccaucauccugaaagggauuuugacaaaagaggaugcagaguuagcugugaagc

SEQ ID NO: 7998 - RNA, 65 nt, Human
guuucagcacugauggaggcagccuggccaccgggggccgggaucggagucuccucugcugggac

SEQ ID NO: 7999 - RNA, 75 nt, Human
guuucccgguguggggcuggaccaggcggcgggcagcggguuuuccuccugguccuccaaaaugcgcuucagaac

SEQ ID NO: 8000 - RNA, 109 nt, Human
guuucuccagacuacuccaccuugggucggcuugguugucggugauauugagacacgacagugcgggggugucaucaacaccaguggccaaggaaggugcuggacuggc

SEQ ID NO: 8001 - RNA, 76 nt, Human
guuugaccacuguaagugccugcacucuguauucuauuaauaaacuaaaauaaagggaagacgcugcuggugaaac

SEQ ID NO: 8002 - RNA, 72 nt, Human
guuuggcccaggcggaagugcaggguugugaucaagguccagggaacccucgugccucuccgggguucaagc

SEQ ID NO: 8003 - RNA, 81 nt, Human
guuuggggacuggcucgggaaugggcucaggcagcuccacgggguuugccuggcagguucaggcucaggacagcccugagc

SEQ ID NO: 8004 - RNA, 105 nt, Human
guuuggguaaugaagccacagagauuugcugauacauuugcuaggcacgacuucuggucauuuagaaagcuauuuuguggcuucaucaauaagguauuccccagc

SEQ ID NO: 8005 - RNA, 89 nt, Human
guuuguggccuucagaaaucggaucuuggggagagucccuuccuaccugacugaccucccauaaggcugaugcugauuuggccagagau

SEQ ID NO: 8006 - RNA, 67 nt, Human
guuuuauuccaucccuguaucaaccuauuuaacacuucagcaggaccuggugcauguggauugauac

SEQ ID NO: 8007 - RNA, 74 nt, Human
guuuucagcuucccuaagggacuggcauaggguuuuguggggucaaugccaggaaccugggggaaacuggaugc

SEQ ID NO: 8008 - RNA, 62 nt, Human
guuuucauccucuaguacugaagugcccucaaggggguaggcacuguauagcaggagaaaac

SEQ ID NO: 8009 - RNA, 72 nt, Human
guuuucuaccugggcugacguugccuuguccggaggggcuugcaggguggcugaagcccuggggcagagaac

SEQ ID NO: 8010 - RNA, 86 nt, Human
guuuugaaggaugcgguguggagccagaggaugugugggagggguuucucuaacacugacuucuauuccaugagcuuuuucaaggc

SEQ ID NO: 8011 - RNA, 100 nt, Human
guuuugacaaaugcagauacauguguaacugaacuuaugacuuuccuuauagaaacuucagaaaguucccucauaccccuuaucucaaucuugucacuac

SEQ ID NO: 8012 - RNA, 79 nt, Human
guuuugaccacuuccaccuaugaaaauuaucugaacauuauucagauuuaagaguucaugggagcaggugguacagaac

SEQ ID NO: 8013 - RNA, 76 nt, Human
guuuuuuaagguuuuggaaguaacaaagggauacauacagcaagauccacuuacauaguuuuaaaacaugcaaaac

SEQ ID NO: 8014 - RNA, 128 nt, Human
uaaaacucaccaucaaauagauguaaucuuauuaauuacacauuuuguauuuuaauuauuucaaggagugaagaaaacaggguguuuuuguuuuuguaguucugauuacucauuuaugcauuguuuug

SEQ ID NO: 8015 - RNA, 86 nt, Human
uaaaagaaaaccaaagugguccacaaaacauucuccuuuccuucugaagguuuuacgaugcauuguuaucauuaaccagucuuuua

SEQ ID NO: 8016 - RNA, 87 nt, Human
uaaacauuucaugggagacaauaucauaaggguaaagagguagaaucacuuucagacuuagaauaauguugauucccaagugcuuua

SEQ ID NO: 8017 - RNA, 86 nt, Human
uaaagaaaauguaauucgagcugguuagcuuaauuuugugccauucuuuaacauaagaguaagcucuauuaugaaauacaacuuua

SEQ ID NO: 8018 - RNA, 74 nt, Human
uaaaggugaccguaaggagucccuuggggaggauuugaaaauuuguccuucccaaaaguugcccggaaccuuug

SEQ ID NO: 8019 - RNA, 128 nt, Human
uaaauucaggguaaugguuacaguuaggagaggaaagggaauacaaucagauuaugguaguaaacagggauuuuaaccauauugauuauguuuuauuucugaaacuggguaauggauacucugguuua

SEQ ID NO: 8020 - RNA, 63 nt, Human
uaacagcagaagauagaagaguugguacaacaaaucuucacuuagaugugucugaugcuguua

SEQ ID NO: 8021 - RNA, 83 nt, Human
uaacuggcgaaaagcuuucagaaacacuggagauaucguuagcuucccugauuucuuguguuuccgggaacguucuaagguua

SEQ ID NO: 8022 - RNA, 98 nt, Human
uaacuucuguuaugauagggugucugaggaaaagaaggaugcgguacauacuaagguacuacuuucuuuuucuuuaaaucucuauguaacaaaaguua

SEQ ID NO: 8023 - RNA, 73 nt, Human
uaagaugaguugauauucaaauauccaguuaguaaugaaaacaauacaauacugagagaaaaagcuugucuug

SEQ ID NO: 8024 - RNA, 82 nt, Human
uaagcccagggucuggccuugaaagcuccgcagaaaugauuccaaaacccaggagcaaccacuggcccuaccgugggacuua

SEQ ID NO: 8025 - RNA, 81 nt, Human
uaagcuauauauauaauauaauuacauauauaugcacauguauauauaguguguacauauauguguguauauauauacuua

SEQ ID NO: 8026 - RNA, 105 nt, Human
uaaggaaagugagauuugaggagucccuguuguucugcaacaucccuagauugaaugaucuguugcagaugguggauaccaaguucaaauuuaaagauuucuuug

SEQ ID NO: 8027 - RNA, 87 nt, Human
uaagggcaaagcgggcauacucccauggcaucgaacuuuugucuuaaaguaaaucaaggccguugaguugagaaugcuuugcuuuug

SEQ ID NO: 8028 - RNA, 95 nt, Human
uaagggcuuugccucguucauugcuguguccuggcacuucucagucucucacggaaugugccuuggauaaaugagugaagcaaagucaucccuug

SEQ ID NO: 8029 - RNA, 86 nt, Human
uaaguucuaggguacaugugcacaacaugcaaguuuguuacauauguauacaugugccauguuggugugcugcacccauuaacuug

SEQ ID NO: 8030 - RNA, 86 nt, Human
uaaguuuuaggguacaugugcacaacgagcagguuuguuacauauguauacaugugccauguuggugugcugcacccguuaacuug

SEQ ID NO: 8031 - RNA, 109 nt, Human
uaauaccacugggaagaaguaugguagugguggaugaaggguggauauuuuaaauugugcaguuacaguuuacuguccuauuaccucugcucguuuaaccaguuuguua

SEQ ID NO: 8032 - RNA, 77 nt, Human
uaauguaaagaagccuuucagugcuuuaacucuaggaguggagugcugguuacuguuuggcuuuagaagugacguua

SEQ ID NO: 8033 - RNA, 63 nt, Human
uaauuuccacugcuuugaaggcccugcaucugaauaaugcaagcucaggcgcgguggucguug

SEQ ID NO: 8034 - RNA, 73 nt, Human
uacaagaugauggacuugaacuuccugccaugcucagacauuccagacaggacaaggaccauuaggacuugug

SEQ ID NO: 8035 - RNA, 78 nt, Human
uacacagcacagaggcacgggcaccaugggagagggcagcacuccugccuucugaggggaucuuggccucacggugua

SEQ ID NO: 8036 - RNA, 94 nt, Human
uacacaggugcaucagacguguggacaugcagacacagacacacggagcauggguacgucaccgcgugucggcacguccagccgcacucgugug

SEQ ID NO: 8037 - RNA, 82 nt, Human
uacacucugaucgagauccuauuccagauguuccugcaguauacuuuguaaugccaacugaagaaaauauugacagaaugug

SEQ ID NO: 8038 - RNA, 85 nt, Human
uacagccaugucacuccuggcgacccuggggcuggagcuggacaguggcccugcucccagacuaguggugcugggauggcucgua

SEQ ID NO: 8039 - RNA, 62 nt, Human
uacagcugauagccuguuuuuguaaauaaaguuuuacuggauggcagaguugaauaguugua

SEQ ID NO: 8040 - RNA, 70 nt, Human
uacaggaccagggcagcagauugagccaccccuugggaggcgaucaggagucugugccuuggcagcugug

SEQ ID NO: 8041 - RNA, 92 nt, Human
uacaggccugcuuacuugggauguaggguuaguaaaugggguuucugcuuuaaaggacugacuugcuaucacacaaaagaggcagacuugua

SEQ ID NO: 8042 - RNA, 95 nt, Human
uacauaucaguauacgacauuaauauaucucccuguccccaauuagguuaucagucacuugauggaggagauuguauguuauauauuacuuugua

SEQ ID NO: 8043 - RNA, 75 nt, Human
uacaugacauuccaauauacuaugcaucaucuuuuggcccaagaauuggaugggcaguguaccagaacauaugua

SEQ ID NO: 8044 - RNA, 97 nt, Human
uaccggucaagccccuugaggccucgccguuggauccucuuacacgaauaagggugagcccccgacuggagagagcuuuggggggacaccccaggug

SEQ ID NO: 8045 - RNA, 65 nt, Human
uaccucacugaaguacucgcauguuguuugguacccacugagcaacuguuucaguuccuaaggua

SEQ ID NO: 8046 - RNA, 103 nt, Human
uaccugaaauugaucuuguaaugcagaaaguggcuauauguuauccagaagaguaacagauaccccaaauacacuugcuaacacaagaaauccugugaaggug

SEQ ID NO: 8047 - RNA, 94 nt, Human
uaccuggaggaaaugagucaucggugauaagcaaagccacacacaauauuguugguucuuauugacugaauuuacuuugguugccuuuuaggug

SEQ ID NO: 8048 - RNA, 86 nt, Human
uaccuuuuuccugucagaaagguuuuccucugugcuacccuuaacuuagggaugaacagacuauaacuaggaaaggaggaaaggua

SEQ ID NO: 8049 - RNA, 95 nt, Human
uacgcagguacacacguguaccugaguguguucaugagggcaucugguguccaugugucugaguguagccuuuguaucaugugugugugugugug

SEQ ID NO: 8050 - RNA, 78 nt, Human
uacgggcucugaaauugccagacaaaacccucauugaccucuaugaacagguuguucuggaauugauagagcuccgug

SEQ ID NO: 8051 - RNA, 86 nt, Human
uacguagugaggaucacaugcaugaagaauccauugcucgcugaaagaagaucuuggaaugagugcguggauccacaauucaugua

SEQ ID NO: 8052 - RNA, 87 nt, Human
uacguccuaguagcucugugaccuugaauuuguugcacaacuagcaaggguugugcuccucagcuuucucagugcuguugggacgug

SEQ ID NO: 8053 - RNA, 83 nt, Human
uacuaccaggccaucaaggugcuggagaacaucgaacugaacaagaagaguauguauucccgcaccuugauggccugguagua

SEQ ID NO: 8054 - RNA, 76 nt, Human
uacugcuugcaagagccuccaugugaaguuucugugcaaaccacacuaacauauuacuggcaucuucaaucuggua

SEQ ID NO: 8055 - RNA, 130 nt, Human
uacuugggaucaguuagucuagagccugcaaagcaaguggcuuggagagauagugauuuagcucaagagggagugagaugugacuguugccacauguuaaaugcuuuucugggccugauuauuuaaggga

SEQ ID NO: 8056 - RNA, 79 nt, Human
uacuuguauuuccauugcuugaauguaagagucagaugauguuuuaauugaaauaaaauucuaggcuggaugcaaugug

SEQ ID NO: 8057 - RNA, 77 nt, Human
uacuuugaaacggagaugucuuggaacauuggaaugucucagauuucugguuguuauguggaucuguguggaaagug

SEQ ID NO: 8058 - RNA, 62 nt, Human
uagaaagcagaccuguuucaggguucggggaagguuguucgauaugaacuggguccucucua

SEQ ID NO: 8059 - RNA, 94 nt, Human
uagaaaggaaucuccuaaaccucaaaaagaacauuuauguuagccuacugcuaacaucaugcuuaaugggagaaaacuggaugguuccuuccua

SEQ ID NO: 8060 - RNA, 76 nt, Human
uagaaauauguaaucgaucuuuucuuuggugggcaauuagcaauauugaggaaaguuaaagauguauguaucccua

SEQ ID NO: 8061 - RNA, 83 nt, Human
uagaaggaaauauauaaaaauguuuacaaauauuuuaaaaaguaaaaaaugaauaaaaguaaaaauuugagugguucucucug

SEQ ID NO: 8062 - RNA, 72 nt, Human
uagacaaauuccgucuccaaguuuccgagcaaagccaaaggaaggcuuugggaagaaaagagguuguugcua

SEQ ID NO: 8063 - RNA, 93 nt, Human
uagagagugagguaguagcaugccuaagguacaccucagcaguuccagaauucugcugcgagugguccuccaucaaacuacuucaccucucug

SEQ ID NO: 8064 - RNA, 71 nt, Human
uagagaugggguuucaacuuguuggccaggcuggucuugaacuccuggccccaggugauccacccacuuua

SEQ ID NO: 8065 - RNA, 87 nt, Human
uagcaugaagucccucuggaucuugagcugguuuauggacucaaucgucucauggaucuuacuguccagagcacugaucuccugcug

SEQ ID NO: 8066 - RNA, 61 nt, Human
uagcauugggugccaauuucgugguguggaauggugacaacaugcguggagccaagugcua

SEQ ID NO: 8067 - RNA, 84 nt, Human
uagccacucugcucuacgugguccaugcgguguucucuuuaaucagauggaagucuucauaaagccgcaguagaacuugagcug

SEQ ID NO: 8068 - RNA, 79 nt, Human
uagccugggcgcucuccagaaaagcuacacuugaacugacacacaauuggggcacugaagaugaugcgacccagaguua

SEQ ID NO: 8069 - RNA, 79 nt, Human
uagccugggcgcucuccagaaaagcuacacuugagcugacacacaauuggggcacugaagaugaugcgacccagaguua

SEQ ID NO: 8070 - RNA, 76 nt, Human
uagcucucccacaccaucaaguggcccucauaacuggaguagaguuccugguugcuuuucauaagagggagaguua

SEQ ID NO: 8071 - RNA, 85 nt, Human
uagcugggacuacaggcgcaugugccaccccuggcuaaguuuuuauauuuuaguagagaugggguuucaccuuguuacccagcug

SEQ ID NO: 8072 - RNA, 88 nt, Human
uagcuguuguaaaaguuugucuuuauuagccauauguauuacaauggugguugguuuauacacauuuuuaaccuuauaauaauagcua

SEQ ID NO: 8073 - RNA, 81 nt, Human
uagcuugagcuuguuccuaguuguccaucacagaaagcauuagcagaggaugcuguggugcagcgggaacagcuuggguua

SEQ ID NO: 8074 - RNA, 71 nt, Human
uaggaagucugagaaugaccuuuacuuuccuauuguuuguuaggagaguuuaacuucaaacuccaacccug

SEQ ID NO: 8075 - RNA, 90 nt, Human
uaggaguagaaaugugacuaagauguuugaacaaauaacauauggaaugcuaaacauauggaaugcuaaacguaugccauuuuucuccug

SEQ ID NO: 8076 - RNA, 93 nt, Human
uaggaucccaucucagucacacagaaucugcuuuguuuucagauuaugaaccacaaagauacacacgaacugucuugauuugaagggagccua

SEQ ID NO: 8077 - RNA, 60 nt, Human
uaggcaccacuugacccuauucgcgcaaguagucugggcaaauuuagcuagugucgccua

SEQ ID NO: 8078 - RNA, 77 nt, Human
uaggcaugugauuucagguuuuucguacugagaacauugagauuucaguuggaagacacccugaaaucuuaugagua

SEQ ID NO: 8079 - RNA, 81 nt, Human
uaggccccacuccagacccacagaaucugaaacugcaucuuaacaagauccucagaagaucuguguguacagugauguuua

SEQ ID NO: 8080 - RNA, 101 nt, Human
uaggccccagaacauuacuuaugcccuucaguuaccauaagauuugugcaagguuuuguacccugguaaaugaugccaaaguuuguuuucugugguguuug

SEQ ID NO: 8081 - RNA, 69 nt, Human
uagggaaagcugguacgccugcagguaccgguccggaauucccgggucgacccacgcguccgcacccua

SEQ ID NO: 8082 - RNA, 65 nt, Human
uagggccagcuucaugcacuguaccuuguacagucauacaagauuucaugcucagaagugcccug

SEQ ID NO: 8083 - RNA, 108 nt, Human
uaggggcagacuuugacuuagcaaggucuuuaacuguuaacauuuuucagcccagagagcugccuugcucucuaaaacaguuacuuuguccugguucacucuucccug

SEQ ID NO: 8084 - RNA, 104 nt, Human
uagguacuagauuugcguccugauggacaucgagcaggucucuggacucacaaucgagggaucugccaccgagaucugucgcgugcgcaagucuugaacaucua

SEQ ID NO: 8085 - RNA, 64 nt, Human
uaggucaaauguguccuccaucacugcuucccugagauuugauggagcccugaauguugaccug

SEQ ID NO: 8086 - RNA, 72 nt, Human
uaguaaagaauagaaaugcagcuacacacccaauucgucuuggucuggccuaaaauuucucagucuuuacua

SEQ ID NO: 8087 - RNA, 97 nt, Human
uaguauggaaagauuuaugacauaauuuuauuacuuacuguaaucguauacaguuuccauuaacuuuuaugacaucauaggguuuuccuaaauacug

SEQ ID NO: 8088 - RNA, 109 nt, Human
uaguauguugagcaucuuuuuguaaguguacuugccaucuguagaucuucuuuggugaagugucuguucagaucugugugcauuuuuaauuggguuguuuaacuuauug

SEQ ID NO: 8089 - RNA, 99 nt, Human
uagugacaagggcaucccaaggcacuugcccagagcugcagaguugugugugccauaccugcggcucaaagggaaggccuucuauccccugaguuucua

SEQ ID NO: 8090 - RNA, 90 nt, Human
uagugauucuugugagaucaagggaggauggagaugcaggcagcagcagccugaacuucuuucuccugcccugguuucuagcugucagua

SEQ ID NO: 8091 - RNA, 82 nt, Human
uagugcacaaugguggaaggaggcgguucguauguccccaggggcggcaucccaaugccagaccuuccucccaugggcucug

SEQ ID NO: 8092 - RNA, 84 nt, Human
uagugguucuucuuaucuccauccccaucggcuuccucuuuaagaaagccgguccugggcugaagagauggggagcagccgcug

SEQ ID NO: 8093 - RNA, 79 nt, Human
uaguuaccaccagcuuggccuagaaucucauugaacgcaacuugacuaguuaugacagagaggaccagggugagaacua

SEQ ID NO: 8094 - RNA, 65 nt, Human
uaguucaggcuuuccaguucacugagaaacauggggaagugugccagugguggaaaccuggagug

SEQ ID NO: 8095 - RNA, 81 nt, Human
uauaaaccugcuaucuugagguccuggucuuuuaaaaauuuuuuuuaauuuaaagcuuuuccaccgagguuuuaguuugug

SEQ ID NO: 8096 - RNA, 73 nt, Human
uauaauguggggacaaaaaauauaccuauagaggagaaauuuauaagagccuuauaggggguaacauauuaua

SEQ ID NO: 8097 - RNA, 86 nt, Human
uauacagguagagauguaugcagauguguccauauauguuccauauuuacauuuugauagcauggauguaugcaucucuuggugua

SEQ ID NO: 8098 - RNA, 93 nt, Human
uauauuugugaaauucauccacacugauguguauaacuguuauccauuuccauuguuguauagcauuccaccacaugaauacaccacaauaua

SEQ ID NO: 8099 - RNA, 120 nt, Human
uaucagcaaucuucucuacuuucauuggggagcacuauguccaugugaacgcuacuuaugugaacguaaaaugugucgcuccauauccuucucuguugucaucagaagauaacgcugaug

SEQ ID NO: 8100 - RNA, 67 nt, Human
uaucgauaguuguuaggugucagcuuccauguaggaagcggcuguaccgauccugagaacuucgaug

SEQ ID NO: 8101 - RNA, 71 nt, Human
uaucucaacgagaagggacaccucacgucgcugacagcucggcacguggcuggucccaggccccagagaua

SEQ ID NO: 8102 - RNA, 77 nt, Human
uaucuuaguguuauuucacagcuaacauucauuuaauacauuuuauugacaaugaugaugugucagacgcuguucua

SEQ ID NO: 8103 - RNA, 89 nt, Human
uaucuugguuaauugcuacugaaagguugagaaaggaaugguuugauauuuaccacagcgcugugccuuucuacaguagaacuggggua

SEQ ID NO: 8104 - RNA, 76 nt, Human
uaugaacuggccacuuuucagaugaaaccuggugggccagcucuguggggugaugcauuuaaaagggcaguucaug

SEQ ID NO: 8105 - RNA, 99 nt, Human
uaugagggacaugaacaccugcagauuuugggguccacagggguccuggaauuaauucccuguggauacugagagaugacuggacauccauucuccaug

SEQ ID NO: 8106 - RNA, 93 nt, Human
uaugauuugauuuuauauacacauauguauacauauuauauauaaauauauauguguauacauauauguguguauaucuaugaaucaaacaua

SEQ ID NO: 8107 - RNA, 62 nt, Human
uaugcagagaugaguuaguguuucuggacguggagaccuuuuaaauggcucaucugugugua

SEQ ID NO: 8108 - RNA, 83 nt, Human
uaugcauguguuuaaaccaaauaccagaauagcuuuaacaauagagcuagcauaauaguauuuauuaaagaaucacaucugua

SEQ ID NO: 8109 - RNA, 63 nt, Human
uaugcuauguuggcuaaacuggugucaucacuacaguggcauaauauugacuggcacagcaug

SEQ ID NO: 8110 - RNA, 130 nt, Human
uauggcaaaagggaucguuaggaucaaaugccaucagaguuuuggagauugcguagcucuucauggucauuggggggugcaauugacgcagcuugguauggucgcuaaagccagguagggguugccaugg

SEQ ID NO: 8111 - RNA, 76 nt, Human
uauggggcuggucucaucauaucuaaagaacugcccagcuuuuacgcauuuugaaugugguggaaccagcugcaua

SEQ ID NO: 8112 - RNA, 85 nt, Human
uauguauuguacuuuuaaucacuuacugagaauauuucaaauuuauauucucaucaggaaaauguaaaaaagauacugauauaua

SEQ ID NO: 8113 - RNA, 131 nt, Human
uauguuaaauucaacaucucuuguaauugucauuugucuguuuuucaaauaacccaaggauuucuaucagugcauuugaaaggaaccuggggauagcuaucaaguggaaagagagagagaaagaauucaua

SEQ ID NO: 8114 - RNA, 62 nt, Human
uauguucgaugccugucaaguucaugucuagcugucaauuugugaauacggcaucgaggaua

SEQ ID NO: 8115 - RNA, 88 nt, Human
uauguugaauagaaauggggaaaguaggcauuccuaucuuguuccaugucuuagggggaaugcuuuuaacucugucccauucaauaug

SEQ ID NO: 8116 - RNA, 101 nt, Human
uauguuucuaaaaaaguuuaguucuaaagaucagagaaaaagcaugacacaaagcguuuugacuauuuuaugaauaugugaauugaaagagaauguacaua

SEQ ID NO: 8117 - RNA, 78 nt, Human
uauguuugccguaaagucacacaguccaggcuugauaaucuucugagaaauugauaaaagaugugugauguagacaug

SEQ ID NO: 8118 - RNA, 80 nt, Human
uauuagguggugcauaaguaaugugguuuugccaugacuuuuauggcaaaaccugcaauuacuuuugcaccaacuuaaua

SEQ ID NO: 8119 - RNA, 74 nt, Human
uauucauuuugcauugauaggcuuuggggguaauuugcagcuuagagcuauuauaaauagugcuguggugaaua

SEQ ID NO: 8120 - RNA, 74 nt, Human
uauuccauuucaagaaaguacgacuaucagcagccacaaaaccaagcugacagugugcaacucucauuggaaug

SEQ ID NO: 8121 - RNA, 73 nt, Human
uauuggauugccacacuggucugauugccugcaaguuuggugaggcugaggcaaagaaugguggcgucuggua

SEQ ID NO: 8122 - RNA, 62 nt, Human
uauuguagcauugcugucugcaagggagccccuagccccuggcagacauagcugcuucagug

SEQ ID NO: 8123 - RNA, 78 nt, Human
uauuuagguaaagcucuaagacucaugagccaacuuuucauguaacuggcuuuccuaggcuggggcuugaacuaagua

SEQ ID NO: 8124 - RNA, 73 nt, Human
ucaaaaggcagcaucugauugugauuugguccagaaauuccuggccagaauauuuccaguguggugcauguga

SEQ ID NO: 8125 - RNA, 86 nt, Human
ucaaaccaaggguugccaauaggacugcaguuuauuggacgugcguuuugugaccagcagcuucuuacaguagccaaaugguuuga

SEQ ID NO: 8126 - RNA, 81 nt, Human
ucaaagggaaugauagcauugaaggacucggggauaucuaacagcaauaccugaucacuacuucgcauuaguuucucguga

SEQ ID NO: 8127 - RNA, 90 nt, Human
ucaacagggauuuggugccaacuggagucuuggugaccaauggggauuaugaucaagaacaguuugcugaugaccaaauaccacuguugg

SEQ ID NO: 8128 - RNA, 78 nt, Human
ucaacucccugccaagaaaaauguagaugcaauucuggaggaguaugcaaauugcaagaaaucgcagggaaauguuga

SEQ ID NO: 8129 - RNA, 72 nt, Human
ucaagacugguguuuccuagagcuuuccauuggcaaaugcugccuccuggaacugagggacaaagguuuuga

SEQ ID NO: 8130 - RNA, 84 nt, Human
ucaagagacaacuuuaaaaacuccauugugguccauuuucuaaaacagacacacacggaggguggaguaaaguaaugucuagga

SEQ ID NO: 8131 - RNA, 82 nt, Human
ucaaggugugcucugcgcaaagacacucucugcucuagcuucuggagcucacguucauguugugccucuguuugcaucuuga

SEQ ID NO: 8132 - RNA, 60 nt, Human
ucaaguuuguauucaguacaguugucauucacuucuuagacaaagaauugacaggcuuga

SEQ ID NO: 8133 - RNA, 99 nt, Human
ucaaugcagaaagacacaccacaaguaagugcuuuuaaugucaaguuuuuuuugagggggaaacauuuaagcauuggacuuuacaaguguuuacauuga

SEQ ID NO: 8134 - RNA, 73 nt, Human
ucacagcacuacuucuucaauguaaauuuuuuguccauuuuacagaugaaaaaacugaggauuagagaaguga

SEQ ID NO: 8135 - RNA, 96 nt, Human
ucacagggccuaaaggaagagugcugggccccuggaggacugagggaagccggcagucccuggaggcggugccggcugcucuccaggcgccuguga

SEQ ID NO: 8136 - RNA, 72 nt, Human
ucacagguuaaaaaaaaguccuucaugaaaaagaaagaucuuaagcagcaugauggauucagaagcucauga

SEQ ID NO: 8137 - RNA, 77 nt, Human
ucacaugacaaugaagcagauauggcucucccgcugguucggcaagccauccccuuugcuuuuacaauacaguguga

SEQ ID NO: 8138 - RNA, 90 nt, Human
ucaccacggugauuagugaaguaacagacagcagccuggaaaauuuccuuccggccuuuucugcuuaacuguuuuaucacuaucugguga

SEQ ID NO: 8139 - RNA, 93 nt, Human
ucaccaucugcagccuugaaggagcuuugguucggagacaggcaaaggagccauguguggagagccugguuucucaguacuuccagaccguga

SEQ ID NO: 8140 - RNA, 80 nt, Human
ucacccuguugccuaggcaggacggaaugcagugaagucaucauaguuuacuguaacacugaacuccugggcucaaguga

SEQ ID NO: 8141 - RNA, 85 nt, Human
ucaccgcuaaugaaagcugggcacugcaaauguucugcuaugcuccagaaaucagaaguugccagcuuuuauaucuagacuguga

SEQ ID NO: 8142 - RNA, 73 nt, Human
ucaccuccgggaacaccugguuccccaucacucugugcagcagaggguggcgggacauguugcucaggaggga

SEQ ID NO: 8143 - RNA, 76 nt, Human
ucacucugucgcccaggcuggagugcagugguacagccucagcucacugcaaccuccaccucccgggcucaaguga

SEQ ID NO: 8144 - RNA, 76 nt, Human
ucacucuguugcccaggcuggagugcaguggugcaaucuuggcucacugcaaccuccaccucccggguucaaguga

SEQ ID NO: 8145 - RNA, 96 nt, Human
ucacuuuuuacgugagcguauaaucccaagaucaguguuauauuuuacuggagaagcuauugaagaugaugaugaugauuaugaugaagaagguga

SEQ ID NO: 8146 - RNA, 72 nt, Human
ucagaaacuguguugcacauugguguacaucucuuuaaauagauuucaccuuggcauucacacuuugucugg

SEQ ID NO: 8147 - RNA, 97 nt, Human
ucagaaauagaauugagccaguuuuuaucagcagcaauauuuucagguaauagggguucccaaauucuguuggguuuuaacugguggauguuaauga

SEQ ID NO: 8148 - RNA, 114 nt, Human
ucagaucaguagugacaugagauuuucauaggagcagaaacccuauugugaacuccaaacacaagggaucuagguuaugcacuacuuaugagaaucuaaugccugaugaucuga

SEQ ID NO: 8149 - RNA, 91 nt, Human
ucagaugaugggaaaacucgaguaaagcugcuguuucagaaucuggacaccaaacagauugagaugaaggaacucgaguuccaggaccuga

SEQ ID NO: 8150 - RNA, 84 nt, Human
ucagcacuguggugagcuccaaggaagugaauaaguuucagauggcuuauucaaaccuccuuagagcuaacauggaugggcuga

SEQ ID NO: 8151 - RNA, 84 nt, Human
ucagcacuguggugagcuccaaggaagugaauaaguuucagauggcuuauucaaaccuccuuagagcuaacauggauggguuga

SEQ ID NO: 8152 - RNA, 64 nt, Human
ucagcagcaaagucaugaggucccaggcuuuucuauacuuggagacuuuuuauuauugcuuuga

SEQ ID NO: 8153 - RNA, 77 nt, Human
ucagcaggaaagaguuuaaaagacuugaauggaaaucagaaauuuagggauuugagaaaauaacuuuuugguacuga

SEQ ID NO: 8154 - RNA, 86 nt, Human
ucagccucuguuucccuggucaaggccacggcuuuucucugauccugaggagaguuuccuaccagaguggaagcagggaggacuga

SEQ ID NO: 8155 - RNA, 94 nt, Human
ucagccuuggucaucugcgauggagcgcuuucucagaacuguaggacauagaacugugcacaggaacagcuuccagagccgaaaaccagguuga

SEQ ID NO: 8156 - RNA, 75 nt, Human
ucagcgcacgccacagggccaguuuuggcuggagaggccugaagcagagccagagcagguccaggugaguucuga

SEQ ID NO: 8157 - RNA, 76 nt, Human
ucagcuucagcuucagcuuggccucauucauuugaaaauaaaauguuuacaugaggccgcgccuguguccagcuga

SEQ ID NO: 8158 - RNA, 71 nt, Human
ucaggaauccuugguaguuuaacucuggaaguuuuagugggacuuugggaaacaaauacuauuuguucugg

SEQ ID NO: 8159 - RNA, 75 nt, Human
ucaggaguucaccauuagacucucacauuuacauauauuccggaagaugugagagucuaauggugagcucuauga

SEQ ID NO: 8160 - RNA, 78 nt, Human
ucaggaucagguuccccuucgcuccacgaugggcaggucauagcccaagggagcgcaggcaagauuugaaucuccuga

SEQ ID NO: 8161 - RNA, 98 nt, Human
ucaggauccaacaagagguucugcgguuuaauaucccgauggcagauuccaaaggaauggauauaggcuaaacuucggaaccucuuguuggauccuga

SEQ ID NO: 8162 - RNA, 71 nt, Human
ucaggccaucugggcguauacgugcaagucacagggaaugccgauggcuuggcuugggcucagaggccuga

SEQ ID NO: 8163 - RNA, 102 nt, Human
ucaggccuggagcccaggaagucugguuucgaauuucaugcuucuaaccugagcacuguacugcuugguggaguucucugcuaguccuaccuuucaggcaga

SEQ ID NO: 8164 - RNA, 98 nt, Human
ucagguggcggugcagaaggucaacgccgcaggcacagaucccagcucuccuguuggcuuugugcuugggguagaucuucuucacauauucccccugg

SEQ ID NO: 8165 - RNA, 99 nt, Human
ucagucucuucucucaccuaccccaguacagcagacaaaacucucugacccaguuuaugagguaggauccuaugaaauugucauaacuuuugagucuga

SEQ ID NO: 8166 - RNA, 109 nt, Human
ucagucuuuuugucuauuccuggauuuuggugaaaacagaaucuaaucuuauauucgcagccuuaagguuagaaggucacuuacauccaguaaucacaguaagaucugg

SEQ ID NO: 8167 - RNA, 79 nt, Human
ucagugcgggaaccaaugcagacuggcauuaaggcuguggauagcuuggugccaauuggucguggucaacgugaacuga

SEQ ID NO: 8168 - RNA, 79 nt, Human
ucaguugcuaugaagccagcuaccagccccucgaccucgacagaugcgacagggacuugucgcugaucaaugugauuga

SEQ ID NO: 8169 - RNA, 61 nt, Human
ucaguuguugguccgacccagaacgcuucaguucugcucugcaaggauauauaauaacuga

SEQ ID NO: 8170 - RNA, 74 nt, Human
ucaguuuccguagucuauucuuucccucauuuuuuucauuucucugauauuuuuaguuucugcuaucuaacuga

SEQ ID NO: 8171 - RNA, 85 nt, Human
ucauaaguucuguagauacuuaugcaugaacauuuucucauuuaguuuuuggguucauuauuuguauuguguuuacuacuuguga

SEQ ID NO: 8172 - RNA, 86 nt, Human
ucauauaaugauuuagggaggauuuccucuuuauccuguggaauagugccaauaggauugguaucaauucuccuuugaauguguga

SEQ ID NO: 8173 - RNA, 72 nt, Human
ucauauagcuguggggggcuuuaauauucuggacauuuauucacugauguuagaaucaucacacauaucuga

SEQ ID NO: 8174 - RNA, 87 nt, Human
ucaucaggccaugguggcagcuguugccuccgcgugcgcaguacagcaggugccaggcuucccaaacagcuccaacccgggugguga

SEQ ID NO: 8175 - RNA, 83 nt, Human
ucaucaucaucaucgucaucaucaucaucuucacguuuucuuuucaaugcauuugaugauucauuggcaguauuuugugauga

SEQ ID NO: 8176 - RNA, 60 nt, Human
ucaucgagauagacacuguuuaaggccgcauagguguuagucccaguuccauuuucauga

SEQ ID NO: 8177 - RNA, 61 nt, Human
ucaucuauaaguagcaucugggaagaggagaucgaggccacaguuugcuauuuuaguauga

SEQ ID NO: 8178 - RNA, 91 nt, Human
ucaugaauccuucugucugacuaacucaauaacuuucuauaaaagccaauggaauucaaauaggagcuaggagacaacaaguuauauauga

SEQ ID NO: 8179 - RNA, 85 nt, Human
ucaugauggggggagaugugggguugcuacgcuauguuuggccagggcuggaucaucagauacuccaugaaucuucuaaugguga

SEQ ID NO: 8180 - RNA, 65 nt, Human
ucaugcugcagcauauuguacuggccugcugcuggcccgcaggcuucucaauagguucggcaugg

SEQ ID NO: 8181 - RNA, 73 nt, Human
ucauggcagugauucaguaaacaagugcugaaaaagaaaucagccuaugguuuaagccugaagaacugguuga

SEQ ID NO: 8182 - RNA, 65 nt, Human
ucauggcccacuggucgcacaucacucuguaaagcagcaagagaugcaggugugacugguucuga

SEQ ID NO: 8183 - RNA, 104 nt, Human
ucaugucccucuaaaugcaaguggaugauugugccaauaagccaggagagaaggaaacaucuucagugguccaguggcacauucaaaauuguacaaugacauga

SEQ ID NO: 8184 - RNA, 80 nt, Human
ucaugucuaagucagagucuccuaaagagcccgaacagcugaggaagcucuucauggaggguugagcuugaaacaacuga

SEQ ID NO: 8185 - RNA, 75 nt, Human
ucauugcugauggaggaauccaaaaugugggucauauugcgaaagccuuggcccuuggggccuccacagucauga

SEQ ID NO: 8186 - RNA, 64 nt, Human
ucauuguggggcucauuuugagauuaccauucuggggacaaccuucagaugagaacugcuuuga

SEQ ID NO: 8187 - RNA, 72 nt, Human
ucauuuguuuugagguuaguuugauuagucauugguggguggugauuaagucgguggugaugagauauuugg

SEQ ID NO: 8188 - RNA, 67 nt, Human
uccaaagcacuuuuguugagugacaacccgauuagcaaggcccuguuacugaacaaagggcagugga

SEQ ID NO: 8189 - RNA, 88 nt, Human
uccaaaggcuccaacagggcccuccagacucaauggcaggguggugucugcacaagcuggaaguguccuugugaugagcccaucagga

SEQ ID NO: 8190 - RNA, 75 nt, Human
uccaaaugucuggauuuuccagcuagagauggggagcucuuaacuuucuggcuccuggucccaggcuccuuagga

SEQ ID NO: 8191 - RNA, 62 nt, Human
uccaaugacucuuucuuuaacuuuuuugccccuccugaaguuccugagaguggagaucugga

SEQ ID NO: 8192 - RNA, 69 nt, Human
uccacacuuccugggaggucagagacaacuguuucagaagagucagaugggcuucccaagacuugugga

SEQ ID NO: 8193 - RNA, 66 nt, Human
uccaccugccgggcauugguugggggacuucuugugcucuucaauguuugcucgggagguacagga

SEQ ID NO: 8194 - RNA, 80 nt, Human
uccacuaucuugaaagcuauucauuuccgagaacaugccacguguuucgcaacuaaaaaugguaucaaaguaacagugga

SEQ ID NO: 8195 - RNA, 66 nt, Human
uccagacuuaaggaaggaagucccaccaguguuuguugcauuugaauuuccuuuaaaaaugcuggg

SEQ ID NO: 8196 - RNA, 81 nt, Human
uccaggcauggacagagggaugcgaggcuggccuucccuguccacgguccucugaggcagcugaagucucccaugucugga

SEQ ID NO: 8197 - RNA, 81 nt, Human
uccagggggcgcuuccaguuuacaccuggccccaccauuugugaaaguuguggccaggcuagacuggaaaaccgugcugga

SEQ ID NO: 8198 - RNA, 66 nt, Human
uccaggucuuuuuaaagaaucaacauguauucacaguacuugggaugcuaagcaaaggaccuguga

SEQ ID NO: 8199 - RNA, 75 nt, Human
uccagugaccugggaagcgaagaagaggagguggaauuugggccaggacuuacuucuuugacauugggaucugga

SEQ ID NO: 8200 - RNA, 86 nt, Human
uccaguucuucugggagaaaaauggcaggcuucuggggaaagaaagccagcugaauuuugacuccaucuccccagaagaugcuggg

SEQ ID NO: 8201 - RNA, 112 nt, Human
uccaguuuuauccugacugauucuuuucuguuguccuuuguuuucuuucuccucuucuagaucucuaaaugaucuuugggggugggagugagagaacgacgucaguccugga

SEQ ID NO: 8202 - RNA, 72 nt, Human
uccauaaugaugggcuuuuagguuguuucuaauguuaugcuauuagcagcuguuuaauuccaauauaaggga

SEQ ID NO: 8203 - RNA, 76 nt, Human
uccauggauuuugguaucuuggcaggagggugguccuggaauuagccgccaccaugcccagcuaauaccccaugga

SEQ ID NO: 8204 - RNA, 62 nt, Human
uccauuuaagcuacagacuuagaugucuaaaaauauguguccugaucuguacagugaguggg

SEQ ID NO: 8205 - RNA, 71 nt, Human
ucccaaccauaggcuucaauguagaaacaguggaauauaagaacaucuguuucacagucugggacguggga

SEQ ID NO: 8206 - RNA, 68 nt, Human
ucccacagcacauccuacccggaagaccagccucagaggguccuucuggaaccagcugucuguggaga

SEQ ID NO: 8207 - RNA, 65 nt, Human
ucccagcuuccagaugcgacauccagaugacccagucuccaucuuccgugucugcaucuguggga

SEQ ID NO: 8208 - RNA, 76 nt, Human
uccccacagccgccccacagccagucccggggcagguccuugggccgcgccgaccggcugcagccgcauguggaga

SEQ ID NO: 8209 - RNA, 63 nt, Human
uccccaccgugaccugccuggccuccccugucucagggagcaggucacaggucaccaugggga

SEQ ID NO: 8210 - RNA, 75 nt, Human
uccccauucguccaaccaggcauucaucccggucacuuuugguuacaggacguggcagcugguuggacuagggga

SEQ ID NO: 8211 - RNA, 72 nt, Human
uccccccccagucucggagagcaacagaaaaaagcucuguaauucaguguuccaaccaccgccggggaggga

SEQ ID NO: 8212 - RNA, 70 nt, Human
ucccccuaccccacuuuugccuucuaacuuuggugcccagcucagggugaggcaguuaaggguccaggga

SEQ ID NO: 8213 - RNA, 96 nt, Human
uccccgaaagcagauacugagguggagaauggcgugcaggaagguucauaggacagugcugugggcugagccggcuggguacaggcuugucaggga

SEQ ID NO: 8214 - RNA, 66 nt, Human
uccccgcgccgcgagaccaggcucccgcuccgguugcggcgaccgccuccgcggcgccccugggga

SEQ ID NO: 8215 - RNA, 75 nt, Human
ucccguucccccagucagccuggcccugcuggugccuccggcgcuacgggcugggcaagauggcggccuucggga

SEQ ID NO: 8216 - RNA, 88 nt, Human
ucccuauaaaaguauacuuaucugcaguuucccuugucaagaguauuaaaggucugcauaaaguaaaagcuaauacuauccugaggga

SEQ ID NO: 8217 - RNA, 93 nt, Human
ucccuccugugucccaaaacgaaaacacuccuauauuuuguagcgccuuccagaauggggcagcggaaacuaguguugggacaaaggaggcga

SEQ ID NO: 8218 - RNA, 103 nt, Human
ucccucugugcccgucuuaucuguauuuuacugucugcucuuucugacugcuuguaaugagaagacaagugauuuucuugaaaugccugaggcuagaaaggga

SEQ ID NO: 8219 - RNA, 87 nt, Human
ucccuggccgaggggcaggcuccucacggccucccugggaccccaggcgcgucgggaggcgucguccuccagccccgaggccggcga

SEQ ID NO: 8220 - RNA, 95 nt, Human
ucccuuuuauuaaccaucuucccuuucucgaguauacacaaguagaaaagaaacagugaaguaccccgauagggaggguggggagaggaugggga

SEQ ID NO: 8221 - RNA, 85 nt, Human
uccgaaagaagcuggugaucguuggggauggugccugugggaagaccugccuccucaucgucuucagcaaggaucaguuuccgga

SEQ ID NO: 8222 - RNA, 74 nt, Human
uccgaugcuacuauuuuauugcaggagguggggguguaugcaccgcacaccggggcuaugagaagcaagaagga

SEQ ID NO: 8223 - RNA, 71 nt, Human
uccgccggccguggucgccgagucggugucguccuugaccaucgccgacgcguucauugcagccggcgaga

SEQ ID NO: 8224 - RNA, 93 nt, Human
uccggauuggcagguagcgggucaggggucgugccugggaaaauuguuucucccgcaucuugaccuccuucucgaccagcugcugccuccggg

SEQ ID NO: 8225 - RNA, 79 nt, Human
uccgggaaaggauuaagauuggagaagacuaugcgaagaccuuagcuaagcucucucagaacucuuggcuuucaaagga

SEQ ID NO: 8226 - RNA, 105 nt, Human
uccgguugcgcuuuccuuucugucaagaagcaguuugaagaauuaacccuuggugaauuuuugaaacuggaccagagaaagagccaagaacaaaauugcaaagga

SEQ ID NO: 8227 - RNA, 86 nt, Human
uccguagugaccggcggcguccaaucagucaugggcucccgcuugggccagauggugcugagugggugucgacccggugcugggga

SEQ ID NO: 8228 - RNA, 73 nt, Human
uccgugcgcguugcugcggccgugguccgcgcccuuccucggcgggccggacuggucuccagaaaugcuuggg

SEQ ID NO: 8229 - RNA, 76 nt, Human
uccuaagucuucuuccauccagucaagccagaagaugcccaggggaguagggagguuuggggagggagguuuaggg

SEQ ID NO: 8230 - RNA, 90 nt, Human
uccuacgagaugaugaugcagugugugucccgcauguuggcccacccccugcaugucaucucaaugcgcugcaugguccaguuuguggga

SEQ ID NO: 8231 - RNA, 101 nt, Human
uccuagaggugaccagaauuuaaugucagggccuaaauagucauugaguagauugcauuccuauuggugcccucgaagaccucacuugugcaccuguggga

SEQ ID NO: 8232 - RNA, 83 nt, Human
uccucaaguuccuccagcuuuuuaugucugauaugccaaagccugccuucaugaagcagaaccuggaugagcuuggaauagga

SEQ ID NO: 8233 - RNA, 69 nt, Human
uccucacugaaugaggcguuugaguuuuacugguagccagugccagcaaacaaaucaacgccuugagga

SEQ ID NO: 8234 - RNA, 77 nt, Human
uccucaggcccuuuaacccuugcagaucggauggagaaagcugccagcacguucuagggaugggggcagauugagga

SEQ ID NO: 8235 - RNA, 108 nt, Human
uccucccccaggcauucuggucacuguuccuuuuuguugagaucauucucggugucucauauagcuggguugcagcuccguucuuugccaggaggugguaauagagga

SEQ ID NO: 8236 - RNA, 87 nt, Human
uccuccugucuuggucuaaacauguugagauuacaggcuugagccaccaugcccagccugaaaaacuuuuaagacaagacauuagga

SEQ ID NO: 8237 - RNA, 72 nt, Human
uccucuauccccugaccuucagcugaaccucaaauccugguaggccacccuuugguucucagggguacagga

SEQ ID NO: 8238 - RNA, 81 nt, Human
uccugagcucgcgcuguccucucguguggccacagccugauacaggcuggaaagguccaggaguuggguccgagcccagga

SEQ ID NO: 8239 - RNA, 84 nt, Human
uccugagcuucuucuaccucugagaguuuuucaucauuuuccaauguuugcugaaguucauggaugguacuaagaagaacauga

SEQ ID NO: 8240 - RNA, 80 nt, Human
uccugauguuugggacagcguaucuguaccagugcucuaaauaacaaaagcuagggugacaaguacauguuccuuuggga

SEQ ID NO: 8241 - RNA, 63 nt, Human
uccugcagagccgcuggugaccugggugaaaacuuuuggcccguuuggaagcggcacgcagga

SEQ ID NO: 8242 - RNA, 103 nt, Human
uccugccuggaaguuuaggucaaagaggcugcuuggagcaaaauacaguggugucucaucccaaauauucuccaggcguuucuuccauccuuccaggauuuga

SEQ ID NO: 8243 - RNA, 61 nt, Human
uccuggcccuguugguggcaggccuagcccaaggcaucagaggcccccuuagggcccagga

SEQ ID NO: 8244 - RNA, 102 nt, Human
uccugggucccaggaagauugagggaggggaugcugcagauguggaaguccaguuuucuuaccaccuugucagaauuuuuucccuucucuggggucccagga

SEQ ID NO: 8245 - RNA, 70 nt, Human
uccuguaguguuccuggagaagcuagagccugauuguaggcuacuacucaucaauuaacuucuacagugg

SEQ ID NO: 8246 - RNA, 92 nt, Human
uccuguccagcugcucuauccagugucccgauucagcaaugucaaaucccuccagcaccuuugcagauuccggauacgacagcucgucagga

SEQ ID NO: 8247 - RNA, 74 nt, Human
uccugugcugcaguagaaauuagagcauguccugcuuuaugcaggcuuugcuuuaguucuucugaaguguauga

SEQ ID NO: 8248 - RNA, 102 nt, Human
uccuuaagugguuucuccgaggcagucuggggcagcugguuaagaaaucuugcaucuuccagccagaguccauggacuagucacgcuugaucacuaaaaggg

SEQ ID NO: 8249 - RNA, 85 nt, Human
uccuugaacuuggaaccugacaauguugguguugucguguuuggaaaugauaaacuaauuaaggaaggagauauagugaagagga

SEQ ID NO: 8250 - RNA, 88 nt, Human
uccuuuuccucuuuuccuuccuccucuuuggaauuuuccugggaccuacagaauaaagggggggauggacaggggguuuucaaaagga

SEQ ID NO: 8251 - RNA, 77 nt, Human
ucgaaaaucuguugaucgacugguuuuuugcagcuuaacuucaaaugcaauccugguucuuuugacacaagauucga

SEQ ID NO: 8252 - RNA, 93 nt, Human
ucgaacauugcagagguacugagccauaacagagaggcgacuacgcuguugcuuccuguauuggcugcaagucucucugccacuuccuuuuga

SEQ ID NO: 8253 - RNA, 71 nt, Human
ucgaacuccugaccucgugaucugcccgccuuggccucccaaagugcugggauuacaggcaugagccucgg

SEQ ID NO: 8254 - RNA, 70 nt, Human
ucgaucuccugaccucaugauccgcccgccuuggccucccaaagugcucggauuagaggcaugagaauga

SEQ ID NO: 8255 - RNA, 70 nt, Human
ucgauuccgagcguagcugucuggaggagagacacuagacugcauuuccucgcgagugacgcuggaacga

SEQ ID NO: 8256 - RNA, 83 nt, Human
ucgcuauggaaugggaacgucuguugagagagcggcagccagcacugauuacuacaagagaggcgauuucauuccugggcuga

SEQ ID NO: 8257 - RNA, 74 nt, Human
ucgcucuaucacccaggcuggagugcaguggcaccaucagcucacugcaaccuccacuuccuggguucaagcga

SEQ ID NO: 8258 - RNA, 78 nt, Human
ucgcucuuuguugcccaggcuagagugcaguggcaugaucucggcucacugcaaccucugccuccuggguucaagcga

SEQ ID NO: 8259 - RNA, 90 nt, Human
ucgcugacagguccucugauuguccaaguguacucuucaagauuccaguuuggacagugcagccuuggaacaaauuaggacuggggguga

SEQ ID NO: 8260 - RNA, 93 nt, Human
ucgcugcagcagcaugcacuucuugguagcagaauggaaugaaccauccaucaacuucuauaaaagaagaggugcuucugaucuguccaguga

SEQ ID NO: 8261 - RNA, 63 nt, Human
ucggaggugucugagguugccaucagccagggcgaggucacccuggcccucaggaaccuccgg

SEQ ID NO: 8262 - RNA, 64 nt, Human
ucggcuccaagucugacccacucugcauccuuuuacaggaugugggagggggcagcugggcuga

SEQ ID NO: 8263 - RNA, 88 nt, Human
ucgggcgucuguccacacacaugaguuauguaccaacaacacuguguugauggcauugcuuauguguaggugaagcagucacgccuga

SEQ ID NO: 8264 - RNA, 85 nt, Human
ucggggcagcggucacggagcaggagcugcuggcgcuggacaccauccggcccgagcacguccugcgccucagccgggucaccga

SEQ ID NO: 8265 - RNA, 81 nt, Human
ucgguguggaggcaguguuugauuucaacugguuaucuguuaaaaggcuugugucccagugcaacacuaccuuugugcaga

SEQ ID NO: 8266 - RNA, 88 nt, Human
ucgugaacaguaauggggagcuguaccaugagcaguguuucgugugcgcucagugcuuccagcaguucccagaaggacucuucuauga

SEQ ID NO: 8267 - RNA, 66 nt, Human
ucguggccucggugaugcuuaacguccgccugcaggugcggaucgagugagcgccggcggcggcgg

SEQ ID NO: 8268 - RNA, 85 nt, Human
ucuaaauuaauuuggcaaaagauaggguacuuaguuuccuguuacugaguuagcucuacgucuucuggaccaaagcaacaugaga

SEQ ID NO: 8269 - RNA, 73 nt, Human
ucuacacuguggaguacgccugcagcgccgugaagaaccugguggacagcagcgucuacuuccgcagcgugga

SEQ ID NO: 8270 - RNA, 82 nt, Human
ucuacagaggcccuggcacauuuuuccuuuccaccccugaguccaccaaagcaaaauguccccuccagggccccucuguggg

SEQ ID NO: 8271 - RNA, 87 nt, Human
ucuaccacaccaaugccuucauggucuuacaucuuguccucuuaacccugacuucucuagcccucaugaaugcuuuaguguggcaga

SEQ ID NO: 8272 - RNA, 72 nt, Human
ucuagauuaauagcuuuaaacaggcaugaccuugcuuuuguccaagcucaaaugucugugugcaugucuaga

SEQ ID NO: 8273 - RNA, 107 nt, Human
ucuagggagacccaggacccgggagagagguagaggggagcagagacagccaccagcuucuaucuucugcucuaagcacauucuuucacgaguuuaaguuuccuaga

SEQ ID NO: 8274 - RNA, 67 nt, Human
ucucaagggcacuuuggccagcugagugaacugcacuguugacaagcuggcauguggauccuugaga

SEQ ID NO: 8275 - RNA, 71 nt, Human
ucucaauaucuauaugcuuugaaaacaagaaucuauuacaaauaagcuuggccuaagagcuagaguuggga

SEQ ID NO: 8276 - RNA, 60 nt, Human
ucucacauccaucaaaggaucucacacuggaaagagguccuauaauguaggaaugugaga

SEQ ID NO: 8277 - RNA, 74 nt, Human
ucucacucugcuggggacccaugaacagcacugccaaggagcagaccuuuuauuggguccccaaaaggaugagg

SEQ ID NO: 8278 - RNA, 75 nt, Human
ucuccaagcuggagaaugggggcuucccuaugagaaagaucucauugaggccauccgaagagccaguaauggaga

SEQ ID NO: 8279 - RNA, 74 nt, Human
ucuccagccugaaguucuccuccugcaacugcuccagcugggauugcagcagcagcagcuucuuggcagugaga

SEQ ID NO: 8280 - RNA, 101 nt, Human
ucuccauaucugauuucagauaacuuagaacagccuaugggaaguagucaugcaucucagguuuguucugagacaccugaugaccuguuagaugaugguga

SEQ ID NO: 8281 - RNA, 97 nt, Human
ucuccauguuugccucuaaauucagaacagcucccaucaagauccuagcaggacuuuuguguaacugcugguucugaagugaggguggagguggaga

SEQ ID NO: 8282 - RNA, 89 nt, Human
ucucccaggguuagaugacugcgggaagccuuugaucccaacccccaaggcuuuguauauuugaucauuugugaucuaacccuggaaga

SEQ ID NO: 8283 - RNA, 89 nt, Human
ucuccccaucacccagaugccuuccccagccuccgagcccucauagccgcucgcuauggggaggcuggggagggucccggauggggagg

SEQ ID NO: 8284 - RNA, 83 nt, Human
ucuccuccaugugucuuggcaggcacucauuucuguggcugucggcagagggaauguucuggagcugccaaggagggaggaga

SEQ ID NO: 8285 - RNA, 68 nt, Human
ucuccugggcuucucagugucucgccggcgggguucggccugagcuggauugacauagcccuugggga

SEQ ID NO: 8286 - RNA, 64 nt, Human
ucucggagagcaggacaucgaauguaaagcgcagaugggacuucgacaggcuucuucucuggga

SEQ ID NO: 8287 - RNA, 65 nt, Human
ucucggugugauugaugccccucaaaacucucguugcaguugggggguagagguugacacuguga

SEQ ID NO: 8288 - RNA, 75 nt, Human
ucucgugugccuuucccauaguaucguaaggacguuucgaguaauuuacaacaacuaagggaguguauaucggga

SEQ ID NO: 8289 - RNA, 76 nt, Human
ucucuacuguaauuaauugggucuauuauuaacucucuguuccaucauagaauguggccaggccuuacaauggaga

SEQ ID NO: 8290 - RNA, 87 nt, Human
ucucuaggcaaaugccuucaaguuuuccaguucugagguaacuaguucaguuuguugggauggaagcaugaaggaaagggcuagaga

SEQ ID NO: 8291 - RNA, 66 nt, Human
ucucuaucuguccaccaucuugccuugcccuuccuggggcugaggcagacaaaggaaagguaauga

SEQ ID NO: 8292 - RNA, 131 nt, Human
ucucucagguucuaugaggucaaggagcuugcuugucuuguucacuaugaaacucccaaauguucagcauauugccugguucucaaugaauacaaaggaaggcacuguucugagaugguaugaggacugga

SEQ ID NO: 8293 - RNA, 73 nt, Human
ucucuccaaguugucaggaaaccucugguuccccauucuccuggcgguacagcaagcacugacagugaguaga

SEQ ID NO: 8294 - RNA, 62 nt, Human
ucucucccucuauguuuuauuucauugccuggcaaagaagacagacuucaguugggaagagg

SEQ ID NO: 8295 - RNA, 127 nt, Human
ucucucuucccucucaucauagauuaaucacuuaguugcaagggaccaguaaauuaacagaauggugaacauuuuccuuuucuuggugcuuuugcuggaugacuagugguuucugcuggaacagaga

SEQ ID NO: 8296 - RNA, 73 nt, Human
ucucugaagcaacaggaucugagacuaaaaaaagugguaaaccugggccauucuugcugucuggauccagaga

SEQ ID NO: 8297 - RNA, 80 nt, Human
ucucuggcuggaccuggacugcagucacacucuaagagcuccucuuucuacaccucugccagugggcguucggucagaga

SEQ ID NO: 8298 - RNA, 78 nt, Human
ucucuuaaguuguuuuauuaaguuaauuugucuuacugaccauauaauuuagaacaaaaagcagcuguacuaaagagg

SEQ ID NO: 8299 - RNA, 81 nt, Human
ucucuucccacugcaggaagauugcagaaggcuguggauuaauuguagcauuucacugaucuucacuccagucacuaggga

SEQ ID NO: 8300 - RNA, 98 nt, Human
ucucuucugaacaagccccaucauuuggugaaccuccacccuaacaaaguagcgaugggguugggggcuaaauuaauuggaguggggcgaggacgaga

SEQ ID NO: 8301 - RNA, 76 nt, Human
ucucuuguccccuccuuuggcugccauuuuccaaugcaaugauaaggucugacagcugguagaggcagacaucuga

SEQ ID NO: 8302 - RNA, 93 nt, Human
ucucuuuauucucaguuuugcacaguaauaaguugacucacacagacuuaaagccugaaaacaucuuauuugugcagucugacuacacagagg

SEQ ID NO: 8303 - RNA, 79 nt, Human
ucugaagauagaucgccaucaugaacgacaccguaacuauccggacuagaaaguacaugaccaagcgacuaucuucaga

SEQ ID NO: 8304 - RNA, 66 nt, Human
ucugaaggaggcuuggcggugguugggcugguggcugagccugacugccucaucuucuccgccaga

SEQ ID NO: 8305 - RNA, 64 nt, Human
ucugaaguguaugugauauuguguauuguuacaauaauacacaauauuauuaaaguauauguga

SEQ ID NO: 8306 - RNA, 74 nt, Human
ucugaaucuucugggaggcagcggaaucugagacgaauccaggguccaaaucccgcaagcuccagaagcacaga

SEQ ID NO: 8307 - RNA, 74 nt, Human
ucugaccagcacccacacucaggcucuggccgcaguguccugucauucgagucagguucugggggcugguuuga

SEQ ID NO: 8308 - RNA, 91 nt, Human
ucugaccucaacuccaaaggagcuuuggcuucccugggccccagucggugacuucaggcaaaggcaaguuuugcuucugaguucccauaga

SEQ ID NO: 8309 - RNA, 115 nt, Human
ucugagaugcacugguauaauucacuggcuugcccaguugguacucucuuagccguggcuauuccugaugacuaacuggcaguaaaagccaggaaauuauggaggucuacugagg

SEQ ID NO: 8310 - RNA, 65 nt, Human
ucugagugcuaaauuuggaagacagcuuguaccugguuggaagcuuuguccaaaaugcacacaga

SEQ ID NO: 8311 - RNA, 72 nt, Human
ucugcaaggugguggaagugggcagcaagaucuacguggaugaugggcuuauuucucuccaggugaagcaga

SEQ ID NO: 8312 - RNA, 77 nt, Human
ucugcaagugugaaaggaaggcacuaaggaaagaccaccugguccugggccugccucuuccccuagcacccaguaga

SEQ ID NO: 8313 - RNA, 84 nt, Human
ucugcaggccuccuuuaugacuaaauccagccauuaagcuucaaaugaguuaccugcuggcauuguguaagggcagccagcaga

SEQ ID NO: 8314 - RNA, 106 nt, Human
ucugcauggacucaugguguggauggguuucugaggguguugguagcaguaacgguuccacaugaugaaacccagauggcugcuccccacugugcauccacccgga

SEQ ID NO: 8315 - RNA, 77 nt, Human
ucugcugcuucaacaacagugacuugcucuccaaugguauccagugauucguugaagaggaggugcucuguagcaga

SEQ ID NO: 8316 - RNA, 73 nt, Human
ucuggaggagcaguugucugaugaagagaaggugcguauagcagcaaaauucaucauucaugccccuccugga

SEQ ID NO: 8317 - RNA, 97 nt, Human
ucuggauuaucuacaaguguuugcuauuuacaaugugaaguuugcgaagugccgcguggauuuuuaugugaaacaagcauuucuguuacgguucagg

SEQ ID NO: 8318 - RNA, 77 nt, Human
ucuggcugcagaucuggagguggaggcaguacccuggacucuauucugcugccccuucaggguuuggaggagccgga

SEQ ID NO: 8319 - RNA, 65 nt, Human
ucuggcuggggauguucauauugugagaggagacuucgaugagaaucugaauuauccagaccaga

SEQ ID NO: 8320 - RNA, 66 nt, Human
ucugguauguuucuuauagcaaacuguuguucaugcaacacuugugcucaaaggggaaggcacagg

SEQ ID NO: 8321 - RNA, 80 nt, Human
ucugguguggagacuucgugguggugcuaagaaaaggaagaagaagucuuacaccacucccaagaagaauaagcacaaga

SEQ ID NO: 8322 - RNA, 63 nt, Human
ucugugcacuugauaauaacccugcaggcguucugcgugaaccaggcuguuaagugcaccaga

SEQ ID NO: 8323 - RNA, 76 nt, Human
ucuguguccagcccuugcagagagcuuuguccucugacaucagcuaccacacaggcucauucucaacuggcacaga

SEQ ID NO: 8324 - RNA, 63 nt, Human
ucuguguuugaagugucuauugggcuagcaugguuagaaauagaacauuaccaucauugcaga

SEQ ID NO: 8325 - RNA, 89 nt, Human
ucuuaccccaguauccuauuaucucauaccuaaggcagugaugguuucucagaccucuuagauugagaagauguggcauggguguaagg

SEQ ID NO: 8326 - RNA, 74 nt, Human
ucuuauaccccaaaagucauacagugucagaacaaaggcugggauggguaugauguaacagugggaauguaaga

SEQ ID NO: 8327 - RNA, 89 nt, Human
ucuuaugguuuauuccucagguaucauucugaucauuguuguuacaggagagaugagaggaaguuagaggggcuagaagaaccaggaga

SEQ ID NO: 8328 - RNA, 98 nt, Human
ucuucaaacauuuaaaucaagcuuuggacuaauuaugcuaauuugugaguucugaucacuuuugagcucugaagcuuugaaucauucagugguggaga

SEQ ID NO: 8329 - RNA, 61 nt, Human
ucuuccaucggccucggucuuuuagauucccugccuucgagccgaaccgagauuuggaagg

SEQ ID NO: 8330 - RNA, 80 nt, Human
ucuuccauugacauaaaaauagucucaggcuugugugggaaaauuaaguauauagauacuauugcauuuaucaagggaga

SEQ ID NO: 8331 - RNA, 121 nt, Human
ucuucccuucaucuccaggggucauccccucaccuuauugggcaaaacugcaucaaucuccuuuugcaguuucugcuggacaucagggugaguggccaguucauauaaagugaaggaaaga

SEQ ID NO: 8332 - RNA, 73 nt, Human
ucuuccggcagaccgauugccuucaugaaggcuucaaaguuuuccuggcucugcaguugguacuugccggaga

SEQ ID NO: 8333 - RNA, 77 nt, Human
ucuuccuccucugugccuggugcuucucaggcccucaggggccucccuucaccgccaccacccccgggagaugaaga

SEQ ID NO: 8334 - RNA, 80 nt, Human
ucuugaccauauaccuuggaguugaauauuguuuucauacugcugugguuugaauguucccuccaacacucauguugaga

SEQ ID NO: 8335 - RNA, 72 nt, Human
ucuugagaagugggugagggcaugcaaauguaaaaaaguaagguguguucugggaucuacuaguucuugaga

SEQ ID NO: 8336 - RNA, 86 nt, Human
ucuugcacugccaccucacuuuccaccacugucagccuggaaagagauccaggucuggagcuggagagaacaggcccugugcagga

SEQ ID NO: 8337 - RNA, 69 nt, Human
ucuugcccaggcuggagugcaguggugcgaucuuggcucacugcaaccucugccuccuggguucaagca

SEQ ID NO: 8338 - RNA, 96 nt, Human
ucuugcccgccccucagcacccugccuugucuccaggagguccgaagcucugugggaccucuugggggcaagguggggugaggccggggaguaggg

SEQ ID NO: 8339 - RNA, 96 nt, Human
ucuugccucuuauuuacauucuccaaacucacuauccauucagcuuguguuagaaggaaugcuaaaaguauggggaguuguaguaugggaccaaga

SEQ ID NO: 8340 - RNA, 63 nt, Human
ucuuggcuuccacguccauugcucagcucacagugguacagaccaaguauguggaagccaagg

SEQ ID NO: 8341 - RNA, 75 nt, Human
ucuugggaacuggaguaaaggucacucuugcuacgcuuuagcagagacugguggcauuuugccccugcccugaga

SEQ ID NO: 8342 - RNA, 69 nt, Human
ucuuguaaacgauugggcuccagcuaucgagccuuaccaaagaguuaccagcagccccaguguacagga

SEQ ID NO: 8343 - RNA, 80 nt, Human
ucuugucucagcaacuuucccaucucgucucuucucuuguaacaagagaagagacgagauguacaagagaagagacgaga

SEQ ID NO: 8344 - RNA, 82 nt, Human
ucuugugucgagacuucgugguggugcuaagcaaacaggaagaagaagucuuacaccacucccaagaagaauaagcacaaga

SEQ ID NO: 8345 - RNA, 80 nt, Human
ucuuguguugagacuucgugguggugcuaagaaaaggaagaagaagucuuacaccacucccaagaagaauaagcgcaaga

SEQ ID NO: 8346 - RNA, 80 nt, Human
ucuuguguugagacuucgugguggugcuaagaaaaggaagaagaauucuuacaccacucccaagaagaauaagcacaaga

SEQ ID NO: 8347 - RNA, 81 nt, Human
ucuuguguugagacuucgugguggugcuaagaaaaggauagaagaagucuuacaccacucccaagaagaauaagcacaaga

SEQ ID NO: 8348 - RNA, 80 nt, Human
ucuuguguugcgacuucgugguggugcuaagaaaaggaagaagaagucuuacaccacucccaagaagaauaagcacaaga

SEQ ID NO: 8349 - RNA, 84 nt, Human
ucuuguucaacauaggguagguggcagccacggguccaacucgcuugaggcugggcccugggcgcuccauuuuguguuccagga

SEQ ID NO: 8350 - RNA, 98 nt, Human
ucuuguuucuugauggucaguucguauggaaugcaccugcaaggguaccuccuugucugaaagucgugcuuuaaaccuaacuuaauuaagagacgaga

SEQ ID NO: 8351 - RNA, 66 nt, Human
ucuuugcagggccaauauugacagcagagucaccaaacacuuccuucaguuaucggucaacaaaga

SEQ ID NO: 8352 - RNA, 64 nt, Human
ucuuugcccccuuuggcaguggcugcccagucaaugggcagagccagcugaggggggcuuugga

SEQ ID NO: 8353 - RNA, 62 nt, Human
ucuuugcccgucuccuggggaccccccaacgaaauguggaguccucgggggccgugcacuga

SEQ ID NO: 8354 - RNA, 121 nt, Human
ucuuuuauaguuuauguuuucauuuuggugaagccuuaaaaugagaaggcagaugacaaugcucaguaacuagucugcuuucuugacccagagccuuaaugauuuuuaagcuuauaaagga

SEQ ID NO: 8355 - RNA, 91 nt, Human
ucuuuucaauaccugguaugguaugaggcacaggauaguugcugacaaacauuuguuagcuaauuaucaugugcugggggaguuggaggga

SEQ ID NO: 8356 - RNA, 73 nt, Human
ucuuuuuaccuggccgugugguuagugauugguacuauuagcaaucagcuaacuacacugccuaguaacuaga

SEQ ID NO: 8357 - RNA, 90 nt, Human
ucuuuuuccuacuucugcaguggggucugucuccuuucauuuucacuauuugaacagcugacgguaagcuccuugaggacaggaaccaga

SEQ ID NO: 8358 - RNA, 101 nt, Human
ucuuuuucugagguuucauuccaaugagaguugcacacugucagcuugguuuuguggcugcugauagucguacuuucuugcuauucacaacaagaaaaaga

SEQ ID NO: 8359 - RNA, 64 nt, Human
ucuuuuuuaguaacagaguacucguauacuuaucacuguaugcacucauugggucuaagggaga

SEQ ID NO: 8360 - RNA, 78 nt, Human
ugaaaagugcuccccaucaucugaagaagcagcaccugguaacaggcauggccauucagaggguacuuagcauuuuca

SEQ ID NO: 8361 - RNA, 80 nt, Human
ugaaaaugaguucacaauagauguauggauuuguuucuugguucucuauucuauuuuauuggucuaggugcuuauuuuua

SEQ ID NO: 8362 - RNA, 104 nt, Human
ugaaacagacugggccaauguccacaaagaauuccuggucagcaccaccgauguccaaaggugcaauaucaaggaagggcaggcgugauggcuuauuuguuuug

SEQ ID NO: 8363 - RNA, 72 nt, Human
ugaaaguuuaguuuuauuauggacacuuuaugcaaacauuucaauacuuuuggcuacuucuauaaucuuuua

SEQ ID NO: 8364 - RNA, 78 nt, Human
ugaaaucuacauuagcagugcugugcaagauucuuacauaauucaagaccuaaaaccagccugcagugugagguuuca

SEQ ID NO: 8365 - RNA, 62 nt, Human
ugaacaacacacacgcugcuguaucucccugugggcagauuugguagccucguguggguuua

SEQ ID NO: 8366 - RNA, 110 nt, Human
ugaaccagcuucucagcucuacuguguuugacccuguguucaagguuaggggaauuauaguuucccaggucuccaucguggggguaaucagaggggcagagaaggcuuca

SEQ ID NO: 8367 - RNA, 99 nt, Human
ugaaccuuaccuaaauaaugaaagccagccagauucauuuuccacggcacaugguuuccuguggguaagauguguuuauuugguuuugguacaaguuca

SEQ ID NO: 8368 - RNA, 77 nt, Human
ugaacugaaugagagagaaaaagagguccagaguaguuuguggagcgauguuuccaucucuaaugccacucagcuca

SEQ ID NO: 8369 - RNA, 81 nt, Human
ugaagaaaaaaugcaaacugaccgggcaaauagauucgaguauuuauuaaagcagacagaacuuuuugcacauuucauuca

SEQ ID NO: 8370 - RNA, 73 nt, Human
ugaagaagguguagcucucggcggggauguuacccuuggaccaggaacacuuuguuguagcugcccuccauca

SEQ ID NO: 8371 - RNA, 72 nt, Human
ugaagaagguguagcucucggcggggauguuacccuuggccaggaacacuuuguuguagcugcccuccauca

SEQ ID NO: 8372 - RNA, 92 nt, Human
ugaagacuccaucacaguuccagauggguaggaauaccuugcagggcuggggcaagguauugccuucucuggaaggcugugcauucucuuca

SEQ ID NO: 8373 - RNA, 102 nt, Human
ugaagauccucacugagcgaggcuacagcuucaccaccacggccgagcgggaaaucgugcgcgacaucaaggagaagcugugcuacgucgcccuggacuucg

SEQ ID NO: 8374 - RNA, 82 nt, Human
ugaaggaaccaaggcaacagggggguuccuggauccuauuuacucgggaaaaaccuuccuaaaccuggccuuggcccuuuua

SEQ ID NO: 8375 - RNA, 69 nt, Human
ugaaggcagucacagaacaggggcaugaacucuccaacgaagagagaaaucugcucucuguugccuaca

SEQ ID NO: 8376 - RNA, 62 nt, Human
ugaagggaggcacugaggucuucugaucuggggagaacagacugggacucaucuuccuuuca

SEQ ID NO: 8377 - RNA, 70 nt, Human
ugaagucacacaugaaagaagccaugaucaagcuugguuuccacuugcucugcuucuucauguaucuuua

SEQ ID NO: 8378 - RNA, 94 nt, Human
ugaaucuacucugacguggccaaaggcauccugcaguacguggcucggagccugagccaccgguccggaggcuucuauacgcgcagaagaugca

SEQ ID NO: 8379 - RNA, 79 nt, Human
ugaauucagugagauacaaaaagcuccuucuguauuggagaauuccgauggagugaauacaugugauauccugaauuca

SEQ ID NO: 8380 - RNA, 80 nt, Human
ugacaaguuuuuguuuguauccaauuacagaguuccauaagacuaugauuugaauauugugguacaacuuaaauuuggca

SEQ ID NO: 8381 - RNA, 101 nt, Human
ugacaaucuugguuaccauccauuaagugcugcugauuuuggaaagaucaugaaaaacgucuuuccaaacaugaaggcacgucguuugggcacaagaggca

SEQ ID NO: 8382 - RNA, 62 nt, Human
ugacauuagcagcauuaggucuauagguggcugcuuaacuaauuaugaacucagcugcuuca

SEQ ID NO: 8383 - RNA, 64 nt, Human
ugaccaaaacugugccuuguggaaaugaacuucacaaguuccucaucugggacacugcugguca

SEQ ID NO: 8384 - RNA, 75 nt, Human
ugacccacacagcuggccacuugcuggucaugcucugaaacuuugcaucagggcuguaccagcuggucaggguca

SEQ ID NO: 8385 - RNA, 77 nt, Human
ugaccccaacccauccugccagggcagggccuaucuuccugccucuggaagacuuguugcagguggguaguggguca

SEQ ID NO: 8386 - RNA, 85 nt, Human
ugaccucaaagucacaacccucauauguuaaaucauggccggcagcucaugguacagauuuggcgaaggguuguggggagaguca

SEQ ID NO: 8387 - RNA, 93 nt, Human
ugaccucauggagaagagguuggcaagcaugguggagaggccuugagccaggcagcucugggcuaugaagcccaacuucaacucugcgaggca

SEQ ID NO: 8388 - RNA, 87 nt, Human
ugaccuggcggacaggugggagccacagcguacaccccaugauucccucugugcugugcguagugccuacugcuugcuuccagguua

SEQ ID NO: 8389 - RNA, 96 nt, Human
ugacuugcugagauguccgucuauucuugaagagcgguauucuuggagcugauaccucuguugaucuugaagaaaguugggcgugucuauaaguua

SEQ ID NO: 8390 - RNA, 72 nt, Human
ugagaauacacauuguauguuucugugcacaugacagugugugugugugcacguacauacuguauagucuua

SEQ ID NO: 8391 - RNA, 62 nt, Human
ugagaauguuccccccauuggaaacugacgcuuggcuccuuucuuguggauggauuuucuca

SEQ ID NO: 8392 - RNA, 102 nt, Human
ugagacacagucucgcucugucacccaggcugcggugcaguggugugaucuuggccucacugcaaccucugccuccuggguucaagugauucuucugccuca

SEQ ID NO: 8393 - RNA, 101 nt, Human
ugagacagggucucgcucugucacccaggcuggagugcaguggcacgaucucagcgcaccgcacccuccgccucccaggcucaggcgauuccccugccuca

SEQ ID NO: 8394 - RNA, 71 nt, Human
ugagaccuacucuccacugcucugcagcuggauggcugauggcaggcugagcaguggggaagcagguuuua

SEQ ID NO: 8395 - RNA, 65 nt, Human
ugagacgaagacuguggcugaggcuuuguuuucaggccgaaagcaggacacucagcucauucuca

SEQ ID NO: 8396 - RNA, 79 nt, Human
ugagacgggguuuggcucugucgcgcagagaucgugccacugcaauccagccugggcgacagagcgagacucugucuca

SEQ ID NO: 8397 - RNA, 71 nt, Human
ugagacucuggccuacuuccuaacaaugucuuggaagugggaugaugguaaaggagaaaggccacagucca

SEQ ID NO: 8398 - RNA, 101 nt, Human
ugagauggagucucacuuugucacccaggcuggagugcaguggugugauaucggcucacugcaaccuccaccucccggguucaagugauucuccugccuca

SEQ ID NO: 8399 - RNA, 97 nt, Human
ugagauggagucuuuguugcccaggcuggagugcaguggcaugaucuuggcucacugcaaccucugccugccagguucaagugauucuugugccuca

SEQ ID NO: 8400 - RNA, 91 nt, Human
ugagcaccagguggucuccucugacuucaaagggaaccaaauccuccacuuugaagcuggguggcuuggcucaagaccauuuguaagcuca

SEQ ID NO: 8401 - RNA, 74 nt, Human
ugagcagagggauggaacagagggugagagaggcaguggccgucuccaccucagcuccugcucccucugcauca

SEQ ID NO: 8402 - RNA, 72 nt, Human
ugagccaagaggaacggagcuuccaagacuaucuugggaagauucauggggcuuacuccucugagaaacuca

SEQ ID NO: 8403 - RNA, 92 nt, Human
ugagccagccgggugaauggcagaaagaauagaggcuauuugaauacugauguggcccucacuuucuucuauuuccauuaaugacaugcuca

SEQ ID NO: 8404 - RNA, 66 nt, Human
ugagccucuccuggcucugucugcuggucuaggccaggguggggcugaucaagggcagagagcuca

SEQ ID NO: 8405 - RNA, 63 nt, Human
ugagcugcuucaucucagacgcacuaagccguguguccucgcccucucccgugaggcaguuca

SEQ ID NO: 8406 - RNA, 101 nt, Human
ugaggcaggagaaucacuugaaccccaggaggcggagguugcagugagcugagaucacgccacugcacuccagccuggcgacugagugagacuccgucuca

SEQ ID NO: 8407 - RNA, 103 nt, Human
ugaggcaggagaaucacuugaacccgggagguggagcuugcggugagccgagaucgcgccauugcacuccaggccugggcaacaagagugaaacuccaucuca

SEQ ID NO: 8408 - RNA, 101 nt, Human
ugaggcaggagaaucauuugaaccugggaaguggagguugcagugagccaagaucgugucacugcacucuagccuaggugauaaagcgagacucagucuca

SEQ ID NO: 8409 - RNA, 102 nt, Human
ugaggcaggagaaucguuugaaccugggaggcggagguuguguugagccgagaucucgccauugcacuccagccuaggcaacaagagcgaaacuccaucuca

SEQ ID NO: 8410 - RNA, 71 nt, Human
ugaggggcuccugaaagaccuacugccaggaccagugacccuggugauggaacgcucggaggagcucaaca

SEQ ID NO: 8411 - RNA, 116 nt, Human
ugagguaaguauguuauuggaaaggugugaucuauauagaacccuguacaugaaaaggaggagaugccgcuaucuuggcagggaugaucauguauuugaaauaguaacucacagca

SEQ ID NO: 8412 - RNA, 102 nt, Human
ugaggugggagaauugcuugaacccaggaggcagagguugcagugagcugagauugcaccacugcacuccagccuggguaacagagugagacucuugucuca

SEQ ID NO: 8413 - RNA, 81 nt, Human
ugagguuuuccagcuaggguggugggaacaggcccuacccuagguccugugucagcaccacuguuccuucuaaucuucuca

SEQ ID NO: 8414 - RNA, 62 nt, Human
ugaguaauguggugcagaguguuucagcagugaagcugacagcaaaggcacagacauucuca

SEQ ID NO: 8415 - RNA, 88 nt, Human
ugaguauacuuggauuuuugguaucuguggguuggggggacgguccaggaaccaauaccccauggauaccaagggacaacuguacuua

SEQ ID NO: 8416 - RNA, 128 nt, Human
ugagucaccgaagagugauaaucccaggcaguacagaaugagcucagcugagguugugcaauggguugugaaugacgaugaaguuguggaucaccucugguucugagacacucuguucuugguguuca

SEQ ID NO: 8417 - RNA, 86 nt, Human
ugagucagcugcuuccacauaaaagucauauauacgcaagguagaaauauguugagacaauauaugauuaugguggcagcugauca

SEQ ID NO: 8418 - RNA, 77 nt, Human
ugaguccaaguguauggugcucuggagcaagagugcuucugucuuuuuuauguuuuggagugcagugcaggauuuca

SEQ ID NO: 8419 - RNA, 88 nt, Human
ugagucccagggccugaaggguucuuggacaugggccgauuuuccugucaccuauguccccucaaccucaucaccacugggcagcuca

SEQ ID NO: 8420 - RNA, 101 nt, Human
ugaguguaugugugagagagaauguuauguuuaucacugaguucccauuguuucauucucauagcacuuauuucuucauacuuucuauacacauuuacucg

SEQ ID NO: 8421 - RNA, 96 nt, Human
ugagugugggcagugcggccccugcggagugaggcgcggcgcgcccuucuugccuguugccucuuccuccuccuguccggggcccgcccgcgcucg

SEQ ID NO: 8422 - RNA, 88 nt, Human
ugaguguguuucuggacacaaacuucugcaguagaaugaccuaacaugucgguuucauugcagucauuauaggauugaaauacguuca

SEQ ID NO: 8423 - RNA, 107 nt, Human
ugaguucggucacagacuugauguuuuugaaaguugucaccaguuuauugucaccuuccaacugaaccacugucuugacuuucuccccugucauugucuccagcuca

SEQ ID NO: 8424 - RNA, 93 nt, Human
ugaguugagugcucagaauucuaccuauaaaugucuaaauauuaagcaggcuaauguuuauacugggcuagauuuaaaaagguacucaagcca

SEQ ID NO: 8425 - RNA, 86 nt, Human
ugauaaauguaccccucucagucuguaguaugaguguuuaaaguauaugugcagucuugcuuacaaggagggguuaccauguauca

SEQ ID NO: 8426 - RNA, 74 nt, Human
ugauccccccaggagggcaacaccacuuggugucaggggcgucccggcagagaaguguggcuaaggggggguca

SEQ ID NO: 8427 - RNA, 67 nt, Human
ugaucuccugaccuugugauccgcccgacuuggccucccaacgugcugggauuacaggcaugaguca

SEQ ID NO: 8428 - RNA, 62 nt, Human
ugaucuccugugggucuggugcuauauucuagagaaguuugcaccuggacaauaggaauucg

SEQ ID NO: 8429 - RNA, 80 nt, Human
ugaugaaaauccacaaugucuuugagcuucugguuguguaaugcugggguuuaaagucaccauuuguggguuuggcauca

SEQ ID NO: 8430 - RNA, 72 nt, Human
ugaugaaaugcacuuucccgugcagcaguguucuuuugccugucaacugcugggugguuuuugcauucauca

SEQ ID NO: 8431 - RNA, 63 nt, Human
ugaugagcagaacaaagauuugagaagcacuuucccugcaucugguucagacucugcucauca

SEQ ID NO: 8432 - RNA, 66 nt, Human
ugaugaggacugggacagguacgugcacccugugcuucaccuaacugccugugccgaucucucuca

SEQ ID NO: 8433 - RNA, 115 nt, Human
ugauggccccaacagguucugggcuucaguggagcccuacugugcugacaucaccagcgaggagguccgcacacuugaggaguuacugaagcccccaagaagaugaggcugagca

SEQ ID NO: 8434 - RNA, 72 nt, Human
ugaugucaguuccuuugcgcccugacugcaucaucaugcggcggcgaacagugucaaauggauaggaaguca

SEQ ID NO: 8435 - RNA, 96 nt, Human
ugauucaaagcaagaugguagcauuggagaggaugagauauggucagaugaggauauauuuuaaaaguugagcuaacaggauuugcugaggaauca

SEQ ID NO: 8436 - RNA, 72 nt, Human
ugauucuggagaaggagaggaugaugcggagguucagcaagaaugccugcauaaauuuuccacccgggauua

SEQ ID NO: 8437 - RNA, 64 nt, Human
ugauucuggcacaggaaauggucuccaaaaucucaaaauaucagaucucuaccuugucaaguca

SEQ ID NO: 8438 - RNA, 71 nt, Human
ugauugccccucuaacuccauggacagacacuagugguggugaaguucauaaaguuuugagguggcaaaca

SEQ ID NO: 8439 - RNA, 76 nt, Human
ugauugguaagccucauaauuggccuuuguuaucuuuguacugugacgaaggcaguggaugauacauuaccaauca

SEQ ID NO: 8440 - RNA, 73 nt, Human
ugcaagucggccacaggagccacggaaccgcaguaggauuucuacuguuauacagcccuugaggcagaaugca

SEQ ID NO: 8441 - RNA, 60 nt, Human
ugcaauguucaucuccccaucaggucuuuuaaagcugcugauggggagaugaacauugca

SEQ ID NO: 8442 - RNA, 84 nt, Human
ugcacuggcaccuagacauguacaacaggaaccguguggauacaucccccacaccuguuucuguggcauggucauguguaugca

SEQ ID NO: 8443 - RNA, 130 nt, Human
ugcacugguccaugagaauugacgauaaauaggaauugccuuggcaaaaugucagucugagaaguuucucucugacauccugggcauccuucuuuuuguccuucccaucccacucuccaacacaguggca

SEQ ID NO: 8444 - RNA, 72 nt, Human
ugcagaagucucccugggaguaauuuuggugaagucagcuuuugccuuuuucaucacaggcaggcuuuagua

SEQ ID NO: 8445 - RNA, 75 nt, Human
ugcagacaaaccaguguuaagaaaguauucaccaucauuuaaacaaauaaccacuuaaauagaacagugucugca

SEQ ID NO: 8446 - RNA, 65 nt, Human
ugcagaccuggcuuagaggaccccuaaggcugaggggucacuuccagaacugaguccgguccgca

SEQ ID NO: 8447 - RNA, 108 nt, Human
ugcagauuccuuuuuguuaaaugcugacuguguccuugguuucccauucaccugggaaguagaagaauaaaaaucauuccauaguuccauccaaggagggcagcugca

SEQ ID NO: 8448 - RNA, 87 nt, Human
ugcaggaugugcacuaaacaucugugugacuggcuccuuuuaaaaguuuucaaaagauuuagccaggcacaguggcuuguuccugua

SEQ ID NO: 8449 - RNA, 74 nt, Human
ugcaggcugccggucuuggucguaugaaaccaaacacacuugugcuuggauuuaagaaggauugguugcaagca

SEQ ID NO: 8450 - RNA, 82 nt, Human
ugcaguacucuaauuuagccaaguaauugcugcuguaaaauccaaaucuacagagcgcacaauuuuuuaaauggagugugca

SEQ ID NO: 8451 - RNA, 76 nt, Human
ugcaguuagugggugauuugcuauuuuucuuaguaguuaaaaaauggaacuaaauagugaauauacauacacugca

SEQ ID NO: 8452 - RNA, 75 nt, Human
ugcauauuuuaacaucugaaaucagaaagugucuuuacuggguuuuugguuuuagaaacauaaaauaauaaugua

SEQ ID NO: 8453 - RNA, 71 nt, Human
ugcaugggguucuuuugugaugaugacaguuuggauaaagguuccaagguucauuauucacagcccgggua

SEQ ID NO: 8454 - RNA, 90 nt, Human
ugcauuacccuccccaacuuaaaaucuuuugauaacccaggcagcuggguuauccccaauuuaaagucuuuuuguuguagcuguauggca

SEQ ID NO: 8455 - RNA, 80 nt, Human
ugccaacgcagagccagcuguucagcguacucuuuuagagaaauagaagauugucggcagaaacagcccaggcguuggca

SEQ ID NO: 8456 - RNA, 63 nt, Human
ugccaauuuuauaaccugccccccagagcuguaccaugaggggggagcagguuggaauaugca

SEQ ID NO: 8457 - RNA, 83 nt, Human
ugccaccauucucuucuccccucccaguggcagcgaggccagaugcugcugcugcgccuguaagagugagacuaauggaggca

SEQ ID NO: 8458 - RNA, 131 nt, Human
ugccaggcauaaucaacauuccucauuacuucuucaacauccucuugaaagcugugcucauuuuacaaaugagaaaacagauuuagagaaauauaaugacuuguaugaggucacauagcuuaugaguggca

SEQ ID NO: 8459 - RNA, 74 nt, Human
ugccauuuaugcccccggaaccaagacccgcgacuacagcuaccugggcuccgauaccgugcugcauguaggca

SEQ ID NO: 8460 - RNA, 86 nt, Human
ugccauuuuuugacucuucugccacuaaccaacauucucauauccacucaagucuguuuuuaguuaggaucaguuuuaaacaggca

SEQ ID NO: 8461 - RNA, 91 nt, Human
ugcccacauuccuguuagcugaggucaccugacucugcuugucguuuuugcacaggcagacgugugcauucuggagagcagggagugagug

SEQ ID NO: 8462 - RNA, 96 nt, Human
ugcccaugauguuuucaguacaaaucuaagucccaagauuagguuggaaaggguauuucuuguuggcuuaguuuggguuggaauuuagcaugggua

SEQ ID NO: 8463 - RNA, 87 nt, Human
ugcccccugcucuggcuggucaaacggaaccaaguccgucuuccugagagguuugguccccuucaaccagcuacagcagggcuggca

SEQ ID NO: 8464 - RNA, 83 nt, Human
ugccccuuucuuuucagccuuucugcggaagcugucucguggacaucucucgucaacagcacaaggcuggaugguucaacgca

SEQ ID NO: 8465 - RNA, 71 nt, Human
ugcccgcguacaugggcugaggaauguucaagcagaagaagugguagaguuuucuucaggcuuaaagggua

SEQ ID NO: 8466 - RNA, 67 nt, Human
ugccgggagcugggcaugaaagcccuggacaugaauucauguccagagcuuucaugccuuaaaggua

SEQ ID NO: 8467 - RNA, 75 nt, Human
ugccuccucugggugcgugaugccuccucugggcgggugaugccuccucugggugcgugaugccuccucugggca

SEQ ID NO: 8468 - RNA, 62 nt, Human
ugccucugcuuucauuucuaugguuauucguggaaugacucauugaccacgcggagaaggca

SEQ ID NO: 8469 - RNA, 67 nt, Human
ugccuggcucuuuucuuuucuuuuaaagggaggcugggaaagccggagagcuaguaggagccaggca

SEQ ID NO: 8470 - RNA, 99 nt, Human
ugccuguguccugucgcaagaggugaguccgucuugugggugcugcugucugggugccugugccucaggggauucgccuucuguacaggaagcaaggca

SEQ ID NO: 8471 - RNA, 86 nt, Human
ugccugugugggacugagaugcaggauuucuucacaccucuccuuugugacuucaagagccucuggcgucucuuucugcaaaggca

SEQ ID NO: 8472 - RNA, 71 nt, Human
ugccuucaugaagcuugugaccaaguggaggaaauagcuauuaaccacacaaucacauaaucaagaaggua

SEQ ID NO: 8473 - RNA, 103 nt, Human
ugcgcaucaagcuggaggagcaggcccagcagauacgccugcaggccgaggccuuucaggcccgucucaagagcugguucgagccccugguggaagacaugca

SEQ ID NO: 8474 - RNA, 78 nt, Human
ugcgcauucccaagucacgaugucacuguacauccgaucggagaugaggauacaugugugaugccacuggaugaugca

SEQ ID NO: 8475 - RNA, 72 nt, Human
ugcgcgagagagggggcucgaggugcuuuuccuauauggggccgagggacaauggucaccgucucuucagca

SEQ ID NO: 8476 - RNA, 96 nt, Human
ugcgcugggcagaagcacgcaccgcauccugggcagccugacccgagcugagcuggccgaaggggaacucgguguauggccgacugcccacgugca

SEQ ID NO: 8477 - RNA, 77 nt, Human
ugcguagagguguuuguaguauucucugauggaaguuuguauuuccugugggauugguggugauauccccuuuauca

SEQ ID NO: 8478 - RNA, 62 nt, Human
ugcguagcauuugcugcauggguuaauugagaauagaaauuugccccuggcaaaugcacaca

SEQ ID NO: 8479 - RNA, 73 nt, Human
ugcuaaauguuuucuucaagggaaccagauuuaguucuuuacagaauuuuccagugaaauaaaacauguugua

SEQ ID NO: 8480 - RNA, 73 nt, Human
ugcuagauagaugaaaauuugaaaaauaacagaaugccuucuuccucccuuucccauuuuuugaccccuggca

SEQ ID NO: 8481 - RNA, 95 nt, Human
ugcuaggcuuauucucuuccucauucagucucucaaucaaucaauacuuacugaguacuugucauugcaagaccugaggaauagaggggcuagca

SEQ ID NO: 8482 - RNA, 76 nt, Human
ugcuauguugccaaggcuggucuugacuccugggcgaucgccugcgcucagaauucagaccagcugggcgcaugua

SEQ ID NO: 8483 - RNA, 81 nt, Human
ugcuauugugaagggugcuugguuuuuucaaaauuggcuuccucagauauuugcaaaacuuuguucaccuguucauaagca

SEQ ID NO: 8484 - RNA, 65 nt, Human
ugcucacagggugugacuggcccacuaucuaggguagugagccuauuuuguggccccugugugca

SEQ ID NO: 8485 - RNA, 65 nt, Human
ugcuccaggcugggcauucagaugugguccggguagacacuauggaugagcugcccagccuugca

SEQ ID NO: 8486 - RNA, 87 nt, Human
ugcucuacaaaguugagggucagagggggaacaauuauauagaaauuucggagauguguauucuuuggccuucgaaauucuggagca

SEQ ID NO: 8487 - RNA, 60 nt, Human
ugcucucaggagugcaacgagguaaaagcaagaagcucuauucaacgcauuuuuuaggua

SEQ ID NO: 8488 - RNA, 74 nt, Human
ugcucuguugccuaggcuggagugcagugaugcaauuuuggcucacugcaaccuccaccuccuggguucaagca

SEQ ID NO: 8489 - RNA, 84 nt, Human
ugcugaaaccuuucagaaauagccauaauuuuguauuacauacaaguaagccauuuuaaggaguuucaugaaagacguuuggca

SEQ ID NO: 8490 - RNA, 67 nt, Human
ugcugaggacucccaagcguacugcucaucaucgauauguuuggugaucacagcuacuuucucagca

SEQ ID NO: 8491 - RNA, 62 nt, Human
ugcugaugaaauuuaucaccagacagcuucuauuuaaaagcaacuggcugugacauugagca

SEQ ID NO: 8492 - RNA, 69 nt, Human
ugcugcccaggcugggaugcaguggcgugaucucggcucacugcaaccucugccuccugggcucaagca

SEQ ID NO: 8493 - RNA, 75 nt, Human
ugcugcugcccauccuggccauguugauggcacugugugugcacugccacagacugccaggcuccuacgacagca

SEQ ID NO: 8494 - RNA, 71 nt, Human
ugcugcuucuuggcuggcuugcuuuggcagucacugccacuggccuugccuuuggcacauggaagcaugca

SEQ ID NO: 8495 - RNA, 90 nt, Human
ugcuggcgcugcgcugcggcucccgcuggcucggccugcucuccgucccgcgcuccgugccgcugcgccuccccgcggcccgcgccugca

SEQ ID NO: 8496 - RNA, 105 nt, Human
ugcugggcgugugaggcggcugugcugugccugugagacaggaaugguuccauuacaccaugggaaaucacugauuuauaggucccaaacugccacacaucagca

SEQ ID NO: 8497 - RNA, 103 nt, Human
ugcuguaggcuguaugcuguuaaugcuaaucgugauagggguuuuugccuccaacugacuccuacauauuagcauuaacaguguaugaugccuguuacuagca

SEQ ID NO: 8498 - RNA, 63 nt, Human
ugcugugaucugauuggaggagggacaguuucugguacccauccucugauuuauacauaugca

SEQ ID NO: 8499 - RNA, 73 nt, Human
ugcuguggucuguucaagugaucuuuucacuuauuugaaaaagagcauggaucaagagcuagauaccacagua

SEQ ID NO: 8500 - RNA, 129 nt, Human
ugcuguguucauccuaucauucaggcauauuuggaagacuagugauuuaaggcagggauuuauguauuuaugugagacaaucagggaacuucuaauaagaacugauuauaagggaaguugguugaagca

SEQ ID NO: 8501 - RNA, 74 nt, Human
ugcuuagucuaacucaaaagauccuuuuucauuuguuaccaaaaauguauuaggucccuguugaaggcuaggca

SEQ ID NO: 8502 - RNA, 71 nt, Human
ugcuucuuuauuaaugauuauaaaucaggaucuagcagcaggucuaguaacuucugucguuuugagaagca

SEQ ID NO: 8503 - RNA, 73 nt, Human
ugcuugaacacaguauuuucccaauagcacuuucauugccagugucuuucuuuggugccuuuccuguucagca

SEQ ID NO: 8504 - RNA, 74 nt, Human
ugcuuuagauuagacugucaugucucagugucuaucuguacuauauuacuuugauauucagagaaucuaaagca

SEQ ID NO: 8505 - RNA, 77 nt, Human
ugcuuugucguucaguugguuacuucuuuuaauguauucaaaaauguugaacacauacagaacugaauuaagaagca

SEQ ID NO: 8506 - RNA, 71 nt, Human
uggaaacuuuuggcuguggggaccccauuucacugaugauugaauggguccaccucugucaaaggaauuca

SEQ ID NO: 8507 - RNA, 88 nt, Human
uggaaauucaauacacugagaaguguuaaaaucauuaaccaaaauuacugaaugguagaauacugucucgaaauguacugaauucaca

SEQ ID NO: 8508 - RNA, 90 nt, Human
uggaacuggaggagcuguccugugucagccugaaauaaucaaaaggaucaaaaauccuguuuuaggcaacauaggaagacuccaacucua

SEQ ID NO: 8509 - RNA, 98 nt, Human
uggaagaggggcagcuguugaaggcauucuuguaucaagggagguaggagggcccucugaugccaaaggcagccuucucaggcuauugcuuucuucca

SEQ ID NO: 8510 - RNA, 78 nt, Human
uggaagccugaccuggccucucucugagaugaccagaauggguccuguccagccaggcagagcacagacaggcugcca

SEQ ID NO: 8511 - RNA, 81 nt, Human
uggaaggcgccuguggucguggaauuguuuauguuucccuuccuucuuggcaaaacguccuccucaggcaguugucaucca

SEQ ID NO: 8512 - RNA, 83 nt, Human
uggaagguuucacuugguggcuuggccuagggaccagcaagggcuggggugggaaggguggcucaaggaagccucuuucucca

SEQ ID NO: 8513 - RNA, 88 nt, Human
uggaagugaugacucuaaacagugcaaugaacaauuuauuuauguacuauuaaaagaacuguaaaugcaauguaaagacacacagcca

SEQ ID NO: 8514 - RNA, 102 nt, Human
uggaauucuucauugagucguugacuucucgacggaaugcugacagguucugggugaaccugucucuguuuuucguaagaagauuucgcucgaugccuucca

SEQ ID NO: 8515 - RNA, 60 nt, Human
uggaauuuucugagagaucuuuauucuuuauucaggaugugggaucgaucagcacugcca

SEQ ID NO: 8516 - RNA, 91 nt, Human
uggacacagacuugccaggcagccuggggcagagugaagagaagcccgugccugcugcgccugugcccagcccugguggacccugugccca

SEQ ID NO: 8517 - RNA, 81 nt, Human
uggacgucucaggauucccucuuuuggaacucugguuuaugggcggaagacuccgagggcaggaauguggagagacguuua

SEQ ID NO: 8518 - RNA, 73 nt, Human
uggacucugaguaugaggcaggcuguucugagguccccguggggugagccugucuguccucccucagagccca

SEQ ID NO: 8519 - RNA, 63 nt, Human
uggacucuggggggacaccaaagaugcccugugaccacuuuugguguugcccgaguuagucca

SEQ ID NO: 8520 - RNA, 75 nt, Human
uggagaaaaaggucauagucccgacaaucugguuucccugccuauuaucaagccaccuaacuccucacuuuucca

SEQ ID NO: 8521 - RNA, 81 nt, Human
uggagacugguagcuuauuaaagaaacuccguguuacucauuccuggaguuggggguuucuguaggcacuuuauuucucca

SEQ ID NO: 8522 - RNA, 75 nt, Human
uggagaguuuaaauaauuugcugaaugucucauggccaaaauccuauugaaguauuugcugggaucuucucucca

SEQ ID NO: 8523 - RNA, 72 nt, Human
uggagcacaugugccgccuggacauugauucaccacccaucacagcccggaacacuggcaucaucuguacca

SEQ ID NO: 8524 - RNA, 92 nt, Human
uggagcguggcgaacaggugcucugggccuggcgcugcugcugcugcucggccucggacuaggccuggaggccgccgcgagcccgcuuucca

SEQ ID NO: 8525 - RNA, 73 nt, Human
uggagggaacauucugcuuuucaggcaccagcugugaagaagaaaccaacaguaacuaaaggcagaucuucua

SEQ ID NO: 8526 - RNA, 88 nt, Human
uggaggggccggacucgucauacuccugcuugcugauccacaucugcuggaagguggacagcgaggccaggauggagccgccgaucca

SEQ ID NO: 8527 - RNA, 94 nt, Human
uggagggucucuaguuaauuggcauuccggugcuuaaggccacuuuuggguagagguuuggcaaggauggaguguccagaccuaugauccucua

SEQ ID NO: 8528 - RNA, 122 nt, Human
uggaguauuuaagagugacuuaaacaacagauguucauacucugccaguucuggagguuggaaaguccaagaucagggugcuggcagauuugguugcuguuggguucucuucuuggcucgca

SEQ ID NO: 8529 - RNA, 65 nt, Human
uggaguccguccggcacggggcuccggaugcaaggcgguacuggggcgucgggccacggaagcca

SEQ ID NO: 8530 - RNA, 85 nt, Human
uggaucaugggugguggugaacagcagaaagggauuauggaugaaucugcauuguucuagcugcuccccaugccacccgucuccg

SEQ ID NO: 8531 - RNA, 80 nt, Human
uggaugcagugacacaccaguagggagcuagcuggcugccccuugcagcccacuccccaaacuggcuacccaggcaucca

SEQ ID NO: 8532 - RNA, 74 nt, Human
uggcaagaaagugcucggugccuuuagugauggccugggcucaccugggacaaccucaagggcaccuuuugcca

SEQ ID NO: 8533 - RNA, 73 nt, Human
uggcaccacauccccauagcccacgguggucaugcucacugugccccaccaccagcaggcugggaugguguua

SEQ ID NO: 8534 - RNA, 96 nt, Human
uggcaccagcuuccaaagccaggaugaagaggaggagaaaggaugggguccacaccuuguuuucuccaccaucauccaggggcucugcugcugcua

SEQ ID NO: 8535 - RNA, 82 nt, Human
uggcagagagcugugcuucaaauacagcuguggucugagcaaacuuggcugcucuaaauacugaaugccaguuccuuugcca

SEQ ID NO: 8536 - RNA, 86 nt, Human
uggcaucccagauguugcaguugaagucgucguagccagcgagcagcagccguccgcugcgcgagaaggcaacagaggugaugcca

SEQ ID NO: 8537 - RNA, 75 nt, Human
uggcauggggaccagcuagaacaaugcagauucauccauaaucccuuucugcuguucaccaccacccaugaucca

SEQ ID NO: 8538 - RNA, 76 nt, Human
uggcauggugaaagggugcaaugggcuuauuuaaggacuagagcagugugcagccauaacacaagaaaucauguca

SEQ ID NO: 8539 - RNA, 97 nt, Human
uggccaugcacaguggcucgcaacuguaaucucagcacuuucggaagccaaggcggucagaucaccugaggucaggaguucgagaccagucuggcca

SEQ ID NO: 8540 - RNA, 76 nt, Human
uggccgggaggcugggcugggggagguaucucuucgaaggguccauccucaagccacgauaagagcuucugagcca

SEQ ID NO: 8541 - RNA, 102 nt, Human
uggccgugcccggagcgcucagcaaacaccccucucacauuccuauggcagacgcuggaggaugaagggcuggcuguugggucuguucuugcucuaaggcca

SEQ ID NO: 8542 - RNA, 67 nt, Human
uggccuggguaaggugccuggcaggaagcaagacaaggccucuggcagagagcaccuuagcaggcca

SEQ ID NO: 8543 - RNA, 93 nt, Human
uggccuuugggacucaaaacacaggaucugacuggugggcacaauaccaucuugaacgcccacaaaaagguuugguuuuguugccaaagggca

SEQ ID NO: 8544 - RNA, 79 nt, Human
uggcgacgccagugugccuguguggaguggucgugaagcgcgcaguguucacuccaggcuggacccaauggcacugcca

SEQ ID NO: 8545 - RNA, 65 nt, Human
uggcgcugcacagguggcuggacugucccaccuucuguggacagagccacuuggugcugcgacca

SEQ ID NO: 8546 - RNA, 90 nt, Human
uggcggacgggaccugucaggacgcggccaucgugggcuacaaggacucgcccuccgucugggccgccguccccgggaaaacguucguca

SEQ ID NO: 8547 - RNA, 79 nt, Human
uggcgggccagucccugcaggugucuugccccuaugacuccaugaagcacugggggaggcgcaaggccuggugccgcca

SEQ ID NO: 8548 - RNA, 85 nt, Human
uggcggugggucaguggcagagggccaugguuuccauguuaaggaagcggacgugcaucuuggucucaaugucgauccccugcca

SEQ ID NO: 8549 - RNA, 75 nt, Human
uggcuauuuaccaaaauuuaagcugagccaaacaugauuuacaggguucgagguucccuuuacuggcaauggcca

SEQ ID NO: 8550 - RNA, 60 nt, Human
uggcucaagcuauccucccgccucugccucacuaagagcugggauuacaggccugagcca

SEQ ID NO: 8551 - RNA, 60 nt, Human
uggcucaugcauauaaucccaacuaucuaggaggcugaggugggaggauuguaugagccg

SEQ ID NO: 8552 - RNA, 81 nt, Human
uggcugacggucgcagcaaauccagcugcugcugcggcggcuguggcggcggcagcggcggugacugaggauagagagcca

SEQ ID NO: 8553 - RNA, 74 nt, Human
uggcuggguugaauccggugcuugucgguacagguccuuaugacacaaaagcaccguaaaagaggcuccagcua

SEQ ID NO: 8554 - RNA, 76 nt, Human
uggcuucuccugcagugauauugaugaguguagcuacuccagcuaccucugucaguaccgcugcgucaacgagcca

SEQ ID NO: 8555 - RNA, 89 nt, Human
uggcuuucgccaguagcugaggacgcccuuguccaucauacgguagaguugaacacagagguggaucaggcugagugccaggaagacca

SEQ ID NO: 8556 - RNA, 66 nt, Human
uggcuuuucaagcuaugucauaccugccucccagagguacuuggaaaauauuggcuugacagcaca

SEQ ID NO: 8557 - RNA, 102 nt, Human
ugggaaagcuuucuuucugaguucauaccuuauucgacaccagaaaauccacacuggagagagaguguaugaauguaaggaaugugggaaagcguuucucca

SEQ ID NO: 8558 - RNA, 72 nt, Human
ugggaaaguuccauaggaagccuaagcacucaucuuaaccuuacuuagucuucucuuaacuggacuuuucua

SEQ ID NO: 8559 - RNA, 95 nt, Human
ugggacuuccagaacuuggaguaacuuggaguugauucccauuuuccuuuggaggugacuggcaaaugcaaucuuuaggaagcuccucugaccca

SEQ ID NO: 8560 - RNA, 74 nt, Human
ugggaugcccuggacuggaccaugcaggccuaugaacgcaacuucugggacccaucuccacaacuggacaccca

SEQ ID NO: 8561 - RNA, 78 nt, Human
ugggcaugugguguacaggugggggcaaguauaugucagaauccugagaugggagucccucaaauacacagcagacca

SEQ ID NO: 8562 - RNA, 85 nt, Human
ugggccaauguccacaaagaauuccuggucagcaccaccgauguccaaaggugcaauaucaaggaagggcaggcgugauggcuua

SEQ ID NO: 8563 - RNA, 63 nt, Human
ugggccacagaggcauaaggucuggguuaagaaauaucuaagacgugcucaaucuguguucca

SEQ ID NO: 8564 - RNA, 78 nt, Human
ugggccagauaguucucuguuguugggggauuucuugugcauugugggagauuucccaucuuuccucacuucuaccca

SEQ ID NO: 8565 - RNA, 95 nt, Human
ugggcuaccagucuugagaaguaggugagggcaugcaaauguaaaaaaguaauguguguucugggaucuacuaguucuugagaagcacaaguuca

SEQ ID NO: 8566 - RNA, 74 nt, Human
ugggcucaagcaguccucccacuuggccucccaaagugcugggauuacaagagugagccacugcacucagccca

SEQ ID NO: 8567 - RNA, 61 nt, Human
ugggcucaucauucccuuggagccuggaaggccgggugcuccaggggcgugacaacgucca

SEQ ID NO: 8568 - RNA, 73 nt, Human
ugggcuugaguggaggaaggcagaauauuucccccuggguccuucagauucgccagcucccacccugaaccca

SEQ ID NO: 8569 - RNA, 85 nt, Human
uggggcagagggcaggaaaagggcggccacauucucacaaacuucuggcgaaggguagcucccuccucgugaaggaccuggccca

SEQ ID NO: 8570 - RNA, 68 nt, Human
uggggccucacgcaaccuugguguuugguuaaauuugugccuuggcuccuguugcguuuaggcaccca

SEQ ID NO: 8571 - RNA, 99 nt, Human
uggggccuugguaauauaggaaaccuucuugccaauauaggaauauguugacauauuagcuauagcaaaaggcuuauauuagcaccgaaugaggcucug

SEQ ID NO: 8572 - RNA, 74 nt, Human
uggggcugagaggcgagacacugauggcacucuuacuucugucagcugccgcaaagucucguccacuugcugca

SEQ ID NO: 8573 - RNA, 61 nt, Human
ugggggaagaggaagagaggacagagaggccaaacaggccucuuccccuccucuucaccca

SEQ ID NO: 8574 - RNA, 98 nt, Human
ugggggaggaucgucugagcccaggaguuugaggcugcagugagcuacaaucacaccccugcacucaagccuggguuacagagugauaaccugucuca

SEQ ID NO: 8575 - RNA, 83 nt, Human
ugggggcacuggcuucugcucuugcucuuucuucuggaaacauuauucuguuccuuuggacaugggcaaggguccugucccua

SEQ ID NO: 8576 - RNA, 67 nt, Human
uggggugagaugagccgggacuugaaaacccuucucuuaacuuucagucucaacuccucccacucua

SEQ ID NO: 8577 - RNA, 78 nt, Human
uggggugcucaucuucuguaacuguugggaaggcucggugguccauuuucaccaguuaaagaauaugaggccagccca

SEQ ID NO: 8578 - RNA, 79 nt, Human
ugggguggcagguauuagggauaauauucauauagccuucugagcuaucugggcagacuuggugaccugucgaacucca

SEQ ID NO: 8579 - RNA, 85 nt, Human
uggguagcaugaacuaagguagauaaaggcuucacgugguguuuggcauggcguagguguagauuggaccucaguuuucugccca

SEQ ID NO: 8580 - RNA, 69 nt, Human
ugggucaauaauuccacuguugggccucacacaguaccggugaggcacgguagucuucacuuugaaaca

SEQ ID NO: 8581 - RNA, 85 nt, Human
ugggucagacgugcugucugccucaugaaauuggguccaaauugauugaacuacuuucaugagcaguuguagcaggcugaccaca

SEQ ID NO: 8582 - RNA, 104 nt, Human
uggguggcuaggagguuugguggccgggugguugguugaauggguguaaguccccauugcugaagugacaggccuccuugucagaaagcucuuuuugcuacuua

SEQ ID NO: 8583 - RNA, 60 nt, Human
uggguuccuggcaugcugauuugugacuuaagauuaaaaucacauugccagggauuacca

SEQ ID NO: 8584 - RNA, 88 nt, Human
uggguugcuguucaggucagcuuugcuccuaacaacacuggggaaaggaaguaaccaguugagugcaagguugaugggauccagccca

SEQ ID NO: 8585 - RNA, 94 nt, Human
ugguaacuaaguaauaucaggaaagaagaaauaaggaugcaagaugacaaacaaaaucuuuaugaaauacuuuugaucaugaacuuaucugcua

SEQ ID NO: 8586 - RNA, 87 nt, Human
ugguagaauggaaacagcagugacuacauggaaggcagaggaccucccauuccugugcagccauggagaagaugucccgugugacca

SEQ ID NO: 8587 - RNA, 69 nt, Human
uggucaccaucauccaucccgggaagggcuccaaggaggggcugcaccgggagggccggaucgagacca

SEQ ID NO: 8588 - RNA, 62 nt, Human
uggucacucgugacuuacuaguuugauaggcucucacuguggagcuagaagcagggugucca

SEQ ID NO: 8589 - RNA, 100 nt, Human
uggucacuguuagcccaugaacacgugugggccucggucacguggcuuugaagggcagucugaccaggcuagaccacacgugccgugacaggcggugcca

SEQ ID NO: 8590 - RNA, 73 nt, Human
uggucacuucguggcucagguaagaacgugcuuguggaagacaagucuguggcuuggugagucuguguggcca

SEQ ID NO: 8591 - RNA, 84 nt, Human
uggucgaugaacggcuagcuguggaugucuauugugagaugguaacuaugcgcacugaagaugccagagcuagcagugcgacca

SEQ ID NO: 8592 - RNA, 61 nt, Human
uggucucaagugauccacccaccuuggccucccaaagugccgggauuacagacaugagcca

SEQ ID NO: 8593 - RNA, 61 nt, Human
uggucucgccucucuccucuccuccccccaggaggaacuugaaaggaggguaaaaagacua

SEQ ID NO: 8594 - RNA, 103 nt, Human
uggucugaggcagagugugguucagucagggauguuggaagcuggaguagacaggauuauuucucaggugguggauccaaaacuuaaccacaucuucaggcca

SEQ ID NO: 8595 - RNA, 82 nt, Human
uggugaaguauuuuguuaccucagucuuguaucaaguugcuguauuuuucagcuuguuacauugauaauaauuauuucacua

SEQ ID NO: 8596 - RNA, 80 nt, Human
uggugagaugaguugcuuggcacagaucagcagaacaggacccuggugauaaggcaucuggcuuugcuaaccacuuauca

SEQ ID NO: 8597 - RNA, 60 nt, Human
uggugaggaauguaucaucuuuuugucucauauuacaaaugggccaauacggacuugcca

SEQ ID NO: 8598 - RNA, 84 nt, Human
uggugauagcauuacuauagagauggcgcagcggggauggcaccauauguuccucgugccuauccuggugguacucuagaacca

SEQ ID NO: 8599 - RNA, 65 nt, Human
uggugauuucugagacugagaugaagauacguuuccaaagagaguauuuacauuugaaucugcca

SEQ ID NO: 8600 - RNA, 99 nt, Human
ugguggcauaugcguguaaucccagcuacuugggaggcugaggcaggagaauugcuugaacccaggagguggagguuacagugagcagagauugcacca

SEQ ID NO: 8601 - RNA, 109 nt, Human
ugguggcuugguuuguguaccuauuuuucugcauuuguauuggaaaagguuucuuuuaagacauuuuccaaaaguggagaggaauauguguguucaggaagggcuuuca

SEQ ID NO: 8602 - RNA, 64 nt, Human
ugguggggucaguggaaguucugucacuggaucugguuucagugucucagaccuugccccacca

SEQ ID NO: 8603 - RNA, 69 nt, Human
ugguggugcuguaggguguggucugguacuuccgaaucaauuaccgccaauucuucacagcaccugcca

SEQ ID NO: 8604 - RNA, 76 nt, Human
ugguguggaggccuauguucugccccauacaccccacaggcccugcuuaugggaaggaacacaggccuccagccca

SEQ ID NO: 8605 - RNA, 78 nt, Human
ugguguggcgucagcccuaugugcgccccggaagugaugugaagcagugagggcaaaauggguugacgcgaagcacca

SEQ ID NO: 8606 - RNA, 123 nt, Human
ugguuauccgggagaauuccuguuguguggaagaugcuuugcccuuucuucaucuggaaaucauuuuuccauccuuuaggucacagcuuaaacaugauuuucccaggaauuuuucucugacca

SEQ ID NO: 8607 - RNA, 86 nt, Human
ugguucgccaguggucacuugccaacggcgccgggacuggucagguggcgagcuaggcgaguuagcaagggauccaggaagaacca

SEQ ID NO: 8608 - RNA, 24 nt, Human
ugagugugauagaagguggagugg

SEQ ID NO: 8609 - RNA, 24 nt, Human
ugagugugcgugagauaagaguug

SEQ ID NO: 8610 - RNA, 24 nt, Human
ugaguuagaauccaaaccagagcu

SEQ ID NO: 8611 - RNA, 24 nt, Human
ugaguuagcucuacgucuucugga

SEQ ID NO: 8612 - RNA, 24 nt, Human
ugaguuaucuuuuaaauaugucuu

SEQ ID NO: 8613 - RNA, 24 nt, Human
ugaguuauguguuagcggaguguc

SEQ ID NO: 8614 - RNA, 24 nt, Human
ugaguucacaauagauguauggau

SEQ ID NO: 8615 - RNA, 24 nt, Human
ugaguuccugcucgccgaugauag

SEQ ID NO: 8616 - RNA, 20 nt, Human
ugaguugaauacucagcucc

SEQ ID NO: 8617 - RNA, 24 nt, Human
ugaguugagaaugcuuugcuuuug

SEQ ID NO: 8618 - RNA, 18 nt, Human
ugaguuggcugcgagggg

SEQ ID NO: 8619 - RNA, 24 nt, Human
ugaguugguggaaaugugggcguu

SEQ ID NO: 8620 - RNA, 21 nt, Human
ugauaacacuaggaggguggu

SEQ ID NO: 8621 - RNA, 22 nt, Human
ugauauauaaucagcccaugau

SEQ ID NO: 8622 - RNA, 24 nt, Human
ugauaugauagauuuuuguauuga

SEQ ID NO: 8623 - RNA, 20 nt, Human
ugauaugcuccagaauaaag

SEQ ID NO: 8624 - RNA, 24 nt, Human
ugauauggcgaccuauuuugggcg

SEQ ID NO: 8625 - RNA, 22 nt, Human
ugauauguauaucaccuucaga

SEQ ID NO: 8626 - RNA, 22 nt, Human
ugauauguguuugacauccccc

SEQ ID NO: 8627 - RNA, 24 nt, Human
ugauauguuacucauuguaaagac

SEQ ID NO: 8628 - RNA, 22 nt, Human
ugauauguuguaugaugcucuc

SEQ ID NO: 8629 - RNA, 22 nt, Human
ugauauuuugauauauuuaugc

SEQ ID NO: 8630 - RNA, 23 nt, Human
ugaucacagcuacuuucucagca

SEQ ID NO: 8631 - RNA, 24 nt, Human
ugaucugagucuggaacugacaag

SEQ ID NO: 8632 - RNA, 22 nt, Human
ugaucugcuacagccugggccu

SEQ ID NO: 8633 - RNA, 22 nt, Human
ugaucugugggauuuauaccug

SEQ ID NO: 8634 - RNA, 24 nt, Human
ugaugagcaguugaaccugugccu

SEQ ID NO: 8635 - RNA, 24 nt, Human
ugaugaucuugaagaaagcugggc

SEQ ID NO: 8636 - RNA, 24 nt, Human
ugaugaugaugaaguuccagaucu

SEQ ID NO: 8637 - RNA, 24 nt, Human
ugaugcauaaacuggucaccugaa

SEQ ID NO: 8638 - RNA, 21 nt, Human
ugaugcgauuaagguagcagc

SEQ ID NO: 8639 - RNA, 24 nt, Human
ugaugcucacauagguugugccau

SEQ ID NO: 8640 - RNA, 23 nt, Human
ugaugcuucaggacgugacaggc

SEQ ID NO: 8641 - RNA, 22 nt, Human
ugaugcuugagcacaguaccuc

SEQ ID NO: 8642 - RNA, 24 nt, Human
ugauggaagcccgguucccugagg

SEQ ID NO: 8643 - RNA, 22 nt, Human
ugauggaucuguuggcggguuu

SEQ ID NO: 8644 - RNA, 24 nt, Human
ugaugggccugugaccauagagcu

SEQ ID NO: 8645 - RNA, 24 nt, Human
ugauggggcuccaacagccaggcu

SEQ ID NO: 8646 - RNA, 24 nt, Human
ugaugggugggcccagaagguggc

SEQ ID NO: 8647 - RNA, 24 nt, Human
ugauggguugaaaagagguugguc

SEQ ID NO: 8648 - RNA, 24 nt, Human
ugaugguggucggugaaucagguc

SEQ ID NO: 8649 - RNA, 24 nt, Human
ugaugugauugaagauuucagaga

SEQ ID NO: 8650 - RNA, 24 nt, Human
ugauguggaccauucuguauugag

SEQ ID NO: 8651 - RNA, 24 nt, Human
ugauguggacuucucuuuucuugg

SEQ ID NO: 8652 - RNA, 24 nt, Human
ugauguggguaguuauuuccgggu

SEQ ID NO: 8653 - RNA, 24 nt, Human
ugauguuggauucuguugccuggg

SEQ ID NO: 8654 - RNA, 24 nt, Human
ugauuagauuuacacagagcuuuu

SEQ ID NO: 8655 - RNA, 24 nt, Human
ugauucaagacaguggaagagaca

SEQ ID NO: 8656 - RNA, 24 nt, Human
ugauugaggaugcaauucgaaguc

SEQ ID NO: 8657 - RNA, 22 nt, Human
ugauuggcaaugguuaugacgg

SEQ ID NO: 8658 - RNA, 24 nt, Human
ugauuugaauauugugguacaacu

SEQ ID NO: 8659 - RNA, 24 nt, Human
ugauuuggggcauucuagcuugca

SEQ ID NO: 8660 - RNA, 24 nt, Human
ugauuuuaaaaauacagaaagauu

SEQ ID NO: 8661 - RNA, 22 nt, Human
ugcaaaaaaugucagucuauag

SEQ ID NO: 8662 - RNA, 24 nt, Human
ugcaaaaauucuuaagacuucugu

SEQ ID NO: 8663 - RNA, 22 nt, Human
ugcaaacacauuauguguuccu

SEQ ID NO: 8664 - RNA, 24 nt, Human
ugcaaagagaaacuaggggaaaau

SEQ ID NO: 8665 - RNA, 24 nt, Human
ugcaagauuccgauuaaugcuauu

SEQ ID NO: 8666 - RNA, 24 nt, Human
ugcaaggaggaguucuggagaccc

SEQ ID NO: 8667 - RNA, 22 nt, Human
ugcaaugcaaaaauagcccggc

SEQ ID NO: 8668 - RNA, 24 nt, Human
ugcacaagcuggaaguguccuugu

SEQ ID NO: 8669 - RNA, 22 nt, Human
ugcacacauacacuugcccagg

SEQ ID NO: 8670 - RNA, 24 nt, Human
ugcacagaucagugucagaagcau

SEQ ID NO: 8671 - RNA, 22 nt, Human
ugcaccacugcacuccagccug

SEQ ID NO: 8672 - RNA, 22 nt, Human
ugcaccauugcacuccagccug

SEQ ID NO: 8673 - RNA, 24 nt, Human
ugcaccuucacccgcugcucaagg

SEQ ID NO: 8674 - RNA, 22 nt, Human
ugcacgugcuuuauucacaaau

SEQ ID NO: 8675 - RNA, 24 nt, Human
ugcacguggccccaggccucccuc

SEQ ID NO: 8676 - RNA, 22 nt, Human
ugcacuccuuaugagaaucuaa

SEQ ID NO: 8677 - RNA, 24 nt, Human
ugcagaaggagaucaccgcccugg

SEQ ID NO: 8678 - RNA, 24 nt, Human
ugcagagaaucuuagaagacgcag

SEQ ID NO: 8679 - RNA, 22 nt, Human
ugcagagcugaauauccccuug

SEQ ID NO: 8680 - RNA, 22 nt, Human
ugcagauacauguguaacugaa

SEQ ID NO: 8681 - RNA, 24 nt, Human
ugcagaugcguuucgacgggcugc

SEQ ID NO: 8682 - RNA, 22 nt, Human
ugcagccuccaacuccugggcu

SEQ ID NO: 8683 - RNA, 24 nt, Human
ugcaguacucacgccccauggggg

SEQ ID NO: 8684 - RNA, 22 nt, Human
ugcagugauauugaugagugua

SEQ ID NO: 8685 - RNA, 24 nt, Human
ugcaugaagaaauuucgguuuccc

SEQ ID NO: 8686 - RNA, 24 nt, Human
ugcauguaacaagucuuuuuuaca

SEQ ID NO: 8687 - RNA, 24 nt, Human
ugcauguaauaauguugaguggca

SEQ ID NO: 8688 - RNA, 22 nt, Human
ugcaugucaagucaggaagcca

SEQ ID NO: 8689 - RNA, 22 nt, Human
ugcaugucugguacagauaaca

SEQ ID NO: 8690 - RNA, 21 nt, Human
ugcauguucuuguugccuguc

SEQ ID NO: 8691 - RNA, 24 nt, Human
ugcauuuggagucuaaggaaagga

SEQ ID NO: 8692 - RNA, 24 nt, Human
ugccaaagcaaagaaauucuaccu

SEQ ID NO: 8693 - RNA, 24 nt, Human
ugccaacguuaggagugaaaauag

SEQ ID NO: 8694 - RNA, 24 nt, Human
ugccaagaaagacugagccccucc

SEQ ID NO: 8695 - RNA, 24 nt, Human
ugccaaggauguggacuuggaguu

SEQ ID NO: 8696 - RNA, 24 nt, Human
ugccaagggcagcugcugaccgcc

SEQ ID NO: 8697 - RNA, 24 nt, Human
ugccaagggcugcggggaucugug

SEQ ID NO: 8698 - RNA, 24 nt, Human
ugccaaggguccugacggccucgu

SEQ ID NO: 8699 - RNA, 23 nt, Human
ugccaaguaugccucggcuuggc

SEQ ID NO: 8700 - RNA, 24 nt, Human
ugccaagugcugagcuaaaggagg

SEQ ID NO: 8701 - RNA, 24 nt, Human
ugccaauguaugcuuguacuccag

SEQ ID NO: 8702 - RNA, 24 nt, Human
ugccacagacugccaggcuccuac

SEQ ID NO: 8703 - RNA, 24 nt, Human
ugccagacuuccguugagucacau

SEQ ID NO: 8704 - RNA, 24 nt, Human
ugccagagcagcuuguccuccagg

SEQ ID NO: 8705 - RNA, 24 nt, Human
ugccagaugccagccagagcucuc

SEQ ID NO: 8706 - RNA, 24 nt, Human
ugccagcacggugguuaaagggga

SEQ ID NO: 8707 - RNA, 24 nt, Human
ugccagccggcuggaccugcagac

SEQ ID NO: 8708 - RNA, 17 nt, Human
ugccaggaaaagaugag

SEQ ID NO: 8709 - RNA, 24 nt, Human
ugccaggaauuccagguuggaggg

SEQ ID NO: 8710 - RNA, 24 nt, Human
ugccaggcagccuggggcagagug

SEQ ID NO: 8711 - RNA, 24 nt, Human
ugccaguagguuccaacuacuaca

SEQ ID NO: 8712 - RNA, 24 nt, Human
ugccaguggccuggcuugaacgga

SEQ ID NO: 8713 - RNA, 24 nt, Human
ugccauagggauucagggggcucc

SEQ ID NO: 8714 - RNA, 24 nt, Human
ugccauggaguccugcuguggaug

SEQ ID NO: 8715 - RNA, 24 nt, Human
ugccauggccaucuuuuucuuugu

SEQ ID NO: 8716 - RNA, 24 nt, Human
ugccaugguggugguucucucgag

SEQ ID NO: 8717 - RNA, 24 nt, Human
ugccauugaucugggcgaugaucu

SEQ ID NO: 8718 - RNA, 24 nt, Human
ugcccaggcuucugggaguacuug

SEQ ID NO: 8719 - RNA, 22 nt, Human
ugcccagguuggagugcaguga

SEQ ID NO: 8720 - RNA, 24 nt, Human
ugcccagugaccugggggagccug

SEQ ID NO: 8721 - RNA, 24 nt, Human
ugcccauugcucucccacuccacg

SEQ ID NO: 8722 - RNA, 23 nt, Human
ugccccaguacuuuguggguguu

SEQ ID NO: 8723 - RNA, 19 nt, Human
ugccccguuuaaggucagg

SEQ ID NO: 8724 - RNA, 24 nt, Human
ugcccgagccgcugcugcugcgcg

SEQ ID NO: 8725 - RNA, 24 nt, Human
ugcccgaggagaagcugguugagg

SEQ ID NO: 8726 - RNA, 24 nt, Human
ugcccgggccgugccagcggagcu

SEQ ID NO: 8727 - RNA, 24 nt, Human
ugcccggguucucugggugagggc

SEQ ID NO: 8728 - RNA, 24 nt, Human
ugcccuggagaaagagaggaauga

SEQ ID NO: 8729 - RNA, 24 nt, Human
ugcccuggggcgccuggcugaggc

SEQ ID NO: 8730 - RNA, 24 nt, Human
ugccgacgugauucccugggacgg

SEQ ID NO: 8731 - RNA, 24 nt, Human
ugccgagccgcugcugcugcgcgu

SEQ ID NO: 8732 - RNA, 24 nt, Human
ugccgagcggacggaggcuccggg

SEQ ID NO: 8733 - RNA, 24 nt, Human
ugccgauggguggguagggugugg

SEQ ID NO: 8734 - RNA, 24 nt, Human
ugccgcaggagcuuagcuugcugc

SEQ ID NO: 8735 - RNA, 24 nt, Human
ugccggaggaguggucgcaguggu

SEQ ID NO: 8736 - RNA, 24 nt, Human
ugccggcaccaagaagcaguucca

SEQ ID NO: 8737 - RNA, 24 nt, Human
ugccguagcuauggaauagaagca

SEQ ID NO: 8738 - RNA, 24 nt, Human
ugccgugacguaggguaugggccu

SEQ ID NO: 8739 - RNA, 24 nt, Human
ugccguggaggccuccuucaagug

SEQ ID NO: 8740 - RNA, 22 nt, Human
ugccuaggcaggacggaaugca

SEQ ID NO: 8741 - RNA, 22 nt, Human
ugccucagagaacuucugcagc

SEQ ID NO: 8742 - RNA, 24 nt, Human
ugccucaggggauucgccuucugu

SEQ ID NO: 8743 - RNA, 22 nt, Human
ugccucagugacagcagcauau

SEQ ID NO: 8744 - RNA, 24 nt, Human
ugccucugggcuuggcuugagcuc

SEQ ID NO: 8745 - RNA, 24 nt, Human
ugccucugucuuagaaaccuggag

SEQ ID NO: 8746 - RNA, 24 nt, Human
ugccugaagcuaaaaauauauacg

SEQ ID NO: 8747 - RNA, 24 nt, Human
ugccugaaguuuucagaaaagcug

SEQ ID NO: 8748 - RNA, 22 nt, Human
ugccugagccugcugcuagccc

SEQ ID NO: 8749 - RNA, 24 nt, Human
ugccugauaacagggugcaguguu

SEQ ID NO: 8750 - RNA, 24 nt, Human
ugccugggcugaggucuugggggc

SEQ ID NO: 8751 - RNA, 24 nt, Human
ugccuggggauccugaagauaaaa

SEQ ID NO: 8752 - RNA, 24 nt, Human
ugccugggguucccuuacucaucu

SEQ ID NO: 8753 - RNA, 24 nt, Human
ugccuggguaacuugcguauuuuc

SEQ ID NO: 8754 - RNA, 24 nt, Human
ugccuggucaaucaguccucggga

SEQ ID NO: 8755 - RNA, 22 nt, Human
ugccuguaaucccagcuacuca

SEQ ID NO: 8756 - RNA, 22 nt, Human
ugccuguuggaucugucuccau

SEQ ID NO: 8757 - RNA, 24 nt, Human
ugccuuaguaaaauccagcuggug

SEQ ID NO: 8758 - RNA, 24 nt, Human
ugccuuggacauggugauggugau

SEQ ID NO: 8759 - RNA, 22 nt, Human
ugccuuggauaaaugagugaag

SEQ ID NO: 8760 - RNA, 24 nt, Human
ugccuuuggguugugacuuggguu

SEQ ID NO: 8761 - RNA, 24 nt, Human
ugcgaaacuugccuuugcaguagg

SEQ ID NO: 8762 - RNA, 24 nt, Human
ugcgauggcacgccagugcuggag

SEQ ID NO: 8763 - RNA, 22 nt, Human
ugcgcaaacacaccaccugggc

SEQ ID NO: 8764 - RNA, 24 nt, Human
ugcgcagccuuaaaagggggcaca

SEQ ID NO: 8765 - RNA, 24 nt, Human
ugcgcuggacgcccgcuucuccug

SEQ ID NO: 8766 - RNA, 24 nt, Human
ugcgcuuuuggauuggggagucug

SEQ ID NO: 8767 - RNA, 24 nt, Human
ugcggcugcuaacuggcugcgcac

SEQ ID NO: 8768 - RNA, 24 nt, Human
ugcgggcaggcgucauagauaggg

SEQ ID NO: 8769 - RNA, 24 nt, Human
ugcgggcgccgggcugaagcuccg

SEQ ID NO: 8770 - RNA, 24 nt, Human
ugcgggugaacagaguugggccug

SEQ ID NO: 8771 - RNA, 23 nt, Human
ugcguggaagaauacaccggggc

SEQ ID NO: 8772 - RNA, 24 nt, Human
ugcuaagggggccccggauuccgg

SEQ ID NO: 8773 - RNA, 24 nt, Human
ugcuacacaaugggguugggaaag

SEQ ID NO: 8774 - RNA, 24 nt, Human
ugcuacagcuuuggcucugguggu

SEQ ID NO: 8775 - RNA, 24 nt, Human
ugcuagguggaguggauggaugau

SEQ ID NO: 8776 - RNA, 22 nt, Human
ugcuagguuuuuuccuuucccc

SEQ ID NO: 8777 - RNA, 24 nt, Human
ugcuaugagaaucuaaggcugcca

SEQ ID NO: 8778 - RNA, 22 nt, Human
ugcucacugcaagcuccgccuc

SEQ ID NO: 8779 - RNA, 24 nt, Human
ugcucagcaggcugaacccagaag

SEQ ID NO: 8780 - RNA, 24 nt, Human
ugcuccucaaucugcugcuuaguc

SEQ ID NO: 8781 - RNA, 24 nt, Human
ugcucgugcaguuugaguacugga

SEQ ID NO: 8782 - RNA, 22 nt, Human
ugcucugucuugccuuuugaug

SEQ ID NO: 8783 - RNA, 22 nt, Human
ugcucuugcucuuucuucugga

SEQ ID NO: 8784 - RNA, 24 nt, Human
ugcugaagucugaacuugggccuc

SEQ ID NO: 8785 - RNA, 24 nt, Human
ugcugagcccgcuucggccgggac

SEQ ID NO: 8786 - RNA, 24 nt, Human
ugcugcaguacaggggagcauagg

SEQ ID NO: 8787 - RNA, 24 nt, Human
ugcugccugcuugguccugccuug

SEQ ID NO: 8788 - RNA, 24 nt, Human
ugcuggaaucacuuuugccaaagg

SEQ ID NO: 8789 - RNA, 24 nt, Human
ugcuggaccaaggacguggaugag

SEQ ID NO: 8790 - RNA, 24 nt, Human
ugcuggagagagugcauggacaga

SEQ ID NO: 8791 - RNA, 24 nt, Human
ugcuggugggcgucgggcggcggc

SEQ ID NO: 8792 - RNA, 24 nt, Human
ugcuguagcagcucuuuagcugaa

SEQ ID NO: 8793 - RNA, 24 nt, Human
ugcuguaguccagucugauaugaa

SEQ ID NO: 8794 - RNA, 24 nt, Human
ugcugugcggccugggcgcuggcg

SEQ ID NO: 8795 - RNA, 22 nt, Human
ugcugugcuaaaggaaggauua

SEQ ID NO: 8796 - RNA, 22 nt, Human
ugcuguggaaaccgagccugua

SEQ ID NO: 8797 - RNA, 24 nt, Human
ugcugugugccccacuccaaccug

SEQ ID NO: 8798 - RNA, 22 nt, Human
ugcuuacauuaagcagaguaau

SEQ ID NO: 8799 - RNA, 22 nt, Human
ugcuuccugccauuguccacau

SEQ ID NO: 8800 - RNA, 24 nt, Human
ugcuugaauguaagagucagauga

SEQ ID NO: 8801 - RNA, 24 nt, Human
ugcuugaggccuggcagcugggcc

SEQ ID NO: 8802 - RNA, 24 nt, Human
ugcuuuguuuaccuacucaagccu

SEQ ID NO: 8803 - RNA, 24 nt, Human
ugcuuuguuuuuggcagucuuuau

SEQ ID NO: 8804 - RNA, 24 nt, Human
ugcuuuuuuauggaauacuauuuu

SEQ ID NO: 8805 - RNA, 24 nt, Human
uggaaaaacaguuagucuggagcc

SEQ ID NO: 8806 - RNA, 24 nt, Human
uggaaaaacuaagggaugcuuuag

SEQ ID NO: 8807 - RNA, 24 nt, Human
uggaaaaagcuaauuguaguuuuc

SEQ ID NO: 8808 - RNA, 24 nt, Human
uggaaaaauucagaggccuaaagu

SEQ ID NO: 8809 - RNA, 24 nt, Human
uggaaaaauuugagcagcaaacuc

SEQ ID NO: 8810 - RNA, 24 nt, Human
uggaaaacaacuauuuucucauca

SEQ ID NO: 8811 - RNA, 24 nt, Human
uggaaaacccccugaaauuuuaug

SEQ ID NO: 8812 - RNA, 24 nt, Human
uggaaaagugauguggguagccaa

SEQ ID NO: 8813 - RNA, 24 nt, Human
uggaaaaucuacuacagggaacaa

SEQ ID NO: 8814 - RNA, 23 nt, Human
uggaaaaugacaugauggucagc

SEQ ID NO: 8815 - RNA, 24 nt, Human
uggaaaccggaagcauguauucaa

SEQ ID NO: 8816 - RNA, 24 nt, Human
uggaaagaacucuucuuaugucca

SEQ ID NO: 8817 - RNA, 24 nt, Human
uggaaagagacuaagaacaagacu

SEQ ID NO: 8818 - RNA, 22 nt, Human
uggaaaggacagccaguccagc

SEQ ID NO: 8819 - RNA, 22 nt, Human
uggaaaguagaaagcacuacau

SEQ ID NO: 8820 - RNA, 24 nt, Human
uggaaaguucagcaagaucagcaa

SEQ ID NO: 8821 - RNA, 24 nt, Human
uggaacaacugaaagauugguuau

SEQ ID NO: 8822 - RNA, 24 nt, Human
uggaacaggaagguauguccuguc

SEQ ID NO: 8823 - RNA, 20 nt, Human
uggaacaguucaggucugag

SEQ ID NO: 8824 - RNA, 24 nt, Human
uggaaccaaagagagcugucucca

SEQ ID NO: 8825 - RNA, 24 nt, Human
uggaagaaaaagacauuccucuac

SEQ ID NO: 8826 - RNA, 24 nt, Human
uggaagaagagggaagucaucaag

SEQ ID NO: 8827 - RNA, 22 nt, Human
uggaagacagaaaccacacaca

SEQ ID NO: 8828 - RNA, 24 nt, Human
uggaagacccugggccccucaccg

SEQ ID NO: 8829 - RNA, 24 nt, Human
uggaagacucauuauucagagcug

SEQ ID NO: 8830 - RNA, 24 nt, Human
uggaagaggucaucacuccccgga

SEQ ID NO: 8831 - RNA, 24 nt, Human
uggaagauaagcuuaaaggagaaa

SEQ ID NO: 8832 - RNA, 24 nt, Human
uggaagaucuuagaauugccugcc

SEQ ID NO: 8833 - RNA, 24 nt, Human
uggaagcaaguggguucagugaag

SEQ ID NO: 8834 - RNA, 24 nt, Human
uggaagcagcggaggaaggagacg

SEQ ID NO: 8835 - RNA, 22 nt, Human
uggaaggaaagcaaguauauag

SEQ ID NO: 8836 - RNA, 24 nt, Human
uggaaggcgauggccccugcgagg

SEQ ID NO: 8837 - RNA, 24 nt, Human
uggaaggcugaagcggguagauca

SEQ ID NO: 8838 - RNA, 24 nt, Human
uggaaggggagacuuaguaucaua

SEQ ID NO: 8839 - RNA, 24 nt, Human
uggaagguaaauauauguuaagaa

SEQ ID NO: 8840 - RNA, 24 nt, Human
uggaaggugacuuuaucaccuuaa

SEQ ID NO: 8841 - RNA, 24 nt, Human
uggaagguggauuuccccuaucag

SEQ ID NO: 8842 - RNA, 24 nt, Human
uggaagugucuauacagaugugug

SEQ ID NO: 8843 - RNA, 24 nt, Human
uggaaguuggaacaauuuugcucc

SEQ ID NO: 8844 - RNA, 24 nt, Human
uggaauacaaguguaauuugaauc

SEQ ID NO: 8845 - RNA, 24 nt, Human
uggaauaugagaaaauagcagaaa

SEQ ID NO: 8846 - RNA, 21 nt, Human
uggaauccugguggucccacc

SEQ ID NO: 8847 - RNA, 24 nt, Human
uggaaucuccaggagugaggguuu

SEQ ID NO: 8848 - RNA, 24 nt, Human
uggaaugaagucugacuccuccag

SEQ ID NO: 8849 - RNA, 22 nt, Human
uggaaugacagaagaugagagc

SEQ ID NO: 8850 - RNA, 21 nt, Human
uggaaugagggacucuuucuc

SEQ ID NO: 8851 - RNA, 20 nt, Human
uggaaugccaucaccggaua

SEQ ID NO: 8852 - RNA, 24 nt, Human
uggaaugcuaaacguaugccauuu

SEQ ID NO: 8853 - RNA, 22 nt, Human
uggaauggcugaagacugugaa

SEQ ID NO: 8854 - RNA, 21 nt, Human
uggaauguucauaguguccuc

SEQ ID NO: 8855 - RNA, 24 nt, Human
uggaauucgagguaggccggccuc

SEQ ID NO: 8856 - RNA, 24 nt, Human
uggaauugaaaugucauuauugua

SEQ ID NO: 8857 - RNA, 21 nt, Human
uggaauugauagagcuccgug

SEQ ID NO: 8858 - RNA, 24 nt, Human
uggaauuuucagaaaaagauuguc

SEQ ID NO: 8859 - RNA, 24 nt, Human
uggacaacgcagccuaaggcagag

SEQ ID NO: 8860 - RNA, 24 nt, Human
uggacacugcccccgugggaccuc

SEQ ID NO: 8861 - RNA, 24 nt, Human
uggacuaguggaagggaugugggg

SEQ ID NO: 8862 - RNA, 24 nt, Human
uggacuggccgucagagcucguaa

SEQ ID NO: 8863 - RNA, 24 nt, Human
uggacuguccucuacagaaggaag

SEQ ID NO: 8864 - RNA, 22 nt, Human
uggagaaauuauauuuuacuaa

SEQ ID NO: 8865 - RNA, 22 nt, Human
uggagaauuaaaaaggguagug

SEQ ID NO: 8866 - RNA, 22 nt, Human
uggagaccugugugguuugugg

SEQ ID NO: 8867 - RNA, 22 nt, Human
uggagagaaaaugcaguauucu

SEQ ID NO: 8868 - RNA, 22 nt, Human
uggagagaaagcgaagauguag

SEQ ID NO: 8869 - RNA, 22 nt, Human
uggagagauaagccaaguaucc

SEQ ID NO: 8870 - RNA, 22 nt, Human
uggagagauagugauuuagcuc

SEQ ID NO: 8871 - RNA, 22 nt, Human
uggagagauucgugguguagcu

SEQ ID NO: 8872 - RNA, 22 nt, Human
uggagaggaagcacuguacuau

SEQ ID NO: 8873 - RNA, 22 nt, Human
uggagaguaaauggcagaauca

SEQ ID NO: 8874 - RNA, 22 nt, Human
uggagaguaggauuuucuugug

SEQ ID NO: 8875 - RNA, 22 nt, Human
uggagcagaaaggcaggagucc

SEQ ID NO: 8876 - RNA, 22 nt, Human
uggagccaagcuagaaggaaca

SEQ ID NO: 8877 - RNA, 22 nt, Human
uggaggacucaccaggcuugug

SEQ ID NO: 8878 - RNA, 24 nt, Human
uggaggaggaugacgaugaugagc

SEQ ID NO: 8879 - RNA, 24 nt, Human
uggaggcccaggcugggagguguc

SEQ ID NO: 8880 - RNA, 24 nt, Human
uggaggguguuguggucuccaauc

SEQ ID NO: 8881 - RNA, 22 nt, Human
uggaguaaaguaaugucuagga

SEQ ID NO: 8882 - RNA, 24 nt, Human
uggaguccuaaggcugguuggcga

SEQ ID NO: 8883 - RNA, 22 nt, Human
uggagugcugguuacuguuugg

SEQ ID NO: 8884 - RNA, 22 nt, Human
uggaguggccaauucuauucuc

SEQ ID NO: 8885 - RNA, 22 nt, Human
uggauacagccgcgaggcuaaa

SEQ ID NO: 8886 - RNA, 24 nt, Human
uggaucaccuaaggucaggaguug

SEQ ID NO: 8887 - RNA, 22 nt, Human
uggaucuuacuguccagagcac

SEQ ID NO: 8888 - RNA, 23 nt, Human
uggaugagcugcccagccuugca

SEQ ID NO: 8889 - RNA, 22 nt, Human
uggauggauaggaauacuucau

SEQ ID NO: 8890 - RNA, 22 nt, Human
uggauucguccagcuuuucgca

SEQ ID NO: 8891 - RNA, 24 nt, Human
uggauucuugggagcuggauacuc

SEQ ID NO: 8892 - RNA, 24 nt, Human
uggauuggugccccacuggcuuca

SEQ ID NO: 8893 - RNA, 22 nt, Human
uggcaaaaugucagucugagaa

SEQ ID NO: 8894 - RNA, 22 nt, Human
uggcaaagaugcugaccuacau

SEQ ID NO: 8895 - RNA, 24 nt, Human
uggcaaauuguagaagucaugggu

SEQ ID NO: 8896 - RNA, 24 nt, Human
uggcaagauugcagcaagaucaug

SEQ ID NO: 8897 - RNA, 24 nt, Human
uggcaagcagcuccaguccgagca

SEQ ID NO: 8898 - RNA, 22 nt, Human
uggcaaggaagaaaguguuccg

SEQ ID NO: 8899 - RNA, 24 nt, Human
uggcaaggagcugccaaaacugag

SEQ ID NO: 8900 - RNA, 24 nt, Human
uggcaaggagguaaggaaaugaaa

SEQ ID NO: 8901 - RNA, 24 nt, Human
uggcaaggcgagggcacccuggcc

SEQ ID NO: 8902 - RNA, 24 nt, Human
uggcaagggacagcacucacacuc

SEQ ID NO: 8903 - RNA, 24 nt, Human
uggcaagggucccuccauuaagca

SEQ ID NO: 8904 - RNA, 22 nt, Human
uggcaaggugugggcuagagau

SEQ ID NO: 8905 - RNA, 24 nt, Human
uggcaagucacuuggugcccgggg

SEQ ID NO: 8906 - RNA, 24 nt, Human
uggcaaguucuuuagccuuugccu

SEQ ID NO: 8907 - RNA, 24 nt, Human
uggcaauaaauacuaugggauugu

SEQ ID NO: 8908 - RNA, 24 nt, Human
uggcaauaucaaggaagggcaggc

SEQ ID NO: 8909 - RNA, 23 nt, Human
uggcaaucaacuuaguagaaguc

SEQ ID NO: 8910 - RNA, 24 nt, Human
uggcaauugggaagggugugucag

SEQ ID NO: 8911 - RNA, 24 nt, Human
uggcacagaaucugggaauuugua

SEQ ID NO: 8912 - RNA, 24 nt, Human
uggcacagacauuuuaaucuuguc

SEQ ID NO: 8913 - RNA, 22 nt, Human
uggcacagaucagcagaacagg

SEQ ID NO: 8914 - RNA, 22 nt, Human
uggcacauaguaaguguucagu

SEQ ID NO: 8915 - RNA, 24 nt, Human
uggcacgauggcggaugugaccuu

SEQ ID NO: 8916 - RNA, 24 nt, Human
uggcacgcucgaacuuccggcccu

SEQ ID NO: 8917 - RNA, 24 nt, Human
uggcacuaagcgguccugagcgcu

SEQ ID NO: 8918 - RNA, 24 nt, Human
uggcagagaauacagucagucagg

SEQ ID NO: 8919 - RNA, 22 nt, Human
uggcagagagcugugcuucaaa

SEQ ID NO: 8920 - RNA, 24 nt, Human
uggcagaggacuucgagcggcgcc

SEQ ID NO: 8921 - RNA, 24 nt, Human
uggcagagguggcggcggcggcau

SEQ ID NO: 8922 - RNA, 24 nt, Human
uggcagaguaaagauuauuccugu

SEQ ID NO: 8923 - RNA, 24 nt, Human
uggcagccucaucaagaugacuga

SEQ ID NO: 8924 - RNA, 22 nt, Human
uggcagccugagaagucagagc

SEQ ID NO: 8925 - RNA, 24 nt, Human
uggcagcggguaaccugcuuguuc

SEQ ID NO: 8926 - RNA, 24 nt, Human
uggcaggaacggagugguugguag

SEQ ID NO: 8927 - RNA, 24 nt, Human
uggcaggaaggggaggcaaggcca

SEQ ID NO: 8928 - RNA, 24 nt, Human
uggcaggaaugggaggcauccaga

SEQ ID NO: 8929 - RNA, 24 nt, Human
uggcaggagcugaggcagcugcag

SEQ ID NO: 8930 - RNA, 21 nt, Human
uggcaggcagugaagugggag

SEQ ID NO: 8931 - RNA, 24 nt, Human
uggcaggccaugggcccucaggau

SEQ ID NO: 8932 - RNA, 24 nt, Human
uggcaggccccucaaagccguggu

SEQ ID NO: 8933 - RNA, 24 nt, Human
uggcaggccugguaggcggaggcg

SEQ ID NO: 8934 - RNA, 24 nt, Human
uggcaggcugggaaaagacaagcc

SEQ ID NO: 8935 - RNA, 24 nt, Human
uggcaggggaggacagaacuuuga

SEQ ID NO: 8936 - RNA, 22 nt, Human
uggcagggucuugcuguguugc

SEQ ID NO: 8937 - RNA, 22 nt, Human
uggcagguguuaagcugguuuc

SEQ ID NO: 8938 - RNA, 24 nt, Human
uggcaguggguaaaaugguggaca

SEQ ID NO: 8939 - RNA, 24 nt, Human
uggcauaguggugauaauugacau

SEQ ID NO: 8940 - RNA, 24 nt, Human
uggcauagugucagauguaccuua

SEQ ID NO: 8941 - RNA, 21 nt, Human
uggcaucaagcaauccuccug

SEQ ID NO: 8942 - RNA, 22 nt, Human
uggcaucauccacauagaauga

SEQ ID NO: 8943 - RNA, 21 nt, Human
uggcaucuaauauuuuuggac

SEQ ID NO: 8944 - RNA, 24 nt, Human
uggcaucugguggcuaagcugguc

SEQ ID NO: 8945 - RNA, 22 nt, Human
uggcaugaagaaggaauagagc

SEQ ID NO: 8946 - RNA, 24 nt, Human
uggcaugcagcuccaguccgagca

SEQ ID NO: 8947 - RNA, 24 nt, Human
uggcaugccuuuuucacggcggcu

SEQ ID NO: 8948 - RNA, 24 nt, Human
uggcauggccuuccgugucccacu

SEQ ID NO: 8949 - RNA, 24 nt, Human
uggcauggggagcagcuagaacag

SEQ ID NO: 8950 - RNA, 24 nt, Human
uggcaugugcccagcgacguggcc

SEQ ID NO: 8951 - RNA, 20 nt, Human
uggcauguggauccuugaga

SEQ ID NO: 8952 - RNA, 24 nt, Human
uggccaaauccacuuguguauggg

SEQ ID NO: 8953 - RNA, 24 nt, Human
uggccaauuggaaccggguguugu

SEQ ID NO: 8954 - RNA, 24 nt, Human
uggccagagagaaggucuucuggg

SEQ ID NO: 8955 - RNA, 23 nt, Human
uggccagccacagcgcagugcug

SEQ ID NO: 8956 - RNA, 24 nt, Human
uggccaggaaugcagcggccgugc

SEQ ID NO: 8957 - RNA, 24 nt, Human
uggccaggccaccugcaccaggga

SEQ ID NO: 8958 - RNA, 24 nt, Human
uggccaggcuagacuggaaaaccg

SEQ ID NO: 8959 - RNA, 24 nt, Human
uggccaggcugcagcugaaugggc

SEQ ID NO: 8960 - RNA, 24 nt, Human
uggccaguguuggcuagggacacu

SEQ ID NO: 8961 - RNA, 24 nt, Human
uggcccggccugacccggucuggc

SEQ ID NO: 8962 - RNA, 24 nt, Human
uggccgcaguccuugcgaacuguu

SEQ ID NO: 8963 - RNA, 24 nt, Human
uggccggacauccgcgucugcaga

SEQ ID NO: 8964 - RNA, 22 nt, Human
uggccgugagccgcacccagga

SEQ ID NO: 8965 - RNA, 24 nt, Human
uggccuagucagugccucgaggag

SEQ ID NO: 8966 - RNA, 24 nt, Human
uggccugaugauccacagcggaga

SEQ ID NO: 8967 - RNA, 22 nt, Human
uggccugcuccggcugcuuguc

SEQ ID NO: 8968 - RNA, 24 nt, Human
uggccugggcaaucuuggcccugu

SEQ ID NO: 8969 - RNA, 24 nt, Human
uggccuugaaagcuccgcagaaau

SEQ ID NO: 8970 - RNA, 20 nt, Human
uggcgcagcuggcggacagc

SEQ ID NO: 8971 - RNA, 21 nt, Human
uggcggaggcagagagucuuc

SEQ ID NO: 8972 - RNA, 24 nt, Human
uggcgggacauguugcucaggagg

SEQ ID NO: 8973 - RNA, 24 nt, Human
uggcgguuccccccacuuuagccc

SEQ ID NO: 8974 - RNA, 20 nt, Human
uggcguauuagaauggugcc

SEQ ID NO: 8975 - RNA, 24 nt, Human
uggcuaaaauuuucuggacuucau

SEQ ID NO: 8976 - RNA, 24 nt, Human
uggcuaggcagccuaggauguggg

SEQ ID NO: 8977 - RNA, 22 nt, Human
uggcuagguacugguggcucac

SEQ ID NO: 8978 - RNA, 24 nt, Human
uggcucaugccuguaaucccagga

SEQ ID NO: 8979 - RNA, 20 nt, Human
uggcucggggcgagcggcgg

SEQ ID NO: 8980 - RNA, 24 nt, Human
uggcucugcccagguggggguggg

SEQ ID NO: 8981 - RNA, 22 nt, Human
uggcucugugguugcugguuau

SEQ ID NO: 8982 - RNA, 24 nt, Human
uggcugacuucgagugggugaugu

SEQ ID NO: 8983 - RNA, 24 nt, Human
uggcugagauucaggggaucuuug

SEQ ID NO: 8984 - RNA, 22 nt, Human
uggcuggacauaguaugucuua

SEQ ID NO: 8985 - RNA, 24 nt, Human
uggcuggaggacaugggagugacg

SEQ ID NO: 8986 - RNA, 24 nt, Human
uggcuggaggugcaguggcgugau

SEQ ID NO: 8987 - RNA, 24 nt, Human
uggcugggaccggccgcucuccuc

SEQ ID NO: 8988 - RNA, 24 nt, Human
uggcugggcagguggauuacaagg

SEQ ID NO: 8989 - RNA, 24 nt, Human
uggcuggguggaacugagucuuuu

SEQ ID NO: 8990 - RNA, 24 nt, Human
uggcuggguucaaaaagggagggg

SEQ ID NO: 8991 - RNA, 24 nt, Human
uggcuggguuuauagcuuggggcu

SEQ ID NO: 8992 - RNA, 24 nt, Human
uggcuuagcuugggcucaggggcc

SEQ ID NO: 8993 - RNA, 24 nt, Human
uggcuucggcagggucagccuugc

SEQ ID NO: 8994 - RNA, 21 nt, Human
uggcuucuggguuccacuccu

SEQ ID NO: 8995 - RNA, 22 nt, Human
uggcuucuggguuccacuccuu

SEQ ID NO: 8996 - RNA, 24 nt, Human
uggcuuggcuugggcucagaggcc

SEQ ID NO: 8997 - RNA, 24 nt, Human
uggcuuguuaugugagaaacacau

SEQ ID NO: 8998 - RNA, 24 nt, Human
uggcuuuucauugacaugguagag

SEQ ID NO: 8999 - RNA, 22 nt, Human
uggcuuuuuauucauaugugau

SEQ ID NO: 9000 - RNA, 19 nt, Human
ugggaaaaugcaggucugg

SEQ ID NO: 9001 - RNA, 24 nt, Human
ugggaacaggaagcucccuagggc

SEQ ID NO: 9002 - RNA, 24 nt, Human
ugggaacugaugaggagaguaaca

SEQ ID NO: 9003 - RNA, 24 nt, Human
ugggaagagcacccugcugaagag

SEQ ID NO: 9004 - RNA, 24 nt, Human
ugggaaggcgaugccugucgggag

SEQ ID NO: 9005 - RNA, 22 nt, Human
ugggaaggguggcucaaggaag

SEQ ID NO: 9006 - RNA, 24 nt, Human
ugggaagugcaagaccaagauaug

SEQ ID NO: 9007 - RNA, 24 nt, Human
ugggaagugguuaagugugcccac

SEQ ID NO: 9008 - RNA, 24 nt, Human
ugggaauggucaucuaugucucgu

SEQ ID NO: 9009 - RNA, 24 nt, Human
ugggacaauuucaguucuaauaau

SEQ ID NO: 9010 - RNA, 24 nt, Human
ugggacagaaaauaaaucuaaguu

SEQ ID NO: 9011 - RNA, 24 nt, Human
ugggacuccauccuucaucucucc

SEQ ID NO: 9012 - RNA, 24 nt, Human
ugggacucuggggccugcucccag

SEQ ID NO: 9013 - RNA, 24 nt, Human
ugggacuuugaccugcaauuaggu

SEQ ID NO: 9014 - RNA, 24 nt, Human
ugggagaaaggcgcugagcguggc

SEQ ID NO: 9015 - RNA, 22 nt, Human
ugggagaagcucaggagucuga

SEQ ID NO: 9016 - RNA, 24 nt, Human
ugggagcagcagccaaguccgcgg

SEQ ID NO: 9017 - RNA, 23 nt, Human
ugggagccaggaauggggcuggg

SEQ ID NO: 9018 - RNA, 24 nt, Human
ugggagcccugguuugggcauaau

SEQ ID NO: 9019 - RNA, 24 nt, Human
ugggagcgagaaaguaguugugaa

SEQ ID NO: 9020 - RNA, 23 nt, Human
ugggaggauggguuauuauaugg

SEQ ID NO: 9021 - RNA, 24 nt, Human
ugggaggcagggcuccgcugcgcc

SEQ ID NO: 9022 - RNA, 24 nt, Human
ugggaggccauggccuucgccagc

SEQ ID NO: 9023 - RNA, 24 nt, Human
ugggagggaggggcugucagaccu

SEQ ID NO: 9024 - RNA, 24 nt, Human
ugggagggccaggcgucggguuau

SEQ ID NO: 9025 - RNA, 24 nt, Human
ugggaggggagauccagaaugaaa

SEQ ID NO: 9026 - RNA, 24 nt, Human
ugggagggggcagcugggcugagc

SEQ ID NO: 9027 - RNA, 24 nt, Human
ugggaguaucggauguagcugagu

SEQ ID NO: 9028 - RNA, 21 nt, Human
ugggauaggaucagaaagcuc

SEQ ID NO: 9029 - RNA, 24 nt, Human
ugggauauccaauaaacugagaau

SEQ ID NO: 9030 - RNA, 24 nt, Human
ugggaucauucugacagccaguca

SEQ ID NO: 9031 - RNA, 24 nt, Human
ugggauccuggguccugaggccuu

SEQ ID NO: 9032 - RNA, 21 nt, Human
ugggaucgaucagcacugcca

SEQ ID NO: 9033 - RNA, 24 nt, Human
ugggaucucuccagauauggucgc

SEQ ID NO: 9034 - RNA, 22 nt, Human
ugggaucuuguuagaaugcaga

SEQ ID NO: 9035 - RNA, 24 nt, Human
ugggaugaccugugaacgagacag

SEQ ID NO: 9036 - RNA, 24 nt, Human
ugggauggaaaugaaauggccaaa

SEQ ID NO: 9037 - RNA, 24 nt, Human
ugggauggaggggaguguugggca

SEQ ID NO: 9038 - RNA, 22 nt, Human
ugggaugucauccuucaaugcu

SEQ ID NO: 9039 - RNA, 24 nt, Human
ugggauguccgcugcaaucugcuc

SEQ ID NO: 9040 - RNA, 24 nt, Human
ugggauguccugccugcggagggg

SEQ ID NO: 9041 - RNA, 22 nt, Human
ugggauguggccauucuugugg

SEQ ID NO: 9042 - RNA, 24 nt, Human
ugggauuacaggcaugagccacug

SEQ ID NO: 9043 - RNA, 22 nt, Human
ugggauuacagguguaagccac

SEQ ID NO: 9044 - RNA, 22 nt, Human
ugggauuggaagucuucagauu

SEQ ID NO: 9045 - RNA, 24 nt, Human
ugggcaaauuuagcuagugucgcc

SEQ ID NO: 9046 - RNA, 24 nt, Human
ugggcacggaagguggagagggau

SEQ ID NO: 9047 - RNA, 24 nt, Human
ugggcagacaaaaucagcaaugcc

SEQ ID NO: 9048 - RNA, 24 nt, Human
ugggcagacuuggugaccugucga

SEQ ID NO: 9049 - RNA, 24 nt, Human
ugggcagcuggcuugccugcgagu

SEQ ID NO: 9050 - RNA, 24 nt, Human
ugggcaggaaggaugugaggacuc

SEQ ID NO: 9051 - RNA, 24 nt, Human
ugggccagcugaguaccugggcgu

SEQ ID NO: 9052 - RNA, 24 nt, Human
ugggcggaggagagaggcggggac

SEQ ID NO: 9053 - RNA, 22 nt, Human
ugggcuauuuuacaacauugua

SEQ ID NO: 9054 - RNA, 22 nt, Human
ugggcuuaaacuacccaugaga

SEQ ID NO: 9055 - RNA, 24 nt, Human
uggggacaggugucuggguccccc

SEQ ID NO: 9056 - RNA, 22 nt, Human
uggggagagcuuuuccacugcc

SEQ ID NO: 9057 - RNA, 19 nt, Human
uggggagaugaacauugca

SEQ ID NO: 9058 - RNA, 24 nt, Human
uggggcacgucucgguugucgggu

SEQ ID NO: 9059 - RNA, 24 nt, Human
uggggccagaaagggguuacaaaa

SEQ ID NO: 9060 - RNA, 24 nt, Human
uggggcccaacgaggcgcuggugg

SEQ ID NO: 9061 - RNA, 22 nt, Human
uggggccuucuuugaguacuag

SEQ ID NO: 9062 - RNA, 24 nt, Human
ugggggccauguuugggggaaggg

SEQ ID NO: 9063 - RNA, 24 nt, Human
ugggggugcagggcuuggugacgc

SEQ ID NO: 9064 - RNA, 24 nt, Human
ugggguaaugaaguauuucaguuu

SEQ ID NO: 9065 - RNA, 24 nt, Human
uggggucagaaaagagaaaugacc

SEQ ID NO: 9066 - RNA, 24 nt, Human
uggggugggagcagaaggaaggcu

SEQ ID NO: 9067 - RNA, 24 nt, Human
ugggguuuccaccuccugccuccg

SEQ ID NO: 9068 - RNA, 22 nt, Human
ugggguuucuccauguugguca

SEQ ID NO: 9069 - RNA, 22 nt, Human
uggguaguuucuguugcugugu

SEQ ID NO: 9070 - RNA, 24 nt, Human
uggguccgcaucguauucccggaa

SEQ ID NO: 9071 - RNA, 24 nt, Human
uggguccugggcagauacagccuu

SEQ ID NO: 9072 - RNA, 24 nt, Human
ugggugaggaacaaaaaccggauu

SEQ ID NO: 9073 - RNA, 24 nt, Human
ugggugcccgcuggcuacgcuugc

SEQ ID NO: 9074 - RNA, 24 nt, Human
uggguggcugugguauaugggaaa

SEQ ID NO: 9075 - RNA, 23 nt, Human
ugggugggacggagccuggauuc

SEQ ID NO: 9076 - RNA, 24 nt, Human
uggguuaauuuguaauggucccag

SEQ ID NO: 9077 - RNA, 22 nt, Human
uggguuagugguugaauaguuu

SEQ ID NO: 9078 - RNA, 24 nt, Human
uggguugggaagaccaucaguucu

SEQ ID NO: 9079 - RNA, 22 nt, Human
uggguuucugaggguguuggua

SEQ ID NO: 9080 - RNA, 24 nt, Human
ugguaagcaaaauaaauuguauuu

SEQ ID NO: 9081 - RNA, 24 nt, Human
ugguacagaccaaguauguggaag

SEQ ID NO: 9082 - RNA, 24 nt, Human
ugguacgccugcagguaccggucc

SEQ ID NO: 9083 - RNA, 24 nt, Human
ugguacggcucaucccuugcaccc

SEQ ID NO: 9084 - RNA, 24 nt, Human
ugguagagugcugaucuuagcaug

SEQ ID NO: 9085 - RNA, 24 nt, Human
ugguaggcccuuggugguccucau

SEQ ID NO: 9086 - RNA, 24 nt, Human
ugguagguagggguagggccagag

SEQ ID NO: 9087 - RNA, 24 nt, Human
ugguaggugggccccucgcuuucu

SEQ ID NO: 9088 - RNA, 24 nt, Human
ugguaguucaugcaggccacggcc

SEQ ID NO: 9089 - RNA, 24 nt, Human
ugguauauuuucaccaugucucug

SEQ ID NO: 9090 - RNA, 22 nt, Human
ugguaugaauuuugcagccgga

SEQ ID NO: 9091 - RNA, 24 nt, Human
ugguaugcuaaggagucaguacuu

SEQ ID NO: 9092 - RNA, 24 nt, Human
ugguauguuguaucuuuguucucg

SEQ ID NO: 9093 - RNA, 24 nt, Human
ugguauuccaggugcaguguccau

SEQ ID NO: 9094 - RNA, 22 nt, Human
uggucauggaaauagaaugcac

SEQ ID NO: 9095 - RNA, 22 nt, Human
uggucucuuagugauggggaca

SEQ ID NO: 9096 - RNA, 22 nt, Human
uggucucuugaaagaggcucuu

SEQ ID NO: 9097 - RNA, 22 nt, Human
uggucuuucccuccacaccugc

SEQ ID NO: 9098 - RNA, 22 nt, Human
ugguggaugaaggguggauauu

SEQ ID NO: 9099 - RNA, 20 nt, Human
ugguggcagguagguggugc

SEQ ID NO: 9100 - RNA, 22 nt, Human
ugguggcaugcaccuguugucc

SEQ ID NO: 9101 - RNA, 22 nt, Human
uggugggaaucccugggaggau

SEQ ID NO: 9102 - RNA, 24 nt, Human
uggugguaaauauaaaugaguuuc

SEQ ID NO: 9103 - RNA, 24 nt, Human
ugguggucauccuggcagcuggug

SEQ ID NO: 9104 - RNA, 24 nt, Human
ugguggucuugagcuuuuggccug

SEQ ID NO: 9105 - RNA, 22 nt, Human
ugguggugcaugccuguauucc

SEQ ID NO: 9106 - RNA, 24 nt, Human
uggugucgaugggccggaaguagg

SEQ ID NO: 9107 - RNA, 24 nt, Human
ugguguggugauucgcuucugguu

SEQ ID NO: 9108 - RNA, 24 nt, Human
ugguguguggaacugcugcaagcu

SEQ ID NO: 9109 - RNA, 22 nt, Human
ugguucagcagggaagccaggu

SEQ ID NO: 9110 - RNA, 22 nt, Human
ugguugaaauucuuacauuuuc

SEQ ID NO: 9111 - RNA, 24 nt, Human
ugguugauauugcuaggguggcgc

SEQ ID NO: 9112 - RNA, 22 nt, Human
ugguuuaagaaauuccuacgug

SEQ ID NO: 9113 - RNA, 24 nt, Human
ugguuugugaauaugacaaugaaa

SEQ ID NO: 9114 - RNA, 22 nt, Human
uguaaacaucccacacacucag

SEQ ID NO: 9115 - RNA, 24 nt, Human
uguaaaguggcuggugcuucccgg

SEQ ID NO: 9116 - RNA, 24 nt, Human
uguaaaguucggaucucaguucca

SEQ ID NO: 9117 - RNA, 22 nt, Human
uguaacacugaacuccugggcu

SEQ ID NO: 9118 - RNA, 24 nt, Human
uguaagaucucuucgagagagcug

SEQ ID NO: 9119 - RNA, 24 nt, Human
uguaagauggauaauguguauaag

SEQ ID NO: 9120 - RNA, 24 nt, Human
uguaauacugaucuggagggaaaa

SEQ ID NO: 9121 - RNA, 24 nt, Human
uguaaucauaagcaucugcgaaug

SEQ ID NO: 9122 - RNA, 24 nt, Human
uguaaugaaaaggguugggaugaa

SEQ ID NO: 9123 - RNA, 24 nt, Human
uguaaugagaguaauguucugaga

SEQ ID NO: 9124 - RNA, 24 nt, Human
uguacacacacauauacauauaua

SEQ ID NO: 9125 - RNA, 24 nt, Human
uguacagucagugaaauugaagaa

SEQ ID NO: 9126 - RNA, 24 nt, Human
uguagaaucuuuauuaucucaaca

SEQ ID NO: 9127 - RNA, 24 nt, Human
uguagagacuuuaugauuagaaug

SEQ ID NO: 9128 - RNA, 24 nt, Human
uguaggacgguugcuccgagcguc

SEQ ID NO: 9129 - RNA, 24 nt, Human
uguagggauaaggcgugaccacag

SEQ ID NO: 9130 - RNA, 22 nt, Human
uguaggugguugagagaaugaa

SEQ ID NO: 9131 - RNA, 22 nt, Human
uguagugcaugggcagugugcg

SEQ ID NO: 9132 - RNA, 24 nt, Human
uguauagcaauaugcuuggagagg

SEQ ID NO: 9133 - RNA, 24 nt, Human
uguauaguaaagaagccaagccca

SEQ ID NO: 9134 - RNA, 24 nt, Human
uguaugaagguccacuuccuuccu

SEQ ID NO: 9135 - RNA, 24 nt, Human
uguauggaaugcuagauggccaag

SEQ ID NO: 9136 - RNA, 24 nt, Human
uguauggacuuucggcgugugcau

SEQ ID NO: 9137 - RNA, 22 nt, Human
uguauguagauagucagaucau

SEQ ID NO: 9138 - RNA, 24 nt, Human
uguauuauuauauaugugccgaga

SEQ ID NO: 9139 - RNA, 24 nt, Human
uguauugucuauggcugcuuuugu

SEQ ID NO: 9140 - RNA, 24 nt, Human
uguauuuauuauuggcgauuauaa

SEQ ID NO: 9141 - RNA, 24 nt, Human
ugucaaggaaugaagucucuagcc

SEQ ID NO: 9142 - RNA, 24 nt, Human
ugucaaguaaaacggaagagggau

SEQ ID NO: 9143 - RNA, 24 nt, Human
ugucaaguuacuaaucauuccucu

SEQ ID NO: 9144 - RNA, 24 nt, Human
ugucacacuggaggcuucauuuac

SEQ ID NO: 9145 - RNA, 23 nt, Human
ugucacagccacagauguugucc

SEQ ID NO: 9146 - RNA, 22 nt, Human
ugucacagucagugcacucagc

SEQ ID NO: 9147 - RNA, 24 nt, Human
ugucacaguucaugaggucagagg

SEQ ID NO: 9148 - RNA, 22 nt, Human
ugucacaucuugcuccagacgu

SEQ ID NO: 9149 - RNA, 22 nt, Human
ugucacccaggacuuuccggaa

SEQ ID NO: 9150 - RNA, 24 nt, Human
ugucacguaggucacacuagacuc

SEQ ID NO: 9151 - RNA, 24 nt, Human
ugucagaacaccggaggcauuuuc

SEQ ID NO: 9152 - RNA, 24 nt, Human
ugucagaauugagcuucacaauug

SEQ ID NO: 9153 - RNA, 24 nt, Human
ugucagagggaagucaaaguggag

SEQ ID NO: 9154 - RNA, 24 nt, Human
ugucagggagcugcugcaggucaa

SEQ ID NO: 9155 - RNA, 22 nt, Human
ugucaguuuuuuaaauacucag

SEQ ID NO: 9156 - RNA, 23 nt, Human
ugucauaaacugccccagcucuu

SEQ ID NO: 9157 - RNA, 24 nt, Human
ugucauacagcuucuucacagccu

SEQ ID NO: 9158 - RNA, 22 nt, Human
ugucauauagaauguucuauga

SEQ ID NO: 9159 - RNA, 24 nt, Human
ugucaugguguagaacuugaacac

SEQ ID NO: 9160 - RNA, 24 nt, Human
ugucaugugaugggugaugucaug

SEQ ID NO: 9161 - RNA, 22 nt, Human
ugucauguucuaccucuuauuc

SEQ ID NO: 9162 - RNA, 22 nt, Human
uguccaauacuuugugucuagg

SEQ ID NO: 9163 - RNA, 24 nt, Human
uguccagguguucagaccucuugg

SEQ ID NO: 9164 - RNA, 24 nt, Human
uguccaguagccgaacaguuuguu

SEQ ID NO: 9165 - RNA, 24 nt, Human
ugucccacauggaagacgcuauuc

SEQ ID NO: 9166 - RNA, 24 nt, Human
ugucccagaugaugagcuucccau

SEQ ID NO: 9167 - RNA, 24 nt, Human
ugucccggguggacucagugagga

SEQ ID NO: 9168 - RNA, 22 nt, Human
uguccggagauucggagcggcg

SEQ ID NO: 9169 - RNA, 24 nt, Human
uguccucgccaacccccgaccugc

SEQ ID NO: 9170 - RNA, 22 nt, Human
uguccugguucugcagucaaaa

SEQ ID NO: 9171 - RNA, 24 nt, Human
uguccugguuuauguuaccagcaa

SEQ ID NO: 9172 - RNA, 24 nt, Human
uguccuguuuuucuucaacuugcu

SEQ ID NO: 9173 - RNA, 23 nt, Human
ugucgcggucugugaguuugucu

SEQ ID NO: 9174 - RNA, 24 nt, Human
ugucguuuuuuccuugacacuugu

SEQ ID NO: 9175 - RNA, 24 nt, Human
ugucuaagucagagucuccuaaag

SEQ ID NO: 9176 - RNA, 24 nt, Human
ugucucaggcaccugaaucagacc

SEQ ID NO: 9177 - RNA, 22 nt, Human
ugucuccccuaccacagcccag

SEQ ID NO: 9178 - RNA, 24 nt, Human
ugucuggagccaaccuuggcaguu

SEQ ID NO: 9179 - RNA, 24 nt, Human
ugucugggaaagauaucggugaga

SEQ ID NO: 9180 - RNA, 22 nt, Human
ugucuucauccaggaaccacau

SEQ ID NO: 9181 - RNA, 22 nt, Human
ugucuugcacugcaaacauagc

SEQ ID NO: 9182 - RNA, 24 nt, Human
ugucuugggggaagugcaacugug

SEQ ID NO: 9183 - RNA, 24 nt, Human
ugugaaagaaagggcccagggugu

SEQ ID NO: 9184 - RNA, 24 nt, Human
ugugaaagaggaugcuuugguagc

SEQ ID NO: 9185 - RNA, 22 nt, Human
ugugaacagucucugaugaaag

SEQ ID NO: 9186 - RNA, 24 nt, Human
ugugaacggcgguuaguuacuaua

SEQ ID NO: 9187 - RNA, 23 nt, Human
ugugaagaauuccagcugaacaa

SEQ ID NO: 9188 - RNA, 24 nt, Human
ugugaaguauagggaagaacaaca

SEQ ID NO: 9189 - RNA, 24 nt, Human
ugugaauucuguugcuucuggggc

SEQ ID NO: 9190 - RNA, 22 nt, Human
ugugacacguucauucugcaag

SEQ ID NO: 9191 - RNA, 24 nt, Human
ugugaccaaagccuaagaagccag

SEQ ID NO: 9192 - RNA, 22 nt, Human
ugugaccuccagcaaacacaug

SEQ ID NO: 9193 - RNA, 24 nt, Human
ugugacuaugaauuacagaucuca

SEQ ID NO: 9194 - RNA, 24 nt, Human
ugugagaaguagauaggguuacug

SEQ ID NO: 9195 - RNA, 22 nt, Human
ugugagacgaaagacaguucac

SEQ ID NO: 9196 - RNA, 22 nt, Human
ugugagagaaauggcaaguugg

SEQ ID NO: 9197 - RNA, 22 nt, Human
ugugaggggguguggcacggga

SEQ ID NO: 9198 - RNA, 24 nt, Human
ugugaggggucccaccagcccagg

SEQ ID NO: 9199 - RNA, 24 nt, Human
ugugaggucucuaacuagcuguau

SEQ ID NO: 9200 - RNA, 22 nt, Human
ugugaguaggagaaauauugcu

SEQ ID NO: 9201 - RNA, 24 nt, Human
ugugauaagaaauguguacuugga

SEQ ID NO: 9202 - RNA, 24 nt, Human
ugugauaagauugacaaguuggug

SEQ ID NO: 9203 - RNA, 24 nt, Human
ugugauacuuagaauacuuuggcu

SEQ ID NO: 9204 - RNA, 24 nt, Human
ugugaucugauuggaggagggaca

SEQ ID NO: 9205 - RNA, 19 nt, Human
ugugaugaaaggaacaguc

SEQ ID NO: 9206 - RNA, 24 nt, Human
ugugaugauucuuuugcuuucuac

SEQ ID NO: 9207 - RNA, 24 nt, Human
ugugaugauuugaauuacaaaucc

SEQ ID NO: 9208 - RNA, 22 nt, Human
ugugcacaacaugcagguuugu

SEQ ID NO: 9209 - RNA, 24 nt, Human
ugugcagaagaaaugggaaggauu

SEQ ID NO: 9210 - RNA, 24 nt, Human
ugugcagaccucgugcagccgggg

SEQ ID NO: 9211 - RNA, 21 nt, Human
ugugcagaggguuagaggcca

SEQ ID NO: 9212 - RNA, 24 nt, Human
ugugcagccauggagaagaugucc

SEQ ID NO: 9213 - RNA, 22 nt, Human
ugugcaugcagaggagcugcuc

SEQ ID NO: 9214 - RNA, 24 nt, Human
ugugccaauacagcauucacaccu

SEQ ID NO: 9215 - RNA, 24 nt, Human
ugugccguggcacgauggcgagga

SEQ ID NO: 9216 - RNA, 22 nt, Human
ugugcucaccucccuaaacaga

SEQ ID NO: 9217 - RNA, 24 nt, Human
ugugcugaaacccauuggagucaa

SEQ ID NO: 9218 - RNA, 24 nt, Human
ugugcugccuuaacaucgagaguu

SEQ ID NO: 9219 - RNA, 22 nt, Human
ugugcugguugcccccgagggg

SEQ ID NO: 9220 - RNA, 24 nt, Human
ugugcugugcguagugccuacugc

SEQ ID NO: 9221 - RNA, 24 nt, Human
uguggagacaggaagucgucccag

SEQ ID NO: 9222 - RNA, 24 nt, Human
uguggagacgcugaccaugcugug

SEQ ID NO: 9223 - RNA, 18 nt, Human
uguggaggaucaaggcug

SEQ ID NO: 9224 - RNA, 24 nt, Human
uguggagucaggaacugaaagcug

SEQ ID NO: 9225 - RNA, 24 nt, Human
uguggagugggccagcugaguacc

SEQ ID NO: 9226 - RNA, 24 nt, Human
uguggagugggugggcaacgggcc

SEQ ID NO: 9227 - RNA, 24 nt, Human
uguggaugagagguuuccaggcug

SEQ ID NO: 9228 - RNA, 24 nt, Human
uguggcagugagagaauccuggca

SEQ ID NO: 9229 - RNA, 24 nt, Human
uguggcaguuacugauguggacca

SEQ ID NO: 9230 - RNA, 22 nt, Human
uguggcccaacuggaucaggca

SEQ ID NO: 9231 - RNA, 24 nt, Human
uguggcgguuacacggccgggcgc

SEQ ID NO: 9232 - RNA, 24 nt, Human
uguggcuccuccuggccaggucau

SEQ ID NO: 9233 - RNA, 22 nt, Human
uguggcuuaggugagcauguga

SEQ ID NO: 9234 - RNA, 24 nt, Human
uguggcuuuuggggagccagugug

SEQ ID NO: 9235 - RNA, 24 nt, Human
uguggggcuggaaggggaggguug

SEQ ID NO: 9236 - RNA, 22 nt, Human
uguggugcagcgggaacagcuu

SEQ ID NO: 9237 - RNA, 24 nt, Human
uguggugcuugauagggcaagaac

SEQ ID NO: 9238 - RNA, 24 nt, Human
ugugguggcaugagauucagcggu

SEQ ID NO: 9239 - RNA, 24 nt, Human
ugugguggcuggagguggccgaau

SEQ ID NO: 9240 - RNA, 24 nt, Human
ugugguuuguugguuucugcuucc

SEQ ID NO: 9241 - RNA, 24 nt, Human
ugugguuuuaaaagagucccucaa

SEQ ID NO: 9242 - RNA, 24 nt, Human
ugugguuuuagcaccuuggggaga

SEQ ID NO: 9243 - RNA, 24 nt, Human
uguguacagugccagcacccacaa

SEQ ID NO: 9244 - RNA, 24 nt, Human
uguguacguauguauauacacaua

SEQ ID NO: 9245 - RNA, 24 nt, Human
uguguaggcgugggaauggacagg

SEQ ID NO: 9246 - RNA, 24 nt, Human
uguguauacauauauguguguaua

SEQ ID NO: 9247 - RNA, 24 nt, Human
ugugucaacuguguccagggugug

SEQ ID NO: 9248 - RNA, 24 nt, Human
ugugucaggcaugacaugaauggu

SEQ ID NO: 9249 - RNA, 24 nt, Human
uguguccugaucuguacagugagu

SEQ ID NO: 9250 - RNA, 24 nt, Human
ugugucugguggucuggcugcggg

SEQ ID NO: 9251 - RNA, 22 nt, Human
ugugugaaaaggcuggccuacu

SEQ ID NO: 9252 - RNA, 24 nt, Human
ugugugaugagaacauguuugggc

SEQ ID NO: 9253 - RNA, 24 nt, Human
uguguggacccauguugaccuuga

SEQ ID NO: 9254 - RNA, 22 nt, Human
ugugugugacugcagacugcua

SEQ ID NO: 9255 - RNA, 22 nt, Human
uguguuagaagauggaccagag

SEQ ID NO: 9256 - RNA, 24 nt, Human
uguguuaggaaugucaacagagca

SEQ ID NO: 9257 - RNA, 24 nt, Human
uguguucuggugaggccauggggu

SEQ ID NO: 9258 - RNA, 24 nt, Human
uguguugcacauugguguacaucu

SEQ ID NO: 9259 - RNA, 22 nt, Human
uguguuggagcagaggcagggg

SEQ ID NO: 9260 - RNA, 24 nt, Human
uguuaaaaucugcuagaaaaguaa

SEQ ID NO: 9261 - RNA, 22 nt, Human
uguuaacauuuuggcuagauag

SEQ ID NO: 9262 - RNA, 21 nt, Human
uguuacagaggagcagaauca

SEQ ID NO: 9263 - RNA, 24 nt, Human
uguuacaugcaagacuguugccaa

SEQ ID NO: 9264 - RNA, 24 nt, Human
uguuacuggagaauucacuggcau

SEQ ID NO: 9265 - RNA, 24 nt, Human
uguuacuucuuugauaguucuuac

SEQ ID NO: 9266 - RNA, 24 nt, Human
uguuauggaggaauagauuugcuu

SEQ ID NO: 9267 - RNA, 24 nt, Human
uguuauggggauaagcuggugagg

SEQ ID NO: 9268 - RNA, 22 nt, Human
uguuauuuuguccaagagagag

SEQ ID NO: 9269 - RNA, 24 nt, Human
uguuccagaugacuucaaagguau

SEQ ID NO: 9270 - RNA, 24 nt, Human
uguucgaugccugucaaguucaug

SEQ ID NO: 9271 - RNA, 22 nt, Human
uguucuguuaccucugggcucu

SEQ ID NO: 9272 - RNA, 24 nt, Human
uguugagguauugccuaaggcugg

SEQ ID NO: 9273 - RNA, 24 nt, Human
uguugaguuugauuauagaagaga

SEQ ID NO: 9274 - RNA, 24 nt, Human
uguugaguuuugguuacuuguaca

SEQ ID NO: 9275 - RNA, 21 nt, Human
uguugcaggguauugcauggu

SEQ ID NO: 9276 - RNA, 24 nt, Human
uguugcuaggaaaugggaaaaggg

SEQ ID NO: 9277 - RNA, 24 nt, Human
uguugggaaaaugcugcuuaugag

SEQ ID NO: 9278 - RNA, 22 nt, Human
uguuggucaggcugguuuugaa

SEQ ID NO: 9279 - RNA, 22 nt, Human
uguuggugggaaccacaagggu

SEQ ID NO: 9280 - RNA, 24 nt, Human
uguugucuuucacccaaaauuugu

SEQ ID NO: 9281 - RNA, 24 nt, Human
uguuguuaccaaguucaguuugug

SEQ ID NO: 9282 - RNA, 24 nt, Human
uguuguuggcguuagcggcagcgg

SEQ ID NO: 9283 - RNA, 22 nt, Human
uguuuaaguagcuuauuuaucu

SEQ ID NO: 9284 - RNA, 24 nt, Human
uguuuaaugaaugcauaugaggug

SEQ ID NO: 9285 - RNA, 24 nt, Human
uguuuagacuacauguauuacaaa

SEQ ID NO: 9286 - RNA, 24 nt, Human
uguuuaguacuguauuguggaaua

SEQ ID NO: 9287 - RNA, 24 nt, Human
uguuuauuauuuauacguuauauu

SEQ ID NO: 9288 - RNA, 24 nt, Human
uguuucuuauagcaaacuguuguu

SEQ ID NO: 9289 - RNA, 24 nt, Human
uguuugauuucuuucugcuuugca

SEQ ID NO: 9290 - RNA, 22 nt, Human
uguuugcccguuuuucugugua

SEQ ID NO: 9291 - RNA, 22 nt, Human
uguuugugaggugcuuggagau

SEQ ID NO: 9292 - RNA, 24 nt, Human
uguuuuggucucuugggcaacauu

SEQ ID NO: 9293 - RNA, 24 nt, Human
uuaaaacaguagagcuagcaauga

SEQ ID NO: 9294 - RNA, 24 nt, Human
uuaaaacugcaagaaaaugcuaca

SEQ ID NO: 9295 - RNA, 23 nt, Human
uuaaaauugugguaaugaugccu

SEQ ID NO: 9296 - RNA, 22 nt, Human
uuaaagaucacuugacauggac

SEQ ID NO: 9297 - RNA, 24 nt, Human
uuaaagcacaguucuuggauccac

SEQ ID NO: 9298 - RNA, 24 nt, Human
uuaaagggccgucauuuccauuag

SEQ ID NO: 9299 - RNA, 24 nt, Human
uuaaagucaggcucauuuggggua

SEQ ID NO: 9300 - RNA, 24 nt, Human
uuaaaguuauaugaagucccugag

SEQ ID NO: 9301 - RNA, 24 nt, Human
uuaaaugugcauuaccugguuaca

SEQ ID NO: 9302 - RNA, 24 nt, Human
uuaaauuauggcaauauugcacuu

SEQ ID NO: 9303 - RNA, 24 nt, Human
uuaaauuguguuucuguuuugacc

SEQ ID NO: 9304 - RNA, 24 nt, Human
uuaacaaacuuacuggcagauugg

SEQ ID NO: 9305 - RNA, 24 nt, Human
uuaacaagaaagcaguuuggggcu

SEQ ID NO: 9306 - RNA, 24 nt, Human
uuaacauuucuccccucacucccu

SEQ ID NO: 9307 - RNA, 24 nt, Human
uuaacauuugcaguccuuguguca

SEQ ID NO: 9308 - RNA, 24 nt, Human
uuaaggcccacuuaggguccuggu

SEQ ID NO: 9309 - RNA, 22 nt, Human
uuaaggcguggaauuuguguaa

SEQ ID NO: 9310 - RNA, 24 nt, Human
uuaagggcuccuugauggaugcca

SEQ ID NO: 9311 - RNA, 22 nt, Human
uuaagucuuuucuuaagcaaag

SEQ ID NO: 9312 - RNA, 24 nt, Human
uuaauccaugaacaucauuauauc

SEQ ID NO: 9313 - RNA, 24 nt, Human
uuaaugaccagcagucacugagcg

SEQ ID NO: 9314 - RNA, 24 nt, Human
uuaauggaagaagaugaagaugcu

SEQ ID NO: 9315 - RNA, 24 nt, Human
uuaauguuauuaugagguuaaugu

SEQ ID NO: 9316 - RNA, 24 nt, Human
uuaauuggugacauccucaagagc

SEQ ID NO: 9317 - RNA, 24 nt, Human
uuacaaacaagaaaggaggugcuu

SEQ ID NO: 9318 - RNA, 24 nt, Human
uuacaaggcaauuuugugggcgag

SEQ ID NO: 9319 - RNA, 24 nt, Human
uuacagaagugaaacaaacuucua

SEQ ID NO: 9320 - RNA, 24 nt, Human
uuacagcgauuggucaaucucuau

SEQ ID NO: 9321 - RNA, 22 nt, Human
uuaccagcaacuguugcacggg

SEQ ID NO: 9322 - RNA, 21 nt, Human
uuaccagggguucgggacagc

SEQ ID NO: 9323 - RNA, 24 nt, Human
uuaccaugaagguuguuuugcuua

SEQ ID NO: 9324 - RNA, 22 nt, Human
uuaccauguuggccaggcuggu

SEQ ID NO: 9325 - RNA, 22 nt, Human
uuacccaggcuggagugcagug

SEQ ID NO: 9326 - RNA, 24 nt, Human
uuaccgguauuguaagaacaagcc

SEQ ID NO: 9327 - RNA, 24 nt, Human
uuacuacauuaagguacgagcagg

SEQ ID NO: 9328 - RNA, 23 nt, Human
uuacucuugagggaacaggucug

SEQ ID NO: 9329 - RNA, 24 nt, Human
uuacugcaagcuccgccuccuggg

SEQ ID NO: 9330 - RNA, 24 nt, Human
uuacugcagcuccagcagcugcuc

SEQ ID NO: 9331 - RNA, 24 nt, Human
uuacugcuagaacggagugaacgg

SEQ ID NO: 9332 - RNA, 24 nt, Human
uuacuggucccuuuacucuuccac

SEQ ID NO: 9333 - RNA, 24 nt, Human
uuagaaaaaguguuuuuccucauc

SEQ ID NO: 9334 - RNA, 24 nt, Human
uuagaacaccagauacaaagcuaa

SEQ ID NO: 9335 - RNA, 22 nt, Human
uuagaacauaacuugcugaagu

SEQ ID NO: 9336 - RNA, 24 nt, Human
uuagaauuaucuuucaaacacuua

SEQ ID NO: 9337 - RNA, 24 nt, Human
uuagaauuggaauuacuuccuuac

SEQ ID NO: 9338 - RNA, 22 nt, Human
uuagacacagcacaguccuuuu

SEQ ID NO: 9339 - RNA, 24 nt, Human
uuagaccagccacagugccugauu

SEQ ID NO: 9340 - RNA, 24 nt, Human
uuagaccucaagguugacuuguga

SEQ ID NO: 9341 - RNA, 24 nt, Human
uuagagacaagaguaccaaagcgg

SEQ ID NO: 9342 - RNA, 24 nt, Human
uuagagcuauuauaaauagugcug

SEQ ID NO: 9343 - RNA, 24 nt, Human
uuagaguguauuucugaaacuagc

SEQ ID NO: 9344 - RNA, 22 nt, Human
uuagaugcuuuguguuguauac

SEQ ID NO: 9345 - RNA, 24 nt, Human
uuagcaaaaaucugucuuaacuuu

SEQ ID NO: 9346 - RNA, 24 nt, Human
uuagcucgguaacuggugaccccu

SEQ ID NO: 9347 - RNA, 22 nt, Human
uuagcugaaaguuugagagcug

SEQ ID NO: 9348 - RNA, 24 nt, Human
uuagcuuucucgggaggaccgagc

SEQ ID NO: 9349 - RNA, 24 nt, Human
uuagggaaaaugcacugaguuuga

SEQ ID NO: 9350 - RNA, 24 nt, Human
uuaggucaaagaggcugcuuggag

SEQ ID NO: 9351 - RNA, 24 nt, Human
uuaguauacagacgacagugaacu

SEQ ID NO: 9352 - RNA, 24 nt, Human
uuagucacaaacaguuccccaguu

SEQ ID NO: 9353 - RNA, 24 nt, Human
uuagucccaguuccauuuucauga

SEQ ID NO: 9354 - RNA, 24 nt, Human
uuagugaagaagaggaggaugaug

SEQ ID NO: 9355 - RNA, 24 nt, Human
uuagugaggucuauguccagagaa

SEQ ID NO: 9356 - RNA, 24 nt, Human
uuagugaggugaacgacuucagau

SEQ ID NO: 9357 - RNA, 24 nt, Human
uuagugauuauuaagcacuucugu

SEQ ID NO: 9358 - RNA, 22 nt, Human
uuagugcaucccagccaagugu

SEQ ID NO: 9359 - RNA, 24 nt, Human
uuagugcaugguauuauaaaacaa

SEQ ID NO: 9360 - RNA, 22 nt, Human
uuaguguucaggcucaaaugaa

SEQ ID NO: 9361 - RNA, 24 nt, Human
uuaguuuugcaaacggcaugauuc

SEQ ID NO: 9362 - RNA, 24 nt, Human
uuauaaguggcucuuuguuuugaa

SEQ ID NO: 9363 - RNA, 22 nt, Human
uuauaggggguaacauauuaua

SEQ ID NO: 9364 - RNA, 24 nt, Human
uuauauucuuugaauccuagccca

SEQ ID NO: 9365 - RNA, 24 nt, Human
uuauauuguguuuuuugcguuggu

SEQ ID NO: 9366 - RNA, 24 nt, Human
uuaucaaguaagauucuauuuuca

SEQ ID NO: 9367 - RNA, 24 nt, Human
uuaucacguaagauucuauuuuca

SEQ ID NO: 9368 - RNA, 22 nt, Human
uuaugggcgaugcaaaccugau

SEQ ID NO: 9369 - RNA, 24 nt, Human
uuauuagaucucaaacucagcugc

SEQ ID NO: 9370 - RNA, 22 nt, Human
uuauucaaaccuccuuagagcu

SEQ ID NO: 9371 - RNA, 24 nt, Human
uuauucccacugccagauagaaaa

SEQ ID NO: 9372 - RNA, 22 nt, Human
uuauuggucaggguagauagag

SEQ ID NO: 9373 - RNA, 24 nt, Human
uucaaacauauucugaacauugau

SEQ ID NO: 9374 - RNA, 24 nt, Human
uucaaaccuuugcccccaguuggg

SEQ ID NO: 9375 - RNA, 24 nt, Human
uucaaagccuccacgacucuguuu

SEQ ID NO: 9376 - RNA, 24 nt, Human
uucaaaguuauuuuuuagucgcug

SEQ ID NO: 9377 - RNA, 22 nt, Human
uucaaauaacucaagauaagug

SEQ ID NO: 9378 - RNA, 24 nt, Human
uucaaaugaaucuucaaauuggaa

SEQ ID NO: 9379 - RNA, 24 nt, Human
uucaacacgauaauaccuguugcc

SEQ ID NO: 9380 - RNA, 21 nt, Human
uucaacagguauuuauugagc

SEQ ID NO: 9381 - RNA, 24 nt, Human
uucaacuccucguccuucaacucc

SEQ ID NO: 9382 - RNA, 24 nt, Human
uucaacuuugauguucaugacgau

SEQ ID NO: 9383 - RNA, 22 nt, Human
uucaagaaagccaagauggcug

SEQ ID NO: 9384 - RNA, 24 nt, Human
uucaagagccugggcuguguccau

SEQ ID NO: 9385 - RNA, 24 nt, Human
uucaagcaugcaaaacaguuuauu

SEQ ID NO: 9386 - RNA, 22 nt, Human
uucaaggauauguauggagcag

SEQ ID NO: 9387 - RNA, 21 nt, Human
uucaagggauggaaagucacc

SEQ ID NO: 9388 - RNA, 22 nt, Human
uucaagggauggaagucaccgu

SEQ ID NO: 9389 - RNA, 24 nt, Human
uucaagguacaaaaaccacgacuc

SEQ ID NO: 9390 - RNA, 19 nt, Human
uucaaugguacugcaguua

SEQ ID NO: 9391 - RNA, 24 nt, Human
uucacaccugaaauguuacugauu

SEQ ID NO: 9392 - RNA, 24 nt, Human
uucacaccuuugugcaguccggau

SEQ ID NO: 9393 - RNA, 24 nt, Human
uucacaggcauuuacucauggcug

SEQ ID NO: 9394 - RNA, 21 nt, Human
uucacagucugggacguggga

SEQ ID NO: 9395 - RNA, 22 nt, Human
uucacaguggcuaaguucugca

SEQ ID NO: 9396 - RNA, 23 nt, Human
uucacauuugaguguccuggaca

SEQ ID NO: 9397 - RNA, 22 nt, Human
uucacccaugaaaggguuugcu

SEQ ID NO: 9398 - RNA, 22 nt, Human
uucacccccgacuuccaggagu

SEQ ID NO: 9399 - RNA, 22 nt, Human
uucaccuucucucgaauaguag

SEQ ID NO: 9400 - RNA, 24 nt, Human
uucacgcaaucaaaaugacuaagc

SEQ ID NO: 9401 - RNA, 22 nt, Human
uucacggauggcaagucaccgu

SEQ ID NO: 9402 - RNA, 24 nt, Human
uucacgugcuccguuggaucaggu

SEQ ID NO: 9403 - RNA, 24 nt, Human
uucacuaucauuguaucugacaca

SEQ ID NO: 9404 - RNA, 24 nt, Human
uucacugucccuguuuagccaagg

SEQ ID NO: 9405 - RNA, 21 nt, Human
uucacugugaguuacugaugc

SEQ ID NO: 9406 - RNA, 24 nt, Human
uucagaagagguuggcuuuccaga

SEQ ID NO: 9407 - RNA, 24 nt, Human
uucagaaggaucuugucgcugcau

SEQ ID NO: 9408 - RNA, 24 nt, Human
uucagaaggcugauuauuaagcua

SEQ ID NO: 9409 - RNA, 24 nt, Human
uucagaaugcguuugcugucaucc

SEQ ID NO: 9410 - RNA, 24 nt, Human
uucagacuuagaauaauguugauu

SEQ ID NO: 9411 - RNA, 24 nt, Human
uucagaguagauguaagcacuaca

SEQ ID NO: 9412 - RNA, 24 nt, Human
uucagagucuuauugggguggggc

SEQ ID NO: 9413 - RNA, 24 nt, Human
uucagaucacucagcucuucgggg

SEQ ID NO: 9414 - RNA, 22 nt, Human
uucagcaaguuuuccugacauu

SEQ ID NO: 9415 - RNA, 22 nt, Human
uucagcgggagcugguccaucu

SEQ ID NO: 9416 - RNA, 24 nt, Human
uucagcugcaucugcgccaccugc

SEQ ID NO: 9417 - RNA, 24 nt, Human
uucaggcaaaggcaaguuuugcuu

SEQ ID NO: 9418 - RNA, 22 nt, Human
uucaggcaccaggcacuuugcc

SEQ ID NO: 9419 - RNA, 22 nt, Human
uucagucuuuuucucucuaugc

SEQ ID NO: 9420 - RNA, 22 nt, Human
uucaguugagcucaguaacauc

SEQ ID NO: 9421 - RNA, 24 nt, Human
uucauaaucuggucaugugggaau

SEQ ID NO: 9422 - RNA, 23 nt, Human
uucaucaguuuccucauccaucc

SEQ ID NO: 9423 - RNA, 24 nt, Human
uucaucaugcaaacaucauagagu

SEQ ID NO: 9424 - RNA, 24 nt, Human
uucaucuaggggcagcgcacgguc

SEQ ID NO: 9425 - RNA, 24 nt, Human
uucaugacaccacucuuuuuucuc

SEQ ID NO: 9426 - RNA, 24 nt, Human
uucauggucagcugcgugguguag

SEQ ID NO: 9427 - RNA, 24 nt, Human
uucauugucacuaacaucuggugu

SEQ ID NO: 9428 - RNA, 24 nt, Human
uuccaaaguuuauacgggaagaca

SEQ ID NO: 9429 - RNA, 23 nt, Human
uuccaaauucugggcugguuuuc

SEQ ID NO: 9430 - RNA, 22 nt, Human
uuccaagccuuccccgggauca

SEQ ID NO: 9431 - RNA, 24 nt, Human
uuccaccucucauccagcuucacg

SEQ ID NO: 9432 - RNA, 24 nt, Human
uuccagaaaccacugggugguccu

SEQ ID NO: 9433 - RNA, 22 nt, Human
uuccagacuaauccugaguccu

SEQ ID NO: 9434 - RNA, 23 nt, Human
uuccagaggaggagcagggaucu

SEQ ID NO: 9435 - RNA, 24 nt, Human
uuccagcgucucgggcuccuugca

SEQ ID NO: 9436 - RNA, 24 nt, Human
uuccagggcugaguguggguggau

SEQ ID NO: 9437 - RNA, 24 nt, Human
uuccagucucuucccccuuucuau

SEQ ID NO: 9438 - RNA, 24 nt, Human
uuccaguucaaagucgugucuuuc

SEQ ID NO: 9439 - RNA, 23 nt, Human
uuccaguugucacgggcgacagc

SEQ ID NO: 9440 - RNA, 24 nt, Human
uuccaugcagccuugcggaacucu

SEQ ID NO: 9441 - RNA, 24 nt, Human
uuccauugacauucuuagcacagc

SEQ ID NO: 9442 - RNA, 24 nt, Human
uuccauuggaagaaggugccgucu

SEQ ID NO: 9443 - RNA, 24 nt, Human
uucccagccagcccgggcccuggg

SEQ ID NO: 9444 - RNA, 24 nt, Human
uucccauccagaaaucucaggcga

SEQ ID NO: 9445 - RNA, 24 nt, Human
uucccaugcaccucuggguaggua

SEQ ID NO: 9446 - RNA, 24 nt, Human
uucccaugccaccaggcuccugca

SEQ ID NO: 9447 - RNA, 24 nt, Human
uucccaugccucccucucauugga

SEQ ID NO: 9448 - RNA, 22 nt, Human
uucccauguucuggcauuaaag

SEQ ID NO: 9449 - RNA, 22 nt, Human
uucccgauacaccuuacuuacu

SEQ ID NO: 9450 - RNA, 24 nt, Human
uucccguggagcagaauuauaaaa

SEQ ID NO: 9451 - RNA, 24 nt, Human
uucccgugugagaagggccagagg

SEQ ID NO: 9452 - RNA, 24 nt, Human
uucccuggauucgagcagccgcgu

SEQ ID NO: 9453 - RNA, 24 nt, Human
uucccuuuugggggccccuuuauu

SEQ ID NO: 9454 - RNA, 22 nt, Human
uuccggaucaccaugugggguu

SEQ ID NO: 9455 - RNA, 22 nt, Human
uuccucaggggugagguuuggg

SEQ ID NO: 9456 - RNA, 24 nt, Human
uuccucaucugggacacugcuggu

SEQ ID NO: 9457 - RNA, 24 nt, Human
uuccucuuauuugcaugaaaggac

SEQ ID NO: 9458 - RNA, 23 nt, Human
uuccugaccccugagaaagcagg

SEQ ID NO: 9459 - RNA, 20 nt, Human
uuccuggaaggguagauucu

SEQ ID NO: 9460 - RNA, 24 nt, Human
uuccuggccaguguggagucucua

SEQ ID NO: 9461 - RNA, 24 nt, Human
uuccugggcagccuuuccagccuc

SEQ ID NO: 9462 - RNA, 24 nt, Human
uuccuggggacucccuuuuaguac

SEQ ID NO: 9463 - RNA, 24 nt, Human
uuccuggucggguccagugugaaa

SEQ ID NO: 9464 - RNA, 22 nt, Human
uuccugguggaggcauucggag

SEQ ID NO: 9465 - RNA, 24 nt, Human
uuccuguauagacacuaaauuguu

SEQ ID NO: 9466 - RNA, 22 nt, Human
uuccugucucugucucucgggu

SEQ ID NO: 9467 - RNA, 22 nt, Human
uuccuguuauuuaauagucugc

SEQ ID NO: 9468 - RNA, 24 nt, Human
uuccuguucacucuugacucugug

SEQ ID NO: 9469 - RNA, 24 nt, Human
uuccuuacuccacugcaccuaauc

SEQ ID NO: 9470 - RNA, 24 nt, Human
uuccuucaguuaucggucaacaaa

SEQ ID NO: 9471 - RNA, 22 nt, Human
uuccuucaguucagggaacccu

SEQ ID NO: 9472 - RNA, 24 nt, Human
uuccuucguuaagucacaggaaac

SEQ ID NO: 9473 - RNA, 21 nt, Human
uuccuugggggaggagauggu

SEQ ID NO: 9474 - RNA, 24 nt, Human
uuccuuuggacaugggcaaggguc

SEQ ID NO: 9475 - RNA, 24 nt, Human
uuccuuuuuucucacauuugagag

SEQ ID NO: 9476 - RNA, 24 nt, Human
uucgaaguuaggacagcauggggg

SEQ ID NO: 9477 - RNA, 22 nt, Human
uucgaauagcagcucuuaaaga

SEQ ID NO: 9478 - RNA, 24 nt, Human
uucgagcacuggccuacuggcacu

SEQ ID NO: 9479 - RNA, 24 nt, Human
uucgcaacuaaaaaugguaucaaa

SEQ ID NO: 9480 - RNA, 24 nt, Human
uucgcgcguuacggcgccgccucc

SEQ ID NO: 9481 - RNA, 22 nt, Human
uucgggauucucuccaacugca

SEQ ID NO: 9482 - RNA, 24 nt, Human
uucggucagaguggugcugggaac

SEQ ID NO: 9483 - RNA, 24 nt, Human
uucgugcagucugaaauuuucccc

SEQ ID NO: 9484 - RNA, 24 nt, Human
uucgugguguuggcgggccugagg

SEQ ID NO: 9485 - RNA, 22 nt, Human
uucuacuagugguugauggccu

SEQ ID NO: 9486 - RNA, 22 nt, Human
uucucacugaauccuggaggcu

SEQ ID NO: 9487 - RNA, 24 nt, Human
uucucagugaugcgggccucgcgc

SEQ ID NO: 9488 - RNA, 22 nt, Human
uucuccaccaucauccaggggc

SEQ ID NO: 9489 - RNA, 22 nt, Human
uucucugcaucugccucaguac

SEQ ID NO: 9490 - RNA, 24 nt, Human
uucucuggguucugaaguucuggg

SEQ ID NO: 9491 - RNA, 24 nt, Human
uucugcugcacgugaagcggggcg

SEQ ID NO: 9492 - RNA, 20 nt, Human
uucuggguggcagugauggc

SEQ ID NO: 9493 - RNA, 22 nt, Human
uucuggugaggucucuauucau

SEQ ID NO: 9494 - RNA, 24 nt, Human
uucuguguccaauggccuuagcag

SEQ ID NO: 9495 - RNA, 24 nt, Human
uucuugaucacuguggcuggggac

SEQ ID NO: 9496 - RNA, 22 nt, Human
uucuuuacauauaggagauggg

SEQ ID NO: 9497 - RNA, 22 nt, Human
uucuuugcagaaauagaaaggc

SEQ ID NO: 9498 - RNA, 22 nt, Human
uucuuuggaaaacgcacgcacu

SEQ ID NO: 9499 - RNA, 22 nt, Human
uugaaaguucacucugucuuca

SEQ ID NO: 9500 - RNA, 24 nt, Human
uugaacagccgccuggaggagcag

SEQ ID NO: 9501 - RNA, 24 nt, Human
uugaacaguuugaauuggcugugg

SEQ ID NO: 9502 - RNA, 21 nt, Human
uugaacucaucaagauguucg

SEQ ID NO: 9503 - RNA, 24 nt, Human
uugaagaaaauaauauguuuuaag

SEQ ID NO: 9504 - RNA, 24 nt, Human
uugaagaagaaggcggcuccuccg

SEQ ID NO: 9505 - RNA, 24 nt, Human
uugaagaccuuaagaaguuucuaa

SEQ ID NO: 9506 - RNA, 24 nt, Human
uugaagauccugcgguaugggaug

SEQ ID NO: 9507 - RNA, 24 nt, Human
uugaagaugaugaugaugauuaug

SEQ ID NO: 9508 - RNA, 24 nt, Human
uugaagccaguaauuagagacauc

SEQ ID NO: 9509 - RNA, 24 nt, Human
uugaagccuaagcuuugaaugaag

SEQ ID NO: 9510 - RNA, 18 nt, Human
uugaaggagcgccaaaag

SEQ ID NO: 9511 - RNA, 22 nt, Human
uugaaguuacccaaccaaaugg

SEQ ID NO: 9512 - RNA, 24 nt, Human
uugaaguucacaagacgggaggcc

SEQ ID NO: 9513 - RNA, 24 nt, Human
uugaaucuuucuggaagaaauggu

SEQ ID NO: 9514 - RNA, 24 nt, Human
uugaaugauugccggaaagugcaa

SEQ ID NO: 9515 - RNA, 24 nt, Human
uugaaugcacaaaagcaacagguc

SEQ ID NO: 9516 - RNA, 24 nt, Human
uugaaugguagagaagaaacagca

SEQ ID NO: 9517 - RNA, 24 nt, Human
uugaaugguugcugcacuuugguc

SEQ ID NO: 9518 - RNA, 24 nt, Human
uugaauguaagugcaguagaaauu

SEQ ID NO: 9519 - RNA, 24 nt, Human
uugaauguuugauacaaaggaugg

SEQ ID NO: 9520 - RNA, 22 nt, Human
uugaauuuuuuacucucucuac

SEQ ID NO: 9521 - RNA, 24 nt, Human
uugacacaguggaucucugugcca

SEQ ID NO: 9522 - RNA, 22 nt, Human
uugagcaaaauaucugguuuca

SEQ ID NO: 9523 - RNA, 22 nt, Human
uugagcaaguuaccagaucucu

SEQ ID NO: 9524 - RNA, 22 nt, Human
uugagcacaguuugaggagugu

SEQ ID NO: 9525 - RNA, 24 nt, Human
uugagcagacagccacauugggca

SEQ ID NO: 9526 - RNA, 24 nt, Human
uugagcccagaaaguugaggcuac

SEQ ID NO: 9527 - RNA, 24 nt, Human
uugaggcuacugugaggaacugcu

SEQ ID NO: 9528 - RNA, 24 nt, Human
uugaucucacuuauauucugagug

SEQ ID NO: 9529 - RNA, 22 nt, Human
uugaugaacggcaggugaggga

SEQ ID NO: 9530 - RNA, 21 nt, Human
uugaugcgcccacuugggcuc

SEQ ID NO: 9531 - RNA, 24 nt, Human
uugauggugguccgcacauaggag

SEQ ID NO: 9532 - RNA, 22 nt, Human
uugauuggguccucuugguugc

SEQ ID NO: 9533 - RNA, 24 nt, Human
uugauuucuuuucagcuuucuuug

SEQ ID NO: 9534 - RNA, 24 nt, Human
uugcaaaggccuuuucgccgcgaa

SEQ ID NO: 9535 - RNA, 22 nt, Human
uugcacuccagccuggguaaca

SEQ ID NO: 9536 - RNA, 24 nt, Human
uugcacugacuaguacugaauaau

SEQ ID NO: 9537 - RNA, 24 nt, Human
uugcagacuugccauggccuccga

SEQ ID NO: 9538 - RNA, 22 nt, Human
uugcagccucugccucccaggu

SEQ ID NO: 9539 - RNA, 24 nt, Human
uugcaggaggccggcaggugauga

SEQ ID NO: 9540 - RNA, 22 nt, Human
uugcaggucugagaaaccucua

SEQ ID NO: 9541 - RNA, 24 nt, Human
uugcaguugaagucgucguagcca

SEQ ID NO: 9542 - RNA, 24 nt, Human
uugcauacaugccuggcaucuguc

SEQ ID NO: 9543 - RNA, 22 nt, Human
uugcaucagagaucauguaagg

SEQ ID NO: 9544 - RNA, 24 nt, Human
uugcaucuguuuuggguaucagca

SEQ ID NO: 9545 - RNA, 24 nt, Human
uugccaaggagacucugccaccgu

SEQ ID NO: 9546 - RNA, 24 nt, Human
uugccacuuuggccucagugugga

SEQ ID NO: 9547 - RNA, 24 nt, Human
uugccagucugcucauccauguau

SEQ ID NO: 9548 - RNA, 22 nt, Human
uugcccaggcuagagugcagug

SEQ ID NO: 9549 - RNA, 22 nt, Human
uugcccaggcuggagugcagua

SEQ ID NO: 9550 - RNA, 22 nt, Human
uugccuaggcuggagugcagug

SEQ ID NO: 9551 - RNA, 24 nt, Human
uugcucagcuucuggcucaaucug

SEQ ID NO: 9552 - RNA, 24 nt, Human
uugcucugagggguccugucuucc

SEQ ID NO: 9553 - RNA, 24 nt, Human
uugcucugcuucuucauguaucuu

SEQ ID NO: 9554 - RNA, 24 nt, Human
uugcugccacuuccaggugcuggc

SEQ ID NO: 9555 - RNA, 24 nt, Human
uugcugcucaaacgaacccccaau

SEQ ID NO: 9556 - RNA, 24 nt, Human
uugcuggagcuggccuggugucuc

SEQ ID NO: 9557 - RNA, 24 nt, Human
uugcuggcaaucaaacccgacacc

SEQ ID NO: 9558 - RNA, 24 nt, Human
uugcuggucuuugaucagcugcuc

SEQ ID NO: 9559 - RNA, 24 nt, Human
uugcuucccucugugauuuggacu

SEQ ID NO: 9560 - RNA, 19 nt, Human
uugcuuggcccugacugau

SEQ ID NO: 9561 - RNA, 24 nt, Human
uugcuuugucuacccgcuggacuu

SEQ ID NO: 9562 - RNA, 24 nt, Human
uugcuuuucauaagagggagaguu

SEQ ID NO: 9563 - RNA, 20 nt, Human
uugcuuuuucuguauucugu

SEQ ID NO: 9564 - RNA, 24 nt, Human
uuggaaagagaccagaaccgaagc

SEQ ID NO: 9565 - RNA, 24 nt, Human
uuggaaccccccgggcccaggccc

SEQ ID NO: 9566 - RNA, 24 nt, Human
uuggaacuaccaagcauguggcuc

SEQ ID NO: 9567 - RNA, 22 nt, Human
uuggaagagagauggggagaga

SEQ ID NO: 9568 - RNA, 23 nt, Human
uuggaagagcagcccaggugguc

SEQ ID NO: 9569 - RNA, 24 nt, Human
uuggaagccacagaaaugcagaau

SEQ ID NO: 9570 - RNA, 22 nt, Human
uuggaccaacuccgaaaguugu

SEQ ID NO: 9571 - RNA, 24 nt, Human
uuggaccacgaccagcuauccgga

SEQ ID NO: 9572 - RNA, 24 nt, Human
uuggacccagagaaccgggccggg

SEQ ID NO: 9573 - RNA, 22 nt, Human
uuggaccuggcggcaucagcug

SEQ ID NO: 9574 - RNA, 24 nt, Human
uuggacucuuuuggaccuauaaac

SEQ ID NO: 9575 - RNA, 24 nt, Human
uuggagacuugggcaaugugacug

SEQ ID NO: 9576 - RNA, 24 nt, Human
uuggagcaaaguucacgaaggcca

SEQ ID NO: 9577 - RNA, 24 nt, Human
uuggagccacugauuauaccucua

SEQ ID NO: 9578 - RNA, 24 nt, Human
uuggaggaccagaugggugggagc

SEQ ID NO: 9579 - RNA, 22 nt, Human
uuggaguaauucaguauagguu

SEQ ID NO: 9580 - RNA, 24 nt, Human
uuggauaugguuggaguggcacag

SEQ ID NO: 9581 - RNA, 21 nt, Human
uuggauauugggagacuuggc

SEQ ID NO: 9582 - RNA, 24 nt, Human
uuggaucuucaugcccuggguucu

SEQ ID NO: 9583 - RNA, 24 nt, Human
uuggauggaggccuggcaggaggg

SEQ ID NO: 9584 - RNA, 24 nt, Human
uuggauuuaagaaggauugguugc

SEQ ID NO: 9585 - RNA, 24 nt, Human
uuggcaaacguuucccgaagagga

SEQ ID NO: 9586 - RNA, 24 nt, Human
uuggcacacucuauccgaaauuug

SEQ ID NO: 9587 - RNA, 24 nt, Human
uuggcacauccuugcauuguucua

SEQ ID NO: 9588 - RNA, 24 nt, Human
uuggcaucuucuaccaggccugaa

SEQ ID NO: 9589 - RNA, 22 nt, Human
uuggccaucaauccgugucagu

SEQ ID NO: 9590 - RNA, 24 nt, Human
uuggcggggccuuggacuaccacu

SEQ ID NO: 9591 - RNA, 24 nt, Human
uuggcuccggggcauccuggauuu

SEQ ID NO: 9592 - RNA, 22 nt, Human
uugggagaggcagcagagucau

SEQ ID NO: 9593 - RNA, 22 nt, Human
uugggcaaugguggugaauaaa

SEQ ID NO: 9594 - RNA, 24 nt, Human
uuggggcuucaacaugggaauuua

SEQ ID NO: 9595 - RNA, 24 nt, Human
uugguacuugagucaaagacgaca

SEQ ID NO: 9596 - RNA, 22 nt, Human
uuggucaucaacuauuuucccu

SEQ ID NO: 9597 - RNA, 24 nt, Human
uuggucccuauccaauucuuccca

SEQ ID NO: 9598 - RNA, 24 nt, Human
uugguccugacuacuaccauuucg

SEQ ID NO: 9599 - RNA, 24 nt, Human
uuggucgauagcaaauauguagug

SEQ ID NO: 9600 - RNA, 24 nt, Human
uuggugaucuauccgaaaauugga

SEQ ID NO: 9601 - RNA, 22 nt, Human
uuggugcaaauggcauuuccau

SEQ ID NO: 9602 - RNA, 24 nt, Human
uuggugccaacuggagucuuggug

SEQ ID NO: 9603 - RNA, 24 nt, Human
uuggugcuuuguggcucaccacag

SEQ ID NO: 9604 - RNA, 24 nt, Human
uuggugggacucggcugccccucc

SEQ ID NO: 9605 - RNA, 24 nt, Human
uugguggugaagugaguagcugca

SEQ ID NO: 9606 - RNA, 23 nt, Human
uugguguugcccgaguuagucca

SEQ ID NO: 9607 - RNA, 24 nt, Human
uugguucaagggauggaaagucaa

SEQ ID NO: 9608 - RNA, 24 nt, Human
uugguucaagggauggcaaaguca

SEQ ID NO: 9609 - RNA, 24 nt, Human
uugguuccaagacgcguaggcgag

SEQ ID NO: 9610 - RNA, 23 nt, Human
uugguucccuuuaaaaguucugg

SEQ ID NO: 9611 - RNA, 24 nt, Human
uugguucuuucgucugcuacagug

SEQ ID NO: 9612 - RNA, 24 nt, Human
uugguugaauacauaguuaagaug

SEQ ID NO: 9613 - RNA, 22 nt, Human
uugguugcugaugagcuuugag

SEQ ID NO: 9614 - RNA, 24 nt, Human
uuguauccuuggccagaaacuggg

SEQ ID NO: 9615 - RNA, 24 nt, Human
uuguaugcagaaauagauaugaaa

SEQ ID NO: 9616 - RNA, 24 nt, Human
uuguauguguguugagcuggcccu

SEQ ID NO: 9617 - RNA, 24 nt, Human
uuguauuuccuagacuuuuauaua

SEQ ID NO: 9618 - RNA, 24 nt, Human
uuguccugugcuggggcugacagg

SEQ ID NO: 9619 - RNA, 22 nt, Human
uugugaaagagcccuuggcugg

SEQ ID NO: 9620 - RNA, 24 nt, Human
uugugggccugggcuuggcucugg

SEQ ID NO: 9621 - RNA, 22 nt, Human
uugugguuagcaguuuuugcca

SEQ ID NO: 9622 - RNA, 24 nt, Human
uugugugccauuuugcagcauuuu

SEQ ID NO: 9623 - RNA, 24 nt, Human
uugugugcugcuuuagauuuggcc

SEQ ID NO: 9624 - RNA, 22 nt, Human
uugugugcuggcguuucuugga

SEQ ID NO: 9625 - RNA, 22 nt, Human
uuguuaggugagagcauguuug

SEQ ID NO: 9626 - RNA, 22 nt, Human
uuguuccuaguuguccaucaca

SEQ ID NO: 9627 - RNA, 22 nt, Human
uuguucgucugagagguuucag

SEQ ID NO: 9628 - RNA, 22 nt, Human
uuguuucuguuucauggaaucu

SEQ ID NO: 9629 - RNA, 22 nt, Human
uuguuugacgauuuggagaaga

SEQ ID NO: 9630 - RNA, 22 nt, Human
uuguuuuagaagaaggucagaa

SEQ ID NO: 9631 - RNA, 24 nt, Human
uuuaaaauaaauucuuaaucagag

SEQ ID NO: 9632 - RNA, 24 nt, Human
uuuaaacugaggaaacggcaaaug

SEQ ID NO: 9633 - RNA, 24 nt, Human
uuuaaagcacuuuucuguaaaagc

SEQ ID NO: 9634 - RNA, 24 nt, Human
uuuaaaggacugacuugcuaucac

SEQ ID NO: 9635 - RNA, 22 nt, Human
uuuaaagucagcaacuuuucac

SEQ ID NO: 9636 - RNA, 22 nt, Human
uuuaaaguggcuacguucuagu

SEQ ID NO: 9637 - RNA, 21 nt, Human
uuuaaauguaaagaaguaugu

SEQ ID NO: 9638 - RNA, 23 nt, Human
uuuaacguuuucaugguaaugca

SEQ ID NO: 9639 - RNA, 24 nt, Human
uuuaagaaaugucuuugaccccau

SEQ ID NO: 9640 - RNA, 22 nt, Human
uuuaagcuauaguuccaggccc

SEQ ID NO: 9641 - RNA, 22 nt, Human
uuuacacgauaaaaauccuuuu

SEQ ID NO: 9642 - RNA, 22 nt, Human
uuuacagauggcaaagaucugg

SEQ ID NO: 9643 - RNA, 24 nt, Human
uuuacaguauauacagucaggccu

SEQ ID NO: 9644 - RNA, 24 nt, Human
uuuaccauaauguuccuuaguggu

SEQ ID NO: 9645 - RNA, 22 nt, Human
uuuacccugaggaaucuauuuu

SEQ ID NO: 9646 - RNA, 24 nt, Human
uuuacuacuucuaucuuuuugacu

SEQ ID NO: 9647 - RNA, 22 nt, Human
uuuaggcauaaccaguaucauu

SEQ ID NO: 9648 - RNA, 24 nt, Human
uuuauaggcaucuguauuaauugu

SEQ ID NO: 9649 - RNA, 24 nt, Human
uuuauaguaucaagugaggcuguu

SEQ ID NO: 9650 - RNA, 24 nt, Human
uuuaugcccccggaaccaagaccc

SEQ ID NO: 9651 - RNA, 21 nt, Human
uuucaacagguauuuauugag

SEQ ID NO: 9652 - RNA, 24 nt, Human
uuucaaggucgcugggcccgaggu

SEQ ID NO: 9653 - RNA, 24 nt, Human
uuucaaguauugccugggucuugg

SEQ ID NO: 9654 - RNA, 24 nt, Human
uuucacagaugaggaaacugaagc

SEQ ID NO: 9655 - RNA, 24 nt, Human
uuucacagcuaacauucauuuaau

SEQ ID NO: 9656 - RNA, 24 nt, Human
uuucacaguggauaugaccuugga

SEQ ID NO: 9657 - RNA, 24 nt, Human
uuucaccauguuggccaggcuggu

SEQ ID NO: 9658 - RNA, 22 nt, Human
uuucaugcucagaagugcccug

SEQ ID NO: 9659 - RNA, 22 nt, Human
uuuccaaacaugaaggcacguc

SEQ ID NO: 9660 - RNA, 24 nt, Human
uuuccagaucuacgcugugccuug

SEQ ID NO: 9661 - RNA, 24 nt, Human
uuuccagguacucaggaacuaggc

SEQ ID NO: 9662 - RNA, 24 nt, Human
uuuccagugaaauaaaacauguug

SEQ ID NO: 9663 - RNA, 24 nt, Human
uuuccaguggccacaaguuauugc

SEQ ID NO: 9664 - RNA, 24 nt, Human
uuuccauguaaaaucucuguugug

SEQ ID NO: 9665 - RNA, 24 nt, Human
uuucccaguaauaaaauuagguuu

SEQ ID NO: 9666 - RNA, 24 nt, Human
uuucccggaagcugcccggggggu

SEQ ID NO: 9667 - RNA, 24 nt, Human
uuuccugaaguuccuuugauugua

SEQ ID NO: 9668 - RNA, 24 nt, Human
uuucuagcuaugaucuuagcuucc

SEQ ID NO: 9669 - RNA, 24 nt, Human
uuucucaggauuacugugguuucu

SEQ ID NO: 9670 - RNA, 22 nt, Human
uuucucagggccuggaguccug

SEQ ID NO: 9671 - RNA, 24 nt, Human
uuucucaguacaaagaauccguga

SEQ ID NO: 9672 - RNA, 24 nt, Human
uuucugaucgauauuuuuguguaa

SEQ ID NO: 9673 - RNA, 22 nt, Human
uuucugcuuuguuggucagggu

SEQ ID NO: 9674 - RNA, 22 nt, Human
uuucugggagaugucucaggcu

SEQ ID NO: 9675 - RNA, 24 nt, Human
uuucugggugugucuguggggaug

SEQ ID NO: 9676 - RNA, 24 nt, Human
uuucugguucuagauccuugggga

SEQ ID NO: 9677 - RNA, 22 nt, Human
uuucuguugugaccugacucuu

SEQ ID NO: 9678 - RNA, 22 nt, Human
uuucuucccuggcuuccugcac

SEQ ID NO: 9679 - RNA, 23 nt, Human
uuucuugggguggguagagcaau

SEQ ID NO: 9680 - RNA, 24 nt, Human
uuucuugucgucugugcuugauuc

SEQ ID NO: 9681 - RNA, 24 nt, Human
uuugaaagaguccgauacacagug

SEQ ID NO: 9682 - RNA, 21 nt, Human
uuugaaaggcaugugcagacc

SEQ ID NO: 9683 - RNA, 24 nt, Human
uuugaaauuaaacagauggguaac

SEQ ID NO: 9684 - RNA, 24 nt, Human
uuugaaauuguguaauguuuauau

SEQ ID NO: 9685 - RNA, 23 nt, Human
uuugaaguaguggguuacaugcu

SEQ ID NO: 9686 - RNA, 24 nt, Human
uuugaaguauguuuagucagcaug

SEQ ID NO: 9687 - RNA, 22 nt, Human
uuugaaguggguccucgaaaug

SEQ ID NO: 9688 - RNA, 19 nt, Human
uuugacaaggaccaugaug

SEQ ID NO: 9689 - RNA, 24 nt, Human
uuugacaucuacccaucccuaaca

SEQ ID NO: 9690 - RNA, 22 nt, Human
uuugaccacuuccaccuaugaa

SEQ ID NO: 9691 - RNA, 24 nt, Human
uuugacccaggguugucuccccuc

SEQ ID NO: 9692 - RNA, 24 nt, Human
uuugaccugaccaugaugcccagg

SEQ ID NO: 9693 - RNA, 24 nt, Human
uuugagucucgacagaacgcuguu

SEQ ID NO: 9694 - RNA, 24 nt, Human
uuugagugucuucucauuccuuaa

SEQ ID NO: 9695 - RNA, 22 nt, Human
uuugaugcaugugaccugggau

SEQ ID NO: 9696 - RNA, 20 nt, Human
uuugauguugugaaagguuu

SEQ ID NO: 9697 - RNA, 24 nt, Human
uuugcaaagaaugaagaagugaau

SEQ ID NO: 9698 - RNA, 24 nt, Human
uuugcacaagcuugucagugacau

SEQ ID NO: 9699 - RNA, 24 nt, Human
uuugcacaguagaugcagaacuag

SEQ ID NO: 9700 - RNA, 22 nt, Human
uuugcaccugagacagauagcc

SEQ ID NO: 9701 - RNA, 22 nt, Human
uuugcacuguaauaccucgguc

SEQ ID NO: 9702 - RNA, 24 nt, Human
uuugcagauggcugucuuccuguu

SEQ ID NO: 9703 - RNA, 24 nt, Human
uuugcauaaggcauagggacauca

SEQ ID NO: 9704 - RNA, 24 nt, Human
uuugccaaaaccacgcuuguagau

SEQ ID NO: 9705 - RNA, 24 nt, Human
uuugccaaacauuugucgugguua

SEQ ID NO: 9706 - RNA, 19 nt, Human
uuugccagcuguagccuug

SEQ ID NO: 9707 - RNA, 24 nt, Human
uuugccccgggccaccucacucuc

SEQ ID NO: 9708 - RNA, 23 nt, Human
uuugccccuggcaaaugcacaca

SEQ ID NO: 9709 - RNA, 24 nt, Human
uuugcccucaucagguuuucgcau

SEQ ID NO: 9710 - RNA, 24 nt, Human
uuugcgcaaaauguggaaagaaag

SEQ ID NO: 9711 - RNA, 24 nt, Human
uuugcguaggccacuggguuuucu

SEQ ID NO: 9712 - RNA, 24 nt, Human
uuugcuauuucuucuagcaaauuu

SEQ ID NO: 9713 - RNA, 24 nt, Human
uuugcugaagcuucuugguggccc

SEQ ID NO: 9714 - RNA, 24 nt, Human
uuugcugaaggaggucaucccuug

SEQ ID NO: 9715 - RNA, 24 nt, Human
uuugcugcgguuaaagcuggccaa

SEQ ID NO: 9716 - RNA, 21 nt, Human
uuugcugggaucuucucucca

SEQ ID NO: 9717 - RNA, 22 nt, Human
uuuggaucaccugcuaucuaau

SEQ ID NO: 9718 - RNA, 24 nt, Human
uuuggcaaggauggaguguccaga

SEQ ID NO: 9719 - RNA, 22 nt, Human
uuuggcaauguguaaacuucac

SEQ ID NO: 9720 - RNA, 22 nt, Human
uuuggggucuccccagcaugca

SEQ ID NO: 9721 - RNA, 24 nt, Human
uuuggucguggacguggucagcca

SEQ ID NO: 9722 - RNA, 24 nt, Human
uuugguggucuuuccuuugcaagc

SEQ ID NO: 9723 - RNA, 24 nt, Human
uuugguugcuacauucugguguug

SEQ ID NO: 9724 - RNA, 24 nt, Human
uuugguugguggcaccaggggaca

SEQ ID NO: 9725 - RNA, 22 nt, Human
uuuguacaaacuaaaugaggug

SEQ ID NO: 9726 - RNA, 20 nt, Human
uuuguaguucugaauacaca

SEQ ID NO: 9727 - RNA, 22 nt, Human
uuuguauauuugaucauuugug

SEQ ID NO: 9728 - RNA, 24 nt, Human
uuuguauugguacugcguucugug

SEQ ID NO: 9729 - RNA, 24 nt, Human
uuugucaguggaaacuaugucagu

SEQ ID NO: 9730 - RNA, 24 nt, Human
uuugucccaguccagccuuuauca

SEQ ID NO: 9731 - RNA, 22 nt, Human
uuugugaaugguugaacuacag

SEQ ID NO: 9732 - RNA, 23 nt, Human
uuugugcugaggcaggacacagc

SEQ ID NO: 9733 - RNA, 24 nt, Human
uuuguggaguuuuccauagccucu

SEQ ID NO: 9734 - RNA, 24 nt, Human
uuugugguaguuggggugcacauu

SEQ ID NO: 9735 - RNA, 24 nt, Human
uuuguuaggauagaucuuaagcag

SEQ ID NO: 9736 - RNA, 24 nt, Human
uuuguuggguuuucugaaacuuaa

SEQ ID NO: 9737 - RNA, 24 nt, Human
uuuguuugccuuauugauguuuuu

SEQ ID NO: 9738 - RNA, 24 nt, Human
uuuguuuugagguuaguuugauua

SEQ ID NO: 9739 - RNA, 24 nt, Human
uuuuaaggaguuucaugaaagacg

SEQ ID NO: 9740 - RNA, 24 nt, Human
uuuuaauaaguuuaauguucuuca

SEQ ID NO: 9741 - RNA, 24 nt, Human
uuuuacaauauuccauguauaucc

SEQ ID NO: 9742 - RNA, 24 nt, Human
uuuuacagagauagguaagcaggg

SEQ ID NO: 9743 - RNA, 24 nt, Human
uuuuacucagugguggaguagacu

SEQ ID NO: 9744 - RNA, 24 nt, Human
uuuuaugaauaugugaauugaaag

SEQ ID NO: 9745 - RNA, 22 nt, Human
uuuucaauggcugacacugucu

SEQ ID NO: 9746 - RNA, 24 nt, Human
uuuucagacagcaaacagaaugau

SEQ ID NO: 9747 - RNA, 24 nt, Human
uuuucagaccacccaacuacucug

SEQ ID NO: 9748 - RNA, 24 nt, Human
uuuucagcacagccuucauguucc

SEQ ID NO: 9749 - RNA, 24 nt, Human
uuuucagcccggguauaagcugaa

SEQ ID NO: 9750 - RNA, 24 nt, Human
uuuucauagccucacggaugagcc

SEQ ID NO: 9751 - RNA, 24 nt, Human
uuuucaugcauuugacaaggaugg

SEQ ID NO: 9752 - RNA, 24 nt, Human
uuuuccccuauaauaggaaacaag

SEQ ID NO: 9753 - RNA, 24 nt, Human
uuuugaaggcucucuuuucugcaa

SEQ ID NO: 9754 - RNA, 22 nt, Human
uuuugcacaguaauaaguugac

SEQ ID NO: 9755 - RNA, 24 nt, Human
uuuugcgaaauguuguauuuacug

SEQ ID NO: 9756 - RNA, 24 nt, Human
uuuuguacccugguaaaugaugcc

SEQ ID NO: 9757 - RNA, 24 nt, Human
uuuuucagacaauuuugcagaaag

SEQ ID NO: 9758 - RNA, 24 nt, Human
uuuuucuuaaccuuauugcaaggg

SEQ ID NO: 9759 - RNA, 24 nt, Human
uuuuucuuagugccucugugcauu

SEQ ID NO: 9760 - RNA, 24 nt, Human
uuuuuggaucuuggacaaagaaaa

SEQ ID NO: 9761 - RNA, 24 nt, Human
uuuuuggcauuauuccaacaugcu

SEQ ID NO: 9762 - RNA, 24 nt, Human
uuuuuuguauucuuuaagauuuua

SEQ ID NO: 9763 - RNA, 22 nt, Human
aauuuaacagacagccacagcc

SEQ ID NO: 9764 - RNA, 24 nt, Human
aauuuuguaacucagaucuugcug

SEQ ID NO: 9765 - RNA, 24 nt, Human
acaaagcacagaaaaaccagauuc

SEQ ID NO: 9766 - RNA, 24 nt, Human
acaaagccugccaggcugagcccu

SEQ ID NO: 9767 - RNA, 24 nt, Human
acaaagucaguucucgaucaaggu

SEQ ID NO: 9768 - RNA, 22 nt, Human
acaaaucuaagucccaagauua

SEQ ID NO: 9769 - RNA, 24 nt, Human
acaaccuucagaugagaacugcuu

SEQ ID NO: 9770 - RNA, 22 nt, Human
acaacuguguaggcuguucuuu

SEQ ID NO: 9771 - RNA, 24 nt, Human
acaagcaagagaagaagcagagac

SEQ ID NO: 9772 - RNA, 22 nt, Human
acaagcccaagauagaugcuca

SEQ ID NO: 9773 - RNA, 24 nt, Human
acaaggauucauggauggaaaacu

SEQ ID NO: 9774 - RNA, 22 nt, Human
acaaggcagggcaggugucugu

SEQ ID NO: 9775 - RNA, 24 nt, Human
acaauggccauacucuguugagga

SEQ ID NO: 9776 - RNA, 22 nt, Human
acaauugguggaaugaaccaga

SEQ ID NO: 9777 - RNA, 22 nt, Human
acacaggucuuuugaaugcagg

SEQ ID NO: 9778 - RNA, 24 nt, Human
acaccagaccaccgccuuccguac

SEQ ID NO: 9779 - RNA, 24 nt, Human
acaccagagggaugggguaggagg

SEQ ID NO: 9780 - RNA, 24 nt, Human
acacugggcuuuuaacacaagacu

SEQ ID NO: 9781 - RNA, 24 nt, Human
acagaaaguuugagccuauaagcc

SEQ ID NO: 9782 - RNA, 24 nt, Human
acagaaauuuauuuucucacaguu

SEQ ID NO: 9783 - RNA, 22 nt, Human
acagaacauaagucagccaagu

SEQ ID NO: 9784 - RNA, 24 nt, Human
acagaaccugugguuugcaacccc

SEQ ID NO: 9785 - RNA, 24 nt, Human
acagaaguccuuuaagaggguuug

SEQ ID NO: 9786 - RNA, 24 nt, Human
acagacuacgagggaguuugacag

SEQ ID NO: 9787 - RNA, 21 nt, Human
acagagcgagacucugucuca

SEQ ID NO: 9788 - RNA, 21 nt, Human
acagaucacucuuuugacccc

SEQ ID NO: 9789 - RNA, 24 nt, Human
acagcaaagcgacccaaaggugga

SEQ ID NO: 9790 - RNA, 22 nt, Human
acagcaagucuuugucaaagcu

SEQ ID NO: 9791 - RNA, 20 nt, Human
acaggagcauggagaggcua

SEQ ID NO: 9792 - RNA, 24 nt, Human
acaggaucugacuggugggcacaa

SEQ ID NO: 9793 - RNA, 24 nt, Human
acaggaugcuacucgggcaccuag

SEQ ID NO: 9794 - RNA, 22 nt, Human
acaggcagacgugugcauucug

SEQ ID NO: 9795 - RNA, 24 nt, Human
acaggcuacaucuggauggggaca

SEQ ID NO: 9796 - RNA, 22 nt, Human
acagggguuggggaggcagagc

SEQ ID NO: 9797 - RNA, 24 nt, Human
acagguacauagguaaccaaagua

SEQ ID NO: 9798 - RNA, 24 nt, Human
acagguaggaggcugggcacaaaa

SEQ ID NO: 9799 - RNA, 22 nt, Human
acagugacuugcucuccaaugg

SEQ ID NO: 9800 - RNA, 24 nt, Human
acagugcagaaacuuacuuuugaa

SEQ ID NO: 9801 - RNA, 22 nt, Human
acaguugcguccagaggcuuuu

SEQ ID NO: 9802 - RNA, 22 nt, Human
acauacauauauauacauaugu

SEQ ID NO: 9803 - RNA, 24 nt, Human
acauaggugugaauuuauccauua

SEQ ID NO: 9804 - RNA, 22 nt, Human
acauaugcauaauuggauaagu

SEQ ID NO: 9805 - RNA, 22 nt, Human
acauauuuuucucucuccuuaa

SEQ ID NO: 9806 - RNA, 22 nt, Human
acaugaucuccucacucuagga

SEQ ID NO: 9807 - RNA, 22 nt, Human
acauuaccaaagaaaaguugga

SEQ ID NO: 9808 - RNA, 22 nt, Human
accaacuauuuugcagccccuc

SEQ ID NO: 9809 - RNA, 24 nt, Human
accaaugguuaagucaaaguuuug

SEQ ID NO: 9810 - RNA, 24 nt, Human
accacaguguggggcuuucucucu

SEQ ID NO: 9811 - RNA, 24 nt, Human
accacuuuugugcaccugucccca

SEQ ID NO: 9812 - RNA, 24 nt, Human
accagcuucaaguacauguccaca

SEQ ID NO: 9813 - RNA, 22 nt, Human
accaggacuggaguuaccugaa

SEQ ID NO: 9814 - RNA, 24 nt, Human
accaggauggucgcuuucugucuc

SEQ ID NO: 9815 - RNA, 22 nt, Human
accagggguucgggacagccua

SEQ ID NO: 9816 - RNA, 24 nt, Human
accagguaugucacagcuugugcu

SEQ ID NO: 9817 - RNA, 24 nt, Human
accaggugcugaaccgggugacag

SEQ ID NO: 9818 - RNA, 22 nt, Human
accaguuaaagaauaugaggcc

SEQ ID NO: 9819 - RNA, 24 nt, Human
accaucuuguauucaagugcugac

SEQ ID NO: 9820 - RNA, 24 nt, Human
accaugcgcacgugaggcucugug

SEQ ID NO: 9821 - RNA, 22 nt, Human
accauguaagccugaauuugug

SEQ ID NO: 9822 - RNA, 22 nt, Human
accauucuuccucuuguguuuu

SEQ ID NO: 9823 - RNA, 24 nt, Human
acccaaagauguuaacaguauuuu

SEQ ID NO: 9824 - RNA, 24 nt, Human
acccaagaagggagacaggcccug

SEQ ID NO: 9825 - RNA, 22 nt, Human
acccacccucugugaggaggau

SEQ ID NO: 9826 - RNA, 22 nt, Human
acccaggagguggaaguugcag

SEQ ID NO: 9827 - RNA, 24 nt, Human
acccaguauccacaugcggugggg

SEQ ID NO: 9828 - RNA, 24 nt, Human
accccaaucucugcccugccugca

SEQ ID NO: 9829 - RNA, 24 nt, Human
accccgauccugcugcgccgccuu

SEQ ID NO: 9830 - RNA, 22 nt, Human
accccucucagucuguaguaug

SEQ ID NO: 9831 - RNA, 24 nt, Human
acccggcucuccuggcccuguguu

SEQ ID NO: 9832 - RNA, 24 nt, Human
acccgggccuccggcccuggcagu

SEQ ID NO: 9833 - RNA, 22 nt, Human
acccugaccuacaagucggaac

SEQ ID NO: 9834 - RNA, 24 nt, Human
acccugagaguguggcuggggagu

SEQ ID NO: 9835 - RNA, 24 nt, Human
acccuggaucugcgcauugcugga

SEQ ID NO: 9836 - RNA, 24 nt, Human
acccugggugaugugcugcccucg

SEQ ID NO: 9837 - RNA, 24 nt, Human
acccugugucugauaagucucaga

SEQ ID NO: 9838 - RNA, 24 nt, Human
acccuuuaaacagagagaguuuau

SEQ ID NO: 9839 - RNA, 22 nt, Human
accgccauuuaaaaguguugga

SEQ ID NO: 9840 - RNA, 24 nt, Human
accggcucaaacccccggggguuu

SEQ ID NO: 9841 - RNA, 22 nt, Human
accuagguauuaagccccacau

SEQ ID NO: 9842 - RNA, 22 nt, Human
accuaguuccagguugagggcc

SEQ ID NO: 9843 - RNA, 24 nt, Human
accuccuugagacaaggcagggug

SEQ ID NO: 9844 - RNA, 24 nt, Human
accuggagggcaugaugagcgagg

SEQ ID NO: 9845 - RNA, 22 nt, Human
accuggccuguaggcaagucuu

SEQ ID NO: 9846 - RNA, 24 nt, Human
accugggguggcacacacacgcaa

SEQ ID NO: 9847 - RNA, 24 nt, Human
accuguuggguuccaucuaacgcc

SEQ ID NO: 9848 - RNA, 22 nt, Human
accuuggccucauuuguaucuu

SEQ ID NO: 9849 - RNA, 22 nt, Human
accuuuccuguacucuuacagg

SEQ ID NO: 9850 - RNA, 24 nt, Human
acgaaccccuccucagugcuuggu

SEQ ID NO: 9851 - RNA, 24 nt, Human
acgaagacauggauaguugcaagg

SEQ ID NO: 9852 - RNA, 22 nt, Human
acgaaggcaguggaugauacau

SEQ ID NO: 9853 - RNA, 23 nt, Human
acgaaguuauaguggaaacuagg

SEQ ID NO: 9854 - RNA, 22 nt, Human
acgaaguuuagggggaauuugc

SEQ ID NO: 9855 - RNA, 24 nt, Human
acgacggcgacgaggaggacgaaa

SEQ ID NO: 9856 - RNA, 24 nt, Human
acgaggcugggaauccuggagaac

SEQ ID NO: 9857 - RNA, 24 nt, Human
acgcaagcaggaggcgggggaguc

SEQ ID NO: 9858 - RNA, 24 nt, Human
acgcagauccuucggaccgggggg

SEQ ID NO: 9859 - RNA, 24 nt, Human
acgcagccguguccggagcgcccu

SEQ ID NO: 9860 - RNA, 24 nt, Human
acgccaugaaagcugccauggccu

SEQ ID NO: 9861 - RNA, 24 nt, Human
acgccaugaaagcugccaugugcc

SEQ ID NO: 9862 - RNA, 24 nt, Human
acgccgggaccgggaccgccgccg

SEQ ID NO: 9863 - RNA, 24 nt, Human
acgccuguaaucccagcacuuugg

SEQ ID NO: 9864 - RNA, 24 nt, Human
acgcggcccagcggggcucgggac

SEQ ID NO: 9865 - RNA, 24 nt, Human
acgcgguuuugggugcgugucgcc

SEQ ID NO: 9866 - RNA, 24 nt, Human
acgcguaguccacaagucgcagcu

SEQ ID NO: 9867 - RNA, 24 nt, Human
acgcgugggccagcagcugguggg

SEQ ID NO: 9868 - RNA, 24 nt, Human
acgcucccacgguggcacaugaac

SEQ ID NO: 9869 - RNA, 24 nt, Human
acgcucuuugugcuagggugaugu

SEQ ID NO: 9870 - RNA, 24 nt, Human
acgcugcccagcaggccggcuccu

SEQ ID NO: 9871 - RNA, 24 nt, Human
acgcugcggcgacugcgggaggcc

SEQ ID NO: 9872 - RNA, 24 nt, Human
acggacccagcucagugagcuucg

SEQ ID NO: 9873 - RNA, 24 nt, Human
acggagcaugaaaagacuuucccc

SEQ ID NO: 9874 - RNA, 22 nt, Human
acgugcugucugccucaugaaa

SEQ ID NO: 9875 - RNA, 24 nt, Human
acuagauuguaaagacuggggugg

SEQ ID NO: 9876 - RNA, 22 nt, Human
acuaggacugugugguguaaau

SEQ ID NO: 9877 - RNA, 24 nt, Human
acuaguagacugaugagcuggauu

SEQ ID NO: 9878 - RNA, 22 nt, Human
acuagugucauuuaggagcuua

SEQ ID NO: 9879 - RNA, 24 nt, Human
acuaugauguggaauggggcuaug

SEQ ID NO: 9880 - RNA, 22 nt, Human
acucacaugcaagcgauuuccu

SEQ ID NO: 9881 - RNA, 24 nt, Human
acucacucuagaaauagccugugu

SEQ ID NO: 9882 - RNA, 22 nt, Human
acucacugcaaccuccaccucc

SEQ ID NO: 9883 - RNA, 22 nt, Human
acucagagccauuccgcucagg

SEQ ID NO: 9884 - RNA, 22 nt, Human
acucaucaaagccuugguuuag

SEQ ID NO: 9885 - RNA, 22 nt, Human
acuccaacugggagagaugugu

SEQ ID NO: 9886 - RNA, 24 nt, Human
acuccauuguccccuccucuggcu

SEQ ID NO: 9887 - RNA, 24 nt, Human
acucgcgccaguggaggugacauc

SEQ ID NO: 9888 - RNA, 24 nt, Human
acucgcgcgggggguaauucgggg

SEQ ID NO: 9889 - RNA, 24 nt, Human
acucgcugcgaacacccucguggu

SEQ ID NO: 9890 - RNA, 24 nt, Human
acucugguuacugggcccgcgccg

SEQ ID NO: 9891 - RNA, 24 nt, Human
acucugguuuucugcucagggucu

SEQ ID NO: 9892 - RNA, 22 nt, Human
acugaccuucugugucauggca

SEQ ID NO: 9893 - RNA, 24 nt, Human
acugagcaccuggugaauggccgg

SEQ ID NO: 9894 - RNA, 24 nt, Human
acugaucugauuggaaaacaagac

SEQ ID NO: 9895 - RNA, 24 nt, Human
acugcacuacagccugggcaacag

SEQ ID NO: 9896 - RNA, 22 nt, Human
acugcacuccagccuaugggau

SEQ ID NO: 9897 - RNA, 22 nt, Human
acugcacuccagccugggcaac

SEQ ID NO: 9898 - RNA, 24 nt, Human
acugcacuccagccugggcaacag

SEQ ID NO: 9899 - RNA, 24 nt, Human
acugcacuccagccugggugacag

SEQ ID NO: 9900 - RNA, 22 nt, Human
acugcacuccaucgugggugac

SEQ ID NO: 9901 - RNA, 24 nt, Human
acugcagaagcacuuuacuuaaaa

SEQ ID NO: 9902 - RNA, 23 nt, Human
acugcagggagaggcgucuccag

SEQ ID NO: 9903 - RNA, 24 nt, Human
acugcaguaucuuauugauuuggg

SEQ ID NO: 9904 - RNA, 24 nt, Human
acugcauucuguguauguaugugc

SEQ ID NO: 9905 - RNA, 22 nt, Human
acugccacgggaggaaugacaa

SEQ ID NO: 9906 - RNA, 22 nt, Human
acuggacucagaggagaagaug

SEQ ID NO: 9907 - RNA, 22 nt, Human
acuggagagccacuugagguca

SEQ ID NO: 9908 - RNA, 24 nt, Human
acuggagucuuuugggaggccaau

SEQ ID NO: 9909 - RNA, 24 nt, Human
acuggcaugaggacuauuggucuu

SEQ ID NO: 9910 - RNA, 22 nt, Human
acuggccugcaugaauacaggg

SEQ ID NO: 9911 - RNA, 22 nt, Human
acugggaaugugccaucuuuac

SEQ ID NO: 9912 - RNA, 22 nt, Human
acuguacuccacccugggcgac

SEQ ID NO: 9913 - RNA, 22 nt, Human
acuguacuccauccugggugac

SEQ ID NO: 9914 - RNA, 22 nt, Human
acugucuggccccaucuucaga

SEQ ID NO: 9915 - RNA, 22 nt, Human
acuguuagcuaccuggaaaacc

SEQ ID NO: 9916 - RNA, 24 nt, Human
acuuaaguucaaaggaggccuguu

SEQ ID NO: 9917 - RNA, 22 nt, Human
acuuauuucuagguuucuuuca

SEQ ID NO: 9918 - RNA, 24 nt, Human
acuucaggcacaugugcugaugag

SEQ ID NO: 9919 - RNA, 24 nt, Human
acuucauucuuuuucuuaacaaaa

SEQ ID NO: 9920 - RNA, 22 nt, Human
acuuguguaacacagaaagaac

SEQ ID NO: 9921 - RNA, 22 nt, Human
acuuugacuuugguuugcugcu

SEQ ID NO: 9922 - RNA, 24 nt, Human
agaaaaagccaguuggaauuuuga

SEQ ID NO: 9923 - RNA, 24 nt, Human
agaaaagagccaggaucagccagg

SEQ ID NO: 9924 - RNA, 24 nt, Human
agaaagaccuccugacuccauguu

SEQ ID NO: 9925 - RNA, 24 nt, Human
agaaauauuauuacaagguuucag

SEQ ID NO: 9926 - RNA, 24 nt, Human
agaaauccucguugugguuucaug

SEQ ID NO: 9927 - RNA, 24 nt, Human
agaaauugcccaacucaugucccu

SEQ ID NO: 9928 - RNA, 24 nt, Human
agaacacauucuaugguuccagga

SEQ ID NO: 9929 - RNA, 24 nt, Human
agaacaguccccugguacacuguc

SEQ ID NO: 9930 - RNA, 24 nt, Human
agaagaaaauaaucuucucauuuu

SEQ ID NO: 9931 - RNA, 22 nt, Human
agaagaucccugcucugaguca

SEQ ID NO: 9932 - RNA, 24 nt, Human
agaagcccaaaggaauugcacugu

SEQ ID NO: 9933 - RNA, 22 nt, Human
agaaggguggaaacaguugugc

SEQ ID NO: 9934 - RNA, 24 nt, Human
agaaguauuuuuagaauaagaauu

SEQ ID NO: 9935 - RNA, 24 nt, Human
agaaugcugacaacgauugguucc

SEQ ID NO: 9936 - RNA, 24 nt, Human
agaaugcuguguuccuucgcugga

SEQ ID NO: 9937 - RNA, 22 nt, Human
agaauuccucaggcugcaagug

SEQ ID NO: 9938 - RNA, 22 nt, Human
agacacaguaggaguagaucuc

SEQ ID NO: 9939 - RNA, 24 nt, Human
agacaucauucaguuucuaauauu

SEQ ID NO: 9940 - RNA, 22 nt, Human
agacaucuccagccuuuggagu

SEQ ID NO: 9941 - RNA, 24 nt, Human
agaccuugucacugugcuugccca

SEQ ID NO: 9942 - RNA, 22 nt, Human
agacggagguuugagcugagua

SEQ ID NO: 9943 - RNA, 24 nt, Human
agacguaccgugcggacgagugga

SEQ ID NO: 9944 - RNA, 22 nt, Human
agacucuucuguuaccaccaag

SEQ ID NO: 9945 - RNA, 24 nt, Human
agacuggaaucaugagcaacaaug

SEQ ID NO: 9946 - RNA, 23 nt, Human
agacuggauacaugaacuguggc

SEQ ID NO: 9947 - RNA, 22 nt, Human
agacuggccucaagcucccaga

SEQ ID NO: 9948 - RNA, 22 nt, Human
agacuuaauuccaauuccaggu

SEQ ID NO: 9949 - RNA, 24 nt, Human
agagaaaagccuguuuaccaagga

SEQ ID NO: 9950 - RNA, 24 nt, Human
agagaagagacgagauguacaaga

SEQ ID NO: 9951 - RNA, 22 nt, Human
agagacggggccuugccauguu

SEQ ID NO: 9952 - RNA, 22 nt, Human
agagacugagcagaccauggug

SEQ ID NO: 9953 - RNA, 24 nt, Human
agagaggaugagaggcaggagagc

SEQ ID NO: 9954 - RNA, 24 nt, Human
agagaggggcaguuaguauuagug

SEQ ID NO: 9955 - RNA, 22 nt, Human
agagagugaggcacaacacaag

SEQ ID NO: 9956 - RNA, 22 nt, Human
agagauaaagagguuuaggcag

SEQ ID NO: 9957 - RNA, 24 nt, Human
agagaugcagcgccgggcugugug

SEQ ID NO: 9958 - RNA, 24 nt, Human
agagauggcagcagcagcugcagg

SEQ ID NO: 9959 - RNA, 22 nt, Human
agagauggguuucaccauguug

SEQ ID NO: 9960 - RNA, 24 nt, Human
agagcacauuuuuguauaaacaaa

SEQ ID NO: 9961 - RNA, 22 nt, Human
agagcagguucuucgugaguuc

SEQ ID NO: 9962 - RNA, 24 nt, Human
agagcagucaggagacaagcauaa

SEQ ID NO: 9963 - RNA, 24 nt, Human
agagcauaccuuccaagaaacugg

SEQ ID NO: 9964 - RNA, 22 nt, Human
agagccucuggcgucucuuucu

SEQ ID NO: 9965 - RNA, 22 nt, Human
agagcgagacuccaucucaaaa

SEQ ID NO: 9966 - RNA, 24 nt, Human
agagcgcgcacggcucgcuggagc

SEQ ID NO: 9967 - RNA, 24 nt, Human
agagcuacagccagggauagagca

SEQ ID NO: 9968 - RNA, 24 nt, Human
agaggaacuuaagaaguauggagu

SEQ ID NO: 9969 - RNA, 22 nt, Human
agaggaggcugcaaacccuuag

SEQ ID NO: 9970 - RNA, 24 nt, Human
agaggcagaccagcuuuauuuuug

SEQ ID NO: 9971 - RNA, 24 nt, Human
agaggcaggcgccagggggaaccc

SEQ ID NO: 9972 - RNA, 22 nt, Human
agaggcugcuuggagcaaaaua

SEQ ID NO: 9973 - RNA, 22 nt, Human
agaggcuggggaauggggguuc

SEQ ID NO: 9974 - RNA, 22 nt, Human
agagggaggaagggugggcaag

SEQ ID NO: 9975 - RNA, 22 nt, Human
agagggggaggaucugaaggaa

SEQ ID NO: 9976 - RNA, 24 nt, Human
agaggguaacucccggcggagggg

SEQ ID NO: 9977 - RNA, 24 nt, Human
agagguaguuugggagcauggggg

SEQ ID NO: 9978 - RNA, 24 nt, Human
agagguauaccugucucuaaagga

SEQ ID NO: 9979 - RNA, 24 nt, Human
agagguccugauucaguuuaucaa

SEQ ID NO: 9980 - RNA, 20 nt, Human
agagguggaaugugucuggc

SEQ ID NO: 9981 - RNA, 24 nt, Human
agaggugggguuucaucauggggg

SEQ ID NO: 9982 - RNA, 24 nt, Human
agagguucugcuggaacaagcugg

SEQ ID NO: 9983 - RNA, 24 nt, Human
agaguaagcucuauuaugaaauac

SEQ ID NO: 9984 - RNA, 22 nt, Human
agaguguaauuaguauuuauau

SEQ ID NO: 9985 - RNA, 24 nt, Human
agaguucaugggauagaccgcagg

SEQ ID NO: 9986 - RNA, 24 nt, Human
agaguuccagccagaagcuacagc

SEQ ID NO: 9987 - RNA, 24 nt, Human
agaguuguucauccaggagacagc

SEQ ID NO: 9988 - RNA, 22 nt, Human
agauagccagucuuggaauccc

SEQ ID NO: 9989 - RNA, 22 nt, Human
agauaguucucuguuguugggg

SEQ ID NO: 9990 - RNA, 24 nt, Human
agauauuugcaaaacuuuguucac

SEQ ID NO: 9991 - RNA, 22 nt, Human
agaucccacugagccccgccug

SEQ ID NO: 9992 - RNA, 24 nt, Human
agaugauugugugugcggucggcu

SEQ ID NO: 9993 - RNA, 24 nt, Human
agauguaccuaugguccuaguagg

SEQ ID NO: 9994 - RNA, 22 nt, Human
agcaaaagccaugcccaggaga

SEQ ID NO: 9995 - RNA, 24 nt, Human
agcaaacagaagcaauugcaccgu

SEQ ID NO: 9996 - RNA, 24 nt, Human
agcaagaugaacagaaucuguauu

SEQ ID NO: 9997 - RNA, 24 nt, Human
agcaaggugguaaaagauacaacc

SEQ ID NO: 9998 - RNA, 24 nt, Human
agcaagguugcagaucgguccuuc

SEQ ID NO: 9999 - RNA, 24 nt, Human
agcaaguggaaagacgcagcaauu

SEQ ID NO: 10000 - RNA, 22 nt, Human
agcaaguguugaaacagcuggu

SEQ ID NO: 10001 - RNA, 22 nt, Human
agcaauggguaacugaagcuuu

SEQ ID NO: 10002 - RNA, 22 nt, Human
agcaaugugugaagcuuucgga

SEQ ID NO: 10003 - RNA, 22 nt, Human
agcacagcguagaucuggaaag

SEQ ID NO: 10004 - RNA, 22 nt, Human
agcagcacucaauauuccacag

SEQ ID NO: 10005 - RNA, 22 nt, Human
agcagcuguaagugccauugcc

SEQ ID NO: 10006 - RNA, 24 nt, Human
agcaggacauggagaaguacaucc

SEQ ID NO: 10007 - RNA, 24 nt, Human
agcagguguguaaacagaggguuc

SEQ ID NO: 10008 - RNA, 22 nt, Human
agcagugugggugcuggauuga

SEQ ID NO: 10009 - RNA, 21 nt, Human
agcaucugaggcaguuuccua

SEQ ID NO: 10010 - RNA, 24 nt, Human
agcauguacauauugccgaucugg

SEQ ID NO: 10011 - RNA, 22 nt, Human
agcauuuucugugcuuugauca

SEQ ID NO: 10012 - RNA, 22 nt, Human
agccacaguguggcuauaauga

SEQ ID NO: 10013 - RNA, 24 nt, Human
agccagaaguagaauugcugauua

SEQ ID NO: 10014 - RNA, 24 nt, Human
agccagagaauaagcuuuuuccug

SEQ ID NO: 10015 - RNA, 22 nt, Human
agccagagauucggggcaguag

SEQ ID NO: 10016 - RNA, 22 nt, Human
agccagagcaauggugauguuc

SEQ ID NO: 10017 - RNA, 22 nt, Human
agccaguauuuuccaaaccgcg

SEQ ID NO: 10018 - RNA, 24 nt, Human
agccaguuuuuaucagcagcaaua

SEQ ID NO: 10019 - RNA, 24 nt, Human
agccaugcccuaacgacaggcugg

SEQ ID NO: 10020 - RNA, 24 nt, Human
agcccauuugcaacucugccucug

SEQ ID NO: 10021 - RNA, 22 nt, Human
agcccugaccguucugcauaug

SEQ ID NO: 10022 - RNA, 24 nt, Human
agcccuugccccacugaaugcugc

SEQ ID NO: 10023 - RNA, 24 nt, Human
agccguagaauuugaccuugcgaa

SEQ ID NO: 10024 - RNA, 24 nt, Human
agccucagcuucuccuggauuugc

SEQ ID NO: 10025 - RNA, 22 nt, Human
agccucuucgggaugucuucca

SEQ ID NO: 10026 - RNA, 22 nt, Human
agccugaaagugcucccauagc

SEQ ID NO: 10027 - RNA, 22 nt, Human
agccuggagugcaguggugcaa

SEQ ID NO: 10028 - RNA, 24 nt, Human
agccuggugacaagaaucggacug

SEQ ID NO: 10029 - RNA, 24 nt, Human
agccuuggguuucucgcauucagu

SEQ ID NO: 10030 - RNA, 22 nt, Human
agcggcaaagucuauggccuuu

SEQ ID NO: 10031 - RNA, 22 nt, Human
agcuaucccacaaucucuucuu

SEQ ID NO: 10032 - RNA, 22 nt, Human
agcuaucucaguauuugggguc

SEQ ID NO: 10033 - RNA, 24 nt, Human
agcuauugcuauucaauggagacg

SEQ ID NO: 10034 - RNA, 24 nt, Human
agcucgugaucaccaucgccaggg

SEQ ID NO: 10035 - RNA, 22 nt, Human
agcugcugauucuaaacugugg

SEQ ID NO: 10036 - RNA, 24 nt, Human
agcuggacuucuggcgggggccug

SEQ ID NO: 10037 - RNA, 22 nt, Human
agcugugagccugccuuccagu

SEQ ID NO: 10038 - RNA, 22 nt, Human
agcuuccuggugucugcccaga

SEQ ID NO: 10039 - RNA, 24 nt, Human
aggaaaaaagcuucugaaaugaag

SEQ ID NO: 10040 - RNA, 24 nt, Human
aggaaaacauaagcuugaagaagg

SEQ ID NO: 10041 - RNA, 24 nt, Human
aggaaauauauaaaaauguuuaca

SEQ ID NO: 10042 - RNA, 24 nt, Human
aggaaaugucaaaaaggcaaaaug

SEQ ID NO: 10043 - RNA, 22 nt, Human
aggaacuguaacuaugucucug

SEQ ID NO: 10044 - RNA, 24 nt, Human
aggaacuugaaaggaggguaaaaa

SEQ ID NO: 10045 - RNA, 24 nt, Human
aggaagaacaacacaguugagaca

SEQ ID NO: 10046 - RNA, 19 nt, Human
aggaagacgggaggauucu

SEQ ID NO: 10047 - RNA, 24 nt, Human
aggaagcaaaaaaggcuaagcaag

SEQ ID NO: 10048 - RNA, 24 nt, Human
aggaagcacagcuguugguugaag

SEQ ID NO: 10049 - RNA, 24 nt, Human
aggaagcgguacgaacuccacggc

SEQ ID NO: 10050 - RNA, 24 nt, Human
aggaaggaagucccaccaguguuu

SEQ ID NO: 10051 - RNA, 24 nt, Human
aggaaggacuaggcuacagaucag

SEQ ID NO: 10052 - RNA, 24 nt, Human
aggaaggagauuaggagacucuga

SEQ ID NO: 10053 - RNA, 22 nt, Human
aggaaggaugaaaggaaaggga

SEQ ID NO: 10054 - RNA, 24 nt, Human
aggaaggcacuaaggaaagaccac

SEQ ID NO: 10055 - RNA, 24 nt, Human
aggaaggcuggcaccucuggcucu

SEQ ID NO: 10056 - RNA, 24 nt, Human
aggaaggcuuuuucugauuuuuug

SEQ ID NO: 10057 - RNA, 24 nt, Human
aggaaguaugggagugacggacuu

SEQ ID NO: 10058 - RNA, 24 nt, Human
aggaagugccaaaaaugccuggac

SEQ ID NO: 10059 - RNA, 24 nt, Human
aggaagugguccccugauuccaaa

SEQ ID NO: 10060 - RNA, 24 nt, Human
aggaauauuacaguguuaacugcc

SEQ ID NO: 10061 - RNA, 24 nt, Human
aggaaucagggacacacagugugg

SEQ ID NO: 10062 - RNA, 24 nt, Human
aggaaucccuacgaucucgauaua

SEQ ID NO: 10063 - RNA, 24 nt, Human
aggaaugcuaaaaguauggggagu

SEQ ID NO: 10064 - RNA, 24 nt, Human
aggaaugucccgcagggcuuugcg

SEQ ID NO: 10065 - RNA, 22 nt, Human
aggagacaauuccuuggagcuc

SEQ ID NO: 10066 - RNA, 24 nt, Human
aggaggaagaaauguuuucuuagg

SEQ ID NO: 10067 - RNA, 22 nt, Human
aggaggacagaacaaaccagug

SEQ ID NO: 10068 - RNA, 24 nt, Human
aggaggagagaaaagcugguccuc

SEQ ID NO: 10069 - RNA, 24 nt, Human
aggaggccauccagcucaucgcuc

SEQ ID NO: 10070 - RNA, 24 nt, Human
aggagguugagguugcagugagcu

SEQ ID NO: 10071 - RNA, 24 nt, Human
aggaguagggagagcugagacuag

SEQ ID NO: 10072 - RNA, 22 nt, Human
aggaugcuggggcagaaagaug

SEQ ID NO: 10073 - RNA, 24 nt, Human
aggaugugcucaagaguaugaagc

SEQ ID NO: 10074 - RNA, 24 nt, Human
aggcaaaaccauuuauauuuugaa

SEQ ID NO: 10075 - RNA, 22 nt, Human
aggcaagagguugcagugagcu

SEQ ID NO: 10076 - RNA, 24 nt, Human
aggcaccugccuggcccuaaaaag

SEQ ID NO: 10077 - RNA, 24 nt, Human
aggcacguccagagcccuggcuac

SEQ ID NO: 10078 - RNA, 24 nt, Human
aggcacugcuuauuccagugcagc

SEQ ID NO: 10079 - RNA, 24 nt, Human
aggcagaagccagugccauccuua

SEQ ID NO: 10080 - RNA, 24 nt, Human
aggcagacauccgacuucuugccc

SEQ ID NO: 10081 - RNA, 24 nt, Human
aggcagaggcccuguuguggucug

SEQ ID NO: 10082 - RNA, 24 nt, Human
aggcagagggagaguuggcuccuu

SEQ ID NO: 10083 - RNA, 24 nt, Human
aggcagagucucacucugucaccc

SEQ ID NO: 10084 - RNA, 24 nt, Human
aggcagaucguugucuauuucuuc

SEQ ID NO: 10085 - RNA, 24 nt, Human
aggcagcaaauguuacagguccug

SEQ ID NO: 10086 - RNA, 24 nt, Human
aggcagcagaggcaugagcagcga

SEQ ID NO: 10087 - RNA, 24 nt, Human
aggcagcaguugcggccgcuuuua

SEQ ID NO: 10088 - RNA, 24 nt, Human
aggcagcaucugauugugauuugg

SEQ ID NO: 10089 - RNA, 24 nt, Human
aggcagccagaaaccugcggaaaa

SEQ ID NO: 10090 - RNA, 24 nt, Human
aggcagccuggggaacgugguugg

SEQ ID NO: 10091 - RNA, 24 nt, Human
aggcagcuggagaaguuuguccgc

SEQ ID NO: 10092 - RNA, 24 nt, Human
aggcagcuuugccuucucuccccu

SEQ ID NO: 10093 - RNA, 22 nt, Human
aggcaggacucggcugagggcc

SEQ ID NO: 10094 - RNA, 24 nt, Human
aggcaggagaaucgcuuaaacccg

SEQ ID NO: 10095 - RNA, 24 nt, Human
aggcaggagaaucgcuugaaccug

SEQ ID NO: 10096 - RNA, 24 nt, Human
aggcaggauagugacaguggcucg

SEQ ID NO: 10097 - RNA, 24 nt, Human
aggcaggcuuagcagcuaagggag

SEQ ID NO: 10098 - RNA, 24 nt, Human
aggcaguaccauacuuggaguuca

SEQ ID NO: 10099 - RNA, 22 nt, Human
aggcagucuggggcagcugguu

SEQ ID NO: 10100 - RNA, 24 nt, Human
aggcaguggcaagagggguucagg

SEQ ID NO: 10101 - RNA, 22 nt, Human
aggcaguguuguuccugauugc

SEQ ID NO: 10102 - RNA, 24 nt, Human
aggcaucccguaaaguuguaguug

SEQ ID NO: 10103 - RNA, 24 nt, Human
aggcauccugcaguacguggcucg

SEQ ID NO: 10104 - RNA, 24 nt, Human
aggcaugacuaagggguaaggguu

SEQ ID NO: 10105 - RNA, 24 nt, Human
aggcauggacgcuuucaugggugg

SEQ ID NO: 10106 - RNA, 24 nt, Human
aggcauggaggagcugugugguca

SEQ ID NO: 10107 - RNA, 24 nt, Human
aggcauguguuggcaaaggcuguu

SEQ ID NO: 10108 - RNA, 22 nt, Human
aggccagagaggacucucuuuu

SEQ ID NO: 10109 - RNA, 24 nt, Human
aggccauuaacuguuugaugcgag

SEQ ID NO: 10110 - RNA, 24 nt, Human
aggccuuuguggaucuucaugccc

SEQ ID NO: 10111 - RNA, 24 nt, Human
aggcgaggcuaggugagccguggg

SEQ ID NO: 10112 - RNA, 24 nt, Human
aggcgaggggaacuggccgcguga

SEQ ID NO: 10113 - RNA, 24 nt, Human
aggcgaucaggagucugugccuug

SEQ ID NO: 10114 - RNA, 24 nt, Human
aggcggcguggacagcggccccgg

SEQ ID NO: 10115 - RNA, 24 nt, Human
aggcguucacucccgccgggccga

SEQ ID NO: 10116 - RNA, 23 nt, Human
aggcguuggggacacugcugggu

SEQ ID NO: 10117 - RNA, 22 nt, Human
aggcuacugcuguuagaaagcu

SEQ ID NO: 10118 - RNA, 22 nt, Human
aggcuagagugcaguggcuauu

SEQ ID NO: 10119 - RNA, 22 nt, Human
aggcugacaucugaggacucug

SEQ ID NO: 10120 - RNA, 22 nt, Human
aggcuggauuccaccuacaaaa

SEQ ID NO: 10121 - RNA, 24 nt, Human
aggcuguagaaccugccagacugu

SEQ ID NO: 10122 - RNA, 24 nt, Human
aggcuucgcugggagcugagaaca

SEQ ID NO: 10123 - RNA, 24 nt, Human
aggcuuguuuggcuuuuuguuuau

SEQ ID NO: 10124 - RNA, 24 nt, Human
aggcuuuuccauucaaacuuuguc

SEQ ID NO: 10125 - RNA, 24 nt, Human
agggaagcccagggguccuguuug

SEQ ID NO: 10126 - RNA, 22 nt, Human
agggaagggagguggaagcuca

SEQ ID NO: 10127 - RNA, 24 nt, Human
agggaaguauaccuguccugccag

SEQ ID NO: 10128 - RNA, 24 nt, Human
agggaaguugggacgaagcccagg

SEQ ID NO: 10129 - RNA, 24 nt, Human
agggaauaacaugauuuaagguug

SEQ ID NO: 10130 - RNA, 24 nt, Human
agggacaccucacgucgcugacag

SEQ ID NO: 10131 - RNA, 24 nt, Human
agggaccaaaucuccaacuuuuuu

SEQ ID NO: 10132 - RNA, 24 nt, Human
agggaccaggagcugcugcgaacu

SEQ ID NO: 10133 - RNA, 22 nt, Human
agggaccuaccaucuaacacca

SEQ ID NO: 10134 - RNA, 24 nt, Human
agggagaagacaggcgcagucagc

SEQ ID NO: 10135 - RNA, 24 nt, Human
agggagacaugaggugguucuaug

SEQ ID NO: 10136 - RNA, 24 nt, Human
agggagacuuuguacauuucaggc

SEQ ID NO: 10137 - RNA, 24 nt, Human
agggagaucuggaguucuguuucc

SEQ ID NO: 10138 - RNA, 24 nt, Human
agggagccccgcugggcccagacc

SEQ ID NO: 10139 - RNA, 22 nt, Human
agggagccucaaauggcacggu

SEQ ID NO: 10140 - RNA, 24 nt, Human
agggagcgcaggcaagauuugaau

SEQ ID NO: 10141 - RNA, 21 nt, Human
agggagcuguguaaauggacc

SEQ ID NO: 10142 - RNA, 24 nt, Human
agggaggacagcaggcuggggcgg

SEQ ID NO: 10143 - RNA, 24 nt, Human
agggaggcacaaaccuaacuguac

SEQ ID NO: 10144 - RNA, 24 nt, Human
agggauaggcucacuuuguuaaua

SEQ ID NO: 10145 - RNA, 24 nt, Human
agggauggacccacuuucuccacc

SEQ ID NO: 10146 - RNA, 23 nt, Human
agggauguucaggacucugcagc

SEQ ID NO: 10147 - RNA, 24 nt, Human
agggauuaucuacaccuucacuuu

SEQ ID NO: 10148 - RNA, 24 nt, Human
agggauugagccaagaggugaggg

SEQ ID NO: 10149 - RNA, 24 nt, Human
agggcgcuguggacgcggugagga

SEQ ID NO: 10150 - RNA, 24 nt, Human
agggcgugaugaccggcacuuugu

SEQ ID NO: 10151 - RNA, 24 nt, Human
agggcuguaccagcuggucagggu

SEQ ID NO: 10152 - RNA, 24 nt, Human
aggggcucacggaggaagugcugc

SEQ ID NO: 10153 - RNA, 22 nt, Human
aggggcuuaauagcgcggugag

SEQ ID NO: 10154 - RNA, 24 nt, Human
agggggcagcugugccaucagugg

SEQ ID NO: 10155 - RNA, 24 nt, Human
agggggcugcuggcugagccccaa

SEQ ID NO: 10156 - RNA, 24 nt, Human
agggggugggaggugugcauaaga

SEQ ID NO: 10157 - RNA, 24 nt, Human
agggguaggcugggaggggcugcc

SEQ ID NO: 10158 - RNA, 24 nt, Human
aggggucguuguaaagccagacuc

SEQ ID NO: 10159 - RNA, 24 nt, Human
agggucccuggaaaaggguggagu

SEQ ID NO: 10160 - RNA, 22 nt, Human
agggucuacauuucucugggag

SEQ ID NO: 10161 - RNA, 24 nt, Human
agggugagcccccgacuggagaga

SEQ ID NO: 10162 - RNA, 22 nt, Human
aggguuguuaguuuuuugguug

SEQ ID NO: 10163 - RNA, 24 nt, Human
agguaagaauucucauuugcuaaa

SEQ ID NO: 10164 - RNA, 22 nt, Human
agguauugccuucucuggaagg

SEQ ID NO: 10165 - RNA, 24 nt, Human
agguauuuggugucauguuuugga

SEQ ID NO: 10166 - RNA, 24 nt, Human
aggucagcccugagcuguugugca

SEQ ID NO: 10167 - RNA, 22 nt, Human
agguccaggucuucacuagggg

SEQ ID NO: 10168 - RNA, 22 nt, Human
agguccucacacacagcucugc

SEQ ID NO: 10169 - RNA, 22 nt, Human
aggucugagcuugaggaggacu

SEQ ID NO: 10170 - RNA, 22 nt, Human
aggucuggacagugcaaguugc

SEQ ID NO: 10171 - RNA, 24 nt, Human
agguguguauuuguuauucugaaa

SEQ ID NO: 10172 - RNA, 22 nt, Human
aggugugugcauuugccagggg

SEQ ID NO: 10173 - RNA, 24 nt, Human
agguguuguaggcauagucacaga

SEQ ID NO: 10174 - RNA, 22 nt, Human
agguuauuuugucucucugucu

SEQ ID NO: 10175 - RNA, 22 nt, Human
aguaauuuagggagcagcccua

SEQ ID NO: 10176 - RNA, 22 nt, Human
aguagcgagggaauggugccgc

SEQ ID NO: 10177 - RNA, 22 nt, Human
agucaacagggagccccagggu

SEQ ID NO: 10178 - RNA, 24 nt, Human
agucaaguugcaggaucagcaggu

SEQ ID NO: 10179 - RNA, 24 nt, Human
agucaccaacagcacugucugguc

SEQ ID NO: 10180 - RNA, 24 nt, Human
agucauggcaaauagaauugggcu

SEQ ID NO: 10181 - RNA, 24 nt, Human
agucauuauauaaauuagcaucua

SEQ ID NO: 10182 - RNA, 24 nt, Human
agucauugaagauacuuggcacua

SEQ ID NO: 10183 - RNA, 24 nt, Human
agucauuguauguagagguggagu

SEQ ID NO: 10184 - RNA, 21 nt, Human
aguccaguugacaugcuauua

SEQ ID NO: 10185 - RNA, 22 nt, Human
agucuccugaguagcugggguu

SEQ ID NO: 10186 - RNA, 24 nt, Human
agucugaagaugggcauuaugcaa

SEQ ID NO: 10187 - RNA, 24 nt, Human
agucugauuaguugcugggauggu

SEQ ID NO: 10188 - RNA, 22 nt, Human
agucugggauguucuaccauac

SEQ ID NO: 10189 - RNA, 24 nt, Human
agugaagaaagguacaucccaagg

SEQ ID NO: 10190 - RNA, 24 nt, Human
agugaagaauuuccagaagagguu

SEQ ID NO: 10191 - RNA, 24 nt, Human
agugaagagaaccagaaaaagucu

SEQ ID NO: 10192 - RNA, 24 nt, Human
agugaguucagaauauccuacacc

SEQ ID NO: 10193 - RNA, 24 nt, Human
agugauggggaacgccaaggagaa

SEQ ID NO: 10194 - RNA, 22 nt, Human
agugauucuccugcuucagccu

SEQ ID NO: 10195 - RNA, 24 nt, Human
agugcagaaacuuacuuugaaagu

SEQ ID NO: 10196 - RNA, 24 nt, Human
agugcagagggcucauugggaaaa

SEQ ID NO: 10197 - RNA, 22 nt, Human
agugcagauuggacgguuaauu

SEQ ID NO: 10198 - RNA, 24 nt, Human
agugcaguggcgcaaucuuggcuc

SEQ ID NO: 10199 - RNA, 24 nt, Human
agugcaguucucaaauggcugccu

SEQ ID NO: 10200 - RNA, 24 nt, Human
agugcauagugaggccacugcugc

SEQ ID NO: 10201 - RNA, 24 nt, Human
aguggaagagaagaacuugaaccc

SEQ ID NO: 10202 - RNA, 24 nt, Human
aguggacagcagccacccauuuga

SEQ ID NO: 10203 - RNA, 24 nt, Human
aguggaccagagccuucgucugga

SEQ ID NO: 10204 - RNA, 24 nt, Human
aguggcacagaccuaugggcuugg

SEQ ID NO: 10205 - RNA, 22 nt, Human
aguggcauaggagggauuaaaa

SEQ ID NO: 10206 - RNA, 24 nt, Human
aguggcuaaugacacaaucauuac

SEQ ID NO: 10207 - RNA, 24 nt, Human
aguggcucagcuucucuuauggug

SEQ ID NO: 10208 - RNA, 24 nt, Human
aguggcugauugacacccucuaug

SEQ ID NO: 10209 - RNA, 22 nt, Human
aguggguuggugcaaaaguaau

SEQ ID NO: 10210 - RNA, 24 nt, Human
agugguuagaauacagggugacuc

SEQ ID NO: 10211 - RNA, 22 nt, Human
aguguagugggaagccuuccuc

SEQ ID NO: 10212 - RNA, 22 nt, Human
aguguaucauucuccuuaugug

SEQ ID NO: 10213 - RNA, 22 nt, Human
aguguggagucgugcugcucca

SEQ ID NO: 10214 - RNA, 24 nt, Human
aguuaggaggugcugcuccuccuc

SEQ ID NO: 10215 - RNA, 22 nt, Human
aguuaucagagaaauccuuuug

SEQ ID NO: 10216 - RNA, 22 nt, Human
aguuaugugaugcuuugaagca

SEQ ID NO: 10217 - RNA, 22 nt, Human
aguucacauuaugcaucucagg

SEQ ID NO: 10218 - RNA, 24 nt, Human
aguucugcucgcucucagucucca

SEQ ID NO: 10219 - RNA, 22 nt, Human
aguucuucuccugaaacuggac

SEQ ID NO: 10220 - RNA, 24 nt, Human
aguugcagaaaggaaugucaguca

SEQ ID NO: 10221 - RNA, 24 nt, Human
aguuggagguuacagugagccgag

SEQ ID NO: 10222 - RNA, 24 nt, Human
aguuggugacuaaucccaugugga

SEQ ID NO: 10223 - RNA, 21 nt, Human
aguuguuuuacuccauccugu

SEQ ID NO: 10224 - RNA, 22 nt, Human
auaagacugccagugaccaagc

SEQ ID NO: 10225 - RNA, 22 nt, Human
auaagauauuuacaagacaacc

SEQ ID NO: 10226 - RNA, 24 nt, Human
auaagauuguaauggagcuguaaa

SEQ ID NO: 10227 - RNA, 22 nt, Human
auaaggcaguggguuuggcuga

SEQ ID NO: 10228 - RNA, 22 nt, Human
auaaucccaguccuuagguagu

SEQ ID NO: 10229 - RNA, 24 nt, Human
auacaaagacagcacccucaucau

SEQ ID NO: 10230 - RNA, 22 nt, Human
auacaugugccauguuggugug

SEQ ID NO: 10231 - RNA, 22 nt, Human
auaccagcacaguggaugggga

SEQ ID NO: 10232 - RNA, 24 nt, Human
auacugaagacaauaccucuccag

SEQ ID NO: 10233 - RNA, 22 nt, Human
auacugagagaaaaagcuuguc

SEQ ID NO: 10234 - RNA, 22 nt, Human
auagacuguccaguguaggugg

SEQ ID NO: 10235 - RNA, 22 nt, Human
auagcaacucugcuuccuugcc

SEQ ID NO: 10236 - RNA, 22 nt, Human
auagcaguaauaccagcauaau

SEQ ID NO: 10237 - RNA, 24 nt, Human
auaggccagugagcccaggccccu

SEQ ID NO: 10238 - RNA, 22 nt, Human
auagggguucugcuucucggcu

SEQ ID NO: 10239 - RNA, 24 nt, Human
auagugaaugaccagcuggcugua

SEQ ID NO: 10240 - RNA, 22 nt, Human
auagugcgaagggacucagggu

SEQ ID NO: 10241 - RNA, 22 nt, Human
auauuggugaaaugcuagcaaa

SEQ ID NO: 10242 - RNA, 22 nt, Human
auauuguguauucaggauagca

SEQ ID NO: 10243 - RNA, 23 nt, Human
aucaaggcaugggacauuggggu

SEQ ID NO: 10244 - RNA, 22 nt, Human
aucacagaggcuuaagugcuga

SEQ ID NO: 10245 - RNA, 21 nt, Human
aucacaguuacuuucucagca

SEQ ID NO: 10246 - RNA, 22 nt, Human
aucacauugccagugauuaccc

SEQ ID NO: 10247 - RNA, 24 nt, Human
aucacauuucaucaagcucagaug

SEQ ID NO: 10248 - RNA, 24 nt, Human
aucagcuccgacuuuggacgggca

SEQ ID NO: 10249 - RNA, 24 nt, Human
aucagguccuccucccccuccacc

SEQ ID NO: 10250 - RNA, 24 nt, Human
aucaucugagcuaucuaauuuuua

SEQ ID NO: 10251 - RNA, 24 nt, Human
aucaugcuuaaugggagaaaacug

SEQ ID NO: 10252 - RNA, 24 nt, Human
aucauuuugagcaaaauaucuguu

SEQ ID NO: 10253 - RNA, 22 nt, Human
auccacauuuuuugcucuacug

SEQ ID NO: 10254 - RNA, 22 nt, Human
auccaggcuggagugcaguggu

SEQ ID NO: 10255 - RNA, 24 nt, Human
aucccgggcacaggcagaggccag

SEQ ID NO: 10256 - RNA, 24 nt, Human
auccgggugaagaagcaggucugg

SEQ ID NO: 10257 - RNA, 24 nt, Human
auccugaggccgaagauugggcug

SEQ ID NO: 10258 - RNA, 24 nt, Human
auccugccuuuccacuguaccacu

SEQ ID NO: 10259 - RNA, 22 nt, Human
auccuuaaagugggauuuacca

SEQ ID NO: 10260 - RNA, 24 nt, Human
aucgaacuucgcuucuuggugaua

SEQ ID NO: 10261 - RNA, 22 nt, Human
aucuacugucaguguggcauga

SEQ ID NO: 10262 - RNA, 22 nt, Human
aucuagagaggcagucuggcca

SEQ ID NO: 10263 - RNA, 24 nt, Human
aucuauauauaaaaagucccacac

SEQ ID NO: 10264 - RNA, 22 nt, Human
aucuccauguaucuuugggacc

SEQ ID NO: 10265 - RNA, 22 nt, Human
aucugcccgccucguccuccca

SEQ ID NO: 10266 - RNA, 22 nt, Human
aucugguuagggcccacuuccu

SEQ ID NO: 10267 - RNA, 22 nt, Human
aucuucagugcucuugggggau

SEQ ID NO: 10268 - RNA, 22 nt, Human
aucuuugccuuuaugccucuag

SEQ ID NO: 10269 - RNA, 24 nt, Human
aucuuuguacugucaacuuuuugg

SEQ ID NO: 10270 - RNA, 24 nt, Human
augaagcagaaccuggaugagcuu

SEQ ID NO: 10271 - RNA, 24 nt, Human
augaagccagcuaccagccccucg

SEQ ID NO: 10272 - RNA, 24 nt, Human
augaagcgagauggcaguuugugc

SEQ ID NO: 10273 - RNA, 24 nt, Human
augaagcuagauaccuaaagcuac

SEQ ID NO: 10274 - RNA, 24 nt, Human
augaagcuagcaacugaaagucua

SEQ ID NO: 10275 - RNA, 22 nt, Human
augaaggauuccugcaucacug

SEQ ID NO: 10276 - RNA, 24 nt, Human
augaauuuuccgaugucgugcaag

SEQ ID NO: 10277 - RNA, 22 nt, Human
augacacaguggggccaguugg

SEQ ID NO: 10278 - RNA, 24 nt, Human
augacccguuaccuggaguccugg

SEQ ID NO: 10279 - RNA, 24 nt, Human
augacuguagcagaaaucucccag

SEQ ID NO: 10280 - RNA, 24 nt, Human
augagauuaucaaaagauguguua

SEQ ID NO: 10281 - RNA, 22 nt, Human
augagccugauccucauaaaca

SEQ ID NO: 10282 - RNA, 24 nt, Human
augaggccuuuguucgggaggugc

SEQ ID NO: 10283 - RNA, 22 nt, Human
augaucauguaugauacugcaa

SEQ ID NO: 10284 - RNA, 22 nt, Human
augaugccguauuuaccaagag

SEQ ID NO: 10285 - RNA, 24 nt, Human
augaugucagcuugaacagucaug

SEQ ID NO: 10286 - RNA, 24 nt, Human
augcaagccuuuuucaguucaaga

SEQ ID NO: 10287 - RNA, 22 nt, Human
augcacccaguuacacucucca

SEQ ID NO: 10288 - RNA, 22 nt, Human
augcacugguauaauucacugg

SEQ ID NO: 10289 - RNA, 24 nt, Human
augcacuuuaguuuuuggucuguu

SEQ ID NO: 10290 - RNA, 24 nt, Human
augcagcaggugucacagaaggac

SEQ ID NO: 10291 - RNA, 24 nt, Human
augcagcuuuucccuacugucacc

SEQ ID NO: 10292 - RNA, 22 nt, Human
augcauagggagagucucuaaa

SEQ ID NO: 10293 - RNA, 24 nt, Human
augcauuuguauguucauauaaca

SEQ ID NO: 10294 - RNA, 24 nt, Human
augccugguagagccccacacaug

SEQ ID NO: 10295 - RNA, 22 nt, Human
augccuguaaucccagcauuuu

SEQ ID NO: 10296 - RNA, 24 nt, Human
augccuguaaucccagcauuuuga

SEQ ID NO: 10297 - RNA, 24 nt, Human
augccuuucuccacauaagcauca

SEQ ID NO: 10298 - RNA, 24 nt, Human
augccuuugcccuccagccugggc

SEQ ID NO: 10299 - RNA, 22 nt, Human
augcucgguuuaagguacacug

SEQ ID NO: 10300 - RNA, 22 nt, Human
augcugcacuuccacaugaagu

SEQ ID NO: 10301 - RNA, 24 nt, Human
augcugccgggcacuuggcgggcc

SEQ ID NO: 10302 - RNA, 22 nt, Human
augcuggaauauuccuaacauu

SEQ ID NO: 10303 - RNA, 24 nt, Human
augcugucggggauucugcugggc

SEQ ID NO: 10304 - RNA, 24 nt, Human
auggaacgcucggaggagcucaac

SEQ ID NO: 10305 - RNA, 19 nt, Human
auggaaguaaucugcuuaa

SEQ ID NO: 10306 - RNA, 24 nt, Human
auggaccgcuagggcccggccuag

SEQ ID NO: 10307 - RNA, 21 nt, Human
auggagacaaggugguggcag

SEQ ID NO: 10308 - RNA, 24 nt, Human
auggagccacaaaguuuccagaug

SEQ ID NO: 10309 - RNA, 23 nt, Human
auggagcccugaauguugaccug

SEQ ID NO: 10310 - RNA, 24 nt, Human
auggagcugugaguuccuggaugg

SEQ ID NO: 10311 - RNA, 22 nt, Human
auggaggaagaaccccuuggau

SEQ ID NO: 10312 - RNA, 24 nt, Human
auggaucacagggucuaagggugg

SEQ ID NO: 10313 - RNA, 22 nt, Human
auggcucugaggaaucugugug

SEQ ID NO: 10314 - RNA, 22 nt, Human
auggcugugugcuucagcggcu

SEQ ID NO: 10315 - RNA, 22 nt, Human
auggcuuauuccauggccauca

SEQ ID NO: 10316 - RNA, 22 nt, Human
auggcuucugucuuggaaauuu

SEQ ID NO: 10317 - RNA, 22 nt, Human
augggagaugaaaguggagggg

SEQ ID NO: 10318 - RNA, 24 nt, Human
augggucagcgaucuccugacuca

SEQ ID NO: 10319 - RNA, 22 nt, Human
auggguuuccugugacauuuug

SEQ ID NO: 10320 - RNA, 22 nt, Human
augguacugagagaguaugugu

SEQ ID NO: 10321 - RNA, 24 nt, Human
auggugcagcagcuccuggaggcu

SEQ ID NO: 10322 - RNA, 24 nt, Human
augguuucuaaaucaguuauuuuc

SEQ ID NO: 10323 - RNA, 22 nt, Human
auguaagcuuuguuaccaucug

SEQ ID NO: 10324 - RNA, 24 nt, Human
auguaccagugcugccacgggagc

SEQ ID NO: 10325 - RNA, 22 nt, Human
augucagugaagaggucuggca

SEQ ID NO: 10326 - RNA, 22 nt, Human
augugcaaacuugggcaaagcc

SEQ ID NO: 10327 - RNA, 24 nt, Human
augugccccagcucuuccgggagc

SEQ ID NO: 10328 - RNA, 22 nt, Human
augugccuccugaggugugucg

SEQ ID NO: 10329 - RNA, 22 nt, Human
auguggcuuuggauuucuggag

SEQ ID NO: 10330 - RNA, 22 nt, Human
auguguauguucugccauuucc

SEQ ID NO: 10331 - RNA, 24 nt, Human
auguugcacccuuguuucuacacc

SEQ ID NO: 10332 - RNA, 24 nt, Human
auuaagcagauagggagaagggaa

SEQ ID NO: 10333 - RNA, 22 nt, Human
auuacagguaugagccagcaug

SEQ ID NO: 10334 - RNA, 22 nt, Human
auuaccuguugccacuuggaau

SEQ ID NO: 10335 - RNA, 22 nt, Human
auuacuuuugcaccaaucuaau

SEQ ID NO: 10336 - RNA, 22 nt, Human
auuagauugucauaggagugca

SEQ ID NO: 10337 - RNA, 22 nt, Human
auuagcuauagcaaaaggcuua

SEQ ID NO: 10338 - RNA, 22 nt, Human
auuauaucucuccugaaauccu

SEQ ID NO: 10339 - RNA, 22 nt, Human
auucacuuccugaaacgugcac

SEQ ID NO: 10340 - RNA, 22 nt, Human
auucaguucuaaggucagugcc

SEQ ID NO: 10341 - RNA, 24 nt, Human
auucuaccaagcagagauggagga

SEQ ID NO: 10342 - RNA, 22 nt, Human
auucuuacuuugaauggcuuau

SEQ ID NO: 10343 - RNA, 22 nt, Human
auucuuuucuaagcccuacuug

SEQ ID NO: 10344 - RNA, 22 nt, Human
auugauuauaacacacagcuga

SEQ ID NO: 10345 - RNA, 24 nt, Human
auugcacuccagccugggccacag

SEQ ID NO: 10346 - RNA, 22 nt, Human
auuggagagagcacgauuuauu

SEQ ID NO: 10347 - RNA, 22 nt, Human
auuggagagccacuugagguca

SEQ ID NO: 10348 - RNA, 22 nt, Human
auuggugcccucgaagaccuca

SEQ ID NO: 10349 - RNA, 24 nt, Human
auuguacaaauaagugugcaguau

SEQ ID NO: 10350 - RNA, 24 nt, Human
auuguucugcuguucuuuguccaa

SEQ ID NO: 10351 - RNA, 24 nt, Human
auuuaagcaaggcaaaggagauag

SEQ ID NO: 10352 - RNA, 22 nt, Human
auuuacucaggccggguguggu

SEQ ID NO: 10353 - RNA, 22 nt, Human
auuuauuuucccucaaguaccu

SEQ ID NO: 10354 - RNA, 22 nt, Human
auuuccacaaugucugugaacu

SEQ ID NO: 10355 - RNA, 22 nt, Human
auuuggaaggagcugcacagca

SEQ ID NO: 10356 - RNA, 22 nt, Human
auuuggggaaauguguuucugg

SEQ ID NO: 10357 - RNA, 22 nt, Human
auuuuugguaucuguggguugg

SEQ ID NO: 10358 - RNA, 22 nt, Human
caaaaaauucaccuuugggcuu

SEQ ID NO: 10359 - RNA, 22 nt, Human
caaaaguacuugccgcucuacc

SEQ ID NO: 10360 - RNA, 24 nt, Human
caaaaguuuuauacacagauauuu

SEQ ID NO: 10361 - RNA, 22 nt, Human
caaaccuguuaacuaccuccug

SEQ ID NO: 10362 - RNA, 22 nt, Human
caaagaggagcuccuacaaggu

SEQ ID NO: 10363 - RNA, 24 nt, Human
caaagcacaguaacaguugaaaag

SEQ ID NO: 10364 - RNA, 24 nt, Human
caaagccgugcggagauuggaggc

SEQ ID NO: 10365 - RNA, 22 nt, Human
caaagugcugagauuacaggca

SEQ ID NO: 10366 - RNA, 22 nt, Human
caacaagcgcucagagcaaagc

SEQ ID NO: 10367 - RNA, 22 nt, Human
caacacagcacccuccuccugu

SEQ ID NO: 10368 - RNA, 21 nt, Human
caacauagugagacucugucu

SEQ ID NO: 10369 - RNA, 21 nt, Human
caacauggugaaaccccaucu

SEQ ID NO: 10370 - RNA, 22 nt, Human
caacauggugaaaccccaucuc

SEQ ID NO: 10371 - RNA, 20 nt, Human
caacaugucuucggcuccgg

SEQ ID NO: 10372 - RNA, 23 nt, Human
caacgcaacggcaacgccacgcg

SEQ ID NO: 10373 - RNA, 22 nt, Human
caacgugugagcugccucuugc

SEQ ID NO: 10374 - RNA, 21 nt, Human
caacuacuguuagaguccacc

SEQ ID NO: 10375 - RNA, 24 nt, Human
caacucaggcucuagcuucuccag

SEQ ID NO: 10376 - RNA, 22 nt, Human
caacuccaggggaugcuguuca

SEQ ID NO: 10377 - RNA, 22 nt, Human
caacuuaccuguugccacuugg

SEQ ID NO: 10378 - RNA, 24 nt, Human
caagaagccccggaggcuauccua

SEQ ID NO: 10379 - RNA, 22 nt, Human
caagaauagcacuucccguuaa

SEQ ID NO: 10380 - RNA, 24 nt, Human
caagacacaaauguaacuucugag

SEQ ID NO: 10381 - RNA, 24 nt, Human
caagacacagguaagaugcaggug

SEQ ID NO: 10382 - RNA, 24 nt, Human
caagacaugauuuugcuggcuuua

SEQ ID NO: 10383 - RNA, 24 nt, Human
caagagaagcacgguuuucucuuu

SEQ ID NO: 10384 - RNA, 24 nt, Human
caagagcaagaagcaguucuuugu

SEQ ID NO: 10385 - RNA, 24 nt, Human
caagauuaggccucucaaaagagc

SEQ ID NO: 10386 - RNA, 22 nt, Human
caagauuauucccacuugucuu

SEQ ID NO: 10387 - RNA, 24 nt, Human
caagccaacugugaacauggguca

SEQ ID NO: 10388 - RNA, 24 nt, Human
caagcugagcuggaugggcuaccu

SEQ ID NO: 10389 - RNA, 22 nt, Human
caaggaaaugucagaaaggcaa

SEQ ID NO: 10390 - RNA, 24 nt, Human
caaggacuucuuugcagguaucug

SEQ ID NO: 10391 - RNA, 24 nt, Human
caaggcaacacuugcugaugagca

SEQ ID NO: 10392 - RNA, 24 nt, Human
caagguaaccuuuuccuuugaggc

SEQ ID NO: 10393 - RNA, 22 nt, Human
caagucccuaaaaugaccugaa

SEQ ID NO: 10394 - RNA, 22 nt, Human
caagugcuaacaugucuggguu

SEQ ID NO: 10395 - RNA, 21 nt, Human
caaguggaugguaagauaggg

SEQ ID NO: 10396 - RNA, 24 nt, Human
caaugccacuauccuucccaucuc

SEQ ID NO: 10397 - RNA, 22 nt, Human
caaugccaggaaccugggggaa

SEQ ID NO: 10398 - RNA, 24 nt, Human
caauggagggaaaugucagccaug

SEQ ID NO: 10399 - RNA, 24 nt, Human
caaugggugaucgggcaugacccc

SEQ ID NO: 10400 - RNA, 22 nt, Human
caauguacagaagccacgugua

SEQ ID NO: 10401 - RNA, 22 nt, Human
caaugucaguccagccagcugc

SEQ ID NO: 10402 - RNA, 22 nt, Human
cacacagucguguaguuuugcg

SEQ ID NO: 10403 - RNA, 24 nt, Human
cacacccaaacaaacccaagucaa

SEQ ID NO: 10404 - RNA, 22 nt, Human
cacaccugcacuacaguaaccc

SEQ ID NO: 10405 - RNA, 22 nt, Human
cacaccuugcuuucccacuaau

SEQ ID NO: 10406 - RNA, 24 nt, Human
cacacugcaggacaucguucuccc

SEQ ID NO: 10407 - RNA, 24 nt, Human
cacagcaagcccaggcucuaccag

SEQ ID NO: 10408 - RNA, 24 nt, Human
cacaggacacugccugccagucac

SEQ ID NO: 10409 - RNA, 23 nt, Human
cacaugggauccaugggcuuggc

SEQ ID NO: 10410 - RNA, 24 nt, Human
caccaaaguacuaauucgguauca

SEQ ID NO: 10411 - RNA, 24 nt, Human
caccaagucuggaugaccacuacc

SEQ ID NO: 10412 - RNA, 24 nt, Human
caccagcacugcacccuaaucaaa

SEQ ID NO: 10413 - RNA, 24 nt, Human
caccagggaggacagcugcuggca

SEQ ID NO: 10414 - RNA, 24 nt, Human
caccaguagggagcuagcuggcug

SEQ ID NO: 10415 - RNA, 24 nt, Human
caccauggugacgcuugcugaacu

SEQ ID NO: 10416 - RNA, 22 nt, Human
caccaugucugugagcucugca

SEQ ID NO: 10417 - RNA, 24 nt, Human
caccaugugaagaguagagagaau

SEQ ID NO: 10418 - RNA, 24 nt, Human
cacccagaugccugcucaguguug

SEQ ID NO: 10419 - RNA, 24 nt, Human
cacccauuguccauagccuucuca

SEQ ID NO: 10420 - RNA, 24 nt, Human
caccccaugccaucugacagaugg

SEQ ID NO: 10421 - RNA, 24 nt, Human
caccccggggaagggggaagagca

SEQ ID NO: 10422 - RNA, 24 nt, Human
cacccggaagaugaggcucgccgu

SEQ ID NO: 10423 - RNA, 19 nt, Human
cacccggggcggcaucgcg

SEQ ID NO: 10424 - RNA, 24 nt, Human
cacccggggcuccacccaagcgcc

SEQ ID NO: 10425 - RNA, 24 nt, Human
cacccguuagaaagagcgugggac

SEQ ID NO: 10426 - RNA, 22 nt, Human
cacccuaaagaagcauauaauc

SEQ ID NO: 10427 - RNA, 24 nt, Human
cacccuggcaagcagcagugaugg

SEQ ID NO: 10428 - RNA, 24 nt, Human
cacccuguaaugguugggaccagg

SEQ ID NO: 10429 - RNA, 22 nt, Human
cacccuuugggaucuugggcuu

SEQ ID NO: 10430 - RNA, 21 nt, Human
caccgagucgccucacucgag

SEQ ID NO: 10431 - RNA, 24 nt, Human
caccgagucgccucacucgagcgc

SEQ ID NO: 10432 - RNA, 24 nt, Human
caccgcaagggccuggcagugugc

SEQ ID NO: 10433 - RNA, 24 nt, Human
caccgcauaacaccccugugggca

SEQ ID NO: 10434 - RNA, 23 nt, Human
caccgccuagugccaacagccuu

SEQ ID NO: 10435 - RNA, 22 nt, Human
caccgcgccccuuuuccagccc

SEQ ID NO: 10436 - RNA, 24 nt, Human
caccgcguauaacuuuccagccca

SEQ ID NO: 10437 - RNA, 24 nt, Human
caccggacacgguggcucacgccu

SEQ ID NO: 10438 - RNA, 24 nt, Human
caccgggagggccggaucgagacc

SEQ ID NO: 10439 - RNA, 24 nt, Human
caccguguccgcgcucuuuucgcg

SEQ ID NO: 10440 - RNA, 24 nt, Human
caccguuaaaacccugaguggaug

SEQ ID NO: 10441 - RNA, 23 nt, Human
caccucacccugaucuccuccaa

SEQ ID NO: 10442 - RNA, 24 nt, Human
caccucaggccagaaggggaugac

SEQ ID NO: 10443 - RNA, 24 nt, Human
caccuccucagcuggugccaggau

SEQ ID NO: 10444 - RNA, 24 nt, Human
caccugcacagcaguuaacagcag

SEQ ID NO: 10445 - RNA, 24 nt, Human
caccugcagccgggcaugagccug

SEQ ID NO: 10446 - RNA, 24 nt, Human
caccugcuccuugaaugacagcgc

SEQ ID NO: 10447 - RNA, 24 nt, Human
caccuggguaccuacaguagucga

SEQ ID NO: 10448 - RNA, 24 nt, Human
caccuguaaucccagcuacuccga

SEQ ID NO: 10449 - RNA, 24 nt, Human
caccuguccugcagaggagucguu

SEQ ID NO: 10450 - RNA, 24 nt, Human
caccugucugcauagaaaggcaga

SEQ ID NO: 10451 - RNA, 24 nt, Human
caccuguuggggaccugcuuguug

SEQ ID NO: 10452 - RNA, 22 nt, Human
caccuguuucuuggcaugucau

SEQ ID NO: 10453 - RNA, 20 nt, Human
caccuugcucacacugcagu

SEQ ID NO: 10454 - RNA, 24 nt, Human
cacgaggugcacacguucgugucc

SEQ ID NO: 10455 - RNA, 24 nt, Human
cacgcuguagaacacgcggccgug

SEQ ID NO: 10456 - RNA, 24 nt, Human
cacgcugugucgcgccucuccucc

SEQ ID NO: 10457 - RNA, 24 nt, Human
cacgggccgaggaggauguggagc

SEQ ID NO: 10458 - RNA, 24 nt, Human
cacgguagucuucacuuugaaaca

SEQ ID NO: 10459 - RNA, 24 nt, Human
cacguagugguaagcggcauuugg

SEQ ID NO: 10460 - RNA, 24 nt, Human
cacuaaacaacugaccauuucuac

SEQ ID NO: 10461 - RNA, 24 nt, Human
cacuacaggccagggcugcggggc

SEQ ID NO: 10462 - RNA, 24 nt, Human
cacuaugucgccuuuggguagcaa

SEQ ID NO: 10463 - RNA, 22 nt, Human
cacucaagcugagguucuugcu

SEQ ID NO: 10464 - RNA, 24 nt, Human
cacuccccagcaugcuggcaucca

SEQ ID NO: 10465 - RNA, 22 nt, Human
cacucgguguacguccuggagg

SEQ ID NO: 10466 - RNA, 22 nt, Human
cacugagacccggaaucaguuc

SEQ ID NO: 10467 - RNA, 22 nt, Human
cacugcaaccucugccaccugg

SEQ ID NO: 10468 - RNA, 22 nt, Human
cacugcaaccucugccuccugg

SEQ ID NO: 10469 - RNA, 22 nt, Human
cacugcacccuccucuuggguu

SEQ ID NO: 10470 - RNA, 22 nt, Human
cacugcacuccaaccuggacaa

SEQ ID NO: 10471 - RNA, 24 nt, Human
cacugcacuccagccugggcaaca

SEQ ID NO: 10472 - RNA, 24 nt, Human
cacugcacuccagccugggugaca

SEQ ID NO: 10473 - RNA, 24 nt, Human
cacugcuucuccgucagugagucg

SEQ ID NO: 10474 - RNA, 24 nt, Human
cacugggccugcugagcgccgugg

SEQ ID NO: 10475 - RNA, 24 nt, Human
cacugggcuucuuuucaugccgcu

SEQ ID NO: 10476 - RNA, 24 nt, Human
cacuggguggcccugugagcuccc

SEQ ID NO: 10477 - RNA, 21 nt, Human
cacuguauagcaggagaaaac

SEQ ID NO: 10478 - RNA, 24 nt, Human
cacuucugguuggccucggggcgc

SEQ ID NO: 10479 - RNA, 24 nt, Human
cacuuuaugggggcagaauggaac

SEQ ID NO: 10480 - RNA, 22 nt, Human
cacuuucagagaugcccugagu

SEQ ID NO: 10481 - RNA, 22 nt, Human
cacuuuccaccacugucagccu

SEQ ID NO: 10482 - RNA, 24 nt, Human
cagaacucagguggcaaugcuuac

SEQ ID NO: 10483 - RNA, 24 nt, Human
cagaacuuguucacgaacgugaca

SEQ ID NO: 10484 - RNA, 24 nt, Human
cagaagaagggauucacucaguac

SEQ ID NO: 10485 - RNA, 24 nt, Human
cagaauccccgcguagccgcugcu

SEQ ID NO: 10486 - RNA, 22 nt, Human
cagaaucuguuuuuucccaagc

SEQ ID NO: 10487 - RNA, 22 nt, Human
cagacugaggauguccuggagg

SEQ ID NO: 10488 - RNA, 22 nt, Human
cagagauccagaaaguggguag

SEQ ID NO: 10489 - RNA, 24 nt, Human
cagagcuaggagaaggagaggggg

SEQ ID NO: 10490 - RNA, 24 nt, Human
cagaggacucagaggggaucaguc

SEQ ID NO: 10491 - RNA, 22 nt, Human
cagaggaugcggcugggaacgg

SEQ ID NO: 10492 - RNA, 22 nt, Human
cagagucuccagccacuacuuc

SEQ ID NO: 10493 - RNA, 24 nt, Human
cagagugcugaagacgggguagcc

SEQ ID NO: 10494 - RNA, 22 nt, Human
cagaugaagaagaugaagcccg

SEQ ID NO: 10495 - RNA, 22 nt, Human
cagauggccauuauguagguuu

SEQ ID NO: 10496 - RNA, 24 nt, Human
cagcaacccacaguagguaggaaa

SEQ ID NO: 10497 - RNA, 24 nt, Human
cagcacaacugucaaugcagguca

SEQ ID NO: 10498 - RNA, 22 nt, Human
cagcacagcuggguucugugcu

SEQ ID NO: 10499 - RNA, 24 nt, Human
cagcacaggaaccugggcaggcag

SEQ ID NO: 10500 - RNA, 24 nt, Human
cagcaccgugguuugugguuagcu

SEQ ID NO: 10501 - RNA, 24 nt, Human
cagcagaaccugugucaggccgcu

SEQ ID NO: 10502 - RNA, 21 nt, Human
cagcagauuacucgggauuuc

SEQ ID NO: 10503 - RNA, 24 nt, Human
cagcagcaagaaggggugcaggug

SEQ ID NO: 10504 - RNA, 24 nt, Human
cagcagcaggcaaaagaggucagc

SEQ ID NO: 10505 - RNA, 24 nt, Human
cagcagcagggaggggaggacugg

SEQ ID NO: 10506 - RNA, 24 nt, Human
cagcagccacagcagccgcuucug

SEQ ID NO: 10507 - RNA, 24 nt, Human
cagcagcccaagcugucaggaucu

SEQ ID NO: 10508 - RNA, 18 nt, Human
cagcagccggaguguggc

SEQ ID NO: 10509 - RNA, 24 nt, Human
cagcagccucaacaguaugguauu

SEQ ID NO: 10510 - RNA, 24 nt, Human
cagcagcgagaggacgcgucacuc

SEQ ID NO: 10511 - RNA, 24 nt, Human
cagcaggaagugcuggugaccccg

SEQ ID NO: 10512 - RNA, 24 nt, Human
cagcaggaucccguugagcugccc

SEQ ID NO: 10513 - RNA, 21 nt, Human
cagcaggguggacaaauaagc

SEQ ID NO: 10514 - RNA, 24 nt, Human
cagcaguaccaacaccugcccucg

SEQ ID NO: 10515 - RNA, 24 nt, Human
cagcaguaggggcugggcuuccag

SEQ ID NO: 10516 - RNA, 23 nt, Human
cagcaguaugcaucugaucugag

SEQ ID NO: 10517 - RNA, 24 nt, Human
cagcauaacuucagaguaagggua

SEQ ID NO: 10518 - RNA, 24 nt, Human
cagcauccacuguucugcccagua

SEQ ID NO: 10519 - RNA, 23 nt, Human
cagcaucugcacauauuuccugc

SEQ ID NO: 10520 - RNA, 24 nt, Human
cagcauggaggacugugacugaug

SEQ ID NO: 10521 - RNA, 21 nt, Human
cagccagccgcggggcguccc

SEQ ID NO: 10522 - RNA, 22 nt, Human
cagccauauuuuucuucucgca

SEQ ID NO: 10523 - RNA, 24 nt, Human
cagcccagagacacgugugcaccu

SEQ ID NO: 10524 - RNA, 24 nt, Human
cagccgcugccagcccugcuccug

SEQ ID NO: 10525 - RNA, 24 nt, Human
cagccuccaagcugggggaguuug

SEQ ID NO: 10526 - RNA, 24 nt, Human
cagccuccugcucucccgagggcu

SEQ ID NO: 10527 - RNA, 24 nt, Human
cagccuggcccucaccggucgccc

SEQ ID NO: 10528 - RNA, 24 nt, Human
cagccuuagauuuuauauuuggau

SEQ ID NO: 10529 - RNA, 22 nt, Human
cagccuuauccucagggucuga

SEQ ID NO: 10530 - RNA, 24 nt, Human
cagccuuucuugccugagagaaga

SEQ ID NO: 10531 - RNA, 23 nt, Human
cagcgcaggaauaucucuggaag

SEQ ID NO: 10532 - RNA, 24 nt, Human
cagcgccgcgucuuccagcccucg

SEQ ID NO: 10533 - RNA, 24 nt, Human
cagcggccccccuccagguccccg

SEQ ID NO: 10534 - RNA, 22 nt, Human
cagcgugugagcuuccaaauaa

SEQ ID NO: 10535 - RNA, 22 nt, Human
cagcuaauuuuuguauuuuugg

SEQ ID NO: 10536 - RNA, 22 nt, Human
cagcuacuuucgcuucuacuua

SEQ ID NO: 10537 - RNA, 22 nt, Human
cagcuauucaggagcuugaggu

SEQ ID NO: 10538 - RNA, 24 nt, Human
cagcucagaccucguaacgcgacg

SEQ ID NO: 10539 - RNA, 24 nt, Human
cagcuccaccccucacuaacuguu

SEQ ID NO: 10540 - RNA, 24 nt, Human
cagcuccuaguggagaccucgggc

SEQ ID NO: 10541 - RNA, 24 nt, Human
cagcugaaucagaaccacacacuu

SEQ ID NO: 10542 - RNA, 23 nt, Human
cagcugacauuuaggagggcuuu

SEQ ID NO: 10543 - RNA, 24 nt, Human
cagcugcaucugcgccaccugcug

SEQ ID NO: 10544 - RNA, 24 nt, Human
cagcugguccugacucguggagau

SEQ ID NO: 10545 - RNA, 24 nt, Human
cagcugguuaauuuuucuccaaua

SEQ ID NO: 10546 - RNA, 24 nt, Human
cagcuguaacuuucuuugacugug

SEQ ID NO: 10547 - RNA, 24 nt, Human
cagcuucaccaacacggccgagcg

SEQ ID NO: 10548 - RNA, 24 nt, Human
cagcuucaccaccacggccgagcg

SEQ ID NO: 10549 - RNA, 24 nt, Human
cagcuuccuuuccuguguguacuc

SEQ ID NO: 10550 - RNA, 22 nt, Human
caggaacacaaugagucucaaa

SEQ ID NO: 10551 - RNA, 24 nt, Human
caggacccucugugacauucuuua

SEQ ID NO: 10552 - RNA, 20 nt, Human
caggagccagcgaggcagag

SEQ ID NO: 10553 - RNA, 23 nt, Human
caggagucagaugaggaccauua

SEQ ID NO: 10554 - RNA, 24 nt, Human
caggaucgcgaggcagcagcgacc

SEQ ID NO: 10555 - RNA, 24 nt, Human
caggccaagauaagggcccugaag

SEQ ID NO: 10556 - RNA, 24 nt, Human
caggcccaucgucggaggguucag

SEQ ID NO: 10557 - RNA, 24 nt, Human
caggcccccuccacucggccuucu

SEQ ID NO: 10558 - RNA, 22 nt, Human
caggcuggagugcaguggugcg

SEQ ID NO: 10559 - RNA, 22 nt, Human
caggcuuccugcagacuguaua

SEQ ID NO: 10560 - RNA, 24 nt, Human
cagggcccaggugcugucuuccug

SEQ ID NO: 10561 - RNA, 24 nt, Human
caggggcugguaggaguacgcagu

SEQ ID NO: 10562 - RNA, 22 nt, Human
caggggguaaagugucauccuu

SEQ ID NO: 10563 - RNA, 22 nt, Human
caggguaaugcauuugcaagga

SEQ ID NO: 10564 - RNA, 24 nt, Human
caggguacaggcucgcaccugggg

SEQ ID NO: 10565 - RNA, 22 nt, Human
caggguuagaugacugcgggaa

SEQ ID NO: 10566 - RNA, 22 nt, Human
cagguauaugugugucuaauac

SEQ ID NO: 10567 - RNA, 23 nt, Human
caggucacaggucaccaugggga

SEQ ID NO: 10568 - RNA, 24 nt, Human
caggugaagagugagguugucaug

SEQ ID NO: 10569 - RNA, 24 nt, Human
caggugccucugccccacgcggug

SEQ ID NO: 10570 - RNA, 22 nt, Human
cagguggucuccucugacuuca

SEQ ID NO: 10571 - RNA, 24 nt, Human
caguacaugcuuuuuaaugggacc

SEQ ID NO: 10572 - RNA, 22 nt, Human
caguacgcccaguuccacugga

SEQ ID NO: 10573 - RNA, 22 nt, Human
caguagaguaacgugcuauaca

SEQ ID NO: 10574 - RNA, 22 nt, Human
caguagaugucuguacuaucau

SEQ ID NO: 10575 - RNA, 24 nt, Human
caguagccugggguuggugcagag

SEQ ID NO: 10576 - RNA, 22 nt, Human
caguagguguuaguaugguugc

SEQ ID NO: 10577 - RNA, 22 nt, Human
caguaucuccgugauuaccuuc

SEQ ID NO: 10578 - RNA, 24 nt, Human
caguaugagaacuugaaagcugca

SEQ ID NO: 10579 - RNA, 24 nt, Human
cagucugugcugaggaccucaggg

SEQ ID NO: 10580 - RNA, 21 nt, Human
cagucuuuuucucucucacuu

SEQ ID NO: 10581 - RNA, 24 nt, Human
cagugcucuucgccagaaguuggc

SEQ ID NO: 10582 - RNA, 22 nt, Human
cagugcugaguaugaaaggccc

SEQ ID NO: 10583 - RNA, 24 nt, Human
caguggaccugccucggauagcag

SEQ ID NO: 10584 - RNA, 21 nt, Human
caguguaccagaacauaugua

SEQ ID NO: 10585 - RNA, 22 nt, Human
caguguaucauuagugugauga

SEQ ID NO: 10586 - RNA, 24 nt, Human
caguguccgcugcagccagucgga

SEQ ID NO: 10587 - RNA, 22 nt, Human
cagugucuugucaaaucuagcu

SEQ ID NO: 10588 - RNA, 18 nt, Human
caguucagaagccaggcu

SEQ ID NO: 10589 - RNA, 24 nt, Human
cauacuuuucuagcuaccuucugc

SEQ ID NO: 10590 - RNA, 22 nt, Human
cauaucuccagguucugcugga

SEQ ID NO: 10591 - RNA, 22 nt, Human
caucaauuaacuucuacagugg

SEQ ID NO: 10592 - RNA, 24 nt, Human
caucaggaugcaucacgaucauua

SEQ ID NO: 10593 - RNA, 22 nt, Human
caucauagucuauuucuugcua

SEQ ID NO: 10594 - RNA, 24 nt, Human
cauccauuguucagcuugaugucu

SEQ ID NO: 10595 - RNA, 22 nt, Human
caucccagcaguguugaucagu

SEQ ID NO: 10596 - RNA, 24 nt, Human
cauccuguuccacaauccugagua

SEQ ID NO: 10597 - RNA, 24 nt, Human
caucguggcugaggugcuggugcu

SEQ ID NO: 10598 - RNA, 22 nt, Human
caucucagguuuguucugagac

SEQ ID NO: 10599 - RNA, 24 nt, Human
caucucaguccuauuuuugaguuu

SEQ ID NO: 10600 - RNA, 24 nt, Human
caucuccuucccagccacuggcug

SEQ ID NO: 10601 - RNA, 23 nt, Human
caucugcaaucugggccccauuu

SEQ ID NO: 10602 - RNA, 24 nt, Human
caucugcacugccaagacugagug

SEQ ID NO: 10603 - RNA, 24 nt, Human
caucugcugccuacauuccugcuc

SEQ ID NO: 10604 - RNA, 22 nt, Human
caucugguccucagacauggga

SEQ ID NO: 10605 - RNA, 24 nt, Human
caucugguucagacucugcucauc

SEQ ID NO: 10606 - RNA, 24 nt, Human
caucuucaaaagacugggacugcu

SEQ ID NO: 10607 - RNA, 22 nt, Human
caucuuccaauagagaucacug

SEQ ID NO: 10608 - RNA, 22 nt, Human
caucuugaaacugcugcagcca

SEQ ID NO: 10609 - RNA, 24 nt, Human
caucuuuuucugaccuguaugaug

SEQ ID NO: 10610 - RNA, 24 nt, Human
caugaaggaagaagugggguuccu

SEQ ID NO: 10611 - RNA, 24 nt, Human
caugagaauuuggaaugacaguau

SEQ ID NO: 10612 - RNA, 23 nt, Human
caugagcauaacacgcacgggca

SEQ ID NO: 10613 - RNA, 24 nt, Human
caugaggccgcgccuguguccagc

SEQ ID NO: 10614 - RNA, 24 nt, Human
caugauccucgcuuacugacuucc

SEQ ID NO: 10615 - RNA, 24 nt, Human
caugcccccuuuggcuugggggcc

SEQ ID NO: 10616 - RNA, 24 nt, Human
cauggcacaucgggcuauuugaac

SEQ ID NO: 10617 - RNA, 24 nt, Human
cauggcacuuacccaagcaccgaa

SEQ ID NO: 10618 - RNA, 18 nt, Human
cauggcccagcccugggg

SEQ ID NO: 10619 - RNA, 24 nt, Human
cauggcccguguguggggacuugc

SEQ ID NO: 10620 - RNA, 24 nt, Human
cauggcgucuaguucuggagaucu

SEQ ID NO: 10621 - RNA, 24 nt, Human
caugggaagccacuuugacaggca

SEQ ID NO: 10622 - RNA, 22 nt, Human
caugguacugccacagaagagu

SEQ ID NO: 10623 - RNA, 24 nt, Human
cauguaaccucggggucugaggcc

SEQ ID NO: 10624 - RNA, 22 nt, Human
caugucccgugguuccagcgcc

SEQ ID NO: 10625 - RNA, 24 nt, Human
caugugaacgcuacuuaugugaac

SEQ ID NO: 10626 - RNA, 24 nt, Human
cauguugugcacguguacccuaga

SEQ ID NO: 10627 - RNA, 22 nt, Human
cauguuuguuguguacauaugu

SEQ ID NO: 10628 - RNA, 24 nt, Human
cauuaacuuuaaacauggucugcg

SEQ ID NO: 10629 - RNA, 24 nt, Human
cauuacuuuuaaccaaaacauuca

SEQ ID NO: 10630 - RNA, 24 nt, Human
cauuaucucuuuaccaguauuaaa

SEQ ID NO: 10631 - RNA, 24 nt, Human
cauucagagacagaguuucaccgu

SEQ ID NO: 10632 - RNA, 22 nt, Human
cauucgcuugucccggcuuacu

SEQ ID NO: 10633 - RNA, 24 nt, Human
cauucgggagaucuuccggaccaa

SEQ ID NO: 10634 - RNA, 24 nt, Human
cauugaaacuucccccaaaucuga

SEQ ID NO: 10635 - RNA, 23 nt, Human
cauugauaucugcaucaugcugc

SEQ ID NO: 10636 - RNA, 22 nt, Human
cauugcaccguuuuagugagaa

SEQ ID NO: 10637 - RNA, 22 nt, Human
cauugcacuccacccuaggcaa

SEQ ID NO: 10638 - RNA, 24 nt, Human
cauugcacuccacccugggcaaca

SEQ ID NO: 10639 - RNA, 22 nt, Human
cauugcacuccagccugggcaa

SEQ ID NO: 10640 - RNA, 24 nt, Human
cauugcacuccagccugggcaaca

SEQ ID NO: 10641 - RNA, 24 nt, Human
cauugcacuccagccugggugaaa

SEQ ID NO: 10642 - RNA, 24 nt, Human
cauugcacuccagccuggucaaca

SEQ ID NO: 10643 - RNA, 24 nt, Human
cauugcacuccggccugggcaaca

SEQ ID NO: 10644 - RNA, 24 nt, Human
cauugcccagaguugcacuugcug

SEQ ID NO: 10645 - RNA, 24 nt, Human
cauugcuuaagacaguagaacaca

SEQ ID NO: 10646 - RNA, 22 nt, Human
cauugcuuugcgaauucuuaug

SEQ ID NO: 10647 - RNA, 22 nt, Human
cauuggaauucugaaggcuuga

SEQ ID NO: 10648 - RNA, 24 nt, Human
cauuguggcuggaggugcuggugc

SEQ ID NO: 10649 - RNA, 24 nt, Human
cauugugggcuacguggaaacccu

SEQ ID NO: 10650 - RNA, 24 nt, Human
cauuucgccauguugcccagcacu

SEQ ID NO: 10651 - RNA, 24 nt, Human
cauuuggguguaaagcaguaaaug

SEQ ID NO: 10652 - RNA, 23 nt, Human
ccaacauugugaaaccccgucuc

SEQ ID NO: 10653 - RNA, 24 nt, Human
ccaacgcgaugcuugguaugccgg

SEQ ID NO: 10654 - RNA, 24 nt, Human
ccaagggggccuuggccgggcggg

SEQ ID NO: 10655 - RNA, 24 nt, Human
ccacaagugaaaaacaugguucag

SEQ ID NO: 10656 - RNA, 22 nt, Human
ccacagugauucacuuuugaag

SEQ ID NO: 10657 - RNA, 22 nt, Human
ccacaugagcucaagagauccu

SEQ ID NO: 10658 - RNA, 18 nt, Human
ccacauguuguucccagg

SEQ ID NO: 10659 - RNA, 24 nt, Human
ccaccagagcauggcuguaggggc

SEQ ID NO: 10660 - RNA, 24 nt, Human
ccaccagcaggcugggaugguguu

SEQ ID NO: 10661 - RNA, 22 nt, Human
ccacgccucucugaccacuuuu

SEQ ID NO: 10662 - RNA, 24 nt, Human
ccacggccgcggugcauguucgcc

SEQ ID NO: 10663 - RNA, 24 nt, Human
ccacugcacuccacccugggcaac

SEQ ID NO: 10664 - RNA, 22 nt, Human
ccacugcacuccagcacuccag

SEQ ID NO: 10665 - RNA, 24 nt, Human
ccacugcacuccagccuggcgacu

SEQ ID NO: 10666 - RNA, 24 nt, Human
ccacugcacuccagccugggcaag

SEQ ID NO: 10667 - RNA, 24 nt, Human
ccacugcacuccagccugggcgac

SEQ ID NO: 10668 - RNA, 24 nt, Human
ccacugggauagcuccugcaagua

SEQ ID NO: 10669 - RNA, 24 nt, Human
ccacugggcgaguaucuggaggag

SEQ ID NO: 10670 - RNA, 22 nt, Human
ccagaaacagaggaagaagaag

SEQ ID NO: 10671 - RNA, 24 nt, Human
ccagaacacagucacgaggauaau

SEQ ID NO: 10672 - RNA, 24 nt, Human
ccagaaccuucuucuuguccgacu

SEQ ID NO: 10673 - RNA, 24 nt, Human
ccagaagcaccuagcagagcugaa

SEQ ID NO: 10674 - RNA, 24 nt, Human
ccagacagcccuaccugugccaga

SEQ ID NO: 10675 - RNA, 22 nt, Human
ccagaggugagucuugauuuug

SEQ ID NO: 10676 - RNA, 24 nt, Human
ccagcaccaugccguccaugcugc

SEQ ID NO: 10677 - RNA, 24 nt, Human
ccagcacccuugacgucugggucc

SEQ ID NO: 10678 - RNA, 24 nt, Human
ccagccaacaggaugggaggaagg

SEQ ID NO: 10679 - RNA, 24 nt, Human
ccagccuagccuuguggggagcaa

SEQ ID NO: 10680 - RNA, 24 nt, Human
ccagccuucgagagcuaugagucc

SEQ ID NO: 10681 - RNA, 23 nt, Human
ccagcgaauuacaggcggcggaa

SEQ ID NO: 10682 - RNA, 22 nt, Human
ccaggaggaauuggaaagaaga

SEQ ID NO: 10683 - RNA, 24 nt, Human
ccaggcaaggcaaagugauggugg

SEQ ID NO: 10684 - RNA, 22 nt, Human
ccaggcaggaacaccuuuugcu

SEQ ID NO: 10685 - RNA, 24 nt, Human
ccaggccaaaaaggcucaacauuu

SEQ ID NO: 10686 - RNA, 24 nt, Human
ccaggccacggugcuucuaguguc

SEQ ID NO: 10687 - RNA, 22 nt, Human
ccaggcuggaggagugcagugg

SEQ ID NO: 10688 - RNA, 22 nt, Human
ccagggaacacucaguuucccu

SEQ ID NO: 10689 - RNA, 24 nt, Human
ccagggagucaucaagcauuggag

SEQ ID NO: 10690 - RNA, 24 nt, Human
ccaggguggccacggguggugagg

SEQ ID NO: 10691 - RNA, 22 nt, Human
ccauaagauuauaauggagcau

SEQ ID NO: 10692 - RNA, 22 nt, Human
ccauauuauggggaaaaaacug

SEQ ID NO: 10693 - RNA, 22 nt, Human
ccaucgugaauguauugagcca

SEQ ID NO: 10694 - RNA, 22 nt, Human
ccaucucucuaaguucucuuau

SEQ ID NO: 10695 - RNA, 22 nt, Human
ccauggucucacacuagugcug

SEQ ID NO: 10696 - RNA, 22 nt, Human
ccaugucuuaaccagcaggugu

SEQ ID NO: 10697 - RNA, 22 nt, Human
ccauucacaacuucguggaggu

SEQ ID NO: 10698 - RNA, 24 nt, Human
cccaagagcucccuuggcccuguu

SEQ ID NO: 10699 - RNA, 22 nt, Human
cccaagagguggagguugcagu

SEQ ID NO: 10700 - RNA, 24 nt, Human
cccaaguagcugggauuacaggcu

SEQ ID NO: 10701 - RNA, 24 nt, Human
cccacaguucugagacaagcuuua

SEQ ID NO: 10702 - RNA, 22 nt, Human
cccagcuggggagaaccauuac

SEQ ID NO: 10703 - RNA, 22 nt, Human
cccaggagauggaaguugcagu

SEQ ID NO: 10704 - RNA, 22 nt, Human
cccaggaggcggagguugcagu

SEQ ID NO: 10705 - RNA, 22 nt, Human
cccaggagguggagguugcagu

SEQ ID NO: 10706 - RNA, 24 nt, Human
cccaggagugucugcccuacgcgg

SEQ ID NO: 10707 - RNA, 22 nt, Human
cccauccguggcaagccgguag

SEQ ID NO: 10708 - RNA, 22 nt, Human
cccaugaccucagauguuuauc

SEQ ID NO: 10709 - RNA, 22 nt, Human
cccaugcagcaaaugcuacgca

SEQ ID NO: 10710 - RNA, 22 nt, Human
cccauuauaaauaaaggguggu

SEQ ID NO: 10711 - RNA, 22 nt, Human
ccccaaggagcagugggcuuug

SEQ ID NO: 10712 - RNA, 22 nt, Human
ccccaccccaguggagcucacc

SEQ ID NO: 10713 - RNA, 24 nt, Human
ccccaggucgcaggugucugaggc

SEQ ID NO: 10714 - RNA, 24 nt, Human
ccccagguuugcuuccucuguccc

SEQ ID NO: 10715 - RNA, 24 nt, Human
ccccaguagaagugaugggcugcu

SEQ ID NO: 10716 - RNA, 22 nt, Human
ccccagucaaugcuucucucca

SEQ ID NO: 10717 - RNA, 24 nt, Human
ccccagucucggagagcaacagaa

SEQ ID NO: 10718 - RNA, 24 nt, Human
ccccaguuguccccuggaguuugg

SEQ ID NO: 10719 - RNA, 24 nt, Human
ccccccgugcccugggccacugug

SEQ ID NO: 10720 - RNA, 22 nt, Human
ccccccuuuucaacuuuccuac

SEQ ID NO: 10721 - RNA, 24 nt, Human
cccccggacaugcuggcagagcag

SEQ ID NO: 10722 - RNA, 24 nt, Human
cccccgguaacaggcccaggcggu

SEQ ID NO: 10723 - RNA, 24 nt, Human
cccccuggaggggcagggcaggca

SEQ ID NO: 10724 - RNA, 24 nt, Human
ccccgcagguccgggcacuagcac

SEQ ID NO: 10725 - RNA, 24 nt, Human
ccccggccagcccgccugagauga

SEQ ID NO: 10726 - RNA, 24 nt, Human
ccccgggaagucagaaaucgauca

SEQ ID NO: 10727 - RNA, 24 nt, Human
ccccgguuuucuuuguuccaaggg

SEQ ID NO: 10728 - RNA, 24 nt, Human
ccccucggccuccaggugaggcug

SEQ ID NO: 10729 - RNA, 24 nt, Human
ccccugagggagaggaaaggugaa

SEQ ID NO: 10730 - RNA, 24 nt, Human
ccccuguagcccaggacuaugcug

SEQ ID NO: 10731 - RNA, 24 nt, Human
ccccugugcaccguggacguguga

SEQ ID NO: 10732 - RNA, 24 nt, Human
ccccuuuucaacauaagcucucug

SEQ ID NO: 10733 - RNA, 24 nt, Human
cccgcuccguggccuccuuccucc

SEQ ID NO: 10734 - RNA, 22 nt, Human
cccgcugcuauugauaaggucg

SEQ ID NO: 10735 - RNA, 24 nt, Human
cccgcugggggcuguugggggccc

SEQ ID NO: 10736 - RNA, 24 nt, Human
cccgggguccggccucucacucgc

SEQ ID NO: 10737 - RNA, 24 nt, Human
cccgugccggagccgcccaaggag

SEQ ID NO: 10738 - RNA, 24 nt, Human
cccgugcgcccgcgccuguccugg

SEQ ID NO: 10739 - RNA, 24 nt, Human
cccguuaggacagaagaggcuuuu

SEQ ID NO: 10740 - RNA, 22 nt, Human
cccuauaaaacugauuuguguu

SEQ ID NO: 10741 - RNA, 22 nt, Human
cccuccguuuaaggcugugguc

SEQ ID NO: 10742 - RNA, 24 nt, Human
cccugagugagcaccugguuacca

SEQ ID NO: 10743 - RNA, 22 nt, Human
cccugaucuugcuaucccagca

SEQ ID NO: 10744 - RNA, 22 nt, Human
cccuggagguggagguugcagu

SEQ ID NO: 10745 - RNA, 22 nt, Human
cccugucaucucugcugagaaa

SEQ ID NO: 10746 - RNA, 24 nt, Human
ccgaagauacucaagagcucccaa

SEQ ID NO: 10747 - RNA, 24 nt, Human
ccgcaaguuccugguguuuguggc

SEQ ID NO: 10748 - RNA, 22 nt, Human
ccgcagccgcuggcccaggugc

SEQ ID NO: 10749 - RNA, 24 nt, Human
ccgcagcugcuugccguuaagccg

SEQ ID NO: 10750 - RNA, 24 nt, Human
ccgcaggcuccaagguccgagguc

SEQ ID NO: 10751 - RNA, 24 nt, Human
ccgcaggcugaucccgccguccac

SEQ ID NO: 10752 - RNA, 24 nt, Human
ccgccagccuucacagcggguucu

SEQ ID NO: 10753 - RNA, 20 nt, Human
ccgcccaugcugcuggcgcu

SEQ ID NO: 10754 - RNA, 24 nt, Human
ccgccgccaugacugagcagauga

SEQ ID NO: 10755 - RNA, 19 nt, Human
ccgccuggacagccugcac

SEQ ID NO: 10756 - RNA, 24 nt, Human
ccgcugggcggccauggccacggc

SEQ ID NO: 10757 - RNA, 24 nt, Human
ccgcuggugcuguggucgagugac

SEQ ID NO: 10758 - RNA, 23 nt, Human
ccgcuguggugacuccgacgugc

SEQ ID NO: 10759 - RNA, 22 nt, Human
ccggaaagcauuggggaugacg

SEQ ID NO: 10760 - RNA, 24 nt, Human
ccggaagcuggcacugggcccgcc

SEQ ID NO: 10761 - RNA, 24 nt, Human
ccggacucuauggggcgggacccu

SEQ ID NO: 10762 - RNA, 24 nt, Human
ccggccccgccguuccgacccccg

SEQ ID NO: 10763 - RNA, 24 nt, Human
ccgggcccucucucccacuuuuuc

SEQ ID NO: 10764 - RNA, 22 nt, Human
ccggggcuguugguacuguuuu

SEQ ID NO: 10765 - RNA, 24 nt, Human
ccgggggugugggccccgggcagg

SEQ ID NO: 10766 - RNA, 24 nt, Human
ccggucccccgaggguggcucgga

SEQ ID NO: 10767 - RNA, 24 nt, Human
ccgguccugggcuuaucccugcaa

SEQ ID NO: 10768 - RNA, 24 nt, Human
ccggugcgggcgcccgcggagagg

SEQ ID NO: 10769 - RNA, 22 nt, Human
ccguaaaauguucaaauguuuu

SEQ ID NO: 10770 - RNA, 24 nt, Human
ccguguauguucagaacgugguca

SEQ ID NO: 10771 - RNA, 22 nt, Human
ccguucuguauuuaugucgcca

SEQ ID NO: 10772 - RNA, 24 nt, Human
ccuaaaacaguucuguauauucuu

SEQ ID NO: 10773 - RNA, 24 nt, Human
ccuaaccccuggcuccauggaggu

SEQ ID NO: 10774 - RNA, 24 nt, Human
ccuacaaucccagcaauuuaggag

SEQ ID NO: 10775 - RNA, 24 nt, Human
ccuagcucugacugcccguggugg

SEQ ID NO: 10776 - RNA, 24 nt, Human
ccuauagccaauauaagcagucac

SEQ ID NO: 10777 - RNA, 24 nt, Human
ccucaagauguugcaaaggagcug

SEQ ID NO: 10778 - RNA, 22 nt, Human
ccucaaggcgggaguugccggc

SEQ ID NO: 10779 - RNA, 24 nt, Human
ccucaaugauguuugcaaaggagc

SEQ ID NO: 10780 - RNA, 22 nt, Human
ccucauggacugaguucuggga

SEQ ID NO: 10781 - RNA, 24 nt, Human
ccuccagcuagucauccguaacga

SEQ ID NO: 10782 - RNA, 24 nt, Human
ccuccaggucaccuuggcuugcug

SEQ ID NO: 10783 - RNA, 24 nt, Human
ccuccauuccauuuaguuuccacc

SEQ ID NO: 10784 - RNA, 24 nt, Human
ccucccagcauucggguagugguc

SEQ ID NO: 10785 - RNA, 22 nt, Human
ccucccccuacaccccccaaca

SEQ ID NO: 10786 - RNA, 24 nt, Human
ccucccgucacuccacgcagcugg

SEQ ID NO: 10787 - RNA, 22 nt, Human
ccuccucucugucuucauuaug

SEQ ID NO: 10788 - RNA, 22 nt, Human
ccuccuuucaucaaauucgagu

SEQ ID NO: 10789 - RNA, 22 nt, Human
ccucgcgccgccuggggccacg

SEQ ID NO: 10790 - RNA, 24 nt, Human
ccucggcagggaggaugacggagc

SEQ ID NO: 10791 - RNA, 24 nt, Human
ccucggugauguggaugugaauga

SEQ ID NO: 10792 - RNA, 22 nt, Human
ccucucccuaagcaguagcaag

SEQ ID NO: 10793 - RNA, 24 nt, Human
ccucuccgguguggggcgcccgcg

SEQ ID NO: 10794 - RNA, 22 nt, Human
ccucugaagucuuacuuggaag

SEQ ID NO: 10795 - RNA, 24 nt, Human
ccucugcuuucauuucuaugguua

SEQ ID NO: 10796 - RNA, 22 nt, Human
ccucuuccagcaaccacagaua

SEQ ID NO: 10797 - RNA, 22 nt, Human
ccucuuuuccuuccuccucuuu

SEQ ID NO: 10798 - RNA, 24 nt, Human
ccugaaaggcaggguucuguggaa

SEQ ID NO: 10799 - RNA, 24 nt, Human
ccugaagcauuacagugacuuccu

SEQ ID NO: 10800 - RNA, 24 nt, Human
ccugaaggcaaggccacgggagac

SEQ ID NO: 10801 - RNA, 24 nt, Human
ccugaccucaggugaucugccugc

SEQ ID NO: 10802 - RNA, 24 nt, Human
ccugcaacuuaaaugaacaagcuu

SEQ ID NO: 10803 - RNA, 24 nt, Human
ccugcaaucccagcacuuagggag

SEQ ID NO: 10804 - RNA, 24 nt, Human
ccugcacaggucgcaucaagaagg

SEQ ID NO: 10805 - RNA, 24 nt, Human
ccugcacauugccagacuuccaaa

SEQ ID NO: 10806 - RNA, 24 nt, Human
ccugcacuacugacaauggagcag

SEQ ID NO: 10807 - RNA, 24 nt, Human
ccugcagcuucgagccaaugguga

SEQ ID NO: 10808 - RNA, 24 nt, Human
ccugcaggucucgggggugacgcu

SEQ ID NO: 10809 - RNA, 24 nt, Human
ccugcauugggcaccaaguaucca

SEQ ID NO: 10810 - RNA, 22 nt, Human
ccugccauaaaguugauaggcu

SEQ ID NO: 10811 - RNA, 22 nt, Human
ccugcccauccugccuccacca

SEQ ID NO: 10812 - RNA, 24 nt, Human
ccugccgccggaauccugaagccc

SEQ ID NO: 10813 - RNA, 24 nt, Human
ccugccguugcccugagcugcagc

SEQ ID NO: 10814 - RNA, 24 nt, Human
ccugccucaugagggcuccaaugu

SEQ ID NO: 10815 - RNA, 24 nt, Human
ccugccugauguuucugucucaga

SEQ ID NO: 10816 - RNA, 24 nt, Human
ccugccuggugacagcuucuacau

SEQ ID NO: 10817 - RNA, 24 nt, Human
ccugccuuaauucuagaaucagcu

SEQ ID NO: 10818 - RNA, 24 nt, Human
ccugcgccucaccgaggccgacua

SEQ ID NO: 10819 - RNA, 24 nt, Human
ccuggacaacagaccucuguuugg

SEQ ID NO: 10820 - RNA, 24 nt, Human
ccuggagagaaggcugugaggcag

SEQ ID NO: 10821 - RNA, 22 nt, Human
ccuggagguggagguugcagug

SEQ ID NO: 10822 - RNA, 24 nt, Human
ccuggcaggcuuuggugacucuag

SEQ ID NO: 10823 - RNA, 22 nt, Human
ccuggcugcacauuggaagcac

SEQ ID NO: 10824 - RNA, 24 nt, Human
ccuggcuuguccuucccagaaggu

SEQ ID NO: 10825 - RNA, 22 nt, Human
ccugggaaguggagguugcagu

SEQ ID NO: 10826 - RNA, 22 nt, Human
ccugggagguggggauugcagu

SEQ ID NO: 10827 - RNA, 22 nt, Human
ccugggggcaaaaugucuaacu

SEQ ID NO: 10828 - RNA, 22 nt, Human
ccugggggccacuuugcacagg

SEQ ID NO: 10829 - RNA, 22 nt, Human
ccuggguaguaguuaguugaca

SEQ ID NO: 10830 - RNA, 22 nt, Human
ccuguaaucucagcuacucagg

SEQ ID NO: 10831 - RNA, 24 nt, Human
ccugucuaaccucuucuguggagu

SEQ ID NO: 10832 - RNA, 24 nt, Human
ccugucuuggucuaaacauguuga

SEQ ID NO: 10833 - RNA, 22 nt, Human
ccugugagugcccucagcccua

SEQ ID NO: 10834 - RNA, 24 nt, Human
ccuguggacagcaggaugauugag

SEQ ID NO: 10835 - RNA, 24 nt, Human
ccuguguacucauaauuauugaga

SEQ ID NO: 10836 - RNA, 24 nt, Human
ccuuaugugguucauuccuucaau

SEQ ID NO: 10837 - RNA, 24 nt, Human
ccuuauuguuuggggcaaagggcc

SEQ ID NO: 10838 - RNA, 24 nt, Human
ccuucccaacaguugcgcagccug

SEQ ID NO: 10839 - RNA, 24 nt, Human
ccuugagucucggcuucgguccca

SEQ ID NO: 10840 - RNA, 24 nt, Human
ccuugcaagcgacggcgccaugag

SEQ ID NO: 10841 - RNA, 24 nt, Human
ccuugcucaucuccuugugcccuu

SEQ ID NO: 10842 - RNA, 24 nt, Human
ccuugcucuguggcuuuucccaac

SEQ ID NO: 10843 - RNA, 24 nt, Human
ccuugcucuguugcucaggcugaa

SEQ ID NO: 10844 - RNA, 24 nt, Human
ccuuugguuucugccggccucggg

SEQ ID NO: 10845 - RNA, 24 nt, Human
cgacgcguucauugcagccggcga

SEQ ID NO: 10846 - RNA, 24 nt, Human
cgacggaaagaucggggaaacucc

SEQ ID NO: 10847 - RNA, 22 nt, Human
cgacucuugaccauggcugggg

SEQ ID NO: 10848 - RNA, 24 nt, Human
cgacuggugaggacaaguggagcc

SEQ ID NO: 10849 - RNA, 24 nt, Human
cgagaggcacagaaggagcuggag

SEQ ID NO: 10850 - RNA, 24 nt, Human
cgagcagccucucgccauuucccg

SEQ ID NO: 10851 - RNA, 23 nt, Human
cgagcagcucagaccaugucgcc

SEQ ID NO: 10852 - RNA, 24 nt, Human
cgagcgggcgcuggcaccgaggcc

SEQ ID NO: 10853 - RNA, 24 nt, Human
cgagggcaacgugguaaacugggg

SEQ ID NO: 10854 - RNA, 24 nt, Human
cgagggcgacgugugggccuucgc

SEQ ID NO: 10855 - RNA, 24 nt, Human
cgaggugggccaucacacucugcu

SEQ ID NO: 10856 - RNA, 24 nt, Human
cgagguuuuuccuagggcugucug

SEQ ID NO: 10857 - RNA, 22 nt, Human
cgcaggucaggcacugcucuga

SEQ ID NO: 10858 - RNA, 24 nt, Human
cgccccaggcaccagggcgugaug

SEQ ID NO: 10859 - RNA, 24 nt, Human
cgccgggacagcagacugccggua

SEQ ID NO: 10860 - RNA, 24 nt, Human
cgccugggcacuugggcuccgggc

SEQ ID NO: 10861 - RNA, 24 nt, Human
cgcggagcccugcgagccgcgggu

SEQ ID NO: 10862 - RNA, 22 nt, Human
cgcuauguuggccaggcugguc

SEQ ID NO: 10863 - RNA, 22 nt, Human
cgcucgaggauugcuguuuuca

SEQ ID NO: 10864 - RNA, 22 nt, Human
cgcugcugucuggguucuuuuu

SEQ ID NO: 10865 - RNA, 21 nt, Human
cgcugcuuaaaaaccgagaug

SEQ ID NO: 10866 - RNA, 24 nt, Human
cgcugggaaaguccuugcugugaa

SEQ ID NO: 10867 - RNA, 24 nt, Human
cggaagcucacacggacagucaca

SEQ ID NO: 10868 - RNA, 24 nt, Human
cggaaugggccaacucacucggug

SEQ ID NO: 10869 - RNA, 24 nt, Human
cggaggugucacccucaauggcuu

SEQ ID NO: 10870 - RNA, 22 nt, Human
cggauuaugugauaccagcuca

SEQ ID NO: 10871 - RNA, 22 nt, Human
cggcaacuucuacucuuucuuc

SEQ ID NO: 10872 - RNA, 22 nt, Human
cggcaagaugccggagugcugg

SEQ ID NO: 10873 - RNA, 24 nt, Human
cggcaagguuuuauguacauaugu

SEQ ID NO: 10874 - RNA, 21 nt, Human
cggcacagccucugugagacu

SEQ ID NO: 10875 - RNA, 24 nt, Human
cggcagaggaggggaugagucuga

SEQ ID NO: 10876 - RNA, 24 nt, Human
cggcagccucagcggcucugaguc

SEQ ID NO: 10877 - RNA, 24 nt, Human
cggcagggaacggccugggacaac

SEQ ID NO: 10878 - RNA, 24 nt, Human
cggcagggcuccgagaccucggcu

SEQ ID NO: 10879 - RNA, 24 nt, Human
cggcaguagaaauagcacaggccu

SEQ ID NO: 10880 - RNA, 24 nt, Human
cggcgaccgccuccgcggcgcccc

SEQ ID NO: 10881 - RNA, 24 nt, Human
cggcgcggcaguggccucgcaggg

SEQ ID NO: 10882 - RNA, 24 nt, Human
cggcggcgaacagugucaaaugga

SEQ ID NO: 10883 - RNA, 24 nt, Human
cggcggcgaacggugucaaaugga

SEQ ID NO: 10884 - RNA, 24 nt, Human
cggcggcggcggcggcgggguggu

SEQ ID NO: 10885 - RNA, 24 nt, Human
cggcgggaaugaccacuuccggcc

SEQ ID NO: 10886 - RNA, 24 nt, Human
cggcgggcucugcgcuccgccccu

SEQ ID NO: 10887 - RNA, 24 nt, Human
cggcgggcugucguuggcuggagc

SEQ ID NO: 10888 - RNA, 24 nt, Human
cggcggggcuaacugcagcgcgga

SEQ ID NO: 10889 - RNA, 22 nt, Human
cggcguggggguuuguagacuu

SEQ ID NO: 10890 - RNA, 24 nt, Human
cggcucgugccgauucggcacgag

SEQ ID NO: 10891 - RNA, 24 nt, Human
cggcugcaggacccugucccagcg

SEQ ID NO: 10892 - RNA, 24 nt, Human
cggcugcgggaaacacaacucgcc

SEQ ID NO: 10893 - RNA, 24 nt, Human
cggcuuuuucgcggggggaaagaa

SEQ ID NO: 10894 - RNA, 24 nt, Human
cgggaccagugcuucggggaccgc

SEQ ID NO: 10895 - RNA, 24 nt, Human
cgggaggaggcgcagcgcguggcc

SEQ ID NO: 10896 - RNA, 24 nt, Human
cgggaucgggcacggagaagacau

SEQ ID NO: 10897 - RNA, 24 nt, Human
cggguucucacgcaacaacggagg

SEQ ID NO: 10898 - RNA, 24 nt, Human
cgguccgacuugucauggccccug

SEQ ID NO: 10899 - RNA, 24 nt, Human
cgucauuggacacguagauucggg

SEQ ID NO: 10900 - RNA, 24 nt, Human
cguccagagcccagguaauccggg

SEQ ID NO: 10901 - RNA, 24 nt, Human
cgucgggaggcgucguccuccagc

SEQ ID NO: 10902 - RNA, 24 nt, Human
cgucuauaacaggacuaaguucac

SEQ ID NO: 10903 - RNA, 24 nt, Human
cgucuggugggaugcgcacccccu

SEQ ID NO: 10904 - RNA, 22 nt, Human
cgucuucagcaaggaucaguuu

SEQ ID NO: 10905 - RNA, 24 nt, Human
cgugcagagggcccgcuggggccc

SEQ ID NO: 10906 - RNA, 24 nt, Human
cgugcagcuggagauccgggggug

SEQ ID NO: 10907 - RNA, 24 nt, Human
cgugcaguaccaguucgagaugga

SEQ ID NO: 10908 - RNA, 24 nt, Human
cgugcuggacaccccucggagccg

SEQ ID NO: 10909 - RNA, 24 nt, Human
cguggcagaaauccagaaaucagu

SEQ ID NO: 10910 - RNA, 24 nt, Human
cguggcagcugguuggacuagggg

SEQ ID NO: 10911 - RNA, 22 nt, Human
cguggcggcgcgcucucuucca

SEQ ID NO: 10912 - RNA, 24 nt, Human
cgugggcacuccggacgugauuaa

SEQ ID NO: 10913 - RNA, 22 nt, Human
cguggucauugguugcauaauu

SEQ ID NO: 10914 - RNA, 22 nt, Human
cguguucaguauggugggagau

SEQ ID NO: 10915 - RNA, 22 nt, Human
cguguuuucuuuaggauacaga

SEQ ID NO: 10916 - RNA, 22 nt, Human
cguucauugcuguguccuggca

SEQ ID NO: 10917 - RNA, 24 nt, Human
cguuccgagcccccgccgccgucg

SEQ ID NO: 10918 - RNA, 21 nt, Human
cguuguacuuggucuugcccc

SEQ ID NO: 10919 - RNA, 24 nt, Human
cguuugaucuucccaaaauuuucc

SEQ ID NO: 10920 - RNA, 22 nt, Human
cuaaacgagggcugguggugag

SEQ ID NO: 10921 - RNA, 24 nt, Human
cuaaagcucaaauugcucuuaaac

SEQ ID NO: 10922 - RNA, 22 nt, Human
cuaaaugaccuuagaccacuua

SEQ ID NO: 10923 - RNA, 22 nt, Human
cuaauuguuccugcagguagua

SEQ ID NO: 10924 - RNA, 22 nt, Human
cuacagccugccccugacugug

SEQ ID NO: 10925 - RNA, 24 nt, Human
cuacauggcaaucgggggcuaugu

SEQ ID NO: 10926 - RNA, 24 nt, Human
cuaccaggucucuaggggccugag

SEQ ID NO: 10927 - RNA, 23 nt, Human
cuacucccgagucuggcccucug

SEQ ID NO: 10928 - RNA, 24 nt, Human
cuacugcauuccagccugggcaac

SEQ ID NO: 10929 - RNA, 23 nt, Human
cuacuuugcugagagucuccauc

SEQ ID NO: 10930 - RNA, 24 nt, Human
cuagaaccacaggagaauggcgug

SEQ ID NO: 10931 - RNA, 24 nt, Human
cuagacagaaagggcugcuuguag

SEQ ID NO: 10932 - RNA, 22 nt, Human
cuagacggagggcccucgaggg

SEQ ID NO: 10933 - RNA, 24 nt, Human
cuagaguugugagaaaaccagaga

SEQ ID NO: 10934 - RNA, 22 nt, Human
cuagaugaggaggaggaagaug

SEQ ID NO: 10935 - RNA, 24 nt, Human
cuagcaccuuugauuuuucucagu

SEQ ID NO: 10936 - RNA, 22 nt, Human
cuagccuuaaucuuuggcaagc

SEQ ID NO: 10937 - RNA, 22 nt, Human
cuaggaagugcaagaucaaggu

SEQ ID NO: 10938 - RNA, 24 nt, Human
cuaguaacgucauggaggaugaac

SEQ ID NO: 10939 - RNA, 24 nt, Human
cuaguagcuuuucugugucucaag

SEQ ID NO: 10940 - RNA, 24 nt, Human
cuagucuuuugggacagaugggac

SEQ ID NO: 10941 - RNA, 24 nt, Human
cuagugccaguuuucuuguuugcc

SEQ ID NO: 10942 - RNA, 24 nt, Human
cuauugggaaaauacuguguucaa

SEQ ID NO: 10943 - RNA, 24 nt, Human
cucaagcgacccuccugcuucagc

SEQ ID NO: 10944 - RNA, 22 nt, Human
cucaagugaucaggauagugug

SEQ ID NO: 10945 - RNA, 24 nt, Human
cucaaguuucauuugugaaguugg

SEQ ID NO: 10946 - RNA, 22 nt, Human
cucaccaguuacucuccaguug

SEQ ID NO: 10947 - RNA, 22 nt, Human
cucaccccucaccuccucaguu

SEQ ID NO: 10948 - RNA, 22 nt, Human
cucacugcaaccuccgccuccc

SEQ ID NO: 10949 - RNA, 24 nt, Human
cucacugcaagcuccgccuccugg

SEQ ID NO: 10950 - RNA, 22 nt, Human
cucaggaggcgggggcugcaau

SEQ ID NO: 10951 - RNA, 22 nt, Human
cucaggucuucugagcucaauc

SEQ ID NO: 10952 - RNA, 22 nt, Human
cucagugugaagaacuacgggu

SEQ ID NO: 10953 - RNA, 24 nt, Human
cuccaacaacagcaaggaggaugc

SEQ ID NO: 10954 - RNA, 23 nt, Human
cuccaggggcgugacaacgucca

SEQ ID NO: 10955 - RNA, 24 nt, Human
cuccaucauggaggagugcggcgg

SEQ ID NO: 10956 - RNA, 22 nt, Human
cuccauguuggucaggcugguc

SEQ ID NO: 10957 - RNA, 24 nt, Human
cucccagacuaguggugcugggau

SEQ ID NO: 10958 - RNA, 24 nt, Human
cuccccauccuacacaccuccuca

SEQ ID NO: 10959 - RNA, 24 nt, Human
cuccccuucucccggccuuccucu

SEQ ID NO: 10960 - RNA, 24 nt, Human
cucccguaauuaggaauuuuccau

SEQ ID NO: 10961 - RNA, 24 nt, Human
cucccuacgucacacuccggaggg

SEQ ID NO: 10962 - RNA, 22 nt, Human
cucccuccacuucugaggacgu

SEQ ID NO: 10963 - RNA, 22 nt, Human
cuccgcuccgaugugaagucua

SEQ ID NO: 10964 - RNA, 24 nt, Human
cuccggguauucaucugcagagca

SEQ ID NO: 10965 - RNA, 24 nt, Human
cuccggguccccagccaaccuggc

SEQ ID NO: 10966 - RNA, 24 nt, Human
cuccuaaucccagauguaccgcga

SEQ ID NO: 10967 - RNA, 21 nt, Human
cuccuacaacugacucucugg

SEQ ID NO: 10968 - RNA, 22 nt, Human
cuccuacaacugacucucugga

SEQ ID NO: 10969 - RNA, 24 nt, Human
cuccucaggcugggguaaggugug

SEQ ID NO: 10970 - RNA, 24 nt, Human
cuccucccagacaguuugaugcau

SEQ ID NO: 10971 - RNA, 24 nt, Human
cuccugcgucauccggaagcggac

SEQ ID NO: 10972 - RNA, 21 nt, Human
cuccugggucccacugguucu

SEQ ID NO: 10973 - RNA, 23 nt, Human
cuccuguugcguuuaggcaccca

SEQ ID NO: 10974 - RNA, 24 nt, Human
cuccuugucucgcucccggcuccg

SEQ ID NO: 10975 - RNA, 24 nt, Human
cuccuuguggccuuccuugaggag

SEQ ID NO: 10976 - RNA, 22 nt, Human
cuccuuugggggcucuaaggga

SEQ ID NO: 10977 - RNA, 22 nt, Human
cucgacggaaugcugacagguu

SEQ ID NO: 10978 - RNA, 24 nt, Human
cucgagguugcaggacucuuucug

SEQ ID NO: 10979 - RNA, 22 nt, Human
cucgaguagcugggauuacagg

SEQ ID NO: 10980 - RNA, 23 nt, Human
cucgcgugggucuuaacacaguu

SEQ ID NO: 10981 - RNA, 23 nt, Human
cucggcgcccugcgcgagcuccc

SEQ ID NO: 10982 - RNA, 24 nt, Human
cucguaguguucuggcgggcaguu

SEQ ID NO: 10983 - RNA, 24 nt, Human
cucgucuugaauuccugaccccag

SEQ ID NO: 10984 - RNA, 24 nt, Human
cucguggggccugagaaccucacc

SEQ ID NO: 10985 - RNA, 24 nt, Human
cucuaaguacaaagacuuauuucu

SEQ ID NO: 10986 - RNA, 24 nt, Human
cucucugcauggcucuggccaucc

SEQ ID NO: 10987 - RNA, 24 nt, Human
cucugcuccuggugccagugcugc

SEQ ID NO: 10988 - RNA, 22 nt, Human
cucuggaucuugagcugguuua

SEQ ID NO: 10989 - RNA, 22 nt, Human
cucugucuuucuaggaguaugu

SEQ ID NO: 10990 - RNA, 22 nt, Human
cucuuuuauaugcuagauuuca

SEQ ID NO: 10991 - RNA, 24 nt, Human
cugaauccuuugccuguggguagg

SEQ ID NO: 10992 - RNA, 24 nt, Human
cugacucaugaacagguggaggaa

SEQ ID NO: 10993 - RNA, 22 nt, Human
cugagcaagagguggugagguu

SEQ ID NO: 10994 - RNA, 22 nt, Human
cugagccccggcacugccuggc

SEQ ID NO: 10995 - RNA, 24 nt, Human
cugauccuuuaaccccuucucagg

SEQ ID NO: 10996 - RNA, 22 nt, Human
cugauguucacucagguaggau

SEQ ID NO: 10997 - RNA, 24 nt, Human
cugcaaccuccaccucuggaguuc

SEQ ID NO: 10998 - RNA, 22 nt, Human
cugcaauuuccccuaagccagg

SEQ ID NO: 10999 - RNA, 24 nt, Human
cugcacccaggucccgucuuagag

SEQ ID NO: 11000 - RNA, 24 nt, Human
cugcacccuagccugggcgauaga

SEQ ID NO: 11001 - RNA, 24 nt, Human
cugcacgacgcacuggcccaggac

SEQ ID NO: 11002 - RNA, 22 nt, Human
cugcacuagaaggcacuauguu

SEQ ID NO: 11003 - RNA, 24 nt, Human
cugcagaugcaucccaauaaucag

SEQ ID NO: 11004 - RNA, 24 nt, Human
cugcagcagcaugcacuucuuggu

SEQ ID NO: 11005 - RNA, 24 nt, Human
cugcagcccaugggucaaagagua

SEQ ID NO: 11006 - RNA, 24 nt, Human
cugcagcgaccacagaccugggcu

SEQ ID NO: 11007 - RNA, 22 nt, Human
cugcagcucccaaggacacaag

SEQ ID NO: 11008 - RNA, 24 nt, Human
cugcagugagccaagaucgugcca

SEQ ID NO: 11009 - RNA, 24 nt, Human
cugcaucguccacuccggucggcg

SEQ ID NO: 11010 - RNA, 22 nt, Human
cugcauggagguggucuaugag

SEQ ID NO: 11011 - RNA, 22 nt, Human
cugccacaguagcucaaccaag

SEQ ID NO: 11012 - RNA, 22 nt, Human
cugccauuuccaggagaucacc

SEQ ID NO: 11013 - RNA, 22 nt, Human
cugcccagcgugaccaguggcc

SEQ ID NO: 11014 - RNA, 24 nt, Human
cugccccagcugcugcaggggccu

SEQ ID NO: 11015 - RNA, 24 nt, Human
cugccccuucaggguuuggaggag

SEQ ID NO: 11016 - RNA, 24 nt, Human
cugcccgcugcucucccacuccac

SEQ ID NO: 11017 - RNA, 24 nt, Human
cugccgggaaagagcuccugaagu

SEQ ID NO: 11018 - RNA, 22 nt, Human
cugccuaaggcacuggguauau

SEQ ID NO: 11019 - RNA, 22 nt, Human
cugccucaggagcuaugugucc

SEQ ID NO: 11020 - RNA, 24 nt, Human
cugcucugcgucggucccgcgcgc

SEQ ID NO: 11021 - RNA, 24 nt, Human
cugcugcgccuguaagagugagac

SEQ ID NO: 11022 - RNA, 24 nt, Human
cugcugcuccccagcccaccagug

SEQ ID NO: 11023 - RNA, 24 nt, Human
cugcuguaggcugggcuacaggga

SEQ ID NO: 11024 - RNA, 24 nt, Human
cuggaacugagggacaaagguuuu

SEQ ID NO: 11025 - RNA, 24 nt, Human
cuggaccaggccgagggcaggccu

SEQ ID NO: 11026 - RNA, 20 nt, Human
cuggacccaaggugugagcc

SEQ ID NO: 11027 - RNA, 22 nt, Human
cuggagccucuacuuauuaccc

SEQ ID NO: 11028 - RNA, 23 nt, Human
cuggagccucuacuuauuacccu

SEQ ID NO: 11029 - RNA, 22 nt, Human
cuggagcucagcccagguucca

SEQ ID NO: 11030 - RNA, 24 nt, Human
cuggagcuggauccgccagccccc

SEQ ID NO: 11031 - RNA, 24 nt, Human
cuggaugcccagcguggaagaaaa

SEQ ID NO: 11032 - RNA, 24 nt, Human
cuggaugggcugcuccucccaggg

SEQ ID NO: 11033 - RNA, 24 nt, Human
cuggauuccaguaagcucuuuauu

SEQ ID NO: 11034 - RNA, 24 nt, Human
cuggccccagccccaucaccgaaa

SEQ ID NO: 11035 - RNA, 24 nt, Human
cuggcccccagaucugccccucca

SEQ ID NO: 11036 - RNA, 22 nt, Human
cuggccccucaucugguuucau

SEQ ID NO: 11037 - RNA, 24 nt, Human
cuggccggccagggagcccacagu

SEQ ID NO: 11038 - RNA, 22 nt, Human
cuggcuaauuuucuugaguuuu

SEQ ID NO: 11039 - RNA, 24 nt, Human
cuggcucccggagcggucgccucu

SEQ ID NO: 11040 - RNA, 22 nt, Human
cuggcucccucucuucucuccc

SEQ ID NO: 11041 - RNA, 22 nt, Human
cuggcucuacccucucacuuca

SEQ ID NO: 11042 - RNA, 24 nt, Human
cuggcuguuuuuuggaccuaaggg

SEQ ID NO: 11043 - RNA, 24 nt, Human
cugggacccaucuccacaacugga

SEQ ID NO: 11044 - RNA, 22 nt, Human
cugggaggcagagguuguugca

SEQ ID NO: 11045 - RNA, 22 nt, Human
cugggauuacaggugugaacca

SEQ ID NO: 11046 - RNA, 24 nt, Human
cugggcccagauggccccuucuga

SEQ ID NO: 11047 - RNA, 22 nt, Human
cugggcgugugaggcggcugug

SEQ ID NO: 11048 - RNA, 22 nt, Human
cugggcucaguggcucacaccu

SEQ ID NO: 11049 - RNA, 24 nt, Human
cugggcuuggccagucggcaguga

SEQ ID NO: 11050 - RNA, 22 nt, Human
cuggggaaauguugcugguuga

SEQ ID NO: 11051 - RNA, 24 nt, Human
cuggggcccuauguuguagauucu

SEQ ID NO: 11052 - RNA, 24 nt, Human
cuggggcgucgggccacggaagcc

SEQ ID NO: 11053 - RNA, 22 nt, Human
cuggggcuccucuacuggaucu

SEQ ID NO: 11054 - RNA, 22 nt, Human
cuggguggccuucaguccauga

SEQ ID NO: 11055 - RNA, 23 nt, Human
cugguaccagugcaagaaugggg

SEQ ID NO: 11056 - RNA, 24 nt, Human
cugguccgagcgcgggaaacggcg

SEQ ID NO: 11057 - RNA, 24 nt, Human
cuggugcuaguguuucuaucagau

SEQ ID NO: 11058 - RNA, 24 nt, Human
cuggugcugcugacggagcugcug

SEQ ID NO: 11059 - RNA, 24 nt, Human
cugguuuuaggagauuuuuaugac

SEQ ID NO: 11060 - RNA, 24 nt, Human
cuguacccauguuaugugacucuc

SEQ ID NO: 11061 - RNA, 24 nt, Human
cugucacacccacaagcuccuugg

SEQ ID NO: 11062 - RNA, 24 nt, Human
cugucaucugcagguuccugguag

SEQ ID NO: 11063 - RNA, 22 nt, Human
cugucgcgguguguaucuuuug

SEQ ID NO: 11064 - RNA, 24 nt, Human
cugugacucuucucucaaccuugg

SEQ ID NO: 11065 - RNA, 22 nt, Human
cugugagcuauuuguuuugguu

SEQ ID NO: 11066 - RNA, 24 nt, Human
cugugccacgcguggcugcggaag

SEQ ID NO: 11067 - RNA, 22 nt, Human
cugugcccagccagggcugugu

SEQ ID NO: 11068 - RNA, 23 nt, Human
cugugccugcagaggagcugcuc

SEQ ID NO: 11069 - RNA, 24 nt, Human
cugugcuuucaaaacugugcaguc

SEQ ID NO: 11070 - RNA, 22 nt, Human
cuguggauacugagagaugacu

SEQ ID NO: 11071 - RNA, 22 nt, Human
cuguggauuuacuugagaagcu

SEQ ID NO: 11072 - RNA, 22 nt, Human
cuguucagaucugugugcauuu

SEQ ID NO: 11073 - RNA, 22 nt, Human
cuuaagaucacagagcuaauga

SEQ ID NO: 11074 - RNA, 22 nt, Human
cuuaggucuaguucuccugggg

SEQ ID NO: 11075 - RNA, 22 nt, Human
cuucaaugcuugagaagucgua

SEQ ID NO: 11076 - RNA, 22 nt, Human
cuucacagcaugcucagguaac

SEQ ID NO: 11077 - RNA, 24 nt, Human
cuucagcgugacgucuggugggca

SEQ ID NO: 11078 - RNA, 22 nt, Human
cuucauggcuauucaggcucag

SEQ ID NO: 11079 - RNA, 22 nt, Human
cuucauucaaguucgcuauagu

SEQ ID NO: 11080 - RNA, 24 nt, Human
cuucauuuuugauggcuggcucug

SEQ ID NO: 11081 - RNA, 24 nt, Human
cuuccaccauucccagaacugauc

SEQ ID NO: 11082 - RNA, 22 nt, Human
cuuccagaugacuugauuggau

SEQ ID NO: 11083 - RNA, 24 nt, Human
cuucccaaagcuagggccguuccc

SEQ ID NO: 11084 - RNA, 24 nt, Human
cuuccccgaugagaacuucaaacu

SEQ ID NO: 11085 - RNA, 22 nt, Human
cuucccuaagggacuggcauag

SEQ ID NO: 11086 - RNA, 24 nt, Human
cuucccucaguuugaaguguuagg

SEQ ID NO: 11087 - RNA, 24 nt, Human
cuuccuccguguuggagaccuggu

SEQ ID NO: 11088 - RNA, 24 nt, Human
cuuccuggaguugauggaauaaag

SEQ ID NO: 11089 - RNA, 21 nt, Human
cuuccugucccaaaggaagug

SEQ ID NO: 11090 - RNA, 24 nt, Human
cuuccugugcccucugaaagcuaa

SEQ ID NO: 11091 - RNA, 24 nt, Human
cuucgaggaccugucccaugugca

SEQ ID NO: 11092 - RNA, 24 nt, Human
cuucgcgggggcggcgggcggccc

SEQ ID NO: 11093 - RNA, 24 nt, Human
cuucguguccaacccucuugcccu

SEQ ID NO: 11094 - RNA, 24 nt, Human
cuucugguucuccgcuccgccucg

SEQ ID NO: 11095 - RNA, 24 nt, Human
cuucuuggucucggcgugccccau

SEQ ID NO: 11096 - RNA, 22 nt, Human
cuugauucauuuaagguuggag

SEQ ID NO: 11097 - RNA, 24 nt, Human
cuugcagcccacagggcuggagaa

SEQ ID NO: 11098 - RNA, 23 nt, Human
cuugcccuucauagaaguccaag

SEQ ID NO: 11099 - RNA, 22 nt, Human
cuugcucuguuuaucugugagg

SEQ ID NO: 11100 - RNA, 24 nt, Human
cuuggagaccucccucucagucaa

SEQ ID NO: 11101 - RNA, 24 nt, Human
cuuggagcuguccauugcagacca

SEQ ID NO: 11102 - RNA, 21 nt, Human
cuuggcacuggccgucguuuu

SEQ ID NO: 11103 - RNA, 24 nt, Human
cuuggcucuggccuuggcucuggc

SEQ ID NO: 11104 - RNA, 23 nt, Human
cuugucccaaggaaagucuagau

SEQ ID NO: 11105 - RNA, 20 nt, Human
cuugucucacuuuacucugu

SEQ ID NO: 11106 - RNA, 22 nt, Human
cuugucugaaagucgugcuuua

SEQ ID NO: 11107 - RNA, 22 nt, Human
cuuguugggaacaccuggauag

SEQ ID NO: 11108 - RNA, 22 nt, Human
cuuuaagaacagacagcuccag

SEQ ID NO: 11109 - RNA, 22 nt, Human
cuuuagugcuucucagucaaca

SEQ ID NO: 11110 - RNA, 24 nt, Human
cuuuaugucucacauucaugucau

SEQ ID NO: 11111 - RNA, 22 nt, Human
cuuucacacaggucagaaggau

SEQ ID NO: 11112 - RNA, 24 nt, Human
cuuucaggcccgucucaagagcug

SEQ ID NO: 11113 - RNA, 24 nt, Human
cuuucaguggaggcauuaaaguac

SEQ ID NO: 11114 - RNA, 24 nt, Human
cuuuccaaaaacugauauagucca

SEQ ID NO: 11115 - RNA, 24 nt, Human
cuuuccagccacuggacgaguaag

SEQ ID NO: 11116 - RNA, 24 nt, Human
cuuuccuggagaggaggcuaaggu

SEQ ID NO: 11117 - RNA, 22 nt, Human
cuuucuaggguuuccaggcaag

SEQ ID NO: 11118 - RNA, 24 nt, Human
cuuucuugacgccaagguagcuua

SEQ ID NO: 11119 - RNA, 24 nt, Human
cuuugaagacucuguccgaaaguu

SEQ ID NO: 11120 - RNA, 22 nt, Human
cuuugaauuucacacgggggca

SEQ ID NO: 11121 - RNA, 24 nt, Human
cuuugagauacuccacacugagca

SEQ ID NO: 11122 - RNA, 24 nt, Human
cuuugaguuucacaaacuccucuu

SEQ ID NO: 11123 - RNA, 24 nt, Human
cuuugggaugcaaggcaguuguuc

SEQ ID NO: 11124 - RNA, 23 nt, Human
cuuugggccuggccuguucuguu

SEQ ID NO: 11125 - RNA, 24 nt, Human
cuuugugcuugggguagaucuucu

SEQ ID NO: 11126 - RNA, 24 nt, Human
cuuuguguacagagguccgggucu

SEQ ID NO: 11127 - RNA, 22 nt, Human
cuuuuauugacagugacuuugc

SEQ ID NO: 11128 - RNA, 22 nt, Human
cuuuucaucagaugccacaucu

SEQ ID NO: 11129 - RNA, 22 nt, Human
cuuuuccaagcuauucaggcac

SEQ ID NO: 11130 - RNA, 22 nt, Human
cuuuuugggcugggguugcuga

SEQ ID NO: 11131 - RNA, 24 nt, Human
gaaaauuuuaaauggccgggaccu

SEQ ID NO: 11132 - RNA, 24 nt, Human
gaaacgccaacuauaaccccuccc

SEQ ID NO: 11133 - RNA, 22 nt, Human
gaaaguaguaaguuguauaguu

SEQ ID NO: 11134 - RNA, 22 nt, Human
gaaagugaggaggugguucagg

SEQ ID NO: 11135 - RNA, 22 nt, Human
gaacagcuccagucuacagccc

SEQ ID NO: 11136 - RNA, 24 nt, Human
gaacagguuggaaguguggaguca

SEQ ID NO: 11137 - RNA, 24 nt, Human
gaacauuggggugaggggcaaaau

SEQ ID NO: 11138 - RNA, 22 nt, Human
gaacauuuggcuuggcaggugc

SEQ ID NO: 11139 - RNA, 24 nt, Human
gaacgcgcgcucaccgugcgcgcu

SEQ ID NO: 11140 - RNA, 24 nt, Human
gaacuggaagauugcucuccgagu

SEQ ID NO: 11141 - RNA, 24 nt, Human
gaacugugcacaggaacagcuucc

SEQ ID NO: 11142 - RNA, 24 nt, Human
gaacuuggccucaguacgucuggg

SEQ ID NO: 11143 - RNA, 22 nt, Human
gaacuuuacauaugugagauag

SEQ ID NO: 11144 - RNA, 24 nt, Human
gaagaccagggaauuuaucagagc

SEQ ID NO: 11145 - RNA, 24 nt, Human
gaaggacugccaaccucuacuccc

SEQ ID NO: 11146 - RNA, 24 nt, Human
gaaggcaaacauguucagaaguca

SEQ ID NO: 11147 - RNA, 24 nt, Human
gaagggcagaaucaggcuaucucu

SEQ ID NO: 11148 - RNA, 24 nt, Human
gaagugaaaauuguucaguccaag

SEQ ID NO: 11149 - RNA, 24 nt, Human
gaagugauuugcuccuuaaagggg

SEQ ID NO: 11150 - RNA, 22 nt, Human
gaauauagcagcacccagugag

SEQ ID NO: 11151 - RNA, 22 nt, Human
gaaucauuggucagccacagug

SEQ ID NO: 11152 - RNA, 24 nt, Human
gaaugcgccucuucgcugugccgg

SEQ ID NO: 11153 - RNA, 24 nt, Human
gaaugcuuuuaacucugucccauu

SEQ ID NO: 11154 - RNA, 22 nt, Human
gaauuagcuauucuauacucua

SEQ ID NO: 11155 - RNA, 24 nt, Human
gacaauggucaccgucucuucagc

SEQ ID NO: 11156 - RNA, 23 nt, Human
gacaauguggaaaaaacccuaaa

SEQ ID NO: 11157 - RNA, 24 nt, Human
gacaccucuggccuccagcccugc

SEQ ID NO: 11158 - RNA, 24 nt, Human
gacacgccagaggaggaggccggg

SEQ ID NO: 11159 - RNA, 24 nt, Human
gacacgggcuguggggcccccggg

SEQ ID NO: 11160 - RNA, 21 nt, Human
gacagcuucccuuccugggac

SEQ ID NO: 11161 - RNA, 22 nt, Human
gacaggaucugugccucaaccc

SEQ ID NO: 11162 - RNA, 24 nt, Human
gacaguaggccaggggccuguggu

SEQ ID NO: 11163 - RNA, 22 nt, Human
gacaugauguagcagaugaugg

SEQ ID NO: 11164 - RNA, 24 nt, Human
gacauggucugggacuucuggagc

SEQ ID NO: 11165 - RNA, 24 nt, Human
gacauuguuggcuucacagcauug

SEQ ID NO: 11166 - RNA, 24 nt, Human
gaccagcacccacacucaggcucu

SEQ ID NO: 11167 - RNA, 22 nt, Human
gaccagccauccugguuuacau

SEQ ID NO: 11168 - RNA, 24 nt, Human
gaccaggcagggucaggcugaccu

SEQ ID NO: 11169 - RNA, 24 nt, Human
gaccaguaacugucaauggcuaaa

SEQ ID NO: 11170 - RNA, 24 nt, Human
gaccccaccucuucccugccgacc

SEQ ID NO: 11171 - RNA, 24 nt, Human
gaccccagcgucucgguccauccc

SEQ ID NO: 11172 - RNA, 22 nt, Human
gacccuguguucaagguuaggg

SEQ ID NO: 11173 - RNA, 24 nt, Human
gaccgcuucccugcagugccccga

SEQ ID NO: 11174 - RNA, 24 nt, Human
gaccgguccgaccuggcguccucc

SEQ ID NO: 11175 - RNA, 24 nt, Human
gaccugaggcagaacuggggugga

SEQ ID NO: 11176 - RNA, 24 nt, Human
gaccugggaagcgaagaagaggag

SEQ ID NO: 11177 - RNA, 24 nt, Human
gaccuugacucuugugcuggucuu

SEQ ID NO: 11178 - RNA, 23 nt, Human
gaccuuuucaaaaaagcaagcuc

SEQ ID NO: 11179 - RNA, 24 nt, Human
gacuaguuuucuuucuuuugcuac

SEQ ID NO: 11180 - RNA, 24 nt, Human
gacucuggucgguuacugauacgg

SEQ ID NO: 11181 - RNA, 24 nt, Human
gacucuuucugcaagauaccugua

SEQ ID NO: 11182 - RNA, 24 nt, Human
gacugcguggcuagcuugggcaug

SEQ ID NO: 11183 - RNA, 24 nt, Human
gacugggaggaaacagcuggccaa

SEQ ID NO: 11184 - RNA, 24 nt, Human
gacuucgugcuccuucaggaggcc

SEQ ID NO: 11185 - RNA, 24 nt, Human
gacuuuagucacuagguucuagga

SEQ ID NO: 11186 - RNA, 21 nt, Human
gagaaaaucauucagcagcug

SEQ ID NO: 11187 - RNA, 24 nt, Human
gagaaucaacaacguggagaccua

SEQ ID NO: 11188 - RNA, 21 nt, Human
gagaaucugagacaucuugcc

SEQ ID NO: 11189 - RNA, 23 nt, Human
gagacuguugaaugugagaugau

SEQ ID NO: 11190 - RNA, 23 nt, Human
gagacuuuuuauuauugcuuuga

SEQ ID NO: 11191 - RNA, 22 nt, Human
gagagagguagaggggagcaga

SEQ ID NO: 11192 - RNA, 22 nt, Human
gagagaguuuucuuguucagga

SEQ ID NO: 11193 - RNA, 22 nt, Human
gagaucagauggaauggaggcu

SEQ ID NO: 11194 - RNA, 24 nt, Human
gagcacagagauuuuugcuuuuuu

SEQ ID NO: 11195 - RNA, 23 nt, Human
gagcacagcgcagcgcgggcggc

SEQ ID NO: 11196 - RNA, 24 nt, Human
gagcagauaaccauuguuucucgg

SEQ ID NO: 11197 - RNA, 24 nt, Human
gagcagcguccacccucggcccuc

SEQ ID NO: 11198 - RNA, 24 nt, Human
gagcagcugccuucaggcccugcg

SEQ ID NO: 11199 - RNA, 24 nt, Human
gagcaggaaaccccagugagugca

SEQ ID NO: 11200 - RNA, 24 nt, Human
gagcaggccggaaguggcuuuccg

SEQ ID NO: 11201 - RNA, 24 nt, Human
gagcaggcgaguccaggaggggcc

SEQ ID NO: 11202 - RNA, 24 nt, Human
gagcaggugugaguugccuuccau

SEQ ID NO: 11203 - RNA, 24 nt, Human
gagcagguguucugggccccuuca

SEQ ID NO: 11204 - RNA, 24 nt, Human
gagcagugcguacaugguugugcg

SEQ ID NO: 11205 - RNA, 24 nt, Human
gagcaucuucucucggacucggga

SEQ ID NO: 11206 - RNA, 24 nt, Human
gagcauggggaggggugugguggg

SEQ ID NO: 11207 - RNA, 22 nt, Human
gagcaugguggugcgcgccugu

SEQ ID NO: 11208 - RNA, 24 nt, Human
gagcaugugguucgcaccacuucu

SEQ ID NO: 11209 - RNA, 22 nt, Human
gagcauguuuucauuugcacaa

SEQ ID NO: 11210 - RNA, 24 nt, Human
gagcauugaccggggcugugcugg

SEQ ID NO: 11211 - RNA, 24 nt, Human
gagcauugacuuccuuucucuccc

SEQ ID NO: 11212 - RNA, 22 nt, Human
gagcggcagaaccagaguucga

SEQ ID NO: 11213 - RNA, 22 nt, Human
gagcuaaggauagaggugagga

SEQ ID NO: 11214 - RNA, 24 nt, Human
gagcuagcauaauaguauuuauua

SEQ ID NO: 11215 - RNA, 24 nt, Human
gagcucaucaccagguuccucccg

SEQ ID NO: 11216 - RNA, 24 nt, Human
gagcugguacaccguccggaaggc

SEQ ID NO: 11217 - RNA, 22 nt, Human
gagcuuccgcgccgacuucucu

SEQ ID NO: 11218 - RNA, 21 nt, Human
gaggacgucaggaggcccugc

SEQ ID NO: 11219 - RNA, 24 nt, Human
gaggacucccaacccuggcuuggu

SEQ ID NO: 11220 - RNA, 24 nt, Human
gaggagcagcucaguccagcguga

SEQ ID NO: 11221 - RNA, 24 nt, Human
gaggagcaguugucugaugaagag

SEQ ID NO: 11222 - RNA, 24 nt, Human
gaggaguccugaacccugggugca

SEQ ID NO: 11223 - RNA, 24 nt, Human
gaggaucacuuuugcccaggaguu

SEQ ID NO: 11224 - RNA, 23 nt, Human
gaggauccuaaugaaauaccuga

SEQ ID NO: 11225 - RNA, 24 nt, Human
gaggaugaagggcuggcuguuggg

SEQ ID NO: 11226 - RNA, 24 nt, Human
gaggauguucuggaagagcugaca

SEQ ID NO: 11227 - RNA, 23 nt, Human
gaggcccaguccugcccgggccc

SEQ ID NO: 11228 - RNA, 24 nt, Human
gaggcgccugcuuuuccuuggccu

SEQ ID NO: 11229 - RNA, 22 nt, Human
gagggagauagugaggggaggg

SEQ ID NO: 11230 - RNA, 22 nt, Human
gaggggcagggucaccaucuca

SEQ ID NO: 11231 - RNA, 22 nt, Human
gagguggagaaauagcccgggc

SEQ ID NO: 11232 - RNA, 24 nt, Human
gagguuauaaggaucuuggcucua

SEQ ID NO: 11233 - RNA, 24 nt, Human
gagguuccuccuuguccuugaugg

SEQ ID NO: 11234 - RNA, 22 nt, Human
gaguacaaaugaagucuguggg

SEQ ID NO: 11235 - RNA, 22 nt, Human
gagucccuguuguucugcaaca

SEQ ID NO: 11236 - RNA, 22 nt, Human
gagucgagaaagagaaaaugga

SEQ ID NO: 11237 - RNA, 24 nt, Human
gagugcaccugggguugggggcac

SEQ ID NO: 11238 - RNA, 24 nt, Human
gagugcccagggcugaggguggcu

SEQ ID NO: 11239 - RNA, 22 nt, Human
gaguuuuaucaccuuaugcagg

SEQ ID NO: 11240 - RNA, 22 nt, Human
gauaucaugggaagguguacuu

SEQ ID NO: 11241 - RNA, 23 nt, Human
gaucacaguuacuuucucagcaa

SEQ ID NO: 11242 - RNA, 22 nt, Human
gaucacuuuagcuuucuccugg

SEQ ID NO: 11243 - RNA, 24 nt, Human
gaucaggcugcaaggaaauggagg

SEQ ID NO: 11244 - RNA, 23 nt, Human
gaucccauauuguuuccaucuuu

SEQ ID NO: 11245 - RNA, 24 nt, Human
gaucccucccccagcucugcuggg

SEQ ID NO: 11246 - RNA, 22 nt, Human
gaucgcuuccugauagaagaug

SEQ ID NO: 11247 - RNA, 24 nt, Human
gaucuggacuccgacccggcgcca

SEQ ID NO: 11248 - RNA, 22 nt, Human
gaugaacagugagagauuccca

SEQ ID NO: 11249 - RNA, 24 nt, Human
gaugaagccagugauuaggguguu

SEQ ID NO: 11250 - RNA, 18 nt, Human
gaugaggcagcacuuggg

SEQ ID NO: 11251 - RNA, 24 nt, Human
gaugauacaugucagugcugugga

SEQ ID NO: 11252 - RNA, 24 nt, Human
gaugcuguuugugccagaagcugg

SEQ ID NO: 11253 - RNA, 24 nt, Human
gauggcaagaacugcuggagacac

SEQ ID NO: 11254 - RNA, 24 nt, Human
gauggugugcccucgguugggucc

SEQ ID NO: 11255 - RNA, 22 nt, Human
gauguugaugagcuugugugca

SEQ ID NO: 11256 - RNA, 24 nt, Human
gauuacagaugugagccaccaugg

SEQ ID NO: 11257 - RNA, 23 nt, Human
gauuacaggaugauaggcugcgu

SEQ ID NO: 11258 - RNA, 24 nt, Human
gauuacaggcaugagccacugcac

SEQ ID NO: 11259 - RNA, 24 nt, Human
gauuacaggcaugagucaccauac

SEQ ID NO: 11260 - RNA, 24 nt, Human
gauuacaggugugagccacugugc

SEQ ID NO: 11261 - RNA, 22 nt, Human
gcaauauuucuauauauguguc

SEQ ID NO: 11262 - RNA, 24 nt, Human
gcacaaguugcggcagcugccuga

SEQ ID NO: 11263 - RNA, 22 nt, Human
gcaccugcuguguacgguauau

SEQ ID NO: 11264 - RNA, 24 nt, Human
gcacgguggugacuguccgggaug

SEQ ID NO: 11265 - RNA, 24 nt, Human
gcagaagagggaaagacaggggaa

SEQ ID NO: 11266 - RNA, 24 nt, Human
gcagaccugacauccaguacccug

SEQ ID NO: 11267 - RNA, 24 nt, Human
gcagagcguccuggcacuaacuca

SEQ ID NO: 11268 - RNA, 22 nt, Human
gcagcucccuauuccaugacag

SEQ ID NO: 11269 - RNA, 22 nt, Human
gcaggaagauugcagaaggcug

SEQ ID NO: 11270 - RNA, 24 nt, Human
gcaggccaaggcagugcugagcgc

SEQ ID NO: 11271 - RNA, 22 nt, Human
gcaguauuguguguggucaugg

SEQ ID NO: 11272 - RNA, 22 nt, Human
gcauuucaccaggcauucuuua

SEQ ID NO: 11273 - RNA, 24 nt, Human
gccaaauuuccacuuucagcaguu

SEQ ID NO: 11274 - RNA, 20 nt, Human
gccaaguuccaguucaucuu

SEQ ID NO: 11275 - RNA, 24 nt, Human
gccacaggguuccuacucgccccu

SEQ ID NO: 11276 - RNA, 22 nt, Human
gccaccaugcccagcuaauacc

SEQ ID NO: 11277 - RNA, 24 nt, Human
gccacuggccuugccuuuggcaca

SEQ ID NO: 11278 - RNA, 24 nt, Human
gccagguuuccgauugucgauuca

SEQ ID NO: 11279 - RNA, 22 nt, Human
gccaugcggagcuucuagaugc

SEQ ID NO: 11280 - RNA, 24 nt, Human
gccauguugccucggcuggucuag

SEQ ID NO: 11281 - RNA, 22 nt, Human
gccauuccucuauaagcgggug

SEQ ID NO: 11282 - RNA, 22 nt, Human
gccauugcacuccagccugggu

SEQ ID NO: 11283 - RNA, 24 nt, Human
gcccagaggugcaaggagcugggu

SEQ ID NO: 11284 - RNA, 24 nt, Human
gcccagagucugagucccagcccu

SEQ ID NO: 11285 - RNA, 24 nt, Human
gccccaggugauccacccacuuua

SEQ ID NO: 11286 - RNA, 24 nt, Human
gccccgaggaggcggcuccucuuc

SEQ ID NO: 11287 - RNA, 24 nt, Human
gccccggauaccuggacugcuuag

SEQ ID NO: 11288 - RNA, 24 nt, Human
gccccgggagaaacacgccagggg

SEQ ID NO: 11289 - RNA, 24 nt, Human
gccccgguagcaagcauggcaggg

SEQ ID NO: 11290 - RNA, 24 nt, Human
gccccugugacuccaaguauaagg

SEQ ID NO: 11291 - RNA, 24 nt, Human
gcccggaagaucaagucgugcucc

SEQ ID NO: 11292 - RNA, 24 nt, Human
gcccggagcaccuccaugccucag

SEQ ID NO: 11293 - RNA, 23 nt, Human
gcccgggggccccucaagugugu

SEQ ID NO: 11294 - RNA, 22 nt, Human
gcccuagaaaauuaauauguga

SEQ ID NO: 11295 - RNA, 24 nt, Human
gcccugggcagcaacaagcugggu

SEQ ID NO: 11296 - RNA, 22 nt, Human
gcccuguugaccagaauuuguu

SEQ ID NO: 11297 - RNA, 24 nt, Human
gcccuguuugauuaugaucggacu

SEQ ID NO: 11298 - RNA, 22 nt, Human
gccgccuuuucagaagcggugc

SEQ ID NO: 11299 - RNA, 22 nt, Human
gccgucagucucccacuagcug

SEQ ID NO: 11300 - RNA, 24 nt, Human
gccgugcgcacccaggagaaggag

SEQ ID NO: 11301 - RNA, 22 nt, Human
gccuaggccagugcaguccagu

SEQ ID NO: 11302 - RNA, 22 nt, Human
gccucaaaaguguuguagaggg

SEQ ID NO: 11303 - RNA, 22 nt, Human
gccucagucucccgaguagcug

SEQ ID NO: 11304 - RNA, 22 nt, Human
gccuccuucauggaauucagug

SEQ ID NO: 11305 - RNA, 22 nt, Human
gccuggccuuccuguguuuuac

SEQ ID NO: 11306 - RNA, 22 nt, Human
gccugggaggacaagccgaguu

SEQ ID NO: 11307 - RNA, 24 nt, Human
gcgaaaagcuuucagaaacacugg

SEQ ID NO: 11308 - RNA, 24 nt, Human
gcgaaggguagcucccuccucgug

SEQ ID NO: 11309 - RNA, 24 nt, Human
gcgaccgccuccgcggcgccccug

SEQ ID NO: 11310 - RNA, 24 nt, Human
gcgagccagagcggggaggccggc

SEQ ID NO: 11311 - RNA, 24 nt, Human
gcgccuggcgggacgugugggccg

SEQ ID NO: 11312 - RNA, 24 nt, Human
gcgcgggucaaccuggccacgugc

SEQ ID NO: 11313 - RNA, 24 nt, Human
gcgcguugcugcggccgugguccg

SEQ ID NO: 11314 - RNA, 24 nt, Human
gcggaucgagugagcgccggcggc

SEQ ID NO: 11315 - RNA, 22 nt, Human
gcggggugacuuggccagucug

SEQ ID NO: 11316 - RNA, 24 nt, Human
gcuaaaguugaacaaucccgguac

SEQ ID NO: 11317 - RNA, 24 nt, Human
gcuaagcuugagcauggcugagca

SEQ ID NO: 11318 - RNA, 24 nt, Human
gcuaagucauuugauucaguagaa

SEQ ID NO: 11319 - RNA, 24 nt, Human
gcucaaggagaagaagcuggugaa

SEQ ID NO: 11320 - RNA, 22 nt, Human
gcucacugcaaccucugccucc

SEQ ID NO: 11321 - RNA, 22 nt, Human
gcucagaauuagccacacugac

SEQ ID NO: 11322 - RNA, 22 nt, Human
gcucagaauucagaccagcugg

SEQ ID NO: 11323 - RNA, 24 nt, Human
gcucaucguguggcugcuggugaa

SEQ ID NO: 11324 - RNA, 24 nt, Human
gcucauuuugcaguuguugaaauu

SEQ ID NO: 11325 - RNA, 22 nt, Human
gcuccauugucuguggcuuucu

SEQ ID NO: 11326 - RNA, 22 nt, Human
gcucuuauagucccagcauguu

SEQ ID NO: 11327 - RNA, 22 nt, Human
gcucuucacuugugucaggcug

SEQ ID NO: 11328 - RNA, 24 nt, Human
gcugaagagguauuuaaauauuuu

SEQ ID NO: 11329 - RNA, 24 nt, Human
gcugacaucugaggacucugcugu

SEQ ID NO: 11330 - RNA, 22 nt, Human
gcugaguuucucauuuguagua

SEQ ID NO: 11331 - RNA, 22 nt, Human
gcugcaguuccugaacggccac

SEQ ID NO: 11332 - RNA, 24 nt, Human
gcugcaguuggaacgauggcggcu

SEQ ID NO: 11333 - RNA, 22 nt, Human
gcuguucugugcauuguuggau

SEQ ID NO: 11334 - RNA, 22 nt, Human
gcuguuguuaagggcacuuggg

SEQ ID NO: 11335 - RNA, 22 nt, Human
gcuucacgaagcacagagauaa

SEQ ID NO: 11336 - RNA, 24 nt, Human
gcuucaguggagcccuacugugcu

SEQ ID NO: 11337 - RNA, 22 nt, Human
gcuucuccuguccccucccuac

SEQ ID NO: 11338 - RNA, 22 nt, Human
gcuugauuugcuuggugaccga

SEQ ID NO: 11339 - RNA, 24 nt, Human
gcuugcuccuaaaugugauccugc

SEQ ID NO: 11340 - RNA, 24 nt, Human
gcuuguuuuuccaccagaccccga

SEQ ID NO: 11341 - RNA, 22 nt, Human
gcuuugggguuaagcgucaucu

SEQ ID NO: 11342 - RNA, 24 nt, Human
gcuuuggugcugacaucggaaugg

SEQ ID NO: 11343 - RNA, 22 nt, Human
gcuuuguguguuugugugugca

SEQ ID NO: 11344 - RNA, 24 nt, Human
gcuuuugggaagcaggacguucuc

SEQ ID NO: 11345 - RNA, 22 nt, Human
ggaaacuuuuuccaaaguggcu

SEQ ID NO: 11346 - RNA, 24 nt, Human
ggaaagaguuuaaaagacuugaau

SEQ ID NO: 11347 - RNA, 24 nt, Human
ggaaaguuccauaggaagccuaag

SEQ ID NO: 11348 - RNA, 22 nt, Human
ggaaauccucugggguggacgg

SEQ ID NO: 11349 - RNA, 22 nt, Human
ggaaccuuuucaguucauacac

SEQ ID NO: 11350 - RNA, 22 nt, Human
ggaagaaugugcuuuuguuguu

SEQ ID NO: 11351 - RNA, 22 nt, Human
ggaaggcagauuagacaucgag

SEQ ID NO: 11352 - RNA, 22 nt, Human
ggaauguaaacaaauauuguau

SEQ ID NO: 11353 - RNA, 24 nt, Human
ggacaagggcugcccgcgugucca

SEQ ID NO: 11354 - RNA, 22 nt, Human
ggacaagggggauccguuugga

SEQ ID NO: 11355 - RNA, 23 nt, Human
ggacacgaagcaaaugaugagua

SEQ ID NO: 11356 - RNA, 24 nt, Human
ggacaugugcuucagaaccuggau

SEQ ID NO: 11357 - RNA, 22 nt, Human
ggaccaagauaugauuauaucu

SEQ ID NO: 11358 - RNA, 24 nt, Human
ggaccugcgagcuggccuaaugug

SEQ ID NO: 11359 - RNA, 24 nt, Human
ggacuacaggcauaagccaucaug

SEQ ID NO: 11360 - RNA, 23 nt, Human
ggacucggccccccaggccucgc

SEQ ID NO: 11361 - RNA, 22 nt, Human
ggacugguagugcaggcuggcu

SEQ ID NO: 11362 - RNA, 22 nt, Human
ggacuugaauggaugaugucac

SEQ ID NO: 11363 - RNA, 24 nt, Human
ggagaaagugaccuagagauugca

SEQ ID NO: 11364 - RNA, 24 nt, Human
ggagaagacgaauauuuggacaac

SEQ ID NO: 11365 - RNA, 24 nt, Human
ggagacagaugagaaaugagaaca

SEQ ID NO: 11366 - RNA, 21 nt, Human
ggagagcauguugcauuugcc

SEQ ID NO: 11367 - RNA, 23 nt, Human
ggagagcuaguaggagccaggca

SEQ ID NO: 11368 - RNA, 24 nt, Human
ggagaggaaugaccuguuucuuuc

SEQ ID NO: 11369 - RNA, 24 nt, Human
ggagaggagggcggagguccugcu

SEQ ID NO: 11370 - RNA, 24 nt, Human
ggagcacggggugacuugcuuggg

SEQ ID NO: 11371 - RNA, 20 nt, Human
ggagcagguuggaauaugca

SEQ ID NO: 11372 - RNA, 24 nt, Human
ggagcggagugggucgggcggggc

SEQ ID NO: 11373 - RNA, 22 nt, Human
ggagguagggugaggaaaugaa

SEQ ID NO: 11374 - RNA, 22 nt, Human
ggaggugacuguuacagaucgg

SEQ ID NO: 11375 - RNA, 22 nt, Human
ggagguggagguugcagugagc

SEQ ID NO: 11376 - RNA, 24 nt, Human
ggagguuucggcaguggcauccgg

SEQ ID NO: 11377 - RNA, 24 nt, Human
ggaguccagcagggccaguccugc

SEQ ID NO: 11378 - RNA, 22 nt, Human
ggagugccugaaaccuguacug

SEQ ID NO: 11379 - RNA, 22 nt, Human
ggaguuaugauagcaguggagg

SEQ ID NO: 11380 - RNA, 24 nt, Human
ggaguucgauacuagccugggcaa

SEQ ID NO: 11381 - RNA, 24 nt, Human
ggaucaggguauguuugcgagcgg

SEQ ID NO: 11382 - RNA, 22 nt, Human
ggauccuucagcacugaggugu

SEQ ID NO: 11383 - RNA, 22 nt, Human
ggcaaaagggcauuuucuaccu

SEQ ID NO: 11384 - RNA, 24 nt, Human
ggcaaaauaucugccuuauacaug

SEQ ID NO: 11385 - RNA, 22 nt, Human
ggcaacaagagcgaaacuccau

SEQ ID NO: 11386 - RNA, 22 nt, Human
ggcaagucuugcauccacugcu

SEQ ID NO: 11387 - RNA, 24 nt, Human
ggcaauaaauacugauggccaagc

SEQ ID NO: 11388 - RNA, 22 nt, Human
ggcaauauuccaggauaggcug

SEQ ID NO: 11389 - RNA, 22 nt, Human
ggcaggaucauagcucacugca

SEQ ID NO: 11390 - RNA, 22 nt, Human
ggcagugucauuagcugauugu

SEQ ID NO: 11391 - RNA, 22 nt, Human
ggcaugaaugcuggcauauuga

SEQ ID NO: 11392 - RNA, 22 nt, Human
ggcaugauggagaggguggaga

SEQ ID NO: 11393 - RNA, 22 nt, Human
ggcaugugugagcagcugcagg

SEQ ID NO: 11394 - RNA, 22 nt, Human
ggcauucaauuaaacacccucc

SEQ ID NO: 11395 - RNA, 24 nt, Human
ggccaacacugccuuuuuccaggg

SEQ ID NO: 11396 - RNA, 22 nt, Human
ggccacuuagaaggccugaguu

SEQ ID NO: 11397 - RNA, 22 nt, Human
ggccauucagucucaggcccuc

SEQ ID NO: 11398 - RNA, 22 nt, Human
ggcccaggagggggagaaaggc

SEQ ID NO: 11399 - RNA, 24 nt, Human
ggcccgggcggccggggcuucugg

SEQ ID NO: 11400 - RNA, 24 nt, Human
ggccgaggagcuacccccuccagg

SEQ ID NO: 11401 - RNA, 24 nt, Human
ggccgaguggcgacugauguuccu

SEQ ID NO: 11402 - RNA, 22 nt, Human
ggccgggugguugguugaaugg

SEQ ID NO: 11403 - RNA, 24 nt, Human
ggccgugguggugaagcuguagcc

SEQ ID NO: 11404 - RNA, 24 nt, Human
ggccuagcggggguacguggcgca

SEQ ID NO: 11405 - RNA, 24 nt, Human
ggccucugauuuccccaucuguau

SEQ ID NO: 11406 - RNA, 22 nt, Human
ggccugagaccuggauugagcc

SEQ ID NO: 11407 - RNA, 22 nt, Human
ggccugaggucagcaguagagg

SEQ ID NO: 11408 - RNA, 24 nt, Human
ggccugaguuugaugacuccgggg

SEQ ID NO: 11409 - RNA, 24 nt, Human
ggccuggaagaagaccccugaggu

SEQ ID NO: 11410 - RNA, 24 nt, Human
ggccuuagucgccagucccgcgcu

SEQ ID NO: 11411 - RNA, 17 nt, Human
ggccuugggaacuugga

SEQ ID NO: 11412 - RNA, 24 nt, Human
ggcgagugaaaggguuccaaccgg

SEQ ID NO: 11413 - RNA, 22 nt, Human
ggcgccgacagcauauucugaa

SEQ ID NO: 11414 - RNA, 24 nt, Human
ggcuaguagggcgcacuuggcggg

SEQ ID NO: 11415 - RNA, 22 nt, Human
ggcucccacuuccuucucccag

SEQ ID NO: 11416 - RNA, 24 nt, Human
ggcucuguugcgggcgcacgacgc

SEQ ID NO: 11417 - RNA, 24 nt, Human
ggcugguggccugagcgggaggcc

SEQ ID NO: 11418 - RNA, 22 nt, Human
ggcuugauuuugcuuggugacc

SEQ ID NO: 11419 - RNA, 24 nt, Human
gggaaagaaagcagagacuaacuc

SEQ ID NO: 11420 - RNA, 24 nt, Human
gggaagaucuaggagaagaggaag

SEQ ID NO: 11421 - RNA, 23 nt, Human
gggaaggaaaagggaguacagac

SEQ ID NO: 11422 - RNA, 24 nt, Human
gggaaggaaaggggccugagcugg

SEQ ID NO: 11423 - RNA, 24 nt, Human
gggaaggacuccggaccgcugggg

SEQ ID NO: 11424 - RNA, 24 nt, Human
gggaaggaucuuuggccuagggga

SEQ ID NO: 11425 - RNA, 24 nt, Human
gggaagggagaaagggauguagga

SEQ ID NO: 11426 - RNA, 22 nt, Human
gggaagggauacagagcuuggu

SEQ ID NO: 11427 - RNA, 24 nt, Human
gggaagggggaccugcuguuuggc

SEQ ID NO: 11428 - RNA, 24 nt, Human
gggaagguauuuauugauccacac

SEQ ID NO: 11429 - RNA, 24 nt, Human
gggaaugccuggcagaaguugcgc

SEQ ID NO: 11430 - RNA, 24 nt, Human
gggaauguagacgccagcuguaca

SEQ ID NO: 11431 - RNA, 22 nt, Human
gggaccucagggcuuggaguca

SEQ ID NO: 11432 - RNA, 22 nt, Human
gggaggauccuugcucaacuua

SEQ ID NO: 11433 - RNA, 24 nt, Human
gggcaaccucagggggauauuuau

SEQ ID NO: 11434 - RNA, 22 nt, Human
gggcaagacaauggaguuagac

SEQ ID NO: 11435 - RNA, 24 nt, Human
gggcaagaguuucgccggcgcauc

SEQ ID NO: 11436 - RNA, 24 nt, Human
gggcacugaagaugaugcgaccca

SEQ ID NO: 11437 - RNA, 24 nt, Human
gggcacugaggcccgggauguagg

SEQ ID NO: 11438 - RNA, 24 nt, Human
gggcagagcacgacggguaggcug

SEQ ID NO: 11439 - RNA, 24 nt, Human
gggcagagcugagaagccaagggg

SEQ ID NO: 11440 - RNA, 24 nt, Human
gggcaggaugaaaucaccuagggu

SEQ ID NO: 11441 - RNA, 24 nt, Human
gggcagggccugaaguguuggggg

SEQ ID NO: 11442 - RNA, 24 nt, Human
gggcagguguuuagguggaagagc

SEQ ID NO: 11443 - RNA, 24 nt, Human
gggcaucaggaaacuuggccacag

SEQ ID NO: 11444 - RNA, 24 nt, Human
gggcaucgucugcaccagccccau

SEQ ID NO: 11445 - RNA, 24 nt, Human
gggcauggccgcguguguggcagc

SEQ ID NO: 11446 - RNA, 24 nt, Human
gggcauuggggcuuuccagcucuc

SEQ ID NO: 11447 - RNA, 24 nt, Human
gggccaucucccucccggagucgc

SEQ ID NO: 11448 - RNA, 24 nt, Human
gggccuggugguugggagucaccu

SEQ ID NO: 11449 - RNA, 23 nt, Human
gggcguggaggccgcggaggccg

SEQ ID NO: 11450 - RNA, 22 nt, Human
gggcugaugaguugaccguggu

SEQ ID NO: 11451 - RNA, 22 nt, Human
gggcugcaucucucuggauugc

SEQ ID NO: 11452 - RNA, 21 nt, Human
gggcuggaagaagcuucccug

SEQ ID NO: 11453 - RNA, 22 nt, Human
gggcuggucucaucauaucuaa

SEQ ID NO: 11454 - RNA, 24 nt, Human
gggcuggugggugaaccccuaggg

SEQ ID NO: 11455 - RNA, 24 nt, Human
gggcuugucaaugaugcagaucau

SEQ ID NO: 11456 - RNA, 24 nt, Human
gggcuuguggccuuagacgccagu

SEQ ID NO: 11457 - RNA, 24 nt, Human
ggggaccacgccccacacccgggg

SEQ ID NO: 11458 - RNA, 24 nt, Human
ggggacuacaaugugccacgucgg

SEQ ID NO: 11459 - RNA, 24 nt, Human
ggggagcgagcacgucgcuccgca

SEQ ID NO: 11460 - RNA, 24 nt, Human
ggggagggugagugucuguguagg

SEQ ID NO: 11461 - RNA, 24 nt, Human
ggggauccagagccaugucggacc

SEQ ID NO: 11462 - RNA, 22 nt, Human
aauuccauuucuucugaacuga

SEQ ID NO: 11463 - RNA, 22 nt, Human
aauugcaaaauaagcaaaugua

SEQ ID NO: 11464 - RNA, 22 nt, Human
aauugcuugaacccaggaagug

SEQ ID NO: 11465 - RNA, 24 nt, Human
aauuguguuauccaggauuuucca

SEQ ID NO: 11466 - RNA, 22 nt, Human
aauuuagaaucguuucugauag

SEQ ID NO: 11467 - RNA, 22 nt, Human
aauuucuuuuguacaagauugu

SEQ ID NO: 11468 - RNA, 22 nt, Human
acaaaagccacacuagaucuuc

SEQ ID NO: 11469 - RNA, 24 nt, Human
acaaagaugaaaagcuuggccaca

SEQ ID NO: 11470 - RNA, 22 nt, Human
acaacgacaggauugacagauu

SEQ ID NO: 11471 - RNA, 24 nt, Human
acaagggucacauuggaugcgagu

SEQ ID NO: 11472 - RNA, 24 nt, Human
acaagguuucaccauguugcccgg

SEQ ID NO: 11473 - RNA, 22 nt, Human
acacaggcccagagaggcagug

SEQ ID NO: 11474 - RNA, 22 nt, Human
acacaguggcagaauugcucuc

SEQ ID NO: 11475 - RNA, 22 nt, Human
acacaucuaauggcugugcuga

SEQ ID NO: 11476 - RNA, 24 nt, Human
acaccaaaauguauuuauuacauc

SEQ ID NO: 11477 - RNA, 24 nt, Human
acaccacugcacuccagccugggc

SEQ ID NO: 11478 - RNA, 24 nt, Human
acaccagccuguuacuaacagccu

SEQ ID NO: 11479 - RNA, 22 nt, Human
acacugggguccccaaagaagu

SEQ ID NO: 11480 - RNA, 24 nt, Human
acagagcugacgcuucaucacgug

SEQ ID NO: 11481 - RNA, 22 nt, Human
acagauucaucaccacgaucug

SEQ ID NO: 11482 - RNA, 24 nt, Human
acagcaaaguguggugcgaucucu

SEQ ID NO: 11483 - RNA, 24 nt, Human
acagcgaucucucucuucuccuau

SEQ ID NO: 11484 - RNA, 24 nt, Human
acagcucuuuuacaaacaaguuau

SEQ ID NO: 11485 - RNA, 22 nt, Human
acaggccuggguucaaauuugg

SEQ ID NO: 11486 - RNA, 24 nt, Human
acaggguuuugccauguugcucag

SEQ ID NO: 11487 - RNA, 24 nt, Human
acagucuuugaguaacaucuguuc

SEQ ID NO: 11488 - RNA, 24 nt, Human
acagugagggcuauacaugguagc

SEQ ID NO: 11489 - RNA, 24 nt, Human
acagugcccugccuuggcugucag

SEQ ID NO: 11490 - RNA, 24 nt, Human
acagugcugcaggcugagcugaca

SEQ ID NO: 11491 - RNA, 22 nt, Human
acauaucuagguacauacacau

SEQ ID NO: 11492 - RNA, 22 nt, Human
acaucuacuuaacuggcacaau

SEQ ID NO: 11493 - RNA, 22 nt, Human
acaugaauucaaugaagggggc

SEQ ID NO: 11494 - RNA, 22 nt, Human
acauuuccaauguuuggggaca

SEQ ID NO: 11495 - RNA, 24 nt, Human
accaagaggauuugccagaggucu

SEQ ID NO: 11496 - RNA, 22 nt, Human
accacagugucacagaguccau

SEQ ID NO: 11497 - RNA, 22 nt, Human
accacuuuguagucccuaccag

SEQ ID NO: 11498 - RNA, 22 nt, Human
accagcugcauccugcaaacuu

SEQ ID NO: 11499 - RNA, 24 nt, Human
accagcugcccgguggggcagacc

SEQ ID NO: 11500 - RNA, 22 nt, Human
accagcugugugaacuuaggaa

SEQ ID NO: 11501 - RNA, 24 nt, Human
accaggcaaauucuuaguccuacu

SEQ ID NO: 11502 - RNA, 24 nt, Human
accagguacaugcacuggguaccc

SEQ ID NO: 11503 - RNA, 22 nt, Human
accaucuucccuuucucgagua

SEQ ID NO: 11504 - RNA, 22 nt, Human
accauucauaucccuuacccuc

SEQ ID NO: 11505 - RNA, 24 nt, Human
accauuuuacuuaugauguucagg

SEQ ID NO: 11506 - RNA, 24 nt, Human
acccauucagccccuuccgcuguc

SEQ ID NO: 11507 - RNA, 24 nt, Human
accccaggucaaaaagggcccgaa

SEQ ID NO: 11508 - RNA, 24 nt, Human
accccgggaccagaugucccuccc

SEQ ID NO: 11509 - RNA, 24 nt, Human
acccggacucucuggcaagggacu

SEQ ID NO: 11510 - RNA, 24 nt, Human
acccucuuggccauccgggcccca

SEQ ID NO: 11511 - RNA, 24 nt, Human
acccugaaaucuucugcuguccca

SEQ ID NO: 11512 - RNA, 24 nt, Human
acccugggagggcccauccagcua

SEQ ID NO: 11513 - RNA, 24 nt, Human
acccugggcuccucgaacucagcc

SEQ ID NO: 11514 - RNA, 24 nt, Human
acccugggggccaaaagguguggg

SEQ ID NO: 11515 - RNA, 24 nt, Human
acccuuuuggcauuguugccacca

SEQ ID NO: 11516 - RNA, 22 nt, Human
accgagugugcuacuucuaucc

SEQ ID NO: 11517 - RNA, 24 nt, Human
accggaagggcagaauuuauuuuu

SEQ ID NO: 11518 - RNA, 24 nt, Human
accuaguacuuugagaaaguuaua

SEQ ID NO: 11519 - RNA, 24 nt, Human
accucggucuuguggcaaauggug

SEQ ID NO: 11520 - RNA, 22 nt, Human
accugagaagcgagguuucugg

SEQ ID NO: 11521 - RNA, 24 nt, Human
accugcugagacucccccuggagc

SEQ ID NO: 11522 - RNA, 24 nt, Human
accugcugccugucucccugaccc

SEQ ID NO: 11523 - RNA, 24 nt, Human
accugggugcagccgcaguccaag

SEQ ID NO: 11524 - RNA, 22 nt, Human
accugguaauuuauuggaaguc

SEQ ID NO: 11525 - RNA, 24 nt, Human
accuggugguguuugucugugguc

SEQ ID NO: 11526 - RNA, 22 nt, Human
accuucuugccaauauaggaau

SEQ ID NO: 11527 - RNA, 24 nt, Human
accuugucacagggcuaugucuug

SEQ ID NO: 11528 - RNA, 24 nt, Human
acgaaccgguguacacuugucagg

SEQ ID NO: 11529 - RNA, 24 nt, Human
acgaacuaguggcuugcauauugg

SEQ ID NO: 11530 - RNA, 24 nt, Human
acgaagccauugaaacagaugauc

SEQ ID NO: 11531 - RNA, 22 nt, Human
acgaauggaugauccuggugga

SEQ ID NO: 11532 - RNA, 24 nt, Human
acgagccccagaugcagucuacac

SEQ ID NO: 11533 - RNA, 24 nt, Human
acgagccuccccuguaugccugcu

SEQ ID NO: 11534 - RNA, 24 nt, Human
acgagguuuagggucgcggcuaca

SEQ ID NO: 11535 - RNA, 24 nt, Human
acgcaccugugagucguccagcuc

SEQ ID NO: 11536 - RNA, 24 nt, Human
acgcaguguccuguguuggcuccu

SEQ ID NO: 11537 - RNA, 24 nt, Human
acgcaguuucaucucagggaggcc

SEQ ID NO: 11538 - RNA, 24 nt, Human
acgcauagccaaggggaagcgcga

SEQ ID NO: 11539 - RNA, 24 nt, Human
acgccacucugcuccagccugggu

SEQ ID NO: 11540 - RNA, 24 nt, Human
acgccagugugccuguguggagug

SEQ ID NO: 11541 - RNA, 24 nt, Human
acgccaugaaagcggccauggccu

SEQ ID NO: 11542 - RNA, 24 nt, Human
acgccaugaaagcugcauggccug

SEQ ID NO: 11543 - RNA, 24 nt, Human
acgccaugaaagcugccuuggccc

SEQ ID NO: 11544 - RNA, 24 nt, Human
acgcuccuccgccagcuugcucgc

SEQ ID NO: 11545 - RNA, 24 nt, Human
acgcucuaugacaccaccaagguc

SEQ ID NO: 11546 - RNA, 24 nt, Human
acgcugccgcugcucugcgccggg

SEQ ID NO: 11547 - RNA, 24 nt, Human
acgcuuuguacgcucugcguuccc

SEQ ID NO: 11548 - RNA, 24 nt, Human
acgcuuugucaugcuucuucagua

SEQ ID NO: 11549 - RNA, 24 nt, Human
acggagcaggagcugcuggcgcug

SEQ ID NO: 11550 - RNA, 22 nt, Human
acgggauccaguucuaugagcg

SEQ ID NO: 11551 - RNA, 24 nt, Human
acggggccuucucguacccuggcc

SEQ ID NO: 11552 - RNA, 24 nt, Human
acgggguuucaccauguuggucag

SEQ ID NO: 11553 - RNA, 24 nt, Human
acgguccuggucaugugccacacg

SEQ ID NO: 11554 - RNA, 22 nt, Human
acguaucaccuagguauuaagc

SEQ ID NO: 11555 - RNA, 22 nt, Human
acgugguuuacuagaaguggcc

SEQ ID NO: 11556 - RNA, 24 nt, Human
acguuuccaauuucuaaauuuuaa

SEQ ID NO: 11557 - RNA, 24 nt, Human
acuaaguaauaucaggaaagaaga

SEQ ID NO: 11558 - RNA, 24 nt, Human
acuacauaaucgcugcacgugccc

SEQ ID NO: 11559 - RNA, 24 nt, Human
acuacuguucgaagauuuuuggaa

SEQ ID NO: 11560 - RNA, 24 nt, Human
acuauggugguugacuacagaacc

SEQ ID NO: 11561 - RNA, 22 nt, Human
acuauuaaaauagcggagugga

SEQ ID NO: 11562 - RNA, 22 nt, Human
acucacaguucugcauggcuga

SEQ ID NO: 11563 - RNA, 22 nt, Human
acucacugcauccucugccuuc

SEQ ID NO: 11564 - RNA, 24 nt, Human
acucagcuggagcugaaggggaac

SEQ ID NO: 11565 - RNA, 19 nt, Human
ucccuaagggaaaaggagg

SEQ ID NO: 11566 - RNA, 22 nt, Human
ucccucagcuccuguccuuugu

SEQ ID NO: 11567 - RNA, 24 nt, Human
ucccucagugauccuuuuacucuc

SEQ ID NO: 11568 - RNA, 24 nt, Human
ucccugagacuuccuuagguuguc

SEQ ID NO: 11569 - RNA, 22 nt, Human
ucccugagcccugaaggguguu

SEQ ID NO: 11570 - RNA, 22 nt, Human
ucccugaggagaaagguguggc

SEQ ID NO: 11571 - RNA, 24 nt, Human
ucccugaguggcugcaucucuucu

SEQ ID NO: 11572 - RNA, 22 nt, Human
ucccugauggggaccaugacuu

SEQ ID NO: 11573 - RNA, 24 nt, Human
ucccugcaggugucuugccccuau

SEQ ID NO: 11574 - RNA, 24 nt, Human
ucccugccaagaaaaauguagaug

SEQ ID NO: 11575 - RNA, 22 nt, Human
ucccugcucucuucucugcugg

SEQ ID NO: 11576 - RNA, 20 nt, Human
ucccuggccagguccauccg

SEQ ID NO: 11577 - RNA, 22 nt, Human
ucccugggacaacuuucuuauu

SEQ ID NO: 11578 - RNA, 22 nt, Human
ucccugggccacuguuguacua

SEQ ID NO: 11579 - RNA, 23 nt, Human
ucccugggcgacguggguuucug

SEQ ID NO: 11580 - RNA, 24 nt, Human
ucccuggggggccacccaaaucgg

SEQ ID NO: 11581 - RNA, 24 nt, Human
ucccuggggucagccgcucuggcu

SEQ ID NO: 11582 - RNA, 24 nt, Human
ucccuggucaaggccacggcuuuu

SEQ ID NO: 11583 - RNA, 24 nt, Human
ucccuguaaugcccgucuuuccug

SEQ ID NO: 11584 - RNA, 24 nt, Human
ucccugugaaaggcaggcucgggu

SEQ ID NO: 11585 - RNA, 24 nt, Human
ucccugugcacaggugggcugacc

SEQ ID NO: 11586 - RNA, 24 nt, Human
ucccugugcgugaacgaggugccc

SEQ ID NO: 11587 - RNA, 24 nt, Human
ucccuguggccuguacccgucccu

SEQ ID NO: 11588 - RNA, 24 nt, Human
ucccuuagaaacuugggccaaacc

SEQ ID NO: 11589 - RNA, 22 nt, Human
ucccuuccuuccuccucuuggg

SEQ ID NO: 11590 - RNA, 24 nt, Human
ucccuugcaguuguucgccccucu

SEQ ID NO: 11591 - RNA, 24 nt, Human
ucccuuggggguggcuugccccca

SEQ ID NO: 11592 - RNA, 22 nt, Human
ucccuuugaagccagguuccag

SEQ ID NO: 11593 - RNA, 24 nt, Human
ucccuuuuccccucaaaggagaac

SEQ ID NO: 11594 - RNA, 24 nt, Human
uccgcagaguuugggcgccaggcg

SEQ ID NO: 11595 - RNA, 24 nt, Human
uccgcaggaaaguugagagcauca

SEQ ID NO: 11596 - RNA, 24 nt, Human
uccgccccacuugugucgggaagc

SEQ ID NO: 11597 - RNA, 22 nt, Human
uccgccucccccaaaccucacc

SEQ ID NO: 11598 - RNA, 23 nt, Human
uccgcgcgccgggagccggccgc

SEQ ID NO: 11599 - RNA, 22 nt, Human
uccgcuuucaggaagacauuau

SEQ ID NO: 11600 - RNA, 24 nt, Human
uccggcaugugcaaagcugguuuu

SEQ ID NO: 11601 - RNA, 24 nt, Human
uccgggguagcaggggcugcucug

SEQ ID NO: 11602 - RNA, 24 nt, Human
uccguagucuauucuuucccucau

SEQ ID NO: 11603 - RNA, 24 nt, Human
uccguagucuggugggccucugua

SEQ ID NO: 11604 - RNA, 22 nt, Human
uccguccucccagucucgagac

SEQ ID NO: 11605 - RNA, 24 nt, Human
uccgugacuggcuccccagcaauc

SEQ ID NO: 11606 - RNA, 23 nt, Human
uccgugcgcguugcugcggccgu

SEQ ID NO: 11607 - RNA, 24 nt, Human
uccguggauacagaaaucucugca

SEQ ID NO: 11608 - RNA, 24 nt, Human
uccguuggcccaaccagucccagc

SEQ ID NO: 11609 - RNA, 22 nt, Human
uccuacauguucucaaaacaca

SEQ ID NO: 11610 - RNA, 22 nt, Human
uccucaccaaaagcacucacuu

SEQ ID NO: 11611 - RNA, 22 nt, Human
uccucaucuuugagucccagcg

SEQ ID NO: 11612 - RNA, 22 nt, Human
uccucauuaauuuuccucauga

SEQ ID NO: 11613 - RNA, 24 nt, Human
uccucggucuccgcccugcccccg

SEQ ID NO: 11614 - RNA, 22 nt, Human
uccucgugccuauccugguggu

SEQ ID NO: 11615 - RNA, 24 nt, Human
uccucugucucucgaggaacuagg

SEQ ID NO: 11616 - RNA, 22 nt, Human
uccugauggacaucgagcaggu

SEQ ID NO: 11617 - RNA, 22 nt, Human
uccugcuaugacuaggcagacu

SEQ ID NO: 11618 - RNA, 24 nt, Human
uccuggaagcaaggcggcucuagc

SEQ ID NO: 11619 - RNA, 24 nt, Human
uccuggguuaaccuuuguuggcug

SEQ ID NO: 11620 - RNA, 22 nt, Human
uccuuaggaccuagagguagua

SEQ ID NO: 11621 - RNA, 24 nt, Human
uccuucacuccaguuaauggcacu

SEQ ID NO: 11622 - RNA, 24 nt, Human
uccuucaugcacuaaacuggacag

SEQ ID NO: 11623 - RNA, 22 nt, Human
uccuucuguagucuuuuagggg

SEQ ID NO: 11624 - RNA, 22 nt, Human
uccuucuuuucgccggaguuga

SEQ ID NO: 11625 - RNA, 24 nt, Human
uccuugaccucugacccgccgacc

SEQ ID NO: 11626 - RNA, 24 nt, Human
uccuugguuccagaacccagcaau

SEQ ID NO: 11627 - RNA, 22 nt, Human
uccuuuggacaugggcaagggu

SEQ ID NO: 11628 - RNA, 24 nt, Human
ucgaacaugucuucuccacgaggu

SEQ ID NO: 11629 - RNA, 24 nt, Human
ucgaagacacuaccauaugcuaaa

SEQ ID NO: 11630 - RNA, 24 nt, Human
ucgaagagcuggagaccaaggccg

SEQ ID NO: 11631 - RNA, 24 nt, Human
ucgaaggguaaccaagcugcaauc

SEQ ID NO: 11632 - RNA, 18 nt, Human
ucgaagguguguguaaau

SEQ ID NO: 11633 - RNA, 24 nt, Human
ucgaauggacacauuaccagugaa

SEQ ID NO: 11634 - RNA, 24 nt, Human
ucgaaugggucacguauugucuac

SEQ ID NO: 11635 - RNA, 24 nt, Human
ucgacaguaaagggcacgucugga

SEQ ID NO: 11636 - RNA, 23 nt, Human
ucgaccccaaaagccaagucugu

SEQ ID NO: 11637 - RNA, 24 nt, Human
ucgaccuugcaggcagcggcagga

SEQ ID NO: 11638 - RNA, 24 nt, Human
ucgauaguuguuaggugucagcuu

SEQ ID NO: 11639 - RNA, 24 nt, Human
ucgauggaggacgggaggccuuug

SEQ ID NO: 11640 - RNA, 24 nt, Human
ucgaugggcaaaguauuuguagca

SEQ ID NO: 11641 - RNA, 24 nt, Human
ucgcagagauccugagugucuacc

SEQ ID NO: 11642 - RNA, 24 nt, Human
ucgcagcagcccggacaggaagau

SEQ ID NO: 11643 - RNA, 24 nt, Human
ucgcagcgccagggguuggcgccc

SEQ ID NO: 11644 - RNA, 24 nt, Human
ucgcagcugccuuccagaaacaac

SEQ ID NO: 11645 - RNA, 24 nt, Human
ucgcaggaauaacgguagagggga

SEQ ID NO: 11646 - RNA, 24 nt, Human
ucgccacaacgugcuccaccucug

SEQ ID NO: 11647 - RNA, 24 nt, Human
ucgcccagaucaaggcucauguag

SEQ ID NO: 11648 - RNA, 22 nt, Human
ucgcccaggcugaauugcagug

SEQ ID NO: 11649 - RNA, 24 nt, Human
ucgcgcugccgccgccacugcugc

SEQ ID NO: 11650 - RNA, 24 nt, Human
ucgcucaaaccagccuuucagaau

SEQ ID NO: 11651 - RNA, 24 nt, Human
ucgcucuggaccucacugcugguc

SEQ ID NO: 11652 - RNA, 24 nt, Human
ucgcucuuguugcccaagcuggag

SEQ ID NO: 11653 - RNA, 24 nt, Human
ucgcuggggggacacuagaagcac

SEQ ID NO: 11654 - RNA, 24 nt, Human
ucgcuguguugcccaggcuggucu

SEQ ID NO: 11655 - RNA, 24 nt, Human
ucggaacgccauucuauccccaaa

SEQ ID NO: 11656 - RNA, 24 nt, Human
ucggaguuaaggcgaauuguucaa

SEQ ID NO: 11657 - RNA, 24 nt, Human
ucggcaguggcauucggggccggg

SEQ ID NO: 11658 - RNA, 24 nt, Human
ucggcucugcuacuucaagaaggc

SEQ ID NO: 11659 - RNA, 24 nt, Human
ucgggccggcuggccgggcgcggg

SEQ ID NO: 11660 - RNA, 22 nt, Human
ucgggcuuuuacgaaaggcaug

SEQ ID NO: 11661 - RNA, 24 nt, Human
ucggggcggugaggacgcuguggg

SEQ ID NO: 11662 - RNA, 22 nt, Human
ucgggguucuccggggaauccu

SEQ ID NO: 11663 - RNA, 22 nt, Human
ucgggguucuccggggaauucu

SEQ ID NO: 11664 - RNA, 24 nt, Human
ucggucagcgggcagcagcugcgc

SEQ ID NO: 11665 - RNA, 24 nt, Human
ucggugccgguugcgucaucuucc

SEQ ID NO: 11666 - RNA, 22 nt, Human
ucguagcgaucuccaauuccaa

SEQ ID NO: 11667 - RNA, 22 nt, Human
ucgucaugaccaacgugauccu

SEQ ID NO: 11668 - RNA, 22 nt, Human
ucgucccuacugcagaggaagu

SEQ ID NO: 11669 - RNA, 22 nt, Human
ucgucuaugagaaaagccaacu

SEQ ID NO: 11670 - RNA, 22 nt, Human
ucguugaagaggaggugcucug

SEQ ID NO: 11671 - RNA, 24 nt, Human
ucuaaaauaaauaaauaggccggg

SEQ ID NO: 11672 - RNA, 24 nt, Human
ucuaaagcuugucuuguagguucg

SEQ ID NO: 11673 - RNA, 22 nt, Human
ucuaacacugacuucuauucca

SEQ ID NO: 11674 - RNA, 24 nt, Human
ucuaacuacuuauauuugugcugc

SEQ ID NO: 11675 - RNA, 24 nt, Human
ucuaaguauuccaaauaaguugac

SEQ ID NO: 11676 - RNA, 24 nt, Human
ucuaagucagagucuccuaaagag

SEQ ID NO: 11677 - RNA, 24 nt, Human
ucuaaucuccucucagucuguacu

SEQ ID NO: 11678 - RNA, 24 nt, Human
ucuaauuuagccaaguaauugcug

SEQ ID NO: 11679 - RNA, 24 nt, Human
ucuacagaagaugaagaagauagg

SEQ ID NO: 11680 - RNA, 24 nt, Human
ucuacagacacgggcccucuccuc

SEQ ID NO: 11681 - RNA, 24 nt, Human
ucuacagccucaagacccgcgagg

SEQ ID NO: 11682 - RNA, 24 nt, Human
ucuacaguaucccacugugucugg

SEQ ID NO: 11683 - RNA, 24 nt, Human
ucuacaucuagacacaauauugua

SEQ ID NO: 11684 - RNA, 24 nt, Human
ucuaccagcuaacacauccaccac

SEQ ID NO: 11685 - RNA, 24 nt, Human
ucuaccuauaaaugucuaaauauu

SEQ ID NO: 11686 - RNA, 24 nt, Human
ucuacuguaauuaauugggucuau

SEQ ID NO: 11687 - RNA, 24 nt, Human
ucuagagucuguugccaacauguu

SEQ ID NO: 11688 - RNA, 24 nt, Human
ucuagcauaacaccagggaugugg

SEQ ID NO: 11689 - RNA, 24 nt, Human
ucuagcuugcuuggacuuucagug

SEQ ID NO: 11690 - RNA, 24 nt, Human
ucuaggauauaaugauuuagugac

SEQ ID NO: 11691 - RNA, 21 nt, Human
ucuagugggaauguguccuuu

SEQ ID NO: 11692 - RNA, 21 nt, Human
ucuauaguccacugucagcug

SEQ ID NO: 11693 - RNA, 24 nt, Human
ucuaucacuuucauguaacaaugg

SEQ ID NO: 11694 - RNA, 24 nt, Human
ucuaugaaucucaucagacucugg

SEQ ID NO: 11695 - RNA, 24 nt, Human
ucuaugagucugucuuaucuucug

SEQ ID NO: 11696 - RNA, 24 nt, Human
ucuauggugguaggagaguacagg

SEQ ID NO: 11697 - RNA, 24 nt, Human
ucuauugccacugauuggagcuga

SEQ ID NO: 11698 - RNA, 24 nt, Human
ucucaaaacucaaauacucuuuau

SEQ ID NO: 11699 - RNA, 24 nt, Human
ucucaagaaccauggacuccuggg

SEQ ID NO: 11700 - RNA, 17 nt, Human
ucucaaggggcaccuuu

SEQ ID NO: 11701 - RNA, 24 nt, Human
ucucaaguagcugggacuacaggc

SEQ ID NO: 11702 - RNA, 24 nt, Human
ucucacacuggcaggcgguggcuc

SEQ ID NO: 11703 - RNA, 24 nt, Human
ucucacagaccaugacccacaggg

SEQ ID NO: 11704 - RNA, 24 nt, Human
ucucacagaccccaaaacagcugc

SEQ ID NO: 11705 - RNA, 23 nt, Human
ucucacaguucugggcuaggacu

SEQ ID NO: 11706 - RNA, 24 nt, Human
ucucacccuagagugacagcuauc

SEQ ID NO: 11707 - RNA, 24 nt, Human
ucucacuuugucacccaggcugga

SEQ ID NO: 11708 - RNA, 24 nt, Human
ucucagacaaccaucucaugggcc

SEQ ID NO: 11709 - RNA, 24 nt, Human
ucucagauuacuucauugcucacc

SEQ ID NO: 11710 - RNA, 24 nt, Human
ucucaggcagagcagggugguccg

SEQ ID NO: 11711 - RNA, 23 nt, Human
ucucaggggcccuggcccugacc

SEQ ID NO: 11712 - RNA, 24 nt, Human
ucucaguaaagaucgcaacuuuca

SEQ ID NO: 11713 - RNA, 22 nt, Human
ucucauauagcuggguugcagc

SEQ ID NO: 11714 - RNA, 24 nt, Human
ucucauggcucuggggcugggucc

SEQ ID NO: 11715 - RNA, 24 nt, Human
ucucauguggcugcugcaccucca

SEQ ID NO: 11716 - RNA, 24 nt, Human
ucuccaaaaauucggagaaaagag

SEQ ID NO: 11717 - RNA, 24 nt, Human
ucuccaaaaauuuggagaaagagc

SEQ ID NO: 11718 - RNA, 23 nt, Human
ucuccaaguaacacaucaaguac

SEQ ID NO: 11719 - RNA, 22 nt, Human
ucuccaggacuccucacucaac

SEQ ID NO: 11720 - RNA, 24 nt, Human
ucuccaggcccaagucgugcucuc

SEQ ID NO: 11721 - RNA, 24 nt, Human
ucuccaguuccaguacgcucauca

SEQ ID NO: 11722 - RNA, 24 nt, Human
ucuccaugagcgucccugacugcc

SEQ ID NO: 11723 - RNA, 24 nt, Human
ucuccauucccaggcucagugcag

SEQ ID NO: 11724 - RNA, 22 nt, Human
ucucccaaaucuuucuagcaca

SEQ ID NO: 11725 - RNA, 20 nt, Human
ucucccagccaccuccuccc

SEQ ID NO: 11726 - RNA, 24 nt, Human
ucucccauucugagaaucuggguu

SEQ ID NO: 11727 - RNA, 22 nt, Human
ucuccuuacccugagaugugcu

SEQ ID NO: 11728 - RNA, 24 nt, Human
ucucgaacuccugagcucaagcag

SEQ ID NO: 11729 - RNA, 22 nt, Human
ucucgauguuaucagucaacaa

SEQ ID NO: 11730 - RNA, 24 nt, Human
ucucgcgcucggccgccgcccgcu

SEQ ID NO: 11731 - RNA, 24 nt, Human
ucucgcucugucacccaggcugga

SEQ ID NO: 11732 - RNA, 24 nt, Human
ucucggccuuggcaacggccgucg

SEQ ID NO: 11733 - RNA, 24 nt, Human
ucucuaggucacuuucuccgcuug

SEQ ID NO: 11734 - RNA, 24 nt, Human
ucucuaggucccuauuccugcuug

SEQ ID NO: 11735 - RNA, 24 nt, Human
ucucucacccuugcugugcaugua

SEQ ID NO: 11736 - RNA, 24 nt, Human
ucucucacgacucucaaagaugaa

SEQ ID NO: 11737 - RNA, 22 nt, Human
ucucugaacucuuuaacugugg

SEQ ID NO: 11738 - RNA, 24 nt, Human
ucucugauaaccagugaugaugag

SEQ ID NO: 11739 - RNA, 24 nt, Human
ucucugcaaaaugucauagcuuau

SEQ ID NO: 11740 - RNA, 22 nt, Human
ucucugcagcuaggaguggcca

SEQ ID NO: 11741 - RNA, 24 nt, Human
ucucugcagcuggaccuggacagg

SEQ ID NO: 11742 - RNA, 22 nt, Human
ucucuggugacaguuuaccugg

SEQ ID NO: 11743 - RNA, 24 nt, Human
ucucuuaggcccucaggcccuugc

SEQ ID NO: 11744 - RNA, 22 nt, Human
ucucuuccaaccacugccuaca

SEQ ID NO: 11745 - RNA, 24 nt, Human
ucucuucggcugagacucccgcca

SEQ ID NO: 11746 - RNA, 22 nt, Human
ucucuugaaccuuaauuuuuag

SEQ ID NO: 11747 - RNA, 24 nt, Human
ucucuuggcacuucaaggguuguu

SEQ ID NO: 11748 - RNA, 24 nt, Human
ucucuuguaaaggagcaagguuuu

SEQ ID NO: 11749 - RNA, 24 nt, Human
ucugaacuugacugaggauaaugu

SEQ ID NO: 11750 - RNA, 24 nt, Human
ucugaagacugaugguuugggcau

SEQ ID NO: 11751 - RNA, 24 nt, Human
ucugaagagugcuucagcugaugg

SEQ ID NO: 11752 - RNA, 24 nt, Human
ucugaagaucucacaaagagaagu

SEQ ID NO: 11753 - RNA, 24 nt, Human
ucugagaaaagggggguucuauug

SEQ ID NO: 11754 - RNA, 22 nt, Human
ucugagcccaggaguuugaggc

SEQ ID NO: 11755 - RNA, 22 nt, Human
ucugaucagccugguguucauu

SEQ ID NO: 11756 - RNA, 23 nt, Human
ucugauccuacguucuacuucug

SEQ ID NO: 11757 - RNA, 22 nt, Human
ucugaucucaguugcugcucaa

SEQ ID NO: 11758 - RNA, 23 nt, Human
ucugcaaauuuugugcucacagc

SEQ ID NO: 11759 - RNA, 24 nt, Human
ucugcaacaguuuguuuguuuguu

SEQ ID NO: 11760 - RNA, 24 nt, Human
ucugcaauucuuauucucuuauag

SEQ ID NO: 11761 - RNA, 24 nt, Human
ucugcacaaaugccaaggcuaagu

SEQ ID NO: 11762 - RNA, 24 nt, Human
ucugcagcugcagauucugcuguu

SEQ ID NO: 11763 - RNA, 24 nt, Human
ucugcaggagugcaaugcuauggc

SEQ ID NO: 11764 - RNA, 24 nt, Human
ucugcagucuuauccaggcucucc

SEQ ID NO: 11765 - RNA, 24 nt, Human
ucugcauuuuaucucuuuaaggua

SEQ ID NO: 11766 - RNA, 24 nt, Human
ucugccaauuucuggauuucuuua

SEQ ID NO: 11767 - RNA, 22 nt, Human
ucugccagagggaggguguuac

SEQ ID NO: 11768 - RNA, 24 nt, Human
ucugccuccuccucccuuucuccc

SEQ ID NO: 11769 - RNA, 22 nt, Human
ucugccuccuggguucacucca

SEQ ID NO: 11770 - RNA, 23 nt, Human
ucugcuggucucccaccucccgc

SEQ ID NO: 11771 - RNA, 24 nt, Human
ucugcuggucucugaguccuagcu

SEQ ID NO: 11772 - RNA, 22 nt, Human
ucugcugugauggacacuugua

SEQ ID NO: 11773 - RNA, 22 nt, Human
ucugcugugcuggcuucccaug

SEQ ID NO: 11774 - RNA, 24 nt, Human
ucuggauaccuccacaugguccga

SEQ ID NO: 11775 - RNA, 24 nt, Human
ucuggauaccuuuauuuuugcuuc

SEQ ID NO: 11776 - RNA, 22 nt, Human
ucuggcccugcuaggcccaaag

SEQ ID NO: 11777 - RNA, 24 nt, Human
ucuggccuaaaauuucucagucuu

SEQ ID NO: 11778 - RNA, 24 nt, Human
ucuggccuacuuccuaacaauguc

SEQ ID NO: 11779 - RNA, 24 nt, Human
ucuggcgccguucgguuucucuua

SEQ ID NO: 11780 - RNA, 24 nt, Human
ucuggcuaaggcucuucauuuccc

SEQ ID NO: 11781 - RNA, 22 nt, Human
ucugggaggcggagguugcagu

SEQ ID NO: 11782 - RNA, 22 nt, Human
ucugggauuaccauguuguuuu

SEQ ID NO: 11783 - RNA, 22 nt, Human
ucugggccagaucuagggaucu

SEQ ID NO: 11784 - RNA, 22 nt, Human
ucuggggcuagggccucagugc

SEQ ID NO: 11785 - RNA, 24 nt, Human
ucuggugugugaaggucggugggu

SEQ ID NO: 11786 - RNA, 22 nt, Human
ucuguaaaggaaaaggcagggu

SEQ ID NO: 11787 - RNA, 22 nt, Human
ucuguaaaucugaauguugccu

SEQ ID NO: 11788 - RNA, 20 nt, Human
ucuguacugagcucuguuuu

SEQ ID NO: 11789 - RNA, 24 nt, Human
ucuguaggccagaacaugaaguua

SEQ ID NO: 11790 - RNA, 24 nt, Human
ucuguaguggauguacuacagcuc

SEQ ID NO: 11791 - RNA, 22 nt, Human
ucugucauuuuucucuuuccau

SEQ ID NO: 11792 - RNA, 24 nt, Human
ucugucccacgcccgcccgccugg

SEQ ID NO: 11793 - RNA, 24 nt, Human
ucugucccuaaagaacugguggca

SEQ ID NO: 11794 - RNA, 23 nt, Human
ucuguccucuguagcacuuuuag

SEQ ID NO: 11795 - RNA, 24 nt, Human
ucuguccuucagaaggaagugauu

SEQ ID NO: 11796 - RNA, 24 nt, Human
ucuguccuucuacaggagguguuc

SEQ ID NO: 11797 - RNA, 24 nt, Human
ucuguccuuucccagcucgcaggc

SEQ ID NO: 11798 - RNA, 24 nt, Human
ucugucuauccugcccuggucucc

SEQ ID NO: 11799 - RNA, 24 nt, Human
ucugucucuucucuguucuccccc

SEQ ID NO: 11800 - RNA, 24 nt, Human
ucugugaagaaagucaugguggcu

SEQ ID NO: 11801 - RNA, 23 nt, Human
ucugugagccccagccugagcca

SEQ ID NO: 11802 - RNA, 22 nt, Human
ucugugcuagagagugguaacc

SEQ ID NO: 11803 - RNA, 24 nt, Human
ucugugcugcgguguguccagggg

SEQ ID NO: 11804 - RNA, 24 nt, Human
ucugugcuucgugaagcuaaucaa

SEQ ID NO: 11805 - RNA, 24 nt, Human
ucuguggacauugacucggagcug

SEQ ID NO: 11806 - RNA, 24 nt, Human
ucuguggcuuggugagucugugug

SEQ ID NO: 11807 - RNA, 23 nt, Human
ucuguggggaguaacaagggcuc

SEQ ID NO: 11808 - RNA, 22 nt, Human
ucugugguaugacagaacuggg

SEQ ID NO: 11809 - RNA, 21 nt, Human
ucugugguuggggaaaaggug

SEQ ID NO: 11810 - RNA, 22 nt, Human
ucugugugugcacugcagacac

SEQ ID NO: 11811 - RNA, 24 nt, Human
ucuguguguguagugagagugugu

SEQ ID NO: 11812 - RNA, 24 nt, Human
ucuguguugcccaagcuggacuug

SEQ ID NO: 11813 - RNA, 24 nt, Human
ucuguuaugauuuuauuucuucaa

SEQ ID NO: 11814 - RNA, 24 nt, Human
ucuguuauugcaaaguugguaaau

SEQ ID NO: 11815 - RNA, 24 nt, Human
ucuguugagagccugguaaggggu

SEQ ID NO: 11816 - RNA, 24 nt, Human
ucuguuguuccuuuuuuaauuccc

SEQ ID NO: 11817 - RNA, 24 nt, Human
ucuuaaguucaaaauggcuaaacu

SEQ ID NO: 11818 - RNA, 24 nt, Human
ucuuaaguuguuuuauuaaguuaa

SEQ ID NO: 11819 - RNA, 24 nt, Human
ucuuagugugauagacuaccacgc

SEQ ID NO: 11820 - RNA, 22 nt, Human
ucuuauucucccuguucccagc

SEQ ID NO: 11821 - RNA, 22 nt, Human
ucuucacuccuccuuuucuuca

SEQ ID NO: 11822 - RNA, 24 nt, Human
ucuucaguuccaacaaaaggucug

SEQ ID NO: 11823 - RNA, 24 nt, Human
ucuucaguuguagaaguuuuuccu

SEQ ID NO: 11824 - RNA, 24 nt, Human
ucuucauuggaggguugagcuuug

SEQ ID NO: 11825 - RNA, 22 nt, Human
ucuuccccagcauugcucccuu

SEQ ID NO: 11826 - RNA, 24 nt, Human
ucuuccgcuggccugggcuccgca

SEQ ID NO: 11827 - RNA, 22 nt, Human
ucuucuaaauacuuccuaacuu

SEQ ID NO: 11828 - RNA, 22 nt, Human
ucuugaagaaaguugggcgugu

SEQ ID NO: 11829 - RNA, 24 nt, Human
ucuugaguuugggaguuaauuuug

SEQ ID NO: 11830 - RNA, 24 nt, Human
ucuugggcugcuaagaugggccuu

SEQ ID NO: 11831 - RNA, 24 nt, Human
ucuuggguuaucuguggggugaga

SEQ ID NO: 11832 - RNA, 22 nt, Human
ucuuggugcuuuugcuggauga

SEQ ID NO: 11833 - RNA, 24 nt, Human
ucuugguucuagcuucugggccuc

SEQ ID NO: 11834 - RNA, 24 nt, Human
ucuugguucucuauucaaaguguu

SEQ ID NO: 11835 - RNA, 24 nt, Human
ucuuguugaacaguguguagacua

SEQ ID NO: 11836 - RNA, 24 nt, Human
ucuuguuugaucuucacguuaaga

SEQ ID NO: 11837 - RNA, 24 nt, Human
ucuuucuuucugccuuucagaugg

SEQ ID NO: 11838 - RNA, 22 nt, Human
ucuuugaucucuuccggggcuu

SEQ ID NO: 11839 - RNA, 22 nt, Human
ucuuugauggaugcauuuccau

SEQ ID NO: 11840 - RNA, 24 nt, Human
ucuuuggucuuuggaagugggcag

SEQ ID NO: 11841 - RNA, 24 nt, Human
ucuuuggugccuuuccuguucagc

SEQ ID NO: 11842 - RNA, 24 nt, Human
ucuuugguguucagagcacagccg

SEQ ID NO: 11843 - RNA, 22 nt, Human
ucuuuuuccaauguggccuggg

SEQ ID NO: 11844 - RNA, 22 nt, Human
ucuuuuuugggagacggagucg

SEQ ID NO: 11845 - RNA, 22 nt, Human
ugaaaacaaggacgggcgaauu

SEQ ID NO: 11846 - RNA, 24 nt, Human
ugaaaaccggcaggguguuaggcu

SEQ ID NO: 11847 - RNA, 24 nt, Human
ugaaaagugccagggcaauuucuu

SEQ ID NO: 11848 - RNA, 24 nt, Human
ugaaacaauucagguuuucuaggg

SEQ ID NO: 11849 - RNA, 24 nt, Human
ugaaacagcguuaucucuuugugu

SEQ ID NO: 11850 - RNA, 24 nt, Human
ugaaacgaacaaggcuugagaauc

SEQ ID NO: 11851 - RNA, 24 nt, Human
ugaaagaaaaugagagcagaaagu

SEQ ID NO: 11852 - RNA, 24 nt, Human
ugaaagaagccaugaucaagcuug

SEQ ID NO: 11853 - RNA, 24 nt, Human
ugaaagcacuggcagccaggaaca

SEQ ID NO: 11854 - RNA, 24 nt, Human
ugaaagcagcaauaucaugucuug

SEQ ID NO: 11855 - RNA, 24 nt, Human
ugaaagcuuuugaacagcugagaa

SEQ ID NO: 11856 - RNA, 21 nt, Human
ugaaaggauuagagaaggauu

SEQ ID NO: 11857 - RNA, 24 nt, Human
ugaaaguaauuaauuuaugacaua

SEQ ID NO: 11858 - RNA, 24 nt, Human
ugaaaguuauaauguaguaggaga

SEQ ID NO: 11859 - RNA, 24 nt, Human
ugaaaguugucaccaguuuauugu

SEQ ID NO: 11860 - RNA, 24 nt, Human
ugaaauaacaaguuuagugcuuua

SEQ ID NO: 11861 - RNA, 22 nt, Human
ugaaauauuuucaagcugauua

SEQ ID NO: 11862 - RNA, 24 nt, Human
ugaaaucagcaaagagcagaugca

SEQ ID NO: 11863 - RNA, 24 nt, Human
ugaaaugcacuuucccgugcagca

SEQ ID NO: 11864 - RNA, 24 nt, Human
ugaaaugccuaaagaagucacagg

SEQ ID NO: 11865 - RNA, 24 nt, Human
ugaaauggcugcaccaugucggcc

SEQ ID NO: 11866 - RNA, 24 nt, Human
ugaacagacuauaacuaggaaagg

SEQ ID NO: 11867 - RNA, 24 nt, Human
ugaaccaggaaaacugaagcaccu

SEQ ID NO: 11868 - RNA, 22 nt, Human
ugaacugcugaaugcuauuccu

SEQ ID NO: 11869 - RNA, 24 nt, Human
ugaagaaauggaagucuggagagg

SEQ ID NO: 11870 - RNA, 24 nt, Human
ugaagacaaccuugaggagggagc

SEQ ID NO: 11871 - RNA, 24 nt, Human
ugaagagacgagcuguggggaucu

SEQ ID NO: 11872 - RNA, 24 nt, Human
ugaagagaugcauuggccuguccc

SEQ ID NO: 11873 - RNA, 24 nt, Human
ugaagagccacccuguggcaucga

SEQ ID NO: 11874 - RNA, 24 nt, Human
ugaagcaagcuccggagacuucuu

SEQ ID NO: 11875 - RNA, 24 nt, Human
ugaagcuagauaccuaaagcuacc

SEQ ID NO: 11876 - RNA, 22 nt, Human
ugaagcuggguggcuuggcuca

SEQ ID NO: 11877 - RNA, 24 nt, Human
ugaaggaagugagcacauuauuug

SEQ ID NO: 11878 - RNA, 24 nt, Human
ugaaggacucguggauaucuaaca

SEQ ID NO: 11879 - RNA, 22 nt, Human
ugaaggagacgaauguauuugg

SEQ ID NO: 11880 - RNA, 24 nt, Human
ugaaggcaaggcagguagacggug

SEQ ID NO: 11881 - RNA, 22 nt, Human
ugaaggcauucuuguaucaagg

SEQ ID NO: 11882 - RNA, 24 nt, Human
ugaaggcuucauggaggugauugu

SEQ ID NO: 11883 - RNA, 22 nt, Human
ugaagggagagaagggugggug

SEQ ID NO: 11884 - RNA, 24 nt, Human
ugaagguaccuuaacauggggaau

SEQ ID NO: 11885 - RNA, 22 nt, Human
ugaaguguaugugauauugugu

SEQ ID NO: 11886 - RNA, 24 nt, Human
ugaaguguccucaaauguaaugcu

SEQ ID NO: 11887 - RNA, 24 nt, Human
ugaauaagauuaauauucucaugg

SEQ ID NO: 11888 - RNA, 24 nt, Human
ugaauacacaucucugucagugug

SEQ ID NO: 11889 - RNA, 24 nt, Human
ugaaugacaacuuuauuuuucuua

SEQ ID NO: 11890 - RNA, 21 nt, Human
ugaaugccaguuccuuugcca

SEQ ID NO: 11891 - RNA, 22 nt, Human
ugaaugccaguuccuuugccaa

SEQ ID NO: 11892 - RNA, 24 nt, Human
ugaaugcgcuaaagcuggacucca

SEQ ID NO: 11893 - RNA, 24 nt, Human
ugaaugggaagugguuaaagccug

SEQ ID NO: 11894 - RNA, 24 nt, Human
ugaauggugcuugcauuuuagggu

SEQ ID NO: 11895 - RNA, 24 nt, Human
ugaaugugcaaauugugaguaaaa

SEQ ID NO: 11896 - RNA, 24 nt, Human
ugaauuaggagguuaggcaggagu

SEQ ID NO: 11897 - RNA, 24 nt, Human
ugaauuauuuaauauauucuaagu

SEQ ID NO: 11898 - RNA, 24 nt, Human
ugaauuuacuuuuaaaaugggcaa

SEQ ID NO: 11899 - RNA, 24 nt, Human
ugacaaacaagucauuucuguaag

SEQ ID NO: 11900 - RNA, 24 nt, Human
ugacaagagcaaccggucuacaac

SEQ ID NO: 11901 - RNA, 24 nt, Human
ugacaagcaguagccaugggggag

SEQ ID NO: 11902 - RNA, 24 nt, Human
ugacaaguacauguuccuuuggga

SEQ ID NO: 11903 - RNA, 24 nt, Human
ugacaagugccguggguugggcuu

SEQ ID NO: 11904 - RNA, 24 nt, Human
ugacagaaaaacauucucaggacu

SEQ ID NO: 11905 - RNA, 24 nt, Human
ugacagagauuccaucuaucuaac

SEQ ID NO: 11906 - RNA, 22 nt, Human
ugacagagugagacccuguuga

SEQ ID NO: 11907 - RNA, 24 nt, Human
ugacagccaacaggguuaugauac

SEQ ID NO: 11908 - RNA, 24 nt, Human
ugacaggaucaagcgugcuuuccu

SEQ ID NO: 11909 - RNA, 24 nt, Human
ugacaggucuuuccccuaugucau

SEQ ID NO: 11910 - RNA, 23 nt, Human
ugacaucaaugugggaauuugag

SEQ ID NO: 11911 - RNA, 24 nt, Human
ugacaugaaccucucggagucccu

SEQ ID NO: 11912 - RNA, 22 nt, Human
ugacaugcacagaaguggagag

SEQ ID NO: 11913 - RNA, 23 nt, Human
ugacaugcuggugcacugcaccc

SEQ ID NO: 11914 - RNA, 24 nt, Human
ugacaugggcucaaacuuggccua

SEQ ID NO: 11915 - RNA, 24 nt, Human
ugacauggugugagugugugggug

SEQ ID NO: 11916 - RNA, 19 nt, Human
ugacauguauacuugcugc

SEQ ID NO: 11917 - RNA, 24 nt, Human
ugacauguuucuuuguuuuggaca

SEQ ID NO: 11918 - RNA, 24 nt, Human
ugaccagacuuuuccagaagugcc

SEQ ID NO: 11919 - RNA, 24 nt, Human
ugaccagcagcuucuuacaguagc

SEQ ID NO: 11920 - RNA, 24 nt, Human
ugaccaggaaauacaacgagcugc

SEQ ID NO: 11921 - RNA, 24 nt, Human
ugaccauaaugcguacagguguuu

SEQ ID NO: 11922 - RNA, 24 nt, Human
ugacccagaucauaguaaugauga

SEQ ID NO: 11923 - RNA, 24 nt, Human
ugacccguguaauccauaaguuuc

SEQ ID NO: 11924 - RNA, 24 nt, Human
ugaccgggaucgauuugacagagc

SEQ ID NO: 11925 - RNA, 22 nt, Human
ugaccgugggcugucuggcccc

SEQ ID NO: 11926 - RNA, 24 nt, Human
ugaccucaagugauccgcucgcuc

SEQ ID NO: 11927 - RNA, 22 nt, Human
ugaccucaggugauacgcccgc

SEQ ID NO: 11928 - RNA, 24 nt, Human
ugaccugcggaagcuggcugugaa

SEQ ID NO: 11929 - RNA, 24 nt, Human
ugaccuggccgucaggcagcucgu

SEQ ID NO: 11930 - RNA, 24 nt, Human
ugaccugguguuugucugcacucu

SEQ ID NO: 11931 - RNA, 22 nt, Human
ugaccuugugcaucccugagag

SEQ ID NO: 11932 - RNA, 24 nt, Human
ugaccuuucgccuuaacagagccu

SEQ ID NO: 11933 - RNA, 22 nt, Human
ugacgaggagaagaggccaagg

SEQ ID NO: 11934 - RNA, 24 nt, Human
ugacgcaaagggauaugugaagcc

SEQ ID NO: 11935 - RNA, 24 nt, Human
ugacgcucaagagcaggauucccc

SEQ ID NO: 11936 - RNA, 24 nt, Human
ugacgucacucacucugagaccua

SEQ ID NO: 11937 - RNA, 24 nt, Human
ugacgugccaucgaggacugcugc

SEQ ID NO: 11938 - RNA, 24 nt, Human
ugacuacaagucuugugcucauga

SEQ ID NO: 11939 - RNA, 24 nt, Human
ugacuacauacauagauggguagc

SEQ ID NO: 11940 - RNA, 21 nt, Human
ugacuagaugccuuguguauc

SEQ ID NO: 11941 - RNA, 24 nt, Human
ugacuaggaccccuucaaacgucu

SEQ ID NO: 11942 - RNA, 24 nt, Human
ugacuauaaaacaaaccuguguug

SEQ ID NO: 11943 - RNA, 24 nt, Human
ugacuauaucaucaaccaguuuuc

SEQ ID NO: 11944 - RNA, 24 nt, Human
ugacucagugcucaggaucuuaug

SEQ ID NO: 11945 - RNA, 24 nt, Human
ugacucgccugaggccacaucucc

SEQ ID NO: 11946 - RNA, 24 nt, Human
ugacugaaauucaccauccagggc

SEQ ID NO: 11947 - RNA, 24 nt, Human
ugacugacacgucugaccccugag

SEQ ID NO: 11948 - RNA, 24 nt, Human
ugacugcucugccauguugcuuug

SEQ ID NO: 11949 - RNA, 22 nt, Human
ugacuggaggaagggagguaag

SEQ ID NO: 11950 - RNA, 24 nt, Human
ugacuggagugaauucagugguca

SEQ ID NO: 11951 - RNA, 22 nt, Human
ugacuggcgcugaagucaccgg

SEQ ID NO: 11952 - RNA, 24 nt, Human
ugacuggggcagguuguagagaaa

SEQ ID NO: 11953 - RNA, 24 nt, Human
ugacuggggcuggggugagagagg

SEQ ID NO: 11954 - RNA, 24 nt, Human
ugacuggguuguccuuuggcuaga

SEQ ID NO: 11955 - RNA, 24 nt, Human
ugacugguggauauagaacgaggg

SEQ ID NO: 11956 - RNA, 24 nt, Human
ugacuguccauagugguuauugau

SEQ ID NO: 11957 - RNA, 22 nt, Human
ugacuguucucaaaguuugaag

SEQ ID NO: 11958 - RNA, 22 nt, Human
ugacuuaaccucucugggucuc

SEQ ID NO: 11959 - RNA, 24 nt, Human
ugacuucccuauggacaaccucau

SEQ ID NO: 11960 - RNA, 24 nt, Human
ugacuugaauccaaaguguauaca

SEQ ID NO: 11961 - RNA, 24 nt, Human
ugacuugguugacuuaggccaggc

SEQ ID NO: 11962 - RNA, 24 nt, Human
ugacuuuagguaaguuacuuaacc

SEQ ID NO: 11963 - RNA, 24 nt, Human
ugacuuuauacuuagaauugcugu

SEQ ID NO: 11964 - RNA, 22 nt, Human
ugacuuugaacagggaauuucu

SEQ ID NO: 11965 - RNA, 19 nt, Human
ugacuuugguguauagugc

SEQ ID NO: 11966 - RNA, 24 nt, Human
ugagaaaacagauuuagagaaaua

SEQ ID NO: 11967 - RNA, 24 nt, Human
ugagaaaagacagacuugggguag

SEQ ID NO: 11968 - RNA, 24 nt, Human
ugagaaagaaaagaaauaugagcc

SEQ ID NO: 11969 - RNA, 22 nt, Human
ugagaaaugaaaucaaugguua

SEQ ID NO: 11970 - RNA, 24 nt, Human
ugagaacuccucaugcacccugug

SEQ ID NO: 11971 - RNA, 22 nt, Human
ugagaacugguuacaugaguuu

SEQ ID NO: 11972 - RNA, 22 nt, Human
ugagaagacaagugauuuucuu

SEQ ID NO: 11973 - RNA, 24 nt, Human
ugagaagaccauuuuguucacuug

SEQ ID NO: 11974 - RNA, 24 nt, Human
ugagaaggagaugagauucaguac

SEQ ID NO: 11975 - RNA, 24 nt, Human
ugagaaggcugguacccagugcuu

SEQ ID NO: 11976 - RNA, 24 nt, Human
ugagaaguagcuucuggauguguu

SEQ ID NO: 11977 - RNA, 24 nt, Human
ugagaaucuggaggagcuacagag

SEQ ID NO: 11978 - RNA, 24 nt, Human
ugagaccuggcagaacaggcuguc

SEQ ID NO: 11979 - RNA, 22 nt, Human
ugagacgaagacuguggcugag

SEQ ID NO: 11980 - RNA, 24 nt, Human
ugagacuggguucccaucgcugga

SEQ ID NO: 11981 - RNA, 24 nt, Human
ugagagaauguaagaacauauaga

SEQ ID NO: 11982 - RNA, 24 nt, Human
ugagagacugcuccccauugcaga

SEQ ID NO: 11983 - RNA, 24 nt, Human
ugagagaggagauggaaaccuggu

SEQ ID NO: 11984 - RNA, 24 nt, Human
ugagagauugggcgaagaaacaac

SEQ ID NO: 11985 - RNA, 22 nt, Human
ugagagcaaagucgcaguucug

SEQ ID NO: 11986 - RNA, 24 nt, Human
ugagagcccugcagugugccugcg

SEQ ID NO: 11987 - RNA, 23 nt, Human
ugagaggaacgcaagcgaggggu

SEQ ID NO: 11988 - RNA, 24 nt, Human
ugagaggaaguuagaggggcuaga

SEQ ID NO: 11989 - RNA, 24 nt, Human
ugagaggcccagguccuagagcag

SEQ ID NO: 11990 - RNA, 18 nt, Human
ugagaguggagaucugga

SEQ ID NO: 11991 - RNA, 24 nt, Human
ugagagugguggagccugguucca

SEQ ID NO: 11992 - RNA, 24 nt, Human
ugagauaaagugccagucugccag

SEQ ID NO: 11993 - RNA, 24 nt, Human
ugagauaaauagaaaaguaaacau

SEQ ID NO: 11994 - RNA, 24 nt, Human
ugagauaacugaaagggaagcaga

SEQ ID NO: 11995 - RNA, 22 nt, Human
ugagauaaguacuuuguacaug

SEQ ID NO: 11996 - RNA, 24 nt, Human
ugagauagccaggcugaagaagcc

SEQ ID NO: 11997 - RNA, 22 nt, Human
ugagaucaagggaggauggaga

SEQ ID NO: 11998 - RNA, 24 nt, Human
ugagaucaagugcuaggacuggau

SEQ ID NO: 11999 - RNA, 22 nt, Human
ugagaucaucguuacaagcagc

SEQ ID NO: 12000 - RNA, 24 nt, Human
ugagauccaucugacugcugccau

SEQ ID NO: 12001 - RNA, 17 nt, Human
ugagaucggcuuuuucc

SEQ ID NO: 12002 - RNA, 21 nt, Human
ugagaugauugauugacauga

SEQ ID NO: 12003 - RNA, 23 nt, Human
ugagaugcaguuugcaggugggu

SEQ ID NO: 12004 - RNA, 21 nt, Human
ugagaugggguggggacacag

SEQ ID NO: 12005 - RNA, 24 nt, Human
ugagauuauuaugagcagaauggu

SEQ ID NO: 12006 - RNA, 24 nt, Human
ugagauucuugcucaccgucuggg

SEQ ID NO: 12007 - RNA, 24 nt, Human
ugagauugcacaagcuguggaaga

SEQ ID NO: 12008 - RNA, 24 nt, Human
ugagauugcuguccucccaaaggu

SEQ ID NO: 12009 - RNA, 24 nt, Human
ugagcaaagaacugaagaagcaag

SEQ ID NO: 12010 - RNA, 24 nt, Human
ugagcaacgccccgcccuuuguug

SEQ ID NO: 12011 - RNA, 24 nt, Human
ugagcaauuggaggcuccuggagg

SEQ ID NO: 12012 - RNA, 24 nt, Human
ugagcacaggaguuccagaccagc

SEQ ID NO: 12013 - RNA, 24 nt, Human
ugagcacugguaaacaaucugcuu

SEQ ID NO: 12014 - RNA, 24 nt, Human
ugagcacuuuaacuggcacauucu

SEQ ID NO: 12015 - RNA, 21 nt, Human
ugagcagcaagucccaagauc

SEQ ID NO: 12016 - RNA, 24 nt, Human
ugagcagguccaccggccccuaca

SEQ ID NO: 12017 - RNA, 23 nt, Human
ugagcagucuguggcucaacugg

SEQ ID NO: 12018 - RNA, 24 nt, Human
ugagcaguggggaagcagguuuua

SEQ ID NO: 12019 - RNA, 24 nt, Human
ugagcaguuauuggaggaagagag

SEQ ID NO: 12020 - RNA, 24 nt, Human
ugagcaguuggugaguuuagaugg

SEQ ID NO: 12021 - RNA, 24 nt, Human
ugagcauaaguaaagaaaggugga

SEQ ID NO: 12022 - RNA, 24 nt, Human
ugagcaucauggaccuuccucccu

SEQ ID NO: 12023 - RNA, 24 nt, Human
ugagcccagaacgaaggaacacgg

SEQ ID NO: 12024 - RNA, 24 nt, Human
ugagccugaagaguguucgcguug

SEQ ID NO: 12025 - RNA, 24 nt, Human
ugagcgcgcagcugcgcgaggccg

SEQ ID NO: 12026 - RNA, 24 nt, Human
ugagcuggauugacauagcccuug

SEQ ID NO: 12027 - RNA, 24 nt, Human
ugagcugugccuucgccaccccuu

SEQ ID NO: 12028 - RNA, 24 nt, Human
ugaggaacuaacugauuaguuguu

SEQ ID NO: 12029 - RNA, 22 nt, Human
ugaggacagacacucagggaau

SEQ ID NO: 12030 - RNA, 22 nt, Human
ugaggacaggagguugugaguu

SEQ ID NO: 12031 - RNA, 24 nt, Human
ugaggacugggacagguacgugca

SEQ ID NO: 12032 - RNA, 24 nt, Human
ugaggagaaagcuguggagaaguu

SEQ ID NO: 12033 - RNA, 24 nt, Human
ugaggagaagcugaaauguguggg

SEQ ID NO: 12034 - RNA, 24 nt, Human
ugaggagaggacgagcaaggacgg

SEQ ID NO: 12035 - RNA, 22 nt, Human
ugaggagggacaaggugagggg

SEQ ID NO: 12036 - RNA, 22 nt, Human
ugaggaggugcuaccagcgucu

SEQ ID NO: 12037 - RNA, 22 nt, Human
ugaggaucuuuucccuucucuc

SEQ ID NO: 12038 - RNA, 24 nt, Human
ugaggcagacaaaggaaagguaau

SEQ ID NO: 12039 - RNA, 24 nt, Human
ugaggcagacgccugaacagggac

SEQ ID NO: 12040 - RNA, 22 nt, Human
ugaggcagcuggccuuuguaga

SEQ ID NO: 12041 - RNA, 24 nt, Human
ugaggcaggcaggguguacagaug

SEQ ID NO: 12042 - RNA, 22 nt, Human
ugaggcaggggaaugggagaag

SEQ ID NO: 12043 - RNA, 23 nt, Human
ugaggccagcgcgcagcacuuuu

SEQ ID NO: 12044 - RNA, 24 nt, Human
ugaggcccguuuagauaccauggc

SEQ ID NO: 12045 - RNA, 24 nt, Human
ugaggcgcagacagguucgguuac

SEQ ID NO: 12046 - RNA, 24 nt, Human
ugaggcgcggcugccccggggagg

SEQ ID NO: 12047 - RNA, 24 nt, Human
ugaggcuugcggaauuuagcuaga

SEQ ID NO: 12048 - RNA, 24 nt, Human
ugagggacugggagccaggcaaga

SEQ ID NO: 12049 - RNA, 24 nt, Human
ugagggaggggaugcugcagaugu

SEQ ID NO: 12050 - RNA, 24 nt, Human
ugagggcaaaauggguugacgcga

SEQ ID NO: 12051 - RNA, 24 nt, Human
ugagggcagccaucaccuucagcu

SEQ ID NO: 12052 - RNA, 24 nt, Human
ugaggggaucuuggccucacggug

SEQ ID NO: 12053 - RNA, 24 nt, Human
ugaggggguucgugcggcucccag

SEQ ID NO: 12054 - RNA, 24 nt, Human
ugaggggucaggcagaauauggug

SEQ ID NO: 12055 - RNA, 24 nt, Human
ugaggguaguagcuuuucaugcac

SEQ ID NO: 12056 - RNA, 22 nt, Human
ugagguaggcagugcuauacag

SEQ ID NO: 12057 - RNA, 24 nt, Human
ugagguaggcuguuuccuucuuuc

SEQ ID NO: 12058 - RNA, 24 nt, Human
ugagguaugauaauugccugaacc

SEQ ID NO: 12059 - RNA, 24 nt, Human
ugaggucaccaagaaguucuacuc

SEQ ID NO: 12060 - RNA, 24 nt, Human
ugaggucaggaaaggggaaggacg

SEQ ID NO: 12061 - RNA, 24 nt, Human
ugaggucauauuugguauuguauu

SEQ ID NO: 12062 - RNA, 24 nt, Human
ugaggucccuccuugagucucaug

SEQ ID NO: 12063 - RNA, 24 nt, Human
ugagguccuggaugccucaucccu

SEQ ID NO: 12064 - RNA, 24 nt, Human
ugagguccuucaaggcugacucca

SEQ ID NO: 12065 - RNA, 24 nt, Human
ugaggugaacaagugcagccgcug

SEQ ID NO: 12066 - RNA, 24 nt, Human
ugagguggaccccaagccugagcc

SEQ ID NO: 12067 - RNA, 24 nt, Human
ugagguggagaauggcgugcagga

SEQ ID NO: 12068 - RNA, 23 nt, Human
ugagguggcuaggcuugacacac

SEQ ID NO: 12069 - RNA, 22 nt, Human
ugaggugggaggauuguaugag

SEQ ID NO: 12070 - RNA, 24 nt, Human
ugagguggguggaucacaagguca

SEQ ID NO: 12071 - RNA, 24 nt, Human
ugagguggguggaucaccugaggu

SEQ ID NO: 12072 - RNA, 22 nt, Human
ugagguuaguaguuugagacca

SEQ ID NO: 12073 - RNA, 24 nt, Human
ugagguugucuaugaggcaggggc

SEQ ID NO: 12074 - RNA, 24 nt, Human
ugagguugugcaauggguugugaa

SEQ ID NO: 12075 - RNA, 24 nt, Human
ugaguagaaguaaauacauuauag

SEQ ID NO: 12076 - RNA, 23 nt, Human
ugaguagacgggaggggagggug

SEQ ID NO: 12077 - RNA, 24 nt, Human
ugaguagauuuacaguugugugga

SEQ ID NO: 12078 - RNA, 22 nt, Human
ugaguagcucuggaauaagagc

SEQ ID NO: 12079 - RNA, 24 nt, Human
ugaguagcugggauucacgggugc

SEQ ID NO: 12080 - RNA, 22 nt, Human
ugaguauucaccaggugcuggg

SEQ ID NO: 12081 - RNA, 24 nt, Human
ugagucacuagaugaggaggagga

SEQ ID NO: 12082 - RNA, 24 nt, Human
ugagucacuccacccuggggccua

SEQ ID NO: 12083 - RNA, 24 nt, Human
ugagucuaggagaauuuuugauuu

SEQ ID NO: 12084 - RNA, 22 nt, Human
ugagucuauagaggcaguaggc

SEQ ID NO: 12085 - RNA, 22 nt, Human
ugagucuguugcuagggggaau

SEQ ID NO: 12086 - RNA, 18 nt, Human
ugagugaaagaagcagcc

SEQ ID NO: 12087 - RNA, 24 nt, Human
ugagugaaaugaguuauggaucua

SEQ ID NO: 12088 - RNA, 24 nt, Human
ugagugaaccuagagacaaaugcu

SEQ ID NO: 12089 - RNA, 24 nt, Human
ugagugcaagguugaugggaucca

SEQ ID NO: 12090 - RNA, 24 nt, Human
ugagugcaauauaauagucaugaa

SEQ ID NO: 12091 - RNA, 24 nt, Human
ugagugcccccaggaggggcuggg

SEQ ID NO: 12092 - RNA, 24 nt, Human
ugagugcccccagggaggggcugg

SEQ ID NO: 12093 - RNA, 24 nt, Human
ugagugcccccagggagggugcug

SEQ ID NO: 12094 - RNA, 24 nt, Human
ugagugcgcgggagccccugugag

SEQ ID NO: 12095 - RNA, 24 nt, Human
ugagugcuaaauuuggaagacagc

SEQ ID NO: 12096 - RNA, 22 nt, Human
ugagugcuuuaaauguuauuuu

SEQ ID NO: 12097 - RNA, 24 nt, Human
ugagugggauuuaugaguuacugu

SEQ ID NO: 12098 - RNA, 24 nt, Human
ugagugggugucgacccggugcug

SEQ ID NO: 12099 - RNA, 22 nt, Human
cuaauuuuuguauuuuugguag

SEQ ID NO: 12100 - RNA, 22 nt, Human
cuacagcugccccuauuuacug

SEQ ID NO: 12101 - RNA, 24 nt, Human
cuacagguugcaacauaaaacgga

SEQ ID NO: 12102 - RNA, 22 nt, Human
cuacuguacuacuuggaucuuu

SEQ ID NO: 12103 - RNA, 22 nt, Human
cuacuuguuccucucaccucaa

SEQ ID NO: 12104 - RNA, 24 nt, Human
cuagaccuggcauuugcucgggac

SEQ ID NO: 12105 - RNA, 22 nt, Human
cuagacucuaagcuccuugaga

SEQ ID NO: 12106 - RNA, 22 nt, Human
cuagacugaagcuccuugagga

SEQ ID NO: 12107 - RNA, 22 nt, Human
cuagaucaguccgauguggacu

SEQ ID NO: 12108 - RNA, 22 nt, Human
cuagccuguuuguccucacccc

SEQ ID NO: 12109 - RNA, 24 nt, Human
cuaggaaaaccgagguguugagag

SEQ ID NO: 12110 - RNA, 22 nt, Human
cuaggaucaugucacauauaca

SEQ ID NO: 12111 - RNA, 22 nt, Human
cuaggcauugugcaagguguua

SEQ ID NO: 12112 - RNA, 24 nt, Human
cuaggggcuggccucagcccugug

SEQ ID NO: 12113 - RNA, 24 nt, Human
cuagucaaggucaaauucaugggu

SEQ ID NO: 12114 - RNA, 24 nt, Human
cuagucaaguauugagggacucag

SEQ ID NO: 12115 - RNA, 24 nt, Human
cuagucgccggaugaagugagggc

SEQ ID NO: 12116 - RNA, 24 nt, Human
cuaucccucaaugugacgcaguga

SEQ ID NO: 12117 - RNA, 24 nt, Human
cuaugugucucagcuuggggcugg

SEQ ID NO: 12118 - RNA, 21 nt, Human
cucaaguuucauuugugaagc

SEQ ID NO: 12119 - RNA, 24 nt, Human
cucacgccuguaaucccagcacuu

SEQ ID NO: 12120 - RNA, 24 nt, Human
cucacugcaaccuccgccucccgg

SEQ ID NO: 12121 - RNA, 22 nt, Human
cucacugcaaccuccgccugcc

SEQ ID NO: 12122 - RNA, 22 nt, Human
cucacugcaaccucugccuccc

SEQ ID NO: 12123 - RNA, 24 nt, Human
cucacugcaaccucugccucccgg

SEQ ID NO: 12124 - RNA, 24 nt, Human
cucacugcaagcuccggcuuggua

SEQ ID NO: 12125 - RNA, 24 nt, Human
cucacuguaaccucugccucccgg

SEQ ID NO: 12126 - RNA, 22 nt, Human
cucaggcaucucaacaagcagc

SEQ ID NO: 12127 - RNA, 22 nt, Human
cucaggugauacacccaucucg

SEQ ID NO: 12128 - RNA, 22 nt, Human
cucaguggcuauugaguuaccc

SEQ ID NO: 12129 - RNA, 24 nt, Human
cucaugauguacgcgcaguccaaa

SEQ ID NO: 12130 - RNA, 22 nt, Human
cuccaccucacccuaguuccua

SEQ ID NO: 12131 - RNA, 24 nt, Human
cuccagggcagguggcugccuccc

SEQ ID NO: 12132 - RNA, 24 nt, Human
cuccccuacucggggcacaggggu

SEQ ID NO: 12133 - RNA, 24 nt, Human
cucccgcaucuugaccuccuucuc

SEQ ID NO: 12134 - RNA, 21 nt, Human
cucccgcugcccaccaacacc

SEQ ID NO: 12135 - RNA, 24 nt, Human
cucccggcuuggguggcgcggccg

SEQ ID NO: 12136 - RNA, 24 nt, Human
cucccgggccuacagcggcugcgg

SEQ ID NO: 12137 - RNA, 24 nt, Human
cucccuggcacagacauugcggcg

SEQ ID NO: 12138 - RNA, 24 nt, Human
cucccugguacacaggcuucugug

SEQ ID NO: 12139 - RNA, 24 nt, Human
cuccggucauugugcgggccucug

SEQ ID NO: 12140 - RNA, 22 nt, Human
cuccuaggcuggagugcagugg

SEQ ID NO: 12141 - RNA, 22 nt, Human
cuccucaaugccacugcacuga

SEQ ID NO: 12142 - RNA, 24 nt, Human
cuccugguccuccaaaaugcgcuu

SEQ ID NO: 12143 - RNA, 24 nt, Human
cuccuguaccucuuaucagauuua

SEQ ID NO: 12144 - RNA, 24 nt, Human
cuccugugucuucucacucuuggu

SEQ ID NO: 12145 - RNA, 24 nt, Human
cuccuucgcggucccugccgccac

SEQ ID NO: 12146 - RNA, 22 nt, Human
cuccuugagagcauacucuuuc

SEQ ID NO: 12147 - RNA, 24 nt, Human
cuccuuuuguggcuguggacaccu

SEQ ID NO: 12148 - RNA, 24 nt, Human
cucgcugggacccgaguuuggagg

SEQ ID NO: 12149 - RNA, 24 nt, Human
cucguauugucucuccuuucgcca

SEQ ID NO: 12150 - RNA, 22 nt, Human
cucuauagcaauguuucuaacu

SEQ ID NO: 12151 - RNA, 24 nt, Human
cucucagauggcaacucccagggc

SEQ ID NO: 12152 - RNA, 22 nt, Human
cucucagcaaaugcucuuuuuu

SEQ ID NO: 12153 - RNA, 24 nt, Human
cucugcaggggaggaagcaccugg

SEQ ID NO: 12154 - RNA, 24 nt, Human
cucugcaucucgcggcgccgcgac

SEQ ID NO: 12155 - RNA, 22 nt, Human
cucugcccucccaauucuauua

SEQ ID NO: 12156 - RNA, 22 nt, Human
cucuggaagcagcgagggaaaa

SEQ ID NO: 12157 - RNA, 24 nt, Human
cucugguuuaggcgcccgaaaggc

SEQ ID NO: 12158 - RNA, 22 nt, Human
cucuucuggggcagauguggca

SEQ ID NO: 12159 - RNA, 22 nt, Human
cucuugaaggaguauuuguguu

SEQ ID NO: 12160 - RNA, 24 nt, Human
cugaaauucuuaaaggaugggagu

SEQ ID NO: 12161 - RNA, 24 nt, Human
cugaaccuccugacagaguacauu

SEQ ID NO: 12162 - RNA, 24 nt, Human
cugaacgcagguacucugggcccc

SEQ ID NO: 12163 - RNA, 24 nt, Human
cugaagcugucugggggagaugau

SEQ ID NO: 12164 - RNA, 24 nt, Human
cugaagcuuugaaucauucagugg

SEQ ID NO: 12165 - RNA, 22 nt, Human
cugaaggguucuuggacauggg

SEQ ID NO: 12166 - RNA, 22 nt, Human
cugacgguaagcuccuugagga

SEQ ID NO: 12167 - RNA, 24 nt, Human
cugagcaccagccauaucuuugcu

SEQ ID NO: 12168 - RNA, 22 nt, Human
cugagcucaagugauccuccca

SEQ ID NO: 12169 - RNA, 22 nt, Human
cugaggucaggaguucgagacc

SEQ ID NO: 12170 - RNA, 22 nt, Human
cugagucugugggucaucuagc

SEQ ID NO: 12171 - RNA, 22 nt, Human
cugaugcacuuuaguuuuuggu

SEQ ID NO: 12172 - RNA, 22 nt, Human
cugauugaaccauucacuuuau

SEQ ID NO: 12173 - RNA, 22 nt, Human
cugcaaccuccaccucccgggc

SEQ ID NO: 12174 - RNA, 22 nt, Human
cugcaaccuccacuuccugggu

SEQ ID NO: 12175 - RNA, 24 nt, Human
cugcaaccucugccucccggguuc

SEQ ID NO: 12176 - RNA, 24 nt, Human
cugcaaggccccaggacugaaguc

SEQ ID NO: 12177 - RNA, 24 nt, Human
cugcaaggcuucuggcuacaucuu

SEQ ID NO: 12178 - RNA, 24 nt, Human
cugcacagguggcuggacuguccc

SEQ ID NO: 12179 - RNA, 24 nt, Human
cugcaccccgugcggggcuuuggc

SEQ ID NO: 12180 - RNA, 22 nt, Human
cugcagauuuugggguccacag

SEQ ID NO: 12181 - RNA, 24 nt, Human
cugcagcaauuuucagugagacag

SEQ ID NO: 12182 - RNA, 21 nt, Human
cugcagccaugcagcccccgc

SEQ ID NO: 12183 - RNA, 24 nt, Human
cugcaggccccgagcccggccccc

SEQ ID NO: 12184 - RNA, 24 nt, Human
cugcagugccuccaagaccacagc

SEQ ID NO: 12185 - RNA, 22 nt, Human
cugcaguggugauguguuguca

SEQ ID NO: 12186 - RNA, 24 nt, Human
cugcauccccuuucugcugcagga

SEQ ID NO: 12187 - RNA, 24 nt, Human
cugcauccugucagcaaugcccgg

SEQ ID NO: 12188 - RNA, 24 nt, Human
cugcaugcaucugcugcuggaggc

SEQ ID NO: 12189 - RNA, 23 nt, Human
cugcauugaaugauaguucugcu

SEQ ID NO: 12190 - RNA, 22 nt, Human
cugccagcucugaugagagauc

SEQ ID NO: 12191 - RNA, 24 nt, Human
cugccccccuccagcccugucagg

SEQ ID NO: 12192 - RNA, 22 nt, Human
cugcccccucugcugacgcccc

SEQ ID NO: 12193 - RNA, 24 nt, Human
cugccuccucugaggcuggcaguu

SEQ ID NO: 12194 - RNA, 24 nt, Human
cugccucuucucugaaaugccccu

SEQ ID NO: 12195 - RNA, 24 nt, Human
cugccuguugcuuugcugugugca

SEQ ID NO: 12196 - RNA, 24 nt, Human
cugccuguuguuuccucuggaagc

SEQ ID NO: 12197 - RNA, 24 nt, Human
cugcgcagggcagggguagggcac

SEQ ID NO: 12198 - RNA, 20 nt, Human
cugcgcccccuccugccagg

SEQ ID NO: 12199 - RNA, 24 nt, Human
cugcgguaucccaaucacagacac

SEQ ID NO: 12200 - RNA, 22 nt, Human
cugcuaucagacuucuucugug

SEQ ID NO: 12201 - RNA, 24 nt, Human
cugcucgggaucaaggcccaggug

SEQ ID NO: 12202 - RNA, 24 nt, Human
cugcucugcgccggggccuggcuc

SEQ ID NO: 12203 - RNA, 24 nt, Human
cugcugcacuggccgccaaguaug

SEQ ID NO: 12204 - RNA, 24 nt, Human
cugcugcaggcagauuccuucugc

SEQ ID NO: 12205 - RNA, 22 nt, Human
cugcugccuuucucucagagau

SEQ ID NO: 12206 - RNA, 24 nt, Human
cugcugcugcuggccggggccggg

SEQ ID NO: 12207 - RNA, 22 nt, Human
cugcuggccauuuucuucaugg

SEQ ID NO: 12208 - RNA, 24 nt, Human
cugcuggccugccgccaccugccc

SEQ ID NO: 12209 - RNA, 24 nt, Human
cugcuucccggugcuguucaccua

SEQ ID NO: 12210 - RNA, 24 nt, Human
cugcuuccugcccagacuggauac

SEQ ID NO: 12211 - RNA, 24 nt, Human
cugcuuugugccucugaccugcug

SEQ ID NO: 12212 - RNA, 23 nt, Human
cuggaaccagcugucuguggaga

SEQ ID NO: 12213 - RNA, 22 nt, Human
cuggaaccucaacagcaggauu

SEQ ID NO: 12214 - RNA, 23 nt, Human
cuggaacucacucucagccacag

SEQ ID NO: 12215 - RNA, 24 nt, Human
cuggaagugcaaaugguguguuug

SEQ ID NO: 12216 - RNA, 24 nt, Human
cuggacccagagucuguggagcug

SEQ ID NO: 12217 - RNA, 24 nt, Human
cuggagcagagccucuugggaaau

SEQ ID NO: 12218 - RNA, 24 nt, Human
cuggagcgcaugaagcggcgcagc

SEQ ID NO: 12219 - RNA, 24 nt, Human
cuggagggcuggagggucucgucu

SEQ ID NO: 12220 - RNA, 24 nt, Human
cuggaggugggcuuuggcauggcc

SEQ ID NO: 12221 - RNA, 22 nt, Human
cuggaguagaguuccugguugc

SEQ ID NO: 12222 - RNA, 22 nt, Human
cuggaguucagugguaugauca

SEQ ID NO: 12223 - RNA, 24 nt, Human
cuggaucccacaccugccacgggu

SEQ ID NO: 12224 - RNA, 24 nt, Human
cuggauggcagaguugaauaguug

SEQ ID NO: 12225 - RNA, 24 nt, Human
cuggcagacagccugaugguucag

SEQ ID NO: 12226 - RNA, 24 nt, Human
cuggcagacggcucgcuuuucgua

SEQ ID NO: 12227 - RNA, 24 nt, Human
cuggcgcagagcguccuugcagcc

SEQ ID NO: 12228 - RNA, 23 nt, Human
cuggcgccgggggucugcgggcg

SEQ ID NO: 12229 - RNA, 22 nt, Human
cuggcucugccacccccugggc

SEQ ID NO: 12230 - RNA, 24 nt, Human
cuggcucuuuccaguccuagcagg

SEQ ID NO: 12231 - RNA, 22 nt, Human
cugggaggcagaaguugcagug

SEQ ID NO: 12232 - RNA, 22 nt, Human
cugggauggaggagaauuagag

SEQ ID NO: 12233 - RNA, 22 nt, Human
cugggcaaccugaguggguaga

SEQ ID NO: 12234 - RNA, 22 nt, Human
cugggcaguaauguaguugaga

SEQ ID NO: 12235 - RNA, 24 nt, Human
cugggccaggccacaucugcggug

SEQ ID NO: 12236 - RNA, 24 nt, Human
cugggcccugggcgcuccauuuug

SEQ ID NO: 12237 - RNA, 24 nt, Human
cugggccucaaggcuaaaguuuua

SEQ ID NO: 12238 - RNA, 22 nt, Human
cugggcucuggucuguagguuu

SEQ ID NO: 12239 - RNA, 24 nt, Human
cuggggacggaaccgucagagcag

SEQ ID NO: 12240 - RNA, 24 nt, Human
cuggucccuggcacacucgugggc

SEQ ID NO: 12241 - RNA, 22 nt, Human
cuggugagagccugcugugugc

SEQ ID NO: 12242 - RNA, 24 nt, Human
cuggugcagcgagcccgggaguug

SEQ ID NO: 12243 - RNA, 24 nt, Human
cuggugccaauggucguggucagc

SEQ ID NO: 12244 - RNA, 24 nt, Human
cuguaccucugcaccccuggaaag

SEQ ID NO: 12245 - RNA, 22 nt, Human
cuguaucucagucugauccugg

SEQ ID NO: 12246 - RNA, 22 nt, Human
cugucaccaggcuacagugcag

SEQ ID NO: 12247 - RNA, 22 nt, Human
cuguccucuaaagcuacagaaa

SEQ ID NO: 12248 - RNA, 22 nt, Human
cuguccugugucagccugaaau

SEQ ID NO: 12249 - RNA, 24 nt, Human
cugugccccuggccgccagugggu

SEQ ID NO: 12250 - RNA, 22 nt, Human
cugugccugugacgagggauga

SEQ ID NO: 12251 - RNA, 22 nt, Human
cugugcgugugaacacgugugu

SEQ ID NO: 12252 - RNA, 24 nt, Human
cugugcuccaggucggccugggcc

SEQ ID NO: 12253 - RNA, 24 nt, Human
cugugcugccccuuucacaucaaa

SEQ ID NO: 12254 - RNA, 22 nt, Human
cuguucacuauuggcuggucug

SEQ ID NO: 12255 - RNA, 22 nt, Human
cuguuccugagagaaggcucau

SEQ ID NO: 12256 - RNA, 22 nt, Human
cuuauugugucuuugaauaagu

SEQ ID NO: 12257 - RNA, 24 nt, Human
cuucaaagcccaugcaguaguugu

SEQ ID NO: 12258 - RNA, 24 nt, Human
cuucaaguguagggacuccucgca

SEQ ID NO: 12259 - RNA, 24 nt, Human
cuucaccauuuuguuuucauuuug

SEQ ID NO: 12260 - RNA, 24 nt, Human
cuucaucggccucugcuggcugcu

SEQ ID NO: 12261 - RNA, 22 nt, Human
cuucauggugcuggaugggaga

SEQ ID NO: 12262 - RNA, 24 nt, Human
cuuccacaaggguugaacuaauuu

SEQ ID NO: 12263 - RNA, 24 nt, Human
cuuccaguccucggcugccacgcg

SEQ ID NO: 12264 - RNA, 24 nt, Human
cuuccaucucagacauccuuuucu

SEQ ID NO: 12265 - RNA, 22 nt, Human
cuuccauguccagaggaagcca

SEQ ID NO: 12266 - RNA, 22 nt, Human
cuuccccaugccucaguuugcu

SEQ ID NO: 12267 - RNA, 24 nt, Human
cuucccgccugcgucccggacccg

SEQ ID NO: 12268 - RNA, 24 nt, Human
cuuccgugauggucuacgaugaca

SEQ ID NO: 12269 - RNA, 24 nt, Human
cuuccuccacgucucaccccagcc

SEQ ID NO: 12270 - RNA, 24 nt, Human
cuuccugcuccagcugacagccgc

SEQ ID NO: 12271 - RNA, 22 nt, Human
cuuccuggguucauauccuggu

SEQ ID NO: 12272 - RNA, 24 nt, Human
cuuccuguauguggcugggcuugg

SEQ ID NO: 12273 - RNA, 24 nt, Human
cuuccugucuuuauggauucaagg

SEQ ID NO: 12274 - RNA, 22 nt, Human
cuucuacuucugguguuuuugg

SEQ ID NO: 12275 - RNA, 22 nt, Human
cuucuaugugaaaagagaaggu

SEQ ID NO: 12276 - RNA, 22 nt, Human
cuucucacaccaucagaaaauu

SEQ ID NO: 12277 - RNA, 22 nt, Human
cuucucucguuguugaacagag

SEQ ID NO: 12278 - RNA, 22 nt, Human
cuugaaauacaaauauugggaa

SEQ ID NO: 12279 - RNA, 24 nt, Human
cuugaaccugggaguuugagguug

SEQ ID NO: 12280 - RNA, 23 nt, Human
cuugaagauuucuaugcaggacc

SEQ ID NO: 12281 - RNA, 22 nt, Human
cuugaauccacaaucuuuucuc

SEQ ID NO: 12282 - RNA, 24 nt, Human
cuugacagcugugggcuggcugcc

SEQ ID NO: 12283 - RNA, 24 nt, Human
cuugaccccagaccuggggguguu

SEQ ID NO: 12284 - RNA, 22 nt, Human
cuugagauuagggaguggugau

SEQ ID NO: 12285 - RNA, 22 nt, Human
cuugcaaaagaaaagugacgug

SEQ ID NO: 12286 - RNA, 24 nt, Human
cuugcaacaauuguuaugcuuuug

SEQ ID NO: 12287 - RNA, 21 nt, Human
cuugcacccgggucuggcccg

SEQ ID NO: 12288 - RNA, 22 nt, Human
cuugcagaaccuuucuuagacu

SEQ ID NO: 12289 - RNA, 19 nt, Human
cuugcaggaagcaggacag

SEQ ID NO: 12290 - RNA, 24 nt, Human
cuugcggaccuuccucgagcgcca

SEQ ID NO: 12291 - RNA, 20 nt, Human
cuugcucuuaacuuuucugu

SEQ ID NO: 12292 - RNA, 22 nt, Human
cuugcugguuccuugcuucuag

SEQ ID NO: 12293 - RNA, 22 nt, Human
cuugcuuacaaggagggguuac

SEQ ID NO: 12294 - RNA, 22 nt, Human
cuuggaaugguaucccaugguu

SEQ ID NO: 12295 - RNA, 22 nt, Human
cuuggagucacugcuacucagc

SEQ ID NO: 12296 - RNA, 24 nt, Human
cuuggauuuucuggaaagauuuca

SEQ ID NO: 12297 - RNA, 22 nt, Human
cuuggcaaggaugagaauaccu

SEQ ID NO: 12298 - RNA, 21 nt, Human
cuuggcaugggagacauugcc

SEQ ID NO: 12299 - RNA, 20 nt, Human
cuuggcccaguaccuaugca

SEQ ID NO: 12300 - RNA, 24 nt, Human
cuuggcccaguaccuaugcaacga

SEQ ID NO: 12301 - RNA, 22 nt, Human
cuuggcccugugaggcuucacc

SEQ ID NO: 12302 - RNA, 24 nt, Human
cuuggcccuuggggccuccacagu

SEQ ID NO: 12303 - RNA, 22 nt, Human
cuuggcgagugcuggggcuagu

SEQ ID NO: 12304 - RNA, 24 nt, Human
cuuggcuuccaaggauggaaaguc

SEQ ID NO: 12305 - RNA, 22 nt, Human
cuugggaagaccaagaggaagu

SEQ ID NO: 12306 - RNA, 24 nt, Human
cuuguaaaaaucaaugaauggcaa

SEQ ID NO: 12307 - RNA, 24 nt, Human
cuuguccggacacgaugaucuggg

SEQ ID NO: 12308 - RNA, 22 nt, Human
cuuuaugaggagaggaagagca

SEQ ID NO: 12309 - RNA, 24 nt, Human
cuuuaugguggugcuggaguuggc

SEQ ID NO: 12310 - RNA, 24 nt, Human
cuuucagccuuucacggaucagcu

SEQ ID NO: 12311 - RNA, 22 nt, Human
cuuuccuucccuggaagagauu

SEQ ID NO: 12312 - RNA, 24 nt, Human
cuuucgggguccgcugcugcugcu

SEQ ID NO: 12313 - RNA, 24 nt, Human
cuuucuguucauccguacuuucaa

SEQ ID NO: 12314 - RNA, 24 nt, Human
cuuucuugauggcggggcaggugg

SEQ ID NO: 12315 - RNA, 21 nt, Human
cuuugaggaguucucagcgcc

SEQ ID NO: 12316 - RNA, 24 nt, Human
cuuugagggggcugaugcggagga

SEQ ID NO: 12317 - RNA, 24 nt, Human
cuuugcuucuguuuucuggaugca

SEQ ID NO: 12318 - RNA, 21 nt, Human
cuuuggcaagggagaagucac

SEQ ID NO: 12319 - RNA, 22 nt, Human
cuuuggccaaauugggguacca

SEQ ID NO: 12320 - RNA, 24 nt, Human
cuuugggaagaaaagagguuguug

SEQ ID NO: 12321 - RNA, 24 nt, Human
cuuugguaguuccuggaaaucauc

SEQ ID NO: 12322 - RNA, 22 nt, Human
cuuugguuggguggguauuugg

SEQ ID NO: 12323 - RNA, 22 nt, Human
cuuugugauguaucugcagcca

SEQ ID NO: 12324 - RNA, 24 nt, Human
cuuuucaacaguuucacauccagc

SEQ ID NO: 12325 - RNA, 22 nt, Human
cuuuucagauguggcuggucau

SEQ ID NO: 12326 - RNA, 24 nt, Human
cuuuucccuuccugugagccccuu

SEQ ID NO: 12327 - RNA, 22 nt, Human
cuuuuccugggucugggcugug

SEQ ID NO: 12328 - RNA, 22 nt, Human
cuuuucuucuuucuuaacuuua

SEQ ID NO: 12329 - RNA, 24 nt, Human
cuuuugggcaucauauaccccaug

SEQ ID NO: 12330 - RNA, 22 nt, Human
cuuuuugggguuuggggcuugg

SEQ ID NO: 12331 - RNA, 22 nt, Human
gaaaaauggagugucauuugca

SEQ ID NO: 12332 - RNA, 22 nt, Human
gaaacuaguguugggacaaagg

SEQ ID NO: 12333 - RNA, 24 nt, Human
gaaacuuucacaauguccggagcc

SEQ ID NO: 12334 - RNA, 24 nt, Human
gaaagcuaucagauaauucgcagu

SEQ ID NO: 12335 - RNA, 24 nt, Human
gaaagcucugccugcaauauuuuu

SEQ ID NO: 12336 - RNA, 24 nt, Human
gaaaggacgggguuucuaguugcu

SEQ ID NO: 12337 - RNA, 22 nt, Human
gaaaugagagaccuguacugua

SEQ ID NO: 12338 - RNA, 22 nt, Human
gaaccuucaacugcuuagccug

SEQ ID NO: 12339 - RNA, 24 nt, Human
gaacugccuucgugccgccucaau

SEQ ID NO: 12340 - RNA, 22 nt, Human
gaagacuguuaaaguguggucu

SEQ ID NO: 12341 - RNA, 22 nt, Human
gaagagcugugugcugugaugu

SEQ ID NO: 12342 - RNA, 24 nt, Human
gaagauagcgaaauacauugggga

SEQ ID NO: 12343 - RNA, 24 nt, Human
gaagcagccucauggucucaugcu

SEQ ID NO: 12344 - RNA, 24 nt, Human
gaaggcacaacaguuaauggcugu

SEQ ID NO: 12345 - RNA, 22 nt, Human
gaaggcaguagguuguauaguu

SEQ ID NO: 12346 - RNA, 24 nt, Human
gaagggaaaugucugagguagagc

SEQ ID NO: 12347 - RNA, 24 nt, Human
gaaggugcugacuuccuugggaga

SEQ ID NO: 12348 - RNA, 24 nt, Human
gaagucacacucagaauuuaauuu

SEQ ID NO: 12349 - RNA, 24 nt, Human
gaagugaaguuuaucaagaacgau

SEQ ID NO: 12350 - RNA, 24 nt, Human
gaaguugucuguacuucuucccua

SEQ ID NO: 12351 - RNA, 22 nt, Human
gaaguuugaagccuguuguuca

SEQ ID NO: 12352 - RNA, 24 nt, Human
gaauguuccccccauuggaaacug

SEQ ID NO: 12353 - RNA, 22 nt, Human
gacaagaggcacagacagcagg

SEQ ID NO: 12354 - RNA, 21 nt, Human
gacacaggcccagagaggcag

SEQ ID NO: 12355 - RNA, 24 nt, Human
gacaccacuccucucugcagcacu

SEQ ID NO: 12356 - RNA, 24 nt, Human
gacacgauggagaagguaugugca

SEQ ID NO: 12357 - RNA, 23 nt, Human
gacacugugcuuacagggaacgg

SEQ ID NO: 12358 - RNA, 24 nt, Human
gacagcagcaggaugaagcuggau

SEQ ID NO: 12359 - RNA, 22 nt, Human
gacauugguuuaccuugccagg

SEQ ID NO: 12360 - RNA, 19 nt, Human
gaccaagaugucuauuacu

SEQ ID NO: 12361 - RNA, 24 nt, Human
gaccagcaccauggcgguuggcaa

SEQ ID NO: 12362 - RNA, 24 nt, Human
gaccaggagaccuaccgcugugaa

SEQ ID NO: 12363 - RNA, 24 nt, Human
gaccagugaagcuggagccagggu

SEQ ID NO: 12364 - RNA, 24 nt, Human
gacccagcccuacucauugcgaug

SEQ ID NO: 12365 - RNA, 21 nt, Human
gaccccauacauuugugguca

SEQ ID NO: 12366 - RNA, 24 nt, Human
gacccggcaacccgcggcccuugg

SEQ ID NO: 12367 - RNA, 22 nt, Human
gacccuggugagcuggguggcc

SEQ ID NO: 12368 - RNA, 24 nt, Human
gaccgcuggaucgugccgggcggg

SEQ ID NO: 12369 - RNA, 23 nt, Human
gaccgggacccggcggcccugcu

SEQ ID NO: 12370 - RNA, 24 nt, Human
gaccucacugacccagacguuccg

SEQ ID NO: 12371 - RNA, 18 nt, Human
gaccucagguuaucugcc

SEQ ID NO: 12372 - RNA, 24 nt, Human
gaccuggauccugcacaguugggg

SEQ ID NO: 12373 - RNA, 24 nt, Human
gaccuugugauccaccugccucag

SEQ ID NO: 12374 - RNA, 24 nt, Human
gaccuuuuaaauggcucaucugug

SEQ ID NO: 12375 - RNA, 22 nt, Human
gacuaacagacacaggcuuaca

SEQ ID NO: 12376 - RNA, 24 nt, Human
gacuccuuaggaggagugagacag

SEQ ID NO: 12377 - RNA, 24 nt, Human
gacucuguuuccccauuucuugcu

SEQ ID NO: 12378 - RNA, 22 nt, Human
gacugaaccuaagauucagaug

SEQ ID NO: 12379 - RNA, 22 nt, Human
gacuggagagaaaggcagucca

SEQ ID NO: 12380 - RNA, 22 nt, Human
gacuucaagaugaaucuuuggg

SEQ ID NO: 12381 - RNA, 24 nt, Human
gacuuuuuccauucccucacgguu

SEQ ID NO: 12382 - RNA, 22 nt, Human
gagaaacagaaucuccuuuguu

SEQ ID NO: 12383 - RNA, 24 nt, Human
gagaaguaggugagggcaugcaaa

SEQ ID NO: 12384 - RNA, 24 nt, Human
gagaggccguguagcgucgccguu

SEQ ID NO: 12385 - RNA, 24 nt, Human
gagaucuugggcaaaucacuuagu

SEQ ID NO: 12386 - RNA, 24 nt, Human
gagcacaugugccgccuggacauu

SEQ ID NO: 12387 - RNA, 24 nt, Human
gagcacccccuccaggcaugaugg

SEQ ID NO: 12388 - RNA, 24 nt, Human
gagcaccgaggagcugcgggugcg

SEQ ID NO: 12389 - RNA, 24 nt, Human
gagcaccugucuucauugccucuc

SEQ ID NO: 12390 - RNA, 24 nt, Human
gagcagaagacagagcuggugugc

SEQ ID NO: 12391 - RNA, 24 nt, Human
gagcagcaagacugaaacuguuga

SEQ ID NO: 12392 - RNA, 23 nt, Human
gagcagcagaacaagguccugga

SEQ ID NO: 12393 - RNA, 24 nt, Human
gagcaggaagaugugccacuuccu

SEQ ID NO: 12394 - RNA, 24 nt, Human
gagcagguccaccggccccuacau

SEQ ID NO: 12395 - RNA, 24 nt, Human
gagcagucggguccggcguccucc

SEQ ID NO: 12396 - RNA, 24 nt, Human
gagcagugcgucaugguugugcga

SEQ ID NO: 12397 - RNA, 24 nt, Human
gagcaguggugcgcucucggcacu

SEQ ID NO: 12398 - RNA, 24 nt, Human
gagcaucaaaguccacguucaugu

SEQ ID NO: 12399 - RNA, 24 nt, Human
gagcaugguuauggugauucgugc

SEQ ID NO: 12400 - RNA, 24 nt, Human
gagcauuagacccaagaccauugu

SEQ ID NO: 12401 - RNA, 23 nt, Human
gagcauuggcagugaauugcaga

SEQ ID NO: 12402 - RNA, 24 nt, Human
gagcauuuguauguuauggugaau

SEQ ID NO: 12403 - RNA, 24 nt, Human
gagccagcccugcccuuggaacca

SEQ ID NO: 12404 - RNA, 22 nt, Human
gagccagucuacuagaaggggg

SEQ ID NO: 12405 - RNA, 24 nt, Human
gagccugucuguccucccucagag

SEQ ID NO: 12406 - RNA, 24 nt, Human
gagccuuaaugggggcagaaaggg

SEQ ID NO: 12407 - RNA, 21 nt, Human
gagccuuugagccagugcugc

SEQ ID NO: 12408 - RNA, 24 nt, Human
gagcgggcccugcuggcugcggcu

SEQ ID NO: 12409 - RNA, 24 nt, Human
gagcgggcuuauaaacccucugug

SEQ ID NO: 12410 - RNA, 24 nt, Human
gagcgguccuuggggagacgcggg

SEQ ID NO: 12411 - RNA, 24 nt, Human
gagcgguucauuuauuuggaaacu

SEQ ID NO: 12412 - RNA, 24 nt, Human
gagcgucaaggcccugugcugcug

SEQ ID NO: 12413 - RNA, 24 nt, Human
gagcucgcuugggucccuuugaca

SEQ ID NO: 12414 - RNA, 24 nt, Human
gagcugagcgaagcgaugccuaaa

SEQ ID NO: 12415 - RNA, 24 nt, Human
gagcugccaaagccauccugccac

SEQ ID NO: 12416 - RNA, 24 nt, Human
gagcugcuggaggcuggcuacuug

SEQ ID NO: 12417 - RNA, 24 nt, Human
gagcuuuaugcugaaaagguggcc

SEQ ID NO: 12418 - RNA, 24 nt, Human
gagcuuuucuuuaacgauaucaac

SEQ ID NO: 12419 - RNA, 22 nt, Human
gaggacccuuaggucagacaga

SEQ ID NO: 12420 - RNA, 24 nt, Human
gaggacguccuggaugauuggacg

SEQ ID NO: 12421 - RNA, 24 nt, Human
gaggagaggcggcccaacucuucu

SEQ ID NO: 12422 - RNA, 24 nt, Human
gaggauccauuuuaugguugaugc

SEQ ID NO: 12423 - RNA, 24 nt, Human
gaggaugccgcacagagauugacu

SEQ ID NO: 12424 - RNA, 22 nt, Human
gaggcagagguugcagugauca

SEQ ID NO: 12425 - RNA, 23 nt, Human
gaggcccaguucuguccgggccc

SEQ ID NO: 12426 - RNA, 24 nt, Human
gaggcugguguugugaagauccug

SEQ ID NO: 12427 - RNA, 21 nt, Human
gagggcccuauggacacccca

SEQ ID NO: 12428 - RNA, 24 nt, Human
gaggggccgauacccagucgcacu

SEQ ID NO: 12429 - RNA, 24 nt, Human
gaggggccuuuguccaauucagca

SEQ ID NO: 12430 - RNA, 22 nt, Human
gaggguaaauucagaguaggag

SEQ ID NO: 12431 - RNA, 22 nt, Human
gagguagagguugcagugaguc

SEQ ID NO: 12432 - RNA, 22 nt, Human
gaggucaccugacucugcuugu

SEQ ID NO: 12433 - RNA, 22 nt, Human
gaggugaaagcauaacaugggu

SEQ ID NO: 12434 - RNA, 22 nt, Human
gagguuucauuauguugcccag

SEQ ID NO: 12435 - RNA, 24 nt, Human
gaguaugcggcucgggcccgucug

SEQ ID NO: 12436 - RNA, 22 nt, Human
gaguccuccuucuuccggucuu

SEQ ID NO: 12437 - RNA, 22 nt, Human
gaguugggagcaauggauucaa

SEQ ID NO: 12438 - RNA, 22 nt, Human
gauaaaggugcugauguuaaug

SEQ ID NO: 12439 - RNA, 21 nt, Human
gauaauaguaauuguggcagc

SEQ ID NO: 12440 - RNA, 24 nt, Human
gauacagcccugguaugaggccuu

SEQ ID NO: 12441 - RNA, 24 nt, Human
gauaccacagaaaugguucagucu

SEQ ID NO: 12442 - RNA, 24 nt, Human
gaucacucugcucugauuauggaa

SEQ ID NO: 12443 - RNA, 24 nt, Human
gaucauacuccacugugguccuga

SEQ ID NO: 12444 - RNA, 22 nt, Human
gaucuguccuggcaguuaacac

SEQ ID NO: 12445 - RNA, 21 nt, Human
gaugacagcaggcaaaaucac

SEQ ID NO: 12446 - RNA, 24 nt, Human
gaugaccaagcgggaggauggggg

SEQ ID NO: 12447 - RNA, 24 nt, Human
gaugcaaaauguuugcaguuugac

SEQ ID NO: 12448 - RNA, 23 nt, Human
gaugcaggugugacugguucuga

SEQ ID NO: 12449 - RNA, 22 nt, Human
gaugcggccaaggcaucaguau

SEQ ID NO: 12450 - RNA, 19 nt, Human
gaugcuguugugccagaag

SEQ ID NO: 12451 - RNA, 24 nt, Human
gauggagcgagucagaaccagcau

SEQ ID NO: 12452 - RNA, 22 nt, Human
gauggcaccuugaacgcugcgu

SEQ ID NO: 12453 - RNA, 24 nt, Human
gauggcccaccgaugggcgggugg

SEQ ID NO: 12454 - RNA, 24 nt, Human
gauggguuucaccauguuggucag

SEQ ID NO: 12455 - RNA, 24 nt, Human
gaugugcgcuugugugggucauga

SEQ ID NO: 12456 - RNA, 22 nt, Human
gauuacacaggcuauuguagcc

SEQ ID NO: 12457 - RNA, 24 nt, Human
gauuacacuguuaccgagaucccu

SEQ ID NO: 12458 - RNA, 22 nt, Human
gauuccuccucuuuaaaauggu

SEQ ID NO: 12459 - RNA, 22 nt, Human
gauucugagaaacacaccagga

SEQ ID NO: 12460 - RNA, 24 nt, Human
gauugggcuccagcuaucgagccu

SEQ ID NO: 12461 - RNA, 24 nt, Human
gauuguuucucuucacccccaaca

SEQ ID NO: 12462 - RNA, 24 nt, Human
gauuucaccuuaaugguagaagua

SEQ ID NO: 12463 - RNA, 22 nt, Human
gauuugagcaacaagaugccgu

SEQ ID NO: 12464 - RNA, 22 nt, Human
gauuuucauaggagcagaaacc

SEQ ID NO: 12465 - RNA, 24 nt, Human
gcaaucccgcgcgguuugucaugg

SEQ ID NO: 12466 - RNA, 20 nt, Human
gcacaaacuggagaaagggg

SEQ ID NO: 12467 - RNA, 22 nt, Human
gcacagagacaguccugagauc

SEQ ID NO: 12468 - RNA, 24 nt, Human
gcacuaguagucaguagggagugg

SEQ ID NO: 12469 - RNA, 22 nt, Human
gcacucaagccuggguuacaga

SEQ ID NO: 12470 - RNA, 24 nt, Human
gcagaagugccgccaaagcugugg

SEQ ID NO: 12471 - RNA, 24 nt, Human
gcagcaaaucauaggcaagcggcc

SEQ ID NO: 12472 - RNA, 22 nt, Human
gcagcaggcagggccaggcagg

SEQ ID NO: 12473 - RNA, 22 nt, Human
gcagcuguuuauuuagaaccug

SEQ ID NO: 12474 - RNA, 22 nt, Human
gcaggcaauuuuggaaggucag

SEQ ID NO: 12475 - RNA, 24 nt, Human
gcaggccagcagggaacaagagga

SEQ ID NO: 12476 - RNA, 22 nt, Human
gcaggccgauuuguuagaaguc

SEQ ID NO: 12477 - RNA, 22 nt, Human
gcaggcugguuggugaggcaaa

SEQ ID NO: 12478 - RNA, 24 nt, Human
gcaggucgaugauguugagcagcu

SEQ ID NO: 12479 - RNA, 24 nt, Human
gcaguagguggcuacuugaugugg

SEQ ID NO: 12480 - RNA, 22 nt, Human
gcauccaugggguccugggagu

SEQ ID NO: 12481 - RNA, 22 nt, Human
gcaucucugcuggagcuguuca

SEQ ID NO: 12482 - RNA, 22 nt, Human
gccaaaagucugagaagugauu

SEQ ID NO: 12483 - RNA, 24 nt, Human
gccaauggugccaccagauguuuu

SEQ ID NO: 12484 - RNA, 21 nt, Human
gccacagcguagggcuggggu

SEQ ID NO: 12485 - RNA, 24 nt, Human
gccaccgucggugcuuuggugcuc

SEQ ID NO: 12486 - RNA, 24 nt, Human
gccacuguacucuagccugggcaa

SEQ ID NO: 12487 - RNA, 24 nt, Human
gccacuguuucaugggcccgaguu

SEQ ID NO: 12488 - RNA, 22 nt, Human
gccaggaugaagaggaggagaa

SEQ ID NO: 12489 - RNA, 24 nt, Human
gccagggugguggcuaacgccugu

SEQ ID NO: 12490 - RNA, 22 nt, Human
gccaugaagaaaccuccuuuuu

SEQ ID NO: 12491 - RNA, 22 nt, Human
gccaugaaucacccaggccauc

SEQ ID NO: 12492 - RNA, 24 nt, Human
gcccagcaucuucaaagacaugcu

SEQ ID NO: 12493 - RNA, 24 nt, Human
gcccagcuggcuaaaguucaagaa

SEQ ID NO: 12494 - RNA, 24 nt, Human
gcccaggacguguggaugcugcug

SEQ ID NO: 12495 - RNA, 22 nt, Human
gcccaggagucugaggcuggag

SEQ ID NO: 12496 - RNA, 24 nt, Human
gcccagugcugaguugucuucgag

SEQ ID NO: 12497 - RNA, 24 nt, Human
gccccagccaccuucacaugagga

SEQ ID NO: 12498 - RNA, 24 nt, Human
gccccagcuccagugccuacugca

SEQ ID NO: 12499 - RNA, 22 nt, Human
gcccccugaggugugagugaaa

SEQ ID NO: 12500 - RNA, 24 nt, Human
gccccgauaugaguagggggagcg

SEQ ID NO: 12501 - RNA, 24 nt, Human
gccccuaggcaccugcggccuggc

SEQ ID NO: 12502 - RNA, 22 nt, Human
gccccuuugcaggggagcgccc

SEQ ID NO: 12503 - RNA, 24 nt, Human
gcccgagugcacgugucugaggag

SEQ ID NO: 12504 - RNA, 24 nt, Human
gcccggggguacccagaggcggga

SEQ ID NO: 12505 - RNA, 24 nt, Human
gcccugacccuacaagaugccaag

SEQ ID NO: 12506 - RNA, 22 nt, Human
gcccugaugcuucugcauuucu

SEQ ID NO: 12507 - RNA, 24 nt, Human
gcccugggauucgagcaggagaug

SEQ ID NO: 12508 - RNA, 24 nt, Human
gcccuuaggggagucacggcugga

SEQ ID NO: 12509 - RNA, 24 nt, Human
gcccuuaggggaguccagggccag

SEQ ID NO: 12510 - RNA, 24 nt, Human
gcccuuuucccagugauaugagca

SEQ ID NO: 12511 - RNA, 22 nt, Human
gccgcgcuguugccgcggcuug

SEQ ID NO: 12512 - RNA, 24 nt, Human
gccgcugugcugaaggaggugugc

SEQ ID NO: 12513 - RNA, 22 nt, Human
gccuaggggcagcuuugacucg

SEQ ID NO: 12514 - RNA, 22 nt, Human
gccuggaugugaccacccucac

SEQ ID NO: 12515 - RNA, 24 nt, Human
gccugugucuggccaggcugaggu

SEQ ID NO: 12516 - RNA, 22 nt, Human
gccuuuccuccagaacugcucc

SEQ ID NO: 12517 - RNA, 24 nt, Human
gcgaaccacagacuaggcuauuua

SEQ ID NO: 12518 - RNA, 24 nt, Human
gcgcaaagacacucucugcucuag

SEQ ID NO: 12519 - RNA, 22 nt, Human
gcgcaacaguugucauuuuucu

SEQ ID NO: 12520 - RNA, 24 nt, Human
gcgcacugauuccgggccccagag

SEQ ID NO: 12521 - RNA, 24 nt, Human
gcgcagguacgucgucuguagcag

SEQ ID NO: 12522 - RNA, 24 nt, Human
gcgcaucguggggaugacugagca

SEQ ID NO: 12523 - RNA, 24 nt, Human
gcgccgggggcaugcucaccuacg

SEQ ID NO: 12524 - RNA, 24 nt, Human
gcgccuggagcucgacgcgcugcg

SEQ ID NO: 12525 - RNA, 24 nt, Human
gcgcugcggcucccgcuggcucgg

SEQ ID NO: 12526 - RNA, 24 nt, Human
gcgcuuuuugcggggggcgaaaag

SEQ ID NO: 12527 - RNA, 24 nt, Human
gcggagcuugcagugagccgagau

SEQ ID NO: 12528 - RNA, 22 nt, Human
gcggggcccagcaaucuguguu

SEQ ID NO: 12529 - RNA, 22 nt, Human
gcguagguguagauuggaccuc

SEQ ID NO: 12530 - RNA, 22 nt, Human
gcguccaaucaggagggagcuc

SEQ ID NO: 12531 - RNA, 24 nt, Human
gcuacagcuucaccaccacggccg

SEQ ID NO: 12532 - RNA, 24 nt, Human
gcucaaggugcagcgccucugcuc

SEQ ID NO: 12533 - RNA, 24 nt, Human
gcuccaccagaugcagauuugugu

SEQ ID NO: 12534 - RNA, 24 nt, Human
gcuccggggaaacgcgagccgcga

SEQ ID NO: 12535 - RNA, 24 nt, Human
gcucgugggacuguacguggaccc

SEQ ID NO: 12536 - RNA, 24 nt, Human
gcucucuuuuucuaauguaaaugu

SEQ ID NO: 12537 - RNA, 24 nt, Human
gcucugcucucuccucccucucau

SEQ ID NO: 12538 - RNA, 22 nt, Human
gcucugcucugauaauucugug

SEQ ID NO: 12539 - RNA, 22 nt, Human
gcugaauuuugacuccaucucc

SEQ ID NO: 12540 - RNA, 22 nt, Human
gcugagaccacccuugccugcc

SEQ ID NO: 12541 - RNA, 24 nt, Human
gcugcagagccugggcugggaagc

SEQ ID NO: 12542 - RNA, 24 nt, Human
gcugccaucuaguuggacgcggau

SEQ ID NO: 12543 - RNA, 22 nt, Human
gcugcgcagaucugcuguucuc

SEQ ID NO: 12544 - RNA, 22 nt, Human
gcugcuccugcucucccucucc

SEQ ID NO: 12545 - RNA, 22 nt, Human
gcugcugccucaacauuuuagg

SEQ ID NO: 12546 - RNA, 24 nt, Human
gcuggcugcccgugcugcggcacu

SEQ ID NO: 12547 - RNA, 22 nt, Human
gcuggggagaggaguuccuccc

SEQ ID NO: 12548 - RNA, 24 nt, Human
gcuguggggggcuuuaauauucug

SEQ ID NO: 12549 - RNA, 24 nt, Human
gcuguggugucuggguguggccug

SEQ ID NO: 12550 - RNA, 22 nt, Human
gcugugguucugcaugaagaca

SEQ ID NO: 12551 - RNA, 22 nt, Human
gcuguguuaacuguucaaacuc

SEQ ID NO: 12552 - RNA, 22 nt, Human
gcuuauagaagacgucaucacc

SEQ ID NO: 12553 - RNA, 24 nt, Human
gcuucagauugacauaccugaugc

SEQ ID NO: 12554 - RNA, 24 nt, Human
gcuucagugacauugagaaccuug

SEQ ID NO: 12555 - RNA, 22 nt, Human
gcuuccugaccgauagagguug

SEQ ID NO: 12556 - RNA, 22 nt, Human
gcuuccuguauuggcugcaagu

SEQ ID NO: 12557 - RNA, 24 nt, Human
gcuuccuuaucccaccccagagac

SEQ ID NO: 12558 - RNA, 24 nt, Human
gcuugaguggaggaaggcagaaua

SEQ ID NO: 12559 - RNA, 22 nt, Human
gcuugauggaaaaaggaugcag

SEQ ID NO: 12560 - RNA, 21 nt, Human
gcuuugguauucuagcuguga

SEQ ID NO: 12561 - RNA, 24 nt, Human
gcuuuugucagauggagugccggu

SEQ ID NO: 12562 - RNA, 22 nt, Human
ggaaaacaaguaccccuggaac

SEQ ID NO: 12563 - RNA, 22 nt, Human
ggaaaguuaaagauguauguau

SEQ ID NO: 12564 - RNA, 22 nt, Human
ggaacccuagacuugcgcagaa

SEQ ID NO: 12565 - RNA, 24 nt, Human
ggaaggacgggcguggucugcagg

SEQ ID NO: 12566 - RNA, 22 nt, Human
ggaauucuggucuaggacaaga

SEQ ID NO: 12567 - RNA, 22 nt, Human
ggacagaacuggcucaaugacc

SEQ ID NO: 12568 - RNA, 22 nt, Human
ggacaucaggauuccucuggga

SEQ ID NO: 12569 - RNA, 22 nt, Human
ggacauggccugucaggugcag

SEQ ID NO: 12570 - RNA, 24 nt, Human
ggacaugggccugguggucgucuu

SEQ ID NO: 12571 - RNA, 24 nt, Human
ggaccgggggcugggcuggccgca

SEQ ID NO: 12572 - RNA, 22 nt, Human
ggacugcagucacacucuaaga

SEQ ID NO: 12573 - RNA, 24 nt, Human
ggacuuggaaggcuggugugacgu

SEQ ID NO: 12574 - RNA, 22 nt, Human
ggagaaguagaucggugagcag

SEQ ID NO: 12575 - RNA, 24 nt, Human
ggagacaguaaaggugaugggggc

SEQ ID NO: 12576 - RNA, 24 nt, Human
ggagacugauuaaguaacuucggc

SEQ ID NO: 12577 - RNA, 22 nt, Human
ggagacugcugguaaagauggg

SEQ ID NO: 12578 - RNA, 24 nt, Human
ggagagcggguggggagcuucugu

SEQ ID NO: 12579 - RNA, 24 nt, Human
ggagauaccugacagaugagagcc

SEQ ID NO: 12580 - RNA, 22 nt, Human
ggagauagacugauugggaacu

SEQ ID NO: 12581 - RNA, 21 nt, Human
ggagauggccauggcgaccgu

SEQ ID NO: 12582 - RNA, 24 nt, Human
ggagauguguauucuuuggccuuc

SEQ ID NO: 12583 - RNA, 24 nt, Human
ggagcagauggccaucaguggcgg

SEQ ID NO: 12584 - RNA, 24 nt, Human
ggaggaaacauuaaaggugauggg

SEQ ID NO: 12585 - RNA, 24 nt, Human
ggaggagagacuccuaggauggcu

SEQ ID NO: 12586 - RNA, 24 nt, Human
ggaggagauaaaauaauucauucu

SEQ ID NO: 12587 - RNA, 22 nt, Human
ggagguagagcccacuaagccu

SEQ ID NO: 12588 - RNA, 24 nt, Human
ggagguuugcagugagccgagagc

SEQ ID NO: 12589 - RNA, 24 nt, Human
ggaguaaauuccccccucucauuu

SEQ ID NO: 12590 - RNA, 24 nt, Human
ggagucuuaugaacuacagucaaa

SEQ ID NO: 12591 - RNA, 24 nt, Human
ggagugguaaaaccagccaaugga

SEQ ID NO: 12592 - RNA, 22 nt, Human
ggaguguaaagaaggauguuac

SEQ ID NO: 12593 - RNA, 22 nt, Human
ggaucugggcugcagucuaggc

SEQ ID NO: 12594 - RNA, 22 nt, Human
ggaugcugcuccacaucccaca

SEQ ID NO: 12595 - RNA, 22 nt, Human
ggauuuuucggaagcuauggau

SEQ ID NO: 12596 - RNA, 22 nt, Human
ggcaaggaagaaagcagaaguu

SEQ ID NO: 12597 - RNA, 23 nt, Human
ggcacgguuaugaaauauuuugu

SEQ ID NO: 12598 - RNA, 22 nt, Human
ggcacuguagguucaaugguaa

SEQ ID NO: 12599 - RNA, 22 nt, Human
ggcagaggacacgucucagggc

SEQ ID NO: 12600 - RNA, 22 nt, Human
ggcagcacauaauguaucauga

SEQ ID NO: 12601 - RNA, 21 nt, Human
ggcagcagaaggaugagggcc

SEQ ID NO: 12602 - RNA, 22 nt, Human
ggcagcuuuguaaauggacucu

SEQ ID NO: 12603 - RNA, 22 nt, Human
ggcaucgaugaggcucauggca

SEQ ID NO: 12604 - RNA, 22 nt, Human
ggcaugauucagcagaggagag

SEQ ID NO: 12605 - RNA, 22 nt, Human
ggcauuagauuagcauuggagc

SEQ ID NO: 12606 - RNA, 22 nt, Human
ggcauuugucucaggugcaaaa

SEQ ID NO: 12607 - RNA, 22 nt, Human
ggccacauuccagagggcugaa

SEQ ID NO: 12608 - RNA, 22 nt, Human
ggccacuuccaccuuccagggc

SEQ ID NO: 12609 - RNA, 22 nt, Human
ggccaggacucuugcagaacug

SEQ ID NO: 12610 - RNA, 20 nt, Human
ggccauggaagcuggcugcc

SEQ ID NO: 12611 - RNA, 24 nt, Human
ggcccaguguuggagagcugaagg

SEQ ID NO: 12612 - RNA, 22 nt, Human
ggccccuuugugaggcacgcuu

SEQ ID NO: 12613 - RNA, 24 nt, Human
ggcccugggugcugcuggcuuuau

SEQ ID NO: 12614 - RNA, 24 nt, Human
ggccgcuacgcgcugcuucccccg

SEQ ID NO: 12615 - RNA, 24 nt, Human
ggccgcuaggacugaagcaccucg

SEQ ID NO: 12616 - RNA, 24 nt, Human
ggccggggcgggagagacucagca

SEQ ID NO: 12617 - RNA, 22 nt, Human
ggccucagaagcugaggggaga

SEQ ID NO: 12618 - RNA, 24 nt, Human
ggccucgagcaagccuggccuauc

SEQ ID NO: 12619 - RNA, 24 nt, Human
ggccuggaggagggggucgcgcga

SEQ ID NO: 12620 - RNA, 22 nt, Human
ggccuuuucucauggcaugacc

SEQ ID NO: 12621 - RNA, 24 nt, Human
ggcgaagcugggccaugcuguuug

SEQ ID NO: 12622 - RNA, 24 nt, Human
ggcgguuagggcuguguagggcga

SEQ ID NO: 12623 - RNA, 22 nt, Human
ggcgugaucuuggcucaccaca

SEQ ID NO: 12624 - RNA, 22 nt, Human
ggcugggcaugguggcucacgc

SEQ ID NO: 12625 - RNA, 22 nt, Human
ggcuggggauuguggcuguaga

SEQ ID NO: 12626 - RNA, 22 nt, Human
ggcuugauuugcuuggugaccg

SEQ ID NO: 12627 - RNA, 22 nt, Human
ggcuuggcacguauaggaucca

SEQ ID NO: 12628 - RNA, 22 nt, Human
ggcuuuuguuauaaucaggccu

SEQ ID NO: 12629 - RNA, 22 nt, Human
gggaaaggaggaucgaugcaca

SEQ ID NO: 12630 - RNA, 24 nt, Human
gggaaaguguucggcagggcagaa

SEQ ID NO: 12631 - RNA, 22 nt, Human
gggaaaucgugcgcgacaucaa

SEQ ID NO: 12632 - RNA, 22 nt, Human
gggaaaucugcuuccuagggcu

SEQ ID NO: 12633 - RNA, 24 nt, Human
gggaacccuaggucagaccuuggu

SEQ ID NO: 12634 - RNA, 24 nt, Human
gggaagaugccaaggcugggcuau

SEQ ID NO: 12635 - RNA, 24 nt, Human
gggaagcccgucucuucgaccucc

SEQ ID NO: 12636 - RNA, 24 nt, Human
gggaagcuuuguuaaauuuuuguu

SEQ ID NO: 12637 - RNA, 24 nt, Human
gggaagucaugcugagggugguag

SEQ ID NO: 12638 - RNA, 24 nt, Human
gggaauaaauauauuaagugccuc

SEQ ID NO: 12639 - RNA, 24 nt, Human
gggaaucagucuaaagcugugcuc

SEQ ID NO: 12640 - RNA, 24 nt, Human
gggaauguucuggagcugccaagg

SEQ ID NO: 12641 - RNA, 22 nt, Human
gggacugagaugcaggauuucu

SEQ ID NO: 12642 - RNA, 24 nt, Human
gggagugugggcgcggcugggguc

SEQ ID NO: 12643 - RNA, 24 nt, Human
gggcaaguuggugagguucugcaa

SEQ ID NO: 12644 - RNA, 24 nt, Human
gggcaaucuuccuggccaucaucc

SEQ ID NO: 12645 - RNA, 24 nt, Human
gggcacugaggcccgggauguaug

SEQ ID NO: 12646 - RNA, 23 nt, Human
gggcaggaggagcuccggagcug

SEQ ID NO: 12647 - RNA, 24 nt, Human
gggcagggggaaugggaguauaag

SEQ ID NO: 12648 - RNA, 21 nt, Human
gggcaggggugaggcagguuu

SEQ ID NO: 12649 - RNA, 24 nt, Human
gggcaguaaucaaguggaugaagc

SEQ ID NO: 12650 - RNA, 24 nt, Human
gggcagugggguccgcaucguggu

SEQ ID NO: 12651 - RNA, 24 nt, Human
gggcaucguggcugaggugcuggu

SEQ ID NO: 12652 - RNA, 24 nt, Human
gggcaugaagaucacaaugggccu

SEQ ID NO: 12653 - RNA, 22 nt, Human
gggcaugaugauggcacuagcg

SEQ ID NO: 12654 - RNA, 24 nt, Human
gggcauggggcugcucacuggcac

SEQ ID NO: 12655 - RNA, 24 nt, Human
gggcaugggucaagggcguccggg

SEQ ID NO: 12656 - RNA, 24 nt, Human
gggcauggugucuuaugccuguaa

SEQ ID NO: 12657 - RNA, 24 nt, Human
gggcauggugugccucgggcucua

SEQ ID NO: 12658 - RNA, 24 nt, Human
gggcauuccaugcagccuugcgga

SEQ ID NO: 12659 - RNA, 24 nt, Human
gggccaccaagcggggggacaaaa

SEQ ID NO: 12660 - RNA, 22 nt, Human
gggccaugacagggagauaggc

SEQ ID NO: 12661 - RNA, 24 nt, Human
gggcccagccaagcaagggugugg

SEQ ID NO: 12662 - RNA, 24 nt, Human
gggccugugaccuugagaaccuca

SEQ ID NO: 12663 - RNA, 24 nt, Human
gggcucaggugagagcagguguuc

SEQ ID NO: 12664 - RNA, 24 nt, Human
gggcucuaugauauuaagaagggg

SEQ ID NO: 12665 - RNA, 24 nt, Human
gggcugggccaguccaggagccgc

SEQ ID NO: 12666 - RNA, 24 nt, Human
ggggaagagauauuuuuaaaacaa

SEQ ID NO: 12667 - RNA, 24 nt, Human
ggggaaggucaggaagguccaagc

SEQ ID NO: 12668 - RNA, 22 nt, Human
ggggaauuaaaugagaagccuu

SEQ ID NO: 12669 - RNA, 24 nt, Human
ggggacagguguacagacauguuc

SEQ ID NO: 12670 - RNA, 24 nt, Human
ggggacagguguacagacauguuu

SEQ ID NO: 12671 - RNA, 22 nt, Human
ggggagagacuguucccaggca

SEQ ID NO: 12672 - RNA, 24 nt, Human
ggggagcagacacaucagcacucg

SEQ ID NO: 12673 - RNA, 24 nt, Human
ggggagccggagcggcagggauuu

SEQ ID NO: 12674 - RNA, 24 nt, Human
ggggagccgucuuggccugcgcgg

SEQ ID NO: 12675 - RNA, 22 nt, Human
ggggagcuguaccaugagcagu

SEQ ID NO: 12676 - RNA, 22 nt, Human
ggggcggccacagacucgacau

SEQ ID NO: 12677 - RNA, 22 nt, Human
ggggcuguuucuuaacacggag

SEQ ID NO: 12678 - RNA, 22 nt, Human
gggggaauccaaggcagaccau

SEQ ID NO: 12679 - RNA, 22 nt, Human
gggggaguucuuucagauucag

SEQ ID NO: 12680 - RNA, 22 nt, Human
gggggaucauuauaaaaauacu

SEQ ID NO: 12681 - RNA, 22 nt, Human
gggggaugauagcagccagugg

SEQ ID NO: 12682 - RNA, 24 nt, Human
gggggcccaggccgagcuccuugu

SEQ ID NO: 12683 - RNA, 24 nt, Human
ggggucacaaauugaaauggcucc

SEQ ID NO: 12684 - RNA, 24 nt, Human
ggguaugggauugaugagggcaug

SEQ ID NO: 12685 - RNA, 22 nt, Human
gggucaccacacuuugcuaacu

SEQ ID NO: 12686 - RNA, 22 nt, Human
gggucucaaaugagggacauuu

SEQ ID NO: 12687 - RNA, 22 nt, Human
gggucucauuauguuguccagg

SEQ ID NO: 12688 - RNA, 24 nt, Human
gggugcccuugauuaucuucacca

SEQ ID NO: 12689 - RNA, 24 nt, Human
gguaagaaaugaaugaguauggcu

SEQ ID NO: 12690 - RNA, 24 nt, Human
ggucaacaggagucgggccucucu

SEQ ID NO: 12691 - RNA, 22 nt, Human
ggucacuugccaacggcgccgg

SEQ ID NO: 12692 - RNA, 22 nt, Human
ggucagugguaugggugugagg

SEQ ID NO: 12693 - RNA, 22 nt, Human
ggucauggacacagucccugaa

SEQ ID NO: 12694 - RNA, 22 nt, Human
gguccagacuggaguauagugc

SEQ ID NO: 12695 - RNA, 22 nt, Human
gguccagauggggagaagaugu

SEQ ID NO: 12696 - RNA, 24 nt, Human
gguccaggaagccagccagcuugg

SEQ ID NO: 12697 - RNA, 24 nt, Human
gguccugggccacccuggccgggg

SEQ ID NO: 12698 - RNA, 22 nt, Human
ggucugugaugcccuuaguugu

SEQ ID NO: 12699 - RNA, 22 nt, Human
ggugaacugaagccuguuccug

SEQ ID NO: 12700 - RNA, 22 nt, Human
ggugaugcauuuaaaagggcag

SEQ ID NO: 12701 - RNA, 22 nt, Human
ggugauggcuguugugugagcc

SEQ ID NO: 12702 - RNA, 24 nt, Human
ggugcaauugacgcagcuugguau

SEQ ID NO: 12703 - RNA, 23 nt, Human
ggugcagaccugcuuggaggccc

SEQ ID NO: 12704 - RNA, 24 nt, Human
ggugcagauccuuagcauaggcag

SEQ ID NO: 12705 - RNA, 24 nt, Human
ggugcagcccucccucccaugccc

SEQ ID NO: 12706 - RNA, 24 nt, Human
gguggcaacuuuaggggguuccag

SEQ ID NO: 12707 - RNA, 22 nt, Human
gguggguuuccuuaauggcauc

SEQ ID NO: 12708 - RNA, 24 nt, Human
ggugguaucauguacucaagaccu

SEQ ID NO: 12709 - RNA, 20 nt, Human
ggugguggauaugcccaggu

SEQ ID NO: 12710 - RNA, 22 nt, Human
gguuaaaaaggaggaagaggaa

SEQ ID NO: 12711 - RNA, 22 nt, Human
gguuaaggagcuaguagauuuc

SEQ ID NO: 12712 - RNA, 22 nt, Human
gguuaggaugcaggucaucuuu

SEQ ID NO: 12713 - RNA, 24 nt, Human
gguuauaaauucuguuaguugcua

SEQ ID NO: 12714 - RNA, 22 nt, Human
gguugcuguguugugcuuccuu

SEQ ID NO: 12715 - RNA, 24 nt, Human
gguugggggcuaaauuaauuggag

SEQ ID NO: 12716 - RNA, 24 nt, Human
guaaaauucuucugauacccacuc

SEQ ID NO: 12717 - RNA, 24 nt, Human
guacagcaagcacugacagugagu

SEQ ID NO: 12718 - RNA, 22 nt, Human
guacaggaauguccuggccauc

SEQ ID NO: 12719 - RNA, 24 nt, Human
guacaggguucucugaauugcugc

SEQ ID NO: 12720 - RNA, 24 nt, Human
guaccagaagggcuccaccaggca

SEQ ID NO: 12721 - RNA, 24 nt, Human
guacguaggauaauucacgucgcu

SEQ ID NO: 12722 - RNA, 22 nt, Human
guacuacuuucuuuuucuuuaa

SEQ ID NO: 12723 - RNA, 22 nt, Human
guacuauguugguggagaggug

SEQ ID NO: 12724 - RNA, 22 nt, Human
guacuuccauccacauauaugu

SEQ ID NO: 12725 - RNA, 24 nt, Human
guagaguuuucuucaggcuuaaag

SEQ ID NO: 12726 - RNA, 24 nt, Human
guagaguuuucuuuaggcuuaaag

SEQ ID NO: 12727 - RNA, 22 nt, Human
guagcaaagauucaggaugugc

SEQ ID NO: 12728 - RNA, 24 nt, Human
guagugcaggaaaguggugauaag

SEQ ID NO: 12729 - RNA, 24 nt, Human
guaguugcagaacucuggguagcu

SEQ ID NO: 12730 - RNA, 24 nt, Human
guaguuguguugggauaagcagga

SEQ ID NO: 12731 - RNA, 24 nt, Human
guaguuguuggggcccaggaccca

SEQ ID NO: 12732 - RNA, 24 nt, Human
gucaagaagugaagacagaugguc

SEQ ID NO: 12733 - RNA, 24 nt, Human
gucaagucaccaaugauguacaua

SEQ ID NO: 12734 - RNA, 22 nt, Human
gucaaucacaaaggcuugucca

SEQ ID NO: 12735 - RNA, 20 nt, Human
gucaaucguuugacagguaa

SEQ ID NO: 12736 - RNA, 24 nt, Human
gucaauggggcaacacgguuagcg

SEQ ID NO: 12737 - RNA, 24 nt, Human
gucaccuugggcaaggacuucgca

SEQ ID NO: 12738 - RNA, 24 nt, Human
gucacuuaaacaagccaucuaucc

SEQ ID NO: 12739 - RNA, 24 nt, Human
gucacuugugguauugauguggac

SEQ ID NO: 12740 - RNA, 22 nt, Human
gucagcaaggagggguggacaa

SEQ ID NO: 12741 - RNA, 22 nt, Human
gucaucuguggagggacagccc

SEQ ID NO: 12742 - RNA, 24 nt, Human
gucaugaauauggacaaaaccuuu

SEQ ID NO: 12743 - RNA, 23 nt, Human
gucauuuuccuuugugagaggaa

SEQ ID NO: 12744 - RNA, 22 nt, Human
guccaauagaugccaguaacaa

SEQ ID NO: 12745 - RNA, 18 nt, Human
guccagguguagaaugcc

SEQ ID NO: 12746 - RNA, 24 nt, Human
guccaguucacagacauuguggaa

SEQ ID NO: 12747 - RNA, 24 nt, Human
gucccggucaagugguucuucugc

SEQ ID NO: 12748 - RNA, 24 nt, Human
gucccuugcaagcguauuuccuua

SEQ ID NO: 12749 - RNA, 24 nt, Human
guccgguggucucucgcggcgcgc

SEQ ID NO: 12750 - RNA, 22 nt, Human
guccucucuccauuugcagauc

SEQ ID NO: 12751 - RNA, 24 nt, Human
guccucuuaaggcaaaugccgaga

SEQ ID NO: 12752 - RNA, 24 nt, Human
guccucuuaucuccugccuccuuc

SEQ ID NO: 12753 - RNA, 24 nt, Human
guccuggucaugugccacacgagg

SEQ ID NO: 12754 - RNA, 24 nt, Human
guccuguacaagugcgugguuucc

SEQ ID NO: 12755 - RNA, 22 nt, Human
guccuucugucuuuuaaauugu

SEQ ID NO: 12756 - RNA, 22 nt, Human
guccuugucauccucugccugu

SEQ ID NO: 12757 - RNA, 24 nt, Human
gucgacccacgcguccgcauuacc

SEQ ID NO: 12758 - RNA, 24 nt, Human
gucgauuggaaacugugaaggugu

SEQ ID NO: 12759 - RNA, 24 nt, Human
gucgccuccccuccuguagcccac

SEQ ID NO: 12760 - RNA, 22 nt, Human
gucgccuguugaguagacaugg

SEQ ID NO: 12761 - RNA, 22 nt, Human
gucggcuugguugucggugaua

SEQ ID NO: 12762 - RNA, 22 nt, Human
gucgugguuuugugcaaagcag

SEQ ID NO: 12763 - RNA, 22 nt, Human
gucuaggggagggaugauggca

SEQ ID NO: 12764 - RNA, 24 nt, Human
gucuauaucaccuugaagaaguau

SEQ ID NO: 12765 - RNA, 24 nt, Human
gucucuuuuuuggggaugagagca

SEQ ID NO: 12766 - RNA, 24 nt, Human
gucuucuuccauccagucaagcca

SEQ ID NO: 12767 - RNA, 24 nt, Human
gugaaacuccuuccucagcugguu

SEQ ID NO: 12768 - RNA, 24 nt, Human
gugaacaggggacaaucucagccu

SEQ ID NO: 12769 - RNA, 24 nt, Human
gugaacuugaagugcuucccauuc

SEQ ID NO: 12770 - RNA, 24 nt, Human
gugaagcaggauguauguggccuu

SEQ ID NO: 12771 - RNA, 22 nt, Human
gugaaggaggugaaguauuuaa

SEQ ID NO: 12772 - RNA, 22 nt, Human
gugaagguagguuucagguuug

SEQ ID NO: 12773 - RNA, 24 nt, Human
gugaaguucauaaaguuuugaggu

SEQ ID NO: 12774 - RNA, 24 nt, Human
gugacacucuggaaaucuuggaug

SEQ ID NO: 12775 - RNA, 24 nt, Human
gugaccgugaucuuguucgucuuu

SEQ ID NO: 12776 - RNA, 22 nt, Human
gugaggagacaccgggcuguuu

SEQ ID NO: 12777 - RNA, 24 nt, Human
gugaggcgccggggcccacugagu

SEQ ID NO: 12778 - RNA, 22 nt, Human
gugagugugaaugggugugcgc

SEQ ID NO: 12779 - RNA, 22 nt, Human
gugaguucccaguucuuggcug

SEQ ID NO: 12780 - RNA, 24 nt, Human
gugauccaccugccuuggccuuuc

SEQ ID NO: 12781 - RNA, 22 nt, Human
gugauuaaauuaaggcucuuga

SEQ ID NO: 12782 - RNA, 24 nt, Human
gugcacuugauaauaacccugcag

SEQ ID NO: 12783 - RNA, 24 nt, Human
gugcagcaccaccagcguguccag

SEQ ID NO: 12784 - RNA, 24 nt, Human
gugcagcagaccuguaaaugucuu

SEQ ID NO: 12785 - RNA, 22 nt, Human
gugcagggaugcagguaugaag

SEQ ID NO: 12786 - RNA, 24 nt, Human
gugcagugaguggccucaaaguug

SEQ ID NO: 12787 - RNA, 24 nt, Human
gugcaguguaacgaugcacuuugg

SEQ ID NO: 12788 - RNA, 22 nt, Human
gugcauaugugugugcauaugu

SEQ ID NO: 12789 - RNA, 24 nt, Human
gugcauggccggaugucucuggga

SEQ ID NO: 12790 - RNA, 22 nt, Human
gugcauguaugugugcaugugu

SEQ ID NO: 12791 - RNA, 24 nt, Human
gugcaugucuaagcccugugccuu

SEQ ID NO: 12792 - RNA, 18 nt, Human
gugcauguggauugauac

SEQ ID NO: 12793 - RNA, 24 nt, Human
gugcauguggauugauacuagcag

SEQ ID NO: 12794 - RNA, 24 nt, Human
gugccuguguccucgauggucugg

SEQ ID NO: 12795 - RNA, 24 nt, Human
gugccuuuagugauggccugggcu

SEQ ID NO: 12796 - RNA, 22 nt, Human
gugcucaucuucuguaacuguu

SEQ ID NO: 12797 - RNA, 22 nt, Human
gugcucuuuggaauuuuccugu

SEQ ID NO: 12798 - RNA, 24 nt, Human
gugcuggaggcggcuauggcuuug

SEQ ID NO: 12799 - RNA, 24 nt, Human
gugcuguaggguguggucugguac

SEQ ID NO: 12800 - RNA, 24 nt, Human
gugcuuugauuaaugguuaaaacu

SEQ ID NO: 12801 - RNA, 24 nt, Human
guggaagugggcagcaagaucuac

SEQ ID NO: 12802 - RNA, 24 nt, Human
guggagcgauguuuccaucucuaa

SEQ ID NO: 12803 - RNA, 24 nt, Human
guggagcgcugguggaagguaccg

SEQ ID NO: 12804 - RNA, 24 nt, Human
guggagcuagaagcagggugucca

SEQ ID NO: 12805 - RNA, 24 nt, Human
guggagcugguagaugagcccacg

SEQ ID NO: 12806 - RNA, 24 nt, Human
guggagcugucuuaaacgaagaga

SEQ ID NO: 12807 - RNA, 22 nt, Human
guggagggcagcuuugucuaca

SEQ ID NO: 12808 - RNA, 24 nt, Human
guggaucccguggagccacauggc

SEQ ID NO: 12809 - RNA, 24 nt, Human
guggauuacaagaucaggaguuug

SEQ ID NO: 12810 - RNA, 22 nt, Human
guggcauuggugguggcauugg

SEQ ID NO: 12811 - RNA, 24 nt, Human
guggcccaacuggaucaggcaguu

SEQ ID NO: 12812 - RNA, 24 nt, Human
guggccuuauucugcggcuguggg

SEQ ID NO: 12813 - RNA, 22 nt, Human
guggcucagacuuauaauccca

SEQ ID NO: 12814 - RNA, 24 nt, Human
guggcuccaaggaaucuucccacg

SEQ ID NO: 12815 - RNA, 22 nt, Human
guggcugcagagcuccacagag

SEQ ID NO: 12816 - RNA, 22 nt, Human
gugggcaagggaaaauagaugg

SEQ ID NO: 12817 - RNA, 22 nt, Human
gugggcaaguugcucaagggua

SEQ ID NO: 12818 - RNA, 24 nt, Human
guggggcagaccgcaaugccuaug

SEQ ID NO: 12819 - RNA, 22 nt, Human
gugggguguacucccccuugca

SEQ ID NO: 12820 - RNA, 22 nt, Human
guggguggaacgugccucugcu

SEQ ID NO: 12821 - RNA, 22 nt, Human
gugggugugguguucagguggc

SEQ ID NO: 12822 - RNA, 22 nt, Human
guggucucguggaugccgcaag

SEQ ID NO: 12823 - RNA, 24 nt, Human
guggugcgggccuguggucucagc

SEQ ID NO: 12824 - RNA, 23 nt, Human
gugguuccggccuucugauaauc

SEQ ID NO: 12825 - RNA, 22 nt, Human
gugugggcagggccgugcuccc

SEQ ID NO: 12826 - RNA, 22 nt, Human
gugugggguuuuuuggagggga

SEQ ID NO: 12827 - RNA, 22 nt, Human
guguuccaggaagucgucuuga

SEQ ID NO: 12828 - RNA, 22 nt, Human
guguugaugcauuuucacuucu

SEQ ID NO: 12829 - RNA, 22 nt, Human
guguugcuuccauuacgccagu

SEQ ID NO: 12830 - RNA, 24 nt, Human
guuaacuucuugagcuauuucgug

SEQ ID NO: 12831 - RNA, 23 nt, Human
guuacagaggcucaccugguggu

SEQ ID NO: 12832 - RNA, 22 nt, Human
guucaaauccaaccccuugucu

SEQ ID NO: 12833 - RNA, 24 nt, Human
guucaagcgauucuccugccucac

SEQ ID NO: 12834 - RNA, 23 nt, Human
guucaagggcauggaaagucacc

SEQ ID NO: 12835 - RNA, 24 nt, Human
guucacgcccuucuccugccucag

SEQ ID NO: 12836 - RNA, 24 nt, Human
guucagagaaggcugcagucagcu

SEQ ID NO: 12837 - RNA, 22 nt, Human
guucaguaauaugccagggguu

SEQ ID NO: 12838 - RNA, 24 nt, Human
guuccauucggcccuccuggguuu

SEQ ID NO: 12839 - RNA, 24 nt, Human
guuccugucaccauugcucucgau

SEQ ID NO: 12840 - RNA, 22 nt, Human
guuccuguccaguuucccccuc

SEQ ID NO: 12841 - RNA, 22 nt, Human
guucuccuggcucccacccugc

SEQ ID NO: 12842 - RNA, 24 nt, Human
guugaucacucacaucgugcucgc

SEQ ID NO: 12843 - RNA, 22 nt, Human
guugccuaggcuggagugcagu

SEQ ID NO: 12844 - RNA, 22 nt, Human
guuggccuuuuggagugggugu

SEQ ID NO: 12845 - RNA, 22 nt, Human
guuguguggaagaugcuuugcc

SEQ ID NO: 12846 - RNA, 22 nt, Human
guuucuucuguuugauacuggc

SEQ ID NO: 12847 - RNA, 22 nt, Human
guuuuaggcaacauaggaagac

SEQ ID NO: 12848 - RNA, 22 nt, Human
guuuugugugugugcccacacg

SEQ ID NO: 12849 - RNA, 24 nt, Human
uaaaacaagauuuggaugacaugg

SEQ ID NO: 12850 - RNA, 24 nt, Human
uaaaacacucuacacaauuucaca

SEQ ID NO: 12851 - RNA, 24 nt, Human
uaaaaccauuaccuuaaaaugggu

SEQ ID NO: 12852 - RNA, 24 nt, Human
uaaaagaaggcaggugucucuuua

SEQ ID NO: 12853 - RNA, 24 nt, Human
uaaaagcagcaauaucaugucuug

SEQ ID NO: 12854 - RNA, 24 nt, Human
uaaaagccaaggagcagcccuagu

SEQ ID NO: 12855 - RNA, 24 nt, Human
uaaaaggacuaacugcagucagca

SEQ ID NO: 12856 - RNA, 24 nt, Human
uaaaaguuugucuuuauuagccau

SEQ ID NO: 12857 - RNA, 24 nt, Human
uaaaauaccuguaucacagaugac

SEQ ID NO: 12858 - RNA, 24 nt, Human
uaaaaucauuucagauaucaccau

SEQ ID NO: 12859 - RNA, 24 nt, Human
uaaaauccacaucaauagcacacg

SEQ ID NO: 12860 - RNA, 21 nt, Human
uaaaaugcauuauaucuggag

SEQ ID NO: 12861 - RNA, 24 nt, Human
uaaacagagugacaacagggagug

SEQ ID NO: 12862 - RNA, 24 nt, Human
uaaacaguccacaacuuugcaucu

SEQ ID NO: 12863 - RNA, 22 nt, Human
uaaacuauuagcuguaauuuua

SEQ ID NO: 12864 - RNA, 24 nt, Human
uaaacuguauccuuuaguuuuauc

SEQ ID NO: 12865 - RNA, 22 nt, Human
uaaagaauggguggcugggcug

SEQ ID NO: 12866 - RNA, 24 nt, Human
uaaagcaucugcaacagccaggaa

SEQ ID NO: 12867 - RNA, 24 nt, Human
uaaagcucaaauugcucuuaaacu

SEQ ID NO: 12868 - RNA, 24 nt, Human
uaaagcucuaagacuccugagcca

SEQ ID NO: 12869 - RNA, 24 nt, Human
uaaaggaauagguugggcuaguua

SEQ ID NO: 12870 - RNA, 24 nt, Human
uaaaguacaaaaacgccaccuuuu

SEQ ID NO: 12871 - RNA, 24 nt, Human
uaaaguagauuggauuugcugaaa

SEQ ID NO: 12872 - RNA, 24 nt, Human
uaaaguauaagguaagguaaauuu

SEQ ID NO: 12873 - RNA, 24 nt, Human
uaaagugaaaaaacacugaaaaga

SEQ ID NO: 12874 - RNA, 22 nt, Human
uaaauccugaaaagugcagacu

SEQ ID NO: 12875 - RNA, 24 nt, Human
uaaaugauacagaaauacguuuau

SEQ ID NO: 12876 - RNA, 24 nt, Human
uaaaugcacuugauggguguugaa

SEQ ID NO: 12877 - RNA, 24 nt, Human
uaaauguaaggaguauauauuuug

SEQ ID NO: 12878 - RNA, 24 nt, Human
uaaauguaguuucaucugucguca

SEQ ID NO: 12879 - RNA, 24 nt, Human
uaaauguccuaucugugagaaaag

SEQ ID NO: 12880 - RNA, 24 nt, Human
uaaauguugagccuuuuuggccug

SEQ ID NO: 12881 - RNA, 24 nt, Human
uaacaaaggucccuuggacauugc

SEQ ID NO: 12882 - RNA, 20 nt, Human
uaacacaagaaaucauguca

SEQ ID NO: 12883 - RNA, 24 nt, Human
uaacagcagaaaauuauccgguag

SEQ ID NO: 12884 - RNA, 24 nt, Human
uaacaggccaaaauucuauuuccu

SEQ ID NO: 12885 - RNA, 24 nt, Human
uaacaguugccucgagaugcucug

SEQ ID NO: 12886 - RNA, 22 nt, Human
uaacaguuuucauugacggcua

SEQ ID NO: 12887 - RNA, 22 nt, Human
uaacauggugaaacccugucuc

SEQ ID NO: 12888 - RNA, 24 nt, Human
uaaccagaggcaagaugcccgagg

SEQ ID NO: 12889 - RNA, 24 nt, Human
uaaccauauugauuauguuuuauu

SEQ ID NO: 12890 - RNA, 24 nt, Human
uaaccuguuuuaccgcaucuucuc

SEQ ID NO: 12891 - RNA, 24 nt, Human
uaaccuuuccuuaaaaggcagaac

SEQ ID NO: 12892 - RNA, 24 nt, Human
uaacgcuguucacguagcucuuuu

SEQ ID NO: 12893 - RNA, 23 nt, Human
uaacggguccugcgguggugggu

SEQ ID NO: 12894 - RNA, 21 nt, Human
uaacuaaaggcagaucuucua

SEQ ID NO: 12895 - RNA, 24 nt, Human
uaacuagacauuauuuaugcugcc

SEQ ID NO: 12896 - RNA, 24 nt, Human
uaacugacaacuguuuucaacucc

SEQ ID NO: 12897 - RNA, 24 nt, Human
uaacugcugaacuaguuccucagg

SEQ ID NO: 12898 - RNA, 22 nt, Human
uaacuuaacaggaggacggauc

SEQ ID NO: 12899 - RNA, 22 nt, Human
uaacuuggaguugauucccauu

SEQ ID NO: 12900 - RNA, 24 nt, Human
uaagaaaaaacuccuuucaucucu

SEQ ID NO: 12901 - RNA, 24 nt, Human
uaagaacaauuucaaauauuucuu

SEQ ID NO: 12902 - RNA, 22 nt, Human
uaagaaguuucacuguuguugu

SEQ ID NO: 12903 - RNA, 22 nt, Human
uaagacagcagacgguggcaug

SEQ ID NO: 12904 - RNA, 24 nt, Human
uaagacgugcucaaucuguguucc

SEQ ID NO: 12905 - RNA, 24 nt, Human
uaagacuaggggcuugguauauau

SEQ ID NO: 12906 - RNA, 24 nt, Human
uaagagaaagguggcagugggauc

SEQ ID NO: 12907 - RNA, 24 nt, Human
uaagagcaacaguggaucaagcug

SEQ ID NO: 12908 - RNA, 24 nt, Human
uaagagguuacagaacuauuagcu

SEQ ID NO: 12909 - RNA, 24 nt, Human
uaagauagauauauaugaguagaa

SEQ ID NO: 12910 - RNA, 24 nt, Human
uaagauaggcuaggcuaagcuggg

SEQ ID NO: 12911 - RNA, 22 nt, Human
uaagaucuccugggcaggagau

SEQ ID NO: 12912 - RNA, 22 nt, Human
uaagaugacugaaugaaacucu

SEQ ID NO: 12913 - RNA, 24 nt, Human
uaagaugcuagaaauucaauggga

SEQ ID NO: 12914 - RNA, 24 nt, Human
uaagauggaaaagaacaugagugg

SEQ ID NO: 12915 - RNA, 24 nt, Human
uaagcagagcucgcagcguggcuu

SEQ ID NO: 12916 - RNA, 23 nt, Human
uaagccucuaaagugaucagugc

SEQ ID NO: 12917 - RNA, 24 nt, Human
uaagcuaauuacuguugcagaaug

SEQ ID NO: 12918 - RNA, 21 nt, Human
uaagcuagucguucuuggcuc

SEQ ID NO: 12919 - RNA, 24 nt, Human
uaagcuccucugagcagggucgac

SEQ ID NO: 12920 - RNA, 22 nt, Human
uaaggaagggcuggauugaaag

SEQ ID NO: 12921 - RNA, 22 nt, Human
uaaggacaucaauaccuucucu

SEQ ID NO: 12922 - RNA, 21 nt, Human
uaaggagggggcauggguccc

SEQ ID NO: 12923 - RNA, 24 nt, Human
uaaggcaauuucaaaaaugcucca

SEQ ID NO: 12924 - RNA, 24 nt, Human
uaagguaaaugacacaaaguugaa

SEQ ID NO: 12925 - RNA, 24 nt, Human
uaagguacaccucagcaguuccag

SEQ ID NO: 12926 - RNA, 24 nt, Human
uaaggucaucgauacggagcagga

SEQ ID NO: 12927 - RNA, 24 nt, Human
uaagguccagguugauucacucca

SEQ ID NO: 12928 - RNA, 24 nt, Human
uaaggucuugugcaagaggaggcc

SEQ ID NO: 12929 - RNA, 24 nt, Human
uaaguaaaaacgcugggucaaaac

SEQ ID NO: 12930 - RNA, 22 nt, Human
uaaguaaagagagaagccagaa

SEQ ID NO: 12931 - RNA, 24 nt, Human
uaaguacauguaaaaaguaggaag

SEQ ID NO: 12932 - RNA, 24 nt, Human
uaaguauaucuauguugcugacau

SEQ ID NO: 12933 - RNA, 24 nt, Human
uaaguauuagauuuucuggugugc

SEQ ID NO: 12934 - RNA, 24 nt, Human
uaaguccccaaucugguugccggc

SEQ ID NO: 12935 - RNA, 22 nt, Human
uaaguccugguguuguguggau

SEQ ID NO: 12936 - RNA, 24 nt, Human
uaagucugugaaucuacccugguc

SEQ ID NO: 12937 - RNA, 22 nt, Human
uaagucuuuuuauucuaccuag

SEQ ID NO: 12938 - RNA, 24 nt, Human
uaagugaaguuacauuggcccuaa

SEQ ID NO: 12939 - RNA, 24 nt, Human
uaagugacuugcucaaugccacac

SEQ ID NO: 12940 - RNA, 21 nt, Human
uaagugaguaggcauuguucu

SEQ ID NO: 12941 - RNA, 24 nt, Human
uaagugccugcacucuguauucua

SEQ ID NO: 12942 - RNA, 24 nt, Human
uaagugcuuuuaaugucaaguuuu

SEQ ID NO: 12943 - RNA, 21 nt, Human
uaaguggacucaacagugugc

SEQ ID NO: 12944 - RNA, 24 nt, Human
uaaguggaguuagaaguggguuau

SEQ ID NO: 12945 - RNA, 24 nt, Human
uaagugggcggggacccaaggcug

SEQ ID NO: 12946 - RNA, 24 nt, Human
uaaguggugaaugaaugugaaggc

SEQ ID NO: 12947 - RNA, 24 nt, Human
uaaguucuuuucaaaucuuggaag

SEQ ID NO: 12948 - RNA, 24 nt, Human
uaaguugaaaacucaguaucuaug

SEQ ID NO: 12949 - RNA, 22 nt, Human
uaauacggaauauaaaguagag

SEQ ID NO: 12950 - RNA, 24 nt, Human
uaauauuuacugaccauuuacuau

SEQ ID NO: 12951 - RNA, 24 nt, Human
uaaucuaguaaaggcauagauuau

SEQ ID NO: 12952 - RNA, 21 nt, Human
uaaucuggaagaucuggcauu

SEQ ID NO: 12953 - RNA, 24 nt, Human
uaaucugugaacauuauugacagg

SEQ ID NO: 12954 - RNA, 22 nt, Human
uaaucuucugcuggaacuguca

SEQ ID NO: 12955 - RNA, 24 nt, Human
uaauggggagagggauggcaagag

SEQ ID NO: 12956 - RNA, 24 nt, Human
uaaugggucugaaaauucugugac

SEQ ID NO: 12957 - RNA, 24 nt, Human
uaaugugcugcuucccuuuucccc

SEQ ID NO: 12958 - RNA, 24 nt, Human
uaauguucugucacgugaaauauu

SEQ ID NO: 12959 - RNA, 21 nt, Human
uaauucuugagacaaaaggug

SEQ ID NO: 12960 - RNA, 24 nt, Human
uaauuuuuuacccuauguuuacau

SEQ ID NO: 12961 - RNA, 24 nt, Human
uacaaaguuauauguguagagcau

SEQ ID NO: 12962 - RNA, 24 nt, Human
uacaaaucugggcaccagugguuc

SEQ ID NO: 12963 - RNA, 22 nt, Human
uacaaauuccugggucuccugg

SEQ ID NO: 12964 - RNA, 24 nt, Human
uacaaauugccugacggcagguaa

SEQ ID NO: 12965 - RNA, 20 nt, Human
uacaacuugcuguuacuuga

SEQ ID NO: 12966 - RNA, 24 nt, Human
uacaagaagauaauaaggguucuu

SEQ ID NO: 12967 - RNA, 24 nt, Human
uacaagcaauaguuauggggaucu

SEQ ID NO: 12968 - RNA, 24 nt, Human
uacaagcauuuugaaauauucugu

SEQ ID NO: 12969 - RNA, 24 nt, Human
uacaagccagcuacuuugcaggaa

SEQ ID NO: 12970 - RNA, 24 nt, Human
uacaagguuuguugaauacuaguu

SEQ ID NO: 12971 - RNA, 21 nt, Human
uacaagugcuccaguacggcc

SEQ ID NO: 12972 - RNA, 22 nt, Human
uacaauccugagaaccuggcca

SEQ ID NO: 12973 - RNA, 24 nt, Human
uacaaugagugaaccugaggccca

SEQ ID NO: 12974 - RNA, 24 nt, Human
uacacacugugagacucugcuaca

SEQ ID NO: 12975 - RNA, 24 nt, Human
uacacaucaauuuggaguuguuuc

SEQ ID NO: 12976 - RNA, 22 nt, Human
uacaccacagaaaucuuuggcc

SEQ ID NO: 12977 - RNA, 24 nt, Human
uacaccacugugagccgacugaaa

SEQ ID NO: 12978 - RNA, 24 nt, Human
uacacggucguggacgagauguuc

SEQ ID NO: 12979 - RNA, 24 nt, Human
uacacuggcagagcucacagauga

SEQ ID NO: 12980 - RNA, 24 nt, Human
uacacuguggacuggagaaaguca

SEQ ID NO: 12981 - RNA, 24 nt, Human
uacacuuuuggauagaauuuauac

SEQ ID NO: 12982 - RNA, 24 nt, Human
uacagccuuuucuuuaucuuauag

SEQ ID NO: 12983 - RNA, 24 nt, Human
uacagcuacagauuguccacacag

SEQ ID NO: 12984 - RNA, 24 nt, Human
uacaggacacuguuggcuuuagag

SEQ ID NO: 12985 - RNA, 24 nt, Human
uacaggcaggaucuugccaccuug

SEQ ID NO: 12986 - RNA, 22 nt, Human
uacaggcaggcacagaggcagu

SEQ ID NO: 12987 - RNA, 24 nt, Human
uacaggcccgggauguaugggauc

SEQ ID NO: 12988 - RNA, 24 nt, Human
uacaggggcaagcuaccaugucug

SEQ ID NO: 12989 - RNA, 24 nt, Human
uacagguaugagccaccacaccca

SEQ ID NO: 12990 - RNA, 24 nt, Human
uacaguacacagcgagagucuuac

SEQ ID NO: 12991 - RNA, 24 nt, Human
uacagucuaccccuacaugcaugc

SEQ ID NO: 12992 - RNA, 24 nt, Human
uacagugcuuguaaaacgguuuga

SEQ ID NO: 12993 - RNA, 24 nt, Human
uacaguucaccaccacggccgagc

SEQ ID NO: 12994 - RNA, 24 nt, Human
uacauacaaugagucuccacgccu

SEQ ID NO: 12995 - RNA, 24 nt, Human
uacauaguuuuaaaacaugcaaaa

SEQ ID NO: 12996 - RNA, 24 nt, Human
uacaucacugcuagaauauuuagc

SEQ ID NO: 12997 - RNA, 24 nt, Human
uacaucgcccuugaacgaggaccu

SEQ ID NO: 12998 - RNA, 24 nt, Human
uacaugcaugcauguguguaugug

SEQ ID NO: 12999 - RNA, 24 nt, Human
uacauuaagaaaauugguacaacc

SEQ ID NO: 13000 - RNA, 22 nt, Human
uacauucuguaccauucuguac

SEQ ID NO: 13001 - RNA, 24 nt, Human
uacauuguguuaaaacagaagaua

SEQ ID NO: 13002 - RNA, 24 nt, Human
uaccaagcccagcuaauuuuugug

SEQ ID NO: 13003 - RNA, 23 nt, Human
uaccaagggccugguugggccac

SEQ ID NO: 13004 - RNA, 22 nt, Human
uaccaaguacugcgcagaaaug

SEQ ID NO: 13005 - RNA, 21 nt, Human
uaccacacaaaggcauuggcu

SEQ ID NO: 13006 - RNA, 24 nt, Human
uaccacaccaaugccuucaugguc

SEQ ID NO: 13007 - RNA, 22 nt, Human
uaccagaaagccauguucauau

SEQ ID NO: 13008 - RNA, 24 nt, Human
uaccaggaagauccaugaucuggg

SEQ ID NO: 13009 - RNA, 24 nt, Human
uaccaggaagcauuugaaauuagu

SEQ ID NO: 13010 - RNA, 24 nt, Human
uaccaggaugguuaccaggaugac

SEQ ID NO: 13011 - RNA, 24 nt, Human
uaccaggugaauauuggcuuggaa

SEQ ID NO: 13012 - RNA, 24 nt, Human
uaccagguuuaaauguagucuucu

SEQ ID NO: 13013 - RNA, 21 nt, Human
uaccagugccacucugacagg

SEQ ID NO: 13014 - RNA, 24 nt, Human
uaccauaccaucaaauggucauaa

SEQ ID NO: 13015 - RNA, 24 nt, Human
uaccauuggcuggucuuaccgugg

SEQ ID NO: 13016 - RNA, 24 nt, Human
uaccauuugccucucgggcucaag

SEQ ID NO: 13017 - RNA, 24 nt, Human
uacccaaagcccgaaucggaaaau

SEQ ID NO: 13018 - RNA, 24 nt, Human
uacccacuuauaaauagcacugau

SEQ ID NO: 13019 - RNA, 24 nt, Human
uacccagugguacaguucauauag

SEQ ID NO: 13020 - RNA, 24 nt, Human
uacccaguuuuuacucaguuugaa

SEQ ID NO: 13021 - RNA, 22 nt, Human
uacccauucuugauuuagauga

SEQ ID NO: 13022 - RNA, 24 nt, Human
uacccauugcucucccacuccacg

SEQ ID NO: 13023 - RNA, 24 nt, Human
uaccccagagccuagcaggccgac

SEQ ID NO: 13024 - RNA, 24 nt, Human
uacccggauugaccaggugcccag

SEQ ID NO: 13025 - RNA, 24 nt, Human
uacccguucucccuuuggucaggg

SEQ ID NO: 13026 - RNA, 19 nt, Human
uacccguuguuaggggcgc

SEQ ID NO: 13027 - RNA, 24 nt, Human
uacccuacgcugccagguggaggg

SEQ ID NO: 13028 - RNA, 22 nt, Human
uacccuaucucuauaaaaauaa

SEQ ID NO: 13029 - RNA, 22 nt, Human
uacccucuuucuuuggagcuaa

SEQ ID NO: 13030 - RNA, 24 nt, Human
uacccugagaacucagagcaguug

SEQ ID NO: 13031 - RNA, 24 nt, Human
uacccuggucaccccaggaucagg

SEQ ID NO: 13032 - RNA, 23 nt, Human
uaccggcccaaguacugcgguuc

SEQ ID NO: 13033 - RNA, 24 nt, Human
uaccguagucuagaugucuugagg

SEQ ID NO: 13034 - RNA, 24 nt, Human
uaccgugcggcuugcugacaggag

SEQ ID NO: 13035 - RNA, 24 nt, Human
uaccuaguaagaguagacuucuuu

SEQ ID NO: 13036 - RNA, 21 nt, Human
uaccuaugggaagccugucac

SEQ ID NO: 13037 - RNA, 24 nt, Human
uaccucaggcuaauuacuguuauu

SEQ ID NO: 13038 - RNA, 22 nt, Human
uaccucugucaguaccgcugcg

SEQ ID NO: 13039 - RNA, 24 nt, Human
uaccucuguugaucuugaagaaac

SEQ ID NO: 13040 - RNA, 24 nt, Human
uaccugagucucugagcuuuucag

SEQ ID NO: 13041 - RNA, 24 nt, Human
uaccugccccguuuucccugugag

SEQ ID NO: 13042 - RNA, 20 nt, Human
uaccuggacagggcaggggc

SEQ ID NO: 13043 - RNA, 24 nt, Human
uaccuggagguuggagacaggggc

SEQ ID NO: 13044 - RNA, 24 nt, Human
uaccugucuguaucgguucagagu

SEQ ID NO: 13045 - RNA, 24 nt, Human
uaccugugcuauaaggugggccug

SEQ ID NO: 13046 - RNA, 24 nt, Human
uaccuuacuuuuccucauucuuaa

SEQ ID NO: 13047 - RNA, 24 nt, Human
uaccuuagaagcuaaaugugucac

SEQ ID NO: 13048 - RNA, 24 nt, Human
uaccuugcaccuuaugccaaguau

SEQ ID NO: 13049 - RNA, 24 nt, Human
uacgaguuuggggcagucuccuca

SEQ ID NO: 13050 - RNA, 22 nt, Human
uacgcugugcugugacauggua

SEQ ID NO: 13051 - RNA, 24 nt, Human
uacgcuguuuuaaaaccuaggugg

SEQ ID NO: 13052 - RNA, 24 nt, Human
uacgggcaguucacgggccaggcc

SEQ ID NO: 13053 - RNA, 24 nt, Human
uacgugguccaugcgguguucucu

SEQ ID NO: 13054 - RNA, 24 nt, Human
uacguggugauauggucagugacu

SEQ ID NO: 13055 - RNA, 17 nt, Human
uacgugguugagaaggu

SEQ ID NO: 13056 - RNA, 24 nt, Human
uacguuaagcuaugcaucacuuuc

SEQ ID NO: 13057 - RNA, 24 nt, Human
uacguuucucacaggcugccaagg

SEQ ID NO: 13058 - RNA, 24 nt, Human
uacuacuggauaucugacuggagc

SEQ ID NO: 13059 - RNA, 24 nt, Human
uacuaugugauaaaauacauauag

SEQ ID NO: 13060 - RNA, 24 nt, Human
uacuaugugccacucauuucucuc

SEQ ID NO: 13061 - RNA, 22 nt, Human
uacucauuuaugcauuguuuug

SEQ ID NO: 13062 - RNA, 24 nt, Human
uacucugggcauggagcagggaag

SEQ ID NO: 13063 - RNA, 22 nt, Human
uacugcacuccagccugggcaa

SEQ ID NO: 13064 - RNA, 24 nt, Human
uacugcagugauggagaugcaagc

SEQ ID NO: 13065 - RNA, 21 nt, Human
uacuguguaacaaaucacugc

SEQ ID NO: 13066 - RNA, 24 nt, Human
uacuguguuauccgggauaucagg

SEQ ID NO: 13067 - RNA, 20 nt, Human
uacuguucuggaguggcccg

SEQ ID NO: 13068 - RNA, 22 nt, Human
uacuguuucuucccuaagaugu

SEQ ID NO: 13069 - RNA, 20 nt, Human
uacuucacgcuaucuaagug

SEQ ID NO: 13070 - RNA, 24 nt, Human
uacuucaggaacucuuuuucaaac

SEQ ID NO: 13071 - RNA, 24 nt, Human
uacuucauauuacacauacuuuuc

SEQ ID NO: 13072 - RNA, 19 nt, Human
uacuucgcacuaaguucuc

SEQ ID NO: 13073 - RNA, 24 nt, Human
uacuugaugggacaggcauugccc

SEQ ID NO: 13074 - RNA, 24 nt, Human
uacuuggagaagaccugugacugg

SEQ ID NO: 13075 - RNA, 22 nt, Human
uacuuucccuuucauucuuugu

SEQ ID NO: 13076 - RNA, 24 nt, Human
uacuuugguggggacuuuggaaca

SEQ ID NO: 13077 - RNA, 24 nt, Human
uacuuuugaacaucuaaauuuaaa

SEQ ID NO: 13078 - RNA, 24 nt, Human
uagaaaagcugauucugguuaucu

SEQ ID NO: 13079 - RNA, 22 nt, Human
uagaaaauagcgugaggugugu

SEQ ID NO: 13080 - RNA, 20 nt, Human
uagaacaggaaggacucaug

SEQ ID NO: 13081 - RNA, 23 nt, Human
uagaacauuaccaucauugcaga

SEQ ID NO: 13082 - RNA, 24 nt, Human
uagaagcauuucuuuacugaaccu

SEQ ID NO: 13083 - RNA, 24 nt, Human
uagaagccuuugaccaagcagguc

SEQ ID NO: 13084 - RNA, 24 nt, Human
uagaagccuuugaccaggcagguc

SEQ ID NO: 13085 - RNA, 24 nt, Human
uagaaugcauugugaaacgacugg

SEQ ID NO: 13086 - RNA, 24 nt, Human
uagaauggggagaguaacaauagc

SEQ ID NO: 13087 - RNA, 23 nt, Human
uagaauucggcugugaauccauc

SEQ ID NO: 13088 - RNA, 22 nt, Human
uagacugaggcuuccugcaggg

SEQ ID NO: 13089 - RNA, 22 nt, Human
uagacugugagcuccuugaagg

SEQ ID NO: 13090 - RNA, 24 nt, Human
uagagaccacugguagccuaagaa

SEQ ID NO: 13091 - RNA, 24 nt, Human
uagagaccagaagggccuggagaa

SEQ ID NO: 13092 - RNA, 22 nt, Human
uagagaugggguuucaccaugu

SEQ ID NO: 13093 - RNA, 22 nt, Human
uagagcaccuguugugugugca

SEQ ID NO: 13094 - RNA, 24 nt, Human
uagaggauccaagcuuacguacgc

SEQ ID NO: 13095 - RNA, 24 nt, Human
uagaggcccugcugagcugcuagc

SEQ ID NO: 13096 - RNA, 24 nt, Human
uagagggagggcgccgugcaaaau

SEQ ID NO: 13097 - RNA, 24 nt, Human
uagagucagugacagggaggcagc

SEQ ID NO: 13098 - RNA, 22 nt, Human
uagaguccuuggaucuguauca

SEQ ID NO: 13099 - RNA, 22 nt, Human
uagaguucuccgagugcuuuuc

SEQ ID NO: 13100 - RNA, 22 nt, Human
uagauagaacgaggcucggagg

SEQ ID NO: 13101 - RNA, 24 nt, Human
uagaucauuuauugaagacauacu

SEQ ID NO: 13102 - RNA, 22 nt, Human
uagauggguuacucagaugacu

SEQ ID NO: 13103 - RNA, 24 nt, Human
uagauguucugacagcacugcacc

SEQ ID NO: 13104 - RNA, 24 nt, Human
uagcaagcaggccaaagaugucuc

SEQ ID NO: 13105 - RNA, 22 nt, Human
uagcacaaugcauuugguauac

SEQ ID NO: 13106 - RNA, 22 nt, Human
uagcaccauuugaaaucgguua

SEQ ID NO: 13107 - RNA, 22 nt, Human
uagcaccuucugaaauaacgug

SEQ ID NO: 13108 - RNA, 24 nt, Human
uagcacgccccgccagaacuacca

SEQ ID NO: 13109 - RNA, 24 nt, Human
uagcagcacaucgcugacuuggcu

SEQ ID NO: 13110 - RNA, 24 nt, Human
uagcagcucguuguauuuccuggu

SEQ ID NO: 13111 - RNA, 22 nt, Human
uagcagcuuccucagcaccaug

SEQ ID NO: 13112 - RNA, 24 nt, Human
uagcaggaacacuacacuacgugc

SEQ ID NO: 13113 - RNA, 24 nt, Human
uagcaguacaaaaucuuugacuau

SEQ ID NO: 13114 - RNA, 24 nt, Human
uagcagugcaaagaguuccuuuau

SEQ ID NO: 13115 - RNA, 24 nt, Human
uagcauaugggcaggugcaaucca

SEQ ID NO: 13116 - RNA, 24 nt, Human
uagcaucaugaauuugcuuuucuc

SEQ ID NO: 13117 - RNA, 22 nt, Human
uagcaucuacuuguagguuugu

SEQ ID NO: 13118 - RNA, 24 nt, Human
uagcaucugagauccaggucaguu

SEQ ID NO: 13119 - RNA, 24 nt, Human
uagcaugaaucaaauguauuuauu

SEQ ID NO: 13120 - RNA, 22 nt, Human
uagcauucugguccuggcugca

SEQ ID NO: 13121 - RNA, 24 nt, Human
uagcauugcugucugcaagggagc

SEQ ID NO: 13122 - RNA, 24 nt, Human
uagccacuauccuugucuagcgcc

SEQ ID NO: 13123 - RNA, 24 nt, Human
uagccagcaggauggaguccacgg

SEQ ID NO: 13124 - RNA, 22 nt, Human
uagccggggcaagaggcagggg

SEQ ID NO: 13125 - RNA, 24 nt, Human
uagcgcagucucggccucgccguu

SEQ ID NO: 13126 - RNA, 24 nt, Human
uagcgcgugucacucccgcggcgc

SEQ ID NO: 13127 - RNA, 24 nt, Human
uagcggcagaggaucuugacugca

SEQ ID NO: 13128 - RNA, 24 nt, Human
uagcggcgacggggagggugggcu

SEQ ID NO: 13129 - RNA, 24 nt, Human
uagcgggucucaugccucggccuc

SEQ ID NO: 13130 - RNA, 24 nt, Human
uagcguccagcgauccagacaaau

SEQ ID NO: 13131 - RNA, 24 nt, Human
uagcguggccacugcguugauguu

SEQ ID NO: 13132 - RNA, 22 nt, Human
uagcuaugaucaugccacugca

SEQ ID NO: 13133 - RNA, 24 nt, Human
uagcucaaccuggugcuggacgag

SEQ ID NO: 13134 - RNA, 24 nt, Human
uagcugguucuguaaagguuggug

SEQ ID NO: 13135 - RNA, 24 nt, Human
uagcuguaacacgaagggcuccga

SEQ ID NO: 13136 - RNA, 24 nt, Human
uagcuguaguacauguuuucauug

SEQ ID NO: 13137 - RNA, 24 nt, Human
uagcuugagacucuauccugagau

SEQ ID NO: 13138 - RNA, 24 nt, Human
uaggaaaaugccaaaauggaauua

SEQ ID NO: 13139 - RNA, 22 nt, Human
uaggaaguauuuuuuaaaaaca

SEQ ID NO: 13140 - RNA, 24 nt, Human
uaggacauaaugguagcuuagacu

SEQ ID NO: 13141 - RNA, 24 nt, Human
uaggaccgucgugagacaugguca

SEQ ID NO: 13142 - RNA, 24 nt, Human
uaggacgcagcuguugccaugacg

SEQ ID NO: 13143 - RNA, 24 nt, Human
uaggagaagagagagaucgcuguc

SEQ ID NO: 13144 - RNA, 22 nt, Human
uaggagaugcuguagugaccau

SEQ ID NO: 13145 - RNA, 24 nt, Human
uaggagcccugggaacgggugacc

SEQ ID NO: 13146 - RNA, 24 nt, Human
uaggagccucuucucggcgcugcg

SEQ ID NO: 13147 - RNA, 24 nt, Human
uaggaggauguggcuguuggggua

SEQ ID NO: 13148 - RNA, 24 nt, Human
uaggaggauguggcuguugggguu

SEQ ID NO: 13149 - RNA, 24 nt, Human
uaggaggugauagucaucgcuguc

SEQ ID NO: 13150 - RNA, 22 nt, Human
uaggaguuucauuugguuuggu

SEQ ID NO: 13151 - RNA, 21 nt, Human
uaggaucaacacuguauguug

SEQ ID NO: 13152 - RNA, 22 nt, Human
uaggaucaguuuuaaacaggca

SEQ ID NO: 13153 - RNA, 24 nt, Human
uaggaucaugaugguaaggcaaau

SEQ ID NO: 13154 - RNA, 20 nt, Human
uaggaucuguaccguccagu

SEQ ID NO: 13155 - RNA, 23 nt, Human
uaggcucuuaauucaaucucacu

SEQ ID NO: 13156 - RNA, 22 nt, Human
uaggcuuuagucccuggaauua

SEQ ID NO: 13157 - RNA, 24 nt, Human
uagggagauaagcacuauuuagaa

SEQ ID NO: 13158 - RNA, 22 nt, Human
uagggcuugcauuccuuugaga

SEQ ID NO: 13159 - RNA, 24 nt, Human
uaggguauuucuccuugauaaaug

SEQ ID NO: 13160 - RNA, 24 nt, Human
uagggucucuagaaggcagguagu

SEQ ID NO: 13161 - RNA, 24 nt, Human
uaggucccuguugaaggcuaggca

SEQ ID NO: 13162 - RNA, 24 nt, Human
uagguccgcgcugucuuccgcgcc

SEQ ID NO: 13163 - RNA, 24 nt, Human
uaggugccauuagcucuuagggag

SEQ ID NO: 13164 - RNA, 24 nt, Human
uaggugugugccacgaugcuggcu

SEQ ID NO: 13165 - RNA, 24 nt, Human
uagguuccaguaaugggcaguuug

SEQ ID NO: 13166 - RNA, 24 nt, Human
uagguucuaggggugcaagccucu

SEQ ID NO: 13167 - RNA, 22 nt, Human
uagguugugcgcuccuuaugag

SEQ ID NO: 13168 - RNA, 22 nt, Human
uagguuuguucucacuggaacu

SEQ ID NO: 13169 - RNA, 24 nt, Human
uaguacuuuuacacguuguaugac

SEQ ID NO: 13170 - RNA, 24 nt, Human
uaguagagaugggguuucaccuug

SEQ ID NO: 13171 - RNA, 24 nt, Human
uaguaguaucucauuuugguuuua

SEQ ID NO: 13172 - RNA, 24 nt, Human
uaguaguggugccuucgcccaaag

SEQ ID NO: 13173 - RNA, 24 nt, Human
uaguauuuauaaucauuuacuugu

SEQ ID NO: 13174 - RNA, 24 nt, Human
uaguauuucauaccgccugaaaug

SEQ ID NO: 13175 - RNA, 22 nt, Human
uaguggaaccuucuaaaugacg

SEQ ID NO: 13176 - RNA, 24 nt, Human
uaguggagauaggguuucaccaug

SEQ ID NO: 13177 - RNA, 24 nt, Human
uaguuuucugcccaguggaggcug

SEQ ID NO: 13178 - RNA, 24 nt, Human
uauaaaaaauacuugcugucacaa

SEQ ID NO: 13179 - RNA, 24 nt, Human
uauaacaaggcacaagauuuggaa

SEQ ID NO: 13180 - RNA, 24 nt, Human
uauaagaacauucuagaagguugu

SEQ ID NO: 13181 - RNA, 24 nt, Human
uauacuguauuguuuuuauuugua

SEQ ID NO: 13182 - RNA, 24 nt, Human
uauagagacuucaguagguauaaa

SEQ ID NO: 13183 - RNA, 24 nt, Human
uauagcaaugauuauaaagcuggg

SEQ ID NO: 13184 - RNA, 24 nt, Human
uauaguaaccuuaaaaagaacauu

SEQ ID NO: 13185 - RNA, 24 nt, Human
uauaguaauggccuucagcauccu

SEQ ID NO: 13186 - RNA, 20 nt, Human
uauaguguggaucaggaaaa

SEQ ID NO: 13187 - RNA, 24 nt, Human
uauaguguuaggucagacacggcu

SEQ ID NO: 13188 - RNA, 24 nt, Human
uauaguuucuccugaacaccugcu

SEQ ID NO: 13189 - RNA, 24 nt, Human
uauaucaucuggguugccuuuuug

SEQ ID NO: 13190 - RNA, 24 nt, Human
uauaugcuccaucaucacucuccu

SEQ ID NO: 13191 - RNA, 24 nt, Human
uauauggauccaauggcaagauca

SEQ ID NO: 13192 - RNA, 24 nt, Human
uaucaagcacuucaggguuguaga

SEQ ID NO: 13193 - RNA, 24 nt, Human
uaucaaggaagggcaaggcgugau

SEQ ID NO: 13194 - RNA, 18 nt, Human
uaucaaggaagggcaggc

SEQ ID NO: 13195 - RNA, 24 nt, Human
uaucaagucagcacacaccuuuuc

SEQ ID NO: 13196 - RNA, 24 nt, Human
uaucacacucacaaauuugguguc

SEQ ID NO: 13197 - RNA, 21 nt, Human
uaucacagaaugcagaauugg

SEQ ID NO: 13198 - RNA, 24 nt, Human
uaucacaguuuacuuauuuacuua

SEQ ID NO: 13199 - RNA, 22 nt, Human
uaucacccaggcuggagugcag

SEQ ID NO: 13200 - RNA, 24 nt, Human
uaucagcgucugaugccuucuucc

SEQ ID NO: 13201 - RNA, 24 nt, Human
uaucaggccauuaggacccgagga

SEQ ID NO: 13202 - RNA, 24 nt, Human
uaucaguggauggcauaauuaacu

SEQ ID NO: 13203 - RNA, 24 nt, Human
uaucauaaaauaaaugcugcgcug

SEQ ID NO: 13204 - RNA, 24 nt, Human
uaucaugucgcccacgcgggucac

SEQ ID NO: 13205 - RNA, 24 nt, Human
uauccagccuugauacccauuacc

SEQ ID NO: 13206 - RNA, 24 nt, Human
uauccaguaucuccgugauuaccu

SEQ ID NO: 13207 - RNA, 22 nt, Human
uauccaguguaaauuguugagc

SEQ ID NO: 13208 - RNA, 24 nt, Human
uaucccaaugacuaaaguaagaau

SEQ ID NO: 13209 - RNA, 24 nt, Human
uaucccagaggcauccuuccugga

SEQ ID NO: 13210 - RNA, 24 nt, Human
uaucccuuuuaaagagguuuauuc

SEQ ID NO: 13211 - RNA, 22 nt, Human
uauccugaacuguauccaaccc

SEQ ID NO: 13212 - RNA, 24 nt, Human
uauccuuguuuuuaacuguugugg

SEQ ID NO: 13213 - RNA, 24 nt, Human
uaucucaaaucugcuuucauccag

SEQ ID NO: 13214 - RNA, 20 nt, Human
uaucucaucuagauggcacu

SEQ ID NO: 13215 - RNA, 24 nt, Human
uaucucuaccagugguucucaaac

SEQ ID NO: 13216 - RNA, 22 nt, Human
uaucucugaauccaagggugac

SEQ ID NO: 13217 - RNA, 22 nt, Human
uaucucuugccuugaccuccua

SEQ ID NO: 13218 - RNA, 22 nt, Human
uaucucuuuaccaucuuggcuu

SEQ ID NO: 13219 - RNA, 24 nt, Human
uaucugaaaacuacaccgcugugg

SEQ ID NO: 13220 - RNA, 24 nt, Human
uaucugaggaacaaccaacuaguu

SEQ ID NO: 13221 - RNA, 24 nt, Human
uaucuugcugauuuguagaaguga

SEQ ID NO: 13222 - RNA, 24 nt, Human
uaugaaaugguaaaaaguauaugu

SEQ ID NO: 13223 - RNA, 22 nt, Human
uaugaauguaaggaauguggga

SEQ ID NO: 13224 - RNA, 21 nt, Human
uaugacacugcacagggaaug

SEQ ID NO: 13225 - RNA, 24 nt, Human
uaugacagaaucaugaagacuugc

SEQ ID NO: 13226 - RNA, 24 nt, Human
uaugacaggucaccguguguaaau

SEQ ID NO: 13227 - RNA, 24 nt, Human
uaugaccaacugaaagagugggaa

SEQ ID NO: 13228 - RNA, 24 nt, Human
uaugacccagguccaaaaguucca

SEQ ID NO: 13229 - RNA, 23 nt, Human
uaugacugcagagcaaguagcug

SEQ ID NO: 13230 - RNA, 24 nt, Human
uaugaggcugaugaauuugagaug

SEQ ID NO: 13231 - RNA, 24 nt, Human
uaugauaaaugauuauaacgugug

SEQ ID NO: 13232 - RNA, 24 nt, Human
uaugaucgugcuacuuucauggcu

SEQ ID NO: 13233 - RNA, 24 nt, Human
uaugauguacagugggaauguaag

SEQ ID NO: 13234 - RNA, 24 nt, Human
uaugauguggaagcugguuucagc

SEQ ID NO: 13235 - RNA, 24 nt, Human
uaugcaaggucaagagcggagggg

SEQ ID NO: 13236 - RNA, 24 nt, Human
uaugcaguucugagucugugccac

SEQ ID NO: 13237 - RNA, 24 nt, Human
uaugccaaggccaauagcuucacc

SEQ ID NO: 13238 - RNA, 23 nt, Human
uaugccacauagugugucaggag

SEQ ID NO: 13239 - RNA, 24 nt, Human
uaugccagccucuacuucugcugc

SEQ ID NO: 13240 - RNA, 24 nt, Human
uaugccauugucuuuguaauucuu

SEQ ID NO: 13241 - RNA, 22 nt, Human
uaugccggucucucccuggcgc

SEQ ID NO: 13242 - RNA, 24 nt, Human
uauggaguuaaggaaggucacgug

SEQ ID NO: 13243 - RNA, 24 nt, Human
uauggcaacucuuggcuguccuca

SEQ ID NO: 13244 - RNA, 24 nt, Human
uauggcaagaaguccaagcuggag

SEQ ID NO: 13245 - RNA, 24 nt, Human
uauggcaagucacuuugacagaca

SEQ ID NO: 13246 - RNA, 24 nt, Human
uauggcaagucacuuuugacagac

SEQ ID NO: 13247 - RNA, 24 nt, Human
uauggcacuggcguccccacacca

SEQ ID NO: 13248 - RNA, 24 nt, Human
uauggggaacgggugucucaaagg

SEQ ID NO: 13249 - RNA, 24 nt, Human
uauggggcccacaugggugguaac

SEQ ID NO: 13250 - RNA, 24 nt, Human
uauggugcggaggcccuggagagg

SEQ ID NO: 13251 - RNA, 24 nt, Human
uauguacauaguguuuucaauguu

SEQ ID NO: 13252 - RNA, 24 nt, Human
uauguacugcagagucugaugagc

SEQ ID NO: 13253 - RNA, 24 nt, Human
uauguagaauggaaugugaaacau

SEQ ID NO: 13254 - RNA, 21 nt, Human
uaugucaauucagaaauagag

SEQ ID NO: 13255 - RNA, 21 nt, Human
uaugucauaccuccauggggg

SEQ ID NO: 13256 - RNA, 24 nt, Human
uaugucuugcagcccucuuugugu

SEQ ID NO: 13257 - RNA, 24 nt, Human
uaugugauaucaaugaagaaauau

SEQ ID NO: 13258 - RNA, 24 nt, Human
uauguuauauuaaaaccuuguucc

SEQ ID NO: 13259 - RNA, 24 nt, Human
uauguugauaaaaacuuguacauc

SEQ ID NO: 13260 - RNA, 24 nt, Human
uauguuguuuaguguuauauucca

SEQ ID NO: 13261 - RNA, 24 nt, Human
uauguuuguuuucucaucccaaaa

SEQ ID NO: 13262 - RNA, 24 nt, Human
uauuacagauacaaauaagaguac

SEQ ID NO: 13263 - RNA, 22 nt, Human
uauuagagacaauaauguugga

SEQ ID NO: 13264 - RNA, 24 nt, Human
uauuaucaagccaccuaacuccuc

SEQ ID NO: 13265 - RNA, 24 nt, Human
uauuauguguauauauauacacac

SEQ ID NO: 13266 - RNA, 20 nt, Human
uauucagagaaucuaaagca

SEQ ID NO: 13267 - RNA, 24 nt, Human
uauucaggauaucucuaaaguuau

SEQ ID NO: 13268 - RNA, 22 nt, Human
uauucuucaacuuuucuccucu

SEQ ID NO: 13269 - RNA, 24 nt, Human
uauugaguuuaaggguugugugua

SEQ ID NO: 13270 - RNA, 24 nt, Human
uauugcucuuguugauccuuucuu

SEQ ID NO: 13271 - RNA, 24 nt, Human
uauuggacaaauuugguggggagc

SEQ ID NO: 13272 - RNA, 24 nt, Human
uauuggguguuuacucugccccau

SEQ ID NO: 13273 - RNA, 24 nt, Human
uauuguacaaaaggagggaggaac

SEQ ID NO: 13274 - RNA, 24 nt, Human
uauugugacucacauguccuccug

SEQ ID NO: 13275 - RNA, 21 nt, Human
uauuguguuuacuacuuguga

SEQ ID NO: 13276 - RNA, 24 nt, Human
uauuucaaaaaugacuaaaucuga

SEQ ID NO: 13277 - RNA, 22 nt, Human
uauuuguuuuuaaugcugggug

SEQ ID NO: 13278 - RNA, 20 nt, Human
uauuuuaggggccuuaccau

SEQ ID NO: 13279 - RNA, 24 nt, Human
uauuuuauugcaggaggugggggu

SEQ ID NO: 13280 - RNA, 22 nt, Human
uauuuugcucacuucccuauuc

SEQ ID NO: 13281 - RNA, 24 nt, Human
uauuuugggggguaggaaacgggu

SEQ ID NO: 13282 - RNA, 24 nt, Human
uauuuugguaaaauucggguuaaa

SEQ ID NO: 13283 - RNA, 17 nt, Human
uauuuuuggagaggugu

SEQ ID NO: 13284 - RNA, 24 nt, Human
ucaaaaauguuaggauuggggggc

SEQ ID NO: 13285 - RNA, 24 nt, Human
ucaaaauagccuccuggaagaagg

SEQ ID NO: 13286 - RNA, 22 nt, Human
ucaaaaucauuaguugggcuuu

SEQ ID NO: 13287 - RNA, 24 nt, Human
ucaaagauaaauccaaauacugca

SEQ ID NO: 13288 - RNA, 22 nt, Human
ucaaagcugcagauugccugug

SEQ ID NO: 13289 - RNA, 24 nt, Human
ucaaaucuccccaaauugauguau

SEQ ID NO: 13290 - RNA, 24 nt, Human
ucaaauggaaagaaguuugauucc

SEQ ID NO: 13291 - RNA, 24 nt, Human
ucaaaugucugugugcaugucuag

SEQ ID NO: 13292 - RNA, 24 nt, Human
ucaacagacuaugcgucugaagug

SEQ ID NO: 13293 - RNA, 24 nt, Human
ucaacagucagcucagugcuugug

SEQ ID NO: 13294 - RNA, 24 nt, Human
ucaacauuuugugugauccagcau

SEQ ID NO: 13295 - RNA, 22 nt, Human
ucaacuaugauuaccaaagcag

SEQ ID NO: 13296 - RNA, 22 nt, Human
ucaacugcucucccuccuucau

SEQ ID NO: 13297 - RNA, 22 nt, Human
ucaagaaauuauaccucuagga

SEQ ID NO: 13298 - RNA, 24 nt, Human
ucaagaauaccaaagcccauguca

SEQ ID NO: 13299 - RNA, 22 nt, Human
ucaagcgauucucaugccuuag

SEQ ID NO: 13300 - RNA, 24 nt, Human
ucaaggagaaugcuuccaguuuuu

SEQ ID NO: 13301 - RNA, 18 nt, Human
ucaaggguaugcaugugu

SEQ ID NO: 13302 - RNA, 24 nt, Human
ucaaggguuaacacgguucuaggu

SEQ ID NO: 13303 - RNA, 24 nt, Human
ucaaggguuccacacuguugggag

SEQ ID NO: 13304 - RNA, 24 nt, Human
ucaagguuucuuuuguauauaauu

SEQ ID NO: 13305 - RNA, 22 nt, Human
ucaaguaauccaggauaggcug

SEQ ID NO: 13306 - RNA, 24 nt, Human
ucaauauuuuaaaugugaugcagu

SEQ ID NO: 13307 - RNA, 24 nt, Human
ucaaucauuuguacagugacuuau

SEQ ID NO: 13308 - RNA, 22 nt, Human
ucaaugcuuuaaaaagugagag

SEQ ID NO: 13309 - RNA, 24 nt, Human
ucaauggauggccuuccgguccca

SEQ ID NO: 13310 - RNA, 24 nt, Human
ucacaaggauugaaagaugagguu

SEQ ID NO: 13311 - RNA, 24 nt, Human
ucacaaggucaggagaucgagacc

SEQ ID NO: 13312 - RNA, 24 nt, Human
ucacaagguccggagauugagacc

SEQ ID NO: 13313 - RNA, 22 nt, Human
ucacacacucuccuugggugau

SEQ ID NO: 13314 - RNA, 24 nt, Human
ucacagaacaggggcaugaacucu

SEQ ID NO: 13315 - RNA, 24 nt, Human
ucacagaagacuucgugucccacc

SEQ ID NO: 13316 - RNA, 22 nt, Human
ucacagcuguagaucaugcugc

SEQ ID NO: 13317 - RNA, 24 nt, Human
ucacaguaugccugggcucuugga

SEQ ID NO: 13318 - RNA, 22 nt, Human
ucacagugaaccggucucuuuc

SEQ ID NO: 13319 - RNA, 17 nt, Human
ucacaguggaauucguc

SEQ ID NO: 13320 - RNA, 22 nt, Human
ucacauaguaaggaaugcugag

SEQ ID NO: 13321 - RNA, 24 nt, Human
ucacauccacucucaacaaacuca

SEQ ID NO: 13322 - RNA, 24 nt, Human
ucacauggauucacuggcuaauaa

SEQ ID NO: 13323 - RNA, 24 nt, Human
ucacauggauuucugggcggagcg

SEQ ID NO: 13324 - RNA, 24 nt, Human
ucacauugaucucaaagcugaaga

SEQ ID NO: 13325 - RNA, 24 nt, Human
ucaccagccucaggacagauacaa

SEQ ID NO: 13326 - RNA, 22 nt, Human
ucaccaggcuggagugcagugg

SEQ ID NO: 13327 - RNA, 24 nt, Human
ucaccagugaccccagucagugcc

SEQ ID NO: 13328 - RNA, 22 nt, Human
ucacccaggcuggaguucagug

SEQ ID NO: 13329 - RNA, 22 nt, Human
ucaccgagagccugggcucagc

SEQ ID NO: 13330 - RNA, 22 nt, Human
ucaccgaggcuggagugcagug

SEQ ID NO: 13331 - RNA, 22 nt, Human
ucaccugaugaaaaaucaguaa

SEQ ID NO: 13332 - RNA, 24 nt, Human
ucaccuggauggcuuucguguccc

SEQ ID NO: 13333 - RNA, 24 nt, Human
ucacuaaauacugaaaguccuuga

SEQ ID NO: 13334 - RNA, 24 nt, Human
ucacucauacuacagacacuuggc

SEQ ID NO: 13335 - RNA, 24 nt, Human
ucacucgggaggaagaugugccug

SEQ ID NO: 13336 - RNA, 22 nt, Human
ucacucuuaugucucucuccuu

SEQ ID NO: 13337 - RNA, 24 nt, Human
ucacugaaguacucgcauguuguu

SEQ ID NO: 13338 - RNA, 24 nt, Human
ucacugagcuagugacuauuggga

SEQ ID NO: 13339 - RNA, 24 nt, Human
ucacugaggcgucuuggcuacugg

SEQ ID NO: 13340 - RNA, 24 nt, Human
ucacugaucccaaugagcagguac

SEQ ID NO: 13341 - RNA, 24 nt, Human
ucacugcaaacuccaccucccggg

SEQ ID NO: 13342 - RNA, 22 nt, Human
ucacugcaaccuacagcucaug

SEQ ID NO: 13343 - RNA, 24 nt, Human
ucacugcaaccuccgccucccggg

SEQ ID NO: 13344 - RNA, 22 nt, Human
ucacugcaaccuccgccugccg

SEQ ID NO: 13345 - RNA, 24 nt, Human
ucacugcaaccucugccucauggg

SEQ ID NO: 13346 - RNA, 24 nt, Human
ucacugcaaccucugccuccuggg

SEQ ID NO: 13347 - RNA, 22 nt, Human
ucacugcaaccucugcugccug

SEQ ID NO: 13348 - RNA, 22 nt, Human
ucacugcaaccucuggguucaa

SEQ ID NO: 13349 - RNA, 24 nt, Human
ucacugcacccucaaacuccuggg

SEQ ID NO: 13350 - RNA, 24 nt, Human
ucacugcacuccagccugggggaa

SEQ ID NO: 13351 - RNA, 24 nt, Human
ucacugcagccuccaacuccuggg

SEQ ID NO: 13352 - RNA, 24 nt, Human
ucacugcaguccacgaggccacac

SEQ ID NO: 13353 - RNA, 24 nt, Human
ucacugcauccucugccucccggg

SEQ ID NO: 13354 - RNA, 24 nt, Human
ucacugcguucaauuuugaguuuc

SEQ ID NO: 13355 - RNA, 24 nt, Human
ucacuggcgggcucgggaccgggc

SEQ ID NO: 13356 - RNA, 24 nt, Human
ucacugggcagguuuaagaagaag

SEQ ID NO: 13357 - RNA, 24 nt, Human
ucacugguuuuguggcugccuccc

SEQ ID NO: 13358 - RNA, 24 nt, Human
ucacuguaaccuugaacuccuggg

SEQ ID NO: 13359 - RNA, 24 nt, Human
ucacuguguucaauuuugaguuuc

SEQ ID NO: 13360 - RNA, 22 nt, Human
ucacuugccuagggucacacag

SEQ ID NO: 13361 - RNA, 24 nt, Human
ucacuugguuggucguauuguagc

SEQ ID NO: 13362 - RNA, 24 nt, Human
ucagaaacuccuggaaacaucuga

SEQ ID NO: 13363 - RNA, 24 nt, Human
ucagaacacuuaauuuacaaucaa

SEQ ID NO: 13364 - RNA, 24 nt, Human
ucagaaccacagagggcucauugg

SEQ ID NO: 13365 - RNA, 24 nt, Human
ucagaacucauuuggugguggcaa

SEQ ID NO: 13366 - RNA, 22 nt, Human
ucagaagagcguggucaucacc

SEQ ID NO: 13367 - RNA, 18 nt, Human
ucagaagcaaucucuucc

SEQ ID NO: 13368 - RNA, 24 nt, Human
ucagaagcuacuacaugugaaauu

SEQ ID NO: 13369 - RNA, 22 nt, Human
ucagaauagagguucuugguga

SEQ ID NO: 13370 - RNA, 24 nt, Human
ucagacaagcaacccacuggcuug

SEQ ID NO: 13371 - RNA, 24 nt, Human
ucagacucuucacaacuauuccua

SEQ ID NO: 13372 - RNA, 24 nt, Human
ucagaggcagccagaggggacagg

SEQ ID NO: 13373 - RNA, 24 nt, Human
ucagagggguugguguacauuccc

SEQ ID NO: 13374 - RNA, 22 nt, Human
ucagaguaggcuugauguaauc

SEQ ID NO: 13375 - RNA, 22 nt, Human
ucagagugauuucuuuuagguu

SEQ ID NO: 13376 - RNA, 24 nt, Human
ucagcaguuucauaugguuccacc

SEQ ID NO: 13377 - RNA, 22 nt, Human
ucagcccaguggaguugcccuu

SEQ ID NO: 13378 - RNA, 22 nt, Human
ucagccuaauacaggaaaagcu

SEQ ID NO: 13379 - RNA, 23 nt, Human
ucagccuuccgaguagcuggagc

SEQ ID NO: 13380 - RNA, 22 nt, Human
ucagcggcaucacuaccaaaac

SEQ ID NO: 13381 - RNA, 24 nt, Human
ucagcgggggacacaggaagggcu

SEQ ID NO: 13382 - RNA, 24 nt, Human
ucagcuauaggaagaggccauacc

SEQ ID NO: 13383 - RNA, 21 nt, Human
ucaggaacugaugagguucuc

SEQ ID NO: 13384 - RNA, 24 nt, Human
ucaggaagagcucaagaugggagg

SEQ ID NO: 13385 - RNA, 24 nt, Human
ucaggaauaugcggucauuuuauu

SEQ ID NO: 13386 - RNA, 24 nt, Human
ucaggagaccauugcaucauuggc

SEQ ID NO: 13387 - RNA, 24 nt, Human
ucaggagccuccacuuuccccagu

SEQ ID NO: 13388 - RNA, 24 nt, Human
ucaggagugcaacgagguaaaagc

SEQ ID NO: 13389 - RNA, 24 nt, Human
ucaggaguucaucuugauuuuuac

SEQ ID NO: 13390 - RNA, 24 nt, Human
ucaggaguugguguccugccugcg

SEQ ID NO: 13391 - RNA, 22 nt, Human
ucaggauaggucaacugcugua

SEQ ID NO: 13392 - RNA, 24 nt, Human
ucaggauccacaugcagcuuguca

SEQ ID NO: 13393 - RNA, 24 nt, Human
ucaggcgcaguacaaguuggggca

SEQ ID NO: 13394 - RNA, 24 nt, Human
ucaggcuccugcugaggggcccga

SEQ ID NO: 13395 - RNA, 24 nt, Human
ucaggcuccugcuucccagagagu

SEQ ID NO: 13396 - RNA, 22 nt, Human
ucaggcugaggucaucugcauc

SEQ ID NO: 13397 - RNA, 22 nt, Human
ucaggcuuuugugauuugagac

SEQ ID NO: 13398 - RNA, 24 nt, Human
ucagggaggugucugcaguauuau

SEQ ID NO: 13399 - RNA, 24 nt, Human
ucagggcggggagcacugcaggcc

SEQ ID NO: 13400 - RNA, 24 nt, Human
ucagggguuucucacucucuuccu

SEQ ID NO: 13401 - RNA, 24 nt, Human
ucagguggaccaucuucuagggcc

SEQ ID NO: 13402 - RNA, 24 nt, Human
ucagguggagcaggaaagccuggu

SEQ ID NO: 13403 - RNA, 24 nt, Human
ucagguggaugcgagaaauaucca

SEQ ID NO: 13404 - RNA, 24 nt, Human
ucaggugguggauccaaaacuuaa

SEQ ID NO: 13405 - RNA, 22 nt, Human
ucagguuccugauuggaguucu

SEQ ID NO: 13406 - RNA, 22 nt, Human
ucagguuugcaaccucgggcaa

SEQ ID NO: 13407 - RNA, 24 nt, Human
ucagucacuugcacaauuaauccu

SEQ ID NO: 13408 - RNA, 24 nt, Human
ucagucauccaaacuagugccauu

SEQ ID NO: 13409 - RNA, 24 nt, Human
ucagucccugguuucucuacuuuu

SEQ ID NO: 13410 - RNA, 24 nt, Human
ucaguccuuuucucgucgaugguc

SEQ ID NO: 13411 - RNA, 22 nt, Human
ucagucguguggaaaucgaugu

SEQ ID NO: 13412 - RNA, 24 nt, Human
ucagucuauagugggaaagcaggu

SEQ ID NO: 13413 - RNA, 24 nt, Human
ucagucuucuccuaagagugacaa

SEQ ID NO: 13414 - RNA, 24 nt, Human
ucagugaacucaugagcgggacag

SEQ ID NO: 13415 - RNA, 24 nt, Human
ucagugagguaaaucggaaugcac

SEQ ID NO: 13416 - RNA, 22 nt, Human
ucagugcaaacuaagcagggca

SEQ ID NO: 13417 - RNA, 24 nt, Human
ucagugcaacgaaggcugcagcug

SEQ ID NO: 13418 - RNA, 23 nt, Human
ucagugcgguucagcucaaggga

SEQ ID NO: 13419 - RNA, 24 nt, Human
ucaguggagaaggaguuggaccag

SEQ ID NO: 13420 - RNA, 24 nt, Human
ucagugggcuggacauggaggaag

SEQ ID NO: 13421 - RNA, 24 nt, Human
ucagugguaggcugauucugauuu

SEQ ID NO: 13422 - RNA, 22 nt, Human
ucagugguccaguggcacauuc

SEQ ID NO: 13423 - RNA, 24 nt, Human
ucaguuggaagacacccugaaauc

SEQ ID NO: 13424 - RNA, 24 nt, Human
ucaguuggagagagcguugaggag

SEQ ID NO: 13425 - RNA, 24 nt, Human
ucauaaggaauuaacucaugagau

SEQ ID NO: 13426 - RNA, 23 nt, Human
ucauaggucacauuccacaagga

SEQ ID NO: 13427 - RNA, 22 nt, Human
ucauauugagccuccuacugaa

SEQ ID NO: 13428 - RNA, 24 nt, Human
ucaucaggaaaauguaaaaaagau

SEQ ID NO: 13429 - RNA, 22 nt, Human
ucaucuaagcuggccaacuugg

SEQ ID NO: 13430 - RNA, 24 nt, Human
ucaucuggugacuccugauucugc

SEQ ID NO: 13431 - RNA, 24 nt, Human
ucaugcagccaucaggacacaggc

SEQ ID NO: 13432 - RNA, 20 nt, Human
ucaugcugcaauuuguuaga

SEQ ID NO: 13433 - RNA, 24 nt, Human
ucaugcugcaauuuguuagaauaa

SEQ ID NO: 13434 - RNA, 24 nt, Human
ucaugcugucagcacuugcaacgg

SEQ ID NO: 13435 - RNA, 24 nt, Human
ucauggaggggauacaagacggaa

SEQ ID NO: 13436 - RNA, 24 nt, Human
ucauggccgaguuaucccugaacc

SEQ ID NO: 13437 - RNA, 24 nt, Human
ucauggguggaaaagaccaggcuu

SEQ ID NO: 13438 - RNA, 22 nt, Human
ucaugggugggggugugugucg

SEQ ID NO: 13439 - RNA, 24 nt, Human
ucauugaggccaggagcucugccc

SEQ ID NO: 13440 - RNA, 22 nt, Human
ucauugcaaccuccaccuccug

SEQ ID NO: 13441 - RNA, 24 nt, Human
ucauuggagauugugccacccaag

SEQ ID NO: 13442 - RNA, 22 nt, Human
ucauuggaggguugagcuuuga

SEQ ID NO: 13443 - RNA, 22 nt, Human
ucauugggcuuugcuuaucuuu

SEQ ID NO: 13444 - RNA, 22 nt, Human
ucauugguugcauaauuugauc

SEQ ID NO: 13445 - RNA, 24 nt, Human
ucauuuauuuuguacuguguuagg

SEQ ID NO: 13446 - RNA, 22 nt, Human
uccaaaauuaaagguuguagaa

SEQ ID NO: 13447 - RNA, 24 nt, Human
uccaaagacaagguuucccuggaa

SEQ ID NO: 13448 - RNA, 24 nt, Human
uccaaagagagucagagcuaagca

SEQ ID NO: 13449 - RNA, 22 nt, Human
uccaaauaaauuccccgcgcgg

SEQ ID NO: 13450 - RNA, 24 nt, Human
uccaagagaucaaggucgagcucu

SEQ ID NO: 13451 - RNA, 24 nt, Human
uccaagauggauggcucccagucg

SEQ ID NO: 13452 - RNA, 24 nt, Human
uccaaguacgagaaguaacaggag

SEQ ID NO: 13453 - RNA, 24 nt, Human
uccaaguaguugggacuacaggca

SEQ ID NO: 13454 - RNA, 24 nt, Human
uccaaugugugaggauggcuggac

SEQ ID NO: 13455 - RNA, 24 nt, Human
uccacaacgguugaacuaauuucc

SEQ ID NO: 13456 - RNA, 24 nt, Human
uccacaggauaaagccacgcuggu

SEQ ID NO: 13457 - RNA, 24 nt, Human
uccacagguucacuaacgggggca

SEQ ID NO: 13458 - RNA, 20 nt, Human
uccacauguggaaguggggu

SEQ ID NO: 13459 - RNA, 24 nt, Human
uccaccauccaggugugcuuggau

SEQ ID NO: 13460 - RNA, 24 nt, Human
uccacuugacaacugacuucugug

SEQ ID NO: 13461 - RNA, 24 nt, Human
uccaggaagggccugguguugcag

SEQ ID NO: 13462 - RNA, 22 nt, Human
uccaggaggcagagguugcagu

SEQ ID NO: 13463 - RNA, 24 nt, Human
uccaggauguuaccguuccugcug

SEQ ID NO: 13464 - RNA, 19 nt, Human
uccaggcacacacagacac

SEQ ID NO: 13465 - RNA, 24 nt, Human
uccaggggagguuugcagaacuuc

SEQ ID NO: 13466 - RNA, 24 nt, Human
uccagguaggaggccaggcggucg

SEQ ID NO: 13467 - RNA, 22 nt, Human
uccaggucaacauuacuguccu

SEQ ID NO: 13468 - RNA, 24 nt, Human
uccagguguaucuuagcuaaaacu

SEQ ID NO: 13469 - RNA, 24 nt, Human
uccagguuacagguagauuuaaaa

SEQ ID NO: 13470 - RNA, 24 nt, Human
uccagguucgaacccaggaucaca

SEQ ID NO: 13471 - RNA, 22 nt, Human
uccaguacaggucucucauuuc

SEQ ID NO: 13472 - RNA, 24 nt, Human
uccaguaucccaaacuuucuaguc

SEQ ID NO: 13473 - RNA, 22 nt, Human
uccagucuggugagaguguuaa

SEQ ID NO: 13474 - RNA, 22 nt, Human
uccagugaaacaggucucuuug

SEQ ID NO: 13475 - RNA, 24 nt, Human
uccauaaauaccauaguuaaaugu

SEQ ID NO: 13476 - RNA, 24 nt, Human
uccauccugagguuuggggggaga

SEQ ID NO: 13477 - RNA, 24 nt, Human
uccaugaccaaaaaucucugaaaa

SEQ ID NO: 13478 - RNA, 24 nt, Human
uccauggcaggcggguacaagggg

SEQ ID NO: 13479 - RNA, 24 nt, Human
uccauggcuaguuguuucuuuuuc

SEQ ID NO: 13480 - RNA, 24 nt, Human
uccauggggcgcccagucgcaggc

SEQ ID NO: 13481 - RNA, 22 nt, Human
uccauguucugggugauggaaa

SEQ ID NO: 13482 - RNA, 24 nt, Human
ucccaaaguuaaccuuggcuaucu

SEQ ID NO: 13483 - RNA, 21 nt, Human
ucccaagcagucacuaggugg

SEQ ID NO: 13484 - RNA, 24 nt, Human
ucccaauacuuuagaaaaauuacu

SEQ ID NO: 13485 - RNA, 24 nt, Human
ucccacagaagcuacagcugccag

SEQ ID NO: 13486 - RNA, 24 nt, Human
ucccacauccaggaugacaccuua

SEQ ID NO: 13487 - RNA, 24 nt, Human
ucccacuuaauugaauacuuagaa

SEQ ID NO: 13488 - RNA, 24 nt, Human
ucccagaagguguccagccgagac

SEQ ID NO: 13489 - RNA, 24 nt, Human
ucccagagauuuugguacguugug

SEQ ID NO: 13490 - RNA, 24 nt, Human
ucccagcuaguucacuccuuucgc

SEQ ID NO: 13491 - RNA, 24 nt, Human
ucccagggcuccagggcccuccuc

SEQ ID NO: 13492 - RNA, 24 nt, Human
ucccagggcugggggacuuccuuc

SEQ ID NO: 13493 - RNA, 24 nt, Human
ucccaguaucgaggggcaaacuua

SEQ ID NO: 13494 - RNA, 24 nt, Human
ucccagugcaacacuaccuuugug

SEQ ID NO: 13495 - RNA, 22 nt, Human
uccccaagccuuguaccagcgu

SEQ ID NO: 13496 - RNA, 24 nt, Human
uccccaauaaaaugcuguucauua

SEQ ID NO: 13497 - RNA, 24 nt, Human
uccccagaaauugacugagagaca

SEQ ID NO: 13498 - RNA, 24 nt, Human
uccccagcaaccaggccuggccuc

SEQ ID NO: 13499 - RNA, 24 nt, Human
uccccagugucuuugggggucugu

SEQ ID NO: 13500 - RNA, 22 nt, Human
uccccaucucuuuuuccccaca

SEQ ID NO: 13501 - RNA, 24 nt, Human
ucccccagucagccuggcccugcu

SEQ ID NO: 13502 - RNA, 21 nt, Human
ucccccugacccaccaggcca

SEQ ID NO: 13503 - RNA, 24 nt, Human
uccccgaaagcacuggagaagggg

SEQ ID NO: 13504 - RNA, 24 nt, Human
uccccgaggccgcgccgggagcuc

SEQ ID NO: 13505 - RNA, 22 nt, Human
uccccgauggcccacugcguga

SEQ ID NO: 13506 - RNA, 24 nt, Human
uccccggaugucccucagacccgc

SEQ ID NO: 13507 - RNA, 21 nt, Human
uccccgggaaaacguucguca

SEQ ID NO: 13508 - RNA, 24 nt, Human
uccccggggauccugcagcucuag

SEQ ID NO: 13509 - RNA, 24 nt, Human
uccccgguacucgccggccggagc

SEQ ID NO: 13510 - RNA, 20 nt, Human
uccccguguguguuggcaua

SEQ ID NO: 13511 - RNA, 24 nt, Human
uccccuaagcuccagggcccaggg

SEQ ID NO: 13512 - RNA, 24 nt, Human
uccccugauaaugcaucaccuucc

SEQ ID NO: 13513 - RNA, 24 nt, Human
uccccuggguccucuguguaguua

SEQ ID NO: 13514 - RNA, 24 nt, Human
uccccuuguccacugauggggggu

SEQ ID NO: 13515 - RNA, 24 nt, Human
ucccgaaagucccaggcuguugga

SEQ ID NO: 13516 - RNA, 24 nt, Human
ucccgauuccuguaguagcggcug

SEQ ID NO: 13517 - RNA, 24 nt, Human
ucccgcacagccugacaggguaca

SEQ ID NO: 13518 - RNA, 24 nt, Human
ucccgcagugggucccggagagga

SEQ ID NO: 13519 - RNA, 24 nt, Human
ucccgcugaugauuaugagucuga

SEQ ID NO: 13520 - RNA, 24 nt, Human
ucccggcucucccgcccucccucc

SEQ ID NO: 13521 - RNA, 24 nt, Human
ucccggggggcaggcgggggccag

SEQ ID NO: 13522 - RNA, 24 nt, Human
ucccgggguaaucacuccccaaua

SEQ ID NO: 13523 - RNA, 24 nt, Human
ucccgggguugccugaggcagagc

SEQ ID NO: 13524 - RNA, 22 nt, Human
ucccggguuauccucgcuggca

SEQ ID NO: 13525 - RNA, 24 nt, Human
ucccgguuccuaacggacugcaag

SEQ ID NO: 13526 - RNA, 24 nt, Human
ucccguggaugacugucuuugaac

SEQ ID NO: 13527 - RNA, 20 nt, Human
ucccuaaaugcaguagauua

SEQ ID NO: 13528 - RNA, 24 nt, Human
ggggaucgagggcuggcggggaga

SEQ ID NO: 13529 - RNA, 22 nt, Human
ggggcacaugccaaacaccaca

SEQ ID NO: 13530 - RNA, 22 nt, Human
gggggagaauaugugaaggggg

SEQ ID NO: 13531 - RNA, 19 nt, Human
gggggaugauagcagccag

SEQ ID NO: 13532 - RNA, 24 nt, Human
ggggggcccaggccgagcuccuug

SEQ ID NO: 13533 - RNA, 22 nt, Human
ggggggucucuccuuucuccug

SEQ ID NO: 13534 - RNA, 22 nt, Human
ggggucagaagacuggauugug

SEQ ID NO: 13535 - RNA, 22 nt, Human
gggguuucuguaggcacuuuau

SEQ ID NO: 13536 - RNA, 22 nt, Human
ggguccaccucugucaaaggaa

SEQ ID NO: 13537 - RNA, 24 nt, Human
gggugaguggcagacccuugggcc

SEQ ID NO: 13538 - RNA, 22 nt, Human
ggguggaguuuucagcccucug

SEQ ID NO: 13539 - RNA, 22 nt, Human
ggguggcucacguuauugcggc

SEQ ID NO: 13540 - RNA, 22 nt, Human
gguacagaugggucuggcacau

SEQ ID NO: 13541 - RNA, 22 nt, Human
gguagcuagaggggagauagca

SEQ ID NO: 13542 - RNA, 22 nt, Human
gguagcuuauuaaagaaacucc

SEQ ID NO: 13543 - RNA, 22 nt, Human
gguauggaccccaugauggaac

SEQ ID NO: 13544 - RNA, 22 nt, Human
gguauguuauaucccuggggca

SEQ ID NO: 13545 - RNA, 22 nt, Human
gguauuaauccuuagcaucagg

SEQ ID NO: 13546 - RNA, 22 nt, Human
ggucauucaaggaacgucaagu

SEQ ID NO: 13547 - RNA, 22 nt, Human
ggucauucaagggaagucaagu

SEQ ID NO: 13548 - RNA, 22 nt, Human
ggucauucacggcaagucaagu

SEQ ID NO: 13549 - RNA, 22 nt, Human
gguccacaaggggagagcaggg

SEQ ID NO: 13550 - RNA, 23 nt, Human
gguccagcaggcagguacaagcc

SEQ ID NO: 13551 - RNA, 24 nt, Human
ggugaauucauguguaguacaagc

SEQ ID NO: 13552 - RNA, 22 nt, Human
ggugacuaucauuugaacaacu

SEQ ID NO: 13553 - RNA, 21 nt, Human
ggugaucgaggagccuggccu

SEQ ID NO: 13554 - RNA, 24 nt, Human
ggugauggcguugguaaaggcuuc

SEQ ID NO: 13555 - RNA, 24 nt, Human
ggugaugguugucauguguggguc

SEQ ID NO: 13556 - RNA, 22 nt, Human
ggugcagaucauggauagagcu

SEQ ID NO: 13557 - RNA, 24 nt, Human
ggugcagucgucacucgcgucugg

SEQ ID NO: 13558 - RNA, 24 nt, Human
ggugcaguggaaauccuugccuug

SEQ ID NO: 13559 - RNA, 22 nt, Human
gguguuguguucagggcccuuc

SEQ ID NO: 13560 - RNA, 24 nt, Human
gguguuuuggugucuguuuuugcc

SEQ ID NO: 13561 - RNA, 22 nt, Human
gguuaugcacuacuuaugagaa

SEQ ID NO: 13562 - RNA, 22 nt, Human
gguuccuuguguggcaacagua

SEQ ID NO: 13563 - RNA, 22 nt, Human
gguucucaaaugagggacauuu

SEQ ID NO: 13564 - RNA, 22 nt, Human
gguucuucagaggaagcuuuuu

SEQ ID NO: 13565 - RNA, 22 nt, Human
gguuggaguugagucucacguu

SEQ ID NO: 13566 - RNA, 22 nt, Human
gguuuggggagaugguggagga

SEQ ID NO: 13567 - RNA, 22 nt, Human
gguuuguuacauagguaaacgu

SEQ ID NO: 13568 - RNA, 22 nt, Human
gguuuugacucugaggaugaca

SEQ ID NO: 13569 - RNA, 24 nt, Human
guaaucccaaccuuugagauagca

SEQ ID NO: 13570 - RNA, 22 nt, Human
guagacagcaagaaaaugaaga

SEQ ID NO: 13571 - RNA, 24 nt, Human
guagaguauucuucaggcuuaaag

SEQ ID NO: 13572 - RNA, 22 nt, Human
guagccauugcacugcagauga

SEQ ID NO: 13573 - RNA, 22 nt, Human
guaggggagugaguuuccaucu

SEQ ID NO: 13574 - RNA, 24 nt, Human
guagucccggauccuuaguuggcu

SEQ ID NO: 13575 - RNA, 22 nt, Human
guaguguggaaaucuuuuugcc

SEQ ID NO: 13576 - RNA, 22 nt, Human
guauggagaucucugcccuugu

SEQ ID NO: 13577 - RNA, 23 nt, Human
gucaagggauggaaagucaccgu

SEQ ID NO: 13578 - RNA, 22 nt, Human
gucacacagcugaacaguggug

SEQ ID NO: 13579 - RNA, 24 nt, Human
gucacuuccagaacugaguccggu

SEQ ID NO: 13580 - RNA, 24 nt, Human
gucaucuuaagccucauccuacau

SEQ ID NO: 13581 - RNA, 22 nt, Human
guccaggcucucuuucacacuc

SEQ ID NO: 13582 - RNA, 24 nt, Human
guccagggcgcggcaugggcgucc

SEQ ID NO: 13583 - RNA, 22 nt, Human
guccagugcucacugccgacau

SEQ ID NO: 13584 - RNA, 24 nt, Human
guccauccucaagccacgauaaga

SEQ ID NO: 13585 - RNA, 22 nt, Human
guccauuccuuuaauguccuua

SEQ ID NO: 13586 - RNA, 24 nt, Human
gucccaaaggcagaaggcaguauu

SEQ ID NO: 13587 - RNA, 24 nt, Human
gucccaauggccaacgugcagcgg

SEQ ID NO: 13588 - RNA, 24 nt, Human
guccccuucagcaaggagggcggc

SEQ ID NO: 13589 - RNA, 24 nt, Human
guccgugggcucagguucucaucc

SEQ ID NO: 13590 - RNA, 24 nt, Human
guccuauaauguaggaaugugaga

SEQ ID NO: 13591 - RNA, 20 nt, Human
guccuaucuggggucuccuc

SEQ ID NO: 13592 - RNA, 22 nt, Human
guccucauuaauuuuccucaug

SEQ ID NO: 13593 - RNA, 22 nt, Human
guccuccuagcuggccugccca

SEQ ID NO: 13594 - RNA, 24 nt, Human
guccucgggugccuuuccaaaaca

SEQ ID NO: 13595 - RNA, 24 nt, Human
guccucuucuuuucccagagcucc

SEQ ID NO: 13596 - RNA, 24 nt, Human
guccuguuccucaugauguuggga

SEQ ID NO: 13597 - RNA, 21 nt, Human
guccuuggauuucucuuucuc

SEQ ID NO: 13598 - RNA, 24 nt, Human
guccuuguggccuuccuugaggag

SEQ ID NO: 13599 - RNA, 22 nt, Human
gucgggaggaaaagaaagaaga

SEQ ID NO: 13600 - RNA, 22 nt, Human
gucucccuuccuagccauggaa

SEQ ID NO: 13601 - RNA, 22 nt, Human
gucugcugucuacacuacacac

SEQ ID NO: 13602 - RNA, 22 nt, Human
gucuggcuuucauggcucugca

SEQ ID NO: 13603 - RNA, 20 nt, Human
gucuuucugauugcaagcug

SEQ ID NO: 13604 - RNA, 24 nt, Human
gugaagcucuacuacccgccccgu

SEQ ID NO: 13605 - RNA, 24 nt, Human
gugaaguauuuuguuaccucaguc

SEQ ID NO: 13606 - RNA, 24 nt, Human
gugaaguggugaaaggaguuucuc

SEQ ID NO: 13607 - RNA, 24 nt, Human
gugacucuccuguggggucccaug

SEQ ID NO: 13608 - RNA, 22 nt, Human
gugagcaaaguuucaggaguag

SEQ ID NO: 13609 - RNA, 24 nt, Human
gugagcccugccgcugucccaugg

SEQ ID NO: 13610 - RNA, 24 nt, Human
gugaugaccuugaagcuguagcca

SEQ ID NO: 13611 - RNA, 23 nt, Human
gugaugcuccuccagcuccucgu

SEQ ID NO: 13612 - RNA, 22 nt, Human
gugcacaacgagcagguuuguu

SEQ ID NO: 13613 - RNA, 24 nt, Human
gugcacucuauucaagugcaagga

SEQ ID NO: 13614 - RNA, 24 nt, Human
gugcagagaaccauugcaagacuu

SEQ ID NO: 13615 - RNA, 24 nt, Human
gugcagcaucucuuuggcaggugg

SEQ ID NO: 13616 - RNA, 24 nt, Human
gugcaggacuuugaugcuuggggu

SEQ ID NO: 13617 - RNA, 24 nt, Human
gugcaucuuuuaaccagccgaaug

SEQ ID NO: 13618 - RNA, 22 nt, Human
gugcauguuuauucagugugca

SEQ ID NO: 13619 - RNA, 24 nt, Human
gugcauugaaaggucuccaggccu

SEQ ID NO: 13620 - RNA, 24 nt, Human
gugcauuguccuguuuucacuuuu

SEQ ID NO: 13621 - RNA, 24 nt, Human
gugccugggggccuaggugaggcu

SEQ ID NO: 13622 - RNA, 24 nt, Human
gugcucaguccuacagcugcaugg

SEQ ID NO: 13623 - RNA, 24 nt, Human
gugcugugaugcgugaggcagccg

SEQ ID NO: 13624 - RNA, 22 nt, Human
gugcuuccauuuccccaucugu

SEQ ID NO: 13625 - RNA, 22 nt, Human
gugcuuccuuaaucccuuuacu

SEQ ID NO: 13626 - RNA, 22 nt, Human
gugcuuguaguugcagcuuagu

SEQ ID NO: 13627 - RNA, 22 nt, Human
gugcuuguuggcuuuaacaucc

SEQ ID NO: 13628 - RNA, 24 nt, Human
gugcuuucacaaaauggagagugg

SEQ ID NO: 13629 - RNA, 22 nt, Human
gugcuuucccaaccuucuuggu

SEQ ID NO: 13630 - RNA, 24 nt, Human
gugcuuuuccaagguuagagguuu

SEQ ID NO: 13631 - RNA, 24 nt, Human
guggacagcgaggccaggauggag

SEQ ID NO: 13632 - RNA, 24 nt, Human
guggacuaccugccugagagggau

SEQ ID NO: 13633 - RNA, 24 nt, Human
guggagcuagaaguuccuuggcug

SEQ ID NO: 13634 - RNA, 24 nt, Human
guggaggaggcgauugccuauggc

SEQ ID NO: 13635 - RNA, 22 nt, Human
guggaguagcugaagcagccaa

SEQ ID NO: 13636 - RNA, 22 nt, Human
guggaguucucugcuaguccua

SEQ ID NO: 13637 - RNA, 24 nt, Human
guggaucgaccagaacucggcccu

SEQ ID NO: 13638 - RNA, 24 nt, Human
guggaucuaccauucugguguuug

SEQ ID NO: 13639 - RNA, 24 nt, Human
guggccccacacaccagucccagc

SEQ ID NO: 13640 - RNA, 24 nt, Human
guggcggcggcggcggcggcagca

SEQ ID NO: 13641 - RNA, 22 nt, Human
guggcuaucaaauuaggacuca

SEQ ID NO: 13642 - RNA, 24 nt, Human
gugggagcuggcgugcuuggcucu

SEQ ID NO: 13643 - RNA, 24 nt, Human
guggucccuccauguugucacagc

SEQ ID NO: 13644 - RNA, 24 nt, Human
guggucugcucauaguuugugugc

SEQ ID NO: 13645 - RNA, 24 nt, Human
guggugcaggggacaagaggcugu

SEQ ID NO: 13646 - RNA, 24 nt, Human
guggugcugccgcugcucccuggc

SEQ ID NO: 13647 - RNA, 21 nt, Human
guggugcugguguuugggaug

SEQ ID NO: 13648 - RNA, 24 nt, Human
gugguggcagacuuugggcuguca

SEQ ID NO: 13649 - RNA, 24 nt, Human
gugguucagucagggaggucagaa

SEQ ID NO: 13650 - RNA, 24 nt, Human
gugguuccgcaauugccuccagcu

SEQ ID NO: 13651 - RNA, 23 nt, Human
gugguugggaaauguuaccauau

SEQ ID NO: 13652 - RNA, 24 nt, Human
gugguuucgcauagugccaagcac

SEQ ID NO: 13653 - RNA, 23 nt, Human
guguauuggccaggagaggacac

SEQ ID NO: 13654 - RNA, 24 nt, Human
gugugcuguuagaaggguucuggg

SEQ ID NO: 13655 - RNA, 24 nt, Human
gugugcuucucgauuuggcuucga

SEQ ID NO: 13656 - RNA, 22 nt, Human
guguggccagguccauugugcu

SEQ ID NO: 13657 - RNA, 22 nt, Human
gugugugauaaggacacagaua

SEQ ID NO: 13658 - RNA, 22 nt, Human
guguguggaaaugcagaugacc

SEQ ID NO: 13659 - RNA, 22 nt, Human
guguguguauauguuucugucc

SEQ ID NO: 13660 - RNA, 22 nt, Human
gugugugugcauguaccgggga

SEQ ID NO: 13661 - RNA, 22 nt, Human
guguguuugagcuggaagugcc

SEQ ID NO: 13662 - RNA, 22 nt, Human
guguuagcauggaacagaacgc

SEQ ID NO: 13663 - RNA, 21 nt, Human
guguuggcugagauuguccau

SEQ ID NO: 13664 - RNA, 24 nt, Human
guuaaauuaacauugcauaaacac

SEQ ID NO: 13665 - RNA, 24 nt, Human
guucacaccagcuuguuucaguuu

SEQ ID NO: 13666 - RNA, 24 nt, Human
guucaugggucgcuugaugugccc

SEQ ID NO: 13667 - RNA, 24 nt, Human
guucauuagcgugaagauguugga

SEQ ID NO: 13668 - RNA, 24 nt, Human
guuccaguuaggggcaguagaguu

SEQ ID NO: 13669 - RNA, 23 nt, Human
guucccguugccuuugcugaggg

SEQ ID NO: 13670 - RNA, 22 nt, Human
guucugcugagauacgugcucu

SEQ ID NO: 13671 - RNA, 22 nt, Human
guucuucugggagaaaaauggc

SEQ ID NO: 13672 - RNA, 24 nt, Human
guugcaauggugagaucucaaaaa

SEQ ID NO: 13673 - RNA, 24 nt, Human
guugcaguccggaacuguugcugg

SEQ ID NO: 13674 - RNA, 22 nt, Human
guugccaacucaguccuuguac

SEQ ID NO: 13675 - RNA, 22 nt, Human
guugggccaaaggugauuacuu

SEQ ID NO: 13676 - RNA, 22 nt, Human
guugggugugagggggguccca

SEQ ID NO: 13677 - RNA, 22 nt, Human
guuggugacauugacuaggcau

SEQ ID NO: 13678 - RNA, 22 nt, Human
guuguuaucuguaccuaaguua

SEQ ID NO: 13679 - RNA, 22 nt, Human
guuuaagguuuucuccauggcc

SEQ ID NO: 13680 - RNA, 22 nt, Human
guuuagcucaaguaugcagcuu

SEQ ID NO: 13681 - RNA, 22 nt, Human
guuucccaggugccagauguga

SEQ ID NO: 13682 - RNA, 22 nt, Human
guuuggcacugaaucauauaca

SEQ ID NO: 13683 - RNA, 24 nt, Human
guuuuggucaaggaugguagccca

SEQ ID NO: 13684 - RNA, 24 nt, Human
uaaaaaggcuuuauaauuacagau

SEQ ID NO: 13685 - RNA, 24 nt, Human
uaaaacaaaacaaaagucauuuca

SEQ ID NO: 13686 - RNA, 24 nt, Human
uaaaacaaguuuuuguugguuacu

SEQ ID NO: 13687 - RNA, 23 nt, Human
uaaaacccgcggggugaaccggg

SEQ ID NO: 13688 - RNA, 22 nt, Human
uaaaagaaccgaaaggcuguac

SEQ ID NO: 13689 - RNA, 24 nt, Human
uaaaagaaguuacugaggaagauu

SEQ ID NO: 13690 - RNA, 23 nt, Human
uaaaauacauuuuauguuaaugu

SEQ ID NO: 13691 - RNA, 24 nt, Human
uaaaauaccucuaauaaacauugu

SEQ ID NO: 13692 - RNA, 22 nt, Human
uaaaaugcaucaaacuccuuuc

SEQ ID NO: 13693 - RNA, 23 nt, Human
uaaaauguacuuuuauuuuaugg

SEQ ID NO: 13694 - RNA, 24 nt, Human
uaaaauguauuugguuuuguugga

SEQ ID NO: 13695 - RNA, 22 nt, Human
uaaaccguugaaacccauucgu

SEQ ID NO: 13696 - RNA, 24 nt, Human
uaaagcacuaagguugauuuuugu

SEQ ID NO: 13697 - RNA, 24 nt, Human
uaaagcuaacaaaucaaaggcaca

SEQ ID NO: 13698 - RNA, 24 nt, Human
uaaagcucuaagacucaugagcca

SEQ ID NO: 13699 - RNA, 24 nt, Human
uaaagggagacaauggugucuugg

SEQ ID NO: 13700 - RNA, 24 nt, Human
uaaagguuccaaggcaugccccaa

SEQ ID NO: 13701 - RNA, 22 nt, Human
uaaagguuucacagucagugca

SEQ ID NO: 13702 - RNA, 24 nt, Human
uaaagucaaccucaauuccuuaca

SEQ ID NO: 13703 - RNA, 24 nt, Human
uaaagugaugauacacugggcuuu

SEQ ID NO: 13704 - RNA, 24 nt, Human
uaaaguuuaguuuaaaaguuguag

SEQ ID NO: 13705 - RNA, 24 nt, Human
uaaaguuugcucucucuuuuugaa

SEQ ID NO: 13706 - RNA, 22 nt, Human
uaaauacagugauucuaagauc

SEQ ID NO: 13707 - RNA, 22 nt, Human
uaaauacugcucacauguuccu

SEQ ID NO: 13708 - RNA, 24 nt, Human
uaaauagcaucccucuccccacga

SEQ ID NO: 13709 - RNA, 22 nt, Human
uaaauaucagcuucuaauuaag

SEQ ID NO: 13710 - RNA, 24 nt, Human
uaaaucaaaacaaaacacaaggua

SEQ ID NO: 13711 - RNA, 22 nt, Human
uaaaugcagauucccaggcccu

SEQ ID NO: 13712 - RNA, 24 nt, Human
uaaauggauuaaucccauuauugc

SEQ ID NO: 13713 - RNA, 24 nt, Human
uaaauuaugaucuaccuaccaauc

SEQ ID NO: 13714 - RNA, 24 nt, Human
uaacaaaaggaaaaugugacuuaa

SEQ ID NO: 13715 - RNA, 22 nt, Human
uaacaacgaggccaggagggau

SEQ ID NO: 13716 - RNA, 24 nt, Human
uaacagaagggguuuuguaagcug

SEQ ID NO: 13717 - RNA, 24 nt, Human
uaacaguauuuccagugacaaugc

SEQ ID NO: 13718 - RNA, 24 nt, Human
uaacauacacauagugaagaaugc

SEQ ID NO: 13719 - RNA, 21 nt, Human
uaacauaguggucauuugucc

SEQ ID NO: 13720 - RNA, 24 nt, Human
uaaccacuuaaauagaacaguguc

SEQ ID NO: 13721 - RNA, 24 nt, Human
uaacccgugugggggaagaggacu

SEQ ID NO: 13722 - RNA, 23 nt, Human
uaaccgcaaaacucuagaggggg

SEQ ID NO: 13723 - RNA, 24 nt, Human
uaaccuguggggcuguguugauaa

SEQ ID NO: 13724 - RNA, 24 nt, Human
uaacgccggugaagcuucaggggg

SEQ ID NO: 13725 - RNA, 24 nt, Human
uaacgugguguugugccugcuggc

SEQ ID NO: 13726 - RNA, 24 nt, Human
uaacucagcacgcuuccacuucac

SEQ ID NO: 13727 - RNA, 24 nt, Human
uaacucuccaagccuucugggaug

SEQ ID NO: 13728 - RNA, 24 nt, Human
uaacugaaagcugaaaccucugga

SEQ ID NO: 13729 - RNA, 24 nt, Human
uaacugaccuaaagaggugugugu

SEQ ID NO: 13730 - RNA, 24 nt, Human
uaacugcauuugcgccaccugcug

SEQ ID NO: 13731 - RNA, 24 nt, Human
uaacuuagcuaagcccuuugcaca

SEQ ID NO: 13732 - RNA, 24 nt, Human
uaacuugagaaucuugaggggcuu

SEQ ID NO: 13733 - RNA, 24 nt, Human
uaacuuuauugcaagucacauaau

SEQ ID NO: 13734 - RNA, 24 nt, Human
uaagaaaacaggcuugaauuucac

SEQ ID NO: 13735 - RNA, 20 nt, Human
uaagaaaauugggucagagg

SEQ ID NO: 13736 - RNA, 24 nt, Human
uaagaaacauguuccaguacuuua

SEQ ID NO: 13737 - RNA, 24 nt, Human
uaagaagccagucagccugcccau

SEQ ID NO: 13738 - RNA, 24 nt, Human
uaagaagugcuuacucacccuuuu

SEQ ID NO: 13739 - RNA, 24 nt, Human
uaagaaguugucaucauucugaau

SEQ ID NO: 13740 - RNA, 24 nt, Human
uaagaccaucaucacugcgugaaa

SEQ ID NO: 13741 - RNA, 24 nt, Human
uaagagaacaguacaauuugcagu

SEQ ID NO: 13742 - RNA, 24 nt, Human
uaagagacauugaaccuggagaag

SEQ ID NO: 13743 - RNA, 22 nt, Human
uaagagcagacacaaccugaga

SEQ ID NO: 13744 - RNA, 24 nt, Human
uaagauacgaaaauuagcugggug

SEQ ID NO: 13745 - RNA, 22 nt, Human
uaagaugagugcuagagacuug

SEQ ID NO: 13746 - RNA, 24 nt, Human
uaagcagcaugauggauucagaag

SEQ ID NO: 13747 - RNA, 24 nt, Human
uaagcauucggcuggguuggcccu

SEQ ID NO: 13748 - RNA, 24 nt, Human
uaagccaccaugaggcugucagug

SEQ ID NO: 13749 - RNA, 22 nt, Human
uaagccuugggacagcugggaa

SEQ ID NO: 13750 - RNA, 24 nt, Human
uaagcuuggccuaagagcuagagu

SEQ ID NO: 13751 - RNA, 24 nt, Human
uaaggaaauauuuuaauuucaugg

SEQ ID NO: 13752 - RNA, 24 nt, Human
uaaggaaauguggaggaggcagaa

SEQ ID NO: 13753 - RNA, 24 nt, Human
uaaggaccugcucuaggaaacauu

SEQ ID NO: 13754 - RNA, 24 nt, Human
uaaggaccuguuuggggcagcagg

SEQ ID NO: 13755 - RNA, 22 nt, Human
uaaggagaggaagggagggaug

SEQ ID NO: 13756 - RNA, 24 nt, Human
uaaggauaggccccaaauguggac

SEQ ID NO: 13757 - RNA, 24 nt, Human
uaaggcaggcggccgaauuugggg

SEQ ID NO: 13758 - RNA, 23 nt, Human
uaagggccugguuaagcaagcgg

SEQ ID NO: 13759 - RNA, 24 nt, Human
uaagguauccgcuucaaggccucc

SEQ ID NO: 13760 - RNA, 22 nt, Human
uaaggugcaucuagugcaguua

SEQ ID NO: 13761 - RNA, 24 nt, Human
uaaguaacauuaacacaauguuga

SEQ ID NO: 13762 - RNA, 24 nt, Human
uaaguagcaucugggaagaggaga

SEQ ID NO: 13763 - RNA, 24 nt, Human
uaagucaugacuguuaucacaggg

SEQ ID NO: 13764 - RNA, 24 nt, Human
uaaguccugauggaggcuuucuga

SEQ ID NO: 13765 - RNA, 24 nt, Human
uaagucgucuucugaccggucaag

SEQ ID NO: 13766 - RNA, 24 nt, Human
uaagucuggguucuacucccaaag

SEQ ID NO: 13767 - RNA, 24 nt, Human
uaagucuuuagccuucccaaguuu

SEQ ID NO: 13768 - RNA, 24 nt, Human
uaagugaaguauuuuucaaagaau

SEQ ID NO: 13769 - RNA, 24 nt, Human
uaagugacaaugcuuauggaaagc

SEQ ID NO: 13770 - RNA, 24 nt, Human
uaagugcuccaaggagguggccac

SEQ ID NO: 13771 - RNA, 22 nt, Human
uaagugcugcugauuuuggaaa

SEQ ID NO: 13772 - RNA, 22 nt, Human
uaaguguacuugccaucuguag

SEQ ID NO: 13773 - RNA, 24 nt, Human
uaaguguccacuuucuuuauccca

SEQ ID NO: 13774 - RNA, 24 nt, Human
uaaguuagacuaugauacuuaguu

SEQ ID NO: 13775 - RNA, 24 nt, Human
uaaguugacuauaucccaacagca

SEQ ID NO: 13776 - RNA, 24 nt, Human
uaaguuuaauguuaauuccaugcu

SEQ ID NO: 13777 - RNA, 24 nt, Human
uaaguuuguuuuggaaaguugagc

SEQ ID NO: 13778 - RNA, 24 nt, Human
uaauaaggauauuuugcuccagca

SEQ ID NO: 13779 - RNA, 24 nt, Human
uaauacacccguuuugccucgugc

SEQ ID NO: 13780 - RNA, 24 nt, Human
uaauacgagagguaaucagauggu

SEQ ID NO: 13781 - RNA, 22 nt, Human
uaauacugccggguaaugaugg

SEQ ID NO: 13782 - RNA, 23 nt, Human
uaauagcguguauagugcaucuc

SEQ ID NO: 13783 - RNA, 24 nt, Human
uaauaugcucaaaaauggaggaaa

SEQ ID NO: 13784 - RNA, 24 nt, Human
uaauaugucucauccucggccuug

SEQ ID NO: 13785 - RNA, 24 nt, Human
uaaugcaacaaaaauacagcauca

SEQ ID NO: 13786 - RNA, 24 nt, Human
uaaugccaacugaagaaaauauug

SEQ ID NO: 13787 - RNA, 24 nt, Human
uaaugcuagcagguuaaaaucaau

SEQ ID NO: 13788 - RNA, 24 nt, Human
uaauggaagaacagaguauuuuaa

SEQ ID NO: 13789 - RNA, 24 nt, Human
uaauggaguuaguguccagucagc

SEQ ID NO: 13790 - RNA, 24 nt, Human
uaauggccagcucuccacgcugcu

SEQ ID NO: 13791 - RNA, 24 nt, Human
uaaugggcguuuucacaugcacau

SEQ ID NO: 13792 - RNA, 24 nt, Human
uaaugguuuaauuuuauguggacg

SEQ ID NO: 13793 - RNA, 24 nt, Human
uaauguacagaacuaaauuuuuua

SEQ ID NO: 13794 - RNA, 24 nt, Human
uaauguacagcagaaauugggcag

SEQ ID NO: 13795 - RNA, 24 nt, Human
uaauguauugauggaaagggucca

SEQ ID NO: 13796 - RNA, 24 nt, Human
uaauuaaaugugauuuccaucauu

SEQ ID NO: 13797 - RNA, 22 nt, Human
uaauucuuuaugagaggauccu

SEQ ID NO: 13798 - RNA, 24 nt, Human
uaauuuuuaaaauauuuguagaga

SEQ ID NO: 13799 - RNA, 24 nt, Human
uacaaaaagcuccuucuguauugg

SEQ ID NO: 13800 - RNA, 24 nt, Human
uacaaagcuuaaaauucugcauau

SEQ ID NO: 13801 - RNA, 22 nt, Human
uacaaaggaaggcacuguucug

SEQ ID NO: 13802 - RNA, 24 nt, Human
uacaacauuauguucccgaauucc

SEQ ID NO: 13803 - RNA, 24 nt, Human
uacaacccugaagugcuuggauau

SEQ ID NO: 13804 - RNA, 24 nt, Human
uacaacuuauagaaaagguaaagg

SEQ ID NO: 13805 - RNA, 24 nt, Human
uacaagacaggcaagaacaagugg

SEQ ID NO: 13806 - RNA, 24 nt, Human
uacaaggaggccuuucggaaggac

SEQ ID NO: 13807 - RNA, 24 nt, Human
uacaagguuccuuccacugaagca

SEQ ID NO: 13808 - RNA, 20 nt, Human
uacacaggcacauggcuuua

SEQ ID NO: 13809 - RNA, 24 nt, Human
uacacaggugccuaugcaaguaca

SEQ ID NO: 13810 - RNA, 24 nt, Human
uacaccacucccaagaagaacaag

SEQ ID NO: 13811 - RNA, 24 nt, Human
uacaccacucccaagaagaauaag

SEQ ID NO: 13812 - RNA, 24 nt, Human
uacaccauucccaagaagaauaag

SEQ ID NO: 13813 - RNA, 23 nt, Human
uacaccuucuuggcacagcagca

SEQ ID NO: 13814 - RNA, 24 nt, Human
uacacugagcaccacgggguuccu

SEQ ID NO: 13815 - RNA, 24 nt, Human
uacacugccuucauacuugcccug

SEQ ID NO: 13816 - RNA, 24 nt, Human
uacagaacaaagggcgagcucuaa

SEQ ID NO: 13817 - RNA, 24 nt, Human
uacagaagaaaucaauacaauaga

SEQ ID NO: 13818 - RNA, 23 nt, Human
uacagcaaguaagucuugccuuu

SEQ ID NO: 13819 - RNA, 24 nt, Human
uacagcauguuguccagagccaac

SEQ ID NO: 13820 - RNA, 23 nt, Human
uacagcuagguaucucuggagac

SEQ ID NO: 13821 - RNA, 22 nt, Human
uacagcucugcuucuggcucac

SEQ ID NO: 13822 - RNA, 24 nt, Human
uacagcuugaaaagcacuuuuuac

SEQ ID NO: 13823 - RNA, 24 nt, Human
uacagcuuugcacacugacaggag

SEQ ID NO: 13824 - RNA, 24 nt, Human
uacaggagacaaucauuuauguuu

SEQ ID NO: 13825 - RNA, 24 nt, Human
uacaggauguucaguuugcaagga

SEQ ID NO: 13826 - RNA, 24 nt, Human
uacaggccaggcuacacuguucuc

SEQ ID NO: 13827 - RNA, 24 nt, Human
uacagguuagaaaauuugaggcac

SEQ ID NO: 13828 - RNA, 24 nt, Human
uacagguuagggcaauuuggacuu

SEQ ID NO: 13829 - RNA, 24 nt, Human
uacagguugccugauggacagcag

SEQ ID NO: 13830 - RNA, 22 nt, Human
uacaguacaugucccagagcaa

SEQ ID NO: 13831 - RNA, 24 nt, Human
uacaguauaguauaaauacaacuu

SEQ ID NO: 13832 - RNA, 22 nt, Human
uacagucaugacagaaguggaa

SEQ ID NO: 13833 - RNA, 24 nt, Human
uacaugaccaagcgacuaucuuca

SEQ ID NO: 13834 - RNA, 24 nt, Human
uacauggaagaguauauaugggaa

SEQ ID NO: 13835 - RNA, 24 nt, Human
uacauuaagaugaagucaaguguu

SEQ ID NO: 13836 - RNA, 24 nt, Human
uaccaagaaguggaagaagaccaa

SEQ ID NO: 13837 - RNA, 23 nt, Human
uaccacacaaaggcauuggcugc

SEQ ID NO: 13838 - RNA, 24 nt, Human
uaccaccagcaccagcacagcugc

SEQ ID NO: 13839 - RNA, 24 nt, Human
uaccagagcauugugggaaagcag

SEQ ID NO: 13840 - RNA, 24 nt, Human
uaccagcuccagaccuuuguccug

SEQ ID NO: 13841 - RNA, 23 nt, Human
uaccaggggaggaguggagcugc

SEQ ID NO: 13842 - RNA, 24 nt, Human
uaccauacacaugaugaaguugcu

SEQ ID NO: 13843 - RNA, 24 nt, Human
uaccaugccagcaagcucagcauc

SEQ ID NO: 13844 - RNA, 24 nt, Human
uaccauggucuagaagugcacugg

SEQ ID NO: 13845 - RNA, 24 nt, Human
uaccauuucuucaaauucuacugc

SEQ ID NO: 13846 - RNA, 24 nt, Human
uacccaaggcccuuucaauuucua

SEQ ID NO: 13847 - RNA, 24 nt, Human
uaccccaaauacacuugcuaacac

SEQ ID NO: 13848 - RNA, 24 nt, Human
uaccccaaugcuauucucgugaua

SEQ ID NO: 13849 - RNA, 22 nt, Human
uaccccgauagggagggugggg

SEQ ID NO: 13850 - RNA, 24 nt, Human
uacccgaggugaugaucuuggucu

SEQ ID NO: 13851 - RNA, 24 nt, Human
uacccgcaagagccagcuugcucg

SEQ ID NO: 13852 - RNA, 22 nt, Human
uacccguuguuaggggcgcagc

SEQ ID NO: 13853 - RNA, 24 nt, Human
uacccugcacccagaacuuaguag

SEQ ID NO: 13854 - RNA, 24 nt, Human
uacccuguaagguagacuuuaucu

SEQ ID NO: 13855 - RNA, 22 nt, Human
uacccugugacagucauucauc

SEQ ID NO: 13856 - RNA, 21 nt, Human
uacccuguguacaacagcaag

SEQ ID NO: 13857 - RNA, 24 nt, Human
uaccgcauuguuucucagaagcaa

SEQ ID NO: 13858 - RNA, 24 nt, Human
uaccggacgggcugggucuauggu

SEQ ID NO: 13859 - RNA, 24 nt, Human
uaccgggagaagauugagaaggag

SEQ ID NO: 13860 - RNA, 24 nt, Human
uaccgggguagagguccacccggc

SEQ ID NO: 13861 - RNA, 24 nt, Human
uaccguagucuauuuaaagugugc

SEQ ID NO: 13862 - RNA, 21 nt, Human
uaccguguuggccaggcuggu

SEQ ID NO: 13863 - RNA, 24 nt, Human
uaccguuuguaaggcgcuugcgca

SEQ ID NO: 13864 - RNA, 24 nt, Human
uaccuauaauagaauuagaugcuu

SEQ ID NO: 13865 - RNA, 24 nt, Human
uaccucagcguucacaggccugug

SEQ ID NO: 13866 - RNA, 24 nt, Human
uaccuccaccugaguuggaugaua

SEQ ID NO: 13867 - RNA, 24 nt, Human
uaccucgcccacacuggccagcag

SEQ ID NO: 13868 - RNA, 24 nt, Human
uaccuggaagagaggcuggaagcu

SEQ ID NO: 13869 - RNA, 24 nt, Human
uaccuggaccagcccugccuugag

SEQ ID NO: 13870 - RNA, 21 nt, Human
uaccuggccacaguucaagcc

SEQ ID NO: 13871 - RNA, 24 nt, Human
uaccugggcugacguugccuuguc

SEQ ID NO: 13872 - RNA, 24 nt, Human
uaccuggguucaaaccacaugcug

SEQ ID NO: 13873 - RNA, 24 nt, Human
uaccugucacucuagaauguaggc

SEQ ID NO: 13874 - RNA, 24 nt, Human
uaccuuguacaggaccuggcacuu

SEQ ID NO: 13875 - RNA, 19 nt, Human
uaccuugugagcaguuggu

SEQ ID NO: 13876 - RNA, 24 nt, Human
uaccuuguguuuucgagccuauag

SEQ ID NO: 13877 - RNA, 24 nt, Human
uaccuuguuucccaacggguuucc

SEQ ID NO: 13878 - RNA, 24 nt, Human
uacgauguucccaccuggaugccc

SEQ ID NO: 13879 - RNA, 24 nt, Human
uacgcuguacggccuggccugcgc

SEQ ID NO: 13880 - RNA, 22 nt, Human
uacggccuccccauccuggguc

SEQ ID NO: 13881 - RNA, 24 nt, Human
uacuacacauuuaaaggaacuguu

SEQ ID NO: 13882 - RNA, 24 nt, Human
uacuacagaaaauaugcagcuauc

SEQ ID NO: 13883 - RNA, 24 nt, Human
uacuagagcgcaaggcuccuccgg

SEQ ID NO: 13884 - RNA, 24 nt, Human
uacuauggcuguccugugucacau

SEQ ID NO: 13885 - RNA, 24 nt, Human
uacuauguaauccggauccaggau

SEQ ID NO: 13886 - RNA, 24 nt, Human
uacucaagacaauugacgagggag

SEQ ID NO: 13887 - RNA, 24 nt, Human
uacuccagccugggggacaaaagg

SEQ ID NO: 13888 - RNA, 24 nt, Human
uacucuaguucaacaaagaguuau

SEQ ID NO: 13889 - RNA, 24 nt, Human
uacugauugagcuaaagaagaaaa

SEQ ID NO: 13890 - RNA, 22 nt, Human
uacugcaacuuccagcuccugg

SEQ ID NO: 13891 - RNA, 24 nt, Human
uacugcacugcagccugguacaaa

SEQ ID NO: 13892 - RNA, 18 nt, Human
uacugcauguuuacauaa

SEQ ID NO: 13893 - RNA, 24 nt, Human
uacugcgagcaguucuuccaauuc

SEQ ID NO: 13894 - RNA, 24 nt, Human
uacugcuccugaaaaaugcucaag

SEQ ID NO: 13895 - RNA, 24 nt, Human
uacugggaguggccugcagugcca

SEQ ID NO: 13896 - RNA, 24 nt, Human
uacugggauuuuuguauuauucug

SEQ ID NO: 13897 - RNA, 24 nt, Human
uacugggcugauuuuggacagugg

SEQ ID NO: 13898 - RNA, 24 nt, Human
uacugguguucuccuggccucaau

SEQ ID NO: 13899 - RNA, 24 nt, Human
uacuguaacuuugaucaugucugu

SEQ ID NO: 13900 - RNA, 24 nt, Human
uacuguagacaaauguaaauaaag

SEQ ID NO: 13901 - RNA, 20 nt, Human
uacuguggaccucacucagg

SEQ ID NO: 13902 - RNA, 22 nt, Human
uacuuacagaaggaagcaauug

SEQ ID NO: 13903 - RNA, 24 nt, Human
uacuucaguuauggacagaaagaa

SEQ ID NO: 13904 - RNA, 24 nt, Human
uacuucucgaaauucuuaagaggu

SEQ ID NO: 13905 - RNA, 24 nt, Human
uacuuuagcuuacuaacuuccaca

SEQ ID NO: 13906 - RNA, 24 nt, Human
uacuuugaaaggcucuacaaaguu

SEQ ID NO: 13907 - RNA, 24 nt, Human
uacuuugacuuugguuugcugcug

SEQ ID NO: 13908 - RNA, 24 nt, Human
uacuuuugcuuuuuauagugauua

SEQ ID NO: 13909 - RNA, 24 nt, Human
uacuuuuuucggaguuagggaggg

SEQ ID NO: 13910 - RNA, 24 nt, Human
uagaaaguguucguccauucggaa

SEQ ID NO: 13911 - RNA, 24 nt, Human
uagaacacaguuaugggucgcaag

SEQ ID NO: 13912 - RNA, 22 nt, Human
uagaacuguggcagugacuggc

SEQ ID NO: 13913 - RNA, 24 nt, Human
uagaagauaaaaggcauucuguau

SEQ ID NO: 13914 - RNA, 24 nt, Human
uagaagcauuugcgguggacaaug

SEQ ID NO: 13915 - RNA, 24 nt, Human
uagaagcugcagcaaguucuccac

SEQ ID NO: 13916 - RNA, 24 nt, Human
uagaaggcuggagucuaaauuggg

SEQ ID NO: 13917 - RNA, 24 nt, Human
uagaaguaguauguuauuccuggu

SEQ ID NO: 13918 - RNA, 24 nt, Human
uagaaguauacgugugugucucca

SEQ ID NO: 13919 - RNA, 22 nt, Human
uagaagugaaccaggcugggag

SEQ ID NO: 13920 - RNA, 21 nt, Human
uagaauaacacugcuguagac

SEQ ID NO: 13921 - RNA, 24 nt, Human
uagaauacugucucgaaauguacu

SEQ ID NO: 13922 - RNA, 24 nt, Human
uagaaugcuguaaaaacuguuagg

SEQ ID NO: 13923 - RNA, 24 nt, Human
uagaauguguaaggcucuugccag

SEQ ID NO: 13924 - RNA, 22 nt, Human
uagaauuagucaccaggcaaag

SEQ ID NO: 13925 - RNA, 24 nt, Human
uagaauuuauaaagaagacucagu

SEQ ID NO: 13926 - RNA, 24 nt, Human
uagaauuuccauugagacaauuga

SEQ ID NO: 13927 - RNA, 20 nt, Human
uagacuccaguuauaacuga

SEQ ID NO: 13928 - RNA, 22 nt, Human
uagacuugaucacaucauuaac

SEQ ID NO: 13929 - RNA, 24 nt, Human
uagagcacauagguucuuuggaga

SEQ ID NO: 13930 - RNA, 24 nt, Human
uagaggauuauacagaugaugauu

SEQ ID NO: 13931 - RNA, 24 nt, Human
uagagugagacucaggcucaaaaa

SEQ ID NO: 13932 - RNA, 22 nt, Human
uagaguuauaugaugugcuagu

SEQ ID NO: 13933 - RNA, 24 nt, Human
uagaucauguuaaauuagcgaaug

SEQ ID NO: 13934 - RNA, 24 nt, Human
uagaugaucuuacuuucuugaaag

SEQ ID NO: 13935 - RNA, 24 nt, Human
uagaugcagacagugaggauggag

SEQ ID NO: 13936 - RNA, 24 nt, Human
uagauucgggcaaguccaccacua

SEQ ID NO: 13937 - RNA, 24 nt, Human
uagcaaaggugcaucugucauccg

SEQ ID NO: 13938 - RNA, 21 nt, Human
uagcaccuggaauucccuggu

SEQ ID NO: 13939 - RNA, 22 nt, Human
uagcagaaggacagguuccucg

SEQ ID NO: 13940 - RNA, 24 nt, Human
uagcagagugugagggcacugagg

SEQ ID NO: 13941 - RNA, 24 nt, Human
uagcagcaagguugaaaagguuaa

SEQ ID NO: 13942 - RNA, 22 nt, Human
uagcagcacauaaugguuugaa

SEQ ID NO: 13943 - RNA, 24 nt, Human
uagcagcagacuaaucugaagaaa

SEQ ID NO: 13944 - RNA, 24 nt, Human
uagcagcagaucuguaguuuguau

SEQ ID NO: 13945 - RNA, 24 nt, Human
uagcagcauuaggucuauaggugg

SEQ ID NO: 13946 - RNA, 24 nt, Human
uagcaggcuuccugcagacuguau

SEQ ID NO: 13947 - RNA, 24 nt, Human
uagcagguccaccggccccuacau

SEQ ID NO: 13948 - RNA, 24 nt, Human
uagcaguaauuuaucagaggucac

SEQ ID NO: 13949 - RNA, 21 nt, Human
uagcaguagauuacuaagcuc

SEQ ID NO: 13950 - RNA, 24 nt, Human
uagcaguaugagaaugaacuaaca

SEQ ID NO: 13951 - RNA, 24 nt, Human
uagcauaauagaaaaguggagaau

SEQ ID NO: 13952 - RNA, 23 nt, Human
uagcauaucaggucucauuaugc

SEQ ID NO: 13953 - RNA, 24 nt, Human
uagcaugaugcuuccagcuuuauu

SEQ ID NO: 13954 - RNA, 24 nt, Human
uagcaugccacuaaaagaggcaga

SEQ ID NO: 13955 - RNA, 24 nt, Human
uagcauggauguaugcaucucuug

SEQ ID NO: 13956 - RNA, 21 nt, Human
uagcauguggaucucgagcuc

SEQ ID NO: 13957 - RNA, 24 nt, Human
uagcauucaguguaccauaccuau

SEQ ID NO: 13958 - RNA, 24 nt, Human
uagcauuccaccacaugaauacac

SEQ ID NO: 13959 - RNA, 22 nt, Human
uagcauuucacugaucuucacu

SEQ ID NO: 13960 - RNA, 22 nt, Human
uagcgcauugugaaauugguuu

SEQ ID NO: 13961 - RNA, 24 nt, Human
uagcgugggauacacgggugcacg

SEQ ID NO: 13962 - RNA, 22 nt, Human
uagcucauuuuugaaaucaguu

SEQ ID NO: 13963 - RNA, 24 nt, Human
uagcuccauuuaacaccagccaug

SEQ ID NO: 13964 - RNA, 24 nt, Human
uagcugaaaagaacgcuagaccaa

SEQ ID NO: 13965 - RNA, 24 nt, Human
uagcugcugauuguacuagagcag

SEQ ID NO: 13966 - RNA, 24 nt, Human
uagcuguaaacugaaaacaauauu

SEQ ID NO: 13967 - RNA, 24 nt, Human
uagcugucggcugucugagagcac

SEQ ID NO: 13968 - RNA, 22 nt, Human
uagcuuaucagacugauguuga

SEQ ID NO: 13969 - RNA, 24 nt, Human
uagcuucauuauuagauuguuuca

SEQ ID NO: 13970 - RNA, 24 nt, Human
uagcuuccugucucaggcuuucua

SEQ ID NO: 13971 - RNA, 24 nt, Human
uagcuucuggccugagcuuggccu

SEQ ID NO: 13972 - RNA, 24 nt, Human
uagcuuuaacugugacgggugucg

SEQ ID NO: 13973 - RNA, 22 nt, Human
uagcuuuaagguggagaggggu

SEQ ID NO: 13974 - RNA, 22 nt, Human
uaggaaauccacugcagaauga

SEQ ID NO: 13975 - RNA, 24 nt, Human
uaggaccccuccaaauagguuuug

SEQ ID NO: 13976 - RNA, 24 nt, Human
uaggagaacguaggguagucaagc

SEQ ID NO: 13977 - RNA, 24 nt, Human
uaggagccgauggaucuguggucc

SEQ ID NO: 13978 - RNA, 24 nt, Human
uaggagggcaggcucuucacuccc

SEQ ID NO: 13979 - RNA, 24 nt, Human
uaggauaauaguggagagaagguc

SEQ ID NO: 13980 - RNA, 24 nt, Human
uaggaucccaaacaucgcugccgc

SEQ ID NO: 13981 - RNA, 24 nt, Human
uaggaugaugauuaauaagaggga

SEQ ID NO: 13982 - RNA, 24 nt, Human
uaggaugguuccugggcugauuga

SEQ ID NO: 13983 - RNA, 24 nt, Human
uaggauguccucauaugggcuuag

SEQ ID NO: 13984 - RNA, 24 nt, Human
uaggauguuugggagcauaauccg

SEQ ID NO: 13985 - RNA, 24 nt, Human
uaggauugguaucaauucuccuuu

SEQ ID NO: 13986 - RNA, 22 nt, Human
uaggcaaucagauguucacaca

SEQ ID NO: 13987 - RNA, 22 nt, Human
uaggcaguugcucaagccagug

SEQ ID NO: 13988 - RNA, 24 nt, Human
uaggggcagucgaaagggcuuggg

SEQ ID NO: 13989 - RNA, 22 nt, Human
uagggggucaccuaugugggag

SEQ ID NO: 13990 - RNA, 24 nt, Human
uaggggguuccuggugagggcuca

SEQ ID NO: 13991 - RNA, 24 nt, Human
uaggguggugggaacaggcccuac

SEQ ID NO: 13992 - RNA, 22 nt, Human
uagguaguuuccuguuguuggg

SEQ ID NO: 13993 - RNA, 23 nt, Human
uaggucccgagguggagucgggg

SEQ ID NO: 13994 - RNA, 24 nt, Human
uaggucccgagguggagucggggg

SEQ ID NO: 13995 - RNA, 24 nt, Human
uaggugacugcaggacugcagcau

SEQ ID NO: 13996 - RNA, 20 nt, Human
uaggugguuauguuccaccc

SEQ ID NO: 13997 - RNA, 22 nt, Human
uagguuaguuucaaguauuggc

SEQ ID NO: 13998 - RNA, 21 nt, Human
uagguucaaacagaguauggc

SEQ ID NO: 13999 - RNA, 24 nt, Human
uagguuccaugauucugaugcagu

SEQ ID NO: 14000 - RNA, 24 nt, Human
uaguacaccacuacagacacauaa

SEQ ID NO: 14001 - RNA, 22 nt, Human
uaguagugucuuacugguuuuu

SEQ ID NO: 14002 - RNA, 23 nt, Human
uaguauacagacauucugcucuu

SEQ ID NO: 14003 - RNA, 23 nt, Human
uaguauguacaggauguacuggu

SEQ ID NO: 14004 - RNA, 24 nt, Human
uaguauucucaaauaagguccuga

SEQ ID NO: 14005 - RNA, 22 nt, Human
uagucguacuucuucucggucu

SEQ ID NO: 14006 - RNA, 24 nt, Human
uagucugcacaauucaauaugaac

SEQ ID NO: 14007 - RNA, 24 nt, Human
uagucugcugggccugcuccucca

SEQ ID NO: 14008 - RNA, 24 nt, Human
uagugcacuuugagcgagggcggc

SEQ ID NO: 14009 - RNA, 24 nt, Human
uagugcuauaaauuucccucuaca

SEQ ID NO: 14010 - RNA, 23 nt, Human
uaguggccccaaaugucuggcug

SEQ ID NO: 14011 - RNA, 24 nt, Human
uagugugcaucaggcaagaugagc

SEQ ID NO: 14012 - RNA, 24 nt, Human
uagugugucuaaaacaaggagguu

SEQ ID NO: 14013 - RNA, 24 nt, Human
uaguucacuuguuuuuccucuuug

SEQ ID NO: 14014 - RNA, 24 nt, Human
uauaaaaguauuacacaauucugu

SEQ ID NO: 14015 - RNA, 22 nt, Human
uauaacagccagcuuggauuca

SEQ ID NO: 14016 - RNA, 24 nt, Human
uauaacauguaugcuuuucagaau

SEQ ID NO: 14017 - RNA, 24 nt, Human
uauaaggcuaaauguguuuauucu

SEQ ID NO: 14018 - RNA, 24 nt, Human
uauaauauauucuaaacacaauga

SEQ ID NO: 14019 - RNA, 22 nt, Human
uauacugcucuuagccagaguc

SEQ ID NO: 14020 - RNA, 24 nt, Human
uauacuguugcuauguuuggauac

SEQ ID NO: 14021 - RNA, 24 nt, Human
uauagaauuuccagauuucuugcc

SEQ ID NO: 14022 - RNA, 22 nt, Human
uauagacaaggggucugaaaac

SEQ ID NO: 14023 - RNA, 22 nt, Human
uauagcagugcuagcucugucu

SEQ ID NO: 14024 - RNA, 24 nt, Human
uauagggcuccugcaucccucugg

SEQ ID NO: 14025 - RNA, 24 nt, Human
uauaguacuaccaauguuggugac

SEQ ID NO: 14026 - RNA, 24 nt, Human
uauagucuccuaacauuugucucu

SEQ ID NO: 14027 - RNA, 24 nt, Human
uauauaauauaauuacauauauau

SEQ ID NO: 14028 - RNA, 24 nt, Human
uauauagauguauauauauacaca

SEQ ID NO: 14029 - RNA, 24 nt, Human
uauauauuuacggggucuaugaga

SEQ ID NO: 14030 - RNA, 24 nt, Human
uauaugaugaaaagaauugagaag

SEQ ID NO: 14031 - RNA, 24 nt, Human
uauauguauacacauacuuacaua

SEQ ID NO: 14032 - RNA, 22 nt, Human
uauaugucugguauucuugggg

SEQ ID NO: 14033 - RNA, 24 nt, Human
uaucaacuauguuuuuucagucua

SEQ ID NO: 14034 - RNA, 24 nt, Human
uaucaagaaagggcuucaccagga

SEQ ID NO: 14035 - RNA, 24 nt, Human
uaucaagcacuugcgacagcugaa

SEQ ID NO: 14036 - RNA, 24 nt, Human
uaucaaggaagggcaggcgugaug

SEQ ID NO: 14037 - RNA, 24 nt, Human
uaucaagugccucauuaaauuugu

SEQ ID NO: 14038 - RNA, 23 nt, Human
uaucacagaagcauggggugacc

SEQ ID NO: 14039 - RNA, 22 nt, Human
uaucacagacuggauuuaguua

SEQ ID NO: 14040 - RNA, 24 nt, Human
uaucacagaugaacaaauccagga

SEQ ID NO: 14041 - RNA, 24 nt, Human
uaucacaguguuauucuucuucau

SEQ ID NO: 14042 - RNA, 24 nt, Human
uaucagagacuguuauccauuugu

SEQ ID NO: 14043 - RNA, 24 nt, Human
uaucaggucuguugguuucuacua

SEQ ID NO: 14044 - RNA, 24 nt, Human
uaucaguagauccuuccacugggu

SEQ ID NO: 14045 - RNA, 24 nt, Human
uaucauuuauggaggcucugugac

SEQ ID NO: 14046 - RNA, 22 nt, Human
uauccaaaugaaugccguccca

SEQ ID NO: 14047 - RNA, 24 nt, Human
uauccagggguuguguguccccau

SEQ ID NO: 14048 - RNA, 24 nt, Human
uauccaguguagcaaauaacagua

SEQ ID NO: 14049 - RNA, 24 nt, Human
uauccauuagacauugagugagaa

SEQ ID NO: 14050 - RNA, 22 nt, Human
uaucccagauguuuugauaggu

SEQ ID NO: 14051 - RNA, 24 nt, Human
uauccuaagaucagcugggcaugg

SEQ ID NO: 14052 - RNA, 24 nt, Human
uauccuagaaggacucacauucua

SEQ ID NO: 14053 - RNA, 24 nt, Human
uauccucauugauccauuccauaa

SEQ ID NO: 14054 - RNA, 24 nt, Human
uauccucucuuaugaacaacugua

SEQ ID NO: 14055 - RNA, 24 nt, Human
uauccuggcuagugauuuucucau

SEQ ID NO: 14056 - RNA, 24 nt, Human
uaucuaaggauuauucugcugaag

SEQ ID NO: 14057 - RNA, 24 nt, Human
uaucugcugcgccugagaugagua

SEQ ID NO: 14058 - RNA, 24 nt, Human
uaucuuaugauuucuuaaggagau

SEQ ID NO: 14059 - RNA, 24 nt, Human
uaucuuauugucacaaaguuguuc

SEQ ID NO: 14060 - RNA, 20 nt, Human
uaugaacuggguccucucua

SEQ ID NO: 14061 - RNA, 21 nt, Human
uaugacaucucaugcugaccc

SEQ ID NO: 14062 - RNA, 24 nt, Human
uaugacauuuuauuuucacuuaug

SEQ ID NO: 14063 - RNA, 24 nt, Human
uaugagaacauuucuaccucugga

SEQ ID NO: 14064 - RNA, 24 nt, Human
uaugaggcccuagagcuccgggac

SEQ ID NO: 14065 - RNA, 22 nt, Human
uaugauacucuggggaggaacc

SEQ ID NO: 14066 - RNA, 24 nt, Human
uaugauagauguggccgucuugua

SEQ ID NO: 14067 - RNA, 24 nt, Human
uaugaucagauuuaccauuuuuag

SEQ ID NO: 14068 - RNA, 24 nt, Human
uaugaucucaacuguuuuugugac

SEQ ID NO: 14069 - RNA, 24 nt, Human
uaugaugccaacauuacucaaagc

SEQ ID NO: 14070 - RNA, 24 nt, Human
uaugauguaacagugggaauguaa

SEQ ID NO: 14071 - RNA, 24 nt, Human
uaugcaacuauauuucauguugua

SEQ ID NO: 14072 - RNA, 24 nt, Human
uaugcaggccaucaaguguguggu

SEQ ID NO: 14073 - RNA, 24 nt, Human
uaugcaggcgcugggggccuggcc

SEQ ID NO: 14074 - RNA, 24 nt, Human
uaugcauuuguuauuuauauugaa

SEQ ID NO: 14075 - RNA, 24 nt, Human
uaugccaaguacaggcacugcuca

SEQ ID NO: 14076 - RNA, 24 nt, Human
uaugccagcuggagcgacugugcu

SEQ ID NO: 14077 - RNA, 22 nt, Human
uaugcuagaauuggacugccau

SEQ ID NO: 14078 - RNA, 22 nt, Human
uaugcuggggccgugucgaugu

SEQ ID NO: 14079 - RNA, 24 nt, Human
uaugcugucugucaguguacagua

SEQ ID NO: 14080 - RNA, 22 nt, Human
uauggaagcuguagcauuucug

SEQ ID NO: 14081 - RNA, 24 nt, Human
uauggagcaaagaaacuggugucc

SEQ ID NO: 14082 - RNA, 24 nt, Human
uauggaguuuucaacauggggucu

SEQ ID NO: 14083 - RNA, 24 nt, Human
uauggcaacaggccauucugggcc

SEQ ID NO: 14084 - RNA, 24 nt, Human
uauggcaagucacuugacagacau

SEQ ID NO: 14085 - RNA, 22 nt, Human
uauggcaucguuggauuucaga

SEQ ID NO: 14086 - RNA, 24 nt, Human
uaugggcauaccuuuaagaauuag

SEQ ID NO: 14087 - RNA, 24 nt, Human
uauggggaagggugucucaaaggc

SEQ ID NO: 14088 - RNA, 24 nt, Human
uauggugggaaggggcacacgggu

SEQ ID NO: 14089 - RNA, 24 nt, Human
uauggugguggcagggguggcugu

SEQ ID NO: 14090 - RNA, 24 nt, Human
uauguagagaaaauugcaugacuu

SEQ ID NO: 14091 - RNA, 22 nt, Human
uaugugagacacuguccuaggc

SEQ ID NO: 14092 - RNA, 24 nt, Human
uaugugaugaaaaaguauagcuuu

SEQ ID NO: 14093 - RNA, 24 nt, Human
uauguugcccaggcugguccugaa

SEQ ID NO: 14094 - RNA, 24 nt, Human
uauuaaggagcucauuaauuuugg

SEQ ID NO: 14095 - RNA, 24 nt, Human
uauuacacuggaggaucacaaacu

SEQ ID NO: 14096 - RNA, 22 nt, Human
uauuacauucauuuugaugguu

SEQ ID NO: 14097 - RNA, 24 nt, Human
uauuacccuucagcaccugagucc

SEQ ID NO: 14098 - RNA, 24 nt, Human
uauuacuggcaucuucaaucuggu

SEQ ID NO: 14099 - RNA, 24 nt, Human
uauuagggagugagggagcacaaa

SEQ ID NO: 14100 - RNA, 22 nt, Human
uauuaguugauuccaagggacc

SEQ ID NO: 14101 - RNA, 24 nt, Human
uauucauguaaagugauuaucaca

SEQ ID NO: 14102 - RNA, 22 nt, Human
uauuccucuuuaaugccuuuuu

SEQ ID NO: 14103 - RNA, 24 nt, Human
uauugaagguacuggucugugcug

SEQ ID NO: 14104 - RNA, 22 nt, Human
uauugaucugucccagccugug

SEQ ID NO: 14105 - RNA, 22 nt, Human
uauugcacuccagccugggcaa

SEQ ID NO: 14106 - RNA, 24 nt, Human
uauugcauuaaaaaugauaccuaa

SEQ ID NO: 14107 - RNA, 22 nt, Human
uauugcuaagaauucagguagu

SEQ ID NO: 14108 - RNA, 24 nt, Human
uauugcucucuaaacuuuguuccu

SEQ ID NO: 14109 - RNA, 24 nt, Human
uauuggacuuuccaucugucagaa

SEQ ID NO: 14110 - RNA, 24 nt, Human
uauuggcacuaguauaaaacagag

SEQ ID NO: 14111 - RNA, 24 nt, Human
uauuguagagcuuauuccuuccuc

SEQ ID NO: 14112 - RNA, 24 nt, Human
uauuguauugaugaugguuauucu

SEQ ID NO: 14113 - RNA, 24 nt, Human
uauugugcaccauauggaaguacu

SEQ ID NO: 14114 - RNA, 24 nt, Human
uauuguguaaaguuuauagaagua

SEQ ID NO: 14115 - RNA, 24 nt, Human
uauuguuuguguuucuguguuuca

SEQ ID NO: 14116 - RNA, 22 nt, Human
uauuucuuguuggcuuaguuug

SEQ ID NO: 14117 - RNA, 22 nt, Human
uauuugguccaaccccugcuuu

SEQ ID NO: 14118 - RNA, 24 nt, Human
uauuugguuuuggcuuuagcugau

SEQ ID NO: 14119 - RNA, 24 nt, Human
uauuuuaacaucugaaaucagaaa

SEQ ID NO: 14120 - RNA, 24 nt, Human
uauuuuacuaugauaguugagaaa

SEQ ID NO: 14121 - RNA, 24 nt, Human
uauuuuauacacucuaugcugagu

SEQ ID NO: 14122 - RNA, 24 nt, Human
uauuuuaucacaggcuuacacuac

SEQ ID NO: 14123 - RNA, 24 nt, Human
uauuuuauugcccgaggugggggu

SEQ ID NO: 14124 - RNA, 24 nt, Human
uauuuuccuuucuggacuuccaag

SEQ ID NO: 14125 - RNA, 24 nt, Human
uauuuuguauuuuuaguagagaca

SEQ ID NO: 14126 - RNA, 24 nt, Human
uauuuugucuucauggaauauauc

SEQ ID NO: 14127 - RNA, 24 nt, Human
ucaaacagacggacucugcaaggc

SEQ ID NO: 14128 - RNA, 24 nt, Human
ucaaacgaaaacccacaggagacc

SEQ ID NO: 14129 - RNA, 24 nt, Human
ucaaagcaggaagaguccaaagcu

SEQ ID NO: 14130 - RNA, 24 nt, Human
ucaacacaaaccauccugugcauc

SEQ ID NO: 14131 - RNA, 24 nt, Human
ucaacauacauggucucaucaucc

SEQ ID NO: 14132 - RNA, 24 nt, Human
ucaagaccaugaccaucucuucua

SEQ ID NO: 14133 - RNA, 22 nt, Human
ucaagcaacuacugucaagugg

SEQ ID NO: 14134 - RNA, 22 nt, Human
ucaagcaauccuccugcuucug

SEQ ID NO: 14135 - RNA, 24 nt, Human
ucaagcacuuuucuguagaagguc

SEQ ID NO: 14136 - RNA, 22 nt, Human
ucaagcucauuccucuaaccuc

SEQ ID NO: 14137 - RNA, 24 nt, Human
ucaagcuuugggaggcugaggcug

SEQ ID NO: 14138 - RNA, 24 nt, Human
ucaaguacauucccagucguggcc

SEQ ID NO: 14139 - RNA, 24 nt, Human
ucaaugcugccauugccaccauca

SEQ ID NO: 14140 - RNA, 22 nt, Human
ucacaacccucauauguuaaau

SEQ ID NO: 14141 - RNA, 22 nt, Human
ucacaaccugcugauaugcugu

SEQ ID NO: 14142 - RNA, 22 nt, Human
ucacaaggagaaucuggaauuu

SEQ ID NO: 14143 - RNA, 24 nt, Human
ucacaaggcugccaagugccuguu

SEQ ID NO: 14144 - RNA, 24 nt, Human
ucacaagggccggcacuucugcag

SEQ ID NO: 14145 - RNA, 24 nt, Human
ucacacuggcaggcgguggcucag

SEQ ID NO: 14146 - RNA, 24 nt, Human
ucacacugguuucucgugcccacc

SEQ ID NO: 14147 - RNA, 24 nt, Human
ucacagcaacugggggaauaucgg

SEQ ID NO: 14148 - RNA, 24 nt, Human
ucacaggcaggcccggcugcacaa

SEQ ID NO: 14149 - RNA, 24 nt, Human
ucacaggcuagccuuucugcacug

SEQ ID NO: 14150 - RNA, 23 nt, Human
ucacaggggaagcugugguacgu

SEQ ID NO: 14151 - RNA, 18 nt, Human
ucacaguggaauucgucc

SEQ ID NO: 14152 - RNA, 22 nt, Human
ucacaguggccucaagugugau

SEQ ID NO: 14153 - RNA, 24 nt, Human
ucacaucguuguuggggaugacgg

SEQ ID NO: 14154 - RNA, 24 nt, Human
ucacauuguaguagggagguuggg

SEQ ID NO: 14155 - RNA, 22 nt, Human
ucaccaccuacuugaguguuga

SEQ ID NO: 14156 - RNA, 24 nt, Human
ucaccaguaauaguggcauuggau

SEQ ID NO: 14157 - RNA, 24 nt, Human
ucaccaguaucuuuuuucugaagg

SEQ ID NO: 14158 - RNA, 22 nt, Human
ucacccaggcuggagugcagug

SEQ ID NO: 14159 - RNA, 22 nt, Human
ucacccaguguaaacagcauga

SEQ ID NO: 14160 - RNA, 24 nt, Human
ucacccgcgccaagccugacagca

SEQ ID NO: 14161 - RNA, 24 nt, Human
ucaccggaggaauaauuuaugaug

SEQ ID NO: 14162 - RNA, 22 nt, Human
ucaccguguuagccgggauggu

SEQ ID NO: 14163 - RNA, 22 nt, Human
ucaccuaggcuggagugcagug

SEQ ID NO: 14164 - RNA, 24 nt, Human
ucaccugaaugcuguggaguccga

SEQ ID NO: 14165 - RNA, 24 nt, Human
ucacgguguaagaagggagaggau

SEQ ID NO: 14166 - RNA, 24 nt, Human
ucacgugauguuucccaggcacug

SEQ ID NO: 14167 - RNA, 24 nt, Human
ucacuagaugcccaugguccaggc

SEQ ID NO: 14168 - RNA, 24 nt, Human
ucacucaauuuaucaguaauggag

SEQ ID NO: 14169 - RNA, 22 nt, Human
ucacucaccuccuuagugaaga

SEQ ID NO: 14170 - RNA, 24 nt, Human
ucacucaggagcauguuauucaau

SEQ ID NO: 14171 - RNA, 24 nt, Human
ucacucuccacccuucccuucugc

SEQ ID NO: 14172 - RNA, 20 nt, Human
ucacucuggcuguccaagcc

SEQ ID NO: 14173 - RNA, 24 nt, Human
ucacugauguuggagcugggcucu

SEQ ID NO: 14174 - RNA, 22 nt, Human
ucacugcaaccuccaccucccg

SEQ ID NO: 14175 - RNA, 24 nt, Human
ucacugcaaccuccaccucccggg

SEQ ID NO: 14176 - RNA, 24 nt, Human
ucacugcaaccuccaccuccuggg

SEQ ID NO: 14177 - RNA, 22 nt, Human
ucacugcaaccuccgccuccca

SEQ ID NO: 14178 - RNA, 22 nt, Human
ucacugcaaccucugccuccca

SEQ ID NO: 14179 - RNA, 22 nt, Human
ucacugcaaccucugccucccg

SEQ ID NO: 14180 - RNA, 22 nt, Human
ucacugcaaccucugccuuccg

SEQ ID NO: 14181 - RNA, 22 nt, Human
ucacugcaaccucugcuucugg

SEQ ID NO: 14182 - RNA, 22 nt, Human
ucacugcaaucucugccugccg

SEQ ID NO: 14183 - RNA, 24 nt, Human
ucacugcacuccagccugggauac

SEQ ID NO: 14184 - RNA, 24 nt, Human
ucacugcagccuugaacuccuggg

SEQ ID NO: 14185 - RNA, 24 nt, Human
ucacugccaccagaagacugugga

SEQ ID NO: 14186 - RNA, 24 nt, Human
ucacugcccucaggcuuggccugu

SEQ ID NO: 14187 - RNA, 24 nt, Human
ucacugccuccugccuuccuuaug

SEQ ID NO: 14188 - RNA, 24 nt, Human
ucacugcggccacaaccuuccagc

SEQ ID NO: 14189 - RNA, 24 nt, Human
ucacuggauaucuugguaugugaa

SEQ ID NO: 14190 - RNA, 24 nt, Human
ucacugggaacgcuuaauggggcc

SEQ ID NO: 14191 - RNA, 24 nt, Human
ucacugggaauugcgaaggggaua

SEQ ID NO: 14192 - RNA, 24 nt, Human
ucacugguaaaaugcuucugaauu

SEQ ID NO: 14193 - RNA, 24 nt, Human
ucacugguugucauucuggguauu

SEQ ID NO: 14194 - RNA, 22 nt, Human
ucacuguuccuuuuuguugaga

SEQ ID NO: 14195 - RNA, 23 nt, Human
ucacuuagucccugcgggugccu

SEQ ID NO: 14196 - RNA, 22 nt, Human
ucacuuuucaaaguuccaaaua

SEQ ID NO: 14197 - RNA, 24 nt, Human
ucagaaaugugaauuccaggaugc

SEQ ID NO: 14198 - RNA, 24 nt, Human
ucagaagaagucaacaggcccaag

SEQ ID NO: 14199 - RNA, 24 nt, Human
ucagaagagucagaugggcuuccc

SEQ ID NO: 14200 - RNA, 24 nt, Human
ucagaaggcacaaagagcuguauu

SEQ ID NO: 14201 - RNA, 24 nt, Human
ucagaaggucuaggugagcuuuuc

SEQ ID NO: 14202 - RNA, 22 nt, Human
ucagaagucuaaggaacagacu

SEQ ID NO: 14203 - RNA, 20 nt, Human
ucagaauguguccuccucau

SEQ ID NO: 14204 - RNA, 18 nt, Human
ucagacccagagguuguc

SEQ ID NO: 14205 - RNA, 24 nt, Human
ucagaccccuugaggcauagaugg

SEQ ID NO: 14206 - RNA, 23 nt, Human
ucagacugcuguuggauuuuaac

SEQ ID NO: 14207 - RNA, 24 nt, Human
ucagagagggggaaguguggacaa

SEQ ID NO: 14208 - RNA, 22 nt, Human
ucagagcaacaggcuauaccag

SEQ ID NO: 14209 - RNA, 24 nt, Human
ucagagcaacggcccaagucuggg

SEQ ID NO: 14210 - RNA, 24 nt, Human
ucagagcagcgacagugaggccgg

SEQ ID NO: 14211 - RNA, 22 nt, Human
ucagagcaggaaggccagcagu

SEQ ID NO: 14212 - RNA, 24 nt, Human
ucagauccagcuuguggaugcucu

SEQ ID NO: 14213 - RNA, 22 nt, Human
ucagauccccagaacaagauuu

SEQ ID NO: 14214 - RNA, 24 nt, Human
ucagcaaugagaauauagcaguga

SEQ ID NO: 14215 - RNA, 24 nt, Human
ucagcacgcgagcgugguggaugg

SEQ ID NO: 14216 - RNA, 24 nt, Human
ucagcagauccuggccuaaugggg

SEQ ID NO: 14217 - RNA, 24 nt, Human
ucagcagcuacauuuucuguuuuu

SEQ ID NO: 14218 - RNA, 22 nt, Human
ucagcagguauuuauugagccc

SEQ ID NO: 14219 - RNA, 24 nt, Human
ucagcauaggcagggucacccaga

SEQ ID NO: 14220 - RNA, 24 nt, Human
ucagccaggguacaagcauucucu

SEQ ID NO: 14221 - RNA, 24 nt, Human
ucagcccauucagcaggaguagga

SEQ ID NO: 14222 - RNA, 23 nt, Human
ucagcccgccagcccgccagcuc

SEQ ID NO: 14223 - RNA, 24 nt, Human
ucagcucaccgcaacaagagcgaa

SEQ ID NO: 14224 - RNA, 24 nt, Human
ucagcucagugaaaccucggccuc

SEQ ID NO: 14225 - RNA, 24 nt, Human
ucagcucgaugacugccugcuuca

SEQ ID NO: 14226 - RNA, 24 nt, Human
ucagcugagcugaguaagggcucc

SEQ ID NO: 14227 - RNA, 24 nt, Human
ucaggaguguggccauguuuucug

SEQ ID NO: 14228 - RNA, 24 nt, Human
ucaggcagauugguauucagcgcu

SEQ ID NO: 14229 - RNA, 22 nt, Human
ucaggcaugacaugugcucccu

SEQ ID NO: 14230 - RNA, 24 nt, Human
ucaggcccaggauguaauccagcu

SEQ ID NO: 14231 - RNA, 24 nt, Human
ucaggcccugcucaagauuccagu

SEQ ID NO: 14232 - RNA, 24 nt, Human
ucagggagggacucagcaaaugau

SEQ ID NO: 14233 - RNA, 24 nt, Human
ucagggcaguguucugcugauggc

SEQ ID NO: 14234 - RNA, 24 nt, Human
ucagggucuucacgaagaucugca

SEQ ID NO: 14235 - RNA, 24 nt, Human
ucagggugaggcaguuaagggucc

SEQ ID NO: 14236 - RNA, 24 nt, Human
ucaggucaggucucucacccagga

SEQ ID NO: 14237 - RNA, 22 nt, Human
ucaguaauucaacaaccuugcu

SEQ ID NO: 14238 - RNA, 24 nt, Human
ucaguacgagugugcgugagugug

SEQ ID NO: 14239 - RNA, 20 nt, Human
ucaguaggccaguccaggug

SEQ ID NO: 14240 - RNA, 24 nt, Human
ucaguaggccuggaaucucuucuc

SEQ ID NO: 14241 - RNA, 24 nt, Human
ucaguaguuaggauucugauuuug

SEQ ID NO: 14242 - RNA, 24 nt, Human
ucagucacacagaaucugcuuugu

SEQ ID NO: 14243 - RNA, 22 nt, Human
ucagucaggaggacagggcccu

SEQ ID NO: 14244 - RNA, 24 nt, Human
ucaguccaguuauauccgcaguau

SEQ ID NO: 14245 - RNA, 24 nt, Human
ucagucccacuccaggcuucaccc

SEQ ID NO: 14246 - RNA, 24 nt, Human
ucagucucaacuccucccacucua

SEQ ID NO: 14247 - RNA, 22 nt, Human
ucagucucuucucucaccuacc

SEQ ID NO: 14248 - RNA, 22 nt, Human
ucagucuuuuugucuauuccug

SEQ ID NO: 14249 - RNA, 18 nt, Human
ucagugaaacacaguagu

SEQ ID NO: 14250 - RNA, 24 nt, Human
ucagugaauauuugcuaagaacag

SEQ ID NO: 14251 - RNA, 24 nt, Human
ucagugagacucuugguggggcgg

SEQ ID NO: 14252 - RNA, 24 nt, Human
ucagugagcgugugggaacugaga

SEQ ID NO: 14253 - RNA, 24 nt, Human
ucagugcacacacugauuuuucac

SEQ ID NO: 14254 - RNA, 24 nt, Human
ucagugcaccauguguuugcuuug

SEQ ID NO: 14255 - RNA, 23 nt, Human
ucagugccccuuuaauuucuggc

SEQ ID NO: 14256 - RNA, 24 nt, Human
ucagugccugauggaguggccggg

SEQ ID NO: 14257 - RNA, 24 nt, Human
ucaguggaaaaccgauggggaacc

SEQ ID NO: 14258 - RNA, 24 nt, Human
ucaguggagaacaggaugcucugu

SEQ ID NO: 14259 - RNA, 22 nt, Human
ucaguugauagcagaugcuguu

SEQ ID NO: 14260 - RNA, 24 nt, Human
ucaguuuuagauuggagcugguau

SEQ ID NO: 14261 - RNA, 22 nt, Human
ucauaaacuggcaagcacuacc

SEQ ID NO: 14262 - RNA, 24 nt, Human
ucauaaggguaguuggggauuucc

SEQ ID NO: 14263 - RNA, 24 nt, Human
ucauacauuuguuauauugucaca

SEQ ID NO: 14264 - RNA, 24 nt, Human
ucauacuuuccuuugauuucccag

SEQ ID NO: 14265 - RNA, 24 nt, Human
ucauagggacaaaccgaggggguu

SEQ ID NO: 14266 - RNA, 24 nt, Human
ucauaguggcaggguggggguggg

SEQ ID NO: 14267 - RNA, 22 nt, Human
ucauaucauuuugaaagcugag

SEQ ID NO: 14268 - RNA, 22 nt, Human
ucauauuuagcucuacauguuu

SEQ ID NO: 14269 - RNA, 24 nt, Human
ucaucaggaaucauuugguuuggg

SEQ ID NO: 14270 - RNA, 22 nt, Human
ucauccugcaugguggaggguc

SEQ ID NO: 14271 - RNA, 22 nt, Human
ucaucuauuaaagugggagaac

SEQ ID NO: 14272 - RNA, 22 nt, Human
ucauguaucacauccagcaagu

SEQ ID NO: 14273 - RNA, 24 nt, Human
ucauugagaggugauuaggggacu

SEQ ID NO: 14274 - RNA, 24 nt, Human
ucauugaggccauccgaagagcca

SEQ ID NO: 14275 - RNA, 24 nt, Human
ucauugauuguguggugagaaucc

SEQ ID NO: 14276 - RNA, 24 nt, Human
ucauugcagucauuauaggauuga

SEQ ID NO: 14277 - RNA, 24 nt, Human
ucauugcucccuuguguuguacua

SEQ ID NO: 14278 - RNA, 24 nt, Human
ucauuggaaguggcaaggggcuuc

SEQ ID NO: 14279 - RNA, 24 nt, Human
ucauuggucgaagaguugaaguua

SEQ ID NO: 14280 - RNA, 24 nt, Human
ucauuuggugggcugauucaucuc

SEQ ID NO: 14281 - RNA, 22 nt, Human
ucauuuucuuucacgcugcugc

SEQ ID NO: 14282 - RNA, 22 nt, Human
uccaaaaguggagaggaauaug

SEQ ID NO: 14283 - RNA, 22 nt, Human
uccaaagacucaacaguuagac

SEQ ID NO: 14284 - RNA, 24 nt, Human
uccaaaggugagaguuggagugag

SEQ ID NO: 14285 - RNA, 24 nt, Human
uccaaauaccagagacugaaauuu

SEQ ID NO: 14286 - RNA, 24 nt, Human
uccaaggcuuccugaaaagcaguc

SEQ ID NO: 14287 - RNA, 24 nt, Human
uccaauaaaagaacucuaugagga

SEQ ID NO: 14288 - RNA, 22 nt, Human
uccaaugcaccaugggugaauu

SEQ ID NO: 14289 - RNA, 24 nt, Human
uccacaauucuagacauuuuccau

SEQ ID NO: 14290 - RNA, 24 nt, Human
uccacagaguuuaguuuccucauu

SEQ ID NO: 14291 - RNA, 24 nt, Human
uccacaggggcuggccguucuggg

SEQ ID NO: 14292 - RNA, 24 nt, Human
uccacagucaugagccuggcuugc

SEQ ID NO: 14293 - RNA, 24 nt, Human
uccacagugucagcuauggccaug

SEQ ID NO: 14294 - RNA, 24 nt, Human
uccacaucagccaucugcuggccc

SEQ ID NO: 14295 - RNA, 22 nt, Human
uccacaugaugaaacccagaug

SEQ ID NO: 14296 - RNA, 19 nt, Human
uccaccagaaaacuugauc

SEQ ID NO: 14297 - RNA, 23 nt, Human
uccaccuggauugcaggcuccag

SEQ ID NO: 14298 - RNA, 24 nt, Human
uccaccuguugacaggacagcagg

SEQ ID NO: 14299 - RNA, 24 nt, Human
uccacgaauugugaauggcuccag

SEQ ID NO: 14300 - RNA, 24 nt, Human
uccacuggcgaaagaugccuuucu

SEQ ID NO: 14301 - RNA, 22 nt, Human
uccacuggguuggaaaccccaa

SEQ ID NO: 14302 - RNA, 24 nt, Human
uccagagguaaagcccauugugug

SEQ ID NO: 14303 - RNA, 24 nt, Human
uccagaguucaguuccuucuggca

SEQ ID NO: 14304 - RNA, 24 nt, Human
uccagcaguucugucagcaaaggg

SEQ ID NO: 14305 - RNA, 22 nt, Human
uccagcuggucaccuuucuccu

SEQ ID NO: 14306 - RNA, 24 nt, Human
uccaggaccucuucucugucaccu

SEQ ID NO: 14307 - RNA, 24 nt, Human
uccaggaugucuacgaaauuggug

SEQ ID NO: 14308 - RNA, 22 nt, Human
uccagggauggcaagucaccgu

SEQ ID NO: 14309 - RNA, 22 nt, Human
uccagggugggccucagacccu

SEQ ID NO: 14310 - RNA, 24 nt, Human
uccagguugaugguuuccaugucc

SEQ ID NO: 14311 - RNA, 21 nt, Human
uccagugaaacaggucucuuu

SEQ ID NO: 14312 - RNA, 24 nt, Human
uccagugucaaucccaaaccccga

SEQ ID NO: 14313 - RNA, 24 nt, Human
uccaucuaaaggcgcugcuugauu

SEQ ID NO: 14314 - RNA, 22 nt, Human
uccaucuacgagauuuuccaga

SEQ ID NO: 14315 - RNA, 24 nt, Human
uccauggcuaaaucaaagcugccc

SEQ ID NO: 14316 - RNA, 22 nt, Human
uccaugggcgagauccaucgac

SEQ ID NO: 14317 - RNA, 24 nt, Human
uccauucuggcucugguggaugga

SEQ ID NO: 14318 - RNA, 24 nt, Human
ucccaaaccacuccucugcucucc

SEQ ID NO: 14319 - RNA, 24 nt, Human
ucccaaguccacacaggggaggug

SEQ ID NO: 14320 - RNA, 24 nt, Human
ucccaauuggaguucugcugguga

SEQ ID NO: 14321 - RNA, 22 nt, Human
ucccacagcuuccuagccacag

SEQ ID NO: 14322 - RNA, 22 nt, Human
ucccacaugcccaccaggagca

SEQ ID NO: 14323 - RNA, 20 nt, Human
ucccacuuaaacacaggccc

SEQ ID NO: 14324 - RNA, 24 nt, Human
ucccagaaucccuugucccucccc

SEQ ID NO: 14325 - RNA, 22 nt, Human
ucccagagaaaguuggucagcu

SEQ ID NO: 14326 - RNA, 19 nt, Human
ucccagagacuguuucucc

SEQ ID NO: 14327 - RNA, 23 nt, Human
ucccagccagcccgggcccuggg

SEQ ID NO: 14328 - RNA, 24 nt, Human
ucccaggccugaugcccacuccuc

SEQ ID NO: 14329 - RNA, 24 nt, Human
ucccaggggaagcccccagcccug

SEQ ID NO: 14330 - RNA, 24 nt, Human
uccccagcagaaaauuugccuuuu

SEQ ID NO: 14331 - RNA, 24 nt, Human
ucccccacauuccaugcaccuccc

SEQ ID NO: 14332 - RNA, 24 nt, Human
ucccccagcugcucugccccuuuc

SEQ ID NO: 14333 - RNA, 24 nt, Human
ucccccgucgcugccccgccccug

SEQ ID NO: 14334 - RNA, 23 nt, Human
ucccccgugccuuggugacgaug

SEQ ID NO: 14335 - RNA, 24 nt, Human
ucccccuaagcccccacugccuuc

SEQ ID NO: 14336 - RNA, 24 nt, Human
ucccccucaagguaacauuggaug

SEQ ID NO: 14337 - RNA, 24 nt, Human
ucccccucuuccucuuggccucug

SEQ ID NO: 14338 - RNA, 24 nt, Human
ucccccugcucuaggccaaggugg

SEQ ID NO: 14339 - RNA, 24 nt, Human
uccccgagcccugaaguggaguaa

SEQ ID NO: 14340 - RNA, 24 nt, Human
uccccgauggcccacugcgugacc

SEQ ID NO: 14341 - RNA, 19 nt, Human
uccccggcugaaguuuucu

SEQ ID NO: 14342 - RNA, 24 nt, Human
uccccgugacaggugggccugagg

SEQ ID NO: 14343 - RNA, 24 nt, Human
uccccugccagcucccccagcugc

SEQ ID NO: 14344 - RNA, 24 nt, Human
uccccuuuuuaacuuccugugccc

SEQ ID NO: 14345 - RNA, 24 nt, Human
ucccgaccaagauggcggccgugg

SEQ ID NO: 14346 - RNA, 24 nt, Human
ucccggaaagggcggggcggccaa

SEQ ID NO: 14347 - RNA, 24 nt, Human
ucccggagaguaaauccucuuucc

SEQ ID NO: 14348 - RNA, 24 nt, Human
ucccggagucagaaaaggcagguc

SEQ ID NO: 14349 - RNA, 24 nt, Human
ucccggauccaggcguccgggauc

SEQ ID NO: 14350 - RNA, 24 nt, Human
ucccggggccgggggaccuuagcg

SEQ ID NO: 14351 - RNA, 24 nt, Human
ucccggggcgucuucgugcagugg

SEQ ID NO: 14352 - RNA, 24 nt, Human
ucccgggugugcagggcauucuag

SEQ ID NO: 14353 - RNA, 24 nt, Human
ucccggugcucugcgagaucuccc

SEQ ID NO: 14354 - RNA, 24 nt, Human
ucccguguccugaacuuggguccc

SEQ ID NO: 14355 - RNA, 24 nt, Human
ucccuagaaaaacauuuuugucac

SEQ ID NO: 14356 - RNA, 24 nt, Human
ucccuagaucaauuuucuucugga

SEQ ID NO: 14357 - RNA, 24 nt, Human
ucccucagcagcguggugaccgug

SEQ ID NO: 14358 - RNA, 24 nt, Human
ucccuccagccucuccuccauucc

SEQ ID NO: 14359 - RNA, 21 nt, Human
ucccuccuaguuguguuguug

SEQ ID NO: 14360 - RNA, 22 nt, Human
ucccucuccugucugcuucuuu

SEQ ID NO: 14361 - RNA, 22 nt, Human
ucccugagacucuuuaacuucu

SEQ ID NO: 14362 - RNA, 24 nt, Human
ucccugagccaugacugcuugacu

SEQ ID NO: 14363 - RNA, 24 nt, Human
ucccugagccucagucucucaucc

SEQ ID NO: 14364 - RNA, 24 nt, Human
ucccugagcucccuagagucggcc

SEQ ID NO: 14365 - RNA, 24 nt, Human
ucccugaggccaacucuuccugau

SEQ ID NO: 14366 - RNA, 24 nt, Human
ucccuggaccagcccgguggcacc

SEQ ID NO: 14367 - RNA, 24 nt, Human
ucccuggagggacuaggaugcugg

SEQ ID NO: 14368 - RNA, 24 nt, Human
ucccuggcuuaugagcaggcugag

SEQ ID NO: 14369 - RNA, 24 nt, Human
ucccugggaguaauuuuggugaag

SEQ ID NO: 14370 - RNA, 24 nt, Human
ucccugggcacagugagcagggcu

SEQ ID NO: 14371 - RNA, 24 nt, Human
ucccuggugcucucaguccaggca

SEQ ID NO: 14372 - RNA, 24 nt, Human
ucccuguacaguguuaccaucccc

SEQ ID NO: 14373 - RNA, 24 nt, Human
ucccugugacuccacaggccagac

SEQ ID NO: 14374 - RNA, 24 nt, Human
ucccugugggcucccuuugggggu

SEQ ID NO: 14375 - RNA, 24 nt, Human
ucccugugucuccccagguaguaa

SEQ ID NO: 14376 - RNA, 21 nt, Human
ucccuguuguccauuguguau

SEQ ID NO: 14377 - RNA, 24 nt, Human
ucccuuaccuacauuguuccaaca

SEQ ID NO: 14378 - RNA, 22 nt, Human
ucccuucagagcccauggguuu

SEQ ID NO: 14379 - RNA, 24 nt, Human
ucccuugcaauuguucgccccucu

SEQ ID NO: 14380 - RNA, 24 nt, Human
uccgagaucugcuuauguucccaa

SEQ ID NO: 14381 - RNA, 24 nt, Human
uccgaguuccugcuccaguuagac

SEQ ID NO: 14382 - RNA, 24 nt, Human
uccgcaccucuuccaaccacccuc

SEQ ID NO: 14383 - RNA, 24 nt, Human
uccgcagagaacagacuuggcccu

SEQ ID NO: 14384 - RNA, 24 nt, Human
uccguacacacgaagccuuuaauc

SEQ ID NO: 14385 - RNA, 24 nt, Human
uccgucuccugaaacaugcccuua

SEQ ID NO: 14386 - RNA, 22 nt, Human
uccgugcgcgugcugcggccgu

SEQ ID NO: 14387 - RNA, 24 nt, Human
uccgugcgcguugcugcggccgug

SEQ ID NO: 14388 - RNA, 22 nt, Human
uccguucuaagccauugcugac

SEQ ID NO: 14389 - RNA, 23 nt, Human
uccuaagaugacuauaguagagg

SEQ ID NO: 14390 - RNA, 24 nt, Human
uccuaggagucugaaggccucgcu

SEQ ID NO: 14391 - RNA, 22 nt, Human
uccuauuaucucauaccuaagg

SEQ ID NO: 14392 - RNA, 22 nt, Human
uccucuucagcuggugaauccu

SEQ ID NO: 14393 - RNA, 24 nt, Human
uccugcuccugacucaccgcuguu

SEQ ID NO: 14394 - RNA, 24 nt, Human
uccuggggccacuguugggggugg

SEQ ID NO: 14395 - RNA, 24 nt, Human
uccuggugcaaaauggcaacucuu

SEQ ID NO: 14396 - RNA, 24 nt, Human
uccuucgucuaccacucugugcca

SEQ ID NO: 14397 - RNA, 24 nt, Human
uccuugggaaaagggguagcaaag

SEQ ID NO: 14398 - RNA, 24 nt, Human
uccuugguaguuuaacucuggaag

SEQ ID NO: 14399 - RNA, 24 nt, Human
ucgaagcugcacaaagguggcccc

SEQ ID NO: 14400 - RNA, 24 nt, Human
ucgaaggcaccagguccaaugcag

SEQ ID NO: 14401 - RNA, 22 nt, Human
ucgaaguuuaucaggauguuca

SEQ ID NO: 14402 - RNA, 24 nt, Human
ucgagcguggucaagcugcugcug

SEQ ID NO: 14403 - RNA, 18 nt, Human
ucgaguggauaauugaac

SEQ ID NO: 14404 - RNA, 22 nt, Human
ucgaguugaugcuagaaugggu

SEQ ID NO: 14405 - RNA, 24 nt, Human
ucgcagacuacggaccugucuggg

SEQ ID NO: 14406 - RNA, 24 nt, Human
ucgcagagucaucuguuugguggg

SEQ ID NO: 14407 - RNA, 24 nt, Human
ucgcaggcugcucugucucuuagc

SEQ ID NO: 14408 - RNA, 24 nt, Human
ucgcagugucagcuggggcuguuu

SEQ ID NO: 14409 - RNA, 24 nt, Human
ucgccacgaaggaucggcugcggg

SEQ ID NO: 14410 - RNA, 24 nt, Human
ucgccauaguugagugagccugac

SEQ ID NO: 14411 - RNA, 22 nt, Human
ucgcccagguuggagugcagug

SEQ ID NO: 14412 - RNA, 24 nt, Human
ucgccggccguucccguucccggc

SEQ ID NO: 14413 - RNA, 24 nt, Human
ucgccgguccaggucguagggccg

SEQ ID NO: 14414 - RNA, 24 nt, Human
ucgccuggaauucgagcagagaug

SEQ ID NO: 14415 - RNA, 24 nt, Human
ucgcgggugacuccgggcuccgug

SEQ ID NO: 14416 - RNA, 24 nt, Human
ucgcucccgucccgcccgcggucc

SEQ ID NO: 14417 - RNA, 24 nt, Human
ucgcucugaaaucaucugacugug

SEQ ID NO: 14418 - RNA, 24 nt, Human
ucgcuggagcugacugcugcccgc

SEQ ID NO: 14419 - RNA, 24 nt, Human
ucggaagcggagcaaggucgaggc

SEQ ID NO: 14420 - RNA, 24 nt, Human
ucggacggaaagcggggcugcggg

SEQ ID NO: 14421 - RNA, 24 nt, Human
ucggacuaggccuggaggccgccg

SEQ ID NO: 14422 - RNA, 22 nt, Human
ucggaggaaauccugucucgug

SEQ ID NO: 14423 - RNA, 22 nt, Human
ucggcagggaacaggaaguagg

SEQ ID NO: 14424 - RNA, 22 nt, Human
ucggccaaagauuucacccuug

SEQ ID NO: 14425 - RNA, 24 nt, Human
ucggccaucaacguggccaucccg

SEQ ID NO: 14426 - RNA, 24 nt, Human
ucgggccucgguggugccuggguc

SEQ ID NO: 14427 - RNA, 24 nt, Human
ucggguggugacuccagcgcagga

SEQ ID NO: 14428 - RNA, 24 nt, Human
ucggucggccuaggcuuucugcug

SEQ ID NO: 14429 - RNA, 24 nt, Human
ucggugcuugguaccuggucucuc

SEQ ID NO: 14430 - RNA, 24 nt, Human
ucggugugauugaugccccucaaa

SEQ ID NO: 14431 - RNA, 22 nt, Human
ucgguguuccugaccaugcugu

SEQ ID NO: 14432 - RNA, 24 nt, Human
ucgguucgcuggagagaggcgagc

SEQ ID NO: 14433 - RNA, 22 nt, Human
ucguauggaaugcaccugcaag

SEQ ID NO: 14434 - RNA, 24 nt, Human
ucgucaggcucagguagcugcugg

SEQ ID NO: 14435 - RNA, 22 nt, Human
ucgugagucugacauuaacaga

SEQ ID NO: 14436 - RNA, 24 nt, Human
ucguugggauaaaagccuuugacc

SEQ ID NO: 14437 - RNA, 24 nt, Human
ucuaaaccaaacaggaaaggugca

SEQ ID NO: 14438 - RNA, 24 nt, Human
ucuaaagugacuauuuggaacucu

SEQ ID NO: 14439 - RNA, 24 nt, Human
ucuaaagugcauucuugcagcuaa

SEQ ID NO: 14440 - RNA, 24 nt, Human
ucuaacagccugcccgugcuuucc

SEQ ID NO: 14441 - RNA, 24 nt, Human
ucuaagaacacuacuagaagcauu

SEQ ID NO: 14442 - RNA, 24 nt, Human
ucuaagggcaaacuccagcagcca

SEQ ID NO: 14443 - RNA, 24 nt, Human
ucuaauggcuuaccgagacagcuc

SEQ ID NO: 14444 - RNA, 24 nt, Human
ucuacaacaacaguguaagugaac

SEQ ID NO: 14445 - RNA, 24 nt, Human
ucuacaaguguuugcuauuuacaa

SEQ ID NO: 14446 - RNA, 22 nt, Human
ucuacaccuaggcuguccgaca

SEQ ID NO: 14447 - RNA, 24 nt, Human
ucuacagucugugaauauaccaau

SEQ ID NO: 14448 - RNA, 24 nt, Human
ucuacagucuucacaugccccacu

SEQ ID NO: 14449 - RNA, 24 nt, Human
ucuacauuagcagugcugugcaag

SEQ ID NO: 14450 - RNA, 24 nt, Human
ucuagagucagaacuggccgaagc

SEQ ID NO: 14451 - RNA, 22 nt, Human
ucuagcagcuacggguccucug

SEQ ID NO: 14452 - RNA, 22 nt, Human
ucuagcucugauuuuaagggau

SEQ ID NO: 14453 - RNA, 24 nt, Human
ucuaguuacagauucaugaaacuu

SEQ ID NO: 14454 - RNA, 24 nt, Human
ucuauccccugaccuucagcugaa

SEQ ID NO: 14455 - RNA, 22 nt, Human
ucuaucuuuauccggaauccuc

SEQ ID NO: 14456 - RNA, 24 nt, Human
ucuaugaguccucucuaggaggag

SEQ ID NO: 14457 - RNA, 24 nt, Human
ucuaugcucagaauccaaugcgga

SEQ ID NO: 14458 - RNA, 22 nt, Human
ucucaaccucaguguguguggg

SEQ ID NO: 14459 - RNA, 22 nt, Human
ucucaagacaagaacguuggca

SEQ ID NO: 14460 - RNA, 24 nt, Human
ucucaagcaaauuaaguucugacu

SEQ ID NO: 14461 - RNA, 24 nt, Human
ucucaagugauccacccaccuugg

SEQ ID NO: 14462 - RNA, 24 nt, Human
ucucaccgaagugaucuggaaugu

SEQ ID NO: 14463 - RNA, 22 nt, Human
ucucaccucaaacucaccuucu

SEQ ID NO: 14464 - RNA, 24 nt, Human
ucucacgccgcggccucacccggc

SEQ ID NO: 14465 - RNA, 24 nt, Human
ucucacucugucaccuaggcugaa

SEQ ID NO: 14466 - RNA, 22 nt, Human
ucucacuucuguguuauggaca

SEQ ID NO: 14467 - RNA, 24 nt, Human
ucucagcccuguacugguucaacu

SEQ ID NO: 14468 - RNA, 24 nt, Human
ucucagggaugccacaaccauggg

SEQ ID NO: 14469 - RNA, 24 nt, Human
ucucagguuuuaaauguugcaaau

SEQ ID NO: 14470 - RNA, 24 nt, Human
ucucaucgcugcucaguacagcgg

SEQ ID NO: 14471 - RNA, 24 nt, Human
ucucaugauaauaguuuccuucac

SEQ ID NO: 14472 - RNA, 24 nt, Human
ucucaugcugaacaguucuccauc

SEQ ID NO: 14473 - RNA, 24 nt, Human
ucucauuguugcugaaugccccuc

SEQ ID NO: 14474 - RNA, 21 nt, Human
ucuccaacccccaagcucuug

SEQ ID NO: 14475 - RNA, 21 nt, Human
ucuccaaccuccuugagugac

SEQ ID NO: 14476 - RNA, 24 nt, Human
ucuccacucugcacggcggcugag

SEQ ID NO: 14477 - RNA, 21 nt, Human
ucuccaggcacacacagacac

SEQ ID NO: 14478 - RNA, 24 nt, Human
ucuccaggugaagcagaaaggugc

SEQ ID NO: 14479 - RNA, 24 nt, Human
ucuccagguucuucaauaucagug

SEQ ID NO: 14480 - RNA, 24 nt, Human
ucuccagucuugucugcuguuucu

SEQ ID NO: 14481 - RNA, 24 nt, Human
ucuccaugcccccuccaguuuggg

SEQ ID NO: 14482 - RNA, 24 nt, Human
ucuccauguccacagcugauuucc

SEQ ID NO: 14483 - RNA, 24 nt, Human
ucuccauuaggaguggggugcucc

SEQ ID NO: 14484 - RNA, 24 nt, Human
ucuccccgccuacguuccagacuc

SEQ ID NO: 14485 - RNA, 24 nt, Human
ucucccugcugaaucgaaaggaag

SEQ ID NO: 14486 - RNA, 24 nt, Human
ucuccgaguuugcgacucgcggac

SEQ ID NO: 14487 - RNA, 24 nt, Human
ucuccugggguccugcagguguac

SEQ ID NO: 14488 - RNA, 24 nt, Human
ucuccuggugcagaggggcagcuu

SEQ ID NO: 14489 - RNA, 24 nt, Human
ucucgaguggggauccagcaaggc

SEQ ID NO: 14490 - RNA, 22 nt, Human
ucucgcucugucacccaggcug

SEQ ID NO: 14491 - RNA, 24 nt, Human
ucucgggcucuacucagacuagcg

SEQ ID NO: 14492 - RNA, 24 nt, Human
ucucgggggcaccuuccgggguuc

SEQ ID NO: 14493 - RNA, 24 nt, Human
ucucguaaucuuggcuuuugaagu

SEQ ID NO: 14494 - RNA, 24 nt, Human
ucucuaacucaggcaucucuggau

SEQ ID NO: 14495 - RNA, 22 nt, Human
ucucuaggccaggugcaguggc

SEQ ID NO: 14496 - RNA, 24 nt, Human
ucucucagaacucuuggcuuucaa

SEQ ID NO: 14497 - RNA, 24 nt, Human
ucucuccacuaucuugaaagcuau

SEQ ID NO: 14498 - RNA, 24 nt, Human
ucucugacgauuagugaugcugag

SEQ ID NO: 14499 - RNA, 22 nt, Human
ucucugaggcccagcugcuccc

SEQ ID NO: 14500 - RNA, 24 nt, Human
ucucugaugaugcaauccaggugg

SEQ ID NO: 14501 - RNA, 24 nt, Human
ucucuggguggccaugcuugguuu

SEQ ID NO: 14502 - RNA, 24 nt, Human
ucucuggugauuuagauaaggcag

SEQ ID NO: 14503 - RNA, 24 nt, Human
ucucugguuccucucugcagucuc

SEQ ID NO: 14504 - RNA, 24 nt, Human
ucucugugugaugaccuuggaugc

SEQ ID NO: 14505 - RNA, 22 nt, Human
ucucuuccauacuucuuugguc

SEQ ID NO: 14506 - RNA, 24 nt, Human
ucucuuccuuuugaagauccgucu

SEQ ID NO: 14507 - RNA, 24 nt, Human
ucucuuguccucagugucucuucu

SEQ ID NO: 14508 - RNA, 24 nt, Human
ucugaaagaccacagggccggggu

SEQ ID NO: 14509 - RNA, 24 nt, Human
ucugaaauucaugcaagcuuccga

SEQ ID NO: 14510 - RNA, 24 nt, Human
ucugaagauggaacagucauugcu

SEQ ID NO: 14511 - RNA, 24 nt, Human
ucugaagugaggguggagguggag

SEQ ID NO: 14512 - RNA, 22 nt, Human
ucugaaucugacgucugccccu

SEQ ID NO: 14513 - RNA, 24 nt, Human
ucugacagugaaaagcagcaacaa

SEQ ID NO: 14514 - RNA, 24 nt, Human
ucugacccacucugcguccuuuua

SEQ ID NO: 14515 - RNA, 24 nt, Human
ucugacccggacuccguuaccccu

SEQ ID NO: 14516 - RNA, 24 nt, Human
ucugaccuucaaauguguagagag

SEQ ID NO: 14517 - RNA, 24 nt, Human
ucugacuuuauucccaguccucuu

SEQ ID NO: 14518 - RNA, 22 nt, Human
ucugagaaauauguucgcaauu

SEQ ID NO: 14519 - RNA, 24 nt, Human
ucugagaaaucgaguucaggcugc

SEQ ID NO: 14520 - RNA, 24 nt, Human
ucugagguugccaucagccagggc

SEQ ID NO: 14521 - RNA, 24 nt, Human
ucugaucaauccuucuuuuucucu

SEQ ID NO: 14522 - RNA, 24 nt, Human
ucugaucugugacacgaggagagg

SEQ ID NO: 14523 - RNA, 22 nt, Human
ucugauuaggcagaaaacacca

SEQ ID NO: 14524 - RNA, 24 nt, Human
ucugcaaaaccaauaaauacaaga

SEQ ID NO: 14525 - RNA, 24 nt, Human
ucugcaacaacaagugguucacag

SEQ ID NO: 14526 - RNA, 20 nt, Human
ucugcaauauuuuucuccuc

SEQ ID NO: 14527 - RNA, 24 nt, Human
ucugcaaugaaaucauguugacug

SEQ ID NO: 14528 - RNA, 23 nt, Human
ucugcaaugagguucuucugugc

SEQ ID NO: 14529 - RNA, 24 nt, Human
ucugcaauuuccccuaagccaggc

SEQ ID NO: 14530 - RNA, 24 nt, Human
ucugcagcacucugcucacauucc

SEQ ID NO: 14531 - RNA, 24 nt, Human
ucugcagcugauuggcucuggagu

SEQ ID NO: 14532 - RNA, 20 nt, Human
ucugcaguccaggcgugugg

SEQ ID NO: 14533 - RNA, 24 nt, Human
ucugcaguccauagaagagcguga

SEQ ID NO: 14534 - RNA, 21 nt, Human
ucugcaugucagaaaagugca

SEQ ID NO: 14535 - RNA, 24 nt, Human
ucugcauucggcugugagugccag

SEQ ID NO: 14536 - RNA, 24 nt, Human
ucugcauuggcugcugggcauaug

SEQ ID NO: 14537 - RNA, 24 nt, Human
ucugcauuguucuagcugcucccc

SEQ ID NO: 14538 - RNA, 22 nt, Human
ucugcauuuuuaacaagcucca

SEQ ID NO: 14539 - RNA, 24 nt, Human
ucugccagcucaagcgagaccagc

SEQ ID NO: 14540 - RNA, 23 nt, Human
ucugccgaauugaagaggccuga

SEQ ID NO: 14541 - RNA, 22 nt, Human
ucugccucccugucucacucuc

SEQ ID NO: 14542 - RNA, 24 nt, Human
ucugcgcaucaguggucauggcuc

SEQ ID NO: 14543 - RNA, 24 nt, Human
ucugcucgugcuucgccguggccc

SEQ ID NO: 14544 - RNA, 22 nt, Human
ucugcucuaagcacauucuuuc

SEQ ID NO: 14545 - RNA, 22 nt, Human
ucugcucugugucuuggcucca

SEQ ID NO: 14546 - RNA, 24 nt, Human
ucugcuggacaucagggugagugg

SEQ ID NO: 14547 - RNA, 21 nt, Human
ucugcugugauggacacuugu

SEQ ID NO: 14548 - RNA, 22 nt, Human
ucugcuuggacugaucauugaa

SEQ ID NO: 14549 - RNA, 23 nt, Human
ucuggacauauugcgugccuaac

SEQ ID NO: 14550 - RNA, 24 nt, Human
ucuggagaaggagaggaugaugcg

SEQ ID NO: 14551 - RNA, 24 nt, Human
ucuggagagcuuuggauccugggu

SEQ ID NO: 14552 - RNA, 22 nt, Human
ucuggauuugagaggcuuuacu

SEQ ID NO: 14553 - RNA, 24 nt, Human
ucuggcacaggaaauggucuccaa

SEQ ID NO: 14554 - RNA, 24 nt, Human
ucuggcaggaagcauccagggccc

SEQ ID NO: 14555 - RNA, 24 nt, Human
ucuggcauauauuagcugugugac

SEQ ID NO: 14556 - RNA, 24 nt, Human
ucuggcccccugcaugccacccag

SEQ ID NO: 14557 - RNA, 24 nt, Human
ucuggcuccggcuuugcuguagcc

SEQ ID NO: 14558 - RNA, 22 nt, Human
ucuggggugugcacaggcacug

SEQ ID NO: 14559 - RNA, 22 nt, Human
ucuggguaacugaggcuaauau

SEQ ID NO: 14560 - RNA, 24 nt, Human
ucuggugauuguuccuucccuccc

SEQ ID NO: 14561 - RNA, 24 nt, Human
ucuggugggucugauacagguagc

SEQ ID NO: 14562 - RNA, 22 nt, Human
ucugguuucaauggguacgauu

SEQ ID NO: 14563 - RNA, 22 nt, Human
ucugguuugagagacaaugaca

SEQ ID NO: 14564 - RNA, 24 nt, Human
ucugguuuuauuauucaaauuaag

SEQ ID NO: 14565 - RNA, 24 nt, Human
ucuguaaauacccguuaccauauu

SEQ ID NO: 14566 - RNA, 24 nt, Human
ucuguccugcguccucuguccccg

SEQ ID NO: 14567 - RNA, 20 nt, Human
ucugucgggcagguggccgu

SEQ ID NO: 14568 - RNA, 24 nt, Human
ucugucuacuguggugaucuguag

SEQ ID NO: 14569 - RNA, 22 nt, Human
ucugucuucgaccaacugaagc

SEQ ID NO: 14570 - RNA, 24 nt, Human
ucugugacuuccuggagacucacu

SEQ ID NO: 14571 - RNA, 22 nt, Human
ucugugcucaugugccugucug

SEQ ID NO: 14572 - RNA, 24 nt, Human
ucugugucugguucagagcucuuc

SEQ ID NO: 14573 - RNA, 22 nt, Human
ucuguuggaggagcgccaaaag

SEQ ID NO: 14574 - RNA, 24 nt, Human
ucuuacagccucugucucuuuauu

SEQ ID NO: 14575 - RNA, 22 nt, Human
ucuuagauugagaagauguggc

SEQ ID NO: 14576 - RNA, 24 nt, Human
ucuuauguuucuauggcuuugaag

SEQ ID NO: 14577 - RNA, 24 nt, Human
ucuucagagaaacagacuguucau

SEQ ID NO: 14578 - RNA, 24 nt, Human
ucuucaggaaaugcuaaaauuggg

SEQ ID NO: 14579 - RNA, 24 nt, Human
ucuucaguaaucgacauuccacua

SEQ ID NO: 14580 - RNA, 22 nt, Human
ucuuccccaccuucggcuugca

SEQ ID NO: 14581 - RNA, 24 nt, Human
ucuugaacucuauaguguuugauc

SEQ ID NO: 14582 - RNA, 24 nt, Human
ucuugcgcuguaugacaucguccu

SEQ ID NO: 14583 - RNA, 24 nt, Human
ucuugcgucuaaugcugcuccaca

SEQ ID NO: 14584 - RNA, 24 nt, Human
ucuugcucugucacccaggcugga

SEQ ID NO: 14585 - RNA, 24 nt, Human
ucuugcugaucagagcuugguugg

SEQ ID NO: 14586 - RNA, 24 nt, Human
ucuuggccacuuuaauucagaaga

SEQ ID NO: 14587 - RNA, 24 nt, Human
ucuuggguccacauacggccauca

SEQ ID NO: 14588 - RNA, 24 nt, Human
ucuugggugaguuagagauggaag

SEQ ID NO: 14589 - RNA, 24 nt, Human
ucuugugucuagaggcuccagagc

SEQ ID NO: 14590 - RNA, 24 nt, Human
ucuuguuuuccacaugugguaucu

SEQ ID NO: 14591 - RNA, 22 nt, Human
ucuuuagaguauauggccuuua

SEQ ID NO: 14592 - RNA, 22 nt, Human
ucuuuaggacugauauucaauu

SEQ ID NO: 14593 - RNA, 24 nt, Human
ucuuucacuggaauugcaaaggga

SEQ ID NO: 14594 - RNA, 22 nt, Human
ucuuucuacaccucugccagug

SEQ ID NO: 14595 - RNA, 22 nt, Human
ucuuucugaugggaagggucaa

SEQ ID NO: 14596 - RNA, 24 nt, Human
ucuuugcccaaaccaauguccugu

SEQ ID NO: 14597 - RNA, 22 nt, Human
ucuuugcuggaaggugccuccc

SEQ ID NO: 14598 - RNA, 22 nt, Human
ucuuuuccagaguucugaacuu

SEQ ID NO: 14599 - RNA, 23 nt, Human
ucuuuugggcgccgggccccaga

SEQ ID NO: 14600 - RNA, 24 nt, Human
ucuuuuguucauuuugagucccca

SEQ ID NO: 14601 - RNA, 22 nt, Human
ucuuuuuguuguagcuguaugg

SEQ ID NO: 14602 - RNA, 24 nt, Human
ugaaaaaacugaggauuagagaag

SEQ ID NO: 14603 - RNA, 24 nt, Human
ugaaaaaauacaaaauucaaaagg

SEQ ID NO: 14604 - RNA, 24 nt, Human
ugaaaaacugaauucugcaacaga

SEQ ID NO: 14605 - RNA, 22 nt, Human
ugaaaacauccugacgugggac

SEQ ID NO: 14606 - RNA, 24 nt, Human
ugaaaagaaacuagucauuuauuu

SEQ ID NO: 14607 - RNA, 22 nt, Human
ugaaaagccuuuggguagugau

SEQ ID NO: 14608 - RNA, 22 nt, Human
ugaaaauccacaaugucuuuga

SEQ ID NO: 14609 - RNA, 24 nt, Human
ugaaaauuugaaaaauaacagaau

SEQ ID NO: 14610 - RNA, 24 nt, Human
ugaaacauaugaaauugcugcauu

SEQ ID NO: 14611 - RNA, 24 nt, Human
ugaaacuaagagauaucgauugac

SEQ ID NO: 14612 - RNA, 24 nt, Human
ugaaagaagagaaauaugggucug

SEQ ID NO: 14613 - RNA, 24 nt, Human
ugaaagaccgaccauucuucccug

SEQ ID NO: 14614 - RNA, 24 nt, Human
ugaaagagacagucgacggaugug

SEQ ID NO: 14615 - RNA, 22 nt, Human
ugaaagagauguggugugugaa

SEQ ID NO: 14616 - RNA, 24 nt, Human
ugaaagcagauaugagucaccaga

SEQ ID NO: 14617 - RNA, 24 nt, Human
ugaaagccagccagauucauuuuc

SEQ ID NO: 14618 - RNA, 24 nt, Human
ugaaaggugaguuucauuguuuag

SEQ ID NO: 14619 - RNA, 24 nt, Human
ugaaaggugugaacuugcaauguc

SEQ ID NO: 14620 - RNA, 24 nt, Human
ugaaagguugagaaaggaaugguu

SEQ ID NO: 14621 - RNA, 24 nt, Human
ugaaaguauucaaaagucuucccg

SEQ ID NO: 14622 - RNA, 24 nt, Human
ugaaagucauccucgccagucccg

SEQ ID NO: 14623 - RNA, 24 nt, Human
ugaaaucaacaaaaggucuuggac

SEQ ID NO: 14624 - RNA, 24 nt, Human
ugaaaucaggaccgcagcucgggc

SEQ ID NO: 14625 - RNA, 21 nt, Human
ugaaaucauacagcugugcaa

SEQ ID NO: 14626 - RNA, 24 nt, Human
ugaaaugaagcagaagcugggagu

SEQ ID NO: 14627 - RNA, 22 nt, Human
ugaaaugacauugguauuugag

SEQ ID NO: 14628 - RNA, 24 nt, Human
ugaaaugcuacacaccucuugucu

SEQ ID NO: 14629 - RNA, 22 nt, Human
ugaaaugcuuuuaggacacugc

SEQ ID NO: 14630 - RNA, 24 nt, Human
ugaaaugggaggaucacuugagcc

SEQ ID NO: 14631 - RNA, 24 nt, Human
ugaacacagagguggaucaggcug

SEQ ID NO: 14632 - RNA, 24 nt, Human
ugaacacaugcaccuuauuuuuug

SEQ ID NO: 14633 - RNA, 21 nt, Human
ugaacagaacguagugguagg

SEQ ID NO: 14634 - RNA, 24 nt, Human
ugaacaguaguuaaauagggaaau

SEQ ID NO: 14635 - RNA, 22 nt, Human
ugaacguuuuguuccuuagaug

SEQ ID NO: 14636 - RNA, 24 nt, Human
ugaagacaccauugacgccccaac

SEQ ID NO: 14637 - RNA, 24 nt, Human
ugaagagaauguauuugcugcagu

SEQ ID NO: 14638 - RNA, 24 nt, Human
ugaagagacgagcugcguggaucu

SEQ ID NO: 14639 - RNA, 23 nt, Human
ugaagaggaaucaggaccuggcu

SEQ ID NO: 14640 - RNA, 24 nt, Human
ugaagaggaaucaggaccuggcuc

SEQ ID NO: 14641 - RNA, 24 nt, Human
ugaagauaacagcuguggacaaga

SEQ ID NO: 14642 - RNA, 22 nt, Human
ugaagaugaugagauaucacuc

SEQ ID NO: 14643 - RNA, 24 nt, Human
ugaagcagagauuauagauguuaa

SEQ ID NO: 14644 - RNA, 22 nt, Human
ugaaggaagaaaggcaguucuc

SEQ ID NO: 14645 - RNA, 24 nt, Human
ugaaggaggcucuguggccaggug

SEQ ID NO: 14646 - RNA, 22 nt, Human
ugaaggggacaguggugcaagu

SEQ ID NO: 14647 - RNA, 24 nt, Human
ugaagguuuuaucagagcccaggg

SEQ ID NO: 14648 - RNA, 24 nt, Human
ugaaguacaagaaaggaggugugg

SEQ ID NO: 14649 - RNA, 22 nt, Human
ugaagucuuugauauauuggug

SEQ ID NO: 14650 - RNA, 24 nt, Human
ugaauacugcuuuuaccacuuuga

SEQ ID NO: 14651 - RNA, 22 nt, Human
ugaauauauuaugucagucccu

SEQ ID NO: 14652 - RNA, 24 nt, Human
ugaaucacgacuguggacgacaau

SEQ ID NO: 14653 - RNA, 24 nt, Human
ugaaugaagcauuguaaagacuua

SEQ ID NO: 14654 - RNA, 24 nt, Human
ugaaugacgagcauugagccauca

SEQ ID NO: 14655 - RNA, 24 nt, Human
ugaaugcccuuguuuagaaugggu

SEQ ID NO: 14656 - RNA, 22 nt, Human
ugaaugcuacccugcuggcucu

SEQ ID NO: 14657 - RNA, 24 nt, Human
ugaauuaaacaaucguguggagaa

SEQ ID NO: 14658 - RNA, 22 nt, Human
ugaauuguguuuccuggaguug

SEQ ID NO: 14659 - RNA, 24 nt, Human
ugaauuuuugaaacuggacagaga

SEQ ID NO: 14660 - RNA, 22 nt, Human
ugacaaccuccuuagugugaug

SEQ ID NO: 14661 - RNA, 22 nt, Human
ugacaagauacaggguagugaa

SEQ ID NO: 14662 - RNA, 24 nt, Human
ugacaagcagaggcaugagcuggg

SEQ ID NO: 14663 - RNA, 24 nt, Human
ugacaagugaaucuccaugugggu

SEQ ID NO: 14664 - RNA, 24 nt, Human
ugacaauaggucuuaaugcaaguu

SEQ ID NO: 14665 - RNA, 23 nt, Human
ugacaauccccuugacguucuau

SEQ ID NO: 14666 - RNA, 24 nt, Human
ugacaauucucaacuccauuuccu

SEQ ID NO: 14667 - RNA, 24 nt, Human
ugacaauuucacagugcucccacu

SEQ ID NO: 14668 - RNA, 24 nt, Human
ugacaccaccccacuccucuuccu

SEQ ID NO: 14669 - RNA, 21 nt, Human
ugacaccauggggagcugcug

SEQ ID NO: 14670 - RNA, 22 nt, Human
ugacacucaacuucaacaugcc

SEQ ID NO: 14671 - RNA, 24 nt, Human
ugacagagaggaccagggugagaa

SEQ ID NO: 14672 - RNA, 22 nt, Human
ugacagagcaagaucuagauaa

SEQ ID NO: 14673 - RNA, 24 nt, Human
ugacagauggagauugggcagcag

SEQ ID NO: 14674 - RNA, 24 nt, Human
ugacagcaaaggcacagacauucu

SEQ ID NO: 14675 - RNA, 24 nt, Human
ugacagcaguuaucucugauagau

SEQ ID NO: 14676 - RNA, 24 nt, Human
ugacagcgcaggacccaaagcucu

SEQ ID NO: 14677 - RNA, 24 nt, Human
ugacagcugguagaggcagacauc

SEQ ID NO: 14678 - RNA, 24 nt, Human
ugacaggacauuugaaauuaagau

SEQ ID NO: 14679 - RNA, 24 nt, Human
ugacaggucgauguagcugaggac

SEQ ID NO: 14680 - RNA, 24 nt, Human
ugacaguccaaaggguuccucggg

SEQ ID NO: 14681 - RNA, 24 nt, Human
ugacagugugcaacucucauugga

SEQ ID NO: 14682 - RNA, 24 nt, Human
ugacaguuuaacaagccuuaggaa

SEQ ID NO: 14683 - RNA, 24 nt, Human
ugacaugaaguugcaaggucaccu

SEQ ID NO: 14684 - RNA, 24 nt, Human
ugacaugcucacgugacaugguua

SEQ ID NO: 14685 - RNA, 21 nt, Human
ugacaugguuucaaaggccug

SEQ ID NO: 14686 - RNA, 22 nt, Human
ugacaugugguuacuggguugc

SEQ ID NO: 14687 - RNA, 24 nt, Human
ugaccaacauggugaaacccaucu

SEQ ID NO: 14688 - RNA, 24 nt, Human
ugaccacgaccuucgggcgcugcc

SEQ ID NO: 14689 - RNA, 24 nt, Human
ugaccagaggugcugcccagaccc

SEQ ID NO: 14690 - RNA, 24 nt, Human
ugaccaggacaucuacgggcgcga

SEQ ID NO: 14691 - RNA, 24 nt, Human
ugaccaggacauggaagucaacga

SEQ ID NO: 14692 - RNA, 24 nt, Human
ugaccaggcuagaccacacgugcc

SEQ ID NO: 14693 - RNA, 24 nt, Human
ugaccagggcugugcuugagguac

SEQ ID NO: 14694 - RNA, 24 nt, Human
ugaccauauuccaaaaugcucaac

SEQ ID NO: 14695 - RNA, 24 nt, Human
ugaccaugcccguggugccacaag

SEQ ID NO: 14696 - RNA, 24 nt, Human
ugacccgacaagaguaccaagaaa

SEQ ID NO: 14697 - RNA, 24 nt, Human
ugaccgaaggaggagcugcgcaga

SEQ ID NO: 14698 - RNA, 20 nt, Human
ugaccuggagcugcaccccc

SEQ ID NO: 14699 - RNA, 24 nt, Human
ugaccuucugauuagcaaagccca

SEQ ID NO: 14700 - RNA, 24 nt, Human
ugaccuuggaugcuguaaagugau

SEQ ID NO: 14701 - RNA, 24 nt, Human
ugacgagcuaugcauacugaacaa

SEQ ID NO: 14702 - RNA, 24 nt, Human
ugacgaggcauuuggcuaccuuaa

SEQ ID NO: 14703 - RNA, 24 nt, Human
ugacgaggggaagagaugagaaga

SEQ ID NO: 14704 - RNA, 24 nt, Human
ugacgcugaagcuggugagccugg

SEQ ID NO: 14705 - RNA, 24 nt, Human
ugacggggcccugggcuggggcug

SEQ ID NO: 14706 - RNA, 18 nt, Human
ugacguggacauccgcaa

SEQ ID NO: 14707 - RNA, 22 nt, Human
ugacuagagacauuuuaagguu

SEQ ID NO: 14708 - RNA, 24 nt, Human
ugacuagaguggccggggauccuc

SEQ ID NO: 14709 - RNA, 24 nt, Human
ugacugcacuuauauaugcagugg

SEQ ID NO: 14710 - RNA, 24 nt, Human
ugacuguguccucacccaaaucuc

SEQ ID NO: 14711 - RNA, 24 nt, Human
ugacuucuaaugcugucacagaga

SEQ ID NO: 14712 - RNA, 24 nt, Human
ugacuuguaguaagcagguuucug

SEQ ID NO: 14713 - RNA, 24 nt, Human
ugacuuugagcaaguuauuuaucc

SEQ ID NO: 14714 - RNA, 24 nt, Human
ugagaaaaugaauucgagucuuug

SEQ ID NO: 14715 - RNA, 24 nt, Human
ugagaaacuuuugauuguuuucaa

SEQ ID NO: 14716 - RNA, 24 nt, Human
ugagaaagaaauucagauauggga

SEQ ID NO: 14717 - RNA, 24 nt, Human
ugagaaagcaagauguuggcuacc

SEQ ID NO: 14718 - RNA, 24 nt, Human
ugagaaaggcggagaggcuccaaa

SEQ ID NO: 14719 - RNA, 24 nt, Human
ugagaaagucuuaaccaguuguug

SEQ ID NO: 14720 - RNA, 24 nt, Human
ugagaacaacaagccccaaagaca

SEQ ID NO: 14721 - RNA, 24 nt, Human
ugagaacgagccagacuuggccag

SEQ ID NO: 14722 - RNA, 24 nt, Human
ugagaacuccaggauuguccugca

SEQ ID NO: 14723 - RNA, 24 nt, Human
ugagaagagguggugguuaaaggc

SEQ ID NO: 14724 - RNA, 24 nt, Human
ugagaagaguguuccuggccuugc

SEQ ID NO: 14725 - RNA, 24 nt, Human
ugagaaggaaauggccgcaauuua

SEQ ID NO: 14726 - RNA, 24 nt, Human
ugagaaggcagguuccauugaaga

SEQ ID NO: 14727 - RNA, 24 nt, Human
ugagaagggagggacuuggcuccc

SEQ ID NO: 14728 - RNA, 24 nt, Human
ugagaagugggugagggcaugcaa

SEQ ID NO: 14729 - RNA, 24 nt, Human
ugagaaugaccuuuacuuuccuau

SEQ ID NO: 14730 - RNA, 24 nt, Human
ugagaauggcaaaauuagucgccu

SEQ ID NO: 14731 - RNA, 24 nt, Human
ugagaauggcucaagcacuuccua

SEQ ID NO: 14732 - RNA, 24 nt, Human
ugagaaugucauguugauccaucc

SEQ ID NO: 14733 - RNA, 24 nt, Human
ugagaauguccgagaauucuucuu

SEQ ID NO: 14734 - RNA, 22 nt, Human
ugagacagaauuugaaauuguu

SEQ ID NO: 14735 - RNA, 24 nt, Human
ugagacauggucucacucugacac

SEQ ID NO: 14736 - RNA, 24 nt, Human
ugagaccagucugggcaacauggc

SEQ ID NO: 14737 - RNA, 24 nt, Human
ugagaccguacucagagugaggau

SEQ ID NO: 14738 - RNA, 24 nt, Human
ugagagaauaaaguauuuuggaaa

SEQ ID NO: 14739 - RNA, 22 nt, Human
ugagagagcaagugaauuuccc

SEQ ID NO: 14740 - RNA, 24 nt, Human
ugagagagcuuucucgugggcacc

SEQ ID NO: 14741 - RNA, 24 nt, Human
ugagagcaagggaacagggcggau

SEQ ID NO: 14742 - RNA, 24 nt, Human
ugagagcacgaguuaguuguaguc

SEQ ID NO: 14743 - RNA, 24 nt, Human
ugagagcacuuuaucuguaggucc

SEQ ID NO: 14744 - RNA, 24 nt, Human
ugagaggaagccuucuguacuuga

SEQ ID NO: 14745 - RNA, 24 nt, Human
ugagagguggaggaguucugaucc

SEQ ID NO: 14746 - RNA, 22 nt, Human
ugagagguggagguugcaguga

SEQ ID NO: 14747 - RNA, 24 nt, Human
ugagauacgauaugauaaacaggc

SEQ ID NO: 14748 - RNA, 24 nt, Human
ugagauagccaggcugaagaagca

SEQ ID NO: 14749 - RNA, 23 nt, Human
ugagauaugggagagcuuuuagg

SEQ ID NO: 14750 - RNA, 24 nt, Human
ugagauccucaucacgggacaccu

SEQ ID NO: 14751 - RNA, 24 nt, Human
ugagaucugacagucucaggucug

SEQ ID NO: 14752 - RNA, 24 nt, Human
ugagaucugcucaccgucuggggc

SEQ ID NO: 14753 - RNA, 22 nt, Human
ugagaugaaccagguaucucag

SEQ ID NO: 14754 - RNA, 22 nt, Human
ugagaugaacccgguaccucag

SEQ ID NO: 14755 - RNA, 22 nt, Human
ugagaugauugugaaacuaggu

SEQ ID NO: 14756 - RNA, 24 nt, Human
ugagauuacagggcaugaggccac

SEQ ID NO: 14757 - RNA, 24 nt, Human
ugagauuggggccgacgugcaagc

SEQ ID NO: 14758 - RNA, 24 nt, Human
ugagauuuuucaaguucuuuauga

SEQ ID NO: 14759 - RNA, 24 nt, Human
ugagcaaagaggccaagcagagac

SEQ ID NO: 14760 - RNA, 24 nt, Human
ugagcaaauggcagaauuaggggc

SEQ ID NO: 14761 - RNA, 24 nt, Human
ugagcaggagagauggggcuauug

SEQ ID NO: 14762 - RNA, 24 nt, Human
ugagcaggcucgugggacggcccu

SEQ ID NO: 14763 - RNA, 23 nt, Human
ugagcagguagccuggggggaca

SEQ ID NO: 14764 - RNA, 24 nt, Human
ugagcaguguaugucaggacuugu

SEQ ID NO: 14765 - RNA, 24 nt, Human
ugagcaucaggauuuuauggauga

SEQ ID NO: 14766 - RNA, 24 nt, Human
ugagcaucaugcauaaggccucca

SEQ ID NO: 14767 - RNA, 24 nt, Human
ugagccagagcagggcgcccccga

SEQ ID NO: 14768 - RNA, 24 nt, Human
ugagcccaggagguggaggcugca

SEQ ID NO: 14769 - RNA, 24 nt, Human
ugagccuauuuuguggccccugug

SEQ ID NO: 14770 - RNA, 24 nt, Human
ugagccucuguucuaaauccuccg

SEQ ID NO: 14771 - RNA, 22 nt, Human
ugagccucuuugaucucuuccg

SEQ ID NO: 14772 - RNA, 24 nt, Human
ugagccuggacggacgggggcugg

SEQ ID NO: 14773 - RNA, 24 nt, Human
ugagcgccccacccaugccugccu

SEQ ID NO: 14774 - RNA, 24 nt, Human
ugagcgggcccugcuccgagauca

SEQ ID NO: 14775 - RNA, 22 nt, Human
ugagcuccaaggaagugaauaa

SEQ ID NO: 14776 - RNA, 22 nt, Human
ugagcuccagggcuggggcuca

SEQ ID NO: 14777 - RNA, 24 nt, Human
ugagcugacacgaggcggaggggu

SEQ ID NO: 14778 - RNA, 24 nt, Human
ugagcuguggccauccaugcuggg

SEQ ID NO: 14779 - RNA, 24 nt, Human
ugagcuuagugcuaggacugagag

SEQ ID NO: 14780 - RNA, 24 nt, Human
ugaggaaagaaaaacugcaggauc

SEQ ID NO: 14781 - RNA, 22 nt, Human
ugaggaaggugugagaaaugag

SEQ ID NO: 14782 - RNA, 24 nt, Human
ugaggaauguaucaucuuuuuguc

SEQ ID NO: 14783 - RNA, 24 nt, Human
ugaggacaggcaucgccgagacuc

SEQ ID NO: 14784 - RNA, 24 nt, Human
ugaggaccuccugccugccauguu

SEQ ID NO: 14785 - RNA, 24 nt, Human
ugaggagagagugugcucagaacu

SEQ ID NO: 14786 - RNA, 24 nt, Human
ugaggagauguugcugaagcaucu

SEQ ID NO: 14787 - RNA, 24 nt, Human
ugaggagucaggcuuaaaacuugu

SEQ ID NO: 14788 - RNA, 24 nt, Human
ugaggaguuccggaaccccaaggc

SEQ ID NO: 14789 - RNA, 22 nt, Human
ugaggaguuuuaagagugagaa

SEQ ID NO: 14790 - RNA, 24 nt, Human
ugaggauacaugugugaugccacu

SEQ ID NO: 14791 - RNA, 24 nt, Human
ugaggcaaagaaugguggcgucug

SEQ ID NO: 14792 - RNA, 22 nt, Human
ugaggcacaggauaguugcuga

SEQ ID NO: 14793 - RNA, 24 nt, Human
ugaggcaggagaaucacuugaacc

SEQ ID NO: 14794 - RNA, 24 nt, Human
ugaggcaggagacuggcaugaacc

SEQ ID NO: 14795 - RNA, 19 nt, Human
ugaggcaguguauuuguau

SEQ ID NO: 14796 - RNA, 21 nt, Human
ugaggccagaggugcugucag

SEQ ID NO: 14797 - RNA, 24 nt, Human
ugaggcgcgacuuccugcgccugc

SEQ ID NO: 14798 - RNA, 24 nt, Human
ugaggcuguggccuccaaaggguc

SEQ ID NO: 14799 - RNA, 24 nt, Human
ugaggcuucauccuugcucugcag

SEQ ID NO: 14800 - RNA, 24 nt, Human
ugagggaaaauucaguuguugugc

SEQ ID NO: 14801 - RNA, 22 nt, Human
ugagggaaugucuguguccuug

SEQ ID NO: 14802 - RNA, 22 nt, Human
ugagggcaggugugaaaaugcu

SEQ ID NO: 14803 - RNA, 24 nt, Human
ugagggccaccaccccacuguggg

SEQ ID NO: 14804 - RNA, 24 nt, Human
ugaggguauuaagcgcauacugug

SEQ ID NO: 14805 - RNA, 22 nt, Human
ugagggugggagggugugucug

SEQ ID NO: 14806 - RNA, 22 nt, Human
ugagguaaguauguuauuggaa

SEQ ID NO: 14807 - RNA, 22 nt, Human
ugagguaggaugauugcuagcu

SEQ ID NO: 14808 - RNA, 22 nt, Human
ugagguaggggucaaaaugagc

SEQ ID NO: 14809 - RNA, 24 nt, Human
ugagguagguaaccuuguuuacug

SEQ ID NO: 14810 - RNA, 21 nt, Human
ugagguaggugcugaaacugc

SEQ ID NO: 14811 - RNA, 22 nt, Human
ugagguaggugcugaaacugcu

SEQ ID NO: 14812 - RNA, 22 nt, Human
ugagguauaguauuguagcuua

SEQ ID NO: 14813 - RNA, 24 nt, Human
ugagguaucuaaagaggcccggaa

SEQ ID NO: 14814 - RNA, 22 nt, Human
ugagguauguauguucuauaug

SEQ ID NO: 14815 - RNA, 24 nt, Human
ugaggucauguguuaagguaugua

SEQ ID NO: 14816 - RNA, 22 nt, Human
ugaggucauguucugucagguu

SEQ ID NO: 14817 - RNA, 24 nt, Human
ugagguccaagauucuggagcaau

SEQ ID NO: 14818 - RNA, 20 nt, Human
ugaggugacagucacggagg

SEQ ID NO: 14819 - RNA, 24 nt, Human
ugaggugcgggugcgcgggccugg

SEQ ID NO: 14820 - RNA, 24 nt, Human
ugagguggaacaacuuguugcgga

SEQ ID NO: 14821 - RNA, 24 nt, Human
ugagguggaguuggacgcgggugu

SEQ ID NO: 14822 - RNA, 22 nt, Human
ugaggugggagaauugcuugaa

SEQ ID NO: 14823 - RNA, 24 nt, Human
ugaggugggaggacugcuuaaggc

SEQ ID NO: 14824 - RNA, 24 nt, Human
ugaggugggaggauggcuugaaca

SEQ ID NO: 14825 - RNA, 24 nt, Human
ugaggugggcgcaccgggcauagu

SEQ ID NO: 14826 - RNA, 24 nt, Human
ugaguaaagcuaaagcuguuauca

SEQ ID NO: 14827 - RNA, 24 nt, Human
ugaguacacgaugcccacccuccu

SEQ ID NO: 14828 - RNA, 24 nt, Human
ugaguacagagaggaccuagaagc

SEQ ID NO: 14829 - RNA, 23 nt, Human
ugaguaggcaaacuccaggccug

SEQ ID NO: 14830 - RNA, 24 nt, Human
ugaguaguaagaggcgcauuugcu

SEQ ID NO: 14831 - RNA, 24 nt, Human
ugagucuagagauauuugugaaau

SEQ ID NO: 14832 - RNA, 24 nt, Human
ugagugaagcugaggagaaggcug

SEQ ID NO: 14833 - RNA, 24 nt, Human
ugagugaaugauuauauguuuaaa

SEQ ID NO: 14834 - RNA, 22 nt, Human
ugagugacagagcaacacucug

SEQ ID NO: 14835 - RNA, 21 nt, Human
ugagugaggacuccaagaaug

SEQ ID NO: 14836 - RNA, 24 nt, Human
ugagugcaacggaaagggcuauca

SEQ ID NO: 14837 - RNA, 24 nt, Human
ugagugcacuugggagaccuggug

SEQ ID NO: 14838 - RNA, 24 nt, Human
ugagugcaggaagcacauuuggcu

SEQ ID NO: 14839 - RNA, 24 nt, Human
ugagugccaaggacaccacuggaa

SEQ ID NO: 14840 - RNA, 24 nt, Human
ugagugccgucugcuuucgguccc

SEQ ID NO: 14841 - RNA, 24 nt, Human
ugaguggagcugccgccuggucac

SEQ ID NO: 14842 - RNA, 24 nt, Human
ugaguggaucaucugaggucagga

SEQ ID NO: 14843 - RNA, 24 nt, Human
ugagugggucguagcggaaucggg

SEQ ID NO: 14844 - RNA, 24 nt, Human
ugaguguagccuuuguaucaugug

SEQ ID NO: 14845 - RNA, 22 nt, Human
ugaguguaugugugagagagaa

SEQ ID NO: 14846 - RNA, 24 nt, Human
ugaguguccccaaaaaaguugucc

SEQ ID NO: 14847 - RNA, 24 nt, Human
ugagugugaagaauguggaaaaug

SEQ ID NO: 14848 - RNA, 24 nt, Human
ugaguuacaggcugugggaagaga

SEQ ID NO: 14849 - RNA, 24 nt, Human
ugaguuaggcugcagaggacuggu

SEQ ID NO: 14850 - RNA, 24 nt, Human
ugaguugaaacucuuggaggaagc

SEQ ID NO: 14851 - RNA, 22 nt, Human
ugaguugaaagcugcaguugau

SEQ ID NO: 14852 - RNA, 24 nt, Human
ugaguuggggccuuauaguggggc

SEQ ID NO: 14853 - RNA, 24 nt, Human
ugaguugguuggauuggcaagcau

SEQ ID NO: 14854 - RNA, 22 nt, Human
ugauaacaaaccaaacuacuug

SEQ ID NO: 14855 - RNA, 24 nt, Human
ugauaagacucaggaauucugaaa

SEQ ID NO: 14856 - RNA, 24 nt, Human
ugauaaggauggcuauaccuuggg

SEQ ID NO: 14857 - RNA, 24 nt, Human
ugauacuggcuuuuguaauccugg

SEQ ID NO: 14858 - RNA, 22 nt, Human
ugauagaauuucuagggcuggg

SEQ ID NO: 14859 - RNA, 24 nt, Human
ugauaggugucagucuuguaauca

SEQ ID NO: 14860 - RNA, 24 nt, Human
ugauagucuccagcagggccugga

SEQ ID NO: 14861 - RNA, 24 nt, Human
ugauagugucgagcaggaugucaa

SEQ ID NO: 14862 - RNA, 24 nt, Human
ugauauaauuuugauuuucuuaaa

SEQ ID NO: 14863 - RNA, 24 nt, Human
ugauaugcaugauguugaagauga

SEQ ID NO: 14864 - RNA, 20 nt, Human
ugaucaaauucugagcggac

SEQ ID NO: 14865 - RNA, 22 nt, Human
ugaucagauuuuaaaaucaguu

SEQ ID NO: 14866 - RNA, 22 nt, Human
ugauccucuggcuucagccucc

SEQ ID NO: 14867 - RNA, 22 nt, Human
ugaucuagagacucauucaaua

SEQ ID NO: 14868 - RNA, 24 nt, Human
ugaucucguuggacugcguggcua

SEQ ID NO: 14869 - RNA, 24 nt, Human
ugaucugucucaggacucugacac

SEQ ID NO: 14870 - RNA, 24 nt, Human
ugaugaagguuucccauaugguuu

SEQ ID NO: 14871 - RNA, 24 nt, Human
ugaugagcucaucacugucuacag

SEQ ID NO: 14872 - RNA, 24 nt, Human
ugaugaggcggcuguuggcagcau

SEQ ID NO: 14873 - RNA, 24 nt, Human
ugaugaugacgaugaugaugauga

SEQ ID NO: 14874 - RNA, 22 nt, Human
ugaugcaucaguggcagcagau

SEQ ID NO: 14875 - RNA, 21 nt, Human
ugaugcugaggagccaggcag

SEQ ID NO: 14876 - RNA, 24 nt, Human
ugauggacuugaacuuccugccau

SEQ ID NO: 14877 - RNA, 22 nt, Human
ugauggaggagauuguauguua

SEQ ID NO: 14878 - RNA, 22 nt, Human
ugauggcagagauuggugagga

SEQ ID NO: 14879 - RNA, 24 nt, Human
ugaugggcccaacccaauauaucc

SEQ ID NO: 14880 - RNA, 24 nt, Human
ugauggggggagaugugggguugc

SEQ ID NO: 14881 - RNA, 18 nt, Human
ugaugguagagacagacu

SEQ ID NO: 14882 - RNA, 24 nt, Human
ugauggugguggaggaaccgaugu

SEQ ID NO: 14883 - RNA, 24 nt, Human
ugaugguguagguggucuggcuuu

SEQ ID NO: 14884 - RNA, 24 nt, Human
ugauguagaauuugagcugagugc

SEQ ID NO: 14885 - RNA, 24 nt, Human
ugauguauuugcaaacauuaaugu

SEQ ID NO: 14886 - RNA, 24 nt, Human
ugauguuuucuucucucuucauuu

SEQ ID NO: 14887 - RNA, 24 nt, Human
ugauuacagaaaauguucuauuua

SEQ ID NO: 14888 - RNA, 24 nt, Human
ugauuaggacuuuuauugugaauu

SEQ ID NO: 14889 - RNA, 24 nt, Human
ugauuagucucuuggcuccuagca

SEQ ID NO: 14890 - RNA, 22 nt, Human
ugauucauuucuaaacccagcu

SEQ ID NO: 14891 - RNA, 24 nt, Human
ugauuggauacuuaaguuuuagaa

SEQ ID NO: 14892 - RNA, 22 nt, Human
ugauugggggugagguuaucua

SEQ ID NO: 14893 - RNA, 22 nt, Human
ugauuguaugauauaugaguuu

SEQ ID NO: 14894 - RNA, 24 nt, Human
ugcaaaccuucccaccccuguauu

SEQ ID NO: 14895 - RNA, 24 nt, Human
ugcaaagagaugcauaaguaaacu

SEQ ID NO: 14896 - RNA, 22 nt, Human
ugcaaaucgagguccaaggagg

SEQ ID NO: 14897 - RNA, 24 nt, Human
ugcaacuacugcaaagacgcgggc

SEQ ID NO: 14898 - RNA, 22 nt, Human
ugcaagagaccccauugauugc

SEQ ID NO: 14899 - RNA, 22 nt, Human
ugcaaggauauauaauaacuga

SEQ ID NO: 14900 - RNA, 24 nt, Human
ugcaaggcggaaaggcuggggcag

SEQ ID NO: 14901 - RNA, 24 nt, Human
ugcaaggugacagcagucgguugg

SEQ ID NO: 14902 - RNA, 22 nt, Human
ugcaagucugugauuuuguguu

SEQ ID NO: 14903 - RNA, 24 nt, Human
ugcaaugacaugaauaauagcugc

SEQ ID NO: 14904 - RNA, 24 nt, Human
ugcaauguauuuuccugcuuuuca

SEQ ID NO: 14905 - RNA, 24 nt, Human
ugcacagaggggcacggaacucca

SEQ ID NO: 14906 - RNA, 24 nt, Human
ugcacaguuccaaaaauguggagg

SEQ ID NO: 14907 - RNA, 24 nt, Human
ugcacggggcuuucugcauguaac

SEQ ID NO: 14908 - RNA, 24 nt, Human
ugcacguagacgcgcaaugcgggu

SEQ ID NO: 14909 - RNA, 24 nt, Human
ugcacuaacugugcccgaugcgug

SEQ ID NO: 14910 - RNA, 22 nt, Human
ugcacuugucuuuacccuagag

SEQ ID NO: 14911 - RNA, 24 nt, Human
ugcagaaucuguaugggaguucca

SEQ ID NO: 14912 - RNA, 24 nt, Human
ugcagcagaaguugguggagcugu

SEQ ID NO: 14913 - RNA, 24 nt, Human
ugcaggaaugagagugauuuuaug

SEQ ID NO: 14914 - RNA, 24 nt, Human
ugcaggaucaucagguucggauga

SEQ ID NO: 14915 - RNA, 22 nt, Human
ugcaggcagagaaggguggaug

SEQ ID NO: 14916 - RNA, 23 nt, Human
ugcaggcgugccccggcggcggc

SEQ ID NO: 14917 - RNA, 22 nt, Human
ugcagugacuggaaguucuggg

SEQ ID NO: 14918 - RNA, 24 nt, Human
ugcagugcacaugauccggaaggu

SEQ ID NO: 14919 - RNA, 24 nt, Human
ugcaguguagaagguauucuguuc

SEQ ID NO: 14920 - RNA, 24 nt, Human
ugcagugucaccauauuggccagg

SEQ ID NO: 14921 - RNA, 24 nt, Human
ugcaugaaggugaaguaaggaggc

SEQ ID NO: 14922 - RNA, 24 nt, Human
ugcauggacaucauccaauucauu

SEQ ID NO: 14923 - RNA, 24 nt, Human
ugcauggugagggauaguucuugg

SEQ ID NO: 14924 - RNA, 24 nt, Human
ugcaugguuuuuacaaaacucauu

SEQ ID NO: 14925 - RNA, 24 nt, Human
ugcauguagugauccggggcuccc

SEQ ID NO: 14926 - RNA, 24 nt, Human
ugcauucuuaucaccuaguauaua

SEQ ID NO: 14927 - RNA, 24 nt, Human
ugcauugccaucuugaagauuugu

SEQ ID NO: 14928 - RNA, 22 nt, Human
ugcauugugugugcauguggcc

SEQ ID NO: 14929 - RNA, 24 nt, Human
ugcauuguuaucauuaaccagucu

SEQ ID NO: 14930 - RNA, 24 nt, Human
ugcauuguuaucauuaacccaguc

SEQ ID NO: 14931 - RNA, 23 nt, Human
ugccaaggaccaggaugauggag

SEQ ID NO: 14932 - RNA, 24 nt, Human
ugccaaggauguagaauaaauaag

SEQ ID NO: 14933 - RNA, 24 nt, Human
ugccaaugaaagacugagccccuc

SEQ ID NO: 14934 - RNA, 24 nt, Human
ugccaccacccuugucuuccucug

SEQ ID NO: 14935 - RNA, 24 nt, Human
ugccacgggcccggcgggauuuuu

SEQ ID NO: 14936 - RNA, 24 nt, Human
ugccagaacgcugguguggggcgc

SEQ ID NO: 14937 - RNA, 24 nt, Human
ugccagagggagggccaugggccg

SEQ ID NO: 14938 - RNA, 24 nt, Human
ugccagauauuggagauaaaaagg

SEQ ID NO: 14939 - RNA, 24 nt, Human
ugccaggacgugcugagcagcuuc

SEQ ID NO: 14940 - RNA, 24 nt, Human
ugccagggcugcacugaguucaaa

SEQ ID NO: 14941 - RNA, 24 nt, Human
ugccagggggaagagcgauggguc

SEQ ID NO: 14942 - RNA, 24 nt, Human
ugccagguugagaauaucccaggu

SEQ ID NO: 14943 - RNA, 24 nt, Human
ugccaguaucacauaaugauaauc

SEQ ID NO: 14944 - RNA, 22 nt, Human
ugccagugcaugugagacugcc

SEQ ID NO: 14945 - RNA, 24 nt, Human
ugccagugguggaaaccuggagug

SEQ ID NO: 14946 - RNA, 24 nt, Human
ugccaucaugagcagggcauugag

SEQ ID NO: 14947 - RNA, 24 nt, Human
ugccaugggaggccugaaggugcu

SEQ ID NO: 14948 - RNA, 24 nt, Human
ugccaugguuuugcacuaugauua

SEQ ID NO: 14949 - RNA, 24 nt, Human
ugccaugucacuuaguguucugug

SEQ ID NO: 14950 - RNA, 22 nt, Human
ugccauguccuccuuuagaagg

SEQ ID NO: 14951 - RNA, 24 nt, Human
ugccauugugggaaugauaguagc

SEQ ID NO: 14952 - RNA, 24 nt, Human
ugcccagaagaaaguuaauggcaa

SEQ ID NO: 14953 - RNA, 23 nt, Human
ugcccaggccucgcugcugcccu

SEQ ID NO: 14954 - RNA, 24 nt, Human
ugcccagugcacaggcccagcuac

SEQ ID NO: 14955 - RNA, 23 nt, Human
ugcccggugagcuucuuauagac

SEQ ID NO: 14956 - RNA, 24 nt, Human
ugcccuggcgccugugccgcuccu

SEQ ID NO: 14957 - RNA, 24 nt, Human
ugcccugguggcagcccccagcac

SEQ ID NO: 14958 - RNA, 22 nt, Human
ugccgaggcuggagugcagugg

SEQ ID NO: 14959 - RNA, 24 nt, Human
ugccggaggaguggucgcaugugg

SEQ ID NO: 14960 - RNA, 22 nt, Human
ugccggccaggcuggagugcag

SEQ ID NO: 14961 - RNA, 24 nt, Human
ugccgggccagggacuggugcgcu

SEQ ID NO: 14962 - RNA, 24 nt, Human
ugccgggggugguggcacugagag

SEQ ID NO: 14963 - RNA, 24 nt, Human
ugccguggaggccucuucaagugc

SEQ ID NO: 14964 - RNA, 22 nt, Human
ugccuaauugaaucgaaacuuc

SEQ ID NO: 14965 - RNA, 22 nt, Human
ugccuaggcuggagugcagugg

SEQ ID NO: 14966 - RNA, 24 nt, Human
ugccuaggcuggagugcaguggug

SEQ ID NO: 14967 - RNA, 24 nt, Human
ugccuaggcugguaggcuggucuc

SEQ ID NO: 14968 - RNA, 22 nt, Human
ugccucacucucuuccuacuga

SEQ ID NO: 14969 - RNA, 24 nt, Human
ugccucagagaacuucugcagccg

SEQ ID NO: 14970 - RNA, 24 nt, Human
ugccucucugcaaaguugaggcgg

SEQ ID NO: 14971 - RNA, 24 nt, Human
ugccucugcuuuuaaaggugcugu

SEQ ID NO: 14972 - RNA, 22 nt, Human
ugccucuuuuucucucuccuau

SEQ ID NO: 14973 - RNA, 24 nt, Human
ugccugaaaaaauauccuuugugc

SEQ ID NO: 14974 - RNA, 24 nt, Human
ugccugaaccaacuguuuugagcc

SEQ ID NO: 14975 - RNA, 24 nt, Human
ugccugcauggauggacaagaguu

SEQ ID NO: 14976 - RNA, 24 nt, Human
ugccugcgccugcuccuguuauca

SEQ ID NO: 14977 - RNA, 24 nt, Human
ugccuggagugacagagccuuccu

SEQ ID NO: 14978 - RNA, 24 nt, Human
ugccugggaggcuugcccauggga

SEQ ID NO: 14979 - RNA, 24 nt, Human
ugccugggguguuguccucuucuu

SEQ ID NO: 14980 - RNA, 24 nt, Human
ugccuguaauccuagcacuuuggg

SEQ ID NO: 14981 - RNA, 24 nt, Human
ugccugugaaauccaaauuccagu

SEQ ID NO: 14982 - RNA, 22 nt, Human
ugccuugggucccuucaguagc

SEQ ID NO: 14983 - RNA, 21 nt, Human
ugccuugugacuagacugugc

SEQ ID NO: 14984 - RNA, 24 nt, Human
ugcgagaaauuccaggcggcgcuc

SEQ ID NO: 14985 - RNA, 24 nt, Human
ugcgagugcccgagggcguuggag

SEQ ID NO: 14986 - RNA, 24 nt, Human
ugcgauguuuuaccuggcugcggc

SEQ ID NO: 14987 - RNA, 24 nt, Human
ugcgauuguccaccuugugucuuc

SEQ ID NO: 14988 - RNA, 24 nt, Human
ugcgcacugaagaugccagagcua

SEQ ID NO: 14989 - RNA, 24 nt, Human
ugcgcgcgcacaugagcgcgugcu

SEQ ID NO: 14990 - RNA, 24 nt, Human
ugcggacuccaaggaggugcacua

SEQ ID NO: 14991 - RNA, 22 nt, Human
ugcggcucaaagggaaggccuu

SEQ ID NO: 14992 - RNA, 24 nt, Human
ugcgggccaagcacggugcgcaaa

SEQ ID NO: 14993 - RNA, 24 nt, Human
ugcgggugaaccaguuaaggguuu

SEQ ID NO: 14994 - RNA, 21 nt, Human
ugcuaagcaaaggaccuguga

SEQ ID NO: 14995 - RNA, 24 nt, Human
ugcuaaguaaccagagcgaggcgg

SEQ ID NO: 14996 - RNA, 24 nt, Human
ugcuagaaaacauucuauuguaua

SEQ ID NO: 14997 - RNA, 24 nt, Human
ugcuagagaggaaauggcugcuuc

SEQ ID NO: 14998 - RNA, 22 nt, Human
ugcuaggcuuauucucuuccuc

SEQ ID NO: 14999 - RNA, 24 nt, Human
ugcuauguguucacuacaacagga

SEQ ID NO: 15000 - RNA, 24 nt, Human
ugcuauguuggcuaaacugguguc

SEQ ID NO: 15001 - RNA, 22 nt, Human
ugcuauucucagagcacucuau

SEQ ID NO: 15002 - RNA, 24 nt, Human
ugcuauugacagauccuggacaua

SEQ ID NO: 15003 - RNA, 24 nt, Human
ugcucagugaccuccaggagucug

SEQ ID NO: 15004 - RNA, 24 nt, Human
ugcuccugucccuuccacuuccuc

SEQ ID NO: 15005 - RNA, 24 nt, Human
ugcugauagucguacuuucuugcu

SEQ ID NO: 15006 - RNA, 22 nt, Human
ugcugcaguagaaauuagagca

SEQ ID NO: 15007 - RNA, 24 nt, Human
ugcugcggccuuucaugcgcucca

SEQ ID NO: 15008 - RNA, 24 nt, Human
ugcugcggugagcgugagacccgc

SEQ ID NO: 15009 - RNA, 19 nt, Human
ugcugcucguggccugcuc

SEQ ID NO: 15010 - RNA, 24 nt, Human
ugcugcugucguccugccuggcgc

SEQ ID NO: 15011 - RNA, 20 nt, Human
ugcugggagaccuuggccac

SEQ ID NO: 15012 - RNA, 24 nt, Human
ugcuggguggggccaggcauaacc

SEQ ID NO: 15013 - RNA, 24 nt, Human
ugcuggugagggcugugcagcugc

SEQ ID NO: 15014 - RNA, 22 nt, Human
ugcuguacagguacaggcugga

SEQ ID NO: 15015 - RNA, 22 nt, Human
ugcuguaguauguauauaguau

SEQ ID NO: 15016 - RNA, 22 nt, Human
ugcugugucaucuuugaaguca

SEQ ID NO: 15017 - RNA, 21 nt, Human
ugcuguugcccccggccucgc

SEQ ID NO: 15018 - RNA, 22 nt, Human
ugcuguuuucuagcccugucca

SEQ ID NO: 15019 - RNA, 22 nt, Human
ugcuuuaguucuucugaagugu

SEQ ID NO: 15020 - RNA, 24 nt, Human
uggaaaaaucagcucagaaaggcc

SEQ ID NO: 15021 - RNA, 24 nt, Human
uggaaaacggcgauggggaacaac

SEQ ID NO: 15022 - RNA, 22 nt, Human
uggaaaagugcucugauaccug

SEQ ID NO: 15023 - RNA, 24 nt, Human
uggaaaaucuacaacauggagugu

SEQ ID NO: 15024 - RNA, 24 nt, Human
uggaaacacuguaugaacugaagc

SEQ ID NO: 15025 - RNA, 22 nt, Human
uggaaacaugggcugggggaug

SEQ ID NO: 15026 - RNA, 22 nt, Human
uggaaaccuccuuggcuggguu

SEQ ID NO: 15027 - RNA, 23 nt, Human
uggaaagacacugacaaaucgcc

SEQ ID NO: 15028 - RNA, 24 nt, Human
uggaaagauuuaugacauaauuuu

SEQ ID NO: 15029 - RNA, 24 nt, Human
uggaaagcuucauguaauaugauc

SEQ ID NO: 15030 - RNA, 24 nt, Human
uggaaagguccaggaguugggucc

SEQ ID NO: 15031 - RNA, 24 nt, Human
uggaacagaaaguaauauggccaa

SEQ ID NO: 15032 - RNA, 24 nt, Human
uggaacaugggccuuauguuguca

SEQ ID NO: 15033 - RNA, 24 nt, Human
uggaaccucaguuaaauucacuua

SEQ ID NO: 15034 - RNA, 24 nt, Human
uggaaccugacaauguugguguug

SEQ ID NO: 15035 - RNA, 24 nt, Human
uggaacuagaaucaccaaggcuuu

SEQ ID NO: 15036 - RNA, 24 nt, Human
uggaacuucuggaccagcucaguc

SEQ ID NO: 15037 - RNA, 24 nt, Human
uggaacuucuuuuagccccagacc

SEQ ID NO: 15038 - RNA, 24 nt, Human
uggaagaaaagagcaucgacuuga

SEQ ID NO: 15039 - RNA, 24 nt, Human
uggaagaaauauucuguucuaaaa

SEQ ID NO: 15040 - RNA, 24 nt, Human
uggaagaagaaugaaguugcugau

SEQ ID NO: 15041 - RNA, 24 nt, Human
uggaagaagauugucuuugggcau

SEQ ID NO: 15042 - RNA, 24 nt, Human
uggaagaauaaggacauucagagg

SEQ ID NO: 15043 - RNA, 24 nt, Human
uggaagaaugacacgggcucagga

SEQ ID NO: 15044 - RNA, 24 nt, Human
uggaagacauggcucguccggaca

SEQ ID NO: 15045 - RNA, 22 nt, Human
uggaagacuagugauuuaaggc

SEQ ID NO: 15046 - RNA, 24 nt, Human
uggaagacuuguugcaggugggua

SEQ ID NO: 15047 - RNA, 24 nt, Human
uggaagagaaauggaagucggcuc

SEQ ID NO: 15048 - RNA, 24 nt, Human
uggaagaggggcuccugcagguaa

SEQ ID NO: 15049 - RNA, 24 nt, Human
uggaagcagcggaggaaggagaca

SEQ ID NO: 15050 - RNA, 24 nt, Human
uggaagccagagguuuuugcucag

SEQ ID NO: 15051 - RNA, 22 nt, Human
uggaagccuccauugccccucc

SEQ ID NO: 15052 - RNA, 24 nt, Human
uggaagcugguagcaguauuaucu

SEQ ID NO: 15053 - RNA, 24 nt, Human
uggaaggagccugcugaaggaggu

SEQ ID NO: 15054 - RNA, 24 nt, Human
uggaaggccuuucaaaagccucac

SEQ ID NO: 15055 - RNA, 21 nt, Human
uggaagggguagauggagggu

SEQ ID NO: 15056 - RNA, 24 nt, Human
uggaaguauuagauacauguuuaa

SEQ ID NO: 15057 - RNA, 24 nt, Human
uggaagugagugcugggucacccc

SEQ ID NO: 15058 - RNA, 22 nt, Human
uggaauacuagugguucuguga

SEQ ID NO: 15059 - RNA, 24 nt, Human
uggaauagcgucuuccauguggga

SEQ ID NO: 15060 - RNA, 24 nt, Human
uggaaugagugcguggauccacaa

SEQ ID NO: 15061 - RNA, 24 nt, Human
uggaaugccugagaggccaguggg

SEQ ID NO: 15062 - RNA, 23 nt, Human
uggaaugcugggggugguggcgc

SEQ ID NO: 15063 - RNA, 24 nt, Human
uggaauggccuugggaagauucag

SEQ ID NO: 15064 - RNA, 24 nt, Human
uggaaugggaacgucuguugagag

SEQ ID NO: 15065 - RNA, 24 nt, Human
uggaauuucugggguauagcacau

SEQ ID NO: 15066 - RNA, 24 nt, Human
uggacaagcagcaaagcuauaauc

SEQ ID NO: 15067 - RNA, 24 nt, Human
uggacaggcaugauuauugggcca

SEQ ID NO: 15068 - RNA, 22 nt, Human
uggacagugcagccuuggaaca

SEQ ID NO: 15069 - RNA, 24 nt, Human
uggacauuccaaaucccaccaucg

SEQ ID NO: 15070 - RNA, 23 nt, Human
uggacugcgcauucauggguucc

SEQ ID NO: 15071 - RNA, 24 nt, Human
uggacugugggcaguuuggacugg

SEQ ID NO: 15072 - RNA, 22 nt, Human
uggagaacaggugcaucucgua

SEQ ID NO: 15073 - RNA, 24 nt, Human
uggagaagugucaaacaaggaugg

SEQ ID NO: 15074 - RNA, 22 nt, Human
uggagagagcagguugcuaaga

SEQ ID NO: 15075 - RNA, 22 nt, Human
uggagcacaacaucagcucacu

SEQ ID NO: 15076 - RNA, 22 nt, Human
uggagcaggcucagucacucca

SEQ ID NO: 15077 - RNA, 22 nt, Human
uggagccagaggauguguggga

SEQ ID NO: 15078 - RNA, 22 nt, Human
uggagccuuguuguuuguucac

SEQ ID NO: 15079 - RNA, 22 nt, Human
uggagcucagcccagguuccag

SEQ ID NO: 15080 - RNA, 22 nt, Human
uggagcugugagcagcagcaca

SEQ ID NO: 15081 - RNA, 22 nt, Human
uggagcuguucuggucuagagu

SEQ ID NO: 15082 - RNA, 24 nt, Human
uggaggcaaaaacaucugugguuc

SEQ ID NO: 15083 - RNA, 24 nt, Human
uggaggcagaaauugggcauaaga

SEQ ID NO: 15084 - RNA, 24 nt, Human
uggaggccuuggugaccaaugcca

SEQ ID NO: 15085 - RNA, 24 nt, Human
uggagggcuguggaguugggggcc

SEQ ID NO: 15086 - RNA, 22 nt, Human
uggaggguggagggguggcauu

SEQ ID NO: 15087 - RNA, 24 nt, Human
uggagggugucguggacgccgccu

SEQ ID NO: 15088 - RNA, 24 nt, Human
uggaggguuugguggucuccacuc

SEQ ID NO: 15089 - RNA, 24 nt, Human
uggaguaaaggucacucuugcuac

SEQ ID NO: 15090 - RNA, 24 nt, Human
uggaguacggaccggugccggaga

SEQ ID NO: 15091 - RNA, 22 nt, Human
uggaguauguucuugaguucug

SEQ ID NO: 15092 - RNA, 24 nt, Human
uggaguccuauguaccagacugag

SEQ ID NO: 15093 - RNA, 24 nt, Human
uggaguccucgggggccgugcacu

SEQ ID NO: 15094 - RNA, 20 nt, Human
uggagugcguaacgcuccag

SEQ ID NO: 15095 - RNA, 22 nt, Human
uggagugucuggaggugucucu

SEQ ID NO: 15096 - RNA, 24 nt, Human
uggagugugaucuagcucacugua

SEQ ID NO: 15097 - RNA, 24 nt, Human
uggaguugcaggauaugagcuugc

SEQ ID NO: 15098 - RNA, 24 nt, Human
uggaguugguuaacacacacuuaa

SEQ ID NO: 15099 - RNA, 24 nt, Human
uggaucaccugaggucaggaguuc

SEQ ID NO: 15100 - RNA, 24 nt, Human
uggaugauccagcaggaaacaguu

SEQ ID NO: 15101 - RNA, 24 nt, Human
uggauggcccuccgggaaacugug

SEQ ID NO: 15102 - RNA, 24 nt, Human
uggaugguggccucacccagauug

SEQ ID NO: 15103 - RNA, 24 nt, Human
uggauguauaauaguuuagcaaga

SEQ ID NO: 15104 - RNA, 24 nt, Human
uggauguauuuugucuguauguaa

SEQ ID NO: 15105 - RNA, 22 nt, Human
uggauuaguaaagaagaaugaa

SEQ ID NO: 15106 - RNA, 24 nt, Human
uggcaaaaccugcaauuacuuuug

SEQ ID NO: 15107 - RNA, 24 nt, Human
uggcaaaaguuuaaucagaggaaa

SEQ ID NO: 15108 - RNA, 24 nt, Human
uggcaaaauucuacugaagacaca

SEQ ID NO: 15109 - RNA, 24 nt, Human
uggcaaacauuuaucaagacaauu

SEQ ID NO: 15110 - RNA, 24 nt, Human
uggcaaacuuucuucauguccugg

SEQ ID NO: 15111 - RNA, 22 nt, Human
uggcaaagaaggcaguacaguu

SEQ ID NO: 15112 - RNA, 24 nt, Human
uggcaaaguuuguuggcucagacu

SEQ ID NO: 15113 - RNA, 24 nt, Human
uggcaaccucgcagugucauggug

SEQ ID NO: 15114 - RNA, 22 nt, Human
uggcaagaucucggcuuacuac

SEQ ID NO: 15115 - RNA, 22 nt, Human
uggcaagcaagaagcgggagcu

SEQ ID NO: 15116 - RNA, 24 nt, Human
uggcaagcaguuccaguccgagca

SEQ ID NO: 15117 - RNA, 21 nt, Human
uggcaagcaugugguguuugg

SEQ ID NO: 15118 - RNA, 24 nt, Human
uggcaaguaaaugcaguacuguuc

SEQ ID NO: 15119 - RNA, 24 nt, Human
uggcaagucacuuugacagacauu

SEQ ID NO: 15120 - RNA, 24 nt, Human
uggcaagugggugguauagaggcu

SEQ ID NO: 15121 - RNA, 24 nt, Human
uggcaauuagugugacaguuucca

SEQ ID NO: 15122 - RNA, 24 nt, Human
uggcacaggccucaccugcagccu

SEQ ID NO: 15123 - RNA, 24 nt, Human
uggcacagguguggccucagccgg

SEQ ID NO: 15124 - RNA, 24 nt, Human
uggcaccauggaugccuucgugaa

SEQ ID NO: 15125 - RNA, 24 nt, Human
uggcaccauguuggccucuucagg

SEQ ID NO: 15126 - RNA, 24 nt, Human
uggcaccggcccugccugcgcugc

SEQ ID NO: 15127 - RNA, 24 nt, Human
uggcacguuuguugaaacccagca

SEQ ID NO: 15128 - RNA, 24 nt, Human
uggcacugaagaacaccugugagu

SEQ ID NO: 15129 - RNA, 24 nt, Human
uggcacugcaggaguagacuggug

SEQ ID NO: 15130 - RNA, 24 nt, Human
uggcacugccggccccuggcccua

SEQ ID NO: 15131 - RNA, 22 nt, Human
uggcacuguuuggucugagggg

SEQ ID NO: 15132 - RNA, 22 nt, Human
uggcacuuuauucucucgaauc

SEQ ID NO: 15133 - RNA, 24 nt, Human
uggcagaaaacuggagaccaggca

SEQ ID NO: 15134 - RNA, 22 nt, Human
uggcagaaaaggcccaaucgcc

SEQ ID NO: 15135 - RNA, 24 nt, Human
uggcagaagauggugacuggagug

SEQ ID NO: 15136 - RNA, 24 nt, Human
uggcagaagccugggagacugacu

SEQ ID NO: 15137 - RNA, 24 nt, Human
uggcagaauacaagucauuucaau

SEQ ID NO: 15138 - RNA, 24 nt, Human
uggcagagagcaccuuagcaggcc

SEQ ID NO: 15139 - RNA, 24 nt, Human
uggcagaguacggcugcuguugga

SEQ ID NO: 15140 - RNA, 24 nt, Human
uggcagaguuaaauugugcuuuug

SEQ ID NO: 15141 - RNA, 24 nt, Human
uggcagauugauaccugccugguc

SEQ ID NO: 15142 - RNA, 22 nt, Human
uggcagauuugguugcuguugg

SEQ ID NO: 15143 - RNA, 24 nt, Human
uggcagcacccacgaugcgggacc

SEQ ID NO: 15144 - RNA, 24 nt, Human
uggcagcaucauggaagggggcgg

SEQ ID NO: 15145 - RNA, 24 nt, Human
uggcagccgcauggacaggcagac

SEQ ID NO: 15146 - RNA, 24 nt, Human
uggcagccgggagaggagcaagcg

SEQ ID NO: 15147 - RNA, 19 nt, Human
uggcagcgagcuggccaug

SEQ ID NO: 15148 - RNA, 24 nt, Human
uggcaggaagggggcagccugcaa

SEQ ID NO: 15149 - RNA, 24 nt, Human
uggcaggcacgccgggcagaguag

SEQ ID NO: 15150 - RNA, 24 nt, Human
uggcaggccauucacgggcuaugg

SEQ ID NO: 15151 - RNA, 24 nt, Human
uggcagggaacaaaugccaaguga

SEQ ID NO: 15152 - RNA, 24 nt, Human
uggcagggcccagugcugggccgg

SEQ ID NO: 15153 - RNA, 24 nt, Human
uggcaggggaacgcuccuggauga

SEQ ID NO: 15154 - RNA, 24 nt, Human
uggcaguagacucugaagcuaagg

SEQ ID NO: 15155 - RNA, 24 nt, Human
uggcagugagagaauccuggcaga

SEQ ID NO: 15156 - RNA, 24 nt, Human
uggcagugccugacggcgcgucug

SEQ ID NO: 15157 - RNA, 24 nt, Human
uggcagugcuccuggcgucgugga

SEQ ID NO: 15158 - RNA, 24 nt, Human
uggcagugguggaggugggcauug

SEQ ID NO: 15159 - RNA, 24 nt, Human
uggcauaggcguugaugugaccgu

SEQ ID NO: 15160 - RNA, 24 nt, Human
uggcauaucacgaacagcaaagcg

SEQ ID NO: 15161 - RNA, 24 nt, Human
uggcaucagugguggcgccugggc

SEQ ID NO: 15162 - RNA, 17 nt, Human
uggcaucccacagccuc

SEQ ID NO: 15163 - RNA, 24 nt, Human
uggcauccgagagagacuggagca

SEQ ID NO: 15164 - RNA, 22 nt, Human
uggcaugaaaagaaaggguauc

SEQ ID NO: 15165 - RNA, 24 nt, Human
uggcauggauggugguccuguagu

SEQ ID NO: 15166 - RNA, 24 nt, Human
uggcauggggugaacuguuuucca

SEQ ID NO: 15167 - RNA, 24 nt, Human
uggcauggguugaguguggccaac

SEQ ID NO: 15168 - RNA, 24 nt, Human
uggcauuguguaagggcagccagc

SEQ ID NO: 15169 - RNA, 24 nt, Human
uggcauuucagaagugagcagugg

SEQ ID NO: 15170 - RNA, 24 nt, Human
uggcauuugcagauguucagcccc

SEQ ID NO: 15171 - RNA, 22 nt, Human
uggccacuuuucagaugaaacc

SEQ ID NO: 15172 - RNA, 24 nt, Human
uggccagagaaucuguccugaggu

SEQ ID NO: 15173 - RNA, 24 nt, Human
uggccaguggggacagucagggac

SEQ ID NO: 15174 - RNA, 24 nt, Human
uggcccagacaccuccacgcugcu

SEQ ID NO: 15175 - RNA, 24 nt, Human
uggccccacgcuuaccaaccuuga

SEQ ID NO: 15176 - RNA, 22 nt, Human
uggcccucacuuucuucuauuu

SEQ ID NO: 15177 - RNA, 24 nt, Human
uggccgaaggggaacucgguguau

SEQ ID NO: 15178 - RNA, 22 nt, Human
uggccgugugguuagugauugg

SEQ ID NO: 15179 - RNA, 24 nt, Human
uggccucgguggacucgcuccucu

SEQ ID NO: 15180 - RNA, 24 nt, Human
uggccugaugauccacagcuggag

SEQ ID NO: 15181 - RNA, 24 nt, Human
uggccugcuuccaggcugcagaau

SEQ ID NO: 15182 - RNA, 24 nt, Human
uggccuggcaucccgagcccagag

SEQ ID NO: 15183 - RNA, 24 nt, Human
uggcgcagaugagugaggcacccu

SEQ ID NO: 15184 - RNA, 22 nt, Human
uggcgccauucuucagggcagc

SEQ ID NO: 15185 - RNA, 24 nt, Human
uggcgccggccgucgcuguacggu

SEQ ID NO: 15186 - RNA, 24 nt, Human
uggcgcucuacauccugcuccuca

SEQ ID NO: 15187 - RNA, 24 nt, Human
uggcggccaugaguuguugcggcg

SEQ ID NO: 15188 - RNA, 24 nt, Human
uggcggccaugaguuuguugcggc

SEQ ID NO: 15189 - RNA, 24 nt, Human
uggcgggcaccuuugguucucagu

SEQ ID NO: 15190 - RNA, 24 nt, Human
uggcguaauaccgaagaggccuga

SEQ ID NO: 15191 - RNA, 24 nt, Human
uggcgugcucugggugggugugcg

SEQ ID NO: 15192 - RNA, 24 nt, Human
uggcguggugaccaagaugaagau

SEQ ID NO: 15193 - RNA, 24 nt, Human
uggcuaaauggggaugaggagaca

SEQ ID NO: 15194 - RNA, 24 nt, Human
uggcuaaugagcaggcguuucuuc

SEQ ID NO: 15195 - RNA, 24 nt, Human
uggcuagaaacuugucagcaugaa

SEQ ID NO: 15196 - RNA, 24 nt, Human
uggcucagauccagacaaugucuc

SEQ ID NO: 15197 - RNA, 24 nt, Human
uggcucaggaaggauucagccugg

SEQ ID NO: 15198 - RNA, 24 nt, Human
uggcuccacaggcaaacccaaggg

SEQ ID NO: 15199 - RNA, 22 nt, Human
uggcucgcaacuguaaucucag

SEQ ID NO: 15200 - RNA, 24 nt, Human
uggcugaagcuccuaauauggcag

SEQ ID NO: 15201 - RNA, 22 nt, Human
uggcugagaacuuacaaggguu

SEQ ID NO: 15202 - RNA, 24 nt, Human
uggcugagggaagcagugaugggg

SEQ ID NO: 15203 - RNA, 24 nt, Human
uggcugccugcucagggccuggcu

SEQ ID NO: 15204 - RNA, 24 nt, Human
uggcuggacuaugucagggcucgu

SEQ ID NO: 15205 - RNA, 24 nt, Human
uggcuggcguugcugcgcuccgug

SEQ ID NO: 15206 - RNA, 24 nt, Human
uggcuggggauguucauauuguga

SEQ ID NO: 15207 - RNA, 24 nt, Human
uggcuggggucggggagggguaca

SEQ ID NO: 15208 - RNA, 24 nt, Human
uggcugggguuaccguggccugga

SEQ ID NO: 15209 - RNA, 24 nt, Human
uggcugggugaaagggaauggaau

SEQ ID NO: 15210 - RNA, 24 nt, Human
uggcuuaggcagaauucuccucug

SEQ ID NO: 15211 - RNA, 24 nt, Human
uggcuuauaccccaagaggauggg

SEQ ID NO: 15212 - RNA, 24 nt, Human
uggcuucacucucacaaacuccuu

SEQ ID NO: 15213 - RNA, 24 nt, Human
uggcuuccuuuuauuucuugagga

SEQ ID NO: 15214 - RNA, 24 nt, Human
uggcuugggucgagcucugucaca

SEQ ID NO: 15215 - RNA, 22 nt, Human
uggcuuuucauuccuaugugau

SEQ ID NO: 15216 - RNA, 24 nt, Human
ugggaaaaagcuaucugggugcaa

SEQ ID NO: 15217 - RNA, 24 nt, Human
ugggaacuuuguaguuuaucaugu

SEQ ID NO: 15218 - RNA, 22 nt, Human
ugggaagaugcuggcaaggugc

SEQ ID NO: 15219 - RNA, 24 nt, Human
ugggaaggaacacaggccuccagc

SEQ ID NO: 15220 - RNA, 24 nt, Human
ugggaagggaaguuaucaagacga

SEQ ID NO: 15221 - RNA, 24 nt, Human
ugggaauccaggaucaagccugcg

SEQ ID NO: 15222 - RNA, 24 nt, Human
ugggacauaagcaaagauuuggug

SEQ ID NO: 15223 - RNA, 24 nt, Human
ugggaccaagcaauccucccaccu

SEQ ID NO: 15224 - RNA, 19 nt, Human
ugggaccacauugaagggu

SEQ ID NO: 15225 - RNA, 21 nt, Human
ugggaccgguucccggggguc

SEQ ID NO: 15226 - RNA, 24 nt, Human
ugggacguccucucauacugaugu

SEQ ID NO: 15227 - RNA, 20 nt, Human
ugggacucaucuuccuuuca

SEQ ID NO: 15228 - RNA, 24 nt, Human
ugggacucauuauggaagaauggg

SEQ ID NO: 15229 - RNA, 22 nt, Human
ugggacugguuagacagugggu

SEQ ID NO: 15230 - RNA, 24 nt, Human
ugggagaaagaacgcggggcccga

SEQ ID NO: 15231 - RNA, 24 nt, Human
ugggagaaauuaccugauuguuaa

SEQ ID NO: 15232 - RNA, 24 nt, Human
ugggagacagauucagcuagaagc

SEQ ID NO: 15233 - RNA, 24 nt, Human
ugggagacagcuggcaucaucuga

SEQ ID NO: 15234 - RNA, 22 nt, Human
ugggagcuucucuaccacagcu

SEQ ID NO: 15235 - RNA, 24 nt, Human
ugggaggaagaucuccagcuucag

SEQ ID NO: 15236 - RNA, 24 nt, Human
ugggaggcagcggaaucugagacg

SEQ ID NO: 15237 - RNA, 22 nt, Human
ugggaggcuacacguuucucca

SEQ ID NO: 15238 - RNA, 22 nt, Human
ugggagggggcagcugggcuga

SEQ ID NO: 15239 - RNA, 24 nt, Human
ugggagggguccccucggagggag

SEQ ID NO: 15240 - RNA, 24 nt, Human
ugggaucggcaugagcaaaagcuc

SEQ ID NO: 15241 - RNA, 24 nt, Human
ugggaucucacuuuguuguccaau

SEQ ID NO: 15242 - RNA, 24 nt, Human
ugggaugcauaaugccagcaaguu

SEQ ID NO: 15243 - RNA, 24 nt, Human
ugggaugggcgguggcggcccggg

SEQ ID NO: 15244 - RNA, 22 nt, Human
ugggaugguuaaaccucucuuc

SEQ ID NO: 15245 - RNA, 24 nt, Human
ugggaugugaagagcuuggaguca

SEQ ID NO: 15246 - RNA, 21 nt, Human
ugggauuacaggcaugaguca

SEQ ID NO: 15247 - RNA, 21 nt, Human
ugggauuacaggccugagcca

SEQ ID NO: 15248 - RNA, 24 nt, Human
ugggauuauaggcaugaggcuccg

SEQ ID NO: 15249 - RNA, 24 nt, Human
ugggauugguggugauauccccuu

SEQ ID NO: 15250 - RNA, 23 nt, Human
ugggcaaaggccccuguugccgc

SEQ ID NO: 15251 - RNA, 22 nt, Human
ugggcaacauggugaaacccca

SEQ ID NO: 15252 - RNA, 22 nt, Human
ugggcaauauagcaagacccca

SEQ ID NO: 15253 - RNA, 22 nt, Human
ugggcacauacugcaucauuua

SEQ ID NO: 15254 - RNA, 24 nt, Human
ugggcaguauaauugauuugcagg

SEQ ID NO: 15255 - RNA, 22 nt, Human
ugggcucgcucuucagucucgg

SEQ ID NO: 15256 - RNA, 24 nt, Human
ugggcuuguagggccggcggcagc

SEQ ID NO: 15257 - RNA, 22 nt, Human
uggggacccaugaacagcacug

SEQ ID NO: 15258 - RNA, 24 nt, Human
uggggagagacacaggcaggcgag

SEQ ID NO: 15259 - RNA, 22 nt, Human
uggggagagacuguucccaggc

SEQ ID NO: 15260 - RNA, 24 nt, Human
uggggaggcuggggagggucccgg

SEQ ID NO: 15261 - RNA, 24 nt, Human
uggggcacucgcugcccucagcgc

SEQ ID NO: 15262 - RNA, 22 nt, Human
uggggcacuguggaggugucau

SEQ ID NO: 15263 - RNA, 22 nt, Human
uggggccacucuuaaaagggcg

SEQ ID NO: 15264 - RNA, 24 nt, Human
uggggccaggacagggaagcugga

SEQ ID NO: 15265 - RNA, 24 nt, Human
uggggcugaucaagggcagagagc

SEQ ID NO: 15266 - RNA, 24 nt, Human
ugggggaaaaccccgauaggguug

SEQ ID NO: 15267 - RNA, 22 nt, Human
uggggggaaguuaauuaugaag

SEQ ID NO: 15268 - RNA, 22 nt, Human
uggggggaggaauuuucugguc

SEQ ID NO: 15269 - RNA, 24 nt, Human
ugggggugggaagauggaauacug

SEQ ID NO: 15270 - RNA, 24 nt, Human
ugggguagagcaauggucugggcc

SEQ ID NO: 15271 - RNA, 24 nt, Human
uggggucaugccgaacacccauga

SEQ ID NO: 15272 - RNA, 22 nt, Human
ugggguggcagguauuagggau

SEQ ID NO: 15273 - RNA, 24 nt, Human
ugggguggggauuauguguggccc

SEQ ID NO: 15274 - RNA, 24 nt, Human
ugggguuguggugcguauaccauu

SEQ ID NO: 15275 - RNA, 24 nt, Human
ugggugaggcaggcuaagcgggau

SEQ ID NO: 15276 - RNA, 24 nt, Human
ugggugccaauuucguggugugga

SEQ ID NO: 15277 - RNA, 24 nt, Human
ugggugcgugaugccuccucuggg

SEQ ID NO: 15278 - RNA, 24 nt, Human
uggguggagauggggaguccuuug

SEQ ID NO: 15279 - RNA, 24 nt, Human
uggguggaugcugcucucgaauaa

SEQ ID NO: 15280 - RNA, 24 nt, Human
uggguguauaacuacaguauuaau

SEQ ID NO: 15281 - RNA, 21 nt, Human
uggguguggacgucuaugacc

SEQ ID NO: 15282 - RNA, 24 nt, Human
uggguucaggucguaugccaggug

SEQ ID NO: 15283 - RNA, 24 nt, Human
ugguaaagacuauauuuuguacuu

SEQ ID NO: 15284 - RNA, 24 nt, Human
ugguaaggaauaaaaaauguacag

SEQ ID NO: 15285 - RNA, 24 nt, Human
ugguaaguauaaacuucauucaua

SEQ ID NO: 15286 - RNA, 24 nt, Human
ugguacauugguuuuccuuuauga

SEQ ID NO: 15287 - RNA, 24 nt, Human
ugguauacuacugcuuugcggaau

SEQ ID NO: 15288 - RNA, 22 nt, Human
ugguauggacucucugcagcua

SEQ ID NO: 15289 - RNA, 24 nt, Human
ugguauugaugaugaacgucuccg

SEQ ID NO: 15290 - RNA, 24 nt, Human
ugguauuuguagcacaauacauca

SEQ ID NO: 15291 - RNA, 24 nt, Human
ugguauuuucuuuuggcaagaugc

SEQ ID NO: 15292 - RNA, 22 nt, Human
ugguccagaggaggaaugaggg

SEQ ID NO: 15293 - RNA, 22 nt, Human
ugguccuauugaggccaguguc

SEQ ID NO: 15294 - RNA, 24 nt, Human
uggucuguaucaaaguuggccaac

SEQ ID NO: 15295 - RNA, 22 nt, Human
uggucuugucgaagaggaagug

SEQ ID NO: 15296 - RNA, 22 nt, Human
uggugaagagggcgugaggaaa

SEQ ID NO: 15297 - RNA, 23 nt, Human
uggugagcccagagcccgagccc

SEQ ID NO: 15298 - RNA, 23 nt, Human
uggugaguguaaaugagugaggc

SEQ ID NO: 15299 - RNA, 22 nt, Human
uggugcuagugucauagcuccc

SEQ ID NO: 15300 - RNA, 22 nt, Human
uggugcucuugaaggacagaug

SEQ ID NO: 15301 - RNA, 22 nt, Human
ugguggggagaggcuugggaag

SEQ ID NO: 15302 - RNA, 22 nt, Human
uggugguuuagcuucugucuac

SEQ ID NO: 15303 - RNA, 24 nt, Human
uggugugcacccucuguuucuugu

SEQ ID NO: 15304 - RNA, 24 nt, Human
ugguguggaggugcucauggggug

SEQ ID NO: 15305 - RNA, 24 nt, Human
ugguguguaucggcccagggugac

SEQ ID NO: 15306 - RNA, 22 nt, Human
ugguuauuguuuucugccuugu

SEQ ID NO: 15307 - RNA, 24 nt, Human
ugguucuguaaaaaccagugaauu

SEQ ID NO: 15308 - RNA, 24 nt, Human
ugguuugaauguucccuccaacac

SEQ ID NO: 15309 - RNA, 24 nt, Human
ugguuugguaaagaaauccaaaga

SEQ ID NO: 15310 - RNA, 24 nt, Human
uguaaaccaaggucuguaacauca

SEQ ID NO: 15311 - RNA, 22 nt, Human
uguaaacuugucuugaauggaa

SEQ ID NO: 15312 - RNA, 24 nt, Human
uguaaagauguacagcaguuaaaa

SEQ ID NO: 15313 - RNA, 24 nt, Human
uguaacuacuauuggcuauguguu

SEQ ID NO: 15314 - RNA, 24 nt, Human
uguaagcucucagcacugaucaug

SEQ ID NO: 15315 - RNA, 19 nt, Human
uguaaugccaauaaccugu

SEQ ID NO: 15316 - RNA, 24 nt, Human
uguacaaaaccuaauuuguuguca

SEQ ID NO: 15317 - RNA, 22 nt, Human
uguacaaggggcucagccagcc

SEQ ID NO: 15318 - RNA, 22 nt, Human
uguacacaacgugcagguuugu

SEQ ID NO: 15319 - RNA, 24 nt, Human
uguacaggaagaaccuaguguuuc

SEQ ID NO: 15320 - RNA, 24 nt, Human
uguacagucgacugcaaaugaaac

SEQ ID NO: 15321 - RNA, 22 nt, Human
uguaccuaugggaagccuguca

SEQ ID NO: 15322 - RNA, 24 nt, Human
uguacgccgccagcugggugagca

SEQ ID NO: 15323 - RNA, 22 nt, Human
uguagugagcuaaccuugaucu

SEQ ID NO: 15324 - RNA, 24 nt, Human
uguauagacuucauucauauauuu

SEQ ID NO: 15325 - RNA, 24 nt, Human
uguaucaaucagcugacuguucug

SEQ ID NO: 15326 - RNA, 22 nt, Human
uguaugaagaagggaguagggc

SEQ ID NO: 15327 - RNA, 24 nt, Human
ugucaaaccguugugcccccagug

SEQ ID NO: 15328 - RNA, 24 nt, Human
ugucaagccccgcagcagcagcgc

SEQ ID NO: 15329 - RNA, 24 nt, Human
ugucaaggucuaguaggggaucca

SEQ ID NO: 15330 - RNA, 24 nt, Human
ugucaaguccuggacccuucccug

SEQ ID NO: 15331 - RNA, 22 nt, Human
ugucacaguuccgaggcagcag

SEQ ID NO: 15332 - RNA, 24 nt, Human
ugucagaagcucaaagcgacucau

SEQ ID NO: 15333 - RNA, 24 nt, Human
ugucagagcugagucugguguuac

SEQ ID NO: 15334 - RNA, 24 nt, Human
ugucagggccucacuguggaagga

SEQ ID NO: 15335 - RNA, 24 nt, Human
ugucaggguuugccucagaagugc

SEQ ID NO: 15336 - RNA, 22 nt, Human
ugucauaccgugccucgggguu

SEQ ID NO: 15337 - RNA, 22 nt, Human
ugucaucaacaccaguggccaa

SEQ ID NO: 15338 - RNA, 22 nt, Human
ugucauucuggaugucuugcac

SEQ ID NO: 15339 - RNA, 24 nt, Human
ugucauugguggccaugcugggaa

SEQ ID NO: 15340 - RNA, 24 nt, Human
uguccaagauuguccagaccuacc

SEQ ID NO: 15341 - RNA, 24 nt, Human
uguccagaagauccuggagcacau

SEQ ID NO: 15342 - RNA, 24 nt, Human
uguccagacuuugagggcuacagg

SEQ ID NO: 15343 - RNA, 24 nt, Human
uguccagagcuuucaugccuuaaa

SEQ ID NO: 15344 - RNA, 24 nt, Human
uguccagccuggggucugggugua

SEQ ID NO: 15345 - RNA, 22 nt, Human
uguccaugugacuaaguucugg

SEQ ID NO: 15346 - RNA, 24 nt, Human
ugucccaaccgggugguggaccuu

SEQ ID NO: 15347 - RNA, 22 nt, Human
ugucccaggcuguuuuuauguu

SEQ ID NO: 15348 - RNA, 22 nt, Human
uguccccucaacuggaguucua

SEQ ID NO: 15349 - RNA, 24 nt, Human
ugucccggacagugcgugcgagcg

SEQ ID NO: 15350 - RNA, 22 nt, Human
uguccgaguucaucguguacua

SEQ ID NO: 15351 - RNA, 22 nt, Human
uguccggggcugcacgcgcgcu

SEQ ID NO: 15352 - RNA, 24 nt, Human
uguccucgcccucucccgugaggc

SEQ ID NO: 15353 - RNA, 24 nt, Human
uguccugauggagugaaagggauc

SEQ ID NO: 15354 - RNA, 22 nt, Human
uguccuuuguuuugagauggag

SEQ ID NO: 15355 - RNA, 22 nt, Human
ugucgcagagccuggagucugg

SEQ ID NO: 15356 - RNA, 24 nt, Human
ugucgggggagggcugccgucgag

SEQ ID NO: 15357 - RNA, 24 nt, Human
ugucuagcgcaugcaggugccguc

SEQ ID NO: 15358 - RNA, 24 nt, Human
ugucuagugaugaguuugcuaaua

SEQ ID NO: 15359 - RNA, 22 nt, Human
ugucucagaccuugccccacca

SEQ ID NO: 15360 - RNA, 24 nt, Human
ugucuggauuuuccagcuagagau

SEQ ID NO: 15361 - RNA, 24 nt, Human
ugucugugucuaucucccuaucug

SEQ ID NO: 15362 - RNA, 22 nt, Human
ugucuguuuuucaaauaaccca

SEQ ID NO: 15363 - RNA, 24 nt, Human
ugucuuggucuugugcuucuccuu

SEQ ID NO: 15364 - RNA, 23 nt, Human
ugucuugguucuuugcugucugg

SEQ ID NO: 15365 - RNA, 24 nt, Human
ugucuugugaagccuugcugcagg

SEQ ID NO: 15366 - RNA, 24 nt, Human
ugugaacacauguacuccagcagc

SEQ ID NO: 15367 - RNA, 24 nt, Human
ugugaacgggaagaaggugcugca

SEQ ID NO: 15368 - RNA, 24 nt, Human
ugugaagaagacauggagaaugga

SEQ ID NO: 15369 - RNA, 20 nt, Human
ugugaagauaacuuucaugu

SEQ ID NO: 15370 - RNA, 24 nt, Human
ugugaagcccgagaugcaggaagg

SEQ ID NO: 15371 - RNA, 24 nt, Human
ugugaaggcgacauguauaaugac

SEQ ID NO: 15372 - RNA, 24 nt, Human
ugugaaggguuugcugggggccaa

SEQ ID NO: 15373 - RNA, 24 nt, Human
ugugaaggugaugagauuuccauc

SEQ ID NO: 15374 - RNA, 24 nt, Human
ugugaauaaauuaaaugacucuuu

SEQ ID NO: 15375 - RNA, 24 nt, Human
ugugaauagugcaacgccggguaa

SEQ ID NO: 15376 - RNA, 24 nt, Human
ugugacacuuucucagucuuuucu

SEQ ID NO: 15377 - RNA, 24 nt, Human
ugugacccaagcuguguccaaucu

SEQ ID NO: 15378 - RNA, 22 nt, Human
ugugacugaggugcgcauaaag

SEQ ID NO: 15379 - RNA, 22 nt, Human
ugugagagaagggagcaguucg

SEQ ID NO: 15380 - RNA, 24 nt, Human
ugugagagguggcaggaaugggga

SEQ ID NO: 15381 - RNA, 24 nt, Human
ugugagagucuaauggugagcucu

SEQ ID NO: 15382 - RNA, 24 nt, Human
ugugaggaggaccugaugcccgag

SEQ ID NO: 15383 - RNA, 22 nt, Human
ugugagguaauuccaguacauu

SEQ ID NO: 15384 - RNA, 22 nt, Human
ugugaguacauagcucaccuau

SEQ ID NO: 15385 - RNA, 24 nt, Human
ugugaugagaagaagaaugcauug

SEQ ID NO: 15386 - RNA, 24 nt, Human
ugugaugaggucaggaacuaggaa

SEQ ID NO: 15387 - RNA, 24 nt, Human
ugugauuuuaguaggaaauuuauu

SEQ ID NO: 15388 - RNA, 24 nt, Human
ugugcacaucggacaaacaggagc

SEQ ID NO: 15389 - RNA, 24 nt, Human
ugugcacauguauguguguuauuu

SEQ ID NO: 15390 - RNA, 24 nt, Human
ugugcagagaaauagcagagugau

SEQ ID NO: 15391 - RNA, 21 nt, Human
ugugcagcaccaguguguugg

SEQ ID NO: 15392 - RNA, 24 nt, Human
ugugcagcuugaucggcggcgccg

SEQ ID NO: 15393 - RNA, 24 nt, Human
ugugcagguagguaggggauggca

SEQ ID NO: 15394 - RNA, 24 nt, Human
ugugcagucuugcuuacaaggagg

SEQ ID NO: 15395 - RNA, 24 nt, Human
ugugcauggcagcuguuuuccuuu

SEQ ID NO: 15396 - RNA, 24 nt, Human
ugugccagcguugggcaauaaaag

SEQ ID NO: 15397 - RNA, 24 nt, Human
ugugcggagaaggcaugagcuggc

SEQ ID NO: 15398 - RNA, 22 nt, Human
ugugcggguuuguuacauaggu

SEQ ID NO: 15399 - RNA, 24 nt, Human
ugugcuaaucuaaagaacgaauca

SEQ ID NO: 15400 - RNA, 24 nt, Human
ugugcugguccgacaccugggcua

SEQ ID NO: 15401 - RNA, 20 nt, Human
ugugcuuggauguuaguucu

SEQ ID NO: 15402 - RNA, 24 nt, Human
ugugcuuguacgccgccucgucca

SEQ ID NO: 15403 - RNA, 24 nt, Human
uguggaagagcagacccaggagcu

SEQ ID NO: 15404 - RNA, 24 nt, Human
uguggagaagaguucugugucugg

SEQ ID NO: 15405 - RNA, 24 nt, Human
uguggagaguggagugcaccaggu

SEQ ID NO: 15406 - RNA, 24 nt, Human
uguggaguggaucgaacuuccucg

SEQ ID NO: 15407 - RNA, 22 nt, Human
uguggcaaugcccguugcucag

SEQ ID NO: 15408 - RNA, 24 nt, Human
uguggcagauacuguuagugccca

SEQ ID NO: 15409 - RNA, 24 nt, Human
uguggccagcuccagcagggggau

SEQ ID NO: 15410 - RNA, 24 nt, Human
uguggcucucggguccuaaaugug

SEQ ID NO: 15411 - RNA, 23 nt, Human
uguggcugugaagauguaucgaa

SEQ ID NO: 15412 - RNA, 24 nt, Human
uguggcuuucauuaauauaguucu

SEQ ID NO: 15413 - RNA, 24 nt, Human
ugugggaauuguuuuucaucuguu

SEQ ID NO: 15414 - RNA, 24 nt, Human
ugugggaucuuugggcuuggggcu

SEQ ID NO: 15415 - RNA, 22 nt, Human
uguggguagugguuugugcugu

SEQ ID NO: 15416 - RNA, 22 nt, Human
ugugguaguagugugaacauua

SEQ ID NO: 15417 - RNA, 24 nt, Human
uguggucggguguuugcuggugcc

SEQ ID NO: 15418 - RNA, 24 nt, Human
uguggucuguucaagugaucuuuu

SEQ ID NO: 15419 - RNA, 24 nt, Human
ugugguugugagucugagcuugug

SEQ ID NO: 15420 - RNA, 24 nt, Human
ugugguuuauuuuauauucuacuu

SEQ ID NO: 15421 - RNA, 24 nt, Human
uguguaaaucuuaaaauuuuuuaa

SEQ ID NO: 15422 - RNA, 23 nt, Human
uguguacacucccuaggacugau

SEQ ID NO: 15423 - RNA, 24 nt, Human
uguguacauauauguguguauaua

SEQ ID NO: 15424 - RNA, 22 nt, Human
uguguacggugcacacacacag

SEQ ID NO: 15425 - RNA, 24 nt, Human
uguguacggugcacacacacagug

SEQ ID NO: 15426 - RNA, 24 nt, Human
uguguagcaccugggucagcugac

SEQ ID NO: 15427 - RNA, 24 nt, Human
ugugucaaagacaucgguuaucaa

SEQ ID NO: 15428 - RNA, 22 nt, Human
ugugucacugagugaaagcugc

SEQ ID NO: 15429 - RNA, 24 nt, Human
ugugucccuuucaacucagacuuu

SEQ ID NO: 15430 - RNA, 24 nt, Human
ugugucuccaguccucucuggagg

SEQ ID NO: 15431 - RNA, 22 nt, Human
ugugucuguggaacagaagcag

SEQ ID NO: 15432 - RNA, 24 nt, Human
ugugucuuuuagcuacagaggagg

SEQ ID NO: 15433 - RNA, 22 nt, Human
ugugugauuugauuccaagcua

SEQ ID NO: 15434 - RNA, 24 nt, Human
ugugugcacguacauacuguauag

SEQ ID NO: 15435 - RNA, 22 nt, Human
ugugugcucacaaguguucccu

SEQ ID NO: 15436 - RNA, 22 nt, Human
ugugugugugauguguguuuug

SEQ ID NO: 15437 - RNA, 24 nt, Human
uguguugcccaggccggucacaaa

SEQ ID NO: 15438 - RNA, 24 nt, Human
uguguuguggaaccugagauuccu

SEQ ID NO: 15439 - RNA, 22 nt, Human
uguuaacauuuuucagcccaga

SEQ ID NO: 15440 - RNA, 24 nt, Human
uguuaaucggcgaggguugggcaa

SEQ ID NO: 15441 - RNA, 24 nt, Human
uguuauggucuuuaugaaaacaaa

SEQ ID NO: 15442 - RNA, 24 nt, Human
uguuauguggaucuguguggaaag

SEQ ID NO: 15443 - RNA, 24 nt, Human
uguucagauucuuuuguaccacgu

SEQ ID NO: 15444 - RNA, 24 nt, Human
uguucaggauacggcugauuugau

SEQ ID NO: 15445 - RNA, 24 nt, Human
uguucaggugcuccagaagcccca

SEQ ID NO: 15446 - RNA, 24 nt, Human
uguuccaacacggcaagguggaga

SEQ ID NO: 15447 - RNA, 24 nt, Human
uguuccuagcuuaguguuuuguuu

SEQ ID NO: 15448 - RNA, 22 nt, Human
uguucgcguaaccugcugaucc

SEQ ID NO: 15449 - RNA, 22 nt, Human
uguucggcaagaagagagggcu

SEQ ID NO: 15450 - RNA, 24 nt, Human
uguucugugaauguguccauaugu

SEQ ID NO: 15451 - RNA, 24 nt, Human
uguugagggccguuccuugggcag

SEQ ID NO: 15452 - RNA, 24 nt, Human
uguugaguagccgggauccuuggg

SEQ ID NO: 15453 - RNA, 24 nt, Human
uguugauacugcuggaauccagag

SEQ ID NO: 15454 - RNA, 22 nt, Human
uguugcagaugguggauaccaa

SEQ ID NO: 15455 - RNA, 24 nt, Human
uguugcugugggccacgcugaacg

SEQ ID NO: 15456 - RNA, 24 nt, Human
uguugcuugauaguguaucauccu

SEQ ID NO: 15457 - RNA, 24 nt, Human
uguugggauggaagcaugaaggaa

SEQ ID NO: 15458 - RNA, 24 nt, Human
uguuguagggcugcuuccggaggc

SEQ ID NO: 15459 - RNA, 20 nt, Human
uguuguaguggcggucccag

SEQ ID NO: 15460 - RNA, 24 nt, Human
uguugugccagaagcuggcggagc

SEQ ID NO: 15461 - RNA, 24 nt, Human
uguuguuuggucuuuaggccugcg

SEQ ID NO: 15462 - RNA, 24 nt, Human
uguuguuuugguccugauaggaag

SEQ ID NO: 15463 - RNA, 24 nt, Human
uguuucacagccaggcaguuuaug

SEQ ID NO: 15464 - RNA, 24 nt, Human
uguuucuuuagcucuccuccaaga

SEQ ID NO: 15465 - RNA, 22 nt, Human
uguuuggccgccagucuuuugu

SEQ ID NO: 15466 - RNA, 24 nt, Human
uguuuuggagugcagugcaggauu

SEQ ID NO: 15467 - RNA, 24 nt, Human
uguuuugggcaccuuuuucagggc

SEQ ID NO: 15468 - RNA, 24 nt, Human
uguuuuguuuuguuuuguuuucuc

SEQ ID NO: 15469 - RNA, 24 nt, Human
uuaaaagaaggcuagcauuguuug

SEQ ID NO: 15470 - RNA, 23 nt, Human
uuaaaagaucacugaaguuggau

SEQ ID NO: 15471 - RNA, 24 nt, Human
uuaaaaguugcugcaaggcugcag

SEQ ID NO: 15472 - RNA, 23 nt, Human
uuaaaauugucuagucucauguc

SEQ ID NO: 15473 - RNA, 24 nt, Human
uuaaagaacuccaacaggacuggg

SEQ ID NO: 15474 - RNA, 24 nt, Human
uuaaagacacuugaccuguuuggg

SEQ ID NO: 15475 - RNA, 24 nt, Human
uuaaagcacuuucuaaagcccuca

SEQ ID NO: 15476 - RNA, 24 nt, Human
uuaaagcagacagaacuuuuugca

SEQ ID NO: 15477 - RNA, 24 nt, Human
uuaaagcuauucaggauuuaguag

SEQ ID NO: 15478 - RNA, 24 nt, Human
uuaaaguaagugugggucaagguc

SEQ ID NO: 15479 - RNA, 22 nt, Human
uuaaagucaccauuuguggguu

SEQ ID NO: 15480 - RNA, 24 nt, Human
uuaaauauuuaguuuggacuugaa

SEQ ID NO: 15481 - RNA, 24 nt, Human
uuaaauggccaauugaaacaaaca

SEQ ID NO: 15482 - RNA, 24 nt, Human
uuaaaugggaaagcccuuuugagc

SEQ ID NO: 15483 - RNA, 22 nt, Human
uuaaauuuaauuugauaggggu

SEQ ID NO: 15484 - RNA, 24 nt, Human
uuaacaaugguaaccccccuaggg

SEQ ID NO: 15485 - RNA, 24 nt, Human
uuaacauagacuugaauuauuuuu

SEQ ID NO: 15486 - RNA, 24 nt, Human
uuaacauaugucaugcuuacagga

SEQ ID NO: 15487 - RNA, 22 nt, Human
uuaaccauugcaaagcacacug

SEQ ID NO: 15488 - RNA, 22 nt, Human
uuaaccccugugggucggcagc

SEQ ID NO: 15489 - RNA, 22 nt, Human
uuaacugagaggaucugaguag

SEQ ID NO: 15490 - RNA, 24 nt, Human
uuaauaggaaagguuuacaagaag

SEQ ID NO: 15491 - RNA, 24 nt, Human
uuaauauuugcaugcaaugucuaa

SEQ ID NO: 15492 - RNA, 24 nt, Human
uuaaugaaacauauuuagagcacu

SEQ ID NO: 15493 - RNA, 24 nt, Human
uuaaugauaggcucuuggggcauc

SEQ ID NO: 15494 - RNA, 24 nt, Human
uuaaugauuauaaaucaggaucua

SEQ ID NO: 15495 - RNA, 22 nt, Human
uuaaugcuaaucgugauagggg

SEQ ID NO: 15496 - RNA, 22 nt, Human
uuaaugcuuuuugucauacuca

SEQ ID NO: 15497 - RNA, 22 nt, Human
uuaaugugugcaaaccauggug

SEQ ID NO: 15498 - RNA, 24 nt, Human
uuaauuugacuuggaauugucuua

SEQ ID NO: 15499 - RNA, 24 nt, Human
uuacaaagaccacuaggaagaggu

SEQ ID NO: 15500 - RNA, 24 nt, Human
uuacagaggcaaguggucccugga

SEQ ID NO: 15501 - RNA, 24 nt, Human
uuacagggugugaguggggauuac

SEQ ID NO: 15502 - RNA, 24 nt, Human
uuacgcugggaccccgccaaggag

SEQ ID NO: 15503 - RNA, 22 nt, Human
uuacuauaggcucauugagaug

SEQ ID NO: 15504 - RNA, 22 nt, Human
uuacugaauguggcaucagggc

SEQ ID NO: 15505 - RNA, 24 nt, Human
uuacugcaaccucugccucccggg

SEQ ID NO: 15506 - RNA, 21 nt, Human
uuacuuugauccucgugaggc

SEQ ID NO: 15507 - RNA, 24 nt, Human
uuagaaguaaauagcagauucaac

SEQ ID NO: 15508 - RNA, 24 nt, Human
uuagaaguggcuauuaagagacga

SEQ ID NO: 15509 - RNA, 22 nt, Human
uuagaccgugcaauuauuaagc

SEQ ID NO: 15510 - RNA, 24 nt, Human
uuagacugcaacagcagcucagga

SEQ ID NO: 15511 - RNA, 24 nt, Human
uuagacuugacgcaacgggagguu

SEQ ID NO: 15512 - RNA, 24 nt, Human
uuagagcagaggaugaucggguuc

SEQ ID NO: 15513 - RNA, 24 nt, Human
uuagagcuggcagcagcaucucag

SEQ ID NO: 15514 - RNA, 24 nt, Human
uuagaguagccuagcaguuuucaa

SEQ ID NO: 15515 - RNA, 24 nt, Human
uuagagugaaguaauugggaaacu

SEQ ID NO: 15516 - RNA, 20 nt, Human
uuagaguuuuaauuguugac

SEQ ID NO: 15517 - RNA, 24 nt, Human
uuagauguacgaacaaggggacuc

SEQ ID NO: 15518 - RNA, 22 nt, Human
uuagcaaacaucuucgugugag

SEQ ID NO: 15519 - RNA, 24 nt, Human
uuagcaaagguuggaggugucuug

SEQ ID NO: 15520 - RNA, 24 nt, Human
uuagcacagguccaauauccaugg

SEQ ID NO: 15521 - RNA, 24 nt, Human
uuagcacucagggcuuccaggugu

SEQ ID NO: 15522 - RNA, 24 nt, Human
uuagcagcuguuuaauuccaauau

SEQ ID NO: 15523 - RNA, 22 nt, Human
uuagcaguugugagacccuaga

SEQ ID NO: 15524 - RNA, 22 nt, Human
uuaggacagcugacauacuugu

SEQ ID NO: 15525 - RNA, 21 nt, Human
uuaggccaagcaugguggcuc

SEQ ID NO: 15526 - RNA, 24 nt, Human
uuaggcccuuuuuguugugcuucu

SEQ ID NO: 15527 - RNA, 22 nt, Human
uuagggcaggcaugagagaacu

SEQ ID NO: 15528 - RNA, 22 nt, Human
uuaggguggcaaggguggucuu

SEQ ID NO: 15529 - RNA, 22 nt, Human
uuagguauuagcaaucugugcu

SEQ ID NO: 15530 - RNA, 24 nt, Human
uuaguacgggucuagaagccaguu

SEQ ID NO: 15531 - RNA, 24 nt, Human
uuagugaaguaacagacagcagcc

SEQ ID NO: 15532 - RNA, 24 nt, Human
uuagugcuuuuaaaccaacuugcg

SEQ ID NO: 15533 - RNA, 20 nt, Human
uuaguggggaggaggguggg

SEQ ID NO: 15534 - RNA, 24 nt, Human
uuagugguccuaagccccgcagug

SEQ ID NO: 15535 - RNA, 24 nt, Human
uuaguugaugaauucuugaagagc

SEQ ID NO: 15536 - RNA, 24 nt, Human
uuaguugguggagcgauuugucug

SEQ ID NO: 15537 - RNA, 24 nt, Human
uuauaagcccccacuucaccgcag

SEQ ID NO: 15538 - RNA, 24 nt, Human
uuaucaggggcccuuccucggaug

SEQ ID NO: 15539 - RNA, 24 nt, Human
uuaucauguaguaccggaggagac

SEQ ID NO: 15540 - RNA, 22 nt, Human
uuauccuaaauguguuuugaag

SEQ ID NO: 15541 - RNA, 24 nt, Human
uuauucuccaacaacuggaacuug

SEQ ID NO: 15542 - RNA, 24 nt, Human
uuauugcacuccagcccgggcgac

SEQ ID NO: 15543 - RNA, 24 nt, Human
uuauugguucgagaaggaauuggu

SEQ ID NO: 15544 - RNA, 24 nt, Human
uucaaauaaacuuauuugaaaagu

SEQ ID NO: 15545 - RNA, 24 nt, Human
uucaaauucuuccccucggcaaug

SEQ ID NO: 15546 - RNA, 21 nt, Human
uucaacacaaguaauugaguu

SEQ ID NO: 15547 - RNA, 22 nt, Human
uucaagaacccucaggaggcug

SEQ ID NO: 15548 - RNA, 24 nt, Human
uucaagaaucacugguguccgagg

SEQ ID NO: 15549 - RNA, 23 nt, Human
uucaagagcuaagaaccugcugc

SEQ ID NO: 15550 - RNA, 24 nt, Human
uucaagagugcauugcguguggca

SEQ ID NO: 15551 - RNA, 24 nt, Human
uucaagcgauucugccuuagccuc

SEQ ID NO: 15552 - RNA, 24 nt, Human
uucaagcuaugucauaccugccuc

SEQ ID NO: 15553 - RNA, 24 nt, Human
uucaagcugacagagaagcugacg

SEQ ID NO: 15554 - RNA, 22 nt, Human
uucaagcuggcccauggccggu

SEQ ID NO: 15555 - RNA, 24 nt, Human
uucaagggucaggaauggaccaga

SEQ ID NO: 15556 - RNA, 24 nt, Human
uucaaugcuuuaaauaaaacaaca

SEQ ID NO: 15557 - RNA, 24 nt, Human
uucaauggcguugccccucuacuu

SEQ ID NO: 15558 - RNA, 20 nt, Human
uucaauggugaagccaagug

SEQ ID NO: 15559 - RNA, 24 nt, Human
uucaauguuugcucgggagguaca

SEQ ID NO: 15560 - RNA, 24 nt, Human
uucaauuagcagucuagacauuuc

SEQ ID NO: 15561 - RNA, 24 nt, Human
uucaauucuccccuagauucucca

SEQ ID NO: 15562 - RNA, 24 nt, Human
uucaauuuucauugaggaagugug

SEQ ID NO: 15563 - RNA, 24 nt, Human
uucacagaccaaaccagacaucca

SEQ ID NO: 15564 - RNA, 24 nt, Human
uucacagaggccaggagucgcaga

SEQ ID NO: 15565 - RNA, 24 nt, Human
uucacagaugaggacacugaggcc

SEQ ID NO: 15566 - RNA, 23 nt, Human
uucacaggauggcaaguccccgu

SEQ ID NO: 15567 - RNA, 22 nt, Human
uucacagugagauuucuuugaa

SEQ ID NO: 15568 - RNA, 22 nt, Human
uucacaguggcugaagcuguuc

SEQ ID NO: 15569 - RNA, 22 nt, Human
uucacauguugcucaguuuugc

SEQ ID NO: 15570 - RNA, 23 nt, Human
uucacauucauauacucccgcau

SEQ ID NO: 15571 - RNA, 24 nt, Human
uucacauuuuuuaaaaaguguauu

SEQ ID NO: 15572 - RNA, 21 nt, Human
uucaccaccacccaugaucca

SEQ ID NO: 15573 - RNA, 23 nt, Human
uucacccaacauuugcuuuugcu

SEQ ID NO: 15574 - RNA, 21 nt, Human
uucacccaucuuuccacccac

SEQ ID NO: 15575 - RNA, 22 nt, Human
uucacccaucuuuccacccacg

SEQ ID NO: 15576 - RNA, 22 nt, Human
uucacgggauggaagucaccgu

SEQ ID NO: 15577 - RNA, 22 nt, Human
uucacuguaaccuccaccucuu

SEQ ID NO: 15578 - RNA, 22 nt, Human
uucacuugcaaccuaugcuucc

SEQ ID NO: 15579 - RNA, 22 nt, Human
uucagagauaaagagguuucgg

SEQ ID NO: 15580 - RNA, 22 nt, Human
uucagagugguuaagaucaugg

SEQ ID NO: 15581 - RNA, 22 nt, Human
uucagcauugccaguguuucca

SEQ ID NO: 15582 - RNA, 24 nt, Human
uucagcuccaucaccauccuggag

SEQ ID NO: 15583 - RNA, 21 nt, Human
uucaggcaacaguuuguccug

SEQ ID NO: 15584 - RNA, 24 nt, Human
uucagggacaaggagaaugcgugg

SEQ ID NO: 15585 - RNA, 24 nt, Human
uucaggucacaugaguugcaagau

SEQ ID NO: 15586 - RNA, 24 nt, Human
uucagguuucaggcuuuagggugu

SEQ ID NO: 15587 - RNA, 22 nt, Human
uucaguagaucuuccuuggcag

SEQ ID NO: 15588 - RNA, 22 nt, Human
uucaguuaucuguugcagcagg

SEQ ID NO: 15589 - RNA, 24 nt, Human
uucaucaucaauaaucuguacacc

SEQ ID NO: 15590 - RNA, 24 nt, Human
uucaucucuuugcucgggagguuc

SEQ ID NO: 15591 - RNA, 24 nt, Human
uucaucugagacaagcaagucucu

SEQ ID NO: 15592 - RNA, 22 nt, Human
uucaucuuguagcagcucugcc

SEQ ID NO: 15593 - RNA, 24 nt, Human
uucaugcauuacugcguuuauuuc

SEQ ID NO: 15594 - RNA, 22 nt, Human
uucaugggagcaggugguacag

SEQ ID NO: 15595 - RNA, 24 nt, Human
uucauggggcuuacuccucugaga

SEQ ID NO: 15596 - RNA, 22 nt, Human
uucauguaggacaugauuuggc

SEQ ID NO: 15597 - RNA, 24 nt, Human
uucaugucaccuaagauugccaaa

SEQ ID NO: 15598 - RNA, 22 nt, Human
uucauuacuguagauaacugag

SEQ ID NO: 15599 - RNA, 24 nt, Human
uucauuggcaguauuuugugauga

SEQ ID NO: 15600 - RNA, 24 nt, Human
uucauuguggacaaaguuauuauu

SEQ ID NO: 15601 - RNA, 22 nt, Human
uucauuuuggugaagccuuaaa

SEQ ID NO: 15602 - RNA, 22 nt, Human
uuccaaauagcugggacuagag

SEQ ID NO: 15603 - RNA, 24 nt, Human
uuccaaaucuaucuugcgcuccug

SEQ ID NO: 15604 - RNA, 22 nt, Human
uuccaaauuccuuccuuuuuaa

SEQ ID NO: 15605 - RNA, 24 nt, Human
uuccaagaaacuggggcaggcagg

SEQ ID NO: 15606 - RNA, 24 nt, Human
uuccaagacaagaucuccugucac

SEQ ID NO: 15607 - RNA, 24 nt, Human
uuccacagucugcuuaaaaaacug

SEQ ID NO: 15608 - RNA, 24 nt, Human
uuccagaguucagucugcgccuca

SEQ ID NO: 15609 - RNA, 22 nt, Human
uuccagauggguaggaauaccu

SEQ ID NO: 15610 - RNA, 24 nt, Human
uuccagauuuauuuccaauuucag

SEQ ID NO: 15611 - RNA, 24 nt, Human
uuccaggggcuccacagaacuaau

SEQ ID NO: 15612 - RNA, 24 nt, Human
uuccagggucaagucauugccuuc

SEQ ID NO: 15613 - RNA, 24 nt, Human
uuccaggucaaagggcuggcgugu

SEQ ID NO: 15614 - RNA, 24 nt, Human
uuccagguccucgaggucccacuc

SEQ ID NO: 15615 - RNA, 24 nt, Human
uuccagugacaaagaacacaugug

SEQ ID NO: 15616 - RNA, 22 nt, Human
uuccaucuggugccuuuucucu

SEQ ID NO: 15617 - RNA, 24 nt, Human
uuccauucugaucaacuaaagaaa

SEQ ID NO: 15618 - RNA, 24 nt, Human
uuccauugacauaaaaauagucuc

SEQ ID NO: 15619 - RNA, 24 nt, Human
uucccaaaaaguuuuugggaacca

SEQ ID NO: 15620 - RNA, 22 nt, Human
uucccaggagcccucagcuucc

SEQ ID NO: 15621 - RNA, 24 nt, Human
uucccaugccccaggcuccugcag

SEQ ID NO: 15622 - RNA, 22 nt, Human
uuccccauuauaccuccuucac

SEQ ID NO: 15623 - RNA, 22 nt, Human
uuccccucuguauuggaaguua

SEQ ID NO: 15624 - RNA, 24 nt, Human
uucccgcgcugagcuacaggacuc

SEQ ID NO: 15625 - RNA, 24 nt, Human
uucccggacaucgacugaggccca

SEQ ID NO: 15626 - RNA, 24 nt, Human
uucccggagaugcggcgcgcagga

SEQ ID NO: 15627 - RNA, 24 nt, Human
uucccgggcagcagggaugagggc

SEQ ID NO: 15628 - RNA, 24 nt, Human
uucccuagguuugcauuuguuuac

SEQ ID NO: 15629 - RNA, 22 nt, Human
uucccucauucuccacccaguc

SEQ ID NO: 15630 - RNA, 24 nt, Human
uucccuggggauagagugcacccu

SEQ ID NO: 15631 - RNA, 22 nt, Human
uucccuguggcuauguucuggg

SEQ ID NO: 15632 - RNA, 24 nt, Human
uucccuguggcuuagcugguggcc

SEQ ID NO: 15633 - RNA, 22 nt, Human
uucccuuuacuggcaauggcca

SEQ ID NO: 15634 - RNA, 24 nt, Human
uucccuuuccacaugacuccagac

SEQ ID NO: 15635 - RNA, 22 nt, Human
uucccuuuuaauucuucuccuc

SEQ ID NO: 15636 - RNA, 22 nt, Human
uuccgugucugcaucuguggga

SEQ ID NO: 15637 - RNA, 24 nt, Human
uuccguuuucgaaaccccugggaa

SEQ ID NO: 15638 - RNA, 24 nt, Human
uuccuagacucacuuugugcaugg

SEQ ID NO: 15639 - RNA, 24 nt, Human
uuccucacuuaaggcaggcagugu

SEQ ID NO: 15640 - RNA, 24 nt, Human
uuccucccugaucuugggguaguc

SEQ ID NO: 15641 - RNA, 24 nt, Human
uuccuccuuggucacugccuucuc

SEQ ID NO: 15642 - RNA, 22 nt, Human
uuccucugauuuuggcaugugg

SEQ ID NO: 15643 - RNA, 22 nt, Human
uuccucugccacgucuuucccu

SEQ ID NO: 15644 - RNA, 22 nt, Human
uuccugaugccagaucugaucg

SEQ ID NO: 15645 - RNA, 21 nt, Human
uuccuggaaggguagauucug

SEQ ID NO: 15646 - RNA, 24 nt, Human
uuccuggaaggguagauucugcua

SEQ ID NO: 15647 - RNA, 24 nt, Human
uuccuggcucugcaguugguacuu

SEQ ID NO: 15648 - RNA, 24 nt, Human
uuccuggguauggaguccuguccu

SEQ ID NO: 15649 - RNA, 24 nt, Human
uuccuggucgaguccagugugaaa

SEQ ID NO: 15650 - RNA, 24 nt, Human
uuccugucaguccacggguugagc

SEQ ID NO: 15651 - RNA, 24 nt, Human
uuccugugcuuucacauuguuuuu

SEQ ID NO: 15652 - RNA, 24 nt, Human
uuccuguuuccuugaguuaucauc

SEQ ID NO: 15653 - RNA, 22 nt, Human
uuccuucagcccuagcugcuuu

SEQ ID NO: 15654 - RNA, 24 nt, Human
uuccuugcagcaggaacccacuua

SEQ ID NO: 15655 - RNA, 24 nt, Human
uuccuugggauacagggugugggc

SEQ ID NO: 15656 - RNA, 21 nt, Human
uuccuuguagccaagaaugag

SEQ ID NO: 15657 - RNA, 24 nt, Human
uuccuugucaugguccuggccuug

SEQ ID NO: 15658 - RNA, 22 nt, Human
uuccuuugcaagcuccuagagg

SEQ ID NO: 15659 - RNA, 22 nt, Human
uucgaauuucaugcuucuaacc

SEQ ID NO: 15660 - RNA, 24 nt, Human
uucgacaaagcccguguaccccug

SEQ ID NO: 15661 - RNA, 23 nt, Human
uucgacaggcuucuucucuggga

SEQ ID NO: 15662 - RNA, 24 nt, Human
uucgaggggaccugcuauucuucg

SEQ ID NO: 15663 - RNA, 22 nt, Human
uucgucauuaugcagccuguga

SEQ ID NO: 15664 - RNA, 24 nt, Human
uucgucucaguuguuccuguuuuu

SEQ ID NO: 15665 - RNA, 24 nt, Human
uucgugcagucugcaaauuuuccc

SEQ ID NO: 15666 - RNA, 24 nt, Human
uucguggaggccacgccgcagcag

SEQ ID NO: 15667 - RNA, 24 nt, Human
uucguuguugcacaaaaucagcca

SEQ ID NO: 15668 - RNA, 22 nt, Human
uucuaugauucucuaaguagca

SEQ ID NO: 15669 - RNA, 24 nt, Human
uucuauugaagcugcuucuggugg

SEQ ID NO: 15670 - RNA, 24 nt, Human
uucucaagggugucagaaccauac

SEQ ID NO: 15671 - RNA, 24 nt, Human
uucucagacagcaguggccuccug

SEQ ID NO: 15672 - RNA, 22 nt, Human
uucucaugaagcgcgaagucgg

SEQ ID NO: 15673 - RNA, 22 nt, Human
uucuccagucagcauuuccuuu

SEQ ID NO: 15674 - RNA, 24 nt, Human
uucuccaugaucccgcuggccggg

SEQ ID NO: 15675 - RNA, 24 nt, Human
uucuccgcuucuccccauccccau

SEQ ID NO: 15676 - RNA, 22 nt, Human
uucucuccaauuugaaauaccu

SEQ ID NO: 15677 - RNA, 24 nt, Human
uucucugugccaaucucugcaacu

SEQ ID NO: 15678 - RNA, 24 nt, Human
uucucuguucacugucagcuuauc

SEQ ID NO: 15679 - RNA, 22 nt, Human
uucucuucaucuguauaaacug

SEQ ID NO: 15680 - RNA, 22 nt, Human
uucucuuuuagaggcuccauga

SEQ ID NO: 15681 - RNA, 22 nt, Human
uucugauaccguucuuccacca

SEQ ID NO: 15682 - RNA, 22 nt, Human
uucuggugaauucaggauggua

SEQ ID NO: 15683 - RNA, 22 nt, Human
uucugugcagguuaacauuucu

SEQ ID NO: 15684 - RNA, 22 nt, Human
uucuguguaacugucuaguuuu

SEQ ID NO: 15685 - RNA, 24 nt, Human
uucugugucgggugggagcguuug

SEQ ID NO: 15686 - RNA, 22 nt, Human
uucuuaaucuuugucucauucc

SEQ ID NO: 15687 - RNA, 24 nt, Human
uucuucacuuuguucuuuuucuga

SEQ ID NO: 15688 - RNA, 24 nt, Human
uucuucuuuuuguggcuguggaca

SEQ ID NO: 15689 - RNA, 24 nt, Human
uucuugggagaaauucaaguuugc

SEQ ID NO: 15690 - RNA, 24 nt, Human
uucuuguugcccaggcuggagugc

SEQ ID NO: 15691 - RNA, 22 nt, Human
uucuuuuuccgcuuucugagcc

SEQ ID NO: 15692 - RNA, 22 nt, Human
uucuuuuuguggcuguggacac

SEQ ID NO: 15693 - RNA, 24 nt, Human
uugaaaauggaggcuaugcagacc

SEQ ID NO: 15694 - RNA, 24 nt, Human
uugaaacauguaaucaacuaauuc

SEQ ID NO: 15695 - RNA, 21 nt, Human
uugaaacccuuugcuuauucc

SEQ ID NO: 15696 - RNA, 24 nt, Human
uugaaacuggaccagagaaagagc

SEQ ID NO: 15697 - RNA, 24 nt, Human
uugaaagagaauuucuucuucuuc

SEQ ID NO: 15698 - RNA, 24 nt, Human
uugaaagcaucccuguugguauaa

SEQ ID NO: 15699 - RNA, 24 nt, Human
uugaaagccacuguugcuucuaug

SEQ ID NO: 15700 - RNA, 24 nt, Human
uugaaagguauauuaaaauuaagg

SEQ ID NO: 15701 - RNA, 24 nt, Human
uugaaagugccugagauccugcag

SEQ ID NO: 15702 - RNA, 24 nt, Human
uugaacaauaaugagucgcuucuu

SEQ ID NO: 15703 - RNA, 24 nt, Human
uugaacacauucuuaaaaacacug

SEQ ID NO: 15704 - RNA, 22 nt, Human
uugaacaccuuuccucacugac

SEQ ID NO: 15705 - RNA, 21 nt, Human
uugaacauaucucagucucgc

SEQ ID NO: 15706 - RNA, 18 nt, Human
uugaaccggguuuucuuu

SEQ ID NO: 15707 - RNA, 24 nt, Human
uugaagaauucacuggucguuuug

SEQ ID NO: 15708 - RNA, 24 nt, Human
uugaagacucugguccgaaaguuu

SEQ ID NO: 15709 - RNA, 24 nt, Human
uugaagcaggccauugagcugagu

SEQ ID NO: 15710 - RNA, 24 nt, Human
uugaagcagguaucuugcauggcc

SEQ ID NO: 15711 - RNA, 24 nt, Human
uugaagccaauuguuuuccaaaua

SEQ ID NO: 15712 - RNA, 24 nt, Human
uugaagcccuguagaaugacacgc

SEQ ID NO: 15713 - RNA, 24 nt, Human
uugaagcuaucagaccacaucgag

SEQ ID NO: 15714 - RNA, 24 nt, Human
uugaagcuuuuacagcuggagacu

SEQ ID NO: 15715 - RNA, 23 nt, Human
uugaaggaccacacagguagugg

SEQ ID NO: 15716 - RNA, 24 nt, Human
uugaaggcuugcgggcccacagug

SEQ ID NO: 15717 - RNA, 24 nt, Human
uugaagguggcgucucaucugucu

SEQ ID NO: 15718 - RNA, 24 nt, Human
uugaaguagcguauucuuggagcu

SEQ ID NO: 15719 - RNA, 24 nt, Human
uugaauacuauaagaauggggacc

SEQ ID NO: 15720 - RNA, 24 nt, Human
uugaaucccggcucguguucuugc

SEQ ID NO: 15721 - RNA, 24 nt, Human
uugaaucucuuaaauuuaguguau

SEQ ID NO: 15722 - RNA, 22 nt, Human
uugaaugugguggaaccagcug

SEQ ID NO: 15723 - RNA, 24 nt, Human
uugacccaucaucugguuuggcau

SEQ ID NO: 15724 - RNA, 22 nt, Human
uugaccucuuuggggaccccag

SEQ ID NO: 15725 - RNA, 24 nt, Human
uugacggaaaaggcacuuaaaugu

SEQ ID NO: 15726 - RNA, 22 nt, Human
uugagacuaguaggcauagaag

SEQ ID NO: 15727 - RNA, 24 nt, Human
uugagaguggaguuacugcaggga

SEQ ID NO: 15728 - RNA, 22 nt, Human
uugaggcuugauugucccuugc

SEQ ID NO: 15729 - RNA, 24 nt, Human
uugagggccauggaagggugagaa

SEQ ID NO: 15730 - RNA, 24 nt, Human
uugagggggcaucagaauugggug

SEQ ID NO: 15731 - RNA, 24 nt, Human
uugaucuuauccuccgugacuguc

SEQ ID NO: 15732 - RNA, 24 nt, Human
uugaucuuuucuuucuucagcagu

SEQ ID NO: 15733 - RNA, 24 nt, Human
uugaugauaugaaugaucuggauu

SEQ ID NO: 15734 - RNA, 24 nt, Human
uugaugcaugugguuaauguugca

SEQ ID NO: 15735 - RNA, 24 nt, Human
uugaugcauuuucacuucuguggu

SEQ ID NO: 15736 - RNA, 23 nt, Human
uugcacagaagaauauccugggg

SEQ ID NO: 15737 - RNA, 24 nt, Human
uugcaccauuguugaacagggaau

SEQ ID NO: 15738 - RNA, 24 nt, Human
uugcaccucguggcugcuuuguuc

SEQ ID NO: 15739 - RNA, 24 nt, Human
uugcacgcggacaugaccaugcac

SEQ ID NO: 15740 - RNA, 24 nt, Human
uugcagcuggacgacgugguuagc

SEQ ID NO: 15741 - RNA, 22 nt, Human
uugcaguaacaggugugagcau

SEQ ID NO: 15742 - RNA, 24 nt, Human
uugcaguuacaaagcuaccaggaa

SEQ ID NO: 15743 - RNA, 24 nt, Human
uugcaguuuaaggcauuucuggcu

SEQ ID NO: 15744 - RNA, 24 nt, Human
uugcauagacagcugaagaguccu

SEQ ID NO: 15745 - RNA, 24 nt, Human
uugcaucaaaaaucgaagaagcac

SEQ ID NO: 15746 - RNA, 24 nt, Human
uugcauccaagucaccuuccccaa

SEQ ID NO: 15747 - RNA, 24 nt, Human
uugcaucucuaaucagcugccagu

SEQ ID NO: 15748 - RNA, 24 nt, Human
uugcauguagaguucgacgcugga

SEQ ID NO: 15749 - RNA, 24 nt, Human
uugccaaaacaacacugcccgaga

SEQ ID NO: 15750 - RNA, 24 nt, Human
uugccagucuccucauccauguau

SEQ ID NO: 15751 - RNA, 24 nt, Human
uugccauccucgaacuugaacagu

SEQ ID NO: 15752 - RNA, 22 nt, Human
uugcccaggcuggagugcagug

SEQ ID NO: 15753 - RNA, 24 nt, Human
uugccggcucaacuucuccgacuc

SEQ ID NO: 15754 - RNA, 22 nt, Human
uugccuaaugcacaaaggugag

SEQ ID NO: 15755 - RNA, 24 nt, Human
uugccucuuccuccuccuguccgg

SEQ ID NO: 15756 - RNA, 22 nt, Human
uugccuggagacauuucuacug

SEQ ID NO: 15757 - RNA, 24 nt, Human
uugcgggagaugcugaagaguaug

SEQ ID NO: 15758 - RNA, 24 nt, Human
uugcucagcaggaaugcaggggua

SEQ ID NO: 15759 - RNA, 24 nt, Human
uugcugccaguccccauccugaag

SEQ ID NO: 15760 - RNA, 22 nt, Human
uugcugcuuaagucuugcccac

SEQ ID NO: 15761 - RNA, 24 nt, Human
uugcugggagaaucucauuuuggc

SEQ ID NO: 15762 - RNA, 24 nt, Human
uugcuggguuuagcucucagcagc

SEQ ID NO: 15763 - RNA, 24 nt, Human
uugcuguccuucuccaauugugag

SEQ ID NO: 15764 - RNA, 24 nt, Human
uugcuguuuggcagauggugaggg

SEQ ID NO: 15765 - RNA, 24 nt, Human
uugcuuccuguauuggcugcaagu

SEQ ID NO: 15766 - RNA, 24 nt, Human
uugcuucuacuuuugaggcgcuuc

SEQ ID NO: 15767 - RNA, 22 nt, Human
uugcuugauccauugaugaaca

SEQ ID NO: 15768 - RNA, 22 nt, Human
uugcuuuuuuggguuuacuggg

SEQ ID NO: 15769 - RNA, 24 nt, Human
uuggaacugguauaaauacaucaa

SEQ ID NO: 15770 - RNA, 24 nt, Human
uuggaaggggcguuguccaguucc

SEQ ID NO: 15771 - RNA, 24 nt, Human
uuggaaguuuacuuaguuagaaug

SEQ ID NO: 15772 - RNA, 24 nt, Human
uuggacugaccccgacaggcauau

SEQ ID NO: 15773 - RNA, 24 nt, Human
uuggagaaccuguucugacuuuag

SEQ ID NO: 15774 - RNA, 24 nt, Human
uuggagauaaacagggcucucgac

SEQ ID NO: 15775 - RNA, 22 nt, Human
uuggagcagauguguauaguua

SEQ ID NO: 15776 - RNA, 24 nt, Human
uuggagcagggacuguggaguuua

SEQ ID NO: 15777 - RNA, 24 nt, Human
uuggagcgagugcagguaccgcca

SEQ ID NO: 15778 - RNA, 22 nt, Human
uuggaggacccauccuuugugg

SEQ ID NO: 15779 - RNA, 22 nt, Human
uuggaggcauucauuccccuca

SEQ ID NO: 15780 - RNA, 24 nt, Human
uuggauauuuucaccucugggaua

SEQ ID NO: 15781 - RNA, 24 nt, Human
uuggaugccacuccccuguguuga

SEQ ID NO: 15782 - RNA, 24 nt, Human
uuggaugugaaaaggaugucaggg

SEQ ID NO: 15783 - RNA, 24 nt, Human
uuggcagcaucuuggaccucaugc

SEQ ID NO: 15784 - RNA, 23 nt, Human
uuggcagccaugaucuuugcaug

SEQ ID NO: 15785 - RNA, 24 nt, Human
uuggcagucuacuaauuccuguau

SEQ ID NO: 15786 - RNA, 24 nt, Human
uuggccccgcaacuccuugaccua

SEQ ID NO: 15787 - RNA, 24 nt, Human
uuggccucuggacacucaucggcc

SEQ ID NO: 15788 - RNA, 22 nt, Human
uuggccuguggggugaacagcu

SEQ ID NO: 15789 - RNA, 24 nt, Human
uuggcugacaccguggaggguaaa

SEQ ID NO: 15790 - RNA, 22 nt, Human
uugggaaauaagcugauaguaa

SEQ ID NO: 15791 - RNA, 24 nt, Human
uugggcagaagagggugcagaaaa

SEQ ID NO: 15792 - RNA, 24 nt, Human
uuggggcagaacuagguaccaagc

SEQ ID NO: 15793 - RNA, 24 nt, Human
uuggguggaccuggacugaggcgu

SEQ ID NO: 15794 - RNA, 22 nt, Human
uugguaaagggaccuagagaug

SEQ ID NO: 15795 - RNA, 24 nt, Human
uugguccaggguucaagauuugag

SEQ ID NO: 15796 - RNA, 22 nt, Human
uugguccccuucaaccagcuac

SEQ ID NO: 15797 - RNA, 24 nt, Human
uuggucuuggaggcgaagccgaaa

SEQ ID NO: 15798 - RNA, 24 nt, Human
uuggugaccgaauuacuagugacu

SEQ ID NO: 15799 - RNA, 22 nt, Human
uuggugccaauuggucgugguc

SEQ ID NO: 15800 - RNA, 24 nt, Human
uuggugccuucuuucaucaugccu

SEQ ID NO: 15801 - RNA, 24 nt, Human
uuggugcugaagauaaacacuuuu

SEQ ID NO: 15802 - RNA, 24 nt, Human
uugguggccaagaaucucuucguu

SEQ ID NO: 15803 - RNA, 24 nt, Human
uugguucaaagggauggaaaguca

SEQ ID NO: 15804 - RNA, 24 nt, Human
uugguucaagggauggaaaaguca

SEQ ID NO: 15805 - RNA, 24 nt, Human
uugguuccaacgcgauggcaaguc

SEQ ID NO: 15806 - RNA, 24 nt, Human
uugguuccacgggauggaaaguca

SEQ ID NO: 15807 - RNA, 24 nt, Human
uugguuccacgggcaugugacagu

SEQ ID NO: 15808 - RNA, 24 nt, Human
uugguucuuauugacugaauuuac

SEQ ID NO: 15809 - RNA, 22 nt, Human
uugguugggugcugugguuggu

SEQ ID NO: 15810 - RNA, 22 nt, Human
uugguuggugaugagcauugaa

SEQ ID NO: 15811 - RNA, 24 nt, Human
uugguugugauauguuaaccugca

SEQ ID NO: 15812 - RNA, 24 nt, Human
uuguaaccaacuccugccagaccu

SEQ ID NO: 15813 - RNA, 24 nt, Human
uuguaagaguggaauuaacugccc

SEQ ID NO: 15814 - RNA, 22 nt, Human
uuguaccaugaacugacagacc

SEQ ID NO: 15815 - RNA, 22 nt, Human
uuguaguuucauguuguugguu

SEQ ID NO: 15816 - RNA, 22 nt, Human
uuguaugcugggaagcgggagg

SEQ ID NO: 15817 - RNA, 22 nt, Human
uugucagaggcugguagggugu

SEQ ID NO: 15818 - RNA, 24 nt, Human
uugugcccuucgcgacgauuuucu

SEQ ID NO: 15819 - RNA, 24 nt, Human
uugugcuccucagcuuucucagug

SEQ ID NO: 15820 - RNA, 22 nt, Human
uugugcuuguacugaccaugua

SEQ ID NO: 15821 - RNA, 23 nt, Human
uuguggugguagagccagaagau

SEQ ID NO: 15822 - RNA, 22 nt, Human
uugugugccuuaucauguguua

SEQ ID NO: 15823 - RNA, 22 nt, Human
uuguugcugcaugauugcgaga

SEQ ID NO: 15824 - RNA, 24 nt, Human
uuguugguguccguggcgcaggug

SEQ ID NO: 15825 - RNA, 22 nt, Human
uuguuguuaaaguggccuuuaa

SEQ ID NO: 15826 - RNA, 24 nt, Human
uuguuugccccccggcugaucucc

SEQ ID NO: 15827 - RNA, 22 nt, Human
uuguuuucuuucuccucuucua

SEQ ID NO: 15828 - RNA, 24 nt, Human
uuuaaacaaauuccauggaguuua

SEQ ID NO: 15829 - RNA, 24 nt, Human
uuuaaagucagcaagaaugaggag

SEQ ID NO: 15830 - RNA, 22 nt, Human
uuuaacaauggauaaguucugu

SEQ ID NO: 15831 - RNA, 24 nt, Human
uuuaaccaaagaagauguguagug

SEQ ID NO: 15832 - RNA, 22 nt, Human
uuuaaccccccgggguucccac

SEQ ID NO: 15833 - RNA, 23 nt, Human
uuuaacuuugcaaacccauuguc

SEQ ID NO: 15834 - RNA, 24 nt, Human
uuuaagcaauaaaaauuggcaugu

SEQ ID NO: 15835 - RNA, 24 nt, Human
uuuaagcacucaugcaaagguaaa

SEQ ID NO: 15836 - RNA, 24 nt, Human
uuuaaguagaacaaacuaaauaca

SEQ ID NO: 15837 - RNA, 24 nt, Human
uuuaauaaaauaauccagugguac

SEQ ID NO: 15838 - RNA, 24 nt, Human
uuuacaacaacuaagggaguguau

SEQ ID NO: 15839 - RNA, 24 nt, Human
uuuacagaggaacuguaguucaca

SEQ ID NO: 15840 - RNA, 19 nt, Human
uuuacauuugaaucugcca

SEQ ID NO: 15841 - RNA, 24 nt, Human
uuuacuggaagauaacucucaccu

SEQ ID NO: 15842 - RNA, 22 nt, Human
uuuacuucuacagggagacuac

SEQ ID NO: 15843 - RNA, 24 nt, Human
uuuagcacuuuuacuucaaaucag

SEQ ID NO: 15844 - RNA, 24 nt, Human
uuuauauuuuugcaaaugucagga

SEQ ID NO: 15845 - RNA, 24 nt, Human
uuuaucaguuaauaauauuaauca

SEQ ID NO: 15846 - RNA, 19 nt, Human
uuuaucuuuuugcugaggg

SEQ ID NO: 15847 - RNA, 22 nt, Human
uuucaaaacaaagcuuucccag

SEQ ID NO: 15848 - RNA, 24 nt, Human
uuucaagcauuuuugccagcacag

SEQ ID NO: 15849 - RNA, 24 nt, Human
uuucacacauggacuccaccguua

SEQ ID NO: 15850 - RNA, 24 nt, Human
uuucacagaguauauaauuuaggu

SEQ ID NO: 15851 - RNA, 24 nt, Human
uuucacagcucuccuccccuacug

SEQ ID NO: 15852 - RNA, 24 nt, Human
uuucaccauguuggccaggcucgu

SEQ ID NO: 15853 - RNA, 24 nt, Human
uuucacggucgcagccaucuugcu

SEQ ID NO: 15854 - RNA, 24 nt, Human
uuucagccuuucugcggaagcugu

SEQ ID NO: 15855 - RNA, 22 nt, Human
uuucauauggauauuugagaau

SEQ ID NO: 15856 - RNA, 24 nt, Human
uuucaucgacuuaucuaugagcau

SEQ ID NO: 15857 - RNA, 24 nt, Human
uuucauugauuuucaccauugguu

SEQ ID NO: 15858 - RNA, 24 nt, Human
uuuccacagaagcaccaccuauca

SEQ ID NO: 15859 - RNA, 22 nt, Human
uuuccacagcggccaauucuuc

SEQ ID NO: 15860 - RNA, 22 nt, Human
uuuccacauguggaaguggggu

SEQ ID NO: 15861 - RNA, 24 nt, Human
uuuccagcauuuccaucuuuacca

SEQ ID NO: 15862 - RNA, 24 nt, Human
uuuccaggagguaguggguggcau

SEQ ID NO: 15863 - RNA, 24 nt, Human
uuuccagucacacaucaaggcgcu

SEQ ID NO: 15864 - RNA, 24 nt, Human
uuuccggcgccgacucugaggccc

SEQ ID NO: 15865 - RNA, 24 nt, Human
uuuccuggccccucacucauuuca

SEQ ID NO: 15866 - RNA, 24 nt, Human
uuuccuguggguaagcagcuguuu

SEQ ID NO: 15867 - RNA, 24 nt, Human
uuuccugugguuuuccaggacugu

SEQ ID NO: 15868 - RNA, 19 nt, Human
uuucgcagagcugaagauc

SEQ ID NO: 15869 - RNA, 24 nt, Human
uuucgcucuuguugcccaagcugg

SEQ ID NO: 15870 - RNA, 24 nt, Human
uuucucaggaggugauucaggaac

SEQ ID NO: 15871 - RNA, 22 nt, Human
uuucucccacucuaauagauga

SEQ ID NO: 15872 - RNA, 22 nt, Human
uuucucuugaacccuaauuuuu

SEQ ID NO: 15873 - RNA, 22 nt, Human
uuucuggagggcaagugcaggg

SEQ ID NO: 15874 - RNA, 22 nt, Human
uuucuuguaggcucacucacca

SEQ ID NO: 15875 - RNA, 24 nt, Human
uuugaaaccaguuuuuaucccuuc

SEQ ID NO: 15876 - RNA, 24 nt, Human
uuugaacacugaaaccauuguugg

SEQ ID NO: 15877 - RNA, 24 nt, Human
uuugaacagcuucagcguggccuu

SEQ ID NO: 15878 - RNA, 24 nt, Human
uuugaacauucacugcggggcuua

SEQ ID NO: 15879 - RNA, 24 nt, Human
uuugaagucuccauucguuguaca

SEQ ID NO: 15880 - RNA, 24 nt, Human
uuugacaaaagaggaugcagaguu

SEQ ID NO: 15881 - RNA, 24 nt, Human
uuugacuuuaugcuagaagaugag

SEQ ID NO: 15882 - RNA, 22 nt, Human
uuugagcguauuugugucaguc

SEQ ID NO: 15883 - RNA, 24 nt, Human
uuugaucaggaaacgugguuacua

SEQ ID NO: 15884 - RNA, 24 nt, Human
uuugaugcaagaaaggccucucuu

SEQ ID NO: 15885 - RNA, 24 nt, Human
uuugauggccuuagcagguucugu

SEQ ID NO: 15886 - RNA, 18 nt, Human
uuugaugguggugucuag

SEQ ID NO: 15887 - RNA, 23 nt, Human
uuugcaaaucugcggaaagugcu

SEQ ID NO: 15888 - RNA, 23 nt, Human
uuugcacaccacaacagccagac

SEQ ID NO: 15889 - RNA, 22 nt, Human
uuugcacacuuuccaaguugcc

SEQ ID NO: 15890 - RNA, 24 nt, Human
uuugcacuggagagcugugcccac

SEQ ID NO: 15891 - RNA, 24 nt, Human
uuugcagauuccggauacgacagc

SEQ ID NO: 15892 - RNA, 22 nt, Human
uuugcaguguucaucaguauuu

SEQ ID NO: 15893 - RNA, 19 nt, Human
uuugcauaaaacaugcauu

SEQ ID NO: 15894 - RNA, 24 nt, Human
uuugccuggcagguucaggcucag

SEQ ID NO: 15895 - RNA, 24 nt, Human
uuugcuagucaccaacuucugggu

SEQ ID NO: 15896 - RNA, 24 nt, Human
uuugcugaaguucauggaugguac

SEQ ID NO: 15897 - RNA, 24 nt, Human
uuugcuguuuuccaucauguguua

SEQ ID NO: 15898 - RNA, 24 nt, Human
uuugcuugccuuuauuagcuggaa

SEQ ID NO: 15899 - RNA, 24 nt, Human
uuuggagagggugucuuucuguaa

SEQ ID NO: 15900 - RNA, 22 nt, Human
uuuggauuccugguuccuacag

SEQ ID NO: 15901 - RNA, 24 nt, Human
uuuggauucugaaaacuaacuggc

SEQ ID NO: 15902 - RNA, 24 nt, Human
uuuggcaaagacuuggugcagaug

SEQ ID NO: 15903 - RNA, 22 nt, Human
uuuggcucuguguccucaccca

SEQ ID NO: 15904 - RNA, 22 nt, Human
uuugguacuagacauguuugcu

SEQ ID NO: 15905 - RNA, 22 nt, Human
uuugguaucuuggcaggagggu

SEQ ID NO: 15906 - RNA, 24 nt, Human
uuugguggaguuugagaccagccu

SEQ ID NO: 15907 - RNA, 24 nt, Human
uuugguggucucuucacauggacg

SEQ ID NO: 15908 - RNA, 22 nt, Human
uuuguaauagcaaaauacugga

SEQ ID NO: 15909 - RNA, 24 nt, Human
uuuguagaaucagacuguucuuug

SEQ ID NO: 15910 - RNA, 24 nt, Human
uuuguagacuuggaacccacaguc

SEQ ID NO: 15911 - RNA, 24 nt, Human
uuuguagucaugggggucucacua

SEQ ID NO: 15912 - RNA, 24 nt, Human
uuuguauauauauuuaaacacaug

SEQ ID NO: 15913 - RNA, 24 nt, Human
uuuguauuuaccccaaaaucuuuu

SEQ ID NO: 15914 - RNA, 24 nt, Human
uuuguccuuaaauuaaccuuugcu

SEQ ID NO: 15915 - RNA, 24 nt, Human
uuugucucugaccucccaggaagu

SEQ ID NO: 15916 - RNA, 24 nt, Human
uuugucucuggauucgauggcucu

SEQ ID NO: 15917 - RNA, 24 nt, Human
uuugucuuuccauccagucuauuc

SEQ ID NO: 15918 - RNA, 24 nt, Human
uuugugcgccgaggucauccccgu

SEQ ID NO: 15919 - RNA, 24 nt, Human
uuugugcugaggcaggacacagcg

SEQ ID NO: 15920 - RNA, 24 nt, Human
uuuguggacagcgagaccaugccu

SEQ ID NO: 15921 - RNA, 24 nt, Human
uuuguggagcugccguugacgugc

SEQ ID NO: 15922 - RNA, 22 nt, Human
uuuguucucaaggacuaucagc

SEQ ID NO: 15923 - RNA, 22 nt, Human
uuuguuugcuccuucugccauu

SEQ ID NO: 15924 - RNA, 24 nt, Human
uuuuaaagaaagaacagaucgagu

SEQ ID NO: 15925 - RNA, 24 nt, Human
uuuuaaguuugcccuaugguggcc

SEQ ID NO: 15926 - RNA, 24 nt, Human
uuuuauggacaggcaauuuaguca

SEQ ID NO: 15927 - RNA, 24 nt, Human
uuuucagccaaaaagagcccacuu

SEQ ID NO: 15928 - RNA, 24 nt, Human
uuuucagguuuaucaacuguuuau

SEQ ID NO: 15929 - RNA, 24 nt, Human
uuuucaguuucauccauguauuuc

SEQ ID NO: 15930 - RNA, 24 nt, Human
uuuuccagacgauuguuuggugga

SEQ ID NO: 15931 - RNA, 24 nt, Human
uuuuccguuccuacagucccgguu

SEQ ID NO: 15932 - RNA, 24 nt, Human
uuuuccuuuacuaagaaaaguauu

SEQ ID NO: 15933 - RNA, 24 nt, Human
uuuucugagaaaccugacucaaug

SEQ ID NO: 15934 - RNA, 24 nt, Human
uuuuguaggagacagggucucccu

SEQ ID NO: 15935 - RNA, 24 nt, Human
uuuugugaugacagcuuggcgggu

SEQ ID NO: 15936 - RNA, 24 nt, Human
uuuuguuuacugagaguaagauca

SEQ ID NO: 15937 - RNA, 22 nt, Human
uuuuuaucuuuuucuccagaug

SEQ ID NO: 15938 - RNA, 22 nt, Human
uuuuucuuaugccucagcucug

SEQ ID NO: 15939 - RNA, 22 nt, Human
uuuuuguucuaaugaucacugu

SEQ ID NO: 15940 - RNA, 24 nt, Human
uuuuuuagauuaguguuucuuaaa

SEQ ID NO: 15941 - RNA, 22 nt, Human
uuuuuugugagaugugaaucuu

SEQ ID NO: 15942 - RNA, 22 nt, Human
aaaaaguuucagauuuuggagu

SEQ ID NO: 15943 - RNA, 24 nt, Human
aaaaaucugauugguggggaucuc

SEQ ID NO: 15944 - RNA, 24 nt, Human
aaaaauguuugccaagggaacuga

SEQ ID NO: 15945 - RNA, 22 nt, Human
aaaaccagggccuucaucuagg

SEQ ID NO: 15946 - RNA, 22 nt, Human
aaaagugccugcugcugcuucu

SEQ ID NO: 15947 - RNA, 24 nt, Human
aaaaugcuucuaagaaccuguuug

SEQ ID NO: 15948 - RNA, 24 nt, Human
aaacaugugagagaaaccauaaag

SEQ ID NO: 15949 - RNA, 22 nt, Human
aaacauuguuuauuugagacag

SEQ ID NO: 15950 - RNA, 24 nt, Human
aaacguccuccucaggcaguuguc

SEQ ID NO: 15951 - RNA, 24 nt, Human
aaacuaguucuuaggaacagacuc

SEQ ID NO: 15952 - RNA, 24 nt, Human
aaacugcucacaaaaauaagucuu

SEQ ID NO: 15953 - RNA, 22 nt, Human
aaacuuuuggcuguggggaccc

SEQ ID NO: 15954 - RNA, 22 nt, Human
aaagaacauugguuugcucuuc

SEQ ID NO: 15955 - RNA, 24 nt, Human
aaagaacuguaaaugcaauguaaa

SEQ ID NO: 15956 - RNA, 24 nt, Human
aaagaagacagacuucaguuggga

SEQ ID NO: 15957 - RNA, 22 nt, Human
aaagaauucuccuuuugggcuu

SEQ ID NO: 15958 - RNA, 22 nt, Human
aaagacagagucugccaugcag

SEQ ID NO: 15959 - RNA, 22 nt, Human
aaagagcucacaggcuuugggg

SEQ ID NO: 15960 - RNA, 22 nt, Human
aaagagguucugauucuggccu

SEQ ID NO: 15961 - RNA, 23 nt, Human
aaagaguauuugaacuuguugac

SEQ ID NO: 15962 - RNA, 24 nt, Human
aaagcagaaaaagcacugagaaaa

SEQ ID NO: 15963 - RNA, 24 nt, Human
aaagcagguggaguugguugaauc

SEQ ID NO: 15964 - RNA, 24 nt, Human
aaagcuaugaaacuguauagggcu

SEQ ID NO: 15965 - RNA, 22 nt, Human
aaagcuuuaccugugagguuuu

SEQ ID NO: 15966 - RNA, 24 nt, Human
aaagucacacaguccaggcuugau

SEQ ID NO: 15967 - RNA, 24 nt, Human
aaagugcucggauuagaggcauga

SEQ ID NO: 15968 - RNA, 22 nt, Human
aaagugcugggauuacaggcau

SEQ ID NO: 15969 - RNA, 22 nt, Human
aaaguggcuggaguggagucuu

SEQ ID NO: 15970 - RNA, 24 nt, Human
aaaguucauauagaaucaaaaaag

SEQ ID NO: 15971 - RNA, 22 nt, Human
aaauacaaaaauuagccaggca

SEQ ID NO: 15972 - RNA, 24 nt, Human
aaauagugaauuugauaugaaauc

SEQ ID NO: 15973 - RNA, 22 nt, Human
aaauccagaaucuagacugaau

SEQ ID NO: 15974 - RNA, 22 nt, Human
aaaugucaaaaaggcaaaaugg

SEQ ID NO: 15975 - RNA, 24 nt, Human
aaaugugcgaaaaauaaaugcuug

SEQ ID NO: 15976 - RNA, 24 nt, Human
aaauguguuuguggcauauaggac

SEQ ID NO: 15977 - RNA, 22 nt, Human
aaauucaucuaacuuccaggaa

SEQ ID NO: 15978 - RNA, 24 nt, Human
aacaagaucacucaaggugaagga

SEQ ID NO: 15979 - RNA, 24 nt, Human
aacaccauuuauugauuagggugu

SEQ ID NO: 15980 - RNA, 24 nt, Human
aacacucuguuuaaugaagugucc

SEQ ID NO: 15981 - RNA, 23 nt, Human
aacacuucuugcuaccagggaug

SEQ ID NO: 15982 - RNA, 24 nt, Human
aacaggaggagauguuaaaguaac

SEQ ID NO: 15983 - RNA, 24 nt, Human
aacagugucuuuucuccaaaacuu

SEQ ID NO: 15984 - RNA, 22 nt, Human
aacauagggagacccugucucu

SEQ ID NO: 15985 - RNA, 24 nt, Human
aacaucauccagccagguguucag

SEQ ID NO: 15986 - RNA, 22 nt, Human
aacaugaggaggauguaaugcu

SEQ ID NO: 15987 - RNA, 24 nt, Human
aaccaggagaugcugcgaugauga

SEQ ID NO: 15988 - RNA, 24 nt, Human
aaccaggaggugagugccuuuggg

SEQ ID NO: 15989 - RNA, 24 nt, Human
aaccaugcuggagaccagagcaac

SEQ ID NO: 15990 - RNA, 22 nt, Human
aacccgacacaguagcauuugu

SEQ ID NO: 15991 - RNA, 22 nt, Human
aaccugcugguaaagcacuggc

SEQ ID NO: 15992 - RNA, 22 nt, Human
aaccugucucuguuuuucguaa

SEQ ID NO: 15993 - RNA, 24 nt, Human
aaccugugaauuggacgaccaucu

SEQ ID NO: 15994 - RNA, 24 nt, Human
aaccuguugacagaucuucagaga

SEQ ID NO: 15995 - RNA, 22 nt, Human
aacggccacgccuaacaauuau

SEQ ID NO: 15996 - RNA, 22 nt, Human
aacguaguuccugagagauagc

SEQ ID NO: 15997 - RNA, 24 nt, Human
aacguccuuuucauuuugguuuag

SEQ ID NO: 15998 - RNA, 24 nt, Human
aacuacuuagguugguaccagcag

SEQ ID NO: 15999 - RNA, 22 nt, Human
aacuccuugccugaucuaaacu

SEQ ID NO: 16000 - RNA, 24 nt, Human
aacucuuugggaaugcagccuagu

SEQ ID NO: 16001 - RNA, 22 nt, Human
aacuguccaugagagaauauaa

SEQ ID NO: 16002 - RNA, 24 nt, Human
aacuguguguugauuucugguucc

SEQ ID NO: 16003 - RNA, 24 nt, Human
aacuguuuaauaggaauuuggaga

SEQ ID NO: 16004 - RNA, 24 nt, Human
aagaaaauauguuguaauaaugcu

SEQ ID NO: 16005 - RNA, 24 nt, Human
aagaacaaggcagcauguagugcu

SEQ ID NO: 16006 - RNA, 21 nt, Human
aagaacacacggcaaacuguu

SEQ ID NO: 16007 - RNA, 24 nt, Human
aagaacacuuuuuggggcagccuu

SEQ ID NO: 16008 - RNA, 24 nt, Human
aagaacuacauccaaggcaucaac

SEQ ID NO: 16009 - RNA, 24 nt, Human
aagaauacaaggaaagggguguca

SEQ ID NO: 16010 - RNA, 24 nt, Human
aagaauccgucgcuaugauuucuc

SEQ ID NO: 16011 - RNA, 22 nt, Human
aagaaugugcccucaccaaagg

SEQ ID NO: 16012 - RNA, 18 nt, Human
aagaauugacaggcuuga

SEQ ID NO: 16013 - RNA, 22 nt, Human
aagacacauaagcaaaagucua

SEQ ID NO: 16014 - RNA, 22 nt, Human
aagaccauuucuggcugggcag

SEQ ID NO: 16015 - RNA, 22 nt, Human
aagaccccgauaccucguguuc

SEQ ID NO: 16016 - RNA, 24 nt, Human
aagacccucauagccgccuacucc

SEQ ID NO: 16017 - RNA, 23 nt, Human
aagagcacugaucguacuggcuc

SEQ ID NO: 16018 - RNA, 24 nt, Human
aagagccaggagcuacucagcaac

SEQ ID NO: 16019 - RNA, 22 nt, Human
aagaggaaaguuuguuagugga

SEQ ID NO: 16020 - RNA, 24 nt, Human
aagaguccaccuugcagcuggugc

SEQ ID NO: 16021 - RNA, 22 nt, Human
aagaguguguaggccagccccg

SEQ ID NO: 16022 - RNA, 24 nt, Human
aagaguucacaccugaugaaugua

SEQ ID NO: 16023 - RNA, 22 nt, Human
aagaucccuaaacucugcauug

SEQ ID NO: 16024 - RNA, 24 nt, Human
aagauugcuuuucuugaaaugcuc

SEQ ID NO: 16025 - RNA, 24 nt, Human
aagcaagcugaagggaaaaggggg

SEQ ID NO: 16026 - RNA, 24 nt, Human
aagcacaacuacacacuuugccca

SEQ ID NO: 16027 - RNA, 24 nt, Human
aagcacacccuuuuaagacuacuu

SEQ ID NO: 16028 - RNA, 24 nt, Human
aagcacuuuuguugagugacaacc

SEQ ID NO: 16029 - RNA, 24 nt, Human
aagcagaagcagauucggcgcggg

SEQ ID NO: 16030 - RNA, 24 nt, Human
aagcagcacucccugggggcagga

SEQ ID NO: 16031 - RNA, 22 nt, Human
aagcagccuuggaccaggaggg

SEQ ID NO: 16032 - RNA, 24 nt, Human
aagcagcgcgggcagcgagcgaga

SEQ ID NO: 16033 - RNA, 24 nt, Human
aagcagcuuauuguagguguggcg

SEQ ID NO: 16034 - RNA, 24 nt, Human
aagcagcuucauaaccgaagauug

SEQ ID NO: 16035 - RNA, 24 nt, Human
aagcaggagcuuguccaggaaugu

SEQ ID NO: 16036 - RNA, 23 nt, Human
aagcagugugaugucgacucccu

SEQ ID NO: 16037 - RNA, 24 nt, Human
aagcauauuuuucagcaaguacag

SEQ ID NO: 16038 - RNA, 24 nt, Human
aagcaugccauuucuguuuucuug

SEQ ID NO: 16039 - RNA, 24 nt, Human
aagcauuuugagaacagguuggca

SEQ ID NO: 16040 - RNA, 24 nt, Human
aagccaccuaugacgcagccaccc

SEQ ID NO: 16041 - RNA, 24 nt, Human
aagcccauacauaacaguggaggu

SEQ ID NO: 16042 - RNA, 22 nt, Human
aagcccauggcaaauaggaaga

SEQ ID NO: 16043 - RNA, 24 nt, Human
aagccccauuucuuugagaagugg

SEQ ID NO: 16044 - RNA, 24 nt, Human
aagccccccaaagaacaagggaaa

SEQ ID NO: 16045 - RNA, 24 nt, Human
aagccgcgcuguuccugcugcugg

SEQ ID NO: 16046 - RNA, 24 nt, Human
aagccugagccaaaccaugagugg

SEQ ID NO: 16047 - RNA, 22 nt, Human
aagccuguugaugucucugguc

SEQ ID NO: 16048 - RNA, 24 nt, Human
aagcgaccagcuacauuuaccaaa

SEQ ID NO: 16049 - RNA, 24 nt, Human
aagcgggcugaugacuguaccugc

SEQ ID NO: 16050 - RNA, 22 nt, Human
aagcucaguggugggugacaca

SEQ ID NO: 16051 - RNA, 24 nt, Human
aagcugacagagaugugagagguc

SEQ ID NO: 16052 - RNA, 24 nt, Human
aagcugaugauccaacaauggggg

SEQ ID NO: 16053 - RNA, 24 nt, Human
aagcugauugucucucccugcagc

SEQ ID NO: 16054 - RNA, 24 nt, Human
aagcugauuucagaaaacaaugca

SEQ ID NO: 16055 - RNA, 24 nt, Human
aagcugcauguugugcacauguac

SEQ ID NO: 16056 - RNA, 21 nt, Human
aagcugcugcagaccaucggg

SEQ ID NO: 16057 - RNA, 24 nt, Human
aagcugguuuugcuggugaucaga

SEQ ID NO: 16058 - RNA, 24 nt, Human
aagcuugcuguggccauggugcug

SEQ ID NO: 16059 - RNA, 24 nt, Human
aagcuuuuccaccgagguuuuagu

SEQ ID NO: 16060 - RNA, 22 nt, Human
aaggaaaugucaaaaagggaaa

SEQ ID NO: 16061 - RNA, 22 nt, Human
aaggacacagcaguauuggacc

SEQ ID NO: 16062 - RNA, 24 nt, Human
aaggaccccaggucagagacugga

SEQ ID NO: 16063 - RNA, 22 nt, Human
aaggagagagggcaaaaccaca

SEQ ID NO: 16064 - RNA, 22 nt, Human
aaggagaggagucauugggaua

SEQ ID NO: 16065 - RNA, 24 nt, Human
aaggagcagggaagcugcccgagg

SEQ ID NO: 16066 - RNA, 24 nt, Human
aaggagcagguguguucuuagaag

SEQ ID NO: 16067 - RNA, 24 nt, Human
aaggagcaugauaguaucuauuua

SEQ ID NO: 16068 - RNA, 24 nt, Human
aaggagccccaaagagaagggacg

SEQ ID NO: 16069 - RNA, 24 nt, Human
aaggagcgguuccaugccagcgug

SEQ ID NO: 16070 - RNA, 24 nt, Human
aaggagcuuugguucggagacagg

SEQ ID NO: 16071 - RNA, 22 nt, Human
aaggcacuugcccagagcugca

SEQ ID NO: 16072 - RNA, 24 nt, Human
aaggcuccaggaacuccuccguac

SEQ ID NO: 16073 - RNA, 22 nt, Human
aaggcuuggacucagccuaggu

SEQ ID NO: 16074 - RNA, 24 nt, Human
aagggaaugauagcauugaaggac

SEQ ID NO: 16075 - RNA, 24 nt, Human
aagggcaagaggagacaggugccu

SEQ ID NO: 16076 - RNA, 24 nt, Human
aagggccuguaccaaggcuuuaac

SEQ ID NO: 16077 - RNA, 22 nt, Human
aaggggacagcaucaccaugga

SEQ ID NO: 16078 - RNA, 24 nt, Human
aaggggucugcggccucgucucca

SEQ ID NO: 16079 - RNA, 24 nt, Human
aagggucuggcuauguugccuagg

SEQ ID NO: 16080 - RNA, 22 nt, Human
aagguaauggucaucuacuuug

SEQ ID NO: 16081 - RNA, 24 nt, Human
aaggugaccguaaggagucccuug

SEQ ID NO: 16082 - RNA, 22 nt, Human
aaggugagaacuauaguacuua

SEQ ID NO: 16083 - RNA, 22 nt, Human
aaggugauuggaguccuccacc

SEQ ID NO: 16084 - RNA, 24 nt, Human
aaggugauugugaaacaguugcug

SEQ ID NO: 16085 - RNA, 24 nt, Human
aaggugccccaagaaacgagaggc

SEQ ID NO: 16086 - RNA, 24 nt, Human
aaggugcugacuuccuuggggaga

SEQ ID NO: 16087 - RNA, 22 nt, Human
aaguaaggaguuggucacuugc

SEQ ID NO: 16088 - RNA, 22 nt, Human
aagucaccugaaaacucaacua

SEQ ID NO: 16089 - RNA, 22 nt, Human
aagucuugcucugucacccagg

SEQ ID NO: 16090 - RNA, 22 nt, Human
aagugagacaaacuucccugcc

SEQ ID NO: 16091 - RNA, 24 nt, Human
aagugcccgccaaagcuguggccc

SEQ ID NO: 16092 - RNA, 22 nt, Human
aaguggauaccuuugggcugag

SEQ ID NO: 16093 - RNA, 24 nt, Human
aagugucuuuuugggucgacaucc

SEQ ID NO: 16094 - RNA, 24 nt, Human
aaguguugggauuacaggugugag

SEQ ID NO: 16095 - RNA, 24 nt, Human
aaguuccuuccaaaucacuuuucu

SEQ ID NO: 16096 - RNA, 22 nt, Human
aaguugucgcuauugugcuuca

SEQ ID NO: 16097 - RNA, 22 nt, Human
aaguuuuggggguuuguuuuuc

SEQ ID NO: 16098 - RNA, 24 nt, Human
aaguuuuucaauccuucauggaaa

SEQ ID NO: 16099 - RNA, 22 nt, Human
aaucagagaggguccugccuca

SEQ ID NO: 16100 - RNA, 24 nt, Human
aaucccaggccacggugcuucuag

SEQ ID NO: 16101 - RNA, 22 nt, Human
aaucggacccauuuaaaccgga

SEQ ID NO: 16102 - RNA, 22 nt, Human
aaucugaaagaacucccccauc

SEQ ID NO: 16103 - RNA, 24 nt, Human
aaucugccuuuggucuguugauuu

SEQ ID NO: 16104 - RNA, 24 nt, Human
aaugacaagggaauugggaugggg

SEQ ID NO: 16105 - RNA, 24 nt, Human
aaugaccccaagaccuuugagggc

SEQ ID NO: 16106 - RNA, 24 nt, Human
aaugacuccgucaccaagagcagu

SEQ ID NO: 16107 - RNA, 22 nt, Human
aaugagaguuuguuuuaggggu

SEQ ID NO: 16108 - RNA, 22 nt, Human
aaugaguccuuuagugccauug

SEQ ID NO: 16109 - RNA, 22 nt, Human
aaugcaaauucuugggcucugc

SEQ ID NO: 16110 - RNA, 24 nt, Human
aaugcacuguggaauuugagggcc

SEQ ID NO: 16111 - RNA, 22 nt, Human
aaugcugacuguguccuugguu

SEQ ID NO: 16112 - RNA, 22 nt, Human
aaugcugugccagagcugcacc

SEQ ID NO: 16113 - RNA, 22 nt, Human
aauggcagagagcugugcuuca

SEQ ID NO: 16114 - RNA, 22 nt, Human
aauggcaucuaugaagcagaca

SEQ ID NO: 16115 - RNA, 24 nt, Human
aaugguacagcaguuacaagagga

SEQ ID NO: 16116 - RNA, 22 nt, Human
aaugucaugaaugugggaaggc

SEQ ID NO: 16117 - RNA, 24 nt, Human
aauguccccuccagggccccucug

SEQ ID NO: 16118 - RNA, 22 nt, Human
aaugugugggagaacagucuuu

SEQ ID NO: 16119 - RNA, 22 nt, Human
aauuacugucuagaaagcacca

SEQ ID NO: 16120 - RNA, 22 nt, Human
aauuacuuuaggaaaacuccuc

SEQ ID NO: 16121 - RNA, 24 nt, Human
acucagguugaguucuguggccag

SEQ ID NO: 16122 - RNA, 22 nt, Human
acuccaauggcugugggagacu

SEQ ID NO: 16123 - RNA, 24 nt, Human
acuccacucacgcgacaucaccac

SEQ ID NO: 16124 - RNA, 24 nt, Human
acuccaggcuuggucuucugggca

SEQ ID NO: 16125 - RNA, 24 nt, Human
acuccaucuuggucauguggccaa

SEQ ID NO: 16126 - RNA, 24 nt, Human
acuccguuucccguggugccccgg

SEQ ID NO: 16127 - RNA, 24 nt, Human
acucgaguaaagcugcuguuucag

SEQ ID NO: 16128 - RNA, 24 nt, Human
acucuguugcccaggcuggaggcg

SEQ ID NO: 16129 - RNA, 24 nt, Human
acugaaguucugcagaacaguauc

SEQ ID NO: 16130 - RNA, 24 nt, Human
acugaccaaggauugcccuugugc

SEQ ID NO: 16131 - RNA, 22 nt, Human
acugcaacaccuccuggguuca

SEQ ID NO: 16132 - RNA, 24 nt, Human
acugcaccugaagcccagccaaug

SEQ ID NO: 16133 - RNA, 24 nt, Human
acugcacuccaaccugggcaacag

SEQ ID NO: 16134 - RNA, 24 nt, Human
acugcacuccagccugggcaagag

SEQ ID NO: 16135 - RNA, 22 nt, Human
acugcacuccagccugggugac

SEQ ID NO: 16136 - RNA, 22 nt, Human
acugcacuccagucugggugac

SEQ ID NO: 16137 - RNA, 22 nt, Human
acugcacuccugccuaggugac

SEQ ID NO: 16138 - RNA, 22 nt, Human
acugcacucuagccuaggugau

SEQ ID NO: 16139 - RNA, 24 nt, Human
acugcagagauuaaaaguuuccuu

SEQ ID NO: 16140 - RNA, 24 nt, Human
acugcagccuugacuuccugggcu

SEQ ID NO: 16141 - RNA, 22 nt, Human
acugcagcuucagggacuugug

SEQ ID NO: 16142 - RNA, 24 nt, Human
acugcagucgagcuugggcgacag

SEQ ID NO: 16143 - RNA, 24 nt, Human
acugccauccuaaaaauauuaaau

SEQ ID NO: 16144 - RNA, 22 nt, Human
acugccauuguuuugaguggaa

SEQ ID NO: 16145 - RNA, 24 nt, Human
acugccucgccguuuuggagcaga

SEQ ID NO: 16146 - RNA, 24 nt, Human
acugcuguucuagacugugggggu

SEQ ID NO: 16147 - RNA, 22 nt, Human
acuggagggguucaaagguucg

SEQ ID NO: 16148 - RNA, 24 nt, Human
acuggauucggaaugugcugauuu

SEQ ID NO: 16149 - RNA, 22 nt, Human
acuggcaaaugcaaucuuuagg

SEQ ID NO: 16150 - RNA, 22 nt, Human
acuggcacagacaucugucaag

SEQ ID NO: 16151 - RNA, 22 nt, Human
acuggcccucaaaucuucgcuc

SEQ ID NO: 16152 - RNA, 24 nt, Human
acugguauaaaacacaguuuaaac

SEQ ID NO: 16153 - RNA, 24 nt, Human
acugguuucuucacucugaagcag

SEQ ID NO: 16154 - RNA, 22 nt, Human
acuguaccugggaggagcuuag

SEQ ID NO: 16155 - RNA, 22 nt, Human
acuguacugcagccugggagac

SEQ ID NO: 16156 - RNA, 24 nt, Human
acuguauuuauguugcuauggggc

SEQ ID NO: 16157 - RNA, 24 nt, Human
acugucucuuguuuuuggagguga

SEQ ID NO: 16158 - RNA, 24 nt, Human
acuguuuuauuuauaccaugcaua

SEQ ID NO: 16159 - RNA, 22 nt, Human
acuuagaacagccuaugggaag

SEQ ID NO: 16160 - RNA, 24 nt, Human
acuucaggcacauggugcugauga

SEQ ID NO: 16161 - RNA, 22 nt, Human
acuucauuggcuuucugcucuu

SEQ ID NO: 16162 - RNA, 24 nt, Human
acuugcuguaggucugcuugagga

SEQ ID NO: 16163 - RNA, 24 nt, Human
acuuggugaccuugccagcuccag

SEQ ID NO: 16164 - RNA, 24 nt, Human
acuuuaauagaaccaaaguugcag

SEQ ID NO: 16165 - RNA, 24 nt, Human
acuuucaggagaggcaagcagauu

SEQ ID NO: 16166 - RNA, 22 nt, Human
acuuucugugcaaacuuaacca

SEQ ID NO: 16167 - RNA, 24 nt, Human
acuuugaugauuugaaaggagaac

SEQ ID NO: 16168 - RNA, 24 nt, Human
agaaagacugucgcuagcauuuuu

SEQ ID NO: 16169 - RNA, 24 nt, Human
agaaagacuuaagggagcagaggg

SEQ ID NO: 16170 - RNA, 24 nt, Human
agaaagcaggcaccagggcugacc

SEQ ID NO: 16171 - RNA, 24 nt, Human
agaaaguaaggggcagagucauac

SEQ ID NO: 16172 - RNA, 22 nt, Human
agaaauauccuugauguguuug

SEQ ID NO: 16173 - RNA, 22 nt, Human
agaacacacagcaaggaaaggu

SEQ ID NO: 16174 - RNA, 22 nt, Human
agaacuucauuuaugaucucga

SEQ ID NO: 16175 - RNA, 22 nt, Human
agaaggcucuccugaauccugg

SEQ ID NO: 16176 - RNA, 22 nt, Human
agaagguuggggcuggaggucu

SEQ ID NO: 16177 - RNA, 22 nt, Human
agaaguaguaguagcaguagua

SEQ ID NO: 16178 - RNA, 22 nt, Human
agaaguguaaauaaguauguau

SEQ ID NO: 16179 - RNA, 22 nt, Human
agaaguguggucaguuucaucc

SEQ ID NO: 16180 - RNA, 24 nt, Human
agaaguugacagccaggugaaugu

SEQ ID NO: 16181 - RNA, 22 nt, Human
agaauuguggcuggacaucugu

SEQ ID NO: 16182 - RNA, 24 nt, Human
agacauagucaaaaugaaaacaua

SEQ ID NO: 16183 - RNA, 24 nt, Human
agacaugcugagguagaauuuaca

SEQ ID NO: 16184 - RNA, 24 nt, Human
agacauggagggcuuucggcaucg

SEQ ID NO: 16185 - RNA, 22 nt, Human
agacauggauagucuggaagac

SEQ ID NO: 16186 - RNA, 22 nt, Human
agacauuuggagccaacuuucc

SEQ ID NO: 16187 - RNA, 24 nt, Human
agacuagaaaaaguucggcugauu

SEQ ID NO: 16188 - RNA, 22 nt, Human
agacuccaucuuuucugggaga

SEQ ID NO: 16189 - RNA, 22 nt, Human
agacuguuccgucagacucagu

SEQ ID NO: 16190 - RNA, 24 nt, Human
agagaacacugugauuaagggaac

SEQ ID NO: 16191 - RNA, 24 nt, Human
agagaagagcggcauugugcuccu

SEQ ID NO: 16192 - RNA, 19 nt, Human
agagaggcauuuagcugau

SEQ ID NO: 16193 - RNA, 22 nt, Human
agagagggucagggggaggcug

SEQ ID NO: 16194 - RNA, 24 nt, Human
agagauacugaugagaccuauugc

SEQ ID NO: 16195 - RNA, 24 nt, Human
agagaucauugauuucuuccuggg

SEQ ID NO: 16196 - RNA, 24 nt, Human
agagauggggugaugauuaugaug

SEQ ID NO: 16197 - RNA, 24 nt, Human
agagauggugaagggccugugcgg

SEQ ID NO: 16198 - RNA, 24 nt, Human
agagcacagcagcacugugccugu

SEQ ID NO: 16199 - RNA, 24 nt, Human
agagcaccaggagcagguagaaga

SEQ ID NO: 16200 - RNA, 24 nt, Human
agagcacuguccagagcuuccucc

SEQ ID NO: 16201 - RNA, 24 nt, Human
agagcaguucuaccacuacaagga

SEQ ID NO: 16202 - RNA, 24 nt, Human
agagcccaucccuguccggggacu

SEQ ID NO: 16203 - RNA, 22 nt, Human
agagccuggacaagaacagcga

SEQ ID NO: 16204 - RNA, 24 nt, Human
agagcucgccgugcgccccgacgg

SEQ ID NO: 16205 - RNA, 24 nt, Human
agaggaaaggaagcuuugccucca

SEQ ID NO: 16206 - RNA, 24 nt, Human
agaggaagagaggacagagaggcc

SEQ ID NO: 16207 - RNA, 24 nt, Human
agaggacagaagcagaccacucug

SEQ ID NO: 16208 - RNA, 24 nt, Human
agaggaccucuaugacugcagggu

SEQ ID NO: 16209 - RNA, 22 nt, Human
agaggagaugcgugauaccaag

SEQ ID NO: 16210 - RNA, 22 nt, Human
agagggaagcagguucauaguu

SEQ ID NO: 16211 - RNA, 24 nt, Human
agagggaugcgaggcuggccuucc

SEQ ID NO: 16212 - RNA, 24 nt, Human
agagggauggaacagagggugaga

SEQ ID NO: 16213 - RNA, 24 nt, Human
agagguacuguugcagccgcugca

SEQ ID NO: 16214 - RNA, 24 nt, Human
agagguccuuagauagagaggaga

SEQ ID NO: 16215 - RNA, 24 nt, Human
agagguucugcgguuuaauauccc

SEQ ID NO: 16216 - RNA, 24 nt, Human
agagguuggcaagcaugguggaga

SEQ ID NO: 16217 - RNA, 24 nt, Human
agagucccugcuguguacuagaac

SEQ ID NO: 16218 - RNA, 22 nt, Human
agaguggagagaaacaacucug

SEQ ID NO: 16219 - RNA, 24 nt, Human
agaguuguucauccaggaagacag

SEQ ID NO: 16220 - RNA, 24 nt, Human
agaguuguucauccagggagacag

SEQ ID NO: 16221 - RNA, 24 nt, Human
agauagaccaguucuguugagggu

SEQ ID NO: 16222 - RNA, 24 nt, Human
agaucagacagaguaccuagaaga

SEQ ID NO: 16223 - RNA, 24 nt, Human
agaugcagaaggagaucaccgccc

SEQ ID NO: 16224 - RNA, 24 nt, Human
agaugcuaaagaaaacccuuaugg

SEQ ID NO: 16225 - RNA, 24 nt, Human
agaugcucugcuguccuguguggu

SEQ ID NO: 16226 - RNA, 22 nt, Human
agauggccuccugcuggauaug

SEQ ID NO: 16227 - RNA, 22 nt, Human
agauggugauaaaugugguacc

SEQ ID NO: 16228 - RNA, 22 nt, Human
agaugucuaccaguuggaaagg

SEQ ID NO: 16229 - RNA, 22 nt, Human
agaugucucauaauuuaggcca

SEQ ID NO: 16230 - RNA, 22 nt, Human
agauguuuugggaugaggagac

SEQ ID NO: 16231 - RNA, 22 nt, Human
agauuagaagaagaaucucuau

SEQ ID NO: 16232 - RNA, 22 nt, Human
agauuauuuaagacaggaacca

SEQ ID NO: 16233 - RNA, 22 nt, Human
agcaagaugguagcauuggaga

SEQ ID NO: 16234 - RNA, 23 nt, Human
agcaagcugaagggaaaaggggg

SEQ ID NO: 16235 - RNA, 22 nt, Human
agcagagccaccaaauuuagug

SEQ ID NO: 16236 - RNA, 22 nt, Human
agcagcccauaacaguuugugg

SEQ ID NO: 16237 - RNA, 22 nt, Human
agcagcucugccugguccagga

SEQ ID NO: 16238 - RNA, 24 nt, Human
agcaggugugaaggcgacaggacc

SEQ ID NO: 16239 - RNA, 24 nt, Human
agcagguucuucgugaguuccucg

SEQ ID NO: 16240 - RNA, 24 nt, Human
agcaguguggaugguugguuggga

SEQ ID NO: 16241 - RNA, 24 nt, Human
agcaguuuguugaagaagccuugg

SEQ ID NO: 16242 - RNA, 24 nt, Human
agcaguuuuuaggucugucaguac

SEQ ID NO: 16243 - RNA, 22 nt, Human
agcaucugcacauauuuccugc

SEQ ID NO: 16244 - RNA, 24 nt, Human
agcauuagguauuagugggaaaug

SEQ ID NO: 16245 - RNA, 22 nt, Human
agccacugagacagauggcugu

SEQ ID NO: 16246 - RNA, 24 nt, Human
agccagaaaccaggguggcuucca

SEQ ID NO: 16247 - RNA, 22 nt, Human
agccagaacuguggauacacac

SEQ ID NO: 16248 - RNA, 24 nt, Human
agccaggaggucaaggcugcagug

SEQ ID NO: 16249 - RNA, 22 nt, Human
agccaucaucacagaagagcau

SEQ ID NO: 16250 - RNA, 22 nt, Human
agccaucugaucgaccuuagac

SEQ ID NO: 16251 - RNA, 22 nt, Human
agccauguaugaggguuuccag

SEQ ID NO: 16252 - RNA, 22 nt, Human
agccccaaccuccuggcuuggu

SEQ ID NO: 16253 - RNA, 24 nt, Human
agccccauccccgcgcuggugggg

SEQ ID NO: 16254 - RNA, 24 nt, Human
agcccuggacuaccugcacucgga

SEQ ID NO: 16255 - RNA, 24 nt, Human
agccgcaaguuccugcugcuuggu

SEQ ID NO: 16256 - RNA, 22 nt, Human
agccgcauguucaugauugaga

SEQ ID NO: 16257 - RNA, 24 nt, Human
agccgcuggugaccugggugaaaa

SEQ ID NO: 16258 - RNA, 24 nt, Human
agccggaauggcauggucugugaa

SEQ ID NO: 16259 - RNA, 24 nt, Human
agccgguaaugcccucauggaugg

SEQ ID NO: 16260 - RNA, 24 nt, Human
agccucugccaagcgguuuguaag

SEQ ID NO: 16261 - RNA, 24 nt, Human
agccuuuauugggucagggcuugc

SEQ ID NO: 16262 - RNA, 22 nt, Human
agcggaaggcaggaugggacca

SEQ ID NO: 16263 - RNA, 22 nt, Human
agcggagaccugagcuaugagu

SEQ ID NO: 16264 - RNA, 22 nt, Human
agcggggauguagcucucucug

SEQ ID NO: 16265 - RNA, 24 nt, Human
agcuaugcguacccuaauucugaa

SEQ ID NO: 16266 - RNA, 22 nt, Human
agcuauuuuguggcuucaucaa

SEQ ID NO: 16267 - RNA, 24 nt, Human
agcucagacagaaaguuuggccug

SEQ ID NO: 16268 - RNA, 22 nt, Human
agcucucaggagggacaaagau

SEQ ID NO: 16269 - RNA, 22 nt, Human
agcugagaaagcgaagaggugg

SEQ ID NO: 16270 - RNA, 22 nt, Human
agcugcauucaugagguagcaa

SEQ ID NO: 16271 - RNA, 22 nt, Human
agcugccaguugaagaacauuu

SEQ ID NO: 16272 - RNA, 24 nt, Human
agcuggaacuacacagguguguac

SEQ ID NO: 16273 - RNA, 24 nt, Human
agcuggaauuacaggcaugagcca

SEQ ID NO: 16274 - RNA, 22 nt, Human
agcugguguguagcggguaccu

SEQ ID NO: 16275 - RNA, 24 nt, Human
agcugguuuggaacuccuggccuc

SEQ ID NO: 16276 - RNA, 24 nt, Human
agcuguucagcguacucuuuuaga

SEQ ID NO: 16277 - RNA, 22 nt, Human
agcuucuggaaggcaaggcuug

SEQ ID NO: 16278 - RNA, 22 nt, Human
agcuuuuugccauggcacuggu

SEQ ID NO: 16279 - RNA, 24 nt, Human
aggaaacauaaagugcuucuagca

SEQ ID NO: 16280 - RNA, 24 nt, Human
aggaaaccugcaaggcaaguucuc

SEQ ID NO: 16281 - RNA, 24 nt, Human
aggaaauuacaguuagaggucaca

SEQ ID NO: 16282 - RNA, 24 nt, Human
aggaacggaaugugauccaaucug

SEQ ID NO: 16283 - RNA, 24 nt, Human
aggaacuuaagaaguauggaguga

SEQ ID NO: 16284 - RNA, 24 nt, Human
aggaagaaauggguugagaagcaa

SEQ ID NO: 16285 - RNA, 24 nt, Human
aggaagaaguucaagauugaugac

SEQ ID NO: 16286 - RNA, 24 nt, Human
aggaagcacguggaggagggacgg

SEQ ID NO: 16287 - RNA, 24 nt, Human
aggaagcgucuuaccccucagcgc

SEQ ID NO: 16288 - RNA, 24 nt, Human
aggaagcugcugccgacgcacccg

SEQ ID NO: 16289 - RNA, 24 nt, Human
aggaagcuguccccagagcucccu

SEQ ID NO: 16290 - RNA, 24 nt, Human
aggaaggaaaagauaaaagguuuc

SEQ ID NO: 16291 - RNA, 24 nt, Human
aggaaggccgaccaggcaagaagc

SEQ ID NO: 16292 - RNA, 24 nt, Human
aggaagucagcacuuacauuacga

SEQ ID NO: 16293 - RNA, 24 nt, Human
aggaagugauaauaguggcaacau

SEQ ID NO: 16294 - RNA, 24 nt, Human
aggaagugccggcaagucugaucu

SEQ ID NO: 16295 - RNA, 24 nt, Human
aggaaguuguccagaaacuugcgu

SEQ ID NO: 16296 - RNA, 24 nt, Human
aggaaucaguacaagucaucaggg

SEQ ID NO: 16297 - RNA, 24 nt, Human
aggaaugagguuuccuggucggcu

SEQ ID NO: 16298 - RNA, 21 nt, Human
aggaauguaaagaagugccua

SEQ ID NO: 16299 - RNA, 24 nt, Human
aggaauguuuggguggcgucaagg

SEQ ID NO: 16300 - RNA, 24 nt, Human
aggacacaaagcgggcggaggaca

SEQ ID NO: 16301 - RNA, 24 nt, Human
aggacaggagaaaaggcagcaaga

SEQ ID NO: 16302 - RNA, 22 nt, Human
aggaggcagagauugcagugag

SEQ ID NO: 16303 - RNA, 24 nt, Human
aggaggcugagguugcagugagcc

SEQ ID NO: 16304 - RNA, 24 nt, Human
aggagggguaggcugggaggggcu

SEQ ID NO: 16305 - RNA, 24 nt, Human
aggaggucaaggaccgcugcaccc

SEQ ID NO: 16306 - RNA, 22 nt, Human
aggagucaucaucuaaagaauu

SEQ ID NO: 16307 - RNA, 22 nt, Human
aggaguguagugucccagcccu

SEQ ID NO: 16308 - RNA, 22 nt, Human
aggaugaagccaaagcagagac

SEQ ID NO: 16309 - RNA, 24 nt, Human
aggaugcagaaggagaucaccgcc

SEQ ID NO: 16310 - RNA, 24 nt, Human
aggaugcccauguggagcacagau

SEQ ID NO: 16311 - RNA, 24 nt, Human
aggaugcucaugcagaagcucagu

SEQ ID NO: 16312 - RNA, 24 nt, Human
aggcaagaagaugacauucacuua

SEQ ID NO: 16313 - RNA, 24 nt, Human
aggcaagagaaaugcuuguuucuu

SEQ ID NO: 16314 - RNA, 22 nt, Human
aggcaagcucuuggcagaguca

SEQ ID NO: 16315 - RNA, 24 nt, Human
aggcaaggugacgggacuggaagc

SEQ ID NO: 16316 - RNA, 22 nt, Human
aggcacagcguagaucuggaaa

SEQ ID NO: 16317 - RNA, 24 nt, Human
aggcaccagauucugcggcccggc

SEQ ID NO: 16318 - RNA, 22 nt, Human
aggcagaagagaagcugcagag

SEQ ID NO: 16319 - RNA, 22 nt, Human
aggcagagcacagacaggcugc

SEQ ID NO: 16320 - RNA, 24 nt, Human
aggcagaggggagacuugcagcuc

SEQ ID NO: 16321 - RNA, 24 nt, Human
aggcagccccgaucggaagcaggu

SEQ ID NO: 16322 - RNA, 23 nt, Human
aggcagccguggaaucagggcag

SEQ ID NO: 16323 - RNA, 24 nt, Human
aggcagcggcuguggcagcccggc

SEQ ID NO: 16324 - RNA, 24 nt, Human
aggcagcuccacugucugugcugg

SEQ ID NO: 16325 - RNA, 24 nt, Human
aggcagcuucggacaggugugguc

SEQ ID NO: 16326 - RNA, 24 nt, Human
aggcaggagguggaaaccccaggg

SEQ ID NO: 16327 - RNA, 22 nt, Human
aggcaggagugcaaugguguga

SEQ ID NO: 16328 - RNA, 24 nt, Human
aggcaggccuaaagggugcgauug

SEQ ID NO: 16329 - RNA, 22 nt, Human
aggcagggcuccgcugcgccuc

SEQ ID NO: 16330 - RNA, 24 nt, Human
aggcagguuaaguuccuugaugcc

SEQ ID NO: 16331 - RNA, 24 nt, Human
aggcaguccugggaccuccuguuc

SEQ ID NO: 16332 - RNA, 24 nt, Human
aggcaguggcgauggcgcccuuuc

SEQ ID NO: 16333 - RNA, 24 nt, Human
aggcaguggguggggaaggggaca

SEQ ID NO: 16334 - RNA, 22 nt, Human
aggcagugugguguggugguua

SEQ ID NO: 16335 - RNA, 24 nt, Human
aggcaguugcagucaccugggacu

SEQ ID NO: 16336 - RNA, 22 nt, Human
aggcauggacauuucggcagcu

SEQ ID NO: 16337 - RNA, 24 nt, Human
aggcauuaucauucuucaccuacu

SEQ ID NO: 16338 - RNA, 24 nt, Human
aggccagggauacaaagcggggag

SEQ ID NO: 16339 - RNA, 24 nt, Human
aggcccugccuuggcauguguguc

SEQ ID NO: 16340 - RNA, 22 nt, Human
aggcccuugaagggaagagaac

SEQ ID NO: 16341 - RNA, 24 nt, Human
aggccgagguccgcggccaggugc

SEQ ID NO: 16342 - RNA, 24 nt, Human
aggccgcccauuuggccccgcgcc

SEQ ID NO: 16343 - RNA, 24 nt, Human
aggcgaugcgccuagggccgggcu

SEQ ID NO: 16344 - RNA, 24 nt, Human
aggcgcccgaacugcggcgcgcgg

SEQ ID NO: 16345 - RNA, 24 nt, Human
aggcggaagugcaggguugugauc

SEQ ID NO: 16346 - RNA, 24 nt, Human
aggcgggugaaggcuguggguguc

SEQ ID NO: 16347 - RNA, 24 nt, Human
aggcgguggguucucucuagcuuu

SEQ ID NO: 16348 - RNA, 24 nt, Human
aggcguuggggacacugcuggguc

SEQ ID NO: 16349 - RNA, 22 nt, Human
aggcugagaugauuagguuggc

SEQ ID NO: 16350 - RNA, 24 nt, Human
aggcugaucccaggcacuguugca

SEQ ID NO: 16351 - RNA, 22 nt, Human
aggcugcaguguaguggcauga

SEQ ID NO: 16352 - RNA, 22 nt, Human
aggcuggucuugacuccugggc

SEQ ID NO: 16353 - RNA, 22 nt, Human
aggcuucucuccaguaugcauu

SEQ ID NO: 16354 - RNA, 24 nt, Human
aggcuuuuacaccacaagugcagu

SEQ ID NO: 16355 - RNA, 24 nt, Human
aggcuuuuacggugauugcugauu

SEQ ID NO: 16356 - RNA, 22 nt, Human
agggaaaacagcugaagaccaa

SEQ ID NO: 16357 - RNA, 24 nt, Human
agggaaccagcauggcaccuacca

SEQ ID NO: 16358 - RNA, 24 nt, Human
agggaaggacugcugggauuggcc

SEQ ID NO: 16359 - RNA, 24 nt, Human
agggaaggacugcuggguuggcca

SEQ ID NO: 16360 - RNA, 24 nt, Human
agggaagugugcggagggcuucca

SEQ ID NO: 16361 - RNA, 24 nt, Human
agggaauucuugccagucccuuaa

SEQ ID NO: 16362 - RNA, 24 nt, Human
agggaccaaaugcuucuaggaguc

SEQ ID NO: 16363 - RNA, 24 nt, Human
agggaccaauuggccauccuaggc

SEQ ID NO: 16364 - RNA, 24 nt, Human
agggaccccaggucagagacugga

SEQ ID NO: 16365 - RNA, 24 nt, Human
agggagacagugaaguaauuaugg

SEQ ID NO: 16366 - RNA, 21 nt, Human
agggagcagcuugauaaguca

SEQ ID NO: 16367 - RNA, 24 nt, Human
agggagccacgauaauucuccaga

SEQ ID NO: 16368 - RNA, 24 nt, Human
agggagccuucaagcgagccuggc

SEQ ID NO: 16369 - RNA, 24 nt, Human
agggaggacagcaggcugggggcg

SEQ ID NO: 16370 - RNA, 22 nt, Human
agggagugguacggguaucacu

SEQ ID NO: 16371 - RNA, 22 nt, Human
agggaguuuacauguuuucuaa

SEQ ID NO: 16372 - RNA, 24 nt, Human
agggauggaggggaggguguugag

SEQ ID NO: 16373 - RNA, 22 nt, Human
agggcaugugaacgggugauug

SEQ ID NO: 16374 - RNA, 22 nt, Human
agggccuauuaccaggagagga

SEQ ID NO: 16375 - RNA, 22 nt, Human
agggcugccccauucgggaauc

SEQ ID NO: 16376 - RNA, 22 nt, Human
aggggacaggugaccugggcuc

SEQ ID NO: 16377 - RNA, 24 nt, Human
aggggauguucauggucagcugcg

SEQ ID NO: 16378 - RNA, 24 nt, Human
aggggggcggaaaauucgcaaggu

SEQ ID NO: 16379 - RNA, 24 nt, Human
aggggguggcggugccaggguccu

SEQ ID NO: 16380 - RNA, 24 nt, Human
agggguuuuggggucgaccuccug

SEQ ID NO: 16381 - RNA, 24 nt, Human
agggugcaggagcugcauccggag

SEQ ID NO: 16382 - RNA, 24 nt, Human
agggugguguaggagaucaaauaa

SEQ ID NO: 16383 - RNA, 22 nt, Human
aggguuccaaaaauucucuggu

SEQ ID NO: 16384 - RNA, 22 nt, Human
agguagggaggguagaugcucu

SEQ ID NO: 16385 - RNA, 24 nt, Human
agguaggugaagcagagaaagaag

SEQ ID NO: 16386 - RNA, 22 nt, Human
agguauacugggcaccauuuga

SEQ ID NO: 16387 - RNA, 22 nt, Human
agguaucagacuucagaaguag

SEQ ID NO: 16388 - RNA, 22 nt, Human
aggucacguccugugaugucau

SEQ ID NO: 16389 - RNA, 22 nt, Human
aggucagugcccacguuguugu

SEQ ID NO: 16390 - RNA, 22 nt, Human
aggucccuccuugagucucaug

SEQ ID NO: 16391 - RNA, 24 nt, Human
agguccuagcucugcuacuuacuc

SEQ ID NO: 16392 - RNA, 22 nt, Human
aggucuccuggccucagugaug

SEQ ID NO: 16393 - RNA, 22 nt, Human
aggucuggagcuggagagaaca

SEQ ID NO: 16394 - RNA, 22 nt, Human
aggugaagugaaguggugacua

SEQ ID NO: 16395 - RNA, 24 nt, Human
aggugagaagcggacccaucacuu

SEQ ID NO: 16396 - RNA, 22 nt, Human
aggugagaggaucacuugagcc

SEQ ID NO: 16397 - RNA, 24 nt, Human
aggugcugacuuccuugggagaug

SEQ ID NO: 16398 - RNA, 24 nt, Human
aggugggggcaaguauaugucaga

SEQ ID NO: 16399 - RNA, 22 nt, Human
aggugguacuuuuaagguaucc

SEQ ID NO: 16400 - RNA, 24 nt, Human
aggugucggauggacuuuuggcuc

SEQ ID NO: 16401 - RNA, 24 nt, Human
agguucacaaaacaaguguaguag

SEQ ID NO: 16402 - RNA, 22 nt, Human
agguucaucaauaacucagaga

SEQ ID NO: 16403 - RNA, 24 nt, Human
agguucuggagaacacuucagugc

SEQ ID NO: 16404 - RNA, 22 nt, Human
agguuuuuagucuauaaguuca

SEQ ID NO: 16405 - RNA, 24 nt, Human
aguaaagauaaucugggcugcucc

SEQ ID NO: 16406 - RNA, 22 nt, Human
aguaaucccagcaauuugggag

SEQ ID NO: 16407 - RNA, 24 nt, Human
aguacagaucguuucucaucucua

SEQ ID NO: 16408 - RNA, 22 nt, Human
aguagaagaauaaaaaucauuc

SEQ ID NO: 16409 - RNA, 24 nt, Human
aguagccccccuccucaacccaga

SEQ ID NO: 16410 - RNA, 22 nt, Human
aguagcuuugcaaucuggaagg

SEQ ID NO: 16411 - RNA, 24 nt, Human
aguaguuuuggucagggguuaaua

SEQ ID NO: 16412 - RNA, 22 nt, Human
aguauguauuccaggcugguug

SEQ ID NO: 16413 - RNA, 22 nt, Human
aguauuacagcagguacugguu

SEQ ID NO: 16414 - RNA, 24 nt, Human
agucaauuuguuuuguaccugugu

SEQ ID NO: 16415 - RNA, 22 nt, Human
agucagacguuuggcaacagca

SEQ ID NO: 16416 - RNA, 22 nt, Human
agucauggagcgaccaacggca

SEQ ID NO: 16417 - RNA, 22 nt, Human
agucauuuugcaccagguaaua

SEQ ID NO: 16418 - RNA, 24 nt, Human
aguccaugugcagucuccauguac

SEQ ID NO: 16419 - RNA, 22 nt, Human
agucccccucucauaccaaagg

SEQ ID NO: 16420 - RNA, 24 nt, Human
aguccuggcuagacaaguccacac

SEQ ID NO: 16421 - RNA, 22 nt, Human
agucucaaguuuucacugaucu

SEQ ID NO: 16422 - RNA, 22 nt, Human
agucucccacuagcuguaggau

SEQ ID NO: 16423 - RNA, 22 nt, Human
agucucuaucauaugguuucac

SEQ ID NO: 16424 - RNA, 22 nt, Human
agucuucucaucugugccagca

SEQ ID NO: 16425 - RNA, 24 nt, Human
agugaagacugaggucugcccuuc

SEQ ID NO: 16426 - RNA, 22 nt, Human
agugaagcgaguugggccagag

SEQ ID NO: 16427 - RNA, 23 nt, Human
agugaagcuuaucagaagauggg

SEQ ID NO: 16428 - RNA, 24 nt, Human
agugacacgugaaugauaauguga

SEQ ID NO: 16429 - RNA, 24 nt, Human
agugagcaauuucugucccuuuua

SEQ ID NO: 16430 - RNA, 22 nt, Human
agugaggaaggaguuuggccac

SEQ ID NO: 16431 - RNA, 24 nt, Human
agugcagaaacuuacuuugaaaag

SEQ ID NO: 16432 - RNA, 24 nt, Human
agugcagaccucugacccuggagu

SEQ ID NO: 16433 - RNA, 22 nt, Human
agugcagguucacaggcugggc

SEQ ID NO: 16434 - RNA, 22 nt, Human
agugcuuccagcaguucccaga

SEQ ID NO: 16435 - RNA, 24 nt, Human
aguggaagcuuugacaucauuaac

SEQ ID NO: 16436 - RNA, 24 nt, Human
aguggaaucauacaguauuugucu

SEQ ID NO: 16437 - RNA, 24 nt, Human
aguggacagcacuuaguagcugug

SEQ ID NO: 16438 - RNA, 24 nt, Human
aguggagagccacacgugugaaau

SEQ ID NO: 16439 - RNA, 24 nt, Human
aguggaugagcuguacagagaagc

SEQ ID NO: 16440 - RNA, 24 nt, Human
aguggauggcaacugauggaacag

SEQ ID NO: 16441 - RNA, 24 nt, Human
aguggauuuugccggcugguugug

SEQ ID NO: 16442 - RNA, 24 nt, Human
aguggcuauaaauacagaugaagc

SEQ ID NO: 16443 - RNA, 22 nt, Human
aguggcuuuagaccagucagua

SEQ ID NO: 16444 - RNA, 24 nt, Human
aguggugugaucacagcucagugu

SEQ ID NO: 16445 - RNA, 22 nt, Human
agugguuucagggacuucugua

SEQ ID NO: 16446 - RNA, 24 nt, Human
agugucuccaccaggcggcuucaa

SEQ ID NO: 16447 - RNA, 22 nt, Human
aguguguacacggcagcagucc

SEQ ID NO: 16448 - RNA, 24 nt, Human
aguuacuaguuuaaugggugaaaa

SEQ ID NO: 16449 - RNA, 24 nt, Human
aguucagaagagguuuggcuuucc

SEQ ID NO: 16450 - RNA, 24 nt, Human
aguucagacaucaauguuccuucc

SEQ ID NO: 16451 - RNA, 23 nt, Human
aguucaguuguggagaaugggac

SEQ ID NO: 16452 - RNA, 22 nt, Human
aguuccauggaaaacaacaaag

SEQ ID NO: 16453 - RNA, 22 nt, Human
aguucuuagaggacugcuuugc

SEQ ID NO: 16454 - RNA, 24 nt, Human
aguugcuccagaaaaaccuguaaa

SEQ ID NO: 16455 - RNA, 24 nt, Human
aguugcucuaaguggauuggauau

SEQ ID NO: 16456 - RNA, 22 nt, Human
aguuggagaccgcuguuacgag

SEQ ID NO: 16457 - RNA, 24 nt, Human
aguugguugaauuuguggaugugg

SEQ ID NO: 16458 - RNA, 24 nt, Human
aguuguauuucaagguuuggucca

SEQ ID NO: 16459 - RNA, 22 nt, Human
aguugucauggggucauucccu

SEQ ID NO: 16460 - RNA, 24 nt, Human
aguuguguugucaauuucaugcuu

SEQ ID NO: 16461 - RNA, 22 nt, Human
auaaagcagguuaacaaagcug

SEQ ID NO: 16462 - RNA, 22 nt, Human
auaaagcguuguaauacacagg

SEQ ID NO: 16463 - RNA, 22 nt, Human
auaaaggucaaacaucagugag

SEQ ID NO: 16464 - RNA, 24 nt, Human
auaacacuuagcaaacacugaucu

SEQ ID NO: 16465 - RNA, 22 nt, Human
auaacaugcugagaacugaggc

SEQ ID NO: 16466 - RNA, 22 nt, Human
auaacugugaagaggcaauugu

SEQ ID NO: 16467 - RNA, 24 nt, Human
auaauguaguauauacuaaauaaa

SEQ ID NO: 16468 - RNA, 22 nt, Human
auacagcucucucuggggacuu

SEQ ID NO: 16469 - RNA, 24 nt, Human
auacugcggcugaucaaaggagcu

SEQ ID NO: 16470 - RNA, 22 nt, Human
auacugugucucuaaaagcuga

SEQ ID NO: 16471 - RNA, 22 nt, Human
auagaagagcagugggguagaa

SEQ ID NO: 16472 - RNA, 24 nt, Human
auagcucacugcagccucuaccuc

SEQ ID NO: 16473 - RNA, 24 nt, Human
auagcucuagggaucucagcaggg

SEQ ID NO: 16474 - RNA, 24 nt, Human
auaguacaaauuagaugcagcgua

SEQ ID NO: 16475 - RNA, 24 nt, Human
auaguacuggugacguggugcggc

SEQ ID NO: 16476 - RNA, 22 nt, Human
auaucauugaaggagccuuucg

SEQ ID NO: 16477 - RNA, 22 nt, Human
auaugcggaggugggccgaguu

SEQ ID NO: 16478 - RNA, 24 nt, Human
aucaaguucaggcacagcccuggu

SEQ ID NO: 16479 - RNA, 22 nt, Human
aucacauugccagggauuacca

SEQ ID NO: 16480 - RNA, 24 nt, Human
aucaccaugagcagagcucucauu

SEQ ID NO: 16481 - RNA, 22 nt, Human
aucacuauuaaugugugcuagu

SEQ ID NO: 16482 - RNA, 22 nt, Human
aucacuuugcagggauuacuaa

SEQ ID NO: 16483 - RNA, 24 nt, Human
aucagcuccgacuuggacgggcac

SEQ ID NO: 16484 - RNA, 24 nt, Human
aucauccuggugcccucgucuugg

SEQ ID NO: 16485 - RNA, 24 nt, Human
aucaucuucaucuacgagaagcgc

SEQ ID NO: 16486 - RNA, 24 nt, Human
aucaugucgcacaaacaaauuuac

SEQ ID NO: 16487 - RNA, 22 nt, Human
auccagugucauugugcaucau

SEQ ID NO: 16488 - RNA, 24 nt, Human
auccaugagaucucccacaguugg

SEQ ID NO: 16489 - RNA, 24 nt, Human
auccgagugugaauucccugcaag

SEQ ID NO: 16490 - RNA, 24 nt, Human
auccgcugccaguccccacugagg

SEQ ID NO: 16491 - RNA, 24 nt, Human
auccucagaagaucuguguguaca

SEQ ID NO: 16492 - RNA, 24 nt, Human
auccuguucucuuccacucugcca

SEQ ID NO: 16493 - RNA, 24 nt, Human
aucgagcauuucuggagggagcug

SEQ ID NO: 16494 - RNA, 24 nt, Human
aucguuccgccugggcgggauucu

SEQ ID NO: 16495 - RNA, 24 nt, Human
aucuauguuagcguuccuggaucc

SEQ ID NO: 16496 - RNA, 22 nt, Human
aucucaggccucgugcuggaac

SEQ ID NO: 16497 - RNA, 22 nt, Human
aucugccaccgagaucugucgc

SEQ ID NO: 16498 - RNA, 22 nt, Human
aucugucacacguuuggaaccc

SEQ ID NO: 16499 - RNA, 22 nt, Human
aucugugugacuggcuccuuuu

SEQ ID NO: 16500 - RNA, 24 nt, Human
aucuucacuuagaugugucugaug

SEQ ID NO: 16501 - RNA, 22 nt, Human
aucuucuccaguuuucacauag

SEQ ID NO: 16502 - RNA, 24 nt, Human
augaaaucuagucauuaaagaguc

SEQ ID NO: 16503 - RNA, 24 nt, Human
augaaauuuaucaccagacagcuu

SEQ ID NO: 16504 - RNA, 24 nt, Human
augaagaugaaccuacuguaguac

SEQ ID NO: 16505 - RNA, 24 nt, Human
augaagcuugugaccaaguggagg

SEQ ID NO: 16506 - RNA, 24 nt, Human
augaaguugucggaguccccaucg

SEQ ID NO: 16507 - RNA, 22 nt, Human
augaccaggaauugagagacug

SEQ ID NO: 16508 - RNA, 22 nt, Human
augacccuucuggaacugcuuc

SEQ ID NO: 16509 - RNA, 22 nt, Human
augaccugcagucagggcccag

SEQ ID NO: 16510 - RNA, 24 nt, Human
augaccuucaggccauucagaaag

SEQ ID NO: 16511 - RNA, 22 nt, Human
augagaguaggaguuugggcuc

SEQ ID NO: 16512 - RNA, 22 nt, Human
augagagugacagggguuagaa

SEQ ID NO: 16513 - RNA, 22 nt, Human
augaggucugugucacuguggu

SEQ ID NO: 16514 - RNA, 22 nt, Human
augauagguaccaacuaucuga

SEQ ID NO: 16515 - RNA, 24 nt, Human
augauccaccugccucggccuccc

SEQ ID NO: 16516 - RNA, 22 nt, Human
augaucuaugaagugagagaug

SEQ ID NO: 16517 - RNA, 22 nt, Human
augauugugccaauaagccagg

SEQ ID NO: 16518 - RNA, 24 nt, Human
augcaaaauaaccaagaaguuaaa

SEQ ID NO: 16519 - RNA, 22 nt, Human
augcacagucuugagucuugca

SEQ ID NO: 16520 - RNA, 24 nt, Human
augcaccucacuaaggcucaucug

SEQ ID NO: 16521 - RNA, 24 nt, Human
augcagaagucgagaccauggagg

SEQ ID NO: 16522 - RNA, 24 nt, Human
augcagacuggcauuaaggcugug

SEQ ID NO: 16523 - RNA, 24 nt, Human
augcagccuaaaaggugguugaaa

SEQ ID NO: 16524 - RNA, 24 nt, Human
augcagcugcugcccgcgggcuug

SEQ ID NO: 16525 - RNA, 24 nt, Human
augcaggcccugugggagcccacg

SEQ ID NO: 16526 - RNA, 17 nt, Human
augcagucacauaggau

SEQ ID NO: 16527 - RNA, 22 nt, Human
augcaucuuugcauauuucacc

SEQ ID NO: 16528 - RNA, 24 nt, Human
augcccaucuuuggauuucuaaug

SEQ ID NO: 16529 - RNA, 24 nt, Human
augcccgaggagaagcugguugag

SEQ ID NO: 16530 - RNA, 24 nt, Human
augccuccucuggguggugauacc

SEQ ID NO: 16531 - RNA, 22 nt, Human
augcgugaucacauagccaaga

SEQ ID NO: 16532 - RNA, 24 nt, Human
augcugcccugggacccagcuggu

SEQ ID NO: 16533 - RNA, 22 nt, Human
augcugccuucaauccauuuaa

SEQ ID NO: 16534 - RNA, 23 nt, Human
augcugcggauauacaggaucug

SEQ ID NO: 16535 - RNA, 24 nt, Human
augcuguauuuuaacacuuuguau

SEQ ID NO: 16536 - RNA, 22 nt, Human
augcugucuuacaugaaugcag

SEQ ID NO: 16537 - RNA, 22 nt, Human
augcuuccggcaggagacacaa

SEQ ID NO: 16538 - RNA, 24 nt, Human
augcuucuaucuccaguugcucuu

SEQ ID NO: 16539 - RNA, 22 nt, Human
auggacacagagucccagacgu

SEQ ID NO: 16540 - RNA, 22 nt, Human
auggacagaguauguugucuca

SEQ ID NO: 16541 - RNA, 22 nt, Human
auggacaguauuagccaucauu

SEQ ID NO: 16542 - RNA, 22 nt, Human
auggagcccugaauguugaccu

SEQ ID NO: 16543 - RNA, 24 nt, Human
auggagcuaaaaguugauuuucau

SEQ ID NO: 16544 - RNA, 24 nt, Human
auggaucccucugugcuucuggac

SEQ ID NO: 16545 - RNA, 22 nt, Human
auggcagaaagaauagaggcua

SEQ ID NO: 16546 - RNA, 22 nt, Human
auggcauggugcccaucgugga

SEQ ID NO: 16547 - RNA, 22 nt, Human
auggccauggugguuucucuac

SEQ ID NO: 16548 - RNA, 24 nt, Human
auggccccuccgggaaaacugugg

SEQ ID NO: 16549 - RNA, 24 nt, Human
auggccccuccgggaaacuguggc

SEQ ID NO: 16550 - RNA, 22 nt, Human
auggccgcuuucucaaguuuga

SEQ ID NO: 16551 - RNA, 24 nt, Human
augggacugggaaggaggggugug

SEQ ID NO: 16552 - RNA, 22 nt, Human
augggcaaauacugggagcugg

SEQ ID NO: 16553 - RNA, 23 nt, Human
augggcccuccaagaguuggaau

SEQ ID NO: 16554 - RNA, 22 nt, Human
augggggguguucugcuuggca

SEQ ID NO: 16555 - RNA, 24 nt, Human
augguaauggagguaaaguguguc

SEQ ID NO: 16556 - RNA, 19 nt, Human
augguaguucaguuggggu

SEQ ID NO: 16557 - RNA, 24 nt, Human
augguggcccuugcaaccuuaaga

SEQ ID NO: 16558 - RNA, 24 nt, Human
auguagugugucuucuugaguagg

SEQ ID NO: 16559 - RNA, 24 nt, Human
augucaaauccugguauccuuccc

SEQ ID NO: 16560 - RNA, 24 nt, Human
augucaucuugaaggcuuuuccac

SEQ ID NO: 16561 - RNA, 24 nt, Human
augugcugugugcucuuugaaagg

SEQ ID NO: 16562 - RNA, 22 nt, Human
auguggcuauccauuauagaga

SEQ ID NO: 16563 - RNA, 22 nt, Human
augugggguugggauucuguga

SEQ ID NO: 16564 - RNA, 23 nt, Human
augugguuaaaguugucugcaau

SEQ ID NO: 16565 - RNA, 22 nt, Human
auguguguguuacaggggcugc

SEQ ID NO: 16566 - RNA, 22 nt, Human
auuacagccauuuugaugagug

SEQ ID NO: 16567 - RNA, 22 nt, Human
auuaguguguguggguuuguau

SEQ ID NO: 16568 - RNA, 22 nt, Human
auuaugcagccugugaacagcg

SEQ ID NO: 16569 - RNA, 22 nt, Human
auuauggugcccgacgggaaca

SEQ ID NO: 16570 - RNA, 22 nt, Human
auucagcucugugcucucacag

SEQ ID NO: 16571 - RNA, 24 nt, Human
auucaguaaacaagugcugaaaaa

SEQ ID NO: 16572 - RNA, 22 nt, Human
auucauacugccaacagucugc

SEQ ID NO: 16573 - RNA, 24 nt, Human
auuccaaucugauacccaaagaga

SEQ ID NO: 16574 - RNA, 24 nt, Human
auuccagaaaccagugaagaugug

SEQ ID NO: 16575 - RNA, 22 nt, Human
auuccuuuaacaaguauguguc

SEQ ID NO: 16576 - RNA, 22 nt, Human
auucucacaugcaagugaaguc

SEQ ID NO: 16577 - RNA, 22 nt, Human
auugaagcucacguugauguca

SEQ ID NO: 16578 - RNA, 24 nt, Human
auugacuuacagcagggagagaau

SEQ ID NO: 16579 - RNA, 24 nt, Human
auugauggucagccaggugccuuc

SEQ ID NO: 16580 - RNA, 24 nt, Human
auugcacuccagccugggcgacaa

SEQ ID NO: 16581 - RNA, 22 nt, Human
auugcacuccagccugggugac

SEQ ID NO: 16582 - RNA, 24 nt, Human
auugcacugcagccugggcaauaa

SEQ ID NO: 16583 - RNA, 24 nt, Human
auugcagcagcagcagcuucuugg

SEQ ID NO: 16584 - RNA, 22 nt, Human
auugcagccucgaacuccuggg

SEQ ID NO: 16585 - RNA, 22 nt, Human
auuggauaugguuggaguggca

SEQ ID NO: 16586 - RNA, 24 nt, Human
auuggugguauuuugguauguggc

SEQ ID NO: 16587 - RNA, 22 nt, Human
auuguacuccagccugggugac

SEQ ID NO: 16588 - RNA, 24 nt, Human
auugugcauaucagggauacccuc

SEQ ID NO: 16589 - RNA, 20 nt, Human
auugugcccuguggcuuccu

SEQ ID NO: 16590 - RNA, 24 nt, Human
auugugcucuuuccagauccucaa

SEQ ID NO: 16591 - RNA, 24 nt, Human
auuuauguggaagcugaacaggua

SEQ ID NO: 16592 - RNA, 24 nt, Human
auuucauucacuggggaggaacaa

SEQ ID NO: 16593 - RNA, 22 nt, Human
auuugaggaggcuuuacagcca

SEQ ID NO: 16594 - RNA, 24 nt, Human
auuugcuggggggaaggacaaccc

SEQ ID NO: 16595 - RNA, 24 nt, Human
auuuggguggaaaacagggugcua

SEQ ID NO: 16596 - RNA, 22 nt, Human
auuuugguauagaggagggguu

SEQ ID NO: 16597 - RNA, 22 nt, Human
auuuuuagaggaauccauuuua

SEQ ID NO: 16598 - RNA, 22 nt, Human
auuuuuccacacacagacucag

SEQ ID NO: 16599 - RNA, 22 nt, Human
auuuuucugcauuuguauugga

SEQ ID NO: 16600 - RNA, 22 nt, Human
caaaaagaauguugcauguguu

SEQ ID NO: 16601 - RNA, 24 nt, Human
caaaacucucaugauggagaacca

SEQ ID NO: 16602 - RNA, 24 nt, Human
caaaaggagcugcaauuuuaaagu

SEQ ID NO: 16603 - RNA, 22 nt, Human
caaacuugccuguuccaucuuu

SEQ ID NO: 16604 - RNA, 22 nt, Human
caaagugagguacacuguugcc

SEQ ID NO: 16605 - RNA, 18 nt, Human
caaaguuuucagauaggc

SEQ ID NO: 16606 - RNA, 24 nt, Human
caaaugacuuaguaaucuaauaug

SEQ ID NO: 16607 - RNA, 24 nt, Human
caaaugccagcagaggccuuuugg

SEQ ID NO: 16608 - RNA, 22 nt, Human
caaauguauaaauguacuuucu

SEQ ID NO: 16609 - RNA, 24 nt, Human
caacaacucgagacaacagagacc

SEQ ID NO: 16610 - RNA, 24 nt, Human
caacacacacgcugcuguaucucc

SEQ ID NO: 16611 - RNA, 24 nt, Human
caacccuuucacaaaaccagggaa

SEQ ID NO: 16612 - RNA, 24 nt, Human
caagaccgagaucccuaagguucu

SEQ ID NO: 16613 - RNA, 22 nt, Human
caagaccugccagauucugugc

SEQ ID NO: 16614 - RNA, 24 nt, Human
caagagccagauggugucagagga

SEQ ID NO: 16615 - RNA, 24 nt, Human
caagaggaaagcauuccucaaacc

SEQ ID NO: 16616 - RNA, 24 nt, Human
caagccauccccuuugcuuuuaca

SEQ ID NO: 16617 - RNA, 24 nt, Human
caagcucaggcgcgguggucguug

SEQ ID NO: 16618 - RNA, 24 nt, Human
caagcucuaaaauuuugguucugu

SEQ ID NO: 16619 - RNA, 24 nt, Human
caaggccacacaagguggauggac

SEQ ID NO: 16620 - RNA, 24 nt, Human
caagggccuggcuccucuuccugu

SEQ ID NO: 16621 - RNA, 24 nt, Human
caagguagucacagacuucuggag

SEQ ID NO: 16622 - RNA, 24 nt, Human
caagguuaaaugccucccucucgg

SEQ ID NO: 16623 - RNA, 24 nt, Human
caagguucauuauucacagcccgg

SEQ ID NO: 16624 - RNA, 22 nt, Human
caaguauguggaaauagcgcgg

SEQ ID NO: 16625 - RNA, 24 nt, Human
caagugaaccucccgccuuugccu

SEQ ID NO: 16626 - RNA, 24 nt, Human
caagugucuugaugguagacaagg

SEQ ID NO: 16627 - RNA, 22 nt, Human
caaguuuucccguggcccugcc

SEQ ID NO: 16628 - RNA, 24 nt, Human
caauccugguucuuuugacacaag

SEQ ID NO: 16629 - RNA, 24 nt, Human
caaugaggccaccggcggcaagua

SEQ ID NO: 16630 - RNA, 22 nt, Human
caaugauuaguuuuuuccccca

SEQ ID NO: 16631 - RNA, 22 nt, Human
caaugcacauggacaucaggcu

SEQ ID NO: 16632 - RNA, 21 nt, Human
caaugcacgcugguauucugc

SEQ ID NO: 16633 - RNA, 24 nt, Human
caaugcaguccuggauggagccga

SEQ ID NO: 16634 - RNA, 24 nt, Human
caaugccccuguuggaauucggca

SEQ ID NO: 16635 - RNA, 24 nt, Human
caauugguuccaagacgcguaggc

SEQ ID NO: 16636 - RNA, 22 nt, Human
cacaacuugucuuggugauauu

SEQ ID NO: 16637 - RNA, 24 nt, Human
cacaagccugguuauuugaggaug

SEQ ID NO: 16638 - RNA, 24 nt, Human
cacaaguuuuccaacuaugaacuc

SEQ ID NO: 16639 - RNA, 22 nt, Human
cacaauauagcaaauagagggu

SEQ ID NO: 16640 - RNA, 22 nt, Human
cacacaugaguuauguaccaac

SEQ ID NO: 16641 - RNA, 24 nt, Human
cacaccaccugcugcaugcggcug

SEQ ID NO: 16642 - RNA, 22 nt, Human
cacaccuguuucuguggcaugg

SEQ ID NO: 16643 - RNA, 24 nt, Human
cacacguucagccacccaccuuca

SEQ ID NO: 16644 - RNA, 24 nt, Human
cacacuguuaaaggguuuuuuggg

SEQ ID NO: 16645 - RNA, 24 nt, Human
cacagcaaacguuccaggccuggg

SEQ ID NO: 16646 - RNA, 24 nt, Human
cacaggaaagacugcuggcugacu

SEQ ID NO: 16647 - RNA, 24 nt, Human
cacaggacucuggguuccugcucu

SEQ ID NO: 16648 - RNA, 24 nt, Human
cacaggguucaccgccauuucuuc

SEQ ID NO: 16649 - RNA, 24 nt, Human
cacaggguucugccucuggcccga

SEQ ID NO: 16650 - RNA, 24 nt, Human
cacagugucaagucuuguuuugag

SEQ ID NO: 16651 - RNA, 22 nt, Human
cacauccuacugacacuguccu

SEQ ID NO: 16652 - RNA, 24 nt, Human
cacaucuugacaauggggaagggu

SEQ ID NO: 16653 - RNA, 24 nt, Human
cacauggagguuagggagagcccu

SEQ ID NO: 16654 - RNA, 23 nt, Human
cacauguauguccagccuguagu

SEQ ID NO: 16655 - RNA, 24 nt, Human
caccacaucaaaaugaggggugug

SEQ ID NO: 16656 - RNA, 24 nt, Human
caccagcaggagguccugcccccu

SEQ ID NO: 16657 - RNA, 24 nt, Human
caccagggccucaucagcaaccug

SEQ ID NO: 16658 - RNA, 24 nt, Human
caccaguaggccuuugugaagugg

SEQ ID NO: 16659 - RNA, 24 nt, Human
caccauacuuaaaauccuguccaa

SEQ ID NO: 16660 - RNA, 22 nt, Human
caccauguuggccaggcugguc

SEQ ID NO: 16661 - RNA, 24 nt, Human
cacccacuccucagccuccagggc

SEQ ID NO: 16662 - RNA, 22 nt, Human
cacccagagucuaggcuggagu

SEQ ID NO: 16663 - RNA, 24 nt, Human
cacccagcccaagaggcccauguc

SEQ ID NO: 16664 - RNA, 22 nt, Human
cacccaggcuggagugcagugg

SEQ ID NO: 16665 - RNA, 24 nt, Human
cacccaugugaccaaggaacguug

SEQ ID NO: 16666 - RNA, 20 nt, Human
caccccacuccaccaguccc

SEQ ID NO: 16667 - RNA, 24 nt, Human
caccccgucuggagggcaggaggu

SEQ ID NO: 16668 - RNA, 24 nt, Human
caccccucaaaccuuggcuccuuu

SEQ ID NO: 16669 - RNA, 24 nt, Human
caccccugccccgccgacccagca

SEQ ID NO: 16670 - RNA, 24 nt, Human
cacccgacagcuucgugcacaugu

SEQ ID NO: 16671 - RNA, 24 nt, Human
cacccgagcuacgccgugccgcac

SEQ ID NO: 16672 - RNA, 24 nt, Human
cacccgcugcgaugcuggcgguca

SEQ ID NO: 16673 - RNA, 24 nt, Human
cacccuaagagccgcccccugugc

SEQ ID NO: 16674 - RNA, 24 nt, Human
cacccugaagugcagaggguugcu

SEQ ID NO: 16675 - RNA, 24 nt, Human
cacccuggagaaggugggcgaccg

SEQ ID NO: 16676 - RNA, 23 nt, Human
cacccuggggcaguagcagggcc

SEQ ID NO: 16677 - RNA, 24 nt, Human
cacccugucaaaacggaccaauca

SEQ ID NO: 16678 - RNA, 23 nt, Human
cacccuuagaggggagaacgaag

SEQ ID NO: 16679 - RNA, 24 nt, Human
caccgcaacgggcaaacaugagcc

SEQ ID NO: 16680 - RNA, 24 nt, Human
caccgcacccuccgccucccaggc

SEQ ID NO: 16681 - RNA, 24 nt, Human
caccgcgugucggcacguccagcc

SEQ ID NO: 16682 - RNA, 24 nt, Human
caccggcaaaguaccgacaucgac

SEQ ID NO: 16683 - RNA, 24 nt, Human
caccggccccgaagcugaguuguu

SEQ ID NO: 16684 - RNA, 23 nt, Human
caccguaaaagaggcuccagcua

SEQ ID NO: 16685 - RNA, 24 nt, Human
caccucacgcccagcucccauccu

SEQ ID NO: 16686 - RNA, 20 nt, Human
caccugagggauccaguggc

SEQ ID NO: 16687 - RNA, 24 nt, Human
caccugcagcuaugaugcccuucc

SEQ ID NO: 16688 - RNA, 20 nt, Human
caccugcuauuuggaugcag

SEQ ID NO: 16689 - RNA, 21 nt, Human
caccuggacaauaggaauucg

SEQ ID NO: 16690 - RNA, 24 nt, Human
caccuggugaugaaaucccaucau

SEQ ID NO: 16691 - RNA, 24 nt, Human
caccuuguggccccuagcaggccc

SEQ ID NO: 16692 - RNA, 24 nt, Human
cacgaugggcacaaugccauucug

SEQ ID NO: 16693 - RNA, 24 nt, Human
cacgcagaaaaaguauguagcgac

SEQ ID NO: 16694 - RNA, 24 nt, Human
cacuacaccauuggcaaggagauc

SEQ ID NO: 16695 - RNA, 24 nt, Human
cacucagcuuauuacagguaggua

SEQ ID NO: 16696 - RNA, 22 nt, Human
cacucauugggucuaagggaga

SEQ ID NO: 16697 - RNA, 24 nt, Human
cacucgguguacguccuggaggac

SEQ ID NO: 16698 - RNA, 24 nt, Human
cacucucuuccaagaaagaccuug

SEQ ID NO: 16699 - RNA, 24 nt, Human
cacugagucuccugucccugagaa

SEQ ID NO: 16700 - RNA, 22 nt, Human
cacugcaacccccgccucccag

SEQ ID NO: 16701 - RNA, 22 nt, Human
cacugcaaccuccaccuccugg

SEQ ID NO: 16702 - RNA, 22 nt, Human
cacugcaaccuccaccucucgg

SEQ ID NO: 16703 - RNA, 22 nt, Human
cacugcaaccuccgccucuggg

SEQ ID NO: 16704 - RNA, 22 nt, Human
cacugcaaccucugucuccugg

SEQ ID NO: 16705 - RNA, 22 nt, Human
cacugcaaccuucaccuuccgg

SEQ ID NO: 16706 - RNA, 22 nt, Human
cacugcaaugacugucagaaca

SEQ ID NO: 16707 - RNA, 22 nt, Human
cacugcacuccagccugggcaa

SEQ ID NO: 16708 - RNA, 22 nt, Human
cacugcacuccagccuggguga

SEQ ID NO: 16709 - RNA, 22 nt, Human
cacugcacucuggccugccuga

SEQ ID NO: 16710 - RNA, 24 nt, Human
cacugcgugacaaugacccaagcc

SEQ ID NO: 16711 - RNA, 24 nt, Human
cacugcguucucacacuagugugc

SEQ ID NO: 16712 - RNA, 24 nt, Human
cacugcucuccgggccucuccugc

SEQ ID NO: 16713 - RNA, 24 nt, Human
cacugcuuuaguaaaaauggaaua

SEQ ID NO: 16714 - RNA, 24 nt, Human
cacuggaucacaaguucguuuggu

SEQ ID NO: 16715 - RNA, 22 nt, Human
cacuggccacaagaaugagaaa

SEQ ID NO: 16716 - RNA, 24 nt, Human
cacugggagcagcuccaacauugg

SEQ ID NO: 16717 - RNA, 24 nt, Human
cacugggccaucugcacucugcuc

SEQ ID NO: 16718 - RNA, 22 nt, Human
cacugggcccagccuauuugca

SEQ ID NO: 16719 - RNA, 24 nt, Human
cacuggguauauaacugguugcca

SEQ ID NO: 16720 - RNA, 24 nt, Human
cacugggugggacgggguacugga

SEQ ID NO: 16721 - RNA, 21 nt, Human
cacuggucaagacaacuuugc

SEQ ID NO: 16722 - RNA, 24 nt, Human
cacuguacuccagccugggcaaca

SEQ ID NO: 16723 - RNA, 24 nt, Human
cacugugugggccucuauguggcc

SEQ ID NO: 16724 - RNA, 22 nt, Human
cacuuaggaaugugucuguugc

SEQ ID NO: 16725 - RNA, 24 nt, Human
cacuucuugcuuccugcuuugcag

SEQ ID NO: 16726 - RNA, 22 nt, Human
cacuuuugaugaccuagcccug

SEQ ID NO: 16727 - RNA, 22 nt, Human
cagaaagaacgaacagcugugg

SEQ ID NO: 16728 - RNA, 24 nt, Human
cagaacaaugcuaaaguagcugug

SEQ ID NO: 16729 - RNA, 22 nt, Human
cagaaccauguagagucuaccu

SEQ ID NO: 16730 - RNA, 24 nt, Human
cagaaggguuaauuuucgcugcag

SEQ ID NO: 16731 - RNA, 22 nt, Human
cagaauggaugagaagcaccgu

SEQ ID NO: 16732 - RNA, 24 nt, Human
cagaccuuaccuuuccagcucaaa

SEQ ID NO: 16733 - RNA, 22 nt, Human
cagaccuuuuauugggucccca

SEQ ID NO: 16734 - RNA, 22 nt, Human
cagagcagcuccugcauguuau

SEQ ID NO: 16735 - RNA, 22 nt, Human
cagagcugccuuucccuuccug

SEQ ID NO: 16736 - RNA, 22 nt, Human
cagaggacaugaaaacucgcuc

SEQ ID NO: 16737 - RNA, 22 nt, Human
cagaggagagagacucuaucuc

SEQ ID NO: 16738 - RNA, 24 nt, Human
cagaggguugccuauggugggcac

SEQ ID NO: 16739 - RNA, 22 nt, Human
cagaguacugugauagacucag

SEQ ID NO: 16740 - RNA, 22 nt, Human
cagaucacauccauccgucacc

SEQ ID NO: 16741 - RNA, 22 nt, Human
cagaucagaacuccuugggaaa

SEQ ID NO: 16742 - RNA, 22 nt, Human
cagaucugggauacagcugugg

SEQ ID NO: 16743 - RNA, 24 nt, Human
cagcaaauccagcugcugcugcgg

SEQ ID NO: 16744 - RNA, 24 nt, Human
cagcacaaucccccgcucagcugg

SEQ ID NO: 16745 - RNA, 23 nt, Human
cagcacacaaccagaaccuagag

SEQ ID NO: 16746 - RNA, 24 nt, Human
cagcacacagagugugggaggaga

SEQ ID NO: 16747 - RNA, 24 nt, Human
cagcacccugccuugucuccagga

SEQ ID NO: 16748 - RNA, 23 nt, Human
cagcagacguggcaauaugugug

SEQ ID NO: 16749 - RNA, 24 nt, Human
cagcagacuccacuccacuuggcu

SEQ ID NO: 16750 - RNA, 22 nt, Human
cagcagagcccauguguucaug

SEQ ID NO: 16751 - RNA, 24 nt, Human
cagcagagucagggauggguccau

SEQ ID NO: 16752 - RNA, 24 nt, Human
cagcagaucccagugaaggguuuu

SEQ ID NO: 16753 - RNA, 24 nt, Human
cagcagcacaggccaggcugggca

SEQ ID NO: 16754 - RNA, 24 nt, Human
cagcagcacgcagugagagccucg

SEQ ID NO: 16755 - RNA, 24 nt, Human
cagcagcagguuugugcugguccc

SEQ ID NO: 16756 - RNA, 24 nt, Human
cagcagcccagcagggauguccuc

SEQ ID NO: 16757 - RNA, 21 nt, Human
cagcagccugcuccccgcacu

SEQ ID NO: 16758 - RNA, 24 nt, Human
cagcagcgucuacuuccgcagcgu

SEQ ID NO: 16759 - RNA, 24 nt, Human
cagcagcuggacgcugagcugagg

SEQ ID NO: 16760 - RNA, 24 nt, Human
cagcaggcugaugaauaagaucua

SEQ ID NO: 16761 - RNA, 24 nt, Human
cagcaggucuugaguuuggcaacu

SEQ ID NO: 16762 - RNA, 24 nt, Human
cagcaggugauuucuuaaugcuuu

SEQ ID NO: 16763 - RNA, 24 nt, Human
cagcaguaagcaacaauggcugau

SEQ ID NO: 16764 - RNA, 24 nt, Human
cagcaguguacugggaucauuagg

SEQ ID NO: 16765 - RNA, 22 nt, Human
cagcaguguugcgaaucaucac

SEQ ID NO: 16766 - RNA, 24 nt, Human
aaaaagcuaucuuaagcuggaaca

SEQ ID NO: 16767 - RNA, 24 nt, Human
aaaacacacauaauacaaguuuuc

SEQ ID NO: 16768 - RNA, 22 nt, Human
aaaacaccagagaagugcagaa

SEQ ID NO: 16769 - RNA, 24 nt, Human
aaaacuuuuagcgccagucuugag

SEQ ID NO: 16770 - RNA, 22 nt, Human
aaaagaggagaaaaaagcugua

SEQ ID NO: 16771 - RNA, 22 nt, Human
aaaagauuuagccaggcacagu

SEQ ID NO: 16772 - RNA, 22 nt, Human
aaaagcuugcugagugguacag

SEQ ID NO: 16773 - RNA, 24 nt, Human
aaaaggacacaggaaccagccagc

SEQ ID NO: 16774 - RNA, 24 nt, Human
aaaagugcaugauggugagagccc

SEQ ID NO: 16775 - RNA, 22 nt, Human
aaaaugccuacaggcaguagcc

SEQ ID NO: 16776 - RNA, 22 nt, Human
aaaaugcuuacaggcaguagcc

SEQ ID NO: 16777 - RNA, 22 nt, Human
aaacaaccuugguguguucuca

SEQ ID NO: 16778 - RNA, 24 nt, Human
aaaccagaacauuuuccccacuau

SEQ ID NO: 16779 - RNA, 24 nt, Human
aaaccagcaggaaaaccucugcuc

SEQ ID NO: 16780 - RNA, 24 nt, Human
aaaccagguauccaaaggcgaaag

SEQ ID NO: 16781 - RNA, 22 nt, Human
aaacccuagcaccugagagcca

SEQ ID NO: 16782 - RNA, 22 nt, Human
aaacgaaaacacuccuauauuu

SEQ ID NO: 16783 - RNA, 22 nt, Human
aaacuagcgaggucugcuguac

SEQ ID NO: 16784 - RNA, 23 nt, Human
aaagaacuaaagggcaagcaggg

SEQ ID NO: 16785 - RNA, 22 nt, Human
aaagaauguucuuuuucaaaaa

SEQ ID NO: 16786 - RNA, 22 nt, Human
aaagacaguucagugacaaguu

SEQ ID NO: 16787 - RNA, 24 nt, Human
aaagaccaagggaaugcaaguccc

SEQ ID NO: 16788 - RNA, 24 nt, Human
aaagauccuggguaguucggauga

SEQ ID NO: 16789 - RNA, 24 nt, Human
aaagaugguaaacauacaguaguc

SEQ ID NO: 16790 - RNA, 24 nt, Human
aaagcaaaacuuucgcuauucuau

SEQ ID NO: 16791 - RNA, 22 nt, Human
aaagcaggagggacuagagaaa

SEQ ID NO: 16792 - RNA, 22 nt, Human
aaagcugagccugagagacaga

SEQ ID NO: 16793 - RNA, 22 nt, Human
aaagcuuuguucauuguaucug

SEQ ID NO: 16794 - RNA, 24 nt, Human
aaaggaacuugcuccauuguuuga

SEQ ID NO: 16795 - RNA, 23 nt, Human
aaaggacaauuuuuaagcugcug

SEQ ID NO: 16796 - RNA, 22 nt, Human
aaaggaguuugugacauugaca

SEQ ID NO: 16797 - RNA, 24 nt, Human
aaaggcacuuugaaccuccuguaa

SEQ ID NO: 16798 - RNA, 22 nt, Human
aaaggcagacggugaaugccuu

SEQ ID NO: 16799 - RNA, 24 nt, Human
aaaggcccggccaccuaaaggcac

SEQ ID NO: 16800 - RNA, 24 nt, Human
aaagggaaugauagcauugaagga

SEQ ID NO: 16801 - RNA, 22 nt, Human
aaagguauagagaugggaaggg

SEQ ID NO: 16802 - RNA, 24 nt, Human
aaagguccugguucacccuggaga

SEQ ID NO: 16803 - RNA, 24 nt, Human
aaagguucuagggcagggaaaaug

SEQ ID NO: 16804 - RNA, 24 nt, Human
aaagucacuuucacgaggugguca

SEQ ID NO: 16805 - RNA, 22 nt, Human
aaagucauauauacgcaaggua

SEQ ID NO: 16806 - RNA, 24 nt, Human
aaagugaagacauuuucugucagg

SEQ ID NO: 16807 - RNA, 24 nt, Human
aaagugacccagaggaggugaacu

SEQ ID NO: 16808 - RNA, 24 nt, Human
aaagugccacuuugaaugguuguu

SEQ ID NO: 16809 - RNA, 22 nt, Human
aaagugcucauagugcagguag

SEQ ID NO: 16810 - RNA, 24 nt, Human
aaagugcuggcguuacagguauga

SEQ ID NO: 16811 - RNA, 24 nt, Human
aaagugcugggauuacaggcauga

SEQ ID NO: 16812 - RNA, 22 nt, Human
aaauaggucaaucagacuauga

SEQ ID NO: 16813 - RNA, 22 nt, Human
aaauccuggggaucuggaggga

SEQ ID NO: 16814 - RNA, 22 nt, Human
aaaucggaucuuggggagaguc

SEQ ID NO: 16815 - RNA, 22 nt, Human
aaaugguaugcagguaugacuu

SEQ ID NO: 16816 - RNA, 20 nt, Human
aaauucuugugugucuccua

SEQ ID NO: 16817 - RNA, 22 nt, Human
aaauugccgagaugauguuugg

SEQ ID NO: 16818 - RNA, 24 nt, Human
aacaaauuucacauaugguaaacc

SEQ ID NO: 16819 - RNA, 24 nt, Human
aacaagaggaguauguauucccgu

SEQ ID NO: 16820 - RNA, 21 nt, Human
aacaauccuagugaagccugu

SEQ ID NO: 16821 - RNA, 24 nt, Human
aacacagagaaacuuucagccaga

SEQ ID NO: 16822 - RNA, 24 nt, Human
aacacauacagaacugaauuaaga

SEQ ID NO: 16823 - RNA, 24 nt, Human
aacacauuacugauagaggaaguc

SEQ ID NO: 16824 - RNA, 22 nt, Human
aacaccacagacagcugcagga

SEQ ID NO: 16825 - RNA, 24 nt, Human
aacaccauaggaguugccaucaga

SEQ ID NO: 16826 - RNA, 24 nt, Human
aacacucugguacagaucuccaga

SEQ ID NO: 16827 - RNA, 24 nt, Human
aacacugcccagcuuugaggagau

SEQ ID NO: 16828 - RNA, 24 nt, Human
aacacuuuaaaaccguggggugga

SEQ ID NO: 16829 - RNA, 24 nt, Human
aacacuuuguuguagcugcccucc

SEQ ID NO: 16830 - RNA, 24 nt, Human
aacaggauaaaagccugguuacca

SEQ ID NO: 16831 - RNA, 24 nt, Human
aacagguuugaacuucuuaacuuc

SEQ ID NO: 16832 - RNA, 24 nt, Human
aacaguguaggucuuggugaagcc

SEQ ID NO: 16833 - RNA, 22 nt, Human
aacauaguacacugcagccucc

SEQ ID NO: 16834 - RNA, 24 nt, Human
aacauuccagaggucgcccagcuc

SEQ ID NO: 16835 - RNA, 24 nt, Human
aacauuuugcccugaacugaagag

SEQ ID NO: 16836 - RNA, 22 nt, Human
aaccaaugcagacuggcauuaa

SEQ ID NO: 16837 - RNA, 22 nt, Human
aaccacauaaauuuaccccacc

SEQ ID NO: 16838 - RNA, 22 nt, Human
aaccaggacccaaggugcccuu

SEQ ID NO: 16839 - RNA, 24 nt, Human
aaccagucccaaccccauaagugu

SEQ ID NO: 16840 - RNA, 24 nt, Human
aaccaguuucacuuguaccaagac

SEQ ID NO: 16841 - RNA, 24 nt, Human
aaccauggacauggaucuucuuua

SEQ ID NO: 16842 - RNA, 22 nt, Human
aaccauguuuuagcauaauggg

SEQ ID NO: 16843 - RNA, 21 nt, Human
aacccccugcucaccgccagc

SEQ ID NO: 16844 - RNA, 24 nt, Human
aacccggcauucccaguuuaauug

SEQ ID NO: 16845 - RNA, 24 nt, Human
aacccgggagguggaacuugcagu

SEQ ID NO: 16846 - RNA, 24 nt, Human
aacccguauuuucuggcuaccagu

SEQ ID NO: 16847 - RNA, 22 nt, Human
aacccuguguuaacaaugagaa

SEQ ID NO: 16848 - RNA, 24 nt, Human
aaccucuucuguggagucugcgug

SEQ ID NO: 16849 - RNA, 24 nt, Human
aaccugggcauuggccuagcuauc

SEQ ID NO: 16850 - RNA, 22 nt, Human
aaccuggugucagcagccuuuc

SEQ ID NO: 16851 - RNA, 23 nt, Human
aaccuguugacagaucuucagag

SEQ ID NO: 16852 - RNA, 24 nt, Human
aaccuuccuaaaccuggccuuggc

SEQ ID NO: 16853 - RNA, 22 nt, Human
aacgaugggcuggauuguuuug

SEQ ID NO: 16854 - RNA, 24 nt, Human
aacgccguugccaccgaggaggcg

SEQ ID NO: 16855 - RNA, 24 nt, Human
aacggcugagggugggggcagugu

SEQ ID NO: 16856 - RNA, 24 nt, Human
aacguccuuuguaaagacugccuu

SEQ ID NO: 16857 - RNA, 24 nt, Human
aacuaaauagugaauauacauaca

SEQ ID NO: 16858 - RNA, 24 nt, Human
aacuauccgggaagagacuuguga

SEQ ID NO: 16859 - RNA, 22 nt, Human
aacuccuggacuauauugugaa

SEQ ID NO: 16860 - RNA, 22 nt, Human
aacugccccacuaagucccugc

SEQ ID NO: 16861 - RNA, 23 nt, Human
aacugcguggcuaucacacugac

SEQ ID NO: 16862 - RNA, 22 nt, Human
aacuuguggcuguuuuugccac

SEQ ID NO: 16863 - RNA, 22 nt, Human
aacuuucacuucccacugugag

SEQ ID NO: 16864 - RNA, 22 nt, Human
aacuuucuggcuuuggggagag

SEQ ID NO: 16865 - RNA, 24 nt, Human
aagaaaccuuuagaaggacuuaga

SEQ ID NO: 16866 - RNA, 24 nt, Human
aagaaacucacagauaaguccauu

SEQ ID NO: 16867 - RNA, 22 nt, Human
aagaaagcaaguaaacgcauga

SEQ ID NO: 16868 - RNA, 24 nt, Human
aagaaauuucacagcaguuuauua

SEQ ID NO: 16869 - RNA, 24 nt, Human
aagaaccccgcacucugugagagg

SEQ ID NO: 16870 - RNA, 24 nt, Human
aagaagaucuagaacgacuucucu

SEQ ID NO: 16871 - RNA, 24 nt, Human
aagaagaugauacgucaugcuucc

SEQ ID NO: 16872 - RNA, 24 nt, Human
aagaagcaaauaacaucuaguacc

SEQ ID NO: 16873 - RNA, 24 nt, Human
aagaagcccgaucgaguccccuga

SEQ ID NO: 16874 - RNA, 24 nt, Human
aagaaguucuugaguggcguguaa

SEQ ID NO: 16875 - RNA, 24 nt, Human
aagaaguugacagccaggugaaug

SEQ ID NO: 16876 - RNA, 24 nt, Human
aagaaguugaucuugugugaugac

SEQ ID NO: 16877 - RNA, 24 nt, Human
aagaauguuagaaguucaagccag

SEQ ID NO: 16878 - RNA, 24 nt, Human
aagacccccaauaguggagagggc

SEQ ID NO: 16879 - RNA, 24 nt, Human
aagacuccgagggcaggaaugugg

SEQ ID NO: 16880 - RNA, 22 nt, Human
aagagagcugucaguuacagag

SEQ ID NO: 16881 - RNA, 22 nt, Human
aagagcguauucuuggagcuga

SEQ ID NO: 16882 - RNA, 22 nt, Human
aagagcuaaaacugaugacagu

SEQ ID NO: 16883 - RNA, 22 nt, Human
aagagcuggagaccaaggccgu

SEQ ID NO: 16884 - RNA, 24 nt, Human
aagagcuucugcuaggugcagggc

SEQ ID NO: 16885 - RNA, 24 nt, Human
aagaggaagcuagguugaaaucac

SEQ ID NO: 16886 - RNA, 24 nt, Human
aagaguucuccugaugauugaaug

SEQ ID NO: 16887 - RNA, 22 nt, Human
aagauggaaaagggagauaugg

SEQ ID NO: 16888 - RNA, 24 nt, Human
aagcaaacauuucgacuaaagggg

SEQ ID NO: 16889 - RNA, 24 nt, Human
aagcaacuagaacaugauucagaa

SEQ ID NO: 16890 - RNA, 24 nt, Human
aagcaacuccucaguacguuuugg

SEQ ID NO: 16891 - RNA, 22 nt, Human
aagcaaguuacaauucaaaaag

SEQ ID NO: 16892 - RNA, 22 nt, Human
aagcacaaaagacuuguugaga

SEQ ID NO: 16893 - RNA, 22 nt, Human
aagcaccuagucuccuuguucu

SEQ ID NO: 16894 - RNA, 24 nt, Human
aagcagaggcuucucuccccaaga

SEQ ID NO: 16895 - RNA, 24 nt, Human
aagcagauacuugagccauugugc

SEQ ID NO: 16896 - RNA, 24 nt, Human
aagcagcauggaaaagauggguug

SEQ ID NO: 16897 - RNA, 24 nt, Human
aagcagccuaagcuuucauucuca

SEQ ID NO: 16898 - RNA, 24 nt, Human
aagcagccucuugucacagguuga

SEQ ID NO: 16899 - RNA, 24 nt, Human
aagcagcucuuucgacguguagca

SEQ ID NO: 16900 - RNA, 24 nt, Human
aagcaguccucccacuuggccucc

SEQ ID NO: 16901 - RNA, 24 nt, Human
aagcaugcagugguaugaaugauc

SEQ ID NO: 16902 - RNA, 22 nt, Human
aagcaugugcugguggucauug

SEQ ID NO: 16903 - RNA, 22 nt, Human
aagcccaggagaaugcugcaau

SEQ ID NO: 16904 - RNA, 22 nt, Human
aagccucauaauuggccuuugu

SEQ ID NO: 16905 - RNA, 22 nt, Human
aagccuccgugcugcuggaucu

SEQ ID NO: 16906 - RNA, 24 nt, Human
aagcgaccccaaaguggauagucu

SEQ ID NO: 16907 - RNA, 24 nt, Human
aagcgccugcgcaaggccaagaag

SEQ ID NO: 16908 - RNA, 24 nt, Human
aagcggccgggggucaucuaacag

SEQ ID NO: 16909 - RNA, 24 nt, Human
aagcuccaguggggaccuuguuaa

SEQ ID NO: 16910 - RNA, 22 nt, Human
aagcugaggcagggcuugcaug

SEQ ID NO: 16911 - RNA, 24 nt, Human
aagcugcaacaaggugauaaaggu

SEQ ID NO: 16912 - RNA, 24 nt, Human
aagcugcagaccuucgccaagagg

SEQ ID NO: 16913 - RNA, 24 nt, Human
aagcugcauguggauccugagaac

SEQ ID NO: 16914 - RNA, 22 nt, Human
aagcugccccaccagcucugcc

SEQ ID NO: 16915 - RNA, 24 nt, Human
aagcugccccccauuucuguaacc

SEQ ID NO: 16916 - RNA, 24 nt, Human
aagcuggccugaaaggcaccuggg

SEQ ID NO: 16917 - RNA, 22 nt, Human
aagcuggccuguaccugcugag

SEQ ID NO: 16918 - RNA, 24 nt, Human
aagcugguacgccugcagguaccg

SEQ ID NO: 16919 - RNA, 22 nt, Human
aagcuggucacaacauuuuucu

SEQ ID NO: 16920 - RNA, 22 nt, Human
aagcuggugaucguuggggaug

SEQ ID NO: 16921 - RNA, 19 nt, Human
aagcuguuacacccauuuc

SEQ ID NO: 16922 - RNA, 24 nt, Human
aagcuguucccaucaaggauggca

SEQ ID NO: 16923 - RNA, 24 nt, Human
aagcuucauagggauggacaucau

SEQ ID NO: 16924 - RNA, 24 nt, Human
aagcuucgcuggcuugccggcccc

SEQ ID NO: 16925 - RNA, 22 nt, Human
aagcuuuucaaagcauggaugg

SEQ ID NO: 16926 - RNA, 22 nt, Human
aaggaaauguggaggaggcaga

SEQ ID NO: 16927 - RNA, 24 nt, Human
aaggacacaaaaggaagcugugug

SEQ ID NO: 16928 - RNA, 22 nt, Human
aaggacccuacccagucauuuu

SEQ ID NO: 16929 - RNA, 24 nt, Human
aaggagcagcucgaggccaggagg

SEQ ID NO: 16930 - RNA, 24 nt, Human
aaggagcgccuguaccuccuggcg

SEQ ID NO: 16931 - RNA, 24 nt, Human
aaggagcugucggugcugucgcuc

SEQ ID NO: 16932 - RNA, 24 nt, Human
aaggaggacaucucugcuugccug

SEQ ID NO: 16933 - RNA, 24 nt, Human
aaggaggcuuggcggugguugggc

SEQ ID NO: 16934 - RNA, 24 nt, Human
aaggaugcugcuagacuaaggaau

SEQ ID NO: 16935 - RNA, 20 nt, Human
aaggauggauggauggaugg

SEQ ID NO: 16936 - RNA, 24 nt, Human
aaggauuuggguuggggcacccag

SEQ ID NO: 16937 - RNA, 22 nt, Human
aaggcaguggcagaagauguca

SEQ ID NO: 16938 - RNA, 24 nt, Human
aaggcauuuucggcuucacugaca

SEQ ID NO: 16939 - RNA, 22 nt, Human
aaggcccugccucuuaauacug

SEQ ID NO: 16940 - RNA, 22 nt, Human
aaggccuggaaaucugccuuua

SEQ ID NO: 16941 - RNA, 24 nt, Human
aaggcgagcgagggcgagaguggg

SEQ ID NO: 16942 - RNA, 24 nt, Human
aaggcugggcugcugauauguaua

SEQ ID NO: 16943 - RNA, 24 nt, Human
aaggcuuugcacagcuauuguuca

SEQ ID NO: 16944 - RNA, 24 nt, Human
aagggacccagcugggucugggcc

SEQ ID NO: 16945 - RNA, 22 nt, Human
aagggcaaguucugagaaagag

SEQ ID NO: 16946 - RNA, 22 nt, Human
aagggccucaggugacuuucau

SEQ ID NO: 16947 - RNA, 24 nt, Human
aaggggcccuuccccauuugcaaa

SEQ ID NO: 16948 - RNA, 22 nt, Human
aaggggcguggcaccagcacca

SEQ ID NO: 16949 - RNA, 24 nt, Human
aaggguccuagguagggggagguu

SEQ ID NO: 16950 - RNA, 24 nt, Human
aagggugccucuaaaagcuugaca

SEQ ID NO: 16951 - RNA, 22 nt, Human
aagguagauaaaggcuucacgu

SEQ ID NO: 16952 - RNA, 24 nt, Human
aagguaguuucguggaugccacag

SEQ ID NO: 16953 - RNA, 18 nt, Human
aaggucccaggagaccag

SEQ ID NO: 16954 - RNA, 24 nt, Human
aaggugcgugaggaguaugccgac

SEQ ID NO: 16955 - RNA, 24 nt, Human
aaggugcuggagaacaucgaacug

SEQ ID NO: 16956 - RNA, 24 nt, Human
aaggugcuggaggugccaagugaa

SEQ ID NO: 16957 - RNA, 24 nt, Human
aaggugcuucauggagaggugauu

SEQ ID NO: 16958 - RNA, 22 nt, Human
aagguggugucauguuuugggg

SEQ ID NO: 16959 - RNA, 24 nt, Human
aagguuacuucucaaauuagggaa

SEQ ID NO: 16960 - RNA, 24 nt, Human
aagguucuggccuccugucuuagc

SEQ ID NO: 16961 - RNA, 24 nt, Human
aagguugucagguaguaaggugga

SEQ ID NO: 16962 - RNA, 24 nt, Human
aagguugucucaacuacagcuauc

SEQ ID NO: 16963 - RNA, 24 nt, Human
aaguaccacccuuugggggugguc

SEQ ID NO: 16964 - RNA, 24 nt, Human
aaguauacuugaggagggugacgg

SEQ ID NO: 16965 - RNA, 22 nt, Human
aaguauggugcacuggucaaua

SEQ ID NO: 16966 - RNA, 24 nt, Human
aaguaugugccgccgagcccugcg

SEQ ID NO: 16967 - RNA, 22 nt, Human
aaguccagcuaauuuuuguauu

SEQ ID NO: 16968 - RNA, 22 nt, Human
aagucuguauuuguuguuguga

SEQ ID NO: 16969 - RNA, 24 nt, Human
aagugcagccucaagauggcugau

SEQ ID NO: 16970 - RNA, 24 nt, Human
aagugccuccgugaggagauucac

SEQ ID NO: 16971 - RNA, 24 nt, Human
aagugcuccccaucaucugaagaa

SEQ ID NO: 16972 - RNA, 22 nt, Human
aagugcuggaauuacaggcaug

SEQ ID NO: 16973 - RNA, 24 nt, Human
aaguggauacaagucuggcauugg

SEQ ID NO: 16974 - RNA, 24 nt, Human
aaguggcaacgcgaauuuggguau

SEQ ID NO: 16975 - RNA, 22 nt, Human
aaguggguccagggcacucagg

SEQ ID NO: 16976 - RNA, 24 nt, Human
aaguguccucggccggcgcagccc

SEQ ID NO: 16977 - RNA, 24 nt, Human
aagugugucuaucaguaguggucc

SEQ ID NO: 16978 - RNA, 22 nt, Human
aaguuaagagcucccaggccug

SEQ ID NO: 16979 - RNA, 24 nt, Human
aaguuuaguuuuauuauggacacu

SEQ ID NO: 16980 - RNA, 22 nt, Human
aauagcuugguuaaaugaaggg

SEQ ID NO: 16981 - RNA, 22 nt, Human
aaucaauguucccaggggaaaa

SEQ ID NO: 16982 - RNA, 24 nt, Human
aaucacuugagcccaggaguuuga

SEQ ID NO: 16983 - RNA, 22 nt, Human
aaucuccauuuguaaaugugac

SEQ ID NO: 16984 - RNA, 22 nt, Human
aaucuucacuaaaauggacaag

SEQ ID NO: 16985 - RNA, 22 nt, Human
aaugaagccacagagauuugcu

SEQ ID NO: 16986 - RNA, 22 nt, Human
aaugacacaaaagcugcuauuu

SEQ ID NO: 16987 - RNA, 22 nt, Human
aaugauccaccugccucggccu

SEQ ID NO: 16988 - RNA, 24 nt, Human
aauggcacugggggcaaguccauc

SEQ ID NO: 16989 - RNA, 24 nt, Human
aaugggacugcugaagaguggaca

SEQ ID NO: 16990 - RNA, 24 nt, Human
aaugguauguacugguggcagaua

SEQ ID NO: 16991 - RNA, 24 nt, Human
aaugugcugguaacugcuuugcuu

SEQ ID NO: 16992 - RNA, 22 nt, Human
aauuaacuggguucucagaugc

SEQ ID NO: 16993 - RNA, 22 nt, Human
aauuaagaaaaucgagcacccu

SEQ ID NO: 16994 - RNA, 24 nt, Human
aauuacacugaggcggugagacga

SEQ ID NO: 16995 - RNA, 24 nt, Human
aauucaaauaggagcuaggagaca

SEQ ID NO: 16996 - RNA, 22 nt, Human
aauucacagagggaggaaaguu

SEQ ID NO: 16997 - RNA, 24 nt, Human
aauugugucaugauuaauguguau

SEQ ID NO: 16998 - RNA, 24 nt, Human
cagcauauuguacuggccugcugc

SEQ ID NO: 16999 - RNA, 24 nt, Human
cagcaucguggccgagcuggaccg

SEQ ID NO: 17000 - RNA, 24 nt, Human
cagcaugcuggggagugcggucag

SEQ ID NO: 17001 - RNA, 24 nt, Human
cagcauugugcagauacacacccc

SEQ ID NO: 17002 - RNA, 24 nt, Human
cagccaauuaagccgacugaguuc

SEQ ID NO: 17003 - RNA, 24 nt, Human
cagccaccucccaggaagaucugg

SEQ ID NO: 17004 - RNA, 24 nt, Human
cagcccaucuggguaccuguuggu

SEQ ID NO: 17005 - RNA, 21 nt, Human
cagccccccugcacgcagccc

SEQ ID NO: 17006 - RNA, 24 nt, Human
cagccguggcucucuagucuucgu

SEQ ID NO: 17007 - RNA, 24 nt, Human
cagccugacaucugucccuucaac

SEQ ID NO: 17008 - RNA, 24 nt, Human
cagccugcaucgaagaaguacugc

SEQ ID NO: 17009 - RNA, 24 nt, Human
cagccugcccgacaucgucuucac

SEQ ID NO: 17010 - RNA, 24 nt, Human
cagcgcauggagggguagugcugg

SEQ ID NO: 17011 - RNA, 24 nt, Human
cagcgccccgcgcggcccugcaag

SEQ ID NO: 17012 - RNA, 24 nt, Human
cagcgcggaacccccuaggcgacc

SEQ ID NO: 17013 - RNA, 24 nt, Human
cagcgcuggugucgggccaagcag

SEQ ID NO: 17014 - RNA, 24 nt, Human
cagcguggggaccacucuucccgg

SEQ ID NO: 17015 - RNA, 24 nt, Human
cagcgugggggcccugcaggccau

SEQ ID NO: 17016 - RNA, 24 nt, Human
cagcucaaauggaauauugucgca

SEQ ID NO: 17017 - RNA, 24 nt, Human
cagcucgggagguccaguaggcug

SEQ ID NO: 17018 - RNA, 24 nt, Human
cagcugaugaacucugggauaggc

SEQ ID NO: 17019 - RNA, 24 nt, Human
cagcugcagcugagacugcggcgg

SEQ ID NO: 17020 - RNA, 24 nt, Human
cagcugccgcaaagucucguccac

SEQ ID NO: 17021 - RNA, 24 nt, Human
cagcugccuggguuguggccgccc

SEQ ID NO: 17022 - RNA, 24 nt, Human
cagcuggugguucuccagggccag

SEQ ID NO: 17023 - RNA, 22 nt, Human
cagcuguacuugacagucaacc

SEQ ID NO: 17024 - RNA, 24 nt, Human
caggacacaauguggcugaccugg

SEQ ID NO: 17025 - RNA, 24 nt, Human
caggagccacggaaccgcaguagg

SEQ ID NO: 17026 - RNA, 24 nt, Human
caggagccagcuguagguguccuu

SEQ ID NO: 17027 - RNA, 24 nt, Human
caggagccaggcuuuagggacggg

SEQ ID NO: 17028 - RNA, 24 nt, Human
caggagcccggggcgcccgcggcg

SEQ ID NO: 17029 - RNA, 22 nt, Human
caggagcugccuaugaaagagg

SEQ ID NO: 17030 - RNA, 24 nt, Human
caggaggcugcuuagcaguuuuga

SEQ ID NO: 17031 - RNA, 22 nt, Human
caggccccgaaugcuuaugaug

SEQ ID NO: 17032 - RNA, 24 nt, Human
caggcccugugggagcccacggug

SEQ ID NO: 17033 - RNA, 24 nt, Human
caggccuaucgcuggaugauugac

SEQ ID NO: 17034 - RNA, 22 nt, Human
caggccugcuggguuaacugcu

SEQ ID NO: 17035 - RNA, 22 nt, Human
caggccuuguccacaagcgaau

SEQ ID NO: 17036 - RNA, 24 nt, Human
cagggccaaagccaccuccagcgc

SEQ ID NO: 17037 - RNA, 24 nt, Human
cagggcccugugguuggacuucac

SEQ ID NO: 17038 - RNA, 22 nt, Human
caggggcaaaggcgauuaucac

SEQ ID NO: 17039 - RNA, 24 nt, Human
caggggcuccuguccugggccagg

SEQ ID NO: 17040 - RNA, 22 nt, Human
cagguacgucugaagucccacc

SEQ ID NO: 17041 - RNA, 22 nt, Human
caggugcaaguguuaaagggua

SEQ ID NO: 17042 - RNA, 24 nt, Human
caggugccucugccauagcuucug

SEQ ID NO: 17043 - RNA, 24 nt, Human
caggugguugcuuugaacuuuauu

SEQ ID NO: 17044 - RNA, 24 nt, Human
cagguguccucauguugcugaaau

SEQ ID NO: 17045 - RNA, 24 nt, Human
cagguuauuuucauuguguuauug

SEQ ID NO: 17046 - RNA, 22 nt, Human
cagguuggucuugaacucuugg

SEQ ID NO: 17047 - RNA, 24 nt, Human
caguacguugcucagcuccucccg

SEQ ID NO: 17048 - RNA, 24 nt, Human
caguacuuauuagcugcaggagcu

SEQ ID NO: 17049 - RNA, 24 nt, Human
caguagcccggccgcgugaccagg

SEQ ID NO: 17050 - RNA, 24 nt, Human
caguaggauuuaauauaugcaggg

SEQ ID NO: 17051 - RNA, 24 nt, Human
caguauccugccgagucuguucug

SEQ ID NO: 17052 - RNA, 24 nt, Human
cagucccuggaggcggugccggcu

SEQ ID NO: 17053 - RNA, 24 nt, Human
caguccgcgcaaacaugcaggugc

SEQ ID NO: 17054 - RNA, 22 nt, Human
cagugcacaccuggaaacucug

SEQ ID NO: 17055 - RNA, 22 nt, Human
cagugcuccuggaaacuuagcu

SEQ ID NO: 17056 - RNA, 22 nt, Human
cagugggaaaaguuugucucau

SEQ ID NO: 17057 - RNA, 24 nt, Human
caguuuccuaaaaugugccuccuc

SEQ ID NO: 17058 - RNA, 24 nt, Human
cauaaacauuuuucucauguuuug

SEQ ID NO: 17059 - RNA, 24 nt, Human
cauaaagagcaaagcaguuguggu

SEQ ID NO: 17060 - RNA, 22 nt, Human
cauaaaguaaaagcuaauacua

SEQ ID NO: 17061 - RNA, 21 nt, Human
cauagcaauggcaacuaucca

SEQ ID NO: 17062 - RNA, 24 nt, Human
caucacaguggagccccuggcccg

SEQ ID NO: 17063 - RNA, 24 nt, Human
caucacugagaagguguuuucgag

SEQ ID NO: 17064 - RNA, 22 nt, Human
caucacuguuugauuucuugac

SEQ ID NO: 17065 - RNA, 24 nt, Human
caucagaggcccccuuagggccca

SEQ ID NO: 17066 - RNA, 24 nt, Human
caucaggcgcccuuugaggccagg

SEQ ID NO: 17067 - RNA, 24 nt, Human
cauccagacugcuguacggaccaa

SEQ ID NO: 17068 - RNA, 24 nt, Human
cauccagccgccgcuugacauggg

SEQ ID NO: 17069 - RNA, 24 nt, Human
cauccagcuugggaacccgggaca

SEQ ID NO: 17070 - RNA, 24 nt, Human
cauccaucuucccuggaagucucc

SEQ ID NO: 17071 - RNA, 24 nt, Human
caucccaaugccagaccuuccucc

SEQ ID NO: 17072 - RNA, 24 nt, Human
cauccggguuuaaagcgauucucc

SEQ ID NO: 17073 - RNA, 24 nt, Human
cauccgguugauagcucggcgccu

SEQ ID NO: 17074 - RNA, 24 nt, Human
cauccuucaucuggacaagggaaa

SEQ ID NO: 17075 - RNA, 23 nt, Human
caucgcccuggauggucuucuug

SEQ ID NO: 17076 - RNA, 24 nt, Human
caucgcucgucucuuccuacucuc

SEQ ID NO: 17077 - RNA, 24 nt, Human
caucggauuuugcagcuucugggc

SEQ ID NO: 17078 - RNA, 24 nt, Human
caucgugugaacuauagaguuugu

SEQ ID NO: 17079 - RNA, 18 nt, Human
caucucaugguacggcug

SEQ ID NO: 17080 - RNA, 21 nt, Human
caucuggauggagaagaggca

SEQ ID NO: 17081 - RNA, 24 nt, Human
caucuggcuauuuugucccagcgg

SEQ ID NO: 17082 - RNA, 24 nt, Human
caucugggccucucuggucaaaac

SEQ ID NO: 17083 - RNA, 22 nt, Human
caugaaacugggaggcgaccgu

SEQ ID NO: 17084 - RNA, 24 nt, Human
caugcacacagcucucuguaccuu

SEQ ID NO: 17085 - RNA, 24 nt, Human
caugcacggaggacacgcccauug

SEQ ID NO: 17086 - RNA, 24 nt, Human
caugcagguuguagcagguaucag

SEQ ID NO: 17087 - RNA, 24 nt, Human
caugcgccugguggaggccugugg

SEQ ID NO: 17088 - RNA, 24 nt, Human
caugcuguuccuguggcauaagca

SEQ ID NO: 17089 - RNA, 24 nt, Human
cauggagcagugccggguggccca

SEQ ID NO: 17090 - RNA, 23 nt, Human
cauggcacaguacgguggcagac

SEQ ID NO: 17091 - RNA, 24 nt, Human
cauggcagccuuuuccuuagaaca

SEQ ID NO: 17092 - RNA, 22 nt, Human
cauggucuggauaguugguggc

SEQ ID NO: 17093 - RNA, 24 nt, Human
caugguguccaccgaugugcacac

SEQ ID NO: 17094 - RNA, 22 nt, Human
cauguaaucccagcuacucagg

SEQ ID NO: 17095 - RNA, 22 nt, Human
cauguacaacaggaaccgugug

SEQ ID NO: 17096 - RNA, 22 nt, Human
caugucaucucaaugcgcugca

SEQ ID NO: 17097 - RNA, 24 nt, Human
cauuaggaugucagcugacccuug

SEQ ID NO: 17098 - RNA, 24 nt, Human
cauuaguaugacagaggggggcug

SEQ ID NO: 17099 - RNA, 24 nt, Human
cauucacugugcuaucggcaauga

SEQ ID NO: 17100 - RNA, 24 nt, Human
cauucauugucuuacaugcagagc

SEQ ID NO: 17101 - RNA, 24 nt, Human
cauuccuuccacauucggcuaugg

SEQ ID NO: 17102 - RNA, 24 nt, Human
cauucuagcccauuaggcucccag

SEQ ID NO: 17103 - RNA, 24 nt, Human
cauucugccucuuccuucucuugu

SEQ ID NO: 17104 - RNA, 24 nt, Human
cauucuucacugagugcugcugac

SEQ ID NO: 17105 - RNA, 24 nt, Human
cauucuugcugucuggauccagag

SEQ ID NO: 17106 - RNA, 24 nt, Human
cauucuuuaaaucugagucucucc

SEQ ID NO: 17107 - RNA, 24 nt, Human
cauugagaagcugguggagcggga

SEQ ID NO: 17108 - RNA, 22 nt, Human
cauugcacuccagccuaggcaa

SEQ ID NO: 17109 - RNA, 22 nt, Human
cauugcacuccagccuggguga

SEQ ID NO: 17110 - RNA, 24 nt, Human
cauugcacuccagccuggugacaa

SEQ ID NO: 17111 - RNA, 24 nt, Human
cauugcacuccaggccugggcaac

SEQ ID NO: 17112 - RNA, 22 nt, Human
cauugcacucuagccugggcaa

SEQ ID NO: 17113 - RNA, 24 nt, Human
cauugccuuauuucugcuagauca

SEQ ID NO: 17114 - RNA, 24 nt, Human
cauugcugaggccugggcucgccu

SEQ ID NO: 17115 - RNA, 22 nt, Human
cauuguaguaguuuguacaguc

SEQ ID NO: 17116 - RNA, 24 nt, Human
cauugugccucgauaguggcagcu

SEQ ID NO: 17117 - RNA, 22 nt, Human
cauuuagguuuuuagaaaggaa

SEQ ID NO: 17118 - RNA, 24 nt, Human
cauuucacuuucacugucugagau

SEQ ID NO: 17119 - RNA, 24 nt, Human
cauuuccucgcgagugacgcugga

SEQ ID NO: 17120 - RNA, 24 nt, Human
cauuucuucugcacaucuacuugc

SEQ ID NO: 17121 - RNA, 22 nt, Human
cauuucuuggcaauguggugcc

SEQ ID NO: 17122 - RNA, 24 nt, Human
cauuuuggguugccgugcucccaa

SEQ ID NO: 17123 - RNA, 22 nt, Human
ccaaagugcuaggauuacagcc

SEQ ID NO: 17124 - RNA, 22 nt, Human
ccaauaccccauggauaccaag

SEQ ID NO: 17125 - RNA, 24 nt, Human
ccaauguuaauuuaguuaacaacu

SEQ ID NO: 17126 - RNA, 24 nt, Human
ccacacagauucugcauggccccu

SEQ ID NO: 17127 - RNA, 24 nt, Human
ccacacaggcucauucucaacugg

SEQ ID NO: 17128 - RNA, 24 nt, Human
ccacagggcugcacuagcacagcc

SEQ ID NO: 17129 - RNA, 24 nt, Human
ccacauguaugaggacacauauaa

SEQ ID NO: 17130 - RNA, 22 nt, Human
ccacauuuguggggaagaucug

SEQ ID NO: 17131 - RNA, 22 nt, Human
ccacccuuccauucuuccucuu

SEQ ID NO: 17132 - RNA, 24 nt, Human
ccaccgagcucuggacgcugagga

SEQ ID NO: 17133 - RNA, 24 nt, Human
ccaccgggaccuggucagcacaga

SEQ ID NO: 17134 - RNA, 24 nt, Human
ccaccugggucuggacugcaugag

SEQ ID NO: 17135 - RNA, 24 nt, Human
ccacgcugucagcugaggugucaa

SEQ ID NO: 17136 - RNA, 22 nt, Human
ccacucaugugaaaauugauuu

SEQ ID NO: 17137 - RNA, 24 nt, Human
ccacugcacuccagccugggagac

SEQ ID NO: 17138 - RNA, 24 nt, Human
ccacugcacuccagccugggcaac

SEQ ID NO: 17139 - RNA, 24 nt, Human
ccacugcacucuagccugggggag

SEQ ID NO: 17140 - RNA, 24 nt, Human
ccacugcgcuccagccugggcaac

SEQ ID NO: 17141 - RNA, 24 nt, Human
ccacugcgcuucuggaaaccuacc

SEQ ID NO: 17142 - RNA, 24 nt, Human
ccacugcugcugcuccagcugagg

SEQ ID NO: 17143 - RNA, 22 nt, Human
ccagaagcuucuuugaaaggga

SEQ ID NO: 17144 - RNA, 22 nt, Human
ccagaauaccuguuuacucagu

SEQ ID NO: 17145 - RNA, 24 nt, Human
ccagaaugggacauggguucaucu

SEQ ID NO: 17146 - RNA, 22 nt, Human
ccagaauuuacagacaugaacg

SEQ ID NO: 17147 - RNA, 24 nt, Human
ccagaccauugucuuccaacccca

SEQ ID NO: 17148 - RNA, 24 nt, Human
ccagagcagguccaggugaguucu

SEQ ID NO: 17149 - RNA, 24 nt, Human
ccagcaaacaaaucaacgccuuga

SEQ ID NO: 17150 - RNA, 24 nt, Human
ccagcaaacucuucucuucccacu

SEQ ID NO: 17151 - RNA, 24 nt, Human
ccagcaagcaggaucgccgccgac

SEQ ID NO: 17152 - RNA, 24 nt, Human
ccagcacgucgaagcgcuccaugg

SEQ ID NO: 17153 - RNA, 24 nt, Human
ccagcacguucuagggaugggggc

SEQ ID NO: 17154 - RNA, 24 nt, Human
ccagccccggauaccuggacugcu

SEQ ID NO: 17155 - RNA, 20 nt, Human
ccagccgugaagccaaacug

SEQ ID NO: 17156 - RNA, 22 nt, Human
ccagccugagguuccuggaggg

SEQ ID NO: 17157 - RNA, 24 nt, Human
ccagcucguggagcagguccaccg

SEQ ID NO: 17158 - RNA, 24 nt, Human
ccaggccagguggagcucugcacg

SEQ ID NO: 17159 - RNA, 24 nt, Human
ccaggcugaagccuguuccugcgg

SEQ ID NO: 17160 - RNA, 22 nt, Human
ccaggcuggagugcaguggugc

SEQ ID NO: 17161 - RNA, 22 nt, Human
ccaggcuggagugcaguggugu

SEQ ID NO: 17162 - RNA, 22 nt, Human
ccaggcuguuuucaaacuuggg

SEQ ID NO: 17163 - RNA, 24 nt, Human
ccaggcuucccaaacagcuccaac

SEQ ID NO: 17164 - RNA, 22 nt, Human
ccagggaacacucauuucccua

SEQ ID NO: 17165 - RNA, 24 nt, Human
ccagggucaccagcaugaaugcuc

SEQ ID NO: 17166 - RNA, 22 nt, Human
ccagggucacccuccuuuagga

SEQ ID NO: 17167 - RNA, 22 nt, Human
ccaggugugaucucauccuuug

SEQ ID NO: 17168 - RNA, 24 nt, Human
ccaguagugaguucuugucggggg

SEQ ID NO: 17169 - RNA, 24 nt, Human
ccagucuugcaagguuaacuucuc

SEQ ID NO: 17170 - RNA, 24 nt, Human
ccagugcagucucuuggcaucucu

SEQ ID NO: 17171 - RNA, 22 nt, Human
ccauaucuuugcauccuucaau

SEQ ID NO: 17172 - RNA, 22 nt, Human
ccauccgaggcaagucuucuga

SEQ ID NO: 17173 - RNA, 24 nt, Human
ccauccguggggccaucauccugg

SEQ ID NO: 17174 - RNA, 22 nt, Human
ccaucugccaucauuacccuag

SEQ ID NO: 17175 - RNA, 24 nt, Human
ccaugccaucacugacaccagaag

SEQ ID NO: 17176 - RNA, 24 nt, Human
ccauugcugaaaaggucgaggccu

SEQ ID NO: 17177 - RNA, 22 nt, Human
ccauuugcuuuuuuggguuuac

SEQ ID NO: 17178 - RNA, 22 nt, Human
cccacacuuggaaucagccauu

SEQ ID NO: 17179 - RNA, 22 nt, Human
cccacauguauguguuuguuga

SEQ ID NO: 17180 - RNA, 22 nt, Human
cccagaccucaugacaucucau

SEQ ID NO: 17181 - RNA, 24 nt, Human
cccagagugguaacuggcagucuu

SEQ ID NO: 17182 - RNA, 22 nt, Human
cccagcugaccaagcaggccug

SEQ ID NO: 17183 - RNA, 24 nt, Human
cccaggaagcuacaagagacaggc

SEQ ID NO: 17184 - RNA, 22 nt, Human
cccaggaggcagagcuugcagu

SEQ ID NO: 17185 - RNA, 22 nt, Human
cccaggagguggagguuacagu

SEQ ID NO: 17186 - RNA, 22 nt, Human
cccaggcuggagugcaguggug

SEQ ID NO: 17187 - RNA, 21 nt, Human
cccauaguuccgcgcgugccc

SEQ ID NO: 17188 - RNA, 24 nt, Human
ccccacagcuccggaagugcuugg

SEQ ID NO: 17189 - RNA, 24 nt, Human
ccccagagcuaauuacauccacac

SEQ ID NO: 17190 - RNA, 24 nt, Human
ccccagaggguuucccaaguuggg

SEQ ID NO: 17191 - RNA, 24 nt, Human
ccccagaugggucagcuucggagg

SEQ ID NO: 17192 - RNA, 24 nt, Human
ccccagcucugcuggucccggggc

SEQ ID NO: 17193 - RNA, 24 nt, Human
ccccaguaccuccaagcaaguagc

SEQ ID NO: 17194 - RNA, 22 nt, Human
ccccaguucaauccgaccaugc

SEQ ID NO: 17195 - RNA, 24 nt, Human
ccccccaacagcuuccucagcuuc

SEQ ID NO: 17196 - RNA, 24 nt, Human
cccccgguccagagggccuuccca

SEQ ID NO: 17197 - RNA, 24 nt, Human
cccccuuugcaggcagucuuuuga

SEQ ID NO: 17198 - RNA, 24 nt, Human
ccccucgcuggugacugcugcgcc

SEQ ID NO: 17199 - RNA, 20 nt, Human
ccccugaggcgcagccgccu

SEQ ID NO: 17200 - RNA, 24 nt, Human
ccccugccacgugggccacuucag

SEQ ID NO: 17201 - RNA, 23 nt, Human
ccccugcgcugccagcuggagcc

SEQ ID NO: 17202 - RNA, 24 nt, Human
ccccuggggaacaggccgucgcgg

SEQ ID NO: 17203 - RNA, 24 nt, Human
ccccuggggcagcgaccagauccu

SEQ ID NO: 17204 - RNA, 24 nt, Human
ccccugggucuuaguuugcucauu

SEQ ID NO: 17205 - RNA, 24 nt, Human
ccccuggguucuuuggaauggucc

SEQ ID NO: 17206 - RNA, 24 nt, Human
ccccugguggcagcgaccagaucc

SEQ ID NO: 17207 - RNA, 24 nt, Human
ccccugucugucugcauuugucuc

SEQ ID NO: 17208 - RNA, 23 nt, Human
ccccuuguggccgucugcacugc

SEQ ID NO: 17209 - RNA, 24 nt, Human
ccccuuuggcaguggcugcccagu

SEQ ID NO: 17210 - RNA, 24 nt, Human
cccgccaguguccucagcugccuc

SEQ ID NO: 17211 - RNA, 22 nt, Human
cccggagguugaagcuacagug

SEQ ID NO: 17212 - RNA, 24 nt, Human
cccggcaggcuugggucgggagac

SEQ ID NO: 17213 - RNA, 22 nt, Human
cccgggaggcaaagguugcagu

SEQ ID NO: 17214 - RNA, 22 nt, Human
cccuccuucucgugucugcauu

SEQ ID NO: 17215 - RNA, 21 nt, Human
cccugaguucuagagcccuuu

SEQ ID NO: 17216 - RNA, 22 nt, Human
cccugggcugguguuugacuug

SEQ ID NO: 17217 - RNA, 24 nt, Human
cccugguaggcccauccuccccgu

SEQ ID NO: 17218 - RNA, 22 nt, Human
cccugguuacaggaagaaguuc

SEQ ID NO: 17219 - RNA, 22 nt, Human
cccuuggauaucgccaggauga

SEQ ID NO: 17220 - RNA, 22 nt, Human
cccuuuccauguacuggggguu

SEQ ID NO: 17221 - RNA, 22 nt, Human
ccgaaccacacgacagugcuca

SEQ ID NO: 17222 - RNA, 22 nt, Human
ccgagugguaacaugggagugu

SEQ ID NO: 17223 - RNA, 24 nt, Human
ccgcaauccuuccaacucucagcc

SEQ ID NO: 17224 - RNA, 24 nt, Human
ccgcacccgccgccucccgccccc

SEQ ID NO: 17225 - RNA, 24 nt, Human
ccgcagggcaucugccuccuggcu

SEQ ID NO: 17226 - RNA, 17 nt, Human
ccgccgccgccgccucg

SEQ ID NO: 17227 - RNA, 24 nt, Human
ccgccgccguuuccugauugguug

SEQ ID NO: 17228 - RNA, 22 nt, Human
ccgccgcgggcucguccuccuc

SEQ ID NO: 17229 - RNA, 24 nt, Human
ccgcgccgaccggcugcagccgca

SEQ ID NO: 17230 - RNA, 24 nt, Human
ccgcggccggcacauccucucggu

SEQ ID NO: 17231 - RNA, 24 nt, Human
ccgcguuguccgauguucaugagu

SEQ ID NO: 17232 - RNA, 24 nt, Human
ccgcuaaugaaagcugggcacugc

SEQ ID NO: 17233 - RNA, 24 nt, Human
ccgcucuuccuggcgugucaucuc

SEQ ID NO: 17234 - RNA, 24 nt, Human
ccgcuggggcuggaggcacgggcc

SEQ ID NO: 17235 - RNA, 24 nt, Human
ccgguccugggcugaagagauggg

SEQ ID NO: 17236 - RNA, 22 nt, Human
ccuacuuuucuggguccccagg

SEQ ID NO: 17237 - RNA, 22 nt, Human
ccuauguccccucaaccucauc

SEQ ID NO: 17238 - RNA, 24 nt, Human
ccucaaggcugccaucugucuugu

SEQ ID NO: 17239 - RNA, 24 nt, Human
ccucacagacggccaggagccagg

SEQ ID NO: 17240 - RNA, 24 nt, Human
ccucacagcugggggaggucagaa

SEQ ID NO: 17241 - RNA, 22 nt, Human
ccucagccuccagaauagcugg

SEQ ID NO: 17242 - RNA, 24 nt, Human
ccucaggaagaaaaccgcuggccc

SEQ ID NO: 17243 - RNA, 22 nt, Human
ccuccaaaugacagacaucauc

SEQ ID NO: 17244 - RNA, 24 nt, Human
ccuccagacaaaguuaacuccuau

SEQ ID NO: 17245 - RNA, 24 nt, Human
ccuccagcucggacaacuaggcgu

SEQ ID NO: 17246 - RNA, 24 nt, Human
ccuccagggacauugauuuucuca

SEQ ID NO: 17247 - RNA, 24 nt, Human
ccuccaugccuauguggugguaca

SEQ ID NO: 17248 - RNA, 24 nt, Human
ccucccagcugacagguccugccc

SEQ ID NO: 17249 - RNA, 24 nt, Human
ccucccgcaagaaaaugguguugu

SEQ ID NO: 17250 - RNA, 22 nt, Human
ccucccggagacuguuucuccc

SEQ ID NO: 17251 - RNA, 24 nt, Human
ccucccugaaccccuggcuuccag

SEQ ID NO: 17252 - RNA, 24 nt, Human
ccucccuucaccgccaccaccccc

SEQ ID NO: 17253 - RNA, 22 nt, Human
ccuccugucugcccuggcugau

SEQ ID NO: 17254 - RNA, 24 nt, Human
ccucgaccuccugggcuccagcgu

SEQ ID NO: 17255 - RNA, 24 nt, Human
ccucgguugggaccguuucucggc

SEQ ID NO: 17256 - RNA, 24 nt, Human
ccucuauccuuaucugucuggucg

SEQ ID NO: 17257 - RNA, 22 nt, Human
ccucuccauguacccauucccc

SEQ ID NO: 17258 - RNA, 24 nt, Human
ccucucugaccgguuggccaggga

SEQ ID NO: 17259 - RNA, 22 nt, Human
ccucugaucaucucccaugaga

SEQ ID NO: 17260 - RNA, 24 nt, Human
ccucugggagcccaacauggaucc

SEQ ID NO: 17261 - RNA, 23 nt, Human
ccucuggggugaagcugccucuu

SEQ ID NO: 17262 - RNA, 22 nt, Human
ccucuguaacuuuucuuggcag

SEQ ID NO: 17263 - RNA, 24 nt, Human
ccugaaguaucugaaaaauaugaa

SEQ ID NO: 17264 - RNA, 24 nt, Human
ccugaccucgugauccacccaccu

SEQ ID NO: 17265 - RNA, 24 nt, Human
ccugaccucgugauugaaauucug

SEQ ID NO: 17266 - RNA, 22 nt, Human
ccugagcucugggagcccacac

SEQ ID NO: 17267 - RNA, 24 nt, Human
ccugaggugaggggcaggccuggg

SEQ ID NO: 17268 - RNA, 22 nt, Human
ccugcaacaccauccugggaga

SEQ ID NO: 17269 - RNA, 24 nt, Human
ccugcacccacaagacucagagcc

SEQ ID NO: 17270 - RNA, 22 nt, Human
ccugcacccuggccugcagccu

SEQ ID NO: 17271 - RNA, 24 nt, Human
ccugcagauccucaucaaggucaa

SEQ ID NO: 17272 - RNA, 24 nt, Human
ccugcagccccggcgcugggcuuu

SEQ ID NO: 17273 - RNA, 24 nt, Human
ccugcaggccccugccccaccucc

SEQ ID NO: 17274 - RNA, 24 nt, Human
ccugcagggcucggccguaggaga

SEQ ID NO: 17275 - RNA, 24 nt, Human
ccugcagucccagcuacuuagaug

SEQ ID NO: 17276 - RNA, 24 nt, Human
ccugcagugcacgguuucuuccag

SEQ ID NO: 17277 - RNA, 24 nt, Human
ccugccacucuaugagcuuaagaa

SEQ ID NO: 17278 - RNA, 24 nt, Human
ccugccccaaggugaacgucguca

SEQ ID NO: 17279 - RNA, 24 nt, Human
ccugcgguuuguggucucuuccac

SEQ ID NO: 17280 - RNA, 22 nt, Human
ccuggagugacagguguagccu

SEQ ID NO: 17281 - RNA, 24 nt, Human
ccuggccaaaauggagaaagccug

SEQ ID NO: 17282 - RNA, 22 nt, Human
ccuggcccacccagguccccug

SEQ ID NO: 17283 - RNA, 24 nt, Human
ccuggcccugggcgccgcgccgac

SEQ ID NO: 17284 - RNA, 24 nt, Human
ccuggccuccauucagggagaaac

SEQ ID NO: 17285 - RNA, 22 nt, Human
ccuggcuaauuuuuguauuugu

SEQ ID NO: 17286 - RNA, 24 nt, Human
ccuggcugaaggccuuacucgagu

SEQ ID NO: 17287 - RNA, 22 nt, Human
ccuggcuuaggaagcucacaag

SEQ ID NO: 17288 - RNA, 23 nt, Human
ccuggcuucaggagggagcggag

SEQ ID NO: 17289 - RNA, 24 nt, Human
ccuggcuucaggagggagcggagc

SEQ ID NO: 17290 - RNA, 22 nt, Human
ccugggaagugcggguugcagu

SEQ ID NO: 17291 - RNA, 24 nt, Human
ccugggcucaagcaauccacccac

SEQ ID NO: 17292 - RNA, 24 nt, Human
ccugggguucuuaggagugaggag

SEQ ID NO: 17293 - RNA, 22 nt, Human
ccuguaaucccagcuacucggg

SEQ ID NO: 17294 - RNA, 24 nt, Human
ccugucaccccaccauggagaaaa

SEQ ID NO: 17295 - RNA, 22 nt, Human
ccugucucuggacuccugcaca

SEQ ID NO: 17296 - RNA, 24 nt, Human
ccuuacggaugccgaacuggcccg

SEQ ID NO: 17297 - RNA, 24 nt, Human
ccuucaggaaguucaggcuuuugu

SEQ ID NO: 17298 - RNA, 22 nt, Human
ccuucccucaaaggcugcugag

SEQ ID NO: 17299 - RNA, 24 nt, Human
ccuugcagcgguugcgccgagacc

SEQ ID NO: 17300 - RNA, 24 nt, Human
ccuugcugguggcuuugggggccc

SEQ ID NO: 17301 - RNA, 24 nt, Human
ccuuggaccacagccuuccagaca

SEQ ID NO: 17302 - RNA, 24 nt, Human
ccuuggguagacaaaauccaacau

SEQ ID NO: 17303 - RNA, 24 nt, Human
ccuuucagcuaacauucauggaug

SEQ ID NO: 17304 - RNA, 20 nt, Human
cgacgagaagcuguguaucc

SEQ ID NO: 17305 - RNA, 24 nt, Human
cgacgggaacaugcccuaugaccu

SEQ ID NO: 17306 - RNA, 23 nt, Human
cgacugacuccagccugggugac

SEQ ID NO: 17307 - RNA, 24 nt, Human
cgagacagcggcgagagaagggag

SEQ ID NO: 17308 - RNA, 23 nt, Human
cgagcacacgggcuacacggggc

SEQ ID NO: 17309 - RNA, 24 nt, Human
cgagccgaaccgagauuuggaagg

SEQ ID NO: 17310 - RNA, 24 nt, Human
cgaggcccuggagcaggccaucau

SEQ ID NO: 17311 - RNA, 24 nt, Human
cgaggccuccgcgcucuacggccg

SEQ ID NO: 17312 - RNA, 24 nt, Human
cgaggcugcuccuguggaaguggc

SEQ ID NO: 17313 - RNA, 24 nt, Human
cgagggaccuggcacguacauccc

SEQ ID NO: 17314 - RNA, 24 nt, Human
cgaggggaccugcacauucagucc

SEQ ID NO: 17315 - RNA, 24 nt, Human
cgaguacaggcacagugccacgac

SEQ ID NO: 17316 - RNA, 22 nt, Human
cgcaaccuucucacacuacaaa

SEQ ID NO: 17317 - RNA, 24 nt, Human
cgccaggguagcgguguagcugcg

SEQ ID NO: 17318 - RNA, 24 nt, Human
cgccauagccccuuggauucccuc

SEQ ID NO: 17319 - RNA, 24 nt, Human
cgccggagcucccacccucuucag

SEQ ID NO: 17320 - RNA, 22 nt, Human
cgccgggucgcgaugugacauu

SEQ ID NO: 17321 - RNA, 24 nt, Human
cgccguggagcaggggguggcgcu

SEQ ID NO: 17322 - RNA, 24 nt, Human
cgccguggagcugcagugcuggug

SEQ ID NO: 17323 - RNA, 22 nt, Human
cgccucaggccauaccugggcu

SEQ ID NO: 17324 - RNA, 24 nt, Human
cgcgaagaggcuggacucggauuc

SEQ ID NO: 17325 - RNA, 24 nt, Human
cgcgcggacuggacgccacgccgc

SEQ ID NO: 17326 - RNA, 24 nt, Human
cggaaugaaauaugacugaggacu

SEQ ID NO: 17327 - RNA, 22 nt, Human
cggauccuggacucaugcaucu

SEQ ID NO: 17328 - RNA, 22 nt, Human
cggaucguccuuacagcuguag

SEQ ID NO: 17329 - RNA, 24 nt, Human
cggcacgggcagacaacgcgagcc

SEQ ID NO: 17330 - RNA, 24 nt, Human
cggcagagaaguguggcuaagggg

SEQ ID NO: 17331 - RNA, 21 nt, Human
cggcagcggcggcgcgaggag

SEQ ID NO: 17332 - RNA, 24 nt, Human
cggcaucaucauggcaauugucau

SEQ ID NO: 17333 - RNA, 24 nt, Human
cggcaucucccaggcucuucugga

SEQ ID NO: 17334 - RNA, 24 nt, Human
cggcaugggcugcaggagccgcgg

SEQ ID NO: 17335 - RNA, 24 nt, Human
cggcauuaggggcucggcgccccc

SEQ ID NO: 17336 - RNA, 24 nt, Human
cggcccgggacugguggaucuccc

SEQ ID NO: 17337 - RNA, 24 nt, Human
cggccgggccggguuggggggcug

SEQ ID NO: 17338 - RNA, 24 nt, Human
cggcgcucuagaggcagagggagg

SEQ ID NO: 17339 - RNA, 24 nt, Human
cggcguguccucccugcagcgcgg

SEQ ID NO: 17340 - RNA, 24 nt, Human
cgggagaaaauccaccauaauaaa

SEQ ID NO: 17341 - RNA, 24 nt, Human
cgggagggcaaggucgagccguug

SEQ ID NO: 17342 - RNA, 24 nt, Human
cgggaucggagucuccucugcugg

SEQ ID NO: 17343 - RNA, 24 nt, Human
cgggcaccaagacugugccggaca

SEQ ID NO: 17344 - RNA, 24 nt, Human
cgggcgcgggcgcuagacgccucg

SEQ ID NO: 17345 - RNA, 24 nt, Human
cgggcuguacgacgaccgugggcg

SEQ ID NO: 17346 - RNA, 24 nt, Human
cggggcccagccuugguccccagc

SEQ ID NO: 17347 - RNA, 24 nt, Human
cggggcugcaggcggcgcagagca

SEQ ID NO: 17348 - RNA, 22 nt, Human
cggguccaggaaucaagggaua

SEQ ID NO: 17349 - RNA, 22 nt, Human
cggguccuauacuucagcaucu

SEQ ID NO: 17350 - RNA, 24 nt, Human
cgguauggagagcggcacacgccg

SEQ ID NO: 17351 - RNA, 24 nt, Human
cgguuuguccacaacuuccagagc

SEQ ID NO: 17352 - RNA, 24 nt, Human
cguaaaccacaaaagaguagcauu

SEQ ID NO: 17353 - RNA, 20 nt, Human
cgucaagggggacgagugcc

SEQ ID NO: 17354 - RNA, 24 nt, Human
cguccuggaggcugccagcguccu

SEQ ID NO: 17355 - RNA, 24 nt, Human
cgucuauaucaccuugaagaagua

SEQ ID NO: 17356 - RNA, 24 nt, Human
cgugaagacauaccagcucaacag

SEQ ID NO: 17357 - RNA, 24 nt, Human
cgugcaggcgcugaagcgcgcggg

SEQ ID NO: 17358 - RNA, 24 nt, Human
cgugcaucuuggucucaaugucga

SEQ ID NO: 17359 - RNA, 22 nt, Human
cgugcugcuaugagaaucuaau

SEQ ID NO: 17360 - RNA, 24 nt, Human
cguggagugggagagcagcgggca

SEQ ID NO: 17361 - RNA, 24 nt, Human
cguggcggaagaugcguuuggcuc

SEQ ID NO: 17362 - RNA, 20 nt, Human
cgugguggugcacgccugua

SEQ ID NO: 17363 - RNA, 24 nt, Human
cgugguguccuaccccuucgacac

SEQ ID NO: 17364 - RNA, 24 nt, Human
cgugguugccaucgugcuauagau

SEQ ID NO: 17365 - RNA, 22 nt, Human
cguguaaucccagcuacuuggg

SEQ ID NO: 17366 - RNA, 24 nt, Human
cguguagaaacaacgcgcagcacg

SEQ ID NO: 17367 - RNA, 22 nt, Human
cgugucuaaccuggacugcgug

SEQ ID NO: 17368 - RNA, 22 nt, Human
cuaauuuugguauuuuuaguag

SEQ ID NO: 17369 - RNA, 22 nt, Human
cuaauuuuuguauuuuuaauag

SEQ ID NO: 17370 - RNA, 21 nt, Human
aaaaaagcaauaauccuacuc

SEQ ID NO: 17371 - RNA, 22 nt, Human
aaaaaagcucaaaacaguguua

SEQ ID NO: 17372 - RNA, 25 nt, Human
aaaaaaguuuggaacccuggucccu

SEQ ID NO: 17373 - RNA, 19 nt, Human
aaaaaaucaaagcucuccu

SEQ ID NO: 17374 - RNA, 21 nt, Human
aaaaaaugggagugggccggg

SEQ ID NO: 17375 - RNA, 22 nt, Human
aaaaaauugcaggauuuauaca

SEQ ID NO: 17376 - RNA, 32 nt, Human
aaaaacaaaaacaagccccagaaucagugggu

SEQ ID NO: 17377 - RNA, 32 nt, Human
aaaaacaaaacaaaacaaaacaaaugacagua

SEQ ID NO: 17378 - RNA, 32 nt, Human
aaaaacaaaacaaaacaaacacauuguuuuuc

SEQ ID NO: 17379 - RNA, 32 nt, Human
aaaaacaaaacaacuacauuguuucauugcuc

SEQ ID NO: 17380 - RNA, 32 nt, Human
aaaaacaaaacacacaccacacacacgcgcuu

SEQ ID NO: 17381 - RNA, 32 nt, Human
aaaaacaaaagacaugguacgcauuccagggc

SEQ ID NO: 17382 - RNA, 32 nt, Human
aaaaacaaaaucugacauauacauacauacag

SEQ ID NO: 17383 - RNA, 32 nt, Human
aaaaacaaaccccaaccuucucuccuugccac

SEQ ID NO: 17384 - RNA, 32 nt, Human
aaaaacaaaccugaaaacugcuuggcauuuga

SEQ ID NO: 17385 - RNA, 21 nt, Human
aaaaacaaaugaauacaggaa

SEQ ID NO: 17386 - RNA, 32 nt, Human
aaaaacaaauuagcugggcgugguggcgggcg

SEQ ID NO: 17387 - RNA, 32 nt, Human
aaaaacaacacaggcugggcgcgguggcucac

SEQ ID NO: 17388 - RNA, 26 nt, Human
aaaaacaacauacaagaccacaggaa

SEQ ID NO: 17389 - RNA, 32 nt, Human
aaaaacaaccagccaggauuaaagguauuaua

SEQ ID NO: 17390 - RNA, 32 nt, Human
aaaaacaagaacagccaaggguuguucgccag

SEQ ID NO: 17391 - RNA, 32 nt, Human
aaaaacaagaggaggggccaggcgagguggcu

SEQ ID NO: 17392 - RNA, 32 nt, Human
aaaaacaaggcucagaaagaauggaaagaaag

SEQ ID NO: 17393 - RNA, 32 nt, Human
aaaaacaaucacacccuuaaccuuuaagccag

SEQ ID NO: 17394 - RNA, 32 nt, Human
aaaaacaaucugacaguagcaguguagaauuu

SEQ ID NO: 17395 - RNA, 32 nt, Human
aaaaacacaaauuagccaggcguggugguaca

SEQ ID NO: 17396 - RNA, 32 nt, Human
aaaaacacagaagcaaaagcuaugaugcauua

SEQ ID NO: 17397 - RNA, 32 nt, Human
aaaaacacauaaacaaauaguuucaguagguc

SEQ ID NO: 17398 - RNA, 32 nt, Human
aaaaacacccagcugggugcaguggcucgcac

SEQ ID NO: 17399 - RNA, 32 nt, Human
aaaaacacccuugucauguauuuucuguaugu

SEQ ID NO: 17400 - RNA, 32 nt, Human
aaaaacacuacaaauguagagaauguggccaa

SEQ ID NO: 17401 - RNA, 32 nt, Human
aaaaacacuauuaccuguuucuagucacuuua

SEQ ID NO: 17402 - RNA, 32 nt, Human
aaaaacacuggacacaaggcuugggugaacag

SEQ ID NO: 17403 - RNA, 32 nt, Human
aaaaacacuuaaggagcuaaacuuaccuucgg

SEQ ID NO: 17404 - RNA, 32 nt, Human
aaaaacacuuuucuaaggacugaagauuggca

SEQ ID NO: 17405 - RNA, 32 nt, Human
aaaaacagaaagagcaucuggggagcgaguga

SEQ ID NO: 17406 - RNA, 32 nt, Human
aaaaacagaauccagucuugacaacauaucca

SEQ ID NO: 17407 - RNA, 23 nt, Human
aaaaacagacacccagcugccga

SEQ ID NO: 17408 - RNA, 32 nt, Human
aaaaacagacuugccugcaauagccagcagua

SEQ ID NO: 17409 - RNA, 32 nt, Human
aaaaacagagccucucuguagagaugcuuaaa

SEQ ID NO: 17410 - RNA, 32 nt, Human
aaaaacagauggagaauaaugucuacaugcaa

SEQ ID NO: 17411 - RNA, 32 nt, Human
aaaaacagcagaacuucugaaaccucuggguc

SEQ ID NO: 17412 - RNA, 32 nt, Human
aaaaacagcagggcuggacggauguugggagu

SEQ ID NO: 17413 - RNA, 32 nt, Human
aaaaacagccaacauccccugugaauugcagu

SEQ ID NO: 17414 - RNA, 32 nt, Human
aaaaacagccuaugauaguuugaaucccccuc

SEQ ID NO: 17415 - RNA, 32 nt, Human
aaaaacagcgccaaagcagucagcauuggaag

SEQ ID NO: 17416 - RNA, 32 nt, Human
aaaaacagcuucaucucugccucucuccaccc

SEQ ID NO: 17417 - RNA, 32 nt, Human
aaaaacaggaaaauaguuguuccaauauauaa

SEQ ID NO: 17418 - RNA, 32 nt, Human
aaaaacaggcagcugguuugcuguggugguuu

SEQ ID NO: 17419 - RNA, 32 nt, Human
aaaaacaggcuggcgugguggcucacaccugu

SEQ ID NO: 17420 - RNA, 32 nt, Human
aaaaacaggcugggcgugguggcucacaccug

SEQ ID NO: 17421 - RNA, 32 nt, Human
aaaaacagggaacuuuguaacugugaaauacu

SEQ ID NO: 17422 - RNA, 32 nt, Human
aaaaacagguggaagagggaaggguccaauua

SEQ ID NO: 17423 - RNA, 32 nt, Human
aaaaacauaagaauuguuucgccaaaugaaug

SEQ ID NO: 17424 - RNA, 32 nt, Human
aaaaacauaugcaaaucucaguguucucacua

SEQ ID NO: 17425 - RNA, 32 nt, Human
aaaaacaucaugggaaaaaugcuuagagguua

SEQ ID NO: 17426 - RNA, 32 nt, Human
aaaaacaucuggaagaaaaugacuaaaacugu

SEQ ID NO: 17427 - RNA, 32 nt, Human
aaaaacaucuggauaucaagguggaaauggcc

SEQ ID NO: 17428 - RNA, 32 nt, Human
aaaaacauguacagucucauaacacauacuuu

SEQ ID NO: 17429 - RNA, 21 nt, Human
aaaaacauguacugagaugaa

SEQ ID NO: 17430 - RNA, 32 nt, Human
aaaaacauguacugagaugaaucuaauuuuua

SEQ ID NO: 17431 - RNA, 31 nt, Human
aaaaacaugucugcuucucauuuaaauaaga

SEQ ID NO: 17432 - RNA, 32 nt, Human
aaaaacauuacuucgccuccccaaaccaaucc

SEQ ID NO: 17433 - RNA, 32 nt, Human
aaaaacauugaugcgcuggcuuggggauuuga

SEQ ID NO: 17434 - RNA, 32 nt, Human
aaaaacauugcugccgccuacuucuuccagcu

SEQ ID NO: 17435 - RNA, 32 nt, Human
aaaaacauugugugaauauauguuuguaugug

SEQ ID NO: 17436 - RNA, 32 nt, Human
aaaaaccaaccaaccaaccaaccaaccaacaa

SEQ ID NO: 17437 - RNA, 32 nt, Human
aaaaaccaacgccaccaugucggagaccagca

SEQ ID NO: 17438 - RNA, 32 nt, Human
aaaaaccaacugcugggaaacugugaaaagcc

SEQ ID NO: 17439 - RNA, 32 nt, Human
aaaaaccaagcagcaaagugcaguggcauguc

SEQ ID NO: 17440 - RNA, 25 nt, Human
aaaaaccaaucagaaaacacaggaa

SEQ ID NO: 17441 - RNA, 32 nt, Human
aaaaaccaaugacaaccaaacugaaaccgaaa

SEQ ID NO: 17442 - RNA, 32 nt, Human
aaaaaccaccacccuccagccugggcaacgua

SEQ ID NO: 17443 - RNA, 32 nt, Human
aaaaaccacucccaguccccagcccuucacau

SEQ ID NO: 17444 - RNA, 31 nt, Human
aaaaaccagagaguugggcuggagagaaaag

SEQ ID NO: 17445 - RNA, 32 nt, Human
aaaaaccagagucacugacagagggaacagca

SEQ ID NO: 17446 - RNA, 32 nt, Human
aaaaaccagagucacugacagagggaacugca

SEQ ID NO: 17447 - RNA, 32 nt, Human
aaaaaccagcuccuagauucacugaucuuuuu

SEQ ID NO: 17448 - RNA, 32 nt, Human
aaaaaccaggagugaaaaaggaaaguagaagg

SEQ ID NO: 17449 - RNA, 32 nt, Human
aaaaaccaguccucucuaaucucaggugggac

SEQ ID NO: 17450 - RNA, 32 nt, Human
aaaaaccagugaaauucuacaagugucccuuu

SEQ ID NO: 17451 - RNA, 32 nt, Human
aaaaaccauaaaaucacuggguuccacaucag

SEQ ID NO: 17452 - RNA, 32 nt, Human
aaaaaccaugggaaggugggaaagcagagaaa

SEQ ID NO: 17453 - RNA, 32 nt, Human
aaaaacccaacucuuuguggauuuuuaucaac

SEQ ID NO: 17454 - RNA, 32 nt, Human
aaaaaccccaccauucagccuagucaacaaca

SEQ ID NO: 17455 - RNA, 32 nt, Human
aaaaaccccuaaauuacagaauuggaauuugu

SEQ ID NO: 17456 - RNA, 32 nt, Human
aaaaaccccucacuuaaaaauggcagucucaa

SEQ ID NO: 17457 - RNA, 32 nt, Human
aaaaacccuagacucagccagacucuggcaga

SEQ ID NO: 17458 - RNA, 32 nt, Human
aaaaaccuacagcugcuuagguccagcuucuu

SEQ ID NO: 17459 - RNA, 32 nt, Human
aaaaaccugaguaucauugcaugaauuuuuau

SEQ ID NO: 17460 - RNA, 32 nt, Human
aaaaaccugcagggcuagaguuuggggugaga

SEQ ID NO: 17461 - RNA, 23 nt, Human
aaaaaccugccucuugucugccu

SEQ ID NO: 17462 - RNA, 32 nt, Human
aaaaaccugccugccugguugggccuucagcu

SEQ ID NO: 17463 - RNA, 32 nt, Human
aaaaaccugcucaucguucagcuuccaaaauu

SEQ ID NO: 17464 - RNA, 32 nt, Human
aaaaaccuguggacauaaugaauuuugagaca

SEQ ID NO: 17465 - RNA, 32 nt, Human
aaaaaccuguucugcuauuccugggcccacaa

SEQ ID NO: 17466 - RNA, 32 nt, Human
aaaaaccuuaccaccaaacauaccaaaaugca

SEQ ID NO: 17467 - RNA, 32 nt, Human
aaaaaccuucaggccacaaagcaaaaaguugc

SEQ ID NO: 17468 - RNA, 32 nt, Human
aaaaaccuucagucgaaguacacaccuuacug

SEQ ID NO: 17469 - RNA, 32 nt, Human
aaaaaccuuguccuggcuucagcuuccaacua

SEQ ID NO: 17470 - RNA, 32 nt, Human
aaaaacgaagccagccuggaccauacacugcc

SEQ ID NO: 17471 - RNA, 32 nt, Human
aaaaacgacaacaagcuucuucccagggugag

SEQ ID NO: 17472 - RNA, 32 nt, Human
aaaaacgacuccugaccuuucccagccuccuc

SEQ ID NO: 17473 - RNA, 32 nt, Human
aaaaacgaggacuccuuaauucugcuagaguu

SEQ ID NO: 17474 - RNA, 32 nt, Human
aaaaacgaggccucugcaagccacuuuuccau

SEQ ID NO: 17475 - RNA, 32 nt, Human
aaaaacgauaccuucaaaguuugcggccuaga

SEQ ID NO: 17476 - RNA, 32 nt, Human
aaaaacgcacagaaaaauuagccaggcauggu

SEQ ID NO: 17477 - RNA, 32 nt, Human
aaaaacgggguuucaccguguuagccaggaug

SEQ ID NO: 17478 - RNA, 32 nt, Human
aaaaacguagcuaccguacacacacaucaauc

SEQ ID NO: 17479 - RNA, 32 nt, Human
aaaaacguguaaaccugugagccaccccaagc

SEQ ID NO: 17480 - RNA, 32 nt, Human
aaaaacuaaauggugcuuuauauuuagauugg

SEQ ID NO: 17481 - RNA, 24 nt, Human
aaaaacuaacugaaagcacaugaa

SEQ ID NO: 17482 - RNA, 32 nt, Human
aaaaacuaccucaagagaccuggcccuguuaa

SEQ ID NO: 17483 - RNA, 32 nt, Human
aaaaacuagcacccuucuguccacucagcaau

SEQ ID NO: 17484 - RNA, 32 nt, Human
aaaaacuagguuuaaggagaugagcuacuguu

SEQ ID NO: 17485 - RNA, 32 nt, Human
aaaaacucaacucaaaacucagucucaaaaau

SEQ ID NO: 17486 - RNA, 32 nt, Human
aaaaacucaccaggaagcuccauuuuguguca

SEQ ID NO: 17487 - RNA, 32 nt, Human
aaaaacucaguuuucggcugggcacaguggcu

SEQ ID NO: 17488 - RNA, 32 nt, Human
aaaaacucauagaagauaucauguaggcccug

SEQ ID NO: 17489 - RNA, 32 nt, Human
aaaaacucccuggauuaggcaagagaaaagga

SEQ ID NO: 17490 - RNA, 32 nt, Human
aaaaacuccuuugaccaggugguuuugccuuc

SEQ ID NO: 17491 - RNA, 32 nt, Human
aaaaacucugacuauucccauuucucaguuua

SEQ ID NO: 17492 - RNA, 32 nt, Human
aaaaacucuucuacuuucaucuauucuuuccc

SEQ ID NO: 17493 - RNA, 32 nt, Human
aaaaacucuugccucugcuuucccccacucug

SEQ ID NO: 17494 - RNA, 32 nt, Human
aaaaacugaaaaaucugguucauucuucagau

SEQ ID NO: 17495 - RNA, 32 nt, Human
aaaaacugaaaaccuuugguccugggaauuua

SEQ ID NO: 17496 - RNA, 32 nt, Human
aaaaacugaauacaagauaccaaaaaugaaaa

SEQ ID NO: 17497 - RNA, 32 nt, Human
aaaaacugacuuucuguugucuaccucaggcc

SEQ ID NO: 17498 - RNA, 32 nt, Human
aaaaacugaggaagcugagcuggagaaggaag

SEQ ID NO: 17499 - RNA, 32 nt, Human
aaaaacugaucugcuuagaauguggcccuggu

SEQ ID NO: 17500 - RNA, 32 nt, Human
aaaaacugaucuuaagagcagacuuaaaguag

SEQ ID NO: 17501 - RNA, 32 nt, Human
aaaaacugauguuuaaaaguccacuuuuaaaa

SEQ ID NO: 17502 - RNA, 32 nt, Human
aaaaacugcauuggcugggugcaguggcucau

SEQ ID NO: 17503 - RNA, 31 nt, Human
aaaaacugccucuguuguguuucucacugga

SEQ ID NO: 17504 - RNA, 32 nt, Human
aaaaacuggaagccuucccccagcaaggcaga

SEQ ID NO: 17505 - RNA, 32 nt, Human
aaaaacuggagaaauaggaauuugugaacccc

SEQ ID NO: 17506 - RNA, 25 nt, Human
aaaaacuggaguucugcuuccuuga

SEQ ID NO: 17507 - RNA, 32 nt, Human
aaaaacuggcugcuaacuggccugagccaggc

SEQ ID NO: 17508 - RNA, 32 nt, Human
aaaaacuguaaaaccacacacuuugauauuug

SEQ ID NO: 17509 - RNA, 32 nt, Human
aaaaacugugaaugacaaaaucuggcaggaac

SEQ ID NO: 17510 - RNA, 32 nt, Human
aaaaacuguuuggaagaguagcguugagguuu

SEQ ID NO: 17511 - RNA, 32 nt, Human
aaaaacuguuuguguaccagcaccuguaaucc

SEQ ID NO: 17512 - RNA, 32 nt, Human
aaaaacuuagcugagugugguggugcaugccu

SEQ ID NO: 17513 - RNA, 32 nt, Human
aaaaacuuagugaaaauguauuagcacgauua

SEQ ID NO: 17514 - RNA, 32 nt, Human
aaaaacuucaucagaaauuaaauuuaaugcaa

SEQ ID NO: 17515 - RNA, 32 nt, Human
aaaaacuuccuuuacagagguucggacuaaca

SEQ ID NO: 17516 - RNA, 32 nt, Human
aaaaacuucggaggcagagcaagguuuggugu

SEQ ID NO: 17517 - RNA, 32 nt, Human
aaaaacuugaaucguucacauuucucagcucu

SEQ ID NO: 17518 - RNA, 32 nt, Human
aaaaacuugaggaggauaaaaauauguuggaa

SEQ ID NO: 17519 - RNA, 32 nt, Human
aaaaacuugucuucccuucugauuguggugcu

SEQ ID NO: 17520 - RNA, 32 nt, Human
aaaaacuuuaugccucacccuggcacaguagc

SEQ ID NO: 17521 - RNA, 32 nt, Human
aaaaacuuucuuccucucucuccaagaggaua

SEQ ID NO: 17522 - RNA, 32 nt, Human
aaaaagaaaaacacaaacauucaaagcuuagg

SEQ ID NO: 17523 - RNA, 32 nt, Human
aaaaagaaaacacacacccacccacacacaca

SEQ ID NO: 17524 - RNA, 32 nt, Human
aaaaagaaaacauaggacauuuuauucagaaa

SEQ ID NO: 17525 - RNA, 32 nt, Human
aaaaagaaaagacuccuaugaagaacuguuuu

SEQ ID NO: 17526 - RNA, 32 nt, Human
aaaaagaaaaggaugagaagauccucagugaa

SEQ ID NO: 17527 - RNA, 32 nt, Human
aaaaagaaaaugcagacagaaugugggacugg

SEQ ID NO: 17528 - RNA, 32 nt, Human
aaaaagaaaaugucagaggaauuugaagccaa

SEQ ID NO: 17529 - RNA, 21 nt, Human
aaaaagaaacaaaguuauggg

SEQ ID NO: 17530 - RNA, 21 nt, Human
aaaaagaaacaacuuguagga

SEQ ID NO: 17531 - RNA, 32 nt, Human
aaaaagaaagaaaggaaaagauuucauaagca

SEQ ID NO: 17532 - RNA, 32 nt, Human
aaaaagaaagaaugagucuucagaugaaauau

SEQ ID NO: 17533 - RNA, 23 nt, Human
aaaaagaaagagagagggccggg

SEQ ID NO: 17534 - RNA, 32 nt, Human
aaaaagaaagccaaaccacuguacuuauauuu

SEQ ID NO: 17535 - RNA, 32 nt, Human
aaaaagaaagugagacacugggcagaaaacag

SEQ ID NO: 17536 - RNA, 32 nt, Human
aaaaagaaaguugcagaacagacauauuuuug

SEQ ID NO: 17537 - RNA, 32 nt, Human
aaaaagaaaugcugcauuuucaguucuauuga

SEQ ID NO: 17538 - RNA, 32 nt, Human
aaaaagaacaagccccaagcugugcauuuaca

SEQ ID NO: 17539 - RNA, 32 nt, Human
aaaaagaacucaaccuguuucucuugaguaac

SEQ ID NO: 17540 - RNA, 32 nt, Human
aaaaagaagaaacccaggcagacaggcaguug

SEQ ID NO: 17541 - RNA, 32 nt, Human
aaaaagaagaaacugacuuguacuggaucauc

SEQ ID NO: 17542 - RNA, 32 nt, Human
aaaaagaagaagagaagcugaagcauugcucc

SEQ ID NO: 17543 - RNA, 32 nt, Human
aaaaagaagagaagagaaagaagaaacaaugc

SEQ ID NO: 17544 - RNA, 32 nt, Human
aaaaagaagauaaggaaauggaagcuacagac

SEQ ID NO: 17545 - RNA, 32 nt, Human
aaaaagaagcagcacgagucuccauacaucau

SEQ ID NO: 17546 - RNA, 32 nt, Human
aaaaagaagcuagggcugggcgcgguggcuca

SEQ ID NO: 17547 - RNA, 32 nt, Human
aaaaagaaggcugggugcaguggcucuugccu

SEQ ID NO: 17548 - RNA, 32 nt, Human
aaaaagaagguagaguagaggccuauugccac

SEQ ID NO: 17549 - RNA, 32 nt, Human
aaaaagaaguagagacagggagacagggucuc

SEQ ID NO: 17550 - RNA, 32 nt, Human
aaaaagaaguauuuccagaaucucauauaaaa

SEQ ID NO: 17551 - RNA, 32 nt, Human
aaaaagaaugagcguuuggugaaauucuuaau

SEQ ID NO: 17552 - RNA, 32 nt, Human
aaaaagacaccaggaggcaggcugcgggguag

SEQ ID NO: 17553 - RNA, 32 nt, Human
aaaaagacacggcgcuggcaagugauaggaac

SEQ ID NO: 17554 - RNA, 32 nt, Human
aaaaagacagggccagguuaggcuugggugag

SEQ ID NO: 17555 - RNA, 32 nt, Human
aaaaagacaguauuuugccaaauuaaacagaa

SEQ ID NO: 17556 - RNA, 32 nt, Human
aaaaagaccaaaacacacuucuccagcaacac

SEQ ID NO: 17557 - RNA, 32 nt, Human
aaaaagaccagccuucccaacaugccuccugc

SEQ ID NO: 17558 - RNA, 32 nt, Human
aaaaagacccccagcaauaaaaagugggucac

SEQ ID NO: 17559 - RNA, 32 nt, Human
aaaaagacucacugacauccugacaucucagg

SEQ ID NO: 17560 - RNA, 32 nt, Human
aaaaagacugagggagcaacaauguggaaagg

SEQ ID NO: 17561 - RNA, 32 nt, Human
aaaaagacugauuuuuaaaguauggcauuuuu

SEQ ID NO: 17562 - RNA, 32 nt, Human
aaaaagacuguacugcaguguaguaauggaau

SEQ ID NO: 17563 - RNA, 32 nt, Human
aaaaagacuguuauccugcuacacacuccugu

SEQ ID NO: 17564 - RNA, 32 nt, Human
aaaaagagaacagcagcuuucuagggacagcu

SEQ ID NO: 17565 - RNA, 32 nt, Human
aaaaagagaagaggaaauaaaccagacagugc

SEQ ID NO: 17566 - RNA, 32 nt, Human
aaaaagagaagcaagccagacaugguggcuca

SEQ ID NO: 17567 - RNA, 32 nt, Human
aaaaagagaaggaagaaagaaaagaaauaaga

SEQ ID NO: 17568 - RNA, 32 nt, Human
aaaaagagaauagucaagaaaaagaggaaaua

SEQ ID NO: 17569 - RNA, 32 nt, Human
aaaaagagacagcaacuggcccagggucacca

SEQ ID NO: 17570 - RNA, 32 nt, Human
aaaaagagacauauaugauauugcuguuauau

SEQ ID NO: 17571 - RNA, 32 nt, Human
aaaaagagagggagguauggacugggggccag

SEQ ID NO: 17572 - RNA, 32 nt, Human
aaaaagagauaugacaagggaaauuaaucagg

SEQ ID NO: 17573 - RNA, 32 nt, Human
aaaaagagauggguuuucgccauguugcccag

SEQ ID NO: 17574 - RNA, 32 nt, Human
aaaaagagcagaaggaaggaagaaggaaggac

SEQ ID NO: 17575 - RNA, 32 nt, Human
aaaaagagcuggcuggccuaaaaaccuaaaua

SEQ ID NO: 17576 - RNA, 32 nt, Human
aaaaagagcuucaggccaggcgugguggcuca

SEQ ID NO: 17577 - RNA, 32 nt, Human
aaaaagagcuucgacuucucucuuggguggag

SEQ ID NO: 17578 - RNA, 32 nt, Human
aaaaagaggagagagauagaggaaggugaauu

SEQ ID NO: 17579 - RNA, 32 nt, Human
aaaaagaggagagaggcuuucgguggacacgu

SEQ ID NO: 17580 - RNA, 31 nt, Human
aaaaagaggagggggcauaaagacuggauaa

SEQ ID NO: 17581 - RNA, 32 nt, Human
aaaaagaggagggggcauaaagacuggauaaa

SEQ ID NO: 17582 - RNA, 32 nt, Human
aaaaagaggcaaauucagauuuggaaacaggg

SEQ ID NO: 17583 - RNA, 32 nt, Human
aaaaagaggcugaggaaggagaggaugacaga

SEQ ID NO: 17584 - RNA, 32 nt, Human
aaaaagagucauacauauuccauuuguccuuu

SEQ ID NO: 17585 - RNA, 32 nt, Human
aaaaagaguuuucuuuaguauagccacaaaug

SEQ ID NO: 17586 - RNA, 32 nt, Human
aaaaagaucaguaauaucaaagagcaccugga

SEQ ID NO: 17587 - RNA, 32 nt, Human
aaaaagaucuccagcuccacacauguuuccac

SEQ ID NO: 17588 - RNA, 32 nt, Human
aaaaagaucucugccucucuucucucugccuc

SEQ ID NO: 17589 - RNA, 32 nt, Human
aaaaagaugcucagauauuaugugucaaggau

SEQ ID NO: 17590 - RNA, 31 nt, Human
aaaaagaugcuggggagcagagcuguaaugc

SEQ ID NO: 17591 - RNA, 31 nt, Human
aaaaagauguucucugggaccucucucaggc

SEQ ID NO: 17592 - RNA, 32 nt, Human
aaaaagauguucucugggaccucucucaggcu

SEQ ID NO: 17593 - RNA, 32 nt, Human
aaaaagauuacaucagucaugauucaugaacc

SEQ ID NO: 17594 - RNA, 32 nt, Human
aaaaagcaaagacugagguacugugaauggag

SEQ ID NO: 17595 - RNA, 32 nt, Human
aaaaagcaaagucauggaaaagaaaugcaaau

SEQ ID NO: 17596 - RNA, 32 nt, Human
aaaaagcaaccagggcuauuuguacaguugaa

SEQ ID NO: 17597 - RNA, 32 nt, Human
aaaaagcaacccaguccccaaccugcacucua

SEQ ID NO: 17598 - RNA, 32 nt, Human
aaaaagcaagaaaagaaagagaagacugagaa

SEQ ID NO: 17599 - RNA, 32 nt, Human
aaaaagcaagggcagcggcauucacacagacc

SEQ ID NO: 17600 - RNA, 32 nt, Human
aaaaagcaaugucuucucuggaauggggcuuc

SEQ ID NO: 17601 - RNA, 32 nt, Human
aaaaagcacacagauggcuugucucaggagug

SEQ ID NO: 17602 - RNA, 32 nt, Human
aaaaagcaccguugagguugcagugagccgag

SEQ ID NO: 17603 - RNA, 32 nt, Human
aaaaagcacggcaagcucauuacguucuuacg

SEQ ID NO: 17604 - RNA, 32 nt, Human
aaaaagcagcacaaauacaaacaguuguguau

SEQ ID NO: 17605 - RNA, 32 nt, Human
aaaaagcagcacagcaaagcccaaguugcuga

SEQ ID NO: 17606 - RNA, 32 nt, Human
aaaaagcagugaauuguaagugugaggugugu

SEQ ID NO: 17607 - RNA, 32 nt, Human
aaaaagcauaccuuucaauuuugcuacuuggu

SEQ ID NO: 17608 - RNA, 32 nt, Human
aaaaagcauacuccagaggaagcugaggcaug

SEQ ID NO: 17609 - RNA, 32 nt, Human
aaaaagcauaguuucaguuugcaugaauuuuu

SEQ ID NO: 17610 - RNA, 32 nt, Human
aaaaagcauccuucagccucuuccuguccuuu

SEQ ID NO: 17611 - RNA, 32 nt, Human
aaaaagcaucuuuugugaaagacagggagcaa

SEQ ID NO: 17612 - RNA, 32 nt, Human
aaaaagcaugacauuuagaaguagaagacuua

SEQ ID NO: 17613 - RNA, 32 nt, Human
aaaaagcauuucaccuuuaccacuuggcaggu

SEQ ID NO: 17614 - RNA, 32 nt, Human
aaaaagccaaaagguggccaggcuugguggcu

SEQ ID NO: 17615 - RNA, 32 nt, Human
aaaaagccaacauuccucugcuucauaggugu

SEQ ID NO: 17616 - RNA, 32 nt, Human
aaaaagccacagaagacacagagcagggaagg

SEQ ID NO: 17617 - RNA, 32 nt, Human
aaaaagccaccugagcuccugaggccaugucu

SEQ ID NO: 17618 - RNA, 32 nt, Human
aaaaagccacucauccccuuguguacucagua

SEQ ID NO: 17619 - RNA, 32 nt, Human
aaaaagccagagaggcuggugagggagcagga

SEQ ID NO: 17620 - RNA, 32 nt, Human
aaaaagccagccuuggcccugcagccuccacc

SEQ ID NO: 17621 - RNA, 32 nt, Human
aaaaagccauguccuagauccccaaggcguga

SEQ ID NO: 17622 - RNA, 32 nt, Human
aaaaagccccuuccccuggauucauguuucuu

SEQ ID NO: 17623 - RNA, 32 nt, Human
aaaaagcccgaauaucucaccugacgagcaga

SEQ ID NO: 17624 - RNA, 32 nt, Human
aaaaagcccuuucaccugagcuuugggaaaga

SEQ ID NO: 17625 - RNA, 32 nt, Human
aaaaagccucagcauuuuaucauuccauggaa

SEQ ID NO: 17626 - RNA, 32 nt, Human
aaaaagccucuguuaccugaaaggaggucaag

SEQ ID NO: 17627 - RNA, 32 nt, Human
aaaaagccugaacagcugaggaagcucuucau

SEQ ID NO: 17628 - RNA, 32 nt, Human
aaaaagccuggaaaacacaaggcuccugcugu

SEQ ID NO: 17629 - RNA, 32 nt, Human
aaaaagccuuaccaguggcuucagaggaagag

SEQ ID NO: 17630 - RNA, 32 nt, Human
aaaaagcgagaaaggugagcuauugggaaauu

SEQ ID NO: 17631 - RNA, 32 nt, Human
aaaaagcuaaugugcagggauauugccuuauu

SEQ ID NO: 17632 - RNA, 32 nt, Human
aaaaagcuccuguaauuugcacuuucucccaa

SEQ ID NO: 17633 - RNA, 32 nt, Human
aaaaagcucuggggcugucugaggcucuggaa

SEQ ID NO: 17634 - RNA, 32 nt, Human
aaaaagcugcaaccccagcccaucagaaggug

SEQ ID NO: 17635 - RNA, 32 nt, Human
aaaaagcugguggaacuuacucuuucuuuuaa

SEQ ID NO: 17636 - RNA, 32 nt, Human
aaaaagcuucagcggucacugaaagugcuuac

SEQ ID NO: 17637 - RNA, 32 nt, Human
aaaaagcuugauacauuugauuuuucauuaga

SEQ ID NO: 17638 - RNA, 32 nt, Human
aaaaagcuugcugagaaggcugugcuggcggc

SEQ ID NO: 17639 - RNA, 32 nt, Human
aaaaagcuuuuugauuucccaaaggagggaca

SEQ ID NO: 17640 - RNA, 32 nt, Human
aaaaaggaaaagugcuuuccuccucugcagga

SEQ ID NO: 17641 - RNA, 32 nt, Human
aaaaaggaaagaaagaaagaaaaagaaagaaa

SEQ ID NO: 17642 - RNA, 32 nt, Human
aaaaaggaaagaaagaaagaaaagaaaagaaa

SEQ ID NO: 17643 - RNA, 32 nt, Human
aaaaaggaaagucaacugggaguuuacugaca

SEQ ID NO: 17644 - RNA, 31 nt, Human
aaaaaggaacaaguaacuaggagagaaaaau

SEQ ID NO: 17645 - RNA, 32 nt, Human
aaaaaggaacuuccucgaacuaaagcaguuaa

SEQ ID NO: 17646 - RNA, 32 nt, Human
aaaaaggaagaagaguggaagugaagaaggug

SEQ ID NO: 17647 - RNA, 32 nt, Human
aaaaaggaagagagaggaagggagaagggaga

SEQ ID NO: 17648 - RNA, 32 nt, Human
aaaaaggaagggccucuccuguggaaagggaa

SEQ ID NO: 17649 - RNA, 32 nt, Human
aaaaaggaauagggguagaguguuacagagag

SEQ ID NO: 17650 - RNA, 32 nt, Human
aaaaaggaccaccugaugcucagucccgagag

SEQ ID NO: 17651 - RNA, 32 nt, Human
aaaaaggagaaaagggaaaagcagaaaggaaa

SEQ ID NO: 17652 - RNA, 32 nt, Human
aaaaaggagaagagauauuuuggguucaaaaa

SEQ ID NO: 17653 - RNA, 32 nt, Human
aaaaaggagacucgagcagauauuaagcaagc

SEQ ID NO: 17654 - RNA, 32 nt, Human
  misc_feature (20)..(20): n is a, c, g, or u
aaaaaggagaggaggaaacnagugaggcaggg

SEQ ID NO: 17655 - RNA, 32 nt, Human
aaaaaggagauaaggacacagacacgaacaga

SEQ ID NO: 17656 - RNA, 31 nt, Human
aaaaaggagcugcaugcuucacuggaguuga

SEQ ID NO: 17657 - RNA, 32 nt, Human
aaaaaggaggaaaagaugacuaugauggcuca

SEQ ID NO: 17658 - RNA, 32 nt, Human
aaaaaggauccuguuugcuguguaauccugag

SEQ ID NO: 17659 - RNA, 32 nt, Human
aaaaaggauuccgucuccuucaaagaaguuuu

SEQ ID NO: 17660 - RNA, 32 nt, Human
aaaaaggauucugccucuuuaguccucacugu

SEQ ID NO: 17661 - RNA, 32 nt, Human
aaaaaggcaaaggacuccuacucacauaccca

SEQ ID NO: 17662 - RNA, 32 nt, Human
aaaaaggcaaagggaagccggaagagacugga

SEQ ID NO: 17663 - RNA, 32 nt, Human
aaaaaggcaagccacagaaauguguauagcgc

SEQ ID NO: 17664 - RNA, 32 nt, Human
aaaaaggcacagaagguugucaugggcuguuc

SEQ ID NO: 17665 - RNA, 32 nt, Human
aaaaaggcaguauguuaaaaauuuuagauuau

SEQ ID NO: 17666 - RNA, 32 nt, Human
aaaaaggcauacaggcagcgagcgcuaaggga

SEQ ID NO: 17667 - RNA, 32 nt, Human
aaaaaggccagaauagcugggcccagcaggag

SEQ ID NO: 17668 - RNA, 32 nt, Human
aaaaaggcuggguuugcagggaugaacacauc

SEQ ID NO: 17669 - RNA, 32 nt, Human
aaaaaggcuuccgggcuguccucugcccagug

SEQ ID NO: 17670 - RNA, 32 nt, Human
aaaaagggacacaccccacuucgguaaaagaa

SEQ ID NO: 17671 - RNA, 32 nt, Human
aaaaagggaccacugacguccugcucuacucu

SEQ ID NO: 17672 - RNA, 32 nt, Human
aaaaagggagagagcaggaaagcgagcacagg

SEQ ID NO: 17673 - RNA, 32 nt, Human
aaaaagggagagugagaaagaggaugagaggg

SEQ ID NO: 17674 - RNA, 32 nt, Human
aaaaagggaggagagagaaggagaaaugagaa

SEQ ID NO: 17675 - RNA, 32 nt, Human
aaaaagggaggcaauugagggaaaggccugcu

SEQ ID NO: 17676 - RNA, 32 nt, Human
aaaaagggagugggggaggagguggaggaucc

SEQ ID NO: 17677 - RNA, 32 nt, Human
aaaaagggaugggggaaauggagauggcacgg

SEQ ID NO: 17678 - RNA, 32 nt, Human
aaaaagggcagaugccccauacgugcugcucg

SEQ ID NO: 17679 - RNA, 32 nt, Human
aaaaagggcccucuccagggaagaacccagag

SEQ ID NO: 17680 - RNA, 32 nt, Human
aaaaaggggcagcaggggguguguuuguggac

SEQ ID NO: 17681 - RNA, 32 nt, Human
aaaaagggggaauaugggagggcagagugggg

SEQ ID NO: 17682 - RNA, 32 nt, Human
aaaaaggguaucagauucuauugugacuucau

SEQ ID NO: 17683 - RNA, 32 nt, Human
aaaaaggguguuugggggaacagcugcagacc

SEQ ID NO: 17684 - RNA, 32 nt, Human
aaaaagguauuuuuauauguucuuuuuaacaa

SEQ ID NO: 17685 - RNA, 32 nt, Human
aaaaaggugaaauaagccuacuauaaggaaua

SEQ ID NO: 17686 - RNA, 32 nt, Human
aaaaagguuacuucuugguucucagcugguuc

SEQ ID NO: 17687 - RNA, 32 nt, Human
aaaaagguugucauggcaucucuugcacagua

SEQ ID NO: 17688 - RNA, 32 nt, Human
aaaaaguaaacauuuaaaauuagccaggcaug

SEQ ID NO: 17689 - RNA, 32 nt, Human
aaaaaguaacacccucccuuuuuccugacagu

SEQ ID NO: 17690 - RNA, 32 nt, Human
aaaaaguaagccacugccucuuaccuaaaggu

SEQ ID NO: 17691 - RNA, 32 nt, Human
aaaaaguaagucucucuuccuccuucucaccc

SEQ ID NO: 17692 - RNA, 32 nt, Human
aaaaaguacagaguccagggaaaagacuugcu

SEQ ID NO: 17693 - RNA, 32 nt, Human
aaaaaguagcuguuccuugugccugaggagau

SEQ ID NO: 17694 - RNA, 32 nt, Human
aaaaaguauaggagaaacugaagaauguacac

SEQ ID NO: 17695 - RNA, 32 nt, Human
aaaaaguauauagugacauuuuuaguaugaaa

SEQ ID NO: 17696 - RNA, 32 nt, Human
aaaaagucaagaaacaacagaugcuggcgagg

SEQ ID NO: 17697 - RNA, 32 nt, Human
aaaaagucaagaaccacagcacuugaguuaaa

SEQ ID NO: 17698 - RNA, 32 nt, Human
aaaaagucaccuccauucucuaccucccaugc

SEQ ID NO: 17699 - RNA, 32 nt, Human
aaaaaguccauggcuucuaaaagaggucccug

SEQ ID NO: 17700 - RNA, 32 nt, Human
aaaaaguccaugucuuuuuaucuuuaaaauau

SEQ ID NO: 17701 - RNA, 32 nt, Human
aaaaagucguuuucaguuggguccccagcauu

SEQ ID NO: 17702 - RNA, 32 nt, Human
aaaaagucuaacucuucugcuugucuuuacaa

SEQ ID NO: 17703 - RNA, 32 nt, Human
aaaaagucuuuuguuugugaacacugaugcaa

SEQ ID NO: 17704 - RNA, 32 nt, Human
aaaaagugaacugagaaagaaaaagggaaaau

SEQ ID NO: 17705 - RNA, 32 nt, Human
aaaaagugaagugaaaacaaucagggcacauu

SEQ ID NO: 17706 - RNA, 32 nt, Human
aaaaagugaaugcacacgcccuuguuggcgug

SEQ ID NO: 17707 - RNA, 32 nt, Human
aaaaagugcaagacucaaugaggaaaugacaa

SEQ ID NO: 17708 - RNA, 32 nt, Human
aaaaagugggcuugcuacaucucuguucaaag

SEQ ID NO: 17709 - RNA, 32 nt, Human
aaaaagugggggagguggagggggaggcaggc

SEQ ID NO: 17710 - RNA, 32 nt, Human
aaaaaguguaucuugaccccaccaucaguacu

SEQ ID NO: 17711 - RNA, 32 nt, Human
aaaaagugucuuuugcaaucuugauguaaugc

SEQ ID NO: 17712 - RNA, 32 nt, Human
aaaaaguuaguccuucaugaaaaugaaagacc

SEQ ID NO: 17713 - RNA, 32 nt, Human
aaaaaguuccaucuaaaauaucaugcccagga

SEQ ID NO: 17714 - RNA, 32 nt, Human
aaaaaguugggaggggaacagggaaggaaggg

SEQ ID NO: 17715 - RNA, 32 nt, Human
aaaaaguugucucaguuccucucccaauugca

SEQ ID NO: 17716 - RNA, 32 nt, Human
aaaaaguuuaaaucacauaaaaagccaaucua

SEQ ID NO: 17717 - RNA, 32 nt, Human
aaaaaguuuaagaaauaugaaugugaguggua

SEQ ID NO: 17718 - RNA, 32 nt, Human
aaaaaguuugcuccuccauagauuuuugcugc

SEQ ID NO: 17719 - RNA, 32 nt, Human
aaaaauaaaaacaaaucacucccaagagcuua

SEQ ID NO: 17720 - RNA, 32 nt, Human
aaaaauaaaaacaaauccucaacauuuagaug

SEQ ID NO: 17721 - RNA, 32 nt, Human
aaaaauaaaaugcauuuaaacucauuugagag

SEQ ID NO: 17722 - RNA, 32 nt, Human
aaaaauaaaauugcuaaacaagaaaugaaaac

SEQ ID NO: 17723 - RNA, 22 nt, Human
aaaaauaaaauuuccuucaggu

SEQ ID NO: 17724 - RNA, 21 nt, Human
aaaaauaaacguauguguuca

SEQ ID NO: 17725 - RNA, 20 nt, Human
aaaaauaaagagcagagcuu

SEQ ID NO: 17726 - RNA, 32 nt, Human
aaaaauaaaucacugccaggcuucauucuucc

SEQ ID NO: 17727 - RNA, 23 nt, Human
aaaaauaaauucucccuuccggu

SEQ ID NO: 17728 - RNA, 32 nt, Human
aaaaauaacaggauuuuacagccuucugauga

SEQ ID NO: 17729 - RNA, 32 nt, Human
aaaaauaaccaauuaaaaauggguuaacagau

SEQ ID NO: 17730 - RNA, 32 nt, Human
aaaaauaacugcacugacuuuauaucuuuuga

SEQ ID NO: 17731 - RNA, 32 nt, Human
aaaaauaacuuaacauccuaacuacaagggag

SEQ ID NO: 17732 - RNA, 32 nt, Human
aaaaauaagccgucaaguaguaagaagaacuu

SEQ ID NO: 17733 - RNA, 32 nt, Human
aaaaauaagcuaccauauagcuuauaagucuc

SEQ ID NO: 17734 - RNA, 32 nt, Human
aaaaauaaggaaauuugugagcaggcacaaaa

SEQ ID NO: 17735 - RNA, 32 nt, Human
aaaaauaagugauuucuggggguggggcagaa

SEQ ID NO: 17736 - RNA, 27 nt, Human
aaaaauaaucaauuaauucuauguuaa

SEQ ID NO: 17737 - RNA, 32 nt, Human
aaaaauaaugcuuuucauuugaacuccugugc

SEQ ID NO: 17738 - RNA, 32 nt, Human
aaaaauaauuuaagaggacagaagacugguac

SEQ ID NO: 17739 - RNA, 32 nt, Human
aaaaauacaaaaauuggcugggcaugguggcg

SEQ ID NO: 17740 - RNA, 32 nt, Human
aaaaauacaauguuucaggcuaccacagugaa

SEQ ID NO: 17741 - RNA, 32 nt, Human
aaaaauacacaaauuagccuggugugguggcc

SEQ ID NO: 17742 - RNA, 32 nt, Human
aaaaauacacaaauuagcugcgugugguggcc

SEQ ID NO: 17743 - RNA, 32 nt, Human
aaaaauacagaauuagccaggcaugguggcgu

SEQ ID NO: 17744 - RNA, 32 nt, Human
aaaccagacaaagccgcgagcccagggauggg

SEQ ID NO: 17745 - RNA, 32 nt, Human
aaaccagaccaagaaguauggaggccacagag

SEQ ID NO: 17746 - RNA, 32 nt, Human
aaaccagagcugucuguggagcuguuuuccag

SEQ ID NO: 17747 - RNA, 32 nt, Human
aaaccagaggucaagaaaagcaguccagagau

SEQ ID NO: 17748 - RNA, 22 nt, Human
aaaccagaugcauccucagagg

SEQ ID NO: 17749 - RNA, 32 nt, Human
aaaccagauuugcuugagcugaugcuggaucg

SEQ ID NO: 17750 - RNA, 32 nt, Human
aaaccagcaauuucuuuuuccuuguggucuga

SEQ ID NO: 17751 - RNA, 32 nt, Human
aaaccagcagcgcuugacccagagccagaucc

SEQ ID NO: 17752 - RNA, 24 nt, Human
aaaccagcccaggccucccaggga

SEQ ID NO: 17753 - RNA, 32 nt, Human
aaaccagccggagggcaugcaugugggcugcu

SEQ ID NO: 17754 - RNA, 32 nt, Human
aaaccagccugaccaacauggugaaaccccgu

SEQ ID NO: 17755 - RNA, 32 nt, Human
aaaccagccugaccaaccuggagaaaccccgu

SEQ ID NO: 17756 - RNA, 32 nt, Human
aaaccagccugaccaacguggagaaaccccau

SEQ ID NO: 17757 - RNA, 32 nt, Human
aaaccagccugaccaacguggagaaaccucgu

SEQ ID NO: 17758 - RNA, 32 nt, Human
aaaccagccugaccaauauggugaaaccccuu

SEQ ID NO: 17759 - RNA, 32 nt, Human
aaaccagccugaccuuuccuuuagcauuagau

SEQ ID NO: 17760 - RNA, 32 nt, Human
aaaccagccuggauuucauacauggacuucug

SEQ ID NO: 17761 - RNA, 32 nt, Human
aaaccagccuuuucagcaucucacccauuagc

SEQ ID NO: 17762 - RNA, 32 nt, Human
aaaccagcugauauauucaguacucuggggga

SEQ ID NO: 17763 - RNA, 32 nt, Human
aaaccagcuuuacugccgguucuuggaaaccu

SEQ ID NO: 17764 - RNA, 32 nt, Human
aaaccaggaagaguugggcuguggaaggacau

SEQ ID NO: 17765 - RNA, 32 nt, Human
aaaccaggaaggcagagauugcagugagcuga

SEQ ID NO: 17766 - RNA, 32 nt, Human
aaaccaggaauucacuucccaccccagauaac

SEQ ID NO: 17767 - RNA, 22 nt, Human
aaaccaggacacuacccugaga

SEQ ID NO: 17768 - RNA, 32 nt, Human
aaaccaggacagcugaaucugcuuuuuaacaa

SEQ ID NO: 17769 - RNA, 23 nt, Human
aaaccaggacggccgcccgaaga

SEQ ID NO: 17770 - RNA, 32 nt, Human
aaaccaggacguccccuacaccuacccauggg

SEQ ID NO: 17771 - RNA, 32 nt, Human
aaaccaggaguaaaagagucaagugaccauca

SEQ ID NO: 17772 - RNA, 32 nt, Human
aaaccaggagugaaaaaggaaaguagaaggca

SEQ ID NO: 17773 - RNA, 32 nt, Human
aaaccaggccgacuaacaagguuuccagcagg

SEQ ID NO: 17774 - RNA, 32 nt, Human
aaaccaggcgacaucaugauggaaagaaagaa

SEQ ID NO: 17775 - RNA, 32 nt, Human
aaaccaggcucugccaggcgcaguggcucaug

SEQ ID NO: 17776 - RNA, 32 nt, Human
aaaccaggcugaugccgugcgggcuaaugagc

SEQ ID NO: 17777 - RNA, 23 nt, Human
aaaccaggcuuuaggcccagggg

SEQ ID NO: 17778 - RNA, 32 nt, Human
aaaccagggaggagaagcgggagccagcccuc

SEQ ID NO: 17779 - RNA, 32 nt, Human
aaaccagggcaguucuagaggagugcugguga

SEQ ID NO: 17780 - RNA, 32 nt, Human
aaaccagguauccacacauagcacuuuuauuc

SEQ ID NO: 17781 - RNA, 32 nt, Human
aaaccagguauucugcuacaguuuggagaaaa

SEQ ID NO: 17782 - RNA, 24 nt, Human
aaaccaggucaccauccucagagg

SEQ ID NO: 17783 - RNA, 32 nt, Human
aaaccaggugagugagcccucgugggaucugg

SEQ ID NO: 17784 - RNA, 22 nt, Human
aaaccagguggucaaucaggga

SEQ ID NO: 17785 - RNA, 26 nt, Human
aaaccagguuuuguuccgcccagugg

SEQ ID NO: 17786 - RNA, 32 nt, Human
aaaccagucugaccaacguggagaaaccccgu

SEQ ID NO: 17787 - RNA, 32 nt, Human
aaaccagugcugggacaaagauggggaaggug

SEQ ID NO: 17788 - RNA, 32 nt, Human
aaaccagugggugagaaagacaccuggucagg

SEQ ID NO: 17789 - RNA, 32 nt, Human
aaaccagugggugagaaggacaccuggucaag

SEQ ID NO: 17790 - RNA, 32 nt, Human
aaaccaguguuaaaaugucuuucaaaauuauu

SEQ ID NO: 17791 - RNA, 32 nt, Human
aaaccaguucaagaaagggaugaagguacaac

SEQ ID NO: 17792 - RNA, 32 nt, Human
aaaccaguucacugagaacacaggagcacuuc

SEQ ID NO: 17793 - RNA, 32 nt, Human
aaaccaguucccaaacacagucagacucuucc

SEQ ID NO: 17794 - RNA, 32 nt, Human
aaaccaguuuccuacaaucauuuuggaucacu

SEQ ID NO: 17795 - RNA, 32 nt, Human
aaaccaguuucucuuuucugcauaggaagguc

SEQ ID NO: 17796 - RNA, 32 nt, Human
aaaccauaauuaaaucaccuccuuucauuagg

SEQ ID NO: 17797 - RNA, 32 nt, Human
aaaccauaucauuccucccugggcuccuccaa

SEQ ID NO: 17798 - RNA, 32 nt, Human
aaaccaucaaacauguuccaaaaguaccagau

SEQ ID NO: 17799 - RNA, 32 nt, Human
aaaccaucacauaugaaucaucacaggucgau

SEQ ID NO: 17800 - RNA, 32 nt, Human
aaaccaucaucuagaauagaguuaauuuauua

SEQ ID NO: 17801 - RNA, 32 nt, Human
aaaccaucauucucagcaaacuauugcaagga

SEQ ID NO: 17802 - RNA, 32 nt, Human
aaaccauccagccauuugacacccuuuaugau

SEQ ID NO: 17803 - RNA, 32 nt, Human
aaaccauccaggccaacuccuggucaucccag

SEQ ID NO: 17804 - RNA, 32 nt, Human
aaaccaucccagagaaaauaagggacuuuugc

SEQ ID NO: 17805 - RNA, 32 nt, Human
aaaccaucucagaaaaaggaaaaugggcaauc

SEQ ID NO: 17806 - RNA, 32 nt, Human
aaaccaucucgcacacagcaaugaagguaguc

SEQ ID NO: 17807 - RNA, 32 nt, Human
aaaccaucugcccuccuccccuagcguugccc

SEQ ID NO: 17808 - RNA, 32 nt, Human
aaaccaucuggccccuucguuuugcucagagg

SEQ ID NO: 17809 - RNA, 32 nt, Human
aaaccaugaaauuucaaaaauuacuuggauga

SEQ ID NO: 17810 - RNA, 32 nt, Human
aaaccauggcugcugcuuucugcccagcucgc

SEQ ID NO: 17811 - RNA, 32 nt, Human
aaaccaugggcuauguuaauguccuaaugugu

SEQ ID NO: 17812 - RNA, 32 nt, Human
aaaccauggucugaaaggauuccugcucuggu

SEQ ID NO: 17813 - RNA, 32 nt, Human
aaaccauguauaucuguggaauacucaaugug

SEQ ID NO: 17814 - RNA, 32 nt, Human
aaaccauguguauguuauguuugucuauaaaa

SEQ ID NO: 17815 - RNA, 32 nt, Human
aaaccauguugcguucaaagaggugaacauua

SEQ ID NO: 17816 - RNA, 32 nt, Human
aaaccauuucuucuggcccagaagacaaacuu

SEQ ID NO: 17817 - RNA, 32 nt, Human
aaaccauuuucaccuucugucuccuccauguc

SEQ ID NO: 17818 - RNA, 32 nt, Human
aaacccaaaagggaaagagaaaguggaagaaa

SEQ ID NO: 17819 - RNA, 32 nt, Human
aaacccaaagggggaggguagggcagggcagg

SEQ ID NO: 17820 - RNA, 24 nt, Human
aaacccaaccuccuagagaagcac

SEQ ID NO: 17821 - RNA, 32 nt, Human
aaacccaaccuugccagcuggcccagcuucac

SEQ ID NO: 17822 - RNA, 32 nt, Human
aaacccaagaggcagagguugaguaagcugag

SEQ ID NO: 17823 - RNA, 32 nt, Human
aaacccaaguuugauguuaucuuuggaugugc

SEQ ID NO: 17824 - RNA, 32 nt, Human
aaacccaauccaaauggcgucuggaaguccaa

SEQ ID NO: 17825 - RNA, 19 nt, Human
aaacccacaaagcaucaaa

SEQ ID NO: 17826 - RNA, 32 nt, Human
aaacccacaaugccacacaggacaccgaccaa

SEQ ID NO: 17827 - RNA, 32 nt, Human
aaacccacacacaacaaaaccugauuugggag

SEQ ID NO: 17828 - RNA, 32 nt, Human
aaacccacacaggcacauuccacagggcauuu

SEQ ID NO: 17829 - RNA, 20 nt, Human
aaacccacaccacccugucc

SEQ ID NO: 17830 - RNA, 19 nt, Human
aaacccacaccuccugccc

SEQ ID NO: 17831 - RNA, 32 nt, Human
aaacccacacuuccagggacccuucagcacag

SEQ ID NO: 17832 - RNA, 32 nt, Human
aaacccacaggaugagagaaaagcuuggcgca

SEQ ID NO: 17833 - RNA, 32 nt, Human
aaacccacaggcggagguugcggugggcuggg

SEQ ID NO: 17834 - RNA, 30 nt, Human
aaacccacaguaaacgcaaaguaaaacuuu

SEQ ID NO: 17835 - RNA, 32 nt, Human
aaacccacagucaaggccaggcgcgguggcuc

SEQ ID NO: 17836 - RNA, 32 nt, Human
aaacccacccuccacguuggaaugagauucca

SEQ ID NO: 17837 - RNA, 21 nt, Human
aaacccaccucaccccggcuc

SEQ ID NO: 17838 - RNA, 32 nt, Human
aaacccaccuccuacuccuggcucagaccuuu

SEQ ID NO: 17839 - RNA, 19 nt, Human
aaacccaccugccucugcc

SEQ ID NO: 17840 - RNA, 32 nt, Human
aaacccaccugccucugccaggaacagccaac

SEQ ID NO: 17841 - RNA, 32 nt, Human
aaacccacuaaucacaucccacugacugaccc

SEQ ID NO: 17842 - RNA, 32 nt, Human
aaacccacuagucccagcuccugggguggcac

SEQ ID NO: 17843 - RNA, 31 nt, Human
aaacccagaaagcugccucacagaugcagac

SEQ ID NO: 17844 - RNA, 32 nt, Human
aaacccagaagaggaagaggaaagcaaaggag

SEQ ID NO: 17845 - RNA, 32 nt, Human
aaacccagaagaggagagcaaaggagucagga

SEQ ID NO: 17846 - RNA, 32 nt, Human
aaacccagaaggcagggguugcagugagccaa

SEQ ID NO: 17847 - RNA, 23 nt, Human
aaacccagacccaccuccugccc

SEQ ID NO: 17848 - RNA, 32 nt, Human
aaacccagcacuuugggagacugaggagggca

SEQ ID NO: 17849 - RNA, 32 nt, Human
aaacccagccagacuugcuucuagagguuuaa

SEQ ID NO: 17850 - RNA, 32 nt, Human
aaacccagccauuauuaaaaauuaaaucauag

SEQ ID NO: 17851 - RNA, 18 nt, Human
aaacccagccccuugccc

SEQ ID NO: 17852 - RNA, 32 nt, Human
aaacccagcccugccccugccuccugcaucca

SEQ ID NO: 17853 - RNA, 32 nt, Human
aaacccagcggagggcgggaagaaggaggagg

SEQ ID NO: 17854 - RNA, 32 nt, Human
aaacccagcuacucaggaggcuugaggcggga

SEQ ID NO: 17855 - RNA, 32 nt, Human
aaacccagcuacucaggagguuggggcagaau

SEQ ID NO: 17856 - RNA, 32 nt, Human
aaacccagcuacucgggaggcugaagcaggag

SEQ ID NO: 17857 - RNA, 32 nt, Human
aaacccagcuacucgggagguugaggcaggag

SEQ ID NO: 17858 - RNA, 32 nt, Human
aaacccagcuacugaggaggcugaggcaugag

SEQ ID NO: 17859 - RNA, 32 nt, Human
aaacccagcuacuugggaggcugaggcaggag

SEQ ID NO: 17860 - RNA, 32 nt, Human
aaacccagcuccccucuagaagaaggauucga

SEQ ID NO: 17861 - RNA, 32 nt, Human
aaacccagcugaggccugggccuagacugugg

SEQ ID NO: 17862 - RNA, 32 nt, Human
aaacccagcugcaccccuuccugggcacacgc

SEQ ID NO: 17863 - RNA, 22 nt, Human
aaacccagcuggcuaccagaga

SEQ ID NO: 17864 - RNA, 22 nt, Human
aaacccagcuugcccccagccc

SEQ ID NO: 17865 - RNA, 32 nt, Human
aaacccaggagagaaagacauagcagagaugg

SEQ ID NO: 17866 - RNA, 21 nt, Human
aaacccaggagaguguggaau

SEQ ID NO: 17867 - RNA, 32 nt, Human
aaacccaggaggcaaaggcugcagugagccaa

SEQ ID NO: 17868 - RNA, 32 nt, Human
aaacccaggaggcagagcuugcagugagccga

SEQ ID NO: 17869 - RNA, 32 nt, Human
aaacccaggaggcagagguugcagugagugaa

SEQ ID NO: 17870 - RNA, 32 nt, Human
aaacccaggaggcggagguugcagugagcuga

SEQ ID NO: 17871 - RNA, 32 nt, Human
aaacccaggaggcggagguugcagugaguuga

SEQ ID NO: 17872 - RNA, 32 nt, Human
aaacccaggaggcggugguuguaggaagcugu

SEQ ID NO: 17873 - RNA, 32 nt, Human
aaacccaggagguggagguugaaaugagcuga

SEQ ID NO: 17874 - RNA, 32 nt, Human
aaacccaggagguggagguugcagugagccga

SEQ ID NO: 17875 - RNA, 32 nt, Human
aaacccaggagguggagguugcagugagcuga

SEQ ID NO: 17876 - RNA, 32 nt, Human
aaacccaggaguucaagaccagccuggguaac

SEQ ID NO: 17877 - RNA, 32 nt, Human
aaacccaggcggcagagguugcagugagccaa

SEQ ID NO: 17878 - RNA, 32 nt, Human
aaacccaggcuccugcaggcacuggcacagcu

SEQ ID NO: 17879 - RNA, 32 nt, Human
aaacccaggguuuuguacuuggagaggaaaga

SEQ ID NO: 17880 - RNA, 32 nt, Human
aaacccagguggcggagguugcagugagccga

SEQ ID NO: 17881 - RNA, 32 nt, Human
aaacccagugacgcccuccaccgcuccaccgu

SEQ ID NO: 17882 - RNA, 31 nt, Human
aaacccagugagaggugagggggagugauga

SEQ ID NO: 17883 - RNA, 32 nt, Human
aaacccagugccuccucaacuccugggugggu

SEQ ID NO: 17884 - RNA, 32 nt, Human
aaacccagugguccgggaguucaggauugcau

SEQ ID NO: 17885 - RNA, 32 nt, Human
aaacccauagcauguacagcacaaagcguuug

SEQ ID NO: 17886 - RNA, 32 nt, Human
aaacccaucaucuaaggugacagagcagugcu

SEQ ID NO: 17887 - RNA, 32 nt, Human
aaacccaucuggagaaaacuaaaaagcucagu

SEQ ID NO: 17888 - RNA, 32 nt, Human
aaacccaugaggcaaugucaggaacagaagga

SEQ ID NO: 17889 - RNA, 32 nt, Human
aaaccccaaaaaccucuggugggagauaggaa

SEQ ID NO: 17890 - RNA, 31 nt, Human
aaaccccaaauguccauccacagacgaaugu

SEQ ID NO: 17891 - RNA, 19 nt, Human
aaaccccaacaacaucaag

SEQ ID NO: 17892 - RNA, 32 nt, Human
aaaccccaccuguauuaaaaauacaauaauua

SEQ ID NO: 17893 - RNA, 32 nt, Human
aaaccccacgcggcugucaacugugugcgugg

SEQ ID NO: 17894 - RNA, 32 nt, Human
aaaccccagcuacuugggaggcugaggcacua

SEQ ID NO: 17895 - RNA, 32 nt, Human
aaaccccagcuauuuucugaccaaaauguguu

SEQ ID NO: 17896 - RNA, 32 nt, Human
aaaccccaggagcugaaaagauugcaggauua

SEQ ID NO: 17897 - RNA, 19 nt, Human
aaaccccaucucccugccc

SEQ ID NO: 17898 - RNA, 32 nt, Human
aaaccccaucucuacaaaaauacaaaaauuaa

SEQ ID NO: 17899 - RNA, 32 nt, Human
aaaccccaucucuacaaaaauacaaaaauuag

SEQ ID NO: 17900 - RNA, 32 nt, Human
aaaccccaucucuacaaaaauuagcugggcgu

SEQ ID NO: 17901 - RNA, 32 nt, Human
aaacccccacuuccugccccaggcuggcgcgg

SEQ ID NO: 17902 - RNA, 32 nt, Human
aaacccccaguuccaaacccgagacuucaggc

SEQ ID NO: 17903 - RNA, 32 nt, Human
aaacccccaucuuguccgucuccacucucauc

SEQ ID NO: 17904 - RNA, 32 nt, Human
aaacccccaucuugucugucuccacucucaac

SEQ ID NO: 17905 - RNA, 32 nt, Human
aaacccccaucuugucugucuccacucucauc

SEQ ID NO: 17906 - RNA, 32 nt, Human
aaacccccauuucucauuagugcaaugucaua

SEQ ID NO: 17907 - RNA, 32 nt, Human
aaaccccgaccaccugcccaaccugcucuccu

SEQ ID NO: 17908 - RNA, 32 nt, Human
aaaccccgcaaaucagaguggggaaggugagu

SEQ ID NO: 17909 - RNA, 32 nt, Human
aaaccccgucucuacaaaaauacaaaaaucag

SEQ ID NO: 17910 - RNA, 32 nt, Human
aaaccccgucucuacaaaaauacaaaaauuag

SEQ ID NO: 17911 - RNA, 32 nt, Human
aaaccccgucucuacaaaaauagaaaaauuag

SEQ ID NO: 17912 - RNA, 32 nt, Human
aaaccccguggccaaaaucaauaaccaauuug

SEQ ID NO: 17913 - RNA, 20 nt, Human
aaaccccuaacuggcuggca

SEQ ID NO: 17914 - RNA, 32 nt, Human
aaaccccuacuucugguuuccuuuggaacccc

SEQ ID NO: 17915 - RNA, 32 nt, Human
aaaccccucuucuccccgcccucccccagcuc

SEQ ID NO: 17916 - RNA, 32 nt, Human
aaaccccuggcuuuugugcacacugcauacgu

SEQ ID NO: 17917 - RNA, 32 nt, Human
aaaccccuucuuucucuuuccguccaacaacu

SEQ ID NO: 17918 - RNA, 21 nt, Human
aaacccgacuugccccugccu

SEQ ID NO: 17919 - RNA, 32 nt, Human
aaacccgaggaccgccaccucuucccagugcu

SEQ ID NO: 17920 - RNA, 32 nt, Human
aaacccgcauuggauaucagagcugggagggc

SEQ ID NO: 17921 - RNA, 20 nt, Human
aaacccgccccaaccugcuc

SEQ ID NO: 17922 - RNA, 32 nt, Human
aaacccgcggaaggcgaggugccuggccugcc

SEQ ID NO: 17923 - RNA, 32 nt, Human
aaacccgggaaguggagguugcagugagccaa

SEQ ID NO: 17924 - RNA, 32 nt, Human
aaacccgggaggcagaggcugcagagagccaa

SEQ ID NO: 17925 - RNA, 32 nt, Human
aaacccgggaggcagagguugcagugacccaa

SEQ ID NO: 17926 - RNA, 32 nt, Human
aaacccgggaggcggagauugcagugagccaa

SEQ ID NO: 17927 - RNA, 32 nt, Human
aaacccgggaggcggagcuugcagugagccaa

SEQ ID NO: 17928 - RNA, 32 nt, Human
aaacccgggaggcggagguugcagugagccga

SEQ ID NO: 17929 - RNA, 32 nt, Human
aaacccgggaggugaaggaugcagugagccaa

SEQ ID NO: 17930 - RNA, 32 nt, Human
aaacccgggagguggagcuugcagugagccga

SEQ ID NO: 17931 - RNA, 32 nt, Human
aaacccgggccagagcagcggagcuucccagc

SEQ ID NO: 17932 - RNA, 31 nt, Human
aaacccgggguagguuccaugccaaguaaca

SEQ ID NO: 17933 - RNA, 32 nt, Human
aaacccuaaauuacaguaguuuaaucaaaguu

SEQ ID NO: 17934 - RNA, 32 nt, Human
aaacccuaaggcaccgagcccaaaaggcccca

SEQ ID NO: 17935 - RNA, 31 nt, Human
aaacccuaagugucccaacaguggagcacau

SEQ ID NO: 17936 - RNA, 32 nt, Human
aaacccuaccccucucucucccucucucaauu

SEQ ID NO: 17937 - RNA, 32 nt, Human
aaacccuacuaaaaauacaaaguuagccaggc

SEQ ID NO: 17938 - RNA, 32 nt, Human
aaacccucaaagcagacgugagagggacgguu

SEQ ID NO: 17939 - RNA, 32 nt, Human
aaacccucacagaguuuuccaccaacagggga

SEQ ID NO: 17940 - RNA, 32 nt, Human
aaacccucaccagauaaacuacaguuuguuua

SEQ ID NO: 17941 - RNA, 24 nt, Human
aaacccucacuccuggagauucca

SEQ ID NO: 17942 - RNA, 32 nt, Human
aaacccucagcuuuccgaaggaugggaaauac

SEQ ID NO: 17943 - RNA, 32 nt, Human
aaacccucaugguaguauuuccucuggcagcu

SEQ ID NO: 17944 - RNA, 32 nt, Human
aaacccuccaucauaaggaggaaguuauucaa

SEQ ID NO: 17945 - RNA, 23 nt, Human
aaacccuccccucugagacucca

SEQ ID NO: 17946 - RNA, 32 nt, Human
aaacccuccucaaaguucaaacuuaauuucag

SEQ ID NO: 17947 - RNA, 32 nt, Human
aaacccuccuggaugggauccugcugcccuuu

SEQ ID NO: 17948 - RNA, 32 nt, Human
aaacccucucccaguuccccugcagcucuuca

SEQ ID NO: 17949 - RNA, 32 nt, Human
aaacccucuccuccugcagguucaagcuccuc

SEQ ID NO: 17950 - RNA, 32 nt, Human
aaacccucuggccggguaauaggccugggucc

SEQ ID NO: 17951 - RNA, 32 nt, Human
aaacccucuggggccaucccagcuccagagcc

SEQ ID NO: 17952 - RNA, 32 nt, Human
aaacccucuguggagcuauaagccucuuggac

SEQ ID NO: 17953 - RNA, 32 nt, Human
aaacccugaaacucugauauucccaggaggau

SEQ ID NO: 17954 - RNA, 32 nt, Human
aaacccugaaauacaaaaauuagucaggcaug

SEQ ID NO: 17955 - RNA, 32 nt, Human
aaacccugaacagaggagguggcggugguggc

SEQ ID NO: 17956 - RNA, 32 nt, Human
aaacccugaaucucaucuggggugggggcccu

SEQ ID NO: 17957 - RNA, 18 nt, Human
aaacccugaccccugccc

SEQ ID NO: 17958 - RNA, 32 nt, Human
aaacccugaccuuccugucccugccuucgacc

SEQ ID NO: 17959 - RNA, 32 nt, Human
aaacccugagcuguuucucuguuccacuuucc

SEQ ID NO: 17960 - RNA, 32 nt, Human
aaacccugaugucuggcugaaagccgaagcau

SEQ ID NO: 17961 - RNA, 32 nt, Human
aaacccugcaaacccaaagagaauauuaauac

SEQ ID NO: 17962 - RNA, 32 nt, Human
aaacccugcacucuccccugagcacccacaga

SEQ ID NO: 17963 - RNA, 32 nt, Human
aaacccugcauccauccuuccuccagcaagcc

SEQ ID NO: 17964 - RNA, 32 nt, Human
aaacccugccaccauggugucuugccguacuu

SEQ ID NO: 17965 - RNA, 31 nt, Human
aaacccugcucaggauuccuguugaggagau

SEQ ID NO: 17966 - RNA, 23 nt, Human
aaacccugcugggaucccuuccu

SEQ ID NO: 17967 - RNA, 32 nt, Human
aaacccuggaggcagagguugcagugagccaa

SEQ ID NO: 17968 - RNA, 31 nt, Human
aaacccugggaugucuaaaugccaagaagag

SEQ ID NO: 17969 - RNA, 32 nt, Human
aaacccugggugccaguccaggagcuguggcu

SEQ ID NO: 17970 - RNA, 32 nt, Human
aaacccugucuacaaaaauuagccaggcauga

SEQ ID NO: 17971 - RNA, 32 nt, Human
aaacccugucucuacaaaaauacaaaaauuag

SEQ ID NO: 17972 - RNA, 32 nt, Human
aaacccugugucuugugucuguaguucaaaag

SEQ ID NO: 17973 - RNA, 21 nt, Human
aaacccuuaacugacaugggc

SEQ ID NO: 17974 - RNA, 32 nt, Human
aaacccuuccaaugccuaagugucuuucuccu

SEQ ID NO: 17975 - RNA, 32 nt, Human
aaacccuuccaguucuugccccagggcuggcc

SEQ ID NO: 17976 - RNA, 32 nt, Human
aaacccuucucccaucugccuucccuaucccc

SEQ ID NO: 17977 - RNA, 32 nt, Human
aaacccuugaaaagacaucaagcacagaagga

SEQ ID NO: 17978 - RNA, 21 nt, Human
aaacccuuguccuucuugaua

SEQ ID NO: 17979 - RNA, 32 nt, Human
aaacccuugucugccugacucccccagcuacu

SEQ ID NO: 17980 - RNA, 32 nt, Human
aaacccuuuaccugcagggagaucaggaaaga

SEQ ID NO: 17981 - RNA, 32 nt, Human
aaacccuuucauuccucccugggaaucagggu

SEQ ID NO: 17982 - RNA, 32 nt, Human
aaaccgacgacaaaucuuuuggcagauuuucu

SEQ ID NO: 17983 - RNA, 32 nt, Human
aaaccgacguuucagggaagaggggagagagc

SEQ ID NO: 17984 - RNA, 32 nt, Human
aaaccgacuggagcaggagcugggagaacugg

SEQ ID NO: 17985 - RNA, 23 nt, Human
aaaccgagccagggcugagccgg

SEQ ID NO: 17986 - RNA, 22 nt, Human
aaaccgagcuggggcugggaga

SEQ ID NO: 17987 - RNA, 32 nt, Human
aaaccgaugacuggugggaggagcagcgcugg

SEQ ID NO: 17988 - RNA, 32 nt, Human
aaaccgcauucagugcaccugccucagcuacc

SEQ ID NO: 17989 - RNA, 32 nt, Human
aaaccgcccagaggagcccuauuccacucugg

SEQ ID NO: 17990 - RNA, 32 nt, Human
aaaccgcccccggggcacugugcaguguggcu

SEQ ID NO: 17991 - RNA, 32 nt, Human
aaaccggaaggcagagguugcagugagccaag

SEQ ID NO: 17992 - RNA, 32 nt, Human
aaaccggaccccggaggcaccacccacauccg

SEQ ID NO: 17993 - RNA, 32 nt, Human
aaaccggacccuuuccaucaaggaggcguccu

SEQ ID NO: 17994 - RNA, 32 nt, Human
aaaccggagagggggugggggagccagccucc

SEQ ID NO: 17995 - RNA, 32 nt, Human
aaaccggaugcucagcccuggccuucaaggac

SEQ ID NO: 17996 - RNA, 32 nt, Human
aaaccggccacuucuaguaaaccacgucgugc

SEQ ID NO: 17997 - RNA, 32 nt, Human
aaaccggccugcuuuuuagcuccugggcccua

SEQ ID NO: 17998 - RNA, 32 nt, Human
aaaccgggaggcggagguugaggugagccgaa

SEQ ID NO: 17999 - RNA, 32 nt, Human
aaaccggggaggcggggguugcaaugagcuaa

SEQ ID NO: 18000 - RNA, 32 nt, Human
aaaccgucacccuuuaguuugcuugaacuuua

SEQ ID NO: 18001 - RNA, 32 nt, Human
aaaccguccaggaagggaggcugcagccccga

SEQ ID NO: 18002 - RNA, 32 nt, Human
aaaccgugggaaagacuuaggugucagggccc

SEQ ID NO: 18003 - RNA, 32 nt, Human
aaaccgugggauucugcuuuucauccucugug

SEQ ID NO: 18004 - RNA, 32 nt, Human
aaaccguggggcucucuggggucugggggaau

SEQ ID NO: 18005 - RNA, 18 nt, Human
aaaccuaaagacaucaaa

SEQ ID NO: 18006 - RNA, 32 nt, Human
aaaccuaaaggcugcaggcugccaggugugcu

SEQ ID NO: 18007 - RNA, 32 nt, Human
aaaccuaaguggucucuugucuauuaguuugg

SEQ ID NO: 18008 - RNA, 24 nt, Human
aaaccuaaucaguacagugggaaa

SEQ ID NO: 18009 - RNA, 18 nt, Human
aaaccuacaucccugcuc

SEQ ID NO: 18010 - RNA, 16 nt, Human
aaaccuagacaucaaa

SEQ ID NO: 18011 - RNA, 32 nt, Human
aaaccuagaguuguuucaucugcgccuaaagu

SEQ ID NO: 18012 - RNA, 19 nt, Human
aaaccuagcaagccccugc

SEQ ID NO: 18013 - RNA, 32 nt, Human
aaaccuagcuuguuuuucuccccuuuuuagag

SEQ ID NO: 18014 - RNA, 32 nt, Human
aaaccuaggagcuaaauaaaacagugugugca

SEQ ID NO: 18015 - RNA, 32 nt, Human
aaaccuauggaaccuacugcaaaaagauuguc

SEQ ID NO: 18016 - RNA, 32 nt, Human
aaaccuauuccacuuacauccaaggcacuguc

SEQ ID NO: 18017 - RNA, 32 nt, Human
aaaccuauucuuagcucacaggccauggagaa

SEQ ID NO: 18018 - RNA, 32 nt, Human
aaaccuauugguaaauuacagucagaaaaaga

SEQ ID NO: 18019 - RNA, 21 nt, Human
aaaccuauuucacaaaucaaa

SEQ ID NO: 18020 - RNA, 32 nt, Human
aaaccucaaacaguaccaaaccuuuauacacu

SEQ ID NO: 18021 - RNA, 32 nt, Human
aaaccucaaggccagcucaaugccugguaucu

SEQ ID NO: 18022 - RNA, 32 nt, Human
aaaccucacacagauaaggaccaagggcuggc

SEQ ID NO: 18023 - RNA, 32 nt, Human
aaaccucacaugcauacauacacauauauaca

SEQ ID NO: 18024 - RNA, 32 nt, Human
aaaccucacguccuuaacugugcucucccucc

SEQ ID NO: 18025 - RNA, 19 nt, Human
aaaccucacuaccccuccc

SEQ ID NO: 18026 - RNA, 32 nt, Human
aaaccucacugcaaauuuccucccaucacgaa

SEQ ID NO: 18027 - RNA, 20 nt, Human
aaaccucacugcacaucaga

SEQ ID NO: 18028 - RNA, 32 nt, Human
aaaccucacuggcccguuugcuuuucacgccc

SEQ ID NO: 18029 - RNA, 32 nt, Human
aaaccucacuuuacuuguuaaaagggauauau

SEQ ID NO: 18030 - RNA, 32 nt, Human
aaaccucagguagcuccugaagaucugugcuu

SEQ ID NO: 18031 - RNA, 32 nt, Human
aaaccucauaauucuuaacaccuggcauuucc

SEQ ID NO: 18032 - RNA, 21 nt, Human
aaaccuccaaaacuccugccc

SEQ ID NO: 18033 - RNA, 32 nt, Human
aaaccuccacaauauuuguaugaaagaaaaac

SEQ ID NO: 18034 - RNA, 22 nt, Human
aaaccuccacagcaacaucgaa

SEQ ID NO: 18035 - RNA, 32 nt, Human
aaaccuccagcagucccuaggaugauguagau

SEQ ID NO: 18036 - RNA, 32 nt, Human
aaaccuccagggcaaagcugaagguuucuugg

SEQ ID NO: 18037 - RNA, 32 nt, Human
aaaccuccagugccacaaaauaaagcucaagu

SEQ ID NO: 18038 - RNA, 32 nt, Human
aaaccuccaucuuuucccugucuucauccugu

SEQ ID NO: 18039 - RNA, 32 nt, Human
aaaccuccauuuugaucaucaggauuucaucu

SEQ ID NO: 18040 - RNA, 32 nt, Human
aaaccucccagaggacugugaggaccaugaag

SEQ ID NO: 18041 - RNA, 32 nt, Human
aaaccuccccuccaaacaccuucucacauucu

SEQ ID NO: 18042 - RNA, 32 nt, Human
aaaccuccucagccuucauuuguucguggaug

SEQ ID NO: 18043 - RNA, 32 nt, Human
aaaccucggcaucuucacuugcucgaucugga

SEQ ID NO: 18044 - RNA, 32 nt, Human
aaaccucucaacacagaaggaauacaggagaa

SEQ ID NO: 18045 - RNA, 21 nt, Human
aaaccucucaaggaaaaggac

SEQ ID NO: 18046 - RNA, 32 nt, Human
aaaccucucacagauaagacagaggcccaggg

SEQ ID NO: 18047 - RNA, 24 nt, Human
aaaccucuccccuccaaaaagcac

SEQ ID NO: 18048 - RNA, 32 nt, Human
aaaccucuccugaccccugccuguuggcagcc

SEQ ID NO: 18049 - RNA, 32 nt, Human
aaaccucucugcuagcucuucagucuacaaau

SEQ ID NO: 18050 - RNA, 32 nt, Human
aaaccucugcaucucugaucccuuccuuguua

SEQ ID NO: 18051 - RNA, 32 nt, Human
aaaccucugcuuggcccagcaggagugagggu

SEQ ID NO: 18052 - RNA, 32 nt, Human
aaaccucuguaaccccaacugaaaugaggagc

SEQ ID NO: 18053 - RNA, 22 nt, Human
aaaccucuuaaagaaaaagcau

SEQ ID NO: 18054 - RNA, 19 nt, Human
aaaccucuuccacccaccc

SEQ ID NO: 18055 - RNA, 32 nt, Human
aaaccugaaaaggaaacuacagaaugggaaag

SEQ ID NO: 18056 - RNA, 32 nt, Human
aaaccugaagaaaagaaguuuuagugaagaug

SEQ ID NO: 18057 - RNA, 32 nt, Human
aaaccugaauccagggccuuauaguucuccuc

SEQ ID NO: 18058 - RNA, 31 nt, Human
aaaccugaauggaacaaccuguugagagagc

SEQ ID NO: 18059 - RNA, 32 nt, Human
aaaccugacucugcuucucucauuugucuucc

SEQ ID NO: 18060 - RNA, 32 nt, Human
aaaccugagaggauggcuucagauggagcauc

SEQ ID NO: 18061 - RNA, 32 nt, Human
aaaccugagaggcagagguuacagugagccaa

SEQ ID NO: 18062 - RNA, 32 nt, Human
aaaccugagagguggagguuacagugaguuga

SEQ ID NO: 18063 - RNA, 32 nt, Human
aaaccugagagguggagguugcaguugagcca

SEQ ID NO: 18064 - RNA, 20 nt, Human
aaaccugagcacacaucaga

SEQ ID NO: 18065 - RNA, 30 nt, Human
aaaccugagcccugggcuccaggacaggca

SEQ ID NO: 18066 - RNA, 32 nt, Human
aaaccugagcuaaaaccaaugcaucagcugau

SEQ ID NO: 18067 - RNA, 32 nt, Human
aaaccugaguacauuuacaaagcugcaagugg

SEQ ID NO: 18068 - RNA, 32 nt, Human
aaaccugaugcagucuaaugucucacauucug

SEQ ID NO: 18069 - RNA, 32 nt, Human
aaaccugauugcaaauggcuucagaggucacc

SEQ ID NO: 18070 - RNA, 32 nt, Human
aaaccugcaauauuuuugcucucuucaaaagu

SEQ ID NO: 18071 - RNA, 17 nt, Human
aaaccugcacauccugc

SEQ ID NO: 18072 - RNA, 32 nt, Human
aaaccugcacaugugggcugggcgcgguggcu

SEQ ID NO: 18073 - RNA, 31 nt, Human
aaaccugcacuuucucugauauugguagcag

SEQ ID NO: 18074 - RNA, 31 nt, Human
aaaccugcacuuuuccuugcaugacagguuc

SEQ ID NO: 18075 - RNA, 32 nt, Human
aaaccugcagagcaguggcucccagcuguggc

SEQ ID NO: 18076 - RNA, 32 nt, Human
aaaccugcauucagaucccugccucucugccu

SEQ ID NO: 18077 - RNA, 21 nt, Human
aaaccugccccacucacaccc

SEQ ID NO: 18078 - RNA, 18 nt, Human
aaaccugccccccaaccc

SEQ ID NO: 18079 - RNA, 19 nt, Human
aaaccugcccccucugccu

SEQ ID NO: 18080 - RNA, 21 nt, Human
aaaccugccccuuggcugcuc

SEQ ID NO: 18081 - RNA, 20 nt, Human
aaaccugcccucgggcugcc

SEQ ID NO: 18082 - RNA, 32 nt, Human
aaaccugccuaccucauaggacagcugugagg

SEQ ID NO: 18083 - RNA, 17 nt, Human
aaaccugccuccaagcc

SEQ ID NO: 18084 - RNA, 17 nt, Human
aaaccugccucugugcc

SEQ ID NO: 18085 - RNA, 21 nt, Human
aaaccugccucuugucugccu

SEQ ID NO: 18086 - RNA, 22 nt, Human
aaaccugccugacuuccugcuc

SEQ ID NO: 18087 - RNA, 32 nt, Human
aaaccugccuggcaagguccuucccugggaau

SEQ ID NO: 18088 - RNA, 21 nt, Human
aaaccugccugggcucugccc

SEQ ID NO: 18089 - RNA, 19 nt, Human
aaaccugccuuccuagccc

SEQ ID NO: 18090 - RNA, 32 nt, Human
aaaccugccuuucccauaugcauaggugcacc

SEQ ID NO: 18091 - RNA, 18 nt, Human
aaaccugccuuugugccc

SEQ ID NO: 18092 - RNA, 16 nt, Human
aaaccugccuuuugcc

SEQ ID NO: 18093 - RNA, 32 nt, Human
aaaccugcgaauucaggucaacaauauggccc

SEQ ID NO: 18094 - RNA, 20 nt, Human
aaaccugcgggccccuaacc

SEQ ID NO: 18095 - RNA, 32 nt, Human
aaaccugcguucuccuaccucuuccaacccuc

SEQ ID NO: 18096 - RNA, 32 nt, Human
aaaccugcugcgagggccccucccagaggagc

SEQ ID NO: 18097 - RNA, 20 nt, Human
aaaccugcuggagccugccc

SEQ ID NO: 18098 - RNA, 32 nt, Human
aaaccuggaagaggaagaggaaagcaaaggag

SEQ ID NO: 18099 - RNA, 32 nt, Human
aaaccuggagaugaguuaauuucuuuugagga

SEQ ID NO: 18100 - RNA, 32 nt, Human
aaaccuggagcggucagagcaggauggccaga

SEQ ID NO: 18101 - RNA, 32 nt, Human
aaaccuggagggagacccccaaaacuucucag

SEQ ID NO: 18102 - RNA, 32 nt, Human
aaaccuggaugccaccuggagcugcuuccuga

SEQ ID NO: 18103 - RNA, 32 nt, Human
aaaccuggauuuagauaaugaaaccuuccaca

SEQ ID NO: 18104 - RNA, 32 nt, Human
aaaccuggcacagaaguggacaugcacucgga

SEQ ID NO: 18105 - RNA, 32 nt, Human
aaaccuggccaacauggugaaacccugucucu

SEQ ID NO: 18106 - RNA, 32 nt, Human
aaaccuggcccaggucugggcagaugucuuca

SEQ ID NO: 18107 - RNA, 32 nt, Human
aaaccugggagacggagguugcagugagccaa

SEQ ID NO: 18108 - RNA, 32 nt, Human
aaaccugggaggacccugagggagggucaggg

SEQ ID NO: 18109 - RNA, 32 nt, Human
aaaccugggaggcagaggugagcugagaucgc

SEQ ID NO: 18110 - RNA, 32 nt, Human
aaaccugggaggcgaagauugcagugagcuga

SEQ ID NO: 18111 - RNA, 32 nt, Human
aaaccugggaggcggagaguacagugagccaa

SEQ ID NO: 18112 - RNA, 32 nt, Human
aaaccugggaggcggagcuugcagugagccga

SEQ ID NO: 18113 - RNA, 32 nt, Human
aaaccugggagguggagguugcagugacccga

SEQ ID NO: 18114 - RNA, 32 nt, Human
aaaccugggaguuugaagcugcagugagccau

SEQ ID NO: 18115 - RNA, 32 nt, Human
aaaccugggauguggagguugcagugaacuga

SEQ ID NO: 18116 - RNA, 32 nt, Human
aaaccugguccucuugagguuauauuguggau

SEQ ID NO: 18117 - RNA, 32 nt, Human
aaaccuguauagcauguuacuauccugaaguc

SEQ ID NO: 18118 - RNA, 32 nt, Human
aaaccuguauuuuucuuggcugugccauaauc

SEQ ID NO: 18119 - RNA, 32 nt, Human
aaaccuguccaggaguugugucuuaaaauuga

SEQ ID NO: 18120 - RNA, 32 nt, Human
aaaccugucucccucaggcucaccuuccuaag

SEQ ID NO: 18121 - RNA, 22 nt, Human
aaaccugucuggccccuuaccc

SEQ ID NO: 18122 - RNA, 18 nt, Human
aaaccugugaacccaccc

SEQ ID NO: 18123 - RNA, 32 nt, Human
aaaccugugcagaugcccucucugaacuggcc

SEQ ID NO: 18124 - RNA, 32 nt, Human
aaaccugugccaggcugaauuacagugaaauu

SEQ ID NO: 18125 - RNA, 18 nt, Human
aaaccugugcccaugccc

SEQ ID NO: 18126 - RNA, 32 nt, Human
aaaccugugggugggguugggguggagaagua

SEQ ID NO: 18127 - RNA, 32 nt, Human
aaaccugugguguguggaagugaccacuggga

SEQ ID NO: 18128 - RNA, 32 nt, Human
aaaccuguuagccacuucucugugccauauac

SEQ ID NO: 18129 - RNA, 19 nt, Human
aaaccuguuguccaugccc

SEQ ID NO: 18130 - RNA, 19 nt, Human
aaaccuguugucucugccc

SEQ ID NO: 18131 - RNA, 32 nt, Human
aaaccuuaaaacugaauuuauguagaacacac

SEQ ID NO: 18132 - RNA, 20 nt, Human
aaaccuuacuacacauuaaa

SEQ ID NO: 18133 - RNA, 32 nt, Human
aaaccuuacugguauuguuccacagcacauag

SEQ ID NO: 18134 - RNA, 32 nt, Human
aaaccuuagaggacagcggcugccugucccuu

SEQ ID NO: 18135 - RNA, 32 nt, Human
aaaccuuagcagcuuccaugugguguugagca

SEQ ID NO: 18136 - RNA, 32 nt, Human
aaaccuuauagagugagauuaucauguacaag

SEQ ID NO: 18137 - RNA, 32 nt, Human
aaaccuucagccacaucuuucuuauuaguuua

SEQ ID NO: 18138 - RNA, 32 nt, Human
aaaccuucagccaggaggcuggcaagauggcc

SEQ ID NO: 18139 - RNA, 32 nt, Human
aaaccuucaggauugaaacugagccacacgca

SEQ ID NO: 18140 - RNA, 23 nt, Human
aaaccuucauggauagucuuuaa

SEQ ID NO: 18141 - RNA, 19 nt, Human
aaaccuucauggcaugaaa

SEQ ID NO: 18142 - RNA, 32 nt, Human
aaaccuuccccaggcuggacgugguggcucac

SEQ ID NO: 18143 - RNA, 32 nt, Human
aaaccuucccuccaauccucaccaugucucca

SEQ ID NO: 18144 - RNA, 32 nt, Human
aaaccuugaauccauuagccaggcuugggaug

SEQ ID NO: 18145 - RNA, 32 nt, Human
aaaccuugacauuucaaagacugccuugaaag

SEQ ID NO: 18146 - RNA, 32 nt, Human
aaaccuugagauaggcugggugcgguggcuca

SEQ ID NO: 18147 - RNA, 32 nt, Human
aaaccuugagggggagggugcucuggguuucc

SEQ ID NO: 18148 - RNA, 32 nt, Human
aaaccuugauucucucccuugaaaaacaggga

SEQ ID NO: 18149 - RNA, 32 nt, Human
aaaccuugcaugucaucauagacuucauacug

SEQ ID NO: 18150 - RNA, 18 nt, Human
aaaccuuggcuccuuccu

SEQ ID NO: 18151 - RNA, 32 nt, Human
aaaccuuguauaccaucauagacuucauagug

SEQ ID NO: 18152 - RNA, 32 nt, Human
aaaccuugugcaauuguaaauaaauuguuuag

SEQ ID NO: 18153 - RNA, 21 nt, Human
aaaccuuguuuaaacauuaaa

SEQ ID NO: 18154 - RNA, 32 nt, Human
aaaccuuguuuuuguggugaaggauccuaaag

SEQ ID NO: 18155 - RNA, 32 nt, Human
aaaccuuuaaugcaauccucagucagcaauuu

SEQ ID NO: 18156 - RNA, 19 nt, Human
aaaccuuucacuuuccaaa

SEQ ID NO: 18157 - RNA, 17 nt, Human
aaaccuuucagaaguca

SEQ ID NO: 18158 - RNA, 19 nt, Human
aaaccuuucagauaacaaa

SEQ ID NO: 18159 - RNA, 19 nt, Human
aaaccuuucagcuggcaga

SEQ ID NO: 18160 - RNA, 19 nt, Human
aaaccuuucaggaagucaa

SEQ ID NO: 18161 - RNA, 19 nt, Human
aaaccuuuccuacuucaaa

SEQ ID NO: 18162 - RNA, 32 nt, Human
aaaccuuugcauucauccuccuucuccaagac

SEQ ID NO: 18163 - RNA, 32 nt, Human
aaaccuuugggaucccauuuugaaguccagag

SEQ ID NO: 18164 - RNA, 32 nt, Human
aaaccuuuggucauuuguaagacaucucaugu

SEQ ID NO: 18165 - RNA, 32 nt, Human
aaaccuuugucaggcugggcgcgguggcucac

SEQ ID NO: 18166 - RNA, 32 nt, Human
aaaccuuuucauauacaucuuaccucauuuca

SEQ ID NO: 18167 - RNA, 23 nt, Human
aaaccuuuuccuuuucccuucuu

SEQ ID NO: 18168 - RNA, 21 nt, Human
aaaccuuuuuauauaaucaaa

SEQ ID NO: 18169 - RNA, 18 nt, Human
aaaccuuuuucagucaaa

SEQ ID NO: 18170 - RNA, 32 nt, Human
aaacgaaaaccucacugagcuaaggcuucuga

SEQ ID NO: 18171 - RNA, 32 nt, Human
aaacgaaaagcugggaauaaucacacuguuug

SEQ ID NO: 18172 - RNA, 32 nt, Human
aaacgaaaggaaagcggggaggggaaaacaga

SEQ ID NO: 18173 - RNA, 32 nt, Human
aaacgaaaugggaagaagauggguggagcuau

SEQ ID NO: 18174 - RNA, 32 nt, Human
aaacgaacugaacuagccugguggaaggaggc

SEQ ID NO: 18175 - RNA, 32 nt, Human
aaacgaagcauggcagaucuguccagcacuga

SEQ ID NO: 18176 - RNA, 32 nt, Human
aaacgaagccagacaacagauuuccaucagca

SEQ ID NO: 18177 - RNA, 32 nt, Human
aaacgaagccagccuggaccauacacugccug

SEQ ID NO: 18178 - RNA, 32 nt, Human
aaacgaagcccccuccuguauugacagcuggg

SEQ ID NO: 18179 - RNA, 32 nt, Human
aaacgacugugucacuuugcuuggggaggggg

SEQ ID NO: 18180 - RNA, 32 nt, Human
aaacgagcuggguaaguaggucucagcuguuc

SEQ ID NO: 18181 - RNA, 30 nt, Human
aaacgaggcacugggugugugugcaaagcc

SEQ ID NO: 18182 - RNA, 32 nt, Human
aaacgaggcugcaguggugguaguaggaagau

SEQ ID NO: 18183 - RNA, 32 nt, Human
aaacgagguguuggcagcaccaugcucucucu

SEQ ID NO: 18184 - RNA, 32 nt, Human
aaacgaguccuaauuuacaacagcuagucuuu

SEQ ID NO: 18185 - RNA, 32 nt, Human
aaacgcacaugcccacacagggagccaagucg

SEQ ID NO: 18186 - RNA, 32 nt, Human
aaacgcagagaaaagcuccauucuucccagga

SEQ ID NO: 18187 - RNA, 32 nt, Human
aaacgcagcuuaguugucucagaggacucaca

SEQ ID NO: 18188 - RNA, 32 nt, Human
aaacgcaggagucugcagcugcaaugaacugu

SEQ ID NO: 18189 - RNA, 32 nt, Human
aaacgcaucuggaaaauugauaaagaagcgau

SEQ ID NO: 18190 - RNA, 32 nt, Human
aaacgcauuucaaaugucaaccaggaaggcac

SEQ ID NO: 18191 - RNA, 32 nt, Human
aaacgccacggaggcucccugugggcuccugc

SEQ ID NO: 18192 - RNA, 32 nt, Human
aaacgcccgcugugggcggagccacccgaaag

SEQ ID NO: 18193 - RNA, 32 nt, Human
aaacgcccuccagucugagagcaggggaggga

SEQ ID NO: 18194 - RNA, 32 nt, Human
aaacgcccuuguccccgcccuccugagcuaug

SEQ ID NO: 18195 - RNA, 32 nt, Human
aaacgccgacucuucugcaccauggagccaga

SEQ ID NO: 18196 - RNA, 32 nt, Human
aaacgccugcugcucuugcccuugcccacggg

SEQ ID NO: 18197 - RNA, 32 nt, Human
aaacgccuguaaucccaacuacuugggaggcu

SEQ ID NO: 18198 - RNA, 32 nt, Human
aaacgccuguaggaagaaaaaggaugcauucc

SEQ ID NO: 18199 - RNA, 25 nt, Human
aaacgcgcgggggagccugagccgg

SEQ ID NO: 18200 - RNA, 32 nt, Human
aaacgcggugcuguugaguggguugccacugc

SEQ ID NO: 18201 - RNA, 32 nt, Human
aaacgcgugaugaagacagaaggcuccggggu

SEQ ID NO: 18202 - RNA, 32 nt, Human
aaacgcuaagaaaagggaguaggaagaacaag

SEQ ID NO: 18203 - RNA, 32 nt, Human
aaacgcugggauuacagucaugagccaccgug

SEQ ID NO: 18204 - RNA, 32 nt, Human
aaacgcuggggcgcccacccuggcagacuaac

SEQ ID NO: 18205 - RNA, 32 nt, Human
aaacgcuugaaccugggaggcugagcuugcag

SEQ ID NO: 18206 - RNA, 32 nt, Human
aaacggaaaacugcuguuuaagagaaaucuga

SEQ ID NO: 18207 - RNA, 32 nt, Human
aaacggaaguggccgucgguggcagguuuggg

SEQ ID NO: 18208 - RNA, 32 nt, Human
aaacggacugaggccaaugagaacagauggau

SEQ ID NO: 18209 - RNA, 32 nt, Human
aaacggagaacugcucucuuuaauuauuucaa

SEQ ID NO: 18210 - RNA, 32 nt, Human
aaacggagcccaucuaaccaaugcccagcaca

SEQ ID NO: 18211 - RNA, 32 nt, Human
aaacggagccugacacaugagcagucuuauua

SEQ ID NO: 18212 - RNA, 32 nt, Human
aaacggaggaagguucucuuugcgcuugccuu

SEQ ID NO: 18213 - RNA, 32 nt, Human
aaacggauagaacaggauuuucuaggaguuac

SEQ ID NO: 18214 - RNA, 32 nt, Human
aaacggcaacacacucaccuccauccaagaca

SEQ ID NO: 18215 - RNA, 32 nt, Human
aaacggccccacccuuaucucccuucacugac

SEQ ID NO: 18216 - RNA, 32 nt, Human
aaacggcgugcauggcaugcacguucagacag

SEQ ID NO: 18217 - RNA, 32 nt, Human
aaacggcugcagcuccugcccccaagccggcc

SEQ ID NO: 18218 - RNA, 32 nt, Human
aaacgggagcuguggaccacaggccagccagu

SEQ ID NO: 18219 - RNA, 32 nt, Human
aaacgggaggcggagguugcagugagccgaaa

SEQ ID NO: 18220 - RNA, 32 nt, Human
aaacggggagaaggguugaguuuucaugaaua

SEQ ID NO: 18221 - RNA, 32 nt, Human
aaacggggagaaugugugugagacagagugug

SEQ ID NO: 18222 - RNA, 32 nt, Human
aaacggggaggcagagggaggagggaaggcug

SEQ ID NO: 18223 - RNA, 32 nt, Human
aaacgggucguggagcuccgcaccacucccgc

SEQ ID NO: 18224 - RNA, 32 nt, Human
aaacggguggugugucucaggacaaaaggagg

SEQ ID NO: 18225 - RNA, 32 nt, Human
aaacgguagagugcuuggcugggcgcaguggc

SEQ ID NO: 18226 - RNA, 32 nt, Human
aaacggucuagugguggagcuguggggcugug

SEQ ID NO: 18227 - RNA, 32 nt, Human
aaacggugccuucagccacauccucugaauug

SEQ ID NO: 18228 - RNA, 32 nt, Human
aaacguaaaauacuuacuccauuuuuccugau

SEQ ID NO: 18229 - RNA, 32 nt, Human
aaacguacaccccaucuuuaacuccacagacc

SEQ ID NO: 18230 - RNA, 32 nt, Human
aaacgucaccuugccauacauucuguuucaac

SEQ ID NO: 18231 - RNA, 32 nt, Human
aaacgucaguuccuguaacauuaccuccacac

SEQ ID NO: 18232 - RNA, 32 nt, Human
aaacgucaugccaguaagccuccuguucaacu

SEQ ID NO: 18233 - RNA, 32 nt, Human
aaacguccggcucuucucaggccagguggcug

SEQ ID NO: 18234 - RNA, 32 nt, Human
aaacgucuucuugccaagcucauucuuagaac

SEQ ID NO: 18235 - RNA, 32 nt, Human
aaacgugaaaggcuguggcaucaggguagggg

SEQ ID NO: 18236 - RNA, 32 nt, Human
aaacgugaggacucaggaaaaauaaauaaaua

SEQ ID NO: 18237 - RNA, 32 nt, Human
aaacgugccugauccuguggcugggucccagg

SEQ ID NO: 18238 - RNA, 32 nt, Human
aaacgugccugcuucacuuucugccaugauuu

SEQ ID NO: 18239 - RNA, 32 nt, Human
aaacguggacguuguuuucugccuucccagga

SEQ ID NO: 18240 - RNA, 32 nt, Human
aaacguggcagagggcaagacgggcacucaca

SEQ ID NO: 18241 - RNA, 32 nt, Human
aaacguggcuggagagagaagugggagggagg

SEQ ID NO: 18242 - RNA, 32 nt, Human
aaacguguuuguauuguaggugguguuuguau

SEQ ID NO: 18243 - RNA, 32 nt, Human
aaacguucaugucauuuuagaggauuauaugg

SEQ ID NO: 18244 - RNA, 32 nt, Human
aaacguuccgcugagagcagggugggggcagc

SEQ ID NO: 18245 - RNA, 32 nt, Human
aaacguugauauucuuaaguaccauuucugau

SEQ ID NO: 18246 - RNA, 32 nt, Human
aaacguuuuaacaucuggagccuuugugggug

SEQ ID NO: 18247 - RNA, 32 nt, Human
aaacguuuuacaugaucugauacaaccauuaa

SEQ ID NO: 18248 - RNA, 32 nt, Human
aaacguuuucccuccuuuaauauugauaaagu

SEQ ID NO: 18249 - RNA, 32 nt, Human
aaacuaaaaaccagcagacaccccugaagaau

SEQ ID NO: 18250 - RNA, 21 nt, Human
aaacuaaaacaaaacagaaca

SEQ ID NO: 18251 - RNA, 32 nt, Human
aaacuaaaaccucgguggaaaagcuuuaaauu

SEQ ID NO: 18252 - RNA, 32 nt, Human
aaacuaaccaacaugcagcacaagaaggggag

SEQ ID NO: 18253 - RNA, 32 nt, Human
aaacuaaccagcugggauuacagguaugagcc

SEQ ID NO: 18254 - RNA, 32 nt, Human
aaacuaacuagcaaagacaaaaauucaggcag

SEQ ID NO: 18255 - RNA, 32 nt, Human
aaacuaagaugcacaaugucuccuucagguga

SEQ ID NO: 18256 - RNA, 23 nt, Human
aaacuaagcucaccaacaucaaa

SEQ ID NO: 18257 - RNA, 24 nt, Human
aaacuaaggcacuucacuuagaga

SEQ ID NO: 18258 - RNA, 32 nt, Human
aaacuaaggcucaggaggcuugagacuugcua

SEQ ID NO: 18259 - RNA, 32 nt, Human
aaacuaaggugaugagauauacaucuucuucc

SEQ ID NO: 18260 - RNA, 23 nt, Human
aaacuaaguauguuuauucaaga

SEQ ID NO: 18261 - RNA, 24 nt, Human
aaacuaagugcuuggaccuggaga

SEQ ID NO: 18262 - RNA, 32 nt, Human
aaacuaaguucaggggccauggaaaaugaaaa

SEQ ID NO: 18263 - RNA, 32 nt, Human
aaacuaauacaaaaugauggccauucaugugc

SEQ ID NO: 18264 - RNA, 32 nt, Human
aaacuaaucugucagguucacugguacauaaa

SEQ ID NO: 18265 - RNA, 32 nt, Human
aaacuaauggaaggcagacuauuuacagcuua

SEQ ID NO: 18266 - RNA, 32 nt, Human
aaacuaaugugucucaggcucaaguuuuuaua

SEQ ID NO: 18267 - RNA, 32 nt, Human
aaacuaauuauucaacaguacauaauuaagca

SEQ ID NO: 18268 - RNA, 32 nt, Human
aaacuaauuuggaagaagagugaggacaaaau

SEQ ID NO: 18269 - RNA, 32 nt, Human
aaacuacaaaccugaagaugugacaaugauuu

SEQ ID NO: 18270 - RNA, 32 nt, Human
aaacuacaaaccugagagaggcgcuaaugcuu

SEQ ID NO: 18271 - RNA, 32 nt, Human
aaacuacaaauuagggugggaaaagcucugua

SEQ ID NO: 18272 - RNA, 32 nt, Human
aaacuacaccuccacccacugggcugaagacc

SEQ ID NO: 18273 - RNA, 32 nt, Human
aaacuacagcuuagaaaacaccagagaguuca

SEQ ID NO: 18274 - RNA, 32 nt, Human
aaacuacaggcacaugccaccaugcccagcug

SEQ ID NO: 18275 - RNA, 32 nt, Human
aaacuaccaaaccaguggaugaagaccacuaa

SEQ ID NO: 18276 - RNA, 32 nt, Human
aaacuaccaagcucucccuuaucaagugaaua

SEQ ID NO: 18277 - RNA, 21 nt, Human
aaacuaccaucuccccugccc

SEQ ID NO: 18278 - RNA, 32 nt, Human
aaacuaccgucauucugcucauguuucuucuu

SEQ ID NO: 18279 - RNA, 32 nt, Human
aaacuaccgugagacaucacuucaccccgguu

SEQ ID NO: 18280 - RNA, 32 nt, Human
aaacuaccuaaccuuggcugugggccgauaau

SEQ ID NO: 18281 - RNA, 32 nt, Human
aaacuaccuaggaggcagaagcuaagugauuu

SEQ ID NO: 18282 - RNA, 32 nt, Human
aaacuacucacuucuuuauuucauccuuucga

SEQ ID NO: 18283 - RNA, 32 nt, Human
aaacuacucccugcuacucauugagacugguu

SEQ ID NO: 18284 - RNA, 32 nt, Human
aaacuacugagaugauaacugugaaauauuug

SEQ ID NO: 18285 - RNA, 32 nt, Human
aaacuacugcaacccucacauccucaaaggga

SEQ ID NO: 18286 - RNA, 32 nt, Human
aaacuacuugaauaguauuuugcugaagagca

SEQ ID NO: 18287 - RNA, 32 nt, Human
aaacuagaauacugcuagucucccaaguccug

SEQ ID NO: 18288 - RNA, 32 nt, Human
aaacuagacacauagaucaaugggacggauga

SEQ ID NO: 18289 - RNA, 32 nt, Human
aaacuagagacucaaagagggagugcauuuau

SEQ ID NO: 18290 - RNA, 32 nt, Human
aaacuagagaugggauuugggggugaauuugu

SEQ ID NO: 18291 - RNA, 22 nt, Human
aaacuagaguauucauccaggg

SEQ ID NO: 18292 - RNA, 32 nt, Human
aaacuagaucauuaacacugcgccugccccuc

SEQ ID NO: 18293 - RNA, 32 nt, Human
aaacuagaugcagaggaggucuugccagcacu

SEQ ID NO: 18294 - RNA, 32 nt, Human
aaacuagcucccagcccccauggggcagcagc

SEQ ID NO: 18295 - RNA, 32 nt, Human
aaacuaggaauugcagucugaggaucauuuag

SEQ ID NO: 18296 - RNA, 32 nt, Human
aaacuaggagucaaggaggacguggggagcug

SEQ ID NO: 18297 - RNA, 32 nt, Human
aaacuaggcuacauuucaaaauucagggcugu

SEQ ID NO: 18298 - RNA, 32 nt, Human
aaacuagggaaacuaguucuuugguuaaugaa

SEQ ID NO: 18299 - RNA, 32 nt, Human
aaacuagguccacuaucaacaggcuacuuacu

SEQ ID NO: 18300 - RNA, 32 nt, Human
aaacuaucaacaacaaggaagucugcucugua

SEQ ID NO: 18301 - RNA, 32 nt, Human
aaacuaucaccugggcuggagugcgauggcau

SEQ ID NO: 18302 - RNA, 32 nt, Human
aaacuaucaguauuuuacagauguuuuaauua

SEQ ID NO: 18303 - RNA, 32 nt, Human
aaacuaucucaaaucaccugaacaucaaguga

SEQ ID NO: 18304 - RNA, 32 nt, Human
aaacuauggaauugagggcacauccuuugugu

SEQ ID NO: 18305 - RNA, 32 nt, Human
aaacuauggcauggacaguaaggauucagaag

SEQ ID NO: 18306 - RNA, 32 nt, Human
aaacuauggcauggacaguaaggauucagagg

SEQ ID NO: 18307 - RNA, 32 nt, Human
aaacuauucacucaaauaauuaguaacugaua

SEQ ID NO: 18308 - RNA, 32 nt, Human
aaacuauugccugagaaaaagagggagacagg

SEQ ID NO: 18309 - RNA, 32 nt, Human
aaacuauuuaguaagaaucaacagugacuguc

SEQ ID NO: 18310 - RNA, 32 nt, Human
aaacuauuugagcuauacacaaaaagaaauuu

SEQ ID NO: 18311 - RNA, 32 nt, Human
aaacuauuuguucaaagaacccguuaguguug

SEQ ID NO: 18312 - RNA, 32 nt, Human
aaacuauuuugcagcauagcuacuuucagaau

SEQ ID NO: 18313 - RNA, 32 nt, Human
aaacuauuuugcaugcugcugcagccuuuaaa

SEQ ID NO: 18314 - RNA, 32 nt, Human
aaacucaaaagaaugcaacuguuugugucuca

SEQ ID NO: 18315 - RNA, 32 nt, Human
aaacucaaaaucaaaagacuuagcuucuagga

SEQ ID NO: 18316 - RNA, 32 nt, Human
aaacucaaaauggauucuuaggagcauuuuag

SEQ ID NO: 18317 - RNA, 32 nt, Human
aaacucaaauauuccuccuaucugcaccaaaa

SEQ ID NO: 18318 - RNA, 32 nt, Human
aaacucaaccaccaccugcagcuugucuccgg

SEQ ID NO: 18319 - RNA, 32 nt, Human
aaacucaagaaugauuuuucuaaaaauaugag

SEQ ID NO: 18320 - RNA, 32 nt, Human
aaacucaagacccauccucccgcugucacuuu

SEQ ID NO: 18321 - RNA, 32 nt, Human
aaacucaagccuugccuuuuaggaggccacca

SEQ ID NO: 18322 - RNA, 32 nt, Human
aaacucacaaauggagauugcaaagucuuggg

SEQ ID NO: 18323 - RNA, 32 nt, Human
aaacucacaaauggugugcuauucuugggcaa

SEQ ID NO: 18324 - RNA, 32 nt, Human
aaacucacacuucucaggguuaggugucagaa

SEQ ID NO: 18325 - RNA, 32 nt, Human
aaacucacccauaacagagagcagugucuccc

SEQ ID NO: 18326 - RNA, 32 nt, Human
aaacucaccucuacucuguauuuucuacaguu

SEQ ID NO: 18327 - RNA, 32 nt, Human
aaacucacgaagcagaggcugggcgugguggc

SEQ ID NO: 18328 - RNA, 32 nt, Human
aaacucacgcugcuccagccugaggcuuccag

SEQ ID NO: 18329 - RNA, 32 nt, Human
aaacucacucaguaucaugacaacagcauggg

SEQ ID NO: 18330 - RNA, 32 nt, Human
aaacucagacagggagggcgcagggccagaac

SEQ ID NO: 18331 - RNA, 21 nt, Human
aaacucagagggaacugagau

SEQ ID NO: 18332 - RNA, 32 nt, Human
aaacucagaggugauuggggagacugacacag

SEQ ID NO: 18333 - RNA, 32 nt, Human
aaacucagaucaucucgcccacccuggagagu

SEQ ID NO: 18334 - RNA, 32 nt, Human
aaacucagccuucaggacucuguccuccagca

SEQ ID NO: 18335 - RNA, 32 nt, Human
aaacucaggcagaaagcaaugaagaagaauua

SEQ ID NO: 18336 - RNA, 32 nt, Human
aaacucaggcccugccuuucugcuacacaauu

SEQ ID NO: 18337 - RNA, 32 nt, Human
aaacucaggcuggaauacacuggcauggucau

SEQ ID NO: 18338 - RNA, 32 nt, Human
aaacucaguaccugcugacccaggaccuacaa

SEQ ID NO: 18339 - RNA, 30 nt, Human
aaacucaguccguccaugcucuguggcauu

SEQ ID NO: 18340 - RNA, 32 nt, Human
aaacucagugaccucugccucucccacauucc

SEQ ID NO: 18341 - RNA, 32 nt, Human
aaacucaguggauaagcaucuuugucauauuu

SEQ ID NO: 18342 - RNA, 32 nt, Human
aaacucauagcacauccuccaguuacauggca

SEQ ID NO: 18343 - RNA, 32 nt, Human
aaacucauaugcagauggucucagaguucuau

SEQ ID NO: 18344 - RNA, 32 nt, Human
aaacucaucugauccuuucaucagcccuagag

SEQ ID NO: 18345 - RNA, 32 nt, Human
aaacucaugaacagugggucuugaugagcuuc

SEQ ID NO: 18346 - RNA, 32 nt, Human
aaacuccaaccagucacccaaccagagccucu

SEQ ID NO: 18347 - RNA, 18 nt, Human
aaacuccaaccccugccc

SEQ ID NO: 18348 - RNA, 32 nt, Human
aaacuccacaugguuccugccugcucauuucc

SEQ ID NO: 18349 - RNA, 32 nt, Human
aaacuccaccuauuuugcaaacaaacuuauuc

SEQ ID NO: 18350 - RNA, 32 nt, Human
aaacuccagaaaucuugucuguccucggaaga

SEQ ID NO: 18351 - RNA, 32 nt, Human
aaacuccagaggauaaguuuacacuuaacaag

SEQ ID NO: 18352 - RNA, 32 nt, Human
aaacuccagaguuggagccaggguucacagcc

SEQ ID NO: 18353 - RNA, 32 nt, Human
aaacuccagaugggcagaaggcagggugcaca

SEQ ID NO: 18354 - RNA, 32 nt, Human
aaacuccagccaggcuguacaggaagcauggc

SEQ ID NO: 18355 - RNA, 32 nt, Human
aaacuccagccauccuggaguugauauucacc

SEQ ID NO: 18356 - RNA, 32 nt, Human
aaacuccaggaggcggaggaggcuaguggcag

SEQ ID NO: 18357 - RNA, 32 nt, Human
aaacuccagggaccucuauccuccaggagucu

SEQ ID NO: 18358 - RNA, 32 nt, Human
aaacuccagucguggcuaaaaggggccacaua

SEQ ID NO: 18359 - RNA, 32 nt, Human
aaacuccauccagcuaagcgaucuugaacaag

SEQ ID NO: 18360 - RNA, 32 nt, Human
aaacuccaugaagacuuuugcagccaguuccc

SEQ ID NO: 18361 - RNA, 32 nt, Human
aaacuccauguuaguccucuuagaugacugcu

SEQ ID NO: 18362 - RNA, 28 nt, Human
aaacucccaaguguguucuuaucccaug

SEQ ID NO: 18363 - RNA, 32 nt, Human
aaacucccagaggugucagagguggcugugcc

SEQ ID NO: 18364 - RNA, 32 nt, Human
aaacucccagcagccccuacagagguggcaca

SEQ ID NO: 18365 - RNA, 32 nt, Human
aaacucccagccgccucauggcaaaugcccaa

SEQ ID NO: 18366 - RNA, 31 nt, Human
aaacuccccaugaucugacaugcagaaaucc

SEQ ID NO: 18367 - RNA, 32 nt, Human
aaacuccccgucccauauccugccucagcccg

SEQ ID NO: 18368 - RNA, 32 nt, Human
aaacuccccuaaaccacacacaggagagagcg

SEQ ID NO: 18369 - RNA, 32 nt, Human
aaacuccccugagaccuuacuccuuccagccc

SEQ ID NO: 18370 - RNA, 32 nt, Human
aaacucccgcagacuucucuguagaucgcuga

SEQ ID NO: 18371 - RNA, 32 nt, Human
aaacucccuucucuccccuguaacugcucauc

SEQ ID NO: 18372 - RNA, 32 nt, Human
aaacuccucaaguucaucuggcucagacaacc

SEQ ID NO: 18373 - RNA, 32 nt, Human
aaacuccuccuugagcacacaccuucucucaa

SEQ ID NO: 18374 - RNA, 32 nt, Human
aaacuccucuggagguuguuuuugaaagaaac

SEQ ID NO: 18375 - RNA, 21 nt, Human
aaacuccugaccucaagugau

SEQ ID NO: 18376 - RNA, 32 nt, Human
aaacuccugaccucaugauuugccugccucgg

SEQ ID NO: 18377 - RNA, 32 nt, Human
aaacuccugccguccugcgccugcuggggccu

SEQ ID NO: 18378 - RNA, 32 nt, Human
aaacuccugccugcccuccagacugucugccc

SEQ ID NO: 18379 - RNA, 32 nt, Human
aaacuccugggcugauuaauagugggauagca

SEQ ID NO: 18380 - RNA, 32 nt, Human
aaacuccuggguucaagccucagccugccaaa

SEQ ID NO: 18381 - RNA, 32 nt, Human
aaacuccuucugcgggaaggagagaaggagaa

SEQ ID NO: 18382 - RNA, 24 nt, Human
aaacuccuuggucaccugcuccaa

SEQ ID NO: 18383 - RNA, 32 nt, Human
aaacucgaauguuugguuagcaaccaagccua

SEQ ID NO: 18384 - RNA, 32 nt, Human
aaacucgcacacuaucuguggaacucauuuaa

SEQ ID NO: 18385 - RNA, 32 nt, Human
aaacucggacugcucucgucugccgugugguu

SEQ ID NO: 18386 - RNA, 32 nt, Human
aaacucggccucaaguugcgcccucuagguag

SEQ ID NO: 18387 - RNA, 32 nt, Human
aaacucgggagguagagguugcagugagccaa

SEQ ID NO: 18388 - RNA, 32 nt, Human
aaacucgggcaaguacugcagcuauuuggaaa

SEQ ID NO: 18389 - RNA, 32 nt, Human
aaacucgucucucggccuuucucuccugccuu

SEQ ID NO: 18390 - RNA, 32 nt, Human
aaacucgucugauguuuugaugccauuugucu

SEQ ID NO: 18391 - RNA, 32 nt, Human
aaacucgugggggauuuuugcauguauaagau

SEQ ID NO: 18392 - RNA, 32 nt, Human
aaacucgugguuuuucucucauuuucuucccu

SEQ ID NO: 18393 - RNA, 32 nt, Human
aaacucguuggaucaagagauccucccacugu

SEQ ID NO: 18394 - RNA, 32 nt, Human
aaacucuacuauauagcaguaauaucaaaagu

SEQ ID NO: 18395 - RNA, 32 nt, Human
aaacucuagaaacucuuuaucuucucaucuua

SEQ ID NO: 18396 - RNA, 32 nt, Human
aaacucuagugagacaaggcuugcuguuucua

SEQ ID NO: 18397 - RNA, 32 nt, Human
aaacucucacagucuuaaaccgugccaaaguc

SEQ ID NO: 18398 - RNA, 32 nt, Human
aaacucucaccgcagcugccagcccccugugc

SEQ ID NO: 18399 - RNA, 32 nt, Human
aaacucuccagccacucucuucuacgcugccu

SEQ ID NO: 18400 - RNA, 32 nt, Human
aaacucucucuuccuuucucucugccuguccc

SEQ ID NO: 18401 - RNA, 32 nt, Human
aaacucucugaaccccucccuccaucguuuuc

SEQ ID NO: 18402 - RNA, 32 nt, Human
aaacucucuuuccccauuucuaucucccagcc

SEQ ID NO: 18403 - RNA, 32 nt, Human
aaacucugacaaaggcuuuuccuuauagaaua

SEQ ID NO: 18404 - RNA, 32 nt, Human
aaacucugaggguggagccaggaagcuguguu

SEQ ID NO: 18405 - RNA, 32 nt, Human
aaacucugauguaacuucuucuaccucugaag

SEQ ID NO: 18406 - RNA, 32 nt, Human
aaacucugcauccuucucuaacaacgugacua

SEQ ID NO: 18407 - RNA, 32 nt, Human
aaacucugcccaacaggagagaucuaguuuuc

SEQ ID NO: 18408 - RNA, 32 nt, Human
aaacucugccucaggauuacagugccaacucc

SEQ ID NO: 18409 - RNA, 32 nt, Human
aaacucugggccuucagaugucacccuaaucc

SEQ ID NO: 18410 - RNA, 32 nt, Human
aaacucuggugaggguggugcagaucaucaug

SEQ ID NO: 18411 - RNA, 32 nt, Human
aaacucugguuaggagaaagauaagaaaaucu

SEQ ID NO: 18412 - RNA, 32 nt, Human
aaacucuguggaggaggaagaugggagcugau

SEQ ID NO: 18413 - RNA, 32 nt, Human
aaacucuguguguuuagggaguauacaaaaga

SEQ ID NO: 18414 - RNA, 32 nt, Human
aaacucuguuuuaagguugagaaaguuucaag

SEQ ID NO: 18415 - RNA, 32 nt, Human
aaacucuuaaggcuacugagauagaacgaaga

SEQ ID NO: 18416 - RNA, 32 nt, Human
aaacucuucaaggccaaggaacaguggucuaa

SEQ ID NO: 18417 - RNA, 32 nt, Human
aaacucuucuucuuccccaucaggaccauuuu

SEQ ID NO: 18418 - RNA, 32 nt, Human
aaacucuugacagaagcugugacaaccagaaa

SEQ ID NO: 18419 - RNA, 32 nt, Human
aaacucuugccagauaaccaguuucaugaacu

SEQ ID NO: 18420 - RNA, 32 nt, Human
aaacucuugcccauauuucaagccucuucagc

SEQ ID NO: 18421 - RNA, 32 nt, Human
aaacucuugucaagaauggcccagaggaaugc

SEQ ID NO: 18422 - RNA, 20 nt, Human
aaacucuuucuauaaagggu

SEQ ID NO: 18423 - RNA, 32 nt, Human
aaacucuuugaagauguuccaggauuuagcac

SEQ ID NO: 18424 - RNA, 32 nt, Human
aaacucuuuuugaucgacuuugcuuaaugggu

SEQ ID NO: 18425 - RNA, 32 nt, Human
aaacugaaaaacaauccaguaaauguacuuug

SEQ ID NO: 18426 - RNA, 22 nt, Human
aaacugaaagcugagcgugaac

SEQ ID NO: 18427 - RNA, 22 nt, Human
aaacugaaagcugagugugaac

SEQ ID NO: 18428 - RNA, 32 nt, Human
aaacugaaaggagauuuugauuaaaauuuugc

SEQ ID NO: 18429 - RNA, 32 nt, Human
aaacugaacaagccaccugccuucccugagac

SEQ ID NO: 18430 - RNA, 32 nt, Human
aaacugaagaccaagaaaacuuggacgguggu

SEQ ID NO: 18431 - RNA, 32 nt, Human
aaacugaagagccugaguuacucucauggcuu

SEQ ID NO: 18432 - RNA, 32 nt, Human
aaacugaaguuagcugggugugguggcucaug

SEQ ID NO: 18433 - RNA, 32 nt, Human
aaacugaauugacaaaugcauuguaacuacaa

SEQ ID NO: 18434 - RNA, 21 nt, Human
aaacugaauuuucacccccca

SEQ ID NO: 18435 - RNA, 32 nt, Human
aaacugacaagaaaaucugaccuucauccaua

SEQ ID NO: 18436 - RNA, 32 nt, Human
aaacugacagcucugagcuguggccuuaccuu

SEQ ID NO: 18437 - RNA, 32 nt, Human
aaacugacaugcccucccuucucccuggaucu

SEQ ID NO: 18438 - RNA, 32 nt, Human
aaacugaccucuuccuccuggcuaaauaaauu

SEQ ID NO: 18439 - RNA, 32 nt, Human
aaacugacuaaggucagagguggcuuucugag

SEQ ID NO: 18440 - RNA, 32 nt, Human
aaacugacuacacauacauaauacugcauuuu

SEQ ID NO: 18441 - RNA, 21 nt, Human
aaacugacucucaacaucaaa

SEQ ID NO: 18442 - RNA, 32 nt, Human
aaacugagacccagaaagguggaagcacuugu

SEQ ID NO: 18443 - RNA, 32 nt, Human
aaacugagaggcuacuuccuggggccacacag

SEQ ID NO: 18444 - RNA, 32 nt, Human
aaacugagauguagccccucuccuggaagugc

SEQ ID NO: 18445 - RNA, 32 nt, Human
aaacugagcagcgccaacucccugccagcggg

SEQ ID NO: 18446 - RNA, 32 nt, Human
aaacugagcagcugccggacgccugggucagg

SEQ ID NO: 18447 - RNA, 32 nt, Human
aaacugagcaggaaggguaaggaaguggcuag

SEQ ID NO: 18448 - RNA, 21 nt, Human
aaacugagcauuucuuuugcc

SEQ ID NO: 18449 - RNA, 32 nt, Human
aaacugagcucucuuccauuuuacuuacugcu

SEQ ID NO: 18450 - RNA, 23 nt, Human
aaacugaggcacuaucccagaga

SEQ ID NO: 18451 - RNA, 32 nt, Human
aaacugaggcccagagagguuaagugauugcc

SEQ ID NO: 18452 - RNA, 32 nt, Human
aaacugaggccuggagguaggaagggacuugc

SEQ ID NO: 18453 - RNA, 32 nt, Human
aaacugaggcucagagaggugaagucacuaag

SEQ ID NO: 18454 - RNA, 32 nt, Human
aaacugaggguugcccugggcccuacccuucc

SEQ ID NO: 18455 - RNA, 32 nt, Human
aaacugaggucucauggagaagccccggagua

SEQ ID NO: 18456 - RNA, 32 nt, Human
aaacugaguagcagaaaacagaggccacacuu

SEQ ID NO: 18457 - RNA, 32 nt, Human
aaacugagucauagaggauacagacuugccca

SEQ ID NO: 18458 - RNA, 32 nt, Human
aaacugagugccuguguagaucauccuagaau

SEQ ID NO: 18459 - RNA, 32 nt, Human
aaacugauacaacucagaaacugcucaauguc

SEQ ID NO: 18460 - RNA, 32 nt, Human
aaacugaugaagcugcagaaccaaugaggugg

SEQ ID NO: 18461 - RNA, 32 nt, Human
aaacugauggccaaccuagagcagcaaggagc

SEQ ID NO: 18462 - RNA, 32 nt, Human
aaacugaugucccugugaacaccugcacuaug

SEQ ID NO: 18463 - RNA, 32 nt, Human
aaacugauugcuaaggugaaacaauucaaugc

SEQ ID NO: 18464 - RNA, 32 nt, Human
aaacugauuucacuccagacugguguggccac

SEQ ID NO: 18465 - RNA, 32 nt, Human
aaacugcaaagcaguuugaugacacuguuuua

SEQ ID NO: 18466 - RNA, 32 nt, Human
aaacugcaacucuacaaaaauacaaaaauuag

SEQ ID NO: 18467 - RNA, 32 nt, Human
aaacugcacccugcgaaagagcagaaaacagg

SEQ ID NO: 18468 - RNA, 32 nt, Human
aaacugcagacugaaagaaacaugccugcagg

SEQ ID NO: 18469 - RNA, 32 nt, Human
aaacugcagcccggccaggcagcugggaccag

SEQ ID NO: 18470 - RNA, 32 nt, Human
aaacugcagcgcggugagagagcgagagagag

SEQ ID NO: 18471 - RNA, 32 nt, Human
aaacugcagcuggucuggcuuacuguuuugcc

SEQ ID NO: 18472 - RNA, 32 nt, Human
aaacugcaggaucuuccuucugaccccugcuu

SEQ ID NO: 18473 - RNA, 32 nt, Human
aaacugcaggcuuccccagaacugucaugaga

SEQ ID NO: 18474 - RNA, 32 nt, Human
aaacugcaucuuggcccuguugccugggcuga

SEQ ID NO: 18475 - RNA, 32 nt, Human
aaacugccaaccacaggaaacagccuggcaaa

SEQ ID NO: 18476 - RNA, 32 nt, Human
aaacugccaccugcgggcacauucccauaaau

SEQ ID NO: 18477 - RNA, 32 nt, Human
aaacugccaggugggagaagcagagccauggg

SEQ ID NO: 18478 - RNA, 32 nt, Human
aaacugccauagaauuaacaucugccaggaau

SEQ ID NO: 18479 - RNA, 32 nt, Human
aaacugcccagcccuucucugccuaauugcaa

SEQ ID NO: 18480 - RNA, 32 nt, Human
aaacugccccuuucuaaaaaugacccuaaacu

SEQ ID NO: 18481 - RNA, 32 nt, Human
aaacugcccuuaagagucauuuccuuguuauc

SEQ ID NO: 18482 - RNA, 32 nt, Human
aaacugccguaaccucugccguucaggaaccc

SEQ ID NO: 18483 - RNA, 32 nt, Human
aaacugccucaagucggccucuccaggcccag

SEQ ID NO: 18484 - RNA, 32 nt, Human
aaacugccucuucauguugccugcucaaguuu

SEQ ID NO: 18485 - RNA, 32 nt, Human
aaacugccugcacuucaucucuggagguucgc

SEQ ID NO: 18486 - RNA, 32 nt, Human
aaacugccugcucuucuaaauuguguguccca

SEQ ID NO: 18487 - RNA, 32 nt, Human
aaacugccuuccacuaaaccagucccuggugc

SEQ ID NO: 18488 - RNA, 32 nt, Human
aaacugcgggagcugggcgcucagugggggaa

SEQ ID NO: 18489 - RNA, 24 nt, Human
aaacugcuaaggccaucucagggg

SEQ ID NO: 18490 - RNA, 32 nt, Human
aaacugcuauuuucgcuuauuucuggaaugua

SEQ ID NO: 18491 - RNA, 32 nt, Human
aaacugcucaaucaaaagaauauuucaacucu

SEQ ID NO: 18492 - RNA, 32 nt, Human
aaacugcugaaaaagcugggugcagugaaaug

SEQ ID NO: 18493 - RNA, 32 nt, Human
aaacugcugagggagcuggcagaggacugcaa

SEQ ID NO: 18494 - RNA, 32 nt, Human
aaacugcugcagcuguuggccgaguggaccga

SEQ ID NO: 18495 - RNA, 32 nt, Human
aaacugcugcugcaggggguccugaaaacagc

SEQ ID NO: 18496 - RNA, 32 nt, Human
aaacugcugcuugaggagauucuacagccaga

SEQ ID NO: 18497 - RNA, 32 nt, Human
aaacuggaaacacucugaacccugccaucuug

SEQ ID NO: 18498 - RNA, 32 nt, Human
aaacuggaagcccccucugccucccagcuggg

SEQ ID NO: 18499 - RNA, 32 nt, Human
aaacuggaaggcagagguugcagugagccaag

SEQ ID NO: 18500 - RNA, 32 nt, Human
aaacuggaaggcagagguugcagugagccgag

SEQ ID NO: 18501 - RNA, 32 nt, Human
aaacuggaaggcucccuuucuguuugaaguuu

SEQ ID NO: 18502 - RNA, 32 nt, Human
aaacuggaccaugucaaccaguuucaggugua

SEQ ID NO: 18503 - RNA, 32 nt, Human
aaacuggaccccuuccuuacaccuuaugcaaa

SEQ ID NO: 18504 - RNA, 32 nt, Human
aaacuggacgugcacccccaugggauggagac

SEQ ID NO: 18505 - RNA, 32 nt, Human
aaacuggaggcugggcgcaguggcucacgccu

SEQ ID NO: 18506 - RNA, 32 nt, Human
aaacuggagugcuugaaggagcugcagacaga

SEQ ID NO: 18507 - RNA, 32 nt, Human
aaacuggaucccuuccuuacaccuuauacaaa

SEQ ID NO: 18508 - RNA, 32 nt, Human
aaacuggaucccuuccuuacaccuuaugcaaa

SEQ ID NO: 18509 - RNA, 32 nt, Human
aaacuggauuaguucuuuuacuucaguguuua

SEQ ID NO: 18510 - RNA, 31 nt, Human
aaacuggcaaaaggaacuuggauugcaggaa

SEQ ID NO: 18511 - RNA, 32 nt, Human
aaacuggcacagaaccagugguggugagagcu

SEQ ID NO: 18512 - RNA, 32 nt, Human
aaacuggccacggccgggaacggaggggacag

SEQ ID NO: 18513 - RNA, 32 nt, Human
aaacuggccauaaagaaauuaucugacuuacc

SEQ ID NO: 18514 - RNA, 32 nt, Human
aaacuggccuguuuacuucgucuccuaacaaa

SEQ ID NO: 18515 - RNA, 32 nt, Human
aaacuggcuccguugcacaaucuaguugcuua

SEQ ID NO: 18516 - RNA, 32 nt, Human
aaacuggcuccuuaaaguugguggugaagaca

SEQ ID NO: 18517 - RNA, 32 nt, Human
aaacuggcuucaaaacacagccauaauuagac

SEQ ID NO: 18518 - RNA, 32 nt, Human
aaacugggaaaaucacaggcucuuccacuuac

SEQ ID NO: 18519 - RNA, 32 nt, Human
aaacugggaaccccuuucccaccccaaccugc

SEQ ID NO: 18520 - RNA, 32 nt, Human
aaacugggaagaggacccucaccaggaaccac

SEQ ID NO: 18521 - RNA, 32 nt, Human
aaacugggacugccuuucccucuccucagccc

SEQ ID NO: 18522 - RNA, 32 nt, Human
aaacugggagagggaggaagggagaaagugag

SEQ ID NO: 18523 - RNA, 32 nt, Human
aaacugggaggcagggguuggagugagccagg

SEQ ID NO: 18524 - RNA, 32 nt, Human
aaacugggaggcggagcuugcagugagccgag

SEQ ID NO: 18525 - RNA, 26 nt, Human
aaacugggagguggagguugcaguga

SEQ ID NO: 18526 - RNA, 32 nt, Human
aaacugggagguggagguugcagugagccaag

SEQ ID NO: 18527 - RNA, 32 nt, Human
aaacugggauuggacaguaguggugcaucugg

SEQ ID NO: 18528 - RNA, 32 nt, Human
aaacugggcggcagccagaguucccugaagug

SEQ ID NO: 18529 - RNA, 32 nt, Human
aaacugggcucagcaugcuuguccucaaaaug

SEQ ID NO: 18530 - RNA, 32 nt, Human
aaacuggggaaugugucucugccuguaaacuc

SEQ ID NO: 18531 - RNA, 32 nt, Human
aaacuggggcacagagaggugaugucaucugc

SEQ ID NO: 18532 - RNA, 32 nt, Human
aaacuggggcugggccucuaucccuccucugc

SEQ ID NO: 18533 - RNA, 32 nt, Human
aaacugggggacucuccucccuucucucccca

SEQ ID NO: 18534 - RNA, 32 nt, Human
aaacuggguacaauaaauaagcuggauuauac

SEQ ID NO: 18535 - RNA, 31 nt, Human
aaacuggguggggcaggaugggugcccacac

SEQ ID NO: 18536 - RNA, 32 nt, Human
aaacugguaacaggcugggugcaauggcucac

SEQ ID NO: 18537 - RNA, 32 nt, Human
aaacuggucucaaacuccuggccucaagcaau

SEQ ID NO: 18538 - RNA, 32 nt, Human
aaacuggucucgaacuccugaccucgggaucc

SEQ ID NO: 18539 - RNA, 32 nt, Human
aaacuggucugcaaagagaaggaagaggaaag

SEQ ID NO: 18540 - RNA, 32 nt, Human
aaacuggucugccuuuacaaaguggaaguuca

SEQ ID NO: 18541 - RNA, 31 nt, Human
aaacuggugaagugagaaaaacagaaugcag

SEQ ID NO: 18542 - RNA, 32 nt, Human
aaacuggugucaucagcuguuucucccagcau

SEQ ID NO: 18543 - RNA, 32 nt, Human
aaacugguuugugguugaccuggggguuaggu

SEQ ID NO: 18544 - RNA, 32 nt, Human
aaacuguaaaaaucccuccuccccaguguaga

SEQ ID NO: 18545 - RNA, 32 nt, Human
aaacuguaaauaccuugaggcaggagugaggu

SEQ ID NO: 18546 - RNA, 32 nt, Human
aaacuguaaauacugcauuucuuuugcguaua

SEQ ID NO: 18547 - RNA, 32 nt, Human
aaacuguaacacaucacauaaaagauacuuua

SEQ ID NO: 18548 - RNA, 32 nt, Human
aaacuguaaggaaaaagaguguuaauaccaug

SEQ ID NO: 18549 - RNA, 32 nt, Human
aaacuguaccacugggccaagugcaguggauc

SEQ ID NO: 18550 - RNA, 32 nt, Human
aaacuguaucagguacauuccagccuguuggc

SEQ ID NO: 18551 - RNA, 23 nt, Human
aaacuguaucagucauccagaga

SEQ ID NO: 18552 - RNA, 32 nt, Human
aaacuguaugucuuauaagaaaacauguaaag

SEQ ID NO: 18553 - RNA, 32 nt, Human
aaacugucaaaacuaccucccaaccaagcccc

SEQ ID NO: 18554 - RNA, 32 nt, Human
aaacugucaucuccuuaugugcuaaugaguuu

SEQ ID NO: 18555 - RNA, 32 nt, Human
aaacuguccuuuuuggauuccugcugcuuuac

SEQ ID NO: 18556 - RNA, 32 nt, Human
aaacugucuuugucaccacguggggcucacuu

SEQ ID NO: 18557 - RNA, 32 nt, Human
aaacugugaaagucagaaaggccagcggggag

SEQ ID NO: 18558 - RNA, 32 nt, Human
aaacugugccuuguuucaacaguuuuugcuaa

SEQ ID NO: 18559 - RNA, 32 nt, Human
aaacugugcgagcacaacacacacaauccuuu

SEQ ID NO: 18560 - RNA, 32 nt, Human
aaacuguggaaguaauuuccaguucuuacacu

SEQ ID NO: 18561 - RNA, 32 nt, Human
aaacugugggaugcuccucccuucucuaccuc

SEQ ID NO: 18562 - RNA, 32 nt, Human
aaacuguggguuuauucuaaguuuacaauuau

SEQ ID NO: 18563 - RNA, 32 nt, Human
aaacuguggucuuugcuuuucucccaaacccg

SEQ ID NO: 18564 - RNA, 32 nt, Human
aaacugugguucgagcaaccugugggaaaucu

SEQ ID NO: 18565 - RNA, 32 nt, Human
aaacuguguaucuggcaggaaguggauuaucu

SEQ ID NO: 18566 - RNA, 32 nt, Human
aaacuguuaacuuauucaaagagaaaacaucu

SEQ ID NO: 18567 - RNA, 32 nt, Human
aaacuguuacucauuaacuuugcuuauaaugc

SEQ ID NO: 18568 - RNA, 32 nt, Human
aaacuguucauccugaaacaggcacaggugau

SEQ ID NO: 18569 - RNA, 32 nt, Human
aaacuguucuugggacugucucaacugugcaa

SEQ ID NO: 18570 - RNA, 32 nt, Human
aaacuguugcugcacacaucuguacucgucaa

SEQ ID NO: 18571 - RNA, 32 nt, Human
aaacuguuucuccaaagcguuuugcaaaaacu

SEQ ID NO: 18572 - RNA, 32 nt, Human
aaacuguuuuagagugaauccugggguguucu

SEQ ID NO: 18573 - RNA, 32 nt, Human
aaacuguuuuccacgacaucugcaccauuuua

SEQ ID NO: 18574 - RNA, 32 nt, Human
aaacuuaacaaugacuuguacucugaaaguuu

SEQ ID NO: 18575 - RNA, 32 nt, Human
aaacuuaaggaguuuugaaaaguaaugcaaau

SEQ ID NO: 18576 - RNA, 32 nt, Human
aaacuuaauguuccagcucuugaacuacacug

SEQ ID NO: 18577 - RNA, 32 nt, Human
aaacuuacaugcaggacaacaaaaugaugaaa

SEQ ID NO: 18578 - RNA, 32 nt, Human
aaacuuacuucauuguaacuauuugaaauaga

SEQ ID NO: 18579 - RNA, 32 nt, Human
aaacuuacuugggauuauuagcacuuucaaac

SEQ ID NO: 18580 - RNA, 32 nt, Human
aaacuuagacuauagacauaacuacaaagcca

SEQ ID NO: 18581 - RNA, 24 nt, Human
aaacuuagcacccuggagagucca

SEQ ID NO: 18582 - RNA, 31 nt, Human
aaacuuaggcacuuugcuauuucuuuucuaa

SEQ ID NO: 18583 - RNA, 32 nt, Human
aaacuuaggggacugagcuggggagggaggca

SEQ ID NO: 18584 - RNA, 32 nt, Human
aaacuuaguccuaaucccagcacuuugggagg

SEQ ID NO: 18585 - RNA, 32 nt, Human
aaacuucaagcugcuuucuuucuugaaaacua

SEQ ID NO: 18586 - RNA, 32 nt, Human
aaacuucacaugcucuuccugccuccuucauc

SEQ ID NO: 18587 - RNA, 32 nt, Human
aaacuucacugcaguggccacuucugaaucuc

SEQ ID NO: 18588 - RNA, 32 nt, Human
aaacuucagcaacccuacaguauauaagcuuu

SEQ ID NO: 18589 - RNA, 32 nt, Human
aaacuucagcaacuguuaauacucagaucaua

SEQ ID NO: 18590 - RNA, 32 nt, Human
aaacuucagcacagaaauagauguggacuuuc

SEQ ID NO: 18591 - RNA, 32 nt, Human
aaacuucaggcggagucccaggagagcagcgc

SEQ ID NO: 18592 - RNA, 32 nt, Human
aaacuucaugcucaccuauuggagauuuggga

SEQ ID NO: 18593 - RNA, 32 nt, Human
aaacuucauuagaacaaacuuuacuugauaug

SEQ ID NO: 18594 - RNA, 32 nt, Human
aaacuuccagcccucuguuaauugugugucuc

SEQ ID NO: 18595 - RNA, 32 nt, Human
aaacuuccaggggcagacaaagugauucgauc

SEQ ID NO: 18596 - RNA, 32 nt, Human
aaacuuccccuccacccaagccccugcuggcc

SEQ ID NO: 18597 - RNA, 32 nt, Human
aaacuuccgaguagcugggacuacaggcauga

SEQ ID NO: 18598 - RNA, 32 nt, Human
aaacuuccuucggaggaaaaagcccuaacgau

SEQ ID NO: 18599 - RNA, 32 nt, Human
aaacuucgguaccuaauacaaaaguuugauug

SEQ ID NO: 18600 - RNA, 32 nt, Human
aaacuucucaacuauauccuaugucugagagg

SEQ ID NO: 18601 - RNA, 32 nt, Human
aaacuucuccccaaacuacaaccucaggaaaa

SEQ ID NO: 18602 - RNA, 32 nt, Human
aaacuucuguaguucuuuuggccaguguguuu

SEQ ID NO: 18603 - RNA, 32 nt, Human
aaacuugaacagcgaaagcagagcauguuauu

SEQ ID NO: 18604 - RNA, 32 nt, Human
aaacuugaaguccaagccgugcugcugauucc

SEQ ID NO: 18605 - RNA, 32 nt, Human
aaacuugaccaaggaagaguuccuguccugaa

SEQ ID NO: 18606 - RNA, 32 nt, Human
aaacuugagaaggcuugugcccaaagcuugaa

SEQ ID NO: 18607 - RNA, 32 nt, Human
aaacuugagucucccuagaggugaaaggugag

SEQ ID NO: 18608 - RNA, 32 nt, Human
aaacuugaucuugggacuucaggguuggccau

SEQ ID NO: 18609 - RNA, 32 nt, Human
aaacuugaugcagaaagccaaauaggucaauu

SEQ ID NO: 18610 - RNA, 32 nt, Human
aaacuugauucuguuucucuacuuauuguaaa

SEQ ID NO: 18611 - RNA, 32 nt, Human
aaacuugcaaggaaagcugccgucucuuuggc

SEQ ID NO: 18612 - RNA, 32 nt, Human
aaacuugcacacaacguuucacaaaaucuuuu

SEQ ID NO: 18613 - RNA, 32 nt, Human
aaacuugcaucugucugaccucaaagcccugc

SEQ ID NO: 18614 - RNA, 32 nt, Human
aaacuugccuuccuaaaaaccaagauggaugc

SEQ ID NO: 18615 - RNA, 32 nt, Human
aaacuugcucuucaacucuguauacaagcaga

SEQ ID NO: 18616 - RNA, 32 nt, Human
aaacuugcugcuuaaugauuugcucacaucua

SEQ ID NO: 18617 - RNA, 32 nt, Human
aaacuugcuggguggugucugcgggaaacagu

SEQ ID NO: 18618 - RNA, 32 nt, Human
aaacuugcuugaaguuccagaaucacuaaggg

SEQ ID NO: 18619 - RNA, 32 nt, Human
aaacuugcuugaccuccacuuuucaggagacu

SEQ ID NO: 18620 - RNA, 32 nt, Human
aaacuuggccaggaguuuccacucgguccgac

SEQ ID NO: 18621 - RNA, 32 nt, Human
aaacuuggccagguucuccagcaaguauaagu

SEQ ID NO: 18622 - RNA, 22 nt, Human
aaacuugggaaggugagggauu

SEQ ID NO: 18623 - RNA, 23 nt, Human
aaacuuggggggacuuccucccu

SEQ ID NO: 18624 - RNA, 32 nt, Human
aaacuugggugagaguggcccaugaagcccuu

SEQ ID NO: 18625 - RNA, 32 nt, Human
aaacuuggucucaagugauucuacugccucag

SEQ ID NO: 18626 - RNA, 32 nt, Human
aaacuuggugauugucagcugugccccugacc

SEQ ID NO: 18627 - RNA, 32 nt, Human
aaacuugguguuagagaacaucuagagagaga

SEQ ID NO: 18628 - RNA, 32 nt, Human
aaacuugguuaggacucuggcuugccuucccc

SEQ ID NO: 18629 - RNA, 32 nt, Human
aaacuuguaaccacccuuuucuaacagcaaua

SEQ ID NO: 18630 - RNA, 32 nt, Human
aaacuuguaacugcuccacagcucccuggaua

SEQ ID NO: 18631 - RNA, 32 nt, Human
aaacuugugaaacccucggucauggacuggau

SEQ ID NO: 18632 - RNA, 32 nt, Human
aaacuuguucugaguccauucaaauguguuuu

SEQ ID NO: 18633 - RNA, 32 nt, Human
aaacuuguuuaccaggaucagaauggccaugu

SEQ ID NO: 18634 - RNA, 32 nt, Human
aaacuuuaacagaaauugucucuuaauacauu

SEQ ID NO: 18635 - RNA, 32 nt, Human
aaacuuuaauauguauuuuauguauguuuaca

SEQ ID NO: 18636 - RNA, 32 nt, Human
aaacuuuacaugccugauggcaccuuacucca

SEQ ID NO: 18637 - RNA, 32 nt, Human
aaacuuuagaaaauuguugacaucaucugugg

SEQ ID NO: 18638 - RNA, 32 nt, Human
aaacuuuagaugauaaaauuagccgggcgugg

SEQ ID NO: 18639 - RNA, 32 nt, Human
aaacuuucagccacaucuuucuucuuaguuua

SEQ ID NO: 18640 - RNA, 32 nt, Human
aaacuuucaguaggaauguugcuaugaucaag

SEQ ID NO: 18641 - RNA, 32 nt, Human
aaacuuuccaucccaaaggcagucuccguggu

SEQ ID NO: 18642 - RNA, 32 nt, Human
aaacuuuccucuuccugccuagaggccccacc

SEQ ID NO: 18643 - RNA, 21 nt, Human
aaacuuuccuuaagccuucaa

SEQ ID NO: 18644 - RNA, 32 nt, Human
aaacuuucuaacaauauagucuuuggauuugu

SEQ ID NO: 18645 - RNA, 32 nt, Human
aaacuuucuaccccucccuucaaucuuauccu

SEQ ID NO: 18646 - RNA, 32 nt, Human
aaacuuucucucuccauguaaucacacuuagu

SEQ ID NO: 18647 - RNA, 32 nt, Human
aaacuuucucugaucuccucucucucuguguc

SEQ ID NO: 18648 - RNA, 32 nt, Human
aaacuuucugccuuccccaacaccuuugugcc

SEQ ID NO: 18649 - RNA, 32 nt, Human
aaacuuucuguggaagggccagagaguaaaua

SEQ ID NO: 18650 - RNA, 32 nt, Human
aaacuuugaaguggguucuucuagucagcuua

SEQ ID NO: 18651 - RNA, 32 nt, Human
aaacuuugacuaauagagcccaggaaggccau

SEQ ID NO: 18652 - RNA, 32 nt, Human
aaacuuugagaguuuacaucagaaagaaaaca

SEQ ID NO: 18653 - RNA, 32 nt, Human
aaacuuugaggaauaaugaaaagcuuuuaaag

SEQ ID NO: 18654 - RNA, 32 nt, Human
aaacuuugccuggucccucuagcugcuggugg

SEQ ID NO: 18655 - RNA, 32 nt, Human
aaacuuugcuucaggcuggguagugguagagg

SEQ ID NO: 18656 - RNA, 32 nt, Human
aaacuuuguaacuuuuguuacugugaauucaa

SEQ ID NO: 18657 - RNA, 32 nt, Human
aaacuuugugcaaagaauagauaguucugccu

SEQ ID NO: 18658 - RNA, 32 nt, Human
aaacuuugugugugugcguguguguauacaua

SEQ ID NO: 18659 - RNA, 32 nt, Human
aaacuuuuaaccaauccucacaccuuauugca

SEQ ID NO: 18660 - RNA, 32 nt, Human
aaacuuuuaugcuggcugggcgcgguggcuua

SEQ ID NO: 18661 - RNA, 32 nt, Human
aaacuuuuccacaguuuuacauucaugugguu

SEQ ID NO: 18662 - RNA, 23 nt, Human
aaacuuuuccagaaaguuuccaa

SEQ ID NO: 18663 - RNA, 32 nt, Human
aaacuuuuccagagaaagauccugauugucau

SEQ ID NO: 18664 - RNA, 20 nt, Human
aaacuuuucuuccccuuccu

SEQ ID NO: 18665 - RNA, 32 nt, Human
aaacuuuuguguccugagcacuggagagaaag

SEQ ID NO: 18666 - RNA, 18 nt, Human
aaagaaaaacccuuucaa

SEQ ID NO: 18667 - RNA, 32 nt, Human
aaagaaaaacgacuuggggaggccguacccgu

SEQ ID NO: 18668 - RNA, 32 nt, Human
aaagaaaaagaaagaaaugaagaaaagagagg

SEQ ID NO: 18669 - RNA, 32 nt, Human
aaagaaaaagcauacacacugggaaggaagaa

SEQ ID NO: 18670 - RNA, 32 nt, Human
aaagaaaaaguauguugugccuucuucuuaag

SEQ ID NO: 18671 - RNA, 18 nt, Human
aaagaaaaauagguucaa

SEQ ID NO: 18672 - RNA, 32 nt, Human
aaagaaaaaucuaggccgggugcaguggcuca

SEQ ID NO: 18673 - RNA, 32 nt, Human
aaagaaaacacaauacaaucaggaguuuucaa

SEQ ID NO: 18674 - RNA, 32 nt, Human
aaagaaaacagguuggaacauacauauagccu

SEQ ID NO: 18675 - RNA, 17 nt, Human
aaagaaaaccacuucaa

SEQ ID NO: 18676 - RNA, 21 nt, Human
aaagaaaacccagugguucaa

SEQ ID NO: 18677 - RNA, 16 nt, Human
aaagaaaaccccucaa

SEQ ID NO: 18678 - RNA, 17 nt, Human
aaagaaaacccuuucag

SEQ ID NO: 18679 - RNA, 18 nt, Human
aaagaaaaccuuucuuca

SEQ ID NO: 18680 - RNA, 32 nt, Human
aaagaaaacgaucccuuccuucuuccacuuuc

SEQ ID NO: 18681 - RNA, 32 nt, Human
aaagaaaacuaacaaccaaccaaccaaccaac

SEQ ID NO: 18682 - RNA, 18 nt, Human
aaagaaaacuuguguuca

SEQ ID NO: 18683 - RNA, 21 nt, Human
aaagaaaagaaaucuaccuca

SEQ ID NO: 18684 - RNA, 32 nt, Human
aaagaaaagaauucuaaugaccugccuugaau

SEQ ID NO: 18685 - RNA, 32 nt, Human
aaagaaaagaggaggaggaggaggaagaaaga

SEQ ID NO: 18686 - RNA, 32 nt, Human
aaagaaaauaaauaugaucaaaagucauaaaa

SEQ ID NO: 18687 - RNA, 32 nt, Human
aaagaaaauacuuauaaaaagacuucauuuuu

SEQ ID NO: 18688 - RNA, 17 nt, Human
aaagaaaauccccucag

SEQ ID NO: 18689 - RNA, 32 nt, Human
aaagaaaauccugacaugcacacccauuaaaa

SEQ ID NO: 18690 - RNA, 18 nt, Human
aaagaaaaugaggcucaa

SEQ ID NO: 18691 - RNA, 32 nt, Human
aaagaaaaugcacaaugguugacagaauagug

SEQ ID NO: 18692 - RNA, 32 nt, Human
aaagaaaauggccuucuugacugugaagagcu

SEQ ID NO: 18693 - RNA, 32 nt, Human
aaagaaaauuuccaagcaugguaucaucucac

SEQ ID NO: 18694 - RNA, 32 nt, Human
aaagaaacaaaaagaagaaccuguucuauguu

SEQ ID NO: 18695 - RNA, 32 nt, Human
aaagaaacaaaccaaaccaaccagcucuugga

SEQ ID NO: 18696 - RNA, 32 nt, Human
aaagaaacagaagagugagaagaaaggagagg

SEQ ID NO: 18697 - RNA, 32 nt, Human
aaagaaacagcagaguaaaagccagacucauu

SEQ ID NO: 18698 - RNA, 17 nt, Human
aaagaaacaugguucaa

SEQ ID NO: 18699 - RNA, 32 nt, Human
aaagaaaccaagcuggauuuugcagugcauau

SEQ ID NO: 18700 - RNA, 32 nt, Human
aaagaaaccacccuuuguucccaacuccacuu

SEQ ID NO: 18701 - RNA, 32 nt, Human
aaagaaacccuacaaaugugaagaauguggca

SEQ ID NO: 18702 - RNA, 32 nt, Human
aaagaaacgugaaugcauaaauauguauaaug

SEQ ID NO: 18703 - RNA, 32 nt, Human
aaagaaacguucgccccagucucuccacagcu

SEQ ID NO: 18704 - RNA, 32 nt, Human
aaagaaacuaaguuacuugucugcagucaaau

SEQ ID NO: 18705 - RNA, 32 nt, Human
aaagaaacuaggguccauaugagggaaaaccc

SEQ ID NO: 18706 - RNA, 31 nt, Human
aaagaaacugagagagguaagacuguacagg

SEQ ID NO: 18707 - RNA, 32 nt, Human
aaagaaacugaggcccagggaggcuaagaguc

SEQ ID NO: 18708 - RNA, 32 nt, Human
aaagaaacugaggcccagggaggcugaguccu

SEQ ID NO: 18709 - RNA, 32 nt, Human
aaagaaagaaaaagaaagaaagaaaagaaaag

SEQ ID NO: 18710 - RNA, 32 nt, Human
aaagaaagaaaagaaaaagaagaaguagcugg

SEQ ID NO: 18711 - RNA, 32 nt, Human
aaagaaagaaagaaagaaagaaaacaguucca

SEQ ID NO: 18712 - RNA, 32 nt, Human
aaagaaagaaagaaagaaagaaaagaaagaaa

SEQ ID NO: 18713 - RNA, 32 nt, Human
aaagaaagaaagaaagaaagaaagaaaacagu

SEQ ID NO: 18714 - RNA, 32 nt, Human
aaagaaagaaagaaagaaagaaagaaaagaaa

SEQ ID NO: 18715 - RNA, 32 nt, Human
aaagaaagaaagaaagaaagaaagaaaauauc

SEQ ID NO: 18716 - RNA, 32 nt, Human
aaagaaagaaagaaagaaagaaaggaauccua

SEQ ID NO: 18717 - RNA, 31 nt, Human
aaagaaagaaagagggaaaaagagcuggugg

SEQ ID NO: 18718 - RNA, 32 nt, Human
aaagaaagagaaaaagaaagaaaggaaagaaa

SEQ ID NO: 18719 - RNA, 32 nt, Human
aaagaaagagaaaagaaaagaaaagcaaccac

SEQ ID NO: 18720 - RNA, 32 nt, Human
aaagaaagagagggagaaagagagggagaaag

SEQ ID NO: 18721 - RNA, 32 nt, Human
aaagaaagagggggaggaagaggaagagaaaa

SEQ ID NO: 18722 - RNA, 32 nt, Human
aaagaaagagguuuaucagacuuacaguucca

SEQ ID NO: 18723 - RNA, 32 nt, Human
aaagaaagaugcugaaaccaaugaagcaaucu

SEQ ID NO: 18724 - RNA, 32 nt, Human
aaagaaagcacccaacgcucuggcagggucug

SEQ ID NO: 18725 - RNA, 32 nt, Human
aaagaaagcccauggaagaggccacacucgga

SEQ ID NO: 18726 - RNA, 32 nt, Human
aaagaaagcugcauaguuauuuuaaauuuaau

SEQ ID NO: 18727 - RNA, 18 nt, Human
aaagaaagcugggguuaa

SEQ ID NO: 18728 - RNA, 32 nt, Human
aaagaaagcuguucuugacagcacucugagcc

SEQ ID NO: 18729 - RNA, 32 nt, Human
aaagaaaggaaggcauuccuuuuauuucuaau

SEQ ID NO: 18730 - RNA, 18 nt, Human
aaagaaaggacgguucga

SEQ ID NO: 18731 - RNA, 32 nt, Human
aaagaaaggacuagcauaugagacuucuggua

SEQ ID NO: 18732 - RNA, 32 nt, Human
aaagaaaggaggcuuuguaggggaagagggcc

SEQ ID NO: 18733 - RNA, 32 nt, Human
aaagaaaggcuauccaguagagcccagugcuc

SEQ ID NO: 18734 - RNA, 32 nt, Human
aaagaaagugcuacaauuccuaaucauuuuag

SEQ ID NO: 18735 - RNA, 32 nt, Human
aaagaaaguggaggggacacuccagaggcugu

SEQ ID NO: 18736 - RNA, 32 nt, Human
aaagaaauaaagugauguuaauaaaaguuuug

SEQ ID NO: 18737 - RNA, 32 nt, Human
aaagaaauacaguacuguuucuggacccuuau

SEQ ID NO: 18738 - RNA, 32 nt, Human
aaagaaauagccaaucaucuauugccugagag

SEQ ID NO: 18739 - RNA, 32 nt, Human
aaagaaauaggaagccacaaauuuguauggau

SEQ ID NO: 18740 - RNA, 32 nt, Human
aaagaaauauggaggaagguuaaaaggggauu

SEQ ID NO: 18741 - RNA, 32 nt, Human
aaagaaaucaaguguuuuuccuuuguaacgua

SEQ ID NO: 18742 - RNA, 18 nt, Human
aaagaaauccuaguuuaa

SEQ ID NO: 18743 - RNA, 32 nt, Human
aaagaaaugaagucccagcugccgagagaaac

SEQ ID NO: 18744 - RNA, 32 nt, Human
aaagaaaugaagucccagcugccgagagcaac

SEQ ID NO: 18745 - RNA, 32 nt, Human
aaagaaauggguucugggccaggugugguggc

SEQ ID NO: 18746 - RNA, 32 nt, Human
aaagaaaugugaagagaaagaagauaauuuuu

SEQ ID NO: 18747 - RNA, 32 nt, Human
aaagaaauguuuuacagaugaaggaauguuuu

SEQ ID NO: 18748 - RNA, 17 nt, Human
aaagaaauucggcucag

SEQ ID NO: 18749 - RNA, 32 nt, Human
aaagaaauuguauggggagugagcacacacca

SEQ ID NO: 18750 - RNA, 32 nt, Human
aaagaacaaaggagagaaaggagggaaaagcc

SEQ ID NO: 18751 - RNA, 32 nt, Human
aaagaacaaaggccagugcgaggcuuggcugg

SEQ ID NO: 18752 - RNA, 32 nt, Human
aaagaacaaauacaaaaauuagccgagcguug

SEQ ID NO: 18753 - RNA, 32 nt, Human
aaagaacaaucacuaaaccacacucaccccag

SEQ ID NO: 18754 - RNA, 32 nt, Human
aaagaacacaagaaagaaagagagggagaaag

SEQ ID NO: 18755 - RNA, 32 nt, Human
aaagaacacacauuuuuaauggagauuggcug

SEQ ID NO: 18756 - RNA, 32 nt, Human
aaagaacacacuguuccacuguauggcuuugg

SEQ ID NO: 18757 - RNA, 32 nt, Human
aaagaacagaacuuugcccacugcacacuugc

SEQ ID NO: 18758 - RNA, 32 nt, Human
aaagaacagagaggaggaggagggagaaaugg

SEQ ID NO: 18759 - RNA, 32 nt, Human
aaagaacagcuggacggagcugagaggagacc

SEQ ID NO: 18760 - RNA, 32 nt, Human
aaagaacaggaaauucugaauagaauugcacu

SEQ ID NO: 18761 - RNA, 32 nt, Human
aaagaacaggauucaaguccagaguuuucauc

SEQ ID NO: 18762 - RNA, 32 nt, Human
aaagaacaggcaggcugugccaguuuaguuaa

SEQ ID NO: 18763 - RNA, 32 nt, Human
aaagaacaguggaagagaagcauuuuauggaa

SEQ ID NO: 18764 - RNA, 31 nt, Human
aaagaacaguuucaguauugagauggcucag

SEQ ID NO: 18765 - RNA, 32 nt, Human
aaagaaccaacaaccucaacugccuacuccaa

SEQ ID NO: 18766 - RNA, 32 nt, Human
aaagaaccagagaggcucugagaaaccucggg

SEQ ID NO: 18767 - RNA, 32 nt, Human
aaagaacccaagguugagugcaacugggguug

SEQ ID NO: 18768 - RNA, 32 nt, Human
aaagaacccagcaacaaaccucccggcuagga

SEQ ID NO: 18769 - RNA, 32 nt, Human
aaagaacccucaauugaugaaaggcagggagu

SEQ ID NO: 18770 - RNA, 32 nt, Human
aaagaacccuggggacccuaauguuggacucu

SEQ ID NO: 18771 - RNA, 32 nt, Human
aaagaacccuuagacccucagagcuggaggug

SEQ ID NO: 18772 - RNA, 32 nt, Human
aaagaaccgcacaccacagacucccuccagcu

SEQ ID NO: 18773 - RNA, 32 nt, Human
aaagaaccguugcgacugguaacugaagugga

SEQ ID NO: 18774 - RNA, 32 nt, Human
aaagaaccuuuccauacuucguguucuguucu

SEQ ID NO: 18775 - RNA, 32 nt, Human
aaagaacgcuuuuagauuucaaaggagcaguu

SEQ ID NO: 18776 - RNA, 32 nt, Human
aaagaacuaaggauuuuuccauggacaugggc

SEQ ID NO: 18777 - RNA, 32 nt, Human
aaagaacucagaguugugugugcaaugcacac

SEQ ID NO: 18778 - RNA, 32 nt, Human
aaagaacucccagagguuccauucaugcccca

SEQ ID NO: 18779 - RNA, 32 nt, Human
aaagaacuccuccaaaucaacaaggcaaaaac

SEQ ID NO: 18780 - RNA, 32 nt, Human
aaagaacugccugaauuacugcaaugaaauag

SEQ ID NO: 18781 - RNA, 32 nt, Human
aaagaacugccugaauugcugcaaugaaauag

SEQ ID NO: 18782 - RNA, 32 nt, Human
aaagaacuggcguagaggcaacagagccaucu

SEQ ID NO: 18783 - RNA, 32 nt, Human
aaagaacuguagaugccccaaggaaccaacca

SEQ ID NO: 18784 - RNA, 32 nt, Human
aaagaacuuauguaaccaaauaccaccuguac

SEQ ID NO: 18785 - RNA, 32 nt, Human
aaagaacuuguucucuccuuaaaguugugaag

SEQ ID NO: 18786 - RNA, 20 nt, Human
aaagaagaaacuuugccuca

SEQ ID NO: 18787 - RNA, 32 nt, Human
aaagaagaaaguauguuccauacaugggagga

SEQ ID NO: 18788 - RNA, 32 nt, Human
aaagaagaaaucaagaccaccuccugcucugg

SEQ ID NO: 18789 - RNA, 23 nt, Human
aaagaagaaaugauaccaauccu

SEQ ID NO: 18790 - RNA, 18 nt, Human
aaagaagaacccaguuca

SEQ ID NO: 18791 - RNA, 32 nt, Human
aaagaagaagaaaaagaggaagaagaagaagg

SEQ ID NO: 18792 - RNA, 32 nt, Human
aaagaagaagaacggaaggaacagagggggca

SEQ ID NO: 18793 - RNA, 32 nt, Human
aaagaagaagccucuggacacugccagagaug

SEQ ID NO: 18794 - RNA, 32 nt, Human
aaagaagaagguguugggguaggauucuucag

SEQ ID NO: 18795 - RNA, 32 nt, Human
aaagaagaaugaacuauaauccuugaagauaa

SEQ ID NO: 18796 - RNA, 32 nt, Human
aaagaagaauuguaguggucauggacagcuaa

SEQ ID NO: 18797 - RNA, 18 nt, Human
aaagaagaccucagucaa

SEQ ID NO: 18798 - RNA, 32 nt, Human
aaagaagagaugagaaaugaugaaaagguugc

SEQ ID NO: 18799 - RNA, 32 nt, Human
aaagaagagcuaagcaaaacucccaucgaugu

SEQ ID NO: 18800 - RNA, 32 nt, Human
aaagaagagguaagcaaaacucccaucgaugu

SEQ ID NO: 18801 - RNA, 32 nt, Human
aaagaagaggucacuagauguugcagugaaaa

SEQ ID NO: 18802 - RNA, 32 nt, Human
aaagaagaguccuacccaggagggagagcgca

SEQ ID NO: 18803 - RNA, 32 nt, Human
aaagaagagucgaguccucugaggucugugcu

SEQ ID NO: 18804 - RNA, 32 nt, Human
aaagaagauaccucccucccaguccaccucau

SEQ ID NO: 18805 - RNA, 32 nt, Human
aaagaagaucugacaggaaagcuguauaauga

SEQ ID NO: 18806 - RNA, 32 nt, Human
aaagaagauugaccagcuugcuagaaaaauac

SEQ ID NO: 18807 - RNA, 32 nt, Human
aaagaagauugugguugccaagagaaagguaa

SEQ ID NO: 18808 - RNA, 18 nt, Human
aaagaagauuuggaucaa

SEQ ID NO: 18809 - RNA, 32 nt, Human
aaagaagauuuguaagaauuaaacuauauuua

SEQ ID NO: 18810 - RNA, 32 nt, Human
aaagaagcaccacucuagacuggcaagggccu

SEQ ID NO: 18811 - RNA, 32 nt, Human
aaagaagcagaaagagaaagaauuugcaacca

SEQ ID NO: 18812 - RNA, 32 nt, Human
aaagaagcagaggcauuugucaaguuaccuac

SEQ ID NO: 18813 - RNA, 32 nt, Human
aaagaagcaugcugccccuggccuuccaaauc

SEQ ID NO: 18814 - RNA, 19 nt, Human
aaagaagcaugugguuuaa

SEQ ID NO: 18815 - RNA, 32 nt, Human
aaagaagccaagcggaggcugcagcccgggcc

SEQ ID NO: 18816 - RNA, 32 nt, Human
aaagaagccagcaggcgaaaagcagggacugc

SEQ ID NO: 18817 - RNA, 32 nt, Human
aaagaagccaggguuugccacugugaagcuug

SEQ ID NO: 18818 - RNA, 32 nt, Human
aaagaagcccuaaagcagaaagcucuauacca

SEQ ID NO: 18819 - RNA, 32 nt, Human
aaagaagcccucaaccuccacccugucccaug

SEQ ID NO: 18820 - RNA, 21 nt, Human
aaagaagccuccaaaagggaa

SEQ ID NO: 18821 - RNA, 32 nt, Human
aaagaagccugagacucuccaacaggagagcu

SEQ ID NO: 18822 - RNA, 32 nt, Human
aaagaagccuggguccaggcucuccccuuccc

SEQ ID NO: 18823 - RNA, 32 nt, Human
aaagaagcgcccccagcuucugagagcccugg

SEQ ID NO: 18824 - RNA, 21 nt, Human
aaagaagcguauuacugggua

SEQ ID NO: 18825 - RNA, 32 nt, Human
aaagaagcucgggcugccauguggaaaagaau

SEQ ID NO: 18826 - RNA, 32 nt, Human
aaagaagcugauuuugaaacugcuuaauggua

SEQ ID NO: 18827 - RNA, 32 nt, Human
aaagaagcugcuggaauugagaacagaaauag

SEQ ID NO: 18828 - RNA, 32 nt, Human
aaagaagcuggguuuguggagaaucagagcau

SEQ ID NO: 18829 - RNA, 32 nt, Human
aaagaaggaacagacaaagguuugaaaaugau

SEQ ID NO: 18830 - RNA, 32 nt, Human
aaagaaggaacauuuccuauggugcugucuca

SEQ ID NO: 18831 - RNA, 32 nt, Human
aaagaaggaaggaagagagguagacagauaca

SEQ ID NO: 18832 - RNA, 32 nt, Human
aaagaaggacacaccauuccauagcacagaac

SEQ ID NO: 18833 - RNA, 32 nt, Human
aaagaaggagaagaaaacugaacugggaaaau

SEQ ID NO: 18834 - RNA, 32 nt, Human
aaagaaggagaagguucuugcaacuguuacaa

SEQ ID NO: 18835 - RNA, 32 nt, Human
aaagaaggagaagguuuuugcaacuguuacaa

SEQ ID NO: 18836 - RNA, 32 nt, Human
aaagaaggauacaaaggagaacucagcagaga

SEQ ID NO: 18837 - RNA, 31 nt, Human
aaagaaggcaacacaaauugcaagggagaag

SEQ ID NO: 18838 - RNA, 32 nt, Human
aaagaaggcaauaggcugggcgcaguggcuca

SEQ ID NO: 18839 - RNA, 32 nt, Human
aaagaaggcagcagugaaagaauuugaagaca

SEQ ID NO: 18840 - RNA, 32 nt, Human
aaagaaggcauccagcaagaacugcacaagaa

SEQ ID NO: 18841 - RNA, 32 nt, Human
aaagaagggacuaaaugcuggggagguaaauu

SEQ ID NO: 18842 - RNA, 32 nt, Human
aaagaagggcagauggcccucuugccuacuga

SEQ ID NO: 18843 - RNA, 32 nt, Human
aaagaagggcccauccuauuuccccucaucua

SEQ ID NO: 18844 - RNA, 32 nt, Human
aaagaagggcuggggccugccguucuuccucc

SEQ ID NO: 18845 - RNA, 32 nt, Human
aaagaaggggcaggucauauaaagaagcaaua

SEQ ID NO: 18846 - RNA, 32 nt, Human
aaagaagguaucucaggccaggcacaguggcc

SEQ ID NO: 18847 - RNA, 32 nt, Human
aaagaaggucaucuuggaugauuggaggacaa

SEQ ID NO: 18848 - RNA, 32 nt, Human
aaagaaguaaacgcagaacaucacauuaaagg

SEQ ID NO: 18849 - RNA, 32 nt, Human
aaagaaguaaaggaguuaggaggagacacuua

SEQ ID NO: 18850 - RNA, 31 nt, Human
aaagaaguagagagagaauuaaaaacuggcc

SEQ ID NO: 18851 - RNA, 32 nt, Human
aaagaaguaggcccagugugguggcuuguacc

SEQ ID NO: 18852 - RNA, 32 nt, Human
aaagaaguccuccucccuuucugggcuuccau

SEQ ID NO: 18853 - RNA, 32 nt, Human
aaagaaguccuuucucuuuauugaguucgagg

SEQ ID NO: 18854 - RNA, 32 nt, Human
aaagaagugagaugcaccuuauuuucaagaag

SEQ ID NO: 18855 - RNA, 20 nt, Human
aaagaagugauucggucccu

SEQ ID NO: 18856 - RNA, 32 nt, Human
aaagaaguucccuucucaucaucuucaucuca

SEQ ID NO: 18857 - RNA, 32 nt, Human
aaagaaguuccuucuuacagcuuggauucaac

SEQ ID NO: 18858 - RNA, 32 nt, Human
aaagaaguuucauaugcacagaagagcaguug

SEQ ID NO: 18859 - RNA, 32 nt, Human
aaagaauaaagaaagaaaagugcgaugcccag

SEQ ID NO: 18860 - RNA, 32 nt, Human
aaagaauaaccacugcacuccaaccugggcaa

SEQ ID NO: 18861 - RNA, 32 nt, Human
aaagaauaauucuaacugguacuccaauucag

SEQ ID NO: 18862 - RNA, 32 nt, Human
aaagaauagaaagagggagagguuggugccgc

SEQ ID NO: 18863 - RNA, 32 nt, Human
aaagaauagauguuauauuucuaaagaauuuc

SEQ ID NO: 18864 - RNA, 32 nt, Human
aaagaauagcugguuuuuagaaaccaaugcca

SEQ ID NO: 18865 - RNA, 32 nt, Human
aaagaauaggggcugaagacgccacucccaga

SEQ ID NO: 18866 - RNA, 32 nt, Human
aaagaauauagaaugcacuugugcacaaggau

SEQ ID NO: 18867 - RNA, 31 nt, Human
aaagaauaucugaccaucacagagauccaga

SEQ ID NO: 18868 - RNA, 32 nt, Human
aaagaauauguugugagcaucuuuccaugaua

SEQ ID NO: 18869 - RNA, 32 nt, Human
aaagaauauuucccucuccugcaucaagucug

SEQ ID NO: 18870 - RNA, 32 nt, Human
aaagaaucacccaggccagacacaauggcuca

SEQ ID NO: 18871 - RNA, 32 nt, Human
aaagaaucagaauaaauguaccugccauccag

SEQ ID NO: 18872 - RNA, 24 nt, Human
aaagaaucaguuuaauuuuucaca

SEQ ID NO: 18873 - RNA, 32 nt, Human
aaagaaucauuuuccccuguguggaagacacu

SEQ ID NO: 18874 - RNA, 32 nt, Human
aaagaaucccaauauugcuguauagaaagaga

SEQ ID NO: 18875 - RNA, 32 nt, Human
aaagaauccccuacgccacucccaccacaccc

SEQ ID NO: 18876 - RNA, 32 nt, Human
aaagaaucccuucacccccuccagggauggcu

SEQ ID NO: 18877 - RNA, 32 nt, Human
aaagaaucugcaacuuuccccaaaaagcagga

SEQ ID NO: 18878 - RNA, 32 nt, Human
aaagaaucugcagagggugcuacugaagaucc

SEQ ID NO: 18879 - RNA, 32 nt, Human
aaagaaugaauggauucuaggaauguuaggga

SEQ ID NO: 18880 - RNA, 32 nt, Human
aaagaaugaauuucuuucaagagaacuaauug

SEQ ID NO: 18881 - RNA, 32 nt, Human
aaagaaugagucagguggcacugaaagccaug

SEQ ID NO: 18882 - RNA, 32 nt, Human
aaagaaugauuccuggccagaguagugauacc

SEQ ID NO: 18883 - RNA, 32 nt, Human
aaagaauggacuuggagaagcaaaugggaaau

SEQ ID NO: 18884 - RNA, 18 nt, Human
aaagaaugucacugccug

SEQ ID NO: 18885 - RNA, 32 nt, Human
aaagaaugucacuuuuuaacagucccaggagc

SEQ ID NO: 18886 - RNA, 32 nt, Human
aaagaaugucucaucuccucugcccaaaaaug

SEQ ID NO: 18887 - RNA, 32 nt, Human
aaagaaugugggucagaauuucuaccacguuu

SEQ ID NO: 18888 - RNA, 19 nt, Human
aaagaauguucacguccug

SEQ ID NO: 18889 - RNA, 32 nt, Human
aaagaauuacauaugaagauucagaaccaucc

SEQ ID NO: 18890 - RNA, 32 nt, Human
aaagaauugaaggcugagaaacucagccucua

SEQ ID NO: 18891 - RNA, 32 nt, Human
aaagaauugagugcuuuuaaauacuuuuuaga

SEQ ID NO: 18892 - RNA, 32 nt, Human
aaagaauuggccuggcugggugcaguggcuca

SEQ ID NO: 18893 - RNA, 32 nt, Human
aaagacaaaacacauagacgcacacacucagg

SEQ ID NO: 18894 - RNA, 32 nt, Human
aaagacaaaacccaacuuugaccaagaagagc

SEQ ID NO: 18895 - RNA, 32 nt, Human
aaagacaaaguggcaacuguagaaaguguugc

SEQ ID NO: 18896 - RNA, 19 nt, Human
aaagacaacagaacuggaa

SEQ ID NO: 18897 - RNA, 32 nt, Human
aaagacaacagcucccuuucugcuucggacac

SEQ ID NO: 18898 - RNA, 32 nt, Human
aaagacaagaagcagcugccaagagaaggaga

SEQ ID NO: 18899 - RNA, 21 nt, Human
aaagacaagcugauugcugug

SEQ ID NO: 18900 - RNA, 32 nt, Human
aaagacaaggccccuggcagugcaguguugga

SEQ ID NO: 18901 - RNA, 32 nt, Human
aaagacaaucacugccaaccccucuuucgucu

SEQ ID NO: 18902 - RNA, 32 nt, Human
aaagacacaaugcacacuuaaaaugacucaau

SEQ ID NO: 18903 - RNA, 32 nt, Human
aaagacacacaaggacgucugcgcagcaagaa

SEQ ID NO: 18904 - RNA, 32 nt, Human
aaagacacauggccuucuuuguguacaugaca

SEQ ID NO: 18905 - RNA, 32 nt, Human
aaagacaccaacaacaaucaaaacugcacuuu

SEQ ID NO: 18906 - RNA, 32 nt, Human
aaagacaccaucuaugaaccaggaagcagggc

SEQ ID NO: 18907 - RNA, 32 nt, Human
aaagacaccccagccaccuggcucagagaggg

SEQ ID NO: 18908 - RNA, 32 nt, Human
aaagacacuacacugccucuccagaaaucagg

SEQ ID NO: 18909 - RNA, 32 nt, Human
aaagacacucccaccagcaccgugacaguuua

SEQ ID NO: 18910 - RNA, 32 nt, Human
aaagacacugagcacagcccagagccaauaaa

SEQ ID NO: 18911 - RNA, 32 nt, Human
aaagacacugagcuaguucagacauggccaug

SEQ ID NO: 18912 - RNA, 32 nt, Human
aaagacacugcagacuccacugugcugagguu

SEQ ID NO: 18913 - RNA, 32 nt, Human
aaagacacugccuauucuuucgucuguucuug

SEQ ID NO: 18914 - RNA, 32 nt, Human
aaagacagaaggcgaaggagacccccugccgu

SEQ ID NO: 18915 - RNA, 32 nt, Human
aaagacagacccagugagugaaucaggcaaag

SEQ ID NO: 18916 - RNA, 32 nt, Human
aaagacagagcgacgcagggacugggggcggg

SEQ ID NO: 18917 - RNA, 32 nt, Human
aaagacagaggaaggaaggagggagaagggaa

SEQ ID NO: 18918 - RNA, 32 nt, Human
aaagacagaggcgggaggauugagugaggcca

SEQ ID NO: 18919 - RNA, 32 nt, Human
aaagacagaggugggaggauugagugaggcca

SEQ ID NO: 18920 - RNA, 32 nt, Human
aaagacagagucucacucugucacucugucug

SEQ ID NO: 18921 - RNA, 32 nt, Human
aaagacagagucuugcucugucacccaggcug

SEQ ID NO: 18922 - RNA, 32 nt, Human
aaagacagaugggccggaugcaauggcucacg

SEQ ID NO: 18923 - RNA, 32 nt, Human
aaagacagaugucagugggcugcucuggcccu

SEQ ID NO: 18924 - RNA, 32 nt, Human
aaagacagcgagauccugagggccagccggga

SEQ ID NO: 18925 - RNA, 32 nt, Human
aaagacaggaaagucccugaaaucaacagagg

SEQ ID NO: 18926 - RNA, 32 nt, Human
aaagacaggaggaggaaauagguaauaggcua

SEQ ID NO: 18927 - RNA, 32 nt, Human
aaagacaggccugguuccuagcuguggggcug

SEQ ID NO: 18928 - RNA, 22 nt, Human
aaagacagggaauagugggauc

SEQ ID NO: 18929 - RNA, 32 nt, Human
aaagacagggucucacucugucacccaagcua

SEQ ID NO: 18930 - RNA, 32 nt, Human
aaagacagggucuugccauauugcccaggcug

SEQ ID NO: 18931 - RNA, 32 nt, Human
aaagacaggguuucaauuuccacacaugaucu

SEQ ID NO: 18932 - RNA, 32 nt, Human
aaagacaggguuucaccauauuggccaggcug

SEQ ID NO: 18933 - RNA, 32 nt, Human
aaagacaggguuucaccauguuggccaggcug

SEQ ID NO: 18934 - RNA, 32 nt, Human
aaagacaggguuucuccauguuggucaggcug

SEQ ID NO: 18935 - RNA, 32 nt, Human
aaagacaggguuuuuccauguugcccaggcug

SEQ ID NO: 18936 - RNA, 32 nt, Human
aaagacaguaaccuuucucuucaaagauaaaa

SEQ ID NO: 18937 - RNA, 32 nt, Human
aaagacaguagccaagaagauggcauagcaua

SEQ ID NO: 18938 - RNA, 32 nt, Human
aaagacagugggcagcuucuguuucuccuucu

SEQ ID NO: 18939 - RNA, 32 nt, Human
aaagacagugguuccugacucaggaagacagu

SEQ ID NO: 18940 - RNA, 32 nt, Human
aaagacaguuaaagcaaagaagagaagugacu

SEQ ID NO: 18941 - RNA, 32 nt, Human
aaagacauacaugcaaaguuccuuugcuuugg

SEQ ID NO: 18942 - RNA, 32 nt, Human
aaagacauacguaaguauguccauaauugccc

SEQ ID NO: 18943 - RNA, 23 nt, Human
aaagacauaggacuuaacuggaa

SEQ ID NO: 18944 - RNA, 32 nt, Human
aaagacaucauucacuucaucauaaccaaaau

SEQ ID NO: 18945 - RNA, 32 nt, Human
aaagacaucuuccuggccacguguugaccuau

SEQ ID NO: 18946 - RNA, 22 nt, Human
aaagacaugaaaacuugcugua

SEQ ID NO: 18947 - RNA, 32 nt, Human
aaagacaugcagaugaauuucuuuuggauuua

SEQ ID NO: 18948 - RNA, 32 nt, Human
aaagacauuccugggugacaggcacagugcag

SEQ ID NO: 18949 - RNA, 32 nt, Human
aaagacauugccucagcuacugaagguggcca

SEQ ID NO: 18950 - RNA, 32 nt, Human
aaagacauugucaccgagugugugugacucaa

SEQ ID NO: 18951 - RNA, 32 nt, Human
aaagaccaaaguaccagcagaaugguugucua

SEQ ID NO: 18952 - RNA, 32 nt, Human
aaagaccaagaagaaaacgaggcggcgcagag

SEQ ID NO: 18953 - RNA, 32 nt, Human
aaagaccaccaggacauccugggaacucuggg

SEQ ID NO: 18954 - RNA, 32 nt, Human
aaagaccacuccucaccccagcucaagccaug

SEQ ID NO: 18955 - RNA, 31 nt, Human
aaagaccagagaguugggcuggagagaaaag

SEQ ID NO: 18956 - RNA, 22 nt, Human
aaagaccagccugggcaacaua

SEQ ID NO: 18957 - RNA, 32 nt, Human
aaagaccagcucuaacgugagcgccucggccg

SEQ ID NO: 18958 - RNA, 32 nt, Human
aaagaccaggcccagagccaggggacagguug

SEQ ID NO: 18959 - RNA, 32 nt, Human
aaagaccagguggucgggcgcgguggcucacg

SEQ ID NO: 18960 - RNA, 32 nt, Human
aaagaccagguugaaaguucucccacaaugaa

SEQ ID NO: 18961 - RNA, 32 nt, Human
aaagaccaguccugccucuguuguagaagaca

SEQ ID NO: 18962 - RNA, 32 nt, Human
aaagaccagucuccaccaccaaagucauggcu

SEQ ID NO: 18963 - RNA, 32 nt, Human
aaagaccauccaccaucacccuuuuccccuuu

SEQ ID NO: 18964 - RNA, 32 nt, Human
aaagaccaugcauucagaucugaaguagugug

SEQ ID NO: 18965 - RNA, 32 nt, Human
aaagacccaaagcguugggauuacaggcauga

SEQ ID NO: 18966 - RNA, 32 nt, Human
aaagacccacacagaauccugacuguccuugu

SEQ ID NO: 18967 - RNA, 32 nt, Human
aaagaccccuaagggcccucugagagguuaug

SEQ ID NO: 18968 - RNA, 32 nt, Human
aaagacccugcacaaagccucagccuggugaa

SEQ ID NO: 18969 - RNA, 32 nt, Human
aaagacccuggagaaagaguggcauuucuucu

SEQ ID NO: 18970 - RNA, 32 nt, Human
aaagacccuuauggaacuggaagacgucuugu

SEQ ID NO: 18971 - RNA, 32 nt, Human
aaagaccgaaaggaagaggaagaggcaccggu

SEQ ID NO: 18972 - RNA, 32 nt, Human
aaagaccgaaggggagaaaguuaaagaaaucg

SEQ ID NO: 18973 - RNA, 32 nt, Human
aaagaccuacauuccucauuguuucauguuug

SEQ ID NO: 18974 - RNA, 32 nt, Human
aaagaccuaucaaaaugucccaccuuaagccc

SEQ ID NO: 18975 - RNA, 32 nt, Human
aaagaccuccacuguuccaaggauucuacccu

SEQ ID NO: 18976 - RNA, 32 nt, Human
aaagaccuggacaaauaaagaccaaucuuaac

SEQ ID NO: 18977 - RNA, 32 nt, Human
aaagaccuuugucaaggagagugcagucaacc

SEQ ID NO: 18978 - RNA, 32 nt, Human
aaagacgagguuucaccauguugaccaggcug

SEQ ID NO: 18979 - RNA, 18 nt, Human
aaagacgauaucacgguc

SEQ ID NO: 18980 - RNA, 32 nt, Human
aaagacgcaagcccagaggcccugccauuucu

SEQ ID NO: 18981 - RNA, 32 nt, Human
aaagacggaaagaaagaaagaaaacgagcgcg

SEQ ID NO: 18982 - RNA, 32 nt, Human
aaagacggacccaggaggagugcugguucuuc

SEQ ID NO: 18983 - RNA, 32 nt, Human
aaagacggagucucacucuguugcccaggcug

SEQ ID NO: 18984 - RNA, 32 nt, Human
aaagacggagucucgcucugucacccaggcug

SEQ ID NO: 18985 - RNA, 32 nt, Human
aaagacgggaggaucacuugaggccaggaguu

SEQ ID NO: 18986 - RNA, 32 nt, Human
aaagacggggcuucacuauauuggucaggcug

SEQ ID NO: 18987 - RNA, 32 nt, Human
aaagacgggguuucaccauguuggucaggcug

SEQ ID NO: 18988 - RNA, 32 nt, Human
aaagacgggguuucaucauguuggccagggug

SEQ ID NO: 18989 - RNA, 32 nt, Human
aaagacgggguuucgccuuguugcccagggug

SEQ ID NO: 18990 - RNA, 32 nt, Human
aaagacgggguuuugucauguugcucgggcua

SEQ ID NO: 18991 - RNA, 32 nt, Human
aaagacuacauuuuccauccacccuagaggcu

SEQ ID NO: 18992 - RNA, 32 nt, Human
aaagacuacauuuugauuauuucauuuacaua

SEQ ID NO: 18993 - RNA, 32 nt, Human
aaagacuacugggaggcugcugccuccuuccu

SEQ ID NO: 18994 - RNA, 32 nt, Human
aaagacuagcuugugagcaggcucaucaguau

SEQ ID NO: 18995 - RNA, 32 nt, Human
aaagacuauauacaucugaauuuuucauccua

SEQ ID NO: 18996 - RNA, 32 nt, Human
aaagacucagagagacauaaaggagaagauuu

SEQ ID NO: 18997 - RNA, 32 nt, Human
aaagacucagcagcacauggggcagguguccu

SEQ ID NO: 18998 - RNA, 32 nt, Human
aaagacucagccaagacaaggagguagagagg

SEQ ID NO: 18999 - RNA, 32 nt, Human
aaagacucagccacuggagucuguguuuccug

SEQ ID NO: 19000 - RNA, 32 nt, Human
aaagacucauccccagccuccaccuccugugu

SEQ ID NO: 19001 - RNA, 32 nt, Human
aaagacuccaaagaaauguaagggaaacugcc

SEQ ID NO: 19002 - RNA, 32 nt, Human
aaagacuccagaacccacucuaccuccucaau

SEQ ID NO: 19003 - RNA, 32 nt, Human
aaagacuccauccugcguuacucaucagaaaa

SEQ ID NO: 19004 - RNA, 32 nt, Human
aaagacucucagaccuuuugucacagggcuac

SEQ ID NO: 19005 - RNA, 32 nt, Human
aaagacucuucuugacacauuuugccuacacu

SEQ ID NO: 19006 - RNA, 32 nt, Human
aaagacugaagaggcuggagugcaguggcgca

SEQ ID NO: 19007 - RNA, 32 nt, Human
aaagacugaagucccaggcugggggugucaau

SEQ ID NO: 19008 - RNA, 32 nt, Human
aaagacugaagugacagauuaagaguucuuga

SEQ ID NO: 19009 - RNA, 32 nt, Human
aaagacugaccuugaauucagccuggguguuc

SEQ ID NO: 19010 - RNA, 32 nt, Human
aaagacugagaagcuggauuuaaucaucccug

SEQ ID NO: 19011 - RNA, 32 nt, Human
aaagacugagccaagucaccuccagggcagug

SEQ ID NO: 19012 - RNA, 32 nt, Human
aaagacugagccuuuuuggcaggaauaauaag

SEQ ID NO: 19013 - RNA, 21 nt, Human
aaagacugcaguaaacaaagc

SEQ ID NO: 19014 - RNA, 32 nt, Human
aaagacuggaaggugauacaugaaaaugucaa

SEQ ID NO: 19015 - RNA, 32 nt, Human
aaagacuggggagaggaaggcagaugggagaa

SEQ ID NO: 19016 - RNA, 19 nt, Human
aaagacuguaugccugugu

SEQ ID NO: 19017 - RNA, 32 nt, Human
aaagacuuaaucagcagugaauacucuccacc

SEQ ID NO: 19018 - RNA, 32 nt, Human
aaagacuuagugguucuguuuucuugagacau

SEQ ID NO: 19019 - RNA, 32 nt, Human
aaagacuucuuuuccugcugauuugcauugcu

SEQ ID NO: 19020 - RNA, 32 nt, Human
aaagacuugaagggacagaagugaagaaaaua

SEQ ID NO: 19021 - RNA, 32 nt, Human
aaagacuugcuugucuugggccugucaccucc

SEQ ID NO: 19022 - RNA, 32 nt, Human
aaagacuugugcaauacauuuugaggugaaac

SEQ ID NO: 19023 - RNA, 32 nt, Human
aaagacuugugccauuggcugcucuuucuagu

SEQ ID NO: 19024 - RNA, 32 nt, Human
aaagacuuguguuugucuuuguucugcugaug

SEQ ID NO: 19025 - RNA, 32 nt, Human
aaagacuuuaaaagugaucuacaugaggaacu

SEQ ID NO: 19026 - RNA, 32 nt, Human
aaagacuuuccucuuagucgagccaaguuaag

SEQ ID NO: 19027 - RNA, 32 nt, Human
aaagacuuugcuuuuauaaagcauuuagaaaa

SEQ ID NO: 19028 - RNA, 32 nt, Human
aaagacuuuugagucccauuuuguauucauau

SEQ ID NO: 19029 - RNA, 32 nt, Human
aaagacuuuuucucccuuccucagacaaucau

SEQ ID NO: 19030 - RNA, 22 nt, Human
aaagagaaaaauaacucuuuug

SEQ ID NO: 19031 - RNA, 20 nt, Human
aaagagaaaaccguagccuc

SEQ ID NO: 19032 - RNA, 32 nt, Human
aaagagaaaacguccaggcgagcccaguuguc

SEQ ID NO: 19033 - RNA, 21 nt, Human
aaagagaaaacuguggucucu

SEQ ID NO: 19034 - RNA, 32 nt, Human
aaagagaaaaggagagagguugagcgagcgag

SEQ ID NO: 19035 - RNA, 23 nt, Human
aaagagaaaaugcgucucuccug

SEQ ID NO: 19036 - RNA, 19 nt, Human
aaagagaaaaugcuuucuc

SEQ ID NO: 19037 - RNA, 22 nt, Human
aaagagaaaauuucugcucuug

SEQ ID NO: 19038 - RNA, 32 nt, Human
aaagagaaacacaucaggauuuauaauuuuua

SEQ ID NO: 19039 - RNA, 32 nt, Human
aaagagaaaccagguauucugcuacaguuugg

SEQ ID NO: 19040 - RNA, 32 nt, Human
aaagagaaacuaucuauuugcaccuuaaaaga

SEQ ID NO: 19041 - RNA, 31 nt, Human
aaagagaaagaauuuguuucacaguuuggau

SEQ ID NO: 19042 - RNA, 32 nt, Human
aaagagaaagagacauucacuuggagggcucu

SEQ ID NO: 19043 - RNA, 32 nt, Human
aaagagaaaugagacacucuaguugcaggaaa

SEQ ID NO: 19044 - RNA, 32 nt, Human
aaagagaaaugaugcagcuggugcccgagccu

SEQ ID NO: 19045 - RNA, 32 nt, Human
aaagagaacacaguuccuuuaagaacuggcag

SEQ ID NO: 19046 - RNA, 32 nt, Human
aaagagaacauacauucucacauuaguguacu

SEQ ID NO: 19047 - RNA, 32 nt, Human
aaagagaaccauugaaggaaucuuuuuaagug

SEQ ID NO: 19048 - RNA, 32 nt, Human
aaagagaagagaagaaaaagggaggagagaga

SEQ ID NO: 19049 - RNA, 19 nt, Human
aaagagaagaggagaggac

SEQ ID NO: 19050 - RNA, 32 nt, Human
aaagagaagcuucuuuaaaagcugcuauugau

SEQ ID NO: 19051 - RNA, 32 nt, Human
aaagagaaggaaggaaggagaaagagaaggaa

SEQ ID NO: 19052 - RNA, 16 nt, Human
aaagagaaggguucaa

SEQ ID NO: 19053 - RNA, 32 nt, Human
aaagagaagguagagaauuccaggcaacaguc

SEQ ID NO: 19054 - RNA, 32 nt, Human
aaagagaagucaauuccuucuuccucaccucu

SEQ ID NO: 19055 - RNA, 32 nt, Human
aaagagaaguuucuuuaguagccacuagacaa

SEQ ID NO: 19056 - RNA, 21 nt, Human
aaagagaaugccauucucuug

SEQ ID NO: 19057 - RNA, 32 nt, Human
aaagagaauugccaauacagaaaaggaguauc

SEQ ID NO: 19058 - RNA, 32 nt, Human
aaagagacaagaaauccuaguggccucccaga

SEQ ID NO: 19059 - RNA, 31 nt, Human
aaagagacagugagagaaagaaaaagaaaaa

SEQ ID NO: 19060 - RNA, 23 nt, Human
aaagagaccucacucuucucuug

SEQ ID NO: 19061 - RNA, 32 nt, Human
aaagagaccugcuugggaaggccaggccugga

SEQ ID NO: 19062 - RNA, 32 nt, Human
aaagagaccuguuaaaccauucagaaaaagcu

SEQ ID NO: 19063 - RNA, 20 nt, Human
aaagagaccuugaacuggaa

SEQ ID NO: 19064 - RNA, 32 nt, Human
aaagagacuaggugaagagagggcaggggagc

SEQ ID NO: 19065 - RNA, 32 nt, Human
aaagagacucgccuggcuccaccaacacccac

SEQ ID NO: 19066 - RNA, 32 nt, Human
aaagagacucucguguggagguuacagcagca

SEQ ID NO: 19067 - RNA, 32 nt, Human
aaagagagaagcaggaaaagaucuuccuuuuu

SEQ ID NO: 19068 - RNA, 32 nt, Human
aaagagagacagggucucaccauguugcccag

SEQ ID NO: 19069 - RNA, 32 nt, Human
aaagagagacgcaggucugggccaggcucaca

SEQ ID NO: 19070 - RNA, 32 nt, Human
aaagagagacuggccuagcuucccagccuaga

SEQ ID NO: 19071 - RNA, 32 nt, Human
aaagagagagaaaaggagagaggaagacacac

SEQ ID NO: 19072 - RNA, 32 nt, Human
aaagagagaggaaggaaggaaggaucauauua

SEQ ID NO: 19073 - RNA, 32 nt, Human
aaagagagaggagaaaauacagcucugauggc

SEQ ID NO: 19074 - RNA, 32 nt, Human
aaagagagaggaugucucucucagacuggcac

SEQ ID NO: 19075 - RNA, 32 nt, Human
aaagagagagugugugggucuauguaaaugca

SEQ ID NO: 19076 - RNA, 32 nt, Human
aaagagagaugggaucccacuauauugcacag

SEQ ID NO: 19077 - RNA, 32 nt, Human
aaagagagcaauugauaaggcaaauaagguaa

SEQ ID NO: 19078 - RNA, 32 nt, Human
aaagagagccaccuagugagggauuauucuca

SEQ ID NO: 19079 - RNA, 32 nt, Human
aaagagagcgugccucagguuacuugaacuug

SEQ ID NO: 19080 - RNA, 32 nt, Human
aaagagaggaagagagaagcaaacauguagga

SEQ ID NO: 19081 - RNA, 32 nt, Human
aaagagaggagagaaagaaaaagagaguggga

SEQ ID NO: 19082 - RNA, 32 nt, Human
aaagagaggagccgucgcaggagccgcacacg

SEQ ID NO: 19083 - RNA, 32 nt, Human
aaagagaggauguccaugcuuaauucuagaua

SEQ ID NO: 19084 - RNA, 32 nt, Human
aaagagaggccgccgcccugcccccgccccgc

SEQ ID NO: 19085 - RNA, 32 nt, Human
aaagagaggccgugguaggugaaggaaugccc

SEQ ID NO: 19086 - RNA, 31 nt, Human
aaagagagggcacugccucagggcuuacagu

SEQ ID NO: 19087 - RNA, 31 nt, Human
aaagagagugagaguagaagcugaaagacuu

SEQ ID NO: 19088 - RNA, 32 nt, Human
aaagagagugugaaagacugcucaguggcugg

SEQ ID NO: 19089 - RNA, 32 nt, Human
aaagagaguuaaaagcagcagccccggcaacu

SEQ ID NO: 19090 - RNA, 32 nt, Human
aaagagauaagaggaggaagcuaauaagagac

SEQ ID NO: 19091 - RNA, 32 nt, Human
aaagagauauuuccuuucuucuuuccuuauuc

SEQ ID NO: 19092 - RNA, 32 nt, Human
aaagagaucgagucacaaaaauucaggaagag

SEQ ID NO: 19093 - RNA, 32 nt, Human
aaagagaugauaccccaccgcccccucuuggu

SEQ ID NO: 19094 - RNA, 32 nt, Human
aaagagauggaagggcuacugugcagcuuuug

SEQ ID NO: 19095 - RNA, 32 nt, Human
aaagagauggcugauucugggugguccuggac

SEQ ID NO: 19096 - RNA, 32 nt, Human
aaagagaugggaguucaccugagggcaagaag

SEQ ID NO: 19097 - RNA, 23 nt, Human
aaagagauggggauuuggccccu

SEQ ID NO: 19098 - RNA, 32 nt, Human
aaagagauguacugcauuuuacccccacccua

SEQ ID NO: 19099 - RNA, 32 nt, Human
aaagagauucuuuaaaaugcugcuucuucuac

SEQ ID NO: 19100 - RNA, 32 nt, Human
aaagagauuuccugugacaggccaagucuuac

SEQ ID NO: 19101 - RNA, 32 nt, Human
aaagagauuuuguaaagaccuugcuguaaaga

SEQ ID NO: 19102 - RNA, 32 nt, Human
aaagagcaaaacuagacuucuaugugagaagu

SEQ ID NO: 19103 - RNA, 32 nt, Human
aaagagcaagaggccauuucuuuucaagauag

SEQ ID NO: 19104 - RNA, 32 nt, Human
aaagagcaaggaaaggaggaugagaaaggaag

SEQ ID NO: 19105 - RNA, 32 nt, Human
aaagagcaagggguugguggccccagaaugga

SEQ ID NO: 19106 - RNA, 32 nt, Human
aaagagcacauccugauaaauacuuucucucu

SEQ ID NO: 19107 - RNA, 32 nt, Human
aaagagcagcuuggccaggugaggaugaggca

SEQ ID NO: 19108 - RNA, 32 nt, Human
aaagagcaggagagacaggucgugggcagggu

SEQ ID NO: 19109 - RNA, 32 nt, Human
aaagagcaggcauccauuuccauacaggaaca

SEQ ID NO: 19110 - RNA, 32 nt, Human
aaagagcagguguggggguuaagcacuuauuu

SEQ ID NO: 19111 - RNA, 32 nt, Human
aaagagcaucuucucucccacugcaccccuuc

SEQ ID NO: 19112 - RNA, 32 nt, Human
aaagagcauggaauugguagaagucuugggau

SEQ ID NO: 19113 - RNA, 19 nt, Human
aaagagccaggcuuugaga

SEQ ID NO: 19114 - RNA, 32 nt, Human
aaagagccagggcuagggcuggaggggccaag

SEQ ID NO: 19115 - RNA, 32 nt, Human
aaagagcccagccugccaacaccucgauuuug

SEQ ID NO: 19116 - RNA, 32 nt, Human
aaagagcccugaggcaaacacucucuccugcu

SEQ ID NO: 19117 - RNA, 32 nt, Human
aaagagccuaggagggagccucagcauacccc

SEQ ID NO: 19118 - RNA, 32 nt, Human
aaagagccucaaaucagaccagcacugauuaa

SEQ ID NO: 19119 - RNA, 32 nt, Human
aaagagccugauugcugacccagucucaggcc

SEQ ID NO: 19120 - RNA, 32 nt, Human
aaagagcgugccuuuuuccuccaucauaaccg

SEQ ID NO: 19121 - RNA, 32 nt, Human
aaagagcuaaccccuucccacacuccacccac

SEQ ID NO: 19122 - RNA, 32 nt, Human
aaagagcuacuccaccccacucuggcuguagu

SEQ ID NO: 19123 - RNA, 18 nt, Human
aaagagcucuaggcgggg

SEQ ID NO: 19124 - RNA, 32 nt, Human
aaagagcugggaacagcuucagagucaggcuc

SEQ ID NO: 19125 - RNA, 32 nt, Human
aaagagcuggggcagaggcaggaagcaggggc

SEQ ID NO: 19126 - RNA, 32 nt, Human
aaagagcuuaucuaagaagggaagagaaagcc

SEQ ID NO: 19127 - RNA, 32 nt, Human
aaagagcuucaaggacaacuagcagacuacaa

SEQ ID NO: 19128 - RNA, 32 nt, Human
aaagaggaaauugagacacagagacagacaug

SEQ ID NO: 19129 - RNA, 17 nt, Human
aaagaggaaugguuuaa

SEQ ID NO: 19130 - RNA, 32 nt, Human
aaagaggacacacuggagcugcagagacugua

SEQ ID NO: 19131 - RNA, 32 nt, Human
aaagaggacauuuuagcuuucucaguugaagg

SEQ ID NO: 19132 - RNA, 17 nt, Human
aaagaggaccaguucag

SEQ ID NO: 19133 - RNA, 32 nt, Human
aaagaggacuccuccucauucccuuuaacaug

SEQ ID NO: 19134 - RNA, 32 nt, Human
aaagaggacugcccugacauuucuuuaccauc

SEQ ID NO: 19135 - RNA, 32 nt, Human
aaagaggacuuauuguugucauggcccaugag

SEQ ID NO: 19136 - RNA, 32 nt, Human
aaagaggagaaaagcucaagaggaaaagcuaa

SEQ ID NO: 19137 - RNA, 32 nt, Human
aaagaggagaaaggaagggaagcauuacuggg

SEQ ID NO: 19138 - RNA, 32 nt, Human
aaagaggagaagcuucaccuuugcuucacaag

SEQ ID NO: 19139 - RNA, 32 nt, Human
aaagaggagagaaagaaagaaagggcacgaga

SEQ ID NO: 19140 - RNA, 32 nt, Human
aaagaggagcccagggagacagauugcaagua

SEQ ID NO: 19141 - RNA, 32 nt, Human
aaagaggaggagagagaaaaagggcacaaaau

SEQ ID NO: 19142 - RNA, 32 nt, Human
aaagaggaggagaguugaaaagagaggagaag

SEQ ID NO: 19143 - RNA, 32 nt, Human
aaagaggauaccuggugacacgcccaggcuuu

SEQ ID NO: 19144 - RNA, 32 nt, Human
aaagaggauucaguuuccaucuucucaacuuu

SEQ ID NO: 19145 - RNA, 31 nt, Human
aaagaggauugugauguaucacuggacccag

SEQ ID NO: 19146 - RNA, 32 nt, Human
aaagaggcaaagucugauguuuugggaagauu

SEQ ID NO: 19147 - RNA, 32 nt, Human
aaagaggcagcucugagauuugugucuuucug

SEQ ID NO: 19148 - RNA, 32 nt, Human
aaagaggcaucugguucucucauguggaugga

SEQ ID NO: 19149 - RNA, 32 nt, Human
aaagaggcauuuaaagaguuaacaaggauacu

SEQ ID NO: 19150 - RNA, 20 nt, Human
aaagaggccaauuccucucc

SEQ ID NO: 19151 - RNA, 32 nt, Human
aaagaggccacaaaaagggccugcugacuccc

SEQ ID NO: 19152 - RNA, 32 nt, Human
aaagaggccagccuggccaacccugucucaaa

SEQ ID NO: 19153 - RNA, 32 nt, Human
aaagaggccagcgugugugggguggggagggc

SEQ ID NO: 19154 - RNA, 20 nt, Human
aaagaggccaucucacuaga

SEQ ID NO: 19155 - RNA, 32 nt, Human
aaagaggcccuggaggaggguggggcuggccg

SEQ ID NO: 19156 - RNA, 32 nt, Human
aaagaggccucuuccaacccacccucgggcug

SEQ ID NO: 19157 - RNA, 23 nt, Human
aaagaggcuauaaauuauucaca

SEQ ID NO: 19158 - RNA, 32 nt, Human
aaagaggcucaauuuucuagauggguggcaac

SEQ ID NO: 19159 - RNA, 32 nt, Human
aaagaggcuggcaaggguuguuuccagagggg

SEQ ID NO: 19160 - RNA, 32 nt, Human
aaagaggcuguucccagcuccagcucuaaccu

SEQ ID NO: 19161 - RNA, 32 nt, Human
aaagaggcuucaaaucuagaacugaauuauau

SEQ ID NO: 19162 - RNA, 19 nt, Human
aaagaggcuugccuugagg

SEQ ID NO: 19163 - RNA, 32 nt, Human
aaagaggcuuugcccaaggcugcauuccagua

SEQ ID NO: 19164 - RNA, 32 nt, Human
aaagaggcuuugcuuugcgcauaucaggcuua

SEQ ID NO: 19165 - RNA, 32 nt, Human
aaagagggaaggagggagagggggaggaaaug

SEQ ID NO: 19166 - RNA, 32 nt, Human
aaagagggacaggagagcaccaggaacaacac

SEQ ID NO: 19167 - RNA, 32 nt, Human
aaagagggagagaugaguggguuagcuaccug

SEQ ID NO: 19168 - RNA, 32 nt, Human
aaagagggagcgagggcaaauggggaguagag

SEQ ID NO: 19169 - RNA, 32 nt, Human
aaagagggaggaagagagggagggagggagga

SEQ ID NO: 19170 - RNA, 32 nt, Human
aaagagggauuaagguggcagguggagugaag

SEQ ID NO: 19171 - RNA, 32 nt, Human
aaagagggcaggaggaagccaggcaugucuuu

SEQ ID NO: 19172 - RNA, 32 nt, Human
aaagagggcagugaguuugauuugaugaaaug

SEQ ID NO: 19173 - RNA, 32 nt, Human
aaagagggccacaguggggagcaggggcaccu

SEQ ID NO: 19174 - RNA, 32 nt, Human
aaagaggggaaaauagugguagugcacuaauu

SEQ ID NO: 19175 - RNA, 32 nt, Human
aaagaggggaaaaugaguuuuuauggggcuga

SEQ ID NO: 19176 - RNA, 32 nt, Human
aaagaggggcuaggcugauggggaagggggcu

SEQ ID NO: 19177 - RNA, 32 nt, Human
aaagaggggcucaaacuuaacuccagcccuga

SEQ ID NO: 19178 - RNA, 32 nt, Human
aaagagguaagaaugaggggaaugggcacaau

SEQ ID NO: 19179 - RNA, 32 nt, Human
aaagagguaauuuuucuccuccucccagucau

SEQ ID NO: 19180 - RNA, 32 nt, Human
aaagaggucaccagaugcacaugggccgcaaa

SEQ ID NO: 19181 - RNA, 32 nt, Human
aaagagguguacuggacuuacaguuccacaug

SEQ ID NO: 19182 - RNA, 32 nt, Human
aaagagguguggugugaacacauacaacaugu

SEQ ID NO: 19183 - RNA, 32 nt, Human
aaagagguuaucucccucugugccaggccaga

SEQ ID NO: 19184 - RNA, 32 nt, Human
aaagaguaaaaauuaaaaaggccaggcccagu

SEQ ID NO: 19185 - RNA, 32 nt, Human
aaagaguaacaugcucuuucuacacagacaug

SEQ ID NO: 19186 - RNA, 32 nt, Human
aaagaguaacuggcauguuagucuugaaaaug

SEQ ID NO: 19187 - RNA, 32 nt, Human
aaagaguaauuccuauccugugugccucagaa

SEQ ID NO: 19188 - RNA, 32 nt, Human
aaagaguaugugaauaguagcaaaauauugau

SEQ ID NO: 19189 - RNA, 32 nt, Human
aaagaguauuugccaacagucaucauaauauc

SEQ ID NO: 19190 - RNA, 21 nt, Human
aaagagucacaauauuccaca

SEQ ID NO: 19191 - RNA, 21 nt, Human
aaagagucagaaaucuucaca

SEQ ID NO: 19192 - RNA, 32 nt, Human
aaagaguccaguuaggguggacuaacuuugga

SEQ ID NO: 19193 - RNA, 32 nt, Human
aaagaguccucagccuuccuguccugcaucug

SEQ ID NO: 19194 - RNA, 32 nt, Human
aaagagugagagaagauggaagggaagggcca

SEQ ID NO: 19195 - RNA, 32 nt, Human
aaagagugagucuucugauuggcagcuguggc

SEQ ID NO: 19196 - RNA, 19 nt, Human
aaagagugauuccuugagg

SEQ ID NO: 19197 - RNA, 32 nt, Human
aaagaguggauauauuuaaccauaacauacug

SEQ ID NO: 19198 - RNA, 31 nt, Human
aaagagugggugggaagacuagugaaaccca

SEQ ID NO: 19199 - RNA, 32 nt, Human
aaagagugucaaggaauaggguggggcaaugu

SEQ ID NO: 19200 - RNA, 32 nt, Human
aaagaguuaacggugugggccacuccagcuug

SEQ ID NO: 19201 - RNA, 32 nt, Human
aaagaguugcaagagaaguuacaguccaggug

SEQ ID NO: 19202 - RNA, 32 nt, Human
aaagaguuuggagaagacuggagccagccuug

SEQ ID NO: 19203 - RNA, 32 nt, Human
aaagaguuugugaaagguuucagucuaacugg

SEQ ID NO: 19204 - RNA, 32 nt, Human
aaagauaaaagcuucgaugaugaagaaucagu

SEQ ID NO: 19205 - RNA, 32 nt, Human
aaagauaaacacauagggugugauuucuauac

SEQ ID NO: 19206 - RNA, 32 nt, Human
aaagauaaaccaggaugagaggcugcaugaca

SEQ ID NO: 19207 - RNA, 32 nt, Human
aaagauaagguacaggaaugaaccuugguuua

SEQ ID NO: 19208 - RNA, 32 nt, Human
aaagauaccaacauucagaaauucauuucagc

SEQ ID NO: 19209 - RNA, 32 nt, Human
aaagauagaaaagagggaauaaucuuuccaaa

SEQ ID NO: 19210 - RNA, 32 nt, Human
aaagauagacuugggacagauaaggacagaga

SEQ ID NO: 19211 - RNA, 32 nt, Human
aaagauagacuuuugccuaaguggcuuagcug

SEQ ID NO: 19212 - RNA, 32 nt, Human
aaagauagggucuuucuauguugcccaggcuc

SEQ ID NO: 19213 - RNA, 32 nt, Human
aaagauaguugcaaccucaccucccucacuca

SEQ ID NO: 19214 - RNA, 32 nt, Human
aaagauaguuucuccuagcucagacuuaacca

SEQ ID NO: 19215 - RNA, 32 nt, Human
aaagauaucuguguccuaauccucagaacuug

SEQ ID NO: 19216 - RNA, 32 nt, Human
aaagauaugucugcacuuugaggucccuuuug

SEQ ID NO: 19217 - RNA, 32 nt, Human
aaagauauuaaccucaucacuacuaacucacu

SEQ ID NO: 19218 - RNA, 32 nt, Human
aaagauauuuguugucuuugaaugauuugcug

SEQ ID NO: 19219 - RNA, 32 nt, Human
aaagaucaacagcaaucugaagacucugacua

SEQ ID NO: 19220 - RNA, 32 nt, Human
aaagaucacacagcagcugcuccugacaggga

SEQ ID NO: 19221 - RNA, 32 nt, Human
aaagaucacauauacugauuuuaaaggcuccu

SEQ ID NO: 19222 - RNA, 32 nt, Human
aaagaucacgccacugcacuccagccugggcg

SEQ ID NO: 19223 - RNA, 32 nt, Human
aaagaucacuuugucaccagcccugggaccug

SEQ ID NO: 19224 - RNA, 32 nt, Human
aaagaucauuccacucagccugggacgauggg

SEQ ID NO: 19225 - RNA, 32 nt, Human
aaagauccaaacugagaaagcaggccgggcau

SEQ ID NO: 19226 - RNA, 28 nt, Human
aaagauccaagugcuuucuuuucauuuc

SEQ ID NO: 19227 - RNA, 32 nt, Human
aaagauccagagagugggggugaggggugggc

SEQ ID NO: 19228 - RNA, 28 nt, Human
aaagauccagcuguugccucauuccuug

SEQ ID NO: 19229 - RNA, 32 nt, Human
aaagaucgagaaaucaaaugaaguucuccuga

SEQ ID NO: 19230 - RNA, 32 nt, Human
aaagaucguaccgcugcacuccagccugggug

SEQ ID NO: 19231 - RNA, 32 nt, Human
aaagaucuacucucacaauauacucaacauua

SEQ ID NO: 19232 - RNA, 32 nt, Human
aaagaucugcagagcccugagcagggacucuu

SEQ ID NO: 19233 - RNA, 32 nt, Human
aaagaucugucuuccuccuuuuccaggccccu

SEQ ID NO: 19234 - RNA, 17 nt, Human
aaagaucugugcacuga

SEQ ID NO: 19235 - RNA, 32 nt, Human
aaagaucuguguguguuggggagcugucaugu

SEQ ID NO: 19236 - RNA, 32 nt, Human
aaagaugaaaggcuuauuauuaugauauaauc

SEQ ID NO: 19237 - RNA, 32 nt, Human
aaagaugaaggcagagaucggaguuuugcagc

SEQ ID NO: 19238 - RNA, 32 nt, Human
aaagaugaggagacagagguccaggguggguu

SEQ ID NO: 19239 - RNA, 32 nt, Human
aaagaugaggcagagguccaaguaaccgcuag

SEQ ID NO: 19240 - RNA, 32 nt, Human
aaagaugauccagugcagggucugagcuagaa

SEQ ID NO: 19241 - RNA, 32 nt, Human
aaagaugauccucccaacaccuugacaccucc

SEQ ID NO: 19242 - RNA, 32 nt, Human
aaagaugaugcugcaggaauccuucuuaaaaa

SEQ ID NO: 19243 - RNA, 32 nt, Human
aaagaugcaacuugcccagcugucuguuauga

SEQ ID NO: 19244 - RNA, 32 nt, Human
aaagaugcagccucacugcuucaacgcagauu

SEQ ID NO: 19245 - RNA, 32 nt, Human
aaagaugccaggauauuggggcugaggggagu

SEQ ID NO: 19246 - RNA, 32 nt, Human
aaagaugccaugaccuucaccgagggccagac

SEQ ID NO: 19247 - RNA, 32 nt, Human
aaagaugcccuauccaugagaugccuuuucau

SEQ ID NO: 19248 - RNA, 32 nt, Human
aaagaugccucaggcaggucucagccuggggg

SEQ ID NO: 19249 - RNA, 32 nt, Human
aaagaugcgaaaaccugaugagggcaaaccag

SEQ ID NO: 19250 - RNA, 32 nt, Human
aaagaugcucagggaaacacaggccucagcug

SEQ ID NO: 19251 - RNA, 32 nt, Human
aaagaugcugguucuggcuggacgcgguggcu

SEQ ID NO: 19252 - RNA, 32 nt, Human
aaagaugcuguucacauagcaccccaagaaag

SEQ ID NO: 19253 - RNA, 29 nt, Human
aaagauggaaacacuggagucugaauuga

SEQ ID NO: 19254 - RNA, 18 nt, Human
aaagauggaaacuaggga

SEQ ID NO: 19255 - RNA, 21 nt, Human
aaagauggacaaacagagauc

SEQ ID NO: 19256 - RNA, 32 nt, Human
aaagauggacuauucuucuuuaaucuggaauu

SEQ ID NO: 19257 - RNA, 21 nt, Human
aaagauggacuccgauggauc

SEQ ID NO: 19258 - RNA, 20 nt, Human
aaagauggagaaacaggauc

SEQ ID NO: 19259 - RNA, 32 nt, Human
aaagauggagaaacaggaucagaggguggaua

SEQ ID NO: 19260 - RNA, 32 nt, Human
aaagauggagagaagacugcagugagcggagu

SEQ ID NO: 19261 - RNA, 32 nt, Human
aaagauggagugagccacaggaaguuuggggc

SEQ ID NO: 19262 - RNA, 32 nt, Human
aaagauggcauuucaccauguuguacaggcug

SEQ ID NO: 19263 - RNA, 29 nt, Human
aaagauggccagguucucuacugugaugg

SEQ ID NO: 19264 - RNA, 29 nt, Human
aaagauggcuaaugcagaagugagugucc

SEQ ID NO: 19265 - RNA, 32 nt, Human
aaagauggcuucagagagguggucacaugcuu

SEQ ID NO: 19266 - RNA, 32 nt, Human
aaagaugggcaguuucuguggcauuuuaggca

SEQ ID NO: 19267 - RNA, 32 nt, Human
aaagaugggcuucaaauaaaagucugcagagu

SEQ ID NO: 19268 - RNA, 21 nt, Human
aaagaugggcuucaugggauu

SEQ ID NO: 19269 - RNA, 32 nt, Human
aaagauggggucucuauauguuucccaggcug

SEQ ID NO: 19270 - RNA, 32 nt, Human
aaagauggggucuggcuaucuugcccaggcuu

SEQ ID NO: 19271 - RNA, 32 nt, Human
aaagauggggucuugcucugucgccaggcugg

SEQ ID NO: 19272 - RNA, 32 nt, Human
aaagauggggucuuguuauauugccuaggcug

SEQ ID NO: 19273 - RNA, 32 nt, Human
aaagaugggguuucaccauguuggccaggcug

SEQ ID NO: 19274 - RNA, 29 nt, Human
aaagaugggguuucaccauguuggucagg

SEQ ID NO: 19275 - RNA, 32 nt, Human
aaagauggguagagucaucuuaucucaggaug

SEQ ID NO: 19276 - RNA, 29 nt, Human
aaagauggucaugaggccccuguggaguc

SEQ ID NO: 19277 - RNA, 32 nt, Human
aaagauggugugagccauacacacagcaggau

SEQ ID NO: 19278 - RNA, 32 nt, Human
aaagauguaaaauaugccagaugugugugagu

SEQ ID NO: 19279 - RNA, 32 nt, Human
aaagauguaaaugauucagguuuaaagcucua

SEQ ID NO: 19280 - RNA, 32 nt, Human
aaagauguauaugaauaaguaucagacccuuu

SEQ ID NO: 19281 - RNA, 32 nt, Human
aaagauguccaucaagggaggaaggguggguc

SEQ ID NO: 19282 - RNA, 32 nt, Human
aaagaugugaaugaguguuacaguugaaagcc

SEQ ID NO: 19283 - RNA, 29 nt, Human
aaagauguggagugggcugcuaccuccug

SEQ ID NO: 19284 - RNA, 32 nt, Human
aaagauguggauacaggaagauaaaagcauca

SEQ ID NO: 19285 - RNA, 32 nt, Human
aaagauguucaucacagcgucaacuguaagag

SEQ ID NO: 19286 - RNA, 32 nt, Human
aaagauguuccagugaggaacccugaucucuc

SEQ ID NO: 19287 - RNA, 32 nt, Human
aaagauuacaauaucuuuauuucaaagaucuu

SEQ ID NO: 19288 - RNA, 32 nt, Human
aaagauuauaaauauacuuuauaucaauuuuc

SEQ ID NO: 19289 - RNA, 32 nt, Human
aaagauuauuaaaaauauucccaaaaggcagg

SEQ ID NO: 19290 - RNA, 32 nt, Human
aaagauucagaacugaaaacuccaccuuccgu

SEQ ID NO: 19291 - RNA, 32 nt, Human
aaagauucauuucucucccacccucaacucca

SEQ ID NO: 19292 - RNA, 32 nt, Human
aaagauucauuuguuuugagcaauaaacuaau

SEQ ID NO: 19293 - RNA, 32 nt, Human
aaagauucauuuuucaaggagaagagccugca

SEQ ID NO: 19294 - RNA, 32 nt, Human
aaagauuccacuuuugguuauccuguaugcug

SEQ ID NO: 19295 - RNA, 32 nt, Human
aaagauuccaggacagagaugacagaggcuua

SEQ ID NO: 19296 - RNA, 32 nt, Human
aaagauuccuuuccuauccauccuuccaucca

SEQ ID NO: 19297 - RNA, 32 nt, Human
aaagauucuggcccaacuccaucgcugcgggg

SEQ ID NO: 19298 - RNA, 32 nt, Human
aaagauucuguaacucucuuuuagcaccaaau

SEQ ID NO: 19299 - RNA, 32 nt, Human
aaagauugugccacuacacuccagccugggag

SEQ ID NO: 19300 - RNA, 32 nt, Human
aaagauuuaguaggaguguaaagugacauucu

SEQ ID NO: 19301 - RNA, 32 nt, Human
aaagauuuccaucaccacagaaaggucggcug

SEQ ID NO: 19302 - RNA, 32 nt, Human
aaagauuucucaggaagacagcagagcagagg

SEQ ID NO: 19303 - RNA, 32 nt, Human
aaagauuucucuuuuauaccuuccucacuggc

SEQ ID NO: 19304 - RNA, 32 nt, Human
aaagauuucuuuucauuauucuccacuuuuuc

SEQ ID NO: 19305 - RNA, 32 nt, Human
aaagauuugugugguucugcuuuuacuguaac

SEQ ID NO: 19306 - RNA, 32 nt, Human
aaagauuuguuuuucccuuuucccaaggaagc

SEQ ID NO: 19307 - RNA, 32 nt, Human
aaagauuuuaaaguacuucucuagucauugaa

SEQ ID NO: 19308 - RNA, 32 nt, Human
aaagauuuuacaagaccuaauuuuggguuccu

SEQ ID NO: 19309 - RNA, 22 nt, Human
aaagauuuucuaaaugucacug

SEQ ID NO: 19310 - RNA, 31 nt, Human
aaagcaaaaauaaaaaccuguugcaaaguuc

SEQ ID NO: 19311 - RNA, 20 nt, Human
aaagcaaaacaaaacaaaca

SEQ ID NO: 19312 - RNA, 32 nt, Human
aaagcaaaccaaaagaaaaaucugaaauuucc

SEQ ID NO: 19313 - RNA, 31 nt, Human
aaagcaaagaacuucuuuacugauuccuugu

SEQ ID NO: 19314 - RNA, 32 nt, Human
aaagcaaagagucacugcaucaaugaaaguuc

SEQ ID NO: 19315 - RNA, 32 nt, Human
aaagcaaagguguggagaagguucagaggaga

SEQ ID NO: 19316 - RNA, 32 nt, Human
aaagcaaaucuauuuucucugcuguguauuaa

SEQ ID NO: 19317 - RNA, 32 nt, Human
aaagcaaaugacuaguaaacaugugggaaaaa

SEQ ID NO: 19318 - RNA, 18 nt, Human
aaagcaaauguggacuga

SEQ ID NO: 19319 - RNA, 32 nt, Human
aaagcaaauuuggcaaagacuaccugcuggag

SEQ ID NO: 19320 - RNA, 32 nt, Human
aaagcaacaagccuggacuuugcucuacaaca

SEQ ID NO: 19321 - RNA, 32 nt, Human
aaagcaacaaguccuaggagcacacaaagcaa

SEQ ID NO: 19322 - RNA, 32 nt, Human
aaagcaacaguguuuuguaguaccaggcugug

SEQ ID NO: 19323 - RNA, 32 nt, Human
aaagcaacaguuacggagggaggacaucauaa

SEQ ID NO: 19324 - RNA, 32 nt, Human
aaagcaacccaguccccaaccugcacucuacc

SEQ ID NO: 19325 - RNA, 23 nt, Human
aaagcaacccucaaugguuuuga

SEQ ID NO: 19326 - RNA, 32 nt, Human
aaagcaacgaacauucacucucucacagucug

SEQ ID NO: 19327 - RNA, 32 nt, Human
aaagcaacuuguccauugcugaagucgaaauu

SEQ ID NO: 19328 - RNA, 32 nt, Human
aaagcaagaaaagaaagagaagacugagaaua

SEQ ID NO: 19329 - RNA, 32 nt, Human
aaagcaagaagaaauguuuaaaagccagggga

SEQ ID NO: 19330 - RNA, 32 nt, Human
aaagcaagaagaaguguccuucucuguagcua

SEQ ID NO: 19331 - RNA, 32 nt, Human
aaagcaagaugaaguguccuucucuguagcua

SEQ ID NO: 19332 - RNA, 32 nt, Human
aaagcaagcaaagcaaaacaauaaacuagcag

SEQ ID NO: 19333 - RNA, 32 nt, Human
aaagcaagcaagaagaaagagaaagagagaag

SEQ ID NO: 19334 - RNA, 32 nt, Human
aaagcaaggaaagaguacugugugcugagaga

SEQ ID NO: 19335 - RNA, 23 nt, Human
aaagcaauauuuuucaucacaug

SEQ ID NO: 19336 - RNA, 32 nt, Human
aaagcaaugagguugucgagacugggaaaacu

SEQ ID NO: 19337 - RNA, 32 nt, Human
aaagcaauggcugagcuaagggaugggguacc

SEQ ID NO: 19338 - RNA, 31 nt, Human
aaagcaauuacuagaagaguuggagaagcau

SEQ ID NO: 19339 - RNA, 32 nt, Human
aaagcaauuccucugucuuccuugugaguugc

SEQ ID NO: 19340 - RNA, 32 nt, Human
aaagcaauuucguccaaagucugcaccucggu

SEQ ID NO: 19341 - RNA, 32 nt, Human
aaagcacaaacagugaggcccccacccgagag

SEQ ID NO: 19342 - RNA, 32 nt, Human
aaagcacaaagacagaaguaaagcuuuaugcu

SEQ ID NO: 19343 - RNA, 32 nt, Human
aaagcacaccucaugcugagcgcucucuuagg

SEQ ID NO: 19344 - RNA, 32 nt, Human
aaagcacaggcagaguggucagggcugaaguc

SEQ ID NO: 19345 - RNA, 20 nt, Human
aaagcacaguccccaugcug

SEQ ID NO: 19346 - RNA, 32 nt, Human
aaagcacauaaacccaaagggcaaacaauuua

SEQ ID NO: 19347 - RNA, 32 nt, Human
aaagcacauaagcuagaagaagaaauauuucu

SEQ ID NO: 19348 - RNA, 32 nt, Human
aaagcacaucauggcuuuaaguaccauguugu

SEQ ID NO: 19349 - RNA, 32 nt, Human
aaagcacaugcaucugcuauuguguuggguug

SEQ ID NO: 19350 - RNA, 32 nt, Human
aaagcaccaauuacugcccucugccucagcag

SEQ ID NO: 19351 - RNA, 32 nt, Human
aaagcaccaauuagcagucucuucccauuuuc

SEQ ID NO: 19352 - RNA, 32 nt, Human
aaagcaccagaaggagggugucuuagguccag

SEQ ID NO: 19353 - RNA, 32 nt, Human
aaagcaccagaagugauuuggaagagaaaucc

SEQ ID NO: 19354 - RNA, 32 nt, Human
aaagcacccagaggucaucugugugucccgag

SEQ ID NO: 19355 - RNA, 32 nt, Human
aaagcaccucaccccagcacagugccaccccu

SEQ ID NO: 19356 - RNA, 32 nt, Human
aaagcacgugauaacuuugaaggaggcugccu

SEQ ID NO: 19357 - RNA, 32 nt, Human
aaagcacuaaguuuucuuugaauguuccauug

SEQ ID NO: 19358 - RNA, 32 nt, Human
aaagcacuaugcuggucaugaacugcuucaaa

SEQ ID NO: 19359 - RNA, 31 nt, Human
aaagcacucaauaaauguuuguuuaaugaaa

SEQ ID NO: 19360 - RNA, 32 nt, Human
aaagcacuggaauccaggcuuccagcuccaua

SEQ ID NO: 19361 - RNA, 32 nt, Human
aaagcacuggggcaggggccagagcagcagca

SEQ ID NO: 19362 - RNA, 32 nt, Human
aaagcacuuaaccaggccccaagccuucaagg

SEQ ID NO: 19363 - RNA, 32 nt, Human
aaagcacuuccaucgcugaggaaaguucugcu

SEQ ID NO: 19364 - RNA, 32 nt, Human
aaagcagaaacauuaguuacaagugucuuaca

SEQ ID NO: 19365 - RNA, 32 nt, Human
aaagcagaaagagaaaugagacacucuaguug

SEQ ID NO: 19366 - RNA, 32 nt, Human
aaagcagacaacacucuagaacuggagagagg

SEQ ID NO: 19367 - RNA, 32 nt, Human
aaagcagacacuacuccaguaugucccaguag

SEQ ID NO: 19368 - RNA, 32 nt, Human
aaagcagacggggcguggguggggaaggggcu

SEQ ID NO: 19369 - RNA, 32 nt, Human
aaagcagacggugcuuggaugggcagggagaa

SEQ ID NO: 19370 - RNA, 32 nt, Human
aaagcagacugcaggccuccagcacuggcgca

SEQ ID NO: 19371 - RNA, 32 nt, Human
aaagcagacuugggaaccuggaagcacucugg

SEQ ID NO: 19372 - RNA, 32 nt, Human
aaagcagagaacagaggaggcccaacugagga

SEQ ID NO: 19373 - RNA, 32 nt, Human
aaagcagagaacagaggaggcccaucugagga

SEQ ID NO: 19374 - RNA, 32 nt, Human
aaagcagagagggaaaaacggagagugaagga

SEQ ID NO: 19375 - RNA, 32 nt, Human
aaagcagagagggagggcaggcgggagggagg

SEQ ID NO: 19376 - RNA, 32 nt, Human
aaagcagagaugggcuuucagcagaauaucaa

SEQ ID NO: 19377 - RNA, 32 nt, Human
aaagcagagcuggccugguugaaggaagggug

SEQ ID NO: 19378 - RNA, 32 nt, Human
aaagcagagucuuaaagagguuagagaggugg

SEQ ID NO: 19379 - RNA, 32 nt, Human
aaagcagaugcuguuuagcaccugccaaggag

SEQ ID NO: 19380 - RNA, 32 nt, Human
aaagcagaugugggagauuuuaagaagaaaag

SEQ ID NO: 19381 - RNA, 20 nt, Human
aaagcagcaagaacucaggg

SEQ ID NO: 19382 - RNA, 32 nt, Human
aaagcagcacuuaaggguggugcucuaauagc

SEQ ID NO: 19383 - RNA, 32 nt, Human
aaagcagcagccccggcaacucuggcuccagg

SEQ ID NO: 19384 - RNA, 19 nt, Human
aaagcagcaggacuguggg

SEQ ID NO: 19385 - RNA, 32 nt, Human
aaagcagcauugaagcagccuuuucccauugu

SEQ ID NO: 19386 - RNA, 32 nt, Human
aaagcagccauggaagagccugcagcucccuc

SEQ ID NO: 19387 - RNA, 32 nt, Human
aaagcagcccauuccugggcucagagacuccc

SEQ ID NO: 19388 - RNA, 32 nt, Human
aaagcagccccuuacccuuccugggcuucccc

SEQ ID NO: 19389 - RNA, 32 nt, Human
aaagcagccguugggagcccaggaggcggggc

SEQ ID NO: 19390 - RNA, 32 nt, Human
aaagcagccucccuucuccucucccuccacuc

SEQ ID NO: 19391 - RNA, 32 nt, Human
aaagcagccuuccugcucggugcacgaugcug

SEQ ID NO: 19392 - RNA, 32 nt, Human
aaagcagcgcggccgccgccuccgagggcugc

SEQ ID NO: 19393 - RNA, 32 nt, Human
aaagcagcuauggcuuuauuucccucuaccuu

SEQ ID NO: 19394 - RNA, 32 nt, Human
aaagcagcuuucuaaguuauugccuugguuau

SEQ ID NO: 19395 - RNA, 32 nt, Human
aaagcagcuuuugggggaaacugaggcagugg

SEQ ID NO: 19396 - RNA, 32 nt, Human
aaagcaggaaagcagauagagcagggaaaagg

SEQ ID NO: 19397 - RNA, 32 nt, Human
aaagcaggaaaguaugcuugggagaggccaag

SEQ ID NO: 19398 - RNA, 32 nt, Human
aaagcaggacacacgugaguccagccaacuca

SEQ ID NO: 19399 - RNA, 32 nt, Human
aaagcaggaggaaugcugacugguugaugaaa

SEQ ID NO: 19400 - RNA, 32 nt, Human
aaagcaggauguggcaguugcagugagaaagg

SEQ ID NO: 19401 - RNA, 32 nt, Human
aaagcaggcaggcagacagcugcugggggaaa

SEQ ID NO: 19402 - RNA, 23 nt, Human
aaagcaggcggaucaccugaggu

SEQ ID NO: 19403 - RNA, 32 nt, Human
aaagcaggcugccggagccagcagcggcaacc

SEQ ID NO: 19404 - RNA, 32 nt, Human
aaagcaggcugcuggagccagcaguggcagcc

SEQ ID NO: 19405 - RNA, 32 nt, Human
aaagcagggaauuuuuaaaaugugaguaauuu

SEQ ID NO: 19406 - RNA, 32 nt, Human
aaagcagggccaggccagaagcugguguccaa

SEQ ID NO: 19407 - RNA, 32 nt, Human
aaagcagggcuggggagaaugagauggacgca

SEQ ID NO: 19408 - RNA, 32 nt, Human
aaagcagggguuucuagaaguuggucaacaga

SEQ ID NO: 19409 - RNA, 32 nt, Human
aaagcagguggaucacgguaucaggaaacuga

SEQ ID NO: 19410 - RNA, 32 nt, Human
aaagcaguacuaagaggggaauuuguagcaau

SEQ ID NO: 19411 - RNA, 32 nt, Human
aaagcaguauuucucauuccugccuccucaau

SEQ ID NO: 19412 - RNA, 32 nt, Human
aaagcagucacaaguacagacacuucacuuag

SEQ ID NO: 19413 - RNA, 32 nt, Human
aaagcagucuguauuccaucaucuuccuuuuu

SEQ ID NO: 19414 - RNA, 32 nt, Human
aaagcagugaaugcaggauggugguugaaauu

SEQ ID NO: 19415 - RNA, 32 nt, Human
aaagcagugaauuuauuggagcaugccacgga

SEQ ID NO: 19416 - RNA, 21 nt, Human
aaagcagugacaaccauuggc

SEQ ID NO: 19417 - RNA, 32 nt, Human
aaagcagugagaaaguugaggugauaaacaac

SEQ ID NO: 19418 - RNA, 32 nt, Human
aaagcaguguacagacaccugccuucuuuaag

SEQ ID NO: 19419 - RNA, 32 nt, Human
aaagcagugucaagacaguaaggauucaaacc

SEQ ID NO: 19420 - RNA, 32 nt, Human
aaagcaguuuucuaucaccuaagugguuuuuc

SEQ ID NO: 19421 - RNA, 32 nt, Human
aaagcauacgugcuaugacucucuccaguuug

SEQ ID NO: 19422 - RNA, 32 nt, Human
aaagcauacuggagaauaagcuacaaagagcc

SEQ ID NO: 19423 - RNA, 32 nt, Human
aaagcauagcaaggcuguauggaucauuguga

SEQ ID NO: 19424 - RNA, 32 nt, Human
aaagcauagcaguucucuaggggagaggccug

SEQ ID NO: 19425 - RNA, 32 nt, Human
aaagcauaggaaaauccgagaaacauauggug

SEQ ID NO: 19426 - RNA, 32 nt, Human
aaagcaucagccuuuuaccaucaugucccugu

SEQ ID NO: 19427 - RNA, 32 nt, Human
aaagcaucagggaugcuaagugcagugaugag

SEQ ID NO: 19428 - RNA, 32 nt, Human
aaagcaucaguauuuauagcaaaaagagacuc

SEQ ID NO: 19429 - RNA, 32 nt, Human
aaagcaucauucuuuaauuacuguaccaucca

SEQ ID NO: 19430 - RNA, 32 nt, Human
aaagcaucauuucugccagcuucuuauggucc

SEQ ID NO: 19431 - RNA, 32 nt, Human
aaagcauccaggauucagugaagaacugacua

SEQ ID NO: 19432 - RNA, 32 nt, Human
aaagcaucuggaaauaggaagacagagaaggu

SEQ ID NO: 19433 - RNA, 32 nt, Human
aaagcaucuucccagggguccaccucccuuua

SEQ ID NO: 19434 - RNA, 32 nt, Human
aaagcaucuuugcucaacuccugggacugaac

SEQ ID NO: 19435 - RNA, 32 nt, Human
aaagcaugaauguuaacccacagaauccaagg

SEQ ID NO: 19436 - RNA, 32 nt, Human
aaagcaugaucaggaauccgaaugccuacaag

SEQ ID NO: 19437 - RNA, 32 nt, Human
aaagcaugcauucuagcacaacaagaugaaau

SEQ ID NO: 19438 - RNA, 32 nt, Human
aaagcaugccguucugcaccuacccaguugcc

SEQ ID NO: 19439 - RNA, 32 nt, Human
aaagcaugggaccugucgucucagccuguugg

SEQ ID NO: 19440 - RNA, 32 nt, Human
aaagcaugguuuggugccagccccuucaccuc

SEQ ID NO: 19441 - RNA, 31 nt, Human
aaagcauguaguaccaagcacuuguauuucc

SEQ ID NO: 19442 - RNA, 32 nt, Human
aaagcauguagugacuguuuuucaagaagaaa

SEQ ID NO: 19443 - RNA, 32 nt, Human
aaagcaugucuugcacuguucaaccuccugag

SEQ ID NO: 19444 - RNA, 32 nt, Human
aaagcauguuucaggaucagaucaauacaauc

SEQ ID NO: 19445 - RNA, 23 nt, Human
aaagcauuaucaugccccugcug

SEQ ID NO: 19446 - RNA, 32 nt, Human
aaagcauuaugaggcuggagacauagguggga

SEQ ID NO: 19447 - RNA, 32 nt, Human
aaagcauucauucuccccauuugugacauuug

SEQ ID NO: 19448 - RNA, 32 nt, Human
aaagcauucuccccagcaugucucuuccagcu

SEQ ID NO: 19449 - RNA, 32 nt, Human
aaagcauucuugcucaucuccaaauaaaacgu

SEQ ID NO: 19450 - RNA, 32 nt, Human
aaagcauugguggucagagggaagacucuggu

SEQ ID NO: 19451 - RNA, 32 nt, Human
aaagcauuguccagagguaggaacacagucug

SEQ ID NO: 19452 - RNA, 32 nt, Human
aaagcauuucacccucucaaugccucaccuuu

SEQ ID NO: 19453 - RNA, 32 nt, Human
aaagcauuugcuguguuucguuagcaucuggc

SEQ ID NO: 19454 - RNA, 32 nt, Human
aaagccaaaauccccauccaaaggacaguaau

SEQ ID NO: 19455 - RNA, 21 nt, Human
aaagccaaacccaccugugua

SEQ ID NO: 19456 - RNA, 32 nt, Human
aaagccaaagguuugaacaaguuguggauggu

SEQ ID NO: 19457 - RNA, 32 nt, Human
aaagccaaaucaagaggaacaagagcaaaauc

SEQ ID NO: 19458 - RNA, 32 nt, Human
aaagccaacaguaagccccaggaaaggguuuu

SEQ ID NO: 19459 - RNA, 32 nt, Human
aaagccaagagcucugucucccucccaaccca

SEQ ID NO: 19460 - RNA, 32 nt, Human
aaagccaagcuacaaauuaaauccucagccug

SEQ ID NO: 19461 - RNA, 32 nt, Human
aaagccaaggugaaggaugaaucacagagaag

SEQ ID NO: 19462 - RNA, 32 nt, Human
aaagccacaaagucagugccuggagaaggguu

SEQ ID NO: 19463 - RNA, 32 nt, Human
aaagccacaagugccuccaaagccauuacacc

SEQ ID NO: 19464 - RNA, 32 nt, Human
aaagccacacacuacuacaucccuucacaaag

SEQ ID NO: 19465 - RNA, 32 nt, Human
aaagccacagaagacacagagcagggaaggga

SEQ ID NO: 19466 - RNA, 32 nt, Human
aaagccacagaauaauugauagggcagcuguu

SEQ ID NO: 19467 - RNA, 32 nt, Human
aaagccaccagccuggacaggaagagguggca

SEQ ID NO: 19468 - RNA, 22 nt, Human
aaagccacccucuuccugugua

SEQ ID NO: 19469 - RNA, 32 nt, Human
aaagccaccugcuuccuccaccccaccuucca

SEQ ID NO: 19470 - RNA, 32 nt, Human
aaagccacgacaguaacccaugcgaccacuuc

SEQ ID NO: 19471 - RNA, 32 nt, Human
aaagccacuaccucgucugaaggacuggacuu

SEQ ID NO: 19472 - RNA, 32 nt, Human
aaagccacuagagagaaacugaaagaaaacau

SEQ ID NO: 19473 - RNA, 32 nt, Human
aaagccacugaggaggaggcugugcugaguuu

SEQ ID NO: 19474 - RNA, 32 nt, Human
aaagccacugcacucaaacguggggaacaaga

SEQ ID NO: 19475 - RNA, 32 nt, Human
aaagccacuuaggagcagacagcagcguuguu

SEQ ID NO: 19476 - RNA, 32 nt, Human
aaagccagaccagugcaauggauagaaugggc

SEQ ID NO: 19477 - RNA, 32 nt, Human
aaagccagacuacagcugguucuugaagcugc

SEQ ID NO: 19478 - RNA, 32 nt, Human
aaagccagcaaagccuccagcaucuuuuccau

SEQ ID NO: 19479 - RNA, 19 nt, Human
aaagccagcaguaaaggcc

SEQ ID NO: 19480 - RNA, 32 nt, Human
aaagccagcaugcaaggcccuccccuuugugc

SEQ ID NO: 19481 - RNA, 32 nt, Human
aaagccagccaggcagagguuuuaaugucugu

SEQ ID NO: 19482 - RNA, 32 nt, Human
aaagccagccaguucagggcucaggccucacc

SEQ ID NO: 19483 - RNA, 32 nt, Human
aaagccagcccucccuucccuucuuggggcgc

SEQ ID NO: 19484 - RNA, 32 nt, Human
aaagccagccuccaucuuaggccuuugccuca

SEQ ID NO: 19485 - RNA, 32 nt, Human
aaagccagccugagccacauagugagacugag

SEQ ID NO: 19486 - RNA, 32 nt, Human
aaagccagcugucgucauuugagagccagcca

SEQ ID NO: 19487 - RNA, 32 nt, Human
aaagccagcuuagugggacuuccgcgucucuc

SEQ ID NO: 19488 - RNA, 32 nt, Human
aaagccaggaaagauugggaagugggugguca

SEQ ID NO: 19489 - RNA, 32 nt, Human
aaagccaggaacagggaccagcuccccggggg

SEQ ID NO: 19490 - RNA, 32 nt, Human
aaagccaggcagcaguacaguggagaaucugc

SEQ ID NO: 19491 - RNA, 32 nt, Human
aaagccaggcucaguucuuaccucugggaauc

SEQ ID NO: 19492 - RNA, 32 nt, Human
aaagccagggcaggccgggcacaguggcucac

SEQ ID NO: 19493 - RNA, 32 nt, Human
aaagccauauuggaguagcgaggaaucugauu

SEQ ID NO: 19494 - RNA, 32 nt, Human
aaagccaucaugggagacauccagauggcaca

SEQ ID NO: 19495 - RNA, 32 nt, Human
aaagccaucauuuucuccuggauuaaucucuu

SEQ ID NO: 19496 - RNA, 32 nt, Human
aaagccaucucuuccagcaggagagggcucua

SEQ ID NO: 19497 - RNA, 32 nt, Human
aaagccaucugaagccugucucuggugaacaa

SEQ ID NO: 19498 - RNA, 32 nt, Human
aaagccaucugacuucaaucaggaagccagag

SEQ ID NO: 19499 - RNA, 19 nt, Human
aaagccaugccggggugug

SEQ ID NO: 19500 - RNA, 32 nt, Human
aaagccaugccugcuccugccucucucccaac

SEQ ID NO: 19501 - RNA, 32 nt, Human
aaagccauggcagaggguccuagcggcgccac

SEQ ID NO: 19502 - RNA, 32 nt, Human
aaagccauggcccaaacccaggaguugguaaa

SEQ ID NO: 19503 - RNA, 19 nt, Human
aaagccaugucaccugcgu

SEQ ID NO: 19504 - RNA, 32 nt, Human
aaagccauuauuaauuuucauuucuacaccua

SEQ ID NO: 19505 - RNA, 21 nt, Human
aaagccauugaccacccacca

SEQ ID NO: 19506 - RNA, 32 nt, Human
aaagccauugaccacccaccauauuguuugau

SEQ ID NO: 19507 - RNA, 32 nt, Human
aaagcccaacacacacucggguuaagaaauac

SEQ ID NO: 19508 - RNA, 27 nt, Human
aaagcccaaccuucuccagggcugcag

SEQ ID NO: 19509 - RNA, 18 nt, Human
aaagcccaaguauuuuga

SEQ ID NO: 19510 - RNA, 32 nt, Human
aaagcccaaguugaucagcuuaccggaagaaa

SEQ ID NO: 19511 - RNA, 32 nt, Human
aaagcccagacccaugaccaccucuggcucua

SEQ ID NO: 19512 - RNA, 32 nt, Human
aaagcccagagacagcuugaucaaaggcacac

SEQ ID NO: 19513 - RNA, 32 nt, Human
aaagcccagagugcccuuggggacacuuuugg

SEQ ID NO: 19514 - RNA, 23 nt, Human
aaagcccagcacgacccugcugg

SEQ ID NO: 19515 - RNA, 20 nt, Human
aaagcccagcccagcuggag

SEQ ID NO: 19516 - RNA, 32 nt, Human
aaagcccagcccuguccccuuggcuggccggc

SEQ ID NO: 19517 - RNA, 32 nt, Human
aaagcccagcuccaccacauugcucagucuuc

SEQ ID NO: 19518 - RNA, 32 nt, Human
aaagcccaggaauaagaaguauggcuggagac

SEQ ID NO: 19519 - RNA, 32 nt, Human
aaagcccaggagagcaguggguggggcugggc

SEQ ID NO: 19520 - RNA, 22 nt, Human
aaagcccagggccuucacuuua

SEQ ID NO: 19521 - RNA, 24 nt, Human
aaagcccagggucuggggcagcag

SEQ ID NO: 19522 - RNA, 20 nt, Human
aaagcccaggugcuggcugc

SEQ ID NO: 19523 - RNA, 31 nt, Human
aaagcccaguuucagaacauaagcuuuaagc

SEQ ID NO: 19524 - RNA, 32 nt, Human
aaagcccaucacuucuagagggagaaaggcaa

SEQ ID NO: 19525 - RNA, 32 nt, Human
aaagcccauccguacuaccaggagacuggauc

SEQ ID NO: 19526 - RNA, 32 nt, Human
aaagcccaucucuagcacaccuugaccccagg

SEQ ID NO: 19527 - RNA, 18 nt, Human
aaagcccaucuugauuuu

SEQ ID NO: 19528 - RNA, 32 nt, Human
aaagcccaugugugcacauacacacaugcacc

SEQ ID NO: 19529 - RNA, 21 nt, Human
aaagcccauuaaugauucaga

SEQ ID NO: 19530 - RNA, 32 nt, Human
aaagccccagcacuaacguaaauacacaacac

SEQ ID NO: 19531 - RNA, 32 nt, Human
aaagccccagguaaccccggacugguggucac

SEQ ID NO: 19532 - RNA, 20 nt, Human
aaagccccaguuaauuuuga

SEQ ID NO: 19533 - RNA, 32 nt, Human
aaagcccccaaaacaaaacaaaccuuaauuga

SEQ ID NO: 19534 - RNA, 32 nt, Human
aaagcccccucaccuggcgucccgcaaccaug

SEQ ID NO: 19535 - RNA, 32 nt, Human
aaagccccuaaaggaggauuuggccuuucaaa

SEQ ID NO: 19536 - RNA, 32 nt, Human
aaagccccucaacuacagcccagcccaaccca

SEQ ID NO: 19537 - RNA, 32 nt, Human
aaagccccuccaguccagcuuugaggcugggc

SEQ ID NO: 19538 - RNA, 32 nt, Human
aaagccccugccccuccucucccucaucaagg

SEQ ID NO: 19539 - RNA, 32 nt, Human
aaagccccugcucucucugagccuuauuucau

SEQ ID NO: 19540 - RNA, 32 nt, Human
aaagccccuggacauacccacagggaaggcaa

SEQ ID NO: 19541 - RNA, 32 nt, Human
aaagccccugggaacgaggccuacccacuaug

SEQ ID NO: 19542 - RNA, 32 nt, Human
aaagccccuguucacgcugcacuggugcauga

SEQ ID NO: 19543 - RNA, 22 nt, Human
aaagccccuuuuuacacagcug

SEQ ID NO: 19544 - RNA, 32 nt, Human
aaagcccgagggaggaagagagggagggagga

SEQ ID NO: 19545 - RNA, 23 nt, Human
aaagcccggcguccaucaccuua

SEQ ID NO: 19546 - RNA, 32 nt, Human
aaagcccggucucacccccuaaccucauccua

SEQ ID NO: 19547 - RNA, 31 nt, Human
aaagcccucaauaaacauguaugaaggcugg

SEQ ID NO: 19548 - RNA, 32 nt, Human
aaagcccucacugcucucucagucuucuugau

SEQ ID NO: 19549 - RNA, 32 nt, Human
aaagcccucaucuucucuuucucuccucaguu

SEQ ID NO: 19550 - RNA, 20 nt, Human
aaagcccuccucacgcaguu

SEQ ID NO: 19551 - RNA, 32 nt, Human
aaagcccuccucccgggccaagguagaggaag

SEQ ID NO: 19552 - RNA, 32 nt, Human
aaagcccucguaaagcccuccggcuugaggag

SEQ ID NO: 19553 - RNA, 32 nt, Human
aaagcccucuacugcuggauccaaagcuaagg

SEQ ID NO: 19554 - RNA, 21 nt, Human
aaagcccucuucaacccacug

SEQ ID NO: 19555 - RNA, 32 nt, Human
aaagcccucuuuuucacaccucaucaaacagg

SEQ ID NO: 19556 - RNA, 32 nt, Human
aaagcccugaguguggcuaggaagggggugcu

SEQ ID NO: 19557 - RNA, 32 nt, Human
aaagcccugaugaccugguucuucugaggccc

SEQ ID NO: 19558 - RNA, 19 nt, Human
aaagcccugccucugugua

SEQ ID NO: 19559 - RNA, 32 nt, Human
aaagcccugcuugcuuuugcagcugggaggcu

SEQ ID NO: 19560 - RNA, 23 nt, Human
aaagcccugguaaaagggauaca

SEQ ID NO: 19561 - RNA, 21 nt, Human
aaagcccuguaaagauuuuga

SEQ ID NO: 19562 - RNA, 32 nt, Human
aaagcccuucgauccccaucagagaggucaca

SEQ ID NO: 19563 - RNA, 32 nt, Human
aaagcccuugggaggcugagguccugccuucu

SEQ ID NO: 19564 - RNA, 32 nt, Human
aaagccgaaggaguaaggugcugcaaugaugu

SEQ ID NO: 19565 - RNA, 32 nt, Human
aaagccgaccuccaccuccuccuccuccuucu

SEQ ID NO: 19566 - RNA, 32 nt, Human
aaagccgauuucaaauucagaaccugaaugcc

SEQ ID NO: 19567 - RNA, 32 nt, Human
aaagccgggagaaacugcugagacgagguggc

SEQ ID NO: 19568 - RNA, 32 nt, Human
aaagccgggaggcaaguaggacagagagauga

SEQ ID NO: 19569 - RNA, 32 nt, Human
aaagccgggcugggcuuggagcugcucaugga

SEQ ID NO: 19570 - RNA, 32 nt, Human
aaagccggggguaggggccacccuggaauggg

SEQ ID NO: 19571 - RNA, 32 nt, Human
aaagccggucucaaagauaacugcauccuuca

SEQ ID NO: 19572 - RNA, 32 nt, Human
aaagccgucgguuacagaggagacugacagag

SEQ ID NO: 19573 - RNA, 32 nt, Human
aaagccgugcucuccagccuggcugccaggga

SEQ ID NO: 19574 - RNA, 32 nt, Human
aaagccuaaaaauuaaggccaagcugagcuuu

SEQ ID NO: 19575 - RNA, 22 nt, Human
aaagccuaaccaaggcugcugg

SEQ ID NO: 19576 - RNA, 32 nt, Human
aaagccuaagaaaaaggaaauuggacaguuuu

SEQ ID NO: 19577 - RNA, 32 nt, Human
aaagccuaagguccuucuuagcacucuucagc

SEQ ID NO: 19578 - RNA, 32 nt, Human
aaagccucaaagcagccaaaaccaggcuuucc

SEQ ID NO: 19579 - RNA, 32 nt, Human
aaagccucaagugacucagccugguuggagaa

SEQ ID NO: 19580 - RNA, 32 nt, Human
aaagccucacacaccuacuuuuaucaaacaaa

SEQ ID NO: 19581 - RNA, 32 nt, Human
aaagccucagaguuggagugccuggcucucug

SEQ ID NO: 19582 - RNA, 32 nt, Human
aaagccucaguuccacugccuuccucucccuc

SEQ ID NO: 19583 - RNA, 32 nt, Human
aaagccucauuccgugcugucuggcaggaagc

SEQ ID NO: 19584 - RNA, 32 nt, Human
aaagccuccaaccuugaaguccagugaagucu

SEQ ID NO: 19585 - RNA, 32 nt, Human
aaagccucccuggcugguguagagggaucagg

SEQ ID NO: 19586 - RNA, 32 nt, Human
aaagccuccucucucccccacuggucaagauu

SEQ ID NO: 19587 - RNA, 32 nt, Human
aaagccucuaccugcaccucacagugcaaggc

SEQ ID NO: 19588 - RNA, 32 nt, Human
aaagccugacccugggcaggugagugacgggu

SEQ ID NO: 19589 - RNA, 32 nt, Human
aaagccugaccuuccaaagcuugcuuccuucc

SEQ ID NO: 19590 - RNA, 32 nt, Human
aaagccugcauguaagaacaucuacugagaaa

SEQ ID NO: 19591 - RNA, 32 nt, Human
aaagccugcugcauuugcgugaucucaagacc

SEQ ID NO: 19592 - RNA, 32 nt, Human
aaagccugggcaacauggugaaacccugucuc

SEQ ID NO: 19593 - RNA, 32 nt, Human
aaagccuguaucucugugaugauuucugugcu

SEQ ID NO: 19594 - RNA, 32 nt, Human
aaagccuguccacccuugagaauccuuccucu

SEQ ID NO: 19595 - RNA, 32 nt, Human
aaagccugugcccccaucaucucacuccuuug

SEQ ID NO: 19596 - RNA, 32 nt, Human
aaagccuguguggcauuucuggaaaagggaau

SEQ ID NO: 19597 - RNA, 32 nt, Human
aaagccuguucccccgacucaggauuuccaag

SEQ ID NO: 19598 - RNA, 22 nt, Human
aaagccuuagguaucaauucca

SEQ ID NO: 19599 - RNA, 32 nt, Human
aaagccuucagauuuguuuucuagucacuuuu

SEQ ID NO: 19600 - RNA, 32 nt, Human
aaagccuucagggucaguucaagccuuaauag

SEQ ID NO: 19601 - RNA, 32 nt, Human
aaagccuuccacccuccugucugcuuuagaag

SEQ ID NO: 19602 - RNA, 32 nt, Human
aaagccuuccacccuccugucuggcuuuagaa

SEQ ID NO: 19603 - RNA, 32 nt, Human
aaagccuucucccuagcuccuccccuuccucu

SEQ ID NO: 19604 - RNA, 32 nt, Human
aaagccuucuggaaggugggagcagggugagc

SEQ ID NO: 19605 - RNA, 32 nt, Human
aaagccuugcaaucccaggcuggggucagccu

SEQ ID NO: 19606 - RNA, 32 nt, Human
aaagccuuggaagagaaaaguagaauucagua

SEQ ID NO: 19607 - RNA, 18 nt, Human
aaagccuuggugccugug

SEQ ID NO: 19608 - RNA, 32 nt, Human
aaagccuuuaaaacaaaaagccaucguaggua

SEQ ID NO: 19609 - RNA, 32 nt, Human
aaagccuuucagggucugucuauauuuucagu

SEQ ID NO: 19610 - RNA, 23 nt, Human
aaagccuuucugauccaguuuca

SEQ ID NO: 19611 - RNA, 32 nt, Human
aaagccuuuugucacccaggcuggagugccau

SEQ ID NO: 19612 - RNA, 32 nt, Human
aaagccuuuuuauccugcuuucuuugaacaca

SEQ ID NO: 19613 - RNA, 32 nt, Human
aaagcgaaaagagguuuuggaggaauauuuua

SEQ ID NO: 19614 - RNA, 32 nt, Human
aaagcgaagaagagaagagggauguguuccgc

SEQ ID NO: 19615 - RNA, 18 nt, Human
aaagcgaccacugccaag

SEQ ID NO: 19616 - RNA, 32 nt, Human
aaagcgaccacugccaaggagccuaucugaau

SEQ ID NO: 19617 - RNA, 32 nt, Human
aaagcgaccuguggacuaaaucugccacgauu

SEQ ID NO: 19618 - RNA, 32 nt, Human
aaagcgagagggcuaaauggguccaucucuag

SEQ ID NO: 19619 - RNA, 21 nt, Human
aaagcgagccuccaggcccag

SEQ ID NO: 19620 - RNA, 32 nt, Human
aaagcgaggccugcgggcggcggcugggcucc

SEQ ID NO: 19621 - RNA, 32 nt, Human
aaagcgcagcugacacaguugaaggagucacu

SEQ ID NO: 19622 - RNA, 32 nt, Human
aaagcgcaucuucuccacaugggcuucacgug

SEQ ID NO: 19623 - RNA, 32 nt, Human
aaagcgccauugcacuccagucugggugacag

SEQ ID NO: 19624 - RNA, 32 nt, Human
aaagcgccgcagcugccaaaaugucuacaggu

SEQ ID NO: 19625 - RNA, 32 nt, Human
aaagcgccggaggcggaggaagcugacugugg

SEQ ID NO: 19626 - RNA, 32 nt, Human
aaagcgcggguccagaugagggccaggaaggg

SEQ ID NO: 19627 - RNA, 32 nt, Human
aaagcgcucaucuugcccucuaccuccugaua

SEQ ID NO: 19628 - RNA, 32 nt, Human
aaagcgcugccacccacccaccugggccagag

SEQ ID NO: 19629 - RNA, 32 nt, Human
aaagcgcuggauuacaggcaugagccacuaca

SEQ ID NO: 19630 - RNA, 32 nt, Human
aaagcggaaaaagagaaagaaaggagagaagc

SEQ ID NO: 19631 - RNA, 32 nt, Human
aaagcggagaggggagugggugaagcugggaa

SEQ ID NO: 19632 - RNA, 32 nt, Human
aaagcggaggagcuaagccaccugccaaaaug

SEQ ID NO: 19633 - RNA, 32 nt, Human
aaagcggaggcagcgggggaagauggcggcgg

SEQ ID NO: 19634 - RNA, 32 nt, Human
aaagcggcagugagcuaaaaucaagucaccac

SEQ ID NO: 19635 - RNA, 32 nt, Human
aaagcggcaucugcuguggccauguuuugcgg

SEQ ID NO: 19636 - RNA, 20 nt, Human
aaagcggccacacuggggga

SEQ ID NO: 19637 - RNA, 32 nt, Human
aaagcggccaggcaggugggagacugaauuug

SEQ ID NO: 19638 - RNA, 32 nt, Human
aaagcgggaggcacuucccaggggaagaccag

SEQ ID NO: 19639 - RNA, 32 nt, Human
aaagcggggugaggggcggaagggucccggcg

SEQ ID NO: 19640 - RNA, 32 nt, Human
aaagcgggugcuguagaggagcacucagcuca

SEQ ID NO: 19641 - RNA, 23 nt, Human
aaagcggguggguuacuugaggc

SEQ ID NO: 19642 - RNA, 32 nt, Human
aaagcggugagaaaggagggccagccaguugg

SEQ ID NO: 19643 - RNA, 32 nt, Human
aaagcggugggcaagggcuggccgcagcuccu

SEQ ID NO: 19644 - RNA, 32 nt, Human
aaagcgugugcuuuacccaucugcugucuugc

SEQ ID NO: 19645 - RNA, 23 nt, Human
aaagcguuucaaagcgucagcug

SEQ ID NO: 19646 - RNA, 32 nt, Human
aaagcuaaaauggcuuaacaucaugcuacacu

SEQ ID NO: 19647 - RNA, 32 nt, Human
aaagcuaaaguggaaguuauugccaaaggaac

SEQ ID NO: 19648 - RNA, 32 nt, Human
aaagcuaagacaaacaaaacuacaauggaaga

SEQ ID NO: 19649 - RNA, 32 nt, Human
aaagcuaagaugaccaugcgcccuuuccucug

SEQ ID NO: 19650 - RNA, 24 nt, Human
aaagcuaaggaaaacccaccagcc

SEQ ID NO: 19651 - RNA, 32 nt, Human
aaagcuaauuaggaauagacauggacacugau

SEQ ID NO: 19652 - RNA, 32 nt, Human
aaagcuacaguacaggcuguguuagguccucu

SEQ ID NO: 19653 - RNA, 32 nt, Human
aaagcuacuaauugucucaguguaaguuuuaa

SEQ ID NO: 19654 - RNA, 32 nt, Human
aaagcuacugaaacuccuccaccugcuucuaa

SEQ ID NO: 19655 - RNA, 32 nt, Human
aaagcuacuuugcuccuggugagagcuuaaaa

SEQ ID NO: 19656 - RNA, 21 nt, Human
aaagcuagaggcaucaugcua

SEQ ID NO: 19657 - RNA, 32 nt, Human
aaagcuagaggcugggcugagccaggaguccu

SEQ ID NO: 19658 - RNA, 32 nt, Human
aaagcuagagucagagguuccgguugagauca

SEQ ID NO: 19659 - RNA, 32 nt, Human
aaagcuaggacagagcaccugaccucaguugu

SEQ ID NO: 19660 - RNA, 20 nt, Human
aaagcuauacuagcucacau

SEQ ID NO: 19661 - RNA, 24 nt, Human
aaagcuauacuuuuucaucacaua

SEQ ID NO: 19662 - RNA, 31 nt, Human
aaagcuauggccucaaccaccagcaccaaga

SEQ ID NO: 19663 - RNA, 32 nt, Human
aaagcuauuaaugucacuccuuuugcgagcau

SEQ ID NO: 19664 - RNA, 32 nt, Human
aaagcuauugagcguuugcuggaacacauuau

SEQ ID NO: 19665 - RNA, 32 nt, Human
aaagcucaaaauggcuaggugauauuccucaa

SEQ ID NO: 19666 - RNA, 32 nt, Human
aaagcucaacuugaagcuuucuugccugcagu

SEQ ID NO: 19667 - RNA, 32 nt, Human
aaagcucaagagggaaucaucuggccugagcc

SEQ ID NO: 19668 - RNA, 32 nt, Human
aaagcucaagccuuugcgaagcuaaugaccug

SEQ ID NO: 19669 - RNA, 19 nt, Human
aaagcucacagucuaauca

SEQ ID NO: 19670 - RNA, 32 nt, Human
aaagcucacugcugccccagccgggcuucuua

SEQ ID NO: 19671 - RNA, 32 nt, Human
aaagcucagagugggccagagcagggguguga

SEQ ID NO: 19672 - RNA, 32 nt, Human
aaagcucaggagagacacagacuuggggcuuu

SEQ ID NO: 19673 - RNA, 32 nt, Human
aaagcucaggguuuguugaauuagcaugagag

SEQ ID NO: 19674 - RNA, 32 nt, Human
aaagcucauucuucuucuuccucccagcagcu

SEQ ID NO: 19675 - RNA, 32 nt, Human
aaagcucauuggcagagagcauugcuagugag

SEQ ID NO: 19676 - RNA, 32 nt, Human
aaagcucauuggugaaaacaguucucaggggu

SEQ ID NO: 19677 - RNA, 17 nt, Human
aaagcuccccccaauga

SEQ ID NO: 19678 - RNA, 32 nt, Human
aaagcucccugccuucccuugccgcugguccc

SEQ ID NO: 19679 - RNA, 32 nt, Human
aaagcuccggagccccagccccaaggcuuuga

SEQ ID NO: 19680 - RNA, 32 nt, Human
aaagcuccucgagggcagggacuuuggucuau

SEQ ID NO: 19681 - RNA, 32 nt, Human
aaagcuccuggacuugggcuuagcagcugagc

SEQ ID NO: 19682 - RNA, 32 nt, Human
aaagcuccugggccccuccucccuucaaggau

SEQ ID NO: 19683 - RNA, 32 nt, Human
aaagcucgcccagggcugggugcaguggcuca

SEQ ID NO: 19684 - RNA, 32 nt, Human
aaagcucugcuuguauuugugauauuucauuu

SEQ ID NO: 19685 - RNA, 32 nt, Human
aaagcucuggacaaccuugagaagcucaauuu

SEQ ID NO: 19686 - RNA, 32 nt, Human
aaagcucuguaacccacauuguaaagccguga

SEQ ID NO: 19687 - RNA, 32 nt, Human
aaagcucugucucccuaacucaacugcuuugc

SEQ ID NO: 19688 - RNA, 20 nt, Human
aaagcucuuaauucuccaua

SEQ ID NO: 19689 - RNA, 32 nt, Human
aaagcugaaagauuugaugagggauuggaaug

SEQ ID NO: 19690 - RNA, 32 nt, Human
aaagcugaacacugaagucaguucucaacaau

SEQ ID NO: 19691 - RNA, 19 nt, Human
aaagcugacagccugugua

SEQ ID NO: 19692 - RNA, 25 nt, Human
aaagcugaccauggaucccuggggc

SEQ ID NO: 19693 - RNA, 32 nt, Human
aaagcugagaucacaggaacagcaggugacag

SEQ ID NO: 19694 - RNA, 32 nt, Human
aaagcugagcacgggaaggaagacugaucucu

SEQ ID NO: 19695 - RNA, 32 nt, Human
aaagcugaggcaaaaguggccuccagacagga

SEQ ID NO: 19696 - RNA, 32 nt, Human
aaagcugaggcagaaggaucccuugagccuag

SEQ ID NO: 19697 - RNA, 32 nt, Human
aaagcugaggcagguggaucaccugaggucag

SEQ ID NO: 19698 - RNA, 32 nt, Human
aaagcugaggugagccaugauuacuccacugc

SEQ ID NO: 19699 - RNA, 32 nt, Human
aaagcugaguuguagagagaguauguauuuaa

SEQ ID NO: 19700 - RNA, 32 nt, Human
aaagcugaugcaacugauuuauacaaaaugaa

SEQ ID NO: 19701 - RNA, 32 nt, Human
aaagcugauucugguuaucucuuuaaggacaa

SEQ ID NO: 19702 - RNA, 32 nt, Human
aaagcugcaaaagguuuuucacugccugccuc

SEQ ID NO: 19703 - RNA, 32 nt, Human
aaagcugcaacaggcuaggcgcaguggcucau

SEQ ID NO: 19704 - RNA, 32 nt, Human
aaagcugcagagcagaggaaccaaaccagguu

SEQ ID NO: 19705 - RNA, 32 nt, Human
aaagcugcagugagcuacugugaucaugccuc

SEQ ID NO: 19706 - RNA, 32 nt, Human
aaagcugcagugagcuguaauugcaucacugc

SEQ ID NO: 19707 - RNA, 32 nt, Human
aaagcugcagugagucaugauagcaccacugc

SEQ ID NO: 19708 - RNA, 32 nt, Human
aaagcugcaucugucuguaucuuucuuuugua

SEQ ID NO: 19709 - RNA, 32 nt, Human
aaagcugccgaguccuaugauuacacgcgaug

SEQ ID NO: 19710 - RNA, 32 nt, Human
aaagcugccgaguccuaugauuacacgugaug

SEQ ID NO: 19711 - RNA, 32 nt, Human
aaagcugccgcugaagcugccgccguugccuc

SEQ ID NO: 19712 - RNA, 32 nt, Human
aaagcugcucuuuacuguuucuagucaaaaau

SEQ ID NO: 19713 - RNA, 32 nt, Human
aaagcugcugagggauagagccugagccuggu

SEQ ID NO: 19714 - RNA, 32 nt, Human
aaagcugcuuuaauaaauacuucuggucugau

SEQ ID NO: 19715 - RNA, 32 nt, Human
aaagcuggaaggacucugccuugggagauucc

SEQ ID NO: 19716 - RNA, 32 nt, Human
aaagcuggagccaauggugagggcugagaggg

SEQ ID NO: 19717 - RNA, 21 nt, Human
aaagcuggaggcaucacgcua

SEQ ID NO: 19718 - RNA, 21 nt, Human
aaagcuggaggcaucacgcug

SEQ ID NO: 19719 - RNA, 32 nt, Human
aaagcuggagucagaggaagcucuucuucuga

SEQ ID NO: 19720 - RNA, 32 nt, Human
aaagcuggcagaggcccuggaauuccagauca

SEQ ID NO: 19721 - RNA, 32 nt, Human
aaagcuggcagcccuggaagugcaguguuggg

SEQ ID NO: 19722 - RNA, 32 nt, Human
aaagcuggccacugccagcuugcugcgggaac

SEQ ID NO: 19723 - RNA, 32 nt, Human
aaagcuggcccaggcgucuaaggagucaaaag

SEQ ID NO: 19724 - RNA, 32 nt, Human
aaagcuggccugguuuccuuccucccugauug

SEQ ID NO: 19725 - RNA, 32 nt, Human
aaagcuggcucugccuugaauucccaccccuu

SEQ ID NO: 19726 - RNA, 32 nt, Human
aaagcuggcucuuggaaauugagcggagagcg

SEQ ID NO: 19727 - RNA, 32 nt, Human
aaagcugggaaccagcaucucagcgccagcuc

SEQ ID NO: 19728 - RNA, 32 nt, Human
aaagcugggauuacaggcgugagccaccgcgc

SEQ ID NO: 19729 - RNA, 32 nt, Human
aaagcugggauuacagggcccugccaccaagc

SEQ ID NO: 19730 - RNA, 32 nt, Human
aaagcugggauuacuagcaugagccaccaugc

SEQ ID NO: 19731 - RNA, 32 nt, Human
aaagcugggcagguuggugggggccucggugu

SEQ ID NO: 19732 - RNA, 32 nt, Human
aaagcugggccugggagcguuuagcugguggg

SEQ ID NO: 19733 - RNA, 32 nt, Human
aaagcuggggauguuagccuaugacugucauc

SEQ ID NO: 19734 - RNA, 32 nt, Human
aaagcuggguacuaagaaauguuauuugcauc

SEQ ID NO: 19735 - RNA, 32 nt, Human
aaagcugguacggggcgccacccuggacaucg

SEQ ID NO: 19736 - RNA, 32 nt, Human
aaagcugguccagcagcagggguggaggcugg

SEQ ID NO: 19737 - RNA, 32 nt, Human
aaagcuggucucaaacuuguggccucaagcaa

SEQ ID NO: 19738 - RNA, 32 nt, Human
aaagcugguuucgugaugagaaaaugaaagaa

SEQ ID NO: 19739 - RNA, 21 nt, Human
aaagcuguaggcaucacgcua

SEQ ID NO: 19740 - RNA, 32 nt, Human
aaagcuguagugagcugucauugugccacuau

SEQ ID NO: 19741 - RNA, 32 nt, Human
aaagcugucuucuguccacgagcaccacaguc

SEQ ID NO: 19742 - RNA, 32 nt, Human
aaagcugugcaguuaaguacaaaaagauacuu

SEQ ID NO: 19743 - RNA, 32 nt, Human
aaagcugugcucagaggaggugagaggagagg

SEQ ID NO: 19744 - RNA, 32 nt, Human
aaagcuguggcaaaaucuuccacccauccugg

SEQ ID NO: 19745 - RNA, 32 nt, Human
aaagcuguggccaggaaguggccgguauaaag

SEQ ID NO: 19746 - RNA, 32 nt, Human
aaagcugugggaugccuacgcugcauucauua

SEQ ID NO: 19747 - RNA, 32 nt, Human
aaagcuuaaaaaggaaauuacuggaaaauaag

SEQ ID NO: 19748 - RNA, 32 nt, Human
aaagcuuaguccuagcauaugcaccugagcca

SEQ ID NO: 19749 - RNA, 32 nt, Human
aaagcuuauaagauauaaauggagauuuuaaa

SEQ ID NO: 19750 - RNA, 32 nt, Human
aaagcuucaaaccguuuguaagguuaaagaaa

SEQ ID NO: 19751 - RNA, 32 nt, Human
aaagcuucaaacugcaugauucaugccaauua

SEQ ID NO: 19752 - RNA, 32 nt, Human
aaagcuucagagaaaucucaagaagucugugu

SEQ ID NO: 19753 - RNA, 32 nt, Human
aaagcuucauuucucacguucuuaaaagagag

SEQ ID NO: 19754 - RNA, 32 nt, Human
aaagcuuccagcccuccucccuucacccugga

SEQ ID NO: 19755 - RNA, 32 nt, Human
aaagcuuccuggaaguggagaggauccuucug

SEQ ID NO: 19756 - RNA, 32 nt, Human
aaagcuucuaacucuucuuguuguucauuuuu

SEQ ID NO: 19757 - RNA, 32 nt, Human
aaagcuucucccaccagcuuccaugugucccc

SEQ ID NO: 19758 - RNA, 32 nt, Human
aaagcuucuccucugagaaacauuucuguugc

SEQ ID NO: 19759 - RNA, 32 nt, Human
aaagcuucuccucugccucauccacagucauu

SEQ ID NO: 19760 - RNA, 22 nt, Human
aaagcuucuuuuaagauuuuga

SEQ ID NO: 19761 - RNA, 32 nt, Human
aaagcuugaacccaggagguggagguugcagu

SEQ ID NO: 19762 - RNA, 32 nt, Human
aaagcuugagcacaaacagauaccucagcccg

SEQ ID NO: 19763 - RNA, 19 nt, Human
aaagcuugcucccuuggga

SEQ ID NO: 19764 - RNA, 32 nt, Human
aaagcuugcugagugguacagcgccagccugg

SEQ ID NO: 19765 - RNA, 32 nt, Human
aaagcuugcugugcaugaucaugguuaagcca

SEQ ID NO: 19766 - RNA, 32 nt, Human
aaagcuuggaauacaagaagacucucaaaauc

SEQ ID NO: 19767 - RNA, 32 nt, Human
aaagcuugggaaggaaggauggaaagcgcgac

SEQ ID NO: 19768 - RNA, 32 nt, Human
aaagcuugggguucauccuccuucccuggauc

SEQ ID NO: 19769 - RNA, 32 nt, Human
aaagcuuguuuguucuaguuagcaggaaauag

SEQ ID NO: 19770 - RNA, 32 nt, Human
aaagcuuuaaaggagauucuucucccaccccc

SEQ ID NO: 19771 - RNA, 32 nt, Human
aaagcuuuacaauggaaguggccucauggaug

SEQ ID NO: 19772 - RNA, 32 nt, Human
aaagcuuuagaggaggaaugaaaacaaaguga

SEQ ID NO: 19773 - RNA, 32 nt, Human
aaagcuuuagcugcugagauaaaagugauggu

SEQ ID NO: 19774 - RNA, 32 nt, Human
aaagcuuuauuuuaacacucaucugaaucaac

SEQ ID NO: 19775 - RNA, 32 nt, Human
aaagcuuuccuuuaacauuuucaccugcucau

SEQ ID NO: 19776 - RNA, 32 nt, Human
aaagcuuuguguuauugggagucuuauuauuu

SEQ ID NO: 19777 - RNA, 32 nt, Human
aaagcuuuuaaucccuuucauucccugauauc

SEQ ID NO: 19778 - RNA, 22 nt, Human
aaagcuuuuacuuuucccuccu

SEQ ID NO: 19779 - RNA, 32 nt, Human
aaagcuuuuagacaguccagaagccugaauga

SEQ ID NO: 19780 - RNA, 32 nt, Human
aaagcuuuucuugcauacucagcuugcuuuau

SEQ ID NO: 19781 - RNA, 32 nt, Human
aaagcuuuugagucaagacaauggagugcucu

SEQ ID NO: 19782 - RNA, 32 nt, Human
aaagcuuuuguuuccacugaucauuauuuuca

SEQ ID NO: 19783 - RNA, 32 nt, Human
aaaggaaaaagaaaaggaguugcuugauguga

SEQ ID NO: 19784 - RNA, 32 nt, Human
aaaggaaaaaggacaagauggaguuguggggg

SEQ ID NO: 19785 - RNA, 32 nt, Human
aaaggaaaacuggcauauccugccuuccgagu

SEQ ID NO: 19786 - RNA, 32 nt, Human
aaaggaaaagagcccacacaauggaguaaauu

SEQ ID NO: 19787 - RNA, 32 nt, Human
aaaggaaaagugguaaggaagugggaagaaaa

SEQ ID NO: 19788 - RNA, 32 nt, Human
aaaggaaaauaacauuaaaggagacuuaugug

SEQ ID NO: 19789 - RNA, 32 nt, Human
aaaggaaacaaacagacaacaaaaagaagaaa

SEQ ID NO: 19790 - RNA, 32 nt, Human
aaaggaaacaccaggggaucagugaguaagaa

SEQ ID NO: 19791 - RNA, 32 nt, Human
aaaggaaacagccaagagaaucaaagaucuag

SEQ ID NO: 19792 - RNA, 18 nt, Human
aaaggaaacccuauucaa

SEQ ID NO: 19793 - RNA, 32 nt, Human
aaaggaaaccuucguuuucagugagaggauug

SEQ ID NO: 19794 - RNA, 32 nt, Human
aaaggaaacuucuagccccuguccuuagugcu

SEQ ID NO: 19795 - RNA, 32 nt, Human
aaaggaaagaaagaaagaaaagaaaagaaaau

SEQ ID NO: 19796 - RNA, 32 nt, Human
aaaggaaagaaaggaaccagaggcagagagac

SEQ ID NO: 19797 - RNA, 32 nt, Human
aaaggaaagaagaagagagaaagcauagaggg

SEQ ID NO: 19798 - RNA, 32 nt, Human
aaaggaaagaagcagaaugagaaaggaauggu

SEQ ID NO: 19799 - RNA, 31 nt, Human
aaaggaaagagaccuguaucuugguguuuuu

SEQ ID NO: 19800 - RNA, 32 nt, Human
aaaggaaagaggaagggggagcggcgagaggc

SEQ ID NO: 19801 - RNA, 32 nt, Human
aaaggaaagagguuuguccucacuggaauaga

SEQ ID NO: 19802 - RNA, 32 nt, Human
aaaggaaagccuuuuccugucugauccugaga

SEQ ID NO: 19803 - RNA, 32 nt, Human
aaaggaaagcuaaagaagacuaugauaccaua

SEQ ID NO: 19804 - RNA, 32 nt, Human
aaaggaaaggaaggaaggaaaaagcagcuuuc

SEQ ID NO: 19805 - RNA, 32 nt, Human
aaaggaaaggagacagaaugagcuuugguuau

SEQ ID NO: 19806 - RNA, 22 nt, Human
aaaggaaagggggucacgcaca

SEQ ID NO: 19807 - RNA, 32 nt, Human
aaaggaaagugggugggggcaccccacaggug

SEQ ID NO: 19808 - RNA, 32 nt, Human
aaaggaaaucugucuucucuucccuugguuug

SEQ ID NO: 19809 - RNA, 32 nt, Human
aaaggaacaaaauuaucagggauggcucuuug

SEQ ID NO: 19810 - RNA, 32 nt, Human
aaaggaacaaauaacauacaauggagcucuaa

SEQ ID NO: 19811 - RNA, 32 nt, Human
aaaggaacacaaaacaaaacuugcacuuuaac

SEQ ID NO: 19812 - RNA, 32 nt, Human
aaaggaacagaaguuccaacuauugccuggga

SEQ ID NO: 19813 - RNA, 32 nt, Human
aaaggaacauggcucacucagagcuauauggu

SEQ ID NO: 19814 - RNA, 32 nt, Human
aaaggaaccaaauuugggaugguucuccuugc

SEQ ID NO: 19815 - RNA, 32 nt, Human
aaaggaacccuacagauuagcccaguucucuc

SEQ ID NO: 19816 - RNA, 32 nt, Human
aaaggaaccuuaaguaagccucagccaaaggu

SEQ ID NO: 19817 - RNA, 32 nt, Human
aaaggaacuguacaaguguaaugaguguggca

SEQ ID NO: 19818 - RNA, 32 nt, Human
aaaggaacuuccuccaccuucggggcuggagc

SEQ ID NO: 19819 - RNA, 32 nt, Human
aaaggaagaaaauauauugauucuuagaaaau

SEQ ID NO: 19820 - RNA, 32 nt, Human
aaaggaagaagagagagaagauguucuuauga

SEQ ID NO: 19821 - RNA, 32 nt, Human
aaaggaagaaggggauaggaaaagaagaggua

SEQ ID NO: 19822 - RNA, 32 nt, Human
aaaggaagaaugaaggaggaagaaggcaguag

SEQ ID NO: 19823 - RNA, 17 nt, Human
aaaggaagacaguucua

SEQ ID NO: 19824 - RNA, 32 nt, Human
aaaggaagagagaggaagggagaagggagagg

SEQ ID NO: 19825 - RNA, 32 nt, Human
aaaggaagaggaaggaaggaaauauuuugaga

SEQ ID NO: 19826 - RNA, 32 nt, Human
aaaggaagaggcugaacauaagaaaaagaugg

SEQ ID NO: 19827 - RNA, 32 nt, Human
aaaggaagagguggaaacccagagagacagag

SEQ ID NO: 19828 - RNA, 32 nt, Human
aaaggaagagucaacucacuugaagaagaggg

SEQ ID NO: 19829 - RNA, 23 nt, Human
aaaggaagaguggggagauccca

SEQ ID NO: 19830 - RNA, 32 nt, Human
aaaggaagcaaguuuccacgauuucugaagag

SEQ ID NO: 19831 - RNA, 32 nt, Human
aaaggaagcagucuuggccaggcacgguggcu

SEQ ID NO: 19832 - RNA, 32 nt, Human
aaaggaagccacagagagaggccagguaagga

SEQ ID NO: 19833 - RNA, 32 nt, Human
aaaggaagcccuccauccucugguauuaacgc

SEQ ID NO: 19834 - RNA, 30 nt, Human
aaaggaagccucuccagcugguguacugca

SEQ ID NO: 19835 - RNA, 32 nt, Human
aaaggaagcugaaggcagaaagagaugcagag

SEQ ID NO: 19836 - RNA, 32 nt, Human
aaaggaagcugggucaucagcccagccccgcc

SEQ ID NO: 19837 - RNA, 32 nt, Human
aaaggaaggaagagugaccuaagcuagcaugc

SEQ ID NO: 19838 - RNA, 32 nt, Human
aaaggaaggaaggaaagaaggaagggaggacc

SEQ ID NO: 19839 - RNA, 32 nt, Human
aaaggaaggaagugguugagggccaggaaaga

SEQ ID NO: 19840 - RNA, 32 nt, Human
aaaggaagggagggagggagaaaggagaaguu

SEQ ID NO: 19841 - RNA, 32 nt, Human
aaaggaagggcagaggggcaaguaggcacagu

SEQ ID NO: 19842 - RNA, 32 nt, Human
aaaggaaggggagauugucucaggcuggcuga

SEQ ID NO: 19843 - RNA, 32 nt, Human
aaaggaaggguuaucuacaaaugaacugauga

SEQ ID NO: 19844 - RNA, 32 nt, Human
aaaggaagguuucacaguaccacugaguuaga

SEQ ID NO: 19845 - RNA, 32 nt, Human
aaaggaaguaguucagcaucuaucgccagcca

SEQ ID NO: 19846 - RNA, 32 nt, Human
aaaggaagucacagaucaggcaaccaaccaca

SEQ ID NO: 19847 - RNA, 32 nt, Human
aaaggaagugcagaggauuuagaaaaguacau

SEQ ID NO: 19848 - RNA, 32 nt, Human
aaaggaaguggcuuugaggcacacagaggggc

SEQ ID NO: 19849 - RNA, 32 nt, Human
aaaggaaguucagagcuuccagaggaauuauu

SEQ ID NO: 19850 - RNA, 32 nt, Human
aaaggaaguucugcugucagaggcaaaacauc

SEQ ID NO: 19851 - RNA, 32 nt, Human
aaaggaaguugguuccauugcagauucaaggu

SEQ ID NO: 19852 - RNA, 19 nt, Human
aaaggaauauaccacuaga

SEQ ID NO: 19853 - RNA, 32 nt, Human
aaaggaaucaaguauggauuucagaggugcuc

SEQ ID NO: 19854 - RNA, 32 nt, Human
aaaggaaucugaaauuuaauucuauuuugaua

SEQ ID NO: 19855 - RNA, 32 nt, Human
aaaggaaucuguaucuguaucaagaugaucug

SEQ ID NO: 19856 - RNA, 32 nt, Human
aaaggaaugccuaagguuaccuugggguuucu

SEQ ID NO: 19857 - RNA, 32 nt, Human
aaaggaauggggacccagaggcugggucccug

SEQ ID NO: 19858 - RNA, 32 nt, Human
aaaggaauugaguaaugggcccccaggcaagg

SEQ ID NO: 19859 - RNA, 32 nt, Human
aaaggaauugcaggucggugagaggacaagag

SEQ ID NO: 19860 - RNA, 32 nt, Human
aaaggaauuucauccuuucuuuccauucacug

SEQ ID NO: 19861 - RNA, 32 nt, Human
aaaggaauuugcauccagcagcagcacuuaga

SEQ ID NO: 19862 - RNA, 32 nt, Human
aaaggacaaagggacggaggcauuuuaccgga

SEQ ID NO: 19863 - RNA, 32 nt, Human
aaaggacaacaacagacaugucuuaguacuua

SEQ ID NO: 19864 - RNA, 32 nt, Human
aaaggacaaucagauggcgguguuuuccaggg

SEQ ID NO: 19865 - RNA, 32 nt, Human
aaaggacacaaacacacauaugcacucuguag

SEQ ID NO: 19866 - RNA, 32 nt, Human
aaaggacacaagcacacauaagaaugcauucu

SEQ ID NO: 19867 - RNA, 21 nt, Human
aaaggacacaaguguuacaga

SEQ ID NO: 19868 - RNA, 19 nt, Human
aaaggacacacagaacaga

SEQ ID NO: 19869 - RNA, 17 nt, Human
aaaggacacacccuaga

SEQ ID NO: 19870 - RNA, 19 nt, Human
aaaggacacacuuaggaga

SEQ ID NO: 19871 - RNA, 21 nt, Human
aaaggacacuaugaacuuuuu

SEQ ID NO: 19872 - RNA, 32 nt, Human
aaaggacacuccuggcuaucucaguucuguag

SEQ ID NO: 19873 - RNA, 21 nt, Human
aaaggacacuuauccacgaga

SEQ ID NO: 19874 - RNA, 32 nt, Human
aaaggacagagucacugcaagcagagagcagg

SEQ ID NO: 19875 - RNA, 32 nt, Human
aaaggacagcauggucggcacagaggaagggg

SEQ ID NO: 19876 - RNA, 32 nt, Human
aaaggacagggacugggaccguuacuuacaug

SEQ ID NO: 19877 - RNA, 18 nt, Human
aaaggacaucaucauaga

SEQ ID NO: 19878 - RNA, 18 nt, Human
aaaggacauccacacaga

SEQ ID NO: 19879 - RNA, 17 nt, Human
aaaggacaugcccacug

SEQ ID NO: 19880 - RNA, 23 nt, Human
aaaggacauuuguuggaggggug

SEQ ID NO: 19881 - RNA, 32 nt, Human
aaaggaccagugccgucacaucgcugucucug

SEQ ID NO: 19882 - RNA, 32 nt, Human
aaaggaccaugaguugguuguacucugaaaag

SEQ ID NO: 19883 - RNA, 32 nt, Human
aaaggacccaggaacgaggcguucaggaaagc

SEQ ID NO: 19884 - RNA, 32 nt, Human
aaaggacccaggagucugggaccccuccuggg

SEQ ID NO: 19885 - RNA, 32 nt, Human
aaaggaccgaggcgugcagcggacagcagaug

SEQ ID NO: 19886 - RNA, 32 nt, Human
aaaggaccgcuugguagccacuggaacccuuu

SEQ ID NO: 19887 - RNA, 32 nt, Human
aaaggaccucagcugcuucucccacuuggcca

SEQ ID NO: 19888 - RNA, 32 nt, Human
aaaggaccuuagcuuacugaaggaucuaaaga

SEQ ID NO: 19889 - RNA, 32 nt, Human
aaaggaccuucccaagucucccuuucccuguc

SEQ ID NO: 19890 - RNA, 32 nt, Human
aaaggaccuuguagaaccucuuugcagacgac

SEQ ID NO: 19891 - RNA, 32 nt, Human
aaaggacgguagaaaccacugccuuugcuuuu

SEQ ID NO: 19892 - RNA, 24 nt, Human
aaaggacucagcuccacucaacca

SEQ ID NO: 19893 - RNA, 32 nt, Human
aaaggacuccacccauccuaucagccugucuc

SEQ ID NO: 19894 - RNA, 18 nt, Human
aaaggacucugaacucag

SEQ ID NO: 19895 - RNA, 32 nt, Human
aaaggacugacugagaacaggagcaguuuuug

SEQ ID NO: 19896 - RNA, 32 nt, Human
aaaggacugcagcugugccaucgcgccucggu

SEQ ID NO: 19897 - RNA, 32 nt, Human
aaaggacugggcaccugccucugacagacacc

SEQ ID NO: 19898 - RNA, 20 nt, Human
aaaggacuguagacugaggg

SEQ ID NO: 19899 - RNA, 32 nt, Human
aaaggacuucauuucucucugccucaauuccu

SEQ ID NO: 19900 - RNA, 32 nt, Human
aaaggacuuucuucuguuuucuuccaaagugc

SEQ ID NO: 19901 - RNA, 32 nt, Human
aaaggagaaaauaauuaaacagucuucauuuu

SEQ ID NO: 19902 - RNA, 19 nt, Human
aaaggagaaacccgcuaga

SEQ ID NO: 19903 - RNA, 21 nt, Human
aaaggagaaagauaccaaucu

SEQ ID NO: 19904 - RNA, 32 nt, Human
aaaggagaagcacagcuccugccagggugagc

SEQ ID NO: 19905 - RNA, 32 nt, Human
aaaggagaagcagcaacggcugcucugcuucc

SEQ ID NO: 19906 - RNA, 32 nt, Human
aaaggagaaggaggaggaggaagagaguguga

SEQ ID NO: 19907 - RNA, 32 nt, Human
aaaggagaagggaaggaggaugagaaggaacg

SEQ ID NO: 19908 - RNA, 31 nt, Human
aaaggagaauucagagaaaaagaacugucag

SEQ ID NO: 19909 - RNA, 32 nt, Human
aaaggagacagaaaugucagacacugugaugg

SEQ ID NO: 19910 - RNA, 32 nt, Human
aaaggagacaggaacaaggaaaaguugagguu

SEQ ID NO: 19911 - RNA, 32 nt, Human
aaaggagagaacacuggcaucuguugaaauuc

SEQ ID NO: 19912 - RNA, 32 nt, Human
aaaggagagaacacuggcaucuguugaaauuu

SEQ ID NO: 19913 - RNA, 32 nt, Human
aaaggagagaggaggggugauggcaggggagu

SEQ ID NO: 19914 - RNA, 32 nt, Human
aaaggagagaggaggguuggaggugcaugaag

SEQ ID NO: 19915 - RNA, 32 nt, Human
aaaggagaggagaaaggaaaugagaaugaaga

SEQ ID NO: 19916 - RNA, 32 nt, Human
  misc_feature (18)..(18): n is a, c, g, or u
aaaggagaggaggaaacnagugaggcagggag

SEQ ID NO: 19917 - RNA, 32 nt, Human
aaaggagaggggugggagcggggugggggcau

SEQ ID NO: 19918 - RNA, 32 nt, Human
aaaggagaucagugagaguacaugaugcugcu

SEQ ID NO: 19919 - RNA, 32 nt, Human
aaaggagaucuguuaaugugcuucacuauagu

SEQ ID NO: 19920 - RNA, 32 nt, Human
aaaggagauggaacuuguucccccuacuuaaa

SEQ ID NO: 19921 - RNA, 18 nt, Human
aaaggagauucuuugaga

SEQ ID NO: 19922 - RNA, 32 nt, Human
aaaggagauuuuggguaaaugagggaacgaua

SEQ ID NO: 19923 - RNA, 32 nt, Human
aaaggagcacacugucgcacuacauugucuaa

SEQ ID NO: 19924 - RNA, 32 nt, Human
aaaggagcaccucccagucacucagauuguga

SEQ ID NO: 19925 - RNA, 18 nt, Human
aaaggagcagcuuugaga

SEQ ID NO: 19926 - RNA, 32 nt, Human
aaaggagcagucauuggacaaugggcacaauc

SEQ ID NO: 19927 - RNA, 32 nt, Human
aaaggagcauuuuuacaccccuuaagggugcu

SEQ ID NO: 19928 - RNA, 24 nt, Human
aaaggagccaagaacuggcgggug

SEQ ID NO: 19929 - RNA, 22 nt, Human
aaaggagccaaggcaaagaggg

SEQ ID NO: 19930 - RNA, 23 nt, Human
aaaggagccaagguguaguggug

SEQ ID NO: 19931 - RNA, 32 nt, Human
aaaggagccacuugaaaaugucugcuccuucg

SEQ ID NO: 19932 - RNA, 32 nt, Human
aaaggagccagccucuccccaguuccugaaau

SEQ ID NO: 19933 - RNA, 32 nt, Human
aaaggagcccggcggaggcagcgguggguuug

SEQ ID NO: 19934 - RNA, 32 nt, Human
aaaggagcgcaggcagaucuggcauuuugcuu

SEQ ID NO: 19935 - RNA, 23 nt, Human
aaaggagcgguuccuagaaggug

SEQ ID NO: 19936 - RNA, 32 nt, Human
aaaggagcugcaggagaagcuaggcaaggagc

SEQ ID NO: 19937 - RNA, 22 nt, Human
aaaggagcuguuuuugaaggug

SEQ ID NO: 19938 - RNA, 32 nt, Human
aaaggagcuugccuccuuugaaugaccuagag

SEQ ID NO: 19939 - RNA, 32 nt, Human
aaaggagcuuucuacacagcuggacuucugag

SEQ ID NO: 19940 - RNA, 31 nt, Human
aaaggagcuuuucagcagccacccugcagca

SEQ ID NO: 19941 - RNA, 32 nt, Human
aaaggaggaaaaagauacauuaccuucaaagg

SEQ ID NO: 19942 - RNA, 18 nt, Human
aaaggaggaaaaguccca

SEQ ID NO: 19943 - RNA, 32 nt, Human
aaaggaggaacucugccucucugcuucuucau

SEQ ID NO: 19944 - RNA, 32 nt, Human
aaaggaggaaggagggagagggaaguaggaaa

SEQ ID NO: 19945 - RNA, 32 nt, Human
aaaggaggaauagucaaagcagcagcggcggc

SEQ ID NO: 19946 - RNA, 32 nt, Human
aaaggaggagcucuauggugacuuugaagacu

SEQ ID NO: 19947 - RNA, 32 nt, Human
aaaggaggaggaagaagaaagagagaaggggg

SEQ ID NO: 19948 - RNA, 32 nt, Human
aaaggaggagugaacgucuaggagaccagccg

SEQ ID NO: 19949 - RNA, 32 nt, Human
aaaggaggagugcaucuuuggccgacaguggu

SEQ ID NO: 19950 - RNA, 32 nt, Human
aaaggaggcgacuccuagauccagggauagcc

SEQ ID NO: 19951 - RNA, 32 nt, Human
aaaggaggcucagcacugucucaggcuggagg

SEQ ID NO: 19952 - RNA, 32 nt, Human
aaaggaggcugacagcaucugggaaaugacag

SEQ ID NO: 19953 - RNA, 32 nt, Human
aaaggagggaauaggaggagggcagggugagu

SEQ ID NO: 19954 - RNA, 32 nt, Human
aaaggagggacaaccugcacuccagggagccc

SEQ ID NO: 19955 - RNA, 32 nt, Human
aaaggagggaccccgccaccccagcagcugag

SEQ ID NO: 19956 - RNA, 32 nt, Human
aaaggagggagagagaggagagagaaggaaau

SEQ ID NO: 19957 - RNA, 32 nt, Human
aaaggagggcagggcuacauccuggcucggug

SEQ ID NO: 19958 - RNA, 32 nt, Human
aaaggagggcucaggaggagaguuuggagaag

SEQ ID NO: 19959 - RNA, 32 nt, Human
aaaggaggggauagagagagaccacuuuucau

SEQ ID NO: 19960 - RNA, 32 nt, Human
aaaggaggggucugaggcagggaggguggcau

SEQ ID NO: 19961 - RNA, 32 nt, Human
aaaggaggguggggcucaggggccucaagcug

SEQ ID NO: 19962 - RNA, 32 nt, Human
aaaggagggugucuuggcugugcuugaaggcg

SEQ ID NO: 19963 - RNA, 32 nt, Human
aaaggagguaguuuaagagucccugacccugg

SEQ ID NO: 19964 - RNA, 32 nt, Human
aaaggagguugaacaugcugugucugaauuca

SEQ ID NO: 19965 - RNA, 32 nt, Human
aaaggagguuugagguaacaacagagacuuuc

SEQ ID NO: 19966 - RNA, 21 nt, Human
aaaggaguaggcuugggggug

SEQ ID NO: 19967 - RNA, 19 nt, Human
aaaggagucgcccacugga

SEQ ID NO: 19968 - RNA, 32 nt, Human
aaaggagugagcuggugagguuaccacccuga

SEQ ID NO: 19969 - RNA, 32 nt, Human
aaaggagugcagaggaccuggccuggcacugg

SEQ ID NO: 19970 - RNA, 32 nt, Human
aaaggaguggaccgaggaaggaaggaaggcaa

SEQ ID NO: 19971 - RNA, 32 nt, Human
aaaggagugguggaacagaguugcuucuuaau

SEQ ID NO: 19972 - RNA, 19 nt, Human
aaaggaguucucccuugag

SEQ ID NO: 19973 - RNA, 32 nt, Human
aaaggauaagguggaggagacaagugaguuag

SEQ ID NO: 19974 - RNA, 32 nt, Human
aaaggauaguuuaugaguaaucuuuaaaacca

SEQ ID NO: 19975 - RNA, 32 nt, Human
aaaggauauaaauacuguguaugcuuuugaau

SEQ ID NO: 19976 - RNA, 32 nt, Human
aaaggauauugcugggauauugaggguugugg

SEQ ID NO: 19977 - RNA, 32 nt, Human
aaaggaucaagaagacuuccuuuucuaccacc

SEQ ID NO: 19978 - RNA, 32 nt, Human
aaaggaucaagcaaucucuugccaccucccag

SEQ ID NO: 19979 - RNA, 19 nt, Human
aaaggaucagaauccaggg

SEQ ID NO: 19980 - RNA, 32 nt, Human
aaaggaucagagaaagggagggcagagggaga

SEQ ID NO: 19981 - RNA, 32 nt, Human
aaaggaucagcuugaggaauaaggcucgucug

SEQ ID NO: 19982 - RNA, 32 nt, Human
aaaggauccucuucacuucuuucuuaaacagc

SEQ ID NO: 19983 - RNA, 32 nt, Human
aaaggaugaguucauguccuuuguagaacaug

SEQ ID NO: 19984 - RNA, 32 nt, Human
aaaggaugcacccaaacuucaaacuucaagca

SEQ ID NO: 19985 - RNA, 31 nt, Human
aaaggaugucuucucccuuguuugagaauga

SEQ ID NO: 19986 - RNA, 32 nt, Human
aaaggauguguuucaaccaugucacaaaaauc

SEQ ID NO: 19987 - RNA, 32 nt, Human
aaaggauguugcagauaucagaaagcaguuuc

SEQ ID NO: 19988 - RNA, 32 nt, Human
aaaggauuaugcuuuaaugcuguuaucuaucu

SEQ ID NO: 19989 - RNA, 32 nt, Human
aaaggauuccuuuaguagcucauguucuuugu

SEQ ID NO: 19990 - RNA, 32 nt, Human
aaaggauucugccucuuuaguccucacuguua

SEQ ID NO: 19991 - RNA, 18 nt, Human
aaaggauuguccuugagg

SEQ ID NO: 19992 - RNA, 32 nt, Human
aaaggauuuucauucaucauguucacaagugc

SEQ ID NO: 19993 - RNA, 32 nt, Human
aaaggcaaagcgcacccccacuuggggaccaa

SEQ ID NO: 19994 - RNA, 32 nt, Human
aaaggcaacauccugucacaggccaugcucug

SEQ ID NO: 19995 - RNA, 32 nt, Human
aaaggcaacguuuugcagcuuccaaauuucug

SEQ ID NO: 19996 - RNA, 18 nt, Human
aaaggcaagaaacugcug

SEQ ID NO: 19997 - RNA, 32 nt, Human
aaaggcaagaccaagaccaccaaaaagcgccc

SEQ ID NO: 19998 - RNA, 32 nt, Human
aaaggcaagaccaagaccaccaaaaagcuccc

SEQ ID NO: 19999 - RNA, 19 nt, Human
aaaggcaagacucucucug

SEQ ID NO: 20000 - RNA, 32 nt, Human
aaaggcacaaacaccaccagccacuuugcuaa

SEQ ID NO: 20001 - RNA, 32 nt, Human
aaaggcacaagaaagaaaauauccagcucucu

SEQ ID NO: 20002 - RNA, 32 nt, Human
aaaggcacuuacugcugcucagaaccucaggc

SEQ ID NO: 20003 - RNA, 32 nt, Human
aaaggcagaaggcagugagagggaggcuaugc

SEQ ID NO: 20004 - RNA, 32 nt, Human
aaaggcagccuccuuaaauguuuucugaagag

SEQ ID NO: 20005 - RNA, 32 nt, Human
aaaggcagccugggcacacggacagacggacu

SEQ ID NO: 20006 - RNA, 32 nt, Human
aaaggcagcguguggagguggagcccagaguu

SEQ ID NO: 20007 - RNA, 32 nt, Human
aaaggcagcuuugucccagcucugccacccuc

SEQ ID NO: 20008 - RNA, 32 nt, Human
aaaggcaggacugggagccggaggggcugaaa

SEQ ID NO: 20009 - RNA, 32 nt, Human
aaaggcaggaggugggugagcggguggggugc

SEQ ID NO: 20010 - RNA, 32 nt, Human
aaaggcaggugcuuuuggcagagaccauaaga

SEQ ID NO: 20011 - RNA, 32 nt, Human
aaaggcagguggaucacuugggucaggaguuc

SEQ ID NO: 20012 - RNA, 31 nt, Human
aaaggcagguucaaaauucuguugaaagaaa

SEQ ID NO: 20013 - RNA, 32 nt, Human
aaaggcaguacagacccaaaaagcgagcagca

SEQ ID NO: 20014 - RNA, 20 nt, Human
aaaggcaguguacccuugag

SEQ ID NO: 20015 - RNA, 31 nt, Human
aaaggcaguuugucuacuacagcagaaggcu

SEQ ID NO: 20016 - RNA, 32 nt, Human
aaaggcauaagaaugaugcaauggacuuuggg

SEQ ID NO: 20017 - RNA, 32 nt, Human
aaaggcauauagaaaauaaaucucaaaaugac

SEQ ID NO: 20018 - RNA, 32 nt, Human
aaaggcaucacugaccaggaauaucugggcuu

SEQ ID NO: 20019 - RNA, 32 nt, Human
aaaggcauccagagaaggugggagcggagagu

SEQ ID NO: 20020 - RNA, 32 nt, Human
aaaggcaucguugucugcuaaauuacuugaau

SEQ ID NO: 20021 - RNA, 32 nt, Human
aaaggcaucuuucugaauuucauucucuugaa

SEQ ID NO: 20022 - RNA, 32 nt, Human
aaaggcaugcaagcccgggcgcccucucagua

SEQ ID NO: 20023 - RNA, 32 nt, Human
aaaggccaacagcauuggccuggccagaccag

SEQ ID NO: 20024 - RNA, 18 nt, Human
aaaggccaagagaaucac

SEQ ID NO: 20025 - RNA, 32 nt, Human
aaaggccaagcuuggucuucagcuggggaaga

SEQ ID NO: 20026 - RNA, 32 nt, Human
aaaggccacaauaugaagucacucucagaugg

SEQ ID NO: 20027 - RNA, 32 nt, Human
aaaggccacagcugagccuggaacugacccuu

SEQ ID NO: 20028 - RNA, 32 nt, Human
aaaggccacagcuggccuggaacugacccuuc

SEQ ID NO: 20029 - RNA, 20 nt, Human
aaaggccaccauggcugcag

SEQ ID NO: 20030 - RNA, 32 nt, Human
aaaggccaccugugcuucaccaugcuccaucc

SEQ ID NO: 20031 - RNA, 32 nt, Human
aaaggccacugaaaggaugacugucccaaaag

SEQ ID NO: 20032 - RNA, 32 nt, Human
aaaggccacugcaccagcccucagcucagggg

SEQ ID NO: 20033 - RNA, 32 nt, Human
aaaggccacugcacuccagccugagugacaga

SEQ ID NO: 20034 - RNA, 32 nt, Human
aaaggccacuggggagaaaccuuauuccugua

SEQ ID NO: 20035 - RNA, 23 nt, Human
aaaggccagacgcaguggcucac

SEQ ID NO: 20036 - RNA, 32 nt, Human
aaaggccagguggaagccauuggggugaacuc

SEQ ID NO: 20037 - RNA, 32 nt, Human
aaaggccagguuguagucccagcucuuaucug

SEQ ID NO: 20038 - RNA, 19 nt, Human
aaaggccauguguggacac

SEQ ID NO: 20039 - RNA, 32 nt, Human
aaaggcccaagagggaagucagagguggcggu

SEQ ID NO: 20040 - RNA, 32 nt, Human
aaaggcccagaacgugcaggucugcggagggg

SEQ ID NO: 20041 - RNA, 32 nt, Human
aaaggcccuggugguuuccacauugcuaccca

SEQ ID NO: 20042 - RNA, 32 nt, Human
aaaggccgacagaggggaaggaauggaccugu

SEQ ID NO: 20043 - RNA, 32 nt, Human
aaaggccgcaugaucuuucuggcuccacucag

SEQ ID NO: 20044 - RNA, 32 nt, Human
aaaggccgccugaugaccugcagccuggaccu

SEQ ID NO: 20045 - RNA, 32 nt, Human
aaaggccguguucacacacucacaagagauau

SEQ ID NO: 20046 - RNA, 32 nt, Human
aaaggccuaagaggagggguuuggggaguuuc

SEQ ID NO: 20047 - RNA, 32 nt, Human
aaaggccuaugcuccagaauucuauuaugaua

SEQ ID NO: 20048 - RNA, 32 nt, Human
aaaggccucagccacccagcugugucccuuuc

SEQ ID NO: 20049 - RNA, 32 nt, Human
aaaggccucgggacuucccaccaccuugcucc

SEQ ID NO: 20050 - RNA, 32 nt, Human
aaaggccugcacccucuuccugcucucccagg

SEQ ID NO: 20051 - RNA, 32 nt, Human
aaaggccuggcuugagaggaaauggagaaaac

SEQ ID NO: 20052 - RNA, 32 nt, Human
aaaggccuggggaggugaaggaagagagacuu

SEQ ID NO: 20053 - RNA, 32 nt, Human
aaaggccugggguggccaaugugaacucauua

SEQ ID NO: 20054 - RNA, 32 nt, Human
aaaggcgaucagcuucaguagauucacggcag

SEQ ID NO: 20055 - RNA, 32 nt, Human
aaaggcgcacacauucgaucucuuucgaagcu

SEQ ID NO: 20056 - RNA, 32 nt, Human
aaaggcgcggccgccccucccccgggcgcccc

SEQ ID NO: 20057 - RNA, 32 nt, Human
aaaggcgcuagggaagggcaaaguauuauugg

SEQ ID NO: 20058 - RNA, 32 nt, Human
aaaggcggaggaaauccaggaggcagaaguga

SEQ ID NO: 20059 - RNA, 21 nt, Human
aaaggcggcacuacuuaugua

SEQ ID NO: 20060 - RNA, 32 nt, Human
aaaggcggcgggaggggagggagggagagugg

SEQ ID NO: 20061 - RNA, 32 nt, Human
aaaggcgggacaacucaaagguggggagaggg

SEQ ID NO: 20062 - RNA, 32 nt, Human
aaaggcgggaggaucacuugaggccaggacuu

SEQ ID NO: 20063 - RNA, 32 nt, Human
aaaggcggugaagagacaggagagggggaucg

SEQ ID NO: 20064 - RNA, 32 nt, Human
aaaggcguaagaauuuugaagcuauguucaaa

SEQ ID NO: 20065 - RNA, 32 nt, Human
aaaggcgugacggagagcuggggcucugagag

SEQ ID NO: 20066 - RNA, 32 nt, Human
aaaggcuaagacuggaggaucgcuugagccaa

SEQ ID NO: 20067 - RNA, 32 nt, Human
aaaggcuaaggcaggaggauugcuugagccca

SEQ ID NO: 20068 - RNA, 32 nt, Human
aaaggcuacgagcaauacuauagcuucacaca

SEQ ID NO: 20069 - RNA, 32 nt, Human
aaaggcucacccuggggagcccuucagccuga

SEQ ID NO: 20070 - RNA, 32 nt, Human
aaaggcuccaucccccgcccccucucucccgc

SEQ ID NO: 20071 - RNA, 32 nt, Human
aaaggcuccuguaacccuccuccaggaugaac

SEQ ID NO: 20072 - RNA, 32 nt, Human
aaaggcucggacgugggcucuguguccugauc

SEQ ID NO: 20073 - RNA, 32 nt, Human
aaaggcucuucugcuugcuuccuggaucccug

SEQ ID NO: 20074 - RNA, 32 nt, Human
aaaggcugaagaccaguucuccccagugaaag

SEQ ID NO: 20075 - RNA, 32 nt, Human
aaaggcugaaggagguggagcuggggaggaag

SEQ ID NO: 20076 - RNA, 32 nt, Human
aaaggcugaaggcagccgggcgcaguggcuca

SEQ ID NO: 20077 - RNA, 32 nt, Human
aaaggcugaccagacuuaacagugcuccaccc

SEQ ID NO: 20078 - RNA, 32 nt, Human
aaaggcugagaggugggcacagcuguggggca

SEQ ID NO: 20079 - RNA, 32 nt, Human
aaaggcugaggcaggagaaucgcuugaaccua

SEQ ID NO: 20080 - RNA, 32 nt, Human
aaaggcugcaacacccagaccuccaggagaga

SEQ ID NO: 20081 - RNA, 32 nt, Human
aaaggcugccugcagaggacagguguguuggg

SEQ ID NO: 20082 - RNA, 32 nt, Human
aaaggcugccuguaccucucaagcuuugcauu

SEQ ID NO: 20083 - RNA, 32 nt, Human
aaaggcugcucacuggcccgucuccucucaug

SEQ ID NO: 20084 - RNA, 32 nt, Human
aaaggcuggaagaagggcugaccuggaggacu

SEQ ID NO: 20085 - RNA, 32 nt, Human
aaaggcugggaaacgggagcagaggaagcaca

SEQ ID NO: 20086 - RNA, 32 nt, Human
aaaggcugggauuacaggcaugagccacugca

SEQ ID NO: 20087 - RNA, 32 nt, Human
aaaggcuggggcaugaguccugcuuggggugg

SEQ ID NO: 20088 - RNA, 32 nt, Human
aaaggcuggggguggaggguggaggagggagc

SEQ ID NO: 20089 - RNA, 18 nt, Human
aaaggcugggucuuggga

SEQ ID NO: 20090 - RNA, 32 nt, Human
aaaggcugguagguacacaaaugcugguccga

SEQ ID NO: 20091 - RNA, 32 nt, Human
aaaggcuguaccaauccucuaauaugaaaugu

SEQ ID NO: 20092 - RNA, 32 nt, Human
aaaggcugugcugcuggggccucccagggccg

SEQ ID NO: 20093 - RNA, 18 nt, Human
aaaggcuguuuuuugagg

SEQ ID NO: 20094 - RNA, 32 nt, Human
aaaggcuuauaaauguuugaaauaucacacaa

SEQ ID NO: 20095 - RNA, 32 nt, Human
aaaggcuucaaggcucugagccccagggcaga

SEQ ID NO: 20096 - RNA, 32 nt, Human
aaaggcuucccucuguguguugcaguccugug

SEQ ID NO: 20097 - RNA, 32 nt, Human
aaaggcuucuccacaaccuccuccuccaguuc

SEQ ID NO: 20098 - RNA, 32 nt, Human
aaaggcuucuuguuugcccaagggccuaucag

SEQ ID NO: 20099 - RNA, 32 nt, Human
aaaggcuugcaauaucccacucccagauugca

SEQ ID NO: 20100 - RNA, 32 nt, Human
aaaggcuuuagccauggacaggaguggcuuug

SEQ ID NO: 20101 - RNA, 32 nt, Human
aaaggcuuucacuucacacccaccuccaucaa

SEQ ID NO: 20102 - RNA, 32 nt, Human
aaaggcuuucgggagugugaggcugcaucugc

SEQ ID NO: 20103 - RNA, 32 nt, Human
aaaggcuuugggccuggugugguggcauaggc

SEQ ID NO: 20104 - RNA, 32 nt, Human
aaagggaaaagaagauguugaagaauagaguu

SEQ ID NO: 20105 - RNA, 32 nt, Human
aaagggaaacaguaccaaggagaccagcccua

SEQ ID NO: 20106 - RNA, 32 nt, Human
aaagggaaagaaaugcuuggaggaggcuccug

SEQ ID NO: 20107 - RNA, 32 nt, Human
aaagggaaagugucugaugaugaccaauuuac

SEQ ID NO: 20108 - RNA, 32 nt, Human
aaagggaaccaaggcagaggcucacagacugu

SEQ ID NO: 20109 - RNA, 32 nt, Human
aaagggaagaaagaagaagaggaggcuguuug

SEQ ID NO: 20110 - RNA, 32 nt, Human
aaagggaagaggagccgacagcagagggggaa

SEQ ID NO: 20111 - RNA, 32 nt, Human
aaagggaagagugauaacaaggcuccacagag

SEQ ID NO: 20112 - RNA, 32 nt, Human
aaagggaagggguuugcccacuuuccucuuuu

SEQ ID NO: 20113 - RNA, 32 nt, Human
aaagggaaguaguuugguucuauuauguggaa

SEQ ID NO: 20114 - RNA, 32 nt, Human
aaagggaagugcugcuuaguccuggacuuuug

SEQ ID NO: 20115 - RNA, 32 nt, Human
aaagggaauaggcugauggagcuguucuguau

SEQ ID NO: 20116 - RNA, 32 nt, Human
aaagggaaugagaggaaggcaagcaggcaggg

SEQ ID NO: 20117 - RNA, 32 nt, Human
aaagggacaagugaggcaggccuagcaguucc

SEQ ID NO: 20118 - RNA, 32 nt, Human
aaagggacaccccuacacacacccaggcccac

SEQ ID NO: 20119 - RNA, 32 nt, Human
aaagggacagagucagcucacacgcugucugu

SEQ ID NO: 20120 - RNA, 32 nt, Human
aaagggacaggaggcaugggauagcaggucug

SEQ ID NO: 20121 - RNA, 32 nt, Human
aaagggaccagagagaaggagucaccugcagu

SEQ ID NO: 20122 - RNA, 32 nt, Human
aaagggaccagcuggaagacuagccucacucu

SEQ ID NO: 20123 - RNA, 32 nt, Human
aaagggaccugggaacgacacuccucugcaua

SEQ ID NO: 20124 - RNA, 32 nt, Human
aaagggacuucuagcaaaccugcaggaagaga

SEQ ID NO: 20125 - RNA, 32 nt, Human
aaagggagaacugccucauucuggcuuuggua

SEQ ID NO: 20126 - RNA, 32 nt, Human
aaagggagaagagggaaaacagaaaaccugau

SEQ ID NO: 20127 - RNA, 32 nt, Human
aaagggagaagagggaaaaggaagcacguccc

SEQ ID NO: 20128 - RNA, 32 nt, Human
aaagggagaagugagagggacaauuggguuca

SEQ ID NO: 20129 - RNA, 32 nt, Human
aaagggagagaaacagagacucagggagaggg

SEQ ID NO: 20130 - RNA, 32 nt, Human
aaagggagagccaccugguacuuguccacccu

SEQ ID NO: 20131 - RNA, 31 nt, Human
aaagggagaggugaaagcaaagacugcuuug

SEQ ID NO: 20132 - RNA, 32 nt, Human
aaagggagauggguagcaucauuuugauuaac

SEQ ID NO: 20133 - RNA, 32 nt, Human
aaagggagcaaugcugugaaugcagcuugcuu

SEQ ID NO: 20134 - RNA, 32 nt, Human
aaagggagcauggguguuggggagacaccugu

SEQ ID NO: 20135 - RNA, 32 nt, Human
aaagggagcccaaacuccacucucacagaacc

SEQ ID NO: 20136 - RNA, 32 nt, Human
aaagggagcccagugguugcaaugaaagacua

SEQ ID NO: 20137 - RNA, 32 nt, Human
aaagggagccugggaggcuggguggaggaggg

SEQ ID NO: 20138 - RNA, 32 nt, Human
aaagggagcugaugcuggcaaugggaucagag

SEQ ID NO: 20139 - RNA, 32 nt, Human
aaagggagcugccccaggcuuuagugcagcug

SEQ ID NO: 20140 - RNA, 32 nt, Human
aaagggaggagaaaggagaaaccaaacuuuga

SEQ ID NO: 20141 - RNA, 32 nt, Human
aaagggaggagagaagcacagugaaagaaaaa

SEQ ID NO: 20142 - RNA, 32 nt, Human
aaagggaggagagagaaggagaaaugagaaaa

SEQ ID NO: 20143 - RNA, 32 nt, Human
aaagggaggaggggcucaugggacugcugaga

SEQ ID NO: 20144 - RNA, 32 nt, Human
aaagggaggcuccgcagccaaaagucccuccu

SEQ ID NO: 20145 - RNA, 32 nt, Human
aaagggaggcugggugagcagagacagaaaag

SEQ ID NO: 20146 - RNA, 32 nt, Human
aaagggagggaaggagaaagaaugggaauaaa

SEQ ID NO: 20147 - RNA, 32 nt, Human
aaagggaggguaggaagagggagaagugucag

SEQ ID NO: 20148 - RNA, 32 nt, Human
aaagggaggugcagagagcucuaagccagugu

SEQ ID NO: 20149 - RNA, 32 nt, Human
aaagggaguaggggagacugagacugaccggu

SEQ ID NO: 20150 - RNA, 20 nt, Human
aaagggagucaaacuuaggg

SEQ ID NO: 20151 - RNA, 32 nt, Human
aaagggagugccugagguaggccuuagaaggg

SEQ ID NO: 20152 - RNA, 32 nt, Human
aaagggaguggcaggacaagauucagacucau

SEQ ID NO: 20153 - RNA, 32 nt, Human
aaagggaguuuccaggccagaagccaucccug

SEQ ID NO: 20154 - RNA, 32 nt, Human
aaagggaucugcaguggggccaaggaugccac

SEQ ID NO: 20155 - RNA, 32 nt, Human
aaagggaugagagaaaggaggugguauggaag

SEQ ID NO: 20156 - RNA, 32 nt, Human
aaagggaugagguugggggaguugcccagagg

SEQ ID NO: 20157 - RNA, 32 nt, Human
aaagggauuaaauugugagaacaacugucaau

SEQ ID NO: 20158 - RNA, 32 nt, Human
aaagggcaaaguacauuccacauguugaagga

SEQ ID NO: 20159 - RNA, 32 nt, Human
aaagggcaacacaugagcugucaaacaguguu

SEQ ID NO: 20160 - RNA, 32 nt, Human
aaagggcaagacgggaguuggggaagggaagg

SEQ ID NO: 20161 - RNA, 32 nt, Human
aaagggcagagacagauaaucucacuuccaga

SEQ ID NO: 20162 - RNA, 32 nt, Human
aaagggcagagcaggccuaaggcuccaacggc

SEQ ID NO: 20163 - RNA, 32 nt, Human
aaagggcagaguuucuggaggaaaccgcagcc

SEQ ID NO: 20164 - RNA, 32 nt, Human
aaagggcagccugugccuguuuauggauccuc

SEQ ID NO: 20165 - RNA, 32 nt, Human
aaagggcaggcucugguuucugcugccucuuc

SEQ ID NO: 20166 - RNA, 32 nt, Human
aaagggcauuuagaggaagaaggcugaaauca

SEQ ID NO: 20167 - RNA, 17 nt, Human
aaagggccaacugcagg

SEQ ID NO: 20168 - RNA, 32 nt, Human
aaagggccagugcccuuauacaaagacuggaa

SEQ ID NO: 20169 - RNA, 32 nt, Human
aaagggccauuuucaccugccucagcauucca

SEQ ID NO: 20170 - RNA, 32 nt, Human
aaagggcccucauuuaaauaaugcuguuauuu

SEQ ID NO: 20171 - RNA, 32 nt, Human
aaagggcccuccacugccaccucucaugggau

SEQ ID NO: 20172 - RNA, 32 nt, Human
aaagggcccuggagagaggggcugguggcugg

SEQ ID NO: 20173 - RNA, 22 nt, Human
aaagggccuauugaacucuggg

SEQ ID NO: 20174 - RNA, 32 nt, Human
aaagggccucugcuggcugcaggugaucaucu

SEQ ID NO: 20175 - RNA, 32 nt, Human
aaagggccugaaccucugcucuggauugaagc

SEQ ID NO: 20176 - RNA, 32 nt, Human
aaagggccugggaaggugaggcaggccagagu

SEQ ID NO: 20177 - RNA, 32 nt, Human
aaagggccugggagguggugggagggagaagg

SEQ ID NO: 20178 - RNA, 32 nt, Human
aaagggcggugacggcacuggguggggccgag

SEQ ID NO: 20179 - RNA, 32 nt, Human
aaagggcgugggaagagcagggcuugcccagc

SEQ ID NO: 20180 - RNA, 32 nt, Human
aaagggcucaaggacagcagcucagcauccug

SEQ ID NO: 20181 - RNA, 32 nt, Human
aaagggcucaaggggcuggagacuggcugcug

SEQ ID NO: 20182 - RNA, 32 nt, Human
aaagggcucagccugugauaggcauucaauaa

SEQ ID NO: 20183 - RNA, 32 nt, Human
aaagggcuccacugcugacaagguuugagaac

SEQ ID NO: 20184 - RNA, 17 nt, Human
aaagggcucgcccaggg

SEQ ID NO: 20185 - RNA, 18 nt, Human
aaagggcucugaagcuca

SEQ ID NO: 20186 - RNA, 32 nt, Human
aaagggcucugccccuuuaacuccucacucuu

SEQ ID NO: 20187 - RNA, 18 nt, Human
aaagggcucuucacucgg

SEQ ID NO: 20188 - RNA, 22 nt, Human
aaagggcucuugagccucuggg

SEQ ID NO: 20189 - RNA, 32 nt, Human
aaagggcuggguuuugaaaauaacacaggcuc

SEQ ID NO: 20190 - RNA, 19 nt, Human
aaagggcuucuuccucagg

SEQ ID NO: 20191 - RNA, 18 nt, Human
aaagggcuuuggauucag

SEQ ID NO: 20192 - RNA, 20 nt, Human
aaagggcuuuggcccaaggg

SEQ ID NO: 20193 - RNA, 32 nt, Human
aaaggggaaaggaagaaagaaggagagcagga

SEQ ID NO: 20194 - RNA, 32 nt, Human
aaaggggaaaggggcagcgggggaagagaauu

SEQ ID NO: 20195 - RNA, 32 nt, Human
aaaggggaaauuuggacacagagagagacaca

SEQ ID NO: 20196 - RNA, 32 nt, Human
aaaggggaagaaagacauaaagaaaagcgaca

SEQ ID NO: 20197 - RNA, 32 nt, Human
aaaggggaaugaaggcugcagauggaaguaaa

SEQ ID NO: 20198 - RNA, 32 nt, Human
aaaggggacagaaauauaacuaaaugcuucca

SEQ ID NO: 20199 - RNA, 32 nt, Human
aaaggggacaugccgggaguugcaguacccuc

SEQ ID NO: 20200 - RNA, 18 nt, Human
aaaggggacccaguucag

SEQ ID NO: 20201 - RNA, 32 nt, Human
aaaggggacuggcugcugugaucuucuaaggg

SEQ ID NO: 20202 - RNA, 32 nt, Human
aaaggggagaagcagagagugggaagacagcu

SEQ ID NO: 20203 - RNA, 32 nt, Human
aaaggggagagaggcuuccaaggggcccauca

SEQ ID NO: 20204 - RNA, 32 nt, Human
aaaggggagagggagauucccaaggagaggcu

SEQ ID NO: 20205 - RNA, 32 nt, Human
aaaggggaggaagauggagggagaagcuagag

SEQ ID NO: 20206 - RNA, 32 nt, Human
aaaggggagggaggggcagggagcugucuacc

SEQ ID NO: 20207 - RNA, 23 nt, Human
aaaggggagugcuaacuggggga

SEQ ID NO: 20208 - RNA, 32 nt, Human
aaaggggaugcagagcccugcccagcaccacc

SEQ ID NO: 20209 - RNA, 32 nt, Human
aaaggggauggagaccugcuccccagcucuuc

SEQ ID NO: 20210 - RNA, 32 nt, Human
aaaggggcaaaagcacuugcucuccucccagc

SEQ ID NO: 20211 - RNA, 32 nt, Human
aaaggggcaagagcugagcggaacaccggccc

SEQ ID NO: 20212 - RNA, 22 nt, Human
aaaggggcacagagugaacaga

SEQ ID NO: 20213 - RNA, 32 nt, Human
aaaggggcacugaccuguagugaaaggccaca

SEQ ID NO: 20214 - RNA, 32 nt, Human
aaaggggcagaacuucaaaugggugaaacucc

SEQ ID NO: 20215 - RNA, 32 nt, Human
aaaggggcaggcggcagugcacagggauuuau

SEQ ID NO: 20216 - RNA, 32 nt, Human
aaaggggccuggcacuuugugauugccacgug

SEQ ID NO: 20217 - RNA, 32 nt, Human
aaaggggcugcaggacacagcaaaaugccagc

SEQ ID NO: 20218 - RNA, 32 nt, Human
aaaggggcugggaagaagggggaccaguuugg

SEQ ID NO: 20219 - RNA, 32 nt, Human
aaaggggcuguugcugaacagucugcaggacc

SEQ ID NO: 20220 - RNA, 32 nt, Human
aaagggggaaaaugcccaggaggaagcaggag

SEQ ID NO: 20221 - RNA, 19 nt, Human
aaagggggaagaacuaggg

SEQ ID NO: 20222 - RNA, 32 nt, Human
aaagggggaggaaaaugauguccccagccuaa

SEQ ID NO: 20223 - RNA, 32 nt, Human
aaagggggaggcauuuugaagauagaaccucu

SEQ ID NO: 20224 - RNA, 20 nt, Human
aaagggggcagcccuuggga

SEQ ID NO: 20225 - RNA, 32 nt, Human
aaagggggccacaugggcagaaacccaaagga

SEQ ID NO: 20226 - RNA, 18 nt, Human
aaagggggccccuugaga

SEQ ID NO: 20227 - RNA, 32 nt, Human
aaagggggcgucuccccuuuaaagacuugcaa

SEQ ID NO: 20228 - RNA, 32 nt, Human
aaagggggcucuucccccagagaaguggcuug

SEQ ID NO: 20229 - RNA, 21 nt, Human
aaaggggggacagguggggga

SEQ ID NO: 20230 - RNA, 32 nt, Human
aaagggggugugaugaguguuaacuugguugu

SEQ ID NO: 20231 - RNA, 32 nt, Human
aaaggggucauccucagucugauaauaccaag

SEQ ID NO: 20232 - RNA, 32 nt, Human
aaaggggucccaacagaggugaagauccaaga

SEQ ID NO: 20233 - RNA, 32 nt, Human
aaagggguguauuuaauuccaucagguccagu

SEQ ID NO: 20234 - RNA, 32 nt, Human
aaagggguugagccaacaaaaggucugccgaa

SEQ ID NO: 20235 - RNA, 32 nt, Human
aacaaaggagagaaaggagggaaaagccaguc

SEQ ID NO: 20236 - RNA, 32 nt, Human
aacaaaggagguuugagagaggcgggaucugg

SEQ ID NO: 20237 - RNA, 32 nt, Human
aacaaaggauccaggauuuaacugggagucag

SEQ ID NO: 20238 - RNA, 32 nt, Human
aacaaaggcaacacauccacaugcacuggaca

SEQ ID NO: 20239 - RNA, 32 nt, Human
aacaaaggcacuggauucugaauggccccugu

SEQ ID NO: 20240 - RNA, 32 nt, Human
aacaaaggcauccucagaggugugccucuuuu

SEQ ID NO: 20241 - RNA, 32 nt, Human
aacaaaggcccagcagccuucugacaagcaag

SEQ ID NO: 20242 - RNA, 32 nt, Human
aacaaaggccuccucaugcuggccuuucuugg

SEQ ID NO: 20243 - RNA, 32 nt, Human
aacaaaggcugaaaaggcugcucacucucauc

SEQ ID NO: 20244 - RNA, 32 nt, Human
aacaaaggcuggggguggaggguggaggaggg

SEQ ID NO: 20245 - RNA, 32 nt, Human
aacaaagggcaaauauccagaaucuacaauga

SEQ ID NO: 20246 - RNA, 32 nt, Human
aacaaagggguucugacacuaagacauuaggg

SEQ ID NO: 20247 - RNA, 32 nt, Human
aacaaaggguaugggaaugagcacauaacacu

SEQ ID NO: 20248 - RNA, 32 nt, Human
aacaaagugauggcuuggaacacugucuuaca

SEQ ID NO: 20249 - RNA, 32 nt, Human
aacaaaguuuauuugagaggaggaauucugga

SEQ ID NO: 20250 - RNA, 32 nt, Human
aacaaauaagacucaaacugcucaaagugacg

SEQ ID NO: 20251 - RNA, 32 nt, Human
aacaaauacauuaucagaaacuggcccaaacc

SEQ ID NO: 20252 - RNA, 32 nt, Human
aacaaauacuccucaguuugacuugacuuagu

SEQ ID NO: 20253 - RNA, 32 nt, Human
aacaaaucacacaccguuucccaaaccaacag

SEQ ID NO: 20254 - RNA, 32 nt, Human
aacaaaucccauauguugggcaacaguucaaa

SEQ ID NO: 20255 - RNA, 32 nt, Human
aacaaaucuauggcuagguaaagggucaacuc

SEQ ID NO: 20256 - RNA, 32 nt, Human
aacaaaucuugcacucugaggaauuuuuaagu

SEQ ID NO: 20257 - RNA, 32 nt, Human
aacaaaugaaggcugaggagguuucuaaaccu

SEQ ID NO: 20258 - RNA, 32 nt, Human
aacaaaugacagacuugggcucugcugcucag

SEQ ID NO: 20259 - RNA, 32 nt, Human
aacaaaugagccacugcgcccggccauaaaug

SEQ ID NO: 20260 - RNA, 32 nt, Human
aacaaaugauaaaggaacucauuuaucaauag

SEQ ID NO: 20261 - RNA, 32 nt, Human
aacaaauggccccuaugcacagagccauagga

SEQ ID NO: 20262 - RNA, 32 nt, Human
aacaaaugggcccugacuguaaauuagugaag

SEQ ID NO: 20263 - RNA, 32 nt, Human
aacaaaugguuuuuauuucacaguuaucaggg

SEQ ID NO: 20264 - RNA, 32 nt, Human
aacaaaugugucugagucuuggaaaacacccc

SEQ ID NO: 20265 - RNA, 32 nt, Human
aacaaauuaaagcucaucuuaaaguccaaaaa

SEQ ID NO: 20266 - RNA, 32 nt, Human
aacaaauuacccucuagcccaguggcuuaaaa

SEQ ID NO: 20267 - RNA, 32 nt, Human
aacaaauuacuuuucaccagcaucuuuacuau

SEQ ID NO: 20268 - RNA, 32 nt, Human
aacaaauuagccuggcacuuuagguaacuuga

SEQ ID NO: 20269 - RNA, 32 nt, Human
aacaaauuuauaaauugauuauuugaaacuuu

SEQ ID NO: 20270 - RNA, 32 nt, Human
aacaacaaaacaccguuauaaacacaucaaag

SEQ ID NO: 20271 - RNA, 32 nt, Human
aacaacaaaagcuugaagcuguggagggccac

SEQ ID NO: 20272 - RNA, 32 nt, Human
aacaacaaagagccaaaagaucaaagaaggga

SEQ ID NO: 20273 - RNA, 32 nt, Human
aacaacaacaaaaacaaaaaugugcuguucaa

SEQ ID NO: 20274 - RNA, 31 nt, Human
aacaacaacaacaaaacagcagaggaauugu

SEQ ID NO: 20275 - RNA, 32 nt, Human
aacaacaacaacaacuuauuuaguuuggggag

SEQ ID NO: 20276 - RNA, 32 nt, Human
aacaacaacaggcugggcgcaguggcucacac

SEQ ID NO: 20277 - RNA, 32 nt, Human
aacaacaacauagccuagucaaacuucucagg

SEQ ID NO: 20278 - RNA, 32 nt, Human
aacaacaagaaagucaaggaagaaaagaacgg

SEQ ID NO: 20279 - RNA, 32 nt, Human
aacaacaagaugaccuuauuucuuaacuguuu

SEQ ID NO: 20280 - RNA, 32 nt, Human
aacaacaaggcugcugggggccuguucuucag

SEQ ID NO: 20281 - RNA, 32 nt, Human
aacaacaaggcuuugggugugaagggacuccc

SEQ ID NO: 20282 - RNA, 32 nt, Human
aacaacacagucucaugaucauacagcugugg

SEQ ID NO: 20283 - RNA, 32 nt, Human
aacaacacaguguguuuuuggaagaugugauu

SEQ ID NO: 20284 - RNA, 32 nt, Human
aacaacaccagccugaccaacauggugaaacc

SEQ ID NO: 20285 - RNA, 32 nt, Human
aacaacacuacccuccucucuucccagaugug

SEQ ID NO: 20286 - RNA, 32 nt, Human
aacaacacucaccacacacacuuccuucaaaa

SEQ ID NO: 20287 - RNA, 32 nt, Human
aacaacacuggagagcagaggcuguggcuugg

SEQ ID NO: 20288 - RNA, 32 nt, Human
aacaacagagggcaagaaaauuugaugcagua

SEQ ID NO: 20289 - RNA, 32 nt, Human
aacaacagcuggugcccugcuuucagauacug

SEQ ID NO: 20290 - RNA, 32 nt, Human
aacaacaggcugggcgcaguggcucacaccug

SEQ ID NO: 20291 - RNA, 24 nt, Human
aacaacaguucgggauauaagaaa

SEQ ID NO: 20292 - RNA, 32 nt, Human
aacaacaguugggcugucaacauucaaagcag

SEQ ID NO: 20293 - RNA, 24 nt, Human
aacaacaguuugcuauaagaaaca

SEQ ID NO: 20294 - RNA, 32 nt, Human
aacaacauacagaaaagugaauaaaacauaaa

SEQ ID NO: 20295 - RNA, 32 nt, Human
aacaacaucaaaaaucaacagacugcacugau

SEQ ID NO: 20296 - RNA, 32 nt, Human
aacaacaucaaauuguauguacgcagagauuu

SEQ ID NO: 20297 - RNA, 32 nt, Human
aacaacauggacggucuuuuucuuuuauuaua

SEQ ID NO: 20298 - RNA, 23 nt, Human
aacaaccaacaaaaugccacuuu

SEQ ID NO: 20299 - RNA, 32 nt, Human
aacaaccaaccaaccaaccaaccaaccacaaa

SEQ ID NO: 20300 - RNA, 32 nt, Human
aacaaccaagaucccuugcaugugcaguucac

SEQ ID NO: 20301 - RNA, 32 nt, Human
aacaaccaauuuaaaauaaggaaagaaagaca

SEQ ID NO: 20302 - RNA, 32 nt, Human
aacaaccaccacuacaccacacaugcuuauaa

SEQ ID NO: 20303 - RNA, 32 nt, Human
aacaaccagaggaggaggaggacagagggaga

SEQ ID NO: 20304 - RNA, 32 nt, Human
aacaaccagaucuuucagggaggcagaaugug

SEQ ID NO: 20305 - RNA, 32 nt, Human
aacaaccauccuagcuuccuagggaagacagu

SEQ ID NO: 20306 - RNA, 32 nt, Human
aacaacccaaauguccauccacagaugaauua

SEQ ID NO: 20307 - RNA, 32 nt, Human
aacaacccaaguuugagccgugugggugcacu

SEQ ID NO: 20308 - RNA, 32 nt, Human
aacaacccaccagaagaagcaccaagaaaacc

SEQ ID NO: 20309 - RNA, 32 nt, Human
aacaaccccaggagaugggaccugaucaugca

SEQ ID NO: 20310 - RNA, 19 nt, Human
aacaacccuauuuccaaag

SEQ ID NO: 20311 - RNA, 31 nt, Human
aacaacccugacagagagacccugucucauu

SEQ ID NO: 20312 - RNA, 32 nt, Human
aacaacccuugaauauuucauuuacuuaacca

SEQ ID NO: 20313 - RNA, 32 nt, Human
aacaaccucccaccccuguccugcugcauggu

SEQ ID NO: 20314 - RNA, 23 nt, Human
aacaaccugacaaacuguggcca

SEQ ID NO: 20315 - RNA, 32 nt, Human
aacaaccugccaccccucccuaacaaaggauu

SEQ ID NO: 20316 - RNA, 32 nt, Human
aacaaccuuagugagguggacaggaggggacc

SEQ ID NO: 20317 - RNA, 22 nt, Human
aacaacgacguugggacuucuc

SEQ ID NO: 20318 - RNA, 32 nt, Human
aacaacguagacugaguuccccaucuagugac

SEQ ID NO: 20319 - RNA, 32 nt, Human
aacaacguauaguauuuacuauaccuggugac

SEQ ID NO: 20320 - RNA, 32 nt, Human
aacaacguccucaaccgggcugaguuccuguc

SEQ ID NO: 20321 - RNA, 32 nt, Human
aacaacgugaucugacaggacagucccagccc

SEQ ID NO: 20322 - RNA, 32 nt, Human
aacaacguugcuauuuccacccauuuguuuuc

SEQ ID NO: 20323 - RNA, 20 nt, Human
aacaacuaaucuuggucccu

SEQ ID NO: 20324 - RNA, 32 nt, Human
aacaacuacaacagauugucucauuuucccag

SEQ ID NO: 20325 - RNA, 32 nt, Human
aacaacuacagucuggccaagugugguggcuc

SEQ ID NO: 20326 - RNA, 32 nt, Human
aacaacuaccaaaagaaauccuaugaaagagu

SEQ ID NO: 20327 - RNA, 32 nt, Human
aacaacuacuuuuggggacuugcccacaucuc

SEQ ID NO: 20328 - RNA, 31 nt, Human
aacaacuaggugaccugaacagcagaaauuu

SEQ ID NO: 20329 - RNA, 32 nt, Human
aacaacucacaaaaccacaaaaagcaacagaa

SEQ ID NO: 20330 - RNA, 32 nt, Human
aacaacucaguuaguauagagaugagguccgc

SEQ ID NO: 20331 - RNA, 32 nt, Human
aacaacuccccaggcuggccgggcaguacacc

SEQ ID NO: 20332 - RNA, 32 nt, Human
aacaacucuaauaucuggugacuuuggguaau

SEQ ID NO: 20333 - RNA, 32 nt, Human
aacaacucugcugccagcaccaaaaagcccuc

SEQ ID NO: 20334 - RNA, 32 nt, Human
aacaacucuggcuuuugagaugacuuauacua

SEQ ID NO: 20335 - RNA, 32 nt, Human
aacaacugaaauucagcuuccuucucaaaguc

SEQ ID NO: 20336 - RNA, 32 nt, Human
aacaacugaccuguuuccuccaccuccacccc

SEQ ID NO: 20337 - RNA, 32 nt, Human
aacaacugaggcuggugggggcuggucggggc

SEQ ID NO: 20338 - RNA, 32 nt, Human
aacaacugcacuccagccuggaugacagaaca

SEQ ID NO: 20339 - RNA, 32 nt, Human
aacaacuggagcaaccuuuagucucuucaaac

SEQ ID NO: 20340 - RNA, 32 nt, Human
aacaacugucuacgugcuucccaugauauguu

SEQ ID NO: 20341 - RNA, 32 nt, Human
aacaacuguggagauuugagggaauguguggu

SEQ ID NO: 20342 - RNA, 32 nt, Human
aacaacuguuaaccuaacccugggugggcauc

SEQ ID NO: 20343 - RNA, 32 nt, Human
aacaacuuaacuuugcauauaacucuauacuu

SEQ ID NO: 20344 - RNA, 32 nt, Human
aacaacuuacucccuccucuggccccaguagc

SEQ ID NO: 20345 - RNA, 32 nt, Human
aacaacuucaaaugcuaaggugauguuuuacc

SEQ ID NO: 20346 - RNA, 32 nt, Human
aacaacuucaugguggaaguaggcagcugaca

SEQ ID NO: 20347 - RNA, 32 nt, Human
aacaacuuccuagauugcaagugcucacguac

SEQ ID NO: 20348 - RNA, 32 nt, Human
aacaacuucuuugcugaagcacugaggagauu

SEQ ID NO: 20349 - RNA, 32 nt, Human
aacaacuuucuccuacucuuccuuccuaauag

SEQ ID NO: 20350 - RNA, 32 nt, Human
aacaacuuucucucacuucugccuccuaucau

SEQ ID NO: 20351 - RNA, 32 nt, Human
aacaacuuuuuaucuucugucuugcuaucauu

SEQ ID NO: 20352 - RNA, 32 nt, Human
aacaagaaaaacaaaaaccaagcaaacuucua

SEQ ID NO: 20353 - RNA, 32 nt, Human
aacaagaaaaacaaaaagaacuuaaccaguuc

SEQ ID NO: 20354 - RNA, 32 nt, Human
aacaagaaauaaaagguguuguggaaacuuaa

SEQ ID NO: 20355 - RNA, 32 nt, Human
aacaagaaccugaggccgcuggagaaaaggaa

SEQ ID NO: 20356 - RNA, 32 nt, Human
aacaagaagauggggaagaggaaguguaaaac

SEQ ID NO: 20357 - RNA, 32 nt, Human
aacaagaaggagauucagaagggcuauauguu

SEQ ID NO: 20358 - RNA, 32 nt, Human
aacaagaaugauuaaaucuauucaucuuacua

SEQ ID NO: 20359 - RNA, 32 nt, Human
aacaagacacuccaauugugauuugaguugag

SEQ ID NO: 20360 - RNA, 32 nt, Human
aacaagacacuggugcuggaugagaccaccac

SEQ ID NO: 20361 - RNA, 32 nt, Human
aacaagacagcacuccagauaggcagccacga

SEQ ID NO: 20362 - RNA, 32 nt, Human
aacaagacaggaguuagaugcagaggagagau

SEQ ID NO: 20363 - RNA, 32 nt, Human
aacaagacagugguuugaauucuggggccuuu

SEQ ID NO: 20364 - RNA, 32 nt, Human
aacaagacaugaaaggucuaccuucauguaau

SEQ ID NO: 20365 - RNA, 32 nt, Human
aacaagaccuaaacaaauugcuuaugggagau

SEQ ID NO: 20366 - RNA, 32 nt, Human
aacaagaccugugcuucuuuacuccaaacucu

SEQ ID NO: 20367 - RNA, 32 nt, Human
aacaagacgcacaaacacgcacccauagaagu

SEQ ID NO: 20368 - RNA, 32 nt, Human
aacaagagacuaauuagacaauggggcuagaa

SEQ ID NO: 20369 - RNA, 32 nt, Human
aacaagagauaagaugcucuccaggggcuagc

SEQ ID NO: 20370 - RNA, 23 nt, Human
aacaagagcaaaacucugucuca

SEQ ID NO: 20371 - RNA, 23 nt, Human
aacaagagcaagacucugucuca

SEQ ID NO: 20372 - RNA, 32 nt, Human
aacaagagcacuaguaugaaaacauuagggac

SEQ ID NO: 20373 - RNA, 32 nt, Human
aacaagagccccuaagucccagccucugcaau

SEQ ID NO: 20374 - RNA, 23 nt, Human
aacaagagcgaaacucugucuca

SEQ ID NO: 20375 - RNA, 32 nt, Human
aacaagaggaagcagaauaugagaagccauau

SEQ ID NO: 20376 - RNA, 32 nt, Human
aacaagaggagaaagcagagauaaaacgcuua

SEQ ID NO: 20377 - RNA, 32 nt, Human
aacaagaggcauuugugcacacacacagggcu

SEQ ID NO: 20378 - RNA, 32 nt, Human
aacaagaggcuaccuccaguuaaccaggacau

SEQ ID NO: 20379 - RNA, 32 nt, Human
aacaagagggagggcgggagagagggaacgga

SEQ ID NO: 20380 - RNA, 32 nt, Human
aacaagagugacgcucacagggcugggcugac

SEQ ID NO: 20381 - RNA, 32 nt, Human
aacaagagugauagcagagaagguuucacaga

SEQ ID NO: 20382 - RNA, 32 nt, Human
aacaagaucacacccuggaacaauuggaggau

SEQ ID NO: 20383 - RNA, 32 nt, Human
aacaagaugccauacaggcaaaacaaagccaa

SEQ ID NO: 20384 - RNA, 32 nt, Human
aacaagauuuccuugugcaaaauauuugacua

SEQ ID NO: 20385 - RNA, 32 nt, Human
aacaagcacacaggagccugucauccccagau

SEQ ID NO: 20386 - RNA, 32 nt, Human
aacaagcacagaaaauauguucccccacacug

SEQ ID NO: 20387 - RNA, 32 nt, Human
aacaagcacccuggaaggcacagggaagcauc

SEQ ID NO: 20388 - RNA, 32 nt, Human
aacaagcaccuuccucuccacagaagcagcug

SEQ ID NO: 20389 - RNA, 32 nt, Human
aacaagcagcugugugcgugagcccaggcuga

SEQ ID NO: 20390 - RNA, 32 nt, Human
aacaagcagcuuucccaaagcgauacacuugc

SEQ ID NO: 20391 - RNA, 32 nt, Human
aacaagcagugcaaaggcccugaggcaggggu

SEQ ID NO: 20392 - RNA, 32 nt, Human
aacaagcauggacauuguuaguucacccaguu

SEQ ID NO: 20393 - RNA, 32 nt, Human
aacaagcauucaauugaacaugagguuaaggc

SEQ ID NO: 20394 - RNA, 32 nt, Human
aacaagcauuccugccuucccuccagaccucu

SEQ ID NO: 20395 - RNA, 32 nt, Human
aacaagccaaaccaaaugaacucuggaaaacc

SEQ ID NO: 20396 - RNA, 32 nt, Human
aacaagccaaauaccagaugugcauuucuuuu

SEQ ID NO: 20397 - RNA, 32 nt, Human
aacaagccaauauuucaacuguucccauugca

SEQ ID NO: 20398 - RNA, 32 nt, Human
aacaagccaccugcucacacaccuuguucaac

SEQ ID NO: 20399 - RNA, 32 nt, Human
aacaagcccagaggcugaagcuucccaguauu

SEQ ID NO: 20400 - RNA, 32 nt, Human
aacaagcccccugcccuccucucccucccacu

SEQ ID NO: 20401 - RNA, 32 nt, Human
aacaagcccugccagccuccuaccucaaaucu

SEQ ID NO: 20402 - RNA, 32 nt, Human
aacaagccuguaugcuggcaggaggcagacuu

SEQ ID NO: 20403 - RNA, 21 nt, Human
aacaagcgaaacucugucuca

SEQ ID NO: 20404 - RNA, 32 nt, Human
aacaagcgccccucagagauucugaugccacu

SEQ ID NO: 20405 - RNA, 32 nt, Human
aacaagcggcucucaaaguccucugccacgcu

SEQ ID NO: 20406 - RNA, 32 nt, Human
aacaagcuauccaaccaaagcaaaguugucga

SEQ ID NO: 20407 - RNA, 32 nt, Human
aacaagcugugaaaauacaguaaauuagaaca

SEQ ID NO: 20408 - RNA, 32 nt, Human
aacaagcuuuucugaagugagaagcuguucuc

SEQ ID NO: 20409 - RNA, 32 nt, Human
aacaaggaaaaauggauguuucgcugcaggau

SEQ ID NO: 20410 - RNA, 32 nt, Human
aacaaggaagaugccuuucaagccucacuggg

SEQ ID NO: 20411 - RNA, 32 nt, Human
aacaaggaaugccugugccaauaaaaguuuuc

SEQ ID NO: 20412 - RNA, 32 nt, Human
aacaaggaauucacaccucugccuccuuugca

SEQ ID NO: 20413 - RNA, 32 nt, Human
aacaaggacacagugguagaacugaaugugaa

SEQ ID NO: 20414 - RNA, 32 nt, Human
aacaaggaccaccuggguucuccagucuugaa

SEQ ID NO: 20415 - RNA, 32 nt, Human
aacaaggacuccuuuccuccacuucuccagua

SEQ ID NO: 20416 - RNA, 32 nt, Human
aacaaggagaguagaucucucuggaucuucug

SEQ ID NO: 20417 - RNA, 32 nt, Human
aacaaggagccccacagcaccuggagcugccc

SEQ ID NO: 20418 - RNA, 32 nt, Human
aacaaggaguccuuccucugaaguggcucuuu

SEQ ID NO: 20419 - RNA, 32 nt, Human
aacaaggauuuccaagcuaagcaagucaucag

SEQ ID NO: 20420 - RNA, 32 nt, Human
aacaaggcagaagggcgacucucaccucucau

SEQ ID NO: 20421 - RNA, 32 nt, Human
aacaaggcaugcuggcagauugcaggguugag

SEQ ID NO: 20422 - RNA, 32 nt, Human
aacaaggcauucagcaguuucugacaauuaac

SEQ ID NO: 20423 - RNA, 32 nt, Human
aacaaggcauugaaggaacauaccugaaaaua

SEQ ID NO: 20424 - RNA, 32 nt, Human
aacaaggccugaaggccaggguagauuggggg

SEQ ID NO: 20425 - RNA, 32 nt, Human
aacaaggcuauuugaaaacagaaggcagguca

SEQ ID NO: 20426 - RNA, 32 nt, Human
aacaagggaagagagagcaggagcuggggcag

SEQ ID NO: 20427 - RNA, 32 nt, Human
aacaagggaggcuuccucaggaucucgaaccu

SEQ ID NO: 20428 - RNA, 23 nt, Human
aacaagggcaaaacucugucuca

SEQ ID NO: 20429 - RNA, 32 nt, Human
aacaagggcaagaaggucugagagggaaggag

SEQ ID NO: 20430 - RNA, 32 nt, Human
aacaagggccaggccagcuguggcugcaaagu

SEQ ID NO: 20431 - RNA, 32 nt, Human
aacaagggcuggagcaguuuauaaacaagguc

SEQ ID NO: 20432 - RNA, 32 nt, Human
aacaaggggaaagugaaauugagcaauucacu

SEQ ID NO: 20433 - RNA, 32 nt, Human
aacaaggggaggaggaagcuauggauacagaa

SEQ ID NO: 20434 - RNA, 32 nt, Human
aacaaggggucugaggaugcauucgagauggc

SEQ ID NO: 20435 - RNA, 32 nt, Human
aacaaggguaacuugaugcccugcgggacauc

SEQ ID NO: 20436 - RNA, 32 nt, Human
aacaagguaggcagagguugcagugagccaag

SEQ ID NO: 20437 - RNA, 32 nt, Human
aacaagguauaucuaguaggggagaaagccac

SEQ ID NO: 20438 - RNA, 32 nt, Human
aacaaguagaaagauaauauuucuccaauugg

SEQ ID NO: 20439 - RNA, 32 nt, Human
aacaagucaagaaauguucaagcccuuggaug

SEQ ID NO: 20440 - RNA, 32 nt, Human
aacaagucaagaaauuuucaagcccuuggaug

SEQ ID NO: 20441 - RNA, 32 nt, Human
aacaagucagaacucagaacacugccugguac

SEQ ID NO: 20442 - RNA, 32 nt, Human
aacaagucuuccugagacccaggcuggugugg

SEQ ID NO: 20443 - RNA, 32 nt, Human
aacaagucuuucuccuccagcccuucucuuca

SEQ ID NO: 20444 - RNA, 32 nt, Human
aacaagugagucucggcuggagugcaguggug

SEQ ID NO: 20445 - RNA, 31 nt, Human
aacaagugccucucacugggcuuugucaaca

SEQ ID NO: 20446 - RNA, 32 nt, Human
aacaagugcucaauaaaugcuugcugauugac

SEQ ID NO: 20447 - RNA, 32 nt, Human
aacaagugcucuuuccaccccaaaggggccuc

SEQ ID NO: 20448 - RNA, 32 nt, Human
aacaaguguuaacuuuaaacaguucgcuacaa

SEQ ID NO: 20449 - RNA, 31 nt, Human
aacaaguugaauagagaaaacacugauugau

SEQ ID NO: 20450 - RNA, 32 nt, Human
aacaaguugccaucugguuugccuuccagcac

SEQ ID NO: 20451 - RNA, 32 nt, Human
aacaaguuuccgugucuucugccuuccucuug

SEQ ID NO: 20452 - RNA, 32 nt, Human
aacaaguuugucaauccaucugaacuucaguu

SEQ ID NO: 20453 - RNA, 32 nt, Human
aacaaguuuuggagaagagagagggagauaaa

SEQ ID NO: 20454 - RNA, 32 nt, Human
aacaauaaaaggauuccuuuaguagcucaugu

SEQ ID NO: 20455 - RNA, 32 nt, Human
aacaauaaagcccacgcucuuugucaggcuca

SEQ ID NO: 20456 - RNA, 32 nt, Human
aacaauaaaguuaauaaagaaguuagaaagaa

SEQ ID NO: 20457 - RNA, 32 nt, Human
aacaauaaaugauguuuuuaugugccuccccu

SEQ ID NO: 20458 - RNA, 32 nt, Human
aacaauaacgaaucucauuuacacuucacaaa

SEQ ID NO: 20459 - RNA, 32 nt, Human
aacaauaagcuccaacgugggcauaguugaac

SEQ ID NO: 20460 - RNA, 32 nt, Human
aacaauaaggcagaagaaggugaacucucuuu

SEQ ID NO: 20461 - RNA, 32 nt, Human
aacaauagacagcacaacacaaacucucucaa

SEQ ID NO: 20462 - RNA, 32 nt, Human
aacaauagccaaugcagaaucuguguguuccu

SEQ ID NO: 20463 - RNA, 32 nt, Human
aacaauagcuuggaauggcuugaaaucacaaa

SEQ ID NO: 20464 - RNA, 32 nt, Human
aacaauauaaacaucugggaauaggggagaug

SEQ ID NO: 20465 - RNA, 32 nt, Human
aacaauaucacagucauucauccaggccacgu

SEQ ID NO: 20466 - RNA, 32 nt, Human
aacaauaucccaauagauuuguugacuugagg

SEQ ID NO: 20467 - RNA, 32 nt, Human
aacaauaucugccucauaggguguuuugugga

SEQ ID NO: 20468 - RNA, 23 nt, Human
aacaauaugcaaauacuucagug

SEQ ID NO: 20469 - RNA, 32 nt, Human
aacaauauucuagagcaacuuugacuacuucc

SEQ ID NO: 20470 - RNA, 32 nt, Human
aacaaucagccccuauagccacauccuccuuu

SEQ ID NO: 20471 - RNA, 32 nt, Human
aacaaucauggagccuaggagcagagagauga

SEQ ID NO: 20472 - RNA, 32 nt, Human
aacaaucuaaauccagaaaauggcaguccuaa

SEQ ID NO: 20473 - RNA, 32 nt, Human
aacaaucucuccccagccucccaaaucaaguc

SEQ ID NO: 20474 - RNA, 32 nt, Human
aacaaucucugccaccaccaagucauugacuu

SEQ ID NO: 20475 - RNA, 32 nt, Human
aacaaucugcccaccgacccccuuucuaagga

SEQ ID NO: 20476 - RNA, 32 nt, Human
aacaaucugugucccuggaaugcuggccucuc

SEQ ID NO: 20477 - RNA, 32 nt, Human
aacaaucuucugacagcaggagcagugauagu

SEQ ID NO: 20478 - RNA, 32 nt, Human
aacaaugaaaugaagaggaacucccucuuucu

SEQ ID NO: 20479 - RNA, 32 nt, Human
aacaaugaacagguuuucucuccaucaccccc

SEQ ID NO: 20480 - RNA, 32 nt, Human
aacaaugaacauguaacuucucucacaagagu

SEQ ID NO: 20481 - RNA, 32 nt, Human
aacaaugaaggaaacucuaaacuccccuuaug

SEQ ID NO: 20482 - RNA, 32 nt, Human
aacaaugaaggccuaguuggcacuuuuauuuc

SEQ ID NO: 20483 - RNA, 32 nt, Human
aacaaugacaacaacauuacuaaccuguggag

SEQ ID NO: 20484 - RNA, 32 nt, Human
aacaaugagauggaaacuccucccucauucag

SEQ ID NO: 20485 - RNA, 32 nt, Human
aacaaugaggaaaauuacugaagaauaaguuu

SEQ ID NO: 20486 - RNA, 31 nt, Human
aacaaugaguaagccaucacacagaagaggg

SEQ ID NO: 20487 - RNA, 32 nt, Human
aacaaugauggccugguuagagcugugguuug

SEQ ID NO: 20488 - RNA, 32 nt, Human
aacaaugauuauacacaaucugcaccaaacag

SEQ ID NO: 20489 - RNA, 32 nt, Human
aacaaugcagaugguucugacaagggcucuau

SEQ ID NO: 20490 - RNA, 32 nt, Human
aacaaugccagcucuguggcuucugcccuggg

SEQ ID NO: 20491 - RNA, 32 nt, Human
aacaaugcccccuugacuuucucaucucacau

SEQ ID NO: 20492 - RNA, 32 nt, Human
aacaaugcugauuuuugaauucaugauuaguu

SEQ ID NO: 20493 - RNA, 32 nt, Human
aacaauggagaugacaaaaauauugguaacag

SEQ ID NO: 20494 - RNA, 32 nt, Human
aacaauggccaaagugaagaaaaugcuaccuu

SEQ ID NO: 20495 - RNA, 31 nt, Human
aacaaugggaaacugacaucagaugucuuga

SEQ ID NO: 20496 - RNA, 32 nt, Human
aacaauggguuauauggcagccaagaaacacc

SEQ ID NO: 20497 - RNA, 32 nt, Human
aacaaugguaaugccauuguguuuguaacacu

SEQ ID NO: 20498 - RNA, 32 nt, Human
aacaauggucaccaagucccggaacagguugu

SEQ ID NO: 20499 - RNA, 32 nt, Human
aacaauggugugugcagaagagaagggacuga

SEQ ID NO: 20500 - RNA, 32 nt, Human
aacaaugguuccuuaguuuugcacugggaaga

SEQ ID NO: 20501 - RNA, 32 nt, Human
aacaauguaacuuuuaaaaggcaucauuccug

SEQ ID NO: 20502 - RNA, 32 nt, Human
aacaauguccagacaagaccuguaccuuugag

SEQ ID NO: 20503 - RNA, 32 nt, Human
aacaaugugcauuugaaggaguuaauuaaaag

SEQ ID NO: 20504 - RNA, 32 nt, Human
aacaaugugcugcugcuucacuuccgcccucc

SEQ ID NO: 20505 - RNA, 19 nt, Human
aacaaugugguaaagccuu

SEQ ID NO: 20506 - RNA, 32 nt, Human
aacaauguuaaggaaacucuuaucucagucau

SEQ ID NO: 20507 - RNA, 32 nt, Human
aacaauguuccaguaagaccuuuguaggcucu

SEQ ID NO: 20508 - RNA, 32 nt, Human
aacaauguucccaaugucuuuacuuuuuaaaa

SEQ ID NO: 20509 - RNA, 32 nt, Human
aacaauuacagaaacauuaaacacuaugacac

SEQ ID NO: 20510 - RNA, 32 nt, Human
aacaauuagggugacaugugugcacugaguaa

SEQ ID NO: 20511 - RNA, 32 nt, Human
aacaauuauaugaccagaagcaucuaaccauu

SEQ ID NO: 20512 - RNA, 32 nt, Human
aacaauuauucaccauggauugcccaacuuuc

SEQ ID NO: 20513 - RNA, 32 nt, Human
aacaauucacuucugucuucugcaaauugacu

SEQ ID NO: 20514 - RNA, 22 nt, Human
aacaauucaguagugucuggaa

SEQ ID NO: 20515 - RNA, 32 nt, Human
aacaauucagucucucaaacauuuuggcacag

SEQ ID NO: 20516 - RNA, 32 nt, Human
aacaauuccccgagcaacuuuaccucacaauc

SEQ ID NO: 20517 - RNA, 32 nt, Human
aacaauuccugccuccuguucccuguucugcc

SEQ ID NO: 20518 - RNA, 32 nt, Human
aacaauucuacaccaaauugucucuucaaaua

SEQ ID NO: 20519 - RNA, 32 nt, Human
aacaauucugcgcgagguagggaggccauggc

SEQ ID NO: 20520 - RNA, 32 nt, Human
aacaauugaagaagaaaggaaaauaagguaag

SEQ ID NO: 20521 - RNA, 32 nt, Human
aacaauugcaauauuuguugagucccuaaaug

SEQ ID NO: 20522 - RNA, 32 nt, Human
aacaauugcauuguccaucaaaaggagacuga

SEQ ID NO: 20523 - RNA, 18 nt, Human
aacaauuguuguguucuu

SEQ ID NO: 20524 - RNA, 20 nt, Human
aacaauuuaacccacaggaa

SEQ ID NO: 20525 - RNA, 32 nt, Human
aacaauuuaagcugcaauauuugugacugaau

SEQ ID NO: 20526 - RNA, 32 nt, Human
aacaauuuggauauuggaaugcagucucauac

SEQ ID NO: 20527 - RNA, 20 nt, Human
aacaauuuggguucugucca

SEQ ID NO: 20528 - RNA, 24 nt, Human
aacaauuugugagcuauauaggaa

SEQ ID NO: 20529 - RNA, 32 nt, Human
aacaauuuguucagaagaacugagcaaacuaa

SEQ ID NO: 20530 - RNA, 23 nt, Human
aacaauuuuaauuuuuugccuca

SEQ ID NO: 20531 - RNA, 20 nt, Human
aacaauuuuagccuuucuca

SEQ ID NO: 20532 - RNA, 22 nt, Human
aacaauuuucuuuauucugucu

SEQ ID NO: 20533 - RNA, 32 nt, Human
aacacaaaaaggcagagagagaaggauuaaau

SEQ ID NO: 20534 - RNA, 32 nt, Human
aacacaaaacauaauaaaacaccaagaacaug

SEQ ID NO: 20535 - RNA, 32 nt, Human
aacacaaaacaucaaguuccacacacgcuaug

SEQ ID NO: 20536 - RNA, 32 nt, Human
aacacaaaaggagugaguuggggucuuuaguc

SEQ ID NO: 20537 - RNA, 32 nt, Human
aacacaaaauuagcugggugugguagugcgug

SEQ ID NO: 20538 - RNA, 32 nt, Human
aacacaaacccccacuccagcuccuucgcuua

SEQ ID NO: 20539 - RNA, 32 nt, Human
aacacaaaggaaugugcauaauggagagaaga

SEQ ID NO: 20540 - RNA, 32 nt, Human
aacacaaagggcaagagguugcuaugguauuu

SEQ ID NO: 20541 - RNA, 32 nt, Human
aacacaaauggacacacauaccuggccacgaa

SEQ ID NO: 20542 - RNA, 32 nt, Human
aacacaaccugccuggccgggcgugguggcgu

SEQ ID NO: 20543 - RNA, 32 nt, Human
aacacaacgcacugcagccucuaccuccuggg

SEQ ID NO: 20544 - RNA, 32 nt, Human
aacacaacuguugccaaagaguuggcuuuguu

SEQ ID NO: 20545 - RNA, 32 nt, Human
aacacaagagggauggaucauucuuccaguuc

SEQ ID NO: 20546 - RNA, 32 nt, Human
aacacaagcagcagcaacaucaacaaugccag

SEQ ID NO: 20547 - RNA, 32 nt, Human
aacacaagccaagaagaguacuuggguggagu

SEQ ID NO: 20548 - RNA, 32 nt, Human
aacacaagcuggagaguuuuagguaagaguca

SEQ ID NO: 20549 - RNA, 32 nt, Human
aacacaaggccuuugccauuggucgcaggaac

SEQ ID NO: 20550 - RNA, 30 nt, Human
aacacaaguuuccaaucagaagacuugaag

SEQ ID NO: 20551 - RNA, 32 nt, Human
aacacaaucaucacuuagugguggugagugac

SEQ ID NO: 20552 - RNA, 32 nt, Human
aacacaaugccacuucacuaauucuuucaaac

SEQ ID NO: 20553 - RNA, 32 nt, Human
aacacaaugcucuuccccuugaccacuucuca

SEQ ID NO: 20554 - RNA, 32 nt, Human
aacacaauuuggggaacagaagggcuuuuguu

SEQ ID NO: 20555 - RNA, 32 nt, Human
aacacacaaacaguuggaacagagcacucuga

SEQ ID NO: 20556 - RNA, 32 nt, Human
aacacacaacauuacacacauauacacacagc

SEQ ID NO: 20557 - RNA, 32 nt, Human
aacacacacaugcuucccuuuccugaguccca

SEQ ID NO: 20558 - RNA, 32 nt, Human
aacacacaccugcugguuaggaacccggcugu

SEQ ID NO: 20559 - RNA, 32 nt, Human
aacacacagaaaccacaccagauauuuucagc

SEQ ID NO: 20560 - RNA, 32 nt, Human
aacacacagaugggaaaucuuaugcauguauu

SEQ ID NO: 20561 - RNA, 32 nt, Human
aacacacagccaugaggagccaugaggagccu

SEQ ID NO: 20562 - RNA, 32 nt, Human
aacacacaggcagcagagaccauggggccccu

SEQ ID NO: 20563 - RNA, 32 nt, Human
aacacacaggccgcuuggaauguugggccauc

SEQ ID NO: 20564 - RNA, 18 nt, Human
aacacacauacaugcaca

SEQ ID NO: 20565 - RNA, 32 nt, Human
aacacacauauaaacaucacacacacagacag

SEQ ID NO: 20566 - RNA, 32 nt, Human
aacacacauaugcacacucacacugacaagca

SEQ ID NO: 20567 - RNA, 32 nt, Human
aacacacauguguagcugcuucuggcugagug

SEQ ID NO: 20568 - RNA, 32 nt, Human
aacacaccaaccagggaagacggccaaggcug

SEQ ID NO: 20569 - RNA, 32 nt, Human
aacacacccccuccuucucugcuuuggguccc

SEQ ID NO: 20570 - RNA, 32 nt, Human
aacacacccuuuccuuaggcguccugcguccc

SEQ ID NO: 20571 - RNA, 32 nt, Human
aacacaccuguauuugauucucagccagggga

SEQ ID NO: 20572 - RNA, 32 nt, Human
aacacaccuuaucuauuagucaccuucuuaaa

SEQ ID NO: 20573 - RNA, 32 nt, Human
aacacacgguagcgaugucauucuucccugcu

SEQ ID NO: 20574 - RNA, 32 nt, Human
aacacacugauggaggagugggcagaguaggc

SEQ ID NO: 20575 - RNA, 32 nt, Human
aacacacugccucgugucuuuguagcugauuc

SEQ ID NO: 20576 - RNA, 32 nt, Human
aacacacuugcccucaugccucccagaauaug

SEQ ID NO: 20577 - RNA, 32 nt, Human
aacacacuuuucucccugugucuggguccaaa

SEQ ID NO: 20578 - RNA, 32 nt, Human
aacacagaaacgcaauaaacacacacaaaaua

SEQ ID NO: 20579 - RNA, 32 nt, Human
aacacagaaauccugaguucuucucauuggug

SEQ ID NO: 20580 - RNA, 32 nt, Human
aacacagaaauugucucucaagaccaggugga

SEQ ID NO: 20581 - RNA, 32 nt, Human
aacacagaacacacaaagcuuucucuuaaaag

SEQ ID NO: 20582 - RNA, 32 nt, Human
aacacagaagguggagguugcagugagccaag

SEQ ID NO: 20583 - RNA, 32 nt, Human
aacacagaccucuuucuugugccuuguucacu

SEQ ID NO: 20584 - RNA, 32 nt, Human
aacacagagacacauugcaucaacuucaagaa

SEQ ID NO: 20585 - RNA, 32 nt, Human
aacacagauucugccugguccaacacagauuc

SEQ ID NO: 20586 - RNA, 32 nt, Human
aacacagcaaaccuucauccggcuggagggca

SEQ ID NO: 20587 - RNA, 32 nt, Human
aacacagcaagaaucugguugucugaacuauu

SEQ ID NO: 20588 - RNA, 32 nt, Human
aacacagcaagggugaugggaaagcauuguaa

SEQ ID NO: 20589 - RNA, 32 nt, Human
aacacagcagcaucucuccacugaaagaagug

SEQ ID NO: 20590 - RNA, 32 nt, Human
aacacagcagcugacuccucuaggcaaggaaa

SEQ ID NO: 20591 - RNA, 32 nt, Human
aacacagcaucauuaugcaauaugaaaccagc

SEQ ID NO: 20592 - RNA, 32 nt, Human
aacacagcaugcaccaggaugcaucagacaga

SEQ ID NO: 20593 - RNA, 32 nt, Human
aacacagccagagaacugugacccugguguuc

SEQ ID NO: 20594 - RNA, 32 nt, Human
aacacagccaguuuccacaaugccuagacugu

SEQ ID NO: 20595 - RNA, 32 nt, Human
aacacagcccacuuauccaucugucaaaaguu

SEQ ID NO: 20596 - RNA, 32 nt, Human
aacacagccgagaaguugcuucuuuguacuuu

SEQ ID NO: 20597 - RNA, 31 nt, Human
aacacagcugugccuggaacagcagacccag

SEQ ID NO: 20598 - RNA, 32 nt, Human
aacacagcuguggcucguuugagggauugggg

SEQ ID NO: 20599 - RNA, 32 nt, Human
aacacaggagaccugcucccuaugugcacacc

SEQ ID NO: 20600 - RNA, 32 nt, Human
aacacaggaggcagagguugcagcgagcugag

SEQ ID NO: 20601 - RNA, 32 nt, Human
aacacaggaggcagagguugcagugagccgag

SEQ ID NO: 20602 - RNA, 32 nt, Human
aacacaggcacacacaugcacacacccauaaa

SEQ ID NO: 20603 - RNA, 32 nt, Human
aacacaggcacagcaggcaccgccugccagau

SEQ ID NO: 20604 - RNA, 32 nt, Human
aacacaggcagcuuucuagaaguuucccuucc

SEQ ID NO: 20605 - RNA, 32 nt, Human
aacacaggcccagugucuguggcuggugagug

SEQ ID NO: 20606 - RNA, 32 nt, Human
aacacaggcuacacagaugagaaaauggggcu

SEQ ID NO: 20607 - RNA, 21 nt, Human
aacacagggacaaaggcaggu

SEQ ID NO: 20608 - RNA, 32 nt, Human
aacacagggcucccagugucccauuuccugug

SEQ ID NO: 20609 - RNA, 32 nt, Human
aacacaggggaggcaggggaagaggcaggagg

SEQ ID NO: 20610 - RNA, 32 nt, Human
aacacaggugcacucagcugcccagggccucu

SEQ ID NO: 20611 - RNA, 32 nt, Human
aacacaggugucaugaaaacuacccccaaaag

SEQ ID NO: 20612 - RNA, 32 nt, Human
aacacagguguuuucugugccaaucugguguu

SEQ ID NO: 20613 - RNA, 32 nt, Human
aacacaguaagcccugcucccuucccugcucu

SEQ ID NO: 20614 - RNA, 32 nt, Human
aacacagucauggagaaggccaguggcagagc

SEQ ID NO: 20615 - RNA, 32 nt, Human
aacacagugagcaaagacacagcaccuacgcc

SEQ ID NO: 20616 - RNA, 32 nt, Human
aacacagugccuggcaaggccucugccccugg

SEQ ID NO: 20617 - RNA, 23 nt, Human
aacacagugccuucuacauugca

SEQ ID NO: 20618 - RNA, 32 nt, Human
aacacagugcucagccuucaguucccuuccac

SEQ ID NO: 20619 - RNA, 32 nt, Human
aacacaguggaaagcagagcugagaaauggac

SEQ ID NO: 20620 - RNA, 32 nt, Human
aacacaguuugaaaaccacugccccagacagc

SEQ ID NO: 20621 - RNA, 22 nt, Human
aacacauaaacaaauaguuuca

SEQ ID NO: 20622 - RNA, 32 nt, Human
aacacauauguaccuacauacauacauaaaua

SEQ ID NO: 20623 - RNA, 32 nt, Human
aacacaucaaugauuuuucacaaguggagcac

SEQ ID NO: 20624 - RNA, 32 nt, Human
aacacaucaccacucccuagggcggggccugu

SEQ ID NO: 20625 - RNA, 20 nt, Human
aacacaucagcucugucuca

SEQ ID NO: 20626 - RNA, 32 nt, Human
aacacaucagcuuucaaaugagaugauaguaa

SEQ ID NO: 20627 - RNA, 21 nt, Human
aacacaucccuccucuucuca

SEQ ID NO: 20628 - RNA, 21 nt, Human
aacacaucccugagcugcaga

SEQ ID NO: 20629 - RNA, 32 nt, Human
aacacauccuuucuccccugggcuuguaagaa

SEQ ID NO: 20630 - RNA, 22 nt, Human
aacacaucuccugcacuucuca

SEQ ID NO: 20631 - RNA, 32 nt, Human
aacacaucugcaggacacauuuugccauguaa

SEQ ID NO: 20632 - RNA, 32 nt, Human
aacacaucuucagccuccuccugggccagcuc

SEQ ID NO: 20633 - RNA, 32 nt, Human
aacacaugacagcauucucagucuugguuucu

SEQ ID NO: 20634 - RNA, 32 nt, Human
aacacaugagcagggugagaggugaggcaagg

SEQ ID NO: 20635 - RNA, 32 nt, Human
aacacaugccugugguccuagcuacuugggag

SEQ ID NO: 20636 - RNA, 32 nt, Human
aacacauggacacacacccaagccacaagaaa

SEQ ID NO: 20637 - RNA, 32 nt, Human
aacacaugucuagcuuucaccuccaggaucua

SEQ ID NO: 20638 - RNA, 32 nt, Human
aacacauguuuauuuugcuuggcugcaguuga

SEQ ID NO: 20639 - RNA, 32 nt, Human
aacacauuauuuuauccguuauuugaaauuuu

SEQ ID NO: 20640 - RNA, 32 nt, Human
aacacauucacuccaacaccuggguauaaagg

SEQ ID NO: 20641 - RNA, 32 nt, Human
aacacauugaaggaaauuggaagaaauggaau

SEQ ID NO: 20642 - RNA, 32 nt, Human
aacacauugguucgugcuucccuuuacuucuu

SEQ ID NO: 20643 - RNA, 32 nt, Human
aacacauuguacugagaaccacuuaagcauug

SEQ ID NO: 20644 - RNA, 32 nt, Human
aacacauuuccaggaauagaagugagaugucu

SEQ ID NO: 20645 - RNA, 32 nt, Human
aacaccaaagcacaggcaacaaaagugaaaau

SEQ ID NO: 20646 - RNA, 32 nt, Human
aacaccaaaggagaccauaugggugaaagcaa

SEQ ID NO: 20647 - RNA, 32 nt, Human
aacaccaaggaaauaucaaagaacacaacgca

SEQ ID NO: 20648 - RNA, 32 nt, Human
aacaccaagguacaauguuaaaggaauauuca

SEQ ID NO: 20649 - RNA, 32 nt, Human
aacaccacacacacauggcaugcauguacgca

SEQ ID NO: 20650 - RNA, 32 nt, Human
aacaccacaggcucgggauugaggugguaagg

SEQ ID NO: 20651 - RNA, 32 nt, Human
aacaccacaggggaacaggacaguuugugacu

SEQ ID NO: 20652 - RNA, 32 nt, Human
aacaccaccaaaacagauacccauguugaggg

SEQ ID NO: 20653 - RNA, 32 nt, Human
aacaccaccauccugugggcccagaagcuuug

SEQ ID NO: 20654 - RNA, 32 nt, Human
aacaccacggcacuucagccugggugacagaa

SEQ ID NO: 20655 - RNA, 32 nt, Human
aacaccacuaaaccacauacggaauaauccac

SEQ ID NO: 20656 - RNA, 32 nt, Human
aacaccacugauaucauuaaagccacuaacag

SEQ ID NO: 20657 - RNA, 32 nt, Human
aacaccacugcacuccaaccugggcaacagag

SEQ ID NO: 20658 - RNA, 32 nt, Human
aacaccacugcacuccaccuguccacuugucc

SEQ ID NO: 20659 - RNA, 32 nt, Human
aacaccacugccugcaggagccugggcugacu

SEQ ID NO: 20660 - RNA, 32 nt, Human
aacaccacuggggcaguacaagucaggaauug

SEQ ID NO: 20661 - RNA, 32 nt, Human
aacaccagauuauuaucuucugauccuggagg

SEQ ID NO: 20662 - RNA, 32 nt, Human
aacaccagccagggagggguggggaaggaggu

SEQ ID NO: 20663 - RNA, 32 nt, Human
aacaccagccucucagcccucucuccauaaag

SEQ ID NO: 20664 - RNA, 32 nt, Human
aacaccagccugggccauauugugagaacacg

SEQ ID NO: 20665 - RNA, 32 nt, Human
aacaccagcuacaaaccaagucuagcacagug

SEQ ID NO: 20666 - RNA, 32 nt, Human
aacaccaggcagcagggcacagagagaggcaa

SEQ ID NO: 20667 - RNA, 32 nt, Human
aacaccagggggcagaggucaggagaaucauc

SEQ ID NO: 20668 - RNA, 32 nt, Human
aacaccagugcuaagguagagcuccccagcag

SEQ ID NO: 20669 - RNA, 32 nt, Human
aacaccagugcucugucagcagccuggccugg

SEQ ID NO: 20670 - RNA, 32 nt, Human
aacaccaguuaggaaaauagcuccagaaaaua

SEQ ID NO: 20671 - RNA, 32 nt, Human
aacaccauuagcuuuugugaucugguuaagaa

SEQ ID NO: 20672 - RNA, 32 nt, Human
aacaccauucugagaacuguugauuuagagag

SEQ ID NO: 20673 - RNA, 23 nt, Human
aacaccauugaugccugccagug

SEQ ID NO: 20674 - RNA, 32 nt, Human
aacaccauugcuuggcguauccuugaggaccu

SEQ ID NO: 20675 - RNA, 32 nt, Human
aacacccaaggucggauucuggggccccugcc

SEQ ID NO: 20676 - RNA, 32 nt, Human
aacacccaccucuccauccaaggcuggucagg

SEQ ID NO: 20677 - RNA, 32 nt, Human
aacacccacgcugguuucugugcaguguuagg

SEQ ID NO: 20678 - RNA, 23 nt, Human
aacacccagaaacucacuucuca

SEQ ID NO: 20679 - RNA, 20 nt, Human
aacacccagcaaccugagca

SEQ ID NO: 20680 - RNA, 22 nt, Human
aacacccagcaggaggcccuca

SEQ ID NO: 20681 - RNA, 32 nt, Human
aacacccagggcgcugccugacuugccgucca

SEQ ID NO: 20682 - RNA, 32 nt, Human
aacacccauccacgcaccaccuccaggacgag

SEQ ID NO: 20683 - RNA, 32 nt, Human
aacaccccaaguguccgggaacaaaggcaagu

SEQ ID NO: 20684 - RNA, 32 nt, Human
aacaccccagaagaauucuagcagugaucucu

SEQ ID NO: 20685 - RNA, 32 nt, Human
aacaccccagcugccaucaccaagccaacucg

SEQ ID NO: 20686 - RNA, 20 nt, Human
aacacccccaggaggccaag

SEQ ID NO: 20687 - RNA, 32 nt, Human
aacacccccaggagucccuucuaggcuugcga

SEQ ID NO: 20688 - RNA, 32 nt, Human
aacaccccucaagcucuacgccagcuucuguu

SEQ ID NO: 20689 - RNA, 32 nt, Human
aacaccccugaugguggugcuguccauuaaca

SEQ ID NO: 20690 - RNA, 32 nt, Human
aacaccccugggaacggacucgcgucuccgca

SEQ ID NO: 20691 - RNA, 21 nt, Human
aacacccgagguuccagggca

SEQ ID NO: 20692 - RNA, 32 nt, Human
aacacccuaaagaucauuuucugucaguauau

SEQ ID NO: 20693 - RNA, 22 nt, Human
aacacccucaaccggcuccauc

SEQ ID NO: 20694 - RNA, 32 nt, Human
aacacccucaaccggcuccaucacauccucag

SEQ ID NO: 20695 - RNA, 32 nt, Human
aacacccucacagacacacucaggaucaaugc

SEQ ID NO: 20696 - RNA, 32 nt, Human
aacacccucccuuuuuccugacaguucuuuca

SEQ ID NO: 20697 - RNA, 32 nt, Human
aacacccuccuggaggaugcuggugagaggca

SEQ ID NO: 20698 - RNA, 32 nt, Human
aacacccucuucacccuccacgccacccccua

SEQ ID NO: 20699 - RNA, 32 nt, Human
aacacccugagugcccugaaaacugcuuuugc

SEQ ID NO: 20700 - RNA, 32 nt, Human
aacacccugcacuccugcuugcgccggcagcu

SEQ ID NO: 20701 - RNA, 32 nt, Human
aacacccugcucucauguccauaagauucagg

SEQ ID NO: 20702 - RNA, 32 nt, Human
aacacccuggcuucucuuuggcacaucagccc

SEQ ID NO: 20703 - RNA, 32 nt, Human
aacacccugggcagcuacaagugcagcuguga

SEQ ID NO: 20704 - RNA, 32 nt, Human
aacacccuugcagcuaaucagguagcccuugu

SEQ ID NO: 20705 - RNA, 32 nt, Human
aacaccgaaauucagauagcucagggacugcu

SEQ ID NO: 20706 - RNA, 18 nt, Human
aacaccgacagcaaccaa

SEQ ID NO: 20707 - RNA, 32 nt, Human
aacaccgagaagacggcaggaggcagaaggcg

SEQ ID NO: 20708 - RNA, 32 nt, Human
aacaccgccccugccugugcucugccucgggc

SEQ ID NO: 20709 - RNA, 32 nt, Human
aacaccgccucccggguucaagcgauucuccu

SEQ ID NO: 20710 - RNA, 32 nt, Human
aacaccgccuuacagucaccucauguugcaga

SEQ ID NO: 20711 - RNA, 32 nt, Human
aacaccggucccuggggagacuugaaaggccc

SEQ ID NO: 20712 - RNA, 32 nt, Human
aacaccuagagcagugccugacauagcagaag

SEQ ID NO: 20713 - RNA, 32 nt, Human
aacaccuagaggagcuguggauucaagugaag

SEQ ID NO: 20714 - RNA, 32 nt, Human
aacaccucaccuuccagcccugccgccccugc

SEQ ID NO: 20715 - RNA, 32 nt, Human
aacaccucagggcaggaaggaggggcuucagg

SEQ ID NO: 20716 - RNA, 32 nt, Human
aacaccuccauugccucugccugcuuagucca

SEQ ID NO: 20717 - RNA, 32 nt, Human
aacaccucccaagaaagauaggggaagaagcc

SEQ ID NO: 20718 - RNA, 19 nt, Human
aacaccucccaggagacag

SEQ ID NO: 20719 - RNA, 32 nt, Human
aacaccucccuggucacauccauggaaucaga

SEQ ID NO: 20720 - RNA, 32 nt, Human
aacaccucuaucucccuugggaauaagcacau

SEQ ID NO: 20721 - RNA, 32 nt, Human
aacaccucucucuccccugcacuagcuguccc

SEQ ID NO: 20722 - RNA, 32 nt, Human
aacaccucugcagugccugcuucuuaccuggc

SEQ ID NO: 20723 - RNA, 32 nt, Human
aacaccucuguaagaaccaaaaagcaagugug

SEQ ID NO: 20724 - RNA, 32 nt, Human
aacaccucuuugucccuucacugucagcuguu

SEQ ID NO: 20725 - RNA, 32 nt, Human
aacaccugagcccaggagguggagguugcacu

SEQ ID NO: 20726 - RNA, 21 nt, Human
aacaccugcacccaugagccc

SEQ ID NO: 20727 - RNA, 32 nt, Human
aacaccugccccagccccaccaugcucauggc

SEQ ID NO: 20728 - RNA, 23 nt, Human
aacaccugccgcgcucugagccc

SEQ ID NO: 20729 - RNA, 32 nt, Human
aacaccugcucacaucuuacucaaaauuguag

SEQ ID NO: 20730 - RNA, 32 nt, Human
aacaccugcucacuggcuggguauucuucgua

SEQ ID NO: 20731 - RNA, 32 nt, Human
aacaccuggagauaaauccugaugauuccauu

SEQ ID NO: 20732 - RNA, 32 nt, Human
aacaccuggagcccuggucugggaguggccug

SEQ ID NO: 20733 - RNA, 17 nt, Human
aacaccuggaugauguu

SEQ ID NO: 20734 - RNA, 32 nt, Human
aacaccuggggguggucagugagggcccccuc

SEQ ID NO: 20735 - RNA, 32 nt, Human
aacaccuguaaucccagcuacuuggaaggcug

SEQ ID NO: 20736 - RNA, 32 nt, Human
aacaccuguagucccagcacucugggaggcgg

SEQ ID NO: 20737 - RNA, 32 nt, Human
aacaccuguagucccagcuuucucuggaagug

SEQ ID NO: 20738 - RNA, 32 nt, Human
aacaccuguguggaggugcaggcccguggccc

SEQ ID NO: 20739 - RNA, 32 nt, Human
aacaccuuaaagacuucugucauuuuaaacau

SEQ ID NO: 20740 - RNA, 32 nt, Human
aacaccuuagggucuuagacucugcugauacu

SEQ ID NO: 20741 - RNA, 21 nt, Human
aacaccuucaccacuggggca

SEQ ID NO: 20742 - RNA, 32 nt, Human
aacacgaaaccugauuugccugugccaugugg

SEQ ID NO: 20743 - RNA, 21 nt, Human
aacacgaacauacagugcaca

SEQ ID NO: 20744 - RNA, 32 nt, Human
aacacgaaggcagaaguuggagugaugagucu

SEQ ID NO: 20745 - RNA, 32 nt, Human
aacacgaccaagcucaagacccuuccccugcc

SEQ ID NO: 20746 - RNA, 32 nt, Human
aacacgacuggguggagggggcggaggggaag

SEQ ID NO: 20747 - RNA, 32 nt, Human
aacacgacuuaaaaguggcuucagaggaaaag

SEQ ID NO: 20748 - RNA, 32 nt, Human
aacacgauguacauuuacaagcggccuuaugu

SEQ ID NO: 20749 - RNA, 32 nt, Human
aacacgcucucuucacagcaguaccuuagggu

SEQ ID NO: 20750 - RNA, 32 nt, Human
aacacggcagaaaggugacaccuggagaccaa

SEQ ID NO: 20751 - RNA, 32 nt, Human
aacacggcucacugcagccucaaccuccugga

SEQ ID NO: 20752 - RNA, 32 nt, Human
aacacggcucacugccgccucaaccucuccug

SEQ ID NO: 20753 - RNA, 32 nt, Human
aacacggcugaucuuucaguguuuccagcaac

SEQ ID NO: 20754 - RNA, 26 nt, Human
aacacgggaggcagagguugcaguga

SEQ ID NO: 20755 - RNA, 32 nt, Human
aacacgggaggcagagguugcagugagcagag

SEQ ID NO: 20756 - RNA, 32 nt, Human
aacacggggugagacagcaggaaggggcccug

SEQ ID NO: 20757 - RNA, 32 nt, Human
aacacggugaaaccugucucuacuaaaaauac

SEQ ID NO: 20758 - RNA, 32 nt, Human
aacacgguucucuccuagccucagcccccagc

SEQ ID NO: 20759 - RNA, 32 nt, Human
aacacgguucugacaguauuucaugacaaugg

SEQ ID NO: 20760 - RNA, 32 nt, Human
aacacgucuccucugcgcacuacguccuguuc

SEQ ID NO: 20761 - RNA, 32 nt, Human
aacacgucugcaagucaagaugucgcacccgu

SEQ ID NO: 20762 - RNA, 32 nt, Human
aacacgugccauccuucaacaccccaacccac

SEQ ID NO: 20763 - RNA, 32 nt, Human
aacacgugcucacccucacacucgccccggcc

SEQ ID NO: 20764 - RNA, 32 nt, Human
aacacguggugcuguuucuacuccaucaccau

SEQ ID NO: 20765 - RNA, 32 nt, Human
aacacgugucugcaguucuuuggcuuguguug

SEQ ID NO: 20766 - RNA, 32 nt, Human
aacacgugugugguuguguaaaccagaccccu

SEQ ID NO: 20767 - RNA, 32 nt, Human
aacacguuuucugccaugaggauuucucuuua

SEQ ID NO: 20768 - RNA, 32 nt, Human
aacacuaaaaagagcaggagcgagagaugaga

SEQ ID NO: 20769 - RNA, 32 nt, Human
aacacuaaaggaaaguuucuucaaagggcucu

SEQ ID NO: 20770 - RNA, 32 nt, Human
aacacuaaauucugucaccuccugucauuuua

SEQ ID NO: 20771 - RNA, 31 nt, Human
aacacuaagcucucugggccuggguuccagg

SEQ ID NO: 20772 - RNA, 32 nt, Human
aacacuaaggugaacuugcuucccuuuucacu

SEQ ID NO: 20773 - RNA, 32 nt, Human
aacacuacucaaagcaaaagugcugcagggcu

SEQ ID NO: 20774 - RNA, 32 nt, Human
aacacuacugcauuccagccugggugacagag

SEQ ID NO: 20775 - RNA, 32 nt, Human
aacacuacuuuagcuucucuccugaagccuua

SEQ ID NO: 20776 - RNA, 32 nt, Human
aacacuagaaauuuuucuguuccuucaaucua

SEQ ID NO: 20777 - RNA, 32 nt, Human
aacacuaucccuugggaguuguagcugcuguc

SEQ ID NO: 20778 - RNA, 32 nt, Human
aacacuaucuucuaccaggaggagguuaaugu

SEQ ID NO: 20779 - RNA, 32 nt, Human
aacacuaugugagaagucagccagcaggcucu

SEQ ID NO: 20780 - RNA, 22 nt, Human
aacacucaaaagcacuaggaca

SEQ ID NO: 20781 - RNA, 32 nt, Human
aacacucaacaaaaccaaucuacauguuuugg

SEQ ID NO: 20782 - RNA, 32 nt, Human
aacacucaacacagagauccagcucagaaaaa

SEQ ID NO: 20783 - RNA, 32 nt, Human
aacacucacaccaacagccagagcaaggcccg

SEQ ID NO: 20784 - RNA, 32 nt, Human
aacacucacugcacugguggcuguucauuuug

SEQ ID NO: 20785 - RNA, 32 nt, Human
aacacucagccaagccacucucagcuuccuga

SEQ ID NO: 20786 - RNA, 32 nt, Human
aacacucauaaauauacaaaacuuuuucagug

SEQ ID NO: 20787 - RNA, 32 nt, Human
aacacucaucaagacacccugccugcagggag

SEQ ID NO: 20788 - RNA, 32 nt, Human
aacacucaucuauugaugagugucaggagauu

SEQ ID NO: 20789 - RNA, 32 nt, Human
aacacucauuuuuaugcuguucccucuugggc

SEQ ID NO: 20790 - RNA, 32 nt, Human
aacacuccuucuuucagccccaccuccccagg

SEQ ID NO: 20791 - RNA, 32 nt, Human
aacacucuacauaugcuccaucuugcagaggc

SEQ ID NO: 20792 - RNA, 32 nt, Human
aacacucuagugagaauuacccugccaauuaa

SEQ ID NO: 20793 - RNA, 32 nt, Human
aacacucugggcaccuuccacugugaauguga

SEQ ID NO: 20794 - RNA, 32 nt, Human
aacacucuuaacuuucucuuuacccuuagcug

SEQ ID NO: 20795 - RNA, 32 nt, Human
aacacucuucagagaaaucugcauucuauuuc

SEQ ID NO: 20796 - RNA, 32 nt, Human
aacacugaagcuguuuugaacuuucaguaaug

SEQ ID NO: 20797 - RNA, 32 nt, Human
aacacugacagcugugccuagccccggaugcc

SEQ ID NO: 20798 - RNA, 25 nt, Human
aacacugaccuugcacuuguacaua

SEQ ID NO: 20799 - RNA, 32 nt, Human
aacacugaccuuggacuggauuugcagggcac

SEQ ID NO: 20800 - RNA, 32 nt, Human
aacacugaccuuuccgucccagaaggagggca

SEQ ID NO: 20801 - RNA, 32 nt, Human
aacacugagacuugggaagauacacaugcaaa

SEQ ID NO: 20802 - RNA, 20 nt, Human
aacacugcacccuccacagg

SEQ ID NO: 20803 - RNA, 32 nt, Human
aacacugcacuccagccugggugacagaguca

SEQ ID NO: 20804 - RNA, 32 nt, Human
aacacugcaggucccagaugucgagccacagu

SEQ ID NO: 20805 - RNA, 32 nt, Human
aacacugcagugagcuaugguggcaccacugc

SEQ ID NO: 20806 - RNA, 32 nt, Human
aacacugccacuccagccugggugacagagca

SEQ ID NO: 20807 - RNA, 32 nt, Human
aacacugccccaggcaauuaaauauuccaaag

SEQ ID NO: 20808 - RNA, 32 nt, Human
aacacugcccuucugugccugccuuaugugug

SEQ ID NO: 20809 - RNA, 32 nt, Human
aacacugccugcagcagucucuggguguguug

SEQ ID NO: 20810 - RNA, 32 nt, Human
aacacugcuaucucccaccucuaacacuggag

SEQ ID NO: 20811 - RNA, 32 nt, Human
aacacugcucacagccuuucugaggacaccag

SEQ ID NO: 20812 - RNA, 32 nt, Human
aacacugcucacugcagccucgaccucccaag

SEQ ID NO: 20813 - RNA, 32 nt, Human
aacacugcucucugcugcccucccauccuccc

SEQ ID NO: 20814 - RNA, 32 nt, Human
aacacugcucuucaugaugcugucuaugauaa

SEQ ID NO: 20815 - RNA, 32 nt, Human
aacacugcucuuccucaccugucacauaaagc

SEQ ID NO: 20816 - RNA, 24 nt, Human
aacacugcugaaaagaacccaaga

SEQ ID NO: 20817 - RNA, 32 nt, Human
aacacugcugcccccuuuccucccagacucug

SEQ ID NO: 20818 - RNA, 32 nt, Human
aacacugcugguuccuuauaagccacugugcu

SEQ ID NO: 20819 - RNA, 32 nt, Human
aacacugcugucgugugaagucacaguggccu

SEQ ID NO: 20820 - RNA, 32 nt, Human
aacacugcugugguggagaaacuggaccccag

SEQ ID NO: 20821 - RNA, 32 nt, Human
aacacuggcucucagcccugagacacaggccu

SEQ ID NO: 20822 - RNA, 32 nt, Human
aacacugggcagccucgccuuguugccaacgu

SEQ ID NO: 20823 - RNA, 32 nt, Human
aacacugggcuaaagacacagacccaggaagc

SEQ ID NO: 20824 - RNA, 32 nt, Human
aacacugggggagggggacggugaaggccaag

SEQ ID NO: 20825 - RNA, 32 nt, Human
aacacugguuacccaagagucaacacuuauua

SEQ ID NO: 20826 - RNA, 32 nt, Human
aacacuguaacuuucaguauuccccaguuagc

SEQ ID NO: 20827 - RNA, 32 nt, Human
aacacuguagaggaauuaccagcuggaaaccg

SEQ ID NO: 20828 - RNA, 32 nt, Human
aacacugucaucagcuugaggguccucagcca

SEQ ID NO: 20829 - RNA, 32 nt, Human
aacacuguccccuggcaguaccacagcaucau

SEQ ID NO: 20830 - RNA, 32 nt, Human
aacacuguuaaagacuccaaggcuccacucug

SEQ ID NO: 20831 - RNA, 32 nt, Human
aacacuguuaggacucucccuguuuaggcugg

SEQ ID NO: 20832 - RNA, 32 nt, Human
aacacuguucauguaacaguaacuccauagau

SEQ ID NO: 20833 - RNA, 32 nt, Human
aacacuguucucugcccuccaagaccuucucc

SEQ ID NO: 20834 - RNA, 32 nt, Human
aacacuguugcccaggcuggagugcagugacg

SEQ ID NO: 20835 - RNA, 32 nt, Human
aacacuguuguugccacaggguagaaucuaau

SEQ ID NO: 20836 - RNA, 22 nt, Human
aacacuuauucaccaucaggca

SEQ ID NO: 20837 - RNA, 32 nt, Human
aacacuucaucauccaccaccuccuggaggga

SEQ ID NO: 20838 - RNA, 32 nt, Human
aacacuucaucauccaccaccuccuggagggg

SEQ ID NO: 20839 - RNA, 32 nt, Human
aacacuucauucuucuuuagcaaguacaguca

SEQ ID NO: 20840 - RNA, 32 nt, Human
aacacuucccagagaggauucuagucugguaa

SEQ ID NO: 20841 - RNA, 32 nt, Human
aacacuuccugucucuggcuucauccuugggc

SEQ ID NO: 20842 - RNA, 32 nt, Human
aacacuucuccugccucagccucccagguagc

SEQ ID NO: 20843 - RNA, 24 nt, Human
aacacuugacuucaucuuaaugua

SEQ ID NO: 20844 - RNA, 32 nt, Human
aacacuugccuccccacugcagccugcggucc

SEQ ID NO: 20845 - RNA, 32 nt, Human
aacacuuggauguuaaggauucaccgaacacu

SEQ ID NO: 20846 - RNA, 24 nt, Human
aacacuugguagaaaucuuaagua

SEQ ID NO: 20847 - RNA, 32 nt, Human
aacacuugucggcugacuggugccucaagcgc

SEQ ID NO: 20848 - RNA, 32 nt, Human
aacacuugugagccaugcucagccuaugucau

SEQ ID NO: 20849 - RNA, 32 nt, Human
aacacuuguuauccaccagauaacagugguua

SEQ ID NO: 20850 - RNA, 32 nt, Human
aacacuuguuucugaaacuuuuuacagcaaac

SEQ ID NO: 20851 - RNA, 32 nt, Human
aacacuuuacaguucuggaggaggagguaaca

SEQ ID NO: 20852 - RNA, 32 nt, Human
aacacuuucugcucauaucauaaccaggucca

SEQ ID NO: 20853 - RNA, 32 nt, Human
aacacuuuguaaaggccaaccaaugcccacug

SEQ ID NO: 20854 - RNA, 32 nt, Human
aacacuuuucaguugcugaaggagaaaggagc

SEQ ID NO: 20855 - RNA, 32 nt, Human
aacacuuuugcugagggagaaaaagaaaacau

SEQ ID NO: 20856 - RNA, 32 nt, Human
aacagaaaauaacauuugaagacuccaaagua

SEQ ID NO: 20857 - RNA, 19 nt, Human
aacagaaaauuuugucuca

SEQ ID NO: 20858 - RNA, 32 nt, Human
aacagaaacauacugaacaugaaccucaccgu

SEQ ID NO: 20859 - RNA, 32 nt, Human
aacagaaacucauucaaaccagcucaggucag

SEQ ID NO: 20860 - RNA, 32 nt, Human
aacagaaagaaaauccuagaaaauacagagua

SEQ ID NO: 20861 - RNA, 32 nt, Human
aacagaaagaagggaaaagguacuaugugaua

SEQ ID NO: 20862 - RNA, 32 nt, Human
aacagaaagacagcaguggccagguggagagc

SEQ ID NO: 20863 - RNA, 32 nt, Human
aacagaaagagcccucaggaggcauccccacc

SEQ ID NO: 20864 - RNA, 32 nt, Human
aacagaaagaggaggaaacuguugccgagaaa

SEQ ID NO: 20865 - RNA, 32 nt, Human
aacagaaaggacacccucucuagguccccagg

SEQ ID NO: 20866 - RNA, 32 nt, Human
aacagaaaggauccccuuucuccaguuugugc

SEQ ID NO: 20867 - RNA, 32 nt, Human
aacagaaauauguauuuuaagcacucaugcaa

SEQ ID NO: 20868 - RNA, 32 nt, Human
aacagaacaaaagcaaaggaaaaugcuuuaga

SEQ ID NO: 20869 - RNA, 21 nt, Human
aacagaacaaggccuccaagg

SEQ ID NO: 20870 - RNA, 32 nt, Human
aacagaacacaaaagagcagagcaccuaagcc

SEQ ID NO: 20871 - RNA, 21 nt, Human
aacagaacagcaagagcagga

SEQ ID NO: 20872 - RNA, 22 nt, Human
aacagaacagcuuucaccaaag

SEQ ID NO: 20873 - RNA, 32 nt, Human
aacagaacaggguggagugaguggaaagcaaa

SEQ ID NO: 20874 - RNA, 32 nt, Human
aacagaacagguaauuuacuccugccugcaga

SEQ ID NO: 20875 - RNA, 32 nt, Human
aacagaacaucauuagaacaaaggacagagua

SEQ ID NO: 20876 - RNA, 32 nt, Human
aacagaaccaauaacauaaguauucaaaguua

SEQ ID NO: 20877 - RNA, 32 nt, Human
aacagaaccaguaucugucauggaacugaaca

SEQ ID NO: 20878 - RNA, 32 nt, Human
aacagaacgcucacaccagcaggaugcuccaa

SEQ ID NO: 20879 - RNA, 32 nt, Human
aacagaacugaacuuagccuucccagggaagg

SEQ ID NO: 20880 - RNA, 32 nt, Human
aacagaacugcaacaugccacacacaccgugg

SEQ ID NO: 20881 - RNA, 21 nt, Human
aacagaacugccaagcccaga

SEQ ID NO: 20882 - RNA, 32 nt, Human
aacagaacuuccaagaccucacagagaaauuc

SEQ ID NO: 20883 - RNA, 32 nt, Human
aacagaacuuccccucucccaugcacccacug

SEQ ID NO: 20884 - RNA, 32 nt, Human
aacagaagaagugguauuugcuggcgaguuaa

SEQ ID NO: 20885 - RNA, 32 nt, Human
aacagaagaccaggagaaaaagucaaaaagaa

SEQ ID NO: 20886 - RNA, 32 nt, Human
aacagaagagucuuguuccaacagaaacuccg

SEQ ID NO: 20887 - RNA, 32 nt, Human
aacagaagagucuuguuccaacagaaacucug

SEQ ID NO: 20888 - RNA, 32 nt, Human
aacagaaggacagauggacccaggagggaggg

SEQ ID NO: 20889 - RNA, 25 nt, Human
aacagaaggagguggugcucucggg

SEQ ID NO: 20890 - RNA, 32 nt, Human
aacagaagugccugggacgcccagauccugcu

SEQ ID NO: 20891 - RNA, 32 nt, Human
aacagaagugcugaggggucgcaggcaggucu

SEQ ID NO: 20892 - RNA, 22 nt, Human
aacagaauaccuucuuccuugc

SEQ ID NO: 20893 - RNA, 32 nt, Human
aacagaauagagaacucagaaauaaguccgug

SEQ ID NO: 20894 - RNA, 32 nt, Human
aacagaauaucaacugcagaaaaugcuucaca

SEQ ID NO: 20895 - RNA, 32 nt, Human
aacagaaucacucacacauacaaguacacuca

SEQ ID NO: 20896 - RNA, 32 nt, Human
aacagaauccaauuuccuuccuucccuccaca

SEQ ID NO: 20897 - RNA, 32 nt, Human
aacagaauccuucugcauuguucuuguaccac

SEQ ID NO: 20898 - RNA, 32 nt, Human
aacagaaucgcguuuggcugugcuggaugugu

SEQ ID NO: 20899 - RNA, 32 nt, Human
aacagaaucuugcucugucucccaggcuggag

SEQ ID NO: 20900 - RNA, 20 nt, Human
aacagaaugccaacccaaag

SEQ ID NO: 20901 - RNA, 32 nt, Human
aacagaauguucagaaacagacuugcacaugu

SEQ ID NO: 20902 - RNA, 32 nt, Human
aacagaauugucccugugaaaucuuuuuaugg

SEQ ID NO: 20903 - RNA, 22 nt, Human
aacagacaaaaacagccucaca

SEQ ID NO: 20904 - RNA, 32 nt, Human
aacagacaaacaagaaaacaaaccacauacuu

SEQ ID NO: 20905 - RNA, 22 nt, Human
aacagacaaacuguuuuccaca

SEQ ID NO: 20906 - RNA, 32 nt, Human
aacagacaagggcaaucuugguauuuaaaucu

SEQ ID NO: 20907 - RNA, 32 nt, Human
aacagacaaugcaggggcagggugugguuugg

SEQ ID NO: 20908 - RNA, 32 nt, Human
aacagacacaaugggaccugggcgggcguuac

SEQ ID NO: 20909 - RNA, 32 nt, Human
aacagacacacagaccaguggaagagaauaca

SEQ ID NO: 20910 - RNA, 32 nt, Human
aacagacacagcaacaaucucaccauuuauau

SEQ ID NO: 20911 - RNA, 32 nt, Human
aacagacacagccgccagcccaaacagcagcg

SEQ ID NO: 20912 - RNA, 32 nt, Human
aacagacauaugccaccaauuguaugauuaau

SEQ ID NO: 20913 - RNA, 32 nt, Human
aacagacauucaggccaggcacggugacucac

SEQ ID NO: 20914 - RNA, 22 nt, Human
aacagacauuucuuccuucaug

SEQ ID NO: 20915 - RNA, 32 nt, Human
aacagacauuuuccacucguguuuccauaguu

SEQ ID NO: 20916 - RNA, 32 nt, Human
aacagaccaacauuuuucucuuccucaagcaa

SEQ ID NO: 20917 - RNA, 32 nt, Human
aacagaccaagaguaccuucauuuaauuuagc

SEQ ID NO: 20918 - RNA, 32 nt, Human
aacagaccaauuaacauacuuauuugcagaag

SEQ ID NO: 20919 - RNA, 32 nt, Human
aacagacccaggugcaaaaccccacaucccaa

SEQ ID NO: 20920 - RNA, 32 nt, Human
aacagacccccucuagaaauuuuucagaugcu

SEQ ID NO: 20921 - RNA, 32 nt, Human
aacagacccuccuggagcuguccaaaggaaag

SEQ ID NO: 20922 - RNA, 32 nt, Human
aacagaccucucuccagcccugagauguccau

SEQ ID NO: 20923 - RNA, 32 nt, Human
aacagaccugagccacuuuucccagccuguuu

SEQ ID NO: 20924 - RNA, 32 nt, Human
aacagacgggcgccaccaaagccaggcccuga

SEQ ID NO: 20925 - RNA, 32 nt, Human
aacagacguacaauuugagagaaggacucgau

SEQ ID NO: 20926 - RNA, 32 nt, Human
aacagacgucugggaguguggugacaccugcg

SEQ ID NO: 20927 - RNA, 32 nt, Human
aacagacgugagccauuuucccagccuguuuu

SEQ ID NO: 20928 - RNA, 32 nt, Human
aacagacuaaaaucuuucucucuagucuuucu

SEQ ID NO: 20929 - RNA, 32 nt, Human
aacagacucaaggagacaaccaccucaacugg

SEQ ID NO: 20930 - RNA, 32 nt, Human
aacagacuccuaaaaggaggguuucuuuccug

SEQ ID NO: 20931 - RNA, 32 nt, Human
aacagacucuuucucacuucugcuccagagcc

SEQ ID NO: 20932 - RNA, 32 nt, Human
aacagacuuauuccuggagacagcauuugagg

SEQ ID NO: 20933 - RNA, 32 nt, Human
aacagacuucacuucccugaaugccuccccca

SEQ ID NO: 20934 - RNA, 32 nt, Human
aacagacuuccaacugggaaacuuuuuggggg

SEQ ID NO: 20935 - RNA, 32 nt, Human
aacagacuucugcugcugaaugugcccugaug

SEQ ID NO: 20936 - RNA, 32 nt, Human
aacagagaaguaacaggaaacaccuaacgcaa

SEQ ID NO: 20937 - RNA, 32 nt, Human
aacagagagaauucgagguugccugaaagcug

SEQ ID NO: 20938 - RNA, 32 nt, Human
aacagagaggauggagguuuggggcgaauguc

SEQ ID NO: 20939 - RNA, 23 nt, Human
aacagagauaguggacuacgcug

SEQ ID NO: 20940 - RNA, 32 nt, Human
aacagagaucgcgccacugaacucgggucugg

SEQ ID NO: 20941 - RNA, 32 nt, Human
aacagagaucuugggacauuuauuuguuuuaa

SEQ ID NO: 20942 - RNA, 22 nt, Human
aacagagcaaaacucugucuca

SEQ ID NO: 20943 - RNA, 19 nt, Human
aacagagcaggcgcaggua

SEQ ID NO: 20944 - RNA, 22 nt, Human
aacagagccagacucugucuca

SEQ ID NO: 20945 - RNA, 32 nt, Human
aacagagccagaucagaacccagguaagcucg

SEQ ID NO: 20946 - RNA, 32 nt, Human
aacagagccauauuucucuucuuucaaaagca

SEQ ID NO: 20947 - RNA, 32 nt, Human
aacagagcccaggagccagggaggaaaagcag

SEQ ID NO: 20948 - RNA, 20 nt, Human
aacagagccucacucuguca

SEQ ID NO: 20949 - RNA, 32 nt, Human
aacagagccugcugccccuggcugucuuccug

SEQ ID NO: 20950 - RNA, 32 nt, Human
aacagagcuccugcugcuucugggugaaccug

SEQ ID NO: 20951 - RNA, 32 nt, Human
aacagaggccaggagccagggaggaaaagcag

SEQ ID NO: 20952 - RNA, 32 nt, Human
aacagaggcccagagagaucagauaauauugc

SEQ ID NO: 20953 - RNA, 32 nt, Human
aacagaggcccaggguggagaccuaagcgggu

SEQ ID NO: 20954 - RNA, 32 nt, Human
aacagaggcuaagaaaggagaauaaacuuguc

SEQ ID NO: 20955 - RNA, 32 nt, Human
aacagaggcuuuuggccuuugaaaauccauga

SEQ ID NO: 20956 - RNA, 32 nt, Human
aacagagggaggcaggugggaauugaggguga

SEQ ID NO: 20957 - RNA, 32 nt, Human
aacagagggcaggcuaauugggugaucaaagg

SEQ ID NO: 20958 - RNA, 32 nt, Human
aacagaggggaagggagcucuuucuuacauuu

SEQ ID NO: 20959 - RNA, 32 nt, Human
aacagaggguccccauucagcagguucaucca

SEQ ID NO: 20960 - RNA, 32 nt, Human
aacagagguuugcggcagaaguggccaauguc

SEQ ID NO: 20961 - RNA, 32 nt, Human
aacagaguacccacugggucacugccuagugg

SEQ ID NO: 20962 - RNA, 32 nt, Human
aacagagugaaaccugucccuguuuuccugcu

SEQ ID NO: 20963 - RNA, 32 nt, Human
aacagagugaugaggcuucaguugaguacuug

SEQ ID NO: 20964 - RNA, 32 nt, Human
aacagauaaucaggccaggcucaguggcucau

SEQ ID NO: 20965 - RNA, 32 nt, Human
aacagauacaaagauaacaaaagcuuuacaag

SEQ ID NO: 20966 - RNA, 32 nt, Human
aacagauaccauuggaccaacagaaaccucaa

SEQ ID NO: 20967 - RNA, 32 nt, Human
aacagauagaggacaggaaagaggagagaaag

SEQ ID NO: 20968 - RNA, 22 nt, Human
aacagauauuuauugaaaauga

SEQ ID NO: 20969 - RNA, 32 nt, Human
aacagaucucugagaaggugcaucagcugcuu

SEQ ID NO: 20970 - RNA, 32 nt, Human
aacagaucuguuuuucacuuauccugauuuaa

SEQ ID NO: 20971 - RNA, 32 nt, Human
aacagaugaagacagaugcaccaacgaggcug

SEQ ID NO: 20972 - RNA, 32 nt, Human
aacagaugaauaugcaccuucuccagaguuau

SEQ ID NO: 20973 - RNA, 21 nt, Human
aacagaugcuacucaggggcu

SEQ ID NO: 20974 - RNA, 32 nt, Human
aacagauggcacuuugaaggggccucaccgag

SEQ ID NO: 20975 - RNA, 32 nt, Human
aacagaugggcugggcugggcugugguggggu

SEQ ID NO: 20976 - RNA, 32 nt, Human
aacagauggugcuuccucaucaaauuguguga

SEQ ID NO: 20977 - RNA, 23 nt, Human
aacagauguaaagacuucaguga

SEQ ID NO: 20978 - RNA, 32 nt, Human
aacagauguacugucuuucauguggccucaca

SEQ ID NO: 20979 - RNA, 32 nt, Human
aacagaugugagaagcccaguacuggagcuaa

SEQ ID NO: 20980 - RNA, 32 nt, Human
aacagaugugagagcccagauucgucugcaau

SEQ ID NO: 20981 - RNA, 32 nt, Human
aacagaugugagccacuuuucucagccuguuu

SEQ ID NO: 20982 - RNA, 22 nt, Human
aacagauguuauguaagaaugu

SEQ ID NO: 20983 - RNA, 32 nt, Human
aacagauguuuaggagauuuccuguauagcag

SEQ ID NO: 20984 - RNA, 32 nt, Human
aacagauuaaacugauugaagugcaaagcaac

SEQ ID NO: 20985 - RNA, 32 nt, Human
aacagauucaauuuccugagguggugaggaga

SEQ ID NO: 20986 - RNA, 32 nt, Human
aacagauucaugggugauuuagccuaucuguc

SEQ ID NO: 20987 - RNA, 32 nt, Human
aacagauuccagacgccgggaacucacgccuc

SEQ ID NO: 20988 - RNA, 32 nt, Human
aacagauucuacauauuuuuccuuccaaugca

SEQ ID NO: 20989 - RNA, 32 nt, Human
aacagauugcagccuucuucgcugagucucug

SEQ ID NO: 20990 - RNA, 32 nt, Human
aacagauuguucuacagaugaaucuguaagcc

SEQ ID NO: 20991 - RNA, 32 nt, Human
aacagauuuacacucagagccuggucgccccc

SEQ ID NO: 20992 - RNA, 32 nt, Human
aacagauuuuaacucugaaaagccauuuccag

SEQ ID NO: 20993 - RNA, 32 nt, Human
aacagauuuugccuccccgaucagugugugcc

SEQ ID NO: 20994 - RNA, 32 nt, Human
aacagcaaaggccauaaccuuuugggauuuuu

SEQ ID NO: 20995 - RNA, 32 nt, Human
aacagcaaaggugguggccugccccucucucu

SEQ ID NO: 20996 - RNA, 32 nt, Human
aacagcaaagucagcauuugcuguauagagcu

SEQ ID NO: 20997 - RNA, 32 nt, Human
aacagcaaauauccccagcccuugaagucacc

SEQ ID NO: 20998 - RNA, 32 nt, Human
aacagcaaaugagaaaaguggacuggggaaug

SEQ ID NO: 20999 - RNA, 32 nt, Human
aacagcaacaacaaagacagacuuuccguagc

SEQ ID NO: 21000 - RNA, 32 nt, Human
aacagcaacucucagcuugcuucaagaaccag

SEQ ID NO: 21001 - RNA, 32 nt, Human
aacagcaagcagagucaugguccuaaacucug

SEQ ID NO: 21002 - RNA, 32 nt, Human
aacagcaaucagugagaaagaugggauucuuu

SEQ ID NO: 21003 - RNA, 32 nt, Human
aacagcaaucuaaguacagaaaagcucuuugu

SEQ ID NO: 21004 - RNA, 32 nt, Human
aacagcaaucuaaguacagaaaagcuuuuugu

SEQ ID NO: 21005 - RNA, 32 nt, Human
aacagcaauuccaggcucaguauugugaccgc

SEQ ID NO: 21006 - RNA, 32 nt, Human
aacagcacaagaaagaccugcccccauaauuc

SEQ ID NO: 21007 - RNA, 32 nt, Human
aacagcaccaagccauucaugggggaaucugc

SEQ ID NO: 21008 - RNA, 32 nt, Human
aacagcaccacauaacgcacacaaagauacuc

SEQ ID NO: 21009 - RNA, 32 nt, Human
aacagcacccuugagcaaugcacacuuauccc

SEQ ID NO: 21010 - RNA, 21 nt, Human
aacagcaccucccaccaacca

SEQ ID NO: 21011 - RNA, 32 nt, Human
aacagcaccugccacacacagugacugugcag

SEQ ID NO: 21012 - RNA, 32 nt, Human
aacagcaccuugccugaacaugacuuuaaaga

SEQ ID NO: 21013 - RNA, 23 nt, Human
aacagcacguccccggccgugug

SEQ ID NO: 21014 - RNA, 32 nt, Human
aacagcacucccaggaugcaguuugugucaac

SEQ ID NO: 21015 - RNA, 22 nt, Human
aacagcagaaucggcuuugcag

SEQ ID NO: 21016 - RNA, 32 nt, Human
aacagcagacugaggcccccacccugaaaaag

SEQ ID NO: 21017 - RNA, 32 nt, Human
aacagcagagagauuuguccccuggcuugggc

SEQ ID NO: 21018 - RNA, 32 nt, Human
aacagcagagguggaggcaagcagugacuccu

SEQ ID NO: 21019 - RNA, 32 nt, Human
aacagcagauuaaucauagaaaauguugcuuc

SEQ ID NO: 21020 - RNA, 32 nt, Human
aacagcagcacugagcucccacccgcagagcc

SEQ ID NO: 21021 - RNA, 32 nt, Human
aacagcagcagagggaggugggggagagggaa

SEQ ID NO: 21022 - RNA, 18 nt, Human
aacagcagcagcagcugc

SEQ ID NO: 21023 - RNA, 32 nt, Human
aacagcagcagcccugucagccuggaugcagc

SEQ ID NO: 21024 - RNA, 32 nt, Human
aacagcagcaggacagggcacggagggagcga

SEQ ID NO: 21025 - RNA, 32 nt, Human
aacagcagcagugccauagccaggcucucugc

SEQ ID NO: 21026 - RNA, 22 nt, Human
aacagcagcaguuaggagagga

SEQ ID NO: 21027 - RNA, 32 nt, Human
aacagcagcaugagccucaggugcuuugggga

SEQ ID NO: 21028 - RNA, 32 nt, Human
aacagcagccucagcuucugaagugcaugaaa

SEQ ID NO: 21029 - RNA, 32 nt, Human
aacagcagcgcaaccucugcucccugccucgc

SEQ ID NO: 21030 - RNA, 32 nt, Human
aacagcagcucuuuaaguguuugcauuuucua

SEQ ID NO: 21031 - RNA, 32 nt, Human
aacagcagcugcagcaguugaaguggcuucua

SEQ ID NO: 21032 - RNA, 32 nt, Human
aacagcagcuguucccagcgccagaggacccc

SEQ ID NO: 21033 - RNA, 32 nt, Human
aacagcaggaaucacgagaaaguuguguuuug

SEQ ID NO: 21034 - RNA, 32 nt, Human
aacagcaggaauuggagguuucgauaugaacu

SEQ ID NO: 21035 - RNA, 32 nt, Human
aacagcaggaccuaacacuggagcucagaagg

SEQ ID NO: 21036 - RNA, 32 nt, Human
aacagcaggccuggccagcccaaaggacucuc

SEQ ID NO: 21037 - RNA, 32 nt, Human
aacagcagguauaagagguugggguggcugua

SEQ ID NO: 21038 - RNA, 32 nt, Human
aacagcagucauacccaaaucauuugcacuuu

SEQ ID NO: 21039 - RNA, 32 nt, Human
aacagcagugagccagaggagcacaggcgggc

SEQ ID NO: 21040 - RNA, 32 nt, Human
aacagcagugccucugcaggcaccaagagagc

SEQ ID NO: 21041 - RNA, 32 nt, Human
aacagcagugccugcgucccgcuccacggagu

SEQ ID NO: 21042 - RNA, 32 nt, Human
aacagcaguggacgauguugugcaauauccau

SEQ ID NO: 21043 - RNA, 32 nt, Human
aacagcaguucagaaaccucaaagagaaaugu

SEQ ID NO: 21044 - RNA, 32 nt, Human
aacagcaucuuucuuuccccaucuuucuauuu

SEQ ID NO: 21045 - RNA, 32 nt, Human
aacagcaugcugcugcucaaaaugccacagcc

SEQ ID NO: 21046 - RNA, 31 nt, Human
aacagcauggaggagaaugaccccaagccug

SEQ ID NO: 21047 - RNA, 32 nt, Human
aacagcauggaggcagauguggggcugagcug

SEQ ID NO: 21048 - RNA, 32 nt, Human
aacagcauugccugugcucuccucucaggggc

SEQ ID NO: 21049 - RNA, 32 nt, Human
aacagcauuguaauccauucucuugcaccuuc

SEQ ID NO: 21050 - RNA, 31 nt, Human
aacagccaaauaaaaacuagacaacuuucaa

SEQ ID NO: 21051 - RNA, 19 nt, Human
aacagccaagagagcaggg

SEQ ID NO: 21052 - RNA, 32 nt, Human
aacagccaagggaggacuagucuggagcacgc

SEQ ID NO: 21053 - RNA, 32 nt, Human
aacagccaauacuagauagcacugccugugug

SEQ ID NO: 21054 - RNA, 32 nt, Human
aacagccaauuagucuggcauggugguuugcg

SEQ ID NO: 21055 - RNA, 32 nt, Human
aacagccacaccccuccuccaguccuucuccu

SEQ ID NO: 21056 - RNA, 32 nt, Human
aacagccacucccuuuuuggccuccaacuggg

SEQ ID NO: 21057 - RNA, 32 nt, Human
aacagccacugagauccuccagccuggacaug

SEQ ID NO: 21058 - RNA, 32 nt, Human
aacagccagauccugaauguucuauguucacc

SEQ ID NO: 21059 - RNA, 32 nt, Human
aacagccagcacucuucuccuagccgcucacu

SEQ ID NO: 21060 - RNA, 32 nt, Human
aacagccagccuggccaccaguuguaccuuac

SEQ ID NO: 21061 - RNA, 32 nt, Human
aacagccagggaggacaagcagggcugggccu

SEQ ID NO: 21062 - RNA, 32 nt, Human
aacagccaggugaaagcuaaaucuugugugag

SEQ ID NO: 21063 - RNA, 32 nt, Human
aacagccaguguccucagauggugcuggaucu

SEQ ID NO: 21064 - RNA, 32 nt, Human
aacagccaguguguguuucccaucucuuguag

SEQ ID NO: 21065 - RNA, 25 nt, Human
aacagccaucagagaauacuauaaa

SEQ ID NO: 21066 - RNA, 32 nt, Human
aacagccaucauccaacauuauugagauuguc

SEQ ID NO: 21067 - RNA, 32 nt, Human
aacagccaugaucuucuguccucugggucccc

SEQ ID NO: 21068 - RNA, 32 nt, Human
aacagccauguaacacaugagcaccugaguug

SEQ ID NO: 21069 - RNA, 32 nt, Human
aacagccauuacuaaucucugcacuggucauu

SEQ ID NO: 21070 - RNA, 32 nt, Human
aacagccauugcacuccagccugggcaacaga

SEQ ID NO: 21071 - RNA, 32 nt, Human
aacagcccagagccccaggugccuggccuggc

SEQ ID NO: 21072 - RNA, 32 nt, Human
aacagcccaucuccugucuaugaagaaagacc

SEQ ID NO: 21073 - RNA, 32 nt, Human
aacagccccacugcaagccugggauauccaga

SEQ ID NO: 21074 - RNA, 32 nt, Human
aacagccccagagccugggcucugcuggacuu

SEQ ID NO: 21075 - RNA, 32 nt, Human
aacagcccccacuccuccuccugaguuccagg

SEQ ID NO: 21076 - RNA, 32 nt, Human
aacagcccuccucugcacucccaccugacaca

SEQ ID NO: 21077 - RNA, 32 nt, Human
aacagccuagaugacucagugggauuggggca

SEQ ID NO: 21078 - RNA, 24 nt, Human
aacagccucaccuuggcugauaga

SEQ ID NO: 21079 - RNA, 23 nt, Human
aacagccuccaauaccacaaccu

SEQ ID NO: 21080 - RNA, 22 nt, Human
aacagccucccaaaaggacaga

SEQ ID NO: 21081 - RNA, 21 nt, Human
aacagccuccggccagcagcc

SEQ ID NO: 21082 - RNA, 32 nt, Human
aacagccuccuuacuccagccuggcagggaag

SEQ ID NO: 21083 - RNA, 32 nt, Human
aacagccucugaaaagcacuuucuccauacau

SEQ ID NO: 21084 - RNA, 32 nt, Human
aacagccucugcgguguaaacagccucugcgg

SEQ ID NO: 21085 - RNA, 32 nt, Human
aacagccugcagcucacuccaugccacacggg

SEQ ID NO: 21086 - RNA, 32 nt, Human
aacagccuggacauggcaucagagauccacau

SEQ ID NO: 21087 - RNA, 32 nt, Human
aacagccuggccugcagaagagcccagaucca

SEQ ID NO: 21088 - RNA, 32 nt, Human
aacagccuggcuuuggaaaggaauuucauccu

SEQ ID NO: 21089 - RNA, 32 nt, Human
aacagccugucucagcuguacucucaugauac

SEQ ID NO: 21090 - RNA, 32 nt, Human
aacagccugugcaaaagcccagaggcugggaa

SEQ ID NO: 21091 - RNA, 20 nt, Human
aacagccuucacagcacacc

SEQ ID NO: 21092 - RNA, 32 nt, Human
aacagccuuuaagagcuggaagaugaaagcuc

SEQ ID NO: 21093 - RNA, 23 nt, Human
aacagccuuuagggaucacagcc

SEQ ID NO: 21094 - RNA, 32 nt, Human
aacagccuuucuggauuucucagaguccuaug

SEQ ID NO: 21095 - RNA, 32 nt, Human
aacagcgauugaccaguaacugugagaucaga

SEQ ID NO: 21096 - RNA, 32 nt, Human
aacagcgccugggaaucagcccuucucccuac

SEQ ID NO: 21097 - RNA, 32 nt, Human
aacagcgcucccaacaaugccaccuccaagac

SEQ ID NO: 21098 - RNA, 32 nt, Human
aacagcggcaaugccucuaucucugggaugca

SEQ ID NO: 21099 - RNA, 25 nt, Human
aacagcggcggcgacagcagcagga

SEQ ID NO: 21100 - RNA, 32 nt, Human
aacagcgggcuggggcagccacugcuuacacu

SEQ ID NO: 21101 - RNA, 31 nt, Human
aacagcggucccacaggcaggagggaucugg

SEQ ID NO: 21102 - RNA, 32 nt, Human
aacagcgguggcagggcaggggguggugggcc

SEQ ID NO: 21103 - RNA, 32 nt, Human
aacagcgucagagagaaagaacugacugaaac

SEQ ID NO: 21104 - RNA, 32 nt, Human
aacagcgucucuuccuggccaagagaagccug

SEQ ID NO: 21105 - RNA, 32 nt, Human
aacagcgucuuaccccagaagguucccuuggg

SEQ ID NO: 21106 - RNA, 18 nt, Human
aacagcuacaacgggaaa

SEQ ID NO: 21107 - RNA, 32 nt, Human
aacagcuagaaauuuuccucugugauauuuua

SEQ ID NO: 21108 - RNA, 32 nt, Human
aacagcuagauauccuggauauuguuugcacc

SEQ ID NO: 21109 - RNA, 22 nt, Human
aacagcuaguaagugguggagc

SEQ ID NO: 21110 - RNA, 32 nt, Human
aacagcuauauacauuuuguuccauuuuucug

SEQ ID NO: 21111 - RNA, 32 nt, Human
aacagcuaucugucugaauuacuucaggccuu

SEQ ID NO: 21112 - RNA, 32 nt, Human
aacagcucaaauguccaucaauagcagaaaga

SEQ ID NO: 21113 - RNA, 32 nt, Human
aacagcucaaucucuuaaaacacuuuucaaaa

SEQ ID NO: 21114 - RNA, 32 nt, Human
aacagcucacugcagucuugaacuccugggcu

SEQ ID NO: 21115 - RNA, 32 nt, Human
aacagcucaguucugucauccaggacauggcc

SEQ ID NO: 21116 - RNA, 32 nt, Human
aacagcucccuggcaggcaggcugugggcugg

SEQ ID NO: 21117 - RNA, 32 nt, Human
aacagcuccuaggaaaauguagacuuuugcuu

SEQ ID NO: 21118 - RNA, 32 nt, Human
aacagcucuggugacuaucauauccuuuucuu

SEQ ID NO: 21119 - RNA, 32 nt, Human
aacagcugacauuuuaaauuuugaugaaaucc

SEQ ID NO: 21120 - RNA, 32 nt, Human
aacagcugagucaagcuuggaggucccugaac

SEQ ID NO: 21121 - RNA, 31 nt, Human
aacagcugcauggcacauaccaaagcugcug

SEQ ID NO: 21122 - RNA, 32 nt, Human
aacagcugccuggucuucucucccagucugcc

SEQ ID NO: 21123 - RNA, 32 nt, Human
aacagcugcugcugcuucuccugcugcuggga

SEQ ID NO: 21124 - RNA, 20 nt, Human
aacagcugcuguuguguuuu

SEQ ID NO: 21125 - RNA, 32 nt, Human
aacagcugcuuugccauagacccaauacccau

SEQ ID NO: 21126 - RNA, 32 nt, Human
aacagcuggaacccggcagugaugugggaccu

SEQ ID NO: 21127 - RNA, 25 nt, Human
aacagcuggcagccaggaggcagga

SEQ ID NO: 21128 - RNA, 32 nt, Human
aacagcugggauuacaggcgugagccaccgcg

SEQ ID NO: 21129 - RNA, 32 nt, Human
aacagcugggcugcuggagucacagaggaaau

SEQ ID NO: 21130 - RNA, 32 nt, Human
aacagcugucauauguucauggucagauguca

SEQ ID NO: 21131 - RNA, 32 nt, Human
aacagcugugcuggacagucagacccggagcc

SEQ ID NO: 21132 - RNA, 32 nt, Human
aacagcugugugacccuagacgaguuccgcag

SEQ ID NO: 21133 - RNA, 32 nt, Human
aacagcuguugaagcucagagcuggaggugag

SEQ ID NO: 21134 - RNA, 32 nt, Human
aacagcuguugacucuaguacugugaauccag

SEQ ID NO: 21135 - RNA, 32 nt, Human
aacagcuuaaagauuugcaugugcagugugca

SEQ ID NO: 21136 - RNA, 32 nt, Human
aacagcuucagcuucagaaucggagcgaaaau

SEQ ID NO: 21137 - RNA, 32 nt, Human
aacagcuucugccucacuccuaagcucugacc

SEQ ID NO: 21138 - RNA, 32 nt, Human
aacagcuugggcccugcaaacacaaccaucua

SEQ ID NO: 21139 - RNA, 32 nt, Human
aacagcuuuggagauggcgguggagaaguuaa

SEQ ID NO: 21140 - RNA, 32 nt, Human
aacaggaaaagcaggauaaaugcuugauuuca

SEQ ID NO: 21141 - RNA, 32 nt, Human
aacaggaaacaugcuuuauuuuucaaaaccuu

SEQ ID NO: 21142 - RNA, 32 nt, Human
aacaggaaaccagccuaagacacuucagguug

SEQ ID NO: 21143 - RNA, 32 nt, Human
aacaggaaagagaguuacaccuugugggugug

SEQ ID NO: 21144 - RNA, 24 nt, Human
aacaggaaagcacccaucagcaaa

SEQ ID NO: 21145 - RNA, 32 nt, Human
aacaggaaaguuuccagauagguauuguauca

SEQ ID NO: 21146 - RNA, 32 nt, Human
aacaggaaauauuggcuuaucucuguaggaag

SEQ ID NO: 21147 - RNA, 23 nt, Human
aacaggaaauuaaacacugcaaa

SEQ ID NO: 21148 - RNA, 32 nt, Human
aacaggaaauuccucucagcucugccucagau

SEQ ID NO: 21149 - RNA, 32 nt, Human
aacaggaagaugcgggacaggugaggagcugg

SEQ ID NO: 21150 - RNA, 32 nt, Human
aacaggacacaggggucugauuugaagccccu

SEQ ID NO: 21151 - RNA, 32 nt, Human
aacaggacagagcacaucacacguauaggcag

SEQ ID NO: 21152 - RNA, 32 nt, Human
aacaggacaggaguuagaugcagagaagagau

SEQ ID NO: 21153 - RNA, 32 nt, Human
aacaggacauauguggccuugaagggaagaca

SEQ ID NO: 21154 - RNA, 32 nt, Human
aacaggacaucggggagaagccagcagccaug

SEQ ID NO: 21155 - RNA, 21 nt, Human
aacaggacauggggcuccugg

SEQ ID NO: 21156 - RNA, 32 nt, Human
aacaggaccagaaacaccucccuucuccaaca

SEQ ID NO: 21157 - RNA, 32 nt, Human
aacaggaccagaggaggacugaggggcacugg

SEQ ID NO: 21158 - RNA, 32 nt, Human
aacaggacccacugcugaugauggcuccaccu

SEQ ID NO: 21159 - RNA, 32 nt, Human
aacaggaccuaggcccugugcaauggcucaca

SEQ ID NO: 21160 - RNA, 32 nt, Human
aacaggacgagaugacgguguuauuccaaggg

SEQ ID NO: 21161 - RNA, 32 nt, Human
aacaggagaaggagggagagagccaaaugucu

SEQ ID NO: 21162 - RNA, 32 nt, Human
aacaggagagacaugccuguaguuacauccag

SEQ ID NO: 21163 - RNA, 18 nt, Human
aacaggagagaggcugcc

SEQ ID NO: 21164 - RNA, 32 nt, Human
aacaggagaggaagaggaggccuggacucucc

SEQ ID NO: 21165 - RNA, 32 nt, Human
aacaggagaggcggcaggaggagcaggagagg

SEQ ID NO: 21166 - RNA, 32 nt, Human
aacaggagaggcugcuggacaagggguaggag

SEQ ID NO: 21167 - RNA, 20 nt, Human
aacaggagaucaccacugcc

SEQ ID NO: 21168 - RNA, 32 nt, Human
aacaggagcaagagagaggcagcugggggcag

SEQ ID NO: 21169 - RNA, 32 nt, Human
aacaggagccagacaugacagggacuuggccc

SEQ ID NO: 21170 - RNA, 32 nt, Human
aacaggagccgaugccaaauggucuagaggca

SEQ ID NO: 21171 - RNA, 32 nt, Human
aacaggagccugaaggcugagcugcagaagcu

SEQ ID NO: 21172 - RNA, 32 nt, Human
aacaggagcugaguuuucugacuugaguuaac

SEQ ID NO: 21173 - RNA, 32 nt, Human
aacaggaggagaagaugcggaggcaggaggag

SEQ ID NO: 21174 - RNA, 32 nt, Human
aacaggagguggagguugcagugagccgagau

SEQ ID NO: 21175 - RNA, 32 nt, Human
aacaggauaaaaagauacccauugccuguguc

SEQ ID NO: 21176 - RNA, 32 nt, Human
aacaggauaaagccauuccuccuuccaccuag

SEQ ID NO: 21177 - RNA, 32 nt, Human
aacaggauaucugccaaagggugucugaugug

SEQ ID NO: 21178 - RNA, 32 nt, Human
aacaggaucuaugccuggaauccuggcaggga

SEQ ID NO: 21179 - RNA, 32 nt, Human
aacaggauuagggaaggacauaauguauuuaa

SEQ ID NO: 21180 - RNA, 32 nt, Human
aacaggauuucugcuccucuugagugggucuc

SEQ ID NO: 21181 - RNA, 32 nt, Human
aacaggcaaaccaaacagcacacuguagcuau

SEQ ID NO: 21182 - RNA, 32 nt, Human
aacaggcaacagcagccagcccucgcugucca

SEQ ID NO: 21183 - RNA, 18 nt, Human
aacaggcaacguguucuu

SEQ ID NO: 21184 - RNA, 32 nt, Human
aacaggcacagcccucccaucuucccaaugag

SEQ ID NO: 21185 - RNA, 19 nt, Human
aacaggcacauuagccuug

SEQ ID NO: 21186 - RNA, 32 nt, Human
aacaggcacccacugacuccagccucauggaa

SEQ ID NO: 21187 - RNA, 22 nt, Human
aacaggcaccuggccagaguga

SEQ ID NO: 21188 - RNA, 32 nt, Human
aacaggcaccuuugcagagagcaaagaaacgu

SEQ ID NO: 21189 - RNA, 32 nt, Human
aacaggcacggcuggcccaaugccuggucugg

SEQ ID NO: 21190 - RNA, 32 nt, Human
aacaggcacggcugguggugugcagugaacag

SEQ ID NO: 21191 - RNA, 32 nt, Human
aacaggcacucaauaaauauuuuugcuguaga

SEQ ID NO: 21192 - RNA, 23 nt, Human
aacaggcacuccaggcuuaguga

SEQ ID NO: 21193 - RNA, 24 nt, Human
aacaggcacuuggcagccuuguga

SEQ ID NO: 21194 - RNA, 32 nt, Human
aacaggcagaagaaaaggcagcuguggugugu

SEQ ID NO: 21195 - RNA, 32 nt, Human
aacaggcagacaagauuauggaagagaaaugu

SEQ ID NO: 21196 - RNA, 32 nt, Human
aacaggcaggagccagguugugcagugcugug

SEQ ID NO: 21197 - RNA, 20 nt, Human
aacaggcagggaguggagcu

SEQ ID NO: 21198 - RNA, 32 nt, Human
aacaggcagggugggcaguugggguucaggga

SEQ ID NO: 21199 - RNA, 21 nt, Human
aacaggcaguagaacuuaagu

SEQ ID NO: 21200 - RNA, 32 nt, Human
aacaggcaguggaagcaguuucagagaacuuu

SEQ ID NO: 21201 - RNA, 32 nt, Human
aacaggcaugacagaccagggugaggguugug

SEQ ID NO: 21202 - RNA, 32 nt, Human
aacaggcaugagccaccgcgccuggcuuuaaa

SEQ ID NO: 21203 - RNA, 32 nt, Human
aacaggcaugagccaccgugccuggcccucuc

SEQ ID NO: 21204 - RNA, 32 nt, Human
aacaggcaugagccacugugcccagccagagg

SEQ ID NO: 21205 - RNA, 32 nt, Human
aacaggcaugggaaaauggaaggguugaggau

SEQ ID NO: 21206 - RNA, 32 nt, Human
aacaggcauugcacuccgguugggggucccca

SEQ ID NO: 21207 - RNA, 32 nt, Human
aacaggccaccugagccucacacccagguuca

SEQ ID NO: 21208 - RNA, 32 nt, Human
aacaggccagccaggaggucaggaggccccag

SEQ ID NO: 21209 - RNA, 32 nt, Human
aacaggccaggacuugucucugugcugaaagc

SEQ ID NO: 21210 - RNA, 32 nt, Human
aacaggcccagucaagucaggggcaagcacau

SEQ ID NO: 21211 - RNA, 23 nt, Human
aacaggcccauucagggcugccu

SEQ ID NO: 21212 - RNA, 32 nt, Human
aacaggcccugaggugugguggcucaugccug

SEQ ID NO: 21213 - RNA, 32 nt, Human
aacaggccucagggcuccuugugggccugggc

SEQ ID NO: 21214 - RNA, 32 nt, Human
aacaggccuccccucccucucucggcaccagu

SEQ ID NO: 21215 - RNA, 21 nt, Human
aacaggccuccuaucuuuagu

SEQ ID NO: 21216 - RNA, 21 nt, Human
aacaggccugcagacucaagu

SEQ ID NO: 21217 - RNA, 32 nt, Human
aacaggcgugaagucaggagaauuugagcuuu

SEQ ID NO: 21218 - RNA, 32 nt, Human
aacaggcuacccaauguuacuacuuauuuuuc

SEQ ID NO: 21219 - RNA, 31 nt, Human
aacaggcucaauauuccugaaugaaauauca

SEQ ID NO: 21220 - RNA, 32 nt, Human
aacaggcuccuucgcccucuggcuccugguca

SEQ ID NO: 21221 - RNA, 32 nt, Human
aacaggcugagagaagaaaaaugacugcucca

SEQ ID NO: 21222 - RNA, 32 nt, Human
aacaggcugaggagguuccgaggcucaaagga

SEQ ID NO: 21223 - RNA, 32 nt, Human
aacaggcugcugcugccuccagcugcccacca

SEQ ID NO: 21224 - RNA, 32 nt, Human
aacaggcuggcgugguggcucacaccuguaau

SEQ ID NO: 21225 - RNA, 32 nt, Human
aacaggcugguguacagggagcaacaccggag

SEQ ID NO: 21226 - RNA, 32 nt, Human
aacaggcugucuagucagaugcagcuugaucu

SEQ ID NO: 21227 - RNA, 32 nt, Human
aacaggcuguucaccaccaucuccagcugauc

SEQ ID NO: 21228 - RNA, 32 nt, Human
aacaggcuucucuuggcaacagacucaugaca

SEQ ID NO: 21229 - RNA, 32 nt, Human
aacaggcuugaaucaaagaacuucuccuacug

SEQ ID NO: 21230 - RNA, 32 nt, Human
aacagggaaaagaaaaacacacacuaccugaa

SEQ ID NO: 21231 - RNA, 32 nt, Human
aacagggaacagcaaaccaaugcuauugugau

SEQ ID NO: 21232 - RNA, 32 nt, Human
aacagggaagcagagguugcggugaaccggga

SEQ ID NO: 21233 - RNA, 32 nt, Human
aacagggaagcaucuaggcugcuuguggaagu

SEQ ID NO: 21234 - RNA, 32 nt, Human
aacagggaccaggcugccccacggucccugaa

SEQ ID NO: 21235 - RNA, 32 nt, Human
aacagggacgaugauagcaccucccucagcgg

SEQ ID NO: 21236 - RNA, 32 nt, Human
aacagggagagggcuuucuggggcagggggag

SEQ ID NO: 21237 - RNA, 32 nt, Human
aacagggaggcagagguugcagugagccgaga

SEQ ID NO: 21238 - RNA, 32 nt, Human
aacagggaggggccucgcaggagcagcagcgg

SEQ ID NO: 21239 - RNA, 32 nt, Human
aacagggaucucacacccauguuacuugccau

SEQ ID NO: 21240 - RNA, 20 nt, Human
aacagggaugaggcucuugg

SEQ ID NO: 21241 - RNA, 22 nt, Human
aacagggcaagacucugucuca

SEQ ID NO: 21242 - RNA, 32 nt, Human
aacagggcagcaucgaccugcccacgcccuac

SEQ ID NO: 21243 - RNA, 32 nt, Human
aacagggcaggcagguaguaggcccagcuggg

SEQ ID NO: 21244 - RNA, 24 nt, Human
aacagggcaggggaaaaucuuagg

SEQ ID NO: 21245 - RNA, 32 nt, Human
aacagggccaauaucacucacuucacagguug

SEQ ID NO: 21246 - RNA, 32 nt, Human
aacagggccacagggauauaaaagcagcccug

SEQ ID NO: 21247 - RNA, 32 nt, Human
aacagggccaguggcacacaaggggccaguga

SEQ ID NO: 21248 - RNA, 32 nt, Human
aacagggcccucugcagcccagccuuuccuuc

SEQ ID NO: 21249 - RNA, 32 nt, Human
aacagggcugcugguuuccgcagccacugcuc

SEQ ID NO: 21250 - RNA, 32 nt, Human
aacagggcuggccuuggaaaaaccccaaaaca

SEQ ID NO: 21251 - RNA, 32 nt, Human
aacaggggagauggagguugcagugagcugag

SEQ ID NO: 21252 - RNA, 32 nt, Human
aacaggggaggcagagccagagggaggagaga

SEQ ID NO: 21253 - RNA, 32 nt, Human
aacaggggcuuagaggaaaguugaagauuaua

SEQ ID NO: 21254 - RNA, 32 nt, Human
aacagggggaagaaaaggaaaagggagcgcag

SEQ ID NO: 21255 - RNA, 32 nt, Human
aacagggggccuaauacuugccaagcccugug

SEQ ID NO: 21256 - RNA, 32 nt, Human
aacaggggugagugcucggaaaggaagggcgg

SEQ ID NO: 21257 - RNA, 32 nt, Human
aacagggguuacuggggaggcggcgucuggga

SEQ ID NO: 21258 - RNA, 32 nt, Human
aacagggguuugaggggaacauggggacuggg

SEQ ID NO: 21259 - RNA, 32 nt, Human
aacaggguaggcagaauauaaccaaauaccuc

SEQ ID NO: 21260 - RNA, 32 nt, Human
aacagggucaccaagcagacagggagcccgcg

SEQ ID NO: 21261 - RNA, 32 nt, Human
aacaggguuaacaucuguguuaggggagguca

SEQ ID NO: 21262 - RNA, 23 nt, Human
aacaggguuacaaauguguagua

SEQ ID NO: 21263 - RNA, 32 nt, Human
aacaggguuagucagcaaaauaaaaucaaccu

SEQ ID NO: 21264 - RNA, 32 nt, Human
aacagguaaguucggggagacuucaggccagg

SEQ ID NO: 21265 - RNA, 32 nt, Human
aacagguacggaauggcccuggaacauuucua

SEQ ID NO: 21266 - RNA, 32 nt, Human
aacagguaugaaccaccgcgcccagccuuuuu

SEQ ID NO: 21267 - RNA, 32 nt, Human
aacaggucagcccucagaucaccuggcccggg

SEQ ID NO: 21268 - RNA, 32 nt, Human
aacaggucauuucuacucuccccauauuccac

SEQ ID NO: 21269 - RNA, 32 nt, Human
aacagguccaggaguagauuccaugccuucag

SEQ ID NO: 21270 - RNA, 32 nt, Human
aacaggugaggaaagaaauaaauaagugauuc

SEQ ID NO: 21271 - RNA, 32 nt, Human
aacaggugauguccuaggugcugcagugaaca

SEQ ID NO: 21272 - RNA, 32 nt, Human
aacaggugcaggacugccagggaucggagugc

SEQ ID NO: 21273 - RNA, 32 nt, Human
aacaggugccagccaccaugcccagcuaauuu

SEQ ID NO: 21274 - RNA, 32 nt, Human
aacagguggcccaggacaugcuccugcauacu

SEQ ID NO: 21275 - RNA, 32 nt, Human
aacagguggcugcuguguggugccaucgaguc

SEQ ID NO: 21276 - RNA, 32 nt, Human
aacaggugggacuugccggccaugaagaggac

SEQ ID NO: 21277 - RNA, 32 nt, Human
aacaggugggcacuauccucugugcccucauu

SEQ ID NO: 21278 - RNA, 32 nt, Human
aacagguggucuucuaugcugcagagaaacua

SEQ ID NO: 21279 - RNA, 32 nt, Human
aacaggugguuugaguggaugucuccugcagg

SEQ ID NO: 21280 - RNA, 32 nt, Human
aacaggugugaacgaccaugcccacuuaauuu

SEQ ID NO: 21281 - RNA, 32 nt, Human
aacaggugugaccugauccugccccuuccuuc

SEQ ID NO: 21282 - RNA, 32 nt, Human
aacaggugugagccaccgcacccugccaaguu

SEQ ID NO: 21283 - RNA, 32 nt, Human
aacaggugugcaccaccaugcccugcuaauuu

SEQ ID NO: 21284 - RNA, 32 nt, Human
aacagguguggaccgcaggaucucagcacucu

SEQ ID NO: 21285 - RNA, 32 nt, Human
aacagguguggggacacagcagugaguaauca

SEQ ID NO: 21286 - RNA, 32 nt, Human
aacaggugugugugaacugggcacagauugaa

SEQ ID NO: 21287 - RNA, 32 nt, Human
aacagguuaaaacucagagaacuccaauaaua

SEQ ID NO: 21288 - RNA, 32 nt, Human
aacagguugccuaauuagcagcuuuuggguga

SEQ ID NO: 21289 - RNA, 32 nt, Human
aacagguugggaagaaaauuguggcuguugga

SEQ ID NO: 21290 - RNA, 21 nt, Human
aacagguuggguuaggagcag

SEQ ID NO: 21291 - RNA, 32 nt, Human
aacagguuugggcaguggugggggagggggcc

SEQ ID NO: 21292 - RNA, 32 nt, Human
aacagguuuuucuuuuccuuuuuaauuuuucu

SEQ ID NO: 21293 - RNA, 32 nt, Human
aacaguaaaccaguauuucacacugagauugu

SEQ ID NO: 21294 - RNA, 32 nt, Human
aacaguaaaggccaugugaagagaauuauuac

SEQ ID NO: 21295 - RNA, 32 nt, Human
aacaguaaccuagaguuacagcacuugcuccu

SEQ ID NO: 21296 - RNA, 32 nt, Human
aacaguaagcggcuccaggccuccucugggcc

SEQ ID NO: 21297 - RNA, 22 nt, Human
aacaguaauggaagugcggcca

SEQ ID NO: 21298 - RNA, 32 nt, Human
aacaguaauggaguacaugagcacuggaagug

SEQ ID NO: 21299 - RNA, 32 nt, Human
aacaguacaaugcuuguuaaugguuaauauag

SEQ ID NO: 21300 - RNA, 31 nt, Human
aacaguacaggugcacucacagcaugauggc

SEQ ID NO: 21301 - RNA, 32 nt, Human
aacaguaccaauaucaugaaguuucaaguauc

SEQ ID NO: 21302 - RNA, 32 nt, Human
aacaguacccugguuguguguccccuugcagc

SEQ ID NO: 21303 - RNA, 32 nt, Human
aacaguaccugggaaggacucccaccucacca

SEQ ID NO: 21304 - RNA, 32 nt, Human
aacaguacuacaaugauucugaagcacagugu

SEQ ID NO: 21305 - RNA, 32 nt, Human
aacaguacuucuaagaacguugccugucaucg

SEQ ID NO: 21306 - RNA, 32 nt, Human
aacaguagcaaauucacuaaacuuuuguguuc

SEQ ID NO: 21307 - RNA, 32 nt, Human
aacaguaggagagaggucuggggauaagugaa

SEQ ID NO: 21308 - RNA, 32 nt, Human
aacaguagguccaggcuggaugcugguaugau

SEQ ID NO: 21309 - RNA, 32 nt, Human
aacaguagucuagauguugcugugaagguauu

SEQ ID NO: 21310 - RNA, 32 nt, Human
aacaguauaugauccagcugcagagagcagac

SEQ ID NO: 21311 - RNA, 20 nt, Human
aacaguaugccauguguucu

SEQ ID NO: 21312 - RNA, 32 nt, Human
aacaguaugugccuugggggaggagggaaaga

SEQ ID NO: 21313 - RNA, 32 nt, Human
aacagucaacacacccugccacuuucaccauc

SEQ ID NO: 21314 - RNA, 32 nt, Human
aacagucacaggcagugggaugagugaaguua

SEQ ID NO: 21315 - RNA, 32 nt, Human
aacagucacauagcaggcuacugcuucaacau

SEQ ID NO: 21316 - RNA, 21 nt, Human
aacagucaccauuuacuacca

SEQ ID NO: 21317 - RNA, 32 nt, Human
aacagucacugcagaagaauuugcugcacgga

SEQ ID NO: 21318 - RNA, 32 nt, Human
aacagucauaugcugaaucuucuaucugugaa

SEQ ID NO: 21319 - RNA, 32 nt, Human
aacagucauucuuccucuuuguuaaugugcca

SEQ ID NO: 21320 - RNA, 32 nt, Human
aacaguccagguucaaggaggcugcuuuuauu

SEQ ID NO: 21321 - RNA, 32 nt, Human
aacagucccacuguuaaccuggugcuacuggg

SEQ ID NO: 21322 - RNA, 32 nt, Human
aacagucgggccggauccccggugucugggga

SEQ ID NO: 21323 - RNA, 32 nt, Human
aacagucuccccucauccugauuccugacaac

SEQ ID NO: 21324 - RNA, 32 nt, Human
aacagucuccgguguccaugcguugacugcca

SEQ ID NO: 21325 - RNA, 32 nt, Human
aacagucuccuuccacaaaaccauggcgucgc

SEQ ID NO: 21326 - RNA, 32 nt, Human
aacagucugcuccccucuucccuuccuucuuu

SEQ ID NO: 21327 - RNA, 32 nt, Human
aacagucuggguggaauggggcugaaaccaug

SEQ ID NO: 21328 - RNA, 32 nt, Human
aacagucuucccuguuguccagauucuguaua

SEQ ID NO: 21329 - RNA, 32 nt, Human
aacagucuucuccccucccucgccuuccauuu

SEQ ID NO: 21330 - RNA, 32 nt, Human
aacagucuucugcccaugucugggaacacacg

SEQ ID NO: 21331 - RNA, 31 nt, Human
aacagugaaaagagagaagggagacucuauu

SEQ ID NO: 21332 - RNA, 32 nt, Human
aacagugaaaugucacauggcucaaacccagg

SEQ ID NO: 21333 - RNA, 32 nt, Human
aacagugaagaaaaggagggugagagggcggc

SEQ ID NO: 21334 - RNA, 32 nt, Human
aacagugacuuuuccagggaggaagaggcagc

SEQ ID NO: 21335 - RNA, 32 nt, Human
aacagugagcccagugagcagccccagccagc

SEQ ID NO: 21336 - RNA, 32 nt, Human
aacagugaggugguagcaagacuucuuuuuag

SEQ ID NO: 21337 - RNA, 32 nt, Human
aacagugaucagacauauuacagggaaauagc

SEQ ID NO: 21338 - RNA, 32 nt, Human
aacagugcacacacaugaacauucauugcaug

SEQ ID NO: 21339 - RNA, 22 nt, Human
aacagugccaaaugcuggggca

SEQ ID NO: 21340 - RNA, 32 nt, Human
aacagugccuggaagccugaggcugcauuucc

SEQ ID NO: 21341 - RNA, 32 nt, Human
aacagugcuuggcaccuggaaguagguggcag

SEQ ID NO: 21342 - RNA, 32 nt, Human
aacaguggaagcaagagguuggggugaugugg

SEQ ID NO: 21343 - RNA, 32 nt, Human
aacaguggagaggaagagggagugaggcccug

SEQ ID NO: 21344 - RNA, 32 nt, Human
aacaguggcgacuggaaucugguuuauauuca

SEQ ID NO: 21345 - RNA, 32 nt, Human
aacaguggcuuaugccuguaaucccagcacuc

SEQ ID NO: 21346 - RNA, 32 nt, Human
aacagugggcacaggcaugcuguucccaccau

SEQ ID NO: 21347 - RNA, 32 nt, Human
aacaguguaagccgguuucagucacuccacag

SEQ ID NO: 21348 - RNA, 32 nt, Human
aacaguguccuagucccucccuucccucuccu

SEQ ID NO: 21349 - RNA, 32 nt, Human
aacaguguuaauuuagaugcacuaaagcaaag

SEQ ID NO: 21350 - RNA, 32 nt, Human
aacaguguuccuuuucuugguuuuaauuucug

SEQ ID NO: 21351 - RNA, 32 nt, Human
aacaguguuuuagaugagagaucauuaaugca

SEQ ID NO: 21352 - RNA, 32 nt, Human
aacaguuaagagucacugggaaauuauuguau

SEQ ID NO: 21353 - RNA, 21 nt, Human
aacaguuagugaggaacagcu

SEQ ID NO: 21354 - RNA, 32 nt, Human
aacaguucaguaaacucugccuugaccagcaa

SEQ ID NO: 21355 - RNA, 32 nt, Human
aacaguucauucuacuuaauaaugcaauaaug

SEQ ID NO: 21356 - RNA, 32 nt, Human
aacaguuccagaccagccugggcaauacagcg

SEQ ID NO: 21357 - RNA, 32 nt, Human
aacaguucccaucaccaccaccaccaccacca

SEQ ID NO: 21358 - RNA, 32 nt, Human
aacaguuccccuacuacuaucucccacucuag

SEQ ID NO: 21359 - RNA, 32 nt, Human
aacaguuccuucagcuuccauuucgccccuca

SEQ ID NO: 21360 - RNA, 24 nt, Human
aacaguuccuuuaaauguguagua

SEQ ID NO: 21361 - RNA, 24 nt, Human
aacaguuccuuuacauguguagua

SEQ ID NO: 21362 - RNA, 32 nt, Human
aacaguuccuuucaaaggagaaugaaucauga

SEQ ID NO: 21363 - RNA, 32 nt, Human
aacaguucgacuucgguuacugccuucucccu

SEQ ID NO: 21364 - RNA, 32 nt, Human
aacaguucggccaagcagaacugcuguaccuc

SEQ ID NO: 21365 - RNA, 32 nt, Human
aacaguucucagaaaugucaugauugccgggg

SEQ ID NO: 21366 - RNA, 32 nt, Human
aacaguucugcaguagugugguggugacuugg

SEQ ID NO: 21367 - RNA, 32 nt, Human
aacaguucugucuugcugggguuccagguacc

SEQ ID NO: 21368 - RNA, 32 nt, Human
aacaguucuugcucuguucagcuccccacauu

SEQ ID NO: 21369 - RNA, 32 nt, Human
aacaguugcaaucuuggcagcuugaaaauggu

SEQ ID NO: 21370 - RNA, 32 nt, Human
aacaguugcugcuaguauuaggguuccacauc

SEQ ID NO: 21371 - RNA, 31 nt, Human
aacaguugggagagagacaagaccugucggg

SEQ ID NO: 21372 - RNA, 32 nt, Human
aacaguuguccaggaugcuggcugguggaaca

SEQ ID NO: 21373 - RNA, 32 nt, Human
aacaguuguucuguucacugcuuucauugaga

SEQ ID NO: 21374 - RNA, 32 nt, Human
aacaguuuaugcagugcugcuuugccaaauaa

SEQ ID NO: 21375 - RNA, 32 nt, Human
aacaguuugaacacaaaggcucuauggaagaa

SEQ ID NO: 21376 - RNA, 19 nt, Human
aacaguuugaugaguuuuu

SEQ ID NO: 21377 - RNA, 19 nt, Human
aacaguuugccagugguuc

SEQ ID NO: 21378 - RNA, 32 nt, Human
aacaguuugccucccucccagccucaaccaca

SEQ ID NO: 21379 - RNA, 17 nt, Human
aacaguuugguggucuu

SEQ ID NO: 21380 - RNA, 32 nt, Human
aacaguuuguagguuaucaggugacuugaccc

SEQ ID NO: 21381 - RNA, 32 nt, Human
aacaguuuguauaguuggaauauuugucuuug

SEQ ID NO: 21382 - RNA, 18 nt, Human
aacaguuuguuaauucuu

SEQ ID NO: 21383 - RNA, 21 nt, Human
aacaguuuucaacuuguucuu

SEQ ID NO: 21384 - RNA, 32 nt, Human
aacaguuuuggcuucuuaaacuucauauuugg

SEQ ID NO: 21385 - RNA, 32 nt, Human
aacaguuuuugcuaauuuuuaggcugaaagau

SEQ ID NO: 21386 - RNA, 32 nt, Human
aacauaaaacacagcaagaaucugguugucug

SEQ ID NO: 21387 - RNA, 32 nt, Human
aacauaaaacauccuuacuuuuauuucacaca

SEQ ID NO: 21388 - RNA, 32 nt, Human
aacauaaaaguggagagacugaggcuaagguu

SEQ ID NO: 21389 - RNA, 32 nt, Human
aacauaaaauggcuugguaaaaguaauaaaau

SEQ ID NO: 21390 - RNA, 32 nt, Human
aacauaaaccccaacauccacccaugaagcca

SEQ ID NO: 21391 - RNA, 32 nt, Human
aacauaaaucugccuacugaacucuaggauau

SEQ ID NO: 21392 - RNA, 32 nt, Human
aacauaacaacaagcauaggucuuaucaucca

SEQ ID NO: 21393 - RNA, 32 nt, Human
aacauaacccagcauuccaagugucuguguug

SEQ ID NO: 21394 - RNA, 32 nt, Human
aacauaacuaacuccauuuuuguuuaaggggc

SEQ ID NO: 21395 - RNA, 32 nt, Human
aacauaacucacaccccugcccccaccccaug

SEQ ID NO: 21396 - RNA, 32 nt, Human
aacauaaguaaucacuaaugcucaacaauuua

SEQ ID NO: 21397 - RNA, 32 nt, Human
aacauaagucucaggagauuugggagguggcc

SEQ ID NO: 21398 - RNA, 32 nt, Human
aacauaauuucaguuaucagaagccauuccau

SEQ ID NO: 21399 - RNA, 32 nt, Human
aacauacacaaugugucuuucuuuuuggacau

SEQ ID NO: 21400 - RNA, 32 nt, Human
aacauacacaggggguuggugaauggugccga

SEQ ID NO: 21401 - RNA, 32 nt, Human
aacauacacaugcauguaucuuuauaaaagaa

SEQ ID NO: 21402 - RNA, 29 nt, Human
aacauacaguguaccucaaaaggggcccu

SEQ ID NO: 21403 - RNA, 32 nt, Human
aacauacaucacuuucugagucauacuuuaug

SEQ ID NO: 21404 - RNA, 32 nt, Human
aacauacaugaauggaccugcuacacagaagg

SEQ ID NO: 21405 - RNA, 32 nt, Human
aacauacaugcaugcacacauacauacauaug

SEQ ID NO: 21406 - RNA, 32 nt, Human
aacauacauucaucugaucagcauuaauuugg

SEQ ID NO: 21407 - RNA, 32 nt, Human
aacauaccucaauccugucccaggccggaucc

SEQ ID NO: 21408 - RNA, 32 nt, Human
aacauacgccuuuguucugucauuuuaaagag

SEQ ID NO: 21409 - RNA, 23 nt, Human
aacauacuaaugggggucuuucu

SEQ ID NO: 21410 - RNA, 32 nt, Human
aacauacuccaucaucccaggacacugaaacu

SEQ ID NO: 21411 - RNA, 32 nt, Human
aacauacucuuguggauuccaucaggagcugg

SEQ ID NO: 21412 - RNA, 32 nt, Human
aacauacugauagagguuagaagauuauuuua

SEQ ID NO: 21413 - RNA, 32 nt, Human
aacauacuggccuggacuguuuucucucggcu

SEQ ID NO: 21414 - RNA, 32 nt, Human
aacauagaaguuaagaagagaucuggcuggga

SEQ ID NO: 21415 - RNA, 32 nt, Human
aacauagaccaacuugcugcaugguaaggugg

SEQ ID NO: 21416 - RNA, 32 nt, Human
aacauagcaagacucugucucuguaaaguaau

SEQ ID NO: 21417 - RNA, 32 nt, Human
aacauagcacacuugugcacugagaggaggga

SEQ ID NO: 21418 - RNA, 32 nt, Human
aacauagccaucaaaauuaauauuauguaaug

SEQ ID NO: 21419 - RNA, 32 nt, Human
aacauagcucacugcagccuugaacuccugga

SEQ ID NO: 21420 - RNA, 32 nt, Human
aacauaggaggcacuucuuuucauaaagagaa

SEQ ID NO: 21421 - RNA, 32 nt, Human
aacauaggcccaggcuauccaggcugcagugg

SEQ ID NO: 21422 - RNA, 32 nt, Human
aacauaggcuuagaugacugguuuuccuuuag

SEQ ID NO: 21423 - RNA, 32 nt, Human
aacauagggcauuccaggucuguaacccugca

SEQ ID NO: 21424 - RNA, 32 nt, Human
aacauagguccuccccucaccccaacucuagg

SEQ ID NO: 21425 - RNA, 32 nt, Human
aacauaguauaaacagagaagacuucauuuuu

SEQ ID NO: 21426 - RNA, 32 nt, Human
aacauagugagcucucugccucuucggaacga

SEQ ID NO: 21427 - RNA, 32 nt, Human
aacauauauuggagagaagcccuguuaugguc

SEQ ID NO: 21428 - RNA, 32 nt, Human
aacauaucccuuagaacagauccaauagacaa

SEQ ID NO: 21429 - RNA, 32 nt, Human
aacauaucuggaauuugaaaugagaucuguuu

SEQ ID NO: 21430 - RNA, 32 nt, Human
aacauaugaaguaaaguguucuauccaggauu

SEQ ID NO: 21431 - RNA, 32 nt, Human
aacauaugguagggauuacagugggggcauuu

SEQ ID NO: 21432 - RNA, 32 nt, Human
aacauauucacacccaugcacgcacacacaua

SEQ ID NO: 21433 - RNA, 32 nt, Human
aacauauucauucucucuucuccaucacccau

SEQ ID NO: 21434 - RNA, 32 nt, Human
aacauauuccaaugcucuccucuuucucuggc

SEQ ID NO: 21435 - RNA, 32 nt, Human
aacaucaaaaacaaaaacaauuagcugggcau

SEQ ID NO: 21436 - RNA, 32 nt, Human
aacaucaacgucuuuuguccagccucuuuuuc

SEQ ID NO: 21437 - RNA, 32 nt, Human
aacaucaauaccuaggccugagaaauaacccc

SEQ ID NO: 21438 - RNA, 32 nt, Human
aacaucaaugaaggagagaagagccagccaga

SEQ ID NO: 21439 - RNA, 32 nt, Human
aacaucacaauuaaaagaacuagaaaagcaag

SEQ ID NO: 21440 - RNA, 32 nt, Human
aacaucacaccauugcacuccagccugggcaa

SEQ ID NO: 21441 - RNA, 32 nt, Human
aacaucaccgauuuuaaaaucugucacaacag

SEQ ID NO: 21442 - RNA, 32 nt, Human
aacaucacuccucccuggucagcugggagagc

SEQ ID NO: 21443 - RNA, 32 nt, Human
aacaucacugaagcucugaagcuuugagcagc

SEQ ID NO: 21444 - RNA, 32 nt, Human
aacaucacugauaccauuaaagccacuaacag

SEQ ID NO: 21445 - RNA, 32 nt, Human
aacaucacuguggaugacuacuuucacgaggg

SEQ ID NO: 21446 - RNA, 32 nt, Human
aacaucacugugggugaacagagauuuccagg

SEQ ID NO: 21447 - RNA, 25 nt, Human
aacaucagaaggaacaaacucuaga

SEQ ID NO: 21448 - RNA, 32 nt, Human
aacaucagaaugggggucagaggcagaaggac

SEQ ID NO: 21449 - RNA, 32 nt, Human
aacaucagagcugaacuucuuaagaaaagcac

SEQ ID NO: 21450 - RNA, 32 nt, Human
aacaucagauacaaaugaaaagguuucaaauu

SEQ ID NO: 21451 - RNA, 32 nt, Human
aacaucagcagaggggcccugccccuccgccu

SEQ ID NO: 21452 - RNA, 32 nt, Human
aacaucagcaguaggguccauuccaagauugu

SEQ ID NO: 21453 - RNA, 32 nt, Human
aacaucagccuccacucucccagcuugcuuua

SEQ ID NO: 21454 - RNA, 32 nt, Human
aacaucagccugggcaacauagcaggacccca

SEQ ID NO: 21455 - RNA, 32 nt, Human
aacaucagcuuccucgaugaggaagucucuac

SEQ ID NO: 21456 - RNA, 32 nt, Human
aacaucaggagaagaaagagagagggggauuu

SEQ ID NO: 21457 - RNA, 32 nt, Human
aacaucagugggaggcaggggaggcagauauu

SEQ ID NO: 21458 - RNA, 32 nt, Human
aacaucaguuucuggggaggccucagggagcu

SEQ ID NO: 21459 - RNA, 31 nt, Human
aacaucaugguggcuuucaaaggggucugga

SEQ ID NO: 21460 - RNA, 32 nt, Human
aacaucauuacagcuaagagaaguucuccuau

SEQ ID NO: 21461 - RNA, 32 nt, Human
aacaucauugauggguucugcagcccagggcc

SEQ ID NO: 21462 - RNA, 32 nt, Human
aacaucauuugcaaagggagagaggggcaagc

SEQ ID NO: 21463 - RNA, 32 nt, Human
aacauccacagaacuaguccaacucuuaaaag

SEQ ID NO: 21464 - RNA, 32 nt, Human
aacauccacaguuaagguugggccagcuaccu

SEQ ID NO: 21465 - RNA, 32 nt, Human
aacauccagaaaacuuuaacauucuucaaaga

SEQ ID NO: 21466 - RNA, 32 nt, Human
aacauccaguaauggggaccuggaaccugggc

SEQ ID NO: 21467 - RNA, 32 nt, Human
aacauccauacagcacugcuggaggaagagga

SEQ ID NO: 21468 - RNA, 28 nt, Human
aacaucccaaguguaugucucuucccug

SEQ ID NO: 21469 - RNA, 32 nt, Human
aacaucccaucucuucccuuucaccucugcca

SEQ ID NO: 21470 - RNA, 32 nt, Human
aacauccccacugucaugugucucagcagugg

SEQ ID NO: 21471 - RNA, 32 nt, Human
aacauccccuccauacucagcucuuuaacuuu

SEQ ID NO: 21472 - RNA, 32 nt, Human
aacauccccuugacaguugcagccucuugacc

SEQ ID NO: 21473 - RNA, 32 nt, Human
aacaucccucaccacucucccccagcaccccc

SEQ ID NO: 21474 - RNA, 32 nt, Human
aacaucccucauugagccacugggaagcuaug

SEQ ID NO: 21475 - RNA, 32 nt, Human
aacaucccugguacuccagcuuugagguccua

SEQ ID NO: 21476 - RNA, 32 nt, Human
aacaucccuucucugcuccacaggagugucuu

SEQ ID NO: 21477 - RNA, 32 nt, Human
aacauccggcgccacugggguuugacuucucc

SEQ ID NO: 21478 - RNA, 32 nt, Human
aacauccuaacaguaaucacaucucacccucc

SEQ ID NO: 21479 - RNA, 32 nt, Human
aacauccucauugauccucuucaguuggaguc

SEQ ID NO: 21480 - RNA, 32 nt, Human
aacauccuccacugacuuccucccacugucug

SEQ ID NO: 21481 - RNA, 32 nt, Human
aacauccugcuuguaucaggaaacucagaagc

SEQ ID NO: 21482 - RNA, 32 nt, Human
aacauccuucaagaacucugggcugcuaccca

SEQ ID NO: 21483 - RNA, 32 nt, Human
aacauccuuggucauugcccagaaaguaccug

SEQ ID NO: 21484 - RNA, 32 nt, Human
aacauccuugucugggucuaccaggaacgcuu

SEQ ID NO: 21485 - RNA, 32 nt, Human
aacaucuaaaguguauuaacagugcaugcuuu

SEQ ID NO: 21486 - RNA, 32 nt, Human
aacaucuacagccuuuggguguuuuaguaaga

SEQ ID NO: 21487 - RNA, 32 nt, Human
aacaucuagcucgauucaggugcauugagaag

SEQ ID NO: 21488 - RNA, 20 nt, Human
aacaucuaucucugcugcca

SEQ ID NO: 21489 - RNA, 19 nt, Human
aacaucuaugguugugaca

SEQ ID NO: 21490 - RNA, 31 nt, Human
aacaucucaauaaaaccauuuuaguugaaaa

SEQ ID NO: 21491 - RNA, 32 nt, Human
aacaucucaguuaccucauucugcaauaaguu

SEQ ID NO: 21492 - RNA, 32 nt, Human
aacaucucccugucauccuuuuucacccauaa

SEQ ID NO: 21493 - RNA, 32 nt, Human
aacaucucuagugcccuugcaagagccuuuaa

SEQ ID NO: 21494 - RNA, 32 nt, Human
aacaucucucucccucuccaucacuccccaug

SEQ ID NO: 21495 - RNA, 32 nt, Human
aacaucucugacuucucuaccuccucugugcu

SEQ ID NO: 21496 - RNA, 32 nt, Human
aacaucucuggcccagaaagccucucucuccc

SEQ ID NO: 21497 - RNA, 32 nt, Human
aacaucugaauguagaccaugaucucaaguuc

SEQ ID NO: 21498 - RNA, 32 nt, Human
aacaucugacccuuuucaagaggaaggaugaa

SEQ ID NO: 21499 - RNA, 32 nt, Human
aacaucugaggcuguagacaucucugcaucuu

SEQ ID NO: 21500 - RNA, 32 nt, Human
aacaucugcaguguucugugaauagcaguggc

SEQ ID NO: 21501 - RNA, 32 nt, Human
aacaucugcucacuggacugucugauccaaug

SEQ ID NO: 21502 - RNA, 32 nt, Human
aacaucugcugucaaaggccagccugucguua

SEQ ID NO: 21503 - RNA, 32 nt, Human
aacaucuggcacauaggauuuguacuccguaa

SEQ ID NO: 21504 - RNA, 32 nt, Human
aacaucuggcacauaggauuuguacucgguaa

SEQ ID NO: 21505 - RNA, 32 nt, Human
aacaucugggcugccuuguagagaugcagccu

SEQ ID NO: 21506 - RNA, 19 nt, Human
aacaucugugacugugaca

SEQ ID NO: 21507 - RNA, 32 nt, Human
aacaucuguggacaccucaugcucuguucaag

SEQ ID NO: 21508 - RNA, 32 nt, Human
aacaucuuauuguugguaauagugcuuuauau

SEQ ID NO: 21509 - RNA, 32 nt, Human
aacaucuucagacuggccugaccugggccuug

SEQ ID NO: 21510 - RNA, 32 nt, Human
aacaucuuccacccucccucucccccucugcc

SEQ ID NO: 21511 - RNA, 32 nt, Human
aacaucuuccagcauguguccuggggugaugg

SEQ ID NO: 21512 - RNA, 32 nt, Human
aacaucuucucccaacacugcuuuaauggaag

SEQ ID NO: 21513 - RNA, 32 nt, Human
aacaucuuggcauccccaccccaggaagugcg

SEQ ID NO: 21514 - RNA, 32 nt, Human
aacaucuuuacucuuauugucuggaccuucaa

SEQ ID NO: 21515 - RNA, 32 nt, Human
aacaucuuugauaguaacgugccuucaaacaa

SEQ ID NO: 21516 - RNA, 18 nt, Human
aacaucuuugauguucaa

SEQ ID NO: 21517 - RNA, 32 nt, Human
aacaucuuuuacucugacuugcuuuuaucuua

SEQ ID NO: 21518 - RNA, 32 nt, Human
aacaugaaagagaucuuugugaauaaauucaa

SEQ ID NO: 21519 - RNA, 28 nt, Human
aacaugaaagccucugcagcacuucugu

SEQ ID NO: 21520 - RNA, 32 nt, Human
aacaugaagccagugcacgccagccugggcga

SEQ ID NO: 21521 - RNA, 32 nt, Human
aacaugaauguugaugaacaaauguaaaauua

SEQ ID NO: 21522 - RNA, 32 nt, Human
aacaugaauugcacuucacugcagcuuuagag

SEQ ID NO: 21523 - RNA, 26 nt, Human
aacaugaccaaaaaccaaaagugcau

SEQ ID NO: 21524 - RNA, 28 nt, Human
aacaugaccagccuggugcaccucacuc

SEQ ID NO: 21525 - RNA, 32 nt, Human
aacaugagagccccucacccccaacucuccac

SEQ ID NO: 21526 - RNA, 32 nt, Human
aacaugagcccuuuuuaaaugugauuucccgu

SEQ ID NO: 21527 - RNA, 32 nt, Human
aacaugagcuucaacuccaccuccagcucuga

SEQ ID NO: 21528 - RNA, 32 nt, Human
aacaugaggaucagagagggaaagucacuugc

SEQ ID NO: 21529 - RNA, 32 nt, Human
aacaugaguauaguuuagaacuuuaugagaau

SEQ ID NO: 21530 - RNA, 32 nt, Human
aacaugaucaauguauuucucugccuugacau

SEQ ID NO: 21531 - RNA, 32 nt, Human
aacaugaucccagcuacacggacugccaugga

SEQ ID NO: 21532 - RNA, 32 nt, Human
aacaugaugccaucauuuaggaaauccaugga

SEQ ID NO: 21533 - RNA, 32 nt, Human
aacaugcaacccacugagaccucaagucagug

SEQ ID NO: 21534 - RNA, 32 nt, Human
aacaugcacguguacacauaccacagacacgc

SEQ ID NO: 21535 - RNA, 32 nt, Human
aacaugcagcagcucugugaccuugggccuca

SEQ ID NO: 21536 - RNA, 32 nt, Human
aacaugcagguuuguuacauagguauacaugu

SEQ ID NO: 21537 - RNA, 32 nt, Human
aacaugcagucuccugucucaugguuugaagu

SEQ ID NO: 21538 - RNA, 32 nt, Human
aacaugcauguuuacagucuugcagugugcug

SEQ ID NO: 21539 - RNA, 32 nt, Human
aacaugccacacacaccgugguuuuaggggcc

SEQ ID NO: 21540 - RNA, 32 nt, Human
aacaugccacagugaacacacucguguacaua

SEQ ID NO: 21541 - RNA, 32 nt, Human
aacaugcccagcaaaaacuugcuuuauggguc

SEQ ID NO: 21542 - RNA, 32 nt, Human
aacaugcccugccuguuuccccucguuggucc

SEQ ID NO: 21543 - RNA, 24 nt, Human
aacaugccuaaucccagcuucauc

SEQ ID NO: 21544 - RNA, 32 nt, Human
aacaugccugauuuuaaaagguugacucaagu

SEQ ID NO: 21545 - RNA, 32 nt, Human
aacaugcuaaaauccccucucuacuaaaaaua

SEQ ID NO: 21546 - RNA, 32 nt, Human
aacaugcuaggaacugcuuuuggcacugggag

SEQ ID NO: 21547 - RNA, 32 nt, Human
aacaugcuccaaaaucugaaacucuuugagcc

SEQ ID NO: 21548 - RNA, 32 nt, Human
aacaugcugccuuugcagaugccugaaaauug

SEQ ID NO: 21549 - RNA, 32 nt, Human
aacaugcugcgggacagaugcagagaggccac

SEQ ID NO: 21550 - RNA, 32 nt, Human
aacaugcugcuuagcuucucugugccaaacuu

SEQ ID NO: 21551 - RNA, 32 nt, Human
aacaugcuguuggguuuuaauucucuaauuau

SEQ ID NO: 21552 - RNA, 32 nt, Human
aacaugcuucgugccaucaugauccuugccuu

SEQ ID NO: 21553 - RNA, 32 nt, Human
aacaugcuuuuauuccagcacugugguuauca

SEQ ID NO: 21554 - RNA, 32 nt, Human
aacauggaaaaccaucucaaugcugaaacuuc

SEQ ID NO: 21555 - RNA, 23 nt, Human
aacauggaaagucagagccuucu

SEQ ID NO: 21556 - RNA, 24 nt, Human
aacauggaacaguguggcucuucu

SEQ ID NO: 21557 - RNA, 32 nt, Human
aacauggaauuugcaaguaaccaaugaccguc

SEQ ID NO: 21558 - RNA, 22 nt, Human
aacauggacaaggagccucucu

SEQ ID NO: 21559 - RNA, 32 nt, Human
aacauggagaaaugccaucucuacuaaaaaua

SEQ ID NO: 21560 - RNA, 20 nt, Human
aacauggagagucagucuuu

SEQ ID NO: 21561 - RNA, 32 nt, Human
aacauggagccuugccuggccugggcuagggg

SEQ ID NO: 21562 - RNA, 28 nt, Human
aacauggaggcagauauaaucacaaauc

SEQ ID NO: 21563 - RNA, 28 nt, Human
aacauggaggcuggcucagugguucgag

SEQ ID NO: 21564 - RNA, 32 nt, Human
aacauggaucuagcucaggucauuccucuacc

SEQ ID NO: 21565 - RNA, 32 nt, Human
aacauggauggaaacugaccaccuacuuuguc

SEQ ID NO: 21566 - RNA, 28 nt, Human
aacauggcaaaaaucuccagcccuacag

SEQ ID NO: 21567 - RNA, 32 nt, Human
aacauggcaaagccuuuaacaagcccucaauu

SEQ ID NO: 21568 - RNA, 32 nt, Human
aacauggcaagauccccucucuaccaaacaaa

SEQ ID NO: 21569 - RNA, 32 nt, Human
aacauggcaaggaacaccacaccacugcuuuu

SEQ ID NO: 21570 - RNA, 32 nt, Human
aacauggcagaaaggugacaccuggagaccaa

SEQ ID NO: 21571 - RNA, 32 nt, Human
aacauggcaggcaggagguccucagaaggugu

SEQ ID NO: 21572 - RNA, 32 nt, Human
aacauggccaacagcauugccaaccugagacu

SEQ ID NO: 21573 - RNA, 32 nt, Human
aacauggcuagauccaucagaaacugaagccg

SEQ ID NO: 21574 - RNA, 32 nt, Human
aacauggcucacugcagccucaaccucccagg

SEQ ID NO: 21575 - RNA, 32 nt, Human
aacauggcucacugcagccucgaccuccuggg

SEQ ID NO: 21576 - RNA, 32 nt, Human
aacauggcucagaggagagggaggaaggaucu

SEQ ID NO: 21577 - RNA, 28 nt, Human
aacauggcuccaguggagcacguugugg

SEQ ID NO: 21578 - RNA, 32 nt, Human
aacaugggaaaucguuuucauuagauguacau

SEQ ID NO: 21579 - RNA, 32 nt, Human
aacaugggacaugccuuucuuuuccgaucagu

SEQ ID NO: 21580 - RNA, 23 nt, Human
aacaugggaggcggagguugcag

SEQ ID NO: 21581 - RNA, 26 nt, Human
aacaugggaggcggagguugcaguga

SEQ ID NO: 21582 - RNA, 32 nt, Human
aacaugggaggcggagguugcagugagccgag

SEQ ID NO: 21583 - RNA, 32 nt, Human
aacaugggaggcguagcuugcagugagcugag

SEQ ID NO: 21584 - RNA, 26 nt, Human
aacaugggagguggaggcugcaguga

SEQ ID NO: 21585 - RNA, 32 nt, Human
aacaugggcuuaguagcucaguuuuccaucau

SEQ ID NO: 21586 - RNA, 32 nt, Human
aacauggggaaacugaggcucggcucggaaag

SEQ ID NO: 21587 - RNA, 32 nt, Human
aacaugguagacagagguugcagugagccaaa

SEQ ID NO: 21588 - RNA, 18 nt, Human
aacauggugaaaccccgu

SEQ ID NO: 21589 - RNA, 32 nt, Human
aacauggugaaaggaagcaccaccagcauggc

SEQ ID NO: 21590 - RNA, 32 nt, Human
aacauggugacacucaccuucugugacuacuu

SEQ ID NO: 21591 - RNA, 32 nt, Human
aacauggugagacucugccucuacaaaagaaa

SEQ ID NO: 21592 - RNA, 32 nt, Human
aacauggugaugggcucccuccccuaaccuug

SEQ ID NO: 21593 - RNA, 32 nt, Human
aacauggugccggcaccugcucagcuuuugga

SEQ ID NO: 21594 - RNA, 32 nt, Human
aacaugguuucaaauugaggaggagagucuug

SEQ ID NO: 21595 - RNA, 32 nt, Human
aacauguaacuugcaguguuugccagcuuuca

SEQ ID NO: 21596 - RNA, 32 nt, Human
aacauguagagaaguuguagauucaagauaua

SEQ ID NO: 21597 - RNA, 32 nt, Human
aacauguaggguggggaguaugagcaccaaca

SEQ ID NO: 21598 - RNA, 32 nt, Human
aacauguccaccucaacuucugagccagcccc

SEQ ID NO: 21599 - RNA, 32 nt, Human
aacaugucgcuucaaauauaacuaauauccug

SEQ ID NO: 21600 - RNA, 23 nt, Human
aacaugucucggccccugucccc

SEQ ID NO: 21601 - RNA, 32 nt, Human
aacaugucuguuaccccucuccaucuuaccaa

SEQ ID NO: 21602 - RNA, 32 nt, Human
aacaugucuguuuccuccucagacacaaaggg

SEQ ID NO: 21603 - RNA, 32 nt, Human
aacaugugagcauggucacaagcacaaagcuc

SEQ ID NO: 21604 - RNA, 32 nt, Human
aacaugugauuccgucuuaaaaguuuuccauu

SEQ ID NO: 21605 - RNA, 32 nt, Human
aacaugugccaaugggcgaucuugccuggaau

SEQ ID NO: 21606 - RNA, 32 nt, Human
aacaugugcuuccuauugaucccaggucuuca

SEQ ID NO: 21607 - RNA, 32 nt, Human
aacauguucagaagccauggggccaagcacau

SEQ ID NO: 21608 - RNA, 32 nt, Human
aacauguucuagcugacaggccagcuucucca

SEQ ID NO: 21609 - RNA, 32 nt, Human
aacauguugagugagcaugcuggagaaugaga

SEQ ID NO: 21610 - RNA, 22 nt, Human
aacauguuggcuuuucucuuga

SEQ ID NO: 21611 - RNA, 32 nt, Human
aacauguuuaaacuuuguucauggucaaauuc

SEQ ID NO: 21612 - RNA, 32 nt, Human
aacauguuuacugagcaucuguuaaguguugg

SEQ ID NO: 21613 - RNA, 32 nt, Human
aacauguuucuccaaugcaaucaagcccuaga

SEQ ID NO: 21614 - RNA, 32 nt, Human
aacauguuugugaauguaugcacuuguacuaa

SEQ ID NO: 21615 - RNA, 32 nt, Human
aacauuaaaacaguaacugacauccaguuaaa

SEQ ID NO: 21616 - RNA, 20 nt, Human
aacauuaaaaugcuggggca

SEQ ID NO: 21617 - RNA, 32 nt, Human
aacauuaaccaccccucucuagucuuacuggu

SEQ ID NO: 21618 - RNA, 32 nt, Human
aacauuaacccugagcuuucuucauggaacca

SEQ ID NO: 21619 - RNA, 32 nt, Human
aacauuaagcuuucugggccacuggaacaaag

SEQ ID NO: 21620 - RNA, 32 nt, Human
aacauuacuggggugaaggaggcauuguucuu

SEQ ID NO: 21621 - RNA, 32 nt, Human
aacauuagagcaaauacucaggggauuuuuca

SEQ ID NO: 21622 - RNA, 32 nt, Human
aacauuagcugucacaggcuguauccuuaaag

SEQ ID NO: 21623 - RNA, 32 nt, Human
aacauucaauuccagagaaccaaaaaucccac

SEQ ID NO: 21624 - RNA, 32 nt, Human
aacauucaucguaguuuugcugucacaucuca

SEQ ID NO: 21625 - RNA, 32 nt, Human
aacauucauucaacaaacacuuacugaggcca

SEQ ID NO: 21626 - RNA, 32 nt, Human
aacauuccaaauuacugucaauaaaauauaua

SEQ ID NO: 21627 - RNA, 32 nt, Human
aacauuccagccccacccucaggcuggagggc

SEQ ID NO: 21628 - RNA, 32 nt, Human
aacauuccauagagugaagugguucaaauuuc

SEQ ID NO: 21629 - RNA, 32 nt, Human
aacauuccccuggaugaugcugugcaguucaa

SEQ ID NO: 21630 - RNA, 32 nt, Human
aacauuccucaaaaauacauacacucauacuu

SEQ ID NO: 21631 - RNA, 32 nt, Human
aacauuccucaagucuagccucaggagaccug

SEQ ID NO: 21632 - RNA, 32 nt, Human
aacauuccuuaaaucuucuccucuccagauau

SEQ ID NO: 21633 - RNA, 32 nt, Human
aacauuccuugcagaccccgcauugccuuugg

SEQ ID NO: 21634 - RNA, 32 nt, Human
aacauucgcuucucucaccaggaacauuuaug

SEQ ID NO: 21635 - RNA, 32 nt, Human
aacauucucaacaagaugaauugauggcggau

SEQ ID NO: 21636 - RNA, 32 nt, Human
aacauucucugcaagugucuguuauuagagaa

SEQ ID NO: 21637 - RNA, 32 nt, Human
aacauucugauuuuacauguaaaacaagaaaa

SEQ ID NO: 21638 - RNA, 32 nt, Human
aacauucugguuuccuccuuccuugaaguccc

SEQ ID NO: 21639 - RNA, 32 nt, Human
aacauucuugcuauaacugucucuccaagacc

SEQ ID NO: 21640 - RNA, 32 nt, Human
aacauucuuuccugccagaguucuaagaaucu

SEQ ID NO: 21641 - RNA, 32 nt, Human
aacauugaacccaggaggcggagcuugcagug

SEQ ID NO: 21642 - RNA, 32 nt, Human
aacauugaguccuguuuuccauuggcuucagg

SEQ ID NO: 21643 - RNA, 32 nt, Human
aacauugaugaacauccgaaacuacaacgugg

SEQ ID NO: 21644 - RNA, 32 nt, Human
aacauugcagagcuaagcagucgugguauggg

SEQ ID NO: 21645 - RNA, 26 nt, Human
aacauugccuaagcccuugccugcug

SEQ ID NO: 21646 - RNA, 32 nt, Human
aacauugcgguauccaugauuuggccuugugg

SEQ ID NO: 21647 - RNA, 20 nt, Human
aacauugcucaccugggccc

SEQ ID NO: 21648 - RNA, 32 nt, Human
aacauugcucagcuccagccugauauggaggc

SEQ ID NO: 21649 - RNA, 32 nt, Human
aacauuggcacugaggccagauggccuugggu

SEQ ID NO: 21650 - RNA, 32 nt, Human
aacauuggcaggaguccagaccacuuuuuguc

SEQ ID NO: 21651 - RNA, 32 nt, Human
aacauugggaaucaugguuuguuugcauuagu

SEQ ID NO: 21652 - RNA, 32 nt, Human
aacauuggggccuucuuaacaaaagucuuuga

SEQ ID NO: 21653 - RNA, 32 nt, Human
aacauugguauauuuccauucaugccaaagca

SEQ ID NO: 21654 - RNA, 32 nt, Human
aacauuguaaggacuaugaguccuccauuuuu

SEQ ID NO: 21655 - RNA, 32 nt, Human
aacauugucaugacaugagaagagacucugcu

SEQ ID NO: 21656 - RNA, 32 nt, Human
aacauugugauaauccuucacagcaagaaacc

SEQ ID NO: 21657 - RNA, 32 nt, Human
aacauuguucuuuuucugccuuccgacucaaa

SEQ ID NO: 21658 - RNA, 32 nt, Human
aacauuuaaaaagggauugggguugaaaauca

SEQ ID NO: 21659 - RNA, 32 nt, Human
aacauuuacauacaguuuugcucuucuauaca

SEQ ID NO: 21660 - RNA, 32 nt, Human
aacauuuacccacuuugugaaugggcugccug

SEQ ID NO: 21661 - RNA, 32 nt, Human
aacauuuagauguuuaguccaacugaaauuug

SEQ ID NO: 21662 - RNA, 32 nt, Human
aacauuuaguuuaaacccaagaaggacacuaa

SEQ ID NO: 21663 - RNA, 32 nt, Human
aacauuuauuaaaaauauaagagcauagagca

SEQ ID NO: 21664 - RNA, 32 nt, Human
aacauuucaguaggguucaagguggucccaaa

SEQ ID NO: 21665 - RNA, 32 nt, Human
aacauuucauccguguguauguguaugugugu

SEQ ID NO: 21666 - RNA, 32 nt, Human
aacauuucaucuauuaucucugccucauuucu

SEQ ID NO: 21667 - RNA, 32 nt, Human
aacauuucauucuucagccuguggaccugcuu

SEQ ID NO: 21668 - RNA, 32 nt, Human
aacauuucauuucccacccacacucgccagcu

SEQ ID NO: 21669 - RNA, 32 nt, Human
aacauuucuaaggugucccaagcccuggaaau

SEQ ID NO: 21670 - RNA, 32 nt, Human
aacauuucucagacaauguugaugcuacugau

SEQ ID NO: 21671 - RNA, 32 nt, Human
aacauuucuccccucacucccuugcugguguc

SEQ ID NO: 21672 - RNA, 21 nt, Human
aacauuugagggagccuuggg

SEQ ID NO: 21673 - RNA, 26 nt, Human
aacauuugcagccacacauguacaua

SEQ ID NO: 21674 - RNA, 32 nt, Human
aacauuugccugaauacuauggcuaagcauca

SEQ ID NO: 21675 - RNA, 32 nt, Human
aacauuugccuuuaggcuguucuuugagguau

SEQ ID NO: 21676 - RNA, 32 nt, Human
aacauuugcuuugcuuucugcugaaucccuaa

SEQ ID NO: 21677 - RNA, 32 nt, Human
aacauuuggcccugagccagcagaucaagcaa

SEQ ID NO: 21678 - RNA, 32 nt, Human
aacauuuggguugaugaggcagaggggauuca

SEQ ID NO: 21679 - RNA, 32 nt, Human
aacauuuguccacccugagagaacucugagca

SEQ ID NO: 21680 - RNA, 32 nt, Human
aacauuugugcagaaauuugaaugacaagauu

SEQ ID NO: 21681 - RNA, 32 nt, Human
aacauuuguuuagcuugcuuggcuuuaauuau

SEQ ID NO: 21682 - RNA, 32 nt, Human
aacauuuuacugaugugaacauucuagaugac

SEQ ID NO: 21683 - RNA, 32 nt, Human
aacauuuuaucugagaaggaaggaaggucaga

SEQ ID NO: 21684 - RNA, 32 nt, Human
aacauuuucagaagcaagugcauaaccuucuc

SEQ ID NO: 21685 - RNA, 32 nt, Human
aacauuuucagagauacagcuucuuauaguaa

SEQ ID NO: 21686 - RNA, 32 nt, Human
aacauuuuccaaauuguuuauuacuauugcuu

SEQ ID NO: 21687 - RNA, 32 nt, Human
aacauuuuccuuccaccucuuugaccuucccu

SEQ ID NO: 21688 - RNA, 32 nt, Human
aacauuuucuguaaagggccagauaguaaaua

SEQ ID NO: 21689 - RNA, 32 nt, Human
aacauuuucuguguguacauguacaugcauuu

SEQ ID NO: 21690 - RNA, 32 nt, Human
aacauuuucuucuucucucucuuaacuucaca

SEQ ID NO: 21691 - RNA, 32 nt, Human
aacauuuucuuuuauuguuacuugcuuuuuaa

SEQ ID NO: 21692 - RNA, 32 nt, Human
aacauuuugaccaaaaauccacacuauaugua

SEQ ID NO: 21693 - RNA, 32 nt, Human
aacauuuuggaggugcaucugcuaugugacau

SEQ ID NO: 21694 - RNA, 32 nt, Human
aacauuuugucuuugaccacugucuuuugaau

SEQ ID NO: 21695 - RNA, 32 nt, Human
aacauuuuucagggcaaggcuuuugcuacugg

SEQ ID NO: 21696 - RNA, 32 nt, Human
aacauuuuugguggucuuuaaugugauggaca

SEQ ID NO: 21697 - RNA, 32 nt, Human
aaccaaaaaggaacccagcaauucccaagugu

SEQ ID NO: 21698 - RNA, 22 nt, Human
aaccaaaacaaaauuaaugaaa

SEQ ID NO: 21699 - RNA, 32 nt, Human
aaccaaaacccaaaggcucuuuucagagccaa

SEQ ID NO: 21700 - RNA, 32 nt, Human
aaccaaaagagcuuucccucccucacuuuuuc

SEQ ID NO: 21701 - RNA, 32 nt, Human
aaccaaaauuggccuuuuucucccucuuaaua

SEQ ID NO: 21702 - RNA, 32 nt, Human
aaccaaacagcaguucauauaccugccugaga

SEQ ID NO: 21703 - RNA, 32 nt, Human
aaccaaaccaauucaccaacacaguugggacc

SEQ ID NO: 21704 - RNA, 23 nt, Human
aaccaaacucugugucagcaucu

SEQ ID NO: 21705 - RNA, 32 nt, Human
aaccaaagacacuguccccacagcaggugccu

SEQ ID NO: 21706 - RNA, 32 nt, Human
aaccaaagcaagaaaggauccugcaugaguca

SEQ ID NO: 21707 - RNA, 32 nt, Human
aaccaaagcggugcauggcaaugugauagggg

SEQ ID NO: 21708 - RNA, 32 nt, Human
aaccaaaggacuaggagucaggagaacaaguc

SEQ ID NO: 21709 - RNA, 32 nt, Human
aaccaaaggcugccacugcaugcagcuguccc

SEQ ID NO: 21710 - RNA, 32 nt, Human
aaccaaagucaagaaaggcugaauaagaaaaa

SEQ ID NO: 21711 - RNA, 32 nt, Human
aaccaaaguguugucaggccaacugaaugaug

SEQ ID NO: 21712 - RNA, 25 nt, Human
aaccaaauccuguugucagcaaucu

SEQ ID NO: 21713 - RNA, 32 nt, Human
aaccaaaucuuagaaucacuucauuuaaaaua

SEQ ID NO: 21714 - RNA, 32 nt, Human
aaccaaauguuacugcucaacugaaauaugag

SEQ ID NO: 21715 - RNA, 32 nt, Human
aaccaaauugcuugcagcuaggaggaccuuga

SEQ ID NO: 21716 - RNA, 32 nt, Human
aaccaaauuggucuuaaaaaugauguuaaccc

SEQ ID NO: 21717 - RNA, 32 nt, Human
aaccaaauuuuaucuuuuacauggccccuuug

SEQ ID NO: 21718 - RNA, 32 nt, Human
aaccaacacugcuuuuaauccucuuuuaaugu

SEQ ID NO: 21719 - RNA, 32 nt, Human
aaccaacaucucuaucaucccaaaaaguucuc

SEQ ID NO: 21720 - RNA, 32 nt, Human
aaccaacauggugaaaccccgucucuacaaaa

SEQ ID NO: 21721 - RNA, 32 nt, Human
aaccaacauggugaaaccccgucucuccuaaa

SEQ ID NO: 21722 - RNA, 32 nt, Human
aaccaacauggugaaaccucgugucuacuaaa

SEQ ID NO: 21723 - RNA, 32 nt, Human
aaccaacauucaaauucugccucaucuggagg

SEQ ID NO: 21724 - RNA, 32 nt, Human
aaccaaccaaccaaccaacaaacaaacacaga

SEQ ID NO: 21725 - RNA, 32 nt, Human
aaccaaccaaccaaccaaccaaacuucccucu

SEQ ID NO: 21726 - RNA, 32 nt, Human
aaccaaccaaccaaccaaccaacaaacaaaca

SEQ ID NO: 21727 - RNA, 32 nt, Human
aaccaaccaaccaaccaaccaaccaacaaaca

SEQ ID NO: 21728 - RNA, 32 nt, Human
aaccaaccaaccaaccaaccaaccacaaacca

SEQ ID NO: 21729 - RNA, 32 nt, Human
aaccaaccaagaggaggagaaagaugacccag

SEQ ID NO: 21730 - RNA, 32 nt, Human
aaccaaccaucccauuuuagcauugagagcau

SEQ ID NO: 21731 - RNA, 32 nt, Human
aaccaaccccuaaaaucauuuucuuauuguac

SEQ ID NO: 21732 - RNA, 32 nt, Human
aaccaaccgaaaaagacuagagggauuaguac

SEQ ID NO: 21733 - RNA, 32 nt, Human
aaccaaccuccaccuccuccuuccauuuugac

SEQ ID NO: 21734 - RNA, 32 nt, Human
aaccaaccugccuggcagaggugcagaaauuu

SEQ ID NO: 21735 - RNA, 32 nt, Human
aaccaaccuugggagcugugugccaguuccag

SEQ ID NO: 21736 - RNA, 32 nt, Human
aaccaacuccaccaaccucuggcucuuaaaua

SEQ ID NO: 21737 - RNA, 32 nt, Human
aaccaacuccaccaaccucuggcucuuacaua

SEQ ID NO: 21738 - RNA, 32 nt, Human
aaccaacucuuaggccugcucuuuacuaggga

SEQ ID NO: 21739 - RNA, 32 nt, Human
aaccaagagcucaggucacacagaccuuggag

SEQ ID NO: 21740 - RNA, 32 nt, Human
aaccaagaucaugccacugaacuccagccugg

SEQ ID NO: 21741 - RNA, 32 nt, Human
aaccaagauuaccugaguccaaguuuuaauaa

SEQ ID NO: 21742 - RNA, 32 nt, Human
aaccaagauucucugcuuuugcacugaaauua

SEQ ID NO: 21743 - RNA, 32 nt, Human
aaccaagcaccuucuagguccuaggauaggug

SEQ ID NO: 21744 - RNA, 32 nt, Human
aaccaagcacuuugacauuugcaccuuaggag

SEQ ID NO: 21745 - RNA, 32 nt, Human
aaccaagcaguugugcugagaauggcaccugg

SEQ ID NO: 21746 - RNA, 32 nt, Human
aaccaagcauuuucagucuuacaaagaaaucu

SEQ ID NO: 21747 - RNA, 32 nt, Human
aaccaagcuauuccuuucccuuccucuucggc

SEQ ID NO: 21748 - RNA, 32 nt, Human
aaccaagcugcagugggagcagccugggaccc

SEQ ID NO: 21749 - RNA, 32 nt, Human
aaccaaggagagaggaagggagcagguucaca

SEQ ID NO: 21750 - RNA, 32 nt, Human
aaccaaggaggcagagguuguaguaagcugac

SEQ ID NO: 21751 - RNA, 32 nt, Human
aaccaaggagguggagguugcagugagccggg

SEQ ID NO: 21752 - RNA, 32 nt, Human
aaccaaggaggugguuggacagcuggaggaug

SEQ ID NO: 21753 - RNA, 32 nt, Human
aaccaaggcacuccagccugggugacagagug

SEQ ID NO: 21754 - RNA, 32 nt, Human
aaccaaggccauguacagcugcagugaaggcu

SEQ ID NO: 21755 - RNA, 32 nt, Human
aaccaaggcccagcuggcagugcugaucgauc

SEQ ID NO: 21756 - RNA, 32 nt, Human
aaccaaggcuccaaaggcugaggucuccccag

SEQ ID NO: 21757 - RNA, 32 nt, Human
aaccaaggcuccccgugcuucuucccauugcu

SEQ ID NO: 21758 - RNA, 32 nt, Human
aaccaaggcucuaaaagaugauuucccuucug

SEQ ID NO: 21759 - RNA, 32 nt, Human
aaccaaggcugcagccgguugaaggccucacu

SEQ ID NO: 21760 - RNA, 32 nt, Human
aaccaagggaagcuccucugauucaccuagaa

SEQ ID NO: 21761 - RNA, 32 nt, Human
aaccaagggauuugugcucuucaucugugggu

SEQ ID NO: 21762 - RNA, 32 nt, Human
aaccaagggcaccuugcuuugcacugacgcaa

SEQ ID NO: 21763 - RNA, 32 nt, Human
aaccaagguggcagagguugcaguaagccaag

SEQ ID NO: 21764 - RNA, 32 nt, Human
aaccaaguacucugucuacaccagagggugcu

SEQ ID NO: 21765 - RNA, 32 nt, Human
aaccaagucauaaauugcuguaaucuuuccug

SEQ ID NO: 21766 - RNA, 32 nt, Human
aaccaagucaugugcauuuccacgucaacaga

SEQ ID NO: 21767 - RNA, 32 nt, Human
aaccaagucucuagguuccucuuaucagauau

SEQ ID NO: 21768 - RNA, 32 nt, Human
aaccaagugccuugagcugccugcucugcagc

SEQ ID NO: 21769 - RNA, 32 nt, Human
aaccaaguuuaagcccaccaaugcacugcuga

SEQ ID NO: 21770 - RNA, 32 nt, Human
aaccaaguuuuuaaaaagaugauucucugaua

SEQ ID NO: 21771 - RNA, 32 nt, Human
aaccaauaaacaguaaccuccaucaaaugcua

SEQ ID NO: 21772 - RNA, 32 nt, Human
aaccaauccccgggaaccucaggcccgcggau

SEQ ID NO: 21773 - RNA, 32 nt, Human
aaccaaucccuucacacucucucccccauccc

SEQ ID NO: 21774 - RNA, 32 nt, Human
aaccaaugaauggcuaauacugacauauucag

SEQ ID NO: 21775 - RNA, 32 nt, Human
aaccaaugcucacaccuuauugcacaggaaag

SEQ ID NO: 21776 - RNA, 32 nt, Human
aaccaaugcucugccucagggugcaaaugcca

SEQ ID NO: 21777 - RNA, 32 nt, Human
aaccaaugucauaacaggcauugccaaccuca

SEQ ID NO: 21778 - RNA, 32 nt, Human
aaccaaugugaggaggcuugagacaggguuau

SEQ ID NO: 21779 - RNA, 32 nt, Human
aaccaauguucucucuucuccaccucccacaa

SEQ ID NO: 21780 - RNA, 32 nt, Human
aaccaauuacucguccccgccauuccagggau

SEQ ID NO: 21781 - RNA, 32 nt, Human
aaccaauuucaccucugucuccaguaucacca

SEQ ID NO: 21782 - RNA, 32 nt, Human
aaccaauuuugucccauuucaccaggaugacu

SEQ ID NO: 21783 - RNA, 32 nt, Human
aaccacaaaacucaucuggaguucucaaagac

SEQ ID NO: 21784 - RNA, 18 nt, Human
aaccacaaacuuguuuua

SEQ ID NO: 21785 - RNA, 32 nt, Human
aaccacaagguggcagaagaacuccauucuug

SEQ ID NO: 21786 - RNA, 32 nt, Human
aaccacacacagucuccaacuucuaaacuaac

SEQ ID NO: 21787 - RNA, 32 nt, Human
aaccacaccacaucuaagccugaaggggcguc

SEQ ID NO: 21788 - RNA, 32 nt, Human
aaccacacugccugucauugugcuuuauguca

SEQ ID NO: 21789 - RNA, 32 nt, Human
aaccacagaccagaacugguugcauguuacuu

SEQ ID NO: 21790 - RNA, 32 nt, Human
aaccacagagcacuggcccuucauggcugagc

SEQ ID NO: 21791 - RNA, 32 nt, Human
aaccacagagccaggaggaaugucugagcaga

SEQ ID NO: 21792 - RNA, 32 nt, Human
aaccacagagccgccuugacagaagccagggc

SEQ ID NO: 21793 - RNA, 32 nt, Human
aaccacagaggaaggaugaggugggaugugga

SEQ ID NO: 21794 - RNA, 32 nt, Human
aaccacagaggaccugugacagcucugcagaa

SEQ ID NO: 21795 - RNA, 32 nt, Human
aaccacagccuauccucugcuccauuucacuc

SEQ ID NO: 21796 - RNA, 32 nt, Human
aaccacagccuauggggaacugcccuugacuc

SEQ ID NO: 21797 - RNA, 32 nt, Human
aaccacagugccaccaagcucacaccuguccu

SEQ ID NO: 21798 - RNA, 32 nt, Human
aaccacaguuauguaagcagguucugagaaaa

SEQ ID NO: 21799 - RNA, 32 nt, Human
aaccacauccccaggcauaacaccaccuuccc

SEQ ID NO: 21800 - RNA, 32 nt, Human
aaccacaucucccauaacugccccagcacauc

SEQ ID NO: 21801 - RNA, 32 nt, Human
aaccacaucugggucuaguagguggaucccau

SEQ ID NO: 21802 - RNA, 32 nt, Human
aaccacaucuucuucagggaucgauauggagu

SEQ ID NO: 21803 - RNA, 24 nt, Human
aaccaccaaaauugucuccagaca

SEQ ID NO: 21804 - RNA, 32 nt, Human
aaccaccaccaccacaauaaacaaguugcuga

SEQ ID NO: 21805 - RNA, 32 nt, Human
aaccaccaccaccaccaccaccccuacuaccc

SEQ ID NO: 21806 - RNA, 32 nt, Human
aaccaccaccaccaccaccgccgccaccacca

SEQ ID NO: 21807 - RNA, 32 nt, Human
aaccaccaccaccacccccacacccaccacuc

SEQ ID NO: 21808 - RNA, 32 nt, Human
aaccaccacgcccagcugguuccugaggaagu

SEQ ID NO: 21809 - RNA, 32 nt, Human
aaccaccaggcgcguccccgccggcuuggguc

SEQ ID NO: 21810 - RNA, 32 nt, Human
aaccaccaguaccaccaccacuacccacauca

SEQ ID NO: 21811 - RNA, 32 nt, Human
aaccaccaguccaagaaucuguuuaaguucag

SEQ ID NO: 21812 - RNA, 32 nt, Human
aaccaccagugaaauguguguguauacaauaa

SEQ ID NO: 21813 - RNA, 32 nt, Human
aaccaccaugggcaaggcagucucucucccag

SEQ ID NO: 21814 - RNA, 32 nt, Human
aaccacccaaguauuggugaugccaggccuca

SEQ ID NO: 21815 - RNA, 32 nt, Human
aaccacccagaacccagaaaaugcagauucac

SEQ ID NO: 21816 - RNA, 32 nt, Human
aaccacccagcccagaaguuccagggaaggaa

SEQ ID NO: 21817 - RNA, 32 nt, Human
aaccacccauccuccugccucccaccaccacc

SEQ ID NO: 21818 - RNA, 32 nt, Human
aaccacccccacucugcacucucccccucuau

SEQ ID NO: 21819 - RNA, 32 nt, Human
aaccaccccuccaccucuggaggucccaccag

SEQ ID NO: 21820 - RNA, 32 nt, Human
aaccacccuugagagaagaggcagcagcagcg

SEQ ID NO: 21821 - RNA, 32 nt, Human
aaccacccuuggaacuugccucuuguccugcu

SEQ ID NO: 21822 - RNA, 32 nt, Human
aaccaccgccaccaccaccaacaccgccacac

SEQ ID NO: 21823 - RNA, 32 nt, Human
aaccaccgcugccucuccuuccuccgcaugag

SEQ ID NO: 21824 - RNA, 32 nt, Human
aaccaccggaaguggcugucucagggauacug

SEQ ID NO: 21825 - RNA, 32 nt, Human
aaccaccgugccuggccaaagauguaauuuaa

SEQ ID NO: 21826 - RNA, 32 nt, Human
aaccaccuaggaaccugcuguugcucuaaggc

SEQ ID NO: 21827 - RNA, 32 nt, Human
aaccaccucccaaaggcugucauuucauugca

SEQ ID NO: 21828 - RNA, 32 nt, Human
aaccaccuccuggcuggacacagggcaaguug

SEQ ID NO: 21829 - RNA, 32 nt, Human
aaccaccucucugucuuuuuccuuccugagaa

SEQ ID NO: 21830 - RNA, 32 nt, Human
aaccaccugaucuccccuuggacuguacccuu

SEQ ID NO: 21831 - RNA, 32 nt, Human
aaccaccugcaggacccucacccauggugucc

SEQ ID NO: 21832 - RNA, 32 nt, Human
aaccaccuggggacucacguagcuggagagca

SEQ ID NO: 21833 - RNA, 32 nt, Human
aaccaccugucaucaaaacauggacagcaggg

SEQ ID NO: 21834 - RNA, 32 nt, Human
aaccaccuuuccagagagcaucagcccuccag

SEQ ID NO: 21835 - RNA, 32 nt, Human
aaccaccuuuccagccauagagauuuuaauua

SEQ ID NO: 21836 - RNA, 32 nt, Human
aaccacgaaacgcccagguggagggaguaagg

SEQ ID NO: 21837 - RNA, 32 nt, Human
aaccacgaccaccaccaccaccaccacucacc

SEQ ID NO: 21838 - RNA, 32 nt, Human
aaccacgcccagcuaauuuuuguauuuucggu

SEQ ID NO: 21839 - RNA, 32 nt, Human
aaccacgcccagcuaauuuuuguauuuuuagu

SEQ ID NO: 21840 - RNA, 32 nt, Human
aaccacgggcuggccuuacugcccuugagauc

SEQ ID NO: 21841 - RNA, 32 nt, Human
aaccacgggucugacacgucugagaugagcug

SEQ ID NO: 21842 - RNA, 32 nt, Human
aaccacguugggacagggaggugugaggcagg

SEQ ID NO: 21843 - RNA, 32 nt, Human
aaccacuagcacuuaaguacuccugauucuua

SEQ ID NO: 21844 - RNA, 32 nt, Human
aaccacuaggguaaacaaagcagcuauggcuu

SEQ ID NO: 21845 - RNA, 32 nt, Human
aaccacuaugugaagggugauuggagaaggac

SEQ ID NO: 21846 - RNA, 32 nt, Human
aaccacucacucuguguaaaggccaacagauu

SEQ ID NO: 21847 - RNA, 32 nt, Human
aaccacucacucuguguaaaggccaacggauu

SEQ ID NO: 21848 - RNA, 32 nt, Human
aaccacuccucauguaaucuuugccucucucu

SEQ ID NO: 21849 - RNA, 32 nt, Human
aaccacuccucuccucccaguggagugggguu

SEQ ID NO: 21850 - RNA, 32 nt, Human
aaccacucuaaaauuguuugguaaugucacuu

SEQ ID NO: 21851 - RNA, 32 nt, Human
aaccacucuccccagauccuggagaguggguu

SEQ ID NO: 21852 - RNA, 32 nt, Human
aaccacugacauuccuccauguccucacggcu

SEQ ID NO: 21853 - RNA, 32 nt, Human
aaccacugacccuuucugggccuguuuccuua

SEQ ID NO: 21854 - RNA, 32 nt, Human
aaccacugaguaugauguuggcucuaaguauu

SEQ ID NO: 21855 - RNA, 32 nt, Human
aaccacugcaauccagccugggcaacgagcaa

SEQ ID NO: 21856 - RNA, 32 nt, Human
aaccacugcacuccaaccugggcaacauggca

SEQ ID NO: 21857 - RNA, 32 nt, Human
aaccacugccaaggagugcggggguggcaaug

SEQ ID NO: 21858 - RNA, 32 nt, Human
aaccacugccgaguuucugccuggagcagggc

SEQ ID NO: 21859 - RNA, 19 nt, Human
aaccacugguauccagaga

SEQ ID NO: 21860 - RNA, 32 nt, Human
aaccacuggucuagcuagaccugcacugucca

SEQ ID NO: 21861 - RNA, 32 nt, Human
aaccacuguaguccagccugagugacagagug

SEQ ID NO: 21862 - RNA, 32 nt, Human
aaccacuguucccaaauugggaaaugucccag

SEQ ID NO: 21863 - RNA, 32 nt, Human
aaccacuuaccccuauugcucuucuuccuaaa

SEQ ID NO: 21864 - RNA, 32 nt, Human
aaccacuucuuagcuucauuuguucucauaac

SEQ ID NO: 21865 - RNA, 32 nt, Human
aaccacuugaaaagcuggaccaauagcaaggu

SEQ ID NO: 21866 - RNA, 32 nt, Human
aaccacuuugugaauacauauguguauauaag

SEQ ID NO: 21867 - RNA, 32 nt, Human
aaccacuuuucugaugucuucaaacaaacagc

SEQ ID NO: 21868 - RNA, 32 nt, Human
aaccagaaaaugugggaacucauucauucuug

SEQ ID NO: 21869 - RNA, 19 nt, Human
aaccagaaaugcaacaguu

SEQ ID NO: 21870 - RNA, 32 nt, Human
aaccagaaaugucuuaucucuaaaaauuuuua

SEQ ID NO: 21871 - RNA, 20 nt, Human
aaccagaaccugcaccacac

SEQ ID NO: 21872 - RNA, 20 nt, Human
aaccagaacucugcgcccca

SEQ ID NO: 21873 - RNA, 32 nt, Human
aaccagaagguggagguggcagugagccgaga

SEQ ID NO: 21874 - RNA, 32 nt, Human
aaccagaaguagcugggcauuggagucauggg

SEQ ID NO: 21875 - RNA, 32 nt, Human
aaccagaaguccugcaccugauuucccaucac

SEQ ID NO: 21876 - RNA, 32 nt, Human
aaccagaaguuagcaagagugcugcugguucc

SEQ ID NO: 21877 - RNA, 32 nt, Human
aaccagaauauauaaggaguucaaccaacucc

SEQ ID NO: 21878 - RNA, 32 nt, Human
aaccagaaucuuaauccuggagucuaggaauc

SEQ ID NO: 21879 - RNA, 32 nt, Human
aaccagaauucuccagcaacaugaggaggaaa

SEQ ID NO: 21880 - RNA, 32 nt, Human
aaccagacaaguguccuaggagagugaacagg

SEQ ID NO: 21881 - RNA, 32 nt, Human
aaccagacacaguaggacaaauauuguauagu

SEQ ID NO: 21882 - RNA, 32 nt, Human
aaccagacagcagccuugggugcaggcguggu

SEQ ID NO: 21883 - RNA, 32 nt, Human
aaccagacagcucgguuuuugccaccauuuau

SEQ ID NO: 21884 - RNA, 32 nt, Human
aaccagacccuccucagccucagccuucgaga

SEQ ID NO: 21885 - RNA, 32 nt, Human
aaccagaccucuacauuccauuuuggaagaag

SEQ ID NO: 21886 - RNA, 32 nt, Human
aaccagacucugugucuccucccaggugcuga

SEQ ID NO: 21887 - RNA, 32 nt, Human
aaccagacucuugccuguuucccaggcccacu

SEQ ID NO: 21888 - RNA, 32 nt, Human
aaccagacugcagaauggaggggugggaacuu

SEQ ID NO: 21889 - RNA, 32 nt, Human
aaccagacugccuuuuguccaguggcugucag

SEQ ID NO: 21890 - RNA, 32 nt, Human
aaccagacuuaucuugcaauaugagaaugcug

SEQ ID NO: 21891 - RNA, 32 nt, Human
aaccagagaaaaguuugaggcauuaaaagaag

SEQ ID NO: 21892 - RNA, 32 nt, Human
aaccagagagguggagguugcagugaaccgag

SEQ ID NO: 21893 - RNA, 32 nt, Human
aaccagagaucuguaaucaucucuauuggccu

SEQ ID NO: 21894 - RNA, 32 nt, Human
aaccagagaugacugaaaccacucugaaauaa

SEQ ID NO: 21895 - RNA, 32 nt, Human
aaccagagcagcugcauuuuuaucccauucau

SEQ ID NO: 21896 - RNA, 32 nt, Human
aaccagagccaaauacuuuugaagaguuuccc

SEQ ID NO: 21897 - RNA, 32 nt, Human
aaccagagcccccuaugggcucagugggcucc

SEQ ID NO: 21898 - RNA, 32 nt, Human
aaccagagcgcucagccagccugcuggacugg

SEQ ID NO: 21899 - RNA, 32 nt, Human
aaccagagcucauuggcuaucucuuccauguu

SEQ ID NO: 21900 - RNA, 32 nt, Human
aaccagaggaggaggaggacagagggagagaa

SEQ ID NO: 21901 - RNA, 32 nt, Human
aaccagaggucugguaucuacacuccuggugc

SEQ ID NO: 21902 - RNA, 32 nt, Human
aaccagagguggaggaagaacgguaggaaggc

SEQ ID NO: 21903 - RNA, 32 nt, Human
aaccagagucauaugcugcuaguagaauuuuu

SEQ ID NO: 21904 - RNA, 32 nt, Human
aaccagagugagagggcagauaggcaggauuc

SEQ ID NO: 21905 - RNA, 32 nt, Human
aaccagagugggcagaagcaucgagagcguga

SEQ ID NO: 21906 - RNA, 32 nt, Human
aaccagaugcagagggaacagccuggccuaga

SEQ ID NO: 21907 - RNA, 32 nt, Human
aaccagaugcccagagccggcaggagcaggac

SEQ ID NO: 21908 - RNA, 32 nt, Human
aaccagaugcccaggacaggugcucuagccau

SEQ ID NO: 21909 - RNA, 32 nt, Human
aaccagauguuacuggggccaagcuaggaugg

SEQ ID NO: 21910 - RNA, 32 nt, Human
aaccagcaacccagacuuccacuggcaacucu

SEQ ID NO: 21911 - RNA, 31 nt, Human
aaccagcaacuuuucucauguguuuggaguu

SEQ ID NO: 21912 - RNA, 32 nt, Human
aaccagcaagaacacuuggaaugaacgaauga

SEQ ID NO: 21913 - RNA, 32 nt, Human
aaccagcaauggaggagcagccccagaugcaa

SEQ ID NO: 21914 - RNA, 32 nt, Human
aaccagcacagauguucugaacugaauggugu

SEQ ID NO: 21915 - RNA, 32 nt, Human
aaccagcacuccaucacugagagcccgacuuc

SEQ ID NO: 21916 - RNA, 32 nt, Human
aaccagcacugcccuggcgcuucauagguucu

SEQ ID NO: 21917 - RNA, 32 nt, Human
aaccagcagcagagccagggcccagggaccag

SEQ ID NO: 21918 - RNA, 32 nt, Human
aaccagcagcuguuccucagguugugacucac

SEQ ID NO: 21919 - RNA, 31 nt, Human
aaccagcagugcuaguaacuaccucacagag

SEQ ID NO: 21920 - RNA, 32 nt, Human
aaccagcaucccaguucucaggagacauggau

SEQ ID NO: 21921 - RNA, 32 nt, Human
aaccagcauggaaaacagauuagguuagaugu

SEQ ID NO: 21922 - RNA, 32 nt, Human
aaccagcauucaacaacaaauuuuggaaccua

SEQ ID NO: 21923 - RNA, 32 nt, Human
aaccagcauucucuuauuaauucuuuaaacug

SEQ ID NO: 21924 - RNA, 32 nt, Human
aaccagccaccuacugcugaagucucuuguaa

SEQ ID NO: 21925 - RNA, 32 nt, Human
aaccagccacugcagcccuccagcucuggccc

SEQ ID NO: 21926 - RNA, 32 nt, Human
aaccagcccaauagaaguacagagccagcuga

SEQ ID NO: 21927 - RNA, 32 nt, Human
aaccagcccacugucaccccuaauuuacagac

SEQ ID NO: 21928 - RNA, 32 nt, Human
aaccagcccagccgcugccucuugccgcuccg

SEQ ID NO: 21929 - RNA, 32 nt, Human
aaccagccccucccccugccccaccuccuccc

SEQ ID NO: 21930 - RNA, 32 nt, Human
aaccagccucacaagaacaucaacaucaccuu

SEQ ID NO: 21931 - RNA, 32 nt, Human
aaccagccucagaucagggcccugccacccag

SEQ ID NO: 21932 - RNA, 32 nt, Human
aaccagccucuucagccucacacccauucccc

SEQ ID NO: 21933 - RNA, 32 nt, Human
aaccagccugggagggagaagccucgguuacc

SEQ ID NO: 21934 - RNA, 32 nt, Human
aaccagccugggagucagggaggacucuucag

SEQ ID NO: 21935 - RNA, 32 nt, Human
aaccagccuggggccuuccuggcuuugggagu

SEQ ID NO: 21936 - RNA, 25 nt, Human
aaccagccugggugacagagggaga

SEQ ID NO: 21937 - RNA, 32 nt, Human
aaccagccugggugcccggugcaguggcucau

SEQ ID NO: 21938 - RNA, 32 nt, Human
aaccagccugguccacugggaacucaaaagcc

SEQ ID NO: 21939 - RNA, 32 nt, Human
aaccagccuuugcuguagcacacacauauauc

SEQ ID NO: 21940 - RNA, 31 nt, Human
aaccagccuuuucagcaucucacccauuagc

SEQ ID NO: 21941 - RNA, 32 nt, Human
aaccagcgggugggcaucuuccccagcaacua

SEQ ID NO: 21942 - RNA, 32 nt, Human
aaccagcuaucccucuggaaugcagcugacca

SEQ ID NO: 21943 - RNA, 32 nt, Human
aaccagcucacauggagaaucagagaauggga

SEQ ID NO: 21944 - RNA, 32 nt, Human
aaccagcucacugcagccuugaccuccugggc

SEQ ID NO: 21945 - RNA, 23 nt, Human
aaccagcugagacagggcgccac

SEQ ID NO: 21946 - RNA, 32 nt, Human
aaccagcugcacagcaggagaguuacugugga

SEQ ID NO: 21947 - RNA, 19 nt, Human
aaccagcuucacccaggag

SEQ ID NO: 21948 - RNA, 32 nt, Human
aaccagcuucgaguuacuuucccuucaagggg

SEQ ID NO: 21949 - RNA, 18 nt, Human
aaccagcuuugcucgagu

SEQ ID NO: 21950 - RNA, 32 nt, Human
aaccaggaaaacuuccuugucuuauuacuuua

SEQ ID NO: 21951 - RNA, 32 nt, Human
aaccaggaaauccugccaucuccgccuuuauu

SEQ ID NO: 21952 - RNA, 32 nt, Human
aaccaggaaaugggucagggaggagaaacaaa

SEQ ID NO: 21953 - RNA, 32 nt, Human
aaccaggaagcauugcuuuuggacaaggaaga

SEQ ID NO: 21954 - RNA, 23 nt, Human
aaccaggaaggcagagauugcag

SEQ ID NO: 21955 - RNA, 32 nt, Human
aaccaggaaggcagagauugcagugagcugag

SEQ ID NO: 21956 - RNA, 32 nt, Human
aaccaggaaggcagagguugcacugagcugag

SEQ ID NO: 21957 - RNA, 32 nt, Human
aaccaggacagaggcugcagcacccagggagg

SEQ ID NO: 21958 - RNA, 32 nt, Human
aaccaggacagcugugugugcagaccucaugu

SEQ ID NO: 21959 - RNA, 32 nt, Human
aaccaggacaugacccucccccacccugcucg

SEQ ID NO: 21960 - RNA, 32 nt, Human
aaccaggagacggagguugcagugagcugaaa

SEQ ID NO: 21961 - RNA, 32 nt, Human
aaccaggagauccugcaucgaugaaucccaga

SEQ ID NO: 21962 - RNA, 32 nt, Human
aaccaggagccucaagugacagccaggaagag

SEQ ID NO: 21963 - RNA, 32 nt, Human
aaccaggagcugcucacuaccuccucagggau

SEQ ID NO: 21964 - RNA, 32 nt, Human
aaccaggaggagguggcugcugugccccaacc

SEQ ID NO: 21965 - RNA, 25 nt, Human
aaccaggaggcggaggcugcaguga

SEQ ID NO: 21966 - RNA, 32 nt, Human
aaccaggaggcugaggcaggagaaucacuuga

SEQ ID NO: 21967 - RNA, 32 nt, Human
aaccaggagguggacguugcagugaucccaga

SEQ ID NO: 21968 - RNA, 32 nt, Human
aaccaggagguuugggguuaagagauacucaa

SEQ ID NO: 21969 - RNA, 32 nt, Human
aaccaggaucugucagcgcagccccagugcug

SEQ ID NO: 21970 - RNA, 32 nt, Human
aaccaggaugauaagacacauggagcagagcc

SEQ ID NO: 21971 - RNA, 32 nt, Human
aaccaggauggaaacuucuucccugccuuacc

SEQ ID NO: 21972 - RNA, 32 nt, Human
aaccaggauggggagguugcagugagccgaga

SEQ ID NO: 21973 - RNA, 32 nt, Human
aaccaggauuccuuacuauugacagauuugcu

SEQ ID NO: 21974 - RNA, 32 nt, Human
aaccaggcacucucccuuucugucuuucuagu

SEQ ID NO: 21975 - RNA, 32 nt, Human
aaccaggcagguccugaaagcauuuuccauaa

SEQ ID NO: 21976 - RNA, 32 nt, Human
aaccaggccacauuccuuccaucgugcccuga

SEQ ID NO: 21977 - RNA, 32 nt, Human
aaccaggcccgcgccgccaccauguuucgaaa

SEQ ID NO: 21978 - RNA, 32 nt, Human
aaccaggccugggcuaggcugcagccugccuc

SEQ ID NO: 21979 - RNA, 32 nt, Human
aaccaggcuggcaaagccccacccucauggag

SEQ ID NO: 21980 - RNA, 32 nt, Human
aaccaggcugggucaggcucuuaauuucacua

SEQ ID NO: 21981 - RNA, 32 nt, Human
aaccagggaagcggagguugcagugagccgag

SEQ ID NO: 21982 - RNA, 32 nt, Human
aaccagggagaugagacauaccagggcugggc

SEQ ID NO: 21983 - RNA, 32 nt, Human
aaccagggagcuaucuggcaccuuuugugcuc

SEQ ID NO: 21984 - RNA, 32 nt, Human
aaccagggagcuuguuagaaauguagaaucug

SEQ ID NO: 21985 - RNA, 32 nt, Human
aaccagggaggaaagaagggagagggagguuc

SEQ ID NO: 21986 - RNA, 32 nt, Human
aaccagggaggaggagcuugcagugagccgag

SEQ ID NO: 21987 - RNA, 32 nt, Human
aaccagggaggcagagauugcagugagccgag

SEQ ID NO: 21988 - RNA, 32 nt, Human
aaccagggaggcagaggcugcggugagccgag

SEQ ID NO: 21989 - RNA, 32 nt, Human
aaccagggaggcagagguugcagugagcccag

SEQ ID NO: 21990 - RNA, 32 nt, Human
aaccagggaggcagagguugcagugagccgag

SEQ ID NO: 21991 - RNA, 32 nt, Human
aaccagggaggcagagguuguggugagccgag

SEQ ID NO: 21992 - RNA, 32 nt, Human
aaccagggaggcagaguuugcagugaauggag

SEQ ID NO: 21993 - RNA, 32 nt, Human
aaccagggaggcggagguugcagcaagccaag

SEQ ID NO: 21994 - RNA, 32 nt, Human
aaccagggaggcggagguugcagugagccgag

SEQ ID NO: 21995 - RNA, 32 nt, Human
aaccagggaggcggcgguuguggugagcugug

SEQ ID NO: 21996 - RNA, 32 nt, Human
aaccagggagguagagguugcagugagcugag

SEQ ID NO: 21997 - RNA, 26 nt, Human
aaccagggagguggagguugcaguga

SEQ ID NO: 21998 - RNA, 32 nt, Human
aaccagggagguggagguugcagugagccaag

SEQ ID NO: 21999 - RNA, 32 nt, Human
aaccagggagguggagguugcagugagccgag

SEQ ID NO: 22000 - RNA, 32 nt, Human
aaccagggagguggagguugcagugagcugag

SEQ ID NO: 22001 - RNA, 32 nt, Human
aaccagggagucagagguuucagugagccaag

SEQ ID NO: 22002 - RNA, 32 nt, Human
aaccagggagucggagauugcagugagcugag

SEQ ID NO: 22003 - RNA, 32 nt, Human
aaccagggaugcugagguugcacgagcugaga

SEQ ID NO: 22004 - RNA, 32 nt, Human
aaccagggcacaauaaauggugugauuggcuc

SEQ ID NO: 22005 - RNA, 32 nt, Human
aaccagggcagaaaggagggaggauucguccc

SEQ ID NO: 22006 - RNA, 32 nt, Human
aaccagggcugaguucagcccagcucugucca

SEQ ID NO: 22007 - RNA, 32 nt, Human
aaccagggcuugucuccuccugaacuugggcc

SEQ ID NO: 22008 - RNA, 32 nt, Human
aaccaggggcccugaucaggggacugagccgu

SEQ ID NO: 22009 - RNA, 32 nt, Human
aaccaggggcuucauuuucgcuuuucccugga

SEQ ID NO: 22010 - RNA, 32 nt, Human
aaccaggguauucuuuuuccaucccuagccau

SEQ ID NO: 22011 - RNA, 32 nt, Human
aaccaggguauucuuuuuccauccuuagccau

SEQ ID NO: 22012 - RNA, 32 nt, Human
aaccaggguggaagcgccaggagcagcugcag

SEQ ID NO: 22013 - RNA, 32 nt, Human
aaccaggucacauggaccacagugccagaucc

SEQ ID NO: 22014 - RNA, 32 nt, Human
aaccaggucaucuccccguugccaaguggguu

SEQ ID NO: 22015 - RNA, 32 nt, Human
aaccaggucauuugugcacagcccggaaggca

SEQ ID NO: 22016 - RNA, 32 nt, Human
aaccaggucccaagcuccauuggagaugacca

SEQ ID NO: 22017 - RNA, 32 nt, Human
aaccagguccugauuauggcaagcugccccac

SEQ ID NO: 22018 - RNA, 32 nt, Human
aaccagguuccaguccucucuggcagaagagc

SEQ ID NO: 22019 - RNA, 32 nt, Human
aaccagguuuaaauaggcucuacccuuaccuu

SEQ ID NO: 22020 - RNA, 32 nt, Human
aaccaguaaggagacuugaaauucagaaaauc

SEQ ID NO: 22021 - RNA, 32 nt, Human
aaccaguauccuucuagcucuccagucaggac

SEQ ID NO: 22022 - RNA, 25 nt, Human
aaccaguauuucauacaaacuugua

SEQ ID NO: 22023 - RNA, 32 nt, Human
aaccagucaccuuucuccuagguaaugaguag

SEQ ID NO: 22024 - RNA, 32 nt, Human
aaccagucagcccucuguggagucauugugcc

SEQ ID NO: 22025 - RNA, 32 nt, Human
aaccaguccagcuggggaaacugaggcucugg

SEQ ID NO: 22026 - RNA, 32 nt, Human
aaccagucugaaauaggauaaaagccaccaaa

SEQ ID NO: 22027 - RNA, 31 nt, Human
aaccagugacuucucugggccugggucuggg

SEQ ID NO: 22028 - RNA, 32 nt, Human
aaccaguggaccuggaauuggccaagggcuca

SEQ ID NO: 22029 - RNA, 32 nt, Human
aaccaguggcccaggggauguuacgguggaca

SEQ ID NO: 22030 - RNA, 32 nt, Human
aaccagugggacaaacugccuccuggagguuu

SEQ ID NO: 22031 - RNA, 32 nt, Human
aaccaguggggaaaaucccacagaaaucagua

SEQ ID NO: 22032 - RNA, 32 nt, Human
aaccaguggucugcaagaaggcuuguucuucc

SEQ ID NO: 22033 - RNA, 32 nt, Human
aaccagugucgaguuccaugcuggccccggca

SEQ ID NO: 22034 - RNA, 32 nt, Human
aaccagugucuucugccccucucccagcuguu

SEQ ID NO: 22035 - RNA, 32 nt, Human
aaccaguguggccgagguugcagugaguguag

SEQ ID NO: 22036 - RNA, 32 nt, Human
aaccaguucccuaccagugucuugucagcucu

SEQ ID NO: 22037 - RNA, 32 nt, Human
aaccaguugcugcugucauaccccuggcaggg

SEQ ID NO: 22038 - RNA, 32 nt, Human
aaccaguuucuaucccuuaccugcuuuucucu

SEQ ID NO: 22039 - RNA, 32 nt, Human
aaccaguuuucaucuuugaaagugccauuucu

SEQ ID NO: 22040 - RNA, 32 nt, Human
aaccauaaaauggacaacugagaauucuccca

SEQ ID NO: 22041 - RNA, 32 nt, Human
aaccauaacauacugugauucaucaaacagca

SEQ ID NO: 22042 - RNA, 32 nt, Human
aaccauaacauacugugauucaucaagcagca

SEQ ID NO: 22043 - RNA, 32 nt, Human
aaccauaagacaccuauccugcucuguuauuu

SEQ ID NO: 22044 - RNA, 22 nt, Human
aaccauaaugaaaaucaugaaa

SEQ ID NO: 22045 - RNA, 32 nt, Human
aaccauacauuuuccaagacucagggaacaca

SEQ ID NO: 22046 - RNA, 32 nt, Human
aaccauacucacaaccaucacagcagagguga

SEQ ID NO: 22047 - RNA, 32 nt, Human
aaccauagaagagaggaagaaaacaaagggca

SEQ ID NO: 22048 - RNA, 32 nt, Human
aaccauaggaagcuaauaugugcuccaucguu

SEQ ID NO: 22049 - RNA, 32 nt, Human
aaccauaucccuucuggcaauuuccuucucag

SEQ ID NO: 22050 - RNA, 32 nt, Human
aaccauaugaauguaaugaaugugggaaagcu

SEQ ID NO: 22051 - RNA, 32 nt, Human
aaccauauuuaguuguacaguaagagaaauuu

SEQ ID NO: 22052 - RNA, 32 nt, Human
aaccaucaacaucucugguguuuuaagauguu

SEQ ID NO: 22053 - RNA, 32 nt, Human
aaccaucacuagcucugguuucccaagauccu

SEQ ID NO: 22054 - RNA, 32 nt, Human
aaccaucagagcaguggcuggggcacuggaag

SEQ ID NO: 22055 - RNA, 32 nt, Human
aaccaucagccaugugcugcuauuucuagggc

SEQ ID NO: 22056 - RNA, 32 nt, Human
aaccaucaugcugugaggaagcccaagcuaac

SEQ ID NO: 22057 - RNA, 32 nt, Human
aaccaucauucugcguggaaaaaccuacagga

SEQ ID NO: 22058 - RNA, 32 nt, Human
aaccauccaccugacaccagcacaucaggccu

SEQ ID NO: 22059 - RNA, 32 nt, Human
aaccaucccuaggggagcagauuaaccuacca

SEQ ID NO: 22060 - RNA, 32 nt, Human
aaccauccuugccuucaguucucuccaauauu

SEQ ID NO: 22061 - RNA, 27 nt, Human
aaccaucucaauaaacacauuuuggac

SEQ ID NO: 22062 - RNA, 27 nt, Human
aaccaucucaauaaacacauuuuggau

SEQ ID NO: 22063 - RNA, 31 nt, Human
aaccaucucaauaaacacauuuuggauuaaa

SEQ ID NO: 22064 - RNA, 32 nt, Human
aaccaucuccaccauccaucuccagaaugacu

SEQ ID NO: 22065 - RNA, 32 nt, Human
aaccaucuccaccugccccagcuccugcaggg

SEQ ID NO: 22066 - RNA, 32 nt, Human
aaccaucucuauagguuccugacagggaagca

SEQ ID NO: 22067 - RNA, 32 nt, Human
aaccaucugcauguuuggauucugagcaaaga

SEQ ID NO: 22068 - RNA, 32 nt, Human
aaccaucugccuggaagaccugggcuucucag

SEQ ID NO: 22069 - RNA, 32 nt, Human
aaccaucuggggacugcugggaaaugcuguga

SEQ ID NO: 22070 - RNA, 32 nt, Human
aaccaucugugcugagccucuuugcaguccuc

SEQ ID NO: 22071 - RNA, 32 nt, Human
aaccaucuuugagguugcaaagcugcuguacu

SEQ ID NO: 22072 - RNA, 32 nt, Human
aaccaucuuuuccuugcugucucccuucuuuc

SEQ ID NO: 22073 - RNA, 32 nt, Human
aaccaugaaagagagccagagagcuuuuugca

SEQ ID NO: 22074 - RNA, 32 nt, Human
aaccaugaaugagagaugaagcuaaagaauag

SEQ ID NO: 22075 - RNA, 32 nt, Human
aaccaugacugaggcaggcauggaguugggcg

SEQ ID NO: 22076 - RNA, 21 nt, Human
aaccaugagaaauaaauuucu

SEQ ID NO: 22077 - RNA, 32 nt, Human
aaccaugagcugugaugaaauccaggcaacug

SEQ ID NO: 22078 - RNA, 32 nt, Human
aaccaugagcuucaccgucugucucuuccuuc

SEQ ID NO: 22079 - RNA, 32 nt, Human
aaccaugauugcacuccaaccugggcgacaga

SEQ ID NO: 22080 - RNA, 32 nt, Human
aaccaugauuguaccacuguauuccagccugg

SEQ ID NO: 22081 - RNA, 32 nt, Human
aaccaugcaagcccucccaccucccagggcuc

SEQ ID NO: 22082 - RNA, 32 nt, Human
aaccaugcagccaccaaccccagccaguguca

SEQ ID NO: 22083 - RNA, 32 nt, Human
aaccaugcaguuccuggugagggucagaaggg

SEQ ID NO: 22084 - RNA, 32 nt, Human
aaccaugcccgaguaauuuuuguauuuauuuu

SEQ ID NO: 22085 - RNA, 32 nt, Human
aaccaugcguagccugaguggcuggguagacg

SEQ ID NO: 22086 - RNA, 32 nt, Human
aaccaugcucagcuaauuuuucuauuuuuagu

SEQ ID NO: 22087 - RNA, 32 nt, Human
aaccaugcuggugauuggcaccgucauaaauc

SEQ ID NO: 22088 - RNA, 32 nt, Human
aaccaugcuuguuuaaccugcugguaaaauuc

SEQ ID NO: 22089 - RNA, 32 nt, Human
aaccauggagagugaagcagcacuuuuuggug

SEQ ID NO: 22090 - RNA, 32 nt, Human
aaccauggagugauguggagcuaggauuguga

SEQ ID NO: 22091 - RNA, 32 nt, Human
aaccauggaugagaaagaaaggagucaggggc

SEQ ID NO: 22092 - RNA, 32 nt, Human
aaccauggauucugccuuuggaccccucucua

SEQ ID NO: 22093 - RNA, 32 nt, Human
aaccauggccuacaggggccugguuuucuccc

SEQ ID NO: 22094 - RNA, 32 nt, Human
aaccauggccuuuccucaguguuguaaggccu

SEQ ID NO: 22095 - RNA, 32 nt, Human
aaccauggcucuucccagccuaggggaagccu

SEQ ID NO: 22096 - RNA, 32 nt, Human
aaccaugggcugcugcugucacucccucucca

SEQ ID NO: 22097 - RNA, 29 nt, Human
aaccauggggacugugcacgcccggaguu

SEQ ID NO: 22098 - RNA, 32 nt, Human
aaccauggguuaacaggaaaggcuaccuaacu

SEQ ID NO: 22099 - RNA, 32 nt, Human
aaccauggucaaaagaccauucuguccuaucc

SEQ ID NO: 22100 - RNA, 32 nt, Human
aaccauguaaagaacauaaauaacaaaucuca

SEQ ID NO: 22101 - RNA, 32 nt, Human
aaccauguauuuaaaaacuuuuuagugauuau

SEQ ID NO: 22102 - RNA, 32 nt, Human
aaccaugucaggaccaccuuccucuagagcuc

SEQ ID NO: 22103 - RNA, 32 nt, Human
aaccaugugaaccuggccagggcggugcgacg

SEQ ID NO: 22104 - RNA, 32 nt, Human
aaccaugugagcccggccggcccagccaggcc

SEQ ID NO: 22105 - RNA, 32 nt, Human
aaccaugugcaagucugugucuugucagucca

SEQ ID NO: 22106 - RNA, 32 nt, Human
aaccaugugcagcuaauuuuuguauuuuuagu

SEQ ID NO: 22107 - RNA, 32 nt, Human
aaccauguggagagaagguuugggagaacuuu

SEQ ID NO: 22108 - RNA, 21 nt, Human
aaccauguuuuuaacuugugg

SEQ ID NO: 22109 - RNA, 32 nt, Human
aaccauuaaagauguggagaaagaccaugguu

SEQ ID NO: 22110 - RNA, 32 nt, Human
aaccauuaacacagcacccuuucaagccaugc

SEQ ID NO: 22111 - RNA, 32 nt, Human
aaccauuaagccccaauagcuacaaggagggu

SEQ ID NO: 22112 - RNA, 32 nt, Human
aaccauuaaugaaaacuuuuucacaguugagu

SEQ ID NO: 22113 - RNA, 32 nt, Human
aaccauuagaguccagccugauugcacaaaug

SEQ ID NO: 22114 - RNA, 32 nt, Human
aaccauuaguaaaacauuuccuaaauagugcc

SEQ ID NO: 22115 - RNA, 32 nt, Human
aaccauucaaaaacucaggguguucgggauaa

SEQ ID NO: 22116 - RNA, 32 nt, Human
aaccauucacagacaccaaaucucuaggagaa

SEQ ID NO: 22117 - RNA, 32 nt, Human
aaccauuccauucgaaaagcacuuugaaaaau

SEQ ID NO: 22118 - RNA, 32 nt, Human
aaccauuccugcaucuuggggcucccugacuc

SEQ ID NO: 22119 - RNA, 32 nt, Human
aaccauuccuuucauagggauggcagugauuc

SEQ ID NO: 22120 - RNA, 32 nt, Human
aaccauucuacugugucaccuuugccauugag

SEQ ID NO: 22121 - RNA, 26 nt, Human
aaccauucuccugccucagccuccca

SEQ ID NO: 22122 - RNA, 32 nt, Human
aaccauucuccugccucagccucccagguagc

SEQ ID NO: 22123 - RNA, 26 nt, Human
aaccauucuccugccucagccucuca

SEQ ID NO: 22124 - RNA, 32 nt, Human
aaccauucugcuugguuccacaaucaucuauu

SEQ ID NO: 22125 - RNA, 32 nt, Human
aaccauugaggcucauacaauuuucaagcaac

SEQ ID NO: 22126 - RNA, 32 nt, Human
aaccauugauaccuccuggcugggugaggcgg

SEQ ID NO: 22127 - RNA, 32 nt, Human
aaccauuguacuccagccugggugacagagca

SEQ ID NO: 22128 - RNA, 32 nt, Human
aaccauuuauucagaaccauuaaaccaaugau

SEQ ID NO: 22129 - RNA, 32 nt, Human
aaccauuucaaucuucugccuccuggauaucu

SEQ ID NO: 22130 - RNA, 32 nt, Human
aaccauuugcauuucuuugucucagcuauauu

SEQ ID NO: 22131 - RNA, 32 nt, Human
aaccauuuucccccucacccuaacucucuuau

SEQ ID NO: 22132 - RNA, 32 nt, Human
aaccauuuuuccuucuaagccuccuggccugu

SEQ ID NO: 22133 - RNA, 32 nt, Human
aacccaaaaggcagacauugcagugagccaag

SEQ ID NO: 22134 - RNA, 32 nt, Human
aacccaaaaggcggagguugcagugagccaag

SEQ ID NO: 22135 - RNA, 32 nt, Human
aacccaaaccaccacaggugcuccuccugggg

SEQ ID NO: 22136 - RNA, 32 nt, Human
aacccaaacugccuuugccucagcuuuauggu

SEQ ID NO: 22137 - RNA, 32 nt, Human
aacccaaagccagcuguuccaggcuccagggg

SEQ ID NO: 22138 - RNA, 32 nt, Human
aacccaacaugccaccauguugacauaaguuc

SEQ ID NO: 22139 - RNA, 32 nt, Human
aacccaacccaaccuagcccagucccagccgc

SEQ ID NO: 22140 - RNA, 32 nt, Human
aacccaagaaguggagguugcagugagccaag

SEQ ID NO: 22141 - RNA, 32 nt, Human
aacccaagacaagccacauaaaagcaaccuaa

SEQ ID NO: 22142 - RNA, 32 nt, Human
aacccaagaggcagaggaugcaaugagccaag

SEQ ID NO: 22143 - RNA, 32 nt, Human
aacccaagaggcagagguugaguaagcugaga

SEQ ID NO: 22144 - RNA, 32 nt, Human
aacccaagaggcagagguugcagugaacugag

SEQ ID NO: 22145 - RNA, 32 nt, Human
aacccaagaggcagaguuugcagugagcugag

SEQ ID NO: 22146 - RNA, 32 nt, Human
aacccaagaggcggagguugagcuggaagagg

SEQ ID NO: 22147 - RNA, 32 nt, Human
aacccaagaggcggagguugaguaagcugaga

SEQ ID NO: 22148 - RNA, 32 nt, Human
aacccaagaggcggagguugcagugagccaag

SEQ ID NO: 22149 - RNA, 32 nt, Human
aacccaagaggcggagguuguggugagccgag

SEQ ID NO: 22150 - RNA, 32 nt, Human
aacccaagagguccaaggcugcagugagccau

SEQ ID NO: 22151 - RNA, 32 nt, Human
aacccaagaggucgaggcugcagugagccaag

SEQ ID NO: 22152 - RNA, 32 nt, Human
aacccaagagguggaggcugaagugagccaag

SEQ ID NO: 22153 - RNA, 32 nt, Human
aacccaagagguggagguugcggugagccaag

SEQ ID NO: 22154 - RNA, 32 nt, Human
aacccaagauggccaggaacugcucugagugc

SEQ ID NO: 22155 - RNA, 32 nt, Human
aacccaagcaugauucacaaaggggcuggcaa

SEQ ID NO: 22156 - RNA, 32 nt, Human
aacccaaggugcugugcuccaucaucgccggu

SEQ ID NO: 22157 - RNA, 32 nt, Human
aacccaagucuccugacuccuggccuucuaug

SEQ ID NO: 22158 - RNA, 23 nt, Human
aacccaagugcugcacaaaagca

SEQ ID NO: 22159 - RNA, 32 nt, Human
aacccaaucuucuccccugacaccaguagaga

SEQ ID NO: 22160 - RNA, 32 nt, Human
aacccaaugagguugagauauaggcuacucuu

SEQ ID NO: 22161 - RNA, 32 nt, Human
aacccaaugccucccuuugcuccuggaugccc

SEQ ID NO: 22162 - RNA, 32 nt, Human
aacccacaaucaggaggcaacccuggccugca

SEQ ID NO: 22163 - RNA, 23 nt, Human
aacccacaccccacaucccccug

SEQ ID NO: 22164 - RNA, 32 nt, Human
aacccacaccccacaucccccugccggcagcc

SEQ ID NO: 22165 - RNA, 32 nt, Human
aacccacagaccucacaccugggggacagagg

SEQ ID NO: 22166 - RNA, 32 nt, Human
aacccacagagggaggggaggggcugagcugu

SEQ ID NO: 22167 - RNA, 32 nt, Human
aacccacagcagucgcagaaugagcaccuggc

SEQ ID NO: 22168 - RNA, 32 nt, Human
aacccacagccugucucuucucuuguuuaguu

SEQ ID NO: 22169 - RNA, 22 nt, Human
aacccacaggcggagguugcgg

SEQ ID NO: 22170 - RNA, 32 nt, Human
aacccacaggcggagguugcggugggcugggg

SEQ ID NO: 22171 - RNA, 32 nt, Human
aacccacagggcagaggucacagugagccaag

SEQ ID NO: 22172 - RNA, 32 nt, Human
aacccacagugccaggcaacccuucagaaagg

SEQ ID NO: 22173 - RNA, 32 nt, Human
aacccaccaagugccugugugcagccuccugu

SEQ ID NO: 22174 - RNA, 32 nt, Human
aacccaccacaggccuggcacauuguguaugu

SEQ ID NO: 22175 - RNA, 32 nt, Human
aacccaccaggccaacugggaauuagaauuga

SEQ ID NO: 22176 - RNA, 32 nt, Human
aacccaccauggugcugucuccugccgacaag

SEQ ID NO: 22177 - RNA, 32 nt, Human
aacccacccagacugcaguucccuccccaccc

SEQ ID NO: 22178 - RNA, 32 nt, Human
aacccacccaggaaguggccuccagccucccu

SEQ ID NO: 22179 - RNA, 32 nt, Human
aacccacccucuuuaccaaccccuuucuccuc

SEQ ID NO: 22180 - RNA, 32 nt, Human
aacccaccuccuacuccuggcucagaccuuug

SEQ ID NO: 22181 - RNA, 32 nt, Human
aacccaccucucucaccccacauucauauccc

SEQ ID NO: 22182 - RNA, 32 nt, Human
aacccaccucucuuuucugucauucuccaacu

SEQ ID NO: 22183 - RNA, 23 nt, Human
aacccaccuggagacgcaguuca

SEQ ID NO: 22184 - RNA, 32 nt, Human
aacccaccugggacggcagugaggaugagcac

SEQ ID NO: 22185 - RNA, 32 nt, Human
aacccacgcagucaccccagagggcagggcua

SEQ ID NO: 22186 - RNA, 32 nt, Human
aacccacucacaccaauccagugaccgugugu

SEQ ID NO: 22187 - RNA, 32 nt, Human
aacccacucacacccacccucaguggcuucuu

SEQ ID NO: 22188 - RNA, 32 nt, Human
aacccacugaacacuaauuaugagcccugucu

SEQ ID NO: 22189 - RNA, 32 nt, Human
aacccacugguuucaaccaguucaggaaugag

SEQ ID NO: 22190 - RNA, 32 nt, Human
aacccacugucaccccuccgacucaccggcaa

SEQ ID NO: 22191 - RNA, 32 nt, Human
aacccacugugggcagcaucuaagccaugucc

SEQ ID NO: 22192 - RNA, 32 nt, Human
aacccagaaagcggagguugcagugaccuggg

SEQ ID NO: 22193 - RNA, 32 nt, Human
aacccagaaaugcugagucaggguggccaaga

SEQ ID NO: 22194 - RNA, 32 nt, Human
aacccagaaccagacacucaggcuccagccac

SEQ ID NO: 22195 - RNA, 32 nt, Human
aacccagaagcggagguugcagugagcugaga

SEQ ID NO: 22196 - RNA, 32 nt, Human
aacccagaaggcagagguugcagugagcugag

SEQ ID NO: 22197 - RNA, 32 nt, Human
aacccagaaggcagggguugcagugagccaag

SEQ ID NO: 22198 - RNA, 32 nt, Human
aacccagaaggcggaaguugcagugagccgag

SEQ ID NO: 22199 - RNA, 32 nt, Human
aacccagaaggcggaaguugcagugagcugag

SEQ ID NO: 22200 - RNA, 32 nt, Human
aacccagaaggugcagguugcagugagcugag

SEQ ID NO: 22201 - RNA, 32 nt, Human
aacccagaagguggagguagcagugagccgag

SEQ ID NO: 22202 - RNA, 32 nt, Human
aacccagaagguggagguugcagugagccgag

SEQ ID NO: 22203 - RNA, 32 nt, Human
aacccagaagucagaacacaucuaccuccugg

SEQ ID NO: 22204 - RNA, 32 nt, Human
aacccagaaugacugauuaagugccuugcgaa

SEQ ID NO: 22205 - RNA, 32 nt, Human
aacccagagaaaugacaauguugcaucaauua

SEQ ID NO: 22206 - RNA, 32 nt, Human
aacccagagcagcuccacgugagagcauuaaa

SEQ ID NO: 22207 - RNA, 32 nt, Human
aacccagagcuggugugcgcgugcgcugucug

SEQ ID NO: 22208 - RNA, 32 nt, Human
aacccagaggcccgcgcucugaaggugacccc

SEQ ID NO: 22209 - RNA, 25 nt, Human
aacccagaggcggagguuguaguga

SEQ ID NO: 22210 - RNA, 32 nt, Human
aacccagaggcggagguuguagugagccgaaa

SEQ ID NO: 22211 - RNA, 32 nt, Human
aacccagauagcagagguugcagugagcugag

SEQ ID NO: 22212 - RNA, 32 nt, Human
aacccagaugaggcucaucaggaacagaucuu

SEQ ID NO: 22213 - RNA, 23 nt, Human
aacccagauuauccaaagagaga

SEQ ID NO: 22214 - RNA, 32 nt, Human
aacccagcaagucaaggccaggaggaccaggg

SEQ ID NO: 22215 - RNA, 32 nt, Human
aacccagcagauggagguugcagugagccaag

SEQ ID NO: 22216 - RNA, 32 nt, Human
aacccagcaggcagagguugcagugagccaag

SEQ ID NO: 22217 - RNA, 26 nt, Human
aacccagcaggcggagguugcgguga

SEQ ID NO: 22218 - RNA, 32 nt, Human
aacccagcaggcggagguugcggugagucgag

SEQ ID NO: 22219 - RNA, 32 nt, Human
aacccagcaucauguggcucagucucugauug

SEQ ID NO: 22220 - RNA, 32 nt, Human
aacccagcauuuucggcaaccgcugcuggcag

SEQ ID NO: 22221 - RNA, 32 nt, Human
aacccagccagccucauacucggagcccggcc

SEQ ID NO: 22222 - RNA, 32 nt, Human
aacccagccugaccccugagagcugccccgug

SEQ ID NO: 22223 - RNA, 32 nt, Human
aacccagcgagaaaggaggggaagccccuucu

SEQ ID NO: 22224 - RNA, 32 nt, Human
aacccagcgggaagagguugcagugagccaag

SEQ ID NO: 22225 - RNA, 32 nt, Human
aacccagcuacucaggagguuggggcagaauu

SEQ ID NO: 22226 - RNA, 31 nt, Human
aacccagcuacucgggagguugaggcaggag

SEQ ID NO: 22227 - RNA, 32 nt, Human
aacccagcugcaccccuuccugggcacacgcu

SEQ ID NO: 22228 - RNA, 32 nt, Human
aacccagcuguggucccagagaucagggggug

SEQ ID NO: 22229 - RNA, 32 nt, Human
aacccagcuugggaagagaagccccagcgugg

SEQ ID NO: 22230 - RNA, 32 nt, Human
aacccaggaagaggagguugcagugagccgag

SEQ ID NO: 22231 - RNA, 32 nt, Human
aacccaggaagaguggccucaccagaaacuga

SEQ ID NO: 22232 - RNA, 32 nt, Human
aacccaggaagcagagguugcaguaagcugag

SEQ ID NO: 22233 - RNA, 32 nt, Human
aacccaggaagcagagguugcagugagcagag

SEQ ID NO: 22234 - RNA, 32 nt, Human
aacccaggaagcagagguugcagugagcugag

SEQ ID NO: 22235 - RNA, 32 nt, Human
aacccaggaagcggagguugcaaucagcugag

SEQ ID NO: 22236 - RNA, 32 nt, Human
aacccaggaagcggagguugcagugagccgag

SEQ ID NO: 22237 - RNA, 26 nt, Human
aacccaggaagcggagguugugguga

SEQ ID NO: 22238 - RNA, 32 nt, Human
aacccaggaagcggagguuguggugagccaag

SEQ ID NO: 22239 - RNA, 32 nt, Human
aacccaggaagcgggguugcagugagccaaag

SEQ ID NO: 22240 - RNA, 32 nt, Human
aacccaggaagguguggcguccccgcuucgcg

SEQ ID NO: 22241 - RNA, 32 nt, Human
aacccaggaaguagagguugcagugagccgag

SEQ ID NO: 22242 - RNA, 32 nt, Human
aacccaggaaguggagacugcagugagccgau

SEQ ID NO: 22243 - RNA, 32 nt, Human
aacccaggaaguggagguugcagugagccgag

SEQ ID NO: 22244 - RNA, 32 nt, Human
aacccaggaaguggagguugcagugagcuaag

SEQ ID NO: 22245 - RNA, 32 nt, Human
aacccaggaaguggagguugcagugagcugag

SEQ ID NO: 22246 - RNA, 32 nt, Human
aacccaggaaguggcaguugcagugagccgag

SEQ ID NO: 22247 - RNA, 32 nt, Human
aacccaggacacggagauugcagugagccaag

SEQ ID NO: 22248 - RNA, 32 nt, Human
aacccaggacgcagagguugcggugagccaag

SEQ ID NO: 22249 - RNA, 32 nt, Human
aacccaggacuccacacacaaaacuccuggga

SEQ ID NO: 22250 - RNA, 32 nt, Human
aacccaggagacagagguugcagugagccaag

SEQ ID NO: 22251 - RNA, 32 nt, Human
aacccaggagacagagguuguagugagcugag

SEQ ID NO: 22252 - RNA, 32 nt, Human
aacccaggagacagagguugugguggggcaag

SEQ ID NO: 22253 - RNA, 32 nt, Human
aacccaggagacagggguugcagugagccaag

SEQ ID NO: 22254 - RNA, 32 nt, Human
aacccaggagacauggguugcagugagccgag

SEQ ID NO: 22255 - RNA, 32 nt, Human
aacccaggagacgagguugcagugagccgaga

SEQ ID NO: 22256 - RNA, 32 nt, Human
aacccaggagacggaaguugcagugagcugag

SEQ ID NO: 22257 - RNA, 32 nt, Human
aacccaggagacggagcuugcagugagccgag

SEQ ID NO: 22258 - RNA, 32 nt, Human
aacccaggagacggagguugcagugagccgag

SEQ ID NO: 22259 - RNA, 26 nt, Human
aacccaggagacggagguugcgguga

SEQ ID NO: 22260 - RNA, 32 nt, Human
aacccaggagacggagguugcggugaguugag

SEQ ID NO: 22261 - RNA, 32 nt, Human
aacccaggagacggugguugcagugagccaag

SEQ ID NO: 22262 - RNA, 32 nt, Human
aacccaggagacggugguugcagugagcgaag

SEQ ID NO: 22263 - RNA, 32 nt, Human
aacccaggagaggaagaaagaaaggagagagg

SEQ ID NO: 22264 - RNA, 32 nt, Human
aacccaggagaggaagguugcaguaagcugag

SEQ ID NO: 22265 - RNA, 32 nt, Human
aacccaggagauagagguugcaaugagccaag

SEQ ID NO: 22266 - RNA, 32 nt, Human
aacccaggagauggaaguugcagugagcugau

SEQ ID NO: 22267 - RNA, 32 nt, Human
aacccaggagauggagguugcagugagccaag

SEQ ID NO: 22268 - RNA, 32 nt, Human
aacccaggagauggagguugcagugagcugag

SEQ ID NO: 22269 - RNA, 26 nt, Human
aacccaggagauggagguugcgguga

SEQ ID NO: 22270 - RNA, 32 nt, Human
aacccaggagauggagguugcggugagcugag

SEQ ID NO: 22271 - RNA, 32 nt, Human
aacccaggagccagaggaaccagggcaagagg

SEQ ID NO: 22272 - RNA, 32 nt, Human
aacccaggagccccgagaaccugcuuuccuca

SEQ ID NO: 22273 - RNA, 26 nt, Human
aacccaggagccggagguugugguga

SEQ ID NO: 22274 - RNA, 32 nt, Human
aacccaggaggaagagguugcagugagccaag

SEQ ID NO: 22275 - RNA, 32 nt, Human
aacccaggaggaggagcuugcagugagccgag

SEQ ID NO: 22276 - RNA, 32 nt, Human
aacccaggaggcaaaggcugcagugagccaag

SEQ ID NO: 22277 - RNA, 32 nt, Human
aacccaggaggcaaagguugcagugagccacg

SEQ ID NO: 22278 - RNA, 32 nt, Human
aacccaggaggcacagauugcagugagccaag

SEQ ID NO: 22279 - RNA, 32 nt, Human
aacccaggaggcacagcuugcagugagcgaag

SEQ ID NO: 22280 - RNA, 32 nt, Human
aacccaggaggcacagguugcagugagccagg

SEQ ID NO: 22281 - RNA, 32 nt, Human
aacccaggaggcagaaguugcaagguugagcc

SEQ ID NO: 22282 - RNA, 32 nt, Human
aacccaggaggcagaaguugcagugagcagag

SEQ ID NO: 22283 - RNA, 32 nt, Human
aacccaggaggcagaaguugcagugagccgaa

SEQ ID NO: 22284 - RNA, 32 nt, Human
aacccaggaggcagaaguugcagugagcugag

SEQ ID NO: 22285 - RNA, 32 nt, Human
aacccaggaggcagacguugcagcgagccaaa

SEQ ID NO: 22286 - RNA, 32 nt, Human
aacccaggaggcagagaucgcagugaguugag

SEQ ID NO: 22287 - RNA, 32 nt, Human
aacccaggaggcagagauugcagugagccaag

SEQ ID NO: 22288 - RNA, 32 nt, Human
aacccaggaggcagagauugcagugagcugag

SEQ ID NO: 22289 - RNA, 32 nt, Human
aacccaggaggcagagauugcggugagccaag

SEQ ID NO: 22290 - RNA, 32 nt, Human
aacccaggaggcagagauugcggugagccggg

SEQ ID NO: 22291 - RNA, 23 nt, Human
aacccaggaggcagagcuugcag

SEQ ID NO: 22292 - RNA, 32 nt, Human
aacccaggaggcagagcuugcagugagccaag

SEQ ID NO: 22293 - RNA, 32 nt, Human
aacccaggaggcagagcuugcagugagccgag

SEQ ID NO: 22294 - RNA, 32 nt, Human
aacccaggaggcagagcuugcagugagccuag

SEQ ID NO: 22295 - RNA, 32 nt, Human
aacccaggaggcagagcuugcagugagcugag

SEQ ID NO: 22296 - RNA, 32 nt, Human
aacccaggaggcagagcuuguagugagccuag

SEQ ID NO: 22297 - RNA, 23 nt, Human
aacccaggaggcagaggcuacag

SEQ ID NO: 22298 - RNA, 32 nt, Human
aacccaggaggcagaggcuacagugagcugag

SEQ ID NO: 22299 - RNA, 32 nt, Human
aacccaggaggcagaggguugcagugagccga

SEQ ID NO: 22300 - RNA, 32 nt, Human
aacccaggaggcagaggucgcagugagucgag

SEQ ID NO: 22301 - RNA, 32 nt, Human
aacccaggaggcagagguuacagugagcagag

SEQ ID NO: 22302 - RNA, 32 nt, Human
aacccaggaggcagagguugcaaugagccaag

SEQ ID NO: 22303 - RNA, 32 nt, Human
aacccaggaggcagagguugcagcgagcugag

SEQ ID NO: 22304 - RNA, 32 nt, Human
aacccaggaggcagagguugcaguaagccaag

SEQ ID NO: 22305 - RNA, 32 nt, Human
aacccaggaggcagagguugcaguaagccuag

SEQ ID NO: 22306 - RNA, 32 nt, Human
aacccaggaggcagagguugcagucagccaag

SEQ ID NO: 22307 - RNA, 26 nt, Human
aacccaggaggcagagguugcaguga

SEQ ID NO: 22308 - RNA, 32 nt, Human
aacccaggaggcagagguugcagugagccaag

SEQ ID NO: 22309 - RNA, 32 nt, Human
aacccaggaggcagagguugcagugagccgag

SEQ ID NO: 22310 - RNA, 32 nt, Human
aacccaggaggcagagguugcagugagcuaag

SEQ ID NO: 22311 - RNA, 32 nt, Human
aacccaggaggcagagguugcagugagcugag

SEQ ID NO: 22312 - RNA, 32 nt, Human
aacccaggaggcagagguugcagugagcugug

SEQ ID NO: 22313 - RNA, 32 nt, Human
aacccaggaggcagagguugcagugagucaag

SEQ ID NO: 22314 - RNA, 32 nt, Human
aacccaggaggcagagguugcagugagugaag

SEQ ID NO: 22315 - RNA, 32 nt, Human
aacccaggaggcagagguugcagugcaccaag

SEQ ID NO: 22316 - RNA, 32 nt, Human
aacccaggaggcagagguugcagugcgcugag

SEQ ID NO: 22317 - RNA, 26 nt, Human
aacccaggaggcagagguugcagugg

SEQ ID NO: 22318 - RNA, 32 nt, Human
aacccaggaggcagagguugcagugggccaag

SEQ ID NO: 22319 - RNA, 26 nt, Human
aacccaggaggcagagguugcgguga

SEQ ID NO: 22320 - RNA, 32 nt, Human
aacccaggaggcagagguugcggugagccgag

SEQ ID NO: 22321 - RNA, 32 nt, Human
aacccaggaggcagagguugcggugagucgag

SEQ ID NO: 22322 - RNA, 32 nt, Human
aacccaggaggcagagguugcguugagccaag

SEQ ID NO: 22323 - RNA, 32 nt, Human
aacccaggaggcagagguuggggugagcugag

SEQ ID NO: 22324 - RNA, 32 nt, Human
aacccaggaggcagagguuguagugagccaag

SEQ ID NO: 22325 - RNA, 32 nt, Human
aacccaggaggcagaguuugcagucagccaag

SEQ ID NO: 22326 - RNA, 32 nt, Human
aacccaggaggcagaguuugcagugagccaag

SEQ ID NO: 22327 - RNA, 32 nt, Human
aacccaggaggcagaguuugcagugagcugag

SEQ ID NO: 22328 - RNA, 32 nt, Human
aacccaggaggcagcuguugcagugagccaag

SEQ ID NO: 22329 - RNA, 32 nt, Human
aacccaggaggcagugauugcagugagcugag

SEQ ID NO: 22330 - RNA, 32 nt, Human
aacccaggaggcagugguugcaaugagccgag

SEQ ID NO: 22331 - RNA, 32 nt, Human
aacccaggaggccgagguugcagugagccaag

SEQ ID NO: 22332 - RNA, 26 nt, Human
aacccaggaggcggaaguugcaguga

SEQ ID NO: 22333 - RNA, 32 nt, Human
aacccaggaggcggaaguugcagugagcugag

SEQ ID NO: 22334 - RNA, 32 nt, Human
aacccaggaggcggaccuuguagugagccgag

SEQ ID NO: 22335 - RNA, 26 nt, Human
aacccaggaggcggagauugcaguga

SEQ ID NO: 22336 - RNA, 32 nt, Human
aacccaggaggcggagauugcagugagccgag

SEQ ID NO: 22337 - RNA, 32 nt, Human
aacccaggaggcggagauugcagugagcugag

SEQ ID NO: 22338 - RNA, 32 nt, Human
aacccaggaggcggagcuggcagugagcugag

SEQ ID NO: 22339 - RNA, 23 nt, Human
aacccaggaggcggagcuugcag

SEQ ID NO: 22340 - RNA, 26 nt, Human
aacccaggaggcggagcuugcaguga

SEQ ID NO: 22341 - RNA, 32 nt, Human
aacccaggaggcggagcuugcagugagcagag

SEQ ID NO: 22342 - RNA, 32 nt, Human
aacccaggaggcggagcuugcagugagccaag

SEQ ID NO: 22343 - RNA, 32 nt, Human
aacccaggaggcggagcuugcagugagccaug

SEQ ID NO: 22344 - RNA, 32 nt, Human
aacccaggaggcggagcuugcagugagccgag

SEQ ID NO: 22345 - RNA, 32 nt, Human
aacccaggaggcggagcuugcagugagcugag

SEQ ID NO: 22346 - RNA, 32 nt, Human
aacccaggaggcggaggcagaggcugcaguga

SEQ ID NO: 22347 - RNA, 26 nt, Human
aacccaggaggcggaggcugcaguga

SEQ ID NO: 22348 - RNA, 32 nt, Human
aacccaggaggcggaggcugcagugagcccag

SEQ ID NO: 22349 - RNA, 32 nt, Human
aacccaggaggcggaggcugcagugagcugag

SEQ ID NO: 22350 - RNA, 26 nt, Human
aacccaggaggcggagguagcaguga

SEQ ID NO: 22351 - RNA, 32 nt, Human
aacccaggaggcggagguagcagugagccaag

SEQ ID NO: 22352 - RNA, 26 nt, Human
aacccaggaggcggagguagugguga

SEQ ID NO: 22353 - RNA, 32 nt, Human
aacccaggaggcggagguaguggugagcaaag

SEQ ID NO: 22354 - RNA, 26 nt, Human
aacccaggaggcggagguuacaguga

SEQ ID NO: 22355 - RNA, 32 nt, Human
aacccaggaggcggagguuacagugagccaag

SEQ ID NO: 22356 - RNA, 26 nt, Human
aacccaggaggcggagguuccaguga

SEQ ID NO: 22357 - RNA, 26 nt, Human
aacccaggaggcggagguugcacuga

SEQ ID NO: 22358 - RNA, 32 nt, Human
aacccaggaggcggagguugcacugagccgag

SEQ ID NO: 22359 - RNA, 23 nt, Human
aacccaggaggcggagguugcag

SEQ ID NO: 22360 - RNA, 26 nt, Human
aacccaggaggcggagguugcaggga

SEQ ID NO: 22361 - RNA, 32 nt, Human
aacccaggaggcggagguugcagggagggaga

SEQ ID NO: 22362 - RNA, 24 nt, Human
aacccaggaggcggagguugcagu

SEQ ID NO: 22363 - RNA, 32 nt, Human
aacccaggaggcggagguugcaguaagccaag

SEQ ID NO: 22364 - RNA, 26 nt, Human
aacccaggaggcggagguugcaguga

SEQ ID NO: 22365 - RNA, 32 nt, Human
aacccaggaggcggagguugcagugaaccgag

SEQ ID NO: 22366 - RNA, 32 nt, Human
aacccaggaggcggagguugcagugacccgag

SEQ ID NO: 22367 - RNA, 32 nt, Human
aacccaggaggcggagguugcagugagacgag

SEQ ID NO: 22368 - RNA, 32 nt, Human
aacccaggaggcggagguugcagugagcagag

SEQ ID NO: 22369 - RNA, 32 nt, Human
aacccaggaggcggagguugcagugagccaag

SEQ ID NO: 22370 - RNA, 32 nt, Human
aacccaggaggcggagguugcagugagccagg

SEQ ID NO: 22371 - RNA, 32 nt, Human
aacccaggaggcggagguugcagugagccgag

SEQ ID NO: 22372 - RNA, 32 nt, Human
aacccaggaggcggagguugcagugagcucag

SEQ ID NO: 22373 - RNA, 32 nt, Human
aacccaggaggcggagguugcagugagcugag

SEQ ID NO: 22374 - RNA, 32 nt, Human
aacccaggaggcggagguugcagugaguugag

SEQ ID NO: 22375 - RNA, 32 nt, Human
aacccaggaggcggagguugcagugauccaag

SEQ ID NO: 22376 - RNA, 26 nt, Human
aacccaggaggcggagguugccguga

SEQ ID NO: 22377 - RNA, 32 nt, Human
aacccaggaggcggagguugccgugagccaag

SEQ ID NO: 22378 - RNA, 26 nt, Human
aacccaggaggcggagguugcgguga

SEQ ID NO: 22379 - RNA, 32 nt, Human
aacccaggaggcggagguugcggugagccaag

SEQ ID NO: 22380 - RNA, 32 nt, Human
aacccaggaggcggagguugcggugagccgag

SEQ ID NO: 22381 - RNA, 32 nt, Human
aacccaggaggcggagguugcggugagcugag

SEQ ID NO: 22382 - RNA, 32 nt, Human
aacccaggaggcggagguugcggugaguugag

SEQ ID NO: 22383 - RNA, 26 nt, Human
aacccaggaggcggagguuguaguga

SEQ ID NO: 22384 - RNA, 32 nt, Human
aacccaggaggcggagguuguagugagccaag

SEQ ID NO: 22385 - RNA, 32 nt, Human
aacccaggaggcggagguuguauaggcugaga

SEQ ID NO: 22386 - RNA, 26 nt, Human
aacccaggaggcggagguugugguga

SEQ ID NO: 22387 - RNA, 32 nt, Human
aacccaggaggcggagguuguggugagccaag

SEQ ID NO: 22388 - RNA, 32 nt, Human
aacccaggaggcggaguuugcagugagcugag

SEQ ID NO: 22389 - RNA, 32 nt, Human
aacccaggaggcggcgguugcagugagccaag

SEQ ID NO: 22390 - RNA, 32 nt, Human
aacccaggaggcggggguugcagugagucgag

SEQ ID NO: 22391 - RNA, 32 nt, Human
aacccaggaggcggugcuugcagggagccgag

SEQ ID NO: 22392 - RNA, 32 nt, Human
aacccaggaggcggugguuguaggaagcugug

SEQ ID NO: 22393 - RNA, 32 nt, Human
aacccaggaggcguagcuagcagugagccaag

SEQ ID NO: 22394 - RNA, 26 nt, Human
aacccaggaggcugagguugcaguga

SEQ ID NO: 22395 - RNA, 32 nt, Human
aacccaggaggcugagguugcagugagccagg

SEQ ID NO: 22396 - RNA, 32 nt, Human
aacccaggaggcugagguugcagugagcccag

SEQ ID NO: 22397 - RNA, 32 nt, Human
aacccaggagguagaagcugcagugagcaggg

SEQ ID NO: 22398 - RNA, 32 nt, Human
aacccaggagguagaaguugcagugagccgag

SEQ ID NO: 22399 - RNA, 32 nt, Human
aacccaggagguagaggcugcagugagcaggg

SEQ ID NO: 22400 - RNA, 32 nt, Human
aacccaggagguagaggcugcagugagccggg

SEQ ID NO: 22401 - RNA, 32 nt, Human
aacccaggagguagaggcugcagugagcuggg

SEQ ID NO: 22402 - RNA, 32 nt, Human
aacccaggagguagagguugcagugagccaag

SEQ ID NO: 22403 - RNA, 32 nt, Human
aacccaggagguagagguugcagugagccgag

SEQ ID NO: 22404 - RNA, 26 nt, Human
aacccaggaggugaagguugcaguga

SEQ ID NO: 22405 - RNA, 32 nt, Human
aacccaggaggugaagguugcagugaccggag

SEQ ID NO: 22406 - RNA, 26 nt, Human
aacccaggaggugcagguugcaguga

SEQ ID NO: 22407 - RNA, 32 nt, Human
aacccaggaggugcagguugcagugagccgag

SEQ ID NO: 22408 - RNA, 32 nt, Human
aacccaggagguggaaguugcuuugagccgag

SEQ ID NO: 22409 - RNA, 32 nt, Human
aacccaggagguggacauuacagugagcccag

SEQ ID NO: 22410 - RNA, 32 nt, Human
aacccaggagguggagacugcagugagccaag

SEQ ID NO: 22411 - RNA, 26 nt, Human
aacccaggagguggagauugcaguga

SEQ ID NO: 22412 - RNA, 32 nt, Human
aacccaggagguggagauugcagugagcugag

SEQ ID NO: 22413 - RNA, 32 nt, Human
aacccaggagguggagcuugcaaugagccgag

SEQ ID NO: 22414 - RNA, 32 nt, Human
aacccaggagguggagcuugcagugagccgag

SEQ ID NO: 22415 - RNA, 26 nt, Human
aacccaggagguggaggaugcaguga

SEQ ID NO: 22416 - RNA, 32 nt, Human
aacccaggagguggaggaugcagugaacugag

SEQ ID NO: 22417 - RNA, 26 nt, Human
aacccaggagguggaggcugcaguga

SEQ ID NO: 22418 - RNA, 32 nt, Human
aacccaggagguggaggcugcagugagcugag

SEQ ID NO: 22419 - RNA, 26 nt, Human
aacccaggagguggaggcugcgguga

SEQ ID NO: 22420 - RNA, 32 nt, Human
aacccaggagguggaggcugcggugagccgag

SEQ ID NO: 22421 - RNA, 26 nt, Human
aacccaggagguggagguagcaguga

SEQ ID NO: 22422 - RNA, 32 nt, Human
aacccaggagguggagguagcagugagccgag

SEQ ID NO: 22423 - RNA, 26 nt, Human
aacccaggagguggagguuacaguga

SEQ ID NO: 22424 - RNA, 32 nt, Human
aacccaggagguggagguuacagugagccaag

SEQ ID NO: 22425 - RNA, 32 nt, Human
aacccaggagguggagguuacagugagcugag

SEQ ID NO: 22426 - RNA, 32 nt, Human
aacccaggagguggagguuccagugagccaaa

SEQ ID NO: 22427 - RNA, 20 nt, Human
aacccaggagguggagguug

SEQ ID NO: 22428 - RNA, 32 nt, Human
aacccaggagguggagguugaaaugagcugag

SEQ ID NO: 22429 - RNA, 32 nt, Human
aacccaggagguggagguugcaagugagcuga

SEQ ID NO: 22430 - RNA, 26 nt, Human
aacccaggagguggagguugcaauga

SEQ ID NO: 22431 - RNA, 23 nt, Human
aacccaggagguggagguugcag

SEQ ID NO: 22432 - RNA, 32 nt, Human
aacccaggagguggagguugcagcaagcagag

SEQ ID NO: 22433 - RNA, 26 nt, Human
aacccaggagguggagguugcagcga

SEQ ID NO: 22434 - RNA, 24 nt, Human
aacccaggagguggagguugcagu

SEQ ID NO: 22435 - RNA, 32 nt, Human
aacccaggagguggagguugcaguaagccaag

SEQ ID NO: 22436 - RNA, 32 nt, Human
aacccaggagguggagguugcaguaagcugag

SEQ ID NO: 22437 - RNA, 26 nt, Human
aacccaggagguggagguugcaguga

SEQ ID NO: 22438 - RNA, 32 nt, Human
aacccaggagguggagguugcagugaacugag

SEQ ID NO: 22439 - RNA, 32 nt, Human
aacccaggagguggagguugcagugagcagag

SEQ ID NO: 22440 - RNA, 32 nt, Human
aacccaggagguggagguugcagugagccaag

SEQ ID NO: 22441 - RNA, 32 nt, Human
aacccaggagguggagguugcagugagccaga

SEQ ID NO: 22442 - RNA, 32 nt, Human
aacccaggagguggagguugcagugagccgag

SEQ ID NO: 22443 - RNA, 32 nt, Human
aacccaggagguggagguugcagugagcugag

SEQ ID NO: 22444 - RNA, 32 nt, Human
aacccaggagguggagguugcagugagcuggg

SEQ ID NO: 22445 - RNA, 32 nt, Human
aacccaggagguggagguugcagugaggcaag

SEQ ID NO: 22446 - RNA, 32 nt, Human
aacccaggagguggagguugcagugagucaag

SEQ ID NO: 22447 - RNA, 32 nt, Human
aacccaggagguggagguugcagugagucgag

SEQ ID NO: 22448 - RNA, 32 nt, Human
aacccaggagguggagguugcagugggccgag

SEQ ID NO: 22449 - RNA, 32 nt, Human
aacccaggagguggagguugcaguuagcugag

SEQ ID NO: 22450 - RNA, 23 nt, Human
aacccaggagguggagguugcgg

SEQ ID NO: 22451 - RNA, 32 nt, Human
aacccaggagguggagguugcggugagcugag

SEQ ID NO: 22452 - RNA, 26 nt, Human
aacccaggagguggagguugcuguga

SEQ ID NO: 22453 - RNA, 32 nt, Human
aacccaggagguggagguugcugugagccaag

SEQ ID NO: 22454 - RNA, 23 nt, Human
aacccaggagguggagguuguag

SEQ ID NO: 22455 - RNA, 26 nt, Human
aacccaggagguggagguuguaguga

SEQ ID NO: 22456 - RNA, 32 nt, Human
aacccaggagguggagguuguagugagacaag

SEQ ID NO: 22457 - RNA, 26 nt, Human
aacccaggagguggagguugugguga

SEQ ID NO: 22458 - RNA, 32 nt, Human
aacccaggagguggagguuguggugagccaag

SEQ ID NO: 22459 - RNA, 32 nt, Human
aacccaggagguggagguuguggugagccgag

SEQ ID NO: 22460 - RNA, 32 nt, Human
aacccaggagguggagguuguggugagcugag

SEQ ID NO: 22461 - RNA, 32 nt, Human
aacccaggagguggaguuugcagugagcugag

SEQ ID NO: 22462 - RNA, 26 nt, Human
aacccaggagguggauguugcaguga

SEQ ID NO: 22463 - RNA, 32 nt, Human
aacccaggaggugggcauugcagugagccgag

SEQ ID NO: 22464 - RNA, 26 nt, Human
aacccaggagguggugguugcaguga

SEQ ID NO: 22465 - RNA, 32 nt, Human
aacccaggagguggugguugcagugagccuag

SEQ ID NO: 22466 - RNA, 32 nt, Human
aacccaggagguugaggcugcagugagucaug

SEQ ID NO: 22467 - RNA, 32 nt, Human
aacccaggagucaaaagcugcagugagcuacu

SEQ ID NO: 22468 - RNA, 32 nt, Human
aacccaggagucagagguuucagugagccgag

SEQ ID NO: 22469 - RNA, 32 nt, Human
aacccaggagucggagguugcagugaguugag

SEQ ID NO: 22470 - RNA, 32 nt, Human
aacccaggaguucaagucugcagugagcuaug

SEQ ID NO: 22471 - RNA, 32 nt, Human
aacccaggaguuggagcuugcagugagccgag

SEQ ID NO: 22472 - RNA, 32 nt, Human
aacccaggaugcggagguugcagugagccgag

SEQ ID NO: 22473 - RNA, 32 nt, Human
aacccaggcagcuggcaggaguggggugguua

SEQ ID NO: 22474 - RNA, 32 nt, Human
aacccaggcaguggagguugcagugagccaag

SEQ ID NO: 22475 - RNA, 32 nt, Human
aacccaggccgauggcugggcacgguggcuca

SEQ ID NO: 22476 - RNA, 18 nt, Human
aacccaggccuuccugga

SEQ ID NO: 22477 - RNA, 23 nt, Human
aacccaggcggcagagguugcag

SEQ ID NO: 22478 - RNA, 32 nt, Human
aacccaggcggcagagguugcagugagccaag

SEQ ID NO: 22479 - RNA, 32 nt, Human
aacccaggcggcagagguugcagugagucgag

SEQ ID NO: 22480 - RNA, 32 nt, Human
aacccagggaauagcccuccucuccccaggaa

SEQ ID NO: 22481 - RNA, 32 nt, Human
aacccagggacacccaaggauaugucuucuga

SEQ ID NO: 22482 - RNA, 32 nt, Human
aacccagggccagcaguggaagccucaagcaa

SEQ ID NO: 22483 - RNA, 26 nt, Human
aacccagggggcagagguugcaguga

SEQ ID NO: 22484 - RNA, 32 nt, Human
aacccagggggcagagguugcagugagccgag

SEQ ID NO: 22485 - RNA, 26 nt, Human
aacccagggggcggagguugcaguga

SEQ ID NO: 22486 - RNA, 32 nt, Human
aacccaggggguggagguugcacugagccgag

SEQ ID NO: 22487 - RNA, 32 nt, Human
aacccaggguuuuguacuuggagaggaaagau

SEQ ID NO: 22488 - RNA, 32 nt, Human
aacccagguccacgugguuccagccuggcuuc

SEQ ID NO: 22489 - RNA, 32 nt, Human
aacccaggucuuggauuucaggucccuccacc

SEQ ID NO: 22490 - RNA, 23 nt, Human
aacccagguggcggagguugcag

SEQ ID NO: 22491 - RNA, 32 nt, Human
aacccagguggcggagguugcagugagccgac

SEQ ID NO: 22492 - RNA, 32 nt, Human
aacccagguuguggagguuguagugagccgag

SEQ ID NO: 22493 - RNA, 32 nt, Human
aacccaguagaggaagguugcaguaagcugag

SEQ ID NO: 22494 - RNA, 32 nt, Human
aacccaguaggcggaaguugcagugagcugaa

SEQ ID NO: 22495 - RNA, 32 nt, Human
aacccagucagacaaauucaccuucacuuagg

SEQ ID NO: 22496 - RNA, 32 nt, Human
aacccagugccguuuauuucagaagcuuccug

SEQ ID NO: 22497 - RNA, 32 nt, Human
aacccagugccuccucaacuccugggugggug

SEQ ID NO: 22498 - RNA, 32 nt, Human
aacccaguggcggaggcugcagugagccgaga

SEQ ID NO: 22499 - RNA, 32 nt, Human
aacccagugugauauaucaaaauacagucuac

SEQ ID NO: 22500 - RNA, 32 nt, Human
aacccagugugcugagaaacaggagagugacu

SEQ ID NO: 22501 - RNA, 32 nt, Human
aacccaguguuugcacacacacaaaaucuuga

SEQ ID NO: 22502 - RNA, 32 nt, Human
aacccaguucagguguaggaggcugcuguggg

SEQ ID NO: 22503 - RNA, 32 nt, Human
aacccaguuccaacuaugaucugacuucaucc

SEQ ID NO: 22504 - RNA, 32 nt, Human
aacccaguuggaggggcauggcuuccaauuua

SEQ ID NO: 22505 - RNA, 32 nt, Human
aacccauaaggcagagguugcagugagcugag

SEQ ID NO: 22506 - RNA, 32 nt, Human
aacccaucaccaggaacugucacuggggacga

SEQ ID NO: 22507 - RNA, 32 nt, Human
aacccaucuaugagagaaaguucagucacuuu

SEQ ID NO: 22508 - RNA, 32 nt, Human
aacccaucucaccacacugcuuuacagucuuc

SEQ ID NO: 22509 - RNA, 32 nt, Human
aacccaucucucuuggagaauccacacuucgu

SEQ ID NO: 22510 - RNA, 32 nt, Human
aacccaucugcaauuugccugugggagaagca

SEQ ID NO: 22511 - RNA, 32 nt, Human
aacccaucuucauuccuuuuuauggggcucca

SEQ ID NO: 22512 - RNA, 32 nt, Human
aacccaucuuugcaaagaagcuugccuauaga

SEQ ID NO: 22513 - RNA, 32 nt, Human
aacccaugacacagcacaacucuacagacagu

SEQ ID NO: 22514 - RNA, 32 nt, Human
aacccaugacuguauucucucccuuggacacc

SEQ ID NO: 22515 - RNA, 32 nt, Human
aacccaugaggcggagguugcagugagccgag

SEQ ID NO: 22516 - RNA, 32 nt, Human
aacccaugagguggagguugcggugagccaag

SEQ ID NO: 22517 - RNA, 32 nt, Human
aacccaugccgaccccuccuagagccacugga

SEQ ID NO: 22518 - RNA, 32 nt, Human
aacccaugccucccccuagccauuuuuacugu

SEQ ID NO: 22519 - RNA, 30 nt, Human
aacccauggagaccagaccaacagcucuga

SEQ ID NO: 22520 - RNA, 32 nt, Human
aacccauguccucacuucaagguuaucaaucu

SEQ ID NO: 22521 - RNA, 32 nt, Human
aacccaugugccauccuacuuguauuacuggu

SEQ ID NO: 22522 - RNA, 30 nt, Human
aacccauguuugcaaucaaagaugauaaaa

SEQ ID NO: 22523 - RNA, 32 nt, Human
aacccauugcccacaaccccuccacccucggu

SEQ ID NO: 22524 - RNA, 32 nt, Human
aacccauugucaccccuccgacucaccggcaa

SEQ ID NO: 22525 - RNA, 32 nt, Human
aaccccaaaagaugccgcgucaguucgagcca

SEQ ID NO: 22526 - RNA, 32 nt, Human
aaccccaaacagccuggaacauguuacucuga

SEQ ID NO: 22527 - RNA, 32 nt, Human
aaccccaaacuguugauuauuagccagguaau

SEQ ID NO: 22528 - RNA, 32 nt, Human
aaccccaaagagagcacuguccaaggaugucg

SEQ ID NO: 22529 - RNA, 32 nt, Human
aaccccaaagcccaugcuccgacagguggccc

SEQ ID NO: 22530 - RNA, 32 nt, Human
aaccccaaagugucccccuuguggaaccaaau

SEQ ID NO: 22531 - RNA, 32 nt, Human
aaccccaaauguccaaaagcccuuuucuggug

SEQ ID NO: 22532 - RNA, 24 nt, Human
aaccccaacaaccugccaccccuc

SEQ ID NO: 22533 - RNA, 32 nt, Human
aaccccaaccucuacacagacagaaaggagca

SEQ ID NO: 22534 - RNA, 19 nt, Human
aaccccaacguccccgaga

SEQ ID NO: 22535 - RNA, 32 nt, Human
aaccccaagccggggcagcuccaccuccccag

SEQ ID NO: 22536 - RNA, 32 nt, Human
aaccccaagggcccuggagcgcucccugauac

SEQ ID NO: 22537 - RNA, 32 nt, Human
aaccccaauucagccauggugacuccuuugau

SEQ ID NO: 22538 - RNA, 32 nt, Human
aaccccacaagugucuucacuguggaaaaccu

SEQ ID NO: 22539 - RNA, 32 nt, Human
aaccccacaauuggaauucacuuuaaaaaucc

SEQ ID NO: 22540 - RNA, 32 nt, Human
aaccccacagcuccugagaauucucucgccug

SEQ ID NO: 22541 - RNA, 32 nt, Human
aaccccaccccagcccuacacagcagucuggc

SEQ ID NO: 22542 - RNA, 32 nt, Human
aaccccaccuagaccacccuccaugucaggua

SEQ ID NO: 22543 - RNA, 32 nt, Human
aaccccacuuccuacuguaauagaucagcauc

SEQ ID NO: 22544 - RNA, 32 nt, Human
aaccccacuuccucggcaggaccccagucuca

SEQ ID NO: 22545 - RNA, 32 nt, Human
aaccccacuuucucccuccuccuuuuccugug

SEQ ID NO: 22546 - RNA, 32 nt, Human
aaccccagaaguuugaguccagcccaggcaac

SEQ ID NO: 22547 - RNA, 32 nt, Human
aaccccagaccagggcaggggacaggucucaa

SEQ ID NO: 22548 - RNA, 32 nt, Human
aaccccagacccagggggaggaaggguggagg

SEQ ID NO: 22549 - RNA, 32 nt, Human
aaccccagaccugcccuuacaguaguguagcg

SEQ ID NO: 22550 - RNA, 32 nt, Human
aaccccagagagagcuuccccgacagcugcag

SEQ ID NO: 22551 - RNA, 32 nt, Human
aaccccagagcuucacuugcuccuucacuucc

SEQ ID NO: 22552 - RNA, 32 nt, Human
aaccccagaggaugagauaaaugggaacugga

SEQ ID NO: 22553 - RNA, 32 nt, Human
aaccccagaggcagaggcugaagugagccaag

SEQ ID NO: 22554 - RNA, 32 nt, Human
aaccccagaggcagagguugcagugagcugag

SEQ ID NO: 22555 - RNA, 32 nt, Human
aaccccagaggcagagguugcggugagccgag

SEQ ID NO: 22556 - RNA, 32 nt, Human
aaccccagaggcaguggcaagaggagguggcg

SEQ ID NO: 22557 - RNA, 32 nt, Human
aaccccagaggcggagguugcagugagccgag

SEQ ID NO: 22558 - RNA, 32 nt, Human
aaccccagagguggagguugcagugagccgag

SEQ ID NO: 22559 - RNA, 32 nt, Human
aaccccagcaaaacauuccucccuguaaaugg

SEQ ID NO: 22560 - RNA, 32 nt, Human
aaccccagcaaucccuuccuuucacuaccuuc

SEQ ID NO: 22561 - RNA, 32 nt, Human
aaccccagccagccugucaccaugcugacagc

SEQ ID NO: 22562 - RNA, 32 nt, Human
aaccccagccauggaccgucaguggcuggagg

SEQ ID NO: 22563 - RNA, 32 nt, Human
aaccccagccuccugagggcuccaugcugaag

SEQ ID NO: 22564 - RNA, 32 nt, Human
aaccccagcuacuagggaggcugaggcaggag

SEQ ID NO: 22565 - RNA, 32 nt, Human
aaccccagcuacucaggaggccgaggcgggag

SEQ ID NO: 22566 - RNA, 32 nt, Human
aaccccagcuacucaggagguugaggcaggag

SEQ ID NO: 22567 - RNA, 32 nt, Human
aaccccagcuacucgggaagcugagguaggag

SEQ ID NO: 22568 - RNA, 32 nt, Human
aaccccagcuacucgggaggcugaggcaggaa

SEQ ID NO: 22569 - RNA, 32 nt, Human
aaccccagcuacuugggaggcugaggagggau

SEQ ID NO: 22570 - RNA, 32 nt, Human
aaccccagcuacuugggaggcugaggcacuag

SEQ ID NO: 22571 - RNA, 32 nt, Human
aaccccagcuccacuccagccuggcguccagg

SEQ ID NO: 22572 - RNA, 32 nt, Human
aaccccagcucugccucacaggcaggcaggcc

SEQ ID NO: 22573 - RNA, 32 nt, Human
aaccccagcuggaugugccucccaggccugcu

SEQ ID NO: 22574 - RNA, 32 nt, Human
aaccccaggacacccacccacccaaagagcca

SEQ ID NO: 22575 - RNA, 32 nt, Human
aaccccaggagguggggguuguugugagccaa

SEQ ID NO: 22576 - RNA, 32 nt, Human
aaccccaggaugagaagggagcagggagaguu

SEQ ID NO: 22577 - RNA, 32 nt, Human
aaccccaggcuggagugcaguggcucaaugca

SEQ ID NO: 22578 - RNA, 32 nt, Human
aaccccagggcuccagcacuaccaaguuggaa

SEQ ID NO: 22579 - RNA, 32 nt, Human
aaccccaguauugccuuucguuucccuauuca

SEQ ID NO: 22580 - RNA, 32 nt, Human
aaccccagugcagcugcaucucccaggcggga

SEQ ID NO: 22581 - RNA, 32 nt, Human
aaccccaucaccaagaggagguucagggaagc

SEQ ID NO: 22582 - RNA, 32 nt, Human
aaccccauccuuguugggcagcucccugcuuu

SEQ ID NO: 22583 - RNA, 32 nt, Human
aaccccaucucugcuaaaaauaccaaaauuac

SEQ ID NO: 22584 - RNA, 32 nt, Human
aaccccaucuuucuacacacaaaaagauacag

SEQ ID NO: 22585 - RNA, 32 nt, Human
aaccccaugggaggaggaggaagaagaggagg

SEQ ID NO: 22586 - RNA, 31 nt, Human
aaccccaugggggaccucgacaacagcgccu

SEQ ID NO: 22587 - RNA, 32 nt, Human
aaccccauuugaagacucauggucccauguca

SEQ ID NO: 22588 - RNA, 32 nt, Human
aaccccauuugcuuucuuuucucccauauugg

SEQ ID NO: 22589 - RNA, 32 nt, Human
aacccccaacaguaugacagaaaauggccuua

SEQ ID NO: 22590 - RNA, 32 nt, Human
aacccccaacccaguggccaucuucacaacug

SEQ ID NO: 22591 - RNA, 18 nt, Human
aacccccaaccccugccc

SEQ ID NO: 22592 - RNA, 32 nt, Human
aacccccaaggcggagcuugcagugagccgag

SEQ ID NO: 22593 - RNA, 32 nt, Human
aacccccagcacuuugggaggccgagguggga

SEQ ID NO: 22594 - RNA, 32 nt, Human
aacccccagccagcacagacuuccugccuucc

SEQ ID NO: 22595 - RNA, 32 nt, Human
aacccccaguagcuuugccugcuuuuauaaag

SEQ ID NO: 22596 - RNA, 32 nt, Human
aacccccaucccagcaccccauccuguuguuc

SEQ ID NO: 22597 - RNA, 32 nt, Human
aacccccauuauacauuaugaucuuaagccag

SEQ ID NO: 22598 - RNA, 32 nt, Human
aacccccgaugccaccacagccaucgccacug

SEQ ID NO: 22599 - RNA, 32 nt, Human
aacccccgcuucgcagcucaggagccugaggu

SEQ ID NO: 22600 - RNA, 32 nt, Human
aacccccggaguagcuggaacuacagccuccu

SEQ ID NO: 22601 - RNA, 32 nt, Human
aacccccggcaucugcuccuaguagaggccag

SEQ ID NO: 22602 - RNA, 32 nt, Human
aacccccguuccccugcacuccucuucuccca

SEQ ID NO: 22603 - RNA, 32 nt, Human
aacccccuaaauugaaguuuagcaauaugaca

SEQ ID NO: 22604 - RNA, 32 nt, Human
aacccccuaccuuggccagcuggcugcagguc

SEQ ID NO: 22605 - RNA, 32 nt, Human
aacccccuccccucgcugcugggccccaucuc

SEQ ID NO: 22606 - RNA, 32 nt, Human
aacccccucccucugcuggaguuuccuagccc

SEQ ID NO: 22607 - RNA, 32 nt, Human
aacccccugaaauguauccucaguuugccaga

SEQ ID NO: 22608 - RNA, 32 nt, Human
aacccccugcagcucucuuguggaccccugcc

SEQ ID NO: 22609 - RNA, 32 nt, Human
aacccccugcgugguccucuguggcagccuuc

SEQ ID NO: 22610 - RNA, 32 nt, Human
aacccccuuccacaauggucucagccuaggcc

SEQ ID NO: 22611 - RNA, 20 nt, Human
aacccccuuuacccccauga

SEQ ID NO: 22612 - RNA, 32 nt, Human
aacccccuuugguuagagaagggaaagugacu

SEQ ID NO: 22613 - RNA, 32 nt, Human
aaccccgagcugcaaaaccagcagguuuuuau

SEQ ID NO: 22614 - RNA, 32 nt, Human
aaccccgccucuuccuccuccugugggacugc

SEQ ID NO: 22615 - RNA, 20 nt, Human
aaccccgccuggccacccca

SEQ ID NO: 22616 - RNA, 22 nt, Human
aaccccggaccucaggugaucc

SEQ ID NO: 22617 - RNA, 32 nt, Human
aaccccggagauggagguugcagugagccaag

SEQ ID NO: 22618 - RNA, 32 nt, Human
aaccccggaggcagagguuucagugagccgag

SEQ ID NO: 22619 - RNA, 32 nt, Human
aaccccggaggcggagcuugcagugagccgag

SEQ ID NO: 22620 - RNA, 32 nt, Human
aaccccggaggcggagguugcagugagcugag

SEQ ID NO: 22621 - RNA, 32 nt, Human
aaccccggagguagagguugcagugagccgag

SEQ ID NO: 22622 - RNA, 32 nt, Human
aaccccggcggagcugaggagcagggccgggc

SEQ ID NO: 22623 - RNA, 32 nt, Human
aaccccgggguagugaugcacaccuguagucu

SEQ ID NO: 22624 - RNA, 32 nt, Human
aaccccgucucuacuaaaaauuagcugagugc

SEQ ID NO: 22625 - RNA, 32 nt, Human
aaccccgugggcagggacuacagggaaggcuc

SEQ ID NO: 22626 - RNA, 32 nt, Human
aaccccuacugaccuggcuggugacagaacau

SEQ ID NO: 22627 - RNA, 32 nt, Human
aaccccuagcacuccggcucugggcuuucggc

SEQ ID NO: 22628 - RNA, 32 nt, Human
aaccccucacaggagcuuacuggcaaacauga

SEQ ID NO: 22629 - RNA, 32 nt, Human
aaccccucagcugccacugcaacagugggcuu

SEQ ID NO: 22630 - RNA, 32 nt, Human
aaccccucaugugaagaacgugucagaaucuu

SEQ ID NO: 22631 - RNA, 32 nt, Human
aaccccuccagcccaucagacgccaggcugcc

SEQ ID NO: 22632 - RNA, 32 nt, Human
aaccccuccgccacccuccaccuccgaaccgc

SEQ ID NO: 22633 - RNA, 32 nt, Human
aaccccuccucccucagacucagagguccaag

SEQ ID NO: 22634 - RNA, 32 nt, Human
aaccccuccuccugcucccagauacgggagaa

SEQ ID NO: 22635 - RNA, 32 nt, Human
aaccccucucagggcugcagcuuacagguggg

SEQ ID NO: 22636 - RNA, 32 nt, Human
aaccccucucucugaaaaugacaugcccucgc

SEQ ID NO: 22637 - RNA, 32 nt, Human
aaccccucugcaggagcuucuccugccgccag

SEQ ID NO: 22638 - RNA, 32 nt, Human
aaccccucuguauguuuuccauguagcgugua

SEQ ID NO: 22639 - RNA, 32 nt, Human
aaccccugaaacccacacagcacucuccaucu

SEQ ID NO: 22640 - RNA, 32 nt, Human
aaccccugaccccacacacucucugccaugca

SEQ ID NO: 22641 - RNA, 32 nt, Human
aaccccugaccccacacacucugccaugcaca

SEQ ID NO: 22642 - RNA, 20 nt, Human
aaccccugaccuaaacuacu

SEQ ID NO: 22643 - RNA, 23 nt, Human
aaccccugaccucaagugaucca

SEQ ID NO: 22644 - RNA, 22 nt, Human
aaccccugaccucaggcaaucu

SEQ ID NO: 22645 - RNA, 23 nt, Human
aaccccugagcucaggugaucca

SEQ ID NO: 22646 - RNA, 32 nt, Human
aaccccugcugcagcauuucaggugcaguaug

SEQ ID NO: 22647 - RNA, 32 nt, Human
aaccccuggaaccugguugggcaguaggggag

SEQ ID NO: 22648 - RNA, 32 nt, Human
aaccccuggacaacugaccacacccacaaggc

SEQ ID NO: 22649 - RNA, 32 nt, Human
aaccccuggcagcugcugccaguccuggaggc

SEQ ID NO: 22650 - RNA, 32 nt, Human
aaccccuggcugaacagugcucugccucuaac

SEQ ID NO: 22651 - RNA, 20 nt, Human
aaccccugggcucaagugau

SEQ ID NO: 22652 - RNA, 24 nt, Human
aaccccugggcucaagugauccuc

SEQ ID NO: 22653 - RNA, 32 nt, Human
aaccccugggcugaggcccuggcccugccccc

SEQ ID NO: 22654 - RNA, 32 nt, Human
aaccccugggggcagagacugaggagggagga

SEQ ID NO: 22655 - RNA, 32 nt, Human
aaccccugucccccaccucucacuuucaccua

SEQ ID NO: 22656 - RNA, 32 nt, Human
aaccccugucggccaaaacccccacacccgga

SEQ ID NO: 22657 - RNA, 32 nt, Human
aaccccugugccccuccccuccaggcuaccuc

SEQ ID NO: 22658 - RNA, 32 nt, Human
aaccccuguggacugcagccucgcucuuucca

SEQ ID NO: 22659 - RNA, 32 nt, Human
aaccccugugucagaaggaugggugaggcuca

SEQ ID NO: 22660 - RNA, 32 nt, Human
aaccccuucacacccaccccucugaccccugc

SEQ ID NO: 22661 - RNA, 19 nt, Human
aaccccuucugggacuuca

SEQ ID NO: 22662 - RNA, 32 nt, Human
aaccccuugccuggccucaccuggccagcuca

SEQ ID NO: 22663 - RNA, 32 nt, Human
aaccccuuuccuccccuccaccaggggucaca

SEQ ID NO: 22664 - RNA, 32 nt, Human
aaccccuuuuucuguguggccccuggggcugc

SEQ ID NO: 22665 - RNA, 32 nt, Human
aacccgaagaggaggcggaccaggagaagagc

SEQ ID NO: 22666 - RNA, 32 nt, Human
aacccgacaggcaccagugcccugccaggccu

SEQ ID NO: 22667 - RNA, 32 nt, Human
aacccgaccaaaguaggcuggugaggaagucc

SEQ ID NO: 22668 - RNA, 32 nt, Human
aacccgagagacggagguugcagugagcugau

SEQ ID NO: 22669 - RNA, 32 nt, Human
aacccgagaggcggaaguugcagugagccgag

SEQ ID NO: 22670 - RNA, 32 nt, Human
aacccgagaggcggagcuugcagugagccaag

SEQ ID NO: 22671 - RNA, 32 nt, Human
aacccgagaggcggagcuugcagugagcugag

SEQ ID NO: 22672 - RNA, 26 nt, Human
aacccgagaggcggagguugcaguga

SEQ ID NO: 22673 - RNA, 32 nt, Human
aacccgagaggcggagguugcagugagcccag

SEQ ID NO: 22674 - RNA, 32 nt, Human
aacccgagaggcggagguugcagugagccgag

SEQ ID NO: 22675 - RNA, 32 nt, Human
aacccgagagguggagguugaagugagccaag

SEQ ID NO: 22676 - RNA, 32 nt, Human
aacccgagagguggagguugcagugaaccaag

SEQ ID NO: 22677 - RNA, 32 nt, Human
aacccgagagguggagguugcagugagccaaa

SEQ ID NO: 22678 - RNA, 32 nt, Human
aacccgaggaagaugcucaucugagccagcac

SEQ ID NO: 22679 - RNA, 32 nt, Human
aacccgagucgaagcgggaagauggcugcaga

SEQ ID NO: 22680 - RNA, 32 nt, Human
aacccgcagagggaggggaggggcugagcugu

SEQ ID NO: 22681 - RNA, 32 nt, Human
aacccgcauuggauaucagagcugggagggcc

SEQ ID NO: 22682 - RNA, 32 nt, Human
aacccgcauuuuccaaagagaggaaucacagg

SEQ ID NO: 22683 - RNA, 32 nt, Human
aacccgcgaggcggagacugcagugagccgag

SEQ ID NO: 22684 - RNA, 32 nt, Human
aacccgcuggcgaccgcugccuccgggaaguu

SEQ ID NO: 22685 - RNA, 32 nt, Human
aacccgcugucgcgcaagcugcauaagauccu

SEQ ID NO: 22686 - RNA, 32 nt, Human
aacccggaagcgaagguugcagugagccaagg

SEQ ID NO: 22687 - RNA, 32 nt, Human
aacccggaaggcagagcuugcagugagccgag

SEQ ID NO: 22688 - RNA, 32 nt, Human
aacccggaaggcagagguugcagugagccgag

SEQ ID NO: 22689 - RNA, 32 nt, Human
aacccggaaggcggagcuugcagugagccgag

SEQ ID NO: 22690 - RNA, 32 nt, Human
aacccggaaggcggagguugcagugagccaag

SEQ ID NO: 22691 - RNA, 32 nt, Human
aacccggaagguggagguugcagugagccgag

SEQ ID NO: 22692 - RNA, 32 nt, Human
aacccggaagguggagguuguugcggugagcu

SEQ ID NO: 22693 - RNA, 32 nt, Human
aacccggaagguggaguuugcagugagccgag

SEQ ID NO: 22694 - RNA, 32 nt, Human
aacccggaggcagagguugcagugagccgaga

SEQ ID NO: 22695 - RNA, 32 nt, Human
aacccggaggcggagguugcgguaagccgaga

SEQ ID NO: 22696 - RNA, 32 nt, Human
aacccggaggugggcuacugcagggaccugag

SEQ ID NO: 22697 - RNA, 32 nt, Human
aacccggcaauguugguggcucuugcauuccu

SEQ ID NO: 22698 - RNA, 32 nt, Human
aacccggcaggaagagguugcauugagcugag

SEQ ID NO: 22699 - RNA, 32 nt, Human
aacccggcaggcagagcuugcagugagccgag

SEQ ID NO: 22700 - RNA, 32 nt, Human
aacccggcaggcagagguugcagugagccgag

SEQ ID NO: 22701 - RNA, 32 nt, Human
aacccggcaggcggagguugcagugagcggag

SEQ ID NO: 22702 - RNA, 32 nt, Human
aacccggcgcauccuggugaagccacacccag

SEQ ID NO: 22703 - RNA, 32 nt, Human
aacccggcgggaagagguugcagugagccaag

SEQ ID NO: 22704 - RNA, 32 nt, Human
aacuggaggcacggcagaggaggcagggccga

SEQ ID NO: 22705 - RNA, 32 nt, Human
aacuggagugugaaggaccgagacaagaugaa

SEQ ID NO: 22706 - RNA, 32 nt, Human
aacuggaucccuuccuuacaccuuaacaaaaa

SEQ ID NO: 22707 - RNA, 32 nt, Human
aacuggaucugaggaggcaggaaaggacccaa

SEQ ID NO: 22708 - RNA, 32 nt, Human
aacuggaugcagcugcucauacucaaucccau

SEQ ID NO: 22709 - RNA, 32 nt, Human
aacuggaugggacauuccgaagagcucccagc

SEQ ID NO: 22710 - RNA, 32 nt, Human
aacuggauguaggccaggcauggugagucaca

SEQ ID NO: 22711 - RNA, 32 nt, Human
aacuggauuuguuaggugagggugaggccaag

SEQ ID NO: 22712 - RNA, 32 nt, Human
aacuggcaacaagcaaacaggucuucagcaaa

SEQ ID NO: 22713 - RNA, 32 nt, Human
aacuggcacccaugggcccacccaugagugau

SEQ ID NO: 22714 - RNA, 32 nt, Human
aacuggcagacaggccagggauguauguugcu

SEQ ID NO: 22715 - RNA, 32 nt, Human
aacuggcauacugcaaaguccccagcccugcc

SEQ ID NO: 22716 - RNA, 32 nt, Human
aacuggcauccuggugggcccaaggguuuuca

SEQ ID NO: 22717 - RNA, 32 nt, Human
aacuggcauuacaggcgccugccaccaccccu

SEQ ID NO: 22718 - RNA, 32 nt, Human
aacuggccacugcugaucugcgccuagaagac

SEQ ID NO: 22719 - RNA, 32 nt, Human
aacuggccagaagaggagcagcugcaguccug

SEQ ID NO: 22720 - RNA, 32 nt, Human
aacuggccagagaucaccccagaagagaguac

SEQ ID NO: 22721 - RNA, 32 nt, Human
aacuggcccaggcacuggaguggaauagaaug

SEQ ID NO: 22722 - RNA, 32 nt, Human
aacuggcccaguaggcugagagauaugaugac

SEQ ID NO: 22723 - RNA, 21 nt, Human
aacuggccggcagccugguga

SEQ ID NO: 22724 - RNA, 32 nt, Human
aacuggccuccagggggcauuguuggaauaug

SEQ ID NO: 22725 - RNA, 32 nt, Human
aacuggccugggagcugagguuggcacuagug

SEQ ID NO: 22726 - RNA, 32 nt, Human
aacuggccuuucucuuaccuugccuuaggccu

SEQ ID NO: 22727 - RNA, 32 nt, Human
aacuggcggguauucuggucauugaggagaca

SEQ ID NO: 22728 - RNA, 32 nt, Human
aacuggcuacugagucaugauccuugcugaua

SEQ ID NO: 22729 - RNA, 32 nt, Human
aacuggcucauggagaaaacaaauuugacuug

SEQ ID NO: 22730 - RNA, 32 nt, Human
aacuggcugccucacauugcucugguuugugu

SEQ ID NO: 22731 - RNA, 32 nt, Human
aacuggcuguuccugaagucugugccccacuu

SEQ ID NO: 22732 - RNA, 32 nt, Human
aacuggcuuaaacaagaacagggcucucucac

SEQ ID NO: 22733 - RNA, 32 nt, Human
aacugggaaaacagugaaucuuaugguggaag

SEQ ID NO: 22734 - RNA, 32 nt, Human
aacugggaaagccaaagucagucuugagcaga

SEQ ID NO: 22735 - RNA, 32 nt, Human
aacugggaagagaaggaggggaacuuaaaccu

SEQ ID NO: 22736 - RNA, 32 nt, Human
aacugggacaacaggcgcccgucaccacgccc

SEQ ID NO: 22737 - RNA, 32 nt, Human
aacugggacaacauguccaugccaccaugcuc

SEQ ID NO: 22738 - RNA, 22 nt, Human
aacugggacagcuuuccccuca

SEQ ID NO: 22739 - RNA, 32 nt, Human
aacugggaccucaagggccuucugucagccuu

SEQ ID NO: 22740 - RNA, 32 nt, Human
aacugggacuaaaggcacacaccaccacaccu

SEQ ID NO: 22741 - RNA, 32 nt, Human
aacugggacuacacacgcaugccacuacaccc

SEQ ID NO: 22742 - RNA, 32 nt, Human
aacugggacuacagaugcgugccaccacaccu

SEQ ID NO: 22743 - RNA, 32 nt, Human
aacugggacuacaggcacagcucacuaugccc

SEQ ID NO: 22744 - RNA, 32 nt, Human
aacugggacuacaggcaugcaccaccaugccu

SEQ ID NO: 22745 - RNA, 32 nt, Human
aacugggacuacaggcgcgugccaccaugccu

SEQ ID NO: 22746 - RNA, 32 nt, Human
aacugggacuacaggugcccgccaccacaccc

SEQ ID NO: 22747 - RNA, 32 nt, Human
aacugggacugcaggcacaugccaccacaucc

SEQ ID NO: 22748 - RNA, 23 nt, Human
aacugggagaaauaaacuucugu

SEQ ID NO: 22749 - RNA, 32 nt, Human
aacugggagaggaagagagcaggacaaggcag

SEQ ID NO: 22750 - RNA, 32 nt, Human
aacugggagagggaggaagggagaaagugaga

SEQ ID NO: 22751 - RNA, 32 nt, Human
aacugggagaggggcaugcuccccagcugugu

SEQ ID NO: 22752 - RNA, 32 nt, Human
aacugggagcagagcacacagagccguggagc

SEQ ID NO: 22753 - RNA, 32 nt, Human
aacugggaggcagggguuggagugagccagga

SEQ ID NO: 22754 - RNA, 32 nt, Human
aacugggaggcggagcuugcagugagccgaga

SEQ ID NO: 22755 - RNA, 32 nt, Human
aacugggaggcugaggcaggaggaucacuuga

SEQ ID NO: 22756 - RNA, 22 nt, Human
aacugggagguggagguugcag

SEQ ID NO: 22757 - RNA, 25 nt, Human
aacugggagguggagguugcaguga

SEQ ID NO: 22758 - RNA, 32 nt, Human
aacugggagguggagguugcagugagccaaga

SEQ ID NO: 22759 - RNA, 32 nt, Human
aacugggaugggugaguccacucuggcuaggg

SEQ ID NO: 22760 - RNA, 32 nt, Human
aacugggaugugugaaagcaggaagcaaagcu

SEQ ID NO: 22761 - RNA, 32 nt, Human
aacugggauuacaggcacccgccaccaugcca

SEQ ID NO: 22762 - RNA, 32 nt, Human
aacugggauuacaggcaugaggcaccgugccu

SEQ ID NO: 22763 - RNA, 32 nt, Human
aacugggauuacaggcaugcaccaccacgccc

SEQ ID NO: 22764 - RNA, 32 nt, Human
aacugggauuacaggcaugcaccaccaugccu

SEQ ID NO: 22765 - RNA, 32 nt, Human
aacugggauuacaggcaugcgccaccauaccc

SEQ ID NO: 22766 - RNA, 32 nt, Human
aacugggauuacaggcaugcgccaccaugccc

SEQ ID NO: 22767 - RNA, 32 nt, Human
aacugggauuacaggcaugcgccacuaaggga

SEQ ID NO: 22768 - RNA, 32 nt, Human
aacugggauuacaggcaugugccaucacgcuc

SEQ ID NO: 22769 - RNA, 32 nt, Human
aacugggauuacaggcaugugucaccaugccc

SEQ ID NO: 22770 - RNA, 32 nt, Human
aacugggauuacaggugcccaccaccaugccc

SEQ ID NO: 22771 - RNA, 32 nt, Human
aacugggauuacaggugugugccaccacaccc

SEQ ID NO: 22772 - RNA, 32 nt, Human
aacugggauuacagucgugugccaccacgcuc

SEQ ID NO: 22773 - RNA, 32 nt, Human
aacugggauuauaggcaugcaccaccacgccc

SEQ ID NO: 22774 - RNA, 32 nt, Human
aacugggauugcaggcgugagccaccgcgccc

SEQ ID NO: 22775 - RNA, 32 nt, Human
aacugggauuuuaucucaucucuuuaaaagag

SEQ ID NO: 22776 - RNA, 32 nt, Human
aacugggcaaaaguugugaagcagcaauucug

SEQ ID NO: 22777 - RNA, 32 nt, Human
aacugggcacuucccucuggaaaucacagugu

SEQ ID NO: 22778 - RNA, 32 nt, Human
aacugggcagaggccacagucaccuccccaca

SEQ ID NO: 22779 - RNA, 32 nt, Human
aacugggcauuucacgaacuguucacacugca

SEQ ID NO: 22780 - RNA, 32 nt, Human
aacugggccucccucccuccccuuggucaugg

SEQ ID NO: 22781 - RNA, 32 nt, Human
aacugggcggagguggaggugcagggucaacu

SEQ ID NO: 22782 - RNA, 32 nt, Human
aacugggcucaagcgauccucccacuuuggcc

SEQ ID NO: 22783 - RNA, 32 nt, Human
aacugggcucacugcagccuagaccugcuggg

SEQ ID NO: 22784 - RNA, 32 nt, Human
aacugggcugugaacccgcaggggcagggacc

SEQ ID NO: 22785 - RNA, 32 nt, Human
aacugggcuuugccucacguauuccugcugcc

SEQ ID NO: 22786 - RNA, 31 nt, Human
aacuggggaaagaaguugugaucuguugccu

SEQ ID NO: 22787 - RNA, 32 nt, Human
aacuggggaagcagagguuguagugagccgag

SEQ ID NO: 22788 - RNA, 32 nt, Human
aacuggggaccaauagaacccugcugaagcag

SEQ ID NO: 22789 - RNA, 32 nt, Human
aacuggggagagaagagauacagagcuaccau

SEQ ID NO: 22790 - RNA, 32 nt, Human
aacuggggaggagaagguugcagugagccgag

SEQ ID NO: 22791 - RNA, 32 nt, Human
aacuggggaggcagagguugcagugagacaag

SEQ ID NO: 22792 - RNA, 32 nt, Human
aacuggggaggcagagguugcaguggcccgag

SEQ ID NO: 22793 - RNA, 26 nt, Human
aacuggggaggcagagguugcgguga

SEQ ID NO: 22794 - RNA, 32 nt, Human
aacuggggaggcagagguugcggugagcccag

SEQ ID NO: 22795 - RNA, 32 nt, Human
aacuggggagguagagguuacagcgagccaag

SEQ ID NO: 22796 - RNA, 32 nt, Human
aacuggggagguggagguaggaagauugcuug

SEQ ID NO: 22797 - RNA, 32 nt, Human
aacugggggacaggucugcgcugcagugggau

SEQ ID NO: 22798 - RNA, 32 nt, Human
aacugggggaggcagggcacagggagaugcuc

SEQ ID NO: 22799 - RNA, 32 nt, Human
aacugggggugucgcuggcaaguucccacaag

SEQ ID NO: 22800 - RNA, 32 nt, Human
aacugggguacagccugggcucagggaauagc

SEQ ID NO: 22801 - RNA, 32 nt, Human
aacuggggugggggaagggaaaaaggaaagua

SEQ ID NO: 22802 - RNA, 32 nt, Human
aacuggguccccuaucacaaggcuacuggcua

SEQ ID NO: 22803 - RNA, 32 nt, Human
aacugggucucucagcccuggggaucagaaag

SEQ ID NO: 22804 - RNA, 32 nt, Human
aacugggugaagccacacacacccaaugaaca

SEQ ID NO: 22805 - RNA, 32 nt, Human
aacuggguggccagggcguccgugcacgaccc

SEQ ID NO: 22806 - RNA, 32 nt, Human
aacugggugucuuuuucuuuucaucuggcaac

SEQ ID NO: 22807 - RNA, 32 nt, Human
aacuggguuaaucaagucucgguaaguccuuu

SEQ ID NO: 22808 - RNA, 26 nt, Human
aacuggguuggacccagcugggccau

SEQ ID NO: 22809 - RNA, 32 nt, Human
aacuggguuuggguucugugguuccaguggaa

SEQ ID NO: 22810 - RNA, 32 nt, Human
aacugguaacaggcugggugcaauggcucaca

SEQ ID NO: 22811 - RNA, 32 nt, Human
aacugguagcagaagcagcagugaagaugaug

SEQ ID NO: 22812 - RNA, 32 nt, Human
aacugguagcauuugccacuucccauggugua

SEQ ID NO: 22813 - RNA, 32 nt, Human
aacugguccugccucuuuaccacacagaacca

SEQ ID NO: 22814 - RNA, 32 nt, Human
aacuggucucaaacuccuggccucaagcaauu

SEQ ID NO: 22815 - RNA, 32 nt, Human
aacuggucucgaacuccugaccucgggaucca

SEQ ID NO: 22816 - RNA, 32 nt, Human
aacuggucuucuucaagagagcuaaguauaca

SEQ ID NO: 22817 - RNA, 32 nt, Human
aacuggucuuugacagauuugacuguccauau

SEQ ID NO: 22818 - RNA, 32 nt, Human
aacuggugaagugagaaaaacagaaugcagcu

SEQ ID NO: 22819 - RNA, 32 nt, Human
aacuggugagauuacaggcaugagccaccaca

SEQ ID NO: 22820 - RNA, 32 nt, Human
aacuggugcucacaccuuacucaacauuagaa

SEQ ID NO: 22821 - RNA, 32 nt, Human
aacugguguuucuauuaauaaguaucuaaguu

SEQ ID NO: 22822 - RNA, 32 nt, Human
aacugguucaauuccccgcuccugggcuuccu

SEQ ID NO: 22823 - RNA, 32 nt, Human
aacugguuccgugaggaaaggcagaagccguu

SEQ ID NO: 22824 - RNA, 32 nt, Human
aacugguucucuguguuccaagcacaauauua

SEQ ID NO: 22825 - RNA, 32 nt, Human
aacugguuuucacuuccaguuacugcaacagc

SEQ ID NO: 22826 - RNA, 32 nt, Human
aacuguaaccgauuguaugacugcugcacuua

SEQ ID NO: 22827 - RNA, 23 nt, Human
aacuguaagaaauaaaucucugu

SEQ ID NO: 22828 - RNA, 21 nt, Human
aacuguacaagacacuacggg

SEQ ID NO: 22829 - RNA, 32 nt, Human
aacuguacaucucacauguugggaaacgcugg

SEQ ID NO: 22830 - RNA, 32 nt, Human
aacuguaccacugggccaagugcaguggauca

SEQ ID NO: 22831 - RNA, 32 nt, Human
aacuguaccauccagagcccaccagaagcuau

SEQ ID NO: 22832 - RNA, 32 nt, Human
aacuguacgcagugacgugcacuggccugggg

SEQ ID NO: 22833 - RNA, 32 nt, Human
aacuguagaaacccuccagaaauuuccacugc

SEQ ID NO: 22834 - RNA, 32 nt, Human
aacuguagaagagaaucaagaagaaaaauaaa

SEQ ID NO: 22835 - RNA, 32 nt, Human
aacuguagcuuauauucuuuauuugugcauac

SEQ ID NO: 22836 - RNA, 32 nt, Human
aacuguagggcaggcuaggacauaucaucuuu

SEQ ID NO: 22837 - RNA, 32 nt, Human
aacuguagucaucuuaaaggcuucucauccac

SEQ ID NO: 22838 - RNA, 32 nt, Human
aacuguaucucuuccggcugaggacagagaag

SEQ ID NO: 22839 - RNA, 32 nt, Human
aacuguaucugccacucauuuccccaguuggu

SEQ ID NO: 22840 - RNA, 32 nt, Human
aacuguaucuuucuguuugucagaaguucucc

SEQ ID NO: 22841 - RNA, 32 nt, Human
aacuguaugcugagggagguggugacggauac

SEQ ID NO: 22842 - RNA, 32 nt, Human
aacuguauuaccugcuuugcaagguggcuuua

SEQ ID NO: 22843 - RNA, 32 nt, Human
aacugucacugagacacagaagccacagagac

SEQ ID NO: 22844 - RNA, 32 nt, Human
aacugucacugcaccaagcucugcuggaggag

SEQ ID NO: 22845 - RNA, 32 nt, Human
aacugucagcauuuuucugccugccugccucc

SEQ ID NO: 22846 - RNA, 32 nt, Human
aacugucaggcugaaaacaauggaguauucuc

SEQ ID NO: 22847 - RNA, 32 nt, Human
aacugucaguggugguuucccaugaccacgcc

SEQ ID NO: 22848 - RNA, 32 nt, Human
aacugucaucagagcagaaaucaagcccaguc

SEQ ID NO: 22849 - RNA, 32 nt, Human
aacugucauggcagguacagggaccaauggcu

SEQ ID NO: 22850 - RNA, 32 nt, Human
aacugucauuaaggagcacagacuuacugaag

SEQ ID NO: 22851 - RNA, 32 nt, Human
aacuguccaaucaaaagacagauuggcaaaau

SEQ ID NO: 22852 - RNA, 32 nt, Human
aacuguccaucuuuucggugcucccuaaucca

SEQ ID NO: 22853 - RNA, 32 nt, Human
aacugucccgggcuggagagccggcaacugcc

SEQ ID NO: 22854 - RNA, 32 nt, Human
aacuguccucuccuuauuaucucccauuuccc

SEQ ID NO: 22855 - RNA, 32 nt, Human
aacuguccuggucacagagcaggcuucucucg

SEQ ID NO: 22856 - RNA, 32 nt, Human
aacuguccuguaccaaagcuugagugucaggu

SEQ ID NO: 22857 - RNA, 28 nt, Human
aacugucgacgugcugccacgucuguug

SEQ ID NO: 22858 - RNA, 32 nt, Human
aacugucgagagcaucuugucuuccacacagu

SEQ ID NO: 22859 - RNA, 32 nt, Human
aacugucuauauuagacacccccagccaguuu

SEQ ID NO: 22860 - RNA, 32 nt, Human
aacugucuauucugccucgcaccuacaaagag

SEQ ID NO: 22861 - RNA, 32 nt, Human
aacugucuccuaccucugcucuuggaggagau

SEQ ID NO: 22862 - RNA, 24 nt, Human
aacugugaaaaaugaccugccugu

SEQ ID NO: 22863 - RNA, 32 nt, Human
aacugugaaagagagguuccagggguaucucc

SEQ ID NO: 22864 - RNA, 21 nt, Human
aacugugaauuuuauuucugu

SEQ ID NO: 22865 - RNA, 24 nt, Human
aacugugacacaacacauuucugu

SEQ ID NO: 22866 - RNA, 23 nt, Human
aacugugagaaaauaaauguuug

SEQ ID NO: 22867 - RNA, 23 nt, Human
aacugugagaaaauaaauuucug

SEQ ID NO: 22868 - RNA, 24 nt, Human
aacugugagaaaauaaauuucugu

SEQ ID NO: 22869 - RNA, 21 nt, Human
aacugugagaaagaaaucucu

SEQ ID NO: 22870 - RNA, 23 nt, Human
aacugugagaaauaaaugucugu

SEQ ID NO: 22871 - RNA, 23 nt, Human
aacugugagaaauaaauuucugu

SEQ ID NO: 22872 - RNA, 23 nt, Human
aacugugagacaauaaacucuca

SEQ ID NO: 22873 - RNA, 23 nt, Human
aacugugagagauaaauuucugu

SEQ ID NO: 22874 - RNA, 32 nt, Human
aacugugagaggaggagaggccaggaagggag

SEQ ID NO: 22875 - RNA, 24 nt, Human
aacugugagauguuacauuucugu

SEQ ID NO: 22876 - RNA, 23 nt, Human
aacugugagccaaauaaacuucu

SEQ ID NO: 22877 - RNA, 32 nt, Human
aacugugagccaauuaaacugcuuuauaaauu

SEQ ID NO: 22878 - RNA, 22 nt, Human
aacugugaggcaauaaauuucu

SEQ ID NO: 22879 - RNA, 24 nt, Human
aacugugaggcaauacauuucugu

SEQ ID NO: 22880 - RNA, 32 nt, Human
aacugugcaaggccugguguuucuugauacau

SEQ ID NO: 22881 - RNA, 32 nt, Human
aacugugcagaacaugccgggagugaucaguc

SEQ ID NO: 22882 - RNA, 32 nt, Human
aacugugcauuguacccugaaaccagcuuuau

SEQ ID NO: 22883 - RNA, 32 nt, Human
aacugugccauuugaacagucacuuccaagcu

SEQ ID NO: 22884 - RNA, 20 nt, Human
aacugugcccaggcccaaag

SEQ ID NO: 22885 - RNA, 32 nt, Human
aacugugcccaucuuaguuuucaugaguuuuc

SEQ ID NO: 22886 - RNA, 32 nt, Human
aacugugccucccucugucuguuuucacuuga

SEQ ID NO: 22887 - RNA, 32 nt, Human
aacugugccuggaagguugaaggguuuguucc

SEQ ID NO: 22888 - RNA, 32 nt, Human
aacuguggaaaaaguaggagaggcagauuccc

SEQ ID NO: 22889 - RNA, 32 nt, Human
aacuguggacacacaaggugaagaggacuccg

SEQ ID NO: 22890 - RNA, 32 nt, Human
aacuguggauucuuuuucucucguggucucac

SEQ ID NO: 22891 - RNA, 21 nt, Human
aacuguggccaaaggaggcag

SEQ ID NO: 22892 - RNA, 32 nt, Human
aacuguggcuacugugcauuccuugaauaauc

SEQ ID NO: 22893 - RNA, 32 nt, Human
aacuguggcucagccacaucccaaagggggca

SEQ ID NO: 22894 - RNA, 32 nt, Human
aacuguggcugagacgugggcucuccagggag

SEQ ID NO: 22895 - RNA, 32 nt, Human
aacuguggcuguguugacaauccaggcuggau

SEQ ID NO: 22896 - RNA, 23 nt, Human
aacugugggcaauaaaugucugu

SEQ ID NO: 22897 - RNA, 32 nt, Human
aacugugggucugacccaggagaacggaaagc

SEQ ID NO: 22898 - RNA, 32 nt, Human
aacugugguccaucuccagacucuaccacuua

SEQ ID NO: 22899 - RNA, 32 nt, Human
aacuguguaacugucuucaucuuuacagagga

SEQ ID NO: 22900 - RNA, 32 nt, Human
aacuguguaguaccuuagacuuggcauuuauu

SEQ ID NO: 22901 - RNA, 32 nt, Human
aacugugucaacaacaggaaacuauuuguauu

SEQ ID NO: 22902 - RNA, 32 nt, Human
aacugugucauccuggagccauauccaugagu

SEQ ID NO: 22903 - RNA, 32 nt, Human
aacuguguccaguuucucugugguguuuauga

SEQ ID NO: 22904 - RNA, 32 nt, Human
aacugugucccaguagagggucccggcugcac

SEQ ID NO: 22905 - RNA, 32 nt, Human
aacugugucuuugugguguccucuggcuuaag

SEQ ID NO: 22906 - RNA, 31 nt, Human
aacugugugagucucccuugaggagcacuca

SEQ ID NO: 22907 - RNA, 23 nt, Human
aacuguguggcaagagagccuca

SEQ ID NO: 22908 - RNA, 21 nt, Human
aacugugugucacccacagag

SEQ ID NO: 22909 - RNA, 32 nt, Human
aacugugugugauccaguaggccucaggccca

SEQ ID NO: 22910 - RNA, 32 nt, Human
aacuguguucuuccucuucugaagacaucagu

SEQ ID NO: 22911 - RNA, 32 nt, Human
aacuguguugcaaaaucacuccccuaccguca

SEQ ID NO: 22912 - RNA, 32 nt, Human
aacuguuacaaaaccaguugguggugacaaga

SEQ ID NO: 22913 - RNA, 32 nt, Human
aacuguuaccugccugucaucaugaaagccug

SEQ ID NO: 22914 - RNA, 25 nt, Human
aacuguuauccauugaguccagaca

SEQ ID NO: 22915 - RNA, 19 nt, Human
aacuguucacaacagcaaa

SEQ ID NO: 22916 - RNA, 32 nt, Human
aacuguuccccagcuacugaggggcacuguca

SEQ ID NO: 22917 - RNA, 20 nt, Human
aacuguucggcuacuggaca

SEQ ID NO: 22918 - RNA, 32 nt, Human
aacuguugaacacaugacugugaugcacaaau

SEQ ID NO: 22919 - RNA, 32 nt, Human
aacuguugagcaugacaucaggaagccuguac

SEQ ID NO: 22920 - RNA, 32 nt, Human
aacuguugcaguaugauucagaucauuuaaaa

SEQ ID NO: 22921 - RNA, 32 nt, Human
aacuguuguaaauacugagaaacauuuugaau

SEQ ID NO: 22922 - RNA, 32 nt, Human
aacuguugugugugugcaugccuugggcacaa

SEQ ID NO: 22923 - RNA, 32 nt, Human
aacuguuuaaccggaucccauuguacccagag

SEQ ID NO: 22924 - RNA, 32 nt, Human
aacuguuuagaccuuuugaagaacaaagacaa

SEQ ID NO: 22925 - RNA, 32 nt, Human
aacuguuuauagucuuuucacacugcagcuuu

SEQ ID NO: 22926 - RNA, 22 nt, Human
aacuguuuccugcauucauuca

SEQ ID NO: 22927 - RNA, 32 nt, Human
aacuguuugcagcacaauauaacuuuacauuc

SEQ ID NO: 22928 - RNA, 32 nt, Human
aacuguuuucauuuucacggcugucucacugg

SEQ ID NO: 22929 - RNA, 32 nt, Human
aacuguuuuccaggaacaaagggcucaaguaa

SEQ ID NO: 22930 - RNA, 32 nt, Human
aacuguuuuccccaaagcuaaacaaguuaaaa

SEQ ID NO: 22931 - RNA, 32 nt, Human
aacuguuuucuuucccuuaauuuccuuuccua

SEQ ID NO: 22932 - RNA, 32 nt, Human
aacuuaaaaauauaugaauacaugcgcaauac

SEQ ID NO: 22933 - RNA, 32 nt, Human
aacuuaaaaugcaaagaggauauuuuucucuu

SEQ ID NO: 22934 - RNA, 32 nt, Human
aacuuaaacauauucuguucacuugaguguaa

SEQ ID NO: 22935 - RNA, 32 nt, Human
aacuuaaacguuaauuuuugugcaaaaacaaa

SEQ ID NO: 22936 - RNA, 32 nt, Human
aacuuaaagaucuuugucugugaagaagaaaa

SEQ ID NO: 22937 - RNA, 32 nt, Human
aacuuaaaugaacacagcucuuuaacaugguu

SEQ ID NO: 22938 - RNA, 32 nt, Human
aacuuaaauugcuuauuuuguuguguaauguc

SEQ ID NO: 22939 - RNA, 32 nt, Human
aacuuaaccacuguuaagugaucugugaucaa

SEQ ID NO: 22940 - RNA, 32 nt, Human
aacuuaaccagcuccaucuuguuucuaaccuc

SEQ ID NO: 22941 - RNA, 32 nt, Human
aacuuaacuuucuguaaaggcacuuugugguu

SEQ ID NO: 22942 - RNA, 32 nt, Human
aacuuaagaggaaauaaggaaaaggagagaaa

SEQ ID NO: 22943 - RNA, 32 nt, Human
aacuuaagcccaagaagagagcucagaagugu

SEQ ID NO: 22944 - RNA, 32 nt, Human
aacuuaagggacaccagaaaauuuguacugaa

SEQ ID NO: 22945 - RNA, 32 nt, Human
aacuuaaggugaggagaaagagcgcuagcuuc

SEQ ID NO: 22946 - RNA, 32 nt, Human
aacuuaaguggagaguuuucucagggauaaga

SEQ ID NO: 22947 - RNA, 32 nt, Human
aacuuaaguggaguuuaccggcagcaucaaau

SEQ ID NO: 22948 - RNA, 32 nt, Human
aacuuaauauccaucugucagucaucaacuuu

SEQ ID NO: 22949 - RNA, 32 nt, Human
aacuuaaugggggacggaagggggaggagugc

SEQ ID NO: 22950 - RNA, 32 nt, Human
aacuuaauugaauguuaccucuuggagggagu

SEQ ID NO: 22951 - RNA, 32 nt, Human
aacuuacacauacuagcagcauuaucauggga

SEQ ID NO: 22952 - RNA, 32 nt, Human
aacuuacauaugcacauuuuguuacaucauuu

SEQ ID NO: 22953 - RNA, 32 nt, Human
aacuuacggggugggggcgggggugaggguag

SEQ ID NO: 22954 - RNA, 32 nt, Human
aacuuacuaggcagcagagaauucauacugga

SEQ ID NO: 22955 - RNA, 32 nt, Human
aacuuacucauguaacaaaccugugcauguac

SEQ ID NO: 22956 - RNA, 32 nt, Human
aacuuacugagccugugacuuguauuuagcug

SEQ ID NO: 22957 - RNA, 32 nt, Human
aacuuacugccauuuuucauaaucugaguggc

SEQ ID NO: 22958 - RNA, 32 nt, Human
aacuuacuuugguaucaaaaucacacaacucc

SEQ ID NO: 22959 - RNA, 32 nt, Human
aacuuacuuuucucccuggcuuuugguucacu

SEQ ID NO: 22960 - RNA, 32 nt, Human
aacuuagaugugaaaaucuacacacugggaga

SEQ ID NO: 22961 - RNA, 32 nt, Human
aacuuagcaacgaucuagcugugcaaaggcau

SEQ ID NO: 22962 - RNA, 18 nt, Human
aacuuagcauguguugaa

SEQ ID NO: 22963 - RNA, 32 nt, Human
aacuuagccaacuugaccccucucaucccacu

SEQ ID NO: 22964 - RNA, 32 nt, Human
aacuuagccagccacuacuguuucauuguguu

SEQ ID NO: 22965 - RNA, 32 nt, Human
aacuuagccuuaggaagcaugguaagacucug

SEQ ID NO: 22966 - RNA, 32 nt, Human
aacuuagcucaccgcaaccuccaccucccggg

SEQ ID NO: 22967 - RNA, 32 nt, Human
aacuuagcuucucagggguaaagacagacaga

SEQ ID NO: 22968 - RNA, 32 nt, Human
aacuuaggagagaagcacggaggagcccccgg

SEQ ID NO: 22969 - RNA, 32 nt, Human
aacuuaggcuuuuggcucagaagauuauugaa

SEQ ID NO: 22970 - RNA, 24 nt, Human
aacuuaggugauucuccugccuca

SEQ ID NO: 22971 - RNA, 31 nt, Human
aacuuagucaauaaaaccuugaaauaaagau

SEQ ID NO: 22972 - RNA, 32 nt, Human
aacuuaguccuaaucccagcacuuugggaggc

SEQ ID NO: 22973 - RNA, 32 nt, Human
aacuuaguucuuuggaaauacacaaguaaaac

SEQ ID NO: 22974 - RNA, 32 nt, Human
aacuuaguuuucugaauggggguggggaguug

SEQ ID NO: 22975 - RNA, 32 nt, Human
aacuuauaaugaaugggcauuguguuaagaaa

SEQ ID NO: 22976 - RNA, 32 nt, Human
aacuuaucauauggcccagccauuucacuacu

SEQ ID NO: 22977 - RNA, 32 nt, Human
aacuuaucaucacacaacucagccuggcugau

SEQ ID NO: 22978 - RNA, 32 nt, Human
aacuuauccaugguuugugucauuaggagucc

SEQ ID NO: 22979 - RNA, 32 nt, Human
aacuuaucucacuccugugaacuuucaggcug

SEQ ID NO: 22980 - RNA, 32 nt, Human
aacuuaugccuggagcuguauccugccccgca

SEQ ID NO: 22981 - RNA, 32 nt, Human
aacuuauggaaagcccauuuguguacacaguc

SEQ ID NO: 22982 - RNA, 32 nt, Human
aacuuauucuacauucugaaagcacaauuuuc

SEQ ID NO: 22983 - RNA, 32 nt, Human
aacuucaaggggaauuucagcuccguuugcgu

SEQ ID NO: 22984 - RNA, 32 nt, Human
aacuucaaguagcggcaacaaggguccgugga

SEQ ID NO: 22985 - RNA, 31 nt, Human
aacuucaaguuucagcaacuaccuacaaaag

SEQ ID NO: 22986 - RNA, 32 nt, Human
aacuucacagcaggccagcugcagugacuugu

SEQ ID NO: 22987 - RNA, 32 nt, Human
aacuucacagcccgcgugcagcgcggcucucg

SEQ ID NO: 22988 - RNA, 32 nt, Human
aacuucacauccguccuccugucucagggcug

SEQ ID NO: 22989 - RNA, 32 nt, Human
aacuucacgagcguuggcugggccucggcuuc

SEQ ID NO: 22990 - RNA, 32 nt, Human
aacuucacugcaauucuguuucccucauuuga

SEQ ID NO: 22991 - RNA, 32 nt, Human
aacuucagacccuggguagggaagagaagggg

SEQ ID NO: 22992 - RNA, 32 nt, Human
aacuucagacuuccuguccugcugguaucaug

SEQ ID NO: 22993 - RNA, 31 nt, Human
aacuucagagaagucaguuggagaaaaauga

SEQ ID NO: 22994 - RNA, 31 nt, Human
aacuucagagaagucaguuggagaaaaugaa

SEQ ID NO: 22995 - RNA, 32 nt, Human
aacuucagagccugucaccaggaaagguaagc

SEQ ID NO: 22996 - RNA, 32 nt, Human
aacuucagcaacugggaaucacagaauaccua

SEQ ID NO: 22997 - RNA, 32 nt, Human
aacuucagcuccugccuccugcccaugcagcc

SEQ ID NO: 22998 - RNA, 32 nt, Human
aacuucagucaguuggagggauggauuugaga

SEQ ID NO: 22999 - RNA, 32 nt, Human
aacuucaguccgggcuggaggccgugcacaac

SEQ ID NO: 23000 - RNA, 32 nt, Human
aacuucaguuuauaauuggaagagaaauuuuu

SEQ ID NO: 23001 - RNA, 32 nt, Human
aacuucaugcugauuucucugccucuugauuu

SEQ ID NO: 23002 - RNA, 22 nt, Human
aacuucaugggacucuucaaag

SEQ ID NO: 23003 - RNA, 32 nt, Human
aacuucauggucuccaaggucuccgcuccccu

SEQ ID NO: 23004 - RNA, 18 nt, Human
aacuucauguucccugca

SEQ ID NO: 23005 - RNA, 32 nt, Human
aacuucauguuugggcagaagcugaaugucug

SEQ ID NO: 23006 - RNA, 32 nt, Human
aacuucauuagcuucugugaugacucaagauu

SEQ ID NO: 23007 - RNA, 32 nt, Human
aacuuccaagccuccggcaucuuuuccuggug

SEQ ID NO: 23008 - RNA, 21 nt, Human
aacuuccagagaccuaucuca

SEQ ID NO: 23009 - RNA, 32 nt, Human
aacuuccauauggucaguaguagauguucucu

SEQ ID NO: 23010 - RNA, 32 nt, Human
aacuuccaugagccaccaugcccggccccuua

SEQ ID NO: 23011 - RNA, 32 nt, Human
aacuuccaugaucauccaaagucugaaacaaa

SEQ ID NO: 23012 - RNA, 32 nt, Human
aacuucccacaguggcugagacugaaugaaag

SEQ ID NO: 23013 - RNA, 32 nt, Human
aacuucccagccuccagaacugugagaaagaa

SEQ ID NO: 23014 - RNA, 32 nt, Human
aacuucccaggcacccuccuuucugccccaga

SEQ ID NO: 23015 - RNA, 32 nt, Human
aacuucccaguucugacauucacagcaugacc

SEQ ID NO: 23016 - RNA, 32 nt, Human
aacuuccccucccacucugggcucaggcuguc

SEQ ID NO: 23017 - RNA, 32 nt, Human
aacuuccccucuaacuggacagccucuucugu

SEQ ID NO: 23018 - RNA, 32 nt, Human
aacuuccccuuuccucugguuuccuuguccua

SEQ ID NO: 23019 - RNA, 32 nt, Human
aacuucccgggaagcagcggcacuuuucuccc

SEQ ID NO: 23020 - RNA, 32 nt, Human
aacuucccucauuccaucaucaccaucucuuu

SEQ ID NO: 23021 - RNA, 32 nt, Human
aacuucccucuuaguacugcuuuugcuguauu

SEQ ID NO: 23022 - RNA, 32 nt, Human
aacuucccugugcaaggcaaguuuacaucaca

SEQ ID NO: 23023 - RNA, 32 nt, Human
aacuuccguugccucccagcccucuguaucca

SEQ ID NO: 23024 - RNA, 32 nt, Human
aacuuccuacccacacccucuucccaaggccc

SEQ ID NO: 23025 - RNA, 32 nt, Human
aacuuccuccaggucauuucccagugugagca

SEQ ID NO: 23026 - RNA, 32 nt, Human
aacuuccucccaccccagacauuuuuccuggu

SEQ ID NO: 23027 - RNA, 32 nt, Human
aacuuccucuuccucauuuucuugagauggau

SEQ ID NO: 23028 - RNA, 32 nt, Human
aacuuccugaguagcugggauuacaggcgccc

SEQ ID NO: 23029 - RNA, 32 nt, Human
aacuuccugcacacacuggcagagaggggcgc

SEQ ID NO: 23030 - RNA, 32 nt, Human
aacuuccugcauagccaacuucccagggucau

SEQ ID NO: 23031 - RNA, 32 nt, Human
aacuuccugcucucacacacaccagaggggaa

SEQ ID NO: 23032 - RNA, 32 nt, Human
aacuuccuguucugugggucuggggucaccag

SEQ ID NO: 23033 - RNA, 22 nt, Human
aacuuccuuacucuuucucuca

SEQ ID NO: 23034 - RNA, 32 nt, Human
aacuuccuuauucaagauaaaauaagacauac

SEQ ID NO: 23035 - RNA, 32 nt, Human
aacuuccuucagguuuggcaagugaucaaagc

SEQ ID NO: 23036 - RNA, 32 nt, Human
aacuuccuuucaaccaagugacggccuccugg

SEQ ID NO: 23037 - RNA, 32 nt, Human
aacuuccuuuugcuaaaugcauucuuucugcu

SEQ ID NO: 23038 - RNA, 32 nt, Human
aacuucgaguucuuuugaaauucagagucugu

SEQ ID NO: 23039 - RNA, 32 nt, Human
aacuucgccccuuuaggaaauucaaagcaggg

SEQ ID NO: 23040 - RNA, 32 nt, Human
aacuucgcugcaggaagcagguuuguuucuuu

SEQ ID NO: 23041 - RNA, 32 nt, Human
aacuucgggcaucuacccugcaauucccgcuu

SEQ ID NO: 23042 - RNA, 32 nt, Human
aacuucggggucgucugccagagcagggucug

SEQ ID NO: 23043 - RNA, 32 nt, Human
aacuucguguggccugcaggacaggccugggc

SEQ ID NO: 23044 - RNA, 32 nt, Human
aacuucuaaggggaaagaacagcuggaguuuc

SEQ ID NO: 23045 - RNA, 32 nt, Human
aacuucuaauggugaugacagccucuucuuca

SEQ ID NO: 23046 - RNA, 32 nt, Human
aacuucuacaaaccaagcucagggccccaacc

SEQ ID NO: 23047 - RNA, 32 nt, Human
aacuucuacaauaugguuuacaauaauuccuu

SEQ ID NO: 23048 - RNA, 32 nt, Human
aacuucuacagaagcagguugcagugagccga

SEQ ID NO: 23049 - RNA, 32 nt, Human
aacuucuagcgucagugcuggagggagaagcu

SEQ ID NO: 23050 - RNA, 31 nt, Human
aacuucucaguuuuggagguugggaggucca

SEQ ID NO: 23051 - RNA, 23 nt, Human
aacuucuccuucccuuccccuca

SEQ ID NO: 23052 - RNA, 32 nt, Human
aacuucucgccugggcaggaggcggucguggg

SEQ ID NO: 23053 - RNA, 32 nt, Human
aacuucucuauugacacuuuuaccucaccgag

SEQ ID NO: 23054 - RNA, 32 nt, Human
aacuucucucucccugcucuugcccagggagc

SEQ ID NO: 23055 - RNA, 22 nt, Human
aacuucucugaagccuuucucc

SEQ ID NO: 23056 - RNA, 32 nt, Human
aacuucucugcaagcaccugugcacagcaaug

SEQ ID NO: 23057 - RNA, 32 nt, Human
aacuucucuggacuggaccagaaguuucuagc

SEQ ID NO: 23058 - RNA, 32 nt, Human
aacuucucuuucuccuccuuucccucuuauuc

SEQ ID NO: 23059 - RNA, 32 nt, Human
aacuucucuuuggcuuuucuucaucuguaaaa

SEQ ID NO: 23060 - RNA, 32 nt, Human
aacuucugaacugccuucgucuucaguuauau

SEQ ID NO: 23061 - RNA, 28 nt, Human
aacuucugaagugcugucuuuuuacauu

SEQ ID NO: 23062 - RNA, 32 nt, Human
aacuucugacccacagaaccauaagaugguaa

SEQ ID NO: 23063 - RNA, 32 nt, Human
aacuucugaccucaaaugauugccugccucag

SEQ ID NO: 23064 - RNA, 23 nt, Human
aacuucugaccucaggugaucca

SEQ ID NO: 23065 - RNA, 32 nt, Human
aacuucugaccuugugaucugccugccuuggc

SEQ ID NO: 23066 - RNA, 32 nt, Human
aacuucugaguguggauuugcacauucuaaac

SEQ ID NO: 23067 - RNA, 32 nt, Human
aacuucugcucagaccgagcgugugccacugg

SEQ ID NO: 23068 - RNA, 19 nt, Human
aacuucugcuuguguugga

SEQ ID NO: 23069 - RNA, 22 nt, Human
aacuucuggccucaagugaucc

SEQ ID NO: 23070 - RNA, 23 nt, Human
aacuucuggccucaagugaucca

SEQ ID NO: 23071 - RNA, 18 nt, Human
aacuucugggcccaggag

SEQ ID NO: 23072 - RNA, 32 nt, Human
aacuucugggcucaagugcuucucccaccuca

SEQ ID NO: 23073 - RNA, 32 nt, Human
aacuucugggcugugguuguaaacugugagca

SEQ ID NO: 23074 - RNA, 32 nt, Human
aacuucugugcuguuccugugaaucuccaaau

SEQ ID NO: 23075 - RNA, 32 nt, Human
aacuucuguggaaguuccaguguucucucuua

SEQ ID NO: 23076 - RNA, 21 nt, Human
aacuucuugauuccucagaua

SEQ ID NO: 23077 - RNA, 32 nt, Human
aacuucuuggugcugaagagaggaucaugcaa

SEQ ID NO: 23078 - RNA, 32 nt, Human
aacuucuuucugucaaauuagauuuaaugaga

SEQ ID NO: 23079 - RNA, 32 nt, Human
aacuugaacccgcuuccaccuccgucucccuc

SEQ ID NO: 23080 - RNA, 23 nt, Human
aacuugaagcaagcuuucucuca

SEQ ID NO: 23081 - RNA, 32 nt, Human
aacuugaaguuugaaacccccagcuugcugag

SEQ ID NO: 23082 - RNA, 32 nt, Human
aacuugaaugaacacugcucaaacuuucugcu

SEQ ID NO: 23083 - RNA, 32 nt, Human
aacuugaaugauucuuuccuuuauacuggcaa

SEQ ID NO: 23084 - RNA, 32 nt, Human
aacuugacaauauuuuugcucucuucaaaagu

SEQ ID NO: 23085 - RNA, 32 nt, Human
aacuugaccacugccacaccagcccugggguc

SEQ ID NO: 23086 - RNA, 32 nt, Human
aacuugaccauccuggaacacccuggaagaaa

SEQ ID NO: 23087 - RNA, 32 nt, Human
aacuugaccugggauaacuacuuuaaagaaau

SEQ ID NO: 23088 - RNA, 32 nt, Human
aacuugacuacaggccuccaucuuguuucagg

SEQ ID NO: 23089 - RNA, 32 nt, Human
aacuugagagaaggggaucagcugcucaguac

SEQ ID NO: 23090 - RNA, 32 nt, Human
aacuugagcaacaggcaccuuuacagagggca

SEQ ID NO: 23091 - RNA, 32 nt, Human
aacuugagcaggagagaaaacucccucaaagu

SEQ ID NO: 23092 - RNA, 32 nt, Human
aacuugagcugugacggguucugcaaggggug

SEQ ID NO: 23093 - RNA, 32 nt, Human
aacuugaggaagcccugguucuauuucaccug

SEQ ID NO: 23094 - RNA, 32 nt, Human
aacuugaggaagucuuuugucuuccagcugcu

SEQ ID NO: 23095 - RNA, 32 nt, Human
aacuugaguagcauuggagaaaucucauuucu

SEQ ID NO: 23096 - RNA, 32 nt, Human
aacuugagucucugcuggcuccuuccaagguu

SEQ ID NO: 23097 - RNA, 32 nt, Human
aacuugauacauccaaugcagaaaagucuuga

SEQ ID NO: 23098 - RNA, 32 nt, Human
aacuugauuuaccaagacaagcugugggcugu

SEQ ID NO: 23099 - RNA, 23 nt, Human
aacuugcaagguggagguuacag

SEQ ID NO: 23100 - RNA, 32 nt, Human
aacuugcaagguggagguuacagugagcugaa

SEQ ID NO: 23101 - RNA, 32 nt, Human
aacuugcagaauugggugugugggagagcaaa

SEQ ID NO: 23102 - RNA, 32 nt, Human
aacuugcagaggaccguagcucuccuggccug

SEQ ID NO: 23103 - RNA, 32 nt, Human
aacuugcagcugcccaccucacccucagcucu

SEQ ID NO: 23104 - RNA, 32 nt, Human
aacuugcccuauuugcaaaagcacuuuuguag

SEQ ID NO: 23105 - RNA, 32 nt, Human
aacuugcccugacagccucuggcucccgcucu

SEQ ID NO: 23106 - RNA, 32 nt, Human
aacuugccuuaaacacucaccuucuagucuug

SEQ ID NO: 23107 - RNA, 32 nt, Human
aacuugcggugagccgagaucgcaccacugca

SEQ ID NO: 23108 - RNA, 32 nt, Human
aacuugcugagagcuuacuaugcgucaggugc

SEQ ID NO: 23109 - RNA, 23 nt, Human
aacuugcuggcacccccgcuccc

SEQ ID NO: 23110 - RNA, 22 nt, Human
aacuugcugggcucaaauccca

SEQ ID NO: 23111 - RNA, 32 nt, Human
aacuugcuguuuccucaucuuugccuuuuggg

SEQ ID NO: 23112 - RNA, 32 nt, Human
aacuugcuucauguaacguguugcauaugagu

SEQ ID NO: 23113 - RNA, 32 nt, Human
aacuugcuuuccccacccuguuucugggggca

SEQ ID NO: 23114 - RNA, 32 nt, Human
aacuugcuuuuuagcugaucuuccauccucaa

SEQ ID NO: 23115 - RNA, 32 nt, Human
aacuuggagagcagggaagugggcacccuuga

SEQ ID NO: 23116 - RNA, 32 nt, Human
aacuuggagagggggccggacccccgucagcu

SEQ ID NO: 23117 - RNA, 32 nt, Human
aacuuggagccaaguccccacagcuggaucag

SEQ ID NO: 23118 - RNA, 32 nt, Human
aacuuggagccccagugccaagcacagugccu

SEQ ID NO: 23119 - RNA, 32 nt, Human
aacuuggcaaaugacaugcagguucuucaagg

SEQ ID NO: 23120 - RNA, 32 nt, Human
aacuuggcacuccugugcccucugccuggaca

SEQ ID NO: 23121 - RNA, 31 nt, Human
aacuuggcacuuuuucguguggaucuugcca

SEQ ID NO: 23122 - RNA, 32 nt, Human
aacuuggcagcagggcuucaguucuccagaag

SEQ ID NO: 23123 - RNA, 32 nt, Human
aacuuggccugagaacauuuucugggaagagg

SEQ ID NO: 23124 - RNA, 32 nt, Human
aacuuggcucacugcaaccucugcccccuggg

SEQ ID NO: 23125 - RNA, 32 nt, Human
aacuugggaaacacugucaucagcuugagggu

SEQ ID NO: 23126 - RNA, 32 nt, Human
aacuugggaaugaagagguagcaggagggugg

SEQ ID NO: 23127 - RNA, 32 nt, Human
aacuugggacagacuauugauggccaagccca

SEQ ID NO: 23128 - RNA, 32 nt, Human
aacuugggagccucuugagaguguacagcauc

SEQ ID NO: 23129 - RNA, 32 nt, Human
aacuugggaggcagagguuguggugagccgag

SEQ ID NO: 23130 - RNA, 32 nt, Human
aacuugggaggcagagguuucagugagccgag

SEQ ID NO: 23131 - RNA, 32 nt, Human
aacuugggaggcggagcuugcggugagccaag

SEQ ID NO: 23132 - RNA, 26 nt, Human
aacuugggaggcggagguugcaguga

SEQ ID NO: 23133 - RNA, 32 nt, Human
aacuugggaggcggagguugcagugagcuaag

SEQ ID NO: 23134 - RNA, 32 nt, Human
aacuugggagggagagguugcagugagcccag

SEQ ID NO: 23135 - RNA, 32 nt, Human
aacuugggagggguagguugcagugagcugag

SEQ ID NO: 23136 - RNA, 32 nt, Human
aacuugggagguagagguuacagggagccaag

SEQ ID NO: 23137 - RNA, 32 nt, Human
aacuugggagguggagcuuacagugagccgag

SEQ ID NO: 23138 - RNA, 26 nt, Human
aacuugggagguggagguugcaguga

SEQ ID NO: 23139 - RNA, 32 nt, Human
aacuugggagguggagguugcagugagccagg

SEQ ID NO: 23140 - RNA, 26 nt, Human
aacuugggagguggagguugcagugg

SEQ ID NO: 23141 - RNA, 32 nt, Human
aacuugggagguggagguugcagugggccgag

SEQ ID NO: 23142 - RNA, 32 nt, Human
aacuugggcaaaacaauuaagcacacaacuuc

SEQ ID NO: 23143 - RNA, 32 nt, Human
aacuugggccauccuaucaucuggagcccuag

SEQ ID NO: 23144 - RNA, 32 nt, Human
aacuugggcuguaaagcaaacuggggcugugu

SEQ ID NO: 23145 - RNA, 32 nt, Human
aacuuggggguuucacugcucucccccaugau

SEQ ID NO: 23146 - RNA, 32 nt, Human
aacuugguacuuguuuuucuucauuuggaggc

SEQ ID NO: 23147 - RNA, 32 nt, Human
aacuuggugaagaacaagauagagacucaucu

SEQ ID NO: 23148 - RNA, 32 nt, Human
aacuuggugcagcacugggguauuguuggcuu

SEQ ID NO: 23149 - RNA, 32 nt, Human
aacuugguggggucagggaggaaaggcagaag

SEQ ID NO: 23150 - RNA, 32 nt, Human
aacuugguuacuucuuucucucuuccuccauc

SEQ ID NO: 23151 - RNA, 32 nt, Human
aacuugguuccucccuuucuuaagcccuuauu

SEQ ID NO: 23152 - RNA, 32 nt, Human
aacuugguucgcagccugccuugccccuggag

SEQ ID NO: 23153 - RNA, 32 nt, Human
aacuuguaucaucaaccugaacacugagcuua

SEQ ID NO: 23154 - RNA, 32 nt, Human
aacuuguccaagaucacaaagcuggugaacau

SEQ ID NO: 23155 - RNA, 32 nt, Human
aacuuguccuuuuucucccuccagagcagcag

SEQ ID NO: 23156 - RNA, 32 nt, Human
aacuugucucauuccaccucuucucagagcaa

SEQ ID NO: 23157 - RNA, 32 nt, Human
aacuugucucucccucuccuuguuagucuguu

SEQ ID NO: 23158 - RNA, 32 nt, Human
aacuugucugagacugacuuuaucaauaaucu

SEQ ID NO: 23159 - RNA, 32 nt, Human
aacuugucuuaaaucaacaaccuucuacucau

SEQ ID NO: 23160 - RNA, 32 nt, Human
aacuugugcagaggacucuccaggugaaggcu

SEQ ID NO: 23161 - RNA, 32 nt, Human
aacuugugccugggagugugugguguuagggu

SEQ ID NO: 23162 - RNA, 32 nt, Human
aacuugugccuguaauuccagcugcucuggaa

SEQ ID NO: 23163 - RNA, 32 nt, Human
aacuuguggcugcuuuugcugcugcugcuccu

SEQ ID NO: 23164 - RNA, 32 nt, Human
aacuugugggaguggggagagaggaggaaagc

SEQ ID NO: 23165 - RNA, 32 nt, Human
aacuugugggguggagguugcagugagcugag

SEQ ID NO: 23166 - RNA, 32 nt, Human
aacuugugugugcagaggaugggcuggaggac

SEQ ID NO: 23167 - RNA, 32 nt, Human
aacuuguguuagggcugugagcuguuccucga

SEQ ID NO: 23168 - RNA, 32 nt, Human
aacuuguucaaaacagggaaagacugaugaaa

SEQ ID NO: 23169 - RNA, 32 nt, Human
aacuuguucaaauuauuaccagugaaucuuug

SEQ ID NO: 23170 - RNA, 32 nt, Human
aacuuguucacuggggacuuugcuuaccguuc

SEQ ID NO: 23171 - RNA, 32 nt, Human
aacuuguucucccaguugucccccucuucucu

SEQ ID NO: 23172 - RNA, 32 nt, Human
aacuuguuggcauuagacaaaucaagcuggug

SEQ ID NO: 23173 - RNA, 32 nt, Human
aacuuguuucagauuugcucuguuacacuuuu

SEQ ID NO: 23174 - RNA, 32 nt, Human
aacuuguuugauuaagaauaaaggaggaggaa

SEQ ID NO: 23175 - RNA, 32 nt, Human
aacuuguuugcuuaaaguuaaugacuuaauga

SEQ ID NO: 23176 - RNA, 32 nt, Human
aacuuguuuucaguuucccuguuuaugacagu

SEQ ID NO: 23177 - RNA, 32 nt, Human
aacuuuaaauagauucucaguuugaaaucauc

SEQ ID NO: 23178 - RNA, 32 nt, Human
aacuuuaauauguauuuuauguauguuuacac

SEQ ID NO: 23179 - RNA, 32 nt, Human
aacuuuaaucuugggaguuauuguuuacuggg

SEQ ID NO: 23180 - RNA, 32 nt, Human
aacuuuacaaaccugaaugaugugacaauaau

SEQ ID NO: 23181 - RNA, 32 nt, Human
aacuuuacagguuuggcuccagcagcugcugu

SEQ ID NO: 23182 - RNA, 32 nt, Human
aacuuuaccauccacagucacugaaucacuua

SEQ ID NO: 23183 - RNA, 32 nt, Human
aacuuuaccguacaguaccucagucuagcugu

SEQ ID NO: 23184 - RNA, 32 nt, Human
aacuuuacgacaaaaugucucuggacaaagag

SEQ ID NO: 23185 - RNA, 32 nt, Human
aacuuuacuaguagcugagauuuaaugggcac

SEQ ID NO: 23186 - RNA, 32 nt, Human
aacuuuacucagcuuggcugugccucaguuua

SEQ ID NO: 23187 - RNA, 32 nt, Human
aacuuuacucgacacccaucucuuaucaaauu

SEQ ID NO: 23188 - RNA, 32 nt, Human
aacuuuagcugguuucuccacccacaguuccu

SEQ ID NO: 23189 - RNA, 32 nt, Human
aacuuuaggcccugccccagauuuacuaaauc

SEQ ID NO: 23190 - RNA, 32 nt, Human
aacuuuauaugcuaauuaucuucaagggucuu

SEQ ID NO: 23191 - RNA, 32 nt, Human
aacuuuaucaaucuuuuccuuuaagauuugca

SEQ ID NO: 23192 - RNA, 32 nt, Human
aacuuuaucacuucugauggcauuaggacaca

SEQ ID NO: 23193 - RNA, 31 nt, Human
aacuuuaucaguaugcuuuguugaaagcaga

SEQ ID NO: 23194 - RNA, 32 nt, Human
aacuuuaucuguguuccucaaaugccuuagac

SEQ ID NO: 23195 - RNA, 32 nt, Human
aacuuuauucacagaguccagcuuugggacua

SEQ ID NO: 23196 - RNA, 32 nt, Human
aacuuuauuuuuaguuguaacugcuugaggua

SEQ ID NO: 23197 - RNA, 32 nt, Human
aacuuucaaagaaaacccccaaacuuuuaagu

SEQ ID NO: 23198 - RNA, 32 nt, Human
aacuuucaaucuaaggcaucacagaagugaaa

SEQ ID NO: 23199 - RNA, 32 nt, Human
aacuuucacaugcaaccaauguauaucugagu

SEQ ID NO: 23200 - RNA, 32 nt, Human
aacuuucagagacagcagagcacacaagcuuc

SEQ ID NO: 23201 - RNA, 32 nt, Human
aacuuucagugaaugauaaaaugugacaucuu

SEQ ID NO: 23202 - RNA, 32 nt, Human
aacuuucaguguagccacagccauggacucca

SEQ ID NO: 23203 - RNA, 32 nt, Human
aacuuuccagcauccuccucuguucuaaccac

SEQ ID NO: 23204 - RNA, 32 nt, Human
aacuuuccagcucccccucaucaugccuccuc

SEQ ID NO: 23205 - RNA, 32 nt, Human
aacuuuccagguuuauacuauaccucaagacc

SEQ ID NO: 23206 - RNA, 32 nt, Human
aacuuuccaguuuacccugcucccucucucug

SEQ ID NO: 23207 - RNA, 32 nt, Human
aacuuuccaugcacacugacagcaaggggguu

SEQ ID NO: 23208 - RNA, 32 nt, Human
aacuuucccagccucguagcccagcacuucuc

SEQ ID NO: 23209 - RNA, 32 nt, Human
aacuuuccccauacaggaaaacuugaaaauua

SEQ ID NO: 23210 - RNA, 32 nt, Human
aacuuucccugacgcaccuugugggaucaaag

SEQ ID NO: 23211 - RNA, 32 nt, Human
aacuuuccuccuaguacugcuuuugcuguauc

SEQ ID NO: 23212 - RNA, 32 nt, Human
aacuuuccugccaccuucauccuugccucccu

SEQ ID NO: 23213 - RNA, 32 nt, Human
aacuuuccuuuaacucccuuuuuacacuuuau

SEQ ID NO: 23214 - RNA, 32 nt, Human
aacuuuccuuugcccaauuauauguacauguc

SEQ ID NO: 23215 - RNA, 32 nt, Human
aacuuucgucugccuguuuuguggacuggcug

SEQ ID NO: 23216 - RNA, 32 nt, Human
aacuuucuaggcaccuagcagagaaagauaag

SEQ ID NO: 23217 - RNA, 32 nt, Human
aacuuucuauauuagacacccccagccaguuu

SEQ ID NO: 23218 - RNA, 32 nt, Human
aacuuucuauccuccccuccugcccugugucc

SEQ ID NO: 23219 - RNA, 21 nt, Human
aacuuucuauugccuguccca

SEQ ID NO: 23220 - RNA, 32 nt, Human
aacuuucucccugcaucucauaccuuuaccuc

SEQ ID NO: 23221 - RNA, 32 nt, Human
aacuuucucuaaggaccccaggacugugccuu

SEQ ID NO: 23222 - RNA, 32 nt, Human
aacuuucucugagccuugcuuccccucuguaa

SEQ ID NO: 23223 - RNA, 32 nt, Human
aacuuucugcagcuuuuccauagaagcccugg

SEQ ID NO: 23224 - RNA, 32 nt, Human
aacuuucuuauccaacuuuuucauaguaagug

SEQ ID NO: 23225 - RNA, 32 nt, Human
aacuuucuuccucucucuccaagaggauaugg

SEQ ID NO: 23226 - RNA, 32 nt, Human
aacuuucuuuuguguuuacaucaugccagggg

SEQ ID NO: 23227 - RNA, 32 nt, Human
aacuuugaauccuugucagccuggagaccagc

SEQ ID NO: 23228 - RNA, 32 nt, Human
aacuuugagaggccgaggcggguagaucacuu

SEQ ID NO: 23229 - RNA, 32 nt, Human
aacuuugagcacuuuguugaguuuugaaaaau

SEQ ID NO: 23230 - RNA, 32 nt, Human
aacuuugagccuuuuguaguccugaugaauaa

SEQ ID NO: 23231 - RNA, 32 nt, Human
aacuuugagcugguuggacggguuaacuugga

SEQ ID NO: 23232 - RNA, 32 nt, Human
aacuuugaggcucagagacagagcagaagaca

SEQ ID NO: 23233 - RNA, 32 nt, Human
aacuuugcagugaacuuugccucuuccuguuu

SEQ ID NO: 23234 - RNA, 32 nt, Human
aacuuugcaguuggaugaauagagaagggaaa

SEQ ID NO: 23235 - RNA, 32 nt, Human
aacuuugccuguguuguuucucugccuggaau

SEQ ID NO: 23236 - RNA, 22 nt, Human
aacuuugcucaggacauuugag

SEQ ID NO: 23237 - RNA, 32 nt, Human
aacuuugcuucaggcuggguagugguagaggu

SEQ ID NO: 23238 - RNA, 32 nt, Human
aacuuugcuucuuuggaaagguuuucuccuga

SEQ ID NO: 23239 - RNA, 32 nt, Human
aacuuuggaaacugccauuucauucacacaag

SEQ ID NO: 23240 - RNA, 32 nt, Human
aacuuuggaagacuguaacuuguucagaggca

SEQ ID NO: 23241 - RNA, 32 nt, Human
aacuuuggagcagaauccugcacauuaaagga

SEQ ID NO: 23242 - RNA, 32 nt, Human
aacuuuggagcuuguaugugagucagauugcu

SEQ ID NO: 23243 - RNA, 32 nt, Human
aacuuuggaguacuguuucuuccuucaaacug

SEQ ID NO: 23244 - RNA, 32 nt, Human
aacuuuggcaaaaagugaacacaauucaaaua

SEQ ID NO: 23245 - RNA, 32 nt, Human
aacuuuggcaccuuccagaaugccuagaggaa

SEQ ID NO: 23246 - RNA, 32 nt, Human
aacuuugggaaaggggcuagcuagcaaaggua

SEQ ID NO: 23247 - RNA, 32 nt, Human
aacuuugggaagccgaggugggcagaucaccu

SEQ ID NO: 23248 - RNA, 32 nt, Human
aacuuugggaggccgagacgggcagaucacuu

SEQ ID NO: 23249 - RNA, 32 nt, Human
aacuuugggaggccgaggcaggaggaucacuu

SEQ ID NO: 23250 - RNA, 32 nt, Human
aacuuugggaggccgaggcagguggaucacaa

SEQ ID NO: 23251 - RNA, 32 nt, Human
aacuuugggaggccgaggugaguggauugcuu

SEQ ID NO: 23252 - RNA, 32 nt, Human
aacuuugggaggccgaggugggaggagcgcuu

SEQ ID NO: 23253 - RNA, 31 nt, Human
aacuuugggaggccuagauggguggaucacu

SEQ ID NO: 23254 - RNA, 32 nt, Human
aacuuugggaggcugaggcagguggaucacuu

SEQ ID NO: 23255 - RNA, 32 nt, Human
aacuuugggagucccaggcgggcggaucaccu

SEQ ID NO: 23256 - RNA, 32 nt, Human
aacuuugggcauggaagaaagacuggaaacua

SEQ ID NO: 23257 - RNA, 32 nt, Human
aacuuugguggugguuucuucagaaucaugaa

SEQ ID NO: 23258 - RNA, 24 nt, Human
aacuuuguaaaggaaucaauagua

SEQ ID NO: 23259 - RNA, 32 nt, Human
aacuuuguagaacuuaaauacuugaauauuca

SEQ ID NO: 23260 - RNA, 32 nt, Human
aacuuuguauaugaaucaaaacaaacgagcag

SEQ ID NO: 23261 - RNA, 21 nt, Human
aacuuuguauugcccaaagua

SEQ ID NO: 23262 - RNA, 32 nt, Human
aacuuugucuaucacucuccccaacaaccuag

SEQ ID NO: 23263 - RNA, 32 nt, Human
aacuuugucuucaaguaaucugacagcauuaa

SEQ ID NO: 23264 - RNA, 32 nt, Human
aacuuugucuuugcucagaaccagcuccaccc

SEQ ID NO: 23265 - RNA, 32 nt, Human
aacuuugugguuugcuguuuagccuucaguuu

SEQ ID NO: 23266 - RNA, 32 nt, Human
aacuuuuaaaaucuauuucauuucuuaguuau

SEQ ID NO: 23267 - RNA, 32 nt, Human
aacuuuuaacccaagcgguggggaaggaagcc

SEQ ID NO: 23268 - RNA, 32 nt, Human
aacuuuuaagacaacaguguggaacacaauca

SEQ ID NO: 23269 - RNA, 32 nt, Human
aacuuuuaaucuccucuucucccuucuccucc

SEQ ID NO: 23270 - RNA, 32 nt, Human
aacuuuuaaugucuuuuuaaaagaugugggac

SEQ ID NO: 23271 - RNA, 32 nt, Human
aacuuuuacacaguuugccuucagagacaguc

SEQ ID NO: 23272 - RNA, 32 nt, Human
aacuuuuacaucuuuucuuccaaaauaaaagu

SEQ ID NO: 23273 - RNA, 32 nt, Human
aacuuuuacuauauaccuuuccuuggccacca

SEQ ID NO: 23274 - RNA, 32 nt, Human
aacuuuuagccugaaaccaacuuuaugccacu

SEQ ID NO: 23275 - RNA, 32 nt, Human
aacuuuuagcucucuuucuucucaaugucuaa

SEQ ID NO: 23276 - RNA, 32 nt, Human
aacuuuucaaagaaauuuuuagauggaggcaa

SEQ ID NO: 23277 - RNA, 32 nt, Human
aacuuuucaagacauuggaaacaaauagaaca

SEQ ID NO: 23278 - RNA, 32 nt, Human
aacuuuucagacacagcagggccccgcgcagc

SEQ ID NO: 23279 - RNA, 32 nt, Human
aacuuuucccucacuguuccccaaaacaugca

SEQ ID NO: 23280 - RNA, 32 nt, Human
aacuuuucccuucucaguuccucucucgaaag

SEQ ID NO: 23281 - RNA, 32 nt, Human
aacuuuuccucuuaccuuccuuucucuuuccu

SEQ ID NO: 23282 - RNA, 32 nt, Human
aacuuuucuauauuugguuucucuccacacau

SEQ ID NO: 23283 - RNA, 32 nt, Human
aacuuuucuuuccuugaugugggauguucuuc

SEQ ID NO: 23284 - RNA, 32 nt, Human
aacuuuuggcaaauaaaagcauuuaaaaagac

SEQ ID NO: 23285 - RNA, 32 nt, Human
aacuuuuguaaauauauaaauauacauagaca

SEQ ID NO: 23286 - RNA, 32 nt, Human
aacuuuuguaauuaacaacagcaacaauaaca

SEQ ID NO: 23287 - RNA, 32 nt, Human
aacuuuuguggacugagcggccgcagagacug

SEQ ID NO: 23288 - RNA, 32 nt, Human
aacuuuuuaacacagaaauacuuccugcgagc

SEQ ID NO: 23289 - RNA, 32 nt, Human
aacuuuuuacagaacuagcacagcagaaauac

SEQ ID NO: 23290 - RNA, 32 nt, Human
aacuuuuuccagaucucaugucuggcuuaaua

SEQ ID NO: 23291 - RNA, 32 nt, Human
aagaaaaacaaggacuuccugggaggcugugg

SEQ ID NO: 23292 - RNA, 32 nt, Human
aagaaaaaccacucccaguccccagcccuuca

SEQ ID NO: 23293 - RNA, 32 nt, Human
aagaaaaacccauuuucuggggagaaauucaa

SEQ ID NO: 23294 - RNA, 32 nt, Human
aagaaaaacuuuaagaaaaugagccaaugggc

SEQ ID NO: 23295 - RNA, 32 nt, Human
aagaaaaagaaaccuggcuuacugaacaguaa

SEQ ID NO: 23296 - RNA, 32 nt, Human
aagaaaaagagagagagccacguacagagaga

SEQ ID NO: 23297 - RNA, 32 nt, Human
aagaaaaagaggaagaagaagaaggaggaaaa

SEQ ID NO: 23298 - RNA, 32 nt, Human
aagaaaaagaggaagaagaagaaggaggagga

SEQ ID NO: 23299 - RNA, 32 nt, Human
aagaaaaagaggaggaaaaagguagggagaaa

SEQ ID NO: 23300 - RNA, 32 nt, Human
aagaaaaagaggaggaaaaaguggauuacaca

SEQ ID NO: 23301 - RNA, 32 nt, Human
aagaaaaaggaaggaaggaaacaaggaaggaa

SEQ ID NO: 23302 - RNA, 32 nt, Human
aagaaaaaugacaguaaagauuagcugggagu

SEQ ID NO: 23303 - RNA, 32 nt, Human
aagaaaaaugcuguuuauucaugcugagguga

SEQ ID NO: 23304 - RNA, 32 nt, Human
aagaaaaauggguggaagacaagugcagggaa

SEQ ID NO: 23305 - RNA, 32 nt, Human
aagaaaaauuagcagccaggugcaguggcuca

SEQ ID NO: 23306 - RNA, 32 nt, Human
aagaaaacaaaccauugcuuaugcuguuauau

SEQ ID NO: 23307 - RNA, 32 nt, Human
aagaaaacacagaugcugucuuugcauucgac

SEQ ID NO: 23308 - RNA, 32 nt, Human
aagaaaacacggagccuucccuccaggugccc

SEQ ID NO: 23309 - RNA, 32 nt, Human
aagaaaacagcauggccaguaaacugagcaag

SEQ ID NO: 23310 - RNA, 32 nt, Human
aagaaaaccaaacaaacccaggccugauggga

SEQ ID NO: 23311 - RNA, 23 nt, Human
aagaaaaccaaauuauuguucaa

SEQ ID NO: 23312 - RNA, 32 nt, Human
aagaaaaccaggaagcccagcaagaaaagccg

SEQ ID NO: 23313 - RNA, 32 nt, Human
aagaaaaccaguauuugauuuaagcuagguuu

SEQ ID NO: 23314 - RNA, 32 nt, Human
aagaaaacgcugacauaugcugccuucucugu

SEQ ID NO: 23315 - RNA, 32 nt, Human
aagaaaacucacugccuuuaccuacuagaauu

SEQ ID NO: 23316 - RNA, 32 nt, Human
aagaaaacucaggugggcaaagggccucagug

SEQ ID NO: 23317 - RNA, 32 nt, Human
aagaaaacuuggcaaauacagcuuuggacugg

SEQ ID NO: 23318 - RNA, 32 nt, Human
aagaaaacuuuccucccucaauagugaagugu

SEQ ID NO: 23319 - RNA, 32 nt, Human
aagaaaacuuucugcugaaagugucauugcug

SEQ ID NO: 23320 - RNA, 32 nt, Human
aagaaaacuuugacuaauagagcccaggaagg

SEQ ID NO: 23321 - RNA, 32 nt, Human
aagaaaagaacugcuugcauuucuuuauuucu

SEQ ID NO: 23322 - RNA, 32 nt, Human
aagaaaagaaggagggagagagggaggaagga

SEQ ID NO: 23323 - RNA, 32 nt, Human
aagaaaagagcaccuccucauuuuagaguaca

SEQ ID NO: 23324 - RNA, 32 nt, Human
aagaaaagaggaggaggaggaggaagaaagaa

SEQ ID NO: 23325 - RNA, 32 nt, Human
aagaaaagaggugguucucugcagugaucguu

SEQ ID NO: 23326 - RNA, 22 nt, Human
aagaaaagaguuccuuuugccu

SEQ ID NO: 23327 - RNA, 32 nt, Human
aagaaaagccacccccugcacccuccauagcc

SEQ ID NO: 23328 - RNA, 32 nt, Human
aagaaaaggaacccuggccugaggcaggugac

SEQ ID NO: 23329 - RNA, 32 nt, Human
aagaaaaggaagcaaagaaaauagcugccaaa

SEQ ID NO: 23330 - RNA, 32 nt, Human
aagaaaaggacacuuaccccaaaacuucaauc

SEQ ID NO: 23331 - RNA, 23 nt, Human
aagaaaaggacuuucuccaggca

SEQ ID NO: 23332 - RNA, 32 nt, Human
aagaaaaggagaaaagggucaccacccugaaa

SEQ ID NO: 23333 - RNA, 32 nt, Human
aagaaaaggcaaugaaaguaaccacaaaagug

SEQ ID NO: 23334 - RNA, 32 nt, Human
aagaaaaggcagcaaagguaaguucagagacc

SEQ ID NO: 23335 - RNA, 32 nt, Human
aagaaaaggcagcacgugguuuuaugaaggua

SEQ ID NO: 23336 - RNA, 32 nt, Human
aagaaaaggcucaggggugagguggagaggga

SEQ ID NO: 23337 - RNA, 21 nt, Human
aagaaaagggauccccaggua

SEQ ID NO: 23338 - RNA, 32 nt, Human
aagaaaaguaaauaggccgggcgcgguagcuc

SEQ ID NO: 23339 - RNA, 32 nt, Human
aagaaaauaagaacccagcagcauggaacuuc

SEQ ID NO: 23340 - RNA, 32 nt, Human
aagaaaaucaaucuuggcugggcacgguggcu

SEQ ID NO: 23341 - RNA, 32 nt, Human
aagaaaaucaggcuggccaacggggugaaacc

SEQ ID NO: 23342 - RNA, 32 nt, Human
aagaaaauccugcuugacaaaaaccgucacuu

SEQ ID NO: 23343 - RNA, 32 nt, Human
aagaaaaugaguucucaaggagggaaugcuuu

SEQ ID NO: 23344 - RNA, 32 nt, Human
aagaaaaugcuugcuaaugccugcuugcacua

SEQ ID NO: 23345 - RNA, 32 nt, Human
aagaaaauggaugacaaagaaauugagaaucu

SEQ ID NO: 23346 - RNA, 22 nt, Human
aagaaaaugucuuucucuuccu

SEQ ID NO: 23347 - RNA, 32 nt, Human
aagaaaauguuacugaacuauugacugaaagu

SEQ ID NO: 23348 - RNA, 32 nt, Human
aagaaaauguuuugaguauaugugacagaaaa

SEQ ID NO: 23349 - RNA, 32 nt, Human
aagaaaauucauuuucauuguugucuccuucc

SEQ ID NO: 23350 - RNA, 32 nt, Human
aagaaaauuugaaaaguuaaagaugguugcac

SEQ ID NO: 23351 - RNA, 32 nt, Human
aagaaaauuuggaaaauuuuaaaacugugaag

SEQ ID NO: 23352 - RNA, 32 nt, Human
aagaaacaaaagaaagcaucaugugaauaaaa

SEQ ID NO: 23353 - RNA, 32 nt, Human
aagaaacaaacaaaagcugaacacauuuccuu

SEQ ID NO: 23354 - RNA, 32 nt, Human
aagaaacaaagcuucccuaacagccccacagu

SEQ ID NO: 23355 - RNA, 32 nt, Human
aagaaacaaccucaaagaccucaggccgccug

SEQ ID NO: 23356 - RNA, 22 nt, Human
aagaaacaacuuucucucacuu

SEQ ID NO: 23357 - RNA, 32 nt, Human
aagaaacacagcaacaaugacuuaaccauaua

SEQ ID NO: 23358 - RNA, 32 nt, Human
aagaaacaccuaccugcugugaccucacaaac

SEQ ID NO: 23359 - RNA, 32 nt, Human
aagaaacacugauuuucuuucagggagacuuc

SEQ ID NO: 23360 - RNA, 22 nt, Human
aagaaacagaaaaccccagggg

SEQ ID NO: 23361 - RNA, 32 nt, Human
aagaaacagaagacuggccuuuuuggugcucc

SEQ ID NO: 23362 - RNA, 32 nt, Human
aagaaacagaaguuuagcaagggucaugaaga

SEQ ID NO: 23363 - RNA, 32 nt, Human
aagaaacagcauggagaaaacccgguacgcuc

SEQ ID NO: 23364 - RNA, 22 nt, Human
aagaaacagcuagcuccugccu

SEQ ID NO: 23365 - RNA, 23 nt, Human
aagaaacagcuugacuucagagg

SEQ ID NO: 23366 - RNA, 32 nt, Human
aagaaacaggcagaaagagagacaaagacaga

SEQ ID NO: 23367 - RNA, 24 nt, Human
aagaaacaggcauagaaucugccu

SEQ ID NO: 23368 - RNA, 32 nt, Human
aagaaacauccaaaagcacauuucauuucucc

SEQ ID NO: 23369 - RNA, 22 nt, Human
aagaaacauuuguauguucuua

SEQ ID NO: 23370 - RNA, 25 nt, Human
aagaaacauuuuugaaguuuucuua

SEQ ID NO: 23371 - RNA, 32 nt, Human
aagaaaccacuucuuugcucauucauaauaag

SEQ ID NO: 23372 - RNA, 32 nt, Human
aagaaaccagccccaguaaucaguaagucagg

SEQ ID NO: 23373 - RNA, 32 nt, Human
aagaaaccauuugagauuugaaucuaaugguu

SEQ ID NO: 23374 - RNA, 32 nt, Human
aagaaacccaccauaaccagcccacugucacc

SEQ ID NO: 23375 - RNA, 32 nt, Human
aagaaacccugacuaacgcauugagaaaagcc

SEQ ID NO: 23376 - RNA, 32 nt, Human
aagaaacccuuaaaacaagugagcauugugaa

SEQ ID NO: 23377 - RNA, 32 nt, Human
aagaaaccugcucuaguuuuacaggaccauau

SEQ ID NO: 23378 - RNA, 32 nt, Human
aagaaaccuggcaaagaaaacggucucgacaa

SEQ ID NO: 23379 - RNA, 32 nt, Human
aagaaacucucauguaccaaguugucucacuu

SEQ ID NO: 23380 - RNA, 32 nt, Human
aagaaacuggaaggaggaauucuggcuggaau

SEQ ID NO: 23381 - RNA, 32 nt, Human
aagaaacuggcuguggggucccagacaugcca

SEQ ID NO: 23382 - RNA, 26 nt, Human
aagaaacuucugaauuucucuugcuu

SEQ ID NO: 23383 - RNA, 32 nt, Human
aagaaacuuuuacaucuuuucuuccaaaauaa

SEQ ID NO: 23384 - RNA, 32 nt, Human
aagaaagaaaaaggaaggaaggaaacaaggaa

SEQ ID NO: 23385 - RNA, 32 nt, Human
aagaaagaaaaaugggaaaauuuggaaaguga

SEQ ID NO: 23386 - RNA, 32 nt, Human
aagaaagaaacauccaaaaaggccaacgaucu

SEQ ID NO: 23387 - RNA, 32 nt, Human
aagaaagaaagaaagaaagaaaagaaagaaag

SEQ ID NO: 23388 - RNA, 32 nt, Human
aagaaagaaagaaagaaagaaagaaaacaguu

SEQ ID NO: 23389 - RNA, 32 nt, Human
aagaaagaaagaaagaaagaaagaaaagaaag

SEQ ID NO: 23390 - RNA, 32 nt, Human
aagaaagaaagaaagaaagaaagaaaauauca

SEQ ID NO: 23391 - RNA, 32 nt, Human
aagaaagaaagaaagaaagaaagaaagaaaag

SEQ ID NO: 23392 - RNA, 32 nt, Human
aagaaagaaagaaagaaagaaagaaagaaaga

SEQ ID NO: 23393 - RNA, 32 nt, Human
aagaaagaaagaaagaaagaaagaaagaaauc

SEQ ID NO: 23394 - RNA, 32 nt, Human
aagaaagaaagaaagaaagaaagaaaucuacc

SEQ ID NO: 23395 - RNA, 32 nt, Human
aagaaagaaagaaagaaagaaagaagaacggc

SEQ ID NO: 23396 - RNA, 32 nt, Human
aagaaagaaagaaagaaagaaaggaauccuac

SEQ ID NO: 23397 - RNA, 32 nt, Human
aagaaagaaagaaagaaagaagaacggccagg

SEQ ID NO: 23398 - RNA, 32 nt, Human
aagaaagaaagaaagagaaaagaaaagaaaag

SEQ ID NO: 23399 - RNA, 32 nt, Human
aagaaagaaagaaagggaaagauggaaggaag

SEQ ID NO: 23400 - RNA, 32 nt, Human
aagaaagaaagagaugccugguuuucacagac

SEQ ID NO: 23401 - RNA, 32 nt, Human
aagaaagaagaaaaggagaaggaagaagaaga

SEQ ID NO: 23402 - RNA, 21 nt, Human
aagaaagaagggagaguaaua

SEQ ID NO: 23403 - RNA, 32 nt, Human
aagaaagaaggugggagcggagagcgcaggcg

SEQ ID NO: 23404 - RNA, 32 nt, Human
aagaaagaaugaugcaaauauguggaccccca

SEQ ID NO: 23405 - RNA, 32 nt, Human
aagaaagaaugugaguaacuguuguuuugcaa

SEQ ID NO: 23406 - RNA, 32 nt, Human
aagaaagacacauuuuguuugugugacacuua

SEQ ID NO: 23407 - RNA, 32 nt, Human
aagaaagacaucacaucccucuccucuccucc

SEQ ID NO: 23408 - RNA, 32 nt, Human
aagaaagacuccguaaucuuaaacagaugcaa

SEQ ID NO: 23409 - RNA, 32 nt, Human
aagaaagacucuauugugguuacuugaaaaau

SEQ ID NO: 23410 - RNA, 32 nt, Human
aagaaagagaaaaagaaagaaaggaaagaaag

SEQ ID NO: 23411 - RNA, 32 nt, Human
aagaaagagaaaaggucccagcugagagaaaa

SEQ ID NO: 23412 - RNA, 32 nt, Human
aagaaagagaaaccagguauucugcuacaguu

SEQ ID NO: 23413 - RNA, 32 nt, Human
aagaaagagagaaagaaagaaagaaagagaga

SEQ ID NO: 23414 - RNA, 32 nt, Human
aagaaagagcaucuucucucccacugcacccc

SEQ ID NO: 23415 - RNA, 32 nt, Human
aagaaagaggcagaggagcgacagagaugacu

SEQ ID NO: 23416 - RNA, 32 nt, Human
aagaaagagggaagcgucagauccuagaaaga

SEQ ID NO: 23417 - RNA, 32 nt, Human
aagaaagaucagauuguuacugugucugugua

SEQ ID NO: 23418 - RNA, 32 nt, Human
aagaaagaucccuggaucccaggaugauuaua

SEQ ID NO: 23419 - RNA, 23 nt, Human
aagaaagaugcauccucuugccu

SEQ ID NO: 23420 - RNA, 32 nt, Human
aagaaagauggauacuaugaugcugaaugugc

SEQ ID NO: 23421 - RNA, 32 nt, Human
aagaaagaugggaggaagugcagcaggaauag

SEQ ID NO: 23422 - RNA, 32 nt, Human
aagaaagauuaaggaggaaggaauacaucugg

SEQ ID NO: 23423 - RNA, 32 nt, Human
aagaaagcaaaaggccuguucugguggggaga

SEQ ID NO: 23424 - RNA, 32 nt, Human
aagaaagcaacuccaacccacacacugcaaau

SEQ ID NO: 23425 - RNA, 32 nt, Human
aagaaagcacaauuaauuuuauagagagguuu

SEQ ID NO: 23426 - RNA, 32 nt, Human
aagaaagcagcccagggugccaugccugacag

SEQ ID NO: 23427 - RNA, 32 nt, Human
aagaaagcaguuuagggccacccagaagaaaa

SEQ ID NO: 23428 - RNA, 32 nt, Human
aagaaagccagacaacuucuguuucuucucuu

SEQ ID NO: 23429 - RNA, 32 nt, Human
aagaaagccaucucuuccucugaucugggguc

SEQ ID NO: 23430 - RNA, 32 nt, Human
aagaaagcccucaaucaaaagcagaaacagaa

SEQ ID NO: 23431 - RNA, 32 nt, Human
aagaaagccgaaguccuugaaaccauuuagga

SEQ ID NO: 23432 - RNA, 32 nt, Human
aagaaagcgcugacagcucaaauggaucccau

SEQ ID NO: 23433 - RNA, 32 nt, Human
aagaaagcucgggcccuggaggcugcggcucu

SEQ ID NO: 23434 - RNA, 32 nt, Human
aagaaagcucuuccacccuccuucaccuaucu

SEQ ID NO: 23435 - RNA, 32 nt, Human
aagaaagcugauagcuccuccauguugguaaa

SEQ ID NO: 23436 - RNA, 32 nt, Human
aagaaagcuguggaaaggaccugccccacaug

SEQ ID NO: 23437 - RNA, 32 nt, Human
aagaaagcuuguggaaagucucucuccuuccu

SEQ ID NO: 23438 - RNA, 32 nt, Human
aagaaagcuuuggauaguaccuauuauaagaa

SEQ ID NO: 23439 - RNA, 32 nt, Human
aagaaaggacuagcauaugagacuucugguac

SEQ ID NO: 23440 - RNA, 32 nt, Human
aagaaaggagagaaaagcaaaugaaguuuagg

SEQ ID NO: 23441 - RNA, 32 nt, Human
aagaaaggagagaagcagauuccaggggaaga

SEQ ID NO: 23442 - RNA, 32 nt, Human
aagaaaggagaguccaagaccaccugccccuc

SEQ ID NO: 23443 - RNA, 17 nt, Human
aagaaaggagcagaaug

SEQ ID NO: 23444 - RNA, 32 nt, Human
aagaaaggagccaaggaagagauuaagaaaaa

SEQ ID NO: 23445 - RNA, 32 nt, Human
aagaaaggagccaaggcaaagagggaccacug

SEQ ID NO: 23446 - RNA, 32 nt, Human
aagaaaggagucagggacagagaaaaagauuc

SEQ ID NO: 23447 - RNA, 32 nt, Human
aagaaaggaguuaagagaggaaggaggagcua

SEQ ID NO: 23448 - RNA, 20 nt, Human
aagaaaggaucaacaagcag

SEQ ID NO: 23449 - RNA, 19 nt, Human
aagaaaggaucaucagcaa

SEQ ID NO: 23450 - RNA, 32 nt, Human
aagaaaggaucucuggggcuuccgggggugag

SEQ ID NO: 23451 - RNA, 23 nt, Human
aagaaaggcaagagcucaagguc

SEQ ID NO: 23452 - RNA, 32 nt, Human
aagaaaggcacauguuuaagaggaauaccuaa

SEQ ID NO: 23453 - RNA, 32 nt, Human
aagaaaggccgacgugcaagaaacccagccuc

SEQ ID NO: 23454 - RNA, 32 nt, Human
aagaaagggaaagauggaaggaaggaaggaaa

SEQ ID NO: 23455 - RNA, 32 nt, Human
aagaaagggacaauggcucugaguggaaacug

SEQ ID NO: 23456 - RNA, 32 nt, Human
aagaaagggaccccucuccaguccuggcuccu

SEQ ID NO: 23457 - RNA, 32 nt, Human
aagaaagggagaccuaagggugaacaguggcc

SEQ ID NO: 23458 - RNA, 32 nt, Human
aagaaagggaguggaggugcagcgaaggaccc

SEQ ID NO: 23459 - RNA, 32 nt, Human
aagaaagggcaggcggcucggcgggcgucuuc

SEQ ID NO: 23460 - RNA, 32 nt, Human
aagaaagggcauugccaugacaucucaaagca

SEQ ID NO: 23461 - RNA, 32 nt, Human
aagaaagggcuggaacugaggguaaagaaggg

SEQ ID NO: 23462 - RNA, 32 nt, Human
aagaaagggcuggauucugccauaccuuuggg

SEQ ID NO: 23463 - RNA, 32 nt, Human
aagaaaggggccugggcagcagguguggccag

SEQ ID NO: 23464 - RNA, 32 nt, Human
aagaaaggugaguuugagcugccuucccuagc

SEQ ID NO: 23465 - RNA, 32 nt, Human
aagaaaggugcauggacccccugcugcucugc

SEQ ID NO: 23466 - RNA, 32 nt, Human
aagaaagguguuccuucccauggauauuugua

SEQ ID NO: 23467 - RNA, 32 nt, Human
aagaaaguaucugugagaacagccugggagaa

SEQ ID NO: 23468 - RNA, 32 nt, Human
aagaaagucaccaagugucuuaagcuguuuua

SEQ ID NO: 23469 - RNA, 32 nt, Human
aagaaagugaagauaacugcaagucagcugga

SEQ ID NO: 23470 - RNA, 32 nt, Human
aagaaagugagaagauagaguacuggaucaga

SEQ ID NO: 23471 - RNA, 32 nt, Human
aagaaagugcaugcaggaauauucagggaguc

SEQ ID NO: 23472 - RNA, 32 nt, Human
aagaaaguuauucaguaccuugcccauguugc

SEQ ID NO: 23473 - RNA, 32 nt, Human
aagaaauacaaggaggaggaggguuagcaggc

SEQ ID NO: 23474 - RNA, 32 nt, Human
aagaaauaccuugccccguuuuugcccaauca

SEQ ID NO: 23475 - RNA, 25 nt, Human
aagaaauacucagagacagaagcau

SEQ ID NO: 23476 - RNA, 21 nt, Human
aagaaauaggaggcauuuuca

SEQ ID NO: 23477 - RNA, 32 nt, Human
aagaaauauuacaccuaaucucauguuuagaa

SEQ ID NO: 23478 - RNA, 32 nt, Human
aagaaauauuuuagcucugaaggauuuaguag

SEQ ID NO: 23479 - RNA, 25 nt, Human
aagaaauauuuuuaagauguucuua

SEQ ID NO: 23480 - RNA, 32 nt, Human
aagaaaucaagagaggagagaggagcccccac

SEQ ID NO: 23481 - RNA, 32 nt, Human
aagaaaucacauaggagauaagccucaugaau

SEQ ID NO: 23482 - RNA, 32 nt, Human
aagaaauccauggcuuuugucuucuuaauguu

SEQ ID NO: 23483 - RNA, 32 nt, Human
aagaaauccugccucugugcagcagaggagcu

SEQ ID NO: 23484 - RNA, 32 nt, Human
aagaaaucgagccugucccuugugcacuuggg

SEQ ID NO: 23485 - RNA, 32 nt, Human
aagaaaucgauguuaccuugcugguagauaga

SEQ ID NO: 23486 - RNA, 32 nt, Human
aagaaaucugaaagcaccucugacauuccuuu

SEQ ID NO: 23487 - RNA, 32 nt, Human
aagaaaugaaaccaggaagguuuucagaucac

SEQ ID NO: 23488 - RNA, 32 nt, Human
aagaaaugaauagacuaucuagaacuugagaa

SEQ ID NO: 23489 - RNA, 32 nt, Human
aagaaaugacaaucacagccacugcaacuuca

SEQ ID NO: 23490 - RNA, 32 nt, Human
aagaaaugagccagacauggugguguaugccu

SEQ ID NO: 23491 - RNA, 32 nt, Human
aagaaaugagguaaagaguuuaaaccagggaa

SEQ ID NO: 23492 - RNA, 32 nt, Human
aagaaaugagguaccuuuucaaagugcagccg

SEQ ID NO: 23493 - RNA, 32 nt, Human
aagaaaugaugaagaaaaagaauaggcuggag

SEQ ID NO: 23494 - RNA, 32 nt, Human
aagaaaugcagaaaggagagagagggaucuga

SEQ ID NO: 23495 - RNA, 32 nt, Human
aagaaaugcaggaagggaacagggaacaaggc

SEQ ID NO: 23496 - RNA, 32 nt, Human
aagaaaugcaugcacacagguaguauggcaac

SEQ ID NO: 23497 - RNA, 32 nt, Human
aagaaaugcauuuauguaagaucugugaguac

SEQ ID NO: 23498 - RNA, 32 nt, Human
aagaaaugccuagaaaguguugucaacauuuu

SEQ ID NO: 23499 - RNA, 30 nt, Human
aagaaauggaaaugacuacaaauaaguuga

SEQ ID NO: 23500 - RNA, 32 nt, Human
aagaaauggaacauaaccagcaccccagaacc

SEQ ID NO: 23501 - RNA, 32 nt, Human
aagaaauggaacuuaauguugugccaaaguua

SEQ ID NO: 23502 - RNA, 32 nt, Human
aagaaauggaagcacagcuucuuucagacuuc

SEQ ID NO: 23503 - RNA, 30 nt, Human
aagaaauggaggaagcaaagaaaaugauau

SEQ ID NO: 23504 - RNA, 32 nt, Human
aagaaauggauacagucuaaagaauuaacuca

SEQ ID NO: 23505 - RNA, 32 nt, Human
aagaaauggcuuuggagaaaacagacaacauc

SEQ ID NO: 23506 - RNA, 32 nt, Human
aagaaaugggaguugucagagcauuaaaaugc

SEQ ID NO: 23507 - RNA, 32 nt, Human
aagaaaugucuauuuuucuuuguucccaauua

SEQ ID NO: 23508 - RNA, 32 nt, Human
aagaaaugugaagagaaaauacacagacacaa

SEQ ID NO: 23509 - RNA, 32 nt, Human
aagaaauguguauaaguaauuaugauauugca

SEQ ID NO: 23510 - RNA, 32 nt, Human
aagaaauuacaguuuacguccauuccaaguug

SEQ ID NO: 23511 - RNA, 32 nt, Human
aagaaauuccauaugaaaaacuccacucaugu

SEQ ID NO: 23512 - RNA, 32 nt, Human
aagaaauucugacagaugacaucagaagacac

SEQ ID NO: 23513 - RNA, 32 nt, Human
aagaaauugaggucacagcaaaaugaaggugu

SEQ ID NO: 23514 - RNA, 24 nt, Human
aagaaauugcccuggcacuuuuca

SEQ ID NO: 23515 - RNA, 32 nt, Human
aagaaauugggugagaggagauagguagcucc

SEQ ID NO: 23516 - RNA, 23 nt, Human
aagaaauugugaucacuucuuca

SEQ ID NO: 23517 - RNA, 32 nt, Human
aagaaauuguucccuuccccuguguucaaugu

SEQ ID NO: 23518 - RNA, 32 nt, Human
aagaaauuugcauuccugaucuucccaacuuc

SEQ ID NO: 23519 - RNA, 32 nt, Human
aagaaauuugucaggcugggugcaguggcuca

SEQ ID NO: 23520 - RNA, 32 nt, Human
aagaaauuuucccuuuuuaauugccucuauag

SEQ ID NO: 23521 - RNA, 32 nt, Human
aagaacaaaaugcuuaacuuuaucucuuaauu

SEQ ID NO: 23522 - RNA, 32 nt, Human
aagaacaaauaaacaacucaccagagauuuau

SEQ ID NO: 23523 - RNA, 32 nt, Human
aagaacaagagggaggagaaagugagaagcag

SEQ ID NO: 23524 - RNA, 32 nt, Human
aagaacaaguaagcaacucaccagagauuuau

SEQ ID NO: 23525 - RNA, 32 nt, Human
aagaacaaucacuaaaccacacucaccccagc

SEQ ID NO: 23526 - RNA, 32 nt, Human
aagaacacccuucuggcccucagucuguuccc

SEQ ID NO: 23527 - RNA, 32 nt, Human
aagaacacuccaauucagccugagugcaaccu

SEQ ID NO: 23528 - RNA, 32 nt, Human
aagaacagaacagccaaugacugaagacagga

SEQ ID NO: 23529 - RNA, 25 nt, Human
aagaacagaagauuauguucuugua

SEQ ID NO: 23530 - RNA, 32 nt, Human
aagaacagacauucaggccaggcacggugacu

SEQ ID NO: 23531 - RNA, 32 nt, Human
aagaacagagaggaggaggagggagaaauggc

SEQ ID NO: 23532 - RNA, 32 nt, Human
aagaacagagguuucucaaaugccucaguccc

SEQ ID NO: 23533 - RNA, 32 nt, Human
aagaacagagugagagaggcccauggcugauu

SEQ ID NO: 23534 - RNA, 26 nt, Human
aagaacagcagagagaaugagcaagg

SEQ ID NO: 23535 - RNA, 32 nt, Human
aagaacagccuggguaacacagggagacucug

SEQ ID NO: 23536 - RNA, 32 nt, Human
aagaacagcuccaaccuccccuucaccuucuc

SEQ ID NO: 23537 - RNA, 32 nt, Human
aagaacagugagaaggguaggggccaggggcc

SEQ ID NO: 23538 - RNA, 22 nt, Human
aagaacaguggaagagaagcau

SEQ ID NO: 23539 - RNA, 20 nt, Human
aagaacaguggggugguuca

SEQ ID NO: 23540 - RNA, 32 nt, Human
aagaacauaccuaauauauacacuucuuuuaa

SEQ ID NO: 23541 - RNA, 32 nt, Human
aagaacaucaaccaugucuuacacuccaggag

SEQ ID NO: 23542 - RNA, 32 nt, Human
aagaacaucagaaaauagaccuccuuccuccu

SEQ ID NO: 23543 - RNA, 32 nt, Human
aagaacauccuggaggccaggaguucgacacu

SEQ ID NO: 23544 - RNA, 32 nt, Human
aagaacauguaacguacuacugccaucuuagu

SEQ ID NO: 23545 - RNA, 32 nt, Human
aagaacauugcuuuuugcaaaaucagauuaaa

SEQ ID NO: 23546 - RNA, 32 nt, Human
aagaacauuuuccucccuuccuuuguguccuu

SEQ ID NO: 23547 - RNA, 32 nt, Human
aagaaccaaucuuugaauagccaucugcuaua

SEQ ID NO: 23548 - RNA, 32 nt, Human
aagaaccacugacaauguaacucucucauugu

SEQ ID NO: 23549 - RNA, 32 nt, Human
aagaaccagcacugccggagccucgcuguggu

SEQ ID NO: 23550 - RNA, 32 nt, Human
aagaaccagcucauguuuggaaaaggaaucuu

SEQ ID NO: 23551 - RNA, 32 nt, Human
aagaaccaggaggccugggagaugcagcugga

SEQ ID NO: 23552 - RNA, 32 nt, Human
aagaaccaggauacaucuuauuucucaaaaug

SEQ ID NO: 23553 - RNA, 32 nt, Human
aagaaccaggaucucuggagaaacaguugggc

SEQ ID NO: 23554 - RNA, 32 nt, Human
aagaaccaggccagauuggugugcacagugcc

SEQ ID NO: 23555 - RNA, 32 nt, Human
aagaaccagggucugucauccccacagccccu

SEQ ID NO: 23556 - RNA, 32 nt, Human
aagaacccccaugaacaccaacaucuccaggu

SEQ ID NO: 23557 - RNA, 32 nt, Human
aagaacccuuagacccucagagcuggaggugu

SEQ ID NO: 23558 - RNA, 21 nt, Human
aagaacccuuaguguccugua

SEQ ID NO: 23559 - RNA, 32 nt, Human
aagaaccgguuuccucccagacuaugucuuac

SEQ ID NO: 23560 - RNA, 32 nt, Human
aagaaccguuuggaaauaaaucacauagagcc

SEQ ID NO: 23561 - RNA, 32 nt, Human
aagaaccuagucuagagacaaugaugcuaguu

SEQ ID NO: 23562 - RNA, 32 nt, Human
aagaaccuaucucugaaaacauagaaguuucc

SEQ ID NO: 23563 - RNA, 32 nt, Human
aagaaccucuacuuaaaccucacaucuuauau

SEQ ID NO: 23564 - RNA, 32 nt, Human
aagaaccugaauacugaacuugauucaggcag

SEQ ID NO: 23565 - RNA, 32 nt, Human
aagaaccugccugagcggcugcuccgagaaag

SEQ ID NO: 23566 - RNA, 32 nt, Human
aagaaccugccugauggggagugucggcugug

SEQ ID NO: 23567 - RNA, 32 nt, Human
aagaaccugggagcuggaggcugguccaccuc

SEQ ID NO: 23568 - RNA, 32 nt, Human
aagaaccuggucacaggacucugccuccucuu

SEQ ID NO: 23569 - RNA, 32 nt, Human
aagaaccuucuagucugaucugauccacugac

SEQ ID NO: 23570 - RNA, 32 nt, Human
aagaaccuugcgauuugcacauauugaguuua

SEQ ID NO: 23571 - RNA, 32 nt, Human
aagaaccuuuuaaacaaaucguccugucacaa

SEQ ID NO: 23572 - RNA, 32 nt, Human
aagaacgcugaacccaaggucuugccucaaaa

SEQ ID NO: 23573 - RNA, 32 nt, Human
aagaacgcuuuccccacugugugucuucuccc

SEQ ID NO: 23574 - RNA, 32 nt, Human
aagaacggcugggcucaaagauaaaaggaagg

SEQ ID NO: 23575 - RNA, 32 nt, Human
aagaacgggaagcauuuucuuccucaccuuug

SEQ ID NO: 23576 - RNA, 32 nt, Human
aagaacguaguuuggaaaacacuggccuaucg

SEQ ID NO: 23577 - RNA, 32 nt, Human
aagaacguauuguuguauuccuccaguguuaa

SEQ ID NO: 23578 - RNA, 32 nt, Human
aagaacgucauuuugggaccuauaucucagug

SEQ ID NO: 23579 - RNA, 32 nt, Human
aagaacgugccaggcaggaggcccccugaagu

SEQ ID NO: 23580 - RNA, 32 nt, Human
aagaacguggccaccugcccagcuucacaccu

SEQ ID NO: 23581 - RNA, 32 nt, Human
aagaacuaaagaaggagaaggaagaggaagaa

SEQ ID NO: 23582 - RNA, 32 nt, Human
aagaacuaaaucauaggccgggcacagucgcu

SEQ ID NO: 23583 - RNA, 22 nt, Human
aagaacuacagaacuguuucag

SEQ ID NO: 23584 - RNA, 32 nt, Human
aagaacuacuucacaguaguugcagugaggau

SEQ ID NO: 23585 - RNA, 32 nt, Human
aagaacucaacauggcaaagcaaaugguaaaa

SEQ ID NO: 23586 - RNA, 32 nt, Human
aagaacucaccacaagccaccuuuuguagugu

SEQ ID NO: 23587 - RNA, 32 nt, Human
aagaacucagcaaucauuggcaagaagagcaa

SEQ ID NO: 23588 - RNA, 32 nt, Human
aagaacucauacgugggaauguuuucacuggc

SEQ ID NO: 23589 - RNA, 20 nt, Human
aagaacuccacaacugaaga

SEQ ID NO: 23590 - RNA, 32 nt, Human
aagaacuccaggagacaggccugaacucuaga

SEQ ID NO: 23591 - RNA, 32 nt, Human
aagaacucucaugccuggccaucccaguguac

SEQ ID NO: 23592 - RNA, 32 nt, Human
aagaacucugcagcuuccugccuucuggguca

SEQ ID NO: 23593 - RNA, 32 nt, Human
aagaacugagccuggucggcugaggccagucc

SEQ ID NO: 23594 - RNA, 32 nt, Human
aagaacugaugcuccuugggugcugcugcuac

SEQ ID NO: 23595 - RNA, 32 nt, Human
aagaacugcauagguuacucucaguauaugau

SEQ ID NO: 23596 - RNA, 32 nt, Human
aagaacugccaagacguuaaagaagggugaag

SEQ ID NO: 23597 - RNA, 32 nt, Human
aagaacugcugcaggucgaggggaagagagga

SEQ ID NO: 23598 - RNA, 32 nt, Human
aagaacuggaaccccagcuucccuccagccuc

SEQ ID NO: 23599 - RNA, 24 nt, Human
aagaacugggauuacaggcaugag

SEQ ID NO: 23600 - RNA, 32 nt, Human
aagaacugggauuacaggcaugaggcaccgug

SEQ ID NO: 23601 - RNA, 21 nt, Human
aagaacugggcuggaauuagc

SEQ ID NO: 23602 - RNA, 32 nt, Human
aagaacuggucuuggucuaucaguaccucuuc

SEQ ID NO: 23603 - RNA, 32 nt, Human
aagaacuuaaccaguucuccccagaucucagc

SEQ ID NO: 23604 - RNA, 32 nt, Human
aagaacuuacugauucuugagaacaaagacua

SEQ ID NO: 23605 - RNA, 32 nt, Human
aagaacuucagaaaucugcaacauaauuuuau

SEQ ID NO: 23606 - RNA, 32 nt, Human
aagaacuucagguuguucugauucuugagccu

SEQ ID NO: 23607 - RNA, 32 nt, Human
aagaacuuccccuucccugucucccaucccuc

SEQ ID NO: 23608 - RNA, 32 nt, Human
aagaacuuccuugagucacauucuccuuaaaa

SEQ ID NO: 23609 - RNA, 32 nt, Human
aagaacuugcccugacagccucuggcucccgc

SEQ ID NO: 23610 - RNA, 32 nt, Human
aagaacuugcgugugcugggggagaggaagcc

SEQ ID NO: 23611 - RNA, 32 nt, Human
aagaacuuggagcaaaaauucccacugucaua

SEQ ID NO: 23612 - RNA, 32 nt, Human
aagaacuugggucauggggaggaagcacagcu

SEQ ID NO: 23613 - RNA, 32 nt, Human
aagaacuugguggccugggucccuggagcccu

SEQ ID NO: 23614 - RNA, 32 nt, Human
aagaacuugucccucaggcuuguugcccucug

SEQ ID NO: 23615 - RNA, 32 nt, Human
aagaacuuucccggcggggaggaccggagaca

SEQ ID NO: 23616 - RNA, 32 nt, Human
aagaacuuugacuggccggcagccugcauugc

SEQ ID NO: 23617 - RNA, 32 nt, Human
aagaagaaaagaaagaaagaaagaaagagaaa

SEQ ID NO: 23618 - RNA, 32 nt, Human
aagaagaaaagcuuggaguagagcagaaggga

SEQ ID NO: 23619 - RNA, 32 nt, Human
aagaagaaaauguuaauuucuguaagaauaaa

SEQ ID NO: 23620 - RNA, 32 nt, Human
aagaagaaagaaagagggaaagagaaauaaaa

SEQ ID NO: 23621 - RNA, 32 nt, Human
aagaagaaagagagaagggggaagggaaagga

SEQ ID NO: 23622 - RNA, 32 nt, Human
aagaagaaagagcgggagaaccaaauaaggca

SEQ ID NO: 23623 - RNA, 32 nt, Human
aagaagaaaggagagcguauuuuaguuucaaa

SEQ ID NO: 23624 - RNA, 32 nt, Human
aagaagaaccagacugaggaaaagaggcuuuu

SEQ ID NO: 23625 - RNA, 24 nt, Human
aagaagaacucucugaccuccuca

SEQ ID NO: 23626 - RNA, 32 nt, Human
aagaagaagaaggaggaggaggaggaggagga

SEQ ID NO: 23627 - RNA, 32 nt, Human
aagaagaagaggaagaagaaaaagaggaagaa

SEQ ID NO: 23628 - RNA, 32 nt, Human
aagaagaagaggaggaagagagggaaagagag

SEQ ID NO: 23629 - RNA, 32 nt, Human
aagaagaagaggaggaggaggaggaggaagaa

SEQ ID NO: 23630 - RNA, 32 nt, Human
aagaagaaggaggaggaggaggaggaggagga

SEQ ID NO: 23631 - RNA, 32 nt, Human
aagaagaaggcagugggaaaacuggguuuauc

SEQ ID NO: 23632 - RNA, 32 nt, Human
aagaagaaggugggaggaugugaauuguuagu

SEQ ID NO: 23633 - RNA, 32 nt, Human
aagaagaaguagucuguaggccuugucuguua

SEQ ID NO: 23634 - RNA, 32 nt, Human
aagaagaauaagcaagaaagaaaagaaggaag

SEQ ID NO: 23635 - RNA, 24 nt, Human
aagaagaaugagcucaacauucca

SEQ ID NO: 23636 - RNA, 32 nt, Human
aagaagaauuccaguguggugaugccaugccc

SEQ ID NO: 23637 - RNA, 32 nt, Human
aagaagacaccagagaagccuaugaugacaag

SEQ ID NO: 23638 - RNA, 32 nt, Human
aagaagaccaaguaagaggagcuucaucucag

SEQ ID NO: 23639 - RNA, 32 nt, Human
aagaagaccugacaaaccaggaaugauuucau

SEQ ID NO: 23640 - RNA, 32 nt, Human
aagaagacgaggaggaugaagauggugaagaa

SEQ ID NO: 23641 - RNA, 32 nt, Human
aagaagacugacuggguggaggcucugccuug

SEQ ID NO: 23642 - RNA, 23 nt, Human
aagaagacugcagcaaggucaga

SEQ ID NO: 23643 - RNA, 32 nt, Human
aagaagacugggcugguguaagaaauagaucc

SEQ ID NO: 23644 - RNA, 32 nt, Human
aagaagacuguugccacuuaaccauuccaugc

SEQ ID NO: 23645 - RNA, 32 nt, Human
aagaagacuuagaaacauagcucaaagugaac

SEQ ID NO: 23646 - RNA, 32 nt, Human
aagaagagaaacaguaaccucacuuugaaaau

SEQ ID NO: 23647 - RNA, 32 nt, Human
aagaagagaaagaggaagggaaagaaagagau

SEQ ID NO: 23648 - RNA, 32 nt, Human
aagaagagaagagauuggcaaauggggcuccu

SEQ ID NO: 23649 - RNA, 32 nt, Human
aagaagagacauccuccagacucuccaggcaa

SEQ ID NO: 23650 - RNA, 32 nt, Human
aagaagagagaagagagacaaagaucacuaca

SEQ ID NO: 23651 - RNA, 32 nt, Human
aagaagagagaaucacuugagcucaggaguuc

SEQ ID NO: 23652 - RNA, 32 nt, Human
aagaagagagagccuguggggauagccuuauc

SEQ ID NO: 23653 - RNA, 32 nt, Human
aagaagagagagugugacagagagggagagga

SEQ ID NO: 23654 - RNA, 32 nt, Human
aagaagagagauuugugccucugugauccuca

SEQ ID NO: 23655 - RNA, 32 nt, Human
aagaagagagcuucucuuccuccucuggacgc

SEQ ID NO: 23656 - RNA, 32 nt, Human
aagaagagaggaagcgggguaguggguggggg

SEQ ID NO: 23657 - RNA, 32 nt, Human
aagaagagagggaggaagaaagggagagagaa

SEQ ID NO: 23658 - RNA, 32 nt, Human
aagaagagagguggggguggaggggaauuagu

SEQ ID NO: 23659 - RNA, 32 nt, Human
aagaagagauucacaaaaacaaagaaucacaa

SEQ ID NO: 23660 - RNA, 31 nt, Human
aagaagagauuucucccuguuauaagcagca

SEQ ID NO: 23661 - RNA, 32 nt, Human
aagaagagauuuuuagagugggaagaagaggc

SEQ ID NO: 23662 - RNA, 32 nt, Human
aagaagagcaugggagaggugggagggguucu

SEQ ID NO: 23663 - RNA, 32 nt, Human
aagaagagccaugggacacagaguugacccag

SEQ ID NO: 23664 - RNA, 32 nt, Human
aagaagagcuucuauuuuuggaaagggcugcu

SEQ ID NO: 23665 - RNA, 20 nt, Human
aagaagaggaaagcaaggua

SEQ ID NO: 23666 - RNA, 32 nt, Human
aagaagaggaagaaugacccuuugcauggcac

SEQ ID NO: 23667 - RNA, 32 nt, Human
aagaagaggaagacgaggaggaaugggggccg

SEQ ID NO: 23668 - RNA, 32 nt, Human
aagaagaggaagagacaucaguaaugcaugca

SEQ ID NO: 23669 - RNA, 32 nt, Human
aagaagaggaagagaggccugagcgagcauau

SEQ ID NO: 23670 - RNA, 32 nt, Human
aagaagaggaagaggaaagaaagacaagucag

SEQ ID NO: 23671 - RNA, 32 nt, Human
aagaagaggagagagaaagaaagggagagaag

SEQ ID NO: 23672 - RNA, 32 nt, Human
aagaagaggagccucagaagaaaacaaaguuc

SEQ ID NO: 23673 - RNA, 32 nt, Human
aagaagaggaggaagacgaggauuaauuucau

SEQ ID NO: 23674 - RNA, 24 nt, Human
aagaagaggaggagacgccaagca

SEQ ID NO: 23675 - RNA, 32 nt, Human
aagaagaggaggaggagagcgacgggacggga

SEQ ID NO: 23676 - RNA, 32 nt, Human
aagaagaggaggaggaggaagaggaggaggag

SEQ ID NO: 23677 - RNA, 32 nt, Human
aagaagaggaggaggaggagaugguggccgag

SEQ ID NO: 23678 - RNA, 32 nt, Human
aagaagaggaggaggaggaggaggaagaagaa

SEQ ID NO: 23679 - RNA, 32 nt, Human
aagaagaggaggaggaggaggaggaggaggag

SEQ ID NO: 23680 - RNA, 22 nt, Human
aagaagaggaggaggccaggca

SEQ ID NO: 23681 - RNA, 32 nt, Human
aagaagaggcugcugucaacacacacaguccc

SEQ ID NO: 23682 - RNA, 32 nt, Human
aagaagagggccugggagaagagucugacgag

SEQ ID NO: 23683 - RNA, 32 nt, Human
aagaagagggcuguggucauacacacugugua

SEQ ID NO: 23684 - RNA, 32 nt, Human
aagaagagggucugcauuuuccuaaacccagu

SEQ ID NO: 23685 - RNA, 32 nt, Human
aagaagagguacucggagcuggagcagcagcu

SEQ ID NO: 23686 - RNA, 32 nt, Human
aagaagaggucacuagauguugcagugaaaaa

SEQ ID NO: 23687 - RNA, 32 nt, Human
aagaagaggugaccccgggucugguggauuuc

SEQ ID NO: 23688 - RNA, 32 nt, Human
aagaagaguaauuucaugaaugcagacuacau

SEQ ID NO: 23689 - RNA, 32 nt, Human
aagaagaguauuacagccuggaccagcagagc

SEQ ID NO: 23690 - RNA, 32 nt, Human
aagaagaguccaaauacaguagcuuaaauuua

SEQ ID NO: 23691 - RNA, 32 nt, Human
aagaagagugugaccaggagaccuuaugcuac

SEQ ID NO: 23692 - RNA, 32 nt, Human
aagaagaguguucuucugguaaagcuaaaauu

SEQ ID NO: 23693 - RNA, 32 nt, Human
aagaagaguuaccucauuuucucuacaugauc

SEQ ID NO: 23694 - RNA, 32 nt, Human
aagaagaguuccggcagcuuuccccaggaaag

SEQ ID NO: 23695 - RNA, 32 nt, Human
aagaagauacacugcagcugaagagggcuggg

SEQ ID NO: 23696 - RNA, 32 nt, Human
aagaagaucagucacccaaaaagauaaaauau

SEQ ID NO: 23697 - RNA, 32 nt, Human
aagaagaucugggggaauaaaaagccaacagu

SEQ ID NO: 23698 - RNA, 31 nt, Human
aagaagaugaauuuggcugagauuugugaua

SEQ ID NO: 23699 - RNA, 32 nt, Human
aagaagaugaugacuagcaguacucugaaugg

SEQ ID NO: 23700 - RNA, 31 nt, Human
aagaagaugaugagacagaggcagagccauu

SEQ ID NO: 23701 - RNA, 32 nt, Human
aagaagaugccauugcacuccagccugggcaa

SEQ ID NO: 23702 - RNA, 32 nt, Human
aagaagauggagacucuuaagcaaagaauggu

SEQ ID NO: 23703 - RNA, 32 nt, Human
aagaagauggauguccucaaaagagaaggaac

SEQ ID NO: 23704 - RNA, 32 nt, Human
aagaagauggggaaaugagagaauacaucuuu

SEQ ID NO: 23705 - RNA, 32 nt, Human
aagaagauucucgccccuucccucucucccug

SEQ ID NO: 23706 - RNA, 32 nt, Human
aagaagauugugcuaaggcuugagugcauuga

SEQ ID NO: 23707 - RNA, 32 nt, Human
aagaagcaaaaagaggaggaggaagaggagcu

SEQ ID NO: 23708 - RNA, 32 nt, Human
aagaagcaaaguuauaauguguuucauuuugc

SEQ ID NO: 23709 - RNA, 32 nt, Human
aagaagcaacagaaaagaccaaaguggaagag

SEQ ID NO: 23710 - RNA, 32 nt, Human
aagaagcaagcucucugucaaugggaggugca

SEQ ID NO: 23711 - RNA, 32 nt, Human
aagaagcacagaauuccucaacucccagugug

SEQ ID NO: 23712 - RNA, 32 nt, Human
aagaagcaccugccauuuagagcugcugaacu

SEQ ID NO: 23713 - RNA, 32 nt, Human
aagaagcagaagaagaacuccaggcaggaagc

SEQ ID NO: 23714 - RNA, 32 nt, Human
aagaagcagaggccuccucuggagugagaggc

SEQ ID NO: 23715 - RNA, 32 nt, Human
aagaagcagccuguuuucacucagcuuaauuc

SEQ ID NO: 23716 - RNA, 32 nt, Human
aagaagcagcucaagggcaggaguaugaaacu

SEQ ID NO: 23717 - RNA, 32 nt, Human
aagaagcaggagaaggcaacugagauccuuca

SEQ ID NO: 23718 - RNA, 32 nt, Human
aagaagcaggagcugcugaaguugcuggucaa

SEQ ID NO: 23719 - RNA, 32 nt, Human
aagaagcaggagguggagaagacccagugaag

SEQ ID NO: 23720 - RNA, 32 nt, Human
aagaagcaggccgagggugguggcucacgcau

SEQ ID NO: 23721 - RNA, 32 nt, Human
aagaagcauauauggguuggaauuaugccaaa

SEQ ID NO: 23722 - RNA, 32 nt, Human
aagaagcauggcgcaccagccucugcaacuag

SEQ ID NO: 23723 - RNA, 32 nt, Human
aagaagccaaagcagaaaccccugauaaaccc

SEQ ID NO: 23724 - RNA, 32 nt, Human
aagaagccacaggcagggccugagggagcccc

SEQ ID NO: 23725 - RNA, 32 nt, Human
aagaagccacauuccucauuggucaguuucuu

SEQ ID NO: 23726 - RNA, 32 nt, Human
aagaagccaccugcauagccguauccauuacc

SEQ ID NO: 23727 - RNA, 32 nt, Human
aagaagccagauccuagccacuuggagcugcc

SEQ ID NO: 23728 - RNA, 32 nt, Human
aagaagccagcaggcgaaaagcagggacugcc

SEQ ID NO: 23729 - RNA, 32 nt, Human
aagaagccagggaagcagugcaauggcuucaa

SEQ ID NO: 23730 - RNA, 32 nt, Human
aagaagcccauuuugaggccauuuugagccuu

SEQ ID NO: 23731 - RNA, 32 nt, Human
aagaagcccuccgagguuuuccggacagacuu

SEQ ID NO: 23732 - RNA, 32 nt, Human
aagaagcccugcccuccagccacagcagucca

SEQ ID NO: 23733 - RNA, 32 nt, Human
aagaagcccugccuacugugcccuguggccuu

SEQ ID NO: 23734 - RNA, 32 nt, Human
aagaagcccugccugcccucugccaccgggcu

SEQ ID NO: 23735 - RNA, 32 nt, Human
aagaagccgaaaccaagcaaaucagauggccc

SEQ ID NO: 23736 - RNA, 32 nt, Human
aagaagccggacgacagccacacacacgacga

SEQ ID NO: 23737 - RNA, 32 nt, Human
aagaagccuggguccaggcucuccccuucccc

SEQ ID NO: 23738 - RNA, 32 nt, Human
aagaagccuuaaaugagagcuaauccaauuua

SEQ ID NO: 23739 - RNA, 32 nt, Human
aagaagcggggagagagagggauagaaaacaa

SEQ ID NO: 23740 - RNA, 32 nt, Human
aagaagcuaugcugcuucccagccuggcuucc

SEQ ID NO: 23741 - RNA, 32 nt, Human
aagaagcucaaggaagcucagggaaaauggac

SEQ ID NO: 23742 - RNA, 32 nt, Human
aagaagcucaucgcugguuuaagcacagguuu

SEQ ID NO: 23743 - RNA, 32 nt, Human
aagaagcugaggcaccuccuacucccaucuga

SEQ ID NO: 23744 - RNA, 32 nt, Human
aagaagcugauggaucuuucucaggacuggca

SEQ ID NO: 23745 - RNA, 32 nt, Human
aagaagcugcugguucuguaccacaggccuca

SEQ ID NO: 23746 - RNA, 32 nt, Human
aagaagcugggcaugggugcaccccacccccu

SEQ ID NO: 23747 - RNA, 32 nt, Human
aagaagcugggcuguaacaauucaggguuuuc

SEQ ID NO: 23748 - RNA, 32 nt, Human
aagaagcuguuguccccucucgaacccugacc

SEQ ID NO: 23749 - RNA, 32 nt, Human
aagaagcuuccccucauggcucuguccaccac

SEQ ID NO: 23750 - RNA, 32 nt, Human
aagaagcuugcagcuuacaucuguccugggcu

SEQ ID NO: 23751 - RNA, 32 nt, Human
aagaaggaaaccaggaguuuuguuuagcgagu

SEQ ID NO: 23752 - RNA, 32 nt, Human
aagaaggaaauggaagaauucagguacauuaa

SEQ ID NO: 23753 - RNA, 32 nt, Human
aagaaggaacacauauuauacacauaaugaug

SEQ ID NO: 23754 - RNA, 32 nt, Human
aagaaggaagaaaagaaggaguggaggaagac

SEQ ID NO: 23755 - RNA, 32 nt, Human
aagaaggaaggaaggaaggaaggaaggaagga

SEQ ID NO: 23756 - RNA, 32 nt, Human
aagaaggaagguggcgaaggcagugagugcuc

SEQ ID NO: 23757 - RNA, 32 nt, Human
aagaaggaaguaaaagggagagagggagggag

SEQ ID NO: 23758 - RNA, 32 nt, Human
aagaaggacaagaaggaggaagacaagaagug

SEQ ID NO: 23759 - RNA, 32 nt, Human
aagaaggacacagagccggggagcagccccug

SEQ ID NO: 23760 - RNA, 32 nt, Human
aagaaggacguggagcgcaaaagagaaaucca

SEQ ID NO: 23761 - RNA, 32 nt, Human
aagaaggagaaaggaaagaaaaaccuaguuuc

SEQ ID NO: 23762 - RNA, 32 nt, Human
aagaaggagaagaaguacauggaggccaggcc

SEQ ID NO: 23763 - RNA, 32 nt, Human
aagaaggagacagaugccaucuggggagggac

SEQ ID NO: 23764 - RNA, 32 nt, Human
aagaaggagaccaggaagccacccuaacacuc

SEQ ID NO: 23765 - RNA, 32 nt, Human
aagaaggagagggagaaaggcccgagccccug

SEQ ID NO: 23766 - RNA, 32 nt, Human
aagaaggaggaaugcuggacuggaggccccug

SEQ ID NO: 23767 - RNA, 32 nt, Human
aagaaggaggaggaggaggaggaggaggaggg

SEQ ID NO: 23768 - RNA, 32 nt, Human
aagaaggaggcuggagagaccaggauccuucc

SEQ ID NO: 23769 - RNA, 32 nt, Human
aagaaggagguggacgaugccuuaguggagau

SEQ ID NO: 23770 - RNA, 32 nt, Human
aagaaggagucacuguucauucugagcaaaaa

SEQ ID NO: 23771 - RNA, 32 nt, Human
aagaaggcacaacuaucucaggccuuaaaugg

SEQ ID NO: 23772 - RNA, 32 nt, Human
aagaaggcaccuuggaaggcacugccuugggc

SEQ ID NO: 23773 - RNA, 32 nt, Human
aagaaggcauccagcaagaacugcacaagaaa

SEQ ID NO: 23774 - RNA, 32 nt, Human
aagaaggcaugucugggcaagugggugccuuu

SEQ ID NO: 23775 - RNA, 32 nt, Human
aagaaggccaucaagguguucuccagugccaa

SEQ ID NO: 23776 - RNA, 32 nt, Human
aagaaggccauggacagaacggagacuagguu

SEQ ID NO: 23777 - RNA, 32 nt, Human
aagaaggccuuugugcccccaaaaagaggcga

SEQ ID NO: 23778 - RNA, 22 nt, Human
aagaaggcggccugcaccagga

SEQ ID NO: 23779 - RNA, 32 nt, Human
aagaaggcguggagaagagggagggagcgaga

SEQ ID NO: 23780 - RNA, 32 nt, Human
aagaaggcuggauucugagguccugggaagga

SEQ ID NO: 23781 - RNA, 32 nt, Human
aagaagggaagagagcagcaguagcuuaagcc

SEQ ID NO: 23782 - RNA, 32 nt, Human
aagaagggaagucacuugcuucauggccaggg

SEQ ID NO: 23783 - RNA, 22 nt, Human
aagaagggacuggacauuccca

SEQ ID NO: 23784 - RNA, 32 nt, Human
aagaagggagagagaguggaugccagggacac

SEQ ID NO: 23785 - RNA, 32 nt, Human
aagaagggauccucuuucaaaggcuaccuuua

SEQ ID NO: 23786 - RNA, 32 nt, Human
aagaagggcacuaugaauuaagccacacaaau

SEQ ID NO: 23787 - RNA, 32 nt, Human
aagaagggcaggcaggaaggggaggggcagug

SEQ ID NO: 23788 - RNA, 32 nt, Human
aagaaggggaaaaacugacaacuaacaaaacc

SEQ ID NO: 23789 - RNA, 32 nt, Human
aagaaggggaaacugaggcccagggaggagag

SEQ ID NO: 23790 - RNA, 32 nt, Human
aagaaggggagaggagguugugugggacaagg

SEQ ID NO: 23791 - RNA, 32 nt, Human
aagaagggggaaggaaaacaaacuucgccacu

SEQ ID NO: 23792 - RNA, 32 nt, Human
aagaaggggucuaauaacaaacuacagcaaca

SEQ ID NO: 23793 - RNA, 32 nt, Human
aagaaggucaaggcuuugcuuuugaaaauauc

SEQ ID NO: 23794 - RNA, 32 nt, Human
aagaaggugaagcccaaaagcucuuaaggaga

SEQ ID NO: 23795 - RNA, 32 nt, Human
aagaaggugauuagucaguagggugugaaaau

SEQ ID NO: 23796 - RNA, 32 nt, Human
aagaaggugccugcuucucuuuugccuucuac

SEQ ID NO: 23797 - RNA, 32 nt, Human
aagaaggugcuguucagagaaggagaaggaaa

SEQ ID NO: 23798 - RNA, 32 nt, Human
aagaaggugguuuuccccacaucccuuugcau

SEQ ID NO: 23799 - RNA, 32 nt, Human
aagaagguuagauuugcacagucuacugggua

SEQ ID NO: 23800 - RNA, 32 nt, Human
aagaagguuauggauaugaagaugcauuuuug

SEQ ID NO: 23801 - RNA, 32 nt, Human
aagaagguuuucagugauuauaccucagguau

SEQ ID NO: 23802 - RNA, 21 nt, Human
aagaaguaccugccucugccu

SEQ ID NO: 23803 - RNA, 32 nt, Human
aagaaguagcugccagaugacagaacaaagua

SEQ ID NO: 23804 - RNA, 32 nt, Human
aagaaguaggaaaugagggcagggggauacag

SEQ ID NO: 23805 - RNA, 32 nt, Human
aagaaguaguggcuccaagaacugaaugcaaa

SEQ ID NO: 23806 - RNA, 32 nt, Human
aagaaguagugguucauccaucagggggccag

SEQ ID NO: 23807 - RNA, 32 nt, Human
aagaagucaagcagauuuuuaaggcuuuggag

SEQ ID NO: 23808 - RNA, 32 nt, Human
aagaagucagcagucuacagugcaaaagaggg

SEQ ID NO: 23809 - RNA, 32 nt, Human
aagaagucagcuuuuuggauucugaguauuuu

SEQ ID NO: 23810 - RNA, 32 nt, Human
aagaagucauuugccagcagauuucuuagagg

SEQ ID NO: 23811 - RNA, 32 nt, Human
aagaaguccccagcagcacacacacauuucca

SEQ ID NO: 23812 - RNA, 32 nt, Human
aagaaguccuccucccuuucugggcuuccaua

SEQ ID NO: 23813 - RNA, 32 nt, Human
aagaagucuguggaguugagugguuacuucaa

SEQ ID NO: 23814 - RNA, 32 nt, Human
aagaagugacgcaucucuggccugugagcccc

SEQ ID NO: 23815 - RNA, 31 nt, Human
aagaagugacuuccguugcauaccaaagccg

SEQ ID NO: 23816 - RNA, 32 nt, Human
aagaagugagcaaagacguggccacauuucua

SEQ ID NO: 23817 - RNA, 23 nt, Human
aagaagugaggauguagaagcca

SEQ ID NO: 23818 - RNA, 32 nt, Human
aagaagugaugccaccaucucuagccauaaua

SEQ ID NO: 23819 - RNA, 32 nt, Human
aagaagugaugggaaugcagagacaggaggca

SEQ ID NO: 23820 - RNA, 32 nt, Human
aagaagugauugagccacaaguauacugaagg

SEQ ID NO: 23821 - RNA, 32 nt, Human
aagaagugcaggcagagccaucugccaggccc

SEQ ID NO: 23822 - RNA, 32 nt, Human
aagaagugcuuggcuggggaugguggcucacg

SEQ ID NO: 23823 - RNA, 20 nt, Human
aagaaguggaaccugggacc

SEQ ID NO: 23824 - RNA, 32 nt, Human
aagaaguggaguugguggaugggugggcaugg

SEQ ID NO: 23825 - RNA, 32 nt, Human
aagaaguggcagccuggccccugcugccggac

SEQ ID NO: 23826 - RNA, 32 nt, Human
aagaagugggaagaagaaggagcucuacaggg

SEQ ID NO: 23827 - RNA, 21 nt, Human
aagaagugggauuagaagaca

SEQ ID NO: 23828 - RNA, 32 nt, Human
aagaagugggguggaagaaguggggugggacg

SEQ ID NO: 23829 - RNA, 32 nt, Human
aagaagugguggagccucagggccagggcagg

SEQ ID NO: 23830 - RNA, 32 nt, Human
aagaaguuacugggagcugcuauuuuauauua

SEQ ID NO: 23831 - RNA, 32 nt, Human
aagaaguucagacacuucuggaaaugaagcaa

SEQ ID NO: 23832 - RNA, 32 nt, Human
aagaaguucugcaaaccuccccuggacccuug

SEQ ID NO: 23833 - RNA, 32 nt, Human
aagaaguugauauuucuuauacuuacaaagag

SEQ ID NO: 23834 - RNA, 32 nt, Human
aagaaguugcuuccuguugccagcaugaccua

SEQ ID NO: 23835 - RNA, 32 nt, Human
aagaaguuggaucauucagugaagauuugggg

SEQ ID NO: 23836 - RNA, 32 nt, Human
aagaaguugguguuucgcugggcccugguacu

SEQ ID NO: 23837 - RNA, 32 nt, Human
aagaaguuuaguguuuugcagcuuugagcuag

SEQ ID NO: 23838 - RNA, 21 nt, Human
aagaaguuuauccggaagcca

SEQ ID NO: 23839 - RNA, 25 nt, Human
aagaauaaaauaugacuguuuuagg

SEQ ID NO: 23840 - RNA, 32 nt, Human
aagaauaacagaauaggaggaaaacaagggga

SEQ ID NO: 23841 - RNA, 32 nt, Human
aagaauaaccacugcacuccaaccugggcaac

SEQ ID NO: 23842 - RNA, 32 nt, Human
aagaauaagucauggagccugaagggugccua

SEQ ID NO: 23843 - RNA, 32 nt, Human
aagaauagaaagagggagagguuggugccgcc

SEQ ID NO: 23844 - RNA, 32 nt, Human
aagaauagacuugcuugggugguaguacguug

SEQ ID NO: 23845 - RNA, 32 nt, Human
aagaauagagguuauucuguaauggaaaagug

SEQ ID NO: 23846 - RNA, 32 nt, Human
aagaauagaguuaggcaccagaagaagaguag

SEQ ID NO: 23847 - RNA, 32 nt, Human
aagaauagccugggcaacauagcaagacccca

SEQ ID NO: 23848 - RNA, 32 nt, Human
aagaauagcuuugacaaaaugauugaagccau

SEQ ID NO: 23849 - RNA, 32 nt, Human
aagaauagguggaggaaucauggccaaaucaa

SEQ ID NO: 23850 - RNA, 32 nt, Human
aagaauaguauuaaaagucagaggcuuuacua

SEQ ID NO: 23851 - RNA, 32 nt, Human
aagaauaguucucauuggaggcugaggucgaa

SEQ ID NO: 23852 - RNA, 32 nt, Human
aagaauauaaugaggaauagcuggauucuaga

SEQ ID NO: 23853 - RNA, 22 nt, Human
aagaauauauaaccacuguagg

SEQ ID NO: 23854 - RNA, 32 nt, Human
aagaauaucugucauccugcuaaugugcauug

SEQ ID NO: 23855 - RNA, 23 nt, Human
aagaauaugaaaaagcagagcga

SEQ ID NO: 23856 - RNA, 32 nt, Human
aagaauauguacauucuugcucugcacuguau

SEQ ID NO: 23857 - RNA, 32 nt, Human
aagaauauguugugagcaucuuuccaugauau

SEQ ID NO: 23858 - RNA, 32 nt, Human
aagaauauuaguuguauauaaaauuagauuag

SEQ ID NO: 23859 - RNA, 32 nt, Human
aagaauauugaggcugggugcaaugcaucaca

SEQ ID NO: 23860 - RNA, 32 nt, Human
aagaauauugccugguuaaaauucugcauugc

SEQ ID NO: 23861 - RNA, 20 nt, Human
aagaauauuucuguucuagg

SEQ ID NO: 23862 - RNA, 32 nt, Human
aagaaucaaaauuccuguuaauaaaagaaaaa

SEQ ID NO: 23863 - RNA, 24 nt, Human
aagaaucaaggaccaaggauccca

SEQ ID NO: 23864 - RNA, 32 nt, Human
aagaaucacagaauucuaguacauguagguaa

SEQ ID NO: 23865 - RNA, 32 nt, Human
aagaaucacccaggccagacacaauggcucau

SEQ ID NO: 23866 - RNA, 32 nt, Human
aagaaucacuggcuucuaugcgcuucuuuucu

SEQ ID NO: 23867 - RNA, 32 nt, Human
aagaaucacuugaacccaggaggcagagugag

SEQ ID NO: 23868 - RNA, 32 nt, Human
aagaaucacuugaacccaggaggcggagguug

SEQ ID NO: 23869 - RNA, 32 nt, Human
aagaaucacuugaacccgggaggcagagguug

SEQ ID NO: 23870 - RNA, 32 nt, Human
aagaaucagaggaggaagaggaagaggaggag

SEQ ID NO: 23871 - RNA, 32 nt, Human
aagaaucauggcucuguagccauuucaaccag

SEQ ID NO: 23872 - RNA, 32 nt, Human
aagaaucauguacuccagccucccuugagaca

SEQ ID NO: 23873 - RNA, 24 nt, Human
aagaaucauguguacuguuuuagg

SEQ ID NO: 23874 - RNA, 32 nt, Human
aagaaucauuccuguacuacagaaggguuaag

SEQ ID NO: 23875 - RNA, 32 nt, Human
aagaauccagaggcggggcucggaugaacccu

SEQ ID NO: 23876 - RNA, 32 nt, Human
aagaauccaguaccuugcacauagaaguagca

SEQ ID NO: 23877 - RNA, 32 nt, Human
aagaauccaucagcaaccucagaccaacccaa

SEQ ID NO: 23878 - RNA, 32 nt, Human
aagaaucccaguuccuccugaccaacccacug

SEQ ID NO: 23879 - RNA, 32 nt, Human
aagaaucccuauaccucauuuguauuuuuaaa

SEQ ID NO: 23880 - RNA, 32 nt, Human
aagaaucccucagagcaggaggccauccugug

SEQ ID NO: 23881 - RNA, 32 nt, Human
aagaauccguguccucccuggaccucagaaug

SEQ ID NO: 23882 - RNA, 32 nt, Human
aagaauccuaaccucaaagggucguggugaga

SEQ ID NO: 23883 - RNA, 32 nt, Human
aagaauccuagaggcaggugacccaccuggag

SEQ ID NO: 23884 - RNA, 32 nt, Human
aagaauccugaggaccuggagugcaaugagaa

SEQ ID NO: 23885 - RNA, 32 nt, Human
aagaauccugcucucccucugccuucugccau

SEQ ID NO: 23886 - RNA, 19 nt, Human
aagaauccugcuuccacca

SEQ ID NO: 23887 - RNA, 32 nt, Human
aagaaucgacuccuuaguaucuugucaugcca

SEQ ID NO: 23888 - RNA, 32 nt, Human
aagaaucgccugaacccgggaggcagaggcug

SEQ ID NO: 23889 - RNA, 32 nt, Human
aagaaucgcuugaacccaggaggcggagguug

SEQ ID NO: 23890 - RNA, 32 nt, Human
aagaaucgcuugaacccgggaggcagagguug

SEQ ID NO: 23891 - RNA, 32 nt, Human
aagaaucuaaaaccagcucugggaaacaaaug

SEQ ID NO: 23892 - RNA, 32 nt, Human
aagaaucuacagccuuccccggcagcccagcc

SEQ ID NO: 23893 - RNA, 26 nt, Human
aagaaucuagcucagaauguuuuagg

SEQ ID NO: 23894 - RNA, 32 nt, Human
aagaaucuauagcauuaguauacacuggcaca

SEQ ID NO: 23895 - RNA, 32 nt, Human
aagaaucucaugaacccaggaggcagagguug

SEQ ID NO: 23896 - RNA, 32 nt, Human
aagaaucucccagagaaggagagguguuuggu

SEQ ID NO: 23897 - RNA, 32 nt, Human
aagaaucuggacaauccugccagccugaaggg

SEQ ID NO: 23898 - RNA, 32 nt, Human
aagaaucugguuuaaauggcauugugguccga

SEQ ID NO: 23899 - RNA, 32 nt, Human
aagaaucuguuccccagcuagguggggaaaau

SEQ ID NO: 23900 - RNA, 32 nt, Human
aagaaucuugaaagaguuugaaugacccaccc

SEQ ID NO: 23901 - RNA, 32 nt, Human
aagaaucuuuucuucccugacccaagaugagg

SEQ ID NO: 23902 - RNA, 32 nt, Human
aagaaugaaguccaggaggagaagggcucauu

SEQ ID NO: 23903 - RNA, 32 nt, Human
aagaaugaaucuucugaaaauauuuuaaguga

SEQ ID NO: 23904 - RNA, 32 nt, Human
aagaaugacagccacagggagauggugguggg

SEQ ID NO: 23905 - RNA, 32 nt, Human
aagaaugaccugggaagccaaaguucagcuca

SEQ ID NO: 23906 - RNA, 32 nt, Human
aagaaugacgcuggcuuaauaggacucuccau

SEQ ID NO: 23907 - RNA, 32 nt, Human
aagaaugaggagaaagcaagaagagugacccc

SEQ ID NO: 23908 - RNA, 32 nt, Human
aagaaugauacagaauuaacuuuaaaaauaaa

SEQ ID NO: 23909 - RNA, 24 nt, Human
aagaaugaugcuucuugcaacaaa

SEQ ID NO: 23910 - RNA, 32 nt, Human
aagaaugcaccacugcaguccagccuaggcaa

SEQ ID NO: 23911 - RNA, 32 nt, Human
aagaaugccgagaaacugcaccucuuauaauu

SEQ ID NO: 23912 - RNA, 32 nt, Human
aagaaugccugagacgcccccagggaauaagg

SEQ ID NO: 23913 - RNA, 32 nt, Human
aagaaugcuugaagucagcgucuuccauucca

SEQ ID NO: 23914 - RNA, 32 nt, Human
aagaaugcuugugauuuuuguacauugauuuu

SEQ ID NO: 23915 - RNA, 32 nt, Human
aagaauggaaaaagaugucccaaugcugcccc

SEQ ID NO: 23916 - RNA, 32 nt, Human
aagaauggaaagguggcuugagcucagcuccu

SEQ ID NO: 23917 - RNA, 32 nt, Human
aagaauggaccuuugaguuaaauccaguguuu

SEQ ID NO: 23918 - RNA, 32 nt, Human
aagaauggagucuaaucccagcacuuugggag

SEQ ID NO: 23919 - RNA, 32 nt, Human
aagaauggagugaagaaaggcaguauggcagg

SEQ ID NO: 23920 - RNA, 32 nt, Human
aagaauggcgaggggagagcagaggagaaggu

SEQ ID NO: 23921 - RNA, 32 nt, Human
aagaauggcguaaacccaggagguggauugcg

SEQ ID NO: 23922 - RNA, 32 nt, Human
aagaauggcgugaacccggaaggcagagcuug

SEQ ID NO: 23923 - RNA, 32 nt, Human
aagaauggcgugaacccgggaggcagagguug

SEQ ID NO: 23924 - RNA, 32 nt, Human
aagaauggcuucaggcuggggcugcagucacc

SEQ ID NO: 23925 - RNA, 32 nt, Human
aagaauggcuugaacccuggaggcagagguug

SEQ ID NO: 23926 - RNA, 32 nt, Human
aagaaugggaaagagaaagagacagagacugg

SEQ ID NO: 23927 - RNA, 32 nt, Human
aagaaugggauaccuccagguuccaguaaaau

SEQ ID NO: 23928 - RNA, 32 nt, Human
aagaaugggggcagugggggaaggaaggggag

SEQ ID NO: 23929 - RNA, 29 nt, Human
aagaauggguaagacguuuucccagcugg

SEQ ID NO: 23930 - RNA, 32 nt, Human
aagaaugguggggaccccuguacuugggggag

SEQ ID NO: 23931 - RNA, 32 nt, Human
aagaauguaacaguguuaguauuuugaauaaa

SEQ ID NO: 23932 - RNA, 32 nt, Human
aagaauguaauaugcagcauucuccaaacuga

SEQ ID NO: 23933 - RNA, 32 nt, Human
aagaauguacccugguagccagccuggcagug

SEQ ID NO: 23934 - RNA, 32 nt, Human
aagaauguaccuuuucuuuuuagaaagccaaa

SEQ ID NO: 23935 - RNA, 32 nt, Human
aagaauguggagaaguacaaggaagcagcucg

SEQ ID NO: 23936 - RNA, 32 nt, Human
aagaauguggagaaguauaaggaagcagcucg

SEQ ID NO: 23937 - RNA, 32 nt, Human
aagaaugugggauuuggagucagacaagccug

SEQ ID NO: 23938 - RNA, 32 nt, Human
aagaauguguuguccaaaaugccugcuuaguu

SEQ ID NO: 23939 - RNA, 32 nt, Human
aagaauguucaucucacuacuauucuucuaca

SEQ ID NO: 23940 - RNA, 32 nt, Human
aagaauguuuaucggcugggcugcagugcccc

SEQ ID NO: 23941 - RNA, 24 nt, Human
aagaauuacaaagacaauggcaua

SEQ ID NO: 23942 - RNA, 32 nt, Human
aagaauuacagaauggaagggaugugugcucu

SEQ ID NO: 23943 - RNA, 32 nt, Human
aagaauucaagauucaguccaaauugcagaaa

SEQ ID NO: 23944 - RNA, 32 nt, Human
aagaauucauacuuaauuccacugacugccac

SEQ ID NO: 23945 - RNA, 32 nt, Human
aagaauucauauaugaaucagaugagaaugcc

SEQ ID NO: 23946 - RNA, 32 nt, Human
aagaauucccauugcccagccucagugcauuu

SEQ ID NO: 23947 - RNA, 32 nt, Human
aagaauuccccuggcauauuacaaagccacca

SEQ ID NO: 23948 - RNA, 32 nt, Human
aagaauucccugagugggccaggcuggugccc

SEQ ID NO: 23949 - RNA, 32 nt, Human
aagaauucgagaucagccugaccaacauggug

SEQ ID NO: 23950 - RNA, 32 nt, Human
aagaauucuaacacaggagcuguccugaggcu

SEQ ID NO: 23951 - RNA, 32 nt, Human
aagaauucuuuguccuuugcugauugguuuug

SEQ ID NO: 23952 - RNA, 32 nt, Human
aagaauugaacccaggagguggagguugcagu

SEQ ID NO: 23953 - RNA, 32 nt, Human
aagaauugaggaagaauggugugggagaggga

SEQ ID NO: 23954 - RNA, 32 nt, Human
aagaauugcuugaacccaggaggcagagguug

SEQ ID NO: 23955 - RNA, 32 nt, Human
aagaauugcuugaacccaggaggcggagguug

SEQ ID NO: 23956 - RNA, 32 nt, Human
aagaauugcuugaacccgggaggcagaggcug

SEQ ID NO: 23957 - RNA, 32 nt, Human
aagaauuggccuggcugggugcaguggcucac

SEQ ID NO: 23958 - RNA, 32 nt, Human
aagaauugguauguaugaugugaucuggucca

SEQ ID NO: 23959 - RNA, 32 nt, Human
aagaauuguauaauauacccccaugaacuugu

SEQ ID NO: 23960 - RNA, 23 nt, Human
aagaauuguuguguaacucaaag

SEQ ID NO: 23961 - RNA, 22 nt, Human
aagaauuuaaagaaucaaaaaa

SEQ ID NO: 23962 - RNA, 32 nt, Human
aagaauuuaaucaggcugggcaccguggcuca

SEQ ID NO: 23963 - RNA, 32 nt, Human
aagaauuuaccagaaauauuugcucaauauga

SEQ ID NO: 23964 - RNA, 32 nt, Human
aagaauuuaguagagacaggagagaggaugaa

SEQ ID NO: 23965 - RNA, 32 nt, Human
aagaauuuauucaccaguuccucugcaaccca

SEQ ID NO: 23966 - RNA, 32 nt, Human
aagaauuucagaaccacugguauccagagaaa

SEQ ID NO: 23967 - RNA, 32 nt, Human
aagaauuucaugaagcauacacaaguaucaau

SEQ ID NO: 23968 - RNA, 32 nt, Human
aagaauuucuucucucaguccaaugguauaau

SEQ ID NO: 23969 - RNA, 32 nt, Human
aagaauuugccaucaguagcaguauuaagcag

SEQ ID NO: 23970 - RNA, 32 nt, Human
aagaauuugcuucuccaaaccucucuuuuggc

SEQ ID NO: 23971 - RNA, 32 nt, Human
aagaauuuggcacaguuacucacuuuguguaa

SEQ ID NO: 23972 - RNA, 23 nt, Human
aagacaaaaacaaaacaacaaca

SEQ ID NO: 23973 - RNA, 32 nt, Human
aagacaaaagcauuuccauuucaacgaguuug

SEQ ID NO: 23974 - RNA, 32 nt, Human
aagacaaaauaacaauagaaaccauucacaca

SEQ ID NO: 23975 - RNA, 32 nt, Human
aagacaaaauucaagaaaacacacacauacau

SEQ ID NO: 23976 - RNA, 20 nt, Human
aagacaaacaaaacaaaaca

SEQ ID NO: 23977 - RNA, 19 nt, Human
aagacaaaccugggugcag

SEQ ID NO: 23978 - RNA, 32 nt, Human
aagacaaacggaugcacccgucuuuagaacca

SEQ ID NO: 23979 - RNA, 32 nt, Human
aagacaaagauccauguagacugggucagcuu

SEQ ID NO: 23980 - RNA, 32 nt, Human
aagacaaagcuccucagugagcugguguauaa

SEQ ID NO: 23981 - RNA, 32 nt, Human
aagacaaaugcccguuuuccuccaguccauga

SEQ ID NO: 23982 - RNA, 32 nt, Human
aagacaacagggugcacugcugccuguacuuc

SEQ ID NO: 23983 - RNA, 32 nt, Human
aagacaacaugcugagaccagaggcuucacca

SEQ ID NO: 23984 - RNA, 32 nt, Human
aagacaaccauccugaagaaguucaaugggga

SEQ ID NO: 23985 - RNA, 32 nt, Human
aagacaaccucggggacauggacacaacaaga

SEQ ID NO: 23986 - RNA, 32 nt, Human
aagacaacggcuguaagagaacuccacaagag

SEQ ID NO: 23987 - RNA, 32 nt, Human
aagacaagaaacaaacuguuguaaaauuucaa

SEQ ID NO: 23988 - RNA, 32 nt, Human
aagacaagagccaaguaaagacagaggcaggg

SEQ ID NO: 23989 - RNA, 32 nt, Human
aagacaagcagggcuaauuccaaaaagcaagg

SEQ ID NO: 23990 - RNA, 32 nt, Human
aagacaagcagguggaggcauccagugauuuc

SEQ ID NO: 23991 - RNA, 32 nt, Human
aagacaaggcucccccucugacccuuccuguu

SEQ ID NO: 23992 - RNA, 32 nt, Human
aagacaagggagcagucccugaagacgcuucu

SEQ ID NO: 23993 - RNA, 22 nt, Human
aagacaaugacuugcacuggga

SEQ ID NO: 23994 - RNA, 32 nt, Human
aagacaaugucagaacaggcuuguaaaugagg

SEQ ID NO: 23995 - RNA, 32 nt, Human
aagacaauguuguaaucccagcaaguugcuaa

SEQ ID NO: 23996 - RNA, 32 nt, Human
aagacaauuaugccaucagacaauguuaagaa

SEQ ID NO: 23997 - RNA, 32 nt, Human
aagacaauucuuuauacaacagugcuaaaaau

SEQ ID NO: 23998 - RNA, 32 nt, Human
aagacacaaaugcaugaacaaguuuuaaugua

SEQ ID NO: 23999 - RNA, 32 nt, Human
aagacacaacggaauagacccaaaaagauaau

SEQ ID NO: 24000 - RNA, 32 nt, Human
aagacacacacccaggcaaccccugggcugug

SEQ ID NO: 24001 - RNA, 32 nt, Human
aagacacacagcaaacggagccucagagugca

SEQ ID NO: 24002 - RNA, 31 nt, Human
aagacacaccagauauuuaggagggaauuag

SEQ ID NO: 24003 - RNA, 32 nt, Human
aagacacagagagagacauugagaugaaacgg

SEQ ID NO: 24004 - RNA, 32 nt, Human
aagacacagaugggguaccugggcacagcggc

SEQ ID NO: 24005 - RNA, 32 nt, Human
aagacacagcagaacagaaaguucaacugcuu

SEQ ID NO: 24006 - RNA, 32 nt, Human
aagacacagccucagaauggccagauggauug

SEQ ID NO: 24007 - RNA, 32 nt, Human
aagacacaggacugugaaagaaagugaugaug

SEQ ID NO: 24008 - RNA, 32 nt, Human
aagacacaggcagggagagacaaagauccagg

SEQ ID NO: 24009 - RNA, 32 nt, Human
aagacacagggagagacaguuggccucaggcu

SEQ ID NO: 24010 - RNA, 19 nt, Human
aagacacauggagcagagc

SEQ ID NO: 24011 - RNA, 32 nt, Human
aagacaccaucuccaucuugaaagaguaacug

SEQ ID NO: 24012 - RNA, 32 nt, Human
aagacaccccuccacagagcuuggcaucaugg

SEQ ID NO: 24013 - RNA, 32 nt, Human
aagacaccccuccagucaacccacagacccca

SEQ ID NO: 24014 - RNA, 32 nt, Human
aagacacccucagaccacagggcggcgccacg

SEQ ID NO: 24015 - RNA, 32 nt, Human
aagacaccuccaggagcccagcucacagccac

SEQ ID NO: 24016 - RNA, 23 nt, Human
aagacacgauuccucagaccagu

SEQ ID NO: 24017 - RNA, 32 nt, Human
aagacacuccccugauuccuacaccgagggaa

SEQ ID NO: 24018 - RNA, 32 nt, Human
aagacacucuggagacagaggaggaaacagug

SEQ ID NO: 24019 - RNA, 32 nt, Human
aagacacucuugauaguucucuuccgauucag

SEQ ID NO: 24020 - RNA, 32 nt, Human
aagacacugaagacuccaaaaaguaggaggaa

SEQ ID NO: 24021 - RNA, 32 nt, Human
aagacacugaauucccaccauuuccuuuucug

SEQ ID NO: 24022 - RNA, 18 nt, Human
aagacacugcugcuuuua

SEQ ID NO: 24023 - RNA, 32 nt, Human
aagacacugucaagccugggccugucaaagcc

SEQ ID NO: 24024 - RNA, 31 nt, Human
aagacacugucucaugggccugugcugucac

SEQ ID NO: 24025 - RNA, 32 nt, Human
aagacacuuuggggaacagaagaacgucuuaa

SEQ ID NO: 24026 - RNA, 32 nt, Human
aagacagaaagccacaggagcccccacguagc

SEQ ID NO: 24027 - RNA, 32 nt, Human
aagacagaaagcccagaaggagcccagaagca

SEQ ID NO: 24028 - RNA, 32 nt, Human
aagacagaaauccaauaucuacauacccuguu

SEQ ID NO: 24029 - RNA, 32 nt, Human
aagacagaacugcucucucugaccuucuucau

SEQ ID NO: 24030 - RNA, 32 nt, Human
aagacagaagcagcugcuggcuucuucagcug

SEQ ID NO: 24031 - RNA, 32 nt, Human
aagacagaaggcgaaggagacccccugccgua

SEQ ID NO: 24032 - RNA, 32 nt, Human
aagacagaccugcaagucuucgucucaaggga

SEQ ID NO: 24033 - RNA, 32 nt, Human
aagacagacuccuuccuguugccuugugaaga

SEQ ID NO: 24034 - RNA, 32 nt, Human
aagacagacuuucccuuccucccagcagcagc

SEQ ID NO: 24035 - RNA, 32 nt, Human
aagacagagaaaagggaaucuugauugaauuc

SEQ ID NO: 24036 - RNA, 32 nt, Human
aagacagagaaaaucacuuauuucucuaagug

SEQ ID NO: 24037 - RNA, 32 nt, Human
aagacagagacuuaaagagauuagagaggugg

SEQ ID NO: 24038 - RNA, 32 nt, Human
aagacagagagugacuaggcagaggaaagaca

SEQ ID NO: 24039 - RNA, 32 nt, Human
aagacagagccccagagucagcucguguuggc

SEQ ID NO: 24040 - RNA, 32 nt, Human
aagacagagcccugaagccuugcucaaggccc

SEQ ID NO: 24041 - RNA, 32 nt, Human
aagacagaggcagagacugaagugaugcugcc

SEQ ID NO: 24042 - RNA, 32 nt, Human
aagacagaggcagagauuggagugacgcaucu

SEQ ID NO: 24043 - RNA, 32 nt, Human
aagacagaggcgggaggauugagugggccagg

SEQ ID NO: 24044 - RNA, 32 nt, Human
aagacagaguccugcagaguccuuccagccua

SEQ ID NO: 24045 - RNA, 32 nt, Human
aagacagagucuuaaagagguuagagaggugg

SEQ ID NO: 24046 - RNA, 32 nt, Human
aagacagagugaugcugucaaugaaagcucuu

SEQ ID NO: 24047 - RNA, 32 nt, Human
aagacagauaaaucugaaggucauguggcauc

SEQ ID NO: 24048 - RNA, 32 nt, Human
aagacagauucucacucaguugcccaggcugg

SEQ ID NO: 24049 - RNA, 32 nt, Human
aagacagcaagaauugguggucugggcuggau

SEQ ID NO: 24050 - RNA, 32 nt, Human
aagacagcaccacugcacuccagccuggguga

SEQ ID NO: 24051 - RNA, 32 nt, Human
aagacagcaccauugcaccccagccugagcaa

SEQ ID NO: 24052 - RNA, 32 nt, Human
aagacagcagaggcacgcauccccuuggagag

SEQ ID NO: 24053 - RNA, 32 nt, Human
aagacagcagugagcuaugcucacaccacugc

SEQ ID NO: 24054 - RNA, 32 nt, Human
aagacagcaguuuccccugcugucacugucuc

SEQ ID NO: 24055 - RNA, 32 nt, Human
aagacagcauugaggcacaucucaccaucagc

SEQ ID NO: 24056 - RNA, 32 nt, Human
aagacagccaacuuaguugcagacaucaccuc

SEQ ID NO: 24057 - RNA, 32 nt, Human
aagacagccagccgcaaaggcagcccagggcu

SEQ ID NO: 24058 - RNA, 32 nt, Human
aagacagcucaucugguuucuuccugcaucuu

SEQ ID NO: 24059 - RNA, 32 nt, Human
aagacagcugggaggugacugcuguacuguca

SEQ ID NO: 24060 - RNA, 32 nt, Human
aagacagcuguacuguuugcuucagccaauga

SEQ ID NO: 24061 - RNA, 32 nt, Human
aagacaggaggaagaaagggagagagggccag

SEQ ID NO: 24062 - RNA, 32 nt, Human
aagacaggcugcacgcggcggcgggcuccucg

SEQ ID NO: 24063 - RNA, 32 nt, Human
aagacaggcuggaugagaucucaggccgagcu

SEQ ID NO: 24064 - RNA, 32 nt, Human
aagacagggaaaggaaggcagcaggaggccac

SEQ ID NO: 24065 - RNA, 32 nt, Human
aagacagggaacacuugugagcacacagagca

SEQ ID NO: 24066 - RNA, 32 nt, Human
aagacagggacagccuuuguuuucugagauac

SEQ ID NO: 24067 - RNA, 32 nt, Human
aagacagggagagagacacggagagagacgca

SEQ ID NO: 24068 - RNA, 32 nt, Human
aagacagggguuucaccaucuuggccaggcug

SEQ ID NO: 24069 - RNA, 32 nt, Human
aagacagggucucacucucauugcccaggcug

SEQ ID NO: 24070 - RNA, 32 nt, Human
aagacaguagccaagauuauucacacauacca

SEQ ID NO: 24071 - RNA, 32 nt, Human
aagacagucaugccugcccuugugugucaaaa

SEQ ID NO: 24072 - RNA, 32 nt, Human
aagacagucgagaagccagggggagaaagaac

SEQ ID NO: 24073 - RNA, 32 nt, Human
aagacagugcaugaagccaggggacauccgcc

SEQ ID NO: 24074 - RNA, 32 nt, Human
aagacagugccauugcacuccagccugcacaa

SEQ ID NO: 24075 - RNA, 32 nt, Human
aagacaguguccagugcuccagccuaggaguc

SEQ ID NO: 24076 - RNA, 32 nt, Human
aagacaguuuuucuagguaccaugaaggaaga

SEQ ID NO: 24077 - RNA, 32 nt, Human
aagacauacacauacaaauggcaaacagguau

SEQ ID NO: 24078 - RNA, 32 nt, Human
aagacauagaacccuuauaaagaauuauuaac

SEQ ID NO: 24079 - RNA, 32 nt, Human
aagacauauagaggcagaaggacaggaauaau

SEQ ID NO: 24080 - RNA, 31 nt, Human
aagacaucacauaaauaaaguuacaaaugga

SEQ ID NO: 24081 - RNA, 32 nt, Human
aagacaucagagaacacacacagggaaaaccc

SEQ ID NO: 24082 - RNA, 32 nt, Human
aagacaucauuuccuuguuccuauuucuuguu

SEQ ID NO: 24083 - RNA, 32 nt, Human
aagacauccgaugguauacuuacucgaacccg

SEQ ID NO: 24084 - RNA, 32 nt, Human
aagacauccuuucuaaagauucaaguggacuu

SEQ ID NO: 24085 - RNA, 32 nt, Human
aagacaucuagaaacauuacaccacacacacc

SEQ ID NO: 24086 - RNA, 32 nt, Human
aagacaucucacucuucugacauccugcaguc

SEQ ID NO: 24087 - RNA, 32 nt, Human
aagacaucuuaggaggaaagauaaaaaugugg

SEQ ID NO: 24088 - RNA, 32 nt, Human
aagacaucuuucuccucugaagggcuuggcag

SEQ ID NO: 24089 - RNA, 32 nt, Human
aagacaugaauagauguuucacugaagaggau

SEQ ID NO: 24090 - RNA, 32 nt, Human
aagacaugcuguuaacucagucugacuggaag

SEQ ID NO: 24091 - RNA, 32 nt, Human
aagacauggaaagcugggaggacagagggcaa

SEQ ID NO: 24092 - RNA, 32 nt, Human
aagacauggaaaucuccauccaaugaggaugu

SEQ ID NO: 24093 - RNA, 32 nt, Human
aagacauggacccccaaugcauucauauuugc

SEQ ID NO: 24094 - RNA, 32 nt, Human
aagacauguguuugcuccuccuucaccuucug

SEQ ID NO: 24095 - RNA, 32 nt, Human
aagacauucuccacugaauuuuaacuuuccuu

SEQ ID NO: 24096 - RNA, 32 nt, Human
aagacauucuuuuguuaacagguuuguuucuu

SEQ ID NO: 24097 - RNA, 32 nt, Human
aagacauugaaggacugcagaaauguaugggu

SEQ ID NO: 24098 - RNA, 32 nt, Human
aagacauugcucacaagcagauuuccccagcg

SEQ ID NO: 24099 - RNA, 32 nt, Human
aagacauuucuaguuuuauuuuaccaauaauu

SEQ ID NO: 24100 - RNA, 24 nt, Human
aagacauuucuuuccucugcucac

SEQ ID NO: 24101 - RNA, 20 nt, Human
aagaccaaaccugggcccug

SEQ ID NO: 24102 - RNA, 32 nt, Human
aagaccaaagaccaaguuaucaucucaccaca

SEQ ID NO: 24103 - RNA, 22 nt, Human
aagaccaacagccuacgugcca

SEQ ID NO: 24104 - RNA, 21 nt, Human
aagaccaacagccugggccag

SEQ ID NO: 24105 - RNA, 32 nt, Human
aagaccaaccuggugaaaccccgucucuacaa

SEQ ID NO: 24106 - RNA, 32 nt, Human
aagaccaacucuggacacugaggcuccauucc

SEQ ID NO: 24107 - RNA, 32 nt, Human
aagaccaacugaccuucuccuaggcagcuccu

SEQ ID NO: 24108 - RNA, 32 nt, Human
aagaccaagaccgcaggaaggacuggggccac

SEQ ID NO: 24109 - RNA, 32 nt, Human
aagaccaagcaugacuccccacccucaacuuu

SEQ ID NO: 24110 - RNA, 20 nt, Human
aagaccaagcccccugccag

SEQ ID NO: 24111 - RNA, 32 nt, Human
aagaccaagcccuuucucugugccucacaaca

SEQ ID NO: 24112 - RNA, 24 nt, Human
aagaccaauaaaugcagagccagu

SEQ ID NO: 24113 - RNA, 32 nt, Human
aagaccacacaccuugagaaguagaagaguca

SEQ ID NO: 24114 - RNA, 32 nt, Human
aagaccacacuccuaugaccaucugaucgucg

SEQ ID NO: 24115 - RNA, 32 nt, Human
aagaccaccauaaagaaagugcauuucaauug

SEQ ID NO: 24116 - RNA, 32 nt, Human
aagaccacccaccugcugcuccuucagcugga

SEQ ID NO: 24117 - RNA, 32 nt, Human
aagaccaccccuccucauuccagaacgaacag

SEQ ID NO: 24118 - RNA, 32 nt, Human
aagaccaccuaguccaaagcucucauuguaca

SEQ ID NO: 24119 - RNA, 32 nt, Human
aagaccacgagacaccagaaaguuggagaaca

SEQ ID NO: 24120 - RNA, 24 nt, Human
aagaccacgcugccggguugcaaa

SEQ ID NO: 24121 - RNA, 32 nt, Human
aagaccacuggaaccaaccucuugcauaagug

SEQ ID NO: 24122 - RNA, 32 nt, Human
aagaccacugguuuuguuugaucuagucccug

SEQ ID NO: 24123 - RNA, 32 nt, Human
aagaccagaaguagcugggauuuguuugcaaa

SEQ ID NO: 24124 - RNA, 32 nt, Human
aagaccagaggagugugcugugcuggcaagug

SEQ ID NO: 24125 - RNA, 32 nt, Human
aagaccagaguuuuucaggagaaaacuggagg

SEQ ID NO: 24126 - RNA, 32 nt, Human
aagaccagccaccugucacaggugcaguuguc

SEQ ID NO: 24127 - RNA, 32 nt, Human
aagaccagcccagcucccuccagccugucccu

SEQ ID NO: 24128 - RNA, 24 nt, Human
aagaccagcccaggcaacaaaguc

SEQ ID NO: 24129 - RNA, 32 nt, Human
aagaccagcccgguaccucucuccccacuggc

SEQ ID NO: 24130 - RNA, 32 nt, Human
aagaccagccuaaaggucaacauaggcagacu

SEQ ID NO: 24131 - RNA, 32 nt, Human
aagaccagccugaccaacauggagaaacgcca

SEQ ID NO: 24132 - RNA, 32 nt, Human
aagaccagccugaccaacguggagaaacccca

SEQ ID NO: 24133 - RNA, 32 nt, Human
aagaccagccugaccaacguggagaaacuccg

SEQ ID NO: 24134 - RNA, 32 nt, Human
aagaccagccugacccacauggagaaacgcca

SEQ ID NO: 24135 - RNA, 32 nt, Human
aagaccagccuggacaacacagcagaccccgu

SEQ ID NO: 24136 - RNA, 32 nt, Human
aagaccagccuggacaacauagugagaccuug

SEQ ID NO: 24137 - RNA, 32 nt, Human
aagaccagccuggacaacauggcaagacccau

SEQ ID NO: 24138 - RNA, 32 nt, Human
aagaccagccuggacagcuuagugagaucccg

SEQ ID NO: 24139 - RNA, 32 nt, Human
aagaccagccuggccaacaugaugagaccucc

SEQ ID NO: 24140 - RNA, 32 nt, Human
aagaccagccuggccaacauggcagaaacccc

SEQ ID NO: 24141 - RNA, 32 nt, Human
aagaccagccuggccaacauggugagacaccg

SEQ ID NO: 24142 - RNA, 32 nt, Human
aagaccagccuggccaacaugguggaacccag

SEQ ID NO: 24143 - RNA, 32 nt, Human
aagaccagccuggccaacaugguggaacccua

SEQ ID NO: 24144 - RNA, 32 nt, Human
aagaccagccugggaaaaauagcaagaccuug

SEQ ID NO: 24145 - RNA, 32 nt, Human
aagaccagccugggaaacauagcaagauccug

SEQ ID NO: 24146 - RNA, 32 nt, Human
aagaccagccugggaaauauagcaagaccuua

SEQ ID NO: 24147 - RNA, 32 nt, Human
aagaccagccugggaacacagcgagacccucu

SEQ ID NO: 24148 - RNA, 32 nt, Human
aagaccagccugggcaaaauagcaagaccgug

SEQ ID NO: 24149 - RNA, 32 nt, Human
aagaccagccugggcaaaauagcaagaccuug

SEQ ID NO: 24150 - RNA, 32 nt, Human
aagaccagccugggcaaaguagggagaccccu

SEQ ID NO: 24151 - RNA, 32 nt, Human
aagaccagccugggcaacaaagugagaccccc

SEQ ID NO: 24152 - RNA, 32 nt, Human
aagaccagccugggcaacacagcaagacccau

SEQ ID NO: 24153 - RNA, 32 nt, Human
aagaccagccugggcaacacagcaagacccug

SEQ ID NO: 24154 - RNA, 32 nt, Human
aagaccagccugggcaacacagcaagauccug

SEQ ID NO: 24155 - RNA, 32 nt, Human
aagaccagccugggcaacacagcgagacccca

SEQ ID NO: 24156 - RNA, 32 nt, Human
aagaccagccugggcaacacagggaggcuacc

SEQ ID NO: 24157 - RNA, 32 nt, Human
aagaccagccugggcaacacagugagacuuca

SEQ ID NO: 24158 - RNA, 32 nt, Human
aagaccagccugggcaacacagugaggccccc

SEQ ID NO: 24159 - RNA, 32 nt, Human
aagaccagccugggcaacacagugagugagac

SEQ ID NO: 24160 - RNA, 32 nt, Human
aagaccagccugggcaacagaacaagacucau

SEQ ID NO: 24161 - RNA, 32 nt, Human
aagaccagccugggcaacauaaugagacccug

SEQ ID NO: 24162 - RNA, 32 nt, Human
aagaccagccugggcaacauaaugagaccuca

SEQ ID NO: 24163 - RNA, 32 nt, Human
aagaccagccugggcaacauagcaagacccca

SEQ ID NO: 24164 - RNA, 32 nt, Human
aagaccagccugggcaacauagcaagacccug

SEQ ID NO: 24165 - RNA, 32 nt, Human
aagaccagccugggcaacauagcaagauccug

SEQ ID NO: 24166 - RNA, 32 nt, Human
aagaccagccugggcaacauagcgagaccccu

SEQ ID NO: 24167 - RNA, 32 nt, Human
aagaccagccugggcaacauaggaagacuccg

SEQ ID NO: 24168 - RNA, 32 nt, Human
aagaccagccugggcaacauagggagacccca

SEQ ID NO: 24169 - RNA, 32 nt, Human
aagaccagccugggcaacauagggagaccccc

SEQ ID NO: 24170 - RNA, 32 nt, Human
aagaccagccugggcaacauagggagacccug

SEQ ID NO: 24171 - RNA, 32 nt, Human
aagaccagccugggcaacauaguaagacccca

SEQ ID NO: 24172 - RNA, 32 nt, Human
aagaccagccugggcaacauagugagaaaaug

SEQ ID NO: 24173 - RNA, 32 nt, Human
aagaccagccugggcaacauagugagaaccuu

SEQ ID NO: 24174 - RNA, 32 nt, Human
aagaccagccugggcaacauagugagaaugca

SEQ ID NO: 24175 - RNA, 32 nt, Human
aagaccagccugggcaacauagugagacccca

SEQ ID NO: 24176 - RNA, 32 nt, Human
aagaccagccugggcaacauagugagaccugc

SEQ ID NO: 24177 - RNA, 32 nt, Human
aagaccagccugggcaacauagugagacgccc

SEQ ID NO: 24178 - RNA, 32 nt, Human
aagaccagccugggcaacauagugagacuccu

SEQ ID NO: 24179 - RNA, 32 nt, Human
aagaccagccugggcaacauagugagacucug

SEQ ID NO: 24180 - RNA, 32 nt, Human
aagaccagccugggcaacauggcaagacccug

SEQ ID NO: 24181 - RNA, 32 nt, Human
aagaccagccugggcaacauggcgagacccca

SEQ ID NO: 24182 - RNA, 32 nt, Human
aagaccagccugggcaacauggugagacccca

SEQ ID NO: 24183 - RNA, 32 nt, Human
aagaccagccugggcaacauggugagauuuca

SEQ ID NO: 24184 - RNA, 32 nt, Human
aagaccagccugggcaacauugggagacucca

SEQ ID NO: 24185 - RNA, 32 nt, Human
aagaccagccugggcaacguagcaagaccuug

SEQ ID NO: 24186 - RNA, 32 nt, Human
aagaccagccugggcaacucaggaagacccca

SEQ ID NO: 24187 - RNA, 32 nt, Human
aagaccagccugggcaacuuagggagauaccc

SEQ ID NO: 24188 - RNA, 32 nt, Human
aagaccagccugggcaacuuagugaggccccg

SEQ ID NO: 24189 - RNA, 32 nt, Human
aagaccagccugggcaagauagcaagaccuug

SEQ ID NO: 24190 - RNA, 32 nt, Human
aagaccagccugggcaauauagugagacccca

SEQ ID NO: 24191 - RNA, 32 nt, Human
aagaccagccugggcuacagagcaagaccuca

SEQ ID NO: 24192 - RNA, 32 nt, Human
aagaccagccuggggaacauagagagaccugu

SEQ ID NO: 24193 - RNA, 32 nt, Human
aagaccagccuggguaacaaagugagaccccc

SEQ ID NO: 24194 - RNA, 32 nt, Human
aagaccagccuggguaacaugggguggaacaa

SEQ ID NO: 24195 - RNA, 32 nt, Human
aagaccagccuggguaucauagggagaccccg

SEQ ID NO: 24196 - RNA, 32 nt, Human
aagaccagccuggucaacauagugagacacug

SEQ ID NO: 24197 - RNA, 32 nt, Human
aagaccagccuggucaauauagcaagaccacg

SEQ ID NO: 24198 - RNA, 32 nt, Human
aagaccagccuucuccaucuucagccuccugc

SEQ ID NO: 24199 - RNA, 32 nt, Human
aagaccagcugaccaacacggugaaaccccau

SEQ ID NO: 24200 - RNA, 20 nt, Human
aagaccagcuggaacugagc

SEQ ID NO: 24201 - RNA, 20 nt, Human
aagaccagcuuggccaaggu

SEQ ID NO: 24202 - RNA, 32 nt, Human
aagaccaggaaggaagggccaccuucccugaa

SEQ ID NO: 24203 - RNA, 21 nt, Human
aagaccaggaccucaugcgag

SEQ ID NO: 24204 - RNA, 32 nt, Human
aagaccaggagaagagagagcacuuucuuccc

SEQ ID NO: 24205 - RNA, 32 nt, Human
aagaccagggaggcccuuaagaaaauauagca

SEQ ID NO: 24206 - RNA, 25 nt, Human
aagaccagggcuagagucaacaguc

SEQ ID NO: 24207 - RNA, 32 nt, Human
aagaccaggguggagaggaauaagagacuaag

SEQ ID NO: 24208 - RNA, 32 nt, Human
aagaccagguugugagggaagacgaauuuacu

SEQ ID NO: 24209 - RNA, 32 nt, Human
aagaccagucuccaccaccaaagucauggcuc

SEQ ID NO: 24210 - RNA, 27 nt, Human
aagaccauagguuagaaaaauaacuca

SEQ ID NO: 24211 - RNA, 32 nt, Human
aagaccaucacugaacucaaggacuugugcug

SEQ ID NO: 24212 - RNA, 32 nt, Human
aagaccauccaggaaaacaugaccucaccaaa

SEQ ID NO: 24213 - RNA, 32 nt, Human
aagaccauccauccucccuucguccaccacuc

SEQ ID NO: 24214 - RNA, 32 nt, Human
aagaccaucgucaacgugcagaccauguuccg

SEQ ID NO: 24215 - RNA, 32 nt, Human
aagaccaucuuccacuuuaucccaucugggag

SEQ ID NO: 24216 - RNA, 21 nt, Human
aagaccauggcccaggauccc

SEQ ID NO: 24217 - RNA, 32 nt, Human
aagaccauggguggaugcugucuucucucuuc

SEQ ID NO: 24218 - RNA, 31 nt, Human
aagaccaugucugggagcuucuacuuuguaa

SEQ ID NO: 24219 - RNA, 32 nt, Human
aagaccauucuuuccaaccucuggguucuugc

SEQ ID NO: 24220 - RNA, 32 nt, Human
aagacccaaagccagacuuccccaaauuccua

SEQ ID NO: 24221 - RNA, 32 nt, Human
aagacccacccagggagcgguuucaguggcgc

SEQ ID NO: 24222 - RNA, 28 nt, Human
aagacccagagaccugccucaccagugc

SEQ ID NO: 24223 - RNA, 32 nt, Human
aagacccaggagagacagagaugcgaaccacc

SEQ ID NO: 24224 - RNA, 21 nt, Human
aagacccagucucuacuguug

SEQ ID NO: 24225 - RNA, 32 nt, Human
aagacccagucuuggcuuuacuuucuuggggu

SEQ ID NO: 24226 - RNA, 32 nt, Human
aagacccaguuucuuguuaauaagugccaacu

SEQ ID NO: 24227 - RNA, 21 nt, Human
aagacccaucuuaaagcuaag

SEQ ID NO: 24228 - RNA, 32 nt, Human
aagacccauuucuacaaaaauacaaaacuuag

SEQ ID NO: 24229 - RNA, 32 nt, Human
aagaccccacuggccaccccucccucuggucc

SEQ ID NO: 24230 - RNA, 32 nt, Human
aagaccccaggaggccaaagggcugcagucac

SEQ ID NO: 24231 - RNA, 32 nt, Human
aagaccccaguauuugcugcuauuuuuaaaac

SEQ ID NO: 24232 - RNA, 32 nt, Human
aagacccccaggaaggaaacagauuuaagcaa

SEQ ID NO: 24233 - RNA, 32 nt, Human
aagaccccgagcauccuuaacaucccagcacc

SEQ ID NO: 24234 - RNA, 32 nt, Human
aagaccccgagugcuggggagcagggagcagg

SEQ ID NO: 24235 - RNA, 32 nt, Human
aagaccccucccccgcuuccucccuuccuuuc

SEQ ID NO: 24236 - RNA, 32 nt, Human
aagacccuggacagaggcugguggggcccccu

SEQ ID NO: 24237 - RNA, 32 nt, Human
aagacccuggaccugaguggcaucagacugac

SEQ ID NO: 24238 - RNA, 32 nt, Human
aagacccuguaguauuugcugugggccugacc

SEQ ID NO: 24239 - RNA, 32 nt, Human
aagacccugucuugaagacccugaccucaagu

SEQ ID NO: 24240 - RNA, 32 nt, Human
aagacccuuggcuggcuuccuccgcucugggu

SEQ ID NO: 24241 - RNA, 19 nt, Human
aagacccuuguuucugcca

SEQ ID NO: 24242 - RNA, 32 nt, Human
aagacccuuugucagccaaucacaguuugaaa

SEQ ID NO: 24243 - RNA, 32 nt, Human
aagaccgaucuuccgcuaucacccuaaucucc

SEQ ID NO: 24244 - RNA, 32 nt, Human
aagaccgcaccacugcacuccagccugggcga

SEQ ID NO: 24245 - RNA, 22 nt, Human
aagaccgccgcccgacucuggg

SEQ ID NO: 24246 - RNA, 32 nt, Human
aagaccggcaauaacacuugcuggugaagaug

SEQ ID NO: 24247 - RNA, 32 nt, Human
aagaccgugccacuguacuccagccugggcag

SEQ ID NO: 24248 - RNA, 32 nt, Human
aagaccguguggacgaggacccccaggcaagc

SEQ ID NO: 24249 - RNA, 32 nt, Human
aagaccguucucuccaaaucagagagcuacuc

SEQ ID NO: 24250 - RNA, 32 nt, Human
aagaccuaagacacuuuuccacccuccaccac

SEQ ID NO: 24251 - RNA, 32 nt, Human
aagaccuaagcucacccagcuaguaguuacuu

SEQ ID NO: 24252 - RNA, 32 nt, Human
aagaccuaaggguuuuaucuccuccccuugaa

SEQ ID NO: 24253 - RNA, 31 nt, Human
aagaccuaaguguccaggagacagaaggaga

SEQ ID NO: 24254 - RNA, 32 nt, Human
aagaccuacugagugagaaucuugagggugga

SEQ ID NO: 24255 - RNA, 32 nt, Human
aagaccucaccacucccacccaaucccaaacg

SEQ ID NO: 24256 - RNA, 32 nt, Human
aagaccucaggcuucauuaucaucucauuucc

SEQ ID NO: 24257 - RNA, 32 nt, Human
aagaccucauacaguaguccccacuuauucau

SEQ ID NO: 24258 - RNA, 32 nt, Human
aagaccucauucuuaucugugugucugcauuu

SEQ ID NO: 24259 - RNA, 32 nt, Human
aagaccuccagaaucuccugacuuuagggaau

SEQ ID NO: 24260 - RNA, 32 nt, Human
aagaccuccgcuucacugccccggcugguccc

SEQ ID NO: 24261 - RNA, 32 nt, Human
aagaccuccuggguccucucaggcucccccuu

SEQ ID NO: 24262 - RNA, 32 nt, Human
aagaccucuccucagcccaugcccagcuguca

SEQ ID NO: 24263 - RNA, 32 nt, Human
aagaccucucuuuacuccuuuuagaccuuuuu

SEQ ID NO: 24264 - RNA, 32 nt, Human
aagaccugaccccagccccaaucugaucagac

SEQ ID NO: 24265 - RNA, 31 nt, Human
aagaccugacuuauggagcacuuguaaccug

SEQ ID NO: 24266 - RNA, 32 nt, Human
aagaccugcaccuaaguggccauguuugcuca

SEQ ID NO: 24267 - RNA, 32 nt, Human
aagaccugcagcuucagcaucacuugagaagu

SEQ ID NO: 24268 - RNA, 32 nt, Human
aagaccugccacggcaaguggagcugcuggau

SEQ ID NO: 24269 - RNA, 32 nt, Human
aagaccugcccaggugucggauaagagccugc

SEQ ID NO: 24270 - RNA, 31 nt, Human
aagaccugccucuggggcaaaugucagcaca

SEQ ID NO: 24271 - RNA, 32 nt, Human
aagaccugcgggggacagcaggaggacagccg

SEQ ID NO: 24272 - RNA, 32 nt, Human
aagaccuggagucuaugcuaggaagcugagau

SEQ ID NO: 24273 - RNA, 32 nt, Human
aagaccuggaucucccuuuuacauggacccua

SEQ ID NO: 24274 - RNA, 32 nt, Human
aagaccugggcuguggugugugggucuuggcc

SEQ ID NO: 24275 - RNA, 32 nt, Human
aagaccuggggaaggaagaaugaggacagucc

SEQ ID NO: 24276 - RNA, 31 nt, Human
aagaccuggguggaaagcgguuuggaugaaa

SEQ ID NO: 24277 - RNA, 32 nt, Human
aagaccuggucagccuaaaucuucccaguccc

SEQ ID NO: 24278 - RNA, 32 nt, Human
aagaccuguuuauacauugaaggaagaaaaga

SEQ ID NO: 24279 - RNA, 32 nt, Human
aagaccuucaauccaccaacauguagaaauug

SEQ ID NO: 24280 - RNA, 32 nt, Human
aagaccuucagcuguauuuccacagauuucuc

SEQ ID NO: 24281 - RNA, 32 nt, Human
aagaccuucauaccuagaccuguuccgcacac

SEQ ID NO: 24282 - RNA, 32 nt, Human
aagaccuuccuuuccuccuuuuuccauauugc

SEQ ID NO: 24283 - RNA, 32 nt, Human
aagaccuucucccuuuucuuuggccccauauu

SEQ ID NO: 24284 - RNA, 32 nt, Human
aagaccuucucuagguuuucuagcuuucauua

SEQ ID NO: 24285 - RNA, 32 nt, Human
aagaccuuuacaacagcaacaaaaagaacaaa

SEQ ID NO: 24286 - RNA, 32 nt, Human
aagaccuuuagagaaagagaaugggagcauau

SEQ ID NO: 24287 - RNA, 32 nt, Human
aagaccuuuccuuucauguccagaagaaugua

SEQ ID NO: 24288 - RNA, 32 nt, Human
aagaccuuuggccaaagcagggcuuaaaagau

SEQ ID NO: 24289 - RNA, 32 nt, Human
aagacgaaaaggaggcuucuaggcacccggga

SEQ ID NO: 24290 - RNA, 23 nt, Human
aagacgaaacucugcaacuuggc

SEQ ID NO: 24291 - RNA, 32 nt, Human
aagacgaaguucuggcaaauguggaaaaccug

SEQ ID NO: 24292 - RNA, 32 nt, Human
aagacgaccagaaaguccaucccucaugagug

SEQ ID NO: 24293 - RNA, 32 nt, Human
aagacgacggaggcggggcaacaggcggggag

SEQ ID NO: 24294 - RNA, 32 nt, Human
aagacgaggggaacaaaaccagcuggauccau

SEQ ID NO: 24295 - RNA, 32 nt, Human
aagacgaugcagccgcuuuucuuuuugaaaug

SEQ ID NO: 24296 - RNA, 32 nt, Human
aagacgccaaaaacaauugcaacagaagcaaa

SEQ ID NO: 24297 - RNA, 32 nt, Human
aagacgccagagcuagccaccacccacacugc

SEQ ID NO: 24298 - RNA, 32 nt, Human
aagacgccauugcaccccagccugggcaauga

SEQ ID NO: 24299 - RNA, 32 nt, Human
aagacgccuuucuccuccaacccaaccucauc

SEQ ID NO: 24300 - RNA, 32 nt, Human
aagacgcggcaggccggccgagggcaccccga

SEQ ID NO: 24301 - RNA, 32 nt, Human
aagacgcguagcagcacacacuucacaaagcc

SEQ ID NO: 24302 - RNA, 32 nt, Human
aagacgcugaggaggaggaggaggcggaggag

SEQ ID NO: 24303 - RNA, 32 nt, Human
aagacgcugagugggagcugucaggcaguagc

SEQ ID NO: 24304 - RNA, 32 nt, Human
aagacgcugccucccacaucaccuuucuuucc

SEQ ID NO: 24305 - RNA, 17 nt, Human
aagacgcuggacuuggc

SEQ ID NO: 24306 - RNA, 19 nt, Human
aagacggacagcccugagg

SEQ ID NO: 24307 - RNA, 32 nt, Human
aagacggagaggagggaaauggggcccuuucc

SEQ ID NO: 24308 - RNA, 32 nt, Human
aagacggagagggcagagcaagaacugcacug

SEQ ID NO: 24309 - RNA, 32 nt, Human
aagacggauccaagggggacagccuggagucg

SEQ ID NO: 24310 - RNA, 32 nt, Human
aagacggauuucacauccacaggacggucuug

SEQ ID NO: 24311 - RNA, 21 nt, Human
aagacggcagcaggacugggg

SEQ ID NO: 24312 - RNA, 32 nt, Human
aagacggcaggaccaggcaugggggagcugga

SEQ ID NO: 24313 - RNA, 32 nt, Human
aagacggccacgaccugggagcagcagguccc

SEQ ID NO: 24314 - RNA, 32 nt, Human
aagacgggaagagggugggagagccagagcaa

SEQ ID NO: 24315 - RNA, 32 nt, Human
aagacgggagucggcagccaggaguucccgug

SEQ ID NO: 24316 - RNA, 32 nt, Human
aagacgggccuccugauaaucgucuugggcau

SEQ ID NO: 24317 - RNA, 32 nt, Human
aagacgggcugcucuuccagacuggcugugcc

SEQ ID NO: 24318 - RNA, 32 nt, Human
aagacgggcugucgcugcugcaccaccagcag

SEQ ID NO: 24319 - RNA, 32 nt, Human
aagacggggguuucaccauguuggcccagcug

SEQ ID NO: 24320 - RNA, 32 nt, Human
aagacggguuaagccuuucuugcuuucaaaua

SEQ ID NO: 24321 - RNA, 32 nt, Human
aagacgucaggugacuucaguccugcugcagu

SEQ ID NO: 24322 - RNA, 23 nt, Human
aagacguccucuucccucugccu

SEQ ID NO: 24323 - RNA, 32 nt, Human
aagacgucucugucugcccugugaaagcguuu

SEQ ID NO: 24324 - RNA, 32 nt, Human
aagacgugagccacggcaccuggccugaauuu

SEQ ID NO: 24325 - RNA, 32 nt, Human
aagacgugauagagggaauauaagagcauuua

SEQ ID NO: 24326 - RNA, 32 nt, Human
aagacgugccucuuccccuucugccauaaugg

SEQ ID NO: 24327 - RNA, 32 nt, Human
aagacguggauuuucuggaagacauggcuugg

SEQ ID NO: 24328 - RNA, 32 nt, Human
aagacgugucgcacuuuucaguuguuuguauu

SEQ ID NO: 24329 - RNA, 24 nt, Human
aagacguuaaaauuuuaggacaga

SEQ ID NO: 24330 - RNA, 32 nt, Human
aagacguuccuuaggcccugugcucagagaaa

SEQ ID NO: 24331 - RNA, 32 nt, Human
aagacuaaauagguuuaccaugugccagucuc

SEQ ID NO: 24332 - RNA, 32 nt, Human
aagacuaacagucuuuuuagaaguaaauauau

SEQ ID NO: 24333 - RNA, 32 nt, Human
aagacuaagacacugauccaacugaauaaaua

SEQ ID NO: 24334 - RNA, 32 nt, Human
aagacuaaguaagaaaugaaauguccuaucaa

SEQ ID NO: 24335 - RNA, 32 nt, Human
aagacuacacagaaaaucuggaaacaguugca

SEQ ID NO: 24336 - RNA, 32 nt, Human
aagacuaccagcucugucuuucuacccucuaa

SEQ ID NO: 24337 - RNA, 32 nt, Human
aagacuacgccacugcacuccagccuggaggc

SEQ ID NO: 24338 - RNA, 32 nt, Human
aagacuacuaugaacaguuuucuuuuaaaauu

SEQ ID NO: 24339 - RNA, 24 nt, Human
aagacuacugccccaccccagagg

SEQ ID NO: 24340 - RNA, 32 nt, Human
aagacuagaagagagggaggaggagcuggagc

SEQ ID NO: 24341 - RNA, 32 nt, Human
aagacuagaaggacuaaaagcaguugaaugua

SEQ ID NO: 24342 - RNA, 32 nt, Human
aagacuagagaagguaacagcuucagcuucag

SEQ ID NO: 24343 - RNA, 32 nt, Human
aagacuagccugggcaacacagucagacucca

SEQ ID NO: 24344 - RNA, 32 nt, Human
aagacuagccugggcaacauagcgagacugca

SEQ ID NO: 24345 - RNA, 32 nt, Human
aagacuagccugggcaacauagugagacucgg

SEQ ID NO: 24346 - RNA, 32 nt, Human
aagacuaggcacagccauuuguguuaauuaaa

SEQ ID NO: 24347 - RNA, 32 nt, Human
aagacuaucuucccucccuucccugaauucag

SEQ ID NO: 24348 - RNA, 32 nt, Human
aagacuaugacucgcgcacagcucugcauguu

SEQ ID NO: 24349 - RNA, 32 nt, Human
aagacuaugccacugcacucccgccuggguga

SEQ ID NO: 24350 - RNA, 32 nt, Human
aagacuaugccauuaaaugaccacauuaacga

SEQ ID NO: 24351 - RNA, 32 nt, Human
aagacucaaagucacugguauauuggauuaag

SEQ ID NO: 24352 - RNA, 32 nt, Human
aagacucaacuuccuggucauaacuucucccc

SEQ ID NO: 24353 - RNA, 32 nt, Human
aagacucaacuugcaacugugcccuccacacu

SEQ ID NO: 24354 - RNA, 32 nt, Human
aagacucaaucuguagcuaguaugaauauuuu

SEQ ID NO: 24355 - RNA, 32 nt, Human
aagacucagaugccgaaaacucguccucccga

SEQ ID NO: 24356 - RNA, 32 nt, Human
aagacucagcaacuccagccucuguagcauug

SEQ ID NO: 24357 - RNA, 32 nt, Human
aagacucagccaagaguucucuuuauucccuu

SEQ ID NO: 24358 - RNA, 32 nt, Human
aagacucaugccauaggugacauucuaaaaua

SEQ ID NO: 24359 - RNA, 32 nt, Human
aagacuccaaaguuccauuggaaaagauaugg

SEQ ID NO: 24360 - RNA, 32 nt, Human
aagacuccaggaaaaacagcuuccauggcaca

SEQ ID NO: 24361 - RNA, 32 nt, Human
aagacuccagugggacugggaugagcugcgug

SEQ ID NO: 24362 - RNA, 32 nt, Human
aagacuccaucucaaaaacaaaaacaaaacaa

SEQ ID NO: 24363 - RNA, 32 nt, Human
aagacuccaucucaaaaacaaacaaacaaaaa

SEQ ID NO: 24364 - RNA, 32 nt, Human
aagacucccacucccugaaaucuggagugaag

SEQ ID NO: 24365 - RNA, 32 nt, Human
aagacucccugcaccaggcccuaggaggccuc

SEQ ID NO: 24366 - RNA, 32 nt, Human
aagacucgcccauuuuggaaugugaccgucug

SEQ ID NO: 24367 - RNA, 32 nt, Human
aagacucgggucucuggccucccagccaggcc

SEQ ID NO: 24368 - RNA, 32 nt, Human
aagacucgguccuucuggaaucuuguaacggu

SEQ ID NO: 24369 - RNA, 32 nt, Human
aagacucuaugcucuguaguucuuuccacaaa

SEQ ID NO: 24370 - RNA, 32 nt, Human
aagacucuccacccucacucccagauccugca

SEQ ID NO: 24371 - RNA, 32 nt, Human
aagacucugccucaccugccuccuugaaggaa

SEQ ID NO: 24372 - RNA, 32 nt, Human
aagacucugucucaaaaacaaacaaacaaaca

SEQ ID NO: 24373 - RNA, 32 nt, Human
aagacugaagaaugugcugauggagcagugcu

SEQ ID NO: 24374 - RNA, 32 nt, Human
aagacugaagaggcuggagugcaguggcgcaa

SEQ ID NO: 24375 - RNA, 32 nt, Human
aagacugaagcauccccaccucaggauucagc

SEQ ID NO: 24376 - RNA, 32 nt, Human
aagacugaagugaaagaagaaccagagcuuca

SEQ ID NO: 24377 - RNA, 32 nt, Human
aagacugaagugaaagaagaaccggagcuuca

SEQ ID NO: 24378 - RNA, 32 nt, Human
aagacugacaacaggccagugcagacuuugcu

SEQ ID NO: 24379 - RNA, 32 nt, Human
aagacugaccagcuucuucugaagacuucugc

SEQ ID NO: 24380 - RNA, 32 nt, Human
aagacugacccacugcauuccagccuggcgac

SEQ ID NO: 24381 - RNA, 32 nt, Human
aagacugaccuugaauucagccuggguguuca

SEQ ID NO: 24382 - RNA, 20 nt, Human
aagacugacuuaucacucug

SEQ ID NO: 24383 - RNA, 32 nt, Human
aagacugagggcaggaaggaggggccccagga

SEQ ID NO: 24384 - RNA, 32 nt, Human
aagacugcacaaaauuacagugcuaauguaua

SEQ ID NO: 24385 - RNA, 32 nt, Human
aagacugcaccacugcacuccagccugggcaa

SEQ ID NO: 24386 - RNA, 31 nt, Human
aagacugcagaucagcaccucucugcccaga

SEQ ID NO: 24387 - RNA, 32 nt, Human
aagacugcagcugcugaaguucugagccgggc

SEQ ID NO: 24388 - RNA, 32 nt, Human
aagacugcaguccuucacuacauggcugggua

SEQ ID NO: 24389 - RNA, 32 nt, Human
aagacugcagugagcuaugauccugccacugc

SEQ ID NO: 24390 - RNA, 32 nt, Human
aagacugcagugagcucucauugggccacugc

SEQ ID NO: 24391 - RNA, 32 nt, Human
aagacugcagugagcugagaucacaccacugu

SEQ ID NO: 24392 - RNA, 32 nt, Human
aagacugcagugagcugugaucgugccacugc

SEQ ID NO: 24393 - RNA, 32 nt, Human
aagacugcaguuucuucacagaucucaggaag

SEQ ID NO: 24394 - RNA, 32 nt, Human
aagacugccaaguacaauuaugauaucuuacu

SEQ ID NO: 24395 - RNA, 23 nt, Human
aagacugccccuaccaccacagg

SEQ ID NO: 24396 - RNA, 32 nt, Human
aagacugccugcuccugagacuucugagaagg

SEQ ID NO: 24397 - RNA, 32 nt, Human
aagacugccuggcuguccugcccagccuuccu

SEQ ID NO: 24398 - RNA, 32 nt, Human
aagacugccuucaguaggaacaagcuggcuuc

SEQ ID NO: 24399 - RNA, 32 nt, Human
aagacugcgccacugcacuccagccugggcaa

SEQ ID NO: 24400 - RNA, 32 nt, Human
aagacugcgccauugcacuccagcccgggcaa

SEQ ID NO: 24401 - RNA, 32 nt, Human
aagacugcucaggccauuucagcagcagccag

SEQ ID NO: 24402 - RNA, 32 nt, Human
aagacugcuccugguggccugugcauagggaa

SEQ ID NO: 24403 - RNA, 32 nt, Human
aagacuggaagcaggugaggcacacagagggg

SEQ ID NO: 24404 - RNA, 32 nt, Human
aagacuggaauguggagaacuggggagugccc

SEQ ID NO: 24405 - RNA, 32 nt, Human
aagacuggacacaauuccgaagagcugcccag

SEQ ID NO: 24406 - RNA, 32 nt, Human
aagacuggaccucugugccaagcaguaucccu

SEQ ID NO: 24407 - RNA, 32 nt, Human
aagacuggcaaggaggcucaggugcuuccauc

SEQ ID NO: 24408 - RNA, 32 nt, Human
aagacuggcauggcucagagguugugagaaag

SEQ ID NO: 24409 - RNA, 25 nt, Human
aagacuggccaggcccaaggaccca

SEQ ID NO: 24410 - RNA, 32 nt, Human
aagacuggccugaucaauaugaugaaaccccu

SEQ ID NO: 24411 - RNA, 23 nt, Human
aagacuggcuggcaauaaaguca

SEQ ID NO: 24412 - RNA, 32 nt, Human
aagacuggcuuuuuguucuucucacacaauua

SEQ ID NO: 24413 - RNA, 32 nt, Human
aagacugggacccaccuuaucuggcuucacuc

SEQ ID NO: 24414 - RNA, 32 nt, Human
aagacugggcuagggagaaugcagagagguuu

SEQ ID NO: 24415 - RNA, 32 nt, Human
aagacuggugggaagugagcagcuggagggaa

SEQ ID NO: 24416 - RNA, 32 nt, Human
aagacuguaguauacuaugaucgugccugugg

SEQ ID NO: 24417 - RNA, 32 nt, Human
aagacuguaugggcgccagggugaaggaaacc

SEQ ID NO: 24418 - RNA, 32 nt, Human
aagacugucauuguuucucuaggaaauguaug

SEQ ID NO: 24419 - RNA, 32 nt, Human
aagacugucuucagcgugaacuaaaguucaca

SEQ ID NO: 24420 - RNA, 24 nt, Human
aagacugugaaaaaugauaacuca

SEQ ID NO: 24421 - RNA, 32 nt, Human
aagacugugccacugcacuccagccugggcaa

SEQ ID NO: 24422 - RNA, 32 nt, Human
aagacugugccacugcacuccagccuggguga

SEQ ID NO: 24423 - RNA, 21 nt, Human
aagacugugggaccaggaccc

SEQ ID NO: 24424 - RNA, 32 nt, Human
aagacugugugaaaaugcccauuuuccuaaau

SEQ ID NO: 24425 - RNA, 32 nt, Human
aagacuguugccguuuuaguguggagauaagu

SEQ ID NO: 24426 - RNA, 32 nt, Human
aagacuguugucuuguucuugugguguuugga

SEQ ID NO: 24427 - RNA, 32 nt, Human
aagacuguuuggugcuucugucuuucaccauu

SEQ ID NO: 24428 - RNA, 32 nt, Human
aagacuuagaaacauagcucaaagugaacacu

SEQ ID NO: 24429 - RNA, 32 nt, Human
aagacuuagaauagucagcuauccugagcaaa

SEQ ID NO: 24430 - RNA, 32 nt, Human
aagacuuagauucauuuauugcuaucugaggc

SEQ ID NO: 24431 - RNA, 32 nt, Human
aagacuuaggauaccucucucacuuucuguuu

SEQ ID NO: 24432 - RNA, 32 nt, Human
aagacuuaggggccacuuauaaaucaagaaga

SEQ ID NO: 24433 - RNA, 32 nt, Human
aagacuuauuuuuguggcaguuugccauucag

SEQ ID NO: 24434 - RNA, 31 nt, Human
aagacuucaauaaaugacuguuuaaaaaggu

SEQ ID NO: 24435 - RNA, 32 nt, Human
aagacuucagaauugggaacuaaaccaugaau

SEQ ID NO: 24436 - RNA, 32 nt, Human
aagacuucauaagcucaucacaggggagggaa

SEQ ID NO: 24437 - RNA, 32 nt, Human
aagacuucaucccucuggggcuguucacgugg

SEQ ID NO: 24438 - RNA, 32 nt, Human
aagacuucauuucaccaacccagaaccuccuu

SEQ ID NO: 24439 - RNA, 32 nt, Human
aagacuucccagaggaagugcgccuuuuucau

SEQ ID NO: 24440 - RNA, 32 nt, Human
aagacuuccuuuccucuccucucgccuccugg

SEQ ID NO: 24441 - RNA, 32 nt, Human
aagacuucucaaggaggugccucagucagauc

SEQ ID NO: 24442 - RNA, 32 nt, Human
aagacuucucaaggaggugccuccaucagacc

SEQ ID NO: 24443 - RNA, 22 nt, Human
aagacuucuccaggcccauguc

SEQ ID NO: 24444 - RNA, 32 nt, Human
aagacuucucucucccaucaccuugcccucau

SEQ ID NO: 24445 - RNA, 32 nt, Human
aagacuucuggacaauuuuucacuuucacaga

SEQ ID NO: 24446 - RNA, 32 nt, Human
aagacuugaaaccaacucgcacccucaaagcu

SEQ ID NO: 24447 - RNA, 32 nt, Human
aagacuugaauccaagauuccugucucuaaau

SEQ ID NO: 24448 - RNA, 32 nt, Human
aagacuugccaagaaucuugggauuuaucuuu

SEQ ID NO: 24449 - RNA, 32 nt, Human
aagacuugcuugaacccgggaggcagagguug

SEQ ID NO: 24450 - RNA, 32 nt, Human
aagacuuguccaagagucuugauguccuaaac

SEQ ID NO: 24451 - RNA, 32 nt, Human
aagacuuguccagguuccucaguuaauuagga

SEQ ID NO: 24452 - RNA, 32 nt, Human
aagacuuuauuaaaucagcgcguuuaacagga

SEQ ID NO: 24453 - RNA, 32 nt, Human
aagacuuuccuaaaucucuaucucuuuauaua

SEQ ID NO: 24454 - RNA, 32 nt, Human
aagacuuucucuuuuccuuuaaagcuaaagac

SEQ ID NO: 24455 - RNA, 32 nt, Human
aagacuuucuuccuccuguuucucguugaguu

SEQ ID NO: 24456 - RNA, 32 nt, Human
aagagaaaaaggcugaaaagaaggaauauacc

SEQ ID NO: 24457 - RNA, 32 nt, Human
aagagaaaacaugccuuucuuuguugaaucac

SEQ ID NO: 24458 - RNA, 32 nt, Human
aagagaaaagcuggaggaaggccgugggcaau

SEQ ID NO: 24459 - RNA, 32 nt, Human
aagagaaaaggagagagguugagcgagcgaga

SEQ ID NO: 24460 - RNA, 32 nt, Human
aagagaaaaggagcccuggugacuugcccagg

SEQ ID NO: 24461 - RNA, 32 nt, Human
aagagaaacugaggcccagaggcggagggcag

SEQ ID NO: 24462 - RNA, 18 nt, Human
aagagaaagaaggccaga

SEQ ID NO: 24463 - RNA, 32 nt, Human
aagagaaagagaaggaaggaaggagaaagaga

SEQ ID NO: 24464 - RNA, 31 nt, Human
aagagaaagagacauucacuuggagggcucu

SEQ ID NO: 24465 - RNA, 32 nt, Human
aagagaaagagagagaggagaagggagugagg

SEQ ID NO: 24466 - RNA, 32 nt, Human
aagagaaagaggaggagaauuaagaagaggau

SEQ ID NO: 24467 - RNA, 32 nt, Human
aagagaaagagggggaaaggaggaccgaagag

SEQ ID NO: 24468 - RNA, 32 nt, Human
aagagaaagguagaaauaaaaacuccuuaacu

SEQ ID NO: 24469 - RNA, 32 nt, Human
aagagaaagguagaacuaaaaacuccuuaacu

SEQ ID NO: 24470 - RNA, 19 nt, Human
aagagaaaucggucauuca

SEQ ID NO: 24471 - RNA, 32 nt, Human
aagagaaaugugccucauuugccauuugagaa

SEQ ID NO: 24472 - RNA, 18 nt, Human
aagagaacaaacugcagg

SEQ ID NO: 24473 - RNA, 32 nt, Human
aagagaacaguugaguucucucaguuggguag

SEQ ID NO: 24474 - RNA, 32 nt, Human
aagagaaccugcagccugccucagcucaggcu

SEQ ID NO: 24475 - RNA, 32 nt, Human
aagagaacgcuugagcauccuuggcaacagcc

SEQ ID NO: 24476 - RNA, 32 nt, Human
aagagaacguugcuguaucucaguccaggaga

SEQ ID NO: 24477 - RNA, 32 nt, Human
aagagaacuaccucauaugcaggaugagccaa

SEQ ID NO: 24478 - RNA, 32 nt, Human
aagagaacugaauguucagagcagcguuugua

SEQ ID NO: 24479 - RNA, 32 nt, Human
aagagaacugcuggcauauugagcccucucuc

SEQ ID NO: 24480 - RNA, 32 nt, Human
aagagaacuuagaaagcaugguauggcacagg

SEQ ID NO: 24481 - RNA, 32 nt, Human
aagagaacuuccgagaccucacagagaaauuc

SEQ ID NO: 24482 - RNA, 32 nt, Human
aagagaagaacuagcagagaaauuguauuuca

SEQ ID NO: 24483 - RNA, 32 nt, Human
aagagaagacuuccuuuccucuccucucgccu

SEQ ID NO: 24484 - RNA, 32 nt, Human
aagagaagagccaggaggaagaaagaauggcu

SEQ ID NO: 24485 - RNA, 32 nt, Human
aagagaagaggcugcggcuguacuggaggggg

SEQ ID NO: 24486 - RNA, 32 nt, Human
aagagaagagggcccagcccagagccaccugg

SEQ ID NO: 24487 - RNA, 32 nt, Human
aagagaagagguggugguauugggggaaagug

SEQ ID NO: 24488 - RNA, 32 nt, Human
aagagaagcaccagaagagaugccaagaaguu

SEQ ID NO: 24489 - RNA, 32 nt, Human
aagagaagcagguguuaauguaaguugcugug

SEQ ID NO: 24490 - RNA, 32 nt, Human
aagagaagcugaugcagccggugcuccaccca

SEQ ID NO: 24491 - RNA, 32 nt, Human
aagagaaggaacccucacacaccacugauagg

SEQ ID NO: 24492 - RNA, 32 nt, Human
aagagaaggagcaguggcucaugugggggccu

SEQ ID NO: 24493 - RNA, 32 nt, Human
aagagaaggccagcagaucagugagagugcaa

SEQ ID NO: 24494 - RNA, 32 nt, Human
aagagaagggcuuaguaacuguugugugggug

SEQ ID NO: 24495 - RNA, 32 nt, Human
aagagaaggucuuguacgugccuaaguucuag

SEQ ID NO: 24496 - RNA, 32 nt, Human
aagagaaguagaagaacggcuacagaaggaac

SEQ ID NO: 24497 - RNA, 32 nt, Human
aagagaaguggcagaggcugagaacagaaaga

SEQ ID NO: 24498 - RNA, 32 nt, Human
aagagaaucaaccagcugaguccugcaaaucc

SEQ ID NO: 24499 - RNA, 32 nt, Human
aagagaauccacccucucuggcccugggacau

SEQ ID NO: 24500 - RNA, 32 nt, Human
aagagaaugaauguaugauugugaacugugaa

SEQ ID NO: 24501 - RNA, 32 nt, Human
aagagaauggaaagcagcacacuccguccccu

SEQ ID NO: 24502 - RNA, 32 nt, Human
aagagaauggcgaaccuaggaggcagaguuug

SEQ ID NO: 24503 - RNA, 32 nt, Human
aagagaauuccuauuccuugaggucccuuggg

SEQ ID NO: 24504 - RNA, 32 nt, Human
aagagaauuuauuuccuucuccacucucucca

SEQ ID NO: 24505 - RNA, 32 nt, Human
aagagaauuucucaagaaaaaucccagcaacg

SEQ ID NO: 24506 - RNA, 32 nt, Human
aagagacaaaggagacuccugagggauuuaga

SEQ ID NO: 24507 - RNA, 32 nt, Human
aagagacaagggagaaaacacaauguauagcc

SEQ ID NO: 24508 - RNA, 32 nt, Human
aagagacaagugcuugguaccuacaugcaaag

SEQ ID NO: 24509 - RNA, 32 nt, Human
aagagacacaugcacccguauguucauugcag

SEQ ID NO: 24510 - RNA, 32 nt, Human
aagagacacauguguuagcugcagccuuuuga

SEQ ID NO: 24511 - RNA, 32 nt, Human
aagagacacugccuuuucagcagcagauacug

SEQ ID NO: 24512 - RNA, 25 nt, Human
aagagacagaaaccagccccagagg

SEQ ID NO: 24513 - RNA, 32 nt, Human
aagagacagaagccaaccuugccccucccuuc

SEQ ID NO: 24514 - RNA, 32 nt, Human
aagagacagaggaggggucaggaggcacugcu

SEQ ID NO: 24515 - RNA, 32 nt, Human
aagagacagaguuucgcuuguugcccaggcug

SEQ ID NO: 24516 - RNA, 19 nt, Human
aagagacagcuuuuagagg

SEQ ID NO: 24517 - RNA, 32 nt, Human
aagagacaggcagagaaggagagaggcagaga

SEQ ID NO: 24518 - RNA, 32 nt, Human
aagagacagggucuucuauguugcccaggcug

SEQ ID NO: 24519 - RNA, 32 nt, Human
aagagacagugcuguagccuugagacuaauga

SEQ ID NO: 24520 - RNA, 32 nt, Human
aagagacaguguccagaagaagcaucuuccuc

SEQ ID NO: 24521 - RNA, 32 nt, Human
aagagacauguuugcagaacccuuuaggaugg

SEQ ID NO: 24522 - RNA, 32 nt, Human
aagagaccaagcuuguuucccugcuggccaaa

SEQ ID NO: 24523 - RNA, 32 nt, Human
aagagaccagccuggccaguauggugaaaccc

SEQ ID NO: 24524 - RNA, 32 nt, Human
aagagaccaucuuugccugcacagcacucuuc

SEQ ID NO: 24525 - RNA, 32 nt, Human
aagagaccccacaggaguucuggccugugacu

SEQ ID NO: 24526 - RNA, 32 nt, Human
aagagaccccgugcccuuuaaccggcauuugc

SEQ ID NO: 24527 - RNA, 32 nt, Human
aagagacccuggggcugggugugguggcucac

SEQ ID NO: 24528 - RNA, 32 nt, Human
aagagaccucacucuucucuugcuuucgugag

SEQ ID NO: 24529 - RNA, 32 nt, Human
aagagaccuuagcugcuccaaccuggugcuga

SEQ ID NO: 24530 - RNA, 32 nt, Human
aagagaccuucagagaagacauggcuuccaga

SEQ ID NO: 24531 - RNA, 32 nt, Human
aagagaccuuggcugcucacuguccacaugug

SEQ ID NO: 24532 - RNA, 32 nt, Human
aagagacggaguuucgcucuucuucccaugcu

SEQ ID NO: 24533 - RNA, 32 nt, Human
aagagacgggagagaggagagagaaagagaga

SEQ ID NO: 24534 - RNA, 32 nt, Human
aagagacgggucucacuauguugcccaggcug

SEQ ID NO: 24535 - RNA, 32 nt, Human
aagagacuacuagguuaccacucugggcauug

SEQ ID NO: 24536 - RNA, 32 nt, Human
aagagacuccagcauggccuucuguuugcccc

SEQ ID NO: 24537 - RNA, 32 nt, Human
aagagacugagggucagagaggucacauggcu

SEQ ID NO: 24538 - RNA, 32 nt, Human
aagagacuggccaacaggaccaaccaagcacc

SEQ ID NO: 24539 - RNA, 32 nt, Human
aagagacuggggccuacacagaggcaggcaug

SEQ ID NO: 24540 - RNA, 32 nt, Human
aagagacuggggcgcagccucuccccaacacg

SEQ ID NO: 24541 - RNA, 32 nt, Human
aagagacugucucugaggcaccaccuuugcug

SEQ ID NO: 24542 - RNA, 32 nt, Human
aagagacuuccagcaccucucaguugaaugaa

SEQ ID NO: 24543 - RNA, 32 nt, Human
aagagacuuccucugguuuccucaggaggaaa

SEQ ID NO: 24544 - RNA, 32 nt, Human
aagagacuuccucuuggcguucaggaaacaca

SEQ ID NO: 24545 - RNA, 32 nt, Human
aagagacuugcgcgcacgcacaguccucugga

SEQ ID NO: 24546 - RNA, 32 nt, Human
aagagagaaaagacaagggaagaaaagaagaa

SEQ ID NO: 24547 - RNA, 32 nt, Human
aagagagaaagaaagagaaaguacucagaggc

SEQ ID NO: 24548 - RNA, 32 nt, Human
aagagagaaaucuagugucuauugcaggagaa

SEQ ID NO: 24549 - RNA, 32 nt, Human
aagagagaaaugacaggagccugcucuaaggc

SEQ ID NO: 24550 - RNA, 32 nt, Human
aagagagaagaaaagaagaauggagagagagg

SEQ ID NO: 24551 - RNA, 32 nt, Human
aagagagaaggaagaauggcaaaggaaggaag

SEQ ID NO: 24552 - RNA, 32 nt, Human
aagagagaaucacuugagcucaggaguucaag

SEQ ID NO: 24553 - RNA, 32 nt, Human
aagagagaaugcuucuuacaggaacaguuacc

SEQ ID NO: 24554 - RNA, 32 nt, Human
aagagagaauggaagagacaaaagaggcuaug

SEQ ID NO: 24555 - RNA, 32 nt, Human
aagagagaccagagcucacucuccagugugug

SEQ ID NO: 24556 - RNA, 32 nt, Human
aagagagacuauucaauaaaaacucacugggu

SEQ ID NO: 24557 - RNA, 32 nt, Human
aagagagagaaaaggagagaggaagacacaca

SEQ ID NO: 24558 - RNA, 32 nt, Human
aagagagaucagacugucacugugucuaugua

SEQ ID NO: 24559 - RNA, 32 nt, Human
aagagagaucagacugucacugugucuauguc

SEQ ID NO: 24560 - RNA, 32 nt, Human
aagagagaucagacuguuacugugucuacaua

SEQ ID NO: 24561 - RNA, 32 nt, Human
aagagagaucagacuguuacugugucuaugua

SEQ ID NO: 24562 - RNA, 32 nt, Human
aagagagaucagauuguuacugugucugugua

SEQ ID NO: 24563 - RNA, 32 nt, Human
aagagagauccaguaugcaccccucagcuuuc

SEQ ID NO: 24564 - RNA, 32 nt, Human
aagagagaucguggagagagccagggcccaga

SEQ ID NO: 24565 - RNA, 32 nt, Human
aagagagauggaaaacuugaugacuagcucca

SEQ ID NO: 24566 - RNA, 32 nt, Human
aagagagcaacgaggaaaggagagggacucug

SEQ ID NO: 24567 - RNA, 32 nt, Human
aagagagcaggauggagaauggaaggaaagcc

SEQ ID NO: 24568 - RNA, 18 nt, Human
aagagagccaggcccuug

SEQ ID NO: 24569 - RNA, 32 nt, Human
aagagagcucaagaggaaugcuuugugagaag

SEQ ID NO: 24570 - RNA, 32 nt, Human
aagagaggaaaucagucgcugaguauuauuug

SEQ ID NO: 24571 - RNA, 31 nt, Human
aagagaggaauugugccucagaagcuguaug

SEQ ID NO: 24572 - RNA, 32 nt, Human
aagagaggaccagaccaggcagaggaacauuu

SEQ ID NO: 24573 - RNA, 32 nt, Human
aagagaggagucaacccaggggagcaggauuc

SEQ ID NO: 24574 - RNA, 32 nt, Human
aagagaggagugggacaguccucuccaccaag

SEQ ID NO: 24575 - RNA, 21 nt, Human
aagagaggaugacacaucaaa

SEQ ID NO: 24576 - RNA, 32 nt, Human
aagagaggcaaaggcucucacuccaggacagu

SEQ ID NO: 24577 - RNA, 32 nt, Human
aagagaggccaguacaaagcccauggauuuug

SEQ ID NO: 24578 - RNA, 32 nt, Human
aagagaggcccaggcuggggcagcccugagag

SEQ ID NO: 24579 - RNA, 32 nt, Human
aagagaggccuucucauccccaagcucuccag

SEQ ID NO: 24580 - RNA, 32 nt, Human
aagagagggaacagggcuucucuagauuauuu

SEQ ID NO: 24581 - RNA, 32 nt, Human
aagagagggaagagaaagcacagagcagagaa

SEQ ID NO: 24582 - RNA, 32 nt, Human
aagagagggagaaagagagggagaaagggaga

SEQ ID NO: 24583 - RNA, 32 nt, Human
aagagagggaggaggaaaggaaggagagagau

SEQ ID NO: 24584 - RNA, 32 nt, Human
aagagagggaggaggagcuggagcuauccuac

SEQ ID NO: 24585 - RNA, 32 nt, Human
aagagagggauaaaauucaggagcaaguuucc

SEQ ID NO: 24586 - RNA, 32 nt, Human
aagagagggaugcauggagauagccccacagg

SEQ ID NO: 24587 - RNA, 32 nt, Human
aagagagggcagagucuggauuugaacccuug

SEQ ID NO: 24588 - RNA, 32 nt, Human
aagagagguagaauggugcuaguuuccuauuu

SEQ ID NO: 24589 - RNA, 32 nt, Human
aagagagguguguacagcaaggaagcaaaaau

SEQ ID NO: 24590 - RNA, 32 nt, Human
aagagagguuucuuuucuggaccucaguuucu

SEQ ID NO: 24591 - RNA, 32 nt, Human
aagagaguaugcauuaaaacaaaagcccgcuu

SEQ ID NO: 24592 - RNA, 32 nt, Human
aagagagugagaggagcaacagugaaaggcca

SEQ ID NO: 24593 - RNA, 32 nt, Human
aagagaguguuugagagcagaagcuauggcaa

SEQ ID NO: 24594 - RNA, 32 nt, Human
aagagaguucaucagggacugauuacguagga

SEQ ID NO: 24595 - RNA, 32 nt, Human
aagagaguuggccagguguggugacucacacc

SEQ ID NO: 24596 - RNA, 32 nt, Human
aagagauaaacaguaacccuuccaggagccca

SEQ ID NO: 24597 - RNA, 32 nt, Human
aagagauaauaugccaggggguugaugccagg

SEQ ID NO: 24598 - RNA, 32 nt, Human
aagagauaggagacagagaaagggacaggaga

SEQ ID NO: 24599 - RNA, 32 nt, Human
aagagauagggagggaggggacauaaagggaa

SEQ ID NO: 24600 - RNA, 32 nt, Human
aagagauaugaggaaaauuguuaaggaaguca

SEQ ID NO: 24601 - RNA, 32 nt, Human
aagagaucaagaccagccugaccaacguggcg

SEQ ID NO: 24602 - RNA, 32 nt, Human
aagagaucaagaccauagugaccaacauagug

SEQ ID NO: 24603 - RNA, 32 nt, Human
aagagaucaagagguugaagcugcagugagcu

SEQ ID NO: 24604 - RNA, 32 nt, Human
aagagaucagaaugaugaguccagaaccccug

SEQ ID NO: 24605 - RNA, 32 nt, Human
aagagaucagggagggcuaaaguugugucuua

SEQ ID NO: 24606 - RNA, 32 nt, Human
aagagaucccuaauaugccuccugaaaugcag

SEQ ID NO: 24607 - RNA, 32 nt, Human
aagagaucccuuaagaaguuagaaggcuuaag

SEQ ID NO: 24608 - RNA, 32 nt, Human
aagagauccuccugccuaagcccccaaauagc

SEQ ID NO: 24609 - RNA, 32 nt, Human
aagagaucgagaccagccuggccaacauagua

SEQ ID NO: 24610 - RNA, 32 nt, Human
aagagaucgagaccagccuggccaacguggug

SEQ ID NO: 24611 - RNA, 32 nt, Human
aagagaucuuuucagcugcuauuuuggaauaa

SEQ ID NO: 24612 - RNA, 30 nt, Human
aagagaugaaaccaggaggcaggagaaugu

SEQ ID NO: 24613 - RNA, 32 nt, Human
aagagaugaaucuguugggauuucuucuuuua

SEQ ID NO: 24614 - RNA, 32 nt, Human
aagagaugcaagacuuucaacugacuggcaaa

SEQ ID NO: 24615 - RNA, 32 nt, Human
aagagaugcacgcaguuggcucuugcaagccu

SEQ ID NO: 24616 - RNA, 32 nt, Human
aagagaugccuaaaauguuuucuauuuaaaaa

SEQ ID NO: 24617 - RNA, 32 nt, Human
aagagaugccugggcgucaccaugccacagcu

SEQ ID NO: 24618 - RNA, 32 nt, Human
aagagauggaggaggaggacuggcccagaauu

SEQ ID NO: 24619 - RNA, 30 nt, Human
aagagauggcagcagaggcuggggaagccg

SEQ ID NO: 24620 - RNA, 32 nt, Human
aagagaugggagguugggggaggugagcauaa

SEQ ID NO: 24621 - RNA, 32 nt, Human
aagagaugugagccaguuuucccagccuguuu

SEQ ID NO: 24622 - RNA, 32 nt, Human
aagagauguuuccccagguuccauaccaucug

SEQ ID NO: 24623 - RNA, 32 nt, Human
aagagauucccugaguagcaccuucaggcuag

SEQ ID NO: 24624 - RNA, 32 nt, Human
aagagauuccuuucuucuugugacaaaacauc

SEQ ID NO: 24625 - RNA, 32 nt, Human
aagagauucuccccaauuucuuugcagguauc

SEQ ID NO: 24626 - RNA, 32 nt, Human
aagagauuuacucaucuauccaagcacuuaau

SEQ ID NO: 24627 - RNA, 27 nt, Human
aagagcaaaaaugagaccuguauauua

SEQ ID NO: 24628 - RNA, 32 nt, Human
aagagcaaaagccgugaaaggaagcgaagucg

SEQ ID NO: 24629 - RNA, 31 nt, Human
aagagcaaaaguaccuccaugccaagucccu

SEQ ID NO: 24630 - RNA, 21 nt, Human
aagagcaaaauacuggguuga

SEQ ID NO: 24631 - RNA, 32 nt, Human
aagagcaaacuuuagugucucuaaguuaugac

SEQ ID NO: 24632 - RNA, 32 nt, Human
aagagcaaagggaacccagcaguucugaguga

SEQ ID NO: 24633 - RNA, 32 nt, Human
aagagcaaagucaacagaaaaucagcccagca

SEQ ID NO: 24634 - RNA, 32 nt, Human
aagagcaacuaaaaauguaaaauugguuaaaa

SEQ ID NO: 24635 - RNA, 24 nt, Human
aagagcaacuggagauagaagcau

SEQ ID NO: 24636 - RNA, 32 nt, Human
aagagcaagaaaucuacagcugguguaaaaua

SEQ ID NO: 24637 - RNA, 32 nt, Human
aagagcaagcuggagaggcugggcaggggcug

SEQ ID NO: 24638 - RNA, 32 nt, Human
aagagcaagggaucacugugcuggguuuaaau

SEQ ID NO: 24639 - RNA, 32 nt, Human
aagagcaagugccuuggccgggcacaguggcu

SEQ ID NO: 24640 - RNA, 32 nt, Human
aagagcaaugugccgucuucugucuuuggaaa

SEQ ID NO: 24641 - RNA, 32 nt, Human
aagagcacacagagaagggaagaaggggccau

SEQ ID NO: 24642 - RNA, 32 nt, Human
aagagcacagccgucuuucacggucacagaga

SEQ ID NO: 24643 - RNA, 32 nt, Human
aagagcaccagccagggcaacauagcgugacc

SEQ ID NO: 24644 - RNA, 32 nt, Human
aagagcaccccaauuuuccuuuggagaaccuc

SEQ ID NO: 24645 - RNA, 32 nt, Human
aagagcaccucugccuucuuccucuguugcca

SEQ ID NO: 24646 - RNA, 32 nt, Human
aagagcacugaauuuccuaggggaaggugagc

SEQ ID NO: 24647 - RNA, 32 nt, Human
aagagcacugcacugacgguuuggagaccuga

SEQ ID NO: 24648 - RNA, 21 nt, Human
aagagcacugcaugagcaagg

SEQ ID NO: 24649 - RNA, 32 nt, Human
aagagcacuuccuugccuccguaaggccagag

SEQ ID NO: 24650 - RNA, 32 nt, Human
aagagcacuugucuuucuccugccucagcagc

SEQ ID NO: 24651 - RNA, 21 nt, Human
aagagcagaacuccugacuac

SEQ ID NO: 24652 - RNA, 23 nt, Human
aagagcagaaugucuguauacua

SEQ ID NO: 24653 - RNA, 32 nt, Human
aagagcagagcugcagacaggaauaagaagaa

SEQ ID NO: 24654 - RNA, 32 nt, Human
aagagcagagggagcauggcccagggguguug

SEQ ID NO: 24655 - RNA, 32 nt, Human
aagagcagcacuucucagcuauuaaaggcccc

SEQ ID NO: 24656 - RNA, 32 nt, Human
aagagcagcagcacccucagggcauccgaugg

SEQ ID NO: 24657 - RNA, 32 nt, Human
aagagcagccugggcaaaauagugagacaccg

SEQ ID NO: 24658 - RNA, 32 nt, Human
aagagcagccugggcaauacagcaagaccuca

SEQ ID NO: 24659 - RNA, 32 nt, Human
aagagcagccugggcaauauagaaagaccucu

SEQ ID NO: 24660 - RNA, 31 nt, Human
aagagcagcuaaaaccuacucacuuagcaug

SEQ ID NO: 24661 - RNA, 32 nt, Human
aagagcagcucgaagaccauccuggccauagc

SEQ ID NO: 24662 - RNA, 32 nt, Human
aagagcagcugcuaggggcugaagcgaagggg

SEQ ID NO: 24663 - RNA, 32 nt, Human
aagagcaggagaaaagacguaaaccuacccca

SEQ ID NO: 24664 - RNA, 32 nt, Human
aagagcaggagaaaauagaugucccagaacaa

SEQ ID NO: 24665 - RNA, 32 nt, Human
aagagcagggcagaggguggcaguggcacaua

SEQ ID NO: 24666 - RNA, 32 nt, Human
aagagcaggggagguuuaguuggucucagcac

SEQ ID NO: 24667 - RNA, 32 nt, Human
aagagcagucagaaguaucuguuucuccuaga

SEQ ID NO: 24668 - RNA, 32 nt, Human
aagagcaguucguggaauuuugcccaucugac

SEQ ID NO: 24669 - RNA, 32 nt, Human
aagagcaguucugcagcuggccuuguuccuuc

SEQ ID NO: 24670 - RNA, 32 nt, Human
aagagcaucaccuccaaucauccugguggccu

SEQ ID NO: 24671 - RNA, 32 nt, Human
aagagcaugcuuacacccuacugugaaaaggg

SEQ ID NO: 24672 - RNA, 32 nt, Human
aagagcauugcaucuuugcugaauccagaugg

SEQ ID NO: 24673 - RNA, 32 nt, Human
aagagccaagagcaggaugagguggaggcguu

SEQ ID NO: 24674 - RNA, 32 nt, Human
aagagccaagaggcaucucagauuugucaaca

SEQ ID NO: 24675 - RNA, 32 nt, Human
aagagccacacacccauuuuccucacuuuccc

SEQ ID NO: 24676 - RNA, 32 nt, Human
aagagccacagcaccuagccugaggcugacua

SEQ ID NO: 24677 - RNA, 32 nt, Human
aagagccacugaaagcagaauaccuguuucaa

SEQ ID NO: 24678 - RNA, 32 nt, Human
aagagccacugcacaacagccaaggaacuuug

SEQ ID NO: 24679 - RNA, 32 nt, Human
aagagccagaaacgugguucuucaaguagauc

SEQ ID NO: 24680 - RNA, 32 nt, Human
aagagccagaagcaggguucugggaauuuugc

SEQ ID NO: 24681 - RNA, 32 nt, Human
aagagccaggagaccagggagggagcuugugg

SEQ ID NO: 24682 - RNA, 32 nt, Human
aagagccaggagaccagggagggaguuugugg

SEQ ID NO: 24683 - RNA, 32 nt, Human
aagagccaggagacccaggagggagcuugugg

SEQ ID NO: 24684 - RNA, 32 nt, Human
aagagccaggaggcucagagucugcagcagca

SEQ ID NO: 24685 - RNA, 32 nt, Human
aagagccagggagggcagcccaggcccaagug

SEQ ID NO: 24686 - RNA, 32 nt, Human
aagagccauggugaaaccgcaucucuacuaaa

SEQ ID NO: 24687 - RNA, 32 nt, Human
aagagcccaggagguugagaaugcagugagcu

SEQ ID NO: 24688 - RNA, 32 nt, Human
aagagcccauagggcagagcugagucggcaga

SEQ ID NO: 24689 - RNA, 32 nt, Human
aagagcccauaucaacaacacacccauguaug

SEQ ID NO: 24690 - RNA, 32 nt, Human
aagagccccaucccuucucucucugccaccau

SEQ ID NO: 24691 - RNA, 32 nt, Human
aagagcccccuccagaccacucuacagcugcu

SEQ ID NO: 24692 - RNA, 32 nt, Human
aagagccccuaccuugaaaagaagguuggagu

SEQ ID NO: 24693 - RNA, 32 nt, Human
aagagccccugcccugcccuagcugaggcaca

SEQ ID NO: 24694 - RNA, 32 nt, Human
aagagcccgcaugcauuuguggcuccacaacu

SEQ ID NO: 24695 - RNA, 32 nt, Human
aagagcccgccgucugcaggggccuggaggaa

SEQ ID NO: 24696 - RNA, 32 nt, Human
aagagcccuggaauauaaaaagacaugagaug

SEQ ID NO: 24697 - RNA, 32 nt, Human
aagagccgacuugcugaaucuuccagccuuca

SEQ ID NO: 24698 - RNA, 32 nt, Human
aagagccggacaagggcucuggacucaaccug

SEQ ID NO: 24699 - RNA, 32 nt, Human
aagagccucuuuccuucauaccaucuucagau

SEQ ID NO: 24700 - RNA, 32 nt, Human
aagagccugacacccaucccucugcccuccac

SEQ ID NO: 24701 - RNA, 32 nt, Human
aagagccugagugacagagcaagaccccaucu

SEQ ID NO: 24702 - RNA, 32 nt, Human
aagagccugcagccccugucagaugccagcca

SEQ ID NO: 24703 - RNA, 32 nt, Human
aagagccugccacccucccccuucaaugcacc

SEQ ID NO: 24704 - RNA, 32 nt, Human
aagagccuggacagauguaaugagaacuaaag

SEQ ID NO: 24705 - RNA, 32 nt, Human
aagagccugggcaacauagugagaccccaucu

SEQ ID NO: 24706 - RNA, 32 nt, Human
aagagccugggcugaugaugauguggcagaac

SEQ ID NO: 24707 - RNA, 32 nt, Human
aagagccuguaaucucagcuacucaggaggcu

SEQ ID NO: 24708 - RNA, 32 nt, Human
aagagccuuacaugaguccucucacuuaaucu

SEQ ID NO: 24709 - RNA, 32 nt, Human
aagagccuucaggagugucuguccacaggcag

SEQ ID NO: 24710 - RNA, 32 nt, Human
aagagccuucucucuuccuguugacacuugcc

SEQ ID NO: 24711 - RNA, 32 nt, Human
aagagcgaggcuguagcggcugccuguugagg

SEQ ID NO: 24712 - RNA, 32 nt, Human
aagagcgcaccauugcacuccagccuugggcg

SEQ ID NO: 24713 - RNA, 32 nt, Human
aagagcgggagaggagauggagaaacagaccc

SEQ ID NO: 24714 - RNA, 32 nt, Human
aagagcgguugucuguuugcugugccauuucu

SEQ ID NO: 24715 - RNA, 32 nt, Human
aagagcgugccuggacccugggagguguggug

SEQ ID NO: 24716 - RNA, 32 nt, Human
aagagcuaaagauggcugaauuucuagaugac

SEQ ID NO: 24717 - RNA, 32 nt, Human
aagagcuaagggccguuugcaguggcucaagc

SEQ ID NO: 24718 - RNA, 32 nt, Human
aagagcuaauccucaucugucauauccagaaa

SEQ ID NO: 24719 - RNA, 32 nt, Human
aagagcuaccugaggcagaagcuccaggcccu

SEQ ID NO: 24720 - RNA, 32 nt, Human
aagagcuagggagggugcacaggcgcuggcac

SEQ ID NO: 24721 - RNA, 31 nt, Human
aagagcucaaaccauuuuacauuccuguuug

SEQ ID NO: 24722 - RNA, 32 nt, Human
aagagcucauagacugacugguccagaagaca

SEQ ID NO: 24723 - RNA, 32 nt, Human
aagagcuccagaaaucugcacaggguucucuu

SEQ ID NO: 24724 - RNA, 32 nt, Human
aagagcuccuccauaauucagcauuaaccagc

SEQ ID NO: 24725 - RNA, 19 nt, Human
aagagcuccuggacgcaga

SEQ ID NO: 24726 - RNA, 18 nt, Human
aagagcucucaacccaga

SEQ ID NO: 24727 - RNA, 32 nt, Human
aagagcucuccaggaaaacauuggauauauug

SEQ ID NO: 24728 - RNA, 32 nt, Human
aagagcucugcaggcuuuccacugccuguauu

SEQ ID NO: 24729 - RNA, 32 nt, Human
aagagcucugcuugcucaacacuugcuuuaug

SEQ ID NO: 24730 - RNA, 32 nt, Human
aagagcucuguauuaacgagcuacucauugag

SEQ ID NO: 24731 - RNA, 23 nt, Human
aagagcucuugggaagacagaga

SEQ ID NO: 24732 - RNA, 32 nt, Human
aagagcugaacaaacagaucgaggagcagaag

SEQ ID NO: 24733 - RNA, 32 nt, Human
aagagcugaagaauaaaaauaugcugucuggc

SEQ ID NO: 24734 - RNA, 32 nt, Human
aagagcugaagcagaagaauaagccauccucu

SEQ ID NO: 24735 - RNA, 32 nt, Human
aagagcugaaugaaggccugguggcaggaugg

SEQ ID NO: 24736 - RNA, 32 nt, Human
aagagcugacucugagcccuggcccagccaag

SEQ ID NO: 24737 - RNA, 24 nt, Human
aagagcugagauuacaggcgugag

SEQ ID NO: 24738 - RNA, 32 nt, Human
aagagcugagauuacaggcgugagccaccaug

SEQ ID NO: 24739 - RNA, 32 nt, Human
aagagcugagccaagucacaggagauuauaug

SEQ ID NO: 24740 - RNA, 21 nt, Human
aagagcugagcgcagcugaca

SEQ ID NO: 24741 - RNA, 32 nt, Human
aagagcugaugaaaucucagucuuuuguaucu

SEQ ID NO: 24742 - RNA, 32 nt, Human
aagagcugccaggcagugucuuagaugugaga

SEQ ID NO: 24743 - RNA, 32 nt, Human
aagagcuggcaaagguggcucuccaguuaguu

SEQ ID NO: 24744 - RNA, 32 nt, Human
aagagcuggcagcugcugaugguguuucccaa

SEQ ID NO: 24745 - RNA, 32 nt, Human
aagagcuggcuguaaucccgccucccgccagc

SEQ ID NO: 24746 - RNA, 19 nt, Human
aagagcugggaauuuauga

SEQ ID NO: 24747 - RNA, 32 nt, Human
aagagcugggagagacacaggaaagagaaaag

SEQ ID NO: 24748 - RNA, 24 nt, Human
aagagcugggauuacaagugugag

SEQ ID NO: 24749 - RNA, 32 nt, Human
aagagcugggauuacaggcaugagccacugug

SEQ ID NO: 24750 - RNA, 32 nt, Human
aagagcugggauuacaggcaugagucaccacg

SEQ ID NO: 24751 - RNA, 24 nt, Human
aagagcugggauuacaggcgugag

SEQ ID NO: 24752 - RNA, 32 nt, Human
aagagcugggauuacaggcgugagacaccgcg

SEQ ID NO: 24753 - RNA, 24 nt, Human
aagagcugggauuacaggugugag

SEQ ID NO: 24754 - RNA, 32 nt, Human
aagagcugggauuacaggugugagcuaccgcg

SEQ ID NO: 24755 - RNA, 32 nt, Human
aagagcugggcauuuagaaagaugucauuugc

SEQ ID NO: 24756 - RNA, 19 nt, Human
aagagcuggggcagaggca

SEQ ID NO: 24757 - RNA, 32 nt, Human
aagagcuggguccuucccccugcuccaucuga

SEQ ID NO: 24758 - RNA, 32 nt, Human
aagagcuuaaaaccagcccaggcaacauggca

SEQ ID NO: 24759 - RNA, 32 nt, Human
aagagcuuacuggguaguuagaguucaucagg

SEQ ID NO: 24760 - RNA, 25 nt, Human
aagagcuuaucuaagaagggaagag

SEQ ID NO: 24761 - RNA, 32 nt, Human
aagagcuugcccaggcuuccucucucucccuu

SEQ ID NO: 24762 - RNA, 19 nt, Human
aagagcuuggaggaccagg

SEQ ID NO: 24763 - RNA, 32 nt, Human
aagagcuuggaggaccaggcacuuugaggaag

SEQ ID NO: 24764 - RNA, 32 nt, Human
aagagcuugugacuggacuccagccugggcaa

SEQ ID NO: 24765 - RNA, 32 nt, Human
aagagcuuugaucuucucagccaggagaagag

SEQ ID NO: 24766 - RNA, 32 nt, Human
aagaggaaaaacacagaacucuccaaagcuuu

SEQ ID NO: 24767 - RNA, 32 nt, Human
aagaggaaaagaacauuccaggcagacagcac

SEQ ID NO: 24768 - RNA, 32 nt, Human
aagaggaaagaaacacaaaaaguggcuugaug

SEQ ID NO: 24769 - RNA, 32 nt, Human
aagaggaaagagaagagaucgcucagggguga

SEQ ID NO: 24770 - RNA, 32 nt, Human
aagaggaaagagacucauguugcucaauguga

SEQ ID NO: 24771 - RNA, 32 nt, Human
aagaggaaauaaugccuccaccauuuucuacc

SEQ ID NO: 24772 - RNA, 32 nt, Human
aagaggaaaucagggucucgcucuguugcuca

SEQ ID NO: 24773 - RNA, 32 nt, Human
aagaggaaauggugacccaaguguggggguug

SEQ ID NO: 24774 - RNA, 32 nt, Human
aagaggaaauugagacacagagacagacauga

SEQ ID NO: 24775 - RNA, 32 nt, Human
aagaggaacagcugcuggccuuggaagacuac

SEQ ID NO: 24776 - RNA, 32 nt, Human
aagaggaacggcugggaucaguuagugauguc

SEQ ID NO: 24777 - RNA, 32 nt, Human
aagaggaagaaagaacagauguucacagcuga

SEQ ID NO: 24778 - RNA, 32 nt, Human
aagaggaagaagaggaaggaaaaggagucagu

SEQ ID NO: 24779 - RNA, 31 nt, Human
aagaggaagagagagacccucacugcugggg

SEQ ID NO: 24780 - RNA, 32 nt, Human
aagaggaagagagagacccucacugcugggga

SEQ ID NO: 24781 - RNA, 32 nt, Human
aagaggaagaggagaauggauguuggggguac

SEQ ID NO: 24782 - RNA, 32 nt, Human
aagaggaagaggagcgugaggagggaggcgag

SEQ ID NO: 24783 - RNA, 32 nt, Human
aagaggaagaggaggaaggcgacggcaacagu

SEQ ID NO: 24784 - RNA, 32 nt, Human
aagaggaagaggaggaggaggagaccggcagc

SEQ ID NO: 24785 - RNA, 32 nt, Human
aagaggaagaggcugcaauggagcagcacacc

SEQ ID NO: 24786 - RNA, 32 nt, Human
aagaggaagauccaggaguccauagaaaagcu

SEQ ID NO: 24787 - RNA, 32 nt, Human
aagaggaagcugagcuauacuacuuuuaaaau

SEQ ID NO: 24788 - RNA, 32 nt, Human
aagaggaagggcagguacuagguguuucauuu

SEQ ID NO: 24789 - RNA, 32 nt, Human
aagaggaagggccuugugggauacaccuugca

SEQ ID NO: 24790 - RNA, 32 nt, Human
aagaggaauaagaauggagcaguacaugggaa

SEQ ID NO: 24791 - RNA, 32 nt, Human
aagaggaauauucugguuuauuuccuagacug

SEQ ID NO: 24792 - RNA, 18 nt, Human
aagaggaauggacuuggc

SEQ ID NO: 24793 - RNA, 32 nt, Human
aagaggacacagaagaguuguauagcaccaga

SEQ ID NO: 24794 - RNA, 32 nt, Human
aagaggacacagaaggauucugcaaauagccu

SEQ ID NO: 24795 - RNA, 32 nt, Human
aagaggacagagccaugcaguccacagaccac

SEQ ID NO: 24796 - RNA, 32 nt, Human
aagaggaccacacuccagcccaggacaaaagc

SEQ ID NO: 24797 - RNA, 32 nt, Human
aagaggaccacacuccagcccaggacaaaugc

SEQ ID NO: 24798 - RNA, 32 nt, Human
aagaggaccaggaggagcucaucuuuggugag

SEQ ID NO: 24799 - RNA, 32 nt, Human
aagaggacccaagagagugccgugcugaggcu

SEQ ID NO: 24800 - RNA, 32 nt, Human
aagaggacccugggugucagugagaucucagc

SEQ ID NO: 24801 - RNA, 32 nt, Human
aagaggaccuggcacacagucaguauucagug

SEQ ID NO: 24802 - RNA, 32 nt, Human
aagaggaccuugcuguccgccugcacugcuuc

SEQ ID NO: 24803 - RNA, 32 nt, Human
aagaggacgaggaggaugaggagggggagagc

SEQ ID NO: 24804 - RNA, 32 nt, Human
aagaggacgaggggcgcaaggcuuccuccggg

SEQ ID NO: 24805 - RNA, 24 nt, Human
aagaggacugggaauaaagucaga

SEQ ID NO: 24806 - RNA, 32 nt, Human
aagaggacuucgggguagaggcugggaggagc

SEQ ID NO: 24807 - RNA, 32 nt, Human
aagaggagaaaaaggagaaaaaguaaacaugu

SEQ ID NO: 24808 - RNA, 32 nt, Human
aagaggagaaaguucuggagaggaugguggug

SEQ ID NO: 24809 - RNA, 32 nt, Human
aagaggagaaugcacaaguguaacuccugguu

SEQ ID NO: 24810 - RNA, 32 nt, Human
aagaggagagaagagagcugaaauaucaaaug

SEQ ID NO: 24811 - RNA, 32 nt, Human
aagaggagagagaagagauggacagaccucag

SEQ ID NO: 24812 - RNA, 32 nt, Human
aagaggagagccaacauucacauuuaccaugg

SEQ ID NO: 24813 - RNA, 21 nt, Human
aagaggagauugaaacugaaa

SEQ ID NO: 24814 - RNA, 32 nt, Human
aagaggagccccgagcagggaggcuggggccu

SEQ ID NO: 24815 - RNA, 19 nt, Human
aagaggagccgagcgcggc

SEQ ID NO: 24816 - RNA, 23 nt, Human
aagaggagccugugaauucagag

SEQ ID NO: 24817 - RNA, 23 nt, Human
aagaggagcuagagcuugccuca

SEQ ID NO: 24818 - RNA, 32 nt, Human
aagaggagcugcagggaccauggccagguuac

SEQ ID NO: 24819 - RNA, 32 nt, Human
aagaggagcugguaccauuucuucugaaacug

SEQ ID NO: 24820 - RNA, 32 nt, Human
aagaggaggaagaggaaggggagagggacgag

SEQ ID NO: 24821 - RNA, 32 nt, Human
aagaggaggaagaggaugaccugagugagcug

SEQ ID NO: 24822 - RNA, 32 nt, Human
aagaggaggaagcaaugggggaauaugacacc

SEQ ID NO: 24823 - RNA, 22 nt, Human
aagaggaggacuaaacucagag

SEQ ID NO: 24824 - RNA, 19 nt, Human
aagaggaggagaaggggga

SEQ ID NO: 24825 - RNA, 32 nt, Human
aagaggaggagaauuaagaagaggaugaucgg

SEQ ID NO: 24826 - RNA, 32 nt, Human
aagaggaggaggaaggaaagaaagaaagcgag

SEQ ID NO: 24827 - RNA, 32 nt, Human
aagaggaggaggaggaagaggaggaggaggaa

SEQ ID NO: 24828 - RNA, 32 nt, Human
aagaggaggaggaggaagaggggagcacaaag

SEQ ID NO: 24829 - RNA, 32 nt, Human
aagaggaggaggaggagaccggcagcaacucu

SEQ ID NO: 24830 - RNA, 32 nt, Human
aagaggaggaggaggagaggcggcggggaagg

SEQ ID NO: 24831 - RNA, 32 nt, Human
aagaggaggaggaggagaugguggccgaggaa

SEQ ID NO: 24832 - RNA, 32 nt, Human
aagaggaggaggaggaggaagaauaggaggaa

SEQ ID NO: 24833 - RNA, 32 nt, Human
aagaggaggaggaggaggagaaggaggagaga

SEQ ID NO: 24834 - RNA, 32 nt, Human
aagaggaggaggaggaggagcuggaggaggag

SEQ ID NO: 24835 - RNA, 32 nt, Human
aagaggaggaggaggaggaggaagaagaaaga

SEQ ID NO: 24836 - RNA, 32 nt, Human
aagaggaggaggaggaggaggaagcugaagac

SEQ ID NO: 24837 - RNA, 32 nt, Human
aagaggaggaggaggaggaggaaggggcuugg

SEQ ID NO: 24838 - RNA, 32 nt, Human
aagaggaggaggaggaggaggaggaggaggag

SEQ ID NO: 24839 - RNA, 32 nt, Human
aagaggaggggaggaggaggaggaggaggagg

SEQ ID NO: 24840 - RNA, 32 nt, Human
aagaggaggugaccugucccaucugccuggag

SEQ ID NO: 24841 - RNA, 32 nt, Human
aagaggagguggcaaugguagauccacccuua

SEQ ID NO: 24842 - RNA, 24 nt, Human
aagaggaguucaccaguuucaaag

SEQ ID NO: 24843 - RNA, 22 nt, Human
aagaggaguucccugcucaagg

SEQ ID NO: 24844 - RNA, 32 nt, Human
aagaggauccuugauguggaagauagaaaaag

SEQ ID NO: 24845 - RNA, 32 nt, Human
aagaggaugaccagagccaaggcucacagaaa

SEQ ID NO: 24846 - RNA, 32 nt, Human
aagaggaugcaggucuuuaagagccaucagcu

SEQ ID NO: 24847 - RNA, 31 nt, Human
aagaggauggacaaagauucucaggggcugc

SEQ ID NO: 24848 - RNA, 32 nt, Human
aagaggauggcagaggcugcugggccuuggaa

SEQ ID NO: 24849 - RNA, 32 nt, Human
aagaggauugcuugaguccaggaguuugagac

SEQ ID NO: 24850 - RNA, 32 nt, Human
aagaggauuuuccaguguuucuggcaguuggu

SEQ ID NO: 24851 - RNA, 32 nt, Human
aagaggcaaccuguugaauuuacucucucaga

SEQ ID NO: 24852 - RNA, 32 nt, Human
aagaggcaaggcagaaauggaugaugaacauc

SEQ ID NO: 24853 - RNA, 32 nt, Human
aagaggcaccuugugcaauauucccaucccug

SEQ ID NO: 24854 - RNA, 32 nt, Human
aagaggcagagggaggcagccagcggggcgug

SEQ ID NO: 24855 - RNA, 32 nt, Human
aagaggcagcagacacaaauaaggugguccuu

SEQ ID NO: 24856 - RNA, 22 nt, Human
aagaggcagcagcaucccaaga

SEQ ID NO: 24857 - RNA, 21 nt, Human
aagaggcagccuggccagagg

SEQ ID NO: 24858 - RNA, 20 nt, Human
aagaggcagcuucgagccca

SEQ ID NO: 24859 - RNA, 20 nt, Human
aagaggcaggcaccccagag

SEQ ID NO: 24860 - RNA, 32 nt, Human
aagaggcaggcagaggcugaggcugauuccac

SEQ ID NO: 24861 - RNA, 20 nt, Human
aagaggcagggaccuaaagg

SEQ ID NO: 24862 - RNA, 32 nt, Human
aagaggcaucugguucucucauguggauggau

SEQ ID NO: 24863 - RNA, 20 nt, Human
aagaggcauggccccaacgg

SEQ ID NO: 24864 - RNA, 32 nt, Human
aagaggccacgcuguaccuaguaugguaugca

SEQ ID NO: 24865 - RNA, 32 nt, Human
aagaggcccagggaauccucuggaccaccaga

SEQ ID NO: 24866 - RNA, 32 nt, Human
aagaggcccaugugccuguuucugccauguaa

SEQ ID NO: 24867 - RNA, 32 nt, Human
aagaggccccgugaaggaggcagugaggagcu

SEQ ID NO: 24868 - RNA, 32 nt, Human
aagaggccccuggauggaugcauggggaaggu

SEQ ID NO: 24869 - RNA, 32 nt, Human
aagaggcccggcggaggcggcggugcagcgcu

SEQ ID NO: 24870 - RNA, 32 nt, Human
aagaggcccugaucccagcucauucaggggag

SEQ ID NO: 24871 - RNA, 32 nt, Human
aagaggcccuggaggaggguggggcuggccgg

SEQ ID NO: 24872 - RNA, 32 nt, Human
aagaggcccugggccgaggugcagugacccug

SEQ ID NO: 24873 - RNA, 32 nt, Human
aagaggcccugguuuggggcugugccagcuca

SEQ ID NO: 24874 - RNA, 32 nt, Human
aagaggccgccgcugccaccuccugggcagcu

SEQ ID NO: 24875 - RNA, 32 nt, Human
aagaggccgccugcacacagagcccaguuaau

SEQ ID NO: 24876 - RNA, 32 nt, Human
aagaggccugggauauuaggacuuugggguuu

SEQ ID NO: 24877 - RNA, 32 nt, Human
aagaggcgcuucuccccuccccuacaccuaaa

SEQ ID NO: 24878 - RNA, 32 nt, Human
aagaggcucacugcccuaucuccuucuuuccu

SEQ ID NO: 24879 - RNA, 32 nt, Human
aagaggcuccaaaaggaagaaaaagaaaaccc

SEQ ID NO: 24880 - RNA, 32 nt, Human
aagaggcucccgcgucccaaccccucgcgccc

SEQ ID NO: 24881 - RNA, 32 nt, Human
aagaggcucggcaccuucuuggaagaaaucau

SEQ ID NO: 24882 - RNA, 32 nt, Human
aagaggcucucaucuuuuccagguagaaggug

SEQ ID NO: 24883 - RNA, 32 nt, Human
aagaggcucucuuguucuccaucaggagagcc

SEQ ID NO: 24884 - RNA, 32 nt, Human
aagaggcugagaugagcagugaacuaagaggc

SEQ ID NO: 24885 - RNA, 32 nt, Human
aagaggcugcaauauuccauccugggugucug

SEQ ID NO: 24886 - RNA, 32 nt, Human
aagaggcugcaauauuccguccugggugucug

SEQ ID NO: 24887 - RNA, 32 nt, Human
aagaggcugguaggcaggugcauuaucaacag

SEQ ID NO: 24888 - RNA, 32 nt, Human
aagaggcuguguccucaguuacccuggaagga

SEQ ID NO: 24889 - RNA, 32 nt, Human
aagaggcuuccagagaaaacggcacaccaauc

SEQ ID NO: 24890 - RNA, 32 nt, Human
aagaggcuuggaccugggcagcuccugccccu

SEQ ID NO: 24891 - RNA, 32 nt, Human
aagaggcuuucucucugaccucauuccaagau

SEQ ID NO: 24892 - RNA, 32 nt, Human
aagagggaagaguggacggugccugggaaugg

SEQ ID NO: 24893 - RNA, 32 nt, Human
aagagggaagucagagguggcgguuaguuggg

SEQ ID NO: 24894 - RNA, 32 nt, Human
aagagggacagagagguuuagaaccuugaccu

SEQ ID NO: 24895 - RNA, 32 nt, Human
aagagggacuccugggcucaucugcccuccau

SEQ ID NO: 24896 - RNA, 32 nt, Human
aagagggacuccuugccucucccuauggccug

SEQ ID NO: 24897 - RNA, 32 nt, Human
aagagggagagaagaaagaagaaaaggagaag

SEQ ID NO: 24898 - RNA, 32 nt, Human
aagagggagagagaagcaggagagggggagga

SEQ ID NO: 24899 - RNA, 32 nt, Human
aagagggagaggggaaggagcugguagugaca

SEQ ID NO: 24900 - RNA, 32 nt, Human
aagagggagaggggagacuguagccuggaagg

SEQ ID NO: 24901 - RNA, 32 nt, Human
aagagggagagugagaggaccaaguccaagug

SEQ ID NO: 24902 - RNA, 32 nt, Human
aagagggagccgguuugggagagaccauugca

SEQ ID NO: 24903 - RNA, 32 nt, Human
aagagggaggcagagauuggagaaucacagcc

SEQ ID NO: 24904 - RNA, 32 nt, Human
aagagggaggcaggaggguuagagugaguagu

SEQ ID NO: 24905 - RNA, 32 nt, Human
aagagggagggaagaaaggaagaaaagaagga

SEQ ID NO: 24906 - RNA, 32 nt, Human
aagagggagggaaggaaggagagcaaaaucuu

SEQ ID NO: 24907 - RNA, 32 nt, Human
aagagggagggagggaggagugcugaagauug

SEQ ID NO: 24908 - RNA, 32 nt, Human
aagagggaggggacagaggcccugccacgucc

SEQ ID NO: 24909 - RNA, 32 nt, Human
aagagggagucacuugaugcuuucagguuaau

SEQ ID NO: 24910 - RNA, 32 nt, Human
aagagggagucuggcaccagccgcagccgggg

SEQ ID NO: 24911 - RNA, 32 nt, Human
aagagggauuggggcaggggaggcagaagggg

SEQ ID NO: 24912 - RNA, 32 nt, Human
aagagggcagaggaacaguuuuuccucucuga

SEQ ID NO: 24913 - RNA, 32 nt, Human
aagagggcagcagcccagcuguuuagguugcu

SEQ ID NO: 24914 - RNA, 32 nt, Human
aagagggcagcucugccuucccauguggucac

SEQ ID NO: 24915 - RNA, 32 nt, Human
aagagggcagggaguuugggcuugguuuugaa

SEQ ID NO: 24916 - RNA, 32 nt, Human
aagagggcauuuucaauucuguaggcucagca

SEQ ID NO: 24917 - RNA, 32 nt, Human
aagagggccacugaggaaggaggaauucaaag

SEQ ID NO: 24918 - RNA, 32 nt, Human
aagagggcccugagcuggcuccagaagcagag

SEQ ID NO: 24919 - RNA, 32 nt, Human
aagagggccgaaacucuucaccuugauguaug

SEQ ID NO: 24920 - RNA, 32 nt, Human
aagagggcgccagugaggaggaagggaaggcg

SEQ ID NO: 24921 - RNA, 32 nt, Human
aagaggggacaggugucagagcagggagaaau

SEQ ID NO: 24922 - RNA, 32 nt, Human
aagaggggaccgagcgcccaccccaggacucc

SEQ ID NO: 24923 - RNA, 32 nt, Human
aagaggggagagagcagagggagggggaggaa

SEQ ID NO: 24924 - RNA, 32 nt, Human
aagaggggagcacgugcccccugcauccauuc

SEQ ID NO: 24925 - RNA, 32 nt, Human
aagaggggaugagacauucaguugagggcauu

SEQ ID NO: 24926 - RNA, 32 nt, Human
aagaggggcucugccauuaguuggacccuggg

SEQ ID NO: 24927 - RNA, 32 nt, Human
aagaggggcugcugccaucugccccagacugu

SEQ ID NO: 24928 - RNA, 19 nt, Human
aagaggggcuggaccuggc

SEQ ID NO: 24929 - RNA, 32 nt, Human
aagaggggcuuccuugggaccaguguaaggaa

SEQ ID NO: 24930 - RNA, 32 nt, Human
aagagggggaggaggaagaggggaaggaggag

SEQ ID NO: 24931 - RNA, 32 nt, Human
aagagggggcauucacuccucuuuuucuuauu

SEQ ID NO: 24932 - RNA, 32 nt, Human
aagaggggguuagagagaaggcagguugagac

SEQ ID NO: 24933 - RNA, 32 nt, Human
aagagggucaacacccuuggcccccagccaag

SEQ ID NO: 24934 - RNA, 32 nt, Human
aagagggucaccaggcugagccucggccagaa

SEQ ID NO: 24935 - RNA, 32 nt, Human
aagaggguccaggaccucacuggacugugccc

SEQ ID NO: 24936 - RNA, 32 nt, Human
aagagggugagcccugaguggagccaggugag

SEQ ID NO: 24937 - RNA, 31 nt, Human
aagagguauaauggauauggcauucauuaaa

SEQ ID NO: 24938 - RNA, 32 nt, Human
aagagguaugccaguagcacacugguggcuuc

SEQ ID NO: 24939 - RNA, 32 nt, Human
aagaggucaaagcuacgugaggagccggggaa

SEQ ID NO: 24940 - RNA, 32 nt, Human
aagaggucacgggggcuaauugcuggcuggcu

SEQ ID NO: 24941 - RNA, 31 nt, Human
aagaggucacucaguugugcuguggagaaug

SEQ ID NO: 24942 - RNA, 32 nt, Human
aagaggucagggaacuccuuacccuagccagg

SEQ ID NO: 24943 - RNA, 32 nt, Human
aagaggucaguaaacuguucuaggggucuuca

SEQ ID NO: 24944 - RNA, 32 nt, Human
aagaggucauaaacuugggccugggugguugc

SEQ ID NO: 24945 - RNA, 32 nt, Human
aagagguccacaaccaggugugcacuguucac

SEQ ID NO: 24946 - RNA, 32 nt, Human
aagagguccagccguggagaaacauccgggac

SEQ ID NO: 24947 - RNA, 32 nt, Human
aagaggucccauauuccugagugcagggguag

SEQ ID NO: 24948 - RNA, 32 nt, Human
aagaggucgauggauuuaccccuggacccaua

SEQ ID NO: 24949 - RNA, 32 nt, Human
aagaggucgugggucuucugagcccagcugau

SEQ ID NO: 24950 - RNA, 32 nt, Human
aagaggucuagucccauauguggaagucuuuu

SEQ ID NO: 24951 - RNA, 32 nt, Human
aagaggucucagaccuugcacaaugccagaag

SEQ ID NO: 24952 - RNA, 32 nt, Human
aagaggucuucugccuuuccuuuccccgugag

SEQ ID NO: 24953 - RNA, 32 nt, Human
aagaggugcagccucuggaaguggaucaaacu

SEQ ID NO: 24954 - RNA, 32 nt, Human
aagaggugcuacugacuuucucagccucugaa

SEQ ID NO: 24955 - RNA, 32 nt, Human
aagaggugcuggagaggaaagcagggagccac

SEQ ID NO: 24956 - RNA, 32 nt, Human
aagagguggaggaggaggaggaagagguggag

SEQ ID NO: 24957 - RNA, 32 nt, Human
aagagguggaggaggaggaggaggagguggug

SEQ ID NO: 24958 - RNA, 32 nt, Human
aagagguggcugagcacuggggugggcuuggc

SEQ ID NO: 24959 - RNA, 32 nt, Human
aagagguggugguauugggggaaagugacuuc

SEQ ID NO: 24960 - RNA, 32 nt, Human
aagagguguaggucggcuugguuuucugcuac

SEQ ID NO: 24961 - RNA, 32 nt, Human
aagagguuccauccugguucucaguccacaug

SEQ ID NO: 24962 - RNA, 32 nt, Human
aagagguugcagugagcugagaucccaccacu

SEQ ID NO: 24963 - RNA, 32 nt, Human
aagagguuggugagcgucugcagccgcggcgu

SEQ ID NO: 24964 - RNA, 32 nt, Human
aagagguuucaguuggcugauagaauaucuuu

SEQ ID NO: 24965 - RNA, 24 nt, Human
aagagguuucuuucugcaccagga

SEQ ID NO: 24966 - RNA, 32 nt, Human
aagaguaaaccaggauaaaucaugaggaaccu

SEQ ID NO: 24967 - RNA, 32 nt, Human
aagaguaaauucucucccucccuacugaggcc

SEQ ID NO: 24968 - RNA, 32 nt, Human
aagaguaauagggaugagauauuaaauggccu

SEQ ID NO: 24969 - RNA, 32 nt, Human
aagaguacaaaaccagcugaaaagcaugcgcc

SEQ ID NO: 24970 - RNA, 32 nt, Human
aagaguacacucagccacugucacaggcauau

SEQ ID NO: 24971 - RNA, 32 nt, Human
aagaguacagcagaaaaugucuacugaacgga

SEQ ID NO: 24972 - RNA, 32 nt, Human
aagaguagagucugucucugucacccaggcug

SEQ ID NO: 24973 - RNA, 32 nt, Human
aagaguagcuggagagugagcugugcgugugu

SEQ ID NO: 24974 - RNA, 32 nt, Human
aagaguaggggccugaauccugcuacaacuau

SEQ ID NO: 24975 - RNA, 32 nt, Human
aagaguaggggccuuaacgacacuagugcaaa

SEQ ID NO: 24976 - RNA, 32 nt, Human
aagaguaggugguuagggcugucaggagcacu

SEQ ID NO: 24977 - RNA, 32 nt, Human
aagaguagugaauacaacacacaaccaggcag

SEQ ID NO: 24978 - RNA, 32 nt, Human
aagaguauuucaaaugcaagaaaugagaaaua

SEQ ID NO: 24979 - RNA, 32 nt, Human
aagagucaaauaauuugcaaccagcuuaugag

SEQ ID NO: 24980 - RNA, 32 nt, Human
aagagucaacuguacuuugcuauauucaucca

SEQ ID NO: 24981 - RNA, 32 nt, Human
aagagucaccuugucuucucucgacuuguucc

SEQ ID NO: 24982 - RNA, 32 nt, Human
aagagucacuaacucucuuuucccaagccuuu

SEQ ID NO: 24983 - RNA, 32 nt, Human
aagagucacugcagagcccaccuggccugcaa

SEQ ID NO: 24984 - RNA, 32 nt, Human
aagagucacuugaacccaggaggcagagguug

SEQ ID NO: 24985 - RNA, 32 nt, Human
aagagucagaagugguaauacagggaauggca

SEQ ID NO: 24986 - RNA, 32 nt, Human
aagagucauccagcucuugcucagugaagagg

SEQ ID NO: 24987 - RNA, 32 nt, Human
aagaguccaagaagccagcaccaccccauccg

SEQ ID NO: 24988 - RNA, 32 nt, Human
aagaguccaaggaagggagggagcagccacuc

SEQ ID NO: 24989 - RNA, 32 nt, Human
aagaguccaguggagccucaguguuuugaaua

SEQ ID NO: 24990 - RNA, 32 nt, Human
aagaguccuggaccaggagugcggagaacugg

SEQ ID NO: 24991 - RNA, 32 nt, Human
aagagucggagaccagccugggcaacacaggg

SEQ ID NO: 24992 - RNA, 32 nt, Human
aagagucggauuaccaaaacacugccugcucu

SEQ ID NO: 24993 - RNA, 32 nt, Human
aagagucguauguaacugucccagacuccucu

SEQ ID NO: 24994 - RNA, 32 nt, Human
aagagucuaugugagaaaaagcauugagcagc

SEQ ID NO: 24995 - RNA, 32 nt, Human
aagagucugagaccagccuggcuaacauggug

SEQ ID NO: 24996 - RNA, 32 nt, Human
aagagucugauuaauguucucucuccauguuu

SEQ ID NO: 24997 - RNA, 32 nt, Human
aagagucugcagcauuuguucuccuggcuccc

SEQ ID NO: 24998 - RNA, 32 nt, Human
aagagucugcaguucacugauguuucagauuu

SEQ ID NO: 24999 - RNA, 32 nt, Human
aagagucuggcucucccuucucugugacccgg

SEQ ID NO: 25000 - RNA, 32 nt, Human
aagagucugggucuccgggccaaccugagggc

SEQ ID NO: 25001 - RNA, 32 nt, Human
aagagucuucagagagaugaugggaggggcca

SEQ ID NO: 25002 - RNA, 32 nt, Human
aagagugacaaauggucagagcaaagcauuuc

SEQ ID NO: 25003 - RNA, 32 nt, Human
aagagugacuccgucggaggaaaaugacuccc

SEQ ID NO: 25004 - RNA, 32 nt, Human
aagagugacuccugaagcccugcgcuaacacu

SEQ ID NO: 25005 - RNA, 32 nt, Human
aagagugagggagggaaggaaggaacuacaag

SEQ ID NO: 25006 - RNA, 32 nt, Human
aagagugagggcagaugucuccagccaggacu

SEQ ID NO: 25007 - RNA, 32 nt, Human
aagagugaggggcagagacuuccagucacuga

SEQ ID NO: 25008 - RNA, 32 nt, Human
aagagugauagggagagggagcgaggcuggug

SEQ ID NO: 25009 - RNA, 25 nt, Human
aagagugaucauugccacaccagga

SEQ ID NO: 25010 - RNA, 32 nt, Human
aagagugcaaaucugccagccuaggcaacaua

SEQ ID NO: 25011 - RNA, 32 nt, Human
aagagugcaacaaaugcuucuauuccauagcu

SEQ ID NO: 25012 - RNA, 32 nt, Human
aagagugcaaggcugcucaggucuccaagcgc

SEQ ID NO: 25013 - RNA, 32 nt, Human
aagagugcacacacacgcacacaagaggguaa

SEQ ID NO: 25014 - RNA, 32 nt, Human
aagagugcacuacuguacuccagccagggcaa

SEQ ID NO: 25015 - RNA, 32 nt, Human
aagagugcagccaccaccccugagccaccugu

SEQ ID NO: 25016 - RNA, 32 nt, Human
aagagugcagugguaugaucucagcucacugc

SEQ ID NO: 25017 - RNA, 32 nt, Human
aagagugccucugcuuucuccuccucuccucc

SEQ ID NO: 25018 - RNA, 32 nt, Human
aagagugcgauaugaggguacagugaguuugg

SEQ ID NO: 25019 - RNA, 32 nt, Human
aagaguggagugcggccagcaaguuugagacc

SEQ ID NO: 25020 - RNA, 22 nt, Human
aagaguggauuacaggcaugag

SEQ ID NO: 25021 - RNA, 32 nt, Human
aagaguggcguggaugacagagacgagaagaa

SEQ ID NO: 25022 - RNA, 32 nt, Human
aagagugggagggagggcuggggauggauggg

SEQ ID NO: 25023 - RNA, 32 nt, Human
aagagugggcuuuccagggucuuuacugggaa

SEQ ID NO: 25024 - RNA, 32 nt, Human
aagaguggugcuggccccgaaccuuuccuguu

SEQ ID NO: 25025 - RNA, 32 nt, Human
aagaguguaggcaggccaggugcaguggcuca

SEQ ID NO: 25026 - RNA, 32 nt, Human
aagagugucuaugacuuauuuccuucacuuaa

SEQ ID NO: 25027 - RNA, 32 nt, Human
aagagugugagaaacuggaugaagacagcugu

SEQ ID NO: 25028 - RNA, 32 nt, Human
aagagugugcucguuuuaaauucauguugauu

SEQ ID NO: 25029 - RNA, 32 nt, Human
aagagugugcugccccuccccaucuccaugcc

SEQ ID NO: 25030 - RNA, 32 nt, Human
aagagugugcugggaaaaaggaagcauuucuu

SEQ ID NO: 25031 - RNA, 32 nt, Human
aagagugugguguuuaauuuucacaaauuugu

SEQ ID NO: 25032 - RNA, 32 nt, Human
aagagugugucuugcaucaacagcugucuuau

SEQ ID NO: 25033 - RNA, 32 nt, Human
aagaguguucagccacagucccacaagccuca

SEQ ID NO: 25034 - RNA, 32 nt, Human
aagaguguucauuucacaccuuaucaggcaau

SEQ ID NO: 25035 - RNA, 32 nt, Human
aagaguguuccuuguuuugguuacacucgaaa

SEQ ID NO: 25036 - RNA, 32 nt, Human
aagaguuaaagaaaccgaacaauaaguggcaa

SEQ ID NO: 25037 - RNA, 32 nt, Human
aagaguuaaagaccagccuggucaauauagca

SEQ ID NO: 25038 - RNA, 32 nt, Human
aagaguuacugaucuaugaaauggcagagaau

SEQ ID NO: 25039 - RNA, 32 nt, Human
aagaguuagauucccccuuucuccuuauugcc

SEQ ID NO: 25040 - RNA, 32 nt, Human
aagaguuauuguacauuacugaccacgcucau

SEQ ID NO: 25041 - RNA, 32 nt, Human
aagaguucaagaccagccugaccaacaugaca

SEQ ID NO: 25042 - RNA, 32 nt, Human
aagaguucaagaccagccugacgaacauggug

SEQ ID NO: 25043 - RNA, 32 nt, Human
aagaguucaagaccagccuggccaacaugaug

SEQ ID NO: 25044 - RNA, 32 nt, Human
aagaguucaagaccagccuggccaacauggug

SEQ ID NO: 25045 - RNA, 32 nt, Human
aagaguucaagaccagccuggccaauacaaaa

SEQ ID NO: 25046 - RNA, 32 nt, Human
aagaguucaagaccagccuggccaauauggug

SEQ ID NO: 25047 - RNA, 32 nt, Human
aagaguucaagaccagccuggccaucauggug

SEQ ID NO: 25048 - RNA, 32 nt, Human
aagaguucaagaccagccugggaaacauagca

SEQ ID NO: 25049 - RNA, 32 nt, Human
aagaguucaagaccagccugggaaacauggca

SEQ ID NO: 25050 - RNA, 32 nt, Human
aagaguucaagaccagccugggcaacauagcg

SEQ ID NO: 25051 - RNA, 32 nt, Human
aagaguucaagaccagccugggcaacauggcg

SEQ ID NO: 25052 - RNA, 32 nt, Human
aagaguucaaugaggaaagagaggaaguggag

SEQ ID NO: 25053 - RNA, 32 nt, Human
aagaguucaugauucuuuagguaaugucaaaa

SEQ ID NO: 25054 - RNA, 32 nt, Human
aagaguuccaaagagccucuggcccaggcccc

SEQ ID NO: 25055 - RNA, 32 nt, Human
aagaguuccauggcucgggguggagcuagggu

SEQ ID NO: 25056 - RNA, 32 nt, Human
aagaguucgagaccagccuagcuaacauggca

SEQ ID NO: 25057 - RNA, 32 nt, Human
aagaguucgagaccagccugaccaacauggag

SEQ ID NO: 25058 - RNA, 32 nt, Human
aagaguucgagaccagccugaccaacauggug

SEQ ID NO: 25059 - RNA, 32 nt, Human
aagaguucgagaccagccugaccaacguggug

SEQ ID NO: 25060 - RNA, 32 nt, Human
aagaguucgagaccagccuggccaacauggug

SEQ ID NO: 25061 - RNA, 32 nt, Human
aagaguucgagaccagccugggcaacauggag

SEQ ID NO: 25062 - RNA, 32 nt, Human
aagaguucgagaccagccugggcaacauggug

SEQ ID NO: 25063 - RNA, 32 nt, Human
aagaguucgaggccagccuggccaacauggug

SEQ ID NO: 25064 - RNA, 32 nt, Human
aagaguucgugaccagccuggccaauauggug

SEQ ID NO: 25065 - RNA, 32 nt, Human
aagaguugaccaggaacccuaaagcauccaga

SEQ ID NO: 25066 - RNA, 32 nt, Human
aagaguugagacaaacguuuccuacauucuuu

SEQ ID NO: 25067 - RNA, 32 nt, Human
aagaguugcagcuucaacagggccacagggau

SEQ ID NO: 25068 - RNA, 32 nt, Human
aagaguugcucuggagagguagggccagagga

SEQ ID NO: 25069 - RNA, 32 nt, Human
aagaguugcugggaccuuuccuagagaaccgg

SEQ ID NO: 25070 - RNA, 32 nt, Human
aagaguuggagaccagccugggcaacauggug

SEQ ID NO: 25071 - RNA, 19 nt, Human
aagaguugggugucuccuu

SEQ ID NO: 25072 - RNA, 32 nt, Human
aagaguuuaagccagcaugauccagauggguu

SEQ ID NO: 25073 - RNA, 32 nt, Human
aagaguuucagaccagccugggcaacauagcc

SEQ ID NO: 25074 - RNA, 32 nt, Human
aagaguuucaggaaguggguugcuaggcaguu

SEQ ID NO: 25075 - RNA, 32 nt, Human
aagaguuucagggcacuggcgaaggugaaagg

SEQ ID NO: 25076 - RNA, 32 nt, Human
aagaguuuccauuguagaauguuuucacauac

SEQ ID NO: 25077 - RNA, 32 nt, Human
aagaguuugagaccagccugaccaacauggug

SEQ ID NO: 25078 - RNA, 32 nt, Human
aagaguuugagaccagccugagcaacauauca

SEQ ID NO: 25079 - RNA, 32 nt, Human
aagaguuugagaccagccuggacaacauaaug

SEQ ID NO: 25080 - RNA, 32 nt, Human
aagaguuugagaccagccuggccaacauggca

SEQ ID NO: 25081 - RNA, 32 nt, Human
aagaguuugagaccagccuggccaacauggug

SEQ ID NO: 25082 - RNA, 32 nt, Human
aagaguuugagaccagccugggcaacauggca

SEQ ID NO: 25083 - RNA, 32 nt, Human
aagaguuugaggccagccuggccaacauggca

SEQ ID NO: 25084 - RNA, 32 nt, Human
aagaguuugccgaccuaacucggguugaaacu

SEQ ID NO: 25085 - RNA, 32 nt, Human
aagaguuuugaggcugggcgcaauggcucacg

SEQ ID NO: 25086 - RNA, 32 nt, Human
aagauaaaaguuaaauagaaauaaaagcaguc

SEQ ID NO: 25087 - RNA, 32 nt, Human
aagauaaauacuuggcuaaucuuccauuuaca

SEQ ID NO: 25088 - RNA, 32 nt, Human
aagauaaauccuuaagaauucagucuaaauua

SEQ ID NO: 25089 - RNA, 32 nt, Human
aagauaaauugucaaguaaagcaccucaauuc

SEQ ID NO: 25090 - RNA, 32 nt, Human
aagauaacacauacuccagccaccucaccuga

SEQ ID NO: 25091 - RNA, 32 nt, Human
aagauaaccaacaggagaacaaacccagccau

SEQ ID NO: 25092 - RNA, 32 nt, Human
aagauaacccugagacaugguggaggagaagg

SEQ ID NO: 25093 - RNA, 32 nt, Human
aagauaaccuggguuucccucagaaucugccc

SEQ ID NO: 25094 - RNA, 32 nt, Human
aagauaacucacaguuuugcccucgagccaau

SEQ ID NO: 25095 - RNA, 32 nt, Human
aagauaacugccucuuguacuuggauguguag

SEQ ID NO: 25096 - RNA, 32 nt, Human
aagauaagaagcagagggguccuugguaaugu

SEQ ID NO: 25097 - RNA, 21 nt, Human
aagauaagacaguggcauaga

SEQ ID NO: 25098 - RNA, 32 nt, Human
aagauaagacuuguuucuuucugucucucucu

SEQ ID NO: 25099 - RNA, 32 nt, Human
aagauaaggaauaugcuuaucuuccaauuuga

SEQ ID NO: 25100 - RNA, 32 nt, Human
aagauaauccagacugauauucaucccaggaa

SEQ ID NO: 25101 - RNA, 32 nt, Human
aagauaaucccccaggagcuccuguugacauc

SEQ ID NO: 25102 - RNA, 32 nt, Human
aagauaaugugacagaaugaugucagguuagg

SEQ ID NO: 25103 - RNA, 32 nt, Human
aagauaauuguuuguaaucauagguguugaaa

SEQ ID NO: 25104 - RNA, 32 nt, Human
aagauacacaugcggccaacaagcauguuuua

SEQ ID NO: 25105 - RNA, 32 nt, Human
aagauacacuggguaaucacuaacccauuauu

SEQ ID NO: 25106 - RNA, 32 nt, Human
aagauacacuuuaagccagacaccuaauucuu

SEQ ID NO: 25107 - RNA, 32 nt, Human
aagauacagacuguuuguuuaccagacauucu

SEQ ID NO: 25108 - RNA, 32 nt, Human
aagauacauuucacucacccuccaccccugcu

SEQ ID NO: 25109 - RNA, 32 nt, Human
aagauaccuaaaagagauuucaagagauuuaa

SEQ ID NO: 25110 - RNA, 25 nt, Human
aagauaccucaaaaugcagaagcaa

SEQ ID NO: 25111 - RNA, 32 nt, Human
aagauaccuugaucuuggacuuccacccucca

SEQ ID NO: 25112 - RNA, 32 nt, Human
aagauaccuugaugaagaccuggacuauugaa

SEQ ID NO: 25113 - RNA, 32 nt, Human
aagauacgaugaucagggaauguaauaauccg

SEQ ID NO: 25114 - RNA, 32 nt, Human
aagauacgauuugaugaugacacuggcacauu

SEQ ID NO: 25115 - RNA, 32 nt, Human
aagauacggguggggagggaagauauccagaa

SEQ ID NO: 25116 - RNA, 32 nt, Human
aagauacgucugaguugaugggaccaacaggg

SEQ ID NO: 25117 - RNA, 32 nt, Human
aagauacuaucuuuaccguaguaguucaggcc

SEQ ID NO: 25118 - RNA, 32 nt, Human
aagauacucaccaggaccaggaaggggacucu

SEQ ID NO: 25119 - RNA, 32 nt, Human
aagauacucacuaggaccaggaaggggacucu

SEQ ID NO: 25120 - RNA, 32 nt, Human
aagauacugagccucucaccucccagcccuca

SEQ ID NO: 25121 - RNA, 32 nt, Human
aagauacuuccucuucagcuggaagaaggcag

SEQ ID NO: 25122 - RNA, 32 nt, Human
aagauacuugcagcaagugauaaaggauuagu

SEQ ID NO: 25123 - RNA, 32 nt, Human
aagauagaagcauaaauuacaauguggaaugc

SEQ ID NO: 25124 - RNA, 32 nt, Human
aagauagacagaaaaaugucaucauauugaaa

SEQ ID NO: 25125 - RNA, 32 nt, Human
aagauagagaaagagagcagcauguaguagaa

SEQ ID NO: 25126 - RNA, 32 nt, Human
aagauagagcaggagucaggagaccugggucc

SEQ ID NO: 25127 - RNA, 32 nt, Human
aagauagcaccacugcacuccagccugggaga

SEQ ID NO: 25128 - RNA, 32 nt, Human
aagauagcaccacugcacuccaggcuggguga

SEQ ID NO: 25129 - RNA, 32 nt, Human
aagauagcaccacugcacuuuagccugggcga

SEQ ID NO: 25130 - RNA, 32 nt, Human
aagauagcugagaagcaccuuucaaauggcac

SEQ ID NO: 25131 - RNA, 32 nt, Human
aagauaggaagggagcacuuucuaggcuagga

SEQ ID NO: 25132 - RNA, 32 nt, Human
aagauaggcaauaguguauaaauaucauguaa

SEQ ID NO: 25133 - RNA, 32 nt, Human
aagauaggcagaaaagaagcuuuugccaguug

SEQ ID NO: 25134 - RNA, 32 nt, Human
aagauaggcucgugccuacaaucccagcacuu

SEQ ID NO: 25135 - RNA, 32 nt, Human
aagauagggaaaggaaaggagggagaaucuga

SEQ ID NO: 25136 - RNA, 32 nt, Human
aagauagggcaguuaacuaaagagcacuuuau

SEQ ID NO: 25137 - RNA, 32 nt, Human
aagauagguguuacagaacauggagggaacca

SEQ ID NO: 25138 - RNA, 32 nt, Human
aagauagguguuaguguggucuguucuuuacc

SEQ ID NO: 25139 - RNA, 32 nt, Human
aagauagugccacugcacuccagccugggcaa

SEQ ID NO: 25140 - RNA, 32 nt, Human
aagauagugccacugcacuucagccuggguga

SEQ ID NO: 25141 - RNA, 32 nt, Human
aagauagugccaucgcacuccagccuggacaa

SEQ ID NO: 25142 - RNA, 32 nt, Human
aagauauaaaggugucagcuaguuuuaagugu

SEQ ID NO: 25143 - RNA, 32 nt, Human
aagauauaacaaaacuggcacauguacccaug

SEQ ID NO: 25144 - RNA, 32 nt, Human
aagauauaauuucuugaaaaucuuaucagaag

SEQ ID NO: 25145 - RNA, 32 nt, Human
aagauauacugcccccaugcaggcaggaugug

SEQ ID NO: 25146 - RNA, 32 nt, Human
aagauauagagaggagaggagugaagaaaagg

SEQ ID NO: 25147 - RNA, 32 nt, Human
aagauauauguguauacauacauguaucuggu

SEQ ID NO: 25148 - RNA, 32 nt, Human
aagauauauuuauaguucacuuuuggguuuuu

SEQ ID NO: 25149 - RNA, 21 nt, Human
aagauauccaaaacaaauuaa

SEQ ID NO: 25150 - RNA, 32 nt, Human
aagauauccaucuuuuucuuuuuaacccuaau

SEQ ID NO: 25151 - RNA, 32 nt, Human
aagauaugaaaagaguguggaucuucuggaga

SEQ ID NO: 25152 - RNA, 32 nt, Human
aagauaugcaagugucaaauaugcaaaagaaa

SEQ ID NO: 25153 - RNA, 32 nt, Human
aagauaugucaucugcugguuguguuaucacu

SEQ ID NO: 25154 - RNA, 32 nt, Human
aagauauuagauaaguggguaauucagagagu

SEQ ID NO: 25155 - RNA, 32 nt, Human
aagauauuucagcugagucagaacagccuugc

SEQ ID NO: 25156 - RNA, 32 nt, Human
aagaucaaaagcuuccucuuccucaggacagc

SEQ ID NO: 25157 - RNA, 32 nt, Human
aagaucaacagcaaucugaagacucugacuaa

SEQ ID NO: 25158 - RNA, 32 nt, Human
aagaucaagauaagcuggaugaaguagugugc

SEQ ID NO: 25159 - RNA, 32 nt, Human
aagaucaagccauuguacuccagccuggacaa

SEQ ID NO: 25160 - RNA, 32 nt, Human
aagaucacaccacuacacuccagccugggcga

SEQ ID NO: 25161 - RNA, 32 nt, Human
aagaucacaccacuccacuccagucuggacaa

SEQ ID NO: 25162 - RNA, 32 nt, Human
aagaucacaccacugaccucuagccugguggc

SEQ ID NO: 25163 - RNA, 32 nt, Human
aagaucacaccacugcacuccaaccuggacaa

SEQ ID NO: 25164 - RNA, 32 nt, Human
aaggaagcucugaggaugguugcagugaggaa

SEQ ID NO: 25165 - RNA, 32 nt, Human
aaggaagcuucaaaacauugauaauucaagau

SEQ ID NO: 25166 - RNA, 32 nt, Human
aaggaaggaaacgggacccaggggaagaaagc

SEQ ID NO: 25167 - RNA, 32 nt, Human
aaggaaggaaagaagagaggaaagaaaggagg

SEQ ID NO: 25168 - RNA, 32 nt, Human
aaggaaggaagucaaggcugcagugagcuaug

SEQ ID NO: 25169 - RNA, 32 nt, Human
aaggaaggaggaaaggagaggggccuccauac

SEQ ID NO: 25170 - RNA, 32 nt, Human
aaggaaggauucaccaccuccaggaaaagugu

SEQ ID NO: 25171 - RNA, 32 nt, Human
aaggaaggcauuuggaccccugccuuuucauu

SEQ ID NO: 25172 - RNA, 32 nt, Human
aaggaaggcugugccaucuuugggcacugcca

SEQ ID NO: 25173 - RNA, 32 nt, Human
aaggaaggcuuccuggacaagguaguucccca

SEQ ID NO: 25174 - RNA, 32 nt, Human
aaggaagggaaaacugauggccaaccuagagc

SEQ ID NO: 25175 - RNA, 32 nt, Human
aaggaagggaaaggguguuacaaggaaaggcu

SEQ ID NO: 25176 - RNA, 32 nt, Human
aaggaagggaacuggagcuggcccagggcugu

SEQ ID NO: 25177 - RNA, 32 nt, Human
aaggaagggaagcaucugcccaacccuccccc

SEQ ID NO: 25178 - RNA, 32 nt, Human
aaggaagggaagggagggaggucuguucuauc

SEQ ID NO: 25179 - RNA, 32 nt, Human
aaggaagggauggaaggcucuaccccuccgug

SEQ ID NO: 25180 - RNA, 32 nt, Human
aaggaagggauuaaagagggugggaaaucuau

SEQ ID NO: 25181 - RNA, 32 nt, Human
aaggaagggcuggauugggccccuuuggugua

SEQ ID NO: 25182 - RNA, 32 nt, Human
aaggaagggcuggguuuucagcuucugggacc

SEQ ID NO: 25183 - RNA, 32 nt, Human
aaggaagggcugugcauugaggguuccaugcu

SEQ ID NO: 25184 - RNA, 32 nt, Human
aaggaagggcuuggcuugccagaggaauuuuc

SEQ ID NO: 25185 - RNA, 32 nt, Human
aaggaaggggcuuugagaggcaaagaugaugg

SEQ ID NO: 25186 - RNA, 32 nt, Human
aaggaagguacaggcaggaugauccagggauu

SEQ ID NO: 25187 - RNA, 32 nt, Human
aaggaagguagaaaaugcuggugggucuccgu

SEQ ID NO: 25188 - RNA, 32 nt, Human
aaggaagguagcagauauaggugcagggugcc

SEQ ID NO: 25189 - RNA, 17 nt, Human
aaggaaguacccugggg

SEQ ID NO: 25190 - RNA, 32 nt, Human
aaggaagucacuucuacucagacuugaccugc

SEQ ID NO: 25191 - RNA, 32 nt, Human
aaggaagucuaggagcugggaggaaaagaaaa

SEQ ID NO: 25192 - RNA, 32 nt, Human
aaggaagucuguuucagaacuuuagggccuuu

SEQ ID NO: 25193 - RNA, 18 nt, Human
aaggaagugaaauucuga

SEQ ID NO: 25194 - RNA, 32 nt, Human
aaggaagugacugcagaaagcucacagcgacc

SEQ ID NO: 25195 - RNA, 32 nt, Human
aaggaaguggguggcaggugugaggggaugcu

SEQ ID NO: 25196 - RNA, 32 nt, Human
aaggaaguguuuguaaucccagcacuuuggga

SEQ ID NO: 25197 - RNA, 31 nt, Human
aaggaauacagcuagcaagaaagcaauuuau

SEQ ID NO: 25198 - RNA, 32 nt, Human
aaggaauaguuugaagcuaauaccaucaggcu

SEQ ID NO: 25199 - RNA, 32 nt, Human
aaggaauaucucuucucagaaggaaagaauaa

SEQ ID NO: 25200 - RNA, 32 nt, Human
aaggaauaugaacaagaugccugcuggugaac

SEQ ID NO: 25201 - RNA, 31 nt, Human
aaggaauauggcuagaauaacauugccaaac

SEQ ID NO: 25202 - RNA, 32 nt, Human
aaggaaucccagccuggauccaacacagccau

SEQ ID NO: 25203 - RNA, 32 nt, Human
aaggaauccgugacccacagagcuagacagau

SEQ ID NO: 25204 - RNA, 32 nt, Human
aaggaaucucacugauaaaacucucaaugagg

SEQ ID NO: 25205 - RNA, 32 nt, Human
aaggaaucugaaggcacuggaaucacuccaca

SEQ ID NO: 25206 - RNA, 32 nt, Human
aaggaaugaacuauugauacagcaaccugaau

SEQ ID NO: 25207 - RNA, 21 nt, Human
aaggaaugaccucugggcuga

SEQ ID NO: 25208 - RNA, 32 nt, Human
aaggaaugagccaugcugcacuguucaagaag

SEQ ID NO: 25209 - RNA, 32 nt, Human
aaggaaugagccugaaguucauaaagaauaca

SEQ ID NO: 25210 - RNA, 32 nt, Human
aaggaaugaucaugaaugcaaagggaaagagg

SEQ ID NO: 25211 - RNA, 18 nt, Human
aaggaaugcagccuugcu

SEQ ID NO: 25212 - RNA, 30 nt, Human
aaggaaugcccaggagagagcacaugguug

SEQ ID NO: 25213 - RNA, 32 nt, Human
aaggaauggagcaagacacagaugaauuagag

SEQ ID NO: 25214 - RNA, 32 nt, Human
aaggaauggaguuuuucagccuguggcccagc

SEQ ID NO: 25215 - RNA, 32 nt, Human
aaggaauggcuugccaagaaucaccaugaggu

SEQ ID NO: 25216 - RNA, 32 nt, Human
aaggaaugugaggaagaaagaaaggcagggca

SEQ ID NO: 25217 - RNA, 32 nt, Human
aaggaaugugcauaauggagagaagacauauu

SEQ ID NO: 25218 - RNA, 32 nt, Human
aaggaaugugccagaaugcugaaccuucuugu

SEQ ID NO: 25219 - RNA, 32 nt, Human
aaggaauguggacuuuauuggaagcauggaug

SEQ ID NO: 25220 - RNA, 25 nt, Human
aaggaaugugggagaugagucaagg

SEQ ID NO: 25221 - RNA, 32 nt, Human
aaggaauguggggaauuuaucuaacuuguuua

SEQ ID NO: 25222 - RNA, 32 nt, Human
aaggaauuaaggcucuuacaaaugggcuuaag

SEQ ID NO: 25223 - RNA, 32 nt, Human
aaggaauuaggaggugggcacuuuaagggaug

SEQ ID NO: 25224 - RNA, 32 nt, Human
aaggaauuaggguggucuacuugaggcagaug

SEQ ID NO: 25225 - RNA, 32 nt, Human
aaggaauucaaugucaauuccuuuacgagaaa

SEQ ID NO: 25226 - RNA, 32 nt, Human
aaggaauugcagcugcuuacauagccccacga

SEQ ID NO: 25227 - RNA, 32 nt, Human
aaggaauugucugacccuagaggcagaugcug

SEQ ID NO: 25228 - RNA, 24 nt, Human
aaggaauuuagagguagggaaaag

SEQ ID NO: 25229 - RNA, 32 nt, Human
aaggaauuuuuacaggaaccugguaucaaacc

SEQ ID NO: 25230 - RNA, 19 nt, Human
aaggacaaaaaugggcugg

SEQ ID NO: 25231 - RNA, 32 nt, Human
aaggacaaaccucccaccucacagacagccaa

SEQ ID NO: 25232 - RNA, 32 nt, Human
aaggacaaagacaaagcuaaacucccggaauc

SEQ ID NO: 25233 - RNA, 32 nt, Human
aaggacaaauugugcuauguccacacauuaga

SEQ ID NO: 25234 - RNA, 21 nt, Human
aaggacaacacacugggccga

SEQ ID NO: 25235 - RNA, 32 nt, Human
aaggacaacuaagauugcacuucguaguaaag

SEQ ID NO: 25236 - RNA, 32 nt, Human
aaggacaaggcuagaucaugaagaaccuugac

SEQ ID NO: 25237 - RNA, 32 nt, Human
aaggacaaggucuguaccuaacagcaguagga

SEQ ID NO: 25238 - RNA, 23 nt, Human
aaggacaaguaagagugaggcca

SEQ ID NO: 25239 - RNA, 32 nt, Human
aaggacaauaaauauucaaaaugcaucccuaa

SEQ ID NO: 25240 - RNA, 32 nt, Human
aaggacaauggcugggacuguuggacagcauc

SEQ ID NO: 25241 - RNA, 32 nt, Human
aaggacaaugggagccacugggcuuggcuuuc

SEQ ID NO: 25242 - RNA, 16 nt, Human
aaggacacaaacugga

SEQ ID NO: 25243 - RNA, 32 nt, Human
aaggacacaagaaucaaucagaccuucucccu

SEQ ID NO: 25244 - RNA, 32 nt, Human
aaggacacaagccugguguucuggagaccucg

SEQ ID NO: 25245 - RNA, 16 nt, Human
aaggacacacacagga

SEQ ID NO: 25246 - RNA, 32 nt, Human
aaggacacaccuaugacacagcaucagguggu

SEQ ID NO: 25247 - RNA, 32 nt, Human
aaggacacagaaggcagucuuaagaagaugaa

SEQ ID NO: 25248 - RNA, 22 nt, Human
aaggacacagacccaaaagcca

SEQ ID NO: 25249 - RNA, 21 nt, Human
aaggacacagcacugggcugg

SEQ ID NO: 25250 - RNA, 32 nt, Human
aaggacacaucucuccagcaaaggacaccucu

SEQ ID NO: 25251 - RNA, 21 nt, Human
aaggacacaucugacauccug

SEQ ID NO: 25252 - RNA, 32 nt, Human
aaggacacauucccagaugggauuacugaguc

SEQ ID NO: 25253 - RNA, 32 nt, Human
aaggacaccaaacuguucugcuuguuaccuuc

SEQ ID NO: 25254 - RNA, 17 nt, Human
aaggacaccauaccuca

SEQ ID NO: 25255 - RNA, 20 nt, Human
aaggacacccgaggccccug

SEQ ID NO: 25256 - RNA, 24 nt, Human
aaggacaccucacuuucuggcucu

SEQ ID NO: 25257 - RNA, 19 nt, Human
aaggacaccuccagccucc

SEQ ID NO: 25258 - RNA, 32 nt, Human
aaggacaccucucuccagcaaaggacaccugc

SEQ ID NO: 25259 - RNA, 32 nt, Human
aaggacaccucuuuccaaacaggccaucaaau

SEQ ID NO: 25260 - RNA, 32 nt, Human
aaggacacuggcagacuuccagaagggccccc

SEQ ID NO: 25261 - RNA, 32 nt, Human
aaggacacuguacacaacaucgcuaaugacgg

SEQ ID NO: 25262 - RNA, 32 nt, Human
aaggacacuguggggucuggguccccagaacu

SEQ ID NO: 25263 - RNA, 32 nt, Human
aaggacacuuccucuaggaugccauccugagc

SEQ ID NO: 25264 - RNA, 32 nt, Human
aaggacacuuugaagugggaagaugguucaug

SEQ ID NO: 25265 - RNA, 32 nt, Human
aaggacagaacauugccuuccucgugcagagc

SEQ ID NO: 25266 - RNA, 32 nt, Human
aaggacagacacagugccucaccuguaaucca

SEQ ID NO: 25267 - RNA, 32 nt, Human
aaggacagacuggccgggcaggcgugacucag

SEQ ID NO: 25268 - RNA, 18 nt, Human
aaggacagacuuggcaaa

SEQ ID NO: 25269 - RNA, 32 nt, Human
aaggacagagucucucucugucacccaggcug

SEQ ID NO: 25270 - RNA, 24 nt, Human
aaggacagcacaggaggagaaaag

SEQ ID NO: 25271 - RNA, 32 nt, Human
aaggacagcagguggaguaggcacagauggaa

SEQ ID NO: 25272 - RNA, 32 nt, Human
aaggacagcauggugaucaggcaauuucucug

SEQ ID NO: 25273 - RNA, 32 nt, Human
aaggacagccuggguaauauaggaagacccug

SEQ ID NO: 25274 - RNA, 24 nt, Human
aaggacagcggcggcagcagcuca

SEQ ID NO: 25275 - RNA, 32 nt, Human
aaggacaggagagacauggaguggcgcuggac

SEQ ID NO: 25276 - RNA, 32 nt, Human
aaggacaggagagaugucagguggggaugaag

SEQ ID NO: 25277 - RNA, 32 nt, Human
aaggacaggagccaccuuccucucucucaccu

SEQ ID NO: 25278 - RNA, 32 nt, Human
aaggacaggauuugguaagugauugacuucuu

SEQ ID NO: 25279 - RNA, 32 nt, Human
aaggacaggcagggagggaggccaggccucgc

SEQ ID NO: 25280 - RNA, 32 nt, Human
aaggacaggccugcccaugcaggagaccaucu

SEQ ID NO: 25281 - RNA, 32 nt, Human
aaggacagggcuagggcauuuggccaggaugg

SEQ ID NO: 25282 - RNA, 32 nt, Human
aaggacagucaaagaagcagcccaguggaacc

SEQ ID NO: 25283 - RNA, 32 nt, Human
aaggacagucuauucaagggcacacaaguuca

SEQ ID NO: 25284 - RNA, 32 nt, Human
aaggacagucuuuggccagagcagaaaucuua

SEQ ID NO: 25285 - RNA, 32 nt, Human
aaggacagugugcuugguuagaguaaaggacg

SEQ ID NO: 25286 - RNA, 32 nt, Human
aaggacauaagaggucaagcucagggaaggaa

SEQ ID NO: 25287 - RNA, 32 nt, Human
aaggacauagccaggccaggugcagugacuca

SEQ ID NO: 25288 - RNA, 32 nt, Human
aaggacaugagacuaagagaaaccuugcaaac

SEQ ID NO: 25289 - RNA, 32 nt, Human
aaggacaugcuuuccaagcucaugugguuguu

SEQ ID NO: 25290 - RNA, 32 nt, Human
aaggacauugaauauuaggaggaaaaagucau

SEQ ID NO: 25291 - RNA, 32 nt, Human
aaggaccaaagacaagugaauuuucugagggu

SEQ ID NO: 25292 - RNA, 32 nt, Human
aaggaccaccccgggcccucuaugccuggcca

SEQ ID NO: 25293 - RNA, 31 nt, Human
aaggaccacgggaggagguguaggagagaag

SEQ ID NO: 25294 - RNA, 32 nt, Human
aaggaccaggaccacuugcaugaugggugugg

SEQ ID NO: 25295 - RNA, 32 nt, Human
aaggacccaagugacucugauguuuacaaagc

SEQ ID NO: 25296 - RNA, 32 nt, Human
aaggacccacuguucuucaucagugacccagg

SEQ ID NO: 25297 - RNA, 32 nt, Human
aaggacccaggccacauugcuguggggaugua

SEQ ID NO: 25298 - RNA, 32 nt, Human
aaggacccaggcucugccaacauuguggacau

SEQ ID NO: 25299 - RNA, 32 nt, Human
aaggaccccaaagucaggauguuguuugaucu

SEQ ID NO: 25300 - RNA, 32 nt, Human
aaggaccccacugucuccuaaggccccggagg

SEQ ID NO: 25301 - RNA, 32 nt, Human
aaggaccccugccuccuugugccccugcuccc

SEQ ID NO: 25302 - RNA, 32 nt, Human
aaggacccuacaggauggggacaggaacaagg

SEQ ID NO: 25303 - RNA, 32 nt, Human
aaggacccugagaaggagguugcggcuaaaga

SEQ ID NO: 25304 - RNA, 32 nt, Human
aaggacccugauuccauuucaugagaaaugau

SEQ ID NO: 25305 - RNA, 32 nt, Human
aaggacccugcaccucggccucccaaaguguu

SEQ ID NO: 25306 - RNA, 32 nt, Human
aaggacccuuuuuccccucuaucugccugaaa

SEQ ID NO: 25307 - RNA, 32 nt, Human
aaggaccgagaggcgggaggagcagcggcuca

SEQ ID NO: 25308 - RNA, 32 nt, Human
aaggaccgcugccuggccugcauugaggaacc

SEQ ID NO: 25309 - RNA, 19 nt, Human
aaggaccggccugggcuga

SEQ ID NO: 25310 - RNA, 30 nt, Human
aaggaccggcucuccauggcuccugcgccu

SEQ ID NO: 25311 - RNA, 32 nt, Human
aaggaccguccaccccuccgcgcuggcggugu

SEQ ID NO: 25312 - RNA, 32 nt, Human
aaggaccguccggucaguaggcaccaauccca

SEQ ID NO: 25313 - RNA, 32 nt, Human
aaggaccucacugcccgccuuccccucccacc

SEQ ID NO: 25314 - RNA, 32 nt, Human
aaggaccucacugucuccagcuaugcccagug

SEQ ID NO: 25315 - RNA, 32 nt, Human
aaggaccucccccacccuucucacacucugcc

SEQ ID NO: 25316 - RNA, 32 nt, Human
aaggaccuccucucuggcaguaucauggccac

SEQ ID NO: 25317 - RNA, 32 nt, Human
aaggaccugccuccccggaagugccuuaaccu

SEQ ID NO: 25318 - RNA, 32 nt, Human
aaggaccuggauucaucaaagcuuaaaguaaa

SEQ ID NO: 25319 - RNA, 32 nt, Human
aaggaccuggggcuggugaggggcccggagga

SEQ ID NO: 25320 - RNA, 32 nt, Human
aaggaccuugccucucuggaaucugucaaccc

SEQ ID NO: 25321 - RNA, 32 nt, Human
aaggaccuuuggcaaaugaagguuuacauuuc

SEQ ID NO: 25322 - RNA, 32 nt, Human
aaggacgacacacaguauggaucacauauugu

SEQ ID NO: 25323 - RNA, 32 nt, Human
aaggacgagggcgagggcacggccggguccug

SEQ ID NO: 25324 - RNA, 32 nt, Human
aaggacgauaggaaggaggaaagaagaaagag

SEQ ID NO: 25325 - RNA, 17 nt, Human
aaggacgcauuucccca

SEQ ID NO: 25326 - RNA, 32 nt, Human
aaggacgccuucugcuuggcaguauuaacugg

SEQ ID NO: 25327 - RNA, 32 nt, Human
aaggacgccuugaauguaugugguguugcuag

SEQ ID NO: 25328 - RNA, 32 nt, Human
aaggacggacgggagcuccacugugaaucggc

SEQ ID NO: 25329 - RNA, 32 nt, Human
aaggacgggugaggcaggggacacauuaugaa

SEQ ID NO: 25330 - RNA, 32 nt, Human
aaggacgguuugguggccagagcgaggucuuc

SEQ ID NO: 25331 - RNA, 32 nt, Human
aaggacuagcccaaggccaacauuaacaagcc

SEQ ID NO: 25332 - RNA, 32 nt, Human
aaggacuaugcugcccuuuugacaucaaagac

SEQ ID NO: 25333 - RNA, 32 nt, Human
aaggacuauuaaguguauuaaaaugaaacagu

SEQ ID NO: 25334 - RNA, 32 nt, Human
aaggacucacagucugccagacacugcuaggu

SEQ ID NO: 25335 - RNA, 32 nt, Human
aaggacucacaugggagagaaacccuaugagu

SEQ ID NO: 25336 - RNA, 32 nt, Human
aaggacucagaacaaaccaaaaagcagcucca

SEQ ID NO: 25337 - RNA, 32 nt, Human
aaggacucagagagucagacagugccacuugg

SEQ ID NO: 25338 - RNA, 32 nt, Human
aaggacuccaccgcugcccuccuggaacugcu

SEQ ID NO: 25339 - RNA, 32 nt, Human
aaggacuccuaccugggugaugaggcccagag

SEQ ID NO: 25340 - RNA, 32 nt, Human
aaggacucgguggaaagagcagaacaccauag

SEQ ID NO: 25341 - RNA, 32 nt, Human
aaggacugaaucgccacuacagccugggugca

SEQ ID NO: 25342 - RNA, 32 nt, Human
aaggacugcccuuugcucuaucaccuuugcau

SEQ ID NO: 25343 - RNA, 32 nt, Human
aaggacugcgagcacagucagcacuuuggcag

SEQ ID NO: 25344 - RNA, 32 nt, Human
aaggacugcuaacaagaaagcuuccaucucaa

SEQ ID NO: 25345 - RNA, 24 nt, Human
aaggacugcuucugcccucugccu

SEQ ID NO: 25346 - RNA, 21 nt, Human
aaggacuggaaaaaugaacug

SEQ ID NO: 25347 - RNA, 32 nt, Human
aaggacuggaaauguguauuauggaagauucg

SEQ ID NO: 25348 - RNA, 32 nt, Human
aaggacuggaagguggcgguggugaaggugca

SEQ ID NO: 25349 - RNA, 32 nt, Human
aaggacuggacuuggcuuauuucuuccugucu

SEQ ID NO: 25350 - RNA, 32 nt, Human
aaggacuggagcuucaggguucucgggauucg

SEQ ID NO: 25351 - RNA, 32 nt, Human
aaggacugggagaggcagagcaagccucagag

SEQ ID NO: 25352 - RNA, 32 nt, Human
aaggacuggucuuccuggagccugugucagcu

SEQ ID NO: 25353 - RNA, 32 nt, Human
aaggacuuaagcccucaagcuaggcaagacac

SEQ ID NO: 25354 - RNA, 32 nt, Human
aaggacuuaagugagaaagaacaagagaagcu

SEQ ID NO: 25355 - RNA, 32 nt, Human
aaggacuucacuuaugcuucugagcauccuga

SEQ ID NO: 25356 - RNA, 32 nt, Human
aaggacuuccuagagaagguagucccugaagg

SEQ ID NO: 25357 - RNA, 32 nt, Human
aaggacuuccuguccagcuccaaccugcaaag

SEQ ID NO: 25358 - RNA, 32 nt, Human
aaggacuugaaccucaagcucucucuaaggag

SEQ ID NO: 25359 - RNA, 32 nt, Human
aaggacuugaagcccggcaucuuccgaccugc

SEQ ID NO: 25360 - RNA, 32 nt, Human
aaggacuugccaggcuggacaaugcccguuga

SEQ ID NO: 25361 - RNA, 32 nt, Human
aaggacuuggcuccaaaacaaaacaaaacaaa

SEQ ID NO: 25362 - RNA, 26 nt, Human
aaggacuugguacaggaagggagaag

SEQ ID NO: 25363 - RNA, 32 nt, Human
aaggacuuucaggcugagaggauagcacagga

SEQ ID NO: 25364 - RNA, 32 nt, Human
aaggacuuugcagccggcacagggucugcucu

SEQ ID NO: 25365 - RNA, 21 nt, Human
aaggagaaaaaaguggagcca

SEQ ID NO: 25366 - RNA, 32 nt, Human
aaggagaaaaugugauugcaugugguaguugu

SEQ ID NO: 25367 - RNA, 32 nt, Human
aaggagaaacagggcucagcuggcaucuguac

SEQ ID NO: 25368 - RNA, 32 nt, Human
aaggagaaaccuggcagauaccaccuuaacca

SEQ ID NO: 25369 - RNA, 32 nt, Human
aaggagaaacugaggauguucucugauggaca

SEQ ID NO: 25370 - RNA, 32 nt, Human
aaggagaaagagaaaugcaggagccgcggggc

SEQ ID NO: 25371 - RNA, 32 nt, Human
aaggagaaagagacauuacagagcagacagcu

SEQ ID NO: 25372 - RNA, 32 nt, Human
aaggagaaaggaaagaaaaaccuaguuucacu

SEQ ID NO: 25373 - RNA, 32 nt, Human
aaggagaaaggagccggaccaagaugggcaca

SEQ ID NO: 25374 - RNA, 31 nt, Human
aaggagaaauaggaguugcaggcagcagcag

SEQ ID NO: 25375 - RNA, 32 nt, Human
aaggagaaauaucaaccagacacugcauggca

SEQ ID NO: 25376 - RNA, 32 nt, Human
aaggagaagaaauauguaaaguauauuuaaac

SEQ ID NO: 25377 - RNA, 32 nt, Human
aaggagaagauggaggaggaggguggcagcag

SEQ ID NO: 25378 - RNA, 23 nt, Human
aaggagaagcacagcaauauaca

SEQ ID NO: 25379 - RNA, 32 nt, Human
aaggagaagcagcaggaaugaugcuuugauac

SEQ ID NO: 25380 - RNA, 32 nt, Human
aaggagaagggagggucuagaagaggcagccc

SEQ ID NO: 25381 - RNA, 32 nt, Human
aaggagaaggucaaggcugcagugagccauca

SEQ ID NO: 25382 - RNA, 32 nt, Human
aaggagaagugaggaagccaggagacugcagu

SEQ ID NO: 25383 - RNA, 32 nt, Human
aaggagaaugacagaugcaauucuuccugcca

SEQ ID NO: 25384 - RNA, 32 nt, Human
aaggagaauggcccaguccucucccaagucca

SEQ ID NO: 25385 - RNA, 32 nt, Human
aaggagacagaagaaggaagagagacgguaac

SEQ ID NO: 25386 - RNA, 32 nt, Human
aaggagacagaggcauggaccacuggcuuuug

SEQ ID NO: 25387 - RNA, 32 nt, Human
aaggagacccagacuucaccuguccuuuuuaa

SEQ ID NO: 25388 - RNA, 32 nt, Human
aaggagagaaagacuuagaacauacacagauc

SEQ ID NO: 25389 - RNA, 32 nt, Human
aaggagagaagggaagugaaaaguagaguaac

SEQ ID NO: 25390 - RNA, 32 nt, Human
aaggagagacaggcacaaaauggaagagauga

SEQ ID NO: 25391 - RNA, 32 nt, Human
aaggagagacuggccuagccucccagccuaca

SEQ ID NO: 25392 - RNA, 32 nt, Human
aaggagagagagggaucugauggcaaaguauu

SEQ ID NO: 25393 - RNA, 32 nt, Human
aaggagagaggaagaggagcagaagggggcag

SEQ ID NO: 25394 - RNA, 32 nt, Human
aaggagagaggaagcaagggaaggaggaagaa

SEQ ID NO: 25395 - RNA, 32 nt, Human
aaggagagagggaagaaaagaucuuuugcccu

SEQ ID NO: 25396 - RNA, 32 nt, Human
aaggagagagggagggcggagggcggaggggc

SEQ ID NO: 25397 - RNA, 32 nt, Human
aaggagagagugaauggauacagagcugaaug

SEQ ID NO: 25398 - RNA, 32 nt, Human
aaggagagauagacgcgaaagugugcugcuau

SEQ ID NO: 25399 - RNA, 32 nt, Human
aaggagaggaaccauuugugcagaucaucuag

SEQ ID NO: 25400 - RNA, 32 nt, Human
aaggagaggagaagaaggaagaaggagaagga

SEQ ID NO: 25401 - RNA, 32 nt, Human
aaggagaggauucagguaaagaccuggaugug

SEQ ID NO: 25402 - RNA, 32 nt, Human
aaggagaggccccagaaccccaaagcagacag

SEQ ID NO: 25403 - RNA, 32 nt, Human
aaggagagggaaugugcaggaacagaggcguc

SEQ ID NO: 25404 - RNA, 32 nt, Human
aaggagagggagagagagguaagggucugguc

SEQ ID NO: 25405 - RNA, 20 nt, Human
aaggagagggcuuuagggga

SEQ ID NO: 25406 - RNA, 32 nt, Human
aaggagagugugggcagcuggagccagguccu

SEQ ID NO: 25407 - RNA, 32 nt, Human
aaggagaguugcuuugagagcuuguuuuuaca

SEQ ID NO: 25408 - RNA, 32 nt, Human
aaggagauaaacauuugagucagugggcuggg

SEQ ID NO: 25409 - RNA, 32 nt, Human
aaggagauaacuuauuaucugucgaaggcuua

SEQ ID NO: 25410 - RNA, 32 nt, Human
aaggagauacuacaugggagggggacacagaa

SEQ ID NO: 25411 - RNA, 32 nt, Human
aaggagaucaaugguuuaacaguuauccaugc

SEQ ID NO: 25412 - RNA, 32 nt, Human
aaggagaucacacccuugccccgcugagcccc

SEQ ID NO: 25413 - RNA, 32 nt, Human
aaggagaucacaccucuguccagccugcaccg

SEQ ID NO: 25414 - RNA, 32 nt, Human
aaggagaucucccucugggcaucuggcuuugc

SEQ ID NO: 25415 - RNA, 32 nt, Human
aaggagaugccacccccuccugcauuguucuu

SEQ ID NO: 25416 - RNA, 32 nt, Human
aaggagaugcccuagugguggcccagcuggcu

SEQ ID NO: 25417 - RNA, 32 nt, Human
aaggagauggagaggaaggacuacagaggaca

SEQ ID NO: 25418 - RNA, 32 nt, Human
aaggagaugguugcagaagauccacuuacuac

SEQ ID NO: 25419 - RNA, 22 nt, Human
aaggagaugucucucccucucc

SEQ ID NO: 25420 - RNA, 31 nt, Human
aaggagcaaaguccuaucacagcgggagggg

SEQ ID NO: 25421 - RNA, 32 nt, Human
aaggagcaacaaggagagggucugcuugagaa

SEQ ID NO: 25422 - RNA, 21 nt, Human
aaggagcaagccaggaagcca

SEQ ID NO: 25423 - RNA, 32 nt, Human
aaggagcacgccugggcugggccccagggagg

SEQ ID NO: 25424 - RNA, 32 nt, Human
aaggagcagagaguuaugcuguuucucccauu

SEQ ID NO: 25425 - RNA, 22 nt, Human
aaggagcagcaucuugauucac

SEQ ID NO: 25426 - RNA, 32 nt, Human
aaggagcagcccuacucuucaaaaguggcugc

SEQ ID NO: 25427 - RNA, 32 nt, Human
aaggagcagcuggaggaggagcagggaggcaa

SEQ ID NO: 25428 - RNA, 32 nt, Human
aaggagcaggccgcgugucacacccaucauug

SEQ ID NO: 25429 - RNA, 32 nt, Human
aaggagcaggcuuggagccagggaccaguggg

SEQ ID NO: 25430 - RNA, 32 nt, Human
aaggagcagggaugagacuggcaauggucaca

SEQ ID NO: 25431 - RNA, 32 nt, Human
aaggagcagggugagggaggggccccaggaga

SEQ ID NO: 25432 - RNA, 32 nt, Human
aaggagcagguggggcuggaggcccugcaggg

SEQ ID NO: 25433 - RNA, 32 nt, Human
aaggagcagugcgcuaagcuguggaaaauucc

SEQ ID NO: 25434 - RNA, 32 nt, Human
aaggagcauaggacagggcaaggcgggauaag

SEQ ID NO: 25435 - RNA, 32 nt, Human
aaggagcauauauguguaugaauagaccacau

SEQ ID NO: 25436 - RNA, 32 nt, Human
aaggagcauggacuggggucaguggguccagg

SEQ ID NO: 25437 - RNA, 32 nt, Human
aaggagcauggucacaggaaggugggguuuca

SEQ ID NO: 25438 - RNA, 32 nt, Human
aaggagcauuuggaagucacuggguggguugu

SEQ ID NO: 25439 - RNA, 24 nt, Human
aaggagccaacuuggcuuuuaccu

SEQ ID NO: 25440 - RNA, 32 nt, Human
aaggagccaagcugaaaaucaugugaaagaau

SEQ ID NO: 25441 - RNA, 32 nt, Human
aaggagccaauuuaaagaaaacuguuaauagu

SEQ ID NO: 25442 - RNA, 32 nt, Human
aaggagccacuucagaaaugugucacagaaaa

SEQ ID NO: 25443 - RNA, 32 nt, Human
aaggagccagggaguacgcaccccagacccau

SEQ ID NO: 25444 - RNA, 32 nt, Human
aaggagccaguggucucagaccugccacccca

SEQ ID NO: 25445 - RNA, 32 nt, Human
aaggagccaucucauccacagcucuuccuuga

SEQ ID NO: 25446 - RNA, 32 nt, Human
aaggagccaucuccaucuugaaggaacucaaa

SEQ ID NO: 25447 - RNA, 22 nt, Human
aaggagcccaggcccccucccu

SEQ ID NO: 25448 - RNA, 32 nt, Human
aaggagccccacagcaccuggagcugcccacu

SEQ ID NO: 25449 - RNA, 32 nt, Human
aaggagccccucucugcuuccuguugggcacc

SEQ ID NO: 25450 - RNA, 32 nt, Human
aaggagcccggcggaggcagcgguggguuugg

SEQ ID NO: 25451 - RNA, 32 nt, Human
aaggagccgggaggggcgcugcggggaagcca

SEQ ID NO: 25452 - RNA, 32 nt, Human
aaggagccucaccugccucccuucucugagua

SEQ ID NO: 25453 - RNA, 23 nt, Human
aaggagccugggaccaggagcca

SEQ ID NO: 25454 - RNA, 32 nt, Human
aaggagccugggagcacgcagaggccuguguu

SEQ ID NO: 25455 - RNA, 23 nt, Human
aaggagccuguauccacccugcc

SEQ ID NO: 25456 - RNA, 32 nt, Human
aaggagccuuccuccucuccccagacuccaga

SEQ ID NO: 25457 - RNA, 32 nt, Human
aaggagcggaaagagaagagagaagagugagc

SEQ ID NO: 25458 - RNA, 18 nt, Human
aaggagcggagaggggag

SEQ ID NO: 25459 - RNA, 32 nt, Human
aaggagcggaggaucggguccacccaaaguga

SEQ ID NO: 25460 - RNA, 32 nt, Human
aaggagcggaggcaccagcguucuccaccugg

SEQ ID NO: 25461 - RNA, 32 nt, Human
aaggagcuaguuuuccugagccugugugugca

SEQ ID NO: 25462 - RNA, 24 nt, Human
aaggagcucaaccucccugugccu

SEQ ID NO: 25463 - RNA, 32 nt, Human
aaggagcucccaggaggggcuucugggaagac

SEQ ID NO: 25464 - RNA, 32 nt, Human
aaggagcucugguuccagagaauuugcacaaa

SEQ ID NO: 25465 - RNA, 32 nt, Human
aaggagcugaccaggaggugucaguucccuga

SEQ ID NO: 25466 - RNA, 32 nt, Human
aaggagcugaggaggagaagccaaagaggagg

SEQ ID NO: 25467 - RNA, 32 nt, Human
aaggagcugcagcgauacaucgaagggcucaa

SEQ ID NO: 25468 - RNA, 32 nt, Human
aaggagcuggacaagcauaauuguucucccua

SEQ ID NO: 25469 - RNA, 32 nt, Human
aaggagcuggacugcaggggaggccacgugca

SEQ ID NO: 25470 - RNA, 32 nt, Human
aaggagcugguacuguccacugugcugucggu

SEQ ID NO: 25471 - RNA, 32 nt, Human
aaggagcugguaucauuuauacuuuuuguuug

SEQ ID NO: 25472 - RNA, 32 nt, Human
aaggagcuggugacccucuacaggagaagugc

SEQ ID NO: 25473 - RNA, 32 nt, Human
aaggagcugguggaggugagggaggcgcugag

SEQ ID NO: 25474 - RNA, 32 nt, Human
aaggagcugucuggaagguuugaauaaauaaa

SEQ ID NO: 25475 - RNA, 32 nt, Human
aaggagcuuccaggcuggggaagaucaucauu

SEQ ID NO: 25476 - RNA, 32 nt, Human
aaggagcuuggauuuuaaggcagcagcuugcu

SEQ ID NO: 25477 - RNA, 32 nt, Human
aaggagcuuugucccaccaugcuuccauuccc

SEQ ID NO: 25478 - RNA, 32 nt, Human
aaggaggaagaagaggaggaggagaaagaagc

SEQ ID NO: 25479 - RNA, 32 nt, Human
aaggaggaagaggaggaggaggaagaggggag

SEQ ID NO: 25480 - RNA, 32 nt, Human
aaggaggaagcugaagcgggcagaucacuuga

SEQ ID NO: 25481 - RNA, 32 nt, Human
aaggaggaaggaagaagguaaaggguggaugg

SEQ ID NO: 25482 - RNA, 32 nt, Human
aaggaggaaggagggagagggaaguaggaaag

SEQ ID NO: 25483 - RNA, 32 nt, Human
aaggaggaagucaccagcucgaggcgugugga

SEQ ID NO: 25484 - RNA, 32 nt, Human
aaggaggaggaagaggggcagguguagggagu

SEQ ID NO: 25485 - RNA, 32 nt, Human
aaggaggaggaggaggaggaggaggagggggc

SEQ ID NO: 25486 - RNA, 32 nt, Human
aaggaggaggcggggcugcacugugagcccga

SEQ ID NO: 25487 - RNA, 32 nt, Human
aaggaggauaauuuuuauugcauuuuacugua

SEQ ID NO: 25488 - RNA, 32 nt, Human
aaggaggaugagaaaggaagagagggagggag

SEQ ID NO: 25489 - RNA, 32 nt, Human
aaggaggauggagaaggaggugacagaaucug

SEQ ID NO: 25490 - RNA, 32 nt, Human
aaggaggcaaagugaucugucugggaacaguu

SEQ ID NO: 25491 - RNA, 32 nt, Human
aaggaggcacaaggaagagaguaugggaagaa

SEQ ID NO: 25492 - RNA, 32 nt, Human
aaggaggcacugggcucagccugggcauuaaa

SEQ ID NO: 25493 - RNA, 17 nt, Human
aaggaggcagaagggga

SEQ ID NO: 25494 - RNA, 32 nt, Human
aaggaggcagggcaaggccgggcuugggggca

SEQ ID NO: 25495 - RNA, 32 nt, Human
aaggaggcagugaccuucaaggauguggcugu

SEQ ID NO: 25496 - RNA, 32 nt, Human
aaggaggccaagcagugccugccuaugaaauu

SEQ ID NO: 25497 - RNA, 32 nt, Human
aaggaggccaguuguaggaaugagcacuagaa

SEQ ID NO: 25498 - RNA, 32 nt, Human
aaggaggccaugaucccucccugagcuuuuuc

SEQ ID NO: 25499 - RNA, 32 nt, Human
aaggaggcccacuugugucuuaggcaggcaag

SEQ ID NO: 25500 - RNA, 32 nt, Human
aaggaggcccaggaguagaggcugcagcgccc

SEQ ID NO: 25501 - RNA, 32 nt, Human
aaggaggccuccacuccuuccaucucuuccuu

SEQ ID NO: 25502 - RNA, 32 nt, Human
aaggaggcggggccugcagcaggcuuggaggc

SEQ ID NO: 25503 - RNA, 32 nt, Human
aaggaggcuagcuucuagccuggguggccauu

SEQ ID NO: 25504 - RNA, 32 nt, Human
aaggaggcugucagaggccgucucagcuccca

SEQ ID NO: 25505 - RNA, 32 nt, Human
aaggagggaaggaaguagggaggcagggaaga

SEQ ID NO: 25506 - RNA, 32 nt, Human
aaggagggaaggagggagaggaaggcagggga

SEQ ID NO: 25507 - RNA, 32 nt, Human
aaggagggagaagggaaggaaggaaagaagag

SEQ ID NO: 25508 - RNA, 32 nt, Human
aaggagggagaagggaaggagugaaggaagga

SEQ ID NO: 25509 - RNA, 32 nt, Human
aaggagggagagagaggagagagaaggaaaua

SEQ ID NO: 25510 - RNA, 32 nt, Human
aaggagggagagagggaggaaggaagaaggug

SEQ ID NO: 25511 - RNA, 32 nt, Human
aaggagggaggaaauaugucccuugcacacca

SEQ ID NO: 25512 - RNA, 32 nt, Human
aaggagggaggaucacuugaacucaggaauuc

SEQ ID NO: 25513 - RNA, 32 nt, Human
aaggagggaguaucaguucugagccacagaug

SEQ ID NO: 25514 - RNA, 32 nt, Human
aaggagggaugccaccagaugacacugggauc

SEQ ID NO: 25515 - RNA, 32 nt, Human
aaggagggccugggccagcuuugaaaaggcag

SEQ ID NO: 25516 - RNA, 32 nt, Human
aaggagggccuuauaagucaagccauggaauu

SEQ ID NO: 25517 - RNA, 32 nt, Human
aaggagggcuacggaaacuaaaaguuucgggg

SEQ ID NO: 25518 - RNA, 32 nt, Human
aaggaggggagaaagcgggcucucacccccuc

SEQ ID NO: 25519 - RNA, 32 nt, Human
aaggaggggagaggaggggaaggggaggcaga

SEQ ID NO: 25520 - RNA, 32 nt, Human
aaggaggggauuagggguggggcaguuuuugu

SEQ ID NO: 25521 - RNA, 32 nt, Human
aaggaggggcagcagggugugugcauaugaga

SEQ ID NO: 25522 - RNA, 32 nt, Human
aaggaggggccgcggcuggcccaggagagaac

SEQ ID NO: 25523 - RNA, 32 nt, Human
aaggaggggucuaggagcucugucccuuguaa

SEQ ID NO: 25524 - RNA, 32 nt, Human
aaggagggguggaggaagaggaagggccaaac

SEQ ID NO: 25525 - RNA, 32 nt, Human
aaggagggguugcuucccucccuaccucaucc

SEQ ID NO: 25526 - RNA, 32 nt, Human
aaggagggucucuugcccaucucuccggccac

SEQ ID NO: 25527 - RNA, 23 nt, Human
aaggaggguggaucaccugaggu

SEQ ID NO: 25528 - RNA, 32 nt, Human
aaggaggucaagcaucuucggccgauauuuaa

SEQ ID NO: 25529 - RNA, 32 nt, Human
aaggaggucaccaagcagguugacccuccccu

SEQ ID NO: 25530 - RNA, 32 nt, Human
aaggagguccccaagaucuccaccccagucau

SEQ ID NO: 25531 - RNA, 32 nt, Human
aaggaggugaaaucccugccucaggccaaggg

SEQ ID NO: 25532 - RNA, 32 nt, Human
aaggaggugcagguaaagggugcagugcagcc

SEQ ID NO: 25533 - RNA, 32 nt, Human
aaggaggugccaagccuguuugucuucauugu

SEQ ID NO: 25534 - RNA, 32 nt, Human
aaggagguggagccaccggcccggccuggauu

SEQ ID NO: 25535 - RNA, 32 nt, Human
aaggaggugggacuagagucaaccuggaauag

SEQ ID NO: 25536 - RNA, 32 nt, Human
aaggaggugggccacacccaggaagggaaagc

SEQ ID NO: 25537 - RNA, 32 nt, Human
aaggagguggggauccgagugcagugagagcc

SEQ ID NO: 25538 - RNA, 32 nt, Human
aaggaggugguuggccagagauggggaacagc

SEQ ID NO: 25539 - RNA, 32 nt, Human
aaggaggugguuguggggaaccaccuggagag

SEQ ID NO: 25540 - RNA, 32 nt, Human
aaggagguuauucauaaauauuggacaguuua

SEQ ID NO: 25541 - RNA, 32 nt, Human
aaggagguugagcucuucacugugucuuucca

SEQ ID NO: 25542 - RNA, 32 nt, Human
aaggagguuguuaucuggccaucuucauuccc

SEQ ID NO: 25543 - RNA, 32 nt, Human
aaggaguacuccaagacagagacagaggcgcc

SEQ ID NO: 25544 - RNA, 32 nt, Human
aaggaguacugaugauggaagcaucugguccc

SEQ ID NO: 25545 - RNA, 32 nt, Human
aaggaguacugcagaggucacagggaagucac

SEQ ID NO: 25546 - RNA, 32 nt, Human
aaggaguaggcuuggggguggggagagagaaa

SEQ ID NO: 25547 - RNA, 32 nt, Human
aaggaguauguccugaggagggguugggaugg

SEQ ID NO: 25548 - RNA, 32 nt, Human
aaggagucaacuugcaggcuguuaaagaccuc

SEQ ID NO: 25549 - RNA, 32 nt, Human
aaggagucaagaacaauucacaguaugagaag

SEQ ID NO: 25550 - RNA, 32 nt, Human
aaggagucacgccucccgccucccggagcugc

SEQ ID NO: 25551 - RNA, 32 nt, Human
aaggaguccgggaggugccugugguuugcacc

SEQ ID NO: 25552 - RNA, 32 nt, Human
aaggagucgaggcuguaccucucuuugcaaga

SEQ ID NO: 25553 - RNA, 32 nt, Human
aaggagucucuugucuacaggcagcaucgggg

SEQ ID NO: 25554 - RNA, 22 nt, Human
aaggagucugcauagccaggaa

SEQ ID NO: 25555 - RNA, 22 nt, Human
aaggagugaaaccuuuagggca

SEQ ID NO: 25556 - RNA, 19 nt, Human
aaggagugaacaagagcca

SEQ ID NO: 25557 - RNA, 32 nt, Human
aaggagugaacaagagccaggagaccagggag

SEQ ID NO: 25558 - RNA, 19 nt, Human
aaggagugacaaggaagcu

SEQ ID NO: 25559 - RNA, 32 nt, Human
aaggagugagccaugugcaaaauucuguaagu

SEQ ID NO: 25560 - RNA, 18 nt, Human
aaggagugauggaagcca

SEQ ID NO: 25561 - RNA, 32 nt, Human
aaggagugcaccacugcacuccagccugggca

SEQ ID NO: 25562 - RNA, 32 nt, Human
aaggagugcaggacacuuucaugagugcagga

SEQ ID NO: 25563 - RNA, 32 nt, Human
aaggagugcauggccacagccaccuccacccc

SEQ ID NO: 25564 - RNA, 32 nt, Human
aaggagugccugaauagcuuggaaaaguaaca

SEQ ID NO: 25565 - RNA, 32 nt, Human
aaggagugcggcaccuucccgucugaugcugg

SEQ ID NO: 25566 - RNA, 20 nt, Human
aaggaguggaagaggagaca

SEQ ID NO: 25567 - RNA, 32 nt, Human
aaggaguguccuuuacccucccagccuccagg

SEQ ID NO: 25568 - RNA, 32 nt, Human
aaggagugucugcuugaaggccuggaccaccc

SEQ ID NO: 25569 - RNA, 32 nt, Human
aaggagugugcccagugcccuugggcaggacc

SEQ ID NO: 25570 - RNA, 32 nt, Human
aaggagugugccgccacacccagccugagcaa

SEQ ID NO: 25571 - RNA, 32 nt, Human
aaggagugugcugcgugcugcccacaccguga

SEQ ID NO: 25572 - RNA, 32 nt, Human
aaggaguucacucaaguucccaagguauucug

SEQ ID NO: 25573 - RNA, 32 nt, Human
aaggaguucuccacuaucuccugggccacgcc

SEQ ID NO: 25574 - RNA, 32 nt, Human
aaggaguuggaagugaagucuaugaugugaaa

SEQ ID NO: 25575 - RNA, 32 nt, Human
aaggaguuggaggaggaggaggaggaggcgag

SEQ ID NO: 25576 - RNA, 32 nt, Human
aaggaguuggggaaggaagagggcgagaucuu

SEQ ID NO: 25577 - RNA, 32 nt, Human
aaggaguuucaagagccuuucuugucaauaua

SEQ ID NO: 25578 - RNA, 32 nt, Human
aaggaguuucgcucuuguccaggcuggaguau

SEQ ID NO: 25579 - RNA, 32 nt, Human
aaggaguuucugauagucuccugcuguuuuac

SEQ ID NO: 25580 - RNA, 32 nt, Human
aaggaguuuucuuuuucucuuuaguacuuacg

SEQ ID NO: 25581 - RNA, 32 nt, Human
aaggauaagguggaggagacaagugaguuaga

SEQ ID NO: 25582 - RNA, 32 nt, Human
aaggauaaugauuucauaauuuucuauuugaa

SEQ ID NO: 25583 - RNA, 32 nt, Human
aaggauaauggaguuccucuccucugcuuucc

SEQ ID NO: 25584 - RNA, 32 nt, Human
aaggauaauuagcugaaagcuaugaugauaua

SEQ ID NO: 25585 - RNA, 21 nt, Human
aaggauacucgucaucggcca

SEQ ID NO: 25586 - RNA, 32 nt, Human
aaggauagcucuaaguguggguugcaguuacu

SEQ ID NO: 25587 - RNA, 32 nt, Human
aaggauaggaaagaggauaugauggguuugaa

SEQ ID NO: 25588 - RNA, 32 nt, Human
aaggauagugugaagaucuuuggcaugauuua

SEQ ID NO: 25589 - RNA, 32 nt, Human
aaggauauaaggauacagaaagcaauggaaga

SEQ ID NO: 25590 - RNA, 32 nt, Human
aaggauauguacugggaagaccacagagaaag

SEQ ID NO: 25591 - RNA, 32 nt, Human
aaggauauucacugcaacaaugucuuaaaugu

SEQ ID NO: 25592 - RNA, 32 nt, Human
aaggaucaccugagcccaggaggucaagacug

SEQ ID NO: 25593 - RNA, 32 nt, Human
aaggaucaccuugaggccaggaguuuaaggcc

SEQ ID NO: 25594 - RNA, 32 nt, Human
aaggaucacugcacccagcccaaggucuugcc

SEQ ID NO: 25595 - RNA, 32 nt, Human
aaggaucacuugaacccaggaguucaagaaua

SEQ ID NO: 25596 - RNA, 32 nt, Human
aaggaucagagggaacuuggguuguuuuggga

SEQ ID NO: 25597 - RNA, 32 nt, Human
aaggauccaguauugaggaaagaaaaacugca

SEQ ID NO: 25598 - RNA, 32 nt, Human
aaggauccuccaggagcucugcuuagccaauc

SEQ ID NO: 25599 - RNA, 32 nt, Human
aaggauccucuccacuccauguuugcaauaca

SEQ ID NO: 25600 - RNA, 32 nt, Human
aaggauccugcaggaaccaaaggcagguaggu

SEQ ID NO: 25601 - RNA, 32 nt, Human
aaggaucgcuugaaccugggaggcagagguug

SEQ ID NO: 25602 - RNA, 32 nt, Human
aaggaucgcuugagcccaggaguucaagaaca

SEQ ID NO: 25603 - RNA, 32 nt, Human
aaggaucgcuugagcccaggaguuugagacca

SEQ ID NO: 25604 - RNA, 32 nt, Human
aaggaucgugucugcugacuguuucauucacu

SEQ ID NO: 25605 - RNA, 32 nt, Human
aaggaucuaugcuuuuucuguggugugucacu

SEQ ID NO: 25606 - RNA, 32 nt, Human
aaggaucucauggcagaacagcggaagacuug

SEQ ID NO: 25607 - RNA, 32 nt, Human
aaggaucucccagaaaacaggaagaaugucau

SEQ ID NO: 25608 - RNA, 20 nt, Human
aaggaucucgaucucugcag

SEQ ID NO: 25609 - RNA, 32 nt, Human
aaggaucucugagaccacagaggcucagacuc

SEQ ID NO: 25610 - RNA, 32 nt, Human
aaggaucugcagaauuugucaggccugccuag

SEQ ID NO: 25611 - RNA, 32 nt, Human
aaggaucugggagcuguccagccaggucuggu

SEQ ID NO: 25612 - RNA, 32 nt, Human
aaggaucugggcucagugaugugaaacauacu

SEQ ID NO: 25613 - RNA, 32 nt, Human
aaggaucuugcagccagcacagaggccucuuc

SEQ ID NO: 25614 - RNA, 32 nt, Human
aaggaugaaccugguggggaugccugggcucc

SEQ ID NO: 25615 - RNA, 29 nt, Human
aaggaugaagaaaaggaagaaggaggaag

SEQ ID NO: 25616 - RNA, 32 nt, Human
aaggaugaagaaaauggaaacagaggaggaaa

SEQ ID NO: 25617 - RNA, 32 nt, Human
aaggaugacaagaaaaacauggggaaacagau

SEQ ID NO: 25618 - RNA, 32 nt, Human
aaggaugacaggccuccgcuggaaaugcaaag

SEQ ID NO: 25619 - RNA, 23 nt, Human
aaggaugacauagagcuggcucc

SEQ ID NO: 25620 - RNA, 32 nt, Human
aaggaugacucagcagggaugauucagcagag

SEQ ID NO: 25621 - RNA, 32 nt, Human
aaggaugacuggccaccuccucccuccugccu

SEQ ID NO: 25622 - RNA, 32 nt, Human
aaggaugagaugggaggauggcuugaggccag

SEQ ID NO: 25623 - RNA, 32 nt, Human
aaggaugagcaggcucucugccaucugcccac

SEQ ID NO: 25624 - RNA, 29 nt, Human
aaggaugcaauguccacacaugcuaaagg

SEQ ID NO: 25625 - RNA, 32 nt, Human
aaggaugcagacuuaccccacccuccaccccu

SEQ ID NO: 25626 - RNA, 32 nt, Human
aaggaugcagccgccgaugccgguccggcuuc

SEQ ID NO: 25627 - RNA, 32 nt, Human
aaggaugccacuguucuuaucuccuccaauuu

SEQ ID NO: 25628 - RNA, 29 nt, Human
aaggaugccuccauuccugcuucucaccu

SEQ ID NO: 25629 - RNA, 32 nt, Human
aaggaugccuuaucucuucucacuuuccuuuu

SEQ ID NO: 25630 - RNA, 32 nt, Human
aaggaugcuacacccaccaucucaucccaugg

SEQ ID NO: 25631 - RNA, 20 nt, Human
aaggaugcucgcagaagcca

SEQ ID NO: 25632 - RNA, 32 nt, Human
aaggaugcuucugguggacuucaggggacccc

SEQ ID NO: 25633 - RNA, 32 nt, Human
aaggauggaaagcaucauuucugccagcuucu

SEQ ID NO: 25634 - RNA, 32 nt, Human
aaggauggaaggcagaggguggguguggggcc

SEQ ID NO: 25635 - RNA, 32 nt, Human
aaggauggcacugaggcaccggagaucuugag

SEQ ID NO: 25636 - RNA, 32 nt, Human
aaggauggcagacgccuggugucaggaggggc

SEQ ID NO: 25637 - RNA, 29 nt, Human
aaggauggccaaggaaagaugccugaaaa

SEQ ID NO: 25638 - RNA, 32 nt, Human
aaggaugggaaaaacugcagucaucaacaaug

SEQ ID NO: 25639 - RNA, 32 nt, Human
aaggaugggaagagaaaaggagcaguuuuauu

SEQ ID NO: 25640 - RNA, 32 nt, Human
aaggaugggaggaugcuuggacccaggccuug

SEQ ID NO: 25641 - RNA, 32 nt, Human
aaggauggggaaaaagaaugccuuuaaguuug

SEQ ID NO: 25642 - RNA, 32 nt, Human
aaggauguaauucgcuuugcucucuccucauu

SEQ ID NO: 25643 - RNA, 32 nt, Human
aaggauguagcccguagguggggagggcagca

SEQ ID NO: 25644 - RNA, 32 nt, Human
aaggaugucaggccuggaccuccugggcagga

SEQ ID NO: 25645 - RNA, 23 nt, Human
aaggaugugacauggcuucuccu

SEQ ID NO: 25646 - RNA, 32 nt, Human
aaggaugugugauagaaggaaaaagaaugcuu

SEQ ID NO: 25647 - RNA, 32 nt, Human
aaggauguuucuggcagcacuuuucuaauaau

SEQ ID NO: 25648 - RNA, 32 nt, Human
aaggauuaauccaaaguaacuccuaaauaaca

SEQ ID NO: 25649 - RNA, 32 nt, Human
aaggauuaaugucgugcuugcugguggccacg

SEQ ID NO: 25650 - RNA, 32 nt, Human
aaggauuagaagaggaaacagaaacagguaac

SEQ ID NO: 25651 - RNA, 32 nt, Human
aaggauuauacugggggugaggggacaagaaa

SEQ ID NO: 25652 - RNA, 31 nt, Human
aaggauuauuuccacauuccucucucugaag

SEQ ID NO: 25653 - RNA, 32 nt, Human
aaggauucaccauucuagaugccaucaagagc

SEQ ID NO: 25654 - RNA, 32 nt, Human
aaggauucaguagagauccugaugauucuuuu

SEQ ID NO: 25655 - RNA, 32 nt, Human
aaggauucaguuauuuacugacaguggugagc

SEQ ID NO: 25656 - RNA, 32 nt, Human
aaggauucaguuuugcuuauuguguguugauu

SEQ ID NO: 25657 - RNA, 32 nt, Human
aaggauucauaaggagcuuaucugaacagauu

SEQ ID NO: 25658 - RNA, 32 nt, Human
aaggauuccagcuuucccuccuggccagaaau

SEQ ID NO: 25659 - RNA, 32 nt, Human
aaggauuccugcugaagucugaaccuuacugu

SEQ ID NO: 25660 - RNA, 32 nt, Human
aaggauucugaccccugugccucccauuuaug

SEQ ID NO: 25661 - RNA, 32 nt, Human
aaggauucugguaccuuuacccaaaccuacug

SEQ ID NO: 25662 - RNA, 32 nt, Human
aaggauugcugugugcuagacuuuccagugag

SEQ ID NO: 25663 - RNA, 32 nt, Human
aaggauugcuugagcccaggaguuugagacca

SEQ ID NO: 25664 - RNA, 30 nt, Human
aaggauuguagggagucagaaagacaaggg

SEQ ID NO: 25665 - RNA, 32 nt, Human
aaggauuguguccuccuccaccuucccugugc

SEQ ID NO: 25666 - RNA, 32 nt, Human
aaggauuguugaggggaugcagugaguucuuu

SEQ ID NO: 25667 - RNA, 32 nt, Human
aaggauuucacgagccuggccuggagaggaca

SEQ ID NO: 25668 - RNA, 32 nt, Human
aaggauuuccuacgaagauaaauuuaacuuua

SEQ ID NO: 25669 - RNA, 32 nt, Human
aaggauuugaugcuuuucucucagcauaggua

SEQ ID NO: 25670 - RNA, 32 nt, Human
aaggauuuggcucuaggaaggcuuccaugcag

SEQ ID NO: 25671 - RNA, 32 nt, Human
aaggauuuggggaucacacuguucaucagcug

SEQ ID NO: 25672 - RNA, 32 nt, Human
aaggauuugucaaggauagaguacaguuguag

SEQ ID NO: 25673 - RNA, 32 nt, Human
aaggauuuuaucagaguccugaugccacuaaa

SEQ ID NO: 25674 - RNA, 32 nt, Human
aaggauuuugagaugagcucguccuggaguau

SEQ ID NO: 25675 - RNA, 32 nt, Human
aaggcaaaaccugaaccaccuucugcacuuaa

SEQ ID NO: 25676 - RNA, 32 nt, Human
aaggcaaaaggaaaagagaaaagggaaagaaa

SEQ ID NO: 25677 - RNA, 32 nt, Human
aaggcaaaagugggguagggggaugugggaag

SEQ ID NO: 25678 - RNA, 21 nt, Human
aaggcaaacauuuguugcaag

SEQ ID NO: 25679 - RNA, 32 nt, Human
aaggcaaacucccuccuugcaaggaaaggaga

SEQ ID NO: 25680 - RNA, 32 nt, Human
aaggcaaacugaggcagcaugcacggaggcgg

SEQ ID NO: 25681 - RNA, 32 nt, Human
aaggcaaagaagggggaaggaaaacaaacuuc

SEQ ID NO: 25682 - RNA, 32 nt, Human
aaggcaaagaugagcagagccauggcccucuu

SEQ ID NO: 25683 - RNA, 18 nt, Human
aaggcaaagccccuggaa

SEQ ID NO: 25684 - RNA, 32 nt, Human
aaggcaaaggcagagcgaggugaaaaggcaug

SEQ ID NO: 25685 - RNA, 32 nt, Human
aaggcaaauacucaggguuugaagggagaccu

SEQ ID NO: 25686 - RNA, 32 nt, Human
aaggcaaauccacuuaaaagaucucuguaucu

SEQ ID NO: 25687 - RNA, 32 nt, Human
aaggcaaauguucauuguuuaauuagcacugg

SEQ ID NO: 25688 - RNA, 32 nt, Human
aaggcaacagucugaacucuccuggccagcuc

SEQ ID NO: 25689 - RNA, 22 nt, Human
aaggcaacgaaagcuguugaaa

SEQ ID NO: 25690 - RNA, 32 nt, Human
aaggcaacuaaagacaugaaaccucagguauc

SEQ ID NO: 25691 - RNA, 32 nt, Human
aaggcaacuccucugugaauuugccuuccagg

SEQ ID NO: 25692 - RNA, 32 nt, Human
aaggcaagaagagcacaugagcccaggaguuc

SEQ ID NO: 25693 - RNA, 32 nt, Human
aaggcaagaagaggaggaaggaauagcacagg

SEQ ID NO: 25694 - RNA, 32 nt, Human
aaggcaagacuggccuagccucccagccuaca

SEQ ID NO: 25695 - RNA, 32 nt, Human
aaggcaagcaaaucacuugagcucaggaguuc

SEQ ID NO: 25696 - RNA, 32 nt, Human
aaggcaagcauauuucuccucauaugaaugag

SEQ ID NO: 25697 - RNA, 32 nt, Human
aaggcaaggagagaagccugcgcugguaguga

SEQ ID NO: 25698 - RNA, 32 nt, Human
aaggcaaggagcauccaugcacccccacagua

SEQ ID NO: 25699 - RNA, 32 nt, Human
aaggcaaggcugcaggucuggcccaggggaau

SEQ ID NO: 25700 - RNA, 32 nt, Human
aaggcaauagagcagggggaaaaagagauugu

SEQ ID NO: 25701 - RNA, 32 nt, Human
aaggcaaugcugcucccugaguccaguccccg

SEQ ID NO: 25702 - RNA, 32 nt, Human
aaggcaauguagaaauucuccaggggagagug

SEQ ID NO: 25703 - RNA, 32 nt, Human
aaggcaauuagcucaggagaaaaagaaaaaca

SEQ ID NO: 25704 - RNA, 18 nt, Human
aaggcacaagaaucgcuu

SEQ ID NO: 25705 - RNA, 32 nt, Human
aaggcacaagugcacacacaucuaugcagaca

SEQ ID NO: 25706 - RNA, 31 nt, Human
aaggcacaaguguccuuggcuuucagaauuu

SEQ ID NO: 25707 - RNA, 32 nt, Human
aaggcacacguacgcacacacgcacaugcaca

SEQ ID NO: 25708 - RNA, 32 nt, Human
aaggcacacuccuguagcucugucgccaaaac

SEQ ID NO: 25709 - RNA, 32 nt, Human
aaggcacagcacagcaguacuccacauuguuu

SEQ ID NO: 25710 - RNA, 32 nt, Human
aaggcacagccauucuguucucacuugguucu

SEQ ID NO: 25711 - RNA, 32 nt, Human
aaggcacagccuugaugaucucagggaaaaau

SEQ ID NO: 25712 - RNA, 32 nt, Human
aaggcacagcuccucuagcccaaaaagcaaaa

SEQ ID NO: 25713 - RNA, 32 nt, Human
aaggcacagggaagcaucagcaaccaagguag

SEQ ID NO: 25714 - RNA, 32 nt, Human
aaggcacagguuuauucaaugaaaaucagacg

SEQ ID NO: 25715 - RNA, 32 nt, Human
aaggcacaugagugccuugagggcaggggcag

SEQ ID NO: 25716 - RNA, 32 nt, Human
aaggcaccaacuuggaaaugugcauagguugu

SEQ ID NO: 25717 - RNA, 32 nt, Human
aaggcaccagaauuugaggacagcgaggaggu

SEQ ID NO: 25718 - RNA, 32 nt, Human
aaggcaccauggucagacuggccaggccugag

SEQ ID NO: 25719 - RNA, 32 nt, Human
aaggcacccugccucugcagagcagaaagauc

SEQ ID NO: 25720 - RNA, 32 nt, Human
aaggcacccuggaaguggaagguucggucauu

SEQ ID NO: 25721 - RNA, 19 nt, Human
aaggcacccugguguggga

SEQ ID NO: 25722 - RNA, 32 nt, Human
aaggcaccgggcaccagcuguucaugcugaac

SEQ ID NO: 25723 - RNA, 19 nt, Human
aaggcaccuggcuccucag

SEQ ID NO: 25724 - RNA, 32 nt, Human
aaggcacgcuccuguccuccucauugcccagc

SEQ ID NO: 25725 - RNA, 32 nt, Human
aaggcacggagggagagacagcaagugccuuu

SEQ ID NO: 25726 - RNA, 32 nt, Human
aaggcacgggacaggcaugugacacuaggcca

SEQ ID NO: 25727 - RNA, 25 nt, Human
aaggcacguccacucacaagggacg

SEQ ID NO: 25728 - RNA, 32 nt, Human
aaggcacuccagccugggugacagagugagac

SEQ ID NO: 25729 - RNA, 32 nt, Human
aaggcacugagaccuccacccacuguggacuc

SEQ ID NO: 25730 - RNA, 32 nt, Human
aaggcacugcccucucugugccuugguuuccc

SEQ ID NO: 25731 - RNA, 32 nt, Human
aaggcacugcuccccuuccaucucuagcagau

SEQ ID NO: 25732 - RNA, 32 nt, Human
aaggcacugggucuuggcuggguugaagguuc

SEQ ID NO: 25733 - RNA, 32 nt, Human
aaggcacuguaccaccagccuacugagauugu

SEQ ID NO: 25734 - RNA, 32 nt, Human
aaggcacugucacugcccaccuccuugggccu

SEQ ID NO: 25735 - RNA, 32 nt, Human
aaggcacuugauggccuccaaaaauccugacu

SEQ ID NO: 25736 - RNA, 32 nt, Human
aaggcagaaaagaaggagagaggcagaccuua

SEQ ID NO: 25737 - RNA, 32 nt, Human
aaggcagaaagaggcagcaugggcacugccag

SEQ ID NO: 25738 - RNA, 32 nt, Human
aaggcagaaagccugggaauggguucggcagg

SEQ ID NO: 25739 - RNA, 32 nt, Human
aaggcagaagcagaaguagcugcuuuuuagca

SEQ ID NO: 25740 - RNA, 32 nt, Human
aaggcagaaugagugcuucagaaugugauuuc

SEQ ID NO: 25741 - RNA, 32 nt, Human
aaggcagacaugguuugcaaaccacaagaauc

SEQ ID NO: 25742 - RNA, 25 nt, Human
aaggcagaccgugugagggggccug

SEQ ID NO: 25743 - RNA, 32 nt, Human
aaggcagaccuacaggcgaggccgcagcagag

SEQ ID NO: 25744 - RNA, 32 nt, Human
aaggcagaccuccaaguuccucccugcucugc

SEQ ID NO: 25745 - RNA, 32 nt, Human
aaggcagaccucuccucucucuuuccaauccc

SEQ ID NO: 25746 - RNA, 32 nt, Human
aaggcagacuauucacagcccuauuuacuuac

SEQ ID NO: 25747 - RNA, 32 nt, Human
aaggcagagaaggaaggaugugcuugggaacu

SEQ ID NO: 25748 - RNA, 32 nt, Human
aaggcagagacuucagacuucucaguguguug

SEQ ID NO: 25749 - RNA, 32 nt, Human
aaggcagagagggaggacggcaccgagcggcu

SEQ ID NO: 25750 - RNA, 32 nt, Human
aaggcagagaucuaaccuggcuuguuuagggc

SEQ ID NO: 25751 - RNA, 32 nt, Human
aaggcagagcaucaucuuguucagccucagcu

SEQ ID NO: 25752 - RNA, 32 nt, Human
aaggcagagcccagacucuuggagcaguuguu

SEQ ID NO: 25753 - RNA, 32 nt, Human
aaggcagaggagcccauagccaugaggagccu

SEQ ID NO: 25754 - RNA, 32 nt, Human
aaggcagauaagauguuuaugggugaacccug

SEQ ID NO: 25755 - RNA, 32 nt, Human
aaggcagaugcaucagagccaagacccggccc

SEQ ID NO: 25756 - RNA, 32 nt, Human
aaggcagauggaucaugaggucagggguucaa

SEQ ID NO: 25757 - RNA, 32 nt, Human
aaggcagcaacaagcucuuuuguguuuaaggc

SEQ ID NO: 25758 - RNA, 32 nt, Human
aaggcagcaagguuggugacuuuggagaugca

SEQ ID NO: 25759 - RNA, 32 nt, Human
aaggcagcaauaaaagcacauuagaagucccc

SEQ ID NO: 25760 - RNA, 32 nt, Human
aaggcagcaaugagcuaugaucaugccacugu

SEQ ID NO: 25761 - RNA, 32 nt, Human
aaggcagcagcuuggcuaauacugagcaggua

SEQ ID NO: 25762 - RNA, 32 nt, Human
aaggcagcauuccaugaccagaaacagggaca

SEQ ID NO: 25763 - RNA, 32 nt, Human
aaggcagccagcccagcgaguccagcgguggc

SEQ ID NO: 25764 - RNA, 32 nt, Human
aaggcagccaggaagguggcucugcaggccca

SEQ ID NO: 25765 - RNA, 32 nt, Human
aaggcagcccaggagucagguaugcaggcauu

SEQ ID NO: 25766 - RNA, 32 nt, Human
aaggcagccccuuccuuccagccugggcucug

SEQ ID NO: 25767 - RNA, 32 nt, Human
aaggcagcccucauagugcaucaaagaauuca

SEQ ID NO: 25768 - RNA, 32 nt, Human
aaggcagcccugguacuuuccuaaguggcccc

SEQ ID NO: 25769 - RNA, 32 nt, Human
aaggcagccgagagcaucucccuggaggggcc

SEQ ID NO: 25770 - RNA, 32 nt, Human
aaggcagccgcuccggauccggaucuccaccu

SEQ ID NO: 25771 - RNA, 32 nt, Human
aaggcagccgugucuguguuuuugucucgcag

SEQ ID NO: 25772 - RNA, 19 nt, Human
aaggcagccuugacaggga

SEQ ID NO: 25773 - RNA, 32 nt, Human
aaggcagcgaagccucggggcccaagccccuc

SEQ ID NO: 25774 - RNA, 32 nt, Human
aaggcagcgcagccggugucccagggaccggu

SEQ ID NO: 25775 - RNA, 32 nt, Human
aaggcagcgucauagcaagggagggagagucc

SEQ ID NO: 25776 - RNA, 32 nt, Human
aaggcagcuaucucccuuucugugaucgggag

SEQ ID NO: 25777 - RNA, 32 nt, Human
aaggcagcucagaaaggauuaaggaagauagc

SEQ ID NO: 25778 - RNA, 16 nt, Human
aaggcagcucuggaca

SEQ ID NO: 25779 - RNA, 32 nt, Human
aaggcagcuucacuuccucuuugaggauggag

SEQ ID NO: 25780 - RNA, 32 nt, Human
aaggcagcuucucaggccccuucccaggccaa

SEQ ID NO: 25781 - RNA, 17 nt, Human
aaggcagcuucuggaca

SEQ ID NO: 25782 - RNA, 32 nt, Human
aaggcagcuuuccuuucuuuuguguguuuucu

SEQ ID NO: 25783 - RNA, 32 nt, Human
aaggcaggagagaaggacuuuggucuccggcc

SEQ ID NO: 25784 - RNA, 18 nt, Human
aaggcaggagaugcagca

SEQ ID NO: 25785 - RNA, 32 nt, Human
aaggcaggagggcccucagcuccuagggcugu

SEQ ID NO: 25786 - RNA, 32 nt, Human
aaggcaggaggguggcagcgucccggcugagu

SEQ ID NO: 25787 - RNA, 32 nt, Human
aaggcaggcagaugggccagaggagcagagag

SEQ ID NO: 25788 - RNA, 32 nt, Human
aaggcaggcagccugcccaggcccucccuccu

SEQ ID NO: 25789 - RNA, 20 nt, Human
aaggcaggcagguggaucac

SEQ ID NO: 25790 - RNA, 32 nt, Human
aaggcaggcauggucaaacccauuucacugac

SEQ ID NO: 25791 - RNA, 32 nt, Human
aaggcaggccucaggauugugcggagaaccau

SEQ ID NO: 25792 - RNA, 32 nt, Human
aaggcaggccugucugcgaugggaucugccua

SEQ ID NO: 25793 - RNA, 32 nt, Human
aaggcaggccuuuccuacaggggguggagaga

SEQ ID NO: 25794 - RNA, 32 nt, Human
aaggcaggcggaucacaugaggccaggaauuc

SEQ ID NO: 25795 - RNA, 32 nt, Human
aaggcagggaaagagggaaggagaggagagga

SEQ ID NO: 25796 - RNA, 32 nt, Human
aaggcagggcacugucuccugaggccagugcc

SEQ ID NO: 25797 - RNA, 32 nt, Human
aaggcagggcaucuaccuuccuccccucaggg

SEQ ID NO: 25798 - RNA, 32 nt, Human
aaggcagggccaugggcuuggaggcgggacac

SEQ ID NO: 25799 - RNA, 32 nt, Human
aaggcagggccguggauaugucuggaaaugua

SEQ ID NO: 25800 - RNA, 32 nt, Human
aaggcagggccucccuucaucuucuuaaauua

SEQ ID NO: 25801 - RNA, 32 nt, Human
aaggcagggccuuggucccugaggcuuccccc

SEQ ID NO: 25802 - RNA, 32 nt, Human
aaggcagggucugggugcgggaagagggcucg

SEQ ID NO: 25803 - RNA, 32 nt, Human
aaggcagguggaggggaggccaguguacaugu

SEQ ID NO: 25804 - RNA, 23 nt, Human
aaggcagguggaucaccugaggu

SEQ ID NO: 25805 - RNA, 32 nt, Human
aaggcagguggaucccuugagcucaggaguuc

SEQ ID NO: 25806 - RNA, 32 nt, Human
aaggcagguggaucgcuugagcucaggaguua

SEQ ID NO: 25807 - RNA, 32 nt, Human
aaggcaguaauuccccuuaggccuuguuauuu

SEQ ID NO: 25808 - RNA, 32 nt, Human
aaggcaguacagugucaaaaugaggauugugc

SEQ ID NO: 25809 - RNA, 32 nt, Human
aaggcaguaggcccggugugguggcucacgcc

SEQ ID NO: 25810 - RNA, 32 nt, Human
aaggcaguauaugauugugccaaaccuacacu

SEQ ID NO: 25811 - RNA, 31 nt, Human
aaggcagucaacacaagagggauggaucauu

SEQ ID NO: 25812 - RNA, 19 nt, Human
aaggcagucucccaaggac

SEQ ID NO: 25813 - RNA, 20 nt, Human
aaggcagucuggaaaaggcg

SEQ ID NO: 25814 - RNA, 32 nt, Human
aaggcagugaauuugggcaaugcuggaggccg

SEQ ID NO: 25815 - RNA, 21 nt, Human
aaggcagugaccaaggaggaa

SEQ ID NO: 25816 - RNA, 21 nt, Human
aaggcagugaccgaggaggaa

SEQ ID NO: 25817 - RNA, 19 nt, Human
aaggcaguggggcuggggg

SEQ ID NO: 25818 - RNA, 32 nt, Human
aaggcagugguaguggacaucacagaguauug

SEQ ID NO: 25819 - RNA, 32 nt, Human
aaggcaguuccaguuuuagcacagauuuguuu

SEQ ID NO: 25820 - RNA, 22 nt, Human
aaggcaguuugcaaaaaauguu

SEQ ID NO: 25821 - RNA, 32 nt, Human
aaggcauacaaguaucuaucuggacuucccug

SEQ ID NO: 25822 - RNA, 32 nt, Human
aaggcauacgaugcuacuauuaugcucuguuu

SEQ ID NO: 25823 - RNA, 32 nt, Human
aaggcauaggggaggccugcugugcuggcaau

SEQ ID NO: 25824 - RNA, 32 nt, Human
aaggcaucaauggcagaaacuacauaugagua

SEQ ID NO: 25825 - RNA, 32 nt, Human
aaggcaucacacacagcuuucuggcacgaauc

SEQ ID NO: 25826 - RNA, 32 nt, Human
aaggcaucagugagcgaugguugugccacugc

SEQ ID NO: 25827 - RNA, 31 nt, Human
aaggcaucauaagaagcuggcauuuauuucu

SEQ ID NO: 25828 - RNA, 21 nt, Human
aaggcauccagaagcuguauc

SEQ ID NO: 25829 - RNA, 32 nt, Human
aaggcauccauaccugcauuuugcauucuucg

SEQ ID NO: 25830 - RNA, 17 nt, Human
aaggcauccccacugga

SEQ ID NO: 25831 - RNA, 32 nt, Human
aaggcaucuaucugugcuagguuaaaugguug

SEQ ID NO: 25832 - RNA, 32 nt, Human
aaggcaucuccaggagcgcgccacaagccugg

SEQ ID NO: 25833 - RNA, 32 nt, Human
aaggcaucucuaaaagaaaggcagcagcccca

SEQ ID NO: 25834 - RNA, 32 nt, Human
aaggcaucucugagaaaguggccccagggaga

SEQ ID NO: 25835 - RNA, 32 nt, Human
aaggcaugaagagugggcuccaccugcuggcc

SEQ ID NO: 25836 - RNA, 32 nt, Human
aaggcaugagccaccgcacucagccacuuaag

SEQ ID NO: 25837 - RNA, 32 nt, Human
aaggcaugaggagagaggcugugucagaaacu

SEQ ID NO: 25838 - RNA, 32 nt, Human
aaggcauggcacuugagaaaugugaauaagau

SEQ ID NO: 25839 - RNA, 32 nt, Human
aaggcaugggcuuuguccuggugaucaguuug

SEQ ID NO: 25840 - RNA, 32 nt, Human
aaggcauguacaacacaaaucaugcuucugac

SEQ ID NO: 25841 - RNA, 32 nt, Human
aaggcauucaguuucaaaagggaaauggagaa

SEQ ID NO: 25842 - RNA, 32 nt, Human
aaggcauuccuauuuugcaguucagaacaaaa

SEQ ID NO: 25843 - RNA, 32 nt, Human
aaggcauuccuccugaaugcauccaugaauuu

SEQ ID NO: 25844 - RNA, 32 nt, Human
aaggcauuggugaagacaaaauggccucgccg

SEQ ID NO: 25845 - RNA, 32 nt, Human
aaggccaaaccagcuugacccuggcucacaga

SEQ ID NO: 25846 - RNA, 18 nt, Human
aaggccaaaggaaugggc

SEQ ID NO: 25847 - RNA, 32 nt, Human
aaggccaaccugggcaauagagcgagacccug

SEQ ID NO: 25848 - RNA, 22 nt, Human
aaggccaagacagguggaucac

SEQ ID NO: 25849 - RNA, 32 nt, Human
aaggccaaggaauugaaagggcuguaggggga

SEQ ID NO: 25850 - RNA, 19 nt, Human
aaggccacaaacuguucaa

SEQ ID NO: 25851 - RNA, 32 nt, Human
aaggccacaaacuguucaacacacacaaagug

SEQ ID NO: 25852 - RNA, 32 nt, Human
aaggccacaacagacccggcccugccagcggg

SEQ ID NO: 25853 - RNA, 23 nt, Human
aaggccacacacuccugcuucau

SEQ ID NO: 25854 - RNA, 32 nt, Human
aaggccacagaaaugggcacuaccuccuggcc

SEQ ID NO: 25855 - RNA, 32 nt, Human
aaggccacagcauaacccaccuaggcacaaag

SEQ ID NO: 25856 - RNA, 32 nt, Human
aaggccacagccacucugccacccugaggcuc

SEQ ID NO: 25857 - RNA, 32 nt, Human
aaggccacagggaccucugccccagaaagccu

SEQ ID NO: 25858 - RNA, 22 nt, Human
aaggccacaguccaaucccucu

SEQ ID NO: 25859 - RNA, 24 nt, Human
aaggccacauacagucucugucau

SEQ ID NO: 25860 - RNA, 22 nt, Human
aaggccacauacaucaaccuca

SEQ ID NO: 25861 - RNA, 23 nt, Human
aaggccacauauccucuuuucau

SEQ ID NO: 25862 - RNA, 23 nt, Human
aaggccacaugugcuccugucau

SEQ ID NO: 25863 - RNA, 30 nt, Human
aaggccaccacgacaagggccaccaguucc

SEQ ID NO: 25864 - RNA, 23 nt, Human
aaggccaccagaccuggcuucgc

SEQ ID NO: 25865 - RNA, 22 nt, Human
aaggccaccauuccugcuugau

SEQ ID NO: 25866 - RNA, 32 nt, Human
aaggccacggccgccucaccucgguuuuugcc

SEQ ID NO: 25867 - RNA, 32 nt, Human
aaggccacuaggauggauuggaagagaacugc

SEQ ID NO: 25868 - RNA, 32 nt, Human
aaggccacucucccugccuuuggauuucauag

SEQ ID NO: 25869 - RNA, 32 nt, Human
aaggccacugcacuccagccugagugacagaa

SEQ ID NO: 25870 - RNA, 23 nt, Human
aaggccacugcuuccugcuuugu

SEQ ID NO: 25871 - RNA, 32 nt, Human
aaggccacuggaagcucagccuccggguggca

SEQ ID NO: 25872 - RNA, 22 nt, Human
aaggccacugucuccugcucgc

SEQ ID NO: 25873 - RNA, 20 nt, Human
aaggccacugucuccugcuu

SEQ ID NO: 25874 - RNA, 32 nt, Human
aaggccacuuagauuuucuuuuucaaguuugg

SEQ ID NO: 25875 - RNA, 32 nt, Human
aaggccagaagauacaaagacagaccauccca

SEQ ID NO: 25876 - RNA, 32 nt, Human
aaggccagaaggagugaaacaugugaacuuuc

SEQ ID NO: 25877 - RNA, 32 nt, Human
aaggccagagagcauggagcugaguggagcca

SEQ ID NO: 25878 - RNA, 32 nt, Human
aaggccagaguccccaguguccccuccccucc

SEQ ID NO: 25879 - RNA, 32 nt, Human
aaggccagccuggacaacauaguaagacccua

SEQ ID NO: 25880 - RNA, 32 nt, Human
aaggccagccuggacgacauagcgagacucca

SEQ ID NO: 25881 - RNA, 21 nt, Human
aaggccagccugggaaacaug

SEQ ID NO: 25882 - RNA, 32 nt, Human
aaggccagccugggcaacauaguaagacucag

SEQ ID NO: 25883 - RNA, 19 nt, Human
aaggccaggagcacaggaa

SEQ ID NO: 25884 - RNA, 32 nt, Human
aaggccaggaggucaaggcugcggugagccgu

SEQ ID NO: 25885 - RNA, 32 nt, Human
aaggccaggaguucaagaccagccuggccaac

SEQ ID NO: 25886 - RNA, 32 nt, Human
aaggccaggaguucgagaccagccuggccaac

SEQ ID NO: 25887 - RNA, 32 nt, Human
aaggccaggaguucgagaccagccugggcaac

SEQ ID NO: 25888 - RNA, 32 nt, Human
aaggccaggaguuugaggcugcagugagcuau

SEQ ID NO: 25889 - RNA, 32 nt, Human
aaggccaggccugacggaagagcccagccuuc

SEQ ID NO: 25890 - RNA, 32 nt, Human
aaggccaggccuggagcuugccucuucaguau

SEQ ID NO: 25891 - RNA, 32 nt, Human
aaggccagggcucaggggaaacugaggcagga

SEQ ID NO: 25892 - RNA, 32 nt, Human
aaggccagguucuuagcacauccucuguucuc

SEQ ID NO: 25893 - RNA, 32 nt, Human
aaggccagucaucccuccucuguguugccaug

SEQ ID NO: 25894 - RNA, 32 nt, Human
aaggccaguucugcagugacaggcccaggggc

SEQ ID NO: 25895 - RNA, 24 nt, Human
aaggccauaaaauaucugguucau

SEQ ID NO: 25896 - RNA, 32 nt, Human
aaggccauaaacaaagacagacuuguaguuua

SEQ ID NO: 25897 - RNA, 32 nt, Human
aaggccauagggcauuaacugaaggaacugac

SEQ ID NO: 25898 - RNA, 20 nt, Human
aaggccauagucuguuuuac

SEQ ID NO: 25899 - RNA, 23 nt, Human
aaggccauauggccaucguguca

SEQ ID NO: 25900 - RNA, 22 nt, Human
aaggccaucccagagagacgga

SEQ ID NO: 25901 - RNA, 32 nt, Human
aaggccaucuagugagagauuucuccaaaugu

SEQ ID NO: 25902 - RNA, 32 nt, Human
aaggccaucugucccccgagagcccauugacc

SEQ ID NO: 25903 - RNA, 22 nt, Human
aaggccaucuuuuugcuuucac

SEQ ID NO: 25904 - RNA, 24 nt, Human
aaggccauggcaucccuuuuucau

SEQ ID NO: 25905 - RNA, 32 nt, Human
aaggccauguacaagaggaaguacucagccgc

SEQ ID NO: 25906 - RNA, 17 nt, Human
aaggccaugucuaugua

SEQ ID NO: 25907 - RNA, 32 nt, Human
aaggccaugucugacuucaaggaacucaguuu

SEQ ID NO: 25908 - RNA, 32 nt, Human
aaggccauuagaauugccccagcagagcagau

SEQ ID NO: 25909 - RNA, 32 nt, Human
aaggccauucugcuuugguuuggcucagccuc

SEQ ID NO: 25910 - RNA, 32 nt, Human
aaggcccaacaauacagaaacaaugucuucuu

SEQ ID NO: 25911 - RNA, 32 nt, Human
aaggcccacacccucccggggugaaauaacua

SEQ ID NO: 25912 - RNA, 32 nt, Human
aaggcccacaguucuugaugcagagaaccaaa

SEQ ID NO: 25913 - RNA, 32 nt, Human
aaggcccacauccuacaauugcuacuuccuga

SEQ ID NO: 25914 - RNA, 32 nt, Human
aaggcccaccucucuguacucugggcucuaaa

SEQ ID NO: 25915 - RNA, 21 nt, Human
aaggcccaccucuucuccaag

SEQ ID NO: 25916 - RNA, 32 nt, Human
aaggcccacugcaucacacagacuggugaggc

SEQ ID NO: 25917 - RNA, 32 nt, Human
aaggcccacuguccagcagcccccagguugcc

SEQ ID NO: 25918 - RNA, 32 nt, Human
aaggcccagagagguuuaacaacuuccucaga

SEQ ID NO: 25919 - RNA, 32 nt, Human
aaggcccagcgccagcccccguccucuguuaa

SEQ ID NO: 25920 - RNA, 32 nt, Human
aaggcccaggcagggccuggaagcagcggacc

SEQ ID NO: 25921 - RNA, 24 nt, Human
aaggcccaggcgcccaggguccca

SEQ ID NO: 25922 - RNA, 32 nt, Human
aaggcccauaaauacugguuaaacucuguuaa

SEQ ID NO: 25923 - RNA, 25 nt, Human
aaggcccauucuaugucugcuucgc

SEQ ID NO: 25924 - RNA, 32 nt, Human
aaggcccauuuggcuccugcagccucuuaugc

SEQ ID NO: 25925 - RNA, 22 nt, Human
aaggccccaacauagcuguauu

SEQ ID NO: 25926 - RNA, 32 nt, Human
aaggccccacacacaggugugcugcauuuggg

SEQ ID NO: 25927 - RNA, 32 nt, Human
aaggccccaggugcacaggaggcguggcugcu

SEQ ID NO: 25928 - RNA, 32 nt, Human
aaggccccaucuuucguugccauucuucauuc

SEQ ID NO: 25929 - RNA, 23 nt, Human
aaggccccauuccggggcuguuc

SEQ ID NO: 25930 - RNA, 32 nt, Human
aaggcccccgagagacagaggcaggguuuaaa

SEQ ID NO: 25931 - RNA, 20 nt, Human
aaggcccccuccuccaccca

SEQ ID NO: 25932 - RNA, 32 nt, Human
aaggcccccucuuccagaggaggagcagggau

SEQ ID NO: 25933 - RNA, 32 nt, Human
aaggcccccugccuuugccucacauaaacugu

SEQ ID NO: 25934 - RNA, 32 nt, Human
aaggccccuaggcugggucugggugcuuggcg

SEQ ID NO: 25935 - RNA, 32 nt, Human
aaggccccucugaggcagauggggcaggcggc

SEQ ID NO: 25936 - RNA, 32 nt, Human
aaggccccucugggcugaucuugugccauucu

SEQ ID NO: 25937 - RNA, 32 nt, Human
aaggccccuggccgcggcagagcucccugcca

SEQ ID NO: 25938 - RNA, 32 nt, Human
aaggccccugucccagccuggacgccacgcac

SEQ ID NO: 25939 - RNA, 32 nt, Human
aaggcccggaagaggggaccugagggagccag

SEQ ID NO: 25940 - RNA, 31 nt, Human
aaggcccucaauaaaggcuuccugaggaacg

SEQ ID NO: 25941 - RNA, 32 nt, Human
aaggcccuccacuguccuaagauaaagccucu

SEQ ID NO: 25942 - RNA, 32 nt, Human
aaggcccucuacugcccucuggguccagcaga

SEQ ID NO: 25943 - RNA, 32 nt, Human
aaggcccucugagggcccucaaauggacccug

SEQ ID NO: 25944 - RNA, 32 nt, Human
aaggcccugcagcuacagcugcuucauucccu

SEQ ID NO: 25945 - RNA, 32 nt, Human
aaggcccugcaucccuugccucaggccgggcu

SEQ ID NO: 25946 - RNA, 32 nt, Human
aaggcccugccaccccuuccuugaccccaagc

SEQ ID NO: 25947 - RNA, 31 nt, Human
aaggcccugcucucucccauccaagugacca

SEQ ID NO: 25948 - RNA, 32 nt, Human
aaggcccugcuguuguggccauguccacccug

SEQ ID NO: 25949 - RNA, 32 nt, Human
aaggcccuggcuugaugaggggaacucgcagc

SEQ ID NO: 25950 - RNA, 32 nt, Human
aaggcccugggcacaggcagagagcccaccgg

SEQ ID NO: 25951 - RNA, 32 nt, Human
aaggcccugggcuggaggaagacaucccagau

SEQ ID NO: 25952 - RNA, 32 nt, Human
aaggcccuguugggggaggugggcccggagcu

SEQ ID NO: 25953 - RNA, 32 nt, Human
aaggcccuuccuucuccccagaagaccaaccc

SEQ ID NO: 25954 - RNA, 32 nt, Human
aaggcccuuggggcugacagggccaggcagcc

SEQ ID NO: 25955 - RNA, 32 nt, Human
aaggcccuuucuguaugccccugggccugucc

SEQ ID NO: 25956 - RNA, 32 nt, Human
aaggccgaaauuugacuucugcaccuggauuu

SEQ ID NO: 25957 - RNA, 32 nt, Human
aaggccgacaaccaccagaagcuggaaggggu

SEQ ID NO: 25958 - RNA, 32 nt, Human
aaggccgacacgcuggcccugaggcaacggcu

SEQ ID NO: 25959 - RNA, 32 nt, Human
aaggccgaggcaggcggaucaccugaggucag

SEQ ID NO: 25960 - RNA, 32 nt, Human
aaggccgaggcagguggaucaccugaggucag

SEQ ID NO: 25961 - RNA, 32 nt, Human
aaggccgaggcgggcggaucaccugaggucag

SEQ ID NO: 25962 - RNA, 32 nt, Human
aaggccgaggcgggugggucaccugaggucag

SEQ ID NO: 25963 - RNA, 32 nt, Human
aaggccgaggggcagagguggcucucggcccu

SEQ ID NO: 25964 - RNA, 32 nt, Human
aaggccgagguggguggaucaccugaggucag

SEQ ID NO: 25965 - RNA, 32 nt, Human
aaggccgaguacucagacguccuggccaagcu

SEQ ID NO: 25966 - RNA, 32 nt, Human
aaggccgaguuccaccgcuggagcuccuacau

SEQ ID NO: 25967 - RNA, 32 nt, Human
aaggccgauguucucaucguguuaaguacauu

SEQ ID NO: 25968 - RNA, 32 nt, Human
aaggccgcaagguggaggagcugcgguggcag

SEQ ID NO: 25969 - RNA, 32 nt, Human
aaggccgcacacugaguuaacagcagaauuga

SEQ ID NO: 25970 - RNA, 32 nt, Human
aaggccgcagugaggugagaucgcgccauugc

SEQ ID NO: 25971 - RNA, 32 nt, Human
aaggccgccucugccaggaggccuucccaggu

SEQ ID NO: 25972 - RNA, 32 nt, Human
aaggccgcgcugccuuucccaucugucuaucu

SEQ ID NO: 25973 - RNA, 32 nt, Human
aaggccgcgucgugaucgacucggacacagag

SEQ ID NO: 25974 - RNA, 32 nt, Human
aaggccgcugccuugccugcacuggcaugucc

SEQ ID NO: 25975 - RNA, 32 nt, Human
aaggccgcuguucaccacagggcuaagagcua

SEQ ID NO: 25976 - RNA, 19 nt, Human
aaggccggcaggcaucucc

SEQ ID NO: 25977 - RNA, 32 nt, Human
aaggccgggacccccugcccaaccuguauggc

SEQ ID NO: 25978 - RNA, 32 nt, Human
aaggccgggcuucuugagcuguguugguuguc

SEQ ID NO: 25979 - RNA, 32 nt, Human
aaggccggggcaggggagccugugcugaugcc

SEQ ID NO: 25980 - RNA, 21 nt, Human
aaggccgucaacgaggcggug

SEQ ID NO: 25981 - RNA, 18 nt, Human
aaggccgugacccgugua

SEQ ID NO: 25982 - RNA, 32 nt, Human
aaggccuaaccagcacccaagaucaugcucau

SEQ ID NO: 25983 - RNA, 32 nt, Human
aaggccuacggguucaagaacaagcugaucau

SEQ ID NO: 25984 - RNA, 32 nt, Human
aaggccuagaguuugcucugauaugcauuugg

SEQ ID NO: 25985 - RNA, 23 nt, Human
aaggccucacagcaggcacccca

SEQ ID NO: 25986 - RNA, 32 nt, Human
aaggccucaccuuggacagaggucaauccuug

SEQ ID NO: 25987 - RNA, 32 nt, Human
aaggccucagccugugccugugucgagcucag

SEQ ID NO: 25988 - RNA, 23 nt, Human
aaggccucaggagagcaucacca

SEQ ID NO: 25989 - RNA, 32 nt, Human
aaggccucagugagcuauuaucacgccgcugc

SEQ ID NO: 25990 - RNA, 32 nt, Human
aaggccuccaccagccucucaccagaagagau

SEQ ID NO: 25991 - RNA, 32 nt, Human
aaggccuccagggcggggucuccauauaacua

SEQ ID NO: 25992 - RNA, 32 nt, Human
aaggccuccugucccugccugcucugggugcu

SEQ ID NO: 25993 - RNA, 32 nt, Human
aaggccucugcugccacugacagcuggcacug

SEQ ID NO: 25994 - RNA, 32 nt, Human
aaggccucugcuggagagacaccagcucucag

SEQ ID NO: 25995 - RNA, 32 nt, Human
aaggccucuggcuaccacgucuuuggacagag

SEQ ID NO: 25996 - RNA, 32 nt, Human
aaggccucugggaagguggaggccggcagggc

SEQ ID NO: 25997 - RNA, 32 nt, Human
aaggccucugggauuauacucugaagaacccg

SEQ ID NO: 25998 - RNA, 32 nt, Human
aaggccucugugaaugaaucagucccagggaa

SEQ ID NO: 25999 - RNA, 32 nt, Human
aaggccucuuagugggaaagugaggcaggguc

SEQ ID NO: 26000 - RNA, 32 nt, Human
aaggccugaaaccaccuuguuaccuuucauuu

SEQ ID NO: 26001 - RNA, 32 nt, Human
aaggccugaccuucagcaaaguucuugaaauu

SEQ ID NO: 26002 - RNA, 32 nt, Human
aaggccugagaacucuccaccugcaggaugag

SEQ ID NO: 26003 - RNA, 32 nt, Human
aaggccugagaguucacagaaccugcuagguc

SEQ ID NO: 26004 - RNA, 24 nt, Human
aaggccugaggacccaaggcccca

SEQ ID NO: 26005 - RNA, 21 nt, Human
aaggccugcagcaggacgagg

SEQ ID NO: 26006 - RNA, 32 nt, Human
aaggccugcccuccuuacccaccagaacaggg

SEQ ID NO: 26007 - RNA, 32 nt, Human
aaggccugcuaucuacagcacagugugucauu

SEQ ID NO: 26008 - RNA, 32 nt, Human
aaggccugcucaccaaucuuucuuucacaccg

SEQ ID NO: 26009 - RNA, 32 nt, Human
aaggccuggaaacaugcuuggcucacccagca

SEQ ID NO: 26010 - RNA, 32 nt, Human
aaggccuggaaggugcacugcccagugggucu

SEQ ID NO: 26011 - RNA, 32 nt, Human
aaggccuggaggagcaggaugaguaggagcau

SEQ ID NO: 26012 - RNA, 32 nt, Human
aaggccuggaggcaggggcagaggugacgaca

SEQ ID NO: 26013 - RNA, 32 nt, Human
aaggccuggccacaugcagacaggaggaagcu

SEQ ID NO: 26014 - RNA, 32 nt, Human
aaggccuggggcguccuggggucugggaggaa

SEQ ID NO: 26015 - RNA, 32 nt, Human
aaggccuguagacagaugggccaccaggcagg

SEQ ID NO: 26016 - RNA, 32 nt, Human
aaggccugucuaccauguucucugccuccccu

SEQ ID NO: 26017 - RNA, 32 nt, Human
aaggccugugccagguucccugugcccuccuc

SEQ ID NO: 26018 - RNA, 22 nt, Human
aaggccuguuuaaagggaaagg

SEQ ID NO: 26019 - RNA, 32 nt, Human
aaggccuucaaaggaaggcccugcuugggaca

SEQ ID NO: 26020 - RNA, 32 nt, Human
aaggccuucacugcagccccaucuccuccucc

SEQ ID NO: 26021 - RNA, 23 nt, Human
aaggccuucagucagggcucauc

SEQ ID NO: 26022 - RNA, 32 nt, Human
aaggccuuccaggacaggcucgguucuggucc

SEQ ID NO: 26023 - RNA, 32 nt, Human
aaggccuuccaggacuuccuccucuggguccu

SEQ ID NO: 26024 - RNA, 32 nt, Human
aaggccuucccuaccucacccugggcccagag

SEQ ID NO: 26025 - RNA, 32 nt, Human
aaggccuuccucugucuccaucagugccagcc

SEQ ID NO: 26026 - RNA, 23 nt, Human
aaggccuucguaaagguugcauc

SEQ ID NO: 26027 - RNA, 32 nt, Human
aaggccuugaggacuucauucugugccucucc

SEQ ID NO: 26028 - RNA, 32 nt, Human
aaggccuugagugcccucugcccaucggcuuc

SEQ ID NO: 26029 - RNA, 32 nt, Human
aaggccuugagugcccucugccgaccggcuuc

SEQ ID NO: 26030 - RNA, 32 nt, Human
aaggccuuggacugccuggaugaggcuauaau

SEQ ID NO: 26031 - RNA, 32 nt, Human
aaggccuuguagcagaggacuuggugacugua

SEQ ID NO: 26032 - RNA, 30 nt, Human
aaggccuuucucuccaugcuccuuuugcgg

SEQ ID NO: 26033 - RNA, 32 nt, Human
aaggccuuugcucuccucugacauugaggccu

SEQ ID NO: 26034 - RNA, 32 nt, Human
aaggccuuugugucuguguccuuguuuaauau

SEQ ID NO: 26035 - RNA, 32 nt, Human
aaggccuuuugaauuauacugcagggcaucuu

SEQ ID NO: 26036 - RNA, 32 nt, Human
aaggcgaagggguggagagugauaugaagagc

SEQ ID NO: 26037 - RNA, 32 nt, Human
aaggcgacaggaucaguccuucucuaggguuc

SEQ ID NO: 26038 - RNA, 32 nt, Human
aaggcgacccagguugaggaaguggauccagc

SEQ ID NO: 26039 - RNA, 32 nt, Human
aaggcgagacuccgccuuucuaaucacaaaug

SEQ ID NO: 26040 - RNA, 32 nt, Human
aaggcgagaggaagcaagggaaggaggaagaa

SEQ ID NO: 26041 - RNA, 32 nt, Human
aaggcgauguccagacacagacuuuaugauua

SEQ ID NO: 26042 - RNA, 32 nt, Human
aaggcgcacacgugcacacagcaccagcugag

SEQ ID NO: 26043 - RNA, 32 nt, Human
aaggcgcaugcgcucucauugcagccucggcg

SEQ ID NO: 26044 - RNA, 32 nt, Human
aaggcgccggggccggcccagagcagggccac

SEQ ID NO: 26045 - RNA, 32 nt, Human
aaggcgccuggaccuggcgaggacgcugcccg

SEQ ID NO: 26046 - RNA, 32 nt, Human
aaggcgcgaccggcggccaugcagccccgggg

SEQ ID NO: 26047 - RNA, 32 nt, Human
aaggcgcgucugucuggcaucuuggccgugaa

SEQ ID NO: 26048 - RNA, 32 nt, Human
aaggcgcucuuugccagcugaaaguucccacg

SEQ ID NO: 26049 - RNA, 32 nt, Human
aaggcgcuggguaggcagggaggggagcgcag

SEQ ID NO: 26050 - RNA, 32 nt, Human
aaggcggaccagccugccucugugaugacugc

SEQ ID NO: 26051 - RNA, 32 nt, Human
aaggcggagggcccuggggcuggacuccugga

SEQ ID NO: 26052 - RNA, 32 nt, Human
aaggcggagguguggaggagaggccggcuugg

SEQ ID NO: 26053 - RNA, 32 nt, Human
aaggcggaguagguggggugaggcggaucccg

SEQ ID NO: 26054 - RNA, 32 nt, Human
aaggcggagucgaucucccaaaaggagaagcc

SEQ ID NO: 26055 - RNA, 23 nt, Human
aaggcggauggaucaccugaggu

SEQ ID NO: 26056 - RNA, 23 nt, Human
aaggcggcacagcccagccgggg

SEQ ID NO: 26057 - RNA, 21 nt, Human
aaggcggcagagaggaugggg

SEQ ID NO: 26058 - RNA, 32 nt, Human
aaggcggcaguucccggaacaaacguggcaga

SEQ ID NO: 26059 - RNA, 32 nt, Human
aaggcggcauccgucugugcccugugccuuuc

SEQ ID NO: 26060 - RNA, 19 nt, Human
aaggcggccacggagcggg

SEQ ID NO: 26061 - RNA, 23 nt, Human
aaggcggccugcaccaggaccca

SEQ ID NO: 26062 - RNA, 32 nt, Human
aaggcggcucgcgguuccuccaccgccuccgc

SEQ ID NO: 26063 - RNA, 24 nt, Human
aaggcggcugugcggacgcagggu

SEQ ID NO: 26064 - RNA, 32 nt, Human
aaggcgggcagaucacuugagaucaggaguuu

SEQ ID NO: 26065 - RNA, 23 nt, Human
aaggcgggcggaucaccugaggu

SEQ ID NO: 26066 - RNA, 32 nt, Human
aaggcggggaaccugcuggcuacuguugcucc

SEQ ID NO: 26067 - RNA, 23 nt, Human
aaggcgggugaaucaccugaggu

SEQ ID NO: 26068 - RNA, 23 nt, Human
aaggcggguggaucacccgaggu

SEQ ID NO: 26069 - RNA, 23 nt, Human
aaggcggguggaucaccugaggc

SEQ ID NO: 26070 - RNA, 23 nt, Human
aaggcggguggaucaccugaggu

SEQ ID NO: 26071 - RNA, 32 nt, Human
aaggcgguacuaguucagacacuuuggaaguu

SEQ ID NO: 26072 - RNA, 32 nt, Human
aaggcguacaaaguagaaucaguagacuugcc

SEQ ID NO: 26073 - RNA, 32 nt, Human
aaggcgucauccaagaauucacuugaguccua

SEQ ID NO: 26074 - RNA, 32 nt, Human
aaggcgucgagguggaaaauaugccguuggau

SEQ ID NO: 26075 - RNA, 32 nt, Human
aaggcgucggcccucuggcaagauggcugcug

SEQ ID NO: 26076 - RNA, 19 nt, Human
aaggcgugaccaggaggaa

SEQ ID NO: 26077 - RNA, 32 nt, Human
aaggcgugagccaccaugcccagccuccuacc

SEQ ID NO: 26078 - RNA, 32 nt, Human
aaggcgugagccaccgcgccuggccugaugcc

SEQ ID NO: 26079 - RNA, 32 nt, Human
aaggcgugagccaccguaccuugcccuuggug

SEQ ID NO: 26080 - RNA, 32 nt, Human
aaggcgugagccaccgugcccagccuaauucu

SEQ ID NO: 26081 - RNA, 32 nt, Human
aaggcgugaggaugggaaggagggagguauuc

SEQ ID NO: 26082 - RNA, 32 nt, Human
aaggcguguguaugacacaguaacuggcagug

SEQ ID NO: 26083 - RNA, 21 nt, Human
aaggcuaaaauuuuggccaga

SEQ ID NO: 26084 - RNA, 32 nt, Human
aaggcuaagauuguuaaauaaaggaacugguc

SEQ ID NO: 26085 - RNA, 32 nt, Human
aaggcuaauagugagggaaaggccccacgacc

SEQ ID NO: 26086 - RNA, 32 nt, Human
aaggcuacaaauucagggucagcuguaugcac

SEQ ID NO: 26087 - RNA, 32 nt, Human
aaggcuacacacacauauggagcaccccaucc

SEQ ID NO: 26088 - RNA, 22 nt, Human
aaggcuacaggaccccugcuuc

SEQ ID NO: 26089 - RNA, 32 nt, Human
aaggcuacagugagcuaugaucacaccacugc

SEQ ID NO: 26090 - RNA, 25 nt, Human
aaggcuacauauacauaguugcuuc

SEQ ID NO: 26091 - RNA, 22 nt, Human
aaggcuacauauauucagcuuu

SEQ ID NO: 26092 - RNA, 32 nt, Human
aaggcuacugugagcuaugaucacgccacugc

SEQ ID NO: 26093 - RNA, 32 nt, Human
aaggcuacugugagcuaugauuggaccacuau

SEQ ID NO: 26094 - RNA, 26 nt, Human
aaggcuagaacauuauucugcuuuau

SEQ ID NO: 26095 - RNA, 32 nt, Human
aaggcuagaagacagggccccucuccaagcug

SEQ ID NO: 26096 - RNA, 32 nt, Human
aaggcuagaaugauacaagugagcaaaaguug

SEQ ID NO: 26097 - RNA, 32 nt, Human
aaggcuagagugaguaaggaauagagccaaau

SEQ ID NO: 26098 - RNA, 32 nt, Human
aaggcuagcaugcacggcuccacagcaggugg

SEQ ID NO: 26099 - RNA, 32 nt, Human
aaggcuagcauuguuugcacaaaaaguuggug

SEQ ID NO: 26100 - RNA, 32 nt, Human
aaggcuagccucccccuaacaauccuagacug

SEQ ID NO: 26101 - RNA, 32 nt, Human
aaggcuagccugggcaacacgcugagacccua

SEQ ID NO: 26102 - RNA, 32 nt, Human
aaggcuagugaugagcuucacccuggagcucc

SEQ ID NO: 26103 - RNA, 18 nt, Human
aaggcuaguggcugugua

SEQ ID NO: 26104 - RNA, 23 nt, Human
aaggcuauacuugucuuguucac

SEQ ID NO: 26105 - RNA, 32 nt, Human
aaggcuauagugugcuaugaucaugccuguga

SEQ ID NO: 26106 - RNA, 23 nt, Human
aaggcuaugacagucugcuacgc

SEQ ID NO: 26107 - RNA, 32 nt, Human
aaggcuauggugagccgugauugugccacugc

SEQ ID NO: 26108 - RNA, 32 nt, Human
aaggcuaugugaugaauggugaagacacuuaa

SEQ ID NO: 26109 - RNA, 32 nt, Human
aaggcucaaagugugagaaccuguucuggauu

SEQ ID NO: 26110 - RNA, 32 nt, Human
aaggcucacagcccugagcucuuuacgggagc

SEQ ID NO: 26111 - RNA, 32 nt, Human
aaggcucaccccagugcugcuggcuucuccuc

SEQ ID NO: 26112 - RNA, 32 nt, Human
aaggcucacgcugaggggacuuggagggaggg

SEQ ID NO: 26113 - RNA, 32 nt, Human
aaggcucacugcaaccucaaccuucugguuuc

SEQ ID NO: 26114 - RNA, 32 nt, Human
aaggcucacugcagccucaaccuucuggguuc

SEQ ID NO: 26115 - RNA, 32 nt, Human
aaggcucacugcagccuugaacaccuggacuc

SEQ ID NO: 26116 - RNA, 32 nt, Human
aaggcucagcucuaagaccugcaccugcuucu

SEQ ID NO: 26117 - RNA, 32 nt, Human
aaggcucaggcagcccagucugaaagugaacu

SEQ ID NO: 26118 - RNA, 32 nt, Human
aaggcucaucagucuauccuucugccuccaua

SEQ ID NO: 26119 - RNA, 32 nt, Human
aaggcuccaaagcucuccaacacaaacaagac

SEQ ID NO: 26120 - RNA, 32 nt, Human
aaggcuccauuucucauuuucccaacuuuuau

SEQ ID NO: 26121 - RNA, 32 nt, Human
aaggcucccaacaaugcuauacagcgcaguug

SEQ ID NO: 26122 - RNA, 32 nt, Human
aaggcucccacuguuuauccauuauucauuga

SEQ ID NO: 26123 - RNA, 32 nt, Human
aaggcucccucccucacuaggccccuggcuac

SEQ ID NO: 26124 - RNA, 32 nt, Human
aaggcuccgagugcccugggggucaccccucc

SEQ ID NO: 26125 - RNA, 31 nt, Human
aaggcuccggcucccaggccuguguccuacc

SEQ ID NO: 26126 - RNA, 32 nt, Human
aaggcuccuaaauuugaguuguuugcuaauca

SEQ ID NO: 26127 - RNA, 32 nt, Human
aaggcuccuccccaccauguaauggcuuccuc

SEQ ID NO: 26128 - RNA, 32 nt, Human
aaggcucgaggagagcgcggcucacgagagau

SEQ ID NO: 26129 - RNA, 32 nt, Human
aaggcucgccuuggcgagcucuugccuuuucu

SEQ ID NO: 26130 - RNA, 32 nt, Human
aaggcucgcugcucugcucccugccggggcua

SEQ ID NO: 26131 - RNA, 32 nt, Human
aaggcucggaggugggccggugaggcaagcaa

SEQ ID NO: 26132 - RNA, 32 nt, Human
aaggcucucacugccccuucgccauccuagag

SEQ ID NO: 26133 - RNA, 32 nt, Human
aaggcucuccacccgccagcauccuuagcgag

SEQ ID NO: 26134 - RNA, 32 nt, Human
aaggcucuccauauagacuacagacuugucag

SEQ ID NO: 26135 - RNA, 21 nt, Human
aaggcucucuuccugcuuuac

SEQ ID NO: 26136 - RNA, 32 nt, Human
aaggcucugaaauaaaaugccauaguuuguga

SEQ ID NO: 26137 - RNA, 32 nt, Human
aaggcucugaaguuggggccacagccggucuc

SEQ ID NO: 26138 - RNA, 32 nt, Human
aaggcucugaguagcucaugcuuccagacuga

SEQ ID NO: 26139 - RNA, 32 nt, Human
aaggcucuggagugggacaggggauagcguuu

SEQ ID NO: 26140 - RNA, 32 nt, Human
aaggcucugggaugcaugucucuccuucucua

SEQ ID NO: 26141 - RNA, 32 nt, Human
aaggcucugggcagacggcucaggaacuggga

SEQ ID NO: 26142 - RNA, 22 nt, Human
aaggcucugugccaaggaggga

SEQ ID NO: 26143 - RNA, 32 nt, Human
aaggcucuucuuccucaccgagcaugcuuccc

SEQ ID NO: 26144 - RNA, 32 nt, Human
aaggcugaagacagagagcugaugagauuuuc

SEQ ID NO: 26145 - RNA, 30 nt, Human
aaggcugaagcuugcucagaaaggcagaaa

SEQ ID NO: 26146 - RNA, 32 nt, Human
aaggcugaccaacauggcaaaaccccgucucu

SEQ ID NO: 26147 - RNA, 32 nt, Human
aaggcugagaaggaacagggaacauuggagcu

SEQ ID NO: 26148 - RNA, 32 nt, Human
aaggcugagacccgagaagggagccagccugu

SEQ ID NO: 26149 - RNA, 32 nt, Human
aaggcugagaugggaagaucacuugagccccg

SEQ ID NO: 26150 - RNA, 32 nt, Human
aaggcugagcacuuaucuggaucauuugguca

SEQ ID NO: 26151 - RNA, 32 nt, Human
aaggcugagcuguuggcacccugcugcggccg

SEQ ID NO: 26152 - RNA, 32 nt, Human
aaggcugaggcaggaggcucucuugagaauag

SEQ ID NO: 26153 - RNA, 32 nt, Human
aaggcugaggcaggcagaucaccugaggucag

SEQ ID NO: 26154 - RNA, 32 nt, Human
aaggcugaggcgggcggaucaccugaggucaa

SEQ ID NO: 26155 - RNA, 32 nt, Human
aaggcugaggucuccccuguaaccuuaugaga

SEQ ID NO: 26156 - RNA, 32 nt, Human
aaggcugagguggguggaucaccugaagucag

SEQ ID NO: 26157 - RNA, 32 nt, Human
aaggcugaguuuacauaaaugaucuagauuga

SEQ ID NO: 26158 - RNA, 32 nt, Human
aaggcugcaacacccagaccuccaggagagac

SEQ ID NO: 26159 - RNA, 32 nt, Human
aaggcugcaacccuauggccucuuggagacag

SEQ ID NO: 26160 - RNA, 32 nt, Human
aaggcugcagaaaguccuaggcucagauagga

SEQ ID NO: 26161 - RNA, 32 nt, Human
aaggcugcagagagcuaugaucaucccacugc

SEQ ID NO: 26162 - RNA, 32 nt, Human
aaggcugcagagcaagggcagcaggaccccaa

SEQ ID NO: 26163 - RNA, 32 nt, Human
aaggcugcagcugcacacugcucuggcccuuc

SEQ ID NO: 26164 - RNA, 22 nt, Human
aaggcugcaggcacuggcagug

SEQ ID NO: 26165 - RNA, 32 nt, Human
aaggcugcaggcacuggcagugggaagaggca

SEQ ID NO: 26166 - RNA, 32 nt, Human
aaggcugcagggaccucugcccaggaaagcca

SEQ ID NO: 26167 - RNA, 32 nt, Human
aaggcugcagugaacuaugauggugccacugc

SEQ ID NO: 26168 - RNA, 32 nt, Human
aaggcugcagugaacuaugauugcaucacugc

SEQ ID NO: 26169 - RNA, 32 nt, Human
aaggcugcagugaacuaugauugugccacugc

SEQ ID NO: 26170 - RNA, 32 nt, Human
aaggcugcagugagcaaugauggugccacugc

SEQ ID NO: 26171 - RNA, 32 nt, Human
aaggcugcagugagccaagaucccgccacugc

SEQ ID NO: 26172 - RNA, 32 nt, Human
aaggcugcagugagccaugaucaugccacugc

SEQ ID NO: 26173 - RNA, 32 nt, Human
aaggcugcagugagccaugaugguaccccugc

SEQ ID NO: 26174 - RNA, 32 nt, Human
aaggcugcagugagccaugauucacagcacug

SEQ ID NO: 26175 - RNA, 32 nt, Human
aaggcugcagugagccaugauugcaccacugc

SEQ ID NO: 26176 - RNA, 32 nt, Human
aaggcugcagugagccaugauugcaccccugc

SEQ ID NO: 26177 - RNA, 32 nt, Human
aaggcugcagugagccaugguugcaccacuac

SEQ ID NO: 26178 - RNA, 32 nt, Human
aaggcugcagugagccauguucacaccgcugc

SEQ ID NO: 26179 - RNA, 32 nt, Human
aaggcugcagugagccauguucaugacacugc

SEQ ID NO: 26180 - RNA, 32 nt, Human
aaggcugcagugagccgugaaaggccacugca

SEQ ID NO: 26181 - RNA, 32 nt, Human
aaggcugcagugagccgugauggcgccacugc

SEQ ID NO: 26182 - RNA, 32 nt, Human
aaggcugcagugagccgugauugcaccacugc

SEQ ID NO: 26183 - RNA, 32 nt, Human
aaggcugcagugagcuaugaugaugccacugu

SEQ ID NO: 26184 - RNA, 32 nt, Human
aaggcugcagugagcuaugauugcgccgcugc

SEQ ID NO: 26185 - RNA, 32 nt, Human
aaggcugcagugagcuauggucaugccacugc

SEQ ID NO: 26186 - RNA, 32 nt, Human
aaggcugcagugagcuaugguugcaccacugu

SEQ ID NO: 26187 - RNA, 32 nt, Human
aaggcugcagugagcucaugaucauaccacug

SEQ ID NO: 26188 - RNA, 32 nt, Human
aaggcugcagugagcugcaaucacaccacuac

SEQ ID NO: 26189 - RNA, 32 nt, Human
aaggcugcagugagcugugaucacaccacugc

SEQ ID NO: 26190 - RNA, 32 nt, Human
aaggcugcagugagcugugaucaugcuacugc

SEQ ID NO: 26191 - RNA, 32 nt, Human
aaggcugcagugagcugugaucauggcacugc

SEQ ID NO: 26192 - RNA, 32 nt, Human
aaggcugcagugagcugugaucgugccacugc

SEQ ID NO: 26193 - RNA, 32 nt, Human
aaggcugcagugagcugugaugacaccacugc

SEQ ID NO: 26194 - RNA, 32 nt, Human
aaggcugcagugagcugugauggcgccacugc

SEQ ID NO: 26195 - RNA, 32 nt, Human
aaggcugcagugagcugugauggcgucagugu

SEQ ID NO: 26196 - RNA, 32 nt, Human
aaggcugcagugagcugugauugugccaccac

SEQ ID NO: 26197 - RNA, 32 nt, Human
aaggcugcagugagcuuggauaacgacugcac

SEQ ID NO: 26198 - RNA, 32 nt, Human
aaggcugcagugagcuuugaucacaccacugc

SEQ ID NO: 26199 - RNA, 32 nt, Human
aaggcugcagugagucaugaucgcaccacugc

SEQ ID NO: 26200 - RNA, 32 nt, Human
aaggcugcagugagucgugauugugccacugc

SEQ ID NO: 26201 - RNA, 32 nt, Human
aaggcugcagugagucgugauuuugccacugc

SEQ ID NO: 26202 - RNA, 32 nt, Human
aaggcugcagugaguugugaucacaccauugc

SEQ ID NO: 26203 - RNA, 32 nt, Human
aaggcugccagccuguguacguguaauggggg

SEQ ID NO: 26204 - RNA, 32 nt, Human
aaggcugccccuaggugcaugccugcgccagc

SEQ ID NO: 26205 - RNA, 32 nt, Human
aaggcugccugggagccccgccucccuaccau

SEQ ID NO: 26206 - RNA, 32 nt, Human
aaggcugccuguaccucucaagcuuugcauuu

SEQ ID NO: 26207 - RNA, 32 nt, Human
aaggcugccuguauuacauugcuuuggggagu

SEQ ID NO: 26208 - RNA, 32 nt, Human
aaggcugcggugagccgugauugugccaaugu

SEQ ID NO: 26209 - RNA, 22 nt, Human
aaggcugcuaccaaguguuguu

SEQ ID NO: 26210 - RNA, 24 nt, Human
aaggcugcuaugaccuguguucac

SEQ ID NO: 26211 - RNA, 32 nt, Human
aaggcugcugugagcuaugauugugccacugc

SEQ ID NO: 26212 - RNA, 32 nt, Human
aaggcugcuguugcugaaagagacuugggcua

SEQ ID NO: 26213 - RNA, 32 nt, Human
aaggcugcuucaaagauuaucugauuccuuua

SEQ ID NO: 26214 - RNA, 32 nt, Human
aaggcuggaaagucaucugccuuuaauaacuc

SEQ ID NO: 26215 - RNA, 21 nt, Human
aaggcuggaagcaucacacua

SEQ ID NO: 26216 - RNA, 32 nt, Human
aaggcuggagaaggacaugagaucagggccug

SEQ ID NO: 26217 - RNA, 32 nt, Human
aaggcuggagccagggagcgcuggaggaaacc

SEQ ID NO: 26218 - RNA, 32 nt, Human
aaggcuggagcuggaacccugccacucuucag

SEQ ID NO: 26219 - RNA, 32 nt, Human
aaggcuggagggcaauggcaugauuucagcuc

SEQ ID NO: 26220 - RNA, 32 nt, Human
aaggcuggaucuuggagaaugugagaagccag

SEQ ID NO: 26221 - RNA, 32 nt, Human
aaggcuggccaguucugcaagaaaggcaagga

SEQ ID NO: 26222 - RNA, 32 nt, Human
aaggcugggaggaggugggcuagaugaucuuu

SEQ ID NO: 26223 - RNA, 32 nt, Human
aaggcugggauaugaugagagauuccagccca

SEQ ID NO: 26224 - RNA, 23 nt, Human
aaggcugggauuacaggcaugag

SEQ ID NO: 26225 - RNA, 32 nt, Human
aaggcugggauuacaggcaugagccacugcac

SEQ ID NO: 26226 - RNA, 32 nt, Human
aaggcugggauuacagguaugcaccaccacgc

SEQ ID NO: 26227 - RNA, 32 nt, Human
aaggcugggcauuguuaaaaucuagauguuac

SEQ ID NO: 26228 - RNA, 32 nt, Human
aaggcuggggguggaggguggaggagggagca

SEQ ID NO: 26229 - RNA, 32 nt, Human
aaggcuggguuuuuccccucuaaucuggaggc

SEQ ID NO: 26230 - RNA, 32 nt, Human
aaggcuggucucaaacuccugaccucagguga

SEQ ID NO: 26231 - RNA, 32 nt, Human
aaggcuggugcagacccagcugccuuagacag

SEQ ID NO: 26232 - RNA, 23 nt, Human
aaggcugguggaucaccugaggu

SEQ ID NO: 26233 - RNA, 32 nt, Human
aaggcuguagugagcugugauugagccacugc

SEQ ID NO: 26234 - RNA, 23 nt, Human
aaggcuguccaaggcaggcagug

SEQ ID NO: 26235 - RNA, 17 nt, Human
aaggcugucuggagggg

SEQ ID NO: 26236 - RNA, 32 nt, Human
aaggcugucuucaggccgggcacagugggagg

SEQ ID NO: 26237 - RNA, 31 nt, Human
aaggcugugacuggggaaaaagauugagcuu

SEQ ID NO: 26238 - RNA, 32 nt, Human
aaggcugugagaagcaguugggaguuugguug

SEQ ID NO: 26239 - RNA, 32 nt, Human
aaggcugugagagaggggguuguuguggagaa

SEQ ID NO: 26240 - RNA, 32 nt, Human
aaggcugugcguuccugagggccaggucgggg

SEQ ID NO: 26241 - RNA, 32 nt, Human
aaggcuguggaagagguuggagugggcgcauc

SEQ ID NO: 26242 - RNA, 32 nt, Human
aaggcuguggaccccagagaagguggcaggug

SEQ ID NO: 26243 - RNA, 32 nt, Human
aaggcuguggugagggaagacgccuuucuccu

SEQ ID NO: 26244 - RNA, 32 nt, Human
aaggcuguguauaguccauuucccaggucuga

SEQ ID NO: 26245 - RNA, 32 nt, Human
aaggcuguguucuggaauuuucugccucacag

SEQ ID NO: 26246 - RNA, 32 nt, Human
aaggcuguuagguugugugagccuugaagugu

SEQ ID NO: 26247 - RNA, 32 nt, Human
aaggcuguugaguugcucacaggcucugaggg

SEQ ID NO: 26248 - RNA, 19 nt, Human
aaggcuguugcagaggcgg

SEQ ID NO: 26249 - RNA, 17 nt, Human
aaggcuguugcaugggc

SEQ ID NO: 26250 - RNA, 32 nt, Human
aaggcuguuuaucacuguuguggaaauuuccu

SEQ ID NO: 26251 - RNA, 24 nt, Human
aaggcuguuuuaccccaaaacuca

SEQ ID NO: 26252 - RNA, 32 nt, Human
aaggcuguuuucccccugauucccacuuugca

SEQ ID NO: 26253 - RNA, 32 nt, Human
aaggcuuaaagagccagacugcgcagccagga

SEQ ID NO: 26254 - RNA, 32 nt, Human
aaggcuuacugaggcugguggagggagccacu

SEQ ID NO: 26255 - RNA, 32 nt, Human
aaggcuuaggcuugaaaggugaagagcaggaa

SEQ ID NO: 26256 - RNA, 32 nt, Human
aaggcuuaggggccaacaaggcuuccagcugg

SEQ ID NO: 26257 - RNA, 32 nt, Human
aaggcuucacagccccagaggauuccauauaa

SEQ ID NO: 26258 - RNA, 32 nt, Human
aaggcuucaccauacuguaagcauuuuaggua

SEQ ID NO: 26259 - RNA, 32 nt, Human
aaggcuucagugagccaugaucaugccacugc

SEQ ID NO: 26260 - RNA, 32 nt, Human
aaggcuucagugagccaugauggugccacugc

SEQ ID NO: 26261 - RNA, 32 nt, Human
aaggcuuccacguugggggacugaggccaacu

SEQ ID NO: 26262 - RNA, 32 nt, Human
aaggcuuccuggaagcggugacccuugagccg

SEQ ID NO: 26263 - RNA, 32 nt, Human
aaggcuuccuggaggagaugacauuuaacuga

SEQ ID NO: 26264 - RNA, 32 nt, Human
aaggcuuccuguugucucagaugcaggagcca

SEQ ID NO: 26265 - RNA, 32 nt, Human
aaggcuuccuucuaggagaccccacaugcagg

SEQ ID NO: 26266 - RNA, 32 nt, Human
aaggcuuccuuguggguaccacaggacaacuc

SEQ ID NO: 26267 - RNA, 32 nt, Human
aaggcuucucaaaugacagagcucaaugaaua

SEQ ID NO: 26268 - RNA, 32 nt, Human
aaggcuucuccggaucaguacaugcaugucac

SEQ ID NO: 26269 - RNA, 32 nt, Human
aaggcuucuccuuccuucuuccucugcucagg

SEQ ID NO: 26270 - RNA, 32 nt, Human
aaggcuucucugcagaaugucaaacaaagauc

SEQ ID NO: 26271 - RNA, 32 nt, Human
aaggcuucuuggaggaggagaugauugagcug

SEQ ID NO: 26272 - RNA, 32 nt, Human
aaggcuugauagcagagguuuggugguucaga

SEQ ID NO: 26273 - RNA, 32 nt, Human
aaggcuugccagagccaacaggaagugagccc

SEQ ID NO: 26274 - RNA, 32 nt, Human
aaggcuugcuuagcaaccacagagucagugac

SEQ ID NO: 26275 - RNA, 32 nt, Human
aaggcuuggaaagaggcaugugaagagcuuua

SEQ ID NO: 26276 - RNA, 32 nt, Human
aaggcuuggacagacuguucucccucuuguua

SEQ ID NO: 26277 - RNA, 32 nt, Human
aaggcuuggaguagacaaaaggaaaggucuca

SEQ ID NO: 26278 - RNA, 32 nt, Human
aaggcuuggcagcgcuagaggcugaaggacaa

SEQ ID NO: 26279 - RNA, 32 nt, Human
aaggcuuggcuucauuuucuacaugugagcuc

SEQ ID NO: 26280 - RNA, 32 nt, Human
aaggcuugggagccaggaugagugucgggcuc

SEQ ID NO: 26281 - RNA, 32 nt, Human
aaggcuugggaggcggggcccugcaggacguc

SEQ ID NO: 26282 - RNA, 32 nt, Human
aaggcuugggugcucaucuaaagcucagccaa

SEQ ID NO: 26283 - RNA, 32 nt, Human
aaggcuuguaacuugguuccucccuuucuuaa

SEQ ID NO: 26284 - RNA, 22 nt, Human
aaggcuuuagcccuggacccag

SEQ ID NO: 26285 - RNA, 32 nt, Human
aaggcuuucauaaugugacuucugcucagcuc

SEQ ID NO: 26286 - RNA, 32 nt, Human
aaggcuuucgggagugugaggcugcaucugcu

SEQ ID NO: 26287 - RNA, 32 nt, Human
aaggcuuucugugggcccccaagugguaggag

SEQ ID NO: 26288 - RNA, 32 nt, Human
aaggcuuugcaaacugugaagugcagugccua

SEQ ID NO: 26289 - RNA, 32 nt, Human
aaggcuuugccauguugcccaggcuggucuug

SEQ ID NO: 26290 - RNA, 32 nt, Human
aaggcuuugccuccucguaccugccgaggccc

SEQ ID NO: 26291 - RNA, 32 nt, Human
aaggcuuugcuacugguggcagagaugguugu

SEQ ID NO: 26292 - RNA, 32 nt, Human
aaggcuuuggacaaaauuuugagacccuaauc

SEQ ID NO: 26293 - RNA, 32 nt, Human
aaggcuuuuaaggauuuucugaaagugcugau

SEQ ID NO: 26294 - RNA, 32 nt, Human
aaggcuuuugcuuagagaauucagcaagagaa

SEQ ID NO: 26295 - RNA, 32 nt, Human
aaggcuuuuguugaauccuaugcuacugauag

SEQ ID NO: 26296 - RNA, 32 nt, Human
aagggaaaaacagugcaagaugagaacaacaa

SEQ ID NO: 26297 - RNA, 32 nt, Human
aagggaaaaccagcuucuguugccguggcaac

SEQ ID NO: 26298 - RNA, 32 nt, Human
aagggaaaaguagauccgauaacuuaaaaacg

SEQ ID NO: 26299 - RNA, 32 nt, Human
aagggaaagaggaggaaguccuaagcagagaa

SEQ ID NO: 26300 - RNA, 32 nt, Human
aagggaaagcuaagggcgucuuagaccggggg

SEQ ID NO: 26301 - RNA, 32 nt, Human
aagggaaaggaaagaaaaagaaguaccuagua

SEQ ID NO: 26302 - RNA, 32 nt, Human
aagggaaaggaggaugggagaccccuagccug

SEQ ID NO: 26303 - RNA, 32 nt, Human
aagggaaaggcagagggugugauuauggugac

SEQ ID NO: 26304 - RNA, 32 nt, Human
aagggaaaggggaggaagauggagggagaagc

SEQ ID NO: 26305 - RNA, 32 nt, Human
aagggaaagguaugagggaaagagagucugag

SEQ ID NO: 26306 - RNA, 32 nt, Human
aagggaacaaauuauguggcagagagggauaa

SEQ ID NO: 26307 - RNA, 32 nt, Human
aagggaacaacaauaucugccucauagggugu

SEQ ID NO: 26308 - RNA, 32 nt, Human
aagggaacaggaacaaauuuccccagcaccac

SEQ ID NO: 26309 - RNA, 32 nt, Human
aagggaacaugcugguucuggaaaagccacaa

SEQ ID NO: 26310 - RNA, 32 nt, Human
aagggaaccaacaaaacacuauaacuuaaaag

SEQ ID NO: 26311 - RNA, 32 nt, Human
aagggaacccuuguuuccucagguaaacuuga

SEQ ID NO: 26312 - RNA, 32 nt, Human
aagggaaccugggaacccuucuccccucaccu

SEQ ID NO: 26313 - RNA, 32 nt, Human
aagggaacucggcuucgucuuuggacacaggu

SEQ ID NO: 26314 - RNA, 32 nt, Human
aagggaacuguacauucuuucuuucuuggcua

SEQ ID NO: 26315 - RNA, 32 nt, Human
aagggaagaagggaaaaagagauuauuauguc

SEQ ID NO: 26316 - RNA, 32 nt, Human
aagggaagacaaaacuggauguucuuucuugu

SEQ ID NO: 26317 - RNA, 32 nt, Human
aagggaagagaagcauuggugaaauggauuuc

SEQ ID NO: 26318 - RNA, 32 nt, Human
aagggaagagcucuuggcucccuugagguucu

SEQ ID NO: 26319 - RNA, 32 nt, Human
aagggaagagguggaggucaggcacgguggcu

SEQ ID NO: 26320 - RNA, 32 nt, Human
aagggaagcaccaucguccaggaucugcaaau

SEQ ID NO: 26321 - RNA, 32 nt, Human
aagggaagcaggaagaccaagaagaaaaacca

SEQ ID NO: 26322 - RNA, 21 nt, Human
aagggaagcaggccucugaug

SEQ ID NO: 26323 - RNA, 32 nt, Human
aagggaagccuagugggccuagaccccuccuc

SEQ ID NO: 26324 - RNA, 32 nt, Human
aagggaagcugggucugaggggagacugaccu

SEQ ID NO: 26325 - RNA, 32 nt, Human
aagggaaggaagaggaagagugcaaaacauug

SEQ ID NO: 26326 - RNA, 32 nt, Human
aagggaaggaagggcagugcugacuuuuggua

SEQ ID NO: 26327 - RNA, 32 nt, Human
aagggaaggaaguuuggcagggccaagagucc

SEQ ID NO: 26328 - RNA, 32 nt, Human
aagggaaggccccacagacaagguagcccugg

SEQ ID NO: 26329 - RNA, 22 nt, Human
aagggaaggcuaagaauugccc

SEQ ID NO: 26330 - RNA, 32 nt, Human
aagggaaguaggcauuaccauagacgacuccu

SEQ ID NO: 26331 - RNA, 32 nt, Human
aagggaagucggcucaggaggaccgagugagg

SEQ ID NO: 26332 - RNA, 32 nt, Human
aagggaauagagaagagaugggacuauuucua

SEQ ID NO: 26333 - RNA, 32 nt, Human
aagggaauaugggcugggcaugguggcucaug

SEQ ID NO: 26334 - RNA, 32 nt, Human
aagggaaucauuguuuacacauggggaucaga

SEQ ID NO: 26335 - RNA, 32 nt, Human
aagggaauccacuguuuucucacuuucauccc

SEQ ID NO: 26336 - RNA, 32 nt, Human
aagggaaugccaccucuucucagaccccgccu

SEQ ID NO: 26337 - RNA, 32 nt, Human
aagggaauuggagguggaaccauccagucuug

SEQ ID NO: 26338 - RNA, 32 nt, Human
aagggaauuggugcccagaaaaugggacugga

SEQ ID NO: 26339 - RNA, 32 nt, Human
aagggaauuuugcuacuacuagacucuugauu

SEQ ID NO: 26340 - RNA, 32 nt, Human
aagggacaagaggaacucuuggaguuggcugg

SEQ ID NO: 26341 - RNA, 32 nt, Human
aagggacacuuaugcagaaccaugaguggcca

SEQ ID NO: 26342 - RNA, 32 nt, Human
aagggacaggagaagagaggaaauaacagaga

SEQ ID NO: 26343 - RNA, 32 nt, Human
aagggacaggcaggaucuggacagcgaagaac

SEQ ID NO: 26344 - RNA, 32 nt, Human
aagggacagggucagggcagcccagggcuccu

SEQ ID NO: 26345 - RNA, 32 nt, Human
aagggacaugauguaagggaaaaggccucaaa

SEQ ID NO: 26346 - RNA, 32 nt, Human
aagggaccagggaacuggugaccuaagcaacc

SEQ ID NO: 26347 - RNA, 32 nt, Human
aagggacccccaggaccuggauaugguggugu

SEQ ID NO: 26348 - RNA, 32 nt, Human
aagggacccugagcucugcaagcugugaucug

SEQ ID NO: 26349 - RNA, 32 nt, Human
aagggacccuggcagauuaaaacccucagacu

SEQ ID NO: 26350 - RNA, 32 nt, Human
aagggaccggccaugccuccaagccuugccca

SEQ ID NO: 26351 - RNA, 32 nt, Human
aagggaccgggugggagggaggacguggaaug

SEQ ID NO: 26352 - RNA, 32 nt, Human
aagggaccuccacgacaggugggcugggugcg

SEQ ID NO: 26353 - RNA, 32 nt, Human
aagggaccucucauggugcaccaccugagcga

SEQ ID NO: 26354 - RNA, 32 nt, Human
aagggaccugggaggaggagcugcaauugaug

SEQ ID NO: 26355 - RNA, 32 nt, Human
aagggacgaaggaggaguaggugaaagcgggg

SEQ ID NO: 26356 - RNA, 32 nt, Human
aagggacgagacaaccaugcugugcuguauga

SEQ ID NO: 26357 - RNA, 32 nt, Human
aagggacgccuccaccaucauuaaggagagga

SEQ ID NO: 26358 - RNA, 32 nt, Human
aagggacgcugaggcaggaggaucauuugagc

SEQ ID NO: 26359 - RNA, 32 nt, Human
aagggacggccucuccccuccuaccugccacc

SEQ ID NO: 26360 - RNA, 32 nt, Human
aagggacgucuucuccacgccgcuccgacucc

SEQ ID NO: 26361 - RNA, 32 nt, Human
aagggacucccaggacccugugcccagcuucc

SEQ ID NO: 26362 - RNA, 32 nt, Human
aagggacucuuccauggccauggcaguccuga

SEQ ID NO: 26363 - RNA, 32 nt, Human
aagggacugaaccacugcccuaaguuucuuua

SEQ ID NO: 26364 - RNA, 32 nt, Human
aagggacugagcaaaggcucccaggggaaggg

SEQ ID NO: 26365 - RNA, 32 nt, Human
aagggacugcugggagguuaaaaagaaaaguu

SEQ ID NO: 26366 - RNA, 32 nt, Human
aagggacugggcugucuaucuuagcaguuggc

SEQ ID NO: 26367 - RNA, 32 nt, Human
aagggagaaagccuggcagaggguugggggcu

SEQ ID NO: 26368 - RNA, 32 nt, Human
aagggagaaaggcagugggaaaagaggugagc

SEQ ID NO: 26369 - RNA, 32 nt, Human
aagggagaaccagcucaagacauuuuggagga

SEQ ID NO: 26370 - RNA, 32 nt, Human
aagggagaagacagaggagaaugccagaugaa

SEQ ID NO: 26371 - RNA, 32 nt, Human
aagggagaagucagaggcugauucuuguagaa

SEQ ID NO: 26372 - RNA, 32 nt, Human
aagggagaagugacauugcaucaaagcaucuu

SEQ ID NO: 26373 - RNA, 32 nt, Human
aagggagaagugagagggacaauuggguucau

SEQ ID NO: 26374 - RNA, 32 nt, Human
aagggagacaucucagggcaaagcuuucguga

SEQ ID NO: 26375 - RNA, 32 nt, Human
aagggagagagaagaaaagaaaaaugaagaaa

SEQ ID NO: 26376 - RNA, 32 nt, Human
aagggagagagggagggagagagagugaaaga

SEQ ID NO: 26377 - RNA, 32 nt, Human
aagggagagagggagggcgcaaggggaggggg

SEQ ID NO: 26378 - RNA, 32 nt, Human
aagggagagagggaggggcagcuaugcucagu

SEQ ID NO: 26379 - RNA, 32 nt, Human
aagggagagagggagggggagggcgggcgaag

SEQ ID NO: 26380 - RNA, 32 nt, Human
aagggagagcacaugaagcuuugcuaauuaua

SEQ ID NO: 26381 - RNA, 32 nt, Human
aagggagaggacuuggggguugggggugguca

SEQ ID NO: 26382 - RNA, 32 nt, Human
aagggagaggagaggauugauagaguguugca

SEQ ID NO: 26383 - RNA, 32 nt, Human
aagggagaggcagcagucuccucccagguggg

SEQ ID NO: 26384 - RNA, 32 nt, Human
aagggagagggaaucggagggagcagcggaau

SEQ ID NO: 26385 - RNA, 32 nt, Human
aagggagagggagggagccgggagccguagag

SEQ ID NO: 26386 - RNA, 32 nt, Human
aagggagaggggacaggagggaagggugggcc

SEQ ID NO: 26387 - RNA, 32 nt, Human
aagggagaguagaagagauagggggucuuuag

SEQ ID NO: 26388 - RNA, 32 nt, Human
aagggagcacaauggaggccgcucaugcuaaa

SEQ ID NO: 26389 - RNA, 32 nt, Human
aagggagcacagcauuuccagcuuugaacuug

SEQ ID NO: 26390 - RNA, 32 nt, Human
aagggagccacuggccgcgguggcagggccag

SEQ ID NO: 26391 - RNA, 32 nt, Human
aagggagccacugugaaccucuuggcuccaaa

SEQ ID NO: 26392 - RNA, 32 nt, Human
aagggagccagccugucccaugccugccuggg

SEQ ID NO: 26393 - RNA, 32 nt, Human
aagggagccaugagccagaaggaggccccuuu

SEQ ID NO: 26394 - RNA, 32 nt, Human
aagggagccccaggcuggagcagcaugaggcc

SEQ ID NO: 26395 - RNA, 19 nt, Human
aagggagcccccaugcaca

SEQ ID NO: 26396 - RNA, 32 nt, Human
aagggagccugcaucccucccuuccuuucucu

SEQ ID NO: 26397 - RNA, 32 nt, Human
aagggagcgauguugaucucaggaagcacaaa

SEQ ID NO: 26398 - RNA, 32 nt, Human
aagggagcggcagcccagccaggccuggccca

SEQ ID NO: 26399 - RNA, 32 nt, Human
aagggagcucuuucuuacauuucccuuggagg

SEQ ID NO: 26400 - RNA, 32 nt, Human
aagggagcuggaggcagaggaagagaaaaugu

SEQ ID NO: 26401 - RNA, 32 nt, Human
aagggagcuggcuccagccuggaaaccugucu

SEQ ID NO: 26402 - RNA, 32 nt, Human
aagggagcuggggcggugagggcaugggguga

SEQ ID NO: 26403 - RNA, 32 nt, Human
aagggagcuucucauuuaauucagcggaugug

SEQ ID NO: 26404 - RNA, 32 nt, Human
aagggagcuuggguaggggccaggcuagccug

SEQ ID NO: 26405 - RNA, 32 nt, Human
aagggaggaaacugugaggagguggagaacgu

SEQ ID NO: 26406 - RNA, 32 nt, Human
aagggaggaaggccuuucuucuguguuaauug

SEQ ID NO: 26407 - RNA, 32 nt, Human
aagggaggaagugggggcuggauaugcccacc

SEQ ID NO: 26408 - RNA, 32 nt, Human
aagggaggacaguggaugacagggaagacgag

SEQ ID NO: 26409 - RNA, 32 nt, Human
aagggaggagacacaggcaagccucaacuccc

SEQ ID NO: 26410 - RNA, 32 nt, Human
aagggaggagccgcucauucacccaacaaaac

SEQ ID NO: 26411 - RNA, 32 nt, Human
aagggaggaggaagaagggagcggggucggag

SEQ ID NO: 26412 - RNA, 32 nt, Human
aagggaggcgugccugagaagguagccugugc

SEQ ID NO: 26413 - RNA, 32 nt, Human
aagggagggaaagagagaagggggaaacacaa

SEQ ID NO: 26414 - RNA, 32 nt, Human
aagggagggaaagcaagccuggcagaggcacc

SEQ ID NO: 26415 - RNA, 32 nt, Human
aagggagggaaaggggaggguagcgggagggu

SEQ ID NO: 26416 - RNA, 32 nt, Human
aagggagggaagggaagucagcucugggagca

SEQ ID NO: 26417 - RNA, 32 nt, Human
aagggagggagggagaaaggagaaguugguuu

SEQ ID NO: 26418 - RNA, 32 nt, Human
aagggagggcccugggcugggugcagggcgcg

SEQ ID NO: 26419 - RNA, 32 nt, Human
aagggaggggagcaagaaagaaggcgagagag

SEQ ID NO: 26420 - RNA, 32 nt, Human
aagggaggggcacagcuacacacucaccaaag

SEQ ID NO: 26421 - RNA, 32 nt, Human
aagggaggguggcagagacagugggcacuaag

SEQ ID NO: 26422 - RNA, 32 nt, Human
aagggaggguuccuaaucuaaaaggaaacaug

SEQ ID NO: 26423 - RNA, 32 nt, Human
aagggagguccccacagagccagagugccuga

SEQ ID NO: 26424 - RNA, 32 nt, Human
aagggagguguucccaucugagcccagagaua

SEQ ID NO: 26425 - RNA, 32 nt, Human
aagggaguaaccaaagagaguauggaccagag

SEQ ID NO: 26426 - RNA, 32 nt, Human
aagggaguaaguagagguggcuucagaaaugg

SEQ ID NO: 26427 - RNA, 32 nt, Human
aagggagugaugggccaguacaacaccccuuc

SEQ ID NO: 26428 - RNA, 22 nt, Human
aagggaguggaucaccugaggu

SEQ ID NO: 26429 - RNA, 32 nt, Human
aagggagugggugggcagggguagaggagggg

SEQ ID NO: 26430 - RNA, 32 nt, Human
aagggaguucucuguccugccuugaagggaag

SEQ ID NO: 26431 - RNA, 32 nt, Human
aagggaguuuaaguuugcaguuacaggccagu

SEQ ID NO: 26432 - RNA, 32 nt, Human
aagggauaaaccuggggugggcuggggcugag

SEQ ID NO: 26433 - RNA, 32 nt, Human
aagggauaaaggccuuuuacagaagcuaaacc

SEQ ID NO: 26434 - RNA, 32 nt, Human
aagggauaauacaaauccuaugaucucuaugc

SEQ ID NO: 26435 - RNA, 32 nt, Human
aagggauauaaaucuaguccauuuuucuuuuc

SEQ ID NO: 26436 - RNA, 32 nt, Human
aagggauauauuuucuugcacaguuguucaaa

SEQ ID NO: 26437 - RNA, 32 nt, Human
aagggaucagagucugacugucacucagaauc

SEQ ID NO: 26438 - RNA, 32 nt, Human
aagggaucaucucugcaacaaaggacacaaua

SEQ ID NO: 26439 - RNA, 28 nt, Human
aagggauccaaggcugccucuuccucuu

SEQ ID NO: 26440 - RNA, 32 nt, Human
aagggauccagggcugugcaggaugugccuug

SEQ ID NO: 26441 - RNA, 32 nt, Human
aagggauccuaaaagaggcgguggaagugaaa

SEQ ID NO: 26442 - RNA, 32 nt, Human
aagggauccuccugccucggccugccaaguag

SEQ ID NO: 26443 - RNA, 32 nt, Human
aagggaugagccaccgcgccuggcccauuucu

SEQ ID NO: 26444 - RNA, 32 nt, Human
aagggauggcggcagaccaggggccaggccaa

SEQ ID NO: 26445 - RNA, 24 nt, Human
aagggauggugaaggagggaaaag

SEQ ID NO: 26446 - RNA, 32 nt, Human
aagggaugugugacuguggguggggacgugug

SEQ ID NO: 26447 - RNA, 32 nt, Human
aagggauguuacagaguagcugagaugacuga

SEQ ID NO: 26448 - RNA, 32 nt, Human
aagggauucuaccaguaugugcuacuacuaac

SEQ ID NO: 26449 - RNA, 32 nt, Human
aagggauuucaaccucugaccaccuggagaca

SEQ ID NO: 26450 - RNA, 18 nt, Human
aagggcaaaauaggcuga

SEQ ID NO: 26451 - RNA, 32 nt, Human
aagggcaacagacuacacgauuggacgugugu

SEQ ID NO: 26452 - RNA, 32 nt, Human
aagggcaacauaguacuucuccuucacccaua

SEQ ID NO: 26453 - RNA, 20 nt, Human
aagggcaaccccaugacuga

SEQ ID NO: 26454 - RNA, 32 nt, Human
aagggcaaccucccuuucacugcuccaguggc

SEQ ID NO: 26455 - RNA, 32 nt, Human
aagggcaagagaacccagagcaaugacaccag

SEQ ID NO: 26456 - RNA, 32 nt, Human
aagggcaaggagcaggcuuggagccagggacc

SEQ ID NO: 26457 - RNA, 32 nt, Human
aagggcaauuuuaaaaguaggacugugauuaa

SEQ ID NO: 26458 - RNA, 22 nt, Human
aagggcacaaagacagccaugg

SEQ ID NO: 26459 - RNA, 18 nt, Human
aagggcacaagaggcgga

SEQ ID NO: 26460 - RNA, 32 nt, Human
aagggcacaaggaaaucuccucuaucaaaaca

SEQ ID NO: 26461 - RNA, 22 nt, Human
aagggcacaagguggcgccagg

SEQ ID NO: 26462 - RNA, 32 nt, Human
aagggcacaaguccuggauguuguguguaucg

SEQ ID NO: 26463 - RNA, 31 nt, Human
aagggcacacaaguucacacagcagagucag

SEQ ID NO: 26464 - RNA, 32 nt, Human
aagggcacagagaggaagggaagaauuggggg

SEQ ID NO: 26465 - RNA, 32 nt, Human
aagggcacagcaucuguagucagccgacaacu

SEQ ID NO: 26466 - RNA, 32 nt, Human
aagggcacagccaagauucagagccaggcugu

SEQ ID NO: 26467 - RNA, 32 nt, Human
aagggcacagccaggcuggagucagugucugc

SEQ ID NO: 26468 - RNA, 32 nt, Human
aagggcacagccucaagcccacugccuguguu

SEQ ID NO: 26469 - RNA, 32 nt, Human
aagggcacagucagguucaccagcagaaacgc

SEQ ID NO: 26470 - RNA, 32 nt, Human
aagggcacaucuugcuuugaacacuugauuuc

SEQ ID NO: 26471 - RNA, 32 nt, Human
aagggcacauggaguauggaagggggcauguu

SEQ ID NO: 26472 - RNA, 32 nt, Human
aagggcaccagcagcauuccacacccagcucu

SEQ ID NO: 26473 - RNA, 32 nt, Human
aagggcacugaacuguugggugaaaguuaguu

SEQ ID NO: 26474 - RNA, 32 nt, Human
aagggcacugccuuuucugcuuugcuucgugg

SEQ ID NO: 26475 - RNA, 32 nt, Human
aagggcacugguuggcauucuccuuaaugugu

SEQ ID NO: 26476 - RNA, 32 nt, Human
aagggcacugguuggcguucuccuuaauguau

SEQ ID NO: 26477 - RNA, 20 nt, Human
aagggcacuuaggagaagga

SEQ ID NO: 26478 - RNA, 32 nt, Human
aagggcacuugaguuucccugcagucucccac

SEQ ID NO: 26479 - RNA, 32 nt, Human
aagggcagaaaacucuguguguguacaugugu

SEQ ID NO: 26480 - RNA, 32 nt, Human
aagggcagaagcuuccuacuuggcugacagcc

SEQ ID NO: 26481 - RNA, 32 nt, Human
aagggcagagccagaagcaagccgugccaggc

SEQ ID NO: 26482 - RNA, 32 nt, Human
aagggcagaguaagagaaaagauggaaugagu

SEQ ID NO: 26483 - RNA, 32 nt, Human
aagggcagagucccaggugucagcuggugggu

SEQ ID NO: 26484 - RNA, 32 nt, Human
aagggcagagugagaaugugggaggacauucc

SEQ ID NO: 26485 - RNA, 32 nt, Human
aagggcagccaugcacucccccugggugucgc

SEQ ID NO: 26486 - RNA, 32 nt, Human
aagggcagccccaccccauccagccugggcuc

SEQ ID NO: 26487 - RNA, 32 nt, Human
aagggcagcccuccuuaccacuguggaagucc

SEQ ID NO: 26488 - RNA, 32 nt, Human
aagggcagccuggaggaaagagguguggugug

SEQ ID NO: 26489 - RNA, 32 nt, Human
aagggcagccugggggacagacuguuguggga

SEQ ID NO: 26490 - RNA, 32 nt, Human
aagggcagcuccgggggaaagaggguggcguc

SEQ ID NO: 26491 - RNA, 22 nt, Human
aagggcagcuggaagggacaca

SEQ ID NO: 26492 - RNA, 24 nt, Human
aagggcagcuucagucucugcagu

SEQ ID NO: 26493 - RNA, 32 nt, Human
aagggcaggaggcagcaggugcaccaggagca

SEQ ID NO: 26494 - RNA, 32 nt, Human
aagggcaggccuguucccugaggaccugcgca

SEQ ID NO: 26495 - RNA, 19 nt, Human
aagggcagggcaaggcuga

SEQ ID NO: 26496 - RNA, 19 nt, Human
aagggcagggcugggguga

SEQ ID NO: 26497 - RNA, 32 nt, Human
aagggcaggguggccucugcugcuagggccuc

SEQ ID NO: 26498 - RNA, 32 nt, Human
aagggcaguccggcggcguucgccaagguggc

SEQ ID NO: 26499 - RNA, 32 nt, Human
aagggcagugagaggaagggagggaugaggag

SEQ ID NO: 26500 - RNA, 32 nt, Human
aagggcagugccuggacggacccggagccccc

SEQ ID NO: 26501 - RNA, 32 nt, Human
aagggcagugccuguaauaccccacacaaguu

SEQ ID NO: 26502 - RNA, 19 nt, Human
aagggcaguuccgggccgg

SEQ ID NO: 26503 - RNA, 32 nt, Human
aagggcaguuuacuagaauuucuaucaaaaau

SEQ ID NO: 26504 - RNA, 32 nt, Human
aagggcauauuuugacucccucugugccucuu

SEQ ID NO: 26505 - RNA, 32 nt, Human
aagggcaucacugggucugcuggcuucuacac

SEQ ID NO: 26506 - RNA, 32 nt, Human
aagggcaucuccagccucaggccggcaggucc

SEQ ID NO: 26507 - RNA, 32 nt, Human
aagggcaucuuugaugguacaagcagaggcuc

SEQ ID NO: 26508 - RNA, 32 nt, Human
aagggcaugagacccaggcagagugagcucuc

SEQ ID NO: 26509 - RNA, 32 nt, Human
aagggcaugcacgggccaugcacacggcuggu

SEQ ID NO: 26510 - RNA, 32 nt, Human
aagggccaaaggaccaucaugaggcuaaguug

SEQ ID NO: 26511 - RNA, 32 nt, Human
aagggccacagaguucugccacccugaacauu

SEQ ID NO: 26512 - RNA, 32 nt, Human
aagggccacagcucuucucuccuucucucuuc

SEQ ID NO: 26513 - RNA, 32 nt, Human
aagggccacaggcuaggggaauaacgaggcca

SEQ ID NO: 26514 - RNA, 22 nt, Human
aagggccacuuaauucugcagu

SEQ ID NO: 26515 - RNA, 32 nt, Human
aagggccagaaauguggagacaugguuuuugu

SEQ ID NO: 26516 - RNA, 32 nt, Human
aagggccagaggaggugggagcagagggagcu

SEQ ID NO: 26517 - RNA, 32 nt, Human
aagggccagguggcacaugccgguggucccag

SEQ ID NO: 26518 - RNA, 32 nt, Human
aagggccauucuuaaguucucuccuuaaacuu

SEQ ID NO: 26519 - RNA, 32 nt, Human
aagggcccagccuugggcugaauggcagcacc

SEQ ID NO: 26520 - RNA, 32 nt, Human
aagggcccauuuccuccccucucuaccugcag

SEQ ID NO: 26521 - RNA, 32 nt, Human
aagggccccacuguggaaccuaagucugggag

SEQ ID NO: 26522 - RNA, 32 nt, Human
aagggccccucuguaucuagccuggaaccaag

SEQ ID NO: 26523 - RNA, 32 nt, Human
aagggccccuguguccccgcauggcccaccuc

SEQ ID NO: 26524 - RNA, 32 nt, Human
aagggcccuacccagaggacagaaagaaagcc

SEQ ID NO: 26525 - RNA, 32 nt, Human
aagggcccuccccaggcaucucauucauuacu

SEQ ID NO: 26526 - RNA, 32 nt, Human
aagggcccugcucaccccaagguaggcuggga

SEQ ID NO: 26527 - RNA, 32 nt, Human
aagggcccuguauucaccuccacugcccccag

SEQ ID NO: 26528 - RNA, 32 nt, Human
aagggccggagccgccuuucugcucccggaau

SEQ ID NO: 26529 - RNA, 32 nt, Human
aagggccuacagcccauuucuccauacgcacu

SEQ ID NO: 26530 - RNA, 32 nt, Human
aagggccuaccuggccccucgccuguggagcu

SEQ ID NO: 26531 - RNA, 32 nt, Human
aagggccuccuuccucccuggccugcagcugg

SEQ ID NO: 26532 - RNA, 32 nt, Human
aagggccucugccuucauuucuccugucaccu

SEQ ID NO: 26533 - RNA, 32 nt, Human
aagggccugaaggacgggauuaucuuaugcac

SEQ ID NO: 26534 - RNA, 32 nt, Human
aagggccugaggcagauccagaggacaagccu

SEQ ID NO: 26535 - RNA, 32 nt, Human
aagggccugaggggcucggcugccucaucccc

SEQ ID NO: 26536 - RNA, 32 nt, Human
aagggccugccucugaccugccguguccuuug

SEQ ID NO: 26537 - RNA, 32 nt, Human
aagggccugccuggccccucgccuguggagcu

SEQ ID NO: 26538 - RNA, 32 nt, Human
aagggccugcugaggucacacagcuguuggug

SEQ ID NO: 26539 - RNA, 32 nt, Human
aagggccuggacacucacagaggcccccucug

SEQ ID NO: 26540 - RNA, 32 nt, Human
aagggccuggcauggcagaggccaggcagccg

SEQ ID NO: 26541 - RNA, 32 nt, Human
aagggccuggcugccuuggauuucuugguccu

SEQ ID NO: 26542 - RNA, 32 nt, Human
aagggccuguaaucccguccaacaggcuggag

SEQ ID NO: 26543 - RNA, 32 nt, Human
aagggcgcuagugccuaaccucacuggucccu

SEQ ID NO: 26544 - RNA, 32 nt, Human
aagggcggagcgccgggcuggggaugagcuaa

SEQ ID NO: 26545 - RNA, 32 nt, Human
aagggcggcacuggagagaugggcccaucauu

SEQ ID NO: 26546 - RNA, 32 nt, Human
aagggcggcccaggcagagacagcacugccaa

SEQ ID NO: 26547 - RNA, 32 nt, Human
aagggcggcggaaggguguccaggcagaggaa

SEQ ID NO: 26548 - RNA, 32 nt, Human
aagggcgggccuguuuggugaggaccugcggc

SEQ ID NO: 26549 - RNA, 32 nt, Human
aagggcgggggcggaggaggagcgagccgggc

SEQ ID NO: 26550 - RNA, 32 nt, Human
aagggcggggucaagacacgggaugacgggaa

SEQ ID NO: 26551 - RNA, 32 nt, Human
aagggcggggugagggaagaaagacccuuuag

SEQ ID NO: 26552 - RNA, 18 nt, Human
aagggcuaaaguuggaga

SEQ ID NO: 26553 - RNA, 32 nt, Human
aagggcuaagacgacucuuccacacacagguc

SEQ ID NO: 26554 - RNA, 32 nt, Human
aagggcuaaggagaagaggaagguaaugguaa

SEQ ID NO: 26555 - RNA, 32 nt, Human
aagggcuacuggagggacaggugaagugauuu

SEQ ID NO: 26556 - RNA, 32 nt, Human
aagggcuacuugguuaaaugcagagaagaaug

SEQ ID NO: 26557 - RNA, 24 nt, Human
aagggcuagaauuacaggugugag

SEQ ID NO: 26558 - RNA, 32 nt, Human
aagggcuaucagaaacaauuuuaagucccugc

SEQ ID NO: 26559 - RNA, 32 nt, Human
aagggcuaucucuggcaccucugagaucccua

SEQ ID NO: 26560 - RNA, 31 nt, Human
aagggcucaauaaauguuagcugaaugaaaa

SEQ ID NO: 26561 - RNA, 32 nt, Human
aagggcucagccacaucuuggggucugggagg

SEQ ID NO: 26562 - RNA, 32 nt, Human
aagggcucagccuccucuccugggguccagcu

SEQ ID NO: 26563 - RNA, 32 nt, Human
aagggcucagccugugauaggcauucaauaaa

SEQ ID NO: 26564 - RNA, 32 nt, Human
aagggcuccaaucagggauuugcaggagcuug

SEQ ID NO: 26565 - RNA, 32 nt, Human
aagggcucccacauccgugagccuguguccgc

SEQ ID NO: 26566 - RNA, 32 nt, Human
aagggcuccggcuggcaccugaggagcggcgu

SEQ ID NO: 26567 - RNA, 32 nt, Human
aagggcuccucacggggguggagggagccgga

SEQ ID NO: 26568 - RNA, 32 nt, Human
aagggcuccuugcccaaugccaagugcugggg

SEQ ID NO: 26569 - RNA, 32 nt, Human
aagggcucucucuaggcagagagagcaacaug

SEQ ID NO: 26570 - RNA, 32 nt, Human
aagggcucuggacagcucaggcuggccggcca

SEQ ID NO: 26571 - RNA, 32 nt, Human
aagggcucuggcucagguugcagacagcugag

SEQ ID NO: 26572 - RNA, 32 nt, Human
aagggcucugugguaucucuggccacauuugu

SEQ ID NO: 26573 - RNA, 32 nt, Human
aagggcugaccuucucccagggucugccgagg

SEQ ID NO: 26574 - RNA, 31 nt, Human
aagggcugacuucuccaggaccuagucgggg

SEQ ID NO: 26575 - RNA, 32 nt, Human
aagggcugcagucaccccuugugcucacccau

SEQ ID NO: 26576 - RNA, 32 nt, Human
aagggcugccacugcacuuagcacuuucaggc

SEQ ID NO: 26577 - RNA, 32 nt, Human
aagggcugcuuugucaggagguuguggaauuu

SEQ ID NO: 26578 - RNA, 32 nt, Human
aagggcuggccuucagggaccccugguggguc

SEQ ID NO: 26579 - RNA, 32 nt, Human
aagggcugggauuacaggaaugagccagcgcu

SEQ ID NO: 26580 - RNA, 24 nt, Human
aagggcugggauuacaggugugag

SEQ ID NO: 26581 - RNA, 32 nt, Human
aagggcugggccaggccaggcuccagcaggcc

SEQ ID NO: 26582 - RNA, 32 nt, Human
aagggcuguaggaauggaagcuucagggccuu

SEQ ID NO: 26583 - RNA, 32 nt, Human
aagggcuguuaaaaauguaaaacuugguugca

SEQ ID NO: 26584 - RNA, 32 nt, Human
aagggcuucaggcugggggcaguggacaggga

SEQ ID NO: 26585 - RNA, 22 nt, Human
aagggcuucucucccucugccu

SEQ ID NO: 26586 - RNA, 32 nt, Human
aagggcuugacuuaggguugggccaggaaaag

SEQ ID NO: 26587 - RNA, 32 nt, Human
aagggcuuggcuugccagaggaauuuuccaag

SEQ ID NO: 26588 - RNA, 32 nt, Human
aagggcuugggcccccagccccagaagaugcu

SEQ ID NO: 26589 - RNA, 32 nt, Human
aagggcuugugucuucaggggcagcucagcuu

SEQ ID NO: 26590 - RNA, 32 nt, Human
aagggcuuugaacaaccuccuccagggacuuu

SEQ ID NO: 26591 - RNA, 21 nt, Human
aaggggaaagaaagggaaaag

SEQ ID NO: 26592 - RNA, 21 nt, Human
aaggggaaagacacagacuca

SEQ ID NO: 26593 - RNA, 24 nt, Human
aaggggaaauggggaggggaaaag

SEQ ID NO: 26594 - RNA, 32 nt, Human
aaggggaacagaucaggcaaaggaguuagaua

SEQ ID NO: 26595 - RNA, 21 nt, Human
aaggggaagccucugggcuga

SEQ ID NO: 26596 - RNA, 32 nt, Human
aaggggaagcucacaacaggaacucacacaaa

SEQ ID NO: 26597 - RNA, 32 nt, Human
aaggggaaggaagagagagggagcaggcggag

SEQ ID NO: 26598 - RNA, 32 nt, Human
aaggggaaggagaagagggagaauggagcagg

SEQ ID NO: 26599 - RNA, 32 nt, Human
aaggggaaggagaggggagagcagcgacaggc

SEQ ID NO: 26600 - RNA, 21 nt, Human
aaggggaauggaagagaaaag

SEQ ID NO: 26601 - RNA, 32 nt, Human
aaggggacaagaaaaucccucuuccuccaugg

SEQ ID NO: 26602 - RNA, 21 nt, Human
aaggggacaaggaaggaaaag

SEQ ID NO: 26603 - RNA, 32 nt, Human
aaggggacaccaacugcccaguccacuggcca

SEQ ID NO: 26604 - RNA, 32 nt, Human
aaggggacagcgccaccucuugucagugcucg

SEQ ID NO: 26605 - RNA, 17 nt, Human
aaggggacagcucaggg

SEQ ID NO: 26606 - RNA, 32 nt, Human
aaggggacaugcugggaacaggcccuaagccu

SEQ ID NO: 26607 - RNA, 23 nt, Human
aaggggacauggagaugagccag

SEQ ID NO: 26608 - RNA, 24 nt, Human
aaggggacauuaccaccaacccca

SEQ ID NO: 26609 - RNA, 32 nt, Human
aaggggacccacaaguauugcccuuuaacaag

SEQ ID NO: 26610 - RNA, 32 nt, Human
aaggggacccccaggugggaggggcaggaagc

SEQ ID NO: 26611 - RNA, 32 nt, Human
aaggggacccuccaugcuugauggccagaggu

SEQ ID NO: 26612 - RNA, 32 nt, Human
aaggggaccuggaagggaggugggccguggcc

SEQ ID NO: 26613 - RNA, 32 nt, Human
aaggggacggcaacuccuccccgcgcccgccg

SEQ ID NO: 26614 - RNA, 32 nt, Human
aaggggacuaacagcagaaucuaccucccaac

SEQ ID NO: 26615 - RNA, 32 nt, Human
aaggggagaaacaggauggaagggugguuuaa

SEQ ID NO: 26616 - RNA, 32 nt, Human
aaggggagaacgucuccagacagaauucuaca

SEQ ID NO: 26617 - RNA, 32 nt, Human
aaggggagaauggauuuaucaggagugaaaaa

SEQ ID NO: 26618 - RNA, 32 nt, Human
aaggggagagagaaggaauggggagugaauau

SEQ ID NO: 26619 - RNA, 17 nt, Human
aaggggagaugguccca

SEQ ID NO: 26620 - RNA, 32 nt, Human
aaggggagcaaaagagaaaaggagccaggcug

SEQ ID NO: 26621 - RNA, 32 nt, Human
aaggggagcagcggcugggagugagcagggca

SEQ ID NO: 26622 - RNA, 32 nt, Human
aaggggagcaggaggagagggaaguaguggca

SEQ ID NO: 26623 - RNA, 32 nt, Human
aaggggagcuccggaagaaccuggaggagcua

SEQ ID NO: 26624 - RNA, 23 nt, Human
aaggggagcugaaaaggggaaag

SEQ ID NO: 26625 - RNA, 32 nt, Human
aaggggagcugagaagccaaccccuagcccag

SEQ ID NO: 26626 - RNA, 32 nt, Human
aaggggagcugggugugaguguuuacacugug

SEQ ID NO: 26627 - RNA, 32 nt, Human
aaggggaggaaaggaaaaggauggacaaccac

SEQ ID NO: 26628 - RNA, 32 nt, Human
aaggggaggaagaaaggaaugaaggcagaaaa

SEQ ID NO: 26629 - RNA, 32 nt, Human
aaggggaggagagaaaucagagguggcgcgcg

SEQ ID NO: 26630 - RNA, 32 nt, Human
aaggggaggagggcgaggcgggaggugcagga

SEQ ID NO: 26631 - RNA, 32 nt, Human
aaggggaggcagaucucaaacuccaggcucag

SEQ ID NO: 26632 - RNA, 32 nt, Human
aaggggaggcaugauucuucugacccuagaaa

SEQ ID NO: 26633 - RNA, 32 nt, Human
aaggggagggaaagaucauuacauuugucagg

SEQ ID NO: 26634 - RNA, 32 nt, Human
aaggggagggagaagggaggaagcucccaugu

SEQ ID NO: 26635 - RNA, 32 nt, Human
aaggggagggcugugcgugggggagaugagga

SEQ ID NO: 26636 - RNA, 32 nt, Human
aaggggagggggaaggcaagaaucacugaaaa

SEQ ID NO: 26637 - RNA, 32 nt, Human
aaggggaggggguggagacugggacaugggaa

SEQ ID NO: 26638 - RNA, 32 nt, Human
aaggggaggguacugaggggcagauggcucca

SEQ ID NO: 26639 - RNA, 32 nt, Human
aaggggaggugcccagugaaauggagccuguc

SEQ ID NO: 26640 - RNA, 32 nt, Human
aaggggagguuagggagguuugaagagugaga

SEQ ID NO: 26641 - RNA, 32 nt, Human
aaggggauauaggaagacaggacucuauuaga

SEQ ID NO: 26642 - RNA, 32 nt, Human
aaggggaucugcaggguagagggcaaauuauu

SEQ ID NO: 26643 - RNA, 31 nt, Human
aaggggaugacguagcuuugccaaagacuua

SEQ ID NO: 26644 - RNA, 32 nt, Human
aaggggaugaggaaggcaugccuggacaaacc

SEQ ID NO: 26645 - RNA, 21 nt, Human
aaggggaugcuucccucugcc

SEQ ID NO: 26646 - RNA, 32 nt, Human
aaggggauggaagcagccucuuguacacauug

SEQ ID NO: 26647 - RNA, 32 nt, Human
aaggggaugggaagacuagggagccagugcca

SEQ ID NO: 26648 - RNA, 32 nt, Human
aaggggauuucucacuucaauuauagaucaua

SEQ ID NO: 26649 - RNA, 32 nt, Human
aaggggcaacaccaggugacaugugaauggau

SEQ ID NO: 26650 - RNA, 32 nt, Human
aaggggcaacccaaggcaucacaguucacagg

SEQ ID NO: 26651 - RNA, 32 nt, Human
aaggggcagagcuggcagagaggggccuccaa

SEQ ID NO: 26652 - RNA, 32 nt, Human
aaggggcaggagugccugggcaugugucugug

SEQ ID NO: 26653 - RNA, 32 nt, Human
aaggggcaggaguuggaauuaguuggucccua

SEQ ID NO: 26654 - RNA, 32 nt, Human
aaggggcaggcugaggcugggggaggggcuca

SEQ ID NO: 26655 - RNA, 32 nt, Human
aaggggcagggaggggacaucugagggcuuca

SEQ ID NO: 26656 - RNA, 32 nt, Human
aaggggcaggguggaaguggcugcaggcaaca

SEQ ID NO: 26657 - RNA, 32 nt, Human
aaggggcaggugcagagguggcagggauggcu

SEQ ID NO: 26658 - RNA, 32 nt, Human
aaggggccaaccagcuacuggagcucuuugac

SEQ ID NO: 26659 - RNA, 32 nt, Human
aaggggccaauagcaagguugcauggggauaa

SEQ ID NO: 26660 - RNA, 18 nt, Human
aaggggccacagcugcuc

SEQ ID NO: 26661 - RNA, 32 nt, Human
aaggggccagaguggaggguaggagugccacu

SEQ ID NO: 26662 - RNA, 21 nt, Human
aaggggccaggacacagcuca

SEQ ID NO: 26663 - RNA, 17 nt, Human
aaggggcccaacccugc

SEQ ID NO: 26664 - RNA, 23 nt, Human
aaggggcccacaaaggggagaag

SEQ ID NO: 26665 - RNA, 21 nt, Human
aaggggcccaccaccacugcc

SEQ ID NO: 26666 - RNA, 18 nt, Human
aaggggcccagaaaucug

SEQ ID NO: 26667 - RNA, 32 nt, Human
aaggggcccagccugaggaacccuggcucuuu

SEQ ID NO: 26668 - RNA, 28 nt, Human
aaggggcccaucauuuggaaagggaaaa

SEQ ID NO: 26669 - RNA, 32 nt, Human
aaggggccgaagaaagaggagugaggcagggg

SEQ ID NO: 26670 - RNA, 32 nt, Human
aaggggccucauccacugucugcuagcaaaga

SEQ ID NO: 26671 - RNA, 32 nt, Human
aaggggccucgaggacucucugcgucucugga

SEQ ID NO: 26672 - RNA, 32 nt, Human
aaggggccucuacccacaccuggaccuccgug

SEQ ID NO: 26673 - RNA, 32 nt, Human
aaggggccucuccuggacaugucuccugcagc

SEQ ID NO: 26674 - RNA, 32 nt, Human
aaggggccuggacugcaggccugaccugcucc

SEQ ID NO: 26675 - RNA, 32 nt, Human
aaggggccuggaggaggagggggaccagccag

SEQ ID NO: 26676 - RNA, 32 nt, Human
aaggggcgccucacacccucuucccacgacug

SEQ ID NO: 26677 - RNA, 32 nt, Human
aaggggcggcuccggcgggcggacucggagcg

SEQ ID NO: 26678 - RNA, 32 nt, Human
aaggggcuacuuccugcgcggaguaggagagu

SEQ ID NO: 26679 - RNA, 21 nt, Human
aaggggcuaggcaaggggaaa

SEQ ID NO: 26680 - RNA, 24 nt, Human
aaggggcuauauugaagggcaaag

SEQ ID NO: 26681 - RNA, 32 nt, Human
aaggggcuccagccuggcaguuucugcguguu

SEQ ID NO: 26682 - RNA, 32 nt, Human
aaggggcucuccccauuuuauggacaagaaga

SEQ ID NO: 26683 - RNA, 32 nt, Human
aaggggcucugcccucccuccuuccuucuugc

SEQ ID NO: 26684 - RNA, 32 nt, Human
aaggggcugaaccauacacuccuuuuucuaca

SEQ ID NO: 26685 - RNA, 19 nt, Human
aaggggcugaacuucaggg

SEQ ID NO: 26686 - RNA, 32 nt, Human
aaggggcugcaccagcccugagaccucaaaga

SEQ ID NO: 26687 - RNA, 32 nt, Human
aaggggcugcaggagacuccagggcagggaga

SEQ ID NO: 26688 - RNA, 32 nt, Human
aaggggcugccugggcucagcuaccugcccaa

SEQ ID NO: 26689 - RNA, 32 nt, Human
aaggggcuggauugauggaggcuggcaaggga

SEQ ID NO: 26690 - RNA, 32 nt, Human
aaggggcuggugcccccaugcccacccuccug

SEQ ID NO: 26691 - RNA, 32 nt, Human
aaggggcuguggggugaaauguugacuggaag

SEQ ID NO: 26692 - RNA, 32 nt, Human
aaggggcuuccagagguggccgcuucucuauu

SEQ ID NO: 26693 - RNA, 32 nt, Human
aaggggcuuugagaggcaaagaugaugggaua

SEQ ID NO: 26694 - RNA, 32 nt, Human
aagggggacacaugaaaggcaucagucccccu

SEQ ID NO: 26695 - RNA, 32 nt, Human
aagggggacugaggcaggagagagagcagcuc

SEQ ID NO: 26696 - RNA, 19 nt, Human
aagggggacugcaagggac

SEQ ID NO: 26697 - RNA, 32 nt, Human
aagggggaggaaaaugauguccccagccuaag

SEQ ID NO: 26698 - RNA, 32 nt, Human
aagggggaggggagacgaaggagaagcaaaca

SEQ ID NO: 26699 - RNA, 32 nt, Human
aagggggaggggccaugacuacgaggcccugg

SEQ ID NO: 26700 - RNA, 32 nt, Human
aagggggcaaaggcagggugaaucacuuucuu

SEQ ID NO: 26701 - RNA, 32 nt, Human
aagggggcaggggugagagagcaggagagcag

SEQ ID NO: 26702 - RNA, 32 nt, Human
aagggggcccuugcugauguucaucagauaug

SEQ ID NO: 26703 - RNA, 32 nt, Human
aagggggccuggcugagggugcuucuugacca

SEQ ID NO: 26704 - RNA, 32 nt, Human
aagggggcucuugggcaaacagucccaaaggc

SEQ ID NO: 26705 - RNA, 32 nt, Human
aagggggcugggacaugggaaaggggaaguug

SEQ ID NO: 26706 - RNA, 32 nt, Human
aagggggcugggcagaggguggaggagguccu

SEQ ID NO: 26707 - RNA, 32 nt, Human
aagggggcuguggacgucuuuggaauuuguua

SEQ ID NO: 26708 - RNA, 32 nt, Human
aagggggcuguugcugcagcucugacuugcuu

SEQ ID NO: 26709 - RNA, 21 nt, Human
aagggggucggcccaggggug

SEQ ID NO: 26710 - RNA, 32 nt, Human
aagggggugaagggaagugucugaugcacggc

SEQ ID NO: 26711 - RNA, 32 nt, Human
aagggggugggagaguggcgggcagagaccuc

SEQ ID NO: 26712 - RNA, 32 nt, Human
aagggggugguugucccaggaggcagcugcug

SEQ ID NO: 26713 - RNA, 20 nt, Human
aaggggguuaagaagggaaa

SEQ ID NO: 26714 - RNA, 32 nt, Human
aaggggguuagacucuagauguguguugucca

SEQ ID NO: 26715 - RNA, 32 nt, Human
aaggggguuagccaugaccucugccuugugug

SEQ ID NO: 26716 - RNA, 32 nt, Human
aagggguagggagagggaggagguugcaaaaa

SEQ ID NO: 26717 - RNA, 31 nt, Human
aagggguauggugccaucacaagcagaugug

SEQ ID NO: 26718 - RNA, 32 nt, Human
aaggggucaggaggaaaaagcuugcauuucug

SEQ ID NO: 26719 - RNA, 20 nt, Human
aaggggucuacccagaaagc

SEQ ID NO: 26720 - RNA, 32 nt, Human
aaggggucucagacuccccugaggguggagga

SEQ ID NO: 26721 - RNA, 22 nt, Human
aaggggugaacuuucacaguca

SEQ ID NO: 26722 - RNA, 32 nt, Human
aaggggugcaucugcacugucaccaugugccc

SEQ ID NO: 26723 - RNA, 32 nt, Human
aaggggugccugagcuguggagagggugcaca

SEQ ID NO: 26724 - RNA, 32 nt, Human
aagggguggagaaacaggaugggaaccggauu

SEQ ID NO: 26725 - RNA, 24 nt, Human
aagggguggcgaaggcacagcuca

SEQ ID NO: 26726 - RNA, 32 nt, Human
aagggguggcuagaguaacuaaccucagcagg

SEQ ID NO: 26727 - RNA, 32 nt, Human
aagggguggcucugcuguuuuucgcuggacuu

SEQ ID NO: 26728 - RNA, 32 nt, Human
aagggguggggcccuggguggagcucagcagg

SEQ ID NO: 26729 - RNA, 32 nt, Human
aagggguggggugaggggauggagagggaggg

SEQ ID NO: 26730 - RNA, 32 nt, Human
aaggggugucaaggcaggauggaaaaggggac

SEQ ID NO: 26731 - RNA, 32 nt, Human
aagggguuacagagagccuccucagaucuguu

SEQ ID NO: 26732 - RNA, 32 nt, Human
aagggguucccuuuuugguaccuuguaaccuu

SEQ ID NO: 26733 - RNA, 32 nt, Human
aagggguugcagcuguucugggcuguguuugg

SEQ ID NO: 26734 - RNA, 31 nt, Human
aagggguuuaauaaauaacccuugaaaacug

SEQ ID NO: 26735 - RNA, 32 nt, Human
aagggguuuccgcuuuggcuucucucucaucc

SEQ ID NO: 26736 - RNA, 32 nt, Human
aaggguaaccgauugggguagguggugguagu

SEQ ID NO: 26737 - RNA, 32 nt, Human
aaggguaacuucuuuacucaggagcuacucca

SEQ ID NO: 26738 - RNA, 32 nt, Human
aaggguaagcuggccugcugagcccagggcga

SEQ ID NO: 26739 - RNA, 32 nt, Human
aaggguaagggacuguucugaagaaccuuucc

SEQ ID NO: 26740 - RNA, 32 nt, Human
aaggguaagggagagggagggagccgggagcc

SEQ ID NO: 26741 - RNA, 32 nt, Human
aaggguaagggugagaugcuugggaugagagu

SEQ ID NO: 26742 - RNA, 31 nt, Human
aaggguaauuguuuuuccaugccaaaugagg

SEQ ID NO: 26743 - RNA, 20 nt, Human
aaggguacugaggcacucua

SEQ ID NO: 26744 - RNA, 32 nt, Human
aaggguagagagccacaguccccaaauccuau

SEQ ID NO: 26745 - RNA, 32 nt, Human
aaggguagccaagaauaggucucaccuguauu

SEQ ID NO: 26746 - RNA, 32 nt, Human
aaggguaggagguaggugagggauaaaagacu

SEQ ID NO: 26747 - RNA, 32 nt, Human
aaggguagggggaggggcuggggaagaucugu

SEQ ID NO: 26748 - RNA, 32 nt, Human
aaggguagggguauaagucuguuccaugcagu

SEQ ID NO: 26749 - RNA, 21 nt, Human
aaggguaucaccaagaagcca

SEQ ID NO: 26750 - RNA, 32 nt, Human
aaggguaucugcccuucuugccaggcagcucc

SEQ ID NO: 26751 - RNA, 32 nt, Human
aaggguauuugugcuuaaauguuaauauacaa

SEQ ID NO: 26752 - RNA, 32 nt, Human
aagggucaauuaugcauuccugugagucaggu

SEQ ID NO: 26753 - RNA, 32 nt, Human
aagggucacugcaccuccacccagagccucuu

SEQ ID NO: 26754 - RNA, 32 nt, Human
aagggucagccagcucacaaagguggccauuc

SEQ ID NO: 26755 - RNA, 21 nt, Human
aagggucagcuggcuucuccu

SEQ ID NO: 26756 - RNA, 32 nt, Human
aagggucaggggcaaggcggguucuagcugca

SEQ ID NO: 26757 - RNA, 32 nt, Human
aagggucaguuguuucugacccuuucugucgg

SEQ ID NO: 26758 - RNA, 32 nt, Human
aagggucaucccuaaaggcaaaaacagaacuu

SEQ ID NO: 26759 - RNA, 32 nt, Human
aagggucaugguccucaucacacacaugucau

SEQ ID NO: 26760 - RNA, 20 nt, Human
aaggguccccucucucugcc

SEQ ID NO: 26761 - RNA, 32 nt, Human
aagggucccugauuugugugcugguauguugg

SEQ ID NO: 26762 - RNA, 32 nt, Human
aagggucccuggaacguagggaggggcugggg

SEQ ID NO: 26763 - RNA, 32 nt, Human
aaggguccgugagcauggagagggggcaaaaa

SEQ ID NO: 26764 - RNA, 32 nt, Human
aaggguccucaccucuccccuaguacacuucu

SEQ ID NO: 26765 - RNA, 32 nt, Human
aaggguccugauugcuuguauuuuaagacauu

SEQ ID NO: 26766 - RNA, 32 nt, Human
aagggucuaguuuuccccuuguuucuaaagau

SEQ ID NO: 26767 - RNA, 32 nt, Human
aagggucucccaggcggcguaguagggcuucc

SEQ ID NO: 26768 - RNA, 32 nt, Human
aagggucugcagguuccaugggugacagccug

SEQ ID NO: 26769 - RNA, 32 nt, Human
aagggucugcaugccuguccucugccuuaucu

SEQ ID NO: 26770 - RNA, 32 nt, Human
aagggucuguucuguggcugagcuaggugaac

SEQ ID NO: 26771 - RNA, 18 nt, Human
aagggucuuugcuucuga

SEQ ID NO: 26772 - RNA, 32 nt, Human
aagggugaauuugaagaauuucagaaccacug

SEQ ID NO: 26773 - RNA, 32 nt, Human
aagggugaggagguggaaggagccggguggau

SEQ ID NO: 26774 - RNA, 29 nt, Human
aagggugaucuguguguucuuagacaaac

SEQ ID NO: 26775 - RNA, 32 nt, Human
aagggugauuauguauuacuuauccauuucug

SEQ ID NO: 26776 - RNA, 32 nt, Human
aagggugauuuucacacuucacauuuggcguu

SEQ ID NO: 26777 - RNA, 32 nt, Human
aagggugcagcccucaugaauggguuuagugc

SEQ ID NO: 26778 - RNA, 32 nt, Human
aagggugcagugagcuaugauugcaccauugc

SEQ ID NO: 26779 - RNA, 32 nt, Human
aagggugccacuggcaccacuggguggauggu

SEQ ID NO: 26780 - RNA, 20 nt, Human
aagggugccuggcuucugcu

SEQ ID NO: 26781 - RNA, 32 nt, Human
aagggugcugacauaaaguauuacaaaaaucu

SEQ ID NO: 26782 - RNA, 32 nt, Human
aaggguggacuuuaagcauggugacagauggu

SEQ ID NO: 26783 - RNA, 32 nt, Human
aaggguggaugugcuggagggguggcccagag

SEQ ID NO: 26784 - RNA, 31 nt, Human
aaggguggcaagagagaaguaaaaguugguu

SEQ ID NO: 26785 - RNA, 32 nt, Human
aaggguggcccaggcugugauuugccaucuac

SEQ ID NO: 26786 - RNA, 32 nt, Human
aaggguggcuuagugggugaccagccccugcg

SEQ ID NO: 26787 - RNA, 32 nt, Human
aagggugggccuggaugugggcuuccagagac

SEQ ID NO: 26788 - RNA, 30 nt, Human
aaggguggggauaucagggcacagucucca

SEQ ID NO: 26789 - RNA, 32 nt, Human
aagggugguaguuuucccuaaaauacuuauua

SEQ ID NO: 26790 - RNA, 32 nt, Human
aaggguggugggaggagauaagagauacaaac

SEQ ID NO: 26791 - RNA, 32 nt, Human
aaggguguaaguaauuaucgggaacaguguuu

SEQ ID NO: 26792 - RNA, 32 nt, Human
aagggugucuccuuagccuggagggagggaca

SEQ ID NO: 26793 - RNA, 32 nt, Human
aagggugugcaggaguucgccagcaaagccag

SEQ ID NO: 26794 - RNA, 32 nt, Human
aaggguguggagggaggaagggggucuaaggu

SEQ ID NO: 26795 - RNA, 32 nt, Human
aagggugugucucguccugcccgcacugccuc

SEQ ID NO: 26796 - RNA, 32 nt, Human
aaggguguguuuugugaaagaaaggaauuuug

SEQ ID NO: 26797 - RNA, 32 nt, Human
aaggguguuaaggggcaccaguggagguuuuc

SEQ ID NO: 26798 - RNA, 22 nt, Human
aaggguguugacccagaaucca

SEQ ID NO: 26799 - RNA, 32 nt, Human
aaggguuaggauuacaggcgugagccaccagg

SEQ ID NO: 26800 - RNA, 32 nt, Human
aaggguuagggcaccaggaggggccagguggc

SEQ ID NO: 26801 - RNA, 32 nt, Human
aaggguuauuccaggggcuacugaagaucuaa

SEQ ID NO: 26802 - RNA, 32 nt, Human
aaggguucacagagccagccuguggcucugac

SEQ ID NO: 26803 - RNA, 32 nt, Human
aaggguucucucuccugcuugcgcuuaguguc

SEQ ID NO: 26804 - RNA, 32 nt, Human
aaggguucuggcugccccaaccugcugaaggg

SEQ ID NO: 26805 - RNA, 21 nt, Human
aaggguugagaagaacucaaa

SEQ ID NO: 26806 - RNA, 32 nt, Human
aaggguugcagcugaauggcucuaaaagaguu

SEQ ID NO: 26807 - RNA, 32 nt, Human
aaggguugcugucccagcaggccagguccagg

SEQ ID NO: 26808 - RNA, 21 nt, Human
aaggguugggauuacaggugu

SEQ ID NO: 26809 - RNA, 32 nt, Human
aaggguugggauuacagguguaagccacugcu

SEQ ID NO: 26810 - RNA, 24 nt, Human
aaggguugggauuaccggcaugag

SEQ ID NO: 26811 - RNA, 32 nt, Human
aaggguuggggugagaacugagcccgagucga

SEQ ID NO: 26812 - RNA, 21 nt, Human
aaggguuggguagaugagcaa

SEQ ID NO: 26813 - RNA, 32 nt, Human
aaggguuggucuucugccagggucccuaagaa

SEQ ID NO: 26814 - RNA, 32 nt, Human
aaggguuguaggaccuuggcagagggggccug

SEQ ID NO: 26815 - RNA, 32 nt, Human
aaggguugugugugugcucaaccgugggcucc

SEQ ID NO: 26816 - RNA, 32 nt, Human
aaggguuuccaagagaucaccccaccagaaaa

SEQ ID NO: 26817 - RNA, 21 nt, Human
aaggguuugaguaaauacaaa

SEQ ID NO: 26818 - RNA, 32 nt, Human
aaggguuuuccagguguagcuaacaguugcca

SEQ ID NO: 26819 - RNA, 32 nt, Human
aagguaaaaugaugcgguguguccgcugcccc

SEQ ID NO: 26820 - RNA, 32 nt, Human
aagguaaaaugguacagccacuauggaaaaug

SEQ ID NO: 26821 - RNA, 23 nt, Human
aagguaacagugucuugcuucau

SEQ ID NO: 26822 - RNA, 32 nt, Human
aagguaacuguacaaaauaaguacaaugcaac

SEQ ID NO: 26823 - RNA, 32 nt, Human
aagguaagaaaaucaugugcucuuaaacuuga

SEQ ID NO: 26824 - RNA, 32 nt, Human
aagguaagaacugagaagggaggcaugaggcg

SEQ ID NO: 26825 - RNA, 31 nt, Human
aagguaagaaguaaauauguaaaagagauaa

SEQ ID NO: 26826 - RNA, 32 nt, Human
aagguaaggagacaggaggaguaggaggaggc

SEQ ID NO: 26827 - RNA, 32 nt, Human
aagguaaggaggaagagaguggaauggaaaaa

SEQ ID NO: 26828 - RNA, 32 nt, Human
aagguaaugacuuaaaauagcauuucaaaaac

SEQ ID NO: 26829 - RNA, 32 nt, Human
aagguaauguuuuuauaggucuuccuugugaa

SEQ ID NO: 26830 - RNA, 32 nt, Human
aagguaauucauacuggagaaaagccauacaa

SEQ ID NO: 26831 - RNA, 32 nt, Human
aagguacaccacuacacuccagccugggcaac

SEQ ID NO: 26832 - RNA, 32 nt, Human
aagguacaggcaggaugauccagggauugggc

SEQ ID NO: 26833 - RNA, 25 nt, Human
aagguacaguguguauguguguaug

SEQ ID NO: 26834 - RNA, 32 nt, Human
aagguaccauguaucucccaggguaaccugaa

SEQ ID NO: 26835 - RNA, 32 nt, Human
aagguaccugcaggauccacuugugucuauug

SEQ ID NO: 26836 - RNA, 32 nt, Human
aagguaccuuugggggcaacagcacccuaguu

SEQ ID NO: 26837 - RNA, 32 nt, Human
aagguacuaauuacugcccagccuggggagau

SEQ ID NO: 26838 - RNA, 32 nt, Human
aagguacuaugaguucucaggggucaaguuca

SEQ ID NO: 26839 - RNA, 32 nt, Human
aagguacuuucccucuucucucaggccaugca

SEQ ID NO: 26840 - RNA, 32 nt, Human
aagguagaaauguucaagcuuaugcacaggcu

SEQ ID NO: 26841 - RNA, 32 nt, Human
aagguagaagcgaguucccuucaugguugauu

SEQ ID NO: 26842 - RNA, 32 nt, Human
aagguagacaguguggcgacuggagaggucgg

SEQ ID NO: 26843 - RNA, 32 nt, Human
aagguagagcagcuacaagaugagaccaacca

SEQ ID NO: 26844 - RNA, 32 nt, Human
aagguagauagaagaaugucuagccaauaggu

SEQ ID NO: 26845 - RNA, 32 nt, Human
aagguagaugagagacagggcagggaaucugc

SEQ ID NO: 26846 - RNA, 32 nt, Human
aagguagauuuggaaucaugcauuuuagcaag

SEQ ID NO: 26847 - RNA, 32 nt, Human
aagguagcagcaagccagguaugguggcucac

SEQ ID NO: 26848 - RNA, 26 nt, Human
aagguagcgugggcccgaacaugcac

SEQ ID NO: 26849 - RNA, 32 nt, Human
aagguaggacucuagacaaaaccuucuauuuu

SEQ ID NO: 26850 - RNA, 32 nt, Human
aagguaggaggcacaucaauaaagaggaaacc

SEQ ID NO: 26851 - RNA, 32 nt, Human
aagguaggauaagacgacacagcagcaauaaa

SEQ ID NO: 26852 - RNA, 32 nt, Human
aagguagggaaagugggagagggacuuggagg

SEQ ID NO: 26853 - RNA, 23 nt, Human
aagguagguggaucaccuaaggu

SEQ ID NO: 26854 - RNA, 25 nt, Human
aagguaguagugagacgugaagcca

SEQ ID NO: 26855 - RNA, 32 nt, Human
aagguagucugccccuuccuuccucucucuuu

SEQ ID NO: 26856 - RNA, 32 nt, Human
aagguaguucuugcgaaugccaccccacuaag

SEQ ID NO: 26857 - RNA, 32 nt, Human
aagguauaacaugauggguauaagaggaaaag

SEQ ID NO: 26858 - RNA, 32 nt, Human
aagguauagcagcaguuagaauucuuugcaaa

SEQ ID NO: 26859 - RNA, 32 nt, Human
aagguauccuacccuggugaagcagcugcuuu

SEQ ID NO: 26860 - RNA, 32 nt, Human
aagguaucuuuuuauucauugcccucaggaaa

SEQ ID NO: 26861 - RNA, 32 nt, Human
aagguauggaagccaagggaaaacuuccccuu

SEQ ID NO: 26862 - RNA, 32 nt, Human
aagguauggggugggagccacaauugaggaua

SEQ ID NO: 26863 - RNA, 32 nt, Human
aagguauguugucuaacaggggaccaacagaa

SEQ ID NO: 26864 - RNA, 32 nt, Human
aagguauuaggauggugcaaaaguaacuugca

SEQ ID NO: 26865 - RNA, 32 nt, Human
aagguauucugaccuugugaacaucagaaggu

SEQ ID NO: 26866 - RNA, 19 nt, Human
aagguauugagacauauua

SEQ ID NO: 26867 - RNA, 32 nt, Human
aagguauuuuccucaaaaaccuuaaaugcaaa

SEQ ID NO: 26868 - RNA, 32 nt, Human
aaggucaaacaucagugagcaagcuguguaca

SEQ ID NO: 26869 - RNA, 32 nt, Human
aaggucaagccacuccugaauguggcucggca

SEQ ID NO: 26870 - RNA, 32 nt, Human
aaggucaaggggugcagccaggagggcagggg

SEQ ID NO: 26871 - RNA, 32 nt, Human
aaggucacaaguuugagaccagucuggccaac

SEQ ID NO: 26872 - RNA, 21 nt, Human
aaggucacacagugucgucca

SEQ ID NO: 26873 - RNA, 32 nt, Human
aaggucacaccacugcacuccagccugggcua

SEQ ID NO: 26874 - RNA, 32 nt, Human
aaggucacaccauugcacuccaaccugggcga

SEQ ID NO: 26875 - RNA, 32 nt, Human
aaggucacagccacacugaaaaugggaugugc

SEQ ID NO: 26876 - RNA, 32 nt, Human
aaggucacaggcuagaucaauauacagaaaau

SEQ ID NO: 26877 - RNA, 32 nt, Human
aaggucaccccacugaggaugcugcuggcagc

SEQ ID NO: 26878 - RNA, 32 nt, Human
aaggucaccugcacucccagccaaguggugau

SEQ ID NO: 26879 - RNA, 32 nt, Human
aaggucacgucacugcacucuagccugggcaa

SEQ ID NO: 26880 - RNA, 32 nt, Human
aaggucacuagaaaugggccagcugggucaau

SEQ ID NO: 26881 - RNA, 32 nt, Human
aaggucagacacacuucugaucuugggggcca

SEQ ID NO: 26882 - RNA, 32 nt, Human
aaggucagcaagauaagcagggccagucucag

SEQ ID NO: 26883 - RNA, 32 nt, Human
aaggucagcugcccccugcccucucucugggg

SEQ ID NO: 26884 - RNA, 32 nt, Human
aaggucaggaguucgagagcagccuggucaac

SEQ ID NO: 26885 - RNA, 32 nt, Human
aaggucaggaguugaagaccagccuggccaac

SEQ ID NO: 26886 - RNA, 32 nt, Human
aaggucaggaguuugagaccagccuggccaaa

SEQ ID NO: 26887 - RNA, 32 nt, Human
aaggucaggaguuugagaccagccuggccaac

SEQ ID NO: 26888 - RNA, 32 nt, Human
aaggucaggaguuugagaccagccuggccaag

SEQ ID NO: 26889 - RNA, 32 nt, Human
aaggucaggaguuugagaucagccuggccaau

SEQ ID NO: 26890 - RNA, 32 nt, Human
aaggucaggcauuugagaccagccuggccaac

SEQ ID NO: 26891 - RNA, 32 nt, Human
aaggucauauaauacauuguggagauugcuua

SEQ ID NO: 26892 - RNA, 21 nt, Human
aaggucaucaaacauuugcca

SEQ ID NO: 26893 - RNA, 32 nt, Human
aaggucaucuuggaugauuggaggacaacauc

SEQ ID NO: 26894 - RNA, 22 nt, Human
aaggucaugagcauucgugcua

SEQ ID NO: 26895 - RNA, 32 nt, Human
aaggucaugccacugcacuccagccugggaga

SEQ ID NO: 26896 - RNA, 32 nt, Human
aaggucaugccacugcacucuagccuggguga

SEQ ID NO: 26897 - RNA, 32 nt, Human
aaggucauuaggauuugcaccuuuguuuucuu

SEQ ID NO: 26898 - RNA, 32 nt, Human
aagguccaagccccaaccaaggggauucuucg

SEQ ID NO: 26899 - RNA, 32 nt, Human
aagguccacagcuucauuuuugaagucagcaa

SEQ ID NO: 26900 - RNA, 32 nt, Human
aagguccacagcuuuauucuugaagucagcga

SEQ ID NO: 26901 - RNA, 22 nt, Human
aagguccacuggacaguuggga

SEQ ID NO: 26902 - RNA, 32 nt, Human
aagguccagaguucaagagcagccuggccaac

SEQ ID NO: 26903 - RNA, 32 nt, Human
aaggucccagccccaggcagcccugucacagu

SEQ ID NO: 26904 - RNA, 32 nt, Human
aaggucccaguggaugagaugcuguccucugg

SEQ ID NO: 26905 - RNA, 32 nt, Human
aagguccccuggcaguggcccauccugucuuc

SEQ ID NO: 26906 - RNA, 32 nt, Human
aagguccggggcgacucucuguucauccuguc

SEQ ID NO: 26907 - RNA, 32 nt, Human
aagguccguagugcuaucuacauccagacggu

SEQ ID NO: 26908 - RNA, 32 nt, Human
aagguccguccucugugggcccaaaccuauuu

SEQ ID NO: 26909 - RNA, 32 nt, Human
aagguccuaaaagacaguuuugccaguggggc

SEQ ID NO: 26910 - RNA, 32 nt, Human
aagguccucacaauaacuaacugugugcuuuu

SEQ ID NO: 26911 - RNA, 32 nt, Human
aagguccuccacuccugaaccccugcagugac

SEQ ID NO: 26912 - RNA, 32 nt, Human
aagguccuccagggggccucggucugacacug

SEQ ID NO: 26913 - RNA, 32 nt, Human
aagguccugcagcccccuuccccugggugugu

SEQ ID NO: 26914 - RNA, 32 nt, Human
aagguccugccucuguccuguccccugagcca

SEQ ID NO: 26915 - RNA, 32 nt, Human
aagguccuguucuugccuugucugaacuugcc

SEQ ID NO: 26916 - RNA, 32 nt, Human
aagguccuugugcaucuuaccuuucccuuacc

SEQ ID NO: 26917 - RNA, 32 nt, Human
aaggucgcaccgcuacacuccagccuggguga

SEQ ID NO: 26918 - RNA, 32 nt, Human
aaggucgccaugaagaagacuugcuucaccaa

SEQ ID NO: 26919 - RNA, 32 nt, Human
aaggucgcgccacugcacuccagccugggcag

SEQ ID NO: 26920 - RNA, 32 nt, Human
aaggucgcgccacugcacuccagccugggcga

SEQ ID NO: 26921 - RNA, 32 nt, Human
aaggucgcgccacugcgcuccagccuggacaa

SEQ ID NO: 26922 - RNA, 32 nt, Human
aaggucgcgccauugcacuccagccugggcga

SEQ ID NO: 26923 - RNA, 32 nt, Human
aaggucgguggagucucccacagagcaucgcu

SEQ ID NO: 26924 - RNA, 32 nt, Human
aaggucguggacaaccaggcugggacccaggg

SEQ ID NO: 26925 - RNA, 24 nt, Human
aaggucgugugcauuugcuuucac

SEQ ID NO: 26926 - RNA, 32 nt, Human
aaggucguugcgggcagugccugcucccagcc

SEQ ID NO: 26927 - RNA, 32 nt, Human
aaggucuaaaugcccacuugaaugaagcugag

SEQ ID NO: 26928 - RNA, 24 nt, Human
aaggucuacuuccccagcaggaca

SEQ ID NO: 26929 - RNA, 32 nt, Human
aaggucuagauaggguuugcuauaggguuugc

SEQ ID NO: 26930 - RNA, 32 nt, Human
aaggucuagccaggcuccagacuggcuucaca

SEQ ID NO: 26931 - RNA, 32 nt, Human
aaggucucagcagagcccccaggagaguugga

SEQ ID NO: 26932 - RNA, 32 nt, Human
aaggucucagcuuuaagacacugaggcugguu

SEQ ID NO: 26933 - RNA, 32 nt, Human
aaggucucagggacgggcugcagccauguccu

SEQ ID NO: 26934 - RNA, 32 nt, Human
aaggucucaugcagggaaguggcaaaacacuu

SEQ ID NO: 26935 - RNA, 32 nt, Human
aaggucuccaagggagggugcagcccucuugc

SEQ ID NO: 26936 - RNA, 32 nt, Human
aaggucuccagccagggcuucugagaugcaaa

SEQ ID NO: 26937 - RNA, 32 nt, Human
aaggucuccagccucaucgaauucuugaagca

SEQ ID NO: 26938 - RNA, 32 nt, Human
aaggucuccauggcugagccugggggcucuua

SEQ ID NO: 26939 - RNA, 32 nt, Human
aaggucuccgugugggaaagcccuugggggau

SEQ ID NO: 26940 - RNA, 32 nt, Human
aaggucucugcagguuuaucugccuggagcga

SEQ ID NO: 26941 - RNA, 32 nt, Human
aaggucugagggaggaaggagcacaaggagug

SEQ ID NO: 26942 - RNA, 32 nt, Human
aaggucugagucuucauccagcccugccuguc

SEQ ID NO: 26943 - RNA, 32 nt, Human
aaggucugaucacaccugacugcacuccagcc

SEQ ID NO: 26944 - RNA, 32 nt, Human
aaggucugcaacuucacuccuggggccagcaa

SEQ ID NO: 26945 - RNA, 32 nt, Human
aaggucugcaggugccuguugucuggguuugg

SEQ ID NO: 26946 - RNA, 32 nt, Human
aaggucugcccagccagguggaucuaccuugc

SEQ ID NO: 26947 - RNA, 32 nt, Human
aaggucugcucuguucuaaucuuauggggcca

SEQ ID NO: 26948 - RNA, 32 nt, Human
aaggucuggaguucgagaccagccuggccaac

SEQ ID NO: 26949 - RNA, 32 nt, Human
aaggucugugaccuuuugcccuccaguugggg

SEQ ID NO: 26950 - RNA, 24 nt, Human
aaggucugugcaagcuggcuccug

SEQ ID NO: 26951 - RNA, 32 nt, Human
aaggucuuacugccauggugcuuuucaggggc

SEQ ID NO: 26952 - RNA, 32 nt, Human
aaggucuucaaggaguugguccagguagcaau

SEQ ID NO: 26953 - RNA, 32 nt, Human
aaggucuugcucugucccucaggcuggagugc

SEQ ID NO: 26954 - RNA, 32 nt, Human
aaggucuugcugucucaguauccugagucuua

SEQ ID NO: 26955 - RNA, 32 nt, Human
aaggucuuggggguaaagccacaggucauccu

SEQ ID NO: 26956 - RNA, 32 nt, Human
aaggucuugguuacacauguccaugcauucca

SEQ ID NO: 26957 - RNA, 32 nt, Human
aaggucuugucuucaaccuccccgucccguug

SEQ ID NO: 26958 - RNA, 32 nt, Human
aaggugaaagaauuugccucuaggaagcagga

SEQ ID NO: 26959 - RNA, 32 nt, Human
aaggugaaauccagcagccgcgccagcugguu

SEQ ID NO: 26960 - RNA, 32 nt, Human
aaggugaaccccuguccugaccaaaauugggc

SEQ ID NO: 26961 - RNA, 32 nt, Human
aaggugaaugagguaagggagaucagaaccau

SEQ ID NO: 26962 - RNA, 32 nt, Human
aaggugaauggcauguucagcaggugcagaaa

SEQ ID NO: 26963 - RNA, 32 nt, Human
aaggugacacuccaccaaccagagugagaggg

SEQ ID NO: 26964 - RNA, 32 nt, Human
aaggugacagggacuggagccauggcucagag

SEQ ID NO: 26965 - RNA, 32 nt, Human
aaggugaccagccuaacggccugccuagugga

SEQ ID NO: 26966 - RNA, 32 nt, Human
aaggugacucuuagcaaccucauuucgacagu

SEQ ID NO: 26967 - RNA, 32 nt, Human
aaggugacugacacaaagugacuuucagggcu

SEQ ID NO: 26968 - RNA, 32 nt, Human
aaggugagcuccagaagggaagggaguucuuu

SEQ ID NO: 26969 - RNA, 32 nt, Human
aaggugaggggaggggaggcuuuuucuaccug

SEQ ID NO: 26970 - RNA, 32 nt, Human
aaggugaggguaagggguugugaguugugucc

SEQ ID NO: 26971 - RNA, 23 nt, Human
aaggugaguggaucaccugaggu

SEQ ID NO: 26972 - RNA, 32 nt, Human
aaggugauaagaauacagggaaauggaauaag

SEQ ID NO: 26973 - RNA, 32 nt, Human
aaggugaugcagaugugaccuaggaugaugga

SEQ ID NO: 26974 - RNA, 32 nt, Human
aaggugauggacaguucacacuggacucccac

SEQ ID NO: 26975 - RNA, 32 nt, Human
aaggugauggugacggucacagcugcugguua

SEQ ID NO: 26976 - RNA, 31 nt, Human
aaggugauggugcuggggugugaguugucug

SEQ ID NO: 26977 - RNA, 32 nt, Human
aaggugauucucuucuaugccucucuccaacg

SEQ ID NO: 26978 - RNA, 32 nt, Human
aaggugauugaaaaggaaaagagugagugaac

SEQ ID NO: 26979 - RNA, 32 nt, Human
aaggugauuguaugcauaaaacaggugaugag

SEQ ID NO: 26980 - RNA, 32 nt, Human
aaggugauuucagacugcagaggggaaagacu

SEQ ID NO: 26981 - RNA, 32 nt, Human
aaggugcaaaaauauauacaauagucucauug

SEQ ID NO: 26982 - RNA, 32 nt, Human
aaggugcaaagucaguagagaagggaauguau

SEQ ID NO: 26983 - RNA, 32 nt, Human
aaggugcacauauuugggggaggcucauggac

SEQ ID NO: 26984 - RNA, 32 nt, Human
aaggugcaccguugccccagccccuuucuggc

SEQ ID NO: 26985 - RNA, 32 nt, Human
aaggugcagccuguguauaaggccugaagagg

SEQ ID NO: 26986 - RNA, 32 nt, Human
aaggugcagguguggagagagaggcuucaauc

SEQ ID NO: 26987 - RNA, 32 nt, Human
aaggugcaguauuacacaucaccagcugccuu

SEQ ID NO: 26988 - RNA, 32 nt, Human
aaggugcagucuagauuucagugagaacccug

SEQ ID NO: 26989 - RNA, 32 nt, Human
aaggugccacuagaagcgccaggcuggggccg

SEQ ID NO: 26990 - RNA, 32 nt, Human
aaggugccagcagccugcaggggaaaggcaaa

SEQ ID NO: 26991 - RNA, 32 nt, Human
aaggugcccagcugccagcccagcuccgcugc

SEQ ID NO: 26992 - RNA, 32 nt, Human
aaggugcccggcuugguaggggauaccagaca

SEQ ID NO: 26993 - RNA, 32 nt, Human
aaggugcccuccagcaugccuggcugauuuuu

SEQ ID NO: 26994 - RNA, 32 nt, Human
aaggugcccugagagguggcagcaucuuuugu

SEQ ID NO: 26995 - RNA, 32 nt, Human
aaggugccgcccucaucacaggcugggcaugg

SEQ ID NO: 26996 - RNA, 32 nt, Human
aaggugccuccuccucuccuuagcuggcccgu

SEQ ID NO: 26997 - RNA, 32 nt, Human
aaggugccuuucuuccccuucgccuucugcca

SEQ ID NO: 26998 - RNA, 32 nt, Human
aaggugccuuuguaccucagguguuuuaggug

SEQ ID NO: 26999 - RNA, 32 nt, Human
aaggugcggcaucuugcuguuguacuucugaa

SEQ ID NO: 27000 - RNA, 32 nt, Human
aaggugcguccucaccaugcuggauggugucc

SEQ ID NO: 27001 - RNA, 32 nt, Human
aaggugcuagaagccaggcccaggaagguucc

SEQ ID NO: 27002 - RNA, 32 nt, Human
aaggugcuagcacuuccguaaauuacuccaaa

SEQ ID NO: 27003 - RNA, 32 nt, Human
aaggugcucaaggaggacuugguuucaagggc

SEQ ID NO: 27004 - RNA, 32 nt, Human
aaggugcuccagaaagcaggaguugaagaccu

SEQ ID NO: 27005 - RNA, 32 nt, Human
aaggugcucccacuccagggcccagcacaucu

SEQ ID NO: 27006 - RNA, 32 nt, Human
aaggugcucugugccaaguuccucacucauuc

SEQ ID NO: 27007 - RNA, 25 nt, Human
aaggugcugagggggcccugaggca

SEQ ID NO: 27008 - RNA, 32 nt, Human
aaggugcugauccuaagaauuuuucauucuca

SEQ ID NO: 27009 - RNA, 32 nt, Human
aaggugcugcagagcccaggugcacuguguga

SEQ ID NO: 27010 - RNA, 32 nt, Human
aaggugcugccuucauccuccccaccuaaugc

SEQ ID NO: 27011 - RNA, 32 nt, Human
aaggugcuggauuacaggcaugagccaccucg

SEQ ID NO: 27012 - RNA, 32 nt, Human
aaggugcuggauuacagguguaagccaucaca

SEQ ID NO: 27013 - RNA, 32 nt, Human
aaggugcugucaccccucugcuggcgagcaug

SEQ ID NO: 27014 - RNA, 32 nt, Human
aaggugcuuccgagcugggaugagaggaagga

SEQ ID NO: 27015 - RNA, 32 nt, Human
aaggugcuuccgagcugggaugagaggaaggg

SEQ ID NO: 27016 - RNA, 32 nt, Human
aaggugcuugacaugcaagaggcuccacaaau

SEQ ID NO: 27017 - RNA, 32 nt, Human
aagguggaaagaggagaacguagcaaucuggc

SEQ ID NO: 27018 - RNA, 32 nt, Human
aagguggaagugaaaaagaacaacacugacac

SEQ ID NO: 27019 - RNA, 31 nt, Human
aagguggacuugucucccagucgaggcuggu

SEQ ID NO: 27020 - RNA, 32 nt, Human
aagguggagaaaagguuccuguggagccucag

SEQ ID NO: 27021 - RNA, 32 nt, Human
aagguggagagggaggagaagccugaauuggg

SEQ ID NO: 27022 - RNA, 32 nt, Human
aagguggaggcagaguuugagcugcugacugu

SEQ ID NO: 27023 - RNA, 32 nt, Human
aagguggaggguggggcuuggccaggagugac

SEQ ID NO: 27024 - RNA, 32 nt, Human
aagguggagggugugaaaugaugccccaguag

SEQ ID NO: 27025 - RNA, 32 nt, Human
aagguggaguagucgugugcucugccugaaga

SEQ ID NO: 27026 - RNA, 31 nt, Human
aagguggcaaugugugucaggugacuaucag

SEQ ID NO: 27027 - RNA, 32 nt, Human
aagguggcacuuccguucagauucauuuugcu

SEQ ID NO: 27028 - RNA, 32 nt, Human
aagguggcagugagcuauucaucgugccugua

SEQ ID NO: 27029 - RNA, 32 nt, Human
aagguggcaguggcuacaucugccuguuggac

SEQ ID NO: 27030 - RNA, 32 nt, Human
aagguggcaucuggagccuccuuuccccuucu

SEQ ID NO: 27031 - RNA, 32 nt, Human
aagguggccaagacccagggauaacuguggug

SEQ ID NO: 27032 - RNA, 32 nt, Human
aagguggccauggauggaugggcuguaucugu

SEQ ID NO: 27033 - RNA, 32 nt, Human
aagguggcccaagguucucuccccugcagcua

SEQ ID NO: 27034 - RNA, 32 nt, Human
aagguggcccuugagcacauuccuccgguaga

SEQ ID NO: 27035 - RNA, 32 nt, Human
aagguggcccuugucugugucuccugguuuuc

SEQ ID NO: 27036 - RNA, 32 nt, Human
aagguggccuauuccucuguguguucucugga

SEQ ID NO: 27037 - RNA, 22 nt, Human
aagguggccugacacugugcca

SEQ ID NO: 27038 - RNA, 32 nt, Human
aagguggccugggacuagacagccccucugag

SEQ ID NO: 27039 - RNA, 32 nt, Human
aagguggcgcuguggaggaggcagagaucaga

SEQ ID NO: 27040 - RNA, 32 nt, Human
aagguggcggugaccgaggggguggggacuga

SEQ ID NO: 27041 - RNA, 32 nt, Human
aagguggcggugguggagaaacagguggaaga

SEQ ID NO: 27042 - RNA, 32 nt, Human
aagguggcuaaggcagaggcugagggggcugg

SEQ ID NO: 27043 - RNA, 32 nt, Human
aagguggcugcauccaggaaaccacguacccu

SEQ ID NO: 27044 - RNA, 32 nt, Human
aaggugggaacacaguuaaugccuguaacacg

SEQ ID NO: 27045 - RNA, 32 nt, Human
aaggugggaagauugccugagcucaggaguuu

SEQ ID NO: 27046 - RNA, 32 nt, Human
aaggugggagaaggggguaucuuuagcagagg

SEQ ID NO: 27047 - RNA, 32 nt, Human
aaggugggagagagaguuugagacagcuccgu

SEQ ID NO: 27048 - RNA, 32 nt, Human
aaggugggaugaggacaugaacagaacauggc

SEQ ID NO: 27049 - RNA, 32 nt, Human
aaggugggauuacgccuguaaucccagcacuu

SEQ ID NO: 27050 - RNA, 23 nt, Human
aaggugggcagaucaccuaaggu

SEQ ID NO: 27051 - RNA, 23 nt, Human
aaggugggcagaucaccugaggu

SEQ ID NO: 27052 - RNA, 32 nt, Human
aaggugggcagauccccugagcucaggagucc

SEQ ID NO: 27053 - RNA, 32 nt, Human
aaggugggcagauugccugagcucaggaguuc

SEQ ID NO: 27054 - RNA, 32 nt, Human
aaggugggcagauugccugagcucaggaguuu

SEQ ID NO: 27055 - RNA, 32 nt, Human
aaggugggcaguuugccugagcucaggaguuu

SEQ ID NO: 27056 - RNA, 32 nt, Human
aaggugggcggaucaccugagaucgagaguuc

SEQ ID NO: 27057 - RNA, 22 nt, Human
aaggugggcggaucaccugagc

SEQ ID NO: 27058 - RNA, 32 nt, Human
aaggugggcggaucaccugagcucaggaguuu

SEQ ID NO: 27059 - RNA, 23 nt, Human
aaggugggcggaucaccugaggu

SEQ ID NO: 27060 - RNA, 32 nt, Human
aaggugggcggaucacuugagaucaggaguuc

SEQ ID NO: 27061 - RNA, 23 nt, Human
aaggugggcggaucaucugaggc

SEQ ID NO: 27062 - RNA, 32 nt, Human
aaggugggcgggucacuugagaucaggaguuc

SEQ ID NO: 27063 - RNA, 32 nt, Human
aagguggggaaacuguaagugaaccccugugg

SEQ ID NO: 27064 - RNA, 32 nt, Human
aaggugggguuggcagggggaggguaggagca

SEQ ID NO: 27065 - RNA, 23 nt, Human
aagguggguagaucaccugaggu

SEQ ID NO: 27066 - RNA, 23 nt, Human
aaggugggugaaucaccugaagu

SEQ ID NO: 27067 - RNA, 32 nt, Human
aaggugggugagccacugcccucaaacccggg

SEQ ID NO: 27068 - RNA, 23 nt, Human
aagguggguggaucaccugaggg

SEQ ID NO: 27069 - RNA, 23 nt, Human
aagguggguggaucaccugaggu

SEQ ID NO: 27070 - RNA, 23 nt, Human
aagguggguggaucacuugaagc

SEQ ID NO: 27071 - RNA, 23 nt, Human
aagguggguggaucacuugaggc

SEQ ID NO: 27072 - RNA, 23 nt, Human
aagguggguggaucaucuaaggc

SEQ ID NO: 27073 - RNA, 32 nt, Human
aagguggguggaucgcuugagcucaggaguuc

SEQ ID NO: 27074 - RNA, 32 nt, Human
aagguggguggcaggagggaacaggugccacc

SEQ ID NO: 27075 - RNA, 32 nt, Human
aagguggguggguugcuugagcucaggaguuu

SEQ ID NO: 27076 - RNA, 32 nt, Human
aagguggguuccagggacuguaccuguaggaa

SEQ ID NO: 27077 - RNA, 32 nt, Human
aaggugguaagaaagcagacuggccagggacu

SEQ ID NO: 27078 - RNA, 32 nt, Human
aaggugguacccccuucucuccccagccccau

SEQ ID NO: 27079 - RNA, 32 nt, Human
aaggugguccugccaggacacagccaucuaaa

SEQ ID NO: 27080 - RNA, 32 nt, Human
aagguggugucaggaacauacuugccuauggg

SEQ ID NO: 27081 - RNA, 32 nt, Human
aaggugguucauuggaggccaggaguuggaga

SEQ ID NO: 27082 - RNA, 32 nt, Human
aaggugguuccccagccgcucaaauuuccgga

SEQ ID NO: 27083 - RNA, 32 nt, Human
aaggugguucuguggccuuuucccucuuugcu

SEQ ID NO: 27084 - RNA, 32 nt, Human
aagguguagcaaguguacccacacagauagca

SEQ ID NO: 27085 - RNA, 32 nt, Human
aagguguauggaaaugccuagauauccaggca

SEQ ID NO: 27086 - RNA, 32 nt, Human
aaggugucacgaggaagaucagcucacugaga

SEQ ID NO: 27087 - RNA, 18 nt, Human
aaggugucaucagugggg

SEQ ID NO: 27088 - RNA, 32 nt, Human
aagguguccaugaucccuccccacugaccuuu

SEQ ID NO: 27089 - RNA, 32 nt, Human
aaggugucccacccuccccuccugacccuccu

SEQ ID NO: 27090 - RNA, 32 nt, Human
aaggugucucagacauuuggccaguaugucuu

SEQ ID NO: 27091 - RNA, 32 nt, Human
aaggugucugugcagauuuucccacugauuua

SEQ ID NO: 27092 - RNA, 32 nt, Human
aaggugugaaggagcaacuucaguugacacaa

SEQ ID NO: 27093 - RNA, 32 nt, Human
aaggugugagacugggaaggcuugggauuugc

SEQ ID NO: 27094 - RNA, 32 nt, Human
aaggugugagccaccaugccuggcccuaugug

SEQ ID NO: 27095 - RNA, 32 nt, Human
aaggugugagccacugugcccagccuauuauu

SEQ ID NO: 27096 - RNA, 32 nt, Human
aaggugugagcugggagguugcuggacaggau

SEQ ID NO: 27097 - RNA, 32 nt, Human
aagguguggaggaggaggggagggaggaagaa

SEQ ID NO: 27098 - RNA, 32 nt, Human
aagguguggccagaacaacuugggcuccugcu

SEQ ID NO: 27099 - RNA, 32 nt, Human
aaggugugggcugugauaggagagggcagagc

SEQ ID NO: 27100 - RNA, 20 nt, Human
aaggugugugcugacuugau

SEQ ID NO: 27101 - RNA, 32 nt, Human
aaggugugugucauacacagggccuaguacau

SEQ ID NO: 27102 - RNA, 32 nt, Human
aagguguugucaggaacauacuugccuauggg

SEQ ID NO: 27103 - RNA, 32 nt, Human
aagguguuuaaaacaugucaaccuuauguaag

SEQ ID NO: 27104 - RNA, 32 nt, Human
aagguguuuaacauggagcaggagugacaaaa

SEQ ID NO: 27105 - RNA, 32 nt, Human
aagguguuucucuucugcucccugaaccucuu

SEQ ID NO: 27106 - RNA, 32 nt, Human
aagguuaaauccuaaucaucacaacagucucu

SEQ ID NO: 27107 - RNA, 32 nt, Human
aagguuaaccaaaaugauuacuacucuugaca

SEQ ID NO: 27108 - RNA, 22 nt, Human
aagguuacauuuuucuuggcca

SEQ ID NO: 27109 - RNA, 32 nt, Human
aagguuacccuugagcugugugccacagucug

SEQ ID NO: 27110 - RNA, 21 nt, Human
aagguuaccucuauuuugcca

SEQ ID NO: 27111 - RNA, 32 nt, Human
aagguuacggaggcagugaccacccacccugg

SEQ ID NO: 27112 - RNA, 32 nt, Human
aagguuacugauuuuccucuucccucuuaguu

SEQ ID NO: 27113 - RNA, 32 nt, Human
aagguuagacuguauuuugccugagggacaug

SEQ ID NO: 27114 - RNA, 32 nt, Human
aagguuagcagcugggcuggggagcagaaaac

SEQ ID NO: 27115 - RNA, 32 nt, Human
aagguuaggaguuugagaccagccuggccaac

SEQ ID NO: 27116 - RNA, 32 nt, Human
aagguuauacagccauaucuucaucacuuucu

SEQ ID NO: 27117 - RNA, 32 nt, Human
aagguuauacugccuuuucuuuguuuguuugu

SEQ ID NO: 27118 - RNA, 32 nt, Human
aagguuauagugaacuaugaucuuaccacuac

SEQ ID NO: 27119 - RNA, 32 nt, Human
aagguuauucaaccagggcaaaggacagccuu

SEQ ID NO: 27120 - RNA, 32 nt, Human
aagguuauuuuccaccaagggauuucccaggu

SEQ ID NO: 27121 - RNA, 32 nt, Human
aagguucaagagugaauggaaaaagagcagua

SEQ ID NO: 27122 - RNA, 32 nt, Human
aagguucaaucagcagaugacccccaggccuu

SEQ ID NO: 27123 - RNA, 32 nt, Human
aagguucauaugcaucacacaccacuuugaca

SEQ ID NO: 27124 - RNA, 20 nt, Human
aagguucauccugaauggga

SEQ ID NO: 27125 - RNA, 32 nt, Human
aagguuccaacuuuaccacauccagccaacag

SEQ ID NO: 27126 - RNA, 32 nt, Human
aagguuccaagaaucaguaaauaagggaguuu

SEQ ID NO: 27127 - RNA, 32 nt, Human
aagguuccaagagugaggagagaaugcauggg

SEQ ID NO: 27128 - RNA, 32 nt, Human
aagguucgcccuggugcugagcuccaugaacc

SEQ ID NO: 27129 - RNA, 32 nt, Human
aagguucuacagcauaagccuuauccugccag

SEQ ID NO: 27130 - RNA, 32 nt, Human
aagguucucaaaggucucagaccuacaaagag

SEQ ID NO: 27131 - RNA, 32 nt, Human
aagguucuccacccugugccccacccucccca

SEQ ID NO: 27132 - RNA, 32 nt, Human
aagguucuggugcuucagcuggcuccugcaga

SEQ ID NO: 27133 - RNA, 32 nt, Human
aagguucuucauugcuuuucuguucacaguug

SEQ ID NO: 27134 - RNA, 32 nt, Human
aagguucuuggacucugcaugguucccuuuag

SEQ ID NO: 27135 - RNA, 32 nt, Human
aagguugaacaacauggcucagagucuuguuc

SEQ ID NO: 27136 - RNA, 32 nt, Human
aagguugaaucucuuccugagggcagagcucu

SEQ ID NO: 27137 - RNA, 32 nt, Human
aagguugaggcugaagagugaggacucuucag

SEQ ID NO: 27138 - RNA, 32 nt, Human
aagguugaggggcuccccagaggucacacagc

SEQ ID NO: 27139 - RNA, 32 nt, Human
aagguugcaaacaagguccuggaagauaagau

SEQ ID NO: 27140 - RNA, 32 nt, Human
aagguugcacuggccagcaugggccuguccca

SEQ ID NO: 27141 - RNA, 32 nt, Human
aagguugcaguaaaccaagaucacgccacuac

SEQ ID NO: 27142 - RNA, 32 nt, Human
aagguugcagugagccaaaaucaugccacugc

SEQ ID NO: 27143 - RNA, 32 nt, Human
aagguugcagugagccaagaucacaccacucc

SEQ ID NO: 27144 - RNA, 32 nt, Human
aagguugcagugagccaagaucacgccacugc

SEQ ID NO: 27145 - RNA, 32 nt, Human
aagguugcagugagccaagaucgcaacacugc

SEQ ID NO: 27146 - RNA, 32 nt, Human
aagguugcagugagccaaggucgugcugcugc

SEQ ID NO: 27147 - RNA, 32 nt, Human
aagguugcagugagccacgaucacaccacagu

SEQ ID NO: 27148 - RNA, 32 nt, Human
aagguugcagugagccauaaucgugccacugc

SEQ ID NO: 27149 - RNA, 32 nt, Human
aagguugcagugagccgagaccacgccacugc

SEQ ID NO: 27150 - RNA, 32 nt, Human
aagguugcagugagccgagaucacaccacugc

SEQ ID NO: 27151 - RNA, 32 nt, Human
aagguugcagugagccgagaucaugccacugc

SEQ ID NO: 27152 - RNA, 32 nt, Human
aagguugcagugagccgagauugcgccacugc

SEQ ID NO: 27153 - RNA, 32 nt, Human
aagguugcagugagccgagauugugccacugc

SEQ ID NO: 27154 - RNA, 32 nt, Human
aagguugcagugagccgagauuucaccagugc

SEQ ID NO: 27155 - RNA, 32 nt, Human
aagguugcagugagccgugaucaugccacugc

SEQ ID NO: 27156 - RNA, 32 nt, Human
aagguugcagugagcuaugauugcacccacug

SEQ ID NO: 27157 - RNA, 32 nt, Human
aagguugcagugagcuaugauuguguggccac

SEQ ID NO: 27158 - RNA, 32 nt, Human
aagguugcagugagcugagaucacaccacugc

SEQ ID NO: 27159 - RNA, 32 nt, Human
aagguugcagugagcugagaucgcgccacugc

SEQ ID NO: 27160 - RNA, 32 nt, Human
aagguugcagugagcugagauggugccacugc

SEQ ID NO: 27161 - RNA, 32 nt, Human
aagguugcagugagcugagauugcgcugcugc

SEQ ID NO: 27162 - RNA, 32 nt, Human
aagguugcagugagcugagauugugcugcugc

SEQ ID NO: 27163 - RNA, 32 nt, Human
aagguugcagugagcugaggucgugcuacugc

SEQ ID NO: 27164 - RNA, 32 nt, Human
aagguugcagugagcuggaaucgugccacucc

SEQ ID NO: 27165 - RNA, 32 nt, Human
aagguugcagugagcugucauugcgccacugc

SEQ ID NO: 27166 - RNA, 32 nt, Human
aagguugcagugagucaugauggugccacugc

SEQ ID NO: 27167 - RNA, 15 nt, Human
aagguugccugcaaa

SEQ ID NO: 27168 - RNA, 32 nt, Human
aagguugcgccacugcacuccagccugggcaa

SEQ ID NO: 27169 - RNA, 32 nt, Human
aagguugcgccacuguacuccagccuggguga

SEQ ID NO: 27170 - RNA, 32 nt, Human
aagguugcucacugcaaauauaaaucucagca

SEQ ID NO: 27171 - RNA, 32 nt, Human
aagguugcuggaaaaugccuuugguggcuuua

SEQ ID NO: 27172 - RNA, 24 nt, Human
aagguuggaauuaacaggcgugag

SEQ ID NO: 27173 - RNA, 32 nt, Human
aagguuggagcagugcuuuucacuacuuugua

SEQ ID NO: 27174 - RNA, 32 nt, Human
aagguuggcugcagagaauuccugccaucuug

SEQ ID NO: 27175 - RNA, 32 nt, Human
aagguugggcuggugcucacagcuguaauccc

SEQ ID NO: 27176 - RNA, 32 nt, Human
aagguuggggaggggaacaggagagaggcaau

SEQ ID NO: 27177 - RNA, 32 nt, Human
aagguuguagugagccaagaucguaccacugc

SEQ ID NO: 27178 - RNA, 32 nt, Human
aagguugucacaucuucccaagccaggccagc

SEQ ID NO: 27179 - RNA, 32 nt, Human
aagguugugaaaccuuuuaacucuccacagug

SEQ ID NO: 27180 - RNA, 32 nt, Human
aagguugugaugugugcacgguauggcacagg

SEQ ID NO: 27181 - RNA, 19 nt, Human
aagguugugccacugcacu

SEQ ID NO: 27182 - RNA, 32 nt, Human
aagguugugccacugcacuccagccugggcaa

SEQ ID NO: 27183 - RNA, 32 nt, Human
aagguugugcugguaagacaucucugacgaag

SEQ ID NO: 27184 - RNA, 22 nt, Human
aagguuguguagcugugucaug

SEQ ID NO: 27185 - RNA, 32 nt, Human
aagguuuaagaaagaaaacaaaaccaacaguu

SEQ ID NO: 27186 - RNA, 32 nt, Human
aagguuuauggauuugacagggugcaugucac

SEQ ID NO: 27187 - RNA, 32 nt, Human
aagguuucaagugauccucccgccucagccug

SEQ ID NO: 27188 - RNA, 32 nt, Human
aagguuucagcgacaaucuccaugcagacgaa

SEQ ID NO: 27189 - RNA, 32 nt, Human
aagguuucauggagcagggagggagacggcua

SEQ ID NO: 27190 - RNA, 32 nt, Human
aagguuucaugggacugaguucugucccugcu

SEQ ID NO: 27191 - RNA, 32 nt, Human
aagguuucccuacauuucccaggcuggucuug

SEQ ID NO: 27192 - RNA, 32 nt, Human
aagguuucccuaugggcaccagacuccaugua

SEQ ID NO: 27193 - RNA, 32 nt, Human
aagguuuccuugcccauuaucagaaggaaaaa

SEQ ID NO: 27194 - RNA, 32 nt, Human
aagguuucgagagcauuccuacucacauaagu

SEQ ID NO: 27195 - RNA, 32 nt, Human
aagguuucugaggacuucucccaggagaagac

SEQ ID NO: 27196 - RNA, 32 nt, Human
aagguuucuguuuaaugcaucuugccuuaucu

SEQ ID NO: 27197 - RNA, 32 nt, Human
aagguuugugaugaugucuguacuaguuagcu

SEQ ID NO: 27198 - RNA, 32 nt, Human
aagguuuuauagaugucuuugccuucccuucu

SEQ ID NO: 27199 - RNA, 32 nt, Human
aagguuuuccaaaauuaagaguacuugaguag

SEQ ID NO: 27200 - RNA, 32 nt, Human
aagguuuuccccucaacaauuuugaagcugug

SEQ ID NO: 27201 - RNA, 32 nt, Human
aagguuuugcagaggagaugaaguuucaguug

SEQ ID NO: 27202 - RNA, 32 nt, Human
aagguuuuuaucuguguagaauggguguuuga

SEQ ID NO: 27203 - RNA, 32 nt, Human
aagguuuuugcaaauaagaauaugaaaaauac

SEQ ID NO: 27204 - RNA, 32 nt, Human
aaguaaaaagucagauuucauuuccauuuacc

SEQ ID NO: 27205 - RNA, 32 nt, Human
aaguaaaaauuagcugggcgugguggcacaug

SEQ ID NO: 27206 - RNA, 32 nt, Human
aaguaaaagaaaaagaaaagaaaauaacuccc

SEQ ID NO: 27207 - RNA, 32 nt, Human
aaguaaaagaccgaagaaggaggcuggagaga

SEQ ID NO: 27208 - RNA, 32 nt, Human
aaguaaaagcaucacagcuuaccauuuuucuu

SEQ ID NO: 27209 - RNA, 32 nt, Human
aaguaaaagcuucguuauacauuugacuaaga

SEQ ID NO: 27210 - RNA, 32 nt, Human
aaguaaaaguccccuagugauagccacuauuc

SEQ ID NO: 27211 - RNA, 32 nt, Human
aaguaaaauggcaggggcagagugcagcuuaa

SEQ ID NO: 27212 - RNA, 32 nt, Human
aaguaaacaaaggucucugguuuuccuaggca

SEQ ID NO: 27213 - RNA, 19 nt, Human
aaguaaacaccagcagcuc

SEQ ID NO: 27214 - RNA, 32 nt, Human
aaguaaacagauuugauugugaggcuucuaau

SEQ ID NO: 27215 - RNA, 32 nt, Human
aaguaaaccaaaauguuaacagugaucaucuc

SEQ ID NO: 27216 - RNA, 32 nt, Human
aaguaaaccaacauacugcauguaaguaucaa

SEQ ID NO: 27217 - RNA, 32 nt, Human
aaguaaaccauugcuaucuuucaccuuaaaua

SEQ ID NO: 27218 - RNA, 32 nt, Human
aaguaaacgauaaaauguggauuaaagugccc

SEQ ID NO: 27219 - RNA, 32 nt, Human
aaguaaacucuaaguacaugguaaguggcagu

SEQ ID NO: 27220 - RNA, 32 nt, Human
aaguaaagaacagccaaguggccaggugcggu

SEQ ID NO: 27221 - RNA, 32 nt, Human
aaguaaagaagcaggcugggcuuggugcccac

SEQ ID NO: 27222 - RNA, 32 nt, Human
aaguaaagaauaugaugaguacagcaccuaca

SEQ ID NO: 27223 - RNA, 32 nt, Human
aaguaaagauguuugaauacuuaaacacuauc

SEQ ID NO: 27224 - RNA, 32 nt, Human
aaguaaagcccaaguguucuuuagcuuuuuau

SEQ ID NO: 27225 - RNA, 31 nt, Human
aaguaaaggaagagagaaaugacugguggcc

SEQ ID NO: 27226 - RNA, 32 nt, Human
aaguaaaggagagugaugagguggugugggga

SEQ ID NO: 27227 - RNA, 32 nt, Human
aaguaaaggggcccugagccugccugcccggc

SEQ ID NO: 27228 - RNA, 32 nt, Human
aaguaaauaacaaaagcccccauacucuucug

SEQ ID NO: 27229 - RNA, 32 nt, Human
aaguaaauacaguuccagauggguuauugcag

SEQ ID NO: 27230 - RNA, 32 nt, Human
aaguaaauaugggaaguuauugccaaaugaga

SEQ ID NO: 27231 - RNA, 32 nt, Human
aaguaaaucugcaacccuggggaggaccccaa

SEQ ID NO: 27232 - RNA, 32 nt, Human
aaguaaaucuuuggcuuuuuguucuguuggug

SEQ ID NO: 27233 - RNA, 32 nt, Human
aaguaaaugucaguaaaacuauuuuuccugaa

SEQ ID NO: 27234 - RNA, 32 nt, Human
aaguaaauuggcugggugugguggcucaugca

SEQ ID NO: 27235 - RNA, 32 nt, Human
aaguaaauuuuaauuuucaucauuccauggag

SEQ ID NO: 27236 - RNA, 32 nt, Human
aaguaacaaagugauggcuuggaacacugucu

SEQ ID NO: 27237 - RNA, 32 nt, Human
aaguaacacacagaggaggauguguguguaug

SEQ ID NO: 27238 - RNA, 32 nt, Human
aaguaacacacuuauuuuugccuguguaugga

SEQ ID NO: 27239 - RNA, 32 nt, Human
aaguaacacauaaagaugucaccagaagacaa

SEQ ID NO: 27240 - RNA, 32 nt, Human
aaguaacacauacauguuuaauugauucuguu

SEQ ID NO: 27241 - RNA, 32 nt, Human
aaguaacagugcauaaaaguuuggaaaauaug

SEQ ID NO: 27242 - RNA, 32 nt, Human
aaguaacauuuacuagcgcaauacugcacuug

SEQ ID NO: 27243 - RNA, 32 nt, Human
aaguaaccaagcuguugacuuucuuacuacuu

SEQ ID NO: 27244 - RNA, 32 nt, Human
aaguaaccauuuuacagaaggaugaggaucag

SEQ ID NO: 27245 - RNA, 32 nt, Human
aaguaacccugccucuaccuuacgagagagcu

SEQ ID NO: 27246 - RNA, 32 nt, Human
aaguaacucgcacuggucacacaucuguaagu

SEQ ID NO: 27247 - RNA, 32 nt, Human
aaguaacugcaggaguuggaggucaggaggca

SEQ ID NO: 27248 - RNA, 32 nt, Human
aaguaacuggaaaagaucuuguagauguggcc

SEQ ID NO: 27249 - RNA, 19 nt, Human
aaguaacugggacugcagg

SEQ ID NO: 27250 - RNA, 32 nt, Human
aaguaacugggacugcaggcacaugccaccac

SEQ ID NO: 27251 - RNA, 32 nt, Human
aaguaagaaaaugcaaguucuaaaaauagacu

SEQ ID NO: 27252 - RNA, 32 nt, Human
aaguaagaaauuuugcuuguuguuuugcaaac

SEQ ID NO: 27253 - RNA, 32 nt, Human
aaguaagaacaaggaggaauuuguuucuaaaa

SEQ ID NO: 27254 - RNA, 32 nt, Human
aaguaagaagagcaggaagaagaagagcgcca

SEQ ID NO: 27255 - RNA, 32 nt, Human
aaguaagaggagcuucaucucagccugcuagc

SEQ ID NO: 27256 - RNA, 32 nt, Human
aaguaagaggcaacugcccuguuuuuguuugu

SEQ ID NO: 27257 - RNA, 32 nt, Human
aaguaagaggguggguuccaaggguggcccaa

SEQ ID NO: 27258 - RNA, 32 nt, Human
aaguaagauaaauagcuagacgaccuuggcac

SEQ ID NO: 27259 - RNA, 32 nt, Human
aaguaagcaagaagagggccugggagaagagu

SEQ ID NO: 27260 - RNA, 32 nt, Human
aaguaagccagcugcuggauuuggcucugggc

SEQ ID NO: 27261 - RNA, 32 nt, Human
aaguaagccuaaaaggaaucuuugaggaaaaa

SEQ ID NO: 27262 - RNA, 32 nt, Human
aaguaaggagagggacuggacccccuggaagc

SEQ ID NO: 27263 - RNA, 32 nt, Human
aaguaaggagcugguaccuaccuacacagcug

SEQ ID NO: 27264 - RNA, 32 nt, Human
aaguaaggcucagagagaagcaaccaacugga

SEQ ID NO: 27265 - RNA, 32 nt, Human
aaguaagggggaacuccugcuuugggcuggga

SEQ ID NO: 27266 - RNA, 32 nt, Human
aaguaaguauccccacuuucaggguagcaucc

SEQ ID NO: 27267 - RNA, 32 nt, Human
aaguaaguauuccucgggauguuuuuauauaa

SEQ ID NO: 27268 - RNA, 32 nt, Human
aaguaagugagaaaggaaagacuuuccaacaa

SEQ ID NO: 27269 - RNA, 32 nt, Human
aaguaagugguaccagccacaacugaauaucc

SEQ ID NO: 27270 - RNA, 32 nt, Human
aaguaaguucaucacgauaucagggaagaugu

SEQ ID NO: 27271 - RNA, 32 nt, Human
aaguaaguugcagaaaucagacacuuuauaug

SEQ ID NO: 27272 - RNA, 32 nt, Human
aaguaaguugcuuugcaccgccuacuuaauuc

SEQ ID NO: 27273 - RNA, 32 nt, Human
aaguaaguuuuuaaaacuuuuuauuuauuuau

SEQ ID NO: 27274 - RNA, 32 nt, Human
aaguaauauuuuauacuuaauuuuaggaguuu

SEQ ID NO: 27275 - RNA, 32 nt, Human
aaguaaucccugauucuauaccgaaguuuuau

SEQ ID NO: 27276 - RNA, 32 nt, Human
aaguaauccuccugccucagccuaccaaguag

SEQ ID NO: 27277 - RNA, 32 nt, Human
aaguaauccuccugccuuagcauuccagagug

SEQ ID NO: 27278 - RNA, 32 nt, Human
aaguaaucucagaauguuggccgggcauggug

SEQ ID NO: 27279 - RNA, 32 nt, Human
aaguaaucuccuguccuuuggcagaagcuccu

SEQ ID NO: 27280 - RNA, 32 nt, Human
aaguaaucucugaagcccagauuuccuaagga

SEQ ID NO: 27281 - RNA, 32 nt, Human
aaguaaucugccgcauccagaaugaacagaac

SEQ ID NO: 27282 - RNA, 32 nt, Human
aaguaaucuuuguucccaagggcugauggcuu

SEQ ID NO: 27283 - RNA, 32 nt, Human
aaguaaugaauucuggccagguacaguggcuc

SEQ ID NO: 27284 - RNA, 32 nt, Human
aaguaauggaaagcaaaagcgaaggacagacc

SEQ ID NO: 27285 - RNA, 32 nt, Human
aaguaaugguugauccugauguacaugaugau

SEQ ID NO: 27286 - RNA, 32 nt, Human
aaguaauuaugauauugcaaaagugauacuua

SEQ ID NO: 27287 - RNA, 32 nt, Human
aaguaauuauugauggcucugccugcuuagga

SEQ ID NO: 27288 - RNA, 32 nt, Human
aaguaauucuuggcugggcaugguggcucacg

SEQ ID NO: 27289 - RNA, 32 nt, Human
aaguaauugugugguuaucugccauuuaaaag

SEQ ID NO: 27290 - RNA, 32 nt, Human
aaguaauuuuaugaggaugaaacucauagcuu

SEQ ID NO: 27291 - RNA, 32 nt, Human
aaguacaaacaugcaucucgugauaguccugc

SEQ ID NO: 27292 - RNA, 32 nt, Human
aaguacaaauacaaugcagagcucauuuucag

SEQ ID NO: 27293 - RNA, 32 nt, Human
aaguacaacuccauuagaaaaauucagacagc

SEQ ID NO: 27294 - RNA, 32 nt, Human
aaguacaaguuuaggcugggcgugguggcuca

SEQ ID NO: 27295 - RNA, 32 nt, Human
aaguacacgauccgcuggcauccaggaggcug

SEQ ID NO: 27296 - RNA, 32 nt, Human
aaguacacuaaauauauuacuacuucacuggg

SEQ ID NO: 27297 - RNA, 32 nt, Human
aaguacacuguacacaacaucgcuaaugaggg

SEQ ID NO: 27298 - RNA, 32 nt, Human
aaguacagguauaucucggagauauugugggu

SEQ ID NO: 27299 - RNA, 32 nt, Human
aaguacagugaauuuugcuuuauugcaaagcu

SEQ ID NO: 27300 - RNA, 32 nt, Human
aaguacagugcuguuacguggcacuguacagu

SEQ ID NO: 27301 - RNA, 32 nt, Human
aaguacauccacccucuuaaucccaaaagaac

SEQ ID NO: 27302 - RNA, 32 nt, Human
aaguacaugguacuuuuacaguaccauguacu

SEQ ID NO: 27303 - RNA, 32 nt, Human
aaguaccaacucuauggacccaggacagagca

SEQ ID NO: 27304 - RNA, 32 nt, Human
aaguaccacuccauccagccuugggcaagaug

SEQ ID NO: 27305 - RNA, 32 nt, Human
aaguaccacuugucuuuucugugaauuaugac

SEQ ID NO: 27306 - RNA, 32 nt, Human
aaguaccagagaugucuccaagagcaccagca

SEQ ID NO: 27307 - RNA, 24 nt, Human
aaguaccaggauuauaggcaugag

SEQ ID NO: 27308 - RNA, 32 nt, Human
aaguaccauuagcuacagugaucuuagcuucc

SEQ ID NO: 27309 - RNA, 32 nt, Human
aaguaccccaguuucacacauaccaaaccaag

SEQ ID NO: 27310 - RNA, 32 nt, Human
aaguaccggaacucagauuuugcccaucucau

SEQ ID NO: 27311 - RNA, 32 nt, Human
aaguaccuccaugccaagucccugcacuguug

SEQ ID NO: 27312 - RNA, 32 nt, Human
aaguaccugaugcugauugauuccacuaauag

SEQ ID NO: 27313 - RNA, 32 nt, Human
aaguaccugccugcggccaacaugauggcugg

SEQ ID NO: 27314 - RNA, 32 nt, Human
aaguaccugccugcggccaacauguggcuggg

SEQ ID NO: 27315 - RNA, 25 nt, Human
aaguaccugggacuacaggcgugag

SEQ ID NO: 27316 - RNA, 32 nt, Human
aaguaccugggauuacaggagcucccaccaag

SEQ ID NO: 27317 - RNA, 23 nt, Human
aaguaccuucuguggacaaggua

SEQ ID NO: 27318 - RNA, 32 nt, Human
aaguaccuuggaggaggagagguuggugacau

SEQ ID NO: 27319 - RNA, 32 nt, Human
aaguacggugucauuuucacagucuccagggu

SEQ ID NO: 27320 - RNA, 32 nt, Human
aaguacuaaggccgcagacuccuguccgcagc

SEQ ID NO: 27321 - RNA, 32 nt, Human
aaguacuacagcccugggggugucacaccgcu

SEQ ID NO: 27322 - RNA, 32 nt, Human
aaguacucggauuacaggugugagucaccgcg

SEQ ID NO: 27323 - RNA, 32 nt, Human
aaguacucucucuccuaaagacaccaccuucc

SEQ ID NO: 27324 - RNA, 32 nt, Human
aaguacucuguacaacaaacccgugacaagag

SEQ ID NO: 27325 - RNA, 32 nt, Human
aaguacugaauuagaaaccaggaaguuuuagu

SEQ ID NO: 27326 - RNA, 32 nt, Human
aaguacugaccagcaaaauggagaagaucaga

SEQ ID NO: 27327 - RNA, 32 nt, Human
aaguacugcccuuuuguguguuagcagucaaa

SEQ ID NO: 27328 - RNA, 32 nt, Human
aaguacugcugaacugugagugcaguauucua

SEQ ID NO: 27329 - RNA, 24 nt, Human
aaguacugggacuacaggcgugag

SEQ ID NO: 27330 - RNA, 32 nt, Human
aaguacugggauuacaggcaugaaccaccgug

SEQ ID NO: 27331 - RNA, 24 nt, Human
aaguacugggauuacaggcaugag

SEQ ID NO: 27332 - RNA, 32 nt, Human
aaguacugggauuacaggcaugagccaccaca

SEQ ID NO: 27333 - RNA, 32 nt, Human
aaguacugggauuacaggcaugagccacugca

SEQ ID NO: 27334 - RNA, 24 nt, Human
aaguacugggauuacaggccugag

SEQ ID NO: 27335 - RNA, 32 nt, Human
aaguacugggauuacaggccugagccaccgcg

SEQ ID NO: 27336 - RNA, 32 nt, Human
aaguacugggauuacaggcgugaaccacugcc

SEQ ID NO: 27337 - RNA, 24 nt, Human
aaguacugggauuacaggcgugag

SEQ ID NO: 27338 - RNA, 32 nt, Human
aaguacugggauuacaggcgugagccaccacg

SEQ ID NO: 27339 - RNA, 32 nt, Human
aaguacugggauuacaggcgugagccaccacu

SEQ ID NO: 27340 - RNA, 32 nt, Human
aaguacugggauuacaggcgugagccaccaug

SEQ ID NO: 27341 - RNA, 32 nt, Human
aaguacugggauuacaggcgugagccaccgug

SEQ ID NO: 27342 - RNA, 32 nt, Human
aaguacugggauuacaggcgugagccaccucg

SEQ ID NO: 27343 - RNA, 32 nt, Human
aaguacugggauuacaggcgugagccacggca

SEQ ID NO: 27344 - RNA, 32 nt, Human
aaguacugggauuacaggcgugagccacugca

SEQ ID NO: 27345 - RNA, 32 nt, Human
aaguacugggauuacaggcgugagccacugug

SEQ ID NO: 27346 - RNA, 32 nt, Human
aaguacugggauuacaggcgugagcccccacg

SEQ ID NO: 27347 - RNA, 24 nt, Human
aaguacugggauuacaggugagag

SEQ ID NO: 27348 - RNA, 32 nt, Human
aaguacugggauuacaggugagagucacugcu

SEQ ID NO: 27349 - RNA, 32 nt, Human
aaguacugggauuacaggugcccaccaccacc

SEQ ID NO: 27350 - RNA, 24 nt, Human
aaguacugggauuauaggcuugag

SEQ ID NO: 27351 - RNA, 24 nt, Human
aaguacugggauuauaggugugag

SEQ ID NO: 27352 - RNA, 23 nt, Human
aaguacugggauucuguguagag

SEQ ID NO: 27353 - RNA, 32 nt, Human
aaguacugggauuuaggcaugagccaccacau

SEQ ID NO: 27354 - RNA, 32 nt, Human
aaguacuggguuuacaggugugagccacugug

SEQ ID NO: 27355 - RNA, 32 nt, Human
aaguacuuagucauuuuccugaaagugugguc

SEQ ID NO: 27356 - RNA, 32 nt, Human
aaguacuucaggcugggcacaguggcucaugc

SEQ ID NO: 27357 - RNA, 32 nt, Human
aaguacuuuuuauuccagcugcugaaaauggu

SEQ ID NO: 27358 - RNA, 32 nt, Human
aaguacuuuuuccagcucugcaagucaccuau

SEQ ID NO: 27359 - RNA, 32 nt, Human
aaguagaaaaugcagaggcucgggcuuguuug

SEQ ID NO: 27360 - RNA, 32 nt, Human
aaguagaaacuuucuauaaccuaaaugauguu

SEQ ID NO: 27361 - RNA, 32 nt, Human
aaguagaacccugggagccagaggugaauaca

SEQ ID NO: 27362 - RNA, 32 nt, Human
aaguagaagaggaggagggauucuggucuuca

SEQ ID NO: 27363 - RNA, 23 nt, Human
aaguagaauauaaaguaucaaca

SEQ ID NO: 27364 - RNA, 32 nt, Human
aaguagacaugacaagugaacagcagagcugg

SEQ ID NO: 27365 - RNA, 32 nt, Human
aaguagaccuuuuucauucaugagauuccuau

SEQ ID NO: 27366 - RNA, 32 nt, Human
aaguagagaagaacauaagaagaaaaacccag

SEQ ID NO: 27367 - RNA, 31 nt, Human
aaguagagaccaagagaaaaacucauugauu

SEQ ID NO: 27368 - RNA, 32 nt, Human
aaguagagacgggguuucaccuguuagccagg

SEQ ID NO: 27369 - RNA, 32 nt, Human
aaguagagagcaccggccccucaaggaccaug

SEQ ID NO: 27370 - RNA, 32 nt, Human
aaguagagaggggguuucuccauguuggucag

SEQ ID NO: 27371 - RNA, 32 nt, Human
aaguagagaugagguuucuccauguuggucag

SEQ ID NO: 27372 - RNA, 32 nt, Human
aaguagagauggggucucacccuguuggccag

SEQ ID NO: 27373 - RNA, 32 nt, Human
aaguagagaugggguuucaccauguugcccag

SEQ ID NO: 27374 - RNA, 32 nt, Human
aaguagagaugggguuucaccauguuggucag

SEQ ID NO: 27375 - RNA, 32 nt, Human
aaguagagcuguuauguuuuucuugaacuuua

SEQ ID NO: 27376 - RNA, 21 nt, Human
aaguagaggaaauacauugag

SEQ ID NO: 27377 - RNA, 32 nt, Human
aaguagaggaugccgaggagaaaacagcaggc

SEQ ID NO: 27378 - RNA, 32 nt, Human
aaguagagucugaaagagcagugggaugggag

SEQ ID NO: 27379 - RNA, 32 nt, Human
aaguagaugcuggcuuaaacaaaugauaaauc

SEQ ID NO: 27380 - RNA, 32 nt, Human
aaguagauuagugguugcuucgggaugggagg

SEQ ID NO: 27381 - RNA, 32 nt, Human
aaguagauuucaggcuaggugcgguggcucac

SEQ ID NO: 27382 - RNA, 32 nt, Human
aaguagcaaagcagcucucaagggcuugucag

SEQ ID NO: 27383 - RNA, 32 nt, Human
aaguagcaaauugccagcaaaaugucuuguac

SEQ ID NO: 27384 - RNA, 32 nt, Human
aaguagcaagaauagagcaaaauaucaaaucc

SEQ ID NO: 27385 - RNA, 32 nt, Human
aaguagcagagugaugggagcaaaauaggcac

SEQ ID NO: 27386 - RNA, 22 nt, Human
aaguagcagcccugaugucauu

SEQ ID NO: 27387 - RNA, 32 nt, Human
aaguagcagcuucucuauccaggaugaugagu

SEQ ID NO: 27388 - RNA, 32 nt, Human
aaguagcaggguggucagggugggagacacaa

SEQ ID NO: 27389 - RNA, 32 nt, Human
aaguagcagugagccgagaucgcgccacugca

SEQ ID NO: 27390 - RNA, 32 nt, Human
aaguagcauuccuccaccucaggccuugggua

SEQ ID NO: 27391 - RNA, 32 nt, Human
aaguagccaagaaaagaugagaaaaaucaaga

SEQ ID NO: 27392 - RNA, 18 nt, Human
aaguagccaccugaguuc

SEQ ID NO: 27393 - RNA, 32 nt, Human
aaguagccucaaguucuaaagaccauggcccc

SEQ ID NO: 27394 - RNA, 32 nt, Human
aaguagccucacucuuauuccucaagaauuaa

SEQ ID NO: 27395 - RNA, 32 nt, Human
aaguagcgagagaagagagaaaaugaagucgg

SEQ ID NO: 27396 - RNA, 23 nt, Human
aaguagcuaggacuacaggcgug

SEQ ID NO: 27397 - RNA, 19 nt, Human
aaguagcuaggacugcagg

SEQ ID NO: 27398 - RNA, 32 nt, Human
aaguagcugaaggucucuuacagauauaucaa

SEQ ID NO: 27399 - RNA, 19 nt, Human
aaguagcugagacugcagg

SEQ ID NO: 27400 - RNA, 21 nt, Human
aaguagcugagauuacaggcg

SEQ ID NO: 27401 - RNA, 23 nt, Human
aaguagcuggaauuacaggcgug

SEQ ID NO: 27402 - RNA, 32 nt, Human
aaguagcuggauuacaggcacgugccaucacg

SEQ ID NO: 27403 - RNA, 32 nt, Human
aaguagcuggauuacaggugcaugccacgaca

SEQ ID NO: 27404 - RNA, 25 nt, Human
aaguagcugggaccacaggcgugag

SEQ ID NO: 27405 - RNA, 32 nt, Human
aaguagcugggaccaccaugcccagcuaauuu

SEQ ID NO: 27406 - RNA, 19 nt, Human
aaguagcugggaccgcagg

SEQ ID NO: 27407 - RNA, 19 nt, Human
aaguagcugggacuacagg

SEQ ID NO: 27408 - RNA, 21 nt, Human
aaguagcugggacuacaggcg

SEQ ID NO: 27409 - RNA, 22 nt, Human
aaguagcugggacuacaggcgu

SEQ ID NO: 27410 - RNA, 23 nt, Human
aaguagcugggacuacaggcgug

SEQ ID NO: 27411 - RNA, 19 nt, Human
aaguagcugggacugcagg

SEQ ID NO: 27412 - RNA, 19 nt, Human
aaguagcugggacugcggg

SEQ ID NO: 27413 - RNA, 32 nt, Human
aaguagcugggacuucagagauggcuggagcc

SEQ ID NO: 27414 - RNA, 23 nt, Human
aaguagcugggaucacaggcgug

SEQ ID NO: 27415 - RNA, 20 nt, Human
aaguagcugggauuacaggc

SEQ ID NO: 27416 - RNA, 21 nt, Human
aaguagcugggauuacaggcg

SEQ ID NO: 27417 - RNA, 32 nt, Human
aaguagcuggggagguggauuuagcagaaggc

SEQ ID NO: 27418 - RNA, 32 nt, Human
aaguagcugugaaucagugagaaacugugacu

SEQ ID NO: 27419 - RNA, 32 nt, Human
aaguagcuuaagguauugugcaauggccuagc

SEQ ID NO: 27420 - RNA, 32 nt, Human
aaguagcuuacauugauuauuauaggggagga

SEQ ID NO: 27421 - RNA, 29 nt, Human
aaguagcuuccagaccagauacuaccugu

SEQ ID NO: 27422 - RNA, 24 nt, Human
aaguagcuugggacuacaggcgug

SEQ ID NO: 27423 - RNA, 32 nt, Human
aaguagcuuucauuuaaccaagcuaaauuauu

SEQ ID NO: 27424 - RNA, 32 nt, Human
aaguagcuuuuucuuuccuuccuuccuuccuc

SEQ ID NO: 27425 - RNA, 32 nt, Human
aaguaggaacaccccagccucagacagacaca

SEQ ID NO: 27426 - RNA, 32 nt, Human
aaguaggacacagagcagggcuuuucuuacca

SEQ ID NO: 27427 - RNA, 32 nt, Human
aaguaggagaagaaauggggaggacucgggug

SEQ ID NO: 27428 - RNA, 32 nt, Human
aaguaggagagggcugcugggaggcgagaggg

SEQ ID NO: 27429 - RNA, 32 nt, Human
aaguaggagggguggaggugagaaggagagag

SEQ ID NO: 27430 - RNA, 32 nt, Human
aaguaggcaaacugaggcucugggagauguag

SEQ ID NO: 27431 - RNA, 32 nt, Human
aaguaggcagggcuguguuccuuuguguagcc

SEQ ID NO: 27432 - RNA, 32 nt, Human
aaguaggccauggcuaggcagacaguggggac

SEQ ID NO: 27433 - RNA, 32 nt, Human
aaguaggcccaucuuggcucugaggcugagag

SEQ ID NO: 27434 - RNA, 32 nt, Human
aaguagggagcagggaaagaagagugagccug

SEQ ID NO: 27435 - RNA, 26 nt, Human
aaguagggaggaggagguugcaguga

SEQ ID NO: 27436 - RNA, 32 nt, Human
aaguagggaggaggagguugcagugagcugag

SEQ ID NO: 27437 - RNA, 32 nt, Human
aaguagggagggggaagcaggagaaugagacu

SEQ ID NO: 27438 - RNA, 32 nt, Human
aaguagggcagggcuuuucucucacuuacauu

SEQ ID NO: 27439 - RNA, 32 nt, Human
aaguaggggagaagggacaggccccagcgcuu

SEQ ID NO: 27440 - RNA, 32 nt, Human
aaguaggggauugcguucccuccagucgcaga

SEQ ID NO: 27441 - RNA, 32 nt, Human
aaguaggggcuggaaccauaagaagaauguuu

SEQ ID NO: 27442 - RNA, 32 nt, Human
aaguaggggugcaauaugucagguguggggcc

SEQ ID NO: 27443 - RNA, 32 nt, Human
aaguagggucuugaggaugcagggguuagaca

SEQ ID NO: 27444 - RNA, 32 nt, Human
aaguagguuaccauuuugaggcaguuggauau

SEQ ID NO: 27445 - RNA, 32 nt, Human
aaguagguuguuuguuuuauaaucagauaaaa

SEQ ID NO: 27446 - RNA, 31 nt, Human
aaguaguacagcuagagcccagggucccugc

SEQ ID NO: 27447 - RNA, 32 nt, Human
aaguaguaguguccuccuaguauauuaguuug

SEQ ID NO: 27448 - RNA, 32 nt, Human
aaguagucagggaaugggggagguggggaguu

SEQ ID NO: 27449 - RNA, 32 nt, Human
aaguagucaguggaagagaguagagcucaaaa

SEQ ID NO: 27450 - RNA, 32 nt, Human
aaguagucauggcaaguccuguuuuuaagacc

SEQ ID NO: 27451 - RNA, 22 nt, Human
aaguaguccaggggcgguggcu

SEQ ID NO: 27452 - RNA, 32 nt, Human
aaguagucccccauaggugaaauuuaaaagga

SEQ ID NO: 27453 - RNA, 19 nt, Human
aaguagucucggguaugcu

SEQ ID NO: 27454 - RNA, 32 nt, Human
aaguagugagagaaggaaggggauaggcagcu

SEQ ID NO: 27455 - RNA, 32 nt, Human
aaguagugcuaagaaaauuaaaagaauaaaac

SEQ ID NO: 27456 - RNA, 32 nt, Human
aaguagugguauuuugguaugugcaaauauuu

SEQ ID NO: 27457 - RNA, 32 nt, Human
aaguaguuccccaggcugcccucgguggugag

SEQ ID NO: 27458 - RNA, 32 nt, Human
aaguaguugcccaagggccagcucaguuuauc

SEQ ID NO: 27459 - RNA, 32 nt, Human
aaguaguugcuuaagaaauacuuguugaagga

SEQ ID NO: 27460 - RNA, 32 nt, Human
aaguauaacugaucuuugcagaaaguggggaa

SEQ ID NO: 27461 - RNA, 32 nt, Human
aaguauaagugaauauauacacacacauacag

SEQ ID NO: 27462 - RNA, 32 nt, Human
aaguauacaaagcaaccacaugcuaaaugguu

SEQ ID NO: 27463 - RNA, 32 nt, Human
aaguauacacaaaaaucagauuuaguaacuaa

SEQ ID NO: 27464 - RNA, 32 nt, Human
aaguauacauguggcuucacauuuauuaaaca

SEQ ID NO: 27465 - RNA, 32 nt, Human
aaguauacauuuaguuaacacacauauaucug

SEQ ID NO: 27466 - RNA, 32 nt, Human
aaguauagaugaagaugaagaggcagaauuga

SEQ ID NO: 27467 - RNA, 32 nt, Human
aaguauaucugugcuucacuggaagaguugaa

SEQ ID NO: 27468 - RNA, 32 nt, Human
aaguauaugauccaccaugcuaaugacacuug

SEQ ID NO: 27469 - RNA, 32 nt, Human
aaguauaugggguaggccgggugcaguggcuc

SEQ ID NO: 27470 - RNA, 32 nt, Human
aaguauauugaauaguucuuugacagaauuug

SEQ ID NO: 27471 - RNA, 32 nt, Human
aaguauauugauagcuuuguagguacaggaaa

SEQ ID NO: 27472 - RNA, 32 nt, Human
aaguaucacuagcucgcuuucuugcuguccaa

SEQ ID NO: 27473 - RNA, 32 nt, Human
aaguaucacucaguugauagucuggaaugcau

SEQ ID NO: 27474 - RNA, 32 nt, Human
aaguauccagagaguuuccaggggguuucuca

SEQ ID NO: 27475 - RNA, 32 nt, Human
aaguauccaguauuugaucacauuauuauaaa

SEQ ID NO: 27476 - RNA, 32 nt, Human
aaguaucuacuucuaaaauuaccuaguugaaa

SEQ ID NO: 27477 - RNA, 32 nt, Human
aaguaucuccaggcuccagcacuugcuuagcu

SEQ ID NO: 27478 - RNA, 23 nt, Human
aaguaucugggaccacaggcgug

SEQ ID NO: 27479 - RNA, 32 nt, Human
aaguaucugugagaacagccugggagaagaau

SEQ ID NO: 27480 - RNA, 32 nt, Human
aaguaugaaagccguguguaggcccuucugug

SEQ ID NO: 27481 - RNA, 24 nt, Human
aaguaugaaauacaguuuuuacca

SEQ ID NO: 27482 - RNA, 29 nt, Human
aaguaugaauaccacagacaacgguguca

SEQ ID NO: 27483 - RNA, 32 nt, Human
aaguaugacaggcaggugaacuuuagucaagu

SEQ ID NO: 27484 - RNA, 32 nt, Human
aaguaugagccuguggcuuccuuugugcauuu

SEQ ID NO: 27485 - RNA, 32 nt, Human
aaguaugagugcugauucaaaccaaagcugcc

SEQ ID NO: 27486 - RNA, 32 nt, Human
aaguaugaucuuauguuagaaaccagauuuaa

SEQ ID NO: 27487 - RNA, 32 nt, Human
aaguaugcaagguuucugaaucucucugguag

SEQ ID NO: 27488 - RNA, 32 nt, Human
aaguaugcagagccccaugaguagccaggaua

SEQ ID NO: 27489 - RNA, 32 nt, Human
aaguaugcagagccgugaacgucauggcaugu

SEQ ID NO: 27490 - RNA, 32 nt, Human
aaguaugcugagcuagaguugaaggaagcuuc

SEQ ID NO: 27491 - RNA, 32 nt, Human
aaguaugcuugaaagaaugucacuaacugguc

SEQ ID NO: 27492 - RNA, 32 nt, Human
aaguaugcuuugccuuauuuccacauuuaaac

SEQ ID NO: 27493 - RNA, 32 nt, Human
aaguauggcgugugccucaucgggcugaagcg

SEQ ID NO: 27494 - RNA, 32 nt, Human
aaguaugguggaaacucaauucaacuccaguu

SEQ ID NO: 27495 - RNA, 32 nt, Human
aaguaugucccgcugccuggagagauggccca

SEQ ID NO: 27496 - RNA, 32 nt, Human
aaguauguccuguuuucugcuauaauucuuuc

SEQ ID NO: 27497 - RNA, 32 nt, Human
aaguaugugggaggggacgggcgggacgagcu

SEQ ID NO: 27498 - RNA, 32 nt, Human
aaguauguguagcuggaaacaaaaaugagcgu

SEQ ID NO: 27499 - RNA, 32 nt, Human
aaguauguugcugaaauugaaaaagaaaaaga

SEQ ID NO: 27500 - RNA, 32 nt, Human
aaguauuaccauuuaaagagugccuccugugu

SEQ ID NO: 27501 - RNA, 32 nt, Human
aaguauuaggcugcugucagggagaggauggc

SEQ ID NO: 27502 - RNA, 32 nt, Human
aaguauuauuuauuaggaaucuaaauugugga

SEQ ID NO: 27503 - RNA, 31 nt, Human
aaguauucaaauaaauaugguuugaauaugu

SEQ ID NO: 27504 - RNA, 32 nt, Human
aaguauucaaugcuuagaauacuaaaagguuu

SEQ ID NO: 27505 - RNA, 32 nt, Human
aaguauucaguaggaauuacaauaugauguua

SEQ ID NO: 27506 - RNA, 32 nt, Human
aaguauucagugguaccuggaggucuggacag

SEQ ID NO: 27507 - RNA, 32 nt, Human
aaguauuccuaugccagagcagugccaacucu

SEQ ID NO: 27508 - RNA, 32 nt, Human
aaguauuccuucauugggcuucauccuuuuag

SEQ ID NO: 27509 - RNA, 32 nt, Human
aaguauucuuaauuauaacuugccuuucagcg

SEQ ID NO: 27510 - RNA, 32 nt, Human
aaguauugagaaggggaaggggauuucucacu

SEQ ID NO: 27511 - RNA, 24 nt, Human
aaguauugagauuacaggcaugag

SEQ ID NO: 27512 - RNA, 32 nt, Human
aaguauugagauuacaggcaugagccacugca

SEQ ID NO: 27513 - RNA, 32 nt, Human
aaguauugcuugaacccaggaggcagagguug

SEQ ID NO: 27514 - RNA, 24 nt, Human
aaguauugggacuacaggcgugag

SEQ ID NO: 27515 - RNA, 32 nt, Human
aaguauugggguggagguugcagugagcagag

SEQ ID NO: 27516 - RNA, 32 nt, Human
aaguauugggguggagguugcagugagcggag

SEQ ID NO: 27517 - RNA, 32 nt, Human
aaguauuguuugcagcucuuuccaauaucuag

SEQ ID NO: 27518 - RNA, 32 nt, Human
aaguauuuccuuccccacaccauugcuacuca

SEQ ID NO: 27519 - RNA, 32 nt, Human
aaguauuuguuuaaucuugcuuugucuuuuca

SEQ ID NO: 27520 - RNA, 32 nt, Human
aaguauuuuagucuagaauuuucuccauuaca

SEQ ID NO: 27521 - RNA, 22 nt, Human
aaguauuuucauagucuuuacc

SEQ ID NO: 27522 - RNA, 32 nt, Human
aaguauuuucauauucuccugucuuuaaguuu

SEQ ID NO: 27523 - RNA, 32 nt, Human
aagucaaaaaccaaagguaagagaugcuaacu

SEQ ID NO: 27524 - RNA, 32 nt, Human
aagucaaacgcuaggaaguuugaauaaaacca

SEQ ID NO: 27525 - RNA, 32 nt, Human
aagucaaaggcugauguccuguuucucuuucc

SEQ ID NO: 27526 - RNA, 32 nt, Human
aagucaaaguaaaacuugcugccugaagaaca

SEQ ID NO: 27527 - RNA, 32 nt, Human
aagucaacacagacucauuuucuacuccgugu

SEQ ID NO: 27528 - RNA, 32 nt, Human
aagucaacacaugggaccuuugugucacauga

SEQ ID NO: 27529 - RNA, 32 nt, Human
aagucaacaggggcauguaggggaagagccuc

SEQ ID NO: 27530 - RNA, 32 nt, Human
aagucaacugugcaccugagcugcaguguaac

SEQ ID NO: 27531 - RNA, 32 nt, Human
aagucaagagugagagaagagaagaaaauuag

SEQ ID NO: 27532 - RNA, 32 nt, Human
aagucaagaguuugagaucagccuggagaaca

SEQ ID NO: 27533 - RNA, 32 nt, Human
aagucaagccaguuuccagaagggcuggggug

SEQ ID NO: 27534 - RNA, 32 nt, Human
aagucaagcuugugaaaugacauuuguguauu

SEQ ID NO: 27535 - RNA, 32 nt, Human
aagucaaggcugcugguuacauagacauggua

SEQ ID NO: 27536 - RNA, 32 nt, Human
aagucaagguaacagaacaaaagggaauccug

SEQ ID NO: 27537 - RNA, 32 nt, Human
aagucaauagaaagcucugccuugccagucuc

SEQ ID NO: 27538 - RNA, 32 nt, Human
aagucaaucauagaaagguugcaggaaacaag

SEQ ID NO: 27539 - RNA, 32 nt, Human
aagucaaucuuacuauauguaacuucagacaa

SEQ ID NO: 27540 - RNA, 32 nt, Human
aagucaauugaaaguccugccugcugcuuucc

SEQ ID NO: 27541 - RNA, 32 nt, Human
aagucacaagggggccugagugcaguggcuca

SEQ ID NO: 27542 - RNA, 32 nt, Human
aagucacacagcuaagaagcagugaugggaua

SEQ ID NO: 27543 - RNA, 31 nt, Human
aagucacacagcuaaucaauggcaaaguuag

SEQ ID NO: 27544 - RNA, 31 nt, Human
aagucacacagcuacugaguggcagagccag

SEQ ID NO: 27545 - RNA, 31 nt, Human
aagucacacagcuagugaagaccagagcagu

SEQ ID NO: 27546 - RNA, 32 nt, Human
aagucacacaucugcgcgccugugcggccccu

SEQ ID NO: 27547 - RNA, 32 nt, Human
aagucacacgcacacaugcacgcacacacaca

SEQ ID NO: 27548 - RNA, 32 nt, Human
aagucacagaagcuugcugggcuuuguacccu

SEQ ID NO: 27549 - RNA, 32 nt, Human
aagucaccaaaaacuuaaaggcauuaaaauaa

SEQ ID NO: 27550 - RNA, 32 nt, Human
aagucaccaccaugaaguuguucggcuucagg

SEQ ID NO: 27551 - RNA, 32 nt, Human
aagucaccaggccuccccuccuggcccaggug

SEQ ID NO: 27552 - RNA, 32 nt, Human
aagucaccagggugguccauucaagcugcaga

SEQ ID NO: 27553 - RNA, 32 nt, Human
aagucacccagcuguuucucagucccagaggc

SEQ ID NO: 27554 - RNA, 32 nt, Human
aagucaccccacuccuuagugccugcaccuca

SEQ ID NO: 27555 - RNA, 32 nt, Human
aagucacccccaacgcguccucucacaccguc

SEQ ID NO: 27556 - RNA, 32 nt, Human
aagucacccuuacaaagaagcuaauauggaaa

SEQ ID NO: 27557 - RNA, 32 nt, Human
aagucaccuucaaauuuccagagccauacaug

SEQ ID NO: 27558 - RNA, 32 nt, Human
aagucacgggcaggccgcagugguucuugcgu

SEQ ID NO: 27559 - RNA, 32 nt, Human
aagucacgucuuauguggaugguggcaggcaa

SEQ ID NO: 27560 - RNA, 32 nt, Human
aagucacuaaagauucauuuuuguugaguccu

SEQ ID NO: 27561 - RNA, 32 nt, Human
aagucacucauuaccacaacagugccacuuau

SEQ ID NO: 27562 - RNA, 32 nt, Human
aagucacugaggcuggaguacaguggcaugau

SEQ ID NO: 27563 - RNA, 32 nt, Human
aagucacugucccacuaugggucuccacuacc

SEQ ID NO: 27564 - RNA, 23 nt, Human
aagucacuuaaucucucuacaug

SEQ ID NO: 27565 - RNA, 32 nt, Human
aagucacuucaagaagucuggugguccccaga

SEQ ID NO: 27566 - RNA, 32 nt, Human
aagucacuucaccucucugugccuugguuucc

SEQ ID NO: 27567 - RNA, 32 nt, Human
aagucacuucauguggguugcugaagcaccau

SEQ ID NO: 27568 - RNA, 32 nt, Human
aagucacuucauucuaacuagaugcgcccacu

SEQ ID NO: 27569 - RNA, 32 nt, Human
aagucacuugacuugcuggcggccaccccguu

SEQ ID NO: 27570 - RNA, 32 nt, Human
aagucacuugagcucaggaguuugagaacaac

SEQ ID NO: 27571 - RNA, 32 nt, Human
aagucacuugugaauagaugugcaaggggagc

SEQ ID NO: 27572 - RNA, 32 nt, Human
aagucagaaauuagacaaagagaugaaaugcu

SEQ ID NO: 27573 - RNA, 32 nt, Human
aagucagaaggaaaaggaaaguagacaaguuu

SEQ ID NO: 27574 - RNA, 32 nt, Human
aagucagaaugcauuaauggacagcauuuaaa

SEQ ID NO: 27575 - RNA, 32 nt, Human
aagucagacugcugggacuggccagguuucug

SEQ ID NO: 27576 - RNA, 32 nt, Human
aagucagagacaacauccuuguccauauccaa

SEQ ID NO: 27577 - RNA, 32 nt, Human
aagucagagacaccuuugacugugucuaguga

SEQ ID NO: 27578 - RNA, 32 nt, Human
aagucagagagguggggugagggugagcuuac

SEQ ID NO: 27579 - RNA, 32 nt, Human
aagucagagccgagugccugcucucggcaccu

SEQ ID NO: 27580 - RNA, 32 nt, Human
aagucagagcuaguuccccaacagaaagauca

SEQ ID NO: 27581 - RNA, 32 nt, Human
aagucagaucagauuugcuaacaggaagcauu

SEQ ID NO: 27582 - RNA, 32 nt, Human
aagucagaugugccacugaacuugacagacac

SEQ ID NO: 27583 - RNA, 32 nt, Human
aagucagauucaggaaucaguccugguucuac

SEQ ID NO: 27584 - RNA, 32 nt, Human
aagucagcacagagcagugcccuggcuguguc

SEQ ID NO: 27585 - RNA, 32 nt, Human
aagucagcauuuucuuagaccucuucagcuga

SEQ ID NO: 27586 - RNA, 32 nt, Human
aagucagcccucucuauuucaugugccaacuc

SEQ ID NO: 27587 - RNA, 32 nt, Human
aagucagcccuugaguguauuuguucucaguc

SEQ ID NO: 27588 - RNA, 32 nt, Human
aagucagccugaggauuuagcccagaggugau

SEQ ID NO: 27589 - RNA, 32 nt, Human
aagucagcgagaucacgaaucugccagaagga

SEQ ID NO: 27590 - RNA, 32 nt, Human
aagucagcgaggacacagcauguuuguucuag

SEQ ID NO: 27591 - RNA, 32 nt, Human
aagucagcugaggggcugagggguggggcucc

SEQ ID NO: 27592 - RNA, 32 nt, Human
aagucagcugugccucacacaaggcucucuuu

SEQ ID NO: 27593 - RNA, 32 nt, Human
aagucagcuguggguggaggaugacccaggug

SEQ ID NO: 27594 - RNA, 32 nt, Human
aagucaggaacugccuugguuuccccuuuuau

SEQ ID NO: 27595 - RNA, 32 nt, Human
aagucaggacaucagucugauuaaagguggug

SEQ ID NO: 27596 - RNA, 32 nt, Human
aagucaggacucugcauuuccaacaagcuccc

SEQ ID NO: 27597 - RNA, 32 nt, Human
aagucaggaggcggaggcugcuuuucugagug

SEQ ID NO: 27598 - RNA, 32 nt, Human
aagucaggaguucaggagcaucagaguucucu

SEQ ID NO: 27599 - RNA, 32 nt, Human
aagucaggauguuguuugaucuucucaaacau

SEQ ID NO: 27600 - RNA, 32 nt, Human
aagucaggcauggcucucacccagggacaggu

SEQ ID NO: 27601 - RNA, 32 nt, Human
aagucaggcccugguucucuucugucuuguuu

SEQ ID NO: 27602 - RNA, 31 nt, Human
aagucaggccucucugggaaggucacaaggc

SEQ ID NO: 27603 - RNA, 32 nt, Human
aagucaggcgugccuccuacaagcuuccuaac

SEQ ID NO: 27604 - RNA, 32 nt, Human
aagucagggaaaggggagaagaaagaaaaaca

SEQ ID NO: 27605 - RNA, 32 nt, Human
aagucagggcaccacaacacgccaccgggaga

SEQ ID NO: 27606 - RNA, 32 nt, Human
aagucagggcgaagacgccagguucagcaugg

SEQ ID NO: 27607 - RNA, 32 nt, Human
aagucagggucuggggcccaaagaacgggcac

SEQ ID NO: 27608 - RNA, 32 nt, Human
aagucaggucaagugaugcuuuugagcuuaca

SEQ ID NO: 27609 - RNA, 32 nt, Human
aagucaggugcugcaaauuggaaagaagacuu

SEQ ID NO: 27610 - RNA, 32 nt, Human
aagucagguucaggaaucaguccugguucuac

SEQ ID NO: 27611 - RNA, 32 nt, Human
aagucaguaagaaagugugaaaugcuaguaua

SEQ ID NO: 27612 - RNA, 32 nt, Human
aagucaguaagccuuagggaaggugagugugg

SEQ ID NO: 27613 - RNA, 32 nt, Human
aagucagucaguuaggggaggagaaggagagg

SEQ ID NO: 27614 - RNA, 32 nt, Human
aagucagucauuuauugaaguuuuagcuacua

SEQ ID NO: 27615 - RNA, 18 nt, Human
aagucaguugucaaugga

SEQ ID NO: 27616 - RNA, 32 nt, Human
aagucauaagccucagggaggccauuuuugcc

SEQ ID NO: 27617 - RNA, 21 nt, Human
aagucauaaguucuuuacaua

SEQ ID NO: 27618 - RNA, 32 nt, Human
aagucauauguauguuucuacugaucggccag

SEQ ID NO: 27619 - RNA, 32 nt, Human
aagucaucaacugccaaccaaggggacgggga

SEQ ID NO: 27620 - RNA, 32 nt, Human
aagucaucaaggccucuugaaagagaaucaua

SEQ ID NO: 27621 - RNA, 23 nt, Human
aagucaucaauauuucucuacau

SEQ ID NO: 27622 - RNA, 32 nt, Human
aagucaucaccacucccuaaucucaaguaccc

SEQ ID NO: 27623 - RNA, 32 nt, Human
aagucauccuuccuacugucaugguuuguuau

SEQ ID NO: 27624 - RNA, 32 nt, Human
aagucaucgccacuccccagucucaauaaauc

SEQ ID NO: 27625 - RNA, 32 nt, Human
aagucaugagaugcuuaacccaugaaugcccc

SEQ ID NO: 27626 - RNA, 32 nt, Human
aagucaugccacugcacucaaaccuggcggac

SEQ ID NO: 27627 - RNA, 32 nt, Human
aagucaugccccagaagcaagguguaagcaug

SEQ ID NO: 27628 - RNA, 22 nt, Human
aagucauggacauucaugcuca

SEQ ID NO: 27629 - RNA, 32 nt, Human
aagucauggcucugcuguugcuuccagaacca

SEQ ID NO: 27630 - RNA, 32 nt, Human
aagucaugggcagugcccuggccugaggccca

SEQ ID NO: 27631 - RNA, 32 nt, Human
aagucauggguccucagagugggggcuccuua

SEQ ID NO: 27632 - RNA, 32 nt, Human
aagucaugucugcuuccucugccuccagcuca

SEQ ID NO: 27633 - RNA, 32 nt, Human
aagucauuaaacggaucaugucuguacauugu

SEQ ID NO: 27634 - RNA, 32 nt, Human
aagucauuaacaaacaacaguuccagagaaaa

SEQ ID NO: 27635 - RNA, 32 nt, Human
aagucauuuucacauccucuugagguucagag

SEQ ID NO: 27636 - RNA, 32 nt, Human
aagucauuuuucauucaucuaacucuguuaau

SEQ ID NO: 27637 - RNA, 32 nt, Human
aaguccaaagaguaugucuagcucuuuacugg

SEQ ID NO: 27638 - RNA, 32 nt, Human
aaguccaaagggugugcgcacacacaauggug

SEQ ID NO: 27639 - RNA, 23 nt, Human
aaguccaaauggcaccaccugua

SEQ ID NO: 27640 - RNA, 32 nt, Human
aaguccaacuuaaccaacuuuccuucaaaguc

SEQ ID NO: 27641 - RNA, 32 nt, Human
aaguccacacaggggaggugauagcauugcuu

SEQ ID NO: 27642 - RNA, 32 nt, Human
aaguccacaggcugguggaguuccgaugacaa

SEQ ID NO: 27643 - RNA, 32 nt, Human
aaguccacugccuuugccccagcacagaagag

SEQ ID NO: 27644 - RNA, 32 nt, Human
aaguccagaaggaggugcuuuuaaugugcuga

SEQ ID NO: 27645 - RNA, 32 nt, Human
aaguccagcaaccugcacuccagccuggguga

SEQ ID NO: 27646 - RNA, 32 nt, Human
aaguccagccugggcuacauagugagaccgug

SEQ ID NO: 27647 - RNA, 32 nt, Human
aaguccaggaagagaaauguaggguuuuacag

SEQ ID NO: 27648 - RNA, 32 nt, Human
aaguccaggacccacuagguugccucagaagc

SEQ ID NO: 27649 - RNA, 32 nt, Human
aauagcugggauuacaguugccugccaccacg

SEQ ID NO: 27650 - RNA, 32 nt, Human
aauagcugucagccguuccacccuuuugaccu

SEQ ID NO: 27651 - RNA, 32 nt, Human
aauagcuguuuaauggaaaccugcugggcugg

SEQ ID NO: 27652 - RNA, 32 nt, Human
aauagcuucuccuacagugauucaugucccag

SEQ ID NO: 27653 - RNA, 32 nt, Human
aauagcuuucagaaacaaacaguuauaugaga

SEQ ID NO: 27654 - RNA, 32 nt, Human
aauagcuuuguuuuugcuaugcuaaugucuag

SEQ ID NO: 27655 - RNA, 32 nt, Human
aauaggaaaaauugucauggauucaaguuauu

SEQ ID NO: 27656 - RNA, 32 nt, Human
aauaggaacaggagauauuucucaauuguaaa

SEQ ID NO: 27657 - RNA, 32 nt, Human
aauaggaagaacaguacauuuuugucuuuauc

SEQ ID NO: 27658 - RNA, 32 nt, Human
aauaggaagcgcucucaugcaggaucugaggg

SEQ ID NO: 27659 - RNA, 32 nt, Human
aauaggacaucuggcucccagcauccaaauua

SEQ ID NO: 27660 - RNA, 32 nt, Human
aauaggacucgacuuggagaaauugcuauucu

SEQ ID NO: 27661 - RNA, 32 nt, Human
aauaggacuugccuucucccugggcagggaga

SEQ ID NO: 27662 - RNA, 32 nt, Human
aauaggagcgauugacaugacaagaacugaga

SEQ ID NO: 27663 - RNA, 32 nt, Human
aauaggaggauagaauuuggauccaaaucuag

SEQ ID NO: 27664 - RNA, 32 nt, Human
aauaggaguagagguuuaccacucuuagguga

SEQ ID NO: 27665 - RNA, 31 nt, Human
aauaggagugaagagagaaaagacuaacagg

SEQ ID NO: 27666 - RNA, 32 nt, Human
aauaggauuaaacacacacaaaaugcucaagg

SEQ ID NO: 27667 - RNA, 32 nt, Human
aauaggauuugugcuccuaugagaaucuaaca

SEQ ID NO: 27668 - RNA, 32 nt, Human
aauaggccaaggcagagauccaugccugcaug

SEQ ID NO: 27669 - RNA, 32 nt, Human
aauaggccacagaaggugaacuuugugcuuca

SEQ ID NO: 27670 - RNA, 32 nt, Human
aauaggcccugagaugugaggucugcugcuuc

SEQ ID NO: 27671 - RNA, 32 nt, Human
aauaggccgguggcucaugccuguaaucucag

SEQ ID NO: 27672 - RNA, 32 nt, Human
aauaggccucucccccagucccauuuagaauc

SEQ ID NO: 27673 - RNA, 32 nt, Human
aauaggccugacuuagucaucauugauauaag

SEQ ID NO: 27674 - RNA, 32 nt, Human
aauaggccugggaaagucgcacuuucauccac

SEQ ID NO: 27675 - RNA, 32 nt, Human
aauaggcugcaaucaaguucacuuccaaaggc

SEQ ID NO: 27676 - RNA, 32 nt, Human
aauaggcugggccacauguuggaaauaagcua

SEQ ID NO: 27677 - RNA, 32 nt, Human
aauaggcuuuugacugggcaugguggcucacg

SEQ ID NO: 27678 - RNA, 32 nt, Human
aauagggagaugcaggaagugggggcccaugg

SEQ ID NO: 27679 - RNA, 32 nt, Human
aauagggaggaggugagaggcuggggugcccc

SEQ ID NO: 27680 - RNA, 32 nt, Human
aauagggaggggaggagaggagaggagaggga

SEQ ID NO: 27681 - RNA, 32 nt, Human
aauagggauggggagagcaagccccgcauguc

SEQ ID NO: 27682 - RNA, 32 nt, Human
aauagggauuugggaugaaacagcugcaguua

SEQ ID NO: 27683 - RNA, 32 nt, Human
aauagggcauaagagagaagaagauguacuua

SEQ ID NO: 27684 - RNA, 32 nt, Human
aauagggccaaagagaaaaauaacaggacucu

SEQ ID NO: 27685 - RNA, 32 nt, Human
aauagggcggacacuccucucuuuuccuguag

SEQ ID NO: 27686 - RNA, 32 nt, Human
aauaggggcauggugacccuugacucaccauc

SEQ ID NO: 27687 - RNA, 32 nt, Human
aauaggggucucaagugacuucacccuagaag

SEQ ID NO: 27688 - RNA, 32 nt, Human
aauaggguauucugccccuuguuuccacagcu

SEQ ID NO: 27689 - RNA, 32 nt, Human
aauaggguugucuuuccuaugaaaaugccauc

SEQ ID NO: 27690 - RNA, 32 nt, Human
aauaggguuuauguuaaccuaacuuucagggc

SEQ ID NO: 27691 - RNA, 32 nt, Human
aauaggucaccaacugugugccauggaagccc

SEQ ID NO: 27692 - RNA, 32 nt, Human
aauagguccugagacuguugauagccccagac

SEQ ID NO: 27693 - RNA, 32 nt, Human
aauaggucuuucucucaaccugcaagagcuaa

SEQ ID NO: 27694 - RNA, 32 nt, Human
aauaggugcucaauaaauauuuauaugaguga

SEQ ID NO: 27695 - RNA, 32 nt, Human
aauaggugcuuccccugaggugcaggggaaga

SEQ ID NO: 27696 - RNA, 32 nt, Human
aauagguggaaaacauggaauuucuuuuaggu

SEQ ID NO: 27697 - RNA, 32 nt, Human
aauagguggaaagagaaaugaugugaaagaua

SEQ ID NO: 27698 - RNA, 32 nt, Human
aauagguugggcuaguuaacugcagcaggagc

SEQ ID NO: 27699 - RNA, 32 nt, Human
aauaguaagaagguggaggaagacuuaaaggc

SEQ ID NO: 27700 - RNA, 32 nt, Human
aauaguaaugagugguaggucauuucaaaauc

SEQ ID NO: 27701 - RNA, 32 nt, Human
aauaguacacuugugaggcaugugggaaacaa

SEQ ID NO: 27702 - RNA, 22 nt, Human
aauaguacuccagaaagacaaa

SEQ ID NO: 27703 - RNA, 32 nt, Human
aauaguacugcagcuucuuguggccuacagug

SEQ ID NO: 27704 - RNA, 32 nt, Human
aauaguagaggaggggagagaggcaccuggca

SEQ ID NO: 27705 - RNA, 32 nt, Human
aauaguagcucccuccaagauggaggcaggag

SEQ ID NO: 27706 - RNA, 32 nt, Human
aauaguaggaguuuccccagaagucauuuuca

SEQ ID NO: 27707 - RNA, 32 nt, Human
aauaguaguaccauaugccaaagugauagaga

SEQ ID NO: 27708 - RNA, 32 nt, Human
aauaguaugggggagcaucucuucagaauggg

SEQ ID NO: 27709 - RNA, 32 nt, Human
aauagucaaauggggaaauuaaacauucaaug

SEQ ID NO: 27710 - RNA, 32 nt, Human
aauagucagcugacuaaagacuguguguguug

SEQ ID NO: 27711 - RNA, 32 nt, Human
aauagucaggcagcuugugagugguuuuuaga

SEQ ID NO: 27712 - RNA, 32 nt, Human
aauagucauccaggaaaaucggaaagaagcac

SEQ ID NO: 27713 - RNA, 32 nt, Human
aauagucccucucucugcuccuccauucgcaa

SEQ ID NO: 27714 - RNA, 32 nt, Human
aauagucccucugcucccaagaucccagccag

SEQ ID NO: 27715 - RNA, 32 nt, Human
aauaguccuaggcuggacagcaaugggcugca

SEQ ID NO: 27716 - RNA, 32 nt, Human
aauagucguggcagugcugcugaauuugcagu

SEQ ID NO: 27717 - RNA, 32 nt, Human
aauagucucagucacauaugaagaggaaaauu

SEQ ID NO: 27718 - RNA, 32 nt, Human
aauagucuggaaaauuuuuggaaagaauccac

SEQ ID NO: 27719 - RNA, 32 nt, Human
aauagucuuauucaaggaauaagaacuaugua

SEQ ID NO: 27720 - RNA, 32 nt, Human
aauagucuugugcuaugcagcagguguaaaaa

SEQ ID NO: 27721 - RNA, 32 nt, Human
aauagugaaauggaucccacuaauuaugacag

SEQ ID NO: 27722 - RNA, 32 nt, Human
aauagugacucugugcuugucuguuuaguucu

SEQ ID NO: 27723 - RNA, 32 nt, Human
aauagugcagacagaaaacugcagugaacaca

SEQ ID NO: 27724 - RNA, 32 nt, Human
aauagugccaaaguugagagacccugggguag

SEQ ID NO: 27725 - RNA, 32 nt, Human
aauagugccaucauccacugcccugacaccuc

SEQ ID NO: 27726 - RNA, 32 nt, Human
aauaguggaaaucgcuuauauguccuuggguu

SEQ ID NO: 27727 - RNA, 32 nt, Human
aauagugggagauggagaagagugaaugaguu

SEQ ID NO: 27728 - RNA, 32 nt, Human
aauaguggggagggaaaaacuccuccuugaag

SEQ ID NO: 27729 - RNA, 32 nt, Human
aauagugucauccucacagugaacacucagug

SEQ ID NO: 27730 - RNA, 32 nt, Human
aauaguguccugguucugaccugcacuugagu

SEQ ID NO: 27731 - RNA, 32 nt, Human
aauagugucuacuaucucaacccuccaaaauu

SEQ ID NO: 27732 - RNA, 32 nt, Human
aauaguguuuguaaucuacacguuuauuugag

SEQ ID NO: 27733 - RNA, 32 nt, Human
aauaguguuuucuuccucuggguucuuauaau

SEQ ID NO: 27734 - RNA, 32 nt, Human
aauaguucagguaacaggcagauacaggaaaa

SEQ ID NO: 27735 - RNA, 32 nt, Human
aauaguuccacaccugaagacccuccaacagc

SEQ ID NO: 27736 - RNA, 32 nt, Human
aauaguucgagaccagccuggccaacaaggug

SEQ ID NO: 27737 - RNA, 32 nt, Human
aauaguucgagaucagccugaccaacaugaug

SEQ ID NO: 27738 - RNA, 32 nt, Human
aauaguucuaaaacaugcuaaccugaccuuuu

SEQ ID NO: 27739 - RNA, 32 nt, Human
aauaguucugguauguuagccauucacauuuu

SEQ ID NO: 27740 - RNA, 32 nt, Human
aauaguucuuucuccugcuucuccguuuaucu

SEQ ID NO: 27741 - RNA, 32 nt, Human
aauaguugaauagauucaccagaauaauucau

SEQ ID NO: 27742 - RNA, 32 nt, Human
aauaguugcauaugggaauuuaaaccaacaug

SEQ ID NO: 27743 - RNA, 32 nt, Human
aauaguugcuugaauuaugaucaucuaccacc

SEQ ID NO: 27744 - RNA, 32 nt, Human
aauaguugucauuuccucagugaugguguguc

SEQ ID NO: 27745 - RNA, 32 nt, Human
aauaguuuauucagccacuguucccagccaca

SEQ ID NO: 27746 - RNA, 32 nt, Human
aauaguuucacccugcacuacccuguucugua

SEQ ID NO: 27747 - RNA, 32 nt, Human
aauaguuuccagcacauggauugaucugagag

SEQ ID NO: 27748 - RNA, 32 nt, Human
aauaguuuccucuccccucccuucuacuucca

SEQ ID NO: 27749 - RNA, 32 nt, Human
aauaguuucuguacuuuagcagaacaggaagg

SEQ ID NO: 27750 - RNA, 32 nt, Human
aauaguuugccuccagccaccauugcucucca

SEQ ID NO: 27751 - RNA, 32 nt, Human
aauaguuuggaccuugugccuccugugggagg

SEQ ID NO: 27752 - RNA, 32 nt, Human
aauaguuuuaucuguacaguugugcaagauau

SEQ ID NO: 27753 - RNA, 32 nt, Human
aauaguuuucuuccucuucuccuugggccagu

SEQ ID NO: 27754 - RNA, 32 nt, Human
aauauaaaaaccaaaaacuacugugugcaaau

SEQ ID NO: 27755 - RNA, 32 nt, Human
aauauaaaaaccaccuaggaaccugcuguugc

SEQ ID NO: 27756 - RNA, 32 nt, Human
aauauaaaauuggccaugcaugguggcacaug

SEQ ID NO: 27757 - RNA, 32 nt, Human
aauauaaaauuugaucuucuaaucugugacga

SEQ ID NO: 27758 - RNA, 32 nt, Human
aauauaaacuaguacagccacuaugaaaaacu

SEQ ID NO: 27759 - RNA, 32 nt, Human
aauauaaacucuccucuuaaucauuuucugga

SEQ ID NO: 27760 - RNA, 32 nt, Human
aauauaacagaaguguuaacuauuguauuccc

SEQ ID NO: 27761 - RNA, 24 nt, Human
aauauaacauaugcaguaauaaac

SEQ ID NO: 27762 - RNA, 32 nt, Human
aauauaaccauaguuaccuaagcacacaguga

SEQ ID NO: 27763 - RNA, 32 nt, Human
aauauaaccccuucuuugagcucugaaccagu

SEQ ID NO: 27764 - RNA, 32 nt, Human
aauauaacuguuuccccucucugcugcuuuag

SEQ ID NO: 27765 - RNA, 32 nt, Human
aauauaagacaagucugaguaguuaugaaucg

SEQ ID NO: 27766 - RNA, 32 nt, Human
aauauaagaguuuguacugaaaccauuuauuu

SEQ ID NO: 27767 - RNA, 32 nt, Human
aauauaagauuagccgggcaugguggcacgug

SEQ ID NO: 27768 - RNA, 32 nt, Human
aauauaagcauguagaugaggauguggcugua

SEQ ID NO: 27769 - RNA, 32 nt, Human
aauauaagcugcuggggaagcugugaaaaccc

SEQ ID NO: 27770 - RNA, 32 nt, Human
aauauaaggaaggcuuugcagcagcauugaaa

SEQ ID NO: 27771 - RNA, 32 nt, Human
aauauaaggcauuccuauuuugcaguucagaa

SEQ ID NO: 27772 - RNA, 32 nt, Human
aauauaauucacaugccauacacuucacccau

SEQ ID NO: 27773 - RNA, 32 nt, Human
aauauacaaucuguaacaacacacagccugac

SEQ ID NO: 27774 - RNA, 32 nt, Human
aauauacaaugauccuggaaauugcaguaaca

SEQ ID NO: 27775 - RNA, 32 nt, Human
aauauacacaaggccggggaagccacagccaa

SEQ ID NO: 27776 - RNA, 32 nt, Human
aauauacacacguauauguaacagcacuuugc

SEQ ID NO: 27777 - RNA, 32 nt, Human
aauauacaguacauugcaggaacugccucagg

SEQ ID NO: 27778 - RNA, 32 nt, Human
aauauacauggaaaacagcuuuuuacaauuaa

SEQ ID NO: 27779 - RNA, 32 nt, Human
aauauaccaucuuucuacaguauuuccuacag

SEQ ID NO: 27780 - RNA, 32 nt, Human
aauauacccaacaacuggaauuguuuacacau

SEQ ID NO: 27781 - RNA, 32 nt, Human
aauauaccuuagaguucacacuguacaguagg

SEQ ID NO: 27782 - RNA, 32 nt, Human
aauauacguagcuagguccuaaccucggagau

SEQ ID NO: 27783 - RNA, 32 nt, Human
aauauacuaagcugaauaacagcucuuuggcc

SEQ ID NO: 27784 - RNA, 32 nt, Human
aauauacucauguaacaagccugcacauguac

SEQ ID NO: 27785 - RNA, 32 nt, Human
aauauacuuacauaugugauaugcauagugua

SEQ ID NO: 27786 - RNA, 32 nt, Human
aauauacuuacucugugcuuguguaugugaau

SEQ ID NO: 27787 - RNA, 32 nt, Human
aauauacuugaauauugcuuaaagaauugugu

SEQ ID NO: 27788 - RNA, 32 nt, Human
aauauagaaguuaaggaaguaguaagucagug

SEQ ID NO: 27789 - RNA, 32 nt, Human
aauauagacuuuacugaauuaguucagaauag

SEQ ID NO: 27790 - RNA, 32 nt, Human
aauauagagacaggugucucacuguguugucc

SEQ ID NO: 27791 - RNA, 32 nt, Human
aauauagauggaaaaggaggcccuuaugugaa

SEQ ID NO: 27792 - RNA, 32 nt, Human
aauauagcacagcugucaucucauuuuggaca

SEQ ID NO: 27793 - RNA, 32 nt, Human
aauauagcacugcggagcaggcugaagagguc

SEQ ID NO: 27794 - RNA, 32 nt, Human
aauauagcgaaaucucuccacugccuucuguc

SEQ ID NO: 27795 - RNA, 32 nt, Human
aauauagcuaauagaauuuucuaaauuuuacc

SEQ ID NO: 27796 - RNA, 32 nt, Human
aauauagcucuuaggcuuccagccucuaccau

SEQ ID NO: 27797 - RNA, 32 nt, Human
aauauaggaggcagagguugcagugagccgag

SEQ ID NO: 27798 - RNA, 32 nt, Human
aauauagggaagagaagcugccagcaauggcc

SEQ ID NO: 27799 - RNA, 32 nt, Human
aauauaggguaugaaugguuuaaucaaggcuu

SEQ ID NO: 27800 - RNA, 31 nt, Human
aauauaggugagagacaagauugucucauau

SEQ ID NO: 27801 - RNA, 32 nt, Human
aauauaggugugagccaccacgccuggcuaau

SEQ ID NO: 27802 - RNA, 32 nt, Human
aauauaguaagacagaaguauuggacauguug

SEQ ID NO: 27803 - RNA, 32 nt, Human
aauauaguaucugggggagaagacuuacuucc

SEQ ID NO: 27804 - RNA, 32 nt, Human
aauauaguuagagacaucagguuuaagccagu

SEQ ID NO: 27805 - RNA, 32 nt, Human
aauauaguucauacugugucugugaguauauu

SEQ ID NO: 27806 - RNA, 32 nt, Human
aauauaguuccacauuauccugggcuugaagg

SEQ ID NO: 27807 - RNA, 32 nt, Human
aauauauaaauguauugcucuaaaaauaaacc

SEQ ID NO: 27808 - RNA, 32 nt, Human
aauauauaaucaaaugauucauuuuucuguua

SEQ ID NO: 27809 - RNA, 32 nt, Human
aauauauaauuuacuggaccucagcccaaauc

SEQ ID NO: 27810 - RNA, 32 nt, Human
aauauauacagcccugcucugggacacaccuc

SEQ ID NO: 27811 - RNA, 32 nt, Human
aauauaucacugcauauuuuuacccuuauuuu

SEQ ID NO: 27812 - RNA, 32 nt, Human
aauauaucagccagagggggaagaaggguggc

SEQ ID NO: 27813 - RNA, 32 nt, Human
aauauauccauguaacaaaaccgcacuuguac

SEQ ID NO: 27814 - RNA, 32 nt, Human
aauauauccguagaauggagagggaccggauc

SEQ ID NO: 27815 - RNA, 32 nt, Human
aauauaucucuuucuuuuucuuccgacauuag

SEQ ID NO: 27816 - RNA, 32 nt, Human
aauauaucuuaagcagguuuguuuucagcacu

SEQ ID NO: 27817 - RNA, 32 nt, Human
aauauaugaaggagaggaggguaaaggagaau

SEQ ID NO: 27818 - RNA, 32 nt, Human
aauauaugcagaccaacaggucuuugcauucc

SEQ ID NO: 27819 - RNA, 32 nt, Human
aauauauggaagucaaagugaggaacagagau

SEQ ID NO: 27820 - RNA, 32 nt, Human
aauauauguaaagcacuuuaacacagcaccag

SEQ ID NO: 27821 - RNA, 32 nt, Human
aauauauguauauguggggacagggaguaugu

SEQ ID NO: 27822 - RNA, 32 nt, Human
aauauauguaugaaauaaaauuaguuccauuu

SEQ ID NO: 27823 - RNA, 32 nt, Human
aauauaugugagaguacuuaguugaaacaaaa

SEQ ID NO: 27824 - RNA, 32 nt, Human
aauauaugugguuugggggaaaggacaagaaa

SEQ ID NO: 27825 - RNA, 32 nt, Human
aauauauguuauagccacggugguuaguuuaa

SEQ ID NO: 27826 - RNA, 32 nt, Human
aauauauuauauaauauguuacacucuuaaua

SEQ ID NO: 27827 - RNA, 32 nt, Human
aauauauucauaauuuacuuuaugaccuagaa

SEQ ID NO: 27828 - RNA, 32 nt, Human
aauauauucucaaaaauauauuaaaacaaacu

SEQ ID NO: 27829 - RNA, 32 nt, Human
aauauauucuuccucuuuuuguccucaucacu

SEQ ID NO: 27830 - RNA, 32 nt, Human
aauauauugagccauguuaaccugccaaugag

SEQ ID NO: 27831 - RNA, 32 nt, Human
aauauauugccaccaucuuggagcucagugcc

SEQ ID NO: 27832 - RNA, 32 nt, Human
aauauauuucaucacugguuacaguuuuaaau

SEQ ID NO: 27833 - RNA, 32 nt, Human
aauauauuuugaagaggugugggaggaaggaa

SEQ ID NO: 27834 - RNA, 32 nt, Human
aauauauuuuugcaaaugcagcaguaaauaug

SEQ ID NO: 27835 - RNA, 32 nt, Human
aauaucaaaauggugggccaggcgugguagcu

SEQ ID NO: 27836 - RNA, 32 nt, Human
aauaucaaacacacaaagucauaaaaugaaaa

SEQ ID NO: 27837 - RNA, 32 nt, Human
aauaucaacucucacuccugaauucaguugcu

SEQ ID NO: 27838 - RNA, 32 nt, Human
aauaucaagcacccucccucuagguccaggga

SEQ ID NO: 27839 - RNA, 32 nt, Human
aauaucaaugcccaacagggcaaccaauaaaa

SEQ ID NO: 27840 - RNA, 32 nt, Human
aauaucaauggacugagucugauucagaaaau

SEQ ID NO: 27841 - RNA, 32 nt, Human
aauaucaauuguuuagacacaccuacaaugau

SEQ ID NO: 27842 - RNA, 32 nt, Human
aauaucaccaucaaugaaacauaaauguaauu

SEQ ID NO: 27843 - RNA, 32 nt, Human
aauaucacugacacuccagacuaaagcagagu

SEQ ID NO: 27844 - RNA, 32 nt, Human
aauaucacuucccuagaaauugcucucaucug

SEQ ID NO: 27845 - RNA, 32 nt, Human
aauaucagaacugagccaggaggcaggugcac

SEQ ID NO: 27846 - RNA, 23 nt, Human
aauaucagagaauuuaugguaga

SEQ ID NO: 27847 - RNA, 32 nt, Human
aauaucagcacuggccucucccucaccaccau

SEQ ID NO: 27848 - RNA, 32 nt, Human
aauaucagccacuccuacggugugagagaauu

SEQ ID NO: 27849 - RNA, 32 nt, Human
aauaucagcggauucggaaggagaagccucaa

SEQ ID NO: 27850 - RNA, 32 nt, Human
aauaucagcuacucaggaggcugaggcaggag

SEQ ID NO: 27851 - RNA, 32 nt, Human
aauaucagcuacuugggagacugaggcaggag

SEQ ID NO: 27852 - RNA, 32 nt, Human
aauaucagguucuagaagaaacuggcgcuuaa

SEQ ID NO: 27853 - RNA, 32 nt, Human
aauaucaguuuuacuuuucagaggauuuguaa

SEQ ID NO: 27854 - RNA, 21 nt, Human
aauaucauacugugguuucug

SEQ ID NO: 27855 - RNA, 32 nt, Human
aauaucauaugcuugaggcucacuguugaugu

SEQ ID NO: 27856 - RNA, 32 nt, Human
aauaucaucauuuucuaguugacauuugaauc

SEQ ID NO: 27857 - RNA, 32 nt, Human
aauaucaugccacugcacuccagccuggguga

SEQ ID NO: 27858 - RNA, 32 nt, Human
aauaucauguaggaauuuaaaaagccaaaaua

SEQ ID NO: 27859 - RNA, 32 nt, Human
aauaucauuacagcacguuaacuuuuccauuc

SEQ ID NO: 27860 - RNA, 32 nt, Human
aauaucauuucgauaaccucacugaaaaacau

SEQ ID NO: 27861 - RNA, 32 nt, Human
aauaucauuuggagaaagugucauggaaguuc

SEQ ID NO: 27862 - RNA, 21 nt, Human
aauaucauuuuugaggcuuug

SEQ ID NO: 27863 - RNA, 32 nt, Human
aauauccacaaagcuucgccuuugcuuuugca

SEQ ID NO: 27864 - RNA, 32 nt, Human
aauauccacaauucaaaagcaccuaaaaagaa

SEQ ID NO: 27865 - RNA, 32 nt, Human
aauauccaccucuccuuuuugccauuucacuu

SEQ ID NO: 27866 - RNA, 32 nt, Human
aauauccagccacuggugcacagccauugcca

SEQ ID NO: 27867 - RNA, 32 nt, Human
aauauccauucccucacucuacucuccucacu

SEQ ID NO: 27868 - RNA, 32 nt, Human
aauaucccaagugccuggcuuugauaguuaaa

SEQ ID NO: 27869 - RNA, 32 nt, Human
aauauccccaaagcuuuuggguccucaaguca

SEQ ID NO: 27870 - RNA, 32 nt, Human
aauauccccuaaaaacuugaggaaggaagaug

SEQ ID NO: 27871 - RNA, 32 nt, Human
aauaucccuacugacaguaacuaccugucaca

SEQ ID NO: 27872 - RNA, 32 nt, Human
aauaucccuccccauucuucucuuccccucuc

SEQ ID NO: 27873 - RNA, 32 nt, Human
aauaucccuccccucucucccugguccccucc

SEQ ID NO: 27874 - RNA, 32 nt, Human
aauauccuaaaaggaaugccaauuaaguuuug

SEQ ID NO: 27875 - RNA, 32 nt, Human
aauauccuaaagucaugcacuucccagaugau

SEQ ID NO: 27876 - RNA, 32 nt, Human
aauauccuauguuugcaucacauaucucuggc

SEQ ID NO: 27877 - RNA, 32 nt, Human
aauauccuccaaaaggagagugcaucugagac

SEQ ID NO: 27878 - RNA, 32 nt, Human
aauauccuguauccugaagcauguuuauuaac

SEQ ID NO: 27879 - RNA, 32 nt, Human
aauauccuucaaguuccacuucccagggagcu

SEQ ID NO: 27880 - RNA, 32 nt, Human
aauauccuuuguccugccccaggauuuagauc

SEQ ID NO: 27881 - RNA, 32 nt, Human
aauaucgcaccacugcacuccagccugggcaa

SEQ ID NO: 27882 - RNA, 32 nt, Human
aauaucggaccugacaacuucucuccaggaaa

SEQ ID NO: 27883 - RNA, 32 nt, Human
aauaucgggagaaaauacaaacucccuguguu

SEQ ID NO: 27884 - RNA, 32 nt, Human
aauaucgugccacugcauuccagccuggguga

SEQ ID NO: 27885 - RNA, 21 nt, Human
aauaucuacauggggcugcug

SEQ ID NO: 27886 - RNA, 32 nt, Human
aauaucuacuaucagcugauuacuagacacau

SEQ ID NO: 27887 - RNA, 32 nt, Human
aauaucuauccuguauucucuuugccaucuag

SEQ ID NO: 27888 - RNA, 32 nt, Human
aauaucucuuucuguguucaagaaggugaaau

SEQ ID NO: 27889 - RNA, 32 nt, Human
aauaucugaaagucaacaugaugcuucuugca

SEQ ID NO: 27890 - RNA, 32 nt, Human
aauaucugaacaaacagcagcugcagacaaaa

SEQ ID NO: 27891 - RNA, 32 nt, Human
aauaucugccuugcccgucagcagaaagcugu

SEQ ID NO: 27892 - RNA, 32 nt, Human
aauaucuggagacaaauacaaugcaauugcaa

SEQ ID NO: 27893 - RNA, 32 nt, Human
aauaucugggauuacaggugcccaccaccaug

SEQ ID NO: 27894 - RNA, 32 nt, Human
aauaucugggauuacaggugcccgcuaccaug

SEQ ID NO: 27895 - RNA, 32 nt, Human
aauaucugucugcaggcaugcagcagucuaca

SEQ ID NO: 27896 - RNA, 32 nt, Human
aauaucugucugcaggcaugcagcagucuacc

SEQ ID NO: 27897 - RNA, 32 nt, Human
aauaucuguggcuaaaaaguuugagauuugug

SEQ ID NO: 27898 - RNA, 32 nt, Human
aauaucuuaguuugcuaccagcauccagcaug

SEQ ID NO: 27899 - RNA, 32 nt, Human
aauaucuucauacuuccucauccccucauugg

SEQ ID NO: 27900 - RNA, 32 nt, Human
aauaucuucucacgccuguaaucccagcacuu

SEQ ID NO: 27901 - RNA, 32 nt, Human
aauaucuucuuugaagcuucugaagaccuggu

SEQ ID NO: 27902 - RNA, 32 nt, Human
aauaucuugguauccaggauaaggguaugugg

SEQ ID NO: 27903 - RNA, 32 nt, Human
aauaucuuguguuguccuuuugucuucucugu

SEQ ID NO: 27904 - RNA, 32 nt, Human
aauaucuuucuagcccucagccacuacaaaug

SEQ ID NO: 27905 - RNA, 32 nt, Human
aauaucuuuucagaugcagucuauauuuuaug

SEQ ID NO: 27906 - RNA, 32 nt, Human
aauaucuuuuugaguaauuguuuuguuucuua

SEQ ID NO: 27907 - RNA, 32 nt, Human
aauaugaauacagggcaugcauuuugcagcag

SEQ ID NO: 27908 - RNA, 32 nt, Human
aauaugaccaaaagccauaaaugacugugaga

SEQ ID NO: 27909 - RNA, 32 nt, Human
aauaugaccacacuccagccaaggacaaaaug

SEQ ID NO: 27910 - RNA, 31 nt, Human
aauaugacccuaccagagguuggagaacaaa

SEQ ID NO: 27911 - RNA, 32 nt, Human
aauaugagagucagagagguuaaguuauuuuc

SEQ ID NO: 27912 - RNA, 32 nt, Human
aauaugagauucuuuuauagcagcuaugacau

SEQ ID NO: 27913 - RNA, 32 nt, Human
aauaugaggcucagagagguuaggugaucuac

SEQ ID NO: 27914 - RNA, 32 nt, Human
aauaugagugauaucacauucaauuuuauguc

SEQ ID NO: 27915 - RNA, 32 nt, Human
aauaugaguuucauuuccucugugucuuuggg

SEQ ID NO: 27916 - RNA, 32 nt, Human
aauaugaugcucuucugcuuuguuuuauucua

SEQ ID NO: 27917 - RNA, 25 nt, Human
aauaugauuuacagaauaauaaaca

SEQ ID NO: 27918 - RNA, 28 nt, Human
aauaugcaagaaucacaggaaacccaca

SEQ ID NO: 27919 - RNA, 32 nt, Human
aauaugcaaucaggcacagugccucaugccua

SEQ ID NO: 27920 - RNA, 32 nt, Human
aauaugcagauuuuaaacagcauuucacauuu

SEQ ID NO: 27921 - RNA, 32 nt, Human
aauaugcagcguucacaaaacagcugccagug

SEQ ID NO: 27922 - RNA, 32 nt, Human
aauaugcauuucuuagagcaguagcuugcagu

SEQ ID NO: 27923 - RNA, 32 nt, Human
aauaugcccaucauccuuccugagacacuaaa

SEQ ID NO: 27924 - RNA, 32 nt, Human
aauaugcucucauuucuuuguaaucuagauuu

SEQ ID NO: 27925 - RNA, 32 nt, Human
aauaugcugagugucuggagucagccugaaga

SEQ ID NO: 27926 - RNA, 32 nt, Human
aauaugcugugcauucacugccugcagugggu

SEQ ID NO: 27927 - RNA, 32 nt, Human
aauaugcuuagaggugcugcuguauuuaccug

SEQ ID NO: 27928 - RNA, 32 nt, Human
aauaugcuuugaugcauaguuuugaacuaaug

SEQ ID NO: 27929 - RNA, 32 nt, Human
aauauggaaaaaggauucucuaaaaauaaaug

SEQ ID NO: 27930 - RNA, 32 nt, Human
aauauggaaaacaaacacugcagacuugagau

SEQ ID NO: 27931 - RNA, 32 nt, Human
aauauggaaagaaaauuaaaaugugucaauaa

SEQ ID NO: 27932 - RNA, 32 nt, Human
aauauggagacaccuuugacuagcuagcaaga

SEQ ID NO: 27933 - RNA, 32 nt, Human
aauauggagagagguguuagcucacuagcuuu

SEQ ID NO: 27934 - RNA, 32 nt, Human
aauauggagcuuucauaaaaaugggaugcauu

SEQ ID NO: 27935 - RNA, 32 nt, Human
aauauggagucucugcccugagaucuucccca

SEQ ID NO: 27936 - RNA, 32 nt, Human
aauauggaucaucacagauccaaacagaaaaa

SEQ ID NO: 27937 - RNA, 32 nt, Human
aauauggcaaauauuuguauauucccaagggg

SEQ ID NO: 27938 - RNA, 32 nt, Human
aauauggcauauggacacagauucucaugcca

SEQ ID NO: 27939 - RNA, 32 nt, Human
aauauggccuggcaaggcacuguuacugaucu

SEQ ID NO: 27940 - RNA, 32 nt, Human
aauauggcucacugcagccucgacaccugggu

SEQ ID NO: 27941 - RNA, 32 nt, Human
aauauggcucagaaaggcacugagaaaaccua

SEQ ID NO: 27942 - RNA, 32 nt, Human
aauauggcucccuaguguuggaaagggcagug

SEQ ID NO: 27943 - RNA, 32 nt, Human
aauauggcuucuccuuuuuccacacacaagag

SEQ ID NO: 27944 - RNA, 32 nt, Human
aauaugggucuauuugaaauaugcaaaaggua

SEQ ID NO: 27945 - RNA, 32 nt, Human
aauaugguauaccuccugaccccucucucccu

SEQ ID NO: 27946 - RNA, 23 nt, Human
aauauggucauuguacuuacgga

SEQ ID NO: 27947 - RNA, 20 nt, Human
aauauggucgcuauuuacag

SEQ ID NO: 27948 - RNA, 32 nt, Human
aauauggucucgaucuccugaccucgugaucc

SEQ ID NO: 27949 - RNA, 20 nt, Human
aauauggugauauauuuaca

SEQ ID NO: 27950 - RNA, 32 nt, Human
aauauggugcuaaaagaacuccuuaccuuucu

SEQ ID NO: 27951 - RNA, 32 nt, Human
aauauguaacuccuguucuuuccuucauuauu

SEQ ID NO: 27952 - RNA, 32 nt, Human
aauauguacucagauucuuucauuaggcaugu

SEQ ID NO: 27953 - RNA, 32 nt, Human
aauauguagauauagcaaaaagaaugagcugg

SEQ ID NO: 27954 - RNA, 32 nt, Human
aauauguauaaauaaaguuacauuuuagucug

SEQ ID NO: 27955 - RNA, 32 nt, Human
aauauguauauguauauguauguaagaugugu

SEQ ID NO: 27956 - RNA, 32 nt, Human
aauauguaucuaagaauguucuagggcacucu

SEQ ID NO: 27957 - RNA, 32 nt, Human
aauauguauuucucccauuucucccucuccuu

SEQ ID NO: 27958 - RNA, 32 nt, Human
aauaugucaucuuuacucagaauccuagggau

SEQ ID NO: 27959 - RNA, 32 nt, Human
aauaugucgcuucaaauauaacuaauauccug

SEQ ID NO: 27960 - RNA, 32 nt, Human
aauaugucuucacuccugauggaagcugcaac

SEQ ID NO: 27961 - RNA, 32 nt, Human
aauaugugaaauggaugauguacuggaucguc

SEQ ID NO: 27962 - RNA, 32 nt, Human
aauaugugaaguuuacaaaggaaccaaaauga

SEQ ID NO: 27963 - RNA, 32 nt, Human
aauaugugaugccacccccgguggcccagcug

SEQ ID NO: 27964 - RNA, 32 nt, Human
aauauguguugagcuucaugcagagggugguu

SEQ ID NO: 27965 - RNA, 32 nt, Human
aauauguuaguaacaaucuugcagccuuccuu

SEQ ID NO: 27966 - RNA, 32 nt, Human
aauauguuagucacccuuucagucuucuguau

SEQ ID NO: 27967 - RNA, 32 nt, Human
aauauguuaugccacauuccaaaagaauuuug

SEQ ID NO: 27968 - RNA, 32 nt, Human
aauauguucacaucuugguauguggccauauu

SEQ ID NO: 27969 - RNA, 32 nt, Human
aauauguucucccauuccauaaguugccuuuu

SEQ ID NO: 27970 - RNA, 32 nt, Human
aauauguuuauucgggaaaacugaggccagau

SEQ ID NO: 27971 - RNA, 32 nt, Human
aauauguuuccuuggccaggugcaauggcuca

SEQ ID NO: 27972 - RNA, 32 nt, Human
aauauguuucguuugcucaacaugguuuacua

SEQ ID NO: 27973 - RNA, 32 nt, Human
aauauguuuugguggggaugggacgguggacu

SEQ ID NO: 27974 - RNA, 32 nt, Human
aauauuaaaauacuucaauccuggauucacag

SEQ ID NO: 27975 - RNA, 32 nt, Human
aauauuaagcuauucugagggagaggccacag

SEQ ID NO: 27976 - RNA, 32 nt, Human
aauauuaaguuagaaaagaaguugcugcccag

SEQ ID NO: 27977 - RNA, 32 nt, Human
aauauuacaaaugcauuaccaguccuagauac

SEQ ID NO: 27978 - RNA, 32 nt, Human
aauauuacaaccaauccuuaacuuuccacuau

SEQ ID NO: 27979 - RNA, 32 nt, Human
aauauuaccuccaggguucaauagaaauccuc

SEQ ID NO: 27980 - RNA, 32 nt, Human
aauauuacuguagcacuuacuagcauuucuga

SEQ ID NO: 27981 - RNA, 22 nt, Human
aauauuagaaacuacagaguuu

SEQ ID NO: 27982 - RNA, 32 nt, Human
aauauuaggcaaaacugcauacuauaaaagug

SEQ ID NO: 27983 - RNA, 32 nt, Human
aauauuauaaccacaggguauccagccaaauu

SEQ ID NO: 27984 - RNA, 32 nt, Human
aauauuaucuucuggucaucucugugcugguc

SEQ ID NO: 27985 - RNA, 32 nt, Human
aauauuaugugacagaauacgacucaauucac

SEQ ID NO: 27986 - RNA, 32 nt, Human
aauauucaguuuuaugucuccaugcaaacauu

SEQ ID NO: 27987 - RNA, 32 nt, Human
aauauucaguuuuaugucuccaugcaacauuc

SEQ ID NO: 27988 - RNA, 31 nt, Human
aauauucauacuucuuaccauauagaacuuc

SEQ ID NO: 27989 - RNA, 32 nt, Human
aauauuccaccaguguaucccuuguuuuccca

SEQ ID NO: 27990 - RNA, 32 nt, Human
aauauuccaguucugggucauuuagagagaua

SEQ ID NO: 27991 - RNA, 32 nt, Human
aauauucccacagauagacaaagucaagcaua

SEQ ID NO: 27992 - RNA, 32 nt, Human
aauauucccauguaacaaaucugcacaugugc

SEQ ID NO: 27993 - RNA, 32 nt, Human
aauauuccucacugcuagaaugagaccagagg

SEQ ID NO: 27994 - RNA, 32 nt, Human
aauauuccuucuuggcugggugcaguaguuua

SEQ ID NO: 27995 - RNA, 32 nt, Human
aauauucgcuugugucccuccuggggccuccg

SEQ ID NO: 27996 - RNA, 32 nt, Human
aauauucuacuguaggugaaaucuuuucaaaa

SEQ ID NO: 27997 - RNA, 32 nt, Human
aauauucuagauacaagcccuuuaucaaguau

SEQ ID NO: 27998 - RNA, 32 nt, Human
aauauucuccaccauucaagaugccuguguac

SEQ ID NO: 27999 - RNA, 32 nt, Human
aauauucucccaaggagugccaugauauugaa

SEQ ID NO: 28000 - RNA, 32 nt, Human
aauauucuggaaaugaaacaaguuauaacuga

SEQ ID NO: 28001 - RNA, 32 nt, Human
aauauucuuaccacuuaaaagagcaagcuaac

SEQ ID NO: 28002 - RNA, 32 nt, Human
aauauugaaaccccgcucuggagcugaaaagg

SEQ ID NO: 28003 - RNA, 32 nt, Human
aauauugaauuacaggcuuuggaggaguugug

SEQ ID NO: 28004 - RNA, 32 nt, Human
aauauugagcaguucccaaggacagucagcau

SEQ ID NO: 28005 - RNA, 32 nt, Human
aauauugauccuggcugugucugugagggugu

SEQ ID NO: 28006 - RNA, 32 nt, Human
aauauugcaccauugcacuccugccugggcaa

SEQ ID NO: 28007 - RNA, 32 nt, Human
aauauugccauuaugcuugacaugguuuccaa

SEQ ID NO: 28008 - RNA, 32 nt, Human
aauauugccuggguucaguuuuuauuuccauu

SEQ ID NO: 28009 - RNA, 32 nt, Human
aauauugcucugcagugcuuuuucagaaugua

SEQ ID NO: 28010 - RNA, 32 nt, Human
aauauugcugaguguggauugcucugaaaucu

SEQ ID NO: 28011 - RNA, 32 nt, Human
aauauugcuucugcucuauuucuuucuccuug

SEQ ID NO: 28012 - RNA, 32 nt, Human
aauauuggaaacgacauauccccaaaugauag

SEQ ID NO: 28013 - RNA, 32 nt, Human
aauauuggaaaguaucagauuuacagauuuuc

SEQ ID NO: 28014 - RNA, 32 nt, Human
aauauuggauuuguagguccugugccaccaaa

SEQ ID NO: 28015 - RNA, 32 nt, Human
aauauugggauuacagacaugagccaugagau

SEQ ID NO: 28016 - RNA, 32 nt, Human
aauauugucagagacuggugggaggaagccug

SEQ ID NO: 28017 - RNA, 32 nt, Human
aauauugucaucugauauacacauaaaacaac

SEQ ID NO: 28018 - RNA, 32 nt, Human
aauauugugccagggauacaaauauggccgua

SEQ ID NO: 28019 - RNA, 32 nt, Human
aauauuguguauggccgcuuugugcuacagua

SEQ ID NO: 28020 - RNA, 32 nt, Human
aauauuguguccuguggcugagccccacuuag

SEQ ID NO: 28021 - RNA, 32 nt, Human
aauauuguugcaauaaauauccuugaacacaa

SEQ ID NO: 28022 - RNA, 32 nt, Human
aauauuguuucaauuuagucuauccuggauau

SEQ ID NO: 28023 - RNA, 32 nt, Human
aauauuuacaucuguuaugaaaagcuaccuuu

SEQ ID NO: 28024 - RNA, 32 nt, Human
aauauuuacuuuguagaauaugacuuuagaca

SEQ ID NO: 28025 - RNA, 24 nt, Human
aauauuuagacauuuauagguaga

SEQ ID NO: 28026 - RNA, 20 nt, Human
aauauuuagacuauggcaga

SEQ ID NO: 28027 - RNA, 32 nt, Human
aauauuuagugcgguauugcucugugaauuca

SEQ ID NO: 28028 - RNA, 32 nt, Human
aauauuuauauguacuaaauguggaaccauua

SEQ ID NO: 28029 - RNA, 32 nt, Human
aauauuuauuuuugugggugucgacuuccuau

SEQ ID NO: 28030 - RNA, 32 nt, Human
aauauuucaaagagaucagcauuuuagaaaac

SEQ ID NO: 28031 - RNA, 32 nt, Human
aauauuucacauuugagauguuugggauuaag

SEQ ID NO: 28032 - RNA, 32 nt, Human
aauauuucagccccauaggauguguaagcuug

SEQ ID NO: 28033 - RNA, 32 nt, Human
aauauuucauucucucuuuacucccacuuuuu

SEQ ID NO: 28034 - RNA, 22 nt, Human
aauauuucauuuugagaacauu

SEQ ID NO: 28035 - RNA, 32 nt, Human
aauauuuccaacaaaagagcauagaugucuuu

SEQ ID NO: 28036 - RNA, 32 nt, Human
aauauuuccucuugacuucuuuuuguaacaag

SEQ ID NO: 28037 - RNA, 32 nt, Human
aauauuuccuucucuucuuuuuacagaaguca

SEQ ID NO: 28038 - RNA, 32 nt, Human
aauauuucucaaggaucuaucugugaggcacu

SEQ ID NO: 28039 - RNA, 32 nt, Human
aauauuucucacuuuauacuacuucuucagaa

SEQ ID NO: 28040 - RNA, 32 nt, Human
aauauuucuucccucacugcugauucuuagau

SEQ ID NO: 28041 - RNA, 32 nt, Human
aauauuucuuuguuuuuccuuuuggaaacuuu

SEQ ID NO: 28042 - RNA, 32 nt, Human
aauauuugaacaaaaauugagagcuuuauugc

SEQ ID NO: 28043 - RNA, 32 nt, Human
aauauuugaauagacaccuuagaaaucuuugc

SEQ ID NO: 28044 - RNA, 32 nt, Human
aauauuugacuauucuguaucuuucauccuug

SEQ ID NO: 28045 - RNA, 32 nt, Human
aauauuugagacaaacggccuauuggcuauuu

SEQ ID NO: 28046 - RNA, 32 nt, Human
aauauuugaguauuuuuauauugacaaauaaa

SEQ ID NO: 28047 - RNA, 32 nt, Human
aauauuugcaguaucuaagaauugaucauuuc

SEQ ID NO: 28048 - RNA, 32 nt, Human
aauauuugcauuuugcacaaugacugguauga

SEQ ID NO: 28049 - RNA, 32 nt, Human
aauauuugccauguuaagugcugguaauuaua

SEQ ID NO: 28050 - RNA, 32 nt, Human
aauauuugcuauguguaaaaugcuuauuccuu

SEQ ID NO: 28051 - RNA, 32 nt, Human
aauauuugcugugaagggagaaagggagagaa

SEQ ID NO: 28052 - RNA, 32 nt, Human
aauauuugcuugucuuugccccuagacucuag

SEQ ID NO: 28053 - RNA, 32 nt, Human
aauauuuggaaccugcauuaguuccagcaaug

SEQ ID NO: 28054 - RNA, 32 nt, Human
aauauuuggagagauuguguggauuuaagaga

SEQ ID NO: 28055 - RNA, 25 nt, Human
aauauuugguuuaauaaaaugugaa

SEQ ID NO: 28056 - RNA, 32 nt, Human
aauauuuguaccacuuccaaacuuuucagcgu

SEQ ID NO: 28057 - RNA, 32 nt, Human
aauauuuguauacacauaaugagaccuugggg

SEQ ID NO: 28058 - RNA, 32 nt, Human
aauauuuguccuuucucaagagcaccagagag

SEQ ID NO: 28059 - RNA, 32 nt, Human
aauauuuguguucauucuaucauucgugcuau

SEQ ID NO: 28060 - RNA, 32 nt, Human
aauauuuguuacuguuaucuaucugcuguaua

SEQ ID NO: 28061 - RNA, 32 nt, Human
aauauuuguucugguuuaguguucuguauuuu

SEQ ID NO: 28062 - RNA, 32 nt, Human
aauauuuguugacugaucaaauguuuuggugc

SEQ ID NO: 28063 - RNA, 32 nt, Human
aauauuuuaaaacugggcuuucccaguauuuc

SEQ ID NO: 28064 - RNA, 32 nt, Human
aauauuuuaacaacugguacaggacagaugcc

SEQ ID NO: 28065 - RNA, 32 nt, Human
aauauuuuaaguguacucaaaauaucauaauu

SEQ ID NO: 28066 - RNA, 32 nt, Human
aauauuuugaugaccaaguuuucuggaaguuu

SEQ ID NO: 28067 - RNA, 32 nt, Human
aauauuuuguuaauuccugucucuccaaccug

SEQ ID NO: 28068 - RNA, 32 nt, Human
aauauuuuuagauccauuuaaggaguuuugaa

SEQ ID NO: 28069 - RNA, 32 nt, Human
aauauuuuuccuauuggacaauggacuugcaa

SEQ ID NO: 28070 - RNA, 32 nt, Human
aauauuuuuccugacagagguuaaugccuuua

SEQ ID NO: 28071 - RNA, 32 nt, Human
aaucaaaagagagcagggugguauucuacaaa

SEQ ID NO: 28072 - RNA, 32 nt, Human
aaucaaaagucuagaacccacacggaaugcug

SEQ ID NO: 28073 - RNA, 32 nt, Human
aaucaaaaguggagagucgaaaugcugugcca

SEQ ID NO: 28074 - RNA, 21 nt, Human
aaucaaacacaacacaagaaa

SEQ ID NO: 28075 - RNA, 32 nt, Human
aaucaaaccuuacuugccucuggaacaccugc

SEQ ID NO: 28076 - RNA, 32 nt, Human
aaucaaaccuuacuugccucuggaacaccuuc

SEQ ID NO: 28077 - RNA, 19 nt, Human
aaucaaacuaaaagacaag

SEQ ID NO: 28078 - RNA, 32 nt, Human
aaucaaagagucaucauaguaggaaauaacau

SEQ ID NO: 28079 - RNA, 32 nt, Human
aaucaaagauacauggugguagggucaccaaa

SEQ ID NO: 28080 - RNA, 32 nt, Human
aaucaaaggagacaugucuccugggaagagcc

SEQ ID NO: 28081 - RNA, 32 nt, Human
aaucaaaggcugaaaucucugccugaccuggc

SEQ ID NO: 28082 - RNA, 32 nt, Human
aaucaaaguaauaucauacucuucucaguuau

SEQ ID NO: 28083 - RNA, 32 nt, Human
aaucaaaguacuugauggggaagaugaauauu

SEQ ID NO: 28084 - RNA, 32 nt, Human
aaucaaagugaaagccauguaagccaucccag

SEQ ID NO: 28085 - RNA, 32 nt, Human
aaucaaauaacgcaguuuuggaaaccuauaac

SEQ ID NO: 28086 - RNA, 32 nt, Human
aaucaaaucuggaacaaaugaaacaucuuuua

SEQ ID NO: 28087 - RNA, 32 nt, Human
aaucaaaugaaaggugacauugccagaaacuu

SEQ ID NO: 28088 - RNA, 32 nt, Human
aaucaaaugauacauauuccugagagacccag

SEQ ID NO: 28089 - RNA, 32 nt, Human
aaucaaaugaugcaaaauauauacaagcacuu

SEQ ID NO: 28090 - RNA, 32 nt, Human
aaucaaauugaauauaucuuuuaagaauucaa

SEQ ID NO: 28091 - RNA, 32 nt, Human
aaucaaauuguacacuucucagccuggguuca

SEQ ID NO: 28092 - RNA, 32 nt, Human
aaucaacaaaguaagcaugacacuucaaagaa

SEQ ID NO: 28093 - RNA, 32 nt, Human
aaucaacacagaaucucccagacacacgugac

SEQ ID NO: 28094 - RNA, 23 nt, Human
aaucaacacauuuuaaggcugaa

SEQ ID NO: 28095 - RNA, 32 nt, Human
aaucaacacauuuuucuuucucgucuugagaa

SEQ ID NO: 28096 - RNA, 32 nt, Human
aaucaacacuguucucucuguaccaugagcuc

SEQ ID NO: 28097 - RNA, 32 nt, Human
aaucaacagauguacagaucagcucucaaaau

SEQ ID NO: 28098 - RNA, 32 nt, Human
aaucaacagcauauugacacguuggagccgag

SEQ ID NO: 28099 - RNA, 32 nt, Human
aaucaaccaugcuagaggaaagaugguauucu

SEQ ID NO: 28100 - RNA, 32 nt, Human
aaucaacccugggguggcuuuaggacugggcu

SEQ ID NO: 28101 - RNA, 32 nt, Human
aaucaacucaauauaucauacauuuacacuua

SEQ ID NO: 28102 - RNA, 32 nt, Human
aaucaacuccacagaaccaccaaaaagaaaau

SEQ ID NO: 28103 - RNA, 32 nt, Human
aaucaacuucaaggagcaccuucauuaguaca

SEQ ID NO: 28104 - RNA, 32 nt, Human
aaucaacuuuuauuaauuuucuagugcuuugg

SEQ ID NO: 28105 - RNA, 32 nt, Human
aaucaagaauuugccaagacuuccuucccucc

SEQ ID NO: 28106 - RNA, 32 nt, Human
aaucaagacagagaaacaauuaucuucagaga

SEQ ID NO: 28107 - RNA, 32 nt, Human
aaucaagacuugcucugcagccacucaguagu

SEQ ID NO: 28108 - RNA, 32 nt, Human
aaucaagauguggcugaagaucagaggcucag

SEQ ID NO: 28109 - RNA, 32 nt, Human
aaucaagcaaacuggaaucaaggggaggggga

SEQ ID NO: 28110 - RNA, 32 nt, Human
aaucaagcagagccagacugaaagagacagac

SEQ ID NO: 28111 - RNA, 22 nt, Human
aaucaagcagcccucugauaga

SEQ ID NO: 28112 - RNA, 32 nt, Human
aaucaagcaggcuuaacacuguguacauauug

SEQ ID NO: 28113 - RNA, 32 nt, Human
aaucaagcaucaucuucuagucacucuuccau

SEQ ID NO: 28114 - RNA, 32 nt, Human
aaucaagcauuuucuugaaagccuucauaagu

SEQ ID NO: 28115 - RNA, 32 nt, Human
aaucaagccagccugggcuccacccacccugg

SEQ ID NO: 28116 - RNA, 32 nt, Human
aaucaagccgagaggaggcccacuaugccccc

SEQ ID NO: 28117 - RNA, 32 nt, Human
aaucaagccucauuuacaacaaaaagaacccu

SEQ ID NO: 28118 - RNA, 32 nt, Human
aaucaagcuuuggaaguccaaaaagaauaaaa

SEQ ID NO: 28119 - RNA, 32 nt, Human
aaucaaggaauuaggggucgggggaggguuua

SEQ ID NO: 28120 - RNA, 32 nt, Human
aaucaaggagaaggacaaagaaaacaaguucc

SEQ ID NO: 28121 - RNA, 32 nt, Human
aaucaagggaagaaggaggaaugcuggacugg

SEQ ID NO: 28122 - RNA, 32 nt, Human
aaucaagggucaggccuuugagcucagaaaau

SEQ ID NO: 28123 - RNA, 32 nt, Human
aaucaaguauuauaaacaagaaugaagguuuu

SEQ ID NO: 28124 - RNA, 32 nt, Human
aaucaagucaccacacuccagccugggugaca

SEQ ID NO: 28125 - RNA, 32 nt, Human
aaucaagucucacagauugcugccucagagca

SEQ ID NO: 28126 - RNA, 32 nt, Human
aaucaagugagcagaaaaacaaugggcaagcc

SEQ ID NO: 28127 - RNA, 29 nt, Human
aaucaagugauuggugugccugggucuca

SEQ ID NO: 28128 - RNA, 32 nt, Human
aaucaagugguauuuuccagcacuuuguauga

SEQ ID NO: 28129 - RNA, 32 nt, Human
aaucaaguugugaccaccuccauuggagggca

SEQ ID NO: 28130 - RNA, 32 nt, Human
aaucaauacaaaccagcaacuaauaaaaccuc

SEQ ID NO: 28131 - RNA, 32 nt, Human
aaucaauagcccagagagcuuagucaaagacg

SEQ ID NO: 28132 - RNA, 32 nt, Human
aaucaaucaauaaagaaagauggaaggaaggg

SEQ ID NO: 28133 - RNA, 32 nt, Human
aaucaaucccaaagagccugaguaaaugaaag

SEQ ID NO: 28134 - RNA, 32 nt, Human
aaucaaugcacugucuguccucuccuuuuuag

SEQ ID NO: 28135 - RNA, 32 nt, Human
aaucaauggaaagaggaagaccgccaaagaac

SEQ ID NO: 28136 - RNA, 32 nt, Human
aaucaauguaaggacugaaguugaaguagcaa

SEQ ID NO: 28137 - RNA, 31 nt, Human
aaucacaaauuuccuugccauuuaaauuaua

SEQ ID NO: 28138 - RNA, 32 nt, Human
aaucacaacauaguuccucucuccuuuccuga

SEQ ID NO: 28139 - RNA, 32 nt, Human
aaucacaaccaucuuuucauauacaggaaguc

SEQ ID NO: 28140 - RNA, 32 nt, Human
aaucacaagggcaaggagagauguuccuucag

SEQ ID NO: 28141 - RNA, 32 nt, Human
aaucacaaguacaguccuuuccaacaccccug

SEQ ID NO: 28142 - RNA, 32 nt, Human
aaucacaaugguaagaaaaaugaagacaggca

SEQ ID NO: 28143 - RNA, 32 nt, Human
aaucacacacaucacaucaccagugccaaaau

SEQ ID NO: 28144 - RNA, 32 nt, Human
aaucacacacgguuuuaguuuuaauggacaug

SEQ ID NO: 28145 - RNA, 32 nt, Human
aaucacaccacugcacuccagccugggcaacu

SEQ ID NO: 28146 - RNA, 32 nt, Human
aaucacaccacugcacuccagcuugggggaua

SEQ ID NO: 28147 - RNA, 32 nt, Human
aaucacaccacugcacucuagccugggcaaca

SEQ ID NO: 28148 - RNA, 32 nt, Human
aaucacaccacuguacuccagccuggugacag

SEQ ID NO: 28149 - RNA, 32 nt, Human
aaucacaccauugcacuccagcuugggcaaca

SEQ ID NO: 28150 - RNA, 32 nt, Human
aaucacacccugacucuuccagccuccauguc

SEQ ID NO: 28151 - RNA, 32 nt, Human
aaucacaccgagaagucacagccccucaacca

SEQ ID NO: 28152 - RNA, 32 nt, Human
aaucacaccuguaaucccagcacuuugggauu

SEQ ID NO: 28153 - RNA, 32 nt, Human
aaucacacugcacacagggucccugaaaucca

SEQ ID NO: 28154 - RNA, 32 nt, Human
aaucacacugcugcuuggauaacuggguacuu

SEQ ID NO: 28155 - RNA, 32 nt, Human
aaucacacuggcgggaaugaagauugugccag

SEQ ID NO: 28156 - RNA, 32 nt, Human
aaucacagaacaguacuuuucuuuuaguguuu

SEQ ID NO: 28157 - RNA, 32 nt, Human
aaucacagaaugaaggcggugaagagcgaacg

SEQ ID NO: 28158 - RNA, 32 nt, Human
aaucacagacacacacuuucuauuccauucca

SEQ ID NO: 28159 - RNA, 32 nt, Human
aaucacagacagagacagggaaagagagagaa

SEQ ID NO: 28160 - RNA, 32 nt, Human
aaucacagcuacucaggagacugaagcaggag

SEQ ID NO: 28161 - RNA, 32 nt, Human
aaucacagcuacucaggaggcugaggcagaag

SEQ ID NO: 28162 - RNA, 32 nt, Human
aaucacagcuacucgggaggcugaggcagaga

SEQ ID NO: 28163 - RNA, 32 nt, Human
aaucacagcuacuugggaggcugagaugggag

SEQ ID NO: 28164 - RNA, 32 nt, Human
aaucacagcuacuugggaggcugaggcaggag

SEQ ID NO: 28165 - RNA, 32 nt, Human
aaucacagcuacuugggaggcugaggcaugag

SEQ ID NO: 28166 - RNA, 32 nt, Human
aaucacagcugacugcagccuugaccuccagg

SEQ ID NO: 28167 - RNA, 32 nt, Human
aaucacagcugccccgaccuuggcuuccucug

SEQ ID NO: 28168 - RNA, 32 nt, Human
aaucacagcuggcuuaucaauauugcuguuug

SEQ ID NO: 28169 - RNA, 32 nt, Human
aaucacagcuuccuugucggaggggaaaagga

SEQ ID NO: 28170 - RNA, 32 nt, Human
aaucacaggaaaauguauccagaggaauugau

SEQ ID NO: 28171 - RNA, 32 nt, Human
aaucacaggaaaucauccaggucucuaccugg

SEQ ID NO: 28172 - RNA, 32 nt, Human
aaucacaguguucacagcucugcuucauaaca

SEQ ID NO: 28173 - RNA, 32 nt, Human
aaucacaguuuuuccuggaauugccagcugac

SEQ ID NO: 28174 - RNA, 32 nt, Human
aaucacauaguuuuaucaguguauuuagacac

SEQ ID NO: 28175 - RNA, 32 nt, Human
aaucacaucuucagaagagaagacacuaauau

SEQ ID NO: 28176 - RNA, 32 nt, Human
aaucacaugcagcugacucggacacuggccuu

SEQ ID NO: 28177 - RNA, 32 nt, Human
aaucaccagaaacaauuugcuuagauuaaaau

SEQ ID NO: 28178 - RNA, 32 nt, Human
aaucaccagaguucaagaguucaagaccagcc

SEQ ID NO: 28179 - RNA, 32 nt, Human
aaucaccagcugucugcuggguucuuuucuca

SEQ ID NO: 28180 - RNA, 32 nt, Human
aaucaccauaaauaagaaugcuaaacagaauu

SEQ ID NO: 28181 - RNA, 32 nt, Human
aaucacccaagcggccucagaagucccaggga

SEQ ID NO: 28182 - RNA, 32 nt, Human
aaucacccagauccuucggccugguggauguc

SEQ ID NO: 28183 - RNA, 32 nt, Human
aaucaccccugccugugucaguuauuauauuu

SEQ ID NO: 28184 - RNA, 32 nt, Human
aaucaccccugccuuuuguucaacucuauaaa

SEQ ID NO: 28185 - RNA, 18 nt, Human
aaucaccccuuccaggaa

SEQ ID NO: 28186 - RNA, 32 nt, Human
aaucacccucugucucuccugccuucugcuua

SEQ ID NO: 28187 - RNA, 32 nt, Human
aaucaccuauguuuacagcgacagccuccauc

SEQ ID NO: 28188 - RNA, 32 nt, Human
aaucaccucaccucucugagccuguucccucc

SEQ ID NO: 28189 - RNA, 32 nt, Human
aaucaccucagcauccuccuguccccagcugu

SEQ ID NO: 28190 - RNA, 19 nt, Human
aaucaccucccaccagccc

SEQ ID NO: 28191 - RNA, 21 nt, Human
aaucaccucccuagcaaccuu

SEQ ID NO: 28192 - RNA, 32 nt, Human
aaucaccucuagcuguucucagucccauucuc

SEQ ID NO: 28193 - RNA, 32 nt, Human
aaucaccucugaggccugggcccaggguucag

SEQ ID NO: 28194 - RNA, 32 nt, Human
aaucaccugcuacccagcugucaaugaagacu

SEQ ID NO: 28195 - RNA, 21 nt, Human
aaucaccuuaagaaggacagg

SEQ ID NO: 28196 - RNA, 32 nt, Human
aaucaccuugagugacugggcagcagcggugg

SEQ ID NO: 28197 - RNA, 32 nt, Human
aaucaccuuucgaggcccuucagacucuggcg

SEQ ID NO: 28198 - RNA, 32 nt, Human
aaucaccuuucuaagcccuggggcgcccaagu

SEQ ID NO: 28199 - RNA, 32 nt, Human
aaucacgccacuacacuccagccugggcaaca

SEQ ID NO: 28200 - RNA, 32 nt, Human
aaucacgccacugcacuccagccugggcaaca

SEQ ID NO: 28201 - RNA, 32 nt, Human
aaucacgccacugcacuccagccugggcugca

SEQ ID NO: 28202 - RNA, 32 nt, Human
aaucacgcccgguggaccuggggagaccagac

SEQ ID NO: 28203 - RNA, 17 nt, Human
aaucacgcguguccacg

SEQ ID NO: 28204 - RNA, 32 nt, Human
aaucacguaguccuuccugaaaccacuaagag

SEQ ID NO: 28205 - RNA, 32 nt, Human
aaucacgugaagauggggcgagugcugggcgu

SEQ ID NO: 28206 - RNA, 32 nt, Human
aaucacguucagccaaguggaguuuccgacgc

SEQ ID NO: 28207 - RNA, 32 nt, Human
aaucacuaaucagaaaacugugcccaauauuu

SEQ ID NO: 28208 - RNA, 32 nt, Human
aaucacuagaagccaggaggcagagguugcag

SEQ ID NO: 28209 - RNA, 32 nt, Human
aaucacucauuucuauucauuccucaggcacu

SEQ ID NO: 28210 - RNA, 32 nt, Human
aaucacuccaauaaauauucuccuacagauga

SEQ ID NO: 28211 - RNA, 32 nt, Human
aaucacucccugcucaucauaaccggcaccuc

SEQ ID NO: 28212 - RNA, 32 nt, Human
aaucacugaacaaaagaaacaggcaacauuca

SEQ ID NO: 28213 - RNA, 32 nt, Human
aaucacugcacuccaaccuggcaacagaguga

SEQ ID NO: 28214 - RNA, 32 nt, Human
aaucacugcagucagcucacaggaagccacau

SEQ ID NO: 28215 - RNA, 32 nt, Human
aaucacugcuccauauuugccaguggaggaaa

SEQ ID NO: 28216 - RNA, 32 nt, Human
aaucacuggacagaagccaugaggcagagcca

SEQ ID NO: 28217 - RNA, 32 nt, Human
aaucacugggaaauuuaaguuugcagauccca

SEQ ID NO: 28218 - RNA, 32 nt, Human
aaucacugggcugggugcaguggcucacgccu

SEQ ID NO: 28219 - RNA, 32 nt, Human
aaucacuguaaugagaaugguacuggaaaaau

SEQ ID NO: 28220 - RNA, 32 nt, Human
aaucacuguaguuagaaucacauacagaaaaa

SEQ ID NO: 28221 - RNA, 32 nt, Human
aaucacuguauguaacaaacagccauauuuaa

SEQ ID NO: 28222 - RNA, 32 nt, Human
aaucacuguuaaaaucuuacuacuucauggag

SEQ ID NO: 28223 - RNA, 32 nt, Human
aaucacuguuuaguucagaagguucuaagaca

SEQ ID NO: 28224 - RNA, 24 nt, Human
aaucacuuccuuaacaaaggaaga

SEQ ID NO: 28225 - RNA, 21 nt, Human
aaucacuuccuuuaggacuga

SEQ ID NO: 28226 - RNA, 24 nt, Human
aaucacuugaacccaaaaggcaga

SEQ ID NO: 28227 - RNA, 32 nt, Human
aaucacuugagccaggaggaggagguugcagu

SEQ ID NO: 28228 - RNA, 31 nt, Human
aaucacuugagcccaggaguuggagaccugc

SEQ ID NO: 28229 - RNA, 32 nt, Human
aaucacuuuaaugccagaacaugguaaauuug

SEQ ID NO: 28230 - RNA, 32 nt, Human
aaucagaagcaguucuuaguagaggcauuucu

SEQ ID NO: 28231 - RNA, 32 nt, Human
aaucagaauaagaaguaccugacauacuuucu

SEQ ID NO: 28232 - RNA, 32 nt, Human
aaucagacagaauauuguugaccuugggggcu

SEQ ID NO: 28233 - RNA, 32 nt, Human
aaucagacagccgccucuaggggcuggguucu

SEQ ID NO: 28234 - RNA, 32 nt, Human
aaucagacaggccacuaagguaaaagagucug

SEQ ID NO: 28235 - RNA, 22 nt, Human
aaucagaccauuucagguagaa

SEQ ID NO: 28236 - RNA, 32 nt, Human
aaucagacuauacauuuacacucccaaauugc

SEQ ID NO: 28237 - RNA, 32 nt, Human
aaucagagaaaaucgcucuaaucauugaaaag

SEQ ID NO: 28238 - RNA, 32 nt, Human
aaucagagagagcucgacucacugugggucag

SEQ ID NO: 28239 - RNA, 32 nt, Human
aaucagagagcagcagauucugaagucaagcu

SEQ ID NO: 28240 - RNA, 32 nt, Human
aaucagagaugcuguagcuccuuggggcaaag

SEQ ID NO: 28241 - RNA, 32 nt, Human
aaucagaggaccaaaguacagauggaaaccau

SEQ ID NO: 28242 - RNA, 32 nt, Human
aaucagagguaauguauuuuggcagcuuguuu

SEQ ID NO: 28243 - RNA, 32 nt, Human
aaucagaucucugacuuaagucaggguggguu

SEQ ID NO: 28244 - RNA, 32 nt, Human
aaucagaugcagcuuucuccuccgucuggucu

SEQ ID NO: 28245 - RNA, 31 nt, Human
aaucagaugccggccucagagcucaaggcuu

SEQ ID NO: 28246 - RNA, 32 nt, Human
aaucagauggcucauucucuccuuccagcucu

SEQ ID NO: 28247 - RNA, 32 nt, Human
aaucagauuauuaagggaauaagccaugacgu

SEQ ID NO: 28248 - RNA, 32 nt, Human
aaucagauuguaaucccaguacuuugggaggc

SEQ ID NO: 28249 - RNA, 32 nt, Human
aaucagcaacucuucaaucccaaccugcgcug

SEQ ID NO: 28250 - RNA, 20 nt, Human
aaucagcaaucuucaaaagc

SEQ ID NO: 28251 - RNA, 21 nt, Human
aaucagcagagcacagaagcc

SEQ ID NO: 28252 - RNA, 32 nt, Human
aaucagcaggacuccugccuuccuucggggca

SEQ ID NO: 28253 - RNA, 22 nt, Human
aaucagcauacaauaaaagacu

SEQ ID NO: 28254 - RNA, 20 nt, Human
aaucagcaugccucuagagg

SEQ ID NO: 28255 - RNA, 32 nt, Human
aaucagccauugcucugcuccuggcauagagu

SEQ ID NO: 28256 - RNA, 24 nt, Human
aaucagccgagaaguuccuggucu

SEQ ID NO: 28257 - RNA, 32 nt, Human
aaucagccugagcuuuacacagcuggggucug

SEQ ID NO: 28258 - RNA, 32 nt, Human
aaucagccuuucuccucuucucuucuugggac

SEQ ID NO: 28259 - RNA, 32 nt, Human
aaucagcggcuccuccccaucucacccccagc

SEQ ID NO: 28260 - RNA, 32 nt, Human
aaucagcucacuggauuccaucacccugagcg

SEQ ID NO: 28261 - RNA, 19 nt, Human
aaucagcuccuuucuaguc

SEQ ID NO: 28262 - RNA, 32 nt, Human
aaucagcugcagcugcuuguugucaaguauaa

SEQ ID NO: 28263 - RNA, 32 nt, Human
aaucagcugcaggucucuguuuugaaaaagca

SEQ ID NO: 28264 - RNA, 32 nt, Human
aaucagcugccauccugcccuccagggacaac

SEQ ID NO: 28265 - RNA, 32 nt, Human
aaucagcuguuauuccaagcuaucaugcuuaa

SEQ ID NO: 28266 - RNA, 32 nt, Human
aaucaggaagugacagugaugacugagaaaua

SEQ ID NO: 28267 - RNA, 32 nt, Human
aaucaggaauggguuuuggugccugaaaaauu

SEQ ID NO: 28268 - RNA, 32 nt, Human
aaucaggacaguguuaacacagaagaaaagaa

SEQ ID NO: 28269 - RNA, 32 nt, Human
aaucaggaccuccuugcagcaccagaagaacc

SEQ ID NO: 28270 - RNA, 32 nt, Human
aaucaggacuccuaaccugcuccagucagccu

SEQ ID NO: 28271 - RNA, 32 nt, Human
aaucaggagaggagggagguaggaggugcaag

SEQ ID NO: 28272 - RNA, 32 nt, Human
aaucaggagagggagauaauuaguugcuuccu

SEQ ID NO: 28273 - RNA, 32 nt, Human
aaucaggagagggauacaagagaggagauggg

SEQ ID NO: 28274 - RNA, 32 nt, Human
aaucaggaggcugaggcaagaggauugcuugg

SEQ ID NO: 28275 - RNA, 32 nt, Human
aaucaggaggcugaggcagagaaucacuugaa

SEQ ID NO: 28276 - RNA, 32 nt, Human
aaucaggaugaaagucaaacuucugcauccuc

SEQ ID NO: 28277 - RNA, 32 nt, Human
aaucaggauuuuuagugcuugccaccaccaga

SEQ ID NO: 28278 - RNA, 32 nt, Human
aaucaggcaaaaauacuuacaguuaauaauau

SEQ ID NO: 28279 - RNA, 32 nt, Human
aaucaggcaagugcuuaaaaggccaacggucc

SEQ ID NO: 28280 - RNA, 32 nt, Human
aaucaggcacuucuaacucaccccaagcucgc

SEQ ID NO: 28281 - RNA, 32 nt, Human
aaucaggcagaggcguuccuuaagcauuagag

SEQ ID NO: 28282 - RNA, 32 nt, Human
aaucaggcagcacccagcugugggggcagugg

SEQ ID NO: 28283 - RNA, 21 nt, Human
aaucaggcagccgcaaaaccu

SEQ ID NO: 28284 - RNA, 25 nt, Human
aaucaggcagccgcaaaaccuggca

SEQ ID NO: 28285 - RNA, 32 nt, Human
aaucaggcaguuccaggacacagggaagugag

SEQ ID NO: 28286 - RNA, 32 nt, Human
aaucaggccagaggacaacaggcuggcguuuu

SEQ ID NO: 28287 - RNA, 32 nt, Human
aaucaggcccagaccgccucucuggaaggugu

SEQ ID NO: 28288 - RNA, 32 nt, Human
aaucaggccgcuggcaggcugcuaauuagcuc

SEQ ID NO: 28289 - RNA, 32 nt, Human
aaucaggcuacagcacuccagccugggcaaca

SEQ ID NO: 28290 - RNA, 32 nt, Human
aaucaggcugggacugaucagaggugaaggga

SEQ ID NO: 28291 - RNA, 32 nt, Human
aaucaggcugugaaucugcagcagugauccca

SEQ ID NO: 28292 - RNA, 32 nt, Human
aaucagggaccagcuuuacuggaguugggggc

SEQ ID NO: 28293 - RNA, 32 nt, Human
aaucagggaggcggagguuguggugagccgag

SEQ ID NO: 28294 - RNA, 32 nt, Human
aaucaggggacuuccccaccuguggugggagg

SEQ ID NO: 28295 - RNA, 32 nt, Human
aaucaggggccagagagcaggggagcuuggga

SEQ ID NO: 28296 - RNA, 32 nt, Human
aaucagggucucgugcugcccuucccucccac

SEQ ID NO: 28297 - RNA, 32 nt, Human
aaucagggugguucccagcuccccaguccagg

SEQ ID NO: 28298 - RNA, 32 nt, Human
aaucaguagagaagugcuuaggguugaaaauu

SEQ ID NO: 28299 - RNA, 32 nt, Human
aaucaguaucuagaucucugcacuuggcaugg

SEQ ID NO: 28300 - RNA, 32 nt, Human
aaucaguaugaauauuauaugccuaaauaaaa

SEQ ID NO: 28301 - RNA, 32 nt, Human
aaucagucaccaggcucuccccaaaaccaugc

SEQ ID NO: 28302 - RNA, 32 nt, Human
aaucagucagcaccugugauucuuuuacuuau

SEQ ID NO: 28303 - RNA, 32 nt, Human
aaucagucauggugauuuaaaauagcuaucaa

SEQ ID NO: 28304 - RNA, 32 nt, Human
aaucaguccuuuuauagcuuucuaaguucuua

SEQ ID NO: 28305 - RNA, 32 nt, Human
aaucagugagccagaagcugauguugaguccg

SEQ ID NO: 28306 - RNA, 32 nt, Human
aaucagugaugcuccuguuacaggcaugguuu

SEQ ID NO: 28307 - RNA, 32 nt, Human
aaucagugcgagcguccugcagaggcauggcc

SEQ ID NO: 28308 - RNA, 32 nt, Human
aaucagugcuuguacuggaggcugaauuggaa

SEQ ID NO: 28309 - RNA, 32 nt, Human
aaucagugugggcuccugcagugggcgcgggu

SEQ ID NO: 28310 - RNA, 32 nt, Human
aaucaguguuaggaugccucagccugaacucu

SEQ ID NO: 28311 - RNA, 32 nt, Human
aaucaguguucuguucuaccuggcuacugcuu

SEQ ID NO: 28312 - RNA, 32 nt, Human
aaucaguguugggguugcaggagaccuaaaca

SEQ ID NO: 28313 - RNA, 32 nt, Human
aaucaguucuuaucuuucaucuguuuccuagg

SEQ ID NO: 28314 - RNA, 32 nt, Human
aaucaguucuucuucccugucaguggugguga

SEQ ID NO: 28315 - RNA, 32 nt, Human
aaucaguuguaaaaguguguuggcaauguccg

SEQ ID NO: 28316 - RNA, 32 nt, Human
aaucauaaagucaguugcucaaaaagaaauca

SEQ ID NO: 28317 - RNA, 32 nt, Human
aaucauaagugggguggcggggccagucuagg

SEQ ID NO: 28318 - RNA, 32 nt, Human
aaucauaauccuuuugcugcuuaucugauguu

SEQ ID NO: 28319 - RNA, 32 nt, Human
aaucauaauuucuucuuacuggccagauacua

SEQ ID NO: 28320 - RNA, 32 nt, Human
aaucauacaagaaaguuuuaugauuuccagag

SEQ ID NO: 28321 - RNA, 32 nt, Human
aaucauacccuugucugcuccaauucagucuc

SEQ ID NO: 28322 - RNA, 32 nt, Human
aaucauacuuccucugugagacaggccauaac

SEQ ID NO: 28323 - RNA, 32 nt, Human
aaucauagccaagaucccaucucuccauauac

SEQ ID NO: 28324 - RNA, 31 nt, Human
aaucauaggaaacugccccugagcucacaca

SEQ ID NO: 28325 - RNA, 32 nt, Human
aaucauauaagaaaacugauucucagugaaau

SEQ ID NO: 28326 - RNA, 32 nt, Human
aaucauauaguggggcucagggccagugcuca

SEQ ID NO: 28327 - RNA, 32 nt, Human
aaucauaucuauucaaaccacccacccccauc

SEQ ID NO: 28328 - RNA, 32 nt, Human
aaucauaugacuugcuuuuuccauuccaguca

SEQ ID NO: 28329 - RNA, 32 nt, Human
aaucauauugaaugauauuucuauaucgaagu

SEQ ID NO: 28330 - RNA, 32 nt, Human
aaucaucaaagaaccuguuugggauauaaaac

SEQ ID NO: 28331 - RNA, 32 nt, Human
aaucaucaacuaaaagcacuuguuucaaguuu

SEQ ID NO: 28332 - RNA, 32 nt, Human
aaucaucaagagaauuuggggcuuccaaguug

SEQ ID NO: 28333 - RNA, 32 nt, Human
aaucaucacaggucgauccaggcacagaucug

SEQ ID NO: 28334 - RNA, 32 nt, Human
aaucaucacaucuuuuccuucagaaacauccu

SEQ ID NO: 28335 - RNA, 32 nt, Human
aaucaucacucucucuuuccuccccgacgaag

SEQ ID NO: 28336 - RNA, 32 nt, Human
aaucaucagauuggcuucccagauuugggaau

SEQ ID NO: 28337 - RNA, 32 nt, Human
aaucaucagcugugggcaucaggcccaccagc

SEQ ID NO: 28338 - RNA, 32 nt, Human
aaucaucaucccucaucacccacagucgcccg

SEQ ID NO: 28339 - RNA, 32 nt, Human
aaucaucccauggauaaugaugacgaagccac

SEQ ID NO: 28340 - RNA, 32 nt, Human
aaucaucccugccucugccauucacacugacu

SEQ ID NO: 28341 - RNA, 32 nt, Human
aaucauccugacgcagaugcaccagaaguagu

SEQ ID NO: 28342 - RNA, 32 nt, Human
aaucaucguuuucccuggcaggugguacagcc

SEQ ID NO: 28343 - RNA, 32 nt, Human
aaucaucuaguucugucaucuuacugaaagga

SEQ ID NO: 28344 - RNA, 32 nt, Human
aaucaucucauguaccugacaguaagaaaaua

SEQ ID NO: 28345 - RNA, 32 nt, Human
aaucaucucuaaugcuacuauuucucugcaca

SEQ ID NO: 28346 - RNA, 32 nt, Human
aaucaucucucccuuccucuaugucaagcacu

SEQ ID NO: 28347 - RNA, 32 nt, Human
aaucaucugggcuccuguccagcuccacaugu

SEQ ID NO: 28348 - RNA, 32 nt, Human
aaucaucuuagcacccuuuccucacaauaaua

SEQ ID NO: 28349 - RNA, 32 nt, Human
aaucaucuucuccuggccaaggcucugaccau

SEQ ID NO: 28350 - RNA, 32 nt, Human
aaucaucuuguuggcccugaccucguuggaaa

SEQ ID NO: 28351 - RNA, 32 nt, Human
aaucaugaacagcucugagauccuggagugau

SEQ ID NO: 28352 - RNA, 32 nt, Human
aaucaugauuguaggcugggcacagugucgcg

SEQ ID NO: 28353 - RNA, 32 nt, Human
aaucaugccacugcacccuagcuuggguggca

SEQ ID NO: 28354 - RNA, 32 nt, Human
aaucaugccacugcacuccagccugggcaaca

SEQ ID NO: 28355 - RNA, 32 nt, Human
aaucaugccacugcauucuagcuuugauggcg

SEQ ID NO: 28356 - RNA, 32 nt, Human
aaucaugccacuguacuccagccugggugaca

SEQ ID NO: 28357 - RNA, 32 nt, Human
aaucaugccauccugccuuuccauggaauaac

SEQ ID NO: 28358 - RNA, 32 nt, Human
aaucaugccauugcacuccagccugggugaca

SEQ ID NO: 28359 - RNA, 32 nt, Human
aaucaugcccacacccccagagcccagcaugg

SEQ ID NO: 28360 - RNA, 32 nt, Human
aaucaugcccguuccccucugccuggcagaau

SEQ ID NO: 28361 - RNA, 32 nt, Human
aaucaugccucacugcagccucggcuuccugg

SEQ ID NO: 28362 - RNA, 32 nt, Human
aaucaugccuggcacacggcacuggcagagac

SEQ ID NO: 28363 - RNA, 32 nt, Human
aaucaugccuguaaagcccaaacauuuguaac

SEQ ID NO: 28364 - RNA, 20 nt, Human
aaucaugcuggagggaagcc

SEQ ID NO: 28365 - RNA, 32 nt, Human
aaucauggaaaagauaaagauucaagacggaa

SEQ ID NO: 28366 - RNA, 32 nt, Human
aaucauggacaaaggcugggugcaguggcuca

SEQ ID NO: 28367 - RNA, 32 nt, Human
aaucauggauguuagagcucaaacgggcuuuu

SEQ ID NO: 28368 - RNA, 32 nt, Human
aaucauggcucacugcagccuggagcuccugg

SEQ ID NO: 28369 - RNA, 32 nt, Human
aaucauggcugcagucuggcugcagggggccu

SEQ ID NO: 28370 - RNA, 32 nt, Human
aaucauggcuggagaauuggauagcagaguaa

SEQ ID NO: 28371 - RNA, 32 nt, Human
aaucauggggaaggaaaaugcagcacucuaaa

SEQ ID NO: 28372 - RNA, 32 nt, Human
aaucauggguuauuucagaagauguaagcauu

SEQ ID NO: 28373 - RNA, 29 nt, Human
aaucaugguggaaggcaagaaggagcaag

SEQ ID NO: 28374 - RNA, 32 nt, Human
aaucauguacuacugcacuugagcaugaaugg

SEQ ID NO: 28375 - RNA, 32 nt, Human
aaucauguauccaccacuuagacuaccaaugg

SEQ ID NO: 28376 - RNA, 32 nt, Human
aaucauguauuucccugcugucauauuugguu

SEQ ID NO: 28377 - RNA, 32 nt, Human
aaucaugucaccaagcuucaagccauggaggu

SEQ ID NO: 28378 - RNA, 32 nt, Human
aaucaugugaacagaucucccuuucccccucc

SEQ ID NO: 28379 - RNA, 32 nt, Human
aaucauguugcagaaccagcagguggauagua

SEQ ID NO: 28380 - RNA, 25 nt, Human
aaucauuaaacucuuucucugcugc

SEQ ID NO: 28381 - RNA, 32 nt, Human
aaucauuagacguauuacggauuuucagacau

SEQ ID NO: 28382 - RNA, 32 nt, Human
aaucauucaagaggaagauggaaggggcuguu

SEQ ID NO: 28383 - RNA, 32 nt, Human
aaucauucaccccauuacuucuugucaacaaa

SEQ ID NO: 28384 - RNA, 31 nt, Human
aaucauucacucaaugugugguagagucuaa

SEQ ID NO: 28385 - RNA, 32 nt, Human
aaucauucaucccuggaauccaugucuccuuc

SEQ ID NO: 28386 - RNA, 32 nt, Human
aaucauucauucauucauuccacacacauuga

SEQ ID NO: 28387 - RNA, 32 nt, Human
aaucauuccuuugacaauuacuggacccaaag

SEQ ID NO: 28388 - RNA, 32 nt, Human
aaucauucuagagguguaacaauacauuucuu

SEQ ID NO: 28389 - RNA, 32 nt, Human
aaucauugaaguauuuuccuccaggcaaaauu

SEQ ID NO: 28390 - RNA, 32 nt, Human
aaucauugagccugaaggcuucaagcccaaga

SEQ ID NO: 28391 - RNA, 32 nt, Human
aaucauuggugaggaauggccacccacugccc

SEQ ID NO: 28392 - RNA, 22 nt, Human
aaucauuguacuguaaaagccu

SEQ ID NO: 28393 - RNA, 32 nt, Human
aaucauuucugaagacaaaagcagaggaauau

SEQ ID NO: 28394 - RNA, 32 nt, Human
aaucauuucugcauuguuguuccagagaauuu

SEQ ID NO: 28395 - RNA, 32 nt, Human
aaucauuuuagacuuauuuugucuauauuaaa

SEQ ID NO: 28396 - RNA, 32 nt, Human
aaucauuuuaugaaaauaauguauuuauaagu

SEQ ID NO: 28397 - RNA, 32 nt, Human
aaucauuuucucaguucucuucuuucuuuagc

SEQ ID NO: 28398 - RNA, 32 nt, Human
aaucauuuuucuuuuguagcuaacgguugccu

SEQ ID NO: 28399 - RNA, 32 nt, Human
aauccaaaaacacaaucccauaugacagaugg

SEQ ID NO: 28400 - RNA, 32 nt, Human
aauccaaaaauguuaaaauuagccaggcauag

SEQ ID NO: 28401 - RNA, 32 nt, Human
aauccaaaacaccuuccgccucccagagcuug

SEQ ID NO: 28402 - RNA, 32 nt, Human
aauccaaauacgauuccucaggccgggcacag

SEQ ID NO: 28403 - RNA, 32 nt, Human
aauccaacaguuugugaugcucugcuugauaa

SEQ ID NO: 28404 - RNA, 32 nt, Human
aauccaaccucacuacauuguagcucagucca

SEQ ID NO: 28405 - RNA, 32 nt, Human
aauccaagagucugaugauuucuugaaaaggg

SEQ ID NO: 28406 - RNA, 32 nt, Human
aauccaaggaacugucugucucaaagaaaacu

SEQ ID NO: 28407 - RNA, 32 nt, Human
aauccaaggacuaguauagaauuaagcugagu

SEQ ID NO: 28408 - RNA, 32 nt, Human
aauccaagguacuggaaaaccuuccacaugcc

SEQ ID NO: 28409 - RNA, 22 nt, Human
aauccaaguauucuaucaucaa

SEQ ID NO: 28410 - RNA, 32 nt, Human
aauccaauauuguaauccuagcacuuugggag

SEQ ID NO: 28411 - RNA, 32 nt, Human
aauccacacaucauaucguucuuaucugcaaa

SEQ ID NO: 28412 - RNA, 32 nt, Human
aauccacacugauuuguacgucugacugagag

SEQ ID NO: 28413 - RNA, 21 nt, Human
aauccacacuggagagaagcc

SEQ ID NO: 28414 - RNA, 32 nt, Human
aauccacagcagaccuaccacucuccaggcag

SEQ ID NO: 28415 - RNA, 32 nt, Human
aauccacaggaccaccagaagggagagggaac

SEQ ID NO: 28416 - RNA, 32 nt, Human
aauccacauaaaagugcucuccugccugggca

SEQ ID NO: 28417 - RNA, 32 nt, Human
aauccacccuccucagccucccaaagugcugg

SEQ ID NO: 28418 - RNA, 32 nt, Human
aauccagaaaucuacuuucuccaucuuccacu

SEQ ID NO: 28419 - RNA, 32 nt, Human
aauccagaaauuacagugaauauuuuauggaa

SEQ ID NO: 28420 - RNA, 26 nt, Human
aauccagaaggcggagguugcaguga

SEQ ID NO: 28421 - RNA, 32 nt, Human
aauccagaaggcggagguugcagugagcugag

SEQ ID NO: 28422 - RNA, 32 nt, Human
aauccagacucugcacaagaaguuaaucugcc

SEQ ID NO: 28423 - RNA, 32 nt, Human
aauccagagggaggggagggaaggccagauag

SEQ ID NO: 28424 - RNA, 32 nt, Human
aauccagcaggcacuccuccuccacaagucag

SEQ ID NO: 28425 - RNA, 32 nt, Human
aauccagcagguggagguugcagugagccaag

SEQ ID NO: 28426 - RNA, 32 nt, Human
aauccagcaugcucuugccugcccugcauaug

SEQ ID NO: 28427 - RNA, 32 nt, Human
aauccagccucgggggucaucuggaggcauga

SEQ ID NO: 28428 - RNA, 32 nt, Human
aauccagccugccuugcauccaacacagauuc

SEQ ID NO: 28429 - RNA, 32 nt, Human
aauccagcggcagaggagugagaggacugugc

SEQ ID NO: 28430 - RNA, 32 nt, Human
aauccagcugugcacuuugcccaaguggugaa

SEQ ID NO: 28431 - RNA, 32 nt, Human
aauccagcuuugauggacaucugugaugguug

SEQ ID NO: 28432 - RNA, 32 nt, Human
aauccaggaagcaagcggagguugcagugagu

SEQ ID NO: 28433 - RNA, 32 nt, Human
aauccaggaagcagagguugcggugagccgaa

SEQ ID NO: 28434 - RNA, 32 nt, Human
aauccaggaauauuguuaucccuucccauuau

SEQ ID NO: 28435 - RNA, 32 nt, Human
aauccaggagccacaggaagcagugagcuuuc

SEQ ID NO: 28436 - RNA, 26 nt, Human
aauccaggaggaggagguugcaguga

SEQ ID NO: 28437 - RNA, 32 nt, Human
aauccaggaggaggagguugcagugagccgag

SEQ ID NO: 28438 - RNA, 32 nt, Human
aauccaggaggcaaagguugcagugagccaaa

SEQ ID NO: 28439 - RNA, 32 nt, Human
aauccaggaggcagagcuugcagugagcugag

SEQ ID NO: 28440 - RNA, 32 nt, Human
aauccaggaggcagaggcuguggugagccaag

SEQ ID NO: 28441 - RNA, 32 nt, Human
aauccaggaggcagagguugcaaugagccaag

SEQ ID NO: 28442 - RNA, 26 nt, Human
aauccaggaggcagagguugcaguga

SEQ ID NO: 28443 - RNA, 32 nt, Human
aauccaggaggcagagguugcagugaguggag

SEQ ID NO: 28444 - RNA, 26 nt, Human
aauccaggaggcgaagguugcaguga

SEQ ID NO: 28445 - RNA, 32 nt, Human
aauccaggaggcgaagguugcagugagcugag

SEQ ID NO: 28446 - RNA, 26 nt, Human
aauccaggaggcggagguugcaguga

SEQ ID NO: 28447 - RNA, 32 nt, Human
aauccaggaggcggagguugcagugaaccaag

SEQ ID NO: 28448 - RNA, 32 nt, Human
aauccaggaggcggagguugcagugagccaag

SEQ ID NO: 28449 - RNA, 32 nt, Human
aauccaggaggcggagguugcagugagccgag

SEQ ID NO: 28450 - RNA, 26 nt, Human
aauccaggaggcggaguuugugguga

SEQ ID NO: 28451 - RNA, 32 nt, Human
aauccaggaggcggaguuuguggugaguugag

SEQ ID NO: 28452 - RNA, 32 nt, Human
aauccaggagguggagccugcagugagccaag

SEQ ID NO: 28453 - RNA, 32 nt, Human
aauccaggagguggagcuugcagugagccgag

SEQ ID NO: 28454 - RNA, 26 nt, Human
aauccaggagguggagguugcagcga

SEQ ID NO: 28455 - RNA, 32 nt, Human
aauccaggagguggagguugcagcgagccaag

SEQ ID NO: 28456 - RNA, 26 nt, Human
aauccaggagguggagguugcaguga

SEQ ID NO: 28457 - RNA, 32 nt, Human
aauccaggagguggagguugcagugagcugag

SEQ ID NO: 28458 - RNA, 32 nt, Human
aauccaggcauuugagaccagccuggguaaca

SEQ ID NO: 28459 - RNA, 32 nt, Human
aauccaggccaagaccagagugguggcuguag

SEQ ID NO: 28460 - RNA, 32 nt, Human
aauccaggcccuguuaacauguuuccagcacu

SEQ ID NO: 28461 - RNA, 32 nt, Human
aauccaggcuagagcaugaaacuaacagguau

SEQ ID NO: 28462 - RNA, 21 nt, Human
aauccaggcuuucucacucca

SEQ ID NO: 28463 - RNA, 32 nt, Human
aauccagggaaacugugagcccaggaguugcc

SEQ ID NO: 28464 - RNA, 17 nt, Human
aauccagggcccaccca

SEQ ID NO: 28465 - RNA, 26 nt, Human
aauccagguggcggagguugcaguga

SEQ ID NO: 28466 - RNA, 32 nt, Human
aauccagguggcggagguugcagugagccgag

SEQ ID NO: 28467 - RNA, 32 nt, Human
aauccagguucauguuugcacacaucaaaagu

SEQ ID NO: 28468 - RNA, 32 nt, Human
aauccaguagaauuuuuaucacuaucuguuau

SEQ ID NO: 28469 - RNA, 32 nt, Human
aauccaguaucacagggugauccuuugggacu

SEQ ID NO: 28470 - RNA, 32 nt, Human
aauccagucaagcugacacucagcauucacca

SEQ ID NO: 28471 - RNA, 32 nt, Human
aauccagugcuuaucagaauuccaguggcuuc

SEQ ID NO: 28472 - RNA, 32 nt, Human
aauccagugguggagguugcagugagccaaga

SEQ ID NO: 28473 - RNA, 32 nt, Human
aauccaguguauuugggauaggccaguggaac

SEQ ID NO: 28474 - RNA, 20 nt, Human
aauccaguuuaauccuuuua

SEQ ID NO: 28475 - RNA, 32 nt, Human
aauccaguuuuacaaauguggaaaaauguuua

SEQ ID NO: 28476 - RNA, 22 nt, Human
aauccauacuggagagaaaccu

SEQ ID NO: 28477 - RNA, 22 nt, Human
aauccauacuggagagaagccu

SEQ ID NO: 28478 - RNA, 31 nt, Human
aauccauaggauagagaaaaaucugcuuguu

SEQ ID NO: 28479 - RNA, 32 nt, Human
aauccauauccucacucugagucuugguaucc

SEQ ID NO: 28480 - RNA, 32 nt, Human
aauccaucaguacccuguucucaccaaagaca

SEQ ID NO: 28481 - RNA, 32 nt, Human
aauccaucauucuuuucuucauucaacaaaua

SEQ ID NO: 28482 - RNA, 32 nt, Human
aauccauccucccauuucucuguuucauucag

SEQ ID NO: 28483 - RNA, 32 nt, Human
aauccaucucagaaguugaagaugugauguug

SEQ ID NO: 28484 - RNA, 32 nt, Human
aauccaucuccuggcccugccccuuguugggg

SEQ ID NO: 28485 - RNA, 32 nt, Human
aauccaugagugagagggaaagucuaguauca

SEQ ID NO: 28486 - RNA, 32 nt, Human
aauccauggagagagaaaaagaagagggcuca

SEQ ID NO: 28487 - RNA, 31 nt, Human
aauccauggcccuagagcacuucuagcagag

SEQ ID NO: 28488 - RNA, 32 nt, Human
aauccaugugacuguuuccaccaucuugggca

SEQ ID NO: 28489 - RNA, 18 nt, Human
aauccauguuuuagcaaa

SEQ ID NO: 28490 - RNA, 32 nt, Human
aauccauucacaagccuccuguaccucagugg

SEQ ID NO: 28491 - RNA, 32 nt, Human
aauccauucacugcaaaccucguuccccauuu

SEQ ID NO: 28492 - RNA, 32 nt, Human
aauccauuccacagugaaacagguggccucgu

SEQ ID NO: 28493 - RNA, 32 nt, Human
aauccauuuagcaccuccucagccuggcucag

SEQ ID NO: 28494 - RNA, 32 nt, Human
aauccauuucacagaugaggaaaucaaggucu

SEQ ID NO: 28495 - RNA, 32 nt, Human
aaucccaaaagcuuacugucuccaggaccaca

SEQ ID NO: 28496 - RNA, 32 nt, Human
aaucccaaagugcugggauuacaggcgugagc

SEQ ID NO: 28497 - RNA, 32 nt, Human
aaucccaaagugcugggauuacaggugugagc

SEQ ID NO: 28498 - RNA, 32 nt, Human
aaucccaaauacucgggaggcugaggcaggag

SEQ ID NO: 28499 - RNA, 32 nt, Human
aaucccaaauuugaaaauccaaucccaagucc

SEQ ID NO: 28500 - RNA, 32 nt, Human
aaucccaacaagcaagggucuccuucaagauu

SEQ ID NO: 28501 - RNA, 32 nt, Human
aaucccaagcagcugggauuacaggcacacac

SEQ ID NO: 28502 - RNA, 32 nt, Human
aaucccaagggacuagagggcugcaauggacu

SEQ ID NO: 28503 - RNA, 32 nt, Human
aaucccacacuccaggucugugcucaagagac

SEQ ID NO: 28504 - RNA, 32 nt, Human
aaucccacaugguaacaacuagcugaacauga

SEQ ID NO: 28505 - RNA, 32 nt, Human
aaucccaccacugcacuccagccugggugaca

SEQ ID NO: 28506 - RNA, 32 nt, Human
aaucccacccccagaguggggagggucaggug

SEQ ID NO: 28507 - RNA, 32 nt, Human
aaucccaccuacucagaagacugaggccggag

SEQ ID NO: 28508 - RNA, 32 nt, Human
aaucccaccuacucgggaggcugaggcaggag

SEQ ID NO: 28509 - RNA, 32 nt, Human
aaucccaccucgggguccacgcugcagcagag

SEQ ID NO: 28510 - RNA, 32 nt, Human
aaucccacuacugcauuccagccuggguggac

SEQ ID NO: 28511 - RNA, 32 nt, Human
aaucccacugaaauugcuggcauucucaaagg

SEQ ID NO: 28512 - RNA, 32 nt, Human
aaucccacugcauuccagccugggcaacagcg

SEQ ID NO: 28513 - RNA, 32 nt, Human
aaucccagaaacuuccaucucagguccuucca

SEQ ID NO: 28514 - RNA, 32 nt, Human
aaucccagaacacauuucaaagagcacguauc

SEQ ID NO: 28515 - RNA, 32 nt, Human
aaucccagagcuucgggaggccaaggugggag

SEQ ID NO: 28516 - RNA, 32 nt, Human
aaucccagaggaagaccaggcaugguggcuca

SEQ ID NO: 28517 - RNA, 32 nt, Human
aaucccagauacucgggaggcugaggcaugag

SEQ ID NO: 28518 - RNA, 32 nt, Human
aaucccagcacuaggaggccgaggugggugaa

SEQ ID NO: 28519 - RNA, 32 nt, Human
aaucccagcacuaugggaggccagggagggag

SEQ ID NO: 28520 - RNA, 32 nt, Human
aaucccagcacuaugggaggcccaggugagca

SEQ ID NO: 28521 - RNA, 32 nt, Human
aaucccagcacuaugggaggccgagacgggcg

SEQ ID NO: 28522 - RNA, 32 nt, Human
aaucccagcacuaugggaggcugaggcaagca

SEQ ID NO: 28523 - RNA, 32 nt, Human
aaucccagcacuaugggaggcugaggugagag

SEQ ID NO: 28524 - RNA, 32 nt, Human
aaucccagcacuaugggaggcugaggugggca

SEQ ID NO: 28525 - RNA, 32 nt, Human
aaucccagcacuuugggagacuaaggcaggcg

SEQ ID NO: 28526 - RNA, 32 nt, Human
aaucccagcacuuugggagacugagaugggag

SEQ ID NO: 28527 - RNA, 32 nt, Human
aaucccagcacuuugggagacugaggagggag

SEQ ID NO: 28528 - RNA, 32 nt, Human
aaucccagcacuuugggagacugaggaggggu

SEQ ID NO: 28529 - RNA, 32 nt, Human
aaucccagcacuuugggagacugaggcgggcg

SEQ ID NO: 28530 - RNA, 32 nt, Human
aaucccagcacuuugggagacugaggcgggug

SEQ ID NO: 28531 - RNA, 32 nt, Human
aaucccagcacuuugggagacugaggugggca

SEQ ID NO: 28532 - RNA, 32 nt, Human
aaucccagcacuuugggagacugaggugggug

SEQ ID NO: 28533 - RNA, 32 nt, Human
aaucccagcacuuuugggaggcugagguuggg

SEQ ID NO: 28534 - RNA, 32 nt, Human
aaucccagcaugcauccugcucagggacaacg

SEQ ID NO: 28535 - RNA, 32 nt, Human
aaucccagccaaggcuggcagaucacuugagg

SEQ ID NO: 28536 - RNA, 32 nt, Human
aaucccagccacucgggaggcugaggcaagag

SEQ ID NO: 28537 - RNA, 32 nt, Human
aaucccagcccacuuugcugugucucuggcgg

SEQ ID NO: 28538 - RNA, 32 nt, Human
aaucccagcccuuugggagacugaggccagca

SEQ ID NO: 28539 - RNA, 32 nt, Human
aaucccagccuggaaugcaguggugcaaucac

SEQ ID NO: 28540 - RNA, 32 nt, Human
aaucccagccugggcaggaauguggcuccccg

SEQ ID NO: 28541 - RNA, 32 nt, Human
aaucccagcuacccaggaaggcugaggcggca

SEQ ID NO: 28542 - RNA, 32 nt, Human
aaucccagcuacccggggaggcugaggcagga

SEQ ID NO: 28543 - RNA, 32 nt, Human
aaucccagcuacgucaggaggcugaggcacag

SEQ ID NO: 28544 - RNA, 32 nt, Human
aaucccagcuacuaaggaggcugaggcaggag

SEQ ID NO: 28545 - RNA, 32 nt, Human
aaucccagcuacuagagaggcugaggcaggag

SEQ ID NO: 28546 - RNA, 32 nt, Human
aaucccagcuacuagggagacugaggcaggag

SEQ ID NO: 28547 - RNA, 32 nt, Human
aaucccagcuacuagggaggaugaggcagaag

SEQ ID NO: 28548 - RNA, 32 nt, Human
aaucccagcuacuagggaggaugaggcaggag

SEQ ID NO: 28549 - RNA, 32 nt, Human
aaucccagcuacuagggaggcggaggaagaag

SEQ ID NO: 28550 - RNA, 32 nt, Human
aaucccagcuacuagggaggcugagacacacg

SEQ ID NO: 28551 - RNA, 32 nt, Human
aaucccagcuacuagggaggcugaggcaagag

SEQ ID NO: 28552 - RNA, 32 nt, Human
aaucccagcuacuagggaggcugaggcaggag

SEQ ID NO: 28553 - RNA, 32 nt, Human
aaucccagcuacuagggaggcugcggcaggag

SEQ ID NO: 28554 - RNA, 32 nt, Human
aaucccagcuacucaagaggcugaggcaagag

SEQ ID NO: 28555 - RNA, 32 nt, Human
aaucccagcuacucaagaggcugaggcacgag

SEQ ID NO: 28556 - RNA, 32 nt, Human
aaucccagcuacucaagaggcugaggcaggag

SEQ ID NO: 28557 - RNA, 32 nt, Human
aaucccagcuacucaagaggcugagguaggag

SEQ ID NO: 28558 - RNA, 32 nt, Human
aaucccagcuacucaagagguugcagugagcu

SEQ ID NO: 28559 - RNA, 32 nt, Human
aaucccagcuacucaaggcugaggcaggagaa

SEQ ID NO: 28560 - RNA, 32 nt, Human
aaucccagcuacucagaaggccgaggugggag

SEQ ID NO: 28561 - RNA, 32 nt, Human
aaucccagcuacucagaaggcugaggcaggag

SEQ ID NO: 28562 - RNA, 32 nt, Human
aaucccagcuacucagaaggcugaggcaugag

SEQ ID NO: 28563 - RNA, 32 nt, Human
aaucccagcuacucagaaggcugagguacaag

SEQ ID NO: 28564 - RNA, 32 nt, Human
aaucccagcuacucagaaggcugaggugggag

SEQ ID NO: 28565 - RNA, 32 nt, Human
aaucccagcuacucagaagguugagacaaagg

SEQ ID NO: 28566 - RNA, 32 nt, Human
aaucccagcuacucagaggcuaaggcgggaga

SEQ ID NO: 28567 - RNA, 32 nt, Human
aaucccagcuacucagauggcugaggcaggag

SEQ ID NO: 28568 - RNA, 32 nt, Human
aaucccagcuacucagcagggugaggugagag

SEQ ID NO: 28569 - RNA, 32 nt, Human
aaucccagcuacucaggaagcugaggcaagag

SEQ ID NO: 28570 - RNA, 32 nt, Human
aaucccagcuacucaggaagcugaggcacgag

SEQ ID NO: 28571 - RNA, 32 nt, Human
aaucccagcuacucaggaagcugaggcaggaa

SEQ ID NO: 28572 - RNA, 32 nt, Human
aaucccagcuacucaggaagcugaggcgagag

SEQ ID NO: 28573 - RNA, 32 nt, Human
aaucccagcuacucaggaagcugggguggaag

SEQ ID NO: 28574 - RNA, 32 nt, Human
aaucccagcuacucaggaaggcugaggcagga

SEQ ID NO: 28575 - RNA, 32 nt, Human
aaucccagcuacucaggagaaucgcccaaacc

SEQ ID NO: 28576 - RNA, 32 nt, Human
aaucccagcuacucaggagacugaggcagaag

SEQ ID NO: 28577 - RNA, 32 nt, Human
aaucccagcuacucaggagacugaggcagaga

SEQ ID NO: 28578 - RNA, 32 nt, Human
aaucccagcuacucaggagacugaggcaggaa

SEQ ID NO: 28579 - RNA, 32 nt, Human
aaucccagcuacucaggagacugaggcaggag

SEQ ID NO: 28580 - RNA, 32 nt, Human
aaucccagcuacucaggagacugaguuaggag

SEQ ID NO: 28581 - RNA, 32 nt, Human
aaucccagcuacucaggaggaugaggcaggag

SEQ ID NO: 28582 - RNA, 32 nt, Human
aaucccagcuacucaggaggcagaggcacaag

SEQ ID NO: 28583 - RNA, 32 nt, Human
aaucccagcuacucaggaggccaaagcaggag

SEQ ID NO: 28584 - RNA, 32 nt, Human
aaucccagcuacucaggaggccgaggcaagag

SEQ ID NO: 28585 - RNA, 32 nt, Human
aaucccagcuacucaggaggccgaggcaggaa

SEQ ID NO: 28586 - RNA, 32 nt, Human
aaucccagcuacucaggaggccgaggcaggag

SEQ ID NO: 28587 - RNA, 32 nt, Human
aaucccagcuacucaggaggcuaaggcaggag

SEQ ID NO: 28588 - RNA, 32 nt, Human
aaucccagcuacucaggaggcuaaggcaggga

SEQ ID NO: 28589 - RNA, 32 nt, Human
aaucccagcuacucaggaggcuaaggcaugag

SEQ ID NO: 28590 - RNA, 32 nt, Human
aaucccagcuacucaggaggcuaaggcgggag

SEQ ID NO: 28591 - RNA, 32 nt, Human
aaucccagcuacucaggaggcuacagcaggag

SEQ ID NO: 28592 - RNA, 32 nt, Human
aaucccagcuacucaggaggcucaggcacgag

SEQ ID NO: 28593 - RNA, 32 nt, Human
aaucccagcuacucaggaggcugaaacaggag

SEQ ID NO: 28594 - RNA, 32 nt, Human
aaucccagcuacucaggaggcugaagcaagag

SEQ ID NO: 28595 - RNA, 32 nt, Human
aaucccagcuacucaggaggcugaagcagaag

SEQ ID NO: 28596 - RNA, 32 nt, Human
aaucccagcuacucaggaggcugaagcaggag

SEQ ID NO: 28597 - RNA, 32 nt, Human
aaucccagcuacucaggaggcugagacagaag

SEQ ID NO: 28598 - RNA, 32 nt, Human
aaucccagcuacucaggaggcugagacaggac

SEQ ID NO: 28599 - RNA, 32 nt, Human
aaucccagcuacucaggaggcugagacaggag

SEQ ID NO: 28600 - RNA, 32 nt, Human
aaucccagcuacucaggaggcugaggaaggag

SEQ ID NO: 28601 - RNA, 32 nt, Human
aaucccagcuacucaggaggcugaggcaagag

SEQ ID NO: 28602 - RNA, 32 nt, Human
aaucccagcuacucaggaggcugaggcacaag

SEQ ID NO: 28603 - RNA, 32 nt, Human
aaucccagcuacucaggaggcugaggcacgag

SEQ ID NO: 28604 - RNA, 32 nt, Human
aaucccagcuacucaggaggcugaggcagaag

SEQ ID NO: 28605 - RNA, 32 nt, Human
aaucccagcuacucaggaggcugaggcagaau

SEQ ID NO: 28606 - RNA, 32 nt, Human
aaucccagcuacucaggaggcugaggcaggaa

SEQ ID NO: 28607 - RNA, 32 nt, Human
aaucccagcuacucaggaggcugaggcaggag

SEQ ID NO: 28608 - RNA, 32 nt, Human
aaucccagcuacucaggaggcugaggcaggau

SEQ ID NO: 28609 - RNA, 32 nt, Human
aaucccagcuacucaggaggcugaggcagggg

SEQ ID NO: 28610 - RNA, 32 nt, Human
aaucccagcuacucaggaggcugaggcaggug

SEQ ID NO: 28611 - RNA, 32 nt, Human
aaucccagcuacucaggaggcugaggcaguag

SEQ ID NO: 28612 - RNA, 32 nt, Human
aaucccagcuacucaggaggcugaggcaugag

SEQ ID NO: 28613 - RNA, 32 nt, Human
aaucccagcuacucaggaggcugaggccggag

SEQ ID NO: 28614 - RNA, 32 nt, Human
aaucccagcuacucaggaggcugaggcggaga

SEQ ID NO: 28615 - RNA, 32 nt, Human
aaucccagcuacucaggaggcugaggcggaug

SEQ ID NO: 28616 - RNA, 32 nt, Human
aaucccagcuacucaggaggcugaggcgggag

SEQ ID NO: 28617 - RNA, 32 nt, Human
aaucccagcuacucaggaggcugaggcuggag

SEQ ID NO: 28618 - RNA, 32 nt, Human
aaucccagcuacucaggaggcugaggcuugag

SEQ ID NO: 28619 - RNA, 32 nt, Human
aaucccagcuacucaggaggcugagggaggag

SEQ ID NO: 28620 - RNA, 32 nt, Human
aaucccagcuacucaggaggcugagguaggag

SEQ ID NO: 28621 - RNA, 32 nt, Human
aaucccagcuacucaggaggcugaggugggag

SEQ ID NO: 28622 - RNA, 32 nt, Human
aaucccagcuacucaggaggcugagucaggau

SEQ ID NO: 28623 - RNA, 32 nt, Human
aaucccagcuacucaggaggcugagugaggca

SEQ ID NO: 28624 - RNA, 32 nt, Human
aaucccagcuacucaggaggcugggacaggag

SEQ ID NO: 28625 - RNA, 32 nt, Human
aaucccagcuacucaggaggcuggggcagcag

SEQ ID NO: 28626 - RNA, 32 nt, Human
aaucccagcuacucaggaggcuggggcaggag

SEQ ID NO: 28627 - RNA, 32 nt, Human
aaucccagcuacucaggaggcuguggcgagag

SEQ ID NO: 28628 - RNA, 32 nt, Human
aaucccagcuacucaggagggugaggcaggag

SEQ ID NO: 28629 - RNA, 32 nt, Human
aaucccagcuacucaggagguugaggcagcag

SEQ ID NO: 28630 - RNA, 32 nt, Human
aaucccagcuacucaggagucugaggaggaga

SEQ ID NO: 28631 - RNA, 32 nt, Human
aaucccagcuacucaggagucugaggcacgag

SEQ ID NO: 28632 - RNA, 32 nt, Human
aaucccagcuacucaggagucugaggcaggag

SEQ ID NO: 28633 - RNA, 32 nt, Human
aaucccagcuacucagggggcugaggcaggag

SEQ ID NO: 28634 - RNA, 32 nt, Human
aaucccagcuacucagggggcugaggcagggg

SEQ ID NO: 28635 - RNA, 32 nt, Human
aaucccagcuacucagguggcuaaggcaggag

SEQ ID NO: 28636 - RNA, 32 nt, Human
aaucccagcuacucagguggcugaggcaggag

SEQ ID NO: 28637 - RNA, 32 nt, Human
aaucccagcuacucauaaggcugaggugggag

SEQ ID NO: 28638 - RNA, 32 nt, Human
aaucccagcuacucaugaggcugaggcagaag

SEQ ID NO: 28639 - RNA, 32 nt, Human
aaucccagcuacucaugaggcugaggcaguag

SEQ ID NO: 28640 - RNA, 32 nt, Human
aaucccagcuacuccagaagcugaggcuggag

SEQ ID NO: 28641 - RNA, 32 nt, Human
aaucccagcuacuccagaggcugaggcaggag

SEQ ID NO: 28642 - RNA, 32 nt, Human
aaucccagcuacucccaaggcugaggcaggag

SEQ ID NO: 28643 - RNA, 32 nt, Human
aaucccagcuacuccggaagcugaggcaggag

SEQ ID NO: 28644 - RNA, 32 nt, Human
aaucccagcuacuccgggaggcugaggcagga

SEQ ID NO: 28645 - RNA, 32 nt, Human
aaucccagcuacucgagaggccaaggcaugag

SEQ ID NO: 28646 - RNA, 32 nt, Human
aaucccagcuacucgagaggcugaggcaggag

SEQ ID NO: 28647 - RNA, 32 nt, Human
aaucccagcuacucgagugccugaggcaggag

SEQ ID NO: 28648 - RNA, 32 nt, Human
aaucccagcuacucgcaaggcugaggcaggag

SEQ ID NO: 28649 - RNA, 32 nt, Human
aaucccagcuacucggaaggccaaggcaggag

SEQ ID NO: 28650 - RNA, 32 nt, Human
aaucccagcuacucggaaguuugagacgagaa

SEQ ID NO: 28651 - RNA, 32 nt, Human
aaucccagcuacucggaggcugaggcacaaga

SEQ ID NO: 28652 - RNA, 32 nt, Human
aaucccagcuacucgggaaccugaggcaggag

SEQ ID NO: 28653 - RNA, 32 nt, Human
aaucccagcuacucgggaagcugaggcagaag

SEQ ID NO: 28654 - RNA, 32 nt, Human
aaucccagcuacucgggaagcugaggcaggag

SEQ ID NO: 28655 - RNA, 32 nt, Human
aaucccagcuacucgggaagcugaggcaggug

SEQ ID NO: 28656 - RNA, 32 nt, Human
aaucccagcuacucgggagaccgaggcaugag

SEQ ID NO: 28657 - RNA, 32 nt, Human
aaucccagcuacucgggagacuaggcagagaa

SEQ ID NO: 28658 - RNA, 32 nt, Human
aaucccagcuacucgggagacugaggcagaag

SEQ ID NO: 28659 - RNA, 32 nt, Human
aaucccagcuacucgggagacugaggcagaga

SEQ ID NO: 28660 - RNA, 32 nt, Human
aaucccagcuacucgggagacugaggcaggag

SEQ ID NO: 28661 - RNA, 32 nt, Human
aaucccagcuacucgggagcugaggcaggaga

SEQ ID NO: 28662 - RNA, 32 nt, Human
aaucccagcuacucgggaggccaaggcaggag

SEQ ID NO: 28663 - RNA, 32 nt, Human
aaucccagcuacucgggaggccgaggcaggag

SEQ ID NO: 28664 - RNA, 32 nt, Human
aaucccagcuacucgggaggcggaggcaggag

SEQ ID NO: 28665 - RNA, 32 nt, Human
aaucccagcuacucgggaggcuaaagcaggag

SEQ ID NO: 28666 - RNA, 32 nt, Human
aaucccagcuacucgggaggcuaaggcaggaa

SEQ ID NO: 28667 - RNA, 32 nt, Human
aaucccagcuacucgggaggcuaaggcaggag

SEQ ID NO: 28668 - RNA, 32 nt, Human
aaucccagcuacucgggaggcuaaggugggag

SEQ ID NO: 28669 - RNA, 32 nt, Human
aaucccagcuacucgggaggcugaaccaggag

SEQ ID NO: 28670 - RNA, 32 nt, Human
aaucccagcuacucgggaggcugaagcaggag

SEQ ID NO: 28671 - RNA, 32 nt, Human
aaucccagcuacucgggaggcugacgcaggag

SEQ ID NO: 28672 - RNA, 32 nt, Human
aaucccagcuacucgggaggcugagacaggaa

SEQ ID NO: 28673 - RNA, 32 nt, Human
aaucccagcuacucgggaggcugagacaggag

SEQ ID NO: 28674 - RNA, 32 nt, Human
aaucccagcuacucgggaggcugagaugaaga

SEQ ID NO: 28675 - RNA, 32 nt, Human
aaucccagcuacucgggaggcugaggaaggag

SEQ ID NO: 28676 - RNA, 32 nt, Human
aaucccagcuacucgggaggcugaggagggag

SEQ ID NO: 28677 - RNA, 32 nt, Human
aaucccagcuacucgggaggcugaggcaagag

SEQ ID NO: 28678 - RNA, 32 nt, Human
aaucccagcuacucgggaggcugaggcacaag

SEQ ID NO: 28679 - RNA, 32 nt, Human
aaucccagcuacucgggaggcugaggcacgag

SEQ ID NO: 28680 - RNA, 32 nt, Human
aaucccagcuacucgggaggcugaggcagaag

SEQ ID NO: 28681 - RNA, 32 nt, Human
aaucccagcuacucgggaggcugaggcaggaa

SEQ ID NO: 28682 - RNA, 32 nt, Human
aaucccagcuacucgggaggcugaggcaggac

SEQ ID NO: 28683 - RNA, 32 nt, Human
aaucccagcuacucgggaggcugaggcaggag

SEQ ID NO: 28684 - RNA, 32 nt, Human
aaucccagcuacucgggaggcugaggcaggau

SEQ ID NO: 28685 - RNA, 32 nt, Human
aaucccagcuacucgggaggcugaggcaggga

SEQ ID NO: 28686 - RNA, 32 nt, Human
aaucccagcuacucgggaggcugaggcauaag

SEQ ID NO: 28687 - RNA, 32 nt, Human
aaucccagcuacucgggaggcugaggcaugag

SEQ ID NO: 28688 - RNA, 32 nt, Human
aaucccagcuacucgggaggcugaggcggaag

SEQ ID NO: 28689 - RNA, 32 nt, Human
aaucccagcuacucgggaggcugagggaggag

SEQ ID NO: 28690 - RNA, 32 nt, Human
aaucccagcuacucgggaggcugaggugggag

SEQ ID NO: 28691 - RNA, 32 nt, Human
aaucccagcuacucgggaggcugagucaggag

SEQ ID NO: 28692 - RNA, 32 nt, Human
aaucccagcuacucgggaggcugcggcgggag

SEQ ID NO: 28693 - RNA, 32 nt, Human
aaucccagcuacucgggaggcuguaauccuag

SEQ ID NO: 28694 - RNA, 32 nt, Human
aaucccagcuacucgggaggcuguggcaggag

SEQ ID NO: 28695 - RNA, 32 nt, Human
aaucccagcuacucgggaggcuuagacaugag

SEQ ID NO: 28696 - RNA, 32 nt, Human
aaucccagcuacucgggagggugaggcaggag

SEQ ID NO: 28697 - RNA, 32 nt, Human
aaucccagcuacucgggaggugaggcaggaga

SEQ ID NO: 28698 - RNA, 32 nt, Human
aaucccagcuacucgggagguugaggcaggag

SEQ ID NO: 28699 - RNA, 32 nt, Human
aaucccagcuacucgggagguugagggaggag

SEQ ID NO: 28700 - RNA, 32 nt, Human
aaucccagcuacucgggagguuuaggcaggag

SEQ ID NO: 28701 - RNA, 32 nt, Human
aaucccagcuacucgggagucucaggcaggag

SEQ ID NO: 28702 - RNA, 32 nt, Human
aaucccagcuacucgggcagcugagacaggag

SEQ ID NO: 28703 - RNA, 32 nt, Human
aaucccagcuacucgguaggcugaggcaggag

SEQ ID NO: 28704 - RNA, 32 nt, Human
aaucccagcuacucugaagccugaggcagaau

SEQ ID NO: 28705 - RNA, 32 nt, Human
aaucccagcuacucuggagacugaggugggag

SEQ ID NO: 28706 - RNA, 32 nt, Human
aaucccagcuacucuggaggcuaaggcaggag

SEQ ID NO: 28707 - RNA, 32 nt, Human
aaucccagcuacucuggaggcugagacagaau

SEQ ID NO: 28708 - RNA, 32 nt, Human
aaucccagcuacucuggaggcugagauaggag

SEQ ID NO: 28709 - RNA, 32 nt, Human
aaucccagcuacucuggaggcugaggcacagc

SEQ ID NO: 28710 - RNA, 32 nt, Human
aaucccagcuacucuggaggcugaggcaggag

SEQ ID NO: 28711 - RNA, 32 nt, Human
aaucccagcuacucuggaggcugggcuggaga

SEQ ID NO: 28712 - RNA, 32 nt, Human
aaucccagcuacucuggaggcuggggcaggag

SEQ ID NO: 28713 - RNA, 32 nt, Human
aaucccagcuacucuggagggugaggcaggag

SEQ ID NO: 28714 - RNA, 32 nt, Human
aaucccagcuacucugggggccaaggcaggag

SEQ ID NO: 28715 - RNA, 32 nt, Human
aaucccagcuacucuuggaggcugaggcagga

SEQ ID NO: 28716 - RNA, 32 nt, Human
aaucccagcuacugaagaggcugaggugggag

SEQ ID NO: 28717 - RNA, 32 nt, Human
aaucccagcuacugaggagacuugagguagga

SEQ ID NO: 28718 - RNA, 32 nt, Human
aaucccagcuacugagggggcugaggcaugag

SEQ ID NO: 28719 - RNA, 32 nt, Human
aaucccagcuacugggaaggcugagguaggag

SEQ ID NO: 28720 - RNA, 32 nt, Human
aaucccagcuacuggggaaagcugaggcagga

SEQ ID NO: 28721 - RNA, 32 nt, Human
aaucccagcuacuggggaagcugaggcaggag

SEQ ID NO: 28722 - RNA, 32 nt, Human
aaucccagcuacuggggaggcugaggcacgag

SEQ ID NO: 28723 - RNA, 32 nt, Human
aaucccagcuacuggggaggcugaggcaggag

SEQ ID NO: 28724 - RNA, 32 nt, Human
aaucccagcuacuggggaggcugaggcgggag

SEQ ID NO: 28725 - RNA, 32 nt, Human
aaucccagcuacuuaggaggcugaggcaggag

SEQ ID NO: 28726 - RNA, 32 nt, Human
aaucccagcuacuuaggaggcugaggugggag

SEQ ID NO: 28727 - RNA, 32 nt, Human
aaucccagcuacuuaggaggcugaugcaggag

SEQ ID NO: 28728 - RNA, 32 nt, Human
aaucccagcuacuucggagguugagucacgag

SEQ ID NO: 28729 - RNA, 32 nt, Human
aaucccagcuacuugagagacugaggcaggag

SEQ ID NO: 28730 - RNA, 32 nt, Human
aaucccagcuacuugagaggcagaggcaggag

SEQ ID NO: 28731 - RNA, 32 nt, Human
aaucccagcuacuugagaggcugaggcacgag

SEQ ID NO: 28732 - RNA, 32 nt, Human
aaucccagcuacuugagaggcugaggccggag

SEQ ID NO: 28733 - RNA, 32 nt, Human
aaucccagcuacuugagaggcuggggcaggag

SEQ ID NO: 28734 - RNA, 32 nt, Human
aaucccagcuacuugagagucugaagcaggag

SEQ ID NO: 28735 - RNA, 32 nt, Human
aaucccagcuacuuggaaggcugaggcaggag

SEQ ID NO: 28736 - RNA, 32 nt, Human
aaucccagcuacuuggaaggcugaggcauagg

SEQ ID NO: 28737 - RNA, 32 nt, Human
aaucccagcuacuuggaaggcugagguaugag

SEQ ID NO: 28738 - RNA, 32 nt, Human
aaucccagcuacuuggcaggcugaggugggag

SEQ ID NO: 28739 - RNA, 32 nt, Human
aaucccagcuacuugggaagcugaagcaggag

SEQ ID NO: 28740 - RNA, 32 nt, Human
aaucccagcuacuugggaagcugagacaggag

SEQ ID NO: 28741 - RNA, 32 nt, Human
aaucccagcuacuugggaagcugaggcgggag

SEQ ID NO: 28742 - RNA, 32 nt, Human
aaucccagcuacuugggacgcugaggugggag

SEQ ID NO: 28743 - RNA, 32 nt, Human
aaucccagcuacuugggagacugagacaugag

SEQ ID NO: 28744 - RNA, 32 nt, Human
aaucccagcuacuugggagacugaggcaagag

SEQ ID NO: 28745 - RNA, 32 nt, Human
aaucccagcuacuugggagacugaggcacgag

SEQ ID NO: 28746 - RNA, 32 nt, Human
aaucccagcuacuugggagacugaggcaggag

SEQ ID NO: 28747 - RNA, 32 nt, Human
aaucccagcuacuugggagccugaggcgggag

SEQ ID NO: 28748 - RNA, 32 nt, Human
aaucccagcuacuugggaggcagaggcaggag

SEQ ID NO: 28749 - RNA, 32 nt, Human
aaucccagcuacuugggaggccaaggcaggag

SEQ ID NO: 28750 - RNA, 32 nt, Human
aaucccagcuacuugggaggccaaggugggag

SEQ ID NO: 28751 - RNA, 32 nt, Human
aaucccagcuacuugggaggccgaggcaggag

SEQ ID NO: 28752 - RNA, 32 nt, Human
aaucccagcuacuugggaggccgaggcaugag

SEQ ID NO: 28753 - RNA, 32 nt, Human
aaucccagcuacuugggaggcuaaggcaggag

SEQ ID NO: 28754 - RNA, 32 nt, Human
aaucccagcuacuugggaggcucaggcacgag

SEQ ID NO: 28755 - RNA, 32 nt, Human
aaucccagcuacuugggaggcugaaacaggag

SEQ ID NO: 28756 - RNA, 32 nt, Human
aaucccagcuacuugggaggcugaagcaggag

SEQ ID NO: 28757 - RNA, 32 nt, Human
aaucccagcuacuugggaggcugacgcagggg

SEQ ID NO: 28758 - RNA, 32 nt, Human
aaucccagcuacuugggaggcugagacaggag

SEQ ID NO: 28759 - RNA, 32 nt, Human
aaucccagcuacuugggaggcugagagaggag

SEQ ID NO: 28760 - RNA, 32 nt, Human
aaucccagcuacuugggaggcugagaugugag

SEQ ID NO: 28761 - RNA, 32 nt, Human
aaucccagcuacuugggaggcugagccaggag

SEQ ID NO: 28762 - RNA, 32 nt, Human
aaucccagcuacuugggaggcugaggcaagag

SEQ ID NO: 28763 - RNA, 32 nt, Human
aaucccagcuacuugggaggcugaggcaagug

SEQ ID NO: 28764 - RNA, 32 nt, Human
aaucccagcuacuugggaggcugaggcacgag

SEQ ID NO: 28765 - RNA, 32 nt, Human
aaucccagcuacuugggaggcugaggcagaag

SEQ ID NO: 28766 - RNA, 32 nt, Human
aaucccagcuacuugggaggcugaggcagaau

SEQ ID NO: 28767 - RNA, 32 nt, Human
aaucccagcuacuugggaggcugaggcagaga

SEQ ID NO: 28768 - RNA, 32 nt, Human
aaucccagcuacuugggaggcugaggcagagc

SEQ ID NO: 28769 - RNA, 32 nt, Human
aaucccagcuacuugggaggcugaggcagcag

SEQ ID NO: 28770 - RNA, 32 nt, Human
aaucccagcuacuugggaggcugaggcaggaa

SEQ ID NO: 28771 - RNA, 32 nt, Human
aaucccagcuacuugggaggcugaggcaggac

SEQ ID NO: 28772 - RNA, 32 nt, Human
aaucccagcuacuugggaggcugaggcaggag

SEQ ID NO: 28773 - RNA, 32 nt, Human
aaucccagcuacuugggaggcugaggcagggg

SEQ ID NO: 28774 - RNA, 32 nt, Human
aaucccagcuacuugggaggcugaggcauaag

SEQ ID NO: 28775 - RNA, 32 nt, Human
aaucccagcuacuugggaggcugaggcaugag

SEQ ID NO: 28776 - RNA, 32 nt, Human
aaucccagcuacuugggaggcugaggcgagag

SEQ ID NO: 28777 - RNA, 32 nt, Human
aaucccagcuacuugggaggcugaggcggcag

SEQ ID NO: 28778 - RNA, 32 nt, Human
aaucccagcuacuugggaggcugaggcuggag

SEQ ID NO: 28779 - RNA, 32 nt, Human
aaucccagcuacuugggaggcugagggcagga

SEQ ID NO: 28780 - RNA, 32 nt, Human
aaucccagcuacuugggaggcugagguaggag

SEQ ID NO: 28781 - RNA, 32 nt, Human
aaucccagcuacuugggaggcugagguaggga

SEQ ID NO: 28782 - RNA, 32 nt, Human
aaucccagcuacuugggaggcugaggugggag

SEQ ID NO: 28783 - RNA, 32 nt, Human
aaucccagcuacuugggaggcugaguugggag

SEQ ID NO: 28784 - RNA, 32 nt, Human
aaucccagcuacuugggaggcuguggcaggag

SEQ ID NO: 28785 - RNA, 32 nt, Human
aaucccagcuacuugggagucugaggcaggag

SEQ ID NO: 28786 - RNA, 32 nt, Human
aaucccagcuacuuggguggccgaggcaggag

SEQ ID NO: 28787 - RNA, 32 nt, Human
aaucccagcuacuuggguggcugaggcaagag

SEQ ID NO: 28788 - RNA, 32 nt, Human
aaucccagcuacuuggguggcugaggcaggcg

SEQ ID NO: 28789 - RNA, 32 nt, Human
aaucccagcuacuuuacuugggaggcugaggc

SEQ ID NO: 28790 - RNA, 32 nt, Human
aaucccagcuacuuugguggcugaggcaugag

SEQ ID NO: 28791 - RNA, 32 nt, Human
aaucccagcuagucaggaggcugaggcaggag

SEQ ID NO: 28792 - RNA, 32 nt, Human
aaucccagcugcucaggagacugaggcaggag

SEQ ID NO: 28793 - RNA, 32 nt, Human
aaucccagcugcucgggaggcagaggcaggag

SEQ ID NO: 28794 - RNA, 32 nt, Human
aaucccagcugcucgggaggcugaggcaggag

SEQ ID NO: 28795 - RNA, 32 nt, Human
aaucccagcugugggagguugaggcaggagaa

SEQ ID NO: 28796 - RNA, 32 nt, Human
aaucccagcuucucgggaggcugaggcaggag

SEQ ID NO: 28797 - RNA, 32 nt, Human
aaucccaggagacagagguugcagugagccga

SEQ ID NO: 28798 - RNA, 32 nt, Human
aaucccaggagguagcaaccuaggcuuugguu

SEQ ID NO: 28799 - RNA, 32 nt, Human
aaucccaggccaugugcacaucccaggauuag

SEQ ID NO: 28800 - RNA, 32 nt, Human
aaucccagggcauugcccaccugggugugauc

SEQ ID NO: 28801 - RNA, 32 nt, Human
aaucccaggggguggagggggagaggagagag

SEQ ID NO: 28802 - RNA, 32 nt, Human
aaucccagggugcugagauuacaggugugagc

SEQ ID NO: 28803 - RNA, 32 nt, Human
aaucccagguacucgggaggcugaagcaggag

SEQ ID NO: 28804 - RNA, 32 nt, Human
aaucccagguacucgggaggcugaggcagaga

SEQ ID NO: 28805 - RNA, 32 nt, Human
aaucccagugauucaggagacugaggugggag

SEQ ID NO: 28806 - RNA, 32 nt, Human
aaucccagugcuuugggagacugaggcaggag

SEQ ID NO: 28807 - RNA, 32 nt, Human
aaucccaguuacucgggaggaugagucaggag

SEQ ID NO: 28808 - RNA, 32 nt, Human
aaucccaguuacucgggaggcugaggcaagag

SEQ ID NO: 28809 - RNA, 32 nt, Human
aaucccaguuacucgggaggcugaggcaggag

SEQ ID NO: 28810 - RNA, 32 nt, Human
aaucccauacccuucagccucugcuccacaga

SEQ ID NO: 28811 - RNA, 32 nt, Human
aaucccaucaucuacucaggaggcugaggcag

SEQ ID NO: 28812 - RNA, 32 nt, Human
aaucccaucuccuaagcuuaccuucacaacuc

SEQ ID NO: 28813 - RNA, 32 nt, Human
aaucccaucuuucugugugaguaaugcauucu

SEQ ID NO: 28814 - RNA, 32 nt, Human
aaucccaugcagugauuccaggauuugaaauu

SEQ ID NO: 28815 - RNA, 32 nt, Human
aaucccauuugagguauaagucacucaggaag

SEQ ID NO: 28816 - RNA, 32 nt, Human
aauccccaccaggcgccuuccuggguggauuc

SEQ ID NO: 28817 - RNA, 32 nt, Human
aauccccagaaacccugauucaggucugcagg

SEQ ID NO: 28818 - RNA, 32 nt, Human
aauccccagccugugagucucagccucuuucc

SEQ ID NO: 28819 - RNA, 32 nt, Human
aauccccagggccugugaacguggcucucuca

SEQ ID NO: 28820 - RNA, 32 nt, Human
aauccccaugugucaagggagggaccugaugg

SEQ ID NO: 28821 - RNA, 32 nt, Human
aaucccccacacaagcucauccccggccucug

SEQ ID NO: 28822 - RNA, 32 nt, Human
aaucccccaccuuucggggucucccccuccuu

SEQ ID NO: 28823 - RNA, 32 nt, Human
aaucccccuuccccaauccugucuuuuuaaaa

SEQ ID NO: 28824 - RNA, 32 nt, Human
aauccccgaggcggagguugcacugagccgag

SEQ ID NO: 28825 - RNA, 32 nt, Human
aauccccgcuggccuccgccuccccugggguu

SEQ ID NO: 28826 - RNA, 32 nt, Human
aauccccgggggccaagcuggggagggaugug

SEQ ID NO: 28827 - RNA, 32 nt, Human
aauccccuuauggucucugagcauuaaagaaa

SEQ ID NO: 28828 - RNA, 32 nt, Human
aaucccgccacugcacucuagccugggugaca

SEQ ID NO: 28829 - RNA, 32 nt, Human
aaucccgccucccgccagccauggcccacuug

SEQ ID NO: 28830 - RNA, 32 nt, Human
aaucccggagaaagguagaaccagcuucggcg

SEQ ID NO: 28831 - RNA, 32 nt, Human
aaucccggagcaccccacccccagcgaguccc

SEQ ID NO: 28832 - RNA, 32 nt, Human
aaucccggaggcagaggccaugcugaccgcag

SEQ ID NO: 28833 - RNA, 32 nt, Human
aaucccggcuacucgggaggcugaggcagcag

SEQ ID NO: 28834 - RNA, 32 nt, Human
aaucccggcuacucgggaggcugaggcaggag

SEQ ID NO: 28835 - RNA, 32 nt, Human
aaucccgggaaagaggaacaggagugccagac

SEQ ID NO: 28836 - RNA, 32 nt, Human
aaucccgggcagggcccagugggauugagggg

SEQ ID NO: 28837 - RNA, 32 nt, Human
aaucccgguauuccuaguauguggaauuauua

SEQ ID NO: 28838 - RNA, 32 nt, Human
aaucccguccaacaggcuggaguacaauggcg

SEQ ID NO: 28839 - RNA, 32 nt, Human
aaucccuaauggcccccagaucugccaaggag

SEQ ID NO: 28840 - RNA, 32 nt, Human
aaucccuaugcuaauaucuacagugucuagau

SEQ ID NO: 28841 - RNA, 32 nt, Human
aaucccucacugcugccucaacuuccugggcu

SEQ ID NO: 28842 - RNA, 32 nt, Human
aaucccuccuuucuagcugaacaaaaaugugc

SEQ ID NO: 28843 - RNA, 32 nt, Human
aaucccucuccuuucuggcauccuggccucuc

SEQ ID NO: 28844 - RNA, 21 nt, Human
aaucccucugcacuccaaaac

SEQ ID NO: 28845 - RNA, 32 nt, Human
aaucccugaagaguuggcagugugaguccaac

SEQ ID NO: 28846 - RNA, 32 nt, Human
aaucccugaaucuaaaacuccauucucagaga

SEQ ID NO: 28847 - RNA, 32 nt, Human
aaucccugacaaguacuuuucaucucauagua

SEQ ID NO: 28848 - RNA, 32 nt, Human
aaucccugaggcagagguugcagugagcugag

SEQ ID NO: 28849 - RNA, 32 nt, Human
aaucccugcagcauucaagguuaauccaucua

SEQ ID NO: 28850 - RNA, 32 nt, Human
aaucccugcccagucagcuggggucugguggg

SEQ ID NO: 28851 - RNA, 32 nt, Human
aaucccugcuacucgggaggcugaaacaggag

SEQ ID NO: 28852 - RNA, 32 nt, Human
aaucccugcuacucgggaggcugaggcaagag

SEQ ID NO: 28853 - RNA, 32 nt, Human
aaucccugcuacuugggagacugaggcaggag

SEQ ID NO: 28854 - RNA, 32 nt, Human
aaucccuggaaccugggauuccacuaggugcc

SEQ ID NO: 28855 - RNA, 32 nt, Human
aaucccugggcuuccacaaugugaacucacuc

SEQ ID NO: 28856 - RNA, 32 nt, Human
aaucccugggggagacagaaggggcaggggcc

SEQ ID NO: 28857 - RNA, 32 nt, Human
aaucccuuaccucggugccuuccucuuuuuau

SEQ ID NO: 28858 - RNA, 32 nt, Human
aaucccuuccuuguguccuuaccaaaugauag

SEQ ID NO: 28859 - RNA, 32 nt, Human
aaucccuucuucccugguucccaaaccaaaga

SEQ ID NO: 28860 - RNA, 32 nt, Human
aaucccuugcucuccccuggaguugucccagc

SEQ ID NO: 28861 - RNA, 32 nt, Human
aaucccuuuccuccagagacuuuuggcaaccu

SEQ ID NO: 28862 - RNA, 32 nt, Human
aaucccuuucuggcccucuucuuccaagggcu

SEQ ID NO: 28863 - RNA, 32 nt, Human
aaucccuuugcaccugagagccuacugaagug

SEQ ID NO: 28864 - RNA, 32 nt, Human
aaucccuuuuugcuuuaacuugcccuugcagg

SEQ ID NO: 28865 - RNA, 18 nt, Human
aauccgagaauccuuuca

SEQ ID NO: 28866 - RNA, 32 nt, Human
aauccgagaauguaaaccgcugaacagcuaug

SEQ ID NO: 28867 - RNA, 32 nt, Human
aauccgagcccuaaccgucucuccccagcccu

SEQ ID NO: 28868 - RNA, 32 nt, Human
aauccgagcuacucaggagcugaggcagaaga

SEQ ID NO: 28869 - RNA, 32 nt, Human
aauccgcagcacuucgaucacugugagagaac

SEQ ID NO: 28870 - RNA, 32 nt, Human
aauccgccaagagggggugcgaagggggcaug

SEQ ID NO: 28871 - RNA, 32 nt, Human
aauccgcgguggggguccuaagccagcggggg

SEQ ID NO: 28872 - RNA, 32 nt, Human
aauccgcucccaggccugccaugaacgcgaag

SEQ ID NO: 28873 - RNA, 32 nt, Human
aauccgcuuccgggagggcacugucuagugca

SEQ ID NO: 28874 - RNA, 32 nt, Human
aauccggagcaguaaguggagaagagcucucc

SEQ ID NO: 28875 - RNA, 32 nt, Human
aauccggaguggcaauggaguggcugccaugg

SEQ ID NO: 28876 - RNA, 32 nt, Human
aauccggcccaggauguagagcuggcagugcc

SEQ ID NO: 28877 - RNA, 31 nt, Human
aauccggcuccaggaacuggcauuccaguug

SEQ ID NO: 28878 - RNA, 32 nt, Human
aauccggcugccccugggccagucccaggacc

SEQ ID NO: 28879 - RNA, 32 nt, Human
aauccgggaagcagagguuguagugagccaag

SEQ ID NO: 28880 - RNA, 32 nt, Human
aauccgggacaccugggccgggcuguagauca

SEQ ID NO: 28881 - RNA, 32 nt, Human
aauccgggagaugcauguugcagugagcugag

SEQ ID NO: 28882 - RNA, 32 nt, Human
aauccgggaggcagagauugcagugggccuag

SEQ ID NO: 28883 - RNA, 21 nt, Human
aauccgggaggcagagguugc

SEQ ID NO: 28884 - RNA, 32 nt, Human
aauccgggaggcagagguugcaggagcugaga

SEQ ID NO: 28885 - RNA, 32 nt, Human
aauccgggaggcggagcuugcagcgagccggg

SEQ ID NO: 28886 - RNA, 26 nt, Human
aauccgggaggcggagguugcaguga

SEQ ID NO: 28887 - RNA, 32 nt, Human
aauccgggaggcggagguugcagugaaccgaa

SEQ ID NO: 28888 - RNA, 26 nt, Human
aauccgggaggcggagguugcgguga

SEQ ID NO: 28889 - RNA, 32 nt, Human
aauccgggaggcggagguugcggugagccaag

SEQ ID NO: 28890 - RNA, 32 nt, Human
aauccgggaggcgggucuugcagugagcagag

SEQ ID NO: 28891 - RNA, 32 nt, Human
aauccgggagguggagguugcagugagccaag

SEQ ID NO: 28892 - RNA, 32 nt, Human
aauccgggggacuuccacagugcuguucccga

SEQ ID NO: 28893 - RNA, 32 nt, Human
aauccguccagucucugcucgcgcaccgugac

SEQ ID NO: 28894 - RNA, 32 nt, Human
aauccgugagguggagguuguagugagucaag

SEQ ID NO: 28895 - RNA, 32 nt, Human
aauccuacagcagcaggagcuguggagauaua

SEQ ID NO: 28896 - RNA, 32 nt, Human
aauccuacuaucuccuggccuggaccucagaa

SEQ ID NO: 28897 - RNA, 32 nt, Human
aauccuacucccucagccucaggcaguggugc

SEQ ID NO: 28898 - RNA, 32 nt, Human
aauccuacuuucagcgucauucugccuuuugu

SEQ ID NO: 28899 - RNA, 32 nt, Human
aauccuagcauuuugggugacugaggcgggug

SEQ ID NO: 28900 - RNA, 32 nt, Human
aauccuagccaacauuuucauuuccacccaug

SEQ ID NO: 28901 - RNA, 32 nt, Human
aauccuagcuacucaagaggcugaggcaggag

SEQ ID NO: 28902 - RNA, 32 nt, Human
aauccuagcuacucaggagccugaggcaggag

SEQ ID NO: 28903 - RNA, 32 nt, Human
aauccuagcuacucaggaggcugaggcaagag

SEQ ID NO: 28904 - RNA, 32 nt, Human
aauccuagcuacucaggaggcugaggcaggag

SEQ ID NO: 28905 - RNA, 32 nt, Human
aauccuagcuacucaggaggcuguggcagaga

SEQ ID NO: 28906 - RNA, 32 nt, Human
aauccuagcuacucagguggcggaggugagag

SEQ ID NO: 28907 - RNA, 32 nt, Human
aauccuagcuacucgggagacugacgggagaa

SEQ ID NO: 28908 - RNA, 32 nt, Human
aauccuagcuacucgggaggcugaggcagaag

SEQ ID NO: 28909 - RNA, 32 nt, Human
aauccuagcuacucgggaggcugaggcaggag

SEQ ID NO: 28910 - RNA, 32 nt, Human
aauccuagcuacucgggaggcuguggcaggag

SEQ ID NO: 28911 - RNA, 32 nt, Human
aauccuagcugcucgggaggcuaaggcaggag

SEQ ID NO: 28912 - RNA, 32 nt, Human
aauccuaggaagcaaaacagaccacacuuacu

SEQ ID NO: 28913 - RNA, 32 nt, Human
aauccuaggcugagggaggugggcgcggggcu

SEQ ID NO: 28914 - RNA, 32 nt, Human
aauccuagggaagggugguggagccaguaaac

SEQ ID NO: 28915 - RNA, 32 nt, Human
aauccuagggcagacuaaauucagacgaccca

SEQ ID NO: 28916 - RNA, 32 nt, Human
aauccuaguggccucccagacugcaggguccc

SEQ ID NO: 28917 - RNA, 32 nt, Human
aauccuauguucugaaaguguucucucuuuaa

SEQ ID NO: 28918 - RNA, 32 nt, Human
aauccucaaaccugucacuuuggucagaugug

SEQ ID NO: 28919 - RNA, 32 nt, Human
aauccucaccagaacccaugugcugauucccu

SEQ ID NO: 28920 - RNA, 32 nt, Human
aauccucacguuaacguacacacacaaacaca

SEQ ID NO: 28921 - RNA, 32 nt, Human
aauccucacugcacuccagcagaggcuagagg

SEQ ID NO: 28922 - RNA, 32 nt, Human
aauccucagagcaauucucuguauucucauau

SEQ ID NO: 28923 - RNA, 32 nt, Human
aauccucagcacaacugcuaccaccaggacac

SEQ ID NO: 28924 - RNA, 32 nt, Human
aauccucagucagcaauuuagaacagcaaauc

SEQ ID NO: 28925 - RNA, 32 nt, Human
aauccuccaaugaggcagagguugcagugagc

SEQ ID NO: 28926 - RNA, 32 nt, Human
aauccuccagcaggagcaguggaugaaugucu

SEQ ID NO: 28927 - RNA, 32 nt, Human
aauccuccagggccuguguccucaccuccaac

SEQ ID NO: 28928 - RNA, 32 nt, Human
aauccuccccagcauggucauguucguggugu

SEQ ID NO: 28929 - RNA, 27 nt, Human
aauccucccgccucauccuucugcaua

SEQ ID NO: 28930 - RNA, 31 nt, Human
aauccucccuccagaaggguuucuaaaaaca

SEQ ID NO: 28931 - RNA, 32 nt, Human
aauccuccucaggcaggucccaccugcaggcc

SEQ ID NO: 28932 - RNA, 32 nt, Human
aauccuccuccaccaccaggggccucaaaagg

SEQ ID NO: 28933 - RNA, 32 nt, Human
aauccuccuccuccucuccaggggccuggaaa

SEQ ID NO: 28934 - RNA, 32 nt, Human
aauccuccugccucagcuccugaguagcugga

SEQ ID NO: 28935 - RNA, 32 nt, Human
aauccuccugccucagcuuccugaguagcugg

SEQ ID NO: 28936 - RNA, 32 nt, Human
aauccuccuggcagaugggaagaaugccaccu

SEQ ID NO: 28937 - RNA, 32 nt, Human
aauccucuccuuggcccugccauagggcagag

SEQ ID NO: 28938 - RNA, 32 nt, Human
aauccucucucccuccuacucugcugccagca

SEQ ID NO: 28939 - RNA, 32 nt, Human
aauccucucugccucauccccacccacugccc

SEQ ID NO: 28940 - RNA, 32 nt, Human
aauccucugcauucauguccaugugggaagac

SEQ ID NO: 28941 - RNA, 32 nt, Human
aauccucuggaacauagccaagaccaggagaa

SEQ ID NO: 28942 - RNA, 32 nt, Human
aauccucuggaaggaacuguuugcaguuguau

SEQ ID NO: 28943 - RNA, 32 nt, Human
aauccucugggagcuucuuccguuucuucccc

SEQ ID NO: 28944 - RNA, 32 nt, Human
aauccucugucuccuugcuccaauggaggcag

SEQ ID NO: 28945 - RNA, 32 nt, Human
aauccucuguuaauguggacuggagcauggua

SEQ ID NO: 28946 - RNA, 32 nt, Human
aauccucuugcuaccauguccguggagcucga

SEQ ID NO: 28947 - RNA, 32 nt, Human
aauccugaaaucaaggaucuuuggaacuauuu

SEQ ID NO: 28948 - RNA, 32 nt, Human
aauccugaccaccaccugagcacaggugcccc

SEQ ID NO: 28949 - RNA, 32 nt, Human
aauccugagcaaucuguccuuccuagugacca

SEQ ID NO: 28950 - RNA, 32 nt, Human
aauccugagcgcaggccaggguuguuugguuu

SEQ ID NO: 28951 - RNA, 32 nt, Human
aauccugauaccuuaaaacaccuagcggaggc

SEQ ID NO: 28952 - RNA, 21 nt, Human
aauccugcacuguauuaaaca

SEQ ID NO: 28953 - RNA, 32 nt, Human
aauccugccacaucagcucuggcugcgggguc

SEQ ID NO: 28954 - RNA, 32 nt, Human
aauccugccacccagggaaccccagcaggccg

SEQ ID NO: 28955 - RNA, 32 nt, Human
aauccugccacugcacaccagccugggugaca

SEQ ID NO: 28956 - RNA, 32 nt, Human
aauccugccacuuguuuccacucuucucaaau

SEQ ID NO: 28957 - RNA, 32 nt, Human
aauccugcccugugccucacagaagagguggg

SEQ ID NO: 28958 - RNA, 32 nt, Human
aauccugccgaggcccacugggccaaggcccc

SEQ ID NO: 28959 - RNA, 23 nt, Human
aauccugcuaaagcucaaaaaca

SEQ ID NO: 28960 - RNA, 32 nt, Human
aauccugcuccuccucagguccuggcaguuuc

SEQ ID NO: 28961 - RNA, 32 nt, Human
aauccugcuugaggucaucugccuugcuaaag

SEQ ID NO: 28962 - RNA, 32 nt, Human
aauccugcuugccugguaaauguucucuucuu

SEQ ID NO: 28963 - RNA, 32 nt, Human
aauccuggaagacuuccugcaggagucagcgu

SEQ ID NO: 28964 - RNA, 32 nt, Human
aauccuggacuccaguuuccucuuggggcccu

SEQ ID NO: 28965 - RNA, 26 nt, Human
aauccuggaggcagagguugcaguga

SEQ ID NO: 28966 - RNA, 32 nt, Human
aauccuggaggcagagguugcagugagcugag

SEQ ID NO: 28967 - RNA, 32 nt, Human
aauccuggaggggcagcaggaggcggagcucu

SEQ ID NO: 28968 - RNA, 32 nt, Human
aauccuggagucucacugucugcuggcaaaga

SEQ ID NO: 28969 - RNA, 32 nt, Human
aauccuggagugcagaagaagcauuaggcauu

SEQ ID NO: 28970 - RNA, 32 nt, Human
aauccuggccaacauggugaaaccccgucucu

SEQ ID NO: 28971 - RNA, 32 nt, Human
aauccuggcuacucgggaggcugaggcaggag

SEQ ID NO: 28972 - RNA, 32 nt, Human
aauccugggggacagcagggaggaggcacuuc

SEQ ID NO: 28973 - RNA, 32 nt, Human
aauccugggguuucaccugagccuucuguuug

SEQ ID NO: 28974 - RNA, 32 nt, Human
aauccuggugaccgagaagagagcagagccac

SEQ ID NO: 28975 - RNA, 32 nt, Human
aauccugugugcagaugcagaaugacaagcug

SEQ ID NO: 28976 - RNA, 32 nt, Human
aauccuguguuagaagcagcuguggggguccc

SEQ ID NO: 28977 - RNA, 32 nt, Human
aauccuguucauguuuguuuaaaguuuuuacu

SEQ ID NO: 28978 - RNA, 32 nt, Human
aauccuuaaaggcuuuuuaauagcagacuucc

SEQ ID NO: 28979 - RNA, 32 nt, Human
aauccuuacuucugccagucuguauuuccuau

SEQ ID NO: 28980 - RNA, 32 nt, Human
aauccuuauguaugaaauuaccuacaaugaau

SEQ ID NO: 28981 - RNA, 32 nt, Human
aauccuucacucucauuuccuucaagaauggc

SEQ ID NO: 28982 - RNA, 32 nt, Human
aauccuucagagaccacccuaucgguucuccu

SEQ ID NO: 28983 - RNA, 18 nt, Human
aauccuucaugacuuuca

SEQ ID NO: 28984 - RNA, 32 nt, Human
aauccuucaugucuuaaccuaccuggaagaag

SEQ ID NO: 28985 - RNA, 32 nt, Human
aauccuuccaacauccuuuugaucucaugaag

SEQ ID NO: 28986 - RNA, 23 nt, Human
aauccuuccauuucuucugcaca

SEQ ID NO: 28987 - RNA, 32 nt, Human
aauccuuccccaugccuccaucagccucaaag

SEQ ID NO: 28988 - RNA, 21 nt, Human
aauccuucccucaucccauca

SEQ ID NO: 28989 - RNA, 32 nt, Human
aauccuuccgccucugggccucaggcugccug

SEQ ID NO: 28990 - RNA, 20 nt, Human
aauccuucgaucucgcuuca

SEQ ID NO: 28991 - RNA, 20 nt, Human
aauccuucuaguuccuuuca

SEQ ID NO: 28992 - RNA, 32 nt, Human
aauccuucugggggcacuggaagcacaauacg

SEQ ID NO: 28993 - RNA, 32 nt, Human
aauccuucugucuucauggccugcugugcuga

SEQ ID NO: 28994 - RNA, 32 nt, Human
aauccuugaggccaggagguugaggcugcagu

SEQ ID NO: 28995 - RNA, 32 nt, Human
aauccuugcaggaagcagagaacagggaggca

SEQ ID NO: 28996 - RNA, 32 nt, Human
aauccuugccugcugaacccagccugggccug

SEQ ID NO: 28997 - RNA, 32 nt, Human
aauccuuggcuaacagaagauucuuccagauu

SEQ ID NO: 28998 - RNA, 32 nt, Human
aauccuuuccaguccagcaccuccuggggcag

SEQ ID NO: 28999 - RNA, 32 nt, Human
aauccuuuccaucauuuaugaaggagcuuuau

SEQ ID NO: 29000 - RNA, 32 nt, Human
aauccuuugcagaaugguacucauauaauggu

SEQ ID NO: 29001 - RNA, 32 nt, Human
aauccuuugucagaaaagaagguagcuaccac

SEQ ID NO: 29002 - RNA, 20 nt, Human
aauccuuugucuuccacuca

SEQ ID NO: 29003 - RNA, 32 nt, Human
aauccuuuuauugccaccucaggaccuggcca

SEQ ID NO: 29004 - RNA, 24 nt, Human
aauccuuuuauuuuaauccuuuua

SEQ ID NO: 29005 - RNA, 32 nt, Human
aauccuuuuccagaguagaaaaauccugcucu

SEQ ID NO: 29006 - RNA, 32 nt, Human
aaucgaaggaauuggcccaauggcgaggagag

SEQ ID NO: 29007 - RNA, 32 nt, Human
aaucgaaucucccaggaggcuuccuuccagcc

SEQ ID NO: 29008 - RNA, 32 nt, Human
aaucgacaccuugcaacugugccuucaaagag

SEQ ID NO: 29009 - RNA, 32 nt, Human
aaucgacgacuuucucaagguugaaacuuuga

SEQ ID NO: 29010 - RNA, 32 nt, Human
aaucgagggcuuuggccaaggccaggucucuc

SEQ ID NO: 29011 - RNA, 32 nt, Human
aaucgaguuguuccgggggacugaggucucuu

SEQ ID NO: 29012 - RNA, 32 nt, Human
aaucgaucuacacacauccacgcacaugcgac

SEQ ID NO: 29013 - RNA, 32 nt, Human
aaucgaucuuccugccaagguuuuggaauuac

SEQ ID NO: 29014 - RNA, 32 nt, Human
aaucgauucccaagcucccuuccgggacaagu

SEQ ID NO: 29015 - RNA, 32 nt, Human
aaucgcaccacugcacuccagccugggcgaca

SEQ ID NO: 29016 - RNA, 22 nt, Human
aaucgcaccgccccggcucccc

SEQ ID NO: 29017 - RNA, 32 nt, Human
aaucgcaccgcugcacuccagccuggcaacag

SEQ ID NO: 29018 - RNA, 32 nt, Human
aaucgcagcuacucaggaagcugaggcaggag

SEQ ID NO: 29019 - RNA, 32 nt, Human
aaucgcagcuacucaggaggcugaggcaggag

SEQ ID NO: 29020 - RNA, 32 nt, Human
aaucgcaggucaaaugacuccuuggggaagcu

SEQ ID NO: 29021 - RNA, 32 nt, Human
aaucgcaucccucccugaagguccgucugcuc

SEQ ID NO: 29022 - RNA, 32 nt, Human
aaucgcaugaguagcaagacugcugccaccag

SEQ ID NO: 29023 - RNA, 32 nt, Human
aaucgcaugguucuccuggcaggccugcugug

SEQ ID NO: 29024 - RNA, 32 nt, Human
aaucgcauuugaguccuuauuuggcacagaga

SEQ ID NO: 29025 - RNA, 32 nt, Human
aaucgccccacccguuccuaccuggugccuug

SEQ ID NO: 29026 - RNA, 32 nt, Human
aaucgcccccuucggaaaugucuccacccgug

SEQ ID NO: 29027 - RNA, 32 nt, Human
aaucgcccucaccucuggcuucagguccaugc

SEQ ID NO: 29028 - RNA, 15 nt, Human
aaucgccuccaggaa

SEQ ID NO: 29029 - RNA, 32 nt, Human
aaucgccugcauuggggagaagcuagaugaaa

SEQ ID NO: 29030 - RNA, 32 nt, Human
aaucgccugccugcgcccuuugcagcauuuca

SEQ ID NO: 29031 - RNA, 32 nt, Human
aaucgcgccacugcacuccagccugggugaca

SEQ ID NO: 29032 - RNA, 32 nt, Human
aaucgcguaccacacuccagccugggugacag

SEQ ID NO: 29033 - RNA, 32 nt, Human
aaucgcgucacugcacuccagccugagugaca

SEQ ID NO: 29034 - RNA, 32 nt, Human
aaucgcucaggaaagacacacugcagacucca

SEQ ID NO: 29035 - RNA, 32 nt, Human
aaucgcucgguggacgagagugucugacucag

SEQ ID NO: 29036 - RNA, 31 nt, Human
aaucgcugccucuggcuuucuguuuucuacu

SEQ ID NO: 29037 - RNA, 32 nt, Human
aaucgcuggaaccugggaaguggaagcugcag

SEQ ID NO: 29038 - RNA, 32 nt, Human
aaucgcuuaaacucgggagguagagguugcag

SEQ ID NO: 29039 - RNA, 32 nt, Human
aaucgcuugaacucgggagacuguaggugccg

SEQ ID NO: 29040 - RNA, 32 nt, Human
aaucgcuugaacucgggaggcagagguuguca

SEQ ID NO: 29041 - RNA, 32 nt, Human
aaucgcuugaacucgggaggcagagguuucag

SEQ ID NO: 29042 - RNA, 32 nt, Human
aaucgcuugaacucgggagguggagguggcag

SEQ ID NO: 29043 - RNA, 32 nt, Human
aaucgcuugaacucgggagguggagguugcag

SEQ ID NO: 29044 - RNA, 32 nt, Human
aaucgcuugguggacgagagugucugacucag

SEQ ID NO: 29045 - RNA, 32 nt, Human
aaucggaaaaugaggcuuauccuccagcagaa

SEQ ID NO: 29046 - RNA, 32 nt, Human
aaucggaaaugcagucguccuuccauauccau

SEQ ID NO: 29047 - RNA, 32 nt, Human
aaucggagacuuugcaaccuguucucagcucu

SEQ ID NO: 29048 - RNA, 32 nt, Human
aaucggcauuuggagcagaguuguuuguuuuu

SEQ ID NO: 29049 - RNA, 32 nt, Human
aaucggcgggcagaggagagggaggccgcgga

SEQ ID NO: 29050 - RNA, 32 nt, Human
aaucggcuccaaauccccuagaugucucagca

SEQ ID NO: 29051 - RNA, 32 nt, Human
aaucggcuuggagcgcgggagguggagucggc

SEQ ID NO: 29052 - RNA, 32 nt, Human
aaucgggcggagguggcgcugccccuucagac

SEQ ID NO: 29053 - RNA, 32 nt, Human
aaucgggcuuugcagaacacuccacuguuuuu

SEQ ID NO: 29054 - RNA, 32 nt, Human
aaucggggaggcagagcuugcagucagccgag

SEQ ID NO: 29055 - RNA, 32 nt, Human
aaucgggggaggaucacuccagugcccagguc

SEQ ID NO: 29056 - RNA, 32 nt, Human
aaucgguaaccagcagcuguuccucagguugu

SEQ ID NO: 29057 - RNA, 32 nt, Human
aaucguaacugcacugcuuucuggaccauuuc

SEQ ID NO: 29058 - RNA, 32 nt, Human
aaucguagagugugcaggaggaaagguguuau

SEQ ID NO: 29059 - RNA, 32 nt, Human
aaucguagcugaggcaggagaaucgccugaac

SEQ ID NO: 29060 - RNA, 32 nt, Human
aaucgucacccacauuggagugcagugguacg

SEQ ID NO: 29061 - RNA, 32 nt, Human
aaucgucgaaacagccugccagcagcgccuca

SEQ ID NO: 29062 - RNA, 32 nt, Human
aaucgucuuugauauuucugaagaaccgaauu

SEQ ID NO: 29063 - RNA, 32 nt, Human
aaucgugccacuccacuccagccugggcaaca

SEQ ID NO: 29064 - RNA, 32 nt, Human
aaucgugccacugcaguccagccuaggcaaca

SEQ ID NO: 29065 - RNA, 32 nt, Human
aaucguggggagacaaaaauauaccugugaaa

SEQ ID NO: 29066 - RNA, 21 nt, Human
aaucguugcugaauccuuuca

SEQ ID NO: 29067 - RNA, 32 nt, Human
aaucuaaaaguggcuagauugugguuguuuug

SEQ ID NO: 29068 - RNA, 32 nt, Human
aaucuaaagaucuuuguucuauaacuguaagu

SEQ ID NO: 29069 - RNA, 32 nt, Human
aaucuaaaugauuuuuaaacuuuucucauaga

SEQ ID NO: 29070 - RNA, 32 nt, Human
aaucuaagaagcagagguugcagugagcugag

SEQ ID NO: 29071 - RNA, 32 nt, Human
aaucuaaggguucuuggggaucuggaaaggau

SEQ ID NO: 29072 - RNA, 32 nt, Human
aaucuaaugaggaaauaucagugaagcuggac

SEQ ID NO: 29073 - RNA, 32 nt, Human
aaucuaaugccucugcugaucugccaggagga

SEQ ID NO: 29074 - RNA, 32 nt, Human
aaucuaauuguaaauaugaaacuuuuuaaauc

SEQ ID NO: 29075 - RNA, 32 nt, Human
aaucuacagcauucucucccaccuacguccug

SEQ ID NO: 29076 - RNA, 32 nt, Human
aaucuacagccaagaauaacucuggcuuccgc

SEQ ID NO: 29077 - RNA, 32 nt, Human
aaucuacaggaaacauuaaaagagagacaggc

SEQ ID NO: 29078 - RNA, 32 nt, Human
aaucuacauaaauauaccucagaaaucauuuu

SEQ ID NO: 29079 - RNA, 32 nt, Human
aaucuacaucccucuguuguauacaggaaucu

SEQ ID NO: 29080 - RNA, 32 nt, Human
aaucuacccaauaauugcaacaugguucuuug

SEQ ID NO: 29081 - RNA, 32 nt, Human
aaucuaccuagaucagcguggcugguccccuu

SEQ ID NO: 29082 - RNA, 32 nt, Human
aaucuaccugcuccucuuucuugguaauuagg

SEQ ID NO: 29083 - RNA, 32 nt, Human
aaucuacuaucuaugauccugccugcaacccc

SEQ ID NO: 29084 - RNA, 32 nt, Human
aaucuacucuuaucacagcugugugacgauuu

SEQ ID NO: 29085 - RNA, 32 nt, Human
aaucuacucuuccucuacaucuuacuguucug

SEQ ID NO: 29086 - RNA, 32 nt, Human
aaucuacuggggcucagaccacaugccccauc

SEQ ID NO: 29087 - RNA, 32 nt, Human
aaucuacuuuuagauaaaccagcgcaggccuu

SEQ ID NO: 29088 - RNA, 32 nt, Human
aaucuacuuuucuuaaacuuuguaucucuagg

SEQ ID NO: 29089 - RNA, 32 nt, Human
aaucuagaaaaugcauucauacaauuacagaa

SEQ ID NO: 29090 - RNA, 32 nt, Human
aaucuagaaguuagggguuuuguuggagaaaa

SEQ ID NO: 29091 - RNA, 32 nt, Human
aaucuagaauuagccgggcauggucgcucaug

SEQ ID NO: 29092 - RNA, 32 nt, Human
aaucuagacuguaaaguaaaacaggaagauuc

SEQ ID NO: 29093 - RNA, 32 nt, Human
aaucuagauauuuaacaaaaacugcagauuaa

SEQ ID NO: 29094 - RNA, 32 nt, Human
aaucuagccagagcccuucacugccaugauag

SEQ ID NO: 29095 - RNA, 32 nt, Human
aaucuagcgggagagacaggauaaccuguccg

SEQ ID NO: 29096 - RNA, 32 nt, Human
aaucuagcucacugcaacccugcaaccucugc

SEQ ID NO: 29097 - RNA, 32 nt, Human
aaucuagcuucuccaccucuuguuucacacuc

SEQ ID NO: 29098 - RNA, 32 nt, Human
aaucuaggaggcagagguugcagugaacugag

SEQ ID NO: 29099 - RNA, 32 nt, Human
aaucuagggcuggggaugccuccugcugaccc

SEQ ID NO: 29100 - RNA, 32 nt, Human
aaucuaguacagauuccaggugcugcuacuuc

SEQ ID NO: 29101 - RNA, 32 nt, Human
aaucuagucuuuguaauagaaguuucccagug

SEQ ID NO: 29102 - RNA, 32 nt, Human
aaucuagugccuuuuaaauguaucccacguuu

SEQ ID NO: 29103 - RNA, 32 nt, Human
aaucuaguuggggguuggagggguaaggaaca

SEQ ID NO: 29104 - RNA, 32 nt, Human
aaucuauauucaaucugaggugauguggugac

SEQ ID NO: 29105 - RNA, 32 nt, Human
aaucuauucucagcagggcauagggcacgcac

SEQ ID NO: 29106 - RNA, 32 nt, Human
aaucuauugacagaaauuggugcaguguuaac

SEQ ID NO: 29107 - RNA, 32 nt, Human
aaucuauuguaucuaccugcagucuccauugu

SEQ ID NO: 29108 - RNA, 32 nt, Human
aaucuauuuccagaggaauguuuugcuaugua

SEQ ID NO: 29109 - RNA, 32 nt, Human
aaucucaaaaugucagccacaggccauuucuu

SEQ ID NO: 29110 - RNA, 32 nt, Human
aaucucaaacuaagcaugaaacaacggcugaa

SEQ ID NO: 29111 - RNA, 32 nt, Human
aaucucaaagccuguaucguucuugaagguca

SEQ ID NO: 29112 - RNA, 32 nt, Human
aaucucaaccaaaacccacagcccugcacccc

SEQ ID NO: 29113 - RNA, 32 nt, Human
aaucucaaccuuacagucuuucccuuaguccu

SEQ ID NO: 29114 - RNA, 32 nt, Human
aaucucaacucugucacccagacuggagugca

SEQ ID NO: 29115 - RNA, 32 nt, Human
aaucucaagccacaugaauuguuaacaccucu

SEQ ID NO: 29116 - RNA, 32 nt, Human
aaucucaaguacccagggacacaaacacugcg

SEQ ID NO: 29117 - RNA, 32 nt, Human
aaucucaagucaaggccaggcacggcggcuca

SEQ ID NO: 29118 - RNA, 32 nt, Human
aaucucaauugcuuuguaagugaaaacaugac

SEQ ID NO: 29119 - RNA, 32 nt, Human
aaucucacagcauuuagugcuuccugccuggu

SEQ ID NO: 29120 - RNA, 32 nt, Human
aaucucacagggggaaugcaacugguuccugu

SEQ ID NO: 29121 - RNA, 32 nt, Human
aaucucaccuacaggcaggauucugccagugc

SEQ ID NO: 29122 - RNA, 32 nt, Human
aaucucacuauguugaccaggcuggucuugaa

SEQ ID NO: 29123 - RNA, 32 nt, Human
aaucucacugcaaccuccgccuuccaguugca

SEQ ID NO: 29124 - RNA, 32 nt, Human
aaucucacugcaagcuccacuuccuggguuca

SEQ ID NO: 29125 - RNA, 32 nt, Human
aaucucacugcaagcucugccucccagguuca

SEQ ID NO: 29126 - RNA, 32 nt, Human
aaucucacugccccuccuccaaucucacccuc

SEQ ID NO: 29127 - RNA, 32 nt, Human
aaucucacuucugcccagcugugucacuuugg

SEQ ID NO: 29128 - RNA, 32 nt, Human
aaucucagcacuaugggaggccgaggugggug

SEQ ID NO: 29129 - RNA, 32 nt, Human
aaucucagcacuuugggagacugagaugagaa

SEQ ID NO: 29130 - RNA, 32 nt, Human
aaucucagcuacuagagaggcugaggcaggag

SEQ ID NO: 29131 - RNA, 32 nt, Human
aaucucagcuacuagggacgcugaggcaggag

SEQ ID NO: 29132 - RNA, 32 nt, Human
aaucucagcuacucaagaggcugagguagaag

SEQ ID NO: 29133 - RNA, 32 nt, Human
aaucucagcuacucaggagacugagggagaga

SEQ ID NO: 29134 - RNA, 32 nt, Human
aaucucagcuacucaggaggaugaggcaggag

SEQ ID NO: 29135 - RNA, 32 nt, Human
aaucucagcuacucaggaggcugaggcaagag

SEQ ID NO: 29136 - RNA, 32 nt, Human
aaucucagcuacucaggaggcugaggcacaag

SEQ ID NO: 29137 - RNA, 32 nt, Human
aaucucagcuacucaggaggcugaggcacgag

SEQ ID NO: 29138 - RNA, 32 nt, Human
aaucucagcuacucaggaggcugaggcaggag

SEQ ID NO: 29139 - RNA, 32 nt, Human
aaucucagcuacucaggaggcugagguaguag

SEQ ID NO: 29140 - RNA, 32 nt, Human
aaucucagcuacucaggagguugaggcaggag

SEQ ID NO: 29141 - RNA, 32 nt, Human
aaucucagcuacucgggaggcugaggcaagag

SEQ ID NO: 29142 - RNA, 32 nt, Human
aaucucagcuacucgggaggcugaggcaggaa

SEQ ID NO: 29143 - RNA, 32 nt, Human
aaucucagcuacucgggaggcugaggcaggag

SEQ ID NO: 29144 - RNA, 32 nt, Human
aaucucagcuacuggagaggcugaggcaggag

SEQ ID NO: 29145 - RNA, 32 nt, Human
aaucucagcuacuugaaaggcugaggcaggag

SEQ ID NO: 29146 - RNA, 32 nt, Human
aaucucagcuacuugagaggcugaggcaggag

SEQ ID NO: 29147 - RNA, 32 nt, Human
aaucucagcuacuugggagacugaggcaggag

SEQ ID NO: 29148 - RNA, 32 nt, Human
aaucucagcuacuugggagccuggggcaggag

SEQ ID NO: 29149 - RNA, 32 nt, Human
aaucucagcuacuugggaggcugaagcaggag

SEQ ID NO: 29150 - RNA, 32 nt, Human
aaucucagcuacuugggaggcugacgcaggag

SEQ ID NO: 29151 - RNA, 32 nt, Human
aaucucagcuacuugggaggcugagacaggac

SEQ ID NO: 29152 - RNA, 32 nt, Human
aaucucagcuacuugggaggcugagacaggag

SEQ ID NO: 29153 - RNA, 32 nt, Human
aaucucagcuacuugggaggcugaggcacgag

SEQ ID NO: 29154 - RNA, 32 nt, Human
aaucucagcuacuugggaggcugaggcaggag

SEQ ID NO: 29155 - RNA, 32 nt, Human
aaucucagcuacuugggaggcugggcagaaga

SEQ ID NO: 29156 - RNA, 32 nt, Human
aaucucagcucacagcaaccuccgccucccag

SEQ ID NO: 29157 - RNA, 32 nt, Human
aaucucagcucacugcaaacuccaccucccag

SEQ ID NO: 29158 - RNA, 32 nt, Human
aaucucagcucacugcaaccuccgccucccag

SEQ ID NO: 29159 - RNA, 32 nt, Human
aaucucagcucacugcaaccuccgccuccuga

SEQ ID NO: 29160 - RNA, 32 nt, Human
aaucucagcucacugcaaccuccguuuccugg

SEQ ID NO: 29161 - RNA, 32 nt, Human
aaucucagcucagugcaaccuccgccucccga

SEQ ID NO: 29162 - RNA, 32 nt, Human
aaucucagcuuauauaauggcuccccaugcug

SEQ ID NO: 29163 - RNA, 32 nt, Human
aaucucaggauuggaagagauuuuaaaggcca

SEQ ID NO: 29164 - RNA, 32 nt, Human
aaucucagguauuccaggucacugacaugaau

SEQ ID NO: 29165 - RNA, 32 nt, Human
aaucucagugcuguuuggagcuccauuucuca

SEQ ID NO: 29166 - RNA, 32 nt, Human
aaucucaugacuauguucuucucccaaacaag

SEQ ID NO: 29167 - RNA, 32 nt, Human
aaucucauuggcccaagggagcugcaguggua

SEQ ID NO: 29168 - RNA, 32 nt, Human
aaucucauuuucuucuuucuaguacuacuauu

SEQ ID NO: 29169 - RNA, 32 nt, Human
aaucucauuuucuucuuucuuccauucccuua

SEQ ID NO: 29170 - RNA, 32 nt, Human
aaucuccaaagagaaguagagagagggccaca

SEQ ID NO: 29171 - RNA, 32 nt, Human
aaucuccaaauguuagucacauugguuugucu

SEQ ID NO: 29172 - RNA, 32 nt, Human
aaucuccagaaagugguauuccauaaaccuac

SEQ ID NO: 29173 - RNA, 32 nt, Human
aaucuccagaucucuguaaaugauaccuacau

SEQ ID NO: 29174 - RNA, 32 nt, Human
aaucuccagcgggagccgccaggccuggccug

SEQ ID NO: 29175 - RNA, 32 nt, Human
aaucuccauaggcugggccucccaggcgaucu

SEQ ID NO: 29176 - RNA, 32 nt, Human
aaucuccaucucagagcuagcuucugggaacc

SEQ ID NO: 29177 - RNA, 32 nt, Human
aaucucccacaggcgugaaccugcucugcugu

SEQ ID NO: 29178 - RNA, 19 nt, Human
aaucucccaccuccugccc

SEQ ID NO: 29179 - RNA, 32 nt, Human
aaucucccagccaggccaacauggugaaaccc

SEQ ID NO: 29180 - RNA, 32 nt, Human
aaucuccccaguaccugggauuacagguagac

SEQ ID NO: 29181 - RNA, 32 nt, Human
aaucuccccuggggaggaagcgggaagccagc

SEQ ID NO: 29182 - RNA, 32 nt, Human
aaucucccuccccucuuuuauuuuaauuaugc

SEQ ID NO: 29183 - RNA, 32 nt, Human
aaucucccugacugcaccucaggguugggcuc

SEQ ID NO: 29184 - RNA, 32 nt, Human
aaucucccuuucugcuugcucuucuguuugcg

SEQ ID NO: 29185 - RNA, 32 nt, Human
aaucuccuacccacgugguuuccucauucucu

SEQ ID NO: 29186 - RNA, 32 nt, Human
aaucuccuauugcuugucagccugugugcgug

SEQ ID NO: 29187 - RNA, 32 nt, Human
aaucuccucacaguaucauguugcaggaauuc

SEQ ID NO: 29188 - RNA, 32 nt, Human
aaucuccugcagcuagcucagugucugcccaa

SEQ ID NO: 29189 - RNA, 32 nt, Human
aaucuccugccucagccuucugaguagcuggg

SEQ ID NO: 29190 - RNA, 32 nt, Human
aaucuccugccucuccccaacugucccccucu

SEQ ID NO: 29191 - RNA, 32 nt, Human
aaucuccuggacgcagaggugacagugggagc

SEQ ID NO: 29192 - RNA, 32 nt, Human
aaucuccugugcuuguggaagcaacauaaguu

SEQ ID NO: 29193 - RNA, 32 nt, Human
aaucuccuguuuguugagugcacugacuguga

SEQ ID NO: 29194 - RNA, 32 nt, Human
aaucuccuugcaaucauguggacaccaaucac

SEQ ID NO: 29195 - RNA, 32 nt, Human
aaucucgaucuugccauaacuuuacaggguaa

SEQ ID NO: 29196 - RNA, 32 nt, Human
aaucucgcccaaacaggaaagcaaaccugaaa

SEQ ID NO: 29197 - RNA, 32 nt, Human
aaucucgcucacugcaaccuccaccucccagg

SEQ ID NO: 29198 - RNA, 32 nt, Human
aaucucgcucugcacuccagccuaggugacag

SEQ ID NO: 29199 - RNA, 32 nt, Human
aaucucggaaggcugaggcaggaggaucauuu

SEQ ID NO: 29200 - RNA, 32 nt, Human
aaucucggcacuuugggagacugaggugggag

SEQ ID NO: 29201 - RNA, 32 nt, Human
aaucucggcucacugcaaccuccgccucccag

SEQ ID NO: 29202 - RNA, 32 nt, Human
aaucucggcucacugcaaccuccgccuccuug

SEQ ID NO: 29203 - RNA, 32 nt, Human
aaucucggcucacugcaaccuccgccuugcug

SEQ ID NO: 29204 - RNA, 32 nt, Human
aaucucggcucacugcaaucucugccucccaa

SEQ ID NO: 29205 - RNA, 32 nt, Human
aaucucgggaggcagagguugcagugagccga

SEQ ID NO: 29206 - RNA, 32 nt, Human
aaucucggggaagagaaagauagguuuaauuu

SEQ ID NO: 29207 - RNA, 32 nt, Human
aaucucggucagagcuguggccucccccuugc

SEQ ID NO: 29208 - RNA, 32 nt, Human
aaucucgguggaaacuccuauccuaucauguu

SEQ ID NO: 29209 - RNA, 32 nt, Human
aaucucgguggccgcugcuccagcgcggccug

SEQ ID NO: 29210 - RNA, 32 nt, Human
aaucucguauuugggggcuuggggaagggggc

SEQ ID NO: 29211 - RNA, 32 nt, Human
aaucucguuucuccucuuuccuccugcuucau

SEQ ID NO: 29212 - RNA, 32 nt, Human
aaucucuaaacuuacccagccugguuggugcc

SEQ ID NO: 29213 - RNA, 32 nt, Human
aaucucuacccacuccagccaacucugaggcc

SEQ ID NO: 29214 - RNA, 32 nt, Human
aaucucuacuaaaaauacaaaaauuagccggg

SEQ ID NO: 29215 - RNA, 32 nt, Human
aaucucuauguuucucuccauuuucauuccuc

SEQ ID NO: 29216 - RNA, 32 nt, Human
aaucucucagaggagcucugcaagucucagcu

SEQ ID NO: 29217 - RNA, 32 nt, Human
aaucucucagcuuuuaaauggguagagaaaca

SEQ ID NO: 29218 - RNA, 32 nt, Human
aaucucucccaccaccugaauucuccaaggac

SEQ ID NO: 29219 - RNA, 31 nt, Human
aaucucucccucucugguauguuucuguuuu

SEQ ID NO: 29220 - RNA, 32 nt, Human
aaucucuccgagggagaaagggguucucugcg

SEQ ID NO: 29221 - RNA, 32 nt, Human
aaucucuccgugggggcagguggacuccaggc

SEQ ID NO: 29222 - RNA, 32 nt, Human
aaucucucugucucccugaggcucuauuucug

SEQ ID NO: 29223 - RNA, 32 nt, Human
aaucucucuuguugcuguccuuugccaaacuc

SEQ ID NO: 29224 - RNA, 32 nt, Human
aaucucugagacuccauuuucuccagggaaac

SEQ ID NO: 29225 - RNA, 32 nt, Human
aaucucugcacgggccuuggaaaacgacuguc

SEQ ID NO: 29226 - RNA, 31 nt, Human
aaucucugccucucccaggcugucccccucc

SEQ ID NO: 29227 - RNA, 32 nt, Human
aaucucugcuauuugggagacugaggcaggag

SEQ ID NO: 29228 - RNA, 31 nt, Human
aaucucuggacccuggagcacuucuaaugua

SEQ ID NO: 29229 - RNA, 32 nt, Human
aaucucuggcuguaaugaucacuuuggaagau

SEQ ID NO: 29230 - RNA, 32 nt, Human
aaucucuggggguugggacccagcaagggcac

SEQ ID NO: 29231 - RNA, 32 nt, Human
aaucucuuaauacacagagaacucccaaucuu

SEQ ID NO: 29232 - RNA, 32 nt, Human
aaucucuuccuugucccaccucauuccccacc

SEQ ID NO: 29233 - RNA, 32 nt, Human
aaucucuucucccuccccuucuugugagauuu

SEQ ID NO: 29234 - RNA, 32 nt, Human
aaucucuucucccuucucccuccaucaucgac

SEQ ID NO: 29235 - RNA, 32 nt, Human
aaucucuugaccucauuaucagccugccucgg

SEQ ID NO: 29236 - RNA, 32 nt, Human
aaucucuuguuaugcagggaguacaguucuuu

SEQ ID NO: 29237 - RNA, 32 nt, Human
aaucucuuguucugcagcuugguggcugccac

SEQ ID NO: 29238 - RNA, 32 nt, Human
aaucugaaaauaaguggucucaagagaagcau

SEQ ID NO: 29239 - RNA, 32 nt, Human
aaucugaaacucuuugagccccagugugaugc

SEQ ID NO: 29240 - RNA, 32 nt, Human
aaucugaacaaauuaucauaauggcucucuug

SEQ ID NO: 29241 - RNA, 32 nt, Human
aaucugaagauagaaagggaagaaaaguaaaa

SEQ ID NO: 29242 - RNA, 32 nt, Human
aaucugaaggggaagagggugaccucagcggc

SEQ ID NO: 29243 - RNA, 32 nt, Human
aaucugaaggucauguggcaucagggaaaggg

SEQ ID NO: 29244 - RNA, 32 nt, Human
aaucugacaagcugccuuuucaaguauuguga

SEQ ID NO: 29245 - RNA, 32 nt, Human
aaucugacagcccaggaggugggcucgcugau

SEQ ID NO: 29246 - RNA, 32 nt, Human
aaucugagacccagaguugaagcaaauugccc

SEQ ID NO: 29247 - RNA, 32 nt, Human
aaucugagagauggaggcugcagugagccgag

SEQ ID NO: 29248 - RNA, 32 nt, Human
aaucugagaggagaggaugggguaaggcagaa

SEQ ID NO: 29249 - RNA, 32 nt, Human
aaucugagaggguggguggcagaggggagcag

SEQ ID NO: 29250 - RNA, 32 nt, Human
aaucugagccaaaucaaccucuuccuuuauaa

SEQ ID NO: 29251 - RNA, 32 nt, Human
aaucugagccuccaccacauagacugaaacuc

SEQ ID NO: 29252 - RNA, 32 nt, Human
aaucugaggagaaaggagagccaguccgaguc

SEQ ID NO: 29253 - RNA, 32 nt, Human
aaucugaggaugaugcuucuuccuccaggauu

SEQ ID NO: 29254 - RNA, 32 nt, Human
aaucugaggcccagagagguuggggacuugag

SEQ ID NO: 29255 - RNA, 32 nt, Human
aaucugaggugugaguagagccugggggagag

SEQ ID NO: 29256 - RNA, 32 nt, Human
aaucugaguagagucugacugcaguuuuugcu

SEQ ID NO: 29257 - RNA, 32 nt, Human
aaucugagugcacaguaugucauuucauuccg

SEQ ID NO: 29258 - RNA, 32 nt, Human
aaucugauaguauuuuagcuucuugaauuuug

SEQ ID NO: 29259 - RNA, 32 nt, Human
aaucugaucccacaggccugagaaagucugcu

SEQ ID NO: 29260 - RNA, 23 nt, Human
aaucugauccuucugaagacaga

SEQ ID NO: 29261 - RNA, 32 nt, Human
aaucugcaaauuccuucuaaauuucaugugca

SEQ ID NO: 29262 - RNA, 32 nt, Human
aaucugcaacccuggggaggaccccaacucac

SEQ ID NO: 29263 - RNA, 32 nt, Human
aaucugcaauuauaccuucuguaacaguggca

SEQ ID NO: 29264 - RNA, 32 nt, Human
aaucugcacagcaaagugaaacacacagauaa

SEQ ID NO: 29265 - RNA, 32 nt, Human
aaucugcacauccagucuuggcacuuuuucca

SEQ ID NO: 29266 - RNA, 32 nt, Human
aaucugcacuguccagccuagcaggccgccga

SEQ ID NO: 29267 - RNA, 32 nt, Human
aaucugcacuuauccccaccaccuggggaccc

SEQ ID NO: 29268 - RNA, 32 nt, Human
aaucugcagcaucuaccugcuccacaaucucc

SEQ ID NO: 29269 - RNA, 32 nt, Human
aaucugcagcccccacaugcaucugucuaacg

SEQ ID NO: 29270 - RNA, 32 nt, Human
aaucugcagccuggaagccacagccauggcag

SEQ ID NO: 29271 - RNA, 32 nt, Human
aaucugcagccuuccuggcagugagaaagaca

SEQ ID NO: 29272 - RNA, 32 nt, Human
aaucugcaggagacagagauccccuugcaugg

SEQ ID NO: 29273 - RNA, 32 nt, Human
aaucugcaguuuacugagggcauuucaguucc

SEQ ID NO: 29274 - RNA, 32 nt, Human
aaucugcaucuucucuuauuucugaccuuuuu

SEQ ID NO: 29275 - RNA, 32 nt, Human
aaucugcauucugcagagauuugucuccuccc

SEQ ID NO: 29276 - RNA, 32 nt, Human
aaucugcauucuggccauaauggucuucucug

SEQ ID NO: 29277 - RNA, 32 nt, Human
aaucugcauugcaaugagacccccagggauuu

SEQ ID NO: 29278 - RNA, 32 nt, Human
aaucugccacuugauccgugaauuaccuauag

SEQ ID NO: 29279 - RNA, 32 nt, Human
aaucugcccagccucagacucccaaggugcug

SEQ ID NO: 29280 - RNA, 32 nt, Human
aaucugccccugggagacgagugaaggagccc

SEQ ID NO: 29281 - RNA, 32 nt, Human
aaucugcccuuaggaguccaggcugcacccug

SEQ ID NO: 29282 - RNA, 32 nt, Human
aaucugcgguccugagacuggggucuugacca

SEQ ID NO: 29283 - RNA, 32 nt, Human
aaucugcgugugucugugaccgccugucauca

SEQ ID NO: 29284 - RNA, 32 nt, Human
aaucugcuagugugaaacuugcucuacucucu

SEQ ID NO: 29285 - RNA, 32 nt, Human
aaucugcuccaaugcucuuguucuaaucucua

SEQ ID NO: 29286 - RNA, 32 nt, Human
aaucugcucgcaucgaagcauucuucuaagcg

SEQ ID NO: 29287 - RNA, 32 nt, Human
aaucugcucugacuuguugccauucuaacaau

SEQ ID NO: 29288 - RNA, 32 nt, Human
aaucugcucuuagacacggccuugccaggaga

SEQ ID NO: 29289 - RNA, 32 nt, Human
aaucugcugcagccauucucucugccuuggcc

SEQ ID NO: 29290 - RNA, 32 nt, Human
aaucugcuugaauauuuuuauauuucaccucc

SEQ ID NO: 29291 - RNA, 32 nt, Human
aaucugcuugcacuagcugugccuucauuagu

SEQ ID NO: 29292 - RNA, 24 nt, Human
aaucugcuugccuuuccugaaagu

SEQ ID NO: 29293 - RNA, 31 nt, Human
aaucuggaacaaugucccuccucuuagaaug

SEQ ID NO: 29294 - RNA, 32 nt, Human
aaucuggaagcagcuaagagaaacuuuuguuu

SEQ ID NO: 29295 - RNA, 32 nt, Human
aaucuggaaggcagagguugcagugagauugc

SEQ ID NO: 29296 - RNA, 32 nt, Human
aaucuggagaaaagccaagaccuggagcgagc

SEQ ID NO: 29297 - RNA, 32 nt, Human
aaucuggcagggagcugccccacccacaggga

SEQ ID NO: 29298 - RNA, 32 nt, Human
aaucuggcauacugaauaaguaacauuaacuu

SEQ ID NO: 29299 - RNA, 32 nt, Human
aaucuggcccaggucuccucagccucugcccc

SEQ ID NO: 29300 - RNA, 32 nt, Human
aaucuggccucaucuuguauuccaacccgaca

SEQ ID NO: 29301 - RNA, 32 nt, Human
aaucuggcucacugcagccuccgccucccggg

SEQ ID NO: 29302 - RNA, 32 nt, Human
aaucuggcucacugcauccucaacuuccuggg

SEQ ID NO: 29303 - RNA, 32 nt, Human
aaucuggcuuugccucccuuucucagacuaga

SEQ ID NO: 29304 - RNA, 32 nt, Human
aaucugggaagcggagguugcagugagcugag

SEQ ID NO: 29305 - RNA, 32 nt, Human
aaucugggagagaaggugacacagcugggccc

SEQ ID NO: 29306 - RNA, 32 nt, Human
aaucugggaggcagagguugcagugagccgag

SEQ ID NO: 29307 - RNA, 32 nt, Human
aaucugggaggcagagguugcagugagcugag

SEQ ID NO: 29308 - RNA, 32 nt, Human
aaucugggaggcagagguugcugugagccgag

SEQ ID NO: 29309 - RNA, 32 nt, Human
aaucugggaggcggagauugcagugagccgag

SEQ ID NO: 29310 - RNA, 32 nt, Human
aaucugggaggcggagguugcagugagccagg

SEQ ID NO: 29311 - RNA, 32 nt, Human
aaucugggagguggaaguugcagugagccgag

SEQ ID NO: 29312 - RNA, 32 nt, Human
aaucugggagguggagguugcagugagccaag

SEQ ID NO: 29313 - RNA, 32 nt, Human
aaucugggcacuguuaccacugggcagaauga

SEQ ID NO: 29314 - RNA, 32 nt, Human
aaucugggccaaagaauggaagacggugguuu

SEQ ID NO: 29315 - RNA, 32 nt, Human
aaucuggggaggcaggaauacaaggacagugg

SEQ ID NO: 29316 - RNA, 32 nt, Human
aaucuggggcacugagacugagaaauccaguc

SEQ ID NO: 29317 - RNA, 32 nt, Human
aaucugggggcugggugaggccacucaugccu

SEQ ID NO: 29318 - RNA, 32 nt, Human
aaucuggggguuccuagacggagccagacuuc

SEQ ID NO: 29319 - RNA, 32 nt, Human
aaucuggguucaaccagccccugccauuucuu

SEQ ID NO: 29320 - RNA, 32 nt, Human
aaucugguaacaggauuugcugugcuguuuuc

SEQ ID NO: 29321 - RNA, 32 nt, Human
aaucuggucccuuuggggaauguggcagucag

SEQ ID NO: 29322 - RNA, 32 nt, Human
aaucugguuggucauuuccaccaggaaucaga

SEQ ID NO: 29323 - RNA, 22 nt, Human
aaucugguuucuggauuuuugu

SEQ ID NO: 29324 - RNA, 32 nt, Human
aaucugguuuugcccagugugacaucaaacuc

SEQ ID NO: 29325 - RNA, 32 nt, Human
aaucuguaagagaauuuagucugaggagcaug

SEQ ID NO: 29326 - RNA, 31 nt, Human
aaucuguacaugucucccaucagaaagauuc

SEQ ID NO: 29327 - RNA, 32 nt, Human
aaucuguacugagguagaucauuugaaagggc

SEQ ID NO: 29328 - RNA, 32 nt, Human
aaucuguaugaauaauguaaacuucgauuuuu

SEQ ID NO: 29329 - RNA, 32 nt, Human
aaucuguaugguaaagcucucagcucgaauuc

SEQ ID NO: 29330 - RNA, 32 nt, Human
aaucugucacccaggcuggagcgcaguggugu

SEQ ID NO: 29331 - RNA, 32 nt, Human
aaucugucacccaggcuggagugcaguggcau

SEQ ID NO: 29332 - RNA, 32 nt, Human
aaucugucccugagagugucucugauaaaagg

SEQ ID NO: 29333 - RNA, 32 nt, Human
aaucuguccuguggaggaggugguggugguau

SEQ ID NO: 29334 - RNA, 32 nt, Human
aaucugucugacugggcuacaauccauuguuc

SEQ ID NO: 29335 - RNA, 32 nt, Human
aaucugucuuucuagcauguugcccuuuuuca

SEQ ID NO: 29336 - RNA, 32 nt, Human
aaucugucuuuguugcucugggagaggggacu

SEQ ID NO: 29337 - RNA, 32 nt, Human
aaucugugacacacaagaugugccugugcacu

SEQ ID NO: 29338 - RNA, 32 nt, Human
aaucugugaugcugaagcagagugugucacaa

SEQ ID NO: 29339 - RNA, 32 nt, Human
aaucugugcaacaacauagacugaccucagua

SEQ ID NO: 29340 - RNA, 32 nt, Human
aaucuguggggugcucugauugugggcacuau

SEQ ID NO: 29341 - RNA, 32 nt, Human
aaucugugucaguuguacauucacaggaucca

SEQ ID NO: 29342 - RNA, 32 nt, Human
aaucuguguguaucguauagcucuagcuguuu

SEQ ID NO: 29343 - RNA, 32 nt, Human
aaucuguguuaacugcauaggaggcucucgau

SEQ ID NO: 29344 - RNA, 32 nt, Human
aaucuguguuauuuucuucuaauauaacacau

SEQ ID NO: 29345 - RNA, 32 nt, Human
aaucuguuacccaggcuggagugcaguggugc

SEQ ID NO: 29346 - RNA, 32 nt, Human
aaucuguuaugguguauuagggggaggagccu

SEQ ID NO: 29347 - RNA, 32 nt, Human
aaucuguuccaaaagcagcucaggauuugaug

SEQ ID NO: 29348 - RNA, 32 nt, Human
aaucuguucgcucgcaacccuaccuaccucuc

SEQ ID NO: 29349 - RNA, 32 nt, Human
aaucuguucugggcccugauuuugccacaccu

SEQ ID NO: 29350 - RNA, 32 nt, Human
aaucuuaaaagugccuaugagacuuuuaggca

SEQ ID NO: 29351 - RNA, 32 nt, Human
aaucuuaaaauugcugaauuuacccucauauu

SEQ ID NO: 29352 - RNA, 32 nt, Human
aaucuuaaugucuaccaacugacgaacaggua

SEQ ID NO: 29353 - RNA, 32 nt, Human
aaucuuacaaguaugaauaugugccaaagccu

SEQ ID NO: 29354 - RNA, 32 nt, Human
aaucuuacagaagguccugugugacccucucu

SEQ ID NO: 29355 - RNA, 32 nt, Human
aaucuuacugggauuacagaacaaagagccuc

SEQ ID NO: 29356 - RNA, 32 nt, Human
aaucuuagcuaaaucauuguuuuuccuucugg

SEQ ID NO: 29357 - RNA, 32 nt, Human
aaucuuaucacauuaaauucacugugaaggca

SEQ ID NO: 29358 - RNA, 32 nt, Human
aaucuuauccacuccacaccuucuacagucaa

SEQ ID NO: 29359 - RNA, 32 nt, Human
aaucuucaacagacauucauuccuuuguucag

SEQ ID NO: 29360 - RNA, 32 nt, Human
aaucuucaacagcaccagaggcagcacauuac

SEQ ID NO: 29361 - RNA, 32 nt, Human
aaucuucacuugguuucagccauaguucaccu

SEQ ID NO: 29362 - RNA, 32 nt, Human
aaucuucagcuugaauuuggaggcagauucuu

SEQ ID NO: 29363 - RNA, 32 nt, Human
aaucuucagggcacugcugcugccuuuagucg

SEQ ID NO: 29364 - RNA, 32 nt, Human
aaucuucagguaaagaagcagcuuugaaucug

SEQ ID NO: 29365 - RNA, 32 nt, Human
aaucuucaguuauccccaaaugcagcuucuau

SEQ ID NO: 29366 - RNA, 31 nt, Human
aaucuuccacucaaggaaucuugugaggugu

SEQ ID NO: 29367 - RNA, 32 nt, Human
aaucuuccagcagcaauugaagaugugucugg

SEQ ID NO: 29368 - RNA, 32 nt, Human
aaucuucccagauagggaaacugaggcagaga

SEQ ID NO: 29369 - RNA, 32 nt, Human
aaucuucccuacacccuucucugccuuuauuu

SEQ ID NO: 29370 - RNA, 22 nt, Human
aaucuuccucaguuccacuucu

SEQ ID NO: 29371 - RNA, 23 nt, Human
aaucuuccugccucaaccuccca

SEQ ID NO: 29372 - RNA, 32 nt, Human
aaucuuccuuuucuauuuaugaagauucuacu

SEQ ID NO: 29373 - RNA, 32 nt, Human
aaucuucugccuggcugaccucugagcccaug

SEQ ID NO: 29374 - RNA, 32 nt, Human
aaucuucuggguaguccccuguugauuaucuu

SEQ ID NO: 29375 - RNA, 32 nt, Human
aaucuucugguccuccuguugcauugcugaau

SEQ ID NO: 29376 - RNA, 32 nt, Human
aaucuucuuccccucaacucauucucaauuuc

SEQ ID NO: 29377 - RNA, 32 nt, Human
aaucuucuucuuuuucuuggcuguggugcaug

SEQ ID NO: 29378 - RNA, 32 nt, Human
aaucuucuuuuaggagcuuguaccacagucuu

SEQ ID NO: 29379 - RNA, 32 nt, Human
aaucuugaacaaggaguccagagcaggucaag

SEQ ID NO: 29380 - RNA, 32 nt, Human
aaucuugaccacaacauggagacaggaaauca

SEQ ID NO: 29381 - RNA, 32 nt, Human
aaucuugaccaucacuaucacugccuucuuua

SEQ ID NO: 29382 - RNA, 32 nt, Human
aaucuugagcacuuaguccugcugguuuuagu

SEQ ID NO: 29383 - RNA, 32 nt, Human
aaucuugaggcugagggcgggugguacagaug

SEQ ID NO: 29384 - RNA, 32 nt, Human
aaucuugauggaaauccuuccuuuccugcucu

SEQ ID NO: 29385 - RNA, 32 nt, Human
aaucuugcaaacuggccauggauggggaagug

SEQ ID NO: 29386 - RNA, 32 nt, Human
aaucuugcaacacuauccuguuucucagaaca

SEQ ID NO: 29387 - RNA, 32 nt, Human
aaucuugcaaggcaucagcuggcuccacucau

SEQ ID NO: 29388 - RNA, 32 nt, Human
aaucuugcuguuauuuuccauggacuaaaggu

SEQ ID NO: 29389 - RNA, 32 nt, Human
aaucuuggauucaugcaggaccuggcagauuu

SEQ ID NO: 29390 - RNA, 32 nt, Human
aaucuuggccacugcaagcuccaccucccagg

SEQ ID NO: 29391 - RNA, 32 nt, Human
aaucuuggcucacugcaaccuccgucuuccgg

SEQ ID NO: 29392 - RNA, 32 nt, Human
aaucuugguaugaacaguugacuucauggugg

SEQ ID NO: 29393 - RNA, 32 nt, Human
aaucuuguaacgguucuaacagcugggugcgg

SEQ ID NO: 29394 - RNA, 32 nt, Human
aaucuugucuuguuaaacccuaaagagagugu

SEQ ID NO: 29395 - RNA, 32 nt, Human
aaucuugugccuggagaaccagagaggacccu

SEQ ID NO: 29396 - RNA, 32 nt, Human
aaucuuguuaaaugccauuaggcaccaacuua

SEQ ID NO: 29397 - RNA, 32 nt, Human
aaucuuguucucuugugucccagcuuuuagac

SEQ ID NO: 29398 - RNA, 32 nt, Human
aaucuuguuucaggagagaucucuauagugac

SEQ ID NO: 29399 - RNA, 32 nt, Human
aaucuuuaauucugaccugccauaaauaccca

SEQ ID NO: 29400 - RNA, 32 nt, Human
aaucuuuagaauauuuucaucaucucaaaaag

SEQ ID NO: 29401 - RNA, 19 nt, Human
aaucuuucacauccucuca

SEQ ID NO: 29402 - RNA, 32 nt, Human
aaucuuucacugcagccucaaacuccuggagu

SEQ ID NO: 29403 - RNA, 32 nt, Human
aaucuuucagggaucacgucaauggccuacaa

SEQ ID NO: 29404 - RNA, 32 nt, Human
aaucuuuccacuaaccaaccuaaugccgcugc

SEQ ID NO: 29405 - RNA, 32 nt, Human
aaucuuuccuccaggcuuccugagagcccugg

SEQ ID NO: 29406 - RNA, 22 nt, Human
aaucuuucuauauuuuuuaaau

SEQ ID NO: 29407 - RNA, 32 nt, Human
aaucuuucucucugacuuguuuacaucauuuc

SEQ ID NO: 29408 - RNA, 20 nt, Human
aaucuuucugcaggaaauca

SEQ ID NO: 29409 - RNA, 20 nt, Human
aaucuuucuguaucuuaaaa

SEQ ID NO: 29410 - RNA, 32 nt, Human
aaucuuucuguaucuuaaaacccaucaauaaa

SEQ ID NO: 29411 - RNA, 23 nt, Human
aaucuuucugucauuuaaagcca

SEQ ID NO: 29412 - RNA, 24 nt, Human
aaucuuucuuacacauuaaaauca

SEQ ID NO: 29413 - RNA, 32 nt, Human
aaucuuucuuuucuaaaauugaugcuaugaaa

SEQ ID NO: 29414 - RNA, 32 nt, Human
aaucuuugaccuucauuuaaauugcugacacu

SEQ ID NO: 29415 - RNA, 32 nt, Human
aaucuuugccaaaucuuccuugcuagccagaa

SEQ ID NO: 29416 - RNA, 32 nt, Human
aaucuuugcuguucugcagccucugcugguga

SEQ ID NO: 29417 - RNA, 32 nt, Human
aaucuuuggacucaggacagggccaggugcag

SEQ ID NO: 29418 - RNA, 32 nt, Human
aaucuuuggagacuucuuccagaugcuaguaa

SEQ ID NO: 29419 - RNA, 32 nt, Human
aaucuuuggcugcugcagcuagccgcuucuug

SEQ ID NO: 29420 - RNA, 32 nt, Human
aaucuuugguaaaggaacuagagaugcaugca

SEQ ID NO: 29421 - RNA, 32 nt, Human
aaucuuugugaauaaugugaggccaguucuuc

SEQ ID NO: 29422 - RNA, 32 nt, Human
aaucuuuuaagauacugacaccaaaugccuuu

SEQ ID NO: 29423 - RNA, 28 nt, Human
aaucuuuuaagugcugaacuuauuuuuc

SEQ ID NO: 29424 - RNA, 32 nt, Human
aaucuuuuacuguggagguggcuggucacgac

SEQ ID NO: 29425 - RNA, 32 nt, Human
aaucuuuuccuuaaaauuaauagauaacaaac

SEQ ID NO: 29426 - RNA, 32 nt, Human
aaucuuuucuaugccucuauuccagcaaaaag

SEQ ID NO: 29427 - RNA, 32 nt, Human
aaucuuuucucuugcuaccaagcuauugucac

SEQ ID NO: 29428 - RNA, 32 nt, Human
aaucuuuucuguuccuagaaaaucugaaguac

SEQ ID NO: 29429 - RNA, 32 nt, Human
aaucuuuugaguuguugaguauauuugagauu

SEQ ID NO: 29430 - RNA, 32 nt, Human
aaucuuuugccucucccagccaccuccuccca

SEQ ID NO: 29431 - RNA, 32 nt, Human
aaucuuuuguauuugcucacaguguuugagca

SEQ ID NO: 29432 - RNA, 32 nt, Human
aaucuuuuuguguauacacauauguacaugaa

SEQ ID NO: 29433 - RNA, 32 nt, Human
aaugaaaacauuucaaccaucuaagucaaaca

SEQ ID NO: 29434 - RNA, 32 nt, Human
aaugaaaacgggcugaaaauaccaccccagga

SEQ ID NO: 29435 - RNA, 32 nt, Human
aaugaaaagccuuguacaagaggcuucgugcc

SEQ ID NO: 29436 - RNA, 32 nt, Human
aaugaaaagcugcaugcaucuacagcaggcau

SEQ ID NO: 29437 - RNA, 31 nt, Human
aaugaaaauacuucuugcacuuaaacacugc

SEQ ID NO: 29438 - RNA, 32 nt, Human
aaugaaaauggagugaguguugccuggguauc

SEQ ID NO: 29439 - RNA, 32 nt, Human
aaugaaacacaaauggauuuguauguaacauu

SEQ ID NO: 29440 - RNA, 32 nt, Human
aaugaaacaggaggcugugcuuccauggagcu

SEQ ID NO: 29441 - RNA, 32 nt, Human
aaugaaacaugcugguagacuccacgagggca

SEQ ID NO: 29442 - RNA, 32 nt, Human
aaugaaacccagcauaggagcuggccaagagc

SEQ ID NO: 29443 - RNA, 32 nt, Human
aaugaaaccccucuuuuucuugaccaaaagag

SEQ ID NO: 29444 - RNA, 32 nt, Human
aaugaaaccugcagcaguucaggaugacuaau

SEQ ID NO: 29445 - RNA, 32 nt, Human
aaugaaaccuuuuucucugaagaaucuaggga

SEQ ID NO: 29446 - RNA, 32 nt, Human
aaugaaacuuggauuugcucagugucuggcug

SEQ ID NO: 29447 - RNA, 32 nt, Human
aaugaaacuuugccacaaccagccuuugcugu

SEQ ID NO: 29448 - RNA, 32 nt, Human
aaugaaagaaagggaaaaggcaguggugugua

SEQ ID NO: 29449 - RNA, 32 nt, Human
aaugaaagaaugacauuuaugcuuugaaagcu

SEQ ID NO: 29450 - RNA, 32 nt, Human
aaugaaagacugcuguuuaaagccacugcauu

SEQ ID NO: 29451 - RNA, 32 nt, Human
aaugaaagaggagaagaaacgcaacuaccugc

SEQ ID NO: 29452 - RNA, 32 nt, Human
aaugaaagauuaaacagaugaugagaauuucu

SEQ ID NO: 29453 - RNA, 32 nt, Human
aaugaaagcauauaagguuuucuugaaguugu

SEQ ID NO: 29454 - RNA, 32 nt, Human
aaugaaagccuaaaccucuuccuuuagcuuug

SEQ ID NO: 29455 - RNA, 32 nt, Human
aaugaaagccucucuucaggcugaaccacaaa

SEQ ID NO: 29456 - RNA, 32 nt, Human
aaugaaagcucaggaucucugaauugggcuau

SEQ ID NO: 29457 - RNA, 32 nt, Human
aaugaaaggcaucacaggaggccucugcauga

SEQ ID NO: 29458 - RNA, 32 nt, Human
aaugaaaggcuucucagcaugauaccccaacu

SEQ ID NO: 29459 - RNA, 32 nt, Human
aaugaaagucuuguaaguuuggccaacaaggu

SEQ ID NO: 29460 - RNA, 29 nt, Human
aaugaaauacaaaugcuauagaaaaauuu

SEQ ID NO: 29461 - RNA, 32 nt, Human
aaugaaaucacacuuggauauauuguuaaacc

SEQ ID NO: 29462 - RNA, 32 nt, Human
aaugaaaucauccucagaggaugaagccacca

SEQ ID NO: 29463 - RNA, 32 nt, Human
aaugaaauccaccccugccugcuagauacuug

SEQ ID NO: 29464 - RNA, 32 nt, Human
aaugaaauccucaagccaucaggauuugcuau

SEQ ID NO: 29465 - RNA, 32 nt, Human
aaugaaaugcagaagaguucauuuuucuaaga

SEQ ID NO: 29466 - RNA, 32 nt, Human
aaugaaaugccugaguuaaugugaacuuuggg

SEQ ID NO: 29467 - RNA, 32 nt, Human
aaugaaauggagugagcccaggagagcucagc

SEQ ID NO: 29468 - RNA, 32 nt, Human
aaugaaauuaaaaggcaaaagaacaugauuga

SEQ ID NO: 29469 - RNA, 32 nt, Human
aaugaaauugaucuuuugacugugccaccuuu

SEQ ID NO: 29470 - RNA, 32 nt, Human
aaugaaauuguggcacaaaaucuguucagguu

SEQ ID NO: 29471 - RNA, 32 nt, Human
aaugaacaauccucaugaugucaugggcccug

SEQ ID NO: 29472 - RNA, 23 nt, Human
aaugaacagcacaguaugggaga

SEQ ID NO: 29473 - RNA, 32 nt, Human
aaugaacagcagauugcuucccuguuggugau

SEQ ID NO: 29474 - RNA, 32 nt, Human
aaugaacaugaggaugggaucaaugugggaug

SEQ ID NO: 29475 - RNA, 32 nt, Human
aaugaacauuuucuccagccucugagacuauc

SEQ ID NO: 29476 - RNA, 32 nt, Human
aaugaaccuaugcacauuuuuauguacacaua

SEQ ID NO: 29477 - RNA, 32 nt, Human
aaugaacgaggcggccgugugguacggggucu

SEQ ID NO: 29478 - RNA, 32 nt, Human
aaugaacguuuauuauauuuugcaguuccaug

SEQ ID NO: 29479 - RNA, 32 nt, Human
aaugaacuagaaggaaugcaauuuucuguaga

SEQ ID NO: 29480 - RNA, 32 nt, Human
aaugaacuuaaaucuggacuguuccaggcaaa

SEQ ID NO: 29481 - RNA, 32 nt, Human
aaugaacuuauguacagaaaacauguauaaau

SEQ ID NO: 29482 - RNA, 32 nt, Human
aaugaacuuggcuucuuuuauuuaaacccaga

SEQ ID NO: 29483 - RNA, 31 nt, Human
aaugaacuuguguccaucccagagaucacug

SEQ ID NO: 29484 - RNA, 32 nt, Human
aaugaacuuuggagcuuguaugugagucagau

SEQ ID NO: 29485 - RNA, 32 nt, Human
aaugaagaaaggaaccuugucuuucagggcau

SEQ ID NO: 29486 - RNA, 32 nt, Human
aaugaagaaauaauauauaaacuccuuaugug

SEQ ID NO: 29487 - RNA, 32 nt, Human
aaugaagaaugagagacccauuaacagaaggc

SEQ ID NO: 29488 - RNA, 32 nt, Human
aaugaagacaaugauauugacacugucccucu

SEQ ID NO: 29489 - RNA, 32 nt, Human
aaugaagacacacguucacacccaguccauca

SEQ ID NO: 29490 - RNA, 32 nt, Human
aaugaagacagaaacauauacucacaauagau

SEQ ID NO: 29491 - RNA, 32 nt, Human
aaugaagagaauucccuuccagaagcuacgaa

SEQ ID NO: 29492 - RNA, 32 nt, Human
aaugaagagacuggcagcaccuccuggaacac

SEQ ID NO: 29493 - RNA, 32 nt, Human
aaugaagagugaaagauaaaguagucaauggc

SEQ ID NO: 29494 - RNA, 32 nt, Human
aaugaagaucuacaucgauaagaaauaugaga

SEQ ID NO: 29495 - RNA, 32 nt, Human
aaugaagaugacgcacucggaagcuugugggc

SEQ ID NO: 29496 - RNA, 32 nt, Human
aaugaagauuagcacugagauccagagaggcu

SEQ ID NO: 29497 - RNA, 32 nt, Human
aaugaagcagagccaggaaaaacagacuacau

SEQ ID NO: 29498 - RNA, 32 nt, Human
aaugaagcauucaaaaugagcaaugcuaaugg

SEQ ID NO: 29499 - RNA, 32 nt, Human
aaugaagcgaccucucgaagcaacuguagacc

SEQ ID NO: 29500 - RNA, 32 nt, Human
aaugaagcucacuaaaugaaguucucauuucu

SEQ ID NO: 29501 - RNA, 32 nt, Human
aaugaagcuggcacaacuaaggaacugaaguu

SEQ ID NO: 29502 - RNA, 32 nt, Human
aaugaaggaaaaaucauauacaggcacugaca

SEQ ID NO: 29503 - RNA, 32 nt, Human
aaugaaggaaacucuaaacuccccuuaugguc

SEQ ID NO: 29504 - RNA, 32 nt, Human
aaugaaggacuccacugugccccacuuucugc

SEQ ID NO: 29505 - RNA, 26 nt, Human
aaugaaggagagaagagccagccaga

SEQ ID NO: 29506 - RNA, 32 nt, Human
aaugaaggcagagagauugaguaacuugcaua

SEQ ID NO: 29507 - RNA, 32 nt, Human
aaugaaggcccagguuccagucaucacaggau

SEQ ID NO: 29508 - RNA, 32 nt, Human
aaugaaggcugcaggcacugguugcagacguc

SEQ ID NO: 29509 - RNA, 31 nt, Human
aaugaagggguggaaguggauguggaggagu

SEQ ID NO: 29510 - RNA, 32 nt, Human
aaugaagguagaaaacugaaaagggaguaaau

SEQ ID NO: 29511 - RNA, 32 nt, Human
aaugaaguaucuguccuuuggcccagccccug

SEQ ID NO: 29512 - RNA, 32 nt, Human
aaugaagugaugaaagcuuagagccaguauuu

SEQ ID NO: 29513 - RNA, 32 nt, Human
aaugaaguuaggugggguggggugggguuuau

SEQ ID NO: 29514 - RNA, 32 nt, Human
aaugaaguucugacacacacugcaauguguau

SEQ ID NO: 29515 - RNA, 32 nt, Human
aaugaaguugggggaugugggggaagagcuua

SEQ ID NO: 29516 - RNA, 32 nt, Human
aaugaauaaagggcacgaaggccaggccaggg

SEQ ID NO: 29517 - RNA, 32 nt, Human
aaugaauaaagugcaaacagaagugcauccug

SEQ ID NO: 29518 - RNA, 32 nt, Human
aaugaauacaguugcagaaacucucacucuuu

SEQ ID NO: 29519 - RNA, 32 nt, Human
aaugaauacucuggaugugguggcuggcuccu

SEQ ID NO: 29520 - RNA, 32 nt, Human
aaugaauagagccucagagagcuguggcacac

SEQ ID NO: 29521 - RNA, 32 nt, Human
aaugaauaggcgguacugguugugcacagugg

SEQ ID NO: 29522 - RNA, 21 nt, Human
aaugaaucaucuguucaugca

SEQ ID NO: 29523 - RNA, 32 nt, Human
aaugaaucauuucuuauaucuuauucaugaaa

SEQ ID NO: 29524 - RNA, 32 nt, Human
aaugaauccaaaguauccuagcucuuugucaa

SEQ ID NO: 29525 - RNA, 32 nt, Human
aaugaauccacagcucuacuccagguucuagc

SEQ ID NO: 29526 - RNA, 32 nt, Human
aaugaauccacucaaauguuggcaaguggagc

SEQ ID NO: 29527 - RNA, 32 nt, Human
aaugaaucccuuaccaacucagugccagcauc

SEQ ID NO: 29528 - RNA, 32 nt, Human
aaugaaucuccaaaguaucuucaaagaauaaa

SEQ ID NO: 29529 - RNA, 32 nt, Human
aaugaaucugcccaugccuaugacauuagccg

SEQ ID NO: 29530 - RNA, 32 nt, Human
aaugaaugaauggauggauguuuugcaugcuc

SEQ ID NO: 29531 - RNA, 32 nt, Human
aaugaaugaauggcuuggagugcacugagaac

SEQ ID NO: 29532 - RNA, 32 nt, Human
aaugaaugccuguagucccagcuacuccggac

SEQ ID NO: 29533 - RNA, 32 nt, Human
aaugaaugcuacaaaguguauguucaagaaaa

SEQ ID NO: 29534 - RNA, 32 nt, Human
aaugaauggcgaccccaauauuuggaaccagg

SEQ ID NO: 29535 - RNA, 32 nt, Human
aaugaauguaucagagaaugucuuuguaacug

SEQ ID NO: 29536 - RNA, 32 nt, Human
aaugaaugugguaaagccuucccucgaauugc

SEQ ID NO: 29537 - RNA, 32 nt, Human
aaugaauguuuucauguagauugcauuguauu

SEQ ID NO: 29538 - RNA, 31 nt, Human
aaugaauuauauucaaugcauuuaaaauacc

SEQ ID NO: 29539 - RNA, 32 nt, Human
aaugaauucucucuaaaaauaaaaugauguau

SEQ ID NO: 29540 - RNA, 32 nt, Human
aaugaauugcaucucaugaauguaucaggcug

SEQ ID NO: 29541 - RNA, 24 nt, Human
aaugaauugguuauacaucaugca

SEQ ID NO: 29542 - RNA, 32 nt, Human
aaugaauuguccugcagaacucccucuuaagc

SEQ ID NO: 29543 - RNA, 32 nt, Human
aaugaauuucagaaaguaaagaaacaacugag

SEQ ID NO: 29544 - RNA, 32 nt, Human
aaugaauuucucuccaacucgaccuugguaaa

SEQ ID NO: 29545 - RNA, 32 nt, Human
aaugaauuucucuuuacuucucuccaccuucu

SEQ ID NO: 29546 - RNA, 23 nt, Human
aaugaauuugucucaacuaugca

SEQ ID NO: 29547 - RNA, 32 nt, Human
aaugacaaaaagccuuuuccagaagaucugaa

SEQ ID NO: 29548 - RNA, 32 nt, Human
aaugacaaacugcuccuucacaagucugccua

SEQ ID NO: 29549 - RNA, 32 nt, Human
aaugacaaccuucugcuuucacugcccagcaa

SEQ ID NO: 29550 - RNA, 32 nt, Human
aaugacaagaggagccagaagggugggugggu

SEQ ID NO: 29551 - RNA, 32 nt, Human
aaugacaagcugguugaagcugguaaucaaug

SEQ ID NO: 29552 - RNA, 32 nt, Human
aaugacaagucaaauccagaccuauguuggau

SEQ ID NO: 29553 - RNA, 32 nt, Human
aaugacaagucacaaggguaucaaagaaagac

SEQ ID NO: 29554 - RNA, 32 nt, Human
aaugacaaucccuuucgucuccuuccuccgcu

SEQ ID NO: 29555 - RNA, 31 nt, Human
aaugacaauguccaagacacagcagaacaga

SEQ ID NO: 29556 - RNA, 32 nt, Human
aaugacacucacagcaugagagcuuccugagu

SEQ ID NO: 29557 - RNA, 32 nt, Human
aaugacacucacuggucuuugcaucgugggca

SEQ ID NO: 29558 - RNA, 32 nt, Human
aaugacagaauuuccuuccucaucaaggcuga

SEQ ID NO: 29559 - RNA, 32 nt, Human
aaugacagacugagaacccacugugauuuguc

SEQ ID NO: 29560 - RNA, 32 nt, Human
aaugacagacugagcaaaauugcuugcaaaag

SEQ ID NO: 29561 - RNA, 32 nt, Human
aaugacagcaucuccccauucaucuagaagaa

SEQ ID NO: 29562 - RNA, 32 nt, Human
aaugacagccuuguuucuccccuuugaaucag

SEQ ID NO: 29563 - RNA, 32 nt, Human
aaugacagcugaucugucggaaccaggacaca

SEQ ID NO: 29564 - RNA, 32 nt, Human
aaugacagggucuccauauguugcccaggcug

SEQ ID NO: 29565 - RNA, 32 nt, Human
aaugacaggguuucaccguguuggccaggcug

SEQ ID NO: 29566 - RNA, 32 nt, Human
aaugacagugggucuuucucucauguucacuc

SEQ ID NO: 29567 - RNA, 32 nt, Human
aaugacaguuucagagagucaaugucauuaca

SEQ ID NO: 29568 - RNA, 20 nt, Human
aaugacauaaaaagaagccu

SEQ ID NO: 29569 - RNA, 32 nt, Human
aaugacauaguuuuggguuagauuuuauaaug

SEQ ID NO: 29570 - RNA, 32 nt, Human
aaugacaucaagggguaugaaaagccacuuaa

SEQ ID NO: 29571 - RNA, 32 nt, Human
aaugacauccuccuccuccaucacuccagggg

SEQ ID NO: 29572 - RNA, 32 nt, Human
aaugacaugaauucaauaucuaaugucaacca

SEQ ID NO: 29573 - RNA, 32 nt, Human
aaugacauuccccucccaccucuccuuuugag

SEQ ID NO: 29574 - RNA, 32 nt, Human
aaugaccaagcccaguuguugcagugauuggu

SEQ ID NO: 29575 - RNA, 32 nt, Human
aaugaccacauccugaaaaggguguugcuaag

SEQ ID NO: 29576 - RNA, 32 nt, Human
aaugaccaccucacggccccaggcuggugagg

SEQ ID NO: 29577 - RNA, 26 nt, Human
aaugaccacugcagccagcgaggugc

SEQ ID NO: 29578 - RNA, 32 nt, Human
aaugaccacugcagccuccaccuccuaggcuc

SEQ ID NO: 29579 - RNA, 32 nt, Human
aaugaccagccaaggcucuugcucucagaaau

SEQ ID NO: 29580 - RNA, 32 nt, Human
aaugaccagugcaguacagaacuccacauaua

SEQ ID NO: 29581 - RNA, 32 nt, Human
aaugaccauggagcggaaagaaagaaaacagc

SEQ ID NO: 29582 - RNA, 32 nt, Human
aaugaccauucagggaucuuacuccagcuuga

SEQ ID NO: 29583 - RNA, 32 nt, Human
aaugacccaaggccaaggaagggaggacagag

SEQ ID NO: 29584 - RNA, 32 nt, Human
aaugacccaccccacaucaucuucccacaugg

SEQ ID NO: 29585 - RNA, 16 nt, Human
aaugacccacuggaaa

SEQ ID NO: 29586 - RNA, 32 nt, Human
aaugacccaguaacuaggaaaguagaaaacuu

SEQ ID NO: 29587 - RNA, 32 nt, Human
aaugacccgaguccuccacaugaccuugugau

SEQ ID NO: 29588 - RNA, 32 nt, Human
aaugacccucagaaccuccuuccugggccugc

SEQ ID NO: 29589 - RNA, 32 nt, Human
aaugacccugaaagaauagcccugaagauaga

SEQ ID NO: 29590 - RNA, 32 nt, Human
aaugaccgcccuuccaagauggcggcucccgu

SEQ ID NO: 29591 - RNA, 32 nt, Human
aaugaccucgcugcuguucccuggcaugaccc

SEQ ID NO: 29592 - RNA, 32 nt, Human
aaugaccucuguccucccucugauuuuucaua

SEQ ID NO: 29593 - RNA, 32 nt, Human
aaugaccugaguguccuaggcauucacucgga

SEQ ID NO: 29594 - RNA, 32 nt, Human
aaugaccuguucaucuguggccauuccaucag

SEQ ID NO: 29595 - RNA, 32 nt, Human
aaugaccuugagacugaugaacagucuggcca

SEQ ID NO: 29596 - RNA, 32 nt, Human
aaugaccuuuucaaggagaaccacaagccacu

SEQ ID NO: 29597 - RNA, 32 nt, Human
aaugacgaagugaaguagugcaaacauagcuc

SEQ ID NO: 29598 - RNA, 32 nt, Human
aaugacgccauugcacuccagccuaggcaaua

SEQ ID NO: 29599 - RNA, 32 nt, Human
aaugacggaggagagaaaaugccaugcagaag

SEQ ID NO: 29600 - RNA, 32 nt, Human
aaugacgggcagugucgggagcagggagccac

SEQ ID NO: 29601 - RNA, 32 nt, Human
aaugacuaaagaaaaagugguacauacacaca

SEQ ID NO: 29602 - RNA, 32 nt, Human
aaugacuaaccauacuaaaagacugguaacag

SEQ ID NO: 29603 - RNA, 32 nt, Human
aaugacuaccugaaauguuacaggcuuuuuaa

SEQ ID NO: 29604 - RNA, 32 nt, Human
aaugacuagacuguacauucccaugagccuuc

SEQ ID NO: 29605 - RNA, 32 nt, Human
aaugacuaggaauauuggaagcagcauagugu

SEQ ID NO: 29606 - RNA, 32 nt, Human
aaugacucagcuuuuauggaauuugaaugaac

SEQ ID NO: 29607 - RNA, 32 nt, Human
aaugacucaguuucaguuaccugagccacagc

SEQ ID NO: 29608 - RNA, 32 nt, Human
aaugacucccauccucuccucaucuccccuuu

SEQ ID NO: 29609 - RNA, 32 nt, Human
aaugacuccuuuccuucaccuccugcccuucu

SEQ ID NO: 29610 - RNA, 32 nt, Human
aaugacucuaauuuuaaggggaauggcuggcu

SEQ ID NO: 29611 - RNA, 32 nt, Human
aaugacucucucucuacauaccagcagcauac

SEQ ID NO: 29612 - RNA, 32 nt, Human
aaugacucuuaaaccaaagaacaguggauuag

SEQ ID NO: 29613 - RNA, 32 nt, Human
aaugacugaauacagaccuaagcacagcagug

SEQ ID NO: 29614 - RNA, 32 nt, Human
aaugacugauaagaguacaauacaggugccau

SEQ ID NO: 29615 - RNA, 32 nt, Human
aaugacugcacacccaugcuaaccuccacggg

SEQ ID NO: 29616 - RNA, 32 nt, Human
aaugacugcucaauaaauguugguuccugcug

SEQ ID NO: 29617 - RNA, 32 nt, Human
aaugacuguaucaaauaaauguuuauugauuu

SEQ ID NO: 29618 - RNA, 32 nt, Human
aaugacuguggaauaauauggaagaagaugga

SEQ ID NO: 29619 - RNA, 32 nt, Human
aaugacuguuacgacccuguucacaaaacucu

SEQ ID NO: 29620 - RNA, 32 nt, Human
aaugacuucaggaagaccucaggcuucauuau

SEQ ID NO: 29621 - RNA, 32 nt, Human
aaugacuugcccaggguaaaacaguccauggc

SEQ ID NO: 29622 - RNA, 32 nt, Human
aaugacuuggaucucccuccuggcagacugug

SEQ ID NO: 29623 - RNA, 32 nt, Human
aaugacuugugucacuucggagugacagaaaa

SEQ ID NO: 29624 - RNA, 32 nt, Human
aaugacuuucugaauaaagauggcaacacaaa

SEQ ID NO: 29625 - RNA, 32 nt, Human
aaugacuuucugaauaaagauggcaacacaau

SEQ ID NO: 29626 - RNA, 32 nt, Human
aaugacuuuguuuuucaaggugcugucauuuu

SEQ ID NO: 29627 - RNA, 32 nt, Human
aaugagaaaaacaaccccauuaaaaacugggc

SEQ ID NO: 29628 - RNA, 32 nt, Human
aaugagaaaggccagaggcugcaaagacaguc

SEQ ID NO: 29629 - RNA, 32 nt, Human
aaugagaacaaaguuagaaaucugccgauaac

SEQ ID NO: 29630 - RNA, 32 nt, Human
aaugagaagaaaucugugccacccugggaagg

SEQ ID NO: 29631 - RNA, 24 nt, Human
aaugagacaccacgagaagagagg

SEQ ID NO: 29632 - RNA, 32 nt, Human
aaugagacacucuaguugcaggaaaagaagcu

SEQ ID NO: 29633 - RNA, 32 nt, Human
aaugagacaggaagcuguucacugugaaacag

SEQ ID NO: 29634 - RNA, 32 nt, Human
aaugagacauaaaaagcaggugacaaggauac

SEQ ID NO: 29635 - RNA, 32 nt, Human
aaugagacggcuugugugugaaaagauuuugg

SEQ ID NO: 29636 - RNA, 21 nt, Human
aaugagacuuuaaaagcauuu

SEQ ID NO: 29637 - RNA, 32 nt, Human
aaugagagaaccugguuaccucagccugaaag

SEQ ID NO: 29638 - RNA, 32 nt, Human
aaugagagaaggcagaccuuguuagugacaug

SEQ ID NO: 29639 - RNA, 32 nt, Human
aaugagagaagugggaaagaagcaauggaaag

SEQ ID NO: 29640 - RNA, 32 nt, Human
aaugagagaauagaguaugguugauucccagc

SEQ ID NO: 29641 - RNA, 32 nt, Human
aaugagagauacaaaugagcuagaggaagaug

SEQ ID NO: 29642 - RNA, 32 nt, Human
aaugagagaucugugaagagagagggcugggu

SEQ ID NO: 29643 - RNA, 32 nt, Human
aaugagagcaaagacagcuaagaaaaaggaaa

SEQ ID NO: 29644 - RNA, 31 nt, Human
aaugagagcaguccuguuucauucacauggg

SEQ ID NO: 29645 - RNA, 20 nt, Human
aaugagagcucgcgggguga

SEQ ID NO: 29646 - RNA, 22 nt, Human
aaugagagcucuugaccaguga

SEQ ID NO: 29647 - RNA, 32 nt, Human
aaugagaggcaaaaccuggugcuugagcacug

SEQ ID NO: 29648 - RNA, 32 nt, Human
aaugagagugacggcuggcaugguggcucccg

SEQ ID NO: 29649 - RNA, 32 nt, Human
aaugagagugggucuuucucucauguucacuc

SEQ ID NO: 29650 - RNA, 32 nt, Human
aaugagaguuccuccauuuaccaaaauuugac

SEQ ID NO: 29651 - RNA, 32 nt, Human
aaugagauauuuugggaauaggacccgagccu

SEQ ID NO: 29652 - RNA, 32 nt, Human
aaugagauccaauccucucaccaaaauuucaa

SEQ ID NO: 29653 - RNA, 32 nt, Human
aaugagaucccccagccguguccuccagccca

SEQ ID NO: 29654 - RNA, 32 nt, Human
aaugagaucugaaugugguuucaaucuaauuu

SEQ ID NO: 29655 - RNA, 32 nt, Human
aaugagaugcaggauucaaggaagaaauuaga

SEQ ID NO: 29656 - RNA, 32 nt, Human
aaugagaugcauccucaaacacuugagauccc

SEQ ID NO: 29657 - RNA, 32 nt, Human
aaugagaugccguaccuccucuggaccaucaa

SEQ ID NO: 29658 - RNA, 32 nt, Human
aaugagaugcugggaggagcaagcgaagcaua

SEQ ID NO: 29659 - RNA, 32 nt, Human
aaugagauggaggaaggaaaaagggagaagcu

SEQ ID NO: 29660 - RNA, 32 nt, Human
aaugagauggcaugugaaagcacuuugaaaau

SEQ ID NO: 29661 - RNA, 32 nt, Human
aaugagauuuugcccagcacauggagcuguaa

SEQ ID NO: 29662 - RNA, 32 nt, Human
aaugagcaagagauugcauugcaguuuagaca

SEQ ID NO: 29663 - RNA, 32 nt, Human
aaugagcaauugcuucuccaaggccuggagcu

SEQ ID NO: 29664 - RNA, 32 nt, Human
aaugagcaccuccgggaaagagcccagccugc

SEQ ID NO: 29665 - RNA, 32 nt, Human
aaugagcagcacucagaguccuugcuccccgc

SEQ ID NO: 29666 - RNA, 32 nt, Human
aaugagcaggcaggggagacugagauggaaau

SEQ ID NO: 29667 - RNA, 32 nt, Human
aaugagcagggugggcccacgcugggaggaca

SEQ ID NO: 29668 - RNA, 32 nt, Human
aaugagcagugugagaggggagggauggguag

SEQ ID NO: 29669 - RNA, 32 nt, Human
aaugagcauaguggggaaagaaaaggaaaugg

SEQ ID NO: 29670 - RNA, 32 nt, Human
aaugagcauggaaccugagcaaagggaauagg

SEQ ID NO: 29671 - RNA, 32 nt, Human
aaugagcauugccugaaucagaguuagcuacu

SEQ ID NO: 29672 - RNA, 18 nt, Human
aaugagccaaagugcuca

SEQ ID NO: 29673 - RNA, 32 nt, Human
aaugagccagaccuguaacaccugcaugaugg

SEQ ID NO: 29674 - RNA, 32 nt, Human
aaugagccagugagcuacagcacuuuggaaaa

SEQ ID NO: 29675 - RNA, 32 nt, Human
aaugagccaucacuagaagaaaagcccauuuu

SEQ ID NO: 29676 - RNA, 32 nt, Human
aaugagccauggcauugggacagggucacuuc

SEQ ID NO: 29677 - RNA, 32 nt, Human
aaugagcccaagcacacaugcauggcauuugu

SEQ ID NO: 29678 - RNA, 32 nt, Human
aaugagcccaccuuguguucuuccuagcucca

SEQ ID NO: 29679 - RNA, 32 nt, Human
aaugagcccaucaccaucccacugacucugug

SEQ ID NO: 29680 - RNA, 32 nt, Human
aaugagcccugugaggcccacacccccaggug

SEQ ID NO: 29681 - RNA, 32 nt, Human
aaugagccgugccaaagucucccuucuguuuc

SEQ ID NO: 29682 - RNA, 32 nt, Human
aaugagccucuccugguaucaggccuagaugg

SEQ ID NO: 29683 - RNA, 32 nt, Human
aaugagccugaccuucaggaccacugacagag

SEQ ID NO: 29684 - RNA, 32 nt, Human
aaugagcgaguggaggaacggaagggagcccu

SEQ ID NO: 29685 - RNA, 32 nt, Human
aaugagcuaauaacaccgaggugguggugagg

SEQ ID NO: 29686 - RNA, 32 nt, Human
aaugagcuacaguuuuacaaagcugaucacuu

SEQ ID NO: 29687 - RNA, 32 nt, Human
aaugagcuacugcuuuccgcugccuuccacac

SEQ ID NO: 29688 - RNA, 32 nt, Human
aaugagcuagcuaugauggcaccacugcacuc

SEQ ID NO: 29689 - RNA, 32 nt, Human
aaugagcucacuggaaauucauucuaaucccc

SEQ ID NO: 29690 - RNA, 32 nt, Human
aaugagcucaguuuuacaugcaucgagcuuga

SEQ ID NO: 29691 - RNA, 32 nt, Human
aaugagcuccaaugggaucccagagugcuacg

SEQ ID NO: 29692 - RNA, 32 nt, Human
aaugagcuccacccucacuuugccugcccuga

SEQ ID NO: 29693 - RNA, 32 nt, Human
aaugagcucccaccucuccagccagccuagaa

SEQ ID NO: 29694 - RNA, 32 nt, Human
aaugaggaaacaaccacuggcccaggguagag

SEQ ID NO: 29695 - RNA, 21 nt, Human
aaugaggaaacagguuaugga

SEQ ID NO: 29696 - RNA, 24 nt, Human
aaugaggaaacuaaacucugugga

SEQ ID NO: 29697 - RNA, 24 nt, Human
aaugaggaaacugaggcucagggg

SEQ ID NO: 29698 - RNA, 23 nt, Human
aaugaggaaacugaggcuuggug

SEQ ID NO: 29699 - RNA, 32 nt, Human
aaugaggaacagaagaagcagagcagaugauu

SEQ ID NO: 29700 - RNA, 32 nt, Human
aaugaggaagggaggggagggaagggacagaa

SEQ ID NO: 29701 - RNA, 24 nt, Human
aaugaggaagugaguguucuugga

SEQ ID NO: 29702 - RNA, 32 nt, Human
aaugaggaaucauuuucaugugcccugacaug

SEQ ID NO: 29703 - RNA, 26 nt, Human
aaugaggaauguauauguuuuguggg

SEQ ID NO: 29704 - RNA, 32 nt, Human
aaugaggacauuguauaugacaucgcuaauga

SEQ ID NO: 29705 - RNA, 32 nt, Human
aaugaggagaaaaaggagaaaagggaaaagca

SEQ ID NO: 29706 - RNA, 31 nt, Human
aaugaggagagaccugcuuuugcagguggau

SEQ ID NO: 29707 - RNA, 32 nt, Human
aaugaggagcugggaaguggggugacauagcu

SEQ ID NO: 29708 - RNA, 32 nt, Human
aaugaggagcuuccucucuuccugugaaggau

SEQ ID NO: 29709 - RNA, 32 nt, Human
aaugaggaggucuucacggauggcuuugccga

SEQ ID NO: 29710 - RNA, 32 nt, Human
aaugaggauaccuuuaaggcacucuuggacuc

SEQ ID NO: 29711 - RNA, 32 nt, Human
aaugaggcaagaggacguuggaagagagaagu

SEQ ID NO: 29712 - RNA, 32 nt, Human
aaugaggcagaggcuugccccaagucacagcc

SEQ ID NO: 29713 - RNA, 32 nt, Human
aaugaggcaggcaauucuagucuuccacaaaa

SEQ ID NO: 29714 - RNA, 22 nt, Human
aaugaggcagggcucaugggau

SEQ ID NO: 29715 - RNA, 32 nt, Human
aaugaggcagggcucaugggauugcuuuugau

SEQ ID NO: 29716 - RNA, 32 nt, Human
aaugaggcauaauuguucccuccaucagcgau

SEQ ID NO: 29717 - RNA, 32 nt, Human
aaugaggccagacucagggucacggggaaugu

SEQ ID NO: 29718 - RNA, 32 nt, Human
aaugaggccaggcacagcagcucacagcugua

SEQ ID NO: 29719 - RNA, 32 nt, Human
aaugaggcugggugggagcggggagggacuag

SEQ ID NO: 29720 - RNA, 32 nt, Human
aaugaggcuguggauucaaggcucccugcccc

SEQ ID NO: 29721 - RNA, 32 nt, Human
aaugagggaagacgagaaagagagugggagag

SEQ ID NO: 29722 - RNA, 32 nt, Human
aaugagggagagaagggggcuguacaguuuga

SEQ ID NO: 29723 - RNA, 32 nt, Human
aaugagggagagagaaaggguggccacuuucc

SEQ ID NO: 29724 - RNA, 32 nt, Human
aaugagggaggaaauauuccuuucuagcauuc

SEQ ID NO: 29725 - RNA, 32 nt, Human
aaugagggaggcaggcaauaugcagugaaaac

SEQ ID NO: 29726 - RNA, 32 nt, Human
aaugagggaggucucaagagauauaauuuaga

SEQ ID NO: 29727 - RNA, 32 nt, Human
aaugagggcugaguuugcacaguggucuggaa

SEQ ID NO: 29728 - RNA, 32 nt, Human
aaugaggggaaagagccuggggaggagcuuaa

SEQ ID NO: 29729 - RNA, 32 nt, Human
aaugaggggaaaggaaaugagcucuacgagga

SEQ ID NO: 29730 - RNA, 32 nt, Human
aaugaggggaagcugggguuugcagugguuug

SEQ ID NO: 29731 - RNA, 32 nt, Human
aaugaggggccugggagggaggagcuuggugc

SEQ ID NO: 29732 - RNA, 32 nt, Human
aaugaggggugaacuccuccucccucugcugu

SEQ ID NO: 29733 - RNA, 32 nt, Human
aaugagggugaccacaacagcacugcccucug

SEQ ID NO: 29734 - RNA, 31 nt, Human
aaugagguaggcacaaauacauuccuuuuag

SEQ ID NO: 29735 - RNA, 32 nt, Human
aaugagguccuguccugcuuucacccaugacc

SEQ ID NO: 29736 - RNA, 32 nt, Human
aaugagguguuuagguggcuggaaaagcauuu

SEQ ID NO: 29737 - RNA, 32 nt, Human
aaugagguugugggguguaaagggaaggggau

SEQ ID NO: 29738 - RNA, 32 nt, Human
aaugagguuucagcuccuaugugaucugaaug

SEQ ID NO: 29739 - RNA, 32 nt, Human
aaugagguuuuuaaaauaagguuuucuaguuu

SEQ ID NO: 29740 - RNA, 31 nt, Human
aaugaguaaauucagcacugguaccuuauua

SEQ ID NO: 29741 - RNA, 32 nt, Human
aaugaguaacacccauuuuugcagaucuuugu

SEQ ID NO: 29742 - RNA, 23 nt, Human
aaugaguaaguuuagaugacugg

SEQ ID NO: 29743 - RNA, 32 nt, Human
aaugaguaauccagcaggcacuccuccuccac

SEQ ID NO: 29744 - RNA, 32 nt, Human
aaugaguacccaugaauagccaugauuccuac

SEQ ID NO: 29745 - RNA, 32 nt, Human
aaugaguaucuguaaccucccacugcaucaga

SEQ ID NO: 29746 - RNA, 22 nt, Human
aaugagucagcucugcucaugg

SEQ ID NO: 29747 - RNA, 32 nt, Human
aaugagucauuuucaguuguaccuuagauguc

SEQ ID NO: 29748 - RNA, 32 nt, Human
aaugaguccaggccaagcaaauggagcagaag

SEQ ID NO: 29749 - RNA, 26 nt, Human
aaugagucuaagugcauuuacucucu

SEQ ID NO: 29750 - RNA, 32 nt, Human
aaugagugaggacacaggucccaggggaguuc

SEQ ID NO: 29751 - RNA, 32 nt, Human
aaugagugaugcugcaacuugcaaauguacca

SEQ ID NO: 29752 - RNA, 32 nt, Human
aaugagugcucuggacuugaacuacacugaug

SEQ ID NO: 29753 - RNA, 32 nt, Human
aaugaguggcaagaacaugaugacagacacgg

SEQ ID NO: 29754 - RNA, 32 nt, Human
aaugaguggggagagagaaggggaggaguagg

SEQ ID NO: 29755 - RNA, 32 nt, Human
aaugagugggggaggagagcagcuggauaucc

SEQ ID NO: 29756 - RNA, 32 nt, Human
aaugaguguacauacauaaaagcugccauucu

SEQ ID NO: 29757 - RNA, 32 nt, Human
aaugaguguacauauauaaaagcugccauucu

SEQ ID NO: 29758 - RNA, 32 nt, Human
aaugagugucucugcuggugcuucucccaaga

SEQ ID NO: 29759 - RNA, 32 nt, Human
aaugagugugccagaguuauuagugccaaguu

SEQ ID NO: 29760 - RNA, 32 nt, Human
aaugaguguggcaagaccuacucucacaauuc

SEQ ID NO: 29761 - RNA, 32 nt, Human
aaugaguuaagggagagaauaagaacggcggu

SEQ ID NO: 29762 - RNA, 32 nt, Human
aaugaguuaccagcuauccaguuuucuccauu

SEQ ID NO: 29763 - RNA, 32 nt, Human
aaugaguugcauucugauaaugucuuaucucu

SEQ ID NO: 29764 - RNA, 32 nt, Human
aaugaguugggagggggucccagggaaggggg

SEQ ID NO: 29765 - RNA, 32 nt, Human
aaugaguugggauauguuccuuuugcuucugu

SEQ ID NO: 29766 - RNA, 32 nt, Human
aaugaguuguauugcuaaucuugaugucucuc

SEQ ID NO: 29767 - RNA, 32 nt, Human
aaugaguuugcagccaaggcuacagaggauca

SEQ ID NO: 29768 - RNA, 32 nt, Human
aaugauaaauacagccauacuuaaauagaaga

SEQ ID NO: 29769 - RNA, 32 nt, Human
aaugauaaaugcuggagggggccaucugauuu

SEQ ID NO: 29770 - RNA, 32 nt, Human
aaugauaauauauucauauauguauguuauau

SEQ ID NO: 29771 - RNA, 32 nt, Human
aaugauaauccaccacccuuugcugacuccuu

SEQ ID NO: 29772 - RNA, 32 nt, Human
aaugauacaggcaagguuucugcagaucuugg

SEQ ID NO: 29773 - RNA, 32 nt, Human
aaugauacccaaacuccuggagugggaguggg

SEQ ID NO: 29774 - RNA, 32 nt, Human
aaugauacucaucaugguuuugauuugcaauu

SEQ ID NO: 29775 - RNA, 32 nt, Human
aaugauacuguagauuguacugccuuuaucug

SEQ ID NO: 29776 - RNA, 32 nt, Human
aaugauagggcugauggcaguuuacuagauca

SEQ ID NO: 29777 - RNA, 32 nt, Human
aaugauaucccccacucauuuagccauucuua

SEQ ID NO: 29778 - RNA, 31 nt, Human
aaugauauggugcugcagaaggagccugcug

SEQ ID NO: 29779 - RNA, 32 nt, Human
aaugauauugcguucgugccucagcuuuaagc

SEQ ID NO: 29780 - RNA, 32 nt, Human
aaugauauuuugucugaaaagacuugacauug

SEQ ID NO: 29781 - RNA, 32 nt, Human
aaugaucaaguuggauuuagaugauguucccu

SEQ ID NO: 29782 - RNA, 32 nt, Human
aaugaucaugaccuucaccuguccucacaugu

SEQ ID NO: 29783 - RNA, 32 nt, Human
aaugaucauugggaauuuauuuugaaagugag

SEQ ID NO: 29784 - RNA, 32 nt, Human
aaugauccagcaaguuugggaaaugcugcguu

SEQ ID NO: 29785 - RNA, 32 nt, Human
aaugauccugccagaaccucacucuccccuuu

SEQ ID NO: 29786 - RNA, 32 nt, Human
aaugauccuucccagccggggccuuccgacca

SEQ ID NO: 29787 - RNA, 32 nt, Human
aaugaucguaccacugcacuccagccuaggug

SEQ ID NO: 29788 - RNA, 20 nt, Human
aaugaucgugcgcuuccuga

SEQ ID NO: 29789 - RNA, 32 nt, Human
aaugaucugcccaccucugccucccaaagugc

SEQ ID NO: 29790 - RNA, 32 nt, Human
aaugaugaagaaaaagaauaggcuggagaguc

SEQ ID NO: 29791 - RNA, 32 nt, Human
aaugaugaaggggauacgcuggaguugcccug

SEQ ID NO: 29792 - RNA, 32 nt, Human
aaugaugacuucugcugcuuccgucucuggag

SEQ ID NO: 29793 - RNA, 32 nt, Human
aaugaugaguccuuggaauugauaggacacgu

SEQ ID NO: 29794 - RNA, 32 nt, Human
aaugaugagugagacucaggaggcacgacaug

SEQ ID NO: 29795 - RNA, 32 nt, Human
aaugaugauaauaccacuuaucucauagcauu

SEQ ID NO: 29796 - RNA, 32 nt, Human
aaugaugauagggaagugucuaauguaugugc

SEQ ID NO: 29797 - RNA, 18 nt, Human
aaugaugauuugugcaaa

SEQ ID NO: 29798 - RNA, 32 nt, Human
aaugaugccacgaagcccugggauuuccuacc

SEQ ID NO: 29799 - RNA, 32 nt, Human
aaugaugccacucuagcauuagcugaagaucc

SEQ ID NO: 29800 - RNA, 32 nt, Human
aaugaugcuaacucugucucuuugccaauucu

SEQ ID NO: 29801 - RNA, 32 nt, Human
aaugaugcuaugcuuuuuccaaccaagccaga

SEQ ID NO: 29802 - RNA, 32 nt, Human
aaugaugcuauuugcaauuccugcuccuaggg

SEQ ID NO: 29803 - RNA, 32 nt, Human
aaugaugcuccugccucugccucccagccccu

SEQ ID NO: 29804 - RNA, 32 nt, Human
aaugauggagccagaauuuaguugcagaacuu

SEQ ID NO: 29805 - RNA, 32 nt, Human
aaugauggaggcacauucuagauggaggcaca

SEQ ID NO: 29806 - RNA, 32 nt, Human
aaugauggagggugggagagccuugagccugc

SEQ ID NO: 29807 - RNA, 32 nt, Human
aaugauggcaggagaggaaccagaagagcagg

SEQ ID NO: 29808 - RNA, 32 nt, Human
aaugauggguuuuccaugaaaugugaugcuuc

SEQ ID NO: 29809 - RNA, 32 nt, Human
aaugaugguaagguucacagggcaguccaagu

SEQ ID NO: 29810 - RNA, 32 nt, Human
aaugauggucugggugccaccuguuuuuaaac

SEQ ID NO: 29811 - RNA, 32 nt, Human
aaugauguccccagccuaaggggccuucggga

SEQ ID NO: 29812 - RNA, 32 nt, Human
aaugaugucuucauguugaguuuuauagcaug

SEQ ID NO: 29813 - RNA, 32 nt, Human
aaugauguuagcuguggccacuguggauuuuu

SEQ ID NO: 29814 - RNA, 32 nt, Human
aaugauguugagugggagauuggcuuugccuu

SEQ ID NO: 29815 - RNA, 32 nt, Human
aaugauguuggcucuguggcuuggggguuuug

SEQ ID NO: 29816 - RNA, 32 nt, Human
aaugauguuggugcugcuuccuucuaagagcu

SEQ ID NO: 29817 - RNA, 32 nt, Human
aaugauuaaauacuguuacaaucuuuauuugu

SEQ ID NO: 29818 - RNA, 32 nt, Human
aaugauuaguaggaaaggacugagaguauuau

SEQ ID NO: 29819 - RNA, 32 nt, Human
aaugauuauaaaaucacauauuuucaaaaaug

SEQ ID NO: 29820 - RNA, 32 nt, Human
aaugauuauauguauuuuauauguguguguau

SEQ ID NO: 29821 - RNA, 32 nt, Human
aaugauuaucuuuuagagaaguauacugaaaa

SEQ ID NO: 29822 - RNA, 32 nt, Human
aaugauucacagugacaaacuuuuaauaacuu

SEQ ID NO: 29823 - RNA, 20 nt, Human
aaugauuccaaaacccaggg

SEQ ID NO: 29824 - RNA, 32 nt, Human
aaugauucccacucuguucucugccuugucuc

SEQ ID NO: 29825 - RNA, 32 nt, Human
aaugauucuaccucuggggauaaggauucaca

SEQ ID NO: 29826 - RNA, 31 nt, Human
aaugauugacuucugucacugccauaguuac

SEQ ID NO: 29827 - RNA, 32 nt, Human
aaugauugaggagagaaaaggaucagauugcu

SEQ ID NO: 29828 - RNA, 32 nt, Human
aaugauugauaaccucucugccagcaaucauu

SEQ ID NO: 29829 - RNA, 32 nt, Human
aaugauugaugggcaaaaauguacaacacagu

SEQ ID NO: 29830 - RNA, 32 nt, Human
aaugauugcuuuuaauguuugcacugauuuag

SEQ ID NO: 29831 - RNA, 32 nt, Human
aaugauuggggugaagacaucccuggagugaa

SEQ ID NO: 29832 - RNA, 32 nt, Human
aaugauuggucagaugucuuugagaaguguua

SEQ ID NO: 29833 - RNA, 32 nt, Human
aaugauugugugcaugaauuugggagauugua

SEQ ID NO: 29834 - RNA, 32 nt, Human
aaugauuguucaccaagcagcaugcuguacau

SEQ ID NO: 29835 - RNA, 32 nt, Human
aaugauuuacagacugaugccagacaaaccuu

SEQ ID NO: 29836 - RNA, 32 nt, Human
aaugauuuauccaauuagaaaaggacaagaua

SEQ ID NO: 29837 - RNA, 32 nt, Human
aaugauuucaacaaugcauuaaaagaaugugc

SEQ ID NO: 29838 - RNA, 32 nt, Human
aaugauuucuaugccuuuaucuuucaaauuuu

SEQ ID NO: 29839 - RNA, 32 nt, Human
aaugauuugggaacuuuugguugccugcaguu

SEQ ID NO: 29840 - RNA, 31 nt, Human
aaugauuugucagagaaccuguugaaaugug

SEQ ID NO: 29841 - RNA, 32 nt, Human
aaugauuugugcuugagugaacaaaagaagac

SEQ ID NO: 29842 - RNA, 32 nt, Human
aaugauuuuugcuauuucuaguagaaagaaaa

SEQ ID NO: 29843 - RNA, 32 nt, Human
aaugcaaaacacaagaacaggaaagugaaugc

SEQ ID NO: 29844 - RNA, 32 nt, Human
aaugcaaaagaccauagaauuuguauuucuuu

SEQ ID NO: 29845 - RNA, 32 nt, Human
aaugcaaacacccugaggauucagagaacaau

SEQ ID NO: 29846 - RNA, 32 nt, Human
aaugcaaacuaguucagccacuguggagagaa

SEQ ID NO: 29847 - RNA, 32 nt, Human
aaugcaaagauguccacacuguuuuaaacuug

SEQ ID NO: 29848 - RNA, 32 nt, Human
aaugcaaaggaaaaguucuggaaggaaauuaa

SEQ ID NO: 29849 - RNA, 32 nt, Human
aaugcaaaugcacauaauucagagcaguaacc

SEQ ID NO: 29850 - RNA, 32 nt, Human
aaugcaacaucaccaacagauccuguuauuuc

SEQ ID NO: 29851 - RNA, 32 nt, Human
aaugcaaccucacaaccuuggcugagucuuga

SEQ ID NO: 29852 - RNA, 32 nt, Human
aaugcaacgugaggccaacugaacaauucccc

SEQ ID NO: 29853 - RNA, 32 nt, Human
aaugcaaggccuuggcuuugucuugcagggau

SEQ ID NO: 29854 - RNA, 32 nt, Human
aaugcaagucagaaaguacaagacuuagugau

SEQ ID NO: 29855 - RNA, 32 nt, Human
aaugcaagucucaaacagcuuagaugggaggc

SEQ ID NO: 29856 - RNA, 32 nt, Human
aaugcaaugaacacaagugguugcugagucuc

SEQ ID NO: 29857 - RNA, 32 nt, Human
aaugcaauuuuagacagacucuagucaagccc

SEQ ID NO: 29858 - RNA, 32 nt, Human
aaugcacaaaaugguggagcugaagaggggga

SEQ ID NO: 29859 - RNA, 32 nt, Human
aaugcacaaggugucucaucugaaaagaaacc

SEQ ID NO: 29860 - RNA, 32 nt, Human
aaugcacacaccugcuguugcuuuugauuucu

SEQ ID NO: 29861 - RNA, 32 nt, Human
aaugcacacacgugcacuggagcagcugccua

SEQ ID NO: 29862 - RNA, 32 nt, Human
aaugcacacaugcacacacgcacacacaugca

SEQ ID NO: 29863 - RNA, 23 nt, Human
aaugcacagagguuuuugaaaaa

SEQ ID NO: 29864 - RNA, 32 nt, Human
aaugcacagggcugcaacaccacgacuucugc

SEQ ID NO: 29865 - RNA, 32 nt, Human
aaugcacauauagacacacauaugccaauauc

SEQ ID NO: 29866 - RNA, 32 nt, Human
aaugcacaugaagaaacagguuuccagacgug

SEQ ID NO: 29867 - RNA, 32 nt, Human
aaugcaccacugcacuccagcaugggcaacac

SEQ ID NO: 29868 - RNA, 32 nt, Human
aaugcaccacugcaguccagccuaggcaacag

SEQ ID NO: 29869 - RNA, 32 nt, Human
aaugcaccagugcuauggaagaccaauggagu

SEQ ID NO: 29870 - RNA, 32 nt, Human
aaugcaccccugggaagcagcccgcuguccgg

SEQ ID NO: 29871 - RNA, 32 nt, Human
aaugcaccucaaggaauuagaguagcaugaac

SEQ ID NO: 29872 - RNA, 32 nt, Human
aaugcaccucauucuucccuggccucuuuccc

SEQ ID NO: 29873 - RNA, 32 nt, Human
aaugcacgucacaaccucucugagcuucguuu

SEQ ID NO: 29874 - RNA, 32 nt, Human
aaugcacuauuauguauugauucuccaugaga

SEQ ID NO: 29875 - RNA, 32 nt, Human
aaugcacucaagugcauccaccaggaauagaa

SEQ ID NO: 29876 - RNA, 32 nt, Human
aaugcacuccucccucuccuuccuuuguuuaa

SEQ ID NO: 29877 - RNA, 32 nt, Human
aaugcacugacuuucaaaaacugagguggggu

SEQ ID NO: 29878 - RNA, 32 nt, Human
aaugcacuugagcagcggucuccaaccacagg

SEQ ID NO: 29879 - RNA, 20 nt, Human
aaugcagaacugacaggagg

SEQ ID NO: 29880 - RNA, 21 nt, Human
aaugcagaaggagacaggagg

SEQ ID NO: 29881 - RNA, 32 nt, Human
aaugcagaauugcagaguguagaaugguacug

SEQ ID NO: 29882 - RNA, 32 nt, Human
aaugcagacaacaccuuccuccugcagacacu

SEQ ID NO: 29883 - RNA, 22 nt, Human
aaugcagacacgagaaggaggg

SEQ ID NO: 29884 - RNA, 20 nt, Human
aaugcagacauaagaagcag

SEQ ID NO: 29885 - RNA, 26 nt, Human
aaugcagaccuccagcucuagaucug

SEQ ID NO: 29886 - RNA, 32 nt, Human
aaugcagacucugccauguccuagugugauuc

SEQ ID NO: 29887 - RNA, 31 nt, Human
aaugcagacuuuguuacuugccaaagaagau

SEQ ID NO: 29888 - RNA, 24 nt, Human
aaugcagagcuuagaaagggaggg

SEQ ID NO: 29889 - RNA, 22 nt, Human
aaugcagagggcugagagaggg

SEQ ID NO: 29890 - RNA, 32 nt, Human
aaugcagaugcuuggacucuucucccaaaucu

SEQ ID NO: 29891 - RNA, 32 nt, Human
aaugcagauguggcauuuaggggagaaucagc

SEQ ID NO: 29892 - RNA, 32 nt, Human
aaugcagauucuuggccccaccccagaccucc

SEQ ID NO: 29893 - RNA, 32 nt, Human
aaugcagcaagggucuggaggcugaggaccag

SEQ ID NO: 29894 - RNA, 26 nt, Human
aaugcagcaauguugacuuuguuuca

SEQ ID NO: 29895 - RNA, 32 nt, Human
aaugcagcagauacucuuccugccagugguaa

SEQ ID NO: 29896 - RNA, 32 nt, Human
aaugcagcaguacugccuucaggccuggacag

SEQ ID NO: 29897 - RNA, 32 nt, Human
aaugcagcccaggcagaggacggugcagccaa

SEQ ID NO: 29898 - RNA, 32 nt, Human
aaugcagcccggucacaugcgcugcggcggug

SEQ ID NO: 29899 - RNA, 32 nt, Human
aaugcagcccucuccacccuccggccagcgag

SEQ ID NO: 29900 - RNA, 32 nt, Human
aaugcagcgguguggaccgaggaacaacuugg

SEQ ID NO: 29901 - RNA, 32 nt, Human
aaugcagcuuugccaguggcauaucugucauc

SEQ ID NO: 29902 - RNA, 32 nt, Human
aaugcagcuuuuccaggguugcuggacugggg

SEQ ID NO: 29903 - RNA, 32 nt, Human
aaugcaggagaggcacagagugcacugucauu

SEQ ID NO: 29904 - RNA, 32 nt, Human
aaugcaggaucacguuagccaauggugacugg

SEQ ID NO: 29905 - RNA, 32 nt, Human
aaugcaggcuacccauucuccccaucagcugc

SEQ ID NO: 29906 - RNA, 32 nt, Human
aaugcaggcuuugacagauggaccucugaaca

SEQ ID NO: 29907 - RNA, 32 nt, Human
aaugcagguaugcacauauacaugcucuuaau

SEQ ID NO: 29908 - RNA, 32 nt, Human
aaugcaguaagccgcaagaaugacuucugcaa

SEQ ID NO: 29909 - RNA, 26 nt, Human
aaugcaguaucccauguaccuucuga

SEQ ID NO: 29910 - RNA, 32 nt, Human
aaugcagucacuucuagaaagcauuuguaauu

SEQ ID NO: 29911 - RNA, 32 nt, Human
aaugcagucaucacccucccgccauucaaugu

SEQ ID NO: 29912 - RNA, 32 nt, Human
aaugcagucauuuugacccucccaagcaauuu

SEQ ID NO: 29913 - RNA, 23 nt, Human
aaugcagucgggagaagggaggg

SEQ ID NO: 29914 - RNA, 32 nt, Human
aaugcagugagcuuguaauugcaccacugcac

SEQ ID NO: 29915 - RNA, 32 nt, Human
aaugcagugcugggaccuuccucuuuuggagc

SEQ ID NO: 29916 - RNA, 32 nt, Human
aaugcagugguaagugaaaacauucauucacu

SEQ ID NO: 29917 - RNA, 20 nt, Human
aaugcaguguaguaugcaga

SEQ ID NO: 29918 - RNA, 32 nt, Human
aaugcaguugaaaagaguuucugcaagauaau

SEQ ID NO: 29919 - RNA, 32 nt, Human
aaugcaguuguucugauaagaaucccaguucc

SEQ ID NO: 29920 - RNA, 21 nt, Human
aaugcaguuuauuuauguaaa

SEQ ID NO: 29921 - RNA, 32 nt, Human
aaugcaguuuuuaaaaaccuguaucugaccca

SEQ ID NO: 29922 - RNA, 32 nt, Human
aaugcauacaaggaguccugagguggugauuu

SEQ ID NO: 29923 - RNA, 21 nt, Human
aaugcauaccgaagagaaacc

SEQ ID NO: 29924 - RNA, 18 nt, Human
aaugcauacuagugggcc

SEQ ID NO: 29925 - RNA, 19 nt, Human
aaugcauacugccuaggcc

SEQ ID NO: 29926 - RNA, 32 nt, Human
aaugcauauauucacauucacagaaacauugg

SEQ ID NO: 29927 - RNA, 32 nt, Human
aaugcauauccaacaugugcucagggaauaau

SEQ ID NO: 29928 - RNA, 18 nt, Human
aaugcauauguauguaaa

SEQ ID NO: 29929 - RNA, 32 nt, Human
aaugcaucaggaauuccagggaagaaacucug

SEQ ID NO: 29930 - RNA, 32 nt, Human
aaugcaucauugcacuccagccugggugacag

SEQ ID NO: 29931 - RNA, 32 nt, Human
aaugcauccacugaugaacaugcaaacuuugg

SEQ ID NO: 29932 - RNA, 32 nt, Human
aaugcauccugagcccacagcuuugaccacug

SEQ ID NO: 29933 - RNA, 18 nt, Human
aaugcaugaguuaucaaa

SEQ ID NO: 29934 - RNA, 32 nt, Human
aaugcaugcagggcuuaauaucuaggugaugg

SEQ ID NO: 29935 - RNA, 32 nt, Human
aaugcaugccgggcuuaauaccuaggugaagg

SEQ ID NO: 29936 - RNA, 19 nt, Human
aaugcaugcuuuuguagca

SEQ ID NO: 29937 - RNA, 32 nt, Human
aaugcauggggugggacagguaggaguggcuc

SEQ ID NO: 29938 - RNA, 18 nt, Human
aaugcauguauuuguaaa

SEQ ID NO: 29939 - RNA, 32 nt, Human
aaugcaugucacacuaauauguaguggccuuu

SEQ ID NO: 29940 - RNA, 32 nt, Human
aaugcaugugggguuuaauaccuaggugaugg

SEQ ID NO: 29941 - RNA, 18 nt, Human
aaugcauguuuuacagua

SEQ ID NO: 29942 - RNA, 19 nt, Human
aaugcauguuuuaugcaaa

SEQ ID NO: 29943 - RNA, 32 nt, Human
aaugcauuaaguugaagucgacugccaaagag

SEQ ID NO: 29944 - RNA, 32 nt, Human
aaugcauuacuuuuauuucaaacccucugccu

SEQ ID NO: 29945 - RNA, 32 nt, Human
aaugcauucccugaaucugugccugcacugag

SEQ ID NO: 29946 - RNA, 32 nt, Human
aaugcauuguauucagaaaaccugugucacau

SEQ ID NO: 29947 - RNA, 32 nt, Human
aaugcauuguuugguuucuuuuaccaaauuaa

SEQ ID NO: 29948 - RNA, 18 nt, Human
aaugcauuuagagaagcc

SEQ ID NO: 29949 - RNA, 32 nt, Human
aaugcauuuccagaguggccaugccuagaggg

SEQ ID NO: 29950 - RNA, 21 nt, Human
aaugcauuucugauaugcaaa

SEQ ID NO: 29951 - RNA, 32 nt, Human
aaugcauuuuccccucuccuccucccugcuac

SEQ ID NO: 29952 - RNA, 32 nt, Human
aaugcauuuuucaaaugcaauggcaacugcuu

SEQ ID NO: 29953 - RNA, 32 nt, Human
aaugccaacuggagaaagggaagaaggacaua

SEQ ID NO: 29954 - RNA, 32 nt, Human
aaugccaacuguuuaucccugcucugaacagg

SEQ ID NO: 29955 - RNA, 32 nt, Human
aaugccaagaagcagccgccaguugggaucaa

SEQ ID NO: 29956 - RNA, 32 nt, Human
aaugccaagauugacagguuggccguuugcuu

SEQ ID NO: 29957 - RNA, 32 nt, Human
aaugccaauauggucuuguaacuuuccuguac

SEQ ID NO: 29958 - RNA, 20 nt, Human
aaugccaaucuuccauauua

SEQ ID NO: 29959 - RNA, 17 nt, Human
aaugccaauugcagauu

SEQ ID NO: 29960 - RNA, 20 nt, Human
aaugccaauugcccagauug

SEQ ID NO: 29961 - RNA, 32 nt, Human
aaugccacaaaguuguggaauuuuugugauua

SEQ ID NO: 29962 - RNA, 32 nt, Human
aaugccacagaaugugcaggaagccugggagg

SEQ ID NO: 29963 - RNA, 32 nt, Human
aaugccacagcccagaauucugggcaagucac

SEQ ID NO: 29964 - RNA, 32 nt, Human
aaugccaccggccccauggacaacagccuggc

SEQ ID NO: 29965 - RNA, 32 nt, Human
aaugccaccuaaucccugccuggcuucaagcc

SEQ ID NO: 29966 - RNA, 32 nt, Human
aaugccaccucaguuuguuucuuucuguuccc

SEQ ID NO: 29967 - RNA, 32 nt, Human
aaugccacucauuccuuuuucugaggagcaaa

SEQ ID NO: 29968 - RNA, 32 nt, Human
aaugccacugcacuacagccugggcgacaaag

SEQ ID NO: 29969 - RNA, 32 nt, Human
aaugccacugcacuccagccugccuggaugac

SEQ ID NO: 29970 - RNA, 32 nt, Human
aaugccacugcucucuguccccugugcuccgu

SEQ ID NO: 29971 - RNA, 32 nt, Human
aaugccacugucaaucccggcacuuugggagg

SEQ ID NO: 29972 - RNA, 32 nt, Human
aaugccagaaagaugaucccuaaaaauguuga

SEQ ID NO: 29973 - RNA, 32 nt, Human
aaugccagaauguaagauucauucagugugcu

SEQ ID NO: 29974 - RNA, 32 nt, Human
aaugccagaguucacaaaaauagcugaucuuc

SEQ ID NO: 29975 - RNA, 32 nt, Human
aaugccagcacuucgggagaccaaggugggcg

SEQ ID NO: 29976 - RNA, 32 nt, Human
aaugccagcagcaauaaaagaaaagagugcac

SEQ ID NO: 29977 - RNA, 32 nt, Human
aaugccagcauuucaugggggcugaggcagaa

SEQ ID NO: 29978 - RNA, 26 nt, Human
aaugccagccacacuccucagagccg

SEQ ID NO: 29979 - RNA, 31 nt, Human
aaugccagccucucuugucccugguuuccuu

SEQ ID NO: 29980 - RNA, 32 nt, Human
aaugccagccuggggcucucagcaggaggacc

SEQ ID NO: 29981 - RNA, 32 nt, Human
aaugccagcuacucaggaggcugaggcaugag

SEQ ID NO: 29982 - RNA, 32 nt, Human
aaugccagcuacucgggaggcugaggcacgag

SEQ ID NO: 29983 - RNA, 32 nt, Human
aaugccagcuacucgggaggcugaggcaggaa

SEQ ID NO: 29984 - RNA, 32 nt, Human
aaugccagcuacuugggaaggcugaggcagga

SEQ ID NO: 29985 - RNA, 32 nt, Human
aaugccagcuacuugggaggcuaaagugggag

SEQ ID NO: 29986 - RNA, 32 nt, Human
aaugccagcuacuugggaggcugaggcaggag

SEQ ID NO: 29987 - RNA, 32 nt, Human
aaugccagcugcaccagggcucagugagcugg

SEQ ID NO: 29988 - RNA, 32 nt, Human
aaugccagcuuuguacaggucuuuucuauuuu

SEQ ID NO: 29989 - RNA, 32 nt, Human
aaugccagcuuuuccguucccugaugaaaaga

SEQ ID NO: 29990 - RNA, 32 nt, Human
aaugccaggaaaauaucuacagaaggaaagaa

SEQ ID NO: 29991 - RNA, 32 nt, Human
aaugccaggagaagaaccaagagguggaacca

SEQ ID NO: 29992 - RNA, 32 nt, Human
aaugccaggaucguggcucacagggacccacc

SEQ ID NO: 29993 - RNA, 32 nt, Human
aaugccaggcccaagggacaaaaagaacagag

SEQ ID NO: 29994 - RNA, 32 nt, Human
aaugccaguacaacagccacaaggggucuucc

SEQ ID NO: 29995 - RNA, 32 nt, Human
aaugccagugcugcucagcccucagcagaacu

SEQ ID NO: 29996 - RNA, 32 nt, Human
aaugccaguguuacuccagcaggcaaccaaga

SEQ ID NO: 29997 - RNA, 32 nt, Human
aaugccauaacccuuuuuaaaucauccaucug

SEQ ID NO: 29998 - RNA, 21 nt, Human
aaugccaugcauuaggcuuug

SEQ ID NO: 29999 - RNA, 32 nt, Human
aaugccauggccgggugcaguggcucacgccu

SEQ ID NO: 30000 - RNA, 21 nt, Human
aaugccauuacccccagauug

SEQ ID NO: 30001 - RNA, 32 nt, Human
aaugcccaagaaggaagggauuguagaaauag

SEQ ID NO: 30002 - RNA, 32 nt, Human
aaugcccaagggacacucauugcugaaagcaa

SEQ ID NO: 30003 - RNA, 21 nt, Human
aaugcccaccuuggggcucug

SEQ ID NO: 30004 - RNA, 32 nt, Human
aaugcccacuggcuggcggcugucaguuaccg

SEQ ID NO: 30005 - RNA, 32 nt, Human
aaugcccaggaaauugacuuugcagugucacc

SEQ ID NO: 30006 - RNA, 32 nt, Human
aaugccccacugcacuccagccugggcgacag

SEQ ID NO: 30007 - RNA, 32 nt, Human
aaugccccagcugaugcuuucagcugggaaua

SEQ ID NO: 30008 - RNA, 32 nt, Human
aaugccccaggacaggcccacccaugggacca

SEQ ID NO: 30009 - RNA, 32 nt, Human
aaugccccauggggcucucuuguguacuuauu

SEQ ID NO: 30010 - RNA, 32 nt, Human
aaugcccccaaaauaugcagaccuuugggaau

SEQ ID NO: 30011 - RNA, 32 nt, Human
aaugcccccgaaggguggaaggcauugcuuuu

SEQ ID NO: 30012 - RNA, 32 nt, Human
aaugcccccucagaccagccgaggacugugcc

SEQ ID NO: 30013 - RNA, 32 nt, Human
aaugccccucccaacuucccauucauagaauc

SEQ ID NO: 30014 - RNA, 32 nt, Human
aaugccccucccccagcugcugccuucauauu

SEQ ID NO: 30015 - RNA, 32 nt, Human
aaugcccguauuaggaggauuacuugagcccu

SEQ ID NO: 30016 - RNA, 32 nt, Human
aaugcccucagcuaaaaggaaaacaaggugac

SEQ ID NO: 30017 - RNA, 32 nt, Human
aaugcccucaguggccacaucaugcccacucc

SEQ ID NO: 30018 - RNA, 32 nt, Human
aaugcccuccugucugugucguucucugugcc

SEQ ID NO: 30019 - RNA, 32 nt, Human
aaugcccugccugccugccugccaggccaagg

SEQ ID NO: 30020 - RNA, 32 nt, Human
aaugcccugcugcugcucaucucccuuuauuc

SEQ ID NO: 30021 - RNA, 32 nt, Human
aaugcccugggcaaccuguaacucacagcccu

SEQ ID NO: 30022 - RNA, 32 nt, Human
aaugcccugugcaugccauggucccuagacac

SEQ ID NO: 30023 - RNA, 32 nt, Human
aaugcccuuagguaagguaaaauaggaauaaa

SEQ ID NO: 30024 - RNA, 32 nt, Human
aaugcccuuccagugggaccccaaaccccaca

SEQ ID NO: 30025 - RNA, 32 nt, Human
aaugccgaagacugcauuucaacuucaagaau

SEQ ID NO: 30026 - RNA, 23 nt, Human
aaugccgccgccgccgccgccgc

SEQ ID NO: 30027 - RNA, 32 nt, Human
aaugccggacuggcccacuaaguuccugcuuc

SEQ ID NO: 30028 - RNA, 32 nt, Human
aaugccgggaggcugaggcgggagaaucgcuu

SEQ ID NO: 30029 - RNA, 32 nt, Human
aaugccgggauuacaggcaugagccaccgcuc

SEQ ID NO: 30030 - RNA, 32 nt, Human
aaugccuacccacucauauaacauaccucagg

SEQ ID NO: 30031 - RNA, 32 nt, Human
aaugccucaauucacauagauuucuucucuuu

SEQ ID NO: 30032 - RNA, 32 nt, Human
aaugccuccaaacucaagccuggguggguuuu

SEQ ID NO: 30033 - RNA, 32 nt, Human
aaugccuccugcucccccuccaugggcuguac

SEQ ID NO: 30034 - RNA, 32 nt, Human
aaugccuccugcugccccagccuuagagagcu

SEQ ID NO: 30035 - RNA, 32 nt, Human
aaugccuccuuugcuaggaaagggagcuuaau

SEQ ID NO: 30036 - RNA, 32 nt, Human
aaugccucuccacguugcauaugucacacuuu

SEQ ID NO: 30037 - RNA, 32 nt, Human
aaugccucuccucuauugauucaguuguuauu

SEQ ID NO: 30038 - RNA, 22 nt, Human
aaugccucugaagaggaagccu

SEQ ID NO: 30039 - RNA, 32 nt, Human
aaugccugagccugaaccuuaauguggggccu

SEQ ID NO: 30040 - RNA, 32 nt, Human
aaugccuggacucuccccuggcugguaucaaa

SEQ ID NO: 30041 - RNA, 32 nt, Human
aaugccuggagcugcuggucccugagagaaag

SEQ ID NO: 30042 - RNA, 32 nt, Human
aaugccuggauguuaaggauuccaauuuaacu

SEQ ID NO: 30043 - RNA, 32 nt, Human
aaugccuguccugccucuggccuguguccugg

SEQ ID NO: 30044 - RNA, 32 nt, Human
aaugccuguggucccagcuacaugggaggcug

SEQ ID NO: 30045 - RNA, 32 nt, Human
aaugccuuagacuauuugcuucccacugauag

SEQ ID NO: 30046 - RNA, 21 nt, Human
aaugccuuagagagaggaggg

SEQ ID NO: 30047 - RNA, 32 nt, Human
aaugccuuccacugcuccuuuaugacugcacu

SEQ ID NO: 30048 - RNA, 32 nt, Human
aaugccuucccugggaggaagggugcuuuccc

SEQ ID NO: 30049 - RNA, 32 nt, Human
aaugccuucucggggguggccacguacaccga

SEQ ID NO: 30050 - RNA, 32 nt, Human
aaugccuucuggaaggcggaauaugugggaac

SEQ ID NO: 30051 - RNA, 32 nt, Human
aaugccuucuguaguuucagaucaguagggag

SEQ ID NO: 30052 - RNA, 32 nt, Human
aaugccuugcaggagguagaggcuggacccau

SEQ ID NO: 30053 - RNA, 32 nt, Human
aaugccuuucaucuugaaguuacacauaacuu

SEQ ID NO: 30054 - RNA, 32 nt, Human
aaugccuuucugcaaagaagguuuccagagau

SEQ ID NO: 30055 - RNA, 32 nt, Human
aaugccuuuguuggcaccucagauuaaucaua

SEQ ID NO: 30056 - RNA, 32 nt, Human
aaugccuuuucucaccugucaucucacauuuu

SEQ ID NO: 30057 - RNA, 32 nt, Human
aaugcgacggagugugcauuacauuuggaaaa

SEQ ID NO: 30058 - RNA, 20 nt, Human
aaugcgagagaggagaaggg

SEQ ID NO: 30059 - RNA, 32 nt, Human
aaugcgagggccugggaugaauuuggugccuu

SEQ ID NO: 30060 - RNA, 32 nt, Human
aaugcgaguggauaaggcaagaugcauuugga

SEQ ID NO: 30061 - RNA, 32 nt, Human
aaugcgauacaaguaccccucacuuuggagag

SEQ ID NO: 30062 - RNA, 21 nt, Human
aaugcgauggacuugugcaaa

SEQ ID NO: 30063 - RNA, 31 nt, Human
aaugcgauggagugugcauuacauuuggaaa

SEQ ID NO: 30064 - RNA, 32 nt, Human
aaugcgccaagaugggcacaugcuugcuucag

SEQ ID NO: 30065 - RNA, 32 nt, Human
aaugcgccgucaccaucuccaccucccaccaa

SEQ ID NO: 30066 - RNA, 32 nt, Human
aaugcggaggcugggcacgguggcucaugccu

SEQ ID NO: 30067 - RNA, 32 nt, Human
aaugcggagugaaagagcaggagccagacaca

SEQ ID NO: 30068 - RNA, 32 nt, Human
aaugcggaugcccaacuguuuuuaaggaagcc

SEQ ID NO: 30069 - RNA, 32 nt, Human
aaugcggcacugacgggcaagugcuucugcaa

SEQ ID NO: 30070 - RNA, 32 nt, Human
aaugcggcucucugacccucucugugcccucc

SEQ ID NO: 30071 - RNA, 32 nt, Human
aaugcgggaacuccaggagcaugugaaaaggg

SEQ ID NO: 30072 - RNA, 32 nt, Human
aaugcggguaauauuuuuccucauguuuuaaa

SEQ ID NO: 30073 - RNA, 32 nt, Human
aaugcggucauuggagucgggggcuggaacau

SEQ ID NO: 30074 - RNA, 21 nt, Human
aaugcguagauagaagaagcc

SEQ ID NO: 30075 - RNA, 19 nt, Human
aaugcgugaaacccagggg

SEQ ID NO: 30076 - RNA, 32 nt, Human
aaugcgugagccaccaugcccggccgcuauug

SEQ ID NO: 30077 - RNA, 32 nt, Human
aaugcguguacaccuugugauauuauuaguaa

SEQ ID NO: 30078 - RNA, 32 nt, Human
aaugcguguggacagucaggaacacuuucagg

SEQ ID NO: 30079 - RNA, 32 nt, Human
aaugcguuaucacaggcagccuuuauccugau

SEQ ID NO: 30080 - RNA, 32 nt, Human
aaugcguucuuccuccaucuuugccuagucca

SEQ ID NO: 30081 - RNA, 32 nt, Human
aaugcuaaguuuuauuaaucuggucaucuuau

SEQ ID NO: 30082 - RNA, 23 nt, Human
aaugcuacacguguagguugcug

SEQ ID NO: 30083 - RNA, 32 nt, Human
aaugcuacagcggugugaaacagcagagcaaa

SEQ ID NO: 30084 - RNA, 32 nt, Human
aaugcuacaugauggccagcugcuucccuccu

SEQ ID NO: 30085 - RNA, 32 nt, Human
aaugcuaccauuucuuccucuggcucaaaauu

SEQ ID NO: 30086 - RNA, 32 nt, Human
aaugcuacccuuugaucauuuccuggccacca

SEQ ID NO: 30087 - RNA, 24 nt, Human
aaugcuacucuuuugugguuuacg

SEQ ID NO: 30088 - RNA, 32 nt, Human
aaugcuaggaggcagaaggggcagagaguaaa

SEQ ID NO: 30089 - RNA, 32 nt, Human
aaugcuaggccucuguugcauggcuguacaaa

SEQ ID NO: 30090 - RNA, 32 nt, Human
aaugcuaggcuggaaaguggugccuguugucc

SEQ ID NO: 30091 - RNA, 32 nt, Human
aaugcuaguuccagcuaaaaacaaguacuuuu

SEQ ID NO: 30092 - RNA, 21 nt, Human
aaugcuauacuggauacucug

SEQ ID NO: 30093 - RNA, 32 nt, Human
aaugcuauacuggauacucugcuccggaaaga

SEQ ID NO: 30094 - RNA, 19 nt, Human
aaugcuauacuguccugcu

SEQ ID NO: 30095 - RNA, 32 nt, Human
aaugcuaucuugugguuuugauuugcauuccc

SEQ ID NO: 30096 - RNA, 23 nt, Human
aaugcuauuucuaguuucucaga

SEQ ID NO: 30097 - RNA, 32 nt, Human
aaugcucaagagccuuaucauuuggcaaacaa

SEQ ID NO: 30098 - RNA, 32 nt, Human
aaugcucaauuucuacuucuucauuacaauuc

SEQ ID NO: 30099 - RNA, 32 nt, Human
aaugcucacaaaccuuggggcugccaucccca

SEQ ID NO: 30100 - RNA, 23 nt, Human
aaugcucauaccggagagaaacc

SEQ ID NO: 30101 - RNA, 32 nt, Human
aaugcuccuagaguauauuccucugcugaaca

SEQ ID NO: 30102 - RNA, 32 nt, Human
aaugcuccuccagggagucucagcuucacccu

SEQ ID NO: 30103 - RNA, 32 nt, Human
acaaagcuguaaaccagcuaugaaucagaaug

SEQ ID NO: 30104 - RNA, 32 nt, Human
acaaagcugugggagccaagaauaagacagaa

SEQ ID NO: 30105 - RNA, 19 nt, Human
acaaagcuuggaagagccu

SEQ ID NO: 30106 - RNA, 32 nt, Human
acaaagcuuguccuugaacccaauucuguuug

SEQ ID NO: 30107 - RNA, 32 nt, Human
acaaagcuugugccuugacuggacccguagcc

SEQ ID NO: 30108 - RNA, 32 nt, Human
acaaagcuuuccgugugaaaucaaaccuugaa

SEQ ID NO: 30109 - RNA, 32 nt, Human
acaaagcuuugccugccacuucugccuccaga

SEQ ID NO: 30110 - RNA, 32 nt, Human
acaaagcuuuucccaucuccagucucaguuuc

SEQ ID NO: 30111 - RNA, 32 nt, Human
acaaaggaaugagugaaugaguaaggagugaa

SEQ ID NO: 30112 - RNA, 32 nt, Human
acaaaggaauguuucacuaaauaaaagaaaac

SEQ ID NO: 30113 - RNA, 32 nt, Human
acaaaggacauggcacuuugugcugcuggcac

SEQ ID NO: 30114 - RNA, 32 nt, Human
acaaaggaccuagacagcccaccaagucacuu

SEQ ID NO: 30115 - RNA, 32 nt, Human
acaaaggagaaaaggaagugauuggagaauua

SEQ ID NO: 30116 - RNA, 32 nt, Human
acaaaggagagaaaggagggaaaagccagucu

SEQ ID NO: 30117 - RNA, 22 nt, Human
acaaaggagcccuuugcuccug

SEQ ID NO: 30118 - RNA, 32 nt, Human
acaaaggaggugggagacugcguuggugccgc

SEQ ID NO: 30119 - RNA, 32 nt, Human
acaaaggauccaggucucccgacgggagguua

SEQ ID NO: 30120 - RNA, 32 nt, Human
acaaaggaugguauuuaaaaauguagaacaca

SEQ ID NO: 30121 - RNA, 32 nt, Human
acaaaggcaaaggcuucauuucaagagucauc

SEQ ID NO: 30122 - RNA, 32 nt, Human
acaaaggcaaggagagcuggaguuggcuccau

SEQ ID NO: 30123 - RNA, 32 nt, Human
acaaaggcauugaaagacacacacccaggcaa

SEQ ID NO: 30124 - RNA, 32 nt, Human
acaaaggccaugggaaaaauucagagaguuag

SEQ ID NO: 30125 - RNA, 32 nt, Human
acaaaggccggcugcccccaaaggucucaacu

SEQ ID NO: 30126 - RNA, 32 nt, Human
acaaaggccucgaccuguugcgcugggccguc

SEQ ID NO: 30127 - RNA, 32 nt, Human
acaaaggcugagaagcagccacaccguuguuu

SEQ ID NO: 30128 - RNA, 32 nt, Human
acaaaggcugggugagccccugcugggcacgg

SEQ ID NO: 30129 - RNA, 32 nt, Human
acaaagggaggaggaagaagggagcggggucg

SEQ ID NO: 30130 - RNA, 32 nt, Human
acaaagggaucucuugcaugugcucaugggug

SEQ ID NO: 30131 - RNA, 32 nt, Human
acaaagggcagcuugaaaggggauguggagca

SEQ ID NO: 30132 - RNA, 32 nt, Human
acaaagggcccuguuucucagcaugagcuuca

SEQ ID NO: 30133 - RNA, 21 nt, Human
acaaaggggagagccaagcug

SEQ ID NO: 30134 - RNA, 32 nt, Human
acaaaggggauuuggugauggaggcuuuguua

SEQ ID NO: 30135 - RNA, 32 nt, Human
acaaaggggugaaagagagggaauaguuucuc

SEQ ID NO: 30136 - RNA, 32 nt, Human
acaaagggguggucacccugcccucaccuuga

SEQ ID NO: 30137 - RNA, 32 nt, Human
acaaaggucccucccucccucugacucuuugc

SEQ ID NO: 30138 - RNA, 32 nt, Human
acaaaggugacgggugguguagguacacaccc

SEQ ID NO: 30139 - RNA, 32 nt, Human
acaaaggugcagcuuuggccacuaucugccac

SEQ ID NO: 30140 - RNA, 31 nt, Human
acaaagguggaccugagaucacuggagccaa

SEQ ID NO: 30141 - RNA, 32 nt, Human
acaaagguuaaaaagaccaaaucaagcugagg

SEQ ID NO: 30142 - RNA, 32 nt, Human
acaaagguuugacugaaacuguggcagauguc

SEQ ID NO: 30143 - RNA, 20 nt, Human
acaaaguaaaagugagcagg

SEQ ID NO: 30144 - RNA, 32 nt, Human
acaaaguaagagggaaaggaaaagagguauca

SEQ ID NO: 30145 - RNA, 17 nt, Human
acaaaguacugagacaa

SEQ ID NO: 30146 - RNA, 32 nt, Human
acaaaguagcagaaauaggaugauguuuguga

SEQ ID NO: 30147 - RNA, 32 nt, Human
acaaagucaagucaauaugucauuucaauuuu

SEQ ID NO: 30148 - RNA, 32 nt, Human
acaaagucaccucacagcaucuugcuccacuc

SEQ ID NO: 30149 - RNA, 32 nt, Human
acaaagucagaguggcugggccaaguguccug

SEQ ID NO: 30150 - RNA, 32 nt, Human
acaaagucaggaguucaagaccagccgggcca

SEQ ID NO: 30151 - RNA, 32 nt, Human
acaaagucaggaguucaagaccagccuggcca

SEQ ID NO: 30152 - RNA, 32 nt, Human
acaaagucaggaguucgagaccagccuggcca

SEQ ID NO: 30153 - RNA, 32 nt, Human
acaaagucauaguaaaggucaggaguucaaga

SEQ ID NO: 30154 - RNA, 32 nt, Human
acaaagucccuccagcuuaucucccacaacaa

SEQ ID NO: 30155 - RNA, 32 nt, Human
acaaaguccuccucacagugccuggugugugg

SEQ ID NO: 30156 - RNA, 32 nt, Human
acaaagucgggagaucaagaccauccuggcua

SEQ ID NO: 30157 - RNA, 32 nt, Human
acaaagucucuuccucauucccguugaguucu

SEQ ID NO: 30158 - RNA, 32 nt, Human
acaaagucuuguguggucugggccacauccug

SEQ ID NO: 30159 - RNA, 32 nt, Human
acaaagugaaucagagaagagcagagggagug

SEQ ID NO: 30160 - RNA, 32 nt, Human
acaaagugacccuggagcguggaaaagcagac

SEQ ID NO: 30161 - RNA, 32 nt, Human
acaaagugagaguuacugccacucuguucuua

SEQ ID NO: 30162 - RNA, 32 nt, Human
acaaagugcugguccuuacaucaugccgagcc

SEQ ID NO: 30163 - RNA, 32 nt, Human
acaaagugggcggaucaccugaggucaggagu

SEQ ID NO: 30164 - RNA, 32 nt, Human
acaaaguggugauuuuugguuagggugaucgc

SEQ ID NO: 30165 - RNA, 32 nt, Human
acaaaguguucuccaucuccuuccccauuccu

SEQ ID NO: 30166 - RNA, 32 nt, Human
acaaaguguugacuguauggcauucaaaggga

SEQ ID NO: 30167 - RNA, 32 nt, Human
acaaaguucugcaugagaacaaaucugcauga

SEQ ID NO: 30168 - RNA, 32 nt, Human
acaaaguugccaagaugcuccuuguugacuuc

SEQ ID NO: 30169 - RNA, 32 nt, Human
acaaaguuggaccugggcuugagcuuacagac

SEQ ID NO: 30170 - RNA, 32 nt, Human
acaaaguuuucagucgcaaaucaagccuugaa

SEQ ID NO: 30171 - RNA, 32 nt, Human
acaaaguuuugggaaucaauucauacauauuu

SEQ ID NO: 30172 - RNA, 32 nt, Human
acaaauaaagaguuccugaucaccugaacaau

SEQ ID NO: 30173 - RNA, 32 nt, Human
acaaauaagcauugauuccugcauuucugaag

SEQ ID NO: 30174 - RNA, 32 nt, Human
acaaauaaugucuuccuuuucccccuucccgc

SEQ ID NO: 30175 - RNA, 32 nt, Human
acaaauaauuuuuaaaaauuagccaggcaugg

SEQ ID NO: 30176 - RNA, 32 nt, Human
acaaauacaaaugauauuuaacaaagauagag

SEQ ID NO: 30177 - RNA, 32 nt, Human
acaaauacaaggaauguggaaaagccauuauu

SEQ ID NO: 30178 - RNA, 32 nt, Human
acaaauacaauucagucuucucuuugggguuu

SEQ ID NO: 30179 - RNA, 32 nt, Human
acaaauacagcuuucugcuucuuucuuuuugg

SEQ ID NO: 30180 - RNA, 32 nt, Human
acaaauacaggauauuuauccagaagucuggc

SEQ ID NO: 30181 - RNA, 32 nt, Human
acaaauaccaacauccauccaaaaugaaaaag

SEQ ID NO: 30182 - RNA, 19 nt, Human
acaaauacuggaaaagcaa

SEQ ID NO: 30183 - RNA, 24 nt, Human
acaaauagaagcuucuugcuccug

SEQ ID NO: 30184 - RNA, 30 nt, Human
acaaauagaagcuucuugcuccuguuuaac

SEQ ID NO: 30185 - RNA, 32 nt, Human
acaaauagcagagugagccaggcggugccaaa

SEQ ID NO: 30186 - RNA, 32 nt, Human
acaaauagcagauuagucacauguacaagcau

SEQ ID NO: 30187 - RNA, 32 nt, Human
acaaauagcaugagugaaguggucagaagcag

SEQ ID NO: 30188 - RNA, 32 nt, Human
acaaauagguagauuucauguccguugagggg

SEQ ID NO: 30189 - RNA, 32 nt, Human
acaaauagguccugcauuuuauaagacuuuuu

SEQ ID NO: 30190 - RNA, 32 nt, Human
acaaauaucaaauuaagcaaguaaagaaaaag

SEQ ID NO: 30191 - RNA, 32 nt, Human
acaaauaugcgucccccucucuuccaauaucc

SEQ ID NO: 30192 - RNA, 32 nt, Human
acaaauaugcuuguggcauccuguaauucauu

SEQ ID NO: 30193 - RNA, 32 nt, Human
acaaauauggugguacagauaugucuucaagu

SEQ ID NO: 30194 - RNA, 20 nt, Human
acaaauauuaaagcacuuga

SEQ ID NO: 30195 - RNA, 32 nt, Human
acaaauauugaacauuuguaugugccuuguac

SEQ ID NO: 30196 - RNA, 32 nt, Human
acaaaucaauggauucaagacaggguauugaa

SEQ ID NO: 30197 - RNA, 31 nt, Human
acaaaucacagcugauagacagcgaagccuu

SEQ ID NO: 30198 - RNA, 32 nt, Human
acaaaucacucccaugaugagacccuggagga

SEQ ID NO: 30199 - RNA, 32 nt, Human
acaaaucagaagcagaugcugauugggaccca

SEQ ID NO: 30200 - RNA, 32 nt, Human
acaaaucagagcugaguggggaggugcuucag

SEQ ID NO: 30201 - RNA, 32 nt, Human
acaaaucagcaucuuuuuccccuucccugcuu

SEQ ID NO: 30202 - RNA, 32 nt, Human
acaaaucagcguaguuacaaaggggucagucu

SEQ ID NO: 30203 - RNA, 32 nt, Human
acaaauccaagguccaacagccuggauuaucu

SEQ ID NO: 30204 - RNA, 32 nt, Human
acaaauccagaagcaaagagauaguaggaccc

SEQ ID NO: 30205 - RNA, 32 nt, Human
acaaauccagagugcagacuucacaggugggg

SEQ ID NO: 30206 - RNA, 32 nt, Human
acaaauccaugagugagagggaaagucuagua

SEQ ID NO: 30207 - RNA, 32 nt, Human
acaaauccucagauuuagugggaagcuggaaa

SEQ ID NO: 30208 - RNA, 32 nt, Human
acaaauccugcucuggucucuggccccacaga

SEQ ID NO: 30209 - RNA, 32 nt, Human
acaaauccuggugaccugcucucccaagaaca

SEQ ID NO: 30210 - RNA, 32 nt, Human
acaaaucgagggagggagggagaagagucaca

SEQ ID NO: 30211 - RNA, 32 nt, Human
acaaaucuauacagcauguugcuguacugaau

SEQ ID NO: 30212 - RNA, 32 nt, Human
acaaaucucaccccuucucuccugcaaauuag

SEQ ID NO: 30213 - RNA, 32 nt, Human
acaaaucuccagccugccuggaaaugcugugg

SEQ ID NO: 30214 - RNA, 32 nt, Human
acaaaucucuaggagauucugccaaaggauuu

SEQ ID NO: 30215 - RNA, 32 nt, Human
acaaaucucuccucugccuucuccuuaucaga

SEQ ID NO: 30216 - RNA, 32 nt, Human
acaaaucuuagcaaucucucaaugccuuuuca

SEQ ID NO: 30217 - RNA, 31 nt, Human
acaaaucuuaugugaagaaaagacugguaug

SEQ ID NO: 30218 - RNA, 32 nt, Human
acaaaucuuucucuuccuuaucuuaugauggu

SEQ ID NO: 30219 - RNA, 32 nt, Human
acaaaucuuucuuuuccucugugaaagaaucc

SEQ ID NO: 30220 - RNA, 32 nt, Human
acaaaugaacacuuauuuguauuugaauugca

SEQ ID NO: 30221 - RNA, 32 nt, Human
acaaaugacaacaucauuacccucagcuuuua

SEQ ID NO: 30222 - RNA, 17 nt, Human
acaaaugacauauguug

SEQ ID NO: 30223 - RNA, 32 nt, Human
acaaaugagauggacuuaaagagcacauccug

SEQ ID NO: 30224 - RNA, 32 nt, Human
acaaaugaggguguaauugaguuucgcuccua

SEQ ID NO: 30225 - RNA, 31 nt, Human
acaaaugauaaaggaacucauuuaucaauag

SEQ ID NO: 30226 - RNA, 32 nt, Human
acaaaugcacacacaugcacacacacauuuca

SEQ ID NO: 30227 - RNA, 32 nt, Human
acaaaugcaucauugcacuccagccuggguga

SEQ ID NO: 30228 - RNA, 32 nt, Human
acaaaugccaguuccaggugauuagaaaggcc

SEQ ID NO: 30229 - RNA, 32 nt, Human
acaaaugccuccaaacucaagccugggugggu

SEQ ID NO: 30230 - RNA, 32 nt, Human
acaaaugccuccuuugcuaggaaagggagcuu

SEQ ID NO: 30231 - RNA, 32 nt, Human
acaaaugcuccuccuccaugcucccuuaaucc

SEQ ID NO: 30232 - RNA, 32 nt, Human
acaaaugcugagccguucuugcucugaaacug

SEQ ID NO: 30233 - RNA, 32 nt, Human
acaaaugcuuauuuuuauuguugcuauuuuca

SEQ ID NO: 30234 - RNA, 20 nt, Human
acaaauggacuucccugaug

SEQ ID NO: 30235 - RNA, 32 nt, Human
acaaauggccaacaggcaucugaagaggagcu

SEQ ID NO: 30236 - RNA, 32 nt, Human
acaaauggcccuacuucucucauucaacuaac

SEQ ID NO: 30237 - RNA, 32 nt, Human
acaaauggccucuaacguugcaaagaauaaug

SEQ ID NO: 30238 - RNA, 32 nt, Human
acaaauggcugccauggaaagucgugcuuccc

SEQ ID NO: 30239 - RNA, 32 nt, Human
acaaauggcuguagaggucuuagauaacaccu

SEQ ID NO: 30240 - RNA, 32 nt, Human
acaaauggcuguggguacauggggagggaccu

SEQ ID NO: 30241 - RNA, 32 nt, Human
acaaaugggauuucuacugccaguggcucagc

SEQ ID NO: 30242 - RNA, 31 nt, Human
acaaauggugagagagaaggcaucugacauu

SEQ ID NO: 30243 - RNA, 32 nt, Human
acaaauggugagagagaaggcaucugacauuu

SEQ ID NO: 30244 - RNA, 24 nt, Human
acaaaugguucccaaugugacuga

SEQ ID NO: 30245 - RNA, 32 nt, Human
acaaauguacauuguuacagggcugcuuccua

SEQ ID NO: 30246 - RNA, 32 nt, Human
acaaauguauguuuuuauugauuuuuacuuua

SEQ ID NO: 30247 - RNA, 32 nt, Human
acaaaugucaacucuguuauaauuaauacaga

SEQ ID NO: 30248 - RNA, 32 nt, Human
acaaaugucauugucuacuccuagaagaacca

SEQ ID NO: 30249 - RNA, 32 nt, Human
acaaaugucuguucccuggaggccaguccagu

SEQ ID NO: 30250 - RNA, 32 nt, Human
acaaauguguaugagaaacaaugaggaggauu

SEQ ID NO: 30251 - RNA, 32 nt, Human
acaaauguucagaauucucaccaccuucuggu

SEQ ID NO: 30252 - RNA, 32 nt, Human
acaaauguuuuuauacaaaugaauuuucuaca

SEQ ID NO: 30253 - RNA, 32 nt, Human
acaaauuaggggguagaaaggagcaguggugu

SEQ ID NO: 30254 - RNA, 32 nt, Human
acaaauuauagcauaacauacagacuuuugca

SEQ ID NO: 30255 - RNA, 32 nt, Human
acaaauuaucuuacagacacaaaaagaaauac

SEQ ID NO: 30256 - RNA, 22 nt, Human
acaaauucaaauguuuaugcca

SEQ ID NO: 30257 - RNA, 32 nt, Human
acaaauucauucccuucucucagccuccacuc

SEQ ID NO: 30258 - RNA, 32 nt, Human
acaaauucugguucugcaacuuccuagcguga

SEQ ID NO: 30259 - RNA, 32 nt, Human
acaaauugaaaacuuccccaaagcuuucacag

SEQ ID NO: 30260 - RNA, 32 nt, Human
acaaauugaacucucucuuagacuggauuugg

SEQ ID NO: 30261 - RNA, 32 nt, Human
acaaauugaucagaagaagauugauuauuucc

SEQ ID NO: 30262 - RNA, 32 nt, Human
acaaauuggguuagcuacaucucugcuaaaca

SEQ ID NO: 30263 - RNA, 22 nt, Human
acaaauuuauuggcauuuaaua

SEQ ID NO: 30264 - RNA, 32 nt, Human
acaaauuucauuuccauuuaagcaauuuguaa

SEQ ID NO: 30265 - RNA, 32 nt, Human
acaaauuuggaauucacuggcuucacuuaauc

SEQ ID NO: 30266 - RNA, 32 nt, Human
acaaauuuggaggugagagcuuugccagaccc

SEQ ID NO: 30267 - RNA, 24 nt, Human
acaaauuuuaaggcuagcucuuca

SEQ ID NO: 30268 - RNA, 32 nt, Human
acaaauuuuaaugccagacauuuaaggagagg

SEQ ID NO: 30269 - RNA, 32 nt, Human
acaaauuuucauuuugcaguuccagagcugcu

SEQ ID NO: 30270 - RNA, 32 nt, Human
acaacaaaauuagcugggcaugauggugggug

SEQ ID NO: 30271 - RNA, 32 nt, Human
acaacaaacugccccucacuacuggcuugguu

SEQ ID NO: 30272 - RNA, 32 nt, Human
acaacaaaugagccacugcgcccggccauaaa

SEQ ID NO: 30273 - RNA, 32 nt, Human
acaacaacaacaaaaacccuauuccuugccuu

SEQ ID NO: 30274 - RNA, 32 nt, Human
acaacaacaacaaaaagcuuccccaacuaaag

SEQ ID NO: 30275 - RNA, 32 nt, Human
acaacaacaacaaaacaacacauuggucuggc

SEQ ID NO: 30276 - RNA, 32 nt, Human
acaacaacaacaaaacaccucugucaauguaa

SEQ ID NO: 30277 - RNA, 32 nt, Human
acaacaacaacaaaacggcaguauauuugucc

SEQ ID NO: 30278 - RNA, 32 nt, Human
acaacaacaacaacaaaaacccuauuccuugc

SEQ ID NO: 30279 - RNA, 32 nt, Human
acaacaacaacaacaaaacuuccuaggccaga

SEQ ID NO: 30280 - RNA, 32 nt, Human
acaacaacacaaaccacacacacucgcacaca

SEQ ID NO: 30281 - RNA, 32 nt, Human
acaacaaccacaaaaucuaaaaauuagcuggg

SEQ ID NO: 30282 - RNA, 32 nt, Human
acaacaaccagcuccaacugacucuggucuug

SEQ ID NO: 30283 - RNA, 32 nt, Human
acaacaaccuagacauguggggugcuccaugg

SEQ ID NO: 30284 - RNA, 32 nt, Human
acaacaaccugcaugcucacaauacccagaca

SEQ ID NO: 30285 - RNA, 32 nt, Human
acaacaacuccuagggccacugaagauauaac

SEQ ID NO: 30286 - RNA, 32 nt, Human
acaacaagaauagaguugaugagcccucuucu

SEQ ID NO: 30287 - RNA, 32 nt, Human
acaacaagacuacaaugcuucucuccaagcaa

SEQ ID NO: 30288 - RNA, 32 nt, Human
acaacaaguccuugaacccaggccaugugguu

SEQ ID NO: 30289 - RNA, 32 nt, Human
acaacaaucacugcagucagcucacaggaagc

SEQ ID NO: 30290 - RNA, 32 nt, Human
acaacaauuagccuggcgugguggugugcacc

SEQ ID NO: 30291 - RNA, 32 nt, Human
acaacaauuuggaacaugaaaaugaaaggcaa

SEQ ID NO: 30292 - RNA, 23 nt, Human
acaacacacacgcugcuguaucu

SEQ ID NO: 30293 - RNA, 31 nt, Human
acaacacacaucugggacaggagggaauccg

SEQ ID NO: 30294 - RNA, 31 nt, Human
acaacacacaucugggacaggagggaaugcg

SEQ ID NO: 30295 - RNA, 32 nt, Human
acaacacacaucugggacaggagggaaugcgg

SEQ ID NO: 30296 - RNA, 32 nt, Human
acaacacaccucaccucacaccacagcacacc

SEQ ID NO: 30297 - RNA, 32 nt, Human
acaacacagaugcucacccgcacacagaggca

SEQ ID NO: 30298 - RNA, 32 nt, Human
acaacacagcugccguuucuucugccugcuua

SEQ ID NO: 30299 - RNA, 32 nt, Human
acaacacaguauccgggccuccuggccuggaa

SEQ ID NO: 30300 - RNA, 32 nt, Human
acaacacauggccaugccugaccucugugggg

SEQ ID NO: 30301 - RNA, 32 nt, Human
acaacaccagccugaccaacauggugaaaccc

SEQ ID NO: 30302 - RNA, 32 nt, Human
acaacaccauguggucuggaggucccagcccc

SEQ ID NO: 30303 - RNA, 22 nt, Human
acaacaccauuugagaaagagg

SEQ ID NO: 30304 - RNA, 32 nt, Human
acaacacccaacaacaggaagaaaucucaaaa

SEQ ID NO: 30305 - RNA, 32 nt, Human
acaacacccagccuuuaacgugccuuucugac

SEQ ID NO: 30306 - RNA, 25 nt, Human
acaacaccgacgucuccaucggcca

SEQ ID NO: 30307 - RNA, 32 nt, Human
acaacaccgcuugagcaacuggaauauguuug

SEQ ID NO: 30308 - RNA, 32 nt, Human
acaacaccucauucuuaacuguguggccaaug

SEQ ID NO: 30309 - RNA, 32 nt, Human
acaacacgcuuggcucuccauucucccagucg

SEQ ID NO: 30310 - RNA, 32 nt, Human
acaacacguuugucaggaaauggaguugaaga

SEQ ID NO: 30311 - RNA, 32 nt, Human
acaacacuauauuuuuaugcuacuuuccuguu

SEQ ID NO: 30312 - RNA, 32 nt, Human
acaacacugcuggacugcuccuggcucuguca

SEQ ID NO: 30313 - RNA, 32 nt, Human
acaacacuucauuuucaggaaaucuacuuccu

SEQ ID NO: 30314 - RNA, 32 nt, Human
acaacagaaaauuuggacagacuucaauuugc

SEQ ID NO: 30315 - RNA, 32 nt, Human
acaacagaagauacaggaagggagaggugucu

SEQ ID NO: 30316 - RNA, 32 nt, Human
acaacagagacggaugguguuucugagaggaa

SEQ ID NO: 30317 - RNA, 32 nt, Human
acaacagagaugguugaucugaucuuagcuca

SEQ ID NO: 30318 - RNA, 18 nt, Human
acaacagagucucaggga

SEQ ID NO: 30319 - RNA, 32 nt, Human
acaacagaguggcugaaagucacaccucucca

SEQ ID NO: 30320 - RNA, 32 nt, Human
acaacagaucaagaaguauggcagugacaacu

SEQ ID NO: 30321 - RNA, 32 nt, Human
acaacagaugcuggagagaauguggagaaaua

SEQ ID NO: 30322 - RNA, 32 nt, Human
acaacagcaagaaaaucucauuuaucuuuaua

SEQ ID NO: 30323 - RNA, 32 nt, Human
acaacagcacccgccucacaggcuaagaggcu

SEQ ID NO: 30324 - RNA, 32 nt, Human
acaacagcagaggcucaucuacaguggcaaac

SEQ ID NO: 30325 - RNA, 32 nt, Human
acaacagccacaaccucccugcuggucuccca

SEQ ID NO: 30326 - RNA, 32 nt, Human
acaacagccuccacaggcacagcuccaucguu

SEQ ID NO: 30327 - RNA, 32 nt, Human
acaacagcgaugaagagaacugugagaauaca

SEQ ID NO: 30328 - RNA, 32 nt, Human
acaacagcguuccccaugaucaagcacccuac

SEQ ID NO: 30329 - RNA, 32 nt, Human
acaacaggagaaacacccaaagagggccagag

SEQ ID NO: 30330 - RNA, 32 nt, Human
acaacaggcgcccgucaccacgcccagcuaau

SEQ ID NO: 30331 - RNA, 32 nt, Human
acaacaggguggggugggaggggaggagacau

SEQ ID NO: 30332 - RNA, 32 nt, Human
acaacagguugcgaacuggcugccugugucuu

SEQ ID NO: 30333 - RNA, 32 nt, Human
acaacagguuucaugcucuugugcacauccaa

SEQ ID NO: 30334 - RNA, 32 nt, Human
acaacaguguguuagcucugucuuagcaaccu

SEQ ID NO: 30335 - RNA, 32 nt, Human
acaacaguucuuguuagaaucaugggaugugu

SEQ ID NO: 30336 - RNA, 32 nt, Human
acaacauaaccagcgccccucccuucaccagu

SEQ ID NO: 30337 - RNA, 32 nt, Human
acaacauaagcauagugcaaggagcuccauuu

SEQ ID NO: 30338 - RNA, 32 nt, Human
acaacauaauacauguucauauacaaacauuu

SEQ ID NO: 30339 - RNA, 32 nt, Human
acaacauaggccagggccaacaaaguggagag

SEQ ID NO: 30340 - RNA, 32 nt, Human
acaacauaugaagcuuaggagugaagagacuu

SEQ ID NO: 30341 - RNA, 32 nt, Human
acaacaucaagaaaacagcaagggagagaauc

SEQ ID NO: 30342 - RNA, 32 nt, Human
acaacauccugggauugggacccacuuucugg

SEQ ID NO: 30343 - RNA, 32 nt, Human
acaacaucugcugacacuauugcacaguguuu

SEQ ID NO: 30344 - RNA, 32 nt, Human
acaacaugcaaucuuugucuuugcuucuggcc

SEQ ID NO: 30345 - RNA, 32 nt, Human
acaacauggaaagagccaaaaugucacaguuc

SEQ ID NO: 30346 - RNA, 20 nt, Human
acaacauggaaaugguccaa

SEQ ID NO: 30347 - RNA, 32 nt, Human
acaacauguaaacuggugagccuggcugugug

SEQ ID NO: 30348 - RNA, 32 nt, Human
acaacaugugggcuuccuguagcuccagggac

SEQ ID NO: 30349 - RNA, 32 nt, Human
acaacauuacaaaggaaggaggagggaagaga

SEQ ID NO: 30350 - RNA, 32 nt, Human
acaacauucucccucucccuguuuucacuuuc

SEQ ID NO: 30351 - RNA, 32 nt, Human
acaacauuggggaacccaggagcuuccagucc

SEQ ID NO: 30352 - RNA, 32 nt, Human
acaacauuuaugucacuccccaccuccucaua

SEQ ID NO: 30353 - RNA, 19 nt, Human
acaaccaagaaaauccauu

SEQ ID NO: 30354 - RNA, 20 nt, Human
acaaccaauuuacauggaaa

SEQ ID NO: 30355 - RNA, 32 nt, Human
acaaccacaaaaucuaaaaauuagcugggugu

SEQ ID NO: 30356 - RNA, 32 nt, Human
acaaccacaaccaacaccacaaaccuuucagc

SEQ ID NO: 30357 - RNA, 32 nt, Human
acaaccacacacugcaugcacacacauacacc

SEQ ID NO: 30358 - RNA, 32 nt, Human
acaaccacaggccgaaccacagaucuggaggc

SEQ ID NO: 30359 - RNA, 32 nt, Human
acaaccaccuccagccugggagauagccuugc

SEQ ID NO: 30360 - RNA, 32 nt, Human
acaaccaccuggcaauaugacucacuugaccc

SEQ ID NO: 30361 - RNA, 17 nt, Human
acaaccaccuucaccug

SEQ ID NO: 30362 - RNA, 32 nt, Human
acaaccaccuuucacauauccugcugggauca

SEQ ID NO: 30363 - RNA, 18 nt, Human
acaaccacucaggccuuu

SEQ ID NO: 30364 - RNA, 32 nt, Human
acaaccacucaggccuuucuggcccaccugga

SEQ ID NO: 30365 - RNA, 32 nt, Human
acaaccagaggaggaggaggacagagggagag

SEQ ID NO: 30366 - RNA, 32 nt, Human
acaaccagagguggcaggagaauuucuacuga

SEQ ID NO: 30367 - RNA, 32 nt, Human
acaaccagaucaaagcuagaaaauggauuccu

SEQ ID NO: 30368 - RNA, 32 nt, Human
acaaccagcaagucccugccccucucugaagc

SEQ ID NO: 30369 - RNA, 32 nt, Human
acaaccagcuuuuaaagaaggugaauuccaau

SEQ ID NO: 30370 - RNA, 32 nt, Human
acaaccaggaggagcuuggaggcugaacaccc

SEQ ID NO: 30371 - RNA, 32 nt, Human
acaaccaggccuagccccagacagccccagcc

SEQ ID NO: 30372 - RNA, 32 nt, Human
acaaccaguucugccggagacuuccauuuggc

SEQ ID NO: 30373 - RNA, 32 nt, Human
acaaccauaagcaagacaugcccaggguuugc

SEQ ID NO: 30374 - RNA, 32 nt, Human
acaaccaucuggguugcucaaguagaugccca

SEQ ID NO: 30375 - RNA, 31 nt, Human
acaaccauggacacaaagcugaacaugcuga

SEQ ID NO: 30376 - RNA, 32 nt, Human
acaaccauuccagagaucuccuuggagccacc

SEQ ID NO: 30377 - RNA, 32 nt, Human
acaaccauuuuucucuucuuccuuccuaggga

SEQ ID NO: 30378 - RNA, 31 nt, Human
acaacccaaauguccauccacagaugaauua

SEQ ID NO: 30379 - RNA, 32 nt, Human
acaacccaacaagcuuaacacccaccauccag

SEQ ID NO: 30380 - RNA, 32 nt, Human
acaacccaagauuaagaggccaggaagagguu

SEQ ID NO: 30381 - RNA, 31 nt, Human
acaacccaaguguccagcuacagaugaacgg

SEQ ID NO: 30382 - RNA, 31 nt, Human
acaacccaaguguccauggauggaugaaugg

SEQ ID NO: 30383 - RNA, 32 nt, Human
acaacccacacacaccaccaucucacuggguc

SEQ ID NO: 30384 - RNA, 32 nt, Human
acaacccacaguuaagaacaucaaguuauaag

SEQ ID NO: 30385 - RNA, 32 nt, Human
acaacccacauccuccauccugacugcagcau

SEQ ID NO: 30386 - RNA, 32 nt, Human
acaacccagccaaacaccacagccuucuccag

SEQ ID NO: 30387 - RNA, 32 nt, Human
acaaccccaccagcaaggaggucuuuuaguuc

SEQ ID NO: 30388 - RNA, 32 nt, Human
acaaccccagaggaugagauaaaugggaacug

SEQ ID NO: 30389 - RNA, 32 nt, Human
acaacccccagccucagcuucccugacagggc

SEQ ID NO: 30390 - RNA, 32 nt, Human
acaacccccaggcucacagcaguggcuucuag

SEQ ID NO: 30391 - RNA, 22 nt, Human
acaacccccgaauguuuuuaua

SEQ ID NO: 30392 - RNA, 32 nt, Human
acaacccccugccaacuauaucuggcugcaau

SEQ ID NO: 30393 - RNA, 32 nt, Human
acaaccccugaacaauggaggccuuucuuucc

SEQ ID NO: 30394 - RNA, 32 nt, Human
acaaccccuguugcccguagaggagccaacag

SEQ ID NO: 30395 - RNA, 32 nt, Human
acaacccggaaagaaccaucacugugaagggc

SEQ ID NO: 30396 - RNA, 32 nt, Human
acaacccucaacuugaggaaguugagagcucc

SEQ ID NO: 30397 - RNA, 24 nt, Human
acaacccugaagacaacaaggaaa

SEQ ID NO: 30398 - RNA, 32 nt, Human
acaacccugacgggagcauggagcugcugucc

SEQ ID NO: 30399 - RNA, 32 nt, Human
acaacccugccucccacaguuccuccccuaau

SEQ ID NO: 30400 - RNA, 22 nt, Human
acaacccuggcuccaauugcca

SEQ ID NO: 30401 - RNA, 32 nt, Human
acaacccugggcaaguaaugugcaaaagaugg

SEQ ID NO: 30402 - RNA, 32 nt, Human
acaacccuuccagagcagggcugacagcccug

SEQ ID NO: 30403 - RNA, 32 nt, Human
acaaccgcugacaaggagagugagugauguuu

SEQ ID NO: 30404 - RNA, 21 nt, Human
acaaccuaauaauuucuuaua

SEQ ID NO: 30405 - RNA, 32 nt, Human
acaaccucaaggugccaaaaaguuaaugagua

SEQ ID NO: 30406 - RNA, 32 nt, Human
acaaccucagcagcuucucccugucuuccucu

SEQ ID NO: 30407 - RNA, 32 nt, Human
acaaccucccaagauugaaccaggaagaaacu

SEQ ID NO: 30408 - RNA, 32 nt, Human
acaaccuccuuugguccaacuccugcugagcu

SEQ ID NO: 30409 - RNA, 32 nt, Human
acaaccucuccaccaucuacccgggcacuuuc

SEQ ID NO: 30410 - RNA, 32 nt, Human
acaaccugaaaugcugagggcagcaggaggaa

SEQ ID NO: 30411 - RNA, 32 nt, Human
acaaccugaagucugcagucugccacacagaa

SEQ ID NO: 30412 - RNA, 32 nt, Human
acaaccugcaccugacuagcuuuuuggccauu

SEQ ID NO: 30413 - RNA, 32 nt, Human
acaaccugcacuggggccggagggcagccagc

SEQ ID NO: 30414 - RNA, 21 nt, Human
acaaccugcucuugcggaagg

SEQ ID NO: 30415 - RNA, 32 nt, Human
acaaccugcuugucuguggcccaccugucaca

SEQ ID NO: 30416 - RNA, 32 nt, Human
acaaccugggcaacauggcgaaacccugucuc

SEQ ID NO: 30417 - RNA, 32 nt, Human
acaaccugggcaacauggugaaacccugucuu

SEQ ID NO: 30418 - RNA, 32 nt, Human
acaaccugguaugggagccaggaguccuggca

SEQ ID NO: 30419 - RNA, 32 nt, Human
acaaccugguguaugacaccucggacagcgau

SEQ ID NO: 30420 - RNA, 32 nt, Human
acaaccuucccuccccuucccacuccuuccgg

SEQ ID NO: 30421 - RNA, 32 nt, Human
acaaccuuggacuccagcuggcagcugaaaug

SEQ ID NO: 30422 - RNA, 32 nt, Human
acaaccuuugccggcccugcuucugccccucc

SEQ ID NO: 30423 - RNA, 23 nt, Human
acaaccuuugcucugaaauucca

SEQ ID NO: 30424 - RNA, 32 nt, Human
acaacgaacagcuggcuagacuggagaagagg

SEQ ID NO: 30425 - RNA, 32 nt, Human
acaacgagcuugccauugaucugcaacaaacg

SEQ ID NO: 30426 - RNA, 32 nt, Human
acaacgaggagaaagaugaggaccacugcagc

SEQ ID NO: 30427 - RNA, 32 nt, Human
acaacgaggagucuguuccuccccgcaccucc

SEQ ID NO: 30428 - RNA, 32 nt, Human
acaacgaggaucaugggagaccaccuggaccu

SEQ ID NO: 30429 - RNA, 32 nt, Human
acaacgauggguggaaauggcugugggagaag

SEQ ID NO: 30430 - RNA, 32 nt, Human
acaacgcaauagugacaugagcacuugacucg

SEQ ID NO: 30431 - RNA, 32 nt, Human
acaacgcagggugcgcuggguugggacguggg

SEQ ID NO: 30432 - RNA, 32 nt, Human
acaacgccaacagaagcacauuugucuuccag

SEQ ID NO: 30433 - RNA, 32 nt, Human
acaacgccuggcuaaguuuuuguauuuuuagu

SEQ ID NO: 30434 - RNA, 32 nt, Human
acaacgcugaggccacgagcuccuggguagcu

SEQ ID NO: 30435 - RNA, 32 nt, Human
acaacggaagagaccucccgcuggggccgggc

SEQ ID NO: 30436 - RNA, 32 nt, Human
acaacggccagaaccauacaccagagacacac

SEQ ID NO: 30437 - RNA, 32 nt, Human
acaacgguggugggagggagagcggccuccuc

SEQ ID NO: 30438 - RNA, 32 nt, Human
acaacguaggccuaaucacagcacuuugggag

SEQ ID NO: 30439 - RNA, 32 nt, Human
acaacgucagccaccccugcgccucggccccg

SEQ ID NO: 30440 - RNA, 32 nt, Human
acaacgucugcgucccccacaggacggcucug

SEQ ID NO: 30441 - RNA, 32 nt, Human
acaacgugggcuguggcuucagagggugcaag

SEQ ID NO: 30442 - RNA, 32 nt, Human
acaacguuuaugaaccugccguuugcuuugua

SEQ ID NO: 30443 - RNA, 32 nt, Human
acaacuaaagcuuugucauagacuucaaaaua

SEQ ID NO: 30444 - RNA, 32 nt, Human
acaacuaagauccuaaauguuuuaauuagugu

SEQ ID NO: 30445 - RNA, 32 nt, Human
acaacuaauaaacacuguauguguacauauuc

SEQ ID NO: 30446 - RNA, 32 nt, Human
acaacuaauuccugccuuucguccaguaccaa

SEQ ID NO: 30447 - RNA, 32 nt, Human
acaacuacaaaugaccuauacagagaagaaaa

SEQ ID NO: 30448 - RNA, 32 nt, Human
acaacuacagucuggccaagugugguggcuca

SEQ ID NO: 30449 - RNA, 21 nt, Human
acaacuacgugagcuuggaag

SEQ ID NO: 30450 - RNA, 23 nt, Human
acaacuacuaucuagguuugaag

SEQ ID NO: 30451 - RNA, 32 nt, Human
acaacuagaagcugcaacgacuguguggcucu

SEQ ID NO: 30452 - RNA, 32 nt, Human
acaacucaguggccugaacacacaccuucagc

SEQ ID NO: 30453 - RNA, 32 nt, Human
acaacucaucacaugugauagauugcagugga

SEQ ID NO: 30454 - RNA, 32 nt, Human
acaacucaugaaaucugcucugggacauuuug

SEQ ID NO: 30455 - RNA, 32 nt, Human
acaacucaugccacaguaugucgucuucaugu

SEQ ID NO: 30456 - RNA, 20 nt, Human
acaacuccaucuucugcugc

SEQ ID NO: 30457 - RNA, 32 nt, Human
acaacucccugaggccucuccgcaccaccuca

SEQ ID NO: 30458 - RNA, 32 nt, Human
acaacucccuuccccaugcacacaucuggaag

SEQ ID NO: 30459 - RNA, 32 nt, Human
acaacuccuccuccuccuccuccucuccugcu

SEQ ID NO: 30460 - RNA, 32 nt, Human
acaacucuagauggagugggccagcaguagcu

SEQ ID NO: 30461 - RNA, 32 nt, Human
acaacucugaugcugagcagggaauacucuaa

SEQ ID NO: 30462 - RNA, 32 nt, Human
acaacucuggaagcagaaacaggugugugcuu

SEQ ID NO: 30463 - RNA, 32 nt, Human
acaacucuuagagguagguguauucccguuuu

SEQ ID NO: 30464 - RNA, 32 nt, Human
acaacugaaagagagauuggaggcuuuuacaa

SEQ ID NO: 30465 - RNA, 32 nt, Human
acaacugaagugaugguguggacauagagaga

SEQ ID NO: 30466 - RNA, 32 nt, Human
acaacugacaacauugguuuucugcagcuagg

SEQ ID NO: 30467 - RNA, 32 nt, Human
acaacugacuugugugggugaggcuugcagaa

SEQ ID NO: 30468 - RNA, 32 nt, Human
acaacugaggcagaguagagugcuggccaauu

SEQ ID NO: 30469 - RNA, 23 nt, Human
acaacugcacuccagcuugggca

SEQ ID NO: 30470 - RNA, 31 nt, Human
acaacugcacuuuagaauaccagcagugaaa

SEQ ID NO: 30471 - RNA, 32 nt, Human
acaacugccuguuuccuccaccuccaccccca

SEQ ID NO: 30472 - RNA, 32 nt, Human
acaacugcguucuggcuaacacuguuggaccu

SEQ ID NO: 30473 - RNA, 32 nt, Human
acaacugcuuguucccagaggauucugauuuu

SEQ ID NO: 30474 - RNA, 32 nt, Human
acaacuggaaacagcaggaagugcuagaaaau

SEQ ID NO: 30475 - RNA, 32 nt, Human
acaacuggacugcgguugauugccaguuugug

SEQ ID NO: 30476 - RNA, 32 nt, Human
acaacuggccagccucugcccacuugaccccg

SEQ ID NO: 30477 - RNA, 32 nt, Human
acaacuggcccuugguucccaccacacugagg

SEQ ID NO: 30478 - RNA, 32 nt, Human
acaacuggggaccugggcagcaagcuucacac

SEQ ID NO: 30479 - RNA, 32 nt, Human
acaacuggggucccccaaaacucaguccuggc

SEQ ID NO: 30480 - RNA, 32 nt, Human
acaacugguacaaggcccagcugcaguguccc

SEQ ID NO: 30481 - RNA, 32 nt, Human
acaacugguagugaaauucagagcagaaugca

SEQ ID NO: 30482 - RNA, 32 nt, Human
acaacugucaucugaaggacucuucuagaagc

SEQ ID NO: 30483 - RNA, 22 nt, Human
acaacugucuuuagcuuugaag

SEQ ID NO: 30484 - RNA, 32 nt, Human
acaacugugaagccacccugggcuacagaaac

SEQ ID NO: 30485 - RNA, 32 nt, Human
acaacugugugggcauugucauagcuguuggu

SEQ ID NO: 30486 - RNA, 32 nt, Human
acaacuuaaagagacgggaggugcuaggaauc

SEQ ID NO: 30487 - RNA, 32 nt, Human
acaacuuaguguaauauaccagcuuguaugca

SEQ ID NO: 30488 - RNA, 32 nt, Human
acaacuucaacauuguuguuucccucugaggc

SEQ ID NO: 30489 - RNA, 32 nt, Human
acaacuucaagcauuuuuccagcguuaccauc

SEQ ID NO: 30490 - RNA, 24 nt, Human
acaacuucaaggaaacuucaggga

SEQ ID NO: 30491 - RNA, 32 nt, Human
acaacuucaguguggagaaaucucaaguuacu

SEQ ID NO: 30492 - RNA, 32 nt, Human
acaacuucauuucauacaccuucugcccuuac

SEQ ID NO: 30493 - RNA, 32 nt, Human
acaacuucauuuucacauguuacucaguuccc

SEQ ID NO: 30494 - RNA, 32 nt, Human
acaacuuccagcugcuaucaugguauucucau

SEQ ID NO: 30495 - RNA, 32 nt, Human
acaacuuccgcuuaaaacaauuaaguuguuaa

SEQ ID NO: 30496 - RNA, 32 nt, Human
acaacuuccuuuccuuucaguucugccaaaug

SEQ ID NO: 30497 - RNA, 32 nt, Human
acaacuucuggcugucagacacuugcugccuu

SEQ ID NO: 30498 - RNA, 17 nt, Human
acaacuugggauccuga

SEQ ID NO: 30499 - RNA, 19 nt, Human
acaacuuguccugguccaa

SEQ ID NO: 30500 - RNA, 32 nt, Human
acaacuuugaccugaugaccucaucccagccc

SEQ ID NO: 30501 - RNA, 32 nt, Human
acaacuuugcaagcucugccuuggguucagcc

SEQ ID NO: 30502 - RNA, 19 nt, Human
acaacuuuggacuguccaa

SEQ ID NO: 30503 - RNA, 22 nt, Human
acaacuuuucaauuugauccaa

SEQ ID NO: 30504 - RNA, 19 nt, Human
acaacuuuuguguggccaa

SEQ ID NO: 30505 - RNA, 20 nt, Human
acaacuuuuguuaguaccaa

SEQ ID NO: 30506 - RNA, 24 nt, Human
acaagaaaaaagcugaaaccugaa

SEQ ID NO: 30507 - RNA, 32 nt, Human
acaagaaaaacacauuucuuauaccaaaauuu

SEQ ID NO: 30508 - RNA, 32 nt, Human
acaagaaaaauaguuuuuacaaacuucuaguu

SEQ ID NO: 30509 - RNA, 32 nt, Human
acaagaaaagaacauggucuagacugaaguac

SEQ ID NO: 30510 - RNA, 22 nt, Human
acaagaaacucaaugcacaaca

SEQ ID NO: 30511 - RNA, 32 nt, Human
acaagaaagcuuccaucucaaaccuuuucucu

SEQ ID NO: 30512 - RNA, 32 nt, Human
acaagaaaggcagacacaccgcggccaggcac

SEQ ID NO: 30513 - RNA, 32 nt, Human
acaagaaaguuagccgggcaugguggugugca

SEQ ID NO: 30514 - RNA, 32 nt, Human
acaagaaauaccaauaacacacacagaacaaa

SEQ ID NO: 30515 - RNA, 32 nt, Human
acaagaaauuagcugggacuacaggcaugcgc

SEQ ID NO: 30516 - RNA, 32 nt, Human
acaagaaauuucaacggaauuuugccaaacua

SEQ ID NO: 30517 - RNA, 32 nt, Human
acaagaacauuuccucccuccccuccuuugaa

SEQ ID NO: 30518 - RNA, 32 nt, Human
acaagaaccccucccugcccuccuugggcacc

SEQ ID NO: 30519 - RNA, 32 nt, Human
acaagaacucaacuggcaaggcugcuuuucug

SEQ ID NO: 30520 - RNA, 32 nt, Human
acaagaacuccacaguucccaggcuggggaug

SEQ ID NO: 30521 - RNA, 32 nt, Human
acaagaacuucccagccagcacugacccugga

SEQ ID NO: 30522 - RNA, 32 nt, Human
acaagaagaagcaggaccccuacuugcugaag

SEQ ID NO: 30523 - RNA, 22 nt, Human
acaagaagagggagaguccuca

SEQ ID NO: 30524 - RNA, 23 nt, Human
acaagaagagggccagcgccuca

SEQ ID NO: 30525 - RNA, 32 nt, Human
acaagaagagucaccuaaagacaggaaacauc

SEQ ID NO: 30526 - RNA, 32 nt, Human
acaagaagauucauacuagagagaaacccuac

SEQ ID NO: 30527 - RNA, 32 nt, Human
acaagaagcccaaacuuuauuuuuauaaaggg

SEQ ID NO: 30528 - RNA, 23 nt, Human
acaagaagcgugagacgccacca

SEQ ID NO: 30529 - RNA, 32 nt, Human
acaagaaggaaagcagggaggaagggagacca

SEQ ID NO: 30530 - RNA, 32 nt, Human
acaagaaggaggaagacaagaaguggacugga

SEQ ID NO: 30531 - RNA, 32 nt, Human
acaagaaggauucccuggagaaaguggaccua

SEQ ID NO: 30532 - RNA, 32 nt, Human
acaagaagggcuuguuaaaauacagaauuuca

SEQ ID NO: 30533 - RNA, 32 nt, Human
acaagaagguggagccagacguacagggcgga

SEQ ID NO: 30534 - RNA, 32 nt, Human
acaagaaguccccagcagcacacacacauuuc

SEQ ID NO: 30535 - RNA, 32 nt, Human
acaagaaugaacaagagggaaaguauccucca

SEQ ID NO: 30536 - RNA, 32 nt, Human
acaagaauuagccagguguggugguccaugcc

SEQ ID NO: 30537 - RNA, 32 nt, Human
acaagaauuagcugggugugguggcgcaugcc

SEQ ID NO: 30538 - RNA, 32 nt, Human
acaagacaccacuuccccuuuacccuggacag

SEQ ID NO: 30539 - RNA, 32 nt, Human
acaagacacgaaagaacccggucuccaguguc

SEQ ID NO: 30540 - RNA, 32 nt, Human
acaagacacuucacaauguaugaagagagcau

SEQ ID NO: 30541 - RNA, 26 nt, Human
acaagacagauauuuugugccuugag

SEQ ID NO: 30542 - RNA, 24 nt, Human
acaagacagauggaagucccggag

SEQ ID NO: 30543 - RNA, 32 nt, Human
acaagacagcacuccagauaggcagccacgac

SEQ ID NO: 30544 - RNA, 32 nt, Human
acaagacaugggcacagagaguagaagcagaa

SEQ ID NO: 30545 - RNA, 32 nt, Human
acaagaccagccuggccaacauggugaaaccc

SEQ ID NO: 30546 - RNA, 32 nt, Human
acaagaccauuugguauuuguaaagagguuau

SEQ ID NO: 30547 - RNA, 32 nt, Human
acaagacccaucucccuagucucagccuuaca

SEQ ID NO: 30548 - RNA, 32 nt, Human
acaagacccaugucuccaucuggucauacucc

SEQ ID NO: 30549 - RNA, 32 nt, Human
acaagacccuuguggucccaccccacacacgc

SEQ ID NO: 30550 - RNA, 32 nt, Human
acaagaccgagacccuggacgaguccgagauc

SEQ ID NO: 30551 - RNA, 32 nt, Human
acaagaccucugucuccguagcauccuggagc

SEQ ID NO: 30552 - RNA, 32 nt, Human
acaagacgacaaaaauuccugcccucauggag

SEQ ID NO: 30553 - RNA, 32 nt, Human
acaagacucagaauccacagugucccauuuuc

SEQ ID NO: 30554 - RNA, 32 nt, Human
acaagacucccacucccuaauccuggagaccc

SEQ ID NO: 30555 - RNA, 32 nt, Human
acaagacuggacucagcacacuccugggaauc

SEQ ID NO: 30556 - RNA, 32 nt, Human
acaagacuguaucuccagcccaaugggacccg

SEQ ID NO: 30557 - RNA, 32 nt, Human
acaagacuuagugggaauuugcuuuaucuacu

SEQ ID NO: 30558 - RNA, 31 nt, Human
acaagacuuggauacauuacagcagacaugg

SEQ ID NO: 30559 - RNA, 32 nt, Human
acaagacuuugaacagaagcaaaugccugaag

SEQ ID NO: 30560 - RNA, 32 nt, Human
acaagagaaaagcaggaggaaaaggggccauu

SEQ ID NO: 30561 - RNA, 32 nt, Human
acaagagaagccaggaggucuaugauggugac

SEQ ID NO: 30562 - RNA, 32 nt, Human
acaagagacagggagacuggagcccaguccca

SEQ ID NO: 30563 - RNA, 32 nt, Human
acaagagaccauucgccccaacauucccggcc

SEQ ID NO: 30564 - RNA, 32 nt, Human
acaagagcaaacaagucugucugaguuucaag

SEQ ID NO: 30565 - RNA, 32 nt, Human
acaagagcaaagaccaugaagccagagucucc

SEQ ID NO: 30566 - RNA, 32 nt, Human
acaagagcagccuguggcaucuuugccuuggg

SEQ ID NO: 30567 - RNA, 32 nt, Human
acaagagcaguugucugccaugagcacccauc

SEQ ID NO: 30568 - RNA, 32 nt, Human
acaagagccacugcacaacagccaaggaacuu

SEQ ID NO: 30569 - RNA, 32 nt, Human
acaagagcccaggagguugagaaugcagugag

SEQ ID NO: 30570 - RNA, 32 nt, Human
acaagagccccagccaguuuacuccagguaga

SEQ ID NO: 30571 - RNA, 32 nt, Human
acaagagcucacugucuccccugucuccacag

SEQ ID NO: 30572 - RNA, 32 nt, Human
acaagagcuccagcaaagacuuucacuguagc

SEQ ID NO: 30573 - RNA, 32 nt, Human
acaagagcugcacucucuugcccgugguggcc

SEQ ID NO: 30574 - RNA, 32 nt, Human
acaagagcuggguuuagaacuuggaucacgug

SEQ ID NO: 30575 - RNA, 32 nt, Human
acaagaggaauuaccaccucagccucuuuugc

SEQ ID NO: 30576 - RNA, 32 nt, Human
acaagaggaggacaucccaugcggcuacuccu

SEQ ID NO: 30577 - RNA, 22 nt, Human
acaagaggcaggaaaaaagaca

SEQ ID NO: 30578 - RNA, 32 nt, Human
acaagaggcauuuaggacuucugugauauucc

SEQ ID NO: 30579 - RNA, 32 nt, Human
acaagaggccaucugagggccauguccaucug

SEQ ID NO: 30580 - RNA, 32 nt, Human
acaagaggcuuugauuuuuaauucugcaaugu

SEQ ID NO: 30581 - RNA, 32 nt, Human
acaagagggaaaaggaugacuaaucguucugc

SEQ ID NO: 30582 - RNA, 32 nt, Human
acaagagggacuguauuucuguggaaaacaau

SEQ ID NO: 30583 - RNA, 32 nt, Human
acaagagggcggaggaagaaguggggagcacc

SEQ ID NO: 30584 - RNA, 32 nt, Human
acaagaggucccggggguggugggagguggcg

SEQ ID NO: 30585 - RNA, 32 nt, Human
acaagagguuagagagaagagagucagcaaca

SEQ ID NO: 30586 - RNA, 32 nt, Human
acaagagugguguuuguuguuuuuccccuccc

SEQ ID NO: 30587 - RNA, 32 nt, Human
acaagauauacuuagcgccacacccauuuaaa

SEQ ID NO: 30588 - RNA, 32 nt, Human
acaagaucacguucucccaaguaccauucguc

SEQ ID NO: 30589 - RNA, 32 nt, Human
acaagaucaggaguucaagaccaggcugggca

SEQ ID NO: 30590 - RNA, 32 nt, Human
acaagaucaggaguucgagaccagccuggcca

SEQ ID NO: 30591 - RNA, 32 nt, Human
acaagauccaggggcuggagcccaaugccaag

SEQ ID NO: 30592 - RNA, 32 nt, Human
acaagauccucccagcuuucucucuacaugua

SEQ ID NO: 30593 - RNA, 32 nt, Human
acaagaucuccuaagaucugugaaugggauua

SEQ ID NO: 30594 - RNA, 32 nt, Human
acaagaucuguagaucugcuauugaaucagaa

SEQ ID NO: 30595 - RNA, 32 nt, Human
acaagaugaaaaagaaaugaaaagaggaagga

SEQ ID NO: 30596 - RNA, 32 nt, Human
acaagaugacaguuaaaaguugccaccuuacu

SEQ ID NO: 30597 - RNA, 32 nt, Human
acaagaugcacagacacauacacacuuaauuc

SEQ ID NO: 30598 - RNA, 32 nt, Human
acaagaugcuuccaguuacagcggcaggagcg

SEQ ID NO: 30599 - RNA, 32 nt, Human
acaagauggacucgcuacauggugugacccuc

SEQ ID NO: 30600 - RNA, 18 nt, Human
acaagauggagaaacaac

SEQ ID NO: 30601 - RNA, 32 nt, Human
acaagaugggcaaagucccugcccucaaccaa

SEQ ID NO: 30602 - RNA, 32 nt, Human
acaagauggugacuucuccuuggggaucuggg

SEQ ID NO: 30603 - RNA, 23 nt, Human
acaagaugguguuuaaaacaauu

SEQ ID NO: 30604 - RNA, 23 nt, Human
acaagauuaaaaguaaaacaauu

SEQ ID NO: 30605 - RNA, 32 nt, Human
acaagauuagaaacuaaaggcagaagacaagg

SEQ ID NO: 30606 - RNA, 32 nt, Human
acaagauuagauggcaggugagagcuccuuga

SEQ ID NO: 30607 - RNA, 32 nt, Human
acaagauuaucuuauuccccugcccaggugug

SEQ ID NO: 30608 - RNA, 21 nt, Human
acaagauucaccugggccucc

SEQ ID NO: 30609 - RNA, 21 nt, Human
acaagauuggcgucuguguug

SEQ ID NO: 30610 - RNA, 32 nt, Human
acaagauuuccauucccacaaauuuuagugag

SEQ ID NO: 30611 - RNA, 32 nt, Human
acaagcaaaguuugcacugggcccacugccga

SEQ ID NO: 30612 - RNA, 32 nt, Human
acaagcaacaacaacaacaaaauaaauaguuc

SEQ ID NO: 30613 - RNA, 32 nt, Human
acaagcaagcagcguggcuggaagcugauggg

SEQ ID NO: 30614 - RNA, 32 nt, Human
acaagcaagcuccuuccugccucuuuuauaag

SEQ ID NO: 30615 - RNA, 22 nt, Human
acaagcaagcugugugugcucu

SEQ ID NO: 30616 - RNA, 32 nt, Human
acaagcaagggucuccuucaagauuaaugcua

SEQ ID NO: 30617 - RNA, 32 nt, Human
acaagcaaguacuauuauuucugauuuuauaa

SEQ ID NO: 30618 - RNA, 32 nt, Human
acaagcaauccaggaacaaaauacucaccagg

SEQ ID NO: 30619 - RNA, 32 nt, Human
acaagcaauuucccaccaacgaauguaguaca

SEQ ID NO: 30620 - RNA, 32 nt, Human
acaagcacacaaaacucagacagcaucccagc

SEQ ID NO: 30621 - RNA, 32 nt, Human
acaagcacacaugcacagagcuucuugacagu

SEQ ID NO: 30622 - RNA, 24 nt, Human
acaagcaccagccaccaugccugg

SEQ ID NO: 30623 - RNA, 32 nt, Human
acaagcaccauaggccacagaccaucaccuca

SEQ ID NO: 30624 - RNA, 32 nt, Human
acaagcaccguggccagucacagggagagacu

SEQ ID NO: 30625 - RNA, 32 nt, Human
acaagcaccucucccuccacaugguagcagcc

SEQ ID NO: 30626 - RNA, 19 nt, Human
acaagcacugcauacgaug

SEQ ID NO: 30627 - RNA, 32 nt, Human
acaagcacuuugagugcugaagacuucuccca

SEQ ID NO: 30628 - RNA, 32 nt, Human
acaagcagaagguaacaaauuucaugcucucc

SEQ ID NO: 30629 - RNA, 32 nt, Human
acaagcagacacacucacacucguccccagcu

SEQ ID NO: 30630 - RNA, 19 nt, Human
acaagcagagcccgggcca

SEQ ID NO: 30631 - RNA, 18 nt, Human
acaagcagcacaaccaca

SEQ ID NO: 30632 - RNA, 32 nt, Human
acaagcagcggaggagaaggaggaggaggcga

SEQ ID NO: 30633 - RNA, 32 nt, Human
acaagcagcuuuguugcugccuuuauggacau

SEQ ID NO: 30634 - RNA, 32 nt, Human
acaagcagcuuuugugacuaagaaggaaaaua

SEQ ID NO: 30635 - RNA, 32 nt, Human
acaagcaguauaguugguaaaagucaucgcca

SEQ ID NO: 30636 - RNA, 22 nt, Human
acaagcaucagugggcaggcca

SEQ ID NO: 30637 - RNA, 32 nt, Human
acaagcaucuccugcccucucuccuuccuccc

SEQ ID NO: 30638 - RNA, 32 nt, Human
acaagcaugagcaggaaaagacccccucaagg

SEQ ID NO: 30639 - RNA, 25 nt, Human
acaagcaugagccaccacaccuggc

SEQ ID NO: 30640 - RNA, 32 nt, Human
acaagcaugcgccgacgaugcccagaauccag

SEQ ID NO: 30641 - RNA, 32 nt, Human
acaagcauggagaaaaugaagaauaggccugu

SEQ ID NO: 30642 - RNA, 32 nt, Human
acaagcauggccccagcauuugcucagcuucu

SEQ ID NO: 30643 - RNA, 32 nt, Human
acaagcauuggacccgaaaugagggagcccag

SEQ ID NO: 30644 - RNA, 32 nt, Human
acaagccaaaaacagagacagggaagaacuca

SEQ ID NO: 30645 - RNA, 32 nt, Human
acaagccaaucacggaaucccggcggccggcg

SEQ ID NO: 30646 - RNA, 32 nt, Human
acaagccacagaaacggccacacauguucaca

SEQ ID NO: 30647 - RNA, 32 nt, Human
acaagccacagaaccccucuuuucuaaaaugg

SEQ ID NO: 30648 - RNA, 32 nt, Human
acaagccacagagggcucaggagcauugcuau

SEQ ID NO: 30649 - RNA, 32 nt, Human
acaagccagaccuggacggaaguggucacagc

SEQ ID NO: 30650 - RNA, 32 nt, Human
acaagccagcagcagcagaacaguaauuacac

SEQ ID NO: 30651 - RNA, 32 nt, Human
acaagccagccugcugucucaggaagcuguag

SEQ ID NO: 30652 - RNA, 32 nt, Human
acaagccauuuugaacuucugcccucaccgga

SEQ ID NO: 30653 - RNA, 32 nt, Human
acaagcccacaccugggcaggcuguugguguc

SEQ ID NO: 30654 - RNA, 32 nt, Human
acaagcccacagcacagcucccugccaaacug

SEQ ID NO: 30655 - RNA, 32 nt, Human
acaagcccacccucccccugccuugguucccc

SEQ ID NO: 30656 - RNA, 32 nt, Human
acaagcccagaauaauauggccaggggaucaa

SEQ ID NO: 30657 - RNA, 32 nt, Human
acaagcccaucuucagcaguugcuaguccauu

SEQ ID NO: 30658 - RNA, 32 nt, Human
acaagcccaugcuagugagccaacacaaacaa

SEQ ID NO: 30659 - RNA, 20 nt, Human
acaagcccccacccccaccg

SEQ ID NO: 30660 - RNA, 32 nt, Human
acaagccccugagcagcaauuugaggcggcug

SEQ ID NO: 30661 - RNA, 32 nt, Human
acaagccccuggggcucuguugaaccugugaa

SEQ ID NO: 30662 - RNA, 32 nt, Human
acaagcccucauuuugccugcugccaucuaua

SEQ ID NO: 30663 - RNA, 32 nt, Human
acaagcccuuuaggaagcaguaccucucgccu

SEQ ID NO: 30664 - RNA, 32 nt, Human
acaagccggacugugcugagguugggacagag

SEQ ID NO: 30665 - RNA, 32 nt, Human
acaagccuacuggaauuauuucccagggagga

SEQ ID NO: 30666 - RNA, 24 nt, Human
acaagccuggccaacaugaugaag

SEQ ID NO: 30667 - RNA, 24 nt, Human
acaagccuggccaacauggugaaa

SEQ ID NO: 30668 - RNA, 24 nt, Human
acaagccugggcaacauggugaaa

SEQ ID NO: 30669 - RNA, 32 nt, Human
acaagccugggcauuauaacgagauccugucc

SEQ ID NO: 30670 - RNA, 32 nt, Human
acaagccugggcuggaagaggauggcagaggc

SEQ ID NO: 30671 - RNA, 32 nt, Human
acaagccuguaaucucugcacuuugggaugcc

SEQ ID NO: 30672 - RNA, 32 nt, Human
acaagccuugcacuggguaaaccacguucaug

SEQ ID NO: 30673 - RNA, 32 nt, Human
acaagcgauguaaaacagcugggagcaguggg

SEQ ID NO: 30674 - RNA, 32 nt, Human
acaagcgcagagcgcagcgcacggccacagac

SEQ ID NO: 30675 - RNA, 32 nt, Human
acaagcgcuagcccugguugcgggcgaagggu

SEQ ID NO: 30676 - RNA, 32 nt, Human
acaagcgcuucagccucguucucugugagcug

SEQ ID NO: 30677 - RNA, 32 nt, Human
acaagcggcagaggcaggaucugcacucagga

SEQ ID NO: 30678 - RNA, 32 nt, Human
acaagcggcugcaggccugucugcagggccag

SEQ ID NO: 30679 - RNA, 25 nt, Human
acaagcggcugccaccacaccuggc

SEQ ID NO: 30680 - RNA, 32 nt, Human
acaagcgugagcuaaccuugcccagccucugg

SEQ ID NO: 30681 - RNA, 32 nt, Human
acaagcguugagccacuaagcagaggaccuug

SEQ ID NO: 30682 - RNA, 32 nt, Human
acaagcucaaagcucaaacucaccaaauuacc

SEQ ID NO: 30683 - RNA, 32 nt, Human
acaagcucaaggagucugaauuuuucacuuua

SEQ ID NO: 30684 - RNA, 32 nt, Human
acaagcucacaucuuccugugggaaaccuucu

SEQ ID NO: 30685 - RNA, 31 nt, Human
acaagcucacucaagaccagauggagaacuu

SEQ ID NO: 30686 - RNA, 32 nt, Human
acaagcucagagauguuccuccccucaucugc

SEQ ID NO: 30687 - RNA, 32 nt, Human
acaagcucaggaguucaagaccagccuggcca

SEQ ID NO: 30688 - RNA, 32 nt, Human
acaagcucaucaggaaccacugccagaagcca

SEQ ID NO: 30689 - RNA, 32 nt, Human
acaagcucuuuagccaaacaagaaguagaaca

SEQ ID NO: 30690 - RNA, 32 nt, Human
acaagcugcccuuccugucuccaccucucagu

SEQ ID NO: 30691 - RNA, 32 nt, Human
acaagcuggacccccugcucccgggggcgagc

SEQ ID NO: 30692 - RNA, 32 nt, Human
acaagcugggcuggggaggacggugucuagga

SEQ ID NO: 30693 - RNA, 32 nt, Human
acaagcugugggauggggcuugggaguugcag

SEQ ID NO: 30694 - RNA, 32 nt, Human
acaagcugugugaccuugggcaaguuacugaa

SEQ ID NO: 30695 - RNA, 29 nt, Human
acaagcuucuuggaagaagaugugacaau

SEQ ID NO: 30696 - RNA, 32 nt, Human
acaagcuugaaggauaaaaagccuuggugcuu

SEQ ID NO: 30697 - RNA, 32 nt, Human
acaagcuugcccgcccuggcucccucugccca

SEQ ID NO: 30698 - RNA, 22 nt, Human
acaaggaaaccuguacuccuca

SEQ ID NO: 30699 - RNA, 31 nt, Human
acaaggaaacuucugccucagguggggagag

SEQ ID NO: 30700 - RNA, 32 nt, Human
acaaggaacaauccaaugucuccuacuccugc

SEQ ID NO: 30701 - RNA, 32 nt, Human
acaaggaagaagagaagagacuugcagugaac

SEQ ID NO: 30702 - RNA, 32 nt, Human
acaaggaagagcagaccaagguugcuucugau

SEQ ID NO: 30703 - RNA, 32 nt, Human
acaaggaagcagagagcagaagaaaagcagaa

SEQ ID NO: 30704 - RNA, 32 nt, Human
acaaggaaggaaaagaaagaagagaaggggag

SEQ ID NO: 30705 - RNA, 31 nt, Human
acaaggaaguuucagcauucccuuauggauc

SEQ ID NO: 30706 - RNA, 32 nt, Human
acaaggaauaucugcagauggcccagaaugga

SEQ ID NO: 30707 - RNA, 24 nt, Human
acaaggacacuuccagcuugugca

SEQ ID NO: 30708 - RNA, 32 nt, Human
acaaggacacuuccagcuugugcagacaccac

SEQ ID NO: 30709 - RNA, 32 nt, Human
acaaggacccagccugagauggucccaucugc

SEQ ID NO: 30710 - RNA, 23 nt, Human
acaaggacuccgaggagcaccac

SEQ ID NO: 30711 - RNA, 32 nt, Human
acaaggagaagaggaagggaggaagggaacag

SEQ ID NO: 30712 - RNA, 21 nt, Human
acaaggagaaggugcacagca

SEQ ID NO: 30713 - RNA, 32 nt, Human
acaaggagacugccuucuccaucaugcccaga

SEQ ID NO: 30714 - RNA, 32 nt, Human
acaaggagagcggagcacaggagcaggaagcc

SEQ ID NO: 30715 - RNA, 18 nt, Human
acaaggagaggagacaag

SEQ ID NO: 30716 - RNA, 32 nt, Human
acaaggagaugucucucccucucccaaagcac

SEQ ID NO: 30717 - RNA, 32 nt, Human
acaaggagcaaaugacguguggggaaggcuau

SEQ ID NO: 30718 - RNA, 32 nt, Human
acaaggagccuccaagcaaaucauccauugcu

SEQ ID NO: 30719 - RNA, 32 nt, Human
acaaggaggaagaaaaagggcuugcagagagu

SEQ ID NO: 30720 - RNA, 32 nt, Human
acaaggaggccugggcccugagauccuccacg

SEQ ID NO: 30721 - RNA, 32 nt, Human
acaaggagggacuugccucucuucucauuauu

SEQ ID NO: 30722 - RNA, 32 nt, Human
acaaggaggucagacuggagugaauguuguaa

SEQ ID NO: 30723 - RNA, 18 nt, Human
acaaggaggucugugcca

SEQ ID NO: 30724 - RNA, 21 nt, Human
acaaggagucccugagccgcc

SEQ ID NO: 30725 - RNA, 24 nt, Human
acaaggagugacggccugaccccc

SEQ ID NO: 30726 - RNA, 18 nt, Human
acaaggaguuaaaagcaa

SEQ ID NO: 30727 - RNA, 32 nt, Human
acaaggaguugcagacccuacucucuauuuug

SEQ ID NO: 30728 - RNA, 32 nt, Human
acaaggaugaauagaaugggccaagguaugac

SEQ ID NO: 30729 - RNA, 20 nt, Human
acaaggauggaaagcaucau

SEQ ID NO: 30730 - RNA, 32 nt, Human
acaaggauucccuuucuuccauuuuccaauaa

SEQ ID NO: 30731 - RNA, 32 nt, Human
acaaggauucuaccugaacugaaaggacugug

SEQ ID NO: 30732 - RNA, 32 nt, Human
acaaggauuugucuuaaguuugcacaauggcu

SEQ ID NO: 30733 - RNA, 32 nt, Human
acaaggcagcagcaagagaaaaugaggaagaa

SEQ ID NO: 30734 - RNA, 32 nt, Human
acaaggcagcagcugagcguggaaggggcugg

SEQ ID NO: 30735 - RNA, 32 nt, Human
acaaggcaggacuuuggcaaugccuuggccuc

SEQ ID NO: 30736 - RNA, 32 nt, Human
acaaggcaucagguaccugaaaaagaagagau

SEQ ID NO: 30737 - RNA, 32 nt, Human
acaaggcaucugcaugagugacuuuaagacuc

SEQ ID NO: 30738 - RNA, 23 nt, Human
acaaggccaagaacuccuggcca

SEQ ID NO: 30739 - RNA, 32 nt, Human
acaaggccagaacuagcaggcacucaauaaac

SEQ ID NO: 30740 - RNA, 32 nt, Human
acaaggccaggaguucgagaccagccuggcca

SEQ ID NO: 30741 - RNA, 32 nt, Human
acaaggccaugggucggccccugcugcugccc

SEQ ID NO: 30742 - RNA, 32 nt, Human
acaaggcccaggaggcuuaguccagucugugc

SEQ ID NO: 30743 - RNA, 32 nt, Human
acaaggcccaggcuggggccagggccagaggg

SEQ ID NO: 30744 - RNA, 32 nt, Human
acaaggcccgaucccccagccacuaguggccc

SEQ ID NO: 30745 - RNA, 32 nt, Human
acaaggcccgugaguccuggcccagccuccgg

SEQ ID NO: 30746 - RNA, 32 nt, Human
acaaggcccgugcacacagcauguugggggcc

SEQ ID NO: 30747 - RNA, 32 nt, Human
acaaggccggccgggugcaguggcucacaccu

SEQ ID NO: 30748 - RNA, 32 nt, Human
acaaggccuacagaagcauaagccgccauguc

SEQ ID NO: 30749 - RNA, 32 nt, Human
acaaggccuccaggcccugaggugggaaggaa

SEQ ID NO: 30750 - RNA, 32 nt, Human
acaaggccugcccuacacccaggcuggugccu

SEQ ID NO: 30751 - RNA, 32 nt, Human
acaaggccuggggcaagccucacaagucuacc

SEQ ID NO: 30752 - RNA, 32 nt, Human
acaaggccuuucucuaucuuccuacugccacc

SEQ ID NO: 30753 - RNA, 32 nt, Human
acaaggcgagccugugacagagcgagacccug

SEQ ID NO: 30754 - RNA, 32 nt, Human
acaaggcuacauguuauacaagcauaggaaaa

SEQ ID NO: 30755 - RNA, 32 nt, Human
acaaggcucaaaggaaccauauccugauuuca

SEQ ID NO: 30756 - RNA, 32 nt, Human
acaaggcucaaggaaguuagguuuggccaaga

SEQ ID NO: 30757 - RNA, 31 nt, Human
acaaggcucaauuccgaacuguugaaggaag

SEQ ID NO: 30758 - RNA, 32 nt, Human
acaaggcucugccugcaccaggccaucccugg

SEQ ID NO: 30759 - RNA, 32 nt, Human
acaaggcugaaaggagggggacuggaggcugc

SEQ ID NO: 30760 - RNA, 32 nt, Human
acaaggcugcugggggccuguucuucagcccc

SEQ ID NO: 30761 - RNA, 32 nt, Human
acaaggcugcuuggaugaccucaugauauggu

SEQ ID NO: 30762 - RNA, 32 nt, Human
acaaggcuggaaaacuggugcauggaggaaag

SEQ ID NO: 30763 - RNA, 32 nt, Human
acaaggcugugucucucuccuggucauuuuug

SEQ ID NO: 30764 - RNA, 32 nt, Human
acaaggcuucucucagccuccccaccagugau

SEQ ID NO: 30765 - RNA, 32 nt, Human
acaaggcuugaagcucuguccugggaaaauau

SEQ ID NO: 30766 - RNA, 32 nt, Human
acaagggaaggccggacucagcaaaggagccc

SEQ ID NO: 30767 - RNA, 20 nt, Human
acaagggaaggggccaaaca

SEQ ID NO: 30768 - RNA, 32 nt, Human
acaagggacagcagauguaagcacagaaauag

SEQ ID NO: 30769 - RNA, 32 nt, Human
acaagggacccacagaauuacagggaaguuac

SEQ ID NO: 30770 - RNA, 32 nt, Human
acaagggacgcugaggcaggaggaucauuuga

SEQ ID NO: 30771 - RNA, 23 nt, Human
acaagggagcacugaaaccugaa

SEQ ID NO: 30772 - RNA, 32 nt, Human
acaagggaggcagagucuggaguuacgcugcc

SEQ ID NO: 30773 - RNA, 32 nt, Human
acaagggaggcuggguagccagggcuggugcu

SEQ ID NO: 30774 - RNA, 32 nt, Human
acaagggaguaccagggcaaagcacaaggagc

SEQ ID NO: 30775 - RNA, 32 nt, Human
acaagggauaugaggccagugccaccagaggg

SEQ ID NO: 30776 - RNA, 32 nt, Human
acaagggcacaagcucagguccugcugccucc

SEQ ID NO: 30777 - RNA, 32 nt, Human
acaagggcagggaagacacagaaggacagaua

SEQ ID NO: 30778 - RNA, 32 nt, Human
acaagggccacagccaugaauggcacagaagg

SEQ ID NO: 30779 - RNA, 32 nt, Human
acaagggccagaggaggugggagcagagggag

SEQ ID NO: 30780 - RNA, 32 nt, Human
acaagggccagccuggccaacauggugaaacc

SEQ ID NO: 30781 - RNA, 32 nt, Human
acaagggcccagcaugucuguguguuuaccca

SEQ ID NO: 30782 - RNA, 32 nt, Human
acaagggcccguuuccauuuccuuccuaaggu

SEQ ID NO: 30783 - RNA, 32 nt, Human
acaagggcgcuggggguggaagugcccuggaa

SEQ ID NO: 30784 - RNA, 32 nt, Human
acaagggcucacugauaaaacucaucaguccc

SEQ ID NO: 30785 - RNA, 32 nt, Human
acaagggcuggcuaaauuuggccgaagaugga

SEQ ID NO: 30786 - RNA, 32 nt, Human
acaagggcuuagaguauacuguauuugcaagu

SEQ ID NO: 30787 - RNA, 32 nt, Human
acaaggggagagaucaguugcgggacagacug

SEQ ID NO: 30788 - RNA, 32 nt, Human
acaaggggagcacccugggccacacaggcgug

SEQ ID NO: 30789 - RNA, 32 nt, Human
acaaggggcuucaccucugagcuguuuuccag

SEQ ID NO: 30790 - RNA, 32 nt, Human
acaagggggccugagugcaguggcucacgucu

SEQ ID NO: 30791 - RNA, 32 nt, Human
acaagggggccuuguggcucucagccaugcca

SEQ ID NO: 30792 - RNA, 32 nt, Human
acaagggggugagggaaagggaaggcuuaaaa

SEQ ID NO: 30793 - RNA, 32 nt, Human
acaagggucacaauacuguugugcgcacaucg

SEQ ID NO: 30794 - RNA, 32 nt, Human
acaagggugcucugggggaccccuggucugug

SEQ ID NO: 30795 - RNA, 23 nt, Human
acaaggguggcuuuucucugcca

SEQ ID NO: 30796 - RNA, 32 nt, Human
acaagguaaaccugagacuuucccagucucca

SEQ ID NO: 30797 - RNA, 32 nt, Human
acaagguaccucuguuggaaaugcagaaauca

SEQ ID NO: 30798 - RNA, 32 nt, Human
acaagguaggcagagguugcagugagccaaga

SEQ ID NO: 30799 - RNA, 32 nt, Human
acaagguagggaguucugagggaagccgcgug

SEQ ID NO: 30800 - RNA, 32 nt, Human
acaagguaguaggaggaaugacuugguguauc

SEQ ID NO: 30801 - RNA, 32 nt, Human
acaaggucaagaguucgagaccagccugacca

SEQ ID NO: 30802 - RNA, 32 nt, Human
acaaggucaagaguucgagaccagccuggcca

SEQ ID NO: 30803 - RNA, 32 nt, Human
acaaggucacacuugacccuuugagacagucc

SEQ ID NO: 30804 - RNA, 32 nt, Human
acaaggucagcaguucaagaccagccugacca

SEQ ID NO: 30805 - RNA, 32 nt, Human
acaaggucaggagaucaagaccauccuggcca

SEQ ID NO: 30806 - RNA, 32 nt, Human
acaaggucaggagaucaagaccauccuggcua

SEQ ID NO: 30807 - RNA, 32 nt, Human
acaaggucaggagaucgagaccagccugacca

SEQ ID NO: 30808 - RNA, 32 nt, Human
acaaggucaggaguucaagaccagccugacca

SEQ ID NO: 30809 - RNA, 32 nt, Human
acaaggucaggaguucaagaccagccuggaca

SEQ ID NO: 30810 - RNA, 32 nt, Human
acaaggucaggaguucaagaccagccuggcca

SEQ ID NO: 30811 - RNA, 32 nt, Human
acaaggucaggaguucaagaccagccuggccc

SEQ ID NO: 30812 - RNA, 32 nt, Human
acaaggucaggaguucaagaccagcugaccaa

SEQ ID NO: 30813 - RNA, 32 nt, Human
acaaggucaggaguuccagaccagccuggcua

SEQ ID NO: 30814 - RNA, 32 nt, Human
acaaggucaggaguucgagaccagccagacca

SEQ ID NO: 30815 - RNA, 32 nt, Human
acaaggucaggaguucgagaccagccugacca

SEQ ID NO: 30816 - RNA, 32 nt, Human
acaaggucaggaguucgagaccagccuggcca

SEQ ID NO: 30817 - RNA, 32 nt, Human
acaaggucaggaguucgagaccagccugguca

SEQ ID NO: 30818 - RNA, 32 nt, Human
acaaggucaggaguuugagaccagccuagcca

SEQ ID NO: 30819 - RNA, 32 nt, Human
acaaggucaggaguuugagaccagccugacca

SEQ ID NO: 30820 - RNA, 32 nt, Human
acaaggucaggaguuugagaccagccuggcca

SEQ ID NO: 30821 - RNA, 32 nt, Human
acaaggucaggaguuugggaccagccugacca

SEQ ID NO: 30822 - RNA, 32 nt, Human
acaaggucaguagaucgagaccagccuggcca

SEQ ID NO: 30823 - RNA, 32 nt, Human
acaagguccagaucacucuggagcaggccagc

SEQ ID NO: 30824 - RNA, 32 nt, Human
acaagguccuuggcugggcaugguggcugaag

SEQ ID NO: 30825 - RNA, 32 nt, Human
acaaggucgggaguuugagaccagccugacua

SEQ ID NO: 30826 - RNA, 32 nt, Human
acaaggucucacuacauugcccagguuggucu

SEQ ID NO: 30827 - RNA, 32 nt, Human
acaaggucucacuauguugcccaggcuggucu

SEQ ID NO: 30828 - RNA, 32 nt, Human
acaaggucucgccauguugccuaggauguucu

SEQ ID NO: 30829 - RNA, 32 nt, Human
acaaggucuugcuauguugcccaggcuagagu

SEQ ID NO: 30830 - RNA, 32 nt, Human
acaaggucuugcuauguugcccaggcugaucu

SEQ ID NO: 30831 - RNA, 32 nt, Human
acaaggucuugcuauguugcccaggcuggucu

SEQ ID NO: 30832 - RNA, 32 nt, Human
acaaggucuugcuauguuguccagacuggucu

SEQ ID NO: 30833 - RNA, 32 nt, Human
acaaggugcacaggcuggaagucuuuugugaa

SEQ ID NO: 30834 - RNA, 32 nt, Human
acaaggugcuaucuacuuuucucucuaggauu

SEQ ID NO: 30835 - RNA, 32 nt, Human
acaaggugggagagagaguuugagacagcucc

SEQ ID NO: 30836 - RNA, 32 nt, Human
acaaggugggucuccuggguaagggaagcaag

SEQ ID NO: 30837 - RNA, 32 nt, Human
acaagguguguguaauggaacaccacuuugag

SEQ ID NO: 30838 - RNA, 32 nt, Human
acaagguuaaagauuccucgaaguucuaggaa

SEQ ID NO: 30839 - RNA, 32 nt, Human
acaagguuaauagccaggcaugguggcucaug

SEQ ID NO: 30840 - RNA, 32 nt, Human
acaagguugcagaaugaacauguaaaguuaca

SEQ ID NO: 30841 - RNA, 32 nt, Human
acaagguugggagcucgagaccagccuggcca

SEQ ID NO: 30842 - RNA, 32 nt, Human
acaagguugugcccuccaccuaccugccggac

SEQ ID NO: 30843 - RNA, 19 nt, Human
acaagguuucaccauguug

SEQ ID NO: 30844 - RNA, 24 nt, Human
acaaguaaaaauuuauaaauauua

SEQ ID NO: 30845 - RNA, 32 nt, Human
acaaguaacacauuuggccacaaaacaccaaa

SEQ ID NO: 30846 - RNA, 32 nt, Human
acaaguaacucuaggcugggugugguggcuca

SEQ ID NO: 30847 - RNA, 32 nt, Human
acaaguacccagcagguggcccagggaggcag

SEQ ID NO: 30848 - RNA, 32 nt, Human
acaaguacuguaguauuacagugacaggaauc

SEQ ID NO: 30849 - RNA, 32 nt, Human
acaaguacuucuugauaccugggauacugugc

SEQ ID NO: 30850 - RNA, 32 nt, Human
acaaguagguuugcuuaagaaauuacuaaaca

SEQ ID NO: 30851 - RNA, 20 nt, Human
acaaguaguuaagagcuaag

SEQ ID NO: 30852 - RNA, 32 nt, Human
acaaguaguucauucaggagggcagggaagac

SEQ ID NO: 30853 - RNA, 32 nt, Human
acaaguauaaugacauuuagaagauuacuuug

SEQ ID NO: 30854 - RNA, 32 nt, Human
acaagucacaaaggagaaugagaacuuaauga

SEQ ID NO: 30855 - RNA, 32 nt, Human
acaagucaccccaaaccuuggaacugucaggg

SEQ ID NO: 30856 - RNA, 32 nt, Human
acaagucacccuacaacuacuacuucuuggga

SEQ ID NO: 30857 - RNA, 32 nt, Human
acaagucacuucucuucuccauaguacaugga

SEQ ID NO: 30858 - RNA, 32 nt, Human
acaagucagaauucacuuugaagagggucuga

SEQ ID NO: 30859 - RNA, 32 nt, Human
acaaguccacacacacucccaccccagccaaa

SEQ ID NO: 30860 - RNA, 24 nt, Human
acaaguccuaucauccucugcuca

SEQ ID NO: 30861 - RNA, 32 nt, Human
acaaguccuggugucuuuaaaaggaucagcuu

SEQ ID NO: 30862 - RNA, 32 nt, Human
acaagucgguggugaugacagacccccuuuug

SEQ ID NO: 30863 - RNA, 32 nt, Human
acaagucuguaaucccagcacuuugggaggcc

SEQ ID NO: 30864 - RNA, 32 nt, Human
acaagucuguggggcaagaggcugcaauauuc

SEQ ID NO: 30865 - RNA, 32 nt, Human
acaagucuuucuccuccagcccuucucuucaa

SEQ ID NO: 30866 - RNA, 32 nt, Human
acaagugacucaguggaagauccagagucaac

SEQ ID NO: 30867 - RNA, 32 nt, Human
acaagugagacggagcugccuccucugacugc

SEQ ID NO: 30868 - RNA, 32 nt, Human
acaagugagccucagcaccacccuccaucccu

SEQ ID NO: 30869 - RNA, 32 nt, Human
acaagugagucucggcuggagugcaguggugc

SEQ ID NO: 30870 - RNA, 32 nt, Human
acaagugauuugcauucucuucuucacgcuuu

SEQ ID NO: 30871 - RNA, 32 nt, Human
acaagugcacacacaucuaugcagacaagcuu

SEQ ID NO: 30872 - RNA, 32 nt, Human
acaagugcacacuguccugguguccugcacug

SEQ ID NO: 30873 - RNA, 32 nt, Human
acaagugcacagaccacacacagcacuaacac

SEQ ID NO: 30874 - RNA, 32 nt, Human
acaagugcagaaggugcaggugcaguggguac

SEQ ID NO: 30875 - RNA, 32 nt, Human
acaagugccagcccccacaucuguagccccug

SEQ ID NO: 30876 - RNA, 32 nt, Human
acaagugcuggaguuagcaccucccucugccc

SEQ ID NO: 30877 - RNA, 32 nt, Human
acaagugcuuuugcuuucuuucuuucuuucuu

SEQ ID NO: 30878 - RNA, 32 nt, Human
acaaguggaacagaugaaagaggccagcagac

SEQ ID NO: 30879 - RNA, 32 nt, Human
acaaguggaauuuaauacauaaaagagaaaaa

SEQ ID NO: 30880 - RNA, 32 nt, Human
acaaguggagagaaguugacguggaaaggguc

SEQ ID NO: 30881 - RNA, 32 nt, Human
acaaguggagccaggguucagggucagagcua

SEQ ID NO: 30882 - RNA, 32 nt, Human
acaaguggauaaagaaauugugguguaucuau

SEQ ID NO: 30883 - RNA, 32 nt, Human
acaagugggaaaaacugugauuagaaagggaa

SEQ ID NO: 30884 - RNA, 32 nt, Human
acaagugggaccgguggagcagccccugggcu

SEQ ID NO: 30885 - RNA, 32 nt, Human
acaaguggguggugagaccauugaaagccuuu

SEQ ID NO: 30886 - RNA, 32 nt, Human
acaagugguuuaguugggcagggcuuugauca

SEQ ID NO: 30887 - RNA, 32 nt, Human
acaaguguccagagaucguagccagacagcca

SEQ ID NO: 30888 - RNA, 32 nt, Human
acaaguguccuccuccagcgccagccuggccc

SEQ ID NO: 30889 - RNA, 32 nt, Human
acaagugugguguuuucccaaggcucccuucc

SEQ ID NO: 30890 - RNA, 32 nt, Human
acaaguguuguggccuuccugaacugggaagu

SEQ ID NO: 30891 - RNA, 32 nt, Human
acaaguuagaaaauucagcuccuuucuguccu

SEQ ID NO: 30892 - RNA, 32 nt, Human
acaaguuaggaucagcagaggguagaggaggg

SEQ ID NO: 30893 - RNA, 32 nt, Human
acaaguuagggaggaagaggcaggcgaugagu

SEQ ID NO: 30894 - RNA, 32 nt, Human
acaaguucaagaccagccuggcaaacauggug

SEQ ID NO: 30895 - RNA, 32 nt, Human
acaaguucaggaggucaagaccauccuggcua

SEQ ID NO: 30896 - RNA, 32 nt, Human
acaaguuccaauagcuuauaugcccagaaggc

SEQ ID NO: 30897 - RNA, 32 nt, Human
acaaguucuggcccaggauucgcucacugacc

SEQ ID NO: 30898 - RNA, 32 nt, Human
acaaguucuggcccaggauucgcucacugauc

SEQ ID NO: 30899 - RNA, 32 nt, Human
acaaguuguuaggccaggugcaauggcucgca

SEQ ID NO: 30900 - RNA, 32 nt, Human
acaaguuuaccucccugcuuuccucuuuucga

SEQ ID NO: 30901 - RNA, 32 nt, Human
acaaguuuagagaugcauuuaagaauuauuca

SEQ ID NO: 30902 - RNA, 32 nt, Human
acaaguuugagaccagccugggcaacauggca

SEQ ID NO: 30903 - RNA, 32 nt, Human
acaaguuugcacagcuagaguguuuuuguaaa

SEQ ID NO: 30904 - RNA, 32 nt, Human
acaaguuugccccauucucuggcuuggggugg

SEQ ID NO: 30905 - RNA, 24 nt, Human
acaaguuuuaguuaaaacucauca

SEQ ID NO: 30906 - RNA, 32 nt, Human
acaaguuuuccucugcuuagcagcucacuuca

SEQ ID NO: 30907 - RNA, 32 nt, Human
acaaguuuucuaauuuuugcaguauggauagg

SEQ ID NO: 30908 - RNA, 32 nt, Human
acaaguuuugcaccacaggccaacacccuuug

SEQ ID NO: 30909 - RNA, 32 nt, Human
acaauaaaacacuugcuuuucuuuuugagaaa

SEQ ID NO: 30910 - RNA, 32 nt, Human
acaauaaacauguaggaaauaaacuugauaca

SEQ ID NO: 30911 - RNA, 32 nt, Human
acaauaaacucucuuuugcaccacagacuucu

SEQ ID NO: 30912 - RNA, 32 nt, Human
acaauaaagcucaugucuggaucucuguuggg

SEQ ID NO: 30913 - RNA, 20 nt, Human
acaauaaauguggcugugca

SEQ ID NO: 30914 - RNA, 32 nt, Human
acaauaacaagaaaagcuuuucaucuaaguuu

SEQ ID NO: 30915 - RNA, 32 nt, Human
acaauaacacaagauaccuguuccucaaagac

SEQ ID NO: 30916 - RNA, 32 nt, Human
acaauaacagaucuggugagugugccaugcca

SEQ ID NO: 30917 - RNA, 32 nt, Human
acaauaagguccaggcugagguagucucagau

SEQ ID NO: 30918 - RNA, 32 nt, Human
acaauaaugcaauuagaauuugggagaagcaa

SEQ ID NO: 30919 - RNA, 21 nt, Human
acaauaauggauuuaaugcuc

SEQ ID NO: 30920 - RNA, 32 nt, Human
acaauacagauaagauuuuuacaugguagauc

SEQ ID NO: 30921 - RNA, 32 nt, Human
acaauacaggaaauguucucagaugcugaugu

SEQ ID NO: 30922 - RNA, 32 nt, Human
acaauacaguacucaggcagugcaguacucag

SEQ ID NO: 30923 - RNA, 32 nt, Human
acaauacauaugcacauaucaugaacagcgua

SEQ ID NO: 30924 - RNA, 32 nt, Human
acaauacaucccuuaccugggaaagggcuguu

SEQ ID NO: 30925 - RNA, 32 nt, Human
acaauacauugaauuugacaacccacugaagu

SEQ ID NO: 30926 - RNA, 32 nt, Human
acaauacccuccccucccuugggcuggacccc

SEQ ID NO: 30927 - RNA, 32 nt, Human
acaauaccgucugugccuaggcugcuugaucu

SEQ ID NO: 30928 - RNA, 32 nt, Human
acaauacgacauguuucuuuugcaauuuauau

SEQ ID NO: 30929 - RNA, 32 nt, Human
acaauacggaaggggagauaggugagaugaua

SEQ ID NO: 30930 - RNA, 32 nt, Human
acaauacugauaguuagaagaaaacuauugua

SEQ ID NO: 30931 - RNA, 32 nt, Human
acaauacugccucuuuuauguuguauuuagaa

SEQ ID NO: 30932 - RNA, 32 nt, Human
acaauacuuguauauuuuuaguaccauacaga

SEQ ID NO: 30933 - RNA, 32 nt, Human
acaauagaaacucaccauguaaaagagucauc

SEQ ID NO: 30934 - RNA, 32 nt, Human
acaauagaaguauuucugaacauaucaaauau

SEQ ID NO: 30935 - RNA, 32 nt, Human
acaauagaauucaagaaaaugcuuaaaagcac

SEQ ID NO: 30936 - RNA, 32 nt, Human
acaauagacauugcaaacucucauguuuuugg

SEQ ID NO: 30937 - RNA, 32 nt, Human
acaauagaggagaauauguaaaggguauacau

SEQ ID NO: 30938 - RNA, 32 nt, Human
acaauagaguugaaagagaggccuuaggauuc

SEQ ID NO: 30939 - RNA, 32 nt, Human
acaauagcaauuaaaagacuaguagggauccu

SEQ ID NO: 30940 - RNA, 32 nt, Human
acaauagcaugagcgaucugugccuuaaggac

SEQ ID NO: 30941 - RNA, 32 nt, Human
acaauagcaugagugaucugugccuuaagaac

SEQ ID NO: 30942 - RNA, 32 nt, Human
acaauagcaugagugaucugugccuuaaggcu

SEQ ID NO: 30943 - RNA, 32 nt, Human
acaauaggacagugacugcacaguugugaaaa

SEQ ID NO: 30944 - RNA, 32 nt, Human
acaauaggcuuagugcuuggcucagacaccua

SEQ ID NO: 30945 - RNA, 32 nt, Human
acaauaggggaagauauaacaaaagccaaaau

SEQ ID NO: 30946 - RNA, 32 nt, Human
acaauaguaccgaucaguuaacucagcgcuga

SEQ ID NO: 30947 - RNA, 32 nt, Human
acaauagucaccacaguggcuggagaugagcc

SEQ ID NO: 30948 - RNA, 32 nt, Human
acaauagucaucuccuagggcucauaguucaa

SEQ ID NO: 30949 - RNA, 32 nt, Human
acaauagugaaagcaugaaaagaggacacaug

SEQ ID NO: 30950 - RNA, 32 nt, Human
acaauaguucccacucaugauuuuccguuaca

SEQ ID NO: 30951 - RNA, 32 nt, Human
acaauaucacagucauucauccaggccacguu

SEQ ID NO: 30952 - RNA, 32 nt, Human
acaauaugcuccugccuugcaccuccaauagg

SEQ ID NO: 30953 - RNA, 32 nt, Human
acaauaugggcucccaaccccugcugaguaca

SEQ ID NO: 30954 - RNA, 32 nt, Human
acaauauggguaaacuucaucccagagacaca

SEQ ID NO: 30955 - RNA, 32 nt, Human
acaauauguuacugagggaaaaauagauuggu

SEQ ID NO: 30956 - RNA, 32 nt, Human
acaauauguuugcaggcuguaugcuugguaga

SEQ ID NO: 30957 - RNA, 32 nt, Human
acaauauugccucacaacccugcuuacauuga

SEQ ID NO: 30958 - RNA, 32 nt, Human
acaauauuggguguuugggagccagaaagcuu

SEQ ID NO: 30959 - RNA, 32 nt, Human
acaauauuguaaucccuacucuaggcacuugc

SEQ ID NO: 30960 - RNA, 32 nt, Human
acaauauuucugcuuuaacaccaucuuucgug

SEQ ID NO: 30961 - RNA, 32 nt, Human
acaaucaaaagauuaacaacacugcaugcggc

SEQ ID NO: 30962 - RNA, 23 nt, Human
acaaucaaaggacuguauggaaa

SEQ ID NO: 30963 - RNA, 32 nt, Human
acaaucaaccugcacugagcacuuugugcggg

SEQ ID NO: 30964 - RNA, 32 nt, Human
acaaucacaaaugaaacaagauucagacuuca

SEQ ID NO: 30965 - RNA, 32 nt, Human
acaaucacaaccacaaccaacaccacaaaccu

SEQ ID NO: 30966 - RNA, 32 nt, Human
acaaucacaagaagauucccaccccugccucc

SEQ ID NO: 30967 - RNA, 32 nt, Human
acaaucacagugaaaaccucagguuggcagcc

SEQ ID NO: 30968 - RNA, 32 nt, Human
acaaucacaucacagaucacacugcaguuucc

SEQ ID NO: 30969 - RNA, 32 nt, Human
acaaucacguucacaaccacaaccacgcagcc

SEQ ID NO: 30970 - RNA, 32 nt, Human
acaaucacucagcuggaaugucugcucucuau

SEQ ID NO: 30971 - RNA, 32 nt, Human
acaaucagaaggauuuuagcuggauaacuuac

SEQ ID NO: 30972 - RNA, 32 nt, Human
acaaucagacuccauccagcuagcugcucauc

SEQ ID NO: 30973 - RNA, 32 nt, Human
acaaucagcuucccugguucugaggcuuucag

SEQ ID NO: 30974 - RNA, 32 nt, Human
acaaucauaccccuucccuucucuccacccaa

SEQ ID NO: 30975 - RNA, 32 nt, Human
acaaucaucucucccuuccucuaugucaagca

SEQ ID NO: 30976 - RNA, 32 nt, Human
acaaucauggcagaaggggaagcaagacauuu

SEQ ID NO: 30977 - RNA, 31 nt, Human
acaaucauggcagaaggugaagaggaaggag

SEQ ID NO: 30978 - RNA, 32 nt, Human
acaaucaugguggaaggcgaaugaggagcaaa

SEQ ID NO: 30979 - RNA, 32 nt, Human
acaaucauugauccuaaagaaaaugugggagu

SEQ ID NO: 30980 - RNA, 32 nt, Human
acaaucauuuugaaucccucuuccucacuuuu

SEQ ID NO: 30981 - RNA, 18 nt, Human
acaauccagagcaggcca

SEQ ID NO: 30982 - RNA, 32 nt, Human
acaauccagccucugcccuggaacugcuggau

SEQ ID NO: 30983 - RNA, 32 nt, Human
acaaucccacacacccucaggguuuacugaga

SEQ ID NO: 30984 - RNA, 32 nt, Human
acaaucccaccugaggacaggauccgcauaug

SEQ ID NO: 30985 - RNA, 22 nt, Human
acaaucccauuuccuauuacca

SEQ ID NO: 30986 - RNA, 32 nt, Human
acaaucccucacugcugccucaacuuccuggg

SEQ ID NO: 30987 - RNA, 25 nt, Human
acaauccuauacauuaaaagaaauu

SEQ ID NO: 30988 - RNA, 32 nt, Human
acaauccucaucagacaaacccaucuguaaaa

SEQ ID NO: 30989 - RNA, 32 nt, Human
acaauccucccaucucagccucugaaguagcu

SEQ ID NO: 30990 - RNA, 32 nt, Human
acaauccuggcccugagccucagccucugcca

SEQ ID NO: 30991 - RNA, 32 nt, Human
acaauccuggggacccacuugaagaagaauag

SEQ ID NO: 30992 - RNA, 21 nt, Human
acaauccugguaucauugcca

SEQ ID NO: 30993 - RNA, 32 nt, Human
acaaucgccacccuagaauuccugguaucagu

SEQ ID NO: 30994 - RNA, 32 nt, Human
acaaucgcuugaaccugggaggcggagguugc

SEQ ID NO: 30995 - RNA, 32 nt, Human
acaaucguaugucugcuuuaccagucuuuccc

SEQ ID NO: 30996 - RNA, 32 nt, Human
acaaucgucacccacauuggagugcaguggua

SEQ ID NO: 30997 - RNA, 32 nt, Human
acaaucuaagucaggucaccagagggaagaga

SEQ ID NO: 30998 - RNA, 18 nt, Human
acaaucuacacugccuua

SEQ ID NO: 30999 - RNA, 32 nt, Human
acaaucuaucaucuguccuacagucccugauc

SEQ ID NO: 31000 - RNA, 32 nt, Human
acaaucucagggacccgagcagcuccaaggac

SEQ ID NO: 31001 - RNA, 32 nt, Human
acaaucuccagugcaggaucuaaugacuguac

SEQ ID NO: 31002 - RNA, 32 nt, Human
acaaucucucuaaccuggugggagacuccucu

SEQ ID NO: 31003 - RNA, 32 nt, Human
acaaucugaaagagucuucaaugauaugcuug

SEQ ID NO: 31004 - RNA, 32 nt, Human
acaaucugacuggauaugacacugcagaauag

SEQ ID NO: 31005 - RNA, 32 nt, Human
acaaucugaggauugauugcugccuuuuaaaa

SEQ ID NO: 31006 - RNA, 32 nt, Human
acaaucugccuuucaccacauggccuugccuc

SEQ ID NO: 31007 - RNA, 22 nt, Human
acaaucuggcucacugcagccu

SEQ ID NO: 31008 - RNA, 32 nt, Human
acaaucuggggacugaaccuuacccagggcug

SEQ ID NO: 31009 - RNA, 22 nt, Human
acaaucuucaggaagccugcua

SEQ ID NO: 31010 - RNA, 32 nt, Human
acaaucuucuaaucuggagucuuugagaucuu

SEQ ID NO: 31011 - RNA, 32 nt, Human
acaaucuucuacagugcuuacucuccagaguc

SEQ ID NO: 31012 - RNA, 32 nt, Human
acaaucuugccucacugcaacgccugccucuc

SEQ ID NO: 31013 - RNA, 32 nt, Human
acaaucuuguauaauuuccucuccuugggugc

SEQ ID NO: 31014 - RNA, 21 nt, Human
acaaucuuucaagaagaaauu

SEQ ID NO: 31015 - RNA, 32 nt, Human
acaaugaacccaaaaccaaauuugcuaagucc

SEQ ID NO: 31016 - RNA, 32 nt, Human
acaaugaagagaaaggaggacucuugaggaau

SEQ ID NO: 31017 - RNA, 32 nt, Human
acaaugaauuacagcacaggcuuuucacaacu

SEQ ID NO: 31018 - RNA, 32 nt, Human
acaaugacaaacacacauuacacacacaacau

SEQ ID NO: 31019 - RNA, 32 nt, Human
acaaugacacaaucauagcucacugcagccuu

SEQ ID NO: 31020 - RNA, 32 nt, Human
acaaugacagcuguaguaacuaugaugggugu

SEQ ID NO: 31021 - RNA, 32 nt, Human
acaaugaccacugcagccuccaccuccuaggc

SEQ ID NO: 31022 - RNA, 32 nt, Human
acaaugacuuuuguaaggauugguacuaucua

SEQ ID NO: 31023 - RNA, 32 nt, Human
acaaugagauaucaucucauccuaauuaaggu

SEQ ID NO: 31024 - RNA, 32 nt, Human
acaaugagcccugguggauuuguggggaaaaa

SEQ ID NO: 31025 - RNA, 19 nt, Human
acaaugagcuaaugcucca

SEQ ID NO: 31026 - RNA, 32 nt, Human
acaaugauacuucuuuuuaucucuuuaguaug

SEQ ID NO: 31027 - RNA, 32 nt, Human
acaaugauagcagcagaugccuagcucauccu

SEQ ID NO: 31028 - RNA, 32 nt, Human
acaaugauagucacauuagagaacaagaaacc

SEQ ID NO: 31029 - RNA, 32 nt, Human
acaaugaugcgaucucagcucacugcaaccuc

SEQ ID NO: 31030 - RNA, 31 nt, Human
acaaugauggaaauagccaaugugaguucuc

SEQ ID NO: 31031 - RNA, 32 nt, Human
acaaugauggcagaacccccaagcgaaugccc

SEQ ID NO: 31032 - RNA, 32 nt, Human
acaaugauggccugguuagagcugugguuugg

SEQ ID NO: 31033 - RNA, 32 nt, Human
acaaugauugucaaacuuuucuaacuggagcu

SEQ ID NO: 31034 - RNA, 32 nt, Human
acaaugauuuucucccuucuuuuacaguagca

SEQ ID NO: 31035 - RNA, 32 nt, Human
acaaugcaaggaaaauggagguuuucaaacac

SEQ ID NO: 31036 - RNA, 32 nt, Human
acaaugcaaggaagucaugucucacuacuuuu

SEQ ID NO: 31037 - RNA, 32 nt, Human
acaaugcaaugccacugagugcuauuuugcuc

SEQ ID NO: 31038 - RNA, 32 nt, Human
acaaugcagcugagcaggcaagcacagcccac

SEQ ID NO: 31039 - RNA, 32 nt, Human
acaaugcauaaauuaucugaauuuuaugucuu

SEQ ID NO: 31040 - RNA, 32 nt, Human
acaaugccaucaugaauauacuuuauuggaaa

SEQ ID NO: 31041 - RNA, 32 nt, Human
acaaugccauuucuccccaccacggaaccuuc

SEQ ID NO: 31042 - RNA, 32 nt, Human
acaaugcccaagcagagggagcccccuugccc

SEQ ID NO: 31043 - RNA, 32 nt, Human
acaaugccuggcacagauuagcgauuuguuga

SEQ ID NO: 31044 - RNA, 32 nt, Human
acaaugcguaaaaggugaaggccagcugaaga

SEQ ID NO: 31045 - RNA, 30 nt, Human
acaaugcuaauaaaauggugacuuuaaaag

SEQ ID NO: 31046 - RNA, 32 nt, Human
acaaugcugccucuguuucugugacgcugugc

SEQ ID NO: 31047 - RNA, 32 nt, Human
acaaugcugcucccuuuuacuccuuucuaagc

SEQ ID NO: 31048 - RNA, 32 nt, Human
acaaugcuguagacucagaaaaggaguggggg

SEQ ID NO: 31049 - RNA, 32 nt, Human
acaaugcuugauuugaaaacaguguggagaaa

SEQ ID NO: 31050 - RNA, 32 nt, Human
acaauggaagcagaggucagagugaugcaauu

SEQ ID NO: 31051 - RNA, 32 nt, Human
acaauggagagggaugggccagguucuugcuc

SEQ ID NO: 31052 - RNA, 32 nt, Human
acaauggagcaaggaagguggagauggaugcu

SEQ ID NO: 31053 - RNA, 32 nt, Human
acaauggaggcagagauuggagcaauuuaucu

SEQ ID NO: 31054 - RNA, 32 nt, Human
acaauggauagaauuauguagucuccguuauc

SEQ ID NO: 31055 - RNA, 32 nt, Human
acaauggcacuauuucagcucacugcaaccuc

SEQ ID NO: 31056 - RNA, 32 nt, Human
acaauggcaugaucucagcucacugcaaccuc

SEQ ID NO: 31057 - RNA, 32 nt, Human
acaauggcccugcuccuuccuccucuaggccc

SEQ ID NO: 31058 - RNA, 22 nt, Human
acaauggcucacgccuguaauc

SEQ ID NO: 31059 - RNA, 32 nt, Human
acaaugggaaccccuugugagcaugcucagua

SEQ ID NO: 31060 - RNA, 32 nt, Human
acaaugggcaggcggguuguacuuaguguggu

SEQ ID NO: 31061 - RNA, 32 nt, Human
acaaugggccuguccacuaucuucuuucauau

SEQ ID NO: 31062 - RNA, 32 nt, Human
acaaugggccuuuuauccccucugaacugcuu

SEQ ID NO: 31063 - RNA, 28 nt, Human
acaauggguccgcgggccacgcgaacgg

SEQ ID NO: 31064 - RNA, 32 nt, Human
acaaugguaccuauuagggauggagauacaga

SEQ ID NO: 31065 - RNA, 32 nt, Human
acaauggucaccaagucccggaacagguugug

SEQ ID NO: 31066 - RNA, 32 nt, Human
acaauggucuuccuccaccccucugggaauca

SEQ ID NO: 31067 - RNA, 32 nt, Human
acaaugguguuagcugggcagaaagaguggca

SEQ ID NO: 31068 - RNA, 32 nt, Human
acaaugguuaggguuguuuucuuaauucuuuu

SEQ ID NO: 31069 - RNA, 32 nt, Human
acaaugguuauccugagguugguuuuuggagg

SEQ ID NO: 31070 - RNA, 32 nt, Human
acaauguacaauauuguauauucuuuguugca

SEQ ID NO: 31071 - RNA, 32 nt, Human
acaauguauagccagagaaggagaagcuccca

SEQ ID NO: 31072 - RNA, 32 nt, Human
acaauguauuaaaauauaaaacauguagaucc

SEQ ID NO: 31073 - RNA, 32 nt, Human
acaauguauuaucaaccuuuucccucucaaaa

SEQ ID NO: 31074 - RNA, 32 nt, Human
acaaugucuaguuccaacuuugcauacuauaa

SEQ ID NO: 31075 - RNA, 32 nt, Human
acaaugucuggaaggcugagcuguaugcugcu

SEQ ID NO: 31076 - RNA, 32 nt, Human
acaaugugaauagcaugcaucacaccauuggg

SEQ ID NO: 31077 - RNA, 23 nt, Human
acaaugugcagaacagucucuga

SEQ ID NO: 31078 - RNA, 32 nt, Human
acaaugugcaguggcauguggaagaaaagaag

SEQ ID NO: 31079 - RNA, 23 nt, Human
acaaugugggaagaggaagaaug

SEQ ID NO: 31080 - RNA, 32 nt, Human
acaauguguacuuugauaguacagcuggcugc

SEQ ID NO: 31081 - RNA, 32 nt, Human
acaaugugucugggucaucacagcagugaaua

SEQ ID NO: 31082 - RNA, 28 nt, Human
acaauguguggacagugucagaguagca

SEQ ID NO: 31083 - RNA, 32 nt, Human
acaauguguggaugauuucuuacacuaaagau

SEQ ID NO: 31084 - RNA, 32 nt, Human
acaauguguguauguuaauaucugauacugua

SEQ ID NO: 31085 - RNA, 32 nt, Human
acaauguucuuggcccaucaugacauugggua

SEQ ID NO: 31086 - RNA, 32 nt, Human
acaauguuucuucugcaacuggcuacuccucu

SEQ ID NO: 31087 - RNA, 32 nt, Human
acaauguuuuacaauaaacagaaagccaagcg

SEQ ID NO: 31088 - RNA, 32 nt, Human
acaauuaacauacaucauuccacacuccuugu

SEQ ID NO: 31089 - RNA, 32 nt, Human
acaauuaaggucucuuccaaauccaagaaccu

SEQ ID NO: 31090 - RNA, 32 nt, Human
acaauuaauguuuaucacaccuuuaucuuggu

SEQ ID NO: 31091 - RNA, 32 nt, Human
acaauuacaacuacacaucuauuucuaaagaa

SEQ ID NO: 31092 - RNA, 32 nt, Human
acaauuaccccacauggaaauuuagggguuuc

SEQ ID NO: 31093 - RNA, 32 nt, Human
acaauuacccuuuaguugaaguccugaaguac

SEQ ID NO: 31094 - RNA, 32 nt, Human
acaauuauacuagauggaagacuugcaucagu

SEQ ID NO: 31095 - RNA, 32 nt, Human
acaauucaaggaccagccuuuuuaccacugca

SEQ ID NO: 31096 - RNA, 32 nt, Human
acaauucagaacuuucaccacaugagauaauu

SEQ ID NO: 31097 - RNA, 32 nt, Human
acaauucaguuccucccaaccaaccagucuuc

SEQ ID NO: 31098 - RNA, 31 nt, Human
acaauucaguuucagcucuggauuacuucag

SEQ ID NO: 31099 - RNA, 32 nt, Human
acaauuccccucccccucgucuuucucuuacc

SEQ ID NO: 31100 - RNA, 32 nt, Human
acaauuccuccaggaugacagauaggacuugg

SEQ ID NO: 31101 - RNA, 32 nt, Human
acaauuccuuuucacauauuccuuucuucucc

SEQ ID NO: 31102 - RNA, 32 nt, Human
acaauucucagacaaaugaaauuggcuugaua

SEQ ID NO: 31103 - RNA, 32 nt, Human
acaauucuccaauccccucuccuuugguccag

SEQ ID NO: 31104 - RNA, 32 nt, Human
acaauucugcuuucccuggaacugugucauuc

SEQ ID NO: 31105 - RNA, 32 nt, Human
acaauucuuacugagggcagagcccagucaga

SEQ ID NO: 31106 - RNA, 20 nt, Human
acaauugaacuuccaggaaa

SEQ ID NO: 31107 - RNA, 32 nt, Human
acaauugaauaucuacauauaaaaagaauuua

SEQ ID NO: 31108 - RNA, 32 nt, Human
acaauugacagccucaagguuccuggcuuuuu

SEQ ID NO: 31109 - RNA, 32 nt, Human
acaauugcaauacuuguacuaaacacuggaau

SEQ ID NO: 31110 - RNA, 32 nt, Human
acaauugcaccaacuucucuaccauguugugg

SEQ ID NO: 31111 - RNA, 32 nt, Human
acaauugcacugcuguuccugcuccaugacug

SEQ ID NO: 31112 - RNA, 32 nt, Human
acaauugcccaccauuuacaauacucaauuuu

SEQ ID NO: 31113 - RNA, 32 nt, Human
acaauugcuaucuauccauagaccauucuuga

SEQ ID NO: 31114 - RNA, 32 nt, Human
acaauugcuguuggccagauagcagucaugac

SEQ ID NO: 31115 - RNA, 32 nt, Human
acaauuggcaagaaauuccuccccagugacau

SEQ ID NO: 31116 - RNA, 32 nt, Human
acaauuggcucuuccuggccucaggcuuuggg

SEQ ID NO: 31117 - RNA, 32 nt, Human
acaauuguagagccaccauucaaagccaggca

SEQ ID NO: 31118 - RNA, 32 nt, Human
acaauuuaaauagagacccacagagcuaaugu

SEQ ID NO: 31119 - RNA, 32 nt, Human
acaauuuacaacagcaaccacacugccuguca

SEQ ID NO: 31120 - RNA, 32 nt, Human
acaauuuaccugucaauaaagcagaagacggc

SEQ ID NO: 31121 - RNA, 32 nt, Human
acaauuuaucgaucucaucaguucucagauuu

SEQ ID NO: 31122 - RNA, 32 nt, Human
acaauuuauguuaguagacaucuuuaaaucuc

SEQ ID NO: 31123 - RNA, 32 nt, Human
acaauuucaaagagaacccacauuugugagau

SEQ ID NO: 31124 - RNA, 31 nt, Human
acaauuucaauaaauuuggggaaaacaaaua

SEQ ID NO: 31125 - RNA, 32 nt, Human
acaauuucagaagaaaucgagggcacaggccc

SEQ ID NO: 31126 - RNA, 32 nt, Human
acaauuucauuguauagauauaccucauuuua

SEQ ID NO: 31127 - RNA, 32 nt, Human
acaauuuccucuucugccaauuaaccacugag

SEQ ID NO: 31128 - RNA, 32 nt, Human
acaauuucuaccccuuuuucugcaauucucau

SEQ ID NO: 31129 - RNA, 32 nt, Human
acaauuucucucaaauuucucuuccauugagc

SEQ ID NO: 31130 - RNA, 32 nt, Human
acaauuucuggcagauguagguaaagaggaaa

SEQ ID NO: 31131 - RNA, 32 nt, Human
acaauuugacaugauggaugguguggcuggga

SEQ ID NO: 31132 - RNA, 32 nt, Human
acaauuugagccugagugaguucuguggagcc

SEQ ID NO: 31133 - RNA, 32 nt, Human
acaauuuggaguuggucucagcaggaccccau

SEQ ID NO: 31134 - RNA, 32 nt, Human
acaauuugggaacccucaaaggcugagaguau

SEQ ID NO: 31135 - RNA, 32 nt, Human
acaauuuguccacccugcagcugccggcccgc

SEQ ID NO: 31136 - RNA, 32 nt, Human
acaauuuuaagaaaaugccccucucuauuacc

SEQ ID NO: 31137 - RNA, 20 nt, Human
acaauuuucucuagcugccu

SEQ ID NO: 31138 - RNA, 32 nt, Human
acaauuuuugcacuugcuuagaagccaucuaa

SEQ ID NO: 31139 - RNA, 32 nt, Human
acacaaaaauuagccaggcaugguggcacacg

SEQ ID NO: 31140 - RNA, 32 nt, Human
acacaaaaauuagccaggcaugguggcgcaug

SEQ ID NO: 31141 - RNA, 32 nt, Human
acacaaaaauuagcuaggcaugguggcguggc

SEQ ID NO: 31142 - RNA, 32 nt, Human
acacaaaaauuagcugagcaugguggcucacg

SEQ ID NO: 31143 - RNA, 32 nt, Human
acacaaaaauuagcugggcaugguggcaggcg

SEQ ID NO: 31144 - RNA, 32 nt, Human
acacaaaaauuagcugggcauuguggcgcaca

SEQ ID NO: 31145 - RNA, 32 nt, Human
acacaaaaauuagcugggcgugguggcacacg

SEQ ID NO: 31146 - RNA, 32 nt, Human
acacaaaaauuagcugggugugguggugcgcg

SEQ ID NO: 31147 - RNA, 23 nt, Human
acacaaaaccaaacacuguuuua

SEQ ID NO: 31148 - RNA, 19 nt, Human
acacaaaacucuaaaaaua

SEQ ID NO: 31149 - RNA, 32 nt, Human
acacaaaaggagagaggggagagcaauagacu

SEQ ID NO: 31150 - RNA, 32 nt, Human
acacaaaagggaggguacaguggugggggcac

SEQ ID NO: 31151 - RNA, 32 nt, Human
acacaaacacaaauagagauuucauagcuuuc

SEQ ID NO: 31152 - RNA, 32 nt, Human
acacaaacagccuucagguuugccagggccug

SEQ ID NO: 31153 - RNA, 32 nt, Human
acacaaacauacacucacacacacaauuacua

SEQ ID NO: 31154 - RNA, 32 nt, Human
acacaaacauuagccggguaugguggcacaug

SEQ ID NO: 31155 - RNA, 32 nt, Human
acacaaaccaaaguuucuggccaucuguggcu

SEQ ID NO: 31156 - RNA, 32 nt, Human
acacaaacccaaauaacucaaccaaagcggac

SEQ ID NO: 31157 - RNA, 32 nt, Human
acacaaaccuuuuggguuaaaagcuuuaacau

SEQ ID NO: 31158 - RNA, 22 nt, Human
acacaaagaaauccugcuuuca

SEQ ID NO: 31159 - RNA, 21 nt, Human
acacaaagaaauucugucuua

SEQ ID NO: 31160 - RNA, 32 nt, Human
acacaaagagcuuauuuuguuaggcaaauaca

SEQ ID NO: 31161 - RNA, 32 nt, Human
acacaaagauugacaguaagaugcuugagaag

SEQ ID NO: 31162 - RNA, 31 nt, Human
acacaaaggaaacugcuuugaagcucucaag

SEQ ID NO: 31163 - RNA, 32 nt, Human
acacaaaggaggugggagacugcguuggugcc

SEQ ID NO: 31164 - RNA, 21 nt, Human
acacaaagggcacgugucuca

SEQ ID NO: 31165 - RNA, 32 nt, Human
acacaaaguaauuauaguucaccuuuauacac

SEQ ID NO: 31166 - RNA, 20 nt, Human
acacaaaucuagaugguagc

SEQ ID NO: 31167 - RNA, 32 nt, Human
acacaaaugaaaugucuccugagaaccauugc

SEQ ID NO: 31168 - RNA, 32 nt, Human
acacaaauguugcccaguaugugcgcauugcc

SEQ ID NO: 31169 - RNA, 32 nt, Human
acacaaauuagccuggugugguggcccgcacc

SEQ ID NO: 31170 - RNA, 32 nt, Human
acacaaauuagcugcgugugguggccuaugac

SEQ ID NO: 31171 - RNA, 32 nt, Human
acacaaauuuguuucaguugggccauaaaugu

SEQ ID NO: 31172 - RNA, 32 nt, Human
acacaacaaaaccaaaccacagaaucaucuuu

SEQ ID NO: 31173 - RNA, 32 nt, Human
acacaacaaagcagcaugcaggaacuagaaac

SEQ ID NO: 31174 - RNA, 32 nt, Human
acacaacaacagcagcagcaagcugcuacugc

SEQ ID NO: 31175 - RNA, 32 nt, Human
acacaacacagcugccguuucuucugccugcu

SEQ ID NO: 31176 - RNA, 19 nt, Human
acacaacacgcaccucgug

SEQ ID NO: 31177 - RNA, 32 nt, Human
acacaacagacacacaucacaaggcgaacaca

SEQ ID NO: 31178 - RNA, 32 nt, Human
acacaacagccccacgagcaucugccauccag

SEQ ID NO: 31179 - RNA, 32 nt, Human
acacaacauaccagaaucucugggacacauuc

SEQ ID NO: 31180 - RNA, 32 nt, Human
acacaacauaccagaaucucugggacacauuu

SEQ ID NO: 31181 - RNA, 32 nt, Human
acacaacauauguaagcaacgcuacugguuca

SEQ ID NO: 31182 - RNA, 32 nt, Human
acacaaccaagcaauccucgcuuuacagauga

SEQ ID NO: 31183 - RNA, 32 nt, Human
acacaaccagaaggagcugaguuuggcaacaa

SEQ ID NO: 31184 - RNA, 22 nt, Human
acacaacccccuauaccuggaa

SEQ ID NO: 31185 - RNA, 32 nt, Human
acacaaccucuuuuuagcaucagaccuaccug

SEQ ID NO: 31186 - RNA, 32 nt, Human
acacaaccugccuggccgggcgugguggcgug

SEQ ID NO: 31187 - RNA, 21 nt, Human
acacaacguugaaaacuuccu

SEQ ID NO: 31188 - RNA, 32 nt, Human
acacaacucagggcuuuugugaagguuccccc

SEQ ID NO: 31189 - RNA, 32 nt, Human
acacaacugcacuccagccugggcaacagaac

SEQ ID NO: 31190 - RNA, 32 nt, Human
acacaacugcacuccagcuugggcaacagggc

SEQ ID NO: 31191 - RNA, 32 nt, Human
acacaacuguggucccagcuacaggggaggcu

SEQ ID NO: 31192 - RNA, 32 nt, Human
acacaagacagugaccaagaaaccacuaauuu

SEQ ID NO: 31193 - RNA, 32 nt, Human
acacaagacaguuugaggcauauuucuuaauc

SEQ ID NO: 31194 - RNA, 32 nt, Human
acacaagaguaguaauguuggcaauuugggua

SEQ ID NO: 31195 - RNA, 22 nt, Human
acacaagaguugauaacuuccu

SEQ ID NO: 31196 - RNA, 32 nt, Human
acacaagcacacacauacacaucuuuguaacu

SEQ ID NO: 31197 - RNA, 32 nt, Human
acacaagcaguacggaugaagacucugagucu

SEQ ID NO: 31198 - RNA, 23 nt, Human
acacaagcccacuugaccuggaa

SEQ ID NO: 31199 - RNA, 32 nt, Human
acacaagccuuuucacacagcacuccccucag

SEQ ID NO: 31200 - RNA, 32 nt, Human
acacaagcuaaguuuccaaggaccauuugcag

SEQ ID NO: 31201 - RNA, 32 nt, Human
acacaagcuacacauuuuauacuuuucauaaa

SEQ ID NO: 31202 - RNA, 21 nt, Human
acacaagcucacuagagugag

SEQ ID NO: 31203 - RNA, 32 nt, Human
acacaagcuccgguagcccauggagcccuggc

SEQ ID NO: 31204 - RNA, 32 nt, Human
acacaaggacagaaagcggaaaaagagaaaga

SEQ ID NO: 31205 - RNA, 32 nt, Human
acacaaggagaaagugagcucagccuggauaa

SEQ ID NO: 31206 - RNA, 32 nt, Human
acacaaggagccaggaguaaucagggcagacc

SEQ ID NO: 31207 - RNA, 32 nt, Human
acacaaggaggcagaggagcuaaccccucuac

SEQ ID NO: 31208 - RNA, 32 nt, Human
acacaaggccggggaagccacagccaagaaau

SEQ ID NO: 31209 - RNA, 32 nt, Human
acacaaggggaaacaggugcagguguguacag

SEQ ID NO: 31210 - RNA, 32 nt, Human
acacaaggguccacagccaaggaaaaggaguc

SEQ ID NO: 31211 - RNA, 32 nt, Human
acacaaggguuccuuauagugauggaagugaa

SEQ ID NO: 31212 - RNA, 32 nt, Human
acacaaggugauuucagacugcagaggggaaa

SEQ ID NO: 31213 - RNA, 32 nt, Human
acacaagugagagagacaauagugaaggcaaa

SEQ ID NO: 31214 - RNA, 31 nt, Human
acacaaguggagagagagguggccugacauu

SEQ ID NO: 31215 - RNA, 32 nt, Human
acacaagugucacccucagugccgagcuggcu

SEQ ID NO: 31216 - RNA, 32 nt, Human
acacaagugucuucucauaagauuuauagaaa

SEQ ID NO: 31217 - RNA, 32 nt, Human
acacaaguucagugaaaaguugauucuuugaa

SEQ ID NO: 31218 - RNA, 32 nt, Human
acacaaguuuucuuuuugaucucccucucccc

SEQ ID NO: 31219 - RNA, 32 nt, Human
acacaauacugugguguuggcaccaauggaca

SEQ ID NO: 31220 - RNA, 32 nt, Human
acacaauagaucagugcuucuuuccuagacaa

SEQ ID NO: 31221 - RNA, 32 nt, Human
acacaaucagcuuuaaccaauggaugaggggg

SEQ ID NO: 31222 - RNA, 32 nt, Human
acacaaucauagcacaccacagccugaaaauc

SEQ ID NO: 31223 - RNA, 32 nt, Human
acacaauccugccucagccuccuauauagcag

SEQ ID NO: 31224 - RNA, 32 nt, Human
acacaaucuuccuauaauccugaaccacaaaa

SEQ ID NO: 31225 - RNA, 20 nt, Human
acacaaugaggaaauaggga

SEQ ID NO: 31226 - RNA, 32 nt, Human
acacaaugugucugagagauucaugcugauug

SEQ ID NO: 31227 - RNA, 32 nt, Human
acacaauucaauuaaagaaagggaaauacaag

SEQ ID NO: 31228 - RNA, 32 nt, Human
acacaauucauuugcauuucuauggcaccaag

SEQ ID NO: 31229 - RNA, 32 nt, Human
acacaauugcagcugcauucugcaucgcugaa

SEQ ID NO: 31230 - RNA, 32 nt, Human
acacaauugcaguccagccugggcagcaagag

SEQ ID NO: 31231 - RNA, 32 nt, Human
acacaauugccuggauaccugaaggaauggag

SEQ ID NO: 31232 - RNA, 32 nt, Human
acacaauuguucugcugaagaguugucaucaa

SEQ ID NO: 31233 - RNA, 32 nt, Human
acacaauuuugccuuuuuguaauucuauuuga

SEQ ID NO: 31234 - RNA, 32 nt, Human
acacacaaacacagaaccacacagccaguccc

SEQ ID NO: 31235 - RNA, 32 nt, Human
acacacaaacauacacucacacacacaauuac

SEQ ID NO: 31236 - RNA, 32 nt, Human
acacacaaauuagccgggcaugguggcuggug

SEQ ID NO: 31237 - RNA, 32 nt, Human
acacacaaauuagcugggcgugguggcggacg

SEQ ID NO: 31238 - RNA, 32 nt, Human
acacacaaauuaggugggcaugguggcaggug

SEQ ID NO: 31239 - RNA, 32 nt, Human
acacacaaccuccuccuccucuuccagcaagg

SEQ ID NO: 31240 - RNA, 32 nt, Human
acacacaacuccagaggcgccauuuacacugu

SEQ ID NO: 31241 - RNA, 32 nt, Human
acacacaagccuuuucugcaggcaggaguuuc

SEQ ID NO: 31242 - RNA, 32 nt, Human
acacacaauauuucccucuaccaaaauaauuu

SEQ ID NO: 31243 - RNA, 26 nt, Human
acacacaaucuauauauguauauaca

SEQ ID NO: 31244 - RNA, 22 nt, Human
acacacacaaaaagaggucagu

SEQ ID NO: 31245 - RNA, 32 nt, Human
acacacacaaacaugcacacacacauaugcau

SEQ ID NO: 31246 - RNA, 18 nt, Human
acacacacaaauccuuga

SEQ ID NO: 31247 - RNA, 32 nt, Human
acacacacaaauuagccgggcaugguggcugg

SEQ ID NO: 31248 - RNA, 32 nt, Human
acacacacaaauuagcugggcgugguggcgga

SEQ ID NO: 31249 - RNA, 32 nt, Human
acacacacaaauuaggugggcaugguggcagg

SEQ ID NO: 31250 - RNA, 20 nt, Human
acacacacaagaggucaguu

SEQ ID NO: 31251 - RNA, 32 nt, Human
acacacacagcucagacccacggacaggaccc

SEQ ID NO: 31252 - RNA, 32 nt, Human
acacacacaggauaccagcaauggauggcagg

SEQ ID NO: 31253 - RNA, 32 nt, Human
acacacacagguggggacugggcacagcucuu

SEQ ID NO: 31254 - RNA, 32 nt, Human
acacacacauacacagagacucuuucauuuuu

SEQ ID NO: 31255 - RNA, 32 nt, Human
acacacacaucacacacacaucacaaugacaa

SEQ ID NO: 31256 - RNA, 32 nt, Human
acacacacauucuuucuuccaucaaagccucc

SEQ ID NO: 31257 - RNA, 32 nt, Human
acacacacccacccacacaccauucagaacau

SEQ ID NO: 31258 - RNA, 32 nt, Human
acacacacccacccccuccugcugacacucuc

SEQ ID NO: 31259 - RNA, 32 nt, Human
acacacaccccacaggcacacagggucaagaa

SEQ ID NO: 31260 - RNA, 18 nt, Human
acacacacgacacaggga

SEQ ID NO: 31261 - RNA, 32 nt, Human
acacacacgcacaaacacacaugcccacacaa

SEQ ID NO: 31262 - RNA, 32 nt, Human
acacacacgcacacaaaccacaccacacacac

SEQ ID NO: 31263 - RNA, 32 nt, Human
acacacacgugugcacacacaaugcacacaac

SEQ ID NO: 31264 - RNA, 32 nt, Human
acacacacucacagacccacacacauacacac

SEQ ID NO: 31265 - RNA, 32 nt, Human
acacacacucacugcggagaaccuugugccug

SEQ ID NO: 31266 - RNA, 32 nt, Human
acacacacuuccucaucacugcagccauugug

SEQ ID NO: 31267 - RNA, 32 nt, Human
acacacacuuccuucaaaagaccaaaagugac

SEQ ID NO: 31268 - RNA, 32 nt, Human
acacacacuugugcacaugugugcacagacac

SEQ ID NO: 31269 - RNA, 32 nt, Human
acacacagacacacaagcagacacacacauau

SEQ ID NO: 31270 - RNA, 32 nt, Human
acacacagacacacagagucacacacacucac

SEQ ID NO: 31271 - RNA, 32 nt, Human
acacacagacacacccucugccacacugcucu

SEQ ID NO: 31272 - RNA, 32 nt, Human
acacacagagagaaggaagagcagacagaggc

SEQ ID NO: 31273 - RNA, 32 nt, Human
acacacagagagacggcgaggaagggaaagac

SEQ ID NO: 31274 - RNA, 32 nt, Human
acacacagagcaaacucccuuucauaaaagcc

SEQ ID NO: 31275 - RNA, 21 nt, Human
acacacagaugcacacacaga

SEQ ID NO: 31276 - RNA, 32 nt, Human
acacacagaugcauaggccugccuuccggaga

SEQ ID NO: 31277 - RNA, 32 nt, Human
acacacagauuccugucccuuugccaacuacu

SEQ ID NO: 31278 - RNA, 21 nt, Human
acacacagccacacacacaga

SEQ ID NO: 31279 - RNA, 32 nt, Human
acacacagccccggaagugcugacugacaagg

SEQ ID NO: 31280 - RNA, 32 nt, Human
acacacagccuccucuuggucugaguaggcau

SEQ ID NO: 31281 - RNA, 32 nt, Human
acacacagcucugggugcacacucagagacag

SEQ ID NO: 31282 - RNA, 32 nt, Human
acacacaggaagagaaagagaucaggcaacag

SEQ ID NO: 31283 - RNA, 25 nt, Human
acacacaggcauacucacacacaga

SEQ ID NO: 31284 - RNA, 32 nt, Human
acacacaggguuucaucauguuguccaggcug

SEQ ID NO: 31285 - RNA, 32 nt, Human
acacacagucuaucauacauguacauacucac

SEQ ID NO: 31286 - RNA, 32 nt, Human
acacacauaaaccauacaacaaacaugagcuu

SEQ ID NO: 31287 - RNA, 21 nt, Human
acacacauaaacguauacaca

SEQ ID NO: 31288 - RNA, 32 nt, Human
acacacauacacaaaugcacacacaugcacac

SEQ ID NO: 31289 - RNA, 32 nt, Human
acacacauacacuccugcgugugcacaagcac

SEQ ID NO: 31290 - RNA, 21 nt, Human
acacacauacauacacacaca

SEQ ID NO: 31291 - RNA, 21 nt, Human
acacacauauacauauauaca

SEQ ID NO: 31292 - RNA, 21 nt, Human
acacacauauauacauacgca

SEQ ID NO: 31293 - RNA, 19 nt, Human
acacacauauauauacaca

SEQ ID NO: 31294 - RNA, 21 nt, Human
acacacauauauguauacgca

SEQ ID NO: 31295 - RNA, 21 nt, Human
acacacauauauguauauaua

SEQ ID NO: 31296 - RNA, 32 nt, Human
acacacauccccaagaaccucgagcucacacc

SEQ ID NO: 31297 - RNA, 32 nt, Human
acacacaucccuugauuccucccugauguggu

SEQ ID NO: 31298 - RNA, 32 nt, Human
acacacauccuccaucccagcauagagaaugg

SEQ ID NO: 31299 - RNA, 32 nt, Human
acacacaugcacacccucucacguccuccaga

SEQ ID NO: 31300 - RNA, 32 nt, Human
acacacaugcaccgcacacauauccaugcaca

SEQ ID NO: 31301 - RNA, 22 nt, Human
acacacaugcagugagaggccu

SEQ ID NO: 31302 - RNA, 21 nt, Human
acacacaugcauacacacaca

SEQ ID NO: 31303 - RNA, 32 nt, Human
acacacaugcgccugcagcacaugcuucuguc

SEQ ID NO: 31304 - RNA, 32 nt, Human
acacacaugugauuucagaagcguucuguggg

SEQ ID NO: 31305 - RNA, 32 nt, Human
acacacauguuuucuuuccagcuuugaagagc

SEQ ID NO: 31306 - RNA, 31 nt, Human
acacacauuacuucuuuucauucuaagaauc

SEQ ID NO: 31307 - RNA, 32 nt, Human
acacacauuagagaaaggacagaggucugcuc

SEQ ID NO: 31308 - RNA, 32 nt, Human
acacacauugauagggcagagcagggagugug

SEQ ID NO: 31309 - RNA, 32 nt, Human
acacacauugcagcuucaacuuuucucuuuag

SEQ ID NO: 31310 - RNA, 32 nt, Human
acacacauugucuccagcuuucaggcuuacug

SEQ ID NO: 31311 - RNA, 23 nt, Human
acacacauuuacuacacacacag

SEQ ID NO: 31312 - RNA, 32 nt, Human
acacaccaagccccacaaagccccuaaaggag

SEQ ID NO: 31313 - RNA, 32 nt, Human
acacaccacacacacucacacucacacacacu

SEQ ID NO: 31314 - RNA, 32 nt, Human
acacaccacacaccacacacaccccacuggca

SEQ ID NO: 31315 - RNA, 23 nt, Human
acacaccacacaucacacacaga

SEQ ID NO: 31316 - RNA, 32 nt, Human
acacaccaccgccugcccucccuccuuccucc

SEQ ID NO: 31317 - RNA, 32 nt, Human
acacaccagcuauauucauuugccaagaucaa

SEQ ID NO: 31318 - RNA, 32 nt, Human
acacaccagguuuaauagauccuggccucagg

SEQ ID NO: 31319 - RNA, 32 nt, Human
acacaccaguaaucccagcuacucgggaggcu

SEQ ID NO: 31320 - RNA, 32 nt, Human
acacaccaguagucccagcuacuagggaggca

SEQ ID NO: 31321 - RNA, 32 nt, Human
acacaccaguagucccagcuacuccugaggcu

SEQ ID NO: 31322 - RNA, 18 nt, Human
acacaccaucaccuuuga

SEQ ID NO: 31323 - RNA, 32 nt, Human
acacacccaaagaugucuuuggagauccccgg

SEQ ID NO: 31324 - RNA, 32 nt, Human
acacacccaagugccccucacaccucgugccu

SEQ ID NO: 31325 - RNA, 32 nt, Human
acacacccacaccaggccucaggauuuugugu

SEQ ID NO: 31326 - RNA, 32 nt, Human
acacacccagagagaagacagagagaaaaucc

SEQ ID NO: 31327 - RNA, 32 nt, Human
acacacccaggccaucguggugauggagugcc

SEQ ID NO: 31328 - RNA, 21 nt, Human
acacacccccacacacacgga

SEQ ID NO: 31329 - RNA, 32 nt, Human
acacaccccuugagaagaagcugcucugggga

SEQ ID NO: 31330 - RNA, 20 nt, Human
acacacccguaguuccagcu

SEQ ID NO: 31331 - RNA, 32 nt, Human
acacacccguaguuccagcuacuugggaggcu

SEQ ID NO: 31332 - RNA, 32 nt, Human
acacacccucugccacacugcucucuuccuuc

SEQ ID NO: 31333 - RNA, 32 nt, Human
acacacccugccacuuucaccaucccauaucc

SEQ ID NO: 31334 - RNA, 20 nt, Human
acacacccugccuuccagcu

SEQ ID NO: 31335 - RNA, 32 nt, Human
acacacccugcguuucucccucccaggcuagg

SEQ ID NO: 31336 - RNA, 32 nt, Human
acacacccugcucugggaucccuugugaggcu

SEQ ID NO: 31337 - RNA, 32 nt, Human
acacacccugggggcagcucucugccagcccc

SEQ ID NO: 31338 - RNA, 25 nt, Human
acacacccuuucucgcacacacaca

SEQ ID NO: 31339 - RNA, 23 nt, Human
acacaccgauguacacacacaga

SEQ ID NO: 31340 - RNA, 25 nt, Human
acacaccgaugugcgcacacacaga

SEQ ID NO: 31341 - RNA, 32 nt, Human
acacaccgcagcaaagagaagacugaaagaca

SEQ ID NO: 31342 - RNA, 25 nt, Human
acacaccgcaggaaagccagggccu

SEQ ID NO: 31343 - RNA, 32 nt, Human
acacaccgguaaucccagcuacucaggaggcu

SEQ ID NO: 31344 - RNA, 21 nt, Human
acacaccguacgauuccagcu

SEQ ID NO: 31345 - RNA, 20 nt, Human
acacaccuaaagucccagcu

SEQ ID NO: 31346 - RNA, 32 nt, Human
acacaccuaaagucccagcuacuugggagguu

SEQ ID NO: 31347 - RNA, 32 nt, Human
acacaccuacucugcuccccucucacacaucu

SEQ ID NO: 31348 - RNA, 32 nt, Human
acacaccuauaaacccagcuacucaggaggcu

SEQ ID NO: 31349 - RNA, 32 nt, Human
acacaccuauaauuccagcuacuugagaggcu

SEQ ID NO: 31350 - RNA, 20 nt, Human
acacaccuauagucccagcu

SEQ ID NO: 31351 - RNA, 32 nt, Human
acacaccuauagucccagcuacuugggaggcu

SEQ ID NO: 31352 - RNA, 32 nt, Human
acacaccuauagucccagcugcccaggaggcu

SEQ ID NO: 31353 - RNA, 32 nt, Human
acacaccuccacuuguuauauaaccuguuugu

SEQ ID NO: 31354 - RNA, 32 nt, Human
acacaccucccugcagccuggcacuggaaacu

SEQ ID NO: 31355 - RNA, 32 nt, Human
acacaccucuacuucuguucuucccucacucc

SEQ ID NO: 31356 - RNA, 32 nt, Human
acacaccugcaaucccagcuacucgggaggcu

SEQ ID NO: 31357 - RNA, 32 nt, Human
acacaccugcagcagcucacacgggaggccau

SEQ ID NO: 31358 - RNA, 32 nt, Human
acacaccugcauucccagcuacuugggaggcu

SEQ ID NO: 31359 - RNA, 32 nt, Human
acacaccugggggcccccacacccaguccuca

SEQ ID NO: 31360 - RNA, 32 nt, Human
acacaccuguaaucccagcuaccggggaggcu

SEQ ID NO: 31361 - RNA, 32 nt, Human
acacaccuguaaucccagcuacucaggaagcu

SEQ ID NO: 31362 - RNA, 32 nt, Human
acacaccuguaaucccagcuacucaggaggcc

SEQ ID NO: 31363 - RNA, 32 nt, Human
acacaccuguaaucccagcuacucaggaggcu

SEQ ID NO: 31364 - RNA, 32 nt, Human
acacaccuguaaucccagcuacucggaggcug

SEQ ID NO: 31365 - RNA, 32 nt, Human
acacaccuguaaucccagcuacucgggaggcu

SEQ ID NO: 31366 - RNA, 32 nt, Human
acacaccuguaaucccagcuacucuggaggcu

SEQ ID NO: 31367 - RNA, 32 nt, Human
acacaccuguaaucccagcuacuugagaggca

SEQ ID NO: 31368 - RNA, 32 nt, Human
acacaccuguaaucccagcuauuugggaggcc

SEQ ID NO: 31369 - RNA, 32 nt, Human
acacaccuguaaucccaguuacucaggaggca

SEQ ID NO: 31370 - RNA, 32 nt, Human
acacaccuguaaucccaguuacuugggaggcu

SEQ ID NO: 31371 - RNA, 32 nt, Human
acacaccuguaaucguagcugaggcaggagaa

SEQ ID NO: 31372 - RNA, 20 nt, Human
acacaccuguaaucucagcu

SEQ ID NO: 31373 - RNA, 32 nt, Human
acacaccuguaaucucagcuacucaggaggcu

SEQ ID NO: 31374 - RNA, 32 nt, Human
acacaccuguaaucucaguuacucaggaggcu

SEQ ID NO: 31375 - RNA, 20 nt, Human
acacaccuguaguaccagcu

SEQ ID NO: 31376 - RNA, 32 nt, Human
acacaccuguaguaccagcuacucuggaggcu

SEQ ID NO: 31377 - RNA, 20 nt, Human
acacaccuguagucccagcu

SEQ ID NO: 31378 - RNA, 32 nt, Human
acacaccuguagucccagcuacaugggaggcu

SEQ ID NO: 31379 - RNA, 32 nt, Human
acacaccuguagucccagcuacucaggaggcu

SEQ ID NO: 31380 - RNA, 32 nt, Human
acacaccuguagucccagcuacucaggagguu

SEQ ID NO: 31381 - RNA, 32 nt, Human
acacaccuguagucccagcuacucagggggcu

SEQ ID NO: 31382 - RNA, 32 nt, Human
acacaccuguagucccagcuacucgaaaggcu

SEQ ID NO: 31383 - RNA, 32 nt, Human
acacaccuguagucccagcuacucgggaagcu

SEQ ID NO: 31384 - RNA, 32 nt, Human
acacaccuguagucccagcuacucgggagccc

SEQ ID NO: 31385 - RNA, 32 nt, Human
acacaccuguagucccagcuacucgggaggcu

SEQ ID NO: 31386 - RNA, 32 nt, Human
acacaccuguagucccagcuacucuagaggcu

SEQ ID NO: 31387 - RNA, 32 nt, Human
acacaccuguagucccagcuacuuaggaggcu

SEQ ID NO: 31388 - RNA, 32 nt, Human
acacaccuguagucccagcuacuugagaggcu

SEQ ID NO: 31389 - RNA, 32 nt, Human
acacaccuguagucccagcuacuuggcaggcu

SEQ ID NO: 31390 - RNA, 32 nt, Human
acacaccuguagucccagcuagucaagaggcu

SEQ ID NO: 31391 - RNA, 32 nt, Human
acacaccuguagucccagcugcucaggaggcu

SEQ ID NO: 31392 - RNA, 32 nt, Human
acacaccuguagucccagcugcuccugaggcu

SEQ ID NO: 31393 - RNA, 21 nt, Human
acacaccuguagucccaggcu

SEQ ID NO: 31394 - RNA, 32 nt, Human
acacaccuguagucccggcuacucgggaggcu

SEQ ID NO: 31395 - RNA, 19 nt, Human
acacaccuguaguccgagc

SEQ ID NO: 31396 - RNA, 20 nt, Human
acacaccuguagucucagcu

SEQ ID NO: 31397 - RNA, 32 nt, Human
acacaccuguaguuccagcuacucaguaggcu

SEQ ID NO: 31398 - RNA, 32 nt, Human
acacaccugugcacacaugccuacaggccagc

SEQ ID NO: 31399 - RNA, 20 nt, Human
acacaccuguggucccagcu

SEQ ID NO: 31400 - RNA, 32 nt, Human
acacaccuguggucccagcuacuagggaggcu

SEQ ID NO: 31401 - RNA, 32 nt, Human
acacaccuguggucccagcuacucgggaggcu

SEQ ID NO: 31402 - RNA, 32 nt, Human
acacaccuguggucccagcugcucgggaggcu

SEQ ID NO: 31403 - RNA, 17 nt, Human
acacaccuuuggccuca

SEQ ID NO: 31404 - RNA, 32 nt, Human
acacacgaauccacagcaauccaucagauaug

SEQ ID NO: 31405 - RNA, 32 nt, Human
acacacgacugcauccuucaucugccaggccc

SEQ ID NO: 31406 - RNA, 32 nt, Human
acacacgagagacagaaggaaagagaggaaga

SEQ ID NO: 31407 - RNA, 21 nt, Human
acacacgaggaggcaggaccu

SEQ ID NO: 31408 - RNA, 32 nt, Human
acacacgcacacacaugcacacacgcacacgc

SEQ ID NO: 31409 - RNA, 32 nt, Human
acacacgcacacacgcacacaaacaugcacac

SEQ ID NO: 31410 - RNA, 32 nt, Human
acacacgccuguaaucccagcugcucgggagg

SEQ ID NO: 31411 - RNA, 32 nt, Human
acacacgccuucagguuugcucagggguucau

SEQ ID NO: 31412 - RNA, 32 nt, Human
acacacgcgggcuggcuuacacaugcucuugc

SEQ ID NO: 31413 - RNA, 32 nt, Human
acacacggaggccagacacaggccgugggacc

SEQ ID NO: 31414 - RNA, 21 nt, Human
acacacggaugcacacacaga

SEQ ID NO: 31415 - RNA, 32 nt, Human
acacacggccccggacggccagaggggaaccg

SEQ ID NO: 31416 - RNA, 32 nt, Human
acacacgggucccuuugcguguuuccaaucuc

SEQ ID NO: 31417 - RNA, 18 nt, Human
acacacgguaauccuugg

SEQ ID NO: 31418 - RNA, 32 nt, Human
acacacgguccuaagagcugggcaccaggaag

SEQ ID NO: 31419 - RNA, 32 nt, Human
acacacgugcgccuucauagcccagccaaggc

SEQ ID NO: 31420 - RNA, 32 nt, Human
acacacgugcuuccucucuugacaucaaggga

SEQ ID NO: 31421 - RNA, 32 nt, Human
acacacgugggugcuggcugggugaggcaagc

SEQ ID NO: 31422 - RNA, 32 nt, Human
acacacguguggucccagcuacucaagaggug

SEQ ID NO: 31423 - RNA, 32 nt, Human
acacacuaaucgaacuaugaacuacaaagcuu

SEQ ID NO: 31424 - RNA, 32 nt, Human
acacacuagcauauaggaaauauuucugcacu

SEQ ID NO: 31425 - RNA, 32 nt, Human
acacacuaugaguguaaugaaagggggauuaa

SEQ ID NO: 31426 - RNA, 32 nt, Human
acacacucaagucacugccgcccagggcuggc

SEQ ID NO: 31427 - RNA, 32 nt, Human
acacacucacacacacaggcauacucacacac

SEQ ID NO: 31428 - RNA, 32 nt, Human
acacacucacacacauccacacacaagcauau

SEQ ID NO: 31429 - RNA, 32 nt, Human
acacacucacacacccuguuuuucuuacacac

SEQ ID NO: 31430 - RNA, 32 nt, Human
acacacucacacucacacacacucacacacac

SEQ ID NO: 31431 - RNA, 32 nt, Human
acacacucacauaggcaggugcacguuaguca

SEQ ID NO: 31432 - RNA, 32 nt, Human
acacacucaggaagccuugucuaccuuucccu

SEQ ID NO: 31433 - RNA, 32 nt, Human
acacacucauaagaagacaccuauauacauuu

SEQ ID NO: 31434 - RNA, 21 nt, Human
acacacucaugcacacacaca

SEQ ID NO: 31435 - RNA, 25 nt, Human
acacacucaugcucacacacacaga

SEQ ID NO: 31436 - RNA, 32 nt, Human
acacacucaugcuuucacauacauacacucac

SEQ ID NO: 31437 - RNA, 32 nt, Human
acacacuccaacaauccaaaggggcauguugc

SEQ ID NO: 31438 - RNA, 32 nt, Human
acacacuccaucagcuuaggggcugcugaccu

SEQ ID NO: 31439 - RNA, 32 nt, Human
acacacucccagcuggcccaguuugugcauga

SEQ ID NO: 31440 - RNA, 32 nt, Human
acacacuccccagggauuugugcauguccuuc

SEQ ID NO: 31441 - RNA, 32 nt, Human
acacacuccuacugaaaauuagcccuccagca

SEQ ID NO: 31442 - RNA, 32 nt, Human
acacacuccuauaauccuagcacuuugggagg

SEQ ID NO: 31443 - RNA, 32 nt, Human
acacacuccuuuuuccccuccuaguuccaaau

SEQ ID NO: 31444 - RNA, 32 nt, Human
acacacucgcucaugcucacacugccccugcu

SEQ ID NO: 31445 - RNA, 20 nt, Human
acacacucggaccccccggg

SEQ ID NO: 31446 - RNA, 23 nt, Human
acacacucucacacucgcccaga

SEQ ID NO: 31447 - RNA, 25 nt, Human
acacacucucacauguacacacaca

SEQ ID NO: 31448 - RNA, 23 nt, Human
acacacucucauucacacacaca

SEQ ID NO: 31449 - RNA, 32 nt, Human
acacacucugagcacauuaucugugauucuuu

SEQ ID NO: 31450 - RNA, 32 nt, Human
acacacucuguagcuuuucuaaaacaguacau

SEQ ID NO: 31451 - RNA, 32 nt, Human
acacacucuugggcugaccuuuauuuuaucaa

SEQ ID NO: 31452 - RNA, 32 nt, Human
acacacugacaccucccgaaguggaccacaag

SEQ ID NO: 31453 - RNA, 32 nt, Human
acacacugcaugcacacacauacaccacagcc

SEQ ID NO: 31454 - RNA, 32 nt, Human
acacacugcccggcucagugcagugccccgcg

SEQ ID NO: 31455 - RNA, 32 nt, Human
acacacugccgcuucaaucuccugggcucaaa

SEQ ID NO: 31456 - RNA, 32 nt, Human
acacacugccuuuggggcuccugggcucauuu

SEQ ID NO: 31457 - RNA, 32 nt, Human
acacacugcuaugcaaaccccaaaggguuggc

SEQ ID NO: 31458 - RNA, 32 nt, Human
acacacuggaaaaaccaccaacaugguccagc

SEQ ID NO: 31459 - RNA, 32 nt, Human
acacacuggacaccaucaccucuuuggaacug

SEQ ID NO: 31460 - RNA, 32 nt, Human
acacacuggaggcucuugcugcucugagccac

SEQ ID NO: 31461 - RNA, 21 nt, Human
acacacuggcacacacacaua

SEQ ID NO: 31462 - RNA, 32 nt, Human
acacacugucauacucacacacucccugacau

SEQ ID NO: 31463 - RNA, 32 nt, Human
acacacugucuuuaaaucuaggccuguauccg

SEQ ID NO: 31464 - RNA, 32 nt, Human
acacacuguggggaggaggaggaagaagagga

SEQ ID NO: 31465 - RNA, 32 nt, Human
acacacuuaauucaaagacauauggguacuua

SEQ ID NO: 31466 - RNA, 32 nt, Human
acacacuucccaaaacguccccagccacagcu

SEQ ID NO: 31467 - RNA, 32 nt, Human
acacacuucugaucuugggggccaguggaguc

SEQ ID NO: 31468 - RNA, 21 nt, Human
acacacuugaguagcccaggc

SEQ ID NO: 31469 - RNA, 32 nt, Human
acacacuugcaccauggggagccaccccaccc

SEQ ID NO: 31470 - RNA, 32 nt, Human
acacacuugcuacaguucgauggggagggugg

SEQ ID NO: 31471 - RNA, 32 nt, Human
acacacuuguagccccagcuacuagggaggcu

SEQ ID NO: 31472 - RNA, 32 nt, Human
acacacuuguaguccgagcuacucgggaggcu

SEQ ID NO: 31473 - RNA, 20 nt, Human
acacacuuuuagcucaguua

SEQ ID NO: 31474 - RNA, 32 nt, Human
acacagaaaacaaaaacccaaccaaaccaagc

SEQ ID NO: 31475 - RNA, 32 nt, Human
acacagaaaauguuaaggauuucaagagcccu

SEQ ID NO: 31476 - RNA, 32 nt, Human
acacagaaagugagaguggggagagagguagu

SEQ ID NO: 31477 - RNA, 32 nt, Human
acacagaacacuguuccaucucagggauugcu

SEQ ID NO: 31478 - RNA, 31 nt, Human
acacagaagagacccugccacaggaggagug

SEQ ID NO: 31479 - RNA, 32 nt, Human
acacagaagcagcccugcccagccuggucauu

SEQ ID NO: 31480 - RNA, 32 nt, Human
acacagaaggcagacugggugaggagaccuag

SEQ ID NO: 31481 - RNA, 32 nt, Human
acacagaagguggagguugcagugagccaagc

SEQ ID NO: 31482 - RNA, 32 nt, Human
acacagaauaugggaauggcagcugcugaacu

SEQ ID NO: 31483 - RNA, 32 nt, Human
acacagaaugucuggagagggcagcaggccuc

SEQ ID NO: 31484 - RNA, 32 nt, Human
acacagacacacaagcagacacacacauauau

SEQ ID NO: 31485 - RNA, 32 nt, Human
acacagacaugcuggcagugagagugaaaggc

SEQ ID NO: 31486 - RNA, 32 nt, Human
acacagacucacccuccuucugagaccuugau

SEQ ID NO: 31487 - RNA, 32 nt, Human
acacagagaccuuugcuuacguuuuccugcug

SEQ ID NO: 31488 - RNA, 32 nt, Human
acacagagagaaaggcuaaaguucucuggagg

SEQ ID NO: 31489 - RNA, 32 nt, Human
acacagagagggacaaacacagccaugaaccc

SEQ ID NO: 31490 - RNA, 32 nt, Human
acacagagauccccuaagguccuggcccaggc

SEQ ID NO: 31491 - RNA, 32 nt, Human
acacagagauguaagaggcaggcuuuaauugc

SEQ ID NO: 31492 - RNA, 32 nt, Human
acacagagcaccagcucccuccugccugaaga

SEQ ID NO: 31493 - RNA, 32 nt, Human
acacagagcccccuagauggugggggaauggc

SEQ ID NO: 31494 - RNA, 32 nt, Human
acacagagccuucugcaugccuguccucccuc

SEQ ID NO: 31495 - RNA, 32 nt, Human
acacagagcuggcugcugugcccacccucagg

SEQ ID NO: 31496 - RNA, 32 nt, Human
acacagaggaagcacuacagccucacagacug

SEQ ID NO: 31497 - RNA, 32 nt, Human
acacagaggagaagauccugugaagagggagg

SEQ ID NO: 31498 - RNA, 32 nt, Human
acacagaggcucagagagguuuagucauuugc

SEQ ID NO: 31499 - RNA, 32 nt, Human
acacagaggggcccuggacggaggcauccacu

SEQ ID NO: 31500 - RNA, 32 nt, Human
acacagaggugcacuggucugcauuugggggc

SEQ ID NO: 31501 - RNA, 32 nt, Human
acacagaggugcaggcaccaggauucuccacu

SEQ ID NO: 31502 - RNA, 32 nt, Human
acacagagguggccaugaaaugguuaauagca

SEQ ID NO: 31503 - RNA, 32 nt, Human
acacagagugggagggagacugaugcaggccu

SEQ ID NO: 31504 - RNA, 32 nt, Human
acacagaguuaaguaauuugcccagggucaca

SEQ ID NO: 31505 - RNA, 32 nt, Human
acacagaguuggcagcacaaagggccugggcc

SEQ ID NO: 31506 - RNA, 32 nt, Human
acacagaguuugagcagcaauaaggcuggguc

SEQ ID NO: 31507 - RNA, 32 nt, Human
acacagauaauauccacauacacauucacugg

SEQ ID NO: 31508 - RNA, 32 nt, Human
acacagaugacccagacccaaagagccuggca

SEQ ID NO: 31509 - RNA, 32 nt, Human
acacagcaaaaugccagcagcgugccggaccc

SEQ ID NO: 31510 - RNA, 32 nt, Human
acacagcaaaggagggaguggaagagagauga

SEQ ID NO: 31511 - RNA, 32 nt, Human
acacagcaaggacugcuguguguggguguguu

SEQ ID NO: 31512 - RNA, 32 nt, Human
acacagcaagggugggagacagcugggcacaa

SEQ ID NO: 31513 - RNA, 19 nt, Human
acacagcaagugcccuuga

SEQ ID NO: 31514 - RNA, 32 nt, Human
acacagcaauacaguccucuugaggcacucaa

SEQ ID NO: 31515 - RNA, 32 nt, Human
acacagcacagagacccugggcccagcccaca

SEQ ID NO: 31516 - RNA, 32 nt, Human
acacagcacaugcacacaggugcacagaccac

SEQ ID NO: 31517 - RNA, 32 nt, Human
acacagcaccucugccaggccuaggagaggac

SEQ ID NO: 31518 - RNA, 32 nt, Human
acacagcagaggaauagcucagccugaacagu

SEQ ID NO: 31519 - RNA, 32 nt, Human
acacagcagauaccuggugagcucagauaguc

SEQ ID NO: 31520 - RNA, 32 nt, Human
acacagcagcaggaugaagccaaccugcagua

SEQ ID NO: 31521 - RNA, 32 nt, Human
acacagcagcggccaccauggccacgccuggg

SEQ ID NO: 31522 - RNA, 22 nt, Human
acacagcagcuccaaccuggag

SEQ ID NO: 31523 - RNA, 32 nt, Human
acacagcaggagccaugaauguucuuugggaa

SEQ ID NO: 31524 - RNA, 32 nt, Human
acacagcagggacauaguggggcugggcaggg

SEQ ID NO: 31525 - RNA, 32 nt, Human
acacagcagggacccaggcaguggggcuguua

SEQ ID NO: 31526 - RNA, 23 nt, Human
acacagcagugucuagagucagu

SEQ ID NO: 31527 - RNA, 26 nt, Human
acacagcaucacaucacacacacaga

SEQ ID NO: 31528 - RNA, 32 nt, Human
acacagccaaccuagccugugcagccuccugg

SEQ ID NO: 31529 - RNA, 32 nt, Human
acacagccaagugcauccgagcagcgcaggau

SEQ ID NO: 31530 - RNA, 32 nt, Human
acacagccacaggugaauggccagcagguggg

SEQ ID NO: 31531 - RNA, 32 nt, Human
acacagccacaucuuccuagaccuaagaguaa

SEQ ID NO: 31532 - RNA, 32 nt, Human
acacagccacgcccccugauucuggaacuccc

SEQ ID NO: 31533 - RNA, 32 nt, Human
acacagccagaacauaguggagugggaacucc

SEQ ID NO: 31534 - RNA, 32 nt, Human
acacagccaguaugugguggcugcaguuggcu

SEQ ID NO: 31535 - RNA, 32 nt, Human
acacagccauccaggcugugcugucccuguac

SEQ ID NO: 31536 - RNA, 32 nt, Human
acacagccauccucaaagugcuggucgaggca

SEQ ID NO: 31537 - RNA, 32 nt, Human
acacagccauuauugccacuugcucagucguc

SEQ ID NO: 31538 - RNA, 32 nt, Human
acacagcccacaucugucacugaaggaggugg

SEQ ID NO: 31539 - RNA, 32 nt, Human
acacagcccagaggaguucucauugguccuau

SEQ ID NO: 31540 - RNA, 18 nt, Human
acacagccccacccuugg

SEQ ID NO: 31541 - RNA, 32 nt, Human
acacagcccccacuccacaaguacucccagca

SEQ ID NO: 31542 - RNA, 32 nt, Human
acacagccccuggauggggaggggguaggagg

SEQ ID NO: 31543 - RNA, 32 nt, Human
acacagccccuuucacacucuguccuccuauc

SEQ ID NO: 31544 - RNA, 32 nt, Human
acacagcccgagagaugggcgcaaggggugcu

SEQ ID NO: 31545 - RNA, 32 nt, Human
acacagcccgggccacugucaggaugagaccu

SEQ ID NO: 31546 - RNA, 32 nt, Human
acacagcccucaccccagcacagccagcaagg

SEQ ID NO: 31547 - RNA, 20 nt, Human
acacagccggcugcccuuga

SEQ ID NO: 31548 - RNA, 32 nt, Human
acacagccuagacguaguagccugggcuucca

SEQ ID NO: 31549 - RNA, 32 nt, Human
acacagccuagcugcccccagggagcucugcu

SEQ ID NO: 31550 - RNA, 32 nt, Human
acacagccugcacccacccccacaucugggcc

SEQ ID NO: 31551 - RNA, 20 nt, Human
acacagccuuccuucugcuc

SEQ ID NO: 31552 - RNA, 32 nt, Human
acacagccuuuccaauccucuggaacauauuc

SEQ ID NO: 31553 - RNA, 32 nt, Human
acacagcgcacacccagacccuccaccaggcu

SEQ ID NO: 31554 - RNA, 32 nt, Human
acacagcgccuccagugggagugcaguuggau

SEQ ID NO: 31555 - RNA, 32 nt, Human
acacagcuagcuccucauccuaccugguuucu

SEQ ID NO: 31556 - RNA, 32 nt, Human
acacagcucacugcagccuugauuucccgggc

SEQ ID NO: 31557 - RNA, 32 nt, Human
acacagcucccaggaaccuccacgcccauggc

SEQ ID NO: 31558 - RNA, 32 nt, Human
acacagcuccccagacuggaggcuggucagag

SEQ ID NO: 31559 - RNA, 32 nt, Human
acacagcucccuauugcugcuaauucccccuc

SEQ ID NO: 31560 - RNA, 32 nt, Human
acacagcucccuggccccugcccccagccccu

SEQ ID NO: 31561 - RNA, 32 nt, Human
acacagcucuucauuccauugacuuagaggca

SEQ ID NO: 31562 - RNA, 32 nt, Human
acacagcugcauccuucugcccucccccagaa

SEQ ID NO: 31563 - RNA, 32 nt, Human
acacagcugccuggcuggggaggcugugcugu

SEQ ID NO: 31564 - RNA, 32 nt, Human
acacagcugcuugcucaggggccgggacagca

SEQ ID NO: 31565 - RNA, 32 nt, Human
acacagcugggggaguccagaccagggcaggg

SEQ ID NO: 31566 - RNA, 32 nt, Human
acacagcuguccauuaugcucuuuauggugag

SEQ ID NO: 31567 - RNA, 32 nt, Human
acacagcuugucucuugccugccacuguguga

SEQ ID NO: 31568 - RNA, 32 nt, Human
acacaggaaagacaaagcaggagcgugcacgc

SEQ ID NO: 31569 - RNA, 32 nt, Human
acacaggaaauggaaaagcaggcacauuauca

SEQ ID NO: 31570 - RNA, 32 nt, Human
acacaggaaauggagaaacauagacaaccuac

SEQ ID NO: 31571 - RNA, 32 nt, Human
acacaggaauuuacauuuucaaagucauuuuu

SEQ ID NO: 31572 - RNA, 32 nt, Human
acacaggacaagggagagagagccaaacaggc

SEQ ID NO: 31573 - RNA, 32 nt, Human
acacaggacagaaaacaugcaaauauacugaa

SEQ ID NO: 31574 - RNA, 32 nt, Human
acacaggacaggccugcugacaaggcugaguc

SEQ ID NO: 31575 - RNA, 32 nt, Human
acacaggacgggaugggggaggagaacccagg

SEQ ID NO: 31576 - RNA, 32 nt, Human
acacaggagcccgucucccagggcagacacgg

SEQ ID NO: 31577 - RNA, 32 nt, Human
acacaggaggaaacugacacacuuuucuuaaa

SEQ ID NO: 31578 - RNA, 32 nt, Human
acacaggaggaaccccuucucugguugagcug

SEQ ID NO: 31579 - RNA, 32 nt, Human
acacaggaggagggaggagcugguagggagau

SEQ ID NO: 31580 - RNA, 32 nt, Human
acacaggaggcagagguugcagcgagcugaga

SEQ ID NO: 31581 - RNA, 32 nt, Human
acacaggaggcagagguugcagugagccgaga

SEQ ID NO: 31582 - RNA, 26 nt, Human
acacaggaggcccauccagagugagu

SEQ ID NO: 31583 - RNA, 32 nt, Human
acacaggaggcugaggcacgagaaucacuuga

SEQ ID NO: 31584 - RNA, 32 nt, Human
acacaggaggcugaggcaggagaaucacuuga

SEQ ID NO: 31585 - RNA, 32 nt, Human
acacaggauauuauaccaggaggcaggaauca

SEQ ID NO: 31586 - RNA, 32 nt, Human
acacaggaugaggaagauuaaggauaaucaau

SEQ ID NO: 31587 - RNA, 32 nt, Human
acacaggcaagaggagugggacaggggaguaa

SEQ ID NO: 31588 - RNA, 32 nt, Human
acacaggcacuuccgcucggguugcaugcucu

SEQ ID NO: 31589 - RNA, 32 nt, Human
acacaggcauuggcaugaccaaagcugaucuc

SEQ ID NO: 31590 - RNA, 32 nt, Human
acacaggccacggaaaccacagggccagcguc

SEQ ID NO: 31591 - RNA, 32 nt, Human
acacaggcccagcaaacacaggcugcacccag

SEQ ID NO: 31592 - RNA, 32 nt, Human
acacaggccugguagucagguggcucuaaacc

SEQ ID NO: 31593 - RNA, 32 nt, Human
acacaggcgcugucucuccagagccauccuuc

SEQ ID NO: 31594 - RNA, 32 nt, Human
acacaggcugaugaccaccuugcccaccuucu

SEQ ID NO: 31595 - RNA, 32 nt, Human
acacaggcuguggugggcucugcccugacugc

SEQ ID NO: 31596 - RNA, 32 nt, Human
acacagggaggcuguagccaggaaacccucuu

SEQ ID NO: 31597 - RNA, 21 nt, Human
acacagggauuuuuaugggaa

SEQ ID NO: 31598 - RNA, 32 nt, Human
acacaggggaggcaggggaagaggcaggaggg

SEQ ID NO: 31599 - RNA, 32 nt, Human
acacaggguaaccgugggcaugacuugggccg

SEQ ID NO: 31600 - RNA, 32 nt, Human
acacagggucaagaacaugcugggcagagcuu

SEQ ID NO: 31601 - RNA, 32 nt, Human
acacagggucagguccagcaggaaagaaugcu

SEQ ID NO: 31602 - RNA, 32 nt, Human
acacagggucuugggacugggguuucggauug

SEQ ID NO: 31603 - RNA, 32 nt, Human
acacaggucacugcucucuaggcggacacacc

SEQ ID NO: 31604 - RNA, 32 nt, Human
acacaggugugcuuugaaaaauggcaauuaag

SEQ ID NO: 31605 - RNA, 32 nt, Human
acacagguugcagguuagcaggagaacaggca

SEQ ID NO: 31606 - RNA, 32 nt, Human
acacaguaaacaccugccaaccccuguacucc

SEQ ID NO: 31607 - RNA, 32 nt, Human
acacaguaccugaauccagcugugcuguguuu

SEQ ID NO: 31608 - RNA, 32 nt, Human
acacaguagcuggucagggcugaguacagucc

SEQ ID NO: 31609 - RNA, 32 nt, Human
acacaguauaguauuuaagugccaaauaucag

SEQ ID NO: 31610 - RNA, 32 nt, Human
acacagucccuggucugcagucagagccacug

SEQ ID NO: 31611 - RNA, 32 nt, Human
acacaguccgaguggaaugggaagggaauggu

SEQ ID NO: 31612 - RNA, 19 nt, Human
acacaguccuccaaaaaua

SEQ ID NO: 31613 - RNA, 32 nt, Human
acacaguccucugcugucuccccacuaggauc

SEQ ID NO: 31614 - RNA, 32 nt, Human
acacaguccuggaggcagagaugcaguuaccu

SEQ ID NO: 31615 - RNA, 32 nt, Human
acacagucucuaugagcuucacuuaugcagcc

SEQ ID NO: 31616 - RNA, 32 nt, Human
acacagucucugugggaaaggcagacagguaa

SEQ ID NO: 31617 - RNA, 32 nt, Human
acacagugaaaccccuucucuacuaaaaauac

SEQ ID NO: 31618 - RNA, 32 nt, Human
acacagugacugugcagaaugagaggagagag

SEQ ID NO: 31619 - RNA, 32 nt, Human
acacagugccuguaaaucucauuuguauuuuc

SEQ ID NO: 31620 - RNA, 22 nt, Human
acacagugcuucccagagugag

SEQ ID NO: 31621 - RNA, 32 nt, Human
acacaguggggaagacacagggcuaagacugu

SEQ ID NO: 31622 - RNA, 32 nt, Human
acacaguguucugcagagccugagcugcugcu

SEQ ID NO: 31623 - RNA, 32 nt, Human
acacaguuaccaggaaccgacccccaguggga

SEQ ID NO: 31624 - RNA, 32 nt, Human
acacaguugagggugacaugcacagaacugga

SEQ ID NO: 31625 - RNA, 32 nt, Human
acacaguuugugccccuuucuucaagucucug

SEQ ID NO: 31626 - RNA, 32 nt, Human
acacaguuuugucuucguagguugugaugaua

SEQ ID NO: 31627 - RNA, 32 nt, Human
acacauaacugcauuggaugugagaguaacgu

SEQ ID NO: 31628 - RNA, 32 nt, Human
acacauaauuacugggugccuacagcaccuag

SEQ ID NO: 31629 - RNA, 32 nt, Human
acacauaauucaggaagcagcuuuccccaugu

SEQ ID NO: 31630 - RNA, 32 nt, Human
acacauacaaaaccuuuaaauuuugggaucug

SEQ ID NO: 31631 - RNA, 32 nt, Human
acacauacacacacaaacauacauguauguau

SEQ ID NO: 31632 - RNA, 32 nt, Human
acacauacacacacuaacacacauaaguuaca

SEQ ID NO: 31633 - RNA, 21 nt, Human
acacauacaccaugcccuuga

SEQ ID NO: 31634 - RNA, 32 nt, Human
acacauacagccgcucaagccgcaggaugcgc

SEQ ID NO: 31635 - RNA, 19 nt, Human
acacauacauacacacaca

SEQ ID NO: 31636 - RNA, 32 nt, Human
acacauacauuucucucaccccuuaaugcauu

SEQ ID NO: 31637 - RNA, 32 nt, Human
acacauaccuguaaucccagcuacuuuggugg

SEQ ID NO: 31638 - RNA, 32 nt, Human
acacauacucccacauacuuacccacauguac

SEQ ID NO: 31639 - RNA, 32 nt, Human
acacauagccugcugugaugagcuuccagguc

SEQ ID NO: 31640 - RNA, 21 nt, Human
acacauaggcccacacacaga

SEQ ID NO: 31641 - RNA, 32 nt, Human
acacauaguagguccacaagcaaaugguuuuc

SEQ ID NO: 31642 - RNA, 21 nt, Human
acacauaguauugaucagaaa

SEQ ID NO: 31643 - RNA, 18 nt, Human
acacauagucauucuuga

SEQ ID NO: 31644 - RNA, 26 nt, Human
acacauauaaacaucacacacacaga

SEQ ID NO: 31645 - RNA, 32 nt, Human
acacauauacaaucaucucccaccucccaacg

SEQ ID NO: 31646 - RNA, 32 nt, Human
acacauauaguguauauaguguaugugugaug

SEQ ID NO: 31647 - RNA, 21 nt, Human
acacauauauauguauauaua

SEQ ID NO: 31648 - RNA, 32 nt, Human
acacauauccggaaacugcagcugcuugaaug

SEQ ID NO: 31649 - RNA, 32 nt, Human
acacauaugcucccaacuaagagaguacuggc

SEQ ID NO: 31650 - RNA, 28 nt, Human
acacauauuaaaacaaauuuuacacagc

SEQ ID NO: 31651 - RNA, 32 nt, Human
acacaucacacagaauuggagugcuguccuuc

SEQ ID NO: 31652 - RNA, 32 nt, Human
acacaucacacagaugccaggagagcugggcc

SEQ ID NO: 31653 - RNA, 31 nt, Human
acacaucacagcugaaaacaugaagagcagu

SEQ ID NO: 31654 - RNA, 32 nt, Human
acacaucacaggcugauuuccacaggcuucuu

SEQ ID NO: 31655 - RNA, 32 nt, Human
acacaucaccuugcaaaugacacuuugccguc

SEQ ID NO: 31656 - RNA, 32 nt, Human
acacaucagcuagcaaaagaaguaacaagagu

SEQ ID NO: 31657 - RNA, 32 nt, Human
acacaucaggugucagaacuugcuugaaggga

SEQ ID NO: 31658 - RNA, 32 nt, Human
acacaucaguaagggccuggagauguguaaag

SEQ ID NO: 31659 - RNA, 32 nt, Human
acacaucauucuggcuggagagugcaaugugu

SEQ ID NO: 31660 - RNA, 32 nt, Human
acacaucauuguagccacacaucauugcuggg

SEQ ID NO: 31661 - RNA, 32 nt, Human
acacauccacacacaagcauaugcauacacac

SEQ ID NO: 31662 - RNA, 31 nt, Human
acacauccacuucucccuccagagcccggcc

SEQ ID NO: 31663 - RNA, 32 nt, Human
acacauccauguucacuguaacaaacugaaua

SEQ ID NO: 31664 - RNA, 32 nt, Human
acacauccccagccagggagcuugccacacuc

SEQ ID NO: 31665 - RNA, 32 nt, Human
acacauccccgguauauccugccugcaguucu

SEQ ID NO: 31666 - RNA, 19 nt, Human
acacaucccuguaguccca

SEQ ID NO: 31667 - RNA, 32 nt, Human
acacauccuagaaggcuaacacgugguuuucu

SEQ ID NO: 31668 - RNA, 27 nt, Human
acacauccucaauaaaaccuguuguau

SEQ ID NO: 31669 - RNA, 32 nt, Human
acacauccugguauccaccacauucggcuuuu

SEQ ID NO: 31670 - RNA, 32 nt, Human
acacauccuuucuccccugggcuuguaagaag

SEQ ID NO: 31671 - RNA, 32 nt, Human
acacaucuaccuuuggccccugguuuuggaaa

SEQ ID NO: 31672 - RNA, 32 nt, Human
acacaucuauaauccccaccccauggcugaca

SEQ ID NO: 31673 - RNA, 32 nt, Human
acacaucuauagucccagcuucucgggaggcu

SEQ ID NO: 31674 - RNA, 32 nt, Human
acacaucucuagucccagcuacucgggaggcu

SEQ ID NO: 31675 - RNA, 32 nt, Human
acacaucugcuccugcucucucuccuccagcg

SEQ ID NO: 31676 - RNA, 32 nt, Human
acacaucuggaaaugcagcaagauggagaaaa

SEQ ID NO: 31677 - RNA, 32 nt, Human
acacaucuguaauccuagcuacuuggcaggcu

SEQ ID NO: 31678 - RNA, 32 nt, Human
acacaucuguagucccagcuacucuggaggcu

SEQ ID NO: 31679 - RNA, 32 nt, Human
acacaucuguauuccagccugggcaauagagc

SEQ ID NO: 31680 - RNA, 32 nt, Human
acacaucuugcccuuccaugaaugaccccuca

SEQ ID NO: 31681 - RNA, 32 nt, Human
acacaugaaguuaccauaaagagggugguucc

SEQ ID NO: 31682 - RNA, 18 nt, Human
acacaugacuaccuuuga

SEQ ID NO: 31683 - RNA, 32 nt, Human
acacaugagaccccaccucccucccugccugc

SEQ ID NO: 31684 - RNA, 32 nt, Human
acacaugagugcaguggcauggaugagugugg

SEQ ID NO: 31685 - RNA, 32 nt, Human
acacaugaucauggcacagaagauaggagguu

SEQ ID NO: 31686 - RNA, 32 nt, Human
acacaugcacacacaaagugcauaggccacac

SEQ ID NO: 31687 - RNA, 32 nt, Human
acacaugcacacacaaauaugcacagaacaca

SEQ ID NO: 31688 - RNA, 32 nt, Human
acacaugcacacacacaugcacacauauaugc

SEQ ID NO: 31689 - RNA, 32 nt, Human
acacaugcacacacagugaauguuuuaaguua

SEQ ID NO: 31690 - RNA, 32 nt, Human
acacaugcacacacauauacacacaugugcca

SEQ ID NO: 31691 - RNA, 32 nt, Human
acacaugcacacacauaugcacacacaugugc

SEQ ID NO: 31692 - RNA, 32 nt, Human
acacaugcacacacgcacacacaugcacacac

SEQ ID NO: 31693 - RNA, 32 nt, Human
acacaugcacacacgcacacgcaugcacacac

SEQ ID NO: 31694 - RNA, 32 nt, Human
acacaugcacacacguacacaaugcacacaug

SEQ ID NO: 31695 - RNA, 32 nt, Human
acacaugcacacacguguagcucacacacagu

SEQ ID NO: 31696 - RNA, 32 nt, Human
acacaugcacacagaccacauagcacacaugu

SEQ ID NO: 31697 - RNA, 32 nt, Human
acacaugcacacauacacgcacaugcacacau

SEQ ID NO: 31698 - RNA, 32 nt, Human
acacaugcacacauauaugcacaggcacacac

SEQ ID NO: 31699 - RNA, 32 nt, Human
acacaugcacacucagacacauggucacacac

SEQ ID NO: 31700 - RNA, 32 nt, Human
acacaugcaccgcacacauauccaugcacaca

SEQ ID NO: 31701 - RNA, 18 nt, Human
acacaugcagaccccugg

SEQ ID NO: 31702 - RNA, 18 nt, Human
acacaugcagccccugga

SEQ ID NO: 31703 - RNA, 18 nt, Human
acacaugcauauacauga

SEQ ID NO: 31704 - RNA, 18 nt, Human
acacaugcaugaaccuug

SEQ ID NO: 31705 - RNA, 18 nt, Human
acacaugcauggcauuug

SEQ ID NO: 31706 - RNA, 18 nt, Human
acacaugcauggucauga

SEQ ID NO: 31707 - RNA, 18 nt, Human
acacaugcauguaucuuu

SEQ ID NO: 31708 - RNA, 18 nt, Human
acacaugcauucaugugg

SEQ ID NO: 31709 - RNA, 32 nt, Human
acacaugccauccaagugaugauggcuuuucc

SEQ ID NO: 31710 - RNA, 20 nt, Human
acacaugcccaggcccuuga

SEQ ID NO: 31711 - RNA, 18 nt, Human
acacaugccuauuucuga

SEQ ID NO: 31712 - RNA, 18 nt, Human
acacaugcguacacauga

SEQ ID NO: 31713 - RNA, 18 nt, Human
acacaugcguguaucuug

SEQ ID NO: 31714 - RNA, 29 nt, Human
acacaugcuacugcugcugcuacugcugc

SEQ ID NO: 31715 - RNA, 32 nt, Human
acacaugcucacaaccauccuggucauucucg

SEQ ID NO: 31716 - RNA, 32 nt, Human
acacaugcucacugccagcuccuguccugagu

SEQ ID NO: 31717 - RNA, 32 nt, Human
acacaugcucacuggugaacagugucuguggg

SEQ ID NO: 31718 - RNA, 18 nt, Human
acacaugcugcagcuuga

SEQ ID NO: 31719 - RNA, 18 nt, Human
acacaugcuuguaucuuu

SEQ ID NO: 31720 - RNA, 32 nt, Human
acacauggagagaaggagaggaacaacagaca

SEQ ID NO: 31721 - RNA, 32 nt, Human
acacauggagcccagcucucuggcugucuuac

SEQ ID NO: 31722 - RNA, 32 nt, Human
acacauggccaccuuggcacaaaagccuugug

SEQ ID NO: 31723 - RNA, 32 nt, Human
acacauggccugauuguuggcaaaggcaucau

SEQ ID NO: 31724 - RNA, 32 nt, Human
acacauggcucugccaaauccuuccagccuuu

SEQ ID NO: 31725 - RNA, 32 nt, Human
acacauggggaucagagcagacuucuccacua

SEQ ID NO: 31726 - RNA, 32 nt, Human
acacaugguccgugccaugucaccuccauagg

SEQ ID NO: 31727 - RNA, 18 nt, Human
acacauguacagcccuug

SEQ ID NO: 31728 - RNA, 23 nt, Human
acacauguacauauguguacaca

SEQ ID NO: 31729 - RNA, 32 nt, Human
acacauguagacacaaacauauacacagacgu

SEQ ID NO: 31730 - RNA, 18 nt, Human
acacauguauccccugga

SEQ ID NO: 31731 - RNA, 32 nt, Human
acacauguccaagaagcccaggaaaggcucca

SEQ ID NO: 31732 - RNA, 32 nt, Human
acacaugugccugcgugggcucugccuugucu

SEQ ID NO: 31733 - RNA, 32 nt, Human
acacaugugccuugccugacagaauugcuuag

SEQ ID NO: 31734 - RNA, 32 nt, Human
acacauguggaucaggcccaggaagggcacag

SEQ ID NO: 31735 - RNA, 32 nt, Human
acacauguggucuuaagacuaaccuuuguucu

SEQ ID NO: 31736 - RNA, 32 nt, Human
acacaugugugggccaaguagacagcaccagc

SEQ ID NO: 31737 - RNA, 32 nt, Human
acacaugugugggccaaguagagagcaccggc

SEQ ID NO: 31738 - RNA, 32 nt, Human
acacaugugugggccaaguagagagcgccggc

SEQ ID NO: 31739 - RNA, 32 nt, Human
acacauguucacagcucacacgcccucuccau

SEQ ID NO: 31740 - RNA, 32 nt, Human
acacauguucugcccucugaggcagucaguga

SEQ ID NO: 31741 - RNA, 22 nt, Human
acacauuagcucuggagugagu

SEQ ID NO: 31742 - RNA, 32 nt, Human
acacauuauacuccaagucccugccgggcucc

SEQ ID NO: 31743 - RNA, 32 nt, Human
acacauucaagcuuuaaaaucugucaguauuc

SEQ ID NO: 31744 - RNA, 32 nt, Human
acacauucaaugcccucccuaucaaaauacca

SEQ ID NO: 31745 - RNA, 32 nt, Human
acacauuccagaaccacauuuucuaaccacag

SEQ ID NO: 31746 - RNA, 32 nt, Human
acacauuccaggaccagaagcauuucaccuuu

SEQ ID NO: 31747 - RNA, 32 nt, Human
acacauuccugucugaucaggcucccucccuc

SEQ ID NO: 31748 - RNA, 32 nt, Human
acacauucucagaauaaacgaugccucucucu

SEQ ID NO: 31749 - RNA, 32 nt, Human
acacauugcaggucagcuucuuccucugccca

SEQ ID NO: 31750 - RNA, 32 nt, Human
acacauugccacggaaacauacagaggaugcc

SEQ ID NO: 31751 - RNA, 32 nt, Human
acacauugcuaccucagugcuccuggaaacuu

SEQ ID NO: 31752 - RNA, 32 nt, Human
acacauuggagcccaugguagcauccucagca

SEQ ID NO: 31753 - RNA, 32 nt, Human
acacauuuaccuccccugccaaguuauggucu

SEQ ID NO: 31754 - RNA, 32 nt, Human
acacauuuacuaccuauguaacaaaccugcac

SEQ ID NO: 31755 - RNA, 32 nt, Human
acacauuuacugcaucuuauuucuggaaaccu

SEQ ID NO: 31756 - RNA, 20 nt, Human
acacauuuauaaacccuuga

SEQ ID NO: 31757 - RNA, 18 nt, Human
acacauuuauaaucucau

SEQ ID NO: 31758 - RNA, 32 nt, Human
acacauuucuacucugagaucuucauggcaca

SEQ ID NO: 31759 - RNA, 32 nt, Human
acacauuugagaagaugagauuaagguuagga

SEQ ID NO: 31760 - RNA, 32 nt, Human
acacauuugccugcuucucucuugccuaauuc

SEQ ID NO: 31761 - RNA, 32 nt, Human
acacauuuggaauagcagagcaaaauauggau

SEQ ID NO: 31762 - RNA, 32 nt, Human
acacauuuguguaaacaguguuuuggaauaaa

SEQ ID NO: 31763 - RNA, 32 nt, Human
acacauuuuauuuguauuucagucacauuuau

SEQ ID NO: 31764 - RNA, 32 nt, Human
acacauuuuguuguuuucuaugucucuguaua

SEQ ID NO: 31765 - RNA, 32 nt, Human
acacauuuuuaguuuacauacauagcauggua

SEQ ID NO: 31766 - RNA, 32 nt, Human
acacauuuuucuguauacaucacagaggcucu

SEQ ID NO: 31767 - RNA, 32 nt, Human
acacauuuuuguucuuagucuaucucuuguac

SEQ ID NO: 31768 - RNA, 32 nt, Human
acaccaaaaaccagugagagccccgcucucua

SEQ ID NO: 31769 - RNA, 32 nt, Human
acaccaaaaggaagaaaacaaucaagcaaaua

SEQ ID NO: 31770 - RNA, 32 nt, Human
acaccaaacccccaggcauaaagcuuuaccua

SEQ ID NO: 31771 - RNA, 32 nt, Human
acaccaaagaggaagaagagcuguggaggcca

SEQ ID NO: 31772 - RNA, 32 nt, Human
acaccaaagcuugaacaccaccguccacagcc

SEQ ID NO: 31773 - RNA, 21 nt, Human
acaccaaagguuaacagugaa

SEQ ID NO: 31774 - RNA, 32 nt, Human
acaccaacuccaggaaacucauucugggccag

SEQ ID NO: 31775 - RNA, 32 nt, Human
acaccaacuucuguuuccauuccagcuagcuu

SEQ ID NO: 31776 - RNA, 32 nt, Human
acaccaagaaacccgacggcuuccauauuuuc

SEQ ID NO: 31777 - RNA, 32 nt, Human
acaccaagcaaguccugaagcuggcgcgggac

SEQ ID NO: 31778 - RNA, 32 nt, Human
acaccaagcacccugaaucgagacugcaggag

SEQ ID NO: 31779 - RNA, 32 nt, Human
acaccaaggaagcagagcaguguuaacuuuaa

SEQ ID NO: 31780 - RNA, 32 nt, Human
acaccaaggagagcgugaaggagaugauugag

SEQ ID NO: 31781 - RNA, 24 nt, Human
acaccaaggcaggacccccagaga

SEQ ID NO: 31782 - RNA, 32 nt, Human
acaccaaggcgcagagaggugacucagccugc

SEQ ID NO: 31783 - RNA, 32 nt, Human
acaccaaggcuacaaugacuguuaaccuggag

SEQ ID NO: 31784 - RNA, 32 nt, Human
acaccaagugcagcccucguccugggucugca

SEQ ID NO: 31785 - RNA, 32 nt, Human
acaccaagugcgcacacacaccgauguacaca

SEQ ID NO: 31786 - RNA, 32 nt, Human
acaccaauagccuuucuugugcuaaaucucuc

SEQ ID NO: 31787 - RNA, 18 nt, Human
acaccaaucacaaaagua

SEQ ID NO: 31788 - RNA, 32 nt, Human
acaccaaugagagagacaaggaggaaagcauc

SEQ ID NO: 31789 - RNA, 32 nt, Human
acaccacacagagguucccugccuuguuugga

SEQ ID NO: 31790 - RNA, 32 nt, Human
acaccacacagcagacaauacacacccacucg

SEQ ID NO: 31791 - RNA, 32 nt, Human
acaccacacaugcacacacguacacaaugcac

SEQ ID NO: 31792 - RNA, 32 nt, Human
acaccacacaugcuuauaacaggcacuagaau

SEQ ID NO: 31793 - RNA, 32 nt, Human
acaccacaccacugcuuuucagcauuguacug

SEQ ID NO: 31794 - RNA, 32 nt, Human
acaccacacccacccacacgcaugaucaugaa

SEQ ID NO: 31795 - RNA, 32 nt, Human
acaccacagaaaccucugaauguaauggaugu

SEQ ID NO: 31796 - RNA, 32 nt, Human
acaccacagaugccagugguucaugccuucuu

SEQ ID NO: 31797 - RNA, 32 nt, Human
acaccacagcacaccucaccacacaacacacc

SEQ ID NO: 31798 - RNA, 32 nt, Human
acaccacagcacaccucaccacaccacaccgc

SEQ ID NO: 31799 - RNA, 32 nt, Human
acaccacagcugcgcacacagcugcuugcuca

SEQ ID NO: 31800 - RNA, 32 nt, Human
acaccacagcuucuccccagcuuggugccuuu

SEQ ID NO: 31801 - RNA, 32 nt, Human
acaccacaguacuccagccuaggugacagagc

SEQ ID NO: 31802 - RNA, 32 nt, Human
acaccacaguucccugccaccuccaggcacaa

SEQ ID NO: 31803 - RNA, 32 nt, Human
acaccaccacacccagccuagaaugaagaaac

SEQ ID NO: 31804 - RNA, 32 nt, Human
acaccacccacggcccaugcagaggugguaga

SEQ ID NO: 31805 - RNA, 32 nt, Human
acaccaccccagccagcauggccggcaggagc

SEQ ID NO: 31806 - RNA, 32 nt, Human
acaccacccccuccagcuucuggggcccagga

SEQ ID NO: 31807 - RNA, 32 nt, Human
acaccaccgcacuccacccugggaagcaaagu

SEQ ID NO: 31808 - RNA, 32 nt, Human
acaccaccucacuccagccugggcaacauagu

SEQ ID NO: 31809 - RNA, 32 nt, Human
acaccaccuguucucagugccugguggauugu

SEQ ID NO: 31810 - RNA, 32 nt, Human
acaccaccuucccaugcuuccuugcauuaggc

SEQ ID NO: 31811 - RNA, 32 nt, Human
acaccaccuuccuccuggcuuccagggggcag

SEQ ID NO: 31812 - RNA, 19 nt, Human
acaccaccuuuuugccuca

SEQ ID NO: 31813 - RNA, 32 nt, Human
acaccacgaacaaagggaucucuugcaugugc

SEQ ID NO: 31814 - RNA, 32 nt, Human
acaccacgccacugcacuccagccugggugac

SEQ ID NO: 31815 - RNA, 32 nt, Human
acaccacggugcuuuuauacauugugcuuauu

SEQ ID NO: 31816 - RNA, 32 nt, Human
acaccacuacacuccagccaaagcaacaagag

SEQ ID NO: 31817 - RNA, 32 nt, Human
acaccacuacacuccagccuaggcaacagagc

SEQ ID NO: 31818 - RNA, 32 nt, Human
acaccacuacacuccagccuggacaacagaaa

SEQ ID NO: 31819 - RNA, 32 nt, Human
acaccacuacacuccagccugggcaacagagc

SEQ ID NO: 31820 - RNA, 32 nt, Human
acaccacuacacuccagccugggcgacagagu

SEQ ID NO: 31821 - RNA, 32 nt, Human
acaccacuacacuccagccugggcgagacggc

SEQ ID NO: 31822 - RNA, 32 nt, Human
acaccacucaugucaccacggcgugcaucaug

SEQ ID NO: 31823 - RNA, 32 nt, Human
acaccacuccacuccagucuggacaacagagu

SEQ ID NO: 31824 - RNA, 32 nt, Human
acaccacugcaauccagccucgguaacacagc

SEQ ID NO: 31825 - RNA, 32 nt, Human
acaccacugcaauccagccugggcgacaaagc

SEQ ID NO: 31826 - RNA, 32 nt, Human
acaccacugcacuacagccucggcaauagagc

SEQ ID NO: 31827 - RNA, 32 nt, Human
acaccacugcacucagccugggugacagagca

SEQ ID NO: 31828 - RNA, 32 nt, Human
acaccacugcacuccaaccuagguaacagaga

SEQ ID NO: 31829 - RNA, 32 nt, Human
acaccacugcacuccaaccuggacaacagagc

SEQ ID NO: 31830 - RNA, 32 nt, Human
acaccacugcacuccaaccugggaaacgcagu

SEQ ID NO: 31831 - RNA, 32 nt, Human
acaccacugcacuccaaccugggcaacagagg

SEQ ID NO: 31832 - RNA, 32 nt, Human
acaccacugcacuccagccagggcaacaguga

SEQ ID NO: 31833 - RNA, 32 nt, Human
acaccacugcacuccagcccaggugacagagc

SEQ ID NO: 31834 - RNA, 32 nt, Human
acaccacugcacuccagccuaggcaacagaga

SEQ ID NO: 31835 - RNA, 32 nt, Human
acaccacugcacuccagccuggacaacagagu

SEQ ID NO: 31836 - RNA, 32 nt, Human
acaccacugcacuccagccuggacgacagagu

SEQ ID NO: 31837 - RNA, 32 nt, Human
acaccacugcacuccagccuggaugacaaagc

SEQ ID NO: 31838 - RNA, 32 nt, Human
acaccacugcacuccagccuggcaacagagcg

SEQ ID NO: 31839 - RNA, 32 nt, Human
acaccacugcacuccagccuggcgacagagag

SEQ ID NO: 31840 - RNA, 32 nt, Human
acaccacugcacuccagccugggcaacaaagc

SEQ ID NO: 31841 - RNA, 32 nt, Human
acaccacugcacuccagccugggcaacaagag

SEQ ID NO: 31842 - RNA, 32 nt, Human
acaccacugcacuccagccugggcaacagaac

SEQ ID NO: 31843 - RNA, 32 nt, Human
acaccacugcacuccagccugggcaacagagc

SEQ ID NO: 31844 - RNA, 32 nt, Human
acaccacugcacuccagccugggcaacagagu

SEQ ID NO: 31845 - RNA, 32 nt, Human
acaccacugcacuccagccugggcaacugagc

SEQ ID NO: 31846 - RNA, 32 nt, Human
acaccacugcacuccagccugggcaauagagu

SEQ ID NO: 31847 - RNA, 32 nt, Human
acaccacugcacuccagccugggcgacagaau

SEQ ID NO: 31848 - RNA, 32 nt, Human
acaccacugcacuccagccugggcgacagaga

SEQ ID NO: 31849 - RNA, 32 nt, Human
acaccacugcacuccagccugggcgacagagc

SEQ ID NO: 31850 - RNA, 32 nt, Human
acaccacugcacuccagccugggcgacagagg

SEQ ID NO: 31851 - RNA, 32 nt, Human
acaccacugcacuccagccugggcgacaguga

SEQ ID NO: 31852 - RNA, 32 nt, Human
acaccacugcacuccagccugggcggcagagc

SEQ ID NO: 31853 - RNA, 32 nt, Human
acaccacugcacuccagccugggcuacagagc

SEQ ID NO: 31854 - RNA, 32 nt, Human
acaccacugcacuccagccugggggacagagc

SEQ ID NO: 31855 - RNA, 32 nt, Human
acaccacugcacuccagccuggggugauagaa

SEQ ID NO: 31856 - RNA, 32 nt, Human
acaccacugcacuccagccugggugacagaga

SEQ ID NO: 31857 - RNA, 32 nt, Human
acaccacugcacuccagccugggugacagagc

SEQ ID NO: 31858 - RNA, 32 nt, Human
acaccacugcacuccagccugggugacagagg

SEQ ID NO: 31859 - RNA, 32 nt, Human
acaccacugcacuccagccugggugacagagu

SEQ ID NO: 31860 - RNA, 32 nt, Human
acaccacugcacuccagccugggugacagauu

SEQ ID NO: 31861 - RNA, 32 nt, Human
acaccacugcacuccagccugggugacagcaa

SEQ ID NO: 31862 - RNA, 32 nt, Human
acaccacugcacuccagccugggugauagagu

SEQ ID NO: 31863 - RNA, 32 nt, Human
acaccacugcacuccagccuggguggcagagc

SEQ ID NO: 31864 - RNA, 32 nt, Human
acaccacugcacuccagccugggugucagagc

SEQ ID NO: 31865 - RNA, 32 nt, Human
acaccacugcacuccagccuggucaacagagc

SEQ ID NO: 31866 - RNA, 32 nt, Human
acaccacugcacuccagccuggugacagagca

SEQ ID NO: 31867 - RNA, 32 nt, Human
acaccacugcacuccagccugugcgacagagg

SEQ ID NO: 31868 - RNA, 32 nt, Human
acaccacugcacuccagccuuggcgacaaacc

SEQ ID NO: 31869 - RNA, 32 nt, Human
acaccacugcacuccagccuuggcgacagagg

SEQ ID NO: 31870 - RNA, 32 nt, Human
acaccacugcacuccagccuuggugacagagu

SEQ ID NO: 31871 - RNA, 32 nt, Human
acaccacugcacuccagcuugggggauagagu

SEQ ID NO: 31872 - RNA, 32 nt, Human
acaccacugcacuccagucuggaugacaaagc

SEQ ID NO: 31873 - RNA, 32 nt, Human
acaccacugcacuccagucugggcaacagugc

SEQ ID NO: 31874 - RNA, 32 nt, Human
acaccacugcacuccagucugggcaccagagc

SEQ ID NO: 31875 - RNA, 32 nt, Human
acaccacugcacuccagugugagcaacagaac

SEQ ID NO: 31876 - RNA, 32 nt, Human
acaccacugcacuccauccagccugggugaca

SEQ ID NO: 31877 - RNA, 32 nt, Human
acaccacugcacuccauccugggcaacagagc

SEQ ID NO: 31878 - RNA, 32 nt, Human
acaccacugcacuccauccugggcaacagagu

SEQ ID NO: 31879 - RNA, 32 nt, Human
acaccacugcacuccggccugggcgacagagc

SEQ ID NO: 31880 - RNA, 32 nt, Human
acaccacugcacuccugccugggcaauagagc

SEQ ID NO: 31881 - RNA, 32 nt, Human
acaccacugcacucuagccugggcaacagagc

SEQ ID NO: 31882 - RNA, 32 nt, Human
acaccacugcacucuagccugggcaacagagu

SEQ ID NO: 31883 - RNA, 32 nt, Human
acaccacugcacucuagccugggugacagagc

SEQ ID NO: 31884 - RNA, 32 nt, Human
acaccacugcacuucagccuggaugacagagu

SEQ ID NO: 31885 - RNA, 32 nt, Human
acaccacugcacuucagccugggcaacagagu

SEQ ID NO: 31886 - RNA, 32 nt, Human
acaccacugcacuucagucugugugacugagc

SEQ ID NO: 31887 - RNA, 32 nt, Human
acaccacugcacuucauccuaggcaacagagc

SEQ ID NO: 31888 - RNA, 32 nt, Human
acaccacugcacuugagccugggcagcagagu

SEQ ID NO: 31889 - RNA, 32 nt, Human
acaccacugcagcuggcaugcuuggcugugug

SEQ ID NO: 31890 - RNA, 32 nt, Human
acaccacugcauuccagccugggcacuagagu

SEQ ID NO: 31891 - RNA, 32 nt, Human
acaccacugcauuccagccugggugacagagu

SEQ ID NO: 31892 - RNA, 32 nt, Human
acaccacugccauuuccuccugggcaacagag

SEQ ID NO: 31893 - RNA, 32 nt, Human
acaccacuggcacuccagccugggcaacagag

SEQ ID NO: 31894 - RNA, 32 nt, Human
acaccacuguacuccagccugagugacaaagu

SEQ ID NO: 31895 - RNA, 32 nt, Human
acaccacuguacuccagccuggaugacagagu

SEQ ID NO: 31896 - RNA, 32 nt, Human
acaccacuguacuccagccugggcaacagagc

SEQ ID NO: 31897 - RNA, 32 nt, Human
acaccacuguacuccagccugggugacaaagu

SEQ ID NO: 31898 - RNA, 32 nt, Human
acaccacuguacuccagccuggugacagagcc

SEQ ID NO: 31899 - RNA, 32 nt, Human
acaccacuguauuccagccugggugacagagu

SEQ ID NO: 31900 - RNA, 32 nt, Human
acaccacuguauuccagccugggugacugaga

SEQ ID NO: 31901 - RNA, 32 nt, Human
acaccagaaagggagagagggagucugcuuag

SEQ ID NO: 31902 - RNA, 25 nt, Human
acaccagacaaacugagacaaugaa

SEQ ID NO: 31903 - RNA, 32 nt, Human
acaccagagcccagggagucccagaggcaagu

SEQ ID NO: 31904 - RNA, 32 nt, Human
acaccagagccgcagccugcucugauucuaug

SEQ ID NO: 31905 - RNA, 32 nt, Human
acaccagaguagcugggaccacaggugugugc

SEQ ID NO: 31906 - RNA, 32 nt, Human
acaccagauuaguguguuaccccaaaugaacg

SEQ ID NO: 31907 - RNA, 32 nt, Human
acaccagcaaaaagaucccaacucaaugaagg

SEQ ID NO: 31908 - RNA, 31 nt, Human
acaccagcacuuuuucugcacauguaucuuc

SEQ ID NO: 31909 - RNA, 19 nt, Human
acaccagcagcugguccug

SEQ ID NO: 31910 - RNA, 32 nt, Human
acaccagcaguagauacaacuaugaugacauu

SEQ ID NO: 31911 - RNA, 21 nt, Human
acaccagcagucagugaggaa

SEQ ID NO: 31912 - RNA, 32 nt, Human
acaccagcauugugugugcagacuucaggaga

SEQ ID NO: 31913 - RNA, 32 nt, Human
acaccagccaagaugcucugcucacagucagu

SEQ ID NO: 31914 - RNA, 23 nt, Human
acaccagccaguccaauuggcca

SEQ ID NO: 31915 - RNA, 32 nt, Human
acaccagcccaggugagagcugcugcggguca

SEQ ID NO: 31916 - RNA, 32 nt, Human
acaccagccucaggaggccucacugagagcug

SEQ ID NO: 31917 - RNA, 32 nt, Human
acaccagccuccagcacgcugaggaugagcug

SEQ ID NO: 31918 - RNA, 32 nt, Human
acaccagccugaccaacauggugaaaccccau

SEQ ID NO: 31919 - RNA, 32 nt, Human
acaccagccuggccagccuccugugggccuug

SEQ ID NO: 31920 - RNA, 23 nt, Human
acaccagccugggcaacauggca

SEQ ID NO: 31921 - RNA, 32 nt, Human
acaccagcuccaaguggucccugccgggaccu

SEQ ID NO: 31922 - RNA, 32 nt, Human
acaccagcugcugcuggagauucaaagcccaa

SEQ ID NO: 31923 - RNA, 32 nt, Human
acaccaggaagaggacaaacugcauggacuca

SEQ ID NO: 31924 - RNA, 32 nt, Human
acaccaggaccagccacuguugcagcaugagu

SEQ ID NO: 31925 - RNA, 32 nt, Human
acaccaggagcagaaaugaaagaggcaagaaa

SEQ ID NO: 31926 - RNA, 32 nt, Human
acaccaggagcugaagccauggccucaaagcc

SEQ ID NO: 31927 - RNA, 32 nt, Human
acaccaggcuccagaagaaagacagcagcuca

SEQ ID NO: 31928 - RNA, 32 nt, Human
acaccaggcugcagagcuaugaugcuucggga

SEQ ID NO: 31929 - RNA, 30 nt, Human
acaccaggcuugcaagcaagaggcucccug

SEQ ID NO: 31930 - RNA, 32 nt, Human
acaccagggcccgcccucccaucacugagcuc

SEQ ID NO: 31931 - RNA, 32 nt, Human
acaccagggggcagaggucaggagaaucaucu

SEQ ID NO: 31932 - RNA, 32 nt, Human
acaccagggugcgagaugccagcucuggaguu

SEQ ID NO: 31933 - RNA, 32 nt, Human
acaccaggugccugugacacauuggguagaca

SEQ ID NO: 31934 - RNA, 32 nt, Human
acaccaguagucccagcuacuccugaggcuga

SEQ ID NO: 31935 - RNA, 32 nt, Human
acaccagucuggagacagagugagaguccguc

SEQ ID NO: 31936 - RNA, 32 nt, Human
acaccagugagaauugguggggcaaguugucc

SEQ ID NO: 31937 - RNA, 32 nt, Human
acaccagugagcuuccaccuugguggguuugg

SEQ ID NO: 31938 - RNA, 32 nt, Human
acaccagugcaagcagaugacaaaaaggugca

SEQ ID NO: 31939 - RNA, 32 nt, Human
acaccagugcacuccagccugggcgacagaga

SEQ ID NO: 31940 - RNA, 32 nt, Human
acaccagugccacccucuagccuugagggacc

SEQ ID NO: 31941 - RNA, 32 nt, Human
acaccaguggcaaggcccagaauggcgaccuc

SEQ ID NO: 31942 - RNA, 32 nt, Human
acaccaguuacuguucauggcacccgggaaug

SEQ ID NO: 31943 - RNA, 32 nt, Human
acaccaguuccugccaaccucuguugccacca

SEQ ID NO: 31944 - RNA, 32 nt, Human
acaccauaacuguuuuugugggagagauuguc

SEQ ID NO: 31945 - RNA, 32 nt, Human
acaccauacaucuuugcccauccacuuccacc

SEQ ID NO: 31946 - RNA, 32 nt, Human
acaccauagguagaauguaaagcuugucugau

SEQ ID NO: 31947 - RNA, 32 nt, Human
acaccauauaaauauucauuaaauaacauaca

SEQ ID NO: 31948 - RNA, 32 nt, Human
acaccauaucggagaaaacuugauagauuagu

SEQ ID NO: 31949 - RNA, 32 nt, Human
acaccaucagugagcgagaggaaaguacguca

SEQ ID NO: 31950 - RNA, 32 nt, Human
acaccaucaugggcuguauuuucaaguugauu

SEQ ID NO: 31951 - RNA, 19 nt, Human
acaccauccaaagcugggg

SEQ ID NO: 31952 - RNA, 32 nt, Human
acaccauccuagcgaggcaccagcacaccuaa

SEQ ID NO: 31953 - RNA, 32 nt, Human
acaccaucgacacccccagacacauccacaca

SEQ ID NO: 31954 - RNA, 32 nt, Human
acaccaucgauacccccagacacauccacaca

SEQ ID NO: 31955 - RNA, 32 nt, Human
acaccaucgcacuccagccuaggcaacaagag

SEQ ID NO: 31956 - RNA, 32 nt, Human
acaccaucuacccuuaaauauccaaccccagc

SEQ ID NO: 31957 - RNA, 32 nt, Human
acaccaugcuccuuuuuccuuuaggauuuuca

SEQ ID NO: 31958 - RNA, 32 nt, Human
acaccaugcugaggcagaaacuagcccagaac

SEQ ID NO: 31959 - RNA, 32 nt, Human
acaccaugugcccgugcacaccagugacuacg

SEQ ID NO: 31960 - RNA, 26 nt, Human
acaccauuaugauaucaggacugguu

SEQ ID NO: 31961 - RNA, 32 nt, Human
acaccauucucuauuauuucucucacauacau

SEQ ID NO: 31962 - RNA, 32 nt, Human
acaccauugcacuccaaccugggcaacaagag

SEQ ID NO: 31963 - RNA, 32 nt, Human
acaccauugcacuccaaccugggcgacagggc

SEQ ID NO: 31964 - RNA, 32 nt, Human
acaccauugcacuccagccuagauaacaagag

SEQ ID NO: 31965 - RNA, 32 nt, Human
acaccauugcacuccagccuaggcaacaagag

SEQ ID NO: 31966 - RNA, 32 nt, Human
acaccauugcacuccagccuaggcauggugag

SEQ ID NO: 31967 - RNA, 32 nt, Human
acaccauugcacuccagccugagcaacagagu

SEQ ID NO: 31968 - RNA, 32 nt, Human
acaccauugcacuccagccugggaaacaagag

SEQ ID NO: 31969 - RNA, 32 nt, Human
acaccauugcacuccagccugggcaaaaagag

SEQ ID NO: 31970 - RNA, 32 nt, Human
acaccauugcacuccagccugggcaacaagaa

SEQ ID NO: 31971 - RNA, 32 nt, Human
acaccauugcacuccagccugggcaacaagag

SEQ ID NO: 31972 - RNA, 32 nt, Human
acaccauugcacuccagccugggcaacagagu

SEQ ID NO: 31973 - RNA, 32 nt, Human
acaccauugcacuccagccugggcgacaagag

SEQ ID NO: 31974 - RNA, 32 nt, Human
acaccauugcacuccagccugggcgacagagu

SEQ ID NO: 31975 - RNA, 32 nt, Human
acaccauugcacuccagccugggcgacagggu

SEQ ID NO: 31976 - RNA, 32 nt, Human
acaccauugcacuccagcuugggcaacaauag

SEQ ID NO: 31977 - RNA, 32 nt, Human
acaccauugcauuccagccuaggcaacagagu

SEQ ID NO: 31978 - RNA, 32 nt, Human
acaccauugcauuccagccugggcaacagagc

SEQ ID NO: 31979 - RNA, 25 nt, Human
acaccauugcccuccagacuggaca

SEQ ID NO: 31980 - RNA, 32 nt, Human
acaccauugcccuccagccugggugacagagu

SEQ ID NO: 31981 - RNA, 32 nt, Human
acaccauugccuggagaugacagaaggcugag

SEQ ID NO: 31982 - RNA, 32 nt, Human
acaccauugcuguccagccugggugacagagc

SEQ ID NO: 31983 - RNA, 32 nt, Human
acaccauugcuguuccccaucugguacuaaug

SEQ ID NO: 31984 - RNA, 32 nt, Human
acaccauuggaccccacccagccuggaucuac

SEQ ID NO: 31985 - RNA, 32 nt, Human
acacccaaggcaggagagcaagagugaugagu

SEQ ID NO: 31986 - RNA, 32 nt, Human
acacccaagguagaccccuaggaaaagcagag

SEQ ID NO: 31987 - RNA, 32 nt, Human
acacccaauguucagaccuuaccucagucuaa

SEQ ID NO: 31988 - RNA, 32 nt, Human
acacccacaacaaaaccuuguucccuuuguuu

SEQ ID NO: 31989 - RNA, 32 nt, Human
acacccacaagcuuuccuuaacucagugugcu

SEQ ID NO: 31990 - RNA, 22 nt, Human
acacccacaauauaaauggguu

SEQ ID NO: 31991 - RNA, 32 nt, Human
acacccacacagaugguguggaccaugcugcc

SEQ ID NO: 31992 - RNA, 32 nt, Human
acacccacacucuggcaccacacacauugucu

SEQ ID NO: 31993 - RNA, 19 nt, Human
acacccacagccccuacuu

SEQ ID NO: 31994 - RNA, 32 nt, Human
acacccacagcugcagcaggugaccuccccuu

SEQ ID NO: 31995 - RNA, 25 nt, Human
acacccacaucagccuggagcucca

SEQ ID NO: 31996 - RNA, 20 nt, Human
acacccaccagcagccgccu

SEQ ID NO: 31997 - RNA, 32 nt, Human
acacccacccucucccccuucagccaugcuga

SEQ ID NO: 31998 - RNA, 32 nt, Human
acacccaccucuccauccaaggcuggucagga

SEQ ID NO: 31999 - RNA, 32 nt, Human
acacccaccucucccugcaccugguucuauuu

SEQ ID NO: 32000 - RNA, 32 nt, Human
acacccaccugccucucuggcuccagaagcug

SEQ ID NO: 32001 - RNA, 32 nt, Human
acacccacgcugaguuagcucugacagcuucu

SEQ ID NO: 32002 - RNA, 32 nt, Human
acacccacugccucugugaccuuggguggguu

SEQ ID NO: 32003 - RNA, 32 nt, Human
acacccacugccugucucacuucugucagaug

SEQ ID NO: 32004 - RNA, 32 nt, Human
acacccacuucuggguucucaggcuggcugac

SEQ ID NO: 32005 - RNA, 32 nt, Human
acacccacuuucuccucccucugccccuauau

SEQ ID NO: 32006 - RNA, 32 nt, Human
acacccagaacugaggcuuggauaucuucuuc

SEQ ID NO: 32007 - RNA, 25 nt, Human
acacccagaauccuuuuguguuuuu

SEQ ID NO: 32008 - RNA, 32 nt, Human
acacccagacacauccacacagacgaccucac

SEQ ID NO: 32009 - RNA, 32 nt, Human
acacccagacacauccccacggaugaccucac

SEQ ID NO: 32010 - RNA, 32 nt, Human
acacccagacaguguuggucaggauggcagaa

SEQ ID NO: 32011 - RNA, 19 nt, Human
acacccagaccccgcgaga

SEQ ID NO: 32012 - RNA, 32 nt, Human
acacccagacggcgcccagcuggcugcagcac

SEQ ID NO: 32013 - RNA, 32 nt, Human
acacccagacucacuucauacacacauagaua

SEQ ID NO: 32014 - RNA, 32 nt, Human
acacccagagcccccuccccagcccucaggcc

SEQ ID NO: 32015 - RNA, 32 nt, Human
acacccagagcugugcggggaggcagggaucu

SEQ ID NO: 32016 - RNA, 22 nt, Human
acacccagagcuuuaauggaca

SEQ ID NO: 32017 - RNA, 32 nt, Human
acacccagaguuuugugccugcuuucaugugg

SEQ ID NO: 32018 - RNA, 32 nt, Human
acacccagauccugugcaggcugccgggcccc

SEQ ID NO: 32019 - RNA, 22 nt, Human
acacccagcaaaguccacccag

SEQ ID NO: 32020 - RNA, 32 nt, Human
acacccagcagaggacuccagccuucucgggg

SEQ ID NO: 32021 - RNA, 32 nt, Human
acacccagccaaggcccugccaaccaacugcc

SEQ ID NO: 32022 - RNA, 32 nt, Human
acacccagccaucuggagucauggagacccac

SEQ ID NO: 32023 - RNA, 30 nt, Human
acacccagccaugaaucagaaauacuuuuu

SEQ ID NO: 32024 - RNA, 32 nt, Human
acacccagcccaggcucauucuuuuaacagcc

SEQ ID NO: 32025 - RNA, 32 nt, Human
acacccagccgaucucccgcucccagacugcu

SEQ ID NO: 32026 - RNA, 32 nt, Human
acacccagccgauuuuuccuuuuugauuaaag

SEQ ID NO: 32027 - RNA, 32 nt, Human
acacccagcucagcauuuccacaccaagcagc

SEQ ID NO: 32028 - RNA, 32 nt, Human
acacccagcucuugucuguaaguggccucugc

SEQ ID NO: 32029 - RNA, 32 nt, Human
acacccagcugccugagacccuccuucaaccu

SEQ ID NO: 32030 - RNA, 32 nt, Human
acacccaggacaagcaaagacacaguggcagu

SEQ ID NO: 32031 - RNA, 32 nt, Human
acacccaggagcugccccugcugugccuggua

SEQ ID NO: 32032 - RNA, 32 nt, Human
acacccaggcccccagagccagcugggccugu

SEQ ID NO: 32033 - RNA, 32 nt, Human
acacccaggccgagcaggaugagcaggugaag

SEQ ID NO: 32034 - RNA, 32 nt, Human
acacccaggcuggagugcaguagcacaaacau

SEQ ID NO: 32035 - RNA, 32 nt, Human
acacccaggcuggagugcaguggugccaucac

SEQ ID NO: 32036 - RNA, 18 nt, Human
acacccagguggcuggca

SEQ ID NO: 32037 - RNA, 32 nt, Human
acaccccaaagagaagaaggggacucuggaua

SEQ ID NO: 32038 - RNA, 32 nt, Human
acaccccaacagcacccucuccagaugcagcc

SEQ ID NO: 32039 - RNA, 32 nt, Human
acaccccaagguucaaacugucucaagcugag

SEQ ID NO: 32040 - RNA, 32 nt, Human
acaccccacaggccugacucccuuccugucug

SEQ ID NO: 32041 - RNA, 32 nt, Human
acaccccaccuuucaaggggaggaauuucaag

SEQ ID NO: 32042 - RNA, 32 nt, Human
acaccccagccuaacuccuccuggggccuggg

SEQ ID NO: 32043 - RNA, 32 nt, Human
acaccccagcugcauuucuuuugcaagauucc

SEQ ID NO: 32044 - RNA, 32 nt, Human
acaccccauccccucacguucucaccccaggc

SEQ ID NO: 32045 - RNA, 32 nt, Human
acaccccauggagcuugucuuggggaggguuc

SEQ ID NO: 32046 - RNA, 32 nt, Human
acacccccaagaaugcaggcucugccuggcac

SEQ ID NO: 32047 - RNA, 32 nt, Human
acacccccacauucucuccucuggacccccag

SEQ ID NO: 32048 - RNA, 32 nt, Human
acacccccaucuucgacuucagagucuucuuc

SEQ ID NO: 32049 - RNA, 19 nt, Human
acacccccgacggccucca

SEQ ID NO: 32050 - RNA, 32 nt, Human
acacccccgccucaauccuccugcugccugaa

SEQ ID NO: 32051 - RNA, 32 nt, Human
acacccccuccaggcccccagacugccaggcu

SEQ ID NO: 32052 - RNA, 32 nt, Human
acacccccucccccaccaucacuaucccugua

SEQ ID NO: 32053 - RNA, 32 nt, Human
acacccccuccccgccuuuaccucacuuccaa

SEQ ID NO: 32054 - RNA, 32 nt, Human
acacccccugccuuaucucugccugcacgccc

SEQ ID NO: 32055 - RNA, 32 nt, Human
acacccccuuccucccccucaucacccauaau

SEQ ID NO: 32056 - RNA, 32 nt, Human
acaccccggagaccuuuuuggaggccuccaag

SEQ ID NO: 32057 - RNA, 32 nt, Human
acaccccuauaauuccagcuacucgggaggcc

SEQ ID NO: 32058 - RNA, 32 nt, Human
acaccccucacacgcaaaacuggcuucuucug

SEQ ID NO: 32059 - RNA, 32 nt, Human
acaccccucacagaugaacaaagugaggcaga

SEQ ID NO: 32060 - RNA, 32 nt, Human
acaccccucagccacaagcaaagcuuuggaca

SEQ ID NO: 32061 - RNA, 32 nt, Human
acaccccuccccugggccgcugaggccccgcg

SEQ ID NO: 32062 - RNA, 32 nt, Human
acaccccucugcugcaacaagcucaucccugg

SEQ ID NO: 32063 - RNA, 32 nt, Human
acaccccugagcuucuuucuucaucugcaaaa

SEQ ID NO: 32064 - RNA, 32 nt, Human
acaccccugcacgaugaacacacaccgggcug

SEQ ID NO: 32065 - RNA, 32 nt, Human
acaccccugcacuccagccugggcggcagagu

SEQ ID NO: 32066 - RNA, 32 nt, Human
acaccccugcacuccagccugggugacagcua

SEQ ID NO: 32067 - RNA, 32 nt, Human
acaccccugcuccccacugccgcugcugccuc

SEQ ID NO: 32068 - RNA, 32 nt, Human
acaccccugcuccggcucacacacgcccugcc

SEQ ID NO: 32069 - RNA, 20 nt, Human
acaccccugcuugggccccc

SEQ ID NO: 32070 - RNA, 32 nt, Human
acaccccuggacuccagcuugggugacacagu

SEQ ID NO: 32071 - RNA, 32 nt, Human
acaccccuguagucccagcuacuugggaggcu

SEQ ID NO: 32072 - RNA, 32 nt, Human
acaccccuguccuccagcaccauagagaggcg

SEQ ID NO: 32073 - RNA, 32 nt, Human
acacccgcaccccugcaaaucucccccuucac

SEQ ID NO: 32074 - RNA, 21 nt, Human
acacccgcaccccugcaccuc

SEQ ID NO: 32075 - RNA, 32 nt, Human
acacccgccugccuggccgcaggugguucucc

SEQ ID NO: 32076 - RNA, 32 nt, Human
acacccgcgagugcccuuucaagccugcuggg

SEQ ID NO: 32077 - RNA, 32 nt, Human
acacccgcggggaugaggagguugucagugau

SEQ ID NO: 32078 - RNA, 18 nt, Human
acacccgcugggcugcug

SEQ ID NO: 32079 - RNA, 32 nt, Human
acacccggaaugugccuugugauuggcagagu

SEQ ID NO: 32080 - RNA, 23 nt, Human
acacccggccccaggccaggaca

SEQ ID NO: 32081 - RNA, 32 nt, Human
acacccgucuggucuuugacaagaccaacgaa

SEQ ID NO: 32082 - RNA, 32 nt, Human
acacccguuucagccacaucuaaaagagcaca

SEQ ID NO: 32083 - RNA, 32 nt, Human
acacccuaaaccaggguccugccugggucuca

SEQ ID NO: 32084 - RNA, 32 nt, Human
acacccucacagcugcucucuggcagagguug

SEQ ID NO: 32085 - RNA, 32 nt, Human
acacccucaccacacagucccuuuggacaaau

SEQ ID NO: 32086 - RNA, 32 nt, Human
acacccucagaggagcugcaagcccguggccu

SEQ ID NO: 32087 - RNA, 32 nt, Human
acacccucagcacucuugccccuguuuuguuc

SEQ ID NO: 32088 - RNA, 32 nt, Human
acacccuccagaccucccacagcuccacccca

SEQ ID NO: 32089 - RNA, 32 nt, Human
acacccuccauuacucuuucagucuccaagca

SEQ ID NO: 32090 - RNA, 32 nt, Human
acacccucccagcugucucuggaggcuggagg

SEQ ID NO: 32091 - RNA, 32 nt, Human
acacccuccucccagggaggguccuccagcuc

SEQ ID NO: 32092 - RNA, 32 nt, Human
acacccucggagggggcaagcagaaccucugg

SEQ ID NO: 32093 - RNA, 32 nt, Human
acacccucuccugguggcaggccacuucccuc

SEQ ID NO: 32094 - RNA, 32 nt, Human
acacccucugccacacugcucucuuccuucca

SEQ ID NO: 32095 - RNA, 32 nt, Human
acacccucugggcccgccucuggagccagcgc

SEQ ID NO: 32096 - RNA, 32 nt, Human
acacccucugggcugaguuccuucuuucccuu

SEQ ID NO: 32097 - RNA, 32 nt, Human
acacccugcacuccugcuugcgccggcagcug

SEQ ID NO: 32098 - RNA, 32 nt, Human
acacccugcccaaggaccccaggaucaugugc

SEQ ID NO: 32099 - RNA, 21 nt, Human
acacccugcguccacaccacu

SEQ ID NO: 32100 - RNA, 22 nt, Human
acacccugcuucuucucucaca

SEQ ID NO: 32101 - RNA, 32 nt, Human
acacccugggauggaaccucaggaugggccaa

SEQ ID NO: 32102 - RNA, 21 nt, Human
acacccugggcccucucucau

SEQ ID NO: 32103 - RNA, 23 nt, Human
acacccugggcccugagcaucca

SEQ ID NO: 32104 - RNA, 32 nt, Human
acacccuggggagcuugcaccccauucugugc

SEQ ID NO: 32105 - RNA, 26 nt, Human
acacccuggugaaccccgggugcuaa

SEQ ID NO: 32106 - RNA, 32 nt, Human
acacccuguccugguggggcuguccgggaaga

SEQ ID NO: 32107 - RNA, 32 nt, Human
acacccugucugcagcaggacauggacaaaua

SEQ ID NO: 32108 - RNA, 32 nt, Human
acacccuuaccucccacccccucagcacagga

SEQ ID NO: 32109 - RNA, 32 nt, Human
acacccuuccacccuccugcuccagccuucca

SEQ ID NO: 32110 - RNA, 32 nt, Human
acacccuucucccacucuccuaggcauucugg

SEQ ID NO: 32111 - RNA, 32 nt, Human
acacccuucuccccuuccugguagaccuuaaa

SEQ ID NO: 32112 - RNA, 32 nt, Human
acacccuucugauggaaggugggagccaacac

SEQ ID NO: 32113 - RNA, 32 nt, Human
acacccuuucaucucagaguccacuguggcac

SEQ ID NO: 32114 - RNA, 20 nt, Human
acacccuuucucaaaagaua

SEQ ID NO: 32115 - RNA, 32 nt, Human
acaccgaaaagcuuuggaggauuucacucuug

SEQ ID NO: 32116 - RNA, 32 nt, Human
acaccgaaggaaaugaaagaagcaagaaggaa

SEQ ID NO: 32117 - RNA, 32 nt, Human
acaccgaaggaaaugggguggugaaaccccac

SEQ ID NO: 32118 - RNA, 32 nt, Human
acaccgaagggcccagcgcagcuacuggcagu

SEQ ID NO: 32119 - RNA, 32 nt, Human
acaccgacacaggcacauguacaugcacaggu

SEQ ID NO: 32120 - RNA, 32 nt, Human
acaccgaccaacaacugaaaacggugacagcu

SEQ ID NO: 32121 - RNA, 32 nt, Human
acaccgacguuguagcagcugcauaauaaaug

SEQ ID NO: 32122 - RNA, 32 nt, Human
acaccgagaacagcagggugacgccagggaca

SEQ ID NO: 32123 - RNA, 32 nt, Human
acaccgagacuggccucagaaauaguuggcua

SEQ ID NO: 32124 - RNA, 32 nt, Human
acaccgagacuggccucagaaauaguuggcuu

SEQ ID NO: 32125 - RNA, 32 nt, Human
acaccgagagcucccuccucugcaccaguggc

SEQ ID NO: 32126 - RNA, 32 nt, Human
acaccgagugugggggccacgccccuugccau

SEQ ID NO: 32127 - RNA, 32 nt, Human
acaccgcagaagcaaagagcagugaggcuccu

SEQ ID NO: 32128 - RNA, 32 nt, Human
acaccgcagcagcaaccgggcccggccagguu

SEQ ID NO: 32129 - RNA, 32 nt, Human
acaccgcaggcagagguugcucggggccuugg

SEQ ID NO: 32130 - RNA, 32 nt, Human
acaccgccacaccaacaccaccacuacaaaaa

SEQ ID NO: 32131 - RNA, 23 nt, Human
acaccgcccucuccaccccaccg

SEQ ID NO: 32132 - RNA, 19 nt, Human
acaccgccugcuaaaaaua

SEQ ID NO: 32133 - RNA, 32 nt, Human
acaccgccuuucugaccccacccugcacuccc

SEQ ID NO: 32134 - RNA, 32 nt, Human
acaccgcgucgacgccuucacugccauccccg

SEQ ID NO: 32135 - RNA, 32 nt, Human
acaccgcugcacucaagccugggugacaguga

SEQ ID NO: 32136 - RNA, 32 nt, Human
acaccgcugcacucaagcuugggugacagagc

SEQ ID NO: 32137 - RNA, 32 nt, Human
acaccgcugcacuccagccugggcaacaagag

SEQ ID NO: 32138 - RNA, 32 nt, Human
acaccggacaugacugcccuccaggaauaacc

SEQ ID NO: 32139 - RNA, 32 nt, Human
acaccggagagggguaggcagaguggugaggc

SEQ ID NO: 32140 - RNA, 32 nt, Human
acaccggagcuuccuagcuuccuuucuuugcu

SEQ ID NO: 32141 - RNA, 32 nt, Human
acaccggaggacaccucuuggagcucaccacc

SEQ ID NO: 32142 - RNA, 32 nt, Human
acaccggcauaaaucuauuuuugcuaccagau

SEQ ID NO: 32143 - RNA, 32 nt, Human
acaccggcccugcuccuuccuccucuaggucc

SEQ ID NO: 32144 - RNA, 32 nt, Human
acaccggcccugcuccuuccuccucugggccc

SEQ ID NO: 32145 - RNA, 32 nt, Human
acaccggggcuggguuucucuuuccucuuuuu

SEQ ID NO: 32146 - RNA, 32 nt, Human
acaccggugaagcuuccuggccgagcauaaac

SEQ ID NO: 32147 - RNA, 32 nt, Human
acaccguaauuuccuacuuuacacucuaacuu

SEQ ID NO: 32148 - RNA, 32 nt, Human
acaccgucaaggccaccaugcccaucugggug

SEQ ID NO: 32149 - RNA, 32 nt, Human
acaccgugaauccauucccaucaguccauucc

SEQ ID NO: 32150 - RNA, 32 nt, Human
acaccgugagccagccaggccuggccgcuggg

SEQ ID NO: 32151 - RNA, 32 nt, Human
acaccgugagccugccuuuguacuucaaacuc

SEQ ID NO: 32152 - RNA, 32 nt, Human
acaccgugcauaguggugaagacugaacgagc

SEQ ID NO: 32153 - RNA, 32 nt, Human
acaccgugggccugaggcgcgagcccggcggc

SEQ ID NO: 32154 - RNA, 32 nt, Human
acaccgugggguccaggcugggccaggagacc

SEQ ID NO: 32155 - RNA, 32 nt, Human
acaccguugagguuggagugggcacaggcaug

SEQ ID NO: 32156 - RNA, 32 nt, Human
acaccguugcccaggcuggagggcagugacgu

SEQ ID NO: 32157 - RNA, 32 nt, Human
acaccuaaaaccaguuuugcugcuauaauucu

SEQ ID NO: 32158 - RNA, 20 nt, Human
acaccuaaggaccaaagaua

SEQ ID NO: 32159 - RNA, 32 nt, Human
acaccuaagugccuccccaaccagggucuguc

SEQ ID NO: 32160 - RNA, 32 nt, Human
acaccuacagcuuuuggucccuugccucuucc

SEQ ID NO: 32161 - RNA, 32 nt, Human
acaccuacaggcucagcauucagcaccccauu

SEQ ID NO: 32162 - RNA, 32 nt, Human
acaccuacaugcagagccauaagagcagcugc

SEQ ID NO: 32163 - RNA, 32 nt, Human
acaccuacuaggguuaaaguucagaugauagu

SEQ ID NO: 32164 - RNA, 32 nt, Human
acaccuacucugcuccccucucacacaucugg

SEQ ID NO: 32165 - RNA, 18 nt, Human
acaccuagcucaaaaaua

SEQ ID NO: 32166 - RNA, 17 nt, Human
acaccuaggacccagga

SEQ ID NO: 32167 - RNA, 32 nt, Human
acaccuagggaaacaugaggccccuuauggga

SEQ ID NO: 32168 - RNA, 32 nt, Human
acaccuauagucccagcacucugagaggcuca

SEQ ID NO: 32169 - RNA, 32 nt, Human
acaccuauuuugcgccagaccucuuaauuguu

SEQ ID NO: 32170 - RNA, 32 nt, Human
acaccucaaauacaaaaagugccugggaacgu

SEQ ID NO: 32171 - RNA, 32 nt, Human
acaccucaacacaccucugccaccccagguuu

SEQ ID NO: 32172 - RNA, 32 nt, Human
acaccucaacuaaauccaaaguccccauucag

SEQ ID NO: 32173 - RNA, 31 nt, Human
acaccucaauaaauguugaaucaugaugaau

SEQ ID NO: 32174 - RNA, 31 nt, Human
acaccucacagcugcccugccaugcagagcc

SEQ ID NO: 32175 - RNA, 32 nt, Human
acaccucacagcugcccugccaugcagagccc

SEQ ID NO: 32176 - RNA, 32 nt, Human
acaccucaccauugaaauuuauaugccaccuu

SEQ ID NO: 32177 - RNA, 32 nt, Human
acaccucacugcacguaaguggguaucuuacu

SEQ ID NO: 32178 - RNA, 32 nt, Human
acaccucacugcagccuuggccucucaggcuc

SEQ ID NO: 32179 - RNA, 32 nt, Human
acaccucagacaugggauagauuuccccauca

SEQ ID NO: 32180 - RNA, 32 nt, Human
acaccucauggacugaggccagagcccccugu

SEQ ID NO: 32181 - RNA, 32 nt, Human
acaccucaugggccuuugugggcugcuggaga

SEQ ID NO: 32182 - RNA, 32 nt, Human
acaccuccaccaaaccuccucuugcacuuucc

SEQ ID NO: 32183 - RNA, 32 nt, Human
acaccuccaggaacuccacucccagucuuaga

SEQ ID NO: 32184 - RNA, 20 nt, Human
acaccucccaccaggcccca

SEQ ID NO: 32185 - RNA, 32 nt, Human
acaccucccaccaggcuccaccuccaacacug

SEQ ID NO: 32186 - RNA, 19 nt, Human
acaccuccccguggcucca

SEQ ID NO: 32187 - RNA, 32 nt, Human
acaccucccugccucgccccgagggcgucacg

SEQ ID NO: 32188 - RNA, 32 nt, Human
acaccucccugcugccccucccucucucuccc

SEQ ID NO: 32189 - RNA, 21 nt, Human
acaccuccgcccccucccgca

SEQ ID NO: 32190 - RNA, 32 nt, Human
acaccuccucaaacucucugcagcagauguaa

SEQ ID NO: 32191 - RNA, 18 nt, Human
acaccuccuccaggaaua

SEQ ID NO: 32192 - RNA, 32 nt, Human
acaccuccucuccagcccaaucuucugggucc

SEQ ID NO: 32193 - RNA, 32 nt, Human
acaccuccugcagcccccagcaugcgggcagg

SEQ ID NO: 32194 - RNA, 19 nt, Human
acaccuccuggaggcccca

SEQ ID NO: 32195 - RNA, 32 nt, Human
acaccuccugguuggaugucaucccccgaccc

SEQ ID NO: 32196 - RNA, 32 nt, Human
acaccucggagcugaauacagccugggccuca

SEQ ID NO: 32197 - RNA, 32 nt, Human
acaccucggcugcugucacuucccugguucgg

SEQ ID NO: 32198 - RNA, 32 nt, Human
acaccucggcuggggaaaccgaggccaccgcc

SEQ ID NO: 32199 - RNA, 32 nt, Human
acaccucuagccccagcuacucaggcuggggu

SEQ ID NO: 32200 - RNA, 32 nt, Human
acaccucucauccgccccuccugcuccaucac

SEQ ID NO: 32201 - RNA, 32 nt, Human
acaccucuccuggguguggagacagcuugguu

SEQ ID NO: 32202 - RNA, 32 nt, Human
acaccucucgcggcagcugucauuuccaugug

SEQ ID NO: 32203 - RNA, 32 nt, Human
acaccucucucaggagcuucugagucagacgc

SEQ ID NO: 32204 - RNA, 32 nt, Human
acaccucucuuugugcugaauuucugggccau

SEQ ID NO: 32205 - RNA, 19 nt, Human
acaccucugaccaaaagua

SEQ ID NO: 32206 - RNA, 32 nt, Human
acaccucugagagaagucagugcagacggccc

SEQ ID NO: 32207 - RNA, 32 nt, Human
acaccucugcacucccuugggcagagauggga

SEQ ID NO: 32208 - RNA, 32 nt, Human
acaccucugccuggccugcugcuagcccugcc

SEQ ID NO: 32209 - RNA, 32 nt, Human
acaccucugggagaaggcugcagccaccuggg

SEQ ID NO: 32210 - RNA, 18 nt, Human
acaccucuuacaaaaaug

SEQ ID NO: 32211 - RNA, 20 nt, Human
acaccucuuacguaaagaua

SEQ ID NO: 32212 - RNA, 32 nt, Human
acaccucuugccaggcugcagagcuaugcagu

SEQ ID NO: 32213 - RNA, 32 nt, Human
acaccugaaucagcuggacauacugcuggagu

SEQ ID NO: 32214 - RNA, 21 nt, Human
acaccugacagccccucccuc

SEQ ID NO: 32215 - RNA, 32 nt, Human
acaccugaccucaggugauccauucgucuugg

SEQ ID NO: 32216 - RNA, 32 nt, Human
acaccugacucugucacucaagccuuucucca

SEQ ID NO: 32217 - RNA, 19 nt, Human
acaccugacugcaaaaaug

SEQ ID NO: 32218 - RNA, 32 nt, Human
acaccugacugcacuccagccuggguggcaaa

SEQ ID NO: 32219 - RNA, 32 nt, Human
acaccugagagucccugggguccagucauugc

SEQ ID NO: 32220 - RNA, 32 nt, Human
acaccugagccaagacuccucuucagaaagag

SEQ ID NO: 32221 - RNA, 32 nt, Human
acaccugagcccaggagguggagguugcacug

SEQ ID NO: 32222 - RNA, 32 nt, Human
acaccugagcuucugagucccuguucuggcac

SEQ ID NO: 32223 - RNA, 32 nt, Human
acaccugagucaguggcucugaaggagaugaa

SEQ ID NO: 32224 - RNA, 32 nt, Human
acaccugcacacaccugcacacucgcuaugcc

SEQ ID NO: 32225 - RNA, 22 nt, Human
acaccugcagaccccugcccca

SEQ ID NO: 32226 - RNA, 32 nt, Human
acaccugcagcucuccccuuggccacagcaag

SEQ ID NO: 32227 - RNA, 32 nt, Human
acaccugccaagcaucacaccugccaagcauc

SEQ ID NO: 32228 - RNA, 32 nt, Human
acaccugccugggaacuuuccccugccaggac

SEQ ID NO: 32229 - RNA, 32 nt, Human
acaccugcuacuuacacauuuccucuuuugga

SEQ ID NO: 32230 - RNA, 21 nt, Human
acaccugcuccucccucccca

SEQ ID NO: 32231 - RNA, 32 nt, Human
acaccugcuggccugggggagcuccagccagg

SEQ ID NO: 32232 - RNA, 32 nt, Human
acaccugcugucccaaacccggagaaguguag

SEQ ID NO: 32233 - RNA, 32 nt, Human
acaccuggaccugcuccuuucccuucaaacgc

SEQ ID NO: 32234 - RNA, 32 nt, Human
acaccuggagccaugggaucuacugaggacca

SEQ ID NO: 32235 - RNA, 21 nt, Human
acaccuggagcugggccuaca

SEQ ID NO: 32236 - RNA, 32 nt, Human
acaccuggagguuuugcuucaaagagaggaga

SEQ ID NO: 32237 - RNA, 17 nt, Human
acaccuggccuaggaga

SEQ ID NO: 32238 - RNA, 32 nt, Human
acaccuggccuggaaggaaccucuuaaaauca

SEQ ID NO: 32239 - RNA, 32 nt, Human
acaccuggcugcagggcugggucagcuggccu

SEQ ID NO: 32240 - RNA, 23 nt, Human
acaccuggcuguccccugcccca

SEQ ID NO: 32241 - RNA, 32 nt, Human
acaccugggacaggcugggcagaggggagaga

SEQ ID NO: 32242 - RNA, 32 nt, Human
acaccugggcaaggaagggcugugcauugagg

SEQ ID NO: 32243 - RNA, 32 nt, Human
acaccugggcaggagugcucucaccacgaggc

SEQ ID NO: 32244 - RNA, 32 nt, Human
acaccugggccgggcuguagaucagguuugcc

SEQ ID NO: 32245 - RNA, 32 nt, Human
acaccugggccuggccuugcuccgggaccugc

SEQ ID NO: 32246 - RNA, 32 nt, Human
acaccugggcuggagugcaguggugcaaucau

SEQ ID NO: 32247 - RNA, 32 nt, Human
acaccugguaccagacccauuuucuacccgug

SEQ ID NO: 32248 - RNA, 32 nt, Human
acaccugguaccucaaagaugacucaucuaca

SEQ ID NO: 32249 - RNA, 32 nt, Human
acaccuggucuugcugcuuccucccaccaccu

SEQ ID NO: 32250 - RNA, 32 nt, Human
acaccuggugagugaggcuucaagggagaugc

SEQ ID NO: 32251 - RNA, 32 nt, Human
acaccugguuagaaggucuaggguucuguaua

SEQ ID NO: 32252 - RNA, 32 nt, Human
acaccuguaauaaucccagcacuuugggaggc

SEQ ID NO: 32253 - RNA, 32 nt, Human
acaccuguaaucacugcacuccaaccuggcaa

SEQ ID NO: 32254 - RNA, 32 nt, Human
acaccuguaaucccagccuggaaugcaguggu

SEQ ID NO: 32255 - RNA, 32 nt, Human
acaccuguacagcacguuacuguacuggauac

SEQ ID NO: 32256 - RNA, 32 nt, Human
acaccuguaggcagaggcugccgagacagacc

SEQ ID NO: 32257 - RNA, 32 nt, Human
acaccuguagucccagcacucugggaggcgga

SEQ ID NO: 32258 - RNA, 32 nt, Human
acaccuguagucccagcugcuccugaggcuga

SEQ ID NO: 32259 - RNA, 32 nt, Human
acaccuguaucaugaaagcaaaaagaaguaaa

SEQ ID NO: 32260 - RNA, 20 nt, Human
acaccugucaaaccaaaaau

SEQ ID NO: 32261 - RNA, 32 nt, Human
acaccugucauugagccaagaaaguccaguuu

SEQ ID NO: 32262 - RNA, 24 nt, Human
acaccugucugcaucugacugagc

SEQ ID NO: 32263 - RNA, 32 nt, Human
acaccugugacauccuccagggccacaggagc

SEQ ID NO: 32264 - RNA, 32 nt, Human
acaccugugaguggcucccagcacuuugagag

SEQ ID NO: 32265 - RNA, 32 nt, Human
acaccugugauucaaagacaccugugucaggc

SEQ ID NO: 32266 - RNA, 32 nt, Human
acaccugugcaggcagcugagaggcagcgugc

SEQ ID NO: 32267 - RNA, 32 nt, Human
acaccugugcagggucccagacccaggcccca

SEQ ID NO: 32268 - RNA, 32 nt, Human
acaccuguggaaucccagcacuucaggaggcc

SEQ ID NO: 32269 - RNA, 32 nt, Human
acaccuguggcauguggaggagacugcccugu

SEQ ID NO: 32270 - RNA, 32 nt, Human
acaccuguggggagacuuuuccagcugggcca

SEQ ID NO: 32271 - RNA, 32 nt, Human
acaccuguuuuuaauaauugccauccuaauga

SEQ ID NO: 32272 - RNA, 32 nt, Human
acaccuuaauaugcugcaacaaaauguagaau

SEQ ID NO: 32273 - RNA, 19 nt, Human
acaccuuaaucucaaaaau

SEQ ID NO: 32274 - RNA, 32 nt, Human
acaccuuaaucugugguuacuaauccagcaaa

SEQ ID NO: 32275 - RNA, 21 nt, Human
acaccuucacagcuuccucgc

SEQ ID NO: 32276 - RNA, 19 nt, Human
acaccuucaugccaaaaau

SEQ ID NO: 32277 - RNA, 32 nt, Human
acaccuucauucucuccagcauccucggcauc

SEQ ID NO: 32278 - RNA, 32 nt, Human
acaccuucccucucugaaugcugagcagaggc

SEQ ID NO: 32279 - RNA, 32 nt, Human
acaccuuccuccacccuccacccugggcugcu

SEQ ID NO: 32280 - RNA, 32 nt, Human
acaccuuccugcagggucccuccugggaggca

SEQ ID NO: 32281 - RNA, 32 nt, Human
acaccuucuccaccauccaggccucccuguca

SEQ ID NO: 32282 - RNA, 32 nt, Human
acaccuucuuuggggcucugcaguuccugcau

SEQ ID NO: 32283 - RNA, 32 nt, Human
acaccuugcucuggucaggaaauguccagugu

SEQ ID NO: 32284 - RNA, 32 nt, Human
acaccuuggaugccuuucucuugcaauguccu

SEQ ID NO: 32285 - RNA, 23 nt, Human
acaccuugguguccugggcccca

SEQ ID NO: 32286 - RNA, 32 nt, Human
acaccuugguucugguuaaacagcuguacuuu

SEQ ID NO: 32287 - RNA, 32 nt, Human
acaccuuuccaucccugacucuauggguuacu

SEQ ID NO: 32288 - RNA, 32 nt, Human
acaccuuucccaugccuccucuggagccuucg

SEQ ID NO: 32289 - RNA, 32 nt, Human
acaccuuuccggaacacauacacacacccugc

SEQ ID NO: 32290 - RNA, 32 nt, Human
acaccuuucuuuucuuuuccucuugugccuag

SEQ ID NO: 32291 - RNA, 23 nt, Human
acaccuuugagucccuucccuca

SEQ ID NO: 32292 - RNA, 32 nt, Human
acaccuuuguauguuccuuguauguuccuauc

SEQ ID NO: 32293 - RNA, 32 nt, Human
acacgaaacauuuuugcuuucuccaguuuucu

SEQ ID NO: 32294 - RNA, 32 nt, Human
acacgaacccaggagugugggccagugcugac

SEQ ID NO: 32295 - RNA, 32 nt, Human
acacgaacucggcuucuuuuguccuagguacg

SEQ ID NO: 32296 - RNA, 32 nt, Human
acacgaagauuugugauccaggccucacuucc

SEQ ID NO: 32297 - RNA, 32 nt, Human
acacgaagucaccagcccauagguccagggag

SEQ ID NO: 32298 - RNA, 32 nt, Human
acacgaagugugaacagaguucuuggaggauu

SEQ ID NO: 32299 - RNA, 32 nt, Human
acacgaaucagagccaccuccaaccagcaaga

SEQ ID NO: 32300 - RNA, 32 nt, Human
acacgaaucgcuuucuggaggaggaggggacc

SEQ ID NO: 32301 - RNA, 32 nt, Human
acacgaccaagcucaagacccuuccccugccc

SEQ ID NO: 32302 - RNA, 32 nt, Human
acacgaccacgacaggccucaggauuuugugu

SEQ ID NO: 32303 - RNA, 32 nt, Human
acacgaccaggagcuacaacggauucaggaac

SEQ ID NO: 32304 - RNA, 32 nt, Human
acacgaccuacaaguagggagcagggaaagaa

SEQ ID NO: 32305 - RNA, 32 nt, Human
acacgacgacuucgcucggaggcacaucggcc

SEQ ID NO: 32306 - RNA, 32 nt, Human
acacgacgugggucucugggacugccugugcc

SEQ ID NO: 32307 - RNA, 32 nt, Human
acacgacuccaucacagggagccugaaaaauu

SEQ ID NO: 32308 - RNA, 32 nt, Human
acacgacuggaggggccuggccccagaacagg

SEQ ID NO: 32309 - RNA, 32 nt, Human
acacgagaagagcuaggguagagaaggacgca

SEQ ID NO: 32310 - RNA, 20 nt, Human
acacgagcagacacccuugg

SEQ ID NO: 32311 - RNA, 32 nt, Human
acacgagccacacgggccacacggugacugcu

SEQ ID NO: 32312 - RNA, 32 nt, Human
acacgagccacaucuggauccccagcagcugg

SEQ ID NO: 32313 - RNA, 32 nt, Human
acacgagccuaaggaggagagauggcuugucc

SEQ ID NO: 32314 - RNA, 32 nt, Human
acacgaggacaugagccaguucugcugagcug

SEQ ID NO: 32315 - RNA, 32 nt, Human
acacgaggcuuguuuauaacaccucuuuuccg

SEQ ID NO: 32316 - RNA, 32 nt, Human
acacgagggcauccccucccagguuuucagcc

SEQ ID NO: 32317 - RNA, 32 nt, Human
acacgagguauuuuauacuggugagaaaccuu

SEQ ID NO: 32318 - RNA, 32 nt, Human
acacgaguccaauacuccuacuucgccaaguc

SEQ ID NO: 32319 - RNA, 32 nt, Human
acacgagugugaaccucucuccccugcgucgc

SEQ ID NO: 32320 - RNA, 32 nt, Human
acacgaucauucuugcucacuucuauaacaaa

SEQ ID NO: 32321 - RNA, 32 nt, Human
acacgaucucagcucacugcaaccucugucuc

SEQ ID NO: 32322 - RNA, 32 nt, Human
acacgaugagccagcacgcacaguggggaucg

SEQ ID NO: 32323 - RNA, 32 nt, Human
acacgauuuggcugaguggcuuugugugaccg

SEQ ID NO: 32324 - RNA, 32 nt, Human
acacgcacacaugcacgcacacacacauaugg

SEQ ID NO: 32325 - RNA, 23 nt, Human
acacgcacaccuccaaccuggga

SEQ ID NO: 32326 - RNA, 32 nt, Human
acacgcaccuaccuggaggacaugagcacaug

SEQ ID NO: 32327 - RNA, 32 nt, Human
acacgcagacacauccccacagaccucacuau

SEQ ID NO: 32328 - RNA, 32 nt, Human
acacgcagagugagagggacaugguggcaggg

SEQ ID NO: 32329 - RNA, 32 nt, Human
acacgcagaguugugauucucaguaccaagcu

SEQ ID NO: 32330 - RNA, 32 nt, Human
acacgcagcagagcagaccugaugucccggug

SEQ ID NO: 32331 - RNA, 32 nt, Human
acacgcagccugggugggugaggggagagacg

SEQ ID NO: 32332 - RNA, 32 nt, Human
acacgcaggagguggggaugcgcgugcggcug

SEQ ID NO: 32333 - RNA, 32 nt, Human
acacgcagguggaggugguugugggugcaggu

SEQ ID NO: 32334 - RNA, 32 nt, Human
acacgcagguggugagccuuaaggacaagcua

SEQ ID NO: 32335 - RNA, 32 nt, Human
acacgcaguuugaccccacgcccagcccuucu

SEQ ID NO: 32336 - RNA, 19 nt, Human
acacgcaugcgccaccacg

SEQ ID NO: 32337 - RNA, 32 nt, Human
acacgcauguaugcaugcacaaacaugugugu

SEQ ID NO: 32338 - RNA, 32 nt, Human
acacgccaagcuuugagaaagcucccagugag

SEQ ID NO: 32339 - RNA, 32 nt, Human
acacgccacugcacuccagccugggugacaga

SEQ ID NO: 32340 - RNA, 32 nt, Human
acacgccaggcuaauguuuuuguauuuuuaau

SEQ ID NO: 32341 - RNA, 32 nt, Human
acacgccauccagcagcgcuaagguggacaug

SEQ ID NO: 32342 - RNA, 32 nt, Human
acacgccauugcacucaagccugggcaauaag

SEQ ID NO: 32343 - RNA, 32 nt, Human
acacgcccaagagaggaagcagagggaggcgg

SEQ ID NO: 32344 - RNA, 32 nt, Human
acacgcccacacagcaccucugccaggccuag

SEQ ID NO: 32345 - RNA, 32 nt, Human
acacgccccugccccucguagcaccugccugc

SEQ ID NO: 32346 - RNA, 32 nt, Human
acacgcccguaaucccagcuacucaggaggcu

SEQ ID NO: 32347 - RNA, 32 nt, Human
acacgcccgucaucucagcuacucaggaggcu

SEQ ID NO: 32348 - RNA, 32 nt, Human
acacgccggggcuggcccugcccucccccacg

SEQ ID NO: 32349 - RNA, 21 nt, Human
acacgccuaauagucccagcu

SEQ ID NO: 32350 - RNA, 32 nt, Human
acacgccuauaaucccagcaccuugggaggcu

SEQ ID NO: 32351 - RNA, 32 nt, Human
acacgccuauaaucccagcuacuuaggaggcu

SEQ ID NO: 32352 - RNA, 32 nt, Human
acacgccuauagucccagcuacucaggaggcu

SEQ ID NO: 32353 - RNA, 20 nt, Human
acacgccugaagucccagcu

SEQ ID NO: 32354 - RNA, 32 nt, Human
acacgccugaagucccagcuacucaggaggcu

SEQ ID NO: 32355 - RNA, 20 nt, Human
acacgccugcagucccagcu

SEQ ID NO: 32356 - RNA, 32 nt, Human
acacgccugcagucccagcuacucaggaggcu

SEQ ID NO: 32357 - RNA, 32 nt, Human
acacgccugccuccuguccccuuauccuuucu

SEQ ID NO: 32358 - RNA, 32 nt, Human
acacgccuguaauaccagcuacucagguggcu

SEQ ID NO: 32359 - RNA, 32 nt, Human
acacgccuguaaucacagcuacuugggaggcu

SEQ ID NO: 32360 - RNA, 32 nt, Human
acacgccuguaaucccagcacuuugggaggcc

SEQ ID NO: 32361 - RNA, 32 nt, Human
acacgccuguaaucccagcuaacccuggaugc

SEQ ID NO: 32362 - RNA, 32 nt, Human
acacgccuguaaucccagcuacaccugaggcu

SEQ ID NO: 32363 - RNA, 32 nt, Human
acacgccuguaaucccagcuacucagauggcu

SEQ ID NO: 32364 - RNA, 32 nt, Human
acacgccuguaaucccagcuacucaggaggcu

SEQ ID NO: 32365 - RNA, 32 nt, Human
acacgccuguaaucccagcuacucgggaagcu

SEQ ID NO: 32366 - RNA, 32 nt, Human
acacgccuguaaucccagcuacucuggaggcu

SEQ ID NO: 32367 - RNA, 32 nt, Human
acacgccuguaaucccagcuacuugggaggcu

SEQ ID NO: 32368 - RNA, 32 nt, Human
acacgccuguaaucccagcugcucgggaggca

SEQ ID NO: 32369 - RNA, 32 nt, Human
acacgccuguaaucccagcugcuugggaggcu

SEQ ID NO: 32370 - RNA, 32 nt, Human
acacgccuguaaucccagguacuuggaaggcu

SEQ ID NO: 32371 - RNA, 32 nt, Human
acacgccuguaaucccaguuacuugggaggcc

SEQ ID NO: 32372 - RNA, 32 nt, Human
acacgccuguaaucucagcuacucaggaggcu

SEQ ID NO: 32373 - RNA, 20 nt, Human
acacgccuguaauuccagcu

SEQ ID NO: 32374 - RNA, 20 nt, Human
acacgccuguagucccagcu

SEQ ID NO: 32375 - RNA, 32 nt, Human
acacgccuguagucccagcuacccgggaggcu

SEQ ID NO: 32376 - RNA, 32 nt, Human
acacgccuguagucccagcuaccuaggaggcu

SEQ ID NO: 32377 - RNA, 32 nt, Human
acacgccuguagucccagcuacucaggaggcu

SEQ ID NO: 32378 - RNA, 32 nt, Human
acacgccuguagucccagcuacucgggagccu

SEQ ID NO: 32379 - RNA, 32 nt, Human
acacgccuguagucccagcuacucgggaggcu

SEQ ID NO: 32380 - RNA, 32 nt, Human
acacgccuguagucccagcuacuggggaggcu

SEQ ID NO: 32381 - RNA, 32 nt, Human
acacgccuguagucccagcuccucgggaggca

SEQ ID NO: 32382 - RNA, 20 nt, Human
acacgccuguagucccaguu

SEQ ID NO: 32383 - RNA, 32 nt, Human
acacgccugucaucccagcuacucgguaggcu

SEQ ID NO: 32384 - RNA, 32 nt, Human
acacgccuguggucucagcuacucgggaggcu

SEQ ID NO: 32385 - RNA, 32 nt, Human
acacgcgaccggcagcuccuggagcgggcgga

SEQ ID NO: 32386 - RNA, 32 nt, Human
acacgcgcacacacgaauacaaauaugccuuc

SEQ ID NO: 32387 - RNA, 22 nt, Human
acacgcgcugccuugcgggagg

SEQ ID NO: 32388 - RNA, 32 nt, Human
acacgcgggagggagagcaguguucugcugga

SEQ ID NO: 32389 - RNA, 32 nt, Human
acacgcuccagcccuucaucagccugggcagu

SEQ ID NO: 32390 - RNA, 32 nt, Human
acacgcucccucccccugccccuucuacacuc

SEQ ID NO: 32391 - RNA, 32 nt, Human
acacgcuccugcacccucuccccguccauacc

SEQ ID NO: 32392 - RNA, 32 nt, Human
acacgcugacuaggaaaaggaggaggcggggc

SEQ ID NO: 32393 - RNA, 32 nt, Human
acacgcugaucuccuaguggagaaggauuuau

SEQ ID NO: 32394 - RNA, 32 nt, Human
acacgcugggggugcuggcugagggaacaugg

SEQ ID NO: 32395 - RNA, 32 nt, Human
acacgcuuacucacugagggugagugggaacg

SEQ ID NO: 32396 - RNA, 32 nt, Human
acacggaccuccaggagcagugagagguggcu

SEQ ID NO: 32397 - RNA, 32 nt, Human
acacggaccuggacacagacauggacauggac

SEQ ID NO: 32398 - RNA, 32 nt, Human
acacggagcaugcccgagagccuggacagccc

SEQ ID NO: 32399 - RNA, 32 nt, Human
acacggagcugcagagggccugggccaccauc

SEQ ID NO: 32400 - RNA, 32 nt, Human
acacggaggacccaacaggaggccguggcucu

SEQ ID NO: 32401 - RNA, 32 nt, Human
acacggaguaggagcagagggaagagagaggg

SEQ ID NO: 32402 - RNA, 32 nt, Human
acacggaucucaaauucacaaauguuaacaug

SEQ ID NO: 32403 - RNA, 32 nt, Human
acacggaucugacagacaaugauccagucacc

SEQ ID NO: 32404 - RNA, 32 nt, Human
acacggauggaagguggagcaaaggaaaauac

SEQ ID NO: 32405 - RNA, 32 nt, Human
acacggcaaccauauuuccucugaaugagaag

SEQ ID NO: 32406 - RNA, 32 nt, Human
acacggcacuucaggcuccacgcacagaaucu

SEQ ID NO: 32407 - RNA, 32 nt, Human
acacggcagcagcaagagaaaaaugaagaagc

SEQ ID NO: 32408 - RNA, 32 nt, Human
acacggcaggcugaggugggaggaucacuuga

SEQ ID NO: 32409 - RNA, 32 nt, Human
acacggcaugaggacagagggaggggcacggg

SEQ ID NO: 32410 - RNA, 18 nt, Human
acacggccacaccaccac

SEQ ID NO: 32411 - RNA, 32 nt, Human
acacggccaggaugacagcggagccaggauca

SEQ ID NO: 32412 - RNA, 32 nt, Human
acacggccaggcgaggaugacagggaaaggga

SEQ ID NO: 32413 - RNA, 32 nt, Human
acacggcucacugcagccucaaccuccuggac

SEQ ID NO: 32414 - RNA, 32 nt, Human
acacggcucacugccgccucaaccucuccugg

SEQ ID NO: 32415 - RNA, 32 nt, Human
acacggcuguaaucccagcacuuugggaggcc

SEQ ID NO: 32416 - RNA, 32 nt, Human
acacggcuuguuccagaugaggaaacugaggu

SEQ ID NO: 32417 - RNA, 32 nt, Human
acacgggaagcugucuugcucccuggacgacu

SEQ ID NO: 32418 - RNA, 32 nt, Human
acacgggaagugagaggcacagugagcuguau

SEQ ID NO: 32419 - RNA, 32 nt, Human
acacgggacaagaacuugggaacugccauaca

SEQ ID NO: 32420 - RNA, 32 nt, Human
acacgggaggcagagguugcagugagcagaga

SEQ ID NO: 32421 - RNA, 23 nt, Human
acacgggaggcggagguugcggu

SEQ ID NO: 32422 - RNA, 32 nt, Human
acacgggccuugagaaauguggcucuuguacc

SEQ ID NO: 32423 - RNA, 32 nt, Human
acacgggggcaauaaaccgagccacccgggcg

SEQ ID NO: 32424 - RNA, 32 nt, Human
acacgggguucuggaaggaccuccucagcaug

SEQ ID NO: 32425 - RNA, 32 nt, Human
acacgggguuugucuguaagcugcagugucug

SEQ ID NO: 32426 - RNA, 32 nt, Human
acacgggugaugauuggcuuucuggggagaga

SEQ ID NO: 32427 - RNA, 32 nt, Human
acacggguggcagcagauggcccagcccaggg

SEQ ID NO: 32428 - RNA, 32 nt, Human
acacggguucaggugauucucuugccucagcc

SEQ ID NO: 32429 - RNA, 32 nt, Human
acacggucaagagaucaagaccauccuggcca

SEQ ID NO: 32430 - RNA, 32 nt, Human
acacggucaucaucccuacccacacacagaug

SEQ ID NO: 32431 - RNA, 32 nt, Human
acacggucuucuccguguaucuuuucacauag

SEQ ID NO: 32432 - RNA, 32 nt, Human
acacgguggguggggagcuaggcucaugcagu

SEQ ID NO: 32433 - RNA, 32 nt, Human
acacgguuaaagcaucgcuaucaacugcguaa

SEQ ID NO: 32434 - RNA, 22 nt, Human
acacgguuguggauccagagaa

SEQ ID NO: 32435 - RNA, 32 nt, Human
acacgucacagcucucaaccuccucucagacc

SEQ ID NO: 32436 - RNA, 32 nt, Human
acacgucaggacuggggugagguggcugggcc

SEQ ID NO: 32437 - RNA, 32 nt, Human
acacguccccugccucaacaggcacagcucuc

SEQ ID NO: 32438 - RNA, 32 nt, Human
acacguccucuuguccuugucucccccagaag

SEQ ID NO: 32439 - RNA, 32 nt, Human
acacgucgaggcuggcaccuggcgcgcucggg

SEQ ID NO: 32440 - RNA, 32 nt, Human
acacgucuauaauuccagcuacucaggaggcu

SEQ ID NO: 32441 - RNA, 32 nt, Human
acacgucuguagucccagcuacucagcaggcu

SEQ ID NO: 32442 - RNA, 32 nt, Human
acacgucuguaguccuagcuacucaggaggcu

SEQ ID NO: 32443 - RNA, 32 nt, Human
acacgucuucaguuuuucagcacagaccagca

SEQ ID NO: 32444 - RNA, 32 nt, Human
acacgugacaacaggcccccuugcagagggca

SEQ ID NO: 32445 - RNA, 32 nt, Human
acacgugagcucgcgguccucccagggagcug

SEQ ID NO: 32446 - RNA, 32 nt, Human
acacgugcaaaccugcuguccucugcauuuac

SEQ ID NO: 32447 - RNA, 18 nt, Human
acacgugcacaacccuga

SEQ ID NO: 32448 - RNA, 32 nt, Human
acacgugcacacacacgcauacacaggcacac

SEQ ID NO: 32449 - RNA, 32 nt, Human
acacgugcacacacgccaacaggcaucugcca

SEQ ID NO: 32450 - RNA, 32 nt, Human
acacgugcacacauacacaggcacacaugcau

SEQ ID NO: 32451 - RNA, 32 nt, Human
acacgugcacacaucguacacaugugagcucc

SEQ ID NO: 32452 - RNA, 32 nt, Human
acacgugccuguagucccagcuacucgggagg

SEQ ID NO: 32453 - RNA, 32 nt, Human
acacgugccuguagucccagcuacucuggagg

SEQ ID NO: 32454 - RNA, 32 nt, Human
acacgugccugucacggaggugaggagugagu

SEQ ID NO: 32455 - RNA, 32 nt, Human
acacguggaaccgcagacagggcccagaagcu

SEQ ID NO: 32456 - RNA, 32 nt, Human
acacguggagacuggaugagggcagaugagga

SEQ ID NO: 32457 - RNA, 32 nt, Human
acacguggagugaauuuaaggagcggagaguu

SEQ ID NO: 32458 - RNA, 32 nt, Human
acacguggccccggaaaucagggagcucuuaa

SEQ ID NO: 32459 - RNA, 21 nt, Human
acacguggggccgcagacaua

SEQ ID NO: 32460 - RNA, 32 nt, Human
acacguggugggggccacugaaaccaggccua

SEQ ID NO: 32461 - RNA, 32 nt, Human
acacguguagcucacacacaguauacacauac

SEQ ID NO: 32462 - RNA, 32 nt, Human
acacguguucucuacagcccguccauggaucc

SEQ ID NO: 32463 - RNA, 32 nt, Human
acacguguuguuuuguuuuugcuuuauugaug

SEQ ID NO: 32464 - RNA, 32 nt, Human
acacguuaaagggccuuaaggcauuuuguuau

SEQ ID NO: 32465 - RNA, 32 nt, Human
acacguuacauacuguuuauuguucuaaugua

SEQ ID NO: 32466 - RNA, 32 nt, Human
acacguucuuuucuaaaugccaaugaguuggc

SEQ ID NO: 32467 - RNA, 32 nt, Human
acacguuuagcuauugagauaaggcugggcgu

SEQ ID NO: 32468 - RNA, 32 nt, Human
acacguuuauuugagccuuacuuuaaaaauau

SEQ ID NO: 32469 - RNA, 32 nt, Human
acacguuuccuugagaagcccauuucucaucu

SEQ ID NO: 32470 - RNA, 32 nt, Human
acacuaaaaauacaaaaaguuagacaggcgug

SEQ ID NO: 32471 - RNA, 32 nt, Human
acacuaaacacaaauagccagucuuaacuugc

SEQ ID NO: 32472 - RNA, 32 nt, Human
acacuaaacacuauucugugugcucaaccuag

SEQ ID NO: 32473 - RNA, 32 nt, Human
acacuaaagaucuggucuuugccgucaagguu

SEQ ID NO: 32474 - RNA, 32 nt, Human
acacuaaccaacuugaggggugcaguggucug

SEQ ID NO: 32475 - RNA, 32 nt, Human
acacuaagaaaaucaaauuuuuaaaaguuauu

SEQ ID NO: 32476 - RNA, 32 nt, Human
acacuaagacuccgccccugaggcuccgcccc

SEQ ID NO: 32477 - RNA, 32 nt, Human
acacuaaggagagguaguaaaugugaaccuug

SEQ ID NO: 32478 - RNA, 32 nt, Human
acacuaaggcuccuuuucugaagaagccuuuu

SEQ ID NO: 32479 - RNA, 32 nt, Human
acacuaauguuccucuggggcagcccccaccu

SEQ ID NO: 32480 - RNA, 32 nt, Human
acacuaauucuaggccauucucuccuucaauc

SEQ ID NO: 32481 - RNA, 32 nt, Human
acacuaauuuugaggaccccagguucaaaagu

SEQ ID NO: 32482 - RNA, 32 nt, Human
acacuacaagucuugaguuaagaaggaaagag

SEQ ID NO: 32483 - RNA, 32 nt, Human
acacuacacaacacaccagccgcugcaggucc

SEQ ID NO: 32484 - RNA, 32 nt, Human
acacuacagccuguaauacugcucucuuucaa

SEQ ID NO: 32485 - RNA, 32 nt, Human
acacuacaggcaggguaugagcagagggaugu

SEQ ID NO: 32486 - RNA, 32 nt, Human
acacuacaguggcugaggcaucagcccccgcc

SEQ ID NO: 32487 - RNA, 32 nt, Human
acacuaccaguggauguccagacaugcucuua

SEQ ID NO: 32488 - RNA, 32 nt, Human
acacuaccuuucugggaaauguuaauaaauuu

SEQ ID NO: 32489 - RNA, 32 nt, Human
acacuacucuucuucaauuccucaguuacucc

SEQ ID NO: 32490 - RNA, 32 nt, Human
acacuacugcacuccagccugggcaacagaac

SEQ ID NO: 32491 - RNA, 32 nt, Human
acacuacugcacuccagccugggcgacaaagc

SEQ ID NO: 32492 - RNA, 32 nt, Human
acacuacugcacuccugcaugggcgacugaga

SEQ ID NO: 32493 - RNA, 32 nt, Human
acacuacugcauuccagccugagcaacagagc

SEQ ID NO: 32494 - RNA, 32 nt, Human
acacuacugcauuccagccugggugacagagu

SEQ ID NO: 32495 - RNA, 32 nt, Human
acacuacugugcccagcuaacuuauuuuuauu

SEQ ID NO: 32496 - RNA, 32 nt, Human
acacuacuguggcaaacuggagaagugccaau

SEQ ID NO: 32497 - RNA, 32 nt, Human
acacuagagaauguugcugagagcagaaacgg

SEQ ID NO: 32498 - RNA, 26 nt, Human
acacuagccugggugacagagcaaga

SEQ ID NO: 32499 - RNA, 32 nt, Human
acacuagcuucccagggcugcccccgacaggc

SEQ ID NO: 32500 - RNA, 32 nt, Human
acacuagcuuucguuccuuagaaugucuuuuc

SEQ ID NO: 32501 - RNA, 32 nt, Human
acacuaggaggacagacacaggcuccaaacuc

SEQ ID NO: 32502 - RNA, 16 nt, Human
acacuaggcugggccc

SEQ ID NO: 32503 - RNA, 32 nt, Human
acacuagggccuuggaaauuccuguacugugu

SEQ ID NO: 32504 - RNA, 17 nt, Human
acacuagucacaaugca

SEQ ID NO: 32505 - RNA, 32 nt, Human
acacuagucuugaacuccuggccucaagcaau

SEQ ID NO: 32506 - RNA, 32 nt, Human
acacuagugcuuccgcuggaguuugcaguuuu

SEQ ID NO: 32507 - RNA, 32 nt, Human
acacuauauaaauaagcuuuuaaacaagucau

SEQ ID NO: 32508 - RNA, 32 nt, Human
acacuauauuggagucucuuucucagacuucc

SEQ ID NO: 32509 - RNA, 32 nt, Human
acacuaucauagauuccuuagguaaauacaau

SEQ ID NO: 32510 - RNA, 32 nt, Human
acacuaugaggacccagguggcaccagcagua

SEQ ID NO: 32511 - RNA, 32 nt, Human
acacuaugaguguuugggauguguuuuauuua

SEQ ID NO: 32512 - RNA, 32 nt, Human
acacuaugugccagacacggugcugagcauug

SEQ ID NO: 32513 - RNA, 31 nt, Human
acacuauuaauaaauaccuuagagaaagauu

SEQ ID NO: 32514 - RNA, 32 nt, Human
acacuauugcacuccagccugggcgacagggc

SEQ ID NO: 32515 - RNA, 32 nt, Human
acacuauuucaucaaucuuuucacaugucauu

SEQ ID NO: 32516 - RNA, 32 nt, Human
acacucacauguuagaaugaaaagagcaguag

SEQ ID NO: 32517 - RNA, 22 nt, Human
acacucaccacucccagcuucu

SEQ ID NO: 32518 - RNA, 32 nt, Human
acacucaccgggaaggucugcagcuucacucc

SEQ ID NO: 32519 - RNA, 32 nt, Human
acacucaccgugaaggucugcagcuucacucc

SEQ ID NO: 32520 - RNA, 22 nt, Human
acacucaccuggcuccagccuc

SEQ ID NO: 32521 - RNA, 32 nt, Human
acacucacggcgaaggucugcagcuucacucc

SEQ ID NO: 32522 - RNA, 32 nt, Human
acacucacuggcugggaaaagacaauguggau

SEQ ID NO: 32523 - RNA, 32 nt, Human
acacucacugggaaugucugcagcuucacucc

SEQ ID NO: 32524 - RNA, 32 nt, Human
acacucacuucuuuuuagcugugugagcauga

SEQ ID NO: 32525 - RNA, 32 nt, Human
acacucagcugcaaguccaaagccacaagugc

SEQ ID NO: 32526 - RNA, 32 nt, Human
acacucagcugcagugagaauacacaggcauc

SEQ ID NO: 32527 - RNA, 32 nt, Human
acacucaggagaagaaggagauugcuuuucag

SEQ ID NO: 32528 - RNA, 32 nt, Human
acacucaggcuggaguggugguaagggacacg

SEQ ID NO: 32529 - RNA, 32 nt, Human
acacucauaacacccauaccucauuccugacu

SEQ ID NO: 32530 - RNA, 23 nt, Human
acacucaucaauaaauaaguguu

SEQ ID NO: 32531 - RNA, 32 nt, Human
acacucauccagacuucucugaagcagaaaac

SEQ ID NO: 32532 - RNA, 32 nt, Human
acacucaucguaugggcucugcaaagggauau

SEQ ID NO: 32533 - RNA, 32 nt, Human
acacucaucuacagagaauauacacuguucuu

SEQ ID NO: 32534 - RNA, 32 nt, Human
acacucaucucugacaagacugaagaugauua

SEQ ID NO: 32535 - RNA, 32 nt, Human
acacucauggacucacacauacacucacaugc

SEQ ID NO: 32536 - RNA, 32 nt, Human
acacucauugcagccaagaugcacaaagcaca

SEQ ID NO: 32537 - RNA, 32 nt, Human
acacucauuggaaggggacgaggaauccaggg

SEQ ID NO: 32538 - RNA, 32 nt, Human
acacucauuuugaggaccccagguucaaaagu

SEQ ID NO: 32539 - RNA, 32 nt, Human
acacuccaaccuaggugacagagcaagacccu

SEQ ID NO: 32540 - RNA, 32 nt, Human
acacuccaaguuucagcaguuuuagcgccacc

SEQ ID NO: 32541 - RNA, 32 nt, Human
acacuccaaugcuuuucaauagcuaaagaauu

SEQ ID NO: 32542 - RNA, 32 nt, Human
acacuccacacucacaccuccaccuuaacaaa

SEQ ID NO: 32543 - RNA, 32 nt, Human
acacuccagcacucagcccccuugcccaccuc

SEQ ID NO: 32544 - RNA, 32 nt, Human
acacuccagcauggacaauagagcaagaaccc

SEQ ID NO: 32545 - RNA, 32 nt, Human
acacuccagccccuuucugggauccuggccac

SEQ ID NO: 32546 - RNA, 32 nt, Human
acacuccagccugagcgacagagcaagacucc

SEQ ID NO: 32547 - RNA, 32 nt, Human
acacuccagccuggauaacagagcgagacccu

SEQ ID NO: 32548 - RNA, 32 nt, Human
acacuccagccuggccacagagcgagacucag

SEQ ID NO: 32549 - RNA, 32 nt, Human
acacuccagccuggcgacagagcgagacuugg

SEQ ID NO: 32550 - RNA, 32 nt, Human
acacuccagccugggcaacagagcaagacucg

SEQ ID NO: 32551 - RNA, 32 nt, Human
acacuccagccuggugacagagugagacucca

SEQ ID NO: 32552 - RNA, 32 nt, Human
acacuccaggaaagagcugaagacugacuagc

SEQ ID NO: 32553 - RNA, 32 nt, Human
acacuccaggugagccaggaucaaucccuggu

SEQ ID NO: 32554 - RNA, 32 nt, Human
acacuccagugaaauguacugaguggauuccg

SEQ ID NO: 32555 - RNA, 32 nt, Human
acacuccauuuucccuccucugaagcuuccaa

SEQ ID NO: 32556 - RNA, 32 nt, Human
acacucccaaagauacccacagaaguccagcc

SEQ ID NO: 32557 - RNA, 32 nt, Human
acacucccaagggaacuggugcuugcugggaa

SEQ ID NO: 32558 - RNA, 32 nt, Human
acacucccacacuccagccuggguaacaguga

SEQ ID NO: 32559 - RNA, 18 nt, Human
acacucccaccccagcca

SEQ ID NO: 32560 - RNA, 32 nt, Human
acacucccagcaccuaguaugcucaguaaaug

SEQ ID NO: 32561 - RNA, 32 nt, Human
acacuccccaaaacaccccuuuccaguuacaa

SEQ ID NO: 32562 - RNA, 32 nt, Human
acacuccccauacccuucagugcaguguacca

SEQ ID NO: 32563 - RNA, 32 nt, Human
acacucccgcguccaccucucccucccugcuu

SEQ ID NO: 32564 - RNA, 32 nt, Human
acacucccugacaugcucacacacugucacac

SEQ ID NO: 32565 - RNA, 32 nt, Human
acacucccugacaugcucacacacugucauac

SEQ ID NO: 32566 - RNA, 32 nt, Human
acacucccugcucagcuccucgugcugcccug

SEQ ID NO: 32567 - RNA, 32 nt, Human
acacucccuguggcugcccuuugugauucccu

SEQ ID NO: 32568 - RNA, 32 nt, Human
acacucccuucccaugacccaggcugggcaag

SEQ ID NO: 32569 - RNA, 20 nt, Human
acacuccgccuugugacuca

SEQ ID NO: 32570 - RNA, 32 nt, Human
acacuccggccucucagaauucacuugagguu

SEQ ID NO: 32571 - RNA, 32 nt, Human
acacuccguggacuccucucuccaucagacug

SEQ ID NO: 32572 - RNA, 32 nt, Human
acacuccuagcagcugguaaaggggugcugga

SEQ ID NO: 32573 - RNA, 32 nt, Human
acacuccucacacugcucaggcuccaacaugu

SEQ ID NO: 32574 - RNA, 32 nt, Human
acacuccucgcacuuccagccuuggagcccuu

SEQ ID NO: 32575 - RNA, 32 nt, Human
acacuccugcaggagucggcggagcaggcaga

SEQ ID NO: 32576 - RNA, 32 nt, Human
acacuccugccuggcagcuccccauguuuagc

SEQ ID NO: 32577 - RNA, 32 nt, Human
acacuccugcugcggcucauguuuggaagcug

SEQ ID NO: 32578 - RNA, 32 nt, Human
acacuccugcuguuccagccucugcaggugaa

SEQ ID NO: 32579 - RNA, 32 nt, Human
acacuccuggacugggcuagccugcacugccu

SEQ ID NO: 32580 - RNA, 32 nt, Human
acacuccuggcaucccagcgucuccagcuugc

SEQ ID NO: 32581 - RNA, 32 nt, Human
acacuccugggagcucaggaggcuucugagcu

SEQ ID NO: 32582 - RNA, 32 nt, Human
acacuccugggcucugaacacacacgccagcu

SEQ ID NO: 32583 - RNA, 32 nt, Human
acacuccuguaaucccagcuacuggggaggcu

SEQ ID NO: 32584 - RNA, 32 nt, Human
acacuccuguaaucccagcuacuuaggaggcu

SEQ ID NO: 32585 - RNA, 32 nt, Human
acacucgaacagauuccucaacggagagcuau

SEQ ID NO: 32586 - RNA, 32 nt, Human
acacucgagucagcuaaaacugcccccagcac

SEQ ID NO: 32587 - RNA, 32 nt, Human
acagucaccagcugggccccggccgcccagag

SEQ ID NO: 32588 - RNA, 32 nt, Human
acagucacccugguuuuaauugcccacaacuc

SEQ ID NO: 32589 - RNA, 32 nt, Human
acagucaccugaccaaauaaauggagaaagcu

SEQ ID NO: 32590 - RNA, 32 nt, Human
acagucacgccacugcauucuauccugggcaa

SEQ ID NO: 32591 - RNA, 32 nt, Human
acagucacugcaaucucuuuaccaccucccca

SEQ ID NO: 32592 - RNA, 27 nt, Human
acagucacugcccagagguacugagga

SEQ ID NO: 32593 - RNA, 32 nt, Human
acagucagaagugggucugugggaucuguggu

SEQ ID NO: 32594 - RNA, 32 nt, Human
acagucagaccagcagugaauagcuaugcuuc

SEQ ID NO: 32595 - RNA, 32 nt, Human
acagucagcccaugggcugggaugggaucccc

SEQ ID NO: 32596 - RNA, 32 nt, Human
acagucagccgcaauacugaugaagcugagaa

SEQ ID NO: 32597 - RNA, 32 nt, Human
acagucagcugcagaaguccugcugaccaccu

SEQ ID NO: 32598 - RNA, 32 nt, Human
acagucagcugggcugaguguauuccaaacgg

SEQ ID NO: 32599 - RNA, 32 nt, Human
acagucagcuuugggguuccuuuuauuagugc

SEQ ID NO: 32600 - RNA, 19 nt, Human
acagucaggacaagggggg

SEQ ID NO: 32601 - RNA, 32 nt, Human
acagucaggagagagcgaugccagagagaacg

SEQ ID NO: 32602 - RNA, 32 nt, Human
acagucaggcaugaauuguaagaaaaaggagu

SEQ ID NO: 32603 - RNA, 32 nt, Human
acagucaggcuuccagcacauucucccccauu

SEQ ID NO: 32604 - RNA, 32 nt, Human
acagucaggggcccugauuccacuuccuuugg

SEQ ID NO: 32605 - RNA, 32 nt, Human
acagucauaucuuccgacguggagauuugaga

SEQ ID NO: 32606 - RNA, 32 nt, Human
acagucauaucuuccgauguggagauuugaga

SEQ ID NO: 32607 - RNA, 32 nt, Human
acagucauaucuuucgauguggagauuugaga

SEQ ID NO: 32608 - RNA, 32 nt, Human
acagucaucacuucuuggaguugguuaccuug

SEQ ID NO: 32609 - RNA, 32 nt, Human
acagucaucaucagggccuggggccugagaga

SEQ ID NO: 32610 - RNA, 18 nt, Human
acagucauccacaaggca

SEQ ID NO: 32611 - RNA, 32 nt, Human
acagucaucccuugauaccugcuggguauugg

SEQ ID NO: 32612 - RNA, 32 nt, Human
acagucaucugccaccacaccuggcuaauuuu

SEQ ID NO: 32613 - RNA, 32 nt, Human
acagucauuuugcuuaucugcgguuucucauu

SEQ ID NO: 32614 - RNA, 32 nt, Human
acaguccaaaagugagcaccugccuggagcug

SEQ ID NO: 32615 - RNA, 32 nt, Human
acaguccagaagccugagagacaguggccccu

SEQ ID NO: 32616 - RNA, 32 nt, Human
acagucccaacaucugccucauagcagauucu

SEQ ID NO: 32617 - RNA, 32 nt, Human
acagucccagcacuuuaagagacucaggcagg

SEQ ID NO: 32618 - RNA, 32 nt, Human
acagucccauggcccacccaaggagagccggc

SEQ ID NO: 32619 - RNA, 32 nt, Human
acaguccccagccuggccaaggccauaguccc

SEQ ID NO: 32620 - RNA, 20 nt, Human
acaguccccguggccauccc

SEQ ID NO: 32621 - RNA, 32 nt, Human
acagucccuccaggguuugggcaggagauggc

SEQ ID NO: 32622 - RNA, 32 nt, Human
acagucccucccacagucuacucugucuccac

SEQ ID NO: 32623 - RNA, 32 nt, Human
acagucccucuucuccccaggaccccagggcc

SEQ ID NO: 32624 - RNA, 32 nt, Human
acagucccugcaggagcagccuccaagcugcc

SEQ ID NO: 32625 - RNA, 24 nt, Human
acagucccuggacaaccuccugcu

SEQ ID NO: 32626 - RNA, 32 nt, Human
acagucccuucucccuucuuccuucuuccuuc

SEQ ID NO: 32627 - RNA, 32 nt, Human
acaguccgaccucacucaauacccacaaccau

SEQ ID NO: 32628 - RNA, 22 nt, Human
acaguccgcuaaagcuaucaaa

SEQ ID NO: 32629 - RNA, 32 nt, Human
acaguccggguaacauaaugagaccuguccuc

SEQ ID NO: 32630 - RNA, 32 nt, Human
acaguccuccaaaaauaaacauuuuauauaga

SEQ ID NO: 32631 - RNA, 32 nt, Human
acaguccuccacccuguccugugguccugugu

SEQ ID NO: 32632 - RNA, 32 nt, Human
acaguccuccugcugcugguccuuagugaaug

SEQ ID NO: 32633 - RNA, 32 nt, Human
acaguccugcagccucauauggcucaauaaaa

SEQ ID NO: 32634 - RNA, 32 nt, Human
acaguccugcagcugcugggucacagaguggc

SEQ ID NO: 32635 - RNA, 32 nt, Human
acaguccuggaggcagagaugcaguuaccuac

SEQ ID NO: 32636 - RNA, 32 nt, Human
acaguccuuacuucucuaccugccucaagaag

SEQ ID NO: 32637 - RNA, 32 nt, Human
acaguccuuggguagacugagaucauggcuag

SEQ ID NO: 32638 - RNA, 32 nt, Human
acaguccuuuguauucugcugagagcuuuccu

SEQ ID NO: 32639 - RNA, 32 nt, Human
acagucgcccgccaccacgcccggcuaauuuu

SEQ ID NO: 32640 - RNA, 32 nt, Human
acagucgccguccugucaagagcgcuaaugaa

SEQ ID NO: 32641 - RNA, 32 nt, Human
acagucgggcuccaggcuccuccugggucuga

SEQ ID NO: 32642 - RNA, 32 nt, Human
acagucgguuuccaucagaguggucaucuuca

SEQ ID NO: 32643 - RNA, 32 nt, Human
acagucguaugauuucuagcccauggguuuaa

SEQ ID NO: 32644 - RNA, 32 nt, Human
acagucguuucuuuuccagccuccuggccuuc

SEQ ID NO: 32645 - RNA, 32 nt, Human
acagucucaaaaccagcaacagcagcaguacc

SEQ ID NO: 32646 - RNA, 32 nt, Human
acagucucacccagacuccaggcugucuuuca

SEQ ID NO: 32647 - RNA, 32 nt, Human
acagucucacuucauuacccaggcuggagugc

SEQ ID NO: 32648 - RNA, 32 nt, Human
acagucucagccacaaaacacuuccucaaaca

SEQ ID NO: 32649 - RNA, 32 nt, Human
acagucucagccccaccgacccacuuucuugg

SEQ ID NO: 32650 - RNA, 32 nt, Human
acagucucagggagguggugggcggggcccuu

SEQ ID NO: 32651 - RNA, 21 nt, Human
acagucucaggugcuguguug

SEQ ID NO: 32652 - RNA, 32 nt, Human
acagucuccuggugucacccaggcuggagugc

SEQ ID NO: 32653 - RNA, 32 nt, Human
acagucucgagggaagagggucugguggaagg

SEQ ID NO: 32654 - RNA, 32 nt, Human
acagucucgccugucugucucuggccuuggug

SEQ ID NO: 32655 - RNA, 32 nt, Human
acagucucuaugcuuauuuacaucuucuacug

SEQ ID NO: 32656 - RNA, 32 nt, Human
acagucucucaggcaugugcaggguccuagga

SEQ ID NO: 32657 - RNA, 32 nt, Human
acagucucucucugucacccaggcuggcgugc

SEQ ID NO: 32658 - RNA, 32 nt, Human
acagucugaagaggaaggaagcagcaguaucu

SEQ ID NO: 32659 - RNA, 32 nt, Human
acagucugaagcucgcauccagacagucgcuc

SEQ ID NO: 32660 - RNA, 32 nt, Human
acagucugagcaagagaccugcagccccuguu

SEQ ID NO: 32661 - RNA, 32 nt, Human
acagucugcaccuggaguccuuguuuguaacc

SEQ ID NO: 32662 - RNA, 32 nt, Human
acagucugcaucuuauagcagugccuuugucu

SEQ ID NO: 32663 - RNA, 32 nt, Human
acagucugcauuccacagugacaguauucuug

SEQ ID NO: 32664 - RNA, 32 nt, Human
acagucugcgaccuucuuguuuggagaugaga

SEQ ID NO: 32665 - RNA, 32 nt, Human
acagucuggagugcuguggugcaauuaugguu

SEQ ID NO: 32666 - RNA, 21 nt, Human
acagucuggcagaccuccacc

SEQ ID NO: 32667 - RNA, 32 nt, Human
acagucuggccaacauggcgaaaccucaucuc

SEQ ID NO: 32668 - RNA, 32 nt, Human
acagucuggcccugucgcccaggcuggagugc

SEQ ID NO: 32669 - RNA, 32 nt, Human
acagucuggcucugcugcccaggcuggaaugc

SEQ ID NO: 32670 - RNA, 31 nt, Human
acagucuggguggaauggggcugaaaccaug

SEQ ID NO: 32671 - RNA, 22 nt, Human
acagucugguaggucuacaacc

SEQ ID NO: 32672 - RNA, 32 nt, Human
acagucugucaccucccuccccgccacuuugu

SEQ ID NO: 32673 - RNA, 32 nt, Human
acagucuuacugaagaacauucccagugcccc

SEQ ID NO: 32674 - RNA, 32 nt, Human
acagucuucaucuuccuccucaagacagcugg

SEQ ID NO: 32675 - RNA, 32 nt, Human
acagucuuccagcuuguaaaugccauugacuu

SEQ ID NO: 32676 - RNA, 32 nt, Human
acagucuugcauucagcagguguuuguucauc

SEQ ID NO: 32677 - RNA, 32 nt, Human
acagucuugccuuucucuugguguuuucuuuc

SEQ ID NO: 32678 - RNA, 21 nt, Human
acagucuugggcuggaugggu

SEQ ID NO: 32679 - RNA, 32 nt, Human
acagucuuguagggaagaucuguauggaauua

SEQ ID NO: 32680 - RNA, 32 nt, Human
acagucuuucuuagauucucuaccucccucuu

SEQ ID NO: 32681 - RNA, 32 nt, Human
acagucuuugugaaauaaaauaacgugcuuca

SEQ ID NO: 32682 - RNA, 32 nt, Human
acagugaaaagaggagugacaggagggaaagg

SEQ ID NO: 32683 - RNA, 32 nt, Human
acagugaaaagcaagaggaaagagaugggaua

SEQ ID NO: 32684 - RNA, 32 nt, Human
acagugaaagugaaucugaagcgaaugaaacc

SEQ ID NO: 32685 - RNA, 32 nt, Human
acagugaaaugagaaagaauucacugggaguu

SEQ ID NO: 32686 - RNA, 24 nt, Human
acagugaaccgagaucacaccacu

SEQ ID NO: 32687 - RNA, 32 nt, Human
acagugaacuuccagaccucagggcaggucua

SEQ ID NO: 32688 - RNA, 32 nt, Human
acagugaagacaucgguggccacuccaauaac

SEQ ID NO: 32689 - RNA, 32 nt, Human
acagugaaggagcugcugcagcaaagacgggc

SEQ ID NO: 32690 - RNA, 32 nt, Human
acagugaaucagguguuaaggaagaugcagag

SEQ ID NO: 32691 - RNA, 32 nt, Human
acagugaaugcagggagaguagacccugggcu

SEQ ID NO: 32692 - RNA, 32 nt, Human
acagugaaugggagguggaggaggguugcagc

SEQ ID NO: 32693 - RNA, 21 nt, Human
acagugaauguaguccgugaa

SEQ ID NO: 32694 - RNA, 32 nt, Human
acagugaccaacaccuucaggacgaacaauau

SEQ ID NO: 32695 - RNA, 18 nt, Human
acagugacccuggccuca

SEQ ID NO: 32696 - RNA, 32 nt, Human
acagugaccugccucugcacacagccagaaug

SEQ ID NO: 32697 - RNA, 32 nt, Human
acagugaccuggcuggaguuaccuggugcaca

SEQ ID NO: 32698 - RNA, 32 nt, Human
acagugacugcaaauggcuucucagguuccca

SEQ ID NO: 32699 - RNA, 32 nt, Human
acagugacugcaaccaguaccuaugggucaca

SEQ ID NO: 32700 - RNA, 32 nt, Human
acagugacuugcuuugggggaggggaggcucu

SEQ ID NO: 32701 - RNA, 32 nt, Human
acagugacuuguuuccuuuuucccucugaacu

SEQ ID NO: 32702 - RNA, 32 nt, Human
acagugagaaggagcaggaaguugcuguuucu

SEQ ID NO: 32703 - RNA, 32 nt, Human
acagugagagaaaagggggagaaggauuggag

SEQ ID NO: 32704 - RNA, 24 nt, Human
acagugagccaagaucacaccacu

SEQ ID NO: 32705 - RNA, 23 nt, Human
acagugagccaugaucacaccac

SEQ ID NO: 32706 - RNA, 32 nt, Human
acagugagcccaacgcccuggcucucgagggg

SEQ ID NO: 32707 - RNA, 24 nt, Human
acagugagccgagaucacaccacu

SEQ ID NO: 32708 - RNA, 32 nt, Human
acagugagcgaguuuucacgagaucugauggu

SEQ ID NO: 32709 - RNA, 24 nt, Human
acagugagcuaugauuacaccacu

SEQ ID NO: 32710 - RNA, 22 nt, Human
acagugagcugagaucacccca

SEQ ID NO: 32711 - RNA, 19 nt, Human
acagugagcugccauucca

SEQ ID NO: 32712 - RNA, 24 nt, Human
acagugagcuguggucacaccacu

SEQ ID NO: 32713 - RNA, 21 nt, Human
acagugagcuuggugcacucc

SEQ ID NO: 32714 - RNA, 32 nt, Human
acagugaggagguggucaucagcaacccagga

SEQ ID NO: 32715 - RNA, 32 nt, Human
acagugaggcauacccagaggacucugagagg

SEQ ID NO: 32716 - RNA, 32 nt, Human
acagugaggcuggggaaggggaagugaauuua

SEQ ID NO: 32717 - RNA, 32 nt, Human
acagugagggagcaagggagagcaggggaggu

SEQ ID NO: 32718 - RNA, 32 nt, Human
acagugagguacucugcugaaguuucagcggu

SEQ ID NO: 32719 - RNA, 32 nt, Human
acagugagguuccaucacaaaggggcaguauu

SEQ ID NO: 32720 - RNA, 32 nt, Human
acagugaguccuccucuuccucuggcaucaau

SEQ ID NO: 32721 - RNA, 32 nt, Human
acagugauaaccacagugacagccaaaagggc

SEQ ID NO: 32722 - RNA, 32 nt, Human
acagugauagagacagaggaacaaaaagagca

SEQ ID NO: 32723 - RNA, 32 nt, Human
acagugaugacaacaagcagugccccaacuuc

SEQ ID NO: 32724 - RNA, 32 nt, Human
acagugaugccaugggggacccuugccuucca

SEQ ID NO: 32725 - RNA, 32 nt, Human
acagugaugcugcugcuaagggcuuccaaaca

SEQ ID NO: 32726 - RNA, 32 nt, Human
acagugcaacagcacuggcucucuccaggauc

SEQ ID NO: 32727 - RNA, 32 nt, Human
acagugcaaggugggagagaccaggggccccg

SEQ ID NO: 32728 - RNA, 17 nt, Human
acagugcaauccggguu

SEQ ID NO: 32729 - RNA, 22 nt, Human
acagugcacaggcuggucuucu

SEQ ID NO: 32730 - RNA, 32 nt, Human
acagugcaccugcccaggggcuguucagagcu

SEQ ID NO: 32731 - RNA, 32 nt, Human
acagugcacuauguuaguuuauuugagcacuu

SEQ ID NO: 32732 - RNA, 32 nt, Human
acagugcagaaaggcuugaaccugccagcuga

SEQ ID NO: 32733 - RNA, 32 nt, Human
acagugcagaagccugcacaccugccaagucu

SEQ ID NO: 32734 - RNA, 32 nt, Human
acagugcaggaaaacuucuuuagggcacaaua

SEQ ID NO: 32735 - RNA, 32 nt, Human
acagugcaggcccggggcccacgggcaacaug

SEQ ID NO: 32736 - RNA, 24 nt, Human
acagugcaggggcuuuuggcuucu

SEQ ID NO: 32737 - RNA, 32 nt, Human
acagugcagguguagacggaguucagaucaga

SEQ ID NO: 32738 - RNA, 32 nt, Human
acagugcagugaauuggaagacuugacugcaa

SEQ ID NO: 32739 - RNA, 32 nt, Human
acagugcaguguguucacaaggccaguuucug

SEQ ID NO: 32740 - RNA, 31 nt, Human
acagugcaguuucaguauguuucauguuagu

SEQ ID NO: 32741 - RNA, 32 nt, Human
acagugcaugcacuccagccugggcaacagac

SEQ ID NO: 32742 - RNA, 32 nt, Human
acagugccacccuccugacccugccgagguac

SEQ ID NO: 32743 - RNA, 32 nt, Human
acagugccaccuccucagcucucagcuugggg

SEQ ID NO: 32744 - RNA, 32 nt, Human
acagugccacggcuuuuggggcucagaccucc

SEQ ID NO: 32745 - RNA, 32 nt, Human
acagugccacugcaauccagccugggcaacag

SEQ ID NO: 32746 - RNA, 32 nt, Human
acagugccagaacccagagagcagagcuuugg

SEQ ID NO: 32747 - RNA, 32 nt, Human
acagugccaggaggaagaaggaaggagucccu

SEQ ID NO: 32748 - RNA, 32 nt, Human
acagugccaugaucauagcucacugcagccuc

SEQ ID NO: 32749 - RNA, 32 nt, Human
acagugccauugcacuccagccugcacaacaa

SEQ ID NO: 32750 - RNA, 32 nt, Human
acagugcccaguccugccccacagggaucuag

SEQ ID NO: 32751 - RNA, 32 nt, Human
acagugcccaucuugccagcagugcccgcccc

SEQ ID NO: 32752 - RNA, 32 nt, Human
acagugcccugagaccucuagagaaaagaugu

SEQ ID NO: 32753 - RNA, 32 nt, Human
acagugcccugccuucugguuuguucacaggg

SEQ ID NO: 32754 - RNA, 32 nt, Human
acagugcccuguuccuggaauguuucagauac

SEQ ID NO: 32755 - RNA, 32 nt, Human
acagugccgagggggagacccuacauucaucu

SEQ ID NO: 32756 - RNA, 32 nt, Human
acagugccgugagacuuagcuccauggccaaa

SEQ ID NO: 32757 - RNA, 32 nt, Human
acagugccuaagggcuaggccacccagagacu

SEQ ID NO: 32758 - RNA, 32 nt, Human
acagugccuagaaugggcucuuuauccaguag

SEQ ID NO: 32759 - RNA, 28 nt, Human
acagugccuagugcugcucauuaugugu

SEQ ID NO: 32760 - RNA, 32 nt, Human
acagugccuaguguugacauuuucuugacacg

SEQ ID NO: 32761 - RNA, 32 nt, Human
acagugccucaaauccugacccaagggccagc

SEQ ID NO: 32762 - RNA, 32 nt, Human
acagugccugggaauguacuuauucugcagca

SEQ ID NO: 32763 - RNA, 20 nt, Human
acagugccugggcucagccu

SEQ ID NO: 32764 - RNA, 32 nt, Human
acagugccugucucgccuccaucagggagagc

SEQ ID NO: 32765 - RNA, 32 nt, Human
acagugccuguucucugcuccaggaacagagc

SEQ ID NO: 32766 - RNA, 22 nt, Human
acagugccuuuccauccgugaa

SEQ ID NO: 32767 - RNA, 32 nt, Human
acagugccuuuccuugcccuguucucaauaac

SEQ ID NO: 32768 - RNA, 32 nt, Human
acagugccuuuuccucuccugcucugagccag

SEQ ID NO: 32769 - RNA, 32 nt, Human
acagugcggcauauucagauucagaccucuuu

SEQ ID NO: 32770 - RNA, 32 nt, Human
acagugcggugggcgauggcccaggugggugg

SEQ ID NO: 32771 - RNA, 32 nt, Human
acagugcuaaagaucgccuggcucagucagac

SEQ ID NO: 32772 - RNA, 32 nt, Human
acagugcuacaaagaauacagcugcucagucc

SEQ ID NO: 32773 - RNA, 32 nt, Human
acagugcuauaaucccagcacuguggaaggcc

SEQ ID NO: 32774 - RNA, 32 nt, Human
acagugcugaaccaucuucccuccuguucucc

SEQ ID NO: 32775 - RNA, 32 nt, Human
acagugcugacgaguacagagcuaaauggagc

SEQ ID NO: 32776 - RNA, 21 nt, Human
acagugcugauugcccaggcc

SEQ ID NO: 32777 - RNA, 32 nt, Human
acagugcuguucuggagcugcuguuccaacag

SEQ ID NO: 32778 - RNA, 32 nt, Human
acagugcuuacccacgaggcaauacuuacuau

SEQ ID NO: 32779 - RNA, 32 nt, Human
acagugcuuuggauucuuccucccaggccuac

SEQ ID NO: 32780 - RNA, 32 nt, Human
acaguggaagccauccccugaaugacaaguca

SEQ ID NO: 32781 - RNA, 32 nt, Human
acaguggacacagcaggcuauuuucuaguuug

SEQ ID NO: 32782 - RNA, 32 nt, Human
acaguggacacccuggccaagcagggugccca

SEQ ID NO: 32783 - RNA, 32 nt, Human
acaguggacagggagaccucacagagaaaggc

SEQ ID NO: 32784 - RNA, 32 nt, Human
acaguggacccuaccagccugcgggaaggugg

SEQ ID NO: 32785 - RNA, 32 nt, Human
acaguggagaagaagacagaaaaggcuguggc

SEQ ID NO: 32786 - RNA, 32 nt, Human
acaguggagaauuuacagucucucucagugau

SEQ ID NO: 32787 - RNA, 32 nt, Human
acaguggagagggcagcagcguggccugaagg

SEQ ID NO: 32788 - RNA, 32 nt, Human
acaguggagagggcuacaaaggaggacaagac

SEQ ID NO: 32789 - RNA, 32 nt, Human
acaguggaugcugcugggccucugccuugucc

SEQ ID NO: 32790 - RNA, 32 nt, Human
acaguggcacgaucucagcucacugcaaccuc

SEQ ID NO: 32791 - RNA, 32 nt, Human
acaguggcagaacaaacuccacccuaaugugg

SEQ ID NO: 32792 - RNA, 32 nt, Human
acaguggcagagcacacaugugcacagguucu

SEQ ID NO: 32793 - RNA, 22 nt, Human
acaguggcagagcccugagcag

SEQ ID NO: 32794 - RNA, 32 nt, Human
acaguggcagcagaagcuaggagccaugugga

SEQ ID NO: 32795 - RNA, 32 nt, Human
acaguggcagcccugaggaagaugguugcaga

SEQ ID NO: 32796 - RNA, 32 nt, Human
acaguggcagguaauaaguggaagagaagaau

SEQ ID NO: 32797 - RNA, 32 nt, Human
acaguggcaugaucauagcucacugcagccuu

SEQ ID NO: 32798 - RNA, 32 nt, Human
acaguggcaugaucucagcucacugcaaacuc

SEQ ID NO: 32799 - RNA, 32 nt, Human
acaguggcauguaccuguugucucagcuaugu

SEQ ID NO: 32800 - RNA, 32 nt, Human
acaguggccacagcccaacaggaggccgggga

SEQ ID NO: 32801 - RNA, 32 nt, Human
acaguggccauggguggaucugaaagcuggug

SEQ ID NO: 32802 - RNA, 32 nt, Human
acaguggcccaggacuugggauguuagaaaua

SEQ ID NO: 32803 - RNA, 19 nt, Human
acaguggccuggccucccu

SEQ ID NO: 32804 - RNA, 22 nt, Human
acaguggcgcacaccuguaauc

SEQ ID NO: 32805 - RNA, 32 nt, Human
acaguggcuaagagggcaggcagcagcagugc

SEQ ID NO: 32806 - RNA, 22 nt, Human
acaguggcucacaccuguaauc

SEQ ID NO: 32807 - RNA, 32 nt, Human
acaguggcucacaccuguaaucccaggacuuu

SEQ ID NO: 32808 - RNA, 32 nt, Human
acaguggcucacaccuguaauuccagcacuuu

SEQ ID NO: 32809 - RNA, 22 nt, Human
acaguggcucacgccuguaauc

SEQ ID NO: 32810 - RNA, 32 nt, Human
acaguggcucaugccuguaaucccagcauuuu

SEQ ID NO: 32811 - RNA, 32 nt, Human
acaguggcugccugugcucccccagggugagc

SEQ ID NO: 32812 - RNA, 32 nt, Human
acaguggcugcucugggaaggggcuuuuagau

SEQ ID NO: 32813 - RNA, 32 nt, Human
acaguggcugcuuuggagacaguaaucauuuu

SEQ ID NO: 32814 - RNA, 32 nt, Human
acaguggcuggagcuugggcacuugucuuauc

SEQ ID NO: 32815 - RNA, 32 nt, Human
acaguggcuguggugaggaguaugucgccugc

SEQ ID NO: 32816 - RNA, 32 nt, Human
acaguggcuucaagaguccuuacugagccagg

SEQ ID NO: 32817 - RNA, 32 nt, Human
acaguggcuuuuaagguggaggugggcuacaa

SEQ ID NO: 32818 - RNA, 32 nt, Human
acagugggaaccccaauagggcuagggcucuc

SEQ ID NO: 32819 - RNA, 32 nt, Human
acagugggagagagaccagugggucccagacg

SEQ ID NO: 32820 - RNA, 21 nt, Human
acagugggagccaagggcaag

SEQ ID NO: 32821 - RNA, 32 nt, Human
acagugggagccaagggcaagugcuagaguug

SEQ ID NO: 32822 - RNA, 32 nt, Human
acagugggagcuguguuacuagcacuauauaa

SEQ ID NO: 32823 - RNA, 32 nt, Human
acagugggagugagaccagccucuagacugug

SEQ ID NO: 32824 - RNA, 32 nt, Human
acagugggccugcuggugggcauggauguccu

SEQ ID NO: 32825 - RNA, 32 nt, Human
acagugggcucugccagggcugccgcaccugu

SEQ ID NO: 32826 - RNA, 32 nt, Human
acaguggggaaggcaugacacaccugggggaa

SEQ ID NO: 32827 - RNA, 31 nt, Human
acaguggggaucagagaaaaggggcuggaaa

SEQ ID NO: 32828 - RNA, 32 nt, Human
acaguggggcugggguguuuaccuggagccug

SEQ ID NO: 32829 - RNA, 20 nt, Human
acagugggggugcuuuguug

SEQ ID NO: 32830 - RNA, 32 nt, Human
acagugggguggugagaagggagcugcaauuu

SEQ ID NO: 32831 - RNA, 32 nt, Human
acagugggucauggguaguaccagccucaaau

SEQ ID NO: 32832 - RNA, 32 nt, Human
acagugggugaaacugacuuucuuuugguugg

SEQ ID NO: 32833 - RNA, 32 nt, Human
acagugggugcugggccucgccccgaagcuuc

SEQ ID NO: 32834 - RNA, 32 nt, Human
acagugguaccaugagaugucaaaaccugggg

SEQ ID NO: 32835 - RNA, 32 nt, Human
acaguggucacugcaaccuccaucucccuggc

SEQ ID NO: 32836 - RNA, 32 nt, Human
acagugguccccaaauauuauguacauauggc

SEQ ID NO: 32837 - RNA, 32 nt, Human
acaguggucugucuguuaguucaguuucucaa

SEQ ID NO: 32838 - RNA, 32 nt, Human
acaguggugagcucuuagcuucaccaggcuca

SEQ ID NO: 32839 - RNA, 32 nt, Human
acaguggugaugacccucaugaaugagccacg

SEQ ID NO: 32840 - RNA, 32 nt, Human
acaguggugcgaucucagcucacugcaacuuc

SEQ ID NO: 32841 - RNA, 32 nt, Human
acagugguggcugacaccccuuguaagaaagc

SEQ ID NO: 32842 - RNA, 32 nt, Human
acagugguggcugggcucacagcuccauccau

SEQ ID NO: 32843 - RNA, 32 nt, Human
acaguggugugaucauagcucacugcagccug

SEQ ID NO: 32844 - RNA, 32 nt, Human
acagugguucucaaaguguggucccagaccag

SEQ ID NO: 32845 - RNA, 32 nt, Human
acagugguuucccacgaggcaauacuuauuau

SEQ ID NO: 32846 - RNA, 32 nt, Human
acaguguaaacaggagucuaauuuguaucaau

SEQ ID NO: 32847 - RNA, 32 nt, Human
acaguguaacauccucucugguccuuuucugu

SEQ ID NO: 32848 - RNA, 20 nt, Human
acaguguacaagacugugcu

SEQ ID NO: 32849 - RNA, 23 nt, Human
acaguguagaccagacugccucu

SEQ ID NO: 32850 - RNA, 32 nt, Human
acaguguaggggaagcaauggaagaacuucua

SEQ ID NO: 32851 - RNA, 32 nt, Human
acaguguagugcucaguaggacagcauaguac

SEQ ID NO: 32852 - RNA, 20 nt, Human
acaguguauagucaaaggca

SEQ ID NO: 32853 - RNA, 32 nt, Human
acagugucaccugccagcaccaccacgccagg

SEQ ID NO: 32854 - RNA, 32 nt, Human
acaguguccagugcuccagccuaggagucuac

SEQ ID NO: 32855 - RNA, 32 nt, Human
acaguguccccaggaaccaccuucuggagccu

SEQ ID NO: 32856 - RNA, 21 nt, Human
acaguguccccaggaggccau

SEQ ID NO: 32857 - RNA, 32 nt, Human
acaguguccucgcucuaccucugccucuccgg

SEQ ID NO: 32858 - RNA, 32 nt, Human
acagugucugcagcugcugcccuucucccagg

SEQ ID NO: 32859 - RNA, 32 nt, Human
acagugucuggcacagaauagaugcucaauaa

SEQ ID NO: 32860 - RNA, 32 nt, Human
acagugugaaguuuaaugcuguugucaagagg

SEQ ID NO: 32861 - RNA, 32 nt, Human
acagugugacccugggcucuggcgggcaguag

SEQ ID NO: 32862 - RNA, 32 nt, Human
acagugugaggggcauggggaggcaggaguag

SEQ ID NO: 32863 - RNA, 32 nt, Human
acagugugcaaaacucacaaaggaaauccguc

SEQ ID NO: 32864 - RNA, 32 nt, Human
acagugugcagguuauaaaagcauuaauacau

SEQ ID NO: 32865 - RNA, 32 nt, Human
acagugugcucuggcugcugggagcccaucuc

SEQ ID NO: 32866 - RNA, 32 nt, Human
acaguguggaagaucgcaagugcugcuuccgu

SEQ ID NO: 32867 - RNA, 32 nt, Human
acaguguggcugggacccacuucucuccucug

SEQ ID NO: 32868 - RNA, 32 nt, Human
acagugugggaccugcccccagcuucugccac

SEQ ID NO: 32869 - RNA, 20 nt, Human
acaguguggggugaaacaag

SEQ ID NO: 32870 - RNA, 32 nt, Human
acagugugguagagaagacaguggaggaaaac

SEQ ID NO: 32871 - RNA, 32 nt, Human
acagugugugguuuuggcaugucuguuucagg

SEQ ID NO: 32872 - RNA, 32 nt, Human
acaguguucaaggucacagggucaaaauauau

SEQ ID NO: 32873 - RNA, 32 nt, Human
acaguguucugcagagccugagcugcugcugu

SEQ ID NO: 32874 - RNA, 32 nt, Human
acaguguugcauaugagccugcccucacuccc

SEQ ID NO: 32875 - RNA, 32 nt, Human
acaguguugcugcuggcagagaugcauuccag

SEQ ID NO: 32876 - RNA, 32 nt, Human
acaguguugggcaucugcuccccguggacaca

SEQ ID NO: 32877 - RNA, 32 nt, Human
acaguguugggggaugugaaugaggacaagcu

SEQ ID NO: 32878 - RNA, 32 nt, Human
acaguguugguuagcuuccugcauugauugcc

SEQ ID NO: 32879 - RNA, 32 nt, Human
acaguguuuauaugugugugagagaguaugau

SEQ ID NO: 32880 - RNA, 32 nt, Human
acaguguuuccacucuuucugcccucaccugg

SEQ ID NO: 32881 - RNA, 32 nt, Human
acaguguuugugucccugauuacuugagauua

SEQ ID NO: 32882 - RNA, 32 nt, Human
acaguuaaacggagaguauuggagagcacccc

SEQ ID NO: 32883 - RNA, 32 nt, Human
acaguuaaaggaacguuucaguuccuuucauu

SEQ ID NO: 32884 - RNA, 32 nt, Human
acaguuaaccagcccauuucuccacacuggua

SEQ ID NO: 32885 - RNA, 21 nt, Human
acaguuacaacgccucugcca

SEQ ID NO: 32886 - RNA, 32 nt, Human
acaguuacaauuuauugcuauauugugauacg

SEQ ID NO: 32887 - RNA, 32 nt, Human
acaguuacggcugaaguggcagggucaagcuu

SEQ ID NO: 32888 - RNA, 32 nt, Human
acaguuacuggcagaggaagaggaugaugauu

SEQ ID NO: 32889 - RNA, 22 nt, Human
acaguuagaucagagaaagcaa

SEQ ID NO: 32890 - RNA, 32 nt, Human
acaguuagcucccugagggcaagggacuguca

SEQ ID NO: 32891 - RNA, 17 nt, Human
acaguuagcuggagcug

SEQ ID NO: 32892 - RNA, 32 nt, Human
acaguuaggacaaauggggaggggacaccaug

SEQ ID NO: 32893 - RNA, 32 nt, Human
acaguuaucagcugccauugcucccugucugu

SEQ ID NO: 32894 - RNA, 32 nt, Human
acaguucacugcagccucaaccucuccagauu

SEQ ID NO: 32895 - RNA, 25 nt, Human
acaguucagcagcuaccacccuggc

SEQ ID NO: 32896 - RNA, 32 nt, Human
acaguucaggcauucucucuuuuagaacuuga

SEQ ID NO: 32897 - RNA, 32 nt, Human
acaguucagugcagugggugagagacgaguca

SEQ ID NO: 32898 - RNA, 32 nt, Human
acaguucaucuuccuuucuuccugcuaaccuu

SEQ ID NO: 32899 - RNA, 32 nt, Human
acaguucauggacugagucagucccaacgucc

SEQ ID NO: 32900 - RNA, 32 nt, Human
acaguuccagccacuaggaggccgucuuggaa

SEQ ID NO: 32901 - RNA, 32 nt, Human
acaguucccaaaggaggcuggaagugaagugc

SEQ ID NO: 32902 - RNA, 32 nt, Human
acaguucccaaguuuucccuugugcauuguuc

SEQ ID NO: 32903 - RNA, 32 nt, Human
acaguucccagagugggcuuugguggccaggg

SEQ ID NO: 32904 - RNA, 32 nt, Human
acaguucccaggcuggggaugcuuugccuugu

SEQ ID NO: 32905 - RNA, 32 nt, Human
acaguuccuagagcagugucuggcacauguuc

SEQ ID NO: 32906 - RNA, 32 nt, Human
acaguuccuggaaggcccuccagcuggaugcu

SEQ ID NO: 32907 - RNA, 32 nt, Human
acaguucgcuaguacaaggggucuucaggaag

SEQ ID NO: 32908 - RNA, 32 nt, Human
acaguucgggaggcagaguuagguggaucaau

SEQ ID NO: 32909 - RNA, 20 nt, Human
acaguucuacagaaaaacaa

SEQ ID NO: 32910 - RNA, 32 nt, Human
acaguucuagggacaggacucugaggugggug

SEQ ID NO: 32911 - RNA, 32 nt, Human
acaguucucauggaggaagaugcucagcuggg

SEQ ID NO: 32912 - RNA, 32 nt, Human
acaguucuccaugccaguaucugggugugggu

SEQ ID NO: 32913 - RNA, 32 nt, Human
acaguucucccugccccucagccugggggaag

SEQ ID NO: 32914 - RNA, 32 nt, Human
acaguucuccuggaagggagguuuuugcuuua

SEQ ID NO: 32915 - RNA, 32 nt, Human
acaguucucugacuugcagaaccugccaggug

SEQ ID NO: 32916 - RNA, 32 nt, Human
acaguucugcugcuguggcuucagcuuuggaa

SEQ ID NO: 32917 - RNA, 32 nt, Human
acaguucugggagugugaccuguaagccuccu

SEQ ID NO: 32918 - RNA, 32 nt, Human
acaguucuguaagcaucaggagcuagagacgc

SEQ ID NO: 32919 - RNA, 32 nt, Human
acaguucugucucuacuaccugaucuccuccu

SEQ ID NO: 32920 - RNA, 32 nt, Human
acaguucuuagcacugaacucgucacaguguu

SEQ ID NO: 32921 - RNA, 32 nt, Human
acaguugacaggugugccuuuagaugacccug

SEQ ID NO: 32922 - RNA, 32 nt, Human
acaguugagauucgcauauuugccuauucuuu

SEQ ID NO: 32923 - RNA, 32 nt, Human
acaguugagcaccccaaaucugaaaggcuucu

SEQ ID NO: 32924 - RNA, 18 nt, Human
acaguugcaaccaaggca

SEQ ID NO: 32925 - RNA, 32 nt, Human
acaguugcagauaggcugguuuucaugaggaa

SEQ ID NO: 32926 - RNA, 32 nt, Human
acaguugccaccaccucuguggcauugaaaug

SEQ ID NO: 32927 - RNA, 32 nt, Human
acaguugccuacaguauucagugcaguaacau

SEQ ID NO: 32928 - RNA, 32 nt, Human
acaguugccuuucaauucaguguuauacugug

SEQ ID NO: 32929 - RNA, 22 nt, Human
acaguugcucacgccuguaauc

SEQ ID NO: 32930 - RNA, 32 nt, Human
acaguugcuggcuuugcuccugggcaaggagg

SEQ ID NO: 32931 - RNA, 32 nt, Human
acaguuggaacccaaggaaggcaggccauccc

SEQ ID NO: 32932 - RNA, 32 nt, Human
acaguuggagauguuggauaaaugucuuuucu

SEQ ID NO: 32933 - RNA, 32 nt, Human
acaguugggaaaggaggcaguggcagaggggu

SEQ ID NO: 32934 - RNA, 32 nt, Human
acaguugggcggagcuuggguugggagugaga

SEQ ID NO: 32935 - RNA, 32 nt, Human
acaguuggggagcuccaggagcuguuuuaagu

SEQ ID NO: 32936 - RNA, 32 nt, Human
acaguuggggcucuccugccuucacgcguggg

SEQ ID NO: 32937 - RNA, 32 nt, Human
acaguugggggaggcagagccagcagguggac

SEQ ID NO: 32938 - RNA, 32 nt, Human
acaguugguggaaccaacgguacuacuucagu

SEQ ID NO: 32939 - RNA, 32 nt, Human
acaguuguauaaacaggaagccaggcuuuuga

SEQ ID NO: 32940 - RNA, 21 nt, Human
acaguugugacagaacaugca

SEQ ID NO: 32941 - RNA, 32 nt, Human
acaguugugacggauguauggauguucuugaa

SEQ ID NO: 32942 - RNA, 21 nt, Human
acaguuguggagaaaaaguaa

SEQ ID NO: 32943 - RNA, 32 nt, Human
acaguugugugguaacaagcuaauaugcuucc

SEQ ID NO: 32944 - RNA, 32 nt, Human
acaguuguguguguaucucauuccacuguucc

SEQ ID NO: 32945 - RNA, 24 nt, Human
acaguuguucucagcauaaaguca

SEQ ID NO: 32946 - RNA, 32 nt, Human
acaguuuaaagaaaacccagugguucaaacau

SEQ ID NO: 32947 - RNA, 32 nt, Human
acaguuuacugauuuagccagugaagagaaag

SEQ ID NO: 32948 - RNA, 32 nt, Human
acaguuuagcauauauaaacaaacaugauagg

SEQ ID NO: 32949 - RNA, 32 nt, Human
acaguuuauuucucccuucauccuuugcuaga

SEQ ID NO: 32950 - RNA, 32 nt, Human
acaguuucacagcaggacacugagggaauauu

SEQ ID NO: 32951 - RNA, 32 nt, Human
acaguuucacagucuuugccaguucuaaguac

SEQ ID NO: 32952 - RNA, 32 nt, Human
acaguuucauugauugacucuaccuccuugcc

SEQ ID NO: 32953 - RNA, 32 nt, Human
acaguuuccagaugcuaucacagacucugcua

SEQ ID NO: 32954 - RNA, 32 nt, Human
acaguuuccuaagcgcauaguuuuugguccug

SEQ ID NO: 32955 - RNA, 32 nt, Human
acaguuucuaaauucuuugaaaccacuuuacu

SEQ ID NO: 32956 - RNA, 32 nt, Human
acaguuucuaagcuacccaggcugccagaccg

SEQ ID NO: 32957 - RNA, 32 nt, Human
acaguuucuaagggcccguccccagcccgggc

SEQ ID NO: 32958 - RNA, 32 nt, Human
acaguuucucagccaggcagggacucuuuucc

SEQ ID NO: 32959 - RNA, 32 nt, Human
acaguuucuccuccuccccucagccuuguggc

SEQ ID NO: 32960 - RNA, 32 nt, Human
acaguuucugugagucaggggucugggcacug

SEQ ID NO: 32961 - RNA, 32 nt, Human
acaguuucuucccacagcuggauauuuuaccc

SEQ ID NO: 32962 - RNA, 32 nt, Human
acaguuugaaaauguugagacagcacagcagc

SEQ ID NO: 32963 - RNA, 32 nt, Human
acaguuugaacaaaaucuccucuuuuagcuga

SEQ ID NO: 32964 - RNA, 19 nt, Human
acaguuugcagaaaagcaa

SEQ ID NO: 32965 - RNA, 32 nt, Human
acaguuugcccguguguuauguaucaguuaua

SEQ ID NO: 32966 - RNA, 32 nt, Human
acaguuuggcauuggugcucucugccuggcag

SEQ ID NO: 32967 - RNA, 32 nt, Human
acaguuuggcugcugugucugcugcgcacgcc

SEQ ID NO: 32968 - RNA, 32 nt, Human
acaguuuggcuucacuucucugaccccagccu

SEQ ID NO: 32969 - RNA, 32 nt, Human
acaguuuguagucucucucagggagagagacu

SEQ ID NO: 32970 - RNA, 32 nt, Human
acaguuugugaggaccuuugcacuuugccauc

SEQ ID NO: 32971 - RNA, 32 nt, Human
acaguuuuaaugauguauuugaugaauuuaaa

SEQ ID NO: 32972 - RNA, 32 nt, Human
acaguuuuauaagaagauguuuuuaaaaccuu

SEQ ID NO: 32973 - RNA, 32 nt, Human
acaguuuucaucagugccuguaucugugguca

SEQ ID NO: 32974 - RNA, 32 nt, Human
acaguuuucucuccacacauaaauaacaccac

SEQ ID NO: 32975 - RNA, 32 nt, Human
acaguuuugcaacaggcagagcugugucgcac

SEQ ID NO: 32976 - RNA, 32 nt, Human
acaguuuugcaaccucugcuccaaagagaaaa

SEQ ID NO: 32977 - RNA, 32 nt, Human
acaguuuugcucuugucuccccggcuggagug

SEQ ID NO: 32978 - RNA, 32 nt, Human
acaguuuugugagacuuaagggucuuuuuaac

SEQ ID NO: 32979 - RNA, 32 nt, Human
acaguuuuugggauaggagaccagcgguuuug

SEQ ID NO: 32980 - RNA, 32 nt, Human
acauaaaaauaacuuuaauguaauuuauguug

SEQ ID NO: 32981 - RNA, 32 nt, Human
acauaaaaauagaguucuuugggcaaaacuuu

SEQ ID NO: 32982 - RNA, 32 nt, Human
acauaaaaauuagcugggggugguagcacaua

SEQ ID NO: 32983 - RNA, 32 nt, Human
acauaaaaccaccaaaauacauagcuucgaca

SEQ ID NO: 32984 - RNA, 32 nt, Human
acauaaaacuacucucuaccucuggcugggcc

SEQ ID NO: 32985 - RNA, 32 nt, Human
acauaaaagccaagccacccauuugcuuuuaa

SEQ ID NO: 32986 - RNA, 32 nt, Human
acauaaaaggaggagacauacaaugggggaag

SEQ ID NO: 32987 - RNA, 32 nt, Human
acauaaaauuaaagccuguggcauuuuuaaag

SEQ ID NO: 32988 - RNA, 32 nt, Human
acauaaacagcuuuaaugaccucuucaccuag

SEQ ID NO: 32989 - RNA, 32 nt, Human
acauaaaccaaugcauuccuggcuccauguua

SEQ ID NO: 32990 - RNA, 32 nt, Human
acauaaaccaggauuacaugugguguagcaag

SEQ ID NO: 32991 - RNA, 32 nt, Human
acauaaaccccacaugccccaggagcgaugug

SEQ ID NO: 32992 - RNA, 32 nt, Human
acauaaacucaaccccuucucuuccaaaagcu

SEQ ID NO: 32993 - RNA, 32 nt, Human
acauaaacuuguacaagaauguucauagcagu

SEQ ID NO: 32994 - RNA, 32 nt, Human
acauaaaggagaagauuugggagagggagagg

SEQ ID NO: 32995 - RNA, 32 nt, Human
acauaaaggccuucccucgcuguugaggccac

SEQ ID NO: 32996 - RNA, 32 nt, Human
acauaaaguccccagcgguuccugucacaccu

SEQ ID NO: 32997 - RNA, 32 nt, Human
acauaaaugaggaaagugaggacaaggagcaa

SEQ ID NO: 32998 - RNA, 32 nt, Human
acauaaauucagaaaguaugauagcaguguag

SEQ ID NO: 32999 - RNA, 32 nt, Human
acauaacaaaccugcacauugugcacauguac

SEQ ID NO: 33000 - RNA, 32 nt, Human
acauaacagcagcccugcaaaggggucuucca

SEQ ID NO: 33001 - RNA, 21 nt, Human
acauaaccauaugucauguag

SEQ ID NO: 33002 - RNA, 32 nt, Human
acauaaccuuuauacagaaucuucccaucucu

SEQ ID NO: 33003 - RNA, 32 nt, Human
acauaacucacaccccugcccccaccccaugc

SEQ ID NO: 33004 - RNA, 32 nt, Human
acauaagagcaucagaacaccuuccauuuuau

SEQ ID NO: 33005 - RNA, 32 nt, Human
acauaagaggauucauacuggagagaaaccau

SEQ ID NO: 33006 - RNA, 32 nt, Human
acauaagaggcaggaagaguuuugauucuauc

SEQ ID NO: 33007 - RNA, 32 nt, Human
acauaagaggggcagaaggcuugaccagaguu

SEQ ID NO: 33008 - RNA, 32 nt, Human
acauaagccaaaacauguaucucaucauugga

SEQ ID NO: 33009 - RNA, 32 nt, Human
acauaagccaggacauucugcugugagugacu

SEQ ID NO: 33010 - RNA, 32 nt, Human
acauaagcuaagaucacuauagguccauuucu

SEQ ID NO: 33011 - RNA, 32 nt, Human
acauaaggcaggcagggauacaaggcagucug

SEQ ID NO: 33012 - RNA, 32 nt, Human
acauaagguaauucauacuggagagaaacccu

SEQ ID NO: 33013 - RNA, 32 nt, Human
acauaagguaauucauucuggagagaaacccu

SEQ ID NO: 33014 - RNA, 32 nt, Human
acauaagguacugaaguuagccaagguugcuu

SEQ ID NO: 33015 - RNA, 31 nt, Human
acauaaguggacauagaaaaagaggcuggca

SEQ ID NO: 33016 - RNA, 32 nt, Human
acauaauaaaaguaauuucuacauuuguguag

SEQ ID NO: 33017 - RNA, 32 nt, Human
acauaauaaaaguaauuucuacauuugugugg

SEQ ID NO: 33018 - RNA, 32 nt, Human
acauaauaagacuuucuuaugugacuuagcug

SEQ ID NO: 33019 - RNA, 32 nt, Human
acauaauacaguuugagaacagccuggccaac

SEQ ID NO: 33020 - RNA, 32 nt, Human
acauaauacgcaaaucacauguaaguaagaga

SEQ ID NO: 33021 - RNA, 32 nt, Human
acauaaucaaagcuuaucuuuuuaagcacuaa

SEQ ID NO: 33022 - RNA, 32 nt, Human
acauaaucaacucccuauuaaauucuuuaaug

SEQ ID NO: 33023 - RNA, 32 nt, Human
acauaaucaagaaaugacuaaguaguuaugug

SEQ ID NO: 33024 - RNA, 32 nt, Human
acauaaucaaguuuugacuauuuggaaaccaa

SEQ ID NO: 33025 - RNA, 32 nt, Human
acauaaucauuucccaaaggauuucaccuccu

SEQ ID NO: 33026 - RNA, 32 nt, Human
acauaaucccaggucaguuagcacagaugccc

SEQ ID NO: 33027 - RNA, 32 nt, Human
acauaauuggacucugucacaaagggacuuug

SEQ ID NO: 33028 - RNA, 32 nt, Human
acauaauuuauggacgaaaugccuaaaaaugu

SEQ ID NO: 33029 - RNA, 32 nt, Human
acauaauuuggaauuguuuaagucuauuucag

SEQ ID NO: 33030 - RNA, 32 nt, Human
acauacaaaacuuaugaauuacccagcacaac

SEQ ID NO: 33031 - RNA, 32 nt, Human
acauacaagauacuccuggagcauuuugcagu

SEQ ID NO: 33032 - RNA, 32 nt, Human
acauacacaaaugcaucauacaugugugguga

SEQ ID NO: 33033 - RNA, 32 nt, Human
acauacacacaaaaacuuguacaccaauguuc

SEQ ID NO: 33034 - RNA, 32 nt, Human
acauacacacaaaacagcaaacuucagguaac

SEQ ID NO: 33035 - RNA, 32 nt, Human
acauacacacauaugucauauauuacuagcau

SEQ ID NO: 33036 - RNA, 32 nt, Human
acauacacacaugugcacacacccucaugcau

SEQ ID NO: 33037 - RNA, 32 nt, Human
acauacacacucauugacauacauucauucac

SEQ ID NO: 33038 - RNA, 32 nt, Human
acauacacagaauccucagauaacaggaggca

SEQ ID NO: 33039 - RNA, 32 nt, Human
acauacacagauugucuucagagccaaacgug

SEQ ID NO: 33040 - RNA, 32 nt, Human
acauacaggaauucaugcuggagagaaacccu

SEQ ID NO: 33041 - RNA, 32 nt, Human
acauacaggauuugaacucagaucugucugau

SEQ ID NO: 33042 - RNA, 32 nt, Human
acauacaggugcucaauaaacacuuguagagc

SEQ ID NO: 33043 - RNA, 32 nt, Human
acauacaguguuuuacauucucuccuuuauag

SEQ ID NO: 33044 - RNA, 32 nt, Human
acauacauacguaaggaucuuaaacccagucu

SEQ ID NO: 33045 - RNA, 32 nt, Human
acauacauaggcagaaagcaauuuuuagguga

SEQ ID NO: 33046 - RNA, 32 nt, Human
acauacaucccuccucugguaccacaguggcc

SEQ ID NO: 33047 - RNA, 32 nt, Human
acauacaucuaguauguuuaggguucuguguu

SEQ ID NO: 33048 - RNA, 32 nt, Human
acauacaugaucccaugcucccaagcuccauu

SEQ ID NO: 33049 - RNA, 32 nt, Human
acauacauggcuuccccaauguggcagaucaa

SEQ ID NO: 33050 - RNA, 32 nt, Human
acauacauggucuugcuuugucgcccaggcug

SEQ ID NO: 33051 - RNA, 32 nt, Human
acauacauugaauauguccaaagaaccauggu

SEQ ID NO: 33052 - RNA, 32 nt, Human
acauaccaaacccuagaaauguuuccaagaac

SEQ ID NO: 33053 - RNA, 32 nt, Human
acauaccagaacuuaaggaaugcggcaaaaac

SEQ ID NO: 33054 - RNA, 32 nt, Human
acauacccacacauuccagggcuggggugagc

SEQ ID NO: 33055 - RNA, 31 nt, Human
acauacccacuuagcaaaaccaaagcaccuu

SEQ ID NO: 33056 - RNA, 32 nt, Human
acauacccagagacacugagagagacagacag

SEQ ID NO: 33057 - RNA, 32 nt, Human
acauacccugcagcucucagcuggcugcagua

SEQ ID NO: 33058 - RNA, 32 nt, Human
acauaccucaaaauaauaaaacuaucuaugac

SEQ ID NO: 33059 - RNA, 32 nt, Human
acauaccuccaaaggcaggacuugccugauaa

SEQ ID NO: 33060 - RNA, 21 nt, Human
acauaccucugcaguaccuca

SEQ ID NO: 33061 - RNA, 32 nt, Human
acauaccugcgguuccagcuacucaagaggcu

SEQ ID NO: 33062 - RNA, 32 nt, Human
acauaccuggaggcugacguugccaaaccagc

SEQ ID NO: 33063 - RNA, 32 nt, Human
acauaccuguaauccaagcugcccaggagcug

SEQ ID NO: 33064 - RNA, 32 nt, Human
acauaccuguaaucccagcuacucaggaggcu

SEQ ID NO: 33065 - RNA, 32 nt, Human
acauaccuguaaucccagcuacucgggaggcu

SEQ ID NO: 33066 - RNA, 32 nt, Human
acauaccuguaaucccagcuacuuggaauugg

SEQ ID NO: 33067 - RNA, 32 nt, Human
acauaccuguaaucccagcuacuuugguggcu

SEQ ID NO: 33068 - RNA, 32 nt, Human
acauaccuguaaugccagcuacuugggaaggc

SEQ ID NO: 33069 - RNA, 32 nt, Human
acauaccuguagucccagcuacucuggaggcu

SEQ ID NO: 33070 - RNA, 32 nt, Human
acauaccuuguuauaugcagacauguauuucu

SEQ ID NO: 33071 - RNA, 32 nt, Human
acauacgacacacaccugugucuccccagggg

SEQ ID NO: 33072 - RNA, 32 nt, Human
acauacgagaggaacccaggagggcagcagac

SEQ ID NO: 33073 - RNA, 32 nt, Human
acauacgcacacacgugcacacauguacacac

SEQ ID NO: 33074 - RNA, 32 nt, Human
acauacgcuccucuauucuucccuucauccuc

SEQ ID NO: 33075 - RNA, 32 nt, Human
acauacguuguucuccccucucuggaucaagg

SEQ ID NO: 33076 - RNA, 32 nt, Human
acauacuacagacaagcuaccaaaaauuauuu

SEQ ID NO: 33077 - RNA, 32 nt, Human
acauacuacugccccauuggaagaagaaccag

SEQ ID NO: 33078 - RNA, 21 nt, Human
acauacucacagcccccgggc

SEQ ID NO: 33079 - RNA, 32 nt, Human
acauacucaugcacaugacucucccccauuuc

SEQ ID NO: 33080 - RNA, 32 nt, Human
acauacucauuucccaaaggauuucaccuccu

SEQ ID NO: 33081 - RNA, 32 nt, Human
acauacucucacacaggaaacgaccuggaaga

SEQ ID NO: 33082 - RNA, 32 nt, Human
acauacugaagcuccagccagggggauggguc

SEQ ID NO: 33083 - RNA, 32 nt, Human
acauacugcucuuuuccccucucccuccacac

SEQ ID NO: 33084 - RNA, 32 nt, Human
acauacugggaaaggcagaggguggagggaag

SEQ ID NO: 33085 - RNA, 31 nt, Human
acauacuuauaagucuaucauuuaaagacau

SEQ ID NO: 33086 - RNA, 32 nt, Human
acauacuucuuacuugucuguacaguaccuug

SEQ ID NO: 33087 - RNA, 32 nt, Human
acauacuugaagucccagcuguuugggaggcu

SEQ ID NO: 33088 - RNA, 32 nt, Human
acauacuugguauccaauaaauauuuguugga

SEQ ID NO: 33089 - RNA, 32 nt, Human
acauacuuguuccuccuccuagcucucucccu

SEQ ID NO: 33090 - RNA, 32 nt, Human
acauacuuuucagacugccuuucuuuuguaau

SEQ ID NO: 33091 - RNA, 32 nt, Human
acauagaaaacacaaaccacaacugacacagg

SEQ ID NO: 33092 - RNA, 32 nt, Human
acauagaaagaauauuaaagaguagguugaac

SEQ ID NO: 33093 - RNA, 32 nt, Human
acauagaaagacaugggcuaucagggaggaag

SEQ ID NO: 33094 - RNA, 32 nt, Human
acauagaaccuuagguagaacucccccaaauc

SEQ ID NO: 33095 - RNA, 32 nt, Human
acauagaaugauuuugcuuuucucuuuuauua

SEQ ID NO: 33096 - RNA, 32 nt, Human
acauagacauaaaaauacuguaugugacagca

SEQ ID NO: 33097 - RNA, 32 nt, Human
acauagaccaaacuuguauacacacagacauc

SEQ ID NO: 33098 - RNA, 32 nt, Human
acauagacuggguggcuuaagcaacagaaguu

SEQ ID NO: 33099 - RNA, 32 nt, Human
acauagagaacaaaagcauauuugaccaagca

SEQ ID NO: 33100 - RNA, 32 nt, Human
acauagagauagagacagagaggcagagaaga

SEQ ID NO: 33101 - RNA, 32 nt, Human
acauagagcacuugaaccuccuuuguaccugu

SEQ ID NO: 33102 - RNA, 30 nt, Human
acauagagccucucucuuuuccuguuucuu

SEQ ID NO: 33103 - RNA, 32 nt, Human
acauagaggagagagaaaauggcugaguuaaa

SEQ ID NO: 33104 - RNA, 32 nt, Human
acauagagggugagaggggagagcuggacaaa

SEQ ID NO: 33105 - RNA, 32 nt, Human
acauagaucucucccacuagagcccagaggga

SEQ ID NO: 33106 - RNA, 32 nt, Human
acauagaugaguaagucuagagaggacauugc

SEQ ID NO: 33107 - RNA, 32 nt, Human
acauagauuauccaggcugagauggaaaacaa

SEQ ID NO: 33108 - RNA, 32 nt, Human
acauagcaagccuguaccacucuacaguaaaa

SEQ ID NO: 33109 - RNA, 32 nt, Human
acauagcaccagccccagccaggagaaggaag

SEQ ID NO: 33110 - RNA, 32 nt, Human
acauagcagcgguuccugucauguguucaugu

SEQ ID NO: 33111 - RNA, 32 nt, Human
acauagcagggcuggggugcagaggaggccca

SEQ ID NO: 33112 - RNA, 32 nt, Human
acauagcauccagcgacaccacagccaaggga

SEQ ID NO: 33113 - RNA, 32 nt, Human
acauagccaccgaggcaccgacaggaagcugu

SEQ ID NO: 33114 - RNA, 32 nt, Human
acauagccauuuucucucuagggcuuucuuuc

SEQ ID NO: 33115 - RNA, 32 nt, Human
acauagcccaacaaagaacuucuuugacauuu

SEQ ID NO: 33116 - RNA, 32 nt, Human
acauagcccauugcccuuaaugaugguuucuu

SEQ ID NO: 33117 - RNA, 32 nt, Human
acauagccccaaccaccucugccagcaaccuu

SEQ ID NO: 33118 - RNA, 21 nt, Human
acauagcccccaaccugugua

SEQ ID NO: 33119 - RNA, 22 nt, Human
acauagcccuuucuuugccaug

SEQ ID NO: 33120 - RNA, 32 nt, Human
acauagccuaaauucuagccuggcagcaagag

SEQ ID NO: 33121 - RNA, 32 nt, Human
acauagcucacugcagccuugaacuccuggac

SEQ ID NO: 33122 - RNA, 32 nt, Human
acauagcucagcaacagaugcucucacgcuug

SEQ ID NO: 33123 - RNA, 32 nt, Human
acauagcucaguggucaagacuugggcuuggg

SEQ ID NO: 33124 - RNA, 32 nt, Human
acauagcuccuggagcgcgggacuuggacacg

SEQ ID NO: 33125 - RNA, 32 nt, Human
acauaggagaaaaaccuuaugaaugauuggau

SEQ ID NO: 33126 - RNA, 32 nt, Human
acauaggaggagaauacuugaagcaguaugcu

SEQ ID NO: 33127 - RNA, 32 nt, Human
acauaggaggauucauacuggagagaaaccau

SEQ ID NO: 33128 - RNA, 32 nt, Human
acauaggaggauucauacuggagagaaaccgu

SEQ ID NO: 33129 - RNA, 32 nt, Human
acauaggaggcugaggugggaggauuguuuga

SEQ ID NO: 33130 - RNA, 32 nt, Human
acauaggauaauucauacuggagagaaacuuu

SEQ ID NO: 33131 - RNA, 32 nt, Human
acauaggcagaagucaagaaaguuacucaaga

SEQ ID NO: 33132 - RNA, 32 nt, Human
acauaggcaguagccuccuccugggcuccaga

SEQ ID NO: 33133 - RNA, 32 nt, Human
acauaggccaccggccucauccaaggccccac

SEQ ID NO: 33134 - RNA, 32 nt, Human
acauaggcccaggcuauccaggcugcagugga

SEQ ID NO: 33135 - RNA, 32 nt, Human
acauaggccuccaggagcccucagugagaggg

SEQ ID NO: 33136 - RNA, 32 nt, Human
acauaggcuauauccuggaagugggcagggga

SEQ ID NO: 33137 - RNA, 32 nt, Human
acauagggaugaaguaaggugccugaaaaguu

SEQ ID NO: 33138 - RNA, 32 nt, Human
acauagggcucaucugagucugugauguucua

SEQ ID NO: 33139 - RNA, 32 nt, Human
acauagguaaacuguuacaaauccagaauggu

SEQ ID NO: 33140 - RNA, 32 nt, Human
acauagguaagccugugccauggugguuugcu

SEQ ID NO: 33141 - RNA, 32 nt, Human
acauaggucuuguuaagaaaccaguccugccu

SEQ ID NO: 33142 - RNA, 32 nt, Human
acauaguaaauccucuuuuugaugaguuucug

SEQ ID NO: 33143 - RNA, 32 nt, Human
acauaguauaauucacacuggagagaagccuu

SEQ ID NO: 33144 - RNA, 32 nt, Human
acauagucauuccucaaguuagcaucucuccu

SEQ ID NO: 33145 - RNA, 32 nt, Human
acauaguccagcuuucuaaaauccaggacucu

SEQ ID NO: 33146 - RNA, 32 nt, Human
acauagucugcucugggcggaagagcuuugcu

SEQ ID NO: 33147 - RNA, 23 nt, Human
acauagucuuaagcauuuuugca

SEQ ID NO: 33148 - RNA, 19 nt, Human
acauagucuucgugucuuu

SEQ ID NO: 33149 - RNA, 32 nt, Human
acauagugaagaagggagucucaguggguccu

SEQ ID NO: 33150 - RNA, 32 nt, Human
acauagugagcucucugccucuucggaacgau

SEQ ID NO: 33151 - RNA, 32 nt, Human
acauagugagggaaagaaaaagcuuaugcagu

SEQ ID NO: 33152 - RNA, 32 nt, Human
acauagugcaguuucaaaggaacucaccagac

SEQ ID NO: 33153 - RNA, 32 nt, Human
acauaguguaggucagcgugcuuagccuccug

SEQ ID NO: 33154 - RNA, 32 nt, Human
acauaguucaggaaguuuuuacauggucuacu

SEQ ID NO: 33155 - RNA, 32 nt, Human
acauaguugaaggauuuaacugaauguaugga

SEQ ID NO: 33156 - RNA, 32 nt, Human
acauaguugccucccuuauaacuucaguuuuu

SEQ ID NO: 33157 - RNA, 32 nt, Human
acauaguuguaacauaguugaaugacauuucu

SEQ ID NO: 33158 - RNA, 32 nt, Human
acauauaaaguuauaaaugaaggacaaggagg

SEQ ID NO: 33159 - RNA, 32 nt, Human
acauauaaguugagaaggugccugccauagcc

SEQ ID NO: 33160 - RNA, 32 nt, Human
acauauacaaauaaaacccugccuuguaaaau

SEQ ID NO: 33161 - RNA, 32 nt, Human
acauauacacagacguguagacacaaacauau

SEQ ID NO: 33162 - RNA, 32 nt, Human
acauauacacaugcacauacauacuuuuucug

SEQ ID NO: 33163 - RNA, 32 nt, Human
acauauacugauuuuaaaggcuccucagucau

SEQ ID NO: 33164 - RNA, 32 nt, Human
acauauacuucuuugcugaaugcuaauaaacu

SEQ ID NO: 33165 - RNA, 32 nt, Human
acauauaggggcacuuggguaaucuuggucag

SEQ ID NO: 33166 - RNA, 32 nt, Human
acauauagugauauagcaugucucuuuaguuu

SEQ ID NO: 33167 - RNA, 32 nt, Human
acauauauacaaaaauuagcugggcaucaugg

SEQ ID NO: 33168 - RNA, 32 nt, Human
acauauauacagauuguuggcauuugcaaaag

SEQ ID NO: 33169 - RNA, 21 nt, Human
acauauauguauguauacaca

SEQ ID NO: 33170 - RNA, 32 nt, Human
acauaucacagaacacacgcguccuuccaaga

SEQ ID NO: 33171 - RNA, 32 nt, Human
acauaucacgcugcugucaugauuuuguguca

SEQ ID NO: 33172 - RNA, 32 nt, Human
acauauccaggauuaugggagccccagccagu

SEQ ID NO: 33173 - RNA, 32 nt, Human
acauauccagggacucccuccuggccuuccug

SEQ ID NO: 33174 - RNA, 32 nt, Human
acauauccauuucuuuuccuaguuacggauga

SEQ ID NO: 33175 - RNA, 32 nt, Human
acauaucccagugcccuugccucauaauagau

SEQ ID NO: 33176 - RNA, 32 nt, Human
acauaucccuguuagcauuccccgggaccuuu

SEQ ID NO: 33177 - RNA, 32 nt, Human
acauauccuggaccaggcuuuucugcugaagc

SEQ ID NO: 33178 - RNA, 32 nt, Human
acauaucggaucuaagagauuaauaccauuag

SEQ ID NO: 33179 - RNA, 32 nt, Human
acauaucuagguauaugcuuucucucugcugu

SEQ ID NO: 33180 - RNA, 32 nt, Human
acauaucuaucucuuuuagaacuuuccagcuu

SEQ ID NO: 33181 - RNA, 32 nt, Human
acauaucucacaaacauuccccaaaccaggca

SEQ ID NO: 33182 - RNA, 32 nt, Human
acauaucucagguugucuaaguguuuuuaugu

SEQ ID NO: 33183 - RNA, 32 nt, Human
acauaucucuacgcugcaaauuuugggucuca

SEQ ID NO: 33184 - RNA, 32 nt, Human
acauaucucucaucuuuugguucuaacgugaa

SEQ ID NO: 33185 - RNA, 32 nt, Human
acauaucugaauggguaacaugaugagguacc

SEQ ID NO: 33186 - RNA, 32 nt, Human
acauaucugagacuggaaacaaaaaggguuua

SEQ ID NO: 33187 - RNA, 32 nt, Human
acauaugcaacauacuaauaccuuccugauuu

SEQ ID NO: 33188 - RNA, 32 nt, Human
acauaugcaauguauaugaauuauguagggau

SEQ ID NO: 33189 - RNA, 32 nt, Human
acauaugcacacacaugugcaaacauagccac

SEQ ID NO: 33190 - RNA, 32 nt, Human
acauaugcacacaggcacacauggcaaaacuc

SEQ ID NO: 33191 - RNA, 32 nt, Human
acauaugcacauaucaugaacagcguaaguuc

SEQ ID NO: 33192 - RNA, 31 nt, Human
acauaugcacuuuuuacauuuagaaacacug

SEQ ID NO: 33193 - RNA, 32 nt, Human
acauaugcaugggcuuggagaaaaugauauuc

SEQ ID NO: 33194 - RNA, 22 nt, Human
acauaugccaguuucacagaac

SEQ ID NO: 33195 - RNA, 32 nt, Human
acauaugcuuauauacaacuauguacaccuuu

SEQ ID NO: 33196 - RNA, 32 nt, Human
acauauggaauucauaguaugagccacauuuu

SEQ ID NO: 33197 - RNA, 32 nt, Human
acauauggaugacauuagcucauuacaguuau

SEQ ID NO: 33198 - RNA, 32 nt, Human
acauaugggaggagggggcagauuccuggccc

SEQ ID NO: 33199 - RNA, 32 nt, Human
acauauggucuauccuggagaauguuccaugu

SEQ ID NO: 33200 - RNA, 32 nt, Human
acauauguagauauuguuuucuguaaauaacc

SEQ ID NO: 33201 - RNA, 32 nt, Human
acauauguauacacacacauaauuugaaaacu

SEQ ID NO: 33202 - RNA, 18 nt, Human
acauauguauacccucga

SEQ ID NO: 33203 - RNA, 32 nt, Human
acauaugugaugagcacauacagacacaccuc

SEQ ID NO: 33204 - RNA, 32 nt, Human
acauaugugcugcacuccuucccuccugccuc

SEQ ID NO: 33205 - RNA, 18 nt, Human
acauauguuaucccuuga

SEQ ID NO: 33206 - RNA, 32 nt, Human
acauauguugcaagacccucccaugggggcac

SEQ ID NO: 33207 - RNA, 32 nt, Human
acauauuaaagaaacuuaaguggaaccagaag

SEQ ID NO: 33208 - RNA, 32 nt, Human
acauauuaauauuccaaucauaacuuuaauuc

SEQ ID NO: 33209 - RNA, 32 nt, Human
acauauuacacaaaacauugugccuuaaaaug

SEQ ID NO: 33210 - RNA, 32 nt, Human
acauauuacauacuucagacuuuugauauaaa

SEQ ID NO: 33211 - RNA, 32 nt, Human
acauauuagccaccagcugucuugcccaaggu

SEQ ID NO: 33212 - RNA, 32 nt, Human
acauauuagcuguguaauauagacaauuuacu

SEQ ID NO: 33213 - RNA, 32 nt, Human
acauauucacuacuugaucuugugaacacugg

SEQ ID NO: 33214 - RNA, 32 nt, Human
acauauucaguuuucaguagaagaacuuaaaa

SEQ ID NO: 33215 - RNA, 32 nt, Human
acauauucauucucucuucuccaucacccaua

SEQ ID NO: 33216 - RNA, 32 nt, Human
acauauucguuugguuucacuggauuuucuuc

SEQ ID NO: 33217 - RNA, 32 nt, Human
acauauucucaguccuccucuggucuacaaag

SEQ ID NO: 33218 - RNA, 32 nt, Human
acauauucuucucgagugcauaugaaacaucu

SEQ ID NO: 33219 - RNA, 32 nt, Human
acauauucuuuaugccacaccuaccacgggau

SEQ ID NO: 33220 - RNA, 32 nt, Human
acauauucuuucucccaauccaugccuucccu

SEQ ID NO: 33221 - RNA, 32 nt, Human
acauauugauuguuuccagucucugggccgaa

SEQ ID NO: 33222 - RNA, 32 nt, Human
acauauuggccuuuugcuauccuuccugcuau

SEQ ID NO: 33223 - RNA, 32 nt, Human
acauauuuaaugauguuuaagucugaaaaagu

SEQ ID NO: 33224 - RNA, 32 nt, Human
acauauuuaucuuuuccugugugauagguuuu

SEQ ID NO: 33225 - RNA, 32 nt, Human
acauauuuauuugagcugaacauuaguuugua

SEQ ID NO: 33226 - RNA, 32 nt, Human
acauauuuauuugagcugagcauuaguuugua

SEQ ID NO: 33227 - RNA, 32 nt, Human
acauauuuccggucaucucugguggugagagg

SEQ ID NO: 33228 - RNA, 32 nt, Human
acauauuucucagaaagauugccgggaagaug

SEQ ID NO: 33229 - RNA, 32 nt, Human
acauauuuuagauuuaucuuauuugaaaguau

SEQ ID NO: 33230 - RNA, 32 nt, Human
acauauuuucccuguuugcuuugcuacuguau

SEQ ID NO: 33231 - RNA, 32 nt, Human
acauauuuuccuuaauagaggaaugcuucgua

SEQ ID NO: 33232 - RNA, 32 nt, Human
acauauuuucuguaaauauacaugcgccggga

SEQ ID NO: 33233 - RNA, 32 nt, Human
acauauuuugcagccaguaauugacaguuaau

SEQ ID NO: 33234 - RNA, 32 nt, Human
acauauuuuggcaagccaaccaggagaaaaga

SEQ ID NO: 33235 - RNA, 32 nt, Human
acaucaaaaguggagaaugaggccaggcgugg

SEQ ID NO: 33236 - RNA, 32 nt, Human
acaucaaaaguuugcaacuacaagccgacgga

SEQ ID NO: 33237 - RNA, 32 nt, Human
acaucaaacccuggagcuugacauauauaaac

SEQ ID NO: 33238 - RNA, 32 nt, Human
acaucaaagcaucucacuccagccucugcuuc

SEQ ID NO: 33239 - RNA, 19 nt, Human
acaucaaagcuucuucaca

SEQ ID NO: 33240 - RNA, 32 nt, Human
acaucaaaggguucauacuggagagaaacccu

SEQ ID NO: 33241 - RNA, 32 nt, Human
acaucaaaguuacuccagagcaaccaagcaau

SEQ ID NO: 33242 - RNA, 19 nt, Human
acaucaaaguuaucucaca

SEQ ID NO: 33243 - RNA, 32 nt, Human
acaucaaauaccagcaccccaccugcacaaug

SEQ ID NO: 33244 - RNA, 20 nt, Human
acaucaacaaugccagcaua

SEQ ID NO: 33245 - RNA, 30 nt, Human
acaucaacagagcaaccagaaagacauugg

SEQ ID NO: 33246 - RNA, 32 nt, Human
acaucaacauaaacagucuuuggauacuaaau

SEQ ID NO: 33247 - RNA, 32 nt, Human
acaucaacccaagugcugggucaagugucuca

SEQ ID NO: 33248 - RNA, 32 nt, Human
acaucaacucacugcauaugcaacucaacuca

SEQ ID NO: 33249 - RNA, 32 nt, Human
acaucaagcucuucuucugugaugaaaccaaa

SEQ ID NO: 33250 - RNA, 32 nt, Human
acaucaagcugcaggcguucaauggcaauggg

SEQ ID NO: 33251 - RNA, 32 nt, Human
acaucaagugaauacugugaucgggaaacauu

SEQ ID NO: 33252 - RNA, 32 nt, Human
acaucaaguuaggggcaaauuagauuagagcu

SEQ ID NO: 33253 - RNA, 32 nt, Human
acaucaauggcagaaucauccagcgaaucaga

SEQ ID NO: 33254 - RNA, 32 nt, Human
acaucaauucacugcugaaccccuggccccag

SEQ ID NO: 33255 - RNA, 32 nt, Human
acaucaauuuggaacgagaggaguggaagcug

SEQ ID NO: 33256 - RNA, 32 nt, Human
acaucaauuuuucuccugacuuuugcucgggu

SEQ ID NO: 33257 - RNA, 32 nt, Human
acaucacaagcagauaggaaacgucuuacaga

SEQ ID NO: 33258 - RNA, 32 nt, Human
acaucacaaugacacacacaucacacacacau

SEQ ID NO: 33259 - RNA, 32 nt, Human
acaucacaccauugcacuccagccugggcaac

SEQ ID NO: 33260 - RNA, 32 nt, Human
acaucacaguauucauacuggagagaaaccuu

SEQ ID NO: 33261 - RNA, 32 nt, Human
acaucaccaagggccuggcaccaggugcccag

SEQ ID NO: 33262 - RNA, 32 nt, Human
acaucaccacagugaaaccugacuucauccua

SEQ ID NO: 33263 - RNA, 32 nt, Human
acaucaccagccugggcgacagagugagacuc

SEQ ID NO: 33264 - RNA, 32 nt, Human
acaucaccaguucugcccuggcagccuccugc

SEQ ID NO: 33265 - RNA, 21 nt, Human
acaucaccaucgucaaagagc

SEQ ID NO: 33266 - RNA, 22 nt, Human
acaucacccaaagcaguggcca

SEQ ID NO: 33267 - RNA, 23 nt, Human
acaucacccacaagggguuauca

SEQ ID NO: 33268 - RNA, 20 nt, Human
acaucacccaccagacagcu

SEQ ID NO: 33269 - RNA, 21 nt, Human
acaucacccacgacccugcca

SEQ ID NO: 33270 - RNA, 19 nt, Human
acaucacccacugugcagc

SEQ ID NO: 33271 - RNA, 32 nt, Human
acaucacccagccuggacgccgcuccucgccu

SEQ ID NO: 33272 - RNA, 21 nt, Human
acaucacccaggaagcgguca

SEQ ID NO: 33273 - RNA, 20 nt, Human
acaucaccccauaccagagc

SEQ ID NO: 33274 - RNA, 21 nt, Human
acaucacccccaccaccccca

SEQ ID NO: 33275 - RNA, 23 nt, Human
acaucacccuacagcaguucagg

SEQ ID NO: 33276 - RNA, 32 nt, Human
acaucacccuggcaaaugucauccgacagcug

SEQ ID NO: 33277 - RNA, 32 nt, Human
acaucaccggaagaaauauggaaggaaaggaa

SEQ ID NO: 33278 - RNA, 32 nt, Human
acaucaccuaccggcuggugcaguacuaccgc

SEQ ID NO: 33279 - RNA, 21 nt, Human
acaucaccucucagggucagc

SEQ ID NO: 33280 - RNA, 32 nt, Human
acaucaccugcagggggcgcggcugucuuucu

SEQ ID NO: 33281 - RNA, 32 nt, Human
acaucacguggaauuggaucccaggcucucuu

SEQ ID NO: 33282 - RNA, 32 nt, Human
acaucacucccaggugcccuagggggcacauu

SEQ ID NO: 33283 - RNA, 32 nt, Human
acaucacugagggcaucaaugaggcuguccuc

SEQ ID NO: 33284 - RNA, 32 nt, Human
acaucacugcacuccagccuggguaacagagu

SEQ ID NO: 33285 - RNA, 32 nt, Human
acaucacugcacuccauccugggugacagaga

SEQ ID NO: 33286 - RNA, 32 nt, Human
acaucacugcacugcugacgccgcccuuguga

SEQ ID NO: 33287 - RNA, 32 nt, Human
acaucacugcaguccagccugggugacagagc

SEQ ID NO: 33288 - RNA, 32 nt, Human
acaucacugccaguugcuggccagcuugcccu

SEQ ID NO: 33289 - RNA, 32 nt, Human
acaucacuggcgugauguaagacaauucagcc

SEQ ID NO: 33290 - RNA, 22 nt, Human
acaucacuuacuucucagacca

SEQ ID NO: 33291 - RNA, 32 nt, Human
acaucacuuuuaucuugcagcucccgagauuc

SEQ ID NO: 33292 - RNA, 32 nt, Human
acaucagaacucugugucagccacuuuuauuu

SEQ ID NO: 33293 - RNA, 32 nt, Human
acaucagacuccaaguucuucaguuuugagac

SEQ ID NO: 33294 - RNA, 32 nt, Human
acaucagaggcagagucagaggccuccauguc

SEQ ID NO: 33295 - RNA, 32 nt, Human
acaucagaguauucauacuggagagaagccac

SEQ ID NO: 33296 - RNA, 32 nt, Human
acaucagaguauucauacuggagagaagcccu

SEQ ID NO: 33297 - RNA, 32 nt, Human
acaucagaugaagaacaugagcaagagcuucu

SEQ ID NO: 33298 - RNA, 32 nt, Human
acaucagcaaauucucaaacaguuauggacuc

SEQ ID NO: 33299 - RNA, 21 nt, Human
acaucagcacugaagucagcc

SEQ ID NO: 33300 - RNA, 32 nt, Human
acaucagcagaaugguugggaaugucaucaug

SEQ ID NO: 33301 - RNA, 32 nt, Human
acaucagcagggacuggucuagacccucccuu

SEQ ID NO: 33302 - RNA, 32 nt, Human
acaucagcaguugaaagaugaagaggauaacu

SEQ ID NO: 33303 - RNA, 32 nt, Human
acaucagcaugcuggcugugaccccggaaaga

SEQ ID NO: 33304 - RNA, 32 nt, Human
acaucagcauuguauacacauauuuucacuuu

SEQ ID NO: 33305 - RNA, 32 nt, Human
acaucagccagcacugcacagacagcugcgac

SEQ ID NO: 33306 - RNA, 32 nt, Human
acaucagcccaggagcccugagcagcacaggc

SEQ ID NO: 33307 - RNA, 32 nt, Human
acaucagccuccaugaggccaagccuuguacc

SEQ ID NO: 33308 - RNA, 32 nt, Human
acaucaggaagugagcccagaaagcugaaggu

SEQ ID NO: 33309 - RNA, 32 nt, Human
acaucaggacagacagaguuuuuggugagaag

SEQ ID NO: 33310 - RNA, 32 nt, Human
acaucaggauaacacauucuacaaaucagcug

SEQ ID NO: 33311 - RNA, 32 nt, Human
acaucaggauaguuuacugaagcacaaucucu

SEQ ID NO: 33312 - RNA, 32 nt, Human
acaucagggacuacagugggaaaaaggccucc

SEQ ID NO: 33313 - RNA, 32 nt, Human
acaucagggagaagaagguauagguggggaag

SEQ ID NO: 33314 - RNA, 32 nt, Human
acaucagggagugauuaguccuggggaaauuc

SEQ ID NO: 33315 - RNA, 24 nt, Human
acaucagggcggccucccaggucc

SEQ ID NO: 33316 - RNA, 32 nt, Human
acaucaggguagggaaagcugcagcagugaug

SEQ ID NO: 33317 - RNA, 32 nt, Human
acaucagguaacucauacaggagagaaaccau

SEQ ID NO: 33318 - RNA, 32 nt, Human
acaucaggugaaauguuagggugaggagccaa

SEQ ID NO: 33319 - RNA, 22 nt, Human
acaucaggugccaccaccacca

SEQ ID NO: 33320 - RNA, 32 nt, Human
acaucaguaaacaugagcgguaccaaaccuga

SEQ ID NO: 33321 - RNA, 24 nt, Human
acaucaguacuaccaccaccacca

SEQ ID NO: 33322 - RNA, 32 nt, Human
acaucaguggcuucucaagggaagagccuugc

SEQ ID NO: 33323 - RNA, 32 nt, Human
acaucagugggaggcaggggaggcagauauua

SEQ ID NO: 33324 - RNA, 32 nt, Human
acaucagugucuccucccuccugcuuugcugc

SEQ ID NO: 33325 - RNA, 32 nt, Human
acaucaguguuuugagaaccuuggacuacucc

SEQ ID NO: 33326 - RNA, 24 nt, Human
acaucauaaaagcaaagucagcca

SEQ ID NO: 33327 - RNA, 32 nt, Human
acaucauaaccagcuuuuacauccauuuuaga

SEQ ID NO: 33328 - RNA, 32 nt, Human
acaucauacaaaccagaauguuuccaucaccc

SEQ ID NO: 33329 - RNA, 32 nt, Human
acaucauacguggcaaccacaagccaaucagu

SEQ ID NO: 33330 - RNA, 32 nt, Human
acaucauauacuuccucagaagcaauugcaac

SEQ ID NO: 33331 - RNA, 20 nt, Human
acaucaucagaggacgcccc

SEQ ID NO: 33332 - RNA, 24 nt, Human
acaucaucccacugggagugguua

SEQ ID NO: 33333 - RNA, 23 nt, Human
acaucauccccaccccuccccca

SEQ ID NO: 33334 - RNA, 32 nt, Human
acaucaucucacacuuucauguucuuccauuu

SEQ ID NO: 33335 - RNA, 32 nt, Human
acaucaucucuauccaugagucaccccagccu

SEQ ID NO: 33336 - RNA, 32 nt, Human
acaucaucuggcaugugugcucugcacuggcu

SEQ ID NO: 33337 - RNA, 32 nt, Human
acaucaugagccuucagucaggguuugucaga

SEQ ID NO: 33338 - RNA, 32 nt, Human
acaucaugccacugcacuccagccuggggcug

SEQ ID NO: 33339 - RNA, 21 nt, Human
acaucauguagcaguuagcca

SEQ ID NO: 33340 - RNA, 32 nt, Human
acaucaugugccagccuccacccucacgccau

SEQ ID NO: 33341 - RNA, 21 nt, Human
acaucauuaccaagguugcca

SEQ ID NO: 33342 - RNA, 32 nt, Human
acaucauucauucaagggcuaaauuuauauuu

SEQ ID NO: 33343 - RNA, 32 nt, Human
acaucauucuggcuggagagugcaauguguca

SEQ ID NO: 33344 - RNA, 32 nt, Human
acaucauuuauuuuugcaucccugucugcuuu

SEQ ID NO: 33345 - RNA, 32 nt, Human
acauccaagaggaaauaauccaggcaaggaag

SEQ ID NO: 33346 - RNA, 32 nt, Human
acauccaagcaccugcuccuucaaggggacaa

SEQ ID NO: 33347 - RNA, 32 nt, Human
acauccaagcuggggugcaguggcgcgaucuc

SEQ ID NO: 33348 - RNA, 32 nt, Human
acauccacaagucucggugcaguuaugauggu

SEQ ID NO: 33349 - RNA, 23 nt, Human
acauccacagcguguccucccuc

SEQ ID NO: 33350 - RNA, 32 nt, Human
acauccacaguguuuucauuuacucugcuugu

SEQ ID NO: 33351 - RNA, 32 nt, Human
acauccacaugcucugcaguccuggcccccuc

SEQ ID NO: 33352 - RNA, 32 nt, Human
acauccaccggacugcagcccaagucuggacc

SEQ ID NO: 33353 - RNA, 32 nt, Human
acauccaccucccagguucaagugauucuugu

SEQ ID NO: 33354 - RNA, 32 nt, Human
acauccaccuccuggguucaagcaauucuccu

SEQ ID NO: 33355 - RNA, 32 nt, Human
acauccaccuccuggguucaagcgauucuccu

SEQ ID NO: 33356 - RNA, 32 nt, Human
acauccagacacaucaucuccauccuccagaa

SEQ ID NO: 33357 - RNA, 32 nt, Human
acauccagacaggaugaggguggagggagagc

SEQ ID NO: 33358 - RNA, 32 nt, Human
acauccagcguugugccuuuucucuauaagga

SEQ ID NO: 33359 - RNA, 32 nt, Human
acauccagcucagcaaccacaagcacagaggc

SEQ ID NO: 33360 - RNA, 32 nt, Human
acauccagcuccuggguuucagcaauucuccu

SEQ ID NO: 33361 - RNA, 22 nt, Human
acauccagcugccccucccuca

SEQ ID NO: 33362 - RNA, 32 nt, Human
acauccaggaagguaggagaaggcaucugagu

SEQ ID NO: 33363 - RNA, 32 nt, Human
acauccagggcugugucuuccuugggggagga

SEQ ID NO: 33364 - RNA, 32 nt, Human
acauccagucaggaccugacccgucucugucu

SEQ ID NO: 33365 - RNA, 32 nt, Human
acauccagugucuccaaaauuguuuccuugua

SEQ ID NO: 33366 - RNA, 32 nt, Human
acauccaucccuccauucauccuuccauccau

SEQ ID NO: 33367 - RNA, 32 nt, Human
acauccaugccauuugaugauuccaccacucc

SEQ ID NO: 33368 - RNA, 32 nt, Human
acaucccaaagggaucucaagccuucagcucu

SEQ ID NO: 33369 - RNA, 32 nt, Human
acaucccaauggcccuguccuuuucuuuacug

SEQ ID NO: 33370 - RNA, 32 nt, Human
acaucccacucucugaacuacaaucacugugc

SEQ ID NO: 33371 - RNA, 32 nt, Human
acaucccacuggcugcuguucugaaaccaucu

SEQ ID NO: 33372 - RNA, 32 nt, Human
acaucccagcacccccucuccugcugcaauuc

SEQ ID NO: 33373 - RNA, 32 nt, Human
acaucccagcuccuguccugugccuucaccuc

SEQ ID NO: 33374 - RNA, 32 nt, Human
acaucccaggauuuauggugucugucuauggc

SEQ ID NO: 33375 - RNA, 32 nt, Human
acaucccaguuuuguucuaucuuucuguccca

SEQ ID NO: 33376 - RNA, 32 nt, Human
acaucccauggacuugucacccagucgccugg

SEQ ID NO: 33377 - RNA, 32 nt, Human
acauccccaacaacagcagggaccaaccuaug

SEQ ID NO: 33378 - RNA, 32 nt, Human
acauccccacuuccagcccauguacacuagug

SEQ ID NO: 33379 - RNA, 32 nt, Human
acauccccagagugaaagauggagcugggcca

SEQ ID NO: 33380 - RNA, 18 nt, Human
acauccccaugcccuuga

SEQ ID NO: 33381 - RNA, 32 nt, Human
acaucccccuuucccuuccuccugugcugucc

SEQ ID NO: 33382 - RNA, 21 nt, Human
acauccccuguccccucccca

SEQ ID NO: 33383 - RNA, 18 nt, Human
acauccccugucuacuca

SEQ ID NO: 33384 - RNA, 32 nt, Human
acauccccuuuagaguucacacaucuugcccu

SEQ ID NO: 33385 - RNA, 19 nt, Human
acaucccgcggccccagca

SEQ ID NO: 33386 - RNA, 32 nt, Human
acaucccgggacggaggaagagaugaaggcuc

SEQ ID NO: 33387 - RNA, 32 nt, Human
acaucccggggcccuggccacagcauuguagg

SEQ ID NO: 33388 - RNA, 32 nt, Human
acaucccuauaauuccagcuacucgggaggcc

SEQ ID NO: 33389 - RNA, 20 nt, Human
acaucccucaaggcugggug

SEQ ID NO: 33390 - RNA, 32 nt, Human
acaucccuccacuucuccaacuucuguuuaau

SEQ ID NO: 33391 - RNA, 32 nt, Human
acaucccuccaggugaccuccaccuaccaugg

SEQ ID NO: 33392 - RNA, 32 nt, Human
acaucccucuguucuucucuuccuccuucagc

SEQ ID NO: 33393 - RNA, 32 nt, Human
acaucccugaauucaggcauucacaagaugca

SEQ ID NO: 33394 - RNA, 32 nt, Human
acaucccugagcugaauggcuucugagucgga

SEQ ID NO: 33395 - RNA, 32 nt, Human
acaucccugccuguagcucuucuuagugccua

SEQ ID NO: 33396 - RNA, 32 nt, Human
acaucccugcucccuccuuccucauccagcac

SEQ ID NO: 33397 - RNA, 32 nt, Human
acaucccugcuggaugcaggacccguccaaag

SEQ ID NO: 33398 - RNA, 25 nt, Human
acaucccuggccuccacccccacca

SEQ ID NO: 33399 - RNA, 32 nt, Human
acaucccugggcagaguaccaggcugcugacc

SEQ ID NO: 33400 - RNA, 32 nt, Human
acaucccugggugaagauggggagacagugcg

SEQ ID NO: 33401 - RNA, 32 nt, Human
acaucccuguagucccagcuacucccagcuau

SEQ ID NO: 33402 - RNA, 32 nt, Human
acaucccuucucgugcucacacacuugcccac

SEQ ID NO: 33403 - RNA, 32 nt, Human
acaucccuugccaaaaucagugucuggggcuu

SEQ ID NO: 33404 - RNA, 32 nt, Human
acaucccuuggccccuccaucugggcuccugu

SEQ ID NO: 33405 - RNA, 32 nt, Human
acaucccuuucccugcaggaguguggucuaua

SEQ ID NO: 33406 - RNA, 32 nt, Human
acaucccuuucucccuucccuccucuugcucc

SEQ ID NO: 33407 - RNA, 32 nt, Human
acaucccuuugaaacaagauaacugagaauuu

SEQ ID NO: 33408 - RNA, 32 nt, Human
acaucccuuuugcucauccagaucuuaaugau

SEQ ID NO: 33409 - RNA, 32 nt, Human
acauccgaaaagcaaccaacuucuucauggaa

SEQ ID NO: 33410 - RNA, 32 nt, Human
acauccgaaagcuacaccacagaugccagugg

SEQ ID NO: 33411 - RNA, 32 nt, Human
acauccgccuccuggguucaagcgauucuccu

SEQ ID NO: 33412 - RNA, 32 nt, Human
acauccgccucugggguucaagugauucuccu

SEQ ID NO: 33413 - RNA, 32 nt, Human
acauccgccugacgcuggacgugaccuucggg

SEQ ID NO: 33414 - RNA, 32 nt, Human
acauccggugcaucaugagacaugcuucuuug

SEQ ID NO: 33415 - RNA, 32 nt, Human
acauccgucuuggaggagaggcugcagccaca

SEQ ID NO: 33416 - RNA, 32 nt, Human
acauccguugugcuugccugcguuuuggaagc

SEQ ID NO: 33417 - RNA, 32 nt, Human
acauccuaaccaggauauacucuguucuugaa

SEQ ID NO: 33418 - RNA, 32 nt, Human
acauccuaagccauccaaaagaguugguuaua

SEQ ID NO: 33419 - RNA, 32 nt, Human
acauccuagaagcagcggauggugaggacaca

SEQ ID NO: 33420 - RNA, 32 nt, Human
acauccuagcuccuucucaggccuccaacugu

SEQ ID NO: 33421 - RNA, 32 nt, Human
acauccucaaauacauggcacauucauuagca

SEQ ID NO: 33422 - RNA, 25 nt, Human
acauccucaauaaaaccuguuguau

SEQ ID NO: 33423 - RNA, 32 nt, Human
acauccucauuucccacgcuucuccuuccacc

SEQ ID NO: 33424 - RNA, 20 nt, Human
acauccuccaucccagcaua

SEQ ID NO: 33425 - RNA, 32 nt, Human
acauccucccaaagugugcuuacuucauuugu

SEQ ID NO: 33426 - RNA, 32 nt, Human
acauccuccugccucggccuccugaguagcug

SEQ ID NO: 33427 - RNA, 32 nt, Human
acauccuccugcuucagccuccagagaguugg

SEQ ID NO: 33428 - RNA, 32 nt, Human
acauccucucucuccaaguuuaucucauccuu

SEQ ID NO: 33429 - RNA, 32 nt, Human
acauccucucuuggccuuacugaagauggggg

SEQ ID NO: 33430 - RNA, 32 nt, Human
acauccucugagcaccuggccgugggaaugcc

SEQ ID NO: 33431 - RNA, 32 nt, Human
acauccugcauucauguaaacaguuugcuguu

SEQ ID NO: 33432 - RNA, 32 nt, Human
acauccugccauugcucacccuuucccuuuau

SEQ ID NO: 33433 - RNA, 32 nt, Human
acauccugcccaaaccacucuccucucguccc

SEQ ID NO: 33434 - RNA, 32 nt, Human
acauccugcuucugcaauuccagagagugcug

SEQ ID NO: 33435 - RNA, 32 nt, Human
acauccuggaguuuggcucuagucacuucugg

SEQ ID NO: 33436 - RNA, 32 nt, Human
acauccuggccuggcacaucagaaaggaaugg

SEQ ID NO: 33437 - RNA, 32 nt, Human
acauccuggcuccuaucucugccuuccaggca

SEQ ID NO: 33438 - RNA, 32 nt, Human
acauccugucucaaauaaauuacauuaaaugu

SEQ ID NO: 33439 - RNA, 32 nt, Human
acauccuucacuguguggaccuagagacucca

SEQ ID NO: 33440 - RNA, 32 nt, Human
acauccuucauauguauuucccugcacuggcc

SEQ ID NO: 33441 - RNA, 32 nt, Human
acauccuucccaacaccuccuucccaacaccu

SEQ ID NO: 33442 - RNA, 32 nt, Human
acauccuucccccagacacuguucccaaccug

SEQ ID NO: 33443 - RNA, 32 nt, Human
acauccuuucuuccuuucauucccaagauaua

SEQ ID NO: 33444 - RNA, 32 nt, Human
acaucgacccccaggccucggaaguggcuguc

SEQ ID NO: 33445 - RNA, 32 nt, Human
acaucgauauacauuuauuuacacucuugauu

SEQ ID NO: 33446 - RNA, 32 nt, Human
acaucgaugacgagcugaagcuguugucacuu

SEQ ID NO: 33447 - RNA, 32 nt, Human
acaucgccauuuuccucuuucccaacucuuac

SEQ ID NO: 33448 - RNA, 32 nt, Human
acaucgcgccacugcacuccagccugggcgac

SEQ ID NO: 33449 - RNA, 32 nt, Human
acaucgcgccacugcacuucagccuggacaac

SEQ ID NO: 33450 - RNA, 32 nt, Human
acaucgcgccauugcacuccagccugggugac

SEQ ID NO: 33451 - RNA, 32 nt, Human
acaucgcggcccuccagccuggccuaacacuu

SEQ ID NO: 33452 - RNA, 32 nt, Human
acaucggcacucuggaccuggccagcagccgc

SEQ ID NO: 33453 - RNA, 32 nt, Human
acaucggccacagccaccuugucuuugcucuu

SEQ ID NO: 33454 - RNA, 32 nt, Human
acaucggggaaucucuccaggacauuggagug

SEQ ID NO: 33455 - RNA, 21 nt, Human
acaucgguuucaccuccacca

SEQ ID NO: 33456 - RNA, 24 nt, Human
acaucguaguccacccccucccca

SEQ ID NO: 33457 - RNA, 32 nt, Human
acaucgucaagaacaagccagugcugcuugug

SEQ ID NO: 33458 - RNA, 32 nt, Human
acaucgucucucucauucaugacugggaagug

SEQ ID NO: 33459 - RNA, 23 nt, Human
acaucgucugacuugagucgcca

SEQ ID NO: 33460 - RNA, 32 nt, Human
acaucgugcauucuguaucagcugguccaguc

SEQ ID NO: 33461 - RNA, 32 nt, Human
acaucgugcugcagcuggacgacauccagcau

SEQ ID NO: 33462 - RNA, 32 nt, Human
acaucguggagcugugguggggccugcaguca

SEQ ID NO: 33463 - RNA, 32 nt, Human
acaucguggccucaggugccaggguuugaugg

SEQ ID NO: 33464 - RNA, 32 nt, Human
acaucuaacccccacaagucacugccucacug

SEQ ID NO: 33465 - RNA, 32 nt, Human
acaucuaagagacauucauuuggauuccccuc

SEQ ID NO: 33466 - RNA, 32 nt, Human
acaucuacagagacaaaauuaggaaggaagga

SEQ ID NO: 33467 - RNA, 32 nt, Human
acaucuaccccuguucugaaucaggauguuga

SEQ ID NO: 33468 - RNA, 32 nt, Human
acaucuacccuuuuaauauagcacucaucuuu

SEQ ID NO: 33469 - RNA, 32 nt, Human
acaucuaccgccaacccagcugcuucuggcag

SEQ ID NO: 33470 - RNA, 32 nt, Human
acaucuauacccugaaacuaggcaggcacaaa

SEQ ID NO: 33471 - RNA, 32 nt, Human
acaucuauacuuccuuguguucaucaacaaug

SEQ ID NO: 33472 - RNA, 32 nt, Human
acaucuauccuacuuaugcagaaaaauaggca

SEQ ID NO: 33473 - RNA, 32 nt, Human
acaucuauugcuuuuucccuucaucugucaca

SEQ ID NO: 33474 - RNA, 32 nt, Human
acaucucaagaaccagccuuucaaacaguuuc

SEQ ID NO: 33475 - RNA, 31 nt, Human
acaucucaaggaauucagcuguugaaaucau

SEQ ID NO: 33476 - RNA, 32 nt, Human
acaucucaagggcuugcagccccacugcuccu

SEQ ID NO: 33477 - RNA, 32 nt, Human
acaucucacuucugcuuccucaucucagccca

SEQ ID NO: 33478 - RNA, 32 nt, Human
acaucucagccaggaaccugggacuuuaggug

SEQ ID NO: 33479 - RNA, 32 nt, Human
acaucucaggugccaggggcugugggagcuug

SEQ ID NO: 33480 - RNA, 32 nt, Human
acaucucagugaauuugcaaguggaucauccu

SEQ ID NO: 33481 - RNA, 32 nt, Human
acaucucaguggcuggaggccaugccuuuuaa

SEQ ID NO: 33482 - RNA, 32 nt, Human
acaucucaucuucuguccucagauggauuuac

SEQ ID NO: 33483 - RNA, 32 nt, Human
acaucucaucuuuugacccaaucuuauucauu

SEQ ID NO: 33484 - RNA, 32 nt, Human
acaucucauugccucuuccugcccugggcugu

SEQ ID NO: 33485 - RNA, 32 nt, Human
acaucuccacccgauccuggagagcugugagg

SEQ ID NO: 33486 - RNA, 32 nt, Human
acaucuccagacuacaaaaauuggaaagcugg

SEQ ID NO: 33487 - RNA, 32 nt, Human
acaucucccauggaauugugagauaugaaaaa

SEQ ID NO: 33488 - RNA, 32 nt, Human
acaucuccccucagccucuccucacuauggcc

SEQ ID NO: 33489 - RNA, 32 nt, Human
acaucucccgaaccucuccagcuagauguccc

SEQ ID NO: 33490 - RNA, 32 nt, Human
acaucucccugcuguguccccugggcauuucu

SEQ ID NO: 33491 - RNA, 32 nt, Human
acaucuccuagagcugggaaugugucccuaac

SEQ ID NO: 33492 - RNA, 32 nt, Human
acaucuccuccccugaaaugcuuuucaguuug

SEQ ID NO: 33493 - RNA, 32 nt, Human
acaucuccugcacuucucaaguugcugccggu

SEQ ID NO: 33494 - RNA, 32 nt, Human
acaucuccugcaggacaggcccuagcuacuga

SEQ ID NO: 33495 - RNA, 32 nt, Human
acaucuccugccuuucugcucacuuuccugcc

SEQ ID NO: 33496 - RNA, 32 nt, Human
acaucucgggguuucagggugggcaggggguu

SEQ ID NO: 33497 - RNA, 32 nt, Human
acaucucguuugcuaguaucuaacagucuuag

SEQ ID NO: 33498 - RNA, 32 nt, Human
acaucucuaaagauuuauuucuuguuuuugag

SEQ ID NO: 33499 - RNA, 32 nt, Human
acaucucucauccccucuuccuuuauuccccc

SEQ ID NO: 33500 - RNA, 32 nt, Human
acaucucucucacccuucuacuuccuaugauu

SEQ ID NO: 33501 - RNA, 32 nt, Human
acaucucucugcccucucccuguguucugggc

SEQ ID NO: 33502 - RNA, 32 nt, Human
acaucucugaagaaguugaggggugggggaga

SEQ ID NO: 33503 - RNA, 32 nt, Human
acaucucugccuuugccuguguguguucuggg

SEQ ID NO: 33504 - RNA, 32 nt, Human
acaucucugcuggaauauuuggaaaagaacac

SEQ ID NO: 33505 - RNA, 32 nt, Human
acaucucuguaacccagcuggccccuggugcu

SEQ ID NO: 33506 - RNA, 32 nt, Human
acaucucuuugcagguagcagcaacaguugua

SEQ ID NO: 33507 - RNA, 32 nt, Human
acaucugaaaccaccaguaccaccaccacuac

SEQ ID NO: 33508 - RNA, 32 nt, Human
acaucugaaauccaaucauucaacuuggguuc

SEQ ID NO: 33509 - RNA, 31 nt, Human
acaucugaauuuauauaccuguugaguuuug

SEQ ID NO: 33510 - RNA, 32 nt, Human
acaucugacuccuggguucaagcaguucuucc

SEQ ID NO: 33511 - RNA, 32 nt, Human
acaucugcagacaagggccaggaagcaaggcu

SEQ ID NO: 33512 - RNA, 32 nt, Human
acaucugcaggcuuuuucuuaguguuccuauu

SEQ ID NO: 33513 - RNA, 32 nt, Human
acaucugcagugcuuccccaggguugacaagg

SEQ ID NO: 33514 - RNA, 32 nt, Human
acaucugccaucauuucucuccucuagagucc

SEQ ID NO: 33515 - RNA, 32 nt, Human
acaucugccauuguucugaagggagacgcuac

SEQ ID NO: 33516 - RNA, 32 nt, Human
acaucugcccuggccucuccugcuccagggca

SEQ ID NO: 33517 - RNA, 32 nt, Human
acaucugccugagagaucuccaagaauuacag

SEQ ID NO: 33518 - RNA, 32 nt, Human
acaucugcuccucacaugaaugcacucaccuc

SEQ ID NO: 33519 - RNA, 32 nt, Human
acaucugcuuccuguaggcccucugggcagaa

SEQ ID NO: 33520 - RNA, 32 nt, Human
acaucugcuucuaacauaucgcauguuuaugu

SEQ ID NO: 33521 - RNA, 32 nt, Human
acaucuggcccugaccccacuggaccaaaagg

SEQ ID NO: 33522 - RNA, 32 nt, Human
acaucuggcuccugcccucauugccuccaauc

SEQ ID NO: 33523 - RNA, 15 nt, Human
acaucuggcugcaca

SEQ ID NO: 33524 - RNA, 32 nt, Human
acaucuggcugcaggaauuucaauauguagaa

SEQ ID NO: 33525 - RNA, 32 nt, Human
acaucuggcuucccuucucagccucaugucca

SEQ ID NO: 33526 - RNA, 20 nt, Human
acaucuggggcugugugcau

SEQ ID NO: 33527 - RNA, 32 nt, Human
acaucuguauuaaacauaggagagaaguuuau

SEQ ID NO: 33528 - RNA, 32 nt, Human
acaucugucacugaaggagguggagcucccac

SEQ ID NO: 33529 - RNA, 32 nt, Human
acaucugucagggugugagcacuccaaggccu

SEQ ID NO: 33530 - RNA, 32 nt, Human
acaucuguccccucauuuuugagaucccccaa

SEQ ID NO: 33531 - RNA, 32 nt, Human
acaucugucuccaagccaaggugaccauucca

SEQ ID NO: 33532 - RNA, 32 nt, Human
acaucugucuccauuccugccaucucuuccug

SEQ ID NO: 33533 - RNA, 32 nt, Human
acaucugucuuggucacagagcugggugcugc

SEQ ID NO: 33534 - RNA, 32 nt, Human
acaucugugcaugccuguuugugcacauauau

SEQ ID NO: 33535 - RNA, 32 nt, Human
acaucuguggauucaaccaacugcagaucaaa

SEQ ID NO: 33536 - RNA, 32 nt, Human
acaucugugggugggccguggguagagggacc

SEQ ID NO: 33537 - RNA, 32 nt, Human
acaucuguggugagugaaaugcacgccauaca

SEQ ID NO: 33538 - RNA, 32 nt, Human
acaucuguguucuuccugucagcuccacgccc

SEQ ID NO: 33539 - RNA, 32 nt, Human
acaucuguguuuuagcaggugggauuugaagc

SEQ ID NO: 33540 - RNA, 32 nt, Human
acaucuguguuuuuauaucuguucccuacccc

SEQ ID NO: 33541 - RNA, 32 nt, Human
acaucuguguuuuuauaucuguucccuacccu

SEQ ID NO: 33542 - RNA, 32 nt, Human
acaucuguucauauauccuccuuaaccacaga

SEQ ID NO: 33543 - RNA, 32 nt, Human
acaucuguuuaugaaggccauauucaguacau

SEQ ID NO: 33544 - RNA, 32 nt, Human
acaucuuagaggcaugaagcccuugcucagau

SEQ ID NO: 33545 - RNA, 32 nt, Human
acaucuuagcacuuccgcucucaggccuccuc

SEQ ID NO: 33546 - RNA, 32 nt, Human
acaucuuaguucugaccuuguggaggccgcgu

SEQ ID NO: 33547 - RNA, 32 nt, Human
acaucuuauuuggugucucaaagcuguauuuc

SEQ ID NO: 33548 - RNA, 32 nt, Human
acaucuucacagauaucagagaaaagugaaaa

SEQ ID NO: 33549 - RNA, 32 nt, Human
acaucuucauucucuaaccacucuauugauuc

SEQ ID NO: 33550 - RNA, 32 nt, Human
acaucuuccuccucgcaggagggaccaggcgg

SEQ ID NO: 33551 - RNA, 32 nt, Human
acaucuucuccagcgcagacuuuugcuggaug

SEQ ID NO: 33552 - RNA, 32 nt, Human
acaucuucucucuuccccaucuugcauuggag

SEQ ID NO: 33553 - RNA, 32 nt, Human
acaucuucugccccuucucagccucccucacc

SEQ ID NO: 33554 - RNA, 32 nt, Human
acaucuugaagaacaagaaaguuguucuugug

SEQ ID NO: 33555 - RNA, 32 nt, Human
acaucuugccaccacaaguccacaccuggccu

SEQ ID NO: 33556 - RNA, 32 nt, Human
acaucuuggaagcaagaacaaucaggaccaaa

SEQ ID NO: 33557 - RNA, 32 nt, Human
acaucuuggagaaccuuucuuacucauuucag

SEQ ID NO: 33558 - RNA, 32 nt, Human
acaucuuggggaugggaugcaagucuaaccac

SEQ ID NO: 33559 - RNA, 32 nt, Human
acaucuugucucccucccagcaugggacucua

SEQ ID NO: 33560 - RNA, 32 nt, Human
acaucuuuagcugaucagaucucuccauaucc

SEQ ID NO: 33561 - RNA, 32 nt, Human
acaucuuucaguuucaugauuaaggauuguug

SEQ ID NO: 33562 - RNA, 32 nt, Human
acaucuuucucuguccccuccuugcccugucu

SEQ ID NO: 33563 - RNA, 32 nt, Human
acaucuuucugacagaagcaccucaucugugg

SEQ ID NO: 33564 - RNA, 21 nt, Human
acaucuuuggagaggauuuga

SEQ ID NO: 33565 - RNA, 32 nt, Human
acaucuuuggcaaccaggcugucagacugacc

SEQ ID NO: 33566 - RNA, 32 nt, Human
acaucuuuuccaaggcaaacccuguucaggcu

SEQ ID NO: 33567 - RNA, 16 nt, Human
acaugaaaaaucuuca

SEQ ID NO: 33568 - RNA, 32 nt, Human
acaugaaaacuucaacacagaggggaaucuug

SEQ ID NO: 33569 - RNA, 32 nt, Human
acaugaaaauacuagcuuauuuucugaaaugu

SEQ ID NO: 33570 - RNA, 32 nt, Human
acaugaaaaugagaagccugaugggaaccgcg

SEQ ID NO: 33571 - RNA, 17 nt, Human
acaugaaagaauccaca

SEQ ID NO: 33572 - RNA, 18 nt, Human
acaugaaagccuugcaca

SEQ ID NO: 33573 - RNA, 18 nt, Human
acaugaaagguccccaca

SEQ ID NO: 33574 - RNA, 32 nt, Human
acaugaaagguguguggaaaguggccagcauu

SEQ ID NO: 33575 - RNA, 18 nt, Human
acaugaaaguacuucuca

SEQ ID NO: 33576 - RNA, 32 nt, Human
acaugaaaguuauugcuaaaguagcugcucau

SEQ ID NO: 33577 - RNA, 32 nt, Human
acaugaacacagccugucugugcucagacaua

SEQ ID NO: 33578 - RNA, 32 nt, Human
acaugaacacaguggcuaucauuucccccuug

SEQ ID NO: 33579 - RNA, 32 nt, Human
acaugaacagguugaagaacuggagcgaagug

SEQ ID NO: 33580 - RNA, 23 nt, Human
acaugaacauucauugcaugcuc

SEQ ID NO: 33581 - RNA, 32 nt, Human
acaugaaccagcccacgcacagcuucacccua

SEQ ID NO: 33582 - RNA, 32 nt, Human
acaugaaccagcuguugcagucugcccacaaa

SEQ ID NO: 33583 - RNA, 32 nt, Human
acaugaacccaggaggcggagcuugcagugag

SEQ ID NO: 33584 - RNA, 32 nt, Human
acaugaacccaggagguugaagcugcgguggg

SEQ ID NO: 33585 - RNA, 32 nt, Human
acaugaaccucaccgucccucucucagcugua

SEQ ID NO: 33586 - RNA, 32 nt, Human
acaugaagaggcaccucuggggagcaaagagg

SEQ ID NO: 33587 - RNA, 32 nt, Human
acaugaagaucuggcacuggcuuuuugucacu

SEQ ID NO: 33588 - RNA, 32 nt, Human
acaugaagccaggugaagaggggccugauggg

SEQ ID NO: 33589 - RNA, 32 nt, Human
acaugaagccagugcacgccagccugggcgac

SEQ ID NO: 33590 - RNA, 32 nt, Human
acaugaagcccccuccuguagggacagcucag

SEQ ID NO: 33591 - RNA, 32 nt, Human
acaugaagccuccuuuucuugagcugguggag

SEQ ID NO: 33592 - RNA, 32 nt, Human
acaugaagcgugcuuuggacaaacuggauggc

SEQ ID NO: 33593 - RNA, 19 nt, Human
acaugaaggcccucucaca

SEQ ID NO: 33594 - RNA, 32 nt, Human
acaugaaggugggcuggccaggugagagcugc

SEQ ID NO: 33595 - RNA, 32 nt, Human
acaugaaguacaaauggaucacagaccugaau

SEQ ID NO: 33596 - RNA, 32 nt, Human
acaugaaguccagccgcuuccucccaaaaccu

SEQ ID NO: 33597 - RNA, 32 nt, Human
acaugaaguucugcccaucuuccugaccucca

SEQ ID NO: 33598 - RNA, 32 nt, Human
acaugaaguuugaacacuaaacaguaauguau

SEQ ID NO: 33599 - RNA, 32 nt, Human
acaugaauagaauucauuugcugagaggcaug

SEQ ID NO: 33600 - RNA, 32 nt, Human
acaugaauaggaaucuuccuggcacuuagugu

SEQ ID NO: 33601 - RNA, 32 nt, Human
acaugaaucucuugcgguuaggcuaagucccu

SEQ ID NO: 33602 - RNA, 32 nt, Human
acaugaaugaaaccccuccugccuugcagggu

SEQ ID NO: 33603 - RNA, 32 nt, Human
acaugaaugaacacuuuggauuuuguuguagu

SEQ ID NO: 33604 - RNA, 32 nt, Human
acaugaaugcauauauaaaaagugcugguuuc

SEQ ID NO: 33605 - RNA, 32 nt, Human
acaugaaugcauauauaaaaauugcugguuuc

SEQ ID NO: 33606 - RNA, 32 nt, Human
acaugaauucuaaguuuuggguaauguuaacu

SEQ ID NO: 33607 - RNA, 32 nt, Human
acaugacaaagaaagacuggaaaagugguuaa

SEQ ID NO: 33608 - RNA, 32 nt, Human
acaugacacagauguucucuaagauuacugga

SEQ ID NO: 33609 - RNA, 32 nt, Human
acaugacaggggagaucccacagcugcagcac

SEQ ID NO: 33610 - RNA, 32 nt, Human
acaugacaguaucuugaguuaugugaguuuuu

SEQ ID NO: 33611 - RNA, 32 nt, Human
acaugacaguguccaggucuuucagagagaac

SEQ ID NO: 33612 - RNA, 32 nt, Human
acaugacaucuuaaguagaaauaaguagggac

SEQ ID NO: 33613 - RNA, 32 nt, Human
acaugacauucuuuuucucuccuuccugaaaa

SEQ ID NO: 33614 - RNA, 32 nt, Human
acaugaccaaaaaccaaaagugcauucaaccu

SEQ ID NO: 33615 - RNA, 32 nt, Human
acaugacccacuuucuccccugggggacguug

SEQ ID NO: 33616 - RNA, 32 nt, Human
acaugacccugaguccccuggauuuugcauuc

SEQ ID NO: 33617 - RNA, 32 nt, Human
acaugacuagcacgcugagcucugcagggacc

SEQ ID NO: 33618 - RNA, 27 nt, Human
acaugacucauggagaagagcuuggcu

SEQ ID NO: 33619 - RNA, 32 nt, Human
acaugacuccagagagccacagugccaaacuc

SEQ ID NO: 33620 - RNA, 32 nt, Human
acaugacucccagugaggagaauucaggugau

SEQ ID NO: 33621 - RNA, 32 nt, Human
acaugacuguaaucccagcuacucaggaggcu

SEQ ID NO: 33622 - RNA, 32 nt, Human
acaugacuuggcuuucucauccagaaauuaug

SEQ ID NO: 33623 - RNA, 32 nt, Human
acaugagaaaggcauuccuggagugugaagcc

SEQ ID NO: 33624 - RNA, 32 nt, Human
acaugagaaagggagaggaagagaagcccagc

SEQ ID NO: 33625 - RNA, 32 nt, Human
acaugagaacauauuuccaagacagaggauuc

SEQ ID NO: 33626 - RNA, 32 nt, Human
acaugagaagugacgauggucaugacagaccc

SEQ ID NO: 33627 - RNA, 32 nt, Human
acaugagacaucaaucaaauauauagagaugu

SEQ ID NO: 33628 - RNA, 32 nt, Human
acaugagagagggagaaggaccgcguuuaccu

SEQ ID NO: 33629 - RNA, 32 nt, Human
acaugagauucugcucaucauugcucagcucc

SEQ ID NO: 33630 - RNA, 32 nt, Human
acaugagcagaaaauauuuucccacuggugug

SEQ ID NO: 33631 - RNA, 17 nt, Human
acaugagcagggugaga

SEQ ID NO: 33632 - RNA, 32 nt, Human
acaugagcccaggagguugaggcugcagugag

SEQ ID NO: 33633 - RNA, 32 nt, Human
acaugagcccaggaguucaaguucagccagag

SEQ ID NO: 33634 - RNA, 32 nt, Human
acaugagcccuuuuuaaaugugauuucccguc

SEQ ID NO: 33635 - RNA, 32 nt, Human
acaugagcucuuccugccacauugagaugauc

SEQ ID NO: 33636 - RNA, 32 nt, Human
acaugaggaauuuacucuggaagaggaaaauc

SEQ ID NO: 33637 - RNA, 32 nt, Human
acaugaggaccuggaggguucaucccgagggc

SEQ ID NO: 33638 - RNA, 32 nt, Human
acaugaggacucuauucuuuaacucccauuac

SEQ ID NO: 33639 - RNA, 32 nt, Human
acaugaggauauuucucaguaccacuuuguua

SEQ ID NO: 33640 - RNA, 32 nt, Human
acaugaggccaucucaggagauggagggcuug

SEQ ID NO: 33641 - RNA, 32 nt, Human
acaugagggcuguagggaaccccuggaggaca

SEQ ID NO: 33642 - RNA, 32 nt, Human
acaugaggggcagaaaugggaucacagagucu

SEQ ID NO: 33643 - RNA, 32 nt, Human
acaugagggugcucuugugacuuaauuuuugu

SEQ ID NO: 33644 - RNA, 32 nt, Human
acaugaggguguaagccuucagccuggcaagu

SEQ ID NO: 33645 - RNA, 32 nt, Human
acaugaggguuccaagugugcugaagaggaca

SEQ ID NO: 33646 - RNA, 32 nt, Human
acaugagguggugguggcgcagcagacugcga

SEQ ID NO: 33647 - RNA, 21 nt, Human
acaugauaaaagacacuccca

SEQ ID NO: 33648 - RNA, 20 nt, Human
acaugauaaacacauguccu

SEQ ID NO: 33649 - RNA, 17 nt, Human
acaugauaccacacuca

SEQ ID NO: 33650 - RNA, 32 nt, Human
acaugauagauaguuggucgauuacauugcua

SEQ ID NO: 33651 - RNA, 32 nt, Human
acaugaucacugcaggaugauccuccucccau

SEQ ID NO: 33652 - RNA, 32 nt, Human
acaugaucauagcucacuccagccugaagcaa

SEQ ID NO: 33653 - RNA, 32 nt, Human
acaugaucauagcucacugcagccuggaacuc

SEQ ID NO: 33654 - RNA, 32 nt, Human
acaugaucccauggcccugaauuuguauaccu

SEQ ID NO: 33655 - RNA, 32 nt, Human
acaugaucccuuaauucaggcucaggcugaag

SEQ ID NO: 33656 - RNA, 32 nt, Human
acaugauccgagacauccaggagacagagccc

SEQ ID NO: 33657 - RNA, 32 nt, Human
acaugauccucuccuuagucuuagcucauggg

SEQ ID NO: 33658 - RNA, 32 nt, Human
acaugaucucuagacugggacggugggguucc

SEQ ID NO: 33659 - RNA, 32 nt, Human
acaugaugcagagcaagccucugugauuccug

SEQ ID NO: 33660 - RNA, 32 nt, Human
acaugaugcaggcgaagcuugggaucuggcca

SEQ ID NO: 33661 - RNA, 27 nt, Human
acaugaugcagggggaggcacacccua

SEQ ID NO: 33662 - RNA, 32 nt, Human
acaugaugcaugcacagguuguacccacagac

SEQ ID NO: 33663 - RNA, 32 nt, Human
acaugaugucuuuuaugcuccuaaaacaucuu

SEQ ID NO: 33664 - RNA, 21 nt, Human
acaugaugugauuaucuucca

SEQ ID NO: 33665 - RNA, 32 nt, Human
acaugauucaugaugauuaaaauaucauacaa

SEQ ID NO: 33666 - RNA, 32 nt, Human
acaugauugcuuugugaaaugugcaaaugaua

SEQ ID NO: 33667 - RNA, 17 nt, Human
acaugauuuaucuucca

SEQ ID NO: 33668 - RNA, 32 nt, Human
acaugcaagccugaaaccuuugcauaugaguu

SEQ ID NO: 33669 - RNA, 32 nt, Human
acaugcaauauacuuauucacugucuaagucu

SEQ ID NO: 33670 - RNA, 21 nt, Human
acaugcacacacacauaugca

SEQ ID NO: 33671 - RNA, 32 nt, Human
acaugcacacacacaugcacacauauaugcac

SEQ ID NO: 33672 - RNA, 32 nt, Human
acaugcacacacccuccuuccccuagcaaaac

SEQ ID NO: 33673 - RNA, 32 nt, Human
acaugcacacacgcaugcacacacacaaagcc

SEQ ID NO: 33674 - RNA, 32 nt, Human
acaugcacacacuccucacacugcucaggcuc

SEQ ID NO: 33675 - RNA, 32 nt, Human
acaugcacaccaacaugcaugccgccggcaca

SEQ ID NO: 33676 - RNA, 32 nt, Human
acaugcacacucacgcucacacaugcugucac

SEQ ID NO: 33677 - RNA, 32 nt, Human
acaugcacacuguccccuauaggaccaugccu

SEQ ID NO: 33678 - RNA, 21 nt, Human
acaugcacauauguauacaca

SEQ ID NO: 33679 - RNA, 32 nt, Human
acaugcacauuccugucuucugccugcucccu

SEQ ID NO: 33680 - RNA, 19 nt, Human
acaugcaccccuggccuca

SEQ ID NO: 33681 - RNA, 32 nt, Human
acaugcaccuacacaaacauuuacauacaguu

SEQ ID NO: 33682 - RNA, 32 nt, Human
acaugcagacacaccugggcgucccgagguca

SEQ ID NO: 33683 - RNA, 32 nt, Human
acaugcagauccauaguauccuuuguaguguu

SEQ ID NO: 33684 - RNA, 32 nt, Human
acaugcagcuacucgggaggcugaggcaggag

SEQ ID NO: 33685 - RNA, 32 nt, Human
acaugcaggcagcuauuuggggaucuuuucac

SEQ ID NO: 33686 - RNA, 32 nt, Human
acaugcaggcccugcccccucgcuacagccag

SEQ ID NO: 33687 - RNA, 32 nt, Human
acaugcaggccggagcccucagcccggcagcu

SEQ ID NO: 33688 - RNA, 32 nt, Human
acaugcaguagcuucucugcuugagugagcug

SEQ ID NO: 33689 - RNA, 32 nt, Human
acaugcagugugcagccagucuggcucaggaa

SEQ ID NO: 33690 - RNA, 32 nt, Human
acaugcaguguggccaugaggucugccggaag

SEQ ID NO: 33691 - RNA, 32 nt, Human
acaugcauacacgaagaaaugcuaacggaagg

SEQ ID NO: 33692 - RNA, 19 nt, Human
acaugcaucaaacccuuga

SEQ ID NO: 33693 - RNA, 32 nt, Human
acaugcaucccccaccagaguaccauacagag

SEQ ID NO: 33694 - RNA, 32 nt, Human
acaugcaucuggguuuauaucugugugaccuu

SEQ ID NO: 33695 - RNA, 32 nt, Human
acaugcaugcaaauguccacugcagcacuauu

SEQ ID NO: 33696 - RNA, 31 nt, Human
acaugcaugcacacaaacaucacugcagccc

SEQ ID NO: 33697 - RNA, 32 nt, Human
acaugcaugcacacaaacguguacacaagugu

SEQ ID NO: 33698 - RNA, 32 nt, Human
acaugcauggauuuuuaaauugccugccaugc

SEQ ID NO: 33699 - RNA, 32 nt, Human
acaugcauuacacacaugcacacacauaugca

SEQ ID NO: 33700 - RNA, 32 nt, Human
acaugccaaacaucauacuucggaagcaauug

SEQ ID NO: 33701 - RNA, 24 nt, Human
acaugccaauuuuuauugcuuaaa

SEQ ID NO: 33702 - RNA, 32 nt, Human
acaugccacauggcuucucucucugcauggga

SEQ ID NO: 33703 - RNA, 32 nt, Human
acaugccacggcgguccuccaggcagggaaca

SEQ ID NO: 33704 - RNA, 32 nt, Human
acaugccacuggaagggaaguggguguccaug

SEQ ID NO: 33705 - RNA, 32 nt, Human
acaugccaguaaccccagcuacuagggaggcu

SEQ ID NO: 33706 - RNA, 32 nt, Human
acaugccagugggugugacuccuucauuuuuc

SEQ ID NO: 33707 - RNA, 27 nt, Human
acaugccaucaucucacauuguguuga

SEQ ID NO: 33708 - RNA, 32 nt, Human
acaugccaucugggacaggccaugugggagac

SEQ ID NO: 33709 - RNA, 32 nt, Human
acaugcccaaguaccccugcaggaugaagggc

SEQ ID NO: 33710 - RNA, 32 nt, Human
acaugcccacugcagcccuccagccucugguc

SEQ ID NO: 33711 - RNA, 32 nt, Human
acaugcccagcccagccacaggcugagcuggu

SEQ ID NO: 33712 - RNA, 32 nt, Human
acaugcccaguucaugucaucucucuuaagaa

SEQ ID NO: 33713 - RNA, 32 nt, Human
acaugcccaugccaccuaugccacagugccua

SEQ ID NO: 33714 - RNA, 32 nt, Human
acaugcccauucacuacagccuggaugacaag

SEQ ID NO: 33715 - RNA, 32 nt, Human
acaugcccauuucuccaguuuucuuaaucuga

SEQ ID NO: 33716 - RNA, 32 nt, Human
acaugccccaacaagaggaagacugucuggcu

SEQ ID NO: 33717 - RNA, 32 nt, Human
acaugccccucggccccagcacauggaaaacc

SEQ ID NO: 33718 - RNA, 32 nt, Human
acaugcccguaaucccagcuagucaggaggcu

SEQ ID NO: 33719 - RNA, 32 nt, Human
acaugccuauaaucccagcacuuugggaggcc

SEQ ID NO: 33720 - RNA, 32 nt, Human
acaugccuauaaucccagcuacucaggaggcu

SEQ ID NO: 33721 - RNA, 32 nt, Human
acaugccuauaaucccagcuacucgggaggcu

SEQ ID NO: 33722 - RNA, 32 nt, Human
acaugccuauaaucccagcuacuugggaggcu

SEQ ID NO: 33723 - RNA, 32 nt, Human
acaugccuauagucccagcuacucaggaggcu

SEQ ID NO: 33724 - RNA, 32 nt, Human
acaugccuauagucccagcugcuggggaggcu

SEQ ID NO: 33725 - RNA, 32 nt, Human
acaugccuaugauccagcuuuggucauaccca

SEQ ID NO: 33726 - RNA, 32 nt, Human
acaugccuaugaucccagcuacuggggaggcu

SEQ ID NO: 33727 - RNA, 16 nt, Human
acaugccucagugccu

SEQ ID NO: 33728 - RNA, 32 nt, Human
acaugccuccccagcccccgcucugacgauga

SEQ ID NO: 33729 - RNA, 24 nt, Human
acaugccucugccuuuuccuucaa

SEQ ID NO: 33730 - RNA, 32 nt, Human
acaugccugcaaucccagcuacuugagaggcu

SEQ ID NO: 33731 - RNA, 32 nt, Human
acaugccugcucccccuccaccuuccaccaug

SEQ ID NO: 33732 - RNA, 32 nt, Human
acaugccugcucccccuuugccuucugccaug

SEQ ID NO: 33733 - RNA, 32 nt, Human
acaugccuggagucccagcuacucgggaggcu

SEQ ID NO: 33734 - RNA, 32 nt, Human
acaugccugggcaacauaaugagacaggucuc

SEQ ID NO: 33735 - RNA, 32 nt, Human
acaugccuguaaacccagcuauucaggaggcu

SEQ ID NO: 33736 - RNA, 32 nt, Human
acaugccuguaacccagcuacucgggaggcug

SEQ ID NO: 33737 - RNA, 32 nt, Human
acaugccuguaacuccagcuacuugggaggcu

SEQ ID NO: 33738 - RNA, 32 nt, Human
acaugccuguaauaucagcuacucaggaggcu

SEQ ID NO: 33739 - RNA, 32 nt, Human
acaugccuguaaucccaacuacuugggaggcu

SEQ ID NO: 33740 - RNA, 32 nt, Human
acaugccuguaaucccagauacuugggaggcu

SEQ ID NO: 33741 - RNA, 32 nt, Human
acaugccuguaaucccagcacuuugggaagcu

SEQ ID NO: 33742 - RNA, 32 nt, Human
acaugccuguaaucccagcacuuugggaggcc

SEQ ID NO: 33743 - RNA, 32 nt, Human
acaugccuguaaucccagcacuuugggggucg

SEQ ID NO: 33744 - RNA, 32 nt, Human
acaugccuguaaucccagcuacacuggaggcu

SEQ ID NO: 33745 - RNA, 32 nt, Human
acaugccuguaaucccagcuacaugggaggcu

SEQ ID NO: 33746 - RNA, 32 nt, Human
acaugccuguaaucccagcuacccggggaggc

SEQ ID NO: 33747 - RNA, 32 nt, Human
acaugccuguaaucccagcuacgucaggaggc

SEQ ID NO: 33748 - RNA, 25 nt, Human
acaugccuguaaucccagcuacuca

SEQ ID NO: 33749 - RNA, 32 nt, Human
acaugccuguaaucccagcuacucaggaggcu

SEQ ID NO: 33750 - RNA, 32 nt, Human
acaugccuguaaucccagcuacucagggggcu

SEQ ID NO: 33751 - RNA, 32 nt, Human
acaugccuguaaucccagcuacucaugaggcu

SEQ ID NO: 33752 - RNA, 32 nt, Human
acaugccuguaaucccagcuacuccggaagcu

SEQ ID NO: 33753 - RNA, 32 nt, Human
acaugccuguaaucccagcuacucggaggcag

SEQ ID NO: 33754 - RNA, 32 nt, Human
acaugccuguaaucccagcuacucgggaggcu

SEQ ID NO: 33755 - RNA, 32 nt, Human
acaugccuguaaucccagcuacuuggcaggcu

SEQ ID NO: 33756 - RNA, 32 nt, Human
acaugccuguaaucccagcuacuugggaggcu

SEQ ID NO: 33757 - RNA, 32 nt, Human
acaugccuguaaucccagcugcucaggaggcu

SEQ ID NO: 33758 - RNA, 32 nt, Human
acaugccuguaaucccagcugcuggagaggcu

SEQ ID NO: 33759 - RNA, 32 nt, Human
acaugccuguaaucccaguuagucgggaggcu

SEQ ID NO: 33760 - RNA, 32 nt, Human
acaugccuguaaucccgguauuugggaggcug

SEQ ID NO: 33761 - RNA, 32 nt, Human
acaugccuguaauccgagugcuuugggaggcu

SEQ ID NO: 33762 - RNA, 32 nt, Human
acaugccuguaauccuagcacuuugggaggcc

SEQ ID NO: 33763 - RNA, 32 nt, Human
acaugccuguaauccuagcuacucgggaggcu

SEQ ID NO: 33764 - RNA, 32 nt, Human
acaugccuguaauccuggcuacuugggaggcu

SEQ ID NO: 33765 - RNA, 32 nt, Human
acaugccuguaaucgcagcuacucaggaggcu

SEQ ID NO: 33766 - RNA, 32 nt, Human
acaugccuguaaucucaacugcuugggaggcu

SEQ ID NO: 33767 - RNA, 32 nt, Human
acaugccuguaaucucagcgacuugggaggcu

SEQ ID NO: 33768 - RNA, 32 nt, Human
acaugccuguaaucucagcuacuagagaggcu

SEQ ID NO: 33769 - RNA, 32 nt, Human
acaugccuguaaucucagcuacucaggaggcu

SEQ ID NO: 33770 - RNA, 32 nt, Human
acaugccuguaaucucagcuacuugggaggcu

SEQ ID NO: 33771 - RNA, 32 nt, Human
acaugccuguaaugccagcuacucgggaggcu

SEQ ID NO: 33772 - RNA, 20 nt, Human
acaugccuguaauuccagcu

SEQ ID NO: 33773 - RNA, 32 nt, Human
acaugccuguaauuccagcuacuugggaggcu

SEQ ID NO: 33774 - RNA, 32 nt, Human
acaugccuguaauuccagcugcuugggagccu

SEQ ID NO: 33775 - RNA, 32 nt, Human
acaugccuguagcccuagcuacucuggaggcu

SEQ ID NO: 33776 - RNA, 32 nt, Human
acaugccuguagucccaccuacucgagaagcu

SEQ ID NO: 33777 - RNA, 20 nt, Human
acaugccuguagucccagcu

SEQ ID NO: 33778 - RNA, 32 nt, Human
acaugccuguagucccagcuacgugggaggcu

SEQ ID NO: 33779 - RNA, 32 nt, Human
acaugccuguagucccagcuacucaagaggcu

SEQ ID NO: 33780 - RNA, 32 nt, Human
acaugccuguagucccagcuacucaggaggcu

SEQ ID NO: 33781 - RNA, 32 nt, Human
acaugccuguagucccagcuacuccagaggcu

SEQ ID NO: 33782 - RNA, 32 nt, Human
acaugccuguagucccagcuacucgggaggcu

SEQ ID NO: 33783 - RNA, 32 nt, Human
acaugccuguagucccagcuacuggggaggcu

SEQ ID NO: 33784 - RNA, 32 nt, Human
acaugccuguagucccagcuacuugagaggcu

SEQ ID NO: 33785 - RNA, 32 nt, Human
acaugccuguagucccagcuacuugggaagcu

SEQ ID NO: 33786 - RNA, 32 nt, Human
acaugccuguagucccagcuauucaggaggcu

SEQ ID NO: 33787 - RNA, 32 nt, Human
acaugccuguagucccagcuucucaggaggcu

SEQ ID NO: 33788 - RNA, 20 nt, Human
acaugccuguaguuccagcu

SEQ ID NO: 33789 - RNA, 32 nt, Human
acaugccuguaguuccagcuacucaggaggcu

SEQ ID NO: 33790 - RNA, 32 nt, Human
acaugccuguauucccagcugcuugggaggcu

SEQ ID NO: 33791 - RNA, 32 nt, Human
acaugccugugaucccagcacuuugggaugcu

SEQ ID NO: 33792 - RNA, 32 nt, Human
acaugccugugaucccagcuacucaggaagcu

SEQ ID NO: 33793 - RNA, 32 nt, Human
acaugccugugaucccagcuacucaggaggcu

SEQ ID NO: 33794 - RNA, 32 nt, Human
acaugccugugaucccagcuacugaggaggcu

SEQ ID NO: 33795 - RNA, 32 nt, Human
acaugccuguggucccagcuacucagagggcu

SEQ ID NO: 33796 - RNA, 32 nt, Human
acaugccuguggucccagcuucuugggaggcu

SEQ ID NO: 33797 - RNA, 32 nt, Human
acaugccuguggucucagcuacucgggaggcu

SEQ ID NO: 33798 - RNA, 32 nt, Human
acaugccuguggucucagcuacuugggaggcu

SEQ ID NO: 33799 - RNA, 32 nt, Human
acaugccuguucugauucucauuugugucucu

SEQ ID NO: 33800 - RNA, 32 nt, Human
acaugccuguugucccagcugcuugggaggcu

SEQ ID NO: 33801 - RNA, 32 nt, Human
acaugccuugauaagugcauucagagcaauag

SEQ ID NO: 33802 - RNA, 27 nt, Human
acaugccuugcacuuguaccuggagga

SEQ ID NO: 33803 - RNA, 32 nt, Human
acaugccuuggggacauccugccuucaggacc

SEQ ID NO: 33804 - RNA, 32 nt, Human
acaugccuuuagucccagcuacucuggaggcu

SEQ ID NO: 33805 - RNA, 32 nt, Human
acaugcgauggcaacagaacccagggccugug

SEQ ID NO: 33806 - RNA, 32 nt, Human
acaugcgcacucucauaugccaccccaugugc

SEQ ID NO: 33807 - RNA, 32 nt, Human
acaugcgccuguaaucccagcuacucgggcag

SEQ ID NO: 33808 - RNA, 32 nt, Human
acaugcgcgugcgcacacacacaaacacacac

SEQ ID NO: 33809 - RNA, 32 nt, Human
acaugcgggcugggaaccgccucaccuccagg

SEQ ID NO: 33810 - RNA, 32 nt, Human
acaugcggucugcagugcacauuauaaggaau

SEQ ID NO: 33811 - RNA, 32 nt, Human
acaugcguacauauacauaacauacacacaau

SEQ ID NO: 33812 - RNA, 32 nt, Human
acaugcguccccuccucgcuugcucaguggaa

SEQ ID NO: 33813 - RNA, 32 nt, Human
acaugcgucgcagugagagcaccuacucugua

SEQ ID NO: 33814 - RNA, 32 nt, Human
acaugcucacacacucaugcuuucacauacau

SEQ ID NO: 33815 - RNA, 32 nt, Human
acaugcucacaucuuacucaacaucagagagu

SEQ ID NO: 33816 - RNA, 32 nt, Human
acaugcucagggaggcagaguucuuccauuag

SEQ ID NO: 33817 - RNA, 31 nt, Human
acaugcucauuaagugcuuguugaaaggaua

SEQ ID NO: 33818 - RNA, 32 nt, Human
acaugcuccuccuguccuucuggcggagcgug

SEQ ID NO: 33819 - RNA, 32 nt, Human
acaugcucuccgccuuccgggacuaccauggc

SEQ ID NO: 33820 - RNA, 32 nt, Human
acaugcucugcucucacguggcaccaguggau

SEQ ID NO: 33821 - RNA, 32 nt, Human
acaugcugaccagccucuaugugaugggagug

SEQ ID NO: 33822 - RNA, 32 nt, Human
acaugcugaccuuccugcagcaacugcgggug

SEQ ID NO: 33823 - RNA, 32 nt, Human
acaugcugagguacuacaugcgugacucacag

SEQ ID NO: 33824 - RNA, 27 nt, Human
acaugcugcagugucugugcuucccug

SEQ ID NO: 33825 - RNA, 32 nt, Human
acaugcugcaucuuucagccuggagacugugc

SEQ ID NO: 33826 - RNA, 32 nt, Human
acaugcugcuacugcuauuccauggauccuag

SEQ ID NO: 33827 - RNA, 32 nt, Human
acaugcuggagaagaaggaagggggaacccau

SEQ ID NO: 33828 - RNA, 32 nt, Human
acaugcuggccacugcugugaccacgacacug

SEQ ID NO: 33829 - RNA, 32 nt, Human
acaugcugggauuacaggcgugagccaacaca

SEQ ID NO: 33830 - RNA, 32 nt, Human
acaugcugguaauagcagcuacugagguggcu

SEQ ID NO: 33831 - RNA, 19 nt, Human
acaugcuguuaucuuuaca

SEQ ID NO: 33832 - RNA, 32 nt, Human
acaugcuuauaaucccagaaauuugggaggcc

SEQ ID NO: 33833 - RNA, 32 nt, Human
acaugcuucagaauccuauggaagagaauauu

SEQ ID NO: 33834 - RNA, 32 nt, Human
acaugcuucagaguguaccuuuugccauaacc

SEQ ID NO: 33835 - RNA, 32 nt, Human
acaugcuuguaaucccagcuacucgggagcug

SEQ ID NO: 33836 - RNA, 32 nt, Human
acaugcuuguaaucccagcuacucgggaggcu

SEQ ID NO: 33837 - RNA, 32 nt, Human
acaugcuugucagccccacgcugugcuccugc

SEQ ID NO: 33838 - RNA, 32 nt, Human
acaugcuuuaucaguagguccugagggcucca

SEQ ID NO: 33839 - RNA, 32 nt, Human
acaugcuuucacuauugugaugacauuaagaa

SEQ ID NO: 33840 - RNA, 23 nt, Human
acaugcuuucagucaaguacaga

SEQ ID NO: 33841 - RNA, 32 nt, Human
acaugcuuuuaagcuguguaacauaccugagg

SEQ ID NO: 33842 - RNA, 32 nt, Human
acauggaaaacccagagccacagagaaggucc

SEQ ID NO: 33843 - RNA, 32 nt, Human
acauggaaaugagagcccggcgcauggauuuu

SEQ ID NO: 33844 - RNA, 32 nt, Human
acauggaacagagcuugugggaugcuaauagu

SEQ ID NO: 33845 - RNA, 32 nt, Human
acauggaacaguguggcucuucugagcuuacg

SEQ ID NO: 33846 - RNA, 32 nt, Human
acauggaagaagauuuagagcucugcagcgau

SEQ ID NO: 33847 - RNA, 19 nt, Human
acauggaagccucagccug

SEQ ID NO: 33848 - RNA, 32 nt, Human
acauggaauagagcuucaagcaguucccaucc

SEQ ID NO: 33849 - RNA, 32 nt, Human
acauggacaagcuguuuucuuuucuagguuac

SEQ ID NO: 33850 - RNA, 32 nt, Human
acauggacacaccccaaacacgcacaggcucc

SEQ ID NO: 33851 - RNA, 19 nt, Human
acauggacaccauuucaug

SEQ ID NO: 33852 - RNA, 32 nt, Human
acauggacacuuccaggucccucacacuccgu

SEQ ID NO: 33853 - RNA, 31 nt, Human
acauggacauggugucccaugcccagaugau

SEQ ID NO: 33854 - RNA, 32 nt, Human
acauggaccacuggagccuggaauucugccac

SEQ ID NO: 33855 - RNA, 32 nt, Human
acauggacggucuuuuucuuuuauuauaaaag

SEQ ID NO: 33856 - RNA, 32 nt, Human
acauggacucaaagaagggaacaguagacacg

SEQ ID NO: 33857 - RNA, 32 nt, Human
acauggacuuguuuauagaggacaggucagcu

SEQ ID NO: 33858 - RNA, 32 nt, Human
acauggagacaggcccagagcacagagagagc

SEQ ID NO: 33859 - RNA, 27 nt, Human
acauggagacccucugugcaccccagg

SEQ ID NO: 33860 - RNA, 22 nt, Human
acauggagacugcacauggacu

SEQ ID NO: 33861 - RNA, 32 nt, Human
acauggagagaaucaugaaagcucaagcccua

SEQ ID NO: 33862 - RNA, 32 nt, Human
acauggagagagacucaaagagacuccaagau

SEQ ID NO: 33863 - RNA, 32 nt, Human
acauggagccauugaaaggaacaacacccuug

SEQ ID NO: 33864 - RNA, 32 nt, Human
acauggagcuaaauggcucaguggcuccagaa

SEQ ID NO: 33865 - RNA, 32 nt, Human
acauggagcugcaucuuuuuaaacguuguuuu

SEQ ID NO: 33866 - RNA, 32 nt, Human
acauggaggaacucaauaaaacuccugcuuca

SEQ ID NO: 33867 - RNA, 27 nt, Human
acauggagggagcugcuuugcugagag

SEQ ID NO: 33868 - RNA, 32 nt, Human
acauggagugaaagccauuugacucaacguuu

SEQ ID NO: 33869 - RNA, 32 nt, Human
acauggagugccugagcaugccaauaggcuuu

SEQ ID NO: 33870 - RNA, 32 nt, Human
acauggaucacacuaaauuucugucauuuaua

SEQ ID NO: 33871 - RNA, 19 nt, Human
acauggaugaaacuggaaa

SEQ ID NO: 33872 - RNA, 19 nt, Human
acauggaugaaauugaaaa

SEQ ID NO: 33873 - RNA, 19 nt, Human
acauggaugaagcuggaaa

SEQ ID NO: 33874 - RNA, 32 nt, Human
acauggaugcagagggacuccucccuaucuga

SEQ ID NO: 33875 - RNA, 27 nt, Human
acauggaugcaguggagccagggggac

SEQ ID NO: 33876 - RNA, 32 nt, Human
acauggauggaaacugaccaccuacuuugucc

SEQ ID NO: 33877 - RNA, 27 nt, Human
acauggcaaccagcgccguccccagug

SEQ ID NO: 33878 - RNA, 32 nt, Human
acauggcacauagaagacaggagcagcuccuc

SEQ ID NO: 33879 - RNA, 32 nt, Human
acauggcaccuacucagcaaugccuuccugga

SEQ ID NO: 33880 - RNA, 32 nt, Human
acauggcagagagaaagagagagaaagaguau

SEQ ID NO: 33881 - RNA, 32 nt, Human
acauggcagccuuauggugauccuggaacaca

SEQ ID NO: 33882 - RNA, 32 nt, Human
acauggcauuuggaaucaaguacauccagguu

SEQ ID NO: 33883 - RNA, 32 nt, Human
acauggccacauccaacauuuccucaggcaau

SEQ ID NO: 33884 - RNA, 27 nt, Human
acauggccaggggcugccucugcugcu

SEQ ID NO: 33885 - RNA, 32 nt, Human
acauggccuucgugaucuuucugcuguucuua

SEQ ID NO: 33886 - RNA, 32 nt, Human
acauggcggcaggcaagagagcaugugcaggg

SEQ ID NO: 33887 - RNA, 32 nt, Human
acauggcguaccguacacagagggacuugagc

SEQ ID NO: 33888 - RNA, 32 nt, Human
acauggcuauaaucccagguacuugggaagcu

SEQ ID NO: 33889 - RNA, 32 nt, Human
acauggcucacugcagccucaaccucccaggc

SEQ ID NO: 33890 - RNA, 32 nt, Human
acauggcucacugcagccucgaccuccugggc

SEQ ID NO: 33891 - RNA, 32 nt, Human
acauggcucugcccuccagaacuucaggcucu

SEQ ID NO: 33892 - RNA, 23 nt, Human
acauggcugauccuggugacuga

SEQ ID NO: 33893 - RNA, 32 nt, Human
acauggcugccagccccgccucccacccccac

SEQ ID NO: 33894 - RNA, 32 nt, Human
acauggcuggacuccagccaggaggacacacg

SEQ ID NO: 33895 - RNA, 32 nt, Human
acauggcugggucuucagaccccuggcucacc

SEQ ID NO: 33896 - RNA, 32 nt, Human
acauggcuuccccaauguggcagaucaagcug

SEQ ID NO: 33897 - RNA, 19 nt, Human
acaugggaaguauucuuga

SEQ ID NO: 33898 - RNA, 32 nt, Human
acaugggacaugccuuucuuuuccgaucaguu

SEQ ID NO: 33899 - RNA, 32 nt, Human
acaugggagcagaagagagagugagaaggggg

SEQ ID NO: 33900 - RNA, 32 nt, Human
acaugggagcuauagggaccucagggagcccc

SEQ ID NO: 33901 - RNA, 32 nt, Human
acaugggaggcggagguugcagugagccgaga

SEQ ID NO: 33902 - RNA, 32 nt, Human
acaugggaggcguagcuugcagugagcugaga

SEQ ID NO: 33903 - RNA, 32 nt, Human
acaugggaggcuaaggugggaggaucacuuga

SEQ ID NO: 33904 - RNA, 32 nt, Human
acaugggaggcugaggcacgagaaucacuuga

SEQ ID NO: 33905 - RNA, 32 nt, Human
acaugggaggcugaggcaggagaagggcguga

SEQ ID NO: 33906 - RNA, 32 nt, Human
acaugggaggcugaggcaggagaaucgcuuga

SEQ ID NO: 33907 - RNA, 32 nt, Human
acaugggaggcugaggcaggaggaucacuuga

SEQ ID NO: 33908 - RNA, 32 nt, Human
acaugggaggcugaggugggaggaucacuuga

SEQ ID NO: 33909 - RNA, 32 nt, Human
acaugggagggaggacagggaaggccaggcuu

SEQ ID NO: 33910 - RNA, 32 nt, Human
acaugggaguuucuuuauugcguaugcagcca

SEQ ID NO: 33911 - RNA, 32 nt, Human
acaugggaugggggaggcagagacugguccag

SEQ ID NO: 33912 - RNA, 32 nt, Human
acaugggcaagcacaagguaggugcuugggga

SEQ ID NO: 33913 - RNA, 19 nt, Human
acaugggccagcggcagcg

SEQ ID NO: 33914 - RNA, 32 nt, Human
acaugggccugagauuuuauuuuagaaaaagg

SEQ ID NO: 33915 - RNA, 32 nt, Human
acaugggcgauuccaaaagcaccgaggagugu

SEQ ID NO: 33916 - RNA, 32 nt, Human
acaugggcuacugcugggaagccugggcuguu

SEQ ID NO: 33917 - RNA, 32 nt, Human
acaugggcucaaaacccccuucccagggacgg

SEQ ID NO: 33918 - RNA, 31 nt, Human
acaugggcucucaauacauguugaaagcaag

SEQ ID NO: 33919 - RNA, 32 nt, Human
acaugggcugcacucgcugaggccaggcagcg

SEQ ID NO: 33920 - RNA, 32 nt, Human
acauggggaagcuuuaggaaugcugaguuuuc

SEQ ID NO: 33921 - RNA, 32 nt, Human
acauggggaggggacuagaugggcaaggggca

SEQ ID NO: 33922 - RNA, 23 nt, Human
acauggggcaaacugcugugcuc

SEQ ID NO: 33923 - RNA, 32 nt, Human
acauggggcugaaucucagacuucugaggugg

SEQ ID NO: 33924 - RNA, 32 nt, Human
acaugggggagagagacuuggaagaggaggag

SEQ ID NO: 33925 - RNA, 32 nt, Human
acauggguagagccugcaagaccugagaccuu

SEQ ID NO: 33926 - RNA, 32 nt, Human
acauggguagggaacagauacaccugguuaga

SEQ ID NO: 33927 - RNA, 32 nt, Human
acauggguaggucaguucuuugguccaagccu

SEQ ID NO: 33928 - RNA, 32 nt, Human
acauggguauaugccaucuucaugccuggcuc

SEQ ID NO: 33929 - RNA, 32 nt, Human
acaugggucaauguuaauucuuuuaucucugu

SEQ ID NO: 33930 - RNA, 32 nt, Human
acauggguggcugccugccugccugccugccu

SEQ ID NO: 33931 - RNA, 32 nt, Human
acauggguuccugugccacccuuuccccgccc

SEQ ID NO: 33932 - RNA, 32 nt, Human
acaugguaaaaccccaucucuacuaaaauaca

SEQ ID NO: 33933 - RNA, 32 nt, Human
acaugguagacagagguugcagugagccaaaa

SEQ ID NO: 33934 - RNA, 32 nt, Human
acaugguagcagaaauaggcccuuuuaugugu

SEQ ID NO: 33935 - RNA, 32 nt, Human
acauggucagaaacagugcuuggaaggacauu

SEQ ID NO: 33936 - RNA, 32 nt, Human
acauggucaucgugaaauaaaaaguccacucu

SEQ ID NO: 33937 - RNA, 32 nt, Human
acaugguccaguuucuagagggcacuagaacu

SEQ ID NO: 33938 - RNA, 32 nt, Human
acaugguccccaggcuggccugaggaugucac

SEQ ID NO: 33939 - RNA, 32 nt, Human
acauggucucacuauguugcugaggcuggucu

SEQ ID NO: 33940 - RNA, 32 nt, Human
acauggucucccacuguucugagcagguggca

SEQ ID NO: 33941 - RNA, 32 nt, Human
acauggugaaaccccaucucuccuaagauaca

SEQ ID NO: 33942 - RNA, 32 nt, Human
acauggugaaaccucgucucuacugaaaauaa

SEQ ID NO: 33943 - RNA, 32 nt, Human
acauggugaaaccucgucucuacugaaaauau

SEQ ID NO: 33944 - RNA, 32 nt, Human
acauggugaaaugaaaccccaucucaacuaaa

SEQ ID NO: 33945 - RNA, 31 nt, Human
acauggugacuuccuuccagagagcacagag

SEQ ID NO: 33946 - RNA, 32 nt, Human
acauggugagccuagcccugggacaucaggag

SEQ ID NO: 33947 - RNA, 27 nt, Human
acauggugagccuugaggaagacuugu

SEQ ID NO: 33948 - RNA, 32 nt, Human
acauggugcauccuuuaucaucacgaaagcaa

SEQ ID NO: 33949 - RNA, 32 nt, Human
acauggugccauccucacaggccuagcucaug

SEQ ID NO: 33950 - RNA, 32 nt, Human
acauggugcucuggaguggccuucaugaugcc

SEQ ID NO: 33951 - RNA, 32 nt, Human
acaugguggaaaggaccacgccuggcagcaaa

SEQ ID NO: 33952 - RNA, 32 nt, Human
acaugguggaguugagagagaggcucacugca

SEQ ID NO: 33953 - RNA, 32 nt, Human
acaugguggauucauguacuucaguguuuguu

SEQ ID NO: 33954 - RNA, 32 nt, Human
acaugguggccacagcuggagugaccgcagug

SEQ ID NO: 33955 - RNA, 32 nt, Human
acaugguggcucagcuucuaaucccagcacuu

SEQ ID NO: 33956 - RNA, 32 nt, Human
acauggugguggucgaagucagcagacacuag

SEQ ID NO: 33957 - RNA, 19 nt, Human
acaugguguauaccuucga

SEQ ID NO: 33958 - RNA, 22 nt, Human
acauggugucccaugcccagau

SEQ ID NO: 33959 - RNA, 32 nt, Human
acaugguucaaaaauccaagcagcguggaagg

SEQ ID NO: 33960 - RNA, 24 nt, Human
acaugguuuauuugaaguauuuua

SEQ ID NO: 33961 - RNA, 32 nt, Human
acaugguuuuucccuuuugccuaaaucagaac

SEQ ID NO: 33962 - RNA, 32 nt, Human
acauguaaaauggcauuucuaaaaguaccuac

SEQ ID NO: 33963 - RNA, 32 nt, Human
acauguaaacacauuuuaguguuucugguuug

SEQ ID NO: 33964 - RNA, 32 nt, Human
acauguaaaugcacaaugugacucauucucau

SEQ ID NO: 33965 - RNA, 19 nt, Human
acauguaacaaacucuagg

SEQ ID NO: 33966 - RNA, 32 nt, Human
acauguaagaauugcuuguugggaagagugcu

SEQ ID NO: 33967 - RNA, 23 nt, Human
acauguaaucacugggcugggug

SEQ ID NO: 33968 - RNA, 22 nt, Human
acauguacaggaccugcagcuu

SEQ ID NO: 33969 - RNA, 32 nt, Human
acauguaccaguucugucaucacugugaucuu

SEQ ID NO: 33970 - RNA, 32 nt, Human
acauguacccagacuucauuucuuucugcauc

SEQ ID NO: 33971 - RNA, 32 nt, Human
acauguaccuugaccaucguccuuccucucaa

SEQ ID NO: 33972 - RNA, 32 nt, Human
acauguacugcagcuucuugucucuguuuugg

SEQ ID NO: 33973 - RNA, 32 nt, Human
acauguacuguggcuccuacauggaucaucag

SEQ ID NO: 33974 - RNA, 32 nt, Human
acauguacuucuaacuggacaguuuucccuua

SEQ ID NO: 33975 - RNA, 32 nt, Human
acauguagaauuuguugucuucugcuaagcac

SEQ ID NO: 33976 - RNA, 32 nt, Human
acauguagcuacucaggaggcugagacaagaa

SEQ ID NO: 33977 - RNA, 31 nt, Human
acauguaggcuucucccuugugcaaagcuua

SEQ ID NO: 33978 - RNA, 17 nt, Human
acauguauauuuucaca

SEQ ID NO: 33979 - RNA, 32 nt, Human
acauguaucugugcuaggcauacaucccugua

SEQ ID NO: 33980 - RNA, 32 nt, Human
acauguaugaaggcugggcacgauggcucacg

SEQ ID NO: 33981 - RNA, 22 nt, Human
acauguaugaggagaccagcag

SEQ ID NO: 33982 - RNA, 18 nt, Human
acauguauuauuuucaca

SEQ ID NO: 33983 - RNA, 32 nt, Human
acaugucaaaccugcaaauucaguaguaacag

SEQ ID NO: 33984 - RNA, 27 nt, Human
acaugucacagcccugguuauacaguc

SEQ ID NO: 33985 - RNA, 31 nt, Human
acaugucacagcuggcaucgcaagcuagggg

SEQ ID NO: 33986 - RNA, 32 nt, Human
acaugucaccauucuauuccucagccuccaac

SEQ ID NO: 33987 - RNA, 32 nt, Human
acaugucacccacccaccgcaggcuggccggg

SEQ ID NO: 33988 - RNA, 32 nt, Human
acaugucaccccugcacuccugccuucccgug

SEQ ID NO: 33989 - RNA, 32 nt, Human
acaugucagaucuuuguacguaauuaaaaaua

SEQ ID NO: 33990 - RNA, 32 nt, Human
acaugucaggaaaaauaaagaacacuuucuac

SEQ ID NO: 33991 - RNA, 27 nt, Human
acaugucagggugggagucauauuaca

SEQ ID NO: 33992 - RNA, 32 nt, Human
acaugucauucuguagacuagaauuucuuaaa

SEQ ID NO: 33993 - RNA, 32 nt, Human
acaugucccagguacauaucccuucccuuuag

SEQ ID NO: 33994 - RNA, 32 nt, Human
acaugucccucuggagcuuccaccuggccagg

SEQ ID NO: 33995 - RNA, 32 nt, Human
acauguccgacauuauuuaauaaauaauuuuu

SEQ ID NO: 33996 - RNA, 32 nt, Human
acauguccucauucucagucugaccagaaugc

SEQ ID NO: 33997 - RNA, 27 nt, Human
acaugucggacccugagaugggauggg

SEQ ID NO: 33998 - RNA, 32 nt, Human
acaugucuauaauuccagcuacucaggaggcu

SEQ ID NO: 33999 - RNA, 32 nt, Human
acaugucuaugaucccagcuacuggagaggcu

SEQ ID NO: 34000 - RNA, 32 nt, Human
acaugucucaggagaaugugacauggggacuc

SEQ ID NO: 34001 - RNA, 32 nt, Human
acaugucucuccccauguuucuccccacuaga

SEQ ID NO: 34002 - RNA, 32 nt, Human
acaugucucucccugcucuuccagggugauuu

SEQ ID NO: 34003 - RNA, 23 nt, Human
acaugucucuguguaguuccagc

SEQ ID NO: 34004 - RNA, 32 nt, Human
acaugucucuugacaguagugcacuuggaaua

SEQ ID NO: 34005 - RNA, 32 nt, Human
acaugucugaaauccauauguuucauaugauc

SEQ ID NO: 34006 - RNA, 32 nt, Human
acaugucuguaaucccagcuacucaggaggcu

SEQ ID NO: 34007 - RNA, 32 nt, Human
acaugucuguaaucccagcuacucgggaggcu

SEQ ID NO: 34008 - RNA, 32 nt, Human
acaugucuguaauccuagcacuuugggaggcc

SEQ ID NO: 34009 - RNA, 32 nt, Human
acaugucuguagucccagcuacuugggcacac

SEQ ID NO: 34010 - RNA, 32 nt, Human
acaugucuucuuuccuacuuccucaagguucu

SEQ ID NO: 34011 - RNA, 32 nt, Human
acaugucuugaugaggggaaccacaaagagcu

SEQ ID NO: 34012 - RNA, 32 nt, Human
acaugucuuucaaagcacgcugacuuggguuu

SEQ ID NO: 34013 - RNA, 32 nt, Human
acaugucuuucauaggugauacaacuuuuuaa

SEQ ID NO: 34014 - RNA, 32 nt, Human
acaugugaaaacacaagucuuugagugugcac

SEQ ID NO: 34015 - RNA, 32 nt, Human
acaugugaccugcagaucuggcaucagaggcc

SEQ ID NO: 34016 - RNA, 32 nt, Human
acaugugacugauuaggaaauauuuuaugguc

SEQ ID NO: 34017 - RNA, 32 nt, Human
acaugugacuuccccuuucccuucccacucgc

SEQ ID NO: 34018 - RNA, 32 nt, Human
acaugugagaaguaagaaagaaacuaaagacc

SEQ ID NO: 34019 - RNA, 32 nt, Human
acaugugcacacacccucaugcaugggugucc

SEQ ID NO: 34020 - RNA, 32 nt, Human
acaugugcacacacgugugcacaaaugugcau

SEQ ID NO: 34021 - RNA, 32 nt, Human
acaugugcacacacugucuacauacaaaccau

SEQ ID NO: 34022 - RNA, 32 nt, Human
acaugugcacacauguaaaacaaaaaugaagc

SEQ ID NO: 34023 - RNA, 32 nt, Human
acaugugcacacauguagcuaaauaaaguaca

SEQ ID NO: 34024 - RNA, 32 nt, Human
acaugugcagcaaacaaaguggaaguauagau

SEQ ID NO: 34025 - RNA, 32 nt, Human
acaugugcagcagcuacuguauccugauagug

SEQ ID NO: 34026 - RNA, 24 nt, Human
acaugugcagcaggccauggagug

SEQ ID NO: 34027 - RNA, 32 nt, Human
acaugugcagcaggccauggaguguagcgggc

SEQ ID NO: 34028 - RNA, 32 nt, Human
acaugugccacuguucagcggagcugacuggu

SEQ ID NO: 34029 - RNA, 32 nt, Human
acaugugccugacaguacacuacucaagucga

SEQ ID NO: 34030 - RNA, 32 nt, Human
acaugugccuggaaguugaauuuguggcuguu

SEQ ID NO: 34031 - RNA, 32 nt, Human
acaugugccuguaaauuauuuugccgaaauaa

SEQ ID NO: 34032 - RNA, 32 nt, Human
acaugugcucaaggaaugcagaccacugugcu

SEQ ID NO: 34033 - RNA, 32 nt, Human
acauguggaaggcagagauugugucuagggug

SEQ ID NO: 34034 - RNA, 27 nt, Human
acauguggaaugauauugagcugcuaa

SEQ ID NO: 34035 - RNA, 32 nt, Human
acauguggagagccagggagaagaagagaaag

SEQ ID NO: 34036 - RNA, 32 nt, Human
acauguggagagccagggagaggaagagaaag

SEQ ID NO: 34037 - RNA, 32 nt, Human
acauguggcccuugccuucugagcagcuccca

SEQ ID NO: 34038 - RNA, 32 nt, Human
acaugugggaguuuucacaacaguaguuuugg

SEQ ID NO: 34039 - RNA, 32 nt, Human
acaugugggcagacgcuggugcccgaguucag

SEQ ID NO: 34040 - RNA, 19 nt, Human
acaugugggcauuuucaca

SEQ ID NO: 34041 - RNA, 32 nt, Human
acauguggucaucagaaaauaagccauuccuc

SEQ ID NO: 34042 - RNA, 32 nt, Human
acaugugguuccaggccagaggcauggaaguc

SEQ ID NO: 34043 - RNA, 32 nt, Human
acauguguaagugccagacagcugaaucuuua

SEQ ID NO: 34044 - RNA, 32 nt, Human
acauguguacaucucagccuuaucucaaggag

SEQ ID NO: 34045 - RNA, 32 nt, Human
acauguguacuuuuucaugaagcuuuuugcaa

SEQ ID NO: 34046 - RNA, 32 nt, Human
acauguguagacacaaacauauacacagaugu

SEQ ID NO: 34047 - RNA, 32 nt, Human
acauguguagccccaccagcccuccaaggcau

SEQ ID NO: 34048 - RNA, 32 nt, Human
acauguguagggcaucuucccccagaaucuua

SEQ ID NO: 34049 - RNA, 20 nt, Human
acauguguauguguacauug

SEQ ID NO: 34050 - RNA, 32 nt, Human
acaugugucgccucucucgcuacuacccaucc

SEQ ID NO: 34051 - RNA, 32 nt, Human
acauguguggugcacacaugcacacucggcuc

SEQ ID NO: 34052 - RNA, 29 nt, Human
acauguguucugugugugucuguauagcc

SEQ ID NO: 34053 - RNA, 21 nt, Human
acauguguuucauaaccugcc

SEQ ID NO: 34054 - RNA, 32 nt, Human
acauguguuuccuguuaaaacuccucuuguuc

SEQ ID NO: 34055 - RNA, 32 nt, Human
acauguuauauuuuugguuucucucuacugau

SEQ ID NO: 34056 - RNA, 32 nt, Human
acauguuauuggaacauauauguauguauuaa

SEQ ID NO: 34057 - RNA, 31 nt, Human
acauguucaauaaaaguuguugaaagauuaa

SEQ ID NO: 34058 - RNA, 32 nt, Human
acauguucaguauaaauauauguguagugaag

SEQ ID NO: 34059 - RNA, 32 nt, Human
acauguucauuuuccuucuuuuuaauuuuuaa

SEQ ID NO: 34060 - RNA, 32 nt, Human
acauguuccaugcugagccaaaggacacuccu

SEQ ID NO: 34061 - RNA, 32 nt, Human
acauguuccuacagccugugcaagaguggacg

SEQ ID NO: 34062 - RNA, 32 nt, Human
acauguuccucuuccuguuccuguugacaugu

SEQ ID NO: 34063 - RNA, 32 nt, Human
acauguuccuucauguacccccuuuucucuau

SEQ ID NO: 34064 - RNA, 32 nt, Human
acauguucucaggaccuccugagggcuauguc

SEQ ID NO: 34065 - RNA, 32 nt, Human
acauguucucaggaccuccugagggcuguguc

SEQ ID NO: 34066 - RNA, 32 nt, Human
acauguucuuuagcuaaccccuucccugccca

SEQ ID NO: 34067 - RNA, 32 nt, Human
acauguugagagagacugagacaggagucuuc

SEQ ID NO: 34068 - RNA, 32 nt, Human
acauguugcccauggggcugaggagacuguuc

SEQ ID NO: 34069 - RNA, 32 nt, Human
acauguugcuuccagacauacuucucugcaac

SEQ ID NO: 34070 - RNA, 31 nt, Human
acauguuggguguccauccuggggcagggaa

SEQ ID NO: 34071 - RNA, 32 nt, Human
acauguugugggaaagacccugugggagauau

SEQ ID NO: 34072 - RNA, 32 nt, Human
acauguuuccaaaauuuaaaagccuggguccc

SEQ ID NO: 34073 - RNA, 32 nt, Human
acauguuucuccaggaugccaaaggaaaugcu

SEQ ID NO: 34074 - RNA, 32 nt, Human
acauguuucuggaaguggguggguggguuuga

SEQ ID NO: 34075 - RNA, 32 nt, Human
acauguuugucugcauccucagggggcucgcc

SEQ ID NO: 34076 - RNA, 32 nt, Human
acauguuuuccugcugacucucuccccacuau

SEQ ID NO: 34077 - RNA, 32 nt, Human
acauguuuuccuuaaaagauggaagguuuuag

SEQ ID NO: 34078 - RNA, 32 nt, Human
acauguuuugagucuuacucugugccugaccu

SEQ ID NO: 34079 - RNA, 32 nt, Human
acauguuuuuauuuccucugcuggaauaggag

SEQ ID NO: 34080 - RNA, 32 nt, Human
acauuaaaaugcuggggcaagaugcaguacaa

SEQ ID NO: 34081 - RNA, 28 nt, Human
acauuaaagaucacuugguaguuagcca

SEQ ID NO: 34082 - RNA, 24 nt, Human
acauuaaaguuaaacuguauuuua

SEQ ID NO: 34083 - RNA, 32 nt, Human
acauuaaauagaaauaaugucauuugaaugaa

SEQ ID NO: 34084 - RNA, 21 nt, Human
acauuaaauauauguguuuua

SEQ ID NO: 34085 - RNA, 32 nt, Human
acauuaaauucacugugaaggcagcauacuua

SEQ ID NO: 34086 - RNA, 32 nt, Human
acauuaacaaaaugcaggaaucugccacauuu

SEQ ID NO: 34087 - RNA, 23 nt, Human
acauuaacauaaaauguauuuua

SEQ ID NO: 34088 - RNA, 32 nt, Human
acauuaacaugcugucucuaaggguggccccu

SEQ ID NO: 34089 - RNA, 32 nt, Human
acauuaaccagcugcccaggguucaagcuuga

SEQ ID NO: 34090 - RNA, 32 nt, Human
acauuaaccagcuuccugagacaugcacccuc

SEQ ID NO: 34091 - RNA, 23 nt, Human
acauuaaccucauuccaaguuaa

SEQ ID NO: 34092 - RNA, 32 nt, Human
acauuaacucaccucaaaccucugucuuuccu

SEQ ID NO: 34093 - RNA, 20 nt, Human
acauuaacugcuguauuuug

SEQ ID NO: 34094 - RNA, 32 nt, Human
acauuaagaaaaucauauugcuucuucuccua

SEQ ID NO: 34095 - RNA, 32 nt, Human
acauuaagacacaccucuggaucccuggaggg

SEQ ID NO: 34096 - RNA, 32 nt, Human
acauuaaggagaguuggaaaaggugaauuuau

SEQ ID NO: 34097 - RNA, 32 nt, Human
acauuaagguaaagguuuuggcuggucagugu

SEQ ID NO: 34098 - RNA, 32 nt, Human
acauuaagugaagagaggggacaaaggccagg

SEQ ID NO: 34099 - RNA, 32 nt, Human
acauuaauaaccccuucuuugacuuccucaag

SEQ ID NO: 34100 - RNA, 32 nt, Human
acauuaauaaccucaccaacauagcucaugcc

SEQ ID NO: 34101 - RNA, 18 nt, Human
acauuaauccccacccca

SEQ ID NO: 34102 - RNA, 32 nt, Human
acauuaauccccaccccaacagagccacuggc

SEQ ID NO: 34103 - RNA, 32 nt, Human
acauuaaugcacugaaugcaugcaucuuuccu

SEQ ID NO: 34104 - RNA, 21 nt, Human
acauuaauguuacuagcauca

SEQ ID NO: 34105 - RNA, 22 nt, Human
acauuaauucuucagaggcagg

SEQ ID NO: 34106 - RNA, 32 nt, Human
acauuacaaaggaaggaggagggaagagacuu

SEQ ID NO: 34107 - RNA, 32 nt, Human
acauuacagaauaugaaugagaaugugccaug

SEQ ID NO: 34108 - RNA, 32 nt, Human
acauuacaguguacacauuauacacugcaucu

SEQ ID NO: 34109 - RNA, 32 nt, Human
acauuacauacuccaaggaaauauaucaggga

SEQ ID NO: 34110 - RNA, 32 nt, Human
acauuaccaccugagcuccaccuccugugaga

SEQ ID NO: 34111 - RNA, 32 nt, Human
acauuaccagacaaaccacucaucacaguauu

SEQ ID NO: 34112 - RNA, 32 nt, Human
acauuaccagugguuugaucugggugaugaaa

SEQ ID NO: 34113 - RNA, 22 nt, Human
acauuaccugcucccaucacca

SEQ ID NO: 34114 - RNA, 32 nt, Human
acauuaccugggaaagcucuccucccuccuga

SEQ ID NO: 34115 - RNA, 32 nt, Human
acauuacuccaaaauaauuaaauuuaaggcuu

SEQ ID NO: 34116 - RNA, 32 nt, Human
acauuacuuaaacuuucuuuccagucaaccau

SEQ ID NO: 34117 - RNA, 32 nt, Human
acauuacuuaaccuuucugggccucugccacc

SEQ ID NO: 34118 - RNA, 21 nt, Human
acauuacuuauuugaggucag

SEQ ID NO: 34119 - RNA, 32 nt, Human
acauuacuucgcuccgucugccuggauuaaac

SEQ ID NO: 34120 - RNA, 32 nt, Human
acauuagaaaaauagcaacuuguguuacaaaa

SEQ ID NO: 34121 - RNA, 32 nt, Human
acauuagaaaggauuucucuuuacuaaggacu

SEQ ID NO: 34122 - RNA, 32 nt, Human
acauuagacaccuguguguaguggccucugau

SEQ ID NO: 34123 - RNA, 32 nt, Human
acauuagagaauugguccuggaagggaaagaa

SEQ ID NO: 34124 - RNA, 32 nt, Human
acauuagagccuguccgucugaucuagagaag

SEQ ID NO: 34125 - RNA, 32 nt, Human
acauuagcaaaaccaguggggccagcacacac

SEQ ID NO: 34126 - RNA, 32 nt, Human
acauuagcuuugcccgaaguuuuuccccacac

SEQ ID NO: 34127 - RNA, 32 nt, Human
acauuaggagcucuuucucucacucuucuguc

SEQ ID NO: 34128 - RNA, 32 nt, Human
acauuaggcugauguccuugcccauugccaag

SEQ ID NO: 34129 - RNA, 32 nt, Human
acauuagguuauagugacacugugagcuuugc

SEQ ID NO: 34130 - RNA, 31 nt, Human
acauuaguaagaagagaaaaauuuuggucau

SEQ ID NO: 34131 - RNA, 32 nt, Human
acauuaguguugggcaugaagccucaaggcuu

SEQ ID NO: 34132 - RNA, 32 nt, Human
acauuauacucauguguucucauguguucuug

SEQ ID NO: 34133 - RNA, 32 nt, Human
acauuauaucaacacuuugcucugcuuuguaa

SEQ ID NO: 34134 - RNA, 32 nt, Human
acauuaucagaacuuaaguccuggagaucaga

SEQ ID NO: 34135 - RNA, 32 nt, Human
acauuaucauucucaggccacugcauuuagcc

SEQ ID NO: 34136 - RNA, 32 nt, Human
acauuaucuacauuuuccucagccucuaucug

SEQ ID NO: 34137 - RNA, 32 nt, Human
acauuaucuaguucauugaaucauuguaugug

SEQ ID NO: 34138 - RNA, 32 nt, Human
acauuaugcagcccugcucaguagagacucac

SEQ ID NO: 34139 - RNA, 23 nt, Human
acauuaugcuagaaaaaaggagc

SEQ ID NO: 34140 - RNA, 32 nt, Human
acauuaugcuugguccggagagcugccuugga

SEQ ID NO: 34141 - RNA, 32 nt, Human
acauuauguggcugaaaaagaauauaaaaagc

SEQ ID NO: 34142 - RNA, 32 nt, Human
acauuauuacaggguuugugaggaccuuugac

SEQ ID NO: 34143 - RNA, 32 nt, Human
acauuauuauuaccaguaaccuuuauuaagca

SEQ ID NO: 34144 - RNA, 24 nt, Human
acauuauuccacauccacagaaca

SEQ ID NO: 34145 - RNA, 32 nt, Human
acauuauuucuucaaaggaaaggaaaggaauu

SEQ ID NO: 34146 - RNA, 32 nt, Human
acauucaaccaaugggaggcaccaagagaaga

SEQ ID NO: 34147 - RNA, 19 nt, Human
acauucaaccccuagcaua

SEQ ID NO: 34148 - RNA, 32 nt, Human
acauucaaggaagguuuccuggaagauuuagu

SEQ ID NO: 34149 - RNA, 32 nt, Human
acauucacagcccucugagucugaguccagau

SEQ ID NO: 34150 - RNA, 32 nt, Human
acauucacaugagaagagaugaccucaucugu

SEQ ID NO: 34151 - RNA, 32 nt, Human
acauucacccuuuauucacagucacuugcagu

SEQ ID NO: 34152 - RNA, 32 nt, Human
acauucaccucccugccuccucuccuuucuac

SEQ ID NO: 34153 - RNA, 22 nt, Human
acauucaccugccccaacucuc

SEQ ID NO: 34154 - RNA, 32 nt, Human
acauucagacacacucccuucugccuuccggc

SEQ ID NO: 34155 - RNA, 32 nt, Human
acauucagagacauagcuauagaauucucucu

SEQ ID NO: 34156 - RNA, 32 nt, Human
acauucagagucuugaaacagcaaucaaaagg

SEQ ID NO: 34157 - RNA, 32 nt, Human
acauucagauggugagggaguuaauaugguug

SEQ ID NO: 34158 - RNA, 32 nt, Human
acauucagauuuaauuacuguaaguaaaauuu

SEQ ID NO: 34159 - RNA, 32 nt, Human
acauucagccuucuugcacuuccagccucuuc

SEQ ID NO: 34160 - RNA, 32 nt, Human
acauucagcugguucgcacugauacggcucaa

SEQ ID NO: 34161 - RNA, 32 nt, Human
acauucaggacucugguuucuguuuugcuuga

SEQ ID NO: 34162 - RNA, 32 nt, Human
acauucaggagcugauauguguuucaaaggcu

SEQ ID NO: 34163 - RNA, 19 nt, Human
acauucaggcaccagcaua

SEQ ID NO: 34164 - RNA, 32 nt, Human
acauucaguagaacauuuuauugccuaguuga

SEQ ID NO: 34165 - RNA, 32 nt, Human
acauucagugccaagugcucccaugggaauaa

SEQ ID NO: 34166 - RNA, 32 nt, Human
acauucauaugagguccccagcaggggcuggc

SEQ ID NO: 34167 - RNA, 32 nt, Human
acauucauccacccugacgugcagaagcugcu

SEQ ID NO: 34168 - RNA, 32 nt, Human
acauucaugccauugugcaaccuucaccaccg

SEQ ID NO: 34169 - RNA, 32 nt, Human
acauuccaaacuuuagcaacaguuaucacacu

SEQ ID NO: 34170 - RNA, 32 nt, Human
acauuccaaauauucugggguugagggaaauu

SEQ ID NO: 34171 - RNA, 32 nt, Human
acauuccaagagagacaaaggcuggagccgag

SEQ ID NO: 34172 - RNA, 32 nt, Human
acauuccaauagacgaagugcacacaacacaa

SEQ ID NO: 34173 - RNA, 32 nt, Human
acauuccaaugccaaacauuucugcacaggga

SEQ ID NO: 34174 - RNA, 18 nt, Human
acauuccagauuaggaga

SEQ ID NO: 34175 - RNA, 32 nt, Human
acauuccauaaauauacuugaaauguuauuua

SEQ ID NO: 34176 - RNA, 32 nt, Human
acauuccauccagccugggcgacaagagcaaa

SEQ ID NO: 34177 - RNA, 32 nt, Human
acauuccauguauuuugaauaugagcaaaaac

SEQ ID NO: 34178 - RNA, 32 nt, Human
acauuccauuaaagaagagcaagaagcgaugg

SEQ ID NO: 34179 - RNA, 28 nt, Human
acauucccaagugccuguccuuauugga

SEQ ID NO: 34180 - RNA, 32 nt, Human
acauucccagaagagcggaaagaucauugacg

SEQ ID NO: 34181 - RNA, 32 nt, Human
acauucccaggccauguaggauaggauacucc

SEQ ID NO: 34182 - RNA, 32 nt, Human
acauucccauuggaagauacuggaccuuuccu

SEQ ID NO: 34183 - RNA, 32 nt, Human
acauuccccuccaguguucccuccuugagagc

SEQ ID NO: 34184 - RNA, 32 nt, Human
acauuccccugccuugccccugagcacuucug

SEQ ID NO: 34185 - RNA, 24 nt, Human
acauucccgcugcucgaagcagcu

SEQ ID NO: 34186 - RNA, 32 nt, Human
acauucccgucaucguuaguguuuccaguuga

SEQ ID NO: 34187 - RNA, 32 nt, Human
acauucccguuuuucuucuuacacucagaguu

SEQ ID NO: 34188 - RNA, 32 nt, Human
acauucccucuccugcccagaugcccuuugga

SEQ ID NO: 34189 - RNA, 32 nt, Human
acauucccucuccuggucucugggucuggcuu

SEQ ID NO: 34190 - RNA, 32 nt, Human
acauucccugcacacggucuuugagagagcag

SEQ ID NO: 34191 - RNA, 32 nt, Human
acauuccuagcuuuacagucuugcugugaauu

SEQ ID NO: 34192 - RNA, 32 nt, Human
acauuccuaggagagugucuguuugcaugaua

SEQ ID NO: 34193 - RNA, 32 nt, Human
acauuccucaaugaccucucccaaaccuccca

SEQ ID NO: 34194 - RNA, 23 nt, Human
acauuccucacguagcuucugcu

SEQ ID NO: 34195 - RNA, 23 nt, Human
acauuccuccaugcccgcugcuu

SEQ ID NO: 34196 - RNA, 32 nt, Human
acauuccucuaggacugguuuggggacgggug

SEQ ID NO: 34197 - RNA, 19 nt, Human
acauuccucucagcuccgc

SEQ ID NO: 34198 - RNA, 32 nt, Human
acauuccucugacuuuauacuguuauuacugc

SEQ ID NO: 34199 - RNA, 32 nt, Human
acauuccugacccucacuuuucucaucuguaa

SEQ ID NO: 34200 - RNA, 32 nt, Human
acauuccugcagcugaaucacagcucuugccc

SEQ ID NO: 34201 - RNA, 32 nt, Human
acauuccuggaaaauaucaagguggaauuuag

SEQ ID NO: 34202 - RNA, 32 nt, Human
acauuccuggaggagcugcuguuugagccagc

SEQ ID NO: 34203 - RNA, 32 nt, Human
acauuccugggugacaggcacagugcagaagc

SEQ ID NO: 34204 - RNA, 32 nt, Human
acauuccuggugucccaaagaauagcaaaaag

SEQ ID NO: 34205 - RNA, 32 nt, Human
acauuccuguaaucccagcuacucgggaggcu

SEQ ID NO: 34206 - RNA, 19 nt, Human
acauuccuuaggguccugc

SEQ ID NO: 34207 - RNA, 32 nt, Human
acauuccuuccuucucccaucuggauuccuaa

SEQ ID NO: 34208 - RNA, 32 nt, Human
acauuccuucuggaguuuguuuuugaaacucc

SEQ ID NO: 34209 - RNA, 32 nt, Human
acauuccuugagugacuaugaaugacugccgg

SEQ ID NO: 34210 - RNA, 32 nt, Human
acauuccuuuuguuguuuaauucuuuagaauc

SEQ ID NO: 34211 - RNA, 32 nt, Human
acauucgcgaggaucagccuugggucagagug

SEQ ID NO: 34212 - RNA, 32 nt, Human
acauucggcuuggugaaauccuucucuaaagc

SEQ ID NO: 34213 - RNA, 32 nt, Human
acauucuacuugauuuacacuuccuagucuac

SEQ ID NO: 34214 - RNA, 20 nt, Human
acauucuaguucucuucaca

SEQ ID NO: 34215 - RNA, 32 nt, Human
acauucuauagccauaaaccugaagaugagua

SEQ ID NO: 34216 - RNA, 32 nt, Human
acauucuaugaguaaacagcaagugcaacgua

SEQ ID NO: 34217 - RNA, 32 nt, Human
acauucuauggaaaaugguuucugguaaacug

SEQ ID NO: 34218 - RNA, 32 nt, Human
acauucucauguguaauauauguuuuuguauc

SEQ ID NO: 34219 - RNA, 32 nt, Human
acauucucauuguauguggucuccgcuguuug

SEQ ID NO: 34220 - RNA, 32 nt, Human
acauucucauuucuaaacaucuggaucugggu

SEQ ID NO: 34221 - RNA, 32 nt, Human
acauucuccaacaauaaagcacagaguggauu

SEQ ID NO: 34222 - RNA, 32 nt, Human
acauucuccaagaugcagcccaggagccucuc

SEQ ID NO: 34223 - RNA, 32 nt, Human
acauucuccaucugcgcaccacagggaggcaa

SEQ ID NO: 34224 - RNA, 32 nt, Human
acauucuccauggccagugaggaagucuugaa

SEQ ID NO: 34225 - RNA, 32 nt, Human
acauucuccccaggaagccggacucuaugggg

SEQ ID NO: 34226 - RNA, 32 nt, Human
acauucucuugcagaaacccuucaaaggcuug

SEQ ID NO: 34227 - RNA, 32 nt, Human
acauucugagacuucuuucuuccuuccuuuuu

SEQ ID NO: 34228 - RNA, 32 nt, Human
acauucugagauuacagcauugucuuagucaa

SEQ ID NO: 34229 - RNA, 32 nt, Human
acauucugagguacuggggguuauaacuucaa

SEQ ID NO: 34230 - RNA, 25 nt, Human
acauucugcccagaggggcugggga

SEQ ID NO: 34231 - RNA, 32 nt, Human
acauucuggguaggccuccagcaaacggaagc

SEQ ID NO: 34232 - RNA, 32 nt, Human
acauucuuacagcagggugucucuccaacagc

SEQ ID NO: 34233 - RNA, 32 nt, Human
acauucuuauacugcugucucaaauccaaaaa

SEQ ID NO: 34234 - RNA, 32 nt, Human
acauucuucagauuaacuucaggauuuauuug

SEQ ID NO: 34235 - RNA, 32 nt, Human
acauucuucauguggauguggccagugucagc

SEQ ID NO: 34236 - RNA, 32 nt, Human
acauucuucccauccugcuauccugcucgaag

SEQ ID NO: 34237 - RNA, 32 nt, Human
acauucuucccauccugcuauucugcucaaag

SEQ ID NO: 34238 - RNA, 32 nt, Human
acauucuucucuucucuccucucaaaaagccc

SEQ ID NO: 34239 - RNA, 32 nt, Human
acauucuugcacaggguggggcgcgcaguagg

SEQ ID NO: 34240 - RNA, 32 nt, Human
acauucuuuagaguggguugggugcauccaaa

SEQ ID NO: 34241 - RNA, 32 nt, Human
acauucuuugccuggugcacugugucuguggu

SEQ ID NO: 34242 - RNA, 32 nt, Human
acauucuuuuugaaauacuuucuucacuugac

SEQ ID NO: 34243 - RNA, 32 nt, Human
acauugaacccccagauucuccuguaccuccu

SEQ ID NO: 34244 - RNA, 32 nt, Human
acauugaacccccaggguacagccucguucuc

SEQ ID NO: 34245 - RNA, 32 nt, Human
acauugacucauuugccccuucccucucggaa

SEQ ID NO: 34246 - RNA, 32 nt, Human
acauugacucuugauggaaagacuuaagaaga

SEQ ID NO: 34247 - RNA, 22 nt, Human
acauugagaccagccaacuucu

SEQ ID NO: 34248 - RNA, 32 nt, Human
acauugagagcaccaagaaggugguggucaac

SEQ ID NO: 34249 - RNA, 32 nt, Human
acauugagcaaauggccacugaguagccccag

SEQ ID NO: 34250 - RNA, 21 nt, Human
acauugagcugcauggacagg

SEQ ID NO: 34251 - RNA, 32 nt, Human
acauugauagauggggugugggaccaacaaac

SEQ ID NO: 34252 - RNA, 32 nt, Human
acauugauagggcagagcagggagugugcaca

SEQ ID NO: 34253 - RNA, 32 nt, Human
acauugauaguugauuacacuguggcacgaau

SEQ ID NO: 34254 - RNA, 32 nt, Human
acauugaucuuaaaauuuuucucagucacuga

SEQ ID NO: 34255 - RNA, 32 nt, Human
acauugaugaugggaaggaaggaaugaagaga

SEQ ID NO: 34256 - RNA, 32 nt, Human
acauugauucacuggcgucuguuuucauuuua

SEQ ID NO: 34257 - RNA, 30 nt, Human
acauugcaacucuccaugcuccugcaauau

SEQ ID NO: 34258 - RNA, 32 nt, Human
acauugcacacacagucuguucagaggcauug

SEQ ID NO: 34259 - RNA, 32 nt, Human
acauugcauucugcacgggcauugacuaucuu

SEQ ID NO: 34260 - RNA, 32 nt, Human
acauugccaacuuaagacacacaaagcagauu

SEQ ID NO: 34261 - RNA, 32 nt, Human
acauugccuccuuccccucccucucucauggc

SEQ ID NO: 34262 - RNA, 32 nt, Human
acauugccuuucucaauacugagccccuaaac

SEQ ID NO: 34263 - RNA, 32 nt, Human
acauugcgccacugcacuccagcgcggaagac

SEQ ID NO: 34264 - RNA, 32 nt, Human
acauugcuaaucaauccucugccaugagccua

SEQ ID NO: 34265 - RNA, 32 nt, Human
acauugcuauaagaaaaguuacaagggaaagu

SEQ ID NO: 34266 - RNA, 32 nt, Human
acauugcucacaagcagauuuccccagcgucg

SEQ ID NO: 34267 - RNA, 32 nt, Human
acauugcugcauucaugcaagacugaaauuua

SEQ ID NO: 34268 - RNA, 32 nt, Human
acauugcugggaaccaagaaauaggaccaucc

SEQ ID NO: 34269 - RNA, 32 nt, Human
acauugcuguucacuagauuaucuuaacaaau

SEQ ID NO: 34270 - RNA, 31 nt, Human
acauuggaagagcagcaccuccucagccuga

SEQ ID NO: 34271 - RNA, 32 nt, Human
acauuggaccuaaacggugacucucauucuuu

SEQ ID NO: 34272 - RNA, 23 nt, Human
acauuggagaguucugaggccgg

SEQ ID NO: 34273 - RNA, 32 nt, Human
acauuggcaaagccuccuacagaaucaucaaa

SEQ ID NO: 34274 - RNA, 32 nt, Human
acauuggcagagguggggguuggcuguggccu

SEQ ID NO: 34275 - RNA, 20 nt, Human
acauuggcaucacccaggua

SEQ ID NO: 34276 - RNA, 32 nt, Human
acauuggcccaaaaauaucuugaagcaauggc

SEQ ID NO: 34277 - RNA, 32 nt, Human
acauuggcuccugccaaggucccucucucucc

SEQ ID NO: 34278 - RNA, 32 nt, Human
acauuggcuggaugugguggcuuaugcuugua

SEQ ID NO: 34279 - RNA, 32 nt, Human
acauuggcuuaucauggggaaaaagaggaucu

SEQ ID NO: 34280 - RNA, 32 nt, Human
acauuggcuuugcucagaugcagauggaagug

SEQ ID NO: 34281 - RNA, 20 nt, Human
acauugggaggccaaggcag

SEQ ID NO: 34282 - RNA, 21 nt, Human
acauugggaggccaaggcagg

SEQ ID NO: 34283 - RNA, 21 nt, Human
acauugggaggccgaggcagg

SEQ ID NO: 34284 - RNA, 21 nt, Human
acauugggaggcugaggcagg

SEQ ID NO: 34285 - RNA, 32 nt, Human
acauugggcucugggaauuuuaucuggguuuu

SEQ ID NO: 34286 - RNA, 32 nt, Human
acauugguuauuuuaugcuuucuuggauauaa

SEQ ID NO: 34287 - RNA, 32 nt, Human
acauuguaaauccuuuuuauauuaaguaacag

SEQ ID NO: 34288 - RNA, 32 nt, Human
acauuguaaguuccuaaaaacauuuuauuaaa

SEQ ID NO: 34289 - RNA, 32 nt, Human
acauuguacagaaugagcagucauguaaugaa

SEQ ID NO: 34290 - RNA, 19 nt, Human
acauuguauugguauuaca

SEQ ID NO: 34291 - RNA, 32 nt, Human
acauuguccugauccuuugcucugccaauuga

SEQ ID NO: 34292 - RNA, 32 nt, Human
acauugucugcugcacgugaucaugagggguu

SEQ ID NO: 34293 - RNA, 32 nt, Human
acauugugaauagaaccuacaugaaaacauac

SEQ ID NO: 34294 - RNA, 31 nt, Human
acauugugauaauccuucacagcaagaaacc

SEQ ID NO: 34295 - RNA, 32 nt, Human
acauuguggauccgcuaacaggcacagauguc

SEQ ID NO: 34296 - RNA, 23 nt, Human
acauugugugggccagaggcagg

SEQ ID NO: 34297 - RNA, 32 nt, Human
acauuguguucccccgcauuccaggcucaggg

SEQ ID NO: 34298 - RNA, 32 nt, Human
acauuguguuuccugcugaaucaagucuacau

SEQ ID NO: 34299 - RNA, 32 nt, Human
acauuguuacacuuaauuuuacagggcacaaa

SEQ ID NO: 34300 - RNA, 31 nt, Human
acauuguuaccucuauauaccaaagcacauu

SEQ ID NO: 34301 - RNA, 32 nt, Human
acauuguuaucuuuacucuucacaagaaccau

SEQ ID NO: 34302 - RNA, 32 nt, Human
acauuguuuccaggaccuccugagaagccuga

SEQ ID NO: 34303 - RNA, 32 nt, Human
acauuuaaacuuuuuaaaauacuuauuaaaaa

SEQ ID NO: 34304 - RNA, 32 nt, Human
acauuuaaagucaaaagaaaaguagaccguuu

SEQ ID NO: 34305 - RNA, 32 nt, Human
acauuuaacaaaaucuauaacugugaagcuua

SEQ ID NO: 34306 - RNA, 24 nt, Human
acauuuaacuaugguauuuaugga

SEQ ID NO: 34307 - RNA, 23 nt, Human
acauuuaauaaaaauguauuuua

SEQ ID NO: 34308 - RNA, 32 nt, Human
acauuuaauguucuuggccucugcuuuuaugu

SEQ ID NO: 34309 - RNA, 19 nt, Human
acauuuacaaaaagagcaa

SEQ ID NO: 34310 - RNA, 32 nt, Human
acauuuacaaccucuucucuccuuccaaccug

SEQ ID NO: 34311 - RNA, 32 nt, Human
acauuuacaagaaucacaucucugauuucagu

SEQ ID NO: 34312 - RNA, 32 nt, Human
acauuuacuuuugcuuucuaccugacugcccc

SEQ ID NO: 34313 - RNA, 32 nt, Human
acauuuagaagagaugcuggugauagucaucu

SEQ ID NO: 34314 - RNA, 32 nt, Human
acauuuagccacagcccaaaucuuccaggcaa

SEQ ID NO: 34315 - RNA, 32 nt, Human
acauuuagggaaaaggggcagcauguggggaa

SEQ ID NO: 34316 - RNA, 28 nt, Human
acauuuauaagugcugcuuacaucacug

SEQ ID NO: 34317 - RNA, 32 nt, Human
acauuuaucugugaccuauaucaaguacacau

SEQ ID NO: 34318 - RNA, 32 nt, Human
acauuuauuggcugggugugguggcucacacc

SEQ ID NO: 34319 - RNA, 32 nt, Human
acauuuauuguccucaaaauugcuuauggcca

SEQ ID NO: 34320 - RNA, 32 nt, Human
acauuuauuuacauuacauacauacauuuaca

SEQ ID NO: 34321 - RNA, 32 nt, Human
acauuucaaggauuuuuauugcucugugaguu

SEQ ID NO: 34322 - RNA, 32 nt, Human
acauuucacaacaucuuguagcaggcuuacua

SEQ ID NO: 34323 - RNA, 32 nt, Human
acauuucacagaagugccugagacgcggagac

SEQ ID NO: 34324 - RNA, 32 nt, Human
acauuucacaggcagagaggugccaucaguuc

SEQ ID NO: 34325 - RNA, 32 nt, Human
acauuucacgcagucagggaacaggugaggaa

SEQ ID NO: 34326 - RNA, 32 nt, Human
acauuucacugucaaagaagcuacuggcuugg

SEQ ID NO: 34327 - RNA, 32 nt, Human
acauuucaguaacagcuacaaacacaccugga

SEQ ID NO: 34328 - RNA, 32 nt, Human
acauuucauauguaaauaaacgugggacauuu

SEQ ID NO: 34329 - RNA, 32 nt, Human
acauuucaucuauuaucucugccucauuucug

SEQ ID NO: 34330 - RNA, 32 nt, Human
acauuuccaagaggagagaaaaaguggaguca

SEQ ID NO: 34331 - RNA, 32 nt, Human
acauuuccacugucuucccuggcagcugugau

SEQ ID NO: 34332 - RNA, 21 nt, Human
acauuuccagcuccugcugca

SEQ ID NO: 34333 - RNA, 32 nt, Human
acauuuccaucaccccagagaguucacuccug

SEQ ID NO: 34334 - RNA, 32 nt, Human
acauuuccauggugugagauccucuuuacucu

SEQ ID NO: 34335 - RNA, 32 nt, Human
acauuuccauuuucauuuucgagccaucaguu

(The sequence listing continues in the following parts.)

1. A bioinformatically detectable novel gene encoding substantially pure DNA wherein:
RNA encoded by said bioinformatically detectable novel gene is about 18 to about 24 nucleotides in length, and originates from an RNA precursor, which RNA precursor is about 50 to about 120 nucleotides in length;
a nucleotide sequence of a first half of said RNA precursor is a partial or accurate inversed reversed sequence of a nucleotide sequence of a second half thereof;
a nucleotide sequence of said RNA encoded by said novel gene is a partial or accurate inversed reversed sequence of a nucleotide sequence of a binding site associated with at least one target gene;
said novel gene cannot be detected by either of the following:
a visually discernable whole body phenotype; and
detection of 99.9% of RNA species shorter than 25 nucleotides expressed in a tissue sample; and
a function of said novel gene is bioinformatically deducible.

2. A bioinformatically detectable novel gene encoding substantially pure DNA wherein:
RNA encoded by said bioninformatically detectable novel gene comprises a plurality of RNA sections, each of said RNA sections being about 50 to about 120 nucleotides in length, and comprising an RNA segment, which RNA segment is about 18 to about 24 nucleotides in length;
a nucleotide sequence of a first half of each of said RNA sections encoded by said novel gene is a partial or accurate inversed reversed sequence of nucleotide sequence of a second half thereof;
a nucleotide sequence of each of said RNA segments encoded by said novel gene is a partial or accurate inversed reversed sequence of the nucleotide sequence of a binding site associated with at least one target gene; and
a function of said novel gene is bioinformatically deducible from the following data elements: said nucleotide sequence of said RNA encoded by said novel gene, a nucleotide sequence of said at least one target gene, and function of said at least one target gene.

3. A bioinformatically detectable novel gene encoding substantially pure DNA wherein:
RNA encoded by said bioinformatically detectable novel gene is about 18 to about 24 nucleotides in length, and originates from an RNA precursor, which RNA precursor is about 50 to about 120 nucleotides in length;
a nucleotide sequence of a first half of said RNA precursor is a partial or accurate inversed reversed sequence of a nucleotide sequence of a second half thereof;
a nucleotide sequence of said RNA encoded by said novel gene is a partial or accurate inversed reversed sequence of a nucleotide sequence of a binding site associated with at least one target gene;
a function of said novel gene is modulation of expression of said at least one target gene; and
said at least one target gene does not encode a protein.

4. A bioinformatically detectable novel gene encoding substantially pure DNA wherein:
said bioinformatically detectable novel gene does not encode a protein;
RNA encoded by said bioinformatically detectable novel gene is maternally transferred by a cell to at least one daughter cell of said cell;
a function of said novel gene comprises modulation of a cell type of said daughter cell; and
said modulation is bioinformatically deducible.

5. A bioinformatically detectable novel gene encoding substantially pure DNA wherein:
said bioinformatically detectable novel gene does not encode a protein;
a function of said novel gene is promotion of expression of said at lease one target gene; and
said at least one target gene is bioinformatically deducible.

6. A bioinformatically detectable novel gene according to claim 1 and wherein said function of said novel gene is bioinformatically deducible from the following data elements:
said nucleotide sequence of said RNA encoded by said bioinformatically detectable novel gene,
a nucleotide sequence of said at least one target gene; and
a function of said at least one target gene.

7. A bioinformatically detectable novel gene according to claim 1 and wherein said RNA encoded by said novel gene complementarily binds said binding site associated with said at least one target gene, thereby modulating expression of said at least one target gene.

8. A bioinformatically detectable novel gene according to claim 1 and wherein:
said binding site associated with at least one target gene is located in an untranslated region of RNA encoded by said at least one target gene.

9. A bioinformatically detectable novel gene according to claim 7 and wherein:
said function of said novel gene is selective inhibition of translation of said at least one target gene, which selective inhibition comprises complementary hybridization of said RNA encoded by said novel gene to said binding site.

10. A vector comprising the DNA of claim 1

11. A method of selectively inhibiting translation of at least one gene, comprising introducing the vector of claim 10 into a cell.

12. A method according to claim 11 and wherein said introducing comprises utilizing RNAi pathway.

13. A gene expression inhibition system comprising:
the vector of claim 10 and
a vector inserter, functional to insert said vector of claim 10 into a cell, thereby selectively inhibiting translation of at least one gene.

14. A probe comprising the DNA of claim 1

15. A method of selectively detecting expression of at least one gene, comprising using the probe of claim 14

16. A gene expression detection system comprising:
the probe of claim 14; and
a gene expression detector functional to selectively detect expression of at least one gene.
